(19) United States
(12) Patent Application Publication
(10) Pub. No.: US 2014/0317781 A1
(43) Pub. Date: Oct. 23, 2014

(54) ISOLATED POLYNUCLEOTIDES AND POLYPEPTIDES, TRANSGENIC PLANTS COMPRISING SAME AND USES THEREOF IN IMPROVING ABIOTIC STRESS TOLERANCE, NITROGEN USE EFFICIENCY, BIOMASS, VIGOR OR YIELD OF PLANTS

(71) Applicant: A.B. Seeds Ltd., Lod (IL)

(72) Inventors: Rudy Maor, Rechovot (IL); Iris Nesher, Tel-Aviv (IL); Orly Noivirt-Brik, Givataim (IL); Osnat Yanai-Azulay, Rishon-LeZion (IL)

(21) Appl. No.: 14/354,932

(22) PCT Filed: Oct. 31, 2012
(86) PCT No.: PCT/IL2012/050431

§ 371 Date: Apr. 29, 2014

Related U.S. Application Data
(60) Provisional application No. 61/553,340, filed on Oct. 31, 2011.
(60) Provisional application No. 61/553,355, filed on Oct. 31, 2011.

(51) Int. Cl. C12N 15/82

(52) U.S. Cl. CPC C12N 15/8273; C12N 15/8261; C12N 15/8271
USPC 800/286; 800/278; 800/290; 800/298; 536/23.1; 435/320.1; 800/289

(57) ABSTRACT

Methods of improving abiotic stress tolerance, nitrogen use efficiency, biomass, vigor or yield of a plant are provided. According to an aspect the method comprising expressing within the plant an exogenous polynucleotide having a nucleic acid sequence at least 90% identical to SEQ ID NOs: 103, 101-102, 104-216, 223-227, 264-416, wherein the nucleic acid sequence is capable of regulating abiotic stress tolerance of the plant, thereby improving abiotic stress tolerance, nitrogen use efficiency, biomass, vigor or yield of the plant. Alternatively, the method comprises, expressing within the plant an exogenous polynucleotide which downregulates an activity or expression of a gene encoding an RNAi molecule having a nucleic acid sequence at least 90% identical to a nucleic acid sequence selected from the group consisting of SEQ ID NOs: 1-100, 615-626 and 639, thereby improving abiotic stress tolerance, nitrogen use efficiency, biomass, vigor or yield of a plant.

### FIELD AND BACKGROUND OF THE INVENTION

[0001] The present invention, in some embodiments thereof, relates to isolated polynucleotides and polypeptides, transgenic plants comprising same and uses thereof in improving abiotic stress tolerance, nitrogen use efficiency, biomass, vigor or yield of plants

[0002] Abiotic stress (ABST) is a collective term for numerous extreme environmental parameters such as drought, high or low salinity, high or low temperature/light, and nutrient imbalances. The major agricultural crops (corn, rice, wheat, canola and soybean) account for over half of total human caloric intake, giving their overall yield and quality vast importance. Abiotic stress causes more than 50% yield loss of the above mentioned major crops. Among the various abiotic stresses, drought is the major factor that limits crop productivity worldwide. Furthermore, drought is associated with increase susceptibility to various diseases. Abiotic-stress-induced dehydration or osmotic stress, in the form of reduced availability of water and disruption of turgor pressure, causes irreversible cellular damage. A water-limiting environment at various plant developmental stages may activate various physiological changes.

[0003] Water deficit, salinity and low/high temperatures are stresses that cause plant cellular dehydration, due to transpiration rate that exceeds water uptake. Drought is known to elicit a response in the plant that mainly affects root architecture, causing activation of plant metabolic pathways driven to maximize water assimilation. Improvement of root architecture, i.e. making branched and longer roots, allows the plant to reach water and nutrient/fertilizer deposits located deeper in the soil by an increase in soil coverage. Thus, genes governing enhancement of root architecture may be used to improve drought tolerance.

[0004] High salt levels, or salinity, of the soil acts similarly to drought; it prevents roots from extracting water and nutrients and thus reduces the availability of arable land and crop production worldwide, since none of the top five food crops can tolerate excessive salt. Salinity causes a water deficit which leads to osmotic stress (similar to freezing and drought stress) and critically damages biochemical processes. Large land areas throughout the world naturally have high salt levels and thus are currently uncultivable. In regions that rely heavily on agricultural production, soil salinity is a significant problem expected to worsen due to growing population and extreme climatic changes. Since salt accumulates in the upper soil layer where seeds are placed, and may interfere with their germination, salt tolerance is of particular importance early in a plant's lifecycle.

[0005] Temperature is a critical factor in germination of many crops. Seedlings as well as mature plants that are exposed to excess heat may experience heat shock, which may arise in various organs when transpiration is insufficient to overcome heat stress. Heat shock damages cellular structures and impairs membrane function and overall protein synthesis (except that of heat shock proteins). Heat stress often accompanies conditions of low water availability, such as drought, and the combined stress can fatally alter plant metabolism. Dehydration invokes survival strategies in plants that include structural (lower surface area) as well as cellular content (increase in oil and soluble material) modifications to prevent evaporation and water loss caused by heat, drought, or salinity.

[0006] There is great variability in responses to abiotic stress among different plant species, but differences also exist among varieties and cultivars within the same plant species. Certain plants are inherently more tolerant to abiotic stress than others, making their genotypes an attractive research subject for potential identification of drought associated genes. The response to any stress may involve both stress specific and common stress pathways, and drains energy from the plant, eventually resulting in lowered yield. Thus, distinguishing between the genes activated in each pathway and subsequent manipulation of only specific relevant genes could lead to a partial stress response without the parallel loss in yield.

[0007] With a growing world population, increasing demand for food, fuel and fiber, and a changing climate, agriculture faces unprecedented challenges. In general, shortage in water supply is one of the most severe global agricultural problems affecting plant growth and crop yield. To illustrate, large areas of cornfields in the United States may be affected by at least moderate drought in any given year. Excessive efforts are made to alleviate the harmful effects of desertification of the world's arable land. Farmers are seeking advanced, biotechnology-based solutions to enable them to obtain stable high yields and give them the potential to reduce irrigation costs or to grow crops in areas where potable water is a limiting factor. It should be noted that improved ABST will confer plants with improved vigor also under non-stress conditions, resulting in crops having improved biomass and/or yield.

[0008] Two major small RNA molecules, microRNAs (miRNAs) or small interfering RNAs (siRNAs), potently regulate specific down-regulation/silencing of a target gene, through RNA interference (RNAi). Both miRNAs and siRNAs are oligonucleotides (20-24 bps) processed from longer RNA precursors by Dicer-like ribonucleases, although the source of their precursors is different (i.e., local single RNA molecules with imperfect stem-loop structures for miRNA, and long, double-stranded precursors potentially from bimolecular duplexes for siRNA). Additional characteristics that differentiate miRNAs from siRNAs are their sequence conservation level between related organisms (high in miRNAs, low to non-existent in siRNAs), regulation of genes unrelated to their locus of origin (typical for miRNAs, infrequent in siRNAs) and the genetic requirements for their respective functions are somewhat dissimilar in many organisms. Despite all their differences, miRNAs and siRNAs are overall chemically and functionally similar and both are incorporated into silencing complexes, wherein they can guide post-transcriptional repression of multiple target genes, and thus function catalytically.

[0009] In contrast to the abundance of genes involved in the responses to abiotic stress in plants, there is limited information on small RNA molecules involved in plant response and adaptation to abiotic stress.

### Related Background Art

[0010] WO 2011/067745

### SUMMARY OF THE INVENTION

[0011] According to an aspect of some embodiments of the present invention there is provided a method of improving abiotic stress tolerance, nitrogen use efficiency, biomass, vigor or yield of a plant, the method comprising expressing within the plant an exogenous polynucleotide having a nucleic acid sequence at least 90% identical to SEQ ID NOs: 103, 101-102, 104-216, 223-227, 264-416, wherein said nucleic acid sequence is capable of regulating abiotic stress tolerance of the plant, thereby improving abiotic stress tolerance, nitrogen use efficiency, biomass, vigor or yield of the plant.

[0012] According to an aspect of some embodiments of the present invention there is provided a transgenic plant exogenously expressing a polynucleotide having a nucleic acid sequence at least 90% identical to SEQ ID NOs: 1-216, 223-227, 264-416, 615-626 or 639, wherein said nucleic acid sequence is capable of regulating abiotic stress tolerance of the plant.

[0013] According to some embodiments of the invention, said polynucleotide has a nucleic acid sequence selected from the group consisting of SEQ ID NOs: 1-216, 223-227, 264-416, 615-626 or 639.

[0014] According to some embodiments of the invention, said exogenous polynucleotide encodes a precursor of said nucleic acid sequence.

[0015] According to some embodiments of the invention, said precursor is at least 60% identical to SEQ ID NO: 217-222, 417-421 or 458-614.

[0016] According to some embodiments of the invention, said exogenous polynucleotide encodes a miRNA or a precursor thereof.

[0017] According to some embodiments of the invention, said exogenous polynucleotide encodes a siRNA.

[0018] According to some embodiments of the invention, said exogenous polynucleotide is selected from the group consisting of SEQ ID NO: 103, 101-102, 104-216, 217-222, 223-227, 264-416, 417-421 or 458-614.

[0019] According to an aspect of some embodiments of the present invention there is provided an isolated polynucleotide having a nucleic acid sequence at least 90% identical to SEQ ID NO: 16-113, 117-216, wherein said nucleic acid sequence is capable of regulating abiotic stress tolerance of a plant.

[0020] According to some embodiments of the invention, said nucleic acid sequence us as set forth in SEQ ID NO: 16-113, 117-216

[0021] According to some embodiments of the invention, said polynucleotide encodes a precursor of said nucleic acid sequence.

[0022] According to some embodiments of the invention, said polynucleotide encodes a miRNA or a precursor thereof.

[0023] According to some embodiments of the invention, said polynucleotide encodes a siRNA.

[0024] According to an aspect of some embodiments of the present invention there is provided a method of improving abiotic stress tolerance, nitrogen use efficiency, biomass, vigor or yield of a plant, the method comprising expressing within the plant an exogenous polynucleotide which downregulates an activity or expression of a gene encoding an RNAi molecule having a nucleic acid sequence at least 90% identical to a nucleic acid sequence selected from the group consisting of SEQ ID NOs: 1-100, 615-626 and 639, thereby improving abiotic stress tolerance, nitrogen use efficiency, biomass, vigor or yield of a plant.

[0025] According to an aspect of some embodiments of the present invention there is provided a transgenic plant exogenously expressing a polynucleotide which downregulates an activity or expression of a gene encoding an RNAi molecule having a nucleic acid sequence at least 90% identical to a nucleic acid sequence selected from the group consisting of SEQ ID NOs: 1-100, 615-626 and 639.

[0026] According to an aspect of some embodiments of the present invention there is provided an isolated polynucleotide which downregulates an activity or expression of a gene encoding an RNAi molecule having a nucleic acid sequence selected from the group consisting of SEQ ID NOs: 1-100, 615-626 and 639, 627-638 and 640.

[0027] According to some embodiments of the invention, said polynucleotide encodes a miRNA-Resistant Target as set forth in Tables 14-16.

[0028] According to some embodiments of the invention, said polynucleotide encoding miRNA-Resistant Target is as set forth in SEQ ID NO: 877-886, 893-913, 1226-1535.

[0029] According to some embodiments of the invention, said isolated polynucleotide encodes a target mimic as set forth in Tables 17-19.

[0030] According to some embodiments of the invention, said polynucleotide encoding said target mimic is as set forth in SEQ ID NO:1741-1815.

[0031] According to an aspect of some embodiments of the present invention there is provided a method of improving abiotic stress tolerance, nitrogen use efficiency, biomass, vigor or yield of a plant, the method comprising expressing within the plant an exogenous polynucleotide encoding a polypeptide having an amino acid sequence at least 80% homologous to SEQ ID NOs: 1861-1869, 1892-1915, 1921-1924, 1931-1939, 1952-1963, 2010-2014, 2327-2355, 2763-3040, 3044-3163, 3175-3269, 3313-3323, 3458-3944 or 3950-3969, wherein said polypeptide is capable of regulating abiotic stress tolerance of the plant, thereby improving abiotic stress tolerance, nitrogen use efficiency, biomass, vigor or yield of the plant.

[0032] According to an aspect of some embodiments of the present invention there is provided a transgenic plant exogenously expressing a polynucleotide encoding a polypeptide having an amino acid sequence at least 80% homologous to SEQ ID NOs: 1816-2014, 2183-2355, 2500-3969, wherein said polypeptide is capable of regulating nitrogen use efficiency of the plant.

[0033] According to an aspect of some embodiments of the present invention there is provided a nucleic acid construct comprising a polynucleotide encoding a polypeptide having an amino acid sequence at least 80% homologous to SEQ ID NOs: 1816-2014, 2183-2355, 2500-3969, wherein said polypeptide is capable of regulating abiotic stress tolerance of a plant, and wherein said polynucleotide is under a transcriptional control of a cis-acting regulatory element.

[0034] According to some embodiments of the invention, said polynucleotide is selected from the group consisting of SEQ ID NO: 2053-2061, 2080-2101, 2106-2109, 2111-2116, 2126-2136, 2178-2182, 2478-2499, 4185-4418, 4422-4527, 4539-4624, 4661-4670, 4787-5213 and 5219-5238.

[0035] According to some embodiments of the invention, said polypeptide is selected from the group consisting of SEQ ID NO: 1861-1869, 1892-1915, 1921-1924, 1931-1939, 1952-1963, 2010-2014, 2327-2355, 2763-3040, 3044-3163, 3175-3269, 3313-3323, 3458-3944 and 3950-3969.

[0036] According to an aspect of some embodiments of the present invention there is provided a method of improving abiotic stress tolerance, nitrogen use efficiency, biomass, vigor or yield of a plant, the method comprising expressing within the plant an exogenous polynucleotide which downregulates an activity or expression of a polypeptide having an amino acid sequence at least 80% homologous to SEQ ID NOs: 1816-1860, 1870-1891, 1916-1920, 1925-1930, 1940-1951, 1964-2009, 2183-2326, 2500-2762, 3041-3043, 3164-3174, 3270-3312, 3324-3457, 3945-3949, wherein said polypeptide is capable of regulating abiotic stress tolerance of the plant, thereby improving abiotic stress tolerance, nitrogen use efficiency, biomass, vigor or yield of the plant.

[0037] According to an aspect of some embodiments of the present invention there is provided a transgenic plant exogenously expressing a polynucleotide which downregulates an activity or expression of a polypeptide having an amino acid sequence at least 80% homologous to SEQ ID NOs: 1816-1860, 1870-1891, 1916-1920, 1925-1930, 1940-1951, 1964-2009, 2183-2326, 2500-2762, 3041-3043, 3164-3174, 3270-3312, 3324-3457, 3945-3979, wherein said polypeptide is capable of regulating abiotic stress tolerance of the plant.

[0038] According to an aspect of some embodiments of the present invention there is provided a nucleic acid construct comprising a polynucleotide which downregulates an activity or expression of a polypeptide having an amino acid sequence at least 80% homologous to SEQ ID NOs: 1816-1860, 1870-1891, 1916-1920, 1925-1930, 1940-1951, 1964-2009, 2183-2326, 2500-2762, 3041-3043, 3164-3174, 3270-3312, 3324-3457, 3945-3949, wherein said polypeptide is capable of regulating abiotic stress tolerance of a plant, said nucleic acid sequence being under the regulation of a cis-acting regulatory element.

[0039] According to some embodiments of the invention, said polynucleotide acts by a mechanism selected from the group consisting of sense suppression, antisense suppression, ribozyme inhibition, gene disruption.

[0040] According to some embodiments of the invention, said cis-acting regulatory element comprises a promoter.

[0041] According to some embodiments of the invention, said promoter comprises a tissue-specific promoter.

[0042] According to some embodiments of the invention, said tissue-specific promoter comprises a root specific promoter.

[0043] According to some embodiments of the invention, the method further comprises growing the plant under water deprivation conditions.

[0044] According to some embodiments of the invention, the method further comprises growing the plant under salinity stress.

[0045] According to some embodiments of the invention, the method further comprises growing the plant under high temperature stress.

[0046] According to some embodiments of the invention, the method further comprises growing the plant under abiotic stress.

[0047] According to some embodiments of the invention, said abiotic stress is selected from the group consisting of salinity, drought, water deprivation, flood, etiolation, low temperature, high temperature, heavy metal toxicity, anaerobiosis, nutrient deficiency, nutrient excess, atmospheric pollution and UV irradiation.

[0048] According to some embodiments of the invention, the plant is a dicotyledon.

[0049] According to some embodiments of the invention, the plant is a monocotyledon.

[0050] Unless otherwise defined, all technical and/or scientific terms used herein have the same meaning as commonly understood by one of ordinary skill in the art to which the invention pertains. Although methods and materials similar or equivalent to those described herein can be used in the practice or testing of embodiments of the invention, exemplary methods and/or materials are described below. In case of conflict, the patent specification, including definitions, will control. In addition, the materials, methods, and examples are illustrative only and are not intended to be necessarily limiting.

### BRIEF DESCRIPTION OF THE DRAWINGS

[0051] Some embodiments of the invention are herein described, by way of example only, with reference to the accompanying drawings. With specific reference now to the drawings in detail, it is stressed that the particulars shown are by way of example and for purposes of illustrative discussion of embodiments of the invention. In this regard, the description taken with the drawings makes apparent to those skilled in the art how embodiments of the invention may be practiced.

[0052] In the drawings:

[0053] FIG. 1 is a plasmid map of the binary vector pORE-E1, which can be used for plant transformation according to some embodiments of the present invention.

[0054] FIG. 2 is a schematic description of miRNA assay including two steps, stem-loop RT and real-time PCR. Stem-loop RT primers bind to at the 3′ portion of miRNA molecules and are reverse transcribed with reverse transcriptase. Then, the RT product is quantified using conventional TaqMan PCR that includes miRNA-specific forward primer and reverse primer. The purpose of tailed forward primer at 5′ is to increase its melting temperature (Tm) depending on the sequence composition of miRNA molecules (Slightly modified from Chen et al. 2005, Nucleic Acids Res 33(20):e179). FIGS. 3A-B are schematic illustrations of an artificial miRNA sequence design for predicted siRNA 55507 (SEQ ID NO: 102) on the backbone of ath-miR172a (SEQ ID NO: 453).

[0055] FIGS. 4A-B are schematic illustrations of an artificial miRNA sequence design for predicted siRNA 55937 (SEQ ID NO: 2) on the backbone of ath-miR319a (SEQ ID NO: 455).

### DESCRIPTION OF SPECIFIC EMBODIMENTS OF THE INVENTION

[0056] The present invention, in some embodiments thereof, relates to isolated polynucleotides and polypeptides, transgenic plants comprising same and uses thereof in improving abiotic stress tolerance, nitrogen use efficiency, biomass, vigor or yield of plants

[0057] Before explaining at least one embodiment of the invention in detail, it is to be understood that the invention is not necessarily limited in its application to the details set forth in the following description or exemplified by the Examples. The invention is capable of other embodiments or of being practiced or carried out in various ways.

[0058] A number of abnormal environment parameters such as drought, salinity, cold, freezing, high temperature, anoxia, high light intensity and nutrient imbalances etc. are collectively termed as abiotic stresses. Abiotic stresses lead to dehydration or osmotic stress through reduced availability of water for vital cellular functions and maintenance of turgor pressure. Stomata closure, reduced supply of CO₂ and slower rate of biochemical reactions during prolonged periods of dehydration, high light intensity, high and low temperatures lead to high production of Reactive Oxygen Intermediates (ROI) in the chloroplasts causing irreversible cellular damage and photo inhibition.

[0059] Understanding the molecular mechanism for providing protection against biotic and abiotic stresses may lead to the identification of genes associated with stress tolerance. Optimum homeostasis is always a key to living organisms for adjusted environments.

[0060] While reducing the present invention to practice, the present inventors have uncovered dsRNA sequences that are differentially expressed in maize plants grown under abiotic stress conditions including, salt stress, heat stress and drought, versus maize plants grown under optimal conditions. Following extensive experimentation and screening the present inventors have identified double stranded RNA interfering (RNAi) molecules including siRNA and miRNA sequences that are upregulated or downregulated in roots and leaves, and suggest using same or sequences controlling same in the generation of transgenic plants having improved abiotic stress tolerance.

[0061] Each of the above mechanisms may affect water uptake as well as salt absorption and therefore embodiments of the invention further relate to enhancement of abiotic stress tolerance, nitrogen use efficiency, biomass, vigor or yield of the plant.

[0062] Thus, according to an aspect of the invention there is provided a method of improving abiotic stress tolerance, nitrogen use efficiency, biomass, vigor or yield of a plant, the method comprising expressing within the plant an exogenous polynucleotide having a nucleic acid sequence at least, 80%, 85%, 90%, 95% or even 100% identical to SEQ ID NOs: 101-216, 217-222, 223-227, 264-416 (Mature all upregulated sequences and homologs of Tables 1-8), wherein said nucleic acid sequence is capable of regulating abiotic stress tolerance of the plant, thereby improving abiotic stress tolerance, nitrogen use efficiency, biomass, vigor or yield of the plant

[0063] The phrase “abiotic stress” as used herein refers to any adverse effect on metabolism, growth, viability and/or reproduction of a plant. Abiotic stress can be induced by any of suboptimal environmental growth conditions such as, for example, water deficit or drought, flooding, freezing, low or high temperature, strong winds, heavy metal toxicity, anaerobiosis, high or low nutrient levels (e.g. nutrient deficiency), high or low salt levels (e.g. salinity), atmospheric pollution, high or low light intensities (e.g. insufficient light) or UV irradiation. Abiotic stress may be a short term effect (e.g. acute effect, e.g. lasting for about a week) or alternatively may be persistent (e.g. chronic effect, e.g. lasting for example 10 days or more). The present invention contemplates situations in which there is a single abiotic stress condition or alternatively situations in which two or more abiotic stresses occur.

[0064] According to an exemplary embodiment the abiotic stress refers to salinity.

[0065] According to another exemplary embodiment the abiotic stress refers to drought.

[0066] According to yet another exemplary embodiment the abiotic stress refers to high temperature.

[0067] As used herein the phrase “abiotic stress tolerance” or ABST refers to the ability of a plant to endure an abiotic stress without exhibiting substantial physiological or physical damage (e.g. alteration in metabolism, growth, viability and/or reproducibility of the plant).

[0068] It will be appreciated that since genes that affect abiotic stress tolerance often modulate any one of root architecture; plant metabolic pathways which may affect nitrogen absorption or localization; and plant surface permeability, it is also suggested that the biomolecular sequences (i.e., nucleic acid and amino acid sequences) of the present invention may also regulate nitrogen use efficiency of the plant.

[0069] As used herein the phrase “nitrogen use efficiency (NUE)” refers to a measure of crop production per unit of nitrogen fertilizer input. Fertilizer use efficiency (FUE) is a measure of NUE. Crop production can be measured by biomass, vigor or yield. The plant's nitrogen use efficiency is typically a result of an alteration in at least one of the uptake, spread, absorbance, accumulation, relocation (within the plant) and use of nitrogen absorbed by the plant. Improved abiotic stress tolerance or NUE is with respect to that of a non-transgenic plant (i.e., lacking the transgene of the transgenic plant) of the same species and of the same developmental stage and grown under the same conditions.

[0070] As used herein the phrase “nitrogen-limiting conditions” refers to growth conditions which include a level (e.g., concentration) of nitrogen (e.g., ammonium or nitrate) applied which is below the level needed for optimal plant metabolism, growth, reproduction and/or viability.

[0071] As used herein the term/phrase “biomass”, “biomass of a plant” or “plant biomass” refers to the amount (e.g., measured in grams of air-dry tissue) of a tissue produced from the plant in a growing season. An increase in plant biomass can be in the whole plant or in parts thereof such as aboveground (e.g. harvestable) parts, vegetative biomass, roots and/or seeds.

[0072] As used herein the term/phrase “vigor”, “vigor of a plant” or “plant vigor” refers to the amount (e.g., measured by weight) of tissue produced by the plant in a given time. Increased vigor could determine or affect the plant yield or the yield per growing time or growing area. In addition, early vigor (e.g. seed and/or seedling) results in improved field stand.

[0073] As used herein the term/phrase “yield”, “yield of a plant” or “plant yield” refers to the amount (e.g., as determined by weight or size) or quantity (e.g., numbers) of tissues or organs produced per plant or per growing season. Increased yield of a plant can affect the economic benefit one can obtain from the plant in a certain growing area and/or growing time.

[0074] According to an exemplary embodiment the yield is measured by cellulose content.

[0075] According to another exemplary embodiment the yield is measured by oil content.

[0076] According to another exemplary embodiment the yield is measured by protein content.

[0077] According to another exemplary embodiment, the yield is measured by seed number per plant or part thereof (e.g., kernel).

[0078] A plant yield can be affected by various parameters including, but not limited to, plant biomass; plant vigor; plant growth rate; seed yield; seed or grain quantity; seed or grain quality; oil yield; content of oil, starch and/or protein in harvested organs (e.g., seeds or vegetative parts of the plant); number of flowers (e.g. florets) per panicle (e.g. expressed as a ratio of number of filled seeds over number of primary panicles); harvest index; number of plants grown per area; number and size of harvested organs per plant and per area; number of plants per growing area (e.g. density); number of harvested organs in field; total leaf area; carbon assimilation and carbon partitioning (e.g. the distribution/allocation of carbon within the plant); resistance to shade; number of harvestable organs (e.g. seeds), seeds per pod, weight per seed; and modified architecture [such as increase stalk diameter, thickness or improvement of physical properties (e.g. elasticity)].

[0079] As used herein the term “improving” or “increasing” refers to at least about 2%, at least about 3%, at least about 4%, at least about 5%, at least about 10%, at least about 15%, at least about 20%, at least about 25%, at least about 30%, at least about 35%, at least about 40%, at least about 45%, at least about 50%, at least about 60%, at least about 70%, at least about 80%, at least about 90% or greater increase in nitrogen use efficiency, in tolerance to abiotic stress, in yield, in biomass or in vigor of a plant, as compared to a native or wild-type plants [i.e., plants not genetically modified to express the bio-molecules (e.g., polynucleotides) of the invention, e.g., a non-transformed plant of the same species and of the same developmental stage which is grown under the same growth conditions as the transformed plant].

[0080] Improved plant abiotic stress tolerance is translated in the field into harvesting similar quantities of yield, while growing on less than optimal conditions (e.g., salinity, heat, cold, drought etc.) or harvesting higher yield when growing under optimal growth conditions.

[0081] Improved plant nitrogen use efficiency is translated in the field into either harvesting similar quantities of yield, while implementing less fertilizers, or increased yields gained by implementing the same levels of fertilizers. Thus, improved NUE or FUE has a direct effect on plant yield in the field. Likewise, improved ABST refers to harvesting similar quantities of yield, while negating the need for growth under regulated conditions such as in a green-house or under irrigation.

[0082] The term “plant” as used herein encompasses whole plants, ancestors and progeny of the plants and plant parts, including seeds, shoots, stems, roots (including tubers), and isolated plant cells, tissues and organs. The plant may be in any form including suspension cultures, embryos, meristematic regions, callus tissue, leaves, gametophytes, sporophytes, pollen, and microspores.

[0083] As used herein the phrase “plant cell” refers to plant cells which are derived and isolated from disintegrated plant cell tissue or plant cell cultures.

[0084] As used herein the phrase “plant cell culture” refers to any type of native (naturally occurring) plant cells, plant cell lines and genetically modified plant cells, which are not assembled to form a complete plant, such that at least one biological structure of a plant is not present. Optionally, the plant cell culture of this aspect of the present invention may comprise a particular type of a plant cell or a plurality of different types of plant cells. It should be noted that optionally plant cultures featuring a particular type of plant cell may be originally derived from a plurality of different types of such plant cells.

[0085] Any commercially or scientifically valuable plant is envisaged in accordance with these embodiments of the invention. Plants that are particularly useful in the methods of the invention include all plants which belong to the super family Viridiplantae, in particular monocotyledonous and dicotyledonous plants including a fodder or forage legume, ornamental plant, food crop, tree, or shrub selected from the list comprising Acacia spp., Acer spp., Actinidia spp., Aesculus spp., Agathis australis, Albizia amara, Alsophila tricolor, Andropogon spp., Arachis spp, Areca catechu, Astelia fragrans, Astragalus cicer, Baikiaea plurijuga, Betula spp., Brassica spp., Bruguiera gymnorrhiza, Burkea africana, Butea frondosa, Cadaba farinosa, Calliandra spp, Camellia sinensis, Canna indica, Capsicum spp., Cassia spp., Centroema pubescens, Chacoomeles spp., Cinnamomum cassia, Coffea arabica, Colophospermum mopane, Coronillia varia, Cotoneaster serotina, Crataegus spp., Cucumis spp., Cupressus spp., Cyathea dealbata, Cyclonia oblonga, Cryptomeria japonica, Cymbopogon spp., Cynthea dealbata, Cyclonia oblonga, Dalbergia monetaria, Davallia divaricata, Desmodium spp., Dicksonia squarosa, Dibeteropogon amplectens, Dioclea spp, Dolichos spp., Dorycnium rectum, Echinochloa pyramidalis, Ehraffia spp., Eleusine coracana, Eragrestis spp., Erythrina spp., Eucalyptus spp., Euclea schimperi, Eulalia vi/losa, Pagopyrum spp., Feijoa sellowlana, Fragaria spp., Flemingia spp, Freycinetia banksli, Geranium thunbergii, GinAgo biloba, Glycine javanica, Gliricidia spp, Gossypium hirsutum, Grevillea spp., Guibourtia coleosperma, Hedysarum spp., Hemaffhia altissima, Heteropogon contoffus, Hordeum vulgare, Hyparrhenia rufa, Hypericum erectum, Hypeffhelia dissolute, Indigo incamata, Iris spp., Leptarrhena pyrolifolia, Lespediza spp., Lettuca spp., Leucaena leucocephala, Loudetia simplex, Lotonus bainesli, Lotus spp., Macrotyloma axillare, Malus spp., Manihot esculenta, Medicago saliva, Metasequoia glyptostroboides, Musa sapientum, Nicotianum spp., Onobrychis spp., Ornithopus spp., Oryza spp., Peltophorum africanum, Pennisetum spp., Persea gratissima, Petunia spp., Phaseolus spp., Phoenix canariensis, Phormium cookianum, Photinia spp., Picea glauca, Pinus spp., Pisum sativam, Podocarpus totara, Pogonarthria fleckii, Pogonaffhria squarrosa, Populus spp., Prosopis cineraria, Pseudotsuga menziesii, Pterolobium stellatum, Pyrus communis, Quercus spp., Rhaphiolepsis umbellata, Rhopalostylis sapida, Rhus natalensis, Ribes grossularia, Ribes spp., Robinia pseudoacacia, Rosa spp., Rubus spp., Salix spp., Schyzachyrium sanguineum, Sciadopitys vefficillata, Sequoia sempervirens, Sequoiadendron giganteum, Sorghum bicolor, Spinacia spp., Sporobolus fimbriatus, Stiburus alopecuroides, Stylosanthos humilis, Tadehagi spp, Taxodium distichum, Themeda triandra, Trifolium spp., Triticum spp., Tsuga heterophylla, Vaccinium spp., Vicia spp., Vitis vinifera, Watsonia pyramidata, Zantedeschia aethiopica, Zea mays, amaranth, artichoke, asparagus, broccoli, Brussels sprouts, cabbage, canola, carrot, cauliflower, celery, collard greens, flax, kale, lentil, oilseed rape, okra, onion, potato, rice, soybean, straw, sugar beet, sugar cane, sunflower, tomato, squash tea, maize, wheat, barley, rye, oat, peanut, pea, lentil and alfalfa, cotton, rapeseed, canola, pepper, sunflower, tobacco, eggplant, eucalyptus, a tree, an ornamental plant, a perennial grass and a forage crop. Alternatively algae and other non-Viridiplantae can be used for the methods of the present invention.

[0086] According to some embodiments of the invention, the plant used by the method of the invention is a crop plant including, but not limited to, cotton, Brassica vegetables, oilseed rape, sesame, olive tree, palm oil, banana, wheat, corn or maize, barley, alfalfa, peanuts, sunflowers, rice, oats, sugarcane, soybean, turf grasses, barley, rye, sorghum, sugar cane, chicory, lettuce, tomato, zucchini, bell pepper, eggplant, cucumber, melon, watermelon, beans, hibiscus, okra, apple, rose, strawberry, chile, garlic, pea, lentil, canola, mums, arabidopsis, broccoli, cabbage, beet, quinoa, spinach, squash, onion, leek, tobacco, potato, sugarbeet, papaya, pineapple, mango, Arabidopsis thaliana, and also plants used in horticulture, floriculture or forestry, such as, but not limited to, poplar, fir, eucalyptus, pine, an ornamental plant, a perennial grass and a forage crop, coniferous plants, moss, algae, as well as other plants listed in World Wide Web(dot) nationmaster(dot)com/encyclopedia/Plantae.

[0087] According to a specific embodiment of the present invention, the plant comprises corn.

[0088] According to a specific embodiment of the present invention, the plant comprises sorghum.

[0089] As used herein, the phrase “exogenous polynucleotide” refers to a heterologous nucleic acid sequence which may not be naturally expressed within the plant or which overexpression in the plant is desired. The exogenous polynucleotide may be introduced into the plant in a stable or transient manner, so as to produce a ribonucleic acid (RNA) molecule. It should be noted that the exogenous polynucleotide may comprise a nucleic acid sequence which is identical or partially homologous to an endogenous nucleic acid sequence of the plant.

[0090] As mentioned the present teachings are based on the identification of RNA interfering molecular sequences (dsRNA) which modulate abiotic stress tolerance of plants.

[0091] According to some embodiments of the present aspect of the invention, the exogenous polynucleotide encodes an RNA interfering molecule.

[0092] Since its initial implementation, remarkable progress has been made in plant genetic engineering, and successful enhancements of commercially important crop plants have been reported (e.g., corn, cotton, soybean, canola, tomato). RNA interference (RNAi) is a remarkably potent technique and has steadily been established as the leading method for specific down-regulation/silencing of a target gene, through manipulation of one of two small RNA molecules, microRNAs (miRNAs) or small interfering RNAs (siRNAs). Both miRNAs and siRNAs are oligonucleotides (20-24 bps, i.e., the mature molecule) processed from longer RNA precursors by Dicer-like ribonucleases, although the source of their precursors is different (i.e., local single RNA molecules with imperfect stem-loop structures for miRNA, and long, double-stranded precursors potentially from bimolecular duplexes for siRNA). Additional characteristics that differentiate miRNAs from siRNAs are their sequence conservation level between related organisms (high in miRNAs, low to non-existent in siRNAs), regulation of genes unrelated to their locus of origin (typical for miRNAs, infrequent in siRNAs) and the genetic requirements for their respective functions are somewhat dissimilar in many organisms (Jones-Rhoades et al., 2006, Ann Rev Plant Biol 57:19-53). Despite all their differences, miRNAs and siRNAs are overall chemically and functionally similar and both are incorporated into silencing complexes, wherein they can guide post-transcriptional repression of multiple target genes, and thus function catalytically. Thus, the exogenous polynucleotide encodes a dsRNA interfering molecule or a precursor thereof.

[0093] According to some embodiments the exogenous polynucleotide encodes a miRNA or a precursor thereof.

[0094] According to other embodiments the exogenous polynucleotide encodes a siRNA or a precursor thereof.

[0095] As used herein, the phrase “siRNA” (also referred to herein interchangeably as “small interfering RNA” or “silencing RNA”, is a class of double-stranded RNA molecules, 20-25 nucleotides in length. The most notable role of siRNA is its involvement in the RNA interference (RNAi) pathway, where it interferes with the expression of a specific gene.

[0096] The siRNA precursor relates to a long dsRNA structure (at least 90% complementarity) of at least 30 bp.

[0097] As used herein, the phrase “microRNA (also referred to herein interchangeably as “miRNA” or “miR”) or a precursor thereof” refers to a microRNA (miRNA) molecule acting as a post-transcriptional regulator. Typically, the miRNA molecules are RNA molecules of about 20 to 22 nucleotides in length which can be loaded into a RISC complex and which direct the cleavage of another RNA molecule, wherein the other RNA molecule comprises a nucleotide sequence essentially complementary to the nucleotide sequence of the miRNA molecule.

[0098] Typically, a miRNA molecule is processed from a “pre-miRNA” or as used herein a precursor of a pre-miRNA molecule by proteins, such as DCL proteins, present in any plant cell and loaded onto a RISC complex where it can guide the cleavage of the target RNA molecules.

[0099] Pre-microRNA molecules are typically processed from pri-microRNA molecules (primary transcripts). The single stranded RNA segments flanking the pre-microRNA are important for processing of the pri-miRNA into the pre-miRNA. The cleavage site appears to be determined by the distance from the stem-ssRNA junction (Han et al. 2006, Cell 125, 887-901, 887-901).

[0100] As used herein, a “pre-miRNA” molecule is an RNA molecule of about 100 to about 200 nucleotides, preferably about 100 to about 130 nucleotides which can adopt a secondary structure comprising a double stranded RNA stem and a single stranded RNA loop (also referred to as “hairpin”) and further comprising the nucleotide sequence of the miRNA (and its complement sequence) in the double stranded RNA stem. According to a specific embodiment, the miRNA and its complement are located about 10 to about 20 nucleotides from the free ends of the miRNA double stranded RNA stem. The length and sequence of the single stranded loop region are not critical and may vary considerably, e.g. between 30 and 50 nt in length. The complementarity between the miRNA and its complement need not be perfect and about 1 to 3 bulges of unpaired nucleotides can be tolerated. The secondary structure adopted by an RNA molecule can be predicted by computer algorithms conventional in the art such as mFOLD. The particular strand of the double stranded RNA stem from the pre-miRNA which is released by DCL activity and loaded onto the RISC complex is determined by the degree of complementarity at the 5′ end, whereby the strand which at its 5′ end is the least involved in hydrogen bounding between the nucleotides of the different strands of the cleaved dsRNA stem is loaded onto the RISC complex and will determine the sequence specificity of the target RNA molecule degradation. However, if empirically the miRNA molecule from a particular synthetic pre-miRNA molecule is not functional (because the “wrong” strand is loaded on the RISC complex), it will be immediately evident that this problem can be solved by exchanging the position of the miRNA molecule and its complement on the respective strands of the dsRNA stem of the pre-miRNA molecule. As is known in the art, binding between A and U involving two hydrogen bounds, or G and U involving two hydrogen bounds is less strong that between G and C involving three hydrogen bounds. Exemplary hairpin sequences are provided in Tables 1-8, below.

[0101] Naturally occurring miRNA molecules may be comprised within their naturally occurring pre-miRNA molecules but they can also be introduced into existing pre-miRNA molecule scaffolds by exchanging the nucleotide sequence of the miRNA molecule normally processed from such existing pre-miRNA molecule for the nucleotide sequence of another miRNA of interest. The scaffold of the pre-miRNA can also be completely synthetic. Likewise, synthetic miRNA molecules may be comprised within, and processed from, existing pre-miRNA molecule scaffolds or synthetic pre-miRNA scaffolds. Some pre-miRNA scaffolds may be preferred over others for their efficiency to be correctly processed into the designed microRNAs, particularly when expressed as a chimeric gene wherein other DNA regions, such as untranslated leader sequences or transcription termination and polyadenylation regions are incorporated in the primary transcript in addition to the pre-microRNA.

[0102] According to the present teachings, the dsRNA molecules may be naturally occurring or synthetic.

[0103] Basically, siRNA and miRNA behave the same. Each can cleave perfectly complementary mRNA targets and decrease the expression of partially complementary targets.

[0104] Thus, the present teachings contemplate expressing an exogenous polynucleotide having a nucleic acid sequence at least 80%, 85%, 90%, 91%, 92%, 93%, 94%, 95%, 96%, 97%, 98% 99% or 100% identical to SEQ ID NOs. 101-216, 217-222, 223-227, 264-416 (Tables 1-8), provided that they regulate abiotic stress tolerance (e.g., heat stress, drought or salinity). Assays for testing the efficacy of transgenes on abiotic stress tolerance are further described hereinbelow.

[0105] Alternatively or additionally, the present teachings contemplate expressing an exogenous polynucleotide having a nucleic acid sequence at least 65%, 50%, 75%, 80%, 85%, 90%, 91%, 92%, 93%, 94%, 95%, 96%, 97%, 98% 99% or 100% identical to SEQ ID NOs. 217-222, 417-421, 458-614 (hairpin sequences of Tables 1-8 representing the core maize genes which were upregulated), provided that they regulate abiotic stress tolerance (e.g., heat stress, drought or salinity).

[0106] Tables 1-8 below illustrate exemplary miRNA sequences and precursors thereof which over expression are associated with modulation of abiotic stress tolerance.

[0107] For example, dsRNA sequences which are up-regulated during salinity stress are listed in Tables 3, 4 and 7.

[0108] dsRNA sequences which are up-regulated during heat stress are listed in Tables 5 and 8.

[0109] dsRNA sequences which are up-regulated during drought are listed in Tables 1, 2 and 6.

[0110] Likewise, Tables 1-8 provide similarly acting siRNA sequences.

[0111] The present invention envisages the use of homologous and orthologous sequences of the above RNA interfering molecules. At the precursor level use of homologous sequences can be done to a much broader extend. Thus, in such precursor sequences the degree of homology may be lower in all those sequences not including the mature miRNA or siRNA segment therein.

[0112] As used herein, the phrase “stem-loop precursor” refers to a stem loop precursor RNA structure from which the miRNA can be processed. In the case of siRNA, the precursor is typically devoid of a stem-loop structure.

[0113] Pre-microRNA molecules are typically processed from pri-microRNA molecules (primary transcripts). The single stranded RNA segments flanking the pre-microRNA are important for processing of the pri-miRNA into the pre-miRNA. The cleavage site appears to be determined by the distance from the stem-ssRNA junction (Han et al. 2006, Cell 125, 887-901, 887-901).

[0114] As used herein, a “pre-miRNA” molecule is an RNA molecule of about 100 to about 200 nucleotides, preferably about 100 to about 130 nucleotides which can adopt a secondary structure comprising a double stranded RNA stem and a single stranded RNA loop (also referred to as “hairpin”) and further comprising the nucleotide sequence of the miRNA (and its complement sequence) in the double stranded RNA stem. According to a specific embodiment, the miRNA and its complement are located about 10 to about 20 nucleotides from the free ends of the miRNA double stranded RNA stem. The length and sequence of the single stranded loop region are not critical and may vary considerably, e.g. between 30 and 50 nt in length. The complementarity between the miRNA and its complement need not be perfect and about 1 to 3 bulges of unpaired nucleotides can be tolerated. The secondary structure adopted by an RNA molecule can be predicted by computer algorithms conventional in the art such as mFOLD. The particular strand of the double stranded RNA stem from the pre-miRNA which is released by DCL activity and loaded onto the RISC complex is determined by the degree of complementarity at the 5′ end, whereby the strand which at its 5′ end is the least involved in hydrogen bonding between the nucleotides of the different strands of the cleaved dsRNA stem is loaded onto the RISC complex and will determine the sequence specificity of the target RNA molecule for degradation. However, if empirically the miRNA molecule from a particular synthetic pre-miRNA molecule is not functional (because the “wrong” strand is loaded on the RISC complex), it will be immediately evident that this problem can be solved by exchanging the position of the miRNA molecule and its complement on the respective strands of the dsRNA stem of the pre-miRNA molecule. As is known in the art, binding between A and U involving two hydrogen bonds, or G and U involving two hydrogen bonds is less strong than between G and C involving three hydrogen bonds.

[0115] Thus, according to a specific embodiment, the exogenous polynucleotide encodes a stem-loop precursor of the nucleic acid sequence. Such a stem-loop precursor can be at least about 60%, at least about 65%, at least about 70%, at least about 75%, at least about 80%, at least about 85%, at least about 90%, at least about 95% or more identical to SEQ ID NOs: 417-421, 458-614 (homolog precursors which are upregulated as in Tables 1-8), provided that it regulates abiotic stress tolerance (e.g., drought, salinity or heat stress).

[0116] Identity (e.g., percent identity) can be determined using any homology comparison software, including for example, the BlastN software of the National Center of Biotechnology Information (NCBI) such as by using default parameters.

[0117] Homology (e.g., percent homology, identity+similarity) can be determined using any homology comparison software, including for example, the TBLASTN software of the National Center of Biotechnology Information (NCBI) such as by using default parameters.

[0118] According to some embodiments of the invention, the term “homology” or “homologous” refers to identity of two or more nucleic acid sequences; or identity of two or more amino acid sequences.

[0119] Homologous sequences include both orthologous and paralogous sequences. The term “paralogous” relates to gene-duplications within the genome of a species leading to paralogous genes. The term “orthologous” relates to homologous genes in different organisms due to ancestral relationship.

[0120] One option to identify orthologues in monocot plant species is by performing a reciprocal blast search. This may be done by a first blast involving blasting the sequence-of-interest against any sequence database, such as the publicly available NCBI database which may be found at: Hypertext Transfer Protocol://World Wide Web(dot) ncbi(dot)nlm(dot)nih(dot)gov. The blast results may be filtered. The full-length sequences of either the filtered results or the non-filtered results are then blasted back (second blast) against the sequences of the organism from which the sequence-of-interest is derived. The results of the first and second blasts are then compared. An orthologue is identified when the sequence resulting in the highest score (best hit) in the first blast identifies in the second blast the query sequence (the original sequence-of-interest) as the best hit. Using the same rational a paralogue (homolog to a gene in the same organism) is found. In case of large sequence families, the ClustalW program may be used [Hypertext Transfer Protocol://World Wide Web(dot)ebi(dot)ac(dot) uk/Tools/clustalw2/index(dot)html], followed by a neighbor-joining tree (Hypertext Transfer Protocol://en(dot)wikipedia(dot)org/wiki/Neighbor-joining) which helps visualizing the clustering.

[0121] The miRNA or precursor sequence can be provided to the plant as naked RNA or expressed from a nucleic acid expression construct, where it is operaly linked to a regulatory sequence.

[0122] Interestingly, while screening for RNAi regulatory sequences, the present inventors have identified a number of miRNA and siRNA sequences which have never been described before.

[0123] Thus, according to an aspect of the invention there is provided an isolated polynucleotide having a nucleic acid sequence at least 80%, 85% 90%, 91%, 92%, 93%, 94%, 95%, 96%, 97%, 98% 99% or 100% identical to SEQ ID NO: 16-113, 117-216 (Tables 1-8 predicted dsRNA which are either upregulated or downregulated), wherein said nucleic acid sequence is capable of regulating abiotic stress tolerance of a plant (e.g., salinity, drought or heat stress).

[0124] According to a specific embodiment, the isolated polynucleotide encodes a stem-loop precursor of the nucleic acid sequence.

[0125] According to a specific embodiment, the stem-loop precursor is at least about 60%, at least about 65%, at least about 70%, at least about 75%, at least about 80%, at least about 85%, at least about 90%, at least about 95% or more identical to the precursor sequence, provided that it is capable of regulating abiotic stress tolerance of a plant (e.g., salinity, drought or heat stress).

[0126] According to a specific embodiment, the stem-loop precursor is selected from the group of precursor sequences of SEQ ID NOs: 101-113 and 117-216 (mature of predicted upregulated).

[0127] According to a specific embodiment, the stem-loop precursor is selected from the group of precursor sequences of SEQ ID NOs: 16-100.

[0128] As mentioned, the present inventors have also identified RNAi sequences which are down regulated under abiotic stress conditions (e.g., salinity, drought or heat stress).

[0129] Thus, according to an aspect of the invention there is provided a method of improving abiotic stress tolerance, nitrogen use efficiency, biomass, vigor or yield of a plant, the method comprising expressing within the plant an exogenous polynucleotide which downregulates an activity or expression of a gene encoding an RNAi molecule having a nucleic acid sequence at least 90% homologous to the sequence selected from the group consisting of SEQ ID NOs: 1-100, 615-626, 639 (Tables 1-8 MATURE DOWN-REGULATED), thereby improving, abiotic stress tolerance, nitrogen use efficiency, biomass, vigor or yield of a plant. Precursor hairpin sequences of those miRs are provided in SEQ ID NOs: 627-638 and 640 and homologous sequences (i.e., at least 60%, at least about 65%, at least about 70%, at least about 75%, at least about 80%, at least about 85%, at least about 90%, at least about 95% or more identical to the precursor sequence).

[0130] There are various approaches to down regulate RNAi sequences.

[0131] As used herein the term “down-regulation” refers to reduced activity or expression of the dsRNA (at least 10%, 20%, 30%, 50%, 60%, 70%, 80%, 90% or 100% reduction in activity or expression) as compared to its activity or expression in a plant of the same species and the same developmental stage not expressing the exogenous polynucleotide.

[0132] Nucleic acid agents that down-regulate miR activity include, but are not limited to, a target mimic, a micro-RNA resistant gene and a miRNA inhibitor.

[0133] The target mimic or micro-RNA resistant target is essentially complementary to the microRNA provided that one or more of following mismatches are allowed:

[0134] (a) a mismatch between the nucleotide at the 5′ end of the microRNA and the corresponding nucleotide sequence in the target mimic or micro-RNA resistant target;

[0135] (b) a mismatch between any one of the nucleotides in position 1 to position 9 of the microRNA and the corresponding nucleotide sequence in the target mimic or micro-RNA resistant target; or

[0136] (c) three mismatches between any one of the nucleotides in position 12 to position 21 of the microRNA and the corresponding nucleotide sequence in the target mimic or micro-RNA resistant target provided that there are no more than two consecutive mismatches.

[0137] The target mimic RNA is essentially similar to the target RNA modified to render it resistant to miRNA induced cleavage, e.g. by modifying the sequence thereof such that a variation is introduced in the nucleotide of the target sequence complementary to the nucleotides 10 or 11 of the miRNA resulting in a mismatch.

[0138] Alternatively, a microRNA-resistant target may be implemented. Thus, a silent mutation may be introduced in the microRNA binding site of the target gene so that the DNA and resulting RNA sequences are changed in a way that prevents microRNA binding, but the amino acid sequence of the protein is unchanged. Thus, a new sequence can be synthesized instead of the existing binding site, in which the DNA sequence is changed, resulting in lack of miRNA binding to its target.

[0139] Tables 14-19 below provide non-limiting examples of target mimics and target resistant sequences that can be used to down-regulate the activity of the miRs/siRNAs of the invention.

[0140] According to a specific embodiment, the target mimic or micro-RNA resistant target is linked to the promoter naturally associated with the pre-miRNA recognizing the target gene and introduced into the plant cell. In this way, the miRNA target mimic or micro-RNA resistant target RNA will be expressed under the same circumstances as the miRNA and the target mimic or micro-RNA resistant target RNA will substitute for the non-target mimic/micro-RNA resistant target RNA degraded by the miRNA induced cleavage.

[0141] Non-functional miRNA alleles or miRNA resistant target genes may also be introduced by homologous recombination to substitute the miRNA encoding alleles or miRNA sensitive target genes.

[0142] While further reducing the present invention to practice, the present inventors have uncovered through extensive experimentation and screening genes that are targeted by the dsRNA sequences of the present teachings and suggest overexpressing these genes or sequences controlling same in the generation of transgenic plants having improved agricultural traits.

[0143] Thus, according to an aspect of the invention there is provided a method of improving abiotic stress tolerance, nitrogen use efficiency, biomass, vigor or yield of a plant, the method comprising expressing within the plant an exogenous polynucleotide encoding a polypeptide having an amino acid sequence at least 80% homologous to SEQ ID NOs: 1861-1869, 1892-1915, 1921-1924, 1931-1939, 1952-1963, 2010-2014, 2327-2355, 2763-3040, 3044-3163, 3175-3269, 3313-3323, 3458-3944 or 3950-3969 (targets of down-regulated miRs of Tables 1-8), wherein said polypeptide is capable of regulating abiotic stress tolerance of the plant, thereby improving abiotic stress tolerance, nitrogen use efficiency, biomass, vigor or yield of the plant.

[0144] Generally, the tables provided in the Examples section are to be considered an integral part of the specification.

[0145] As used herein a “target gene” refers to a gene that is processed by microRNA or siRNA activity. Typically the gene encodes a polypeptide which expression is downregulated due to microRNA/siRNA processing.

[0146] Target genes are typically identified using the WMD3 website (http://wmd3dotweigelworlddotorg/).

[0147] As mentioned, the method of the present invention is performed by expressing within a plant an exogenous polynucleotide encoding a target gene of the RNA interfering molecules uncovered by the present inventors, as explained below.

[0148] As used herein, the phrase “expressing within the plant an exogenous polynucleotide” refers to upregulating the expression level of an exogenous polynucleotide within the plant e.g., by introducing the exogenous polynucleotide into a plant or plant cell and expressing by recombinant means, as described in detail hereinbelow.

[0149] As used herein “expressing” refers to expression at the mRNA level (e.g., in case the target gene expresses an mRNA product but no protein or in the case of expressing the dsRNA) or at the polypeptide level of the desired exogenous polynucleotide.

[0150] As used herein, the phrase “exogenous polynucleotide” refers to a heterologous nucleic acid sequence which may not be naturally expressed within the plant or which overexpression in the plant is desired (i.e., overexpression of an endogenous gene). The exogenous polynucleotide may be introduced into the plant in a stable or transient manner, so as to produce a ribonucleic acid (RNA) molecule and/or a polypeptide molecule. The exogenous polynucleotide may comprise a nucleic acid sequence which is identical or partially homologous to an endogenous nucleic acid sequence expressed within the plant.

[0151] The term “endogenous” as used herein refers to any polynucleotide or polypeptide which is present and/or naturally expressed within a plant or a cell thereof.

[0152] As used herein the term “polynucleotide” refers to a single or double stranded nucleic acid sequence which is isolated and provided in the form of an RNA sequence, a complementary polynucleotide sequence (cDNA), a genomic polynucleotide sequence (e.g. sequence isolated from a chromosome) and/or a composite polynucleotide sequences (e.g., a combination of the above). This term includes polynucleotides and/or oligonucleotides derived from naturally occurring nucleic acid molecules (e.g., RNA or DNA), synthetic polynucleotide and/or oligonucleotide molecules composed of naturally occurring bases, sugars, and covalent internucleoside linkages (e.g., backbone), as well as synthetic polynucleotides and/or oligonucleotides having non-naturally occurring portions, which function similarly to the respective naturally occurring portions.

[0153] The term “isolated” refers to at least partially separated from the natural environment e.g., from a plant cell.

[0154] Nucleic acid sequences of the polypeptides of some embodiments of the invention may be optimized for expression in a specific plant host. Examples of such sequence modifications include, but are not limited to, an altered G/C content to more closely approach that typically found in the plant species of interest, and the removal of codons atypically found in the plant species commonly referred to as codon optimization.

[0155] The phrase “codon optimization” refers to the selection of appropriate DNA nucleotides for use within a structural gene or fragment thereof that approaches codon usage within the plant of interest. Therefore, an optimized gene or nucleic acid sequence refers to a gene in which the nucleotide sequence of a native or naturally occurring gene has been modified in order to utilize statistically-preferred or statistically-favored codons within the plant. The nucleotide sequence typically is examined at the DNA level and the coding region optimized for expression in the plant species determined using any suitable procedure, for example as described in Sardana et al. (1996, Plant Cell Reports 15:677-681). In this method, the standard deviation of codon usage, a measure of codon usage bias, may be calculated by first finding the squared proportional deviation of usage of each codon of the native gene relative to that of highly expressed plant genes, followed by a calculation of the average squared deviation. The formula used is: 1 SDCU=n=1N[(Xn−Yn)/Yn]2/N, where Xn refers to the frequency of usage of codon n in highly expressed plant genes, where Yn to the frequency of usage of codon n in the gene of interest and N refers to the total number of codons in the gene of interest. A table of codon usage from highly expressed genes of dicotyledonous plants is compiled using the data of Murray et al. (1989, Nuc Acids Res. 17:477-498).

[0156] One method of optimizing the nucleic acid sequence in accordance with the preferred codon usage for a particular plant cell type is based on the direct use, without performing any extra statistical calculations, of codon optimization tables such as those provided on-line at the Codon Usage Database through the NIAS (National Institute of Agrobiological Sciences) DNA bank in Japan (www.kazusa.or.jp/codon/). The Codon Usage Database contains codon usage tables for a number of different species, with each codon usage table having been statistically determined based on the data present in Genbank.

[0157] By using the above tables to determine the most preferred or most favored codons for each amino acid in a particular species (for example, rice), a naturally-occurring nucleotide sequence encoding a protein of interest can be codon optimized for that particular plant species. This is effected by replacing codons that may have a low statistical incidence in the particular species genome with corresponding codons, in regard to an amino acid, that are statistically more favored. However, one or more less-favored codons may be selected to delete existing restriction sites, to create new ones at potentially useful junctions (5′ and 3′ ends to add signal peptide or termination cassettes, internal sites that might be used to cut and splice segments together to produce a correct full-length sequence), or to eliminate nucleotide sequences that may negatively effect mRNA stability or expression.

[0158] The naturally-occurring encoding nucleotide sequence may already, in advance of any modification, contain a number of codons that correspond to a statistically-favored codon in a particular plant species. Therefore, codon optimization of the native nucleotide sequence may comprise determining which codons, within the native nucleotide sequence, are not statistically-favored with regards to a particular plant, and modifying these codons in accordance with a codon usage table of the particular plant to produce a codon optimized derivative. A modified nucleotide sequence may be fully or partially optimized for plant codon usage provided that the protein encoded by the modified nucleotide sequence is produced at a level higher than the protein encoded by the corresponding naturally occurring or native gene. Construction of synthetic genes by altering the codon usage is described in for example PCT Patent Application 93/07278.

[0159] Target genes which are contemplated according to the present teachings are provided in the polynucleotide sequences encoding polypeptides which comprise amino acid sequences as set forth in SEQ ID NO:1816-2014, 2183-2355, 2501-3970. However the present teachings also relate to orthologs or homologs at least about 60%, at least about 65%, at least about 70%, at least about 75%, at least about 80%, at least about 85%, at least about 90%, or at least about 95% or more identical or similar to SEQ ID NO: 1816-2014, 2183-2355, 2500-3969. Parameters for determining the level of identity are provided hereinbelow.

[0160] Alternatively or additionally, target genes which are contemplated according to the present teachings are provided in the polynucleotide sequences which comprise nucleic acid sequences as set forth in SEQ ID NO: 2015-2182, 2356-2499, 3970-5236. However the present teachings also relate to orthologs or homologs at least about 60%, at least about 65%, at least about 70%, at least about 75%, at least about 80%, at least about 85%, at least about 90%, or at least about 95% or more identical or similar to SEQ ID NO: 2015-2182, 2356-2499, 3970-5236 (Tables 20-22).

[0161] Homology (e.g., percent homology, identity+similarity) can be determined using any homology comparison software, including for example, the TBLASTN software of the National Center of Biotechnology Information (NCBI) such as by using default parameters, when starting from a polypeptide sequence; or the tBLASTX algorithm (available via the NCBI) such as by using default parameters, which compares the six-frame conceptual translation products of a nucleotide query sequence (both strands) against a protein sequence database.

[0162] According to some embodiments of the invention, the term “homology” or “homologous” refers to identity of two or more nucleic acid sequences; or identity of two or more amino acid sequences.

[0163] Homologous sequences include both orthologous and paralogous sequences. The term “paralogous” relates to gene-duplications within the genome of a species leading to paralogous genes. The term “orthologous” relates to homologous genes in different organisms due to ancestral relationship.

[0164] One option to identify orthologues in monocot plant species is by performing a reciprocal blast search. This may be done by a first blast involving blasting the sequence-of-interest against any sequence database, such as the publicly available NCBI database which may be found at: Hypertext Transfer Protocol://World Wide Web(dot) ncbi(dot)nlm(dot)nih(dot)gov. The blast results may be filtered. The full-length sequences of either the filtered results or the non-filtered results are then blasted back (second blast) against the sequences of the organism from which the sequence-of-interest is derived. The results of the first and second blasts are then compared. An orthologue is identified when the sequence resulting in the highest score (best hit) in the first blast identifies in the second blast the query sequence (the original sequence-of-interest) as the best hit. Using the same rational a paralogue (homolog to a gene in the same organism) is found. In case of large sequence families, the ClustalW program may be used [Hypertext Transfer Protocol://World Wide Web(dot)ebi(dot)ac(dot) uk/Tools/clustalw2/index(dot)html], followed by a neighbor-joining tree (Hypertext Transfer Protocol://en(dot)wikipedia(dot)org/wiki/Neighbor-joining) which helps visualizing the clustering.

[0165] As mentioned the present inventors have also identified genes which down-regulation may be done in order to improve their NUE, biomass, vigor, yield and abiotic stress tolerance.

[0166] Thus, according to an aspect of the invention there is provided a method of improving abiotic stress tolerance, nitrogen use efficiency, biomass, vigor or yield of a plant, the method comprising expressing within the plant an exogenous polynucleotide which downregulates an activity or expression of a polypeptide having an amino acid sequence at least 80%, 85%, 90%, 95%, or 100% homologous to SEQ ID NOs: 1816-1860, 1870-1891, 1916-1920, 1925-1930, 1940-1951, 1964-2009, 2183-2326, 2500-2762, 3041-3043, 3164-3174, 3270-3312, 3324-3457, 3945-3949 (targets of upregulated miRs shown in Tables 20-22), wherein said polypeptide is capable of regulating abiotic stress tolerance of the plant, thereby improving abiotic stress tolerance, nitrogen use efficiency, biomass, vigor or yield of the plant.

[0167] Down regulation of activity or expression is by at least 10%, 20%, 30%, 40%, 50%, 60%, 70%, 80%, 90% or even complete (100%) loss of activity or expression. Assays for measuring gene expression can be effected at the protein level (e.g., Western blot, ELISA) or at the mRNA level such as by RT-PCR.

[0168] According to a specific embodiment the amino acid sequence of the target gene is as set forth in SEQ ID NOs: 1816-1860, 1870-1891, 1916-1920, 1925-1930, 1940-1951, 1964-2009, 2183-2326, 2500-2762, 3041-3043, 3164-3174, 3270-3312, 3324-3457, 3945-3949 (targets of upregulated miRs, Tables 20-22).

[0169] Alternatively or additionally, the amino acid sequence of the target gene is encoded by a polynucleotide sequence as set forth in SEQ ID NOs: 2015-2052, 2062-2079, 2102-2105, 2110, 2117-2125, 2137-2177, 2356-2477, 3970-4184, 4421-4421, 4528-4538, 4625-4660, 4671-4786, 5214-5218 (targets of upregulated miRs, Tables 20-22).

[0170] Examples of polynucleotide downregulating agents that inhibit (also referred to herein as inhibitors or nucleic acid agents) the expression of a target gene are given below.

[0171] 1. Polynucleotide-Based Inhibition of Gene Expression.

[0172] It will be appreciated, that any of these methods when specifically referring to downregulating expression/activity of the target genes can be used, at least in part, to downregulate expression or activity of endogenous RNA molecules.

[0173] i. Sense Suppression/Cosuppression

[0174] In some embodiments of the invention, inhibition of the expression of target gene may be obtained by sense suppression or cosuppression. For cosuppression, an expression cassette is designed to express an RNA molecule corresponding to all or part of a messenger RNA encoding a target gene in the “sense” orientation. Over-expression of the RNA molecule can result in reduced expression of the native gene. Accordingly, multiple plant lines transformed with the cosuppression expression cassette are screened to identify those that show the greatest inhibition of target gene expression.

[0175] The polynucleotide used for cosuppression may correspond to all or part of the sequence encoding the target gene, all or part of the 5′ and/or 3′ untranslated region of a target transcript, or all or part of both the coding sequence and the untranslated regions of a transcript encoding the target gene. In some embodiments where the polynucleotide comprises all or part of the coding region for the target gene, the expression cassette is designed to eliminate the start codon of the polynucleotide so that no protein product will be transcribed.

[0176] Cosuppression may be used to inhibit the expression of plant genes to produce plants having undetectable protein levels for the proteins encoded by these genes. See, for example, Broin, et al., (2002) Plant Cell 15:1517-1532. Cosuppression may also be used to inhibit the expression of multiple proteins in the same plant. Methods for using cosuppression to inhibit the expression of endogenous genes in plants are described in Flavell, et al., (1995) Proc. Natl. Acad. Sci. USA 91:3590-3596; Jorgensen, et al., (1996) Plant Mol. Biol. 31:957-973; Johansen and Carrington, (2001) Plant Physiol. 126:930-938; Broin, et al., (2002) Plant Cell 15:1517-1532; Stoutjesdijk, et al., (2002) Plant Physiol. 129:1723-1731; Yu, et al., (2003) Phytochemistry 63:753-763; and U.S. Pat. Nos. 5,035,323, 5,283,185 and 5,952,657; each of which is herein incorporated by reference. The efficiency of cosuppression may be increased by including a poly-dt region in the expression cassette at a position 3′ to the sense sequence and 5′ of the polyadenylation signal. See, US Patent Publication Number 20020058815, herein incorporated by reference. Typically, such a nucleotide sequence has substantial sequence identity to the sequence of the transcript of the endogenous gene, optimally greater than about 65% sequence identity, more optimally greater than about 85% sequence identity, most optimally greater than about 95% sequence identity. See, U.S. Pat. Nos. 5,283,185 and 5,035,323; herein incorporated by reference.

[0177] Transcriptional gene silencing (TGS) may be accomplished through use of hpRNA constructs wherein the inverted repeat of the hairpin shares sequence identity with the promoter region of a gene to be silenced. Processing of the hpRNA into short RNAs which can interact with the homologous promoter region may trigger degradation or methylation to result in silencing. (Aufsatz, et al., (2002) PNAS 99(4):16499-16506; Mette, et al., (2000) EMBO J. 19(19):5194-5201)

[0178] ii. Antisense Suppression

[0179] In some embodiments of the invention, inhibition of the expression of the target gene may be obtained by antisense suppression. For antisense suppression, the expression cassette is designed to express an RNA molecule complementary to all or part of a messenger RNA encoding the target gene. Over-expression of the antisense RNA molecule can result in reduced expression of the native gene. Accordingly, multiple plant lines transformed with the antisense suppression expression cassette are screened to identify those that show the greatest inhibition of target gene expression.

[0180] The polynucleotide for use in antisense suppression may correspond to all or part of the complement of the sequence encoding the target gene, all or part of the complement of the 5′ and/or 3′ untranslated region of the target gene transcript, or all or part of the complement of both the coding sequence and the untranslated regions of a transcript encoding the target gene. In addition, the antisense polynucleotide may be fully complementary (i.e., 100% identical to the complement of the target sequence) or partially complementary (i.e., less than 100% identical to the complement of the target sequence) to the target sequence. Antisense suppression may be used to inhibit the expression of multiple proteins in the same plant. Furthermore, portions of the antisense nucleotides may be used to disrupt the expression of the target gene. Generally, sequences of at least 50 nucleotides, 100 nucleotides, 200 nucleotides, 300, 500, 550, 500, 550 or greater may be used. Methods for using antisense suppression to inhibit the expression of endogenous genes in plants are described, for example, in Liu, et al., (2002) Plant Physiol. 129:1732-1753 and U.S. Pat. No. 5,759,829, which is herein incorporated by reference. Efficiency of antisense suppression may be increased by including a poly-dt region in the expression cassette at a position 3′ to the antisense sequence and 5′ of the polyadenylation signal. See, US Patent Publication Number 20020058815.

[0181] iii. Double-Stranded RNA Interference

[0182] In some embodiments of the invention, inhibition of the expression of a target gene may be obtained by double-stranded RNA (dsRNA) interference. For dsRNA interference, a sense RNA molecule like that described above for cosuppression and an antisense RNA molecule that is fully or partially complementary to the sense RNA molecule are expressed in the same cell, resulting in inhibition of the expression of the corresponding endogenous messenger RNA.

[0183] Expression of the sense and antisense molecules can be accomplished by designing the expression cassette to comprise both a sense sequence and an antisense sequence. Alternatively, separate expression cassettes may be used for the sense and antisense sequences. Multiple plant lines transformed with the dsRNA interference expression cassette or expression cassettes are then screened to identify plant lines that show the greatest inhibition of target gene expression. Methods for using dsRNA interference to inhibit the expression of endogenous plant genes are described in Waterhouse, et al., (1998) Proc. Natl. Acad. Sci. USA 95:13959-13965, Liu, et al., (2002) Plant Physiol. 129:1732-1753, and WO 99/59029, WO 99/53050, WO 99/61631, and WO 00/59035;

[0184] iv. Hairpin RNA Interference and Intron-Containing Hairpin RNA Interference

[0185] In some embodiments of the invention, inhibition of the expression of one or more target gene may be obtained by hairpin RNA (hpRNA) interference or intron-containing hairpin RNA (ihpRNA) interference. These methods are highly efficient at downregulating the expression of endogenous genes. See, Waterhouse and Helliwell, (2003) Nat. Rev. Genet. 5:29-38 and the references cited therein.

[0186] For hpRNA interference, the expression cassette is designed to express an RNA molecule that hybridizes with itself to form a hairpin structure that comprises a single-stranded loop region and a base-paired stem. The base-paired stem region comprises a sense sequence corresponding to all or part of the endogenous messenger RNA encoding the gene whose expression is to be inhibited, and an antisense sequence that is fully or partially complementary to the sense sequence. Thus, the base-paired stem region of the molecule generally determines the specificity of the RNA interference. hpRNA molecules are highly efficient at inhibiting the expression of endogenous genes, and the RNA interference they induce is inherited by subsequent generations of plants. See, for example, Chuang and Meyerowitz, (2000) Proc. Natl. Acad. Sci. USA 97:5985-5990; Stoutjesdijk, et al., (2002) Plant Physiol. 129:1723-1731; and Waterhouse and Helliwell, (2003) Nat. Rev. Genet. 5:29-38. Methods for using hpRNA interference to inhibit or silence the expression of genes are described, for example, in Chuang and Meyerowitz, (2000) Proc. Natl. Acad. Sci. USA 97:5985-5990; Stoutjesdijk, et al., (2002) Plant Physiol. 129:1723-1731; Waterhouse and Helliwell, (2003) Nat. Rev. Genet. 5:29-38; Pandolfini, et al., BMC Biotechnology 3:7, and US Patent Publication Number 20030175965; each of which is herein incorporated by reference. A transient assay for the efficiency of hpRNA constructs to silence gene expression in vivo has been described by Panstruga, et al., (2003) Mol. Biol. Rep. 30:135-150, herein incorporated by reference.

[0187] ForihpRNA, the interfering molecules have the same general structure as for hpRNA, but the RNA molecule additionally comprises an intron that is capable of being spliced in the cell in which the ihpRNA is expressed. The use of an intron minimizes the size of the loop in the hairpin RNA molecule following splicing, and this increases the efficiency of interference. See, for example, Smith, et al., (2000) Nature 507:319-320. In fact, Smith, et al., show 100% suppression of endogenous gene expression using ihpRNA-mediated interference. Methods for using ihpRNA interference to inhibit the expression of endogenous plant genes are described, for example, in Smith, et al., (2000) Nature 507:319-320; Wesley, et al., (2001) Plant J. 27:581-590; Wang and Waterhouse, (2001) Curr. Opin. Plant Biol. 5:156-150; Waterhouse and Helliwell, (2003) Nat. Rev. Genet. 5:29-38; Helliwell and Waterhouse, (2003) Methods 30:289-295, and US Patent Publication Number 20030180955, each of which is herein incorporated by reference.

[0188] The expression cassette for hpRNA interference may also be designed such that the sense sequence and the antisense sequence do not correspond to an endogenous RNA. In this embodiment, the sense and antisense sequence flank a loop sequence that comprises a nucleotide sequence corresponding to all or part of the endogenous messenger RNA of the target gene. Thus, it is the loop region that determines the specificity of the RNA interference. See, for example, WO 02/00905, herein incorporated by reference.

[0189] v. Amplicon-Mediated Interference

[0190] Amplicon expression cassettes comprise a plant virus-derived sequence that contains all or part of the target gene but generally not all of the genes of the native virus. The viral sequences present in the transcription product of the expression cassette allow the transcription product to direct its own replication. The transcripts produced by the amplicon may be either sense or antisense relative to the target sequence (i.e., the messenger RNA for target gene). Methods of using amplicons to inhibit the expression of endogenous plant genes are described, for example, in Angell and Baulcombe, (1997) EMBO J. 16:3675-3685, Angell and Baulcombe, (1999) Plant J. 20:357-362, and U.S. Pat. No. 6,656,805, each of which is herein incorporated by reference.

[0191] vi. Ribozymes

[0192] In some embodiments, the polynucleotide expressed by the expression cassette of the invention is catalytic RNA or has ribozyme activity specific for the messenger RNA of target gene. Thus, the polynucleotide causes the degradation of the endogenous messenger RNA, resulting in reduced expression of the target gene. This method is described, for example, in U.S. Pat. No. 5,987,071, herein incorporated by reference.

[0193] 2. Gene Disruption

[0194] In some embodiments of the present invention, the activity of a miRNA or a target gene is reduced or eliminated by disrupting the gene encoding the target polypeptide. The gene encoding the target polypeptide may be disrupted by any method known in the art. For example, in one embodiment, the gene is disrupted by transposon tagging. In another embodiment, the gene is disrupted by mutagenizing plants using random or targeted mutagenesis, and selecting for plants that have reduced response regulator activity.

[0195] Recombinant expression is effected by cloning the nucleic acid of interest (e.g., miRNA, target gene, silencing agent etc) into a nucleic acid expression construct under the expression of a plant promoter.

[0196] In other embodiments of the invention, synthetic single stranded nucleic acids are used as miRNA inhibitors. A miRNA inhibitor is typically between about 17 to 25 nucleotides in length and comprises a 5′ to 3′ sequence that is at least 90% complementary to the 5′ to 3′ sequence of a mature miRNA. In certain embodiments, a miRNA inhibitor molecule is 17, 18, 19, 20, 21, 22, 23, 24, or 25 nucleotides in length, or any range derivable therein. Moreover, a miRNA inhibitor has a sequence (from 5′ to 3′) that is or is at least 90, 91, 92, 93, 94, 95, 96, 97, 98, 99, 99.1, 99.2, 99.3, 99.4, 99.5, 99.6, 99.7, 99.8, 99.9 or 100% complementary, or any range derivable therein, to the 5′ to 3′ sequence of a mature miRNA, particularly a mature, naturally occurring miRNA.

[0197] As mentioned, the polynucleotide sequences of the invention can be provided to the plant as naked RNA or expressed from a nucleic acid expression construct, where it is operaly linked to a regulatory sequence.

[0198] According to a specific embodiment of the invention, there is provided a nucleic acid construct comprising a nucleic acid sequence encoding a miRNA or siRNA or a precursor thereof as described herein, said nucleic acid sequence being under a transcriptional control of a regulatory sequence such as a fiber-cell specific promoter.

[0199] Alternatively or additionally, there is provided a nucleic acid construct comprising a nucleic acid sequence encoding an inhibitor of the miRNA or siRNA sequences as described herein (e.g., target mimic, miR resistant target or miR inhibitor), said nucleic acid sequence being under a transcriptional control of a regulatory sequence such as a tissue (e.g., root) specific promoter.

[0200] An exemplary nucleic acid construct which can be used for plant transformation include, the pORE E2 binary vector (FIG. 1) in which the relevant polynucleotide sequence is ligated under the transcriptional control of a promoter.

[0201] A coding nucleic acid sequence is “operably linked” or “transcriptionally linked to a regulatory sequence (e.g., promoter)” if the regulatory sequence is capable of exerting a regulatory effect on the coding sequence linked thereto. Thus the regulatory sequence controls the transcription of the miRNA or precursor thereof.

[0202] The term “regulatory sequence”, as used herein, means any DNA, that is involved in driving transcription and controlling (i.e., regulating) the timing and level of transcription of a given DNA sequence, such as a DNA coding for a miRNA or siRNA, precursor or inhibitor of same. For example, a 5′ regulatory region (or “promoter region”) is a DNA sequence located upstream (i.e., 5′) of a coding sequence and which comprises the promoter and the 5′-untranslated leader sequence. A 3′ regulatory region is a DNA sequence located downstream (i.e., 3′) of the coding sequence and which comprises suitable transcription termination (and/or regulation) signals, including one or more polyadenylation signals.

[0203] For the purpose of the invention, the promoter is a plant-expressible promoter. As used herein, the term “plant-expressible promoter” means a DNA sequence which is capable of controlling (initiating) transcription in a plant cell. This includes any promoter of plant origin, but also any promoter of non-plant origin which is capable of directing transcription in a plant cell, i.e., certain promoters of viral or bacterial origin Thus, any suitable promoter sequence can be used by the nucleic acid construct of the present invention. According to some embodiments of the invention, the promoter is a constitutive promoter, a tissue-specific promoter or an inducible promoter (e.g. an abiotic stress-inducible promoter).

[0204] Suitable constitutive promoters include, for example, hydroperoxide lyase (HPL) promoter, CaMV 35S promoter (Odell et al, Nature 313:810-812, 1985); maize Ubi 1 (Christensen et al., Plant Sol. Biol. 18:675-689, 1992); rice actin (McElroy et al., Plant Cell 2:163-171, 1990); pEMU (Last et al, Theor. Appl. Genet. 81:581-588, 1991); CaMV 19S (Nilsson et al, Physiol. Plant 100:456-462, 1997); GOS2 (de Pater et al, Plant J November; 2(6):837-44, 1992); ubiquitin (Christensen et al, Plant MoI. Biol. 18: 675-689, 1992); Rice cyclophilin (Bucholz et al, Plant MoI Biol. 25(5):837-43, 1994); Maize H3 histone (Lepetit et al, MoI. Gen. Genet. 231: 276-285, 1992); Actin 2 (An et al, Plant J. 10(1); 107-121, 1996) and Synthetic Super MAS (Ni et al., The Plant Journal 7: 661-76, 1995). Other constitutive promoters include those in U.S. Pat. Nos. 5,659,026, 5,608,149; 5,608,144; 5,604,121; 5,569,597: 5,466,785; 5,399,680; 5,268,463; and 5,608,142.

[0205] Suitable tissue-specific promoters include, but not limited to, leaf-specific promoters [such as described, for example, by Yamamoto et al., Plant J. 12:255-265, 1997; Kwon et al., Plant Physiol. 105:357-67, 1994; Yamamoto et al., Plant Cell Physiol. 35:773-778, 1994; Gotor et al., Plant J. 3:509-18, 1993; Orozco et al., Plant MoI. Biol. 23:1129-1138, 1993; and Matsuoka et al., Proc. Natl. Acad. Sci. USA 90:9586-9590, 1993], seed-preferred promoters [e.g., from seed specific genes (Simon, et al., Plant MoI. Biol. 5. 191, 1985; Scofield, et al., J. Biol. Chem. 262: 12202, 1987; Baszczynski, et al., Plant MoI. Biol. 14: 633, 1990), Brazil Nut albumin (Pearson' et al., Plant MoI. Biol. 18: 235-245, 1992), legumin (Ellis, et al. Plant MoI. Biol. 10: 203-214, 1988), Glutelin (rice) (Takaiwa, et al., MoI. Gen. Genet. 208: 15-22, 1986; Takaiwa, et al., FEBS Letts. 221: 43-47, 1987), Zein (Matzke et al., Plant MoI Biol, 143)323-32 1990), napA (Stalberg, et al., Planta 199: 515-519, 1996), Wheat SPA (Albanietal, Plant Cell, 9: 171-184, 1997), sunflower oleosin (Cummins, et al, Plant MoI. Biol. 19: 873-876, 1992)], endosperm specific promoters [e.g., wheat LMW and HMW, glutenin-1 (MoI Gen Genet. 216:81-90, 1989; NAR 17:461-2), wheat a, b and g gliadins (EMBO3: 1409-15, 1984), Barley ltrl promoter, barley Bl, C, D hordein (Theor Appl Gen 98:1253-62, 1999; Plant J 4:343-55, 1993; MoI Gen Genet. 250:750-60, 1996), Barley DOF (Mena et al., The Plant Journal, 116(1): 53-62, 1998), Biz2 (EP99106056.7), Synthetic promoter (Vicente-Carbajosa et al., Plant J. 13: 629-640, 1998), rice prolamin NRP33, rice-globulin GIb-I (Wu et al., Plant Cell Physiology 39(8) 885-889, 1998), rice alpha-globulin REB/OHP-1 (Nakase et al. Plant MoI. Biol. 33: 513-S22, 1997), rice ADP-glucose PP (Trans Res 6:157-68, 1997), maize ESR gene family (Plant J 12:235-46, 1997), sorghum gamma-kafirin (PMB 32:1029-35, 1996); e.g., the Napin promoter], embryo specific promoters [e.g., rice OSH1 (Sato et al, Proc. Natl. Acad. Sci. USA, 93: 8117-8122), KNOX (Postma-Haarsma et al, Plant MoI. Biol. 39:257-71, 1999), rice oleosin (Wu et at, J. Biochem., 123:386, 1998)], and flower-specific promoters [e.g., AtPRP4, chalene synthase (chsA) (Van der Meer, et al., Plant MoI. Biol. 15, 95-109, 1990), LAT52 (Twell et al., MoI. Gen Genet. 217:240-245; 1989), apetala-3]. Also contemplated are root-specific promoters such as the ROOTP promoter described in Vissenberg K, et al. Plant Cell Physiol. 2005 January; 46(1):192-200.

[0206] The nucleic acid construct of some embodiments of the invention can further include an appropriate selectable marker and/or an origin of replication.

[0207] The nucleic acid construct of some embodiments of the invention can be utilized to stably or transiently transform plant cells. In stable transformation, the exogenous polynucleotide is integrated into the plant genome and as such it represents a stable and inherited trait. In transient transformation, the exogenous polynucleotide is expressed by the cell transformed but it is not integrated into the genome and as such it represents a transient trait.

[0208] When naked RNA or DNA is introduced into a cell, the polynucleotides may be synthesized using any method known in the art, including either enzymatic syntheses or solid-phase syntheses. These are especially useful in the case of short polynucleotide sequences with or without modifications as explained above. Equipment and reagents for executing solid-phase synthesis are commercially available from, for example, Applied Biosystems. Any other means for such synthesis may also be employed; the actual synthesis of the oligonucleotides is well within the capabilities of one skilled in the art and can be accomplished via established methodologies as detailed in, for example: Sambrook, J. and Russell, D. W. (2001), “Molecular Cloning: A Laboratory Manual”; Ausubel, R. M. et al., eds. (1994, 1989), “Current Protocols in Molecular Biology,” Volumes I-III, John Wiley & Sons, Baltimore, Md.; Perbal, B. (1988), “A Practical Guide to Molecular Cloning,” John Wiley & Sons, New York; and Gait, M. J., ed. (1984), “Oligonucleotide Synthesis”; utilizing solid-phase chemistry, e.g. cyanoethyl phosphoramidite followed by deprotection, desalting, and purification by, for example, an automated trityl-on method or HPLC.

[0209] There are various methods of introducing foreign genes into both monocotyledonous and dicotyledonous plants (Potrykus, L, Annu. Rev. Plant. Physiol, Plant. MoI. Biol. (1991) 42:205-225; Shimamoto et al., Nature (1989) 338:274-276).

[0210] The principle methods of causing stable integration of exogenous DNA into plant genomic DNA include two main approaches:

[0211] (i) Agrobacterium-mediated gene transfer (e.g., T-DNA using Agrobacterium tumefaciens or Agrobacterium rhizogenes); see for example, Klee et al. (1987) Annu. Rev. Plant Physiol. 38:467-486; Klee and Rogers in Cell Culture and Somatic Cell Genetics of Plants, Vol. 6, Molecular Biology of Plant Nuclear Genes, eds. Schell, J., and Vasil, L. K., Academic Publishers, San Diego, Calif. (1989) p. 2-25; Gatenby, in Plant Biotechnology, eds. Kung, S, and Arntzen, C. J., Butterworth Publishers, Boston, Mass. (1989) p. 93-112.

[0212] (ii) Direct DNA uptake: Paszkowski et al., in Cell Culture and Somatic Cell Genetics of Plants, Vol. 6, Molecular Biology of Plant Nuclear Genes eds. Schell, J., and Vasil, L. K., Academic Publishers, San Diego, Calif. (1989) p. 52-68; including methods for direct uptake of DNA into protoplasts, Toriyama, K. et al. (1988) Bio/Technology 6:1072-1074. DNA uptake induced by brief electric shock of plant cells: Zhang et al. Plant Cell Rep. (1988) 7:379-384. Fromm et al. Nature (1986) 319:791-793. DNA injection into plant cells or tissues by particle bombardment, Klein et al. Bio/Technology (1988) 6:559-563; McCabe et al. Bio/Technology (1988) 6:923-926; Sanford, Physiol. Plant. (1990) 79:206-209; by the use of micropipette systems: Neuhaus et al., Theor. Appl. Genet. (1987) 75:30-36; Neuhaus and Spangenberg, Physiol. Plant. (1990) 79:213-217; glass fibers or silicon carbide whisker transformation of cell cultures, embryos or callus tissue, U.S. Pat. No. 5,464,765 or by the direct incubation of DNA with germinating pollen, DeWet et al. in Experimental Manipulation of Ovule Tissue, eds. Chapman, G. P. and Mantell, S. H. and Daniels, W. Longman, London, (1985) p. 197-209; and Ohta, Proc. Natl. Acad. Sci. USA (1986) 83:715-719.

[0213] The Agrobacterium system includes the use of plasmid vectors that contain defined DNA segments that integrate into the plant genomic DNA. Methods of inoculation of the plant tissue vary depending upon the plant species and the Agrobacterium delivery system. A widely used approach is the leaf disc procedure which can be performed with any tissue explant that provides a good source for initiation of whole plant differentiation. See, e.g., Horsch et al. in Plant Molecular Biology Manual A5, Kluwer Academic Publishers, Dordrecht (1988) p. 1-9. A supplementary approach employs the Agrobacterium delivery system in combination with vacuum infiltration. The Agrobacterium system is especially viable in the creation of transgenic dicotyledonous plants.

[0214] According to a specific embodiment of the present invention, the exogenous polynucleotide is introduced into the plant by infecting the plant with a bacteria, such as using a floral dip transformation method (as described in further detail in Example 5, of the Examples section which follows).

[0215] There are various methods of direct DNA transfer into plant cells. In electroporation, the protoplasts are briefly exposed to a strong electric field. In microinjection, the DNA is mechanically injected directly into the cells using very small micropipettes. In microparticle bombardment, the DNA is adsorbed on microprojectiles such as magnesium sulfate crystals or tungsten particles, and the microprojectiles are physically accelerated into cells or plant tissues.

[0216] Following stable transformation plant propagation is exercised. The most common method of plant propagation is by seed. Regeneration by seed propagation, however, has the deficiency that due to heterozygosity there is a lack of uniformity in the crop, since seeds are produced by plants according to the genetic variances governed by Mendelian rules. Basically, each seed is genetically different and each will grow with its own specific traits. Therefore, it is preferred that the transformed plant be produced such that the regenerated plant has the identical traits and characteristics of the parent transgenic plant. For this reason it is preferred that the transformed plant be regenerated by micropropagation which provides a rapid, consistent reproduction of the transformed plants.

[0217] Micropropagation is a process of growing new generation plants from a single piece of tissue that has been excised from a selected parent plant or cultivar. The new generation plants which are produced are genetically identical to, and have all of the characteristics of, the original plant. Micropropagation allows mass production of quality plant material in a short period of time and offers a rapid multiplication of selected cultivars in the preservation of the characteristics of the original transgenic or transformed plant. The advantages of cloning plants are the speed of plant multiplication and the quality and uniformity of plants produced.

[0218] Micropropagation is a multi-stage procedure that requires alteration of culture medium or growth conditions between stages. Thus, the micropropagation process involves four basic stages: Stage one, initial tissue culturing; stage two, tissue culture multiplication; stage three, differentiation and plant formation; and stage four, greenhouse culturing and hardening. During stage one, initial tissue culturing, the tissue culture is established and certified contaminant-free. During stage two, the initial tissue culture is multiplied until a sufficient number of tissue samples are produced to meet production goals. During stage three, the tissue samples grown in stage two are divided and grown into individual plantlets. At stage four, the transformed plantlets are transferred to a greenhouse for hardening where the plants' tolerance to light is gradually increased so that it can be grown in the natural environment.

[0219] Although stable transformation is presently preferred, transient transformation of leaf cells, meristematic cells or the whole plant is also envisaged by the present invention.

[0220] Transient transformation can be effected by any of the direct DNA transfer methods described above or by viral infection using modified plant viruses.

[0221] Viruses that have been shown to be useful for the transformation of plant hosts include CaMV, Tobacco mosaic virus (TMV), brome mosaic virus (BMV) and Bean Common Mosaic Virus (BV or BCMV). Transformation of plants using plant viruses is described in U.S. Pat. No. 4,855,237 (bean golden mosaic virus; BGV), EP-A 67,553 (TMV), Japanese Published Application No. 63-14693 (TMV), EPA 194,809 (BV), EPA 278,667 (BV); and Gluzman, Y. et al., Communications in Molecular Biology: Viral Vectors, Cold Spring Harbor Laboratory, New York, pp. 172-189 (1988). Pseudovirus particles for use in expressing foreign DNA in many hosts, including plants are described in WO 87/06261. According to some embodiments of the invention, the virus used for transient transformations is avirulent and thus is incapable of causing severe symptoms such as reduced growth rate, mosaic, ring spots, leaf roll, yellowing, streaking, pox formation, tumor formation and pitting. A suitable avirulent virus may be a naturally occurring avirulent virus or an artificially attenuated virus. Virus attenuation may be effected by using methods well known in the art including, but not limited to, sub-lethal heating, chemical treatment or by directed mutagenesis techniques such as described, for example, by Kurihara and Watanabe (Molecular Plant Pathology 4:259-269, 2003), Galon et al. (1992), Atreya et al. (1992) and Huet et al. (1994).

[0222] Suitable virus strains can be obtained from available sources such as, for example, the American Type culture Collection (ATCC) or by isolation from infected plants. Isolation of viruses from infected plant tissues can be effected by techniques well known in the art such as described, for example by Foster and Tatlor, Eds. “Plant Virology Protocols From Virus Isolation to Transgenic Resistance (Methods in Molecular Biology (Humana Pr), VoI 81)”, Humana Press, 1998. Briefly, tissues of an infected plant believed to contain a high concentration of a suitable virus, preferably young leaves and flower petals, are ground in a buffer solution (e.g., phosphate buffer solution) to produce a virus infected sap which can be used in subsequent inoculations.

[0223] Construction of plant RNA viruses for the introduction and expression of non-viral exogenous polynucleotide sequences in plants is demonstrated by the above references as well as by Dawson, W. O. et al, Virology (1989) 172:285-292; Takamatsu et al. EMBO J. (1987) 6:307-311; French et al. Science (1986) 231:1294-1297; Takamatsu et al. FEBS Letters (1990) 269:73-76; and U.S. Pat. No. 5,316,931.

[0224] When the virus is a DNA virus, suitable modifications can be made to the virus itself. Alternatively, the virus can first be cloned into a bacterial plasmid for ease of constructing the desired viral vector with the foreign DNA. The virus can then be excised from the plasmid. If the virus is a DNA virus, a bacterial origin of replication can be attached to the viral DNA, which is then replicated by the bacteria. Transcription and translation of this DNA will produce the coat proteins which will encapsidate the viral DNA. If the virus is an RNA virus, the virus is generally cloned as a cDNA and inserted into a plasmid. The plasmid is then used to make all of the constructions. The RNA virus is then produced by transcribing the viral sequence of the plasmid and translation of the viral genes to produce the coat protein(s) which encapsidate the viral RNA.

[0225] In one embodiment, a plant viral nucleic acid is provided in which the native coat protein coding sequence has been deleted from a viral nucleic acid, a non-native plant viral coat protein coding sequence and a non-native promoter, preferably the subgenomic promoter of the non-native coat protein coding sequence, capable of expression in the plant host, packaging of the recombinant plant viral nucleic acid, and ensuring a systemic infection of the host by the recombinant plant viral nucleic acid, has been inserted. Alternatively, the coat protein gene may be inactivated by insertion of the non-native nucleic acid sequence within it, such that a protein is produced. The recombinant plant viral nucleic acid may contain one or more additional non-native subgenomic promoters. Each non-native subgenomic promoter is capable of transcribing or expressing adjacent genes or nucleic acid sequences in the plant host and incapable of recombination with each other and with native subgenomic promoters. Non-native (foreign) nucleic acid sequences may be inserted adjacent the native plant viral subgenomic promoter or the native and a non-native plant viral subgenomic promoters if more than one nucleic acid sequence is included. The non-native nucleic acid sequences are transcribed or expressed in the host plant under control of the subgenomic promoter to produce the desired products.

[0226] In a second embodiment, a recombinant plant viral nucleic acid is provided as in the first embodiment except that the native coat protein coding sequence is placed adjacent one of the non-native coat protein subgenomic promoters instead of a non-native coat protein coding sequence.

[0227] In a third embodiment, a recombinant plant viral nucleic acid is provided in which the native coat protein gene is adjacent its subgenomic promoter and one or more non-native subgenomic promoters have been inserted into the viral nucleic acid. The inserted non-native subgenomic promoters are capable of transcribing or expressing adjacent genes in a plant host and are incapable of recombination with each other and with native subgenomic promoters. Non-native nucleic acid sequences may be inserted adjacent the non-native subgenomic plant viral promoters such that the sequences are transcribed or expressed in the host plant under control of the subgenomic promoters to produce the desired product.

[0228] In a fourth embodiment, a recombinant plant viral nucleic acid is provided as in the third embodiment except that the native coat protein coding sequence is replaced by a non-native coat protein coding sequence.

[0229] The viral vectors are encapsidated by the coat proteins encoded by the recombinant plant viral nucleic acid to produce a recombinant plant virus. The recombinant plant viral nucleic acid or recombinant plant virus is used to infect appropriate host plants. The recombinant plant viral nucleic acid is capable of replication in the host, systemic spread in the host, and transcription or expression of foreign gene(s) (isolated nucleic acid) in the host to produce the desired sequence.

[0230] In addition to the above, the nucleic acid molecule of the present invention can also be introduced into a chloroplast genome thereby enabling chloroplast expression.

[0231] A technique for introducing exogenous nucleic acid sequences to the genome of the chloroplasts is known. This technique involves the following procedures. First, plant cells are chemically treated so as to reduce the number of chloroplasts per cell to about one. Then, the exogenous nucleic acid is introduced via particle bombardment into the cells with the aim of introducing at least one exogenous nucleic acid molecule into the chloroplasts. The exogenous nucleic acid is selected such that it is integratable into the chloroplast's genome via homologous recombination which is readily effected by enzymes inherent to the chloroplast. To this end, the exogenous nucleic acid includes, in addition to a gene of interest, at least one nucleic acid stretch which is derived from the chloroplast's genome. In addition, the exogenous nucleic acid includes a selectable marker, which serves by sequential selection procedures to ascertain that all or substantially all of the copies of the chloroplast genomes following such selection will include the exogenous nucleic acid. Further details relating to this technique are found in U.S. Pat. Nos. 4,945,050; and 5,693,507 which are incorporated herein by reference.

[0232] Regardless of the method of transformation, propagation or regeneration, the present invention also contemplates a transgenic plant exogenously expressing the polynucleotide of the invention.

[0233] According to a specific embodiment, the transgenic plant exogenously expresses a polynucleotide having a nucleic acid sequence at least 80%, 85%, 90%, 95% or even 100% identical to SEQ ID NOs: 1-216, 217-222, 223-227, 264-416, 417-421, 458-614, 615-626, 627-638, 639 or 640 (Tables 1-8), wherein said nucleic acid sequence is capable of regulating abiotic stress tolerance (e.g., salinity, heat stress or drought) of the plant.

[0234] According to further embodiments, the exogenous polynucleotide encodes a precursor of said nucleic acid sequence.

[0235] According to yet further embodiments, the stem-loop precursor is at least 60%, 65%, 70%, 75%, 80%, 85%, 90%, 95% or even 100% identical to SEQ ID NO: 217-222, 417-421, 458-614, 627-638 or 640 (precursor sequences of Tables 1-8) but importantly comprises a sequence that is at least 90% identical to SEQ ID NOs: 1-216, 217-222, 223-227, 264-416, 615-626 or 639 (Tables 1-8 including all the mature sequences). More specifically the exogenous polynucleotide is selected from the group consisting of SEQ ID NO: 1-216, 217-222, 223-227, 264-416, 417-421, 458-614, 615-626, 627-638, 639 or 640.

[0236] Alternatively, there is provided a transgenic plant exogenously expressing a polynucleotide which downregulates an activity or expression of a gene encoding an RNAi molecule having a nucleic acid sequence selected from the group consisting of SEQ ID NOs: 1-100, 615-626, 627-638, 639 or 640.

[0237] More specifically, the transgenic plant expresses the nucleic acid agent of Tables 14-19. Even more specifically, to improve the agricultural traits of the transgenic plant, it expresses a nucleic acid agent of Tables 14, 15a, 16a and 17-19.

[0238] Also provided are transgenic plants over expressing the target gene of the invention such as exogenously expressing polypeptide sequences which comprise amino acid sequence selected from the group consisting of SEQ ID NOs: 1816-1860, 1870-1891, 1916-1920, 1925-1930, 1940-1951, 1964-2009, 2183-2326, 2500-2762, 3041-3043, 3164-3174, 3270-3312, 3324-3457, 3945-3949 (targets of upregulated dsRNAs of Tables 20-22) or homologs/orthologs of same (at least about 60%, 65%, 70%, 75%, 80%, 85%, 90%, 95% or higher level of homology as described above).

[0239] Accordingly, the present teachings also contemplate nucleic acid expression constructs and plants which comprise the same expressing polynucleotide sequences at least about 60%, 65%, 70%, 75%, 80%, 85%, 90%, 95% or higher level of identity to SEQ ID NOs: 2015-2052, 2062-2079, 2102-2105, 2110, 2117-2125, 2137-2177, 2355-2477, 3970-4184, 4419-4421, 4528-4539, 4625-4660, 4671-4786, 5214-5218 (targets of upregulated dsRNAs of Tables 20-22).

[0240] Also contemplated are transgenic plants which express any of the polynucleotide or polypeptide sequences of the present invention (SEQ ID NOs: 1-640, 877-886, 893-913, 932-1012, 1226-1535, 1617-5237 and homologs thereof). This is important for analyzing the significance of those sequences in regulating abiotic stress tolerance and biomass, NUE, vigor or yield.

[0241] Also contemplated are hybrids of the above described transgenic plants. A “hybrid plant” refers to a plant or a part thereof resulting from a cross between two parent plants, wherein one parent is a genetically engineered plant of the invention (transgenic plant expressing an exogenous RNAi sequence or a precursor thereof). Such a cross can occur naturally by, for example, sexual reproduction, or artificially by, for example, in vitro nuclear fusion. Methods of plant breeding are well-known and within the level of one of ordinary skill in the art of plant biology.

[0242] Since abiotic stress tolerance, nitrogen use efficiency as well as yield, vigor or biomass of the plant can involve multiple genes acting additively or in synergy (see, for example, in Quesda et al., Plant Physiol. 130:951-063, 2002), the invention also envisages expressing a plurality of exogenous polynucleotides in a single host plant to thereby achieve superior effect on abiotic stress tolerance, efficiency of nitrogen use, yield, vigor and biomass of the plant.

[0243] Expressing a plurality of exogenous polynucleotides in a single host plant can be effected by co-introducing multiple nucleic acid constructs, each including a different exogenous polynucleotide, into a single plant cell. The transformed cell can then be regenerated into a mature plant using the methods described hereinabove. Alternatively, expressing a plurality of exogenous polynucleotides in a single host plant can be effected by co-introducing into a single plant-cell a single nucleic-acid construct including a plurality of different exogenous polynucleotides. Such a construct can be designed with a single promoter sequence which can transcribe a polycistronic messenger RNA including all the different exogenous polynucleotide sequences. Alternatively, the construct can include several promoter sequences each linked to a different exogenous polynucleotide sequence.

[0244] The plant cell transformed with the construct including a plurality of different exogenous polynucleotides can be regenerated into a mature plant, using the methods described hereinabove.

[0245] Alternatively, expressing a plurality of exogenous polynucleotides can be effected by introducing different nucleic acid constructs, including different exogenous polynucleotides, into a plurality of plants. The regenerated transformed plants can then be cross-bred and resultant progeny selected for superior yield or fiber traits as described above, using conventional plant breeding techniques.

[0246] Expression of the miRNAs/siRNAs of the present invention or precursors thereof can be qualified using methods which are well known in the art such as those involving gene amplification e.g., PCR or RT-PCR or Northern blot or in-situ hybridization.

[0247] According to some embodiments of the invention, the plant expressing the exogenous polynucleotide(s) is grown under stress (abiotic) or normal conditions (e.g., biotic conditions and/or abiotic conditions with sufficient water, optimal temperature and salt). Such conditions, which depend on the plant being grown, are known to those skilled in the art of agriculture, and are further, described above. Examples 7-9 hereinbelow provides specific assays for measuring abiotic stress tolerance.

[0248] According to some embodiments of the invention, the method further comprises growing the plant expressing the exogenous polynucleotide(s) under abiotic stress or nitrogen limiting conditions. Non-limiting examples of abiotic stress conditions include, water deprivation, drought, excess of water (e.g., flood, waterlogging), freezing, low temperature, high temperature, strong winds, heavy metal toxicity, anaerobiosis, nutrient deficiency, nutrient excess, salinity, atmospheric pollution, intense light, insufficient light, or UV irradiation, etiolation and atmospheric pollution.

[0249] Thus, the invention encompasses plants exogenously expressing the polynucleotide(s), the nucleic acid constructs of the invention.

[0250] Methods of determining the level in the plant of the RNA transcribed from the exogenous polynucleotide are well known in the art and include, for example, Northern blot analysis, reverse transcription polymerase chain reaction (RT-PCR) analysis (including quantitative, semi-quantitative or real-time RT-PCR) and RNA-m situ hybridization.

[0251] The sequence information and annotations uncovered by the present teachings can be harnessed in favor of classical breeding. Thus, sub-sequence data of those polynucleotides described above, can be used as markers for marker assisted selection (MAS), in which a marker is used for indirect selection of a genetic determinant or determinants of a trait of interest (e.g., tolerance to abiotic stress). Nucleic acid data of the present teachings (DNA or RNA sequence) may contain or be linked to polymorphic sites or genetic markers on the genome such as restriction fragment length polymorphism (RFLP), microsatellites and single nucleotide polymorphism (SNP), DNA fingerprinting (DFP), amplified fragment length polymorphism (AFLP), expression level polymorphism, and any other polymorphism at the DNA or RNA sequence.

[0252] Examples of marker assisted selections include, but are not limited to, selection for a morphological trait (e.g., a gene that affects form, coloration, male sterility or resistance such as the presence or absence of awn, leaf sheath coloration, height, grain color, aroma of rice); selection for a biochemical trait (e.g., a gene that encodes a protein that can be extracted and observed; for example, isozymes and storage proteins); selection for a biological trait (e.g., pathogen races or insect biotypes based on host pathogen or host parasite interaction can be used as a marker since the genetic constitution of an organism can affect its susceptibility to pathogens or parasites).

[0253] The polynucleotides described hereinabove can be used in a wide range of economical plants, in a safe and cost effective manner.

[0254] Plant lines exogenously expressing the polynucleotide of the invention can be screened to identify those that show the greatest increase of the desired plant trait.

[0255] Thus, according to an additional embodiment of the present invention, there is provided a method of evaluating a trait of a plant, the method comprising: (a) expressing in a plant or a portion thereof the nucleic acid construct; and (b) evaluating a trait of a plant as compared to a wild type plant of the same type; thereby evaluating the trait of the plant.

[0256] Thus, the effect of the transgene (the exogenous polynucleotide) on different plant characteristics may be determined any method known to one of ordinary skill in the art.

[0257] Thus, for example, tolerance to abiotic stress conditions may be compared in transformed plants {i.e., expressing the transgene) compared to non-transformed (wild type) plants exposed to the same stress conditions (e.g. water deprivation, salt stress e.g. salinity, suboptimal temperature, osmotic stress, and the like), using the following assays.

[0258] Methods of qualifying plants as being tolerant or having improved tolerance to abiotic stress or limiting nitrogen levels are well known in the art and are further described hereinbelow.

[0259] Fertilizer use efficiency—To analyze whether the transgenic plants are more responsive to fertilizers, plants are grown in agar plates or pots with a limited amount of fertilizer, as described, for example, in Yanagisawa et al (Proc Natl Acad Sci USA. 2004; 101:7833-8). The plants are analyzed for their overall size, time to flowering, yield, protein content of shoot and/or grain. The parameters checked are the overall size of the mature plant, its wet and dry weight, the weight of the seeds yielded, the average seed size and the number of seeds produced per plant. Other parameters that may be tested are: the chlorophyll content of leaves (as nitrogen plant status and the degree of leaf verdure is highly correlated), amino acid and the total protein content of the seeds or other plant parts such as leaves or shoots, oil content, etc. Similarly, instead of providing nitrogen at limiting amounts, phosphate or potassium can be added at increasing concentrations. Again, the same parameters measured are the same as listed above. In this way, nitrogen use efficiency (NUE), phosphate use efficiency (PUE) and potassium use efficiency (KUE) are assessed, checking the ability of the transgenic plants to thrive under nutrient restraining conditions.

[0260] Nitrogen use efficiency—To analyze whether the transgenic plants (e.g., Arabidopsis plants) are more responsive to nitrogen, plant are grown in 0.75-3 millimolar (mM, nitrogen deficient conditions) or 6-10 mM (optimal nitrogen concentration). Plants are allowed to grow for additional 25 days or until seed production. The plants are then analyzed for their overall size, time to flowering, yield, protein content of shoot and/or grain/seed production. The parameters checked can be the overall size of the plant, wet and dry weight, the weight of the seeds yielded, the average seed size and the number of seeds produced per plant. Other parameters that may be tested are: the chlorophyll content of leaves (as nitrogen plant status and the degree of leaf greenness is highly correlated), amino acid and the total protein content of the seeds or other plant parts such as leaves or shoots and oil content. Transformed plants not exhibiting substantial physiological and/or morphological effects, or exhibiting higher measured parameters levels than wild-type plants, are identified as nitrogen use efficient plants.

[0261] Nitrogen Use efficiency assay using plantlets—The assay is done according to Yanagisawa-S. et al. with minor modifications (“Metabolic engineering with Dof1 transcription factor in plants: Improved nitrogen assimilation and growth under low-nitrogen conditions” Proc. Natl. Acad. Sci. USA 101, 7833-7838). Briefly, transgenic plants which are grown for 7-10 days in 0.5×MS [Murashige-Skoog] supplemented with a selection agent are transferred to two nitrogen-limiting conditions: MS media in which the combined nitrogen concentration (NH₄NO₃ and KNO₃) was 0.75 mM (nitrogen deficient conditions) or 6-15 mM (optimal nitrogen concentration). Plants are allowed to grow for additional 30-40 days and then photographed, individually removed from the Agar (the shoot without the roots) and immediately weighed (fresh weight) for later statistical analysis. Constructs for which only T1 seeds are available are sown on selective media and at least 20 seedlings (each one representing an independent transformation event) are carefully transferred to the nitrogen-limiting media. For constructs for which T2 seeds are available, different transformation events are analyzed. Usually, 20 randomly selected plants from each event are transferred to the nitrogen-limiting media allowed to grow for 3-4 additional weeks and individually weighed at the end of that period. Transgenic plants are compared to control plants grown in parallel under the same conditions. Mock-transgenic plants expressing the uidA reporter gene (GUS) under the same promoter or transgenic plants carrying the same promoter but lacking a reporter gene are used as control.

[0262] Nitrogen determination—The procedure for N (nitrogen) concentration determination in the structural parts of the plants involves the potassium persulfate digestion method to convert organic N to NO₃⁻ (Purcell and King 1996 Argon. J. 88:111-113, the modified Cd⁻ mediated reduction of NO₃⁻ to NO₂⁻ (Vodovotz 1996 Biotechniques 20:390-394) and the measurement of nitrite by the Griess assay (Vodovotz 1996, supra). The absorbance values are measured at 550 nm against a standard curve of NaNO₂. The procedure is described in details in Samonte et al. 2006 Agron. J. 98:168-176.

[0263] Tolerance to abiotic stress (e.g. tolerance to drought or salinity) can be evaluated by determining the differences in physiological and/or physical condition, including but not limited to, vigor, growth, size, or root length, or specifically, leaf color or leaf area size of the transgenic plant compared to a non-modified plant of the same species grown under the same conditions. Other techniques for evaluating tolerance to abiotic stress include, but are not limited to, measuring chlorophyll fluorescence, photosynthetic rates and gas exchange rates. Further assays for evaluating tolerance to abiotic stress are provided hereinbelow and in the Examples section which follows.

[0264] Drought tolerance assay—Soil-based drought screens are performed with plants overexpressing the polynucleotides detailed above. Seeds from control Arabidopsis plants, or other transgenic plants overexpressing nucleic acid of the invention are germinated and transferred to pots. Drought stress is obtained after irrigation is ceased. Transgenic and control plants are compared to each other when the majority of the control plants develop severe wilting. Plants are re-watered after obtaining a significant fraction of the control plants displaying a severe wilting. Plants are ranked comparing to controls for each of two criteria: tolerance to the drought conditions and recovery (survival) following re-watering.

[0265] Quantitative parameters of tolerance measured include, but are not limited to, the average wet and dry weight, growth rate, leaf size, leaf coverage (overall leaf area), the weight of the seeds yielded, the average seed size and the number of seeds produced per plant. Transformed plants not exhibiting substantial physiological and/or morphological effects, or exhibiting higher biomass than wild-type plants, are identified as drought stress tolerant plants

[0266] Salinity tolerance assay—Transgenic plants with tolerance to high salt concentrations are expected to exhibit better germination, seedling vigor or growth in high salt. Salt stress can be effected in many ways such as, for example, by irrigating the plants with a hyperosmotic solution, by cultivating the plants hydroponically in a hyperosmotic growth solution (e.g., Hoagland solution with added salt), or by culturing the plants in a hyperosmotic growth medium [e.g., 50% Murashige-Skoog medium (MS medium) with added salt]. Since different plants vary considerably in their tolerance to salinity, the salt concentration in the irrigation water, growth solution, or growth medium can be adjusted according to the specific characteristics of the specific plant cultivar or variety, so as to inflict a mild or moderate effect on the physiology and/or morphology of the plants (for guidelines as to appropriate concentration see, Bernstein and Kafkafi, Root Growth Under Salinity Stress In: Plant Roots, The Hidden Half 3rd ed. Waisel Y, Eshel A and Kafkafi U. (editors) Marcel Dekker Inc., New York, 2002, and reference therein).

[0267] For example, a salinity tolerance test can be performed by irrigating plants at different developmental stages with increasing concentrations of sodium chloride (for example 50 mM, 150 mM, 300 mM NaCl) applied from the bottom and from above to ensure even dispersal of salt. Following exposure to the stress condition the plants are frequently monitored until substantial physiological and/or morphological effects appear in wild type plants. Thus, the external phenotypic appearance, degree of chlorosis and overall success to reach maturity and yield progeny are compared between control and transgenic plants. Quantitative parameters of tolerance measured include, but are not limited to, the average wet and dry weight, growth rate, leaf size, leaf coverage (overall leaf area), the weight of the seeds yielded, the average seed size and the number of seeds produced per plant. Transformed plants not exhibiting substantial physiological and/or morphological effects, or exhibiting higher biomass than wild-type plants, are identified as abiotic stress tolerant plants.

[0268] Osmotic tolerance test—Osmotic stress assays (including sodium chloride and PEG assays) are conducted to determine if an osmotic stress phenotype was sodium chloride-specific or if it was a general osmotic stress related phenotype. Plants which are tolerant to osmotic stress may have more tolerance to drought and/or freezing. For salt and osmotic stress experiments, the medium is supplemented for example with 50 mM, 100 mM, 200 mM NaCl or 15%, 20% or 25% PEG.

[0269] Cold stress tolerance—One way to analyze cold stress is as follows. Mature (25 day old) plants are transferred to 4° C. chambers for 1 or 2 weeks, with constitutive light. Later on plants are moved back to greenhouse. Two weeks later damages from chilling period, resulting in growth retardation and other phenotypes, are compared between control and transgenic plants, by measuring plant weight (wet and dry), and by comparing growth rates measured as time to flowering, plant size, yield, and the like.

[0270] Heat stress tolerance—One way to measure heat stress tolerance is by exposing the plants to temperatures above 34° C. for a certain period. Plant tolerance is examined after transferring the plants back to 22° C. for recovery and evaluation after 5 days relative to internal controls (non-transgenic plants) or plants not exposed to neither cold or heat stress.

[0271] The biomass, vigor and yield of the plant can also be evaluated using any method known to one of ordinary skill in the art. Thus, for example, plant vigor can be calculated by the increase in growth parameters such as leaf area, fiber length, rosette diameter, plant fresh weight and the like per time.

[0272] As mentioned, the increase of plant yield can be determined by various parameters. For example, increased yield of rice may be manifested by an increase in one or more of the following: number of plants per growing area, number of panicles per plant, number of spikelets per panicle, number of flowers per panicle, increase in the seed filling rate, increase in thousand kernel weight (1000-weight), increase oil content per seed, increase starch content per seed, among others. An increase in yield may also result in modified architecture, or may occur because of modified architecture. Similarly, increased yield of soybean may be manifested by an increase in one or more of the following: number of plants per growing area, number of pods per plant, number of seeds per pod, increase in the seed filling rate, increase in thousand seed weight (1000-weight), reduce pod shattering, increase oil content per seed, increase protein content per seed, among others. An increase in yield may also result in modified architecture, or may occur because of modified architecture.

[0273] Thus, the present invention is of high agricultural value for increasing tolerance of plants to abiotic stress as well as promoting the yield, biomass and vigor of commercially desired crops.

[0274] According to another embodiment of the present invention, there is provided a food or feed comprising the plants or a portion thereof of the present invention.

[0275] In a further aspect the invention, the transgenic plants of the present invention or parts thereof are comprised in a food or feed product (e.g., dry, liquid, paste). A food or feed product is any ingestible preparation containing the transgenic plants, or parts thereof, of the present invention, or preparations made from these plants. Thus, the plants or preparations are suitable for human (or animal) consumption, i.e. the transgenic plants or parts thereof are more readily digested. Feed products of the present invention further include a oil or a beverage adapted for animal consumption.

[0276] It will be appreciated that the transgenic plants, or parts thereof, of the present invention may be used directly as feed products or alternatively may be incorporated or mixed with feed products for consumption. Furthermore, the food or feed products may be processed or used as is. Exemplary feed products comprising the transgenic plants, or parts thereof, include, but are not limited to, grains, cereals, such as oats, e.g. black oats, barley, wheat, rye, sorghum, corn, vegetables, leguminous plants, especially soybeans, root vegetables and cabbage, or green forage, such as grass or hay.

[0277] As used herein the term “about” refers to ±10%.

[0278] The terms “comprises”, “comprising”, “includes”, “including”, “having” and their conjugates mean “including but not limited to”.

[0279] The term “consisting of means “including and limited to”.

[0280] The term “consisting essentially of” means that the composition, method or structure may include additional ingredients, steps and/or parts, but only if the additional ingredients, steps and/or parts do not materially alter the basic and novel characteristics of the claimed composition, method or structure.

[0281] As used herein, the singular form “a”, “an” and “the” include plural references unless the context clearly dictates otherwise. For example, the term “a compound” or “at least one compound” may include a plurality of compounds, including mixtures thereof.

[0282] Throughout this application, various embodiments of this invention may be presented in a range format. It should be understood that the description in range format is merely for convenience and brevity and should not be construed as an inflexible limitation on the scope of the invention. Accordingly, the description of a range should be considered to have specifically disclosed all the possible subranges as well as individual numerical values within that range. For example, description of a range such as from 1 to 6 should be considered to have specifically disclosed subranges such as from 1 to 3, from 1 to 4, from 1 to 5, from 2 to 4, from 2 to 6, from 3 to 6 etc., as well as individual numbers within that range, for example, 1, 2, 3, 4, 5, and 6.

[0283] Whenever a numerical range is indicated herein, it is meant to include any cited numeral (fractional or integral) within the indicated range. The phrases “ranging/ranges between” a first indicate number and a second indicate number and “ranging/ranges from” a first indicate number “to” a second indicate number are used herein interchangeably and are meant to include the first and second indicated numbers and all the fractional and integral numerals therebetween.

[0284] As used herein the term “method” refers to manners, means, techniques and procedures for accomplishing a given task including, but not limited to, those manners, means, techniques and procedures either known to, or readily developed from known manners, means, techniques and procedures by practitioners of the chemical, pharmacological, biological, biochemical and medical arts.

[0285] It is appreciated that certain features of the invention, which are, for clarity, described in the context of separate embodiments, may also be provided in combination in a single embodiment. Conversely, various features of the invention, which are, for brevity, described in the context of a single embodiment, may also be provided separately or in any suitable subcombination or as suitable in any other described embodiment of the invention. Certain features described in the context of various embodiments are not to be considered essential features of those embodiments, unless the embodiment is inoperative without those elements.

[0286] Various embodiments and aspects of the present invention as delineated hereinabove and as claimed in the claims section below find experimental support in the following examples.

### EXAMPLES

[0287] Reference is now made to the following examples, which together with the above descriptions illustrate some embodiments of the invention in a non limiting fashion.

[0288] Generally, the nomenclature used herein and the laboratory procedures utilized in the present invention include molecular, biochemical, microbiological and recombinant DNA techniques. Such techniques are thoroughly explained in the literature. See, for example, “Molecular Cloning: A laboratory Manual” Sambrook et al., (1989); “Current Protocols in Molecular Biology” Volumes I-III Ausubel, R. M., ed. (1994); Ausubel et al., “Current Protocols in Molecular Biology”, John Wiley and Sons, Baltimore, Md. (1989); Perbal, “A Practical Guide to Molecular Cloning”, John Wiley & Sons, New York (1988); Watson et al., “Recombinant DNA”, Scientific American Books, New York; Birren et al. (eds) “Genome Analysis: A Laboratory Manual Series”, Vols. 1-4, Cold Spring Harbor Laboratory Press, New York (1998); methodologies as set forth in U.S. Pat. Nos. 4,666,828; 4,683,202; 4,801,531; 5,192,659 and 5,272,057; “Cell Biology: A Laboratory Handbook”, Volumes I-III Cellis, J. E., ed. (1994); “Current Protocols in Immunology” Volumes I-III Coligan J. E., ed. (1994); Stites et al. (eds), “Basic and Clinical Immunology” (8th Edition), Appleton & Lange, Norwalk, Conn. (1994); Mishell and Shiigi (eds), “Selected Methods in Cellular Immunology”, W. H. Freeman and Co., New York (1980); available immunoassays are extensively described in the patent and scientific literature, see, for example, U.S. Pat. Nos. 3,791,932; 3,839,153; 3,850,752; 3,850,578; 3,853,987; 3,867,517; 3,879,262; 3,901,654; 3,935,074; 3,984,533; 3,996,345; 4,034,074; 4,098,876; 4,879,219; 5,011,771 and 5,281,521; “Oligonucleotide Synthesis” Gait, M. J., ed. (1984); “Nucleic Acid Hybridization” Hames, B. D., and Higgins S. J., eds. (1985); “Transcription and Translation” Hames, B. D., and Higgins S. J., Eds. (1984); “Animal Cell Culture” Freshney, R. I., ed. (1986); “Immobilized Cells and Enzymes” IRL Press, (1986); “A Practical Guide to Molecular Cloning” Perbal, B., (1984) and “Methods in Enzymology” Vol. 1-317, Academic Press; “PCR Protocols: A Guide To Methods And Applications”, Academic Press, San Diego, Calif. (1990); Marshak et al., “Strategies for Protein Purification and Characterization—A Laboratory Course Manual” CSHL Press (1996); all of which are incorporated by reference as if fully set forth herein. Other general references are provided throughout this document. The procedures therein are believed to be well known in the art and are provided for the convenience of the reader. All the information contained therein is incorporated herein by reference.

### Example 1

### Differential Expression of miRNAs in Maize Plant Under Optimal Versus Abiotic Stress Conditions

[0289] Experimental Procedures

[0290] Plant Material

[0291] Corn seeds were obtained from Galil seeds (Israel). Corn variety GSO308 was used in all experiments. Plants were grown at 24° C. under a 16 hr light: 8 hr dark regime.

[0292] Drought Induction

[0293] Corn seeds were germinated and grown at 22° C. in soil under normal conditions for 3-4 weeks. Seedlings were then used for experimental assays of each of the following abiotic stresses: drought, salinity and heat shock. For drought induction, irrigation of the stress group was completely stopped for four or six days.

[0294] Salt Induction

[0295] For salinity induction, irrigation with regular water was substituted by irrigation with 300 mM NaCl solution in the stress group, for overall 2-3 irrigations in a period of four or six days.

[0296] Heat Induction

[0297] For induction of heat shock, the stress group plants were exposed to a high temperature (37° C.) for one hour.

[0298] For all stress analyses, tissue samples from both experimental groups are then used for RNA analysis, as described below.

[0299] Total RNA Extraction

[0300] Total RNA of leaf or root samples from four to eight biological repeats were extracted using the mirVana™ kit (Ambion, Austin, Tex.) by pooling 3-4 plants to one biological repeat. RNA samples from the two experimental groups of each assay were then loaded onto a microarray for small RNA expression comparison and subsequent identification of differential small RNAs, as described below.

[0301] Microarray Design

[0302] Custom microarrays were manufactured by Agilent Technologies by in situ synthesis. The first generation microarray consisted of a total of 13619 non-redundant DNA probes, the majority of which arose from deep sequencing data and included different small RNA molecules (i.e. miRNA, siRNA and predicted small RNA sequences), with each probe being printed once. An in-depth analysis of the first generation microarray, which included hybridization experiments as well as structure and orientation verifications on all its small RNAs, resulted in the formation of an improved, second generation, microarray. The second generation microarray consists of a total 4721 non-redundant DNA 45-nucleotide long probes for all known plant small RNAs, with 912 sequences (19.32%) from Sanger version 15 and the rest (3809), encompassing miRNAs (968=20.5%), siRNAs (1626=34.44%) and predicted small RNA sequences (1215=25.74%), from deep sequencing data accumulated by the inventors, with each probe being printed in triplicate. An additional microarray, consisting of 707 sequences from Sanger version 15 was also used in this invention.

[0303] Results

[0304] Wild type maize plants were allowed to grow at standard, optimal conditions or stress conditions for a period of time as specified above, at the end of which they were evaluated for stress tolerance. Three to four plants from each group were grouped as a biological repeat. Four to eight biological repeats were obtained for each group, and RNA was extracted from leaf or root tissue. The expression level of the maize small RNAs was analyzed by high throughput microarray to identify small RNAs that were differentially expressed between the experimental groups.

[0305] Tables 1-5 below present sequences that were found to be differentially expressed in corn grown under drought conditions (lasting four or six days) compared to optimal growth conditions. To clarify, the sequence of an up-regulated miRNA is induced under stress conditions and the sequence of a down-regulated miRNA is repressed under stress conditions.

TABLE 1
Differentially Expressed Small RNAs in Plants Growing
under Drought (4 days) versus Optimal Conditions.

| | Mature | Stem | | |
|---|---|---|---|---|
| | Sequence/ | Loop/ | | |
| | SEQ ID | SEQ ID | | Leaf |
| Mir Name | NO: | NO: | Direction | 4 d |
| Predicted folded 24- | 101 | | up | 2.65 |
| nts-long seq 52214 | | | | |
| Predicted folded 24- | 1 | | down | 2.64 |
| nts-long seq 52255 | | | | |
| Predicted siRNA 55507 | 102 | | up | 4.82 |
| Predicted siRNA 55629 | 103 | | up | 4.97 |
| Predicted siRNA 55869 | 104 | | up | 2.23 |
| Predicted siRNA 55937 | 2 | | down | 2.93 |
| Predicted siRNA 55979 | 105 | | up | 2.58 |
| Predicted siRNA 56759 | 106 | | up | 2.22 |
| Predicted siRNA 57049 | 107 | | up | 2.14 |
| Predicted siRNA 57283 | 108 | | up | 2.52 |
| Predicted siRNA 58170 | 3 | | down | 2.22 |
| Predicted zma mir 47934 | 4 | | down | 2.16 |
| Predicted zma mir 48043 | 109 | | up | 2.04 |
| Predicted zma mir 48120 | 5 | | down | 7.44 |
| Predicted zma mir 48193 | 110 | | up | 3.19 |
| Predicted zma mir 48408 | 6 | | down | 3.58 |
| Predicted zma mir 48451 | 7 | | down | 2.69 |
| Predicted zma mir 48462 | 8 | | down | 3.4 |
| Predicted zma mir 48514 | 111 | | up | 2.2 |
| Predicted zma mir 48520 | 9 | | down | 2.12 |
| Predicted zma mir 48669 | 10 | | down | 2.78 |
| Predicted zma mir 48682 | 11 | | down | 3.11 |
| Predicted zma mir 48841 | 12 | | down | 4.52 |
| Predicted zma mir 48966 | 13 | | down | 3.02 |
| Predicted zma mir 49156 | 14 | | down | 2.08 |
| Predicted zma mir 49199 | 15 | | down | 2.04 |
| Predicted zma mir 50109 | 112 | | up | 2.18 |
| Predicted zma mir 50425 | 113 | | up | 2.31 |
| tae-miR1125 | 114 | 217 | up | 2.07 |

TABLE 2
Differentially Expressed Small RNAs in Plants Growing
under Drought (6 days) versus Optimal Conditions.

| | Mature | | | | Fold | Fold |
|---|---|---|---|---|---|---|
| | Sequence/ | Stem Loop/ | old | | Change | Change |
| Mir Name | SEQ ID NO: | SEQ ID NO: | numbers | Direction | Leaf 6 d | Root 6 d |
| ath-miR164c | 115 | 218 | 218 | up | 1.94 | 1.51 |
| osa- | 116 | 219 | 219 | up | 3.69 | |
| miR2907a | | | | | | |
| Predicted | 117 | | | up | 3.94 | |
| folded 24- | | | | | | |
| nts-long seq | | | | | | |
| 52214 | | | | | | |
| Predicted | 16 | | | down | 2.95 | |
| folded 24- | | | | | | |
| nts-long seq | | | | | | |
| 52255 | | | | | | |
| Predicted | 118 | | | up | 2.09 | |
| folded 24- | | | | | | |
| nts-long seq | | | | | | |
| 52285 | | | | | | |
| Predicted | 119 | | | up | 2.99 | |
| folded 24- | | | | | | |
| nts-long seq | | | | | | |
| 52953 | | | | | | |
| Predicted | 120 | | | up | 4.24 | |
| folded 24- | | | | | | |
| nts-long seq | | | | | | |
| 53693 | | | | | | |
| Predicted | 121 | | | up | 9.27 | |
| siRNA 55507 | | | | | | |
| Predicted | 122 | | | up | 8.68 | |
| siRNA 55629 | | | | | | |
| Predicted | 123 | | | up | 2.93 | |
| siRNA 55775 | | | | | | |
| Predicted | 124 | | | up | 3.08 | |
| siRNA 55869 | | | | | | |
| Predicted | 17 | | | down | 2.82 | |
| siRNA 55937 | | | | | | |
| Predicted | 18 | | | down | 2.86 | |
| siRNA 56066 | | | | | | |
| Predicted | 125 | | | up | 2.69 | |
| siRNA 56759 | | | | | | |
| Predicted | 126 | | | up | 2.67 | |
| siRNA 57049 | | | | | | |
| Predicted | 127 | | | up | 3.91 | |
| siRNA 57283 | | | | | | |
| Predicted | 19 | | | down | 5.99 | |
| siRNA 58170 | | | | | | |
| Predicted | 128 | | | up | 2.73 | |
| siRNA 58574 | | | | | | |
| Predicted | 129 | | | up | 4.18 | |
| siRNA 60433 | | | | | | |
| Predicted | 20 | | | down | 2.47 | |
| zma mir | | | | | | |
| 47934 | | | | | | |
| Predicted | 130 | | | up | 2.4 | |
| zma mir | | | | | | |
| 48043 | | | | | | |
| Predicted | 21 | | | down | 9.3 | |
| zma mir | | | | | | |
| 48120 | | | | | | |
| Predicted | 131 | | | up | 5.34 | |
| zma mir | | | | | | |
| 48193 | | | | | | |
| Predicted | 22 | | | down | 3.23 | |
| zma mir | | | | | | |
| 48408 | | | | | | |
| Predicted | 23 | | | down | 2.69 | |
| zma mir | | | | | | |
| 48451 | | | | | | |
| Predicted | 24 | | | down | 5.49 | |
| zma mir | | | | | | |
| 48462 | | | | | | |
| Predicted | 25 | | | down | 6.19 | |
| zma mir | | | | | | |
| 48520 | | | | | | |
| Predicted | 26 | | | down | 2.98 | |
| zma mir | | | | | | |
| 48653 | | | | | | |
| Predicted | 27 | | | down | 2.33 | |
| zma mir | | | | | | |
| 48669 | | | | | | |
| Predicted | 28 | | | down | 2.86 | |
| zma mir | | | | | | |
| 48682 | | | | | | |
| Predicted | 29 | | | down | 5.01 | |
| zma mir | | | | | | |
| 48841 | | | | | | |
| Predicted | 30 | | | down | 2.54 | |
| zma mir | | | | | | |
| 48966 | | | | | | |
| Predicted | 31 | | | down | 4.39 | |
| zma mir | | | | | | |
| 49156 | | | | | | |
| Predicted | 32 | | | down | 2.8 | |
| zma mir | | | | | | |
| 49199 | | | | | | |
| sbi-miR164c | 132 | 220 | 220 | up | 1.86 | |
| tae-miR1125 | 133 | 222 | 221 | up | 2.58 | |

TABLE 3
Differentially Expressed Small RNAs in Plants Growing
under High Salt (4 days) versus Optimal Conditions

| | | | Fold |
|---|---|---|---|
| | | | Change |
| | SEQ ID | | Leaf |
| Name Mir | NO: | Direction | 4 d |
| folded 24-nts-long | 33 | down | 2.34 |
| Predicted seq 54187 | | | |
| siRNA 54673 Predicted | 134 | up | 2.08 |
| siRNA 54895 Predicted | 135 | up | 2.17 |
| siRNA 55242 Predicted | 136 | up | 2.09 |
| siRNA 55246 Predicted | 137 | up | 2.64 |
| siRNA 55344 Predicted | 138 | up | 2.35 |
| siRNA 55402 Predicted | 139 | up | 2.46 |
| siRNA 55909 Predicted | 140 | up | 2.06 |
| siRNA 56060 Predicted | 141 | up | 2.31 |
| siRNA 56305 Predicted | 142 | up | 2.43 |
| siRNA 56314 Predicted | 143 | up | 2.31 |
| siRNA 56506 Predicted | 144 | up | 2.3 |
| siRNA 56651 Predicted | 145 | up | 2.42 |
| siRNA 57169 Predicted | 146 | up | 2.25 |
| siRNA 57197 Predicted | 147 | up | 2.15 |
| siRNA 58212 Predicted | 148 | up | 2.66 |
| siRNA 59035 Predicted | 149 | up | 6.12 |
| siRNA 59453 Predicted | 150 | up | 2.73 |
| zma mir 47990 Predicted | 34 | down | 2.69 |
| zma mir 48459 Predicted | 45 (35) | down | 2.37 |
| zma mir 48490 Predicted | 151 | up | 3.12 |
| zma mir 48753 Predicted | 36 | down | 2.11 |
| zma mir 48783 Predicted | 152 | up | 2.35 |
| zma mir 48824 Predicted | 37 | down | 2.08 |
| zma mir 48848 Predicted | 38 | down | 2.06 |
| zma mir 49575 Predicted | 39 | down | 2.49 |
| zma mir 49817 Predicted | 40 | down | 2.8 |
| zma mir 49855 Predicted | 41 | down | 2.69 |
| zma mir 49862 Predicted | 52 (42) | down | 2.16 |
| zma mir 50145 Predicted | 153 | up | 3.92 |

TABLE 4
Differentially Expressed Small RNAs in Plants Growing
under High Salt (6 days) versus Optimal Conditions

| | | | Fold |
|---|---|---|---|
| | | | Change |
| | SEQ ID | | Leaf |
| Mir Name | NO: | Direction | 6 d |
| Predicted folded 24- | 43 | down | 2.2 |
| nts-long seq 54187 | | | |
| Predicted siRNA 54673 | 154 | up | 5.57 |
| Predicted siRNA 54895 | 155 | up | 6.11 |
| Predicted siRNA 55242 | 156 | up | 5.91 |
| Predicted siRNA 55246 | 157 | up | 6.3 |
| Predicted siRNA 55344 | 158 | up | 8.56 |
| Predicted siRNA 55402 | 159 | up | 4.96 |
| Predicted siRNA 55909 | 160 | up | 2.58 |
| Predicted siRNA 56060 | 161 | up | 2.95 |
| Predicted siRNA 56305 | 162 | up | 4.66 |
| Predicted siRNA 56314 | 163 | up | 5.97 |
| Predicted siRNA 56506 | 164 | up | 5.98 |
| Predicted siRNA 56651 | 165 | up | 5.5 |
| Predicted siRNA 57169 | 166 | up | 5.52 |
| Predicted siRNA 57197 | 167 | up | 3.98 |
| Predicted siRNA 58212 | 168 | up | 3.29 |
| Predicted siRNA 59035 | 169 | up | 8.47 |
| Predicted siRNA 59453 | 170 | up | 2.12 |
| Predicted zma mir 47990 | 44 | down | 4.22 |
| Predicted zma mir 48459 | 45 (35) | down | 3.21 |
| Predicted zma mir 48490 | 171 | up | 2.71 |
| Predicted zma mir 48753 | 46 | down | 3.3 |
| Predicted zma mir 48783 | 172 | up | 2.69 |
| Predicted zma mir 48824 | 47 | down | 2.17 |
| Predicted zma mir 48848 | 48 | down | 2.38 |
| Predicted zma mir 49575 | 49 | down | 2.07 |
| Predicted zma mir 49817 | 50 | down | 3.26 |
| Predicted zma mir 49855 | 51 | down | 3.01 |
| Predicted zma mir 49862 | 52 (42) | down | 2.88 |
| Predicted zma mir 50145 | 173 | up | 3.66 |

TABLE 5
Differentially Expressed Small RNAs in Plants Growing
under Heat Shock (1 hour) versus Optimal Conditions

| | | | Fold |
|---|---|---|---|
| | | | Change |
| | SEQ ID | | Leaf |
| Mir Name | NO: | Direction | 1 hour |
| Predicted folded 24- | 174 | up | 2.7 |
| nts-long seq 50957 | | | |
| Predicted folded 24- | 175 | up | 3.56 |
| nts-long seq 51391 | | | |
| Predicted folded 24- | 176 | up | 2.47 |
| nts-long seq 51709 | | | |
| Predicted folded 24- | 177 | up | 2.46 |
| nts-long seq 52606 | | | |
| Predicted folded 24- | 178 | up | 2.47 |
| nts-long seq 52682 | | | |
| Predicted folded 24- | 53 | down | 2.25 |
| nts-long seq 52724 | | | |
| Predicted folded 24- | 179 | up | 4.42 |
| nts-long seq 53851 | | | |
| Predicted folded 24- | 54 | down | 4.51 |
| nts-long seq 53866 | | | |
| Predicted siRNA 54548 | 180 | up | 3.72 |
| Predicted siRNA 54566 | 181 | up | 4.34 |
| Predicted siRNA 54666 | 182 | up | 2.42 |
| Predicted siRNA 54735 | 55 | down | 4.98 |
| Predicted siRNA 55208 | 56 | down | 3.8 |
| Predicted siRNA 55684 | 183 | up | 3.16 |
| Predicted siRNA 55793 | 184 | up | 2.62 |
| Predicted siRNA 55824 | 185 | up | 6.85 |
| Predicted siRNA 55968 | 186 | up | 2.35 |
| Predicted siRNA 56154 | 187 | up | 2.03 |
| Predicted siRNA 56225 | 188 | up | 3.61 |
| Predicted siRNA 56396 | 57 | down | 3.08 |
| Predicted siRNA 56582 | 189 | up | 2.51 |
| Predicted siRNA 56658 | 190 | up | 2.19 |
| Predicted siRNA 56664 | 191 | up | 3.07 |
| Predicted siRNA 56791 | 58 | down | 4.75 |
| Predicted siRNA 56885 | 192 | up | 2.24 |
| Predicted siRNA 57061 | 193 | up | 3.15 |
| Predicted siRNA 57689 | 59 | down | 2.69 |
| Predicted siRNA 58105 | 194 | up | 2.55 |
| Predicted siRNA 58108 | 60 | down | 6.63 |
| Predicted siRNA 58158 | 61 | down | 3.98 |
| Predicted siRNA 58387 | 195 | up | 2.77 |
| Predicted siRNA 58717 | 196 | up | 3.46 |
| Predicted siRNA 58720 | 62 | down | 3.54 |
| Predicted siRNA 58740 | 63 | down | 2.88 |
| Predicted siRNA 59056 | 64 | down | 2.29 |
| Predicted siRNA 59211 | 65 | down | 5.31 |
| Predicted siRNA 59300 | 66 | down | 3.04 |
| Predicted siRNA 59379 | 67 | down | 2.32 |
| Predicted siRNA 59410 | 68 | down | 6.53 |
| Predicted siRNA 59474 | 69 | down | 6.01 |
| Predicted siRNA 59580 | 197 | up | 3.95 |
| Predicted siRNA 59736 | 70 | down | 3.34 |
| Predicted siRNA 59799 | 71 | down | 2.22 |
| Predicted siRNA 59800 | 72 | down | 2 |
| Predicted siRNA 59817 | 198 | up | 7.86 |
| Predicted siRNA 59820 | 73 | down | 3.79 |
| Predicted siRNA 59851 | 74 | down | 9.21 |
| Predicted siRNA 59918 | 75 | down | 9.26 |
| Predicted siRNA 59935 | 76 | down | 2.06 |
| Predicted siRNA 59937 | 77 | down | 2.61 |
| Predicted siRNA 59987 | 199 | up | 12.68 |
| Predicted siRNA 60036 | 200 | up | 2.16 |
| Predicted siRNA 60421 | 78 | down | 6.25 |
| Predicted siRNA 60533 | 79 | down | 6.03 |
| Predicted siRNA 60635 | 201 | up | 3.01 |
| Predicted siRNA 60718 | 202 | up | 2.18 |
| Predicted siRNA 60742 | 203 | up | 2.07 |
| Predicted siRNA 60833 | 80 | down | 2.45 |
| Predicted siRNA 60993 | 204 | up | 2.37 |
| Predicted siRNA 61212 | 81 | down | 2.14 |
| Predicted siRNA 61236 | 82 | down | 2.27 |
| Predicted zma mir 47966 | 205 | up | 3.04 |
| Predicted zma mir 48327 | 83 | down | 2.04 |
| Predicted zma mir 48479 | 206 | up | 3.92 |
| Predicted zma mir 48482 | 207 | up | 2.91 |
| Predicted zma mir 48489 | 84 | down | 2.98 |
| Predicted zma mir 48790 | 208 | up | 2.04 |
| Predicted zma mir 48905 | 209 | up | 3.72 |
| Predicted zma mir 49248 | 85 | down | 4.94 |
| Predicted zma mir 49259 | 210 | up | 3.77 |
| Predicted zma mir 49310 | 86 | down | 4.45 |
| Predicted zma mir 49642 | 211 | up | 4.3 |
| Predicted zma mir 49718 | 212 | up | 3.57 |
| Predicted zma mir 49952 | 87 | down | 2.41 |
| Predicted zma mir 50085 | 213 | up | 2.43 |
| Predicted zma mir 50120 | 88 | down | 2.92 |
| Predicted zma mir 50166 | 89 | down | 2.9 |
| Predicted zma mir 50256 | 90 | down | 6.25 |
| Predicted zma mir 50289 | 91 | down | 2.01 |
| Predicted zma mir 50388 | 92 | down | 2.43 |
| Predicted zma mir 50449 | 214 | up | 2.25 |
| Predicted zma mir 50453 | 93 | down | 7.88 |
| Predicted zma mir 50480 | 94 | down | 2.21 |
| Predicted zma mir 50481 | 95 | down | 2.3 |
| Predicted zma mir 50483 | 96 | down | 2.23 |
| Predicted zma mir 50486 | 215 | up | 2.34 |
| Predicted zma mir 50522 | 216 | up | 2.73 |
| Predicted zma mir 50570 | 97 | down | 2.07 |
| Predicted zma mir 50682 | 98 | down | 2.21 |
| Predicted zma mir 50695 | 99 | down | 2.02 |
| Predicted zma mir 50701 | 100 | down | 3.38 |

### Example 2

### Identification of Homologous and Orthologous Sequences of Differential Small RNAs Associated with Enhanced Abiotic Stress Tolerance

[0306] The small RNA sequences of the invention that were either down- or up-regulated under abiotic stress conditions were examined for homologous and orthologous sequences using the miRBase database (www.mirbase.org/) and the Plant MicroRNA Database (PMRD, http://bioinformatics.cau.edu.cn/PMRD). The mature miRNA sequences that are homologous or orthologous to the miRNAs of the invention (listed in Tables 1-5 above) are found using miRNA public databases, having at least 75% identity of the mature small RNA, and are summarized in Tables 6-8 below.

TABLE 6
Homologs of Small RNAs Listed in Tables 1-2 Above
(Differentially Expressed Under Drought Stress)

| | | | | | | Homolog | |
|---|---|---|---|---|---|---|---|
| | Mature | | | | | Stem-loop | |
| Mir | Sequence/ | Mir | Homologs | Sequence/ | Homolog | Sequence/ | |
| Name | SEQ ID NO: | Length | Names | SEQ ID NO: | Length | SEQ ID NO: | % Identity |
| Predicted | 133 | 21 | aly- | 223 | 21 | 417 | 0.95 |
| zma mir | | | miR168a* | | | | |
| 50425 | | | | | | | |
| | | | hvu- | 224 | 24 | 418 | 0.95 |
| | | | miR168-3p | | | | |
| | | | osa- | 225 | 24 | 419 | 0.95 |
| | | | miR168a- | | | | |
| | | | 3p | | | | |
| | | | zma- | 226 | 20 | 420 | 0.9 |
| | | | miR168a* | | | | |
| | | | zma- | 227 | 20 | 421 | 0.95 |
| | | | miR168b* | | | | |
| osa- | 116 | 22 | osa- | 264 | 22 | 458 | 1 |
| miR2907a | | | miR2907b | | | | |
| | | | osa- | 265 | 22 | 459 | 1 |
| | | | miR2907c | | | | |
| | | | osa- | 266 | 22 | 460 | 1 |
| | | | miR2907d | | | | |
| ath- | 115 | 21 | aly- | 267 | 21 | 461 | 0.95 |
| miR164c | | | miR164a | | | | |
| | | | aly- | 268 | 21 | 462 | 0.95 |
| | | | miR164b | | | | |
| | | | aly- | 269 | 21 | 463 | 1 |
| | | | miR164c | | | | |
| | | | ath- | 270 | 21 | 464 | 0.95 |
| | | | miR164a | | | | |
| | | | ath- | 271 | 21 | 465 | 0.95 |
| | | | miR164b | | | | |
| | | | bdi- | 272 | 21 | 466 | 0.95 |
| | | | miR164a | | | | |
| | | | bdi- | 273 | 21 | 467 | 0.95 |
| | | | miR164b | | | | |
| | | | bdi- | 274 | 21 | 468 | 0.95 |
| | | | miR164c | | | | |
| | | | bdi- | 275 | 21 | 469 | 0.95 |
| | | | miR164d | | | | |
| | | | bdi- | 276 | 21 | 470 | 0.95 |
| | | | miR164e | | | | |
| | | | bdi- | 277 | 21 | 471 | 0.86 |
| | | | miR164f | | | | |
| | | | bna- | 278 | 21 | 472 | 0.95 |
| | | | miR164 | | | | |
| | | | bra- | 279 | 21 | 473 | 0.95 |
| | | | miR164a | | | | |
| | | | cav- | 280 | 21 | 474 | 0.95 |
| | | | miR164 | | | | |
| | | | csi-miR164 | 281 | 21 | 475/605 | 0.95 |
| | | | ctr-miR164 | 282 | 21 | 476 | 0.95 |
| | | | far- | 283 | 21 | 477 | 0.9 |
| | | | miR164a | | | | |
| | | | far- | 284 | 21 | 478 | 0.9 |
| | | | miR164b | | | | |
| | | | gar- | 285 | 21 | 479 | 0.86 |
| | | | miR164 | | | | |
| | | | ghr- | 286 | 21 | 480 | 0.95 |
| | | | miR164 | | | | |
| | | | gma- | 287 | 21 | 481 | 0.95 |
| | | | miR164 | | | | |
| | | | ini-miR164 | 288 | 21 | 482 | 0.9 |
| | | | mtr- | 289 | 21 | 483 | 0.95 |
| | | | miR164a | | | | |
| | | | mtr- | 290 | 21 | 484 | 0.95 |
| | | | miR164b | | | | |
| | | | mtr- | 291 | 21 | 485 | 0.95 |
| | | | miR164c | | | | |
| | | | mtr- | 292 | 21 | 486 | 0.9 |
| | | | miR164d | | | | |
| | | | osa- | 293 | 21 | 487 | 0.95 |
| | | | miR164a | | | | |
| | | | osa- | 294 | 21 | 488 | 0.95 |
| | | | miR164b | | | | |
| | | | osa- | 295 | 21 | 489 | 0.9 |
| | | | miR164c | | | | |
| | | | osa- | 296 | 21 | 490 | 0.95 |
| | | | miR164d | | | | |
| | | | osa- | 297 | 21 | 491 | 0.95 |
| | | | miR164e | | | | |
| | | | osa- | 298 | 21 | 492 | 0.95 |
| | | | miR164f | | | | |
| | | | ppl- | 299 | 21 | 493 | 0.95 |
| | | | miR164 | | | | |
| | | | ptc- | 300 | 21 | 494 | 0.95 |
| | | | miR164a | | | | |
| | | | ptc- | 301 | 21 | 495 | 0.95 |
| | | | miR164b | | | | |
| | | | ptc- | 302 | 21 | 496 | 0.95 |
| | | | miR164c | | | | |
| | | | ptc- | 303 | 21 | 497 | 0.95 |
| | | | miR164d | | | | |
| | | | ptc- | 304 | 21 | 498 | 0.95 |
| | | | miR164e | | | | |
| | | | ptc- | 305 | 21 | 499 | 0.9 |
| | | | miR164f | | | | |
| | | | rco- | 306 | 21 | 500 | 0.95 |
| | | | miR164a | | | | |
| | | | rco- | 307 | 21 | 501 | 0.95 |
| | | | miR164b | | | | |
| | | | rco- | 308 | 21 | 502 | 0.95 |
| | | | miR164c | | | | |
| | | | rco- | 309 | 21 | 503 | 0.9 |
| | | | miR164d | | | | |
| | | | sbi- | 310 | 21 | 504 | 0.95 |
| | | | miR164 | | | | |
| | | | sbi- | 311 | 21 | 505 | 0.95 |
| | | | miR164b | | | | |
| | | | sbi- | 312 | 21 | 506 | 0.9 |
| | | | miR164c | | | | |
| | | | sbi- | 313 | 21 | 507 | 0.95 |
| | | | miR164d | | | | |
| | | | sbi- | 314 | 21 | 508 | 0.95 |
| | | | miR164e | | | | |
| | | | tae- | 315 | 21 | 509 | 0.95 |
| | | | miR164 | | | | |
| | | | tae- | 316 | 21 | 510 | 0.95 |
| | | | miR164b | | | | |
| | | | tcc- | 317 | 21 | 511 | 0.95 |
| | | | miR164a | | | | |
| | | | tcc- | 318 | 21 | 512 | 0.95 |
| | | | miR164b | | | | |
| | | | tcc- | 319 | 21 | 513 | 0.9 |
| | | | miR164c | | | | |
| | | | vvi- | 320 | 21 | 514 | 0.95 |
| | | | miR164a | | | | |
| | | | vvi- | 321 | 21 | 515 | 0.9 |
| | | | miR164b | | | | |
| | | | vvi- | 322 | 21 | 516 | 0.95 |
| | | | miR164c | | | | |
| | | | vvi- | 323 | 21 | 517 | 0.95 |
| | | | miR164d | | | | |
| | | | zma- | 324 | 21 | 518 | 0.95 |
| | | | miR164a | | | | |
| | | | zma- | 325 | 21 | 519 | 0.95 |
| | | | miR164b | | | | |
| | | | zma- | 326 | 21 | 520 | 0.95 |
| | | | miR164c | | | | |
| | | | zma- | 327 | 21 | 521 | 0.95 |
| | | | miR164d | | | | |
| | | | zma- | 411 | 21 | 522/606 | 0.90/0.95 |
| | | | miR164e | | | | |
| | | | zma- | 412 | 21 | 523/607 | 0.95 |
| | | | miR164f | | | | |
| | | | zma- | 330 | 21 | 524/608 | 0.95 |
| | | | miR164g | | | | |
| | | | zma- | 413 | 21 | 525/609 | 0.95 |
| | | | miR164h | | | | |
| sbi- | 132 | 21 | aly- | 332 | 21 | 526 | 0.86 |
| miR164c | | | miR164a | | | | |
| | | | aly- | 333 | 21 | 527 | 0.86 |
| | | | miR164b | | | | |
| | | | aly- | 334 | 21 | 528 | 0.9 |
| | | | miR164c | | | | |
| | | | ath- | 335 | 21 | 529 | 0.86 |
| | | | miR164a | | | | |
| | | | ath- | 336 | 21 | 530 | 0.86 |
| | | | miR164b | | | | |
| | | | ath- | 337 | 21 | 531 | 0.9 |
| | | | miR164c | | | | |
| | | | bdi- | 338 | 21 | 532 | 0.86 |
| | | | miR164a | | | | |
| | | | bdi- | 339 | 21 | 533 | 0.86 |
| | | | miR164b | | | | |
| | | | bdi- | 340 | 21 | 534 | 0.86 |
| | | | miR164c | | | | |
| | | | bdi- | 341 | 21 | 535 | 0.86 |
| | | | miR164d | | | | |
| | | | bdi- | 342 | 21 | 536 | 0.86 |
| | | | miR164e | | | | |
| | | | bdi- | 343 | 21 | 537 | 0.76 |
| | | | miR164f | | | | |
| | | | bna- | 344 | 21 | 538 | 0.86 |
| | | | miR164 | | | | |
| | | | bra- | 345 | 21 | 539 | 0.86 |
| | | | miR164a | | | | |
| | | | cav- | 346 | 21 | 540 | 0.86 |
| | | | miR164 | | | | |
| | | | csi-miR164 | 347 | 21 | 541/611 | 0.86 |
| | | | ctr-miR164 | 348 | 21 | 542 | 0.86 |
| | | | far- | 349 | 21 | 543 | 0.81 |
| | | | miR164a | | | | |
| | | | far- | 350 | 21 | 544 | 0.81 |
| | | | miR164b | | | | |
| | | | gar- | 351 | 21 | 545 | 0.86 |
| | | | miR164 | | | | |
| | | | ghr- | 352 | 21 | 546 | 0.86 |
| | | | miR164 | | | | |
| | | | gma- | 353 | 21 | 547 | 0.86 |
| | | | miR164 | | | | |
| | | | ini-miR164 | 354 | 21 | 548 | 0.86 |
| | | | mtr- | 355 | 21 | 549 | 0.86 |
| | | | miR164a | | | | |
| | | | mtr- | 356 | 21 | 550 | 0.86 |
| | | | miR164b | | | | |
| | | | mtr- | 357 | 21 | 551 | 0.86 |
| | | | miR164c | | | | |
| | | | mtr- | 358 | 21 | 552 | 0.81 |
| | | | miR164d | | | | |
| | | | osa- | 359 | 21 | 553 | 0.86 |
| | | | miR164a | | | | |
| | | | osa- | 360 | 21 | 554 | 0.86 |
| | | | miR164b | | | | |
| | | | osa- | 361 | 21 | 555 | 0.81 |
| | | | miR164c | | | | |
| | | | osa- | 362 | 21 | 556 | 0.86 |
| | | | miR164d | | | | |
| | | | osa- | 363 | 21 | 557 | 0.95 |
| | | | miR164e | | | | |
| | | | osa- | 364 | 21 | 558 | 0.86 |
| | | | miR164f | | | | |
| | | | ppl- | 365 | 21 | 559 | 0.86 |
| | | | miR164 | | | | |
| | | | ptc- | 366 | 21 | 560 | 0.86 |
| | | | miR164a | | | | |
| | | | ptc- | 367 | 21 | 561 | 0.86 |
| | | | miR164b | | | | |
| | | | ptc- | 368 | 21 | 562 | 0.86 |
| | | | miR164c | | | | |
| | | | ptc- | 369 | 21 | 563 | 0.86 |
| | | | miR164d | | | | |
| | | | ptc- | 370 | 21 | 564 | 0.86 |
| | | | miR164e | | | | |
| | | | ptc- | 371 | 21 | 565 | 0.81 |
| | | | miR164f | | | | |
| | | | rco- | 372 | 21 | 566 | 0.86 |
| | | | miR164a | | | | |
| | | | rco- | 373 | 21 | 567 | 0.86 |
| | | | miR164b | | | | |
| | | | rco- | 374 | 21 | 568 | 0.86 |
| | | | miR164c | | | | |
| | | | rco- | 375 | 21 | 569 | 0.81 |
| | | | miR164d | | | | |
| | | | sbi- | 376 | 21 | 570 | 0.86 |
| | | | miR164 | | | | |
| | | | sbi- | 377 | 21 | 571 | 0.86 |
| | | | miR164b | | | | |
| | | | sbi- | 378 | 21 | 572 | 0.86 |
| | | | miR164d | | | | |
| | | | sbi- | 379 | 21 | 573 | 0.86 |
| | | | miR164e | | | | |
| | | | tae- | 380 | 21 | 574 | 0.86 |
| | | | miR164 | | | | |
| | | | tae- | 381 | 21 | 575 | 0.86 |
| | | | miR164b | | | | |
| | | | tcc- | 382 | 21 | 576 | 0.86 |
| | | | miR164a | | | | |
| | | | tcc- | 383 | 21 | 577 | 0.86 |
| | | | miR164b | | | | |
| | | | tcc- | 384 | 21 | 578 | 0.81 |
| | | | miR164c | | | | |
| | | | vvi- | 385 | 21 | 579 | 0.86 |
| | | | miR164a | | | | |
| | | | vvi- | 386 | 21 | 580 | 0.81 |
| | | | miR164b | | | | |
| | | | vvi- | 387 | 21 | 581 | 0.86 |
| | | | miR164c | | | | |
| | | | vvi- | 388 | 21 | 582 | 0.86 |
| | | | miR164d | | | | |
| | | | zma- | 389 | 21 | 583 | 0.86 |
| | | | miR164a | | | | |
| | | | zma- | 390 | 21 | 584 | 0.86 |
| | | | miR164b | | | | |
| | | | zma- | 391 | 21 | 585 | 0.86 |
| | | | miR164c | | | | |
| | | | zma- | 392 | 21 | 586 | 0.86 |
| | | | miR164d | | | | |
| | | | zma- | 414 | 21 | 587/611 | 1.00/0.86 |
| | | | miR164e | | | | |
| | | | zma- | 415 | 21 | 588/612 | 0.86 |
| | | | miR164f | | | | |
| | | | zma- | 395 | 21 | 589/613 | 0.86 |
| | | | miR164g | | | | |
| | | | zma- | 416 | 21 | 590/614 | 0.90/0.86 |
| | | | miR164h | | | | |
| Predicted | 112 | 21 | aly- | 397 | 21 | 591 | 0.9 |
| zma mir | | | miR827 | | | | |
| 50109 | | | | | | | |
| | | | ath- | 398 | 21 | 592 | 0.9 |
| | | | miR827 | | | | |
| | | | bdi- | 399 | 21 | 593 | 1 |
| | | | miR827 | | | | |
| | | | csi- | 400 | 21 | 594 | 0.95 |
| | | | miR827 | | | | |
| | | | ghr- | 401 | 21 | 595 | 0.95 |
| | | | miR827a | | | | |
| | | | ghr- | 402 | 21 | 596 | 0.95 |
| | | | miR827b | | | | |
| | | | ghr- | 403 | 21 | 597 | 0.95 |
| | | | miR827c | | | | |
| | | | osa- | 404 | 21 | 598 | 0.86 |
| | | | miR827 | | | | |
| | | | osa- | 405 | 21 | 599 | 1 |
| | | | miR827a | | | | |
| | | | osa- | 406 | 21 | 600 | 1 |
| | | | miR827b | | | | |
| | | | ptc- | 407 | 21 | 601 | 0.86 |
| | | | miR827 | | | | |
| | | | ssp- | 408 | 21 | 602 | 1 |
| | | | miR827 | | | | |
| | | | tcc- | 409 | 21 | 603 | 0.95 |
| | | | miR827 | | | | |
| | | | zma- | 410 | 21 | 604 | 1 |
| | | | miR827 | | | | |

TABLE 7
Homologs of Small RNAs Listed in Tables 3-4 Above
(Differentially Expressed Under Salinity Stress)

| | Mature | | | Homolog | | Stem Loop | |
|---|---|---|---|---|---|---|---|
| Mir | Sequence/ | Mir | Homologs | Sequence/ | Homolog | Sequence/ | |
| Name | SEQ ID NO: | Length | Names | SEQ ID NO: | Length | SEQ ID NO: | % Identity |
| Predicted | 52 | 21 | bdi- | 615 | 21 | 627 | 0.9 |
| zma mir | | | miR528 | | | | |
| 49862 | | | | | | | |
| | | | osa- | 616 | 21 | 628 | 0.9 |
| | | | miR528 | | | | |
| | | | sbi- | 617 | 21 | 629 | 0.9 |
| | | | miR528 | | | | |
| | | | ssp- | 618 | 21 | 630 | 0.9 |
| | | | miR528 | | | | |
| | | | zma- | 619 | 21 | 631 | 0.9 |
| | | | miR528a | | | | |
| | | | zma- | 620 | 21 | 632 | 0.9 |
| | | | miR528b | | | | |
| Predicted | 45 | 21 | bdi- | 621 | 21 | 633 | 0.9 |
| zma mir | | | miR528 | | | | |
| 48459 | | | | | | | |
| | | | osa- | 622 | 21 | 634 | 0.9 |
| | | | miR528 | | | | |
| | | | sbi- | 623 | 21 | 635 | 0.9 |
| | | | miR528 | | | | |
| | | | ssp- | 624 | 21 | 636 | 0.9 |
| | | | miR528 | | | | |
| | | | zma- | 625 | 21 | 637 | 0.9 |
| | | | miR528a | | | | |
| | | | zma- | 626 | 21 | 638 | 0.9 |
| | | | miR528b | | | | |

TABLE 8
Homologs of Small RNAs Listed in Table 5 Above (Differentially
Expressed Under Heat Shock Stress)

| | | | | | | Stem Loop | |
|---|---|---|---|---|---|---|---|
| Mir | Mature | Mir | Homologs | Sequence/ | Homolog | Sequence/ | |
| Name | Sequence | Length | Names | SEQ ID NO: | Length | SEQ ID NO: | % Identity |
| Predicted | 85 | 21 | zma- | 639 | 21 | 640 | 0.9 |
| zma mir | | | miR398b* | | | | |
| 49248 | | | | | | | |

### Example 3

### Verification of Expression of Small RNA Molecules Associated with Abiotic Stress

[0307] Small RNAs that are potentially associated with improved abiotic or biotic stress tolerance are first identified by proprietary computational algorithms that analyze RNA expression profiles alongside publicly available gene and protein databases. A high throughput screening is performed on microarrays loaded with miRNAs that were found to be differential under multiple stress and optimal environmental conditions and in different plant tissues. Following identification of small RNA molecules potentially involved in maize abiotic stress tolerance using bioinformatics tools, the actual mRNA levels in an experiment are determined using reverse transcription assay followed by quantitative Real-Time PCR (qRT-PCR) analysis. RNA levels are compared between different tissues, developmental stages, growing conditions and/or genetic backgrounds incorporated in each experiment. A correlation analysis between mRNA levels in different experimental conditions/genetic backgrounds is applied and used as evidence for the role of the gene in the plant.

[0308] Experimental Procedures

[0309] Root and leaf samples are freshly excised from maize plants grown as described above on Murashige-Skoog (Duchefa). Experimental plants are grown either under optimal irrigation conditions, salt levels or temperatures to be used as a control group, or under stressful conditions of prolonged water deprivation, high salt concentrations and a heat shock treatment at a temperature higher than 34° C. to be used as stress-induced groups to assess the drought, salinity and heat shock tolerance, respectively, of control versus transgenic plants. Total RNA is extracted from the different tissues, using mirVana™ commercial kit (Ambion) following the protocol provided by the manufacturer. For measurement and verification of messenger RNA (mRNA) expression level of all genes, reverse transcription followed by quantitative real time PCR (qRT-PCR) is performed on total RNA extracted from each plant tissue (i.e., roots and leaves) from each experimental group as described above. To elaborate, reverse transcription is performed on 1 μg total RNA, using a miScript Reverse Transcriptase kit (Qiagen), following the protocol suggested by the manufacturer. Quantitative RT-PCR is performed on cDNA (0.1 ng/μl final concentration), using a miScript SYBR GREEN PCR (Qiagen) forward (based on the miR sequence itself) and reverse primers (supplied with the kit). All qRT-PCR reactions are performed in triplicates using an ABI7500 real-time PCR machine, following the recommended protocol for the machine. To normalize the expression level of miRNAs associated with enhanced NUE between the different tissues and growing conditions of the maize plants, normalizer miRNAs are selected and used for comparison. Normalizer miRNAs, which are miRNAs with unchanged expression level between tissues and growing conditions, are custom selected for each experiment. The normalization procedure consists of second-degree polynomial fitting to a reference data (which is the median vector of all the data—excluding outliers) as described by Rosenfeld et al (2008, Nat Biotechnol, 26(4):462-469). A summary of primers for the differential small RNA molecules that will be used in the qRT-PCR validation and analysis is presented in Tables 9-11 below.

TABLE 9
Primers for qRT-PCR Analysis of small RNAs
Differentially Expressed in Drought

| | Primer Sequence/ | Primer | |
|---|---|---|---|
| miR Name | SEQ ID NO: | length | Tm |
| ath-miR164c | 641 | 21 | 64 |
| osa-miR2907a | 642 | 20 | 67 |
| Predicted folded 24-nts-long seq | 643 | 24 | 66 |
| 52214 | | | |
| Predicted folded 24-nts-long seq | 644 | 24 | 59 |
| 52255 | | | |
| Predicted folded 24-nts-long seq | 645 | 24 | 64 |
| 52285 | | | |
| Predicted folded 24-nts-long seq | 646 | 24 | 64 |
| 52953 | | | |
| Predicted folded 24-nts-long seq | 647 | 24 | 62 |
| 53693 | | | |
| Predicted siRNA 55507 | 648 | 22 | 59 |
| Predicted siRNA 55629 | 649 | 22 | 62 |
| Predicted siRNA 55775 | 650 | 21 | 61 |
| Predicted siRNA 55869 | 651 | 23 | 61 |
| Predicted siRNA 55937 | 652 | 23 | 60 |
| Predicted siRNA 55979 | 653 | 24 | 60 |
| Predicted siRNA 56066 | 654 | 25 | 59 |
| Predicted siRNA 56759 | 655 | 23 | 59 |
| Predicted siRNA 57049 | 656 | 23 | 61 |
| Predicted siRNA 57283 | 657 | 21 | 66 |
| Predicted siRNA 58170 | 658 | 22 | 60 |
| Predicted siRNA 58574 | 659 | 23 | 59 |
| Predicted siRNA 60433 | 660 | 24 | 66 |
| Predicted siRNA 60529 | 661 | 22 | 61 |
| Predicted zma mir 47934 | 662 | 25 | 60 |
| Predicted zma mir 48043 | 663 | 21 | 61 |
| Predicted zma mir 48120 | 664 | 22 | 61 |
| Predicted zma mir 48193 | 665 | 26 | 60 |
| Predicted zma mir 48408 | 666 | 21 | 58 |
| Predicted zma mir 48451 | 667 | 26 | 60 |
| Predicted zma mir 48462 | 668 | 26 | 59 |
| Predicted zma mir 48514 | 669 | 22 | 61 |
| Predicted zma mir 48520 | 670 | 29 | 59 |
| Predicted zma mir 48653 | 671 | 23 | 58 |
| Predicted zma mir 48669 | 672 | 24 | 60 |
| Predicted zma mir 48682 | 673 | 23 | 59 |
| Predicted zma mir 48841 | 674 | 24 | 59 |
| Predicted zma mir 48966 | 675 | 25 | 61 |
| Predicted zma mir 49156 | 676 | 26 | 60 |
| Predicted zma mir 49199 | 677 | 22 | 60 |
| Predicted zma mir 50109 | 678 | 25 | 59 |
| Predicted zma mir 50425 | 679 | 22 | 60 |
| sbi-miR164c | 680 | 21 | 58 |
| tae-miR1125 | 682 | 24 | 66 |

TABLE 10
Primers for qRT-PCR Analysis of small RNAs
Differentially Expressed in Salt Stress

| | SEQ ID | Primer | |
|---|---|---|---|
| miR Name | NO: | length | Tm |
| Predicted folded 24-nts-long seq | 683 | 24 | 65 |
| 54187 | | | |
| Predicted siRNA 54673 | 684 | 24 | 63 |
| Predicted siRNA 54895 | 685 | 23 | 59 |
| Predicted siRNA 55242 | 686 | 21 | 63 |
| Predicted siRNA 55246 | 687 | 27 | 60 |
| Predicted siRNA 55344 | 688 | 22 | 60 |
| Predicted siRNA 55402 | 689 | 23 | 60 |
| Predicted siRNA 55909 | 690 | 24 | 63 |
| Predicted siRNA 56060 | 691 | 22 | 59 |
| Predicted siRNA 56305 | 692 | 21 | 62 |
| Predicted siRNA 56314 | 693 | 23 | 59 |
| Predicted siRNA 56506 | 694 | 26 | 59 |
| Predicted siRNA 56651 | 695 | 22 | 64 |
| Predicted siRNA 57169 | 696 | 24 | 64 |
| Predicted siRNA 57197 | 697 | 25 | 59 |
| Predicted siRNA 58212 | 698 | 18 | 60 |
| Predicted siRNA 59035 | 699 | 22 | 61 |
| Predicted siRNA 59453 | 700 | 18 | 60 |
| Predicted zma mir 47990 | 701 | 26 | 59 |
| Predicted zma mir 48459 | 702 | 23 | 61 |
| Predicted zma mir 48490 | 703 | 25 | 59 |
| Predicted zma mir 48753 | 704 | 24 | 59 |
| Predicted zma mir 48783 | 705 | 24 | 60 |
| Predicted zma mir 48824 | 706 | 22 | 60 |
| Predicted zma mir 48848 | 707 | 23 | 60 |
| Predicted zma mir 49575 | 708 | 21 | 59 |
| Predicted zma mir 49817 | 709 | 22 | 59 |
| Predicted zma mir 49855 | 710 | 27 | 59 |
| Predicted zma mir 49862 | 711 | 21 | 60 |
| Predicted zma mir 50145 | 712 | 24 | 60 |

TABLE 11
Primers for qRT-PCR Analysis of small RNAs
Differentially Expressed in Heat Stress

| | SEQ ID | Primer | |
|---|---|---|---|
| miR Name | NO: | length | Tm |
| Predicted folded 24-nts-long seq | 713 | 24 | 59 |
| 50957 | | | |
| Predicted folded 24-nts-long seq | 714 | 24 | 64 |
| 51391 | | | |
| Predicted folded 24-nts-long seq | 715 | 24 | 64 |
| 51709 | | | |
| Predicted folded 24-nts-long seq | 716 | 24 | 65 |
| 52606 | | | |
| Predicted folded 24-nts-long seq | 717 | 24 | 65 |
| 52682 | | | |
| Predicted folded 24-nts-long seq | 718 | 24 | 66 |
| 52724 | | | |
| Predicted folded 24-nts-long seq | 719 | 26 | 59 |
| 53851 | | | |
| Predicted folded 24-nts-long seq | 720 | 24 | 64 |
| 53866 | | | |
| Predicted siRNA 54548 | 721 | 24 | 60 |
| Predicted siRNA 54566 | 722 | 22 | 66 |
| Predicted siRNA 54666 | 723 | 22 | 62 |
| Predicted siRNA 54735 | 724 | 24 | 63 |
| Predicted siRNA 55208 | 725 | 26 | 59 |
| Predicted siRNA 55684 | 726 | 22 | 60 |
| Predicted siRNA 55793 | 727 | 25 | 59 |
| Predicted siRNA 55824 | 728 | 23 | 59 |
| Predicted siRNA 55968 | 729 | 24 | 61 |
| Predicted siRNA 56154 | 730 | 24 | 61 |
| Predicted siRNA 56225 | 731 | 24 | 61 |
| Predicted siRNA 56396 | 732 | 24 | 60 |
| Predicted siRNA 56582 | 733 | 21 | 61 |
| Predicted siRNA 56658 | 734 | 24 | 67 |
| Predicted siRNA 56664 | 735 | 21 | 62 |
| Predicted siRNA 56791 | 736 | 26 | 59 |
| Predicted siRNA 56885 | 737 | 24 | 59 |
| Predicted siRNA 57061 | 738 | 22 | 62 |
| Predicted siRNA 57689 | 739 | 20 | 61 |
| Predicted siRNA 58105 | 740 | 24 | 64 |
| Predicted siRNA 58108 | 741 | 20 | 61 |
| Predicted siRNA 58158 | 742 | 21 | 64 |
| Predicted siRNA 58387 | 743 | 27 | 60 |
| Predicted siRNA 58717 | 744 | 24 | 61 |
| Predicted siRNA 58720 | 745 | 20 | 60 |
| Predicted siRNA 58740 | 746 | 24 | 59 |
| Predicted siRNA 59056 | 747 | 23 | 59 |
| Predicted siRNA 59211 | 748 | 21 | 60 |
| Predicted siRNA 59300 | 749 | 20 | 64 |
| Predicted siRNA 59379 | 750 | 20 | 59 |
| Predicted siRNA 59410 | 751 | 22 | 60 |
| Predicted siRNA 59474 | 752 | 19 | 61 |
| Predicted siRNA 59580 | 753 | 24 | 64 |
| Predicted siRNA 59736 | 754 | 19 | 61 |
| Predicted siRNA 59799 | 755 | 20 | 64 |
| Predicted siRNA 59800 | 756 | 20 | 63 |
| Predicted siRNA 59817 | 757 | 21 | 60 |
| Predicted siRNA 59820 | 758 | 20 | 59 |
| Predicted siRNA 59851 | 759 | 22 | 60 |
| Predicted siRNA 59918 | 760 | 21 | 60 |
| Predicted siRNA 59935 | 761 | 25 | 66 |
| Predicted siRNA 59937 | 762 | 25 | 64 |
| Predicted siRNA 59987 | 763 | 22 | 60 |
| Predicted siRNA 60036 | 764 | 24 | 61 |
| Predicted siRNA 60421 | 765 | 27 | 59 |
| Predicted siRNA 60533 | 766 | 20 | 63 |
| Predicted siRNA 60635 | 767 | 29 | 59 |
| Predicted siRNA 60718 | 768 | 25 | 59 |
| Predicted siRNA 60742 | 769 | 24 | 59 |
| Predicted siRNA 60833 | 770 | 21 | 60 |
| Predicted siRNA 60993 | 771 | 25 | 60 |
| Predicted siRNA 61212 | 772 | 21 | 59 |
| Predicted siRNA 61236 | 773 | 25 | 60 |
| Predicted zma mir 47966 | 774 | 26 | 59 |
| Predicted zma mir 48327 | 775 | 22 | 59 |
| Predicted zma mir 48479 | 776 | 24 | 60 |
| Predicted zma mir 48482 | 777 | 24 | 59 |
| Predicted zma mir 48489 | 778 | 22 | 60 |
| Predicted zma mir 48790 | 779 | 22 | 59 |
| Predicted zma mir 48905 | 780 | 25 | 59 |
| Predicted zma mir 49248 | 781 | 21 | 62 |
| Predicted zma mir 49259 | 782 | 22 | 60 |
| Predicted zma mir 49310 | 783 | 21 | 63 |
| Predicted zma mir 49642 | 784 | 22 | 66 |
| Predicted zma mir 49718 | 785 | 22 | 59 |
| Predicted zma mir 49952 | 786 | 23 | 67 |
| Predicted zma mir 50085 | 787 | 25 | 59 |
| Predicted zma mir 50120 | 788 | 23 | 61 |
| Predicted zma mir 50166 | 789 | 22 | 60 |
| Predicted zma mir 50256 | 790 | 22 | 61 |
| Predicted zma mir 50289 | 791 | 19 | 58 |
| Predicted zma mir 50388 | 792 | 24 | 60 |
| Predicted zma mir 50449 | 793 | 23 | 59 |
| Predicted zma mir 50453 | 794 | 22 | 61 |
| Predicted zma mir 50480 | 795 | 20 | 64 |
| Predicted zma mir 50481 | 796 | 20 | 64 |
| Predicted zma mir 50483 | 797 | 20 | 63 |
| Predicted zma mir 50486 | 798 | 22 | 61 |
| Predicted zma mir 50522 | 799 | 22 | 61 |
| Predicted zma mir 50570 | 800 | 20 | 60 |
| Predicted zma mir 50682 | 801 | 23 | 59 |
| Predicted zma mir 50695 | 802 | 22 | 58 |
| Predicted zma mir 50701 | 803 | 19 | 60 |

Alternative RT-PCR Validation Method of Selected microRNAs of the Invention

[0310] A novel microRNA quantification method has been applied using stem-loop RT followed by PCR analysis (Chen C, Ridzon D A, Broomer A J, Zhou Z, Lee D H, Nguyen J T, Barbisin M, Xu N L, Mahuvakar V R, Andersen M R, Lao K Q, Livak K J, Guegler K J. 2005, Nucleic Acids Res 33(20):e179; Varkonyi-Gasic E, Wu R, Wood M, Walton E F, Hellens R P. 2007, Plant Methods 3:12) (see FIG. 2). This highly accurate method allows the detection of less abundant miRNAs. In this method, stem-loop RT primers are used, which provide higher specificity and efficiency to the reverse transcription process. While the conventional method relies on polyadenylated (poly (A)) tail and thus becomes sensitive to methylation because of the susceptibility of the enzymes involved, in this novel method the reverse transcription step is transcriptspecific and insensitive to methylation. Reverse transcriptase reactions contained RNA samples including purified total RNA, 50 nM stem-loop RT primer (see Tables 12a-c, synthesized by Sigma), and using the SuperScript II reverse transcriptase (Invitrogen). A mix of up to 12 stem-loop RT primers may be used in each reaction, and the forward primers are such that the last 6 nucleotides are replaced with a GC rich sequence. For the PCR step, each miRNA has a custom forward primer, while only miRNAs exhibiting technical difficulties using the stem loop universal reverse primer (5′-GTGCAGGGTCCGAGGT-3′-SEQ ID NO: 228) get custom reverse primer as well. Note, SL-RT stands for stem loop reverse transcription, SL-F are the forward primers, SL-R are the reverse primers.

TABLE 12a
Stem Loop Reverse Transcriptase Primers for RT-PCR Validation
of Differential Mirs under Drought Stress

| | | SEQ ID | Primer |
|---|---|---|---|
| Mir Name | Primer Name | NO: | Length |
| Predicted folded 24- | Pred zma 52255-SL- | 804 | 51 |
| nts-long seq 52255 | RT | | |
| | Pred zma 52255-SL-F | 805 | 21 |
| Predicted siRNA | Pred siRNA 55629-SL- | 806 | 50 |
| 55629 | RT | | |
| | Pred siRNA 55629-SL- | 807 | 20 |
| | F | | |
| Predicted siRNA | Pred zma 55775-SL- | 808 | 50 |
| 55775 | RT | | |
| | Pred zma 55775-SL-F | 809 | 21 |
| Predicted siRNA | Pred zma 55869-SL- | 810 | 50 |
| 55869 | RT | | |
| | Pred zma 55869-SL-F | 811 | 21 |
| Predicted siRNA | Pred zma 55937-SL- | 812 | 50 |
| 55937 | RT | | |
| | Pred zma 55937-SL-F | 813 | 20 |
| Predicted siRNA | Pred zma 58170-SL- | 814 | 50 |
| 58170 | RT | | |
| | Pred zma 58170-SL-F | 815 | 19 |
| Predicted zma mir | Pred zma 47934-SL- | 816 | 50 |
| 47934 | RT | | |
| | Pred zma 47934-SL-F | 817 | 22 |
| Predicted zma mir | Pred zma 48043-SL- | 818 | 50 |
| 48043 | RT | | |
| | Pred zma 48043-SL-F | 819 | 21 |
| Predicted zma mir | Pred zma mir 48193- | 820 | 50 |
| 48193 | SL-RT | | |
| | Pred zma mir 48193- | 821 | 22 |
| | SL-F | | |
| | Pred zma 48193 -SL-R | 822 | 24 |
| Predicted zma mir | Pred zma 48408-SL- | 823 | 50 |
| 48408 | RT | | |
| | Pred zma 48408-SL-F | 824 | 21 |

TABLE 12b
Stem Loop Reverse Transcriptase Primers for RT-PCR Validation
of Differential Mirs under Salinity Stress

| | | Primer | |
|---|---|---|---|
| | | Sequence/ | Primer |
| Mir Name | Primer Name | SEQ ID NO: | Length |
| Predicted siRNA | Pred zma 54895- | 825 | 50 |
| 54895 | SL-RT | | |
| | Pred zma 54895- | 826 | 22 |
| | SL-F | | |
| Predicted siRNA | Pred zma 55344- | 827 | 50 |
| 55344 | SL-RT | | |
| | Pred zma 55344- | 828 | 20 |
| | SL-F | | |
| Predicted siRNA | Pred zma 56506- | 829 | 50 |
| 56506 | SL-RT | | |
| | Pred zma 56506- | 830 | 24 |
| | SL-F | | |
| Predicted siRNA | Pred zma 59035- | 831 | 19 |
| 59035 | SL-F | | |
| | Pred 59035-SL-RT | 832 | 50 |
| Predicted zma mir | Pred zma 47990- | 833 | 50 |
| 47990 | SL-RT | | |
| | Pred zma 47990- | 834 | 22 |
| | SL-F | | |
| Predicted zma mir | Pred zma 48459- | 835 | 51 |
| 48459 | SL-RT | | |
| | Pred zma 48459- | 836 | 18 |
| | SL-F | | |
| Predicted zma mir | Pred zma 49817- | 837 | 51 |
| 49817 | SL-RT | | |
| | Pred zma 49817- | 838 | 18 |
| | SL-F | | |
| Predicted zma mir | Pred zma 49855- | 839 | 50 |
| 49855 | SL-RT | | |
| | Pred zma 49855- | 840 | 21 |
| | SL-F | | |
| Predicted zma mir | Pred zma 49862- | 841 | 18 |
| 49862 | SL-F | | |
| | Pred zma 49862- | 842 | 51 |
| | SL-RT | | |
| Predicted zma mir | Pred zma 50145- | 843 | 50 |
| 50145 | SL-RT | | |
| | Pred zma 50145- | 844 | 20 |
| | SL-F | | |

TABLE 12c
Stem Loop Reverse Transcriptase Primers for RT-PCR Validation
of Differential Mirs under Heat Shock Stress

| | | Primer | |
|---|---|---|---|
| | | Sequence/ | Primer |
| Mir Name | Primer Name | SEQ ID NO: | Length |
| Predicted folded 24-nts-long | Pred zma 53851- | 845 | 50 |
| seq 53851 | SL-RT | | |
| | Pred zma 53851- | 846 | 24 |
| | SL-F | | |
| Predicted folded 24-nts-long | Pred zma 53866- | 847 | 51 |
| seq 53866 | SL-RT | | |
| | Pred zma 53866- | 848 | 23 |
| | SL-F | | |
| Predicted siRNA 54566 | Pred zma 54566- | 849 | 50 |
| | SL-RT | | |
| | Pred zma 54566- | 850 | 20 |
| | SL-F | | |
| Predicted siRNA 55824 | Pred zma 55824- | 851 | 50 |
| | SL-RT | | |
| | Pred zma 55824- | 852 | 20 |
| | SL-F | | |
| Predicted siRNA 58108 | Pred zma 58108- | 853 | 50 |
| | SL-RT | | |
| | Pred zma 58108- | 854 | 17 |
| | SL-F | | |
| Predicted siRNA 59817 | Pred zma 59817- | 855 | 50 |
| | SL-RT | | |
| | Pred zma 59817- | 856 | 19 |
| | SL-F | | |
| Predicted siRNA 59851 | Pred zma 59851- | 857 | 50 |
| | SL-RT | | |
| | Pred zma 59851- | 858 | 18 |
| | SL-F | | |
| Predicted siRNA 59918 | Pred zma 59918- | 859 | 50 |
| | SL-RT | | |
| | Pred zma 59918- | 860 | 20 |
| | SL-F | | |
| Predicted siRNA 59987 | Pred zma 59987- | 861 | 50 |
| | SL-RT | | |
| | Pred zma 59987- | 862 | 20 |
| | SL-F | | |
| | Pred zma 59987- | 863 | 24 |
| | SL-R | | |
| Predicted zma mir 48479 | Pred zma 48479- | 864 | 22 |
| | SL-F | | |
| | Pred zma 48479- | 865 | 50 |
| | SL-RT | | |
| Predicted zma mir 49248 | Pred zma 49248- | 866 | 50 |
| | SL-RT | | |
| | Pred zma 49248- | 867 | 19 |
| | SL-F | | |
| Predicted zma mir 49642 | Pred zma 49642- | 868 | 50 |
| | SL-RT | | |
| | Pred zma 49642- | 869 | 18 |
| | SL-F | | |
| Predicted zma mir 50256 | Pred zma 50256- | 870 | 50 |
| | SL-RT | | |
| | Pred zma 50256- | 871 | 20 |
| | SL-F | | |
| Predicted zma mir 50453 | Pred zma 50453- | 872 | 50 |
| | SL-RT | | |
| | Pred zma 50453- | 873 | 20 |
| | SL-F | | |

### Example 4

### Results of RT-PCR Validation of Selected miRNAs of the Invention

[0311] An RT-PCR analysis was run on selected microRNAs of the invention, using the conventional and stem-loop RT primers as described in Tables 9-11 and 12a-c in Example 3 above. Total RNA was extracted from either leaf or root tissues of maize plants grown as described above, and was used as a template for RT-PCR analysis. Expression level and directionality of several up-regulated and down-regulated microRNAs that were found to be differential on the microarray analysis were verified. Results are summarized in Tables 13a-b below.

TABLE 13a
Summary of RT-PCR Verification Results on
Selected miRNAs using Conventional Method

| Trait | miR Name | p-Value | Fold-change |
|---|---|---|---|
| Drought | Predicted folded 24-nts- | 3.80E−03 | 1.82 (−) |
| | long seq 52255 | | |
| | Predicted zma mir | 1.50E−03 | 1.66 (+) |
| | 48043 | | |
| | Predicted siRNA | 5.20E−03 | 1.51 (+) |
| | 55775 | | |

TABLE 13b
Summary of RT-PCR Verification Results on Selected
miRNAs using Stem Loop RT (Alternative) Method

| Trait | miR Name | p-Value | Fold-change |
|---|---|---|---|
| Drought | Predicted folded 24- | 3.30E−02 | 3.12 (−) |
| | nts-long seq 52255 | | |
| | Predicted siRNA 55869 | 5.30E−02 | 2.00 (+) |
| | Predicted siRNA 55629 | 2.70E−02 | 1.43 (+) |
| Salinity | Predicted zma mir 50145 | 4.20E−02 | 1.75 (+) |
| | Predicted zma mir 49817 | 2.20E−03 | 3.28 (−) |
| | Predicted zma mir 47990 | 5.10E−02 | 3.64 (−) |
| | Predicted siRNA 54895 | 1.70E−04 | 3.98 (+) |
| | Predicted siRNA 55344 | 7.40E−06 | 3.31 (+) |
| | Predicted siRNA 56506 | 1.20E−03 | 2.17 (+) |
| | Predicted zma mir 48459 | 1.50E−03 | 4.81 (−) |
| Heat Shock | Predicted siRNA 59987 | 1.20E−04 | 5.40 (+) |
| | Predicted siRNA 54566 | 4.80E−02 | 1.52 (+) |
| | Predicted siRNA 59851 | 7.60E−05 | 10.30 (−) |
| | Predicted zma mir 50453 | 7.40E−05 | 7.24 (−) |
| | Predicted folded 24- | 6.50E−03 | 4.34 (−) |
| | nts-long seq 53866 | | |

### Example 5

### Gene Cloning Strategies for miRNA and siRNA Molecules and Creation of Binary Vectors for Plant Expression

[0312] The best validated miRNA sequences are cloned into pORE-E1 binary vectors (FIG. 1) for the generation of transgenic plants. The full-length precursor sequence comprising the hairpin sequence of each selected miRNA, is synthesized by Genscript (USA). The resulting clone is digested with appropriate restriction enzymes and inserted into the Multi Cloning Site (MCS) of a similarly digested binary vector through ligation using T4 DNA ligase enzyme (Promega, Madison, Wis., USA).

[0313] In order to clone siRNA sequences, which have different secondary structures than those of miRNA sequences, a method of artificial microRNA (amiRNA) is implemented, where a plant miRNA precursor is modified to express a small RNA sequence that is not related to the original miRNA produced by the precursor. In this method, the mature siRNA sequence replaces the mature sequence of a specific known miRNA (e.g., miR172a and miR319a) but uses its hairpin backbone for amiRNA expression (Schwab et al., 2006, Plant Cell 18(5): 1121-1133). Moreover, the miRNA* sequences are altered such that both structural and energetic features of the miRNA precursor are retained. Examples for such artificial miRNA constructs using either miR172a (Arabidopsis mature sequence AGAAUCUUGAUGAUGCUGCAU SEQ ID NO: 453, stem loop UGCUGUGGCAUCAUCAAGAUUCACAUCUGUUGAUGGACGGUGGUGAUUC ACUCUCCACAAAGUUCUCUAUGAAAAUGAGAAUCUUGAUGAUGCUGCAU CGGC SEQ ID NO: 454) or miR319a (Arabidopsis mature sequence UUGGACUGAAGGGAGCUCCCU SEQ ID NO: 455, stem loop AGAGAGAGCUUCCUUGAGUCCAUUCACAGGUCGUGAUAUGAUUCAAUUA GCUUCCGACUCAUUCAUCCAAAUACCGAGUCGCCAAAAUUCAAACUAGAC UCGUUAAAUGAAUGAAUGAUGCGGUAGACAAAUUGGAUCAUUGAUUCUC UUUGAUUGGACUGAAGGGAGCUCCCUCU SEQ ID NO: 456), as a backbone are presented in FIGS. 3 and 4, respectively.

### Example 6

### Generation of Transgenic Model Plants Expressing the Abiotic Stress Associated Small RNAs

[0314] Arabidoposis thaliana transformation is performed using the floral dip procedure following a slightly modified version of the published protocol (Clough and Bent, 1998, Plant J 16(6): 735-43; and Desfeux et al., 2000, Plant Physiol 123(3): 895-904). Briefly, T0 Plants are planted in small pots filled with soil. The pots are covered with aluminum foil and a plastic dome, kept at 4° C. for 3-4 days, then uncovered and incubated in a growth chamber at 24° C. under 16 hr light: 8 hr dark cycles. A week prior to transformation all individual flowering stems are removed to allow for growth of multiple flowering stems instead. A single colony of Agrobacterium (GV3101) carrying the binary vectors (pORE-E1), harboring the miRNA hairpin sequences with additional flanking sequences both upstream and downstream of it, is cultured in LB medium supplemented with kanamycin (50 mg/L) and gentamycin (25 mg/L). Three days prior to transformation, each culture is incubated at 28° C. for 48 hrs, shaking at 180 rpm. The starter culture is split the day before transformation into two cultures, which are allowed to grow further at 28° C. for 24 hours at 180 rpm. Pellets containing the agrobacterium cells are obtained by centrifugation of the cultures at 5000 rpm for 15 minutes. The pellets are re-suspended in an infiltration medium (10 mM MgCl₂, 5% sucrose, 0.044 μM BAP (Sigma) and 0.03% Tween 20) prepared with double-distilled water.

[0315] Transformation of T0 plants is performed by inverting each plant into the agrobacterium suspension, keeping the flowering stem submerged for 5 minutes. Following inoculation, each plant is blotted dry for 5 minutes on both sides, and placed sideways on a fresh covered tray for 24 hours at 22° C. Transformed (transgenic) plants are then uncovered and transferred to a greenhouse for recovery and maturation. The transgenic T0 plants are grown in the greenhouse for 3-5 weeks until the seeds are ready, which are then harvested from plants and kept at room temperature until sowing.

### Example 7

### Selection of Transgenic Arabidopsis Plants Expressing the Abiotic Stress Genes According to Expression Level

[0316] Arabidopsis seeds are sown and Basta (Bayer) is sprayed for the first time on 1-2 weeks old seedlings, at least twice every few days. Only resistant plants, which are heterozygous for the transgene, survive. PCR on the genomic gene sequence is performed on the surviving seedlings using primers pORE-F2 (fwd, 5′-TTTAGCGATGAACTTCACTC-3′, SEQ ID NO: 457) and a custom designed reverse primer based on each small RNA sequence.

### Example 8

### Abiotic Stress Tolerance Assessments in Control and Transgenic Plants

[0317] Transgenic plants with tolerance to abiotic stress in the form of extreme deficiency in water, high salt concentrations, or heat shock are expected to exhibit better overall survival and growth compared to control non-transgenic plants. Since different plants vary considerably in their tolerance to drought, salinity and heat shock stresses, the duration of drought effected, concentration of salt applied and duration of exposure to high temperature, respectively, can be tailored to the specific plant cultivar or variety (for guidelines specifically to appropriate salt concentrations see, Bernstein and Kafkafi, Root Growth Under Salinity Stress In: Plant Roots, The Hidden Half 3rd ed. Waisel Y, Eshel A and Kafkafi U. (editors) Marcel Dekker Inc., New York, 2002).

[0318] Transgenic Arabidopsis plants are allowed to grow until seed production followed by an evaluation of their drought tolerance. Quantitative parameters of tolerance measured include, but are not limited to, the overall size and yield, average wet and dry weight, growth rate, leaf size, leaf coverage (overall leaf area), the weight of the seeds yielded, the average seed size and the number of seeds produced per plant. Under normal conditions, transgenic plants exhibit a phenotype equivalent or superior to that of the wild type plants. Following stress induction i.e., growth under stress, transformed plants not exhibiting substantial physiological and/or morphological effects, or exhibiting higher measured parameters levels compared to wild-type plants, are identified as abiotic stress tolerant plants.

[0319] Corn seeds were germinated and grown at 22° C. in soil under normal conditions for 3-4 weeks. Seedlings were then used for experimental assays of each of the following abiotic stresses: drought, salinity and heat shock. Generally, each stress assay includes an internal control group of plants that is continuously grown under optimal conditions. For drought induction, irrigation of the stress group was completely stopped for four or six days. For salinity induction, irrigation with regular water is substituted by irrigation with 300 mM NaCl solution in the stress group, for overall 2-3 irrigations in a period of four or six days. For induction of heat shock, the stress group plants are exposed to a high temperature (37° C.) for one hour. For all stress analyses, tissue samples from both experimental groups are then used for RNA analysis, as described below.

[0320] Soil-Based Drought Tolerance Assay

[0321] Screens are performed with transgenic plants over-expressing the differential small RNAs detailed above. Briefly, seeds from control Arabidopsis plants, or other transgenic plants over-expressing the small RNA molecule of the invention are germinated and transferred to pots. Drought stress is obtained after irrigation is ceased and the two plant types (transgenic and control plants) are compared when most control plants develop severe wilting, concurrently, rehydration of the plants is initiated at this point. Transgenic plants are ranked on two levels compared to controls: (1) tolerance to drought conditions, and (2) recovery (survival) following re-watering.

[0322] To illustrate and elaborate on the above drought tolerance assays of any given wild type plant compared to a corresponding transgenic plant (in which a drought-associated miRNA has been over-expressed), two different approaches are taken as follows:

[0323] Lethal drought stress—whereby wild type (used as a control) and transgenic plants (1-3 weeks old) are grown under prolonged extreme drought conditions (duration varies in accordance with plant species). Next, a recovery attempt is implemented during which plants are regularly irrigated and survival level is estimated in the two plant groups 1-2 days post irrigation initiation. While the control (wild type) plant is not expected to survive this extreme stress, the transgenic plant is expected to demonstrate some improved drought tolerance, usually within hours of re-hydration.

[0324] Non-lethal drought stress—whereby wild type (used as a control) and transgenic plants (1-3 weeks old) are grown under regular short-term cycles of drought and re-hydration steps, such that re-hydration is applied when general visible drought symptoms (e.g., evident decrease in turgor pressure of lower leaves) emerge in the experimental plants. This drought/irrigation alternating treatment continues until the flowering stage of the plants is reached, followed by an evaluation of dry matter weight. Both wild type and transgenic plants are expected to survive this non-lethal stress, however, measurable differences in drought tolerance are demonstrated by increased yield of the transgenic compared with the wild type plants.

[0325] Drought Tolerance Assay Using Sorbitol

[0326] Another assay designed to assess whether transgenic plants are more tolerant to drought or severe water deprivation, involves induction of an osmotic stress by the non-ionic osmolyte sorbitol (Mazel et al., 2004, Plant Physiol 134: 118-128). Control and transgenic plants are germinated and grown in plant-agar plates for 4 days, after which they are transferred to plates containing 500 mM sorbitol, to cause delayed growth. Following 7 days of stress treatment, control and transgenic plants are compared by measuring plant weight (wet and dry), yield, and by growth rates measured as time to flowering.

[0327] Methods for Salinity Tolerance Assessment

[0328] Osmotic stress assays, such as chloride and mannitol assays, are aimed to determine whether an osmotic stress phenotype is sodium chloride-specific or a result of a general osmotic stress. Plants which are tolerant to osmotic stress may also exhibit tolerance to drought and/or freezing. For salt and osmotic stress germination experiments, the medium is supplemented with 50, 100, or 200 mM NaCl or 100 mM, 200 mM NaCl, 400 mM mannitol.

[0329] Methods for Heat Stress Tolerance Assessment

[0330] Heat stress tolerance is achieved by exposing the plants to temperatures above 34° C. for a certain period, dependent on the plant and in accordance with the above-guidelines. Plant tolerance is examined after transferring the plants back to 22° C. for recovery and evaluation after 5 days relative to internal controls (non-transgenic plants) or plants not exposed to neither cold or heat stress.

[0331] Methods for Cold Stress Tolerance Assessment

[0332] To analyze cold stress, mature (25 day old) plants are transferred to 4° C. chambers for 1 or 2 weeks, with constitutive light. Next, plants are moved back to the greenhouse for 2 weeks to recover. Following the recovery period, chilling damages such as growth retardation are determined based on measurements of plant weight (wet and dry) and growth rates (e.g. time to flowering, plant size, yield, etc) taken on control and transgenic plants.

### Example 9

### Evaluating Changes in Root Architecture in Transgenic Plants

[0333] Many key traits in modern agriculture can be explained by changes in the root architecture of the plant. Root size and depth have been shown to logically correlate with drought tolerance and fertilizer use efficiency, since deeper and more branched root systems provide better coverage of the soil and can access water stored in deeper soil layers.

[0334] To test whether the transgenic plants produce a modified root structure, plants can be grown in agar plates placed vertically. A digital picture of the plates is taken every few days and the maximal length and total area covered by the plant roots are assessed. From every construct created, several independent transformation events are checked in replicates. To assess significant differences between root features, statistical test, such as a Student's t-test, is employed in order to identify enhanced root features and to provide a statistical value to the findings.

### Example 10

### Method for Generating Transgenic Maize Plants with Enhanced or Reduced Small RNA Regulation of Target Genes

[0335] Target prediction enables two contrasting strategies; an enhancement (positive) or a reduction (negative) of small RNA regulation. Both these strategies have been used in plants and have resulted in significant phenotype alterations. For complete in-vivo assessment of the phenotypic effects of the differential small RNAs of this invention, the inventors plan to implement both over-expression and down-regulation methods on the small RNA molecules found to associate with abiotic stress tolerance as listed in Tables 1-5. In the case of small RNAs that were up-regulated under abiotic stress conditions, an enhancement in abiotic stress tolerance can theoretically be achieved by maintaining their directionality, i.e. over-expressing them. Conversely, in the case of small RNAs that were down-regulated under abiotic stress conditions, enhancement in tolerance can be achieved by reduction of their regulation. Reduction of small RNA regulation of target genes can be accomplished in one of two approaches:

[0336] Expressing a miRNA-Resistant Target

[0337] In this method, silent mutations are introduced in the miRNA binding site of the target gene so that the DNA and resulting RNA sequences are changed to prevent miRNA binding, but the amino acid sequence of the protein is unchanged.

[0338] For design of miRNA-resistant target sequences for the small RNA molecules of the invention, optimization of the nucleic acid sequence in accordance with the preferred codon usage for a particular plant species is required. Tables such as those provided on-line at the Codon Usage Database through the NCBI (National Center for Biotechnology Information) webpage (Hypertext Transfer Protocol://World Wide Web (dot)ncbi(dot)nlm(dot)nih(dot)gov/Taxonomy/Utils/wprintgc(dot)cgi) were used. The Genbank database contains codon usage tables for a number of different species, with its Table 11 (The Bacterial, Archaeal and Plant Plastid Code) being the most relevant for plant species of this invention.

[0339] Expressing a Target-Mimic Sequence

[0340] Plant miRNAs usually lead to cleavage of their targeted gene, with this cleavage typically occurring between bases 10 and 11 of the miRNA. This position is therefore especially sensitive to mismatches between the miRNA and the target. It was found that expressing a DNA sequence that could potentially be targeted by a miRNA, but contains three extra nucleotides (ATC), and thus creating a bulge in a key position (between the two nucleotides that are predicted to hybridize with bases 10-11 of the miRNA), can inhibit the regulation of that miRNA on its native targets (Franco-Zorilla et al., 2007, Nat Genet. 39(8):1033-1037).

[0341] This type of sequence is referred to as a “target-mimic”. Inhibition of the miRNA regulation is presumed to occur through physically capturing the miRNA by the target-mimic sequence and titering-out the miRNA, thereby reducing its abundance. This method was used to reduce the amount and, consequentially, the regulation of miRNA 399 in Arabidopsis.

[0342] Tables 14-16 below present miRNA-resistant target examples and Tables 17-19 below present target mimic examples for differential (downregulated) miRNAs under drought, salinity and heat-shock stress, respectively.

TABLE 14
miRNA-Resistant Target Examples for miRNAs which
were Downregulated under Drought Stress.

| | | Original | ORF | Mutated | |
|---|---|---|---|---|---|
| | Protein | Nucleotide | nucleotide | Nucleotide | NCBI Mir |
| Mir | Sequence/ | Sequence/ | seq/ | Sequence/ | Binding |
| name | SEQ ID NO: | SEQ ID NO: | SEQ ID NO: | SEQ ID NO: | Site |
| Predicted | 874 | 875 | 876 | 877 | 1224-1245 |
| siRNA | | | | 878 | 1224-1245 |
| 55937 | | | | 879 | 1224-1245 |
| | | | | 880 | 1224-1245 |
| | | | | 881 | 1224-1245 |
| | | | | 882 | 1224-1245 |
| | | | | 883 | 1224-1245 |
| | | | | 884 | 1224-1245 |
| | | | | 885 | 1224-1245 |
| | | | | 886 | 1224-1245 |

TABLE 15a
miRNA-Resistant Target Examples for miRNAs which
were Downregulated under Salinity Stress.

| | Original | ORF | Mutated | |
|---|---|---|---|---|
| | Nucleotide | nucleotide | Nucleotide | NCBI Mir |
| Mir | Sequence/ | seq/ | Sequence/ | Binding |
| name | SEQ ID NO: | SEQ ID NO: | SEQ ID NO: | Site |
| Predicted | 887 | 890 | 893 | 100-120 |
| zma mir | | | 894 | 100-120 |
| 48459 | | | 895 | 100-120 |
| | | | 896 | 100-120 |
| | | | 897 | 100-120 |
| | | | 898 | 100-120 |
| | | | 899 | 100-120 |
| | | | 900 | 100-120 |
| | | | 901 | 100-120 |
| | | | 902 | 100-120 |
| Predicted | 888 | 891 | 903 | 414-434 |
| zma mir | | | 904 | 414-434 |
| 48824 | | | 905 | 414-434 |
| | | | 906 | 414-434 |
| | | | 907 | 414-434 |
| | | | 908 | 414-434 |
| | | | 909 | 414-434 |
| Predicted | 889 | 892 | 910 | 515-535 |
| zma mir | | | 911 | 515-535 |
| 49862 | | | 912 | 515-535 |
| | | | 913 | 515-535 |

TABLE 15b
miRNA-Resistant Target Examples for miRNAs which
were Upregulated under Salinity Stress

| | Original | ORF | Mutated | |
|---|---|---|---|---|
| | Nucleotide | nucleotide | Nucleotide | NCBI Mir |
| Mir | Sequence/ | seq/ | Sequence/ | Binding |
| name | SEQ ID NO: | SEQ ID NO: | SEQ ID NO: | Site |
| Predicted | 914 | 923 | 932 | 280-301 |
| siRNA | | | 933 | 280-301 |
| 56314 | | | 934 | 280-301 |
| | | | 935 | 280-301 |
| | | | 936 | 280-301 |
| | | | 937 | 280-301 |
| | | | 938 | 280-301 |
| | | | 939 | 280-301 |
| | | | 940 | 280-301 |
| | | | 941 | 280-301 |
| Predicted | 915 | 924 | 942 | 176-193 |
| siRNA | | | 943 | 176-193 |
| 58212 | | | 944 | 176-193 |
| | | | 945 | 176-193 |
| | 916 | 925 | 946 | 970-987 |
| | | | 947 | 970-987 |
| | | | 948 | 970-987 |
| | | | 949 | 970-987 |
| | | | 950 | 970-987 |
| | | | 951 | 970-987 |
| | | | 952 | 970-987 |
| | 917 | 926 | 953 | 1294-1311 |
| | | | 954 | 1294-1311 |
| | | | 955 | 1294-1311 |
| | | | 956 | 1294-1311 |
| | | | 957 | 1294-1311 |
| | | | 958 | 1294-1311 |
| | | | 959 | 1294-1311 |
| | | | 960 | 1294-1311 |
| | | | 961 | 1294-1311 |
| | | | 962 | 1294-1311 |
| | 918 | 927 | 963 | 183-200 |
| | | | 964 | 183-200 |
| | | | 965 | 183-200 |
| | | | 966 | 183-200 |
| | | | 967 | 183-200 |
| | | | 968 | 183-200 |
| | | | 969 | 183-200 |
| | | | 970 | 183-200 |
| | | | 971 | 183-200 |
| | | | 972 | 183-200 |
| | 919 | 928 | 973 | 130-147 |
| | | | 974 | 130-147 |
| | | | 975 | 130-147 |
| | | | 976 | 130-147 |
| | | | 977 | 130-147 |
| | | | 978 | 130-147 |
| | | | 979 | 130-147 |
| | | | 980 | 130-147 |
| | | | 981 | 130-147 |
| | | | 982 | 130-147 |
| Predicted | 920 | 929 | 983 | 527-544 |
| siRNA | | | 984 | 527-544 |
| 59453 | | | 985 | 527-544 |
| | | | 986 | 527-544 |
| | | | 987 | 527-544 |
| | | | 988 | 527-544 |
| | | | 989 | 527-544 |
| | | | 990 | 527-544 |
| | | | 991 | 527-544 |
| | | | 992 | 527-544 |
| | 921 | 930 | 993 | 1165-1182 |
| | | | 994 | 1165-1182 |
| | | | 995 | 1165-1182 |
| | | | 996 | 1165-1182 |
| | | | 997 | 1165-1182 |
| | | | 998 | 1165-1182 |
| | | | 999 | 1165-1182 |
| | | | 1000 | 1165-1182 |
| | | | 1001 | 1165-1182 |
| | | | 1002 | 1165-1182 |
| | 922 | 931 | 1003 | 1135-1152 |
| | | | 1004 | 1135-1152 |
| | | | 1005 | 1135-1152 |
| | | | 1006 | 1135-1152 |
| | | | 1007 | 1135-1152 |
| | | | 1008 | 1135-1152 |
| | | | 1009 | 1135-1152 |
| | | | 1010 | 1135-1152 |
| | | | 1011 | 1135-1152 |
| | | | 1012 | 1135-1152 |

TABLE 16a
miRNA-Resistant Target Examples for miRNAs which were Downregulated during Heat Shock.

| | | | | | Original | ORF | Mutated | NCBI |
|---|---|---|---|---|---|---|---|---|
| | Mir | Homolog | | Protein | Nucleotide | nucleotide | Nucleotide | Mir |
| Mir | sequence/ | NCBI | | Sequence/ | Sequence/ | seq/ | Sequence/ | Binding |
| name | SEQ ID NO: | Accession | Organism | SEQ ID NO: | SEQ ID NO: | SEQ ID NO: | SEQ ID NO: | Site |
| Predicted | 59 | ACR33787 | Zea mays | 1013 | 1084 | 1155 | | |
| siRNA 57689 | | | | | | | 1226 | 822-839 |
| | | | | | | | 1227 | 822-839 |
| | | | | | | | 1228 | 822-839 |
| | | | | | | | 1229 | 822-839 |
| | | | | | | | 1230 | 822-839 |
| | | ACF83391 | Zea mays | 1014 | 1085 | 1156 | | |
| | | | | | | | 1231 | 575-592 |
| | | | | | | | 1232 | 575-592 |
| | | | | | | | 1233 | 575-592 |
| | | | | | | | 1234 | 575-592 |
| | | | | | | | 1235 | 575-592 |
| Predicted | 60 | XP_002455452 | Sorghum bicolor | 1015 | 1086 | 1157 | | |
| siRNA 58108 | | | | | | | 1236 | 617-634 |
| | | | | | | | 1237 | 617-634 |
| | | | | | | | 1238 | 617-634 |
| | | | | | | | 1239 | 617-634 |
| | | | | | | | 1240 | 617-634 |
| | | NP_001132904 | Zea mays | 1016 | 1087 | 1158 | | |
| | | | | | | | 1241 | 1540-1557 |
| | | | | | | | 1242 | 1540-1557 |
| | | | | | | | 1243 | 1540-1557 |
| | | | | | | | 1244 | 1540-1557 |
| | | | | | | | 1245 | 1540-1557 |
| | | XP_002451348 | Sorghum bicolor | 1017 | 1088 | 1159 | | |
| | | | | | | | 1246 | 1564-1581 |
| | | | | | | | 1247 | 1564-1581 |
| | | | | | | | 1248 | 1564-1581 |
| | | NP_001143089 | Zea mays | 1018 | 1089 | 1160 | | |
| | | | | | | | 1249 | 1528-1545 |
| | | | | | | | 1250 | 1528-1545 |
| | | | | | | | 1251 | 1528-1545 |
| | | | | | | | 1252 | 1528-1545 |
| | | | | | | | 1253 | 1528-1545 |
| Predicted | 61 | ACL53547 | Zea mays | 1019 | 1090 | 1161 | | |
| siRNA 58158 | | | | | | | 1254 | 1179-1199 |
| | | | | | | | 1255 | 1179-1199 |
| | | | | | | | 1256 | 1179-1199 |
| | | | | | | | 1257 | 1179-1199 |
| | | XP_002460562 | Sorghum bicolor | 1020 | 1091 | 1162 | | |
| | | | | | | | 1258 | 1382-1402 |
| | | | | | | | 1259 | 1382-1402 |
| | | | | | | | 1260 | 1382-1402 |
| | | | | | | | 1261 | 1382-1402 |
| | | | | | | | 1262 | 1382-1402 |
| | | ACN31936 | Zea mays | 1021 | 1092 | 1163 | | |
| | | | | | | | 1263 | 1393-1413 |
| | | | | | | | 1264 | 1393-1413 |
| | | | | | | | 1265 | 1393-1413 |
| | | | | | | | 1266 | 1393-1413 |
| | | NP_001183878 | Zea mays | 1022 | 1093 | 1164 | | |
| | | | | | | | 1267 | 1180-1200 |
| | | | | | | | 1268 | 1180-1200 |
| | | | | | | | 1269 | 1180-1200 |
| | | | | | | | 1270 | 1180-1200 |
| Predicted | 64 | NP_001169291 | Zea mays | 1023 | 1094 | 1165 | | |
| siRNA 59056 | | | | | | | 1271 | 353-371 |
| | | | | | | | 1272 | 353-371 |
| | | | | | | | 1273 | 353-371 |
| | | | | | | | 1274 | 353-371 |
| | | XP_002437665 | Sorghum bicolor | 1024 | 1095 | 1166 | | |
| | | | | | | | 1275 | 264-282 |
| | | | | | | | 1276 | 264-282 |
| | | | | | | | 1277 | 264-282 |
| | | | | | | | 1278 | 264-282 |
| | | | | | | | 1279 | 264-282 |
| | | ACL52777 | Zea mays | 1025 | 1096 | 1167 | | |
| | | | | | | | 1280 | 30-Dec |
| | | | | | | | 1281 | 30-Dec |
| | | | | | | | 1282 | 30-Dec |
| | | | | | | | 1283 | 30-Dec |
| | | | | | | | 1284 | 30-Dec |
| | | NP_001140626 | Zea mays | 1026 | 1097 | 1168 | | |
| | | | | | | | 1285 | 328-346 |
| | | | | | | | 1286 | 328-346 |
| | | | | | | | 1287 | 328-346 |
| | | | | | | | 1288 | 328-346 |
| | | | | | | | 1289 | 328-346 |
| | | NP_001143033 | Zea mays | 1027 | 1098 | 1169 | | |
| | | | | | | | 1290 | 60-78 |
| | | | | | | | 1291 | 60-78 |
| | | | | | | | 1292 | 60-78 |
| | | | | | | | 1293 | 60-78 |
| | | | | | | | 1294 | 60-78 |
| | | NP_001146570 | Zea mays | 1028 | 1099 | 1170 | | |
| | | | | | | | 1295 | 1713-1731 |
| | | | | | | | 1296 | 1713-1731 |
| | | | | | | | 1297 | 1713-1731 |
| | | | | | | | 1298 | 1713-1731 |
| | | | | | | | 1299 | 1713-1731 |
| Predicted | 66 | XP_002453411 | Sorghum bicolor | 1029 | 1100 | 1171 | | |
| siRNA 59300 | | | | | | | 1300 | 2064-2083 |
| | | NP_001144625 | Zea mays | 1030 | 1101 | 1172 | | |
| | | | | | | | 1301 | 237-256 |
| | | | | | | | 1302 | 237-256 |
| | | | | | | | 1303 | 237-256 |
| | | | | | | | 1304 | 237-256 |
| | | | | | | | 1305 | 237-256 |
| | | ADX60172 | Zea mays | 1031 | 1102 | 1173 | | |
| | | | | | | | 1306 | 1838-1857 |
| Predicted | 67 | XP_002464695 | Sorghum bicolor | 1032 | 1103 | 1174 | | |
| siRNA 59379 | | | | | | | 1307 | 35-52 |
| | | | | | | | 1308 | 35-52 |
| | | | | | | | 1309 | 35-52 |
| | | | | | | | 1310 | 35-52 |
| Predicted | 69 | XP_002466400 | Sorghum bicolor | 1033 | 1104 | 1175 | | |
| siRNA 59474 | | | | | | | 1311 | 278-296 |
| | | | | | | | 1312 | 278-296 |
| | | | | | | | 1313 | 278-296 |
| | | | | | | | 1314 | 278-296 |
| | | NP_001151137 | Zea mays | 1034 | 1105 | 1176 | | |
| | | | | | | | 1315 | 597-615 |
| | | | | | | | 1316 | 597-615 |
| | | | | | | | 1317 | 597-615 |
| | | | | | | | 1318 | 597-615 |
| | | | | | | | 1319 | 597-615 |
| | | ACG50012 | Zea mays | 1035 | 1106 | 1177 | | |
| | | | | | | | 1320 | 41-59 |
| | | | | | | | 1321 | 41-59 |
| | | | | | | | 1322 | 41-59 |
| | | | | | | | 1323 | 41-59 |
| | | XP_002465546 | Sorghum bicolor | 1036 | 1107 | 1178 | | |
| | | | | | | | 1324 | 387-405 |
| | | | | | | | 1325 | 387-405 |
| | | | | | | | 1326 | 387-405 |
| | | | | | | | 1327 | 387-405 |
| | | | | | | | 1328 | 387-405 |
| | | NP_001149657 | Zea mays | 1037 | 1108 | 1179 | | |
| | | | | | | | 1329 | 279-297 |
| | | | | | | | 1330 | 279-297 |
| | | | | | | | 1331 | 279-297 |
| | | | | | | | 1332 | 279-297 |
| Predicted | 70 | ACF84208 | Zea mays | 1038 | 1109 | 1180 | | |
| siRNA 59736 | | | | | | | 1333 | 491-509 |
| | | | | | | | 1334 | 491-509 |
| | | | | | | | 1335 | 491-509 |
| | | | | | | | 1336 | 491-509 |
| | | | | | | | 1337 | 491-509 |
| | | NP_001183626 | Zea mays | 1039 | 1110 | 1181 | | |
| | | | | | | | 1338 | 225-243 |
| | | | | | | | 1339 | 225-243 |
| | | | | | | | 1340 | 225-243 |
| | | | | | | | 1341 | 225-243 |
| | | | | | | | 1342 | 225-243 |
| Predicted | 71 | ACR34837 | Zea mays | 1040 | 1111 | 1182 | | |
| siRNA 59799 | | | | | | | 1343 | 154-173 |
| Predicted | 72 | NP_001132616 | Zea mays | 1041 | 1112 | 1183 | | |
| siRNA 59800 | | | | | | | 1344 | 343-362 |
| | | | | | | | 1345 | 343-362 |
| | | | | | | | 1346 | 343-362 |
| | | | | | | | 1347 | 343-362 |
| | | | | | | | 1348 | 343-362 |
| Predicted | 75 | XP_002458387 | Sorghum bicolor | 1042 | 1113 | 1184 | | |
| siRNA 59918 | | | | | | | 1349 | 801-821 |
| | | | | | | | 1350 | 801-821 |
| | | | | | | | 1351 | 801-821 |
| | | | | | | | 1352 | 801-821 |
| | | | | | | | 1353 | 801 -821 |
| Predicted zma | 91 | NP_001183850 | Zea mays | 1043 | 1114 | 1185 | | |
| mir 50289 | | | | | | | 1354 | 1414-1432 |
| | | | | | | | 1355 | 1414-1432 |
| | | | | | | | 1356 | 1414-1432 |
| | | | | | | | 1357 | 1414-1432 |
| | | | | | | | 1358 | 1414-1432 |
| | | NP_001168893 | Zea mays | 1044 | 1115 | 1186 | | |
| | | | | | | | 1359 | 1395-1413 |
| Predicted zma | 94 | NP_001147862 | Zea mays | 1045 | 1116 | 1187 | | |
| mir 50480 | | | | | | | 1360 | 626-645 |
| | | | | | | | 1361 | 626-645 |
| | | | | | | | 1362 | 626-645 |
| | | | | | | | 1363 | 626-645 |
| | | | | | | | 1364 | 626-645 |
| | | ACN27570 | Zea mays | 1046 | 1117 | 1188 | | |
| | | | | | | | 1365 | 1304-1323 |
| | | | | | | | 1366 | 1304-1323 |
| | | | | | | | 1367 | 1304-1323 |
| | | | | | | | 1368 | 1304-1323 |
| | | NP_001151285 | Zea mays | 1047 | 1118 | 1189 | | |
| | | | | | | | 1369 | 670-689 |
| | | | | | | | 1370 | 670-689 |
| | | | | | | | 1371 | 670-689 |
| | | | | | | | 1372 | 670-689 |
| | | | | | | | 1373 | 670-689 |
| | | NP_001168251 | Zea mays | 1048 | 1119 | 1190 | | |
| | | | | | | | 1374 | 458-477 |
| | | | | | | | 1375 | 458-477 |
| | | | | | | | 1376 | 458-477 |
| | | | | | | | 1377 | 458-477 |
| | | | | | | | 1378 | 458-477 |
| | | ACN27595 | Zea mays | 1049 | 1120 | 1191 | | |
| | | | | | | | 1379 | 858-877 |
| | | | | | | | 1380 | 858-877 |
| | | | | | | | 1381 | 858-877 |
| | | | | | | | 1382 | 858-877 |
| | | | | | | | 1383 | 858-877 |
| | | NP_001159284 | Zea mays | 1050 | 1121 | 1192 | | |
| | | | | | | | 1384 | 1743-1762 |
| | | | | | | | 1385 | 1743-1762 |
| | | | | | | | 1386 | 1743-1762 |
| | | | | | | | 1387 | 1743-1762 |
| | | | | | | | 1388 | 1743-1762 |
| | | NP_001159342 | Zea mays | 1051 | 1122 | 1193 | | |
| | | | | | | | 1389 | 1751-1770 |
| | | | | | | | 1390 | 1751-1770 |
| | | | | | | | 1391 | 1751-1770 |
| | | | | | | | 1392 | 1751-1770 |
| | | | | | | | 1393 | 1751-1770 |
| | | NP_001146934 | Zea mays | 1052 | 1123 | 1194 | | |
| | | | | | | | 1394 | 151-170 |
| | | | | | | | 1395 | 151-170 |
| | | | | | | | 1396 | 151-170 |
| | | | | | | | 1397 | 151-170 |
| | | XP_002449308 | Sorghum bicolor | 1053 | 1124 | 1195 | | |
| | | | | | | | 1398 | 409-428 |
| | | | | | | | 1399 | 409-428 |
| | | | | | | | 1400 | 409-428 |
| | | | | | | | 1401 | 409-428 |
| | | | | | | | 1402 | 409-428 |
| | | NP_001144625 | Zea mays | 1054 | 1125 | 1196 | | |
| | | | | | | | 1403 | 237-256 |
| | | | | | | | 1404 | 237-256 |
| | | | | | | | 1405 | 237-256 |
| | | | | | | | 1406 | 237-256 |
| | | | | | | | 1407 | 237-256 |
| | | NP_001151654 | Zea mays | 1055 | 1126 | 1197 | | |
| | | | | | | | 1408 | 118-137 |
| | | | | | | | 1409 | 118-137 |
| | | | | | | | 1410 | 118-137 |
| | | | | | | | 1411 | 118-137 |
| | | | | | | | 1412 | 118-137 |
| Predicted zma | 95 | NP_001140853 | Zea mays | 1056 | 1127 | 1198 | | |
| mir 50481 | | | | | | | 1413 | 506-525 |
| | | | | | | | 1414 | 506-525 |
| | | | | | | | 1415 | 506-525 |
| | | | | | | | 1416 | 506-525 |
| | | | | | | | 1417 | 506-525 |
| | | ACN35719 | Zea mays | 1057 | 1128 | 1199 | | |
| | | | | | | | 1418 | 669-688 |
| | | | | | | | 1419 | 669-688 |
| | | | | | | | 1420 | 669-688 |
| | | | | | | | 1421 | 669-688 |
| | | | | | | | 1422 | 669-688 |
| | | NP_001130351 | Zea mays | 1058 | 1129 | 1200 | | |
| | | | | | | | 1423 | 1174-1193 |
| | | | | | | | 1424 | 1174-1193 |
| | | | | | | | 1425 | 1174-1193 |
| | | | | | | | 1426 | 1174-1193 |
| | | | | | | | 1427 | 1174-1193 |
| | | ACF84329 | Zea mays | 1059 | 1130 | 1201 | | |
| | | | | | | | 1428 | 223-242 |
| | | | | | | | 1429 | 223-242 |
| | | | | | | | 1430 | 223-242 |
| | | | | | | | 1431 | 223-242 |
| | | | | | | | 1432 | 223-242 |
| | | XP_002463817 | Sorghum bicolor | 1060 | 1131 | 1202 | | |
| | | | | | | | 1433 | 1298-1317 |
| | | | | | | | 1434 | 1298-1317 |
| | | | | | | | 1435 | 1298-1317 |
| | | | | | | | 1436 | 1298-1317 |
| | | XP_002465627 | Sorghum bicolor | 1061 | 1132 | 1203 | | |
| | | | | | | | 1437 | 1990-2009 |
| | | | | | | | 1438 | 1990-2009 |
| | | | | | | | 1439 | 1990-2009 |
| | | | | | | | 1440 | 1990-2009 |
| | | | | | | | 1441 | 1990-2009 |
| | | NP_001105211 | Zea mays | 1062 | 1133 | 1204 | | |
| | | | | | | | 1442 | 911-930 |
| | | | | | | | 1443 | 911-930 |
| | | | | | | | 1444 | 911-930 |
| | | | | | | | 1445 | 911-930 |
| | | | | | | | 1446 | 911-930 |
| | | NP_001158910 | Zea mays | 1063 | 1134 | 1205 | | |
| | | | | | | | 1447 | 491-510 |
| | | | | | | | 1448 | 491-510 |
| | | | | | | | 1449 | 491-510 |
| | | | | | | | 1450 | 491-510 |
| | | ACF84241 | Zea mays | 1064 | 1135 | 1206 | | |
| | | | | | | | 1451 | 1477-1496 |
| | | | | | | | 1452 | 1477-1496 |
| | | | | | | | 1453 | 1477-1496 |
| | | | | | | | 1454 | 1477-1496 |
| | | NP_001132755 | Zea mays | 1065 | 1136 | 1207 | | |
| | | | | | | | 1455 | 591-610 |
| | | | | | | | 1456 | 591-610 |
| | | | | | | | 1457 | 591-610 |
| | | | | | | | 1458 | 591-610 |
| | | | | | | | 1459 | 591-610 |
| | | NP_001144625 | Zea mays | 1066 | 1137 | 1208 | | |
| | | | | | | | 1460 | 237-256 |
| | | | | | | | 1461 | 237-256 |
| | | | | | | | 1462 | 237-256 |
| | | | | | | | 1463 | 237-256 |
| | | | | | | | 1464 | 237-256 |
| | | XP_002453372 | Sorghum bicolor | 1067 | 1138 | 1209 | | |
| | | | | | | | 1465 | 26-45 |
| | | | | | | | 1466 | 26-45 |
| | | | | | | | 1467 | 26-45 |
| | | | | | | | 1468 | 26-45 |
| | | | | | | | 1469 | 26-45 |
| Predicted zma | 96 | XP_002439337 | Sorghum bicolor | 1068 | 1139 | 1210 | | |
| mir 50483 | | | | | | | 1470 | 592-611 |
| | | ACF80701 | Zea mays | 1069 | 1140 | 1211 | | |
| | | | | | | | 1471 | 897-916 |
| | | | | | | | 1472 | 897-916 |
| | | | | | | | 1473 | 897-916 |
| | | | | | | | 1474 | 897-916 |
| | | | | | | | 1475 | 897-916 |
| | | XP_002455492 | Sorghum bicolor | 1070 | 1141 | 1212 | | |
| | | | | | | | 1476 | 342-361 |
| | | | | | | | 1477 | 342-361 |
| | | | | | | | 1478 | 342-361 |
| | | | | | | | 1479 | 342-361 |
| | | | | | | | 1480 | 342-361 |
| | | NP_001142046 | Zea mays | 1071 | 1142 | 1213 | | |
| | | | | | | | 1481 | 360-379 |
| | | | | | | | 1482 | 360-379 |
| | | | | | | | 1483 | 360-379 |
| | | | | | | | 1484 | 360-379 |
| | | XP_002451328 | Sorghum bicolor | 1072 | 1143 | 1214 | | |
| | | | | | | | 1485 | 1185-1204 |
| | | | | | | | 1486 | 1185-1204 |
| | | | | | | | 1487 | 1185-1204 |
| | | | | | | | 1488 | 1185-1204 |
| | | | | | | | 1489 | 1185-1204 |
| | | NP_001142230 | Zea mays | 1073 | 1144 | 1215 | | |
| | | | | | | | 1490 | 199-218 |
| | | ACN26514 | Zea mays | 1074 | 1145 | 1216 | | |
| | | | | | | | 1491 | 429-448 |
| | | | | | | | 1492 | 429-448 |
| | | | | | | | 1493 | 429-448 |
| | | | | | | | 1494 | 429-448 |
| | | | | | | | 1495 | 429-448 |
| | | NP_001152292 | Zea mays | 1075 | 1146 | 1217 | | |
| | | | | | | | 1496 | 230-249 |
| | | | | | | | 1497 | 230-249 |
| | | | | | | | 1498 | 230-249 |
| | | | | | | | 1499 | 230-249 |
| | | | | | | | 1500 | 230-249 |
| | | ACF81426 | Zea mays | 1076 | 1147 | 1218 | | |
| | | | | | | | 1501 | 690-709 |
| | | | | | | | 1502 | 690-709 |
| | | | | | | | 1503 | 690-709 |
| | | | | | | | 1504 | 690-709 |
| | | | | | | | 1505 | 690-709 |
| | | NP_001141352 | Zea mays | 1077 | 1148 | 1219 | | |
| | | | | | | | 1506 | 240-259 |
| | | | | | | | 1507 | 240-259 |
| | | | | | | | 1508 | 240-259 |
| | | | | | | | 1509 | 240-259 |
| | | | | | | | 1510 | 240-259 |
| | | XP_002437204 | Sorghum bicolor | 1078 | 1149 | 1220 | | |
| | | | | | | | 1511 | 447-466 |
| | | | | | | | 1512 | 447-466 |
| | | | | | | | 1513 | 447-466 |
| | | | | | | | 1514 | 447-466 |
| | | | | | | | 1515 | 447-466 |
| | | NP_001141965 | Zea mays | 1079 | 1150 | 1221 | | |
| | | | | | | | 1516 | 993-1012 |
| | | | | | | | 1517 | 993-1012 |
| | | | | | | | 1518 | 993-1012 |
| | | | | | | | 1519 | 993-1012 |
| | | | | | | | 1520 | 993-1012 |
| | | NP_001130136 | Zea mays | 1080 | 1151 | 1222 | | |
| | | | | | | | 1521 | 750-769 |
| | | | | | | | 1522 | 750-769 |
| | | | | | | | 1523 | 750-769 |
| | | | | | | | 1524 | 750-769 |
| | | | | | | | 1525 | 750-769 |
| | | XP_002464517 | Sorghum bicolor | 1081 | 1152 | 1223 | | |
| | | | | | | | 1526 | 345-364 |
| | | | | | | | 1527 | 345-364 |
| | | | | | | | 1528 | 345-364 |
| | | | | | | | 1529 | 345-364 |
| | | | | | | | 1530 | 345-364 |
| | | NP_001147443 | Zea mays | 1082 | 1153 | 1224 | | |
| | | | | | | | 1531 | 830-849 |
| Predicted zma | 98 | ACG38830 | Zea mays | 1083 | 1154 | 1225 | | |
| mir 50682 | | | | | | | 1532 | 561-580 |
| | | | | | | | 1533 | 561-580 |
| | | | | | | | 1534 | 561-580 |
| | | | | | | | 1535 | 561-580 |

TABLE 16b
miRNA-Resistant Target Examples for miRNAs which were Upregulated during Heat Shock

| | | | | | Original | ORF | Mutated | |
|---|---|---|---|---|---|---|---|---|
| | | Homolog | | Protein | Nucleotide | nucleotide | Nucleotide | NCBI Mir |
| Mir | | NCBI | | Sequence/ | Sequence/ | seq/ | Sequence/ | Binding |
| name | SEQ ID NO: | Accession | Organism | SEQ ID NO: | SEQ ID NO: | SEQ ID NO: | SEQ ID NO: | Site |
| Predicted folded | 177 | NP_001169556 | Zea mays | 1536 | 1563 | 1590 | | |
| 24-nts-long | | | | | | | 1617 | 1561-1584 |
| seq 52606 | | | | | | | 1618 | 1561-1584 |
| | | | | | | | 1619 | 1561-1584 |
| | | | | | | | 1620 | 1561-1584 |
| Predicted siRNA | 181 | NP_001152619 | Zea mays | 1537 | 1564 | 1591 | | |
| 54566 | | | | | | | 1621 | 837-858 |
| | | | | | | | 1622 | 837-858 |
| | | | | | | | 1623 | 837-858 |
| | | | | | | | 1624 | 837-858 |
| | | NP_001130342 | Zea mays | 1538 | 1565 | 1592 | | |
| | | | | | | | 1625 | 212-233 |
| | | | | | | | 1626 | 212-233 |
| | | | | | | | 1627 | 212-233 |
| | | | | | | | 1628 | 212-233 |
| | | | | | | | 1629 | 212-233 |
| Predicted siRNA | 182 | ACN33370 | Zea mays | 1539 | 1566 | 1593 | | |
| 54666 | | | | | | | 1630 | 207-228 |
| | | | | | | | 1631 | 207-228 |
| | | | | | | | 1632 | 207-228 |
| | | | | | | | 1633 | 207-228 |
| | | | | | | | 1634 | 207-228 |
| | | ACR38139 | Zea mays | 1540 | 1567 | 1594 | | |
| | | | | | | | 1635 | 680-701 |
| | | | | | | | 1636 | 680-701 |
| | | | | | | | 1637 | 680-701 |
| | | NP_001141527 | Zea mays | 1541 | 1568 | 1595 | | |
| | | | | | | | 1638 | 848-869 |
| | | | | | | | 1639 | 848-869 |
| | | | | | | | 1640 | 848-869 |
| | | | | | | | 1641 | 848-869 |
| | | | | | | | 1642 | 848-869 |
| | | NP_001130841 | Zea mays | 1542 | 1569 | 1596 | | |
| | | | | | | | 1643 | 327-348 |
| | | | | | | | 1644 | 327-348 |
| | | | | | | | 1645 | 327-348 |
| | | | | | | | 1646 | 327-348 |
| | | | | | | | 1647 | 327-348 |
| | | NP_001183778 | Zea mays | 1543 | 1570 | 1597 | | |
| | | | | | | | 1648 | 588-609 |
| | | | | | | | 1649 | 588-609 |
| | | | | | | | 1650 | 588-609 |
| | | | | | | | 1651 | 588-609 |
| | | | | | | | 1652 | 588-609 |
| Predicted siRNA | 183 | NP_001150152 | Zea mays | 1544 | 1571 | 1598 | | |
| 55684 | | | | | | | 1653 | 231-252 |
| | | | | | | | 1654 | 231-252 |
| | | | | | | | 1655 | 231-252 |
| | | | | | | | 1656 | 231-252 |
| | | | | | | | 1657 | 231-252 |
| | | NP_001146149 | Zea mays | 1545 | 1572 | 1599 | | |
| | | | | | | | 1658 | 252-273 |
| | | | | | | | 1659 | 252-273 |
| | | | | | | | 1660 | 252-273 |
| | | | | | | | 1661 | 252-273 |
| | | | | | | | 1662 | 252-273 |
| | | NP_001141527 | Zea mays | 1546 | 1573 | 1600 | | |
| | | | | | | | 1663 | 846-867 |
| | | | | | | | 1664 | 846-867 |
| | | | | | | | 1665 | 846-867 |
| | | | | | | | 1666 | 846-867 |
| | | | | | | | 1667 | 846-867 |
| Predicted siRNA | 190 | NP_001105185 | Zea mays | 1547 | 1574 | 1601 | | |
| 56658 | | | | | | | 1668 | 102-125 |
| | | | | | | | 1669 | 102-125 |
| | | | | | | | 1670 | 102-125 |
| | | | | | | | 1671 | 102-125 |
| | | | | | | | 1672 | 102-125 |
| Predicted siRNA | 192 | NP_001147862 | Zea mays | 1548 | 1575 | 1602 | | |
| 56885 | | | | | | | 1673 | 1287-1308 |
| | | | | | | | 1674 | 1287-1308 |
| | | | | | | | 1675 | 1287-1308 |
| | | | | | | | 1676 | 1287-1308 |
| | | | | | | | 1677 | 1287-1308 |
| | | XP_002467897 | Sorghum bicolor | 1549 | 1576 | 1603 | | |
| | | | | | | | 1678 | 188-209 |
| | | | | | | | 1679 | 188-209 |
| | | | | | | | 1680 | 188-209 |
| | | | | | | | 1681 | 188-209 |
| | | | | | | | 1682 | 188-209 |
| | | NP_001062056 | Oryza sativa | 1550 | 1577 | 1604 | | |
| | | | Japonica Group | | | | 1683 | 1145-1166 |
| | | | | | | | 1684 | 1145-1166 |
| | | | | | | | 1685 | 1145-1166 |
| | | | | | | | 1686 | 1145-1166 |
| | | | | | | | 1687 | 1145-1166 |
| Predicted siRNA | 203 | NP_001131832 | Zea mays | 1551 | 1578 | 1605 | | |
| 60742 | | | | | | | 1688 | 542-563 |
| | | | | | | | 1689 | 542-563 |
| | | | | | | | 1690 | 542-563 |
| | | | | | | | 1691 | 542-563 |
| | | | | | | | 1692 | 542-563 |
| Predicted siRNA | 80 | NP_001145763 | Zea mays | 1552 | 1579 | 1606 | | |
| 60833 | | | | | | | 1693 | 434-451 |
| | | | | | | | 1694 | 434-451 |
| | | | | | | | 1695 | 434-451 |
| | | | | | | | 1696 | 434-451 |
| | | | | | | | 1697 | 434-451 |
| | | NP_001149387 | Zea mays | 1553 | 1580 | 1607 | | |
| | | | | | | | 1698 | 673-690 |
| | | | | | | | 1699 | 673-690 |
| | | | | | | | 1700 | 673-690 |
| | | | | | | | 1701 | 673-690 |
| | | | | | | | 1702 | 673-690 |
| Predicted zma | 207 | XP_002465048 | Sorghum bicolor | 1554 | 1581 | 1608 | | |
| mir 48482 | | | | | | | 1703 | 380-401 |
| | | | | | | | 1704 | 380-401 |
| | | | | | | | 1705 | 380-401 |
| | | | | | | | 1706 | 380-401 |
| | | | | | | | 1707 | 380-401 |
| Predicted zma | 210 | BAJ84854 | Hordeum vulgare | 1555 | 1582 | 1609 | | |
| mir49259 | | | subsp. vulgare | | | | 1708 | 456-477 |
| | | | | | | | 1709 | 456-477 |
| | | | | | | | 1710 | 456-477 |
| | | | | | | | 1711 | 456-477 |
| | | | | | | | 1712 | 456-477 |
| Predicted zma | 211 | XP_002448827 | Sorghum bicolor | 1556 | 1583 | 1610 | | |
| mir 49642 | | | | | | | 1713 | 129-150 |
| | | ACN25803 | Zea mays | 1557 | 1584 | 1611 | | |
| | | | | | | | 1714 | 1138-1159 |
| | | | | | | | 1715 | 1138-1159 |
| | | | | | | | 1716 | 1138-1159 |
| | | | | | | | 1717 | 1138-1159 |
| | | | | | | | 1718 | 1138-1159 |
| | | ACO72994 | Zea mays | 1558 | 1585 | 1612 | | |
| | | | | | | | 1719 | 174-195 |
| | | | | | | | 1720 | 174-195 |
| | | | | | | | 1721 | 174-195 |
| | | | | | | | 1722 | 174-195 |
| | | | | | | | 1723 | 174-195 |
| Predicted zma | 213 | XP_002452943 | Sorghum bicolor | 1559 | 1586 | 1613 | | |
| mir 50085 | | | | | | | 1724 | 820-840 |
| | | | | | | | 1725 | 820-840 |
| | | | | | | | 1726 | 820-840 |
| | | | | | | | 1727 | 820-840 |
| | | | | | | | 1728 | 820-840 |
| | | NP_001150320 | Zea mays | 1560 | 1587 | 1614 | | |
| | | | | | | | 1729 | 349-369 |
| | | | | | | | 1730 | 349-369 |
| | | XP_002436903 | Sorghum bicolor | 1561 | 1588 | 1615 | | |
| | | | | | | | 1731 | 813-833 |
| | | | | | | | 1732 | 813-833 |
| | | | | | | | 1733 | 813-833 |
| | | | | | | | 1734 | 813-833 |
| | | | | | | | 1735 | 813-833 |
| Predicted zma | 215 | ACN35534 | Zea mays | 1562 | 1589 | 1616 | | |
| mir 50486 | | | | | | | 1736 | 352-373 |
| | | | | | | | 1737 | 352-373 |
| | | | | | | | 1738 | 352-373 |
| | | | | | | | 1739 | 352-373 |

TABLE 17
Target Mimic Examples for miRNAs which were
Downregulated under Drought Stress.

| | | Bulge in |
|---|---|---|
| | | Target Binding |
| | Mir Sequence/ | Sequence/ |
| Mir Name | SEQ ID NO: | SEQ ID NO: |
| Predicted folded 24-nts-long seq | 1 | 1741 |
| 52255 | | |
| Predicted siRNA 55937 | 2 | 1742 |
| Predicted siRNA 56066 | 18 | 1743 |
| Predicted siRNA 58170 | 3 | 1744 |
| Predicted zma mir 47934 | 4 | 1745 |
| Predicted zma mir 48120 | 5 | 1746 |
| Predicted zma mir 48408 | 6 | 1747 |
| Predicted zma mir 48451 | 7 | 1748 |
| Predicted zma mir 48462 | 8 | 1749 |
| Predicted zma mir 48520 | 9 | 1750 |
| Predicted zma mir 48653 | 26 | 1751 |
| Predicted zma mir 48669 | 10 | 1752 |
| Predicted zma mir 48682 | 11 | 1753 |
| Predicted zma mir 48841 | 12 | 1754 |
| Predicted zma mir 48966 | 13 | 1755 |
| Predicted zma mir 49156 | 14 | 1756 |
| Predicted zma mir 49199 | 15 | 1757 |

TABLE 18
Target Mimic Examples for miRNAs which
were Downregulated during Salt Stress.

| | | Bulge in |
|---|---|---|
| | | Target Binding |
| | Mir Sequence/ | Sequence/ |
| Mir Name | SEQ ID NO: | SEQ ID NO: |
| Predicted folded 24-nts-long seq | 33 | 1758 |
| 54187 | | |
| Predicted zma mir 47990 | 34 | 1759 |
| Predicted zma mir 48459 | 35 | 1760 |
| Predicted zma mir 48753 | 36 | 1761 |
| Predicted zma mir 48824 | 37 | 1762 |
| Predicted zma mir 48848 | 38 | 1763 |
| Predicted zma mir 49575 | 39 | 1764 |
| Predicted zma mir 49817 | 40 | 1765 |
| Predicted zma mir 49855 | 41 | 1766 |
| Predicted zma mir 49862 | 42 | 1767 |

TABLE 19
Target Mimic Examples for miRNAs which
were Downregulated during Heat Shock

| | | Bulge in |
|---|---|---|
| | | Target Binding |
| | Mir Sequence/ | Sequence/ |
| Mir Name | SEQ ID NO: | SEQ ID NO: |
| Predicted folded 24-nts-long seq | 53 | 1768 |
| 52724 | | |
| Predicted folded 24-nts-long seq | 54 | 1769 |
| 53866 | | |
| Predicted siRNA 54735 | 55 | 1770 |
| Predicted siRNA 55208 | 56 | 1771 |
| Predicted siRNA 56396 | 57 | 1772 |
| Predicted siRNA 56791 | 58 | 1773 |
| Predicted siRNA 57689 | 59 | 1774 |
| Predicted siRNA 58108 | 60 | 1775 |
| Predicted siRNA 58158 | 61 | 1776 |
| Predicted siRNA 58720 | 62 | 1777 |
| Predicted siRNA 58740 | 63 | 1778 |
| Predicted siRNA 59056 | 64 | 1779 |
| Predicted siRNA 59211 | 65 | 1780 |
| Predicted siRNA 59300 | 66 | 1781 |
| Predicted siRNA 59379 | 67 | 1782 |
| Predicted siRNA 59410 | 68 | 1783 |
| Predicted siRNA 59474 | 69 | 1784 |
| Predicted siRNA 59736 | 70 | 1785 |
| Predicted siRNA 59799 | 71 | 1786 |
| Predicted siRNA 59800 | 72 | 1787 |
| Predicted siRNA 59820 | 73 | 1788 |
| Predicted siRNA 59851 | 74 | 1789 |
| Predicted siRNA 59918 | 75 | 1790 |
| Predicted siRNA 59935 | 76 | 1791 |
| Predicted siRNA 59937 | 77 | 1792 |
| Predicted siRNA 60421 | 78 | 1793 |
| Predicted siRNA 60533 | 79 | 1794 |
| Predicted siRNA 60833 | 80 | 1795 |
| Predicted siRNA 61212 | 81 | 1796 |
| Predicted siRNA 61236 | 82 | 1797 |
| Predicted zma mir 48327 | 83 | 1798 |
| Predicted zma mir 48489 | 84 | 1799 |
| Predicted zma mir 49248 | 85 | 1800 |
| Predicted zma mir 49310 | 86 | 1801 |
| Predicted zma mir 49952 | 87 | 1802 |
| Predicted zma mir 50120 | 88 | 1803 |
| Predicted zma mir 50166 | 89 | 1804 |
| Predicted zma mir 50256 | 90 | 1805 |
| Predicted zma mir 50289 | 91 | 1806 |
| Predicted zma mir 50388 | 92 | 1807 |
| Predicted zma mir 50453 | 93 | 1808 |
| Predicted zma mir 50480 | 94 | 1809 |
| Predicted zma mir 50481 | 95 | 1810 |
| Predicted zma mir 50483 | 96 | 1811 |
| Predicted zma mir 50570 | 97 | 1812 |
| Predicted zma mir 50682 | 98 | 1813 |
| Predicted zma mir 50695 | 99 | 1814 |
| Predicted zma mir 50701 | 100 | 1815 |

### Example 11

### Target Gene Identification Using Bioinformatic Tools

[0343] Homologous or orthologous genes to the genes of interest in maize and/or Arabidopsis are found through a proprietary tool that analyzes publicly available genomic as well as expression and gene annotation databases from multiple plant species. Homologous and orthologous protein and nucleotide sequences of target genes of the small RNA sequences of the invention, were found using BLAST having at least 70% identity on at least 60% of the entire master gene length, and are summarized in Table 6-8 below.

TABLE 20
Targets of small RNAs listed in Tables 1 and 2 above

| | Mir | Homolog | Nucleotide | | | | | |
|---|---|---|---|---|---|---|---|---|
| Mir | Binding | NCBI | NCBI GI | | | | Protein | Nucleotide |
| name | Position | Accession | number | Annotation | Identity | Organism | seq id no: | seq id no: |
| ath-miR164c | 758-778 | CAH56057 | 60098047 | hypothetical protein [Zea mays] | 1 | Zea mays | 1816 | 2015 |
| | | XP_002441978 | 242083105 | hypothetical protein SORBIDRAFT_08g006330 | 0.793296 | Sorghum bicolor | 1817 | 2016 |
| | | | | [Sorghum bicolor] &gt:gi\|241942671\|gb\|EES15816.1\| | | | | |
| | | | | hypothetical protein SORBIDRAFT_08g006330 | | | | |
| | | | | [Sorghum bicolor] | | | | |
| | | EAZ00836 | 54362548 | hypothetical protein OsI_22867 [Oryza sativa Indica | 0.701117 | Oryza sativa | 1818 | |
| | | | | Group] | | Indica Group | | |
| | | NP_001057578 | 115467957 | Os06g0344900 [Oryza sativa Japonica Group] | 0.703911 | Oryza sativa | 1819 | 2017 |
| | | | | &gt:gi\|54291113\|dbj\|BAD61787.1\| putative NAM | | Japonica Group | | |
| | | | | [Oryza sativa Japonica Group] | | | | |
| | | | | &gt:gi\|113595618\|dbj\|BAF19492.1\| Os06g0344900 | | | | |
| | | | | [Oryza sativa Japonica Group] | | | | |
| | 671-691 | ADX60129 | 323388648 | NAC transcription factor [Zea mays] | 1 | Zea mays | 1820 | 2018 |
| | | ACF86180 | 194704191 | unknown [Zea mays] | 1 | Zea mays | 1821 | 2019 |
| | | NP_001148231 | 226507011 | NAC domain-containing protein 21/22 [Zea mays] | 0.956364 | Zea mays | 1822 | 2020 |
| | | | | &gt:gi\|195616832\|gb\|ACG30246.1\| NAC domain- | | | | |
| | | | | containing protein 21/22 [Zea mays] | | | | |
| | | XP_002443999 | 242078460 | hypothetical protein SORBIDRAFT_07g005610 | 0.854545 | Sorghum bicolor | 1823 | 2021 |
| | | | | [Sorghum bicolor] &gt:gi\|241940349\|gb\|EES13494.1\| | | | | |
| | | | | hypothetical protein SORBIDRAFT_07g005610 | | | | |
| | | | | [Sorghum bicolor] | | | | |
| | 409-429 | NP_00116879 | 293334660 | hypothetical protein LOC100382594 [Zea mays] | 1 | Zea mays | 1824 | 2022 |
| | | | | &gt:gi\|223973065\|gb\|ACN30720.1\| unknown [Zea mays] | | | | |
| | | XP_002463116 | 242050743 | hypothetical protein SORBIDRAFT_02g038150 | 0.944532 | Sorghum bicolor | 1825 | 2023 |
| | | | | [Sorghum bicolor] &gt:gi\|241926493\|gb\|EER99637.1\| | | | | |
| | | | | hypothetical protein SORBIDRAFT_02g038150 | | | | |
| | | | | [Sorghum bicolor] | | | | |
| | | NP_001060161 | 115473124 | Os07g0592200 [Oryza sativa Japonica Group] | 0.852615 | Oryza sativa | 1826 | 2024 |
| | | | | &gt:gi\|29027762\|dbj\|BAC65898.1\| putative CND41, | | Japonica Group | | |
| | | | | chloroplast nucleoid DNA binding protein | | | | |
| | | | | [Oryza sativa Japonica Group] | | | | |
| | | | | &gt:gi\|113611697\|dbj\|BAF22075.1\| Os07g0592200 | | | | |
| | | | | [Oryza sativa Japonica Group] | | | | |
| | | EEE67511 | 54398660 | hypothetical protein OsJ_24961 [Oryza sativa Japonica | 0.852615 | Oryza sativa | 1827 | |
| | | | | Group] | | Japonica Group | | |
| | | EEC82371 | 54362548 | hypothetical protein OsI_26705 [Oryza sativa Indica | 0.85103 | Oryza sativa | 1828 | |
| | | | | Group] | | Indica Group | | |
| | | BAK03251 | 326511103 | predicted protein [Hordeum vulgare subsp. vulgare] | 0.806656 | Hordeum vulgare | 1829 | 2025 |
| | | | | | | subsp. vulgare | | |
| | | BAK02500 | 326501421 | predicted protein [Hordeum vulgare subsp. vulgare] | 0.805071 | Hordeum vulgare | 1830 | 2026 |
| | | | | | | subsp. vulgare | | |
| | 854-874 | ACG42560 | 195646183 | CUC2 [Zea mays] | 1 | Zea mays | 1831 | 2027 |
| | | XP_002452517 | 242062455 | hypothetical protein SORBIDRAFT_04g027290 | 0.843902 | Sorghum bicolor | 1832 | 2028 |
| | | | | [Sorghum bicolor] &gt:gi\|241932348\|gb\|EES05493.1\| | | | | |
| | | | | hypothetical protein SORBIDRAFT_04g027290 | | | | |
| | | | | [Sorghum bicolor] | | | | |
| | 953-973 | ACN28126 | 223948084 | unknown [Zea mays] | 1 | Zea mays | 1833 | 2029 |
| | | NP_001132469 | 212723361 | hypothetical protein LOC100193925 [Zea mays] | 0.922652 | Zea mays | 1834 | 2030 |
| | | | | &gt:gi\|194694468\|gb\|ACF81318.1\| unknown [Zea mays] | | | | |
| | | ACG34790 | 195625919 | hypothetical protein [Zea mays] | 0.911602 | Zea mays | 1835 | 2031 |
| | | XP_002455261 | 242052230 | hypothetical protein SORBIDRAFT_03g007360 | 0.737569 | Sorghum bicolor | 1836 | 2032 |
| | | | | [Sorghum bicolor] &gt:gi\|241927236\|gb\|EES00381.1\| | | | | |
| | | | | hypothetical protein SORBIDRAFT_03g007360 | | | | |
| | | | | [Sorghum bicolor] | | | | |
| osa-miR2907a | 205-226 | XP_002448756 | 242077639 | hypothetical protein SORBIDRAFT_06g032630 | 1 | Sorghum bicolor | 1837 | 2033 |
| | | | | [Sorghum bicolor] &gt:gi\|241939939\|gb\|EES13084.1\| | | | | |
| | | | | hypothetical protein SORBIDRAFT_06g032630 | | | | |
| | | | | [Sorghum bicolor] | | | | |
| | | NP_001143260 | 226499897 | hypothetical protein LOC100275789 [Zea mays] | 0.797468 | Zea mays | 1838 | 2034 |
| | | | | &gt:gi\|195616738\|gb\|ACG30199.1\| hypothetical | | | | |
| | | | | protein [Zea mays] | | | | |
| | | NP_001143008 | 226500337 | hypothetical protein LOC100275471 [Zea mays] | 0.794304 | Zea mays | 1839 | 2035 |
| | | | | &gt:gi\|195612812\|gb\|ACG28236.1\| hypothetical | | | | |
| | | | | protein [Zea mays] | | | | |
| | 797-818 | XP_002458417 | 242058542 | hypothetical protein SORBIDRAFT_03g033100 | 1 | Sorghum bicolor | 1840 | 2036 |
| | | | | [Sorghum bicolor] &gt:gi\|241930392\|gb\|EES03537.1\| | | | | |
| | | | | hypothetical protein SORBIDRAFT_03g033100 | | | | |
| | | | | [Sorghum bicolor] | | | | |
| | | NP_001151156 | 226529416 | LOC100284789 [Zea mays] | 0.852518 | Zea mays | 1841 | 2037 |
| | | | | &gt:gi\|195644686\|gb\|ACG41811.1\| phosphatase | | | | |
| | | | | phospho1 [Zea mays] | | | | |
| | | ACG25081 | 195606501 | phosphatase phospho1 [Zea mays] | 0.848921 | Zea mays | 1842 | 2038 |
| | | NP_001130133 | 212275705 | hypothetical protein LOC100191227 [Zea mays] | 0.845324 | Zea mays | 1843 | 2039 |
| | | | | &gt:gi\|194688368\|gb\|ACF78268.1\| unknown [Zea mays] | | | | |
| | | | | &gt:gi\|195606422\|gb\|ACG25041.1\| phosphatase | | | | |
| | | | | phospho1 [Zea mays] | | | | |
| | | | | &gt:gi\|195606828\|gb\|ACG25244.1\| phosphatase | | | | |
| | | | | phospho1 [Zea mays] | | | | |
| | | BAJ95704 | 326507253 | predicted protein [Hordeum vulgare subsp. vulgare] | 0.78777 | Hordeum vulgare | 1844 | 2040 |
| | | | | | | subsp. vulgare | | |
| | | BAJ88911 | 326525728 | predicted protein [Hordeum vulgare subsp. vulgare] | 0.784173 | Hordeum vulgare | 1845 | 2041 |
| | | | | | | subsp. vulgare | | |
| | | EAY75640 | 54362548 | hypothetical protein OsI_03545 [Oryza sativa Indica | 0.780576 | Oryza sativa | 1846 | |
| | | | | Group] | | Indica Group | | |
| | | ABI95993 | 115361862 | acid phosphatase [Oryza sativa Japonica Group] | 0.773381 | Oryza sativa | 1847 | 2042 |
| | | | | | | Japonica Group | | |
| | | NP_001044089 | 115439618 | Os01g0720400 [Oryza sativa Japonica Group] | 0.773381 | Oryza sativa | 1848 | 2043 |
| | | | | &gt:gi\|18461219\|dbj\|BAB84416.1\| phosphatase-like | | Japonica Group | | |
| | | | | [Oryza sativa Japonica Group] | | | | |
| | | | | &gt:gi\|113533620\|dbj\|BAF06003.1\| Os01g0720400 | | | | |
| | | | | [Oryza sativa Japonica Group] | | | | |
| Predicted | 264-285 | XP_002462124 | 242048755 | hypothetical protein SORBIDRAFT_02g019550 | 1 | Sorghum bicolor | 1849 | 2044 |
| siRNA 55507 | | | | [Sorghum bicolor] &gt:gi\|241925501\|gb\|EER98645.1\| | | | | |
| | | | | hypothetical protein SORBIDRAFT_02g019550 | | | | |
| | | | | [Sorghum bicolor] | | | | |
| | | NP_001132708 | 212720661 | hypothetical protein LOC100194191 [Zea mays] | 0.880952 | Zea mays | 1850 | 2045 |
| | | | | &gt:gi\|194695164\|gb\|ACF81666.1\| unknown | | | | |
| | | | | [Zea mays] | | | | |
| Predicted | 399-420 | AAA33496 | 293901 | Zea mI [Zea mays] | 1 | Zea mays | 1851 | 2046 |
| siRNA 55629 | | | | | | | | |
| | | 2HCZ_X | | Chain X, Crystal Structure Of Expb1 (Zea M 1), A | 0.973822 | Zea mays | 1852 | |
| | | | | Beta-Expansin And Group-1 Pollen Allergen From Maize | | | | |
| | 765-786 | NP_001105209 | 162460197 | expansin-B9 precursor [Zea mays] | 1 | Zea mays | 1853 | 2047 |
| | | | | &gt:gi\|115502389\|sp\|Q07154.2\|EXPB9_MAIZE | | | | |
| | | | | RecName: Full = Expansin-B9; AltName: Full = Beta- | | | | |
| | | | | expansin-1b; AltName: Full = Pollen allergen Zea m 1; | | | | |
| | | | | AltName: Full = ZmEXPB9; AltName: Allergen = Zea m | | | | |
| | | | | 1; Flags: Precursor &gt:gi\|28630919\|gb\|AAO45607.1\| | | | | |
| | | | | beta-expansin 9 protein [Zea mays] | | | | |
| | | P58738 | | RecName: Full=Expansin-B1; AltName: Full=Allergen | 0.977695 | Zea mays | 1854 | |
| | | | | Zea m 1d; AltName: Full=Beta-expansin-1a; AltName: | | | | |
| | | | | Full = Pollen allergen Zea m 1; AltName: | | | | |
| | | | | Full = ZmEXPB1; AltName: Allergen = Zea m 1; Flags: | | | | |
| | | | | Precursor &gt:gi\|28630923\|gb\|AAO45608.1\| beta- | | | | |
| | | | | expansin 1 protein [Zea mays] | | | | |
| | | | | &gt:gi\|224035093\|gb\|ACN36622.1\| unknown [Zea mays] | | | | |
| | | AAK56124 | 14193760 | beta-expansin 1 [Zea mays] | 0.973978 | Zea mays | 1855 | 2048 |
| | | ACF86930 | 194705691 | unknown [Zea mays] | 0.97026 | Zea mays | 1856 | 2049 |
| | | ACA23876 | 168419913 | Pas n 1 allergen precursor [Paspalum notatum] | 0.836431 | Paspalum notatum | 1857 | 2050 |
| | | XP_002467539 | 242040288 | hypothetical protein SORBIDRAFT_01g029840 | 0.802974 | Sorghum bicolor | 1858 | 2051 |
| | | | | [Sorghum bicolor] &gt:gi\|241921393\|gb\|EER94537.1\| | | | | |
| | | | | hypothetical protein SORBIDRAFT_01g029840 | | | | |
| | | | | [Sorghum bicolor] | | | | |
| | | NP_001065305 | 115483269 | Os10g0548600 [Oryza sativa Japonica Group] | 0.732342 | Oryza sativa | 1859 | 2052 |
| | | | | &gt:gi\|75232354\|sp\|Q7XCG7.1\|EXPB9_ORYSJ | | Japonica Group | | |
| | | | | RecName: Full = Expansin-B9; AltName: Full = Beta- | | | | |
| | | | | expansin-9; AltName: Full = OsEXPB9; AltName: | | | | |
| | | | | Full = OsaEXPb1.6; Flags: Precursor | | | | |
| | | | | &gt:gi\|8118437\|gb\|AAF72990.1\|AF261277_1 beta- | | | | |
| | | | | expansin [Oryza sativa] | | | | |
| | | | | &gt:gi\|13876539\|gb\|AAK43515.1\|AC020666_25 beta- | | | | |
| | | | | expansin [Oryza sativa Japonica Group] | | | | |
| | | | | &gt:gi\|31433387\|gb\|AAP54906.1\| Beta-expansin 1a | | | | |
| | | | | precursor, putative, expressed [Oryza sativa Japonica | | | | |
| | | | | Group] &gt:gi\|33338561\|gb\|AAQ13902.1\| pollen | | | | |
| | | | | allergen [Oryza sativa] | | | | |
| | | | | &gt:gi\|113639837\|dbj\|BAF27142.1\| Os10g0548600 | | | | |
| | | | | [Oryza sativa Japonica Group] | | | | |
| | | | | &gt:gi\|125575604\|gb\|EAZ16888.1\| hypothetical protein | | | | |
| | | | | OsJ_32365 [Oryza sativa Japonica Group] | | | | |
| | | | | &gt:gi\|215704498\|dbj\|BAG93932.1\| unnamed protein | | | | |
| | | | | product [Oryza sativa Japonica Group] | | | | |
| | | EAY79426 | 54362548 | hypothetical protein OsI_34559 [Oryza sativa Indica | 0.728625 | Oryza sativa | 1860 | |
| | | | | Group] | | Indica Group | | |
| Predicted | 1289-1310 | XP_002445918 | 242082298 | hypothetical protein SORBIDRAFT_07g028020 | 1 | Sorghum bicolor | 1861 | 2053 |
| siRNA 55937 | | | | [Sorghum bicolor] &gt:gi\|241942268\|gb\|EES15413.1\| | | | | |
| | | | | hypothetical protein SORBIDRAFT_07g028020 | | | | |
| | | | | [Sorghum bicolor] | | | | |
| | | AAY89657 | 68303941 | beta 1,2-xylosyltransferase [Zea mays] | 0.926499 | Zea mays | 1862 | 2054 |
| | | NP_001105845 | 162464153 | Beta-1,2-xylosyltransferase [Zea mays] | 0.914894 | Zea mays | 1863 | 2055 |
| | | | | &gt:gi\|83715789\|emb\|CAJ47425.1\| Beta-1,2- | | | | |
| | | | | xylosyltransferase [Zea mays] | | | | |
| | | CAI11448 | 55956967 | beta-2-xylosyltransferase [Saccharum officinarum] | 0.870406 | Saccharum officinarum | 1864 | 2056 |
| | | CAJ47422 | 83715782 | Beta-1,2-xylosyltransferase [Sorghum bicolor] | 0.831721 | Sorghum bicolor | 1865 | 2057 |
| | | NP_001062177 | 115477161 | Os08g0503800 [Oryza sativa Japonica Group] | 0.808511 | Oryza sativa | 1866 | 2058 |
| | | | | &gt:gi\|42408140\|dbj\|BAD09279.1\| putative beta 1,2- | | Japonica Group | | |
| | | | | xylosyltransferase [Oryza sativa Japonica Group] | | | | |
| | | | | &gt:gi\|113624146\|dbj\|BAF24091.1\| Os08g0503800 | | | | |
| | | | | [Oryza sativa Japonica Group] | | | | |
| | | BAJ90540 | 326495835 | predicted protein [Hordeum vulgare subsp. vulgare] | 0.775629 | Hordeum vulgare | 1867 | 2059 |
| | | | | | | subsp. vulgare | | |
| | | CAJ47421 | 83715780 | Beta-1,2-xylosyltransferase [Hordeum vulgare] | 0.783366 | Hordeum vulgare | 1868 | 2060 |
| | 1225-1246 | ACG29798 | 195615935 | beta-2-xylosyltransferase [Zea mays] | 1 | Zea mays | 1869 | 2061 |
| Predicted | 336-356 | XP_002465700 | 242036610 | hypothetical protein SORBIDRAFT_01g044050 | 1 | Sorghum bicolor | 1870 | 2062 |
| siRNA 57283 | | | | [Sorghum bicolor] &gt:gi\|241919554\|gb\|EER92698.1\| | | | | |
| | | | | hypothetical protein SORBIDRAFT_01g044050 | | | | |
| | | | | [Sorghum bicolor] | | | | |
| | | NP_001105083 | 162463855 | serine acetyltransferase2 [Zea mays] | 0.877814 | Zea mays | 1871 | 2063 |
| | | | | &gt:gi\|25991549\|gb\|AAN76865.1\|AF453838_1 satase | | | | |
| | | | | isoform II [Zea mays] | | | | |
| | | EAY88901 | 54362548 | hypothetical protein OsI_10380 [Oryza sativa Indica | 0.794212 | Oryza sativa | 1872 | |
| | | | | Group] | | Indica Group | | |
| | | NP_001049265 | 297600483 | Os03g0196600 [Oryza sativa Japonica Group] | 0.800643 | Oryza sativa | 1873 | 2064 |
| | | | | &gt:gi\|122224506\|sp\|Q10QH1.1\|SAT4_ORYSJ | | Japonica Group | | |
| | | | | RecName: Full = Probable serine acetyltransferase 4; | | | | |
| | | | | AltName: Full = OsSERAT2; 2 | | | | |
| | | | | &gt:gi\|108706662\|gb\|ABF94457.1\| satase isoform II, | | | | |
| | | | | putative, expressed [Oryza sativa Japonica Group] | | | | |
| | | | | &gt:gi\|255674283\|dbj\|BAF11179.2\| Os03g0196600 | | | | |
| | | | | [Oryza sativa Japonica Group] | | | | |
| | | BAJ93017 | 326523692 | predicted protein [Hordeum vulgare subsp. vulgare] | 0.784566 | Hordeum vulgare | 1874 | 2065 |
| | | | | | | subsp. vulgare | | |
| | | NP_001049193 | 297600437 | Os03g0185000 [Oryza sativa Japonica Group] | 0.752412 | Oryza sativa | 1875 | 2066 |
| | | | | &gt:gi\|223635827\|sp\|Q0DUI1.2\|SAT3_ORYSJ | | Japonica Group | | |
| | | | | RecName: Full = Probable serine acetyltransferase 3; | | | | |
| | | | | AltName: Full = OsSERAT2; 1 | | | | |
| | | | | &gt:gi\|108706556\|gb\|ABF94351.1\| satase isoform II, | | | | |
| | | | | putative [Oryza sativa Japonica Group] | | | | |
| | | | | &gt:gi\|255674260\|dbj\|BAF11107.2\| Os03g0185000 | | | | |
| | | | | [Oryza sativa Japonica Group] | | | | |
| | 647-667 | XP_002452644 | 242062709 | hypothetical protein SORBIDRAFT_04g029800 | 1 | Sorghum bicolor | 1876 | 2067 |
| | | | | [Sorghum bicolor] &gt:gi\|241932475\|gb\|EES05620.1\| | | | | |
| | | | | hypothetical protein SORBIDRAFT_04g029800 | | | | |
| | | | | [Sorghum bicolor] | | | | |
| | | ACN27676 | 223947184 | unknown [Zea mays] | 0.979592 | Zea mays | 1877 | 2068 |
| | | NP_001151821 | 226506715 | px19-like protein [Zea mays] | 0.97449 | Zea mays | 1878 | 2069 |
| | | | | &gt:gi\|195649987\|gb\|ACG44461.1\| px19-like protein | | | | |
| | | | | [Zea mays] | | | | |
| | | BAJ98658 | 326498460 | predicted protein [Hordeum vulgare subsp. vulgare] | 0.857143 | Hordeum vulgare | 1879 | 2070 |
| | | | | &gt:gi\|326526295\|dbj\|BAJ97164.1\| predicted protein | | subsp. vulgare | | |
| | | | | [Hordeum vulgare subsp. vulgare] | | | | |
| | | NP_001047936 | 115448312 | Os02g0717900 [Oryza sativa Japonica Group] | 0.862245 | Oryza sativa | 1880 | 2071 |
| | | | | &gt:gi\|45735865\|dbj\|BAD12899.1\| unknown protein | | Japonica Group | | |
| | | | | [Oryza sativa Japonica Group] | | | | |
| | | | | &gt:gi\|113537467\|dbj\|BAF09850.1\| Os02g0717900 | | | | |
| | | | | [Oryza sativa Japonica Group] | | | | |
| | | | | &gt:gi\|125540909\|gb\|EAY87304.1\| hypothetical protein | | | | |
| | | | | OsI_08707 [Oryza sativa Indica Group] | | | | |
| | | | | &gt:gi\|215697545\|dbj\|BAG91539.1\| unnamed protein | | | | |
| | | | | product [Oryza sativa Japonica Group] | | | | |
| | | EAZ24403 | 54398660 | hypothetical protein OsJ_08158 [Oryza sativa Japonica | 0.852041 | Oryza sativa | 1881 | |
| | | | | Group] | | Japonica Group | | |
| | 77-97 | XP_002459575 | 242043407 | hypothetical protein SORBIDRAFT_02g006870 | 1 | Sorghum bicolor | 1882 | 2072 |
| | | | | [Sorghum bicolor] &gt:gi\|241922952\|gb\|EER96096.1\| | | | | |
| | | | | hypothetical protein SORBIDRAFT_02g006870 | | | | |
| | | | | [Sorghum bicolor] | | | | |
| | | CAH39852 | 74473394 | putative protein kinase [Zea mays] | 0.927063 | Zea mays | 1883 | 2073 |
| | | | | &gt:gi\|238015268\|gb\|ACR38669.1\| unknown | | | | |
| | | | | [Zea mays] | | | | |
| | | CAH55606 | 76057830 | putative protein kinase [Zea mays] | 0.915547 | Zea mays | 1884 | 2074 |
| | | NP_001105820 | 162461746 | putative protein kinase [Zea mays] | 0.888676 | Zea mays | 1885 | 2075 |
| | | | | &gt:gi\|74473391\|emb\|CAH39850.1\| putative protein | | | | |
| | | | | kinase [Zea mays] | | | | |
| | | NP_001064960 | 115482733 | Os10g0497600 [Oryza sativa Japonica Group] | 0.882917 | Oryza sativa | 1886 | 2076 |
| | | | | &gt:gi\|78708852\|gb\|ABB47827.1\| Protein kinase | | Japonica Group | | |
| | | | | domain containing protein, expressed [Oryza sativa | | | | |
| | | | | Japonica Group] &gt:gi\|113639569\|dbj\|BAF26874.1\| | | | | |
| | | | | Os10g0497600 [Oryza sativa Japonica Group] | | | | |
| | | | | &gt:gi\|215736900\|dbj\|BAG95829.1\| unnamed protein | | | | |
| | | | | product [Oryza sativa Japonica Group] | | | | |
| | | XP_002440368 | 242089070 | hypothetical protein SORBIDRAFT_09g030440 | 0.879079 | Sorghum bicolor | 1887 | 2077 |
| | | | | [Sorghum bicolor] &gt:gi\|241945653\|gb\|EES18798.1\| | | | | |
| | | | | hypothetical protein SORBIDRAFT_09g030440 | | | | |
| | | | | [Sorghum bicolor] | | | | |
| | | CAH39851 | 74473392 | putative protein kinase [Zea mays] | 0.886756 | Zea mays | 1888 | 2078 |
| | | EEC67247 | 54362548 | hypothetical protein OsI_34186 [Oryza sativa Indica | 0.884837 | Oryza sativa | 1889 | |
| | | | | Group] | | Indica Group | | |
| | | ACR36632 | 238011193 | unknown [Zea mays] | 0.884837 | Zea mays | 1890 | 2079 |
| | | | | &gt:gi\|238013118\|gb\|ACR37594.1\| unknown | | | | |
| | | | | [Zea mays] | | | | |
| | | EEE51214 | 54398660 | hypothetical protein OsJ_32036 [Oryza sativa Japonica | 0.882917 | Oryza sativa | 1891 | |
| | | | | Group] | | Japonica Group | | |
| Predicted | 0-19 | ACG30934 | 195618207 | 60S ribosomal protein L19-3 [Zea mays] | 1 | Zea mays | 1892 | 2080 |
| siRNA 58170 | | | | &gt:gi\|195635187\|gb\|ACG37062.1\| 60S ribosomal | | | | |
| | | | | protein L19-3 [Zea mays] | | | | |
| | | | | &gt:gi\|223973915\|gb\|ACN31145.1\| unknown | | | | |
| | | | | [Zea mays] | | | | |
| | | XP_002453326 | 242064073 | hypothetical protein SORBIDRAFT_04g003890 | 0.961353 | Sorghum bicolor | 1893 | 2081 |
| | | | | [Sorghum bicolor] &gt:gi\|241933157\|gb\|EES06302.1\| | | | | |
| | | | | hypothetical protein SORBIDRAFT_04g003890 | | | | |
| | | | | [Sorghum bicolor] | | | | |
| | | XP_002458037 | 242057782 | hypothetical protein SORBIDRAFT_03g025960 | 0.94686 | Sorghum bicolor | 1894 | 2082 |
| | | | | [Sorghum bicolor] &gt:gi\|241930012\|gb\|EES03157.1\| | | | | |
| | | | | hypothetical protein SORBIDRAFT_03g025960 | | | | |
| | | | | [Sorghum bicolor] | | | | |
| | | NP_001150484 | 226499705 | 60S ribosomal protein L19-3 [Zea mays] | 0.942029 | Zea mays | 1895 | 2083 |
| | | | | &gt:gi\|195639566\|gb\|ACG39251.1\| 60S ribosomal | | | | |
| | | | | protein L19-3 [Zea mays] | | | | |
| | | | | &gt:gi\|238006088\|gb\|ACR34079.1\| unknown | | | | |
| | | | | [Zea mays] | | | | |
| | | ACF82857 | 194697545 | unknown [Zea mays] | 0.932367 | Zea mays | 1896 | 2084 |
| | | NP_001148813 | 226503680 | 60S ribosomal protein L19-3 [Zea mays] | 0.922705 | Zea mays | 1897 | 2085 |
| | | | | &gt:gi\|195622310\|gb\|ACG32985.1\| 60S ribosomal | | | | |
| | | | | protein L19-3 [Zea mays] | | | | |
| | | EAY90757 | 54362548 | hypothetical protein OsI_12360 [Oryza sativa Indica | 0.913043 | Oryza sativa | 1898 | |
| | | | | Group] | | Indica Group | | |
| | | AAP05800 | 29837750 | putative ribosomal protein L19 [Oryza sativa Japonica | 0.903382 | Oryza sativa | 1899 | 2086 |
| | | | | Group] &gt:gi\|50399976\|gb\|AAT76364.1\| putative | | Japonica Group | | |
| | | | | ribosomal protein L19 [Oryza sativa Japonica Group] | | | | |
| | | | | &gt:gi\|108709489\|gb\|ABF97284.1\| 60S ribosomal | | | | |
| | | | | protein L19-3, putative, expressed [Oryza sativa | | | | |
| | | | | Japonica Group] &gt:gi\|125586925\|gb\|EAZ27589.1\| | | | | |
| | | | | hypothetical protein OsJ_11537 [Oryza sativa Japonica | | | | |
| | | | | Group] | | | | |
| | | NP_001050051 | 115452900 | Os03g0337800 [Oryza sativa Japonica Group] | 0.874396 | Oryza sativa | 1900 | 2087 |
| | | | | &gt:gi\|108708037\|gb\|ABF95832.1\| 60S ribosomal | | Japonica Group | | |
| | | | | protein L19-1, putative, expressed [Oryza sativa | | | | |
| | | | | Japonica Group] &gt:gi\|113548522\|dbj\|BAF11965.1\| | | | | |
| | | | | Os03g0337800 [Oryza sativa Japonica Group] | | | | |
| | | | | &gt:gi\|125543790\|gb\|EAY89929.1\| hypothetical protein | | | | |
| | | | | OsI_11477 [Oryza sativa Indica Group] | | | | |
| | | | | &gt:gi\|125586185\|gb\|EAZ26849.1\| hypothetical protein | | | | |
| | | | | OsJ_10765 [Oryza sativa Japonica Group] | | | | |
| | | | | &gt:gi\|215734967\|dbj\|BAG95689.1\| unnamed protein | | | | |
| | | | | product [Oryza sativa Japonica Group] | | | | |
| | | | | &gt:gi\|215765261\|dbj\|BAG86958.1\| unnamed protein | | | | |
| | | | | product [Oryza sativa Japonica Group] | | | | |
| | | NP_001136706 | 219362984 | hypothetical protein LOC100216841 [Zea mays] | 0.884058 | Zea mays | 1901 | 2088 |
| | | | | &gt:gi\|194696712\|gb\|ACF82440.1\| unknown | | | | |
| | | | | [Zea mays] | | | | |
| | 98-117 | EEC83614 | 54362548 | hypothetical protein OsI_29322 [Oryza sativa Indica | 1 | Oryza sativa | 1902 | |
| | | | | Group] | | Indica Group | | |
| | | NP_001061858 | 115476523 | Os08g0430700 [Oryza sativa Japonica Group] | 0.994937 | Oryza sativa | 1903 | 2089 |
| | | | | &gt:gi\|38175475\|dbj\|BAD01172.1\| putative UVB- | | Japonica Group | | |
| | | | | resistance protein UVR8 [Oryza sativa Japonica Group] | | | | |
| | | | | &gt:gi\|113623827\|dbj\|BAF23772.1\| Os08g0430700 | | | | |
| | | | | [Oryza sativa Japonica Group] | | | | |
| | | | | &gt:gi\|215734996\|dbj\|BAG95718.1\| unnamed protein | | | | |
| | | | | product [Oryza sativa Japonica Group] | | | | |
| | | | | &gt:gi\|222640598\|gb\|EEE68730.1\| hypothetical protein | | | | |
| | | | | OsJ_27407 [Oryza sativa Japonica Group] | | | | |
| | | NP_001141854 | 226495690 | hypothetical protein LOC100273996 [Zea mays] | 0.868354 | Zea mays | 1904 | 2090 |
| | | | | &gt:gi\|194706180\|gb\|ACF87174.1\| unknown [Zea mays] | | | | |
| | | BAJ86407 | 326506177 | predicted protein [Hordeum vulgare subsp. vulgare] | 0.868354 | Hordeum vulgare | 1905 | 2091 |
| | | | | | | subsp. vulgare | | |
| | | XP_002283479 | 225451992 | PREDICTED: hypothetical protein [Vitis vinifera] | 0.78481 | Vitis vinifera | 1906 | 2092 |
| | | | | &gt:gi\|296087299\|emb\|CBI33673.3\| unnamed protein | | | | |
| | | | | product [Vitis vinifera] | | | | |
| | | XP_002329325 | 224127629 | predicted protein [Populus trichocarpa] | 0.777215 | Populus trichocarpa | 1907 | 2093 |
| | | | | &gt:gi\|222870779\|gb\|EEF07910.1\| predicted protein | | | | |
| | | | | [Populus trichocarpa] | | | | |
| | | XP_002516745 | 255551397 | Ran GTPase binding protein, putative [Ricinus communis] | 0.767089 | Ricinus communis | 1908 | 2094 |
| | | | | &gt:gi\|223544118\|gb\|EEF45643.1\| Ran | | | | |
| | | | | GTPase binding protein, putative [Ricinus communis] | | | | |
| | | ADE76711 | 294462323 | unknown [Picea sitchensis] | 0.886076 | Picea sitchensis | 1909 | 2095 |
| | | XP_002873752 | 297811736 | regulator of chromosome condensation family protein | 0.764557 | Arabidopsis lyrata | 1910 | 2096 |
| | | | | [Arabidopsis lyrata subsp. lyrata] | | subsp. lyrata | | |
| | | | | &gt:gi\|297319589\|gb\|EFH50011.1\| regulator of | | | | |
| | | | | chromosome condensation family protein | | | | |
| | | | | [Arabidopsis lyrata subsp. lyrata] | | | | |
| | 82-101 | NP_001169682 | 293336964 | hypothetical protein LOC100383563 [Zea mays] | 1 | Zea mays | 1911 | 2097 |
| | | | | &gt:gi\|224030677\|gb\|ACN34414.1\| unknown [Zea mays] | | | | |
| | | | | &gt:gi\|224030857\|gb\|ACN34504.1\| unknown | | | | |
| | | | | [Zea mays] | | | | |
| | | NP_001047275 | 115446990 | Os02g0588500 [Oryza sativa Japonica Group] | 0.741036 | Oryza sativa | 1912 | 2098 |
| | | | | &gt:gi\|46806229\|dbj\|BAD17453.1\| putative GPI- | | Japonica Group | | |
| | | | | anchored protein [Oryza sativa Japonica Group] | | | | |
| | | | | &gt:gi\|113536806\|dbj\|BAF09189.1\| Os02g0588500 | | | | |
| | | | | [Oryza sativa Japonica Group] | | | | |
| | | | | &gt:gi\|125582687\|gb\|EAZ23618.1\| hypothetical protein | | | | |
| | | | | OsJ_07316 [Oryza sativa Japonica Group] | | | | |
| | 190-209 | XP_002452366 | 242062153 | hypothetical protein SORBIDRAFT_04g024440 | 1 | Sorghum bicolor | 1913 | 2099 |
| | | | | [Sorghum bicolor] &gt:gi\|241932197\|gb\|EES05342.1\| | | | | |
| | | | | hypothetical protein SORBIDRAFT_04g024440 | | | | |
| | | | | [Sorghum bicolor] | | | | |
| | 105-124 | NP_001140994 | 226507777 | hypothetical protein LOC100273073 [Zea mays] | 1 | Zea mays | 1914 | 2100 |
| | | | | &gt:gi\|194702086\|gb\|ACF85127.1\| unknown | | | | |
| | | | | [Zea mays] | | | | |
| | | NP_197108 | 186523277 | regulator of chromosome condensation repeat- | 0.77892 | Arabidopsis thaliana | 1915 | 2101 |
| | | | | containing protein [Arabidopsis thaliana] | | | | |
| | | | | &gt:gi\|9755650\|emb\|CAC01803.1\| UVB-resistance | | | | |
| | | | | protein-like [Arabidopsis thaliana] | | | | |
| | | | | &gt:gi\|114213505\|gb\|ABI54335.1\| At5g16040 | | | | |
| | | | | [Arabidopsis thaliana] | | | | |
| | | | | &gt:gi\|332004857\|gb\|AED92240.1\| regulator of | | | | |
| | | | | chromosome condensation repeat-containing protein | | | | |
| | | | | [Arabidopsis thaliana] | | | | |
| Predicted | 804-827 | XP_002451473 | 242060367 | hypothetical protein SORBIDRAFT_04g002490 | 1 | Sorghum bicolor | 1916 | 2102 |
| siRNA 60433 | | | | [Sorghum bicolor] &gt:gi\|241931304\|gb\|EES04449.1\| | | | | |
| | | | | hypothetical protein SORBIDRAFT_04g002490 | | | | |
| | | | | [Sorghum bicolor] | | | | |
| | | NP_001168856 | 293336630 | hypothetical protein LOC100382661 [Zea mays] | 0.875 | Zea mays | 1917 | 2103 |
| | | | | &gt:gi\|223973357\|gb\|ACN30866.1\| unknown | | | | |
| | | | | [Zea mays] | | | | |
| | | EEC72413 | 54362548 | hypothetical protein OsI_05713 [Oryza sativa Indica | 0.810897 | Oryza sativa | 1918 | |
| | | | | Group] &gt:gi\|222622105\|gb\|EEE56237.1\| hypothetical | | Indica Group | | |
| | | | | protein OsJ_05240 [Oryza sativa Japonica Group] | | | | |
| | | NP_001045780 | 115444000 | Os02g0129900 [Oryza sativa Japonica Group] | 0.785256 | Oryza sativa | 1919 | 2104 |
| | | | | &gt:gi\|41053058\|dbj\|BAD07988.1\| hypothetical protein | | Japonica Group | | |
| | | | | [Oryza sativa Japonica Group] | | | | |
| | | | | &gt:gi\|113535311\|dbj\|BAF07694.1\| Os02g0129900 | | | | |
| | | | | [Oryza sativa Japonica Group] | | | | |
| | | BAJ92423 | 326516535 | predicted protein [Hordeum vulgare subsp. vulgare] | 0.791667 | Hordeum vulgare | 1920 | 2105 |
| | | | | &gt:gi\|326523493\|dbj\|BAJ92917.1\| predicted protein | | subsp. vulgare | | |
| | | | | [Hordeum vulgare subsp. vulgare] | | | | |
| Predicted | 840-861 | XP_002456624 | 242054956 | hypothetical protein SORBIDRAFT_03g039630 | 1 | Sorghum bicolor | 1921 | 2106 |
| zma mir | | | | [Sorghum bicolor] &gt:gi\|241928599\|gb\|EES01744.1\| | | | | |
| 47934 | | | | hypothetical protein SORBIDRAFT_03g039630 | | | | |
| | | | | [Sorghum bicolor] | | | | |
| | | NP_001149037 | 226528422 | protein phosphatase 2C [Zea mays] | 0.876214 | Zea mays | 1922 | 2107 |
| | | | | &gt:gi\|195624162\|gb\|ACG33911.1\| protein phosphatase | | | | |
| | | | | 2C [Zea mays] | | | | |
| | | NP_001044788 | 115441016 | Os01g0846300 [Oryza sativa Japonica Group] | 0.742718 | Oryza sativa | 1923 | 2108 |
| | | | | &gt:gi\|75285811\|sp\|Q5N9N2.1\|P2C09_ORYSJ | | Japonica Group | | |
| | | | | RecName: Full = Probable protein phosphatase 2C 9; | | | | |
| | | | | Short = OsPP2C09 &gt:gi\|56784698\|dbj\|BAD81824.1\| | | | | |
| | | | | putative protein phosphatase 2C [Oryza sativa Japonica | | | | |
| | | | | Group] &gt:gi\|113534319\|dbj\|BAF06702.1\| | | | | |
| | | | | Os01g0846300 [Oryza sativa Japonica Group] | | | | |
| | | | | &gt:gi\|218189363\|gb\|EEC71790.1\| hypothetical protein | | | | |
| | | | | OsI_04415 [Oryza sativa Indica Group] | | | | |
| | | | | &gt:gi\|222619530\|gb\|EEE55662.1\| hypothetical protein | | | | |
| | | | | OsJ_04060 [Oryza sativa Japonica Group] | | | | |
| | | BAK01548 | 326489128 | predicted protein [Hordeum vulgare subsp. vulgare] | 0.73301 | Hordeum vulgare | 1924 | 2109 |
| | | | | | | subsp. vulgare | | |
| Predicted | 2885-2905 | AAL76004 | 18568260 | putative gag-pol polyprotein [Zea mays] | 1 | Zea mays | 1925 | |
| zma mir | 2677-2697 | AAN40030 | 23928433 | putative gag-pol polyprotein [Zea mays] | 1 | Zea mays | 1926 | |
| 48043 | 2926-2946 | AAN40035 | 23928433 | putative gag-pol polyprotein [Zea mays] | 1 | Zea mays | 1927 | |
| | 2425-2445 | AAL66760 | 18254408 | putative gag protein [Zea mays] | 1 | Zea mays | 1928 | |
| | 114-134 | AAL75488 | 46200524 | putative pol protein [Zea mays] | 1 | Zea mays | 1929 | |
| | 225-245 | AAD09018 | 4185305 | polyprotein [Zea mays] | 1 | Zea mays | 1930 | 2110 |
| Predicted | 102-122 | NP_001169451 | 293335512 | hypothetical protein LOC100383322 [Zea mays] | 1 | Zea mays | 1931 | 2111 |
| zma mir | | | | &gt:gi\|224029469\|gb\|ACN33810.1\| unknown | | | | |
| 48408 | | | | [Zea mays] | | | | |
| | | EEC68244 | 54362548 | hypothetical protein OsI_36259 [Oryza sativa Indica | 0.856471 | Oryza sativa | 1932 | |
| | | | | Group] | | Indica Group | | |
| | | NP_001067969 | 115485650 | Os11g0514800 [Oryza sativa Japonica Group] | 0.851765 | Oryza sativa | 1933 | 2112 |
| | | | | &gt:gi\|77551091\|gb\|ABA93888.1\| expressed protein | | Japonica Group | | |
| | | | | [Oryza sativa Japonica Group] | | | | |
| | | | | &gt:gi\|113645191\|dbj\|BAF28332.1\| Os11g0514800 | | | | |
| | | | | [Oryza sativa Japonica Group] | | | | |
| | | | | &gt:gi\|125577286\|gb\|EAZ18508.1\| hypothetical protein | | | | |
| | | | | OsJ_34037 [Oryza sativa Japonica Group] | | | | |
| | | | | &gt:gi\|215686713\|dbj\|BAG88966.1\| unnamed protein | | | | |
| | | | | product [Oryza sativa Japonica Group] | | | | |
| | | | | &gt:gi\|215708828\|dbj\|BAG94097.1\| unnamed protein | | | | |
| | | | | product [Oryza sativa Japonica Group] | | | | |
| | 35-55 | XP_002463174 | 242050859 | hypothetical protein SORBIDRAFT_02g039100 | 1 | Sorghum bicolor | 1934 | 2113 |
| | | | | [Sorghum bicolor] &gt:gi\|241926551\|gb\|EER99695.1\| | | | | |
| | | | | hypothetical protein SORBIDRAFT_02g039100 | | | | |
| | | | | [Sorghum bicolor] | | | | |
| | | NP_001150845 | 226504299 | DGCR14 protein [Zea mays] | 0.873727 | Zea mays | 1935 | 2114 |
| | | | | &gt:gi\|195642346\|gb\|ACG40641.1\| DGCR14 protein | | | | |
| | | | | [Zea mays] | | | | |
| | | BAJ99113 | 326502969 | predicted protein [Hordeum vulgare subsp. vulgare] | 0.843177 | Hordeum vulgare | 1936 | 2115 |
| | | | | | | subsp. vulgare | | |
| | | EAZ01087 | 54362548 | hypothetical protein OsI_23114 [Oryza sativa Indica | 0.830957 | Oryza sativa | 1937 | |
| | | | | Group] | | Indica Group | | |
| | | NP_001057711 | 115468223 | Os06g0502900 [Oryza sativa Japonica Group] | 0.835031 | Oryza sativa | 1938 | 2116 |
| | | | | &gt:gi\|52076439\|dbj\|BAD45267.1\| putative ES2 protein | | Japonica Group | | |
| | | | | [Oryza sativa Japonica Group] | | | | |
| | | | | &gt:gi\|113595751\|dbj\|BAF19625.1\| Os06g0502900 | | | | |
| | | | | [Oryza sativa Japonica Group] | | | | |
| | | | | &gt:gi\|215737222\|dbj\|BAG96151.1\| unnamed protein | | | | |
| | | | | product [Oryza sativa Japonica Group] | | | | |
| | | | | &gt:gi\|215767859\|dbj\|BAH00088.1\| unnamed protein | | | | |
| | | | | product [Oryza sativa Japonica Group] | | | | |
| | | EAZ37129 | 54398660 | hypothetical protein OsJ_21470 [Oryza sativa Japonica | 0.775967 | Oryza sativa | 1939 | |
| | | | | Group] | | Japonica Group | | |
| Predicted | 63-84 | NP_001148466 | 226493425 | protein phosphatase 2C [Zea mays] | 1 | Zea mays | 1940 | 2117 |
| zma mir | | | | &gt:gi\|195619560\|gb\|ACG31610.1\| protein phosphatase | | | | |
| 48514 | | | | 2C [Zea mays] | | | | |
| | | NP_001042103 | 115434689 | Os01g0164600 [Oryza sativa Japonica Group] | 0.787234 | Oryza sativa | 1941 | 2118 |
| | | | | &gt:gi\|75164086\|sp\|Q942P9.1\|P2C01_ORYSJ | | Japonica Group | | |
| | | | | RecName: Full = Probable protein phosphatase 2C 1; | | | | |
| | | | | Short = OsPP2C01 &gt:gi\|15528748\|dbj\|BAB64790.1\| | | | | |
| | | | | putative senescence-associated protein [Oryza sativa | | | | |
| | | | | Japonica Group] &gt:gi\|21327992\|dbj\|BAC00581.1\| | | | | |
| | | | | putative senescence-associated protein [Oryza sativa | | | | |
| | | | | Japonica Group] &gt:gi\|113531634\|dbj\|BAF04017.1\| | | | | |
| | | | | Os01g0164600 [Oryza sativa Japonica Group] | | | | |
| | | | | &gt:gi\|125569151\|gb\|EAZ10666.1\| hypothetical protein | | | | |
| | | | | OsJ_00496 [Oryza sativa Japonica Group] | | | | |
| | | EAY72662 | 54362548 | hypothetical protein OsI_00528 [Oryza sativa Indica | 0.787234 | Oryza sativa | 1942 | |
| | | | | Group] | | Indica Group | | |
| | | BAJ94449 | 326494659 | predicted protein [Hordeum vulgare subsp. vulgare] | 0.784195 | Hordeum vulgare | 1943 | 2119 |
| | | | | | | subsp. vulgare | | |
| | 54-75 | XP_002438740 | 242096499 | hypothetical protein SORBIDRAFT_10g025330 | 1 | Sorghum bicolor | 1944 | 2120 |
| | | | | [Sorghum bicolor] &gt:gi\|241916963\|gb\|EER90107.1\| | | | | |
| | | | | hypothetical protein SORBIDRAFT_10g025330 | | | | |
| | | | | [Sorghum bicolor] | | | | |
| | | ACG29270 | 195614879 | amino acid permease [Zea mays] | 0.952479 | Zea mays | 1945 | 2121 |
| | | NP_001130863 | 212274856 | hypothetical protein LOC100191967 [Zea mays] | 0.952479 | Zea mays | 1946 | 2122 |
| | | | | &gt:gi\|194690296\|gb\|ACF79232.1\| unknown [Zea mays] | | | | |
| | | | | &gt:gi\|194707684\|gb\|ACF87926.1\| unknown [Zea mays] | | | | |
| | | | | &gt:gi\|224029673\|gb\|ACN33912.1\| unknown [Zea mays] | | | | |
| | | NP_001058189 | 115469179 | Os06g0644700 [Oryza sativa Japonica Group] | 0.867769 | Oryza sativa | 1947 | 2123 |
| | | | | &gt:gi\|51535520\|dbj\|BAD37439.1\| amino acid | | Japonica | | |
| | | | | transporter-like protein [Oryza sativa Japonica Group] | | Group | | |
| | | | | &gt:gi\|113596229\|dbj\|BAF20103.1\| Os06g0644700 | | | | |
| | | | | [Oryza sativa Japonica Group] | | | | |
| | | EAZ01859 | 54362548 | hypothetical protein OsI_23880 [Oryza sativa Indica | 0.873967 | Oryza sativa | 1948 | |
| | | | | Group] | | Indica Group | | |
| | | BAJ85749 | 326495305 | predicted protein [Hordeum vulgare subsp. vulgare] | 0.845041 | Hordeum vulgare | 1949 | 2124 |
| | | | | | | subsp. vulgare | | |
| | | BAJ95660 | 326507165 | predicted protein [Hordeum vulgare subsp. vulgare] | 0.797521 | Hordeum vulgare | 1950 | 2125 |
| | | | | | | subsp. vulgare | | |
| | | EEE66107 | 54398660 | hypothetical protein OsJ_22140 [Oryza sativa Japonica | 0.743802 | Oryza sativa | 1951 | |
| | | | | Group] | | Japonica Group | | |
| Predicted | 1615-1636 | NP_001130670 | 212275146 | hypothetical protein LOC100191773 [Zea mays] | 1 | Zea mays | 1952 | 2126 |
| zma mir | | | | &gt:gi\|194689790\|gb\|ACF78979.1\| unknown | | | | |
| 48669 | | | | [Zea mays] | | | | |
| | | ACL54094 | 219887438 | unknown [Zea mays] | 0.940397 | Zea mays | 1953 | 2127 |
| | | XP_002438836 | 242096691 | hypothetical protein SORBIDRAFT_10g026920 | 0.763797 | Sorghum bicolor | 1954 | 2128 |
| | | | | [Sorghum bicolor] &gt:gi\|241917059\|gb\|EER90203.1\| | | | | |
| | | | | hypothetical protein SORBIDRAFT_10g026920 | | | | |
| | | | | [Sorghum bicolor] | | | | |
| Predicted | 416-437 | AAL76004 | 18568260 | putative gag-pol polyprotein [Zea mays] | 1 | Zea mays | 1955 | |
| zma mir | 1232-1253 | XP_002449124 | 242067694 | hypothetical protein SORBIDRAFT_05g005470 | 1 | Sorghum bicolor | 1956 | 2129 |
| 48682 | | | | [Sorghum bicolor] &gt:gi\|241934967\|gb\|EES08112.1\| | | | | |
| | | | | hypothetical protein SORBIDRAFT_05g005470 | | | | |
| | | | | [Sorghum bicolor] | | | | |
| | | ACG29168 | 195614675 | aldehyde dehydrogenase, dimeric NADP-preferring | 0.916318 | Zea mays | 1957 | 2130 |
| | | | | [Zea mays] | | | | |
| | | NP_001168661 | 293331192 | hypothetical protein LOC100382449 [Zea mays] | 0.90795 | Zea mays | 1958 | 2131 |
| | | | | &gt:gi\|223950009\|gb\|ACN29088.1\| unknown | | | | |
| | | | | [Zea mays] | | | | |
| | | NP_001148092 | 226509003 | aldehyde dehydrogenase, dimeric NADP-preferring | 0.914226 | Zea mays | 1959 | 2132 |
| | | | | [Zea mays] &gt:gi\|195615734\|gb\|ACG29697.1\| | | | | |
| | | | | aldehyde dehydrogenase, dimeric NADP-preferring | | | | |
| | | | | [Zea mays] | | | | |
| | | ACF85700 | 194703231 | unknown [Zea mays] | 0.912134 | Zea mays | 1960 | 2133 |
| | | NP_001065921 | 115484518 | Os11g0186200 [Oryza sativa Japonica Group] | 0.803347 | Oryza sativa | 1961 | 2134 |
| | | | | &gt:gi\|62954909\|gb\|AAY23278.1\| aldehyde | | Japonica Group | | |
| | | | | dehydrogenase, putative [Oryza sativa Japonica Group] | | | | |
| | | | | &gt:gi\|108864076\|gb\|ABA91775.2\| aldehyde | | | | |
| | | | | dehydrogenase family protein, expressed [Oryza sativa | | | | |
| | | | | Japonica Group] &gt:gi\|113644625\|dbj\|BAF27766.1\| | | | | |
| | | | | Os11g0186200 [Oryza sativa Japonica Group] | | | | |
| | | | | &gt:gi\|215737694\|dbj\|BAG96824.1\| unnamed protein | | | | |
| | | | | product [Oryza sativa Japonica Group] | | | | |
| | | | | &gt:gi\|215737793\|dbj\|BAG96923.1\| unnamed protein | | | | |
| | | | | product [Oryza sativa Japonica Group] | | | | |
| | | | | &gt:gi\|218185391\|gb\|EEC67818.1\| hypothetical protein | | | | |
| | | | | OsI_35395 [Oryza sativa Indica Group] | | | | |
| | | | | &gt:gi\|222615645\|gb\|EEE51777.1\| hypothetical protein | | | | |
| | | | | OsJ_33226 [Oryza sativa Japonica Group] | | | | |
| | | AAX96338 | 45860991 | aldehyde dehydrogenase, putative [Oryza sativa | 0.803347 | Oryza sativa | 1962 | 2135 |
| | | | | Japonica Group] | | Japonica Group | | |
| | | BAK01937 | 326492306 | predicted protein [Hordeum vulgare subsp. vulgare] | 0.763598 | Hordeum vulgare | 1963 | 2136 |
| | | | | | | subsp. vulgare | | |
| Predicted | 1977-1997 | ADU32889 | 315493433 | embryonic flower 1 protein [Eulaliopsis binata] | 1 | Eulaliopsis binata | 1964 | 2137 |
| zma mir | | ABC69154 | 85062576 | EMF-like [Zea mays] | 0.923445 | Zea mays | 1965 | 2138 |
| 50109 | | NP_001105530 | 162461707 | VEF family protein [Zea mays] | 0.934609 | Zea mays | 1966 | 2139 |
| | | | | &gt:gi\|29569111\|gb\|AAO84022.1\| VEF family protein | | | | |
| | | | | [Zea mays] &gt:gi\|60687422\|gb\|AAX35735.1\| | | | | |
| | | | | embryonic flower 2 [Zea mays] | | | | |
| | | ABB77210 | 82469918 | EMF2 [Dendrocalamus latiflorus] | 0.805423 | Dendrocalamus latiflorus | 1967 | 2140 |
| | | AAX78232 | 62275660 | embryonic flower 2 [Triticum aestivum] | 0.797448 | Triticum aestivum | 1968 | 2141 |
| | | NP_001062825 | 115478459 | Os09g0306800 [Oryza sativa Japonica Group] | 0.757576 | Oryza sativa | 1969 | 2142 |
| | | | | &gt:gi\|255678755\|dbj\|BAF24739.2\| Os09g0306800 | | Japonica Group | | |
| | | | | [Oryza sativa Japonica Group] | | | | |
| | | BAD36510 | 51091694 | putative VEF family protein [Oryza sativa Japonica | 0.757576 | Oryza sativa | 1970 | |
| | | | | Group] | | Japonica Group | | |
| | | ADU32890 | 315493435 | embryonic flower 2 protein [Eulaliopsis binata] | 0.757576 | Eulaliopsis binata | 1971 | 2143 |
| | | BAJ99275 | 326503299 | predicted protein [Hordeum vulgare subsp. vulgare] | 0.76874 | Hordeum vulgare | 1972 | 2144 |
| | | | | | | subsp. vulgare | | |
| | | BAD99131 | 66796110 | HvEMF2b [Hordeum vulgare] | 0.770335 | Hordeum vulgare | 1973 | 2145 |
| | 1748-1768 | NP_001105530 | 162461707 | VEF family protein [Zea mays] | 1 | Zea mays | 1974 | 2146 |
| | | | | &gt:gi\|29569111\|gb\|AAO84022.1\| VEF family protein | | | | |
| | | | | [Zea mays] &gt:gi\|60687422\|gb\|AAX35735.1\| | | | | |
| | | | | embryonic flower 2 [Zea mays] | | | | |
| | 580-600 | XP_002454482 | 242066385 | hypothetical protein SORBIDRAFT_04g031920 | 1 | Sorghum bicolor | 1975 | 2147 |
| | | | | [Sorghum bicolor] &gt:gi\|241934313\|gb\|EES07458.1\| | | | | |
| | | | | hypothetical protein SORBIDRAFT_04g031920 | | | | |
| | | | | [Sorghum bicolor] | | | | |
| | | ACN30672 | 223972968 | unknown [Zea mays] | 0.942529 | Zea mays | 1976 | 2148 |
| | | NP_001183461 | 308044322 | hypothetical protein LOC100501893 [Zea mays] | 0.941092 | Zea mays | 1977 | 2149 |
| | | | | &gt:gi\|238011698\|gb\|ACR36884.1\| unknown | | | | |
| | | | | [Zea mays] | | | | |
| | | Q6EPQ3 | | RecName: Full = SPX domain-containing membrane | 0.87069 | Oryza sativa | 1978 | |
| | | | | protein Os02g45520 | | Japonica Group | | |
| | | | | &gt:gi\|306756291\|sp\|A2X8A7.2\|SPXM1_ORYSI | | | | |
| | | | | RecName: Full = SPX domain-containing membrane | | | | |
| | | | | protein OsI_08463 &gt:gi\|50252990\|dbj\|BAD29241.1\| | | | | |
| | | | | SPX (SYG1/Pho81/XPR1) domain-containing protein- | | | | |
| | | | | like [Oryza sativa Japonica Group] | | | | |
| | | | | &gt:gi\|50253121\|dbj\|BAD29367.1\| SPX | | | | |
| | | | | (SYG1/Pho81/XPR1) domain-containing protein-like | | | | |
| | | | | [Oryza sativa Japonica Group] | | | | |
| | | BAJ95234 | 326502341 | predicted protein [Hordeum vulgare subsp. vulgare] | 0.83477 | Hordeum vulgare | 1979 | 2150 |
| | | | | | | subsp. vulgare | | |
| | | CAD41659 | 38605939 | OSJNBa0019K04.6 [Oryza sativa Japonica Group] | 0.808908 | Oryza sativa | 1980 | |
| | | | | &gt:gi\|25591348\|gb\|EAZ31698.1\| hypothetical protein | | Japonica Group | | |
| | | | | OsJ_15847 [Oryza sativa Japonica Group] | | | | |
| | | NP_001053611 | 115460021 | Os04g0573000 [Oryza sativa Japonica Group] | 0.808908 | Oryza sativa | 1981 | 2151 |
| | | | | &gt:gi\|306756012\|sp\|B8AT51.1\|SPXM2_ORYSI | | Japonica Group | | |
| | | | | RecName: Full = SPX domain-containing membrane | | | | |
| | | | | protein OsI_17046 | | | | |
| | | | | &gt:gi\|306756288\|sp\|Q0JAW2.2\|SPXM2_ORYSJ | | | | |
| | | | | RecName: Full = SPX domain-containing membrane | | | | |
| | | | | protein Os04g0573000 | | | | |
| | | | | &gt:gi\|215694614\|dbj\|BAG89805.1\| unnamed protein | | | | |
| | | | | product [Oryza sativa Japonica Group] | | | | |
| | | | | &gt:gi\|218195403\|gb\|EEC77830.1\| hypothetical protein | | | | |
| | | | | OsI_17046 [Oryza sativa Indica Group] | | | | |
| | | | | &gt:gi\|255675707\|dbj\|BAF15525.2\| Os04g0573000 | | | | |
| | | | | [Oryza sativa Japonica Group] | | | | |
| | | CAH66957 | 116309919 | OSIGBa0147H17.5 [Oryza sativa Indica Group] | 0.806034 | Oryza sativa | 1982 | 2152 |
| | | | | | | Indica Group | | |
| | | XP_002446964 | 242074055 | hypothetical protein SORBIDRAFT_06g025950 | 0.784483 | Sorghum bicolor | 1983 | 2153 |
| | | | | [Sorghum bicolor] &gt:gi\|241938147\|gb\|EES11292.1\| | | | | |
| | | | | hypothetical protein SORBIDRAFT_06g025950 | | | | |
| | | | | [Sorghum bicolor] | | | | |
| | | XP_002282540 | 225426756 | PREDICTED: hypothetical protein [Vitis vinifera] | 0.721264 | Vitis vinifera | 1984 | 2154 |
| | | | | &gt:gi\|297742609\|emb\|CBI34758.3\| unnamed protein | | | | |
| | | | | product [Vitis vinifera] | | | | |
| | 965-985 | XP_002462548 | 242049607 | hypothetical protein SORBIDRAFT_02g027920 | 1 | Sorghum bicolor | 1985 | 2155 |
| | | | | [Sorghum bicolor] &gt:gi\|241925925\|gb\|EER99069.1\| | | | | |
| | | | | hypothetical protein SORBIDRAFT_02g027920 | | | | |
| | | | | [Sorghum bicolor] | | | | |
| | | NP_001145770 | 226498793 | hypothetical protein LOC100279277 [Zea mays] | 0.881919 | Zea mays | 1986 | 2156 |
| | | | | &gt:gi\|219884365\|gb\|ACL52557.1\| unknown | | | | |
| | | | | [Zea mays] | | | | |
| | | ACN34477 | 224030802 | unknown [Zea mays] | 0.852399 | Zea mays | 1987 | 2157 |
| | | NP_001145176 | 226530255 | hypothetical protein LOC100278416 [Zea mays] | 0.852399 | Zea mays | 1988 | 2158 |
| | | | | &gt:gi\|195652339\|gb\|ACG45637.1\| hypothetical | | | | |
| | | | | protein [Zea mays] | | | | |
| | 1075-1095 | NP_001130294 | 212274814 | hypothetical protein LOC100191388 [Zea mays] | 1 | Zea mays | 1989 | 2159 |
| | | | | &gt:gi\|194688768\|gb\|ACF78468.1\| unknown | | | | |
| | | | | [Zea mays] | | | | |
| | | NP_001062638 | 115478085 | Os09g0135400 [Oryza sativa Japonica Group] | 0.786982 | Oryza sativa | 1990 | 2160 |
| | | | | &gt:gi\|47848428\|dbj\|BAD22285.1\| putative | | Japonica Group | | |
| | | | | octicosapeptide/Phox/Bem1p (PB1) domain-containing | | | | |
| | | | | protein [Oryza sativa Japonica Group] | | | | |
| | | | | &gt:gi\|113630871\|dbj\|BAF24552.1\| Os09g0135400 | | | | |
| | | | | [Oryza sativa Japonica Group] | | | | |
| sbi-miR164c | 161-181 | AAL83928 | 19070614 | D-type cyclin [Zea mays] | 1 | Zea mays | 1991 | 2161 |
| | | ACL54102 | 219887454 | unknown [Zea mays] | 0.974359 | Zea mays | 1992 | 2162 |
| | | XP_002444532 | 242079526 | hypothetical protein SORBIDRAFT_07g023350 | 0.720513 | Sorghum bicolor | 1993 | 2163 |
| | | | | [Sorghum bicolor] &gt:gi\|241940882\|gb\|EES14027.1\| | | | | |
| | | | | hypothetical protein SORBIDRAFT_07g023350 | | | | |
| | | | | [Sorghum bicolor] | | | | |
| | | NP_001152238 | 226502938 | cyclin delta-2 [Zea mays] | 0.702564 | Zea mays | 1994 | 2164 |
| | | | | &gt:gi\|195654177\|gb\|ACG46556.1\| | | | | |
| | | | | cyclin delta-2 [Zea mays] | | | | |
| | 467-487 | ACN31118 | 223973860 | unknown [Zea mays] | 1 | Zea mays | 1995 | 2165 |
| | 347-367 | XP_002460244 | 242044745 | hypothetical protein SORBIDRAFT_02g025260 | 1 | Sorghum bicolor | 1996 | 2166 |
| | | | | [Sorghum bicolor] &gt:gi\|241923621\|gb\|EER96765.1\| | | | | |
| | | | | hypothetical protein SORBIDRAFT_02g025260 | | | | |
| | | | | [Sorghum bicolor] | | | | |
| | | ACG44940 | 195650944 | uncharacterized ACR [Zea mays] | 0.904145 | Zea mays | 1997 | 2167 |
| | | NP_001130182 | 212275603 | hypothetical protein LOC100191276 [Zea mays] | 0.904145 | Zea mays | 1998 | 2168 |
| | | | | &gt:gi\|194688486\|gb\|ACF78327.1\| unknown | | | | |
| | | | | [Zea mays] | | | | |
| | | BAK00654 | 326524541 | predicted protein [Hordeum vulgare subsp. vulgare] | 0.740933 | Hordeum vulgare | 1999 | 2169 |
| | | | | | | subsp. vulgare | | |
| | | BAJ99672 | 326512633 | predicted protein [Hordeum vulgare subsp. vulgare] | 0.738342 | Hordeum vulgare | 2000 | 2170 |
| | | | | | | subsp. vulgare | | |
| | | NP_001063233 | 115479278 | Os09g0428900 [Oryza sativa Japonica Group] | 0.725389 | Oryza sativa | 2001 | 2171 |
| | | | | &gt:gi\|50726497\|dbj\|BAD34105.1\| VirR/VirH-like | | Japonica Group | | |
| | | | | protein [Oryza sativa Japonica Group] | | | | |
| | | | | &gt:gi\|113631466\|dbj\|BAF25147.1\| Os09g0428900 | | | | |
| | | | | [Oryza sativa Japonica Group] | | | | |
| | | | | &gt:gi\|215704829\|dbj\|BAG94857.1\| unnamed protein | | | | |
| | | | | product [Oryza sativa Japonica Group] | | | | |
| | | EEE69749 | 54398660 | hypothetical protein OsJ_29445 | 0.725389 | Oryza sativa | 2002 | |
| | | | | [Oryza sativa Japonica Group] | | Japonica Group | | |
| | | EEC84614 | 54362548 | hypothetical protein OsI_31450 [Oryza sativa Indica | 0.735751 | Oryza sativa | 2003 | |
| | | | | Group] | | Indica Group | | |
| | 357-377 | ACN25505 | 223942842 | unknown [Zea mays] | 1 | Zea mays | 2004 | 2172 |
| | | NP_001147770 | 226503046 | NAC domain protein NAC5 [Zea mays] | 0.979885 | Zea mays | 2005 | 2173 |
| | | | | &gt:gi\|195613638\|gb\|ACG28649.1\| NAC domain | | | | |
| | | | | protein NAC5 [Zea mays] | | | | |
| | | XP_002452340 | 242062101 | hypothetical protein SORBIDRAFT_04g023990 | 0.83046 | Sorghum bicolor | 2006 | 2174 |
| | | | | [Sorghum bicolor] &gt:gi\|241932171\|gb\|EES05316.1\| | | | | |
| | | | | hypothetical protein SORBIDRAFT_04g023990 | | | | |
| | | | | [Sorghum bicolor] | | | | |
| | 450-470 | NP_001130182 | 212275603 | hypothetical protein LOC100191276 [Zea mays] | 1 | Zea mays | 2007 | 2175 |
| | | | | &gt:gi\|194688486\|gb\|ACF78327.1\| unknown [Zea | | | | |
| | | | | mays] | | | | |
| | | XP_002460244 | 242044745 | hypothetical protein SORBIDRAFT_02g025260 | 0.838095 | Sorghum bicolor | 2008 | 2176 |
| | | | | [Sorghum bicolor] &gt:gi\|241923621\|gb\|EER96765.1\| | | | | |
| | | | | hypothetical protein SORBIDRAFT_02g025260 | | | | |
| | | | | [Sorghum bicolor] | | | | |
| | 320-340 | ACF87609 | 194707049 | unknown [Zea mays] | 1 | Zea mays | 2009 | 2177 |

TABLE 21
Targets of small RNAs listed in Tables 3 and 4 above

| | Mir | Homolog | Nucleotide | | | | | |
|---|---|---|---|---|---|---|---|---|
| Mir | Binding | NCBI | NCBI | | | | Protein | Nucleotide |
| name | Position | Accession | GI number | Annotation | Identity | Organism | seq id no: | seq id no: |
| Predicted | 1161-1184 | NP_001169815 | 293337028 | hypothetical protein LOC100383707 [Zea mays] | 1 | Zea mays | 2183 | 2356 |
| folded | | | | &gt:gi\|224031809\|gb\|ACN34980.1\| unknown [Zea mays] | | | | |
| 24-nts-long | | | | | | | | |
| seq 54187 | | | | | | | | |
| Predicted | 448-469 | XP_002456346 | 242054400 | hypothetical protein SORBIDRAFT_03g034380 | 1 | Sorghum | 2184 | 2357 |
| siRNA | | | | [Sorghum bicolor] &gt:gi\|241928321\|gb\|EES01466.1\| | | bicolor | | |
| 54895 | | | | hypothetical protein SORBIDRAFT_03g034380 | | | | |
| | | | | [Sorghum bicolor] | | | | |
| | | NP_001168171 | 293333303 | hypothetical protein LOC100381924 [Zea mays] | 0.948753 | Zea mays | 2185 | 2358 |
| | | | | &gt:gi\|223946473\|gb\|ACN27320.1\| unknown [Zea mays] | | | | |
| | | BAK02879 | 326504983 | predicted protein [Hordeum vulgare subsp. vulgare] | 0.858726 | Hordeum | 2186 | 2359 |
| | | | | | | vulgare | | |
| | | | | | | subsp. | | |
| | | | | | | vulgare | | |
| | | NP_001044228 | 115439896 | Os01g0746200 [Oryza sativa Japonica Group] | 0.855956 | Oryza | 2187 | 2360 |
| | | | | &gt:gi\|21902047\|dbj\|BAC05596.1\| putative | | sativa | | |
| | | | | nucleoporin Nup75 [Oryza sativa Japonica Group] | | Japonica | | |
| | | | | &gt:gi\|13533759\|dbj\|BAF06142.1\|Os01g0746200 | | Group | | |
| | | | | [Oryza sativa Japonica Group] | | | | |
| | | EEE55373 | 54398660 | hypothetical protein OsJ_03432 [Oryza sativa Japonica | 0.822715 | Oryza | 2188 | |
| | | | | Group] | | sativa | | |
| | | | | | | Japonica | | |
| | | | | | | Group | | |
| | | BAD87530 | 21902027 | putative nucleoporin Nup75 [Oryza sativa Japonica | 0.709141 | Oryza | 2189 | |
| | | | | Group] | | sativa | | |
| | | | | | | Japonica | | |
| | | | | | | Group | | |
| | | EEC71467 | 54362548 | hypothetical protein OsI_03713 [Oryza sativa Indica | 0.732687 | Oryza | 2190 | |
| | | | | Group] | | sativa | | |
| | | | | | | Indica | | |
| | | | | | | Group | | |
| Predicted | 207-227 | NP_001169431 | 293335380 | hypothetical protein LOC100383302 [Zea mays] | 1 | Zea mays | 2191 | 2361 |
| siRNA | | | | &gt:gi\|224029331\|gb\|ACN33741.1\| unknown [Zea mays] | | | | |
| 55242 | | | | | | | | |
| Predicted | 1392-1415 | XP_002468341 | 242041892 | hypothelical protein SORBIDRAFT_01g044140 | 1 | Sorghum | 2192 | 2362 |
| siRNA | | | | [Sorghum bicolor] &gt:gi\|241922195\|gb\|EER95339.1\| | | bicolor | | |
| 55246 | | | | hypothetical protein SORBIDRAFT_01g044140 | | | | |
| | | | | [Sorghum bicolor] | | | | |
| | | NP_001151876 | 226503834 | membrane protein [Zea mays] | 0.81 | Zea mays | 2193 | 2363 |
| | | | | &gt:gi\|195650527\|gb\|ACG44731.1\| membrane protein | | | | |
| | | | | [Zea mays] | | | | |
| | | ACR36360 | 238010649 | unknown [Zea mays] | 0.81137 | Zea mays | 2194 | 2364 |
| | | NP_001148205 | 226506697 | membrane protein [Zea mays] | 0.857881 | Zea mays | 2195 | 2365 |
| | | | | &gt:gi\|195616684\|gb\|ACG30172.1\| membrane protein | | | | |
| | | | | [Zea mays] | | | | |
| | 1356-1379 | ACN34728 | 224031304 | unknown [Zea mays] | 1 | Zea mays | 2196 | 2366 |
| Predicted | 18-38 | XP_002463627 | 242032464 | hypothetical protein SORBIDRAFT_01g003230 | 1 | Sorghum | 2197 | 2367 |
| siRNA | | | | [Sorghum bicolor] &gt:gi\|241917481\|gb\|EER90625.1\| | | bicolor | | |
| 55402 | | | | hypothetical protein SORBIDRAFT_01g003230 | | | | |
| | | | | [Sorghum bicolor] | | | | |
| | | NP_001151779 | 226493505 | CRAL/TRIO domain containing protein [Zea mays] | 0.93038 | Zea mays | 2198 | 2368 |
| | | | | &gt:gi\|95649633\|gb\|ACG44284.1\| CRAL/TRIO | | | | |
| | | | | domain containing protein [Zea mays] | | | | |
| | | | | &gt:gi\|223945249\|gb\|ACN26708.1\| unknown [Zea mays] | | | | |
| | | | | &gt:gi\|224028997\|gb\|ACN33574.1\| unknown | | | | |
| | | | | [Zea mays] | | | | |
| | | NP_001151588 | 226492275 | CRAL/TRIO domain containing protein [Zea mays] | 0.92827 | Zea mays | 2199 | 2369 |
| | | | | &gt:gi\|195647970\|gb\|ACG43453.1\| CRAL/TRIO | | | | |
| | | | | domain containing protein [Zea mays] | | | | |
| | | ACN25417 | 223942666 | unknown [Zea mays] | 0.93038 | Zea mays | 2200 | 2370 |
| | | | | &gt:gi\|223946125\|gb\|ACN27146.1\| unknown [Zea mays] | | | | |
| | | NP_001051723 | 115456244 | Os03g0820900 [Oryza sativa Japonica Group] | 0.78481 | Oryza | 2201 | 2371 |
| | | | | &gt:gi\|29124131\|gb\|AAO65872.1\| unknown protein | | sativa | | |
| | | | | [Oryza sativa Japonica Group] | | Japonica | | |
| | | | | &gt:gi\|108711795\|gb\|ABF99590.1\| CRAL/TRIO | | Group | | |
| | | | | domain containing protein, expressed | | | | |
| | | | | [Oryza sativa Japonica Group] | | | | |
| | | | | &gt:gi\|108711796\|gb\|ABF99591.1\| | | | | |
| | | | | CRAL/TRIO domain containing protein, expressed | | | | |
| | | | | [Oryza sativa Japonica Group] | | | | |
| | | | | &gt:gi\|113550194\|dbj\|BAF13637.1\| Os03g0820900 | | | | |
| | | | | [Oryza sativa Japonica Group] | | | | |
| | | | | &gt:gi\|215704136\|dbj\|BAG92976.1\| unnamed protein | | | | |
| | | | | product [Oryza sativa Japonica Group] | | | | |
| | | BAK03907 | 326519964 | predicted protein [Hordeum vulgare subsp. vulgare] | 0.759494 | Hordeum | 2202 | 2372 |
| | | | | | | vulgare | | |
| | | | | | | subsp. | | |
| | | | | | | vulgare | | |
| Predicted | 2164-2185 | XP_002453411 | 242064243 | hypothetical protein SORBIDRAFT_04g005580 | 1 | Sorghum | 2203 | 2373 |
| siRNA | | | | [Sorghum bicolor] &gt:gi\|241933242\|gb\|EES06387.1\| | | bicolor | | |
| 56314 | | | | hypothetical protein SORBIDRAFT_04g005580 | | | | |
| | | | | [Sorghum bicolor] | | | | |
| | | NP_001104863 | 162460461 | response regulator 9 [Zea mays] | 0.939778 | Zea mays | 2204 | 2374 |
| | | | | &gt:gi\|14189890\|dbj\|BAB55874.1\| response regulator | | | | |
| | | | | 9 [Zea mays] | | | | |
| | | ADX60157 | 323388704 | ARR-B transcription factor [Zea mays] | 0.939778 | Zea mays | 2205 | 2375 |
| | | NP_001046097 | 115444634 | Os02g0182100 [Oryza sativa Japonica Group] | 0.743265 | Oryza | 2206 | 2376 |
| | | | | &gt:gi\|49388028\|dbj\|BAD25144.1\| putative response | | sativa | | |
| | | | | regulator 9 [Oryza sativa Japonica Group] | | Japonica | | |
| | | | | &gt:gi\|113535628\|dbj\|BAF08011.1\| Os02g0182100 | | Group | | |
| | | | | [Oryza sativa Japonica Group] | | | | |
| | | | | &gt:gi\|118790764\|tpd\|FAA00257.1\| TPA: response | | | | |
| | | | | regulator [Oryza sativa Japonica Group] | | | | |
| | | | | &gt:gi\|215713506\|dbj\|BAG94643.1\| unnamed protein | | | | |
| | | | | product [Oryza sativa Japonica Group] | | | | |
| | | | | &gt:gi\|222622313\|gb\|EEE56445.1\| hypothetical protein | | | | |
| | | | | OsJ_05635 [Oryza sativa Japonica Group] | | | | |
| | | EAY84742 | 54362548 | hypothetical protein OsI_06112 [Oryza sativa Indica | 0.740095 | Oryza | 2207 | |
| | | | | Group] | | sativa | | |
| | | | | | | Indica | | |
| | | | | | | Group | | |
| | | BAJ94963 | 326500593 | predicted protein [Hordeum vulgare subsp. vulgare] | 0.719493 | Hordeum | 2208 | 2377 |
| | | | | | | vulgare | | |
| | | | | | | subsp. | | |
| | | | | | | vulgare | | |
| | 366-387 | XP_002463544 | 242032298 | hypothetical protein SORBIDRAFT_01g001720 | 1 | Sorghum | 2209 | 2378 |
| | | | | [Sorghum bicolor] &gt:gi\|241917398\|gb\|EER90542.1\| | | bicolor | | |
| | | | | hypothetical protein SORBIDRAFT_01g001720 | | | | |
| | | | | [Sorghum bicolor] | | | | |
| | | NP_001146073 | 226508205 | hypothetical protein LOC100279605 [Zea mays] | 0.916342 | Zea mays | 2210 | 2379 |
| | | | | &gt:gi\|219885573\|gb\|ACL53161.1\| unknown [Zea mays] | | | | |
| | | AAX96076 | 45430072 | diphthamide biosynthesis protein 2 [Oryza sativa | 0.774319 | Oryza | 2211 | |
| | | | | Japonica Group] &gt:gi\|77549704\|gb\|ABA92501.1\| | | sativa | | |
| | | | | diphthamide biosynthesis protein 2 containing protein, | | Japonica | | |
| | | | | expressed [Oryza sativa Japonica Group] | | Group | | |
| | | | | &gt:gi\|125576808\|gb\|EAZ18030.1\| hypothetical | | | | |
| | | | | protein OsJ_33577 [Oryza sativa Japonica Group] | | | | |
| | | NP_001067661 | 297611609 | Os11g0265600 [Oryza sativa Japonica Group] | 0.762646 | Oryza | 2212 | 2380 |
| | | | | &gt:gi\|255679981\|dbj\|BAF28024.2\| Os11g0265600 | | sativa | | |
| | | | | [Oryza sativa Japonica Group] | | Japonica | | |
| | | | | | | Group | | |
| | | BAJ96431 | 326516877 | predicted protein [Hordeum vulgare subsp. vulgare] | 0.743191 | Hordeum | 2213 | 2381 |
| | | | | | | vulgare | | |
| | | | | | | subsp. | | |
| | | | | | | vulgare | | |
| Predicted | 836-853 | NP_001044108 | 115439656 | Os01g0723600 [Oryza sativa Japonica Group] | 1 | Oryza | 2214 | 2382 |
| siRNA | | | | &gt:gi\|68571765\|sp\|Q8S2E5.1\|KPRS3_ORYSJ | | sativa | | |
| 58212 | | | | RecName: Full = Ribose-phosphate pyrophosphokinase | | Japonica | | |
| | | | | 3, chloroplastic; AltName: Full = Phosphoribosyl | | Group | | |
| | | | | pyrophosphate synthase 3; Flags: Precursor | | | | |
| | | | | &gt:gi\|20160549\|dbj\|BAB89498.1\| putative | | | | |
| | | | | phosphoribosyl pyrophosphate synthase [Oryza sativa | | | | |
| | | | | Japonica Group] &gt:gi\|113533639\|dbj\|BAF06022.1\| | | | | |
| | | | | Os01g0723600 [Oryza sativa Japonica Group] | | | | |
| | | | | &gt:gi\|215766650\|dbj\|BAG98878.1\| unnamed protein | | | | |
| | | | | product [Oryza sativa Japonica Group] | | | | |
| | | EAY75668 | 54362548 | hypothetical protein OsI_03574 [Oryza sativa Indica | 0.9511 | Oryza | 2215 | |
| | | | | Group] | | sativa Indica | | |
| | | | | | | Group | | |
| | | XP_002456270 | 242054248 | hypothetical protein SORBIDRAFT_03g033270 | 0.843521 | Sorghum | 2216 | 2383 |
| | | | | [Sorghum bicolor] &gt:gi\|241928245\|gb\|EES01390.1\| | | bicolor | | |
| | | | | hypothetical protein SORBIDRAFT_03g033270 | | | | |
| | | | | [Sorghum bicolor] | | | | |
| | | EAZ13389 | 54398660 | hypothetical protein OsJ_03307 [Oryza sativa Japonica | 0.784841 | Oryza | 2217 | |
| | | | | Group] | | sativa | | |
| | | | | | | Japonica | | |
| | | | | | | Group | | |
| | | BAJ93948 | 326488558 | predicted protein [Hordeum vulgare subsp. vulgare] | 0.770171 | Hordeum | 2218 | 2384 |
| | | | | | | vulgare | | |
| | | | | | | subsp. | | |
| | | | | | | vulgare | | |
| | | NP_001144250 | 226496474 | hypothetical protein LOC100277120 [Zea mays] | 0.721271 | Zea mays | 2219 | 2385 |
| | | | | &gt:gi\|95639012\|gb\|ACG38974.1\| hypothetical | | | | |
| | | | | protein [Zea mays] | | | | |
| | 174-191 | XP_002439476 | 242087286 | hypothetical protein SORBIDRAFT_09g007410 | 1 | Sorghum | 2220 | 2386 |
| | | | | [Sorghum bicolor] &gt:gi\|241944761\|gb\|EES17906.1\| | | bicolor | | |
| | | | | hypothetical protein SORBIDRAFT_09g007410 | | | | |
| | | | | [Sorghum bicolor] | | | | |
| | | NP_001130714 | 212274518 | hypothetical protein LOC100191818 [Zea mays] | 0.974522 | Zea mays | 2221 | 2387 |
| | | | | &gt:gi\|195621524\|gb\|ACG32592.1\| ubiquitin- | | | | |
| | | | | conjugating enzyme E2 16 [Zea mays] | | | | |
| | | | | &gt:gi\|195638874\|gb\|ACG38905.1\| ubiquitin- | | | | |
| | | | | conjugating enzyme E2 16 [Zea mays] | | | | |
| | | | | &gt:gi\|224035185\|gb\|ACN36668.1\| unknown [Zea mays] | | | | |
| | | ACF79042 | 194689915 | unknown [Zea mays] | 0.968153 | Zea mays | 2222 | 2388 |
| | | | | &gt:gi\|224033341\|gb\|ACN35746.1\| unknown [Zea mays] | | | | |
| | | NP_001047515 | 115447470 | Os02g0634800 [Oryza sativa Japonica Group] | 0.961783 | Oryza | 2223 | 2389 |
| | | | | &gt:gi\|49387540\|dbj\|BAD25096.1\| putative ubiquitin- | | sativa | | |
| | | | | conjugating enzyme E2 [Oryza sativa Japonica Group] | | Japonica | | |
| | | | | &gt:gi\|49388188\|dbj\|BAD25314.1\| putative ubiquitin- | | Group | | |
| | | | | conjugating enzyme E2 [Oryza sativa Japonica Group] | | | | |
| | | | | &gt:gi\|113537046\|dbj\|BAF09429.1\| Os02g0634800 | | | | |
| | | | | [Oryza sativa Japonica Group] | | | | |
| | | | | &gt:gi\|215765381\|dbj\|BAG87078.1\| unnamed protein | | | | |
| | | | | product [Oryza sativa Japonica Group] | | | | |
| | | NP_001150370 | 226529098 | ubiquitin-conjugating enzyme E2 16 [Zea mays] | 0.961783 | Zea mays | 2224 | 2390 |
| | | | | &gt:gi\|195638722\|gb\|ACG38829.1\| ubiquitin- | | | | |
| | | | | conjugating enzyme E2 16 [Zea mays] | | | | |
| | | | | &gt:gi\|223944475\|gb\|ACN26321.1\| unknown [Zea | | | | |
| | | | | mays] | | | | |
| | | XP_002284068 | 225429994 | PREDICTED: hypothetical protein isoform 2 [Vitis vinifera] | 0.942675 | Vitis | 2225 | 2391 |
| | | | | &gt:gi\|225429997\|ref\|XP_002284062.1\| | | vinifera | | |
| | | | | PREDICTED: hypothetical protein isoform 1 [Vitis vinifera] | | | | |
| | | | | &gt:gi\|296081873\|emb\|CBI20878.3\| unnamed | | | | |
| | | | | protein product [Vitis vinifera] | | | | |
| | | ADV04064 | 317159578 | protein binding/ubiquitin-protein ligase 4 [Hevea brasiliensis] | 0.923567 | Hevea | 2226 | 2392 |
| | | | | | | brasiliensis | | |
| | | ACA24139 | 168472726 | ubiquitin-conjugating enzyme [Lolium temulentum] | 0.936306 | Lolium | 2227 | 2393 |
| | | | | | | temulentum | | |
| | | XP_002872181 | 297808594 | predicted protein [Arabidopsis lyrata subsp. lyrata] | 0.929936 | Arabidopsis | 2228 | 2394 |
| | | | | &gt:gi\|297836036\|ref\|XP_002885900.1\| hypothetical | | lyrata | | |
| | | | | protein ARALYDRAFT_899617 [Arabidopsis lyrata | | subsp. | | |
| | | | | subsp. lyrata] &gt:gi\|297318018\|gb\|EFH48440.1\| | | lyrata | | |
| | | | | predicted protein [Arabidopsis lyrata subsp. lyrata] | | | | |
| | | | | &gt:gi\|297331740\|gb\|EFH62159.1\| hypothetical | | | | |
| | | | | protein ARALYDRAFT_899617 [Arabidopsis lyrata | | | | |
| | | | | subsp. lyrata] | | | | |
| | | NP_568476 | 145358439 | putative ubiquitin-conjugating enzyme E2 21 | 0.929936 | Arabidopsis | 2229 | 2395 |
| | | | | [Arabidopsis thaliana] | | thaliana | | |
| | | | | &gt:gi\|79328676\|ref\|NP_001031939.1\| putative | | | | |
| | | | | ubiquitin-conjugating enzyme E2 21 [Arabidopsis thaliana] | | | | |
| | | | | &gt:gi\|75330089\|sp\|Q8LGF7.1\|PEX4_ARATH | | | | |
| | | | | RecName: Full = Protein PEROXIN-4; Short = AtPEX4; | | | | |
| | | | | AltName: Full = Probable ubiquitin-conjugating enzyme | | | | |
| | | | | E2 21; AltName: Full = Ubiquitin carrier protein 21 | | | | |
| | | | | &gt:gi\|21536556\|gb\|AAM60888.1\| E2, ubiquitin- | | | | |
| | | | | conjugating enzyme, putative [Arabidopsis thaliana] | | | | |
| | | | | &gt:gi\|66354452\|gb\|AAY44861.1\| ubiquitinating | | | | |
| | | | | enzyme [Arabidopsis thaliana] | | | | |
| | | | | &gt:gi\|98961101\|gb\|ABF59034.1\| At5g25760 | | | | |
| | | | | [Arabidopsis thaliana] | | | | |
| | | | | &gt:gi\|332006099\|gb\|AED93482.1\| putative ubiquitin- | | | | |
| | | | | conjugating enzyme E2 21 [Arabidopsis thaliana] | | | | |
| | | | | &gt:gi\|332006100\|gb\|AED93483.1\| putative ubiquitin- | | | | |
| | | | | conjugating enzyme E2 21 [Arabidopsis thaliana] | | | | |
| | 53-70 | XP_002443820 | 242078102 | hypothetical protein SORBIDRAFT_07g002770 | 1 | Sorghum | 2230 | 2396 |
| | | | | [Sorghum bicolor] | | bicolor | | |
| | | | | &gt:gi\|18481702\|gb\|AAL73524.1\|AF466200_3 | | | | |
| | | | | tryptophan synthase beta-subunit [Sorghum bicolor] | | | | |
| | | | | &gt:gi\|241940170\|gb\|EES13315.1\| hypothetical protein | | | | |
| | | | | SORBIDRAFT_07g002770 [Sorghum bicolor] | | | | |
| | | P43284 | | RecName: Full = Tryptophan synthase beta chain 2, | 0.834034 | Zea mays | 2231 | |
| | | | | chloroplastic; AltName: Full = Orange pericarp 2; Flags: | | | | |
| | | | | Precursor &gt:gi\|168574\|gb\|AAA33491.1\| tryptophan | | | | |
| | | | | synthase beta-subunit [Zea mays] | | | | |
| | | EAZ05512 | 54362548 | hypothetical protein OsI_27728 [Oryza sativa Indica | 0.848739 | Oryza | 2232 | |
| | | | | Group] | | sativa | | |
| | | | | | | Indica | | |
| | | | | | | Group | | |
| | | P43283 | | RecName: Full = Tryptophan synthase beta chain 1; | 0.802521 | Zea mays | 2233 | |
| | | | | AltName: Full = Orange pericarp 1 | | | | |
| | | | | &gt:gi\|168572\|gb\|AAA33490.1\| tryptophan synthase | | | | |
| | | | | beta-subunit [Zea mays] | | | | |
| | | ADZ04637 | 325260807 | hypothetical protein [Oryza glaberrima] | 0.848739 | Oryza | 2234 | 2397 |
| | | | | | | glaberrima | | |
| | | XP_002281484 | 225461049 | PREDICTED: hypothetical protein [Vitis vinifera] | 0.752101 | Vitis | 2235 | 2398 |
| | | | | | | vinifera | | |
| | | CBI23954 | 270256979 | unnamed protein product [Vitis vinifera] | 0.752101 | Vitis | 2236 | 2399 |
| | | | | | | vinifera | | |
| | | NP_200292 | 145359253 | tryptophan synthase beta chain [Arabidopsis thaliana] | 0.754202 | Arabidopsis | 2237 | 2400 |
| | | | | &gt:gi\|136251\|sp\|P14671.1\|TRPB1_ARATH | | thaliana | | |
| | | | | RecName: Full = Tryptophan synthase beta chain 1, | | | | |
| | | | | chloroplastic; Flags: Precursor | | | | |
| | | | | &gt:gi\|14194117\|gb\|AAK56253.1\|AF367264_1 | | | | |
| | | | | AT5g54810/MBG8_7 [Arabidopsis thaliana] | | | | |
| | | | | &gt:gi\|166892\|gb\|AAA32878.1\| tryptophan synthase | | | | |
| | | | | beta subunit [Arabidopsis thaliana] | | | | |
| | | | | &gt:gi\|9758261\|dbj\|BAB08760.1\| tryptophan synthase | | | | |
| | | | | beta chain 1 precursor [Arabidopsis thaliana] | | | | |
| | | | | &gt:gi\|21592983\|gb\|AAM64932.1\| tryptophan synthase | | | | |
| | | | | beta chain 1 precursor [Arabidopsis thaliana] | | | | |
| | | | | &gt:gi\|22137210\|gb\|AAM91450.1\| | | | | |
| | | | | AT5g54810/MBG8_7 [Arabidopsis thaliana] | | | | |
| | | | | &gt:gi\|110742593\|dbj\|BAE99210.1\| tryptophan | | | | |
| | | | | synthase beta chain 1 precursor [Arabidopsis thaliana] | | | | |
| | | | | &gt:gi\|332009160\|gb\|AED96543.1\| tryptophan | | | | |
| | | | | synthase beta chain [Arabidopsis thaliana] | | | | |
| | | BAD83779 | 57157620 | tryptophan synthase beta subunit [Polygonum tinctorium] | 0.747899 | Polygonum | 2238 | 2401 |
| | | | | | | tinctorium | | |
| | 1275-1292 | ACF84664 | 194701159 | unknown [Zea mays] | 1 | Zea mays | 2239 | 2402 |
| | | NP_001132166 | 239049858 | hypothetical protein LOC100193588 [Zea mays] | 0.961303 | Zea mays | 2240 | 2403 |
| | | | | &gt:gi\|238908670\|gb\|ACF80898.2\| unknown [Zea mays] | | | | |
| | | XP_002463588 | 242032386 | hypothetical protein SORBIDRAFT_01g002540 | 0.847251 | Sorghum | 2241 | 2404 |
| | | | | [Sorghum bicolor] &gt:gi\|241917442\|gb\|EER90586.1\| | | bicolor | | |
| | | | | hypothetical protein SORBIDRAFT_01g002540 | | | | |
| | | | | [Sorghum bicolor] | | | | |
| | | NP_001142611 | 226501615 | hypothetical protein LOC100274879 [Zea mays] | 0.796334 | Zea mays | 2242 | 2405 |
| | | | | &gt:gi\|195607300\|gb\|ACG25480.1\| hypothetical | | | | |
| | | | | protein [Zea mays] | | | | |
| | 193-210 | ADX60181 | 323388752 | NLP transcription factor [Zea mays] | 1 | Zea mays | 2243 | 2406 |
| | | NP_001151037 | 226532035 | RWP-RK domain containing protein [Zea mays] | 0.996979 | Zea mays | 2244 | 2407 |
| | | | | &gt:gi\|195643826\|gb\|ACG41381.1\| RWP-RK domain | | | | |
| | | | | containing protein [Zea mays] | | | | |
| | | ACF82353 | 194696537 | unknown [Zea mays] | 0.996979 | Zea mays | 2245 | 2408 |
| | | XP_002448339 | 242076805 | hypothetical protein SORBIDRAFT_06g025420 | 0.912387 | Sorghum | 2246 | 2409 |
| | | | | [Sorghum bicolor] &gt:gi\|241939522\|gb\|EES12667.1\| | | bicolor | | |
| | | | | hypothetical protein SORBIDRAFT_06g025420 | | | | |
| | | | | [Sorghum bicolor] | | | | |
| | 191-208 | XP_002442705 | 242084559 | hypothetical protein SORBIDRAFT_08g001540 | 1 | Sorghum | 2247 | 2410 |
| | | | | [Sorghum bicolor] &gt:gi\|241943398\|gb\|EES16543.1\| | | bicolor | | |
| | | | | hypothetical protein SORBIDRAFT_08g001540 | | | | |
| | | | | [Sorghum bicolor] | | | | |
| | | ACN27961 | 223947754 | unknown [Zea mays] | 0.954268 | Zea mays | 2248 | 2411 |
| | | | | &gt:gi\|223950179\|gb\|ACN29173.1\| unknown [Zea mays] | | | | |
| | | | | &gt:gi\|224030475\|gb\|ACN34313.1\| unknown | | | | |
| | | | | [Zea mays] | | | | |
| | | ACN33779 | 224029406 | unknown [Zea mays] | 0.882622 | Zea mays | 2249 | 2412 |
| | | NP_001148977 | 226508337 | LOC100282597 [Zea mays] | 0.881098 | Zea mays | 2250 | 2413 |
| | | | | &gt:gi\|195623744\|gb\|ACG33702.1\| alpha-N- | | | | |
| | | | | arabinofuranosidase A precursor [Zea mays] | | | | |
| | | EEC67598 | 54362548 | hypothetical protein OsI_34967 [Oryza sativa Indica | 0.890244 | Oryza | 2251 | |
| | | | | Group] | | sativa | | |
| | | | | | | Indica | | |
| | | | | | | Group | | |
| | | NP_001065660 | 115483996 | Os11g0131900 [Oryza sativa Japonica Group] | 0.890244 | Oryza | 2252 | 2414 |
| | | | | &gt:gi\|108863956\|gb\|ABA91355.2\| Alpha-L- | | sativa | | |
| | | | | arabinofuranosidase C-terminus family protein, | | Japonica | | |
| | | | | expressed [Oryza sativa Japonica Group] | | Group | | |
| | | | | &gt:gi\|108863957\|gb\|ABG22345.1\| Alpha-L- | | | | |
| | | | | arabinofuranosidase C-terminus family protein, | | | | |
| | | | | expressed [Oryza sativa Japonica Group] | | | | |
| | | | | &gt:gi\|108863958\|gb\|ABG22346.1\| Alpha-L- | | | | |
| | | | | arabinofuranosidase C-terminus family protein, | | | | |
| | | | | expressed [Oryza sativa Japonica Group] | | | | |
| | | | | &gt:gi\|13644364\|dbj\|BAF27505.1\| Os11g0131900 | | | | |
| | | | | [Oryza sativa Japonica Group] | | | | |
| | | | | &gt:gi\|215694468\|dbj\|BAG89431.1\| unnamed protein | | | | |
| | | | | product [Oryza sativa Japonica Group] | | | | |
| | | | | &gt:gi\|222615454\|gb\|EEE51586.1\| hypothetical protein | | | | |
| | | | | OsJ_32826 [Oryza sativa Japonica Group] | | | | |
| | | AAK21880 | 13398413 | arabinoxylan arabinofuranohydrolase isoenzyme | 0.873476 | Hordeum | 2253 | 2415 |
| | | | | AXAH-II [Hordeum vulgare] | | vulgare | | |
| | | NP_001066062 | 115487149 | Os12g0128700 [Oryza sativa Japonica Group] | 0.875 | Oryza | 2254 | 2416 |
| | | | | &gt:gi\|77553575\|gb\|ABA96371.1\| Alpha-L- | | sativa | | |
| | | | | arabinofuranosidase C-terminus family protein, | | Japonica | | |
| | | | | expressed [Oryza sativa Japonica Group] | | Group | | |
| | | | | &gt:gi\|108862132\|gb\|ABA96370.2\| Alpha-L | | | | |
| | | | | arabinofuranosidase C-terminus family protein, | | | | |
| | | | | expressed [Oryza sativa Japonica Group] | | | | |
| | | | | &gt:gi\|113648569\|dbj\|BAF29081.1\| Os12g0128700 | | | | |
| | | | | [Oryza sativa Japonica Group] | | | | |
| | | EEC68793 | 54362548 | hypothetical protein OsI_37345 [Oryza sativa Indica | 0.875 | Oryza | 2255 | |
| | | | | Group] | | sativa | | |
| | | | | | | Indica | | |
| | | | | | | Group | | |
| | | EEE52698 | 54398660 | hypothetical protein OsJ_35098 [Oryza sativa Japonica | 0.855183 | Oryza | 2256 | |
| | | | | Group] | | sativa | | |
| | | | | | | Japonica | | |
| | | | | | | Group | | |
| | 39-56 | XP_002460589 | 242045435 | hypothetical protein SORBIDRAFT_02g031360 | 1 | Sorghum | 2257 | 2417 |
| | | | | [Sorghum bicolor] | | bicolor | | |
| | | | | &gt:gi\|241923966\|gb\|EER97110.1\| | | | | |
| | | | | hypothetical protein SORBIDRAFT_02g031360 | | | | |
| | | | | [Sorghum bicolor] | | | | |
| | | NP_001170202 | 293335825 | hypothetical protein LOC100384152 [Zea mays] | 0.932534 | Zea mays | 2258 | 2418 |
| | | | | &gt:gi\|74011495\|ref\|XP_548544.2\| PREDICTED: | | | | |
| | | | | similar to solute carrier family 15, member 4 [Canis | | | | |
| | | | | familiaris] &gt:gi\|224034265\|gb\|ACN36208.1\| | | | | |
| | | | | unknown [Zea mays] | | | | |
| | 1336-1353 | XP_002448678 | 242077483 | hypothetical protein SORBIDRAFT_06g031350 | 1 | Sorghum | 2259 | 2419 |
| | | | | [Sorghum bicolor] &gt:gi\|241939861\|gb\|EES13006.1\| | | bicolor | | |
| | | | | hypothetical protein SORBIDRAFT_06g031350 | | | | |
| | | | | [Sorghum bicolor] | | | | |
| | | ACV84254 | 258618872 | LOX6 [Sorghum bicolor] | 0.986711 | Sorghum | 2260 | 2420 |
| | | | | | | bicolor | | |
| | | NP_001105976 | 162463393 | lipoxygenase6 [Zea mays] | 0.864895 | Zea mays | 2261 | 2421 |
| | | | | &gt:gi\|84626289\|gb\|ABC59689.1\| lipoxygenase [Zea | | | | |
| | | | | mays] &gt:gi\|223949113\|gb\|ACN28640.1\| unknown | | | | |
| | | | | [Zea mays] &gt:gi\|224030589\|gb\|ACN34370.1\| | | | | |
| | | | | unknown [Zea mays] | | | | |
| | | | | &gt:gi\|238009650\|gb\|ACR35860.1\| unknown [Zea mays] | | | | |
| | | ACL5319 | 219885648 | unknown [Zea mays] | 0.844961 | Zea mays | 2262 | 2422 |
| | | | | &gt:gi\|224030301\|gb\|ACN34226.1\| unknown [Zea mays] | | | | |
| | | | | &gt:gi\|224030481\|gb\|ACN34316.1\| unknown | | | | |
| | | | | [Zea mays] | | | | |
| | 165-182 | NP_001145144 | 226499907 | hypothetical protein LOC100278375 [Zea mays] | 1 | Zea mays | 2263 | 2423 |
| | | | | &gt:gi\|195651893\|gb\|ACG45414.1\| hypothetical | | | | |
| | | | | protein [Zea mays] | | | | |
| | | XP_002444131 | 242078724 | hypothetical protein SORBIDRAFT_07g009350 | 0.875 | Sorghum | 2264 | 2424 |
| | | | | [Sorghum bicolor] &gt:gi\|241940481\|gb\|EES13626.1\| | | bicolor | | |
| | | | | hypothetical protein SORBIDRAFT_07g009350 | | | | |
| | | | | [Sorghum bicolor] | | | | |
| | 560-577 | NP_001169179 | 293336717 | hypothetical protein LOC100383029 [Zea mays] | 1 | Zea mays | 2265 | 2425 |
| | | | | &gt:gi\|223975337\|gb\|ACN31856.1\| unknown [Zea mays] | | | | |
| | | XP_002463802 | 242032814 | hypothetical protein SORBIDRAFT_01g006430 | 0.816964 | Sorghum | 2266 | 2426 |
| | | | | [Sorghum bicolor] &gt:gi\|241917656\|gb\|EER90800.1\| | | bicolor | | |
| | | | | hypothetical protein SORBIDRAFT_01g006430 | | | | |
| | | | | [Sorghum bicolor] | | | | |
| | 1379-1396 | XP_002458253 | 242058214 | hypothetical protein SORBIDRAFT_03g029970 | 1 | Sorghum | 2267 | 2427 |
| | | | | [Sorghum bicolor] &gt:gi\|241930228\|gb\|EES03373.1\| | | bicolor | | |
| | | | | hypothetical protein SORBIDRAFT_03g029970 | | | | |
| | | | | [Sorghum bicolor] | | | | |
| | | NP_001105776 | 162457954 | inorganic phosphate transporter 6 [Zea mays] | 0.927798 | Zea mays | 2268 | 2428 |
| | | | | &gt:gi\|60677369\|emb\|CAH25731.1\| phosphate | | | | |
| | | | | transporter [Zea mays] | | | | |
| | | | | &gt:gi\|65335927\|gb\|AAY42390.1\| inorganic phosphate | | | | |
| | | | | transporter 6 [Zea mays] | | | | |
| | | | | &gt:gi\|221047212\|gb\|ACL98053.1\| inorganic | | | | |
| | | | | phosphate transporter 6 [Zea mays] | | | | |
| | | NP_001043759 | 115438958 | Os01g0657100 [Oryza sativa Japonica Group] | 0.799639 | Oryza | 2269 | 2429 |
| | | | | &gt:gi\|75306389\|sp\|Q94DB8.1\|PT111_ORYSJ | | sativa | | |
| | | | | RecName: Full = Inorganic phosphate transporter 1-11; | | Japonica | | |
| | | | | Short = OsPT11; Short = OsPht1; 11; AltName: | | Group | | |
| | | | | Full = H(+)/Pi cotransporter | | | | |
| | | | | &gt:gi\|5290037\|dbj\|BAB63731.1\| putative phosphate | | | | |
| | | | | transport protein PT1 [Oryza sativa Japonica Group] | | | | |
| | | | | &gt:gi\|23600435\|gb\|AAN39041.1\| high affinity | | | | |
| | | | | phosphate transporter 11 [Oryza sativa Japonica Group] | | | | |
| | | | | &gt:gi\|23600477\|gb\|AAN39052.1\| putative | | | | |
| | | | | phosphate transporter OsPT11 [Oryza sativa Japonica | | | | |
| | | | | Group] &gt:gi\|113533290\|dbj\|BAF05673.1\| | | | | |
| | | | | Os01g0657100 [Oryza sativa Japonica Group] | | | | |
| | | | | &gt:gi\|125527126\|gb\|EAY75240.1\| hypothetical | | | | |
| | | | | protein OsI_03128 [Oryza sativa Indica Group] | | | | |
| | | | | &gt:gi\|125571445\|gb\|EAZ12960.1\| hypothetical | | | | |
| | | | | protein OsJ_02880 [Oryza sativa Japonica Group] | | | | |
| | | AAM14592 | 20162452 | phosphate transporter [Oryza sativa Indica Group] | 0.799639 | Oryza | 2270 | 2430 |
| | | | | | | sativa | | |
| | | | | | | Indica | | |
| | | | | | | Group | | |
| | 38-55 | ACL54346 | 219887942 | unknown [Zea mays] | 1 | Zea mays | 2271 | 2431 |
| | | NP_001144869 | 226528390 | hypothetical protein LOC100277964 [Zea mays] | 1 | Zea mays | 2272 | 2432 |
| | | | | &gt:gi\|195648236\|gb\|ACG43586.1\| hypothetical | | | | |
| | | | | protein [Zea mays] | | | | |
| | | XP_002464507 | 242034224 | hypothetical protein SORBIDRAFT_01g019820 | 0.820738 | Sorghum | 2273 | 2433 |
| | | | | [Sorghum bicolor] &gt:gi\|241918361\|gb\|EER91505.1\| | | bicolor | | |
| | | | | hypothetical protein SORBIDRAFT_01g019820 | | | | |
| | | | | [Sorghum bicolor] | | | | |
| | 241-258 | XP_002446139 | 242072405 | hypothetical protein SORBIDRAFT_06g002240 | 1 | Sorghum | 2274 | 2434 |
| | | | | [Sorghum bicolor] &gt:gi\|241937322\|gb\|EES10467.1\| | | bicolor | | |
| | | | | hypothetical protein SORBIDRAFT_06g002240 | | | | |
| | | | | [Sorghum bicolor] | | | | |
| | | ACN34366 | 224030580 | unknown [Zea mays] | 0.936508 | Zea mays | 2275 | 2435 |
| | | NP_001147785 | 226500959 | amino acid permease [Zea mays] | 0.924162 | Zea mays | 2276 | 2436 |
| | | | | &gt:gi\|195613758\|gb\|ACG28709.1\| amino acid | | | | |
| | | | | permease [Zea mays] | | | | |
| | | XP_002453115 | 242063651 | hypothetical protein SORBIDRAFT_04g000290 | 0.742504 | Sorghum | 2277 | 2437 |
| | | | | [Sorghum bicolor] &gt:gi\|241932946\|gb\|EES06091.1\| | | bicolor | | |
| | | | | hypothetical protein SORBIDRAFT_04g000290 | | | | |
| | | | | [Sorghum bicolor] | | | | |
| | | XP_002438439 | 242095897 | hypothetical protein SORBIDRAFT_10g019640 | 0.724868 | Sorghum | 2278 | 2438 |
| | | | | [Sorghum bicolor] &gt:gi\|241916662\|gb\|EER89806.1\| | | bicolor | | |
| | | | | hypothetical protein SORBIDRAFT_10g019640 | | | | |
| | | | | [Sorghum bicolor] | | | | |
| | | NP_001045585 | 115443610 | Os02g0101000 [Oryza sativa Japonica Group] | 0.705467 | Oryza | 2279 | 2439 |
| | | | | &gt:gi\|41053220\|dbj\|BAD08181.1\| putative amino acid | | sativa | | |
| | | | | transport protein [Oryza sativa Japonica Group] | | Japonica | | |
| | | | | | | Group | | |
| | | | | &gt:gi\|113535116\|dbj\|BAF07499.1\| Os02g0101000 | | | | |
| | | | | [Oryza sativa Japonica Group] | | | | |
| | | | | &gt:gi\|215704334\|dbj\|BAG93768.1\| unnamed protein | | | | |
| | | | | product [Oryza sativa Japonica Group] | | | | |
| | | | | &gt:gi\|218189857\|gb\|EEC72284.1\| hypothetical | | | | |
| | | | | protein OsI_05452 [Oryza sativa Indica Group] | | | | |
| | | | | &gt:gi\|222621988\|gb\|EEE56120.1\| hypothetical protein | | | | |
| | | | | OsJ_04987 [Oryza sativa Japonica Group] | | | | |
| | | NP_001136459 | 219362430 | hypothetical protein LOC100216569 [Zea mays] | 0.717813 | Zea mays | 2280 | 2440 |
| | | | | &gt:gi\|94695786\|gb\|ACF81977.1\| unknown | | | | |
| | | | | [Zea mays] | | | | |
| | 110-127 | ACG28457 | 195613253 | chlorophyll a-b binding protein 8 [Zea mays] | 1 | Zea mays | 2281 | 2441 |
| | | | | &gt:gi\|238013956\|gb\|ACR38013.1\| unknown | | | | |
| | | | | [Zea mays] | | | | |
| | | ABJ99590 | 116519120 | type III chlorophyll a/b-binding protein [Lycoris aurea] | 0.861423 | Lycoris | 2282 | 2442 |
| | | | | | | aurea | | |
| | | ABJ99591 | 116519124 | type III chlorophyll a/b-binding protein [Lycoris aurea] | 0.853933 | Lycoris | 2283 | 2443 |
| | | | | | | aurea | | |
| | | 1609235A | | chlorophyll a/b binding protein | 0.835206 | Solanum | 2284 | |
| | | | | | | lycopersicum | | |
| | | P27522 | | RecName: Full = Chlorophyll a-b binding protein 8, | 0.835206 | Solanum | 2285 | |
| | | | | chloroplastic; AltName: Full = LHCI type III CAB-8; | | lycopersicum | | |
| | | | | Flags: Precursor &gt:gi\|19182\|emb\|CAA33330.1\| Type | | | | |
| | | | | III chlorophyll a/b-binding protein [Solanum lycopersicum] | | | | |
| | | XP_002273201 | 225436256 | PREDICTED: hypothetical protein [Vitis vinifera] | 0.816479 | Vitis | 2286 | 2444 |
| | | | | | | vinifera | | |
| | | BAD25284 | 49388136 | putative chlorophyll a/b-binding protein type III | 0.827715 | Oryza | 2287 | 2445 |
| | | | | precursor [Oryza sativa Japonica Group] | | sativa | | |
| | | | | &gt:gi\|49388341\|dbj\|BAD25451.1\| putative | | Japonica | | |
| | | | | chlorophyll a/b-binding protein type III precursor | | Group | | |
| | | | | [Oryza sativa Japonica Group] | | | | |
| | | | | &gt:gi\|125538483\|gb\|EAY84878.1\| hypothetical | | | | |
| | | | | protein OsI_06243 [Oryza sativa Indica Group] | | | | |
| | | | | &gt:gi\|125581168\|gb\|EAZ22099.1\| hypothetical | | | | |
| | | | | protein OsJ_05758 [Oryza sativa Japonica Group] | | | | |
| | | | | &gt:gi\|215678980\|dbj\|BAG96410.1\| unnamed protein | | | | |
| | | | | product [Oryza sativa Japonica Group] | | | | |
| | | | | &gt:gi\|215679371\|dbj\|BAG96511.1\| unnamed protein | | | | |
| | | | | product [Oryza sativa Japonica Group] | | | | |
| | | | | &gt:gi\|215686386\|dbj\|BAG87647.1\| unnamed protein | | | | |
| | | | | product [Oryza sativa Japonica Group] | | | | |
| | | | | &gt:gi\|215737482\|dbj\|BAG96612.1\| unnamed protein | | | | |
| | | | | product [Oryza sativa Japonica Group] | | | | |
| | | | | &gt:gi\|215737505\|dbj\|BAG96635.1\| unnamed protein | | | | |
| | | | | product [Oryza sativa Japonica Group] | | | | |
| | | | | &gt:gi\|215737512\|dbj\|BAG96642.1\| unnamed protein | | | | |
| | | | | product [Oryza sativa Japonica Group] | | | | |
| | | | | &gt:gi\|215737560\|dbj\|BAG96690.1\| unnamed protein | | | | |
| | | | | product [Oryza sativa Japonica Group] | | | | |
| | | | | &gt:gi\|215737570\|dbj\|BAG96700.1\| unnamed protein | | | | |
| | | | | product [Oryza sativa Japonica Group] | | | | |
| | | | | &gt:gi\|215737580\|dbj\|BAG96710.1\| unnamed protein | | | | |
| | | | | product [Oryza sativa Japonica Group] | | | | |
| | | | | &gt:gi\|215737621\|dbj\|BAG96751.1\| unnamed protein | | | | |
| | | | | product [Oryza sativa Japonica Group] | | | | |
| | | | | &gt:gi\|215737634\|dbj\|BAG96764.1\| unnamed protein | | | | |
| | | | | product [Oryza sativa Japonica Group] | | | | |
| | | | | &gt:gi\|215737653\|dbj\|BAG96783.1\| unnamed protein | | | | |
| | | | | product [Oryza sativa Japonica Group] | | | | |
| | | | | &gt:gi\|215737729\|dbj\|BAG96859.1\| unnamed protein | | | | |
| | | | | product [Oryza sativa Japonica Group] | | | | |
| | | | | &gt:gi\|215737785\|dbj\|BAG96915.1\| unnamed protein | | | | |
| | | | | product [Oryza sativa Japonica Group] | | | | |
| | | | | &gt:gi\|215765646\|dbj\|BAG87343.1\| unnamed protein | | | | |
| | | | | product [Oryza sativa Japonica Group] | | | | |
| | | | | &gt:gi\|215767462\|dbj\|BAG99690.1\| unnamed protein | | | | |
| | | | | product [Oryza sativa Japonica Group] | | | | |
| | | XP_002888084 | 297840404 | hypothetical protein ARALYDRAFT_475174 | 0.805243 | Arabidopsis | 2288 | 2446 |
| | | | | [Arabidopsis lyrata subsp. lyrata] | | lyrata | | |
| | | | | &gt:gi\|297333925\|gb\|EFH64343.1\| hypothetical | | subsp. | | |
| | | | | protein ARALYDRAFT_475174 [Arabidopsis lyrata | | lyrata | | |
| | | | | subsp. lyrata] | | | | |
| | | NP_176347 | 30696581 | light-harvesting complex I chlorophyll a/b binding | 0.801498 | Arabidopsis | 2289 | 2447 |
| | | | | protein 3 [Arabidopsis thaliana] | | thaliana | | |
| | | | | &gt:gi\|334183551\|ref\|NP_001185280.1\| light- | | | | |
| | | | | harvesting complex I chlorophyll a/b binding protein 3 | | | | |
| | | | | [Arabidopsis thaliana] | | | | |
| | | | | &gt:gi\|4585882\|gb\|AAD25555.1\|AC005850_12PSI | | | | |
| | | | | type III chlorophyll a/b-binding protein [Arabidopsis thaliana] | | | | |
| | | | | &gt:gi\|16649019\|gb\|AAL24361.1\| PSI type | | | | |
| | | | | III chlorophyll a/b-binding protein [Arabidopsis thaliana] | | | | |
| | | | | &gt:gi\|20260044\|gb\|AAM13369.1\| PSI type | | | | |
| | | | | III chlorophyll a/b-binding protein [Arabidopsis thaliana] | | | | |
| | | | | &gt:gi\|332195725\|gb\|AEE33846.1\| light- | | | | |
| | | | | harvesting complex I chlorophyll a/b binding protein 3 | | | | |
| | | | | [Arabidopsis thaliana] | | | | |
| | | | | &gt:gi\|332195727\|gb\|AEE33848.1\| light-harvesting | | | | |
| | | | | complex I chlorophyll a/b binding protein 3 | | | | |
| | | | | [Arabidopsis thaliana] | | | | |
| | | XP_002321218 | 224131949 | light-harvesting complex I protein Lhca3 [Populus | 0.805243 | Populus | 2290 | 2448 |
| | | | | trichocarpa] &gt:gi\|118485656\|gb\|ABK94678.1\| | | trichocarpa | | |
| | | | | unknown [Populus trichocarpa] | | | | |
| | | | | &gt:gi\|222861991\|gb\|EEE99533.1\| light-harvesting | | | | |
| | | | | complex I protein Lhca3 [Populus trichocarpa] | | | | |
| | 211-228 | NP_001145838 | 226500499 | hypothetical protein LOC100279347 [Zea mays] | 1 | Zea mays | 2291 | 2449 |
| | | | | &gt:gi\|219884649\|gb\|ACL52699.1\| unknown | | | | |
| | | | | [Zea mays] | | | | |
| | 437-454 | NP_001060945 | 115474696 | Os08g0135900 [Oryza sativa Japonica Group] | 1 | Oryza | 2292 | 2450 |
| | | | | &gt:gi\|38636821\|dbj\|BAD03061.1\| putative tryptophan | | sativa | | |
| | | | | synthase beta-subunit [Oryza sativa Japonica Group] | | Japonica | | |
| | | | | &gt:gi\|46390803\|dbj\|BAD16309.1\| putative tryptophan | | Group | | |
| | | | | synthase beta-subunit [Oryza sativa Japonica Group] | | | | |
| | | | | &gt:gi\|113622914\|dbj\|BAF22859.1\| Os08g0135900 | | | | |
| | | | | [Oryza sativa Japonica Group] | | | | |
| | | | | &gt:gi\|125602115\|gb\|EAZ41440.1\| hypothetical | | | | |
| | | | | protein OsJ_25962 [Oryza sativa Japonica Group] | | | | |
| | | | | &gt:gi\|215704181\|dbj\|BAG93021.1\| unnamed protein | | | | |
| | | | | product [Oryza sativa Japonica Group] | | | | |
| | | O50046 | | RecName: Full = Tryptophan synthase beta chain 2, | 0.753715 | Camptotheca | 2293 | |
| | | | | chloroplastic; Flags: Precursor | | acuminata | | |
| | | | | &gt:gi\|2792520\|gb\|AAB97087.1\| tryptophan synthase | | | | |
| | | | | beta subunit [Camptotheca acuminata ] | | | | |
| | | | | &gt:gi\|2801771\|gb\|AAB97526.1\| tryptophan synthase | | | | |
| | | | | beta [Camptotheca acuminata] | | | | |
| | | NP_194437 | 186514016 | tryptophan synthase beta chain [Arabidopsis thaliana] | 0.745223 | Arabidopsis | 2294 | 2451 |
| | | | | &gt:gi\|1174779\|sp\|P25269.2\|TRBP2_ARATH | | thaliana | | |
| | | | | RecName: Full = Tryptophan synthase beta chain 2, | | | | |
| | | | | chloroplastic; Flags: Precursor | | | | |
| | | | | &gt:gi\|166894\|gb\|AAA32879.1\| tryptophan synthase | | | | |
| | | | | beta-subunit [Arabidopsis thaliana] | | | | |
| | | | | &gt:gi\|4490703\|emb\|CAB38837.1\| tryptophan synthase | | | | |
| | | | | beta-subunit (TSB2) [Arabidopsis thaliana] | | | | |
| | | | | &gt:gi\|7269560\|emb\|CAB79562.1\| tryptophan synthase | | | | |
| | | | | beta-subunit (TSB2) [Arabidopsis thaliana] | | | | |
| | | | | &gt:gi\|21536585\|gb\|AAM60917.1\| tryptophan synthase | | | | |
| | | | | beta-subunit TSB2 [Arabidopsis thaliana] | | | | |
| | | | | &gt:gi\|27808592\|gb\|AAO24576.1\| At4g27070 | | | | |
| | | | | [Arabidopsis thaliana] | | | | |
| | | | | &gt:gi\|110736231\|dbj\|BAF00086.1\| tryptophan | | | | |
| | | | | synthase beta-subunit [Arabidopsis thaliana] | | | | |
| | | | | &gt:gi\|332659896\|gb\|AEE85296.1\| tryptophan | | | | |
| | | | | synthase beta chain [Arabidopsis thaliana] | | | | |
| | 671-688 | XP_002459719 | 242043695 | hypothetical protein SORBIDRAFT_02g009320 | 1 | Sorghum | 2295 | 2452 |
| | | | | [Sorghum bicolor] &gt:gi\|241923096\|gb\|EER96240.1\| | | bicolor | | |
| | | | | hypothetical protein SORBIDRAFT_02g009320 | | | | |
| | | | | [Sorghum bicolor] | | | | |
| | | NP_001148038 | 226505789 | PVR3-like protein [Zea mays] | 0.788462 | Zea mays | 2296 | 2453 |
| | | | | &gt:gi\|195615460\|gb\|ACG29560.1\| PVR3-like protein | | | | |
| | | | | [Zea mays] | | | | |
| | 237-254 | ACN28677 | 223949186 | unknown [Zea mays] | 1 | Zea mays | 2297 | 2454 |
| | | CAE00460 | 66346994 | branched-chain amino acid aminotransferase | 0.761787 | Hordeum | 2298 | 2455 |
| | | | | [Hordeum vulgare subsp. vulgare] | | vulgare | | |
| | | | | | | subsp. | | |
| | | | | | | vulgare | | |
| | | NP_001049461 | 297600593 | Os03g0231600 [Oryza sativa Japonica Group] | 0.771712 | Oryza | 2299 | 2456 |
| | | | | &gt:gi\|27311239\|gb\|AAO00685.1\| Unknown protein | | sativa | | |
| | | | | [Oryza sativa Japonica Group] | | Japonica | | |
| | | | | &gt:gi\|27356673\|gb\|AAO06962.1\| Putative branched- | | Group | | |
| | | | | chain amino acid aminotransferase [Oryza sativa | | | | |
| | | | | Japonica Group] &gt:gi\|108706990\|gb\|ABF94785.1\| | | | | |
| | | | | Branched-chain-amino-acid aminotransferase 5, | | | | |
| | | | | chloroplast precursor, putative, expressed [Oryza sativa | | | | |
| | | | | Japonica Group] &gt:gi\|113547932\|dbj\|BAF11375.1\| | | | | |
| | | | | Os03g0231600 [Oryza sativa Japonica Group] | | | | |
| | | | | &gt:gi\|125542999\|gb\|EAY89138.1\| hypothetical | | | | |
| | | | | protein OsI_10629 [Oryza sativa Indica Group] | | | | |
| | | | | &gt:gi\|215740973\|dbj\|BAG97468.1\| unnamed protein | | | | |
| | | | | product [Oryza sativa Japonica Group] | | | | |
| | | | | &gt:gi\|215767850\|db;\|BAH00079.1\| unnamed protein | | | | |
| | | | | product [Oryza sativa Japonica Group] | | | | |
| | | ABF94786 | 108705663 | Branched-chain-amino-acid aminotransferase 5, | 0.771712 | Oryza | 2300 | |
| | | | | chloroplast precursor, putative, expressed [Oryza sativa | | sativa | | |
| | | | | Japonica Group] | | Japonica | | |
| | | | | | | Group | | |
| | | EEE58645 | 54398660 | hypothetical protein OsJ_10024 [Oryza sativa Japonica | 0.74938 | Oryza | 2301 | |
| | | | | Group] | | sativa | | |
| | | | | | | Japonica | | |
| | | | | | | Group | | |
| | 237-254 | NP_001147646 | 226510491 | branched-chain-amino-acid aminotransferase [Zea | 1 | Zea mays | 2302 | 2457 |
| | | | | mays] &gt:gi\|195612830\|gb\|ACG28245.1\| branched- | | | | |
| | | | | chain-amino-acid aminotransferase [Zea mays] | | | | |
| | | ABF94786 | 108705663 | Branched-chain-amino-acid aminotransferase 5, | 0.754854 | Oryza | 2303 | |
| | | | | chloroplast precursor, putative, expressed [Oryza sativa | | sativa | | |
| | | | | Japonica Group] | | Japonica | | |
| | | | | | | Group | | |
| | 130-147 | XP_002467798 | 242040806 | hypothetical protein SORBIDRAFT_01g034300 | 1 | Sorghum | 2304 | 2458 |
| | | | | [Sorghum bicolor] &gt:gi\|241921652\|gb\|EER94796.1\| | | bicolor | | |
| | | | | hypothetical protein SORBIDRAFT_01g034300 | | | | |
| | | | | [Sorghum bicolor] | | | | |
| | | ACG35330 | 195626999 | cytochrome P450 CYP709H1 [Zea mays] | 0.897004 | Zea mays | 2305 | 2459 |
| | | BAJ94885 | 326498044 | predicted protein [Hordeum vulgare subsp. vulgare] | 0.807116 | Hordeum | 2306 | 2460 |
| | | | | | | vulgare | | |
| | | | | | | subsp. | | |
| | | | | | | vulgare | | |
| | 26-Sep | NP_001150615 | 226531913 | photoperiod responsive protein [Zea mays] | 1 | Zea mays | 2307 | 2461 |
| | | | | &gt:gi\|195640592\|gb\|ACG39764.1\| photoperiod | | | | |
| | | | | responsive protein [Zea mays] | | | | |
| | | BAK02161 | 326497152 | predicted protein [Hordeum vulgare subsp. vulgare] | 0.79955 | Hordeum | 2308 | 2462 |
| | | | | | | vulgare | | |
| | | | | | | subsp. | | |
| | | | | | | vulgare | | |
| | | XP_002446455 | 242073037 | hypothetical protein SORBIDRAFT_06g016300 | 0.837838 | Sorghum | 2309 | 2463 |
| | | | | [Sorghum bicolor] &gt:gi\|241937638\|gb\|EES10783.1\| | | bicolor | | |
| | | | | hypothetical protein SORBIDRAFT_06g016300 | | | | |
| | | | | [Sorghum bicolor] | | | | |
| | | NP_001052772 | 115458343 | Os04g0418500 [Oryza sativa Japonica Group] | 0.759009 | Oryza | 2310 | 2464 |
| | | | | &gt:gi\|38605834\|emb\|CAE02914.3\| | | sativa | | |
| | | | | OSJNBb0108J11.6 [Oryza sativa Japonica Group] | | Japonica | | |
| | | | | &gt:gi\|113564343\|dbj\|BAF14686.1\| Os04g0418500 | | Group | | |
| | | | | [Oryza sativa Japonica Group] | | | | |
| | | NP_001047062 | 115446564 | Os02g0540700 [Oryza sativa Japonica Group] | 0.70045 | Oryza | 2311 | 2465 |
| | | | | &gt:gi\|50251283\|dbj\|BAD28063.1\| putative | | sativa | | |
| | | | | photoperiod responsive protein [Oryza sativa Japonica | | Japonica | | |
| | | | | Group] &gt:gi\|113536593\|dbj\|BAF08976.1\| | | Group | | |
| | | | | Os02g0540700 [Oryza sativa Japonica Group] | | | | |
| | | EAY86195 | 54362548 | hypothetical protein OsI_07571 [Oryza sativa Indica | 0.70045 | Oryza | 2312 | |
| | | | | Group] | | sativa | | |
| | | | | | | Indica | | |
| | | | | | | Group | | |
| Predicted | 553-570 | NP_001105321 | 162460315 | homologue of Arabidopsis gene AGAMOUS [Zea mays] | 1 | Zea mays | 2313 | 2466 |
| siRNA | | | | &gt:gi\|309574\|gb\|AAA02933.1\| homologue of | | | | |
| 59453 | | | | Arabidopsis gene AGAMOUS [Zea mays] | | | | |
| | 1821-1838 | NP_001130613 | 212274880 | hypothetical protein LOC100191712 [Zea mays] | 1 | Zea mays | 2314 | 2467 |
| | | | | &gt:gi\|194689638\|gb\|ACF78903.1\| unknown | | | | |
| | | | | [Zea mays] | | | | |
| | | XP_002437583 | 242094185 | hypothetical protein SORBIDRAFT_10g029780 | 0.935018 | Sorghum | 2315 | 2468 |
| | | | | [Sorghum bicolor] &gt:gi\|241915806\|gb\|EER88950.1\| | | bicolor | | |
| | | | | hypothetical protein SORBIDRAFT_10g029780 | | | | |
| | | | | [Sorghum bicolor] | | | | |
| | | BAJ87739 | 326511450 | predicted protein [Hordeum vulgare subsp. vulgare] | 0.797834 | Hordeum | 2316 | 2469 |
| | | | | | | vulgare | | |
| | | | | | | subsp. | | |
| | | | | | | vulgare | | |
| | | NP_001058556 | 115469913 | Os06g0712300 [Oryza sativa Japonica Group] | 0.790614 | Oryza | 2317 | 2470 |
| | | | | &gt:gi\|53792883\|dbj\|BAD54060.1\| putative JD1 | | sativa | | |
| | | | | [Oryza sariva Japonica Group] | | Japonica | | |
| | | | | &gt:gi\|113596596\|dbj\|BAF20470.1\| Os06g0712300 | | Group | | |
| | | | | [Oryza sativa Japonica Group] | | | | |
| | | EEC81300 | 54362548 | hypothetical protein OsI_24436 [Oryza sativa Indica | 0.787004 | Oryza | 2318 | |
| | | | | Group] | | sativa | | |
| | | | | | | Indica | | |
| | | | | | | Group | | |
| | | EEE66342 | 54398660 | hypothetical protein OsJ_22632 [Oryza sativa Japonica | 0.725632 | Oryza | 2319 | |
| | | | | Group] | | sativa | | |
| | | | | | | Japonica | | |
| | | | | | | Group | | |
| | 1068-1085 | NP_001159145 | 259490077 | hypothetical protein LOC100304227 [Zea mays] | 1 | Zea mays | 2320 | 2471 |
| | | | | &gt:gi\|223942267\|gb\|ACN25217.1\| unknown | | | | |
| | | | | [Zea mays] | | | | |
| | 65-82 | ACN25589 | 223943010 | unknown [Zea mays] | 1 | Zea mays | 2321 | 2472 |
| | | NP_001149752 | 226531311 | receptor-like protein kinase RK20-1 [Zea mays] | 1 | Zea mays | 2322 | 2473 |
| | | | | &gt:gi\|195631560\|gb\|ACG36675.1\| receplor-like | | | | |
| | | | | protein kinase RK20-1 [Zea mays] | | | | |
| | | NP_001140883 | 226532087 | hypothetical protein LOC100272959 [Zea mays] | 1 | Zea mays | 2323 | 2474 |
| | | | | &gt:gi\|194701580\|gb\|ACF84874.1\| unknown | | | | |
| | | | | [Zea mays] | | | | |
| | | XP_002462965 | 242050441 | hypothetical protein SORBIDRAFT_02g035450 | 0.738617 | Sorghum | 2324 | 2475 |
| | | | | [Sorghum bicolor] &gt:gi\|241926342\|gb\|EER99486.1\| | | bicolor | | |
| | | | | hypothetical protein SORBIDRAFT_02g035450 | | | | |
| | | | | [Sorghum bicolor] | | | | |
| | | XP_002462964 | 242050439 | hypothetical protein SORBIDRAFT_02g035440 | 0.74199 | Sorghum | 2325 | 2476 |
| | | | | [Sorghum bicolor] &gt:gi\|241926341\|gb\|EER99485.1\| | | bicolor | | |
| | | | | hypothetical protein SORBIDRAFT_02g035440 | | | | |
| | | | | [Sorghum bicolor] | | | | |
| | | BAJ96500 | 326517015 | predicted protein [Hordeum vulgare subsp. vulgare] | 0.706577 | Hordeum | 2326 | 2477 |
| | | | | | | vulgare | | |
| | | | | | | subsp. | | |
| | | | | | | vulgare | | |
| Predicted | 787-808 | EEC67667 | 54362548 | hypothetical protein OsI_35091 [Oryza sativa Indica | 1 | Oryza | 2327 | |
| zma | | | | Group] | | sativa | | |
| mir | | | | | | Indica | | |
| 47990 | | | | | | Group | | |
| | | NP_001065737 | 115484150 | Os11g0146700 [Oryza sativa Japonica Group] | 0.98741 | Oryza | 2328 | 2478 |
| | | | | &gt:gi\|108863991\|gb\|ABA91466.2\| expressed protein | | sativa | | |
| | | | | [Oryza sativa Japonica Group] | | Japonica | | |
| | | | | &gt:gi\|113644441\|dbj\|BAF27582.1\| Os11g0146700 | | Group | | |
| | | | | [Oryza sativa Japonica Group] | | | | |
| | | | | &gt:gi\|215704119\|dbj\|BAG92959.1\| unnamed protein | | | | |
| | | | | product [Oryza sativa Japonica Group] | | | | |
| | | | | &gt:gi\|222615514\|gb\|EEE51646.1\| hypothetical protein | | | | |
| | | | | OsJ_32953 [Oryza sativa Japonica Group] | | | | |
| | | XP_002441707 | 242082563 | hypothetical protein SORBIDRAFT_08g001030 | 0.839928 | Sorghum | 2329 | 2479 |
| | | | | [Sorghum bicolor] &gt:gi\|241942400\|gb\|EES15545.1\| | | bicolor | | |
| | | | | hypothetical protein SORBIDRAFT_08g001030 | | | | |
| | | | | [Sorghum bicolor] | | | | |
| | | EAY82236 | 54362548 | hypothetical protein OsI_37441 [Oryza sativa Indica | 0.890288 | Oryza | 2330 | |
| | | | | Group] | | sativa | | |
| | | | | | | Indica | | |
| | | | | | | Group | | |
| | | NP_001105988 | 162458579 | putative splicing factor [Zea mays] | 0.841727 | Zea mays | 2331 | 2480 |
| | | | | &gt:gi\|134035227\|gb\|ABO47657.1\| putative splicing | | | | |
| | | | | factor [Zea mays] &gt:gi\|134035229\|gb\|ABO47658.1\| | | | | |
| | | | | putative splicing factor [Zea mays] | | | | |
| | | ACG42564 | 195646191 | hypothetical protein [Zea mays] | 0.838129 | Zea mays | 2332 | 2481 |
| | | NP_001066137 | 297612660 | Os12g0143400 [Oryza sativa Japonica Group] | 0.877698 | Oryza | 2333 | 2482 |
| | | | | &gt:gi\|77553658\|gb\|ABA96454.1\| expressed protein | | sativa | | |
| | | | | [Oryza sativa Japonica Group] | | Japonica | | |
| | | | | &gt:gi\|125578472\|gb\|EAZ19618.1\| hypothetical | | Group | | |
| | | | | protein OsJ_35195 [Oryza sativa Japonica Group] | | | | |
| | | | | &gt:gi\|255670045\|dbj\|BAF29156.2\| Os12g0143400 | | | | |
| | | | | [Oryza sativa Japonica Group] | | | | |
| | | BAJ86249 | 326503485 | predicted protein [Hordeum vulgare subsp. vulgare] | 0.827338 | Hordeum | 2334 | 2483 |
| | | | | | | vulgare | | |
| | | | | | | subsp. | | |
| | | | | | | vulgare | | |
| | | XP_002274576 | 225444598 | PREDICTED: hypothetical protein isoform 1 [Vitis | 0.733813 | Vitis | 2335 | 2484 |
| | | | | vinifera] &gt:gi\|297738505\|emb\|CBI27750.3\| unnamed | | vinifera | | |
| | | | | protein product [Vitis vinifera] | | | | |
| Predicted | 222-242 | XP_002456622 | 242054952 | hypothetical protein SORBIDRAFT_03g039570 | 1 | Sorghum | 2336 | 2485 |
| zma | | | | [Sorghum bicolor] &gt:gi\|241928597\|gb\|EES01742.1\| | | bicolor | | |
| mir | | | | hypothetical protein SORBIDRAFT_03g039570 | | | | |
| 48459 | | | | [Sorghum bicolor] | | | | |
| | | ACG47007 | 195655078 | L-ascorbate oxidase precursor [Zea mays] | 0.939551 | Zea mays | 2337 | 2486 |
| | | NP_001105921 | 162463583 | putative laccase [Zea mays] | 0.915371 | Zea mays | 2338 | 2487 |
| | | | | &gt:gi\|84618783\|emb\|CAJ30497.1\| putative laccase | | | | |
| | | | | [Zea mays] | | | | |
| | | NP_001105874 | 162461267 | putative laccase [Zea mays] | 0.721934 | Zea mays | 2339 | 2488 |
| | | | | &gt:gi\|84618777\|emb\|CAJ30498.1\| putative laccase | | | | |
| | | | | [Zea mays] | | | | |
| | | Q0DHL5 | | RecName: Full = Putative laccase-11; AltName: | 0.715026 | Oryza | 2340 | |
| | | | | Full = Benzenediol: oxygen oxidoreductase 11; | | sativa | | |
| | | | | AltName: Full = Diphenol oxidase 11; AltName: | | Japonica | | |
| | | | | Full = Urishiol oxidase 11 | | Group | | |
| | | | | &gt:gi\|222631843\|gb\|EEE63975.1\| hypothetical protein | | | | |
| | | | | OsJ_18801 [Oryza sativa Japonica Group] | | | | |
| | | XP_002441216 | 242090766 | hypothetical protein SORBIDRAFT_09g022460 | 0.71848 | Sorghum | 2341 | 2489 |
| | | | | [Sorghum bicolor] | | bicolor | | |
| | | | | &gt:gi\|241946501\|gb\|EES19646.1\| | | | | |
| | | | | hypothetical protein SORBIDRAFT_09g022460 | | | | |
| | | | | [Sorghum bicolor] | | | | |
| Predicted | 493-513 | NP_001151803 | 226532099 | tubulin--tyrosine ligase-like protein 12 [Zea mays] | 1 | Zea mays | 2342 | 2490 |
| zma | | | | &gt:gi\|195649775\|gb\|ACG44355.1\| tubulin--tyrosine | | | | |
| mir | | | | ligase-like protein 12 [Zea mays] | | | | |
| 48824 | | | | | | | | |
| | | NP_001049155 | 115451108 | Os03g0179000 [Oryza sativa Japonica Group] | 0.833716 | Oryza | 2343 | 2491 |
| | | | | &gt:gi\|108706494\|gb\|ABF94289.1\| Tubulin-tyrosine | | sativa | | |
| | | | | ligase family protein, expressed [Oryza sativa Japonica | | Japonica | | |
| | | | | Group] &gt:gi\|113547626\|dbj\|BAF11069.1\| | | Group | | |
| | | | | Os03g0179000 | | | | |
| | | | | [Oryza sativa Japonica Group] | | | | |
| | | EEE58434 | 54398660 | hypothetical protein OsJ_09642 [Oryza sativa Japonica | 0.833716 | Oryza | 2344 | |
| | | | | Group] | | sativa | | |
| | | | | | | Japonica | | |
| | | | | | | Group | | |
| | | ACN32043 | 223975710 | unknown [Zea mays] | 0.821101 | Zea mays | 2345 | 2492 |
| | | BAJ96002 | 326512041 | predicted protein [Hordeum vulgare subsp. vulgare] | 0.811927 | Hordeum | 2346 | 2493 |
| | | | | | | vulgare | | |
| | | | | | | subsp. | | |
| | | | | | | vulgare | | |
| | | EEC74627 | 54362548 | hypothetical protein OsI_10249 [Oryza sativa Indica | 0.794725 | Oryza | 2347 | |
| | | | | Group] | | sativa | | |
| | | | | | | Indica | | |
| | | | | | | Group | | |
| | | AAO13468 | 26665711 | Hypothetical protein [Oryza sativa Japonica Group] | 0.787844 | Oryza | 2348 | |
| | | | | | | sativa | | |
| | | | | | | Japonica | | |
| | | | | | | Group | | |
| | | ABF94288 | 108705663 | Tubulin-tyrosine ligase family protein, expressed | 0.744266 | Oryza | 2349 | |
| | | | | [Oryza sativa Japonica Group] | | sativa | | |
| | | | | | | Japonica | | |
| | | | | | | Group | | |
| Predicted | 639-659 | XP_002436323 | 242091665 | hypothetical protein SORBIDRAFT_10g000450 | 1 | Sorghum | 2350 | 2494 |
| zma | | | | [Sorghum bicolor] &gt:gi\|241914546\|gb\|EER87690.1\| | | bicolor | | |
| mir | | | | hypothetical protein SORBIDRAFT_10g000450 | | | | |
| 49862 | | | | [Sorghum bicolor] | | | | |
| | | NP_001056548 | 115465897 | Os06g0104100 [Oryza sativa Japonica Group] | 0.847682 | Oryza | 2351 | 2495 |
| | | | | &gt:gi\|24413977\|dbj\|BAC22228.1\| unknown protein | | sativa | | |
| | | | | [Oryza sativa Japonica Group] | | Japonica | | |
| | | | | &gt:gi\|113594588\|dbj\|BAF18462.1\| Os06g0104100 | | Group | | |
| | | | | [Oryza sativa Japonica Group] | | | | |
| | | | | &gt:gi\|215766729\|dbj\|BAG98957.1\| unnamed protein | | | | |
| | | | | product [Oryza sativa Japonica Group] | | | | |
| | | | | &gt:gi\|218197401\|gb\|EEC79828.1\| hypothetical | | | | |
| | | | | protein OsI_21284 [Oryza sativa Indica Group] | | | | |
| | | | | &gt:gi\|222634813\|gb\|EEE64945.1\| hypothetical protein | | | | |
| | | | | OsJ_19819 [Oryza sativa Japonica Group] | | | | |
| | | BAK06666 | 326504749 | predicted protein [Hordeum vulgare subsp. vulgare] | 0.847682 | Hordeum | 2352 | 2496 |
| | | | | | | vulgare | | |
| | | | | | | subsp. | | |
| | | | | | | vulgare | | |
| | | NP_001151045 | 226532945 | phytoene synthase [Zea mays] | 0.86755 | Zea mays | 2353 | 2497 |
| | | | | &gt:gi\|195643862\|gb\|ACG41399.1\| phytoene synthase | | | | |
| | | | | [Zea mays] | | | | |
| | | ACF84120 | 194700071 | unknown [Zea mays] | 0.768212 | Zea mays | 2354 | 2498 |
| | | | | &gt:gi\|224028481\|gb\|ACN33316.1\| unknown [Zea | | | | |
| | | | | mays] &gt:gi\|224033023\|gb\|ACN35587.1\| unknown | | | | |
| | | | | [Zea mays] | | | | |
| | | NP_001132196 | 212722785 | hypothetical protein LOC100193624 [Zea mays] | 0.768212 | Zea mays | 2355 | 2499 |
| | | | | &gt:gi\|194692646\|gb\|ACF80407.1\| unknown [Zea mays] | | | | |
| | | | | &gt:gi\|194693728\|gb\|ACF80948.1\| unknown | | | | |
| | | | | [Zea mays] &gt:gi\|224035777\|gb\|ACN36964.1\| | | | | |
| | | | | unknown [Zea mays] | | | | |
| | | | | &gt:gi\|238014538\|gb\|ACR38304.1\| unknown [Zea mays] | | | | |

TABLE 22
Targets of small RNAs listed in Table 5 above

| | Mir | Homolog | Nucleotide | | | | | |
|---|---|---|---|---|---|---|---|---|
| Mir | Binding | NCBI | NCBI | | | | Protein | Nucleotide |
| name | Position | Accession | GI number | Annotation | Identity | Organism | seq id no: | seq id no: |
| Predicted | | XP_848677 | 74013161 | PREDICTED: similar to Retrovirus-related Pol | 1 | Canis familiaris | 2500 | 3970 |
| folded 24- | | | | polyprotein from transposon 297 [Canis familiaris] | | | | |
| nts-long | | | | | | | | |
| seq 51391 | | | | | | | | |
| | | AAL66751 | 18254408 | putative gag-pol precursor [Zea mays] | 0.79257 | Zea mays | 2501 | |
| | | | | &gt:gi\|33113975\|gb\|AAP94597.1\| putative gag-pol | | | | |
| | | | | precursor [Zea mays] | | | | |
| | | AAL75982 | 18568234 | putative prpol [Zea mays] | 0.806811 | Zea mays | 2502 | |
| Predicted | 215-238 | XP_002465068 | 242035346 | hypothetical protein SORBIDRAFT_01g031560 | 1 | Sorghum bicolor | 2503 | 3971 |
| folded 24- | | | | [Sorghum bicolor] | | | | |
| nts-long | | | | &gt:gi\|241918922\|gb\|EER92066.1\| | | | | |
| seq 52606 | | | | hypothetical protein SORBIDRAFT_01g031560 | | | | |
| | | | | [Sorghum bicolor] | | | | |
| | | NP_001147458 | 226528231 | LOC100281067 [Zea mays] | 0.847599 | Zea mays | 2504 | 3972 |
| | | | | &gt:gi\|195611562\|gb\|ACG27611.1\| indole-3-acetate | | | | |
| | | | | beta-glucosyltransferase [Zea mays] | | | | |
| | | BAK04808 | 326529722 | predicted protein | 0.73904 | Hordeum vulgare subsp. vulgare | 2505 | 3973 |
| | | | | [Hordeum vulgare subsp. vulgare] | | | | |
| | 372-395 | NP_001169556 | 293331934 | hypothetical protein LOC100383435 [Zea mays] | 1 | Zea mays | 2506 | 3974 |
| | | | | &gt:gi\|224030083\|gb\|ACN34117.1\| | | | | |
| | | | | unknown [Zea mays] | | | | |
| | | ACN35262 | 224032372 | unknown [Zea mays] | 1 | Zea mays | 2507 | 3975 |
| | | XP_002438139 | 242095297 | hypothetical protein SORBIDRAFT_10g008670 | 0.85906 | Sorghum bicolor | 2508 | 3976 |
| | | | | [Sorghum bicolor] | | | | |
| | | | | &gt:gi\|241916362\|gb\|EER89506.1\| | | | | |
| | | | | hypothetical protein SORBIDRAFT_10g008670 | | | | |
| | | | | [Sorghum bicolor] | | | | |
| | 211-234 | XP_002468043 | 242041296 | hypothetical protein SORBIDRAFT_01g038540 | 1 | Sorghum bicolor | 2509 | 3977 |
| | | | | [Sorghum bicolor] | | | | |
| | | | | &gt:gi\|241921897\|gb\|EER95041.1\| | | | | |
| | | | | hypothetical protein SORBIDRAFT_01g038540 | | | | |
| | | | | [Sorghum bicolor] | | | | |
| | | CAC13988 | 10880264 | phosphoinositide-specific phospholipase C | 0.906621 | Digitaria sanguinalis | 2510 | 3978 |
| | | | | [Digitaria sanguinalis] | | | | |
| | | ACF87551 | 194706933 | unknown [Zea mays] | 0.879457 | Zea mays | 2511 | 3979 |
| | | EEE58849 | 54398660 | hypothetical protein OsJ_10440 | 0.842105 | Oryza sativa Japonica Group | 2512 | |
| | | | | [Oryza sativa Japonica Group] | | | | |
| | | EEC75018 | 54362548 | hypothetical protein OsI_11098 | 0.83871 | Oryza sativa Indica Group | 2513 | |
| | | | | [Oryza sativa Indica Group] | | | | |
| | | NP_001049792 | 297600758 | Os03g0289300 [Oryza sativa Japonica Group] | 0.842105 | Oryza sativa Japonica Group | 2514 | 3980 |
| | | | | &gt:gi\|255674423\|dbj\|BAF11706.2\| Os03g0289300 | | | | |
| | | | | [Oryza sativa Japonica Group] | | | | |
| | | NP_001130371 | 212275184 | hypothetical protein LOC100191466 [Zea mays] | 0.726655 | Zea mays | 2515 | 3981 |
| | | | | &gt:gi\|194688956\|gb\|ACF78562.1\| | | | | |
| | | | | unknown [Zea mays] | | | | |
| | | ABF95389 | 108705663 | phosphoinositide-specific phospholipase C, putative, | 0.711375 | Oryza sativa Japonica Group | 2516 | 3982 |
| | | | | expressed [Oryza sativa Japonica Group] | | | | |
| | | XP_002463446 | 242051403 | hypothetical protein SORBIDRAFT_02g044010 | 0.721562 | Sorghum bicolor | 2517 | 3983 |
| | | | | [Sorghum bicolor] | | | | |
| | | | | &gt:gi\|241926823\|gb\|EER99967.1\| | | | | |
| | | | | hypothetical protein SORBIDRAFT_02g044010 | | | | |
| | | | | [Sorghum bicolor] | | | | |
| | 48-71 | ACG39668 | 195640399 | hypothetical protein [Zea mays] | 1 | Zea mays | 2518 | 3984 |
| | | NP_001130595 | 212276329 | hypothetical protein LOC100191694 [Zea mays] | 0.987562 | Zea mays | 2519 | 3985 |
| | | | | &gt:gi\|194689586\|gb\|ACF78877.1\| unknown | | | | |
| | | | | [Zea mays] | | | | |
| | | XP_002460510 | 242045277 | hypothetical protein SORBIDRAFT_02g029650 | 0.930348 | Sorghum bicolor | 2520 | 3986 |
| | | | | [Sorghum bicolor] | | | | |
| | | | | &gt:gi\|241923887\|gb\|EER97031.1\| | | | | |
| | | | | hypothetical protein SORBIDRAFT_02g029650 | | | | |
| | | | | [Sorghum bicolor] | | | | |
| | | NP_001063644 | 115480100 | Os09g0512700 [Oryza sativa Japonica Group] | 0.776119 | Oryza sativa Japonica Group | 2521 | 3987 |
| | | | | &gt:gi\|113631877\|dbj\|BAF25558.1\| Os09g0512700 | | | | |
| | | | | [Oryza sativa Japonica Group] | | | | |
| | | | | &gt:gi\|215765318\|dbj\|BAG87015.1\| unnamed protein | | | | |
| | | | | product [Oryza sativa Japonica Group] | | | | |
| | | EAZ09731 | 54362548 | hypothetical protein OsI_32019 | 0.773632 | Oryza sativa Indica Group | 2522 | |
| | | | | [Oryza sativa Indica Group] | | | | |
| | | BAK01473 | 326532193 | predicted protein [Hordeum vulgare subsp. vulgare] | 0.701493 | Hordeum vulgare subsp. vulgare | 2523 | 3988 |
| Predicted | 968-991 | NP_001168323 | 293337020 | hypothetical protein LOC100382090 [Zea mays] | 1 | Zea mays | 2524 | 3989 |
| folded 24- | | | | &gt:gi\|223947455\|gb\|ACN27811.1\| | | | | |
| nts-long | | | | unknown [Zea mays] | | | | |
| seq 52682 | | | | | | | | |
| | | XP_002447163 | 242074453 | hypothetical protein SORBIDRAFT_06g029640 | 0.881423 | Sorghum bicolor | 2525 | 3990 |
| | | | | [Sorghum bicolor] | | | | |
| | | | | &gt:gi\|241938346\|gb\|EES11491.1\| | | | | |
| | | | | hypothetical protein SORBIDRAFT_06g029640 | | | | |
| | | | | [Sorghum bicolor] | | | | |
| | | BAK03641 | 326515455 | predicted protein [Hordeum vulgare subsp. vulgare] | 0.758893 | Hordeum vulgare subsp. vulgare | 2526 | 3991 |
| | | CAH68069 | 90399260 | H0105C05.5 [Oryza sativa Indica Group] | 0.768775 | Oryza sativa Indica Group | 2527 | 3992 |
| | | CAI44640 | 58532108 | OSJNBb0015D13.11 [Oryza sativa Japonica Group] | 0.768775 | Oryza sativa Japonica Group | 2528 | 3993 |
| | | | | &gt:gi\|125549861\|gb\|EAY95683.1\| hypothetical | | | | |
| | | | | protein OsI_17548 [Oryza sativa Indica Group] | | | | |
| | | EAZ32093 | 54398660 | hypothetical protein OsJ_16284 | 0.766798 | Oryza sativa Japonica Group | 2529 | |
| | | | | [Oryza sativa Japonica Group] | | | | |
| | 604-627 | NP_001146934 | 226505051 | ovate protein [Zea mays] | 1 | Zea mays | 2530 | 3994 |
| | | | | &gt:gi\|195605346\|gb\|ACG24503.1\| ovate protein | | | | |
| | | | | [Zea mays] | | | | |
| Predicted | 130-151 | XP_002441411 | 242091156 | hypothetical protein SORBIDRAFT_09g026210 | 1 | Sorghum bicolor | 2531 | 3995 |
| siRNA | | | | [Sorghum bicolor] | | | | |
| 54566 | | | | &gt:gi\|241946696\|gb\|EES19841.1\| | | | | |
| | | | | hypothetical protein SORBIDRAFT_09g026210 | | | | |
| | | | | [Sorghum bicolor] | | | | |
| | | NP_001130268 | 212276204 | hypothetical protein LOC100191362 [Zea mays] | 0.956863 | Zea mays | 2532 | 3996 |
| | | | | &gt:gi\|194688708\|gb\|ACF78438.1\| unknown | | | | |
| | | | | [Zea mays] | | | | |
| | | | | &gt:gi\|195639384\|gb\|ACG39160.1\| | | | | |
| | | | | seed maturation protein [Zea mays] | | | | |
| | | | | &gt:gi\|19886847\|gb\|ACL53798.1\| unknown | | | | |
| | | | | [Zea mays] | | | | |
| | | NP_001056102 | 115465004 | Os05g0526400 [Oryza sativa Japonica Group] | 0.854902 | Oryza sativa Japonica Group | 2533 | 3997 |
| | | | | &gt:gi\|52353496\|gb\|AAU44062.1\| unknown protein | | | | |
| | | | | [Oryza sativa Japonica Group] | | | | |
| | | | | &gt:gi\|113579653\|dbj\|BAF18016.1\| Os05g0526400 | | | | |
| | | | | [Oryza sativa Japonica Group] | | | | |
| | | | | &gt:gi\|215737410\|dbj\|BAG96540.1\| unnamed protein | | | | |
| | | | | product [Oryza sativa Japonica Group] | | | | |
| | | | | &gt:gi\|215768410\|dbj\|BAH00639.1\| unnamed protein | | | | |
| | | | | product [Oryza sativa Japonica Group] | | | | |
| | | | | &gt:gi\|222632297\|gb\|EEE64429.1\| hypothetical | | | | |
| | | | | protein OsJ_19273 [Oryza sativa Japonica Group] | | | | |
| | | EAY98759 | 54362548 | hypothetical protein OsI_20691 | 0.839216 | Oryza sativa Indica Group | 2534 | |
| | | | | [Oryza sativa Indica Group] | | | | |
| | | NP_001149653 | 226529556 | LOC100283279 [Zea mays] | 0.827451 | Zea mays | 2535 | 3998 |
| | | | | &gt:gi\|195629032\|gb\|ACG36248.1\| seed | | | | |
| | | | | maturation protein [Zea mays] | | | | |
| | | | | &gt:gi\|223975305\|gb\|ACN31840.1\| unknown | | | | |
| | | | | [Zea mays] | | | | |
| | | BAJ89699 | 326487429 | predicted protein | 0.792157 | Hordeum vulgare subsp. vulgare | 2536 | 3999 |
| | | | | [Hordeum vulgare subsp. vulgare] | | | | |
| | | NP_001130478 | 212274956 | hypothetical protein LOC100191576 [Zea mays] | 0.811765 | Zea mays | 2537 | 4000 |
| | | | | &gt:gi\|194689240\|gb\|ACF78704.1\| unknown | | | | |
| | | | | [Zea mays] | | | | |
| | | | | &gt:gi\|194700430\|gb\|ACF84299.1\| unknown | | | | |
| | | | | [Zea mays] | | | | |
| | | | | &gt:gi\|195657175\|gb\|ACG48055.1\| seed | | | | |
| | | | | maturation protein [Zea mays] | | | | |
| | | | | &gt:gi\|238007632\|gb\|ACR34851.1\| unknown | | | | |
| | | | | [Zea mays] | | | | |
| | | EAY75742 | 54362548 | hypothetical protein OsI_03655 | 0.807843 | Oryza sativa Indica Group | 2538 | |
| | | | | [Oryza sativa Indica Group] | | | | |
| | | NP_001044177 | 115439794 | Os01g0736900 [Oryza sativa Japonica Group] | 0.8 | Oryza sativa Japonica Group | 2539 | 4001 |
| | | | | &gt:gi\|20160502\|dbj\|BAB89453.1\| putative 24 kDa | | | | |
| | | | | seed maturation protein [Oryza sativa Japonica Group] | | | | |
| | | | | &gt:gi\|113533708\|dbj\|BAF06091.1\| Os01g0736900 | | | | |
| | | | | [Oryza sativa Japonica Group] | | | | |
| | | | | &gt:gi\|215694473\|dbj\|BAG89426.1\| unnamed protein | | | | |
| | | | | product [Oryza sativa Japonica Group] | | | | |
| | | | | &gt:gi\|215768164\|dbj\|BAH00393.1\| unnamed protein | | | | |
| | | | | product [Oryza sativa Japonica Group] | | | | |
| | 74-95 | ACG32549 | 195621437 | seed maturation protein [Zea mays] | 1 | Zea mays | 2540 | 4002 |
| | 151-172 | XP_002463496 | 242032202 | hypothetical protein SORBIDRAFT_01g000790 | 1 | Sorghum bicolor | 2541 | 4003 |
| | | | | [Sorghum bicolor] | | | | |
| | | | | &gt:gi\|241917350\|gb\|EER90494.1\| | | | | |
| | | | | hypothetical protein SORBIDRAFT_01g000790 | | | | |
| | | | | [Sorghum bicolor] | | | | |
| | | NP_001144754 | 226493369 | hypothetical protein LOC100277804 [Zea mays] | 0.882834 | Zea mays | 2542 | 4004 |
| | | | | &gt:gi\|195646528\|gb\|ACG42732.1\| hypothetical | | | | |
| | | | | protein [Zea mays] | | | | |
| | | NP_001051933 | 115456664 | Os03g0853900 [Oryza sativa Japonica Group] | 0.722071 | Oryza sativa Japonica Group | 2543 | 4005 |
| | | | | &gt:gi\|29126338\|gb\|AAO66530.1\| putative p21 | | | | |
| | | | | C-terminal-binding protein (alternative splicing | | | | |
| | | | | products) [Oryza sativa Japonica Group] | | | | |
| | | | | &gt:gi\|108712161\|gb\|ABF99956.1\| expressed protein | | | | |
| | | | | [Oryza sativa Japonica Group] | | | | |
| | | | | &gt:gi\|113550404\|dbj\|BAF13847.1\| Os03g0853900 | | | | |
| | | | | [Oryza sativa Japonica Group] | | | | |
| | | | | &gt:gi\|125546494\|gb\|EAY92633.1\| hypothetical | | | | |
| | | | | protein OsI_14377 [Oryza sativa Indica Group] | | | | |
| | | | | &gt:gi\|125588683\|gb\|EAZ29347.1\| hypothetical | | | | |
| | | | | protein OsJ_13413 [Oryza sativa Japonica Group] | | | | |
| | | | | &gt:gi\|215737372\|dbj\|BAG96301.1\| unnamed protein | | | | |
| | | | | product [Oryza sativa Japonica Group] | | | | |
| | | BAK02069 | 326492571 | predicted protein [Hordeum vulgare subsp. vulgare] | 0.722071 | Hordeum vulgare subsp. vulgare | 2544 | 4006 |
| | | | | &gt:gi\|326505672\|dbj\|BAJ95507.1\| predicted protein | | | | |
| | | | | [Hordeum vulgare subsp. vulgare] | | | | |
| | 842-863 | NP_001152619 | 226506333 | lactoylglutathione lyase [Zea mays] | 1 | Zea mays | 2545 | 4007 |
| | | | | &gt:gi\|195658267\|gb\|ACG48601.1\| | | | | |
| | | | | lactoylglutathione lyase [Zea mays] | | | | |
| | | NP_001149571 | 226500125 | lactoylglutathione lyase [Zea mays] | 0.77027 | Zea mays | 2546 | 4008 |
| | | | | &gt:gi\|194700264\|gb\|ACF84216.1\| unknown | | | | |
| | | | | [Zea mays] | | | | |
| | | | | &gt:gi\|195628124\|gb\|ACG35892.1\| | | | | |
| | | | | lactoylglutathione lyase [Zea mays] | | | | |
| | | XP_002439371 | 242087076 | hypothetical protein SORBIDRAFT_09g005270 | 0.752252 | Sorghum bicolor | 2547 | 4009 |
| | | | | [Sorghum bicolor] | | | | |
| | | | | &gt:gi\|241944656\|gb\|EES17801.1\| | | | | |
| | | | | hypothetical protein SORBIDRAFT_09g005270 | | | | |
| | | | | [Sorghum bicolor] | | | | |
| | 23-Feb | XP_002466636 | 242038482 | hypothetical protein SORBIDRAFT_01g011390 | 1 | Sorghum bicolor | 2548 | 4010 |
| | | | | [Sorghum bicolor] | | | | |
| | | | | &gt:gi\|241920490\|gb\|EER93634.1\| | | | | |
| | | | | hypothetical protein SORBIDRAFT_01g011390 | | | | |
| | | | | [Sorghum bicolor] | | | | |
| | | NP_001105326 | 162460990 | indole-3-acetate beta-glucosyltransferase [Zea mays] | 0.833333 | Zea mays | 2549 | 4011 |
| | | | | &gt:gi\|2501499\|sp\|Q41819.1\|IABG_MAIZE | | | | |
| | | | | RecName: Full = Indole-3-acetate beta- | | | | |
| | | | | glucosyltransferase; AltName: Full = (Uridine 5&apos:- | | | | |
| | | | | diphosphate-glucose: indol-3-ylacetyl)-beta-D-glucosyl | | | | |
| | | | | transferase; AltName: Full = IAA-Glu synthase | | | | |
| | | | | &gt:gi\|548195\|gb\|AAA59054.1\| IAA-glu synthetase | | | | |
| | | | | [Zea mays] | | | | |
| | 213-234 | NP_001130342 | 212276285 | hypothetical protein LOC100191437 [Zea mays] | 1 | Zea mays | 2550 | 4012 |
| | | | | &gt:gi\|194688890\|gb\|ACF78529.1\| unknown | | | | |
| | | | | [Zea mays] | | | | |
| | 256-277 | ABF01001 | 93211179 | lipoxygenase [Zea mays] | 1 | Zea mays | 2551 | 4013 |
| | | ABF01002 | 93211181 | lipoxygenase [Zea mays] | 0.887293 | Zea mays | 2552 | 4014 |
| | | NP_001105981 | 162464185 | lipoxygenase11 [Zea mays] | 0.886188 | Zea mays | 2553 | 4015 |
| | | | | &gt:gi\|84626299\|gb\|ABC59694.1\| | | | | |
| | | | | lipoxygenase [Zea mays] | | | | |
| | | ACL53739 | 219886728 | unknown [Zea mays] | 0.80663 | Zea mays | 2554 | 4016 |
| | | ACN33257 | 224028362 | unknown [Zea mays] | 0.798895 | Zea mays | 2555 | 4017 |
| | | BAK01953 | 326492338 | predicted protein | 0.733702 | Hordeum vulgare subsp. vulgare | 2556 | 4018 |
| | | | | [Hordeum vulgare subsp. vulgare] | | | | |
| | | Q8GSM2 | | RecName: Full = Lipoxygenase 2.3, chloroplastic; | 0.731492 | Hordeum vulgare subsp. vulgare | 2557 | |
| | | | | AltName: Full = LOX2: Hv: 3; Flags: Precursor | | | | |
| | | | | &gt:gi\|25809278\|emb\|CAD45187.1\| lipoxygenase 2 | | | | |
| | | | | [Hordeum vulgare subsp. vulgare] | | | | |
| | | NP_001046180 | 115444800 | Os02g0194700 [Oryza sativa Japonica Group] | 0.710497 | Oryza sativa Japonica Group | 2558 | 4019 |
| | | | | &gt:gi\|49388109\|dbj\|BAD25240.1\| putative | | | | |
| | | | | Lipoxygenase 2.3, chloroplast precursor | | | | |
| | | | | [Oryza sativa Japonica Group] | | | | |
| | | | | &gt:gi\|113535711\|dbj\|BAF08094.1\| | | | | |
| | | | | Os02g0194700 [Oryza sativa Japonica Group] | | | | |
| | 1784-1805 | XP_002461846 | 242048199 | hypothetical protein SORBIDRAFT_02g009170 | 1 | Sorghum bicolor | 2559 | 4020 |
| | | | | [Sorghum bicolor] | | | | |
| | | | | &gt:gi\|241925223\|gb\|EER98367.1\| | | | | |
| | | | | hypothetical protein SORBIDRAFT_02g009170 | | | | |
| | | | | [Sorghum bicolor] | | | | |
| | | NP_001183207 | 308081147 | hypothetical protein LOC100501591 [Zea mays] | 0.853949 | Zea mays | 2560 | 4021 |
| | | | | &gt:gi\|238010066\|gb\|ACR36068.1\| unknown | | | | |
| | | | | [Zea mays] | | | | |
| | | BAC84446 | 50508886 | putative receptor-type protein kinase LRK1 | 0.731744 | Oryza sativa Japonica Group | 2561 | |
| | | | | [Oryza sativa Japonica Group] | | | | |
| | | | | &gt:gi\|50509358\|dbj\|BAD30821.1\| | | | | |
| | | | | putative receptor-type protein kinase LRK1 | | | | |
| | | | | [Oryza sativa Japonica Group] | | | | |
| | | EAZ03505 | 54362548 | hypothetical protein OsI_25645 | 0.721311 | Oryza sativa Indica Group | 2562 | |
| | | | | [Oryza sativa Indica Group] | | | | |
| | | NP_001175142 | 297725556 | Os07g0283125 [Oryza sativa Japonica Group] | 0.722802 | Oryza sativa Japonica Group | 2563 | 4022 |
| | | | | &gt:gi\|125599841\|gb\|EAZ39417.1\| hypothetical | | | | |
| | | | | protein OsJ_23853 [Oryza sativa Japonica Group] | | | | |
| | | | | &gt:gi\|255677673\|dbj\|BAH93870.1\| Os07g0283125 | | | | |
| | | | | [Oryza sativa Japonica Group] | | | | |
| | 257-278 | NP_001105980 | 162464002 | lipoxygenase10 [Zea mays] | 1 | Zea mays | 2564 | 4023 |
| | | | | &gt:gi\|84626297\|gb\|ABC59693.1\| lipoxygenase | | | | |
| | | | | [Zea mays] | | | | |
| Predicted | 216-237 | NP_001131499 | 212720749 | hypothetical protein LOC100192836 [Zea mays] | 1 | Zea mays | 2565 | 4024 |
| siRNA | | | | &gt:gi\|194691702\|gb\|ACF79935.1\| unknown | | | | |
| 54666 | | | | [Zea mays] | | | | |
| | | XP_002465188 | 242035586 | hypothetical protein SORBIDRAFT_01g033660 | 0.710594 | Sorghum bicolor | 2566 | 4025 |
| | | | | [Sorghum bicolor] | | | | |
| | | | | &gt:gi\|241919042\|gb\|EER92186.1\| | | | | |
| | | | | hypothetical protein SORBIDRAFT_01g033660 | | | | |
| | | | | [Sorghum bicolor] | | | | |
| | 37-58 | XP_002465922 | 242037054 | hypothetical protein SORBIDRAFT_01g048270 | 1 | Sorghum bicolor | 2567 | 4026 |
| | | | | [Sorghum bicolor] | | | | |
| | | | | &gt:gi\|241919776\|gb\|EER92920.1\| | | | | |
| | | | | hypothetical protein SORBIDRAFT_01g048270 | | | | |
| | | | | [Sorghum bicolor] | | | | |
| | | NP_001149726 | 226502948 | 60S ribosomal protein L5-1 [Zea mays] | 0.900662 | Zea mays | 2568 | 4027 |
| | | | | &gt:gi\|195629822\|gb\|ACG36552.1\| 60S | | | | |
| | | | | ribosomal protein L5-1 [Zea mays] | | | | |
| | | ACR38045 | 238014019 | unknown [Zea mays] | 0.89404 | Zea mays | 2569 | 4028 |
| | | NP_001151284 | 226510053 | 60S ribosomal protein L5-1 [Zea mays] | 0.887417 | Zea mays | 2570 | 4029 |
| | | | | &gt:gi\|195645524\|gb\|ACG42230.1\| 60S | | | | |
| | | | | ribosomal protein L5-1 [Zea mays] | | | | |
| | | BAJ89012 | 326527920 | predicted protein | 0.887417 | Hordeum vulgare subsp. vulgare | 2571 | 4030 |
| | | | | [Hordeum vulgare subsp. vulgare] | | | | |
| | | A2WXX3 | | RecName: Full = 60S ribosomal protein L5-1 | 0.857616 | Oryza sativa Indica Group | 2572 | |
| | | | | &gt:gi\|218189527\|gb\|EEC71954.1\| hypothetical | | | | |
| | | | | protein OsI_04779 [Oryza sativa Indica Group] | | | | |
| | | NP_001045083 | 115441606 | Os01g0896800 [Oryza sativa Japonica Group] | 0.857616 | Oryza sativa Japonica Group | 2573 | 4031 |
| | | | | &gt:gi\|122222375\|sp\|Q0JGY1.1\|RL51_ORYSJ | | | | |
| | | | | RecName: Full = 60S ribosomal protein L5-1 | | | | |
| | | | | &gt:gi\|56785265\|dbj\|BAD82174.1\| putative ribosomal | | | | |
| | | | | protein L5 [Oryza sativa Japonica Group] | | | | |
| | | | | &gt:gi\|113534614\|dbj\|BAF06997.1\| Os01g0896800 | | | | |
| | | | | [Oryza sativa Japonica Group] | | | | |
| | | | | &gt:gi\|169244415\|gb\|ACA50481.1\| 60S ribosomal | | | | |
| | | | | protein L5 [Oryza sativa Japonica Group] | | | | |
| | | | | &gt:gi\|215737756\|dbj\|BAG96886.1\| unnamed protein | | | | |
| | | | | product [Oryza sativa Japonica Group] | | | | |
| | | BAD82173 | 22093582 | putative ribosomal protein L5 | 0.854305 | Oryza sativa Japonica Group | 2574 | |
| | | | | [Oryza sativa Japonica Group] | | | | |
| | | | | &gt:gi\|169244413\|gb\|ACA50480.1\| 60S | | | | |
| | | | | ribosomal protein L5 [Oryza sativa Japonica Group] | | | | |
| | | | | &gt:gi\|218189526\|gb\|EEC71953.1\| hypothetical | | | | |
| | | | | protein OsI_04778 [Oryza sativa Indica Group] | | | | |
| | | | | &gt:gi\|222619675\|gb\|EEE55807.1\| hypothetical | | | | |
| | | | | protein OsJ_04400 [Oryza sativa Japonica Group] | | | | |
| | | BAC06273 | 21952828 | putative 60S ribosomal protein L5 | 0.847682 | Oryza sativa Japonica Group | 2575 | |
| | | | | [Oryza sativa Japonica Group] | | | | |
| | | | | &gt:gi\|125572963\|gb\|EAZ14478.1\| | | | | |
| | | | | hypothetical protein OsJ_04401 | | | | |
| | | | | [Oryza sativa Japonica Group] | | | | |
| | | Q8L4L4 | | RecName: Full = 60S ribosomal protein L5-2 | 0.844371 | Oryza sativa Japonica Group | 2576 | |
| | | | | &gt:gi\|313103586\|pdb\|3IZ5\|Q Chain Q, Localization | | | | |
| | | | | Of The Large Subunit Ribosomal Proteins Into A 5.5 | | | | |
| | | | | A Cryo-Em Map Of Triticum Aestivum Translating | | | | |
| | | | | 80s Ribosome &gt:gi\|315113258\|pdb\|3IZR\|Q Chain | | | | |
| | | | | Q, Localization Of The Large Subunit Ribosomal | | | | |
| | | | | Proteins Into A 5.5 A Cryo-Em Map Of | | | | |
| | | | | Triticum Aestivum Translating 80s Ribosome | | | | |
| | | | | &gt:gi\|21952857\|dbj\|BAC06272.1\| putative 60S | | | | |
| | | | | ribosomal protein L5 [Oryza sativa Japonica Group] | | | | |
| | 292-313 | NP_001136748 | 219362396 | hypothetical protein LOC100216889 [Zea mays] | 1 | Zea mays | 2577 | 4032 |
| | | | | &gt:gi\|194696888\|gb\|ACF82528.1\| unknown | | | | |
| | | | | [Zea mays] | | | | |
| | | XP_002441226 | 242090786 | hypothetical protein SORBIDRAFT_09g022730 | 0.738806 | Sorghum bicolor | 2578 | 4033 |
| | | | | [Sorghum bicolor] | | | | |
| | | | | &gt:gi\|241946511\|gb\|EES19656.1\| | | | | |
| | | | | hypothetical protein SORBIDRAFT_09g022730 | | | | |
| | | | | [Sorghum bicolor] | | | | |
| | 376-397 | XP_002436516 | 242092051 | hypothetical protein SORBIDRAFT_10g004010 | 1 | Sorghum bicolor | 2579 | 4034 |
| | | | | [Sorghum bicolor] | | | | |
| | | | | &gt:gi\|241914739\|gb\|EER87883.1\| | | | | |
| | | | | hypothetical protein SORBIDRAFT_10g004010 | | | | |
| | | | | [Sorghum bicolor] | | | | |
| | | NP_001145738 | 226529448 | hypothetical protein LOC100279245 [Zea mays] | 0.920388 | Zea mays | 2580 | 4035 |
| | | | | &gt:gi\|219884233\|gb\|ACL52491.1\| unknown | | | | |
| | | | | [Zea mays] | | | | |
| | | NP_001159047 | 259490760 | hypothetical protein LOC100304073 [Zea mays] | 0.904854 | Zea mays | 2581 | 4036 |
| | | | | &gt:gi\|195644974\|gb\|ACG41955.1\| hypothetical | | | | |
| | | | | protein [Zea mays] | | | | |
| | | EEC80051 | 54362548 | hypothetical protein OsI_21754 | 0.786408 | Oryza sativa Indica Group | 2582 | |
| | | | | [Oryza sativa Indica Group] | | | | |
| | | EEE65126 | 54398660 | hypothetical protein OsJ_20196 | 0.782524 | Oryza sativa Japonica Group | 2583 | |
| | | | | [Oryza sativa Japonica Group] | | | | |
| | 362-383 | NP_001149452 | 226510424 | LOC100283078 [Zea mays] | 1 | Zea mays | 2584 | 4037 |
| | | | | &gt:gi\|195627344\|gb\|ACG35502.1\| | | | | |
| | | | | lipopolysaccharide-modifying protein | | | | |
| | | | | [Zea mays] | | | | |
| | | XP_002443683 | 242077828 | hypothetical protein SORBIDRAFT_07g000280 | 0.726667 | Sorghum bicolor | 2585 | 4038 |
| | | | | [Sorghum bicolor] | | | | |
| | | | | &gt:gi\|241940033\|gb\|EES13178.1\| | | | | |
| | | | | hypothetical protein SORBIDRAFT_07g000280 | | | | |
| | | | | [Sorghum bicolor] | | | | |
| | 211-232 | ACN33370 | 224028588 | unknown [Zea mays] | 1 | Zea mays | 2586 | 4039 |
| | | XP_002447369 | 242074865 | hypothetical protein SORBIDRAFT_06g033830 | 0.865526 | Sorghum bicolor | 2587 | 4040 |
| | | | | [Sorghum bicolor] | | | | |
| | | | | &gt:gi\|241938552\|gb\|EES11697.1\| | | | | |
| | | | | hypothetical protein SORBIDRAFT_06g033830 | | | | |
| | | | | [Sorghum bicolor] | | | | |
| | | CAB53491 | 5777612 | CAA303718.1 protein [Oryza sativa] | 0.735941 | Oryza sativa | 2588 | 4041 |
| | | | | &gt:gi\|90399023\|emb\|CAJ86143.1\| H0701F11.9 | | | | |
| | | | | [Oryza sativa Indica Group] | | | | |
| | | | | &gt:gi\|116311977\|emb\|CAJ86335.1\| H0814G11.2 | | | | |
| | | | | [Oryza sativa Indica Group] | | | | |
| | | EAY96137 | 54362548 | hypothetical protein OsI_18016 | 0.718826 | Oryza sativa Indica Group | 2589 | |
| | | | | [Oryza sativa Indica Group] | | | | |
| | | EEE61953 | 54398660 | hypothetical protein OsJ_16714 | 0.706601 | Oryza sativa Japonica Group | 2590 | |
| | | | | [Oryza sativa Japonica Group] | | | | |
| | 128-149 | XP_002451458 | 242060337 | hypothetical protein SORBIDRAFT_04g002290 | 1 | Sorghum bicolor | 2591 | 4042 |
| | | | | [Sorghum bicolor] | | | | |
| | | | | &gt:gi\|241931289\|gb\|EES04434.1\| | | | | |
| | | | | hypothetical protein SORBIDRAFT_04g002290 | | | | |
| | | | | [Sorghum bicolor] | | | | |
| | | NP_001146328 | 226493387 | hypothetical protein LOC100279904 [Zea mays] | 0.824798 | Zea mays | 2592 | 4043 |
| | | | | &gt:gi\|219886655\|gb\|ACL53702.1\| unknown | | | | |
| | | | | [Zea mays] | | | | |
| | 544-565 | XP_002454331 | 242066083 | hypothetical protein SORBIDRAFT_04g028790 | 1 | Sorghum bicolor | 2593 | 4044 |
| | | | | [Sorghum bicolor] | | | | |
| | | | | &gt:gi\|241934162\|gb\|EES07307.1\| | | | | |
| | | | | hypothetical protein SORBIDRAFT_04g028790 | | | | |
| | | | | [Sorghum bicolor] | | | | |
| | | NP_001057318 | 115467437 | Os06g0256900 [Oryza sativa Japonica Group] | 0.875 | Oryza sativa Japonica Group | 2594 | 4045 |
| | | | | &gt:gi\|75253245\|sp\|Q652F9.1\|GUN17_ORYSJ | | | | |
| | | | | RecName: Full = Endoglucanase 17; AltName: | | | | |
| | | | | Full = Endo-1,4-beta glucanase 17; AltName: | | | | |
| | | | | Full = OsGLU13; Flags: Precursor | | | | |
| | | | | &gt:gi\|52077266\|dbj\|BAD46308.1\| | | | | |
| | | | | putative endo-1,4-beta-glucanase precursor | | | | |
| | | | | [Oryza sativa Japonica Group] | | | | |
| | | | | &gt:gi\|113595358\|dbj\|BAF19232.1\| | | | | |
| | | | | Os06g0256900 [Oryza sativa Japonica Group] | | | | |
| | | | | &gt:gi\|125596749\|gb\|EAZ36529.1\| hypothetical | | | | |
| | | | | protein OsJ_20865 [Oryza sativa Japonica Group] | | | | |
| | | NP_001048033 | 115448506 | Os02g0733300 [Oryza sativa Japonica Group] | 0.890873 | Oryza sativa Japonica Group | 2595 | 4046 |
| | | | | &gt:gi\|75225300\|sp\|Q6Z2J3.1\|GUN6_ORYSJ | | | | |
| | | | | RecName: Full = Endoglucanase 6; AltName: | | | | |
| | | | | Full = Endo-1,4-beta glucanase 6; AltName: | | | | |
| | | | | Full = OsCel9E; Flags: Precursor | | | | |
| | | | | &gt:gi\|46390665\|dbj\|BAD16147.1\| | | | | |
| | | | | putative endo-1,4-beta-glucanase | | | | |
| | | | | [Oryza sativa Japonica Group] | | | | |
| | | | | &gt:gi\|113537564\|dbj\|BAF09947.1\| Os02g0733300 | | | | |
| | | | | [Oryza sativa Japonica Group] | | | | |
| | | | | &gt:gi\|215704889\|dbj\|BAG94917.1\| unnamed protein | | | | |
| | | | | product [Oryza sativa Japonica Group] | | | | |
| | | | | &gt:gi\|215740598\|dbj\|BAG97254.1\| unnamed protein | | | | |
| | | | | product [Oryza sativa Japonica Group] | | | | |
| | | ACG39876 | 195640815 | endoglucanase 1 precursor [Zea mays] | 0.934524 | Zea mays | 2596 | 4047 |
| | | BAJ85886 | 326495579 | predicted protein | 0.853175 | Hordeum vulgare subsp. vulgare | 2597 | 4048 |
| | | | | [Hordeum vulgare subsp. vulgare] | | | | |
| | | BAK01727 | 326489492 | predicted protein | 0.823413 | Hordeum vulgare subsp. vulgare | 2598 | 4049 |
| | | | | [Hordeum vulgare subsp. vulgare] | | | | |
| | | ACN25509 | 223942850 | unknown [Zea mays] | 0.801587 | Zea mays | 2599 | 4050 |
| | | NP_001136728 | 219363410 | hypothetical protein LOC100216867 [Zea mays] | 0.81746 | Zea mays | 2600 | 4051 |
| | | | | &gt:gi\|194699722\|gb\|ACF83945.1\| unknown | | | | |
| | | | | [Zea mays] | | | | |
| | 778-799 | XP_002437997 | 242095013 | hypothetical protein SORBIDRAFT_10g006130 | 1 | Sorghum bicolor | 2601 | 4052 |
| | | | | [Sorghum bicolor] | | | | |
| | | | | &gt:gi\|241916220\|gb\|EER89364.1\| | | | | |
| | | | | hypothetical protein SORBIDRAFT_10g006130 | | | | |
| | | | | [Sorghum bicolor] | | | | |
| | | AAK73111 | 166008041 | serine threonine kinase 1 [Zea mays] | 0.93593 | Zea mays | 2602 | |
| | | | | &gt:gi\|145309042\|gb\|ABP57732.1\| Tassel serine | | | | |
| | | | | threonine kinase 1 [Zea mays] | | | | |
| | | ACA21852 | 168251061 | serine threonine kinase 1 [Zea mays] | 0.896985 | Zea mays | 2603 | |
| | | EEE65245 | 54398660 | hypothetical protein OsJ_20418 | 0.815327 | Oryza sativa Japonica Group | 2604 | |
| | | | | [Oryza sativa Japonica Group] | | | | |
| | | BAK06108 | 326499234 | predicted protein | 0.802764 | Hordeum vulgare subsp. vulgare | 2605 | 4053 |
| | | | | [Hordeum vulgare subsp. vulgare] | | | | |
| | | EAY99981 | 54362548 | hypothetical protein OsI_21985 | 0.762563 | Oryza sativa Indica Group | 2606 | |
| | | | | [Oryza sativa Indica Group] | | | | |
| | 103-124 | XP_002468218 | 242041646 | hypothetical protein SORBIDRAFT_01g041990 | 1 | Sorghum bicolor | 2607 | 4054 |
| | | | | [Sorghum bicolor] | | | | |
| | | | | &gt:gi\|241922072\|gb\|EER95216.1\| | | | | |
| | | | | hypothetical protein SORBIDRAFT_01g041990 | | | | |
| | | | | [Sorghum bicolor] | | | | |
| | | NP_001150369 | 226490909 | LOC100283999 [Zea mays] | 0.962085 | Zea mays | 2608 | 4055 |
| | | | | &gt:gi\|195638716\|gb\|ACG38826.1\| | | | | |
| | | | | maf-like protein CV_0124 | | | | |
| | | | | [Zea mays] | | | | |
| | | BAJ91214 | 326505949 | predicted protein | 0.914692 | Hordeum vulgare subsp. vulgare | 2609 | 4056 |
| | | | | [Hordeum vulgare subsp. vulgare] | | | | |
| | | ABF94776 | 108705663 | Maf family protein, putative, expressed | 0.914692 | Oryza sativa Japonica Group | 2610 | 4057 |
| | | | | [Oryza sativa Japonica Group] | | | | |
| | | EEC74808 | 54362548 | hypothetical protein OsI_10622 | 0.881517 | Oryza sativa Indica Group | 2611 | |
| | | | | [Oryza sativa Indica Group] | | | | |
| | | | | &gt:gi\|222624509\|gb\|EEE58641.1\| | | | | |
| | | | | hypothetical protein OsJ_10016 | | | | |
| | | | | [Oryza sativa Japonica Group] | | | | |
| | 556-577 | NP_001170197 | 293334350 | hypothetical protein LOC100384147 [Zea mays] | 1 | Zea mays | 2612 | 4058 |
| | | | | &gt:gi\|224034241\|gb\|ACN36196.1\| unknown | | | | |
| | | | | [Zea mays] | | | | |
| | | XP_002468612 | 242042434 | hypothetical protein SORBIDRAFT_01g048980 | 0.928846 | Sorghum bicolor | 2613 | 4059 |
| | | | | [Sorghum bicolor] | | | | |
| | | | | &gt:gi\|241922466\|gb\|EER95610.1\| | | | | |
| | | | | hypothetical protein SORBIDRAFT_01g048980 | | | | |
| | | | | [Sorghum bicolor] | | | | |
| | | NP_001048804 | 115450406 | Os03g0123300 [Oryza sativa Japonica Group] | 0.857692 | Oryza sativa Japonica Group | 2614 | 4060 |
| | | | | &gt:gi\|108705924\|gb\|ABF93719.1\| Fizzy-related | | | | |
| | | | | protein, putative, expressed | | | | |
| | | | | [Oryza sativa Japonica Group] | | | | |
| | | | | &gt:gi\|113547275\|dbj\|BAF10718.1\| | | | | |
| | | | | Os03g0123300 [Oryza sativa Japonica Group] | | | | |
| | | | | &gt:gi\|215697879\|dbj\|BAG92072.1\| unnamed protein | | | | |
| | | | | product [Oryza sativa Japonica Group] | | | | |
| | | AAN74839 | 24942863 | Putative cell cycle switch protein | 0.851923 | Oryza sativa Japonica Group | 2615 | 4061 |
| | | | | [Oryza sativa Japonica Group] | | | | |
| | | BAK01604 | 326489240 | predicted protein | 0.778846 | Hordeum vulgare subsp. vulgare | 2616 | 4062 |
| | | | | [Hordeum vulgare subsp. vulgare] | | | | |
| | 1689-1710 | ACN35345 | 224032538 | unknown [Zea mays] | 1 | Zea mays | 2617 | 4063 |
| | 40-61 | ACR35596 | 238009121 | unknown [Zea mays] | 1 | Zea mays | 2618 | 4064 |
| | | NP_001167964 | 293337176 | hypothetical protein LOC100381680 [Zea mays] | 0.723005 | Zea mays | 2619 | 4065 |
| | | | | &gt:gi\|223945177\|gb\|ACN26672.1\| unknown | | | | |
| | | | | [Zea mays] | | | | |
| | 135-156 | XP_002437370 | 242093759 | hypothetical protein SORBIDRAFT_10g025700 | 1 | Sorghum bicolor | 2620 | 4066 |
| | | | | [Sorghum bicolor] | | | | |
| | | | | &gt:gi\|241915593\|gb\|EER88737.1\| | | | | |
| | | | | hypothetical protein SORBIDRAFT_10g025700 | | | | |
| | | | | [Sorghum bicolor] | | | | |
| | | NP_001169745 | 293337166 | hypothetical protein LOC100383626 [Zea mays] | 0.957878 | Zea mays | 2621 | 4067 |
| | | | | &gt:gi\|224031377\|gb\|ACN34764.1\| unknown | | | | |
| | | | | [Zea mays] | | | | |
| | | EEC81091 | 54362548 | hypothetical protein OsI_23922 | 0.840874 | Oryza sativa Indica Group | 2622 | |
| | | | | [Oryza sativa Indica Group] | | | | |
| | | NP_001058222 | 115469245 | Os06g0650600 [Oryza sativa Japonica Group] | 0.840874 | Oryza sativa Japonica Group | 2623 | 4068 |
| | | | | &gt:gi\|51534986\|dbj\|BAD38110.1\| endomembrane | | | | |
| | | | | protein 70-like [Oryza sativa Japonica Group] | | | | |
| | | | | &gt:gi\|113596262\|dbj\|BAF20136.1\| Os06g0650600 | | | | |
| | | | | [Oryza sativa Japonica Group] | | | | |
| | | | | &gt:gi\|215694831\|dbj\|BAG90022.1\| unnamed protein | | | | |
| | | | | product [Oryza sativa Japonica Group] | | | | |
| | | ACG29725 | 195615789 | transmembrane 9 superfamily protein member | 0.806552 | Zea mays | 2624 | 4069 |
| | | | | 4 [Zea mays] | | | | |
| | | NP_001146016 | 226492185 | hypothetical protein LOC100279547 [Zea mays] | 0.803432 | Zea mays | 2625 | 4070 |
| | | | | &gt:gi\|219885331\|gb\|ACL53040.1\| unknown | | | | |
| | | | | [Zea mays] | | | | |
| | | XP_002437369 | 242093757 | hypothetical protein SORBIDRAFT_10g025690 | 0.809672 | Sorghum bicolor | 2626 | 4071 |
| | | | | [Sorghum bicolor] | | | | |
| | | | | &gt:gi\|241915592\|gb\|EER88736.1\| | | | | |
| | | | | hypothetical protein SORBIDRAFT_10g025690 | | | | |
| | | | | [Sorghum bicolor] | | | | |
| | | XP_002445411 | 242081284 | hypothetical protein SORBIDRAFT_07g016310 | 0.798752 | Sorghum bicolor | 2627 | 4072 |
| | | | | [Sorghum bicolor] | | | | |
| | | | | &gt:gi\|241941761\|gb\|EES14906.1\| | | | | |
| | | | | hypothetical protein SORBIDRAFT_07g016310 | | | | |
| | | | | [Sorghum bicolor] | | | | |
| | | NP_001130383 | 212275585 | hypothetical protein LOC100191479 [Zea mays] | 0.794072 | Zea mays | 2628 | 4073 |
| | | | | &gt:gi\|194688986\|gb\|ACF78577.1\| unknown | | | | |
| | | | | [Zea mays] | | | | |
| | | | | &gt:gi\|195614790\|gb\|ACG29225.1\| | | | | |
| | | | | transmembrane 9 superfamily protein member 2 | | | | |
| | | | | precursor [Zea mays] | | | | |
| | | XP_002529382 | 255576994 | Endosomal P24A protein precursor, putative | 0.792512 | Ricinus communis | 2629 | 4074 |
| | | | | [Ricinus communis] | | | | |
| | | | | &gt:gi\|223531130\|gb\|EEF32978.1\| | | | | |
| | | | | Endosomal P24A protein precursor, putative | | | | |
| | | | | [Ricinus communis] | | | | |
| | 698-719 | ACR38139 | 238014207 | unknown [Zea mays] | 1 | Zea mays | 2630 | 4075 |
| | | ACG26030 | 195608399 | homeobox domain containing protein | 0.987302 | Zea mays | 2631 | 4076 |
| | | | | [Zea mays] | | | | |
| | | XP_002465335 | 242035880 | hypothetical protein SORBIDRAFT_01g036670 | 0.873016 | Sorghum bicolor | 2632 | 4077 |
| | | | | [Sorghum bicolor] | | | | |
| | | | | &gt:gi\|241919189\|gb\|EER92333.1\| | | | | |
| | | | | hypothetical protein SORBIDRAFT_01g036670 | | | | |
| | | | | [Sorghum bicolor] | | | | |
| | | NP_001049985 | 115452768 | Os03g0325600 [Oryza sativa Japonica Group] | 0.704762 | Oryza sativa Japonica Group | 2633 | 4078 |
| | | | | &gt:gi\|122247076\|sp\|Q10M29.1\|WOX6_ORYSJ | | | | |
| | | | | RecName: Full = WUSCHEL-related homeobox 6; | | | | |
| | | | | AltName: Full = OsWOX6 | | | | |
| | | | | &gt:gi\|108707914\|gb\|ABF95709.1\| Homeobox | | | | |
| | | | | domain containing protein, expressed | | | | |
| | | | | [Oryza sativa Japonica Group] | | | | |
| | | | | &gt:gi\|113548456\|dbj\|BAF11899.1\| | | | | |
| | | | | Os03g0325600 [Oryza sativa Japonica Group] | | | | |
| | | A2XG77 | | RecName: Full = WUSCHEL-related homeobox 6; | 0.704762 | Oryza sativa Indica Group | 2634 | |
| | | | | AltName: Full = OsWOX6 | | | | |
| | | | | &gt:gi\|125543698\|gb\|EAY89837.1\| | | | | |
| | | | | hypothetical protein OsI_11385 | | | | |
| | | | | [Oryza sativa Indica Group] | | | | |
| | 328-349 | NP_001130841 | 212276171 | hypothetical protein LOC100191945 [Zea mays] | 1 | Zea mays | 2635 | 4079 |
| | | | | &gt:gi\|194690250\|gb\|ACF79209.1\| unknown | | | | |
| | | | | [Zea mays] | | | | |
| | | | | &gt:gi\|195636434\|gb\|ACG37685.1\| | | | | |
| | | | | hypothetical protein [Zea mays] | | | | |
| | | | | &gt:gi\|195640568\|gb\|ACG39752.1\| hypothetical | | | | |
| | | | | protein [Zea mays] | | | | |
| | | NP_001144387 | 226531256 | hypothetical protein LOC100277315 [Zea mays] | 0.891304 | Zea mays | 2636 | 4080 |
| | | | | &gt:gi\|195641390\|gb\|ACG40163.1\| hypothetical | | | | |
| | | | | protein [Zea mays] | | | | |
| | | EEE67740 | 54398660 | hypothetical protein OsJ_25431 | 0.791925 | Oryza sativa Japonica Group | 2637 | |
| | | | | [Oryza sativa Japonica Group] | | | | |
| | | EAZ05000 | 54362548 | hypothetical protein OsI_27180 | 0.785714 | Oryza sativa Indica Group | 2638 | |
| | | | | [Oryza sativa Indica Group] | | | | |
| | | BAC15474 | 22775614 | unknown protein [Oryza sativa Japonica Group] | 0.782609 | Oryza sativa Japonica Group | 2639 | 4081 |
| | | | | &gt:gi\|50510136\|dbj\|BAD31101.1\| unknown protein | | | | |
| | | | | [Oryza sativa Japonica Group] | | | | |
| | | BAJ85816 | 326495439 | predicted protein | 0.742236 | Hordeum vulgare subsp. vulgare | 2640 | 4082 |
| | | | | [Hordeum vulgare subsp. vulgare] | | | | |
| | | BAJ87777 | 326513515 | predicted protein | 0.742236 | Hordeum vulgare subsp. vulgare | 2641 | 4083 |
| | | | | [Hordeum vulgare subsp. vulgare] | | | | |
| | 259-280 | XP_002465189 | 242035588 | hypothetical protein SORBIDRAFT_01g033670 | 1 | Sorghum bicolor | 2642 | 4084 |
| | | | | [Sorghum bicolor] | | | | |
| | | | | &gt:gi\|241919043\|gb\|EER92187.1\| | | | | |
| | | | | hypothetical protein SORBIDRAFT_01g033670 | | | | |
| | | | | [Sorghum bicolor] | | | | |
| | 589-610 | AAV64214 | 55741072 | stk [Zea mays] | 1 | Zea mays | 2643 | 4085 |
| | | EEC74143 | 54362548 | hypothetical protein OsI_09217 | 0.707953 | Oryza sativa Indica Group | 2644 | |
| | | | | [Oryza sativa Indica Group] | | | | |
| | | NP_001048340 | 115449120 | Os02g0787200 [Oryza sativa Japonica Group] | 0.706649 | Oryza sativa Japonica Group | 2645 | 4086 |
| | | | | &gt:gi\|47497167\|dbj\|BAD19215.1\| putative serine | | | | |
| | | | | threonine kinase [Oryza sativa Japonica Group] | | | | |
| | | | | &gt:gi\|47497752\|dbj\|BAD19852.1\| putative serine | | | | |
| | | | | threonine kinase [Oryza sativa Japonica Group] | | | | |
| | | | | &gt:gi\|113537871\|dbj\|BAF10254.1\| Os02g0787200 | | | | |
| | | | | [Oryza sativa Japonica Group] | | | | |
| | 89-110 | NP_001147835 | 226528692 | lectin-like receptor kinase 7 [Zea mays] | 1 | Zea mays | 2646 | 4087 |
| | | | | &gt:gi\|195614030\|gb\|ACG28845.1\| lectin-like | | | | |
| | | | | receptor kinase 7 [Zea mays] | | | | |
| | | XP_002463621 | 242032452 | hypothetical protein SORBIDRAFT_01g003030 | 0.860704 | Sorghum bicolor | 2647 | 4088 |
| | | | | [Sorghum bicolor] | | | | |
| | | | | &gt:gi\|241917475\|gb\|EER90619.1\| | | | | |
| | | | | hypothetical protein SORBIDRAFT_01g003030 | | | | |
| | | | | [Sorghum bicolor] | | | | |
| | 169-190 | XP_002467786 | 242040782 | hypothetical protein SORBIDRAFT_01g034030 | 1 | Sorghum bicolor | 2648 | 4089 |
| | | | | [Sorghum bicolor] | | | | |
| | | | | &gt:gi\|241921640\|gb\|EER94784.1\| | | | | |
| | | | | hypothetical protein SORBIDRAFT_01g034030 | | | | |
| | | | | [Sorghum bicolor] | | | | |
| | | NP_001141138 | 226530821 | hypothetical protein LOC100273224 [Zea mays] | 0.903353 | Zea mays | 2649 | 4090 |
| | | | | &gt:gi\|194702834\|gb\|ACF85501.1\| unknown | | | | |
| | | | | [Zea mays] | | | | |
| | | NP_001141473 | 226499929 | hypothetical protein LOC100273583 [Zea mays] | 0.90927 | Zea mays | 2650 | 4091 |
| | | | | &gt:gi\|194704720\|gb\|ACF86444.1\| unknown | | | | |
| | | | | [Zea mays] | | | | |
| | | BAK05639 | 326491078 | predicted protein | 0.745562 | Hordeum vulgare subsp. vulgare | 2651 | 4092 |
| | | | | [Hordeum vulgare subsp. vulgare] | | | | |
| | | NP_001050230 | 115453258 | Os03g0378000 [Oryza sativa Japonica Group] | 0.755424 | Oryza sativa Japonica Group | 2652 | 4093 |
| | | | | &gt:gi\|108708445\|gb\|ABF96240.1\| GDA1/CD39 | | | | |
| | | | | family protein, expressed | | | | |
| | | | | [Oryza sativa Japonica Group] | | | | |
| | | | | &gt:gi\|113548701\|dbj\|BAF12144.1\| | | | | |
| | | | | Os03g0378000 [Oryza sativa Japonica Group] | | | | |
| | | | | &gt:gi\|215704674\|dbj\|BAG94302.1\| unnamed protein | | | | |
| | | | | product [Oryza sativa Japonica Group] | | | | |
| | | EEC75360 | 54362548 | hypothetical protein OsI_11798 | 0.751479 | Oryza sativa Indica Group | 2653 | |
| | | | | [Oryza sativa Indica Group] | | | | |
| | | EEE59145 | 54398660 | hypothetical protein OsJ_11044 | 0.749507 | Oryza sativa Japonica Group | 2654 | |
| | | | | [Oryza sativa Japonica Group] | | | | |
| | 178-199 | XP_002463998 | 242033206 | hypothetical protein SORBIDRAFT_01g010290 | 1 | Sorghum bicolor | 2655 | 4094 |
| | | | | [Sorghum bicolor] | | | | |
| | | | | &gt:gi\|241917852\|gb\|EER90996.1\| | | | | |
| | | | | hypothetical protein SORBIDRAFT_01g010290 | | | | |
| | | | | [Sorghum bicolor] | | | | |
| | | NP_001151626 | 226498593 | atypical receptor-like kinase MARK [Zea mays] | 0.873563 | Zea mays | 2656 | 4095 |
| | | | | &gt:gi\|195648190\|gb\|ACG43563.1\| atypical | | | | |
| | | | | receptor-like kinase MARK [Zea mays] | | | | |
| | | NP_001105207 | 162459880 | atypical receptor-like kinase MARK [Zea mays] | 0.906609 | Zea mays | 2657 | 4096 |
| | | | | &gt:gi\|37778684\|gb\|AAO83390.1\| atypical | | | | |
| | | | | receptor-like kinase MARK [Zea mays] | | | | |
| | | AAK18840 | 13249436 | putative receptor kinase | 0.760057 | Oryza sativa Japonica Group | 2658 | 4097 |
| | | | | [Oryza sativa Japonica Group] | | | | |
| | | | | &gt:gi\|108710729\|gb\|ABF98524.1\| atypical | | | | |
| | | | | receptor-like kinase MARK, putative, expressed | | | | |
| | | | | [Oryza sativa Japonica Group] | | | | |
| | 376-397 | NP_001146675 | 226530240 | hypothetical protein LOC100280275 [Zea mays] | 1 | Zea mays | 2659 | 4098 |
| | | | | &gt:gi\|219888259\|gb\|ACL54504.1\| unknown | | | | |
| | | | | [Zea mays] | | | | |
| | | ACN28169 | 223948170 | unknown [Zea mays] | 0.727083 | Zea mays | 2660 | 4099 |
| | 1237-1258 | NP_001131617 | 239048016 | hypothetical protein LOC100192969 [Zea mays] | 1 | Zea mays | 2661 | 4100 |
| | | | | &gt:gi\|238908597\|gb\|ACF80108.2\| unknown | | | | |
| | | | | [Zea mays] | | | | |
| | | EAZ00403 | 54362548 | hypothetical protein OsI_22418 | 0.869565 | Oryza sativa Indica Group | 2662 | |
| | | | | [Oryza sativa Indica Group] | | | | |
| | | NP_001136728 | 219363410 | hypothetical protein LOC100216867 [Zea mays] | 0.804348 | Zea mays | 2663 | 4101 |
| | | | | &gt:gi\|194699722\|gb\|ACF83945.1\| unknown | | | | |
| | | | | [Zea mays] | | | | |
| | 72-93 | XP_002438795 | 242096609 | hypothetical protein SORBIDRAFT_10g026410 | 1 | Sorghum bicolor | 2664 | 4102 |
| | | | | [Sorghum bicolor] | | | | |
| | | | | &gt:gi\|241917018\|gb\|EER90162.1\| | | | | |
| | | | | hypothetical protein SORBIDRAFT_10g026410 | | | | |
| | | | | [Sorghum bicolor] | | | | |
| | | NP_001146201 | 226533323 | hypothetical protein LOC100279771 [Zea mays] | 0.931174 | Zea mays | 2665 | 4103 |
| | | | | &gt:gi\|219886163\|gb\|ACL53456.1\| unknown | | | | |
| | | | | [Zea mays] | | | | |
| | | EAZ01968 | 54362548 | hypothetical protein OsI_24000 | 0.717949 | Oryza sativa Indica Group | 2666 | |
| | | | | [Oryza sativa Indica Group] | | | | |
| | | BAD45848 | 47169781 | putative microtubule-associated protein | 0.717949 | Oryza sativa Japonica Group | 2667 | 4104 |
| | | | | [Oryza sativa Japonica Group] | | | | |
| | | | | &gt:gi\|52077384\|dbj\|BAD46424.1\| | | | | |
| | | | | putative microtubule-associated protein | | | | |
| | | | | [Oryza sativa Japonica Group] | | | | |
| | | | | &gt:gi\|125598116\|gb\|EAZ37896.1\| hypothetical | | | | |
| | | | | protein OsJ_22246 [Oryza sativa Japonica Group] | | | | |
| | | | | &gt:gi\|215695188\|dbj\|BAG90379.1\| | | | | |
| | | | | unnamed protein product [Oryza sativa Japonica Group] | | | | |
| | 778-799 | NP_001183778 | 308081574 | hypothetical protein LOC100502371 [Zea mays] | 1 | Zea mays | 2668 | 4105 |
| | | | | &gt:gi\|18092335\|gb\|AAL59227.1\|AF448416_5 serine | | | | |
| | | | | threonine kinase [Zea mays] | | | | |
| | 35-56 | XP_002437861 | 242094741 | hypothetical protein SORBIDRAFT_10g003930 | 1 | Sorghum bicolor | 2669 | 4106 |
| | | | | [Sorghum bicolor] | | | | |
| | | | | &gt:gi\|241916084\|gb\|EER89228.1\| | | | | |
| | | | | hypothetical protein SORBIDRAFT_10g003930 | | | | |
| | | | | [Sorghum bicolor] | | | | |
| | | ACN31616 | 223974856 | unknown [Zea mays] | 0.891008 | Zea mays | 2670 | 4107 |
| | | NP_001168581 | 293337218 | hypothetical protein LOC100382365 [Zea mays] | 0.899183 | Zea mays | 2671 | 4108 |
| | | | | &gt:gi\|223944685\|gb\|ACN26426.1\| unknown | | | | |
| | | | | [Zea mays] | | | | |
| | | | | &gt:gi\|223949323\|gb\|ACN28745.1\| | | | | |
| | | | | unknown [Zea mays] | | | | |
| | | EEE65121 | 54398660 | hypothetical protein OsJ_20187 | 0.825613 | Oryza sativa Japonica Group | 2672 | |
| | | | | [Oryza sativa Japonica Group] | | | | |
| | | BAJ90380 | 326494221 | predicted protein [Hordeum vulgare subsp. vulgare] | 0.803815 | Hordeum vulgare subsp. vulgare | 2673 | 4109 |
| | | | | &gt:gi\|326494274\|dbj\|BAJ90406.1\| predicted protein | | | | |
| | | | | [Hordeum vulgare subsp. vulgare] | | | | |
| | | ABL11233 | 118725124 | UCW116, putative lipase | 0.803815 | Hordeum vulgare subsp. vulgare | 2674 | 4110 |
| | | | | [Hordeum vulgare subsp. vulgare] | | | | |
| | | NP_001141565 | 226507421 | hypothetical protein LOC100273681 [Zea mays] | 0.779292 | Zea mays | 2675 | 4111 |
| | | | | &gt:gi\|194705086\|gb\|ACF86627.1\| unknown | | | | |
| | | | | [Zea mays] | | | | |
| | | ACG38031 | 195637125 | alpha-L-fucosidase 2 precursor [Zea mays] | 0.779292 | Zea mays | 2676 | 4112 |
| | | XP_002453668 | 242064757 | hypothetical protein SORBIDRAFT_04g010100 | 0.760218 | Sorghum bicolor | 2677 | 4113 |
| | | | | [Sorghum bicolor] | | | | |
| | | | | &gt:gi\|241933499\|gb\|EES06644.1\| | | | | |
| | | | | hypothetical protein SORBIDRAFT_04g010100 | | | | |
| | | | | [Sorghum bicolor] | | | | |
| | | NP_001056858 | 115466517 | Os06g0157000 [Oryza sativa Japonica Group] | 0.757493 | Oryza sativa Japonica Group | 2678 | 4114 |
| | | | | &gt:gi\|113594898\|dbj\|BAF18772.1\| Os06g0157000 | | | | |
| | | | | [Oryza sativa Japonica Group] | | | | |
| Predicted | 214-235 | NP_001131499 | 212720749 | hypothetical protein LOC100192836 [Zea mays] | 1 | Zea mays | 2679 | 4115 |
| siRNA | | | | &gt:gi\|494691702\|gb\|ACF79935.1\| unknown | | | | |
| 55684 | | | | [Zea mays] | | | | |
| | 275-296 | NP_001150152 | 226497009 | LOC100283781 [Zea mays] | 1 | Zea mays | 2680 | 4116 |
| | | | | &gt:gi\|195637168\|gb\|ACG38052.1\| cathepsin B-like | | | | |
| | | | | cysteine proteinase 3 precursor [Zea mays] | | | | |
| | | ACY38050 | 262217336 | cathepsin B [Dactylis glomerata] | 0.786744 | Dactylis glomerata | 2681 | 4117 |
| | | BAG90919 | 32978477 | unnamed protein product | 0.789625 | Oryza sativa Japonica Group | 2682 | 4118 |
| | | | | [Oryza sativa Japonica Group] | | | | |
| | | CAQ00112 | 194352767 | papain-like cysteine proteinase | 0.743516 | Hordeum vulgare subsp. vulgare | 2683 | 4119 |
| | | | | [Hordeum vulgare subsp. vulgare] | | | | |
| | | | | &gt:gi\|326488519\|dbj\|BAJ93928.1\| predicted | | | | |
| | | | | protein [Hordeum vulgare subsp. vulgare] | | | | |
| | | | | &gt:gi\|326508126\|dbj\|BAJ99330.1\| predicted | | | | |
| | | | | protein [Hordeum vulgare subsp. vulgare] | | | | |
| | | CAC83720 | 40643249 | cathepsin B [Hordeum vulgare subsp. vulgare] | 0.74928 | Hordeum vulgare subsp. vulgare | 2684 | 4120 |
| | | | | &gt:gi\|326494236\|dbj\|BAJ90387.1\| predicted | | | | |
| | | | | protein [Hordeum vulgare subsp. vulgare] | | | | |
| | | | | &gt:gi\|326499864\|dbj\|BAJ90767.1\| predicted | | | | |
| | | | | protein [Hordeum vulgare subsp. vulgare] | | | | |
| | | BAJ90118 | 326490901 | predicted protein [Hordeum vulgare subsp. vulgare] | 0.737752 | Hordeum vulgare subsp. vulgare | 2685 | 4121 |
| | | | | &gt:gi\|326508404\|dbj\|BAJ99469.1\| predicted | | | | |
| | | | | protein [Hordeum vulgare subsp. vulgare] | | | | |
| | | | | &gt:gi\|326514912\|dbj\|BAJ99817.1\| predicted | | | | |
| | | | | protein [Hordeum vulgare subsp. vulgare] | | | | |
| | | CAA46810 | 21692 | cathepsin B [Triticum aestivum] | 0.73487 | Triticum aestivum | 2686 | 4122 |
| | | CAA46811 | 21698 | cathepsin B [Triticum aestivum] | 0.717579 | Triticum aestivum | 2687 | 4123 |
| | 260-281 | NP_001146149 | 226505901 | hypothetical protein LOC100279718 [Zea mays] | 1 | Zea mays | 2688 | 4124 |
| | | | | &gt:gi\|219885973\|gb\|ACL53361.1\| unknown | | | | |
| | | | | [Zea mays] | | | | |
| | | XP_002463310 | 242051131 | hypothetical protein SORBIDRAFT_02g041560 | 0.802419 | Sorghum bicolor | 2689 | 4125 |
| | | | | [Sorghum bicolor] | | | | |
| | | | | &gt:gi\|241926687\|gb\|EER99831.1\| | | | | |
| | | | | hypothetical protein SORBIDRAFT_02g041560 | | | | |
| | | | | [Sorghum bicolor] | | | | |
| | 654-675 | NP_001143915 | 226500557 | hypothetical protein LOC100276723 [Zea mays] | 1 | Zea mays | 2690 | 4126 |
| | | | | &gt:gi\|195629462\|gb\|ACG36372.1\| hypothetical | | | | |
| | | | | protein [Zea mays] | | | | |
| | | XP_002458638 | 242058984 | hypothetical protein SORBIDRAFT_03g037170 | 0.948171 | Sorghum bicolor | 2691 | 4127 |
| | | | | [Sorghum bicolor] | | | | |
| | | | | &gt:gi\|241930613\|gb\|EES03758.1\| | | | | |
| | | | | hypothetical protein SORBIDRAFT_03g037170 | | | | |
| | | | | [Sorghum bicolor] | | | | |
| | | NP_001144570 | 226528574 | hypothetical protein LOC100277579 [Zea mays] | 0.838415 | Zea mays | 2692 | 4128 |
| | | | | &gt:gi\|195643964\|gb\|ACG41450.1\| hypothetical | | | | |
| | | | | protein [Zea mays] | | | | |
| | | EAY76156 | 54362548 | hypothetical protein OsI_04089 | 0.844512 | Oryza sativa Indica Group | 2693 | |
| | | | | [Oryza sativa Indica Group] | | | | |
| | | NP_001044532 | 115440504 | Os01g0800300 [Oryza sativa Japonica Group] | 0.844512 | Oryza sativa Japonica Group | 2694 | 4129 |
| | | | | &gt:gi\|19570984\|dbj\|BAB86411.1\| unknown | | | | |
| | | | | protein [Oryza sativa Japonica Group] | | | | |
| | | | | &gt:gi\|20804736\|dbj\|BAB92422.1\| unknown | | | | |
| | | | | protein [Oryza sativa Japonica Group] | | | | |
| | | | | &gt:gi\|113534063\|dbj\|BAF06446.1\| Os01g0800300 | | | | |
| | | | | [Oryza sativa Japonica Group] | | | | |
| | | | | &gt:gi\|215704187\|dbj\|BAG93027.1\| unnamed protein | | | | |
| | | | | product [Oryza sativa Japonica Group] | | | | |
| | | | | &gt:gi\|215704815\|dbj\|BAG94843.1\| unnamed protein | | | | |
| | | | | product [Oryza sativa Japonica Group] | | | | |
| | | | | &gt:gi\|215704819\|dbj\|BAG94847.1\| unnamed protein | | | | |
| | | | | product [Oryza sativa Japonica Group] | | | | |
| | | | | &gt:gi\|215741020\|dbj\|BAG97515.1\| unnamed protein | | | | |
| | | | | product [Oryza sativa Japonica Group] | | | | |
| | | BAK06822 | 326513163 | predicted protein | 0.783537 | Hordeum vulgare subsp. vulgare | 2695 | 4130 |
| | | | | [Hordeum vulgare subsp. vulgare] | | | | |
| | | XP_002457313 | 242056334 | hypothetical protein SORBIDRAFT_03g005440 | 0.759146 | Sorghum bicolor | 2696 | 4131 |
| | | | | [Sorghum bicolor] | | | | |
| | | | | &gt:gi\|241929288\|gb\|EES02433.1\| | | | | |
| | | | | hypothetical protein SORBIDRAFT_03g005440 | | | | |
| | | | | [Sorghum bicolor] | | | | |
| | 13-34 | XP_002465221 | 242035652 | hypothetical protein SORBIDRAFT_01g034400 | 1 | Sorghum bicolor | 2697 | 4132 |
| | | | | [Sorghum bicolor] | | | | |
| | | | | &gt:gi\|241919075\|gb\|EER92219.1\| | | | | |
| | | | | hypothetical protein SORBIDRAFT_01g034400 | | | | |
| | | | | [Sorghum bicolor] | | | | |
| | | ACF85210 | 194702251 | unknown [Zea mays] | 0.970696 | Zea mays | 2698 | 4133 |
| | | | | &gt:gi\|223942479\|gb\|ACN25323.1\| | | | | |
| | | | | unknown [Zea mays] | | | | |
| | | NP_001050195 | 115453188 | Os03g0369800 [Oryza sativa Japonica Group] | 0.879121 | Oryza sativa Japonica Group | 2699 | 4134 |
| | | | | &gt:gi\|12039356\|gb\|AAG46143.1\|AC082644_25 | | | | |
| | | | | putative vesicle soluble NSF attachment protein | | | | |
| | | | | receptor [Oryza sativa Japonica Group] | | | | |
| | | | | &gt:gi\|108708370\|gb\|ABF96165.1\| Novel plant | | | | |
| | | | | SNARE 11, putative, expressed | | | | |
| | | | | [Oryza sativa Japonica Group] | | | | |
| | | | | &gt:gi\|113548666\|dbj\|BAF12109.1\| | | | | |
| | | | | Os03g0369800 [Oryza sativa Japonica Group] | | | | |
| | | | | &gt:gi\|125586400\|gb\|EAZ27064.1\| hypothetical | | | | |
| | | | | protein OsJ_10993 [Oryza sativa Japonica Group] | | | | |
| | | | | &gt:gi\|215694052\|dbj\|BAG89251.1\| unnamed protein | | | | |
| | | | | product [Oryza sativa Japonica Group] | | | | |
| | | EAY90177 | 54362548 | hypothetical protein OsI_11742 | 0.879121 | Oryza sativa Indica Group | 2700 | |
| | | | | [Oryza sativa Indica Group] | | | | |
| | | AAU94636 | 53829386 | SNARE 12 [Oryza sativa Japonica Group] | 0.875458 | Oryza sativa Japonica Group | 2701 | 4135 |
| | | EEE67665 | 54398660 | hypothetical protein OsJ_25287 | 0.791209 | Oryza sativa Japonica Group | 2702 | |
| | | | | [Oryza sativa Japonica Group] | | | | |
| | | XP_002461096 | 242046449 | hypothetical protein SORBIDRAFT_02g040620 | 0.802198 | Sorghum bicolor | 2703 | 4136 |
| | | | | [Sorghum bicolor] | | | | |
| | | | | &gt:gi\|241924473\|gb\|EER97617.1\| | | | | |
| | | | | hypothetical protein SORBIDRAFT_02g040620 | | | | |
| | | | | [Sorghum bicolor] | | | | |
| | | NP_001151516 | 226502489 | novel plant SNARE 11 [Zea mays] | 0.798535 | Zea mays | 2704 | 4137 |
| | | | | &gt:gi\|195647358\|gb\|ACG43147.1\| | | | | |
| | | | | novel plant SNARE 11 [Zea mays] | | | | |
| | | | | &gt:gi\|219887387\|gb\|ACL54068.1\| | | | | |
| | | | | unknown [Zea mays] | | | | |
| | | NP_001060402 | 115473606 | Os07g0637400 [Oryza sativa Japonica Group] | 0.791209 | Oryza sativa Japonica Group | 2705 | 4138 |
| | | | | &gt:gi\|23237830\|dbj\|BAC16405.1\| vesicle soluble | | | | |
| | | | | NSF attachment protein receptor-like | | | | |
| | | | | protein [Oryza sativa Japonica Group] | | | | |
| | | | | &gt:gi\|113611938\|dbj\|BAF22316.1\| Os07g0637400 | | | | |
| | | | | [Oryza sativa Japonica Group] | | | | |
| | | | | &gt:gi\|215695299\|dbj\|BAG90490.1\| unnamed protein | | | | |
| | | | | product [Oryza sativa Japonica Group] | | | | |
| | | AAU94637 | 53829388 | SNARE 13 [Oryza sativa Japonica Group] | 0.791209 | Oryza sativa Japonica Group | 2706 | 4139 |
| | 295-316 | AAX11351 | 59895950 | cathepsin B-like cysteine protease | 1 | Oryza sativa Japonica Group | 2707 | 4140 |
| | | | | [Oryza sativa Japonica Group] | | | | |
| | | | | &gt:gi\|125551767\|gb\|EAY97476.1\| | | | | |
| | | | | hypothetical protein OsI_19406 | | | | |
| | | | | [Oryza sativa Indica Group] | | | | |
| | | | | &gt:gi\|215694023\|dbj\|BAG89222.1\| unnamed | | | | |
| | | | | protein product [Oryza sativa Japonica Group] | | | | |
| | | | | &gt:gi\|215712372\|dbj\|BAG94499.1\| unnamed | | | | |
| | | | | protein product [Oryza sativa Japonica Group] | | | | |
| | | | | &gt:gi\|215765382\|dbj\|BAG87079.1\| unnamed | | | | |
| | | | | protein product [Oryza sativa Japonica Group] | | | | |
| | | | | &gt:gi\|222631058\|gb\|EEE63190.1\| hypothetical | | | | |
| | | | | protein OsJ_17999 [Oryza sativa Japonica Group] | | | | |
| | | BAJ90198 | 326492683 | predicted protein | 0.726257 | Hordeum vulgare subsp. vulgare | 2708 | 4141 |
| | | | | [Hordeum vulgare subsp. vulgare] | | | | |
| | 554-575 | NP_001170197 | 293334350 | hypothetical protein LOC100384147 [Zea mays] | 1 | Zea mays | 2709 | 4142 |
| | | | | &gt:gi\|224034241\|gb\|ACN36196.1\| unknown | | | | |
| | | | | [Zea mays] | | | | |
| | 526-547 | NP_001106022 | 162461199 | putative growth-regulating factor 3 [Zea mays] | 1 | Zea mays | 2710 | 4143 |
| | | | | &gt:gi\|146008369\|gb\|ABQ01216.1\| putative | | | | |
| | | | | growth-regulating factor 3 [Zea mays] | | | | |
| | | ACG42410 | 195645883 | atGRF5 [Zea mays] | 0.9825 | Zea mays | 2711 | 4144 |
| | | XP_002454651 | 242066723 | hypothetical protein SORBIDRAFT_04g034800 | 0.805 | Sorghum bicolor | 2712 | 4145 |
| | | | | [Sorghum bicolor] | | | | |
| | | | | &gt:gi\|241934482\|gb\|EES07627.1\| | | | | |
| | | | | hypothetical protein SORBIDRAFT_04g034800 | | | | |
| | | | | [Sorghum bicolor] | | | | |
| | | NP_001048288 | 115449016 | Os02g0776900 [Oryza sativa Japonica Group] | 0.725 | Oryza sativa Japonica Group | 2713 | 4146 |
| | | | | &gt:gi\|51039831\|tpg\|DAA05205.1\| TPA_exp: | | | | |
| | | | | growth-regulating factor 1 | | | | |
| | | | | [Oryza sativa (japonica cultivar-group)] | | | | |
| | | | | &gt:gi\|113537819\|dbj\|BAF10202.1\| | | | | |
| | | | | Os02g0776900 [Oryza sativa Japonica Group] | | | | |
| | | AAF17567 | 6573148 | growth-regulating factor 1 [Oryza sativa] | 0.7275 | Oryza sativa | 2714 | 4147 |
| | | | | &gt:gi\|125541338\|gb\|EAY87733.1\| hypothetical | | | | |
| | | | | protein OsI_09149 [Oryza sativa Indica Group] | | | | |
| | | NP_001106027 | 162461967 | putative growth-regulating factor 9 [Zea mays] | 0.7125 | Zea mays | 2715 | 4148 |
| | | | | &gt:gi\|146008476\|gb\|ABQ01222.1\| putative | | | | |
| | | | | growth-regulating factor 9 [Zea mays] | | | | |
| | 257-278 | XP_002465189 | 242035588 | hypothetical protein SORBIDRAFT_01g033670 | 1 | Sorghum bicolor | 2716 | 4149 |
| | | | | [Sorghum bicolor] | | | | |
| | | | | &gt:gi\|241919043\|gb\|EER92187.1\| | | | | |
| | | | | hypothetical protein SORBIDRAFT_01g033670 | | | | |
| | | | | [Sorghum bicolor] | | | | |
| Predicted | 247-270 | NP_001105185 | 162463524 | sigma factor protein [Zea mays] | 1 | Zea mays | 2717 | 4150 |
| siRNA | | | | &gt:gi\|20159761\|gb\|AAM12034.1\| | | | | |
| 56658 | | | | sigma factor protein [Zea mays] | | | | |
| | | ACN32028 | 223975680 | unknown [Zea mays] | 0.924296 | Zea mays | 2718 | 4151 |
| | | XP_002440362 | 242089058 | hypothetical protein SORBIDRAFT_09g030350 | 0.727113 | Sorghum bicolor | 2719 | 4152 |
| | | | | [Sorghum bicolor] | | | | |
| | | | | &gt:gi\|241945647\|gb\|EES18792.1\| | | | | |
| | | | | hypothetical protein SORBIDRAFT_09g030350 | | | | |
| | | | | [Sorghum bicolor] | | | | |
| Predicted | 170-191 | NP_001147862 | 226497613 | LOC100281472 [Zea mays] | 1 | Zea mays | 2720 | 4153 |
| siRNA | | | | &gt:gi\|195614188\|gb\|ACG28924.1\| | | | | |
| 56885 | | | | transparent testa 12 protein [Zea mays] | | | | |
| | | BAJ87592 | 326511155 | predicted protein [Hordeum vulgare subsp. vulgare] | 0.778468 | Hordeum vulgare subsp. vulgare | 2721 | 4154 |
| | | | | &gt:gi\|326521392\|dbj\|BAJ96899.1\| predicted | | | | |
| | | | | protein [Hordeum vulgare subsp. vulgare] | | | | |
| | 483-504 | XP_002467897 | 242041004 | hypothetical protein SORBIDRAFT_01g036050 | 1 | Sorghum bicolor | 2722 | 4155 |
| | | | | [Sorghum bicolor] | | | | |
| | | | | &gt:gi\|241921751\|gb\|EER94895.1\| | | | | |
| | | | | hypothetical protein SORBIDRAFT_01g036050 | | | | |
| | | | | [Sorghum bicolor] | | | | |
| | | NP_001146010 | 226508499 | hypothetical protein LOC100279541 [Zea mays] | 0.945342 | Zea mays | 2723 | 4156 |
| | | | | &gt:gi\|219885317\|gb\|ACL53033.1\| | | | | |
| | | | | unknown [Zea mays] | | | | |
| | | | | &gt:gi\|223944401\|gb\|ACN26284.1\| | | | | |
| | | | | unknown [Zea mays] | | | | |
| | | Q8VXB5 | | RecName: Full = Putative potassium transporter 8; | 0.880745 | Oryza sativa Japonica Group | 2724 | |
| | | | | AltName: Full = OsHAK8 | | | | |
| | | | | &gt:gi\|108708033\|gb\|ABF95828.1\| | | | | |
| | | | | Potassium transporter 2, putative, expressed | | | | |
| | | | | [Oryza sativa Japonica Group] | | | | |
| | | | | &gt:gi\|125586181\|gb\|EAZ26845.1\| | | | | |
| | | | | hypothetical protein OsJ_10761 | | | | |
| | | | | [Oryza sativa Japonica Group] | | | | |
| | | EAY89924 | 54362548 | hypothetical protein OsI_11472 | 0.879503 | Oryza sativa Indica Group | 2725 | |
| | | | | [Oryza sativa Indica Group] | | | | |
| | | NP_001060637 | 115474076 | Os07g0679000 [Oryza sativa Japonica Group] | 0.807453 | Oryza sativa Japonica Group | 2726 | 4157 |
| | | | | &gt:gi\|75232649\|sp\|Q7XIV8.1\|HAK9_ORYSJ | | | | |
| | | | | RecName: Full = Probable potassium transporter 9; | | | | |
| | | | | AltName: Full = OsHAK9 | | | | |
| | | | | &gt:gi\|18250702\|emb\|CAD20999.1\| putative potasium | | | | |
| | | | | transporter [Oryza sativa Japonica Group] | | | | |
| | | | | &gt:gi\|33146437\|dbj\|BAC79545.1\| | | | | |
| | | | | putative potassium transporter | | | | |
| | | | | [Oryza sativa Japonica Group] | | | | |
| | | | | &gt:gi\|113612173\|dbj\|BAF2255.1\| Os07g0679000 | | | | |
| | | | | [Oryza sativa Japonica Group] | | | | |
| | | | | &gt:gi\|125559610\|gb\|EAZ05146.1\| hypothetical | | | | |
| | | | | protein OsI_27340 [Oryza sativa Indica Group] | | | | |
| | | BAE93160 | 91204711 | potassium transporter [Phragmites australis] | 0.804969 | Phragmites australis | 2727 | 4158 |
| | | BAE93159 | 91204709 | potassium transporter [Phragmites australis] | 0.803727 | Phragmites australis | 2728 | 4159 |
| | | BAE93158 | 91204707 | potassium transporter [Phragmites australis] | 0.807453 | Phragmites australis | 2729 | 4160 |
| | | EAZ41092 | 54398660 | hypothetical protein OsJ_25584 | 0.781366 | Oryza sativa Japonica Group | 2730 | |
| | | | | [Oryza sativa Japonica Group] | | | | |
| | | BAJ87873 | 326513707 | predicted protein [Hordeum vulgare subsp. vulgare] | 0.762733 | Hordeum vulgare subsp. vulgare | 2731 | 4161 |
| | | | | &gt:gi\|326525935\|dbj\|BAJ93144.1\| predicted | | | | |
| | | | | protein [Hordeum vulgare subsp. vulgare] | | | | |
| | 378-399 | XP_002438701 | 242096421 | hypothetical protein SORBIDRAFT_10g024660 | 1 | Sorghum bicolor | 2732 | 4162 |
| | | | | [Sorghum bicolor] | | | | |
| | | | | &gt:gi\|241916924\|gb\|EER90068.1\| | | | | |
| | | | | hypothetical protein SORBIDRAFT_10g024660 | | | | |
| | | | | [Sorghum bicolor] | | | | |
| | | NP_001147472 | 226504515 | potassium transporter 10 [Zea mays] | 0.937805 | Zea mays | 2733 | 4163 |
| | | | | &gt:gi\|195611632\|gb\|ACG27646.1\| | | | | |
| | | | | potassium transporter 10 [Zea mays] | | | | |
| | | BAK03495 | 326515163 | predicted protein | 0.831707 | Hordeum vulgare subsp. vulgare | 2734 | 4164 |
| | | | | [Hordeum vulgare subsp. vulgare] | | | | |
| | | CAD21000 | 18250703 | putative potasium transporter | 0.820732 | Oryza sativa Japonica Group | 2735 | 4165 |
| | | | | [Oryza sativa Japonica Group] | | | | |
| | | NP_001058116 | 115469033 | Os06g0625900 [Oryza sativa Japonica Group] | 0.828049 | Oryza sativa Japonica Group | 2736 | 4166 |
| | | | | &gt:gi\|62900352\|sp\|Q67VS5.1\|HAK10_ORYSJ | | | | |
| | | | | RecName: Full = Potassium transporter 10; | | | | |
| | | | | AltName: Full = OsHAK10 | | | | |
| | | | | &gt:gi\|18250690\|emb\|CAD20993.1\| | | | | |
| | | | | putative potasium transporter | | | | |
| | | | | [Oryza sativa Japonica Group] | | | | |
| | | | | &gt:gi\|51535727\|dbj\|BAD37744.1\| | | | | |
| | | | | putative potassium transporter KUP3p | | | | |
| | | | | [Oryza sativa Japonica Group] | | | | |
| | | | | &gt:gi\|113596156\|dbj\|BAF20030.1\| | | | | |
| | | | | Os06g0625900 [Oryza sativa Japonica Group] | | | | |
| | | CAN75895 | 123699834 | hypothetical protein VITISV_038658 | 0.7 | Vitis vinifera | 2737 | |
| | | | | [Vitis vinifera] | | | | |
| | 402-423 | XP_002463387 | 242051285 | hypothetical protein SORBIDRAFT_02g042930 | 1 | Sorghum bicolor | 2738 | 4167 |
| | | | | [Sorghum bicolor] | | | | |
| | | | | &gt:gi\|241926764\|gb\|EER99908.1\| | | | | |
| | | | | hypothetical protein SORBIDRAFT_02g042930 | | | | |
| | | | | [Sorghum bicolor] | | | | |
| | | NP_001141423 | 226503931 | hypothetical protein LOC100273533 [Zea mays] | 0.934343 | Zea mays | 2739 | 4168 |
| | | | | &gt:gi\|194704534\|gb\|ACF86351.1\| | | | | |
| | | | | unknown [Zea mays] | | | | |
| | | | | &gt:gi\|223945057\|gb\|ACN26612.1\| | | | | |
| | | | | unknown [Zea mays] | | | | |
| | | | | &gt:gi\|223948037\|gb\|ACN28102.1\| | | | | |
| | | | | unknown [Zea mays] | | | | |
| | 31-52 | ABA95869 | 108862058 | protein kinase family protein, putative, expressed | 1 | Oryza sativa Japonica Group | 2740 | |
| | | | | [Oryza sativa Japonica Group] | | | | |
| | | | | &gt:gi\|215769321\|dbj\|BAH01550.1\| unnamed protein | | | | |
| | | | | product [Oryza sativa Japonica Group] | | | | |
| | | EEE52818 | 54398660 | hypothetical protein OsJ_35327 | 0.956848 | Oryza sativa Japonica Group | 2741 | |
| | | | | [Oryza sativa Japonica Group] | | | | |
| | | EEC68910 | 54362548 | hypothetical protein OsI_37582 | 0.840525 | Oryza sativa Indica Group | 2742 | |
| | | | | [Oryza sativa Indica Group] | | | | |
| | | NP_001151569 | 226498197 | ATP binding protein [Zea mays] | 0.840525 | Zea mays | 2743 | 4169 |
| | | | | &gt:gi\|195647818\|gb\|ACG43377.1\| | | | | |
| | | | | ATP binding protein [Zea mays] | | | | |
| | | ACR35824 | 238009577 | unknown [Zea mays] | 0.838649 | Zea mays | 2744 | 4170 |
| | | NP_001141661 | 239047296 | hypothetical protein LOC100273787 [Zea mays] | 0.836773 | Zea mays | 2745 | 4171 |
| | | | | &gt:gi\|238908867\|gb\|ACF86813.2\| | | | | |
| | | | | unknown [Zea mays] | | | | |
| | | BAJ91271 | 326506063 | predicted protein [Hordeum vulgare subsp. vulgare] | 0.78424 | Hordeum vulgare subsp. vulgare | 2746 | 4172 |
| | | BAJ88388 | 326522683 | predicted protein [Hordeum vulgare subsp. vulgare] | 0.78424 | Hordeum vulgare subsp. vulgare | 2747 | 4173 |
| | | NP_001152374 | 226504771 | ATP binding protein [Zea mays] | 0.705441 | Zea mays | 2748 | 4174 |
| | | | | &gt:gi\|195655683\|gb\|ACG47309.1\| | | | | |
| | | | | ATP binding protein [Zea mays] | | | | |
| | | XP_002449038 | 242067522 | hypothetical protein SORBIDRAFT_05g003840 | 0.716698 | Sorghum bicolor | 2749 | 4175 |
| | | | | [Sorghum bicolor] | | | | |
| | | | | &gt:gi\|241934881\|gb\|EES08026.1\| | | | | |
| | | | | hypothetical protein SORBIDRAFT_05g003840 | | | | |
| | | | | [Sorghum bicolor] | | | | |
| | 819-840 | EEE68876 | 54398660 | hypothetical protein OsJ_27688 | 1 | Oryza sativa Japonica Group | 2750 | |
| | | | | [Oryza sativa Japonica Group] | | | | |
| | | EEC83753 | 54362548 | hypothetical protein OsI_29621 | 0.997436 | Oryza sativa Indica Group | 2751 | |
| | | | | [Oryza sativa Indica Group] | | | | |
| | 132-153 | XP_002441141 | 242090616 | hypothetical protein SORBIDRAFT_09g021160 | 1 | Sorghum bicolor | 2752 | 4176 |
| | | | | [Sorghum bicolor] | | | | |
| | | | | &gt:gi\|241946426\|gb\|EES19571.1\| | | | | |
| | | | | hypothetical protein SORBIDRAFT_09g021160 | | | | |
| | | | | [Sorghum bicolor] | | | | |
| | | NP_001105120 | 162461887 | potassium channel protein ZMK2 [Zea mays] | 0.906921 | Zea mays | 2753 | 4177 |
| | | | | &gt:gi\|5830781\|emb\|CAB54856.1\| potassium | | | | |
| | | | | channel protein ZMK2 [Zea mays] | | | | |
| | | NP_001147796 | 226503366 | potassium channel AKT2/3 [Zea mays] | 0.896181 | Zea mays | 2754 | 4178 |
| | | | | &gt:gi\|195613792\|gb\|ACG28726.1\| potassium | | | | |
| | | | | channel AKT2/3 [Zea mays] | | | | |
| | | XP_002441145 | 242090624 | hypothetical protein SORBIDRAFT_09g021210 | 0.872315 | Sorghum bicolor | 2755 | 4179 |
| | | | | [Sorghum bicolor] | | | | |
| | | | | &gt:gi\|241946430\|gb\|EES19575.1\| | | | | |
| | | | | hypothetical protein SORBIDRAFT_09g021210 | | | | |
| | | | | [Sorghum bicolor] | | | | |
| | | XP_002441143 | 242090620 | hypothetical protein SORBIDRAFT_09g021190 | 0.874702 | Sorghum bicolor | 2756 | 4180 |
| | | | | [Sorghum bicolor] | | | | |
| | | | | &gt:gi\|241946428\|gb\|EES19573.1\| | | | | |
| | | | | hypothetical protein SORBIDRAFT_09g021190 | | | | |
| | | | | [Sorghum bicolor] | | | | |
| | | Q75HP9 | | RecName: Full = Potassium channel AKT2 | 0.791169 | Oryza sativa Japonica Group | 2757 | |
| | | | | &gt:gi\|46391141\|gb\|AAS90668.1\| putative potassium | | | | |
| | | | | channel protein [Oryza sativa Japonica Group] | | | | |
| | | | | &gt:gi\|222631670\|gb\|EEE63802.1\| hypothetical | | | | |
| | | | | protein OsJ_18626 [Oryza sativa Japonica Group] | | | | |
| | | EAY98139 | 54362548 | hypothetical protein OsI_20054 | 0.791169 | Oryza sativa Indica Group | 2758 | |
| | | | | [Oryza sativa Indica Group] | | | | |
| | | ABE99811 | 93138732 | inwardly rectifying potassium channel | 0.74821 | Hordeum vulgare | 2759 | 4181 |
| | | | | AKT2 [Hordeum vulgare] | | | | |
| | | | | &gt:gi\|326499398\|dbj\|BAJ86010.1\| predicted | | | | |
| | | | | protein [Hordeum vulgare subsp. vulgare] | | | | |
| | | BAJ86681 | 326507875 | predicted protein | 0.747017 | Hordeum vulgare subsp. vulgare | 2760 | 4182 |
| | | | | [Hordeum vulgare subsp. vulgare] | | | | |
| | | BAJ96949 | 326523876 | predicted protein | 0.747017 | Hordeum vulgare subsp. vulgare | 2761 | 4183 |
| | | | | [Hordeum vulgare subsp. vulgare] | | | | |
| | 1374-1395 | NP_001062056 | 115476919 | Os08g0480000 [Oryza sativa Japonica Group] | 1 | Oryza sativa Japonica Group | 2762 | 4184 |
| | | | | &gt:gi\|42408579\|dbj\|BAD09756.1\| putative ripening | | | | |
| | | | | regulated protein [Oryza sativa Japonica Group] | | | | |
| | | | | &gt:gi\|113624025\|dbj\|BAF23970.1\| Os08g0480000 | | | | |
| | | | | [Oryza sativa Japonica Group] | | | | |
| | | | | &gt:gi\|215695384\|dbj\|BAG90575.1\| unnamed protein | | | | |
| | | | | product [Oryza sativa Japonica Group] | | | | |
| Predicted | 213-230 | ACR33787 | 237908822 | cytochrome P450 monooxygenase [Zea mays] | 1 | Zea mays | 2763 | 4185 |
| siRNA | | | | | | | | |
| 57689 | | | | | | | | |
| | | XP_002456213 | 242054134 | hypothetical protein SORBIDRAFT_03g032220 | 0.790262 | Sorghum bicolor | 2764 | 4186 |
| | | | | [Sorghum bicolor] | | | | |
| | | | | &gt:gi\|241928188\|gb\|EES01333.1\| | | | | |
| | | | | hypothetical protein SORBIDRAFT_03g032220 | | | | |
| | | | | [Sorghum bicolor] | | | | |
| | | EAY75509 | 54362548 | hypothetical protein OsI_03409 | 0.70412 | Oryza sativa Indica Group | 2765 | |
| | | | | [Oryza sativa Indica Group] | | | | |
| | | NP_001172524 | 297720324 | Os01g0701300 [Oryza sativa Japonica Group] | 0.705993 | Oryza sativa Japonica Group | 2766 | 4187 |
| | | | | &gt:gi\|255673594\|dbj\|BAH91254.1\| Os01g0701300 | | | | |
| | | | | [Oryza sativa Japonica Group] | | | | |
| | 809-826 | XP_002439318 | 242086970 | hypothetical protein SORBIDRAFT_09g004290 | 1 | Sorghum bicolor | 2767 | 4188 |
| | | | | [Sorghum bicolor] | | | | |
| | | | | &gt:gi\|241944603\|gb\|EES17748.1\| | | | | |
| | | | | hypothetical protein SORBIDRAFT_09g004290 | | | | |
| | | | | [Sorghum bicolor] | | | | |
| | | NP_001132852 | 212721551 | hypothetical protein LOC100194344 [Zea mays] | 0.989362 | Zea mays | 2768 | 4189 |
| | | | | &gt:gi\|195606262\|gb\|ACG24961.1\| | | | | |
| | | | | 60S ribosomal protein L18 [Zea mays] | | | | |
| | | | | &gt:gi\|195625914\|gb\|ACG34787.1\| | | | | |
| | | | | 60S ribosomal protein L18 [Zea mays] | | | | |
| | | | | &gt:gi\|195640242\|gb\|ACG39589.1\| | | | | |
| | | | | 60S ribosomal protein L18 [Zea mays] | | | | |
| | | | | &gt:gi\|238006204\|gb\|ACR34137.1\| unknown | | | | |
| | | | | [Zea mays] | | | | |
| | | NP_001054688 | 115462176 | Os05g0155100 [Oryza sativa Japonica Group] | 0.968085 | Oryza sativa Japonica Group | 2769 | 4190 |
| | | | | &gt:gi\|54291850\|gb\|AAV32218.1\| | | | | |
| | | | | cytoplasmic ribosomal protein L18 | | | | |
| | | | | [Oryza sativa Japonica Group] | | | | |
| | | | | &gt:gi\|113578239\|dbj\|BAF16602.1\| Os05g0155100 | | | | |
| | | | | [Oryza sativa Japonica Group] | | | | |
| | | | | &gt:gi\|125550901\|gb\|EAY96610.1\| hypothetical | | | | |
| | | | | protein OsI_18515 [Oryza sativa Indica Group] | | | | |
| | | | | &gt:gi\|149392184\|gb\|ABR25945.1\| | | | | |
| | | | | 60S ribosomal protein 118 | | | | |
| | | | | [Oryza sativa Indica Group] | | | | |
| | | | | &gt:gi\|215692755\|dbj\|BAG88175.1\| unnamed protein | | | | |
| | | | | product [Oryza sativa Japonica Group] | | | | |
| | | | | &gt:gi\|215767982\|dbj\|BAH00211.1\| unnamed protein | | | | |
| | | | | product [Oryza sativa Japonica Group] | | | | |
| | | | | &gt:gi\|222630251\|gb\|EEE62383.1\| hypothetical | | | | |
| | | | | protein OsJ_17172 [Oryza sativa Japonica Group] | | | | |
| | | BAJ90421 | 326494303 | predicted protein | 0.925532 | Hordeum vulgare subsp. vulgare | 2770 | 4191 |
| | | | | [Hordeum vulgare subsp. vulgare] | | | | |
| | | | | &gt:gi\|326527807\|dbj\|BAJ88976.1\| predicted | | | | |
| | | | | protein [Hordeum vulgare subsp. vulgare] | | | | |
| | | 3IZ5_R | | Chain R, Localization Of The Large Subunit | 0.920213 | Triticum aestivum | 2771 | |
| | | | | Ribosomal Proteins Into A 5.5 A Cryo-Em Map Of | | | | |
| | | | | Triticum Aestivum Translating 80s Ribosome | | | | |
| | | | | &gt:gi\|315113257\|pdb\|3IZR\|R Chain R, Localization | | | | |
| | | | | Of The Large Subunit Ribosomal Proteins Into A 5.5 | | | | |
| | | | | A Cryo-Em Map Of Triticum Aestivum Translating | | | | |
| | | | | 80s Ribosome &gt:gi\|57471708\|gb\|AAW50985.1\| | | | | |
| | | | | ribosomal protein L18 [Triticum aestivum] | | | | |
| | | XP_002461201 | 242046909 | hypothetical protein SORBIDRAFT_02g042750 | 0.93617 | Sorghum bicolor | 2772 | 4192 |
| | | | | [Sorghum bicolor] | | | | |
| | | | | &gt:gi\|241924578\|gb\|EER97722.1\| | | | | |
| | | | | hypothetical protein SORBIDRAFT_02g042750 | | | | |
| | | | | [Sorghum bicolor] | | | | |
| | | XP_002465302 | 242035814 | hypothetical protein SORBIDRAFT_01g035860 | 0.941489 | Sorghum bicolor | 2773 | 4193 |
| | | | | [Sorghum bicolor] | | | | |
| | | | | &gt:gi\|241919156\|gb\|EER92300.1\| | | | | |
| | | | | hypothetical protein SORBIDRAFT_01g035860 | | | | |
| | | | | [Sorghum bicolor] | | | | |
| | | NP_001131538 | 212721317 | hypothetical protein LOC100192878 [Zea mays] | 0.93617 | Zea mays | 2774 | 4194 |
| | | | | &gt:gi\|195606022\|gb\|ACG24841.1\| | | | | |
| | | | | 60S ribosomal protein L18 [Zea mays] | | | | |
| | | | | &gt:gi\|195620212\|gb\|ACG31936.1\| | | | | |
| | | | | 60S ribosomal protein L18 [Zea mays] | | | | |
| | | NP_001050069 | 115452936 | Os03g0341100 [Oryza sativa Japonica Group] | 0.909574 | Oryza sativa Japonica Group | 2775 | 4195 |
| | | | | &gt:gi\|108708066\|gb\|ABF95861.1\| | | | | |
| | | | | 60S ribosomal protein L18, putative, expressed | | | | |
| | | | | [Oryza sativa Japonica Group] | | | | |
| | | | | &gt:gi\|113548540\|dbj\|BAF11983.1\| | | | | |
| | | | | Os03g0341100 [Oryza sativa Japonica Group] | | | | |
| | | | | &gt:gi\|218192805\|gb\|EEC75232.1\| hypothetical | | | | |
| | | | | protein OsI_11506 [Oryza sativa Indica Group] | | | | |
| | | | | &gt:gi\|222624903\|gb\|EEE59035.1\| hypothetical | | | | |
| | | | | protein OsJ_10788 [Oryza sativa Japonica Group] | | | | |
| | | NP_001060617 | 115474036 | Os07g0674700 [Oryza sativa Japonica Group] | 0.898936 | Oryza sativa Japonica Group | 2776 | 4196 |
| | | | | &gt:gi\|34393858\|dbj\|BAC83538.1\| putative | | | | |
| | | | | cytoplasmic ribosomal protein L18 | | | | |
| | | | | [Oryza sativa Japonica Group] | | | | |
| | | | | &gt:gi\|50509811\|dbj\|BAD31974.1\| | | | | |
| | | | | putative cytoplasmic ribosomal protein L18 | | | | |
| | | | | [Oryza sativa Japonica Group] | | | | |
| | | | | &gt:gi\|113612153\|dbj\|BAF22531.1\| Os07g0674700 | | | | |
| | | | | [Oryza sativa Japonica Group] | | | | |
| | | | | &gt:gi\|125559582\|gb\|EAZ05118.1\| hypothetical | | | | |
| | | | | protein OsI_27311 [Oryza sativa Indica Group] | | | | |
| | | | | &gt:gi\|215694724\|dbj\|BAG89915.1\| unnamed protein | | | | |
| | | | | product [Oryza sativa Japonica Group] | | | | |
| | | | | &gt:gi\|222637674\|gb\|EEE67806.1\| hypothetical | | | | |
| | | | | protein OsJ_25556 [Oryza sativa Japonica Group] | | | | |
| | 562-579 | XP_002445227 | 242080916 | hypothetical protein SORBIDRAFT_07g006330 | 1 | Sorghum bicolor | 2777 | 4197 |
| | | | | [Sorghum bicolor] | | | | |
| | | | | &gt:gi\|241941577\|gb\|EES14722.1\| | | | | |
| | | | | hypothetical protein SORBIDRAFT_07g006330 | | | | |
| | | | | [Sorghum bicolor] | | | | |
| | | NP_001168868 | 293333741 | hypothetical protein LOC100382673 [Zea mays] | 0.920875 | Zea mays | 2778 | 4198 |
| | | | | &gt:gi\|223973427\|gb\|ACN30901.1\| unknown | | | | |
| | | | | [Zea mays] | | | | |
| | | NP_001131176 | 212721253 | hypothetical protein LOC100192484 [Zea mays] | 0.914141 | Zea mays | 2779 | 4199 |
| | | | | &gt:gi\|194690786\|gb\|ACF79477.1\| unknown | | | | |
| | | | | [Zea mays] | | | | |
| | | EEC83121 | 54362548 | hypothetical protein OsI_28280 | 0.787879 | Oryza sativa Indica Group | 2780 | |
| | | | | [Oryza sativa Indica Group] | | | | |
| | | NP_001061275 | 115475356 | Os08g0224200 [Oryza sativa Japonica Group] | 0.786195 | Oryza sativa Japonica Group | 2781 | 4200 |
| | | | | &gt:gi\|38636667\|dbj\|BAD02987.1\| putative | | | | |
| | | | | Rubisco subunit binding-protein beta subunit | | | | |
| | | | | [Oryza sativa Japonica Group] | | | | |
| | | | | &gt:gi\|113623244\|dbj\|BAF23189.1\| | | | | |
| | | | | Os08g0224200 [Oryza sativa Japonica Group] | | | | |
| | | | | &gt:gi\|215715262\|dbj\|BAG95013.1\| unnamed | | | | |
| | | | | protein product [Oryza sativa Japonica Group] | | | | |
| | | EEE68253 | 54398660 | hypothetical protein OsJ_26460 | 0.740741 | Oryza sativa Japonica Group | 2782 | |
| | | | | [Oryza sativa Japonica Group] | | | | |
| | 544-561 | ACF83391 | 194698613 | unknown [Zea mays] | 1 | Zea mays | 2783 | 4201 |
| | | NP_001105647 | 162458977 | LOC542653 [Zea mays] | 0.993569 | Zea mays | 2784 | 4202 |
| | | | | &gt:gi\|28950670\|gb\|AAO63267.1\| | | | | |
| | | | | legumin-like protein [Zea mays] | | | | |
| | | ACG36012 | 195628363 | legumin-like protein [Zea mays] | 0.987138 | Zea mays | 2785 | 4203 |
| | | XP_002440480 | 242089294 | hypothetical protein SORBIDRAFT_09g001680 | 0.874598 | Sorghum bicolor | 2786 | 4204 |
| | | | | [Sorghum bicolor] | | | | |
| | | | | &gt:gi\|241945765\|gb\|EES18910.1\| | | | | |
| | | | | hypothetical protein SORBIDRAFT_09g001680 | | | | |
| | | | | [Sorghum bicolor] | | | | |
| | | NP_001150066 | 226498887 | legumin-like protein [Zea mays] | 0.881029 | Zea mays | 2787 | 4205 |
| | | | | &gt:gi\|195607700\|gb\|ACG25680.1\| | | | | |
| | | | | legumin-like protein [Zea mays] | | | | |
| | | | | &gt:gi\|195636432\|gb\|ACG37684.1\| | | | | |
| | | | | legumin-like protein [Zea mays] | | | | |
| | | | | &gt:gi\|224033321\|gb\|ACN35736.1\| | | | | |
| | | | | unknown [Zea mays] | | | | |
| | | NP_001105062 | 162459029 | legumin-like protein [Zea mays] | 0.893891 | Zea mays | 2788 | 4206 |
| | | | | &gt:gi\|28950668\|gb\|AAO63266.1\| | | | | |
| | | | | legumin-like protein [Zea mays] | | | | |
| | | ACG36544 | 195629805 | legumin-like protein [Zea mays] | 0.890675 | Zea mays | 2789 | 4207 |
| | | BAJ94492 | 326494745 | predicted protein | 0.85209 | Hordeum vulgare subsp. vulgare | 2790 | 4208 |
| | | | | [Hordeum vulgare subsp. vulgare] | | | | |
| | | | | &gt:gi\|326511543\|dbj\|BAJ91916.1\| predicted | | | | |
| | | | | protein [Hordeum vulgare subsp. vulgare] | | | | |
| | | NP_001054469 | 115461738 | Os05g0116000 [Oryza sativa Japonica Group] | 0.784566 | Oryza sativa Japonica Group | 2791 | 4209 |
| | | | | &gt:gi\|52353520\|gb\|AAU44086.1\| putative | | | | |
| | | | | legumin [Oryza sativa Japonica Group] | | | | |
| | | | | &gt:gi\|55168333\|gb\|AAV44198.1\| putative | | | | |
| | | | | legumin [Oryza sativa Japonica Group] | | | | |
| | | | | &gt:gi\|113578020\|dbj\|BAF16383.1\| Os05g0116000 | | | | |
| | | | | [Oryza sativa Japonica Group] | | | | |
| | | | | &gt:gi\|125550596\|gb\|EAY96305.1\| hypothetical | | | | |
| | | | | protein OsI_18204 [Oryza sativa Indica Group] | | | | |
| | | | | &gt:gi\|215764963\|dbj\|BAG86660.1\| unnamed | | | | |
| | | | | protein product [Oryza sativa Japonica Group] | | | | |
| | | | | &gt:gi\|215768422\|dbj\|BAH00651.1\| unnamed | | | | |
| | | | | protein product [Oryza sativa Japonica Group] | | | | |
| | | EEE62108 | 54398660 | hypothetical protein OsJ_16892 | 0.78135 | Oryza sativa Japonica Group | 2792 | |
| | | | | [Oryza sativa Japonica Group] | | | | |
| | 849-866 | XP_002458930 | 242059568 | hypothetical protein SORBIDRAFT_03g042880 | 1 | Sorghum bicolor | 2793 | 4210 |
| | | | | [Sorghum bicolor] | | | | |
| | | | | &gt:gi\|241930905\|gb\|EES04050.1\| | | | | |
| | | | | hypothetical protein SORBIDRAFT_03g042880 | | | | |
| | | | | [Sorghum bicolor] | | | | |
| | | NP_001169575 | 293331910 | hypothetical protein LOC100383455 [Zea mays] | 0.900249 | Zea mays | 2794 | 4211 |
| | | | | &gt:gi\|224030179\|gb\|ACN34165.1\| unknown | | | | |
| | | | | [Zea mays] | | | | |
| | | EEC71972 | 54362548 | hypothetical protein OsI_04809 | 0.869077 | Oryza sativa Indica Group | 2795 | |
| | | | | [Oryza sativa Indica Group] | | | | |
| | | NP_001045108 | 115441656 | Os01g0901000 [Oryza sativa Japonica Group] | 0.86409 | Oryza sativa Japonica Group | 2796 | 4212 |
| | | | | &gt:gi\|56784865\|dbj\|BAD82105.1\| putative | | | | |
| | | | | bg55 [Oryza sativa Japonica Group] | | | | |
| | | | | &gt:gi\|113534639\|dbj\|BAF07022.1\| Os01g0901000 | | | | |
| | | | | [Oryza sativa Japonica Group] | | | | |
| | | | | &gt:gi\|215715204\|dbj\|BAG94955.1\| unnamed | | | | |
| | | | | protein product [Oryza sativa Japonica Group] | | | | |
| | | BAB90523 | 20161598 | B1065G12.5 [Oryza sativa Japonica Group] | 0.814214 | Oryza sativa Japonica Group | 2797 | 4213 |
| | | BAK03281 | 326512747 | predicted protein | 0.837905 | Hordeum vulgare subsp. vulgare | 2798 | 4214 |
| | | | | [Hordeum vulgare subsp. vulgare] | | | | |
| | | EEE55827 | 54398660 | hypothetical protein OsJ_04433 | 0.820449 | Oryza sativa Japonica Group | 2799 | |
| | | | | [Oryza sativa Japonica Group] | | | | |
| | 1153-1170 | NP_001151583 | 226492901 | WRKY74 - superfamily of TFs having WRKY and | 1 | Zea mays | 2800 | 4215 |
| | | | | zinc finger domains [Zea mays] | | | | |
| | | | | &gt:gi\|195647918\|gb\|ACG43427.1\| WRKY74 - | | | | |
| | | | | superfamily of TFs having WRKY and zinc | | | | |
| | | | | finger domains [Zea mays] | | | | |
| | | XP_002460068 | 242044393 | hypothetical protein SORBIDRAFT_02g022280 | 0.774834 | Sorghum bicolor | 2801 | 4216 |
| | | | | [Sorghum bicolor] | | | | |
| | | | | &gt:gi\|241923445\|gb\|EER96589.1\| | | | | |
| | | | | hypothetical protein SORBIDRAFT_02g022280 | | | | |
| | | | | [Sorghum bicolor] | | | | |
| Predicted | 822-839 | XP_002455452 | 242052612 | hypothetical protein SORBIDRAFT_03g011010 | 1 | Sorghum bicolor | 2802 | 4217 |
| siRNA | | | | [Sorghum bicolor] | | | | |
| 58108 | | | | &gt:gi\|63087720\|emb\|CAI93175.1\| | | | | |
| | | | | glycosyltransferase [Sorghum bicolor] | | | | |
| | | | | &gt:gi\|241927427\|gb\|EES00572.1\| hypothetical | | | | |
| | | | | protein SORBIDRAFT_03g011010 | | | | |
| | | | | [Sorghum bicolor] | | | | |
| | | NP_001105783 | 162459421 | glycosyltransferase [Zea mays] | 0.876471 | Zea mays | 2803 | 4218 |
| | | | | &gt:gi\|63087722\|emb\|CAI93176.1\| | | | | |
| | | | | glycosyltransferase [Zea mays] | | | | |
| | 285-302 | NP_001132904 | 212723947 | hypothetical protein LOC100194403 [Zea mays] | 1 | Zea mays | 2804 | 4219 |
| | | | | &gt:gi\|194695716\|gb\|ACF81942.1\| unknown | | | | |
| | | | | [Zea mays] | | | | |
| | | AEF30550 | 333385002 | serine/threonine protein kinase Stpk-B | 0.77037 | Triticum aestivum | 2805 | 4220 |
| | | | | [Triticum aestivum] | | | | |
| | | AEF30549 | 333385000 | serine/threonine protein kinase Stpk-D | 0.762963 | Triticum aestivum | 2806 | 4221 |
| | | | | [Triticum aestivum] | | | | |
| | | BAJ93188 | 326526022 | predicted protein | 0.762963 | Hordeum vulgare subsp. vulgare | 2807 | 4222 |
| | | | | [Hordeum vulgare subsp. vulgare] | | | | |
| | | AEF30546 | 333384994 | serine/threonine protein kinase Stpk-V | 0.760494 | Dasypyrum villosum | 2808 | 4223 |
| | | | | [Dasypyrum villosum] | | | | |
| | | | | &gt:gi\|333384997\|gb\|AEF30547.1\| | | | | |
| | | | | serine/threonine protein kinase Stpk-V | | | | |
| | | | | [Dasypyrum villosum] | | | | |
| | | AEF30548 | 333384998 | serine/threonine protein kinase Stpk-A | 0.760494 | Triticum aestivum | 2809 | 4224 |
| | | | | [Triticum aestivum] | | | | |
| | | NP_001045995 | 115444430 | Os02g0165100 [Oryza sativa Japonica Group] | 0.745679 | Oryza sativa Japonica Group | 2810 | 4225 |
| | | | | &gt:gi\|49388058\|dbj\|BAD25172.1\| putative receptor | | | | |
| | | | | protein kinase PERK [Oryza sativa Japonica Group] | | | | |
| | | | | &gt:gi\|49388415\|dbj\|BAD25548.1\| putative receptor | | | | |
| | | | | protein kinase PERK [Oryza sativa Japonica Group] | | | | |
| | | | | &gt:gi\|113535526\|dbj\|BAF07909.1\| Os02g0165100 | | | | |
| | | | | [Oryza sativa Japonica Group] | | | | |
| | | | | &gt:gi\|215694876\|dbj\|BAG90067.1\| unnamed | | | | |
| | | | | protein product [Oryza sativa Japonica Group] | | | | |
| | | EEE56371 | 54398660 | hypothetical protein OsJ_05508 | 0.74321 | Oryza sativa Japonica Group | 2811 | |
| | | | | [Oryza sativa Japonica Group] | | | | |
| | 677-694 | EEE56138 | 54398660 | hypothetical protein OsJ_05018 | 1 | Oryza sativa Japonica Group | 2812 | |
| | | | | [Oryza sativa Japonica Group] | | | | |
| | | NP_001045614 | 115443668 | Os02g0104700 [Oryza sativa Japonica Group] | 0.98829 | Oryza sativa Japonica Group | 2813 | 4226 |
| | | | | &gt:gi\|75131025\|sp\|Q6YPG5.1\|NOS_ORYSJ | | | | |
| | | | | RecName: Full = Putative nitric oxide synthase | | | | |
| | | | | &gt:gi\|40363768\|dbj\|BAD06278.1\| putative | | | | |
| | | | | GTPase [Oryza sativa Japonica Group] | | | | |
| | | | | &gt:gi\|41052546\|dbj\|BAD07538.1\| putative | | | | |
| | | | | GTPase [Oryza sativa Japonica Group] | | | | |
| | | | | &gt:gi\|113535145\|dbj\|BAF07528.1\| Os02g0104700 | | | | |
| | | | | [Oryza sativa Japonica Group] | | | | |
| | | EAY84101 | 54362548 | hypothetical protein OsI_05484 | 0.985948 | Oryza sativa Indica Group | 2814 | |
| | | | | [Oryza sativa Indica Group] | | | | |
| | | NP_001168044 | 293331104 | hypothetical protein LOC100381773 [Zea mays] | 0.894614 | Zea mays | 2815 | 4227 |
| | | | | &gt:gi\|223945667\|gb\|ACN26917.1\| unknown | | | | |
| | | | | [Zea mays] | | | | |
| | | ADK47527 | 301015572 | NOA1/RIF1 protein [Medicago truncatula] | 0.730679 | Medicago truncatula | 2816 | 4228 |
| | 640-657 | XP_002446751 | 242073629 | hypothetical protein SORBIDRAFT_06g021760 | 1 | Sorghum bicolor | 2817 | 4229 |
| | | | | [Sorghum bicolor] | | | | |
| | | | | &gt:gi\|241937934\|gb\|EES11079.1\| | | | | |
| | | | | hypothetical protein SORBIDRAFT_06g021760 | | | | |
| | | | | [Sorghum bicolor] | | | | |
| | | NP_001053236 | 115459271 | Os04g0502800 [Oryza sativa Japonica Group] | 0.883362 | Oryza sativa Japonica Group | 2818 | 4230 |
| | | | | &gt:gi\|113564807\|dbj\|BAF15150.1\| Os04g0502800 | | | | |
| | | | | [Oryza sativa Japonica Group] | | | | |
| | | BAK00120 | 326519493 | predicted protein | 0.866209 | Hordeum vulgare subsp. vulgare | 2819 | 4231 |
| | | | | [Hordeum vulgare subsp. vulgare] | | | | |
| | | EEE61279 | 54398660 | hypothetical protein OsJ_15362 | 0.881647 | Oryza sativa Japonica Group | 2820 | |
| | | | | [Oryza sativa Japonica Group] | | | | |
| | | CAE02931 | 70663914 | OSJNBa0014K14.3 | 0.881647 | Oryza sativa Japonica Group | 2821 | 4232 |
| | | | | [Oryza sativa Japonica Group] | | | | |
| | | CAH67585 | 116310792 | OSIGBa0112M24.2 | 0.883362 | Oryza sativa Indica Group | 2822 | 4233 |
| | | | | [Oryza sativa Indica Group] | | | | |
| | | EEC77582 | 54362548 | hypothetical protein OsI_16534 | 0.883362 | Oryza sativa Indica Group | 2823 | |
| | | | | [Oryza sativa Indica Group] | | | | |
| | | NP_001168646 | 293332436 | hypothetical protein LOC100382433 [Zea mays] | 0.70669 | Zea mays | 2824 | 4234 |
| | | | | &gt:gi\|223949891\|gb\|ACN29029.1\| unknown | | | | |
| | | | | [Zea mays] | | | | |
| | 927-944 | XP_002451348 | 242060117 | hypothetical protein SORBIDRAFT_04g000530 | 1 | Sorghum bicolor | 2825 | 4235 |
| | | | | [Sorghum bicolor] | | | | |
| | | | | &gt:gi\|241931179\|gb\|EES04324.1\| | | | | |
| | | | | hypothetical protein SORBIDRAFT_04g000530 | | | | |
| | | | | [Sorghum bicolor] | | | | |
| | | BAK03882 | 326519914 | predicted protein | 0.838828 | Hordeum vulgare subsp. vulgare | 2826 | 4236 |
| | | | | [Hordeum vulgare subsp. vulgare] | | | | |
| | 1528-1545 | NP_001143089 | 226498753 | hypothetical protein LOC100275564 [Zea mays] | 1 | Zea mays | 2827 | 4237 |
| | | | | &gt:gi\|195614134\|gb\|ACG28897.1\| hypothetical | | | | |
| | | | | protein [Zea mays] | | | | |
| | | XP_002453857 | 242065135 | hypothetical protein SORBIDRAFT_04g019720 | 0.866758 | Sorghum bicolor | 2828 | 4238 |
| | | | | [Sorghum bicolor] | | | | |
| | | | | &gt:gi\|241933688\|gb\|EES06833.1\| | | | | |
| | | | | hypothetical protein SORBIDRAFT_04g019720 | | | | |
| | | | | [Sorghum bicolor] | | | | |
| | | EAY74088 | 54362548 | hypothetical protein OsI_01975 | 0.739011 | Oryza sativa Indica Group | 2829 | |
| | | | | [Oryza sativa Indica Group] | | | | |
| | | BAB61143 | 14587202 | unknown protein [Oryza sativa Japonica Group] | 0.737637 | Oryza sativa Japonica Group | 2830 | 4239 |
| | | | | &gt:gi\|15408639\|dbj\|BAB64056.1\| unknown protein | | | | |
| | | | | [Oryza sativa Japonica Group] | | | | |
| | | | | &gt:gi\|125570433\|gb\|EAZ11948.1\| hypothetical | | | | |
| | | | | protein OsJ_01821 [Oryza sativa Japonica Group] | | | | |
| | | | | &gt:gi\|215741489\|dbj\|BAG97984.1\| unnamed protein | | | | |
| | | | | product [Oryza sativa Japonica Group] | | | | |
| Predicted | 1481-1501 | ACL53547 | 219886344 | unknown [Zea mays] | 1 | Zea mays | 2831 | 4240 |
| siRNA | | | | | | | | |
| 58158 | | | | | | | | |
| | | ACL54434 | 219888118 | unknown [Zea mays] | 0.964789 | Zea mays | 2832 | 4241 |
| | | ACF88046 | 194707923 | unknown [Zea mays] | 0.964789 | Zea mays | 2833 | 4242 |
| | | ACG44902 | 195650868 | ureide permease 2 [Zea mays] | 0.960094 | Zea mays | 2834 | 4243 |
| | | NP_001066832 | 115488689 | Os12g0502800 [Oryza sativa Japonica Group] | 0.852113 | Oryza sativa Japonica Group | 2835 | 4244 |
| | | | | &gt:gi\|77555848\|gb\|ABA98644.1\| Ureide permease 2, | | | | |
| | | | | putative, expressed [Oryza sativa Japonica Group] | | | | |
| | | | | &gt:gi\|113649339\|dbj\|BAF29851.1\| Os12g0502800 | | | | |
| | | | | [Oryza sativa Japonica Group] | | | | |
| | | | | &gt:gi\|215707179\|dbj\|BAG93639.1\| unnamed protein | | | | |
| | | | | product [Oryza sativa Japonica Group] | | | | |
| | | | | &gt:gi\|215741152\|dbj\|BAG97647.1\| unnamed protein | | | | |
| | | | | product [Oryza sativa Japonica Group] | | | | |
| | | ABA98643 | 108862058 | Ureide permease 2, putative, expressed | 0.852113 | Oryza sativa Japonica Group | 2836 | |
| | | | | [Oryza sativa Japonica Group] | | | | |
| | | | | &gt:gi\|218186904\|gb\|EEC69331.1\| | | | | |
| | | | | hypothetical protein OsI_38433 | | | | |
| | | | | [Oryza sativa Indica Group] | | | | |
| | | | | &gt:gi\|222617132\|gb\|EEE53264.1\| | | | | |
| | | | | hypothetical protein OsJ_36199 | | | | |
| | | | | [Oryza sativa Japonica Group] | | | | |
| | | BAK08299 | 326530038 | predicted protein | 0.826291 | Hordeum vulgare subsp. vulgare | 2837 | 4245 |
| | | | | [Hordeum vulgare subsp. vulgare] | | | | |
| | | NP_001183878 | 308081201 | hypothetical protein LOC100502471 [Zea mays] | 0.873239 | Zea mays | 2838 | 4246 |
| | | | | &gt:gi\|238015200\|gb\|ACR38635.1\| unknown | | | | |
| | | | | [Zea mays] | | | | |
| | | ACF22675 | 193848478 | ureide permease 2-like protein 2 | 0.701878 | Brachypodium distachyon | 2839 | |
| | | | | [Brachypodium distachyon] | | | | |
| | 113-133 | XP_002463060 | 242050631 | hypothetical protein SORBIDRAFT_02g036920 | 1 | Sorghum bicolor | 2840 | 4247 |
| | | | | [Sorghum bicolor] | | | | |
| | | | | &gt:gi\|241926437\|gb\|EER99581.1\| | | | | |
| | | | | hypothetical protein SORBIDRAFT_02g036920 | | | | |
| | | | | [Sorghum bicolor] | | | | |
| | | NP_001168223 | 293336038 | hypothetical protein LOC100381982 [Zea mays] | 0.94206 | Zea mays | 2841 | 4248 |
| | | | | &gt:gi\|223946819\|gb\|ACN27493.1\| unknown | | | | |
| | | | | [Zea mays] | | | | |
| | | EEC82301 | 54362548 | hypothetical protein OsI_26552 | 0.76824 | Oryza sativa Indica Group | 2842 | |
| | | | | [Oryza sativa Indica Group] | | | | |
| | | NP_001060053 | 115472908 | Os07g0571700 [Oryza sativa Japonica Group] | 0.76824 | Oryza sativa Japonica Group | 2843 | 4249 |
| | | | | &gt:gi\|34394216\|dbj\|BAC84668.1\| putative organic | | | | |
| | | | | cation transporter [Oryza sativa Japonica Group] | | | | |
| | | | | &gt:gi\|113611589\|dbj\|BAF21967.1\| Os07g0571700 | | | | |
| | | | | [Oryza sativa Japonica Group] | | | | |
| | 1396-1416 | XP_002460562 | 242045381 | hypothetical protein SORBIDRAFT_02g030730 | 1 | Sorghum bicolor | 2844 | 4250 |
| | | | | [Sorghum bicolor] | | | | |
| | | | | &gt:gi\|241923939\|gb\|EER97083.1\| | | | | |
| | | | | hypothetical protein SORBIDRAFT_02g030730 | | | | |
| | | | | [Sorghum bicolor] | | | | |
| | | XP_002460563 | 242045383 | hypothetical protein SORBIDRAFT_02g030740 | 0.893069 | Sorghum bicolor | 2845 | 4251 |
| | | | | [Sorghum bicolor] | | | | |
| | | | | &gt:gi\|241923940\|gb\|EER97084.1\| | | | | |
| | | | | hypothetical protein SORBIDRAFT_02g030740 | | | | |
| | | | | [Sorghum bicolor] | | | | |
| | | NP_001168434 | 293334700 | hypothetical protein LOC100382204 [Zea mays] | 0.881188 | Zea mays | 2846 | 4252 |
| | | | | &gt:gi\|223948277\|gb\|ACN28222.1\| unknown | | | | |
| | | | | [Zea mays] | | | | |
| | | XP_002460167 | 242044591 | hypothetical protein SORBIDRAFT_02g023770 | 0.875248 | Sorghum bicolor | 2847 | 4253 |
| | | | | [Sorghum bicolor] | | | | |
| | | | | &gt:gi\|241923544\|gb\|EER96688.1\| | | | | |
| | | | | hypothetical protein SORBIDRAFT_02g023770 | | | | |
| | | | | [Sorghum bicolor] | | | | |
| | | XP_002460561 | 242045379 | hypothetical protein SORBIDRAFT_02g030720 | 0.786139 | Sorghum bicolor | 2848 | 4254 |
| | | | | [Sorghum bicolor] | | | | |
| | | | | &gt:gi\|241923938\|gb\|EER97082.1\| | | | | |
| | | | | hypothetical protein SORBIDRAFT_02g030720 | | | | |
| | | | | [Sorghum bicolor] | | | | |
| | 1610-1630 | ACN31936 | 223975496 | unknown [Zea mays] | 1 | Zea mays | 2849 | 4255 |
| | 1382-1402 | NP_001183878 | 308081201 | hypothetical protein LOC100502471 [Zea mays] | 1 | Zea mays | 2850 | 4256 |
| | | | | &gt:gi\|238015200\|gb\|ACR38635.1\| unknown | | | | |
| | | | | [Zea mays] | | | | |
| | 479-499 | XP_002460117 | 242044491 | hypothetical protein SORBIDRAFT_02g023000 | 1 | Sorghum bicolor | 2851 | 4257 |
| | | | | [Sorghum bicolor] | | | | |
| | | | | &gt:gi\|241923494\|gb\|EER96638.1\| | | | | |
| | | | | hypothetical protein SORBIDRAFT_02g023000 | | | | |
| | | | | [Sorghum bicolor] | | | | |
| | | ACR37870 | 238013669 | unknown [Zea mays] | 0.946809 | Zea mays | 2852 | 4258 |
| | | NP_001143802 | 226505329 | hypothetical protein LOC100276574 [Zea mays] | 0.93883 | Zea mays | 2853 | 4259 |
| | | | | &gt:gi\|195627382\|gb\|ACG35521.1\| hypothetical | | | | |
| | | | | protein [Zea mays] | | | | |
| | | BAD23415 | 48716714 | hydrolase-like protein [Oryza sativa Japonica Group] | 0.702128 | Oryza sativa Japonica Group | 2854 | 4260 |
| | | | | &gt:gi\|50726197\|dbj\|BAD33716.1\| hydrolase-like | | | | |
| | | | | protein [Oryza sativa Japonica Group] | | | | |
| | | BAJ92435 | 326516559 | predicted protein | 0.744681 | Hordeum vulgare subsp. vulgare | 2855 | 4261 |
| | | | | [Hordeum vulgare subsp. vulgare] | | | | |
| | | EEC84446 | 54362548 | hypothetical protein OsI_31065 | 0.742021 | Oryza sativa Indica Group | 2856 | |
| | | | | [Oryza sativa Indica Group] | | | | |
| | | | | &gt:gi\|222641433\|gb\|EEE69565.1\| | | | | |
| | | | | hypothetical protein OsJ_29077 | | | | |
| | | | | [Oryza sativa Japonica Group] | | | | |
| | 577-597 | XP_002456713 | 242055134 | hypothetical protein SORBIDRAFT_03g041220 | 1 | Sorghum bicolor | 2857 | 4262 |
| | | | | [Sorghum bicolor] | | | | |
| | | | | &gt:gi\|241928688\|gb\|EES01833.1\| | | | | |
| | | | | hypothetical protein SORBIDRAFT_03g041220 | | | | |
| | | | | [Sorghum bicolor] | | | | |
| | | NP_001147599 | 226506121 | POT family protein [Zea mays] | 0.790353 | Zea mays | 2858 | 4263 |
| | | | | &gt:gi\|195612430\|gb\|ACG28045.1\| POT | | | | |
| | | | | family protein [Zea mays] | | | | |
| Predicted | 1081-1100 | ACR37939 | 238013807 | unknown [Zea mays] | 1 | Zea mays | 2859 | 4264 |
| siRNA | | | | | | | | |
| 58740 | | | | | | | | |
| | | NP_001150768 | 226495128 | LOC100284401 [Zea mays] | 0.996764 | Zea mays | 2860 | 4265 |
| | | | | &gt:gi\|195641698\|gb\|ACG40317.1\| | | | | |
| | | | | ubiquitinating enzyme [Zea mays] | | | | |
| | | NP_001049901 | 115452600 | Os03g0308000 [Oryza sativa Japonica Group] | 0.76699 | Oryza sativa Japonica Group | 2861 | 4266 |
| | | | | &gt:gi\|108707750\|gb\|ABF95545.1\| | | | | |
| | | | | ubiquitinating enzyme, putative, expressed | | | | |
| | | | | [Oryza sativa Japonica Group] | | | | |
| | | | | &gt:gi\|113548372\|dbj\|BAF11815.1\| | | | | |
| | | | | Os03g0308000 [Oryza sativa Japonica Group] | | | | |
| | | | | &gt:gi\|215713428\|dbj\|BAG94565.1\| unnamed | | | | |
| | | | | protein product [Oryza sativa Japonica Group] | | | | |
| | | EEC75094 | 54362548 | hypothetical protein OsI_11252 | 0.760518 | Oryza sativa Indica Group | 2862 | |
| | | | | [Oryza sativa Indica Group] | | | | |
| | | BAJ86904 | 326509022 | predicted protein | 0.760518 | Hordeum vulgare subsp. vulgare | 2863 | 4267 |
| | | | | [Hordeum vulgare subsp. vulgare] | | | | |
| | | EEE58922 | 54398660 | hypothetical protein OsJ_10572 | 0.737864 | Oryza sativa Japonica Group | 2864 | |
| | | | | [Oryza sativa Japonica Group] | | | | |
| Predicted | 410-428 | NP_001169291 | 293331114 | hypothetical protein LOC100383155 [Zea mays] | 1 | Zea mays | 2865 | 4268 |
| siRNA | | | | &gt:gi\|224028455\|gb\|ACN33303.1\| unknown | | | | |
| 59056 | | | | [Zea mays] | | | | |
| | 211-229 | NP_001052652 | 115458103 | Os04g0394200 [Oryza sativa Japonica Group] | 1 | Oryza sativa Japonica Group | 2866 | 4269 |
| | | | | &gt:gi\|21740743\|emb\|CAD40552.1\| | | | | |
| | | | | OSJNBa0072K14.5 [Oryza sativa Japonica Group] | | | | |
| | | | | &gt:gi\|113564223\|dbj\|BAF14566.1\| Os04g0394200 | | | | |
| | | | | [Oryza sativa Japonica Group] | | | | |
| | | | | &gt:gi\|116309381\|emb\|CAH66460.1\| H0718E12.4 | | | | |
| | | | | [Oryza sativa Indica Group] | | | | |
| | | | | &gt:gi\|125590215\|gb\|EAZ30565.1\| hypothetical | | | | |
| | | | | protein OsJ_14615 [Oryza sativa Japonica Group] | | | | |
| | | | | &gt:gi\|215768038\|dbj\|BAH00267.1\| unnamed | | | | |
| | | | | protein product [Oryza sativa Japonica Group] | | | | |
| | | ACG35848 | 195628035 | dihydrolipoyllysine-residue succinyltransferase | 0.884091 | Zea mays | 2867 | 4270 |
| | | | | component of 2-oxoglutarate dehydrogenase complex | | | | |
| | | | | [Zea mays] | | | | |
| | | NP_001147014 | 226509379 | dihydrolipoyllysine-residue succinyltransferase | 0.881818 | Zea mays | 2868 | 4271 |
| | | | | component of 2-oxoglutarate dehydrogenase complex | | | | |
| | | | | [Zea mays] | | | | |
| | | | | &gt:gi\|195606476\|gb\|ACG25068.1\| | | | | |
| | | | | dihydrolipoyllysine-residue succinyltransferase | | | | |
| | | | | component of 2-oxoglutarate dehydrogenase complex | | | | |
| | | | | [Zea mays] | | | | |
| | | ACR38672 | 238015273 | unknown [Zea mays] | 0.827273 | Zea mays | 2869 | 4272 |
| | | BAJ96018 | 326512073 | predicted protein | 0.813636 | Hordeum vulgare subsp. vulgare | 2870 | 4273 |
| | | | | [Hordeum vulgare subsp. vulgare] | | | | |
| | | BAD22992 | 48716367 | putative 2-oxoglutarate dehydrogenase E2 | 0.734091 | Oryza sativa Japonica Group | 2871 | 4274 |
| | | | | subunit [Oryza sativa Japonica Group] | | | | |
| | 28-Oct | NP_001045255 | 115441950 | Os01g0925300 [Oryza sativa Japonica Group] | 1 | Oryza sativa Japonica Group | 2872 | 4275 |
| | | | | &gt:gi\|57899394\|dbj\|BAD88041.1\| putative | | | | |
| | | | | zisp [Oryza sativa Japonica Group] | | | | |
| | | | | &gt:gi\|57900122\|dbj\|BAD88184.1\| putative | | | | |
| | | | | zisp [Oryza sativa Japonica Group] | | | | |
| | | | | &gt:gi\|113534786\|dbj\|BAF07169.1\| Os01g0925300 | | | | |
| | | | | [Oryza sativa Japonica Group] | | | | |
| | | EAZ14683 | 54398660 | hypothetical protein OsJ_04607 | 0.961259 | Oryza sativa Japonica Group | 2873 | |
| | | | | [Oryza sativa Japonica Group] | | | | |
| | | BAB89658 | 20160711 | P0482D04.5 [Oryza sativa Japonica Group] | 0.949153 | Oryza sativa Japonica Group | 2874 | 4276 |
| | | EEC72069 | 54362548 | hypothetical protein OsI_05001 | 0.932203 | Oryza sativa Indica Group | 2875 | |
| | | | | [Oryza sativa Indica Group] | | | | |
| | | NP_001130802 | 212274974 | hypothetical protein LOC100191906 [Zea mays] | 0.849879 | Zea mays | 2876 | 4277 |
| | | | | &gt:gi\|194690056\|gb\|ACF79112.1\| unknown | | | | |
| | | | | [Zea mays] | | | | |
| | | | | &gt:gi\|194690150\|gb\|ACF79159.1\| | | | | |
| | | | | unknown [Zea mays] | | | | |
| | | | | &gt:gi\|195635627\|gb\|ACG37282.1\| | | | | |
| | | | | palmitoyltransferase ZDHHC9 [Zea mays] | | | | |
| | | | | &gt:gi\|224030505\|gb\|ACN34328.1\| unknown | | | | |
| | | | | [Zea mays] | | | | |
| | | BAK03564 | 326515301 | predicted protein | 0.8523 | Hordeum vulgare subsp. vulgare | 2877 | 4278 |
| | | | | [Hordeum vulgare subsp. vulgare] | | | | |
| | | XP_002459011 | 242059730 | hypothetical protein SORBIDRAFT_03g044420 | 0.769976 | Sorghum bicolor | 2878 | 4279 |
| | | | | [Sorghum bicolor] | | | | |
| | | | | &gt:gi\|241930986\|gb\|EES04131.1\| | | | | |
| | | | | hypothetical protein SORBIDRAFT_03g044420 | | | | |
| | | | | [Sorghum bicolor] | | | | |
| | 137-155 | NP_001056918 | 115466637 | Os06g0167100 [Oryza sativa Japonica Group] | 1 | Oryza sativa Japonica Group | 2879 | 4280 |
| | | | | &gt:gi\|55296045\|dbj\|BAD67607.1\| putative | | | | |
| | | | | gamma-adaptin 1 [Oryza sativa Japonica Group] | | | | |
| | | | | &gt:gi\|113594958\|dbj\|BAF18832.1\| Os06g0167100 | | | | |
| | | | | [Oryza sativa Japonica Group] | | | | |
| | | | | &gt:gi\|215678749\|dbj\|BAG95186.1\| unnamed protein | | | | |
| | | | | product [Oryza sativa Japonica Group] | | | | |
| | | | | &gt:gi\|222635027\|gb\|EEE65159.1\| hypothetical | | | | |
| | | | | protein OsJ_20260 [Oryza sativa Japonica Group] | | | | |
| | | EEC80086 | 54362548 | hypothetical protein OsI_21821 | 0.95977 | Oryza sativa Indica Group | 2880 | |
| | | | | [Oryza sativa Indica Group] | | | | |
| | | BAK00520 | 326524272 | predicted protein | 0.889655 | Hordeum vulgare subsp. vulgare | 2881 | 4281 |
| | | | | [Hordeum vulgare subsp. vulgare] | | | | |
| | | ACG28758 | 195613855 | AP-1 complex subunit gamma-1 [Zea mays] | 0.894253 | Zea mays | 2882 | 4282 |
| | | XP_002454734 | 242066889 | hypothetical protein SORBIDRAFT_04g036416 | 0.821839 | Sorghum bicolor | 2883 | 4283 |
| | | | | [Sorghum bicolor] | | | | |
| | | | | &gt:gi\|241934565\|gb\|EES07710.1\| | | | | |
| | | | | hypothetical protein SORBIDRAFT_04g036416 | | | | |
| | | | | [Sorghum bicolor] | | | | |
| | | EEC74194 | 54362548 | hypothetical protein OsI_09342 | 0.825287 | Oryza sativa Indica Group | 2884 | |
| | | | | [Oryza sativa Indica Group] | | | | |
| | | XP_002521026 | 255560014 | AP-1 complex subunit gamma-2, putative | 0.733333 | Ricinus communis | 2885 | 4284 |
| | | | | [Ricinus communis] | | | | |
| | | | | &gt:gi\|223539863\|gb\|EEF41443.1\| | | | | |
| | | | | AP-1 complex subunit gamma-2, putative | | | | |
| | | | | [Ricinus communis] | | | | |
| | | XP_002265190 | 225424712 | PREDICTED: hypothetical protein [Vitis vinifera] | 0.732184 | Vitis vinifera | 2886 | 4285 |
| | | | | &gt:gi\|296086533\|emb\|CBI32122.3\| unnamed protein | | | | |
| | | | | product [Vitis vinifera] | | | | |
| | 431-449 | XP_002456313 | 242054334 | hypothetical protein SORBIDRAFT_03g033840 | 1 | Sorghum bicolor | 2887 | 4286 |
| | | | | [Sorghum bicolor] | | | | |
| | | | | &gt:gi\|241928288\|gb\|EES01433.1\| | | | | |
| | | | | hypothetical protein SORBIDRAFT_03g033840 | | | | |
| | | | | [Sorghum bicolor] | | | | |
| | | NP_001168082 | 293331612 | hypothetical protein LOC100381816 [Zea mays] | 0.89852 | Zea mays | 2888 | 4287 |
| | | | | &gt:gi\|223945895\|gb\|ACN27031.1\| unknown | | | | |
| | | | | [Zea mays] | | | | |
| | | XP_002458462 | 242058632 | hypothetical protein SORBIDRAFT_03g034130 | 0.701903 | Sorghum bicolor | 2889 | 4288 |
| | | | | [Sorghum bicolor] | | | | |
| | | | | &gt:gi\|241930437\|gb\|EES03582.1\| | | | | |
| | | | | hypothetical protein SORBIDRAFT_03g034130 | | | | |
| | | | | [Sorghum bicolor] | | | | |
| | 84-102 | ACN30664 | 223972952 | unknown [Zea mays] | 1 | Zea mays | 2890 | 4289 |
| | 626-644 | NP_001150636 | 226532023 | dihydrolipoyllysine-residue succinyltransferase | 1 | Zea mays | 2891 | 4290 |
| | | | | component of 2-oxoglutarate dehydrogenase complex | | | | |
| | | | | [Zea mays] | | | | |
| | | | | &gt:gi\|195640766\|gb\|ACG39851.1\| | | | | |
| | | | | dihydrolipoyllysine-residue succinyltransferase | | | | |
| | | | | component of 2-oxoglutarate dehydrogenase | | | | |
| | | | | complex [Zea mays] | | | | |
| | 235-253 | XP_002447329 | 242074785 | hypothetical protein SORBIDRAFT_06g033040 | 1 | Sorghum bicolor | 2892 | 4291 |
| | | | | [Sorghum bicolor] | | | | |
| | | | | &gt:gi\|241938512\|gb\|EES11657.1\| | | | | |
| | | | | hypothetical protein SORBIDRAFT_06g033040 | | | | |
| | | | | [Sorghum bicolor] | | | | |
| | | ACN26581 | 223944994 | unknown [Zea mays] | 0.912548 | Zea mays | 2893 | 4292 |
| | | XP_002448044 | 242076215 | hypothetical protein SORBIDRAFT_06g020130 | 0.901141 | Sorghum bicolor | 2894 | 4293 |
| | | | | [Sorghum bicolor] | | | | |
| | | | | &gt:gi\|241939227\|gb\|EES12372.1\| | | | | |
| | | | | hypothetical protein SORBIDRAFT_06g020130 | | | | |
| | | | | [Sorghum bicolor] | | | | |
| | | ADT92202 | 315259985 | N-acetylglucosaminyl-phosphatidylinositol | 0.912548 | Zea mays | 2895 | 4294 |
| | | | | de-N-acetylase-like protein [Zea mays] | | | | |
| | | BAJ97962 | 326488700 | predicted protein | 0.802281 | Hordeum vulgare subsp. vulgare | 2896 | 4295 |
| | | | | [Hordeum vulgare subsp. vulgare] | | | | |
| | | EEC78258 | 54362548 | hypothetical protein OsI_17935 | 0.787072 | Oryza sativa Indica Group | 2897 | |
| | | | | [Oryza sativa Indica Group] | | | | |
| | | NP_001054275 | 115461349 | Os04g0678800 [Oryza sativa Japonica Group] | 0.78327 | Oryza sativa Japonica Group | 2898 | 4296 |
| | | | | &gt:gi\|32487388\|emb\|CAE05722.1\| | | | | |
| | | | | OSJNBb0017I01.2 [Oryza sativa Japonica Group] | | | | |
| | | | | &gt:gi\|113565846\|dbj\|BAF16189.1\| Os04g0678800 | | | | |
| | | | | [Oryza sativa Japonica Group] | | | | |
| | | | | &gt:gi\|215701450\|dbj\|BAG92874.1\| unnamed | | | | |
| | | | | protein product [Oryza sativa Japonica Group] | | | | |
| | | | | &gt:gi\|215704470\|dbj\|BAG93904.1\| unnamed | | | | |
| | | | | protein product [Oryza sativa Japonica Group] | | | | |
| | | | | &gt:gi\|222629778\|gb\|EEE61910.1\| hypothetical | | | | |
| | | | | protein OsJ_16635 [Oryza sativa Japonica Group] | | | | |
| | 535-553 | ACF85503 | 194702837 | unknown [Zea mays] | 1 | Zea mays | 2899 | 4297 |
| | | | | &gt:gi\|223949391\|gb\|ACN28779.1\| unknown | | | | |
| | | | | [Zea mays] | | | | |
| | | NP_001149059 | 226497141 | LOC100282679 [Zea mays] | 0.948718 | Zea mays | 2900 | 4298 |
| | | | | &gt:gi\|195624404\|gb\|ACG34032.1\| | | | | |
| | | | | chaperone protein dnaJ [Zea mays] | | | | |
| | | ACF86076 | 194703983 | unknown [Zea mays] | 0.95338 | Zea mays | 2901 | 4299 |
| | | XP_002437726 | 242094471 | hypothetical protein SORBIDRAFT_10g001410 | 0.909091 | Sorghum bicolor | 2902 | 4300 |
| | | | | [Sorghum bicolor] | | | | |
| | | | | &gt:gi\|241915949\|gb\|EER89093.1\| | | | | |
| | | | | hypothetical protein SORBIDRAFT_10g001410 | | | | |
| | | | | [Sorghum bicolor] | | | | |
| | | NP_001056623 | 115466047 | Os06g0116800 [Oryza sativa Japonica Group] | 0.778555 | Oryza sativa Japonica Group | 2903 | 4301 |
| | | | | &gt:gi\|55296201\|dbj\|BAD67919.1\| putative | | | | |
| | | | | GFA2 [Oryza sativa Japonica Group] | | | | |
| | | | | &gt:gi\|113594663\|dbj\|BAF18537.1\| Os06g0116800 | | | | |
| | | | | [Oryza sativa Japonica Group] | | | | |
| | | | | &gt:gi\|215765163\|dbj\|BAG86860.1\| unnamed | | | | |
| | | | | protein product [Oryza sativa Japonica Group] | | | | |
| | | | | &gt:gi\|218197458\|gb\|EEC79885.1\| hypothetical | | | | |
| | | | | protein OsI_21393 [Oryza sativa Indica Group] | | | | |
| | | | | &gt:gi\|222637666\|gb\|EEE67798.1\| hypothetical | | | | |
| | | | | protein OsJ_25536 [Oryza sativa Japonica Group] | | | | |
| | 275-293 | XP_002437665 | 242094349 | hypothetical protein SORBIDRAFT_10g000420 | 1 | Sorghum bicolor | 2904 | 4302 |
| | | | | [Sorghum bicolor] | | | | |
| | | | | &gt:gi\|241915888\|gb\|EER89032.1\| | | | | |
| | | | | hypothetical protein SORBIDRAFT_10g000420 | | | | |
| | | | | [Sorghum bicolor] | | | | |
| | | ACN30602 | 223972828 | unknown [Zea mays] | 0.838323 | Zea mays | 2905 | 4303 |
| | | NP_001150955 | 226491174 | glutamine cyclotransferase [Zea mays] | 0.835329 | Zea mays | 2906 | 4304 |
| | | | | &gt:gi\|195643198\|gb\|ACG41067.1\| glutamine | | | | |
| | | | | cyclotransferase precursor [Zea mays] | | | | |
| | | NP_001056544 | 115465889 | Os06g0103700 [Oryza sativa Japonica Group] | 0.736527 | Oryza sativa Japonica Group | 2907 | 4305 |
| | | | | &gt:gi\|55296762\|dbj\|BAD67954.1\| putative | | | | |
| | | | | glutamine cyclotransferase precursor | | | | |
| | | | | [Oryza sativa Japonica Group] | | | | |
| | | | | &gt:gi\|113594584\|dbj\|BAF18458.1\| | | | | |
| | | | | Os06g0103700 [Oryza sativa Japonica Group] | | | | |
| | | | | &gt:gi\|215687230\|dbj\|BAG91795.1\| unnamed | | | | |
| | | | | protein product [Oryza sativa Japonica Group] | | | | |
| | 103-121 | ACL52777 | 219884804 | unknown [Zea mays] | 1 | Zea mays | 2908 | 4306 |
| | | XP_002453425 | 242064271 | hypothetical protein SORBIDRAFT_04g005820 | 0.819588 | Sorghum bicolor | 2909 | 4307 |
| | | | | [Sorghum bicolor] | | | | |
| | | | | &gt:gi\|241933256\|gb\|EES06401.1\| | | | | |
| | | | | hypothetical protein SORBIDRAFT_04g005820 | | | | |
| | | | | [Sorghum bicolor] | | | | |
| | 315-333 | NP_001150068 | 226506409 | N-acetylglucosaminyl-phosphatidylinositol | 1 | Zea mays | 2910 | 4308 |
| | | | | de-N-acetylase [Zea mays] | | | | |
| | | | | &gt:gi\|195636450\|gb\|ACG37693.1\| | | | | |
| | | | | N-acetylglucosaminyl-phosphatidylinositol | | | | |
| | | | | de-N-acetylase [Zea mays] | | | | |
| | 329-347 | NP_001140626 | 226493992 | hypothetical protein LOC100272700 [Zea mays] | 1 | Zea mays | 2911 | 4309 |
| | | | | &gt:gi\|194700230\|gb\|ACF84199.1\| unknown | | | | |
| | | | | [Zea mays] | | | | |
| | 315-333 | XP_002448044 | 242076215 | hypothetical protein SORBIDRAFT_06g020130 | 1 | Sorghum bicolor | 2912 | 4310 |
| | | | | [Sorghum bicolor] | | | | |
| | | | | &gt:gi\|241939227\|gb\|EES12372.1\| | | | | |
| | | | | hypothetical protein SORBIDRAFT_06g020130 | | | | |
| | | | | [Sorghum bicolor] | | | | |
| | 1361-1379 | ADT92191 | 315259978 | putative potassium efflux system | 1 | Zea mays | 2913 | |
| | | | | protein family [Zea mays] | | | | |
| | | ADT92192 | 315259985 | putative potassium efflux system | 0.990308 | Zea mays | 2914 | |
| | | | | family protein [Zea mays] | | | | |
| | | XP_002448794 | 242077715 | hypothetical protein SORBIDRAFT_06g033310 | 0.881938 | Sorghum bicolor | 2915 | 4311 |
| | | | | [Sorghum bicolor] | | | | |
| | | | | &gt:gi\|241939977\|gb\|EES13122.1\| | | | | |
| | | | | hypothetical protein SORBIDRAFT_06g033310 | | | | |
| | | | | [Sorghum bicolor] | | | | |
| | | NP_001054299 | 115461397 | Os04g0682800 [Oryza sativa Japonica Group] | 0.807048 | Oryza sativa Japonica Group | 2916 | 4312 |
| | | | | &gt:gi\|38345563\|emb\|CAE03437.2\| | | | | |
| | | | | OSJNBa0032F06.20 [Oryza sativa Japonica Group] | | | | |
| | | | | &gt:gi\|113565870\|dbj\|BAF16213.1\| Os04g0682800 | | | | |
| | | | | [Oryza sativa Japonica Group] | | | | |
| | | | | &gt:gi\|215768459\|dbj\|BAH00688.1\| unnamed | | | | |
| | | | | protein product [Oryza sativa Japonica Group] | | | | |
| | | BAJ87826 | 326513613 | predicted protein | 0.769163 | Hordeum vulgare subsp. vulgare | 2917 | 4313 |
| | | | | [Hordeum vulgare subsp. vulgare] | | | | |
| | | BAJ89683 | 326487397 | predicted protein | 0.768282 | Hordeum vulgare subsp. vulgare | 2918 | 4314 |
| | | | | [Hordeum vulgare subsp. vulgare] | | | | |
| | 38-56 | XP_002436836 | 242092691 | hypothetical protein SORBIDRAFT_10g009750 | 1 | Sorghum bicolor | 2919 | 4315 |
| | | | | [Sorghum bicolor] | | | | |
| | | | | &gt:gi\|241915059\|gb\|EER88203.1\| | | | | |
| | | | | hypothetical protein SORBIDRAFT_10g009750 | | | | |
| | | | | [Sorghum bicolor] | | | | |
| | 81-99 | NP_001143033 | 226529719 | hypothetical protein LOC100275501 [Zea mays] | 1 | Zea mays | 2920 | 4316 |
| | | | | &gt:gi\|195613282\|gb\|ACG28471.1\| hypothetical | | | | |
| | | | | protein [Zea mays] | | | | |
| | 2226-2244 | NP_001142912 | 226498003 | hypothetical protein LOC100275344 [Zea mays] | 1 | Zea mays | 2921 | 4317 |
| | | | | &gt:gi\|195611342\|gb\|ACG27501.1\| hypothetical | | | | |
| | | | | protein [Zea mays] | | | | |
| | | XP_002452898 | 242063217 | hypothetical protein SORBIDRAFT_04g034580 | 0.941261 | Sorghum bicolor | 2922 | 4318 |
| | | | | [Sorghum bicolor] | | | | |
| | | | | &gt:gi\|241932729\|gb\|EES05874.1\| | | | | |
| | | | | hypothetical protein SORBIDRAFT_04g034580 | | | | |
| | | | | [Sorghum bicolor] | | | | |
| | | BAK07849 | 326525157 | predicted protein | 0.84384 | Hordeum vulgare subsp. vulgare | 2923 | 4319 |
| | | | | [Hordeum vulgare subsp. vulgare] | | | | |
| | | Q69T58 | | RecName: Full = Homeobox-leucine zipper protein | 0.808023 | Oryza sativa Japonica Group | 2924 | |
| | | | | ROC8; AltName: Full = GLABRA 2-like homeobox | | | | |
| | | | | protein 8; AltName: Full = HD-ZIP protein ROC8; | | | | |
| | | | | AltName: Full = Homeodomain transcription factor | | | | |
| | | | | ROC8; AltName: Full = Protein RICE OUTERMOST | | | | |
| | | | | CELL-SPECIFIC 8 | | | | |
| | | BAD35894 | 51091189 | putative homeobox | 0.808023 | Oryza sativa Japonica Group | 2925 | 4320 |
| | | | | [Oryza sativa Japonica Group] | | | | |
| | | XP_002438026 | 242095071 | hypothetical protein SORBIDRAFT_10g006820 | 0.789398 | Sorghum bicolor | 2926 | 4321 |
| | | | | [Sorghum bicolor] | | | | |
| | | | | &gt:gi\|241916249\|gb\|EER89393.1\| | | | | |
| | | | | hypothetical protein SORBIDRAFT_10g006820 | | | | |
| | | | | [Sorghum bicolor] | | | | |
| | | EEC80207 | 54362548 | hypothetical protein OsI_22100 | 0.724928 | Oryza sativa Indica Group | 2927 | |
| | | | | [Oryza sativa Indica Group] | | | | |
| | 384-402 | NP_001146570 | 226496306 | hypothetical protein LOC100280166 [Zea mays] | 1 | Zea mays | 2928 | 4322 |
| | | | | &gt:gi\|219887859\|gb\|ACL54304.1\| unknown | | | | |
| | | | | [Zea mays] | | | | |
| | | NP_001063308 | 297609549 | Os09g0446200 [Oryza sativa Japonica Group] | 0.924125 | Oryza sativa Japonica Group | 2929 | 4323 |
| | | | | &gt:gi\|255678935\|dbj\|BAF25222.2\| Os09g0446200 | | | | |
| | | | | [Oryza sativa Japonica Group] | | | | |
| | | EEC84667 | 54362548 | hypothetical protein OsI_31569 | 0.815175 | Oryza sativa Indica Group | 2930 | |
| | | | | [Oryza sativa Indica Group] | | | | |
| Predicted | 443-462 | XP_002454541 | 242066503 | hypothetical protein SORBIDRAFT_04g032980 | 1 | Sorghum bicolor | 2931 | 4324 |
| siRNA | | | | [Sorghum bicolor] | | | | |
| 59211 | | | | &gt:gi\|241934372\|gb\|EES07517.1\| | | | | |
| | | | | hypothetical protein SORBIDRAFT_04g032980 | | | | |
| | | | | [Sorghum bicolor] | | | | |
| | | ACR36020 | 238009969 | unknown [Zea mays] | 0.951667 | Zea mays | 2932 | 4325 |
| | | NP_001147126 | 226494332 | cell division cycle protein 23 [Zea mays] | 0.948333 | Zea mays | 2933 | 4326 |
| | | | | &gt:gi\|195607482\|gb\|ACG25571.1\| cell | | | | |
| | | | | division cycle protein 23 [Zea mays] | | | | |
| | | EEC73723 | 54362548 | hypothetical protein OsI_08332 | 0.878333 | Oryza sativa Indica Group | 2934 | |
| | | | | [Oryza sativa Indica Group] | | | | |
| | | NP_001047624 | 115447688 | Os02g0656300 [Oryza sativa Japonica Group] | 0.876667 | Oryza sativa Japonica Group | 2935 | 4327 |
| | | | | &gt:gi\|49388560\|dbj\|BAD25679.1\| putative | | | | |
| | | | | cell division cycle protein 23 | | | | |
| | | | | [Oryza sativa Japonica Group] | | | | |
| | | | | &gt:gi\|113537155\|dbj\|BAF09538.1\| | | | | |
| | | | | Os02g0656300 [Oryza sativa Japonica Group] | | | | |
| | | | | &gt:gi\|222623375\|gb\|EEE57507.1\| | | | | |
| | | | | hypothetical protein OsJ_07790 | | | | |
| | | | | [Oryza sativa Japonica Group] | | | | |
| | | CAC39070 | 14140112 | anaphase-promoting complex subunit | 0.875 | Oryza sativa | 2936 | 4328 |
| | | | | 8-like protein [Oryza sativa] | | | | |
| | | BAK03657 | 326517476 | predicted protein | 0.885 | Hordeum vulgare subsp. vulgare | 2937 | 4329 |
| | | | | [Hordeum vulgare subsp. vulgare] | | | | |
| | | XP_002266966 | 225463150 | PREDICTED: hypothetical protein | 0.701667 | Vitis vinifera | 2938 | 4330 |
| | | | | [Vitis vinifera] | | | | |
| | | CAN83330 | 147844944 | hypothetical protein VITISV_005847 | 0.701667 | Vitis vinifera | 2939 | 4331 |
| | | | | [Vitis vinifera] | | | | |
| | 1053-1072 | XP_002438417 | 242095853 | hypothetical protein SORBIDRAFT_10g017800 | 1 | Sorghum bicolor | 2940 | 4332 |
| | | | | [Sorghum bicolor] | | | | |
| | | | | &gt:gi\|241916640\|gb\|EER89784.1\| | | | | |
| | | | | hypothetical protein SORBIDRAFT_10g017800 | | | | |
| | | | | [Sorghum bicolor] | | | | |
| | | NP_001141152 | 226494465 | hypothetical protein LOC100273238 [Zea mays] | 0.92435 | Zea mays | 2941 | 4333 |
| | | | | &gt:gi\|194702930\|gb\|ACF85549.1\| unknown | | | | |
| | | | | [Zea mays] | | | | |
| | | ACF85911 | 194703653 | unknown [Zea mays] | 0.898345 | Zea mays | 2942 | 4334 |
| | | NP_001057632 | 115468065 | Os06g0474500 [Oryza sativa Japonica Group] | 0.869976 | Oryza sativa Japonica Group | 2943 | 4335 |
| | | | | &gt:gi\|51090811\|dbj\|BAD35288.1\| putative | | | | |
| | | | | ZmEBE-1 protein [Oryza sativa Japonica Group] | | | | |
| | | | | &gt:gi\|113595672\|dbj\|BAF19546.1\| Os06g0474500 | | | | |
| | | | | [Oryza sativa Japonica Group] | | | | |
| | | | | &gt:gi\|215706920\|dbj\|BAG93380.1\| unnamed | | | | |
| | | | | protein product [Oryza sativa Japonica Group] | | | | |
| | | | | &gt:gi\|215740902\|dbj\|BAG97058.1\| unnamed | | | | |
| | | | | protein product [Oryza sativa Japonica Group] | | | | |
| | | | | &gt:gi\|222635579\|gb\|EEE65711.1\| hypothetical | | | | |
| | | | | protein OsJ_21346 [Oryza sativa Japonica Group] | | | | |
| | | EAZ00932 | 54362548 | hypothetical protein OsI_22962 | 0.867612 | Oryza sativa Indica Group | 2944 | |
| | | | | [Oryza sativa Indica Group] | | | | |
| Predicted | 528-547 | NP_001152385 | 226507515 | lyase [Zea mays] | 1 | Zea mays | 2945 | 4336 |
| siRNA | | | | &gt:gi\|195655769\|gb\|ACG47352.1\| | | | | |
| 59300 | | | | lyase [Zea mays] | | | | |
| | | XP_002441731 | 242082611 | hypothetical protein SORBIDRAFT_08g001440 | 0.766575 | Sorghum bicolor | 2946 | 4337 |
| | | | | [Sorghum bicolor] | | | | |
| | | | | &gt:gi\|241942424\|gb\|EES15569.1\| | | | | |
| | | | | hypothetical protein SORBIDRAFT_08g001440 | | | | |
| | | | | [Sorghum bicolor] | | | | |
| | 1224-1243 | XP_002445025 | 242080512 | hypothetical protein SORBIDRAFT_07g003020 | 1 | Sorghum bicolor | 2947 | 4338 |
| | | | | [Sorghum bicolor] | | | | |
| | | | | &gt:gi\|241941375\|gb\|EES14520.1\| | | | | |
| | | | | hypothetical protein SORBIDRAFT_07g003020 | | | | |
| | | | | [Sorghum bicolor] | | | | |
| | | NP_001146372 | 226528117 | hypothetical protein LOC100279950 [Zea mays] | 0.892514 | Zea mays | 2948 | 4339 |
| | | | | &gt:gi\|219886865\|gb\|ACL53807.1\| unknown | | | | |
| | | | | [Zea mays] | | | | |
| | | XP_002445026 | 242080514 | hypothetical protein SORBIDRAFT_07g003040 | 0.869482 | Sorghum bicolor | 2949 | 4340 |
| | | | | [Sorghum bicolor] & | | | | |
| | | | | gt:gi\|241941376\|gb\|EES14521.1\| | | | | |
| | | | | hypothetical protein SORBIDRAFT_07g003040 | | | | |
| | | | | [Sorghum bicolor] | | | | |
| | | NP_001169175 | 293335560 | hypothetical protein LOC100383025 [Zea mays] | 0.856046 | Zea mays | 2950 | 4341 |
| | | | | &gt:gi\|223975313\|gb\|ACN31844.1\| unknown | | | | |
| | | | | [Zea mays] | | | | |
| | | | | &gt:gi\|223975749\|gb\|ACN32062.1\| | | | | |
| | | | | unknown [Zea mays] | | | | |
| | | BAD11769 | 42794043 | tryptophan decarboxylase [Hordeum vulgare] | 0.809981 | Hordeum vulgare | 2951 | 4342 |
| | | NP_001060969 | 115474744 | Os08g0140500 [Oryza sativa Japonica Group] | 0.829175 | Oryza sativa Japonica Group | 2952 | 4343 |
| | | | | &gt:gi\|42761330\|dbj\|BAD11583.1\| putative | | | | |
| | | | | Aromatic-L-amino-acid decarboxylase | | | | |
| | | | | [Oryza sativa Japonica Group] | | | | |
| | | | | &gt:gi\|45736124\|dbj\|BAD13170.1\| putative | | | | |
| | | | | Aromatic-L-amino-acid decarboxylase | | | | |
| | | | | [Oryza sativa Japonica Group] | | | | |
| | | | | &gt:gi\|113622938\|dbj\|BAF22883.1\| | | | | |
| | | | | Os08g0140500 [Oryza sativa Japonica Group] | | | | |
| | | | | &gt:gi\|125560099\|gb\|EAZ05547.1\| hypothetical | | | | |
| | | | | protein OsI_27762 [Oryza sativa Indica Group] | | | | |
| | | BAD11768 | 42794041 | tryptophan decarboxylase | 0.809981 | Hordeum vulgare subsp. spontaneum | 2953 | 4344 |
| | | | | [Hordeum vulgare subsp. spontaneum] | | | | |
| | | NP_001060968 | 115474742 | Os08g0140300 [Oryza sativa Japonica Group] | 0.821497 | Oryza sativa Japonica Group | 2954 | 4345 |
| | | | | &gt:gi\|42761328\|dbj\|BAD11581.1\| putative | | | | |
| | | | | Aromatic-L-amino-acid decarboxylase | | | | |
| | | | | [Oryza sativa Japonica Group] | | | | |
| | | | | &gt:gi\|113622937\|dbj\|BAF22882.1\| | | | | |
| | | | | Os08g0140300 [Oryza sativa Japonica Group] | | | | |
| | | | | &gt:gi\|125560097\|gb\|EAZ05545.1\| hypothetical | | | | |
| | | | | protein OsI_27760 [Oryza sativa Indica Group] | | | | |
| | | | | &gt:gi\|125602145\|gb\|EAZ41470.1\| hypothetical | | | | |
| | | | | protein OsJ_25993 [Oryza sativa Japonica Group] | | | | |
| | | | | &gt:gi\|215697229\|dbj\|BAG91223.1\| unnamed | | | | |
| | | | | protein product [Oryza sativa Japonica Group] | | | | |
| | | ADE48535 | 293612213 | putative decarboxylase protein | 0.744722 | Triticum aestivum | 2955 | |
| | | | | [Triticum aestivum] | | | | |
| | 94-113 | BAJ97340 | 326528636 | predicted protein | 1 | Hordeum vulgare subsp. spontaneum | 2956 | 4346 |
| | | | | [Hordeum vulgare subsp. vulgare] | | | | |
| | | NP_001168594 | 293334714 | hypothetical protein LOC100382378 [Zea mays] | 0.872204 | Zea mays | 2957 | 4347 |
| | | | | &gt:gi\|223949419\|gb\|ACN28793.1\| unknown | | | | |
| | | | | [Zea mays] | | | | |
| | | A2YGP6 | | RecName: Full = UDP-sugar pyrophosphorylase | 0.865815 | Oryza sativa Indica Group | 2958 | |
| | | NP_001058482 | 115469765 | Os06g0701200 [Oryza sativa Japonica Group] | 0.84984 | Oryza sativa Japonica Group | 2959 | 4348 |
| | | | | &gt:gi\|75112500\|sp\|Q5Z8Y4.1\|USP_ORYSJ | | | | |
| | | | | RecName: Full = UDP-sugar pyrophosphorylase | | | | |
| | | | | &gt:gi\|53792734\|dbj\|BAD53770.1\| | | | | |
| | | | | UDP-N-acetylglucosamine pyrophosphorylase-like | | | | |
| | | | | [Oryza sativa Japonica Group] | | | | |
| | | | | &gt:gi\|113596522\|dbj\|BAF20396.1\| Os06g0701200 | | | | |
| | | | | [Oryza sativa Japonica Group] | | | | |
| | | | | &gt:gi\|215686708\|dbj\|BAG88961.1\| unnamed | | | | |
| | | | | protein product [Oryza sativa Japonica Group] | | | | |
| | | NP_001152310 | 226501637 | LOC100285949 [Zea mays] | 0.84984 | Zea mays | 2960 | 4349 |
| | | | | &gt:gi\|195654965\|gb\|ACG46950.1\| | | | | |
| | | | | UDP-sugar pyrophospharylase [Zea mays] | | | | |
| | | EEC81262 | 54362548 | hypothetical protein OsI_24356 | 0.84984 | Oryza sativa Indica Group | 2961 | |
| | | | | [Oryza sativa Indica Group] | | | | |
| | | EEE66302 | 54398660 | hypothetical protein OsJ_22533 | 0.833866 | Oryza sativa Japonica Group | 2962 | |
| | | | | [Oryza sativa Japonica Group] | | | | |
| | | Q0GZS3 | | RecName: Full = UDP-sugar pyrophospharylase; | 0.72524 | Cucumis melo | 2963 | |
| | | | | AltName: Full = UDP-galaclose/glucose | | | | |
| | | | | pyrophosphorylase; Short = UGGPase | | | | |
| | | | | &gt:gi\|88954061\|gb\|ABD59006.1\| | | | | |
| | | | | UDP-galactose/glucose pyrophosphorylase | | | | |
| | | | | [Cucumis melo] | | | | |
| | | XP_002864182 | 297792594 | hypothetical protein ARALYDRAFT_495327 | 0.71885 | Arabidopsis lyrata subsp. lyrata | 2964 | 4350 |
| | | | | [Arabidopsis lyrata subsp. lyrata] | | | | |
| | | | | &gt:gi\|297310017\|gb\|EFH40441.1\| hypothetical | | | | |
| | | | | protein ARALYDRAFT_495327 | | | | |
| | | | | [Arabidopsis lyrata subsp. lyrata] | | | | |
| | | NP_568775 | 145359167 | UDP-sugar pyrophosphorylase [Arabidopsis thaliana] | 0.722045 | Arabidopsis thaliana | 2965 | 4351 |
| | | | | &gt:gi\|75168956\|sp\|Q9C5I1.1\|USP_ARATH | | | | |
| | | | | RecName: Full = UDP-sugar pyrophosphorylase; | | | | |
| | | | | Short = AtUSP | | | | |
| | | | | &gt:gi\|13430648\|gb\|AAK25946.1\|AF360236_1 | | | | |
| | | | | unknown protein [Arabidopsis thaliana] | | | | |
| | | | | &gt:gi\|14532822\|gb\|AAK64093.1\| unknown | | | | |
| | | | | protein [Arabidopsis thaliana] | | | | |
| | | | | &gt:gi\|84181457\|gb\|ABC55066.1\| nonspecific | | | | |
| | | | | UDP-sugar pyrophosphorylase | | | | |
| | | | | [Arabidopsis thaliana] | | | | |
| | | | | &gt:gi\|332008851\|gb\|AED96234.1\| | | | | |
| | | | | UDP-sugar pyrophosphorylase | | | | |
| | | | | [Arabidopsis thaliana] | | | | |
| | 1268-1287 | XP_002443799 | 242078060 | hypothetical protein SORBIDRAFT_07g002260 | 1 | Sorghum bicolor | 2966 | 4352 |
| | | | | [Sorghum bicolor] | | | | |
| | | | | &gt:gi\|241940149\|gb\|EES13294.1\| | | | | |
| | | | | hypothetical protein SORBIDRAFT_07g002260 | | | | |
| | | | | [Sorghum bicolor] | | | | |
| | | NP_001170379 | 293334010 | hypothetical protein LOC100384362 [Zea mays] | 0.918103 | Zea mays | 2967 | 4353 |
| | | | | &gt:gi\|224035469\|gb\|ACN36810.1\| unknown | | | | |
| | | | | [Zea mays] | | | | |
| | | XP_002454589 | 242066599 | hypothetical protein SORBIDRAFT_04g033960 | 0.851293 | Sorghum bicolor | 2968 | 4354 |
| | | | | [Sorghum bicolor] | | | | |
| | | | | &gt:gi\|241934420\|gb\|EES07565.1\| | | | | |
| | | | | hypothetical protein SORBIDRAFT_04g033960 | | | | |
| | | | | [Sorghum bicolor] | | | | |
| | | XP_002443797 | 242078056 | hypothetical protein SORBIDRAFT_07g002250 | 0.788793 | Sorghum bicolor | 2969 | 4355 |
| | | | | [Sorghum bicolor] | | | | |
| | | | | &gt:gi\|241940147\|gb\|EES13292.1\| | | | | |
| | | | | hypothetical protein SORBIDRAFT_07g002250 | | | | |
| | | | | [Sorghum bicolor] | | | | |
| | | NP_001147827 | 226502679 | LHT1 [Zea mays] | 0.784483 | Zea mays | 2970 | 4356 |
| | | | | &gt:gi\|195613982\|gb\|ACG28821.1\| | | | | |
| | | | | LHT1 [Zea mays] | | | | |
| | | NP_001152139 | 226498595 | LHT1 [Zea mays] | 0.75431 | Zea mays | 2971 | 4357 |
| | | | | &gt:gi\|195653153\|gb\|ACG46044.1\| | | | | |
| | | | | LHT1 [Zea mays] | | | | |
| | | CAD89802 | 30409135 | histidine amino acid transporter | 0.784483 | Oryza sativa Indica Group | 2972 | 4358 |
| | | | | [Oryza sativa Indica Group] | | | | |
| | | XP_002443796 | 242078054 | hypothetical protein SORBIDRAFT_07g002240 | 0.75431 | Sorghum bicolor | 2973 | 4359 |
| | | | | [Sorghum bicolor] | | | | |
| | | | | &gt:gi\|241940146\|gb\|EES13291.1\| | | | | |
| | | | | hypothetical protein SORBIDRAFT_07g002240 | | | | |
| | | | | [Sorghum bicolor] | | | | |
| | 241-260 | NP_001144625 | 226498917 | hypothetical protein LOC100277643 [Zea mays] | 1 | Zea mays | 2974 | 4360 |
| | | | | &gt:gi\|195644788\|gb\|ACG41862.1\| hypothetical | | | | |
| | | | | protein [Zea mays] | | | | |
| | | BAJ94382 | 326494525 | predicted protein | 0.762195 | Hordeum vulgare subsp. vulgare | 2975 | 4361 |
| | | | | [Hordeum vulgare subsp. vulgare] | | | | |
| | | NP_001047900 | 115448240 | Os02g0711100 [Oryza sativa Japonica Group] | 0.75 | Oryza sativa Japonica Group | 2976 | 4362 |
| | | | | &gt:gi\|41052650\|dbj\|BAD07498.1\| pentatricopeptide | | | | |
| | | | | (PPR) repeat-containing protein-like | | | | |
| | | | | [Oryza sativa Japonica Group] | | | | |
| | | | | &gt:gi\|41052866\|dbj\|BAD07780.1\| pentatricopeptide | | | | |
| | | | | (PPR) repeat-containing protein-like | | | | |
| | | | | [Oryza sativa Japonica Group] | | | | |
| | | | | &gt:gi\|113537431\|dbj\|BAF09814.1\| Os02g0711100 | | | | |
| | | | | [Oryza sativa Japonica Group] | | | | |
| | | | | &gt:gi\|125540864\|gb\|EAY87259.1\| hypothetical | | | | |
| | | | | protein OsI_08660 [Oryza sativa Indica Group] | | | | |
| | | | | &gt:gi\|215687282\|dbj\|BAG91847.1\| unnamed | | | | |
| | | | | protein product [Oryza sativa Japonica Group] | | | | |
| | 1395-1414 | XP_002458633 | 242058974 | hypothetical protein SORBIDRAFT_03g037090 | 1 | Sorghum bicolor | 2977 | 4363 |
| | | | | [Sorghum bicolor] | | | | |
| | | | | &gt:gi\|241930608\|gb\|EES03753.1\| | | | | |
| | | | | hypothetical protein SORBIDRAFT_03g037090 | | | | |
| | | | | [Sorghum bicolor] | | | | |
| | | NP_001146020 | 226507335 | hypothetical protein LOC100279551 [Zea mays] | 0.858388 | Zea mays | 2978 | 4364 |
| | | | | &gt:gi\|219885345\|gb\|ACL53047.1\| unknown | | | | |
| | | | | [Zea mays] | | | | |
| | | BAJ95510 | 326505677 | predicted protein | 0.840959 | Hordeum vulgare subsp. vulgare | 2979 | 4365 |
| | | | | [Hordeum vulgare subsp. vulgare] | | | | |
| | | NP_001142614 | 226529843 | hypothetical protein LOC100274883 [Zea mays] | 0.814815 | Zea mays | 2980 | 4366 |
| | | | | &gt:gi\|224030957\|gb\|ACN34554.1\| unknown | | | | |
| | | | | [Zea mays] | | | | |
| | | AAX96247 | 45592979 | hypothetical protein LOC_Os11g25920 | 0.795207 | Oryza sativa Japonica Group | 2981 | |
| | | | | [Oryza sativa Japonica Group] | | | | |
| | | EEC83703 | 54362548 | hypothetical protein OsI_29522 | 0.786492 | Oryza sativa Indica Group | 2982 | |
| | | | | [Oryza sativa Indica Group] | | | | |
| Predicted | 50-67 | NP_001149733 | 226509895 | UBA and UBX domain-containing protein [Zea mays] | 1 | Zea mays | 2983 | 4367 |
| siRNA | | | | &gt:gi\|195629900\|gb\|ACG36591.1\| UBA and UBX | | | | |
| 59379 | | | | domain-containing protein [Zea mays] | | | | |
| | | XP_002446630 | 242073387 | hypothetical protein SORBIDRAFT_06g019230 | 0.926282 | Sorghum bicolor | 2984 | 4368 |
| | | | | [Sorghum bicolor] | | | | |
| | | | | &gt:gi\|241937813\|gb\|EES10958.1\| | | | | |
| | | | | hypothetical protein SORBIDRAFT_06g019230 | | | | |
| | | | | [Sorghum bicolor] | | | | |
| | | ACN31131 | 223973886 | unknown [Zea mays] | 0.807692 | Zea mays | 2985 | 4369 |
| | | NP_001148755 | 226496278 | LOC100282371 [Zea mays] | 0.910256 | Zea mays | 2986 | 4370 |
| | | | | &gt:gi\|195621900\|gb\|ACG32780.1\| UBA and UBX | | | | |
| | | | | domain-containing protein [Zea mays] | | | | |
| | | NP_001053018 | 115458835 | Os04g0464500 [Oryza sativa Japonica Group] | 0.753205 | Oryza sativa Japonica Group | 2987 | 4371 |
| | | | | &gt:gi\|113564589\|dbj\|BAF14932.1\| Os04g0464500 | | | | |
| | | | | [Oryza sativa Japonica Group] | | | | |
| | | CAE04359 | 32489876 | OSJNBa0060P14.10 [Oryza sativa Japonica Group] | 0.740385 | Oryza sativa Japonica Group | 2988 | 4372 |
| | | | | &gt:gi\|125548622\|gb\|EAY94444.1\| hypothetical | | | | |
| | | | | protein OsI_16215 [Oryza sativa Indica Group] | | | | |
| | | | | &gt:gi\|125590658\|gb\|EAZ31008.1\| hypothetical | | | | |
| | | | | protein OsJ_15090 [Oryza sativa Japonica Group] | | | | |
| Predicted | 83-101 | XP_002455291 | 242052290 | hypothetical protein SORBIDRAFT_03g007910 | 1 | Sorghum bicolor | 2989 | 4373 |
| siRNA | | | | [Sorghum bicolor] | | | | |
| 59474 | | | | &gt:gi\|241927266\|gb\|EES00411.1\| | | | | |
| | | | | hypothetical protein SORBIDRAFT_03g007910 | | | | |
| | | | | [Sorghum bicolor] | | | | |
| | | NP_001130987 | 212275100 | hypothetical protein LOC100192092 [Zea mays] | 0.7813 | Zea mays | 2990 | 4374 |
| | | | | &gt:gi\|194690638\|gb\|ACF79403.1\| unknown | | | | |
| | | | | [Zea mays] | | | | |
| | | | | &gt:gi\|224030713\|gb\|ACN34432.1\| | | | | |
| | | | | unknown [Zea mays] | | | | |
| | | NP_001130824 | 212275671 | hypothetical protein LOC100191928 [Zea mays] | 0.73851 | Zea mays | 2991 | 4375 |
| | | | | &gt:gi\|194690210\|gb\|ACF79189.1\| unknown | | | | |
| | | | | [Zea mays] | | | | |
| | | ACN27042 | 223945916 | unknown [Zea mays] | 0.787639 | Zea mays | 2992 | 4376 |
| | | NP_001130385 | 212275649 | hypothetical protein LOC100191481 [Zea mays] | 0.786054 | Zea mays | 2993 | 4377 |
| | | | | &gt:gi\|194688994\|gb\|ACF78581.1\| unknown | | | | |
| | | | | [Zea mays] | | | | |
| | | ACG48121 | 195657306 | glycosyltransferase [Zea mays] | 0.784469 | Zea mays | 2994 | 4378 |
| | 267-285 | XP_002466400 | 242038010 | hypothetical protein SORBIDRAFT_01g007120 | 1 | Sorghum bicolor | 2995 | 4379 |
| | | | | [Sorghum bicolor] | | | | |
| | | | | &gt:gi\|241920254\|gb\|EER93398.1\| | | | | |
| | | | | hypothetical protein SORBIDRAFT_01g007120 | | | | |
| | | | | [Sorghum bicolor] | | | | |
| | | ACF79259 | 194690349 | unknown [Zea mays] | 0.989071 | Zea mays | 2996 | 4380 |
| | | NP_001130882 | 212275449 | hypothetical protein LOC100191986 [Zea mays] | 0.986339 | Zea mays | 2997 | 4381 |
| | | | | &gt:gi\|195622040\|gb\|ACG32850.1\| | | | | |
| | | | | serine/threonine-protein kinase SAPK8 | | | | |
| | | | | [Zea mays] | | | | |
| | | ACL52689 | 219884628 | unknown [Zea mays] | 0.978142 | Zea mays | 2998 | 4382 |
| | | BAK05495 | 326487645 | predicted protein | 0.945355 | Hordeum vulgare subsp. vulgare | 2999 | 4383 |
| | | | | [Hordeum vulgare subsp. vulgare] | | | | |
| | | NP_001051371 | 115455540 | Os03g0764800 [Oryza sativa Japonica Group] | 0.934426 | Oryza sativa Japonica Group | 3000 | 4384 |
| | | | | &gt:gi\|71153747\|sp\|Q7Y0B9.1\|SAPK8_ORYSJ | | | | |
| | | | | RecName: Full = Serine/threonine-protein kinase | | | | |
| | | | | SAPK8; AltName: Full = Osmotic stress/abscisic | | | | |
| | | | | acid-activated protein kinase 8 | | | | |
| | | | | &gt:gi\|31415944\|gb\|AAP50965.1\| | | | | |
| | | | | putative serine-threonine protein kinase | | | | |
| | | | | [Oryza sativa Japonica Group] | | | | |
| | | | | &gt:gi\|46917344\|dbj\|BAD18004.1\| | | | | |
| | | | | serine/threonine protein kinase SAPK8 | | | | |
| | | | | [Oryza sativa Japonica Group] | | | | |
| | | | | &gt:gi\|108711239\|gb\|ABF99034.1\| | | | | |
| | | | | Serine/threonine-protein kinase SAPK9, | | | | |
| | | | | putative, expressed [Oryza sativa Japonica Group] | | | | |
| | | | | &gt:gi\|113549842\|dbj\|BAF13285.1\| Os03g0764800 | | | | |
| | | | | [Oryza sativa Japonica Group] | | | | |
| | | CAN62745 | 147788087 | hypothetical protein VITISV_025025 | 0.836066 | Vitis vinifera | 3001 | |
| | | | | [Vitis vinifera] | | | | |
| | | XP_002284959 | 225428694 | PREDICTED: hypothetical protein [Vitis vinifera] | 0.836066 | Vitis vinifera | 3002 | 4385 |
| | | | | &gt:gi\|297741336\|emb\|CBI32467.3\| unnamed protein | | | | |
| | | | | product [Vitis vinifera] | | | | |
| | 612-630 | XP_002440597 | 242089528 | hypothetical protein SORBIDRAFT_09g003790 | 1 | Sorghum bicolor | 3003 | 4386 |
| | | | | [Sorghum bicolor] | | | | |
| | | | | &gt:gi\|241945882\|gb\|EES19027.1\| | | | | |
| | | | | hypothetical protein SORBIDRAFT_09g003790 | | | | |
| | | | | [Sorghum bicolor] | | | | |
| | | XP_002439286 | 242086906 | hypothetical protein SORBIDRAFT_09g003800 | 0.933544 | Sorghum bicolor | 3004 | 4387 |
| | | | | [Sorghum bicolor] | | | | |
| | | | | &gt:gi\|3386565\|gb\|AAC28488.1\| | | | | |
| | | | | 1-aminocyclopropane-1-carboxylate oxidase | | | | |
| | | | | [Sorghum bicolor] | | | | |
| | | | | &gt:gi\|241944571\|gb\|EES17716.1\| | | | | |
| | | | | hypothetical protein SORBIDRAFT_09g003800 | | | | |
| | | | | [Sorghum bicolor] | | | | |
| | | AAR25561 | 38607362 | acc oxidase [Zea mays] | 0.933544 | Zea mays | 3005 | 4388 |
| | | NP_001105234 | 162458172 | acc oxidase [Zea mays] | 0.93038 | Zea mays | 3006 | 4389 |
| | | | | &gt:gi\|38607365\|gb\|AAR25562.1\| | | | | |
| | | | | acc oxidase [Zea mays] | | | | |
| | | NP_001141367 | 226495452 | hypothetical protein LOC100273458 [Zea mays] | 0.93038 | Zea mays | 3007 | 4390 |
| | | | | &gt:gi\|194704206\|gb\|ACF86187.1\| unknown | | | | |
| | | | | [Zea mays] | | | | |
| | | BAK00849 | 326526920 | predicted protein | 0.835443 | Hordeum vulgare subsp. vulgare | 3008 | 4391 |
| | | | | [Hordeum vulgare subsp. vulgare] | | | | |
| | | BAJ87146 | 326509860 | predicted protein [Hordeum vulgare subsp. vulgare] | 0.825949 | Hordeum vulgare subsp. vulgare | 3009 | 4392 |
| | | | | &gt:gi\|326510641\|dbj\|BAJ87537.1\| predicted | | | | |
| | | | | protein [Hordeum vulgare subsp. vulgare] | | | | |
| | | NP_001054657 | 115462114 | Os05g0149400 [Oryza sativa Japonica Group] | 0.794304 | Oryza sativa Japonica Group | 3010 | 4393 |
| | | | | &gt:gi\|52353464\|gb\|AAU44031.1\| putative | | | | |
| | | | | 1-aminocyclopropane-1-carboxylate oxidase | | | | |
| | | | | [Oryza sativa Japonica Group] | | | | |
| | | | | &gt:gi\|113578208\|dbj\|BAF16571.1\| Os05g0149400 | | | | |
| | | | | [Oryza sativa Japonica Group] | | | | |
| | | | | &gt:gi\|215686421\|dbj\|BAG87706.1\| unnamed | | | | |
| | | | | protein product [Oryza sativa Japonica Group] | | | | |
| | | | | &gt:gi\|218196096\|gb\|EEC78523.1\| hypothetical | | | | |
| | | | | protein OsI_18467 [Oryza sativa Indica Group] | | | | |
| | 595-613 | NP_001151137 | 226502371 | LOC100284770 [Zea mays] | 1 | Zea mays | 3011 | 4394 |
| | | | | &gt:gi\|195644530\|gb\|ACG41733.1\| anthranilate | | | | |
| | | | | N-benzoyltransferase protein 1 [Zea mays] | | | | |
| | | XP_002462399 | 242049309 | hypothetical protein SORBIDRAFT_02g025010 | 0.896074 | Sorghum bicolor | 3012 | 4395 |
| | | | | [Sorghum bicolor] | | | | |
| | | | | &gt:gi\|241925776\|gb\|EER98920.1\| | | | | |
| | | | | hypothetical protein SORBIDRAFT_02g025010 | | | | |
| | | | | [Sorghum bicolor] | | | | |
| | | BAK06725 | 326504867 | predicted protein [Hordeum vulgare subsp. vulgare] | 0.840647 | Hordeum vulgare subsp. vulgare | 3013 | 4396 |
| | | | | &gt:gi\|326531672\|dbj\|BAJ97840.1\| predicted protein | | | | |
| | | | | [Hordeum vulgare subsp. vulgare] | | | | |
| | | EAZ09138 | 54362548 | hypothetical protein OsI_31408 | 0.82679 | Oryza sativa Indica Group | 3014 | |
| | | | | [Oryza sativa Indica Group] | | | | |
| | | NP_001063206 | 115479224 | Os09g0422000 [Oryza sativa Japonica Group] | 0.82448 | Oryza sativa Japonica Group | 3015 | 4397 |
| | | | | &gt:gi\|50726120\|dbj\|BAD33641.1\| | | | | |
| | | | | putative hydroxycinnamoyl transferase | | | | |
| | | | | [Oryza sativa Japonica Group] | | | | |
| | | | | &gt:gi\|113631439\|dbj\|BAF25120.1\| | | | | |
| | | | | Os09g0422000 [Oryza sativa Japonica Group] | | | | |
| | | | | &gt:gi\|215678844\|dbj\|BAG95281.1\| unnamed | | | | |
| | | | | protein product [Oryza sativa Japonica Group] | | | | |
| | | NP_001147464 | 226494126 | anthranilate N-benzoyltransferase protein 1 | 0.766744 | Zea mays | 3016 | 4398 |
| | | | | [Zea mays] | | | | |
| | | | | &gt:gi\|195611590\|gb\|ACG27625.1\| | | | | |
| | | | | anthranilate N-benzoyltransferase protein 1 | | | | |
| | | | | [Zea mays] | | | | |
| | | ACF87435 | 194706701 | unknown [Zea mays] | 0.764434 | Zea mays | 3017 | 4399 |
| | | XP_002445569 | 242081600 | hypothetical protein SORBIDRAFT_07g021750 | 0.743649 | Sorghum bicolor | 3018 | 4400 |
| | | | | [Sorghum bicolor] | | | | |
| | | | | &gt:gi\|241941919\|gb\|EES15064.1\| | | | | |
| | | | | hypothetical protein SORBIDRAFT_07g021750 | | | | |
| | | | | [Sorghum bicolor] | | | | |
| | | BAJ94002 | 326489856 | predicted protein | 0.741339 | Hordeum vulgare subsp. vulgare | 3019 | 4401 |
| | | | | [Hordeum vulgare subsp. vulgare] | | | | |
| | | BAJ92446 | 326516581 | predicted protein | 0.720554 | Hordeum vulgare subsp. vulgare | 3020 | 4402 |
| | | | | [Hordeum vulgare subsp. vulgare] | | | | |
| | 231-249 | ACG50012 | 195549568 | SnRK2.8 [Zea mays] | 1 | Zea mays | 3021 | 4403 |
| | 342-360 | XP_002444412 | 242079286 | hypothetical protein SORBIDRAFT_07g021570 | 1 | Sorghum bicolor | 3022 | 4404 |
| | | | | [Sorghum bicolor] | | | | |
| | | | | &gt:gi\|241940762\|gb\|EES13907.1\| | | | | |
| | | | | hypothetical protein SORBIDRAFT_07g021570 | | | | |
| | | | | [Sorghum bicolor] | | | | |
| | | NP_001150060 | 226495678 | mitochondrial glycoprotein [Zea mays] | 0.900433 | Zea mays | 3023 | 4405 |
| | | | | &gt:gi\|195636360\|gb\|ACG37648.1\| | | | | |
| | | | | mitochondrial glycoprotein [Zea mays] | | | | |
| | | | | &gt:gi\|224033179\|gb\|ACN35665.1\| unknown | | | | |
| | | | | [Zea mays] | | | | |
| | 98-116 | NP_001183574 | 308081404 | hypothetical protein LOC100502167 [Zea mays] | 1 | Zea mays | 3024 | 4406 |
| | | | | &gt:gi\|238013154\|gb\|ACR37612.1\| unknown | | | | |
| | | | | [Zea mays] | | | | |
| | | NP_001183715 | 308081496 | hypothetical protein LOC100502308 [Zea mays] | 0.931408 | Zea mays | 3025 | 4407 |
| | | | | &gt:gi\|238014104\|gb\|ACR38087.1\| unknown | | | | |
| | | | | [Zea mays] | | | | |
| | | XP_002458491 | 242058690 | hypothetical protein SORBIDRAFT_03g034670 | 0.859206 | Sorghum bicolor | 3026 | 4408 |
| | | | | [Sorghum bicolor] | | | | |
| | | | | &gt:gi\|241930466\|gb\|EES03611.1\| | | | | |
| | | | | hypothetical protein SORBIDRAFT_03g034670 | | | | |
| | | | | [Sorghum bicolor] | | | | |
| | | BAB56055 | 20975281 | WRKY transcription factor-like | 0.707581 | Oryza sativa Japonica Group | 3027 | 4409 |
| | | | | [Oryza sativa Japonica Group] | | | | |
| | | | | &gt:gi\|46394280\|tpg\|DAA05078.1\| | | | | |
| | | | | TPA_inf: WRKY transcription factor 13 | | | | |
| | | | | [Oryza sativa (japonica cultivar-group)] | | | | |
| | | | | &gt:gi\|58042735\|gb\|AAW63711.1\| WRKY13 | | | | |
| | | | | [Oryza sativa Japonica Group] | | | | |
| | | | | &gt:gi\|215695180\|dbj\|BAG90371.1\| unnamed | | | | |
| | | | | protein product [Oryza sativa Japonica Group] | | | | |
| | | EAY75827 | 54362548 | hypothetical protein OsI_03741 | 0.703971 | Oryza sativa Indica Group | 3028 | |
| | | | | [Oryza sativa Indica Group] | | | | |
| | | | | &gt:gi\|132566305\|gb\|ABO34049.1\| | | | | |
| | | | | defense-responsive protein WRKY13 | | | | |
| | | | | [Oryza sativa Indica Group] | | | | |
| | | EAZ13545 | 54398660 | hypothetical protein OsJ_03461 | 0.703971 | Oryza sativa Japonica Group | 3029 | |
| | | | | [Oryza sativa Japonica Group] | | | | |
| | 370-388 | XP_002465546 | 242036302 | hypothetical protein SORBIDRAFT_01g040900 | 1 | Sorghum bicolor | 3030 | 4410 |
| | | | | [Sorghum bicolor] | | | | |
| | | | | &gt:gi\|241919400\|gb\|EER92544.1\| | | | | |
| | | | | hypothetical protein SORBIDRAFT_01g040900 | | | | |
| | | | | [Sorghum bicolor] | | | | |
| | | NP_001149345 | 226504079 | phosphomevalonate kinase [Zea mays] | 0.916016 | Zea mays | 3031 | 4411 |
| | | | | &gt:gi\|195626562\|gb\|ACG35111.1\| | | | | |
| | | | | phosphomevalonate kinase [Zea mays] | | | | |
| | | ACN31689 | 223975002 | unknown [Zea mays] | 0.916016 | Zea mays | 3032 | 4412 |
| | | ACG35008 | 195626355 | phosphomevalonate kinase [Zea mays] | 0.919922 | Zea mays | 3033 | 4413 |
| | | NP_001049577 | 115451952 | Os03g0253100 [Oryza sativa Japonica Group] | 0.865234 | Oryza sativa Japonica Group | 3034 | 4414 |
| | | | | &gt:gi\|108707213\|gb\|ABF95008.1\| | | | | |
| | | | | phosphomevalonate kinase, putative, expressed | | | | |
| | | | | [Oryza sativa Japonica Group] | | | | |
| | | | | &gt:gi\|113548048\|dbj\|BAF11491.1\| Os03g0253100 | | | | |
| | | | | [Oryza sativa Japonica Group] | | | | |
| | | EEE58712 | 54398660 | hypothetical protein OsJ_10169 | 0.865234 | Oryza sativa Japonica Group | 3035 | |
| | | | | [Oryza sativa Japonica Group] | | | | |
| | | EEC74880 | 54362548 | hypothetical protein OsI_10786 | 0.863281 | Oryza sativa Indica Group | 3036 | |
| | | | | [Oryza sativa Indica Group] | | | | |
| | 821-839 | XP_002437161 | 242093341 | hypothetical protein SORBIDRAFT_10g022190 | 1 | Sorghum bicolor | 3037 | 4415 |
| | | | | [Sorghum bicolor] | | | | |
| | | | | &gt:gi\|241915384\|gb\|EER88528.1\| | | | | |
| | | | | hypothetical protein SORBIDRAFT_10g022190 | | | | |
| | | | | [Sorghum bicolor] | | | | |
| | | NP_001105942 | 162463452 | multidrug resistance protein associated 1 | 0.918409 | Zea mays | 3038 | 4416 |
| | | | | [Zea mays] | | | | |
| | | | | &gt:gi\|37694078\|gb\|AAO72315.1\| | | | | |
| | | | | multidrug resistance associated protein 1 | | | | |
| | | | | [Zea mays] | | | | |
| | | | | &gt:gi\|37694080\|gb\|AAO72316.1\| | | | | |
| | | | | multidrug resistance associated protein 1 | | | | |
| | | | | [Zea mays] | | | | |
| | | BAJ96820 | 326521233 | predicted protein | 0.805125 | Hordeum vulgare subsp. vulgare | 3039 | 4417 |
| | | | | [Hordeum vulgare subsp. vulgare] | | | | |
| | 210-228 | NP_001149657 | 226492307 | serine/threonine-protein kinase SAPK8 | 1 | Zea mays | 3040 | 4418 |
| | | | | [Zea mays] | | | | |
| | | | | &gt:gi\|188011171\|gb\|ACD44937.1\| | | | | |
| | | | | osmotic stress/ABA-activated protein kinase | | | | |
| | | | | [Zea mays] | | | | |
| | | | | &gt:gi\|195629240\|gb\|ACG36261.1\| | | | | |
| | | | | serine/threonine-protein kinase SAPK8 | | | | |
| | | | | [Zea mays] | | | | |
| | | | | &gt:gi\|238011080\|gb\|ACR36575.1\| | | | | |
| | | | | unknown [Zea mays] | | | | |
| Predicted | 794-817 | NP_001143962 | 226501495 | hypothetical protein LOC100276777 | 1 | Zea mays | 3041 | 4419 |
| siRNA | | | | [Zea mays] | | | | |
| 59580 | | | | &gt:gi\|195633825\|gb\|ACG36757.1\| | | | | |
| | | | | hypothetical protein [Zea mays] | | | | |
| | | BAJ96330 | 326516675 | predicted protein | 0.78209 | Hordeum vulgare subsp. vulgare | 3042 | 4420 |
| | | | | [Hordeum vulgare subsp. vulgare] | | | | |
| | | NP_001060795 | 115474396 | Os08g0107100 [Oryza sativa Japonica Group] | 0.81791 | Oryza sativa Japonica Group | 3043 | 4421 |
| | | | | &gt:gi\|42408231\|dbj\|BAD09388.1\| unknown | | | | |
| | | | | protein [Oryza sativa Japonica Group] | | | | |
| | | | | &gt:gi\|113622764\|dbj\|BAF22709.1\| Os08g0107100 | | | | |
| | | | | [Oryza sativa Japonica Group] | | | | |
| | | | | &gt:gi\|215694360\|dbj\|BAG89353.1\| unnamed | | | | |
| | | | | protein product [Oryza sativa Japonica Group] | | | | |
| Predicted | 160-178 | XP_002456611 | 242054930 | hypothetical protein SORBIDRAFT_03g039360 | 1 | Sorghum bicolor | 3044 | 4422 |
| siRNA | | | | [Sorghum bicolor] | | | | |
| 59736 | | | | &gt:gi\|241928586\|gb\|EES01731.1\| | | | | |
| | | | | hypothetical protein SORBIDRAFT_03g039360 | | | | |
| | | | | [Sorghum bicolor] | | | | |
| | | NP_001183165 | 308081376 | hypothetical protein LOC100501536 [Zea mays] | 0.984568 | Zea mays | 3045 | 4423 |
| | | | | &gt:gi\|238009750\|gb\|ACR35910.1\| unknown | | | | |
| | | | | [Zea mays] | | | | |
| | | XP_002441219 | 242090772 | hypothetical protein SORBIDRAFT_09g022580 | 0.96142 | Sorghum bicolor | 3046 | 4424 |
| | | | | [Sorghum bicolor] | | | | |
| | | | | &gt:gi\|241946504\|gb\|EES19649.1\| | | | | |
| | | | | hypothetical protein SORBIDRAFT_09g022580 | | | | |
| | | | | [Sorghum bicolor] | | | | |
| | | ACL53191 | 219885632 | unknown [Zea mays] | 0.929012 | Zea mays | 3047 | 4425 |
| | | NP_001068540 | 115486792 | Os11g0703900 [Oryza sativa Japonica Group] | 0.938272 | Oryza sativa Japonica Group | 3048 | 4426 |
| | | | | &gt:gi\|62733235\|gb\|AAX95352.1\| dnaK-type | | | | |
| | | | | molecular chaperone hsp70 - rice (fragment) | | | | |
| | | | | [Oryza sativa Japonica Group] | | | | |
| | | | | &gt:gi\|77552703\|gb\|ABA95500.1\| Heat shock | | | | |
| | | | | cognate 70 kDa protein, putative, expressed | | | | |
| | | | | [Oryza sativa Japonica Group] | | | | |
| | | | | &gt:gi\|113645762\|dbj\|BAF28903.1\| | | | | |
| | | | | Os11g0703900 [Oryza sativa Japonica Group] | | | | |
| | | AAR17080 | 38325814 | heat shock protein 70-3 | 0.935185 | Nicotiana tabacum | 3049 | 4427 |
| | | | | [Nicotiana tabacum] | | | | |
| | | AAB99745 | 2827001 | HSP70 [Triticum aestivum] | 0.936728 | Triticum aestivum | 3050 | 4428 |
| | | BAK00257 | 326519768 | predicted protein | 0.936728 | Hordeum vulgare subsp. vulgare | 3051 | 4429 |
| | | | | [Hordeum vulgare subsp. vulgare] | | | | |
| | 245-263 | XP_002447095 | 242074317 | hypothetical protein SORBIDRAFT_06g028470 | 1 | Sorghum bicolor | 3052 | 4430 |
| | | | | [Sorghum bicolor] | | | | |
| | | | | &gt:gi\|241938278\|gb\|EES11423.1\| | | | | |
| | | | | hypothetical protein SORBIDRAFT_06g028470 | | | | |
| | | | | [Sorghum bicolor] | | | | |
| | | NP_001053867 | 115460533 | Os04g0615100 [Oryza sativa Japonica Group] | 0.819887 | Oryza sativa Japonica Group | 3053 | 4431 |
| | | | | &gt:gi\|38344254\|emb\|CAD41792.2\| | | | | |
| | | | | OSJNBa0008M17.7 [Oryza sativa Japonica Group] | | | | |
| | | | | &gt:gi\|113565438\|dbj\|BAF15781.1\| Os04g0615100 | | | | |
| | | | | [Oryza sativa Japonica Group] | | | | |
| | | | | &gt:gi\|215697586\|dbj\|BAG91580.1\| unnamed | | | | |
| | | | | protein product [Oryza sativa Japonica Group] | | | | |
| | | | | &gt:gi\|218195572\|gb\|EEC77999.1\| hypothetical | | | | |
| | | | | protein OsI_17392 [Oryza sativa Indica Group] | | | | |
| | | | | &gt:gi\|222629547\|gb\|EEE61679.1\| hypothetical | | | | |
| | | | | protein OsJ_16148 [Oryza sativa Japonica Group] | | | | |
| | | NP_001170155 | 293334500 | hypothetical protein LOC100384087 [Zea mays] | 0.714822 | Zea mays | 3054 | 4432 |
| | | | | &gt:gi\|224033871\|gb\|ACN36011.1\| unknown | | | | |
| | | | | [Zea mays] | | | | |
| | | ACR34350 | 238006629 | unknown [Zea mays] | 0.714822 | Zea mays | 3055 | 4433 |
| | 448-466 | ACF84208 | 194700247 | unknown [Zea mays] | 1 | Zea mays | 3056 | 4434 |
| | | | | &gt:gi\|194708648\|gb\|ACF88408.1\| unknown | | | | |
| | | | | [Zea mays] | | | | |
| | | NP_001105049 | 162464284 | D-type cyclin [Zea mays] | 0.98017 | Zea mays | 3057 | 4435 |
| | | | | &gt:gi\|19070613\|gb\|AAL83927.1\|AF351190_1 | | | | |
| | | | | D-type cyclin [Zea mays] | | | | |
| | | ACG35290 | 195626919 | cyclin delta-3 [Zea mays] | 0.963173 | Zea mays | 3058 | 4436 |
| | | ACN27070 | 223945972 | unknown [Zea mays] | 0.750708 | Zea mays | 3059 | 4437 |
| | | ACG25429 | 195607197 | cyclin delta-3 [Zea mays] | 0.747875 | Zea mays | 3060 | 4438 |
| | | XP_002465679 | 242036568 | hypothetical protein SORBIDRAFT_01g043610 | 0.767705 | Sorghum bicolor | 3061 | 4439 |
| | | | | [Sorghum bicolor] | | | | |
| | | | | &gt:gi\|241919533\|gb\|EER92677.1\| | | | | |
| | | | | hypothetical protein SORBIDRAFT_01g043610 | | | | |
| | | | | [Sorghum bicolor] | | | | |
| | | NP_001105863 | 162459778 | cyclin D5,2 [Zea mays] | 0.725212 | Zea mays | 3062 | 4440 |
| | | | | &gt:gi\|61741624\|gb\|AAX54698.1\| | | | | |
| | | | | cyclin D5,3B [Zea mays] | | | | |
| | 167-185 | NP_001055754 | 297604614 | Os05g0460000 [Oryza sativa Japonica Group] | 1 | Oryza sativa Japonica Group | 3063 | 4441 |
| | | | | &gt:gi\|47900318\|gb\|AAT39165.1\| putative hsp70 | | | | |
| | | | | [Oryza sativa Japonica Group] | | | | |
| | | | | &gt:gi\|113579305\|dbj\|BAF17668.1\| Os05g0460000 | | | | |
| | | | | [Oryza sativa Japonica Group] | | | | |
| | | | | &gt:gi\|215769174\|dbj\|BAH01403.1\| | | | | |
| | | | | unnamed protein product | | | | |
| | | | | [Oryza sativa Japonica Group] | | | | |
| | | | | &gt:gi\|222631852\|gb\|EEE63984.1\| hypothetical | | | | |
| | | | | protein OsJ_18811 [Oryza sativa Japonica Group] | | | | |
| | | XP_002311161 | 224098389 | predicted protein [Populus trichocarpa] | 0.94582 | Populus trichocarpa | 3064 | 4442 |
| | | | | &gt:gi\|222850981\|gb\|EEE88528.1\| predicted | | | | |
| | | | | protein [Populus trichocarpa] | | | | |
| | | ACJ11741 | 211906495 | heat shock protein 70 [Gossypium hirsutum] | 0.944272 | Gossypium hirsutum | 3065 | 4443 |
| | | ACD45076 | 188011547 | heat-shock protein 70 [Dactylis glomerata] | 0.948916 | Dactylis glomerata | 3066 | 4444 |
| | 160-178 | NP_001183626 | 308081354 | hypothetical protein LOC100502220 [Zea mays] | 1 | Zea mays | 3067 | 4445 |
| | | | | &gt:gi\|238013512\|gb\|ACR37791.1\| unknown | | | | |
| | | | | [Zea mays] | | | | |
| | | XP_002457205 | 242056118 | hypothetical protein SORBIDRAFT_03g003290 | 0.838791 | Sorghum bicolor | 3068 | 4446 |
| | | | | [Sorghum bicolor] | | | | |
| | | | | &gt:gi\|241929180\|gb\|EES02325.1\| | | | | |
| | | | | hypothetical protein SORBIDRAFT_03g003290 | | | | |
| | | | | [Sorghum bicolor] | | | | |
| | 42-60 | ACG31293 | 195618925 | histone H4 [Zea mays] | 1 | Zea mays | 3069 | 4447 |
| | | | | &gt:gi\|195641748\|gb\|ACG40342.1\| histone | | | | |
| | | | | H4 [Zea mays] | | | | |
| | | ACG31227 | 195618793 | histone H4 [Zea mays] | 0.96875 | Zea mays | 3070 | 4448 |
| | | ACD76815 | 189099146 | histone 4 [Capsella bursa-pastoris] | 0.96875 | Capsella bursa-pastoris | 3071 | 4449 |
| | | 1101277A | | histone H4 | 0.96875 | Triticum aestivum | 3072 | |
| | | P62786 | | RecName: Full = Histone H4 variant TH091 | 0.96875 | Triticum aestivum | 3073 | |
| | | | | &gt:gi\|170747\|gb\|AAA34292.1\| histone H4 | | | | |
| | | | | [Triticum aestivum] | | | | |
| | | ACG31455 | 195619249 | histone H4 [Zea mays] | 0.96875 | Zea mays | 3074 | 4450 |
| | | NP_180441 | 42569420 | histone H4 [Arabidopsis thaliana] | 0.96875 | Arabidopsis thaliana | 3075 | 4451 |
| | | | | &gt:gi\|15231283\|ref\|NP_190179.1\| | | | | |
| | | | | histone H4 [Arabidopsis thaliana] | | | | |
| | | | | &gt:gi\|15232318\|ref\|NP_190941.1\| | | | | |
| | | | | histone H4 [Arabidopsis thaliana] | | | | |
| | | | | &gt:gi\|18390794\|ref\|NP_563793.1\| | | | | |
| | | | | histone H4 [Arabidopsis thaliana] | | | | |
| | | | | &gt:gi\|18390815\|ref\|NP_563797.1\| | | | | |
| | | | | histone H4 [Arabidopsis thaliana] | | | | |
| | | | | &gt:gi\|18424269\|ref\|NP_568911.1\| | | | | |
| | | | | histone H4 [Arabidopsis thaliana] | | | | |
| | | | | &gt:gi\|18424305\|ref\|NP_568918.1\| | | | | |
| | | | | histone H4 [Arabidopsis thaliana] | | | | |
| | | | | &gt:gi\|30680368\|ref\|NP_850939.1\| | | | | |
| | | | | histone H4 [Arabidopsis thaliana] | | | | |
| | | | | &gt:gi\|30692704\|ref\|NP_850660.1\| | | | | |
| | | | | histone H4 [Arabidopsis thaliana] | | | | |
| | | | | &gt:gi\|115447965\|ref\|NP_001047762.1\| | | | | |
| | | | | Os02g0684500 [Oryza sativa Japonica Group] | | | | |
| | | | | &gt:gi\|115450365\|ref\|NP_001048783.1\| | | | | |
| | | | | Os03g0119900 [Oryza sativa Japonica Group] | | | | |
| | | | | &gt:gi\|115460128\|ref\|NP_001053664.1\| | | | | |
| | | | | Os04g0583600 [Oryza sativa Japonica Group] | | | | |
| | | | | &gt:gi\|115464339\|ref\|NP_001055769.1\| | | | | |
| | | | | Os05g0462700 [Oryza sativa Japonica Group] | | | | |
| | | | | &gt:gi\|115464373\|ref\|NP_001055786.1\| | | | | |
| | | | | Os05g0466600 [Oryza sativa Japonica Group] | | | | |
| | | | | &gt:gi\|115479303\|ref\|NP_001063245.1\| | | | | |
| | | | | Os09g0433600 [Oryza sativa Japonica Group] | | | | |
| | | | | &gt:gi\|115480569\|ref\|NP_001063878.1\| | | | | |
| | | | | Os09g0553100 [Oryza sativa Japonica Group] | | | | |
| | | | | &gt:gi\|1115483172\|ref\|NP_001065 179.1\| | | | | |
| | | | | Os10g0539500 [Oryza sativa Japonica Group] | | | | |
| | | | | &gt:gi\|212722314\|ref\|NP_001131585.1\| | | | | |
| | | | | histone H4 [Zea mays] | | | | |
| | | | | &gt:gi\|297597921\|ref\|NP_001044729.2l | | | | |
| | | | | Os01g0835900 [Oryza sativa Japonica Group] | | | | |
| | | | | &gt:gi\|297725773\|ref\|NP_001175250.1\| | | | | |
| | | | | Os07g0549900 [Oryza sativa Japonica Group] | | | | |
| | | | | &gt:gi\|167998046\|ref\|XP_001751729.1\| histone | | | | |
| | | | | H4 [Physcomitrella patens subsp. patens] | | | | |
| | | | | &gt:gi\|168027663\|ref\|XP_001766349.1\| histone | | | | |
| | | | | H4 [Physcomitrella patens subsp. patens] | | | | |
| | | | | &gt:gi\|168031388\|ref\|XP_001768203.1\| histone | | | | |
| | | | | H4 [Physcomitrella patens subsp. patens] | | | | |
| | | | | &gt:gi\|168034381\|ref\|XP_001769691.1\| histone | | | | |
| | | | | H4 [Physcomitrella patens subsp. patens] | | | | |
| | | | | &gt:gi\|168037263\|ref\|XP_001771124.1\| histone | | | | |
| | | | | H4 [Physcomitrella patens subsp. patens] | | | | |
| | | | | &gt:gi\|168042214\|ref\|XP_001773584.1\| histone | | | | |
| | | | | H4 [Physcomitrella patens subsp. patens] | | | | |
| | | | | &gt:gi\|168046645\|ref\|XP_001775783.1\| | | | | |
| | | | | histone H4 [Physcomitrella patens subsp. patens] | | | | |
| | | | | &gt:gi\|168054207\|ref\|XP_001779524.1\| predicted | | | | |
| | | | | protein [Physcomitrella patens subsp. patens] | | | | |
| | | | | &gt:gi\|168055941\|ref\|XP_001779981.1\| histone | | | | |
| | | | | H4 [Physcomitrella patens subsp. patens] | | | | |
| | | | | &gt:gi\|168056875\|ref\|XP_001780443.1\| histone | | | | |
| | | | | H4 [Physcomitrella patens subsp. patens] | | | | |
| | | | | &gt:gi\|168063722\|ref\|XP_001783818.1\| histone | | | | |
| | | | | H4 [Physcomitrella patens subsp. patens] | | | | |
| | | | | &gt:gi\|224097150\|ref\|XP_002310853.1\| | | | | |
| | | | | histone H4 [Populus trichocarpa] | | | | |
| | | | | &gt:gi\|224097156\|ref\|XP_002310855.1\| | | | | |
| | | | | histone H4 [Populus trichocarpa] | | | | |
| | | | | &gt:gi\|224097164\|ref\|XP_002310859.1\| | | | | |
| | | | | histone H4 [Populus trichocarpa] | | | | |
| | | | | &gt:gi\|224098168\|ref\|XP_002311129.1\| | | | | |
| | | | | histone H4 [Populus trichocarpa] | | | | |
| | | | | &gt:gi\|224112905\|ref\|XP_002316326.1\| | | | | |
| | | | | histone H4 [Populus trichocarpa] | | | | |
| | | | | &gt:gi\|224126063\|ref\|XP_002329652.1\| | | | | |
| | | | | histone H4 [Populus trichocarpa] | | | | |
| | | | | &gt:gi\|224133734\|ref\|XP_002327667.1\| | | | | |
| | | | | histone H4 [Populus trichocarpa] | | | | |
| | | | | &gt:gi\|224133742\|ref\|XP_002327669.1\| | | | | |
| | | | | histone H4 [Populus trichocarpa] | | | | |
| | | | | &gt:gi\|224142251\|ref\|XP_002324472.1\| | | | | |
| | | | | histone H4 [Populus trichocarpa] | | | | |
| | | | | &gt:gi\|224142255\|ref\|XP_002324474.1\| | | | | |
| | | | | histone H4 [Populus trichocarpa] | | | | |
| | | | | &gt:gi\|224143736\|ref\|XP_002325056.1\| | | | | |
| | | | | histone H4 [Populus trichocarpa] | | | | |
| | | | | &gt:gi\|224167386\|ref\|XP_002339024.1\| | | | | |
| | | | | histone H4 [Populus trichocarpa] | | | | |
| | | | | &gt:gi\|225435016\|ref\|XP_002284158.1\| | | | | |
| | | | | PREDICTED: hypothetical protein | | | | |
| | | | | isoform 1 [Vitis vinifera] | | | | |
| | | | | &gt:gi\|225435124\|ref\|XP_002284569.1\| | | | | |
| | | | | PREDICTED: hypothetical protein | | | | |
| | | | | isoform 2 [Vitis vinifera] | | | | |
| | | | | &gt:gi\|225435126\|ref\|XP_002284564.1\| | | | | |
| | | | | PREDICTED: hypothetical protein | | | | |
| | | | | isoform 1 [Vitis vinifera] | | | | |
| | | | | &gt:gi\|225440304\|ref\|XP_002262845.1\| | | | | |
| | | | | PREDICTED: hypothetical protein | | | | |
| | | | | isoform 1 [Vitis vinifera] | | | | |
| | | | | &gt:gi\|225448771\|ref\|XP_002281801.1\| | | | | |
| | | | | PREDICTED: hypothetical protein | | | | |
| | | | | isoform 2 [Vitis vinifera] | | | | |
| | | | | &gt:gi\|225448773\|ref\|XP_002281789.1\| | | | | |
| | | | | PREDICTED: hypothetical protein | | | | |
| | | | | isoform 1 [Vitis vinifera] | | | | |
| | | | | &gt:gi\|225449567\|ref\|XP_002283894.1\| | | | | |
| | | | | PREDICTED: hypothetical protein | | | | |
| | | | | [Vitis vinifera] | | | | |
| | | | | &gt:gi\|225449569\|ref\|XP_002283901.1\| | | | | |
| | | | | PREDICTED: hypothetical protein | | | | |
| | | | | isoform 1 [Vitis vinifera] | | | | |
| | | | | &gt:gi\|225449573\|ref\|XP_002283912.1\| | | | | |
| | | | | PREDICTED: hypothetical protein | | | | |
| | | | | isoform 1 [Vitis vinifera] | | | | |
| | | | | &gt:gi\|242035235\|ref\|XP_002465012.1\| | | | | |
| | | | | hypothetical protein SORBIDRAFT_01g030460 | | | | |
| | | | | [Sorghum bicolor] | | | | |
| | | | | &gt:gi\|242042459\|ref\|XP_002468624.1\| | | | | |
| | | | | hypothetical protein SORBIDRAFT_01g049250 | | | | |
| | | | | [Sorghum bicolor] | | | | |
| | | | | &gt:gi\|242044758\|ref\|XP_002460250.1\| | | | | |
| | | | | hypothetical protein SORBIDRAFT_02g025440 | | | | |
| | | | | [Sorghum bicolor] | | | | |
| | | | | &gt:gi\|242050118\|ref\|XP_002462803.1\| | | | | |
| | | | | hypothetical protein SORBIDRAFT_02g032240 | | | | |
| | | | | [Sorghum bicolor] | | | | |
| | | | | &gt:gi\|242051969\|ref\|XP_002455130.1\| | | | | |
| | | | | hypothetical protein SORBIDRAFT_03g004840 | | | | |
| | | | | [Sorghum bicolor] | | | | |
| | | | | &gt:gi\|242051971\|ref\|XP_002455131.1\| | | | | |
| | | | | hypothetical protein SORBIDRAFT_03g004870 | | | | |
| | | | | [Sorghum bicolor] | | | | |
| | | | | &gt:gi\|242054901\|ref\|XP_002456596.1\| | | | | |
| | | | | hypothetical protein SORBIDRAFT_03g039090 | | | | |
| | | | | [Sorghum bicolor] | | | | |
| | | | | &gt:gi\|242056281\|ref\|XP_002457286.1\| | | | | |
| | | | | hypothetical protein SORBIDRAFT_03g004890 | | | | |
| | | | | [Sorghum bicolor] | | | | |
| | | | | &gt:gi\|242062908\|ref\|XP_002452743.1\| | | | | |
| | | | | hypothetical protein SORBIDRAFT_04g031620 | | | | |
| | | | | [Sorghum bicolor] | | | | |
| | | | | &gt:gi\|242076918\|ref\|XP_002448395.1\| | | | | |
| | | | | hypothetical protein SORBIDRAFT_06g026490 | | | | |
| | | | | [Sorghum bicolor] | | | | |
| | | | | &gt:gi\|242088199\|ref\|XP_002439932.1\| | | | | |
| | | | | hypothetical protein SORBIDRAFT_09g022920 | | | | |
| | | | | [Sorghum bicolor] | | | | |
| | | | | &gt:gi\|255537239\|ref\|XP_002509686.1\| | | | | |
| | | | | histone h4, putative [Ricinus communis] | | | | |
| | | | | &gt:gi\|255555809\|ref\|XP_002518940.1\| | | | | |
| | | | | histone h4, putative [Ricinus communis] | | | | |
| | | | | &gt:gi\|255568195\|ref\|XP_002525073.1\| | | | | |
| | | | | histone h4, putative [Ricinus communis] | | | | |
| | | | | &gt:gi\|255581703\|ref\|XP_002531654.1\| | | | | |
| | | | | histone h4, putative [Ricinus communis] | | | | |
| | | | | &gt:gi\|255581707\|ref\|XP_002531656.1\| | | | | |
| | | | | histone h4, putative [Ricinus communis] | | | | |
| | | | | &gt:gi\|255584136\|ref\|XP_002532808.1\| | | | | |
| | | | | histone h4, putative [Ricinus communis] | | | | |
| | | | | &gt:gi\|297793525\|ref\|XP_002864647.1\| | | | | |
| | | | | hypothetical protein ARALYDRAFT_496101 | | | | |
| | | | | [Arabidopsis lyrata subsp. lyrata] | | | | |
| | | | | &gt:gi\|297815748\|ref\|XP_002875757.1\| | | | | |
| | | | | hypothetical protein ARALYDRAFT_484971 | | | | |
| | | | | [Arabidopsis lyrata subsp. lyrata] | | | | |
| | | | | &gt:gi\|297819196\|ref\|XP_002877481.1\| | | | | |
| | | | | hypothetical protein ARALYDRAFT_485010 | | | | |
| | | | | [Arabidopsis lyrata subsp. lyrata] | | | | |
| | | | | &gt:gi\|297820110\|ref\|XP_002877938.1\| | | | | |
| | | | | hypothetical protein ARALYDRAFT_485763 | | | | |
| | | | | [Arabidopsis lyrata subsp. lyrata] | | | | |
| | | | | &gt:gi\|297826247\|ref\|XP_002881006.1\| | | | | |
| | | | | hypothetical protein ARALYDRAFT_481787 | | | | |
| | | | | [Arabidopsis lyrata subsp. lyrata] | | | | |
| | | | | &gt:gi\|28202123\|sp\|P59259.2\|H4_ARATH | | | | |
| | | | | RecName: Full = Histone H4 | | | | |
| | | | | &gt:gi\|51315699\|sp\|Q6LAF3.3\|H4_FLATR | | | | |
| | | | | RecName: Full = Histone H4 | | | | |
| | | | | &gt:gi\|51315702\|sp\|Q6PMI5.3\|H4_CHEMJ | | | | |
| | | | | RecName: Full = Histone H4 | | | | |
| | | | | &gt:gi\|51315711\|sp\|Q6WZ83.3\|H4_EUCGL | | | | |
| | | | | RecName: Full = Histone H4 | | | | |
| | | | | &gt:gi\|51315719\|sp\|Q76H85.3\|H4_SILLA | | | | |
| | | | | RecName: Full = Histone H4 | | | | |
| | | | | &gt:gi\|51317313\|sp\|P62788.2\|H4_PEA | | | | |
| | | | | RecName: Full = Histone H4 | | | | |
| | | | | &gt:gi\|51317325\|sp\|P62787.2\|H4_MAIZE | | | | |
| | | | | RecName: Full = Histone H4 | | | | |
| | | | | &gt:gi\|51317341\|sp\|P62887.2\|H4_LOLTE | | | | |
| | | | | RecName: Full = Histone H4 | | | | |
| | | | | &gt:gi\|78100002\|sp\|P62785.2\|H41_WHEAT | | | | |
| | | | | RecName: Full = Histone H4 variant TH011 | | | | |
| | | | | &gt:gi\|302425021\|sp\|P0CG89.1\|H4_SOYBN | | | | |
| | | | | RecName: Full = Histone H4 | | | | |
| | | | | &gt:gi\|8439886\|gb\|AAF75072.1\|AC007583_8 | | | | |
| | | | | Identical to histone H4 from | | | | |
| | | | | Arabidopsis thaliana gi\|S06904 | | | | |
| | | | | &gt:gi\|8439903\|gb\|AAF75089.1\|AC007583_25 | | | | |
| | | | | Identical to histone H4 from | | | | |
| | | | | Arabidopsis thaliana gi\|S06904 | | | | |
| | | | | &gt:gi\|11762277\|gb\|AAG40410.1\|AF325058_1 | | | | |
| | | | | AT5g59690 [Arabidopsis thaliana] | | | | |
| | | | | &gt:gi\|12039318\|gb\|AAG46106.1\|AC073166_4 | | | | |
| | | | | histone H4 [Oryza sativa Japonica Group] | | | | |
| | | | | &gt:gi\|12248031\|gb\|AAG50107.1\|AF334729_1 | | | | |
| | | | | putative histone H4 protein [Arabidopsis thaliana] | | | | |
| | | | | &gt:gi\|21795\|emb\|CAA24924.1\| | | | | |
| | | | | unnamed protein product [Triticum aestivum] | | | | |
| | | | | &gt:gi\|166740\|gb\|AAA32810.1\| | | | | |
| | | | | histone H4 [Arabidopsis thaliana] | | | | |
| | | | | &gt:gi\|166742\|gb\|AAA32811.1\| | | | | |
| | | | | histone H4 [Arabidopsis thaliana] | | | | |
| | | | | &gt:gi\|168499\|gb\|AAA33474.1\| | | | | |
| | | | | histone H4 (H4C13) [Zea mays] | | | | |
| | | | | &gt:gi\|168501\|gb\|AAA33475.1\| | | | | |
| | | | | histone H4 [Zea mays] | | | | |
| | | | | &gt:gi\|168503\|gb\|AAA33476.1\| | | | | |
| | | | | histone H4 [Zea mays] | | | | |
| | | | | &gt:gi\|498898\|gb\|AAA86948.1\| | | | | |
| | | | | histone H4 homolog [Pisum sativum] | | | | |
| | | | | &gt:gi\|1806285\|emb\|CAB01914.1\| | | | | |
| | | | | histone H4 homologue [Sesbania rostrata] | | | | |
| | | | | &gt:gi\|3927823\|gb\|AAC79580.1\| | | | | |
| | | | | histone H4 [Arabidopsis thaliana] | | | | |
| | | | | &gt:gi\|6009915\|dbj\|BAA85120.1\| | | | | |
| | | | | histone H4-like protein [Solanum melongena] | | | | |
| | | | | &gt:gi\|6522611\|emb\|CAB62023.1\| | | | | |
| | | | | histone H4-like protein [Arabidopsis thaliana] | | | | |
| | | | | &gt:gi\|7339494\|emb\|CAB82817.1\| | | | | |
| | | | | Histone H4-like protein [Arabidopsis thaliana] | | | | |
| | | | | &gt:gi\|7629993\|emb\|CAB88335.1\| | | | | |
| | | | | histone H4-like protein [Arabidopsis thaliana] | | | | |
| | | | | &gt:gi\|9757918\|dbj\|BAB08365.1\| | | | | |
| | | | | histone H4 [Arabidopsis thaliana] | | | | |
| | | | | &gt:gi\|9758835\|dbj\|BAB09507.1\| | | | | |
| | | | | histone H4 [Arabidopsis thaliana] | | | | |
| | | | | &gt:gi\|13277212\|emb\|CAC34411.1\| | | | | |
| | | | | histone H4 [Flaveria trinervia] | | | | |
| | | | | &gt:gi\|16209693\|gb\|AAL14404.1\| | | | | |
| | | | | AT5g59690/mth12_90 [Arabidopsis thaliana] | | | | |
| | | | | &gt:gi\|17065282\|gb\|AAL32795.1\| | | | | |
| | | | | histone H4-like protein [Arabidopsis thaliana] | | | | |
| | | | | &gt:gi\|17380766\|gb\|AAL36213.1\| putative | | | | |
| | | | | histone H4 protein [Arabidopsis thaliana] | | | | |
| | | | | &gt:gi\|20160804\|dbj\|BAB89744.1\| | | | | |
| | | | | histone H4 [Oryza sativa Japonica Group] | | | | |
| | | | | &gt:gi\|20198175\|gb\|AAM15445.1\| | | | | |
| | | | | histone H4 [Arabidopsis thaliana] | | | | |
| | | | | &gt:gi\|20260010\|gb\|AAM13352.1\| | | | | |
| | | | | histone H4-like protein [Arabidopsis thaliana] | | | | |
| | | | | &gt:gi\|20466418\|gb\|AAM20526.1\| | | | | |
| | | | | histone H4-like protein [Arabidopsis thaliana] | | | | |
| | | | | &gt:gi\|21537385\|gb\|AAM61726.1\| | | | | |
| | | | | histone H4-like protein [Arabidopsis thaliana] | | | | |
| | | | | &gt:gi\|21553628\|gb\|AAM62721.1\| | | | | |
| | | | | histone H4-like protein [Arabidopsis thaliana] | | | | |
| | | | | &gt:gi\|21554094\|gb\|AAM63175.1\| | | | | |
| | | | | histone H4-like protein [Arabidopsis thaliana] | | | | |
| | | | | &gt:gi\|21555353\|gb\|AAM63839.1\| | | | | |
| | | | | histone H4-like protein [Arabidopsis thaliana] | | | | |
| | | | | &gt:gi\|21592313\|gb\|AAM64264.1\| | | | | |
| | | | | histone H4-like protein [Arabidopsis thaliana] | | | | |
| | | | | &gt:gi\|21592673\|gb\|AAM64622.1\| | | | | |
| | | | | histone H4-like protein [Arabidopsis thaliana] | | | | |
| | | | | &gt:gi\|21592795\|gb\|AAM64744.1\| | | | | |
| | | | | histone H4-like protein [Arabidopsis thaliana] | | | | |
| | | | | &gt:gi\|21700843\|gb\|AAM70545.1\| | | | | |
| | | | | AT5g59690/mth12_90 [Arabidopsis thaliana] | | | | |
| | | | | &gt:gi\|22136354\|gb\|AAM91255.1\| | | | | |
| | | | | histone H4-like protein | | | | |
| | | | | [Arabidopsis thaliana] | | | | |
| | | | | &gt:gi\|22165124\|gb\|AAM93740.1\| | | | | |
| | | | | histone H4 [Oryza sativa Japonica Group] | | | | |
| | | | | &gt:gi\|23296862\|gb\|AAN13189.1\| | | | | |
| | | | | putative histone H4 | | | | |
| | | | | protein [Arabidopsis thaliana] | | | | |
| | | | | &gt:gi\|27452909\|gb\|AAO15293.1\| | | | | |
| | | | | Unknown protein [Oryza sativa Japonica Group] | | | | |
| | | | | &gt:gi\|28208264\|dbj\|BAC56852.1\| | | | | |
| | | | | histone H4 [Silene latifolia] | | | | |
| | | | | &gt:gi\|28393088\|gb\|AAO41978.1\| | | | | |
| | | | | putative histone H4 protein | | | | |
| | | | | [Arabidopsis thaliana] | | | | |
| | | | | &gt:gi\|28466803\|gb\|AAO44010.1\| | | | | |
| | | | | At1g07820 [Arabidopsis thaliana] | | | | |
| | | | | &gt:gi\|28564804\|dbj\|BAC57734.1\| | | | | |
| | | | | histone H4 [Oryza sativa Japonica Group] | | | | |
| | | | | &gt:gi\|28827318\|gb\|AAO50503.1\| | | | | |
| | | | | putative histone H4 | | | | |
| | | | | protein [Arabidopsis thaliana] | | | | |
| | | | | &gt:gi\|30575604\|gb\|AAP33088.1\| | | | | |
| | | | | histone H4 [Eucalyptus globulus] | | | | |
| | | | | &gt:gi\|31433309\|gb\|AAP54838.1\| | | | | |
| | | | | Histone H4, putative, expressed | | | | |
| | | | | [Oryza sativa Japonica Group] | | | | |
| | | | | &gt:gi\|38346810\|emb\|CAD41377.2\| | | | | |
| | | | | OSJNBa0088A01.17 [Oryza sativa Japonica Group] | | | | |
| | | | | &gt:gi\|41052706\|dbj\|BAD07563.1\| | | | | |
| | | | | histone H4 [Oryza sativa Japonica Group] | | | | |
| | | | | &gt:gi\|46811262\|gb\|AAT01924.1\| | | | | |
| | | | | histone H4 [Chelidonium majus] | | | | |
| | | | | &gt:gi\|47900360\|gb\|AAT39190.1\| | | | | |
| | | | | putative histone H4 [Oryza sativa Japonica Group] | | | | |
| | | | | &gt:gi\|49328063\|gb\|AAT58763.1\| | | | | |
| | | | | histone H4 [Oryza sativa Japonica Group] | | | | |
| | | | | &gt:gi\|49328086\|gb\|AAT58785.1\| | | | | |
| | | | | histone H4 [Oryza sativa Japonica Group] | | | | |
| | | | | &gt:gi\|50251938\|dbj\|BAD27874.1\| | | | | |
| | | | | histone H4 [Oryza sativa Japonica Group] | | | | |
| | | | | &gt:gi\|50726031\|dbj\|BAD33556.1\| | | | | |
| | | | | histone H4 [Oryza sativa Japonica Group] | | | | |
| | | | | &gt:gi\|51969168\|dbj\|BAD43276.1\| | | | | |
| | | | | histone H4 [Arabidopsis thaliana] | | | | |
| | | | | &gt:gi\|51969828\|dbj\|BAD43606.1\| | | | | |
| | | | | histone H4 [Arabidopsis thaliana] | | | | |
| | | | | &gt:gi\|51970436\|dbj\|BAD43910.1\| | | | | |
| | | | | histone H4 [Arabidopsis thaliana] | | | | |
| | | | | &gt:gi\|53749311\|gb\|AAU90170.1\| | | | | |
| | | | | histone H4 [Oryza sativa Japonica Group] | | | | |
| | | | | &gt:gi\|56798269\|dbj\|BAD82897.1\| | | | | |
| | | | | histone H4 [Fragaria × ananassa] | | | | |
| | | | | &gt:gi\|62642127\|gb\|AAX92702.1\| | | | | |
| | | | | histone 4 [Picea abies] | | | | |
| | | | | &gt:gi\|87138105\|gb\|ABD28289.1\| | | | | |
| | | | | histone H4-like protein [Glycine max] | | | | |
| | | | | &gt:gi\|88010997\|gb\|ABD38885.1\| | | | | |
| | | | | At3g45930 [Arabidopsis thaliana] | | | | |
| | | | | &gt:gi\|92885100\|gb\|ABE87620.1\| | | | | |
| | | | | Histone core [Medicago truncatula] | | | | |
| | | | | &gt:gi\|108705887\|gb\|ABF93682.1\| | | | | |
| | | | | Histone H4, putative, expressed | | | | |
| | | | | [Oryza sativa Japonica Group] | | | | |
| | | | | &gt:gi\|110738359\|dbj\|BAF01106.1 | | | | |
| | | | | Histone H4 like protein [Arabidopsis thaliana] | | | | |
| | | | | &gt:gi\|110742734\|dbj\|BAF00179.1\| | | | | |
| | | | | histone H4 [Arabidopsis thaliana] | | | | |
| | | | | &gt:gi\|113537293\|dbj\|BAF09676.1\| | | | | |
| | | | | Os02g0684500 [Oryza sativa Japonica Group] | | | | |
| | | | | &gt:gi\|113547254\|dbj\|BAF10697.1\| | | | | |
| | | | | Os03g0119900 [Oryza sativa Japonica Group] | | | | |
| | | | | &gt:gi\|113565235\|dbj\|BAF15578.1\| | | | | |
| | | | | Os04g0583600 [Oryza sativa Japonica Group] | | | | |
| | | | | &gt:gi\|113579320\|dbj\|BAF17683.1\| | | | | |
| | | | | Os05g0462700 [Oryza sativa Japonica Group] | | | | |
| | | | | &gt:gi\|113579337\|dbj\|BAF17700.1\| | | | | |
| | | | | Os05g0466600 [Oryza sativa Japonica Group] | | | | |
| | | | | &gt:gi\|113631478\|dbj\|BAF25159.1\| | | | | |
| | | | | Os09g0433600 [Oryza sativa Japonica Group] | | | | |
| | | | | &gt:gi\|113632111\|dbj\|BAF25792.1\| | | | | |
| | | | | Os09g0553100 [Oryza sativa Japonica Group] | | | | |
| | | | | &gt:gi\|113639788\|dbj\|BAF27093.1\| | | | | |
| | | | | Os10g0539500 [Oryza sativa Japonica Group] | | | | |
| | | | | &gt:gi\|116778467\|gb\|ABK20879.1\| | | | | |
| | | | | unknown [Picea sitchensis] | | | | |
| | | | | &gt:gi\|116782704\|gb\|ABK22619.1\| | | | | |
| | | | | unknown [Picea sitchensis] | | | | |
| | | | | &gt:gi\|116788052\|gb\|ABK24738.1\| | | | | |
| | | | | unknown [Picea sitchensis] | | | | |
| | | | | &gt:gi\|116793524\|gb\|ABK26777.1\| | | | | |
| | | | | unknown [Picea sitchensis] | | | | |
| | | | | &gt:gi\|118482735\|gb\|ABK93286.1\| | | | | |
| | | | | unknown [Populus trichocarpa] | | | | |
| | | | | &gt:gi\|118484754\|gb\|ABK94246.1\| | | | | |
| | | | | unknown [Populus trichocarpa] | | | | |
| | | | | &gt:gi\|118485565\|gb\|ABK94634.1\| | | | | |
| | | | | unknown [Populus trichocarpa] | | | | |
| | | | | &gt:gi\|124360937\|gb\|ABN08909.1\| | | | | |
| | | | | Histone core [Medicago truncatula] | | | | |
| | | | | &gt:gi\|125528296\|gb\|EAY76410.1\| | | | | |
| | | | | hypothetical protein OsI_04340 | | | | |
| | | | | [Oryza sativa Indica Group] | | | | |
| | | | | &gt:gi\|125532798\|gb\|EAY79363.1\| | | | | |
| | | | | hypothetical protein OsI_34491 | | | | |
| | | | | [Oryza sativa Indica Group] | | | | |
| | | | | &gt:gi\|125540704\|gb\|EAY87099.1\| | | | | |
| | | | | hypothetical protein OsI_08497 | | | | |
| | | | | [Oryza sativa Indica Group] | | | | |
| | | | | &gt:gi\|125542165\|gb\|EAY88304.1\| | | | | |
| | | | | hypothetical protein OsI_09762 | | | | |
| | | | | [Oryza sativa Indica Group] | | | | |
| | | | | &gt:gi\|125549476\|gb\|EAY95298.1\| | | | | |
| | | | | hypothetical protein OsI_17123 | | | | |
| | | | | [Oryza sativa Indica Group] | | | | |
| | | | | &gt:gi\|125552628\|gb\|EAY98337.1\| | | | | |
| | | | | hypothetical protein OsI_20247 | | | | |
| | | | | [Oryza sativa Indica Group] | | | | |
| | | | | &gt:gi\|125552649\|gb\|EAY98358.1\| | | | | |
| | | | | hypothetical protein OsI_20269 | | | | |
| | | | | [Oryza sativa Indica Group] | | | | |
| | | | | &gt:gi\|125558734\|gb\|EAZ04270.1\| | | | | |
| | | | | hypothetical protein OsI_26413 | | | | |
| | | | | [Oryza sativa Indica Group] | | | | |
| | | | | &gt:gi\|125563829\|gb\|EAZ09209.1\| | | | | |
| | | | | hypothetical protein OsI_31484 | | | | |
| | | | | [Oryza sativa Indica Group] | | | | |
| | | | | &gt:gi\|125564638\|gb\|EAZ10018.1\| | | | | |
| | | | | hypothetical protein OsI_32321 | | | | |
| | | | | [Oryza sativa Indica Group] | | | | |
| | | | | &gt:gi\|125572554\|gb\|EAZ14069.1\| | | | | |
| | | | | hypothetical protein OsJ_03994 | | | | |
| | | | | [Oryza sativa Japonica Group] | | | | |
| | | | | &gt:gi\|125575549\|gb\|EAZ16833.1\| | | | | |
| | | | | hypothetical protein OsJ_32304 | | | | |
| | | | | [Oryza sativa Japonica Group] | | | | |
| | | | | &gt:gi\|125583277\|gb\|EAZ24208.1\| | | | | |
| | | | | hypothetical protein OsJ_07955 | | | | |
| | | | | [Oryza sativa Japonica Group] | | | | |
| | | | | &gt:gi\|125584717\|gb\|EAZ25381.1\| | | | | |
| | | | | hypothetical protein OsJ_09199 | | | | |
| | | | | [Oryza sativa Japonica Group] | | | | |
| | | | | &gt:gi\|125591413\|gb\|EAZ31763.1\| | | | | |
| | | | | hypothetical protein OsJ_15915 | | | | |
| | | | | [Oryza sativa Japonica Group] | | | | |
| | | | | &gt:gi\|125600645\|gb\|EAZ40221.1\| | | | | |
| | | | | hypothetical protein OsJ_24666 | | | | |
| | | | | [Oryza sativa Japonica Group] | | | | |
| | | | | &gt:gi\|125606566\|gb\|EAZ45602.1\| | | | | |
| | | | | hypothetical protein OsJ_30268 | | | | |
| | | | | [Oryza sativa Japonica Group] | | | | |
| | | | | &gt:gi\|146403794\|gb\|ABQ32303.1\| | | | | |
| | | | | putative histone H4-like protein | | | | |
| | | | | [Artemisia annua] | | | | |
| | | | | &gt:gi\|147800359\|emb\|CAN64268.1\| | | | | |
| | | | | hypothetical protein VITISV_036365 | | | | |
| | | | | [Vitis vinifera] | | | | |
| | | | | &gt:gi\|147826823\|emb\|CAN59705.1\| | | | | |
| | | | | hypothetical protein VITISV_010247 | | | | |
| | | | | [Vitis vinifera] | | | | |
| | | | | &gt:gi\|147826824\|emb\|CAN59706.1\| | | | | |
| | | | | hypothetical protein VITISV_010248 | | | | |
| | | | | [Vitis vinifera] | | | | |
| | | | | &gt:gi\|147839844\|emb\|CAN68239.1\| | | | | |
| | | | | hypothetical protein VITISV_006985 | | | | |
| | | | | [Vitis vinifera] | | | | |
| | | | | &gt:gi\|147842470\|emb\|CAN63143.1\| | | | | |
| | | | | hypothetical protein VITISV_034577 | | | | |
| | | | | [Vitis vinifera] | | | | |
| | | | | &gt:gi\|147855175\|emb\|CAN79580.1\| | | | | |
| | | | | hypothetical protein VITISV_002271 | | | | |
| | | | | [Vitis vinifera] | | | | |
| | | | | &gt:gi\|147855176\|emb\|CAN79581.1\| | | | | |
| | | | | hypothetical protein VITISV_002272 | | | | |
| | | | | [Vitis vinifera] | | | | |
| | | | | &gt:gi\|147855413\|emb\|CAN79612.1\| | | | | |
| | | | | hypothetical protein VITISV_035467 | | | | |
| | | | | [Vitis vinifera] | | | | |
| | | | | &gt:gi\|147858185\|emb\|CAN79680.1\| | | | | |
| | | | | hypothetical protein VITISV_034640 | | | | |
| | | | | [Vitis vinifera] | | | | |
| | | | | &gt:gi\|147859377\|emb\|CAN83554.1\| | | | | |
| | | | | hypothetical protein VITISV_030356 | | | | |
| | | | | [Vitis vinifera] | | | | |
| | | | | &gt:gi\|158828217\|gb\|ABW81095.1\| | | | | |
| | | | | H4his18 [Cleome spinosa] | | | | |
| | | | | &gt:gi\|162664647\|gb\|EDQ51358.1\| histone | | | | |
| | | | | H4 [Physcomitrella patens subsp. patens] | | | | |
| | | | | &gt:gi\|162668119\|gb\|EDQ54733.1\| histone | | | | |
| | | | | H4 [Physcomitrella patens subsp. patens] | | | | |
| | | | | &gt:gi\|162668586\|gb\|EDQ55190.1\| histone | | | | |
| | | | | H4 [Physcomitrella patens subsp. patens] | | | | |
| | | | | &gt:gi\|162669106\|gb\|EDQ55700.1\| predicted protein | | | | |
| | | | | [Physcomitrella patens subsp. patens] | | | | |
| | | | | &gt:gi\|162672790\|gb\|EDQ59322.1\| histone | | | | |
| | | | | H4 [Physcomitrella patens subsp. patens] | | | | |
| | | | | &gt:gi\|162675123\|gb\|EDQ61622.1\| histone | | | | |
| | | | | H4 [Physcomitrella patens subsp. patens] | | | | |
| | | | | &gt:gi\|162677657\|gb\|EDQ64125.1\| histone | | | | |
| | | | | H4 [Physcomitrella patens subsp. patens] | | | | |
| | | | | &gt:gi\|162679040\|gb\|EDQ65492.1\| histone | | | | |
| | | | | H4 [Physcomitrella patens subsp. patens] | | | | |
| | | | | &gt:gi\|162680641\|gb\|EDQ67076.1\| histone | | | | |
| | | | | H4 [Physcomitrella patens subsp. patens] | | | | |
| | | | | &gt:gi\|162682563\|gb\|EDQ68981.1\| histone | | | | |
| | | | | H4 [Physcomitrella patens subsp. patens] | | | | |
| | | | | &gt:gi\|162696827\|gb\|EDQ83164.1\| histone | | | | |
| | | | | H4 [Physcomitrella patens subsp. patens] | | | | |
| | | | | &gt:gi\|194691936\|gb\|ACF80052.1\| | | | | |
| | | | | unknown [Zea mays] | | | | |
| | | | | &gt:gi\|194693488\|gb\|ACF80828.1\| | | | | |
| | | | | unknown [Zea mays] | | | | |
| | | | | &gt:gi\|194696282\|gb\|ACF82225.1\| | | | | |
| | | | | unknown [Zea mays] | | | | |
| | | | | &gt:gi\|194696408\|gb\|ACF82288.1\| | | | | |
| | | | | unknown [Zea mays] | | | | |
| | | | | &gt:gi\|194698290\|gb\|ACF83229.1\| | | | | |
| | | | | unknown [Zea mays] | | | | |
| | | | | &gt:gi\|194698982\|gb\|ACF83575.1\| | | | | |
| | | | | unknown [Zea mays] | | | | |
| | | | | &gt:gi\|194699362\|gb\|ACF83765.1\| | | | | |
| | | | | unknown [Zea mays] | | | | |
| | | | | &gt:gi\|194700348\|gb\|ACF84258.1\| | | | | |
| | | | | unknown [Zea mays] | | | | |
| | | | | &gt:gi\|194704392\|gb\|ACF86280.1\| | | | | |
| | | | | unknown [Zea mays] | | | | |
| | | | | &gt:gi\|194706260\|gb\|ACF87214.1\| | | | | |
| | | | | unknown [Zea mays] | | | | |
| | | | | &gt:gi\|194708346\|gb\|ACF88257.1\| | | | | |
| | | | | unknown [Zea mays] | | | | |
| | | | | &gt:gi\|195605566\|gb\|ACG24613.1\| | | | | |
| | | | | histone H4 [Zea mays] | | | | |
| | | | | &gt:gi\|195605632\|gb\|ACG24646.1\| | | | | |
| | | | | histone H4 [Zea mays] | | | | |
| | | | | &gt:gi\|195605640\|gb\|ACG24650.1\| | | | | |
| | | | | histone H4 [Zea mays] | | | | |
| | | | | &gt:gi\|195605982\|gb\|ACG24821.1\| | | | | |
| | | | | histone H4 [Zea mays] | | | | |
| | | | | &gt:gi\|195606488\|gb\|ACG25074.1\| | | | | |
| | | | | histone H4 [Zea mays] | | | | |
| | | | | &gt:gi\|195606652\|gb\|ACG25 156.1\| | | | | |
| | | | | histone H4 [Zea mays] | | | | |
| | | | | &gt:gi\|195607014\|gb\|ACG25337.1\| | | | | |
| | | | | histone H4 [Zea mays] | | | | |
| | | | | &gt:gi\|195607340\|gb\|ACG25500.1\| | | | | |
| | | | | histone H4 [Zea mays] | | | | |
| | | | | &gt:gi\|195617184\|gb\|ACG30422.1\| | | | | |
| | | | | histone H4 [Zea mays] | | | | |
| | | | | &gt:gi\|195617244\|gb\|ACG30452.1\| | | | | |
| | | | | histone H4 [Zea mays] | | | | |
| | | | | &gt:gi\|195617708\|gb\|ACG30684.1\| | | | | |
| | | | | histone H4 [Zea mays] | | | | |
| | | | | &gt:gi\|195617830\|gb\|ACG30745.1\| | | | | |
| | | | | histone H4 [Zea mays] | | | | |
| | | | | &gt:gi\|195617840\|gb\|ACG30750.1\| | | | | |
| | | | | histone H4 [Zea mays] | | | | |
| | | | | &gt:gi\|195617842\|gb\|ACG3075 1.1\| | | | | |
| | | | | histone H4 [Zea mays] | | | | |
| | | | | &gt:gi\|195617880\|gb\|ACG30770.1\| | | | | |
| | | | | histone H4 [Zea mays] | | | | |
| | | | | &gt:gi\|195618008\|gb\|ACG30834.1\| | | | | |
| | | | | histone H4 [Zea mays] | | | | |
| | | | | &gt:gi\|195618012\|gb\|ACG30836.1\| | | | | |
| | | | | histone H4 [Zea mays] | | | | |
| | | | | &gt:gi\|195618076\|gb\|ACG30868.1\| | | | | |
| | | | | histone H4 [Zea mays] | | | | |
| | | | | &gt:gi\|195618078\|gb\|ACG30869.1\| | | | | |
| | | | | histone H4 [Zea mays] | | | | |
| | | | | &gt:gi\|195618086\|gb\|ACG30873.1\| | | | | |
| | | | | histone H4 [Zea mays] | | | | |
| | | | | &gt:gi\|195618174\|gb\|ACG30917.1\| | | | | |
| | | | | histone H4 [Zea mays] | | | | |
| | | | | &gt:gi\|195618332\|gb\|ACG30996.1\| | | | | |
| | | | | histone H4 [Zea mays] | | | | |
| | | | | &gt:gi\|195618430\|gb\|ACG31045.1\| | | | | |
| | | | | histone H4 [Zea mays] | | | | |
| | | | | &gt:gi\|195618454\|gb\|ACG31057.1\| | | | | |
| | | | | histone H4 [Zea mays] | | | | |
| | | | | &gt:gi\|195618798\|gb\|ACG31229.1\| | | | | |
| | | | | histone H4 [Zea mays] | | | | |
| | | | | &gt:gi\|195618800\|gb\|ACG31230.1\| | | | | |
| | | | | histone H4 [Zea mays] | | | | |
| | | | | &gt:gi\|195618808\|gb\|ACG31234.1\| | | | | |
| | | | | histone H4 [Zea mays] | | | | |
| | | | | &gt:gi\|195618940\|gb\|ACG31300.1\| | | | | |
| | | | | histone H4 [Zea mays] | | | | |
| | | | | &gt:gi\|195618970\|gb\|ACG31315.1\| | | | | |
| | | | | histone H4 [Zea mays] | | | | |
| | | | | &gt:gi\|195620178\|gb\|ACG31919.1\| | | | | |
| | | | | histone H4 [Zea mays] | | | | |
| | | | | &gt:gi\|195621558\|gb\|ACG32609.1\| | | | | |
| | | | | histone H4 [Zea mays] | | | | |
| | | | | &gt:gi\|195623194\|gb\|ACG33427.1\| | | | | |
| | | | | histone H4 [Zea mays] | | | | |
| | | | | &gt:gi\|195625166\|gb\|ACG34413.1\| | | | | |
| | | | | histone H4 [Zea mays] | | | | |
| | | | | &gt:gi\|195626072\|gb\|ACG34866.1\| | | | | |
| | | | | histone H4 [Zea mays] | | | | |
| | | | | &gt:gi\|195628242\|gb\|ACG35951.1\| | | | | |
| | | | | histone H4 [Zea mays] | | | | |
| | | | | &gt:gi\|195628292\|gb\|ACG35976.1\| | | | | |
| | | | | histone H4 [Zea mays] | | | | |
| | | | | &gt:gi\|195628370\|gb\|ACG36015.1\| | | | | |
| | | | | histone H4 [Zea mays] | | | | |
| | | | | &gt:gi\|195629326\|gb\|ACG36304.1\| | | | | |
| | | | | histone H4 [Zea mays] | | | | |
| | | | | &gt:gi\|195630263\|gb\|ACG36622.1\| | | | | |
| | | | | histone H4 [Zea mays] | | | | |
| | | | | &gt:gi\|195635063\|gb\|ACG37000.1\| | | | | |
| | | | | histone H4 [Zea mays] | | | | |
| | | | | &gt:gi\|195635563\|gb\|ACG37250.1\| | | | | |
| | | | | histone H4 [Zea mays] | | | | |
| | | | | &gt:gi\|195636274\|gb\|ACG37605.1\| | | | | |
| | | | | histone H4 [Zea mays] | | | | |
| | | | | &gt:gi\|195636714\|gb\|ACG37825.1\| | | | | |
| | | | | histone H4 [Zea mays] | | | | |
| | | | | &gt:gi\|195638688\|gb\|ACG388 12.1\| | | | | |
| | | | | histone H4 [Zea mays] | | | | |
| | | | | &gt:gi\|195639506\|gb\|ACG39221.1\| | | | | |
| | | | | histone H4 [Zea mays] | | | | |
| | | | | &gt:gi\|195658023\|gb\|ACG48479.1\| | | | | |
| | | | | histone H4 [Zea mays] | | | | |
| | | | | &gt:gi\|195658045\|gb\|ACG48490.1\| | | | | |
| | | | | histone H4 [Zea mays] | | | | |
| | | | | &gt:gi\|195658083\|gb\|ACG48509.1\| | | | | |
| | | | | histone H4 [Zea mays] | | | | |
| | | | | &gt:gi\|195658353\|gb\|ACG48644.1\| | | | | |
| | | | | histone H4 [Zea mays] | | | | |
| | | | | &gt:gi\|195658451\|gb\|ACG48693.1\| | | | | |
| | | | | histone H4 [Zea mays] | | | | |
| | | | | &gt:gi\|195659307\|gb\|ACG49121.1\| | | | | |
| | | | | histone H4 [Zea mays] | | | | |
| | | | | &gt:gi\|215740727\|dbj\|BAG97383.1\| | | | | |
| | | | | unnamed protein product | | | | |
| | | | | [Oryza sativa Japonica Group] | | | | |
| | | | | &gt:gi\|215765078\|dbj\|BAG86775.1\| | | | | |
| | | | | unnamed protein product | | | | |
| | | | | [Oryza sativa Japonica Group] | | | | |
| | | | | &gt:gi\|215765094\|dbj\|BAG86791.1\| | | | | |
| | | | | unnamed protein product | | | | |
| | | | | [Oryza sativa Japonica Group] | | | | |
| | | | | &gt:gi\|215765174\|dbj\|BAG86871.1\| | | | | |
| | | | | unnamed protein product | | | | |
| | | | | [Oryza sativa Japonica Group] | | | | |
| | | | | &gt:gi\|215765195\|dbj\|BAG86892.1\| | | | | |
| | | | | unnamed protein product | | | | |
| | | | | [Oryza sativa Japonica Group] | | | | |
| | | | | &gt:gi\|215767370\|dbj\|BAG99598.1\| | | | | |
| | | | | unnamed protein product | | | | |
| | | | | [Oryza sativa Japonica Group] | | | | |
| | | | | &gt:gi\|215767525\|dbj\|BAG99753.1\| | | | | |
| | | | | unnamed protein product | | | | |
| | | | | [Oryza sativa Japonica Group] | | | | |
| | | | | &gt:gi\|222423594\|dbj\|BAH19766.1\| | | | | |
| | | | | AT1G07820 [Arabidopsis thaliana] | | | | |
| | | | | &gt:gi\|222631868\|gb\|EEE64000.1\| | | | | |
| | | | | hypothetical protein OsJ_18829 | | | | |
| | | | | [Oryza sativa Japonica Group] | | | | |
| | | | | &gt:gi\|222641632\|gb\|EEE69764.1\| | | | | |
| | | | | hypothetical protein OsJ_29473 | | | | |
| | | | | [Oryza sativa Japonica Group] | | | | |
| | | | | &gt:gi\|222836752\|gb\|EEE75145.1\| | | | | |
| | | | | histone H4 [Populus trichocarpa] | | | | |
| | | | | &gt:gi\|222836754\|gb\|EEE75147.1\| | | | | |
| | | | | histone H4 [Populus trichocarpa] | | | | |
| | | | | &gt:gi\|222850949\|gb\|EEE88496.1\| | | | | |
| | | | | histone H4 [Populus trichocarpa] | | | | |
| | | | | &gt:gi\|222853756\|gb\|EEE91303.1\| | | | | |
| | | | | histone H4 [Populus trichocarpa] | | | | |
| | | | | &gt:gi\|222853758\|gb\|EEE91305.1\| | | | | |
| | | | | histone H4 [Populus trichocarpa] | | | | |
| | | | | &gt:gi\|222853762\|gb\|EEE91309.1\| | | | | |
| | | | | histone H4 [Populus trichocarpa] | | | | |
| | | | | &gt:gi\|222865366\|gb\|EEF02497.1\| | | | | |
| | | | | histone H4 [Populus trichocarpa] | | | | |
| | | | | &gt:gi\|222865906\|gb\|EEF03037.1\| | | | | |
| | | | | histone H4 [Populus trichocarpa] | | | | |
| | | | | &gt:gi\|222865908\|gb\|EEF03039.1\| | | | | |
| | | | | histone H4 [Populus trichocarpa] | | | | |
| | | | | &gt:gi\|222866490\|gb\|EEF03621.1\| | | | | |
| | | | | histone H4 [Populus trichocarpa] | | | | |
| | | | | &gt:gi\|222870533\|gb\|EEF07664.1\| | | | | |
| | | | | histone H4 [Populus trichocarpa] | | | | |
| | | | | &gt:gi\|222874224\|gb\|EEF11355.1\| | | | | |
| | | | | histone H4 [Populus trichocarpa] | | | | |
| | | | | &gt:gi\|223527428\|gb\|EEF29565.1\| | | | | |
| | | | | histone h4, putative [Ricinus communis] | | | | |
| | | | | &gt:gi\|223528712\|gb\|EEF30724.1\| | | | | |
| | | | | histone h4, putative [Ricinus communis] | | | | |
| | | | | &gt:gi\|223528714\|gb\|EEF30726.1\| | | | | |
| | | | | histone h4, putative [Ricinus communis] | | | | |
| | | | | &gt:gi\|223535654\|gb\|EEF37320.1\| | | | | |
| | | | | histone h4, putative [Ricinus communis] | | | | |
| | | | | &gt:gi\|223541927\|gb\|EEF43473.1\| | | | | |
| | | | | histone h4, putative [Ricinus communis] | | | | |
| | | | | &gt:gi\|223549585\|gb\|EEF51073.1\| | | | | |
| | | | | histone h4, putative [Ricinus communis] | | | | |
| | | | | &gt:gi\|224032847\|gb\|ACN35499.1\| | | | | |
| | | | | unknown [Zea mays] | | | | |
| | | | | &gt:gi\|224285053\|gb\|ACN40254.1\| | | | | |
| | | | | unknown [Picea sitchensis] | | | | |
| | | | | &gt:gi\|238011888\|gb\|ACR36979.1\| | | | | |
| | | | | unknown [Zea mays] | | | | |
| | | | | &gt:gi\|238012310\|gb\|ACR37190.1\| | | | | |
| | | | | unknown [Zea mays] | | | | |
| | | | | &gt:gi\|238014142\|gb\|ACR38 106.1\| | | | | |
| | | | | unknown [Zea mays] | | | | |
| | | | | &gt:gi\|238014264\|gb\|ACR38167.1\| | | | | |
| | | | | unknown [Zea mays] | | | | |
| | | | | &gt:gi\|238014334\|gb\|ACR38202.1\| | | | | |
| | | | | unknown [Zea mays] | | | | |
| | | | | &gt:gi\|238014894\|gb\|ACR38482.1\| | | | | |
| | | | | unknown [Zea mays] | | | | |
| | | | | &gt:gi\|241918866\|gb\|EER92010.1\| | | | | |
| | | | | hypothetical protein SORBIDRAFT_01g030460 | | | | |
| | | | | [Sorghum bicolor] | | | | |
| | | | | &gt:gi\|241922478\|gb\|EER95622.1\| | | | | |
| | | | | hypothetical protein SORBIDRAFT_01g049250 | | | | |
| | | | | [Sorghum bicolor] | | | | |
| | | | | &gt:gi\|241923627\|gb\|EER96771.1\| | | | | |
| | | | | hypothetical protein SORBIDRAFT_02g025440 | | | | |
| | | | | [Sorghum bicolor] | | | | |
| | | | | &gt:gi\|241926180\|gb\|EER99324.1\| | | | | |
| | | | | hypothetical protein SORBIDRAFT_02g032240 | | | | |
| | | | | [Sorghum bicolor] | | | | |
| | | | | &gt:gi\|241927105\|gb\|EES00250.1\| | | | | |
| | | | | hypothetical protein SORBIDRAFT_03g004840 | | | | |
| | | | | [Sorghum bicolor] | | | | |
| | | | | &gt:gi\|241927106\|gb\|EES00251.1\| | | | | |
| | | | | hypothetical protein SORBIDRAFT_03g004870 | | | | |
| | | | | [Sorghum bicolor] | | | | |
| | | | | &gt:gi\|241928571\|gb\|EES01716.1\| | | | | |
| | | | | hypothetical protein SORBIDRAFT_03g039090 | | | | |
| | | | | [Sorghum bicolor] | | | | |
| | | | | &gt:gi\|241929261\|gb\|EES02406.1\| | | | | |
| | | | | hypothetical protein SORBIDRAFT_03g004890 | | | | |
| | | | | [Sorghum bicolor] | | | | |
| | | | | &gt:gi\|241932574\|gb\|EES05719.1\| | | | | |
| | | | | hypothetical protein SORBIDRAFT_04g031620 | | | | |
| | | | | [Sorghum bicolor] | | | | |
| | | | | &gt:gi\|241939578\|gb\|EES12723.1\| | | | | |
| | | | | hypothetical protein SORBIDRAFT_06g026490 | | | | |
| | | | | [Sorghum bicolor] | | | | |
| | | | | &gt:gi\|241945217\|gb\|EES18362.1\| | | | | |
| | | | | hypothetical protein SORBIDRAFT_09g022920 | | | | |
| | | | | [Sorghum bicolor] | | | | |
| | | | | &gt:gi\|255625991\|gb\|ACU13340.1\| | | | | |
| | | | | unknown [Glycine max] | | | | |
| | | | | &gt:gi\|255673853\|dbj\|BAF06643.2\| | | | | |
| | | | | Os01g0835900 [Oryza sativa Japonica Group] | | | | |
| | | | | &gt:gi\|255677871\|dbj\|BAH93978.1\| | | | | |
| | | | | Os07g0549900 [Oryza sativa Japonica Group] | | | | |
| | | | | &gt:gi\|297310482\|gb\|EFH40906.1\| | | | | |
| | | | | hypothetical protein ARALYDRAFT_496101 | | | | |
| | | | | [Arabidopsis lyrata subsp. lyrata] | | | | |
| | | | | &gt:gi\|297321595\|gb\|EFH52016.1\| | | | | |
| | | | | hypothetical protein ARALYDRAFT_484971 | | | | |
| | | | | [Arabidopsis lyrata subsp. lyrata] | | | | |
| | | | | &gt:gi\|297323319\|gb\|EFH53740.1\| | | | | |
| | | | | hypothetical protein ARALYDRAFT_485010 | | | | |
| | | | | [Arabidopsis lyrata subsp. lyrata] | | | | |
| | | | | &gt:gi\|297323776\|gb\|EFH54197.1\| | | | | |
| | | | | hypothetical protein ARALYDRAFT_485763 | | | | |
| | | | | [Arabidopsis lyrata subsp. lyrata] | | | | |
| | | | | &gt:gi\|297326845\|gb\|EFH57265.1\| | | | | |
| | | | | hypothetical protein ARALYDRAFT_481787 | | | | |
| | | | | [Arabidopsis lyrata subsp. lyrata] | | | | |
| | | | | &gt:gi\|326488189\|dbj\|BAJ89933.1\| | | | | |
| | | | | predicted protein | | | | |
| | | | | [Hordeum vulgare subsp. vulgare] | | | | |
| | | | | &gt:gi\|326489645\|dbj\|BAK01803.1\| | | | | |
| | | | | predicted protein | | | | |
| | | | | [Hordeum vulgare subsp. vulgare] | | | | |
| | | | | &gt:gi\|326490127\|dbj\|BAJ94137.1\| | | | | |
| | | | | predicted protein | | | | |
| | | | | [Hordeum vulgare subsp. vulgare] | | | | |
| | | | | &gt:gi\|326497283\|dbj\|BAK02226.1\| | | | | |
| | | | | predicted protein | | | | |
| | | | | [Hordeum vulgare subsp. vulgare] | | | | |
| | | | | &gt:gi\|326498581\|dbj\|BAJ98718.1\| | | | | |
| | | | | predicted protein | | | | |
| | | | | [Hordeum vulgare subsp. vulgare] | | | | |
| | | | | &gt:gi\|326500352\|dbj\|BAK06265.1\| | | | | |
| | | | | predicted protein | | | | |
| | | | | [Hordeum vulgare subsp. vulgare] | | | | |
| | | | | &gt:gi\|326503956\|dbj\|BAK02764.1\| | | | | |
| | | | | predicted protein | | | | |
| | | | | [Hordeum vulgare subsp. vulgare] | | | | |
| | | | | &gt:gi\|326505870\|dbj\|BAJ91174.1\| | | | | |
| | | | | predicted protein | | | | |
| | | | | [Hordeum vulgare subsp. vulgare] | | | | |
| | | | | &gt:gi\|326505922\|dbj\|BAJ91200.1\| | | | | |
| | | | | predicted protein | | | | |
| | | | | [Hordeum vulgare subsp. vulgare] | | | | |
| | | | | &gt:gi\|326506492\|dbj\|BAJ86564.1\| | | | | |
| | | | | predicted protein | | | | |
| | | | | [Hordeum vulgare subsp. vulgare] | | | | |
| | | | | &gt:gi\|326506520\|dbj\|BAJ86578.1\| | | | | |
| | | | | predicted protein | | | | |
| | | | | [Hordeum vulgare subsp. vulgare] | | | | |
| | | | | &gt:gi\|326522106\|dbj\|BAK04181.1\| | | | | |
| | | | | predicted protein | | | | |
| | | | | [Hordeum vulgare subsp. vulgare] | | | | |
| | | | | &gt:gi\|326523419\|dbj\|BAJ88750.1\| | | | | |
| | | | | predicted protein | | | | |
| | | | | [Hordeum vulgare subsp. vulgare] | | | | |
| | | | | &gt:gi\|326524814\|dbj\|BAK04343.1\| | | | | |
| | | | | predicted protein | | | | |
| | | | | [Hordeum vulgare subsp. vulgare] | | | | |
| | | | | &gt:gi\|326529405\|dbj\|BAK04649.1\| | | | | |
| | | | | predicted protein | | | | |
| | | | | [Hordeum vulgare subsp. vulgare] | | | | |
| | | | | &gt:gi\|326530001\|dbj\|BAK08280.1\| | | | | |
| | | | | predicted protein | | | | |
| | | | | [Hordeum vulgare subsp. vulgare] | | | | |
| | | | | &gt:gi\|326532258\|dbj\|BAK05058.1\| | | | | |
| | | | | predicted protein | | | | |
| | | | | [Hordeum vulgare subsp. vulgare] | | | | |
| | | | | &gt:gi\|326532458\|dbj\|BAK05158.1\| | | | | |
| | | | | predicted protein | | | | |
| | | | | [Hordeum vulgare subsp. vulgare] | | | | |
| | | | | &gt:gi\|326533346\|dbj\|BAJ93645.1\| | | | | |
| | | | | predicted protein | | | | |
| | | | | [Hordeum vulgare subsp. vulgare] | | | | |
| | | | | &gt:gi\|330253071\|gb\|AEC08165.1\| | | | | |
| | | | | histone H4 [Arabidopsis thaliana] | | | | |
| | | | | &gt:gi\|330318553\|gb\|AEC10949.1\| | | | | |
| | | | | histone H4 [Camellia sinensis] | | | | |
| | | | | &gt:gi\|332009837\|gb\|AED97220.1\| | | | | |
| | | | | histone H4 [Arabidopsis thaliana] | | | | |
| | | | | &gt:gi\|332009877\|gb\|AED97260.1\| | | | | |
| | | | | histone H4 [Arabidopsis thaliana] | | | | |
| | | | | &gt:gi\|332190037\|gb\|AEE28158.1\| | | | | |
| | | | | histone H4 [Arabidopsis thaliana] | | | | |
| | | | | &gt:gi\|332190066\|gb\|AEE28187.1\| | | | | |
| | | | | histone H4 [Arabidopsis thaliana] | | | | |
| | | | | &gt:gi\|332190067\|gb\|AEE28188.1\| | | | | |
| | | | | histone H4 [Arabidopsis thaliana] | | | | |
| | | | | &gt:gi\|332644570\|gb\|AEE78091.1\| | | | | |
| | | | | histone H4 [Arabidopsis thaliana] | | | | |
| | | | | &gt:gi\|332644625\|gb\|AEE78 146.1\| | | | | |
| | | | | histone H4 [Arabidopsis thaliana] | | | | |
| | | | | &gt:gi\|332645612\|gb\|AEE79133.1\| | | | | |
| | | | | histone H4 [Arabidopsis thaliana] | | | | |
| | | | | &gt:gi\|225838\|prf\|\|1314298A | | | | |
| | | | | histone H4 | | | | |
| | | AAT08725 | 47027019 | histone H4 [Hyacinthus orientalis] | 0.96875 | Hyacinthus orientalis | 3076 | 4452 |
| | | ADL36649 | 302398708 | C3HL domain class transcription factor | 0.96875 | Malus × domestica | 3077 | 4453 |
| | | | | [Malus × domestica] | | | | |
| | | | | &gt:gi\|302398719\|gb\|ADL36654.1\| | | | | |
| | | | | C3HL domain class transcription factor | | | | |
| | | | | [Malus × domestica] | | | | |
| | 15-33 | NP_001044757 | 297597935 | Os01g0840100 [Oryza sativa Japonica Group] | 1 | Oryza sativa Japonica Group | 3078 | 4454 |
| | | | | &gt:gi\|15623835\|dbj\|BAB67894.1\| putative | | | | |
| | | | | HSP70 [Oryza sativa Japonica Group] | | | | |
| | | | | &gt:gi\|21104622\|dbj\|BAB93214.1\| putative | | | | |
| | | | | HSP70 [Oryza sativa Japonica Group] | | | | |
| | | | | &gt:gi\|113534288\|dbj\|BAF06671.1\| Os01g0840100 | | | | |
| | | | | [Oryza sativa Japonica Group] | | | | |
| | | | | &gt:gi\|125572585\|gb\|EAZ14100.1\| hypothetical | | | | |
| | | | | protein OsJ_04024 [Oryza sativa Japonica Group] | | | | |
| | | | | &gt:gi\|215769289\|dbj\|BAH01518.1\| unnamed | | | | |
| | | | | protein product [Oryza sativa Japonica Group] | | | | |
| | | | | &gt:gi\|306416013\|gb\|ADM86881.1\| 70 kDa heat | | | | |
| | | | | shock protein [Oryza sativa Japonica Group] | | | | |
| | | | | &gt:gi\|313575779\|gb\|ADR66969.1\| 70 kDa heat | | | | |
| | | | | shock protein [Oryza sativa Japonica Group] | | | | |
| | | XP_002884912 | 297834059 | hypothetical protein ARALYDRAFT_897465 | 0.94444 | Arabidopsis lyrata subsp. lyrata | 3079 | 4455 |
| | | | | [Arabidopsis lyrata subsp. lyrata] | | | | |
| | | | | &gt:gi\|297330752\|gb\|EFH61171.1\| | | | | |
| | | | | hypothetical protein ARALYDRAFT_897465 | | | | |
| | | | | [Arabidopsis lyrata subsp. lyrata] | | | | |
| | 703-721 | NP_001144808 | 226501057 | hypothetical protein LOC100277884 [Zea mays] | 1 | Zea mays | 3080 | 4456 |
| | | | | &gt:gi\|195647306\|gb\|ACG43121.1\| | | | | |
| | | | | hypothetical protein [Zea mays] | | | | |
| | 152-170 | XP_002466218 | 242037646 | hypothetical protein SORBIDRAFT_01g003720 | 1 | Sorghum bicolor | 3081 | 4457 |
| | | | | [Sorghum bicolor] | | | | |
| | | | | &gt:gi\|241920072\|gb\|EER93216.1\| | | | | |
| | | | | hypothetical protein SORBIDRAFT_01g003720 | | | | |
| | | | | [Sorghum bicolor] | | | | |
| | | NP_001144602 | 226501987 | hypothetical protein LOC100277618 [Zea mays] | 0.952489 | Zea mays | 3082 | 4458 |
| | | | | &gt:gi\|195644458\|gb\|ACG41697.1\| | | | | |
| | | | | hypothetical protein [Zea mays] | | | | |
| | | CAE05414 | 61656646 | OSJNBa0035I04.2 [Oryza sativa Japonica Group] | 0.834842 | Oryza sativa Japonica Group | 3083 | 4459 |
| | | | | &gt:gi\|38605918\|emb\|CAE05953.3\| | | | | |
| | | | | OSJNBb0088C09.12 [Oryza sativa Japonica Group] | | | | |
| | | | | &gt:gi\|116309409\|emb\|CAH66485.1\| | | | | |
| | | | | OSIGBa0076I14.6 [Oryza sativa Indica Group] | | | | |
| | | EEC77275 | 54362548 | hypothetical protein OsI_15905 | 0.837104 | Oryza sativa Indica Group | 3084 | |
| | | | | [Oryza sativa Indica Group] | | | | |
| | | NP_001052798 | 297602722 | Os04g0423700 [Oryza sativa Japonica Group] | 0.834842 | Oryza sativa Japonica Group | 3085 | 4460 |
| | | | | &gt:gi\|255675459\|dbj\|BAF14712.2\| | | | | |
| | | | | Os04g0423700 [Oryza sativa Janonica Group] | | | | |
| | | ACN34295 | 224030438 | unknown [Zea mays] | 0.769231 | Zea mays | 3086 | 4461 |
| | | EEC73359 | 54362548 | hypothetical protein OsI_07583 | 0.794118 | Oryza sativa Indica Group | 3087 | |
| | | | | [Oryza sativa Indica Group] | | | | |
| | | XP_002453960 | 242065341 | hypothetical protein SORBIDRAFT_04g022230 | 0.721719 | Sorghum bicolor | 3088 | 4462 |
| | | | | [Sorghum bicolor] | | | | |
| | | | | &gt:gi\|241933791\|gb\|EES06936.1\| | | | | |
| | | | | hypothetical protein SORBIDRAFT_04g022230 | | | | |
| | | | | [Sorghum bicolor] | | | | |
| Predicted | 167-186 | ACR34837 | 238007603 | unknown [Zea mays] | 1 | Zea mays | 3089 | 4463 |
| siRNA | | | | | | | | |
| 59799 | | | | | | | | |
| | | ACF84683 | 194701197 | unknown [Zea mays] | 1 | Zea mays | 3090 | 4464 |
| | | | | &gt:gi\|195638498\|gb\|ACG38717.1\| | | | | |
| | | | | monoglyceride lipase [Zea mays] | | | | |
| | | NP_001136909 | 219363598 | hypothetical protein LOC100217066 [Zea mays] | 0.838235 | Zea mays | 3091 | 4465 |
| | | | | &gt:gi\|194697568\|gb\|ACF82868.1\| | | | | |
| | | | | unknown [Zea mays] | | | | |
| | | EEC70511 | 54362548 | hypothetical protein OsI_01608 | 0.814706 | Oryza sativa Indica Group | 3092 | |
| | | | | [Oryza sativa Indica Group] | | | | |
| | | XP_002439655 | 242087644 | hypothetical protein SORBIDRAFT_09g018060 | 0.752941 | Sorghum bicolor | 3093 | 4466 |
| | | | | [Sorghum bicolor] | | | | |
| | | | | &gt:gi\|241944940\|gb\|EES18085.1\| | | | | |
| | | | | hypothetical protein SORBIDRAFT_09g018060 | | | | |
| | | | | [Sorghum bicolor] | | | | |
| | | BAK01593 | 326489218 | predicted protein | 0.738235 | Hordeum vulgare subsp. vulgare | 3094 | 4467 |
| | | | | [Hordeum vulgare subsp. vulgare] | | | | |
| | | BAJ99202 | 326503153 | predicted protein | 0.738235 | Hordeum vulgare subsp. vulgare | 3095 | 4468 |
| | | | | [Hordeum vulgare subsp. vulgare] | | | | |
| | | NP_001055317 | 115463434 | Os05g0363100 [Oryza sativa Japonica Group] | 0.720588 | Oryza sativa Japonica Group | 3096 | 4469 |
| | | | | &gt:gi\|54287660\|gb\|AAV31404.1\| | | | | |
| | | | | putative phospholipase | | | | |
| | | | | [Oryza sativa Japonica Group] | | | | |
| | | | | &gt:gi\|113578868\|dbj\|BAF17231.1\| | | | | |
| | | | | Os05g0363100 [Oryza sativa Japonica Group] | | | | |
| | | EEE63431 | 54398660 | hypothetical protein OsJ_18244 | 0.720588 | Oryza sativa Japonica Group | 3097 | |
| | | | | [Oryza sativa Japonica Group] | | | | |
| | 255-274 | XP_002455548 | 242052804 | hypothetical protein SORBIDRAFT_03g012970 | 1 | Sorghum bicolor | 3098 | 4470 |
| | | | | [Sorghum bicolor] | | | | |
| | | | | &gt:gi\|241927523\|gb\|EES00668.1\| | | | | |
| | | | | hypothetical protein SORBIDRAFT_03g012970 | | | | |
| | | | | [Sorghum bicolor] | | | | |
| | 660-679 | XP_002444285 | 242079032 | hypothetical protein SORBIDRAFT_07g019500 | 1 | Sorghum bicolor | 3099 | 4471 |
| | | | | [Sorghum bicolor] | | | | |
| | | | | &gt:gi\|241940635\|gb\|EES13780.1\| | | | | |
| | | | | hypothetical protein SORBIDRAFT_07g019500 | | | | |
| | | | | [Sorghum bicolor] | | | | |
| | | NP_001149164 | 226533573 | F-box domain containing protein [Zea mays] | 0.795154 | Zea mays | 3100 | 4472 |
| | | | | &gt:gi\|195625194\|gb\|ACG34427.1\| F-box domain | | | | |
| | | | | containing protein [Zea mays] | | | | |
| Predicted | 344-363 | NP_001132616 | 239047681 | hypothetical protein LOC100194090 [Zea mays] | 1 | Zea mays | 3101 | 4473 |
| siRNA | | | | &gt:gi\|194703996\|gb\|ACF86082.1\| | | | | |
| 59800 | | | | unknown [Zea mays] | | | | |
| | | | | &gt:gi\|238908725\|gb\|ACF81540.21 | | | | |
| | | | | unknown [Zea mays] | | | | |
| | | NP_001147445 | 226501241 | myb-related protein Hv33 [Zea mays] | 0.960725 | Zea mays | 3102 | 4474 |
| | | | | &gt:gi\|195611444\|gb\|ACG27552.1\| | | | | |
| | | | | myb-related protein Hv33 [Zea mays] | | | | |
| | | XP_002465218 | 242035646 | hypothetical protein SORBIDRAFT_01g034270 | 0.864048 | Sorghum bicolor | 3103 | 4475 |
| | | | | [Sorghum bicolor] | | | | |
| | | | | &gt:gi\|241919072\|gb\|EER92216.1\| | | | | |
| | | | | hypothetical protein SORBIDRAFT_01g034270 | | | | |
| | | | | [Sorghum bicolor] | | | | |
| Predicted | 1526-1544 | NP_001143089 | 226498753 | hypothetical protein LOC100275564 [Zea mays] | 1 | Zea mays | 3104 | 4476 |
| siRNA | | | | &gt:gi\|195614134\|gb\|ACG28897.1\| | | | | |
| 59820 | | | | hypothetical protein [Zea mays] | | | | |
| Predicted | 871-891 | XP_002458387 | 242058482 | hypothetical protein SORBIDRAFT_03g032650 | 1 | Sorghum bicolor | 3105 | 4477 |
| siRNA | | | | [Sorghum bicolor] | | | | |
| 59918 | | | | &gt:gi\|241930362\|gb\|EES03507.1\| | | | | |
| | | | | hypothetical protein SORBIDRAFT_03g032650 | | | | |
| | | | | [Sorghum bicolor] | | | | |
| | | NP_001169333 | 293332220 | hypothetical protein LOC100383200 [Zea mays] | 0.862136 | Zea mays | 3106 | 4478 |
| | | | | &gt:gi\|224028761\|gb\|ACN33456.1\| | | | | |
| | | | | unknown [Zea mays] | | | | |
| | | EAY75564 | 54362548 | hypothetical protein OsI_03468 | 0.780583 | Oryza sativa Indica Group | 3107 | |
| | | | | [Oryza sativa Indica Group] | | | | |
| | | NP_001044038 | 115439516 | Os01g0710200 [Oryza sativa Japonica Group] | 0.778641 | Oryza sativa Japonica Group | 3108 | 4479 |
| | | | | &gt:gi\|56784137\|dbj\|BAD81522.1\| polyamine | | | | |
| | | | | oxidase-like [Oryza sativa Japonica Group] | | | | |
| | | | | &gt:gi\|113533569\|dbj\|BAF05952.1\| Os01g0710200 | | | | |
| | | | | [Oryza sativa Japonica Group] | | | | |
| | | | | &gt:gi\|125571772\|gb\|EAZ13287.1\| | | | | |
| | | | | hypothetical protein OsJ_03212 | | | | |
| | | | | [Oryza sativa Japonica Group] | | | | |
| | | BAK01686 | 326489405 | predicted protein | 0.765049 | Hordeum vulgare subsp. vulgare | 3109 | 4480 |
| | | | | [Hordeum vulgare subsp. vulgare] | | | | |
| Predicted | 20-37 | AAY42386 | 65335862 | inorganic phosphate transporter 2 | 1 | Zea mays | 3110 | 4481 |
| siRNA | | | | [Zea mays] | | | | |
| 60421 | | ACF85228 | 194702287 | unknown [Zea mays] | 0.987085 | Zea mays | 3111 | 4482 |
| | | | | &gt:gi\|238007276\|gb\|ACR34673.1\| | | | | |
| | | | | unknown [Zea mays] | | | | |
| | | NP_001105269 | 162458547 | phosphate transporter protein 1 [Zea mays] | 0.987085 | Zea mays | 3112 | 4483 |
| | | | | &gt:gi\|49066604\|gb\|AAT51690.1\| | | | | |
| | | | | phosphate transport protein [Zea mays] | | | | |
| | | ACF84347 | 194700525 | unknown [Zea mays] | 0.98524 | Zea mays | 3113 | 4484 |
| | | AAY42388 | 65335893 | inorganic phosphate transporter 4 | 0.98524 | Zea mays | 3114 | 4485 |
| | | | | [Zea mays] | | | | |
| | | XP_002464558 | 242034326 | hypothetical protein SORBIDRAFT_01g020570 | 0.948339 | Sorghum bicolor | 3115 | 4486 |
| | | | | [Sorghum bicolor] | | | | |
| | | | | &gt:gi\|241918412\|gb\|EER91556.1\| | | | | |
| | | | | hypothetical protein SORBIDRAFT_01g020570 | | | | |
| | | | | [Sorghum bicolor] | | | | |
| | | NP_001105816 | 162461218 | phosphate transporter protein2 [Zea mays] | 0.944649 | Zea mays | 3116 | 4487 |
| | | | | &gt:gi\|65335848\|gb\|AAY42385.1\| | | | | |
| | | | | inorganic phosphate transporter 1 | | | | |
| | | | | [Zea mays] | | | | |
| | | | | &gt:gi\|223944389\|gb\|ACN26278.1\| | | | | |
| | | | | unknown [Zea mays] | | | | |
| | | ACG38622 | 195638307 | inorganic phosphate transporter | 0.931734 | Zea mays | 3117 | 4488 |
| | | | | 1-4 [Zea mays] | | | | |
| | | AAO72437 | 29367130 | phosphate transporter HvPT4 | 0.841328 | Hordeum vulgare subsp. vulgare | 3118 | 4489 |
| | | | | [Hordeum vulgare subsp. vulgare] | | | | |
| | | | | &gt:gi\|29367133\|gb\|AAO72438.1\| | | | | |
| | | | | phosphate transporter HvPT4 | | | | |
| | | | | [Hordeum vulgare subsp. vulgare] | | | | |
| | | NP_001064708 | 115482229 | Os10g0444700 [Oryza sativa Japonica Group] | 0.845018 | Oryza sativa Japonica Group | 3119 | 4490 |
| | | | | &gt:gi\|75299854\|sp\|Q8H6G8.1\|PHT18_ORYSJ | | | | |
| | | | | RecName: Full = Probable inorganic phosphate | | | | |
| | | | | transporter 1-8; Short = OsPT8; Short = OsPht1; 8; | | | | |
| | | | | AltName: Full = H(+)/Pi cotransporter | | | | |
| | | | | &gt:gi\|23600468\|gb\|AAN39049.1\| | | | | |
| | | | | putative phosphate transporter OsPT8 | | | | |
| | | | | [Oryza sativa Japonica Group] | | | | |
| | | | | &gt:gi\|31432353\|gb\|AAP53996.1\| | | | | |
| | | | | phosphate: H+ symporter family protein, expressed | | | | |
| | | | | [Oryza sativa Japonica Group] | | | | |
| | | | | &gt:gi\|78708737\|gb\|ABB47712.1\| | | | | |
| | | | | phosphate: H+ symporter family protein, expressed | | | | |
| | | | | [Oryza sativa Japonica Group] | | | | |
| | | | | &gt:gi\|113639317\|dbj\|BAF26622.1\| | | | | |
| | | | | Os10g0444700 [Oryza sativa Japonica Group] | | | | |
| | | | | &gt:gi\|125532137\|gb\|EAY78702.1\| | | | | |
| | | | | hypothetical protein OsI_33803 | | | | |
| | | | | [Oryza sativa Indica Group] | | | | |
| | | | | &gt:gi\|125574950\|gb\|EAZ16234.1\| | | | | |
| | | | | hypothetical protein OsJ_31686 | | | | |
| | | | | [Oryza sativa Japonica Group] | | | | |
| | 531-548 | NP_001151553 | 226497123 | nucleolar protein, Nop52 containing | 1 | Zea mays | 3120 | 4491 |
| | | | | protein [Zea mays] | | | | |
| | | | | &gt:gi\|195647654\|gb\|ACG43295.1\| | | | | |
| | | | | nucleolar protein, Nop52 containing | | | | |
| | | | | protein [Zea mays] | | | | |
| | | NP_001168446 | 293336366 | hypothetical protein LOC100382218 [Zea mays] | 0.815742 | Zea mays | 3121 | 4492 |
| | | | | &gt:gi\|223948351\|gb\|ACN28259.1\| | | | | |
| | | | | unknown [Zea mays] | | | | |
| | | AAL87179 | 19387261 | unknown [Oryza sativa Japonica Group] | 0.711986 | Oryza sativa Japonica Group | 3122 | 4493 |
| | | | | &gt:gi\|38346404\|emb\|CAE04237.2\| | | | | |
| | | | | OSJNBa0011F23.10 [Oryza sativa Japonica Group] | | | | |
| | | | | &gt:gi\|222629700\|gb\|EEE61832.1\| | | | | |
| | | | | hypothetical protein OsJ_16477 | | | | |
| | | | | [Oryza sativa Japonica Group] | | | | |
| | | NP_001054129 | 115461057 | Os04g0658600 [Oryza sativa Japonica Group] | 0.703041 | Oryza sativa Japonica Group | 3123 | 4494 |
| | | | | &gt:gi\|113565700\|dbj\|BAF16043.1\| | | | | |
| | | | | Os04g0658600 [Oryza sativa Japonica Group] | | | | |
| | | CAH67793 | 116310844 | OSIGBa0132E09-OSIGBa0108L24.7 | 0.70483 | Oryza sativa Indica Group | 3124 | 4495 |
| | | | | [Oryza sativa Indica Group] | | | | |
| | | EAY95889 | 54362548 | hypothetical protein OsI_17752 | 0.703041 | Oryza sativa Indica Group | 3125 | |
| | | | | [Oryza sativa Indica Group] | | | | |
| | 117-134 | NP_001148391 | 226531629 | nitrate-induced NOI protein [Zea mays] | 1 | Zea mays | 3126 | 4496 |
| | | | | &gt:gi\|195618920\|gb\|ACG31290.1\| | | | | |
| | | | | nitrate-induced NOI protein [Zea mays] | | | | |
| | | XP_002448552 | 242077231 | hypothetical protein SORBIDRAFT_06g028920 | 0.858696 | Sorghum bicolor | 3127 | 4497 |
| | | | | [Sorghum bicolor] | | | | |
| | | | | &gt:gi\|241939735\|gb\|EES12880.1\| | | | | |
| | | | | hypothetical protein SORBIDRAFT_06g028920 | | | | |
| | | | | [Sorghum bicolor] | | | | |
| | | NP_001053908 | 115460615 | Os04g0620600 [Oryza sativa Japonica Group] | 0.717391 | Oryza sativa Japonica Group | 3128 | 4498 |
| | | | | &gt:gi\|38344338\|emb\|CAE02154.2\| | | | | |
| | | | | OSJNBa0058K23.20 [Oryza sativa Japonica Group] | | | | |
| | | | | &gt:gi\|113565479\|dbj\|BAF15822.1\| Os04g0620600 | | | | |
| | | | | [Oryza sativa Japonica Group] | | | | |
| | | | | &gt:gi\|116309950\|emb\|CAH66981.1\| | | | | |
| | | | | H0714H04.8 [Oryza sativa Indica Group] | | | | |
| | | | | &gt:gi\|215768265\|dbj\|BAH00494.1\| | | | | |
| | | | | unnamed protein product | | | | |
| | | | | [Oryza sativa Japonica Group] | | | | |
| | 986-1003 | ACF84537 | 194700905 | unknown [Zea mays] | 1 | Zea mays | 3129 | 4499 |
| | | AAM13441 | 20152972 | similar to H. sapiens NNP-1/Nop52 AP001752 | 0.710909 | Hordeum vulgare subsp. vulgare | 3130 | 4500 |
| | | | | (Score = 92; E = 9e−18) | | | | |
| | | | | [Hordeum vulgare subsp. vulgare] | | | | |
| | 3196-3213 | XP_002443497 | 242086143 | hypothetical protein SORBIDRAFT_08g020610 | 1 | Sorghum bicolor | 3131 | 4501 |
| | | | | [Sorghum bicolor] | | | | |
| | | | | &gt:gi\|241944190\|gb\|EES17335.1\| | | | | |
| | | | | hypothetical protein SORBIDRAFT_08g020610 | | | | |
| | | | | [Sorghum bicolor] | | | | |
| | | NP_001106067 | 239985666 | H+-translocating pyrophosphatase | 0.981227 | Zea mays | 3132 | 4502 |
| | | | | [Zea mays] | | | | |
| | | | | &gt:gi\|117622272\|gb\|ABK51382.1\| | | | | |
| | | | | H+-translocating pyrophosphatase | | | | |
| | | | | [Zea mays] | | | | |
| | | EEC73348 | 54362548 | hypothetical protein OsI_07556 | 0.946183 | Oryza sativa Indica Group | 3133 | |
| | | | | [Oryza sativa Indica Group] | | | | |
| | | NP_001047051 | 115446542 | Os02g0537900 [Oryza sativa Japonica Group] | 0.94368 | Oryza sativa Japonica Group | 3134 | 4503 |
| | | | | &gt:gi\|50251984\|dbj\|BAD27918.1\| | | | | |
| | | | | putative vacuolar-type H+-translocating | | | | |
| | | | | inorganic pyrophosphatase | | | | |
| | | | | [Oryza sativa Japonica Group] | | | | |
| | | | | &gt:gi\|50252660\|dbj\|BAD28829.1\| | | | | |
| | | | | putative vacuolar-type H+-translocating | | | | |
| | | | | inorganic pyrophosphatase | | | | |
| | | | | [Oryza sativa Japonica Group] | | | | |
| | | | | &gt:gi\|113536582\|dbj\|BAF08965.1\| | | | | |
| | | | | Os02g0537900 [Oryza sativa Japonica Group] | | | | |
| | | | | &gt:gi\|222623005\|gb\|EEE57137.1\| | | | | |
| | | | | hypothetical protein OsJ_07039 | | | | |
| | | | | [Oryza sativa Japonica Group] | | | | |
| | | BAJ95133 | 326500933 | predicted protein | 0.918648 | Hordeum vulgare subsp. vulgare | 3135 | 4504 |
| | | | | [Hordeum vulgare subsp. vulgare] | | | | |
| | | Q9FWR2 | | RecName: Full = Pyrophosphate-energized | 0.862328 | Arabidopsis thaliana | 3136 | |
| | | | | membrane proton pump 3; | | | | |
| | | | | AltName: Full = AVP1-like protein 2; | | | | |
| | | | | AltName: Full = Pyrophosphate-energized inorganic | | | | |
| | | | | pyrophosphatase 3; Short = H(+)-PPase 3 | | | | |
| | | | | &gt:gi\|9954727\|gb\|AAG09080.1\|AC026237_1 | | | | |
| | | | | Putative vacuolar-type H+-translocating | | | | |
| | | | | inorganic pyrophosphatase | | | | |
| | | | | [Arabidopsis thaliana] | | | | |
| | | NP_173122 | 334182630 | Pyrophosphate-energized membrane proton | 0.862328 | Arabidopsis thaliana | 3137 | 4505 |
| | | | | pump 3 [Arabidopsis thaliana] | | | | |
| | | | | &gt:gi\|332191375\|gb\|AEE29496.1\| | | | | |
| | | | | Pyrophosphate-energized membrane proton | | | | |
| | | | | pump 3 [Arabidopsis thaliana] | | | | |
| | | XP_002265811 | 225443360 | PREDICTED: hypothetical protein [Vitis vinifera] | 0.87234 | Vitis vinifera | 3138 | 4506 |
| | | | | &gt:gi\|297735766\|emb\|CBI18453.3\| | | | | |
| | | | | unnamed protein product [Vitis vinifera] | | | | |
| | | XP_002887762 | 297839760 | vacuolar H+-pyrophosphatase 2 | 0.862328 | Arabidopsis lyrata subsp. lyrata | 3139 | 4507 |
| | | | | [Arabidopsis lyrata subsp. lyrata] | | | | |
| | | | | &gt:gi\|297333603\|gb\|EFH64021.1\| | | | | |
| | | | | vacuolar H+-pyrophosphatase 2 | | | | |
| | | | | [Arabidopsis lyrata subsp. lyrata] | | | | |
| | | NP_565195 | 145337727 | pyrophosphate-energized membrane proton | 0.85607 | Arabidopsis thaliana | 3140 | 4508 |
| | | | | pump 2 [Arabidopsis thaliana] | | | | |
| | | | | &gt:gi\|186496309lref\|NP_001117619.1\| | | | | |
| | | | | pyrophosphate-energized membrane proton | | | | |
| | | | | pump 2 [Arabidopsis thaliana] | | | | |
| | | | | &gt:gi\|83287950\|sp\|Q56ZN6.2\|AVP2_ARATH | | | | |
| | | | | RecName: Full = Pyrophosphate-energized | | | | |
| | | | | membrane proton pump 2; | | | | |
| | | | | AltName: Full = AVP1-like protein 1; | | | | |
| | | | | AltName: Full = Pyrophosphate-energized inorganic | | | | |
| | | | | pyrophosphatase 2; Short = H(+)-PPase 2; | | | | |
| | | | | AltName: Full = Vacuolar proton pyrophosphatase 2 | | | | |
| | | | | &gt:gi\|7024455\|dbj\|BAA92151.1\| | | | | |
| | | | | vacuolar-pyrophosphatase like protein | | | | |
| | | | | [Arabidopsis thaliana] | | | | |
| | | | | &gt:gi\|15450810\|gb\|AAK96676.1\| | | | | |
| | | | | Similar to vacuolar H+-pyrophosphatase | | | | |
| | | | | [Arabidopsis thaliana] | | | | |
| | | | | &gt:gi\|34098827\|gb\|AAQ56796.1\| | | | | |
| | | | | At1g78920 [Arabidopsis thaliana] | | | | |
| | | | | &gt:gi\|332198056\|gb\|AEE36177.1\| | | | | |
| | | | | pyrophosphate-energized membrane proton | | | | |
| | | | | pump 2 [Arabidopsis thaliana] | | | | |
| | | | | &gt:gi\|332198057\|gb\|AEE36178.1\| | | | | |
| | | | | pyrophosphate-energized membrane proton | | | | |
| | | | | pump 2 [Arabidopsis thaliana] | | | | |
| Predicted | 35-54 | NP_001167652 | 293331418 | hypothetical protein LOC100381282 | 1 | Zea mays | 3141 | 4509 |
| siRNA | | | | [Zea mays] | | | | |
| 60533 | | | | &gt:gi\|194708280\|gb\|ACF88224.1\| | | | | |
| | | | | unknown [Zea mays] | | | | |
| | | NP_001060508 | 115473818 | Os07g0656900 [Oryza sativa Japonica Group] | 0.793451 | Oryza sativa Japonica Group | 3142 | 4510 |
| | | | | &gt:gi\|113612044\|dbj\|BAF22422.1\| | | | | |
| | | | | Os07g0656900 [Oryza sativa Japonica Group] | | | | |
| | | EEE67734 | 54398660 | hypothetical protein OsJ_25423 | 0.793451 | Oryza sativa Japonica Group | 3143 | |
| | | | | [Oryza sativa Japonica Group] | | | | |
| | | EEC82601 | 54362548 | hypothetical protein OsI_27169 | 0.7733 | Oryza sativa Indica Group | 3144 | |
| | | | | [Oryza sativa Indica Group] | | | | |
| | 220-239 | XP_002463867 | 242032944 | hypothetical protein SORBIDRAFT_01g007880 | 1 | Sorghum bicolor | 3145 | 4511 |
| | | | | [Sorghum bicolor] | | | | |
| | | | | &gt:gi\|241917721\|gb\|EER90865.1\| | | | | |
| | | | | hypothetical protein SORBIDRAFT_01g007880 | | | | |
| | | | | [Sorghum bicolor] | | | | |
| | | ACL82964 | 223890398 | glutathione transporter [Zea mays] | 0.973226 | Zea mays | 3146 | 4512 |
| | | AAQ91200 | 37362135 | putative glutathione transporter | 0.943775 | Zea mays | 3147 | 4513 |
| | | | | [Zea mays] | | | | |
| | | BAK07444 | 326520370 | predicted protein | 0.907631 | Hordeum vulgare subsp. vulgare | 3148 | 4514 |
| | | | | [Hordeum vulgare subsp. vulgare] | | | | |
| | | NP_001051290 | 115455378 | Os03g0751100 [Oryza sativa Japonica Group] | 0.89826 | Oryza sativa Japonica Group | 3149 | 4515 |
| | | | | &gt:gi\|40539006\|gb\|AAR87263.1\| | | | | |
| | | | | putative oligopeptide transporter protein | | | | |
| | | | | [Oryza sativa Japonica Group] | | | | |
| | | | | &gt:gi\|108711110\|gb\|ABF98905.1\| | | | | |
| | | | | oligopeptide transporter 3, putative, expressed | | | | |
| | | | | [Oryza sativa Japonica Group] | | | | |
| | | | | &gt:gi\|113549761\|dbj\|BAF13204.1\| | | | | |
| | | | | Os03g0751100 [Oryza sativa Japonica Group] | | | | |
| | | | | &gt:gi\|218193762\|gb\|EEC76189.1\| | | | | |
| | | | | hypothetical protein OsI_13528 | | | | |
| | | | | [Oryza sativa Indica Group] | | | | |
| | | | | &gt:gi\|222625807\|gb\|EEE59939.1\| | | | | |
| | | | | hypothetical protein OsJ_12589 | | | | |
| | | | | [Oryza sativa Japonica Group] | | | | |
| | | ABF70152 | 102140012 | oligopeptide transporter OPT | 0.8166 | Musa acuminata | 3150 | 4516 |
| | | | | family protein [Musa acuminata] | | | | |
| | | AAO32313 | 21070919 | putative oligopeptide transporter protein | 0.854083 | Oryza sativa Japonica Group | 3151 | 4517 |
| | | | | [Oryza sativa Japonica Group] | | | | |
| | | O23482 | | RecName: Full = Oligopeptide transporter 3; | 0.801874 | Arabidopsis thaliana | 3152 | |
| | | | | Short = AtOPT3 | | | | |
| | | | | &gt:gi\|25083021\|gb\|AAN72034.1\| | | | | |
| | | | | isp4 like protein | | | | |
| | | | | [Arabidopsis thaliana] | | | | |
| | | AAK96781 | 15451019 | Unknown protein [Arabidopsis thaliana] | 0.800535 | Arabidopsis thaliana | 3153 | 4518 |
| | | XP_002868139 | 297800509 | hypothetical protein ARALYDRAFT_355122 | 0.801874 | Arabidopsis lyrata subsp. lyrata | 3154 | 4519 |
| | | | | [Arabidopsis lyrata subsp. lyrata] | | | | |
| | | | | &gt:gi\|297313975\|gb\|EFH44398.1\| | | | | |
| | | | | hypothetical protein ARALYDRAFT_355122 | | | | |
| | | | | [Arabidopsis lyrata subsp. lyrata] | | | | |
| | 1285-1304 | ACR35065 | 238008059 | unknown [Zea mays] | 1 | Zea mays | 3155 | 4520 |
| | 542-561 | ACN29008 | 223949848 | unknown [Zea mays] | 1 | Zea mays | 3156 | 4521 |
| | | NP_001147904 | 226502317 | serine carboxypeptidase 1 [Zea mays] | 0.996183 | Zea mays | 3157 | 4522 |
| | | | | &gt:gi\|195614482\|gb\|ACG29071.1\| | | | | |
| | | | | serine carboxypeptidase 1 precursor | | | | |
| | | | | [Zea mays] | | | | |
| | | XP_002463311 | 242051133 | hypothetical protein SORBIDRAFT_02g041610 | 0.902672 | Sorghum bicolor | 3158 | 4523 |
| | | | | [Sorghum bicolor] | | | | |
| | | | | &gt:gi\|241926688\|gb\|EER99832.1\| | | | | |
| | | | | hypothetical protein SORBIDRAFT_02g041610 | | | | |
| | | | | [Sorghum bicolor] | | | | |
| | | ACN26414 | 223944660 | unknown [Zea mays] | 0.877863 | Zea mays | 3159 | 4524 |
| | | NP_001147829 | 226509933 | LOC100281439 [Zea mays] | 0.874046 | Zea mays | 3160 | 4525 |
| | | | | &gt:gi\|195613988\|gb\|ACG28824.1\| | | | | |
| | | | | serine carboxypeptidase 1 precursor | | | | |
| | | | | [Zea mays] | | | | |
| | | BAC16131 | 50510131 | putative serine carboxypeptidase II-3 | 0.736641 | Oryza sativa Japonica Group | 3161 | 4526 |
| | | | | precursor [Oryza sativa Japonica Group] | | | | |
| | | BAJ94105 | 326490062 | predicted protein | 0.732824 | Hordeum vulgare subsp. vulgare | 3162 | 4527 |
| | | | | [Hordeum vulgare subsp. vulgare] | | | | |
| | | P52711 | | RecName: Full = Serine carboxypeptidase II-3; | 0.730916 | Hordeum vulgare subsp. vulgare | 3163 | |
| | | | | AltName: Full = CP-MIL3; Contains: | | | | |
| | | | | RecName: Full = Serine carboxypeptidase II-3 | | | | |
| | | | | chain A; Contains: | | | | |
| | | | | RecName: Full = Serine carboxypeptidase | | | | |
| | | | | II-3 chain B; Flags: Precursor | | | | |
| | | | | &gt:gi\|474392\|emb\|CAA55478.1\| | | | | |
| | | | | serine carboxylase II-3 | | | | |
| | | | | [Hordeum vulgare subsp. vulgare] | | | | |
| | | | | &gt:gi\|619350\|gb\|AAB31589.1\| | | | | |
| | | | | CP-MII.3 = serine carboxypeptidase | | | | |
| | | | | [Hordeum vulgare= barley, cv. Alexis, | | | | |
| | | | | aleurone, Peptide, 516 aa] | | | | |
| Predicted | 161-182 | NP_001044720 | 115440880 | Os01g0834500 [Oryza sativa Japonica Group] | 1 | Oryza sativa Japonica Group | 3164 | 4528 |
| siRNA | | | | &gt:gi\|115456215\|ref\|NP_001051708.1\| | | | | |
| 60718 | | | | Os03g0818400 [Oryza sativa Japonica Group] | | | | |
| | | | | &gt:gi\|297720551\|ref\|NP_001172637.1\| | | | | |
| | | | | Os01g0834601 [Oryza sativa Japonica Group] | | | | |
| | | | | &gt:gi\|313103637\|pdb\|3IZ6\|L Chain L, | | | | |
| | | | | Localization Of The Small Subunit | | | | |
| | | | | Ribosomal Proteins Into A 5.5 A Cryo-Em | | | | |
| | | | | Map Of Triticum Aestivum Translating 80s Ribosome | | | | |
| | | | | &gt:gi\|20805266\|dbj\|BAB92932.1\| | | | | |
| | | | | putative 40s ribosomal protein S23 | | | | |
| | | | | [Oryza sativa Japonica Group] | | | | |
| | | | | &gt:gi\|20805267\|dbj\|BAB92933.1\| | | | | |
| | | | | putative 40s ribosomal protein S23 | | | | |
| | | | | [Oryza sativa Japonica Group] | | | | |
| | | | | &gt:gi\|21671347\|dbj\|BAC02683.1\| | | | | |
| | | | | putative 40s ribosomal protein S23 | | | | |
| | | | | [Oryza sativa Japonica Group] | | | | |
| | | | | &gt:gi\|21671348\|dbj\|BAC02684.1\| | | | | |
| | | | | putative 40s ribosomal protein S23 | | | | |
| | | | | [Oryza sativa Japonica Group] | | | | |
| | | | | &gt:gi\|28876025\|gb\|AAO60034.1\| | | | | |
| | | | | 40S ribosomal protein S23 | | | | |
| | | | | [Oryza sativa Japonica Group] | | | | |
| | | | | &gt:gi\|29124115\|gb\|AAO65856.1\| | | | | |
| | | | | 40S ribosomal protein S23 | | | | |
| | | | | [Oryza sativa Japonica Group] | | | | |
| | | | | &gt:gi\|108711771\|gb\|ABF99566.1\| | | | | |
| | | | | 40S ribosomal protein S23, putative, expressed | | | | |
| | | | | [Oryza sativa Japonica Group] | | | | |
| | | | | &gt:gi\|113534251\|dbj\|BAF06634.1\| | | | | |
| | | | | Os01g0834500 [Oryza sativa Japonica Group] | | | | |
| | | | | &gt:gi\|113550179\|dbj\|BAF13622.1\| | | | | |
| | | | | Os03g0818400 [Oryza sativa Japonica Group] | | | | |
| | | | | &gt:gi\|125528286\|gb\|EAY76400.1\| | | | | |
| | | | | hypothetical protein OsI_04329 | | | | |
| | | | | [Oryza sativa Indica Group] | | | | |
| | | | | &gt:gi\|125546216\|gb\|EAY92355.1\| | | | | |
| | | | | hypothetical protein OsI_14082 | | | | |
| | | | | [Oryza sativa Indica Group] | | | | |
| | | | | &gt:gi\|215697420\|dbj\|BAG91414.1\| | | | | |
| | | | | unnamed protein product | | | | |
| | | | | [Oryza sativa Japonica Group] | | | | |
| | | | | &gt:gi\|215734943\|dbj\|BAG95665.1\| | | | | |
| | | | | unnamed protein product | | | | |
| | | | | [Oryza sativa Japonica Group] | | | | |
| | | | | &gt:gi\|255673847\|dbj\|BAH91367.1\| | | | | |
| | | | | Os01g0834601 [Oryza sativa Japonica Group] | | | | |
| | | | | &gt:gi\|326501134\|dbj\|BAJ98798.1\| | | | | |
| | | | | predicted protein | | | | |
| | | | | [Hordeum vulgare subsp. vulgare] | | | | |
| | | | | &gt:gi\|326506086\|dbj\|BAJ91282.1\| | | | | |
| | | | | predicted protein | | | | |
| | | | | [Hordeum vulgare subsp. vulgare] | | | | |
| | | NP_001131287 | 212722729 | hypothetical protein LOC100192600 | 0.992958 | Zea mays | 3165 | 4529 |
| | | | | [Zea mays] | | | | |
| | | | | &gt:gi\|242032479\|ref\|XP_002463634.1\| | | | | |
| | | | | hypothetical protein SORBIDRAFT_01g003410 | | | | |
| | | | | [Sorghum bicolor] | | | | |
| | | | | &gt:gi\|242059153\|ref\|XP_002458722.1\| | | | | |
| | | | | hypothetical protein SORBIDRAFT_03g039010 | | | | |
| | | | | [Sorghum bicolor] | | | | |
| | | | | &gt:gi\|242090801\|ref\|XP_002441233.1\| | | | | |
| | | | | hypothetical protein SORBIDRAFT_09g022840 | | | | |
| | | | | [Sorghum bicolor] | | | | |
| | | | | &gt:gi\|194691088\|gb\|ACF79628.1\| | | | | |
| | | | | unknown [Zea mays] | | | | |
| | | | | &gt:gi\|194697612\|gb\|ACF82890.1\| | | | | |
| | | | | unknown [Zea mays] | | | | |
| | | | | &gt:gi\|194702740\|gb\|ACF85454.1\| | | | | |
| | | | | unknown [Zea mays] | | | | |
| | | | | &gt:gi\|195606082\|gb\|ACG24871.1\| | | | | |
| | | | | 40S ribosomal protein S23 | | | | |
| | | | | [Zea mays] | | | | |
| | | | | &gt:gi\|195618728\|gb\|ACG31194.1\| | | | | |
| | | | | 40S ribosomal protein S23 | | | | |
| | | | | [Zea mays] | | | | |
| | | | | &gt:gi\|195619636\|gb\|ACG31648.1\| | | | | |
| | | | | 40S ribosomal protein S23 | | | | |
| | | | | [Zea mays] | | | | |
| | | | | &gt:gi\|195625318\|gb\|ACG34489.1\| | | | | |
| | | | | 40S ribosomal protein S23 | | | | |
| | | | | [Zea mays] | | | | |
| | | | | &gt:gi\|195628702\|gb\|ACG36181.1\| | | | | |
| | | | | 40S ribosomal protein S23 | | | | |
| | | | | [Zea mays] | | | | |
| | | | | &gt:gi\|195657679\|gb\|ACG48307.1\| | | | | |
| | | | | 40S ribosomal protein S23 | | | | |
| | | | | [Zea mays] | | | | |
| | | | | &gt:gi\|238012290\|gb\|ACR37180.1\| | | | | |
| | | | | unknown [Zea mays] | | | | |
| | | | | &gt:gi\|241917488\|gb\|EER90632.1\| | | | | |
| | | | | hypothetical protein SORBIDRAFT_01g003410 | | | | |
| | | | | [Sorghum bicolor] | | | | |
| | | | | &gt:gi\|241930697\|gb\|EES03842.1\| | | | | |
| | | | | hypothetical protein SORBIDRAFT_03g039010 | | | | |
| | | | | [Sorghum bicolor] | | | | |
| | | | | &gt:gi\|241946518\|gb\|EES19663.1\| | | | | |
| | | | | hypothetical protein SORBIDRAFT_09g022840 | | | | |
| | | | | [Sorghum bicolor] | | | | |
| | | ACG32843 | 195622025 | 40S ribosomal protein S23 | 0. 985915 | Zea mays | 3166 | 4530 |
| | | | | [Zea mays] | | | | |
| | | ACF06518 | 192910819 | 40S ribosomal protein S23 | 0.978873 | Elaeis guineensis | 3167 | 4531 |
| | | | | [Elaeis guineensis] | | | | |
| | | | | &gt:gi\|192910894\|gb\|ACF06555.1\| | | | | |
| | | | | 40S ribosomal protein S23 | | | | |
| | | | | [Elaeis guineensis] | | | | |
| | | ACF06519 | 192910821 | 40S ribosomal protein S23 | 0.971831 | Elaeis guineensis | 3168 | 4532 |
| | | | | [Elaeis guineensis] | | | | |
| | | ABBl6993 | 77999292 | unknown [Solanum tuberosum] | 0.964789 | Solanum tuberosum | 3169 | 4533 |
| | | XP_002523902 | 255565825 | 40S ribosomal protein S23, putative | 0.964789 | Ricinus communis | 3170 | 4534 |
| | | | | [Ricinus communis] | | | | |
| | | | | &gt:gi\|255568414\|ref\|XP_002525181.1\| | | | | |
| | | | | 40S ribosomal protein S23, putative | | | | |
| | | | | [Ricinus communis] | | | | |
| | | | | &gt:gi\|223535478\|gb\|EEF37147.1\| | | | | |
| | | | | 40S ribosomal protein S23, putative | | | | |
| | | | | [Ricinus communis] | | | | |
| | | | | &gt:gi\|223536832\|gb\|EEF38471.1\| | | | | |
| | | | | 40S ribosomal protein S23, putative | | | | |
| | | | | [Ricinus communis] | | | | |
| | | XP_002279025 | 225439887 | PREDICTED: hypothetical protein | 0.964789 | Vitis vinifera | 3171 | 4535 |
| | | | | [Vitis vinifera] | | | | |
| Predicted | 658-679 | NP_001131832 | 212724035 | hypothetical protein LOC100193207 | 1 | Zea mays | 3172 | 4536 |
| siRNA | | | | [Zea mays] | | | | |
| 60742 | | | | &gt:gi\|194692668\|gb\|ACF80418.1\| | | | | |
| | | | | unknown [Zea mays] | | | | |
| | | XP_002455284 | 242052276 | hypothetical protein SORBIDRAFT_03g007780 | 0.745562 | Sorghum bicolor | 3173 | 4537 |
| | | | | [Sorghum bicolor] | | | | |
| | | | | &gt:gi\|241927259\|gb\|EES00404.1\| | | | | |
| | | | | hypothetical protein SORBIDRAFT_03g007780 | | | | |
| | | | | [Sorghum bicolor] | | | | |
| | 1293-1314 | XP_002451722 | 242060865 | hypothetical protein SORBIDRAFT_04g006610 | 1 | Sorghum bicolor | 3174 | 4538 |
| | | | | [Sorghum bicolor] | | | | |
| | | | | &gt:gi\|241931553\|gb\|EES04698.1\| | | | | |
| | | | | hypothetical protein SORBIDRAFT_04g006610 | | | | |
| | | | | [Sorghum bicolor] | | | | |
| Predicted | 437-454 | NP_001145763 | 226491569 | hypothetical protein LOC100279270 | 1 | Zea mays | 3175 | 4539 |
| siRNA | | | | [Zea mays] | | | | |
| 60833 | | | | &gt:gi\|219884277\|gb\|ACL52513.1\| | | | | |
| | | | | unknown [Zea mays] | | | | |
| | | | | &gt:gi\|219884335\|gb\|ACL52542.1\| | | | | |
| | | | | unknown [Zea mays] | | | | |
| | | | | &gt:gi\|224028501\|gb\|ACN33326.1\| | | | | |
| | | | | unknown [Zea mays] | | | | |
| | | NP_001054556 | 115461912 | Os05g0132100 [Oryza sativa Japonica Group] | 0.828358 | Oryza sativa Japonica Group | 3176 | 4540 |
| | | | | &gt:gi\|113578107\|dbj\|BAF16470.1\| | | | | |
| | | | | Os05g0132100 [Oryza sativa Japonica Group] | | | | |
| | | | | &gt:gi\|222630090\|gb\|EEE62222.1\| | | | | |
| | | | | hypothetical protein OsJ_17009 | | | | |
| | | | | [Oryza sativa Japonica Group] | | | | |
| | | EEC78466 | 54362548 | hypothetical protein OsI_18335 | 0.810448 | Oryza sativa Indica Group | 3177 | |
| | | | | [Oryza sativa Indica Group] | | | | |
| | | BAG97315 | 32990827 | unnamed protein product | 0.753731 | Oryza sativa Japonica Group | 3178 | 4541 |
| | | | | [Oryza sativa Japonica Group] | | | | |
| | 1660-1677 | XP_002456424 | 242054556 | hypothetical protein SORBIDRAFT_03g036030 | 1 | Sorghum bicolor | 3179 | 4542 |
| | | | | [Sorghum bicolor] | | | | |
| | | | | &gt:gi\|241928399\|gb\|EES01544.1\| | | | | |
| | | | | hypothetical protein SORBIDRAFT_03g036030 | | | | |
| | | | | [Sorghum bicolor] | | | | |
| | | NP_001142208 | 226496106 | hypothetical protein LOC100274376 | 0.987903 | Zea mays | 3180 | 4543 |
| | | | | [Zea mays] | | | | |
| | | | | &gt:gi\|194702286\|gb\|ACF85227.1\| | | | | |
| | | | | unknown [Zea mays] | | | | |
| | | | | &gt:gi\|194707600\|gb\|ACF87884.1\| | | | | |
| | | | | unknown [Zea mays] | | | | |
| | | NP_001044395 | 115440230 | Os01g0772800 [Oryza sativa Japonica Group] | 0.947581 | Oryza sativa Japonica Group | 3181 | 4544 |
| | | | | &gt:gi\|20160917\|dbj\|BAB89854.1\| | | | | |
| | | | | putative signal recognition particle 54 kD protein | | | | |
| | | | | [Oryza sativa Japonica Group] | | | | |
| | | | | &gt:gi\|21743252\|dbj\|BAC03250.1\| | | | | |
| | | | | putative signal recognition particle 54 kD protein | | | | |
| | | | | [Oryza sativa Japonica Group] | | | | |
| | | | | &gt:gi\|32879776\|dbj\|BAC79360.1\| | | | | |
| | | | | signal recognition particle 54 kDa subunit | | | | |
| | | | | [Oryza sativa Japonica Group] | | | | |
| | | | | &gt:gi\|113533926\|dbj\|BAF06309.1\| | | | | |
| | | | | Os01g0772800 [Oryza sativa Japonica Group] | | | | |
| | | | | &gt:gi\|215767979\|dbj\|BAH00208.1\| | | | | |
| | | | | unnamed protein product | | | | |
| | | | | [Oryza sativa Japonica Group] | | | | |
| | | | | &gt:gi\|222619331\|gb\|EEE55463.1\| | | | | |
| | | | | hypothetical protein OsJ_03626 | | | | |
| | | | | [Oryza sativa Japonica Group] | | | | |
| | | EEC71559 | 54362548 | hypothetical protein OsI_03915 | 0.945565 | Oryza sativa Indica Group | 3182 | |
| | | | | [Oryza sativa Indica Group] | | | | |
| | | XP_002517663 | 255553240 | signal recognition particle 54 kD protein, putative | 0.905242 | Ricinus communis | 3183 | 4545 |
| | | | | [Ricinus communis] | | | | |
| | | | | &gt:gi\|223543295\|gb\|EEF44827.1\| | | | | |
| | | | | signal recognition particle 54 kD protein, putative | | | | |
| | | | | [Ricinus communis] | | | | |
| | | XP_002299799 | 224059269 | predicted protein [Populus trichocarpa] | 0.887097 | Populus trichocarpa | 3184 | 4546 |
| | | | | &gt:gi\|222847057\|gb\|EEE84604.1\| | | | | |
| | | | | predicted protein [Populus trichocarpa] | | | | |
| | | XP_002264159 | 225442909 | PREDICTED: hypothetical protein | 0.887097 | Vitis vinifera | 3185 | 4547 |
| | | | | [Vitis vinifera] | | | | |
| | | XP_002322968 | 224139051 | predicted protein [Populus trichocarpa] | 0.893145 | Populus trichocarpa | 3186 | 4548 |
| | | | | &gt:gi\|222867598\|gb\|EEF04729.1\| | | | | |
| | | | | predicted protein [Populus trichocarpa] | | | | |
| | | ABK95819 | 118487995 | unknown [Populus trichocarpa] | 0.885081 | Populus trichocarpa | 3187 | 4549 |
| | 1015-1032 | XP_002466942 | 242039094 | hypothetical protein SORBIDRAFT_01g017160 | 1 | Sorghum bicolor | 3188 | 4550 |
| | | | | [Sorghum bicolor] | | | | |
| | | | | &gt:gi\|241920796\|gb\|EER93940.1\| | | | | |
| | | | | hypothetical protein SORBIDRAFT_01g017160 | | | | |
| | | | | [Sorghum bicolor] | | | | |
| | | NP_001146067 | 226501573 | hypothetical protein LOC100279598 | 0.925144 | Zea mays | 3189 | 4551 |
| | | | | [Zea mays] | | | | |
| | | | | &gt:gi\|224030981\|gb\|ACN34566.1\| | | | | |
| | | | | unknown [Zea mays] | | | | |
| | | ACG47544 | 195656152 | transposon protein [Zea mays] | 0.932821 | Zea mays | 3190 | 4552 |
| | | XP_002466943 | 242039096 | hypothetical protein SORBIDRAFT_01g017170 | 0.815739 | Sorghum bicolor | 3191 | 4553 |
| | | | | [Sorghum bicolor] | | | | |
| | | | | &gt:gi\|241920797\|gb\|EER93941.1\| | | | | |
| | | | | hypothetical protein SORBIDRAFT_01g017170 | | | | |
| | | | | [Sorghum bicolor] | | | | |
| | | BAJ94552 | 326494865 | predicted protein | 0.761996 | Hordeum vulgare subsp. vulgare | 3192 | 4554 |
| | | | | [Hordeum vulgare subsp. vulgare] | | | | |
| | | NP_001065056 | 115482925 | Os10g0515200 [Oryza sativa Japonica Group] | 0.740883 | Oryza sativa Japonica Group | 3193 | 4555 |
| | | | | &gt:gi\|10140669\|gb\|AAG13504.1\|AC068924_9 | | | | |
| | | | | putative cytochrome P450 | | | | |
| | | | | [Oryza sativa Japonica Group] | | | | |
| | | | | &gt:gi\|31433051\|gb\|AAP54611.1\| | | | | |
| | | | | transposon protein, putative, unclassified, expressed | | | | |
| | | | | [Oryza sativa Japonica Group] | | | | |
| | | | | &gt:gi\|113639665\|dbj\|BAF26970.1\| | | | | |
| | | | | Os10g0515200 [Oryza sativa Japonica Group] | | | | |
| | | | | &gt:gi\|215740677\|dbj\|BAG97333.1\| | | | | |
| | | | | unnamed protein product | | | | |
| | | | | [Oryza sativa Japonica Group] | | | | |
| | | EAY79199 | 54362548 | hypothetical protein OsI_34311 | 0.735125 | Oryza sativa Indica Group | 3194 | |
| | | | | [Oryza sativa Indica Group] | | | | |
| | | BAK03964 | 326520078 | predicted protein | 0.737044 | Hordeum vulgare subsp. vulgare | 3195 | 4556 |
| | | | | [Hordeum vulgare subsp. vulgare] | | | | |
| | | BAJ93808 | 326488278 | predicted protein | 0.723608 | Hordeum vulgare subsp. vulgare | 3196 | 4557 |
| | | | | [Hordeum vulgare subsp. vulgare] | | | | |
| | 14111-428 | XP_002448742 | 242077611 | hypothetical protein SORBIDRAFT_06g032450 | 1 | Sorghum bicolor | 3197 | 4558 |
| | | | | [Sorghum bicolor] | | | | |
| | | | | &gt:gi\|241939925\|gb\|EES13070.1\| | | | | |
| | | | | hypothetical protein SORBIDRAFT_06g032450 | | | | |
| | | | | [Sorghum bicolor] | | | | |
| | | ACF78749 | 238908545 | unknown [Zea mays] | 0.969199 | Zea mays | 3198 | 4559 |
| | | | | &gt:gi\|194707726\|gb\|ACF87947.1\| | | | | |
| | | | | unknown [Zea mays] | | | | |
| | | | | &gt:gi\|195611472\|gb\|ACG27566.1\| | | | | |
| | | | | lysine-specific histone demethylase 1 | | | | |
| | | | | [Zea mays] | | | | |
| | | | | &gt:gi\|195616900\|gb\|ACG30280.1\| | | | | |
| | | | | lysine-specific histone demethylase 1 | | | | |
| | | | | [Zea mays] | | | | |
| | | | | &gt:gi\|223950041\|gb\|ACN29104.1\| | | | | |
| | | | | unknown [Zea mays] | | | | |
| | | | | &gt:gi\|224031369\|gb\|ACN34760.1\| | | | | |
| | | | | unknown [Zea mays] | | | | |
| | | NP_001054218 | 115461235 | Os04g0671200 [Oryza sativa Japonica Group] | 0.905544 | Oryza sativa Japonica Group | 3199 | 4560 |
| | | | | &gt:gi\|32488409\|emb\|CAE02834.1\| | | | | |
| | | | | OSJNBa0043A12.39 [Oryza sativa Japonica Group] | | | | |
| | | | | &gt:gi\|90265248\|emb\|CAH67701.1\| | | | | |
| | | | | H0624F09.9 [Oryza sativa Indica Group] | | | | |
| | | | | &gt:gi\|113565789\|dbj\|BAF16132.1\| | | | | |
| | | | | Os04g0671200 [Oryza sativa Japonica Group] | | | | |
| | | | | &gt:gi\|125550177\|gb\|EAY95999.1\| | | | | |
| | | | | hypothetical protein OsI_17870 | | | | |
| | | | | [Oryza sativa Indica Group] | | | | |
| | | | | &gt:gi\|125592017\|gb\|EAZ32367.1\| | | | | |
| | | | | hypothetical protein OsJ_16578 | | | | |
| | | | | [Oryza sativa Japonica Group] | | | | |
| | | XP_002448744 | 242077615 | hypothetical protein SORBIDRAFT_06g032460 | 0.7577 | Sorghum bicolor | 3200 | 4561 |
| | | | | [Sorghum bicolor] | | | | |
| | | | | &gt:gi\|241939927\|gb\|EES13072.1\| | | | | |
| | | | | hypothetical protein SORBIDRAFT_06g032460 | | | | |
| | | | | [Sorghum bicolor] | | | | |
| | | NP_001054219 | 115461237 | Os04g0671300 [Oryza sativa Japonica Group] | 0.75154 | Oryza sativa Japonica Group | 3201 | 4562 |
| | | | | &gt:gi\|90265249\|emb\|CAH67702.1\| | | | | |
| | | | | H0624F09.10 [Oryza sativa Indica Group] | | | | |
| | | | | &gt:gi\|113565790\|dbj\|BAF16133.1\| | | | | |
| | | | | Os04g0671300 [Oryza sativa Japonica Group] | | | | |
| | | | | &gt:gi\|215704120\|dbj\|BAG92960.1\| | | | | |
| | | | | unnamed protein product | | | | |
| | | | | [Oryza sativa Japonica Group] | | | | |
| | | | | &gt:gi\|218195801\|gb\|EEC78228.1\| | | | | |
| | | | | hypothetical protein OsI_17871 | | | | |
| | | | | [Oryza sativa Indica Group] | | | | |
| | | | | &gt:gi\|222629752\|gb\|EEE61884.1\| | | | | |
| | | | | hypothetical protein OsJ_16579 | | | | |
| | | | | [Oryza sativa Japonica Group] | | | | |
| | | CAE03599 | 70663936 | OSJNBb0004A17.1 [Oryza sativa Japonica Group] | 0.74538 | Oryza sativa Japonica Group | 3202 | 4563 |
| | | NP_001170164 | 293332860 | hypothetical protein LOC100384102 | 0.743326 | Zea mays | 3203 | 4564 |
| | | | | [Zea mays] | | | | |
| | | | | &gt:gi\|195613858\|gb\|ACG28759.1\| | | | | |
| | | | | lysine-specific histone demethylase 1 | | | | |
| | | | | [Zea mays] | | | | |
| | | ACG29077 | 195614493 | lysine-specific histone demethylase 1 | 0.73922 | Zea mays | 3204 | 4565 |
| | | | | [Zea mays] | | | | |
| | | ACN36050 | 224033948 | unknown [Zea mays] | 0.741273 | Zea mays | 3205 | 4566 |
| | 1657-1674 | NP_001183903 | 308080099 | hypothetical protein LOC100502496 | 1 | Zea mays | 3206 | 4567 |
| | | | | [Zea mays] | | | | |
| | | | | &gt:gi\|238015356\|gb\|ACR38713.1\| | | | | |
| | | | | unknown [Zea mays] | | | | |
| | 462-479 | XP_002467261 | 242039732 | hypothetical protein SORBIDRAFT_01g022230 | 1 | Sorghum bicolor | 3207 | 4568 |
| | | | | [Sorghum bicolor] | | | | |
| | | | | &gt:gi\|24192115\|gb\|EER94259.1\| | | | | |
| | | | | hypothetical protein SORBIDRAFT_01g022230 | | | | |
| | | | | [Sorghum bicolor] | | | | |
| | | NP_001150190 | 226490935 | PP2Ac-4 - Phosphatase 2A isoform 4 belonging | 0.984127 | Zea mays | 3208 | 4569 |
| | | | | to family 2 [Zea mays] | | | | |
| | | | | &gt:gi\|195637426\|gb\|ACG38181.1\| | | | | |
| | | | | PP2Ac-4 -Phosphatase 2A isoform 4 belonging | | | | |
| | | | | to family 2 [Zea mays] | | | | |
| | | XP_002465801 | 242036812 | hypothetical protein SORBIDRAFT_01g046020 | 0.942857 | Sorghum bicolor | 3209 | 4570 |
| | | | | [Sorghum bicolor] | | | | |
| | | | | &gt:gi\|241919655\|gb\|EER92799.1\| | | | | |
| | | | | hypothetical protein SORBIDRAFT_01g046020 | | | | |
| | | | | [Sorghum bicolor] | | | | |
| | | ACG34764 | 195625867 | PP2Ac-5 - Phosphatase 2A isoform 5 belonging | 0.939683 | Zea mays | 3210 | 4571 |
| | | | | to family 2 [Zea mays] | | | | |
| | | P0C5D7 | | RecName: Full = Putative serine/threonine-protein | 0.942857 | Oryza sativa Indica Group | 3211 | |
| | | | | phosphatase PP2A-4 catalytic subunit | | | | |
| | | | | &gt:gi\|5714762\|gb\|AAD48068.1\|AF173881_1 | | | | |
| | | | | serine/threonine protein phosphatase PP2A-4 catalytic subunit | | | | |
| | | | | [Oryza sativa Indica Group] | | | | |
| | | NP_001130096 | 212274514 | hypothetical protein LOC100191189 | 0.936508 | Zea mays | 3212 | 4572 |
| | | | | [Zea mays] | | | | |
| | | | | &gt:gi\|194688278\|gb\|ACF78223.1\| | | | | |
| | | | | unknown [Zea mays] | | | | |
| | | ABOl6371 | 126517971 | serine/threonine-protein phosphatase PP2A-1 catalytic subunit | 0.936508 | Triticum aestivum | 3213 | 4573 |
| | | | | [Triticum aestivum] | | | | |
| | | NP_001149212 | 226495576 | PP2Ac-5 - Phosphatase 2A isoform 5 belonging | 0.933333 | Zea mays | 3214 | 4574 |
| | | | | to family 2 [Zea mays] | | | | |
| | | | | &gt:gi\|195625500\|gb\|ACG34580.1\| | | | | |
| | | | | PP2Ac-5 - Phosphatase 2A isoform 5 belonging | | | | |
| | | | | to family 2 [Zea mays] | | | | |
| | | NP_001049084 | 115450966 | Os03g0167700 [Oryza sativa Japonica Group] | 0.92381 | Oryza sativa Japonica Group | 3215 | 4575 |
| | | | | &gt:gi\|108706380\|gb\|ABF94175.1\| | | | | |
| | | | | Serine/threonine protein phosphatase | | | | |
| | | | | PP2A-4 catalytic subunit, putative, expressed | | | | |
| | | | | [Oryza sativa Japonica Group] | | | | |
| | | | | &gt:gi\|113547555\|dbj\|BAF10998.1\| | | | | |
| | | | | Os03g0167700 [Oryza sativa Japonica Group] | | | | |
| | | | | &gt:gi\|215697662\|dbj\|BAG91656.1\| | | | | |
| | | | | unnamed protein product | | | | |
| | | | | [Oryza sativa Japonica Group] | | | | |
| | | | | &gt:gi\|215701359\|dbj\|BAG92783.1\| | | | | |
| | | | | unnamed protein product | | | | |
| | | | | [Oryza sativa Japonica Group] | | | | |
| | 1228-1245 | AAL75481 | 46200524 | putative TNP2 [Zea mays] | 1 | Zea mays | 3216 | 4576 |
| | 735-752 | NP_001130504 | 212275861 | hypothetical protein LOC100191603 | 1 | Zea mays | 3217 | 4577 |
| | | | | [Zea mays] | | | | |
| | | | | &gt:gi\|195616620\|gb\|ACG30140.1\| | | | | |
| | | | | lysine-specific histone demethylase 1 | | | | |
| | | | | [Zea mays] | | | | |
| | 114-131 | XP_002447908 | 242075943 | hypothetical protein SORBIDRAFT_06g017770 | 1 | Sorghum bicolor | 3218 | 4578 |
| | | | | [Sorghum bicolor] | | | | |
| | | | | &gt:gi\|241939091\|gb\|EES12236.1\| | | | | |
| | | | | hypothetical protein SORBIDRAFT_06g017770 | | | | |
| | | | | [Sorghum bicolor] | | | | |
| | | NP_001105527 | 162461261 | barley mlo defense gene homolog3 [Zea mays] | 0.916667 | Zea mays | 3219 | 4579 |
| | | | | &gt:gi\|13784979\|gb\|AAK38339.1\| | | | | |
| | | | | seven transmembrane protein Mlo3 | | | | |
| | | | | [Zea mays] | | | | |
| | | EAY94273 | 54362548 | hypothetical protein OsI_16042 | 0.702381 | Oryza sativa Indica Group | 3220 | |
| | | | | [Oryza sativa Indica Group] | | | | |
| | | CAD40974 | 32482917 | OSJNBa0027P08.3 [Oryza sativa Japonica Group] | 0.702381 | Oryza sativa Japonica Group | 3221 | 4580 |
| | | | | &gt:gi\|21742880\|emb\|CAD41046.1\| | | | | |
| | | | | OSJNBa0058G03.6 [Oryza sativa Japonica Group] | | | | |
| | | | | &gt:gi\|125590510\|gb\|EAZ30860.1\| | | | | |
| | | | | hypothetical protein OsJ_14932 | | | | |
| | | | | [Oryza sativa Japonica Group] | | | | |
| | 361-378 | XP_002442895 | 242084939 | hypothetical protein SORBIDRAFT_08g004520 | 1 | Sorghum bicolor | 3222 | 4581 |
| | | | | [Sorghum bicolor] | | | | |
| | | | | &gt:gi\|241943588\|gb\|EES16733.1\| | | | | |
| | | | | hypothetical protein SORBIDRAFT_08g004520 | | | | |
| | | | | [Sorghum bicolor] | | | | |
| | | ACN36368 | 224034584 | unknown [Zea mays] | 0.769231 | Zea mays | 3223 | 4582 |
| | | NP_001152351 | 226496368 | bile acid sodium symporter/transporter | 0.764268 | Zea mays | 3224 | 4583 |
| | | | | [Zea mays] | | | | |
| | | | | &gt:gi\|195655405\|gb\|ACG47170.1\| | | | | |
| | | | | bile acid sodium symporter/transporter | | | | |
| | | | | [Zea mays] | | | | |
| | | ABA96556 | 108862058 | Sodium Bile acid symporter family protein, expressed | 0.722084 | Oryza sativa Japonica Group | 3225 | 4584 |
| | | | | [Oryza sativa Japonica Group] | | | | |
| | 680-697 | NP_001048539 | 115449732 | Os02g0820000 [Oryza sativa Japonica Group] | 1 | Oryza sativa Japonica Group | 3226 | 4585 |
| | | | | &gt:gi\|113538070\|dbj\|BAF10453.1\| | | | | |
| | | | | Os02g0820000 [Oryza sativa Japonica Group] | | | | |
| | | AAK64283 | 14495345 | protein phosphatase [Oryza sativa] | 0.921283 | Oryza sativa | 3227 | 4586 |
| | | | | &gt:gi\|48716362\|dbj\|BAD22973.1\| protein | | | | |
| | | | | phosphatase [Oryza sativa Japonica Group] | | | | |
| | | | | &gt:gi\|48716497\|dbj\|BAD23102.1\| protein | | | | |
| | | | | phosphatase [Oryza sativa Japonica Group] | | | | |
| | | | | &gt:gi\|215767785\|dbj\|BAH00014.1\| unnamed protein | | | | |
| | | | | product [Oryza sativa Japonica Group] | | | | |
| | | | | &gt:gi\|218191835\|gb\|EEC74262.1\| | | | | |
| | | | | hypothetical protein OsI_09476 | | | | |
| | | | | [Oryza sativa Indica Group] | | | | |
| | | | | &gt:gi\|222623927\|gb\|EEE58059.1\| | | | | |
| | | | | hypothetical protein OsJ_08899 | | | | |
| | | | | [Oryza sativa Japonica Group] | | | | |
| | | NP_001105341 | 162462901 | serine/threonine-protein phosphatase | 0.868805 | Zea mays | 3228 | 4587 |
| | | | | PP1 [Zea mays] | | | | |
| | | | | &gt:gi\|130709\|sp\|P22198.1\|PP1_MAIZE | | | | |
| | | | | RecName: Full = Serine/threonine-protein phosphatase PP1 | | | | |
| | | | | &gt:gi\|168723\|gb\|AAA33545.1\| | | | | |
| | | | | protein phosphatase-1 [Zea mays] | | | | |
| | | | | &gt:gi\|223944929\|gb\|ACN26548.1\| | | | | |
| | | | | unknown [Zea mays] | | | | |
| | | | | &gt:gi\|445586\|prf\|\|1909338A | | | | |
| | | | | protein phosphatase 1 | | | | |
| | | XP_002521968 | 255561918 | serine/threonine protein phosphatase, putative | 0.784257 | Ricinus communis | 3229 | 4588 |
| | | | | [Ricinus communis] | | | | |
| | | | | &gt:gi\|223538772\|gb\|EEF40372.1\| | | | | |
| | | | | serine/threonine protein phosphatase, putative | | | | |
| | | | | [Ricinus communis] | | | | |
| | | XP_002265552 | 225453025 | PREDICTED: hypothetical protein | 0.781341 | Vitis vinifera | 3230 | 4589 |
| | | | | [Vitis vinifera] | | | | |
| | | CAN71489 | 147842159 | hypothetical protein VITISV_005340 | 0.781341 | Vitis vinifera | 3231 | |
| | | | | [Vitis vinifera] | | | | |
| | | ACU24610 | 255648313 | unknown [Glycine max] | 0.790087 | Glycine max | 3232 | 4590 |
| | | XP_002319103 | 224123531 | predicted protein [Populus trichocarpa] | 0.769679 | Populus trichocarpa | 3233 | 4591 |
| | | | | &gt:gi\|222857479\|gb\|EEE95026.1\| | | | | |
| | | | | predicted protein [Populus trichocarpa] | | | | |
| | 103-120 | NP_001168450 | 293331506 | hypothetical protein LOC100382223 | 1 | Zea mays | 3234 | 4592 |
| | | | | [Zea mays] | | | | |
| | | | | &gt:gi\|223948377\|gb\|ACN28272.1\| | | | | |
| | | | | unknown [Zea mays] | | | | |
| | | NP_001142379 | 226504555 | hypothetical protein LOC100274552 | 0.911688 | Zea mays | 3235 | 4593 |
| | | | | [Zea mays] | | | | |
| | | | | &gt:gi\|194708552\|gb\|ACF88360.1\| | | | | |
| | | | | unknown [Zea mays] | | | | |
| | | XP_002438780 | 242096579 | hypothetical protein SORBIDRAFT_10g026080 | 0.901299 | Sorghum bicolor | 3236 | 4594 |
| | | | | [Sorghum bicolor] | | | | |
| | | | | &gt:gi\|241917003\|gb\|EER90147.1\| | | | | |
| | | | | hypothetical protein SORBIDRAFT_10g026080 | | | | |
| | | | | [Sorghum bicolor] | | | | |
| | | BAJ93429 | 326528494 | predicted protein | 0.823377 | Hordeum vulgare subsp. vulgare | 3237 | 4595 |
| | | | | [Hordeum vulgare subsp. vulgare] | | | | |
| | | NP_001058250 | 115469301 | Os06g0655500 [Oryza sativa Japonica Group] | 0.820779 | Oryza sativa Japonica Group | 3238 | 4596 |
| | | | | &gt:gi\|51535613\|dbj\|BAD37556.1\| | | | | |
| | | | | kelch repeat containing F-box protein-like | | | | |
| | | | | [Oryza sativa Japonica Group] | | | | |
| | | | | &gt:gi\|51536380\|dbj\|BAD37573.1\| | | | | |
| | | | | kelch repeat containing F-box protein-like | | | | |
| | | | | [Oryza sativa Japonica Group] | | | | |
| | | | | &gt:gi\|113596290\|dbj\|BAF20164.1\| | | | | |
| | | | | Os06g0655500 [Oryza sativa Japonica Group] | | | | |
| | | | | &gt:gi\|215697408\|dbj\|BAG91402.1\| | | | | |
| | | | | unnamed protein product | | | | |
| | | | | [Oryza sativa Japonica Group] | | | | |
| | 698-715 | NP_001149387 | 226496780 | LOC100283013 [Zea mays] | 1 | Zea mays | 3239 | 4597 |
| | | | | &gt:gi\|195626870\|gb\|ACG35265.1\| serine/threonine- | | | | |
| | | | | protein phosphatase PP1 [Zea mays] | | | | |
| | 175-192 | ACG35262 | 195626863 | seed specific protein Bn15D17A [Zea mays] | 1 | Zea mays | 3240 | 4598 |
| | | NP_001148471 | 226528520 | seed specific protein Bn15D17A [Zea mays] | 0.98722 | Zea mays | 3241 | 4599 |
| | | | | &gt:gi\|195619590\|gb\|ACG31625.1\| | | | | |
| | | | | seed specific protein Bn15D17A [Zea mays] | | | | |
| | | XP_002441388 | 242091110 | hypothetical protein SORBIDRAFT_09g025710 | 0.817891 | Sorghum bicolor | 3242 | 4600 |
| | | | | [Sorghum bicolor] | | | | |
| | | | | &gt:gi\|241946673\|gb\|EES19818.1\| | | | | |
| | | | | hypothetical protein SORBIDRAFT_09g025710 | | | | |
| | | | | [Sorghum bicolor] | | | | |
| | 542-559 | NP_001105206 | 162459735 | SET domain protein SDG117 [Zea mays] | 1 | Zea mays | 3243 | 4601 |
| | | | | &gt:gi\|28261315\|gb\|AAO32935.1\| | | | | |
| | | | | SET domain protein SDG117 [Zea mays] | | | | |
| | 258-275 | NP_001064578 | 115481969 | Os10g0410600 [Oryza sativa Japonica Group] | 1 | Oryza sativa Japonica Group | 3244 | 4602 |
| | | | | &gt:gi\|158513707\|sp\|A3C4N5.2\|PP2A4_ORYSJ | | | | |
| | | | | RecName: Full = Serine/threonine-protein phosphatase | | | | |
| | | | | PP2A-4 catalytic subunit | | | | |
| | | | | &gt:gi\|78708615\|gb\|ABB47590.1\| | | | | |
| | | | | Serine/threonine protein phosphatase | | | | |
| | | | | PP2A-4 catalytic subunit, putative, expressed | | | | |
| | | | | [Oryza sativa Japonica Group] | | | | |
| | | | | &gt:gi\|113639187\|dbj\|BAF26492.1\| | | | | |
| | | | | Os10g0410600 [Oryza sativa Japonica Group] | | | | |
| | | | | &gt:gi\|215704585\|dbj\|BAG94218.1\| | | | | |
| | | | | unnamed protein product | | | | |
| | | | | [Oryza sativa Japonica Group] | | | | |
| | | | | &gt:gi\|222612811\|gb\|EEE50943.1\| | | | | |
| | | | | hypothetical protein OsJ_31490 | | | | |
| | | | | [Oryza sativa Japonica Group] | | | | |
| | 162-179 | BAJ85175 | 326493427 | predicted protein | 1 | Hordeum vulgare subsp. vulgare | 3245 | 4603 |
| | | | | [Hordeum vulgare subsp. vulgare] | | | | |
| | | | | &gt:gi\|326500666\|dbj\|BAJ94999.1\| | | | | |
| | | | | predicted protein | | | | |
| | | | | [Hordeum vulgare subsp. vulgare] | | | | |
| | | | | &gt:gi\|326513058\|dbj\|BAK03436.1\| | | | | |
| | | | | predicted protein | | | | |
| | | | | [Hordeum vulgare subsp. vulgare] | | | | |
| | | BAF31132 | 114213457 | catalytic subunit of protein | 0.8375 | Vicia faba | 3246 | 4604 |
| | | | | phosphatase 1 [Vicia faba] | | | | |
| | | NP_001049669 | 115452136 | Os03g0268000 [Oryza sativa Japonica Group] | 0.80625 | Oryza sativa Japonica Group | 3247 | 4605 |
| | | | | &gt:gi\|108935873\|sp\|P48489.2\|PP1_ORYSJ | | | | |
| | | | | RecName: Full = Serine/threonine-protein phosphatase | | | | |
| | | | | PP1 &gt:gi\|108707369\|gb\|ABF95164.1\| | | | | |
| | | | | Serine/threonine protein phosphatase PP1, putative, | | | | |
| | | | | expressed [Oryza sativa Japonica Group] | | | | |
| | | | | &gt:gi\|108707370\|gb\|ABF95165.1\| | | | | |
| | | | | Serine/threonine protein phosphatase PP1, putative, | | | | |
| | | | | expressed [Oryza sativa Japonica Group] | | | | |
| | | | | &gt:gi\|108707371\|gb\|ABF95166.1\| | | | | |
| | | | | Serine/threonine protein phosphatase PP1, putative, | | | | |
| | | | | expressed [Oryza sativa Japonica Group] | | | | |
| | | | | &gt:gi\|113548140\|dbj\|BAF11583.1\| | | | | |
| | | | | Os03g0268000 [Oryza sativa Japonica Group] | | | | |
| | | | | &gt:gi\|215706450\|dbj\|BAG93306.1\| | | | | |
| | | | | unnamed protein | | | | |
| | | | | product [Oryza sativa Japonica Group] | | | | |
| Predicted | 2333-2353 | NP_001106014 | 162459693 | starch synthase IIb-2 precursor | 1 | Zea mays | 3248 | 4606 |
| siRNA | | | | [Zea mays] | | | | |
| 61212 | | | | &gt:gi\|145202746\|gb\|ABP35814.1\| | | | | |
| | | | | starch synthase IIb-2 precursor | | | | |
| | | | | [Zea mays] | | | | |
| | | ACC86845 | 186695419 | starch synthase IIb precursor | 0.880682 | Sorghum bicolor | 3249 | 4607 |
| | | | | [Sorghum bicolor] | | | | |
| | | ACN31779 | 223975182 | unknown [Zea mays] | 0.87642 | Zea mays | 3250 | 4608 |
| | | NP_001104880 | 162463587 | starch synthase homolog1 [Zea mays] | 0.872159 | Zea mays | 3251 | 4609 |
| | | | | &gt:gi\|2655031\|gb\|AAD13342.1\| | | | | |
| | | | | starch synthase isoform zSTSII-2 | | | | |
| | | | | [Zea mays] | | | | |
| | | Q6Z2T8 | | RecName: Full = Soluble starch synthase 2-2, | 0.764205 | Oryza sativa Japonica Group | 3252 | |
| | | | | chloroplastic/amyloplastic; | | | | |
| | | | | AltName: Full = Soluble starch synthase II-2; | | | | |
| | | | | Flags: Precursor | | | | |
| | | | | &gt:gi\|262345641\|gb\|ACY56184.1\| | | | | |
| | | | | soluble starch synthase II-2 | | | | |
| | | | | [Oryza sativa Japonica Group] | | | | |
| | | | | &gt:gi\|262345643\|gb\|ACY56185.1\| | | | | |
| | | | | soluble starch synthase II-2 | | | | |
| | | | | [Oryza sativa Japonica Group] | | | | |
| | | | | &gt:gi\|262345645\|gb\|ACY56186.1\| | | | | |
| | | | | soluble starch synthase II-2 | | | | |
| | | | | [Oryza sativa Japonica Group] | | | | |
| | | | | &gt:gi\|262345647\|gb\|ACY56187.1\| | | | | |
| | | | | soluble starch synthase II-2 | | | | |
| | | | | [Oryza sativa Japonica Group] | | | | |
| | | | | &gt:gi\|262345649\|gb\|ACY56188.1\| | | | | |
| | | | | soluble starch synthase II-2 | | | | |
| | | | | [Oryza sativa Japonica Group] | | | | |
| | | | | &gt:gi\|262345651\|gb\|ACY56189.1\| | | | | |
| | | | | soluble starch synthase II-2 | | | | |
| | | | | [Oryza sativa Japonica Group] | | | | |
| | | EEC73999 | 54362548 | hypothetical protein OsI_08916 | 0.762784 | Oryza sativa Indica Group | 3253 | |
| | | | | [Oryza sativa Indica Group] | | | | |
| | | | | &gt:gi\|262345653\|gb\|ACY56190.1\| | | | | |
| | | | | soluble starch synthase II-2 | | | | |
| | | | | [Oryza sativa Indica Group] | | | | |
| | | | | &gt:gi\|262345655\|gb\|ACY56191.1\| | | | | |
| | | | | soluble starch synthase II-2 | | | | |
| | | | | [Oryza sativa Indica Group] | | | | |
| | | | | &gt:gi\|262345657\|gb\|ACY56192.1\| | | | | |
| | | | | soluble starch synthase II-2 | | | | |
| | | | | [Oryza sativa Indica Group] | | | | |
| | | | | &gt:gi\|262345659\|gb\|ACY56193.1\| | | | | |
| | | | | soluble starch synthase II-2 | | | | |
| | | | | [Oryza sativa Indica Group] | | | | |
| | | | | &gt:gi\|262345661\|gb\|ACY56194.1\| | | | | |
| | | | | soluble starch synthase II-2 | | | | |
| | | | | [Oryza sativa Indica Group] | | | | |
| | | | | &gt:gi\|262345665\|gb\|ACY56196.1\| | | | | |
| | | | | soluble starch synthase II-2 | | | | |
| | | | | [Oryza sativa Indica Group] | | | | |
| | | | | &gt:gi\|262345667\|gb\|ACY56197.1\| | | | | |
| | | | | soluble starch synthase II-2 | | | | |
| | | | | [Oryza sativa Indica Group] | | | | |
| | | NP_001048104 | 115448648 | Os02g0744700 [Oryza sativa Japonica Group] | 0.75 | Oryza sativa Japonica Group | 3254 | 4610 |
| | | | | &gt:gi\|113537635\|dbj\|BAF10018.1\| | | | | |
| | | | | Os02g0744700 [Oryza sativa Japonica Group] | | | | |
| | | ACY56195 | 262345662 | soluble starch synthase II-2 | 0.761364 | Oryza sativa Indica Group | 3255 | 4611 |
| | | | | [Oryza sativa Indica Group] | | | | |
| | | AAK81729 | 15028466 | soluble starch synthase II-2 | 0.761364 | Oryza sativa | 3256 | 4612 |
| | | | | [Oryza sativa] | | | | |
| | 2530-2550 | XP_002452556 | 242062533 | hypothetical protein SORBIDRAFT_04g028060 | 1 | Sorghum bicolor | 3257 | 4613 |
| | | | | [Sorghum bicolor] | | | | |
| | | | | &gt:gi\|241932387\|gb\|EES05532.1\| | | | | |
| | | | | hypothetical protein SORBIDRAFT_04g028060 | | | | |
| | | | | [Sorghum bicolor] | | | | |
| Predicted | 854-874 | BAJ91900 | 326511510 | predicted protein | 1 | Hordeum vulgare subsp. vulgare | 3258 | 4614 |
| zma | | | | [Hordeum vulgare subsp. vulgare] | | | | |
| mir | | | | | | | | |
| 48327 | | | | | | | | |
| | | BAD52695 | 14164403 | putative protein kinase PK12 | 0.854415 | Oryza sativa Japonica Group | 3259 | 4615 |
| | | | | [Oryza sativa Japonica Group] | | | | |
| | | | | &gt:gi\|215694659\|dbj\|BAG89850.1\| | | | | |
| | | | | unnamed protein product | | | | |
| | | | | [Oryza sativa Japonica Group] | | | | |
| | | | | &gt:gi\|222618771\|gb\|EEE54903.1\| | | | | |
| | | | | hypothetical protein OsJ_02427 | | | | |
| | | | | [Oryza sativa Japonica Group] | | | | |
| | | ACG35326 | 195626991 | serine/threonine-protein kinase | 0.844869 | Zea mays | 3260 | 4616 |
| | | | | AFC3 [Zea mays] | | | | |
| | | ACR34364 | 238006657 | unknown [Zea mays] | 0.844869 | Zea mays | 3261 | 4617 |
| | | ACN28994 | 223949820 | unknown [Zea mays] | 0.837709 | Zea mays | 3262 | 4618 |
| | | NP_001043452 | 115438077 | Os01g0590900 [Oryza sativa Japonica Group] | 0.837709 | Oryza sativa Japonica Group | 3263 | 4619 |
| | | | | &gt:gi\|113532983\|dbj\|BAF05366.1\| | | | | |
| | | | | Os01g0590900 [Oryza sativa Japonica Group] | | | | |
| | | BAJ98839 | 326501215 | predicted protein | 0.768496 | Hordeum vulgare subsp. vulgare | 3264 | 4620 |
| | | | | [Hordeum vulgare subsp. vulgare] | | | | |
| | | XP_002455867 | 242053442 | hypothetical protein SORBIDRAFT_03g026540 | 0.708831 | Sorghum bicolor | 3265 | 4621 |
| | | | | [Sorghum bicolor] | | | | |
| | | | | &gt:gi\|241927842\|gb\|EES00987.1\| | | | | |
| | | | | hypothetical protein SORBIDRAFT_03g026540 | | | | |
| | | | | [Sorghum bicolor] | | | | |
| | | XP_002308625 | 224089073 | predicted protein [Populus trichocarpa] | 0.71599 | Populus trichocarpa | 3266 | 4622 |
| | | | | &gt:gi\|222854601\|gb\|EEE92148.1\| | | | | |
| | | | | predicted protein [Populus trichocarpa] | | | | |
| | 368-388 | XP_002456429 | 242054566 | hypothetical protein SORBIDRAFT_03g036130 | 1 | Sorghum bicolor | 3267 | 4623 |
| | | | | [Sorghum bicolor] | | | | |
| | | | | &gt:gi\|241928404\|gb\|EES01549.1\| | | | | |
| | | | | hypothetical protein SORBIDRAFT_03g036130 | | | | |
| | | | | [Sorghum bicolor] | | | | |
| | | NP_001146289 | 226499967 | hypothetical protein LOC100279864 [Zea mays] | 0.812362 | Zea mays | 3268 | 4624 |
| | | | | &gt:gi\|219886519\|gb\|ACL53634.1\| | | | | |
| | | | | unknown [Zea mays] | | | | |
| | 946-966 | EEC70991 | 54362548 | hypothetical protein OsI_02649 | 1 | Oryza sativa Indica Group | 3269 | |
| | | | | [Oryza sativa Indica Group] | | | | |
| Predicted | 179-200 | BAK06079 | 326499176 | predicted protein | 1 | Hordeum vulgare subsp. vulgare | 3270 | 4625 |
| zma | | | | [Hordeum vulgare subsp. vulgare] | | | | |
| mir | | | | | | | | |
| 48479 | | | | | | | | |
| | | NP_001140935 | 226492610 | hypothetical protein LOC100273013 [Zea mays] | 0.860399 | Zea mays | 3271 | 4626 |
| | | | | &gt:gi\|194701826\|gb\|ACF84997.1\| | | | | |
| | | | | unknown [Zea mays] | | | | |
| | | | | &gt:gi\|194703532\|gb\|ACF85850.1\| | | | | |
| | | | | unknown [Zea mays] | | | | |
| | | NP_001051729 | 115456256 | Os03g0821800 [Oryza sativa Japonica Group] | 0.874644 | Oryza sativa Japonica Group | 3272 | 4627 |
| | | | | &gt:gi\|108711803\|gb\|ABF99598.1\| | | | | |
| | | | | glycosyl transferase, group 2 family protein, expressed | | | | |
| | | | | [Oryza sativa Japonica Group] | | | | |
| | | | | &gt:gi\|113550200\|dbj\|BAF13643.1\| | | | | |
| | | | | Os03g0821800 [Oryza sativa Japonica Group] | | | | |
| | | | | &gt:gi\|215717119\|dbj\|BAG95482.1\| unnamed | | | | |
| | | | | protein product [Oryza sativa Japonica Group] | | | | |
| | | | | &gt:gi\|222626064\|gb\|EEE60196.1\| | | | | |
| | | | | hypothetical protein OsJ_13154 | | | | |
| | | | | [Oryza sativa Japonica Group] | | | | |
| | | AAO18453 | 24899477 | putative dolichyl-phosphate beta-glucosyltransferase | 0.794872 | Oryza sativa Japonica Group | 3273 | 4628 |
| | | | | [Oryza sativa Japonica Group] | | | | |
| | 467-488 | ACN31661 | 223974946 | unknown [Zea mays] | 1 | Zea mays | 3274 | 4629 |
| | | NP_001142978 | 226498261 | hypothetical protein LOC100275432 [Zea mays] | 0.972387 | Zea mays | 3275 | 4630 |
| | | | | &gt:gi\|195612426\|gb\|ACG28043.1\| | | | | |
| | | | | hypothetical protein [Zea mays] | | | | |
| | | XP_002458459 | 242058626 | hypothetical protein SORBIDRAFT_03g034030 | 0.767258 | Sorghum bicolor | 3276 | 4631 |
| | | | | [Sorghum bicolor] | | | | |
| | | | | &gt:gi\|241930434\|gb\|EES03579.1\| | | | | |
| | | | | hypothetical protein SORBIDRAFT_03g034030 | | | | |
| | | | | [Sorghum bicolor] | | | | |
| | 114-135 | ACG40719 | 195642501 | alpha-taxilin [Zea mays] | 1 | Zea mays | 3277 | 4632 |
| | | NP_001132592 | 212722627 | hypothetical protein LOC100194064 [Zea mays] | 0.99763 | Zea mays | 3278 | 4633 |
| | | | | &gt:gi\|194694846\|gb\|ACF81507.1\| | | | | |
| | | | | unknown [Zea mays] | | | | |
| | | XP_002468045 | 242041300 | hypothetical protein SORBIDRAFT_01g038590 | 0.890995 | Sorghum bicolor | 3279 | 4634 |
| | | | | [Sorghum bicolor] | | | | |
| | | | | &gt:gi\|241921899\|gb\|EER95043.1\| | | | | |
| | | | | hypothetical protein SORBIDRAFT_01g038590 | | | | |
| | | | | [Sorghum bicolor] | | | | |
| | | NP_001141235 | 226500461 | hypothetical protein LOC100273322 | 0.869668 | Zea mays | 3280 | 4635 |
| | | | | [Zea mays] | | | | |
| | | | | &gt:gi\|194703420\|gb\|ACF85794.1\| | | | | |
| | | | | unknown [Zea mays] | | | | |
| | | ACN28388 | 223948608 | unknown [Zea mays] | 0.872038 | Zea mays | 3281 | 4636 |
| | | ACL54606 | 219888462 | unknown [Zea mays] | 0.869668 | Zea mays | 3282 | 4637 |
| | | ACG42375 | 195645813 | alpha-taxilin [Zea mays] | 0.834123 | Zea mays | 3283 | 4638 |
| | 192-213 | EEC76428 | 54362548 | hypothetical protein OsI_14108 | 1 | Oryza sativa Indica Group | 3284 | |
| | | | | [Oryza sativa Indica Group] | | | | |
| Predicted | 254-275 | XP_002458718 | 242059144 | hypothetical protein SORBIDRAFT_03g038910 | 1 | Sorghum bicolor | 3285 | 4639 |
| zma | | | | [Sorghum bicolor] | | | | |
| mir | | | | &gt:gi\|241930693\|gb\|EES03838.1\| | | | | |
| 48482 | | | | hypothetical protein SORBIDRAFT_03g038910 | | | | |
| | | | | [Sorghum bicolor] | | | | |
| | | NP_001148462 | 226497951 | LOC100282077 [Zea mays] | 0.936306 | Zea mays | 3286 | 4640 |
| | | | | &gt:gi\|195619496\|gb\|ACG31578.1\| | | | | |
| | | | | CTD small phosphatase-like protein | | | | |
| | | | | [Zea mays] | | | | |
| | | NP_001136647 | 219363036 | hypothetical protein LOC100216776 | 0.933121 | Zea mays | 3287 | 4641 |
| | | | | [Zea mays] | | | | |
| | | | | &gt:gi\|194696496\|gb\|ACF82332.1\| | | | | |
| | | | | unknown [Zea mays] | | | | |
| | | ACG32959 | 195622257 | CTD small phosphatase-like protein | 0.933121 | Zea mays | 3288 | 4642 |
| | | | | [Zea mays] | | | | |
| | | EEC71746 | 54362548 | hypothetical protein OsI_04315 | 0.898089 | Oryza sativa Indica Group | 3289 | |
| | | | | [Oryza sativa Indica Group] | | | | |
| | | NP_001044710 | 115440860 | Os01g0833100 [Oryza sativa Japonica Group] | 0.894904 | Oryza sativa Japonica Group | 3290 | 4643 |
| | | | | &gt:gi\|56202314\|dbj\|BAD73773.1\| | | | | |
| | | | | NLI interacting factor (NIF) family protein-like | | | | |
| | | | | [Oryza sativa Japonica Group] | | | | |
| | | | | &gt:gi\|113534241\|dbj\|BAF06624.1\| | | | | |
| | | | | Os01g0833100 [Oryza sativa Japonica Group] | | | | |
| | | | | &gt:gi\|215697182\|dbj\|BAG91176.1\| | | | | |
| | | | | unnamed protein product | | | | |
| | | | | [Oryza sativa Japonica Group] | | | | |
| | | | | &gt:gi\|222619498\|gb\|EEE55630.1\| | | | | |
| | | | | hypothetical protein OsJ_03971 | | | | |
| | | | | [Oryza sativa Japonica Group] | | | | |
| | | BAJ91589 | 326509344 | predicted protein | 0.89172 | Hordeum vulgare subsp. vulgare | 3291 | 4644 |
| | | | | [Hordeum vulgare subsp. vulgare] | | | | |
| | | XP_002439933 | 242088200 | hypothetical protein SORBIDRAFT_09g022940 | 0.719745 | Sorghum bicolor | 3292 | 4645 |
| | | | | [Sorghum bicolor] | | | | |
| | | | | &gt:gi\|241945218\|gb\|EES18363.1\| | | | | |
| | | | | hypothetical protein SORBIDRAFT_09g022940 | | | | |
| | | | | [Sorghum bicolor] | | | | |
| | | EAY98360 | 54362548 | hypothetical protein OsI_20271 | 0.748408 | Oryza sativa Indica Group | 3293 | |
| | | | | [Oryza sativa Indica Group] | | | | |
| | | BAK00193 | 326519639 | predicted protein | 0.726115 | Hordeum vulgare subsp. vulgare | 3294 | 4646 |
| | | | | [Hordeum vulgare subsp. vulgare] | | | | |
| | | | | &gt:gi\|326529107\|dbj\|BAK00947.1\| | | | | |
| | | | | predicted protein | | | | |
| | | | | [Hordeum vulgare subsp. vulgare] | | | | |
| | 132-153 | XP_002463784 | 242032778 | hypothetical protein SORBIDRAFT_01g006100 | 1 | Sorghum bicolor | 3295 | 4647 |
| | | | | [Sorghum bicolor] | | | | |
| | | | | &gt:gi\|241917638\|gb\|EER90782.1\| | | | | |
| | | | | hypothetical protein SORBIDRAFT_01g006100 | | | | |
| | | | | [Sorghum bicolor] | | | | |
| | | ACG39703 | 195640469 | ferredoxin--NADP reductase, root isozyme | 0.936842 | Zea mays | 3296 | 4648 |
| | | | | [Zea mays] | | | | |
| | | NP_001051476 | 115455750 | Os03g0784700 [Oryza sativa Japonica Group] | 0.894737 | Oryza sativa Japonica Group | 3297 | 4649 |
| | | | | &gt:gi\|729480\|sp\|P41345.1\|FENR2_ORYSJ | | | | |
| | | | | RecName: Full = Ferredoxin--NADP reductase, root isozyme, | | | | |
| | | | | chloroplastic; Short = FNR; Flags: Precursor | | | | |
| | | | | &gt:gi\|14718314\|gb\|AAK72892.1\|AC091123_11 | | | | |
| | | | | ferredoxin-NADP+ reductase | | | | |
| | | | | [Oryza sativa Japonica Group] | | | | |
| | | | | &gt:gi\|435647\|dbj\|BAA04232.1\| | | | | |
| | | | | ferredoxin-NADP+ reductase | | | | |
| | | | | [Oryza sativa Japonica Group] | | | | |
| | | | | &gt:gi\|902936\|dbj\|BAA07479.1\| | | | | |
| | | | | root ferredoxin-NADP+ reductase | | | | |
| | | | | [Oryza sativa Japonica Group] | | | | |
| | | | | &gt:gi\|108711425\|gb\|ABF99220.1 | | | | |
| | | | | Ferredoxin-NADP reductase, root isozyme, | | | | |
| | | | | chloroplast precursor, putative, expressed | | | | |
| | | | | [Oryza sativa Japonica Group] | | | | |
| | | | | &gt:gi\|113549947\|dbj\|BAF13390.1\| | | | | |
| | | | | Os03g0784700 [Oryza sativa Japonica Group] | | | | |
| | | | | &gt:gi\|125545944\|gb\|EAY92083.1\| | | | | |
| | | | | hypothetical protein OsI_13788 | | | | |
| | | | | [Oryza sativa Indica Group] | | | | |
| | | | | &gt:gi\|125588154\|gb\|EAZ28818.1\| | | | | |
| | | | | hypothetical protein OsJ_12850 | | | | |
| | | | | [Oryza sativa Japonica Group] | | | | |
| | | | | &gt:gi\|215678914\|dbj\|BAG96344.1\| | | | | |
| | | | | unnamed protein product | | | | |
| | | | | [Oryza sativa Japonica Group] | | | | |
| | | | | &gt:gi\|1096932lprf\|\|2113196A ferredoxin-NADP | | | | |
| | | | | oxidoreductase | | | | |
| | | BAJ93902 | 326488466 | predicted protein | 0.878947 | Hordeum vulgare subsp. vulgare | 3298 | 4650 |
| | | | | [Hordeum vulgare subsp. vulgare] | | | | |
| | | NP_001058890 | 115470582 | Os07g0147900 [Oryza sativa Japonica Group] | 0.823684 | Oryza sativa Japonica Group | 3299 | 4651 |
| | | | | &gt:gi\|3913653\|sp\|O23877.1\|FENR3_ORYSJ | | | | |
| | | | | RecName: Full = Ferredoxin--NADP reductase, embryo | | | | |
| | | | | isozyme, chloroplastic; Short = FNR; Flags: Precursor | | | | |
| | | | | &gt:gi\|1778686\|dbj\|BAA13417.1\| precursor | | | | |
| | | | | ferredoxin-NADP+ oxidoreductase [Oryza sativa | | | | |
| | | | | (Japonica cultivar-group)] | | | | |
| | | | | &gt:gi\|34393644\|dbj\|BAC83340.1\| Ferredoxin-NADP | | | | |
| | | | | reductase, embryo isozyme, chloroplasl precursor | | | | |
| | | | | (FNR) [Oryza sativa Japonica Group] | | | | |
| | | | | &gt:gi\|11361 0426\|dbj\|BAF20804.1\| Os07g0147900 | | | | |
| | | | | [Oryza sativa Japonica Group] | | | | |
| | | | | &gt:gi\|125599119\|gb\|EAZ38695.1\| hypothetical | | | | |
| | | | | protein OsJ_23093 [Oryza sativa Japonica Group] | | | | |
| | | NP_001132762 | 212722161 | hypothetical protein LOC100194249 [Zea mays] | 0.823684 | Zea mays | 3300 | 4652 |
| | | | | &gt:gi\|194695328\|gb\|ACF81748.1\| | | | | |
| | | | | unknown [Zea mays] | | | | |
| | | ACG35047 | 195626433 | ferredoxin-NADP reductase, embryo isozyme [Zea mays] | 0.821053 | Zea mays | 3301 | 4653 |
| | | EAZ02773 | 54362548 | hypothetical protein OsI_24896 | 0.821053 | Oryza sativa Indica Group | 3302 | |
| | | | | [Oryza sativa Indica Group] | | | | |
| | | XP_002461452 | 242047411 | hypothetical protein SORBIDRAFT_02g002900 | 0.815789 | Sorghum bicolor | 3303 | 4654 |
| | | | | [Sorghum bicolor] | | | | |
| | | | | &gt:gi\|241924829\|gb\|EER97973.1\| | | | | |
| | | | | hypothetical protein SORBIDRAFT_02g002900 | | | | |
| | | | | [Sorghum bicolor] | | | | |
| | 172-193 | ACF87736 | 194707303 | unknown [Zea mays] | 1 | Zea mays | 3304 | 4655 |
| | | | | &gt:gi\|223949881\|gb\|ACN29024.1\| | | | | |
| | | | | unknown [Zea mays] | | | | |
| | | | | &gt:gi\|238009776\|gb\|ACR35923.1\| | | | | |
| | | | | unknown [Zea mays] | | | | |
| | | | | &gt:gi\|238011352\|gb\|ACR36711.1\| | | | | |
| | | | | unknown [Zea mays] | | | | |
| | | AAB40034 | 500750 | ferredoxin-NADP reductase precursor | 0.847769 | Zea mays | 3305 | 4656 |
| | | | | [Zea mays] | | | | |
| | | 1JB9_A | | Chain A, Crystal Structure Of The Ferredoxin: nadp+ | 0.829396 | Zea mays | 3306 | |
| | | | | Reductase From Maize Root At 1.7 Angstroms | | | | |
| | 302-323 | XP_002465048 | 242035306 | hypothetical protein SORBIDRAFT_01g031270 | 1 | Sorghum bicolor | 3307 | 4657 |
| | | | | [Sorghum bicolor] | | | | |
| | | | | &gt:gi\|241918902\|gb\|EER92046.1\| | | | | |
| | | | | hypothetical protein SORBIDRAFT_01g031270 | | | | |
| | | | | [Sorghum bicolor] | | | | |
| | | NP_001151845 | 226530638 | actin-depolymerizing factor [Zea mays] | 0.954248 | Zea mays | 3308 | 4658 |
| | | | | &gt:gi\|195650207\|gb\|ACG44571.1\| | | | | |
| | | | | actin-depolymerizing factor [Zea mays] | | | | |
| | | AAG13444 | 10122030 | putative actin depolymerizing factor | 0.954248 | Oryza sativa Japonica Group | 3309 | 4659 |
| | | | | [Oryza sativa Japonica Group] | | | | |
| | | | | &gt:gi\|22122913\|gb\|AAM92296.1\| | | | | |
| | | | | putative actin depolymerizing factor | | | | |
| | | | | [Oryza sativa Japonica Group] | | | | |
| | | | | &gt:gi\|125532673\|gb\|EAY79238.1\| | | | | |
| | | | | hypothetical protein OsI_34355 | | | | |
| | | | | [Oryza sativa Indica Group] | | | | |
| | | NP_001065088 | 115482989 | Os10g0521100 [Oryza sativa Japonica Group] | 0.895425 | Oryza sativa Japonica Group | 3310 | 4660 |
| | | | | &gt:gi\|122212110\|sp\|Q337A5.1\|ADF10_ORYSJ | | | | |
| | | | | RecName: Full = Actin-depolymerizing factor 10; | | | | |
| | | | | Short = ADF-10; Short = OsADF10 | | | | |
| | | | | &gt:gi\|78708922\|gb\|ABB47897.1\| | | | | |
| | | | | Actin-depolymerizing factor, putative, expressed | | | | |
| | | | | [Oryza sativa Japonica Group] | | | | |
| | | | | &gt:gi\|113639697\|dbj\|BAF27002.1\| | | | | |
| | | | | Os10g0521100 [Oryza sativa Japonica Group] | | | | |
| | | | | &gt:gi\|215693794\|dbj\|BAG88993.1\| | | | | |
| | | | | unnamed protein product | | | | |
| | | | | [Oryza sativa Japonica Group] | | | | |
| | | | | &gt:gi\|215768406\|dbj\|BAH00635.1\| | | | | |
| | | | | unnamed protein product | | | | |
| | | | | [Oryza sativa Japonica Group] | | | | |
| | | | | &gt:gi\|222613 147\|gb\|EEE51279.1\| | | | | |
| | | | | hypothetical protein OsJ_32187 | | | | |
| | | | | [Oryza sativa Japonica Group] | | | | |
| | | Q0D744 | | RecName: Full = Putative actin-depolymerizing factor 8; | 0.843137 | Oryza sativa Japonica Group | 3311 | |
| | | | | Short = ADF-8; Short = OsADF8 | | | | |
| | | | | &gt:gi\|34394310\|dbj\|BAC84792.1\| | | | | |
| | | | | putative actin depolymerizing factor | | | | |
| | | | | [Oryza sativa Japonica Group] | | | | |
| | | EEE58130 | 54398660 | hypothetical protein OsJ_09029 | 0.816993 | Oryza sativa Japonica Group | 3312 | |
| | | | | [Oryza sativa Japonica Group] | | | | |
| Predicted | 893-913 | XP_002465226 | 242035662 | hypothetical protein SORBIDRAFT_01g034550 | 1 | Sorghum bicolor | 3313 | 4661 |
| zma | | | | [Sorghum bicolor] | | | | |
| mir | | | | &gt:gi\|241919080\|gb\|EER92224.1\| | | | | |
| 49248 | | | | hypothetical protein SORBIDRAFT_01g034550 | | | | |
| | | | | [Sorghum bicolor] | | | | |
| | | ABF96114 | 108705663 | proline-rich family protein, putative, | 0.8583 | Oryza sativa Japonica Group | 3314 | 4662 |
| | | | | expressed [Oryza sativa Japonica Group] | | | | |
| | | | | &gt:gi\|108708320\|gb\|ABF96115.1\| | | | | |
| | | | | proline-rich family protein, putative, expressed | | | | |
| | | | | [Oryza sativa Japonica Group] | | | | |
| | | | | &gt:gi\|218192888\|gb\|EEC75315.1\| | | | | |
| | | | | hypothetical protein OsI_11686 | | | | |
| | | | | [Oryza sativa Indica Group] | | | | |
| | | | | &gt:gi\|222624967\|gb\|EEE59099.1\| | | | | |
| | | | | hypothetical protein OsJ_10953 | | | | |
| | | | | [Oryza sativa Japonica Group] | | | | |
| | | NP_001060438 | 115473678 | Os07g0642800 [Oryza sativa Japonica Group] | 0.722672 | Oryza sativa Japonica Group | 3315 | 4663 |
| | | | | &gt:gi\|33146645\|dbj\|BAC79975.1\| unknown protein | | | | |
| | | | | [Oryza sativa Japonica Group] | | | | |
| | | | | &gt:gi\|50509935\|dbj\|BAD30256.1\| unknown protein | | | | |
| | | | | [Oryza sativa Japonica Group] | | | | |
| | | | | &gt:gi\|113611 974\|dbj\|BAF22352.1\| Os07g0642800 | | | | |
| | | | | [Oryza sativa Japonica Group] | | | | |
| | | | | &gt:gi\|125601263\|gb\|EAZ40839.1\| hypothetical | | | | |
| | | | | protein OsJ_25318 [Oryza sativa Japonica Group] | | | | |
| | | | | &gt:gi\|215707132\|dbj\|BAG93592.1\| unnamed protein | | | | |
| | | | | product [Oryza sativa Japonica Group] | | | | |
| | | NP_001136832 | 219362356 | hypothetical protein LOC100216981 | 0.714575 | Zea mays | 3316 | 4664 |
| | | | | [Zea mays] | | | | |
| | | | | &gt:gi\|194697292\|gb\|ACF82730.1\| | | | | |
| | | | | unknown [Zea mays] | | | | |
| | | | | &gt:gi\|223944185\|gb\|ACN26176.1\| | | | | |
| | | | | unknown [Zea mays] | | | | |
| | | EAZ04885 | 54362548 | hypothetical protein OsI_27067 | 0.720648 | Oryza sativa Indica Group | 3317 | |
| | | | | [Oryza sativa Indica Group] | | | | |
| | | XP_002461113 | 242046733 | hypothetical protein SORBIDRAFT_02g040980 | 0.720648 | Sorghum bicolor | 3318 | 4665 |
| | | | | [Sorghum bicolor] | | | | |
| | | | | &gt:gi\|241924490\|gb\|EER97634.1\| | | | | |
| | | | | hypothetical protein SORBIDRAFT_02g040980 | | | | |
| | | | | [Sorghum bicolor] | | | | |
| | | BAK07098 | 326515703 | predicted protein | 0.718623 | Hordeum vulgare subsp. vulgare | 3319 | 4666 |
| | | | | [Hordeum vulgare subsp. vulgare] | | | | |
| | 320-340 | YP_003208225 | 260677373 | ribosomal protein S3 [Coix lacryma-jobi] | 1 | Coix lacryma-jobi | 3320 | 4667 |
| | | | | &gt:gi\|209361395\|gb\|ACI43310.1\| ribosomal protein | | | | |
| | | | | S3 [Coix lacryma-jobi] | | | | |
| | | YP_004733282 | 339906432 | ribosomal protein S3 [Indocalamus longiauritus] | 0.959821 | Indocalamus longiauritus | 3321 | 4668 |
| | | | | &gt:gi\|340034064\|ref\|YP_004733616.1\| ribosomal | | | | |
| | | | | protein S3 [Phyllostachys edulis] | | | | |
| | | | | &gt:gi\|340034235\|ref\|YP_004733798.1\| ribosomal | | | | |
| | | | | protein S3 [Acidosasa purpurea] | | | | |
| | | | | &gt:gi\|340034403\|ref\|YP_004734016.1\| ribosomal protein | | | | |
| | | | | S3 [Phyllostachys nigra var. henonis] | | | | |
| | | | | &gt:gi\|340034574\|ref\|YP_004734223.1\| ribosomal | | | | |
| | | | | protein S3 [Ferrocalamus rimosivaginus] | | | | |
| | | | | &gt:gi\|307133924\|gb\|ADN32929.1\| ribosomal protein | | | | |
| | | | | S3 [Phyllostachys nigra var. henonis] | | | | |
| | | | | &gt:gi\|309321655\|gb\|ADO65180.1\| ribosomal protein | | | | |
| | | | | S3 [Acidosasa purpurea] | | | | |
| | | | | &gt:gi\|309321739\|gb\|ADO65263.1\| ribosomal protein | | | | |
| | | | | S3 [Ferrocalamus rimosivaginus] | | | | |
| | | | | &gt:gi\|309321823\|gb\|ADO65346.1\| ribosomal protein | | | | |
| | | | | S3 [Indocalamus longiauritus] | | | | |
| | | | | &gt:gi\|309321906\|gb\|ADO65428.1\| ribosomal protein | | | | |
| | | | | S3 [Phyllostachys edulis] | | | | |
| | | AEI70820 | 337730951 | ribosomal protein S3 [Puelia olyriformis] | 0.955357 | Puelia olyriformis | 3322 | 4669 |
| | | YP_004734139 | 340034430 | ribosomal protein S3 [Bambusa emeiensis] | 0.946429 | Bambusa emeiensis | 3323 | 4670 |
| | | | | &gt:gi\|309321991\|gb\|ADO65512.1\| | | | | |
| | | | | ribosomal protein S3 | | | | |
| | | | | [Bambusa emeiensis] | | | | |
| Predicted | 482-503 | NP_001140256 | 226500157 | hypothetical protein LOC100272298 [Zea mays] | 1 | Zea mays | 3324 | 4671 |
| zma | | | | &gt:gi\|223947639\|gb\|ACN27903.1\| | | | | |
| mir | | | | unknown [Zea mays] | | | | |
| 49259 | | | | | | | | |
| | 374-395 | BAJ84854 | 326490380 | predicted protein | 1 | Hordeum vulgare subsp. vulgare | 3325 | 4672 |
| | | | | [Hordeum vulgare subsp. vulgare] | | | | |
| | | XP_002446506 | 242073139 | hypothetical protein SORBIDRAFT_06g017 100 | 0.901328 | Sorghum bicolor | 3326 | 4673 |
| | | | | [Sorghum bicolor] | | | | |
| | | | | &gt:gi\|241937689\|gb\|EES10834.1\| | | | | |
| | | | | hypothetical protein SORBIDRAFT_06g017100 | | | | |
| | | | | [Sorghum bicolor] | | | | |
| | | NP_001148156 | 226498467 | amino acid permease [Zea mays] | 0.893738 | Zea mays | 3327 | 4674 |
| | | | | &gt:gi\|195616234\|gb\|ACG29947.1\| | | | | |
| | | | | amino acid permease [Zea mays] | | | | |
| | | NP_001052846 | 115458491 | Os04g0435100 [Oryza sativa Japonica Group] | 0.86907 | Oryza sativa Japonica Group | 3328 | 4675 |
| | | | | &gt:gi\|21741208\|emb\|CAD41019.1\| | | | | |
| | | | | OSJNBb0086G13.12 [Oryza sativa Japonica Group] | | | | |
| | | | | &gt:gi\|113564417\|dbj\|BAF14760.1\| | | | | |
| | | | | Os04g0435100 [Oryza sativa Japonica Group] | | | | |
| | | | | &gt:gi\|116310284\|emb\|CAH67303.1\| | | | | |
| | | | | OSIGBa0102D10.6 [Oryza sativa Indica Group] | | | | |
| | | | | &gt:gi\|125548375\|gb\|EAY94197.1\| | | | | |
| | | | | hypothetical protein OsI_15971 [Oryza sativa Indica Group] | | | | |
| | | | | &gt:gi\|125590463\|gb\|EAZ30813.1\| | | | | |
| | | | | hypothetical protein OsJ_14882 | | | | |
| | | | | [Oryza sativa Japonica Group] | | | | |
| | | | | &gt:gi\|215687171\|dbj\|BAG90941.1\| | | | | |
| | | | | unnamed protein product | | | | |
| | | | | [Oryza sativa Japonica Group] | | | | |
| | | XP_002309938 | 224093574 | amino acid transporter | 0.827324 | Populus trichocarpa | 3329 | 4676 |
| | | | | [Populus trichocarpa] | | | | |
| | | | | &gt:gi\|222852841\|gb\|EEE90388.1\| | | | | |
| | | | | amino acid transporter | | | | |
| | | | | [Populus trichocarpa] | | | | |
| | | CBI21593 | 270232045 | unnamed protein product [Vitis vinifera] | 0.823529 | Vitis vinifera | 3330 | 4677 |
| | | XP_002274762 | 225438399 | PREDICTED: hypothetical protein | 0.821632 | Vitis vinifera | 3331 | 4678 |
| | | | | [Vitis vinifera] | | | | |
| | | CAN60789 | 147773951 | hypothetical protein VITISV_000645 | 0.819734 | Vitis vinifera | 3332 | 4679 |
| | | | | [Vitis vinifera] | | | | |
| | | XP_002520314 | 255558577 | GABA-specific permease, putative | 0.741935 | Ricinus communis | 3333 | 4680 |
| | | | | [Ricinus communis] | | | | |
| | | | | &gt:gi\|223540533\|gb\|EEF42100.1\| | | | | |
| | | | | GABA-specific permease, putative | | | | |
| | | | | [Ricinus communis] | | | | |
| | | XP_002284603 | 225459654 | PREDICTED: hypothetical protein | 0.753321 | Vitis vinifera | 3334 | 4681 |
| | | | | [Vitis vinifera] | | | | |
| | 28-49 | XP_002456818 | 242055344 | hypothetical protein SORBIDRAFT_03g043360 | 1 | Sorghum bicolor | 3335 | 4682 |
| | | | | [Sorghum bicolor] | | | | |
| | | | | &gt:gi\|241928793\|gb\|EES01938.1\| | | | | |
| | | | | hypothetical protein SORBIDRAFT_03g043360 | | | | |
| | | | | [Sorghum bicolor] | | | | |
| | | NP_001144608 | 226505097 | hypothetical protein LOC100277624 [Zea mays] | 0.899244 | Zea mays | 3336 | 4683 |
| | | | | &gt:gi\|195644550\|gb\|ACG41743.1\| | | | | |
| | | | | hypothetical protein [Zea mays] | | | | |
| | | | | &gt:gi\|224033445\|gb\|ACN35798.1\| | | | | |
| | | | | unknown [Zea mays] | | | | |
| | | NP_001062225 | 115477257 | Os08g0513300 [Oryza sativa Japonica Group] | 0.743073 | Oryza sativa Japonica Group | 3337 | 4684 |
| | | | | &gt:gi\|42408809\|dbj\|BAD10070.1\| | | | | |
| | | | | unknown protein [Oryza sativa Japonica Group] | | | | |
| | | | | &gt:gi\|113624194\|dbj\|BAF24139.1\| | | | | |
| | | | | Os08g0513300 [Oryza sativa Japonica Group] | | | | |
| | | | | &gt:gi\|125562163\|gb\|EAZ07611.1\| hypothetical | | | | |
| | | | | protein OsI_29862 [Oryza sativa Indica Group] | | | | |
| | | | | &gt:gi\|125603995\|gb\|EAZ43320.1\| hypothetical | | | | |
| | | | | protein OsJ_27916 | | | | |
| | | | | [Oryza sativa Japonica Group] | | | | |
| | | | | &gt:gi\|215697131\|dbj\|BAG91125.1\| | | | | |
| | | | | unnamed protein product | | | | |
| | | | | [Oryza sativa Japonica Group] | | | | |
| | | BAJ93470 | 326528576 | predicted protein | 0.70529 | Hordeum vulgare subsp. vulgare | 3338 | 4685 |
| | | | | [Hordeum vulgare subsp. vulgare] | | | | |
| | 950-971 | XP_002461022 | 242046301 | hypothetical protein SORBIDRAFT_02g039350 | 1 | Sorghum bicolor | 3339 | 4686 |
| | | | | [Sorghum bicolor] | | | | |
| | | | | &gt:gi\|241924399\|gb\|EER97543.1\| | | | | |
| | | | | hypothetical protein SORBIDRAFT_02g039350 | | | | |
| | | | | [Sorghum bicolor] | | | | |
| | 266-287 | NP_001147593 | 226502838 | receptor-like protein kinase [Zea mays] | 1 | Zea mays | 3340 | 4687 |
| | | | | &gt:gi\|195612392\|gb\|ACG28026.1\| | | | | |
| | | | | receptor-like protein kinase [Zea mays] | | | | |
| | | NP_001064013 | 115480839 | Os10g0101000 [Oryza sativa Japonica Group] | 0.736196 | Oryza sativa Japonica Group | 3341 | 4688 |
| | | | | &gt:gi\|18481964\|gb\|AAL73562.1\|AC079632_6 | | | | |
| | | | | Putative receptor-like protein kinase | | | | |
| | | | | [Oryza sativa Japonica Group] | | | | |
| | | | | &gt:gi\|19920204\|gb\|AAM08636.1\|AC108883_9 | | | | |
| | | | | Putative receptor-like protein kinase | | | | |
| | | | | [Oryza sativa Japonica Group] | | | | |
| | | | | &gt:gi\|31429736\|gb\|AAP51745.1\| | | | | |
| | | | | Protein kinase domain containing protein, expressed | | | | |
| | | | | [Oryza sativa Japonica Group] | | | | |
| | | | | &gt:gi\|113638622\|dbj\|BAF25927.1\| | | | | |
| | | | | Os10g0101000 [Oryza sativa Japonica Group] | | | | |
| | | | | &gt:gi\|125573756\|gb\|EAZ15040.1\| | | | | |
| | | | | hypothetical protein OsJ_30450 | | | | |
| | | | | [Oryza sativa Japonica Group] | | | | |
| | | BAJ93355 | 326528346 | predicted protein | 0.71411 | Hordeum vulgare subsp. vulgare | 3342 | 4689 |
| | | | | [Hordeum vulgare subsp. vulgare] | | | | |
| | | BAJ85838 | 326495483 | predicted protein | 0.712883 | Hordeum vulgare subsp. vulgare | 3343 | 4690 |
| | | | | [Hordeum vulgare subsp. vulgare] | | | | |
| Predicted | 732-753 | NP_001132844 | 239046576 | hypothetical protein LOC100194336 [Zea mays] | 1 | Zea mays | 3344 | 4691 |
| zma | | | | &gt:gi\|194695554\|gb\|ACF81861.1\| | | | | |
| mir | | | | unknown [Zea mays] | | | | |
| 49642 | | | | &gt:gi\|219885465\|gb\|ACL53107.1\| | | | | |
| | | | | unknown [Zea mays] | | | | |
| | | NP_001140555 | 226493194 | hypothetical protein LOC100272620 [Zea mays] | 0.85348 | Zea mays | 3345 | 4692 |
| | | | | &gt:gi\|194690356\|gb\|ACF79262.1\| | | | | |
| | | | | unknown [Zea mays] | | | | |
| | | | | &gt:gi\|194699966\|gb\|ACF84067.1\| unknown | | | | |
| | | | | [Zea mays] | | | | |
| | | | | &gt:gi\|219887213\|gb\|ACL53981.1\| | | | | |
| | | | | unknown [Zea mays] | | | | |
| | | XP_002460380 | 242045017 | hypothetical protein SORBIDRAFT_02g027300 | 0.827839 | Sorghum bicolor | 3346 | 4693 |
| | | | | [Sorghum bicolor] | | | | |
| | | | | &gt:gi\|241923757\|gb\|EER96901.1\| | | | | |
| | | | | hypothetical protein SORBIDRAFT_02g027300 | | | | |
| | | | | [Sorghum bicolor] | | | | |
| | | EEE69885 | 54398660 | hypothetical protein OsJ_29706 | 0.750916 | Oryza sativa Japonica Group | 3347 | |
| | | | | [Oryza sativa Japonica Group] | | | | |
| | | NP_001063436 | 115479684 | Os09g0470500 [Oryza sativa Japonica Group] | 0.754579 | Oryza sativa Japonica Group | 3348 | 4694 |
| | | | | &gt:gi\|75125073\|sp\|Q6K498.1\|HOX4_ORYSJ | | | | |
| | | | | RecName: Full = Homeobox-leucine zipper protein HOX4; | | | | |
| | | | | AltName: Full = HD-ZIP protein HOX4; | | | | |
| | | | | AltName: Full = Homeodomain transcription factor HOX4; | | | | |
| | | | | AltName: Full = OsHox4 | | | | |
| | | | | &gt:gi\|75315199\|sp\|Q9XH37.1\|HOX4_ORYSI | | | | |
| | | | | RecName: Full = Homeobox-leucine zipper protein HOX4; | | | | |
| | | | | AltName: Full = HD-ZIP protein HOX4; | | | | |
| | | | | AltName: Full = Homeodomain transcription factor HOX4; | | | | |
| | | | | AltName: Full = OsHox4 | | | | |
| | | | | &gt:gi\|5006853\|gb\|AAD37697.1\|AF145728_1 | | | | |
| | | | | homeodomain leucine zipper protein | | | | |
| | | | | [Oryza sativa Indica Group] | | | | |
| | | | | &gt:gi\|47848413\|dbj\|BAD22271.1\| | | | | |
| | | | | homeodomain leucine zipper protein | | | | |
| | | | | [Oryza sativa Japonica Group] | | | | |
| | | | | &gt:gi\|113631669\|dbj\|BAF25350.1\| | | | | |
| | | | | Os09g0470500 [Oryza sativa Japonica Group] | | | | |
| | | | | &gt:gi\|21 8202304\|gb\|EEC84731.1\| | | | | |
| | | | | hypothetical protein OsI_31718 | | | | |
| | | | | [Oryza sativa Indica Group] | | | | |
| | | BAJ85282 | 326493641 | predicted protein | 0.74359 | Hordeum vulgare subsp. vulgare | 3349 | 4695 |
| | | | | [Hordeum vulgare subsp. vulgare] | | | | |
| | | | | &gt:gi\|326502458\|dbj\|BAJ95292.1\| | | | | |
| | | | | predicted protein | | | | |
| | | | | [Hordeum vulgare subsp. vulgare] | | | | |
| | | | | &gt:gi\|326509779\|dbj\|BAJ87105.1\| | | | | |
| | | | | predicted protein | | | | |
| | | | | [Hordeum vulgare subsp. vulgare] | | | | |
| | 521-542 | XP_002489042 | 253761062 | hypothetical protein SORBIDRAFT_0283s002010 | 1 | Sorghum bicolor | 3350 | 4696 |
| | | | | [Sorghum bicolor] | | | | |
| | | | | &gt:gi\|241947303\|gb\|EES20448.1\| | | | | |
| | | | | hypothetical protein SORBIDRAFT_0283s002010 | | | | |
| | | | | [Sorghum bicolor] | | | | |
| | | ACG35382 | 195627103 | leucine-rich repeat receptor protein | 0.878116 | Zea mays | 3351 | 4697 |
| | | | | kinase EXS precursor [Zea mays] | | | | |
| | | ACG30302 | 195616943 | leucine-rich repeat receptor protein | 0.858726 | Zea mays | 3352 | 4698 |
| | | | | kinase EXS precursor [Zea mays] | | | | |
| | | NP_001053443 | 115459685 | Os04g0540900 [Oryza sativa Japonica Group] | 0.778393 | Oryza sativa Japonica Group | 3353 | 4699 |
| | | | | &gt:gi\|38344983\|emb\|CAE02789.2\| | | | | |
| | | | | OSJNBa0011L07.13 [Oryza sativa Japonica Group] | | | | |
| | | | | &gt:gi\|113565014\|dbj\|BAF15357.1\| | | | | |
| | | | | Os04g0540900 [Oryza sativa Japonica Group] | | | | |
| | | | | &gt:gi\|116310384\|emb\|CAH67395.1\| | | | | |
| | | | | H0115B09.7 [Oryza sativa Indica Group] | | | | |
| | | | | &gt:gi\|125549190\|gb\|EAY95012.1\| | | | | |
| | | | | hypothetical protein OsI_16820 | | | | |
| | | | | [Oryza sativa Indica Group] | | | | |
| | | | | &gt:gi\|125591143\|gb\|EAZ31493.1\| | | | | |
| | | | | hypothetical protein OsJ_15629 | | | | |
| | | | | [Oryza sativa Japonica Group] | | | | |
| | | | | &gt:gi\|215694759\|dbj\|BAG89950.1\| | | | | |
| | | | | unnamed protein product | | | | |
| | | | | [Oryza sativa Japonica Group] | | | | |
| | | BAJ85198 | 326493473 | predicted protein | 0.731302 | Hordeum vulgare subsp. vulgare | 3354 | 4700 |
| | | | | [Hordeum vulgare subsp. vulgare] | | | | |
| | | | | &gt:gi\|326516176\|dbj\|BAJ88111.1\| | | | | |
| | | | | predicted protein | | | | |
| | | | | [Hordeum vulgare subsp. vulgare] | | | | |
| | 129-150 | XP_002448827 | 242077781 | hypothetical protein SORBIDRAFT_06g033930 | 1 | Sorghum bicolor | 3355 | 4701 |
| | | | | [Sorghum bicolor] | | | | |
| | | | | &gt:gi\|241940010\|gb\|EES13155.1\| | | | | |
| | | | | hypothetical protein SORBIDRAFT_06g033930 | | | | |
| | | | | [Sorghum bicolor] | | | | |
| | | NP_001169688 | 293332518 | hypothetical protein LOC100383569 | 0.972477 | Zea mays | 3356 | 4702 |
| | | | | [Zea mays] | | | | |
| | | | | &gt:gi\|224030901\|gb\|ACN34526.1\| | | | | |
| | | | | unknown [Zea mays] | | | | |
| | | NP_001061552 | 115475911 | Os08g0326600 [Oryza sativa Japonica Group] | 0.902752 | Oryza sativa Japonica Group | 3357 | 4703 |
| | | | | &gt:gi\|24414065\|dbj\|BAC22314.1\| | | | | |
| | | | | putative GMP synthetase | | | | |
| | | | | [Oryza sativa Japonica Group] | | | | |
| | | | | &gt:gi\|113623521\|dbj\|BAF23466.1\| | | | | |
| | | | | Os08g0326600 [Oryza sativa Japonica Group] | | | | |
| | | | | &gt:gi\|215694477\|dbj\|BAG89422.1\| | | | | |
| | | | | unnamed protein product | | | | |
| | | | | [Oryza sativa Japonica Group] | | | | |
| | | BAK00536 | 326524304 | predicted protein | 0.880734 | Hordeum vulgare subsp. vulgare | 3358 | 4704 |
| | | | | [Hordeum vulgare subsp. vulgare] | | | | |
| | | XP_002274590 | 225426433 | PREDICTED: hypothetical protein [Vitis vinifera] | 0.746789 | Vitis vinifera | 3359 | 4705 |
| | | XP_002304500 | 224074940 | predicted protein [Populus trichocarpa] | 0.73945 | Populus trichocarpa | 3360 | 4706 |
| | | | | &gt:gi\|222841932\|gb\|EEE79479.1\| | | | | |
| | | | | predicted protein [Populus trichocarpa] | | | | |
| | | XP_002886394 | 297837024 | hypothetical protein ARALYDRAFT_893078 | 0.733945 | Arabidopsis lyrata subsp. lyrata | 3361 | 4707 |
| | | | | [Arabidopsis lyrata subsp. lyrata] | | | | |
| | | | | &gt:gi\|297332235\|gb\|EFH62653.1\| | | | | |
| | | | | hypothetical protein ARALYDRAFT_893078 | | | | |
| | | | | [Arabidopsis lyrata subsp. lyrata] | | | | |
| | | NP_176553 | 42562914 | GMP-synthase-C and glutamine amidotransferase | 0.733945 | Arabidopsis thaliana | 3362 | 4708 |
| | | | | domain-containing protein | | | | |
| | | | | [Arabidopsis thaliana] | | | | |
| | | | | &gt:gi\|12324937\|gb\|AAG52416.1\|AC011622_4 | | | | |
| | | | | GMP synthase; 61700-64653 | | | | |
| | | | | [Arabidopsis thaliana] | | | | |
| | | | | &gt:gi\|56381989\|gb\|AAV85713.1\| | | | | |
| | | | | At1g63660 [Arabidopsis thaliana] | | | | |
| | | | | &gt:gi\|332196006\|gb\|AEE34127.1\| | | | | |
| | | | | GMP-synthase-C and glutamine amidotransferase | | | | |
| | | | | domain-containing protein | | | | |
| | | | | [Arabidopsis thaliana] | | | | |
| | | AAO42053 | 28393248 | putative GMP synthase | 0.73211 | Arabidopsis thaliana | 3363 | 4709 |
| | | | | [Arabidopsis thaliana] | | | | |
| | 194-215 | XP_002467027 | 242039264 | hypothetical protein SORBIDRAFT_01g018490 | 1 | Sorghum bicolor | 3364 | 4710 |
| | | | | [Sorghum bicolor] | | | | |
| | | | | &gt:gi\|241920881\|gb\|EER94025.1\| | | | | |
| | | | | hypothetical protein SORBIDRAFT_01g018490 | | | | |
| | | | | [Sorghum bicolor] | | | | |
| | | NP_001149395 | 226532849 | LOC100283021 [Zea mays] | 0.857778 | Zea mays | 3365 | 4711 |
| | | | | &gt:gi\|195626940\|gb\|ACG35300.1\| | | | | |
| | | | | secretory protein [Zea mays] | | | | |
| | | ABV22582 | 157093711 | PR17c precursor | 0.808889 | Hordeum vulgare subsp. vulgare | 3366 | 4712 |
| | | | | [Hordeum vulgare subsp. vulgare] | | | | |
| | | | | &gt:gi\|157093714\|gb\|ABV22583.1\| | | | | |
| | | | | PR17c precursor | | | | |
| | | | | [Hordeum vulgare subsp. vulgare] | | | | |
| | | | | &gt:gi\|157093720\|gb\|ABV22586.1\| | | | | |
| | | | | PR17c precursor | | | | |
| | | | | [Hordeum vulgare subsp. vulgare] | | | | |
| | | CAA74594 | 2266665 | hypothetical protein [Hordeum vulgare] | 0.808889 | Hordeum vulgare | 3367 | 4713 |
| | | | | &gt:gi\|326494904\|dbj\|BAJ85547.1\| | | | | |
| | | | | predicted protein | | | | |
| | | | | [Hordeum vulgare subsp. vulgare] | | | | |
| | | | | &gt:gi\|326514206\|dbj\|BAJ92253.1\| | | | | |
| | | | | predicted protein | | | | |
| | | | | [Hordeum vulgare subsp. vulgare] | | | | |
| | | XP_002467026 | 242039262 | hypothetical protein SORBIDRAFT_01g018480 | 0.733333 | Sorghum bicolor | 3368 | 4714 |
| | | | | [Sorghum bicolor] | | | | |
| | | | | &gt:gi\|241920880\|gb\|EER94024.1\| | | | | |
| | | | | hypothetical protein SORBIDRAFT_01g018480 | | | | |
| | | | | [Sorghum bicolor] | | | | |
| | | AAD46133 | 5669007 | secretory protein [Triticum aestivum] | 0.791111 | Triticum aestivum | 3369 | 4715 |
| | | EEC67221 | 54362548 | hypothetical protein OsI_34133 | 0.702222 | Oryza sativa Indica Group | 3370 | |
| | | | | [Oryza sativa Indica Group] | | | | |
| | 1270-1291 | ACN25803 | 223943438 | unknown [Zea mays] | 1 | Zea mays | 3371 | 4716 |
| | | NP_001144623 | 226502924 | hypothetical protein LOC100277639 [Zea mays] | 0.975741 | Zea mays | 3372 | 4717 |
| | | | | &gt:gi\|195644748\|gb\|ACG41842.1\| | | | | |
| | | | | hypothetical protein [Zea mays] | | | | |
| | | XP_002456637 | 242054982 | hypothetical protein SORBIDRAFT_03g039920 | 0.830189 | Sorghum bicolor | 3373 | 4718 |
| | | | | [Sorghum bicolor] | | | | |
| | | | | &gt:gi\|241928612\|gb\|EES01757.1\| | | | | |
| | | | | hypothetical protein SORBIDRAFT_03g039920 | | | | |
| | | | | [Sorghum bicolor] | | | | |
| | | ACL53226 | 219885702 | unknown [Zea mays] | 0.762803 | Zea mays | 3374 | 4719 |
| | 1323-1344 | XP_002450912 | 242071270 | hypothetical protein SORBIDRAFT_05g021030 | 1 | Sorghum bicolor | 3375 | 4720 |
| | | | | [Sorghum bicolor] | | | | |
| | | | | &gt:gi\|241936755\|gb\|EES09900.1\| | | | | |
| | | | | hypothetical protein SORBIDRAFT_05g021030 | | | | |
| | | | | [Sorghum bicolor] | | | | |
| | | NP_001146157 | 226497549 | hypothetical protein LOC100279726 [Zea mays] | 0.936995 | Zea mays | 3376 | 4721 |
| | | | | &gt:gi\|224030419\|gb\|ACN34285.1\| | | | | |
| | | | | unknown [Zea mays] | | | | |
| | | NP_001068068 | 297611975 | Os11g0547000 [Oryza sativa Japonica Group] | 0.851373 | Oryza sativa Japonica Group | 3377 | 4722 |
| | | | | &gt:gi\|110832734\|sp\|Q2R2W1.2\|ADO3_ORYSJ | | | | |
| | | | | RecName: Full = Adagio-like protein 3 | | | | |
| | | | | &gt:gi\|108864481\|gb\|ABA94231.2\| Adagio 3, | | | | |
| | | | | putative, expressed [Oryza sativa Japonica Group] | | | | |
| | | | | &gt:gi\|255680164\|dbj\|BAF28431.2\| | | | | |
| | | | | Os11g0547000 | | | | |
| | | | | [Oryza sativa Japonica Group] | | | | |
| | | EAZ18680 | 54398660 | hypothetical protein OsJ_34201 | 0.849758 | Oryza sativa Japonica Group | 3378 | |
| | | | | [Oryza sativa Japonica Group] | | | | |
| | | BAJ95049 | 326500765 | predicted protein | 0.849758 | Hordeum vulgare subsp. vulgare | 3379 | 4723 |
| | | | | [Hordeum vulgare subsp. vulgare] | | | | |
| | | ABL11478 | 118767204 | FKF1 protein [Triticum aestivum] | 0.812601 | Triticum aestivum | 3380 | 4724 |
| | | ACL53371 | 219885992 | unknown [Zea mays] | 0.781906 | Zea mays | 3381 | 4725 |
| | | | | &gt:gi\|223942805\|gb\|ACN25486.1\| | | | | |
| | | | | unknown [Zea mays] | | | | |
| | | EAY81253 | 54362548 | hypothetical protein OsI_36431 | 0.767367 | Oryza sativa Indica Group | 3382 | |
| | | | | [Oryza sativa Indica Group] | | | | |
| | | ABG22521 | 108863896 | Adagio 3, putative, expressed | 0.767367 | Oryza sativa Japonica Group | 3383 | 4726 |
| | | | | [Oryza sativa Japonica Group] | | | | |
| | | ABD28287 | 87138100 | circadian clock-associated FKF1 | 0.710824 | Glycine max | 3384 | 4727 |
| | | | | [Glycine max] | | | | |
| | 196-217 | ACO72994 | 226701035 | DRE-binding protein 3 [Zea mays] | 1 | Zea mays | 3385 | 4728 |
| | | NP_001147172 | 226504965 | sbCBF6 [Zea mays] | 0.911765 | Zea mays | 3386 | 4729 |
| | | | | &gt:gi\|195607972\|gb\|ACG25816.1\| | | | | |
| | | | | sbCBF6 [Zea mays] | | | | |
| | | XP_002462691 | 242049893 | hypothetical protein SORBIDRAFT_02g030320 | 0.831933 | Sorghum bicolor | 3387 | 4730 |
| | | | | [Sorghum bicolor] | | | | |
| | | | | &gt:gi\|241926068\|gb\|EER99212.1\| | | | | |
| | | | | hypothetical protein SORBIDRAFT_02g030320 | | | | |
| | | | | [Sorghum bicolor] | | | | |
| | | NP_001063712 | 115480236 | Os09g0522200 [Oryza sativa Japonica Group] | 0.739496 | Oryza sativa Japonica Group | 3388 | 4731 |
| | | | | &gt:gi\|75253216\|sp\|Q64MA1.1\|DRE1A_ORYSJ | | | | |
| | | | | RecName: Full = Dehydration-responsive element- | | | | |
| | | | | binding protein 1A; Short = Protein DREB1A; | | | | |
| | | | | AltName: Full = Protein C-repeat-binding factor 3; | | | | |
| | | | | Short = rCBF3 | | | | |
| | | | | &gt:gi\|22594969\|gb\|AAN02486.1\|AF300970_1 | | | | |
| | | | | DRE-binding protein 1A | | | | |
| | | | | [Oryza sativa] | | | | |
| | | | | &gt:gi\|52075594\|dbj\|BAD46704.1\| | | | | |
| | | | | DRE-binding protein 1A | | | | |
| | | | | [Oryza sativa Japonica Group] | | | | |
| | | | | &gt:gi\|113631945\|dbj\|BAF25626.1\| | | | | |
| | | | | Os09g0522200 [Oryza sativa Japonica Group] | | | | |
| | | A2Z389 | | RecName: Full = Dehydration-responsive element- | 0.735294 | Oryza sativa | 3389 | |
| | | | | binding protein 1A; Short = Protein DREB1A; | | | | |
| | | | | AltName: Full = Protein C-repeat-binding factor 3; | | | | |
| | | | | Short = rCBF3 | | | | |
| | | | | &gt:gi\|33321848\|gb\|AAQ06658.1\| | | | | |
| | | | | apetala2 domain-containing CBF1-like protein | | | | |
| | | | | [Oryza sativa] | | | | |
| | | | | &gt:gi\|125564420\|gb\|EAZ09800.1\| | | | | |
| | | | | hypothetical protein OsI_32087 | | | | |
| | | | | [Oryza sativa Indica Group] | | | | |
| | | AAQ23983 | 33637697 | transcription factor RCBF3 | 0.735294 | Oryza sativa | 3390 | 4732 |
| | | | | [Oryza sativa] | | | | |
| | | ABG73450 | 110430645 | DREBlb [Oryza brachyantha] | 0.705882 | Oryza brachyantha | 3391 | |
| | | XP_002462692 | 242049895 | hypothetical protein SORBIDRAFT_02g030330 | 0.714286 | Sorghum bicolor | 3392 | 4733 |
| | | | | [Sorghum bicolor] | | | | |
| | | | | &gt:gi\|60593391\|gb\|AAX28960.1\| | | | | |
| | | | | SbCBF6 [Sorghum bicolor] | | | | |
| | | | | &gt:gi\|241926069\|gb\|EER99213.1\| | | | | |
| | | | | hypothetical protein SORBIDRAFT_02g030330 | | | | |
| | | | | [Sorghum bicolor] | | | | |
| | 1246-1267 | XP_002463252 | 242051015 | hypothetical protein SORBIDRAFT_02g040610 | 1 | Sorghum bicolor | 3393 | 4734 |
| | | | | [Sorghum bicolor] | | | | |
| | | | | &gt:gi\|241926629\|gb\|EER99773.1\| | | | | |
| | | | | hypothetical protein SORBIDRAFT_02g040610 | | | | |
| | | | | [Sorghum bicolor] | | | | |
| | | ACF78838 | 194689507 | unknown [Zea mays] | 0.958678 | Zea mays | 3394 | 4735 |
| | | | | &gt:gi\|238009848\|gb\|ACR35959.1\| | | | | |
| | | | | unknown [Zea mays] | | | | |
| | | NP_001105608 | 162458296 | pyruvate dehydrogenase (lipoamide) kinase2 | 0.955923 | Zea mays | 3395 | 4736 |
| | | | | [Zea mays] | | | | |
| | | | | &gt:gi\|3695005\|gb\|AAC63962.1\| | | | | |
| | | | | pyruvate dehydrogenase kinase isoform 2 | | | | |
| | | | | [Zea mays] | | | | |
| | | NP_001060401 | 115473604 | Os07g0637300 [Oryza sativa Japonica Group] | 0.898072 | Oryza sativa Japonica Group | 3396 | 4737 |
| | | | | &gt:gi\|12829952\|gb\|AAK01947.1\| | | | | |
| | | | | pyruvate dehydrogenase kinase 1 | | | | |
| | | | | [Oryza sativa Indica Group] | | | | |
| | | | | &gt:gi\|23237829\|dbj\|BAC16404.1\| | | | | |
| | | | | pyruvate dehydrogenase kinase 1 | | | | |
| | | | | [Oryza sativa Japonica Group] | | | | |
| | | | | &gt:gi\|60499792\|gb\|AAX22104.1\| | | | | |
| | | | | pyruvate dehydrogenase kinase | | | | |
| | | | | [Oryza sativa Indica Group] | | | | |
| | | | | &gt:gi\|60499794\|gb\|AAX22105.1\| | | | | |
| | | | | pyruvate dehydrogenase kinase | | | | |
| | | | | [Oryza sativa Indica Group] | | | | |
| | | | | &gt:gi\|113611937\|dbj\|BAF22315.1\| | | | | |
| | | | | Os07g0637300 [Oryza sativa Japonica Group] | | | | |
| | | EEC82518 | 54362548 | hypothetical protein OsI_27023 | 0.898072 | Oryza sativa Indica Group | 3397 | |
| | | | | [Oryza sativa Indica Group] | | | | |
| | | EEE67664 | 54398660 | hypothetical protein OsJ_25286 | 0.895317 | Oryza sativa Japonica Group | 3398 | |
| | | | | [Oryza sativa Japonica Group] | | | | |
| | | BAJ85210 | 326493497 | predicted protein | 0.878788 | Hordeum vulgare subsp. vulgare | 3399 | 4738 |
| | | | | [Hordeum vulgare subsp. vulgare] | | | | |
| | | XP_002467803 | 242040816 | hypothetical protein SORBIDRAFT_01g034390 | 0.812672 | Sorghum bicolor | 3400 | 4739 |
| | | | | [Sorghum bicolor] | | | | |
| | | | | &gt:gi\|241921657\|gb\|EER94801.1\| | | | | |
| | | | | hypothetical protein SORBIDRAFT_01g034390 | | | | |
| | | | | [Sorghum bicolor] | | | | |
| | | NP_001104897 | 162459440 | pyruvate dehydrogenase (lipoamide) kinase1 | 0.807163 | Zea mays | 3401 | 4740 |
| | | | | [Zea mays] | | | | |
| | | | | &gt:gi\|3746431\|gb\|AAC63961.1\| | | | | |
| | | | | pyruvate dehydrogenase kinase isoform 1 | | | | |
| | | | | [Zea mays] | | | | |
| | | | | &gt:gi\|219885093\|gb\|ACL52921.1\| | | | | |
| | | | | unknown [Zea mays] | | | | |
| | | NP_001132485 | 212721389 | hypothetical protein LOC100193944 | 0.801653 | Zea mays | 3402 | 4741 |
| | | | | [Zea mays] | | | | |
| | | | | &gt:gi\|194694512\|gb\|ACF81340.1\| | | | | |
| | | | | unknown [Zea mays] | | | | |
| Predicted | 829-850 | XP_002441194 | 242090722 | hypothetical protein SORBIDRAFT_09g022010 | 1 | Sorghum bicolor | 3403 | 4742 |
| zma | | | | [Sorghum bicolor] | | | | |
| mir | | | | &gt:gi\|241946479\|gb\|EES19624.1\| | | | | |
| 49718 | | | | hypothetical protein SORBIDRAFT_09g022010 | | | | |
| | | | | [Sorghum bicolor] | | | | |
| | | NP_001144777 | 226503764 | hypothetical protein LOC100277843 | 0.879684 | Zea mays | 3404 | 4743 |
| | | | | [Zea mays] | | | | |
| | | | | &gt:gi\|195646864\|gb\|ACG42900.1\| | | | | |
| | | | | hypothetical protein [Zea mays] | | | | |
| | | NP_001055695 | 115464190 | Os05g0447700 [Oryza sativa Japonica Group] | 0.783037 | Oryza sativa Japonica Group | 3405 | 4744 |
| | | | | &gt:gi\|51854380\|gb\|AAU10760.1\| unknown | | | | |
| | | | | protein [Oryza sativa Japonica Group] | | | | |
| | | | | &gt:gi\|113579246\|dbj\|BAF17609.1\| | | | | |
| | | | | Os05g0447700 [Oryza sativa Japonica Group] | | | | |
| | | | | &gt:gi\|215701012\|dbj\|BAG92436.1\| | | | | |
| | | | | unnamed protein product | | | | |
| | | | | [Oryza sativa Japonica Group] | | | | |
| | | | | &gt:gi\|215701421\|dbj\|BAG92845.1\| | | | | |
| | | | | unnamed protein product | | | | |
| | | | | [Oryza sativa Japonica Group] | | | | |
| | | | | &gt:gi\|222631775\|gb\|EEE63907.1\| | | | | |
| | | | | hypothetical protein OsJ_18732 | | | | |
| | | | | [Oryza sativa Japonica Group] | | | | |
| | | EAY98243 | 54362548 | hypothetical protein OsI_20153 | 0.781065 | Oryza sativa Indica Group | 3406 | |
| | | | | [Oryza sativa Indica Group] | | | | |
| | | BAJ91869 | 326511042 | predicted protein | 0.700197 | Hordeum vulgare subsp. vulgare | 3407 | 4745 |
| | | | | [Hordeum vulgare subsp. vulgare] | | | | |
| | 2065-2086 | BAD02277 | 38488589 | vacuolar proton pyrophosphatase | 1 | Oryza sativa Japonica Group | 3408 | |
| | | | | [Oryza sativa Japonica Group] | | | | |
| | | BAD25066 | 38488637 | putative inorganic diphosphatase | 0.998701 | Oryza sativa Japonica Group | 3409 | |
| | | | | [Oryza sativa Japonica Group] | | | | |
| | | | | &gt:gi\|222622322\|gb\|EEE56454.1\| | | | | |
| | | | | hypothetical protein OsJ_05651 | | | | |
| | | | | [Oryza sativa Japonica Group] | | | | |
| | | XP_002453419 | 242064259 | hypothetical protein SORBIDRAFT_04g005710 | 0.961039 | Sorghum bicolor | 3410 | 4746 |
| | | | | [Sorghum bicolor] | | | | |
| | | | | &gt:gi\|241933250\|gb\|EES06395.1\| | | | | |
| | | | | hypothetical protein SORBIDRAFT_04g005710 | | | | |
| | | | | [Sorghum bicolor] | | | | |
| | | CAG29370 | 57161867 | vacuolar H+-translocating inorganic | 0.950649 | Zea mays | 3411 | |
| | | | | pyrophosphatase [Zea mays] | | | | |
| | | BAJ91598 | 326509362 | predicted protein | 0.92987 | Hordeum vulgare subsp. vulgare | 3412 | 4747 |
| | | | | [Hordeum vulgare subsp. vulgare] | | | | |
| | | NP_001058184 | 115469169 | Os06g0644200 [Oryza sativa Japonica Group] | 0.937662 | Oryza sativa Japonica Group | 3413 | 4748 |
| | | | | &gt:gi\|51535512\|dbj\|BAD37431.1\| | | | | |
| | | | | inorganic diphosphatase, H+-translocating, vacuolar | | | | |
| | | | | membrane [Oryza sativa Japonica Group] | | | | |
| | | | | &gt:gi\|113596224\|dbj\|BAF20098.1\| | | | | |
| | | | | Os06g0644200 [Oryza sativa Japonica Group] | | | | |
| | | | | &gt:gi\|215704675\|dbj\|BAG94303.1\| | | | | |
| | | | | unnamed protein product | | | | |
| | | | | [Oryza sativa Japonica Group] | | | | |
| | | BAA08232 | 1747293 | vacuolar H+-pyrophosphatase | 0.936364 | Oryza sativa (Japonica cultivar-group)] | 3414 | 4749 |
| | | | | [Oryza sativa (Japonica cultivar-group)] | | | | |
| | | BAA31523 | 3298473 | Ovp1 [Oryza sativa] | 0.935065 | Oryza sativa | 3415 | 4750 |
| | | BAB18681 | 11527560 | vacuolar proton-inorganic pyrophosphatase | 0.925974 | Hordeum vulgare subsp. vulgare | 3416 | 4751 |
| | | | | [Hordeum vulgare subsp. vulgare] | | | | |
| | | EEE66103 | 54398660 | hypothetical protein OsJ_22136 | 0.935065 | Oryza sativa Japonica Group | 3417 | |
| | | | | [Oryza sativa Japonica Group] | | | | |
| Predicted | 749-769 | ACN36483 | 224034814 | unknown [Zea mays] | 1 | Zea mays | 3418 | 4752 |
| zma | | | | | | | | |
| mir | | | | | | | | |
| 50085 | | | | | | | | |
| | | XP_002464347 | 242033904 | hypothetical protein SORBIDRAFT_01g016710 | 0.753709 | Sorghum bicolor | 3419 | 4753 |
| | | | | [Sorghum bicolor] | | | | |
| | | | | &gt:gi\|241918201\|gb\|EER91345.1\| | | | | |
| | | | | hypothetical protein SORBIDRAFT_01g016710 | | | | |
| | | | | [Sorghum bicolor] | | | | |
| | 772-792 | XP_002441965 | 242083079 | hypothetical protein SORBIDRAFT_08g005660 | 1 | Sorghum bicolor | 3420 | 4754 |
| | | | | [Sorghum bicolor] | | | | |
| | | | | &gt:gi\|241942658\|gb\|EES15803.1\| | | | | |
| | | | | hypothetical protein SORBIDRAFT_08g005660 | | | | |
| | | | | [Sorghum bicolor] | | | | |
| | | NP_001147944 | 226491563 | AAP6 [Zea mays] | 0.887734 | Zea mays | 3421 | 4755 |
| | | | | &gt:gi\|195614738\|gb\|ACG29199.1\| | | | | |
| | | | | AAP6 [Zea mays] | | | | |
| | | ACF82748 | 194697327 | unknown [Zea mays] | 0.881497 | Zea mays | 3422 | 4756 |
| | | NP_001066353 | 115487731 | Os12g0194900 [Oryza sativa Japonica Group] | 0.881497 | Oryza sativa Japonica Group | 3423 | 4757 |
| | | | | &gt:gi\|108862289\|gb\|ABA96080.2\| | | | | |
| | | | | amino acid permease I, putative, expressed | | | | |
| | | | | [Oryza sativa Japonica Group] | | | | |
| | | | | &gt:gi\|113648860\|dbj\|BAF29372.1\| | | | | |
| | | | | Os12g0194900 [Oryza sativa Japonica Group] | | | | |
| | | | | &gt:gi\|125536049\|gb\|EAY82537.1\| | | | | |
| | | | | hypothetical protein OsI_37760 | | | | |
| | | | | [Oryza sativa Indica Group] | | | | |
| | 113-133 | EEC74142 | 54362548 | hypothetical protein OsI_09216 | 1 | Oryza sativa Indica Group | 3424 | |
| | | | | [Oryza sativa Indica Group] | | | | |
| | | NP_001152051 | 226502027 | serine esterase family protein | 0.848765 | Zea mays | 3425 | 4758 |
| | | | | [Zea mays] | | | | |
| | | | | &gt:gi\|195652153\|gb\|ACG45544.1\| | | | | |
| | | | | serine esterase family protein | | | | |
| | | | | [Zea mays] | | | | |
| | | ACF80204 | 194692239 | unknown [Zea mays] | 0.712963 | Zea mays | 3426 | 4759 |
| | | XP_002452943 | 242063307 | hypothetical protein SORBIDRAFT_04g035350 | 0.728395 | Sorghum bicolor | 3427 | 4760 |
| | | | | [Sorghum bicolor] | | | | |
| | | | | &gt:gi\|241932774\|gb\|EES05919.1\| | | | | |
| | | | | hypothetical protein SORBIDRAFT_04g035350 | | | | |
| | | | | [Sorghum bicolor] | | | | |
| | 200-220 | XP_002462815 | 242050141 | hypothetical protein SORBIDRAFT_02g032420 | 1 | Sorghum bicolor | 3428 | 4761 |
| | | | | [Sorghum bicolor] | | | | |
| | | | | &gt:gi\|241926192\|gb\|EER99336.1\| | | | | |
| | | | | hypothetical protein SORBIDRAFT_02g032420 | | | | |
| | | | | [Sorghum bicolor] | | | | |
| | | EEC85037 | 54362548 | hypothetical protein OsI_32346 | 0.964072 | Oryza sativa Japonica Group | 3429 | |
| | | | | [Oryza sativa Indica Group] | | | | |
| | | | | &gt:gi\|222642071\|gb\|EEE70203.1\| | | | | |
| | | | | hypothetical protein OsJ_30293 | | | | |
| | | | | [Oryza sativa Japonica Group] | | | | |
| | | NP_001142116 | 226502757 | hypothetical protein LOC100274280 | 0.976048 | Zea mays | 3430 | 4762 |
| | | | | [Zea mays] | | | | |
| | | | | &gt:gi\|194704262\|gb\|ACF86215.1\| | | | | |
| | | | | unknown [Zea mays] | | | | |
| | | | | &gt:gi\|194707182\|gb\|ACF87675.1\| | | | | |
| | | | | unknown [Zea mays] | | | | |
| | | BAJ85748 | 326495303 | predicted protein | 0.952096 | Hordeum vulgare subsp. vulgare | 3431 | 4763 |
| | | | | [Hordeum vulgare subsp. vulgare] | | | | |
| | | | | &gt:gi\|326508052\|dbj\|BAJ86769.1\| | | | | |
| | | | | predicted protein | | | | |
| | | | | [Hordeum vulgare subsp. vulgare] | | | | |
| | | | | &gt:gi\|326524422\|dbj\|BAK00594.1\| | | | | |
| | | | | predicted protein | | | | |
| | | | | [Hordeum vulgare subsp. vulgare] | | | | |
| | | ACU13649 | 255626608 | unknown [Glycine max] | 0.820359 | Glycine max | 3432 | 4764 |
| | | ACU14908 | 255629126 | unknown [Glycine max] | 0.820359 | Glycine max | 3433 | 4765 |
| | | XP_002284866 | 225451010 | PREDICTED: hypothetical protein | 0.790419 | Vitis vinifera | 3434 | 4766 |
| | | | | [Vitis vinifera] | | | | |
| | | ACG47475 | 195656014 | hypothetical protein [Zea mays] | 0.874251 | Zea mays | 3435 | 4767 |
| | | XP_002512352 | 255542577 | microsomal signal peptidase 23 kD subunit, putative | 0.784431 | Ricinus communis | 3436 | 4768 |
| | | | | [Ricinus communis] | | | | |
| | | | | &gt:gi\|223548313\|gb\|EEF49804.1\| | | | | |
| | | | | microsomal signal peptidase 23 kD subunit, putative | | | | |
| | | | | [Ricinus communis] | | | | |
| | 946-966 | XP_002452943 | 242063307 | hypothetical protein SORBIDRAFT_04g035350 | 1 | Sorghum bicolor | 3437 | 4769 |
| | | | | [Sorghum bicolor] | | | | |
| | | | | &gt:gi\|241932774\|gb\|EES05919.1\| | | | | |
| | | | | hypothetical protein SORBIDRAFT_04g035350 | | | | |
| | | | | [Sorghum bicolor] | | | | |
| | | ACF88103 | 194708037 | unknown [Zea mays] | 0.9 | Zea mays | 3438 | 4770 |
| | | NP_001048339 | 115449118 | Os02g0787100 [Oryza sativa Japonica Group] | 0.757895 | Oryza sativa Japonica Group | 3439 | 4771 |
| | | | | &gt:gi\|47497166\|dbj\|BAD19214.1\| | | | | |
| | | | | hypothetical protein [Oryza sativa Japonica Group] | | | | |
| | | | | &gt:gi\|47497751\|dbj\|BAD19851.1\| | | | | |
| | | | | hypothetical protein [Oryza sativa Japonica Group] | | | | |
| | | | | &gt:gi\|113537870\|dbj\|BAF10253.1\| | | | | |
| | | | | Os02g0787100 [Oryza sativa Japonica Group] | | | | |
| | | BAJ88501 | 326522910 | predicted protein | 0.7 | Hordeum vulgare subsp. vulgare | 3440 | 4772 |
| | | | | [Hordeum vulgare subsp. vulgare] | | | | |
| | 231-251 | NP_001150320 | 226502818 | signal peptidase complex subunit 3 | 1 | Zea mays | 3441 | 4773 |
| | | | | [Zea mays] | | | | |
| | | | | &gt:gi\|194695862\|gb\|ACF82015.1\| | | | | |
| | | | | unknown [Zea mays] | | | | |
| | | | | &gt:gi\|195638350\|gb\|ACG38643.1\| | | | | |
| | | | | signal peptidase complex subunit 3 | | | | |
| | | | | [Zea mays] | | | | |
| | | ACG47475 | 195656014 | hypothetical protein [Zea mays] | 0.862275 | Zea mays | 3442 | 4774 |
| | | AAO45754 | 307135766 | signal peptidase protein-like protein | 0.778443 | Cucumis melo subsp. melo | 3443 | 4775 |
| | | | | [Cucumis melo subsp. melo] | | | | |
| | 1001-1021 | XP_002436903 | 242092825 | hypothetical protein SORBIDRAFT_10g010840 | 1 | Sorghum bicolor | 3444 | 4776 |
| | | | | [Sorghum bicolor] | | | | |
| | | | | &gt:gi\|241915126\|gb\|EER88270.1\| | | | | |
| | | | | hypothetical protein SORBIDRAFT_10g010840 | | | | |
| | | | | [Sorghum bicolor] | | | | |
| | | NP_001130415 | 212274954 | hypothetical protein LOC100191511 | 0.954128 | Zea mays | 3445 | 4777 |
| | | | | [Zea mays] | | | | |
| | | | | &gt:gi\|194689060\|gb\|ACF78614.1\| | | | | |
| | | | | unknown [Zea mays] | | | | |
| | | | | &gt:gi\|223942719\|gb\|ACN25443.1\| | | | | |
| | | | | unknown [Zea mays] | | | | |
| | | | | &gt:gi\|224029573\|gb\|ACN33862.1\| | | | | |
| | | | | unknown [Zea mays] | | | | |
| | | NP_001057438 | 115467677 | Os06g0297700 [Oryza sativa Japonica Group] | 0.821101 | Oryza sativa Japonica Group | 3446 | 4778 |
| | | | | &gt:gi\|53791981\|dbj\|BAD54434.1\| | | | | |
| | | | | unknown protein | | | | |
| | | | | [Oryza sativa Japonica Group] | | | | |
| | | | | &gt:gi\|113595478\|dbj\|BAF19352.1\| | | | | |
| | | | | Os06g0297700 | | | | |
| | | | | [Oryza sativa Japonica Group] | | | | |
| | | BAK05539 | 326487733 | predicted protein | 0.80581 | Hordeum vulgare subsp. vulgare | 3447 | 4779 |
| | | | | [Hordeum vulgare subsp. vulgare] | | | | |
| | 537-557 | XP_002451778 | 242060977 | hypothetical protein SORBIDRAFT_04g007700 | 1 | Sorghum bicolor | 3448 | 4780 |
| | | | | [Sorghum bicolor] | | | | |
| | | | | &gt:gi\|241931609\|gb\|EES04754.1\| | | | | |
| | | | | hypothetical protein SORBIDRAFT_04g007700 | | | | |
| | | | | [Sorghum bicolor] | | | | |
| | | NP_001150860 | 226502363 | dihydrolipoamide S-acetyltransferase1 | 0.955473 | Zea mays | 3449 | 4781 |
| | | | | [Zea mays] | | | | |
| | | | | &gt:gi\|195642434\|gb\|ACG40685.1\| | | | | |
| | | | | dihydrolipoyllysine-residue acetyltransferase | | | | |
| | | | | component of pyruvatedehydrogenase complex | | | | |
| | | | | [Zea mays] | | | | |
| | | NP_001104936 | 162458261 | dihydrolipoamide S-acetyltransferase | 0.946197 | Zea mays | 3450 | 4782 |
| | | | | [Zea mays] | | | | |
| | | | | &gt:gi\|5669871\|gb\|AAD46491.1\|AF135014_1 | | | | |
| | | | | dihydrolipoamide S-acetyltransferase | | | | |
| | | | | [Zea mays] | | | | |
| | | NP_001059445 | 115471692 | Os07g0410100 [Oryza sativa Japonica Group] | 0.834879 | Oryza sativa Japonica Group | 3451 | 4783 |
| | | | | &gt:gi\|33354212\|dbj\|BAC81178.1\| | | | | |
| | | | | unknown protein | | | | |
| | | | | [Oryza sativa Japonica Group] | | | | |
| | | | | &gt:gi\|50510197\|dbj\|BAD31326.1\| | | | | |
| | | | | unknown protein | | | | |
| | | | | [Oryza sativa Japonica Group] | | | | |
| | | | | &gt:gi\|113610981\|dbj\|BAF21359.1\| | | | | |
| | | | | Os07g0410100 | | | | |
| | | | | [Oryza sativa Japonica Group] | | | | |
| | | | | &gt:gi\|215678515\|dbj\|BAG92170.1\| | | | | |
| | | | | unnamed protein | | | | |
| | | | | product [Oryza sativa Japonica Group] | | | | |
| | | EAZ03591 | 54362548 | hypothetical protein OsI_25727 | 0.831169 | Oryza sativa Indica Group | 3452 | |
| | | | | [Oryza sativa Indica Group] | | | | |
| | | NP_001045618 | 115443676 | Os02g0105200 [Oryza sativa Japonica Group] | 0.825603 | Oryza sativa Japonica Group | 3453 | 4784 |
| | | | | &gt:gi\|40363771\|dbj\|BAD06281.1\| | | | | |
| | | | | putative dihydrolipoamide S-acetyltransferase | | | | |
| | | | | [Oryza sativa Japonica Group] | | | | |
| | | | | &gt:gi\|41052549\|dbj\|BAD07541.1\| | | | | |
| | | | | putative dihydrolipoamide S-acetyltransferase | | | | |
| | | | | [Oryza sativa Japonica Group] | | | | |
| | | | | &gt:gi\|50252092\|dbj\|BAD28078.1\| | | | | |
| | | | | putative dihydrolipoamide S-acetyltransferase | | | | |
| | | | | [Oryza sativa Japonica Group] | | | | |
| | | | | &gt:gi\|113535149\|dbj\|BAF07532.1\| | | | | |
| | | | | Os02g0105200 | | | | |
| | | | | [Oryza sativa Japonica Group] | | | | |
| | | | | &gt:gi\|215693370\|dbj\|BAG88752.1\| | | | | |
| | | | | unnamed protein product | | | | |
| | | | | [Oryza sativa Japonica Group] | | | | |
| | | | | &gt:gi\|222622010\|gb\|EEE56142.1\| | | | | |
| | | | | hypothetical protein OsJ_05022 | | | | |
| | | | | [Oryza sativa Japonica Group] | | | | |
| | | EEC72305 | 54362548 | hypothetical protein OsI_05488 | 0.821892 | Oryza sativa Indica Group | 3454 | |
| | | | | [Oryza sativa Indica Group] | | | | |
| | | NP_001056555 | 115465911 | Os06g0105400 [Oryza sativa Japonica Group] | 0.766234 | Oryza sativa Japonica Group | 3455 | 4785 |
| | | | | &gt:gi\|55295833\|dbj\|BAD67701.1\| | | | | |
| | | | | putative dihydrolipoamide S-acetyltransferase | | | | |
| | | | | [Oryza sativa Japonica Group] | | | | |
| | | | | &gt:gi\|113594595\|dbj\|BAF18469.1\| | | | | |
| | | | | Os06g0105400 [Oryza sativa Japonica Group] | | | | |
| | | EEC79834 | 54362548 | hypothetical protein OsI_21298 | 0.756957 | Oryza sativa Indica Group | 3456 | |
| | | | | [Oryza sativa Indica Group] | | | | |
| | | BAJ97318 | 326526602 | predicted protein | 0.766234 | Hordeum vulgare subsp. vulgare | 3457 | 4786 |
| | | | | [Hordeum vulgare subsp. vulgare] | | | | |
| Predicted | 313-331 | NP_001183850 | 308080134 | hypothetical protein LOC100502443 | 1 | Zea mays | 3458 | 4787 |
| zma | | | | [Zea mays] | | | | |
| mir | | | | &gt:gi\|238015018\|gb\|ACR38544.1\| | | | | |
| 50289 | | | | unknown [Zea mays] | | | | |
| | 315-333 | NP_001105340 | 162462750 | ATP synthase subunit beta, mitochondrial precursor | 1 | Zea mays | 3459 | 4788 |
| | | | | [Zea mays] | | | | |
| | | | | &gt:gi\|114420\|sp\|P19023.1\|ATPBM_MAIZE | | | | |
| | | | | RecName: Full = ATP synthase subunit beta, mitochondrial; | | | | |
| | | | | Flags: Precursor | | | | |
| | | | | &gt:gi\|22173\|emb\|CAA38140.1\| | | | | |
| | | | | unnamed protein product | | | | |
| | | | | [Zea mays] | | | | |
| | | | | &gt:gi\|897618\|gb\|AAA70268.1\| | | | | |
| | | | | mitochondrial F-1-ATPase subunit 2 | | | | |
| | | | | [Zea mays] | | | | |
| | | | | &gt:gi\|223943103\|gb\|ACN25635.1\| | | | | |
| | | | | unknown [Zea mays] | | | | |
| | | NP_001151807 | 226493588 | ATP synthase beta chain [Zea mays] | 0.987342 | Zea mays | 3460 | 4789 |
| | | | | &gt:gi\|195614324\|gb\|ACG28992.1\| | | | | |
| | | | | ATP synthase beta chain [Zea mays] | | | | |
| | | | | &gt:gi\|195649793\|gb\|ACG44364.1\| | | | | |
| | | | | ATP synthase beta chain [Zea mays] | | | | |
| | | BAA01372 | 218146 | mitochondrial F1-ATPase beta subunit | 0.949367 | Oryza sativa Japonica Group | 3461 | 4790 |
| | | | | [Oryza sativa Japonica Group] | | | | |
| | | BAJ95263 | 326502399 | predicted protein | 0.933092 | Hordeum vulgare subsp. vulgare | 3462 | 4791 |
| | | | | [Hordeum vulgare subsp. vulgare] | | | | |
| | | | | &gt:gi\|326528609\|dbj\|BAJ97326.1\| | | | | |
| | | | | predicted protein | | | | |
| | | | | [Hordeum vulgare subsp. vulgare] | | | | |
| | | NP_001043900 | 115439240 | Os01g0685800 [Oryza sativa Japonica Group] | 0.94575 | Oryza sativa Japonica Group | 3463 | 4792 |
| | | | | &gt:gi\|113533431\|dbj\|BAF05814.1\| | | | | |
| | | | | Os01g0685800 [Oryza sativa Japonica Group] | | | | |
| | | AAD03392 | 3676295 | mitochondrial ATPase beta subunit | 0.896926 | Nicotiana sylvestris | 3464 | 4793 |
| | | | | [Nicotiana sylvestris] | | | | |
| | | AAD03394 | 3893823 | ATPase beta subunit | 0.898734 | Nicotiana sylvestris | 3465 | 4794 |
| | | | | [Nicotiana sylvestris] | | | | |
| | | AAD03393 | 3893821 | ATPase beta subunit | 0.893309 | Nicotiana sylvestris | 3466 | 4795 |
| | | | | [Nicotiana sylvestris] | | | | |
| | 739-757 | NP_001168893 | 293335318 | hypothetical protein LOC100382698 | 1 | Zea mays | 3467 | 4796 |
| | | | | [Zea mays] | | | | |
| | | | | &gt:gi\|223973523\|gb\|ACN30949.1\| | | | | |
| | | | | unknown [Zea mays] | | | | |
| | | NP_001131845 | 212721699 | hypothetical protein LOC100193221 | 0.991039 | Zea mays | 3468 | 4797 |
| | | | | [Zea mays] | | | | |
| | | | | &gt:gi\|194692700\|gb\|ACF80434.1\| | | | | |
| | | | | unknown [Zea mays] | | | | |
| | | XP_002462395 | 242049301 | hypothetical protein SORBIDRAFT_02g024970 | 0.799283 | Sorghum bicolor | 3469 | 4798 |
| | | | | [Sorghum bicolor] | | | | |
| | | | | &gt:gi\|241925772\|gb\|EER98916.1\| | | | | |
| | | | | hypothetical protein SORBIDRAFT_02g024970 | | | | |
| | | | | [Sorghum bicolor] | | | | |
| | 328-346 | XP_002456162 | 242054032 | hypothetical protein SORBIDRAFT_03g031470 | 1 | Sorghum bicolor | 3470 | 4799 |
| | | | | [Sorghum bicolor] | | | | |
| | | | | &gt:gi\|241928137\|gb\|EES01282.1\| | | | | |
| | | | | hypothetical protein SORBIDRAFT_03g031470 | | | | |
| | | | | [Sorghum bicolor] | | | | |
| | | P17614 | | RecName: Full = ATP synthase subunit beta, | 0.897436 | Nicotiana plumbaginifolia | 3471 | |
| | | | | mitochondrial; Flags: Precursor | | | | |
| | | | | &gt:gi\|19685\|emb\|CAA26620.1\| | | | | |
| | | | | ATP synthase beta subunit | | | | |
| | | | | [Nicotiana plumbaginifolia] | | | | |
| | 417-435 | NP_001056261 | 115465322 | Os05g0553000 [Oryza sativa Japonica Group] | 1 | Oryza sativa Japonica Group | 3472 | 4800 |
| | | | | &gt:gi\|84028177\|sp\|Q01859.2\|ATPBM_ORYSJ | | | | |
| | | | | RecName: Full = ATP synthase subunit beta, | | | | |
| | | | | mitochondrial; Flags: Precursor | | | | |
| | | | | &gt:gi\|49328022\|gb\|AAT58723.1\| | | | | |
| | | | | putative ATP synthase beta chain | | | | |
| | | | | [Oryza sativa Japonica Group] | | | | |
| | | | | &gt:gi\|50878425\|gb\|AAT85199.1\| | | | | |
| | | | | putative ATP synthase beta chain | | | | |
| | | | | [Oryza sativa Japonica Group] | | | | |
| | | | | &gt:gi\|113579812\|dbj\|BAF18175.1\| | | | | |
| | | | | Os05g0553000 [Oryza sativa Japonica Group] | | | | |
| | | | | &gt:gi\|215692634\|dbj\|BAG88054.1\| | | | | |
| | | | | unnamed protein product | | | | |
| | | | | [Oryza sativa Japonica Group] | | | | |
| | | ACS83602 | 242129045 | ATP synthase beta subunit 1 | 0.900362 | Gossypium hirsutum | 3473 | 4801 |
| | | | | [Gossypium hirsutum] | | | | |
| Predicted | 507-526 | EEE57671 | 54398660 | hypothetical protein OsJ_08115 | 1 | Oryza sativa Japonica Group | 3474 | |
| zma | | | | [Oryza sativa Japonica Group] | | | | |
| mir | | | | | | | | |
| 50480 | | | | | | | | |
| | | EAY87257 | 54362548 | hypothetical protein OsI_08658 | 0.984305 | Oryza sativa Indica Group | 3475 | |
| | | | | [Oryza sativa Indica Group] | | | | |
| | | NP_001146323 | 226494858 | hypothetical protein LOC100279899 | 0.826233 | Zea mays | 3476 | 4802 |
| | | | | [Zea mays] | | | | |
| | | | | &gt:gi\|219886633\|gb\|ACL53691.1\| | | | | |
| | | | | unknown [Zea mays] | | | | |
| | | BAJ88744 | 326523406 | predicted protein | 0.817265 | Hordeum vulgare subsp. vulgare | 3477 | 4803 |
| | | | | [Hordeum vulgare subsp. vulgare] | | | | |
| | 543-562 | AAV64247 | 55741096 | unknown [Zea mays] | 1 | Zea mays | 3478 | 4804 |
| | | AAV64209 | 55741054 | unknown [Zea mays] | 0.829971 | Zea mays | 3479 | 4805 |
| | 247-266 | ACG33184 | 195622707 | integral membrane protein DUF6 containing protein | 1 | Zea mays | 3480 | 4806 |
| | | | | [Zea mays] | | | | |
| | | | | &gt:gi\|223948881\|gb\|ACN28524.1\| | | | | |
| | | | | unknown [Zea mays] | | | | |
| | | XP_002462410 | 242049331 | hypothetical protein SORBIDRAFT_02g025210 | 0.879357 | Sorghum bicolor | 3481 | 4807 |
| | | | | [Sorghum bicolor] | | | | |
| | | | | &gt:gi\|241925787\|gb\|EER98931.1\| | | | | |
| | | | | hypothetical protein SORBIDRAFT_02g025210 | | | | |
| | | | | [Sorghum bicolor] | | | | |
| | | BAH01249 | 116011645 | unnamed protein product | 0.729223 | Oryza sativa Japonica Group | 3482 | 4808 |
| | | | | [Oryza sativa Japonica Group] | | | | |
| | | EEC84606 | 54362548 | hypothetical protein OsI_31435 | 0.713137 | Oryza sativa Indica Group | 3483 | |
| | | | | [Oryza sativa Indica Group] | | | | |
| | | | | &gt:gi\|222641609\|gb\|EEE69741.1\| | | | | |
| | | | | hypothetical protein OsJ_29432 | | | | |
| | | | | [Oryza sativa Japonica Group] | | | | |
| | 533-552 | NP_001147862 | 226497613 | LOC100281472 [Zea mays] | 1 | Zea mays | 3484 | 4809 |
| | | | | &gt:gi\|195614188\|gb\|ACG28924.1\| | | | | |
| | | | | transparent testa 12 protein | | | | |
| | | | | [Zea mays] | | | | |
| | 1939-1958 | XP_002463844 | 242032898 | hypothetical protein SORBIDRAFT_01g007310 | 1 | Sorghum bicolor | 3485 | 4810 |
| | | | | [Sorghum bicolor] | | | | |
| | | | | &gt:gi\|242033607\|ref\|XP_002464198.1\| | | | | |
| | | | | hypothetical protein SORBIDRAFT_01g013970 | | | | |
| | | | | [Sorghum bicolor] | | | | |
| | | | | &gt:gi\|241917698\|gb\|EER90842.1\| | | | | |
| | | | | hypothetical protein SORBIDRAFT_01g007310 | | | | |
| | | | | [Sorghum bicolor] | | | | |
| | | | | &gt:gi\|241918052\|gb\|EER91196.1\| | | | | |
| | | | | hypothetical protein SORBIDRAFT_01g013970 | | | | |
| | | | | [Sorghum bicolor] | | | | |
| | | NP_001151463 | 226529446 | LOC100285096 [Zea mays] | 0.941099 | Zea mays | 3486 | 4811 |
| | | | | &gt:gi\|195646966\|gb\|ACG42951.1\| | | | | |
| | | | | subtilisin-like protease precursor | | | | |
| | | | | [Zea mays] | | | | |
| | | NP_001051353 | 115455504 | Os03g0761500 [Oryza sativa Japonica Group] | 0.875654 | Oryza sativa Japonica Group | 3487 | 4812 |
| | | | | &gt:gi\|14488360\|gb\|AAK63927.1\|AC084282_8 | | | | |
| | | | | putative serine protease | | | | |
| | | | | [Oryza sativa Japonica Group] | | | | |
| | | | | &gt:gi\|108711215\|gb\|ABF99010.1\| | | | | |
| | | | | cucumisin-like serine protease, putative, expressed | | | | |
| | | | | [Oryza sativa Japonica Group] | | | | |
| | | | | &gt:gi\|113549824\|dbj\|BAF13267.1\| | | | | |
| | | | | Os03g0761500 [Oryza sativa Japonica Group] | | | | |
| | | | | &gt:gi\|125588004\|gb\|EAZ28668.1\| | | | | |
| | | | | hypothetical protein OsJ_12679 | | | | |
| | | | | [Oryza sativa Japonica Group] | | | | |
| | | | | &gt:gi\|215678732\|dbj\|BAG95169.1\| | | | | |
| | | | | unnamed protein product | | | | |
| | | | | [Oryza sativa Japonica Group] | | | | |
| | | | | &gt:gi\|215737049\|dbj\|BAG95978.1\| | | | | |
| | | | | unnamed protein product | | | | |
| | | | | [Oryza sativa Japonica Group] | | | | |
| | | BAJ99493 | 326508451 | predicted protein | 0.823298 | Hordeum vulgare subsp. vulgare | 3488 | 4813 |
| | | | | [Hordeum vulgare subsp. vulgare] | | | | |
| | 529-548 | ACN27570 | 223946972 | unknown [Zea mays] | 1 | Zea mays | 3489 | 4814 |
| | | EEC76224 | 54362548 | hypothetical protein OsI_13631 | 0.764368 | Oryza sativa Indica Group | 3490 | |
| | | | | [Oryza sativa Indica Group] | | | | |
| | 281-300 | XP_002467528 | 242040266 | hypothetical protein SORBIDRAFT_01g029660 | 1 | Sorghum bicolor | 3491 | 4815 |
| | | | | [Sorghum bicolor] | | | | |
| | | | | &gt:gi\|241921382\|gb\|EER94526.1\| | | | | |
| | | | | hypothetical protein SORBIDRAFT_01g029660 | | | | |
| | | | | [Sorghum bicolor] | | | | |
| | | NP_001147577 | 226531032 | proline oxidase [Zea mays] | 0.893788 | Zea mays | 3492 | 4816 |
| | | | | &gt:gi\|195612286\|gb\|ACG27973.1\| | | | | |
| | | | | proline oxidase [Zea mays] | | | | |
| | | NP_001147660 | 226505515 | proline oxidase [Zea mays] | 0.833667 | Zea mays | 3493 | 4817 |
| | | | | &gt:gi\|195612896\|gb\|ACG28278.1\| | | | | |
| | | | | proline oxidase [Zea mays] | | | | |
| | | BAK02892 | 326505009 | predicted protein | 0.787575 | Hordeum vulgare subsp. vulgare | 3494 | 4818 |
| | | | | [Hordeum vulgare subsp. vulgare] | | | | |
| | | EAY79449 | 54362548 | hypothetical protein OsI_34579 | 0.749499 | Oryza sativa Indica Group | 3495 | |
| | | | | [Oryza sativa Indica Group] | | | | |
| | | NP_001065321 | 115483301 | Os10g0550900 [Oryza sativa Japonica Group] | 0.749499 | Oryza sativa Japonica Group | 3496 | 4819 |
| | | | | &gt:gi\|78708991\|gb\|ABB47966.1\| | | | | |
| | | | | Proline dehydrogenase family protein, expressed | | | | |
| | | | | [Oryza sativa Japonica Group] | | | | |
| | | | | &gt:gi\|113639853\|dbj\|BAF27158.1\| | | | | |
| | | | | Os10g0550900 [Oryza sativa Japonica Group] | | | | |
| | | | | &gt:gi\|215768044\|dbj\|BAH00273.1\| | | | | |
| | | | | unnamed protein product | | | | |
| | | | | [Oryza sativa Japonica Group] | | | | |
| | | AAG13467 | 20143586 | putative proline oxidase | 0.731463 | Oryza sativa Japonica Group | 3497 | 4820 |
| | | | | [Oryza sativa Japonica Group] | | | | |
| | 471-490 | AAV64209 | 55741054 | unknown [Zea mays] | 1 | Zea mays | 3498 | 4821 |
| | 789-808 | NP_001151285 | 226528965 | plastid-specific 30S ribosomal protein 1 [Zea mays] | 1 | Zea mays | 3499 | 4822 |
| | | | | &gt:gi\|195645526\|gb\|ACG42231.1\| plastid-specific | | | | |
| | | | | 30S ribosomal protein 1 [Zea mays] | | | | |
| | | XP_002466065 | 242037340 | hypothetical protein SORBIDRAFT_01g000590 | 0.779935 | Sorghum bicolor | 3500 | 4823 |
| | | | | [Sorghum bicolor] | | | | |
| | | | | &gt:gi\|241919919\|gb\|EER93063.1\| | | | | |
| | | | | hypothetical protein SORBIDRAFT_01g000590 | | | | |
| | | | | [Sorghum bicolor] | | | | |
| | 79-98 | NP_001147623 | 226499377 | WRKY11 - superfamily of TFs having WRKY | 1 | Zea mays | 3501 | 4824 |
| | | | | and zinc finger domains [Zea mays] | | | | |
| | | | | &gt:gi\|194700780\|gb\|ACF84474.1\| | | | | |
| | | | | unknown [Zea mays] | | | | |
| | | | | &gt:gi\|195612626\|gb\|ACG28143.1\| | | | | |
| | | | | WRKY11 - superfamily of TFs having WRKY | | | | |
| | | | | and zinc finger domains [Zea mays] | | | | |
| | | XP_002455987 | 242053682 | hypothetical protein SORBIDRAFT_03g028530 | 0.892045 | Sorghum bicolor | 3502 | 4825 |
| | | | | [Sorghum bicolor] | | | | |
| | | | | &gt:gi\|241927962\|gb\|EES01107.1\| | | | | |
| | | | | hypothetical protein SORBIDRAFT_03g028530 | | | | |
| | | | | [Sorghum bicolor] | | | | |
| | 545-564 | XP_002446670 | 242073467 | hypothetical protein SORBIDRAFT_06g020170 | 1 | Sorghum bicolor | 3503 | 4826 |
| | | | | [Sorghum bicolor] | | | | |
| | | | | &gt:gi\|241937853\|gb\|EES10998.1\| | | | | |
| | | | | hypothetical protein SORBIDRAFT_06g020170 | | | | |
| | | | | [Sorghum bicolor] | | | | |
| | | NP_001151349 | 226528885 | eukaryotic translation initiation factor 4B | 0.905838 | Zea mays | 3504 | 4827 |
| | | | | [Zea mays] | | | | |
| | | | | &gt:gi\|195646008\|gb\|ACG42472.1\| | | | | |
| | | | | eukaryotic translation initiation factor 4B | | | | |
| | | | | [Zea mays] | | | | |
| | | BAH01553 | 116012715 | unnamed protein product | 0.785311 | Oryza sativa Japonica Group | 3505 | 4828 |
| | | | | [Oryza sativa Japonica Group] | | | | |
| | | EEE61194 | 54398660 | hypothetical protein OsJ_15202 | 0.755179 | Oryza sativa Japonica Group | 3506 | |
| | | | | [Oryza sativa Japonica Group] | | | | |
| | | CAE05890 | 38605759 | OSJNBa0044K18.31 | 0.774011 | Oryza sativa Japonica Group | 3507 | 4829 |
| | | | | [Oryza sativa Japonica Group] | | | | |
| | | AAC28254 | 3372235 | eukaryotic translation initiation factor 4B | 0.711864 | Triticum aestivum | 3508 | 4830 |
| | | | | [Triticum aestivum] | | | | |
| | | BAJ97809 | 326531609 | predicted protein | 0.721281 | Hordeum vulgare subsp. vulgare | 3509 | 4831 |
| | | | | [Hordeum vulgare subsp. vulgare] | | | | |
| | 459-478 | NP_001168251 | 293332880 | hypothetical protein LOC100382014 | 1 | Zea mays | 3510 | 4832 |
| | | | | [Zea mays] | | | | |
| | | | | &gt:gi\|223947025\|gb\|ACN27596.1\| | | | | |
| | | | | unknown [Zea mays] | | | | |
| | 741-760 | ACN27595 | 223947022 | unknown [Zea mays] | 1 | Zea mays | 3511 | 4833 |
| | | EAZ17908 | 54398660 | hypothetical protein OsJ_33455 | 0.766633 | Oryza sativa Japonica Group | 3512 | |
| | | | | [Oryza sativa Japonica Group] | | | | |
| | | EAY80442 | 54362548 | hypothetical protein OsI_35624 | 0.765609 | Oryza sativa Indica Group | 3513 | |
| | | | | [Oryza sativa Indica Group] | | | | |
| | | NP_001067561 | 115484834 | Os11g0232100 [Oryza sativa Japonica Group] | 0.765609 | Oryza sativa Japonica Group | 3514 | 4834 |
| | | | | &gt:gi\|62734108\|gb\|AAX96217.1\| | | | | |
| | | | | Leucine Rich Repeat, putative | | | | |
| | | | | [Oryza sativa Japonica Group] | | | | |
| | | | | &gt:gi\|77549387\|gb\|ABA92184.1\| | | | | |
| | | | | Leucine Rich Repeat family protein, expressed | | | | |
| | | | | [Oryza sativa Japonica Group] | | | | |
| | | | | &gt:gi\|113644783\|dbj\|BAF27924.1\| | | | | |
| | | | | Os11g0232100 [Oryza sativa Japonica Group] | | | | |
| | | BAJ87631 | 326511233 | predicted protein | 0.729785 | Hordeum vulgare subsp. vulgare | 3515 | 4835 |
| | | | | [Hordeum vulgare subsp. vulgare] | | | | |
| | | BAJ97282 | 326526530 | predicted protein | 0.728762 | Hordeum vulgare subsp. vulgare | 3516 | 4836 |
| | | | | [Hordeum vulgare subsp. vulgare] | | | | |
| | 1744-1763 | NP_001159284 | 259490169 | hypothetical protein LOC100304374 | 1 | Zea mays | 3517 | 4837 |
| | | | | [Zea mays] | | | | |
| | | | | &gt:gi\|223943193\|gb\|ACN25680.1\| | | | | |
| | | | | unknown [Zea mays] | | | | |
| | | XP_002463079 | 242050669 | hypothetical protein SORBIDRAFT_02g037440 | 0.856041 | Sorghum bicolor | 3518 | 4838 |
| | | | | [Sorghum bicolor] | | | | |
| | | | | &gt:gi\|241926456\|gb\|EER99600.1\| | | | | |
| | | | | hypothetical protein SORBIDRAFT_02g037440 | | | | |
| | | | | [Sorghum bicolor] | | | | |
| | 549-568 | NP_001047898 | 115448236 | Os02g0710900 [Oryza sativa Japonica Group] | 1 | Oryza sativa Japonica Group | 3519 | 4839 |
| | | | | &gt:gi\|41052647\|dbj\|BAD07495.1\| | | | | |
| | | | | putative growth regulator | | | | |
| | | | | [Oryza sativa Japonica Group] | | | | |
| | | | | &gt:gi\|41052863\|dbj\|BAD07777.1\| | | | | |
| | | | | putative growth regulator | | | | |
| | | | | [Oryza sativa Japonica Group] | | | | |
| | | | | &gt:gi\|113537429\|dbj\|BAF09812.1\| | | | | |
| | | | | Os02g0710900 [Oryza sativa Japonica Group] | | | | |
| | 165-184 | XP_002455851 | 242053410 | hypothetical protein SORBIDRAFT_03g026180 | 1 | Sorghum bicolor | 3520 | 4840 |
| | | | | [Sorghum bicolor] | | | | |
| | | | | &gt:gi\|241927826\|gb\|EES00971.1\| | | | | |
| | | | | hypothetical protein SORBIDRAFT_03g026 180 | | | | |
| | | | | [Sorghum bicolor] | | | | |
| | | NP_001130177 | 212275443 | hypothetical protein LOC100191271 | 0.944149 | Zea mays | 3521 | 4841 |
| | | | | [Zea mays] | | | | |
| | | | | &gt:gi\|194688476\|gb\|ACF78322.1\| | | | | |
| | | | | unknown [Zea mays] | | | | |
| | | | | &gt:gi\|195639048\|gb\|ACG38992.1\| | | | | |
| | | | | integral membrane protein [Zea mays] | | | | |
| | | | | &gt:gi\|219888143\|gb\|ACL54446.1\| | | | | |
| | | | | unknown [Zea mays] | | | | |
| | | | | &gt:gi\|224030309\|gb\|ACN34230.1\| | | | | |
| | | | | unknown [Zea mays] | | | | |
| | | NP_001043423 | 115437959 | Os01g0585100 [Oryza sativa Japonica Group] | 0.867021 | Oryza sativa Japonica Group | 3522 | 4842 |
| | | | | &gt:gi\|14588680\|dbj\|BAB61845.1\| | | | | |
| | | | | unknown protein | | | | |
| | | | | [Oryza sativa Japonica Group] | | | | |
| | | | | &gt:gi\|21644683\|dbj\|BAC01240.1\| | | | | |
| | | | | unknown protein | | | | |
| | | | | [Oryza sativa Japonica Group] | | | | |
| | | | | &gt:gi\|113532954\|dbj\|BAF05337.1\| | | | | |
| | | | | Os01g0585100 [Oryza sativa Japonica Group] | | | | |
| | | | | &gt:gi\|215697604\|dbj\|BAG91598.1\| | | | | |
| | | | | unnamed protein product | | | | |
| | | | | [Oryza sativa Japonica Group] | | | | |
| | | EAZ12481 | 54398660 | hypothetical protein OsJ_02378 | 0.867021 | Oryza sativa Japonica Group | 3523 | |
| | | | | [Oryza sativa Japonica Group] | | | | |
| | | EAY74703 | 54362548 | hypothetical protein OsI_02596 | 0.864362 | Oryza sativa Indica Group | 3524 | |
| | | | | [Oryza sativa Indica Group] | | | | |
| | | BAJ96508 | 326517031 | predicted protein | 0.856383 | Hordeum vulgare subsp. vulgare | 3525 | 4843 |
| | | | | [Hordeum vulgare subsp. vulgare] | | | | |
| | | XP_002280579 | 225444823 | PREDICTED: hypothetical protein | 0.712766 | Vitis vinifera | 3526 | 4844 |
| | | | | [Vitis vinifera] | | | | |
| | | ACU22841 | 255644677 | unknown [Glycine max] | 0.712766 | Glycine max | 3527 | 4845 |
| | | XP_002514086 | 255546052 | conserved hypothetical protein | 0.712766 | Ricinus communis | 3528 | 4846 |
| | | | | [Ricinus communis] | | | | |
| | | | | &gt:gi\|223546542\|gb\|EEF48040.1\| | | | | |
| | | | | conserved hypothetical protein | | | | |
| | | | | [Ricinus communis] | | | | |
| | 1215-1234 | NP_001146872 | 226501845 | gibberellin 2-beta-dioxygenase | 1 | Zea mays | 3529 | 4847 |
| | | | | [Zea mays] | | | | |
| | | | | &gt:gi\|195604518\|gb\|ACG24089.1\| | | | | |
| | | | | gibberellin 2-beta-dioxygenase | | | | |
| | | | | [Zea mays] | | | | |
| | | BAJ88432 | 326522772 | predicted protein | 0.742604 | Hordeum vulgare subsp. vulgare | 3530 | 4848 |
| | | | | [Hordeum vulgare subsp. vulgare] | | | | |
| | 725-744 | EEE68876 | 54398660 | hypothetical protein OsJ_27688 | 1 | Oryza sativa Japonica Group | 3531 | |
| | | | | [Oryza sativa Japonica Group] | | | | |
| | 1926-1945 | NP_001159342 | 259489829 | hypothetical protein LOC100304436 | 1 | Zea mays | 3532 | 4849 |
| | | | | [Zea mays] | | | | |
| | | | | &gt:gi\|223943517\|gb\|ACN25842.1\| | | | | |
| | | | | unknown [Zea mays] | | | | |
| | 632-651 | XP_002449308 | 242068062 | hypothetical protein SORBIDRAFT_05g007490 | 1 | Sorghum bicolor | 3533 | 4850 |
| | | | | [Sorghum bicolor] | | | | |
| | | | | &gt:gi\|241935151\|gb\|EES08296.1\| | | | | |
| | | | | hypothetical protein SORBIDRAFT_05g007490 | | | | |
| | | | | [Sorghum bicolor] | | | | |
| | 1268-1287 | XP_002443799 | 242078060 | hypothetical protein SORBIDRAFT_07g002260 | 1 | Sorghum bicolor | 3534 | 4851 |
| | | | | [Sorghum bicolor] | | | | |
| | | | | &gt:gi\|241940149\|gb\|EES13294.1\| | | | | |
| | | | | hypothetical protein SORBIDRAFT_07g002260 | | | | |
| | | | | [Sorghum bicolor] | | | | |
| | | BAJ93280 | 326526206 | predicted protein | 0.767241 | Hordeum vulgare subsp. vulgare | 3535 | 4852 |
| | | | | [Hordeum vulgare subsp. vulgare] | | | | |
| | 189-208 | NP_001151301 | 226508349 | protein binding protein [Zea mays] | 1 | Zea mays | 3536 | 4853 |
| | | | | &gt:gi\|195645662\|gb\|ACG42299.1\| | | | | |
| | | | | protein binding protein [Zea mays] | | | | |
| | | XP_002454380 | 242066181 | hypothetical protein SORBIDRAFT_04g029720 | 0.825 | Sorghum bicolor | 3537 | 4854 |
| | | | | [Sorghum bicolor] | | | | |
| | | | | &gt:gi\|241934211\|gb\|EES07356.1\| | | | | |
| | | | | hypothetical protein SORBIDRAFT_04g029720 | | | | |
| | | | | [Sorghum bicolor] | | | | |
| | | NP_001152525 | 226508021 | protein binding protein [Zea mays] | 0.79 | Zea mays | 3538 | 4855 |
| | | | | &gt:gi\|195657115\|gb\|ACG48025.1\| | | | | |
| | | | | protein binding protein [Zea mays] | | | | |
| | 241-260 | NP_001144625 | 226498917 | hypothetical protein LOC100277643 | 1 | Zea mays | 3539 | 4856 |
| | | | | [Zea mays] | | | | |
| | | | | &gt:gi\|195644788\|gb\|ACG41862.1\| | | | | |
| | | | | hypothetical protein [Zea mays] | | | | |
| | | ACR36806 | 238011541 | unknown [Zea mays] | 0747967 | Zea mays | 3540 | 4857 |
| | 135-154 | NP_001151654 | 226533332 | anthocyanin regulatory C1 protein [Zea mays] | 1 | Zea mays | 3541 | 4858 |
| | | | | &gt:gi\|195648418\|gb\|ACG43677.1lanthocyanin | | | | |
| | | | | regulatory C1 protein [Zea mays] | | | | |
| | 317-336 | NP_001148026 | 226530490 | RING-H2 finger protein ATL2K [Zea mays] | 1 | Zea mays | 3542 | 4859 |
| | | | | &gt:gi\|195615316\|gb\|ACG29488.1\| | | | | |
| | | | | RING-H2 finger protein ATL2K [Zea mays] | | | | |
| | | XP_002456372 | 242054452 | hypothetical protein SORBIDRAFT_03g034930 | 0.863071 | Sorghum bicolor | 3543 | 4860 |
| | | | | [Sorghum bicolor] | | | | |
| | | | | &gt:gi\|241928347\|gb\|EES01492.1\| | | | | |
| | | | | hypothetical protein SORBIDRAFT_03g034930 | | | | |
| | | | | [Sorghum bicolor] | | | | |
| | | NP_001148308 | 226499733 | RING-H2 finger protein ATL2K [Zea mays] | 0.792531 | Zea mays | 3544 | 4861 |
| | | | | &gt:gi\|195617376\|gb\|ACG30518.1\| | | | | |
| | | | | RING-H2 finger protein ATL2K [Zea mays] | | | | |
| | | ACN33508 | 224028864 | unknown [Zea mays] | 0.809129 | Zea mays | 3545 | 4862 |
| Predicted | 22-Mar | EEC68352 | 54362548 | hypothetical protein OsI_36482 | 1 | Oryza sativa Indica Group | 3546 | |
| zma | | | | [Oryza sativa Indica Group] | | | | |
| mir | | | | | | | | |
| 50481 | | | | | | | | |
| | | NP_001068093 | 297612029 | Os11g0557700 [Oryza sativa Japonica Group] | 0.995951 | Oryza sativa Japonica Group | 3547 | 4863 |
| | | | | &gt:gi\|77551490\|gb\|ABA94287.1\| | | | | |
| | | | | protease, putative, expressed | | | | |
| | | | | [Oryza sativa Japonica Group] | | | | |
| | | | | &gt:gi\|113645315\|dbj\|BAF28456.1\| | | | | |
| | | | | Os11g0557700 [Oryza sativa Japonica Group] | | | | |
| | | | | &gt:gi\|215701208\|dbj\|BAG92632.1\| | | | | |
| | | | | unnamed protein product | | | | |
| | | | | [Oryza sativa Japonica Group] | | | | |
| | | | | &gt:gi\|215741610\|dbj\|BAG98105.1\| | | | | |
| | | | | unnamed protein product | | | | |
| | | | | [Oryza sativa Japonica Group] | | | | |
| | | | | &gt:gi\|222616146\|gb\|EEE52278.1\| | | | | |
| | | | | hypothetical protein OsJ_34257 | | | | |
| | | | | [Oryza sativa Japonica Group] | | | | |
| | | BAJ87085 | 326509738 | predicted protein | 0.882591 | Hordeum vulgare subsp. vulgare | 3548 | 4864 |
| | | | | [Hordeum vulgare subsp. vulgare] | | | | |
| | | NP_001151887 | 226509855 | S-adenosylmethionine-dependent | 0.850202 | Zea mays | 3549 | 4865 |
| | | | | methyltransferase/catalytic [Zea mays] | | | | |
| | | | | &gt:gi\|195650607\|gb\|ACG44771.1\| | | | | |
| | | | | S-adenosylmethionine-dependent | | | | |
| | | | | methyltransferase/catalytic [Zea mays] | | | | |
| | | XP_002449700 | 242068846 | hypothetical protein SORBIDRAFT_05g021800 | 0.765182 | Sorghum bicolor | 3550 | 4866 |
| | | | | [Sorghum bicolor] | | | | |
| | | | | &gt:gi\|241935543\|gb\|EES08688.1\| | | | | |
| | | | | hypothetical protein SORBIDRAFT_05g021800 | | | | |
| | | | | [Sorghum bicolor] | | | | |
| | 336-355 | ACN35785 | 224033418 | unknown [Zea mays] | 1 | Zea mays | 3551 | 4867 |
| | | NP_001147826 | 226499285 | aspartic-type endopeptidase/pepsin A | 0.93186 | Zea mays | 3552 | 4868 |
| | | | | [Zea mays] | | | | |
| | | | | &gt:gi\|195613980\|gb\|ACG28820.1\| | | | | |
| | | | | aspartic-type endopeptidase/pepsin A | | | | |
| | | | | [Zea mays] | | | | |
| | | XP_002437603 | 242094225 | hypothetical protein SORBIDRAFT_10g030330 | 0.756906 | Sorghum bicolor | 3553 | 4869 |
| | | | | [Sorghum bicolor] | | | | |
| | | | | &gt:gi\|241915826\|gb\|EER88970.1\| | | | | |
| | | | | hypothetical protein SORBIDRAFT_10g030330 | | | | |
| | | | | [Sorghum bicolor] | | | | |
| | 88-107 | BAK07450 | 326520382 | predicted protein | 1 | Hordeum vulgare subsp. vulgare | 3554 | 4870 |
| | | | | [Hordeum vulgare subsp. vulgare] | | | | |
| | | BAJ96089 | 326512215 | predicted protein | 0.999001 | Hordeum vulgare subsp. vulgare | 3555 | 4871 |
| | | | | [Hordeum vulgare subsp. vulgare] | | | | |
| | | BAJ86216 | 326503419 | predicted protein | 0.953047 | Hordeum vulgare subsp. vulgare | 3556 | 4872 |
| | | | | [Hordeum vulgare subsp. vulgare] | | | | |
| | | NP_001182877 | 308081604 | hypothetical protein LOC100501149 | 0.865135 | Zea mays | 3557 | 4873 |
| | | | | [Zea mays] | | | | |
| | | | | &gt:gi\|238007924\|gb\|ACR34997.1\| | | | | |
| | | | | unknown [Zea mays] | | | | |
| | | BAD25508 | 41152728 | putative copper-exporting ATPase | 0.875125 | Oryza sativa Japonica Group | 3558 | |
| | | | | [Oryza sativa Japonica Group] | | | | |
| | | NP_001046033 | 115444506 | Os02g0172600 [Oryza sativa Japonica Group] | 0.875125 | Oryza sativa Japonica Group | 3559 | 4874 |
| | | | | &gt:gi\|113535564\|dbj\|BAF07947.1\| | | | | |
| | | | | Os02g0172600 [Oryza sativa Japonica Group] | | | | |
| | | EEC72585 | 54362548 | hypothetical protein OsI_06035 | 0.87013 | Oryza sativa Indica Group | 3560 | |
| | | | | [Oryza sativa Indica Group] | | | | |
| | | BAJ96159 | 326514343 | predicted protein | 0.827173 | Hordeum vulgare subsp. vulgare | 3561 | 4875 |
| | | | | [Hordeum vulgare subsp. vulgare] | | | | |
| | | | | &gt:gi\|326528265\|dbj\|BAJ93314.1\| | | | | |
| | | | | predicted protein | | | | |
| | | | | [Hordeum vulgare subsp. vulgare] | | | | |
| | | XP_002438813 | 242096645 | hypothetical protein SORBIDRAFT_10g026600 | 0.822178 | Sorghum bicolor | 3562 | 4876 |
| | | | | [Sorghum bicolor] | | | | |
| | | | | &gt:gi\|241917036\|gb\|EER90180.1\| | | | | |
| | | | | hypothetical protein SORBIDRAFT_10g026600 | | | | |
| | | | | [Sorghum bicolor] | | | | |
| | 666-685 | NP_001150862 | 226510390 | LOC100284495 [Zea mays] | 1 | Zea mays | 3563 | 4877 |
| | | | | &gt:gi\|195642440\|gb\|ACG40688.1\| | | | | |
| | | | | helix-loop-helix DNA-binding domain containing | | | | |
| | | | | protein [Zea mays] | | | | |
| | | XP_002456792 | 242055292 | hypothetical protein SORBIDRAFT_03g042860 | 0.846797 | Sorghum bicolor | 3564 | 4878 |
| | | | | [Sorghum bicolor] | | | | |
| | | | | &gt:gi\|241928767\|gb\|EES01912.1\| | | | | |
| | | | | hypothetical protein SORBIDRAFT_03g042860 | | | | |
| | | | | [Sorghum bicolor] | | | | |
| | 493-512 | NP_001144018 | 226499443 | hypothetical protein LOC100276839 | 1 | Zea mays | 3565 | 4879 |
| | | | | [Zea mays] | | | | |
| | | | | &gt:gi\|195635535\|gb\|ACG37236.1\| | | | | |
| | | | | hypothetical protein [Zea mays] | | | | |
| | | XP_002438996 | 242097011 | hypothetical protein SORBIDRAFT_10g029660 | 0.84058 | Sorghum bicolor | 3566 | 4880 |
| | | | | [Sorghum bicolor] | | | | |
| | | | | &gt:gi\|241917219\|gb\|EER90363.1\| | | | | |
| | | | | hypothetical protein SORBIDRAFT_10g029660 | | | | |
| | | | | [Sorghum bicolor] | | | | |
| | 330-349 | NP_001105960 | 162460273 | WUS1 protein [Zea mays] | 1 | Zea mays | 3567 | 4881 |
| | | | | &gt:gi\|116811056\|emb\|CAJ84136.1\| | | | | |
| | | | | WUS1 protein [Zea mays] | | | | |
| | | XP_002448707 | 242077541 | hypothetical protein SORBIDRAFT_06g031880 | 0.705128 | Sorghum bicolor | 3568 | 4882 |
| | | | | [Sorghum bicolor] | | | | |
| | | | | &gt:gi\|241939890\|gb\|EES13035.1\| | | | | |
| | | | | hypothetical protein SORBIDRAFT_06g03 1880 | | | | |
| | | | | [Sorghum bicolor] | | | | |
| | 739-758 | ACF82946 | 194697723 | unknown [Zea mays] | 1 | Zea mays | 3569 | 4883 |
| | | EAY95236 | 54362548 | hypothetical protein OsI_17053 | 0.761719 | Oryza sativa Indica Group | 3570 | |
| | | | | [Oryza sativa Indica Group] | | | | |
| | | XP_002446966 | 242074059 | hypothetical protein SORBIDRAFT_06g025990 | 0.757813 | Sorghum bicolor | 3571 | 4884 |
| | | | | [Sorghum bicolor] | | | | |
| | | | | &gt:gi\|241938149\|gb\|EES11294.1\| | | | | |
| | | | | hypothetical protein SORBIDRAFT_06g025990 | | | | |
| | | | | [Sorghum bicolor] | | | | |
| | | NP_001053615 | 115460029 | Os04g0573900 [Oryza sativa Japonica Group] | 0.759766 | Oryza sativa Japonica Group | 3572 | 4885 |
| | | | | &gt:gi\|38605952\|emb\|CAD41666.3\| | | | | |
| | | | | OSJNBa0019K04.13 [Oryza sativa Japonica Group] | | | | |
| | | | | &gt:gi\|113565186\|dbj\|BAF15529.1\| | | | | |
| | | | | Os04g0573900 [Oryza sativa Japonica Group] | | | | |
| | | NP_001182854 | 308044212 | hypothetical protein LOC100501109 | 0.728516 | Zea mays | 3573 | 4886 |
| | | | | [Zea mays] | | | | |
| | | | | &gt:gi\|238007736\|gb\|ACR34903.1\| | | | | |
| | | | | unknown [Zea mays] | | | | |
| | 1071-1090 | NP_001145817 | 226491437 | hypothetical protein LOC100279324 | 1 | Zea mays | 3574 | 4887 |
| | | | | [Zea mays] | | | | |
| | | | | &gt:gi\|219884539\|gb\|ACL52644.1\| | | | | |
| | | | | unknown [Zea mays] | | | | |
| | | XP_002460158 | 242044573 | hypothetical protein SORBIDRAFT_02g023600 | 0.773956 | Sorghum bicolor | 3575 | 4888 |
| | | | | [Sorghum bicolor] | | | | |
| | | | | &gt:gi\|241923535\|gb\|EER96679.1\| | | | | |
| | | | | hypothetical protein SORBIDRAFT_02g023600 | | | | |
| | | | | [Sorghum bicolor] | | | | |
| | 153-172 | XP_002455017 | 242051742 | hypothetical protein SORBIDRAFT_03g003020 | 1 | Sorghum bicolor | 3576 | 4889 |
| | | | | [Sorghum bicolor] | | | | |
| | | | | &gt:gi\|241926992\|gb\|EES00137.1\| | | | | |
| | | | | hypothetical protein SORBIDRAFT_03g003020 | | | | |
| | | | | [Sorghum bicolor] | | | | |
| | 513-532 | NP_001140853 | 226509373 | hypothetical protein LOC100272929 | 1 | Zea mays | 3577 | 4890 |
| | | | | [Zea mays] | | | | |
| | | | | &gt:gi\|194701444\|gb\|ACF84806.1\| | | | | |
| | | | | unknown [Zea mays] | | | | |
| | | | | &gt:gi\|194703860\|gb\|ACF86014.1\| | | | | |
| | | | | unknown [Zea mays] | | | | |
| | | | | &gt:gi\|195641672\|gb\|ACG40304.1\| | | | | |
| | | | | hypothetical protein [Zea mays] | | | | |
| | | NP_001144670 | 226506299 | hypothetical protein LOC100277696 | 0.82243 | Zea mays | 3578 | 4891 |
| | | | | [Zea mays] | | | | |
| | | | | &gt:gi\|194708364\|gb\|ACF88266.1\| | | | | |
| | | | | unknown [Zea mays] | | | | |
| | | | | &gt:gi\|195645476\|gb\|ACG42206.1\| | | | | |
| | | | | hypothetical protein [Zea mays] | | | | |
| | | XP_002460312 | 242044881 | hypothetical protein SORBIDRAFT_02g026310 | 0.75 | Sorghum bicolor | 3579 | 4892 |
| | | | | [Sorghum bicolor] | | | | |
| | | | | &gt:gi\|241923689\|gb\|EER96833.1\| | | | | |
| | | | | hypothetical protein SORBIDRAFT_02g026310 | | | | |
| | | | | [Sorghum bicolor] | | | | |
| | 420-439 | NP_001150595 | 226507979 | transferase, transferring glycosyl groups | 1 | Zea mays | 3580 | 4893 |
| | | | | [Zea mays] | | | | |
| | | | | &gt:gi\|195640434\|gb\|ACG39685.1\| | | | | |
| | | | | transferase, transferring glycosyl groups | | | | |
| | | | | [Zea mays] | | | | |
| | 538-557 | EEE57671 | 54398660 | hypothetical protein OsJ_08115 | 1 | Oryza sativa Japonica Group | 3581 | |
| | | | | [Oryza sativa Japonica Group] | | | | |
| | 76-95 | ACN31863 | 223975350 | unknown [Zea mays] | 1 | Zea mays | 3582 | 4894 |
| | | ACG44151 | 195649366 | choline-phosphate cytidylyltransferase B | 0.990164 | Zea mays | 3583 | 4895 |
| | | | | [Zea mays] | | | | |
| | | XP_002445104 | 242080670 | hypothetical protein SORBIDRAFT_07g004150 | 0.95082 | Sorghum bicolor | 3584 | 4896 |
| | | | | [Sorghum bicolor] | | | | |
| | | | | &gt:gi\|241941454\|gb\|EES14599.1\| | | | | |
| | | | | hypothetical protein SORBIDRAFT_07g004150 | | | | |
| | | | | [Sorghum bicolor] | | | | |
| | | NP_001061052 | 115474910 | Os08g0161800 [Oryza sativa Japonica Group] | 0.836066 | Oryza sativa Japonica Group | 3585 | 4897 |
| | | | | &gt:gi\|37806270\|dbj\|BAC99786.1\| | | | | |
| | | | | putative CTP: phosphorylcholine cytidylyltransferase | | | | |
| | | | | [Oryza sativa Japonica Group] | | | | |
| | | | | &gt:gi\|113623021\|dbj\|BAF22966.1\| | | | | |
| | | | | Os08g0161800 [Oryza sativa Japonica Group] | | | | |
| | | | | &gt:gi\|215765435\|dbj\|BAG87132.1\| | | | | |
| | | | | unnamed protein product | | | | |
| | | | | [Oryza sativa Japonica Group] | | | | |
| | | | | &gt:gi\|218200513\|gb\|EEC82940.1\| | | | | |
| | | | | hypothetical protein OsI_27913 | | | | |
| | | | | [Oryza sativa Indica Group] | | | | |
| | | EEE68089 | 54398660 | hypothetical protein OsJ_26135 | 0.832787 | Oryza sativa Japonica Group | 3586 | |
| | | | | [Oryza sativa Japonica Group] | | | | |
| | 32-51 | NP_001137004 | 219362694 | hypothetical protein LOC100217167 | 1 | Zea mays | 3587 | 4898 |
| | | | | [Zea mays] | | | | |
| | | | | &gt:gi\|195639104\|gb\|ACG39020.1\| | | | | |
| | | | | DNA binding protein [Zea mays] | | | | |
| | | | | &gt:gi\|224034497\|gb\|ACN36324.1\| | | | | |
| | | | | unknown [Zea mays] | | | | |
| | | ACF83052 | 194697935 | unknown [Zea mays] | 0.994334 | Zea mays | 3588 | 4899 |
| | | XP_002448987 | 242067420 | hypothetical protein SORBIDRAFT_05g002940 | 0.869688 | Sorghum bicolor | 3589 | 4900 |
| | | | | [Sorghum bicolor] | | | | |
| | | | | &gt:gi\|241934830\|gb\|EES07975.1\| | | | | |
| | | | | hypothetical protein SORBIDRAFT_05g002940 | | | | |
| | | | | [Sorghum bicolor] | | | | |
| | | NP_001065753 | 115484182 | Os11g0149100 [Oryza sativa Japonica Group] | 0.705382 | Oryza sativa Japonica Group | 3590 | 4901 |
| | | | | &gt:gi\|62701672\|gb\|AAX92745.1\| | | | | |
| | | | | expressed protein | | | | |
| | | | | [Oryza sativa Japonica Group] | | | | |
| | | | | &gt:gi\|77548692\|gb\|ABA91489.1\| | | | | |
| | | | | expressed protein | | | | |
| | | | | [Oryza sativa Japonica Group] | | | | |
| | | | | &gt:gi\|113644457\|dbj\|BAF27598.1\| | | | | |
| | | | | Os11g0149100 [Oryza sativa Japonica Group] | | | | |
| | | XP_002441824 | 242082797 | hypothetical protein SORBIDRAFT_08g002940 | 0.798867 | Sorghum bicolor | 3591 | 4902 |
| | | | | [Sorghum bicolor] | | | | |
| | | | | &gt:gi\|241942517\|gb\|EES15662.1\| | | | | |
| | | | | hypothetical protein SORBIDRAFT_08g002940 | | | | |
| | | | | [Sorghum bicolor] | | | | |
| | 573-592 | ACG34322 | 195624983 | fructokinase-2 [Zea mays] | 1 | Zea mays | 3592 | 4903 |
| | | | | &gt:gi\|195626972\|gb\|ACG35316.1\| | | | | |
| | | | | fructokinase-2 [Zea mays] | | | | |
| | | ACG38926 | 195638915 | fructokinase-2 [Zea mays] | 0.997015 | Zea mays | 3593 | 4904 |
| | | ACG34312 | 195624963 | fructokinase-2 [Zea mays] | 0.991045 | Zea mays | 3594 | 4905 |
| | | ACG33449 | 195623237 | fructokinase-2 [Zea mays] | 0.991045 | Zea mays | 3595 | 4906 |
| | | ACG39031 | 195639125 | fructokinase-2 [Zea mays] | 0.98806 | Zea mays | 3596 | 4907 |
| | | NP_001060837 | 115474480 | Os08g0113100 [Oryza sativa Japonica Group] | 0.901493 | Oryza sativa Japonica Group | 3597 | 4908 |
| | | | | &gt:gi\|122234591\|sp\|Q0J8G4.1\|SCRK2_ORYSJ | | | | |
| | | | | RecName: Full = Fructokinase-2; | | | | |
| | | | | AltName: Full = Fructokinase II; | | | | |
| | | | | AltName: Full = OsFKII | | | | |
| | | | | &gt:gi\|158513662\|sp\|A2YQL4.2\|SCRK2_ORYSI | | | | |
| | | | | RecName: Full = Fructokinase-2; | | | | |
| | | | | AltName: Full = Fructokinase II; | | | | |
| | | | | AltName: Full = OsFKII | | | | |
| | | | | &gt:gi\|16566704\|gb\|AAL26573.1\|AF429947_1 | | | | |
| | | | | putative fructokinase II | | | | |
| | | | | [Oryza sativa] | | | | |
| | | | | &gt:gi\|32352126\|dbj\|BAC78556.1\| | | | | |
| | | | | fructokinase [Oryza sativa Japonica Group] | | | | |
| | | | | &gt:gi\|42408363\|dbj\|BAD09515.1\| | | | | |
| | | | | putative fructokinase | | | | |
| | | | | [Oryza sativa Japonica Group] | | | | |
| | | | | &gt:gi\|113622806\|dbj\|BAF22751.1\| | | | | |
| | | | | Os08g0113100 [Oryza sativa Japonica Group] | | | | |
| | | | | &gt:gi\|125601970\|gb\|EAZ41295.1\| | | | | |
| | | | | hypothetical protein OsJ_25803 | | | | |
| | | | | [Oryza sativa Japonica Group] | | | | |
| | | | | &gt:gi\|215687214\|dbj\|BAG91779.1\| | | | | |
| | | | | unnamed protein product | | | | |
| | | | | [Oryza sativa Japonica Group] | | | | |
| | | | | &gt:gi\|215708813\|dbj\|BAG94082.1\| | | | | |
| | | | | unnamed protein product | | | | |
| | | | | [Oryza sativa Japonica Group] | | | | |
| | | EAZ05375 | 54362548 | hypothetical protein OsI_27579 | 0.901493 | Oryza sativa Indica Group | 3598 | |
| | | | | [Oryza sativa Indica Group] | | | | |
| | | BAK06949 | 326513417 | predicted protein | 0.862687 | Hordeum vulgare subsp. vulgare | 3599 | 4909 |
| | | | | [Hordeum vulgare subsp. vulgare] | | | | |
| | 333-352 | XP_002467133 | 242039476 | hypothetical protein SORBIDRAFT_01g020150 | 1 | Sorghum bicolor | 3600 | 4910 |
| | | | | [Sorghum bicolor] | | | | |
| | | | | &gt:gi\|241920987\|gb\|EER94131.1\| | | | | |
| | | | | hypothetical protein SORBIDRAFT_01g020150 | | | | |
| | | | | [Sorghum bicolor] | | | | |
| | | ACN29136 | 223950104 | unknown [Zea mays] | 0.958874 | Zea mays | 3601 | 4911 |
| | | NP_001064764 | 115482341 | Os10g0457600 [Oryza sativa Japonica Group] | 0.904762 | Oryza sativa Japonica Group | 3602 | 4912 |
| | | | | &gt:gi\|14140293\|gb\|AAK54299.1\|AC034258_17 | | | | |
| | | | | putative thiolase [Oryza sativa Japonica Group] | | | | |
| | | | | &gt:gi\|31432470\|gb\|AAP54100.1\| | | | | |
| | | | | 3-ketoacyl-CoA thiolase 2, peroxisomal | | | | |
| | | | | precursor, putative, expressed | | | | |
| | | | | [Oryza sativa Japonica Group] | | | | |
| | | | | &gt:gi\|113639373\|dbj\|BAF26678.1\| | | | | |
| | | | | Os10g0457600 [Oryza sativa Japonica Group] | | | | |
| | | | | &gt:gi\|125575033\|gb\|EAZ16317.1\| | | | | |
| | | | | hypothetical protein OsJ_31778 | | | | |
| | | | | [Oryza sativa Japonica Group] | | | | |
| | | | | &gt:gi\|215704141\|dbj\|BAG92981.1\| | | | | |
| | | | | unnamed protein product | | | | |
| | | | | [Oryza sativa Japonica Group] | | | | |
| | | EEC67095 | 54362548 | hypothetical protein OsI_33888 | 0.904762 | Oryza sativa Indica Group | 3603 | |
| | | | | [Oryza sativa Indica Group] | | | | |
| | | XP_002285653 | 225433423 | PREDICTED: hypothetical protein isoform 1 | 0.772727 | Vitis vinifera | 3604 | 4913 |
| | | | | [Vitis vinifera] | | | | |
| | | | | &gt:gi\|297741919\|emb\|CBI33354.3\| | | | | |
| | | | | unnamed protein product | | | | |
| | | | | [Vitis vinifera] | | | | |
| | | CAN81585 | 147866528 | hypothetical protein VITISV_023191 | 0.772727 | Vitis vinifera | 3605 | |
| | | | | [Vitis vinifera] | | | | |
| | | NP_001131193 | 212723031 | hypothetical protein LOC100192501 | 0.766234 | Zea mays | 3606 | 4914 |
| | | | | [Zea mays] | | | | |
| | | | | &gt:gi\|194690834\|gb\|ACF79501.1\| | | | | |
| | | | | unknown [Zea mays] | | | | |
| | | ACG36949 | 195634960 | 3-ketoacyl-CoA thiolase 2, peroxisomal | 0.764069 | Zea mays | 3607 | 4915 |
| | | | | precursor [Zea mays] | | | | |
| | | XP_002299284 | 224057613 | predicted protein [Populus trichocarpa] | 0.768398 | Populus trichocarpa | 3608 | 4916 |
| | | | | &gt:gi\|222846542\|gb\|EEE84089.1\| | | | | |
| | | | | predicted protein [Populus trichocarpa] | | | | |
| | | ACV70033 | 257815408 | 3-ketoacyl CoA thiolase 2 | 0.764069 | Petunia × hybrida | 3609 | 4917 |
| | | | | [Petunia × hybrida] | | | | |
| | 135-154 | XP_002437297 | 242093613 | hypothetical protein SORBIDRAFT_10g024430 | 1 | Sorghum bicolor | 3610 | 4918 |
| | | | | [Sorghum bicolor] | | | | |
| | | | | &gt:gi\|241915520\|gb\|EER88664.1\| | | | | |
| | | | | hypothetical protein SORBIDRAFT_10g024430 | | | | |
| | | | | [Sorghum bicolor] | | | | |
| | | ACR36817 | 238011563 | unknown [Zea mays] | 0.875 | Zea mays | 3611 | 4919 |
| | | NP_001147256 | 226507503 | LOC100280864 [Zea mays] | 0.871711 | Zea mays | 3612 | 4920 |
| | | | | &gt:gi\|195609146\|gb\|ACG26403.1\| | | | | |
| | | | | bZIP transcription factor protein | | | | |
| | | | | [Zea mays] | | | | |
| | 348-367 | XP_002437473 | 242093965 | hypothetical protein SORBIDRAFT_10g027790 | 1 | Sorghum bicolor | 3613 | 4921 |
| | | | | [Sorghum bicolor] | | | | |
| | | | | &gt:gi\|241915696\|gb\|EER88840.1\| | | | | |
| | | | | hypothetical protein SORBIDRAFT_10g027790 | | | | |
| | | | | [Sorghum bicolor] | | | | |
| | | NP_001058399 | 115469599 | Os06g0685700 [Oryza sativa Japonica Group] | 0.858956 | Oryza sativa Japonica Group | 3614 | 4922 |
| | | | | &gt:gi\|75253259\|sp\|Q653H7.1\|ARFR_ORYSJ | | | | |
| | | | | RecName: Full = Auxin response factor 18; | | | | |
| | | | | AltName: Full = OsARF10 | | | | |
| | | | | &gt:gi\|52076670\|dbj\|BAD45570.1\| | | | | |
| | | | | putative auxin response factor 10 | | | | |
| | | | | [Oryza sativa Japonica Group] | | | | |
| | | | | &gt:gi\|52077007\|dbj\|BAD46040.1\| | | | | |
| | | | | putative auxin response factor 10 | | | | |
| | | | | [Oryza sativa Japonica Group] | | | | |
| | | | | &gt:gi\|113596439\|dbj\|BAF20313.1\| | | | | |
| | | | | Os06g0685700 [Oryza sativa Japonica Group] | | | | |
| | | | | &gt:gi\|215713413\|dbj\|BAG94550.1\| | | | | |
| | | | | unnamed protein product | | | | |
| | | | | [Oryza sativa Japonica Group] | | | | |
| | | BAB85919 | 19352050 | auxin response factor 10 | 0.857546 | Oryza sativa | 3615 | 4923 |
| | | | | [Oryza sativa] | | | | |
| | | EEC81202 | 54362548 | hypothetical protein OsI_24228 | 0.722144 | Oryza sativa Indica Group | 3616 | |
| | | | | [Oryza sativa Indica Group] | | | | |
| | | EEE66240 | 54398660 | hypothetical protein OsJ_22412 | 0.77292 | Oryza sativa Japonica Group | 3617 | |
| | | | | [Oryza sativa Japonica Group] | | | | |
| | 85-104 | BAD12057 | 44885915 | plastidic glutamine synthetase | 1 | Phragmites australis | 3618 | 4924 |
| | | | | [Phragmites australis] | | | | |
| | | | | &gt:gi\|44885918\|dbj\|BAD12058.1\| | | | | |
| | | | | plastidic glutamine synthetase | | | | |
| | | | | [Phragmites australis] | | | | |
| | | NP_001054133 | 115461065 | Os04g0659100 [Oryza sativa Japonica Group] | 0.93007 | Oryza sativa Japonica Group | 3619 | 4925 |
| | | | | &gt:gi\|121343\|sp\|P14655.1\|GLNA2_ORYSJ | | | | |
| | | | | RecName: Full = Glutamine synthetase, chloroplastic; | | | | |
| | | | | AltName: Full = Glutamate--ammonia ligase; | | | | |
| | | | | AltName: Full = OsGS2; | | | | |
| | | | | Short = GS2; Flags: Precursor | | | | |
| | | | | &gt:gi\|20370\|emb\|CAA32462.1\| | | | | |
| | | | | unnamed protein product [Oryza sativa] | | | | |
| | | | | &gt:gi\|38345192\|emb\|CAE02885.2\| | | | | |
| | | | | OSJNBa0015K02.2 [Oryza sativa Japonica Group] | | | | |
| | | | | &gt:gi\|38346409\|emb\|CAE54574.1\| | | | | |
| | | | | OSJNBa0011F23.5 [Oryza sativa Japonica Group] | | | | |
| | | | | &gt:gi\|113565704\|dbj\|BAF16047.1\| | | | | |
| | | | | Os04g0659100 [Oryza sativa Japonica Group] | | | | |
| | | | | &gt:gi\|116310855\|emb\|CAH67797.1\| | | | | |
| | | | | OSIGBa0132E09-OSIGBa0108L24.11 | | | | |
| | | | | [Oryza sativa Indica Group] | | | | |
| | | | | &gt:gi\|218195744\|gb\|EEC78171.1\| | | | | |
| | | | | hypothetical protein OsI_17756 | | | | |
| | | | | [Oryza sativa Indica Group] | | | | |
| | | | | &gt:gi\|222629702\|gb\|EEE61834.1\| | | | | |
| | | | | hypothetical protein OsJ_16481 | | | | |
| | | | | [Oryza sativa Japonica Group] | | | | |
| | | BAD12059 | 44885919 | plastidic glutamine synthetase | 0.913753 | Phragmites australis | 3620 | 4926 |
| | | | | [Phragmites australis] | | | | |
| | | AAZ30062 | 71362639 | plastid glutamine synthetase isoform GS2c | 0.864802 | Triticum aestivum | 3621 | 4927 |
| | | | | [Triticum aestivum] | | | | |
| | | | | &gt:gi\|73672739\|gb\|AAZ80474.1\| GS2 | | | | |
| | | | | [Triticum aestivum] | | | | |
| | | | | &gt:gi\|251832981\|gb\|ACT22493.1\| | | | | |
| | | | | plastid glutamine synthetase 2 | | | | |
| | | | | [Triticum aestivum] | | | | |
| | | | | &gt:gi\|251832984\|gb\|ACT22495.1\| | | | | |
| | | | | plastid glutamine synthetase 2 | | | | |
| | | | | [Triticum aestivum] | | | | |
| | | | | &gt:gi\|251832990\|gb\|ACT22498.1\| | | | | |
| | | | | plastid glutamine synthetase 2 | | | | |
| | | | | [Triticum aestivum] | | | | |
| | | | | &gt:gi\|334855519\|gb\|AEH16638.1\| | | | | |
| | | | | glutamine synthetase | | | | |
| | | | | [Triticum aestivum] | | | | |
| | | BAJ91545 | 326509256 | predicted protein | 0.864802 | Hordeum vulgare subsp. vulgare | 3622 | 4928 |
| | | | | [Hordeum vulgare subsp. vulgare] | | | | |
| | | ACT22496 | 251832985 | plastid glutamine synthetase 2 | 0.862471 | Triticum aestivum | 3623 | 4929 |
| | | | | [Triticum aestivum] | | | | |
| | | | | &gt:gi\|251832988\|gb\|ACT22497.1\| | | | | |
| | | | | plastid glutamine synthetase 2 | | | | |
| | | | | [Triticum aestivum] | | | | |
| | | ACT22500 | 251832991 | plastid glutamine synthetase 2 | 0.862471 | Triticum aestivum | 3624 | 4930 |
| | | | | [Triticum aestivum] | | | | |
| | | CAA34131 | 18985 | unnamed protein product | 0.862471 | Hordeum vulgare subsp. vulgare | 3625 | 4931 |
| | | | | [Hordeum vulgare subsp. vulgare] | | | | |
| | | BAJ95492 | 326505641 | predicted protein | 0.86014 | Hordeum vulgare subsp. vulgare | 3626 | 4932 |
| | | | | [Hordeum vulgare subsp. vulgare] | | | | |
| | | AAL87183 | 19387261 | putative precursor chloroplastic glutamine | 0.902098 | Oryza sativa Japonica Group | 3627 | |
| | | | | synthetase [Oryza sativa Japonica Group] | | | | |
| | 252-271 | NP_001182863 | 308080633 | hypothetical protein LOC100501125 | 1 | Zea mays | 3628 | 4933 |
| | | | | [Zea mays] | | | | |
| | | | | &gt:gi\|238007838\|gb\|ACR34954.1\| | | | | |
| | | | | unknown [Zea mays] | | | | |
| | | AAK28346 | 13506811 | receptor-like protein kinase 1 [Zea mays] | 0.871329 | Zea mays | 3629 | 4934 |
| | | XP_002445874 | 242082210 | hypothetical protein SORBIDRAFT_07g027220 | 0.815385 | Sorghum bicolor | 3630 | 4935 |
| | | | | [Sorghum bicolor] | | | | |
| | | | | &gt:gi\|241942224\|gb\|EES15369.1\| | | | | |
| | | | | hypothetical protein SORBIDRAFT_07g027220 | | | | |
| | | | | [Sorghum bicolor] | | | | |
| | 888-907 | ACG36535 | 195629787 | fructokinase-2 [Zea mays] | 1 | Zea mays | 3631 | 4936 |
| | | NP_001060837 | 115474480 | Os08g0113100 [Oryza sativa Japonica Group] | 0.901493 | Oryza sativa Japonica Group | 3632 | 4937 |
| | | | | &gt:gi\|122234591\|sp\|QOJ8G4.1\|SCRK2_ORYSJ | | | | |
| | | | | RecName: Full = Fructokinase-2; | | | | |
| | | | | AltName: Full = Fructokinase II; | | | | |
| | | | | AltName: Full = OsFKII | | | | |
| | | | | &gt:gi\|158513662\|sp\|A2YQL4.2\|SCRK2_ORYSI | | | | |
| | | | | RecName: Full = Fructokinase-2; | | | | |
| | | | | AltName: Full = Fructokinase II; | | | | |
| | | | | AltName: Full = OsFKII | | | | |
| | | | | &gt:gi\|16566704\|gb\|AAL26573.1\|AF429947_1 | | | | |
| | | | | putative fructokinase II [Oryza sativa] | | | | |
| | | | | &gt:gi\|32352126\|dbj\|BAC78556.1\| | | | | |
| | | | | fructokinase [Oryza sativa Japonica Group] | | | | |
| | | | | &gt:gi\|42408363\|dbj\|BAD09515.1\| | | | | |
| | | | | putative fructokinase | | | | |
| | | | | [Oryza sativa Japonica Group] | | | | |
| | | | | &gt:gi\|113622806\|dbj\|BAF22751.1\| | | | | |
| | | | | Os08g0113100 [Oryza sativa Japonica Group] | | | | |
| | | | | &gt:gi\|125601970\|gb\|EAZ41295.1\| | | | | |
| | | | | hypothetical protein OsJ_25803 | | | | |
| | | | | [Oryza sativa Japonica Group] | | | | |
| | | | | &gt:gi\|215687214\|dbj\|BAG91779.1\| | | | | |
| | | | | unnamed protein product | | | | |
| | | | | [Oryza sativa Japonica Group] | | | | |
| | | | | &gt:gi\|215708813\|dbj\|BAG94082.1\| | | | | |
| | | | | unnamed protein product | | | | |
| | | | | [Oryza sativa Japonica Group] | | | | |
| | 140-159 | ACG30481 | 195617301 | hypothetical protein [Zea mays] | 1 | Zea mays | 3633 | 4938 |
| | | ACG37907 | 195636877 | hypothetical protein [Zea mays] | 0.931034 | Zea mays | 3634 | 4939 |
| | | ACF79048 | 194689927 | unknown [Zea mays] | 0.977011 | Zea mays | 3635 | 4940 |
| | | ACG29425 | 195615189 | hypothetical protein [Zea mays] | 0.95977 | Zea mays | 3636 | 4941 |
| | | | | &gt:gi\|195649199\|gb\|ACG44067.1\| | | | | |
| | | | | hypothetical protein [Zea mays] | | | | |
| | | NP_001144199 | 226501971 | hypothetical protein LOC100277059 | 0.890805 | Zea mays | 3637 | 4942 |
| | | | | [Zea mays] | | | | |
| | | | | &gt:gi\|195638304\|gb\|ACG38620.1\| | | | | |
| | | | | hypothetical protein [Zea mays] | | | | |
| | | EEC79730 | 54362548 | hypothetical protein OsI_21063 | 0.787356 | Oryza sativa Indica Group | 3638 | |
| | | | | [Oryza sativa Indica Group] | | | | |
| | | XP_002441542 | 242091418 | hypothetical protein SORBIDRAFT_09g029060 | 0.827586 | Sorghum bicolor | 3639 | 4943 |
| | | | | [Sorghum bicolor] | | | | |
| | | | | &gt:gi\|241946827\|gb\|EES19972.1\| | | | | |
| | | | | hypothetical protein SORBIDRAFT_09g029060 | | | | |
| | | | | [Sorghum bicolor] | | | | |
| | | NP_001056374 | 115465548 | Os05g0571400 [Oryza sativa Japonica Group] | 0.747126 | Oryza sativa Japonica Group | 3640 | 4944 |
| | | | | &gt:gi\|52353529\|gb\|AAU44095.1\| | | | | |
| | | | | unknown protein | | | | |
| | | | | [Oryza sativa Japonica Group] | | | | |
| | | | | &gt:gi\|113579925\|dbj\|BAF18288.1\| | | | | |
| | | | | Os05g0571400 [Oryza sativa Japonica Group] | | | | |
| | | | | &gt:gi\|215692864\|dbj\|BAG88284.1\| | | | | |
| | | | | unnamed protein product | | | | |
| | | | | [Oryza sativa Japonica Group] | | | | |
| | | BAK01837 | 326489712 | predicted protein | 0.729885 | Hordeum vulgare subsp. vulgare | 3641 | 4945 |
| | | | | [Hordeum vulgare subsp. vulgare] | | | | |
| | | | | &gt:gi\|326513576\|dbj\|BAJ87807.1\| | | | | |
| | | | | predicted protein | | | | |
| | | | | [Hordeum vulgare subsp. vulgare] | | | | |
| | 154-173 | ACN35719 | 224033286 | unknown [Zea mays] | 1 | Zea mays | 3642 | 4946 |
| | 1182-1201 | XP_002445912 | 242082286 | hypothetical protein SORBIDRAFT_07g027930 | 1 | Sorghum bicolor | 3643 | 4947 |
| | | | | [Sorghum bicolor] | | | | |
| | | | | &gt:gi\|241942262\|gb\|EES15407.1\| | | | | |
| | | | | hypothetical protein SORBIDRAFT_07g027930 | | | | |
| | | | | [Sorghum bicolor] | | | | |
| | | NP_001148257 | 226530356 | protein kinase [Zea mays] | 0.853273 | Zea mays | 3644 | 4948 |
| | | | | &gt:gi\|195616992\|gb\|ACG30326.1\| | | | | |
| | | | | protein kinase [Zea mays] | | | | |
| | | | | &gt:gi\|223974019\|gb\|ACN31197.1\| | | | | |
| | | | | unknown [Zea mays] | | | | |
| | 1224-1243 | NP_001130351 | 212274554 | hypothetical protein LOC100191446 | 1 | Zea mays | 3645 | 4949 |
| | | | | [Zea mays] | | | | |
| | | | | &gt:gi\|194688912\|gb\|ACF78540.1\| | | | | |
| | | | | unknown [Zea mays] | | | | |
| | | NP_001168165 | 293331166 | hypothetical protein LOC100381917 | 0.883562 | Zea mays | 3646 | 4950 |
| | | | | [Zea mays] | | | | |
| | | | | &gt:gi\|223946413\|gb\|ACN27290.1\| | | | | |
| | | | | unknown [Zea mays] | | | | |
| | | XP_002460448 | 242045153 | hypothetical protein SORBIDRAFT_02g028250 | 0.849315 | Sorghum bicolor | 3647 | 4951 |
| | | | | [Sorghum bicolor] | | | | |
| | | | | &gt:gi\|241923825\|gb\|EER96969.1\| | | | | |
| | | | | hypothetical protein SORBIDRAFT_02g028250 | | | | |
| | | | | [Sorghum bicolor] | | | | |
| | | BAJ96874 | 326521341 | predicted protein | 0.719178 | Hordeum vulgare subsp. vulgare | 3648 | 4952 |
| | | | | [Hordeum vulgare subsp. vulgare] | | | | |
| | 621-640 | NP_001132310 | 212723631 | hypothetical protein LOC100193752 | 1 | Zea mays | 3649 | 4953 |
| | | | | [Zea mays] | | | | |
| | | | | &gt:gi\|194694046\|gb\|ACF81107.1\| | | | | |
| | | | | unknown [Zea mays] | | | | |
| | | NP_001150692 | 226531587 | transmembrane receptor [Zea mays] | 0.861842 | Zea mays | 3650 | 4954 |
| | | | | &gt:gi\|195641100\|gb\|ACG40018.1\| | | | | |
| | | | | transmembrane receptor [Zea mays] | | | | |
| | | NP_001183230 | 308079992 | hypothetical protein LOC100501618 | 0.785088 | Zea mays | 3651 | 4955 |
| | | | | [Zea mays] | | | | |
| | | | | &gt:gi\|238010202\|gb\|ACR36136.1\| | | | | |
| | | | | unknown [Zea mays] | | | | |
| | | XP_002439928 | 242088190 | hypothetical protein SORBIDRAFT_09g022750 | 0.791667 | Sorghum bicolor | 3652 | 4956 |
| | | | | [Sorghum bicolor] | | | | |
| | | | | &gt:gi\|241945213\|gb\|EES18358.1\| | | | | |
| | | | | hypothetical protein SORBIDRAFT_09g022750 | | | | |
| | | | | [Sorghum bicolor] | | | | |
| | 315-334 | NP_001147345 | 226510092 | AP2 domain containing protein [Zea mays] | 1 | Zea mays | 3653 | 4957 |
| | | | | &gt:gi\|195610330\|gb\|ACG26995.1\| | | | | |
| | | | | AP2 domain containing protein [Zea mays] | | | | |
| | | XP_002452378 | 242062177 | hypothetical protein SORBIDRAFT_04g024690 | 0.884354 | Sorghum bicolor | 3654 | 4958 |
| | | | | [Sorghum bicolor] | | | | |
| | | | | &gt:gi\|241932209\|gb\|EES05354.1\| | | | | |
| | | | | hypothetical protein SORBIDRAFT_04g024690 | | | | |
| | | | | [Sorghum bicolor] | | | | |
| | 1284-1303 | XP_002453161 | 242063743 | hypothetical protein SORBIDRAFT_04g001020 | 1 | Sorghum bicolor | 3655 | 4959 |
| | | | | [Sorghum bicolor] | | | | |
| | | | | &gt:gi\|241932992\|gb\|EES06137.1\| | | | | |
| | | | | hypothetical protein SORBIDRAFT_04g001020 | | | | |
| | | | | [Sorghum bicolor] | | | | |
| | | NP_001132593 | 212722739 | hypothetical protein LOC100194065 | 0.852332 | Zea mays | 3656 | 4960 |
| | | | | [Zea mays] | | | | |
| | | | | &gt:gi\|194694848\|gb\|ACF81508.1\| | | | | |
| | | | | unknown [Zea mays] | | | | |
| | | XP_002445672 | 242081806 | hypothetical protein SORBIDRAFT_07g023970 | 0.725389 | Sorghum bicolor | 3657 | 4961 |
| | | | | [Sorghum bicolor] | | | | |
| | | | | &gt:gi\|241942022\|gb\|EES15167.1\| | | | | |
| | | | | hypothetical protein SORBIDRAFT_07g023970 | | | | |
| | | | | [Sorghum bicolor] | | | | |
| | | EAZ13316 | 54398660 | hypothetical protein OsJ_03238 | 0.722798 | Oryza sativa Japonica Group | 3658 | |
| | | | | [Oryza sativa Japonica Group] | | | | |
| | | BAD13218 | 42409221 | putative MtN21 | 0.722798 | Oryza sativa Japonica Group | 3659 | 4962 |
| | | | | [Oryza sativa Japonica Group] | | | | |
| | | NP_001172775 | 297720824 | Os02g0114050 [Oryza sativa Japonica Group] | 0.733161 | Oryza sativa Japonica Group | 3660 | 4963 |
| | | | | &gt:gi\|41052583\|dbj\|BAD07925.1\| | | | | |
| | | | | putative nodulin MIN21 | | | | |
| | | | | [Oryza sativa Japonica Group] | | | | |
| | | | | &gt:gi\|41052778\|dbj\|BAD07647.1\| | | | | |
| | | | | putative nodulin MIN21 | | | | |
| | | | | [Oryza sativa Japonica Group] | | | | |
| | | | | &gt:gi\|125580551\|gb\|EAZ21482.1\| | | | | |
| | | | | hypothetical protein OsJ_05091 | | | | |
| | | | | [Oryza sativa Japonica Group] | | | | |
| | | | | &gt:gi\|218189915\|gb\|EEC72342.1\| | | | | |
| | | | | hypothetical protein OsI_05563 | | | | |
| | | | | [Oryza sativa Indica Group] | | | | |
| | | | | &gt:gi\|255670546\|dbj\|BAH91504.1\| | | | | |
| | | | | Os02g0114050 [Oryza sativa Japonica Group] | | | | |
| | | EAZ08018 | 54362548 | hypothetical protein OsI_30283 | 0.720207 | Oryza sativa Indica Group | 3661 | |
| | | | | [Oryza sativa Indica Group] | | | | |
| | 760-779 | XP_002446967 | 242074061 | hypothetical protein SORBIDRAFT_06g026000 | 1 | Sorghum bicolor | 3662 | 4964 |
| | | | | [Sorghum bicolor] | | | | |
| | | | | &gt:gi\|241938150\|gb\|EES11295.1\| | | | | |
| | | | | hypothetical protein SORBIDRAFT_06g026000 | | | | |
| | | | | [Sorghum bicolor] | | | | |
| | 621-640 | NP_001104903 | 162460262 | protein terminal ear1 [Zea mays] | 1 | Zea mays | 3663 | 4965 |
| | | | | &gt:gi\|75318510\|sp\|O65001.1\|TE1_MAIZE | | | | |
| | | | | RecName: Full = Protein terminal ear1 | | | | |
| | | | | &gt:gi\|13540340\|gb\|AAK29419.1\|AF348319_1 | | | | |
| | | | | TERMINAL EAR1 [Zea mays] | | | | |
| | | | | &gt:gi\|3153237\|gb\|AAC39463.1\| | | | | |
| | | | | terminal ear1 [Zea mays] | | | | |
| | | XP_002456810 | 242055328 | hypothetical protein SORBIDRAFT_03g043230 | 0.858232 | Sorghum bicolor | 3664 | 4966 |
| | | | | [Sorghum bicolor] | | | | |
| | | | | &gt:gi\|241928785\|gb\|EES01930.1\| | | | | |
| | | | | hypothetical protein SORBIDRAFT_03g043230 | | | | |
| | | | | [Sorghum bicolor] | | | | |
| | 84-103 | XP_002437444 | 242093907 | hypothetical protein SORBIDRAFT_10g027180 | 1 | Sorghum bicolor | 3665 | 4967 |
| | | | | [Sorghum bicolor] | | | | |
| | | | | &gt:gi\|241915667\|gb\|EER88811.1\| | | | | |
| | | | | hypothetical protein SORBIDRAFT_10g027180 | | | | |
| | | | | [Sorghum bicolor] | | | | |
| | | NP_001151503 | 226492640 | rab geranylgeranyl transferase like protein | 0.935065 | Zea mays | 3666 | 4968 |
| | | | | [Zea mays] | | | | |
| | | | | &gt:gi\|195647272\|gb\|ACG43104.1\| | | | | |
| | | | | rab geranylgeranyl transferase like protein | | | | |
| | | | | [Zea mays] | | | | |
| | | BAJ96308 | 326514641 | predicted protein | 0.767677 | Hordeum vulgare subsp. vulgare | 3667 | 4969 |
| | | | | [Hordeum vulgare subsp. vulgare] | | | | |
| | | BAJ94589 | 326496253 | predicted protein | 0.766234 | Hordeum vulgare subsp. vulgare | 3668 | 4970 |
| | | | | [Hordeum vulgare subsp. vulgare] | | | | |
| | | EEC81176 | 54362548 | hypothetical protein OsI_24155 | 0.774892 | Oryza sativa Indica Group | 3669 | |
| | | | | [Oryza sativa Indica Group] | | | | |
| | | NP_001058357 | 115469515 | Os06g0677500 [Oryza sativa Japonica Group] | 0.772006 | Oryza sativa Japonica Group | 3670 | 4971 |
| | | | | &gt:gi\|52076622\|dbj\|BAD45523.1\| | | | | |
| | | | | putative Rab geranylgeranyl transferase, | | | | |
| | | | | a subunit [Oryza sativa Japonica Group] | | | | |
| | | | | &gt:gi\|52076908\|dbj\|BAD45920.1\| | | | | |
| | | | | putative Rab geranylgeranyl transferase, | | | | |
| | | | | a subunit [Oryza sativa Japonica Group] | | | | |
| | | | | &gt:gi\|113596397\|dbj\|BAF20271.1\| | | | | |
| | | | | Os06g0677500 [Oryza sativa Japonica Group] | | | | |
| | | | | &gt:gi\|125598230\|gb\|EAZ38010.1\| | | | | |
| | | | | hypothetical protein OsJ_22355 | | | | |
| | | | | [Oryza sativa Japonica Group] | | | | |
| | 2063-2082 | XP_002466382 | 242037974 | hypothetical protein SORBIDRAFT_01g006780 | 1 | Sorghum bicolor | 3671 | 4972 |
| | | | | [Sorghum bicolor] | | | | |
| | | | | &gt:gi\|241920236\|gb\|EER93380.1\| | | | | |
| | | | | hypothetical protein SORBIDRAFT_01g006780 | | | | |
| | | | | [Sorghum bicolor] | | | | |
| | | NP_001147990 | 226508033 | lectin-like receptor kinase 7 [Zea mays] | 0.898975 | Zea mays | 3672 | 4973 |
| | | | | &gt:gi\|195615004\|gb\|ACG29332.1\| | | | | |
| | | | | lectin-like receptor kinase 7 [Zea mays] | | | | |
| | | BAJ98654 | 326498452 | predicted protein | 0.778917 | Hordeum vulgare subsp. vulgare | 3673 | 4974 |
| | | | | [Hordeum vulgare subsp. vulgare] | | | | |
| | | EAY91999 | 54362548 | hypothetical protein OsI_13689 | 0.786237 | Oryza sativa Indica Group | 3674 | |
| | | | | [Oryza sativa Indica Group] | | | | |
| | | ABF99098 | 108705663 | lectin receptor kinase 7, putative, | 0.733529 | Oryza sativa Japonica Group | 3675 | |
| | | | | expressed [Oryza sativa Japonica Group] | | | | |
| | | EAZ28732 | 54398660 | hypothetical protein OsJ_12752 | 0.733529 | Oryza sativa Japonica Group | 3676 | |
| | | | | [Oryza sativa Japonica Group] | | | | |
| | 318-337 | NP_001150139 | 226506903 | 4-methyl-5-thiazole monophosphate biosynthesis | 1 | Zea mays | 3677 | 4975 |
| | | | | protein [Zea mays] | | | | |
| | | | | &gt:gi\|195637064\|gb\|ACG38000.1\| | | | | |
| | | | | 4-methyl-5-thiazole monophosphate biosynthesis | | | | |
| | | | | protein [Zea mays] | | | | |
| | | NP_001130715 | 212274550 | hypothetical protein LOC100191819 | 1.040921 | Zea mays | 3678 | 4976 |
| | | | | [Zea mays] | | | | |
| | | | | &gt:gi\|194689918\|gb\|ACF79043.1\| | | | | |
| | | | | unknown [Zea mays] | | | | |
| | | XP_002457130 | 242055968 | hypothetical protein SORBIDRAFT_03g001750 | 0.879795 | Sorghum bicolor | 3679 | 4977 |
| | | | | [Sorghum bicolor] | | | | |
| | | | | &gt:gi\|241929105\|gb\|EES02250.1\| | | | | |
| | | | | hypothetical protein SORBIDRAFT_03g001750 | | | | |
| | | | | [Sorghum bicolor] | | | | |
| | | XP_002457129 | 242055966 | hypothetical protein SORBIDRAFT_03g001740 | 0.713555 | Sorghum bicolor | 3680 | 4978 |
| | | | | [Sorghum bicolor] | | | | |
| | | | | &gt:gi\|241929104\|gb\|EES02249.1\| | | | | |
| | | | | hypothetical protein SORBIDRAFT_03g001740 | | | | |
| | | | | [Sorghum bicolor] | | | | |
| | 247-266 | ACF84329 | 194700489 | unknown [Zea mays] | 1 | Zea mays | 3681 | 4979 |
| | | NP_001143181 | 226491793 | hypothetical protein LOC100275681 | 0.983505 | Zea mays | 3682 | 4980 |
| | | | | [Zea mays] | | | | |
| | | | | &gt:gi\|195615484\|gb\|ACG29572.1\| | | | | |
| | | | | hypothetical protein [Zea mays] | | | | |
| | | XP_002439532 | 242087398 | hypothetical protein SORBIDRAFT_09g010410 | 0.775258 | Sorghum bicolor | 3683 | 4981 |
| | | | | [Sorghum bicolor] | | | | |
| | | | | &gt:gi\|241944817\|gb\|EES17962.1\| | | | | |
| | | | | hypothetical protein SORBIDRAFT_09g010410 | | | | |
| | | | | [Sorghum bicolor] | | | | |
| | 1371-1390 | XP_002463817 | 242032844 | hypothetical protein SORBIDRAFT_01g006730 | 1 | Sorghum bicolor | 3684 | 4982 |
| | | | | [Sorghum bicolor] | | | | |
| | | | | &gt:gi\|241917671\|gb\|EER90815.1\| | | | | |
| | | | | hypothetical protein SORBIDRAFT_01g006730 | | | | |
| | | | | [Sorghum bicolor] | | | | |
| | | ACF82838 | 238908755 | unknown [Zea mays] | 0.96789 | Zea mays | 3685 | 4983 |
| | | ACG44256 | 195649576 | hypothetical protein [Zea mays] | 0.965596 | Zea mays | 3686 | 4984 |
| | | NP_001141500 | 226490864 | hypothetical protein LOC100273612 | 0.933486 | Zea mays | 3687 | 4985 |
| | | | | [Zea mays] | | | | |
| | | | | &gt:gi\|194704836\|gb\|ACF86502.1\| | | | | |
| | | | | unknown [Zea mays] | | | | |
| | | | | &gt:gi\|194707468\|gb\|ACF87818.1\| | | | | |
| | | | | unknown [Zea mays] | | | | |
| | | EAY92004 | 54362548 | hypothetical protein OsI_13693 | 0.848624 | Oryza sativa Indica Group | 3688 | |
| | | | | [Oryza sativa Indica Group] | | | | |
| | | EAZ28736 | 54398660 | hypothetical protein OsJ_12756 | 0.848624 | Oryza sativa Japonica Group | 3689 | |
| | | | | [Oryza sativa Japonica Group] | | | | |
| | | NP_001051414 | 115455626 | Os03g0773000 [Oryza sativa Japonica Group] | 0.84633 | Oryza sativa Japonica Group | 3690 | 4986 |
| | | | | &gt:gi\|31745235\|gb\|AAP68895.1\| | | | | |
| | | | | unknown protein | | | | |
| | | | | [Oryza sativa Japonica Group] | | | | |
| | | | | &gt:gi\|108711308\|gb\|ABF99103.1\| | | | | |
| | | | | expressed protein | | | | |
| | | | | [Oryza sativa Japonica Group] | | | | |
| | | | | &gt:gi\|113549885\|dbj\|BAF13328.1\| | | | | |
| | | | | Os03g0773000 [Oryza sativa Japonica Group] | | | | |
| | | AAP68894 | 28269488 | unknown protein | 0.768349 | Oryza sativa Japonica Group | 3691 | 4987 |
| | | | | [Oryza sativa Japonica Group] | | | | |
| | | BAJ89011 | 326527918 | predicted protein | 0.729358 | Hordeum vulgare subsp. vulgare | 3692 | 4988 |
| | | | | [Hordeum vulgare subsp. vulgare] | | | | |
| | | NP_001058837 | 115470476 | Os07g0133500 [Oryza sativa Japonica Group] | 0.722477 | Oryza sativa Japonica Group | 3693 | 4989 |
| | | | | &gt:gi\|32352156\|dbj\|BAC78571.1\| | | | | |
| | | | | hypothetical protein | | | | |
| | | | | [Oryza sativa Japonica Group] | | | | |
| | | | | &gt:gi\|34393412\|dbj\|BAC82946.1\| | | | | |
| | | | | unknown protein | | | | |
| | | | | [Oryza sativa Japonica Group] | | | | |
| | | | | &gt:gi\|50509299\|dbj\|BAD30606.1\| | | | | |
| | | | | unknown protein | | | | |
| | | | | [Oryza sativa Japonica Group] | | | | |
| | | | | &gt:gi\|113610373\|dbj\|BAF20751.1\| | | | | |
| | | | | Os07g0133500 [Oryza sativa Japonica Group] | | | | |
| | | | | &gt:gi\|125599028\|gb\|EAZ38604.1\| | | | | |
| | | | | hypothetical protein OsJ_22992 | | | | |
| | | | | [Oryza sativa Japonica Group] | | | | |
| | | | | &gt:gi\|215741158\|dbj\|BAG97653.1\| | | | | |
| | | | | unnamed protein product | | | | |
| | | | | [Oryza sativa Japonica Group] | | | | |
| | 338-357 | XP_002465042 | 242035294 | hypothetical protein SORBIDRAFT_01g03 1090 | 1 | Sorghum bicolor | 3694 | 4990 |
| | | | | [Sorghum bicolor] | | | | |
| | | | | &gt:gi\|241918896\|gb\|EER92040.1\| | | | | |
| | | | | hypothetical protein SORBIDRAFT_01g03 1090 | | | | |
| | | | | [Sorghum bicolor] | | | | |
| | | ACG29187 | 195614713 | subtilisin-like protease precursor | 0.934211 | Zea mays | 3695 | 4991 |
| | | | | [Zea mays] | | | | |
| | | EAY79268 | 54362548 | hypothetical protein OsI_34383 | 0.878947 | Oryza sativa Indica Group | 3696 | |
| | | | | [Oryza sativa Indica Group] | | | | |
| | | NP_001065109 | 115483031 | Os10g0524600 [Oryza sativa Japonica Group] | 0.876316 | Oryza sativa Japonica Group | 3697 | 4992 |
| | | | | &gt:gi\|20146761\|gb\|AAM12497.1\|AC074232_24 | | | | |
| | | | | putative serine protease | | | | |
| | | | | [Oryza sativa Japonica Group] | | | | |
| | | | | &gt:gi\|27311277\|gb\|AAO00703.1\| | | | | |
| | | | | putative serine protease | | | | |
| | | | | [Oryza sativa Japonica Group] | | | | |
| | | | | &gt:gi\|31433153\|gb\|AAP54706.1\| | | | | |
| | | | | Subtilisin N-terminal Region family protein, | | | | |
| | | | | expressed [Oryza sativa Japonica Group] | | | | |
| | | | | &gt:gi\|113639718\|dbj\|BAF27023.1\| | | | | |
| | | | | Os10g0524600 [Oryza sativa Japonica Group] | | | | |
| | | | | &gt:gi\|125575456\|gb\|EAZ16740.1\| | | | | |
| | | | | hypothetical protein OsJ_32216 | | | | |
| | | | | [Oryza sativa Japonica Group] | | | | |
| | | | | &gt:gi\|215697336\|dbj\|BAG91330.1\| | | | | |
| | | | | unnamed protein product | | | | |
| | | | | [Oryza sativa Japonica Group] | | | | |
| | | NP_001048778 | 115450354 | Os03g0119300 [Oryza sativa Japonica Group] | 0.744737 | Oryza sativa Japonica Group | 3698 | 4993 |
| | | | | &gt:gi\|27452907\|gb\|AAO15291.1\| | | | | |
| | | | | Putative serine protease | | | | |
| | | | | [Oryza sativa Japonica Group] | | | | |
| | | | | &gt:gi\|108705882\|gb\|ABF93677.1\| | | | | |
| | | | | Subtilisin N-terminal Region family protein, | | | | |
| | | | | expressed [Oryza sativa Japonica Group] | | | | |
| | | | | &gt:gi\|113547249\|dbj\|BAF10692.1\| | | | | |
| | | | | Os03g0119300 | | | | |
| | | | | [Oryza sativa Japonica Group] | | | | |
| | | XP_002465976 | 242037162 | hypothetical protein SORBIDRAFT_01g049280 | 0.731579 | Sorghum bicolor | 3699 | 4994 |
| | | | | [Sorghum bicolor] | | | | |
| | | | | &gt:gi\|241919830\|gb\|EER92974.1\| | | | | |
| | | | | hypothetical protein SORBIDRAFT_01g049280 | | | | |
| | | | | [Sorghum bicolor] | | | | |
| | | BAK05599 | 326490998 | predicted protein | 0.728947 | Hordeum vulgare subsp. vulgare | 3700 | 4995 |
| | | | | [Hordeum vulgare subsp. vulgare] | | | | |
| | | | | &gt:gi\|326496769\|dbj\|BAJ98411.1\| | | | | |
| | | | | predicted protein | | | | |
| | | | | [Hordeum vulgare subsp. vulgare] | | | | |
| | | | | &gt:gi\|326497201\|dbj\|BAK02185.1\| | | | | |
| | | | | predicted protein | | | | |
| | | | | [Hordeum vulgare subsp. vulgare] | | | | |
| | | ACN30792 | 223973208 | unknown [Zea mays] | 0.715789 | Zea mays | 3701 | 4996 |
| | | NP_001148151 | 226498389 | xylem serine proteinase 1 | 0.714474 | Zea mays | 3702 | 4997 |
| | | | | [Zea mays] | | | | |
| | | | | &gt:gi\|195616146\|gb\|ACG29903.1\| | | | | |
| | | | | xylem serine proteinase 1 precursor | | | | |
| | | | | [Zea mays] | | | | |
| | 2007-2026 | XP_002465627 | 242036464 | hypothetical protein SORBIDRAFT_01g042530 | 1 | Sorghum bicolor | 3703 | 4998 |
| | | | | [Sorghum bicolor] | | | | |
| | | | | &gt:gi\|241919481\|gb\|EER92625.1\| | | | | |
| | | | | hypothetical protein SORBIDRAFT_01g042530 | | | | |
| | | | | [Sorghum bicolor] | | | | |
| | | NP_001159302 | 259490447 | hypothetical protein LOC100304394 | 0.919003 | Zea mays | 3704 | 4999 |
| | | | | [Zea mays] | | | | |
| | | | | &gt:gi\|223943285\|gb\|ACN25726.1\| | | | | |
| | | | | unknown [Zea mays] | | | | |
| | | NP_001049417 | 115451632 | Os03g0222100 [Oryza sativa Japonica Group] | 0.806854 | Oryza sativa Japonica Group | 3705 | 5000 |
| | | | | &gt:gi\|108706910\|gb\|ABF94705.1\| | | | | |
| | | | | MA3 domain-containing protein, putative, | | | | |
| | | | | expressed [Oryza sativa Japonica Group] | | | | |
| | | | | &gt:gi\|113547888\|dbj\|BAF11331.1\| | | | | |
| | | | | Os03g0222100 [Oryza sativa Japonica Group] | | | | |
| | | AAN05329 | 22417315 | Putative topoisomerase | 0.805296 | Oryza sativa Japonica Group | 3706 | 5001 |
| | | | | [Oryza sativa Japonica Group] | | | | |
| | | | | &gt:gi\|125542940\|gb\|EAY89079.1\| | | | | |
| | | | | hypothetical protein OsI_10565 | | | | |
| | | | | [Oryza sativa Indica Group] | | | | |
| | | BAK08048 | 326527546 | predicted protein | 0.816199 | Hordeum vulgare subsp. vulgare | 3707 | 5002 |
| | | | | [Hordeum vulgare subsp. vulgare] | | | | |
| | | EEE58613 | 54398660 | hypothetical protein OsJ_09961 | 0.772586 | Oryza sativa Japonica Group | 3708 | |
| | | | | [Oryza sativa Japonica Group] | | | | |
| | 924-943 | BAJ85289 | 326493655 | predicted protein | 1 | Hordeum vulgare subsp. vulgare | 3709 | 5003 |
| | | | | [Hordeum vulgare subsp. vulgare] | | | | |
| | | NP_001130482 | 212275084 | hypothetical protein LOC100191580 | 0.929688 | Zea mays | 3710 | 5004 |
| | | | | [Zea mays] | | | | |
| | | | | &gt:gi\|194689252\|gb\|ACF78710.1\| | | | | |
| | | | | unknown [Zea mays] | | | | |
| | | | | &gt:gi\|223972733\|gb\|ACN30554.1\| | | | | |
| | | | | unknown [Zea mays] | | | | |
| | | NP_001056670 | 115466141 | Os06g0128200 [Oryza sativa Japonica Group] | 0.904297 | Oryza sativa Japonica Group | 3711 | 5005 |
| | | | | &gt:gi\|75115092\|sp\|Q658I5.1\|LMBD1_ORYSJ | | | | |
| | | | | RecName: Full = LIMR family protein Os06g0128200 | | | | |
| | | | | &gt:gi\|52075611\|dbj\|BAD44782.1\| | | | | |
| | | | | LMBR1 integral membrane family protein-like | | | | |
| | | | | [Oryza sativa Japonica Group] | | | | |
| | | | | &gt:gi\|55296214\|dbj\|BAD67932.1\| | | | | |
| | | | | LMBR1 integral membrane family protein-like | | | | |
| | | | | [Oryza sativa Japonica Group] | | | | |
| | | | | &gt:gi\|113594710\|dbj\|BAF18584.1\| | | | | |
| | | | | Os06g0128200 [Oryza sativa Japonica Group] | | | | |
| | | | | &gt:gi\|215697147\|dbj\|BAG91141.1\| | | | | |
| | | | | unnamed protein product | | | | |
| | | | | [Oryza sativa Japonica Group] | | | | |
| | | | | &gt:gi\|218197487\|gb\|EEC79914.1\| | | | | |
| | | | | hypothetical protein OsI_21464 | | | | |
| | | | | [Oryza sativa Indica Group] | | | | |
| | | | | &gt:gi\|222634886\|gb\|EEE65018.1\| | | | | |
| | | | | hypothetical protein OsJ_19972 | | | | |
| | | | | [Oryza sativa Japonica Group] | | | | |
| | | XP_002873012 | 297810256 | LMBR1 integral membrane family protein | 0.802734 | Arabidopsis lyrata subsp. lyrata | 3712 | 5006 |
| | | | | [Arabidopsis lyrata subsp. lyrata] | | | | |
| | | | | &gt:gi\|297318849\|gb\|EFH49271.1\| | | | | |
| | | | | LMBR1 integral membrane family protein | | | | |
| | | | | [Arabidopsis lyrata subsp. lyrata] | | | | |
| | | XP_002528095 | 255574362 | conserved hypothetical protein [Ricinus communis] | 0.802734 | Ricinus communis | 3713 | 5007 |
| | | | | &gt:gi\|223532484\|gb\|EEF34274.1\| conserved | | | | |
| | | | | hypothetical protein [Ricinus communis] | | | | |
| | | XP_002882590 | 297829415 | hypothetical protein ARALYDRAFT_478196 | 0.806641 | Arabidopsis lyrata subsp. lyrata | 3714 | 5008 |
| | | | | [Arabidopsis lyrata subsp. lyrata] | | | | |
| | | | | &gt:gi\|297328430\|gb\|EFH58849.1\| | | | | |
| | | | | hypothetical protein ARALYDRAFT_478196 | | | | |
| | | | | [Arabidopsis lyrata subsp. lyrata] | | | | |
| | | NP_195766 | 30679270 | LMBR1-like membrane protein | 0.800781 | Arabidopsis thaliana | 3715 | 5009 |
| | | | | [Arabidopsis thaliana] | | | | |
| | | | | &gt:gi\|75181394\|sp\|Q9M028.1\|LMBD2_ARATH | | | | |
| | | | | RecName: Full = LIMR family protein At5g01460 | | | | |
| | | | | &gt:gi\|7320724\|emb\|CAB81929.1\| | | | | |
| | | | | putative protein [Arabidopsis thaliana] | | | | |
| | | | | &gt:gi\|18176296\|gb\|AAL60018.1\| | | | | |
| | | | | unknown protein [Arabidopsis thaliana] | | | | |
| | | | | &gt:gi\|20465353\|gb\|AAM20080.1\| | | | | |
| | | | | unknown protein [Arabidopsis thaliana] | | | | |
| | | | | &gt:gi\|332002964\|gb\|AED90347.1\| | | | | |
| | | | | LMBR1-like membrane protein | | | | |
| | | | | [Arabidopsis thaliana] | | | | |
| | | NP_566338 | 240255304 | LMBR1-like membrane protein | 0.804688 | Arabidopsis thaliana | 3716 | 5010 |
| | | | | [Arabidopsis thaliana] | | | | |
| | | | | &gt:gi\|226789815\|sp\|Q9SR93.2\|LMBD1_ARATH | | | | |
| | | | | RecName: Full = LIMR family protein At3g08930 | | | | |
| | | | | &gt:gi\|14334836\|gb\|AAK59596.1\| | | | | |
| | | | | unknown protein [Arabidopsis thaliana] | | | | |
| | | | | &gt:gi\|24417362\|gb\|AAN60291.1\| | | | | |
| | | | | unknown [Arabidopsis thaliana] | | | | |
| | | | | &gt:gi\|56550703\|gb\|AAV97805.1\| | | | | |
| | | | | At3g08930 [Arabidopsis thaliana] | | | | |
| | | | | &gt:gi\|332641175\|gb\|AEE74696.1\| | | | | |
| | | | | LMBR1-like membrane protein | | | | |
| | | | | [Arabidopsis thaliana] | | | | |
| | | XP_002280330 | 225440691 | PREDICTED: hypothetical protein | 0.796875 | Vitis vinifera | 3717 | 5011 |
| | | | | [Vitis vinifera] | | | | |
| | | | | &gt:gi\|297740207\|emb\|CBI30389.3\| | | | | |
| | | | | unnamed protein product [Vitis vinifera] | | | | |
| | | XP_002323579 | 224140416 | predicted protein [Populus trichocarpa] | 0.796875 | Populus trichocarpa | 3718 | 5012 |
| | | | | &gt:gi\|222868209\|gb\|EEF05340.1\| | | | | |
| | | | | predicted protein [Populus trichocarpa] | | | | |
| | 716-735 | BAJ97749 | 326531489 | predicted protein | 1 | Hordeum vulgare subsp. vulgare | 3719 | 5013 |
| | | | | [Hordeum vulgare subsp. vulgare] | | | | |
| | 714-733 | XP_002456960 | 242055628 | hypothetical protein SORBIDRAFT_03g046410 | 1 | Sorghum bicolor | 3720 | 5014 |
| | | | | [Sorghum bicolor] | | | | |
| | | | | &gt:gi\|241928935\|gb\|EES02080.1\| | | | | |
| | | | | hypothetical protein SORBIDRAFT_03g046410 | | | | |
| | | | | [Sorghum bicolor] | | | | |
| | | NP_001168278 | 293335408 | hypothetical protein LOC100382042 | 0.87905 | Zea mays | 3721 | 5015 |
| | | | | [Zea mays] | | | | |
| | | | | &gt:gi\|223947167\|gb\|ACN27667.1\| | | | | |
| | | | | unknown [Zea mays] | | | | |
| | | BAJ90008 | 326490681 | predicted protein | 0.721382 | Hordeum vulgare subsp. vulgare | 3722 | 5016 |
| | | | | [Hordeum vulgare subsp. vulgare] | | | | |
| | 1011-1030 | NP_001105211 | 162460524 | fructokinase-2 [Zea mays] | 1 | Zea mays | 3723 | 5017 |
| | | | | &gt:gi\|75293603\|sp\|Q6XZ78.1\|SCRK2_MAIZE | | | | |
| | | | | RecName: Full = Fructokinase-2; | | | | |
| | | | | AltName: Full = ZmFRK2 | | | | |
| | | | | &gt:gi\|31652276\|gb\|AAP42806.1\| | | | | |
| | | | | fructokinase 2 [Zea mays] | | | | |
| | | NP_001060837 | 115474480 | Os08g0113100 [Oryza sativa Japonica Group] | 0.907463 | Oryza sativa Japonica Group | 3724 | 5018 |
| | | | | &gt:gi\|122234591\|sp\|Q0J8G4.1\|SCRK2_ORYSJ | | | | |
| | | | | RecName: Full = Fructokinase-2; | | | | |
| | | | | AltName: Full = Fructokinase II; | | | | |
| | | | | AltName: Full = OsFKII | | | | |
| | | | | &gt:gi\|158513662\|sp\|A2YQL4.2\|SCRK2_ORYSI | | | | |
| | | | | RecName: Full = Fructokinase-2; | | | | |
| | | | | AltName: Full = Fructokinase II; | | | | |
| | | | | AltName: Full = OsFKII | | | | |
| | | | | &gt:gi\|16566704\|gb\|AAL26573.1\|AF429947_1 | | | | |
| | | | | putative fructokinase II [Oryza sativa] | | | | |
| | | | | &gt:gi\|32352126\|dbj\|BAC78556.1\| | | | | |
| | | | | fructokinase [Oryza sativa Japonica Group] | | | | |
| | | | | &gt:gi\|42408363\|dbj\|BAD09515.1\| | | | | |
| | | | | putative fructokinase | | | | |
| | | | | [Oryza sativa Japonica Group] | | | | |
| | | | | &gt:gi\|113622806\|dbj\|BAF22751.1\| | | | | |
| | | | | Os08g0113100 [Oryza sativa Japonica Group] | | | | |
| | | | | &gt:gi\|125601970\|gb\|EAZ41295.1\| | | | | |
| | | | | hypothetical protein OsJ_25803 | | | | |
| | | | | [Oryza sativa Japonica Group] | | | | |
| | | | | &gt:gi\|215687214\|dbj\|BAG91779.1\| | | | | |
| | | | | unnamed protein product | | | | |
| | | | | [Oryza sativa Japonica Group] | | | | |
| | | | | &gt:gi\|215708813\|dbj\|BAG94082.1\| | | | | |
| | | | | unnamed protein product | | | | |
| | | | | [Oryza sativa Japonica Group] | | | | |
| | 600-619 | NP_001158910 | 259490644 | hypothetical protein LOC100303804 | 1 | Zea mays | 3725 | 5019 |
| | | | | [Zea mays] | | | | |
| | | | | &gt:gi\|194703158\|gb\|ACF85663.1\| | | | | |
| | | | | unknown [Zea mays] | | | | |
| | 1224-1243 | NP_001183123 | 308044352 | hypothetical protein LOC100501490 | 1 | Zea mays | 3726 | 5020 |
| | | | | [Zea mays] | | | | |
| | | | | &gt:gi\|238009484\|gb\|ACR35777.1\| | | | | |
| | | | | unknown [Zea mays] | | | | |
| | | XP_002436478 | 242091975 | hypothetical protein SORBIDRAFT_10g003410 | 0.758519 | Sorghum bicolor | 3727 | 5021 |
| | | | | [Sorghum bicolor] | | | | |
| | | | | &gt:gi\|241914701\|gb\|EER87845.1\| | | | | |
| | | | | hypothetical protein SORBIDRAFT_10g003410 | | | | |
| | | | | [Sorghum bicolor] | | | | |
| | 1268-1287 | XP_002443799 | 242078060 | hypothetical protein SORBIDRAFT_07g002260 | 1 | Sorghum bicolor | 3728 | 5022 |
| | | | | [Sorghum bicolor] | | | | |
| | | | | &gt:gi\|241940149\|gb\|EES13294.1\| | | | | |
| | | | | hypothetical protein SORBIDRAFT_07g002260 | | | | |
| | | | | [Sorghum bicolor] | | | | |
| | 30-49 | NP_001183250 | 308080805 | hypothetical protein LOC100501641 | 1 | Zea mays | 3729 | 5023 |
| | | | | [Zea mays] | | | | |
| | | | | &gt:gi\|238010326\|gb\|ACR36198.1\| | | | | |
| | | | | unknown [Zea mays] | | | | |
| | 760-779 | NP_001143079 | 226492450 | hypothetical protein LOC100275552 | 1 | Zea mays | 3730 | 5024 |
| | | | | [Zea mays] | | | | |
| | | | | &gt:gi\|195613956\|gb\|ACG28808.1\| | | | | |
| | | | | hypothetical protein [Zea mays] | | | | |
| | 1545-1564 | ACF84241 | 194700313 | unknown [Zea mays] | 1 | Zea mays | 3731 | 5025 |
| | | | | &gt:gi\|194707260\|gb\|ACF87714.1\| | | | | |
| | | | | unknown [Zea mays] | | | | |
| | | NP_001147589 | 226507680 | endo-1,4-beta-xylanase [Zea mays] | 0.969543 | Zea mays | 3732 | 5026 |
| | | | | &gt:gi\|195612376\|gb\|ACG28018.1\| | | | | |
| | | | | endo-1,4-beta-xylanase [Zea mays] | | | | |
| | | XP_002455242 | 242052192 | hypothetical protein SORBIDRAFT_03g006980 | 0.873096 | Sorghum bicolor | 3733 | 5027 |
| | | | | [Sorghum bicolor] | | | | |
| | | | | &gt:gi\|241927217\|gb\|EES00362.1\| | | | | |
| | | | | hypothetical protein SORBIDRAFT_03g006980 | | | | |
| | | | | [Sorghum bicolor] | | | | |
| | | EAY72425 | 54362548 | hypothetical protein OsI_00279 | 0.746193 | Oryza sativa Indica Group | 3734 | |
| | | | | [Oryza sativa Indica Group] | | | | |
| | | EEE53821 | 54398660 | hypothetical protein OsJ_00270 | 0.71912 | Oryza sativa Japonica Group | 3735 | |
| | | | | [Oryza sativa Japonica Group] | | | | |
| | 273-292 | NP_001132755 | 212721503 | hypothetical protein LOC100194242 | 1 | Zea mays | 3736 | 5028 |
| | | | | [Zea mays] | | | | |
| | | | | &gt:gi\|194695312\|gb\|ACF81740.1\| | | | | |
| | | | | unknown [Zea mays] | | | | |
| | | | | &gt:gi\|223946859\|gb\|ACN27513.1\| | | | | |
| | | | | unknown [Zea mays] | | | | |
| | | ACG31916 | 195620171 | RHC1A [Zea mays] | 0.895385 | Zea mays | 3737 | 5029 |
| | | NP_001148878 | 226501599 | LOC100282497 [Zea mays] | 0.84 | Zea mays | 3738 | 5030 |
| | | | | &gt:gi\|195622884\|gb\|ACG33272.1\| | | | | |
| | | | | RHC1A [Zea mays] | | | | |
| | | ACF82310 | 194696451 | unknown [Zea mays] | 0.843077 | Zea mays | 3739 | 5031 |
| | 241-260 | NP_001144625 | 226498917 | hypothetical protein LOC100277643 | 1 | Zea mays | 3740 | 5032 |
| | | | | [Zea mays] | | | | |
| | | | | &gt:gi\|195644788\|gb\|ACG41862.1\| | | | | |
| | | | | hypothetical protein [Zea mays] | | | | |
| | 160-179 | XP_002440874 | 242090082 | hypothetical protein SORBIDRAFT_09g011240 | 1 | Sorghum bicolor | 3741 | 5033 |
| | | | | [Sorghum bicolor] | | | | |
| | | | | &gt:gi\|241946159\|gb\|EES19304.1\| | | | | |
| | | | | hypothetical protein SORBIDRAFT_09g011240 | | | | |
| | | | | [Sorghum bicolor] | | | | |
| | | ACL54333 | 219887916 | unknown [Zea mays] | 0.935484 | Zea mays | 3742 | 5034 |
| | | NP_001152417 | 226533398 | ubiquinone biosynthesis protein ubiB | 0.931276 | Zea mays | 3743 | 5035 |
| | | | | [Zea mays] | | | | |
| | | | | &gt:gi\|195656083\|gb\|ACG47509.1\| | | | | |
| | | | | ubiquinone biosynthesis protein ubiB | | | | |
| | | | | [Zea mays] | | | | |
| | | BAK08115 | 326527680 | predicted protein | 0.851332 | Hordeum vulgare subsp. vulgare | 3744 | 5036 |
| | | | | [Hordeum vulgare subsp. vulgare] | | | | |
| | | EEC78984 | 54362548 | hypothetical protein OsI_19471 | 0.778401 | Oryza sativa Indica Group | 3745 | |
| | | | | [Oryza sativa Indica Group] | | | | |
| | | EEE63256 | 54398660 | hypothetical protein OsJ_18066 | 0.776999 | Oryza sativa Japonica Group | 3746 | |
| | | | | [Oryza sativa Japonica Group] | | | | |
| | | XP_002301879 | 224065602 | predicted protein [Populus trichocarpa] | 0.709677 | Populus trichocarpa | 3747 | 5037 |
| | | | | &gt:gi\|222843605\|gb\|EEE81152.1\| | | | | |
| | | | | predicted protein [Populus trichocarpa] | | | | |
| | | XP_002263052 | 225464715 | PREDICTED: hypothetical protein | 0.737728 | Vitis vinifera | 3748 | 5038 |
| | | | | [Vitis vinifera] | | | | |
| | 150-169 | XP_002453372 | 242064165 | hypothetical protein SORBIDRAFT_04g004820 | 1 | Sorghum bicolor | 3749 | 5039 |
| | | | | [Sorghum bicolor] | | | | |
| | | | | &gt:gi\|241933203\|gb\|EES06348.1\| | | | | |
| | | | | hypothetical protein SORBIDRAFT_04g004820 | | | | |
| | | | | [Sorghum bicolor] | | | | |
| | | EEE56406 | 54398660 | hypothetical protein OsJ_05563 | 0.867458 | Oryza sativa Japonica Group | 3750 | |
| | | | | [Oryza sativa Japonica Group] | | | | |
| Predicted | 430-449 | XP_002439337 | 242087008 | hypothetical protein SORBIDRAFT_09g004620 | 1 | Sorghum bicolor | 3751 | 5040 |
| zma | | | | [Sorghum bicolor] | | | | |
| mir | | | | &gt:gi\|241944622\|gb\|EES17767.1\| | | | | |
| 50483 | | | | hypothetical protein SORBIDRAFT_09g004620 | | | | |
| | | | | [Sorghum bicolor] | | | | |
| | | ACG35753 | 195627845 | macrophage erythroblast attacher | 0.950617 | Zea mays | 3752 | 5041 |
| | | | | [Zea mays] | | | | |
| | | | | &gt:gi\|223949645\|gb\|ACN28906.1\| | | | | |
| | | | | unknown [Zea mays] | | | | |
| | | NP_001054719 | 115462238 | Os05g0160100 [Oryza sativa Japonica Group] | 0.814815 | Oryza sativa Japonica Group | 3753 | 5042 |
| | | | | &gt:gi\|51038108\|gb\|AAT93911.1\| unknown | | | | |
| | | | | protein [Oryza sativa Japonica Group] | | | | |
| | | | | &gt:gi\|55168055\|gb\|AAV43923.1\| unknown | | | | |
| | | | | protein [Oryza sativa Japonica Group] | | | | |
| | | | | &gt:gi\|113578270\|dbj\|BAF16633.1\| | | | | |
| | | | | Os05g0160100 [Oryza sativa Japonica Group] | | | | |
| | | | | &gt:gi\|125550933\|gb\|EAY96642.1\| | | | | |
| | | | | hypothetical protein OsI_18556 | | | | |
| | | | | [Oryza sativa Indica Group] | | | | |
| | | | | &gt:gi\|215707056\|dbj\|BAG93516.1\| | | | | |
| | | | | unnamed protein product | | | | |
| | | | | [Oryza sativa Japonica Group] | | | | |
| | | | | &gt:gi\|222630285\|gb\|EEE62417.1\| | | | | |
| | | | | hypothetical protein OsJ_17208 | | | | |
| | | | | [Oryza sativa Japonica Group] | | | | |
| | | BAK01850 | 326489738 | predicted protein | 0.859259 | Hordeum vulgare subsp. vulgare | 3754 | 5043 |
| | | | | [Hordeum vulgare subsp. vulgare] | | | | |
| | 898-917 | ACF80701 | 194693233 | unknown [Zea mays] | 1 | Zea mays | 3755 | 5044 |
| | | NP_001141965 | 226493338 | hypothetical protein LOC100274114 | 1 | Zea mays | 3756 | 5045 |
| | | | | [Zea mays] | | | | |
| | | | | &gt:gi\|194706606\|gb\|ACF87387.1\| | | | | |
| | | | | unknown [Zea mays] | | | | |
| | 150-169 | XP_002467057 | 242039324 | hypothetical protein SORBIDRAFT_01g018900 | 1 | Sorghum bicolor | 3757 | 5046 |
| | | | | [Sorghum bicolor] | | | | |
| | | | | &gt:gi\|241920911\|gb\|EER94055.1\| | | | | |
| | | | | hypothetical protein SORBIDRAFT_01g018900 | | | | |
| | | | | [Sorghum bicolor] | | | | |
| | | ACL52685 | 219884620 | unknown [Zea mays] | 0.922222 | Zea mays | 3758 | 5047 |
| | | NP_001150075 | 226501115 | lysM domain containing protein | 0.919444 | Zea mays | 3759 | 5048 |
| | | | | [Zea mays] | | | | |
| | | | | &gt:gi\|195636494\|gb\|ACG37715.1\| | | | | |
| | | | | lysM domain containing protein | | | | |
| | | | | [Zea mays] | | | | |
| | | NP_001152252 | 226496336 | lysM domain containing protein | 0.947222 | Zea mays | 3760 | 5049 |
| | | | | [Zea mays] | | | | |
| | | | | &gt:gi\|195654297\|gb\|ACG46616.1\| | | | | |
| | | | | lysM domain containing protein | | | | |
| | | | | [Zea mays] | | | | |
| | | NP_001064897 | 115482607 | Os10g0485500 [Oryza sativa Japonica Group] | 0.772222 | Oryza sativa Japonica Group | 3761 | 5050 |
| | | | | &gt:gi\|18087889\|gb\|AAL59043.1\|AC087182_26 | | | | |
| | | | | unknown protein [Oryza sativa Japonica Group] | | | | |
| | | | | &gt:gi\|31432752\|gb\|AAP54345.1\| | | | | |
| | | | | LysM domain containing protein, | | | | |
| | | | | expressed [Oryza sativa Japonica Group] | | | | |
| | | | | &gt:gi\|113639506\|dbj\|BAF26811.1\| | | | | |
| | | | | Os10g0485500 [Oryza sativa Japonica Group] | | | | |
| | | | | &gt:gi\|125532413\|gb\|EAY78978.1\| | | | | |
| | | | | hypothetical protein OsI_34084 | | | | |
| | | | | [Oryza sativa Indica Group] | | | | |
| | 691-710 | XP_002455492 | 242052692 | hypothetical protein SORBIDRAFT_03g011880 | 1 | Sorghum bicolor | 3762 | 5051 |
| | | | | [Sorghum bicolor] | | | | |
| | | | | &gt:gi\|229609765\|gb\|ACQ83498.1\| | | | | |
| | | | | CBL-interacting protein kinase 21 | | | | |
| | | | | [Sorghum bicolor] | | | | |
| | | | | &gt:gi\|241927467\|gb\|EES00612.1\| | | | | |
| | | | | hypothetical protein SORBIDRAFT_03g011880 | | | | |
| | | | | [Sorghum bicolor] | | | | |
| | | NP_001105967 | 162461846 | putative protein kinase [Zea mays] | 0.933045 | Zea mays | 3763 | 5052 |
| | | | | &gt:gi\|120400397\|gb\|ABM21449.1\| | | | | |
| | | | | putative protein kinase [Zea mays] | | | | |
| | | ACG35130 | 195626599 | CBL-interacting serine/threonine-protein | 0.922246 | Zea mays | 3764 | 5053 |
| | | | | kinase 1 [Zea mays] | | | | |
| | | NP_001042792 | 115436067 | Os01g0292200 [Oryza sativa Japonica Group] | 0.866091 | Oryza sativa Japonica Group | 3765 | 5054 |
| | | | | &gt:gi\|75334984\|sp\|Q9LGV5.1\|CIPK1_ORYSJ | | | | |
| | | | | RecName: Full = CBL-interacting protein kinase 1; | | | | |
| | | | | AltName: Full = OsCIPK01 | | | | |
| | | | | &gt:gi\|8468028\|dbj\|BAA96628.1\| | | | | |
| | | | | putative CBL-interacting protein kinase 1 | | | | |
| | | | | [Oryza sativa Japonica Group] | | | | |
| | | | | &gt:gi\|113532323\|dbj\|BAF04706.1\| | | | | |
| | | | | Os01g0292200 [Oryza sativa Japonica Group] | | | | |
| | | | | &gt:gi\|189099603\|gb\|ACD76973.1\| | | | | |
| | | | | CBL-interactingprotein kinase 1 | | | | |
| | | | | [Oryza sativa Japonica Group] | | | | |
| | | | | &gt:gi\|215686723\|dbj\|BAG89573.1\| | | | | |
| | | | | unnamed protein product | | | | |
| | | | | [Oryza sativa Japonica Group] | | | | |
| | | | | &gt:gi\|222618247\|gb\|EEE54379.1\| | | | | |
| | | | | hypothetical protein OsJ_01395 | | | | |
| | | | | [Oryza sativa Japonica Group] | | | | |
| | | NP_001054578 | 115461956 | Os08g0136200 [Oryza sativa Japonica Group] | 0.74514 | Oryza sativa Japonica Group | 3766 | 5055 |
| | | | | &gt:gi\|75326492\|sp\|Q75L42.1\|CIPKH_ORYSJ | | | | |
| | | | | RecName: Full = CBL-interacting protein kinase 17; | | | | |
| | | | | AltName: Full = OsCIPK17 | | | | |
| | | | | &gt:gi\|46485791\|gb\|AAS98416.1\| unknown | | | | |
| | | | | protein [Oryza sativa Japonica Group] | | | | |
| | | | | &gt:gi\|51038254\|gb\|AAT94057.1\| unknown | | | | |
| | | | | protein [Oryza sativa Japonica Group] | | | | |
| | | | | &gt:gi\|113578129\|dbj\|BAF16492.1\| | | | | |
| | | | | Os05g0136200 [Oryza sativa Japonica Group] | | | | |
| | | | | &gt:gi\|189099617\|gb\|ACD76980.1\| | | | | |
| | | | | CBL-interacting protein kinase 17 | | | | |
| | | | | [Oryza sativa Japonica Group] | | | | |
| | | | | &gt:gi\|222630113\|gb\|EEE62245.1\| | | | | |
| | | | | hypothetical protein OsJ_17032 | | | | |
| | | | | [Oryza sativa Japonica Group] | | | | |
| | | EEC78476 | 54362548 | hypothetical protein OsI_18365 | 0.74514 | Oryza sativa Indica Group | 3767 | |
| | | | | [Oryza sativa Indica Group] | | | | |
| | | BAJ96678 | 326519357 | predicted protein | 0.714903 | Hordeum vulgare subsp. vulgare | 3768 | 5056 |
| | | | | [Hordeum vulgare subsp. vulgare] | | | | |
| | 361-380 | NP_001142046 | 226531335 | hypothetical protein LOC100274202 | 1 | Zea mays | 3769 | 5057 |
| | | | | [Zea mays] | | | | |
| | | | | &gt:gi\|194706888\|gb\|ACF87528.1\| | | | | |
| | | | | unknown [Zea mays] | | | | |
| | | ACG42550 | 195646163 | F-box domain containing protein | 0.755501 | Zea mays | 3770 | 5058 |
| | | | | [Zea mays] | | | | |
| | | XP_002441523 | 242091380 | hypothetical protein SORBIDRAFT_09g028610 | 0.765281 | Sorghum bicolor | 3771 | 5059 |
| | | | | [Sorghum bicolor] | | | | |
| | | | | &gt:gi\|241946808\|gb\|EES19953.1\| | | | | |
| | | | | hypothetical protein SORBIDRAFT_09g028610 | | | | |
| | | | | [Sorghum bicolor] | | | | |
| | 123-142 | XP_002451328 | 242072102 | hypothetical protein SORBIDRAFT_05g027870 | 1 | Sorghum bicolor | 3772 | 5060 |
| | | | | [Sorghum bicolor] | | | | |
| | | | | &gt:gi\|241937171\|gb\|EES10316.1\| | | | | |
| | | | | hypothetical protein SORBIDRAFT_05g027870 | | | | |
| | | | | [Sorghum bicolor] | | | | |
| | | NP_001104921 | 162458160 | ribulose bisphosphate carboxylase/oxygenase activase, | 0.915909 | Zea mays | 3773 | 5061 |
| | | | | chloroplastic precursor [Zea mays] | | | | |
| | | | | &gt:gi\|29429152\|sp\|Q9ZT00.3\|RCA_MAIZE | | | | |
| | | | | RecName: Full = Ribulose bisphosphate | | | | |
| | | | | carboxylase/oxygenase activase, chloroplastic; | | | | |
| | | | | Short = RA; Short = RuBisCO activase; | | | | |
| | | | | Flags: Precursor | | | | |
| | | | | &gt:gi\|19855034\|gb\|AAC97932.3\| | | | | |
| | | | | ribulose-1,5-bisphosphate carboxylase/oxygenase | | | | |
| | | | | activase precursor [Zea mays] | | | | |
| | | | | &gt:gi\|195620038\|gb\|ACG31849.1\| | | | | |
| | | | | ribulose bisphosphate carboxylase/oxygenase | | | | |
| | | | | activase [Zea mays] | | | | |
| | | | | &gt:gi\|313574198\|dbj\|BAJ41042.1\| | | | | |
| | | | | ribulose-1,5-bisphosphate carboxylase/oxygenase | | | | |
| | | | | activase small isoform | | | | |
| | | | | [Zea mays] | | | | |
| | | ACN28387 | 223948606 | unknown [Zea mays] | 0.820455 | Zea mays | 3774 | 5062 |
| | | BAA97584 | 8918360 | RuBisCO activase small isoform precursor | 0.834091 | Oryza sativa | 3775 | 5063 |
| | | | | [Oryza sativa] | | | | |
| | | | | &gt:gi\|62733169\|gb\|AAX95286.1\| | | | | |
| | | | | RuBisCO activase small isoform precursor | | | | |
| | | | | [Oryza sativa Japonica Group] | | | | |
| | | | | &gt:gi\|77552726\|gb\|ABA95523.1\| | | | | |
| | | | | Ribulose bisphosphate carboxylase/oxygenase | | | | |
| | | | | activase, chloroplast precursor, putative, expressed | | | | |
| | | | | [Oryza sativa Japonica Group] | | | | |
| | | | | &gt:gi\|215694316\|dbj\|BAG89309.1\| | | | | |
| | | | | unnamed protein product | | | | |
| | | | | [Oryza sativa Japonica Group] | | | | |
| | | ABG22614 | 108863896 | Ribulose bisphosphate carboxylase/oxygenase | 0.834091 | Oryza sativa Japonica Group | 3776 | |
| | | | | activase, chloroplast precursor, putative, expressed | | | | |
| | | | | [Oryza sativa Japonica Group] | | | | |
| | | P93431 | | RecName: Full = Ribulose bisphosphate | 0.834091 | Oryza sativa (Japonica cultivar-group) | 3777 | |
| | | | | carboxylase/oxygenase activase, chloroplastic; | | | | |
| | | | | Short = RA; Short = RuBisCO activase; | | | | |
| | | | | Flags: Precursor | | | | |
| | | | | &gt:gi\|8918359\|dbj\|BAA97583.1\| | | | | |
| | | | | RuBisCO activase large isoform precursor | | | | |
| | | | | [Oryza sativa (Japonica cultivar-group)] | | | | |
| | | | | &gt:gi\|32352158\|dbj\|BAC78572.1\| | | | | |
| | | | | ribulose-bisphosphate carboxylase activase large | | | | |
| | | | | isoform precursor protein | | | | |
| | | | | [Oryza sativa Japonica Group] | | | | |
| | | | | &gt:gi\|77552725\|gb\|ABA95522.1\| | | | | |
| | | | | Ribulose bisphosphate carboxylase/oxygenase | | | | |
| | | | | activase, chloroplast precursor, putative, expressed | | | | |
| | | | | [Oryza sativa Japonica Group] | | | | |
| | | | | &gt:gi\|125578108\|gb\|EAZ19330.1\| | | | | |
| | | | | hypothetical protein OsJ_34880 | | | | |
| | | | | [Oryza sativa Japonica Group] | | | | |
| | | | | &gt:gi\|218186228\|gb\|EEC68655.1\| | | | | |
| | | | | hypothetical protein OsI_37096 | | | | |
| | | | | [Oryza sativa Indica Group] | | | | |
| | | AAC28134 | 3377792 | ribulose-1,5-bisphosphate carboxylase/oxygenase | 0.834091 | Oryza sativa Japonica Group | 3778 | 5064 |
| | | | | activase [Oryza sativa Japonica Group] | | | | |
| | | AAF71272 | 7960276 | ribulose bisphosphate carboxylase activase | 0.818182 | Triticum aestivum | 3779 | 5065 |
| | | | | B [Triticum aestivum] | | | | |
| | | AAP83928 | 32481062 | Rubisco activase beta form precursor | 0.815909 | Deschampsia antarctica | 3780 | 5066 |
| | | | | [Deschampsia antarctica] | | | | |
| | | AAH29790 | 20987526 | Unknown (protein for MGC: 35458) | 0.809091 | Homo sapiens | 3781 | 5067 |
| | | | | [Homo sapiens] | | | | |
| | 1071-1090 | XP_002441513 | 242091360 | hypothetical protein SORBIDRAFT_09g028410 | 1 | Sorghum bicolor | 3782 | 5068 |
| | | | | [Sorghum bicolor] | | | | |
| | | | | &gt:gi\|241946798\|gb\|EES19943.1\| | | | | |
| | | | | hypothetical protein SORBIDRAFT_09g028410 | | | | |
| | | | | [Sorghum bicolor] | | | | |
| | | ACF85297 | 194702425 | unknown [Zea mays] | 0.977901 | Zea mays | 3783 | 5069 |
| | | NP_001149016 | 226510213 | dnaJ subfamily B member 5 [Zea mays] | 0.972376 | Zea mays | 3784 | 5070 |
| | | | | &gt:gi\|195624008\|gb\|ACG33834.1\| | | | | |
| | | | | dnaJ subfamily B member 5 [Zea mays] | | | | |
| | | NP_001168528 | 293332110 | hypothetical protein LOC100382308 | 0.881215 | Zea mays | 3785 | 5071 |
| | | | | [Zea mays] | | | | |
| | | | | &gt:gi\|223948919\|gb\|ACN28543.1\| | | | | |
| | | | | unknown [Zea mays] | | | | |
| | | NP_001056320 | 115465440 | Os05g0562300 [Oryza sativa Japonica Group] | 0.90884 | Oryza sativa Japonica Group | 3786 | 5072 |
| | | | | &gt:gi\|51854270\|gb\|AAU10651.1\| | | | | |
| | | | | &apos:putative; heat shock protein, hsp40&apos: | | | | |
| | | | | [Oryza sativa Japonica Group] | | | | |
| | | | | &gt:gi\|113579871\|dbj\|BAF18234.1\| | | | | |
| | | | | Os05g0562300 [Oryza sativa Japonica Group] | | | | |
| | | | | &gt:gi\|215695218\|dbj\|BAG90409.1\| | | | | |
| | | | | unnamed protein product | | | | |
| | | | | [Oryza sativa Japonica Group] | | | | |
| | | | | &gt:gi\|222632556\|gb\|EEE64688.1\| | | | | |
| | | | | hypothetical protein OsJ_19543 | | | | |
| | | | | [Oryza sativa Japonica Group] | | | | |
| | | EAY99019 | 54362548 | hypothetical protein OsI_20977 | 0.906077 | Oryza sativa Indica Group | 3787 | |
| | | | | [Oryza sativa Indica Group] | | | | |
| | | XP_002278979 | 225443601 | PREDICTED: hypothetical protein | 0.767956 | Vitis vinifera | 3788 | 5073 |
| | | | | [Vitis vinifera] | | | | |
| | | ACU18092 | 255635479 | unknown [Glycine max] | 0.773481 | Glycine max | 3789 | 5074 |
| | | XP_002886287 | 297836809 | DNAJ heat shock family protein | 0.745856 | Arabidopsis lyrata subsp. lyrata | 3790 | 5075 |
| | | | | [Arabidopsis lyrata subsp. lyrata] | | | | |
| | | | | &gt:gi\|297332127\|gb\|EFH62546.1\| | | | | |
| | | | | DNAJ heat shock family protein | | | | |
| | | | | [Arabidopsis lyrata subsp. lyrata] | | | | |
| | | XP_002509430 | 255536726 | Protein SIS1, putative [Ricinus communis] | 0.756906 | Ricinus communis | 3791 | 5076 |
| | | | | &gt:gi\|223549329\|gb\|EEF50817.1\| | | | | |
| | | | | Protein SIS1, putative [Ricinus communis] | | | | |
| | 174-193 | XP_002457615 | 242056938 | hypothetical protein SORBIDRAFT_03g010370 | 1 | Sorghum bicolor | 3792 | 5077 |
| | | | | [Sorghum bicolor] | | | | |
| | | | | &gt:gi\|241929590\|gb\|EES02735.1\| | | | | |
| | | | | hypothetical protein SORBIDRAFT_03g010370 | | | | |
| | | | | [Sorghum bicolor] | | | | |
| | | ACG48423 | 195657910 | hypothetical protein [Zea mays] | 0.943478 | Zea mays | 3793 | 5078 |
| | | NP_001145494 | 226503300 | hypothetical protein LOC100278893 | 0.943478 | Zea mays | 3794 | 5079 |
| | | | | [Zea mays] | | | | |
| | | | | &gt:gi\|195657081\|gb\|ACG48008.1\| | | | | |
| | | | | hypothetical protein [Zea mays] | | | | |
| | | EAZ11347 | 54398660 | hypothetical protein OsJ_01214 | 0.743478 | Oryza sativa Japonica Group | 3795 | |
| | | | | [Oryza sativa Japonica Group] | | | | |
| | | NP_001042671 | 115435825 | Os01g0265700 [Oryza sativa Japonica Group] | 0.752174 | Oryza sativa Japonica Group | 3796 | 5080 |
| | | | | &gt:gi\|56783773\|dbj\|BAD81185.1\| unknown | | | | |
| | | | | protein [Oryza sativa Japonica Group] | | | | |
| | | | | &gt:gi\|113532202\|dbj\|BAF04585.1\| | | | | |
| | | | | Os01g0265700 [Oryza sativa Japonica Group] | | | | |
| | | | | &gt:gi\|125525302\|gb\|EAY73416.1\| | | | | |
| | | | | hypothetical protein OsI_01298 | | | | |
| | | | | [Oryza sativa Indica Group] | | | | |
| | | | | &gt:gi\|215766960\|dbj\|BAG99188.1\| | | | | |
| | | | | unnamed protein product | | | | |
| | | | | [Oryza sativa Japonica Group] | | | | |
| | | BAK07146 | 326515799 | predicted protein | 0.713043 | Hordeum vulgare subsp. vulgare | 3797 | 5081 |
| | | | | [Hordeum vulgare subsp. vulgare] | | | | |
| | 912-931 | NP_001151603 | 226509921 | VAMP protein SEC22 [Zea mays] | 1 | Zea mays | 3798 | 5082 |
| | | | | &gt:gi\|195648052\|gb\|ACG43494.1\| | | | | |
| | | | | VAMP protein SEC22 [Zea mays] | | | | |
| | | NP_001150617 | 226492448 | VAMP protein SEC22 [Zea mays] | 0.890688 | Zea mays | 3799 | 5083 |
| | | | | &gt:gi\|195640598\|gb\|ACG39767.1\| | | | | |
| | | | | VAMP protein SEC22 [Zea mays] | | | | |
| | | ACN30757 | 223973138 | unknown [Zea mays] | 0.874494 | Zea mays | 3800 | 5084 |
| | | BAK04669 | 326529444 | predicted protein | 0.700405 | Hordeum vulgare subsp. vulgare | 3801 | 5085 |
| | | | | [Hordeum vulgare subsp. vulgare] | | | | |
| | | NP_001052766 | 115458331 | Os04g0416700 [Oryza sativa Japonica Group] | 0.704453 | Oryza sativa Japonica Group | 3802 | 5086 |
| | | | | &gt:gi\|38344036\|emb\|CAE01528.2\| | | | | |
| | | | | OJ991214_12.17 [Oryza sativa Japonica Group] | | | | |
| | | | | &gt:gi\|39545714\|emb\|CAD40930.3\| | | | | |
| | | | | OSJNBa0033G16.4 [Oryza sativa Japonica Group] | | | | |
| | | | | &gt:gi\|113564337\|dbj\|BAF14680.1\| | | | | |
| | | | | Os04g0416700 [Oryza sativa Japonica Group] | | | | |
| | | | | &gt:gi\|116310806\|emb\|CAH67596.1\| | | | | |
| | | | | OSIGBa0092M08.8 [Oryza sativa Indica Group] | | | | |
| | | | | &gt:gi\|125548247\|gb\|EAY94069.1\| | | | | |
| | | | | hypothetical protein OsI_15845 | | | | |
| | | | | [Oryza sativa Indica Group] | | | | |
| | | | | &gt:gi\|125590354\|gb\|EAZ30704.1\| | | | | |
| | | | | hypothetical protein OsJ_14762 | | | | |
| | | | | [Oryza sativa Japonica Group] | | | | |
| | | | | &gt:gi\|215686964\|dbj\|BAG90834.1\| | | | | |
| | | | | unnamed protein product | | | | |
| | | | | [Oryza sativa Japonica Group] | | | | |
| | 387-406 | XP_002444876 | 242080214 | hypothetical protein SORBIDRAFT_07g000760 | 1 | Sorghum bicolor | 3803 | 5087 |
| | | | | [Sorghum bicolor] | | | | |
| | | | | &gt:gi\|241941226\|gb\|EES14371.1\| | | | | |
| | | | | hypothetical protein SORBIDRAFT_07g000760 | | | | |
| | | | | [Sorghum bicolor] | | | | |
| | | NP_001148818 | 226531679 | shwachman-Bodian-Diamond syndrome protein | 0.95493 | Zea mays | 3804 | 5088 |
| | | | | [Zea mays] | | | | |
| | | | | &gt:gi\|194708114\|gb\|ACF88141.1\| | | | | |
| | | | | unknown [Zea mays] | | | | |
| | | | | &gt:gi\|195622368\|gb\|ACG33014.1\| | | | | |
| | | | | shwachman-Bodian-Diamond syndrome protein | | | | |
| | | | | [Zea mays] | | | | |
| | | NP_001060798 | 115474402 | Os08g0107500 [Oryza sativa Japonica Group] | 0.850704 | Oryza sativa Japonica Group | 3805 | 5089 |
| | | | | &gt:gi\|42408234\|dbj\|BAD09391.1\| | | | | |
| | | | | putative Shwachman-Bodian-Diamond syndrome protein | | | | |
| | | | | [Oryza sativa Japonica Group] | | | | |
| | | | | &gt:gi\|113622767\|dbj\|BAF22712.1\| | | | | |
| | | | | Os08g0107500 [Oryza sativa Japonica Group] | | | | |
| | | | | &gt:gi\|215693786\|dbj\|BAG88985.1\| | | | | |
| | | | | unnamed protein product [Oryza sativa Japonica Group] | | | | |
| | | | | &gt:gi\|218200357\|gb\|EEC82784.1\| | | | | |
| | | | | hypothetical protein OsI_27530 | | | | |
| | | | | [Oryza sativa Indica Group] | | | | |
| | | | | &gt:gi\|222639780\|gb\|EEE67912.1\| | | | | |
| | | | | hypothetical protein OsJ_25763 | | | | |
| | | | | [Oryza sativa Japonica Group] | | | | |
| | | BAJ88850 | 326525606 | predicted protein | 0.785915 | Hordeum vulgare subsp. vulgare | 3806 | 5090 |
| | | | | [Hordeum vulgare subsp. vulgare] | | | | |
| | | | | &gt:gi\|326529251\|dbj\|BAK01019.1\| | | | | |
| | | | | predicted protein | | | | |
| | | | | [Hordeum vulgare subsp. vulgare] | | | | |
| | 231-250 | NP_001142230 | 226530616 | hypothetical protein LOC100274398 | 1 | Zea mays | 3807 | 5091 |
| | | | | [Zea mays] | | | | |
| | | | | &gt:gi\|194707712\|gb\|ACF87940.1\| | | | | |
| | | | | unknown [Zea mays] | | | | |
| | | | | &gt:gi\|323388581\|gb\|ADX60095.1\| | | | | |
| | | | | AP2-EREBP transcription factor | | | | |
| | | | | [Zea mays] | | | | |
| | | NP_001149871 | 226497003 | ethylene responsive protein [Zea mays] | 0.966667 | Zea mays | 3808 | 5092 |
| | | | | &gt:gi\|195635171\|gb\|ACG37054.1\| | | | | |
| | | | | ethylene responsive protein [Zea mays] | | | | |
| | | XP_002448280 | 242076687 | hypothetical protein SORBIDRAFT_06g024355 | 0.818519 | Sorghum bicolor | 3809 | 5093 |
| | | | | [Sorghum bicolor] | | | | |
| | | | | &gt:gi\|241939463\|gb\|EES12608.1\| | | | | |
| | | | | hypothetical protein SORBIDRAFT_06g024355 | | | | |
| | | | | [Sorghum bicolor] | | | | |
| | | NP_001152050 | 226498033 | ethylene-responsive transcription factor 2 | 0.87037 | Zea mays | 3810 | 5094 |
| | | | | [Zea mays] | | | | |
| | | | | &gt:gi\|195652151\|gb\|ACG45543.1\| | | | | |
| | | | | ethylene-responsive transcription factor 2 | | | | |
| | | | | [Zea mays] | | | | |
| | | ABQ52686 | 148009083 | ethylene-responsive factor | 0.77037 | Thinopyrum intermedium | 3811 | 5095 |
| | | | | [Thinopyrum intermedium] | | | | |
| | | ABQ52687 | 148009101 | pathogen-inducible transcription factor | 0.766667 | Triticum aestivum | 3812 | 5096 |
| | | | | ERF3 [Triticum aestivum] | | | | |
| | | NP_001053474 | 297603127 | Os04g0546800 [Oryza sativa Japonica Group] | 0.740741 | Oryza sativa Japonica Group | 3813 | 5097 |
| | | | | &gt:gi\|70663974\|emb\|CAD41472.3\| | | | | |
| | | | | OSJNBa0079A21.16 [Oryza sativa Japonica Group] | | | | |
| | | | | &gt:gi\|113565045\|dbj\|BAF15388.1\| | | | | |
| | | | | Os04g0546800 [Oryza sativa Japonica Group] | | | | |
| | | | | &gt:gi\|117501525\|gb\|ABK34954.1\| | | | | |
| | | | | development related ERF protein | | | | |
| | | | | [Oryza sativa Japonica Group] | | | | |
| | | | | &gt:gi\|215769250\|dbj\|BAH01479.1\| | | | | |
| | | | | unnamed protein product | | | | |
| | | | | [Oryza sativa Japonica Group] | | | | |
| | | CAH67263 | 116310240 | OSIGBa0101C23.15 [Oryza sativa Indica Group] | 0.740741 | Oryza sativa Indica Group | 3814 | 5098 |
| | | EAY95058 | 54362548 | hypothetical protein OsI_16873 | 0.740741 | Oryza sativa Indica Group | 3815 | |
| | | | | [Oryza sativa Indica Group] | | | | |
| | | BAK05766 | 326491332 | predicted protein | 0.737037 | Hordeum vulgare subsp. vulgare | 3816 | 5099 |
| | | | | [Hordeum vulgare subsp. vulgare] | | | | |
| | 345-364 | XP_002440768 | 242089870 | hypothetical protein SORBIDRAFT_09g006240 | 1 | Sorghum bicolor | 3817 | 5100 |
| | | | | [Sorghum bicolor] | | | | |
| | | | | &gt:gi\|241946053\|gb\|EES19198.1\| | | | | |
| | | | | hypothetical protein SORBIDRAFT_09g006240 | | | | |
| | | | | [Sorghum bicolor] | | | | |
| | | NP_001150209 | 226531775 | prenylated rab acceptor family protein | 0.918367 | Zea mays | 3818 | 5101 |
| | | | | [Zea mays] | | | | |
| | | | | &gt:gi\|195637576\|gb\|ACG38256.1\| | | | | |
| | | | | prenylated rab acceptor family protein | | | | |
| | | | | [Zea mays] | | | | |
| | | BAJ94157 | 326490166 | predicted protein | 0.714286 | Hordeum vulgare subsp. vulgare | 3819 | 5102 |
| | | | | [Hordeum vulgare subsp. vulgare] | | | | |
| | | AAT44309 | 37719165 | hypothetical protein | 0.739796 | Oryza sativa Japonica Group | 3820 | 5103 |
| | | | | [Oryza sativa Japonica Group] | | | | |
| | 1398-1417 | XP_002441339 | 242091012 | hypothetical protein SORBIDRAFT_09g024710 | 1 | Sorghum bicolor | 3821 | 5104 |
| | | | | [Sorghum bicolor] | | | | |
| | | | | &gt:gi\|241946624\|gb\|EES19769.1\| | | | | |
| | | | | hypothetical protein SORBIDRAFT_09g024710 | | | | |
| | | | | [Sorghum bicolor] | | | | |
| | | NP_001055967 | 115464734 | Os05g0500900 [Oryza sativa Japonica Group] | 0.79289 | Oryza sativa Japonica Group | 3822 | 5105 |
| | | | | &gt:gi\|75113903\|sp\|Q60EJ6.1\|GH34_ORYSJ | | | | |
| | | | | RecName: Full = Probable indole-3-acetic | | | | |
| | | | | acid-amido synthetase GH3.4; | | | | |
| | | | | AltName: Full = Auxin-responsive GH3-like protein 4; | | | | |
| | | | | Short = OsGH3-4 | | | | |
| | | | | &gt:gi\|53749366\|gb\|AAU90225.1\| | | | | |
| | | | | putative auxin-responsive protein GH3 | | | | |
| | | | | [Oryza sativa Japonica Group] | | | | |
| | | | | &gt:gi\|113579518\|dbj\|BAF17881.1\| | | | | |
| | | | | Os05g0500900 [Oryza sativa Japonica Group] | | | | |
| | | | | &gt:gi\|125552879\|gb\|EAY98588.1\| | | | | |
| | | | | hypothetical protein OsI_20501 | | | | |
| | | | | [Oryza sativa Indica Group] | | | | |
| | | | | &gt:gi\|222632129\|gb\|EEE64261.1\| | | | | |
| | | | | hypothetical protein OsJ_19094 | | | | |
| | | | | [Oryza sativa Japonica Group] | | | | |
| | | XP_002456458 | 242054624 | hypothetical protein SORBIDRAFT_03g036680 | 0.772798 | Sorghum bicolor | 3823 | 5106 |
| | | | | [Sorghum bicolor] | | | | |
| | | | | &gt:gi\|241928433\|gb\|EES01578.1\| | | | | |
| | | | | hypothetical protein SORBIDRAFT_03g036680 | | | | |
| | | | | [Sorghum bicolor] | | | | |
| | | NP_001044467 | 115440374 | Os01g0785400 [Oryza sativa Japonica Group] | 0.769706 | Oryza sativa Japonica Group | 3824 | 5107 |
| | | | | &gt:gi\|75272534\|sp\|Q8LQM5.1\|GH31_ORYSJ | | | | |
| | | | | RecName: Full = Probable indole-3-acetic | | | | |
| | | | | acid-amido synthetase GH3.1; | | | | |
| | | | | AltName: Full = Auxin-responsive GH3-like protein 1; | | | | |
| | | | | Short = OsGH3-1 | | | | |
| | | | | &gt:gi\|20804910\|dbj\|BAB92590.1\| | | | | |
| | | | | putative auxin-regulated protein GH3 | | | | |
| | | | | [Oryza sativa Japonica Group] | | | | |
| | | | | &gt:gi\|113533998\|dbj\|BAF06381.1\| | | | | |
| | | | | Os01g0785400 [Oryza sativa Japonica Group] | | | | |
| | | | | &gt:gi\|125572267\|gb\|EAZ13782.1\| | | | | |
| | | | | hypothetical protein OsJ_03707 | | | | |
| | | | | [Oryza sativa Japonica Group] | | | | |
| | | | | &gt:gi\|215693284\|dbj\|BAG88666.1\| | | | | |
| | | | | unnamed protein product | | | | |
| | | | | [Oryza sativa Japonica Group] | | | | |
| | | ACL52529 | 219884308 | unknown [Zea mays] | 0.734158 | Zea mays | 3825 | 5108 |
| | 489-508 | NP_001130602 | 212274530 | hypothetical protein LOC100191701 | 1 | Zea mays | 3826 | 5109 |
| | | | | [Zea mays] | | | | |
| | | | | &gt:gi\|194689604\|gb\|ACF78886.1\| | | | | |
| | | | | unknown [Zea mays] | | | | |
| | | | | &gt:gi\|219886741\|gb\|ACL53745.1\| | | | | |
| | | | | unknown [Zea mays] | | | | |
| | | XP_002457581 | 242056870 | hypothetical protein SORBIDRAFT_03g009790 | 0.868908 | Sorghum bicolor | 3827 | 5110 |
| | | | | [Sorghum bicolor] | | | | |
| | | | | &gt:gi\|241929556\|gb\|EES02701.1\| | | | | |
| | | | | hypothetical protein SORBIDRAFT_03g009790 | | | | |
| | | | | [Sorghum bicolor] | | | | |
| | | BAK07768 | 326522611 | predicted protein | 0.741176 | Hordeum vulgare subsp. vulgare | 3828 | 5111 |
| | | | | [Hordeum vulgare subsp. vulgare] | | | | |
| | | BAA84618 | 5922603 | putative pectinesterase | 0.712605 | Oryza sativa Japonica Group | 3829 | 5112 |
| | | | | [Oryza sativa Japonica Group] | | | | |
| | | | | &gt:gi\|6016850\|dbj\|BAA85193.1\| | | | | |
| | | | | putative pectinesterase | | | | |
| | | | | [Oryza sativa Japonica Group] | | | | |
| | 654-673 | XP_002458737 | 242059182 | hypothetical protein SORBIDRAFT_03g039330 | 1 | Sorghum bicolor | 3830 | 5113 |
| | | | | [Sorghum bicolor] | | | | |
| | | | | &gt:gi\|241930712\|gb\|EES03857.1\| | | | | |
| | | | | hypothetical protein SORBIDRAFT_03g039330 | | | | |
| | | | | [Sorghum bicolor] | | | | |
| | | NP_001147098 | 226508543 | osmotin-like protein [Zea mays] | 0.964143 | Zea mays | 3831 | 5114 |
| | | | | &gt:gi\|226958466\|ref\|NP_001152945.1\| | | | | |
| | | | | LOC100284104 [Zea mays] | | | | |
| | | | | &gt:gi\|195607196\|gb\|ACG25428.1\| | | | | |
| | | | | osmotin-like protein precursor [Zea mays] | | | | |
| | | | | &gt:gi\|195639504\|gb\|ACG39220.1\| | | | | |
| | | | | osmotin-like protein precursor [Zea mays] | | | | |
| | | ADI43217 | 297498988 | osmotin-like protein | 0888446 | Oryza sativa Indica Group | 3832 | 5115 |
| | | | | [Oryza sativa Indica Group] | | | | |
| | | NP_001044756 | 115440952 | Os01g0839900 [Oryza sativa Japonica Group] | 0.87251 | Oryza sativa Japonica Group | 3833 | 5116 |
| | | | | &gt:gi\|15623832\|dbj\|BAB67891.1\| | | | | |
| | | | | putative thaumatin-like cytokinin-binding | | | | |
| | | | | protein [Oryza sativa Japonica Group] | | | | |
| | | | | &gt:gi\|21104619\|dbj\|BAB93211.1\| | | | | |
| | | | | putative thaumatin-like cytokinin-binding protein | | | | |
| | | | | [Oryza sativa Japonica Group] | | | | |
| | | | | &gt:gi\|113534287\|dbj\|BAF06670.1\| | | | | |
| | | | | Os01g0839900 [Oryza sativa Japonica Group] | | | | |
| | | | | &gt:gi\|125528326\|gb\|EAY76440.1\| | | | | |
| | | | | hypothetical protein OsI_04374 | | | | |
| | | | | [Oryza sativa Indica Group] | | | | |
| | | | | &gt:gi\|125572584\|gb\|EAZ14099.1\| | | | | |
| | | | | hypothetical protein OsJ_04023 | | | | |
| | | | | [Oryza sativa Japonica Group] | | | | |
| | | | | &gt:gi\|215765831\|dbj\|BAG87528.1\| | | | | |
| | | | | unnamed protein product | | | | |
| | | | | [Oryza sativa Japonica Group] | | | | |
| | | ADI43216 | 297498986 | osmotin-like protein | 0.868526 | Oryza sativa Indica Group | 3834 | 5117 |
| | | | | [Oryza sativa Indica Group] | | | | |
| | | BAK00635 | 326524503 | predicted protein | 0.808765 | Hordeum vulgare subsp. vulgare | 3835 | 5118 |
| | | | | [Hordeum vulgare subsp. vulgare] | | | | |
| | 430-449 | ACN26514 | 223944860 | unknown [Zea mays] | 1 | Zea mays | 3836 | 5119 |
| | | NP_001151242 | 226533364 | triacylglycerol lipase [Zea mays] | 0.997512 | Zea mays | 3837 | 5120 |
| | | | | &gt:gi\|195645276\|gb\|ACG42106.1\| | | | | |
| | | | | triacylglycerol lipase [Zea mays] | | | | |
| | | XP_002441554 | 242091442 | hypothetical protein SORBIDRAFT_09g029230 | 0.81592 | Sorghum bicolor | 3838 | 5121 |
| | | | | [Sorghum bicolor] | | | | |
| | | | | &gt:gi\|241946839\|gb\|EES19984.1\| | | | | |
| | | | | hypothetical protein SORBIDRAFT_09g029230 | | | | |
| | | | | [Sorghum bicolor] | | | | |
| | | NP_001132361 | 212722431 | hypothetical protein LOC100193806 [Zea mays] | 0.716418 | Zea mays | 3839 | 5122 |
| | | | | &gt:gi\|194694184\|gb\|ACF81176.1\| | | | | |
| | | | | unknown [Zea mays] | | | | |
| | | XP_002440467 | 242089268 | hypothetical protein SORBIDRAFT_09g001420 | 0.706468 | Sorghum bicolor | 3840 | 5123 |
| | | | | [Sorghum bicolor] | | | | |
| | | | | &gt:gi\|241945752\|gb\|EES18897.1\| | | | | |
| | | | | hypothetical protein SORBIDRAFT_09g001420 | | | | |
| | | | | [Sorghum bicolor] | | | | |
| | | NP_001056387 | 115465574 | Os05g0574100 [Oryza sativa Japonica Group] | 0.803483 | Oryza sativa Japonica Group | 3841 | 5124 |
| | | | | &gt:gi\|75122568\|sp\|Q6F357.1\|PLA7_ORYSJ | | | | |
| | | | | RecName: Full = Phospholipase A1-II 7 | | | | |
| | | | | &gt:gi\|334350808\|sp\|A2Y7R2.1\|PLA7_ORYSI | | | | |
| | | | | RecName: Full = Phospholipase A1-II 7 | | | | |
| | | | | &gt:gi\|50080246\|gb\|AAT69581.1\| | | | | |
| | | | | putative lipase | | | | |
| | | | | [Oryza sativa Japonica Group] | | | | |
| | | | | &gt:gi\|52353545\|gb\|AAU44111.1\| | | | | |
| | | | | putative lipase | | | | |
| | | | | [Oryza sativa Japonica Group] | | | | |
| | | | | &gt:gi\|113579938\|dbj\|BAF18301.1\| | | | | |
| | | | | Os05g0574100 [Oryza sativa Japonica Group] | | | | |
| | | | | &gt:gi\|125553413\|gb\|EAY99122.1\| | | | | |
| | | | | hypothetical protein OsI_21081 | | | | |
| | | | | [Oryza sativa Indica Group] | | | | |
| | | XP_002465238 | 242035686 | hypothetical protein SORBIDRAFT_01g034810 | 0.708955 | Sorghum bicolor | 3842 | 5125 |
| | | | | [Sorghum bicolor] | | | | |
| | | | | &gt:gi\|241919092\|gb\|EER92236.1\| | | | | |
| | | | | hypothetical protein SORBIDRAFT_01g034810 | | | | |
| | | | | [Sorghum bicolor] | | | | |
| | 381-400 | NP_001152292 | 226492961 | LOC100285931 [Zea mays] | 1 | Zea mays | 3843 | 5126 |
| | | | | &gt:gi\|195654767\|gb\|ACG46851.1\| | | | | |
| | | | | poly [Zea mays] | | | | |
| | | | | &gt:gi\|238006566\|gb\|ACR34318.1\| | | | | |
| | | | | unknown [Zea mays] | | | | |
| | | XP_002465362 | 242035934 | hypothetical protein SORBIDRAFT_01g037200 | 0.891589 | Sorghum bicolor | 3844 | 5127 |
| | | | | [Sorghum bicolor] | | | | |
| | | | | &gt:gi\|241919216\|gb\|EER92360.1\| | | | | |
| | | | | hypothetical protein SORBIDRAFT_01g037200 | | | | |
| | | | | [Sorghum bicolor] | | | | |
| | 419-438 | XP_002455452 | 242052612 | hypothetical protein SORBIDRAFT_03g011010 | 1 | Sorghum bicolor | 3845 | 5128 |
| | | | | [Sorghum bicolor] | | | | |
| | | | | &gt:gi\|63087720\|emb\|CAI93175.1\| | | | | |
| | | | | glycosyltransferase [Sorghum bicolor] | | | | |
| | | | | &gt:gi\|241927427\|gb\|EES00572.1\| | | | | |
| | | | | hypothetical protein SORBIDRAFT_03g011010 | | | | |
| | | | | [Sorghum bicolor] | | | | |
| | 439-458 | NP_001141101 | 226505471 | hypothetical protein LOC100273184 | 1 | Zea mays | 3846 | 5129 |
| | | | | [Zea mays] | | | | |
| | | | | &gt:gi\|194702624\|gb\|ACF85396.1\| | | | | |
| | | | | unknown [Zea mays] | | | | |
| | | XP_002456304 | 242054316 | hypothetical protein SORBIDRAFT_03g033760 | 0.883772 | Sorghum bicolor | 3847 | 5130 |
| | | | | [Sorghum bicolor] | | | | |
| | | | | &gt:gi\|241928279\|gb\|EES01424.1\| | | | | |
| | | | | hypothetical protein SORBIDRAFT_03g033760 | | | | |
| | | | | [Sorghum bicolor] | | | | |
| | | NP_001044161 | 115439762 | Os01g0733500 [Oryza sativa Japonica Group] | 0.747807 | Oryza sativa Japonica Group | 3848 | 5131 |
| | | | | &gt:gi\|75164073\|sp\|Q942D4.1\|BURP3_ORYSJ | | | | |
| | | | | RecName: Full = BURP domain-containing protein 3; | | | | |
| | | | | Short = OsBURP03; Flags: Precursor | | | | |
| | | | | &gt:gi\|15624018\|dbj\|BAB68072.1\| | | | | |
| | | | | putative BURP domain-containing protein | | | | |
| | | | | [Oryza sativa Japonica Group] | | | | |
| | | | | &gt:gi\|20161002\|dbj\|BAB89935.1\| | | | | |
| | | | | putative BURP domain-containing protein | | | | |
| | | | | [Oryza sativa Japonica Group] | | | | |
| | | | | &gt:gi\|113533692\|dbj\|BAF06075.1\| | | | | |
| | | | | Os01g0733500 [Oryza sativa Japonica Group] | | | | |
| | | | | &gt:gi\|215694492\|dbj\|BAG89485.1\| | | | | |
| | | | | unnamed protein product | | | | |
| | | | | [Oryza sativa Japonica Group] | | | | |
| | | | | &gt:gi\|215741032\|dbj\|BAG97527.1\| | | | | |
| | | | | unnamed protein product | | | | |
| | | | | [Oryza sativa Japonica Group] | | | | |
| | | EAZ13440 | 54398660 | hypothetical protein OsJ_03360 | 0.745614 | Oryza sativa Japonica Group | 3849 | |
| | | | | [Oryza sativa Japonica Group] | | | | |
| | | EAY75726 | 54362548 | hypothetical protein OsI_03637 | 0.741228 | Oryza sativa Indica Group | 3850 | |
| | | | | [Oryza sativa Indica Group] | | | | |
| | | BAK06506 | 326502027 | predicted protein | 0.962719 | Hordeum vulgare subsp. vulgare | 3851 | 5132 |
| | | | | [Hordeum vulgare subsp. vulgare] | | | | |
| | 328-347 | ACN36219 | 224034286 | unknown [Zea mays] | 1 | Zea mays | 3852 | 5133 |
| | | NP_001150471 | 226532659 | LOC100284101 [Zea mays] | 0.780684 | Zea mays | 3853 | 5134 |
| | | | | &gt:gi\|195639480\|gb\|ACG39208.1\| | | | | |
| | | | | RNA-binding protein-like [Zea mays] | | | | |
| | 486-505 | XP_002464945 | 242035100 | hypothetical protein SORBIDRAFT_01g029270 | 1 | Sorghum bicolor | 3854 | 5135 |
| | | | | [Sorghum bicolor] | | | | |
| | | | | &gt:gi\|241918799\|gb\|EER91943.1\| | | | | |
| | | | | hypothetical protein SORBIDRAFT_01g029270 | | | | |
| | | | | [Sorghum bicolor] | | | | |
| | | NP_001105643 | 162458363 | beta-expansin 7 [Zea mays] | 0.924812 | Zea mays | 3855 | 5136 |
| | | | | &gt:gi\|14193773\|gb\|AAK56130.1\|AF332180_1 | | | | |
| | | | | beta-expansin 7 [Zea mays] | | | | |
| | | XP_002464944 | 242035098 | hypothetical protein SORBIDRAFT_01g029260 | 0.909774 | Sorghum bicolor | 3856 | 5137 |
| | | | | [Sorghum bicolor] | | | | |
| | | | | &gt:gi\|241918798\|gb\|EER91942.1\| | | | | |
| | | | | hypothetical protein SORBIDRAFT_01g029260 | | | | |
| | | | | [Sorghum bicolor] | | | | |
| | | NP_001148695 | 226494268 | beta-expansin 1a [Zea mays] | 0.887218 | Zea mays | 3857 | 5138 |
| | | | | &gt:gi\|195621464\|gb\|ACG32562.1\| | | | | |
| | | | | beta-expansin 1a precursor [Zea mays] | | | | |
| | | | | &gt:gi\|238010538\|gb\|ACR36304.1\| | | | | |
| | | | | unknown [Zea mays] | | | | |
| | | XP_002464943 | 242035096 | hypothetical protein SORBIDRAFT_01g029250 | 0.883459 | Sorghum bicolor | 3858 | 5139 |
| | | | | [Sorghum bicolor] | | | | |
| | | | | &gt:gi\|241918797\|gb\|EER91941.1\| | | | | |
| | | | | hypothetical protein SORBIDRAFT_01g029250 | | | | |
| | | | | [Sorghum bicolor] | | | | |
| | | XP_002464946 | 242035102 | hypothetical protein SORBIDRAFT_01g029273 | 0.868421 | Sorghum bicolor | 3859 | 5140 |
| | | | | [Sorghum bicolor] | | | | |
| | | | | &gt:gi\|241918800\|gb\|EER91944.1\| | | | | |
| | | | | hypothetical protein SORBIDRAFT_01g029273 | | | | |
| | | | | [Sorghum bicolor] | | | | |
| | | NP_001065351 | 115483361 | Os10g0555900 [Oryza sativa Japonica Group] | 0.834586 | Oryza sativa Japonica Group | 3860 | 5141 |
| | | | | &gt:gi\|115502197\|sp\|Q336T5.2\|EXPB3_ORYSJ | | | | |
| | | | | RecName: Full = Expansin-B3; | | | | |
| | | | | AltName: Full = Beta-expansin-3; | | | | |
| | | | | AltName: Full = OsEXPB3; | | | | |
| | | | | AltName: Full = OsaEXPb1.10; | | | | |
| | | | | Flags: Precursor | | | | |
| | | | | &gt:gi\|8118423\|gb\|AAF72984.1\|AF261271_2 | | | | |
| | | | | beta-expansin [Oryza sativa] | | | | |
| | | | | &gt:gi\|13194235\|gb\|AAK15453.1\|AC037426_15 | | | | |
| | | | | beta-expansin EXPB3 | | | | |
| | | | | [Oryza sativa Japonica Group] | | | | |
| | | | | &gt:gi\|14165333\|gb\|AAK55465.1\|AC069300_20 | | | | |
| | | | | beta-expansin (EXPB3) | | | | |
| | | | | [Oryza sativa Japonica Group] | | | | |
| | | | | &gt:gi\|110289548\|gb\|ABB47975.2\| | | | | |
| | | | | Beta-expansin 1a precursor, putative, | | | | |
| | | | | expressed [Oryza sativa Japonica Group] | | | | |
| | | | | &gt:gi\|113639883\|dbj\|BAF27188.1\| | | | | |
| | | | | Os10g0555900 [Oryza sativa Japonica Group] | | | | |
| | | | | &gt:gi\|125532914\|gb\|EAY79479.1\| | | | | |
| | | | | hypothetical protein OsI_34607 | | | | |
| | | | | [Oryza sativa Indica Group] | | | | |
| | | | | &gt:gi\|169244487\|gb\|ACA50517.1\| | | | | |
| | | | | beta-expansin [Oryza sativa Japonica Group] | | | | |
| | | | | &gt:gi\|215704824\|dbj\|BAG94852.1\| | | | | |
| | | | | unnamed protein product | | | | |
| | | | | [Oryza sativa Japonica Group] | | | | |
| | | XP_002452339 | 242062099 | hypothetical protein SORBIDRAFT_04g023980 | 0.808271 | Sorghum bicolor | 3861 | 5142 |
| | | | | [Sorghum bicolor] | | | | |
| | | | | &gt:gi\|241932170\|gb\|EES05315.1\| | | | | |
| | | | | hypothetical protein SORBIDRAFT_04g023980 | | | | |
| | | | | [Sorghum bicolor] | | | | |
| | | AAS48881 | 44894799 | expansin EXPB3 [Triticum aestivum] | 0.819549 | Triticum aestivum | 3862 | 5143 |
| | | AAT99293 | 51242710 | beta-expansin TaEXPB2 | 0.819549 | Triticum aestivum | 3863 | 5144 |
| | | | | [Triticum aestivum] | | | | |
| | 285-304 | ACF81426 | 194694683 | unknown [Zea mays] | 1 | Zea mays | 3864 | 5145 |
| | | | | &gt:gi\|223946585\|gb\|ACN27376.1\| | | | | |
| | | | | unknown [Zea mays] | | | | |
| | 71-90 | XP_002445056 | 242080574 | hypothetical protein SORBIDRAFT_07g003430 | 1 | Sorghum bicolor | 3865 | 5146 |
| | | | | [Sorghum bicolor] | | | | |
| | | | | &gt:gi\|241941406\|gb\|EES14551.1\| | | | | |
| | | | | hypothetical protein SORBIDRAFT_07g003430 | | | | |
| | | | | [Sorghum bicolor] | | | | |
| | | NP_001132060 | 212721279 | hypothetical protein LOC100193472 | 0.813309 | Zea mays | 3866 | 5147 |
| | | | | [Zea mays] | | | | |
| | | | | &gt:gi\|194693322\|gb\|ACF80745.1\| | | | | |
| | | | | unknown [Zea mays] | | | | |
| | 579-598 | XP_002439103 | 242086540 | hypothetical protein SORBIDRAFT_09g000540 | 1 | Sorghum bicolor | 3867 | 5148 |
| | | | | [Sorghum bicolor] | | | | |
| | | | | &gt:gi\|241944388\|gb\|EES17533.1\| | | | | |
| | | | | hypothetical protein SORBIDRAFT_09g000540 | | | | |
| | | | | [Sorghum bicolor] | | | | |
| | | NP_001151078 | 226529502 | ras-related protein Rab11C [Zea mays] | 0.954545 | Zea mays | 3868 | 5149 |
| | | | | &gt:gi\|226958337\|ref\|NP_001152941.1\| | | | | |
| | | | | ras-related protein Rab11C [Zea mays] | | | | |
| | | | | &gt:gi\|195629564\|gb\|ACG36423.1\| | | | | |
| | | | | ras-related protein Rab11C [Zea mays] | | | | |
| | | | | &gt:gi\|195644124\|gb\|ACG41530.1\| | | | | |
| | | | | ras-related protein Rab11C [Zea mays] | | | | |
| | | | | &gt:gi\|223973589\|gb\|ACN30982.1\| | | | | |
| | | | | unknown [Zea mays] | | | | |
| | | NP_001054408 | 115461616 | Os05g0105100 [Oryza sativa Japonica Group] | 0.945455 | Oryza sativa Japonica Group | 3869 | 5150 |
| | | | | &gt:gi\|46359908\|gb\|AAS88840.1\| | | | | |
| | | | | putative GTP-binding protein | | | | |
| | | | | [Oryza sativa Japonica Group] | | | | |
| | | | | &gt:gi\|52353601\|gb\|AAU44167.1\| | | | | |
| | | | | putative GTP-binding protein | | | | |
| | | | | [Oryza sativa Japonica Group] | | | | |
| | | | | &gt:gi\|113577959\|dbj\|BAF16322.1\| | | | | |
| | | | | Os05g0105100 [Oryza sativa Japonica Group] | | | | |
| | | | | &gt:gi\|125550513\|gb\|EAY96222.1\| | | | | |
| | | | | hypothetical protein OsI_18113 | | | | |
| | | | | [Oryza sativa Indica Group] | | | | |
| | | | | &gt:gi\|215734964\|dbj\|BAG95686.1\| | | | | |
| | | | | unnamed protein product | | | | |
| | | | | [Oryza sativa Japonica Group] | | | | |
| | | | | &gt:gi\|222629896\|gb\|EEE62028.1\| | | | | |
| | | | | hypothetical protein OsJ_16810 | | | | |
| | | | | [Oryza sativa Japonica Group] | | | | |
| | | BAK04054 | 326521851 | predicted protein | 0.859091 | Hordeum vulgare subsp. vulgare | 3870 | 5151 |
| | | | | [Hordeum vulgare subsp. vulgare] | | | | |
| | | XP_002892514 | 297849265 | hypothetical protein ARALYDRAFT_888208 | 0.781818 | Arabidopsis lyrata subsp. lyrata | 3871 | 5152 |
| | | | | [Arabidopsis lyrata subsp. lyrata] | | | | |
| | | | | &gt:gi\|297338356\|gb\|EFH68773.1\| | | | | |
| | | | | hypothetical protein ARALYDRAFT_888208 | | | | |
| | | | | [Arabidopsis lyrata subsp. lyrata] | | | | |
| | | NP_172434 | 30681250 | Ras-related protein RABA2a | 0.777273 | Arabidopsis thaliana | 3872 | 5153 |
| | | | | [Arabidopsis thaliana] | | | | |
| | | | | &gt:gi\|3024516\|sp\|O04486.1\|RAA2A_ARATH | | | | |
| | | | | RecName: Full = Ras-related protein RABA2a; | | | | |
| | | | | Short = AtRABA2a; | | | | |
| | | | | AltName: Full = Ras-related protein Rab11C; | | | | |
| | | | | Short = AtRab11C; Flags: Precursor | | | | |
| | | | | &gt:gi\|2160157\|gb\|AAB60720.1\| | | | | |
| | | | | Strong similarity to A. thaliana | | | | |
| | | | | ara-2 (gb\|ATHARA2). ESTs | | | | |
| | | | | gb\|ATTS2483, gb\|ATTS2484, gb\|AA042159 | | | | |
| | | | | come from this gene | | | | |
| | | | | [Arabidopsis thaliana] | | | | |
| | | | | &gt:gi\|2231303\|gb\|AAB61994.1\| | | | | |
| | | | | ras-related small GTPase | | | | |
| | | | | [Arabidopsis thaliana] | | | | |
| | | | | &gt:gi\|15010638\|gb\|AAK73978.1\| | | | | |
| | | | | At1g09630/F21M12_2 [Arabidopsis thaliana] | | | | |
| | | | | &gt:gi\|21553810\|gb\|AAM62903.1\| | | | | |
| | | | | putative RAS-related protein RAB11C | | | | |
| | | | | [Arabidopsis thaliana] | | | | |
| | | | | &gt:gi\|22137284\|gb\|AAM91487.1\| | | | | |
| | | | | At1g09630/F21M12_2 [Arabidopsis thaliana] | | | | |
| | | | | &gt:gi\|332190350\|gb\|AEE28471.1\| | | | | |
| | | | | Ras-related protein RABA2a | | | | |
| | | | | [Arabidopsis thaliana] | | | | |
| | | XP_002264444 | 225465199 | PREDICTED: hypothetical protein | 0.795455 | Vitis vinifera | 3873 | 5154 |
| | | | | [Vitis vinifera] | | | | |
| | | | | &gt:gi\|297739506\|emb\|CBI29688.3\| | | | | |
| | | | | unnamed protein product | | | | |
| | | | | [Vitis vinifera] | | | | |
| | | NP_001147252 | 226491887 | ras-related protein Rab11C [Zea mays] | 0.781818 | Zea mays | 3874 | 5155 |
| | | | | &gt:gi\|195609118\|gb\|ACG26389.1\| | | | | |
| | | | | ras-related protein Rab11C [Zea mays] | | | | |
| | | ACU23049 | 255645099 | unknown [Glycine max] | 0.772727 | Glycine max | 3875 | 5156 |
| | | XP_002331128 | 224120065 | predicted protein [Populus trichocarpa] | 0.772727 | Populus trichocarpa | 3876 | 5157 |
| | | | | &gt:gi\|222872856\|gb\|EEF09987.1\| | | | | |
| | | | | predicted protein [Populus trichocarpa] | | | | |
| | 627-646 | XP_002489255 | 253761759 | hypothetical protein SORBIDRAFT_0012s021070 | 1 | Sorghum bicolor | 3877 | 5158 |
| | | | | [Sorghum bicolor] | | | | |
| | | | | &gt:gi\|241947115\|gb\|EES20260.1\| | | | | |
| | | | | hypothetical protein SORBIDRAFT_0012s021070 | | | | |
| | | | | [Sorghum bicolor] | | | | |
| | | NP_001149604 | 226532613 | LOC100283230 [Zea mays] | 0.976959 | Zea mays | 3878 | 5159 |
| | | | | &gt:gi\|195628412\|gb\|ACG36036.1\| | | | | |
| | | | | ras-related protein Rab11D [Zea mays] | | | | |
| | | | | &gt:gi\|224032313\|gb\|ACN35232.1\| | | | | |
| | | | | unknown [Zea mays] | | | | |
| | | NP_001064476 | 115481765 | Os10g0377400 [Oryza sativa Japonica Group] | 0.953917 | Oryza sativa Japonica Group | 3879 | 5160 |
| | | | | &gt:gi\|78708412\|gb\|ABB47387.1\| | | | | |
| | | | | Ras-related protein Rab11D, putative, | | | | |
| | | | | expressed [Oryza sativa Japonica Group] | | | | |
| | | | | &gt:gi\|113639085\|dbj\|BAF26390.1\| | | | | |
| | | | | Os10g0377400 [Oryza sativa Japonica Group] | | | | |
| | | | | &gt:gi\|215767227\|dbj\|BAG99455.1\| | | | | |
| | | | | unnamed protein product | | | | |
| | | | | [Oryza sativa Japonica Group] | | | | |
| | | | | &gt:gi\|218184417\|gb\|EEC66844.1\| | | | | |
| | | | | hypothetical protein OsI_33317 | | | | |
| | | | | [Oryza sativa Indica Group] | | | | |
| | | | | &gt:gi\|222612729\|gb\|EEE50861.1\| | | | | |
| | | | | hypothetical protein OsJ_31310 | | | | |
| | | | | [Oryza sativa Japonica Group] | | | | |
| | | XP_002465727 | 242036664 | hypothetical protein SORBIDRAFT_01g044550 | 0.917051 | Sorghum bicolor | 3880 | 5161 |
| | | | | [Sorghum bicolor] | | | | |
| | | | | &gt:gi\|241919581\|gb\|EER92725.1\| | | | | |
| | | | | hypothetical protein SORBIDRAFT_01g044550 | | | | |
| | | | | [Sorghum bicolor] | | | | |
| | | NP_001151068 | 226529762 | ras-related protein Rab11D [Zea mays] | 0.917051 | Zea mays | 3881 | 5162 |
| | | | | &gt:gi\|226958362\|ref\|NP_001152898.1\| | | | | |
| | | | | hypothetical protein LOC100272235 | | | | |
| | | | | [Zea mays] | | | | |
| | | | | &gt:gi\|194696242\|gb\|ACF82205.1\| | | | | |
| | | | | unknown [Zea mays] | | | | |
| | | | | &gt:gi\|195644068\|gb\|ACG41502.1\| | | | | |
| | | | | ras-related protein Rab11D [Zea mays] | | | | |
| | | NP_001151560 | 226503740 | ras-related protein Rab11D [Zea mays] | 0.912442 | Zea mays | 3882 | 5163 |
| | | | | &gt:gi\|194708702\|gb\|ACF88435.1\| | | | | |
| | | | | unknown [Zea mays] | | | | |
| | | | | &gt:gi\|195647718\|gb\|ACG43327.1\| | | | | |
| | | | | ras-related protein Rab11D [Zea mays] | | | | |
| | | BAJ93377 | 326528454 | predicted protein | 0.921659 | Hordeum vulgare subsp. vulgare | 3883 | 5164 |
| | | | | [Hordeum vulgare subsp. vulgare] | | | | |
| | | AAM08543 | 17298574 | Putative Ras-related protein Rab | 0.889401 | Oryza sativa Japonica Group | 3884 | 5165 |
| | | | | [Oryza sativa Japonica Group] | | | | |
| | | XP_002310552 | 224096150 | predicted protein [Populus trichocarpa] | 0.843318 | Populus trichocarpa | 3885 | 5166 |
| | | | | &gt:gi\|222853455\|gb\|EEE91002.1\| | | | | |
| | | | | predicted protein [Populus trichocarpa] | | | | |
| | | XP_002273530 | 225468179 | PREDICTED: hypothetical protein | 0.829493 | Vitis vinifera | 3886 | 5167 |
| | | | | [Vitis vinifera] | | | | |
| | | | | &gt:gi\|147811153\|emb\|CAN70163.1\| | | | | |
| | | | | hypothetical protein VITISV_039255 | | | | |
| | | | | [Vitis vinifera] | | | | |
| | 241-260 | NP_001141352 | 226529852 | hypothetical protein LOC100273443 | 1 | Zea mays | 3887 | 5168 |
| | | | | [Zea mays] | | | | |
| | | | | &gt:gi\|194704134\|gb\|ACF86151.1\| | | | | |
| | | | | unknown [Zea mays] | | | | |
| | 902-921 | NP_001168477 | 293334238 | hypothetical protein LOC100382253 | 1 | Zea mays | 3888 | 5169 |
| | | | | [Zea mays] | | | | |
| | | | | &gt:gi\|223948517\|gb\|ACN28342.1\| | | | | |
| | | | | unknown [Zea mays] | | | | |
| | | ACR36409 | 238010747 | unknown [Zea mays] | 0.870253 | Zea mays | 3889 | 5170 |
| | 615-634 | XP_002437204 | 242093427 | hypothetical protein SORBIDRAFT_10g022830 | 1 | Sorghum bicolor | 3890 | 5171 |
| | | | | [Sorghum bicolor] | | | | |
| | | | | &gt:gi\|241915427\|gb\|EER88571.1\| | | | | |
| | | | | hypothetical protein SORBIDRAFT_10g022830 | | | | |
| | | | | [Sorghum bicolor] | | | | |
| | | NP_001150723 | 226503328 | pectate lyase [Zea mays] | 0.865639 | Zea mays | 3891 | 5172 |
| | | | | &gt:gi\|195641318\|gb\|ACG40127.1\| | | | | |
| | | | | pectate lyase precursor [Zea mays] | | | | |
| | | NP_001057945 | 115468691 | Os06g0583900 [Oryza sativa Japonica Group] | 0.751101 | Oryza sativa Japonica Group | 3892 | 5173 |
| | | | | &gt:gi\|55296520\|dbj\|BAD68734.1\| | | | | |
| | | | | putative pectate lyase | | | | |
| | | | | [Oryza sativa Japonica Group] | | | | |
| | | | | &gt:gi\|113595985\|dbj\|BAF19859.1\| | | | | |
| | | | | Os06g0583900 [Oryza sativa Japonica Group] | | | | |
| | | | | &gt:gi\|215704206\|dbj\|BAG93046.1\| | | | | |
| | | | | unnamed protein product | | | | |
| | | | | [Oryza sativa Japonica Group] | | | | |
| | | | | &gt:gi\|218198444\|gb\|EEC80871.1\| | | | | |
| | | | | hypothetical protein OsI_23497 | | | | |
| | | | | [Oryza sativa Indica Group] | | | | |
| | | BAK06965 | 326513449 | predicted protein | 0.729075 | Hordeum vulgare subsp. vulgare | 3893 | 5174 |
| | | | | [Hordeum vulgare subsp. vulgare] | | | | |
| | 329-348 | XP_002447622 | 242075371 | hypothetical protein SORBIDRAFT_06g009000 | 1 | Sorghum bicolor | 3894 | 5175 |
| | | | | [Sorghum bicolor] | | | | |
| | | | | &gt:gi\|241938805\|gb\|EES11950.1\| | | | | |
| | | | | hypothetical protein SORBIDRAFT_06g009000 | | | | |
| | | | | [Sorghum bicolor] | | | | |
| | 759-778 | NP_001130136 | 212275801 | hypothetical protein LOC100191230 | 1 | Zea mays | 3895 | 5176 |
| | | | | [Zea mays] | | | | |
| | | | | &gt:gi\|194688374\|gb\|ACF78271.1\| | | | | |
| | | | | unknown [Zea mays] | | | | |
| | | | | &gt:gi\|223946699\|gb\|ACN27433.1\| | | | | |
| | | | | unknown [Zea mays] | | | | |
| | | | | &gt:gi\|224033665\|gb\|ACN35908.1\| | | | | |
| | | | | unknown [Zea mays] | | | | |
| | | ACG32118 | 195620575 | exopolygalacturonase precursor | 0.985577 | Zea mays | 3896 | 5177 |
| | | | | [Zea mays] | | | | |
| | | XP_002455693 | 242053094 | hypothetical protein SORBIDRAFT_03g021050 | 0.834135 | Sorghum bicolor | 3897 | 5178 |
| | | | | [Sorghum bicolor] | | | | |
| | | | | &gt:gi\|241927668\|gb\|EES00813.1\| | | | | |
| | | | | hypothetical protein SORBIDRAFT_03g021050 | | | | |
| | | | | [Sorghum bicolor] | | | | |
| | | NP_001141594 | 226503987 | hypothetical protein LOC100273711 | 0.831731 | Zea mays | 3898 | 5179 |
| | | | | [Zea mays] | | | | |
| | | | | &gt:gi\|194705208\|gb\|ACF86688.1\| | | | | |
| | | | | unknown [Zea mays] | | | | |
| | | ACG34252 | 195624843 | exopolygalacturonase precursor | 0.829327 | Zea mays | 3899 | 5180 |
| | | | | [Zea mays] | | | | |
| | 419-438 | XP_002464517 | 242034244 | hypothetical protein SORBIDRAFT_01g019940 | 1 | Sorghum bicolor | 3900 | 5181 |
| | | | | [Sorghum bicolor] | | | | |
| | | | | &gt:gi\|241918371\|gb\|EER91515.1\| | | | | |
| | | | | hypothetical protein SORBIDRAFT_01g019940 | | | | |
| | | | | [Sorghum bicolor] | | | | |
| | | NP_001168725 | 293336668 | hypothetical protein LOC100382517 | 0.858 | Zea mays | 3901 | 5182 |
| | | | | [Zea mays] | | | | |
| | | | | &gt:gi\|223950415\|gb\|ACN29291.1\| | | | | |
| | | | | unknown [Zea mays] | | | | |
| | 1035-1054 | XP_002447810 | 242075747 | hypothetical protein SORBIDRAFT_06g016230 | 1 | Sorghum bicolor | 3902 | 5183 |
| | | | | [Sorghum bicolor] | | | | |
| | | | | &gt:gi\|241938993\|gb\|EES12138.1\| | | | | |
| | | | | hypothetical protein SORBIDRAFT_06g016230 | | | | |
| | | | | [Sorghum bicolor] | | | | |
| | 654-673 | XP_002460936 | 242046129 | hypothetical protein SORBIDRAFT_02g037770 | 1 | Sorghum bicolor | 3903 | 5184 |
| | | | | [Sorghum bicolor] | | | | |
| | | | | &gt:gi\|241924313\|gb\|EER97457.1\| | | | | |
| | | | | hypothetical protein SORBIDRAFT_02g037770 | | | | |
| | | | | [Sorghum bicolor] | | | | |
| | | NP_001145615 | 226507742 | hypothetical protein LOC100279098 | 0.873846 | Zea mays | 3904 | 5185 |
| | | | | [Zea mays] | | | | |
| | | | | &gt:gi\|195658887\|gb\|ACG48911.1\| | | | | |
| | | | | hypothetical protein [Zea mays] | | | | |
| | | NP_001145067 | 226495966 | hypothetical protein LOC100278263 | 0.830769 | Zea mays | 3905 | 5186 |
| | | | | [Zea mays] | | | | |
| | | | | &gt:gi\|195650593\|gb\|ACG44764.1\| | | | | |
| | | | | hypothetical protein [Zea mays] | | | | |
| | 1012-1031 | XP_002452495 | 242062411 | hypothetical protein SORBIDRAFT_04g026900 | 1 | Sorghum bicolor | 3906 | 5187 |
| | | | | [Sorghum bicolor] | | | | |
| | | | | &gt:gi\|241932326\|gb\|EES05471.1\| | | | | |
| | | | | hypothetical protein SORBIDRAFT_04g026900 | | | | |
| | | | | [Sorghum bicolor] | | | | |
| | | ACF88069 | 194707969 | unknown [Zea mays] | 0.898947 | Zea mays | 3907 | 5188 |
| | | NP_001152245 | 226533273 | lysosomal protective protein [Zea mays] | 0.907368 | Zea mays | 3908 | 5189 |
| | | | | &gt:gi\|195654245\|gb\|ACG46590.1\| | | | | |
| | | | | lysosomal protective protein precursor | | | | |
| | | | | [Zea mays] | | | | |
| | | NP_001047514 | 115447468 | Os02g0634700 [Oryza sativa Japonica Group] | 0.825263 | Oryza sativa Japonica Group | 3909 | 5190 |
| | | | | &gt:gi\|49387538\|dbj\|BAD25094.1\| | | | | |
| | | | | putative carboxypeptidase D | | | | |
| | | | | [Oryza sativa Japonica Group] | | | | |
| | | | | &gt:gi\|49388186\|dbj\|BAD25312.1\| | | | | |
| | | | | putative carboxypeptidase D | | | | |
| | | | | [Oryza sativa Japonica Group] | | | | |
| | | | | &gt:gi\|113537045\|dbj\|BAF09428.1\| | | | | |
| | | | | Os02g0634700 [Oryza sativa Japonica Group] | | | | |
| | | | | &gt:gi\|215737473\|dbj\|BAG96603.1\| | | | | |
| | | | | unnamed protein product | | | | |
| | | | | [Oryza sativa Japonica Group] | | | | |
| | | | | &gt:gi\|215741081\|dbj\|BAG97576.1\| | | | | |
| | | | | unnamed protein product | | | | |
| | | | | [Oryza sativa Japonica Group] | | | | |
| | | | | &gt:gi\|222623302\|gb\|EEE57434.1\| | | | | |
| | | | | hypothetical protein OsJ_07638 | | | | |
| | | | | [Oryza sativa Japonica Group] | | | | |
| | | EEC73659 | 54362548 | hypothetical protein OsI_08191 | 0.825263 | Oryza sativa Indica Group | 3910 | |
| | | | | [Oryza sativa Indica Group] | | | | |
| | | ABF70080 | 102139931 | serine carboxypeptidase (carboxypeptidase D), | 0.722105 | Musa acuminata | 3911 | 5191 |
| | | | | putative [Musa acuminata] | | | | |
| | 1137-1156 | XP_002451244 | 242071934 | hypothetical protein SORBIDRAFT_05g026400 | 1 | Sorghum bicolor | 3912 | 5192 |
| | | | | [Sorghum bicolor] | | | | |
| | | | | &gt:gi\|241937087\|gb\|EES10232.1\| | | | | |
| | | | | hypothetical protein SORBIDRAFT_05g026400 | | | | |
| | | | | [Sorghum bicolor] | | | | |
| | | NP_001145980 | 226531268 | hypothetical protein LOC100279508 | 0.834177 | Zea mays | 3913 | 5193 |
| | | | | [Zea mays] | | | | |
| | | | | &gt:gi\|219885199\|gb\|ACL52974.1\| | | | | |
| | | | | unknown [Zea mays] | | | | |
| | | NP_001068441 | 115486594 | Os11g0673200 [Oryza sativa Japonica Group] | 0.777215 | Oryza sativa Japonica Group | 3914 | 5194 |
| | | | | &gt:gi\|113645663\|dbj\|BAF28804.1\| | | | | |
| | | | | Os11g0673200 [Oryza sativa Japonica Group] | | | | |
| | | ACG29242 | 195614823 | auxin-induced beta-glucosidase [Zea mays] | 0.702532 | Zea mays | 3915 | 5195 |
| | | EAY81823 | 54362548 | hypothetical protein OsI_36995 | 0.775949 | Oryza sativa Indica Group | 3916 | |
| | | | | [Oryza sativa Indica Group] | | | | |
| | | ABA95273 | 108863896 | Beta-D-xylosidase, putative, expressed | 0.777215 | Oryza sativa Japonica Group | 3917 | |
| | | | | [Oryza sativa Japonica Group] | | | | |
| | 951-970 | NP_001147443 | 226493965 | peroxidase 52[Zea mays] | 1 | Zea mays | 3918 | 5196 |
| | | | | &gt:gi\|195611432\|gb\|ACG27546.1\| | | | | |
| | | | | peroxidase 52 precursor [Zea mays] | | | | |
| | | EEC75221 | 54362548 | hypothetical protein OsI_11488 | 0.779456 | Oryza sativa Indica Group | 3919 | |
| | | | | [Oryza sativa Indica Group] | | | | |
| | | CAH69282 | 55700946 | TPA: class III peroxidase 40 precursor | 0.776435 | Oryza sativa Japonica Group | 3920 | 5197 |
| | | | | [Oryza sativa Japonica Group] | | | | |
| | | ABF95843 | 108705663 | Peroxidase 52 precursor, putative, | 0.776435 | Oryza sativa Japonica Group | 3921 | |
| | | | | expressed [Oryza sativa Japonica Group] | | | | |
| | | | | &gt:gi\|222624896\|gb\|EEE59028.1\| | | | | |
| | | | | hypothetical protein OsJ_10775 | | | | |
| | | | | [Oryza sativa Japonica Group] | | | | |
| | | BAK00939 | 326529090 | predicted protein | 0.767372 | Hordeum vulgare subsp. vulgare | 3922 | 5198 |
| | | | | [Hordeum vulgare subsp. vulgare] | | | | |
| | 1197-1216 | ACG45528 | 195652120 | ubiquitin-protein ligase [Zea mays] | 1 | Zea mays | 3923 | 5199 |
| | | NP_001152043 | 226491951 | ubiquitin-protein ligase [Zea mays] | 0.997015 | Zea mays | 3924 | 5200 |
| | | | | &gt:gi\|194697400\|gb\|ACF82784.1\| | | | | |
| | | | | unknown [Zea mays] | | | | |
| | | | | &gt:gi\|219886369\|gb\|ACL53559.1\| | | | | |
| | | | | unknown [Zea mays] | | | | |
| | | | | &gt:gi\|223942179\|gb\|ACN25173.1\| | | | | |
| | | | | unknown [Zea mays] | | | | |
| | | | | &gt:gi\|224028595\|gb\|ACN33373.1\| | | | | |
| | | | | unknown [Zea mays] | | | | |
| | | XP_002454240 | 242065901 | hypothetical protein SORBIDRAFT_04g027350 | 0.877612 | Sorghum bicolor | 3925 | 5201 |
| | | | | [Sorghum bicolor] | | | | |
| | | | | &gt:gi\|241934071\|gb\|EES07216.1\| | | | | |
| | | | | hypothetical protein SORBIDRAFT_04g027350 | | | | |
| | | | | [Sorghum bicolor] | | | | |
| | | NP_001048172 | 115448784 | Os02g0757700 [Oryza sativa Japonica Group] | 0.79403 | Oryza sativa Japonica Group | 3926 | 5202 |
| | | | | &gt:gi\|46805687\|dbj\|BAD17088.1\| | | | | |
| | | | | F-box protein-like | | | | |
| | | | | [Oryza sativa Japonica Group] | | | | |
| | | | | &gt:gi\|113537703\|dbj\|BAF10086.1\| | | | | |
| | | | | Os02g0757700 [Oryza sativa Japonica Group] | | | | |
| | | | | &gt:gi\|125541199\|gb\|EAY87594.1\| | | | | |
| | | | | hypothetical protein OsI_09005 | | | | |
| | | | | [Oryza sativa Indica Group] | | | | |
| | | | | &gt:gi\|125583751\|gb\|EAZ24682.1\| | | | | |
| | | | | hypothetical protein OsJ_08452 | | | | |
| | | | | [Oryza sativa Japonica Group] | | | | |
| | | NP_001141525 | 226506077 | hypothetical protein LOC100273637 | 0.847761 | Zea mays | 3927 | 5203 |
| | | | | [Zea mays] | | | | |
| | | | | &gt:gi\|194696402\|gb\|ACF82285.1\| | | | | |
| | | | | unknown [Zea mays] | | | | |
| | | | | &gt:gi\|194704930\|gb\|ACF86549.1\| | | | | |
| | | | | unknown [Zea mays] | | | | |
| | | ACF79744 | 194691319 | unknown [Zea mays] | 0.844776 | Zea mays | 3928 | 5204 |
| | | ACG31703 | 195619745 | ubiquitin-protein ligase [Zea mays] | 0.844776 | Zea mays | 3929 | 5205 |
| | | NP_001057164 | 115467129 | Os06g0219700 [Oryza sativa Japonica Group] | 0.728358 | Oryza sativa Japonica Group | 3930 | 5206 |
| | | | | &gt:gi\|51535368\|dbj\|BAD37239.1\| | | | | |
| | | | | F-box protein-like | | | | |
| | | | | [Oryza sativa Japonica Group] | | | | |
| | | | | &gt:gi\|113595204\|dbj\|BAF19078.1\| | | | | |
| | | | | Os06g0219700 [Oryza sativa Japonica Group] | | | | |
| | | | | &gt:gi\|125554574\|gb\|EAZ00180.1\| | | | | |
| | | | | hypothetical protein OsI_22185 | | | | |
| | | | | [Oryza sativa Indica Group] | | | | |
| | | | | &gt:gi\|125596515\|gb\|EAZ36295.1\| | | | | |
| | | | | hypothetical protein OsJ_20616 | | | | |
| | | | | [Oryza sativa Japonica Group] | | | | |
| | | | | &gt:gi\|215697729\|dbj\|BAG91723.1\| | | | | |
| | | | | unnamed protein product | | | | |
| | | | | [Oryza sativa Japonica Group] | | | | |
| | | BAJ92240 | 326514179 | predicted protein | 0.701493 | Hordeum vulgare subsp. vulgare | 3931 | 5207 |
| | | | | [Hordeum vulgare subsp. vulgare] | | | | |
| | 779-798 | AAR30916 | 39777292 | phytochrome B [Sorghum propinquum] | 1 | Sorghum propinquum | 3932 | |
| | | AAR30915 | 39777290 | phytochrome B | 0.998301 | Sorghum bicolor subsp. × drummondii | 3933 | |
| | | | | [Sorghum bicolor subsp. × drummondii] | | | | |
| | | XP_002467973 | 242041156 | hypothetical protein SORBIDRAFT_01g037340 | 0.998301 | Sorghum bicolor | 3934 | 5208 |
| | | | | [Sorghum bicolor] | | | | |
| | | | | &gt:gi\|39777261\|gb\|AAR30900.1\| | | | | |
| | | | | phytochrome B [Sorghum bicolor] | | | | |
| | | | | &gt:gi\|39777263\|gb\|AAR30901.1\| | | | | |
| | | | | phytochrome B [Sorghum bicolor] | | | | |
| | | | | &gt:gi\|39777265\|gb\|AAR30902.1\| | | | | |
| | | | | phytochrome B [Sorghum bicolor] | | | | |
| | | | | &gt:gi\|39777269\|gb\|AAR30904.1\| | | | | |
| | | | | phytochrome B [Sorghum bicolor] | | | | |
| | | | | &gt:gi\|39777275\|gb\|AAR30907.1\| | | | | |
| | | | | phytochrome B | | | | |
| | | | | [Sorghum bicolor subsp. | | | | |
| | | | | verticilliflorum] | | | | |
| | | | | &gt:gi\|39777277\|gb\|AAR30908.1\| | | | | |
| | | | | phytochrome B | | | | |
| | | | | [Sorghum bicolor subsp. | | | | |
| | | | | verticilliflorum] | | | | |
| | | | | &gt:gi\|39777279\|gb\|AAR30909.1\| | | | | |
| | | | | phytochrome B | | | | |
| | | | | [Sorghum bicolor subsp. | | | | |
| | | | | verticilliflorum] | | | | |
| | | | | &gt:gi\|39777281\|gb\|AAR30910.1\| | | | | |
| | | | | phytochrome B | | | | |
| | | | | [Sorghum bicolor subsp. | | | | |
| | | | | verticilliflorum] | | | | |
| | | | | &gt:gi\|39777283\|gb\|AAR30911.1\| | | | | |
| | | | | phytochrome B | | | | |
| | | | | [Sorghum bicolor subsp. | | | | |
| | | | | verticilliflorum] | | | | |
| | | | | &gt:gi\|39777285\|gb\|AAR30912.1\| | | | | |
| | | | | phytochrome B | | | | |
| | | | | [Sorghum bicolor subsp. | | | | |
| | | | | verticilliflorum] | | | | |
| | | | | &gt:gi\|39777287\|gb\|AAR30913.1\| | | | | |
| | | | | phytochrome B | | | | |
| | | | | [Sorghum bicolor subsp. | | | | |
| | | | | verticilliflorum] | | | | |
| | | | | &gt:gi\|241921827\|gb\|EER94971.1\| | | | | |
| | | | | hypothetical protein SORBIDRAFT_01g037340 | | | | |
| | | | | [Sorghum bicolor] | | | | |
| | | AAR30914 | 39777288 | phytochrome B | 0.997451 | Sorghum bicolor subsp. | 3935 | |
| | | | | [Sorghum bicolor subsp. | | verticilliflorum | | |
| | | | | verticilliflorum] | | | | |
| | | AAR30903 | 39777266 | phytochrome B [Sorghum bicolor] | 0.997451 | Sorghum bicolor | 3936 | |
| | | AAR30905 | 39777270 | phytochrome B [Sorghum bicolor] | 0.996602 | Sorghum bicolor | 3937 | |
| | | | | &gt:gi\|39777273\|gb\|AAR30906.1\| | | | | |
| | | | | phytochrome B [Sorghum bicolor] | | | | |
| | | P93527 | | RecName: Full = Phytochrome B | 0.995752 | Sorghum bicolor | 3938 | |
| | | | | &gt:gi\|7110162\|gb\|AAB41398.2\| | | | | |
| | | | | phytochrome B [Sorghum bicolor] | | | | |
| | | NP_001169810 | 293335472 | hypothetical protein LOC100383702 | 0.95582 | Zea mays | 3939 | 5209 |
| | | | | [Zea mays] | | | | |
| | | | | &gt:gi\|37926866\|gb\|AAP06788.1\| | | | | |
| | | | | phytochrome B1 apoprotein [Zea mays] | | | | |
| | | NP_001168077 | 293336622 | hypothetical protein LOC100381811 | 0.932031 | Zea mays | 3940 | 5210 |
| | | | | [Zea mays] | | | | |
| | | | | &gt:gi\|37926881\|gb\|AAP06789.1\| | | | | |
| | | | | phytochrome B2 apoprotein [Zea mays] | | | | |
| | | Q10MG9 | | RecName: Full = Phytochrome B | 0.912489 | Oryza sativa Japonica Group | 3941 | |
| | | | | &gt:gi\|30578178\|dbj\|BAC76432.1\| | | | | |
| | | | | phytochrome B | | | | |
| | | | | [Oryza sativa Japonica Group] | | | | |
| | | | | &gt:gi\|57506674\|dbj\|BAD86669.1\| | | | | |
| | | | | phytochrome B | | | | |
| | | | | [Oryza sativa Japonica Group] | | | | |
| | | | | &gt:gi\|108707763\|gb\|ABF95558.1\| | | | | |
| | | | | Phytochrome B, putative, expressed | | | | |
| | | | | [Oryza sativa Japonica Group] | | | | |
| | 1398-1417 | NP_001146696 | 226503338 | hypothetical protein LOC100280297 | 1 | Zea mays | 3942 | 5211 |
| | | | | [Zea mays] | | | | |
| | | | | &gt:gi\|219888377\|gb\|ACL54563.1\| | | | | |
| | | | | unknown [Zea mays] | | | | |
| | 606-625 | NP_001151271 | 226500783 | beta-amylase [Zea mays] | 1 | Zea mays | 3943 | 5212 |
| | | | | &gt:gi\|195645426\|gb\|ACG42181.1\| | | | | |
| | | | | beta-amylase [Zea mays] | | | | |
| | | XP_002467860 | 242040930 | hypothetical protein SORBIDRAFT_01g035370 | 0.815642 | Sorghum bicolor | 3944 | 5213 |
| | | | | [Sorghum bicolor] | | | | |
| | | | | &gt:gi\|241921714\|gb\|EER94858.1\| | | | | |
| | | | | hypothetical protein SORBIDRAFT_01g035370 | | | | |
| | | | | [Sorghum bicolor] | | | | |
| Predicted | 269-290 | ACN35534 | 224032916 | unknown [Zea mays] | 1 | Zea mays | 3945 | 5214 |
| zma | | | | | | | | |
| mir | | | | | | | | |
| 50486 | | | | | | | | |
| | | ACG33974 | 195624287 | hypothetical protein [Zea mays] | 0.991189 | Zea mays | 3946 | 5215 |
| | | NP_001136584 | 219363442 | hypothetical protein LOC100216707 | 0.894273 | Zea mays | 3947 | 5216 |
| | | | | [Zea mays] | | | | |
| | | | | &gt:gi\|194696272\|gb\|ACF82220.1\| | | | | |
| | | | | unknown [Zea mays] | | | | |
| | | XP_002466626 | 242038462 | hypothetical protein SORBIDRAFT_01g011230 | 0.854626 | Sorghum bicolor | 3948 | 5217 |
| | | | | [Sorghum bicolor] | | | | |
| | | | | &gt:gi\|241920480\|gb\|EER93624.1\| | | | | |
| | | | | hypothetical protein SORBIDRAFT_01g011230 | | | | |
| | | | | [Sorghum bicolor] | | | | |
| | | NP_001050978 | 115454754 | Os03g0696000 [Oryza sativa Japonica Group] | 0.76652 | Oryza sativa Japonica Group | 3949 | 5218 |
| | | | | &gt:gi\|108710552\|gb\|ABF98347.1\| expressed | | | | |
| | | | | protein [Oryza sativa Japonica Group] | | | | |
| | | | | &gt:gi\|113549449\|dbj\|BAF12892.1\| | | | | |
| | | | | Os03g0696000 [Oryza sativa Japonica Group] | | | | |
| | | | | &gt:gi\|215766532\|dbj\|BAG98840.1\| | | | | |
| | | | | unnamed protein product | | | | |
| | | | | [Oryza sativa Japonica Group] | | | | |
| Predicted | 1103-1122 | NP_001130769 | 212276197 | hypothetical protein LOC100191873 [Zea mays] | 1 | Zea mays | 3950 | 5219 |
| zma | | | | &gt:gi\|194690070\|gb\|ACF79119.1\| | | | | |
| mir | | | | unknown [Zea mays] | | | | |
| 50570 | | | | | | | | |
| | | ACG47274 | 195655612 | cys2/His2 zinc-finger transcription | 0.961877 | Zea mays | 3951 | 5220 |
| | | | | factor [Zea mays] | | | | |
| | | NP_001152162 | 226532358 | cys2/His2 zinc-finger transcription | 0.777126 | Zea mays | 3952 | 5221 |
| | | | | factor [Zea mays] | | | | |
| | | | | &gt:gi\|195653369\|gb\|ACG46152.1\| | | | | |
| | | | | cys2/His2 zinc-finger transcription | | | | |
| | | | | factor [Zea mays] | | | | |
| | | | | &gt:gi\|223947915\|gb\|ACN28041.1\| | | | | |
| | | | | unknown [Zea mays] | | | | |
| | | XP_002464952 | 242035114 | hypothetical protein SORBIDRAFT_01g029370 | 0.765396 | Sorghum bicolor | 3953 | 5222 |
| | | | | [Sorghum bicolor] | | | | |
| | | | | &gt:gi\|241918806\|gb\|EER91950.1\| | | | | |
| | | | | hypothetical protein SORBIDRAFT_01g029370 | | | | |
| | | | | [Sorghum bicolor] | | | | |
| Predicted | 336-355 | ACG38830 | 195638723 | nucleotide binding protein [Zea mays] | 1 | Zea mays | 3954 | 5223 |
| zma | | | | | | | | |
| mir | | | | | | | | |
| 50682 | | | | | | | | |
| | | NP_001150233 | 226495198 | nucleotide binding protein [Zea mays] | 0.925466 | Zea mays | 3955 | 5224 |
| | | | | &gt:gi\|195637698\|gb\|ACG38317.1\| | | | | |
| | | | | nucleotide binding protein [Zea mays] | | | | |
| | 138-157 | XP_002453342 | 242064105 | hypothetical protein SORBIDRAFT_04g004 160 | 1 | Sorghum bicolor | 3956 | 5225 |
| | | | | [Sorghum bicolor] | | | | |
| | | | | &gt:gi\|241933173\|gb\|EES06318.1\| | | | | |
| | | | | hypothetical protein SORBIDRAFT_04g004 160 | | | | |
| | | | | [Sorghum bicolor] | | | | |
| | | EEE56349 | 54398660 | hypothetical protein OsJ_05464 | 0.838996 | Oryza sativa Japonica Group | 3957 | |
| | | | | [Oryza sativa Japonica Group] | | | | |
| | | BAD28046 | 45382008 | putative Helicase SKI2W | 0.774742 | Oryza sativa Japonica Group | 3958 | |
| | | | | [Oryza sativa Japonica Group] | | | | |
| | 554-573 | XP_002466420 | 242038050 | hypothetical protein SORBIDRAFT_01g007510 | 1 | Sorghum bicolor | 3959 | 5226 |
| | | | | [Sorghum bicolor] | | | | |
| | | | | &gt:gi\|241920274\|gb\|EER93418.1\| | | | | |
| | | | | hypothetical protein SORBIDRAFT_01g007510 | | | | |
| | | | | [Sorghum bicolor] | | | | |
| Predicted | 24-42 | XP_002437845 | 242094709 | hypothetical protein SORBIDRAFT_10g003610 | 1 | Sorghum bicolor | 3960 | 5227 |
| zma | | | | [Sorghum bicolor] | | | | |
| mir | | | | &gt:gi\|241916068\|gb\|EER89212.1\| | | | | |
| 50701 | | | | hypothetical protein SORBIDRAFT_10g003610 | | | | |
| | | | | [Sorghum bicolor] | | | | |
| | | NP_001149507 | 226500789 | LOC100283133 [Zea mays] | 0.986014 | Zea mays | 3961 | 5228 |
| | | | | &gt:gi\|195621266\|gb\|ACG32463.1\| | | | | |
| | | | | trafficking protein particle complex | | | | |
| | | | | subunit 4 [Zea mays] | | | | |
| | | | | &gt:gi\|195627666\|gb\|ACG35663.1\| | | | | |
| | | | | trafficking protein particle complex | | | | |
| | | | | subunit 4 [Zea mays] | | | | |
| | | | | &gt:gi\|223974417\|gb\|ACN31396.1\| | | | | |
| | | | | unknown [Zea mays] | | | | |
| | | | | &gt:gi\|223974509\|gb\|ACN3 1442.1\| | | | | |
| | | | | unknown [Zea mays] | | | | |
| | | NP_001131958 | 212721385 | hypothetical protein LOC100193354 | 0.979021 | Zea mays | 3962 | 5229 |
| | | | | [Zea mays] | | | | |
| | | | | &gt:gi\|194693036\|gb\|ACF80602.1\| | | | | |
| | | | | unknown [Zea mays] | | | | |
| | | | | &gt:gi\|194696020\|gb\|ACF82094.1\| | | | | |
| | | | | unknown [Zea mays] | | | | |
| | | | | &gt:gi\|223973055\|gb\|ACN30715.1\| | | | | |
| | | | | unknown [Zea mays] | | | | |
| | | ACG45824 | 195652712 | trafficking protein particle complex | 0.972028 | Zea mays | 3963 | 5230 |
| | | | | subunit 4 [Zea mays] | | | | |
| | | ACG47442 | 195655948 | trafficking protein particle complex | 0.972028 | Zea mays | 3964 | 5231 |
| | | | | subunit 4 [Zea mays] | | | | |
| | | NP_001059557 | 115471916 | Os07g0454700 [Oryza sativa Japonica Group] | 0.937063 | Oryza sativa Japonica Group | 3965 | 5232 |
| | | | | &gt:gi\|28971996\|dbj\|BAC65404.1\| | | | | |
| | | | | synbindin-like protein | | | | |
| | | | | [Oryza sativa Japonica Group] | | | | |
| | | | | &gt:gi\|113611093\|dbj\|BAF21471.1\| | | | | |
| | | | | Os07g0454700 [Oryza sativa Japonica Group] | | | | |
| | | | | &gt:gi\|125600106\|gb\|EAZ39682.1\| | | | | |
| | | | | hypothetical protein OsJ_24117 | | | | |
| | | | | [Oryza sativa Japonica Group] | | | | |
| | | | | &gt:gi\|215764944\|dbj\|BAG86641.1\| | | | | |
| | | | | unnamed protein product | | | | |
| | | | | [Oryza sativa Japonica Group] | | | | |
| | | | | &gt:gi\|218199540\|gb\|EEC81967.1\| | | | | |
| | | | | hypothetical protein OsI_25868 | | | | |
| | | | | [Oryza sativa Indica Group] | | | | |
| | | NP_001174604 | 297724480 | Os06g0151300 [Oryza sativa Japonica Group] | 0.923077 | Oryza sativa Japonica Group | 3966 | 5233 |
| | | | | &gt:gi\|222634966\|gb\|EEE65098.1\| | | | | |
| | | | | hypothetical protein OsJ_20146 | | | | |
| | | | | [Oryza sativa Japonica Group] | | | | |
| | | | | &gt:gi\|255676723\|dbj\|BAH93332.1\| | | | | |
| | | | | Os06g0151300 [Oryza sativa Japonica Group] | | | | |
| | | XP_002534307 | 255587545 | synbindin, putative [Ricinus communis] | 0.839161 | Ricinus communis | 3967 | 5234 |
| | | | | &gt:gi\|223525526\|gb\|EEF28075.1\| | | | | |
| | | | | synbindin, putative [Ricinus communis] | | | | |
| | | XP_002281149 | 225450513 | PREDICTED: hypothetical protein | 0.846154 | Vitis vinifera | 3968 | 5235 |
| | | | | [Vitis vinifera] | | | | |
| | | | | &gt:gi\|147807581\|emb\|CAN66318.1\| | | | | |
| | | | | hypothetical protein VITISV_040622 | | | | |
| | | | | [Vitis vinifera] | | | | |
| | | | | &gt:gi\|296089818\|emb\|CBI39637.3\| | | | | |
| | | | | unnamed protein product | | | | |
| | | | | [Vitis vinifera] | | | | |
| | | XP_002314001 | 224105980 | predicted protein [Populus trichocarpa] | 0.839161 | Populus trichocarpa | 3969 | 5236 |
| | | | | &gt:gi\|222850409\|gb\|EEE87956.1\| | | | | |
| | | | | predicted protein [Populus trichocarpa] | | | | |

[0344] Target sequences according to the teachings of the invention can be overexpressed or silenced as described herein. Methods of generating transgenic plants are described in Example 6, selection according to expression level is described in Example 7, selection according to tolerance to abiotic stress is described in Examples 8 and 9, above. Generally, target genes of upregulated miRNAs are contemplated to be downregulated; conversely target genes of downregulated miRNAs are contemplated to be upregulated according to the present teachings.

TABLE 23
Abbreviations of Plant Species

| | | Abbrevi- |
|---|---|---|
| Common Name | Organism Name | ation |
| Peanut | Arachis hypogaea | ahy |
| Arabidopsis lyrata | Arabidopsis lyrata | aly |
| Rocky Mountain Columbine | Aquilegia coerulea | aqc |
| Tausch's goatgrass | Aegilops taushii | ata |
| Arabidopsis thaliana | Arabidopsis thaliana | ath |
| Grass | Brachypodium distachyon | bdi |
| Brassica napus canola | Brassica napus | bna |
| (“liftit”) | | |
| Brassica oleracea wild | Brassica oleracea | bol |
| cabbage | | |
| Brassica rapa yellow | Brassica rapa | bra |
| mustard | | |
| Clementine | Citrus clementine | ccl |
| Orange | Citrus sinensis | csi |
| Trifoliate orange | Citrus trifoliata | ctr |
| Glycine max | Glycine max | gma |
| Wild soybean | Glycine soja | gso |
| Barley | Hordeum vulgare | hvu |
| Lotus japonicus | Lotus japonicus | lja |
| Medicago truncatula - | Medicago truncatula | mtr |
| Barrel Clover (“tiltan”) | | |
| Oryza sativa | Oryza sativa | osa |
| European spruce | Picea abies | pab |
| Physcomitrella patens | Physcomitrella patens | ppt |
| (moss) | | |
| Pinus taeda - Loblolly | Pinus taeda | pta |
| Pine | | |
| Populus trichocarpa - | Populus trichocarpa | ptc |
| black cotton wood | | |
| Castor bean (“kikayon”) | Ricinus communis | rco |
| Sorghum bicolor Dura | Sorghum bicolor | sbi |
| tomato microtom | Solanum lycopersicum | sly |
| Selaginella | Selaginella | smo |
| moellendorffii | moellendorffii | |
| Sugarcane | Saccharum spp | ssp |
| Triticum aestivum | Triticum aestivum | tae |
| cacao tree and cocoa tree | Theobroma cacao | tcc |
| Vitis vinifera Grapes | Vitis vinifera | vvi |
| corn | Zea mays | zma |

[0345] Although the invention has been described in conjunction with specific embodiments thereof, it is evident that many alternatives, modifications and variations will be apparent to those skilled in the art. Accordingly, it is intended to embrace all such alternatives, modifications and variations that fall within the spirit and broad scope of the appended claims.

[0346] All publications, patents and patent applications mentioned in this specification are herein incorporated in their entirety by reference into the specification, to the same extent as if each individual publication, patent or patent application was specifically and individually indicated to be incorporated herein by reference. In addition, citation or identification of any reference in this application shall not be construed as an admission that such reference is available as prior art to the present invention. To the extent that section headings are used, they should not be construed as necessarily limiting.

The application's sequence listing, which the Patent Office published only in electronic form, follows.

SEQUENCE LISTING (5236 sequences)

SEQ ID NO: 1 - DNA, 24 bp, Artificial sequence
  Predicted folded 24-nts-long seq 52255
ccgcacttgtagcttcgataggat

SEQ ID NO: 2 - DNA, 22 bp, Artificial sequence
  Predicted siRNA
gatgtgggcaaaaggacggtag

SEQ ID NO: 3 - DNA, 20 bp, Artificial sequence
  Predicted siRNA
aggaactggggcatcaagtg

SEQ ID NO: 4 - DNA, 22 bp, Artificial sequence
  Predicted Zea mays mir
aaaaagggggagaaatgagcaa

SEQ ID NO: 5 - DNA, 22 bp, Artificial sequence
  Predicted Zea mays mir
aagcgagcggggtgtctcaaat

SEQ ID NO: 6 - DNA, 21 bp, Artificial sequence
  Predicted Zea mays mir
agatgggctgactatggggga

SEQ ID NO: 7 - DNA, 23 bp, Artificial sequence
  Predicted Zea mays mir
aggaaagtagagtaggcacagat

SEQ ID NO: 8 - DNA, 22 bp, Artificial sequence
  Predicted Zea mays mir
aggaagtgctaagaagtgaaat

SEQ ID NO: 9 - DNA, 21 bp, Artificial sequence
  Predicted Zea mays mir
aggtactgtaactggtattct

SEQ ID NO: 10 - DNA, 22 bp, Artificial sequence
  Predicted Zea mays mir
atgctatttgtacccgtcaccg

SEQ ID NO: 11 - DNA, 22 bp, Artificial sequence
  Predicted Zea mays mir
atggcattgatcaagggggaga

SEQ ID NO: 12 - DNA, 23 bp, Artificial sequence
  Predicted Zea mays mir
cagtgcaatgggatgtggctatt

SEQ ID NO: 13 - DNA, 23 bp, Artificial sequence
  Predicted Zea mays mir
cgtggagatatagggggaagaga

SEQ ID NO: 14 - DNA, 23 bp, Artificial sequence
  Predicted Zea mays mir
gatgagaggaatggaagtgattg

SEQ ID NO: 15 - DNA, 21 bp, Artificial sequence
  Predicted Zea mays mir
gctaggatacgagtcgaggct

SEQ ID NO: 16 - DNA, 24 bp, Artificial sequence
  Predicted folded 24-nts-long seq 52255
ccgcacttgtagcttcgataggat

SEQ ID NO: 17 - DNA, 22 bp, Artificial sequence
  Predicted siRNA
gatgtgggcaaaaggacggtag

SEQ ID NO: 18 - DNA, 24 bp, Artificial sequence
  Predicted siRNA
gagtacgtagtcgcgaagcataat

SEQ ID NO: 19 - DNA, 20 bp, Artificial sequence
  Predicted siRNA
aggaactggggcatcaagtg

SEQ ID NO: 20 - DNA, 22 bp, Artificial sequence
  Predicted Zea mays mir
aaaaagggggagaaatgagcaa

SEQ ID NO: 21 - DNA, 22 bp, Artificial sequence
  Predicted Zea mays mir
aagcgagcggggtgtctcaaat

SEQ ID NO: 22 - DNA, 21 bp, Artificial sequence
  Predicted Zea mays mir
agatgggctgactatggggga

SEQ ID NO: 23 - DNA, 23 bp, Artificial sequence
  Predicted Zea mays mir
aggaaagtagagtaggcacagat

SEQ ID NO: 24 - DNA, 22 bp, Artificial sequence
  Predicted Zea mays mir
aggaagtgctaagaagtgaaat

SEQ ID NO: 25 - DNA, 21 bp, Artificial sequence
  Predicted Zea mays mir
aggtactgtaactggtattct

SEQ ID NO: 26 - DNA, 23 bp, Artificial sequence
  Predicted Zea mays mir
atgagtacgtagtcgcgaagcat

SEQ ID NO: 27 - DNA, 22 bp, Artificial sequence
  Predicted Zea mays mir
atgctatttgtacccgtcaccg

SEQ ID NO: 28 - DNA, 22 bp, Artificial sequence
  Predicted Zea mays mir
atggcattgatcaagggggaga

SEQ ID NO: 29 - DNA, 23 bp, Artificial sequence
  Predicted Zea mays mir
cagtgcaatgggatgtggctatt

SEQ ID NO: 30 - DNA, 23 bp, Artificial sequence
  Predicted Zea mays mir
cgtggagatatagggggaagaga

SEQ ID NO: 31 - DNA, 23 bp, Artificial sequence
  Predicted Zea mays mir
gatgagaggaatggaagtgattg

SEQ ID NO: 32 - DNA, 21 bp, Artificial sequence
  Predicted Zea mays mir
gctaggatacgagtcgaggct

SEQ ID NO: 33 - DNA, 24 bp, Artificial sequence
  Predicted folded 24-nts-long seq 54187
tttgctcatgggagcagcagggct

SEQ ID NO: 34 - DNA, 22 bp, Artificial sequence
  Predicted Zea mays mir
aaagctgaaggtacgaaagaat

SEQ ID NO: 35 - DNA, 21 bp, Artificial sequence
  Predicted Zea mays mir
aggaagggacatgcagaggag

SEQ ID NO: 36 - DNA, 21 bp, Artificial sequence
  Predicted Zea mays mir
atttggaatcgtcttaggcct

SEQ ID NO: 37 - DNA, 21 bp, Artificial sequence
  Predicted Zea mays mir
cagatcccactctcgtcacca

SEQ ID NO: 38 - DNA, 21 bp, Artificial sequence
  Predicted Zea mays mir
catatcccactctcgtcacca

SEQ ID NO: 39 - DNA, 21 bp, Artificial sequence
  Predicted Zea mays mir
tcaccagcgctgcactcaatt

SEQ ID NO: 40 - DNA, 21 bp, Artificial sequence
  Predicted Zea mays mir
tggaaggggcatgcagattct

SEQ ID NO: 41 - DNA, 21 bp, Artificial sequence
  Predicted Zea mays mir
tggatttggatagaagggtac

SEQ ID NO: 42 - DNA, 21 bp, Artificial sequence
  Predicted Zea mays mir
tggcagggtcatgcagaggag

SEQ ID NO: 43 - DNA, 24 bp, Artificial sequence
  Predicted folded 24-nts-long seq 54187
tttgctcatgggagcagcagggct

SEQ ID NO: 44 - DNA, 22 bp, Artificial sequence
  Predicted Zea mays mir
aaagctgaaggtacgaaagaat

SEQ ID NO: 45 - DNA, 21 bp, Artificial sequence
  Predicted Zea mays mir
aggaagggacatgcagaggag

SEQ ID NO: 46 - DNA, 21 bp, Artificial sequence
  Predicted Zea mays mir
atttggaatcgtcttaggcct

SEQ ID NO: 47 - DNA, 21 bp, Artificial sequence
  Predicted Zea mays mir
cagatcccactctcgtcacca

SEQ ID NO: 48 - DNA, 21 bp, Artificial sequence
  Predicted Zea mays mir
catatcccactctcgtcacca

SEQ ID NO: 49 - DNA, 21 bp, Artificial sequence
  Predicted Zea mays mir
tcaccagcgctgcactcaatt

SEQ ID NO: 50 - DNA, 21 bp, Artificial sequence
  Predicted Zea mays mir
tggaaggggcatgcagattct

SEQ ID NO: 51 - DNA, 21 bp, Artificial sequence
  Predicted Zea mays mir
tggatttggatagaagggtac

SEQ ID NO: 52 - DNA, 21 bp, Artificial sequence
  Predicted Zea mays mir
tggcagggtcatgcagaggag

SEQ ID NO: 53 - DNA, 24 bp, Artificial sequence
  Predicted folded 24-nts-long seq 52724
ggcacgaataagcggaccgggctc

SEQ ID NO: 54 - DNA, 24 bp, Artificial sequence
  Predicted folded 24-nts-long seq 53866
ctccttttggctctaaggcccggc

SEQ ID NO: 55 - DNA, 24 bp, Artificial sequence
  Predicted siRNA
acagtacatcggcaaacaggggcg

SEQ ID NO: 56 - DNA, 24 bp, Artificial sequence
  Predicted siRNA
aaataatatggaccgggctagcat

SEQ ID NO: 57 - DNA, 24 bp, Artificial sequence
  Predicted siRNA
ggggacaagggacacagtatgagg

SEQ ID NO: 58 - DNA, 24 bp, Artificial sequence
  Predicted siRNA
tatgaaaaaccaggggacagactc

SEQ ID NO: 59 - DNA, 18 bp, Artificial sequence
  Predicted siRNA
aatccggcagatagcgcg

SEQ ID NO: 60 - DNA, 18 bp, Artificial sequence
  Predicted siRNA
agcattgcgacggtcctt

SEQ ID NO: 61 - DNA, 21 bp, Artificial sequence
  Predicted siRNA
agctgacgagcgggagtccct

SEQ ID NO: 62 - DNA, 20 bp, Artificial sequence
  Predicted siRNA
caaagcgttgcgacggtcct

SEQ ID NO: 63 - DNA, 20 bp, Artificial sequence
  Predicted siRNA
caacctactcagaactggta

SEQ ID NO: 64 - DNA, 19 bp, Artificial sequence
  Predicted siRNA
ccggaggagaagaaactta

SEQ ID NO: 65 - DNA, 20 bp, Artificial sequence
  Predicted siRNA
cgccgcccgaattgtattct

SEQ ID NO: 66 - DNA, 20 bp, Artificial sequence
  Predicted siRNA
cgtcgtctgcgcggacggta

SEQ ID NO: 67 - DNA, 18 bp, Artificial sequence
  Predicted siRNA
ctcaacgagtcgggttgt

SEQ ID NO: 68 - DNA, 22 bp, Artificial sequence
  Predicted siRNA
ctcgcgttgactatgtccctgc

SEQ ID NO: 69 - DNA, 19 bp, Artificial sequence
  Predicted siRNA
ctgtccacgcccggtcgta

SEQ ID NO: 70 - DNA, 19 bp, Artificial sequence
  Predicted siRNA
gatccggatcgcacggcct

SEQ ID NO: 71 - DNA, 20 bp, Artificial sequence
  Predicted siRNA
gcacgcctgtcgggaaccga

SEQ ID NO: 72 - DNA, 20 bp, Artificial sequence
  Predicted siRNA
gcacgcctgtcgggacctga

SEQ ID NO: 73 - DNA, 19 bp, Artificial sequence
  Predicted siRNA
gcattgcgacggtcctcta

SEQ ID NO: 74 - DNA, 20 bp, Artificial sequence
  Predicted siRNA
gccgcccgaattatagtctg

SEQ ID NO: 75 - DNA, 21 bp, Artificial sequence
  Predicted siRNA
gctcgccttgactacgtccct

SEQ ID NO: 76 - DNA, 25 bp, Artificial sequence
  Predicted siRNA
gcttaacggcccgccaaccttggaa

SEQ ID NO: 77 - DNA, 25 bp, Artificial sequence
  Predicted siRNA
gcttaacggcccgccaactttggaa

SEQ ID NO: 78 - DNA, 18 bp, Artificial sequence
  Predicted siRNA
tcaaacttgggtataggg

SEQ ID NO: 79 - DNA, 20 bp, Artificial sequence
  Predicted siRNA
tccgtccacgcccgttcgta

SEQ ID NO: 80 - DNA, 18 bp, Artificial sequence
  Predicted siRNA
tgccacgatccactgaaa

SEQ ID NO: 81 - DNA, 21 bp, Artificial sequence
  Predicted siRNA
ttgaaaatccggaggcccgaa

SEQ ID NO: 82 - DNA, 23 bp, Artificial sequence
  Predicted siRNA
ttgaggttgactctagtccgact

SEQ ID NO: 83 - DNA, 21 bp, Artificial sequence
  Predicted Zea mays mir
actctggtggaggctcgaaaa

SEQ ID NO: 84 - DNA, 22 bp, Artificial sequence
  Predicted Zea mays mir
aggatgctgacgcaatgtgctt

SEQ ID NO: 85 - DNA, 21 bp, Artificial sequence
  Predicted Zea mays mir
ggcggactgggaacacatggg

SEQ ID NO: 86 - DNA, 21 bp, Artificial sequence
  Predicted Zea mays mir
gtccacgcccggtcgtactca

SEQ ID NO: 87 - DNA, 23 bp, Artificial sequence
  Predicted Zea mays mir
ttccgtggttcggaagcggggca

SEQ ID NO: 88 - DNA, 21 bp, Artificial sequence
  Predicted Zea mays mir
aaagcattacgacggtcctcg

SEQ ID NO: 89 - DNA, 22 bp, Artificial sequence
  Predicted Zea mays mir
caaagcatagcgacggtcctcg

SEQ ID NO: 90 - DNA, 22 bp, Artificial sequence
  Predicted Zea mays mir
tggattcgttgcgggacgagac

SEQ ID NO: 91 - DNA, 19 bp, Artificial sequence
  Predicted Zea mays mir
aacctggcagatagcgcga

SEQ ID NO: 92 - DNA, 20 bp, Artificial sequence
  Predicted Zea mays mir
caaccgacttagaactggta

SEQ ID NO: 93 - DNA, 22 bp, Artificial sequence
  Predicted Zea mays mir
cgccgcccaaattgtagtctgg

SEQ ID NO: 94 - DNA, 20 bp, Artificial sequence
  Predicted Zea mays mir
cgtcgtcagcgcggacggta

SEQ ID NO: 95 - DNA, 20 bp, Artificial sequence
  Predicted Zea mays mir
cgtcgtcggcgcagacggta

SEQ ID NO: 96 - DNA, 20 bp, Artificial sequence
  Predicted Zea mays mir
cgtcgtcggtgcggacggta

SEQ ID NO: 97 - DNA, 20 bp, Artificial sequence
  Predicted Zea mays mir
ggcggaatgctcgagttgct

SEQ ID NO: 98 - DNA, 20 bp, Artificial sequence
  Predicted Zea mays mir
ttgaaaatccagaggaccga

SEQ ID NO: 99 - DNA, 22 bp, Artificial sequence
  Predicted Zea mays mir
ttgtcaggtgtggagtttggct

SEQ ID NO: 100 - DNA, 19 bp, Artificial sequence
  Predicted Zea mays mir
ttttgctccaaggcccggc

SEQ ID NO: 101 - DNA, 24 bp, Artificial sequence
  Predicted folded 24-nts-long seq 52214
cacgacacgagaacggcacggcac

SEQ ID NO: 102 - DNA, 22 bp, Artificial sequence
  Predicted siRNA
catcacaaacatcaccggcgag

SEQ ID NO: 103 - DNA, 22 bp, Artificial sequence
  Predicted siRNA
cacaaacatcaccggcgaggca

SEQ ID NO: 104 - DNA, 21 bp, Artificial sequence
  Predicted siRNA
ccgtaagggcataatcgggat

SEQ ID NO: 105 - DNA, 24 bp, Artificial sequence
  Predicted siRNA
cacgacagagagcacacaagacac

SEQ ID NO: 106 - DNA, 21 bp, Artificial sequence
  Predicted siRNA
taccgtaagggcataatcggg

SEQ ID NO: 107 - DNA, 21 bp, Artificial sequence
  Predicted siRNA
accgtaagggcataatcggga

SEQ ID NO: 108 - DNA, 21 bp, Artificial sequence
  Predicted siRNA
tcggcctcgagcaacgggcaa

SEQ ID NO: 109 - DNA, 21 bp, Artificial sequence
  Predicted Zea mays mir
aacatgggctagtcggcggtg

SEQ ID NO: 110 - DNA, 22 bp, Artificial sequence
  Predicted Zea mays mir
aataggagtcaaggagaagctt

SEQ ID NO: 111 - DNA, 22 bp, Artificial sequence
  Predicted Zea mays mir
aggggtgttgaactgtggtggc

SEQ ID NO: 112 - DNA, 21 bp, Artificial sequence
  Predicted Zea mays mir
ttagatgaccatcagcaaaca

SEQ ID NO: 113 - DNA, 21 bp, Artificial sequence
  Predicted Zea mays mir
cccgccttgcatcaagtgaat

SEQ ID NO: 114 - DNA, 24 bp, Triticum aestivum
aaccaacgagaccaactgcggcgg

SEQ ID NO: 115 - DNA, 21 bp, Arabidopsis thaliana
tggagaagcagggcacgtgcg

SEQ ID NO: 116 - DNA, 22 bp, Oryza sativa
ggcagccgagcgagggcctcgg

SEQ ID NO: 117 - DNA, 24 bp, Artificial sequence
  Predicted folded 24-nts-long sequence
cacgacacgagaacggcacggcac

SEQ ID NO: 118 - DNA, 24 bp, Artificial sequence
  Predicted folded 24-nts-long sequence
cggaaacgggagcgggataaacgg

SEQ ID NO: 119 - DNA, 24 bp, Artificial sequence
  Predicted folded 24-nts-long sequence
gttgcacgtacgggtaggaagcgg

SEQ ID NO: 120 - DNA, 24 bp, Artificial sequence
  Predicted folded 24-nts-long sequence
atctcggggatttgtcagggacgg

SEQ ID NO: 121 - DNA, 22 bp, Artificial sequence
  Predicted siRNA
catcacaaacatcaccggcgag

SEQ ID NO: 122 - DNA, 22 bp, Artificial sequence
  Predicted siRNA
cacaaacatcaccggcgaggca

SEQ ID NO: 123 - DNA, 21 bp, Artificial sequence
  Predicted siRNA
cggcagctattagacggggca

SEQ ID NO: 124 - DNA, 21 bp, Artificial sequence
  Predicted siRNA
ccgtaagggcataatcgggat

SEQ ID NO: 125 - DNA, 21 bp, Artificial sequence
  Predicted siRNA
taccgtaagggcataatcggg

SEQ ID NO: 126 - DNA, 21 bp, Artificial sequence
  Predicted siRNA
accgtaagggcataatcggga

SEQ ID NO: 127 - DNA, 21 bp, Artificial sequence
  Predicted siRNA
tcggcctcgagcaacgggcaa

SEQ ID NO: 128 - DNA, 21 bp, Artificial sequence
  Predicted siRNA
atgcctagtaagcgctagtca

SEQ ID NO: 129 - DNA, 24 bp, Artificial sequence
  Predicted siRNA
tcaacggaccgggccaggcactag

SEQ ID NO: 130 - DNA, 21 bp, Artificial sequence
  Predicted Zea mays mir
aacatgggctagtcggcggtg

SEQ ID NO: 131 - DNA, 22 bp, Artificial sequence
  Predicted Zea mays mir
aataggagtcaaggagaagctt

SEQ ID NO: 132 - DNA, 21 bp, Sorghum bicolor
tggagaagcaggacacgtgag

SEQ ID NO: 133 - DNA, 24 bp, Triticum aestivum
aaccaacgagaccaactgcggcgg

SEQ ID NO: 134 - DNA, 24 bp, Artificial sequence
  Predicted siRNA
acggatacttttggggcacctggc

SEQ ID NO: 135 - DNA, 22 bp, Artificial sequence
  Predicted siRNA
agagggcagatatgtaggcgtg

SEQ ID NO: 136 - DNA, 21 bp, Artificial sequence
  Predicted siRNA
aggggccgcaaacgcaaacat

SEQ ID NO: 137 - DNA, 24 bp, Artificial sequence
  Predicted siRNA
agtacgagtacagactacagacac

SEQ ID NO: 138 - DNA, 22 bp, Artificial sequence
  Predicted siRNA
atcagtcgcatgcactctcgga

SEQ ID NO: 139 - DNA, 21 bp, Artificial sequence
  Predicted siRNA
cagaaggggtcacggatactt

SEQ ID NO: 140 - DNA, 24 bp, Artificial sequence
  Predicted siRNA
gacacaacgacgagctgggacagg

SEQ ID NO: 141 - DNA, 21 bp, Artificial sequence
  Predicted siRNA
gaggacctcaagaagaccgac

SEQ ID NO: 142 - DNA, 21 bp, Artificial sequence
  Predicted siRNA
gcggtgtgttttgcagagcgg

SEQ ID NO: 143 - DNA, 22 bp, Artificial sequence
  Predicted siRNA
ggcagatttgatgtagagggca

SEQ ID NO: 144 - DNA, 24 bp, Artificial sequence
  Predicted siRNA
tacgagtacagactacagacacca

SEQ ID NO: 145 - DNA, 22 bp, Artificial sequence
  Predicted siRNA
gcggcaagctagagcgacccat

SEQ ID NO: 146 - DNA, 24 bp, Artificial sequence
  Predicted siRNA
cgctcgtcagaaggggtcacggat

SEQ ID NO: 147 - DNA, 24 bp, Artificial sequence
  Predicted siRNA
gagatggcgagaatgacagatgac

SEQ ID NO: 148 - DNA, 18 bp, Artificial sequence
  Predicted siRNA
aggccggctgcactgaga

SEQ ID NO: 149 - DNA, 22 bp, Artificial sequence
  Predicted siRNA
ccgaagaccggcaagaccacaa

SEQ ID NO: 150 - DNA, 18 bp, Artificial sequence
  Predicted siRNA
ctgcctaagcctggcgca

SEQ ID NO: 151 - DNA, 22 bp, Artificial sequence
  Predicted Zea mays mir
aggatgctgactcaatgtgatt

SEQ ID NO: 152 - DNA, 22 bp, Artificial sequence
  Predicted Zea mays mir
caaggacggcaaaaagaaggaa

SEQ ID NO: 153 - DNA, 22 bp, Artificial sequence
  Predicted Zea mays mir
aggatcctgacgcaatgtgatt

SEQ ID NO: 154 - DNA, 24 bp, Artificial sequence
  Predicted siRNA
acggatacttttggggcacctggc

SEQ ID NO: 155 - DNA, 22 bp, Artificial sequence
  Predicted siRNA
agagggcagatatgtaggcgtg

SEQ ID NO: 156 - DNA, 21 bp, Artificial sequence
  Predicted siRNA
aggggccgcaaacgcaaacat

SEQ ID NO: 157 - DNA, 24 bp, Artificial sequence
  Predicted siRNA
agtacgagtacagactacagacac

SEQ ID NO: 158 - DNA, 22 bp, Artificial sequence
  Predicted siRNA
atcagtcgcatgcactctcgga

SEQ ID NO: 159 - DNA, 21 bp, Artificial sequence
  Predicted siRNA
cagaaggggtcacggatactt

SEQ ID NO: 160 - DNA, 24 bp, Artificial sequence
  Predicted siRNA
gacacaacgacgagctgggacagg

SEQ ID NO: 161 - DNA, 21 bp, Artificial sequence
  Predicted siRNA
gaggacctcaagaagaccgac

SEQ ID NO: 162 - DNA, 21 bp, Artificial sequence
  Predicted siRNA
gcggtgtgttttgcagagcgg

SEQ ID NO: 163 - DNA, 22 bp, Artificial sequence
  Predicted siRNA
ggcagatttgatgtagagggca

SEQ ID NO: 164 - DNA, 24 bp, Artificial sequence
  Predicted siRNA
tacgagtacagactacagacacca

SEQ ID NO: 165 - DNA, 22 bp, Artificial sequence
  Predicted siRNA
gcggcaagctagagcgacccat

SEQ ID NO: 166 - DNA, 24 bp, Artificial sequence
  Predicted siRNA
cgctcgtcagaaggggtcacggat

SEQ ID NO: 167 - DNA, 24 bp, Artificial sequence
  Predicted siRNA
gagatggcgagaatgacagatgac

SEQ ID NO: 168 - DNA, 18 bp, Artificial sequence
  Predicted siRNA
aggccggctgcactgaga

SEQ ID NO: 169 - DNA, 22 bp, Artificial sequence
  Predicted siRNA
ccgaagaccggcaagaccacaa

SEQ ID NO: 170 - DNA, 18 bp, Artificial sequence
  Predicted siRNA
ctgcctaagcctggcgca

SEQ ID NO: 171 - DNA, 22 bp, Artificial sequence
  Predicted Zea mays mir
aggatgctgactcaatgtgatt

SEQ ID NO: 172 - DNA, 22 bp, Artificial sequence
  Predicted Zea mays mir
caaggacggcaaaaagaaggaa

SEQ ID NO: 173 - DNA, 22 bp, Artificial sequence
  Predicted Zea mays mir
aggatcctgacgcaatgtgatt

SEQ ID NO: 174 - DNA, 24 bp, Artificial sequence
  Predicted folded 24-nts-long sequence
aagaaaagttggctgtggggagaa

SEQ ID NO: 175 - DNA, 24 bp, Artificial sequence
  Predicted folded 24-nts-long sequence
actgggtggaacggacgacgacaa

SEQ ID NO: 176 - DNA, 24 bp, Artificial sequence
  Predicted folded 24-nts-long sequence
aggagacctggaggagacgctgga

SEQ ID NO: 177 - DNA, 24 bp, Artificial sequence
  Predicted folded 24-nts-long sequence
gcaggagcaggatgtggacgacgg

SEQ ID NO: 178 - DNA, 24 bp, Artificial sequence
  Predicted folded 24-nts-long sequence
ggacgacagcgacggcgagaacaa

SEQ ID NO: 179 - DNA, 24 bp, Artificial sequence
  Predicted folded 24-nts-long sequence
ctaaatttagaggacgaggacgtc

SEQ ID NO: 180 - DNA, 24 bp, Artificial sequence
  Predicted siRNA
acagtcaagacatgcggaggacat

SEQ ID NO: 181 - DNA, 22 bp, Artificial sequence
  Predicted siRNA
acgacgaggacgagaggcgcca

SEQ ID NO: 182 - DNA, 22 bp, Artificial sequence
  Predicted siRNA
acgacgacgaggagcacgagta

SEQ ID NO: 183 - DNA, 22 bp, Artificial sequence
  Predicted siRNA
gacgacgaggagcacgagtaga

SEQ ID NO: 184 - DNA, 24 bp, Artificial sequence
  Predicted siRNA
ctggacactgttgtagaaggagga

SEQ ID NO: 185 - DNA, 22 bp, Artificial sequence
  Predicted siRNA
gacaaaggacgaggtcaaggac

SEQ ID NO: 186 - DNA, 24 bp, Artificial sequence
  Predicted siRNA
ggcgacgacgaggatagaagtgac

SEQ ID NO: 187 - DNA, 24 bp, Artificial sequence
  Predicted siRNA
ggccgtaggaggactagaggagac

SEQ ID NO: 188 - DNA, 24 bp, Artificial sequence
  Predicted siRNA
gtttagaggacgctgctggaggac

SEQ ID NO: 189 - DNA, 21 bp, Artificial sequence
  Predicted siRNA
ggtacgtgctgtggaggacgg

SEQ ID NO: 190 - DNA, 24 bp, Artificial sequence
  Predicted siRNA
ggaggacgggcagaacacggtgca

SEQ ID NO: 191 - DNA, 21 bp, Artificial sequence
  Predicted siRNA
gtacgtgctgtggaggacggc

SEQ ID NO: 192 - DNA, 22 bp, Artificial sequence
  Predicted siRNA
tgaccagaagacgaaggagatc

SEQ ID NO: 193 - DNA, 22 bp, Artificial sequence
  Predicted siRNA
acgtgctacgacgaggacgaga

SEQ ID NO: 194 - DNA, 24 bp, Artificial sequence
  Predicted siRNA
agcatcacgcaagcagggaggaca

SEQ ID NO: 195 - DNA, 24 bp, Artificial sequence
  Predicted siRNA
atactgttatgagatggaggacga

SEQ ID NO: 196 - DNA, 22 bp, Artificial sequence
  Predicted siRNA
caaactgggagtagaggacgac

SEQ ID NO: 197 - DNA, 24 bp, Artificial sequence
  Predicted siRNA
gaacgacgcaacgacgaacgacga

SEQ ID NO: 198 - DNA, 21 bp, Artificial sequence
  Predicted siRNA
gcatgaggcagggactgcatt

SEQ ID NO: 199 - DNA, 22 bp, Artificial sequence
  Predicted siRNA
ggccaagaactcgctggagaac

SEQ ID NO: 200 - DNA, 24 bp, Artificial sequence
  Predicted siRNA
ggtggagacagacagaggacgact

SEQ ID NO: 201 - DNA, 22 bp, Artificial sequence
  Predicted siRNA
tctagacttagatgaaggaggt

SEQ ID NO: 202 - DNA, 22 bp, Artificial sequence
  Predicted siRNA
tgaagaagaaggatgagccaaa

SEQ ID NO: 203 - DNA, 22 bp, Artificial sequence
  Predicted siRNA
tgacgaggagtgagagaaggat

SEQ ID NO: 204 - DNA, 22 bp, Artificial sequence
  Predicted siRNA
tgtacgatgatcagaaggaggt

SEQ ID NO: 205 - DNA, 22 bp, Artificial sequence
  Predicted Zea mays mir
aaagaaagtagatgaggaagcc

SEQ ID NO: 206 - DNA, 22 bp, Artificial sequence
  Predicted Zea mays mir
aggagggtcagaaagaggatga

SEQ ID NO: 207 - DNA, 22 bp, Artificial sequence
  Predicted Zea mays mir
aggatctgaaggaggacaggat

SEQ ID NO: 208 - DNA, 22 bp, Artificial sequence
  Predicted Zea mays mir
caagtggagaaggtggaccagg

SEQ ID NO: 209 - DNA, 22 bp, Artificial sequence
  Predicted Zea mays mir
cctaaatttagaggacgaggac

SEQ ID NO: 210 - DNA, 22 bp, Artificial sequence
  Predicted Zea mays mir
gggagacgacgacctagaccac

SEQ ID NO: 211 - DNA, 22 bp, Artificial sequence
  Predicted Zea mays mir
tcgtggtcgaggccgaggacgt

SEQ ID NO: 212 - DNA, 22 bp, Artificial sequence
  Predicted Zea mays mir
tgacaagggcgacaacaaggac

SEQ ID NO: 213 - DNA, 21 bp, Artificial sequence
  Predicted Zea mays mir
tttgtaggagaaggagatggt

SEQ ID NO: 214 - DNA, 22 bp, Artificial sequence
  Predicted Zea mays mir
cgcacataacagagaaggacga

SEQ ID NO: 215 - DNA, 22 bp, Artificial sequence
  Predicted Zea mays mir
cgtgctacgacgaggacgagag

SEQ ID NO: 216 - DNA, 22 bp, Artificial sequence
  Predicted Zea mays mir
gacgtgctacgacgaggacgag

SEQ ID NO: 217 - DNA, 281 bp, Triticum aestivum
  misc_feature (218)..(218): n is a, c, g, or t
tttggccgtaaatttaaccaacgagaccaactgcggcgggaacaaaaattatatcgctgaattatatcaaaaatacgaattcagtagcataggttttgctcccgccacattcggtcttgttggttaaatttaccggtcaaatttggccgtaaatttaaccaacgagaccaactgcggcgggaacaaaaattatatcgctgaattatatcaaaaatacnaattcagtagcataggttttgctcccgccacattcggtcttgttggttaaatttacggtcaaa

SEQ ID NO: 218 - DNA, 102 bp, Arabidopsis thaliana
taacacttgatggagaagcagggcacgtgcgaacacaaatgaaatcgatcggtacttgttgatcatattttcgcacgtgttctactactccaacacgtgtct

SEQ ID NO: 219 - DNA, 65 bp, Oryza sativa
gagcagctctctctccgcccacttggccaccacgcggcagccgagcgagggcctcggggcagctt

SEQ ID NO: 220 - DNA, 153 bp, Sorghum bicolor
tatggtgtgtttgtgcagggtggagaagcaggacacgtgagcgaccatccagtttccatcgctggctctccgctgcgggcgctgccgtgcgttggatcgtcgttgggtggtcgctcatgtgtccgtcctctccaccgagcaccggtacatccg

SEQ ID NO: 221 - DNA, 281 bp, Triticum aestivum; identical to SEQ ID NO: 217
  misc_feature (218)..(218): n is a, c, g, or t

SEQ ID NO: 222 - DNA, 23 bp, Artificial sequence
  Target Mimic Example for miRNA which was found down regulated during drought
ttcttggagcctacccagttcct

SEQ ID NO: 223 - DNA, 21 bp, Arabidopsis lyrata
cccgccttgcatcaactgaat

SEQ ID NO: 224 - DNA, 24 bp, Hordeum vulgare
gatcccgccttgcaccaagtgaat

SEQ ID NO: 225 - DNA, 24 bp, Oryza sativa
gatcccgccttgcaccaagtgaat

SEQ ID NO: 226 - DNA, 20 bp, Zea mays
cccgccttgcaccaagtgaa

SEQ ID NO: 227 - DNA, 20 bp, Zea mays
cccgccttgcatcaagtgaa

SEQ ID NO: 228 - DNA, 16 bp, Artificial sequence
  Single strand DNA oligonucleotide
gtgcagggtccgaggt

SEQ ID NO: 229-263 - skipped (35 entries)

SEQ ID NO: 264 - DNA, 22 bp, Oryza sativa
ggcagccgagcgagggcctcgg

SEQ ID NO: 265 - DNA, 22 bp, Oryza sativa
ggcagccgagcgagggcctcgg

SEQ ID NO: 266 - DNA, 22 bp, Oryza sativa
ggcagccgagcgagggcctcgg

SEQ ID NO: 267 - DNA, 21 bp, Arabidopsis lyrata
tggagaagcagggcacgtgca

SEQ ID NO: 268 - DNA, 21 bp, Arabidopsis lyrata
tggagaagcagggcacgtgca

SEQ ID NO: 269 - DNA, 21 bp, Arabidopsis lyrata
tggagaagcagggcacgtgcg

SEQ ID NO: 270 - DNA, 21 bp, Arabidopsis thaliana
tggagaagcagggcacgtgca

SEQ ID NO: 271 - DNA, 21 bp, Arabidopsis thaliana
tggagaagcagggcacgtgca

SEQ ID NO: 272 - DNA, 21 bp, Brachypodium distachyon
tggagaagcagggcacgtgca

SEQ ID NO: 273 - DNA, 21 bp, Brachypodium distachyon
tggagaagcagggcacgtgca

SEQ ID NO: 274 - DNA, 21 bp, Brachypodium distachyon
tggagaagcagggcacgtgct

SEQ ID NO: 275 - DNA, 21 bp, Brachypodium distachyon
tggagaagcagggcacgtgca

SEQ ID NO: 276 - DNA, 21 bp, Brachypodium distachyon
tggagaagcagggcacgtgca

SEQ ID NO: 277 - DNA, 21 bp, Brachypodium distachyon
tggagaagaagggcacatgca

SEQ ID NO: 278 - DNA, 21 bp, Brassica napus
tggagaagcagggcacgtgca

SEQ ID NO: 279 - DNA, 21 bp, Brassica rapa
tggagaagcagggcacgtgca

SEQ ID NO: 280 - DNA, 21 bp, Corylus avellana
tggagaagcagggcacgtgca

SEQ ID NO: 281 - DNA, 21 bp, Citrus sinensis
tggagaagcagggcacgtgca

SEQ ID NO: 282 - DNA, 21 bp, Citrus trifoliata
tggagaagcagggcacgtgca

SEQ ID NO: 283 - DNA, 21 bp, Festuca arundinacea
tggagaagcagggcacttgct

SEQ ID NO: 284 - DNA, 21 bp, Festuca arundinacea
tggagaagcagggcacttgct

SEQ ID NO: 285 - DNA, 21 bp, Gossypium arboreum
tggagaagcagggcacgtaaa

SEQ ID NO: 286 - DNA, 21 bp, Gossypium hirsutum
tggagaagcagggcacgtgca

SEQ ID NO: 287 - DNA, 21 bp, Glycine max
tggagaagcagggcacgtgca

SEQ ID NO: 288 - DNA, 21 bp, Ipomoea nil
cggagaagcaggtcacgtgcg

SEQ ID NO: 289 - DNA, 21 bp, Medicago truncatula
tggagaagcagggcacgtgca

SEQ ID NO: 290 - DNA, 21 bp, Medicago truncatula
tggagaagcagggcacgtgca

SEQ ID NO: 291 - DNA, 21 bp, Medicago truncatula
tggagaagcagggcacgtgca

SEQ ID NO: 292 - DNA, 21 bp, Medicago truncatula
tggagaagcagggcacatgct

SEQ ID NO: 293 - DNA, 21 bp, Oryza sativa
tggagaagcagggcacgtgca

SEQ ID NO: 294 - DNA, 21 bp, Oryza sativa
tggagaagcagggcacgtgca

SEQ ID NO: 295 - DNA, 21 bp, Oryza sativa
tggagaagcagggtacgtgca

SEQ ID NO: 296 - DNA, 21 bp, Oryza sativa
tggagaagcagggcacgtgct

SEQ ID NO: 297 - DNA, 21 bp, Oryza sativa
tggagaagcagggcacgtgag

SEQ ID NO: 298 - DNA, 21 bp, Oryza sativa
tggagaagcagggcacgtgca

SEQ ID NO: 299 - DNA, 21 bp, Populus tremula x Populus tremuloides
tggagaagcagggcacgtgca

SEQ ID NO: 300 - DNA, 21 bp, Populus trichocarpa
tggagaagcagggcacgtgca

SEQ ID NO: 301 - DNA, 21 bp, Populus trichocarpa
tggagaagcagggcacgtgca

SEQ ID NO: 302 - DNA, 21 bp, Populus trichocarpa
tggagaagcagggcacgtgca

SEQ ID NO: 303 - DNA, 21 bp, Populus trichocarpa
tggagaagcagggcacgtgca

SEQ ID NO: 304 - DNA, 21 bp, Populus trichocarpa
tggagaagcagggcacgtgca

SEQ ID NO: 305 - DNA, 21 bp, Populus trichocarpa
tggagaagcagggcacatgct

SEQ ID NO: 306 - DNA, 21 bp, Ricinus communis
tggagaagcagggcacgtgca

SEQ ID NO: 307 - DNA, 21 bp, Ricinus communis
tggagaagcagggcacgtgca

SEQ ID NO: 308 - DNA, 21 bp, Ricinus communis
tggagaagcagggcacgtgca

SEQ ID NO: 309 - DNA, 21 bp, Ricinus communis
tggagaagcagggcacatgct

SEQ ID NO: 310 - DNA, 21 bp, Sorghum bicolor
tggagaagcagggcacgtgca

SEQ ID NO: 311 - DNA, 21 bp, Sorghum bicolor
tggagaagcagggcacgtgct

SEQ ID NO: 312 - DNA, 21 bp, Sorghum bicolor
tggagaagcaggacacgtgag

SEQ ID NO: 313 - DNA, 21 bp, Sorghum bicolor
tggagaagcagggcacgtgca

SEQ ID NO: 314 - DNA, 21 bp, Sorghum bicolor
tggagaagcagggcacgtgca

SEQ ID NO: 315 - DNA, 21 bp, Triticum aestivum
tggagaagcagggcacgtgca

SEQ ID NO: 316 - DNA, 21 bp, Triticum aestivum
tggagaagcagggcacgtgca

SEQ ID NO: 317 - DNA, 21 bp, Theobroma cacao
tggagaagcagggcacgtgca

SEQ ID NO: 318 - DNA, 21 bp, Theobroma cacao
tggagaagcagggcacgtgca

SEQ ID NO: 319 - DNA, 21 bp, Theobroma cacao
tggagaagcagggcacatgct

SEQ ID NO: 320 - DNA, 21 bp, Vitis vinifera
tggagaagcagggcacgtgca

SEQ ID NO: 321 - DNA, 21 bp, Vitis vinifera
tggagaagcagggcacatgct

SEQ ID NO: 322 - DNA, 21 bp, Vitis vinifera
tggagaagcagggcacgtgca

SEQ ID NO: 323 - DNA, 21 bp, Vitis vinifera
tggagaagcagggcacgtgca

SEQ ID NO: 324 - DNA, 21 bp, Zea mays
tggagaagcagggcacgtgca

SEQ ID NO: 325 - DNA, 21 bp, Zea mays
tggagaagcagggcacgtgca

SEQ ID NO: 326 - DNA, 21 bp, Zea mays
tggagaagcagggcacgtgca

SEQ ID NO: 327 - DNA, 21 bp, Zea mays
tggagaagcagggcacgtgca

SEQ ID NO: 328 - DNA, 21 bp, Zea mays
tggagaagcaggacacgtgag

SEQ ID NO: 329 - DNA, 21 bp, Zea mays
tggagaagcagggcacgtgct

SEQ ID NO: 330 - DNA, 21 bp, Zea mays
tggagaagcagggcacgtgca

SEQ ID NO: 331 - DNA, 21 bp, Zea mays
tggagaagcagggcacgtgtg

SEQ ID NO: 332 - DNA, 21 bp, Arabidopsis lyrata
tggagaagcagggcacgtgca

SEQ ID NO: 333 - DNA, 21 bp, Arabidopsis lyrata
tggagaagcagggcacgtgca

SEQ ID NO: 334 - DNA, 21 bp, Arabidopsis lyrata
tggagaagcagggcacgtgcg

SEQ ID NO: 335 - DNA, 21 bp, Arabidopsis thaliana
tggagaagcagggcacgtgca

SEQ ID NO: 336 - DNA, 21 bp, Arabidopsis thaliana
tggagaagcagggcacgtgca

SEQ ID NO: 337 - DNA, 21 bp, Arabidopsis thaliana
tggagaagcagggcacgtgcg

SEQ ID NO: 338 - DNA, 21 bp, Brachypodium distachyon
tggagaagcagggcacgtgca

SEQ ID NO: 339 - DNA, 21 bp, Brachypodium distachyon
tggagaagcagggcacgtgca

SEQ ID NO: 340 - DNA, 21 bp, Brachypodium distachyon
tggagaagcagggcacgtgct

SEQ ID NO: 341 - DNA, 21 bp, Brachypodium distachyon
tggagaagcagggcacgtgca

SEQ ID NO: 342 - DNA, 21 bp, Brachypodium distachyon
tggagaagcagggcacgtgca

SEQ ID NO: 343 - DNA, 21 bp, Brachypodium distachyon
tggagaagaagggcacatgca

SEQ ID NO: 344 - DNA, 21 bp, Brassica napus
tggagaagcagggcacgtgca

SEQ ID NO: 345 - DNA, 21 bp, Brassica rapa
tggagaagcagggcacgtgca

SEQ ID NO: 346 - DNA, 21 bp, Corylus avellana
tggagaagcagggcacgtgca

SEQ ID NO: 347 - DNA, 21 bp, Citrus sinensis
tggagaagcagggcacgtgca

SEQ ID NO: 348 - DNA, 21 bp, Citrus trifoliata
tggagaagcagggcacgtgca

SEQ ID NO: 349 - DNA, 21 bp, Festuca arundinacea
tggagaagcagggcacttgct

SEQ ID NO: 350 - DNA, 21 bp, Festuca arundinacea
tggagaagcagggcacttgct

SEQ ID NO: 351 - DNA, 21 bp, Gossypium arboreum
tggagaagcagggcacgtaaa

SEQ ID NO: 352 - DNA, 21 bp, Gossypium hirsutum
tggagaagcagggcacgtgca

SEQ ID NO: 353 - DNA, 21 bp, Glycine max
tggagaagcagggcacgtgca

SEQ ID NO: 354 - DNA, 21 bp, Ipomoea nil
cggagaagcaggtcacgtgcg

SEQ ID NO: 355 - DNA, 21 bp, Medicago truncatula
tggagaagcagggcacgtgca

SEQ ID NO: 356 - DNA, 21 bp, Medicago truncatula
tggagaagcagggcacgtgca

SEQ ID NO: 357 - DNA, 21 bp, Medicago truncatula
tggagaagcagggcacgtgca

SEQ ID NO: 358 - DNA, 21 bp, Medicago truncatula
tggagaagcagggcacatgct

SEQ ID NO: 359 - DNA, 21 bp, Oryza sativa
tggagaagcagggcacgtgca

SEQ ID NO: 360 - DNA, 21 bp, Oryza sativa
tggagaagcagggcacgtgca

SEQ ID NO: 361 - DNA, 21 bp, Oryza sativa
tggagaagcagggtacgtgca

SEQ ID NO: 362 - DNA, 21 bp, Oryza sativa
tggagaagcagggcacgtgct

SEQ ID NO: 363 - DNA, 21 bp, Oryza sativa
tggagaagcagggcacgtgag

SEQ ID NO: 364 - DNA, 21 bp, Oryza sativa
tggagaagcagggcacgtgca

SEQ ID NO: 365 - DNA, 21 bp, Populus tremula x Populus tremuloides
tggagaagcagggcacgtgca

SEQ ID NO: 366 - DNA, 21 bp, Populus trichocarpa
tggagaagcagggcacgtgca

SEQ ID NO: 367 - DNA, 21 bp, Populus trichocarpa
tggagaagcagggcacgtgca

SEQ ID NO: 368 - DNA, 21 bp, Populus trichocarpa
tggagaagcagggcacgtgca

SEQ ID NO: 369 - DNA, 21 bp, Populus trichocarpa
tggagaagcagggcacgtgca

SEQ ID NO: 370 - DNA, 21 bp, Populus trichocarpa
tggagaagcagggcacgtgca

SEQ ID NO: 371 - DNA, 21 bp, Populus trichocarpa
tggagaagcagggcacatgct

SEQ ID NO: 372 - DNA, 21 bp, Ricinus communis
tggagaagcagggcacgtgca

SEQ ID NO: 373 - DNA, 21 bp, Ricinus communis
tggagaagcagggcacgtgca

SEQ ID NO: 374 - DNA, 21 bp, Ricinus communis
tggagaagcagggcacgtgca

SEQ ID NO: 375 - DNA, 21 bp, Ricinus communis
tggagaagcagggcacatgct

SEQ ID NO: 376 - DNA, 21 bp, Sorghum bicolor
tggagaagcagggcacgtgca

SEQ ID NO: 377 - DNA, 21 bp, Sorghum bicolor
tggagaagcagggcacgtgct

SEQ ID NO: 378 - DNA, 21 bp, Sorghum bicolor
tggagaagcagggcacgtgca

SEQ ID NO: 379 - DNA, 21 bp, Sorghum bicolor
tggagaagcagggcacgtgca

SEQ ID NO: 380 - DNA, 21 bp, Triticum aestivum
tggagaagcagggcacgtgca

SEQ ID NO: 381 - DNA, 21 bp, Triticum aestivum
tggagaagcagggcacgtgca

SEQ ID NO: 382 - DNA, 21 bp, Theobroma cacao
tggagaagcagggcacgtgca

SEQ ID NO: 383 - DNA, 21 bp, Theobroma cacao
tggagaagcagggcacgtgca

SEQ ID NO: 384 - DNA, 21 bp, Theobroma cacao
tggagaagcagggcacatgct

SEQ ID NO: 385 - DNA, 21 bp, Vitis vinifera
tggagaagcagggcacgtgca

SEQ ID NO: 386 - DNA, 21 bp, Vitis vinifera
tggagaagcagggcacatgct

SEQ ID NO: 387 - DNA, 21 bp, Vitis vinifera
tggagaagcagggcacgtgca

SEQ ID NO: 388 - DNA, 21 bp, Vitis vinifera
tggagaagcagggcacgtgca

SEQ ID NO: 389 - DNA, 21 bp, Zea mays
tggagaagcagggcacgtgca

SEQ ID NO: 390 - DNA, 21 bp, Zea mays
tggagaagcagggcacgtgca

SEQ ID NO: 391 - DNA, 21 bp, Zea mays
tggagaagcagggcacgtgca

SEQ ID NO: 392 - DNA, 21 bp, Zea mays
tggagaagcagggcacgtgca

SEQ ID NO: 393 - DNA, 21 bp, Zea mays
tggagaagcaggacacgtgag

SEQ ID NO: 394 - DNA, 21 bp, Zea mays
tggagaagcagggcacgtgct

SEQ ID NO: 395 - DNA, 21 bp, Zea mays
tggagaagcagggcacgtgca

SEQ ID NO: 396 - DNA, 21 bp, Zea mays
tggagaagcagggcacgtgtg

SEQ ID NO: 397 - DNA, 21 bp, Arabidopsis lyrata
ttagatgaccatcaacaaacg

SEQ ID NO: 398 - DNA, 21 bp, Arabidopsis thaliana
ttagatgaccatcaacaaact

SEQ ID NO: 399 - DNA, 21 bp, Brachypodium distachyon
ttagatgaccatcagcaaaca

SEQ ID NO: 400 - DNA, 21 bp, Citrus sinensis
ttagatgaccatcaacaaaca

SEQ ID NO: 401 - DNA, 21 bp, Gossypium hirsutum
ttagatgaccatcaacaaaca

SEQ ID NO: 402 - DNA, 21 bp, Gossypium hirsutum
ttagatgaccatcaacaaaca

SEQ ID NO: 403 - DNA, 21 bp, Gossypium hirsutum
ttagatgaccatcaacaaaca

SEQ ID NO: 404 - DNA, 21 bp, Oryza sativa
taagatgaccatcagcgaaaa

SEQ ID NO: 405 - DNA, 21 bp, Oryza sativa
ttagatgaccatcagcaaaca

SEQ ID NO: 406 - DNA, 21 bp, Oryza sativa
ttagatgaccatcagcaaaca

SEQ ID NO: 407 - DNA, 21 bp, Populus trichocarpa
ttagatgaccatcaacgaaaa

SEQ ID NO: 408 - DNA, 21 bp, Saccharum ssp.
ttagatgaccatcagcaaaca

SEQ ID NO: 409 - DNA, 21 bp, Theobroma cacao
ttagatgaccatcaacaaaca

SEQ ID NO: 410 - DNA, 21 bp, Zea mays
ttagatgaccatcagcaaaca

SEQ ID NO: 411 - DNA, 21 bp, Zea mays
tggagaagcagggcacgtgca

SEQ ID NO: 412 - DNA, 21 bp, Zea mays
tggagaagcagggcacgtgca

SEQ ID NO: 413 - DNA, 21 bp, Zea mays
tggagaagcagggcacgtgca

SEQ ID NO: 414 - DNA, 21 bp, Zea mays
tggagaagcagggcacgtgca

SEQ ID NO: 415 - DNA, 21 bp, Zea mays
tggagaagcagggcacgtgca

SEQ ID NO: 416 - DNA, 21 bp, Zea mays
tggagaagcagggcacgtgca

SEQ ID NO: 417 - DNA, 155 bp, Arabidopsis lyrata
gagtctcaccgtcgggctcggattcgcttggtgcaggtcgggaaccaattcggctgacacagcctcgtgactttaaaacctttattggtttgtgagcagggattggatcccgccttgcatcaactgaatcggatccccgaggtgtaagaaaactc

SEQ ID NO: 418 - DNA, 106 bp, Hordeum vulgare
gtccgtcgccgccgcctcgggctcgcttggtgcagatcgggaccctccgcccgccccgacgggccggatcccgccttgcaccaagtgaatcggagccggcgcagcg

SEQ ID NO: 419 - DNA, 87 bp, Oryza sativa
cgcctcgggctcgcttggtgcagatcgggacccgccgccgccgctgccggggccggatcccgccttgcaccaagtgaatcggagccg

SEQ ID NO: 420 - DNA, 104 bp, Zea mays
gaagccgcgccgcctcgggctcgcttggtgcagatcgggacccgccgcccggccgacgggacggatcccgccttgcaccaagtgaatcggagccggcggagcga

SEQ ID NO: 421 - DNA, 104 bp, Zea mays
tccgccgcgccgtctcgggctcgcttggtgcagatcgggacccgccgcccggccgacgggacggatcccgccttgcatcaagtgaatcggagccggcgcagcga

SEQ ID NO: 422-452 - skipped (31 entries)

SEQ ID NO: 453 - RNA, 21 nt, Arabidopsis thaliana
agaaucuugaugaugcugcau

SEQ ID NO: 454 - RNA, 102 nt, Arabidopsis thaliana
ugcuguggcaucaucaagauucacaucuguugauggacgguggugauucacucuccacaaaguucucuaugaaaaugagaaucuugaugaugcugcaucggc

SEQ ID NO: 455 - RNA, 21 nt, Arabidopsis thaliana
uuggacugaagggagcucccu

SEQ ID NO: 456 - RNA, 176 nt, Arabidopsis thaliana
agagagagcuuccuugaguccauucacaggucgugauaugauucaauuagcuuccgacucauucauccaaauaccgagucgccaaaauucaaacuagacucguuaaaugaaugaaugaugcgguagacaaauuggaucauugauucucuuugauuggacugaagggagcucccucu

SEQ ID NO: 457 - DNA, 20 bp, Artificial sequence
  Single strand DNA oligonucleotide
tttagcgatgaacttcactc

SEQ ID NO: 458 - DNA, 65 bp, Oryza sativa
gagcacctctccctccgcccgctcggccaccacgtggcagccgagcgagggcctcggggcagctc

SEQ ID NO: 459 - DNA, 88 bp, Oryza sativa
gcgcggcagccgagcgagggcctcggggcgaagccgcgggagagcccgagggggtgacgtcatgccccgaggcccccccctcccgcgc

SEQ ID NO: 460 - DNA, 66 bp, Oryza sativa
gaggcacccctatctccacccacgcggccgccacatggcagccgagcgagggcctcggggtaactc

SEQ ID NO: 461 - DNA, 79 bp, Arabidopsis lyrata
gttggagaagcagggcacgtgcaaaccaacaaacacgaaatccgtctcatgtgttttgcacgtactccccttctccaac

SEQ ID NO: 462 - DNA, 161 bp, Arabidopsis lyrata
gatggagaagcagggcacgtgcattactagctcatctcgtatgcatatatatatacatcctcaccacaaatgcgtgtatatgtgcggagatatagatatatatgtgtgtggagtgtgatgatataaatgagttagttcttcatgtgcccatcttcaccatc

SEQ ID NO: 463 - DNA, 115 bp, Arabidopsis lyrata
gggtgagtaacacttgatggagaagcagggcacgtgcgaacacaaatgagatcgatcggtacatgatgatcatattttcgcacgtgttctactcctccaacacgtgtctctcccc

SEQ ID NO: 464 - DNA, 113 bp, Arabidopsis thaliana
gggtgagaatctccatgttggagaagcagggcacgtgcaaaccaacaaacacgaaatccgtctcatttgcttatttgcacgtacttaacttctccaacatgagctcttcaccc

SEQ ID NO: 465 - DNA, 153 bp, Arabidopsis thaliana
gatggagaagcagggcacgtgcattactagctcatatatacactctcaccacaaatgcgtgtatatatgcggaattttgtgatatagatgtgtgtgtgtgttgagtgtgatgatatggatgagttagttcttcatgtgcccatcttcaccatc

SEQ ID NO: 466 - DNA, 193 bp, Brachypodium distachyon
gagtggacatatgaggcgaggcgcgcgaggtggagaagcagggcacgtgcattcgttccagctcgccgccggtgtgccgcgccgcggcctgggcgcgcgtgtcgcccgagcggccggccatgcgcgtgtgtgtgcatgcatgtgcccttcttctccaccgcgcaagcctcgcctgcgaacgcgcgcgcacgcc

SEQ ID NO: 467 - DNA, 209 bp, Brachypodium distachyon
aagagaggagagctcagcgagaaggaccgcgttggagaagcagggcacgtgcatgcatgcaactagagcttagctagtgtcaattcttccatctcttgtgcctggccgggatcgatcttatataccgagcttaatttggcacctattggatgctgcatgcatgtgttcttctcctccatcacggtcttcatttctctcgctttctttac

SEQ ID NO: 468 - DNA, 138 bp, Brachypodium distachyon
atgatttgaggagagggggcgagcaaaccttgctggagaagcagggcacgtgcttgaccggtcggccggagccgggttgcagcatgtgcgctccttctccagcatggcttctcgccccgtcgaccggcgttcggcagg

SEQ ID NO: 469 - DNA, 186 bp, Brachypodium distachyon
agcgagaaggaccgcgttggagaagcagggcacgtgcatgcatgcaactagagcttagctagtgtcaattcttccatctcttgtgcctggccgggatcgatcttatataccgagcttaatttggcacctattggatgctgcatgcatgtgttcttctcctccatcacggtcttcatttctctcgct

SEQ ID NO: 470 - DNA, 127 bp, Brachypodium distachyon
tggtgagaatgcccctgttggagaagcagggcacgtgcaaagatcggagcacgtttcgtatgtgatgtacgtatgtgcatggatcgctgtgcacgcgctccccttctccaccatggccttcttacca

SEQ ID NO: 471 - DNA, 161 bp, Brachypodium distachyon
aggcgaggcttgcgcggtggagaagaagggcacatgcatgcacacacacgcgcatggccggccgctcgggcgacacgcgcgcccaggccgcggcgcggcacaccggcggcgagctggaacgaatgcacgtgccctgcttctccacctcgcgcgcctcgcct

SEQ ID NO: 472 - DNA, 86 bp, Brassica napus
ccacgttggagaagcagggcacgtgcaaaccaacaaacacgagatctatctcatgtaatttgcacgtgctccactcctccaacatg

SEQ ID NO: 473 - DNA, 92 bp, Brassica rapa
cctccacgttggagaagcagggcacgtgcaaaccaacaaacacgagatctatctcatgtaatttgcacgtgctccactcctccaacatgagc

SEQ ID NO: 474 - DNA, 95 bp, Corylus avellana
agctccttgttggagaagcagggcacgtgcaatgttcttggctctcaaatgccagtgaaccctttgcacgtgctccccttctccaacatgggttc

SEQ ID NO: 475 - DNA, 278 bp, Citrus sinensis
gtgtagagcaagatggagaagcagggcacgtgcattactaactcaaccgcacatacatctactaacaaaaattaattaatccacacattttgaagaaaccaaatcaagaagcagcaagctctttctgttgttatagctcagtcatgagttgagttatttcttcatgtgcccttcttccccatcatgaccgcggcaccttgtgtgtgtgtgtgtgtgtctgtgtatcatcagggatcagctcaagatctgaatttcttcttagcaaaattcatgtgcca

SEQ ID NO: 476 - DNA, 297 bp, Citrus trifoliata
gaaggtgtgtgtagagcaagatggagaagcagggcacgtgcattactaactcaaccgcacatacatctactaacaaaaattaattaatccacacattttgaagaaaccaaatcaagaagcaggaggctctttctgttgttatagctcagtcatgagttgagttatttcttcatgtgcccttcttccccatcatgaccgcggcaccttgtgcgtgtgtgtgtgtgtatcatcagggatcagctcaagatctgaatttcttcttagcaaaattcatgtgccaatctaaagcctaccaaa

SEQ ID NO: 477 - DNA, 102 bp, Festuca arundinacea
ggtagctgctgttgttgctggcactgttattattgaagctggagaagcagggcacttgctcaagtgcagtggcggcagaggtggagttcatggtggcatgga

SEQ ID NO: 478 - DNA, 102 bp, Festuca arundinacea; identical to SEQ ID NO: 477

SEQ ID NO: 479 - DNA, 111 bp, Gossypium arboreum
  misc_feature (87)..(87): n is a, c, g, or t
tggagaagcagggcacgtaaaccgattcagaaacagggtttttcttggcattgaaacttgaagaagaatccattaatggtggaaganccggacggacccaattcatttcca

SEQ ID NO: 480 - DNA, 101 bp, Gossypium hirsutum
ggggtgagtatctcttgttggagaagcagggcacgtgcaagttcctatgtttaagtgaactttgcacgtgctccccttctccaccgtgagtttctcattct

SEQ ID NO: 481 - DNA, 95 bp, Glycine max
agctccttgttggagaagcagggcacgtgcaagtctcttggatctcaaatgccactgaaccctttgcacgtgctccccttctccaacacgggttt

SEQ ID NO: 482 - DNA, 87 bp, Ipomoea nil
  misc_feature (2)..(2): n is a, c, g, or t
  misc_feature (14)..(14): n is a, c, g, or t
  misc_feature (21)..(21): n is a, c, g, or t
  misc_feature (27)..(27): n is a, c, g, or t
cngaaaaatctgantttttcnatgaanagaaatggggagcgatgggttttttgtcctccttggagccggagaagcaggtcacgtgcg

SEQ ID NO: 483 - DNA, 99 bp, Medicago truncatula
cttgttggagaagcagggcacgtgcaaatcctctttctgattcattctctcataatgcatatcaatatcttttgcacgtgctccccttctccaactagg

SEQ ID NO: 484 - DNA, 144 bp, Medicago truncatula
caagatggagaagcagggcacgtgcaatactaactcatgaacatacacacatgatggaagtgaatacaaagagaatctacattctcttatgtttcatttttttaattgagttagttcttcatgtgcccctcttccccatcatga

SEQ ID NO: 485 - DNA, 86 bp, Medicago truncatula
cttgttggagaagcagggcacgtgcaaccgtagatctctctcaaacttcaatctcattttgcacgtgctccacttttccaacttga

SEQ ID NO: 486 - DNA, 72 bp, Medicago truncatula
cacgttggagaagcagggcacatgcttgattttatcaaagttctgagcatgtgctcttgctctccatcatgg

SEQ ID NO: 487 - DNA, 156 bp, Oryza sativa
gtgagaaggaccgcgttggagaagcagggcacgtgcatgcatatgttcatcatcatcttcttcctcctcctctagctccagccttgtgtgggttggaagtttagatagaactcgcactgcacgtggtctccttctccatcccggtctttttctcac

SEQ ID NO: 488 - DNA, 109 bp, Oryza sativa
gtgcacggtggagaagcagggcacgtgcattaccatccactcgcctgccggccgccggccgccattgccatggatggttcttcatgtgcccgtcttctccaccgagcac

SEQ ID NO: 489 - DNA, 119 bp, Oryza sativa
aggttcttgttggagaagcagggtacgtgcaaaatgcacaccggttggtcgagctaattaacaagctctgacgaccatggtgatcgaatgcacgtgctccccttctccaccatggcctt

SEQ ID NO: 490 - DNA, 94 bp, Oryza sativa
caaaccgtgctggagaagcagggcacgtgctcgacggcggggctggctggccggccggcttgcagcatgtgcgctccttctccagcatggcttc

SEQ ID NO: 491 - DNA, 132 bp, Oryza sativa
ttgtgcagggtggagaagcagggcacgtgagcggccatccagtgtagcttcgctgcgcgtccatggcggcgaacgcgcgtgatctggagtttggatggtcgttcatgtgtccgtcttctccaccgagcactg

SEQ ID NO: 492 - DNA, 210 bp, Oryza sativa
tgaggatggcgaggcgcgcgaggtggagaagcagggcacgtgcattcctagagcttccgtccagctccccggcgggctagctagctcactccgccgccgccgccgccgccgccggcgcgcgcacggctggctggctccggccggctgagatgcatgcacggatgcatgtgcccttcttctccaccgtgcacgcctcgcctgcagcaagga

SEQ ID NO: 493 - DNA, 159 bp, Populus tremula x Populus tremuloides
gtgagcaagatggagaagcagggcacgtgcattactaactcatgcatacagagtgagagagacatttcttgctcgagttatgactcttacctactatagattttgttggcctcagtgagttagttcttcatgtgcctgtcttccccatcatgatcacta

SEQ ID NO: 494 - DNA, 85 bp, Populus trichocarpa
ggttccttgctggagaagcagggcacgtgcaaaatcctgatgaagtgcttacactttgcacgcgctcttcttctccaacacgggc

SEQ ID NO: 495 - DNA, 162 bp, Populus trichocarpa
gtgagcaagatggagaagcagggcacgtgcactactaactcatgcacacagagagggagacgcatttcttgctggagttacgagttacgactcttacctactattgattttgttagctccagtgagttagttattcatgtgcctgtcttcctcatcatgatc

SEQ ID NO: 496 - DNA, 82 bp, Populus trichocarpa
tagctcttgctggagaagcagggcacgtgcaagctctctcctcaagctttccttgcacgtgctccccttctccaacatgggt

SEQ ID NO: 497 - DNA, 99 bp, Populus trichocarpa
tggctcacgctggagaagcagggcacgtgcaaaatccttctcggcttccagatgctgatgaagcactctttgcacgtgctcccctcctccaacatgagt

SEQ ID NO: 498 - DNA, 155 bp, Populus trichocarpa
gtgagcaagatggagaagcagggcacgtgcattactaactcatgcacacagagtgagagagacatttcttgctggagttatgactcttacctactatagattgtgttggcttcagcgagttagttcttcatgtgcctgtcttccccatcatgatc

SEQ ID NO: 499 - DNA, 90 bp, Populus trichocarpa
tgagccatgctggagaagcagggcacatgctaaatctatcagcttgaaagtctgatagttttgcatgtgctctatctctccagcttggac

SEQ ID NO: 500 - DNA, 78 bp, Ricinus communis
cttgctggagaagcagggcacgtgcaattcctttctttccctctccgaattgcacgtgctccacttctccaacatggg

SEQ ID NO: 501 - DNA, 104 bp, Ricinus communis
cctgctggagaagcagggcacgtgcaaaccccaacactccttggtttcttgaatgccaatggaaactatactcttttgcacgtgctccccttctccaacatggt

SEQ ID NO: 502 - DNA, 116 bp, Ricinus communis
caagatggagaagcagggcacgtgcattactaactcatgcataattgaacatacatacatacgcatttttcttgctggaggttagttcttcatgtgcccgtcttccccatcatgac

SEQ ID NO: 503 - DNA, 85 bp, Ricinus communis
catgctggagaagcagggcacatgctagatttatcagaatgaaaaacctgagaattttgcatgtgcctttgttctccagcttgga

SEQ ID NO: 504 - DNA, 126 bp, Sorghum bicolor
tggagaagcagggcacgtgcattaccatccaatgccgccaagctcgatcctcctctgagcttgctagctccatcagctcgccagccatggctggatggatggttcttcatgtgcccatcttctcca

SEQ ID NO: 505 - DNA, 111 bp, Sorghum bicolor
gaggggcgagcaaaccgtgctggagaagcagggcacgtgctcgtcgtcgctgcatgcgtggtcgtcgtcgcagcacgtgcgctccttctccaacatggcttctcgccccca

SEQ ID NO: 506 - DNA, 153 bp, Sorghum bicolor; identical to SEQ ID NO: 220

SEQ ID NO: 507 - DNA, 160 bp, Sorghum bicolor
tggagaagcagggcacgtgcatgctcctaacttctcgcgcgctcctctccgccgagatccatcgttcatctatatctccatggatatggagctatatatggactggatcgcggagagaaagctagctagtatactgcacgcacgtgttctccttctccat

SEQ ID NO: 508 - DNA, 205 bp, Sorghum bicolor
gttggagaagcagggcacgtgcagagacacgccggccggagcacggccgccgccgatagatcgacctcgcactcgcactcgcacaccagctgcgtctgcgtgtggatgaggtcgagatcgtcgtcggtcgaagctagcgaggaacctcttgcttgttgcttcacccgctagctcctgcactgcacgtgctccccttctccaccat

SEQ ID NO: 509 - DNA, 156 bp, Triticum aestivum
ggtggagaagcagggcacgtgcatccatttccagctcggcattcccggcgtccggccggccggctgccgcggccttgcctggctgggtagtgcgtcgctcgatccggccgtgcgccggcggccggcccttgcatgcatgtgcctttcttctccacc

SEQ ID NO: 510 - DNA, 152 bp, Triticum aestivum
tggagaagcagggcacgtgcatccatttccagctcggcattcccggcgtccggccggccggctgccgcggccttgcctggctgggtagtgcgtcgctcgatccggccgtgcgccggcggccggcccttgcatgcatgtgcctttcttctcca

SEQ ID NO: 511 - DNA, 128 bp, Theobroma cacao
ccgggtgagtagctccttgttggagaagcagggcacgtgcaaaattgccaatccattttggcttctcaaatgccatgtctcgcgttctgcacgtgctccccttctccaacacgggttcctcgccctat

SEQ ID NO: 512 - DNA, 130 bp, Theobroma cacao
agtgggtgagtagctcttgttggagaagcagggcacgtgcaagtcctagtttagctatctcgagtttaacatactcccccagtgaactgtgcacgtgctccccttctccaccatgagttcctcacccttt

SEQ ID NO: 513 - DNA, 112 bp, Theobroma cacao
ggagagagggtaagccatgctggagaagcagggcacatgctaaagcaatcagacaaaaatctgagaaattttgcatgtgccctggctctccagcttggaccgtctcccttac

SEQ ID NO: 514 - DNA, 121 bp, Vitis vinifera
agctccttgttggagaagcagggcacgtgcagatttgcctcacttttcccccttttttcttctttactcccaccaccgcccacaggcttgcacgtgctccccttctccaacatgggttcct

SEQ ID NO: 515 - DNA, 93 bp, Vitis vinifera
taaaccatgctggagaagcagggcacatgctggatcaatcagcacctggatctgagattttacatgtgccctggctctcccacttggatccta

SEQ ID NO: 516 - DNA, 97 bp, Vitis vinifera
ttgagcaagatggagaagcagggcacgtgcattactagctcatgcaccacaaaccaataatcttttgctcgagttagactcttgcttgctgctttga

SEQ ID NO: 517 - DNA, 118 bp, Vitis vinifera
aagctcttgatggagaagcagggcacgtgcagttcacaaattctaatctgctctgcacgtgcagttcacaaattctaatctgctctgcacgtgctccccttctccaacatgggttcct

SEQ ID NO: 518 - DNA, 152 bp, Zea mays
cagtgacaaggaccacgctggagaagcagggcacgtgcatgcgcataccatatagctagacgatgttctctctcgctccgctcgaccaagcttcatgtatggatgggtacgcacgcacgtgttctccttctccatcgaggtctttctcactt

SEQ ID NO: 519 - DNA, 128 bp, Zea mays
tagacggtggctgtgcgtggtggagaagcagggcacgtgcattaccatccaatgccgccgggtgggtgggtggaatggatggatggttcttgatgtgcccatcttctccaccgagcacgaactgtctt

SEQ ID NO: 520 - DNA, 270 bp, Zea mays
tggcgaggtgcgcgcggtggagaagcagggcacgtgcattctttccgtcgccggccggcttggcagcggccggcggcccggctctcgcagtcacgcgtacgtcgcctgagcggcgcgcgcgagagagagagacacggcaggtcgtcgccggcgcggctaactggtgcaggtgcagcagctagcttctgaaacccagccagccagccagccggccggccggccgatcgatgcgtgcatgtgcccttcttctccatcgggcacgcctcgcct

SEQ ID NO: 521 - DNA, 216 bp, Zea mays
tgagtgagaaggaccacgctggagaagcagggcacgtgcatgcacatacgccattctcgatctctcctctccaccactactgcatctagctatctccatggatggatgtacgtagctcggactggatcgatcggagaagcaataagctagcgagctcatgcatgctggctgtgcacgcacgtggtctccttctccatcacggttctttctcacttc

SEQ ID NO: 522 - DNA, 116 bp, Zea mays
gtggagaagcaggacacgtgagcgaccatccagttccactcccgctggctcgctgctggagctcccggcggcttggtgagtttgggtggtcgttcatgtgtccgccctctccaccg

SEQ ID NO: 523 - DNA, 108 bp, Zea mays
ctggagaagcagggcacgtgctcgccgacaagtcgaagccttagggcagcttggcctgtggctgcacgcgtacgtggtcgtcgcagcacgtgcgctccttctccaaca

SEQ ID NO: 524 - DNA, 171 bp, Zea mays
ttggagaagcagggcacgtgcagagacacgccggagcacggccgccgccgatctaccgacctcccaaacctgccttatggtgtgggggtggaggtcgtcggtggaagcgatagctgtcgttgttgcttcgatgttgttagctcctcctgcacgtgctccccttctccacca

SEQ ID NO: 525 - DNA, 219 bp, Zea mays
gtggagaagcagggcacgtgtgaattcattcgttccatcgacggtctggcgccgactcacgcatcgccggcgcggcgagctgagcgcgtgacacggaaagcaggtccgccgcgccggcgcccgcgctggccgatcgaccggctaactgtagctccacgaagcaaagccaggccagccggccgatcgatgcgtgcgtgcatgtgcccttcttctccatcg

SEQ ID NO: 526 - DNA, 79 bp, Arabidopsis lyrata; identical to SEQ ID NO: 461

SEQ ID NO: 527 - DNA, 161 bp, Arabidopsis lyrata; identical to SEQ ID NO: 462

SEQ ID NO: 528 - DNA, 115 bp, Arabidopsis lyrata; identical to SEQ ID NO: 463

SEQ ID NO: 529 - DNA, 113 bp, Arabidopsis thaliana; identical to SEQ ID NO: 464

SEQ ID NO: 530 - DNA, 153 bp, Arabidopsis thaliana; identical to SEQ ID NO: 465

SEQ ID NO: 531 - DNA, 102 bp, Arabidopsis thaliana; identical to SEQ ID NO: 218

SEQ ID NO: 532 - DNA, 193 bp, Brachypodium distachyon; identical to SEQ ID NO: 466

SEQ ID NO: 533 - DNA, 209 bp, Brachypodium distachyon; identical to SEQ ID NO: 467

SEQ ID NO: 534 - DNA, 138 bp, Brachypodium distachyon; identical to SEQ ID NO: 468

SEQ ID NO: 535 - DNA, 186 bp, Brachypodium distachyon; identical to SEQ ID NO: 469

SEQ ID NO: 536 - DNA, 127 bp, Brachypodium distachyon; identical to SEQ ID NO: 470

SEQ ID NO: 537 - DNA, 161 bp, Brachypodium distachyon; identical to SEQ ID NO: 471

SEQ ID NO: 538 - DNA, 86 bp, Brassica napus; identical to SEQ ID NO: 472

SEQ ID NO: 539 - DNA, 92 bp, Brassica rapa; identical to SEQ ID NO: 473

SEQ ID NO: 540 - DNA, 95 bp, Corylus avellana; identical to SEQ ID NO: 474

SEQ ID NO: 541 - DNA, 278 bp, Citrus sinensis; identical to SEQ ID NO: 475

SEQ ID NO: 542 - DNA, 297 bp, Citrus trifoliata; identical to SEQ ID NO: 476

SEQ ID NO: 543 - DNA, 102 bp, Festuca arundinacea; identical to SEQ ID NO: 477

SEQ ID NO: 544 - DNA, 102 bp, Festuca arundinacea; identical to SEQ ID NO: 477

SEQ ID NO: 545 - DNA, 111 bp, Gossypium arboreum; identical to SEQ ID NO: 479
  misc_feature (87)..(87): n is a, c, g, or t

SEQ ID NO: 546 - DNA, 101 bp, Gossypium hirsutum; identical to SEQ ID NO: 480

SEQ ID NO: 547 - DNA, 95 bp, Glycine max; identical to SEQ ID NO: 481

SEQ ID NO: 548 - DNA, 87 bp, Ipomoea nil; identical to SEQ ID NO: 482
  misc_feature (2)..(2): n is a, c, g, or t
  misc_feature (14)..(14): n is a, c, g, or t
  misc_feature (21)..(21): n is a, c, g, or t
  misc_feature (27)..(27): n is a, c, g, or t

SEQ ID NO: 549 - DNA, 99 bp, Medicago truncatula; identical to SEQ ID NO: 483

SEQ ID NO: 550 - DNA, 144 bp, Medicago truncatula; identical to SEQ ID NO: 484

SEQ ID NO: 551 - DNA, 86 bp, Medicago truncatula; identical to SEQ ID NO: 485

SEQ ID NO: 552 - DNA, 72 bp, Medicago truncatula; identical to SEQ ID NO: 486

SEQ ID NO: 553 - DNA, 156 bp, Oryza sativa; identical to SEQ ID NO: 487

SEQ ID NO: 554 - DNA, 109 bp, Oryza sativa; identical to SEQ ID NO: 488

SEQ ID NO: 555 - DNA, 119 bp, Oryza sativa; identical to SEQ ID NO: 489

SEQ ID NO: 556 - DNA, 94 bp, Oryza sativa; identical to SEQ ID NO: 490

SEQ ID NO: 557 - DNA, 132 bp, Oryza sativa; identical to SEQ ID NO: 491

SEQ ID NO: 558 - DNA, 210 bp, Oryza sativa; identical to SEQ ID NO: 492

SEQ ID NO: 559 - DNA, 159 bp, Populus tremula x Populus tremuloides; identical to SEQ ID NO: 493

SEQ ID NO: 560 - DNA, 85 bp, Populus trichocarpa; identical to SEQ ID NO: 494

SEQ ID NO: 561 - DNA, 162 bp, Populus trichocarpa; identical to SEQ ID NO: 495

SEQ ID NO: 562 - DNA, 82 bp, Populus trichocarpa; identical to SEQ ID NO: 496

SEQ ID NO: 563 - DNA, 99 bp, Populus trichocarpa; identical to SEQ ID NO: 497

SEQ ID NO: 564 - DNA, 155 bp, Populus trichocarpa; identical to SEQ ID NO: 498

SEQ ID NO: 565 - DNA, 90 bp, Populus trichocarpa; identical to SEQ ID NO: 499

SEQ ID NO: 566 - DNA, 78 bp, Ricinus communis; identical to SEQ ID NO: 500

SEQ ID NO: 567 - DNA, 104 bp, Ricinus communis; identical to SEQ ID NO: 501

SEQ ID NO: 568 - DNA, 116 bp, Ricinus communis; identical to SEQ ID NO: 502

SEQ ID NO: 569 - DNA, 85 bp, Ricinus communis; identical to SEQ ID NO: 503

SEQ ID NO: 570 - DNA, 126 bp, Sorghum bicolor; identical to SEQ ID NO: 504

SEQ ID NO: 571 - DNA, 111 bp, Sorghum bicolor; identical to SEQ ID NO: 505

SEQ ID NO: 572 - DNA, 160 bp, Sorghum bicolor; identical to SEQ ID NO: 507

SEQ ID NO: 573 - DNA, 205 bp, Sorghum bicolor; identical to SEQ ID NO: 508

SEQ ID NO: 574 - DNA, 156 bp, Triticum aestivum; identical to SEQ ID NO: 509

SEQ ID NO: 575 - DNA, 152 bp, Triticum aestivum; identical to SEQ ID NO: 510

SEQ ID NO: 576 - DNA, 128 bp, Theobroma cacao; identical to SEQ ID NO: 511

SEQ ID NO: 577 - DNA, 130 bp, Theobroma cacao; identical to SEQ ID NO: 512

SEQ ID NO: 578 - DNA, 112 bp, Theobroma cacao; identical to SEQ ID NO: 513

SEQ ID NO: 579 - DNA, 121 bp, Vitis vinifera; identical to SEQ ID NO: 514

SEQ ID NO: 580 - DNA, 93 bp, Vitis vinifera; identical to SEQ ID NO: 515

SEQ ID NO: 581 - DNA, 97 bp, Vitis vinifera; identical to SEQ ID NO: 516

SEQ ID NO: 582 - DNA, 118 bp, Vitis vinifera; identical to SEQ ID NO: 517

SEQ ID NO: 583 - DNA, 152 bp, Zea mays; identical to SEQ ID NO: 518

SEQ ID NO: 584 - DNA, 128 bp, Zea mays; identical to SEQ ID NO: 519

SEQ ID NO: 585 - DNA, 270 bp, Zea mays; identical to SEQ ID NO: 520

SEQ ID NO: 586 - DNA, 216 bp, Zea mays; identical to SEQ ID NO: 521

SEQ ID NO: 587 - DNA, 116 bp, Zea mays; identical to SEQ ID NO: 522

SEQ ID NO: 588 - DNA, 108 bp, Zea mays; identical to SEQ ID NO: 523

SEQ ID NO: 589 - DNA, 171 bp, Zea mays; identical to SEQ ID NO: 524

SEQ ID NO: 590 - DNA, 219 bp, Zea mays; identical to SEQ ID NO: 525

SEQ ID NO: 591 - DNA, 197 bp, Arabidopsis lyrata
tacatctttaacttccatgaaacattatagggttttttctctcttgcaacccttgaatgtgtttgttgattgacatctatacatatcgataatcctatcgtgttgatagatcgattggtttagatgaccatcaacaaacgctttcgtggttttgcatcgcttcttgaaatcttgatcatgtttttagcatctttgta

SEQ ID NO: 592 - DNA, 177 bp, Arabidopsis thaliana
ttccatgaaacgttataggtttttttctttctctcttgcaacccttgaatgtgtttgttgattgatatctacacatgttgatcatccttgtgttgatcgattggtttagatgaccatcaacaaactctttcgtggttttgcatcgcttcttggaatctcgatcatgtttttagcatc

SEQ ID NO: 593 - DNA, 164 bp, Brachypodium distachyon
attgagccgattcatgcagctctgaacttgttttgttggttgtcatctaaccatcgatcggtccgtgcttcggtgcttgtgccatgattttgcatcatcacaccggcgatggttagatgaccatcagcaaacatgttcgtgagacatgccgtgcgtcctgagct

SEQ ID NO: 594 - DNA, 100 bp, Citrus sinensis
gcttgttgattgtcatctaatcattttctttttcatccgggcatttgaatgattatatggttagatgaccatcaacaaacatattcatggtatggcatgc

SEQ ID NO: 595 - DNA, 155 bp, Gossypium hirsutum
atgcattgttgaatgtgtttgtttatggtcatctaagccatttttcatctcgccaattctttgttcaagcagtttttggataatcgaaccgatagactacacccgcagaaatgatgtttagatgaccatcaacaaacaacttcatcttattgcat

SEQ ID NO: 596 - DNA, 192 bp, Gossypium hirsutum
ctttttcttttcatgaaaatgcattattgaatgtgtttgtttatggtcatctaagccatttttcatctcgccaattctttgttcaagcagtttttggataatcgaaccgatagaatacacccgcagaaatgatgtttagatgaccatcaacaaacaacttcatcttattgcatcaagtgttcaagatttaag

SEQ ID NO: 597 - DNA, 155 bp, Gossypium hirsutum
atgcattgttgaatgtgtttgtttatggtcatctaagccatttttcatctcgccaattctttgttcaagcagtttttggataatcgaaccgatagactacacccgcagaaatgatgtttagatgaccatcaacaaacaacttcctcttattgcat

SEQ ID NO: 598 - DNA, 132 bp, Oryza sativa
gattttcgctgacggccgatttaacacagccaccagcgaaaatgaatttttgctagcggctgatgtaagatgaccgctagcaaagatccatttttgctggtggctggcttaagatgaccatcagcgaaaatg

SEQ ID NO: 599 - DNA, 117 bp, Oryza sativa
ttttgttgctggtcatctagctacccgtgcatgcctggagattggagaataattgacgatgcagcagtcggcttattggctcttgggcacgcgtggttagatgaccatcagcaaaca

SEQ ID NO: 600 - DNA, 138 bp, Oryza sativa
ccatgaacctgttttgttgctggtcatctagctacccgtgcatgcctggagattggagaataattgacgatgcagcagtcggcttattggctcttgggcacgcgtggttagatgaccatcagcaaacaagttcgtgag

SEQ ID NO: 601 - DNA, 76 bp, Populus trichocarpa
catgaatatatttgttgatagtcatctagtgaacattgaaagtcatattagatgaccatcaacgaaaacattcatg

SEQ ID NO: 602 - DNA, 130 bp, Saccharum ssp.
acctgttttgttggtggtcatttaaccatgcttccatcgatgggtgcatggtttatggcagagtgtgatgccatgaactcatcatggtcatgcatgtgtgcatggttagatgaccatcagcaaacatgtt

SEQ ID NO: 603 - DNA, 148 bp, Theobroma cacao
aaattatgcattattgaatatgtttgttgatggtcatcttgtcattttttcacctcttcttggccttgtaccagttgccagtaccaagttcgtgtgcagaatgatgcttagatgaccatcaacaaacactttcatcgttttgcattct

SEQ ID NO: 604 - DNA, 122 bp, Zea mays
gttttgttggtggtcatttaaccatgcatgcttcgatcgatggattggtgcatgcatggattattgcatagtgtgatgcatgtggcgcatcagtgcatggttagatgaccatcagcaaacat

SEQ ID NO: 605 - DNA, 168 bp, Citrus sinensis
tggagaagcagggcacgtgcattactaactcaaccgcacatacatctactaacaaaaattaattaatccacacattttgaagaaaccaaatcaagaagcagcaagctctttctgttgttatagctcagtcatgagttgagttatttcttcatgtgcccttcttcccca

SEQ ID NO: 606 - DNA, 242 bp, Zea mays
cggtggagaagcagggcacgtgcattctttccgtcgccggccggcttggcagcggccggcggcccggctctcgcagtcacgcgtacgtcgcctgagcggcgcgcgcgagagagagagacacggcaggtcgtcgccggcgcggctaactggtgcaggtgcagcagctagcttctgaaacccagccagccagccagccggccggccggccgatcgatgcgtgcatgtgcccttcttctccatcg

SEQ ID NO: 607 - DNA, 177 bp, Zea mays
tggagaagcagggcacgtgcatgcacatacgccattctcgatctctcctctccaccactactgcatctagctatctccatggatggatgtacgtagctcggactggatcgatcggagaagcaataagctagcgagctcatgcatgctggctgtgcacgcacgtggtctccttctcca

SEQ ID NO: 608 - DNA, 116 bp, Zea mays
tggagaagcagggcacgtgcatgcgcataccatatagctagacgatgttctctctcgctccgctcgaccaagcttcatgtatggatgggtacgcacgcacgtgttctccttctcca

SEQ ID NO: 609 - DNA, 96 bp, Zea mays
tggtggagaagcagggcacgtgcattaccatccaatgccgccgggtgggtgggtggaatggatggatggttcttgatgtgcccatcttctccaccg

SEQ ID NO: 610 - DNA, 168 bp, Citrus sinensis; identical to SEQ ID NO: 605

SEQ ID NO: 611 - DNA, 242 bp, Zea mays; identical to SEQ ID NO: 606

SEQ ID NO: 612 - DNA, 177 bp, Zea mays; identical to SEQ ID NO: 607

SEQ ID NO: 613 - DNA, 116 bp, Zea mays; identical to SEQ ID NO: 608

SEQ ID NO: 614 - DNA, 96 bp, Zea mays; identical to SEQ ID NO: 609

SEQ ID NO: 615 - DNA, 21 bp, Brachypodium distachyon
tggaaggggcatgcagaggag

SEQ ID NO: 616 - DNA, 21 bp, Oryza sativa
tggaaggggcatgcagaggag

SEQ ID NO: 617 - DNA, 21 bp, Sorghum bicolor
tggaaggggcatgcagaggag

SEQ ID NO: 618 - DNA, 21 bp, Saccharum ssp.
tggaaggggcatgcagaggag

SEQ ID NO: 619 - DNA, 21 bp, Zea mays
tggaaggggcatgcagaggag

SEQ ID NO: 620 - DNA, 21 bp, Zea mays
tggaaggggcatgcagaggag

SEQ ID NO: 621 - DNA, 21 bp, Brachypodium distachyon
tggaaggggcatgcagaggag

SEQ ID NO: 622 - DNA, 21 bp, Oryza sativa
tggaaggggcatgcagaggag

SEQ ID NO: 623 - DNA, 21 bp, Sorghum bicolor
tggaaggggcatgcagaggag

SEQ ID NO: 624 - DNA, 21 bp, Saccharum ssp.
tggaaggggcatgcagaggag

SEQ ID NO: 625 - DNA, 21 bp, Zea mays
tggaaggggcatgcagaggag

SEQ ID NO: 626 - DNA, 21 bp, Zea mays
tggaaggggcatgcagaggag

SEQ ID NO: 627 - DNA, 160 bp, Brachypodium distachyon
tttggggttgggattgggggctggagcagcagcggtggaaggggcatgcagaggagcagggatgatggggggttgtactctgcttcttcccctctcgttctcctgtgcctgcctcttccattcctgctgctaccgccgtgctcggtgggcagggctgggc

SEQ ID NO: 628 - DNA, 88 bp, Oryza sativa
agtggaaggggcatgcagaggagcaggagattcagtttgaagctggacttcacttttgcctctctctcctgtgcttgcctcttccatt

SEQ ID NO: 629 - DNA, 84 bp, Sorghum bicolor
tggaaggggcatgcagaggagcacgaggcttggctggaagccgacctacgcctcgctggctctcctgtgcctgcctcttccatt

SEQ ID NO: 630 - DNA, 92 bp, Saccharum ssp.
tggaaggggcatgcagaggagcacgaggcttggctaaaagccgacctgtgctatgctacccctcgctggctctcctgtgcctgcctcttcca

SEQ ID NO: 631 - DNA, 123 bp, Zea mays
gtggaaggggcatgcagaggaggagcacgagcgaggtgtggctggaagaagcagccggggcctgtgtgctatatacccctcgcaagctctcctcactcctctcctgtgcctgcctcttccatt

SEQ ID NO: 632 - DNA, 78 bp, Zea mays
gtggaaggggcatgcagaggagcacgaacgaggtgtggttggcccctcgttagctctcctgtgcctgcctcttccatt

SEQ ID NO: 633 - DNA, 160 bp, Brachypodium distachyon; identical to SEQ ID NO: 627

SEQ ID NO: 634 - DNA, 88 bp, Oryza sativa; identical to SEQ ID NO: 628

SEQ ID NO: 635 - DNA, 84 bp, Sorghum bicolor; identical to SEQ ID NO: 629

SEQ ID NO: 636 - DNA, 92 bp, Saccharum ssp.; identical to SEQ ID NO: 630

SEQ ID NO: 637 - DNA, 123 bp, Zea mays; identical to SEQ ID NO: 631

SEQ ID NO: 638 - DNA, 78 bp, Zea mays; identical to SEQ ID NO: 632

SEQ ID NO: 639 - DNA, 21 bp, Zea mays
ggggcggactgggaacacatg

SEQ ID NO: 640 - DNA, 108 bp, Zea mays
gggggcggactgggaacacatgggaatgagatgagatcattgctcggtcgtgctggcctgggccgtcggcgcgcgttgatcttgcatgtgttctcaggtcgcccccgg

SEQ ID NO: 641 - DNA, 21 bp, Artificial sequence
  Single strand DNA oligonucleotide
tggagaagcagggcacgtgcg

SEQ ID NO: 642 - DNA, 20 bp, Artificial sequence
  Single strand DNA oligonucleotide
ggcagccgagcgagggcctc

SEQ ID NO: 643 - DNA, 24 bp, Artificial sequence
  Single strand DNA oligonucleotide
cacgacacgagaacggcacggcac

SEQ ID NO: 644 - DNA, 24 bp, Artificial sequence
  Single strand DNA oligonucleotide
ccgcacttgtagcttcgataggat

SEQ ID NO: 645 - DNA, 24 bp, Artificial sequence
  Single strand DNA oligonucleotide
cggaaacgggagcgggataaacgg

SEQ ID NO: 646 - DNA, 24 bp, Artificial sequence
  Single strand DNA oligonucleotide
gttgcacgtacgggtaggaagcgg

SEQ ID NO: 647 - DNA, 24 bp, Artificial sequence
  Single strand DNA oligonucleotide
atctcggggatttgtcagggacgg

SEQ ID NO: 648 - DNA, 22 bp, Artificial sequence
  Single strand DNA oligonucleotide
catcacaaacatcaccggcgag

SEQ ID NO: 649 - DNA, 22 bp, Artificial sequence
  Single strand DNA oligonucleotide
cacaaacatcaccggcgaggca

SEQ ID NO: 650 - DNA, 21 bp, Artificial sequence
  Single strand DNA oligonucleotide
cggcagctattagacggggca

SEQ ID NO: 651 - DNA, 23 bp, Artificial sequence
  Single strand DNA oligonucleotide
gcccgtaagggcataatcgggat

SEQ ID NO: 652 - DNA, 23 bp, Artificial sequence
  Single strand DNA oligonucleotide
cgatgtgggcaaaaggacggtag

SEQ ID NO: 653 - DNA, 24 bp, Artificial sequence
  Single strand DNA oligonucleotide
cacgacagagagcacacaagacac

SEQ ID NO: 654 - DNA, 25 bp, Artificial sequence
  Single strand DNA oligonucleotide
cgagtacgtagtcgcgaagcataat

SEQ ID NO: 655 - DNA, 23 bp, Artificial sequence
  Single strand DNA oligonucleotide
gctaccgtaagggcataatcggg

SEQ ID NO: 656 - DNA, 23 bp, Artificial sequence
  Single strand DNA oligonucleotide
gcaccgtaagggcataatcggga

SEQ ID NO: 657 - DNA, 21 bp, Artificial sequence
  Single strand DNA oligonucleotide
tcggcctcgagcaacgggcaa

SEQ ID NO: 658 - DNA, 22 bp, Artificial sequence
  Single strand DNA oligonucleotide
gcaggaactggggcatcaagtg

SEQ ID NO: 659 - DNA, 23 bp, Artificial sequence
  Single strand DNA oligonucleotide
gcatgcctagtaagcgctagtca

SEQ ID NO: 660 - DNA, 24 bp, Artificial sequence
  Single strand DNA oligonucleotide
tcaacggaccgggccaggcactag

SEQ ID NO: 661 - DNA, 22 bp, Artificial sequence
  Single strand DNA oligonucleotide
tccgctgtgacacaaggaaggc

SEQ ID NO: 662 - DNA, 25 bp, Artificial sequence
  Single strand DNA oligonucleotide
ggcaaaaagggggagaaatgagcaa

SEQ ID NO: 663 - DNA, 21 bp, Artificial sequence
  Single strand DNA oligonucleotide
aacatgggctagtcggcggtg

SEQ ID NO: 664 - DNA, 22 bp, Artificial sequence
  Single strand DNA oligonucleotide
aagcgagcggggtgtctcaaat

SEQ ID NO: 665 - DNA, 26 bp, Artificial sequence
  Single strand DNA oligonucleotide
tggcaataggagtcaaggagaagctt

SEQ ID NO: 666 - DNA, 21 bp, Artificial sequence
  Single strand DNA oligonucleotide
agatgggctgactatggggga

SEQ ID NO: 667 - DNA, 26 bp, Artificial sequence
  Single strand DNA oligonucleotide
ggcaggaaagtagagtaggcacagat

SEQ ID NO: 668 - DNA, 26 bp, Artificial sequence
  Single strand DNA oligonucleotide
tggcaggaagtgctaagaagtgaaat

SEQ ID NO: 669 - DNA, 22 bp, Artificial sequence
  Single strand DNA oligonucleotide
aggggtgttgaactgtggtggc

SEQ ID NO: 670 - DNA, 29 bp, Artificial sequence
  Single strand DNA oligonucleotide
catttggcaggtactgtaactggtattct

SEQ ID NO: 671 - DNA, 23 bp, Artificial sequence
  Single strand DNA oligonucleotide
atgagtacgtagtcgcgaagcat

SEQ ID NO: 672 - DNA, 24 bp, Artificial sequence
  Single strand DNA oligonucleotide
gcatgctatttgtacccgtcaccg

SEQ ID NO: 673 - DNA, 23 bp, Artificial sequence
  Single strand DNA oligonucleotide
catggcattgatcaagggggaga

SEQ ID NO: 674 - DNA, 24 bp, Artificial sequence
  Single strand DNA oligonucleotide
ccagtgcaatgggatgtggctatt

SEQ ID NO: 675 - DNA, 25 bp, Artificial sequence
  Single strand DNA oligonucleotide
gccgtggagatatagggggaagaga

SEQ ID NO: 676 - DNA, 26 bp, Artificial sequence
  Single strand DNA oligonucleotide
ggcgatgagaggaatggaagtgattg

SEQ ID NO: 677 - DNA, 22 bp, Artificial sequence
  Single strand DNA oligonucleotide
cgctaggatacgagtcgaggct

SEQ ID NO: 678 - DNA, 25 bp, Artificial sequence
  Single strand DNA oligonucleotide
tggcttagatgaccatcagcaaaca

SEQ ID NO: 679 - DNA, 22 bp, Artificial sequence
  Single strand DNA oligonucleotide
ccccgccttgcatcaagtgaat

SEQ ID NO: 680 - DNA, 21 bp, Artificial sequence
  Single strand DNA oligonucleotide
tggagaagcaggacacgtgag

SEQ ID NO: 681 - skipped

SEQ ID NO: 682 - DNA, 24 bp, Artificial sequence
  Single strand DNA oligonucleotide
aaccaacgagaccaactgcggcgg

SEQ ID NO: 683 - DNA, 24 bp, Artificial sequence
  Single strand DNA oligonucleotide
tttgctcatgggagcagcagggct

SEQ ID NO: 684 - DNA, 24 bp, Artificial sequence
  Single strand DNA oligonucleotide
acggatacttttggggcacctggc

SEQ ID NO: 685 - DNA, 23 bp, Artificial sequence
  Single strand DNA oligonucleotide
cagagggcagatatgtaggcgtg

SEQ ID NO: 686 - DNA, 21 bp, Artificial sequence
  Single strand DNA oligonucleotide
aggggccgcaaacgcaaacat

SEQ ID NO: 687 - DNA, 27 bp, Artificial sequence
  Single strand DNA oligonucleotide
ggcagtacgagtacagactacagacac

SEQ ID NO: 688 - DNA, 22 bp, Artificial sequence
  Single strand DNA oligonucleotide
atcagtcgcatgcactctcgga

SEQ ID NO: 689 - DNA, 23 bp, Artificial sequence
  Single strand DNA oligonucleotide
gccagaaggggtcacggatactt

SEQ ID NO: 690 - DNA, 24 bp, Artificial sequence
  Single strand DNA oligonucleotide
gacacaacgacgagctgggacagg

SEQ ID NO: 691 - DNA, 22 bp, Artificial sequence
  Single strand DNA oligonucleotide
cgaggacctcaagaagaccgac

SEQ ID NO: 692 - DNA, 21 bp, Artificial sequence
  Single strand DNA oligonucleotide
gcggtgtgttttgcagagcgg

SEQ ID NO: 693 - DNA, 23 bp, Artificial sequence
  Single strand DNA oligonucleotide
cggcagatttgatgtagagggca

SEQ ID NO: 694 - DNA, 26 bp, Artificial sequence
  Single strand DNA oligonucleotide
gctacgagtacagactacagacacca

SEQ ID NO: 695 - DNA, 22 bp, Artificial sequence
  Single strand DNA oligonucleotide
gcggcaagctagagcgacccat

SEQ ID NO: 696 - DNA, 24 bp, Artificial sequence
  Single strand DNA oligonucleotide
cgctcgtcagaaggggtcacggat

SEQ ID NO: 697 - DNA, 25 bp, Artificial sequence
  Single strand DNA oligonucleotide
cgagatggcgagaatgacagatgac

SEQ ID NO: 698 - DNA, 18 bp, Artificial sequence
  Single strand DNA oligonucleotide
aggccggctgcactgaga

SEQ ID NO: 699 - DNA, 22 bp, Artificial sequence
  Single strand DNA oligonucleotide
ccgaagaccggcaagaccacaa

SEQ ID NO: 700 - DNA, 18 bp, Artificial sequence
  Single strand DNA oligonucleotide
ctgcctaagcctggcgca

SEQ ID NO: 701 - DNA, 26 bp, Artificial sequence
  Single strand DNA oligonucleotide
tggcaaagctgaaggtacgaaagaat

SEQ ID NO: 702 - DNA, 23 bp, Artificial sequence
  Single strand DNA oligonucleotide
gcaggaagggacatgcagaggag

SEQ ID NO: 703 - DNA, 25 bp, Artificial sequence
  Single strand DNA oligonucleotide
ggcaggatgctgactcaatgtgatt

SEQ ID NO: 704 - DNA, 24 bp, Artificial sequence
  Single strand DNA oligonucleotide
ggcatttggaatcgtcttaggcct

SEQ ID NO: 705 - DNA, 24 bp, Artificial sequence
  Single strand DNA oligonucleotide
gccaaggacggcaaaaagaaggaa

SEQ ID NO: 706 - DNA, 22 bp, Artificial sequence
  Single strand DNA oligonucleotide
ccagatcccactctcgtcacca

SEQ ID NO: 707 - DNA, 23 bp, Artificial sequence
  Single strand DNA oligonucleotide
gccatatcccactctcgtcacca

SEQ ID NO: 708 - DNA, 21 bp, Artificial sequence
  Single strand DNA oligonucleotide
tcaccagcgctgcactcaatt

SEQ ID NO: 709 - DNA, 22 bp, Artificial sequence
  Single strand DNA oligonucleotide
ctggaaggggcatgcagattct

SEQ ID NO: 710 - DNA, 27 bp, Artificial sequence
  Single strand DNA oligonucleotide
tttggctggatttggatagaagggtac

SEQ ID NO: 711 - DNA, 21 bp, Artificial sequence
  Single strand DNA oligonucleotide
tggcagggtcatgcagaggag

SEQ ID NO: 712 - DNA, 24 bp, Artificial sequence
  Single strand DNA oligonucleotide
gcaggatcctgacgcaatgtgatt

SEQ ID NO: 713 - DNA, 24 bp, Artificial sequence
  Single strand DNA oligonucleotide
aagaaaagttggctgtggggagaa

SEQ ID NO: 714 - DNA, 24 bp, Artificial sequence
  Single strand DNA oligonucleotide
actgggtggaacggacgacgacaa

SEQ ID NO: 715 - DNA, 24 bp, Artificial sequence
  Single strand DNA oligonucleotide
aggagacctggaggagacgctgga

SEQ ID NO: 716 - DNA, 24 bp, Artificial sequence
  Single strand DNA oligonucleotide
gcaggagcaggatgtggacgacgg

SEQ ID NO: 717 - DNA, 24 bp, Artificial sequence
  Single strand DNA oligonucleotide
ggacgacagcgacggcgagaacaa

SEQ ID NO: 718 - DNA, 24 bp, Artificial sequence
  Single strand DNA oligonucleotide
ggcacgaataagcggaccgggctc

SEQ ID NO: 719 - DNA, 26 bp, Artificial sequence
  Single strand DNA oligonucleotide
gcctaaatttagaggacgaggacgtc

SEQ ID NO: 720 - DNA, 24 bp, Artificial sequence
  Single strand DNA oligonucleotide
ctccttttggctctaaggcccggc

SEQ ID NO: 721 - DNA, 24 bp, Artificial sequence
  Single strand DNA oligonucleotide
acagtcaagacatgcggaggacat

SEQ ID NO: 722 - DNA, 22 bp, Artificial sequence
  Single strand DNA oligonucleotide
acgacgaggacgagaggcgcca

SEQ ID NO: 723 - DNA, 22 bp, Artificial sequence
  Single strand DNA oligonucleotide
acgacgacgaggagcacgagta

SEQ ID NO: 724 - DNA, 24 bp, Artificial sequence
  Single strand DNA oligonucleotide
acagtacatcggcaaacaggggcg

SEQ ID NO: 725 - DNA, 26 bp, Artificial sequence
  Single strand DNA oligonucleotide
gcaaataatatggaccgggctagcat

SEQ ID NO: 726 - DNA, 22 bp, Artificial sequence
  Single strand DNA oligonucleotide
gacgacgaggagcacgagtaga

SEQ ID NO: 727 - DNA, 25 bp, Artificial sequence
  Single strand DNA oligonucleotide
cctggacactgttgtagaaggagga

SEQ ID NO: 728 - DNA, 23 bp, Artificial sequence
  Single strand DNA oligonucleotide
cgacaaaggacgaggtcaaggac

SEQ ID NO: 729 - DNA, 24 bp, Artificial sequence
  Single strand DNA oligonucleotide
ggcgacgacgaggatagaagtgac

SEQ ID NO: 730 - DNA, 24 bp, Artificial sequence
  Single strand DNA oligonucleotide
ggccgtaggaggactagaggagac

SEQ ID NO: 731 - DNA, 24 bp, Artificial sequence
  Single strand DNA oligonucleotide
gtttagaggacgctgctggaggac

SEQ ID NO: 732 - DNA, 24 bp, Artificial sequence
  Single strand DNA oligonucleotide
ggggacaagggacacagtatgagg

SEQ ID NO: 733 - DNA, 21 bp, Artificial sequence
  Single strand DNA oligonucleotide
ggtacgtgctgtggaggacgg

SEQ ID NO: 734 - DNA, 24 bp, Artificial sequence
  Single strand DNA oligonucleotide
ggaggacgggcagaacacggtgca

SEQ ID NO: 735 - DNA, 21 bp, Artificial sequence
  Single strand DNA oligonucleotide
gtacgtgctgtggaggacggc

SEQ ID NO: 736 - DNA, 26 bp, Artificial sequence
  Single strand DNA oligonucleotide
gctatgaaaaaccaggggacagactc

SEQ ID NO: 737 - DNA, 24 bp, Artificial sequence
  Single strand DNA oligonucleotide
gctgaccagaagacgaaggagatc

SEQ ID NO: 738 - DNA, 22 bp, Artificial sequence
  Single strand DNA oligonucleotide
acgtgctacgacgaggacgaga

SEQ ID NO: 739 - DNA, 20 bp, Artificial sequence
  Single strand DNA oligonucleotide
gcaatccggcagatagcgcg

SEQ ID NO: 740 - DNA, 24 bp, Artificial sequence
  Single strand DNA oligonucleotide
agcatcacgcaagcagggaggaca

SEQ ID NO: 741 - DNA, 20 bp, Artificial sequence
  Single strand DNA oligonucleotide
gcagcattgcgacggtcctt

SEQ ID NO: 742 - DNA, 21 bp, Artificial sequence
  Single strand DNA oligonucleotide
agctgacgagcgggagtccct

SEQ ID NO: 743 - DNA, 27 bp, Artificial sequence
  Single strand DNA oligonucleotide
ggcatactgttatgagatggaggacga

SEQ ID NO: 744 - DNA, 24 bp, Artificial sequence
  Single strand DNA oligonucleotide
gccaaactgggagtagaggacgac

SEQ ID NO: 745 - DNA, 20 bp, Artificial sequence
  Single strand DNA oligonucleotide
caaagcgttgcgacggtcct

SEQ ID NO: 746 - DNA, 24 bp, Artificial sequence
  Single strand DNA oligonucleotide
tggccaacctactcagaactggta

SEQ ID NO: 747 - DNA, 23 bp, Artificial sequence
  Single strand DNA oligonucleotide
tggcccggaggagaagaaactta

SEQ ID NO: 748 - DNA, 21 bp, Artificial sequence
  Single strand DNA oligonucleotide
ccgccgcccgaattgtattct

SEQ ID NO: 749 - DNA, 20 bp, Artificial sequence
  Single strand DNA oligonucleotide
cgtcgtctgcgcggacggta

SEQ ID NO: 750 - DNA, 20 bp, Artificial sequence
  Single strand DNA oligonucleotide
gcctcaacgagtcgggttgt

SEQ ID NO: 751 - DNA, 22 bp, Artificial sequence
  Single strand DNA oligonucleotide
ctcgcgttgactatgtccctgc

SEQ ID NO: 752 - DNA, 19 bp, Artificial sequence
  Single strand DNA oligonucleotide
ctgtccacgcccggtcgta

SEQ ID NO: 753 - DNA, 24 bp, Artificial sequence
  Single strand DNA oligonucleotide
gaacgacgcaacgacgaacgacga

SEQ ID NO: 754 - DNA, 19 bp, Artificial sequence
  Single strand DNA oligonucleotide
gatccggatcgcacggcct

SEQ ID NO: 755 - DNA, 20 bp, Artificial sequence
  Single strand DNA oligonucleotide
gcacgcctgtcgggaaccga

SEQ ID NO: 756 - DNA, 20 bp, Artificial sequence
  Single strand DNA oligonucleotide
gcacgcctgtcgggacctga

SEQ ID NO: 757 - DNA, 21 bp, Artificial sequence
  Single strand DNA oligonucleotide
gcatgaggcagggactgcatt

SEQ ID NO: 758 - DNA, 20 bp, Artificial sequence
  Single strand DNA oligonucleotide
cgcattgcgacggtcctcta

SEQ ID NO: 759 - DNA, 22 bp, Artificial sequence
  Single strand DNA oligonucleotide
gcgccgcccgaattatagtctg

SEQ ID NO: 760 - DNA, 21 bp, Artificial sequence
  Single strand DNA oligonucleotide
gctcgccttgactacgtccct

SEQ ID NO: 761 - DNA, 25 bp, Artificial sequence
  Single strand DNA oligonucleotide
gcttaacggcccgccaaccttggaa

SEQ ID NO: 762 - DNA, 25 bp, Artificial sequence
  Single strand DNA oligonucleotide
gcttaacggcccgccaactttggaa

SEQ ID NO: 763 - DNA, 22 bp, Artificial sequence
  Single strand DNA oligonucleotide
ggccaagaactcgctggagaac

SEQ ID NO: 764 - DNA, 24 bp, Artificial sequence
  Single strand DNA oligonucleotide
ggtggagacagacagaggacgact

SEQ ID NO: 765 - DNA, 27 bp, Artificial sequence
  Single strand DNA oligonucleotide
tcatttggctcaaacttgggtataggg

SEQ ID NO: 766 - DNA, 20 bp, Artificial sequence
  Single strand DNA oligonucleotide
tccgtccacgcccgttcgta

SEQ ID NO: 767 - DNA, 29 bp, Artificial sequence
  Single strand DNA oligonucleotide
atttggctctagacttagatgaaggaggt

SEQ ID NO: 768 - DNA, 25 bp, Artificial sequence
  Single strand DNA oligonucleotide
ggctgaagaagaaggatgagccaaa

SEQ ID NO: 769 - DNA, 24 bp, Artificial sequence
  Single strand DNA oligonucleotide
gctgacgaggagtgagagaaggat

SEQ ID NO: 770 - DNA, 21 bp, Artificial sequence
  Single strand DNA oligonucleotide
ggctgccacgatccactgaaa

SEQ ID NO: 771 - DNA, 25 bp, Artificial sequence
  Single strand DNA oligonucleotide
ggctgtacgatgatcagaaggaggt

SEQ ID NO: 772 - DNA, 21 bp, Artificial sequence
  Single strand DNA oligonucleotide
ttgaaaatccggaggcccgaa

SEQ ID NO: 773 - DNA, 25 bp, Artificial sequence
  Single strand DNA oligonucleotide
gcttgaggttgactctagtccgact

SEQ ID NO: 774 - DNA, 26 bp, Artificial sequence
  Single strand DNA oligonucleotide
tggcaaagaaagtagatgaggaagcc

SEQ ID NO: 775 - DNA, 22 bp, Artificial sequence
  Single strand DNA oligonucleotide
cactctggtggaggctcgaaaa

SEQ ID NO: 776 - DNA, 24 bp, Artificial sequence
  Single strand DNA oligonucleotide
gcaggagggtcagaaagaggatga

SEQ ID NO: 777 - DNA, 24 bp, Artificial sequence
  Single strand DNA oligonucleotide
gcaggatctgaaggaggacaggat

SEQ ID NO: 778 - DNA, 22 bp, Artificial sequence
  Single strand DNA oligonucleotide
aggatgctgacgcaatgtgctt

SEQ ID NO: 779 - DNA, 22 bp, Artificial sequence
  Single strand DNA oligonucleotide
caagtggagaaggtggaccagg

SEQ ID NO: 780 - DNA, 25 bp, Artificial sequence
  Single strand DNA oligonucleotide
ggccctaaatttagaggacgaggac

SEQ ID NO: 781 - DNA, 21 bp, Artificial sequence
  Single strand DNA oligonucleotide
ggcggactgggaacacatggg

SEQ ID NO: 782 - DNA, 22 bp, Artificial sequence
  Single strand DNA oligonucleotide
gggagacgacgacctagaccac

SEQ ID NO: 783 - DNA, 21 bp, Artificial sequence
  Single strand DNA oligonucleotide
gtccacgcccggtcgtactca

SEQ ID NO: 784 - DNA, 22 bp, Artificial sequence
  Single strand DNA oligonucleotide
tcgtggtcgaggccgaggacgt

SEQ ID NO: 785 - DNA, 22 bp, Artificial sequence
  Single strand DNA oligonucleotide
tgacaagggcgacaacaaggac

SEQ ID NO: 786 - DNA, 23 bp, Artificial sequence
  Single strand DNA oligonucleotide
ttccgtggttcggaagcggggca

SEQ ID NO: 787 - DNA, 25 bp, Artificial sequence
  Single strand DNA oligonucleotide
tggctttgtaggagaaggagatggt

SEQ ID NO: 788 - DNA, 23 bp, Artificial sequence
  Single strand DNA oligonucleotide
gcaaagcattacgacggtcctcg

SEQ ID NO: 789 - DNA, 22 bp, Artificial sequence
  Single strand DNA oligonucleotide
caaagcatagcgacggtcctcg

SEQ ID NO: 790 - DNA, 22 bp, Artificial sequence
  Single strand DNA oligonucleotide
tggattcgttgcgggacgagac

SEQ ID NO: 791 - DNA, 19 bp, Artificial sequence
  Single strand DNA oligonucleotide
aacctggcagatagcgcga

SEQ ID NO: 792 - DNA, 24 bp, Artificial sequence
  Single strand DNA oligonucleotide
tggccaaccgacttagaactggta

SEQ ID NO: 793 - DNA, 23 bp, Artificial sequence
  Single strand DNA oligonucleotide
ccgcacataacagagaaggacga

SEQ ID NO: 794 - DNA, 22 bp, Artificial sequence
  Single strand DNA oligonucleotide
cgccgcccaaattgtagtctgg

SEQ ID NO: 795 - DNA, 20 bp, Artificial sequence
  Single strand DNA oligonucleotide
cgtcgtcagcgcggacggta

SEQ ID NO: 796 - DNA, 20 bp, Artificial sequence
  Single strand DNA oligonucleotide
cgtcgtcggcgcagacggta

SEQ ID NO: 797 - DNA, 20 bp, Artificial sequence
  Single strand DNA oligonucleotide
cgtcgtcggtgcggacggta

SEQ ID NO: 798 - DNA, 22 bp, Artificial sequence
  Single strand DNA oligonucleotide
cgtgctacgacgaggacgagag

SEQ ID NO: 799 - DNA, 22 bp, Artificial sequence
  Single strand DNA oligonucleotide
gacgtgctacgacgaggacgag

SEQ ID NO: 800 - DNA, 20 bp, Artificial sequence
  Single strand DNA oligonucleotide
ggcggaatgctcgagttgct

SEQ ID NO: 801 - DNA, 23 bp, Artificial sequence
  Single strand DNA oligonucleotide
ggcttgaaaatccagaggaccga

SEQ ID NO: 802 - DNA, 22 bp, Artificial sequence
  Single strand DNA oligonucleotide
ttgtcaggtgtggagtttggct

SEQ ID NO: 803 - DNA, 19 bp, Artificial sequence
  Single strand DNA oligonucleotide
ttttgctccaaggcccggc

SEQ ID NO: 804 - DNA, 51 bp, Artificial sequence
  Single strand DNA oligonucleotide
gtcgtatccagtgcagggtccgaggtattcgcactggatacgacatcctat

SEQ ID NO: 805 - DNA, 21 bp, Artificial sequence
  Single strand DNA oligonucleotide
gctcccgcacttgtagcttcg

SEQ ID NO: 806 - DNA, 50 bp, Artificial sequence
  Single strand DNA oligonucleotide
gtcgtatccagtgcagggtccgaggtattcgcactggatacgactgcctc

SEQ ID NO: 807 - DNA, 20 bp, Artificial sequence
  Single strand DNA oligonucleotide
ttcccacaaacatcaccggc

SEQ ID NO: 808 - DNA, 50 bp, Artificial sequence
  Single strand DNA oligonucleotide
gtcgtatccagtgcagggtccgaggtattcgcactggatacgactgcccc

SEQ ID NO: 809 - DNA, 21 bp, Artificial sequence
  Single strand DNA oligonucleotide
cggcggcggcagctattagac

SEQ ID NO: 810 - DNA, 50 bp, Artificial sequence
  Single strand DNA oligonucleotide
gtcgtatccagtgcagggtccgaggtattcgcactggatacgacatcccg

SEQ ID NO: 811 - DNA, 21 bp, Artificial sequence
  Single strand DNA oligonucleotide
ccgggtccgtaagggcataat

SEQ ID NO: 812 - DNA, 50 bp, Artificial sequence
  Single strand DNA oligonucleotide
gtcgtatccagtgcagggtccgaggtattcgcactggatacgacctaccg

SEQ ID NO: 813 - DNA, 20 bp, Artificial sequence
  Single strand DNA oligonucleotide
cggcgatgtgggcaaaagga

SEQ ID NO: 814 - DNA, 50 bp, Artificial sequence
  Single strand DNA oligonucleotide
gtcgtatccagtgcagggtccgaggtattcgcactggatacgaccacttg

SEQ ID NO: 815 - DNA, 19 bp, Artificial sequence
  Single strand DNA oligonucleotide
cgcgcaggaactggggcat

SEQ ID NO: 816 - DNA, 50 bp, Artificial sequence
  Single strand DNA oligonucleotide
gtcgtatccagtgcagggtccgaggtattcgcactggatacgacttgctc

SEQ ID NO: 817 - DNA, 22 bp, Artificial sequence
  Single strand DNA oligonucleotide
cggcggaaaaagggggagaaat

SEQ ID NO: 818 - DNA, 50 bp, Artificial sequence
  Single strand DNA oligonucleotide
gtcgtatccagtgcagggtccgaggtattcgcactggatacgaccaccgc

SEQ ID NO: 819 - DNA, 21 bp, Artificial sequence
  Single strand DNA oligonucleotide
cggcggaacatgggctagtcg

SEQ ID NO: 820 - DNA, 50 bp, Artificial sequence
  Single strand DNA oligonucleotide
gtcgtatccagtgcagggtccgaggtattcgcactggatacgacaagctt

SEQ ID NO: 821 - DNA, 22 bp, Artificial sequence
  Single strand DNA oligonucleotide
cggcggaataggagtcaaggag

SEQ ID NO: 822 - DNA, 24 bp, Artificial sequence
  Single strand DNA oligonucleotide
tcgcactggatacgacaagcttct

SEQ ID NO: 823 - DNA, 50 bp, Artificial sequence
  Single strand DNA oligonucleotide
gtcgtatccagtgcagggtccgaggtattcgcactggatacgactccccc

SEQ ID NO: 824 - DNA, 21 bp, Artificial sequence
  Single strand DNA oligonucleotide
cggcggagatgggctgactat

SEQ ID NO: 825 - DNA, 50 bp, Artificial sequence
  Single strand DNA oligonucleotide
gtcgtatccagtgcagggtccgaggtattcgcactggatacgaccacgcc

SEQ ID NO: 826 - DNA, 22 bp, Artificial sequence
  Single strand DNA oligonucleotide
cggcggagagggcagatatgta

SEQ ID NO: 827 - DNA, 50 bp, Artificial sequence
  Single strand DNA oligonucleotide
gtcgtatccagtgcagggtccgaggtattcgcactggatacgactccgag

SEQ ID NO: 828 - DNA, 20 bp, Artificial sequence
  Single strand DNA oligonucleotide
ccggatcagtcgcatgcact

SEQ ID NO: 829 - DNA, 50 bp, Artificial sequence
  Single strand DNA oligonucleotide
gtcgtatccagtgcagggtccgaggtattcgcactggatacgactggtgt

SEQ ID NO: 830 - DNA, 24 bp, Artificial sequence
  Single strand DNA oligonucleotide
cggcggtacgagtacagactacag

SEQ ID NO: 831 - DNA, 19 bp, Artificial sequence
  Single strand DNA oligonucleotide
ctcgcgaagaccggcaaga

SEQ ID NO: 832 - DNA, 50 bp, Artificial sequence
  Single strand DNA oligonucleotide
gtcgtatccagtgcagggtccgaggtattcgcactggatacgacttgtgg

SEQ ID NO: 833 - DNA, 50 bp, Artificial sequence
  Single strand DNA oligonucleotide
gtcgtatccagtgcagggtccgaggtattcgcactggatacgacattctt

SEQ ID NO: 834 - DNA, 22 bp, Artificial sequence
  Single strand DNA oligonucleotide
cggcggaaagctgaaggtacga

SEQ ID NO: 835 - DNA, 51 bp, Artificial sequence
  Single strand DNA oligonucleotide
gtcgtatccagtgcagggtccgaggtattcgcactggatacgacctcctct

SEQ ID NO: 836 - DNA, 18 bp, Artificial sequence
  Single strand DNA oligonucleotide
gccgaggaagggacatgc

SEQ ID NO: 837 - DNA, 51 bp, Artificial sequence
  Single strand DNA oligonucleotide
gtcgtatccagtgcagggtccgaggtattcgcactggatacgacagaatct

SEQ ID NO: 838 - DNA, 18 bp, Artificial sequence
  Single strand DNA oligonucleotide
ccgttggaaggggcatgc

SEQ ID NO: 839 - DNA, 50 bp, Artificial sequence
  Single strand DNA oligonucleotide
gtcgtatccagtgcagggtccgaggtattcgcactggatacgacgtaccc

SEQ ID NO: 840 - DNA, 21 bp, Artificial sequence
  Single strand DNA oligonucleotide
cggcggtggatttggatagaa

SEQ ID NO: 841 - DNA, 18 bp, Artificial sequence
  Single strand DNA oligonucleotide
ttcctggcagggtcatgc

SEQ ID NO: 842 - DNA, 51 bp, Artificial sequence; identical to SEQ ID NO: 835
  Single strand DNA oligonucleotide

SEQ ID NO: 843 - DNA, 50 bp, Artificial sequence
  Single strand DNA oligonucleotide
gtcgtatccagtgcagggtccgaggtattcgcactggatacgacaatcac

SEQ ID NO: 844 - DNA, 20 bp, Artificial sequence
  Single strand DNA oligonucleotide
cggcaggatcctgacgcaat

SEQ ID NO: 845 - DNA, 50 bp, Artificial sequence
  Single strand DNA oligonucleotide
gtcgtatccagtgcagggtccgaggtattcgcactggatacgacgacgtc

SEQ ID NO: 846 - DNA, 24 bp, Artificial sequence
  Single strand DNA oligonucleotide
cggcggctaaatttagaggacgag

SEQ ID NO: 847 - DNA, 51 bp, Artificial sequence
  Single strand DNA oligonucleotide
gtcgtatccagtgcagggtccgaggtattcgcactggatacgacgccgggc

SEQ ID NO: 848 - DNA, 23 bp, Artificial sequence
  Single strand DNA oligonucleotide
ccttccctccttttggctctaag

SEQ ID NO: 849 - DNA, 50 bp, Artificial sequence
  Single strand DNA oligonucleotide
gtcgtatccagtgcagggtccgaggtattcgcactggatacgactggcgc

SEQ ID NO: 850 - DNA, 20 bp, Artificial sequence
  Single strand DNA oligonucleotide
cggcacgacgaggacgagag

SEQ ID NO: 851 - DNA, 50 bp, Artificial sequence
  Single strand DNA oligonucleotide
gtcgtatccagtgcagggtccgaggtattcgcactggatacgacgtcctt

SEQ ID NO: 852 - DNA, 20 bp, Artificial sequence
  Single strand DNA oligonucleotide
cggcgacaaaggacgaggtc

SEQ ID NO: 853 - DNA, 50 bp, Artificial sequence
  Single strand DNA oligonucleotide
gtcgtatccagtgcagggtccgaggtattcgcactggatacgacaaggac

SEQ ID NO: 854 - DNA, 17 bp, Artificial sequence
  Single strand DNA oligonucleotide
cggccagcattgcgacg

SEQ ID NO: 855 - DNA, 50 bp, Artificial sequence
  Single strand DNA oligonucleotide
gtcgtatccagtgcagggtccgaggtattcgcactggatacgacaatgca

SEQ ID NO: 856 - DNA, 19 bp, Artificial sequence
  Single strand DNA oligonucleotide
cgtcgcatgaggcagggac

SEQ ID NO: 857 - DNA, 50 bp, Artificial sequence
  Single strand DNA oligonucleotide
gtcgtatccagtgcagggtccgaggtattcgcactggatacgaccagact

SEQ ID NO: 858 - DNA, 18 bp, Artificial sequence
  Single strand DNA oligonucleotide
tcccgccgcccgaattat

SEQ ID NO: 859 - DNA, 50 bp, Artificial sequence
  Single strand DNA oligonucleotide
gtcgtatccagtgcagggtccgaggtattcgcactggatacgacagggac

SEQ ID NO: 860 - DNA, 20 bp, Artificial sequence
  Single strand DNA oligonucleotide
cccgggctcgccttgactac

SEQ ID NO: 861 - DNA, 50 bp, Artificial sequence
  Single strand DNA oligonucleotide
gtcgtatccagtgcagggtccgaggtattcgcactggatacgacgttctc

SEQ ID NO: 862 - DNA, 20 bp, Artificial sequence
  Single strand DNA oligonucleotide
cgtcggccaagaactcgctg

SEQ ID NO: 863 - DNA, 24 bp, Artificial sequence
  Single strand DNA oligonucleotide
tcgcactggatacgacgttctcca

SEQ ID NO: 864 - DNA, 22 bp, Artificial sequence
  Single strand DNA oligonucleotide
cggcggaggagggtcagaaaga

SEQ ID NO: 865 - DNA, 50 bp, Artificial sequence
  Single strand DNA oligonucleotide
gtcgtatccagtgcagggtccgaggtattcgcactggatacgactcatcc

SEQ ID NO: 866 - DNA, 50 bp, Artificial sequence
  Single strand DNA oligonucleotide
gtcgtatccagtgcagggtccgaggtattcgcactggatacgaccccatg

SEQ ID NO: 867 - DNA, 19 bp, Artificial sequence
  Single strand DNA oligonucleotide
cgtcggcggactgggaaca

SEQ ID NO: 868 - DNA, 50 bp, Artificial sequence
  Single strand DNA oligonucleotide
gtcgtatccagtgcagggtccgaggtattcgcactggatacgacacgtcc

SEQ ID NO: 869 - DNA, 18 bp, Artificial sequence
  Single strand DNA oligonucleotide
cgtcgtggtcgaggccga

SEQ ID NO: 870 - DNA, 50 bp, Artificial sequence
  Single strand DNA oligonucleotide
gtcgtatccagtgcagggtccgaggtattcgcactggatacgacgtctcg

SEQ ID NO: 871 - DNA, 20 bp, Artificial sequence
  Single strand DNA oligonucleotide
cgtctggattcgttgcggga

SEQ ID NO: 872 - DNA, 50 bp, Artificial sequence
  Single strand DNA oligonucleotide
gtcgtatccagtgcagggtccgaggtattcgcactggatacgacccagac

SEQ ID NO: 873 - DNA, 20 bp, Artificial sequence
  Single strand DNA oligonucleotide
cgtccgccgcccaaattgta

SEQ ID NO: 874 - protein, 480 aa, Zea mays
MMAGRAHGHRNRLRRLIPRLLLLLVAVYAASFAIYLLLQSHSHHQSPPDPTPRTEARDGVLAPSSSQKPWPRLPSFLPWVSGGWFRCHHSETLGSSICEGARVRLDPALIAMSRGGEPLEQVMGRAEEEELPKYEPGALQVEGPAAGMPVPLVDAGFLNDYVPTGGIGMHTMRALLESTRVVPPGELHCSQWVEEPTLLVTRFEYANLFHTITDWYSAYVSSRVTNLPNRPNVVFLDGHCKAQLEETWEALFSSVTYAKNFTVPVCFRHAILSPLGYETAMFKGLSESFSCEGASVDSLREKPDYEKTARLSEFGEMIVASFDLLQDDIMSSKKSNGLNVLFVRREDYLAHPRHSGKVESRLSNEQEVYDAIDKWAQGLKCKVNVVNGLFAHMTMKEQLRAILEASVVIGAHGAGLTHLVSATPDTKVLEIISSMYRRPHFALISHWKSLEYHAINLPGSFARVTDVINELRKILEGLGC

SEQ ID NO: 875 - DNA, 1906 bp, Zea mays
gtgtccctcgcggcgacacccctcgatctgcgcgagagtgcgagaccacagcggctcgccggcggcgatgatggctggcagagctcatggccacagaaaccgcctccgccgcctcatcccgcggctcctcctcctcctcgtcgccgtctacgccgcctccttcgcgatctacctcctcctccagtcccattcccaccaccagtcgccgccggaccccacccccaggactgaagcccgtgacggtgtcctggcgccgtcgtcctcgcagaagccgtggccgcgcctcccctccttcctgccctgggtgtccggcggctggttccggtgccaccacagcgagacgctgggaagctcgatctgcgagggcgccagggttcggcttgacccggcgctcatcgcgatgtcgcgcggcggggagccgctggagcaggtgatgggccgcgccgaggaggaggagctacccaagtacgagcccggcgcgctgcaggtggaggggccggcggcgggtatgccggtgcccctggtggacgcagggttcctcaacgactacgtacccaccggcgggatcgggatgcacactatgagggcgctgctcgagtcgacgcgcgttgtgccacccggtgagctgcactgctcccagtgggttgaagaaccgacacttctggtcactcgtttcgaatatgcgaaccttttccacacaattacggactggtacagtgcatatgttagttccagagtcacgaatttaccaaaccgtcctaatgttgtattcttggatggccattgcaaggcacaattagaggaaacatgggaagcacttttctcaagtgtgacatatgctaagaacttcactgttcctgtttgtttccgacatgccattctttcaccattgggctatgagactgccatgtttaagggtcttagcgagagcttcagctgtgaaggtgcctccgtagattcactccgagaaaaaccagactatgaaaaaactgcacggttatctgaattcggggaaatgattgtagcttcttttgatcttctgcaggatgacatcatgtcatccaaaaaatcgaatggactcaatgttctctttgttcgacgagaagactacctggcccacccgcgccacagtggtaaggttgaatcgagactaagcaatgagcaggaggtgtatgatgcaattgacaagtgggcacaaggcctgaaatgcaaagtgaatgtcgtgaacggtctttttgcccacatgaccatgaaggagcaactccgtgctatcctggaagcttcagtggtaataggggctcatggggctggtctaacacacttggtttcagcaactcctgatacaaaggttcttgagattatcagcagcatgtaccggcgcccacattttgcacttatctcacactggaagtctttagagtaccatgccataaatctccctggatcatttgcaagggtcacagatgtcatcaacgagttgagaaaaatactggaaggtctcggatgctgaaacagaaatactcttcaaggccaccacaggccatgtagaatggacatcgtgtctacttcatcacccatacttggtcacaccagttgcaaggggtcatatggattttaattcgaagacattttcacaggctattcaacattgtgccaagaaaccaatcattctcattttccagcaaagaattttattatgctgccaaatacagaaagtcaagaaagcaatcctctgtttggtttatgtcagcaaatgataacacgtaatccagagctttaggttgtccacccttattcttggacatgattttaggaccagaattttgacaaaactgtattctttgttggattatagattagtataccttttgtgtgttacatgttgatcaaaaaaaaaaaaaaaaaa

SEQ ID NO: 876 - DNA, 1440 bp, Zea mays
atgatggctggcagagctcatggccacagaaaccgcctccgccgcctcatcccgcggctcctcctcctcctcgtcgccgtctacgccgcctccttcgcgatctacctcctcctccagtcccattcccaccaccagtcgccgccggaccccacccccaggactgaagcccgtgacggtgtcctggcgccgtcgtcctcgcagaagccgtggccgcgcctcccctccttcctgccctgggtgtccggcggctggttccggtgccaccacagcgagacgctgggaagctcgatctgcgagggcgccagggttcggcttgacccggcgctcatcgcgatgtcgcgcggcggggagccgctggagcaggtgatgggccgcgccgaggaggaggagctacccaagtacgagcccggcgcgctgcaggtggaggggccggcggcgggtatgccggtgcccctggtggacgcagggttcctcaacgactacgtacccaccggcgggatcgggatgcacactatgagggcgctgctcgagtcgacgcgcgttgtgccacccggtgagctgcactgctcccagtgggttgaagaaccgacacttctggtcactcgtttcgaatatgcgaaccttttccacacaattacggactggtacagtgcatatgttagttccagagtcacgaatttaccaaaccgtcctaatgttgtattcttggatggccattgcaaggcacaattagaggaaacatgggaagcacttttctcaagtgtgacatatgctaagaacttcactgttcctgtttgtttccgacatgccattctttcaccattgggctatgagactgccatgtttaagggtcttagcgagagcttcagctgtgaaggtgcctccgtagattcactccgagaaaaaccagactatgaaaaaactgcacggttatctgaattcggggaaatgattgtagcttcttttgatcttctgcaggatgacatcatgtcatccaaaaaatcgaatggactcaatgttctctttgttcgacgagaagactacctggcccacccgcgccacagtggtaaggttgaatcgagactaagcaatgagcaggaggtgtatgatgcaattgacaagtgggcacaaggcctgaaatgcaaagtgaatgtcgtgaacggtctttttgcccacatgaccatgaaggagcaactccgtgctatcctggaagcttcagtggtaataggggctcatggggctggtctaacacacttggtttcagcaactcctgatacaaaggttcttgagattatcagcagcatgtaccggcgcccacattttgcacttatctcacactggaagtctttagagtaccatgccataaatctccctggatcatttgcaagggtcacagatgtcatcaacgagttgagaaaaatactggaaggtctcggatgc

SEQ ID NO: 877 - DNA, 1440 bp, Artificial sequence
  Mir resistant mutated nucleotide sequence
atgatggctggcagagctcatggccacagaaaccgcctccgccgcctcatcccgcggctcctcctcctcctcgtcgccgtctacgccgcctccttcgcgatctacctcctcctccagtcccattcccaccaccagtcgccgccggaccccacccccaggactgaagcccgtgacggtgtcctggcgccgtcgtcctcgcagaagccgtggccgcgcctcccctccttcctgccctgggtgtccggcggctggttccggtgccaccacagcgagacgctgggaagctcgatctgcgagggcgccagggttcggcttgacccggcgctcatcgcgatgtcgcgcggcggggagccgctggagcaggtgatgggccgcgccgaggaggaggagctacccaagtacgagcccggcgcgctgcaggtggaggggccggcggcgggtatgccggtgcccctggtggacgcagggttcctcaacgactacgtacccaccggcgggatcgggatgcacactatgagggcgctgctcgagtcgacgcgcgttgtgccacccggtgagctgcactgctcccagtgggttgaagaaccgacacttctggtcactcgtttcgaatatgcgaaccttttccacacaattacggactggtacagtgcatatgttagttccagagtcacgaatttaccaaaccgtcctaatgttgtattcttggatggccattgcaaggcacaattagaggaaacatgggaagcacttttctcaagtgtgacatatgctaagaacttcactgttcctgtttgtttccgacatgccattctttcaccattgggctatgagactgccatgtttaagggtcttagcgagagcttcagctgtgaaggtgcctccgtagattcactccgagaaaaaccagactatgaaaaaactgcacggttatctgaattcggggaaatgattgtagcttcttttgatcttctgcaggatgacatcatgtcatccaaaaaatcgaatggactcaatgttctctttgttcgacgagaagactacctggcccacccgcgccacagtggtaaggttgaatcgagactaagcaatgagcaggaggtgtatgatgcaattgacaagtgggcacaaggcctgaaatgcaaagtgaatgtcgtaaatggattattcgcacatatgaccatgaaggagcaactccgtgctatcctggaagcttcagtggtaataggggctcatggggctggtctaacacacttggtttcagcaactcctgatacaaaggttcttgagattatcagcagcatgtaccggcgcccacattttgcacttatctcacactggaagtctttagagtaccatgccataaatctccctggatcatttgcaagggtcacagatgtcatcaacgagttgagaaaaatactggaaggtctcggatgc

SEQ ID NO: 878 - DNA, 1440 bp, Artificial sequence
  Mir resistant mutated nucleotide sequence
atgatggctggcagagctcatggccacagaaaccgcctccgccgcctcatcccgcggctcctcctcctcctcgtcgccgtctacgccgcctccttcgcgatctacctcctcctccagtcccattcccaccaccagtcgccgccggaccccacccccaggactgaagcccgtgacggtgtcctggcgccgtcgtcctcgcagaagccgtggccgcgcctcccctccttcctgccctgggtgtccggcggctggttccggtgccaccacagcgagacgctgggaagctcgatctgcgagggcgccagggttcggcttgacccggcgctcatcgcgatgtcgcgcggcggggagccgctggagcaggtgatgggccgcgccgaggaggaggagctacccaagtacgagcccggcgcgctgcaggtggaggggccggcggcgggtatgccggtgcccctggtggacgcagggttcctcaacgactacgtacccaccggcgggatcgggatgcacactatgagggcgctgctcgagtcgacgcgcgttgtgccacccggtgagctgcactgctcccagtgggttgaagaaccgacacttctggtcactcgtttcgaatatgcgaaccttttccacacaattacggactggtacagtgcatatgttagttccagagtcacgaatttaccaaaccgtcctaatgttgtattcttggatggccattgcaaggcacaattagaggaaacatgggaagcacttttctcaagtgtgacatatgctaagaacttcactgttcctgtttgtttccgacatgccattctttcaccattgggctatgagactgccatgtttaagggtcttagcgagagcttcagctgtgaaggtgcctccgtagattcactccgagaaaaaccagactatgaaaaaactgcacggttatctgaattcggggaaatgattgtagcttcttttgatcttctgcaggatgacatcatgtcatccaaaaaatcgaatggactcaatgttctctttgttcgacgagaagactacctggcccacccgcgccacagtggtaaggttgaatcgagactaagcaatgagcaggaggtgtatgatgcaattgacaagtgggcacaaggcctgaaatgcaaagtgaatgtcgtgaatggattattcgcacatatgaccatgaaggagcaactccgtgctatcctggaagcttcagtggtaataggggctcatggggctggtctaacacacttggtttcagcaactcctgatacaaaggttcttgagattatcagcagcatgtaccggcgcccacattttgcacttatctcacactggaagtctttagagtaccatgccataaatctccctggatcatttgcaagggtcacagatgtcatcaacgagttgagaaaaatactggaaggtctcggatgc

SEQ ID NO: 879 - DNA, 1440 bp, Artificial sequence; identical to SEQ ID NO: 878
  Mir resistant mutated nucleotide sequence

SEQ ID NO: 880 - DNA, 1440 bp, Artificial sequence; identical to SEQ ID NO: 878
  Mir resistant mutated nucleotide sequence

SEQ ID NO: 881 - DNA, 1440 bp, Artificial sequence
  Mir resistant mutated nucleotide sequence
atgatggctggcagagctcatggccacagaaaccgcctccgccgcctcatcccgcggctcctcctcctcctcgtcgccgtctacgccgcctccttcgcgatctacctcctcctccagtcccattcccaccaccagtcgccgccggaccccacccccaggactgaagcccgtgacggtgtcctggcgccgtcgtcctcgcagaagccgtggccgcgcctcccctccttcctgccctgggtgtccggcggctggttccggtgccaccacagcgagacgctgggaagctcgatctgcgagggcgccagggttcggcttgacccggcgctcatcgcgatgtcgcgcggcggggagccgctggagcaggtgatgggccgcgccgaggaggaggagctacccaagtacgagcccggcgcgctgcaggtggaggggccggcggcgggtatgccggtgcccctggtggacgcagggttcctcaacgactacgtacccaccggcgggatcgggatgcacactatgagggcgctgctcgagtcgacgcgcgttgtgccacccggtgagctgcactgctcccagtgggttgaagaaccgacacttctggtcactcgtttcgaatatgcgaaccttttccacacaattacggactggtacagtgcatatgttagttccagagtcacgaatttaccaaaccgtcctaatgttgtattcttggatggccattgcaaggcacaattagaggaaacatgggaagcacttttctcaagtgtgacatatgctaagaacttcactgttcctgtttgtttccgacatgccattctttcaccattgggctatgagactgccatgtttaagggtcttagcgagagcttcagctgtgaaggtgcctccgtagattcactccgagaaaaaccagactatgaaaaaactgcacggttatctgaattcggggaaatgattgtagcttcttttgatcttctgcaggatgacatcatgtcatccaaaaaatcgaatggactcaatgttctctttgttcgacgagaagactacctggcccacccgcgccacagtggtaaggttgaatcgagactaagcaatgagcaggaggtgtatgatgcaattgacaagtgggcacaaggcctgaaatgcaaagtgaatgtcgtaaacggattattcgcacatatgaccatgaaggagcaactccgtgctatcctggaagcttcagtggtaataggggctcatggggctggtctaacacacttggtttcagcaactcctgatacaaaggttcttgagattatcagcagcatgtaccggcgcccacattttgcacttatctcacactggaagtctttagagtaccatgccataaatctccctggatcatttgcaagggtcacagatgtcatcaacgagttgagaaaaatactggaaggtctcggatgc

SEQ ID NO: 882 - DNA, 1440 bp, Artificial sequence; identical to SEQ ID NO: 881
  Mir resistant mutated nucleotide sequence

SEQ ID NO: 883 - DNA, 1440 bp, Artificial sequence; identical to SEQ ID NO: 881
  Mir resistant mutated nucleotide sequence

SEQ ID NO: 884 - DNA, 1440 bp, Artificial sequence
  Mir resistant mutated nucleotide sequence
atgatggctggcagagctcatggccacagaaaccgcctccgccgcctcatcccgcggctcctcctcctcctcgtcgccgtctacgccgcctccttcgcgatctacctcctcctccagtcccattcccaccaccagtcgccgccggaccccacccccaggactgaagcccgtgacggtgtcctggcgccgtcgtcctcgcagaagccgtggccgcgcctcccctccttcctgccctgggtgtccggcggctggttccggtgccaccacagcgagacgctgggaagctcgatctgcgagggcgccagggttcggcttgacccggcgctcatcgcgatgtcgcgcggcggggagccgctggagcaggtgatgggccgcgccgaggaggaggagctacccaagtacgagcccggcgcgctgcaggtggaggggccggcggcgggtatgccggtgcccctggtggacgcagggttcctcaacgactacgtacccaccggcgggatcgggatgcacactatgagggcgctgctcgagtcgacgcgcgttgtgccacccggtgagctgcactgctcccagtgggttgaagaaccgacacttctggtcactcgtttcgaatatgcgaaccttttccacacaattacggactggtacagtgcatatgttagttccagagtcacgaatttaccaaaccgtcctaatgttgtattcttggatggccattgcaaggcacaattagaggaaacatgggaagcacttttctcaagtgtgacatatgctaagaacttcactgttcctgtttgtttccgacatgccattctttcaccattgggctatgagactgccatgtttaagggtcttagcgagagcttcagctgtgaaggtgcctccgtagattcactccgagaaaaaccagactatgaaaaaactgcacggttatctgaattcggggaaatgattgtagcttcttttgatcttctgcaggatgacatcatgtcatccaaaaaatcgaatggactcaatgttctctttgttcgacgagaagactacctggcccacccgcgccacagtggtaaggttgaatcgagactaagcaatgagcaggaggtgtatgatgcaattgacaagtgggcacaaggcctgaaatgcaaagtgaatgtcgtaaatggtttattcgcacatatgaccatgaaggagcaactccgtgctatcctggaagcttcagtggtaataggggctcatggggctggtctaacacacttggtttcagcaactcctgatacaaaggttcttgagattatcagcagcatgtaccggcgcccacattttgcacttatctcacactggaagtctttagagtaccatgccataaatctccctggatcatttgcaagggtcacagatgtcatcaacgagttgagaaaaatactggaaggtctcggatgc

SEQ ID NO: 885 - DNA, 1440 bp, Artificial sequence; identical to SEQ ID NO: 884
  Mir resistant mutated nucleotide sequence

SEQ ID NO: 886 - DNA, 1440 bp, Artificial sequence; identical to SEQ ID NO: 884
  Mir resistant mutated nucleotide sequence

SEQ ID NO: 887 - DNA, 1932 bp, Sorghum bicolor
cttcaaagcgcaaacacacataagaagcagggcggagcggttgtcatcagagaatgggctcgcgtcatggcctccggcgaggcggccaagccgctgccgtcttctccgcatgtcccttcctcgccttcgccgtcctcctcgccttgccgggcctcgcagccggcgacacccattactacacgttcaacgtgcaaatgacgaacgtgacacggctgtgcgtgaccaagagcatcccgacggtgaacgggcagttcccggggccgaagctggtcgtgcgggaaggcgaccgtctcgtggtcaaggttcacaaccacatcaactacaatgtctcgttccactggcacggcgtccggcagctgcgcaacgggtgggcggacgggccggcgtacatcacgcagtgcccgatccagggcgggcagagctacgtgtacgacttcaccatcacggggcagcgcgggacgctgtggtggcacgcgcacttctcctggctgcgcgtgcacctctacggcccgctcgtcatcctccccaagcgcggcgagggctacccgttcccgcgcccctacaaggaggtgcccatcctcttcggtgaatggttcaatgcggacaccgaggccgtcatcaaccaggccctgcaaactggcggcggcccaaacgtctccgatgcctacaccttcaatgggcttccaggcccgacatataactgctcctctaaagacacgtacaagctgaaggtaaagcccgggaggacgtacatgctccggctcatcaactccgcgctcaacgacgagctcttcttcggcatcgcaaaccacacgctcaccgtcgtcgaggcggacgccaactacgtcaagccattcaccgtgaacacgctcgtcatctcgccggggcagaccatgaacgtgctcctgacgacgcctccaaacccggcctccccggcctacgccatggcgatcgcgccctacaccaacacgcagggcacgttcgacaacaccaccgcggccgccgtcctcgagtacgccccgacgacgacgacgctgccgcccttgcccctgccggccctgccgctgtacaacgacaccggcgcggtgaccaacttctcgcgcaacttccgcagcctgaacagcgcgcagtacccggcgcaagtgccggcggcggtggaccggcacctgctcttcaccgtggggctcggcacggacccgtgcccgtccaaccagacgtgccagggccccaacggcaccaagttcgcggcgtccatcaacaacaactccttcttccggccccggaccgcgctcctcgaggcgcactaccagcgccgctacgccggcgtgctcctcgccgacttccccaccaccccgccgcaccccttcaactacacggggaccccgcccaacaacacgttcgtgcagcacggcacccgggtggtgccgctcaggttcaacacctccgtggagctggtgctgcagggcaccagcatccagggcgccgagagccacccgctgcacttgcacggctacgacttcttcgtcgtcggacaggggttcggcaacttcgacccggtgaacgacccgcccaactacaacctcgccgaccccgtggagcggaacaccatcagcgtgcccaccgccggctgggtcgccgtccgcttcctcgccgacaacccgggggtgtggctgatgcattgccacttcgacgtgcacctgagctggggcctgtccatggcgtggcttgtcaacgacggcccgctgccgaatcagaagatgttgcccccgccatccgatcttccaaaatgctgatgactgatcgttcatcatccgagggggggtagatgggcatttaacaaggttttggtgcacgtctgcgtactttcttacgatgtttgaaacaatttggtctgggatatttaattgcagtgtgccgatttttggcaagtgc

SEQ ID NO: 888 - DNA, 2729 bp, Zea mays
gccgccgccgcttgccgggtctatagccatgtcaccagcggttgcctctgcctcatctggcgaccgcatacgaacctacgaagacttcgtgcgggtacacgcgtacctgctggccgcggcgggcatcccgccgtcgctgcaccagaggctgtaccgcaagctcgcggacgaggtcttcgacggcggggaggtctttgccgtcgagccgtgcgaggacgggaggcagcggcgcctcgtgctcaccgccgatcagtctctaggaaaagagtccgatgtcttcctcgtcgaccatgcgtggtccttccgcctccctgatgcgctcaagcagttgcgggaagtaccaggattggctgaaaggatggcagcattgatgtgtgtcgatttggaccgcaagattgaagaagatgagcaggatgatgacgagagtgggagcttggagcatgtatcgcaagtagtcgagaaagaaagggctagagttcaggagagaagtgattctacagcttggctggaacttgaagaacttggaattgatgatgacatgctagtagccttggatctatctgcaaattttccgaatctagtagctctgaacctatggggaaacaagctgcgggatccagagaaagttatgcaagaaatcaggaagtgcacaaagctaaaggcactttggttgaacgagaatcctgttcttggcaaaagtattgacaaagctgttctcgatggcctctctggattggaaatatacaattcacattttacaagtaaagccggagagtgggcactaggtttttgcgcagacattgttggagtagataatccctgttcttctgtggaaagcacattgtttgggagcattgggactattgacctttctgatagatgcattcacaagctaccagaggtgttctctcctagtaaattgccatctctgtcaaaattgaacgttcgtggtaatcctctggatcaaatttctggcgatgatctcttaaagctatttggtggattcactcagttacaagagttggaggttgacattcctggccctctgggaaacagtgcaatctccattcttgagtctcttcctaatttatctttgctaaatggcgtggattcctcaagcataatagagagtgggaagcatatagttgactctgcacttgaaccacggcttccagaatggtcacctgaagaaccccttgctgaaagagttattggcgcaatgtggttgtatcttatgacataccggcttgctgatgatgaaaagattgacgaaacacctgtttggtatgtcatggacgagttgggctcagccatgcgccacagtgataatgcaaacttcagaatagctccattcttgttcatgccagaagggaaactgcacactgctataagttacacaattctgtggcccactcatgatgttcatactggagaagagtgtacccgggatttcttgtttggtattggtgaggacaaacagcgttcagctaggcttacagcttggttccgcacacctgagaactactttattcaggaattcaggaggtaccaggaacagcttcaatcaaatagcatttgttcttcgacaaaaatagaagagacacagacaccctcaaccaaaagtgtacgcccaagggatggtcgcgtccttcgagtatatactgacatacctcatgtagaggagtttttaacacggccagaatttgttctcacgactgatccaaaggaagctgacatcatctgggtaagcatgcaagtagattcagaagtaaagaatgctgtagggctcacagaccaacaatacacaaaccaatttccttttgaagcttgcctggtcatgaagcaccaccttgcggagaccatccacaaggcttggggctcacctgaatggcttcaacctacatataacctggaaacccatttgtctccactcattggtgattattgtgtgaggaaacgagatggcatggacaatttatggatcatgaagccttggaacatggcgagaacaatcgataccacagttactggtgatttgtctgctatcatcagacttatggagacaggccccaagatatgccaaaaatatattgaacgccctgcacttttccaaggaaggaagtttgatcttcggtacattgttttggtccgtagtatccgccctttggaaatatttctgtctgatgttttctgggttaggttagcaaacaatcagtacactttggagaagactagcttttttgagtacgagacccatttcactgtgatgaattatatcggaaggatgaatcatatgaacacgccagagttcgtcaaggggttcgagaaggagcaccaagttaaatggctggacattcatgaaagcgtacgatctaccatacgccatatctttgaggcagccgcagctgtccatcctgagatgcagaacccattctccagggccatctacggtgtagatattatgcttgacaacagattcaaaccaaaggttttagaggtgacatactgtccagactgcgggagggcatgcaagtatgacacgcaagctctggtaggaagccaggataccatcagaggccgtgatttttttaactcggtgtttggctgcctctttcttgacgagcaaacgcatgtattgcccttataggcatccgccccagaggcggctgctgtaacatcaggttttatcataataataacgtgacatatgtataaaaaaaaaaaaaaaa

SEQ ID NO: 889 - DNA, 1345 bp, Sorghum bicolor
cgccgccgcccgtctccggtacgacggcgacgcacaggtgtcgtgcagggacctttccttcctgatacaggaaggcagggctcatgagtggcacgccagcagcaagcagtagcctacaggcagccctctcatactgcgtcaggcaagtccgcgcctatgactaccaccactacctatgccttctccacctgcctccggccatgcgcaaggcagcgttcaccttccgtgccttcaacgtcgagacagcaaaggccatggacgtcgtgtccgaccctcggactggcctcatgcgcctcctctggtggaaggacgccgtcgacaaggtctttgccaacaagctggtcgagcacccggttgcccaggcgctctcttcggtcgtcgcagaccacaaggttagcaagcactggctcaagcggtccgtggaggcgaggataaacgacgccaaccatgacgagggcaccattcctgagacgagcactgagttggagaggtacgcggaagacacccagtccaccatcctttacatgaccctgcaggctggtggcatacagtccactgtcgctgatcatgccgcctctcacatcggcaaagccagtgggcttctgttactgctcaaggcactgcctcaccatgtaaataagcaagggacggtaccttatatcccagctagtgtggctgaggaatgtggcctactcacacgggagggtggcagatcggaggtcaggatggacgagaggcttccagatgcagttttcaaggttgcatctgttgccgaggctcacctgcacaaggcgcgggagctggcatcgtccgtgcctaaaaaggcgatccctgtgctcctcccagccgtgccagcccaggtcctcctggataccttgcgaagatgtgagttcaatgtgtttgattctcggttgtcgaggggagtccacggggtctctcctctgtggtatcagctcaagcttaactggaatgcgtggcgaaacaagtactgatgaagaaccgagcaagtttaacctgttcaaccatgggaagaactgcactgaactgcaggctgctgctgttccttttagcaaagctttattgagcttccgatgaggttttgctgaaacacttcgttatataaccaagattgaataagatgagtagggtctgctacttgtgccaaacttggcgactttgagcaatttttgctgtggcttctggcttgggaggtttatttatttgtttggagtgcctcttttacatacatgaagctgttgaatttgtgttgtgctgtacgtaccacagtattatgtggagtctgttgtgcttctggctgggctccattttgacacttacaacatga

SEQ ID NO: 890 - DNA, 1737 bp, 947
atgggctcgcgtcatggcctccggcgaggcggccaagccgctgccgtcttctccgcatgtcccttcctcgccttcgccgtcctcctcgccttgccgggcctcgcagccggcgacacccattactacacgttcaacgtgcaaatgacgaacgtgacacggctgtgcgtgaccaagagcatcccgacggtgaacgggcagttcccggggccgaagctggtcgtgcgggaaggcgaccgtctcgtggtcaaggttcacaaccacatcaactacaatgtctcgttccactggcacggcgtccggcagctgcgcaacgggtgggcggacgggccggcgtacatcacgcagtgcccgatccagggcgggcagagctacgtgtacgacttcaccatcacggggcagcgcgggacgctgtggtggcacgcgcacttctcctggctgcgcgtgcacctctacggcccgctcgtcatcctccccaagcgcggcgagggctacccgttcccgcgcccctacaaggaggtgcccatcctcttcggtgaatggttcaatgcggacaccgaggccgtcatcaaccaggccctgcaaactggcggcggcccaaacgtctccgatgcctacaccttcaatgggcttccaggcccgacatataactgctcctctaaagacacgtacaagctgaaggtaaagcccgggaggacgtacatgctccggctcatcaactccgcgctcaacgacgagctcttcttcggcatcgcaaaccacacgctcaccgtcgtcgaggcggacgccaactacgtcaagccattcaccgtgaacacgctcgtcatctcgccggggcagaccatgaacgtgctcctgacgacgcctccaaacccggcctccccggcctacgccatggcgatcgcgccctacaccaacacgcagggcacgttcgacaacaccaccgcggccgccgtcctcgagtacgccccgacgacgacgacgctgccgcccttgcccctgccggccctgccgctgtacaacgacaccggcgcggtgaccaacttctcgcgcaacttccgcagcctgaacagcgcgcagtacccggcgcaagtgccggcggcggtggaccggcacctgctcttcaccgtggggctcggcacggacccgtgcccgtccaaccagacgtgccagggccccaacggcaccaagttcgcggcgtccatcaacaacaactccttcttccggccccggaccgcgctcctcgaggcgcactaccagcgccgctacgccggcgtgctcctcgccgacttccccaccaccccgccgcaccccttcaactacacggggaccccgcccaacaacacgttcgtgcagcacggcacccgggtggtgccgctcaggttcaacacctccgtggagctggtgctgcagggcaccagcatccagggcgccgagagccacccgctgcacttgcacggctacgacttcttcgtcgtcggacaggggttcggcaacttcgacccggtgaacgacccgcccaactacaacctcgccgaccccgtggagcggaacaccatcagcgtgcccaccgccggctgggtcgccgtccgcttcctcgccgacaacccgggggtgtggctgatgcattgccacttcgacgtgcacctgagctggggcctgtccatggcgtggcttgtcaacgacggcccgctgccgaatcagaagatgttgcccccgccatccgatcttccaaaatgc

SEQ ID NO: 891 - DNA, 2616 bp, 948
atgtcaccagcggttgcctctgcctcatctggcgaccgcatacgaacctacgaagacttcgtgcgggtacacgcgtacctgctggccgcggcgggcatcccgccgtcgctgcaccagaggctgtaccgcaagctcgcggacgaggtcttcgacggcggggaggtctttgccgtcgagccgtgcgaggacgggaggcagcggcgcctcgtgctcaccgccgatcagtctctaggaaaagagtccgatgtcttcctcgtcgaccatgcgtggtccttccgcctccctgatgcgctcaagcagttgcgggaagtaccaggattggctgaaaggatggcagcattgatgtgtgtcgatttggaccgcaagattgaagaagatgagcaggatgatgacgagagtgggagcttggagcatgtatcgcaagtagtcgagaaagaaagggctagagttcaggagagaagtgattctacagcttggctggaacttgaagaacttggaattgatgatgacatgctagtagccttggatctatctgcaaattttccgaatctagtagctctgaacctatggggaaacaagctgcgggatccagagaaagttatgcaagaaatcaggaagtgcacaaagctaaaggcactttggttgaacgagaatcctgttcttggcaaaagtattgacaaagctgttctcgatggcctctctggattggaaatatacaattcacattttacaagtaaagccggagagtgggcactaggtttttgcgcagacattgttggagtagataatccctgttcttctgtggaaagcacattgtttgggagcattgggactattgacctttctgatagatgcattcacaagctaccagaggtgttctctcctagtaaattgccatctctgtcaaaattgaacgttcgtggtaatcctctggatcaaatttctggcgatgatctcttaaagctatttggtggattcactcagttacaagagttggaggttgacattcctggccctctgggaaacagtgcaatctccattcttgagtctcttcctaatttatctttgctaaatggcgtggattcctcaagcataatagagagtgggaagcatatagttgactctgcacttgaaccacggcttccagaatggtcacctgaagaaccccttgctgaaagagttattggcgcaatgtggttgtatcttatgacataccggcttgctgatgatgaaaagattgacgaaacacctgtttggtatgtcatggacgagttgggctcagccatgcgccacagtgataatgcaaacttcagaatagctccattcttgttcatgccagaagggaaactgcacactgctataagttacacaattctgtggcccactcatgatgttcatactggagaagagtgtacccgggatttcttgtttggtattggtgaggacaaacagcgttcagctaggcttacagcttggttccgcacacctgagaactactttattcaggaattcaggaggtaccaggaacagcttcaatcaaatagcatttgttcttcgacaaaaatagaagagacacagacaccctcaaccaaaagtgtacgcccaagggatggtcgcgtccttcgagtatatactgacatacctcatgtagaggagtttttaacacggccagaatttgttctcacgactgatccaaaggaagctgacatcatctgggtaagcatgcaagtagattcagaagtaaagaatgctgtagggctcacagaccaacaatacacaaaccaatttccttttgaagcttgcctggtcatgaagcaccaccttgcggagaccatccacaaggcttggggctcacctgaatggcttcaacctacatataacctggaaacccatttgtctccactcattggtgattattgtgtgaggaaacgagatggcatggacaatttatggatcatgaagccttggaacatggcgagaacaatcgataccacagttactggtgatttgtctgctatcatcagacttatggagacaggccccaagatatgccaaaaatatattgaacgccctgcacttttccaaggaaggaagtttgatcttcggtacattgttttggtccgtagtatccgccctttggaaatatttctgtctgatgttttctgggttaggttagcaaacaatcagtacactttggagaagactagcttttttgagtacgagacccatttcactgtgatgaattatatcggaaggatgaatcatatgaacacgccagagttcgtcaaggggttcgagaaggagcaccaagttaaatggctggacattcatgaaagcgtacgatctaccatacgccatatctttgaggcagccgcagctgtccatcctgagatgcagaacccattctccagggccatctacggtgtagatattatgcttgacaacagattcaaaccaaaggttttagaggtgacatactgtccagactgcgggagggcatgcaagtatgacacgcaagctctggtaggaagccaggataccatcagaggccgtgatttttttaactcggtgtttggctgcctctttcttgacgagcaaacgcatgtattgccctta

SEQ ID NO: 892 - DNA, 906 bp, 949
atgagtggcacgccagcagcaagcagtagcctacaggcagccctctcatactgcgtcaggcaagtccgcgcctatgactaccaccactacctatgccttctccacctgcctccggccatgcgcaaggcagcgttcaccttccgtgccttcaacgtcgagacagcaaaggccatggacgtcgtgtccgaccctcggactggcctcatgcgcctcctctggtggaaggacgccgtcgacaaggtctttgccaacaagctggtcgagcacccggttgcccaggcgctctcttcggtcgtcgcagaccacaaggttagcaagcactggctcaagcggtccgtggaggcgaggataaacgacgccaaccatgacgagggcaccattcctgagacgagcactgagttggagaggtacgcggaagacacccagtccaccatcctttacatgaccctgcaggctggtggcatacagtccactgtcgctgatcatgccgcctctcacatcggcaaagccagtgggcttctgttactgctcaaggcactgcctcaccatgtaaataagcaagggacggtaccttatatcccagctagtgtggctgaggaatgtggcctactcacacgggagggtggcagatcggaggtcaggatggacgagaggcttccagatgcagttttcaaggttgcatctgttgccgaggctcacctgcacaaggcgcgggagctggcatcgtccgtgcctaaaaaggcgatccctgtgctcctcccagccgtgccagcccaggtcctcctggataccttgcgaagatgtgagttcaatgtgtttgattctcggttgtcgaggggagtccacggggtctctcctctgtggtatcagctcaagcttaactggaatgcgtggcgaaacaagtac

SEQ ID NO: 893 - DNA, 1737 bp, Artificial sequence
  Mir resistant mutated nucleotide sequence
atgggctcgcgtcatggcctccggcgaggcggccaagccgctgccgtatttagtgcctgcccatttttagccttcgccgtcctcctcgccttgccgggcctcgcagccggcgacacccattactacacgttcaacgtgcaaatgacgaacgtgacacggctgtgcgtgaccaagagcatcccgacggtgaacgggcagttcccggggccgaagctggtcgtgcgggaaggcgaccgtctcgtggtcaaggttcacaaccacatcaactacaatgtctcgttccactggcacggcgtccggcagctgcgcaacgggtgggcggacgggccggcgtacatcacgcagtgcccgatccagggcgggcagagctacgtgtacgacttcaccatcacggggcagcgcgggacgctgtggtggcacgcgcacttctcctggctgcgcgtgcacctctacggcccgctcgtcatcctccccaagcgcggcgagggctacccgttcccgcgcccctacaaggaggtgcccatcctcttcggtgaatggttcaatgcggacaccgaggccgtcatcaaccaggccctgcaaactggcggcggcccaaacgtctccgatgcctacaccttcaatgggcttccaggcccgacatataactgctcctctaaagacacgtacaagctgaaggtaaagcccgggaggacgtacatgctccggctcatcaactccgcgctcaacgacgagctcttcttcggcatcgcaaaccacacgctcaccgtcgtcgaggcggacgccaactacgtcaagccattcaccgtgaacacgctcgtcatctcgccggggcagaccatgaacgtgctcctgacgacgcctccaaacccggcctccccggcctacgccatggcgatcgcgccctacaccaacacgcagggcacgttcgacaacaccaccgcggccgccgtcctcgagtacgccccgacgacgacgacgctgccgcccttgcccctgccggccctgccgctgtacaacgacaccggcgcggtgaccaacttctcgcgcaacttccgcagcctgaacagcgcgcagtacccggcgcaagtgccggcggcggtggaccggcacctgctcttcaccgtggggctcggcacggacccgtgcccgtccaaccagacgtgccagggccccaacggcaccaagttcgcggcgtccatcaacaacaactccttcttccggccccggaccgcgctcctcgaggcgcactaccagcgccgctacgccggcgtgctcctcgccgacttccccaccaccccgccgcaccccttcaactacacggggaccccgcccaacaacacgttcgtgcagcacggcacccgggtggtgccgctcaggttcaacacctccgtggagctggtgctgcagggcaccagcatccagggcgccgagagccacccgctgcacttgcacggctacgacttcttcgtcgtcggacaggggttcggcaacttcgacccggtgaacgacccgcccaactacaacctcgccgaccccgtggagcggaacaccatcagcgtgcccaccgccggctgggtcgccgtccgcttcctcgccgacaacccgggggtgtggctgatgcattgccacttcgacgtgcacctgagctggggcctgtccatggcgtggcttgtcaacgacggcccgctgccgaatcagaagatgttgcccccgccatccgatcttccaaaatgc

SEQ ID NO: 894 - DNA, 1737 bp, Artificial sequence
  Mir resistant mutated nucleotide sequence
atgggctcgcgtcatggcctccggcgaggcggccaagccgctgccgtctttagtgcctgcccatttttagccttcgccgtcctcctcgccttgccgggcctcgcagccggcgacacccattactacacgttcaacgtgcaaatgacgaacgtgacacggctgtgcgtgaccaagagcatcccgacggtgaacgggcagttcccggggccgaagctggtcgtgcgggaaggcgaccgtctcgtggtcaaggttcacaaccacatcaactacaatgtctcgttccactggcacggcgtccggcagctgcgcaacgggtgggcggacgggccggcgtacatcacgcagtgcccgatccagggcgggcagagctacgtgtacgacttcaccatcacggggcagcgcgggacgctgtggtggcacgcgcacttctcctggctgcgcgtgcacctctacggcccgctcgtcatcctccccaagcgcggcgagggctacccgttcccgcgcccctacaaggaggtgcccatcctcttcggtgaatggttcaatgcggacaccgaggccgtcatcaaccaggccctgcaaactggcggcggcccaaacgtctccgatgcctacaccttcaatgggcttccaggcccgacatataactgctcctctaaagacacgtacaagctgaaggtaaagcccgggaggacgtacatgctccggctcatcaactccgcgctcaacgacgagctcttcttcggcatcgcaaaccacacgctcaccgtcgtcgaggcggacgccaactacgtcaagccattcaccgtgaacacgctcgtcatctcgccggggcagaccatgaacgtgctcctgacgacgcctccaaacccggcctccccggcctacgccatggcgatcgcgccctacaccaacacgcagggcacgttcgacaacaccaccgcggccgccgtcctcgagtacgccccgacgacgacgacgctgccgcccttgcccctgccggccctgccgctgtacaacgacaccggcgcggtgaccaacttctcgcgcaacttccgcagcctgaacagcgcgcagtacccggcgcaagtgccggcggcggtggaccggcacctgctcttcaccgtggggctcggcacggacccgtgcccgtccaaccagacgtgccagggccccaacggcaccaagttcgcggcgtccatcaacaacaactccttcttccggccccggaccgcgctcctcgaggcgcactaccagcgccgctacgccggcgtgctcctcgccgacttccccaccaccccgccgcaccccttcaactacacggggaccccgcccaacaacacgttcgtgcagcacggcacccgggtggtgccgctcaggttcaacacctccgtggagctggtgctgcagggcaccagcatccagggcgccgagagccacccgctgcacttgcacggctacgacttcttcgtcgtcggacaggggttcggcaacttcgacccggtgaacgacccgcccaactacaacctcgccgaccccgtggagcggaacaccatcagcgtgcccaccgccggctgggtcgccgtccgcttcctcgccgacaacccgggggtgtggctgatgcattgccacttcgacgtgcacctgagctggggcctgtccatggcgtggcttgtcaacgacggcccgctgccgaatcagaagatgttgcccccgccatccgatcttccaaaatgc

SEQ ID NO: 895 - DNA, 1737 bp, Artificial sequence; identical to SEQ ID NO: 894
  Mir resistant mutated nucleotide sequence

SEQ ID NO: 896 - DNA, 1737 bp, Artificial sequence; identical to SEQ ID NO: 894
  Mir resistant mutated nucleotide sequence

SEQ ID NO: 897 - DNA, 1737 bp, Artificial sequence
  Mir resistant mutated nucleotide sequence
atgggctcgcgtcatggcctccggcgaggcggccaagccgctgccgtattcagtgcctgcccattcttagccttcgccgtcctcctcgccttgccgggcctcgcagccggcgacacccattactacacgttcaacgtgcaaatgacgaacgtgacacggctgtgcgtgaccaagagcatcccgacggtgaacgggcagttcccggggccgaagctggtcgtgcgggaaggcgaccgtctcgtggtcaaggttcacaaccacatcaactacaatgtctcgttccactggcacggcgtccggcagctgcgcaacgggtgggcggacgggccggcgtacatcacgcagtgcccgatccagggcgggcagagctacgtgtacgacttcaccatcacggggcagcgcgggacgctgtggtggcacgcgcacttctcctggctgcgcgtgcacctctacggcccgctcgtcatcctccccaagcgcggcgagggctacccgttcccgcgcccctacaaggaggtgcccatcctcttcggtgaatggttcaatgcggacaccgaggccgtcatcaaccaggccctgcaaactggcggcggcccaaacgtctccgatgcctacaccttcaatgggcttccaggcccgacatataactgctcctctaaagacacgtacaagctgaaggtaaagcccgggaggacgtacatgctccggctcatcaactccgcgctcaacgacgagctcttcttcggcatcgcaaaccacacgctcaccgtcgtcgaggcggacgccaactacgtcaagccattcaccgtgaacacgctcgtcatctcgccggggcagaccatgaacgtgctcctgacgacgcctccaaacccggcctccccggcctacgccatggcgatcgcgccctacaccaacacgcagggcacgttcgacaacaccaccgcggccgccgtcctcgagtacgccccgacgacgacgacgctgccgcccttgcccctgccggccctgccgctgtacaacgacaccggcgcggtgaccaacttctcgcgcaacttccgcagcctgaacagcgcgcagtacccggcgcaagtgccggcggcggtggaccggcacctgctcttcaccgtggggctcggcacggacccgtgcccgtccaaccagacgtgccagggccccaacggcaccaagttcgcggcgtccatcaacaacaactccttcttccggccccggaccgcgctcctcgaggcgcactaccagcgccgctacgccggcgtgctcctcgccgacttccccaccaccccgccgcaccccttcaactacacggggaccccgcccaacaacacgttcgtgcagcacggcacccgggtggtgccgctcaggttcaacacctccgtggagctggtgctgcagggcaccagcatccagggcgccgagagccacccgctgcacttgcacggctacgacttcttcgtcgtcggacaggggttcggcaacttcgacccggtgaacgacccgcccaactacaacctcgccgaccccgtggagcggaacaccatcagcgtgcccaccgccggctgggtcgccgtccgcttcctcgccgacaacccgggggtgtggctgatgcattgccacttcgacgtgcacctgagctggggcctgtccatggcgtggcttgtcaacgacggcccgctgccgaatcagaagatgttgcccccgccatccgatcttccaaaatgc

SEQ ID NO: 898 - DNA, 1737 bp, Artificial sequence; identical to SEQ ID NO: 897
  Mir resistant mutated nucleotide sequence

SEQ ID NO: 899 - DNA, 1737 bp, Artificial sequence; identical to SEQ ID NO: 897
  Mir resistant mutated nucleotide sequence

SEQ ID NO: 900 - DNA, 1737 bp, Artificial sequence
  Mir resistant mutated nucleotide sequence
atgggctcgcgtcatggcctccggcgaggcggccaagccgctgccgtattttccgcctgcccatttttagccttcgccgtcctcctcgccttgccgggcctcgcagccggcgacacccattactacacgttcaacgtgcaaatgacgaacgtgacacggctgtgcgtgaccaagagcatcccgacggtgaacgggcagttcccggggccgaagctggtcgtgcgggaaggcgaccgtctcgtggtcaaggttcacaaccacatcaactacaatgtctcgttccactggcacggcgtccggcagctgcgcaacgggtgggcggacgggccggcgtacatcacgcagtgcccgatccagggcgggcagagctacgtgtacgacttcaccatcacggggcagcgcgggacgctgtggtggcacgcgcacttctcctggctgcgcgtgcacctctacggcccgctcgtcatcctccccaagcgcggcgagggctacccgttcccgcgcccctacaaggaggtgcccatcctcttcggtgaatggttcaatgcggacaccgaggccgtcatcaaccaggccctgcaaactggcggcggcccaaacgtctccgatgcctacaccttcaatgggcttccaggcccgacatataactgctcctctaaagacacgtacaagctgaaggtaaagcccgggaggacgtacatgctccggctcatcaactccgcgctcaacgacgagctcttcttcggcatcgcaaaccacacgctcaccgtcgtcgaggcggacgccaactacgtcaagccattcaccgtgaacacgctcgtcatctcgccggggcagaccatgaacgtgctcctgacgacgcctccaaacccggcctccccggcctacgccatggcgatcgcgccctacaccaacacgcagggcacgttcgacaacaccaccgcggccgccgtcctcgagtacgccccgacgacgacgacgctgccgcccttgcccctgccggccctgccgctgtacaacgacaccggcgcggtgaccaacttctcgcgcaacttccgcagcctgaacagcgcgcagtacccggcgcaagtgccggcggcggtggaccggcacctgctcttcaccgtggggctcggcacggacccgtgcccgtccaaccagacgtgccagggccccaacggcaccaagttcgcggcgtccatcaacaacaactccttcttccggccccggaccgcgctcctcgaggcgcactaccagcgccgctacgccggcgtgctcctcgccgacttccccaccaccccgccgcaccccttcaactacacggggaccccgcccaacaacacgttcgtgcagcacggcacccgggtggtgccgctcaggttcaacacctccgtggagctggtgctgcagggcaccagcatccagggcgccgagagccacccgctgcacttgcacggctacgacttcttcgtcgtcggacaggggttcggcaacttcgacccggtgaacgacccgcccaactacaacctcgccgaccccgtggagcggaacaccatcagcgtgcccaccgccggctgggtcgccgtccgcttcctcgccgacaacccgggggtgtggctgatgcattgccacttcgacgtgcacctgagctggggcctgtccatggcgtggcttgtcaacgacggcccgctgccgaatcagaagatgttgcccccgccatccgatcttccaaaatgc

SEQ ID NO: 901 - DNA, 1737 bp, Artificial sequence; identical to SEQ ID NO: 900
  Mir resistant mutated nucleotide sequence

SEQ ID NO: 902 - DNA, 1737 bp, Artificial sequence; identical to SEQ ID NO: 900
  Mir resistant mutated nucleotide sequence

SEQ ID NO: 903 - DNA, 2616 bp, Artificial sequence
  Mir resistant mutated nucleotide sequence
atgtcaccagcggttgcctctgcctcatctggcgaccgcatacgaacctacgaagacttcgtgcgggtacacgcgtacctgctggccgcggcgggcatcccgccgtcgctgcaccagaggctgtaccgcaagctcgcggacgaggtcttcgacggcggggaggtctttgccgtcgagccgtgcgaggacgggaggcagcggcgcctcgtgctcaccgccgatcagtctctaggaaaagagtccgatgtcttcctcgtcgaccatgcgtggtccttccgcctccctgatgcgctcaagcagttgcgggaagtaccaggattggctgaaaggatggcagcattgatgtgtgtcgatttggaccgcaagattgaagaagatgagcaggacgacgatgaatcaggatcactagagcatgtatcgcaagtagtcgagaaagaaagggctagagttcaggagagaagtgattctacagcttggctggaacttgaagaacttggaattgatgatgacatgctagtagccttggatctatctgcaaattttccgaatctagtagctctgaacctatggggaaacaagctgcgggatccagagaaagttatgcaagaaatcaggaagtgcacaaagctaaaggcactttggttgaacgagaatcctgttcttggcaaaagtattgacaaagctgttctcgatggcctctctggattggaaatatacaattcacattttacaagtaaagccggagagtgggcactaggtttttgcgcagacattgttggagtagataatccctgttcttctgtggaaagcacattgtttgggagcattgggactattgacctttctgatagatgcattcacaagctaccagaggtgttctctcctagtaaattgccatctctgtcaaaattgaacgttcgtggtaatcctctggatcaaatttctggcgatgatctcttaaagctatttggtggattcactcagttacaagagttggaggttgacattcctggccctctgggaaacagtgcaatctccattcttgagtctcttcctaatttatctttgctaaatggcgtggattcctcaagcataatagagagtgggaagcatatagttgactctgcacttgaaccacggcttccagaatggtcacctgaagaaccccttgctgaaagagttattggcgcaatgtggttgtatcttatgacataccggcttgctgatgatgaaaagattgacgaaacacctgtttggtatgtcatggacgagttgggctcagccatgcgccacagtgataatgcaaacttcagaatagctccattcttgttcatgccagaagggaaactgcacactgctataagttacacaattctgtggcccactcatgatgttcatactggagaagagtgtacccgggatttcttgtttggtattggtgaggacaaacagcgttcagctaggcttacagcttggttccgcacacctgagaactactttattcaggaattcaggaggtaccaggaacagcttcaatcaaatagcatttgttcttcgacaaaaatagaagagacacagacaccctcaaccaaaagtgtacgcccaagggatggtcgcgtccttcgagtatatactgacatacctcatgtagaggagtttttaacacggccagaatttgttctcacgactgatccaaaggaagctgacatcatctgggtaagcatgcaagtagattcagaagtaaagaatgctgtagggctcacagaccaacaatacacaaaccaatttccttttgaagcttgcctggtcatgaagcaccaccttgcggagaccatccacaaggcttggggctcacctgaatggcttcaacctacatataacctggaaacccatttgtctccactcattggtgattattgtgtgaggaaacgagatggcatggacaatttatggatcatgaagccttggaacatggcgagaacaatcgataccacagttactggtgatttgtctgctatcatcagacttatggagacaggccccaagatatgccaaaaatatattgaacgccctgcacttttccaaggaaggaagtttgatcttcggtacattgttttggtccgtagtatccgccctttggaaatatttctgtctgatgttttctgggttaggttagcaaacaatcagtacactttggagaagactagcttttttgagtacgagacccatttcactgtgatgaattatatcggaaggatgaatcatatgaacacgccagagttcgtcaaggggttcgagaaggagcaccaagttaaatggctggacattcatgaaagcgtacgatctaccatacgccatatctttgaggcagccgcagctgtccatcctgagatgcagaacccattctccagggccatctacggtgtagatattatgcttgacaacagattcaaaccaaaggttttagaggtgacatactgtccagactgcgggagggcatgcaagtatgacacgcaagctctggtaggaagccaggataccatcagaggccgtgatttttttaactcggtgtttggctgcctctttcttgacgagcaaacgcatgtattgccctta

SEQ ID NO: 904 - DNA, 2616 bp, Artificial sequence
  Mir resistant mutated nucleotide sequence
atgtcaccagcggttgcctctgcctcatctggcgaccgcatacgaacctacgaagacttcgtgcgggtacacgcgtacctgctggccgcggcgggcatcccgccgtcgctgcaccagaggctgtaccgcaagctcgcggacgaggtcttcgacggcggggaggtctttgccgtcgagccgtgcgaggacgggaggcagcggcgcctcgtgctcaccgccgatcagtctctaggaaaagagtccgatgtcttcctcgtcgaccatgcgtggtccttccgcctccctgatgcgctcaagcagttgcgggaagtaccaggattggctgaaaggatggcagcattgatgtgtgtcgatttggaccgcaagattgaagaagatgagcaggatgatgatgaatcaggatcactagagcatgtatcgcaagtagtcgagaaagaaagggctagagttcaggagagaagtgattctacagcttggctggaacttgaagaacttggaattgatgatgacatgctagtagccttggatctatctgcaaattttccgaatctagtagctctgaacctatggggaaacaagctgcgggatccagagaaagttatgcaagaaatcaggaagtgcacaaagctaaaggcactttggttgaacgagaatcctgttcttggcaaaagtattgacaaagctgttctcgatggcctctctggattggaaatatacaattcacattttacaagtaaagccggagagtgggcactaggtttttgcgcagacattgttggagtagataatccctgttcttctgtggaaagcacattgtttgggagcattgggactattgacctttctgatagatgcattcacaagctaccagaggtgttctctcctagtaaattgccatctctgtcaaaattgaacgttcgtggtaatcctctggatcaaatttctggcgatgatctcttaaagctatttggtggattcactcagttacaagagttggaggttgacattcctggccctctgggaaacagtgcaatctccattcttgagtctcttcctaatttatctttgctaaatggcgtggattcctcaagcataatagagagtgggaagcatatagttgactctgcacttgaaccacggcttccagaatggtcacctgaagaaccccttgctgaaagagttattggcgcaatgtggttgtatcttatgacataccggcttgctgatgatgaaaagattgacgaaacacctgtttggtatgtcatggacgagttgggctcagccatgcgccacagtgataatgcaaacttcagaatagctccattcttgttcatgccagaagggaaactgcacactgctataagttacacaattctgtggcccactcatgatgttcatactggagaagagtgtacccgggatttcttgtttggtattggtgaggacaaacagcgttcagctaggcttacagcttggttccgcacacctgagaactactttattcaggaattcaggaggtaccaggaacagcttcaatcaaatagcatttgttcttcgacaaaaatagaagagacacagacaccctcaaccaaaagtgtacgcccaagggatggtcgcgtccttcgagtatatactgacatacctcatgtagaggagtttttaacacggccagaatttgttctcacgactgatccaaaggaagctgacatcatctgggtaagcatgcaagtagattcagaagtaaagaatgctgtagggctcacagaccaacaatacacaaaccaatttccttttgaagcttgcctggtcatgaagcaccaccttgcggagaccatccacaaggcttggggctcacctgaatggcttcaacctacatataacctggaaacccatttgtctccactcattggtgattattgtgtgaggaaacgagatggcatggacaatttatggatcatgaagccttggaacatggcgagaacaatcgataccacagttactggtgatttgtctgctatcatcagacttatggagacaggccccaagatatgccaaaaatatattgaacgccctgcacttttccaaggaaggaagtttgatcttcggtacattgttttggtccgtagtatccgccctttggaaatatttctgtctgatgttttctgggttaggttagcaaacaatcagtacactttggagaagactagcttttttgagtacgagacccatttcactgtgatgaattatatcggaaggatgaatcatatgaacacgccagagttcgtcaaggggttcgagaaggagcaccaagttaaatggctggacattcatgaaagcgtacgatctaccatacgccatatctttgaggcagccgcagctgtccatcctgagatgcagaacccattctccagggccatctacggtgtagatattatgcttgacaacagattcaaaccaaaggttttagaggtgacatactgtccagactgcgggagggcatgcaagtatgacacgcaagctctggtaggaagccaggataccatcagaggccgtgatttttttaactcggtgtttggctgcctctttcttgacgagcaaacgcatgtattgccctta

SEQ ID NO: 905 - DNA, 2616 bp, Artificial sequence; identical to SEQ ID NO: 904
  Mir resistant mutated nucleotide sequence

SEQ ID NO: 906 - DNA, 2616 bp, Artificial sequence
  Mir resistant mutated nucleotide sequence
atgtcaccagcggttgcctctgcctcatctggcgaccgcatacgaacctacgaagacttcgtgcgggtacacgcgtacctgctggccgcggcgggcatcccgccgtcgctgcaccagaggctgtaccgcaagctcgcggacgaggtcttcgacggcggggaggtctttgccgtcgagccgtgcgaggacgggaggcagcggcgcctcgtgctcaccgccgatcagtctctaggaaaagagtccgatgtcttcctcgtcgaccatgcgtggtccttccgcctccctgatgcgctcaagcagttgcgggaagtaccaggattggctgaaaggatggcagcattgatgtgtgtcgatttggaccgcaagattgaagaagatgagcaggacgacgatgagtcaggatcactagagcatgtatcgcaagtagtcgagaaagaaagggctagagttcaggagagaagtgattctacagcttggctggaacttgaagaacttggaattgatgatgacatgctagtagccttggatctatctgcaaattttccgaatctagtagctctgaacctatggggaaacaagctgcgggatccagagaaagttatgcaagaaatcaggaagtgcacaaagctaaaggcactttggttgaacgagaatcctgttcttggcaaaagtattgacaaagctgttctcgatggcctctctggattggaaatatacaattcacattttacaagtaaagccggagagtgggcactaggtttttgcgcagacattgttggagtagataatccctgttcttctgtggaaagcacattgtttgggagcattgggactattgacctttctgatagatgcattcacaagctaccagaggtgttctctcctagtaaattgccatctctgtcaaaattgaacgttcgtggtaatcctctggatcaaatttctggcgatgatctcttaaagctatttggtggattcactcagttacaagagttggaggttgacattcctggccctctgggaaacagtgcaatctccattcttgagtctcttcctaatttatctttgctaaatggcgtggattcctcaagcataatagagagtgggaagcatatagttgactctgcacttgaaccacggcttccagaatggtcacctgaagaaccccttgctgaaagagttattggcgcaatgtggttgtatcttatgacataccggcttgctgatgatgaaaagattgacgaaacacctgtttggtatgtcatggacgagttgggctcagccatgcgccacagtgataatgcaaacttcagaatagctccattcttgttcatgccagaagggaaactgcacactgctataagttacacaattctgtggcccactcatgatgttcatactggagaagagtgtacccgggatttcttgtttggtattggtgaggacaaacagcgttcagctaggcttacagcttggttccgcacacctgagaactactttattcaggaattcaggaggtaccaggaacagcttcaatcaaatagcatttgttcttcgacaaaaatagaagagacacagacaccctcaaccaaaagtgtacgcccaagggatggtcgcgtccttcgagtatatactgacatacctcatgtagaggagtttttaacacggccagaatttgttctcacgactgatccaaaggaagctgacatcatctgggtaagcatgcaagtagattcagaagtaaagaatgctgtagggctcacagaccaacaatacacaaaccaatttccttttgaagcttgcctggtcatgaagcaccaccttgcggagaccatccacaaggcttggggctcacctgaatggcttcaacctacatataacctggaaacccatttgtctccactcattggtgattattgtgtgaggaaacgagatggcatggacaatttatggatcatgaagccttggaacatggcgagaacaatcgataccacagttactggtgatttgtctgctatcatcagacttatggagacaggccccaagatatgccaaaaatatattgaacgccctgcacttttccaaggaaggaagtttgatcttcggtacattgttttggtccgtagtatccgccctttggaaatatttctgtctgatgttttctgggttaggttagcaaacaatcagtacactttggagaagactagcttttttgagtacgagacccatttcactgtgatgaattatatcggaaggatgaatcatatgaacacgccagagttcgtcaaggggttcgagaaggagcaccaagttaaatggctggacattcatgaaagcgtacgatctaccatacgccatatctttgaggcagccgcagctgtccatcctgagatgcagaacccattctccagggccatctacggtgtagatattatgcttgacaacagattcaaaccaaaggttttagaggtgacatactgtccagactgcgggagggcatgcaagtatgacacgcaagctctggtaggaagccaggataccatcagaggccgtgatttttttaactcggtgtttggctgcctctttcttgacgagcaaacgcatgtattgccctta

SEQ ID NO: 907 - DNA, 2616 bp, Artificial sequence
  Mir resistant mutated nucleotide sequence
atgtcaccagcggttgcctctgcctcatctggcgaccgcatacgaacctacgaagacttcgtgcgggtacacgcgtacctgctggccgcggcgggcatcccgccgtcgctgcaccagaggctgtaccgcaagctcgcggacgaggtcttcgacggcggggaggtctttgccgtcgagccgtgcgaggacgggaggcagcggcgcctcgtgctcaccgccgatcagtctctaggaaaagagtccgatgtcttcctcgtcgaccatgcgtggtccttccgcctccctgatgcgctcaagcagttgcgggaagtaccaggattggctgaaaggatggcagcattgatgtgtgtcgatttggaccgcaagattgaagaagatgagcaggacgacgatgaaagtggaagtctagagcatgtatcgcaagtagtcgagaaagaaagggctagagttcaggagagaagtgattctacagcttggctggaacttgaagaacttggaattgatgatgacatgctagtagccttggatctatctgcaaattttccgaatctagtagctctgaacctatggggaaacaagctgcgggatccagagaaagttatgcaagaaatcaggaagtgcacaaagctaaaggcactttggttgaacgagaatcctgttcttggcaaaagtattgacaaagctgttctcgatggcctctctggattggaaatatacaattcacattttacaagtaaagccggagagtgggcactaggtttttgcgcagacattgttggagtagataatccctgttcttctgtggaaagcacattgtttgggagcattgggactattgacctttctgatagatgcattcacaagctaccagaggtgttctctcctagtaaattgccatctctgtcaaaattgaacgttcgtggtaatcctctggatcaaatttctggcgatgatctcttaaagctatttggtggattcactcagttacaagagttggaggttgacattcctggccctctgggaaacagtgcaatctccattcttgagtctcttcctaatttatctttgctaaatggcgtggattcctcaagcataatagagagtgggaagcatatagttgactctgcacttgaaccacggcttccagaatggtcacctgaagaaccccttgctgaaagagttattggcgcaatgtggttgtatcttatgacataccggcttgctgatgatgaaaagattgacgaaacacctgtttggtatgtcatggacgagttgggctcagccatgcgccacagtgataatgcaaacttcagaatagctccattcttgttcatgccagaagggaaactgcacactgctataagttacacaattctgtggcccactcatgatgttcatactggagaagagtgtacccgggatttcttgtttggtattggtgaggacaaacagcgttcagctaggcttacagcttggttccgcacacctgagaactactttattcaggaattcaggaggtaccaggaacagcttcaatcaaatagcatttgttcttcgacaaaaatagaagagacacagacaccctcaaccaaaagtgtacgcccaagggatggtcgcgtccttcgagtatatactgacatacctcatgtagaggagtttttaacacggccagaatttgttctcacgactgatccaaaggaagctgacatcatctgggtaagcatgcaagtagattcagaagtaaagaatgctgtagggctcacagaccaacaatacacaaaccaatttccttttgaagcttgcctggtcatgaagcaccaccttgcggagaccatccacaaggcttggggctcacctgaatggcttcaacctacatataacctggaaacccatttgtctccactcattggtgattattgtgtgaggaaacgagatggcatggacaatttatggatcatgaagccttggaacatggcgagaacaatcgataccacagttactggtgatttgtctgctatcatcagacttatggagacaggccccaagatatgccaaaaatatattgaacgccctgcacttttccaaggaaggaagtttgatcttcggtacattgttttggtccgtagtatccgccctttggaaatatttctgtctgatgttttctgggttaggttagcaaacaatcagtacactttggagaagactagcttttttgagtacgagacccatttcactgtgatgaattatatcggaaggatgaatcatatgaacacgccagagttcgtcaaggggttcgagaaggagcaccaagttaaatggctggacattcatgaaagcgtacgatctaccatacgccatatctttgaggcagccgcagctgtccatcctgagatgcagaacccattctccagggccatctacggtgtagatattatgcttgacaacagattcaaaccaaaggttttagaggtgacatactgtccagactgcgggagggcatgcaagtatgacacgcaagctctggtaggaagccaggataccatcagaggccgtgatttttttaactcggtgtttggctgcctctttcttgacgagcaaacgcatgtattgccctta

SEQ ID NO: 908 - DNA, 2616 bp, Artificial sequence
  Mir resistant mutated nucleotide sequence
atgtcaccagcggttgcctctgcctcatctggcgaccgcatacgaacctacgaagacttcgtgcgggtacacgcgtacctgctggccgcggcgggcatcccgccgtcgctgcaccagaggctgtaccgcaagctcgcggacgaggtcttcgacggcggggaggtctttgccgtcgagccgtgcgaggacgggaggcagcggcgcctcgtgctcaccgccgatcagtctctaggaaaagagtccgatgtcttcctcgtcgaccatgcgtggtccttccgcctccctgatgcgctcaagcagttgcgggaagtaccaggattggctgaaaggatggcagcattgatgtgtgtcgatttggaccgcaagattgaagaagatgagcaggacgacgatgaatcagggtcactagagcatgtatcgcaagtagtcgagaaagaaagggctagagttcaggagagaagtgattctacagcttggctggaacttgaagaacttggaattgatgatgacatgctagtagccttggatctatctgcaaattttccgaatctagtagctctgaacctatggggaaacaagctgcgggatccagagaaagttatgcaagaaatcaggaagtgcacaaagctaaaggcactttggttgaacgagaatcctgttcttggcaaaagtattgacaaagctgttctcgatggcctctctggattggaaatatacaattcacattttacaagtaaagccggagagtgggcactaggtttttgcgcagacattgttggagtagataatccctgttcttctgtggaaagcacattgtttgggagcattgggactattgacctttctgatagatgcattcacaagctaccagaggtgttctctcctagtaaattgccatctctgtcaaaattgaacgttcgtggtaatcctctggatcaaatttctggcgatgatctcttaaagctatttggtggattcactcagttacaagagttggaggttgacattcctggccctctgggaaacagtgcaatctccattcttgagtctcttcctaatttatctttgctaaatggcgtggattcctcaagcataatagagagtgggaagcatatagttgactctgcacttgaaccacggcttccagaatggtcacctgaagaaccccttgctgaaagagttattggcgcaatgtggttgtatcttatgacataccggcttgctgatgatgaaaagattgacgaaacacctgtttggtatgtcatggacgagttgggctcagccatgcgccacagtgataatgcaaacttcagaatagctccattcttgttcatgccagaagggaaactgcacactgctataagttacacaattctgtggcccactcatgatgttcatactggagaagagtgtacccgggatttcttgtttggtattggtgaggacaaacagcgttcagctaggcttacagcttggttccgcacacctgagaactactttattcaggaattcaggaggtaccaggaacagcttcaatcaaatagcatttgttcttcgacaaaaatagaagagacacagacaccctcaaccaaaagtgtacgcccaagggatggtcgcgtccttcgagtatatactgacatacctcatgtagaggagtttttaacacggccagaatttgttctcacgactgatccaaaggaagctgacatcatctgggtaagcatgcaagtagattcagaagtaaagaatgctgtagggctcacagaccaacaatacacaaaccaatttccttttgaagcttgcctggtcatgaagcaccaccttgcggagaccatccacaaggcttggggctcacctgaatggcttcaacctacatataacctggaaacccatttgtctccactcattggtgattattgtgtgaggaaacgagatggcatggacaatttatggatcatgaagccttggaacatggcgagaacaatcgataccacagttactggtgatttgtctgctatcatcagacttatggagacaggccccaagatatgccaaaaatatattgaacgccctgcacttttccaaggaaggaagtttgatcttcggtacattgttttggtccgtagtatccgccctttggaaatatttctgtctgatgttttctgggttaggttagcaaacaatcagtacactttggagaagactagcttttttgagtacgagacccatttcactgtgatgaattatatcggaaggatgaatcatatgaacacgccagagttcgtcaaggggttcgagaaggagcaccaagttaaatggctggacattcatgaaagcgtacgatctaccatacgccatatctttgaggcagccgcagctgtccatcctgagatgcagaacccattctccagggccatctacggtgtagatattatgcttgacaacagattcaaaccaaaggttttagaggtgacatactgtccagactgcgggagggcatgcaagtatgacacgcaagctctggtaggaagccaggataccatcagaggccgtgatttttttaactcggtgtttggctgcctctttcttgacgagcaaacgcatgtattgccctta

SEQ ID NO: 909 - DNA, 2616 bp, Artificial sequence
  Mir resistant mutated nucleotide sequence
atgtcaccagcggttgcctctgcctcatctggcgaccgcatacgaacctacgaagacttcgtgcgggtacacgcgtacctgctggccgcggcgggcatcccgccgtcgctgcaccagaggctgtaccgcaagctcgcggacgaggtcttcgacggcggggaggtctttgccgtcgagccgtgcgaggacgggaggcagcggcgcctcgtgctcaccgccgatcagtctctaggaaaagagtccgatgtcttcctcgtcgaccatgcgtggtccttccgcctccctgatgcgctcaagcagttgcgggaagtaccaggattggctgaaaggatggcagcattgatgtgtgtcgatttggaccgcaagattgaagaagatgagcaggacgacgatgaaagcggaagcctagagcatgtatcgcaagtagtcgagaaagaaagggctagagttcaggagagaagtgattctacagcttggctggaacttgaagaacttggaattgatgatgacatgctagtagccttggatctatctgcaaattttccgaatctagtagctctgaacctatggggaaacaagctgcgggatccagagaaagttatgcaagaaatcaggaagtgcacaaagctaaaggcactttggttgaacgagaatcctgttcttggcaaaagtattgacaaagctgttctcgatggcctctctggattggaaatatacaattcacattttacaagtaaagccggagagtgggcactaggtttttgcgcagacattgttggagtagataatccctgttcttctgtggaaagcacattgtttgggagcattgggactattgacctttctgatagatgcattcacaagctaccagaggtgttctctcctagtaaattgccatctctgtcaaaattgaacgttcgtggtaatcctctggatcaaatttctggcgatgatctcttaaagctatttggtggattcactcagttacaagagttggaggttgacattcctggccctctgggaaacagtgcaatctccattcttgagtctcttcctaatttatctttgctaaatggcgtggattcctcaagcataatagagagtgggaagcatatagttgactctgcacttgaaccacggcttccagaatggtcacctgaagaaccccttgctgaaagagttattggcgcaatgtggttgtatcttatgacataccggcttgctgatgatgaaaagattgacgaaacacctgtttggtatgtcatggacgagttgggctcagccatgcgccacagtgataatgcaaacttcagaatagctccattcttgttcatgccagaagggaaactgcacactgctataagttacacaattctgtggcccactcatgatgttcatactggagaagagtgtacccgggatttcttgtttggtattggtgaggacaaacagcgttcagctaggcttacagcttggttccgcacacctgagaactactttattcaggaattcaggaggtaccaggaacagcttcaatcaaatagcatttgttcttcgacaaaaatagaagagacacagacaccctcaaccaaaagtgtacgcccaagggatggtcgcgtccttcgagtatatactgacatacctcatgtagaggagtttttaacacggccagaatttgttctcacgactgatccaaaggaagctgacatcatctgggtaagcatgcaagtagattcagaagtaaagaatgctgtagggctcacagaccaacaatacacaaaccaatttccttttgaagcttgcctggtcatgaagcaccaccttgcggagaccatccacaaggcttggggctcacctgaatggcttcaacctacatataacctggaaacccatttgtctccactcattggtgattattgtgtgaggaaacgagatggcatggacaatttatggatcatgaagccttggaacatggcgagaacaatcgataccacagttactggtgatttgtctgctatcatcagacttatggagacaggccccaagatatgccaaaaatatattgaacgccctgcacttttccaaggaaggaagtttgatcttcggtacattgttttggtccgtagtatccgccctttggaaatatttctgtctgatgttttctgggttaggttagcaaacaatcagtacactttggagaagactagcttttttgagtacgagacccatttcactgtgatgaattatatcggaaggatgaatcatatgaacacgccagagttcgtcaaggggttcgagaaggagcaccaagttaaatggctggacattcatgaaagcgtacgatctaccatacgccatatctttgaggcagccgcagctgtccatcctgagatgcagaacccattctccagggccatctacggtgtagatattatgcttgacaacagattcaaaccaaaggttttagaggtgacatactgtccagactgcgggagggcatgcaagtatgacacgcaagctctggtaggaagccaggataccatcagaggccgtgatttttttaactcggtgtttggctgcctctttcttgacgagcaaacgcatgtattgccctta

SEQ ID NO: 910 - DNA, 906 bp, Artificial sequence
  Mir resistant mutated nucleotide sequence
atgagtggcacgccagcagcaagcagtagcctacaggcagccctctcatactgcgtcaggcaagtccgcgcctatgactaccaccactacctatgccttctccacctgcctccggccatgcgcaaggcagcgttcaccttccgtgccttcaacgtcgagacagcaaaggccatggacgtcgtgtccgaccctcggactggcctcatgcgcctcctctggtggaaggacgccgtcgacaaggtctttgccaacaagctggtcgagcacccggttgcccaggcgctctcttcggtcgtcgcagaccacaaggttagcaagcactggctcaagcggtccgtggaggcgaggataaacgacgccaaccatgacgagggcaccattcctgagacgagcactgagttggagaggtacgcggaagacacccagtccaccatattatatatgacattacaagctggtggcatacagtccactgtcgctgatcatgccgcctctcacatcggcaaagccagtgggcttctgttactgctcaaggcactgcctcaccatgtaaataagcaagggacggtaccttatatcccagctagtgtggctgaggaatgtggcctactcacacgggagggtggcagatcggaggtcaggatggacgagaggcttccagatgcagttttcaaggttgcatctgttgccgaggctcacctgcacaaggcgcgggagctggcatcgtccgtgcctaaaaaggcgatccctgtgctcctcccagccgtgccagcccaggtcctcctggataccttgcgaagatgtgagttcaatgtgtttgattctcggttgtcgaggggagtccacggggtctctcctctgtggtatcagctcaagcttaactggaatgcgtggcgaaacaagtac

SEQ ID NO: 911 - DNA, 906 bp, Artificial sequence
  Mir resistant mutated nucleotide sequence
atgagtggcacgccagcagcaagcagtagcctacaggcagccctctcatactgcgtcaggcaagtccgcgcctatgactaccaccactacctatgccttctccacctgcctccggccatgcgcaaggcagcgttcaccttccgtgccttcaacgtcgagacagcaaaggccatggacgtcgtgtccgaccctcggactggcctcatgcgcctcctctggtggaaggacgccgtcgacaaggtctttgccaacaagctggtcgagcacccggttgcccaggcgctctcttcggtcgtcgcagaccacaaggttagcaagcactggctcaagcggtccgtggaggcgaggataaacgacgccaaccatgacgagggcaccattcctgagacgagcactgagttggagaggtacgcggaagacacccagtccaccatactttatatgacacttcaagctggtggcatacagtccactgtcgctgatcatgccgcctctcacatcggcaaagccagtgggcttctgttactgctcaaggcactgcctcaccatgtaaataagcaagggacggtaccttatatcccagctagtgtggctgaggaatgtggcctactcacacgggagggtggcagatcggaggtcaggatggacgagaggcttccagatgcagttttcaaggttgcatctgttgccgaggctcacctgcacaaggcgcgggagctggcatcgtccgtgcctaaaaaggcgatccctgtgctcctcccagccgtgccagcccaggtcctcctggataccttgcgaagatgtgagttcaatgtgtttgattctcggttgtcgaggggagtccacggggtctctcctctgtggtatcagctcaagcttaactggaatgcgtggcgaaacaagtac

SEQ ID NO: 912 - DNA, 906 bp, Artificial sequence; identical to SEQ ID NO: 911
  Mir resistant mutated nucleotide sequence

SEQ ID NO: 913 - DNA, 906 bp, Artificial sequence
  Mir resistant mutated nucleotide sequence
atgagtggcacgccagcagcaagcagtagcctacaggcagccctctcatactgcgtcaggcaagtccgcgcctatgactaccaccactacctatgccttctccacctgcctccggccatgcgcaaggcagcgttcaccttccgtgccttcaacgtcgagacagcaaaggccatggacgtcgtgtccgaccctcggactggcctcatgcgcctcctctggtggaaggacgccgtcgacaaggtctttgccaacaagctggtcgagcacccggttgcccaggcgctctcttcggtcgtcgcagaccacaaggttagcaagcactggctcaagcggtccgtggaggcgaggataaacgacgccaaccatgacgagggcaccattcctgagacgagcactgagttggagaggtacgcggaagacacccagtccaccatactgtatatgacactgcaagctggtggcatacagtccactgtcgctgatcatgccgcctctcacatcggcaaagccagtgggcttctgttactgctcaaggcactgcctcaccatgtaaataagcaagggacggtaccttatatcccagctagtgtggctgaggaatgtggcctactcacacgggagggtggcagatcggaggtcaggatggacgagaggcttccagatgcagttttcaaggttgcatctgttgccgaggctcacctgcacaaggcgcgggagctggcatcgtccgtgcctaaaaaggcgatccctgtgctcctcccagccgtgccagcccaggtcctcctggataccttgcgaagatgtgagttcaatgtgtttgattctcggttgtcgaggggagtccacggggtctctcctctgtggtatcagctcaagcttaactggaatgcgtggcgaaacaagtac

SEQ ID NO: 914 - DNA, 2021 bp, Sorghum bicolor
atggaagccgacatcgcttcgaggtatgagatccctcggaccgctcagttccttcgcgactgcgcctacaacagggtcgcgctccagttccccgacgagatgctcaaggacgccgcggcggtggcgagggcgctgcggcgggagcttgcctccggcggggccggtggtggggtcagggtgttcgtgatggccgacacggcgtacaactcctgctgcgtcgacgaggtgggcgcgtcccacatcgatgcgcagtgcgtcgtccattacggccacgcctgcatgagcccaacatcaaatttgccagcttactttgtattcgggaaggcacagttggatatccacgcatgtgccagcacattgcttgagtgctcaagaacaagcaataagcgcattctggttttatatggactagagtacgcatatgcattggatgatcttagacaagctttcatggagtcatgcaaatcaaattcttgcaatcctgaagtccagtatgcagaagttctgtgttcagttatgagtccatcatcaagtactacagaagaaaacacaattcctcagtcgagtggcacctcttgtaacagagatatcacaagaaacagcgatgtagcaacattcctggacaatcattatggcatgaaatgttccagttctacacaaaagtacagccttggtggcattacatgggatatttcagttgatgaaaaaatggaggactatttgatattttggattggacaagataactcagcatttgccaacatagtccttaccttcaataaatgtgaaatagttagatatgacgcaatagaaaatcaactcacagctgacatctctcatctgatgaaaattcttaggcgaagatattaccttgtggagaaggcgaaggatgcaaatattattggcattttggtgggaactctgggtgctgctggttatcttcatataatcgaacaaatgaaagaactgatcaaggctgctggaaagaaatcttatacattggtcatgggcaggcctaattctgcaaaacttgcgaattttccagagtgcgaagtttttatttatgtttcttgtgcccaaaccgctctgctggatagcaaggattttttagctccagttattacaccttttgaagctgtactagcttttagcaggggaagagagtggactggagaatatcttttggatttcaaggatttgatcactttagagaaacaagaagttgtgagcacaacagaagaagcacgtttttcttttatcaaaggtgtctatgtggaagataattgcccccaagaaaatgaggagcaatcagaaacatcgctcgcactggctgaggtaacagaaaaggcactaagcatccaaaaccagcacaacgacgctgtcctttacaaaggaggagcaatgtcctcaatcgactacctcaaggcacgttcataccgtggtctaactggagaatatgaaggtccagtgcctaattcaatcttggtaggcagaaccggcagggcggctggttacagtgatgagaaaaccgagaacgcacaataaatgtaccatcctgccagttaaccagttactacaggctcccttgttttggcggtgaaaaaccagggtgcacaatgattcaatcttaccctggatggtttaccaatctttgccttttgttttggaggggaaacaggtttacaaacaattgtcgacatttttatcgacgagaacacctgtttctagtcccagggaacaatgctttagatgctgttcgttcacgtggctgttttgctgttggaaactctgtgcatagtcggtttggatgcgtcacaagttttgcgaatttgtgtgaggttatttctaacaactgtggcatgtgttcagaagatgagatatacgttgtaccagacttgttcaaacagtgacagatggatagaccactgtagtccgttatgtttgtaccagacaaagtttactctgtacattcatatttattgactactactagggagcccttaaagcaccatttggtaaaa

SEQ ID NO: 915 - DNA, 1685 bp, Sorghum bicolor
cccccccacctcctctcgatttgttccgatggccgccgccaccattcgcagccctacccgcgccgccgccgcaggaggacccgccgcggcgccgacgcagcagcgatcggtgctgcgggtggcgtcgtccgccgcgtcggcttcctcgtcgtccgcccgcacgcggaggggtgcggccgcaatgcagccggccaaggcggtggccgcggaggcggcgtcccccgcggtggagatggggaacggcgcggcggtcgcggggatgcagaggcccgacgccatggggaggttcgggaagttcggcgggaagtatgtccccgagacgctcatgcacgcgctcaccgagctcgagaacgccttccacgcgctcgccaccgacgaagagttccagaaagaacttgacggtattctcaaggactatgttggacgtgagagccccctctattttgcggagcgcctgacggagcactacaagcgcgccgatggcacaggcccgctcatctacctcaagagggaggaccttaaccacaccggtgcccacaagatcaacaatgccgtggcgcaggccttgctcgccaagcgacttgggaagcagcgcatcattgctgagacaggggctggtcagcacggtgtcgccactgccaccgtgtgcgcccgttttgggctgcagtgcatcatctacatgggtgcgcaagatatggagaggcaggcgctcaatgttttccggatgaggcttcttggtgcagaggtcagggctgtacattctgggacagcaaccctgaaggatgcaacttcagaggctatccgcgactgggtcactaatgtggagactacacactacattttgggctctgttgctggtccgcacccatacccaatgatggtgagggagttccataaggttattggcaaggagacccggaggcaggccatggacaagtggggtggaaagccggatgtgttggttgcttgcgtcggtggtggatcaaacgctatgggtttattccatgagtttgttgaggatcaagatgtgaggctgattggagtggaggcagctggtcatggtgtagacactgacaagcatgctgctactttgacaaagggcgaagttggagttctccacggatctatgagctacttgctgcaggacgatgatggacaagttattgaaccccactccatcagtgctgggctggactaccctggtgttggacccgagcacagtttcttgaaggacattggacgtgctgaatacgacagcgtgactgatcaggaggcactggatgctttcaagcgtgtctctcgtctggagggcatcatccctgccctggagacctcccatgcgctcgcctacctcgagaagctctgcccgaccctgccagacggcgtgagagtggtggtgaactgcagtggacgaggagacaaggacgtgcacaccgccagcaagtacctggacgtctaaaacacaacataggaggctgaatgaaggttttttccatgtcaatttttgaagggttcagcagtaatttagcgctgttcttttggataaaagtacaaataacctggaagcttgtattgttgtagtaaccggtagggccctttggtttttttgttgttgttgtcctgtatctgagtgatgttggagtgcattatgatcaataaacaaataaataccaagctttctccct

SEQ ID NO: 916 - DNA, 1737 bp, Zea mays
ggtagagcctgctctgctcagctcagccgcatccttgcctccactgcaaagatctctctcccttcttcaatggcatctgcctgccctcttactctcagattcctcttctcctgcatcctccttcaaacaatctgctgttcaggagtatctgtggagctatcatacgattcagcacaggtcaaggcgctgtccagctcagccgtcaccgagtacagagtcacggtcaccgacaagcggcgtgcctattacgtcttccagaagccgtttgtgtgcagagacaagccatgcagatcgtcggagcctatcgccgccgccggctcatttgtcaacgaggctattgctggtgccaaacggcatgagccagaggcaaacggcgagctcgccgtggttgcggagatcgaaggggccggcgtcgtgccccacgtcaagagccgtgtggctccaagcgcggtggcaatgagtagcggccgggagaagaggctcttgggtgtcctggtcgacgtgccctcccctcggcgggagctcggcgaggcaagagccacggcgcgcgacgagttctctccggtcagcaacccggcgacgactcccgtgagcaacccagtcaccgtgccggccaccaacccgatgcccccgggcttcgtcaccgtgccatcgaccaacccgggcaacgggatcgcgaccaacccgaacctgccgccgttgtacccggagccgacgacgccgggcaccatgcccatgcctgacccgacgacgacgcccgtgaccgtgccacccgccttcacgaatccggtcgccgcgccgaacaccatgccggggacggcggtgacgaacccggcgacgacgccgacgcagttccctggctcgtcgcctgtcaccaacccggtgaccacgtatccgtacccgcagcagggcggcatgccggcaacaacgccgccagcggtgtaccagcctccggcgacggcgatgcccggcacggtgcagccgggcgcgccgaccgtggcagggcaggcggcgtggtgcgtcgccaagtcggggctcatggacaccgccctccaggacgggatcgactacgcgtgcggcgtcggcggggccgactgctcggccatccagcccatgggcgcctgctacaaccccaacacgctgcaggcccacgcctcctacgccttcaacagctacttccagcgcaacccgtcggcggcgagctgcgacttcggcggcgccggcatgctcgtcaatgtcaacccaagctcaggaacttgcgtgtaccagacaccagcaggtttcggcgccggttacagcccggggacgacgggcgtcggtgtgcctagcggttacactccggggatgtcgggcgccgtgggagggggctccggctccacggtgctgaacgccaacgaccccgggggtaactccatgtacgacgacggctacgacaacccgacggggctcaccgccggctcggcgtcgctgtcctgcggcggccgggtcgtcgtgtgcctcatctggatggtcacctttgcatttgtcagggagaaaatgttgtagagcccacctcgagctgctggaaggaaataggatcacactgctgtcacatgtttgtttgttaatcagttgtgtcgtgctgtacatatacgatcgagtgagtttctcatatgcgagatgagatgacgagtacatgttttttatgtcggttgtacaggagtggattcaaagatgaaaatgggattggagcaattc

SEQ ID NO: 917 - DNA, 1665 bp, Sorghum bicolor
atggcggcggagggcgggtcgaacctggcggtgctggacgcgctggactcggcgcgcacccagatgtaccacatgaaggccatcgtcatcgccggcatgggcttcttcaccgacgcctacgacctcttctgcatcaccaccgtctccaagctgctcggccgcatctactacccgaatgacaacctgtacctagacaagcccaagcctggcaccctacccgtgtccaccaacaacctggtcaccggcgtcgcgctcgtcggcacgctcatgggccagctcgtcttcggctacttcggcgacaagctggggcggaagcgcgtgtacggcatcacgctcgtgctcatggccgcctgcgccatcggctcgggcctctcgttcggcagcacgcggcacgccgtcatcggcacgctctgcttcttccgcttctggctcggcttcggcatcggcggggactacccgctgtccgcgaccatcatgtccgagtactccaacaagaagacgcggggcgccttcatcgccgccgtgttcgcgatgcagggcgtcggcatcatcttcgcggggctcgtgtccatggtcatctcggggatcctcctgcgctacaacccggcgccgtcgtggacagaggaccacgacagctcgttgggtgaccagttgccggcggcggactacatgtggcgcatcgtgctcatgctcggcgcgttcccggcgctggccaccttctactggcggatgaagatgcccgagacggcgaggtacacggcgctcatcgagggcaacgccaagcaggcggccaacgacatgcagaaggtgatggacgtggagatccagtcggagcaggacaagctcgccaggtacaaggcggccaacgactacccgctgctgtcgagggagttcgcacagcgccacggcctgcacctcatcggcacggccaccacgtggttccttctggacatagccttctacagccagaacctcacccagaaggacatcttcccggcgatcaagctgacgagccccgccggtgacataaacccactcaaggaggtgttcgagatttcaaaggccatgttcctcgtcgcactcctcggcaccttccccggctactgggtcaccgtcgccctcatcgacaaaatgggcaggtacctgatccagctcatcggtttcttcatgatgtccgtgttcatgctattgatgggcatcatgtacgatgatctcaagaacaaatacaccacgctcttcgccctcttctacgcgctcaccttcttcttcgccaacttcgggcccaacagcaccaccttcgtgctgccggccgagctgttcccgacacgcgtgcgctccacctgccacgccatcagcgccgcgtcaggcaaggccggcgccatcgtcgcggccttcggggtgcagagcctcacgctcaagggcgacatcgcgtccatcaagaaggcgctcatcatcctcgccgtcaccaacatgctcggcttcttcttcaccttcctcgtcccggagaccatggggcggtcgctcgaggagatctccggggaggacggcaacgccggaaacggtcccggtgttcccgccggcgcggccatgggcgctgcggacgtgagcaaggatgacaagatacctgtttccagtactgagtggcagagctccatgcaagcgtga

SEQ ID NO: 918 - DNA, 1704 bp, Sorghum bicolor
atgaagaactcggtgacggagcggagcttcctcatggagagcgacgaggaggaggacgatgccgccgccgtggaggacgggaagcggcggggccatgggcatggtggcggcgacgagtcaggggacgacgacgacgacgggtcggactcctcgtcgccgtgcgacagcccgcgggtggtggcggcgcggtgcagccagccgagttcgtacacgcagcaatggccgcagagctacaggcaatccattgacatgtacagcagtgtgcactcacccaacctgagcttcttgggcacgccatcactgagccgcttgtccaactcgttcctgacaaactcattccgggggaagccacctgagatcatctccagcttaatcaagccattactgccaacaagcattgcttccgccagcgatgaccagcagcatcagcagcatgaggatgtctggaagagctcccattacctgccaccatcgcggaaggcatcatcactgcagaggatccctgaggaccagagacctatggttgggggccatgaggtggggccctatcggcagtgctcctatacccaaggggtcatgaacggagtgaatgtcttatgtggtgtggggatcctgtcaacaccttatgctgtcaagcaaggtggctggcttggactagtgatactggcagtgttgggtgcactggcatggtacactggcatacttctgcggcgttgcctggacagcaaggatggcctcgagacctaccctgatattggacatgctgcctttggcactgctggccgtatcatcatctcggcatgttgtgtcgagtatttgatactagagagcgacaacttatcaaagttgttcccagatgcacacctaaccataggtggcttgactctagattcacatgtgctatttgccatcctgactgctcttatcgtcatgcctactacttggcttcgcgatctcagctgcctcagcttcatttcagctggtggagtcattgcgtctatcgtcattgtctcctgcttgttctgggtgggacttgttgatcacgttggcacagttaaggttgaagggacagcactgaaccttcctggaatccccattgccatcgggttgtatgggtactgctactcaggccatggagtgttccctaacatctactcttctctgaagaaacgcaaccaattctctgctgttctcttcacctgtattgctctgtctactgttctgttcgctggtgctgcaatcatgggatacattatgttcggtgaatctacagagtcccaattcacactgaacttacccccagatcttgtggcttccaagattgcagtctggactacggtgacgaatccaataaccaaatatgcgctaaccatgactcctctcgccctgagtttggaggaactgctaccaccaaatcagcagacatacccaaacataatgatgcttagatccgctctggtggtatcttcccttattattgctctgtccgtcccattttttggacttgtcatgtcactggttgggtcttttctcaccatgtttgtggcctatattctaccatgtgcctgctttttgtctatcctcaggagtaaagtgacctggtatcaggtagtactgtgtgtgttcatcattgccgttggactttgctgtgctggtgttggcacatactcttctctttctaagataatacaacagtaccattga

SEQ ID NO: 919 - DNA, 1096 bp, Zea mays
aagcagaggcagcgacacgatcgcgagcgcacgcacgtaagcacgttgtcggaagctcaagttagaagaagcaccagtgcctgatcgatggcggcccaggctctcctctccggccggcagctgctgggccgccccgtgcagtcggccgtctctaggtcgtcggcgaggaaggcgcccttcgtcgtcagggccagctccagccctccagccaagcaaggtgccgacaggcagctgtggttcgcgtccaagcagtccctctcctacctcgatggcacgctgcccggcgactatggcttcgacccgctgggcctctcggacccggagggcaccgggggcttcatcgagcccaagtggctggcctacggcgaggtgatcaacggccgctacgccatgctgggcgcggtgggcgccatcgccccggagatcttcggcaagatgggcatcatcccgccggagaccgcgctgccgtggttcaagacgggcgtcatcccgcccgcgggcacctacaactactgggccgactcctacacgctcttcgtcttcaacatggcgctcatgggcttcgccgagcaccgccgcctccaggactggtacaacccgggctccatgggcaagcagtacttcctcggcctcgagaagttcctcgccggctccggcgacccgtcctaccccggcgggcccctcttcaacccgctcggcttcggcaagaccgagaaggagatgaatgagctcaagctcaaggagatcaagaacggcaggctcgccatgctcgccatcctcggttacttcatccaggggctcgtcaccggcgttggcccgttccagaacctgctcgaccacctcgccgaccccgtcaacaacaacgtgctcaccagcctcaagttccactagaacgttggtgcatcagcatacctgctgccgccgccgccagttgtttgctgtggaaagctagatgcatgcgtgttgtaaaggaacctgaagcgttgcatcggtcatgattcatgcatggccagcctgctgcctgtaacaacaaactagtattgatcttattgagaccggaaactgtattgcacatggttaaaaaaaaaaaaaaaaa

SEQ ID NO: 920 - DNA, 1351 bp, Zea mays
cccagagctaccacccctcttatccccacccctcctcctcctaccttttctccttcagacctcaaaatctgtgtgataggaacaagagcatgcacatccgagaagaggaggctacaccatccacagtaacaggcatcatgtcgaccctgacttcggcggggcagcagaagctgaaggagcccatatcccctggtggcggctccgcgtcggtcgctgggtccgctgcggagaggaacaacggcggcaggggcaagggcaagactgagatcaagcgcatcgagaacacgaccaacaggcaggtcaccttctgcaagcgccgcaacggcctcctcaagaaggcgtacgagctctccgtgctctgcgacgccgaggtcgcgctcatcgtcttctccagccgcggccgcctctacgagtacgccaacaacagcgtgaagggcaccattgagaggtacaagaaggcaaccagtgacaactccagcgcagctggtacgattgcagaggtcaccattcagcattacaagcaggaatctgctaggctgaggcagcagatcgttaacttgcagaactccaacagggccctgataggtgattctatcacaaccatgagccacaaggaacttaagcacttggagactaggttagacaaagctctcggaaagattagagcaaaaaagaacgatgtgctgtgttctgaagtcgagtacatgcagagaagggaaatggagttgcagaatgacaacttgtacttaaggagccgggttgatgagaatgaaagggcacaacagacagcgaacatgatgggggcaccatcgacaagtgagtatcagcagcacggttttactccttatgatccaataaggagcttcctgcagttcaacatcgtgcagcagcctcagttctattctcagcaggaggaccggaaagacttcaacgaccaaggtggaagataaatattggacctctcaagcttcagtacttatccgtgatgatgcatgacgtactgccagtgagaaactgagctacattactgtggaattatatgtaaagactagtactactgcttcatatgtgcatggcacacgcgcacgtagtatgcacaatttcatcccactattatggcttggcaccaactatgtctccttaattatcataggagaaaaataagtcacgcacaaaaaaattctaaagatgaggcgcagtgttggatgactgaaactgaaagataggattctcgtggatggcggtggtcatatacggcctgttttggttgatgtacccgagcgcacccgcggaatcttaaagcaagttgtgtttaattgactgcactttatatacgggttgaacagatgta

SEQ ID NO: 921 - DNA, 2759 bp, Zea mays
cgtccgtttctcttctcctgtgtctatctccacctctcctccacccgggcgatctgctctttggacttcagcggtttagcccaaacccttcttcctcctcggtgcactccaatgcgtcgcattccgtccttctaatcccgacgcattctctcgttgcagaccccatcgttctatctctccgtcgtcatctatctgtgctccccacctcccgctcccttttcgttgcgcctcggggccgctgcgctggtgatttgcgtcgcctccccccctggggttaatgtgacggccctgccgacgatcttgcctgacgactagtttcttctctagctgggctactctccattcagtggttatggagcctcccaggaagaataagtccagtggcatgcaagtcaaggaggaagtgaagttagaagatggaaatgatttgttagtcaagcgcaggaggactgaacttccaggttccattgttcaactacaacagaaaattgaagtatttgacatggagaacaaagtgccagatggtctttcagttgaagattctactggcaaggatcccatggatgtgctcactagatatgcagcacagaactctggtcaagggaatagttgcagtaacgaacctgcaatctcgagactgacaaaaatatgcaaggcaattggctggaaagaaccatcatatgactttgaagaacaaggacctccgcataacagaatgacaacacagttccacttgttggaccctcactatgacgagcaccataggggacgactcatcgcagaagggcaggtgttgcccgttctgcggtccaggacccatgacaggtttctagacatgcggtacgacgacaggtacactcctctccttgagagggctggcttggacgtcgtatcgttccaggttcgccgcgggttgcccacaatcaacattgcggcgatcacagctttggtcgataggtggcggccggagactcacactttccatcttccttgcggcgagatgaccgtgacactgcgagacagccagaagcaacttggtctcagtattcgtgggcgtccagtgaccggtcaggcagcgcccggtggctggagacagagagtcgaggcctttcttggaagggaggttcccacagacacaccaggtagccacacatctggggtttctctcgcctggcttaggcagtcgttcggggagtgtccagctgcagcagatgaccagacggttagctactactgccgagcttgggtcctacacttgtttggctccgtcctttttccagacgcgacgggtgatagcgcgtcctggatgttccttccttgcctcactgattgggacatggcaggaggctacagctgggcttctgcagtgctatccttcctgtacagacaactttgtgaggcttgtcgtcggacggcaaagaacgcaagtttaggcggttgcgtgtacctactccagttgtggatgtggtcgcacctaccggttggtcgccctattgagtttgctcctcgaccttggttcgacgtcgtcggcttgcgactacgaccgacggcggcttaccgttgggaccaggtccaggctccgttcgcacgtcaccagcgcgcctacgtcgagtactcaaacgagctggacgcacttacaccgtcgatggttagctggcaaccatatgatgagccaccgttgccacacattcagttgagctccgcgtgcacgacagatgaagacatttatttattaaggtgtccactgatttgtttctatgccgttgagtaccacttgcctcatagagtagcacgccagttcggtctacgtcaggagttccctgtggagcccttctcgacatcggtagaactccacaagttcgaccgccaaaagcagaagaagatcactgactttgaggcgcaccaccaagtgtacattgacgaatgggaccaaatgcatgacctcctctaccagagcgatcagtcccacaccaactacaactttcgcgagtacatctcttggtatgtcggtgtaactcggtgcaagttgaagggccagtggacatcagcggactacgccgaactagagtcttcagatgacgaagacacatcctatgacctagttactcggcatgggacacacgtggaggctgcaccaatcctagatagagtgggcaactccatgatgcagtctgtggtcgacatcgagcatttctctaagaccacttctgacgacaggacacttgcctttctctcaaggctatcacgtcgcctacgttgtgctgctgctcgttgtggttgcaggattagcgccgtagttaacatacaacatactctgcagcaccatggtgacacctcgctaggacttggagctatcaccgttgcacagggctcgtcacgtacgacacgagatgcgtttgcgagccacaaggaggacgaggatgacattaagattcctctcgacaagattggaccataggatgctcctaagacaaccttcacagcctataccacgcagacgatggcgacgatcgcgcaaccctaacaccccaggcatcaacgctcttggggccaagggcaacggtaactagaaggatgcgagggaaacatgatggtgcatgtcttctgctttggcttttttgtgctatggactatggatgacgatatagactttctgcgttgtacactttggttgatgatatagattatctgtggtatgcactttgtttgatctagttgtgtgatgcgctatttagagatatatatgctcatatcatatt

SEQ ID NO: 922 - DNA, 2095 bp, Zea mays
catcgccaccgtctcgttgctggcgcccggcgccgctgcctacccgtggccagtttgtgggacgagcaacgacttcgagcccaacagcacataccaggccaacctcaacctcctcgccgccatgctgcccaacaacgtgtccgcatccccggtcctctacgccaccgccgtcgtcggcgccgtcccggagcaggtctggggcatgggactctgccgcggcgacgccaacgccagcagctgcctcgcctgcctcacccaggcgttccaggacctgcccaacgactgctcctacaacaaggacgccgccatctactacgacccctgcaccctccactactccgacgtccacaccctcgccgacgacgacaccggcccgacgaccatgtcgtacaacatcaacaacaacgccaacgtcacctcggacccggcccggttcgagcgcctcctcgccgccctcgtcaacgccaccgccgagcacgccgcgtccaactccacccggcgattcgccacgggggaggccgacgccgacttcgaccggcagttccccaaggtgtacgcgctggcgcagtgcacgccggaccagacgccggcgcagtgccgcaagtgcctcgccggcctcatatcgcagtcgctggacgggttccagaacaacatcggaggcagggtgctctgggtcaactgcacctggcggtacgagacctcgcccttcttcaatggaccggccatggtgcgcctggcatcgtcgtcgagccctccggcagcggcagcggcaggtggaggggagaggaagtacagcgtgttcatcgtggttcttgcagttgtgctgcccactctagctgccctgaatcttgtgttttgcttctgtttctggcggcggccagcaccacaggcaaagcagtcacagcccatgtattccaccgaagcagaggacgtggaaacggtggactccatgatgatcgacgtctccgccctgcgagccgcaacagggaatttcgacgagagcaacaagctcggcgaaggcgggtttggcgcggtgtacaagggcgtcctcccggacggcgacgagatagcggtgaagcgtctgtcgaagagctcgacgcagggagtggaggagctgaagaacgagctcgcgctggtcgccaggctgaggcacaggaacctcgtcaggctcgtcggcgtgtgcctggagcagcaagaacggctgctcgtctacgagtttgtccccaaccggagcctcgacctggtactcttcggtaccgacacgcgtgagccgctcagctgggagcagaggtacaggatcataaacggcatcgctcgaggcctgcagtacctccacgaggactcccagctcaaggtagtccaccgtgatctcaaggccagcaacatcctgctagacgtggagatgaaccccaagatctcagatttcggcctcgcgaggatcttcggccgggaccagacgcaggccgtcaccagccgcgttgtcggaacctatgggtacctagcaccagaatacctgatgcgcgggaactactccgtgaaatcggacgccttcagcttcggcgtcatggtgctggagatcgtcaccgggaggaagaacaacggcagctcccacaagtccggagacctcttgaccaccgtatgggagcactgggaggccgggacggtggcggagctggtggacccgtccctgggcggaagcttcccggagggcgacgtgctgaggtgcatccacatcggtctgctctgcgtccagggggaccccgctgcccgcccggtgatgtcgtccgtcgtgacgatgcttggaaccgacacggtcaccctccaggctccatccaagccgggattcttcgccagaaagagtggcactagcacgaccgtgtccgctgatgatgggtcgatttagagattgccactagagtacagagttgccagaaagagtagctcctttttttaacgatagccatctctatcgctaataagatcctgcgttttattagtatgggaggcatgggattattgaaggtctccttgactctaaagaaaatgtcttaggacagacttgagcctaaacgtctttgttcaaccaaaactttct

SEQ ID NO: 923 - DNA, 1542 bp, 938
atggaagccgacatcgcttcgaggtatgagatccctcggaccgctcagttccttcgcgactgcgcctacaacagggtcgcgctccagttccccgacgagatgctcaaggacgccgcggcggtggcgagggcgctgcggcgggagcttgcctccggcggggccggtggtggggtcagggtgttcgtgatggccgacacggcgtacaactcctgctgcgtcgacgaggtgggcgcgtcccacatcgatgcgcagtgcgtcgtccattacggccacgcctgcatgagcccaacatcaaatttgccagcttactttgtattcgggaaggcacagttggatatccacgcatgtgccagcacattgcttgagtgctcaagaacaagcaataagcgcattctggttttatatggactagagtacgcatatgcattggatgatcttagacaagctttcatggagtcatgcaaatcaaattcttgcaatcctgaagtccagtatgcagaagttctgtgttcagttatgagtccatcatcaagtactacagaagaaaacacaattcctcagtcgagtggcacctcttgtaacagagatatcacaagaaacagcgatgtagcaacattcctggacaatcattatggcatgaaatgttccagttctacacaaaagtacagccttggtggcattacatgggatatttcagttgatgaaaaaatggaggactatttgatattttggattggacaagataactcagcatttgccaacatagtccttaccttcaataaatgtgaaatagttagatatgacgcaatagaaaatcaactcacagctgacatctctcatctgatgaaaattcttaggcgaagatattaccttgtggagaaggcgaaggatgcaaatattattggcattttggtgggaactctgggtgctgctggttatcttcatataatcgaacaaatgaaagaactgatcaaggctgctggaaagaaatcttatacattggtcatgggcaggcctaattctgcaaaacttgcgaattttccagagtgcgaagtttttatttatgtttcttgtgcccaaaccgctctgctggatagcaaggattttttagctccagttattacaccttttgaagctgtactagcttttagcaggggaagagagtggactggagaatatcttttggatttcaaggatttgatcactttagagaaacaagaagttgtgagcacaacagaagaagcacgtttttcttttatcaaaggtgtctatgtggaagataattgcccccaagaaaatgaggagcaatcagaaacatcgctcgcactggctgaggtaacagaaaaggcactaagcatccaaaaccagcacaacgacgctgtcctttacaaaggaggagcaatgtcctcaatcgactacctcaaggcacgttcataccgtggtctaactggagaatatgaaggtccagtgcctaattcaatcttggtaggcagaaccggcagggcggctggttacagtgatgagaaaaccgagaacgcacaa

SEQ ID NO: 924 - DNA, 1428 bp, 939
atggccgccgccaccattcgcagccctacccgcgccgccgccgcaggaggacccgccgcggcgccgacgcagcagcgatcggtgctgcgggtggcgtcgtccgccgcgtcggcttcctcgtcgtccgcccgcacgcggaggggtgcggccgcaatgcagccggccaaggcggtggccgcggaggcggcgtcccccgcggtggagatggggaacggcgcggcggtcgcggggatgcagaggcccgacgccatggggaggttcgggaagttcggcgggaagtatgtccccgagacgctcatgcacgcgctcaccgagctcgagaacgccttccacgcgctcgccaccgacgaagagttccagaaagaacttgacggtattctcaaggactatgttggacgtgagagccccctctattttgcggagcgcctgacggagcactacaagcgcgccgatggcacaggcccgctcatctacctcaagagggaggaccttaaccacaccggtgcccacaagatcaacaatgccgtggcgcaggccttgctcgccaagcgacttgggaagcagcgcatcattgctgagacaggggctggtcagcacggtgtcgccactgccaccgtgtgcgcccgttttgggctgcagtgcatcatctacatgggtgcgcaagatatggagaggcaggcgctcaatgttttccggatgaggcttcttggtgcagaggtcagggctgtacattctgggacagcaaccctgaaggatgcaacttcagaggctatccgcgactgggtcactaatgtggagactacacactacattttgggctctgttgctggtccgcacccatacccaatgatggtgagggagttccataaggttattggcaaggagacccggaggcaggccatggacaagtggggtggaaagccggatgtgttggttgcttgcgtcggtggtggatcaaacgctatgggtttattccatgagtttgttgaggatcaagatgtgaggctgattggagtggaggcagctggtcatggtgtagacactgacaagcatgctgctactttgacaaagggcgaagttggagttctccacggatctatgagctacttgctgcaggacgatgatggacaagttattgaaccccactccatcagtgctgggctggactaccctggtgttggacccgagcacagtttcttgaaggacattggacgtgctgaatacgacagcgtgactgatcaggaggcactggatgctttcaagcgtgtctctcgtctggagggcatcatccctgccctggagacctcccatgcgctcgcctacctcgagaagctctgcccgaccctgccagacggcgtgagagtggtggtgaactgcagtggacgaggagacaaggacgtgcacaccgccagcaagtacctggacgtc

SEQ ID NO: 925 - DNA, 1473 bp, 940
atggcatctgcctgccctcttactctcagattcctcttctcctgcatcctccttcaaacaatctgctgttcaggagtatctgtggagctatcatacgattcagcacaggtcaaggcgctgtccagctcagccgtcaccgagtacagagtcacggtcaccgacaagcggcgtgcctattacgtcttccagaagccgtttgtgtgcagagacaagccatgcagatcgtcggagcctatcgccgccgccggctcatttgtcaacgaggctattgctggtgccaaacggcatgagccagaggcaaacggcgagctcgccgtggttgcggagatcgaaggggccggcgtcgtgccccacgtcaagagccgtgtggctccaagcgcggtggcaatgagtagcggccgggagaagaggctcttgggtgtcctggtcgacgtgccctcccctcggcgggagctcggcgaggcaagagccacggcgcgcgacgagttctctccggtcagcaacccggcgacgactcccgtgagcaacccagtcaccgtgccggccaccaacccgatgcccccgggcttcgtcaccgtgccatcgaccaacccgggcaacgggatcgcgaccaacccgaacctgccgccgttgtacccggagccgacgacgccgggcaccatgcccatgcctgacccgacgacgacgcccgtgaccgtgccacccgccttcacgaatccggtcgccgcgccgaacaccatgccggggacggcggtgacgaacccggcgacgacgccgacgcagttccctggctcgtcgcctgtcaccaacccggtgaccacgtatccgtacccgcagcagggcggcatgccggcaacaacgccgccagcggtgtaccagcctccggcgacggcgatgcccggcacggtgcagccgggcgcgccgaccgtggcagggcaggcggcgtggtgcgtcgccaagtcggggctcatggacaccgccctccaggacgggatcgactacgcgtgcggcgtcggcggggccgactgctcggccatccagcccatgggcgcctgctacaaccccaacacgctgcaggcccacgcctcctacgccttcaacagctacttccagcgcaacccgtcggcggcgagctgcgacttcggcggcgccggcatgctcgtcaatgtcaacccaagctcaggaacttgcgtgtaccagacaccagcaggtttcggcgccggttacagcccggggacgacgggcgtcggtgtgcctagcggttacactccggggatgtcgggcgccgtgggagggggctccggctccacggtgctgaacgccaacgaccccgggggtaactccatgtacgacgacggctacgacaacccgacggggctcaccgccggctcggcgtcgctgtcctgcggcggccgggtcgtcgtgtgcctcatctggatggtcacctttgcatttgtcagggagaaaatgttg

SEQ ID NO: 926 - DNA, 1662 bp, 941
atggcggcggagggcgggtcgaacctggcggtgctggacgcgctggactcggcgcgcacccagatgtaccacatgaaggccatcgtcatcgccggcatgggcttcttcaccgacgcctacgacctcttctgcatcaccaccgtctccaagctgctcggccgcatctactacccgaatgacaacctgtacctagacaagcccaagcctggcaccctacccgtgtccaccaacaacctggtcaccggcgtcgcgctcgtcggcacgctcatgggccagctcgtcttcggctacttcggcgacaagctggggcggaagcgcgtgtacggcatcacgctcgtgctcatggccgcctgcgccatcggctcgggcctctcgttcggcagcacgcggcacgccgtcatcggcacgctctgcttcttccgcttctggctcggcttcggcatcggcggggactacccgctgtccgcgaccatcatgtccgagtactccaacaagaagacgcggggcgccttcatcgccgccgtgttcgcgatgcagggcgtcggcatcatcttcgcggggctcgtgtccatggtcatctcggggatcctcctgcgctacaacccggcgccgtcgtggacagaggaccacgacagctcgttgggtgaccagttgccggcggcggactacatgtggcgcatcgtgctcatgctcggcgcgttcccggcgctggccaccttctactggcggatgaagatgcccgagacggcgaggtacacggcgctcatcgagggcaacgccaagcaggcggccaacgacatgcagaaggtgatggacgtggagatccagtcggagcaggacaagctcgccaggtacaaggcggccaacgactacccgctgctgtcgagggagttcgcacagcgccacggcctgcacctcatcggcacggccaccacgtggttccttctggacatagccttctacagccagaacctcacccagaaggacatcttcccggcgatcaagctgacgagccccgccggtgacataaacccactcaaggaggtgttcgagatttcaaaggccatgttcctcgtcgcactcctcggcaccttccccggctactgggtcaccgtcgccctcatcgacaaaatgggcaggtacctgatccagctcatcggtttcttcatgatgtccgtgttcatgctattgatgggcatcatgtacgatgatctcaagaacaaatacaccacgctcttcgccctcttctacgcgctcaccttcttcttcgccaacttcgggcccaacagcaccaccttcgtgctgccggccgagctgttcccgacacgcgtgcgctccacctgccacgccatcagcgccgcgtcaggcaaggccggcgccatcgtcgcggccttcggggtgcagagcctcacgctcaagggcgacatcgcgtccatcaagaaggcgctcatcatcctcgccgtcaccaacatgctcggcttcttcttcaccttcctcgtcccggagaccatggggcggtcgctcgaggagatctccggggaggacggcaacgccggaaacggtcccggtgttcccgccggcgcggccatgggcgctgcggacgtgagcaaggatgacaagatacctgtttccagtactgagtggcagagctccatgcaagcg

SEQ ID NO: 927 - DNA, 1701 bp, 942
atgaagaactcggtgacggagcggagcttcctcatggagagcgacgaggaggaggacgatgccgccgccgtggaggacgggaagcggcggggccatgggcatggtggcggcgacgagtcaggggacgacgacgacgacgggtcggactcctcgtcgccgtgcgacagcccgcgggtggtggcggcgcggtgcagccagccgagttcgtacacgcagcaatggccgcagagctacaggcaatccattgacatgtacagcagtgtgcactcacccaacctgagcttcttgggcacgccatcactgagccgcttgtccaactcgttcctgacaaactcattccgggggaagccacctgagatcatctccagcttaatcaagccattactgccaacaagcattgcttccgccagcgatgaccagcagcatcagcagcatgaggatgtctggaagagctcccattacctgccaccatcgcggaaggcatcatcactgcagaggatccctgaggaccagagacctatggttgggggccatgaggtggggccctatcggcagtgctcctatacccaaggggtcatgaacggagtgaatgtcttatgtggtgtggggatcctgtcaacaccttatgctgtcaagcaaggtggctggcttggactagtgatactggcagtgttgggtgcactggcatggtacactggcatacttctgcggcgttgcctggacagcaaggatggcctcgagacctaccctgatattggacatgctgcctttggcactgctggccgtatcatcatctcggcatgttgtgtcgagtatttgatactagagagcgacaacttatcaaagttgttcccagatgcacacctaaccataggtggcttgactctagattcacatgtgctatttgccatcctgactgctcttatcgtcatgcctactacttggcttcgcgatctcagctgcctcagcttcatttcagctggtggagtcattgcgtctatcgtcattgtctcctgcttgttctgggtgggacttgttgatcacgttggcacagttaaggttgaagggacagcactgaaccttcctggaatccccattgccatcgggttgtatgggtactgctactcaggccatggagtgttccctaacatctactcttctctgaagaaacgcaaccaattctctgctgttctcttcacctgtattgctctgtctactgttctgttcgctggtgctgcaatcatgggatacattatgttcggtgaatctacagagtcccaattcacactgaacttacccccagatcttgtggcttccaagattgcagtctggactacggtgacgaatccaataaccaaatatgcgctaaccatgactcctctcgccctgagtttggaggaactgctaccaccaaatcagcagacatacccaaacataatgatgcttagatccgctctggtggtatcttcccttattattgctctgtccgtcccattttttggacttgtcatgtcactggttgggtcttttctcaccatgtttgtggcctatattctaccatgtgcctgctttttgtctatcctcaggagtaaagtgacctggtatcaggtagtactgtgtgtgttcatcattgccgttggactttgctgtgctggtgttggcacatactcttctctttctaagataatacaacagtaccat

SEQ ID NO: 928 - DNA, 801 bp, 943
atggcggcccaggctctcctctccggccggcagctgctgggccgccccgtgcagtcggccgtctctaggtcgtcggcgaggaaggcgcccttcgtcgtcagggccagctccagccctccagccaagcaaggtgccgacaggcagctgtggttcgcgtccaagcagtccctctcctacctcgatggcacgctgcccggcgactatggcttcgacccgctgggcctctcggacccggagggcaccgggggcttcatcgagcccaagtggctggcctacggcgaggtgatcaacggccgctacgccatgctgggcgcggtgggcgccatcgccccggagatcttcggcaagatgggcatcatcccgccggagaccgcgctgccgtggttcaagacgggcgtcatcccgcccgcgggcacctacaactactgggccgactcctacacgctcttcgtcttcaacatggcgctcatgggcttcgccgagcaccgccgcctccaggactggtacaacccgggctccatgggcaagcagtacttcctcggcctcgagaagttcctcgccggctccggcgacccgtcctaccccggcgggcccctcttcaacccgctcggcttcggcaagaccgagaaggagatgaatgagctcaagctcaaggagatcaagaacggcaggctcgccatgctcgccatcctcggttacttcatccaggggctcgtcaccggcgttggcccgttccagaacctgctcgaccacctcgccgaccccgtcaacaacaacgtgctcaccagcctcaagttccac

SEQ ID NO: 929 - DNA, 858 bp, 944
atgcacatccgagaagaggaggctacaccatccacagtaacaggcatcatgtcgaccctgacttcggcggggcagcagaagctgaaggagcccatatcccctggtggcggctccgcgtcggtcgctgggtccgctgcggagaggaacaacggcggcaggggcaagggcaagactgagatcaagcgcatcgagaacacgaccaacaggcaggtcaccttctgcaagcgccgcaacggcctcctcaagaaggcgtacgagctctccgtgctctgcgacgccgaggtcgcgctcatcgtcttctccagccgcggccgcctctacgagtacgccaacaacagcgtgaagggcaccattgagaggtacaagaaggcaaccagtgacaactccagcgcagctggtacgattgcagaggtcaccattcagcattacaagcaggaatctgctaggctgaggcagcagatcgttaacttgcagaactccaacagggccctgataggtgattctatcacaaccatgagccacaaggaacttaagcacttggagactaggttagacaaagctctcggaaagattagagcaaaaaagaacgatgtgctgtgttctgaagtcgagtacatgcagagaagggaaatggagttgcagaatgacaacttgtacttaaggagccgggttgatgagaatgaaagggcacaacagacagcgaacatgatgggggcaccatcgacaagtgagtatcagcagcacggttttactccttatgatccaataaggagcttcctgcagttcaacatcgtgcagcagcctcagttctattctcagcaggaggaccggaaagacttcaacgaccaaggtggaaga

SEQ ID NO: 930 - DNA, 2103 bp, 945
atggagcctcccaggaagaataagtccagtggcatgcaagtcaaggaggaagtgaagttagaagatggaaatgatttgttagtcaagcgcaggaggactgaacttccaggttccattgttcaactacaacagaaaattgaagtatttgacatggagaacaaagtgccagatggtctttcagttgaagattctactggcaaggatcccatggatgtgctcactagatatgcagcacagaactctggtcaagggaatagttgcagtaacgaacctgcaatctcgagactgacaaaaatatgcaaggcaattggctggaaagaaccatcatatgactttgaagaacaaggacctccgcataacagaatgacaacacagttccacttgttggaccctcactatgacgagcaccataggggacgactcatcgcagaagggcaggtgttgcccgttctgcggtccaggacccatgacaggtttctagacatgcggtacgacgacaggtacactcctctccttgagagggctggcttggacgtcgtatcgttccaggttcgccgcgggttgcccacaatcaacattgcggcgatcacagctttggtcgataggtggcggccggagactcacactttccatcttccttgcggcgagatgaccgtgacactgcgagacagccagaagcaacttggtctcagtattcgtgggcgtccagtgaccggtcaggcagcgcccggtggctggagacagagagtcgaggcctttcttggaagggaggttcccacagacacaccaggtagccacacatctggggtttctctcgcctggcttaggcagtcgttcggggagtgtccagctgcagcagatgaccagacggttagctactactgccgagcttgggtcctacacttgtttggctccgtcctttttccagacgcgacgggtgatagcgcgtcctggatgttccttccttgcctcactgattgggacatggcaggaggctacagctgggcttctgcagtgctatccttcctgtacagacaactttgtgaggcttgtcgtcggacggcaaagaacgcaagtttaggcggttgcgtgtacctactccagttgtggatgtggtcgcacctaccggttggtcgccctattgagtttgctcctcgaccttggttcgacgtcgtcggcttgcgactacgaccgacggcggcttaccgttgggaccaggtccaggctccgttcgcacgtcaccagcgcgcctacgtcgagtactcaaacgagctggacgcacttacaccgtcgatggttagctggcaaccatatgatgagccaccgttgccacacattcagttgagctccgcgtgcacgacagatgaagacatttatttattaaggtgtccactgatttgtttctatgccgttgagtaccacttgcctcatagagtagcacgccagttcggtctacgtcaggagttccctgtggagcccttctcgacatcggtagaactccacaagttcgaccgccaaaagcagaagaagatcactgactttgaggcgcaccaccaagtgtacattgacgaatgggaccaaatgcatgacctcctctaccagagcgatcagtcccacaccaactacaactttcgcgagtacatctcttggtatgtcggtgtaactcggtgcaagttgaagggccagtggacatcagcggactacgccgaactagagtcttcagatgacgaagacacatcctatgacctagttactcggcatgggacacacgtggaggctgcaccaatcctagatagagtgggcaactccatgatgcagtctgtggtcgacatcgagcatttctctaagaccacttctgacgacaggacacttgcctttctctcaaggctatcacgtcgcctacgttgtgctgctgctcgttgtggttgcaggattagcgccgtagttaacatacaacatactctgcagcaccatggtgacacctcgctaggacttggagctatcaccgttgcacagggctcgtcacgtacgacacgagatgcgtttgcgagccacaaggaggacgaggatgacattaagattcctctcgacaagattggacca

SEQ ID NO: 931 - DNA, 1779 bp, 946
atgctgcccaacaacgtgtccgcatccccggtcctctacgccaccgccgtcgtcggcgccgtcccggagcaggtctggggcatgggactctgccgcggcgacgccaacgccagcagctgcctcgcctgcctcacccaggcgttccaggacctgcccaacgactgctcctacaacaaggacgccgccatctactacgacccctgcaccctccactactccgacgtccacaccctcgccgacgacgacaccggcccgacgaccatgtcgtacaacatcaacaacaacgccaacgtcacctcggacccggcccggttcgagcgcctcctcgccgccctcgtcaacgccaccgccgagcacgccgcgtccaactccacccggcgattcgccacgggggaggccgacgccgacttcgaccggcagttccccaaggtgtacgcgctggcgcagtgcacgccggaccagacgccggcgcagtgccgcaagtgcctcgccggcctcatatcgcagtcgctggacgggttccagaacaacatcggaggcagggtgctctgggtcaactgcacctggcggtacgagacctcgcccttcttcaatggaccggccatggtgcgcctggcatcgtcgtcgagccctccggcagcggcagcggcaggtggaggggagaggaagtacagcgtgttcatcgtggttcttgcagttgtgctgcccactctagctgccctgaatcttgtgttttgcttctgtttctggcggcggccagcaccacaggcaaagcagtcacagcccatgtattccaccgaagcagaggacgtggaaacggtggactccatgatgatcgacgtctccgccctgcgagccgcaacagggaatttcgacgagagcaacaagctcggcgaaggcgggtttggcgcggtgtacaagggcgtcctcccggacggcgacgagatagcggtgaagcgtctgtcgaagagctcgacgcagggagtggaggagctgaagaacgagctcgcgctggtcgccaggctgaggcacaggaacctcgtcaggctcgtcggcgtgtgcctggagcagcaagaacggctgctcgtctacgagtttgtccccaaccggagcctcgacctggtactcttcggtaccgacacgcgtgagccgctcagctgggagcagaggtacaggatcataaacggcatcgctcgaggcctgcagtacctccacgaggactcccagctcaaggtagtccaccgtgatctcaaggccagcaacatcctgctagacgtggagatgaaccccaagatctcagatttcggcctcgcgaggatcttcggccgggaccagacgcaggccgtcaccagccgcgttgtcggaacctatgggtacctagcaccagaatacctgatgcgcgggaactactccgtgaaatcggacgccttcagcttcggcgtcatggtgctggagatcgtcaccgggaggaagaacaacggcagctcccacaagtccggagacctcttgaccaccgtatgggagcactgggaggccgggacggtggcggagctggtggacccgtccctgggcggaagcttcccggagggcgacgtgctgaggtgcatccacatcggtctgctctgcgtccagggggaccccgctgcccgcccggtgatgtcgtccgtcgtgacgatgcttggaaccgacacggtcaccctccaggctccatccaagccgggattcttcgccagaaagagtggcactagcacgaccgtgtccgctgatgatgggtcgatt

SEQ ID NO: 932 - DNA, 1542 bp, Artificial sequence
  Mir resistant mutated nucleotide sequence
atggaagccgacatcgcttcgaggtatgagatccctcggaccgctcagttccttcgcgactgcgcctacaacagggtcgcgctccagttccccgacgagatgctcaaggacgccgcggcggtggcgagggcgctgcggcgggagcttgcctccggcggggccggtggtggggtcagggtgttcgtgatggccgacacggcgtacaactcctgctgcgtcgacgaggtgggcgcgtcccacatcgatgcgcagtgcgtcgtccattacggccacgcctgcatgtcacccaccagcaacctacccgcttactttgtattcgggaaggcacagttggatatccacgcatgtgccagcacattgcttgagtgctcaagaacaagcaataagcgcattctggttttatatggactagagtacgcatatgcattggatgatcttagacaagctttcatggagtcatgcaaatcaaattcttgcaatcctgaagtccagtatgcagaagttctgtgttcagttatgagtccatcatcaagtactacagaagaaaacacaattcctcagtcgagtggcacctcttgtaacagagatatcacaagaaacagcgatgtagcaacattcctggacaatcattatggcatgaaatgttccagttctacacaaaagtacagccttggtggcattacatgggatatttcagttgatgaaaaaatggaggactatttgatattttggattggacaagataactcagcatttgccaacatagtccttaccttcaataaatgtgaaatagttagatatgacgcaatagaaaatcaactcacagctgacatctctcatctgatgaaaattcttaggcgaagatattaccttgtggagaaggcgaaggatgcaaatattattggcattttggtgggaactctgggtgctgctggttatcttcatataatcgaacaaatgaaagaactgatcaaggctgctggaaagaaatcttatacattggtcatgggcaggcctaattctgcaaaacttgcgaattttccagagtgcgaagtttttatttatgtttcttgtgcccaaaccgctctgctggatagcaaggattttttagctccagttattacaccttttgaagctgtactagcttttagcaggggaagagagtggactggagaatatcttttggatttcaaggatttgatcactttagagaaacaagaagttgtgagcacaacagaagaagcacgtttttcttttatcaaaggtgtctatgtggaagataattgcccccaagaaaatgaggagcaatcagaaacatcgctcgcactggctgaggtaacagaaaaggcactaagcatccaaaaccagcacaacgacgctgtcctttacaaaggaggagcaatgtcctcaatcgactacctcaaggcacgttcataccgtggtctaactggagaatatgaaggtccagtgcctaattcaatcttggtaggcagaaccggcagggcggctggttacagtgatgagaaaaccgagaacgcacaa

SEQ ID NO: 933 - DNA, 1542 bp, Artificial sequence
  Mir resistant mutated nucleotide sequence
atggaagccgacatcgcttcgaggtatgagatccctcggaccgctcagttccttcgcgactgcgcctacaacagggtcgcgctccagttccccgacgagatgctcaaggacgccgcggcggtggcgagggcgctgcggcgggagcttgcctccggcggggccggtggtggggtcagggtgttcgtgatggccgacacggcgtacaactcctgctgcgtcgacgaggtgggcgcgtcccacatcgatgcgcagtgcgtcgtccattacggccacgcctgcatgagccccaccagcaacctacccgcttactttgtattcgggaaggcacagttggatatccacgcatgtgccagcacattgcttgagtgctcaagaacaagcaataagcgcattctggttttatatggactagagtacgcatatgcattggatgatcttagacaagctttcatggagtcatgcaaatcaaattcttgcaatcctgaagtccagtatgcagaagttctgtgttcagttatgagtccatcatcaagtactacagaagaaaacacaattcctcagtcgagtggcacctcttgtaacagagatatcacaagaaacagcgatgtagcaacattcctggacaatcattatggcatgaaatgttccagttctacacaaaagtacagccttggtggcattacatgggatatttcagttgatgaaaaaatggaggactatttgatattttggattggacaagataactcagcatttgccaacatagtccttaccttcaataaatgtgaaatagttagatatgacgcaatagaaaatcaactcacagctgacatctctcatctgatgaaaattcttaggcgaagatattaccttgtggagaaggcgaaggatgcaaatattattggcattttggtgggaactctgggtgctgctggttatcttcatataatcgaacaaatgaaagaactgatcaaggctgctggaaagaaatcttatacattggtcatgggcaggcctaattctgcaaaacttgcgaattttccagagtgcgaagtttttatttatgtttcttgtgcccaaaccgctctgctggatagcaaggattttttagctccagttattacaccttttgaagctgtactagcttttagcaggggaagagagtggactggagaatatcttttggatttcaaggatttgatcactttagagaaacaagaagttgtgagcacaacagaagaagcacgtttttcttttatcaaaggtgtctatgtggaagataattgcccccaagaaaatgaggagcaatcagaaacatcgctcgcactggctgaggtaacagaaaaggcactaagcatccaaaaccagcacaacgacgctgtcctttacaaaggaggagcaatgtcctcaatcgactacctcaaggcacgttcataccgtggtctaactggagaatatgaaggtccagtgcctaattcaatcttggtaggcagaaccggcagggcggctggttacagtgatgagaaaaccgagaacgcacaa

SEQ ID NO: 934 - DNA, 1542 bp, Artificial sequence; identical to SEQ ID NO: 933
  Mir resistant mutated nucleotide sequence

SEQ ID NO: 935 - DNA, 1542 bp, Artificial sequence; identical to SEQ ID NO: 933
  Mir resistant mutated nucleotide sequence

SEQ ID NO: 936 - DNA, 1542 bp, Artificial sequence; identical to SEQ ID NO: 933
  Mir resistant mutated nucleotide sequence

SEQ ID NO: 937 - DNA, 1542 bp, Artificial sequence; identical to SEQ ID NO: 933
  Mir resistant mutated nucleotide sequence

SEQ ID NO: 938 - DNA, 1542 bp, Artificial sequence
  Mir resistant mutated nucleotide sequence
atggaagccgacatcgcttcgaggtatgagatccctcggaccgctcagttccttcgcgactgcgcctacaacagggtcgcgctccagttccccgacgagatgctcaaggacgccgcggcggtggcgagggcgctgcggcgggagcttgcctccggcggggccggtggtggggtcagggtgttcgtgatggccgacacggcgtacaactcctgctgcgtcgacgaggtgggcgcgtcccacatcgatgcgcagtgcgtcgtccattacggccacgcctgcatgtcaccaaccagcaacctaccagcttactttgtattcgggaaggcacagttggatatccacgcatgtgccagcacattgcttgagtgctcaagaacaagcaataagcgcattctggttttatatggactagagtacgcatatgcattggatgatcttagacaagctttcatggagtcatgcaaatcaaattcttgcaatcctgaagtccagtatgcagaagttctgtgttcagttatgagtccatcatcaagtactacagaagaaaacacaattcctcagtcgagtggcacctcttgtaacagagatatcacaagaaacagcgatgtagcaacattcctggacaatcattatggcatgaaatgttccagttctacacaaaagtacagccttggtggcattacatgggatatttcagttgatgaaaaaatggaggactatttgatattttggattggacaagataactcagcatttgccaacatagtccttaccttcaataaatgtgaaatagttagatatgacgcaatagaaaatcaactcacagctgacatctctcatctgatgaaaattcttaggcgaagatattaccttgtggagaaggcgaaggatgcaaatattattggcattttggtgggaactctgggtgctgctggttatcttcatataatcgaacaaatgaaagaactgatcaaggctgctggaaagaaatcttatacattggtcatgggcaggcctaattctgcaaaacttgcgaattttccagagtgcgaagtttttatttatgtttcttgtgcccaaaccgctctgctggatagcaaggattttttagctccagttattacaccttttgaagctgtactagcttttagcaggggaagagagtggactggagaatatcttttggatttcaaggatttgatcactttagagaaacaagaagttgtgagcacaacagaagaagcacgtttttcttttatcaaaggtgtctatgtggaagataattgcccccaagaaaatgaggagcaatcagaaacatcgctcgcactggctgaggtaacagaaaaggcactaagcatccaaaaccagcacaacgacgctgtcctttacaaaggaggagcaatgtcctcaatcgactacctcaaggcacgttcataccgtggtctaactggagaatatgaaggtccagtgcctaattcaatcttggtaggcagaaccggcagggcggctggttacagtgatgagaaaaccgagaacgcacaa

SEQ ID NO: 939 - DNA, 1542 bp, Artificial sequence; identical to SEQ ID NO: 938
  Mir resistant mutated nucleotide sequence

SEQ ID NO: 940 - DNA, 1542 bp, Artificial sequence; identical to SEQ ID NO: 938
  Mir resistant mutated nucleotide sequence

SEQ ID NO: 941 - DNA, 1542 bp, Artificial sequence; identical to SEQ ID NO: 938
  Mir resistant mutated nucleotide sequence

SEQ ID NO: 942 - DNA, 1428 bp, Artificial sequence
  Mir resistant mutated nucleotide sequence
atggccgccgccaccattcgcagccctacccgcgccgccgccgcaggaggacccgccgcggcgccgacgcagcagcgatcggtgctgcgggtggcgtcgtccgccgcgtcggcttcctcgtcgtccgcccgcacgcggaggggtgcggcagccatgcaaccagcaaaagcggtggccgcggaggcggcgtcccccgcggtggagatggggaacggcgcggcggtcgcggggatgcagaggcccgacgccatggggaggttcgggaagttcggcgggaagtatgtccccgagacgctcatgcacgcgctcaccgagctcgagaacgccttccacgcgctcgccaccgacgaagagttccagaaagaacttgacggtattctcaaggactatgttggacgtgagagccccctctattttgcggagcgcctgacggagcactacaagcgcgccgatggcacaggcccgctcatctacctcaagagggaggaccttaaccacaccggtgcccacaagatcaacaatgccgtggcgcaggccttgctcgccaagcgacttgggaagcagcgcatcattgctgagacaggggctggtcagcacggtgtcgccactgccaccgtgtgcgcccgttttgggctgcagtgcatcatctacatgggtgcgcaagatatggagaggcaggcgctcaatgttttccggatgaggcttcttggtgcagaggtcagggctgtacattctgggacagcaaccctgaaggatgcaacttcagaggctatccgcgactgggtcactaatgtggagactacacactacattttgggctctgttgctggtccgcacccatacccaatgatggtgagggagttccataaggttattggcaaggagacccggaggcaggccatggacaagtggggtggaaagccggatgtgttggttgcttgcgtcggtggtggatcaaacgctatgggtttattccatgagtttgttgaggatcaagatgtgaggctgattggagtggaggcagctggtcatggtgtagacactgacaagcatgctgctactttgacaaagggcgaagttggagttctccacggatctatgagctacttgctgcaggacgatgatggacaagttattgaaccccactccatcagtgctgggctggactaccctggtgttggacccgagcacagtttcttgaaggacattggacgtgctgaatacgacagcgtgactgatcaggaggcactggatgctttcaagcgtgtctctcgtctggagggcatcatccctgccctggagacctcccatgcgctcgcctacctcgagaagctctgcccgaccctgccagacggcgtgagagtggtggtgaactgcagtggacgaggagacaaggacgtgcacaccgccagcaagtacctggacgtc

SEQ ID NO: 943 - DNA, 1428 bp, Artificial sequence
  Mir resistant mutated nucleotide sequence
atggccgccgccaccattcgcagccctacccgcgccgccgccgcaggaggacccgccgcggcgccgacgcagcagcgatcggtgctgcgggtggcgtcgtccgccgcgtcggcttcctcgtcgtccgcccgcacgcggaggggtgcggcagcaatgcaaccagcaaaagcggtggccgcggaggcggcgtcccccgcggtggagatggggaacggcgcggcggtcgcggggatgcagaggcccgacgccatggggaggttcgggaagttcggcgggaagtatgtccccgagacgctcatgcacgcgctcaccgagctcgagaacgccttccacgcgctcgccaccgacgaagagttccagaaagaacttgacggtattctcaaggactatgttggacgtgagagccccctctattttgcggagcgcctgacggagcactacaagcgcgccgatggcacaggcccgctcatctacctcaagagggaggaccttaaccacaccggtgcccacaagatcaacaatgccgtggcgcaggccttgctcgccaagcgacttgggaagcagcgcatcattgctgagacaggggctggtcagcacggtgtcgccactgccaccgtgtgcgcccgttttgggctgcagtgcatcatctacatgggtgcgcaagatatggagaggcaggcgctcaatgttttccggatgaggcttcttggtgcagaggtcagggctgtacattctgggacagcaaccctgaaggatgcaacttcagaggctatccgcgactgggtcactaatgtggagactacacactacattttgggctctgttgctggtccgcacccatacccaatgatggtgagggagttccataaggttattggcaaggagacccggaggcaggccatggacaagtggggtggaaagccggatgtgttggttgcttgcgtcggtggtggatcaaacgctatgggtttattccatgagtttgttgaggatcaagatgtgaggctgattggagtggaggcagctggtcatggtgtagacactgacaagcatgctgctactttgacaaagggcgaagttggagttctccacggatctatgagctacttgctgcaggacgatgatggacaagttattgaaccccactccatcagtgctgggctggactaccctggtgttggacccgagcacagtttcttgaaggacattggacgtgctgaatacgacagcgtgactgatcaggaggcactggatgctttcaagcgtgtctctcgtctggagggcatcatccctgccctggagacctcccatgcgctcgcctacctcgagaagctctgcccgaccctgccagacggcgtgagagtggtggtgaactgcagtggacgaggagacaaggacgtgcacaccgccagcaagtacctggacgtc

SEQ ID NO: 944 - DNA, 1428 bp, Artificial sequence; identical to SEQ ID NO: 943
  Mir resistant mutated nucleotide sequence

SEQ ID NO: 945 - DNA, 1428 bp, Artificial sequence; identical to SEQ ID NO: 943
  Mir resistant mutated nucleotide sequence

SEQ ID NO: 946 - DNA, 1473 bp, Artificial sequence
  Mir resistant mutated nucleotide sequence
atggcatctgcctgccctcttactctcagattcctcttctcctgcatcctccttcaaacaatctgctgttcaggagtatctgtggagctatcatacgattcagcacaggtcaaggcgctgtccagctcagccgtcaccgagtacagagtcacggtcaccgacaagcggcgtgcctattacgtcttccagaagccgtttgtgtgcagagacaagccatgcagatcgtcggagcctatcgccgccgccggctcatttgtcaacgaggctattgctggtgccaaacggcatgagccagaggcaaacggcgagctcgccgtggttgcggagatcgaaggggccggcgtcgtgccccacgtcaagagccgtgtggctccaagcgcggtggcaatgagtagcggccgggagaagaggctcttgggtgtcctggtcgacgtgccctcccctcggcgggagctcggcgaggcaagagccacggcgcgcgacgagttctctccggtcagcaacccggcgacgactcccgtgagcaacccagtcaccgtgccggccaccaacccgatgcccccgggcttcgtcaccgtgccatcgaccaacccgggcaacgggatcgcgaccaacccgaacctgccgccgttgtacccggagccgacgacgccgggcaccatgcccatgcctgacccgacgacgacgcccgtgaccgtgccacccgccttcacgaatccggtcgccgcgccgaacaccatgccggggacggcggtgacgaacccggcgacgacgccgacgcagttccctggctcgtcgcctgtcaccaacccggtgaccacgtatccgtacccgcagcagggcggcatgccggcaacaacgccgccagcggtgtaccagcctccggcgacggcgatgcccggaacagtacaaccaggagcaccgaccgtggcagggcaggcggcgtggtgcgtcgccaagtcggggctcatggacaccgccctccaggacgggatcgactacgcgtgcggcgtcggcggggccgactgctcggccatccagcccatgggcgcctgctacaaccccaacacgctgcaggcccacgcctcctacgccttcaacagctacttccagcgcaacccgtcggcggcgagctgcgacttcggcggcgccggcatgctcgtcaatgtcaacccaagctcaggaacttgcgtgtaccagacaccagcaggtttcggcgccggttacagcccggggacgacgggcgtcggtgtgcctagcggttacactccggggatgtcgggcgccgtgggagggggctccggctccacggtgctgaacgccaacgaccccgggggtaactccatgtacgacgacggctacgacaacccgacggggctcaccgccggctcggcgtcgctgtcctgcggcggccgggtcgtcgtgtgcctcatctggatggtcacctttgcatttgtcagggagaaaatgttg

SEQ ID NO: 947 - DNA, 1473 bp, Artificial sequence
  Mir resistant mutated nucleotide sequence
atggcatctgcctgccctcttactctcagattcctcttctcctgcatcctccttcaaacaatctgctgttcaggagtatctgtggagctatcatacgattcagcacaggtcaaggcgctgtccagctcagccgtcaccgagtacagagtcacggtcaccgacaagcggcgtgcctattacgtcttccagaagccgtttgtgtgcagagacaagccatgcagatcgtcggagcctatcgccgccgccggctcatttgtcaacgaggctattgctggtgccaaacggcatgagccagaggcaaacggcgagctcgccgtggttgcggagatcgaaggggccggcgtcgtgccccacgtcaagagccgtgtggctccaagcgcggtggcaatgagtagcggccgggagaagaggctcttgggtgtcctggtcgacgtgccctcccctcggcgggagctcggcgaggcaagagccacggcgcgcgacgagttctctccggtcagcaacccggcgacgactcccgtgagcaacccagtcaccgtgccggccaccaacccgatgcccccgggcttcgtcaccgtgccatcgaccaacccgggcaacgggatcgcgaccaacccgaacctgccgccgttgtacccggagccgacgacgccgggcaccatgcccatgcctgacccgacgacgacgcccgtgaccgtgccacccgccttcacgaatccggtcgccgcgccgaacaccatgccggggacggcggtgacgaacccggcgacgacgccgacgcagttccctggctcgtcgcctgtcaccaacccggtgaccacgtatccgtacccgcagcagggcggcatgccggcaacaacgccgccagcggtgtaccagcctccggcgacggcgatgcccggcacagtacaaccaggcgcaccgaccgtggcagggcaggcggcgtggtgcgtcgccaagtcggggctcatggacaccgccctccaggacgggatcgactacgcgtgcggcgtcggcggggccgactgctcggccatccagcccatgggcgcctgctacaaccccaacacgctgcaggcccacgcctcctacgccttcaacagctacttccagcgcaacccgtcggcggcgagctgcgacttcggcggcgccggcatgctcgtcaatgtcaacccaagctcaggaacttgcgtgtaccagacaccagcaggtttcggcgccggttacagcccggggacgacgggcgtcggtgtgcctagcggttacactccggggatgtcgggcgccgtgggagggggctccggctccacggtgctgaacgccaacgaccccgggggtaactccatgtacgacgacggctacgacaacccgacggggctcaccgccggctcggcgtcgctgtcctgcggcggccgggtcgtcgtgtgcctcatctggatggtcacctttgcatttgtcagggagaaaatgttg

SEQ ID NO: 948 - DNA, 1473 bp, Artificial sequence; identical to SEQ ID NO: 947
  Mir resistant mutated nucleotide sequence

SEQ ID NO: 949 - DNA, 1473 bp, Artificial sequence; identical to SEQ ID NO: 947
  Mir resistant mutated nucleotide sequence

SEQ ID NO: 950 - DNA, 1473 bp, Artificial sequence
  Mir resistant mutated nucleotide sequence
atggcatctgcctgccctcttactctcagattcctcttctcctgcatcctccttcaaacaatctgctgttcaggagtatctgtggagctatcatacgattcagcacaggtcaaggcgctgtccagctcagccgtcaccgagtacagagtcacggtcaccgacaagcggcgtgcctattacgtcttccagaagccgtttgtgtgcagagacaagccatgcagatcgtcggagcctatcgccgccgccggctcatttgtcaacgaggctattgctggtgccaaacggcatgagccagaggcaaacggcgagctcgccgtggttgcggagatcgaaggggccggcgtcgtgccccacgtcaagagccgtgtggctccaagcgcggtggcaatgagtagcggccgggagaagaggctcttgggtgtcctggtcgacgtgccctcccctcggcgggagctcggcgaggcaagagccacggcgcgcgacgagttctctccggtcagcaacccggcgacgactcccgtgagcaacccagtcaccgtgccggccaccaacccgatgcccccgggcttcgtcaccgtgccatcgaccaacccgggcaacgggatcgcgaccaacccgaacctgccgccgttgtacccggagccgacgacgccgggcaccatgcccatgcctgacccgacgacgacgcccgtgaccgtgccacccgccttcacgaatccggtcgccgcgccgaacaccatgccggggacggcggtgacgaacccggcgacgacgccgacgcagttccctggctcgtcgcctgtcaccaacccggtgaccacgtatccgtacccgcagcagggcggcatgccggcaacaacgccgccagcggtgtaccagcctccggcgacggcgatgcccggaacagtgcaaccaggagcaccgaccgtggcagggcaggcggcgtggtgcgtcgccaagtcggggctcatggacaccgccctccaggacgggatcgactacgcgtgcggcgtcggcggggccgactgctcggccatccagcccatgggcgcctgctacaaccccaacacgctgcaggcccacgcctcctacgccttcaacagctacttccagcgcaacccgtcggcggcgagctgcgacttcggcggcgccggcatgctcgtcaatgtcaacccaagctcaggaacttgcgtgtaccagacaccagcaggtttcggcgccggttacagcccggggacgacgggcgtcggtgtgcctagcggttacactccggggatgtcgggcgccgtgggagggggctccggctccacggtgctgaacgccaacgaccccgggggtaactccatgtacgacgacggctacgacaacccgacggggctcaccgccggctcggcgtcgctgtcctgcggcggccgggtcgtcgtgtgcctcatctggatggtcacctttgcatttgtcagggagaaaatgttg

SEQ ID NO: 951 - DNA, 1473 bp, Artificial sequence; identical to SEQ ID NO: 950
  Mir resistant mutated nucleotide sequence

SEQ ID NO: 952 - DNA, 1473 bp, Artificial sequence; identical to SEQ ID NO: 950
  Mir resistant mutated nucleotide sequence

SEQ ID NO: 953 - DNA, 1662 bp, Artificial sequence
  Mir resistant mutated nucleotide sequence
atggcggcggagggcgggtcgaacctggcggtgctggacgcgctggactcggcgcgcacccagatgtaccacatgaaggccatcgtcatcgccggcatgggcttcttcaccgacgcctacgacctcttctgcatcaccaccgtctccaagctgctcggccgcatctactacccgaatgacaacctgtacctagacaagcccaagcctggcaccctacccgtgtccaccaacaacctggtcaccggcgtcgcgctcgtcggcacgctcatgggccagctcgtcttcggctacttcggcgacaagctggggcggaagcgcgtgtacggcatcacgctcgtgctcatggccgcctgcgccatcggctcgggcctctcgttcggcagcacgcggcacgccgtcatcggcacgctctgcttcttccgcttctggctcggcttcggcatcggcggggactacccgctgtccgcgaccatcatgtccgagtactccaacaagaagacgcggggcgccttcatcgccgccgtgttcgcgatgcagggcgtcggcatcatcttcgcggggctcgtgtccatggtcatctcggggatcctcctgcgctacaacccggcgccgtcgtggacagaggaccacgacagctcgttgggtgaccagttgccggcggcggactacatgtggcgcatcgtgctcatgctcggcgcgttcccggcgctggccaccttctactggcggatgaagatgcccgagacggcgaggtacacggcgctcatcgagggcaacgccaagcaggcggccaacgacatgcagaaggtgatggacgtggagatccagtcggagcaggacaagctcgccaggtacaaggcggccaacgactacccgctgctgtcgagggagttcgcacagcgccacggcctgcacctcatcggcacggccaccacgtggttccttctggacatagccttctacagccagaacctcacccagaaggacatcttcccggcgatcaagctgacgagccccgccggtgacataaacccactcaaggaggtgttcgagatttcaaaggccatgttcctcgtcgcactcctcggcaccttccccggctactgggtcaccgtcgccctcatcgacaaaatgggcaggtacctgatccagctcatcggtttcttcatgatgtccgtgttcatgctattgatgggcatcatgtacgatgatctcaagaacaaatacaccacgctcttcgccctcttctacgcgctcaccttcttcttcgccaacttcgggcccaacagcaccacatttgtattaccagcagaactgttcccgacacgcgtgcgctccacctgccacgccatcagcgccgcgtcaggcaaggccggcgccatcgtcgcggccttcggggtgcagagcctcacgctcaagggcgacatcgcgtccatcaagaaggcgctcatcatcctcgccgtcaccaacatgctcggcttcttcttcaccttcctcgtcccggagaccatggggcggtcgctcgaggagatctccggggaggacggcaacgccggaaacggtcccggtgttcccgccggcgcggccatgggcgctgcggacgtgagcaaggatgacaagatacctgtttccagtactgagtggcagagctccatgcaagcg

SEQ ID NO: 954 - DNA, 1662 bp, Artificial sequence
  Mir resistant mutated nucleotide sequence
atggcggcggagggcgggtcgaacctggcggtgctggacgcgctggactcggcgcgcacccagatgtaccacatgaaggccatcgtcatcgccggcatgggcttcttcaccgacgcctacgacctcttctgcatcaccaccgtctccaagctgctcggccgcatctactacccgaatgacaacctgtacctagacaagcccaagcctggcaccctacccgtgtccaccaacaacctggtcaccggcgtcgcgctcgtcggcacgctcatgggccagctcgtcttcggctacttcggcgacaagctggggcggaagcgcgtgtacggcatcacgctcgtgctcatggccgcctgcgccatcggctcgggcctctcgttcggcagcacgcggcacgccgtcatcggcacgctctgcttcttccgcttctggctcggcttcggcatcggcggggactacccgctgtccgcgaccatcatgtccgagtactccaacaagaagacgcggggcgccttcatcgccgccgtgttcgcgatgcagggcgtcggcatcatcttcgcggggctcgtgtccatggtcatctcggggatcctcctgcgctacaacccggcgccgtcgtggacagaggaccacgacagctcgttgggtgaccagttgccggcggcggactacatgtggcgcatcgtgctcatgctcggcgcgttcccggcgctggccaccttctactggcggatgaagatgcccgagacggcgaggtacacggcgctcatcgagggcaacgccaagcaggcggccaacgacatgcagaaggtgatggacgtggagatccagtcggagcaggacaagctcgccaggtacaaggcggccaacgactacccgctgctgtcgagggagttcgcacagcgccacggcctgcacctcatcggcacggccaccacgtggttccttctggacatagccttctacagccagaacctcacccagaaggacatcttcccggcgatcaagctgacgagccccgccggtgacataaacccactcaaggaggtgttcgagatttcaaaggccatgttcctcgtcgcactcctcggcaccttccccggctactgggtcaccgtcgccctcatcgacaaaatgggcaggtacctgatccagctcatcggtttcttcatgatgtccgtgttcatgctattgatgggcatcatgtacgatgatctcaagaacaaatacaccacgctcttcgccctcttctacgcgctcaccttcttcttcgccaacttcgggcccaacagcaccacctttgtattaccagcagaactgttcccgacacgcgtgcgctccacctgccacgccatcagcgccgcgtcaggcaaggccggcgccatcgtcgcggccttcggggtgcagagcctcacgctcaagggcgacatcgcgtccatcaagaaggcgctcatcatcctcgccgtcaccaacatgctcggcttcttcttcaccttcctcgtcccggagaccatggggcggtcgctcgaggagatctccggggaggacggcaacgccggaaacggtcccggtgttcccgccggcgcggccatgggcgctgcggacgtgagcaaggatgacaagatacctgtttccagtactgagtggcagagctccatgcaagcg

SEQ ID NO: 955 - DNA, 1662 bp, Artificial sequence; identical to SEQ ID NO: 954
  Mir resistant mutated nucleotide sequence

SEQ ID NO: 956 - DNA, 1662 bp, Artificial sequence; identical to SEQ ID NO: 954
  Mir resistant mutated nucleotide sequence

SEQ ID NO: 957 - DNA, 1662 bp, Artificial sequence
  Mir resistant mutated nucleotide sequence
atggcggcggagggcgggtcgaacctggcggtgctggacgcgctggactcggcgcgcacccagatgtaccacatgaaggccatcgtcatcgccggcatgggcttcttcaccgacgcctacgacctcttctgcatcaccaccgtctccaagctgctcggccgcatctactacccgaatgacaacctgtacctagacaagcccaagcctggcaccctacccgtgtccaccaacaacctggtcaccggcgtcgcgctcgtcggcacgctcatgggccagctcgtcttcggctacttcggcgacaagctggggcggaagcgcgtgtacggcatcacgctcgtgctcatggccgcctgcgccatcggctcgggcctctcgttcggcagcacgcggcacgccgtcatcggcacgctctgcttcttccgcttctggctcggcttcggcatcggcggggactacccgctgtccgcgaccatcatgtccgagtactccaacaagaagacgcggggcgccttcatcgccgccgtgttcgcgatgcagggcgtcggcatcatcttcgcggggctcgtgtccatggtcatctcggggatcctcctgcgctacaacccggcgccgtcgtggacagaggaccacgacagctcgttgggtgaccagttgccggcggcggactacatgtggcgcatcgtgctcatgctcggcgcgttcccggcgctggccaccttctactggcggatgaagatgcccgagacggcgaggtacacggcgctcatcgagggcaacgccaagcaggcggccaacgacatgcagaaggtgatggacgtggagatccagtcggagcaggacaagctcgccaggtacaaggcggccaacgactacccgctgctgtcgagggagttcgcacagcgccacggcctgcacctcatcggcacggccaccacgtggttccttctggacatagccttctacagccagaacctcacccagaaggacatcttcccggcgatcaagctgacgagccccgccggtgacataaacccactcaaggaggtgttcgagatttcaaaggccatgttcctcgtcgcactcctcggcaccttccccggctactgggtcaccgtcgccctcatcgacaaaatgggcaggtacctgatccagctcatcggtttcttcatgatgtccgtgttcatgctattgatgggcatcatgtacgatgatctcaagaacaaatacaccacgctcttcgccctcttctacgcgctcaccttcttcttcgccaacttcgggcccaacagcaccacattcgtattaccagcagaactgttcccgacacgcgtgcgctccacctgccacgccatcagcgccgcgtcaggcaaggccggcgccatcgtcgcggccttcggggtgcagagcctcacgctcaagggcgacatcgcgtccatcaagaaggcgctcatcatcctcgccgtcaccaacatgctcggcttcttcttcaccttcctcgtcccggagaccatggggcggtcgctcgaggagatctccggggaggacggcaacgccggaaacggtcccggtgttcccgccggcgcggccatgggcgctgcggacgtgagcaaggatgacaagatacctgtttccagtactgagtggcagagctccatgcaagcg

SEQ ID NO: 958 - DNA, 1662 bp, Artificial sequence; identical to SEQ ID NO: 957
  Mir resistant mutated nucleotide sequence

SEQ ID NO: 959 - DNA, 1662 bp, Artificial sequence; identical to SEQ ID NO: 957
  Mir resistant mutated nucleotide sequence

SEQ ID NO: 960 - DNA, 1662 bp, Artificial sequence
  Mir resistant mutated nucleotide sequence
atggcggcggagggcgggtcgaacctggcggtgctggacgcgctggactcggcgcgcacccagatgtaccacatgaaggccatcgtcatcgccggcatgggcttcttcaccgacgcctacgacctcttctgcatcaccaccgtctccaagctgctcggccgcatctactacccgaatgacaacctgtacctagacaagcccaagcctggcaccctacccgtgtccaccaacaacctggtcaccggcgtcgcgctcgtcggcacgctcatgggccagctcgtcttcggctacttcggcgacaagctggggcggaagcgcgtgtacggcatcacgctcgtgctcatggccgcctgcgccatcggctcgggcctctcgttcggcagcacgcggcacgccgtcatcggcacgctctgcttcttccgcttctggctcggcttcggcatcggcggggactacccgctgtccgcgaccatcatgtccgagtactccaacaagaagacgcggggcgccttcatcgccgccgtgttcgcgatgcagggcgtcggcatcatcttcgcggggctcgtgtccatggtcatctcggggatcctcctgcgctacaacccggcgccgtcgtggacagaggaccacgacagctcgttgggtgaccagttgccggcggcggactacatgtggcgcatcgtgctcatgctcggcgcgttcccggcgctggccaccttctactggcggatgaagatgcccgagacggcgaggtacacggcgctcatcgagggcaacgccaagcaggcggccaacgacatgcagaaggtgatggacgtggagatccagtcggagcaggacaagctcgccaggtacaaggcggccaacgactacccgctgctgtcgagggagttcgcacagcgccacggcctgcacctcatcggcacggccaccacgtggttccttctggacatagccttctacagccagaacctcacccagaaggacatcttcccggcgatcaagctgacgagccccgccggtgacataaacccactcaaggaggtgttcgagatttcaaaggccatgttcctcgtcgcactcctcggcaccttccccggctactgggtcaccgtcgccctcatcgacaaaatgggcaggtacctgatccagctcatcggtttcttcatgatgtccgtgttcatgctattgatgggcatcatgtacgatgatctcaagaacaaatacaccacgctcttcgccctcttctacgcgctcaccttcttcttcgccaacttcgggcccaacagcaccacatttgtgttaccagcagaactgttcccgacacgcgtgcgctccacctgccacgccatcagcgccgcgtcaggcaaggccggcgccatcgtcgcggccttcggggtgcagagcctcacgctcaagggcgacatcgcgtccatcaagaaggcgctcatcatcctcgccgtcaccaacatgctcggcttcttcttcaccttcctcgtcccggagaccatggggcggtcgctcgaggagatctccggggaggacggcaacgccggaaacggtcccggtgttcccgccggcgcggccatgggcgctgcggacgtgagcaaggatgacaagatacctgtttccagtactgagtggcagagctccatgcaagcg

SEQ ID NO: 961 - DNA, 1662 bp, Artificial sequence; identical to SEQ ID NO: 960
  Mir resistant mutated nucleotide sequence

SEQ ID NO: 962 - DNA, 1662 bp, Artificial sequence; identical to SEQ ID NO: 960
  Mir resistant mutated nucleotide sequence

SEQ ID NO: 963 - DNA, 1701 bp, Artificial sequence
  Mir resistant mutated nucleotide sequence
atgaagaactcggtgacggagcggagcttcctcatggagagcgacgaggaggaggacgatgccgccgccgtggaggacgggaagcggcggggccatgggcatggtggcggcgacgagtcaggggacgacgacgacgacgggtcggactcctcgtcgccgtgcgacagcccgcgggtggtggcggcaagatgttcacaaccaagttcgtacacgcagcaatggccgcagagctacaggcaatccattgacatgtacagcagtgtgcactcacccaacctgagcttcttgggcacgccatcactgagccgcttgtccaactcgttcctgacaaactcattccgggggaagccacctgagatcatctccagcttaatcaagccattactgccaacaagcattgcttccgccagcgatgaccagcagcatcagcagcatgaggatgtctggaagagctcccattacctgccaccatcgcggaaggcatcatcactgcagaggatccctgaggaccagagacctatggttgggggccatgaggtggggccctatcggcagtgctcctatacccaaggggtcatgaacggagtgaatgtcttatgtggtgtggggatcctgtcaacaccttatgctgtcaagcaaggtggctggcttggactagtgatactggcagtgttgggtgcactggcatggtacactggcatacttctgcggcgttgcctggacagcaaggatggcctcgagacctaccctgatattggacatgctgcctttggcactgctggccgtatcatcatctcggcatgttgtgtcgagtatttgatactagagagcgacaacttatcaaagttgttcccagatgcacacctaaccataggtggcttgactctagattcacatgtgctatttgccatcctgactgctcttatcgtcatgcctactacttggcttcgcgatctcagctgcctcagcttcatttcagctggtggagtcattgcgtctatcgtcattgtctcctgcttgttctgggtgggacttgttgatcacgttggcacagttaaggttgaagggacagcactgaaccttcctggaatccccattgccatcgggttgtatgggtactgctactcaggccatggagtgttccctaacatctactcttctctgaagaaacgcaaccaattctctgctgttctcttcacctgtattgctctgtctactgttctgttcgctggtgctgcaatcatgggatacattatgttcggtgaatctacagagtcccaattcacactgaacttacccccagatcttgtggcttccaagattgcagtctggactacggtgacgaatccaataaccaaatatgcgctaaccatgactcctctcgccctgagtttggaggaactgctaccaccaaatcagcagacatacccaaacataatgatgcttagatccgctctggtggtatcttcccttattattgctctgtccgtcccattttttggacttgtcatgtcactggttgggtcttttctcaccatgtttgtggcctatattctaccatgtgcctgctttttgtctatcctcaggagtaaagtgacctggtatcaggtagtactgtgtgtgttcatcattgccgttggactttgctgtgctggtgttggcacatactcttctctttctaagataatacaacagtaccat

SEQ ID NO: 964 - DNA, 1701 bp, Artificial sequence
  Mir resistant mutated nucleotide sequence
atgaagaactcggtgacggagcggagcttcctcatggagagcgacgaggaggaggacgatgccgccgccgtggaggacgggaagcggcggggccatgggcatggtggcggcgacgagtcaggggacgacgacgacgacgggtcggactcctcgtcgccgtgcgacagcccgcgggtggtggcggcgagatgttcacaaccaagttcgtacacgcagcaatggccgcagagctacaggcaatccattgacatgtacagcagtgtgcactcacccaacctgagcttcttgggcacgccatcactgagccgcttgtccaactcgttcctgacaaactcattccgggggaagccacctgagatcatctccagcttaatcaagccattactgccaacaagcattgcttccgccagcgatgaccagcagcatcagcagcatgaggatgtctggaagagctcccattacctgccaccatcgcggaaggcatcatcactgcagaggatccctgaggaccagagacctatggttgggggccatgaggtggggccctatcggcagtgctcctatacccaaggggtcatgaacggagtgaatgtcttatgtggtgtggggatcctgtcaacaccttatgctgtcaagcaaggtggctggcttggactagtgatactggcagtgttgggtgcactggcatggtacactggcatacttctgcggcgttgcctggacagcaaggatggcctcgagacctaccctgatattggacatgctgcctttggcactgctggccgtatcatcatctcggcatgttgtgtcgagtatttgatactagagagcgacaacttatcaaagttgttcccagatgcacacctaaccataggtggcttgactctagattcacatgtgctatttgccatcctgactgctcttatcgtcatgcctactacttggcttcgcgatctcagctgcctcagcttcatttcagctggtggagtcattgcgtctatcgtcattgtctcctgcttgttctgggtgggacttgttgatcacgttggcacagttaaggttgaagggacagcactgaaccttcctggaatccccattgccatcgggttgtatgggtactgctactcaggccatggagtgttccctaacatctactcttctctgaagaaacgcaaccaattctctgctgttctcttcacctgtattgctctgtctactgttctgttcgctggtgctgcaatcatgggatacattatgttcggtgaatctacagagtcccaattcacactgaacttacccccagatcttgtggcttccaagattgcagtctggactacggtgacgaatccaataaccaaatatgcgctaaccatgactcctctcgccctgagtttggaggaactgctaccaccaaatcagcagacatacccaaacataatgatgcttagatccgctctggtggtatcttcccttattattgctctgtccgtcccattttttggacttgtcatgtcactggttgggtcttttctcaccatgtttgtggcctatattctaccatgtgcctgctttttgtctatcctcaggagtaaagtgacctggtatcaggtagtactgtgtgtgttcatcattgccgttggactttgctgtgctggtgttggcacatactcttctctttctaagataatacaacagtaccat

SEQ ID NO: 965 - DNA, 1701 bp, Artificial sequence; identical to SEQ ID NO: 964
  Mir resistant mutated nucleotide sequence

SEQ ID NO: 966 - DNA, 1701 bp, Artificial sequence; identical to SEQ ID NO: 964
  Mir resistant mutated nucleotide sequence

SEQ ID NO: 967 - DNA, 1701 bp, Artificial sequence
  Mir resistant mutated nucleotide sequence
atgaagaactcggtgacggagcggagcttcctcatggagagcgacgaggaggaggacgatgccgccgccgtggaggacgggaagcggcggggccatgggcatggtggcggcgacgagtcaggggacgacgacgacgacgggtcggactcctcgtcgccgtgcgacagcccgcgggtggtggcggcacggtgttcacaaccaagttcgtacacgcagcaatggccgcagagctacaggcaatccattgacatgtacagcagtgtgcactcacccaacctgagcttcttgggcacgccatcactgagccgcttgtccaactcgttcctgacaaactcattccgggggaagccacctgagatcatctccagcttaatcaagccattactgccaacaagcattgcttccgccagcgatgaccagcagcatcagcagcatgaggatgtctggaagagctcccattacctgccaccatcgcggaaggcatcatcactgcagaggatccctgaggaccagagacctatggttgggggccatgaggtggggccctatcggcagtgctcctatacccaaggggtcatgaacggagtgaatgtcttatgtggtgtggggatcctgtcaacaccttatgctgtcaagcaaggtggctggcttggactagtgatactggcagtgttgggtgcactggcatggtacactggcatacttctgcggcgttgcctggacagcaaggatggcctcgagacctaccctgatattggacatgctgcctttggcactgctggccgtatcatcatctcggcatgttgtgtcgagtatttgatactagagagcgacaacttatcaaagttgttcccagatgcacacctaaccataggtggcttgactctagattcacatgtgctatttgccatcctgactgctcttatcgtcatgcctactacttggcttcgcgatctcagctgcctcagcttcatttcagctggtggagtcattgcgtctatcgtcattgtctcctgcttgttctgggtgggacttgttgatcacgttggcacagttaaggttgaagggacagcactgaaccttcctggaatccccattgccatcgggttgtatgggtactgctactcaggccatggagtgttccctaacatctactcttctctgaagaaacgcaaccaattctctgctgttctcttcacctgtattgctctgtctactgttctgttcgctggtgctgcaatcatgggatacattatgttcggtgaatctacagagtcccaattcacactgaacttacccccagatcttgtggcttccaagattgcagtctggactacggtgacgaatccaataaccaaatatgcgctaaccatgactcctctcgccctgagtttggaggaactgctaccaccaaatcagcagacatacccaaacataatgatgcttagatccgctctggtggtatcttcccttattattgctctgtccgtcccattttttggacttgtcatgtcactggttgggtcttttctcaccatgtttgtggcctatattctaccatgtgcctgctttttgtctatcctcaggagtaaagtgacctggtatcaggtagtactgtgtgtgttcatcattgccgttggactttgctgtgctggtgttggcacatactcttctctttctaagataatacaacagtaccat

SEQ ID NO: 968 - DNA, 1701 bp, Artificial sequence; identical to SEQ ID NO: 967
  Mir resistant mutated nucleotide sequence

SEQ ID NO: 969 - DNA, 1701 bp, Artificial sequence; identical to SEQ ID NO: 967
  Mir resistant mutated nucleotide sequence

SEQ ID NO: 970 - DNA, 1701 bp, Artificial sequence
  Mir resistant mutated nucleotide sequence
atgaagaactcggtgacggagcggagcttcctcatggagagcgacgaggaggaggacgatgccgccgccgtggaggacgggaagcggcggggccatgggcatggtggcggcgacgagtcaggggacgacgacgacgacgggtcggactcctcgtcgccgtgcgacagcccgcgggtggtggcggcaagatgctcacaaccaagttcgtacacgcagcaatggccgcagagctacaggcaatccattgacatgtacagcagtgtgcactcacccaacctgagcttcttgggcacgccatcactgagccgcttgtccaactcgttcctgacaaactcattccgggggaagccacctgagatcatctccagcttaatcaagccattactgccaacaagcattgcttccgccagcgatgaccagcagcatcagcagcatgaggatgtctggaagagctcccattacctgccaccatcgcggaaggcatcatcactgcagaggatccctgaggaccagagacctatggttgggggccatgaggtggggccctatcggcagtgctcctatacccaaggggtcatgaacggagtgaatgtcttatgtggtgtggggatcctgtcaacaccttatgctgtcaagcaaggtggctggcttggactagtgatactggcagtgttgggtgcactggcatggtacactggcatacttctgcggcgttgcctggacagcaaggatggcctcgagacctaccctgatattggacatgctgcctttggcactgctggccgtatcatcatctcggcatgttgtgtcgagtatttgatactagagagcgacaacttatcaaagttgttcccagatgcacacctaaccataggtggcttgactctagattcacatgtgctatttgccatcctgactgctcttatcgtcatgcctactacttggcttcgcgatctcagctgcctcagcttcatttcagctggtggagtcattgcgtctatcgtcattgtctcctgcttgttctgggtgggacttgttgatcacgttggcacagttaaggttgaagggacagcactgaaccttcctggaatccccattgccatcgggttgtatgggtactgctactcaggccatggagtgttccctaacatctactcttctctgaagaaacgcaaccaattctctgctgttctcttcacctgtattgctctgtctactgttctgttcgctggtgctgcaatcatgggatacattatgttcggtgaatctacagagtcccaattcacactgaacttacccccagatcttgtggcttccaagattgcagtctggactacggtgacgaatccaataaccaaatatgcgctaaccatgactcctctcgccctgagtttggaggaactgctaccaccaaatcagcagacatacccaaacataatgatgcttagatccgctctggtggtatcttcccttattattgctctgtccgtcccattttttggacttgtcatgtcactggttgggtcttttctcaccatgtttgtggcctatattctaccatgtgcctgctttttgtctatcctcaggagtaaagtgacctggtatcaggtagtactgtgtgtgttcatcattgccgttggactttgctgtgctggtgttggcacatactcttctctttctaagataatacaacagtaccat

SEQ ID NO: 971 - DNA, 1701 bp, Artificial sequence; identical to SEQ ID NO: 970
  Mir resistant mutated nucleotide sequence

SEQ ID NO: 972 - DNA, 1701 bp, Artificial sequence; identical to SEQ ID NO: 970
  Mir resistant mutated nucleotide sequence

SEQ ID NO: 973 - DNA, 801 bp, Artificial sequence
  Mir resistant mutated nucleotide sequence
atggcggcccaggctctcctctccggccggcagctgctgggcagaccagtacaaagcgcagtatctaggtcgtcggcgaggaaggcgcccttcgtcgtcagggccagctccagccctccagccaagcaaggtgccgacaggcagctgtggttcgcgtccaagcagtccctctcctacctcgatggcacgctgcccggcgactatggcttcgacccgctgggcctctcggacccggagggcaccgggggcttcatcgagcccaagtggctggcctacggcgaggtgatcaacggccgctacgccatgctgggcgcggtgggcgccatcgccccggagatcttcggcaagatgggcatcatcccgccggagaccgcgctgccgtggttcaagacgggcgtcatcccgcccgcgggcacctacaactactgggccgactcctacacgctcttcgtcttcaacatggcgctcatgggcttcgccgagcaccgccgcctccaggactggtacaacccgggctccatgggcaagcagtacttcctcggcctcgagaagttcctcgccggctccggcgacccgtcctaccccggcgggcccctcttcaacccgctcggcttcggcaagaccgagaaggagatgaatgagctcaagctcaaggagatcaagaacggcaggctcgccatgctcgccatcctcggttacttcatccaggggctcgtcaccggcgttggcccgttccagaacctgctcgaccacctcgccgaccccgtcaacaacaacgtgctcaccagcctcaagttccac

SEQ ID NO: 974 - DNA, 801 bp, Artificial sequence
  Mir resistant mutated nucleotide sequence
atggcggcccaggctctcctctccggccggcagctgctgggccgcccagtacaaagcgcagtatctaggtcgtcggcgaggaaggcgcccttcgtcgtcagggccagctccagccctccagccaagcaaggtgccgacaggcagctgtggttcgcgtccaagcagtccctctcctacctcgatggcacgctgcccggcgactatggcttcgacccgctgggcctctcggacccggagggcaccgggggcttcatcgagcccaagtggctggcctacggcgaggtgatcaacggccgctacgccatgctgggcgcggtgggcgccatcgccccggagatcttcggcaagatgggcatcatcccgccggagaccgcgctgccgtggttcaagacgggcgtcatcccgcccgcgggcacctacaactactgggccgactcctacacgctcttcgtcttcaacatggcgctcatgggcttcgccgagcaccgccgcctccaggactggtacaacccgggctccatgggcaagcagtacttcctcggcctcgagaagttcctcgccggctccggcgacccgtcctaccccggcgggcccctcttcaacccgctcggcttcggcaagaccgagaaggagatgaatgagctcaagctcaaggagatcaagaacggcaggctcgccatgctcgccatcctcggttacttcatccaggggctcgtcaccggcgttggcccgttccagaacctgctcgaccacctcgccgaccccgtcaacaacaacgtgctcaccagcctcaagttccac

SEQ ID NO: 975 - DNA, 801 bp, Artificial sequence; identical to SEQ ID NO: 974
  Mir resistant mutated nucleotide sequence

SEQ ID NO: 976 - DNA, 801 bp, Artificial sequence; identical to SEQ ID NO: 974
  Mir resistant mutated nucleotide sequence

SEQ ID NO: 977 - DNA, 801 bp, Artificial sequence; identical to SEQ ID NO: 974
  Mir resistant mutated nucleotide sequence

SEQ ID NO: 978 - DNA, 801 bp, Artificial sequence; identical to SEQ ID NO: 974
  Mir resistant mutated nucleotide sequence

SEQ ID NO: 979 - DNA, 801 bp, Artificial sequence
  Mir resistant mutated nucleotide sequence
atggcggcccaggctctcctctccggccggcagctgctgggcagacccgtacaaagcgcagtatctaggtcgtcggcgaggaaggcgcccttcgtcgtcagggccagctccagccctccagccaagcaaggtgccgacaggcagctgtggttcgcgtccaagcagtccctctcctacctcgatggcacgctgcccggcgactatggcttcgacccgctgggcctctcggacccggagggcaccgggggcttcatcgagcccaagtggctggcctacggcgaggtgatcaacggccgctacgccatgctgggcgcggtgggcgccatcgccccggagatcttcggcaagatgggcatcatcccgccggagaccgcgctgccgtggttcaagacgggcgtcatcccgcccgcgggcacctacaactactgggccgactcctacacgctcttcgtcttcaacatggcgctcatgggcttcgccgagcaccgccgcctccaggactggtacaacccgggctccatgggcaagcagtacttcctcggcctcgagaagttcctcgccggctccggcgacccgtcctaccccggcgggcccctcttcaacccgctcggcttcggcaagaccgagaaggagatgaatgagctcaagctcaaggagatcaagaacggcaggctcgccatgctcgccatcctcggttacttcatccaggggctcgtcaccggcgttggcccgttccagaacctgctcgaccacctcgccgaccccgtcaacaacaacgtgctcaccagcctcaagttccac

SEQ ID NO: 980 - DNA, 801 bp, Artificial sequence; identical to SEQ ID NO: 979
  Mir resistant mutated nucleotide sequence

SEQ ID NO: 981 - DNA, 801 bp, Artificial sequence; identical to SEQ ID NO: 979
  Mir resistant mutated nucleotide sequence

SEQ ID NO: 982 - DNA, 801 bp, Artificial sequence; identical to SEQ ID NO: 979
  Mir resistant mutated nucleotide sequence

SEQ ID NO: 983 - DNA, 858 bp, Artificial sequence
  Mir resistant mutated nucleotide sequence
atgcacatccgagaagaggaggctacaccatccacagtaacaggcatcatgtcgaccctgacttcggcggggcagcagaagctgaaggagcccatatcccctggtggcggctccgcgtcggtcgctgggtccgctgcggagaggaacaacggcggcaggggcaagggcaagactgagatcaagcgcatcgagaacacgaccaacaggcaggtcaccttctgcaagcgccgcaacggcctcctcaagaaggcgtacgagctctccgtgctctgcgacgccgaggtcgcgctcatcgtcttctccagccgcggccgcctctacgagtacgccaacaacagcgtgaagggcaccattgagaggtacaagaaggcaaccagtgacaactccagcgcagctggtacgattgcagaggtcaccattcagcattacaagcaggaaagcgcacgattacgacaacagatcgttaacttgcagaactccaacagggccctgataggtgattctatcacaaccatgagccacaaggaacttaagcacttggagactaggttagacaaagctctcggaaagattagagcaaaaaagaacgatgtgctgtgttctgaagtcgagtacatgcagagaagggaaatggagttgcagaatgacaacttgtacttaaggagccgggttgatgagaatgaaagggcacaacagacagcgaacatgatgggggcaccatcgacaagtgagtatcagcagcacggttttactccttatgatccaataaggagcttcctgcagttcaacatcgtgcagcagcctcagttctattctcagcaggaggaccggaaagacttcaacgaccaaggtggaaga

SEQ ID NO: 984 - DNA, 858 bp, Artificial sequence
  Mir resistant mutated nucleotide sequence
atgcacatccgagaagaggaggctacaccatccacagtaacaggcatcatgtcgaccctgacttcggcggggcagcagaagctgaaggagcccatatcccctggtggcggctccgcgtcggtcgctgggtccgctgcggagaggaacaacggcggcaggggcaagggcaagactgagatcaagcgcatcgagaacacgaccaacaggcaggtcaccttctgcaagcgccgcaacggcctcctcaagaaggcgtacgagctctccgtgctctgcgacgccgaggtcgcgctcatcgtcttctccagccgcggccgcctctacgagtacgccaacaacagcgtgaagggcaccattgagaggtacaagaaggcaaccagtgacaactccagcgcagctggtacgattgcagaggtcaccattcagcattacaagcaggaatctgcacgattacgacaacagatcgttaacttgcagaactccaacagggccctgataggtgattctatcacaaccatgagccacaaggaacttaagcacttggagactaggttagacaaagctctcggaaagattagagcaaaaaagaacgatgtgctgtgttctgaagtcgagtacatgcagagaagggaaatggagttgcagaatgacaacttgtacttaaggagccgggttgatgagaatgaaagggcacaacagacagcgaacatgatgggggcaccatcgacaagtgagtatcagcagcacggttttactccttatgatccaataaggagcttcctgcagttcaacatcgtgcagcagcctcagttctattctcagcaggaggaccggaaagacttcaacgaccaaggtggaaga

SEQ ID NO: 985 - DNA, 858 bp, Artificial sequence; identical to SEQ ID NO: 984
  Mir resistant mutated nucleotide sequence

SEQ ID NO: 986 - DNA, 858 bp, Artificial sequence; identical to SEQ ID NO: 984
  Mir resistant mutated nucleotide sequence

SEQ ID NO: 987 - DNA, 858 bp, Artificial sequence; identical to SEQ ID NO: 984
  Mir resistant mutated nucleotide sequence

SEQ ID NO: 988 - DNA, 858 bp, Artificial sequence; identical to SEQ ID NO: 984
  Mir resistant mutated nucleotide sequence

SEQ ID NO: 989 - DNA, 858 bp, Artificial sequence
  Mir resistant mutated nucleotide sequence
atgcacatccgagaagaggaggctacaccatccacagtaacaggcatcatgtcgaccctgacttcggcggggcagcagaagctgaaggagcccatatcccctggtggcggctccgcgtcggtcgctgggtccgctgcggagaggaacaacggcggcaggggcaagggcaagactgagatcaagcgcatcgagaacacgaccaacaggcaggtcaccttctgcaagcgccgcaacggcctcctcaagaaggcgtacgagctctccgtgctctgcgacgccgaggtcgcgctcatcgtcttctccagccgcggccgcctctacgagtacgccaacaacagcgtgaagggcaccattgagaggtacaagaaggcaaccagtgacaactccagcgcagctggtacgattgcagaggtcaccattcagcattacaagcaggaaagcgctcgattacgacaacagatcgttaacttgcagaactccaacagggccctgataggtgattctatcacaaccatgagccacaaggaacttaagcacttggagactaggttagacaaagctctcggaaagattagagcaaaaaagaacgatgtgctgtgttctgaagtcgagtacatgcagagaagggaaatggagttgcagaatgacaacttgtacttaaggagccgggttgatgagaatgaaagggcacaacagacagcgaacatgatgggggcaccatcgacaagtgagtatcagcagcacggttttactccttatgatccaataaggagcttcctgcagttcaacatcgtgcagcagcctcagttctattctcagcaggaggaccggaaagacttcaacgaccaaggtggaaga

SEQ ID NO: 990 - DNA, 858 bp, Artificial sequence; identical to SEQ ID NO: 989
  Mir resistant mutated nucleotide sequence

SEQ ID NO: 991 - DNA, 858 bp, Artificial sequence; identical to SEQ ID NO: 989
  Mir resistant mutated nucleotide sequence

SEQ ID NO: 992 - DNA, 858 bp, Artificial sequence; identical to SEQ ID NO: 989
  Mir resistant mutated nucleotide sequence

SEQ ID NO: 993 - DNA, 2103 bp, Artificial sequence
  Mir resistant mutated nucleotide sequence
atggagcctcccaggaagaataagtccagtggcatgcaagtcaaggaggaagtgaagttagaagatggaaatgatttgttagtcaagcgcaggaggactgaacttccaggttccattgttcaactacaacagaaaattgaagtatttgacatggagaacaaagtgccagatggtctttcagttgaagattctactggcaaggatcccatggatgtgctcactagatatgcagcacagaactctggtcaagggaatagttgcagtaacgaacctgcaatctcgagactgacaaaaatatgcaaggcaattggctggaaagaaccatcatatgactttgaagaacaaggacctccgcataacagaatgacaacacagttccacttgttggaccctcactatgacgagcaccataggggacgactcatcgcagaagggcaggtgttgcccgttctgcggtccaggacccatgacaggtttctagacatgcggtacgacgacaggtacactcctctccttgagagggctggcttggacgtcgtatcgttccaggttcgccgcgggttgcccacaatcaacattgcggcgatcacagctttggtcgataggtggcggccggagactcacactttccatcttccttgcggcgagatgaccgtgacactgcgagacagccagaagcaacttggtctcagtattcgtgggcgtccagtgaccggtcaggcagcgcccggtggctggagacagagagtcgaggcctttcttggaagggaggttcccacagacacaccaggtagccacacatctggggtttctttagcatggttacgacaatcgttcggggagtgtccagctgcagcagatgaccagacggttagctactactgccgagcttgggtcctacacttgtttggctccgtcctttttccagacgcgacgggtgatagcgcgtcctggatgttccttccttgcctcactgattgggacatggcaggaggctacagctgggcttctgcagtgctatccttcctgtacagacaactttgtgaggcttgtcgtcggacggcaaagaacgcaagtttaggcggttgcgtgtacctactccagttgtggatgtggtcgcacctaccggttggtcgccctattgagtttgctcctcgaccttggttcgacgtcgtcggcttgcgactacgaccgacggcggcttaccgttgggaccaggtccaggctccgttcgcacgtcaccagcgcgcctacgtcgagtactcaaacgagctggacgcacttacaccgtcgatggttagctggcaaccatatgatgagccaccgttgccacacattcagttgagctccgcgtgcacgacagatgaagacatttatttattaaggtgtccactgatttgtttctatgccgttgagtaccacttgcctcatagagtagcacgccagttcggtctacgtcaggagttccctgtggagcccttctcgacatcggtagaactccacaagttcgaccgccaaaagcagaagaagatcactgactttgaggcgcaccaccaagtgtacattgacgaatgggaccaaatgcatgacctcctctaccagagcgatcagtcccacaccaactacaactttcgcgagtacatctcttggtatgtcggtgtaactcggtgcaagttgaagggccagtggacatcagcggactacgccgaactagagtcttcagatgacgaagacacatcctatgacctagttactcggcatgggacacacgtggaggctgcaccaatcctagatagagtgggcaactccatgatgcagtctgtggtcgacatcgagcatttctctaagaccacttctgacgacaggacacttgcctttctctcaaggctatcacgtcgcctacgttgtgctgctgctcgttgtggttgcaggattagcgccgtagttaacatacaacatactctgcagcaccatggtgacacctcgctaggacttggagctatcaccgttgcacagggctcgtcacgtacgacacgagatgcgtttgcgagccacaaggaggacgaggatgacattaagattcctctcgacaagattggacca

SEQ ID NO: 994 - DNA, 2103 bp, Artificial sequence
  Mir resistant mutated nucleotide sequence
atggagcctcccaggaagaataagtccagtggcatgcaagtcaaggaggaagtgaagttagaagatggaaatgatttgttagtcaagcgcaggaggactgaacttccaggttccattgttcaactacaacagaaaattgaagtatttgacatggagaacaaagtgccagatggtctttcagttgaagattctactggcaaggatcccatggatgtgctcactagatatgcagcacagaactctggtcaagggaatagttgcagtaacgaacctgcaatctcgagactgacaaaaatatgcaaggcaattggctggaaagaaccatcatatgactttgaagaacaaggacctccgcataacagaatgacaacacagttccacttgttggaccctcactatgacgagcaccataggggacgactcatcgcagaagggcaggtgttgcccgttctgcggtccaggacccatgacaggtttctagacatgcggtacgacgacaggtacactcctctccttgagagggctggcttggacgtcgtatcgttccaggttcgccgcgggttgcccacaatcaacattgcggcgatcacagctttggtcgataggtggcggccggagactcacactttccatcttccttgcggcgagatgaccgtgacactgcgagacagccagaagcaacttggtctcagtattcgtgggcgtccagtgaccggtcaggcagcgcccggtggctggagacagagagtcgaggcctttcttggaagggaggttcccacagacacaccaggtagccacacatctggggtttctctcgcatggctccgacaatcgttcggggagtgtccagctgcagcagatgaccagacggttagctactactgccgagcttgggtcctacacttgtttggctccgtcctttttccagacgcgacgggtgatagcgcgtcctggatgttccttccttgcctcactgattgggacatggcaggaggctacagctgggcttctgcagtgctatccttcctgtacagacaactttgtgaggcttgtcgtcggacggcaaagaacgcaagtttaggcggttgcgtgtacctactccagttgtggatgtggtcgcacctaccggttggtcgccctattgagtttgctcctcgaccttggttcgacgtcgtcggcttgcgactacgaccgacggcggcttaccgttgggaccaggtccaggctccgttcgcacgtcaccagcgcgcctacgtcgagtactcaaacgagctggacgcacttacaccgtcgatggttagctggcaaccatatgatgagccaccgttgccacacattcagttgagctccgcgtgcacgacagatgaagacatttatttattaaggtgtccactgatttgtttctatgccgttgagtaccacttgcctcatagagtagcacgccagttcggtctacgtcaggagttccctgtggagcccttctcgacatcggtagaactccacaagttcgaccgccaaaagcagaagaagatcactgactttgaggcgcaccaccaagtgtacattgacgaatgggaccaaatgcatgacctcctctaccagagcgatcagtcccacaccaactacaactttcgcgagtacatctcttggtatgtcggtgtaactcggtgcaagttgaagggccagtggacatcagcggactacgccgaactagagtcttcagatgacgaagacacatcctatgacctagttactcggcatgggacacacgtggaggctgcaccaatcctagatagagtgggcaactccatgatgcagtctgtggtcgacatcgagcatttctctaagaccacttctgacgacaggacacttgcctttctctcaaggctatcacgtcgcctacgttgtgctgctgctcgttgtggttgcaggattagcgccgtagttaacatacaacatactctgcagcaccatggtgacacctcgctaggacttggagctatcaccgttgcacagggctcgtcacgtacgacacgagatgcgtttgcgagccacaaggaggacgaggatgacattaagattcctctcgacaagattggacca

SEQ ID NO: 995 - DNA, 2103 bp, Artificial sequence; identical to SEQ ID NO: 994
  Mir resistant mutated nucleotide sequence

SEQ ID NO: 996 - DNA, 2103 bp, Artificial sequence; identical to SEQ ID NO: 994
  Mir resistant mutated nucleotide sequence

SEQ ID NO: 997 - DNA, 2103 bp, Artificial sequence; identical to SEQ ID NO: 994
  Mir resistant mutated nucleotide sequence

SEQ ID NO: 998 - DNA, 2103 bp, Artificial sequence; identical to SEQ ID NO: 994
  Mir resistant mutated nucleotide sequence

SEQ ID NO: 999 - DNA, 2103 bp, Artificial sequence
  Mir resistant mutated nucleotide sequence
atggagcctcccaggaagaataagtccagtggcatgcaagtcaaggaggaagtgaagttagaagatggaaatgatttgttagtcaagcgcaggaggactgaacttccaggttccattgttcaactacaacagaaaattgaagtatttgacatggagaacaaagtgccagatggtctttcagttgaagattctactggcaaggatcccatggatgtgctcactagatatgcagcacagaactctggtcaagggaatagttgcagtaacgaacctgcaatctcgagactgacaaaaatatgcaaggcaattggctggaaagaaccatcatatgactttgaagaacaaggacctccgcataacagaatgacaacacagttccacttgttggaccctcactatgacgagcaccataggggacgactcatcgcagaagggcaggtgttgcccgttctgcggtccaggacccatgacaggtttctagacatgcggtacgacgacaggtacactcctctccttgagagggctggcttggacgtcgtatcgttccaggttcgccgcgggttgcccacaatcaacattgcggcgatcacagctttggtcgataggtggcggccggagactcacactttccatcttccttgcggcgagatgaccgtgacactgcgagacagccagaagcaacttggtctcagtattcgtgggcgtccagtgaccggtcaggcagcgcccggtggctggagacagagagtcgaggcctttcttggaagggaggttcccacagacacaccaggtagccacacatctggggtttctttagcctggttacgacaatcgttcggggagtgtccagctgcagcagatgaccagacggttagctactactgccgagcttgggtcctacacttgtttggctccgtcctttttccagacgcgacgggtgatagcgcgtcctggatgttccttccttgcctcactgattgggacatggcaggaggctacagctgggcttctgcagtgctatccttcctgtacagacaactttgtgaggcttgtcgtcggacggcaaagaacgcaagtttaggcggttgcgtgtacctactccagttgtggatgtggtcgcacctaccggttggtcgccctattgagtttgctcctcgaccttggttcgacgtcgtcggcttgcgactacgaccgacggcggcttaccgttgggaccaggtccaggctccgttcgcacgtcaccagcgcgcctacgtcgagtactcaaacgagctggacgcacttacaccgtcgatggttagctggcaaccatatgatgagccaccgttgccacacattcagttgagctccgcgtgcacgacagatgaagacatttatttattaaggtgtccactgatttgtttctatgccgttgagtaccacttgcctcatagagtagcacgccagttcggtctacgtcaggagttccctgtggagcccttctcgacatcggtagaactccacaagttcgaccgccaaaagcagaagaagatcactgactttgaggcgcaccaccaagtgtacattgacgaatgggaccaaatgcatgacctcctctaccagagcgatcagtcccacaccaactacaactttcgcgagtacatctcttggtatgtcggtgtaactcggtgcaagttgaagggccagtggacatcagcggactacgccgaactagagtcttcagatgacgaagacacatcctatgacctagttactcggcatgggacacacgtggaggctgcaccaatcctagatagagtgggcaactccatgatgcagtctgtggtcgacatcgagcatttctctaagaccacttctgacgacaggacacttgcctttctctcaaggctatcacgtcgcctacgttgtgctgctgctcgttgtggttgcaggattagcgccgtagttaacatacaacatactctgcagcaccatggtgacacctcgctaggacttggagctatcaccgttgcacagggctcgtcacgtacgacacgagatgcgtttgcgagccacaaggaggacgaggatgacattaagattcctctcgacaagattggacca

SEQ ID NO: 1000 - DNA, 2103 bp, Artificial sequence; identical to SEQ ID NO: 999
  Mir resistant mutated nucleotide sequence

SEQ ID NO: 1001 - DNA, 2103 bp, Artificial sequence; identical to SEQ ID NO: 999
  Mir resistant mutated nucleotide sequence

SEQ ID NO: 1002 - DNA, 2103 bp, Artificial sequence; identical to SEQ ID NO: 999
  Mir resistant mutated nucleotide sequence

SEQ ID NO: 1003 - DNA, 1779 bp, Artificial sequence
  Mir resistant mutated nucleotide sequence
atgctgcccaacaacgtgtccgcatccccggtcctctacgccaccgccgtcgtcggcgccgtcccggagcaggtctggggcatgggactctgccgcggcgacgccaacgccagcagctgcctcgcctgcctcacccaggcgttccaggacctgcccaacgactgctcctacaacaaggacgccgccatctactacgacccctgcaccctccactactccgacgtccacaccctcgccgacgacgacaccggcccgacgaccatgtcgtacaacatcaacaacaacgccaacgtcacctcggacccggcccggttcgagcgcctcctcgccgccctcgtcaacgccaccgccgagcacgccgcgtccaactccacccggcgattcgccacgggggaggccgacgccgacttcgaccggcagttccccaaggtgtacgcgctggcgcagtgcacgccggaccagacgccggcgcagtgccgcaagtgcctcgccggcctcatatcgcagtcgctggacgggttccagaacaacatcggaggcagggtgctctgggtcaactgcacctggcggtacgagacctcgcccttcttcaatggaccggccatggtgcgcctggcatcgtcgtcgagccctccggcagcggcagcggcaggtggaggggagaggaagtacagcgtgttcatcgtggttcttgcagttgtgctgcccactctagctgccctgaatcttgtgttttgcttctgtttctggcggcggccagcaccacaggcaaagcagtcacagcccatgtattccaccgaagcagaggacgtggaaacggtggactccatgatgatcgacgtctccgccctgcgagccgcaacagggaatttcgacgagagcaacaagctcggcgaaggcgggtttggcgcggtgtacaagggcgtcctcccggacggcgacgagatagcggtgaagcgtctgtcgaagagctcgacgcagggagtggaggagctgaagaacgagctcgcgctggtagcacgattacgacataggaacctcgtcaggctcgtcggcgtgtgcctggagcagcaagaacggctgctcgtctacgagtttgtccccaaccggagcctcgacctggtactcttcggtaccgacacgcgtgagccgctcagctgggagcagaggtacaggatcataaacggcatcgctcgaggcctgcagtacctccacgaggactcccagctcaaggtagtccaccgtgatctcaaggccagcaacatcctgctagacgtggagatgaaccccaagatctcagatttcggcctcgcgaggatcttcggccgggaccagacgcaggccgtcaccagccgcgttgtcggaacctatgggtacctagcaccagaatacctgatgcgcgggaactactccgtgaaatcggacgccttcagcttcggcgtcatggtgctggagatcgtcaccgggaggaagaacaacggcagctcccacaagtccggagacctcttgaccaccgtatgggagcactgggaggccgggacggtggcggagctggtggacccgtccctgggcggaagcttcccggagggcgacgtgctgaggtgcatccacatcggtctgctctgcgtccagggggaccccgctgcccgcccggtgatgtcgtccgtcgtgacgatgcttggaaccgacacggtcaccctccaggctccatccaagccgggattcttcgccagaaagagtggcactagcacgaccgtgtccgctgatgatgggtcgatt

SEQ ID NO: 1004 - DNA, 1779 bp, Artificial sequence
  Mir resistant mutated nucleotide sequence
atgctgcccaacaacgtgtccgcatccccggtcctctacgccaccgccgtcgtcggcgccgtcccggagcaggtctggggcatgggactctgccgcggcgacgccaacgccagcagctgcctcgcctgcctcacccaggcgttccaggacctgcccaacgactgctcctacaacaaggacgccgccatctactacgacccctgcaccctccactactccgacgtccacaccctcgccgacgacgacaccggcccgacgaccatgtcgtacaacatcaacaacaacgccaacgtcacctcggacccggcccggttcgagcgcctcctcgccgccctcgtcaacgccaccgccgagcacgccgcgtccaactccacccggcgattcgccacgggggaggccgacgccgacttcgaccggcagttccccaaggtgtacgcgctggcgcagtgcacgccggaccagacgccggcgcagtgccgcaagtgcctcgccggcctcatatcgcagtcgctggacgggttccagaacaacatcggaggcagggtgctctgggtcaactgcacctggcggtacgagacctcgcccttcttcaatggaccggccatggtgcgcctggcatcgtcgtcgagccctccggcagcggcagcggcaggtggaggggagaggaagtacagcgtgttcatcgtggttcttgcagttgtgctgcccactctagctgccctgaatcttgtgttttgcttctgtttctggcggcggccagcaccacaggcaaagcagtcacagcccatgtattccaccgaagcagaggacgtggaaacggtggactccatgatgatcgacgtctccgccctgcgagccgcaacagggaatttcgacgagagcaacaagctcggcgaaggcgggtttggcgcggtgtacaagggcgtcctcccggacggcgacgagatagcggtgaagcgtctgtcgaagagctcgacgcagggagtggaggagctgaagaacgagctcgcgctggtcgcacgattacgacataggaacctcgtcaggctcgtcggcgtgtgcctggagcagcaagaacggctgctcgtctacgagtttgtccccaaccggagcctcgacctggtactcttcggtaccgacacgcgtgagccgctcagctgggagcagaggtacaggatcataaacggcatcgctcgaggcctgcagtacctccacgaggactcccagctcaaggtagtccaccgtgatctcaaggccagcaacatcctgctagacgtggagatgaaccccaagatctcagatttcggcctcgcgaggatcttcggccgggaccagacgcaggccgtcaccagccgcgttgtcggaacctatgggtacctagcaccagaatacctgatgcgcgggaactactccgtgaaatcggacgccttcagcttcggcgtcatggtgctggagatcgtcaccgggaggaagaacaacggcagctcccacaagtccggagacctcttgaccaccgtatgggagcactgggaggccgggacggtggcggagctggtggacccgtccctgggcggaagcttcccggagggcgacgtgctgaggtgcatccacatcggtctgctctgcgtccagggggaccccgctgcccgcccggtgatgtcgtccgtcgtgacgatgcttggaaccgacacggtcaccctccaggctccatccaagccgggattcttcgccagaaagagtggcactagcacgaccgtgtccgctgatgatgggtcgatt

SEQ ID NO: 1005 - DNA, 1779 bp, Artificial sequence; identical to SEQ ID NO: 1004
  Mir resistant mutated nucleotide sequence

SEQ ID NO: 1006 - DNA, 1779 bp, Artificial sequence; identical to SEQ ID NO: 1004
  Mir resistant mutated nucleotide sequence

SEQ ID NO: 1007 - DNA, 1779 bp, Artificial sequence
  Mir resistant mutated nucleotide sequence
atgctgcccaacaacgtgtccgcatccccggtcctctacgccaccgccgtcgtcggcgccgtcccggagcaggtctggggcatgggactctgccgcggcgacgccaacgccagcagctgcctcgcctgcctcacccaggcgttccaggacctgcccaacgactgctcctacaacaaggacgccgccatctactacgacccctgcaccctccactactccgacgtccacaccctcgccgacgacgacaccggcccgacgaccatgtcgtacaacatcaacaacaacgccaacgtcacctcggacccggcccggttcgagcgcctcctcgccgccctcgtcaacgccaccgccgagcacgccgcgtccaactccacccggcgattcgccacgggggaggccgacgccgacttcgaccggcagttccccaaggtgtacgcgctggcgcagtgcacgccggaccagacgccggcgcagtgccgcaagtgcctcgccggcctcatatcgcagtcgctggacgggttccagaacaacatcggaggcagggtgctctgggtcaactgcacctggcggtacgagacctcgcccttcttcaatggaccggccatggtgcgcctggcatcgtcgtcgagccctccggcagcggcagcggcaggtggaggggagaggaagtacagcgtgttcatcgtggttcttgcagttgtgctgcccactctagctgccctgaatcttgtgttttgcttctgtttctggcggcggccagcaccacaggcaaagcagtcacagcccatgtattccaccgaagcagaggacgtggaaacggtggactccatgatgatcgacgtctccgccctgcgagccgcaacagggaatttcgacgagagcaacaagctcggcgaaggcgggtttggcgcggtgtacaagggcgtcctcccggacggcgacgagatagcggtgaagcgtctgtcgaagagctcgacgcagggagtggaggagctgaagaacgagctcgcgctggtagcccgattacgacataggaacctcgtcaggctcgtcggcgtgtgcctggagcagcaagaacggctgctcgtctacgagtttgtccccaaccggagcctcgacctggtactcttcggtaccgacacgcgtgagccgctcagctgggagcagaggtacaggatcataaacggcatcgctcgaggcctgcagtacctccacgaggactcccagctcaaggtagtccaccgtgatctcaaggccagcaacatcctgctagacgtggagatgaaccccaagatctcagatttcggcctcgcgaggatcttcggccgggaccagacgcaggccgtcaccagccgcgttgtcggaacctatgggtacctagcaccagaatacctgatgcgcgggaactactccgtgaaatcggacgccttcagcttcggcgtcatggtgctggagatcgtcaccgggaggaagaacaacggcagctcccacaagtccggagacctcttgaccaccgtatgggagcactgggaggccgggacggtggcggagctggtggacccgtccctgggcggaagcttcccggagggcgacgtgctgaggtgcatccacatcggtctgctctgcgtccagggggaccccgctgcccgcccggtgatgtcgtccgtcgtgacgatgcttggaaccgacacggtcaccctccaggctccatccaagccgggattcttcgccagaaagagtggcactagcacgaccgtgtccgctgatgatgggtcgatt

SEQ ID NO: 1008 - DNA, 1779 bp, Artificial sequence; identical to SEQ ID NO: 1007
  Mir resistant mutated nucleotide sequence

SEQ ID NO: 1009 - DNA, 1779 bp, Artificial sequence; identical to SEQ ID NO: 1007
  Mir resistant mutated nucleotide sequence

SEQ ID NO: 1010 - DNA, 1779 bp, Artificial sequence
  Mir resistant mutated nucleotide sequence
atgctgcccaacaacgtgtccgcatccccggtcctctacgccaccgccgtcgtcggcgccgtcccggagcaggtctggggcatgggactctgccgcggcgacgccaacgccagcagctgcctcgcctgcctcacccaggcgttccaggacctgcccaacgactgctcctacaacaaggacgccgccatctactacgacccctgcaccctccactactccgacgtccacaccctcgccgacgacgacaccggcccgacgaccatgtcgtacaacatcaacaacaacgccaacgtcacctcggacccggcccggttcgagcgcctcctcgccgccctcgtcaacgccaccgccgagcacgccgcgtccaactccacccggcgattcgccacgggggaggccgacgccgacttcgaccggcagttccccaaggtgtacgcgctggcgcagtgcacgccggaccagacgccggcgcagtgccgcaagtgcctcgccggcctcatatcgcagtcgctggacgggttccagaacaacatcggaggcagggtgctctgggtcaactgcacctggcggtacgagacctcgcccttcttcaatggaccggccatggtgcgcctggcatcgtcgtcgagccctccggcagcggcagcggcaggtggaggggagaggaagtacagcgtgttcatcgtggttcttgcagttgtgctgcccactctagctgccctgaatcttgtgttttgcttctgtttctggcggcggccagcaccacaggcaaagcagtcacagcccatgtattccaccgaagcagaggacgtggaaacggtggactccatgatgatcgacgtctccgccctgcgagccgcaacagggaatttcgacgagagcaacaagctcggcgaaggcgggtttggcgcggtgtacaagggcgtcctcccggacggcgacgagatagcggtgaagcgtctgtcgaagagctcgacgcagggagtggaggagctgaagaacgagctcgcgctggtagcaaggttaaggcataggaacctcgtcaggctcgtcggcgtgtgcctggagcagcaagaacggctgctcgtctacgagtttgtccccaaccggagcctcgacctggtactcttcggtaccgacacgcgtgagccgctcagctgggagcagaggtacaggatcataaacggcatcgctcgaggcctgcagtacctccacgaggactcccagctcaaggtagtccaccgtgatctcaaggccagcaacatcctgctagacgtggagatgaaccccaagatctcagatttcggcctcgcgaggatcttcggccgggaccagacgcaggccgtcaccagccgcgttgtcggaacctatgggtacctagcaccagaatacctgatgcgcgggaactactccgtgaaatcggacgccttcagcttcggcgtcatggtgctggagatcgtcaccgggaggaagaacaacggcagctcccacaagtccggagacctcttgaccaccgtatgggagcactgggaggccgggacggtggcggagctggtggacccgtccctgggcggaagcttcccggagggcgacgtgctgaggtgcatccacatcggtctgctctgcgtccagggggaccccgctgcccgcccggtgatgtcgtccgtcgtgacgatgcttggaaccgacacggtcaccctccaggctccatccaagccgggattcttcgccagaaagagtggcactagcacgaccgtgtccgctgatgatgggtcgatt

SEQ ID NO: 1011 - DNA, 1779 bp, Artificial sequence; identical to SEQ ID NO: 1010
  Mir resistant mutated nucleotide sequence

SEQ ID NO: 1012 - DNA, 1779 bp, Artificial sequence; identical to SEQ ID NO: 1010
  Mir resistant mutated nucleotide sequence

SEQ ID NO: 1013 - protein, 534 aa, Zea mays
MEECTFTSAAMAVGFLLVVYLYEPYWKVRHVPGPVPLPFVGHLHLLARHGPDVFLVLAKKYGPIFRFHMGRQPLVIVANAELCKEVGIKKFKSMPNRSLPSAIANSPIHLKGLFSTRDSRWSALRNIIVSIYQPSHLAGLIPSMQSHIERAATNLDDGGEAEVAFSKLALSLATDVIGQAAFGADFGLTTKPAAPPPHHGPPRQHGEEDGDGSHSTRSSEFIKMHIHSTTSLKMDLSGSLSTIVGTLLPVLQWPLRQLLLRVPGAADREIQRVNGALCRMMDGIVADRVAARERAPQAQRQKDFLSVVLAARDSDAAARKLLTPDYLSALTYEHLLAGSATTAFTLSSVLYLVAQHPRVEEKLLREVDAFGPPDRVPTAEDLQSRFPYTDQVLKESMRFFMVSPLVARETSEQVDIAGYVLPKSTWVWMAPGVLAKDPVNFPEPELFRPERFDPAGDEQKRRHPYAFIPFGIGPRICIGQRFSIQEIKLALIHLYRQYVFRHSPSMESPLEFQFGVVLNFKHGVKLQSIKRHKC

SEQ ID NO: 1014 - protein, 311 aa, Zea mays
MAAVDLTPRTPKKAYGGDGGAYYEWSPADLPMLAVASIGAAKLSLAAGGLSLPSYSDSAKVAYVLQGVGTCGLVLPEATKEKVVAVKEGDALALPFGAVTWWHNGPAAQADLTVLFLGDTSKGHKRGQFTNFQLTGSAGIFTGLSTEFVSRAWDLPEPDAARLVSSQPASGIVKLPASAAALPAPSPQDRAGVALNCLVAPLDVDIPGGGRVVVLNTANLPLVREVGLGADLVRIDAHSMCSPGFSCDSAYQVTYIVRGSGRVQVVGPDGRRVLETRIEGGSLFIVPRFHVVSKIADASGMEWFSIITTPK

SEQ ID NO: 1015 - protein, 340 aa, Sorghum bicolor
MAALPPFSPRRPFSSPCFILCFLLGFVAGLFPFAHRHLHLDLHHLPLPVPDPPPTPPPAAPTQAAPTPPPTTTTLIVVTPTRARPLQAYYLHRLAHTLRLVPQPLLWLVVDRGAATRETAALLRGCGLMYRHLPSSHRGDAPDDARRRGATHEHPAERGLQRRQRNAALDHIEHHRIHGLVYFADEDNVYSLDLFHQLRGIRSFGTWPVAMLGVGKSKTLLEGPVCDSSQVVGWHTNERDKRQRRFHVNTSGFAFNSSMLWDADKRAHQAWNYIRLLDTVRDGFQATTFVEQLVEDETYMEGIPTGCSKIMNVNLHLEDKHLVYPKGWQMTENLDVLIPL

SEQ ID NO: 1016 - protein, 405 aa, Zea mays
MGCFSTFCKKRRATRQPSSHHNEDVPGCSNITKYTYKELVRATNNFNPLNKIGEGGFGSVYKGQLRNGTVIAVKVLSSESRQGVREFLNELVAISDISHDNLVKLYGYCAEGDQRILVYNHLENNSLAQTLLGSSHSNIQFDWKTRVNICLGIARGLAYLHHGVSPHIVHRDIKASNILLDRDLTPKISDFGLAKLLPPNATHVSTRVAGTLGYLAPEYAIRGQVTRKSDVYSFGVLLLEIVCGRSNSDTRLAYGDQILLEKFPEITNGALLLQTWMHYEQGSLERIIDRSLGGGDLDVAQACRFLKVGLLCTQDVTRHRPDMPRVVAMLTGEWDVEPETVSKPAIISDFMDLKVRSTRKASDNVATPPTSSSTFLSSLMAHSSPLLSNESTQASMAFTGVSDRE

SEQ ID NO: 1017 - protein, 546 aa, Sorghum bicolor
MASPHLPFLSFPKTLPPPPPPLKPHAHRTSLAVAAAPAPPPAPPDGAGPAAPTRGDRFLGRQLATEAAARVLAPDDADRRRRRKEKRRALSRKPSGLASCYGCGAPLQTAEEAAPGYVDPDTYELKKRHHQLRTVLCGRCKLLSHGHMVTAVGGHGGYPGGKQFVSAEQLREKLSYLRHEKALIVKLVDIVDFNGSFLARVRDFAGANPIILVITKVDLLPRDTDLNCIGDWVVESVVKKKLNVLSVHLTSSKSLVGITGVISEIQQEKKGRDVYILGSANVGKSAFISAMLRTMAYKDPVAAAAQKYKPIQSAVPGTTLGPIQIEAFLGGGKLYDTPGVHLHHRQAAVIHADDLPSLAPQSRLKGRCFPANDTDVELSGNSLFWAGLVRIDVVKALPRARLTFYGPKKLKINMVPTTEADQFYETEVGVTLTPPTGKERAEGWQGLQGVRELKIKYEERDRPACDIAISGLGWISVEPSGVPSNSSDDNVEEEYDGGELHLVVHVPKPVEVFVRPPLPVGKAASQWYQYQELTEEEEELRPKWHY

SEQ ID NO: 1018 - protein, 728 aa, Zea mays
MASSLVNLLLMEVAAIVSIVLLAILVVLSSYGRRSGHPALRLFVWSASTLFLPLVSYAVSAAAKWDAARVPLLLAWTVFLQILRNTIDTSRSSSSTINSSGSNGSKFRPSVEQLARMGWVAFLIISSGGTAGSPLLTGVLLWLWVLSLLKLIHRLVAAELAKNSFAVGLNSYLVADYMKQLHGHGHSQAAGQRGLEVPAYFVMGEEKLPIKPGPQGYYIDSTEAPPSLSMDDAGHVVTVDRIWSLSSSGDPLLASCPQIKDLCLSFALFKLQLRRFIGCPLAEAGCHRAMAFVQDGLLAGSGSAERVFQVVEAELSFLADFLYSKLTVFYASGWWFPALNSILVLATWISCLAAGGAIVHDMTNPGTALAVDYHMLRDYLQHHDTVFHVIVGLDILVSVSFIVSIVFMEGWEIANYVCSDWIKVSTICEYTRRPSWQKSLWARRKLSRLFWLRPMRQWDDRFCQVSILQLRFCYYGCISQQVDRIVKKTVAVPATVKSAIVKTLRANQGRLGNGELSLQGNGVGNLSWACRIKASDDNAMDSLSEQILVWHLATRLVELKCSQGAHGDSGNDTYGESDLEVVATQLSRYCAYLVALKSSLLPDHRAWTEELYKGVVEEVTRVLARCAGPVAGYERASMCLSGSMNATLRKASKLGRQLVEEVSDEELLWKVLAEFWAEFVLYLAPSDNVASHSKSLYHGGEFITVLWALLGHAGIVGRPETESTENSA

SEQ ID NO: 1019 - protein, 426 aa, Zea mays
MFVIEDKGGAIALMLASLLFLGTWPAVLTLLERRGRLPQHTYLDYSITNLLAAVLIALTFGQLGDSRRGMPNFFTQLGQDNWPSVLFAMAGGVVLSVGNLSTQYAWAYVGLSVTEVISSSMVVVIGTTLNYFLDNRINRAEILFPGVACFLVAVILGSAVHSSNAADNEQKLGASTNAYKLGTSGNVEPSKQAVDRGVHCLSEEERTNLISDAPKDLEESGASGIRQPDKAEAGTAEYLIELEERRSIKVFGSNTFIGLGIVFFAGVCFSLFSPAFNLATNDQWHTLRDGVPHLVVYTAFFYFSISCFVVGVGLNVLFLYRPMAGVPRSSLGAYLRDWDGRQWALLAGLLCGFGNGFQFMGGQAAGYAAADAVQALPLVSTFWGVLLFGEYRKSSRKTYVLLGFMLFMFVAAVAVLMASSGHRSTE

SEQ ID NO: 1020 - protein, 505 aa, Sorghum bicolor
MSPYLLLAAAALIAFLYIIKNRRSSKLPPSPPSLPLIGHLHLIGRLAHRSLHELQLRYGGGGGLLFLQLGRRRTLVVSTAAAAADLFRNHDLAFASRARSVGGDKMTYGCSNVSFAPYGENWRLGKKIAVVHLLSPRRVESFAPVRAAEVAALVAWTRCAAEAREAVEMRELLYGYTNAVVTRAATGAAGVTADKMKQLMGNAEALMAGFQPEDVLPDAPARFVRWATGLDKKLDDMGEAWDKFLSEIVAAHKKGDDGAGEDDEDFLDVLLRLREEGTGGLELTDDRIKAIIKDMIFAATETSSQTLEWTMAELMANPRVMSKLQDEIARVVSADQTTIAEPDLSKMEYLKAVFKEVLRLHAPAPLLVPHESTTPAVVQGYEIPAKTALFVNVWAIGRDPAVWDTADVFRPERFMAGSPSVDFRGTDYQLIPFGAGRRICPGISFALPVLELALVSLLHHFEWELPAGMRPADLDMGEAPGLTTPRQVPLVLVPKCKTLVQAALQ

SEQ ID NO: 1021 - protein, 453 aa, Zea mays
MHVYMSLGRKSPQDRIDHLLGYCCLLLQVLQEQVPSTRSRLGMFVIEDKGGAIALMLASLLFLGTWPAVLTLLERRGRLPQHTYLDYSITNLLAAVLIALTFGQLGDSRRGMPNFFTQLGQDNWPSVLFAMAGGVVLSVGNLSTQYAWAYVGLSVTEVISSSMVVVIGTTLNYFLDNRINRAEILFPGVACFLVAVILGSAVHSSNAADNEQKLGASTNAYKLGTSGNVEPSKQAVDRDAPKDLEESGASGIRQPDKAEAGTAEYLIELEERRSIKVFGSNTFIGLGIVFFAGVCFSLFSPAFNLATNDQWHTLRDGVPHLVVYTAFFYFSISCFVVGVGLNVLFLYRPMAGVPRSSLGAYLRDWDGRQWALLAGLLCGFGNGFQFMGGQAAGYAAADAVQALPLVSTFWGVLLFGEYRKSSRKTYVLLGFMLFMFVAAVAVLMASSGHRSTE

SEQ ID NO: 1022 - protein, 411 aa, Zea mays
MFVVEDKGGAIALMLASLLFLGTWPAVLTLLERRGRLPQHTYLDYSVTNLLAAVLIALTFGQLGGARRGMPNFLTQLGQPNWPSVLFAMAGGVVLSVGNLSTQYAWAYVGLSVTEVVSSSMVVVIGTTLNYFLDNRINRAEILFPGVACFLVAVILGSAVHASNAADNEEKLSASTNAYQLGRTAGAAEPSKHVLDKDVAKDLENGVSGTKQADKAEAGTAEYLIQLEERRSIKVFGSNTFIGLGIVFFAGACFSLFSPAFNLATNDQWRTLRGGVPHLVVYTAFFYFSVACFAVGVGLNVLFLYRPMAGVPRSSLGAYLGDWDGRHWALLAGLLCGFGNGLQFTGGQAAGYAAADAVQALPLVSTFWGVLLFGEYRKSSRKTYLLLGFMLFMFVAAVAVLMASSGHRTTE

SEQ ID NO: 1023 - protein, 457 aa, Zea mays
MASTNAIDFQLTQARALLSEFDNRLREIDSKWETRVGVLETKVADSARNLETISKEIRDGVVAQLAAAEAGVDFRIRLLETGTIIRVAALESTAHAFELWRPHVDLSIDSLFSSIDAVCTEVEKLGIHRFPGPRPSDGAAAPGTATQPEPSSHRPRSSPPPEVHDGDDDDEEIDDDDDDDDDDDDDDDDDDDDDDDEDYEGFTDEELDKFESAFGWGSTFLSDPQVLCMDSSDPQNPPRIGRQNYEPLTAQEFFSLRHNWQQLLDGKKTYLRPPKNNRVAKHSYANCTFVTPEPLEKALQCQEPLSDFGRKYAENSIVQQKFKILSEHYAHVRQMRMDGSSFYRAFLFSYLENLGKMQASHAEVTRLMECVARSREKFCRLHWNDAYFSNPEAFFSSVVSEFEQLVNSVANGLNADELYKRSLHEITSSRSEDTNFFGMCCLFVLYVTFSLVSSLFV

SEQ ID NO: 1024 - protein, 334 aa, Sorghum bicolor
MPVGSRRRPPPSHHRRAMTPASVSAPAPGAAAAPTKPLYLRGPVIAGAAALAAFLLLAAAYATRRAGSPPTALLAHPAVATRFFSFDLVREYPHDPDAFTQGLLYAENDTLFESTGLYHRSSVRKVDLQTGKVLVNHQMDGQMFGEGLTLLGHRLFQVTWLKNDGFIYDQHNFSKRTSFTHKMRDGWGLATDGKVLFGSDGTSMLYKLDPKSLEVMKVVTVKYHGDEVPYLNELEYVDGEVWANVWQTDCIARVSPEDGLVVGWIFLHELRRQLWNSGNTNIDVLNGIAWDERNHRLFVTGKLWPKLYEIKLRAVDGPADGSVEKLCPKASFYR

SEQ ID NO: 1025 - protein, 388 aa, Zea mays
MISLLLRAPGSPYVPCPHFFPLFYPHRLLSATKCVATKPFAVEDYLVATCGLTQAQALKASKHVSHLKDPSKADAVVAFLSNLGLSSAEITDVVTRDPKVLCSDVERSLTARVAELTDLGFSRPEIVRLLIVGMNHFRHSSLRLNLEFWISVFGSLDELIRALRINAALLSTRIEEVCKPNLELLQECGINVSDISNSFMSRVLTRDPKSLQEALARLHEFRIQPGSQPFFRGLYTFAILGSGKITKSIQLFEKLGWSKDHIVSAVKRDPTILGFTEERVRRNMEFLIRVVGLEVPYIARRPALINYSIDRRLLPRNCLINFLRAKGLFNDEASFLSVAAIGDEKFRRRYVHPYEEDFPGLAAAFASSCAGEHQWERLYKMTGENKES

SEQ ID NO: 1026 - protein, 302 aa, Zea mays
MARRRLQQPHRRLARHLRLQPLRHAAPRYRRPRWPPFLLRRRQLLLRRHSARHRRPPRPPPPQPLQQPVQRHIVRLLAFCSGPEAKLLVYEYMVNGSLGEALHRAGADDGGGGVVLSWASRLRVATEAAKGLCYLHHDCSPPILHRDVKSNNILLDARMEAHVADFGLAKFLGGSGASECMSAVAGSYGYIAPEYAYTLKVDEKSDVYSFGVVLLELITGLKPVGEHLGDDAVDLVQWARARSSAGGGVLALLDPRLGGDVPVAEAAHVLFVSMLCVQEHSVERPTMREVVQMLQQARHQPS

SEQ ID NO: 1027 - protein, 395 aa, Zea mays
MNNLRKRMISLLLRAPGSPYVPCPHFFPLFYPHRLLSAIKCVATKPFAVEDYLVATCGLTQAQALKASKHVSHLKDPSKADAVVAFLSNLGLSSAEITDVVTRDPKVLCSDVERSLTARVAELTDLGFSRPEIVRLLIVGMNHFRHSSLRLNLEFWISVFGSLDELIRALRINAALLSTRIEEVCKPNLELLQECGINVSDISNSFMSRVLTRDPKSLQEALARLHEFRIQPGSQPFFRGLYTFAILGSGKITKSIQLFEKLGWSKDHIVSAVKRDPTILGFTEERVRRNMEFLIRVVGLEVPYIARRPALINYSIDRRLLPRNCLINFLRAKGLFNDEASFLSVAAIGDEKFRRRYVHPYEEDFPGLAAAFASSCAGEHQWERLYKMTGENKES

SEQ ID NO: 1028 - protein, 514 aa, Zea mays
MRLMAVLVDGCRGLRGGAMAGVIHGHAQHGDPMFQEFMGRLLRRVCSPLFEMVRSWVLEGELEDVFAEFFIVGQPVKAESLWREGYLIQSDMLPAFISPVLAKRILRTGKSINFLRVCCDDSGWADAAAEAAAYVGTTTSRGGLGYGETDALEALVVEAAKRIDRHLMDVIHKRYRFKDHCLAIKRYLLLGQGDFVQYLMDVVGPELSEPANRISSFQLAGLLETAIRASNAQYDDCDILDRIKVKMMDHGDGDRGWDVFSLEYDARVPLDTVFTASVMKMYLKVFNFLWKLKRVDHSLTGVWKTMKPNCIVSSPFYKEGTSIRAQFVSVLRKCQVLFNEMNHFVTNFQYYIMFEVLEVSWARFSDEMDAAKDLDDLLLAHDKYLNSILEKALLGEHSQGLLRNLFELFDIILQFRSHADRWFERIYELQLRGKGKSKSKDTGSWFDGGRKAMIQLAGELFWKMGEDLDSIAKDYTASLDAFITQLPMQQHVDLKFLLFRLDFTEYYSRVSSNK

SEQ ID NO: 1029 - protein, 631 aa, Sorghum bicolor
MTVEDVKLQAAKANGGGHGAKDQFPVGMRVLAVDDDPTCLKLLEKLLQHCQYHVTTTGQAATALKLLREKKDQFDLVISDVHMPDMDGFKLLELVGLEMDLPVIMLSANGETQTVMKGITHGACDYLLKPVRIEQLRTIWQHVVRRRSCDAKNNGNDNDDSGKKLQVVSAEGDNGGGNRNKRTSRRGRDDNGDDGDDSDENSNENGDSSTQKKPRVVWSVELHRKFVAAVNQLGIDKAVPKKILDLMNVENITRENVASHLQKYRLYLKRLSADASRQANLTAAFGGRNPAYVNMGLDAFRQYNAYGRYRPVPTTNHSQPNNLLARMNSPAFGMHGLLPSQPLQIGHTQNNMSTSVGNVGGMNNGNLIRGAHMPLQDTSKCFPTGPSGNSFANISNSIQLVTTNNLPLQSLEPSNQQHLGRLQSSADPFNSFVGESPQFPDLGRCNTTWPTAVSSSNVQELGQKDRIVNGPKLEPLSSFTEASSQIPLLGNEMQSQVASLASNGLPMPFTQEAAPFAYGSSTNSREMLNNNLALSNSGINSSLPNLRIDGSVVPRQTLDGGNSGGVPPLQDGRIDHQAVSSHLSYNNELMMGTSRLQRGLSGGLDDIVVDMFRPDRADDGVPFIDGDWELV

SEQ ID NO: 1030 - protein, 492 aa, Zea mays
MSDHRAKRPSDGAATVASPAAKRARDPPAPALPTNKEAPDMAPKTRIFCDILASRADDEELNAELDKADIRVSIADVEQVLRFSYAHPRAAAAFFRWAGYRYLGHEHSPYSWNLLVDILGKNRLFEPMWDTVKSMQSQQLLSLATFASIFSSLAATPGGSPLKAFMDMPRYGMTRDTPALNSLLSALCRANRLDDARAAIPVARAEAGTRPDADSYAILLEGSEAAADLRVAREVFDEMVQAIGFYPDNVPAYDSFLTTLVSSDSSTALPEAMEYLNVLSRHGCSPGEKFFRAALAAHLEARQLRGAMNLWDDFVGRRGLVPDMEMYNTMIKLQGSLGHAELIVGYLDDMISNGVFPDTNTYNVVLQLLLKGKKHREAAAIFSEMVKNECWPNEGNCSLALRMFLDTHYWETGIKVWCCMVENGLPPLQECGNMLVAKLKDDRLPEACKYAEDMIDRGIKLSSATLSKLKQRLQRIKKGEIHDHLLAKWKAH

SEQ ID NO: 1031 - protein, 631 aa, Zea mays
MTVDELKLQARASGGHGAKDQFPVGMRVLAVDDDPTCLKILENLLLRCQYHVTTTGQAATALKLLREKKDQFDLVISDVHMPDMDGFKLLELVGLEMDLPVIMLSANGETQTVMKGITHGACDYLLKPVRIEQLRTIWQHVVRRRSCDAKNSGNDNDDSGKKLQVVSAEGDNGGVNRNKRISRKGRDDNGDDGDDSDDNSNENGDSSSQKKPRVVWSVELHRKFVAAVNQLGIDKAVPKKILDLMNVENITRENVASHLQKYRLYLKRLSADASRQANLTAAFGGRNPAYVNMGLDAFRQYNAYGRYRPVPTTNHSQPNNLLARMNSPAFGMHGLLPSQPLQIGHNQNNLSTSLGNVGGMNNGNLIRGAHMPLQDTSKCFPTGPSGNSFANISNSTQLVTTNNLPLQSLEPSNQQHLGRLHSSADPFNSFVGEPPQFADLGRCNTTWPTAVSSSNVQEIGQKDRIVNRPKLEPLSSFTEASSQIPLLGSEMQSHQVASLASNGLPMPFTQEAVPFAYGSSTNSREMLNNNLALSNSGVNSTLPNLRIDGSVVPGQTLGGSNSGGCVVPPLQDGRIDHQAVSSHLNYNNELMGTGRLQRGLSGGLDDIVVDMFRPDRADDGVSFIDGDWELV

SEQ ID NO: 1032 - protein, 91 aa, Sorghum bicolor
RSLPPDLGCIPKQPDSLTAPRGAAGSGPDGALTLPGVPFQGTWARSVAEDASPDYNSGDEATRFSSWAGPGSLAVTRGILVSFFSSAYLYA

SEQ ID NO: 1033 - protein, 366 aa, Sorghum bicolor
MAGPAPDRAALTVGPGMDMPIMHDSDRYELVRDIGSGNFGVARLMRDRRTSELVAVKYIERGEKIDENVQREIINHRSLKHPNIIRFKEVILTPTHLAIVMEYASGGELFERICKNVRFSEDEARYFFQQLISGVSYCHSMQVCHRDLKLENTLLDGSDAPRLKICDFGYSKSSVLHSQPKSTVGTPAYIAPEVLLKKEYDGKIADVWSCGVTLYVMVVGAYPFEDPEEPKNFRKTIQRILNVQYAIPDNVNISPECRHLISRIFVGDPAMRITIPEIRNHSWFLKNLPADLMDDDSMSNQYEEPDQPMQTMDQIMQILTEATIPPACSRSINVLADGLDMDDDMDDLDSDSDLDVDSSGEIVYAM

SEQ ID NO: 1034 - protein, 433 aa, Zea mays
MKVEVVETTLVPPSEATPRHALWLSNLDLAVPKTHTPLVYYYPRPAGAGAGEEGKGEGEGSFFDPARLREALSRALVPFYPLAGRLAAGPGGRLEIDCTGEGALFCVARADFTGDEMFADFEPSPEARRLLVPFAASGDPPCVLAMVQVTFLKCGGVAVGTGMHHVTMDGAGAIQFIRAWTALARGEAPAWTPSHDRTLLRARSPPHVPACEHPVYSPAYLNGAPRPFVTRVYAVPPKLLAGIRSRCAPGASTYCAVTAHLWRAMCVARGLPAGSDTRLRVPANVRQRLRPPLPASYFGNAIVRDLVTVRVADVLSQPLGFVAERIKRAVARVDDARVRSVVDYLELESDKGNQAARGQFMPESDLWVVSLLGMPIHDADFGWGRPGFVAPAQMFGSGTAYVTQGRDKDDPINVLFALEPEYLNTFEKAFYGE

SEQ ID NO: 1035 - protein, 359 aa, Zea mays
MAGPAPDRAALTVGPGMDMPIMHDSDRYELVRDIGSGNFGVARLMRDRRTSELVAVKYIERGEKIDENVQREIINHRSLKHPNIIRFKEVILTPTHLAIVMEYASGGELFERICKNVRFSEDEARYFFQQLISGQVCHRDLKLENTLLDGSDAPRLKICDFGYSKSSVLHSQPKSTVGTPAYIAPEVLLKKEYDGKIADVWSCGVTLYVMVVGAYPFEDPEEPKNFRKTIQRILNVQYAIPDNVNISPECRHLISRIFVGDPATRITIPEIRNHSWFLKNLPADLMDDDSMSNQYEEPDQPMQTMDQIMQILTEATIPPACSRSINVLADGLDMDDDMDDLDSDSDLDIDSSGEIVYAM

SEQ ID NO: 1036 - protein, 512 aa, Sorghum bicolor
MEVVASAPGKVLIAGGYLVLERPNAGLVLSTTARFYAVVRPIRDSLPADSWAWAWTDVKVTSPQLSREATYKLSLTKSTLQLTSARESTNPFVEQAIQFSVAAAKSIITDKDKKDAIDKLLLQGLNITILGCNDFYSYRKQIEARGLPLTTEVLLSLPPFSSITFNSEVANGTTTGEKCKPEVAKTGLGSSAAMTTSVVAALLHYLGAVNLSCPGQPSGDNATGRGLDLVHAIAQSAHCIAQGKIGSGFDVSAAVYGSQRYVRFSPEILSSAQATGGTFLPDVVSDIVTQRWDHENKQFSLPPLMTLLLGEPGTGGSSTPSMVGSVKRWQKSDPEKSKDTWSKLAIANSALENQLRILKGLSENHREAYESVVRSCSHLTYGKWTEVATNQDQELIVRSLLAARDASLEIRLHMREMGIAAGVPIEPDSQTQLLDATMNMEGVLLAGVPGAGGFDAVFSVTLGDANNAVANAWSSAGVLPLLVREDCRGVSLEDADPRTREVSAAVSSIQIN

SEQ ID NO: 1037 - protein, 366 aa, Zea mays
MAGPAPDRAALTVGPGMDMPIMHDSDRYELVRDIGSGNFGVARLMRDRRTSELVAVKYIERGEKIDENVQREIINHRSLKHPNIIRFKEVILTPTHLAIVMEYASGGELFERICKNVRFSEDEARYFFQQLISGVSYCHSMQVCHRDLKLENTLLDGSDAPRLKICDFGYSKSSVLHSQPKSTVGTPAYIAPEVLLKKEYDGKIADVWSCGVTLYVMVVGAYPFEDPEEPKNFRKTIQRILNVQYAIPDNVNISPECRHLISRIFVGDPATRITIPEIRNHSWFLKNLPADLMDDDSMSNQYEEPDQPMQTMDQIMQILTEATIPPACSRSINVLADGLDMDDDMDDLDSDSDLDVDSSGEIVYAM

SEQ ID NO: 1038 - protein, 353 aa, Zea mays
MGDAAAAAASTSAPTTPTSILICLEDGSDLLADADDGAGTDLVVARDERLLVVDQDEEYVALLLSKESASGGGGGPVEEMEDWMKAARSGCVRWIIKTTAMFRFGGKTAYVAVNYLDRFLAQRRVNREHAWGLQLLMVACMSLATKLEEQHAPRLSELPLDACEFAFDRASVLRMELLVLGTLEWRMVAVTPFPYISCFAARFGQDERRAVLVRAVECVFAAIRAMSSVEYQPSTIAVASILVARGRETPADNLDALKAILGSSFPQLDTGHVYSCYSAMIREDDKSPTQSTSTSTGVASSGVSVAAHAGGSGSPSPPGASVSVGANNAAGTAPPATTDNRNKRRRLRSPQRQ

SEQ ID NO: 1039 - protein, 397 aa, Zea mays
MPISSTLATRLRTGHSSAPKPARRSPYTRPKPSGGAKASRPSPRLDPATTRPLEPSQKAVRSGLGRRAEPDVPDARAAESKPKLAHGDDRPPLEEKRRCSGEGGFVFLCALAGHTEAIGGISLPSGSNKLYSGSVDGSVRIWDCNSGKCVDVIKMGGKVSCMITHGPWVLIGIPKFVEAWNTKTGMKLRFQGPSSLVCSMAITDEMLFAGTGDGRIMAWRFPAKESNTEPVLILSGHQRPVISLSISARRLYSGSLDKTIKAWDLTTRQCVQTLSEHKAAVTSVLCWDEKLLSCSLDKTVKLWTLSESGNLQVKYTHAEENGLRTLFGMHRVGKTPVLLCSLHNSNRVRLLDLPSFDGIGTLLSTKEVRTIELAAGGLLFTGDCSGELKVWRWAPKD

SEQ ID NO: 1040 - protein, 340 aa, Zea mays
MEVEYHELFTCGWLPAAASPKALVFLCHGYGMECSGFMRECGVRLAAAGYGVFGMDYEGHGKSMGARCYIRSFRRLVDDCGHFFKSVCELEEYRGKSRFLYGESMGGAVALLLHTEDPAFWDGAVLVAPMCKISEKVKPHPLVITLLTQVEDVIPRWKIVPTKQDVIDAAFKDPVKREKIRRNQLIYQDKPRLKTALEMLRTSMYIEDSLSQVTLPFFVLHGEADTVTDPEVSRALYERSASADKTIKLYPGMWHGLTAGEPDENVEAIFSDIVSWLNHRSRSWAVEERHMTRKLAPAPAKSIEGHGTVDGKVHTQQGRPRRRQGFLCGLAGRTHHHAEM

SEQ ID NO: 1041 - protein, 331 aa, Zea mays
MAKQSCCHKKKLRRGLWSPEEDEKLMNHIAKYGHGCWSSVPKLAGLDRCGKSCRLRWINYLRPDLKRGTFSQEEEDLIIHLHSLLGNKWSQIAAQLPGRTDNEVKNFWNSYIKKRLRERGIDPATHQPLAEPAAAATATTTTTVSRRAVFGDVDLIPTTTTTTIQVPPPSFEGGPMLESVKLAVELDWPVAGDGVTSRPCYLQGGCFDMDALQQHCGSIPPVPVVPSASASSSTLTSMAEAEHCSTNNVAAGGNLPWLELGANAVADAGGHVVGSCYAGALDELRWSEYFDSAFQAAESQQGALQPGQCVYGGKDDVPVHFDVHGGLSNWC

SEQ ID NO: 1042 - protein, 515 aa, Sorghum bicolor
MVAKKPRVVVVGAGVAGLTAAHRLCAGGGDRFEVTVVEAGARAGGRVLTSEFAGHRVEMGATWIQGIDGSPVYALARDAGALACDRDAPPYERMDGSPDRVLTVAEGGEVVDADRVARPVEELYRGMMEAARAGESSGGGSVEEYLRRGLRAYQAARQGGKELEGIEDALLAMHINRERTDTSADELGDLDLAAEGEYRDFPGEHVTIPGGYSRVVDRLVAALPPGTVRLGLRLRRLDWSDTPVRLHFAEDGATTAITADHVILTVSLGVLKASIGKDAHAAGGVAFDPPLPQFKRDAVARLGFGVVNKLFMELEAVPAAKPEGDGGGGGGGGSEHPLAMSAPPEFPFLHMAFRGHVSEIPWWMRGTESICPVHGGSSVALAWFAGREAEYLESLPDDEVIRGVQATMDSFLPAPDPRDGAKATSRWRVKRIKRSGWATDPLFLGSYSYVAVGSSGEDLERMAEPLPRGSNVGGAPPLRVLFAGEATHRTHYSTTHAAYLSGVREAERLLQHYGN

SEQ ID NO: 1043 - protein, 565 aa, Zea mays
MEFASRSRPTTTAADDEENDCLRRFPDHPPSQPQGHGEPNTSGVDAALLARRQKLLLELLKGSIQQGLILRELVETEHAMGFIAGSHNPVPALPQDFLRCWTPSMSTLEAHLRQPCPCGCGNSMAVRAPPVNPHLERSSHAPEQTRPGNDAEQHQEDRSSGVRTHPFNGHFKLCHSPSKQTPVPGKAGVNQMRPSSGHQQAIVWEKIGVEVVHNMQPLNEIKNHSSEGQKAVDSAIEVCVKKPIQQRLQYKPVDQENAANNEHAPEQTRQGNDAEHHQEGRSSGVRTHPFNGYFELCRSPSKQIPLAGKAGINQVRPLSGHQQGVVWEKIGVEVVHNMQPLHEIKNPSSEGRKAIDSGIEDCVKKPMHHRLQYKPVDQENAASNDQKSTEFNEPTAEGTSAGVKRKLTTPSSPVKKQKPLGQWSCTICQANPASQRQLEQHLAGKRHQSNVAALQPSQSNSSSPEPDTKATPARSRIIATNAQQDGKQDVPENRWTCTLCRAKCYTELNYYSHLGGLWHREKAQARREEHLRFYCSVCDLQCNSEKMLESHLGGRRHRETLEARD

SEQ ID NO: 1044 - protein, 558 aa, Zea mays
MTVPCAVDPLLVIREALLSQLQKDRLRQEIIQVELAKIERAMVLCKCNSSHHGIAADDVEWTRPAPFTFREQSMRPWRWSVSQECYVDVDEVHDRKQKEGRHRSVVLKSEKPAMEDGECLRPCCNGKASQENSKVEDQKSQESSETIQPKTTLPSVKWELTGITIPVKKKKRHQKLSCEICQVQATSEHSLQEHRAGRKHQLKEAIDQKVQLTEESSSSTEQKTSSIKWSCSTCQANGTSESDLKEHLNGRTHRQNIKAQLMESDGIAKTNELQEPECPKNNAPQHSEKPPPMSSTHCLANSTHELELRGHLLAKPQALLDEISNLSRNSESREATVLPNIAPQHTEQTPGSNCSILQADSDCKLDLEHQFGAKIHQLNVQDLLEEAKKTGDFPPEIAKDQQPPSEWGCVICQAKCYSAPQFAQHCRGKKHQKKVEALQGGVDAKSSNLTTVHKAASNGPDCSSSSSEKVEDQTALWSCGVCNVQCNSESMLAGHCKEEEHMEKQKLRDFCEVCNLKCNSEKMLAHHLSGSKHQKRLSANKRNAVVAWVPVALRGIVQ

SEQ ID NO: 1045 - protein, 483 aa, Zea mays
MEDQALAPLLQPLPLGETGAIKGRARRAALEWWVESKKLWHIVGPAIFQRIALYGVNVVTQSFIGHLGDLELAAFSIAATVVGGFNFGFLLGMASALETLCGQAFGAKKHHMLGVYLQRSWIVLLIFAAALTPTYIFMEDLLLLIGQSPELSRLAGQMSVWLLPQHFAMAMLLPLTRFLQSQLKNWVTAITAAVALAIHVVATYVLVRLLDFGIVGAVASADMAWWLVVLGQYVYVVGGWCPLSWKGFTMEAFADFWEFIKLSSASGVMLCLENWYYRVLVLLTGYLDNAEIAVDALSICQTINGWEMMIPFGFLAATGVRVANELGAGSGKGARFAIVVSITTSVVIGLVFWCLILYFDDKIALLFTSSAVVLDAVHHLSVLLAFTILLNSVQPVLSGVAVGSGWQALVAYVNVGSYYLIGVPLGIVLGWPLHFGVGGIWSGMIGGTAVQTLILAYLTAKCDWHEEAKLASMRMKKWADESK

SEQ ID NO: 1046 - protein, 522 aa, Zea mays
MAPRARVATYKVCWVGGCFSSDILKAMEVAVTDGVDVLSLSLGGGTAEYYRDSIAVGAFSAMEKGIFVSCSAGNAGPGAATLSNGAPWITTVGAGTIDRDFPAYVTLGNGKNYTGVSLYSGKPLPTTPMPFIYAGNASNSSMGQLCMSGSLIPEKVAGKIVLCDRGTNARVQKGFVVKDAGGAGMVLANTAANGEELVADAHVLPGSGVGEKAGNAMRDYAMSDPKATATIVFAGTKVGVKPSPVVAAFSSRGPNTVTSSVLKPDIIAPGVNILAAWSGSVGPSGLPGDGRRVGFNIISGTSMSCPHVSGLAALLRAAHPEWSPAAIRSALMTTAYNEYPGGGNGILDVATGRPATPLDVGAGHVDPAKAVDPGLVYDIAAADYVDFLCANNYEAAQIAALTRQHASEGCSANRTYAVTALNYPSFSVAFPAAGGTAKHTRTVTNVGQPGTYKVAASAAAGGTPVTVTVEPSTLSFSRAGEKQSYTVSFTAGGMPSGTNGFGRLVWSSDHHVVASPIAATWT

SEQ ID NO: 1047 - protein, 309 aa, Zea mays
MAATAMCPSPSAAITRHIHARRSCAAASLSLRRSGFLGRVVLAAVPVAVDATRRRRVSVSVRMAWDGPLSSVRLIMQSRNAKLSEKLKEHIEDKVGRAVSKHCHLVREVDVRLSARGGELGRGPKTSRCEITLFTKRHGVLRAEEDAESTYASIDLAAAIVKRKLRKIKEKETEVRRGGDADGVWDEIPPADLLPPAEADDLEAAVGAEDEETVLAKVVRTKVFEMPPLTVEEALEQLENVDHDFYCFRDEATGQVNILYRRKEGGYGLIIPKNDGKVDTVGVVPPPAVAAEPEPEPSYAVHAADNNNS

SEQ ID NO: 1048 - protein, 526 aa, Zea mays
MLPAGLSSMQHVQEIDLSWNNFNGEILANIGNCIELTVLDLSHNSLAGNLPSTLSQLKNLESLNVANNNLSGEIPISLANCDRLKYLNLSYNDFSGGVPTTGPFVNFSCLSYLGNRRLSGPVLRRCGGRHRSWYQSRKFVVILCVCSAALAFALTILCTVSVRKIRERVAAMREDMFSGRRGGGSSPVMKYKFPRITYRELVEATEEFSEDRLVGTGSYGRVYRGTLRDGTMVAVKVLQLQTGNSTKSFNRECQVLKRIRHRNLMRIVTACSLPDFKALVLPFMANGSLERCLYAGPPAELSLVQRVNICSDIAEGMAYLHHHSPVKVIHCDLKPSNVLINDDMTALVSDFGISRLVMSIGGVANTADVGASTANMLCGSIGYIPPEYGYGSNPTTKGDAYSFGVLVLEMVTRRKPTDDMFDAGLSLHKWVKTHYHGRADAVVDQALVRMVRDQTPEVRRMSDVAIGELLELGILCTQEQSSARPTMMDAADDLDRLKRYLGGDTTATFASSLGFSSTTLEVEDID

SEQ ID NO: 1049 - protein, 977 aa, Zea mays
MGGGQMLACLPLGLITLLSLSLSSSCQIDPQTHALLQFKDGLNDPLNHLASWTNATSGCRFFGVRCDDDGSGTVTEISLSNMNLTGGISPSVGALHGLARLQLDSNSLSGPVPPELAKCTQLRFLNLSYNSLAGELPDLSALTALQALDVENNAFTGRFPEWVSNLSGLTTLSVGMNSYGPGETPRGIGNLRNLTYLFLAGSSLTGVIPDSIFGLTELETLDMSMNNLVGTIPPAIGNLRNLWKVELYKNNLAGELPPELGELTKLREIDVSQNQISGGIPAAFAALTGFTVIQLYHNNLSGPIPEEWGDLRYLTSFSIYENRFSGGFPRNFGRFSPLNSVDISENAFDGPFPRYLCHGNNLQFLLALQNGFSGEFPEEYAACNSLQRFRINKNRFTGDLPEGLWGLPAATIIDVSDNGFTGAMSPLIGQAQSLNQLWLQNNHLSGAIPPEIGRLGQVQKLYLSNNTFSGSIPSEIGSLSQLTALHLEDNAFSGALPDDIGGCLRLVEIDVSQNALSGPIPASLSLLSSLNSLNLSCNELSGPIPTSLQALKLSSIDFSSNQLTGNVPPGLLVLSGGTQAFARNPGLCIDGRSNLGVCNVDGGHKDSLARKSQLVLVPALVSAMLLLVAGILFISYRSFKLEELKKRDLEHGDGCGQWKLESFHPLDLDADEICAVGEENLIGSGGTGRVYRLELKGRGGGSGGVVAVKRLWKGNAARVMAAEMAILGKVRHRNILKLHACLSRGELNFIVYEYMPRGNLHQALRREAKGSGRPELDWRRRSKIALGAAKGIMYLHHDCTPAIIHRDIKSTNILLDEDYEAKIADFGIAKVAEDSSDSEFSCFAGTHGYLAPELAYSLKVTEKTDVYSFGVVLLELVTGRSPIDPRFGEGRDIVFWLSSKLASESLHDVLDPRVAVLPRERDDMLKVLKIAVLCTAKLPAGRPTMRDVVKMLTDAGTGPCSPRGQPPSRVCSNKSCC

SEQ ID NO: 1050 - protein, 778 aa, Zea mays
MATTITRLLHHLALLLLVVQFADAVFVPKTKNYAVLKPQSWGTTYIVHANFLAKPPHFGSLKEWYRSMVTTHASSTRAASSSSILYTYDTVMHGFAVQLTGDEARLMSSAPGVIGVYEDRVLYPQTTRSPGFMGLEPGNGAWKQTDFGDGVIIGFIDGGIWPESASFNDSGLGPVRSGWRGKCVDAHGFDANLCNNKLVGAKAFSAAADAVAGRKSRGVPSPRDKDGHGTHVASTAAGAEVRNASLYAFSQGTARGMAPKARIAMYKACSENGCMHADIVAAVDAAVKDGVDIISISLGRSFPIAFHDDVLAVALFGAERKGVFVVVAGGNAGPQAARVVNSAPWMTTVGAATVDRLFPAHLTLGNGVVLAGQSLYTMHAKGTPMIPLVSTDGINSWTPDTVMGKIVVCMFGASDADGILLQNAGGAGIVDVDSYEWSRDGSALYSFTLPGLTLSYTAGEKLRAYMVSVPYPVASLSFGCETVISRKNRAPVVAGFSSRGPNPAAPELLKPDVVAPGVNILAAWSGDAPLAGVFVPDGRRANYNIISGTSMACPHVAGIAALIKKKHPSWTPAMVRSALMTTAGTVDNRGGHILDNGHTDTLGRTDNVRVATPLVAGAGHVHPDLALDPGLVYDAGERDYVDFLCALNYTAEQMRRFVPDFVKCTGTLAGGPAGLNYPSFVVAFDSRTDVVRTLTRTVTKVSEEAEVYTATVVAPEHVKVTVTPTTLEFKEHMETRSYSVEFRNEAGWHREAGWDFGQIIWANGKHKVRSPVAFQWKN

SEQ ID NO: 1051 - protein, 783 aa, Zea mays
MATTITRLLHHLALFLLIVEFADAVLIPKTKNHAALKPQASSTTYIVHANDLAKPPHFRSLEEWYRSMVITHASSTRAASSSSILYTYDTVMHGFAVQLTGDEARLMSSAPGVIGVYEDRVLYPQTTRSPGFMGLEPGNGAWKQADFGDGVIIGFVDTGIWPESASFDDSGLGPVRSSWRGKCVDAHDFNASLCNNKLVGAKAFITPAADAVEERKSRGVSSPRDKEGHGTHVASTAAGAEVRNASLYMFSRGTARGMAPKARIAMYKACGVGGYCRNADIVAAVDAAVKDGVDIISMSVGGARPTAFHDDVVAIALFGAERKGVFVVLSAGNNGPQATTVINSAPWMTTVGAATVDRQYPAQLTLGNGVVLAGQSLYTMHAKGTHMIQLVSTDVFNRWHSWTPDTVMGKIMVCMHEASDVDGIILQNAGGAGIVDVDPQEWSRDGSVAYAFTLPGLTLSYTAGEKLRAYMASVPYPVASFSFACETVIGRNNRAPVVAGFSSRGPNLVALELLKPDVVAPGVNILAAWSGDASVSGYSDDGRRADYNIISGTSMSCPHVAGIAALIKKKHPSWTPAMVRSALMTTARTVDNRGGYILDNGHSVIVGRRIDNFRVATPLVAGAGHVQPDLALDPGLVYDAGEHDYVHFLCALNYTAEQMRRFVPDFVNCTGTLAGGPASLNYPSFVVAFENCTDVRTLTRTLTKVSEEAETYSVTVVAPEHVKVTVTPTTLEFKEQMETRSYSVEFRNEAGGNPEAGGWDFGQISWENGKHKVRSPVAFHWKN

SEQ ID NO: 1052 - protein, 417 aa, Zea mays
MRTPFVDPHSAAGRLKQRLARILTRSTCTTNNAAAASSGGTATATAFVSLAKTNNAHTAASSSHPEPEAPPSPYFCTPCTYDYERPKADRGTRPRRTRSASLIHISVDCTGGAASGRRSAHSDAPLLQHLLSEQVPARDVVGGTKQSKSGGRSKLTTTRSSPSASRRHCSSSSSSWGRARARRPSSTPTPYSWSSSSSSRSSATATDDELAPFSGSDDEEGGGGGEAADMRTLFSSLSFSSDPTSSEFYRTNGGRSGNGNASRRSHRNTASRRRGRRARAPRRALSRSSGGDPAAPPDAFRPLVSVETTRRTTERSERSKEDKGLNNAKKLTMTMLGAAAAAEEEAAGAGMAVVKRSSNPYLDFRSSMVEMVVERRIASVGKMEELLGSYLSLNSPRHHPAILAAFEDVWEAVFGEE

SEQ ID NO: 1053 - protein, 978 aa, Sorghum bicolor
MRGQILACLPLNLITLLSLFLSCTCQIDSQTHALLQFKAGLNDPLNHLVSWTNATSKCRFFGVRCDDDGSGTVTEISLSNMNLSGGISPSVGALHGLARLQLDSNSLSGPVPPELAKCTQLRFLNLSYNSLAGELPDLSALTALQALDVENNYFTGRFPAWVGNLSGLTTLSVGMNSYDPGETPPSIGNLRNLTYLYLAGSSLTGVIPDSIFGLTALETLDMSMNNLAGAIPPAIGNLRNLWKIELYKNNLTGELPPELGELTKLREIDVSRNQISGGIPAAFAALTGFTVIQLYHNNLSGPIPEEWGDLRYLTSFSIYENRFSGEFPANFGRFSPLNSVDISENGFVGPFPRYLCHGNNLEYLLALQNGFSGEFPEEYAVCKSLQRFRINKNRFTGDLPEGLWGLPAATIIDVSDNGFTGAMSPLIGQAQSLNQLWLQNNKLGGAIPPEIGRLGQVQKLYLSNNTFSGSIPSEIGSLSQLTALHLEDNAFSGALPDDIGGCIRLVEIDVSQNALSGPIPASLSLLSSLNSLNLSNNELSGPIPTSLQALKLSSIDFSSNQLTGNVPPGLLVLTGGGQAFARNPGLCVDGRSDLSACNVDGGRKDGLLARKSQLVLVLVLVSATLLLVAGIVFVSYRSFKLEEVKKRDLEHGDGCGQWKLESFHPLELDADEICAVGEENLIGSGGTGRVYRLELKGRGGAGAGGVVAVKRLWKSNAARVMAAEMAILGKVRHRNILKLHACLSRGELNFIVYEYMPRGNLHQALRREAKGSGRPELDWPRRCKIALGAAKGIMYLHHDCTPAVIHRDIKSTNILLDEDYEAKIADFGIAKVAADASDSEFSCFAGTHGYLAPELAYSLRVTEKTDVYSFGVVLLELVTGRSPIDRRFGEGRDIVYWLSSKLASESLDDVLDPRVAVVARERDDMLKVLKIAVLCTAKLPAGRPTMRDVVKMLTDAGAGPCSPRGQPPVRVCSNKSCC

SEQ ID NO: 1054 - protein, 492 aa, Zea mays; identical to SEQ ID NO: 1030

SEQ ID NO: 1055 - protein, 268 aa, Zea mays
MVRKPIHADDAGAKSTEASKERKGLWSPEEDERLFTHITYHVVSTWSSVAQLAGLRRSGKSCRLRWLNYLRPDLKKEPISKREEETIISLQQSLGNRWSTIAARMPGRTDNEIKNYWNSRIRKRLNAAASRAAGCGDGGDSAAEPSGAAAAGGKEDSANAAPPPAAQPTPIPARFPVFGCQLPDGAGGGISSPGSGKSPQSSTTASMRQNAGDESDASDGGGGDSDMVHFLSFDDLDYPGDLLIDVPGAMDAWESQLCYANPMMSSLC

SEQ ID NO: 1056 - protein, 428 aa, Zea mays
MAPKRPAAAAAAASGSASEASDAEADVGHQPSSPSPSKTPPTNPNPKSAAAGPAEDSTAAGSDSEAAYDSDADHRPAHRKAAVAASPSRKPRSPRPRSRSRSPDAASYSDGAASDADADPAARDGADSADDGNASPLALPRLSRAEAAAIKPLSSRPMDPPRRSMVHSFSELRSKRPRSAAVPSSVEQLKRPTRLWSLRDEIVILRGLVTYRAKRGVLPGAMYDISMFQGHIQSELSVNVTPTQLSDKVRRLKQKYNQLASRGKNGRDPDLPTQHEQSVYEIGKKVWGTSTGGDGYEIGGDSQEEHEIGESDEDVESGWDERARKNRRLMPITMANGHGSGFGAGRGKFDVEKGKDAYPYLWETVEDLSKEHPNGVAFKKAFELIEGARARGMEEKLRKFRLTEIRHQLRRMELMKETVKMVLDALEG

SEQ ID NO: 1057 - protein, 128 aa, Zea mays
MHGCTHTGTLRARRPCQRSRRRRSCSDHGVGDGGDSSSSTRTTTAVKTIRTNQNHYAKHIYRLLSTYCRTKDLCINICVRPYHHRTGIKLAISLLHDREIARVRVIKYYRCMYDACVCVSIYHVMVCI

SEQ ID NO: 1058 - protein, 438 aa, Zea mays
MSMTPSMEIDLHVVRAARVLGRGAMGTVFLAVDGGTGEAYALKVFDKRSAAAASRPAAGADAARRAQWEVSVLSRLAHPHLPSLLGCAETPDLLGWALPYCPGGDLNELRHAQPDRVFSPAAIRFYVAEVVSALAELHAAGIAYRDLKPENVLLRADGHVMLTDFDLSRQLPPPRSPSASTSTSSSSCSATSSPLPQTQTTHMKNIFKRSESAVTAPTSGQEEPRNLAWYLSKSIDGGSDQVKKAKSARVTPVDRGKELPSFCPAAAAAAGERSFSFVGTEEYVAPEVVRGDGHEFAVDWWALGVLVYEMSHGRTPFRGRSRKETFRNVLLREPGFTADARRRWPELTDLVSRLLEKNPARRLGFAGGADEVRAHPFFAGVAWDLLGDVSRPPYIPAPPDDSIASCEGFSVAEYFDRLHQPPLSPAKHSPEEELLPEF

SEQ ID NO: 1059 - protein, 485 aa, Zea mays
MRKVCANPDREVGLDTVLEVPVPDQLHHDPSSSSSGHGRRRRRTLKAWVRSRMDQRHRRHSSPPSQADVQLMLGVVGAPLVPQPVQARKAMVAGEDIKEEPLEVSKAKYIVEQYVAASGGERALSAATSMYAVGKVLMRTRSSSTTTKQGQKARRTGMVGVVHGGAEIAGGLVLWQKGPEVWCVEMVVAGGTKMSAGSDGRVAWRQTPWQQAHASRGPPRPLRRCVQGLNPRSTANLFSTATWVGEKSVDGDDCFVLRVDADPLALRARSGDDVEVVRHAVWGYFSQRTGLLSRLEDSHLLRVRATKGSPLAQTTTYWETSMDSSIGDYRAVDGINVAHAGRTVVSLSRFGGSTNDDSAGSESAGVLGRRTCTCMEENWSIEEVDFNVVGLSAECFLPPRDMVVVPCSPKPVDDEKGQCGRLDHSCKKDDAPAALDVRNKNGNGGAGGVHRPATARKALVTAATGLPWSGTAKVVAVETFDTTAE

SEQ ID NO: 1060 - protein, 436 aa, Sorghum bicolor
MDPCPFVRVLVGNLALRMPVAPPAAGAGAGVHPSTSPCYCKIRLGKMPVQSVPAPLVVSDGGEQTPASGALAAAFHLSKADLEWFNGKPSLFSSRGEASLKVSVYAGRKGSTCGVSSGRLLGKATIPLDLKGAEAKPAVLHSGWISIGKRAGKGNPAATELSLTVRAEPDPRFVFEFDGEPECSPQVLQVGSAMKQPMFTCKFGCRSNSDLRRPGMQPERDAGASAKERKGWSVTVHDLKGSPVAMASMVTPFVPSPGTDRVSRSNPGAWLILRPAGDGAWEPWARLECWRERGGAGASDSLGYHFDLLVPGADHAVALADSSIPSSKGGKFAIDLTAAQPLSRGGTPGCSPRGSGDLSNWPLGNYRGFVMSAAVQGEGRCSKPTVEVGVAHIGCAEDAAAFVALAAAVDLSMDACRLFSHRLRKELSHLRADLLR

SEQ ID NO: 1061 - protein, 642 aa, Sorghum bicolor
MSCGRVPMECGHDCVVPRPQEHQAPLKCESPTLSSEEFLQFKRKATTIVEEYFSTDDVAATANELRELRVPCYHYYFVKKLVSVAMDRHDREKEMAAVLLSSLYGDVVDRPQLCKGFCKLTESCDDLSVDTPDAVDILAVFVARAVVDDMLPPAFLAKQSACLPDGCKGAEVLRRAEKSYLSVPHHGEIVLQRWGGSKRITVEEAKAKISDILEEYLAAGDRCEALRCIRDLKIPFFHHDVVKRALVLAVERGGASEAHILDLLKSASEEGVINESQIAKGFDRLIDSLDDLTLDVPNARCLVQSVIHKASSEGWLCVSCLKPLPPEPKKSSEVDDAAVRQFKAKAVLIIKEYFLTGDIIEVLSWLEAENFSCCPSFNAIFVQKLVNAAMDRKSREKEMASVLLSSLCMPPEDVVAGFHLLIEAAEDAALDNPAIVEDLTMFFARSVVDEVIAPSDLEAMEEDASRVKADGSTGMLALRNARALLGAKLSAERILRCWGGGGSGKAGWELEEVKDKIGKLLQEYDCGGDIREACRCIKDLGMPFFHHEVVKKALVAIIEKRGKDERLWGLLSECYGRGLITPNQMTKGFDRVADCVDDLALDVPDAAKQLGCCIDRAKKEGWLDPSFSMTRPGQPVANGVCS

SEQ ID NO: 1062 - protein, 335 aa, Zea mays
MAPLGDGGAAAAAASNNLVVSFGEMLIDFVPDVAGLSLAESGGFVKAPGGAPANVACAIAKLGGSSAFVGKFGDDEFGHMLVNILKQNNVNAEGCLFDKHARTALAFVTLKHDGEREFMFYRNPSADMLLTEAELDLGLVRRARVFHYGSISLISEPCRSAHMAAMRAAKAAGVLCSYDPNVRLPLWPSPDAAREGILSIWKEADFIKVSDDEVAFLTRGDANDEKNVLSLWFDGLKLLVVTDGDKGCRYFTKDFKGSVPGFKVDTVDTTGAGDAFVGSLLVNVAKDDSIFHNEEKLREALKFSNACGAICTTKKGAIPALPTVATAQDLIAKAN

SEQ ID NO: 1063 - protein, 276 aa, Zea mays
MAYYSGGGKLSAVDAILAEAADLVALEQVAKLNTAHLDDDSALPSSLEARFRKLKSLPSPAAVPPVSTLARSATAPRPAPALPGPDPPAPAPPVHHPVHEDPPPGDAETKGGGSSPRQARAPAPAPTVHADDAKDLDQLFGSAPRGRPTLRERNRGSDSSSVSPSPPPPPRQACCFGFSPKKPLRRAPSAKGKKKEVCHGSRDVLGVDADEWGDENRRIATELREQQRRLRKALEDQVQVSRETAKMARWVKQASARMTHAEAIDDLLSDCEDDLK

SEQ ID NO: 1064 - protein, 591 aa, Zea mays
MAFAEEETTRYLGTNLIESCGDSEDGLAGWAPSGSCTLSAHADEDASLPSLAAALSAAAGGDDEGDDSDEDEFQQRAPRPSGRYVLAARRASDKDGLCRAVSRAPIRPNVTYRVAGWVGLGAAVDGSHAVHVEVRVDGGGRPVGGGVAVVESGKWGQIKGSFRVDCDEPPRHAKVYVHGPPAGVDLKVTTDLQVCAVNKIPRLRHLRKKADKVRKRDVVLKVSRRTDVDDDDTTASVAGAHIQVVQVQNSVPIGSCITKAGMQNPEYVDFFTKHFDWAVLENELKWYYTEAVRGQVSYADADELIDFCDRHGKPVRGHCIFWAVENSVQPWVRALSADQLRAAVEARLRGLVSRYAGRFPHYEVNNEMLHGAFYQQRLGDDINAHMFRETAQIDPAPALFVNDYNVESANDPNATPEKYVALVTDLQRRGAPVGGIGVQGHVTHPVGDIICDALDKLAVTGLPIWITELDVSAADESVRADDLEIVLREAFAHPAVEGIMLWGFMQGHMWRSHGQLVNADGKYTQAGNMFAGLRREWTSHARGKVDSIGNFKFRGFHGTYQVLLTTPAGEVKKRTFDVHKGDAPLVLDMDF

SEQ ID NO: 1065 - protein, 325 aa, Zea mays
MSNRATHWCYACRRPIRLRGQDIACPNCNDGFIQEISEMGGILNTYGLIEPDFEERRARRFGMMDAMSSLMRQRMEEMGRDGLFDIRGRQGTGTEYGRRPTAVPTLVFGGIPSPGVDSGDVNVVLRGGRRVGAAQPNFSSLVVGPSLEALFEQLLLQNNRQGPAPAPQSAIDSMPVVKINRRHLDDDPQCAVCKDKFEVGAEAREMPCKHLYHTDCIIPWLVQHNSCPVCRHPLPSQRSGSTSSARPSAYYNEAADPPGVTRADLEPAPRDGGRESQERRRSFSFLWPFGPSSSRSSSYQYEQNVDEPAVYDPNQIAYSEWHYDH

SEQ ID NO: 1066 - protein, 492 aa, Zea mays; identical to SEQ ID NO: 1030

SEQ ID NO: 1067 - protein, 1011 aa, Sorghum bicolor
MAHLQLTALAGGADDEMEEVALLGSYDEEAGVGPEGEDQAEAGMRRVQVRVTGMTCSACTGAVEAALSARRGVRRAAVSLLQNRAHVVFDPALAKVPLSVGSIEWKQSPDDDIVEAIEDAGFEAEILPDSTVSQPKSQKTLSGQFRIGGMTCAACVNSVEGILKKLPGVKRAVVALATSLGEVEYDPSAISKDEIVQAIEDAGFDAALLQSSEQDKALLTVTGLHFEGDVDVLHDILKKMEGLRQFGVDFAKSEVDIVFDPEVVGLRQIVDTIEMESNNRLKAHVQNPYIRAASNDAQEANKTLHLLRFSLFLSIPVFFIRMVCPHIPLISSFLLMHFGPFRIGDLLKWILVTMVQFVVGKRFYVAAYRALRHGSTNMDVLVVIGTTASYVYSVCALLYGAFTGFHPPIYFETSAMIITFVLFGKYLEVLAKGKTSDAIKKLVELAPATALLLLKDKEGKYSGEKEIDASLVQPGDALKVLPGSKVPADGIVIWGTSHVNESMVTGESVPISKEVSSLVIGGTMNLHGILHIQATKVGSGTVLSQIISLVETAQMSKAPIQKFADYVASIFVPIVITLSFLTFLAWFLCGWLGAYPNSWSAESSNCFVFSLMFSISVVVIACPCALGLATPTAVMVATGVGASHGVLVKGGDALERAQNVKYVIFDKTGTLTQGKATVTTAKIFSGMDLGDFLTLVASAEASSEHPLAKAILDYTFHFHFFGKLTSAKDNINRRKEEILSQWLLEVADFSALPGKGIQCWINGKKILVGNRALITENGVNIPEEAECFLVDMELNAKTGILVAYDGDFIGLIGITDPLKREAAVVIQGLKKMGVHPVMVTGDNWRTARAVAKEVGIDDVRAEVMPAGKANVIRSLQKDGSVVAMVGDGINDSPALAAADVGMAIGAGTDIAIEAADYVLVRNNLEDVITAIDLSRKTFSRIRWNYFFAMAYNVIAIPVAAGALFPFTGVQMPPWLAGACMAFSSVSVVCSSLLLRRYRKPRLTTVLQITVE

SEQ ID NO: 1068 - protein, 405 aa, Sorghum bicolor
MDMAIDTPSPAPPPTPPAPSAAAGRQTRAAEAVRLEHQLVRVPLESLRATVRSNHRLAEKEIAAVLSSASAAPAESSAAAVDHLTSLVSRLHGLKRKMEEGARVEELQVQRCRARLDRLATASTGDDAEWEDIRLKRILVDYMLRMSYYDSATKLAETSGIQELVDIDVFLDAKRVIDSLQNNEVAPALAWCAENKSRLKKSKSKLEFLLRLQEFVEFVKAKNCIQAIAYARKHLAPWGNMHMKELQRVTATLVFRSNTNCTPYKILFEQERWDYLVDIFKQDFCKLYGMTLEPLLNIYLQAGLTALKTPFCTEGSCPREDPLSLEGFRKLAEPLPFSKQHHSKLVCYITKELMDTENPPRVLPNGYVYSEKALQEMSKKNDGKITCPRTGDVCDFSECVRAFIS

SEQ ID NO: 1069 - protein, 391 aa, Zea mays
MKVRRSEPVLVHATGAATTQEDSLSRVLSQYYPFEGRLAVREDGRLAVRNDRRGVPFVDAVSDYELQVVCDATAPGSELLGDLVYVSMQHENALEAPMLTVQVTTFKCGGFVLGLAMNHCLADGQSAAEFICSWAETARGVAMSTPPYLDRTVQRARPIPTVDFAHDEFAEIEDVSGLAGTFGKEPCVYRSFTFDAGKLHRLKQAASEQGQGGTKSSVFVALTAFVWVSRTRALRMLPDQKSKLLFAVDARLRVDPPLPPGFWGNAIIFACCISTARDLLSKPLSAAARSIREAIVRTDDAFIRSAVDYIELNSGARPSLMATTLVTAWNRLRFRAADFGWGEAIYSGPAELPQKEVAMFLRGVSDSQSTVLVIGMPVSCMQAFQETVDLL

SEQ ID NO: 1070 - protein, 463 aa, Sorghum bicolor
MVNGEPAGAECTRASLLGRYEIGRTLGEGNFGKVKYARHIGTGGHFAIKILDRSKILSLRIDDQIRREIGTLKLLKHPNVVRLHEVAASKTKIYMVLEFVNGGELFDKIAIKGKLSEHEGRRLFQQLIDGVSYCHDKGVYHRDLKPENVLVDRKGNIKISDFGLSALPQHLGNDGLLHTTCGSPNYIAPEVLQNRGYDGSLSDIWSCGVILYVMLVGYLPFDDRNLVVLYQKIFKGDCQIPKWLSPAAQDLLKRILEPNPMKRINITGIREHEWFKKDYVPAVPYDDDEDVLSGSVLSIKEQIEEPAQEKCTHINAFQLIGMASSLDLSGLFEEEDAAQRKIRFTSTHPPKDLFDKIESVAMEMGFEVHRGASKLKVLKNSKCSKKSRNPSSFLVCTEVFELGPSLYVVELRKSHGDSTLYRQLCERLSDELGACKTEQIMRTESLSDDLSSLDGEAFPLSGF

SEQ ID NO: 1071 - protein, 409 aa, Zea mays
MMEAKQAAPDRLSSLPAELQDEILIRLDLRDAVRTSALSRTWRDLWKSLSVISLSFPFGTHPSVVDSVLLRYIGPRVSLFRICVDDACADRIDDWLIALSRYRVESIDMCGTLRSLGNFNLYSSIFSLGDLVSLLLKNCRIPPLPVGFPGFPALQKLVLAYVIFPSNGFKQLEAIIRRSPLLHTLHMFDVFIPGEYPDSVIEAPNLRVLSIYSPYDYRWRFGELSCLEYANIHVFHCPQHEHDFGVFLARFAHVQKFGLFSPAVDVKMPYTLPFTFYNLKKLQLCVDFNEIHSILSMFTMLRSCHNLQNLKIESRHDSYESFEADWEFLNALWTDGMCANLQIVRMIDIISLPNETSFMKLILSKATLLHTLYVGAHPYDFDDHIIDMLKCERASAQARVQFEGSEQQW

SEQ ID NO: 1072 - protein, 440 aa, Sorghum bicolor
MAAAFSSTVGAPASTPSRSSFLGKKLSKQQVSAAAAVNYYHGKSSSSAAANVNRFKVMAAKEVDETKQSDQDRWKGLAYDVSDDQQDITRGKGMIDSLFQAPMGDGTHVAVLSSYDYISQGQKTYSFDNMMDGFYISKSFMDKLVVHLSKNFMSLPNIKVPLILGIWGGKGQGKSFQCELVFSKMGIIPIMMSAGELESGNAGEPAKLIRQRYREAADLISKGKMSCLFINDLDAGAGRMGGTTQYTVNNQMVNATLMNIADNPTNVQLPGMYNKVDNARVPIIVTGNDFSTLYAPLIRDGRMEKFYWAPTREDRIGVCKGIFRTDGVDEEHVVQLVDTFPGQSIDFFGALRARVYDDEVRRWVAETGVENIAKKLVNSKEGPPTFEQPKMTIEKLLEYGHMLVAEQENVKRVQLADKYLNEAALGAANEDAMKTGNFFK

SEQ ID NO: 1073 - protein, 270 aa, Zea mays
MLLNPASEASVLDTIRQHLLEEPADESFGSLVADQWSGSLPFRTDDADDMVVFGALQDAFAYGWLPDGSFVHVKPEPVRSPDSSSYPCSYDGSPCFGLLDPEPPLTPGTTTPSSRGQEEAAAAMARGKHYRGVRQRPWGKFAAEIRDPARNGARVWLGTYDTAEDAALAYDRAAYRMRGSRALLNFPLRIGSGDKRPSPAPPEPATSSDSSSSSASGSHKRRKRGEAAAANMAMALVPPPSQLNRPAQPWFPAAPVEQAAMAPRVEQIVV

SEQ ID NO: 1074 - protein, 402 aa, Zea mays
MAPGSIASRWRELQGADSWSGLLDPLDIDLRANLIAYGELTQATYDGFNQERRSPHAGACVFGYSNLLAGSGAAAAGSYAVTRFIYATSALPGVPEAFLLLPLPDLLPESWSRESNWMGYVAVATDDGVAALGRRDILVAWRGTMRGLEWVNDFDFTPVSAAPVLGPAAAANPFALVHRGFLSVYTSSNPDSKYNQTSARDQVLAEVSRLVALYKDEVTSITVCGHSLGASLATLNAVDLAANGVNAPPAGSSQPPCPVTALVFASPRVGDGNFKRAIASFPDLRALHVKNAGDIVPTYPPLGYVDVAVQLPIATGRSPYLRQPGTIATLHNLECYLHGVAGEQGSAGGFRLEVDRDVALVNKGEDALKDQYPVPAQWWVAKNKCMVKGADGHYALQDFEQI

SEQ ID NO: 1075 - protein, 535 aa, Zea mays
MVLDHAIRGSAARRAETQTLAPVLLMGPPPPPPIPPTTGMYLPGPPPPGTLLPHPMHMALPREVIIYMDECRSRSLLKFISDAGIVPSLEDERRRERVVRELGKIVMDWAKRVAYEQGNWHWIASATVLTFGSYALGAYGPESDIDVLCIGPCIASLQHHFFVVLRQMLEGRPEVSELHSIEGAKVPLMRFKFNGILVDFPYVQLPVINAAEAMHAFDPHVLENVDGPSWRCLSGVRANRQIIQLVPNMKKFQYLLRCLKLWARKRGLHCHLLGFFAGIHLAILAAYVCRRHPNASINTLLSLFFDIFVHWPWPLPVSLLDPPVPCRGPDGCSLMPIMLPCIPPEFCSSSTTESTFSKIKEELWRGYALSKDTRSTDFNWSWLFAPFPYGARYKCFLRIVLSAPMGEELRDWVGWVKSRFRNLLLKLESLGVYCDPDPSEQVDHTITDPNVVFFWGLIYRRNIQICISSLKEDFMKSVCNNIYGKEKCAHSDITMSIVGPPQLPKSVFDLSVYSEKLPQHMMGHQLMKQNYNAVS

SEQ ID NO: 1076 - protein, 460 aa, Zea mays
MVNGERRADAECTRASLLGRYEIGRTLGEGNFGKVKYARHIASGGHFAIKILDRSKILSLRIDDQIRREIGTLKLLKHPNVVRLHEVAASKTKIYMVLEFVNGGELFDKIAIKGKLSEHEGRRLFQQLIDGVSYCHDRGVYHRDLKPENVLVDRKGTIKISDFGLSALPQHLGSDGLLHTTCGSPNYIAPEVLQNRGYDGSLSDLWSCGVILYVMLVGCLPFDDRNLVVLYQKIFKGDCQIPKWLSPAAQDLLKRILQPNPMKRINVAGIREHEWFKKDYVPAVPHDDDEDVLPSPAPSIKPIDEPAQEKCSPINAFQLIGMASSLDLSGFFEEEDAAQRKIRFTSTHPPKDLFDKIESVVMEMGFKVHRGAGKLKVLKNSKCSRNPSSLLVCTEVFELGPSLYVVELRKSHGDSTLYRQLCERLSDELGACKTDQIARTESSSDDLSSVDGEAFPLSGF

SEQ ID NO: 1077 - protein, 358 aa, Zea mays
MPSFTSKTLLAAVAGAMGVAAHGHVSSINVAGAVYDGFDASSAPFDQNPKTLIAWSTTASDNGFVAPDAFGTGDIICHRDAKNAKGHAKVKAGDQIYIKWDTWPESHKGPVIDMLASCGSAGCESVDKETLKFFKIDEAGLVKSGNPGTYASDELIANDNGWLIEIPENIKPGSYVLRHEIIALHAAGQENGAQNYPQCFNLEISGSGSELPEGTLGTELYKSTEKGIVFDLYNNPTSYPIPGPAMTIKSPKVTQGKLAEKSKGTPTTGSGSDSGSGSAAPETPAQTEAPAAGTSAAAPVATSAAAEEPSAPVETSPAAQEPATPVQTEAPAATKPAKTGCKAKRGMKARRHARDLMN

SEQ ID NO: 1078 - protein, 454 aa, Sorghum bicolor
MEEEGFRWSRAGSFVLFYLVLFLSAAVSSEANIGDFDDYWRQRKLMADAAAEATYKHDPLEVTNQLNRAVHRSVEKEDMSTRRRAMMGHKKGKLNNGPCEATNPIDRCWRCRQDWATDRKRLARCAQGFGRNTTGGLAGKFYVVTDGTDDDVVNPRPGTLRWAVIQIEPLWITFARTMIITLKEELIIQGDKTIDGRGAQVRIANGAQLTVQFANNVIIHNVHINDIMSSNKNGGNIRDSPDHFGWRTVSDGDGITLFGSTNVWLDHLSLSNCQDGLIDVIVKSTGVTISNCHMTNHNDVMLFSSSDKHPEDQIMQITVAFNHFGRGLVQRMPRCRWGFFHVVNNDYTHWLMYAIGGSKAPTIISQGNRYIAPPNLAAKLVTKHHDAPESEWKNWVWHSENDLFMEGANFTVSGGQKINRNFHKKDLIKPKNGSYVTRLTRYAGALACRPGKPC

SEQ ID NO: 1079 - protein, 424 aa, Zea mays
MKVRRSEPVLVHATGAATTQEYYFLSNLDRNVAVLMKTVHIFSVSCDDVATLLRDSLSRVLSQYYPFEGRLAVREDGRLAVRNDRRGVPFVDAVSDYELQVVCDATAPGSELLGDLVYVSMQHENALEAPMLTVQVTTFKCGGFVLGLAMNHCLADGQSAAEFICSWAETARGVAMSTPPYLDRTVQRARPIPTVDFAHDEFAEIEDVSGLAGTFGKEPCVYRSFTFDAGKLHRLKQAASEQGQGGTKSSVFVALTAFVWVSRTRALRMLPDQKSKLLFAVDARLRVDPPLPPGFWGNAIIFACCISTARDLLSKPLSAAARSIREAIVRTDDAFIRSAVDYIELNSGARPSLMATTLVTAWNRLRFRAADFGWGEAIYSGPAELPQKEVAMFLRGVSDSQSTVLVIGMPVSCMQAFQETVDLL

SEQ ID NO: 1080 - protein, 416 aa, Zea mays
MASAHNALRVFFILAVVCAVCTAKRTGANKEESAAAPGGAAGGSGGTFDISKLGATSDGKTDCTKAVQDAWTSACEATGSATVVIPKGDYLVGPLNFTGPCKGSNIAIQLDGNLLGSNDLDKYTASWIELSHVNNIGITGSGTLDGQGTAVYSKSKTDNVKAMPNTLVLFHVINATVAGIKLLNSKFFHINIDNSESITVKDVNITAPADVENTDGVHVGGSSKISILNSTIGTGDDCVSIGPGCNGVLVDSITCGPGQGISVGCLGRYKDEKDVSDITVRNCVLKNTTNGVRIKSYVDAESVLTASHLTFENIRMEEVANPIVIDQYFCPQKVCPGKRSNSSHVSVKDVTFRNITGTSSTPEAISLLCSETQPCSGVSLIDVNVEYAGKNNKTMAVCSNAKGTAKGSIEALACLV

SEQ ID NO: 1081 - protein, 500 aa, Sorghum bicolor
MTTPCPGAAAVRVQWTARSLAGAFLDLTLAWACLCLAALAAAAARFLALLGLPLPCTCARPHLPCILAFLACYPSRAVGSLHAALRARFPFAGPTDDEDRRQEGAEEDGEEQAVDAREEEADLRRREEARAELQRELEKERSAAASAAEEAMSMILRLQKEKSALEIEARQQRRTADERCAFYEDEVEELRDIVLVREREARALRKEVDAYRRLLGLGPAEDDEEEDDEQEMVTPHSFLMSEGEPSSSRSVDANRMQHFRNNSSGFSFKTPSLREQLIVPPLTADRINVGSDDSVAVQTPAKVPTPQSRLELDSSEDEDEDDGAETVEILPLSARSQDLDQGGDFHVDAAPGMESTCAKDTCTKEQTAHAFQEVECPGIDKIVNNDQTASKNDANVYDVHVVDDIRFSTEVKGLIGRSFSEATMQAERLQTRAAADDLLGKSLNAIKGAQDKIRHAANERRQSLQLQLLEDIANQLQGIKDAAEAGRQVYCATPKSSKRS

SEQ ID NO: 1082 - protein, 331 aa, Zea mays
MVVSILTHPFMAAAACVAVALALLATTSSAQLDPHFYDKACPAALPTIKRLVEEAVAAEPRMGASLLRLHFHDCFVNGCDGSILLDDTPFFTGETMAAPNANSVRGFDVIDRIKGAVNAACRGNVVSCADVVAIAARDSVVALGGPSYDVPLGRRDARTASQAAANSSIPAPTFGIDRLASNFASHGLSLQDLVALSGAHTLGFSRCTNFRDRLYNETATLDGSLAASLRAACPRAAGTGDDSLAPLDPTPARFDAAYFASLLRNRGVLHSDQQLFAGGPGVADALVRLYAADTDAFRRDFADAMVRMGSLSPLTGSNGEIRYNCRKVNYS

SEQ ID NO: 1083 - protein, 322 aa, Zea mays
MARRSLAVDATAGAASRVRFAPTSNNLLVSSWDSGLRLYDADEGTLRVNVESEAAFLDCCFEDESAAFACGSDGSVRRYDFHSGSQDTVGLHEDALACIEFSSLTGQIMTGSLDKKLKLWDSKTRNVSPSGTITLNSDVASISICGIYILAAVERNVYLYDMRNLTRPVDEKDCPLDYQIRCLHTSLEWNAYVAGSVDGVVALKYLDRGTDRDLGYAFRCHPNSRNGKWNLVPVNCISVHPCNRTFVTGDDKGCTIVWDAQLKKKLIELPMYLGSVASVAYNHNGQLLAVASNYFLEVDKEEQHHQVFIETVENFKGKSRVG

SEQ ID NO: 1084 - DNA, 1605 bp, Zea mays
atggaggagtgcaccttcacctcggcggccatggccgtggggttcctgctggtcgtgtacctgtacgagccgtactggaaggtgcggcacgtgccggggcccgttccgctgccgttcgtcggccacctccacctgctggcgaggcacggcccggacgtcttcctcgtgctcgccaagaagtacgggccaatcttcaggttccacatgggaaggcaacctttggtcatcgtggccaacgcagagctctgcaaggaggtcggcatcaagaagttcaagagcatgccgaaccggagcttaccttcggccatcgccaattccccgatccacctcaaaggcctcttctcgacaagggattcacggtggtcggcgttgcgaaacatcatcgtctccatctaccagccctcgcacctggcggggctgatcccgagcatgcagtcgcacatcgagcgcgcggccacgaacctggacgacggcggcgaggccgaggtcgccttctccaagctcgcgctcagcctcgccaccgacgtgatcggacaggcggcgttcggcgcggacttcggcctgaccacaaagcctgccgcgccgccccctcaccacggaccaccacgacagcacggcgaggaagacggagacggtagtcacagcaccaggtcgtcggagttcataaagatgcacatccactcgaccacgtcgctgaagatggacctgtcggggtcgctgtccaccatcgtcggcacgctcctgcccgtgctgcagtggccgctacggcagctgctcctgcgggtcccgggcgccgccgacagggagatccagcgcgtcaacggcgcgctctgccggatgatggacggcatcgtggccgacagggtggccgcgagggagcgcgcgccccaagcccagcggcagaaagacttcctgtccgtggtcctcgccgcgcgcgacagcgacgcggccgcgcggaagctgctcacgccggactacctcagcgctctcacctacgagcacctcctcgccgggtcggccaccacggccttcacgctgtcctccgtgctctacctcgtcgcccagcacccgcgggtggaggagaagctgctgagggaggttgacgcgttcggacctccggaccgcgttcccacggcggaagatcttcagagccgcttcccctacaccgatcaggtgctgaaggaatcgatgagatttttcatggtctcgccgctggttgcgcgggagacctctgagcaggtggacatcgctggctatgtcctgcccaagagtacgtgggtgtggatggcaccgggggttctggcaaaggaccccgtcaacttccctgagccagagctcttccggccggagcggttcgaccctgccggcgacgagcagaagaggcggcacccctacgcgttcatcccgttcggaatcggtcccaggatttgcatcggccagaggttctccatccaggagatcaagcttgcgctgatccacctctaccggcagtacgtgttccggcactctccaagcatggagtcccctttggagtttcagttcggtgttgtgctcaacttcaaacatggagtgaagcttcagtccatcaagaggcacaaatgttag

SEQ ID NO: 1085 - DNA, 1466 bp, Zea mays
cgatcatcgcaccacctgtagcccacctcgctctcgagtctcgacccagcgacgagatggccgcggtggatctgaccccaaggacgcccaagaaggcctacggcggcgacggcggcgcctactacgagtggagccccgccgacctgcccatgctcgccgtcgcctccatcggcgccgccaagctctcgctcgccgccggcggcctctccctccccagctactccgactccgccaaggtcgcctacgtcctacaaggcgtcggtacctgcggcctcgtcctccccgaggcgacgaaggagaaggtggtggcggtgaaggagggcgacgcgctggcgctgcccttcggcgcggtgacgtggtggcacaacggccccgccgcgcaggccgacctcacggtgctcttcctcggcgacacctccaagggccacaagcgggggcagttcaccaacttccagctcacggggtccgcgggcatcttcacgggcctgtccaccgagttcgtgtcgcgcgcgtgggatctgccggagcccgacgccgcgaggctggtgtcgagccagccggcctcgggcatcgtcaagctgcccgcctccgccgccgcgctcccggcgccctcgccgcaggaccgcgccggggtggcgctcaactgcctggtggcgccgctggacgtggacatccccggcgggggccgcgtcgtggtgctcaacacggccaacctgccgctggtgcgcgaggtcgggctcggcgccgacctggtccgcatcgacgcccactccatgtgctccccgggcttctcgtgcgactcggcgtaccaggtcacgtacatcgtgcgcggcagcggccgggtgcaggtggtcgggcccgacgggaggcgcgtgctggagacccgcatcgagggcgggtccctcttcatcgtgccccgcttccatgtcgtgtccaagatcgccgacgcgtccgggatggagtggttctccatcatcaccaccccgaagtaaggcgtctctgctcctttttgcctgactgtgctttgtttgcctgctcgcgaatagaaatggattgactgtgctttgtttggaaaaaaaaatgcagcccggtgttcagccacctggcggggaagacgtcggtgtggaaggccatctcgccggaggtgctgcaggcgtccttcaacaccactccggagatggagaagctgttccgctccaagaggctcgactcggagatctttttcgcgcctcccagctccaactgaagcaccagctctccaagacgggggagaggagatcgttctcgattgtcgtcaaggtcatggttattaataattaagttagtgtcgtcgtcttaagttagcgtcgcgtcgtcgtcttaagttagcgtcgtcgaagtcagggtagagcgagaggtagaggtcgtctgtcatccgccattgaactggaactgctttttcaagatgaatactacccctctttctt

SEQ ID NO: 1086 - DNA, 1393 bp, Sorghum bicolor
atggcggctctgccgcccttctcgccgcggcggcccttctcgtcgccgtgcttcatcctctgcttcctactcggcttcgtcgcgggcctcttccccttcgcgcaccgccacctccacctcgacctccaccacctcccgctcccggtcccggaccctcctcctactcctcctcctgccgcgccgacccaggcggccccgactccgccgccgacgacgacgaccctgatcgtcgtcacgccgacccgcgcgcgcccgctgcaggcgtactacctgcaccgcctcgcgcacacgctccgcctcgtgccccagccgctgctctggctcgtcgtcgaccgcggcgccgccacgcgcgagaccgccgccctgctccgcggctgcggcctcatgtaccgccacctcccttcctcccaccgcggcgacgcgcccgatgatgctcgccggagaggggcgacccatgagcacccggcggagcgcggcctgcagcggcgccagaggaacgcggcgctcgaccacatcgagcaccaccgcatccacggcctcgtctacttcgccgacgaggacaacgtgtattcccttgacctcttccatcagcttcgcggcataaggagttttggcacctggccagtcgcaatgctgggcgtgggcaagagcaagacacttctggaagggccagtttgtgacagcagccaggtggtaggatggcacacgaacgagagggacaagaggcaacgaaggtttcatgtgaatacttcgggctttgctttcaatagcagtatgctctgggatgccgacaagagggctcatcaggcgtggaattacatccggctgctggacacggtcagagatgggtttcaggcaacaacatttgtagaacagcttgtagaagatgaaacttatatggagggcataccaactggttgttcaaaaattatgaatgttaatcttcatctagaagataaacatcttgtatatccaaagggatggcaaatgacagaaaacctggatgtattaattcctctctgagccagaacagaggcagaccagcctgcagcttcagcaatcgagcacatggaaacggccgagcatgacgtatgtggcatgtgtcaaactgaagaaagtcgtgggtcaccggaggtttaggttaggtgtacattaccaaaggaaatatgcacttaactttcacagatttgtttgcagcaaagagctcaaaaaatacgattaggtacacgaatacatcatacaagaggatcttaggttcagagtagggccttagcctttgtgaacatttaaggtaaatacatctaacttgaagtgaatgtggtgactacttttatgtaccactagagactagagataacattggttaattagtttgaattatatacatgcattg

SEQ ID NO: 1087 - DNA, 1955 bp, Zea mays
ccctcccctccggcctcccttcccgcaccgcggacgacaagtcaaataccgcgcgtgcgtaccacttggagccatccggcaccacgccacgagtccacagtccgcgcgccccccacgggccgtcgtcgccccggcttctcctctccttcccggcttcccccaacccctcgcgaaagctcgccgctgctgcgtccgcgccccgtggcggcacggcgcggcacctcgtggggaaaccgacggaggccttcgccgagcctttgggggccggcgctttttcctggtgccgtccttctgtactgcctgcgggtgggttgttccgatcataaccgacaaggcgcggcgtgctctcttccctcgcgttgtagactctcgcgggatctgtctcggcggcggcggcgggggtgggggtgggttactgggctcgcttcatcctcccggatcacggcggcggtttgttcagaacatgttagaagccagggaagatcggtgaaatgcttgcattgatataataagtccaggctgaagttattgagctgacagcactaagatataatagtttgagaatctcaatgggttgcttttctacattttgcaagaaaagaagggcaacgcggcaaccaagttcccaccataatgaagacgtacctggctgttcaaatataacaaaatacacttacaaggagctagtaagggcgacaaataactttaacccattgaacaaaattggtgagggtggttttggttccgtttacaagggacagctcaggaatggtacagttattgctgtcaaggtcctttcgtcggagtcaagacaaggagtaagggagtttctgaatgaactcgtggcaatttccgacatctcacatgataatcttgtgaaactttatgggtattgtgcggaaggagaccaaagaatccttgtttacaatcatcttgaaaataatagccttgcacaaacacttctaggctccagccacagcaatatccagtttgattggaaaacacgagtaaatatttgccttggcattgcacggggattagcatacctccatcatggtgtcagtccccacattgttcatcgagacattaaagcaagcaatatacttcttgatagggaccttaccccaaaaatctctgattttggtctagcaaagcttcttccaccaaacgcaacacatgttagcacaagagttgcaggaacactgggttatttggctcctgagtatgctattcgaggacaggtgacacgcaaatcagatgtgtacagctttggcgtgctgcttctggaaattgtttgcgggagatcaaacagcgatacaagattagcatacggagatcagatactcctcgaaaagttcccagagatcaccaacggggctctcctcttgcagacatggatgcactacgagcaggggagtctggagaggatcatagacaggtccttgggcggcggcgacctggacgtggcgcaggcctgcaggttcctgaaggtcgggctgctgtgcacgcaggacgtgacgaggcaccggcccgacatgccgagggtcgtcgccatgctgacgggcgagtgggacgtcgagccggagacggtcagcaagcccgccataatcagcgacttcatggacctcaaggtcaggagcacgaggaaagcgagcgacaacgtggccacgccgcctacgtcctcctcgacgttcctgtcctccctcatggcgcactcctcgcccttgctgtcgaacgagtccacgcaggcctccatggcgttcaccggggtgtcggatcgcgagtgatccttgatcccttcgtcaaagactggtcaggctggctggtagtgacctgagttggttggaggtgtggaagacatgtgtagtgtaggcaggcaggcacagatggatttaattgcttcgtttgtaggcgcaacatcattgttgagtcaaaaggttcaagtacatgtgagg

SEQ ID NO: 1088 - DNA, 1925 bp, Sorghum bicolor
atggcgtcgccgcaccttcccttcctctccttccccaaaaccctaccgccaccacctccaccgctcaagccccacgcccaccgcacctccctcgccgtcgccgctgctcctgctcccccgcccgccccgcctgacggcgcggggcccgccgcgcccacgcgtggcgaccgcttcctcggccgccagctggccaccgaggccgccgcgcgcgtgctcgcgcccgacgacgccgacaggcgccgccgacgcaaggagaagcgccgggcactgtcgcggaagccctccggcctcgcctcttgctacgggtgcggcgccccgctgcagacggcggaggaggccgcgccgggatacgtagaccccgacacgtacgaactgaaaaagaggcaccaccaactgagaaccgttctatgtggaaggtgcaagctgctctctcatggccacatggtcactgctgttggtggccacggcggttatcctgggggcaagcagtttgtttctgcggaacagctcagggagaagctgtcatacctccgtcacgagaaagcactgatagtcaaattggttgacatcgttgacttcaatgggagtttcctggcacgagtacgtgactttgctggtgcaaatccgattattcttgtgataacaaaggttgatctccttcccagagacactgatttgaattgcataggcgactgggttgtcgagtcagttgtcaagaagaagcttaatgtccttagtgtccatttgacaagctcaaagtcactggtcggtatcacaggggttatatcagagattcaacaggaaaagaagggccgagatgtatatatactgggttctgcaaatgttgggaaatctgcatttatcagtgcaatgctaagaacaatggcatacaaggatccggtggcagcggcagctcaaaaatacaagcctatacagtctgctgttcctggaacaacccttggccctattcaaattgaagcatttttaggcggagggaaattgtatgatacacctggagtccaccttcaccataggcaggcagcagttatccatgctgatgatctgccttctcttgcaccacaaagtcgtttgaaagggcgatgttttcccgctaatgatacagatgttgaattgagtgggaattcattattctgggctgggctagtccgcattgatgttgtcaaggctcttccacgcgcacggctgacattctatgggcccaagaagctaaagattaatatggtcccgacaacagaagcagatcaattttacgagactgaagttggagttacattgactccaccaactggtaaggagagagctgaaggatggcaagggcttcaaggtgttcgcgagttgaagataaagtatgaggaacgtgacaggcctgcttgtgacatcgcgatctctgggcttgggtggatttctgtggagccatcaggcgtgccctcaaacagctctgatgacaatgtcgaggaagaatacgatggcggtgagctgcatctggtagtacatgtacccaaaccggttgaggtcttcgtccgccccccattgcctgttggtaaagcagcgtcgcaatggtaccagtatcaagagctcacagaggaagaagaggagttgaggcctaaatggcactactgatgctgctctggttctctacctatttctctagcagtagtacagttttgtgtaatccaaatatttagcacaaagttatatgctatgatgagatgatgttggcacgactagtgttaggatcaggtgataaggtggattcagaaaacaaattttgaataaatgtctctagtgtctatctagcacatgcttcagaaggccatgaggaaaagaatcctccagtacgtgctgtacatgtactctaaatgaaggagcttaccaacaagccatcgaagagattcataacaatt

SEQ ID NO: 1089 - DNA, 2421 bp, Zea mays
aagagccctgtctccatatttgctcattgccaacaaggagaggacagcgggtaaactacaccacaccaatggcttccagcctcgtgaatctgctcctcatggaggtggcggccatcgtcagcattgttctgctcgcaatcctcgttgtgctcagctcttacggccgccgttctggccatccggcactccgcctcttcgtttggtccgcatccactctgttcctcccgctcgtgtcctacgccgtctccgcggcggccaaatgggacgcagcgcgcgtccctttgctactcgcctggacagtcttcctccagatcctgcgcaacaccatcgacacctcccgctcctcgagttcgaccatcaacagcagcggctccaacggaagcaagttccggccgtccgttgagcagctggcgaggatgggttgggtggcgttcctcatcatcagcagtggcggtaccgccgggagcccgctgctgaccggcgtcctgctctggctgtgggtgctcagcctcctcaagctcatccacaggctcgtcgctgccgagctcgccaagaactcgttcgctgtcggcctcaactcgtacctagtcgccgactacatgaagcaactccatgggcatgggcatagtcaagcagctggccagcgtggactagaagtgcctgcttactttgtgatgggtgaggagaaactgcctatcaagcctgggccgcaggggtactacattgacagcactgaagctccgccttcattgtccatggacgacgcggggcatgtcgtcaccgtggacaggatatggtcgctttcctcatccggcgaccctctcctcgcatcctgcccgcagatcaaggacctctgcctctcttttgctctattcaagctccagctccggcggttcattgggtgcccactcgccgaagccggctgtcaccgtgctatggcatttgtgcaggacggtctccttgctggtagtggtagcgcagagagggtgttccaggtggtcgaggccgagctgtccttcctcgccgacttcctgtactcgaagctcaccgtcttctatgccagcgggtggtggttcccagcactcaactcaatcctcgtactggccacgtggatcagctgtctagcagccggcggcgccatcgtgcacgacatgacgaacccaggcacggcactcgccgtggactaccacatgctccgggattacctgcaacaccacgacacggtgttccacgtcattgttggccttgacatacttgtctccgtctcattcatcgtctccattgtgttcatggaaggatgggagatcgccaactacgtctgttccgactggatcaaggtgtccaccatctgcgagtacacccgacgtccatcgtggcagaagtcgctgtgggcgcgtcgtaagctcagccgcctattttggctccgacccatgcgacaatgggatgaccgattctgccaggtgtcaatattgcagcttcggttctgctactatggctgcatctcacagcaagtcgaccgaatcgtgaagaagaccgtcgcagtgcccgcaacggtgaaatctgccattgtgaagacgctcagagcaaaccagggtaggctcgggaacggcgagctatccttgcaaggcaacggagtcggtaacctctcctgggcttgtcgtattaaagccagcgacgacaatgccatggacagcttatccgagcagatcctcgtgtggcatctcgccacgaggctcgtcgagctcaagtgctctcaaggagctcatggtgacagtggcaatgacacatatggggagagcgatctagaggtggttgcgacacagttgtcccgttactgcgcctacctagtggcgctgaagtcgtccctcctgccggaccaccgcgcatggacagaggagctctacaagggcgtggtggaggaggtgacaagggtgctggcacgatgcgcgggaccagttgcggggtacgagcgcgcttcgatgtgcctcagcgggagcatgaacgccacgttgagaaaggcatccaaactcgggcggcagctagtagaggaggtcagtgacgaggagttgttgtggaaggtgctcgccgagttctgggcagaatttgtcctgtacctcgcgccgtcagacaacgtggcctcgcactcaaagtctctctaccacggtggcgagttcataaccgtgttgtgggcgttgcttggtcacgctggcattgtcgggcgcccggagacggagagcactgagaactcagcctagaataggttcgttcttctttttgtacttgctttaggcatgtgaaattttacatatatgcatttgatctttgttgtttcaatttcctcttttttcatgtacacaaatggaagtttgctttatataggatgcaatatgtattggccttaactaaaaaaaaaaaaaaaaa

SEQ ID NO: 1090 - DNA, 1646 bp, Zea mays
tgctcacatgccgcgaggtgctccaggaacaagtgccgtccaccagatccaggctcggcatgttcgtgatcgaggacaagggcggcgccatcgcgctgatgctggcgtcgctcctgttcctgggcacctggccggccgtgctcaccctgctggagcgccggggccgcctgccgcagcacacgtacctggactactccatcaccaacctcctcgcggccgtgctcatcgcgctcaccttcggccagctcggggacagcaggcgcggcatgcccaacttcttcacgcagctcggccaggacaactggccctctgtgctgttcgccatggccgggggcgtcgtgctcagcgtcggcaacctctccacccagtacgcttgggcctatgtgggcctctccgtcactgaggtcatcagctccagcatggtggtggtcataggcaccacgctgaactacttcctggacaaccgcatcaacagggcagagattctgttccctggtgtggcgtgcttcctcgtcgccgtcatccttggctccgctgtccattcctccaatgcagctgacaatgagcagaaactcggtgcctccacgaatgcctacaaactcgggacaagtggaaatgtggaaccaagcaaacaagctgtagacagaggtgttcattgtctatctgaagaagaaagaacaaatctaatttcagatgctcccaaagacttggaggagagtggagcctctggaatccggcaacctgacaaagctgaggcaggcactgcagagtacctcattgagcttgaagaacggcgatcaattaaggtattcggttcaaacaccttcatcgggctggggatcgtcttcttcgcgggcgtgtgcttctcgctcttctccccggcgttcaacctggccactaacgaccagtggcacacgctcagggacggcgtgccgcacctggtggtgtacaccgccttcttctacttctccatctcctgcttcgtcgtcggcgtcggactcaacgtcctgttcctctaccgccccatggccggcgtgccccgctcctccctcggggcctacctcagggactgggacggccgccagtgggcgctcctcgccggcctgctctgcggcttcggcaacggcttccagttcatgggcggccaggccgcagggtacgccgccgctgacgctgtccaggccctgccgctcgtcagcaccttctggggcgtactgctcttcggggagtaccgcaagtcgtcgcggaagacctacgtcctgctcggcttcatgctcttcatgttcgtcgccgctgtcgccgtgctcatggcttcgtcaggtcacaggagcacagagtgaattgcaagtcttgttcgtcctctgcttgttgcaagcccttccacttgcgattgatccacggaaagatccatcgtcttcgtgaagcaggggaaatccattccttccagccattaatgagatcttcagaacaatggaatggagatgtacaaaaaaatggttgttgtatgattgatcaaatgtatagaactatttatattctttccaagacaattggctgataggataggaactgttccaggggtggaaaaaatctctatctttatgaacagggtaaaagcaatgttcagaaaaaagtagtttgtgcct

SEQ ID NO: 1091 - DNA, 1634 bp, Sorghum bicolor
ccgcagcaatagactggtcatcagagcagaaaaaatgtctccttacctgctgcttgccgccgccgcgcttatcgccttcctctacatcatcaagaaccgcaggagcagcaagctcccgccgtccccgccgtcgctaccgctgatcggccaccttcacctcatcggccgcctcgcgcaccgatccttgcacgagctgcagcttcgctatggcggcggcggcggtctcctcttcctgcaactcgggcgcaggcggaccttggtcgtgtccactgccgcggcggcagcggacctgttcaggaaccacgacctcgccttcgcctcgcgcgcgcgcagcgtgggaggggataagatgacgtatggctgcagcaacgtgtcgttcgcgccgtacggcgagaactggcgcctgggcaagaagatcgcggtggtccacctcctctccccgcggcgcgtggagtcgttcgcgcccgtgcgggccgccgaggtagccgcgctcgtcgcgtggacacgctgcgccgcggaggcacgggaggccgtggagatgagggagctcctgtacgggtacaccaacgcggtggtcacccgcgcggccaccggtgccgccggagtaacagcagacaagatgaaacagctgatggggaacgccgaggcgctgatggcgggcttccaacctgaggacgtgctgccggacgcgccggcgaggtttgtgagatgggcgacgggcctcgataagaagctcgacgacatgggcgaggcatgggacaagttcctgtccgagatagtggccgcgcacaagaagggggacgacggtgcaggggaggacgatgaggacttcttggacgtcttgcttcggctgagggaagaaggtaccggcgggctcgagctcacagacgatcgcatcaaagctatcatcaaggatatgatattcgccgcaactgaaacatcatctcaaacgctagaatggaccatggccgaactcatggccaacccgcgggtgatgagcaagctccaggacgagatagcgcgagtcgtcagcgccgatcagacgaccattgctgaaccggacctgagcaaaatggagtacctgaaggcagtgttcaaagaggtgcttcggctccacgcaccagcgccgctcctcgtcccgcacgaatcaacgacgccagcggtcgtgcagggctacgagatcccggccaagacggcgctcttcgtcaacgtgtgggccatcgggcgggaccctgctgtgtgggacacagcggacgtgttccgcccggagcggttcatggccggcagcccctccgtggactttagagggaccgactaccagctcatcccgttcggcgccggtcggaggatctgcccgggcatcagcttcgcgctgccggtcttggagctcgcgctcgtcagcctcctgcatcacttcgaatgggagctccccgccggcatgcgtccggcggacctcgacatgggcgaggcaccggggctgacgacgccccggcaggtaccccttgtcctagtccccaagtgcaagacgctcgttcaggcggcactacagtagcacaagggatttggtgtgcctccattgttaccgtgaactaggctggacagtttggtctttcacatttagtcatggggcattg

SEQ ID NO: 1092 - DNA, 1940 bp, Zea mays
tgaaaatgcttccttttctctggttgagatcttcccctccccctgccggatctgaatctcatccccgggtggggccgtgggggggactctagctggaggggcactttcttgttcaccatgtttgtcgtgcccttaatacattttttgtagtaccttcctgtcaaaactacaagaaatggagattttggatggatgcatgtgtacatgtctctcggaaggaaaagcccgcaagatcggatcgatcacttacttggctactgctgcctgctgctgcaggtgctccaggaacaagtgccgtccaccagatccaggctcggcatgttcgtgatcgaggacaagggcggcgccatcgcgctgatgctggcgtcgctcctgttcctgggcacctggccggccgtgctcaccctgctggagcgccggggccgcctgccgcagcacacgtacctggactactccatcaccaacctcctcgcggccgtgctcatcgcgctcaccttcggccagctcggggacagcaggcgcggcatgcccaacttcttcacgcagctcggccaggacaactggccctctgtgctgttcgccatggccgggggcgtcgtgctcagcgtcggcaacctctccacccagtacgcttgggcctatgtgggcctctccgtcactgaggtcatcagctccagcatggtggtggtcataggcaccacgctgaactacttcctggacaaccgcatcaacagggcagagattctgttccctggtgtggcgtgcttcctcgtcgccgtcatccttggctccgctgtccattcctccaatgcagctgacaatgagcagaaactcggtgcctccacgaatgcctacaaactcgggacaagtggaaatgtggaaccaagcaaacaagctgtagacagagatgctcccaaagacttggaggagagtggagcctctggaatccggcaacctgacaaagctgaggcaggcactgcagagtacctcattgagcttgaagaacggcgatcaattaaggtattcggttcaaacaccttcatcgggctggggatcgtcttcttcgcgggcgtgtgcttctcgctcttctccccggcgttcaacctggccactaacgaccagtggcacacgctcagggacggcgtgccgcacctggtggtgtacaccgccttcttctacttctccatctcctgcttcgtcgtcggcgtcggactcaacgtcctgttcctctaccgccccatggccggcgtgccccgctcctccctcggggcctacctcagggactgggacggccgccagtgggcgctcctcgccggcctgctctgcggcttcggcaacggcttccagttcatgggcggccaggccgcagggtacgccgccgctgacgctgtccaggccctgccgctcgtcagcaccttctggggcgtactgctcttcggggagtaccgcaagtcgtcgcggaagacctacgtcctgctcggcttcatgctcttcatgttcgtcgccgctgtcgccgtgctcatggcttcgtcaggtcacaggagcacagagtgaattgcaagtcttgttcgtcctctgcttgttgcaagcccttccacttgcgattgatccacggaaagatccatcgtcttcgtgaagcaggggaaatccattccttccagccattaatgagatcttcagaacaatggaatggagatgtacaaaaaaatggttgttgtatgattgatcaaatgtatagaactatttatattctttccaagacaattggctgataggataggaactgttccaggggtggaaaaaatctctatctttatgaacagggtaaaagcaatgttcagaaaaaagtagtttgtgcctagtatgacagattcagaatggtatcagtactcccgctgttttggaatgttcaagagaaaactagtggatgctctaaatct

SEQ ID NO: 1093 - DNA, 1487 bp, Zea mays
ctctgcttcactgcaggtggtcgaagaagaagaaggccctcgatctcctgccctccactccaccagagccggtgcgatcccggtcccgaccgacctcagcacagcatgttcgtggtcgaggacaagggcggcgccatcgcgctgatgctggcgtcgctgctgttcctgggcacgtggccggccgtgctgacgctgctggagcgccgaggccggctgccgcagcacacgtacctggactactccgtcacgaacctcctcgcggccgtgctcatcgcgctcaccttcggccagctcgggggcgccaggcgcggcatgcccaacttcctcacgcagctcggccagcccaactggccttccgtgctgttcgccatggccggaggcgtcgtgctcagcgtcgggaacctctccacccagtacgcttgggcctacgtcggtctctccgtcaccgaggtcgtcagctccagcatggtggtcgtcattggcacgacgctgaactacttcctggacaaccgcatcaacagggcagagattctgtttcccggcgtggcatgcttccttgttgctgtcatccttggctctgctgtccacgcctccaacgcagctgacaacgaggagaagctcagtgcctccacaaatgcctaccagcttggtaggacagctggggctgcggaaccaagcaagcatgtcctagacaaagatgttgccaaggacttggagaatggagtctctggaacaaagcaagctgacaaagcggaggcaggcaccgcagaatacctcattcaactcgaagagcggcggtcaatcaaggtattcggttcaaacacgttcatcggtctggggatcgtgttcttcgcgggggcgtgcttctcgctcttctccccggcgttcaacctggcaaccaacgaccagtggcgcacgctcaggggcggcgtgccgcacctggtggtctacaccgccttcttctacttctccgtcgcgtgcttcgccgtcggcgtcggcctcaacgtgctgttcctctaccgccccatggccggggtgcccaggtcctccctcggggcctacctcggggactgggacggccggcactgggcgctcctcgccggcctgctctgcggcttcggcaacggcctccagttcacgggcgggcaggccgcgggctacgccgccgccgacgcggtccaggcgctgccgctcgtcagcaccttctggggcgtactgctctttggggagtaccgcaagtcgtcgcggaagacgtacctcctgctcggcttcatgctcttcatgttcgtcgccgccgtcgccgtgctcatggcttcgtcaggtcacaggaccacagagtgatcctggtcctgtcagtcaggctgtcacgccctaacatgcatgaaatcttcggtacaaaggaatggagatgtacataaaaatgtttctgttgtgattgatcaggtatatagcaccatataaaaattaaagctatttatattctttcc

SEQ ID NO: 1094 - DNA, 1546 bp, Zea mays
ggcatccgccgatcctcggctccgatcaatggcgtccaccaacgcaatcgatttccaactcacccaggcccgggcgctgctgtccgaattcgacaaccggctccgcgagattgattccaagtgggagacccgcgtcggcgtcctcgaaacgaaagttgcggactctgctcgaaatctggagacgatctccaaggagatccgcgacggggtggtggcgcagttggcggcggccgaggcgggtgtggatttccggatccgcctgcttgagacggggaccatcattcgcgtcgctgcgctcgagtcgactgcccacgccttcgagctgtggcgtcctcacgtcgacttgtcgatcgacagtctcttctcctccattgacgcggtttgtaccgaggtcgagaaattggggatccaccggttcccaggaccgcgtcccagcgatggcgcagcagcaccggggaccgcgacgcaaccggaaccctcttctcatcggccacgttcatcgcctccgcccgaggtccatgacggcgacgatgacgatgaagaaattgacgatgacgatgacgacgacgacgacgacgacgacgacgacgacgacgacgacgacgacgacgacgacgaggattatgagggcttcacagacgaagagctggacaaattcgaaagcgccttcggatggggttctacattcttgagtgatcctcaagttctttgtatggactcgagtgatccacaaaacccccctcgtattggccggcaaaattatgagccgctcaccgcacaggagtttttttcactgcgccacaattggcaacagctgctcgatggcaagaagacatacctccgcccaccaaagaacaaccgtgttgccaagcacagttatgctaactgcacctttgtaaccccagaacctcttgagaaggcactacaatgtcaggagccgctatctgattttggtcggaaatatgcagaaaattctatagttcagcaaaagtttaagattcttagtgaacattatgcgcacgtcagacaaatgcgaatggatggatcatctttttacagagctttccttttctcttacttggaaaaccttgggaaaatgcaagctagtcatgctgaggtcactcgcttaatggaatgtgtggcaaggtccagagagaaattttgtcgtttacattggaatgatgcgtacttctcaaatcctgaagcatttttctcaagtgttgtttctgagttcgagcaattggtcaattcagttgccaatgggctaaatgctgatgagctttacaagagaagcctacatgagattacatcatccaggagtgaggatacaaatttttttgggatgtgttgtttatttgttctctatgtaacattttctttggttagttctttgtttgtttagattgctgacagaggttcatatccgtacacatcatgcggactacccagaattcagtcaggaaacagaagcccttatggttagtgtttctggctgctgtacagtccttttcagaaattatgcttgattcatttcaagtagtagatt

SEQ ID NO: 1095 - DNA, 1299 bp, Sorghum bicolor
actttttcaactggctgtcccagatgcccgtcggctcccgacggaggccgccgccgtcgcaccaccgtcgcgccatgacacccgcctccgtctccgcccccgcccccggcgccgccgccgctcccacaaagccgctctacctccgcggtccggtcatcgcgggcgccgccgcgctggccgcgttcctcctcctcgccgccgcctacgccaccaggcgagccggttccccaccgaccgccctcctcgctcacccagctgttgccaccaggttcttctccttcgacctggtccgcgagtaccctcacgacccggacgccttcacccagggtctcttatacgcggaaaatgacactcttttcgagtccactggcctctaccacaggtcttcagtccgaaaggttgatcttcagacgggaaaggttttggttaatcaccaaatggacggacaaatgtttggagaaggtttaactcttctcggccacagattgtttcaggttacctggttgaagaacgacgggtttatatatgatcaacataacttctccaaacgcacgagttttacccataaaatgcgagatggttggggtttggcgactgatggaaaagttctttttggcagtgatggcacttcaatgctgtataagctggatccaaagtcacttgaagtcatgaaagtggtgactgtcaagtatcacggtgatgaagtcccctaccttaatgagctggagtatgtagatggtgaagtctgggcaaatgtctggcagacagattgcatagctagagtgtcccctgaagatggcctagtggtgggctggatctttcttcatgagctgaggcggcagttgtggaactcaggcaatacgaatattgatgtcttaaacgggatagcttgggatgaaagaaaccacagattatttgtgacagggaaactgtggccaaagctctatgagatcaagctacgggcagtagatggtccagcagatggatctgtagaaaaactttgtccaaaagccagcttctatcgctgaagagtgtaccacggcatatatactggggcgtgctaacatgggccttaatttgtctaaccgcatgatgcgaagaatgtggagatgtgagtacatgcatgtttgatttggtaccagtctctcatatacccatgagttagtactggttgggatagttgtaggatttttttaaaaaaaatgaatatttcttatagctgtaaattgttgtaacttgtatgaattttgatgatggttgtgttggttgcaaggtgcaatttcaagaaatttagtgttg

SEQ ID NO: 1096 - DNA, 1552 bp, Zea mays
ccggaagcgcatgatctcccttctcctccgggcacctggatcaccatacgtcccttgcccccacttcttcccgctcttctatccccaccgcctcctctccgccaccaaatgcgtcgctacaaaaccattcgccgtcgaggactacctcgtcgccacatgcggcctcacccaagcacaggccctcaaggcgtcgaagcatgtctcccatctgaaggatccctcgaaagccgacgcggtcgtcgccttcctctccaacctcggcctgtccagcgccgagatcaccgacgtcgtgaccagggaccccaaagtcctctgctccgacgtggagagatccctcaccgctcgcgtcgccgagctcaccgacctcgggttttcacgtccggagatcgtccgccttctcatcgttggcatgaaccacttccgccatagctcgcttcgcctcaatcttgagttttggatctcggtctttggctctctcgacgagctcattcgggcgctcagaattaacgccgctctcctcagcacaaggattgaggaggtctgcaagcccaacctggagctccttcaagagtgtggtataaatgtttctgatatctccaacagcttcatgtcccgtgtgctcaccagggaccctaagagcctgcaggaagctttggctcgccttcatgagttcagaatccagccgggctctcaacctttcttccgtgggctttatacatttgcaatccttggcagcgggaagataaccaagagcattcagctgtttgagaagcttggatggtcaaaggaccatatagtatcagcggtgaagagagacccgactatattgggtttcaccgaggagagggttcgaagaaacatggaattcttgatcagggttgtcggattggaggtaccatacatcgcacgaaggccagcgctgataaattatagtattgaccgtcggttgttgccacggaattgcttgatcaattttctcagggcaaaggggttgttcaatgacgaggctagtttcctttctgtcgccgctataggcgatgagaaatttcggcgccgatacgtgcatccttacgaggaggattttccaggccttgctgctgcttttgcttctagctgtgctggagaacaccaatgggaacggctatataagatgacaggcgaaaataaagaaagctgacaattgttctggaaagtacaatcaggaacctgctgcaagccttgtttttcatcaccatggtcagtcgttttgaaatctaattttctagcattttgctgctggctactggcttaggtgttattaaatgtttgattagtggtatggtatatttctttcactaggttctatcttgctgcctcccttctgagaaagagcttctcatgtgatggcatcgttacaagtttatttattaacttgcaaggattatctcaagttttagcccaactttattcctgtgcttcaggaagattattacgttggtggtctacttcccaccatgttttttgtaccacaatctatgagctctcgaacaccaggaacgggtttttttattcc

SEQ ID NO: 1097 - DNA, 1232 bp, Zea mays
cgaggagcaagctctgctctccgaacccggccacccatggctctcgtcctcctcctcctcctgcccatcttccttctctcatcgtcttcctgcctcgtcctcgccattccaacgctagccagccaggctgccaccctgctctccctcaaggactctttctcgcctccgctcccgccgcagctgcgcagctggaccctcgccaactatgcctcgctctgctcctcatggcccggcgtcgcctgcagcaaccgcaccgtcgtctcgctcgacatctccggctacaacctctccggcacgctgccccccgctatcgccgacctcgctggcctccgtttcttctccgccgccgccaactccttctccggagacattccgcccgccatcgccgccctccgcgacctccgccacctcaacctctccaacaaccagttcaacggcacatcgtgcggctgctggccttctgctcggggcccgaggcgaagctgctggtgtacgagtacatggtgaacggcagcctcggggaggcgctgcaccgcgctggcgctgatgatggcggcggcggtgtggtgctgtcgtgggcgtcgcgtctccgcgtggcgacggaggctgccaaggggctgtgctacctgcaccacgactgctcgccgccgatcctgcaccgggacgtcaagtccaacaacatcctgctggacgcgcgcatggaggcccacgtggcggacttcgggctggccaagttcctgggcggcagcggcgcctccgagtgcatgtccgccgtcgcaggatcatacggctacatcgcaccagagtacgcgtacacgctcaaggtggacgagaagagtgacgtgtacagcttcggcgtggtcctgctggagctcatcacggggctgaagccggtgggggagcacctcggcgacgacgcggtggacctggtgcagtgggcgcgcgcccggagctctgcagggggcggcgtcctggcgctgctggaccctcgcctcggcggcgacgtcccggtggcggaggcggcgcatgtgctgttcgtgtcgatgctatgcgtgcaggagcacagcgtggagcgccccaccatgcgcgaggtcgtccagatgctgcagcaggcacggcaccagcctagctaggacgacgactggagaaacgatgtgaaaatgtgatagatagacagaggtggtgttgtgtacgttgtcattgcattcggtaactatatatatttttagcag

SEQ ID NO: 1098 - DNA, 1631 bp, Zea mays
gtaaccctcacgccggcgcagccgcagccgaggcgccatgaacaacctccggaagcgcatgatctcccttctcctccgggcacctggatcaccatacgtcccttgcccccacttcttcccgctcttctatccccaccgcctcctctccgccatcaaatgcgtcgctacaaaaccattcgccgtcgaggactacctcgtcgccacatgcggcctcacccaagcacaggccctcaaggcgtcgaagcatgtctcccatctgaaggatccctcgaaagccgacgcggtcgtcgccttcctctccaacctcggcctgtccagcgccgagatcaccgacgtcgtgaccagggaccccaaagtcctctgctccgacgtggagagatccctcaccgctcgcgtcgccgagctcaccgacctcgggttttcacgtccggagatcgtccgccttctcatcgttggcatgaaccacttccgccatagctcgcttcgcctcaatcttgagttttggatctcggtctttggctctctcgacgagctcattcgggcgctcagaattaacgccgctctcctcagcacaaggattgaggaggtctgcaagcccaacttggagctccttcaagagtgtggtataaatgtttctgatatctccaacagcttcatgtcccgtgtgctcaccagggaccctaagagcctgcaggaagctttggctcgccttcatgagttcagaatccagccgggctctcaacctttcttccgtgggctttatacatttgcaatccttggcagcgggaagataaccaagagcattcagctgtttgagaagcttggatggtcaaaggaccatatagtatcagcggtgaagagagacccgactatattgggtttcaccgaggagagggttcgaagaaacatggaattcttgatcagggttgtcggattggaggtaccatacatcgcacgaaggccagcgctgataaattatagtattgaccgtcggttgttgccacggaattgcttgatcaattttctcagggcaaaggggttgttcaatgacgaggctagtttcctttctgtcgccgctataggcgatgagaaatttcggcgccgatacgtgcatccttacgaggaggattttccaggccttgctgctgcttttgcttctagctgtgctggagaacaccaatgggaacggctatataagatgacaggcgaaaataaagaaagctgacaattgttctggaaagtacaatcaggaacctgctgcaagccttgtttttcatcaccatggtcagtcgttttgaaatctaattttctagcattttgctgctggctactggcttaggtgttattaaatgtttgattagtggtatggtatatttctttcactaggttctatcttgctgcctcccttctgagaaagagcttctcatgtgatggcatcgttacaagtttatttattaacttgcaaggattatctcaagttttagcccaactttattcctgtgcttcaggaagattattacgttggtggtctacttcccaccatgttttttgtaccacaatctatgagctctcgaacaccaggaacgggtttttttattccaaattcttcagtcgacaaaaaaaaaaaaaaa

SEQ ID NO: 1099 - DNA, 2046 bp, Zea mays
ttctgacaacataagccgctcgccctcagatgctgccactgaggtgggcactgttacccaggcattctgctcggcgctccaggaggagctgtctgattattataagctgctggctgttctggaatcgtactcattgaatccaattcccacacctggatctgattcaggtgtgtccagtaattacctctcactgcgccgtcttgcagtgtggcttgctgagcctgcagtgagaatgcgcctaatggctgttctggttgatggatgccggggactgaggggtggtgctatggctggtgtgatccatgggcacgcacaacacggagatcctatgtttcaggagtttatgggccgattactgcgccgggtgtgctcgccgttgtttgagatggtcaggagctgggtgctagaaggggaattggaggatgtatttgcagagttttttatcgttgggcagccagtgaaagcagaatctttgtggcgggagggctaccttattcaatctgatatgcttccagctttcatatctccagtgctcgcaaaacggattcttagaactggcaagtcaatcaactttcttagagtatgctgtgacgatagtggctgggctgatgctgctgccgaggctgctgcatatgttggcactacaacatctcggggtggccttggttatggggagactgatgctttggaggcattggtggttgaggcagccaagaggattgatcgacatttgatggatgtcattcataagcggtaccgatttaaggaccactgccttgccattaagcgttacttgcttcttgggcagggtgattttgtccagtatcttatggacgttgttggccccgagttatcagagccagcaaataggattagctccttccaattggctggcttgcttgagactgcaatccgagcatccaatgcacaatatgatgactgtgatatcttggaccggataaaggtaaagatgatggatcatggggatggtgatcgtggctgggatgtcttctctttggagtatgatgctagggtccccctggacactgtgttcacagcttcagttatgaagatgtatctcaaggttttcaacttcttgtggaagctcaaacgcgtagatcactcccttaccggagtgtggaagactatgaaacctaactgcattgtttcttctccattttacaaggaaggaacaagcatcagagctcaatttgtatcagttcttcgtaaatgtcaagttctattcaatgagatgaatcactttgtgaccaatttccaatactacattatgtttgaggtcctggaggtttcgtgggcccgtttttctgatgaaatggatgcagcaaaggatttagatgaccttctcttagcacacgataaatatctcaactcgatactggagaaggccctgcttggtgaacattcccaaggacttttgaggaatctgtttgaactgtttgacattattttacagtttcgaagccatgctgatcgatggtttgaaaggatatatgagttgcagctaaggggaaagggtaaatcaaaatcaaaggatacaggttcatggtttgatggcggcagaaaagctatgatccaactagctggagaacttttctggaaaatgggtgaagacctggatagcatcgcaaaggattatacagcttctcttgatgcttttattacgcagctgcccatgcaacagcacgtcgatttgaagttccttctcttccgccttgacttcactgaatattacagtcgtgtttcctccaacaaatgaatgtgagccgcttatgtgaaaaactaggagttagattgatcgtttggttgggacttggaaagcattatttttataccatatcccattaattgatcttggtcgcttgattggcaatggtcacttccattttccttgcacctcctgtagaagaggatctgaatacccttttactgaggattgccaatgctacaatctggtgattctgtcagctgtttgcatgctgatgcttatgtgccgattcaacgaggctaaagccacgcatttcatgc

SEQ ID NO: 1100 - DNA, 2411 bp, Sorghum bicolor
ctctctctctgctccggtgctggtgctgctctcctcccctgctttgacctcgctgcctttttatccgcctttccccgccgtttcttggatttctaggatccaaagaaactcccttgttgtgagcctgcttcttgcctctgcatacaggatccttcggtgatcctggtgccgttggttgggtttggtctttggtgctgttggattcgcggaggcggaggcggaggagatgaccgtcgaggacgtgaagctgcaggcggcgaaggcgaacggcggcggccatggggccaaggaccagttccccgtcggcatgcgcgtgctcgccgtcgacgacgatcccacctgcctcaagctcctcgagaagctcttgcaacactgccagtaccatgtgacaacaactggacaggcagccacggccctaaagctgctgagggagaagaaggaccagtttgaccttgtgatcagcgatgtccacatgccggacatggacggcttcaagctcctcgagcttgtgggcctcgagatggacctcccggtcattatgctgtctgcaaatggggagacacaaacagtcatgaagggtattacccatggagcatgtgactacctgctcaagccagtgcggattgagcagttgaggactatatggcagcatgtggttagaaggaggagttgtgatgccaagaacaatggtaatgataacgatgattccggtaagaagttgcaggtggtgagtgctgaaggtgacaatggtggtggtaatcgcaacaagagaacttcccgcaggggtagggatgataatggagatgacggtgatgattctgatgagaacagtaatgagaatggagactcatcaacccagaagaagccaagggtcgtgtggtctgttgaattacaccgaaagtttgtggctgctgtcaaccagcttggcattgacaaggctgttccaaagaaaatattggatctcatgaatgtcgagaacatcacaagggagaatgttgcaagtcatctgcagaagtatcggctgtatctgaaaagactcagtgcagatgcaagcaggcaggctaacctaactgctgcatttggaggaagaaaccctgcttatgtcaacatgggactagatgccttcaggcaatacaatgcatatgggagataccggccagttccaaccactaaccattcacagccaaacaacctccttgcaaggatgaactctcctgcatttggtatgcatggtttgctgccttcgcagccgcttcagattggacacacccagaacaatatgagcacttccgtaggcaatgtcggggggatgaacaacggcaacctgatcaggggtgcgcatatgccactgcaggatactagcaaatgctttcctactggcccttctggtaattcatttgcgaacatatcaaacagcatacaattggttacgacaaataacttgccattacagtctcttgagccaagcaaccaacaacaccttggtcggctgcagtcttctgcagacccattcaactcatttgttggtgagtctccccagtttccagatcttggaagatgcaacactacctggccaactgcggtctcatcctccaacgttcaggagcttggtcagaaggacagaattgtgaatgggcccaagcttgagcctctctcaagctttacagaagcatccagtcagattcccttgctgggaaatgaaatgcagagccaagtagcatcactagccagcaacggtcttccaatgccgttcactcaggaagcggcgcccttcgcatatggaagcagcacgaactcaagagagatgctgaataacaaccttgcacttagtaattcaggcatcaactcttcattgccgaaccttcgcatagacggttctgttgttccgaggcagacactggacggtggtaattcaggtggagtcccccctctgcaagatggcaggattgatcatcaagctgttagtagtcatctaagctataacaacgaactcatgatggggacaagtaggctgcaaaggggactcagtggtggtctggatgacattgtcgtggacatgtttaggccggaccgcgcagacgatggcgtccccttcattgatggggactgggaactggtctagcaggcttcagttccctacatcaagtttttccgcatttgtgggggttcggcgcttgattggtccatgctaatttgcctgctcaaagttgtttatagtagcaagtttgcatcacaaatgccctttgcatttggttttttcagtttagcgaccaggttccagtgtcacgtccttatatcaactatgtggtatttgctaccttaactcgtatggctatgttttaagtcaggtgttaactgtggttatcgtgatatatatagcatggttatgagcaaggaatgttttcctgttt

SEQ ID NO: 1101 - DNA, 2023 bp, Zea mays
aaaaaagatctccactccagtatcccctccccgacttgcaacctctcctgaatcccaccgatcacgcgagctccccgccgcgatgtccgatcaccgagcgaagcggccgtccgacggcgcagccactgtggcatcgccggcggcgaagcgcgcccgcgacccgcccgcgccggcgttacccacgaacaaggaagctcccgacatggcccccaagacccgcatcttctgcgacatcctggcctcccgcgccgacgacgaggaactgaatgccgagctcgacaaggccgacatccgcgtaagcatcgctgacgtcgagcaggtgctccgcttctcctacgcgcacccgcgcgccgccgccgccttctttcgctgggcgggataccggtacctcggccacgagcactccccctactcgtggaacctcctcgtcgacatcctcggtaagaatcgtctcttcgagcccatgtgggacacagtcaaatctatgcagtcgcagcagctgctctcgctcgccactttcgcctccatattctcctccctggcggcgacccccggcggttccccgctcaaggcgttcatggacatgccccgctacggcatgacccgcgacacgccggcgctcaactcgctcctctccgcgctgtgtcgtgccaaccgcctcgacgacgctcgcgccgcgatcccagtagcccgcgccgaggctggcacgcgcccggatgccgactcctacgccatcctcctcgagggcagcgaggccgccgccgatctgcgggttgcgcgcgaggtgttcgacgaaatggtgcaggccattggattttatcctgacaacgtgcctgcctatgactccttcctcactacgcttgtttcaagtgactcctccacggcgctaccggaagcaatggagtacctaaatgtcttgagcaggcacggctgttcgccaggagagaagttcttccgtgctgctcttgctgcacaccttgaggcacgacaattgcgcggagccatgaatctctgggatgactttgttgggcgtcgaggactcgtcccagatatggaaatgtacaacacaatgatcaagctgcagggcagtctcgggcatgctgagctgatagtgggttatctcgacgacatgatctccaatggagtcttccctgataccaacacatacaatgtggtcctccagcttttgttgaagggaaagaagcaccgagaggcagcggcaatatttagcgagatggtcaagaacgaatgttggccaaacgagggaaattgttcacttgcacttcgcatgtttttggatacacactattgggagactgggatcaaagtctggtgctgcatggtggagaatggcttgccacctttacaggagtgtgggaacatgcttgtagcaaagctgaaggatgacaggctacctgaggcatgcaaatatgcagaagacatgattgatcggggtatcaagttgagttcagcgacactgtccaagctgaagcagcgcctgcagaggattaagaaaggagagatccatgatcacctgcttgcaaaatggaaggcacattagtttgttgtgctccctcgtatgggtaacctggtgcgatctcagtgttgacaatgaggttgagccttttatcactctgcaacgtttcaaacaacagttggaagtctctttctagtttctacattgaaattatcatattaatcagctggagcatttgggtctcaaggagtgagctggaacatcttccaagaaattctaccgtctgtatcaaatggctaagcctttttcaagaaagagtttgcccaggttatccatagagcatagaagaaatatttccttgaagaatgactagagcgtcagttgtggtctttttttaatatcttttgtgtcctttttttgtttcatgaattttgttgcttgcagctgtctggctgcaatttaggtagctgttccttttatgtatttgcataattatcaatgcaacattctaggcgtaaaagtgcattctcaaaaaaaaaaaaaaaa

SEQ ID NO: 1102 - DNA, 1893 bp, Zea mays
atgaccgtcgacgagctgaagctgcaggcgagggccagcggcggccacggcgccaaggaccagttccccgtcggcatgcgcgtgctcgccgtcgacgacgacccgacctgcctcaagatcctcgagaacctcttgctccgctgccagtaccatgtgacaacaacgggacaggcagccacggccttgaagctgctgagggagaagaaggaccagtttgaccttgtgatcagcgacgtccacatgccggacatggacggcttcaagctcctcgagcttgtgggcctcgagatggacctcccggtcattatgctgtctgcaaatggggagacacagacagtcatgaaggggattacccatggagcatgtgactacctgctgaagccagtgcgtattgagcagctgaggactatatggcagcatgtggttaggcggaggagttgtgacgccaagaacagtggcaatgacaacgatgattcgggtaaaaagttgcaggtggtgagcgctgaaggtgacaatggcggtgttaatcgcaacaagagaatttcacgcaagggtagggatgataatggtgatgacggtgatgattctgatgacaacagtaatgagaatggagactcgtcgagccagaagaagccaagggttgtgtggtctgttgaattgcaccgaaagtttgtggctgctgtcaaccagcttggcattgacaaggctgttccaaagaaaatattggatcttatgaatgttgagaacatcacaagggagaacgttgcaagtcatctgcagaagtatcggctgtatctgaaaagactcagcgcagatgcaagcaggcaggctaacctaactgctgcatttggaggaagaaaccctgcttatgtgaacatgggactagacgccttcaggcagtacaatgcatatgggagataccggccagttccaaccactaaccattcacagccaaacaacctccttgcaaggatgaactctcctgcatttggtatgcatggtctgctgccttcgcagccacttcagattggacacaaccagaacaatctgagcacttccctagggaatgtcggggggatgaacaacggcaacctgatcaggggtgcgcatatgccactgcaggatactagcaaatgctttcctactggcccttctggtaattcgttcgcgaacatatcaaacagcacacaactggttacgacaaacaacttgccattacagtctcttgagccaagcaaccaacaacaccttggtcggctgcattcctctgcagaccctttcaactcatttgttggtgagcccccccagtttgcagatcttggaaggtgcaacaccacctggccaaccgcggtctcatcatccaatgttcaggagattggccagaaggacaggatcgtgaataggcccaagcttgagcctctctcaagctttacagaagcatccagtcagatccctttgctgggaagtgaaatgcagagccaccaagtagcatcactagccagcaacggtcttccgatgccgttcactcaggaagcggtgcccttcgcttatggaagcagcacgaactcgagagagatgctgaataacaaccttgcgcttagtaattcaggcgtcaactctacattgccgaaccttcgcatagacggttctgttgttccagggcagacactgggtggtagcaattcaggtggttgtgttgtcccccctctgcaagatggcaggattgatcaccaagctgtcagcagtcatctaaactacaacaacgaactcatggggacaggtaggctgcaaaggggacttagtggtggtctggatgacattgtcgtggacatgtttaggccggaccgcgcagacgatggcgtctccttcattgatggggactgggaactggtc

SEQ ID NO: 1103 - DNA, 276 bp, Sorghum bicolor
cggagtttaccgcccgatttgggctgcattcccaaacaacccgactcgttgacggcgcctcgtggtgcggcagggtccgggccggacggggctctcaccctcccaggtgtccctttccagggaacttgggcccggtccgtcgctgaggacgcctctccagactacaattcaggtgacgaagccacccgattctcaagctgggctggtcccggttcgctcgccgttactaggggaatccttgtaagtttcttctcctccgcttatttatatgcttaa

SEQ ID NO: 1104 - DNA, 1654 bp, Sorghum bicolor
gcggttagcaaggcgataaaaagcctttctctctcttggtcagtgacatcacgaactcgtcgacggtagagagagagcaggctctccggcgatttgagaagaaacgggtagcgagagcgcgtgggtgtgtgtgagagagagcgcgaggaggagctgggacttggagactgcgcccggggggccagggtcacggaatcctaccactaccaaccctagcctccgttgatcgccgtctccggccatggcagggccggcgccggatcgggccgccctgactgtggggccgggcatggacatgccgatcatgcacgacagcgaccggtacgagctcgtgcgcgacatcggctccggcaacttcggcgttgcccgcctcatgcgcgaccgccgcaccagcgaactcgtcgccgtcaagtacatagagcgcggcgagaagatagatgagaatgtccagcgtgagataattaaccatagatcattgaaacaccctaacattattaggtttaaagaggttattttaacaccgacccaccttgctattgtcatggaatatgcctctggtggtgagctttttgagagaatatgtaagaacgtgcgattcagtgaagatgaggctcgctacttcttccagcagctcatttcaggagtaagctactgccattcaatgcaagtatgccaccgtgatctgaagctggagaacacacttctagatgggagtgatgctcctcgcttgaagatatgtgacttcggctattccaagtcatctgttcttcattcccagccgaagtccactgttggaacacctgcttatattgcacctgaagttctgttgaaaaaagaatacgatggcaagattgctgatgtttggtcatgtggtgtaaccctctatgtaatggttgttggtgcatatccttttgaagacccagaagagcctaagaacttccgcaagacaattcagcgcatcttgaacgttcagtacgcaattccagacaacgtgaacatatctccagagtgcaggcatctaatttcgaggatttttgttggagatcctgctatgcgaataacaatccctgaaatccggaatcatagttggttcctgaagaaccttcctgctgatctgatggatgatgatagcatgagcaaccaatatgaggagcctgaccagccaatgcagaccatggatcagatcatgcagattttgacagaggccaccataccacctgcctgttctcgcagtataaatgtcctagctgatggattggacatggacgacgacatggatgatcttgactctgactcagatcttgatgttgacagcagcggtgagattgtgtacgcaatgtgagtaaccatctcactagtcaaccaaagaaccaatcaggcatgggatgccctgatgttgtatactctggcaaagagctagcatccttttgtgaaaaatcttcctgtagtcttctcagcgaatcgcaacctgttctgtggaacacagatgtagtcaaactggggttactcagcttgtaaaactagcctcctcttgcttcctggttactgaggtttggatactcccgggttcgacctgtgtgttactgttaaatatgtacaagaaacttctactcatgttgatctgtcaatttggactcgggtagtggttttgctc

SEQ ID NO: 1105 - DNA, 1639 bp, Zea mays
aagctcaccgctcactcacaagcacgctgcgaaacacagacgcagagacccgcgcacagatcgaagcggaggatgaaggtggaggtggtggagacgacgctggtgccgccgagcgaggcgacgccgcggcacgcgctgtggctgtccaacctggacctggcggtgcccaagacccacaccccgctcgtctactactacccgaggcccgccggcgccggcgccggggaggagggaaagggagagggagaagggtcgttcttcgacccggcgcgcctgcgggaggcgctgtccagggcgctggtgcccttctacccgctggcggggcggctggcggccggcccgggcggccggctcgagatcgactgcaccggcgagggcgcgctgttctgcgtcgcgcgggccgacttcaccggcgacgagatgttcgccgacttcgagccctcccccgaggcgcgccgcctgctcgtgccattcgccgcgtccggcgacccgccctgcgtgctcgccatggtccaggtgaccttcctcaagtgcggcggcgtggccgtgggcacgggcatgcaccacgtgacgatggacggcgccggcgcgatccagttcatccgggcgtggacggcgctggcgcgcggggaggcccccgcgtggacgccgtcgcacgaccggacgctcctgcgcgcgcgctccccgccgcacgtccccgcctgcgagcacccggtctactccccggcctacctcaacggggcgccgcggcccttcgtgacgcgcgtctacgccgtgccgcccaagctgctggcgggcatccggtcgcgctgcgcgccgggcgcgtccacgtactgcgcggtgacggcgcacctgtggcgcgccatgtgcgtcgcccggggcctcccggcgggcagcgacacgcggctgcgcgtcccggccaacgtccggcagcgcctgcgcccgccgctcccggcgtcctacttcggcaacgccatcgtgcgggacctggtcaccgtgcgggtggccgacgtgctgtcgcagccgctgggcttcgtggcggagcggatcaagcgcgcggtggcccgcgtcgacgacgcccgcgtgcgctccgtcgtcgactacctggagcttgagtcggacaagggcaaccaggcggcgcgcggccagttcatgcccgagtccgacctgtgggtcgtcagcttgctcggcatgcccatccacgacgccgacttcggctggggccgccccgggttcgtggcccccgcgcagatgttcggcagcggcacggcgtacgtcacgcagggacgcgacaaggacgaccccatcaacgtgctcttcgcgctcgagccagagtacctgaacaccttcgagaaggccttctacggggagtgaccgtgacgcgaccacgaccagccatggcgaggagtccgatgacgatggaatgggactgtgatgccattgtgatgccatgccgttgtggcatctcccgtggtgtgcactgtaataccatatcatattgcatgtttcggaatgcaagtcaatgcttactgggtgtgtgataaggtgcttcattccagctttgtactagtgtcaccaagcacgtaaataattgaatgagaaactggaacgtgcacggctgggaaaaaaaaaaaaaaaa

SEQ ID NO: 1106 - DNA, 1098 bp, Zea mays
ggtcatggcagggccggcgccggatcgggccgccctgactgtggggccgggcatggacatgccaatcatgcacgacagcgaccggtacgagctcgtgcgcgatatcggctccggcaacttcggcgttgcccgcctcatgcgcgaccgccgcaccagcgaactcgtcgccgtcaagtacatcgagcgcggcgagaagatagatgagaatgtccagcgtgagataattaaccatagatcattgaagcaccctaacattattaggtttaaagaggttattttaacaccgacccatcttgctattgtcatggaatatgcctctggcggtgagctttttgagaggatatgtaagaacgtgcgattcagtgaagatgaggctcgctacttcttccagcagcttatttcaggacaagtatgccaccgtgatttgaagttggagaacacacttctagatgggagtgacgctcctcgcttgaagatttgcgatttcggttattccaagtcatctgttcttcattcccagccgaagtccactgttggaacacctgcttatattgcacctgaagttttgttgaaaaaagaatatgatggcaagattgctgacgtttggtcatgtggtgtaaccctctatgtaatggttgttggcgcatatccttttgaagatccagaagagcctaagaacttccgcaagacaattcagcgtatcttgaatgttcagtacgcaattccagacaacgtgaacatatctccagagtgcaggcatctaatttcgaggatttttgttggcgatcctgctacgcgaataacaatccctgaaatccggaatcatagttggttcctgaagaaccttcctgctgatctgatggatgatgatagcatgagcaaccaatatgaggagcctgaccagccaatgcagaccatggatcagatcatgcagattttaacagaggccaccataccacctgcctgttctcgcagtataaatgtcctagctgatggactggacatggacgacgacatggatgatcttgattccgactcagatcttgatattgacagcagcggtgagattgtgtacgcaatgtgagtaacatctcagca

SEQ ID NO: 1107 - DNA, 2078 bp, Sorghum bicolor
acctgggccgtcagactcgcgtcgcgtcgtggcgcccccacggcggcacggccacatcgccgacttctcctcggttcctccgcacccgcacgcggcacgcttcctcccccgcgcccacccgtcgccgtgatcgccagagcgttcccctgccgcgctgttcggcccgttccactccagcgaagcttccagcagaggcggccgccggatcgagtctctgccgccgaggagtcgaagaccatggaagtggtggcgtcggcgccggggaaggtgctcatcgcgggaggatacctcgtgctggagcgccccaacgccggcctggtcctcagcaccaccgcccgcttctacgccgtcgtccgccccatccgcgacagcctccccgccgactcctgggcctgggcgtggacggatgtgaaagtgacttcccctcagctctcccgggaggccacatacaagttgtctctaacgaaatcgacactgcaattgacgtctgcaagggaatctacaaacccttttgttgagcaggccatacagttctccgtagcagctgctaaatcgatcatcactgataaggacaagaaggatgctatagataagctgctgttgcaaggtctgaacattacaattcttggttgcaatgatttctattcttatagaaagcagatcgaagcacgtggtcttcctcttactacggaggtattgctttcattgcctccattctcttcaattacatttaactcagaggttgctaatggaacaacgactggagagaaatgtaaacctgaagtagccaaaactggacttgggtcatcagctgccatgaccacatcagttgttgcagctcttcttcactaccttggtgctgttaacctttcatgtccgggacaaccttccggtgataatgcaactggacgaggtcttgacttggttcacgctattgcccaaagtgcacattgtatagcacaagggaaaattggaagtggttttgatgttagtgctgctgtctatgggagtcaacgctatgtaaggttttctccagaaatactctcctcggctcaggctacaggtgggactttcttgccagatgtagtatccgatattgttacacaaaggtgggatcatgagaataaacagttttcattaccccctctgatgacccttctccttggggaacctggaaccggaggatcatctactccatcaatggttggatctgtgaaacggtggcagaagtctgaccctgagaaatccaaagatacatggagtaaactggccattgccaattcagcgctggagaaccaactgagaatcttaaaaggactttctgaaaatcaccgggaggcatatgagtctgtagtgcggtcctgtagtcatctcacatatgggaagtggacagaggtggctactaaccaagatcaagaattaattgttagatcattgttggctgcaagggatgcttcccttgagataaggcttcacatgcgagagatgggtatagcagccggtgttccaattgagccagattcacaaacacagctactagatgccactatgaatatggagggtgttttactggctggagttcctggagctggtggtttcgatgcagtattctcagtgactttgggggatgcaaataatgctgtagcaaatgcttggagctcagctggcgttctgccacttcttgtacgagaagactgccgtggtgtttcattggaagatgctgacccaagaacaagggaggtctcagcagctgtatcgtccattcagattaattgattctactgttaatagttctatttatgtatgtatggtgtaccattatttattatctcgttcttttagaagtaccaaattgtgccgaatgctaggaggtacgtggttaaaataagtgctgcacttgcagcaggatagcacgttatttacaacgactgttcatgagtgtagaaaataaggaattctagggatttccatggaattagtgcttgtagctatggaatatacgtgaggaaatgtcaagctattcaatcaacaaactcatactgtaaaccttgtatttgcaactgtttaacatggtttgt

SEQ ID NO: 1108 - DNA, 1684 bp, Zea mays
aaactgttaacaggtgataaagcttttctctctcttggccggccagtgacatcagacatcaccaactcgtcgacggtagagagagcaagctcttcggcgatttgagaagaatcgaggagcgagcgagcgagcgagcgagagaggaggaggaggagctggggcttgagcctgcgcccgggggccccgggtcacggaatcctaccattaccaaccctagccttcgttgatcgccgtctcaggtcatggcagggccggcgccggatcgggccgccctgactgtggggccgggcatggacatgccaatcatgcacgacagcgaccggtacgagctcgtgcgcgatatcggctccggcaacttcggcgttgcccgcctcatgcgcgaccgccgcaccagcgaactcgtcgccgtcaagtacatcgagcgcggcgagaagatagatgagaatgtccagcgtgagataattaaccatagatcattgaagcaccctaacattattaggtttaaagaggttattttaacaccgacccatcttgctattgtcatggaatatgcctctggcggtgagctttttgagaggatatgtaagaacgtgcgattcagtgaagatgaggctcgctacttcttccagcagcttatttcaggagtaagctactgccattcaatgcaagtatgccaccgtgatttgaagttggagaacacacttctagatgggagtgacgctcctcgcttgaagatttgcgatttcggttattccaagtcatctgttcttcattcccagccgaagtccactgttggaacacctgcttatattgcacctgaagttttgttgaaaaaagaatatgatggcaagattgctgacgtttggtcatgtggtgtaaccctctatgtaatggttgttggcgcatatccttttgaagatccagaagagcctaagaacttccgcaagacaattcagcgtatcttgaatgttcagtacgcaattccagacaacgtgaacatatctccagagtgcaggcatctaatttcgaggatttttgttggcgatcctgctacgcgaataacaatccctgaaatccggaatcatagttggttcctgaagaaccttcctgctgatctgatggatgatgatagcatgagcaaccaatatgaggagcctgaccagccaatgcagaccatggatcagatcatgcagattttaacagaggccaccataccacctgcctgttctcgcagtataaatgtcctagctgatggactggacatggacgacgacatggatgatcttgattccgactcagatcttgatgttgacagcagcggtgagattgtgtacgcaatgtgagtaacatctcagcagccatctcagcagtcaaccaaggaaccaatcaggcatgggatgccctgttgtatactctggcaaagggcatgcttccttttgtgaaaaacatccatgtagttttctcaaggaatcgcaatgtgttctgtggaacacatatgttgtagtcaaactcgggttactcagcttgtaaaactagcctcctcttgcttcctggttactgggctttggatactctcaggcttcgacttgtgtgttgctgttaaatatgtataagaaacttctactcaggttgatctgtgaatctggattcgggtagtggttttgctcataaaaaaaaaaaaaaa

SEQ ID NO: 1109 - DNA, 1740 bp, Zea mays
cctctccagctgcccacttctcccctgtgctcgcgggcgcgcgcgagtgtggagagaagggagggaattcccccctttctgttcggcgccgtgctcgcgcacacacccgcacgccccacgctgcacgccgccttttcctccgtcttgctgctgcaagtccgcaaccactggaggaaaaatcttttccttcacttttcttccctttccccccgcgcatgcacgggctctgattgacgccatgggggacgccgccgccgccgcagcctccacgtccgctcccaccacgcccacctccattctcatctgcctggaagacggcagcgaccttctcgccgatgccgacgatggcgccggcactgacctagttgtcgcccgcgacgagcgtctgcttgtcgtggaccaggacgaggagtatgtagcgctgctcctgtccaaggagagcgcgtcaggcggcggcggcggcccggtggaggaaatggaggactggatgaaggccgcgcgctccggatgcgtccgctggatcatcaagaccacggcgatgttccggttcggcgggaagaccgcttacgtcgcggtgaattacctcgatcgcttcctggcgcaacggcgagtcaatagggagcatgcgtggggtctgcagctgctcatggtggcgtgcatgtcgctggcgaccaagctggaggagcagcacgctccgcggctgtcggagttgccgctggacgcgtgcgagttcgcgttcgaccgcgcgtccgtgctgcggatggagctcctcgtcctgggcaccctcgagtggcggatggtcgccgtcacccccttcccctacatcagctgcttcgcggcgcggttcgggcaggacgagcgccgggcggtcctcgtgcgcgccgtggagtgcgtcttcgcggcgatcagagcgatgagctcggtggagtaccagccgtcgaccatcgccgtagcatccatcctcgtcgctcgcggcagggagacgcccgccgacaatctggacgcgctcaaggcgatcctgggctcatcatttccacagctagacaccgggcatgtgtactcctgctacagcgcaatgattcgggaggacgacaagtcgccgacgcagtcgacgtcgacgtcgacgggggtggcgtcctcgggcgtctctgtcgccgcgcacgccggggggagcgggagtcccagccccccgggcgcttccgtgtccgtgggcgccaataatgccgctggcaccgccccgccggcaaccacggacaaccgcaacaagaggagacggttgcgctcacctcagcgacagtaggagcagctcagctgctggcagtgcattgcagtgcagtgcagtccagctgcgttttcttttttcagctcaccatttccttttgctgccgattgtttcttcaggggtggccgtagagtgatttggtaatttagtgccggaaagattagtgcggtgtcgcagagtgatttggtaatttagtgccggaaagatttctttgttttgaggagatctttcgcgggaccaaagggaggggggcagtgtaaagacgacagaacaagcgtgaaggcctcgagagtcgagacctcacagggtaccgcctagcgcctactggggtgaaagtgaagtcaaggagtcgggagggtgtgtgtgaataccgtttgtagcagctagtgcgtccgtctgtctttttttttctttctgtttattaattattaatagcctgctagatttcatttgatttc

SEQ ID NO: 1110 - DNA, 1418 bp, Zea mays
cgcgagactagccctagccgcgcgtacgcgagacaccaaccaccggcgccgctatgccgatctcctccacgctcgccacacgcctccgcaccggtcattcttccgcacccaaacccgcacggcggagcccctacaccagacccaagcccagcggcggcgccaaggcctcccgcccttccccccgccttgatccagcgaccacgagacctctcgaaccctctcagaaggcggtgcgatccggtttgggtcgccgtgccgagcccgatgtgcccgacgcgcgcgcggctgagtcgaagccgaaactggcgcatggagacgataggccgccccttgaggagaagcgccgctgcagcggtgagggcggattcgtcttcctctgcgcccttgctggacacaccgaggctatcggtgggatttctctgccgtctggttcgaacaagctctactccggcagcgtcgacggatctgttcgcatctgggactgcaattccggcaagtgtgttgatgtcatcaagatgggaggcaaggttagctgcatgatcacccatggcccatgggtactcattggaattccaaagtttgtggaggcatggaacacaaagacagggatgaaactaagatttcaagggccttctagtctggtttgttccatggctatcacggatgagatgctgtttgctggtactggagatggtcgcatcatggcctggagatttcctgctaaggaaagtaacactgaaccagtgttgatcctcagtggccatcaacggccagtgatttcactgtctatctcggcaagaagactttactctggctcactggacaagaccatcaaagcatgggaccttacaactcggcagtgtgtccaaacactctctgagcataaagctgctgtaacatctgtgctttgttgggatgagaagttattatcttgctcccttgacaagactgtaaaactctggactctgtcagagtcaggaaaccttcaagtcaaatatacccatgctgaggagaatggtttgcgcacactcttcggcatgcaccgagttgggaagacgccagttctcttgtgctccctccacaacagcaatcgcgtccgcttgctcgacttgccatcgttcgacgggattggaacactgttgtccacgaaggaagttaggaccatcgagcttgcggctggtgggctgctcttcaccggagactgctccggcgagctgaaagtgtggaggtgggcgcccaaggactaggaggcagtagctgatgtgcatcaaatagtgtagctgtagcctcattgaagaataatagccactgacgtgctccatcattgtattcgtttccatgtaaattatggctgctccccctgatgatgtagcacatacggccaattttgtgaggatgcaaccctggtatcatgttcc

SEQ ID NO: 1111 - DNA, 1374 bp, Zea mays
cgtacgatacgagcctcaccagcgccggcgctgtagtgtgcagccctcctcctggatctctgcacccttcggcggccacgcctcgcgcgcgcgcgcggacatggaggtcgaataccacgagctcttcacctgcggctggctgcccgctgccgcatcgcccaaggcgctcgtcttcctctgccacggctacggcatggagtgcagtggcttcatgagagaatgcggcgtgcggctggcggcggccgggtacggcgtgttcgggatggactacgagggccacggcaagtcgatgggcgcgcgctgctacatccgcagtttccgccgcctcgtcgacgactgcggccatttcttcaagtccgtctgcgagcttgaggagtaccggggcaagagccggttcctgtacggcgagtccatgggtggcgcggtggcgctgctgctgcacaccgaggaccccgccttctgggacggcgccgtcctcgtggcgcccatgtgcaagatatcggagaaggtgaagccgcaccctctggtgatcacgctcctgacgcaggtggaggacgtgatccccaggtggaagatcgtgcccaccaagcaggacgtcatcgacgccgccttcaaggaccccgtcaagcgtgaaaagatcaggaggaaccagctgatctaccaggacaagccgcggctcaagactgcgttggagatgctcaggaccagcatgtacatagaagacagcttgtcacaggtgacgctgccgttcttcgtcctgcacggcgaggccgacacggtgacggacccggaggtgagccgcgcgctgtacgagcgttcggccagcgccgacaagaccatcaagctgtacccggggatgtggcacggcctcaccgccggggagcccgacgagaacgtggaggccatcttctccgacatcgtgtcctggctcaaccaccgcagccggagctgggccgtggaggaacgccatatgaccaggaagctggcgccagctccggccaagtccatcgaaggccacggcaccgtggacggcaaagtgcacacacaacaagggcgccctcggcggcgccagggcttcctctgcgggcttgccggccggacgcatcaccacgcggagatgtgaaagatagaatcgccgtctcggtcccggatcagatgggcgcctgctttcttcaaccatggcaaataaaggaatgatgacctgcggtttataatatagaggtcttattatgcttgtcaaagttatgtatgaccaatcattcccagtctggtgcagattcaaactcatgctcagatatatgtaatgtaagattataacgctattagcattctggataacccgttaacaatgacattacaaaatggtacgtcgtt

SEQ ID NO: 1112 - DNA, 1461 bp, Zea mays
gctggctgctggtgcatgctggcatccttttctctctctttctctttctctttctcctggcctctcttcaattcggctcctagtagcctgccgccatcacatctcgccttccatataacgagcgatcatcgtcaaggatcggtcggcgcgcgcgcgaggccaacggccggctggggttttagcttgctagctcctggcgccaggctatcccggcatggcgaagcagtcgtgctgccacaagaagaagcttaggagagggctctggtcccccgaggaggacgagaagctcatgaaccacattgccaagtacggccacggctgctggagctccgtacccaagcttgcaggcctcgacaggtgtggcaagagctgcaggctgaggtggataaactacctgaggccagacctcaagaggggcacattctcgcaagaggaggaggacctcatcatacacctccactccttgctgggaaacaagtggtctcagattgcggcccagctgcctggccggacggacaacgaggtcaagaacttctggaactcgtacatcaagaagaggctcagggagcgcggcatcgaccccgccacccaccagccgctcgccgagcctgccgccgcagccactgccaccaccaccaccacggtctcccgccgcgcggtgtttggggacgtcgacctcatcccgactactactactactacaatccaggtgccgccgccgtcgttcgagggcggcccaatgctggagagcgtgaagctagcggtggagctggactggcccgtcgctggcgacggggtaacgtcaaggccatgctacctgcaggggggctgcttcgacatggacgcgctgcagcagcactgcggctccatcccgccggtgccggtcgtcccgtcggcctccgccagctccagcacgctgacctcgatggcggaagcggaacactgcagcaccaacaacgtcgccgccggcggcaacctcccatggctggagctcggggcaaacgcggtggctgacgccggcggccacgtcgtcggcagctgctacgccggcgcgctggacgagctcaggtggtcggagtacttcgacagtgccttccaggccgccgagagccagcaaggcgccctgcagccggggcagtgtgtctacggcggcaaggatgacgtcccggtgcacttcgacgtccatggcgggctaagcaactggtgctagtccagtaatccatcacgtactcaatgcaaagaaaccacggaacaagaaacagtccatcagtgtgaattaattactgtctatatatagtctgcagatgcaaattcttacgggcatttcatctggtgttacccctccccctttctattctcatgttgctgtgttgattagcagcggataaaagttcatgtgatgagtacatttgaagtgtttaacacacatgtaaagtaatacatacgctgttgttaattagt

SEQ ID NO: 1113 - DNA, 1548 bp, Sorghum bicolor
atggtggccaagaagccgcgggtcgtcgtagtgggcgcgggcgtggccggcctcacggcggcgcaccggctgtgcgccggaggcggggacaggttcgaggtgacggtcgtggaggccggcgcccgcgcgggcgggcgggtgctcacgtccgagttcgcgggccaccgcgtcgagatgggcgccacgtggattcagggcatcgacgggagccccgtgtacgcgctcgcgcgcgacgccggcgcgctcgcctgcgacagggacgctcccccgtacgagcgcatggacgggtcccccgaccgcgtgctcacggtcgccgagggcggcgaggtggtcgacgcggaccgcgtggccaggccggtcgaggagctgtacaggggcatgatggaggccgcgcgcgccggcgagtccagcggcggagggagtgtcgaggagtacctgaggcgcggcctccgagcgtaccaggcggcgcgccagggcggcaaggagctggaggggatcgaggacgcgctgctcgccatgcacatcaaccgggagcggacggacacctccgccgacgagctcggggacctcgacctcgccgcggagggcgagtaccgggacttcccaggcgagcacgtcacgatccccggcgggtactctcgcgtcgtcgaccgcctcgtcgcggcactcccgccgggcaccgtccgcctcggcctccgcctccgccgcctcgactggagcgacacccccgtgcgccttcacttcgccgaggatggcgcgacgacggcgatcaccgccgaccacgtcatcctcacggtgtcgctgggcgtcctcaaggcgagcatcggcaaggacgcccacgccgcgggcggggtcgccttcgacccaccgctcccgcagttcaagcgcgacgccgtcgcgaggctcggcttcggcgtcgtgaacaagctgttcatggagctggaggccgtgccagcggcgaaaccggaaggcgacggaggtggcggcggcggcggcggcagcgaacacccgctagccatgtctgcgccaccggagttcccgttcctacacatggcgttccgggggcacgtatcggagatcccgtggtggatgcgcggcaccgagtcgatctgccccgtccacgggggctccagcgtcgcgctggcgtggttcgccgggcgggaggccgagtacctcgagtcgctccccgacgacgaggtcatccgcggggtccaggccacgatggactccttcctcccggccccggacccgcgcgacggggccaaggcgacgtcacggtggagggtgaagcggatcaagaggagcgggtgggcaacggacccgctcttcctggggtcctacagctacgtggccgtcgggtccagcggcgaggacctcgaacggatggccgagccgctgccacgcgggtcgaacgttggcggtgcgccgccgcttcgcgtcctgttcgccggcgaggcgacgcaccggacgcactactcgacgacgcacgccgcgtacctgagcggtgtgagggaggccgagcggctgctgcagcactacggaaattag

SEQ ID NO: 1114 - DNA, 2068 bp, Zea mays
aaaaccgtttcgcgcaccataaaatcgctttgggtttccaacgcaaaaccgccccgcacttctccgcaccgttaccaaattgatccttcccgcaaagctgcaatggagttcgcctcccgcagtcgacccaccaccacagcagccgacgacgaagaaaacgactgtcttcgccgcttccccgaccatccgccgtcgcagccgcagggacacggcgagcccaatacatccggggtagacgctgcactactggcgaggaggcagaaactgctgttggagctgctcaagggatccatccaacagggcttgatcttgcgtgagctcgtggagactgagcacgccatgggctttattgccggcagccacaatcctgtgccagcactcccacaggatttcttgcgttgctggacgccgtcgatgtctactttggaagcgcatctccgccagccatgcccttgtggctgtggaaactccatggcggtcagggcacctccagtgaacccacacttggagcggtcatcgcatgcacccgagcaaacaaggccaggcaatgatgctgagcagcatcaagaggacaggtcatctggggtgaggacacatccatttaacggccattttaaactgtgtcattcaccgagcaagcagactccagtgccaggcaaagctggtgtcaatcagatgcggccatcgtccggacaccaacaggccattgtttgggaaaagattggtgtggaggttgttcataacatgcagccgttgaacgaaatcaagaaccacagcagtgaggggcagaaggccgtagactctgccattgaggtttgtgtaaagaaacccatacaacagcgtcttcagtacaaaccagtggatcaggagaatgcagcaaacaatgagcatgcacctgagcagacaaggcaaggcaatgatgctgagcatcatcaagagggcaggtcatctggagtgaggacacatccatttaacggctactttgaactgtgtcgttcaccgagcaagcagattccactggcaggcaaagctggtatcaatcaggtgcgtccattgtcaggacaccaacagggtgttgtttgggaaaagattggtgtggaggtagttcataacatgcagccattgcacgaaatcaagaatccgagcagtgaggggcggaaggccatagactctggcattgaggattgtgtaaagaaacccatgcatcatcgtcttcagtacaaaccagtggatcaggagaatgcagcaagtaatgaccagaagagtacagagttcaacgagccaacagctgagggaacttccgctggggtgaaaaggaagctgaccaccccaagctcacctgtcaagaagcagaagccactcgggcaatggagctgcactatctgccaggctaacccagctagccagcgccaacttgagcaacaccttgccggcaagcggcaccagtcaaatgtcgcagcactgcaaccatctcagagcaacagcagcagccctgagcctgacacaaaagcgacgcccgcgaggagcaggatcatcgcgacgaacgcgcagcaagacggcaagcaggatgtgccggagaacagatggacgtgtacactctgccgggccaagtgctacactgaattgaactactacagccatctcgggggcttgtggcaccgggagaaggcacaggccaggcgcgaggagcacttgaggttctactgctcggtgtgcgacctgcaatgcaacagcgagaaaatgctggagtcacacctcggcggtaggaggcatcgggagactctggaggcgcgcgactaggatgccgaggcacggctgcaggctgacccgtccttgttcacggggaagctgttgtggctgggttccggcgggtcgatctgccattttgaggggcactacggtggtgcacgaagctgctatcgctggtctgctgctggactctgcctagttcgttgatttctctcgtttcgagcttttagtttcacgttggtaggttttaatgttatgcgacttttgatcttcgggcccaagacaaaacagacttgaaatgcgtatgtttcgatgtagt

SEQ ID NO: 1115 - DNA, 2641 bp, Zea mays
ctttcccctcggcgctcgcgctccaccgccggccatcctcagcggaacaggaaaaccgtgctgtttccccgcgctgcttccggtcgatggaattcgctcgccgaggccgcggcgacgaggacatcgacgacatgcaccggttcatcgaccttccgccgcctcacggtacaccgccgccgtactcgacctccgcgcttgtgtgtgtgtttggattgggagggaacaacaaaaaggcaaagggtgaatcttttgaagattcctttcgtgcagatgcaagcgattcttttggtccgtaccaacattccaagctggcttgctgcctgcctgcctgttcctttggaaagcgaaaccccgatttccattaaggaagcaaggttcttgtgcgttggcataatcaccagcataggaaggatctaaagttccgttgctatgctactctgcggctcttggcataatcaccaggataggaaggttctaaaattcagttgctatatgctactctacggctcttggcataatcacctgcataggaaggttctactgcacctgataaggaaatactcctaaataggtaatttagagcatcaatccatcaacttagcttgtttgccttttgataatctctgtctgaaaatataattcgttttagactaaacaaatattcattaattattcttcgaatgtagtttatatgtatatctacaaaaaggttagaaaaagttatattttggaacggagagagtattttttaagaaaacctgttcgtctttgactgtcatcttaggtctaaccttagcatagtcagagcatcagacgctcacgactggtcaactgctgaattggttatgcttttttttacggcaagatgactgtgccttgtgcagtggacccattgctggtgattagggaagcgctgctgtcacagcttcagaaggatcgtcttcgccaggagatcatccaggttgagttggctaagatagagcgtgccatggtcctgtgcaagtgcaacagctcacatcatggtattgccgctgatgatgtggaatggactaggcctgctcccttcaccttcagggagcagtccatgcgaccttggcgatggtcagtcagtcaagaatgttatgtcgatgtggatgaggtccatgatcgaaagcaaaaggagggaaggcacaggagtgtagtgttgaagtctgagaagcctgccatggaagatggtgaatgcttgagaccttgttgtaatggtaaggcaagtcaggagaattcaaaagtcgaagatcagaaatcacaagaatccagtgagaccatacagcccaagacgactttgccttcagtgaaatgggaactgacaggaataacaataccagttaagaaaaagaaacgacaccagaaactgagttgtgaaatctgccaggtgcaagcaactagtgagcacagcttacaagaacaccgtgcagggcgtaagcaccaattaaaagaagcaattgatcagaaggtacaattaacagaagaatcctcttccagcacagagcagaaaacatcctcgataaaatggagctgcagtacatgccaggccaacggtacaagcgaatcagacctgaaggagcatctaaatggaagaacacaccgacaaaacattaaagcgcaactcatggagagtgatggcattgctaagactaatgagctgcaggaaccagagtgccctaagaacaatgcaccacaacattcagagaagccacctccgatgagttctacccattgcctagcgaactctactcatgaattggagttacgagggcaccttttagctaagcctcaagctctactggacgaaatcagtaacctgtcaaggaattctgagtcgcgagaagccacggtgcttccgaacattgcaccgcaacatacagagcagactccaggatcaaattgtagcatacttcaagctgattctgattgcaaattagacttggagcaccaatttggagcgaagatacaccaactgaatgtccaggacctacttgaagaagccaagaaaacaggagattttccaccagaaattgccaaggaccagcaaccgccctctgaatggggttgtgttatctgtcaggcaaaatgttactccgcacctcaattcgctcagcactgcagaggcaagaaacaccaaaagaaggtggaggcactacaaggaggcgtggatgccaaatcaagtaatctgacgacagtgcacaaagcagcttcaaatggtcctgactgcagcagttcgagttcagagaaggtggaggatcagacagcattgtggtcgtgcggggtttgcaatgtgcagtgcaacagcgagagtatgcttgcaggccattgtaaggaggaggaacatatggagaaacagaagttgcgggatttctgcgaggtctgcaatttgaagtgcaacagcgaaaagatgcttgctcaccatctttctgggagtaagcaccagaaaaggctcagtgcgaacaagcgaaatgcagttgtggcttgggtcccggtggcactgaggggaattgtacagtaagataaggaacctagtaccccacctagtgaagtttgtataccatgccactatttattatagtgacccgactgcaatttcaaaatacattttgttgagtgc

SEQ ID NO: 1116 - DNA, 2165 bp, Zea mays
atttattctactgcatcatcagcaacacgccatgatatatttgtccacgagctaataacaccagcgtcgcctagaaacgggctcacgcaggcgtcgtgcctccgccgtttggccatctctatatacagcggaggatcaggcaataatcgcaaatcccacaccaaccagagccaccctgccgtcgtaggcgcacgcgccgtagataggaagcttattaagctagcgcgtgtcgctgcgccatcctgccatggaggatcaggcgctggcgccgctgctgcagccgctcccgctcggcgaaacgggggccatcaaggggcgcgcgaggcgggcggcgctggagtggtgggtggagtcgaagaagctatggcacatcgtgggcccggccatcttccaacggatcgcgctgtacggggtcaacgtcgtcacgcagtccttcatcggccacctcggcgacctcgagctcgccgccttctccattgctgccaccgtcgtcgggggcttcaacttcggtttcctgctgggaatggcgagcgcgctggagacgctgtgcgggcaggcgttcggcgccaagaagcaccacatgctgggggtgtacctgcagcgctcctggatcgtgctcctcatcttcgccgccgcgctgacgccgacgtacatcttcatggaggacctgctgctgctgatcgggcagtccccggagctgtcgcggctggcggggcagatgagcgtgtggctgctcccgcagcacttcgccatggcgatgctgctcccgctcacgcggttcctgcagagccagctgaagaactgggtgaccgcgatcaccgcggccgtcgcgctcgccatccacgtcgtcgccacctacgtgctagtgcgtctcctcgacttcggcatcgtcggggccgtcgcctccgcggacatggcgtggtggctggtcgtgctgggccagtacgtctacgtcgtcggcggctggtgcccgctgtcgtggaaggggttcaccatggaggcgttcgccgacttctgggagttcatcaagctctcctcggcctccggagtgatgctctgcttggagaactggtactaccgagtgttggtgttgctgacagggtacctggacaacgctgaaatcgctgtggatgcactctccatatgtcagacgatcaacggatgggagatgatgatcccgttcggcttcttagcagcaaccggggtgcgagtcgcaaatgagctcggcgcagggagcggcaaaggtgcgcgcttcgccatcgtggtgtccatcacgacgtccgtggtgatcggcctcgtcttctggtgcctcatcctctacttcgacgacaagatcgcgcttctcttcacgtccagcgcggtcgtgctcgacgccgtgcaccacctgtccgtgctgctcgcattcaccatcctgctcaacagtgtgcagcccgtcctctcaggggtggccgttggttcaggatggcaagcactggtcgcctacgtcaacgtcggcagctactacctcatcggagttcccttgggtatcgtactcggttggccgctgcacttcggagtagggggaatctggtccgggatgattggagggaccgccgttcaaacgctcatactggcatacctcactgccaaatgtgattggcacgaagaggcgaagttagctagtatgagaatgaagaagtgggccgacgagtcgaaataaacccactccactgctgcgctttgtttgttagccaggcacacaggggaacccctgaagctaagataacttctgatacagcgctatgcatattccggccttcagacgccgtcagcttgctgcggcagtttgctacaggaaaatgaagccgcaggtttctgacgatggtgtacggaaacctcccatagtggaattgcgtaccgcgcgtgtcaaaatattgttccactatagctaatatgggacaggacattcatcgtttttttttcttctcatcatcattgttgtttgggcgcgtttggtttgcttccgaggcgcccaggcatgcctggctctcattaggtcaacaaggctacacttgtcctaattgagtacatacaacacaaaatatttggttgttgtaaggataattttaaagtacagtttcggtgtcaaaatattgttctactatagctaaaaaaaaaaaaaaaaa

SEQ ID NO: 1117 - DNA, 2087 bp, Zea mays
ctacgacgacaccgggttcggccccgtgcctgcgggctggaagggcaagtgcgaggacggcaacgacttcaacgcctccgcgtgcaacaagaagctcatcggcgcgaggttcttcctgacgggctatgaggcggccaagggccccgtggacacgtccaaggaatcccggtcgccgagggacaacgacggccacgggacgcacacgtccagcaccgcggcgggcggcgccgtccagggcgccgacctgctcggctacgctgccggcacggccaagggcatggcgccccgcgcccgcgtcgccacgtacaaggtgtgctgggtcggcgggtgcttcagctccgacatcctcaaggccatggaggtcgccgtgacggacggcgtcgacgtgctctcgctctcccttggcggcggcacggcggagtactaccgcgacagcatcgcggtgggcgctttcagcgccatggagaaggggatcttcgtgtcctgctccgcgggcaatgccggcccgggcgccgcgacgctgtccaacggcgcgccgtggatcaccaccgtgggcgccgggaccatcgaccgcgacttccccgcctacgtcacgctcggcaacggcaagaactacacgggggtgtccctgtacagcggcaagccgttgcccaccacgccgatgcccttcatctacgcggggaacgcgtccaacagcagcatgggccagctctgcatgtccggcagcctgatcccggagaaggtggccggcaagatcgtcctttgcgaccgcggcaccaatgccagggtccagaagggcttcgtcgtcaaagacgccggcggcgccggcatggttctcgccaacaccgccgccaacggcgaggagctcgtcgccgacgcgcacgttctcccgggctccggcgtgggggagaaagccggcaacgccatgagggactacgccatgtcggatccgaaagcgacggccaccatcgtgttcgccgggacgaaggtcggcgtcaagccgtctcccgtcgtcgcggcattctcctcccggggccccaacactgtgacgtcgagcgtcctgaagccggacatcatcgcgcccggcgtgaacatcctggcggcgtggtcggggtccgtcggcccgtcggggctccccggcgacggccgccgcgtcggcttcaacatcatctccggcacgtccatgtcgtgcccgcacgtgagcgggctcgccgcgctgctccgcgcggcgcacccggagtggagcccggcagccatccggtcggcgctgatgacgacggcgtacaacgagtaccccggcggcggcaacggcatcctggacgtggccacggggcggccggccacgccgctggacgtgggcgccggccacgtcgaccccgcgaaggccgtcgacccggggctggtgtacgacatcgcggcggcggactacgtggacttcctctgcgccaacaactacgaggcggcgcagatcgcggcgctcaccaggcagcacgcgtccgaggggtgcagcgccaaccgcacctacgcggtgaccgcgctcaactacccgtccttctccgtggcgttcccggccgccggcggcacggcgaagcacacccgcacggtaaccaacgtcgggcagcccgggacgtacaaggtggccgcgagcgccgccgccggcggcaccccggtgacggtgaccgtggagccgtcgacgctgagcttcagcagggccggcgagaagcagagctacacggtgagcttcacggcgggcgggatgccgtcgggcaccaacgggttcgggcggctcgtctggtccagcgaccaccacgtggtcgccagcccgatcgcggcgacgtggacctaatggctagcggcggccgtaccgtagcaatagcgagataaaatcccgattgggggacggcaatggcgagcgcgcgccattctcgaatgcgagagagatggcggatatcgtcgaggatgtgctgttgtattgtgtgcatgagtccgctccggtgtgtaagctgccggtgtagtgtaatctatctgtagctgacccgattgtagcgatgcagcaattaaatctcaaaagggttgcagacttgagc

SEQ ID NO: 1118 - DNA, 1116 bp, Zea mays
cattgtgtaatcctcatcctccgtcgagatcaaggaagaaagaaagaaagaaagcaaccatggcggcaaccgcaatgtgcccctccccctcggccgcaataactcgccacatccatgctcgtcgctcctgtgctgctgcttccttgtccctccgccgctcgggcttcctggggcgcgtcgtgctggccgcggtgccggtggccgtggacgccacccggcgccgccgcgtctccgtgtcggtgcggatggcctgggacggtccgctctcgtcggtgcgcctcatcatgcagagcaggaacgcgaagctgagcgagaagctcaaggagcacatcgaggacaaggtgggtcgggcggtgtccaagcactgccacctggtccgggaggtagacgtgcgcctctccgcgcgcggcggcgagctcggccggggccccaagacgtcgcgctgcgagatcaccctcttcaccaagcgccatggcgtcctgcgcgccgaggaggacgccgagtccacctacgccagcatcgacctcgccgccgccatcgtcaagcgcaagctccgcaagatcaaggagaaggagacggaggtgcgccgcggcggagacgctgacggcgtctgggacgagatcccgccggccgacctgctgccccccgccgaggccgacgacctggaggcggccgtgggcgctgaggacgaggagacggtgctcgccaaggtggtgcgcaccaaggtgttcgagatgccgccgctcacggtggaggaggcgctggagcagctggagaacgtggaccacgacttctactgcttcagggacgaggccacggggcaggtgaacatcctctaccgcaggaaggaaggcggatacggcctcatcatccccaagaacgacggcaaagtggataccgttggcgttgtgccaccacccgccgtcgctgcggagccggagccggagccgtcctacgcagtgcacgccgctgacaacaacaactcctgaactgagcactcgtcgacgtctcatccaaccaaaaccaaaacgagagagaatgcttgcttggtactgtaaaaataaaacaaacgcagtcgtcgacgacgtctcatctgcaccaaaaaaaaaaaaaaaa

SEQ ID NO: 1119 - DNA, 1713 bp, Zea mays
gcttgggggcatgctgccggctggcctcagcagcatgcagcatgtgcaagagatcgacctgtcctggaataacttcaacggtgagatcttggccaacatcggaaactgcattgagttgacagtgctcgacctctcacacaactcgcttgccggcaacctcccttcgacactcagccagctgaagaacctggaaagcctcaatgtcgcgaacaacaacctcagtggtgagatccccattagcctggccaattgcgacaggctgaaatatctcaatctgtcatacaacgacttcagcggcggcgtccccaccaccggccctttcgtgaatttcagctgtctctcctacctcggcaaccgtcgcctctctggtcctgtgctcaggcgttgcggaggtcgccaccgctcgtggtaccagtcccggaagttcgtagtcatcttgtgtgtctgctcggcggctctggcgttcgcgctgacgatcctctgcactgtcagcgtccgcaagatccgcgagcgggtcgcggcaatgcgggaggacatgttcagtggccgccgcggcggcggctcgtcgccagtgatgaagtacaagttcccccggatcacgtacagggagctggtcgaggccaccgaggagttcagcgaggaccggcttgtcgggacgggcagctacgggcgggtgtaccgcggcacgctacgcgacggcaccatggtggccgtgaaggtgctgcagctccagacggggaactcgaccaagagcttcaaccgcgagtgccaggtcctgaagcgcatccggcaccggaacctcatgcgcatcgtcacggcgtgtagcctgccggacttcaaggcgctggtgctgccgttcatggccaacggcagcctcgagcggtgcctctacgcggggccaccggcggagctgagccttgtgcagcgggtcaacatctgtagcgacatcgccgaggggatggcctacctgcaccaccactcgccggtcaaggtcatccactgcgacctcaagccgagcaacgtcctcatcaacgacgacatgaccgcgctcgtctctgacttcggcatctccaggctcgtcatgagcatcggcggggtggccaacactgccgacgtcggcgcctccacggcgaacatgctgtgcggctccatcggatacatccctccagagtacggctacggctcgaatccgacgacaaagggcgacgcgtacagcttcggtgtgctggtgctggaaatggtgacaaggaggaagccaaccgacgacatgttcgacgccggactgagcctgcacaagtgggttaagacccactaccacggccgcgccgacgcagtggtcgaccaggcactggtgcgcatggtccgggaccagacgcccgaggtgagaaggatgtcggacgtggccatcggtgagctactggagcttggcatcctctgtacccaagagcaatcgtccgctcggccaaccatgatggacgcagccgacgacctggaccgcctcaagcggtacctcggcggcgacaccacggccaccttcgcgtcatcgctgggattctcctccaccacgctagaagtggaagacatcgattgaccacgaggtaaggtataatttttttaagcggatgcaaaaacacataggattaattcgttgaaggtgtctgattgatgtaataatataagccttggccatagatctatctatatggcttatac

SEQ ID NO: 1120 - DNA, 3567 bp, Zea mays
catggccatgtctccgtgtacatatctccgttccggtgcacatcccgccaccgccggacccgtataccatcgctgaatcttagcctcccacacgagagttaaacacgcagacagctcctcgtcgatcccctgtcagttaaccatacccacgagctaagcccacactaagctagccttattagccctgcaatcgctgcatcctctgctgctcatatctattcgcaaaaccagcagctattcttctccctacaactcttcctcgctcgctcaattggccgctcttcttctccatgctgccgcttgtggtgcgcgcgatatcgtccctcgttgacgtcgaactaggagggctgatcaagagctagggagggagggaggaaggtcttctgaatctcaagacatccatgtgatccatttcttcagagatcttccagcaccatctcctggcaatgggtggagggcaaatgcttgcctgccttcctctaggtctgatcacgctcctctcgctctcgctgagctccagctgccaaatcgacccccaaacacatgccctcctccagttcaaggacggtctgaacgaccccctgaaccacctcgcgtcatggacgaacgccacctccgggtgccgcttcttcggcgtccggtgcgacgacgacggctccggcacggtcaccgagatctcgctgtccaacatgaacctcaccggcgggatctcgccctccgtcggggccctgcacggcctggcgcgcctgcagctcgactccaactcgctgtcggggcccgtgccgcctgagctggccaaatgcacgcagctccgcttcctgaacctgtcctacaacagcctcgccggggagctgccggacctgtccgcgctgacggcgctccaggccctcgacgtcgagaacaatgccttcaccggccgcttcccggagtgggtcagcaacctgtccggcctgaccacgctcagcgtcggcatgaacagctacggcccaggggagacgccgcggggcatcggcaatctcaggaacctgacgtacctgttcctcgcgggcagcagcttgacgggggtcataccggactccatcttcgggctcaccgagctggagacgctggacatgtccatgaacaatctcgtcggcaccatcccaccggccatcggaaacctccggaacctgtggaaggtcgagctgtacaagaacaacctcgcgggcgagctcccgccggagctcggggagctcaccaagctgcgagagatcgacgtgtcccagaaccagatcagcggcggcatcccagcggcgttcgcggcgctcacggggttcacggtgatccagctctaccacaacaacctgtcggggccgatcccggaggagtggggagacctgcggtacctgacgagcttctccatctacgagaaccggttctccggcgggttcccgcgcaacttcggccggttctcaccgctcaacagcgtcgacatctccgagaacgccttcgacgggcctttcccgaggtacctgtgccacggcaacaacctccagttccttctcgctctccagaacggcttctccggtgagttcccggaggagtacgcggcgtgcaacagcctgcaacgcttccggatcaacaagaaccggttcaccggcgacctaccggaaggcctgtgggggctcccagcggcgacgatcatcgacgtgtccgacaacgggttcaccggagccatgtcgccgctgatcgggcaggcgcagagcctcaaccagctgtggctgcagaacaaccacctcagcggggcaataccgccggaaatcggccggcttgggcaggtgcagaagctctacctatccaacaacaccttctctggctccataccgtcggagatcggcagcctgtcgcagctgacggcgctgcacctggaggacaacgcgttcagcggcgccttgccggacgacatcggcggctgcttgaggctcgtcgagatcgacgtctcccagaacgcactgtccgggccgattccggcctcgctgtcgctgctgtcgtcgctcaactcgctgaacctttcctgcaacgagctcagcgggccgatcccgacgagcctccaggcgctcaagctcagctccatcgacttctcctcgaaccagctcaccgggaacgtgccgccggggcttctggtgctcagcggcggcacccaggcgtttgcccggaaccccggcctctgcattgacggcaggtccaacctcggcgtctgcaacgtggacggcggccacaaggacagcctcgccaggaagtcgcagcttgtgctcgtgccggcccttgtctcggcgatgctgctgctcgtggccggcatcctgtttatcagctaccggagcttcaagctcgaggagctcaagaagagagacctggagcacggcgacgggtgcgggcagtggaagctggagtcgttccacccgctggacctggatgctgacgagatctgcgccgtcggggaggagaacctgatcgggtcgggcggcacggggcgcgtgtaccggctggagctcaagggccgtggcggcggcagcggcggcgtggtggccgtgaagcggctgtggaagggcaacgcggcgcgagtgatggccgccgagatggccatcctcggcaaggtccggcaccggaacatcctcaagcttcacgcgtgtctgtcgcgcggcgagctcaactttatcgtgtacgagtacatgccgcgcggcaacctgcaccaggcgctccggcgggaggccaagggcagcgggcgcccggagctggactggcggcggcggagcaagatcgctctcggcgcggccaaggggatcatgtacctccaccacgactgcacgccggccatcatccaccgcgacatcaagtccaccaacatcctgctcgacgaggactacgaggccaagatcgccgacttcggcattgccaaggtcgccgaggattcctccgactccgagttcagctgcttcgccggaacgcatggctacctcgcgcccgagctggcctactcgctcaaagtgacggagaagacggacgtgtacagcttcggcgtggtgctgctggagctggtcaccggccggagcccgatcgacccgcgcttcggcgagggcagggacatcgtgttctggctttccagcaagctcgcctcggagagcctccacgacgtcctggacccgcgggtcgccgtgcttcccagggagagggacgacatgctcaaggtgctcaagatcgccgtgctttgcaccgcaaagctgccggcgggcaggccgaccatgagggacgttgtgaagatgctcaccgacgccggcacggggccctgcagcccgcgcggacagccgccgtcaagggtctgcagcaacaagagctgctgctgaatttttggagcaggctctgcgtctcttgccaccgaaccgacacatatgcctctgtttcttcgttggattcctggtgccacctgcgttatgtggtaggacaattcgtaggatcatgtacttgcaggtattttgtacaatgattaaactgcagtactccatcctcattaatgtaagccataatctggtt

SEQ ID NO: 1121 - DNA, 2625 bp, Zea mays
cacacacacatccaacagcaatggcgaccaccatcaccaggctcttgcaccacctggcgctcttactcctcgttgtccagttcgccgacgcagttttcgtcccaaagaccaagaactacgctgtgctgaagcctcagtcatggggcaccacctacatagtccatgccaacttcctcgccaagccgccccacttcggctccctgaaggagtggtaccgttccatggtgaccacccacgcctcttccactcgggcggcgagctccagcagcatcctgtacacctacgacaccgtcatgcacggcttcgcggtccagcttactggcgacgaggcccggctcatgtccagcgcgcccggcgtgatcggcgtgtacgaggacagggtgctctaccctcagaccacgaggtcgccggggttcatgggcctcgaacccggcaacggcgcctggaagcagaccgacttcggtgacggcgtcatcatcggtttcatcgacggcggcatatggcccgagagcgcgagcttcaacgacagcgggctcggccccgtccggtcggggtggcggggcaagtgcgtcgacgcccacggcttcgacgccaacttgtgcaacaacaagctggttggagccaaggccttcagcgctgctgcggacgccgtggcgggtaggaagagccgtggcgtcccgtccccgagggacaaggatgggcacggcacacacgtggcctctacggccgccggtgctgaggtccggaacgccagcctctacgcgttctcccaggggaccgctcggggaatggcgcccaaggcgaggatcgccatgtacaaggcatgcagcgagaatggctgcatgcatgcggacatcgtagcagcggtggacgctgcggtgaaggacggcgttgacatcatctccatatccctcggacgaagttttcccatagccttccacgatgacgtcctcgcggtcgccttgtttggtgcagagcgcaaaggcgtcttcgtcgtcgtagccggcggcaatgccggcccgcaggcagctagggtggtcaactcagcgccgtggatgaccaccgtaggcgccgccaccgtggacaggctgttcccggcgcacctcacgctcgggaacggcgtcgtgctcgccggccagtccctttataccatgcatgccaagggcacgcccatgatcccgttagtgtccacggacggcatcaattcgtggacgcccgacacggtcatggggaaaatcgtggtgtgcatgttcggagcaagcgacgcggatggcatcttgttgcagaatgctggtggagcagggatagttgatgtggattcttacgagtggtctcgtgatggttccgcgctttattccttcacccttccgggtctcacgctcagctacaccgccggcgagaagctcagggcgtacatggtctcggtgccctatccggtggcgtccttgagcttcggctgtgagacggtcatcagccgcaagaatcgggcgccggtggtggcgggattctcgtcgcgtggccccaatcctgccgcacccgagctcctcaagcccgatgtcgtcgcgccgggagtgaacattcttgcggcctggtcaggcgacgcaccactagcgggggtcttcgttcccgatgggaggagagcgaactacaacatcatatcggggacttccatggcgtgcccgcacgtcgctggcatcgcggcactgatcaagaagaagcacccaagctggacgccggccatggtacggtcggcgctgatgacgaccgccgggacggtcgacaacagaggcggacacatcctcgacaacggtcacacggacacccttggccgcaccgacaacgtcagggtcgcgacgccgctggtggccggtgccgggcacgtccacccggacctcgctctggacccgggcctcgtctacgacgccggcgagcgcgactatgtcgacttcctgtgcgccctgaactacaccgcggaacagatgcggcggttcgttccggacttcgtcaagtgcacgggaacgctcgccggcggccccgccggcctgaactacccgtcattcgtcgtggccttcgacagccgcaccgacgtcgtccgcacactgacgcggaccgtgaccaaagtgtccgaggaggcggaggtgtacaccgcgactgtcgtcgcgccggagcacgtgaaggtgactgtcacgccgacgaccttggagttcaaggagcatatggagacgaggagctactcggtggagttcagaaatgaagccggatggcaccgagaggcagggtgggacttcgggcagatcatctgggcgaacgggaagcataaagtcaggagcccggtggcgttccagtggaagaactgacgacttctagtagtattggagtagaagatgcacaagaataagcaatatgttgagctgccgtgcttaaatctgtcagatgttgtcatgcagatgagttcattggttaggggaagggaaatcagtaattccgattctcggacagcaatcgtgtactatcactgtcatcattggccgcgagctgttttttcatgggctcagggcgtggctatctcgaatagctctcgtaaaagaatcgtaatagtaatttatttatctcttgattcatctt

SEQ ID NO: 1122 - DNA, 2443 bp, Zea mays
catcactccatcagcaatggcgacaaccatcaccaggctcttgcaccacctagcgctgttcctcctcattgtcgagttcgccgacgcagttctcatcccaaagaccaagaaccacgctgcgttgaagcctcaggcatcgagcaccacctacatcgttcatgccaacgacctcgccaagccgccccactttcgctccctggaggagtggtaccgttccatggtgatcacccacgcctcttccactcgggcggcgagctccagcagcatcctgtacacctacgacaccgtcatgcacgggttcgcggtccagctcactggcgacgaggcccggctcatgtccagcgcgcccggcgtcatcggcgtgtacgaggacagggtgctctaccctcaaaccacgaggtcgccggggttcatgggtctcgaacccggcaacggcgcctggaagcaggccgacttcggtgacggcgtcatcatcggcttcgtcgacaccggcatatggcccgagagcgcgagcttcgacgacagcgggctcggccccgtccggtcgagctggcggggcaagtgcgtcgacgcccacgacttcaacgctagcttgtgcaacaacaagctggtcggagccaaggccttcatcactcctgctgcggacgccgtggaagagaggaagagccgtggcgtctcctccccgagggacaaggaaggacacggcacgcacgtggcctcgacggccgccggtgctgaggtccggaacgccagcctctacatgttctcccgggggaccgcgcggggaatggcacccaaggcgaggatcgccatgtacaaggcatgcggcgtgggaggctactgcaggaatgcggacatcgtagcggcggtggacgctgcggtgaaggacggcgttgacatcatttccatgtccgtcggaggagctcgtcccacagccttccacgacgacgtcgtcgcgatcgccctcttcggtgcggagcgcaaaggcgtcttcgtcgtcctctctgctggcaacaacggcccgcaggcaactacggtgatcaactcggcgccgtggatgaccaccgtaggcgccgccaccgtggaccggcagtacccggcgcagctcacgctcgggaacggcgtcgtgctcgccggtcagtccctttataccatgcatgccaagggcacacacatgatccagttagtgtccacggacgtcttcaataggtggcacagctggacgcccgacacggtcatgggaaaaatcatggtgtgcatgcacgaagcaagcgacgtggatggcatcatcttgcagaatgctggtggagcagggatagttgatgtggatcctcaggagtggtctcgagatggttccgtggcatatgccttcactcttccgggtctcacgcttagctacaccgctggcgagaagctcagggcgtacatggcatcggtgccctatccggtggcgtccttcagcttcgcctgtgagacggtcattggccgcaacaaccgggcgccggtggtggcgggattctcgtcgcggggccccaaccttgtcgcactagagctcctcaagcccgacgtcgtcgcgccgggagtgaacattcttgcggcctggtcgggcgacgcatctgtctcgggatattccgacgacggcaggagagccgactacaacatcatctccggaacgtccatgtcgtgcccccacgtcgctggcatcgcggcgctgatcaagaagaagcacccaagctggacgcctgccatggtacggtcggcgctgatgacgacggcccgtacggtcgacaaccgaggcggatatatcctcgacaacggtcatagcgtcatcgtgggccgcagaatcgacaacttcagggtcgcgacgccgctggtggccggggccgggcacgtccagccggacctcgcgctggacccgggcctcgtctacgacgccggcgagcacgactacgtccacttcctgtgcgccctgaactacaccgctgagcagatgcggcggttcgttccggacttcgtcaactgcacaggaacgctcgccggcggccccgccagcctcaactacccgtcgttcgtcgtggccttcgagaactgcaccgacgtacgcacgctgacgcggacgctgaccaaagtgtccgaggaggcggagacgtacagtgtcaccgtcgtggcgccggagcacgtgaaggtgaccgtcacgccgacgaccttggagttcaaggagcagatggagacgaggagctactcggtggagttcagaaatgaagccggagggaacccggaggcaggcgggtgggacttcgggcagatcagctgggagaacgggaagcataaagtcaggagcccggtggcgttccactggaagaactgacgacttattacttaagtattgcacagaaataagctatatcttgagctatcatggttaaaggacttatttcagatg

SEQ ID NO: 1123 - DNA, 1555 bp, Zea mays
aaagacacacgttcacatcaatccaccattgaccaattcctcccacactgaagccaccacaccaccacaacagcagcctttgtagcaagcacacactcgccacaatgcgcacgcccttcgtggatcctcacagcgccgccggccggctcaagcagcgcctggcaaggatcctcacgcgctccacctgcaccaccaataacgccgctgccgccagctcgggcggcacggccacggccacggccttcgtcagcctcgccaagaccaacaacgcccacaccgccgcctcctcatctcacccggagccggaagcgccgccctccccgtacttctgcacgccctgcacctacgactacgagcgccccaaggccgaccgcgggacgcgcccgcgccgcacccgcagcgcctcgctcatacacatctccgtcgactgcacgggcggggccgcctccggccgccgctccgcccactccgacgcgccgcttctgcagcacctcttgtcggaacaggtgccggcgagggacgtcgtcggcggcacgaagcagagcaagagcggcggcaggagcaagctgacgacgacgcggtcgtctccgtcggcgtcgaggcggcactgctcgtcgtcgtcctcctcctggggccgcgcccgcgcgcgccggcccagcagcacgcccacgccctacagctggtcgtcgtcgtcgtcgtcgcggtcgtccgccaccgcgacggacgacgagctcgcgccgttcagcggcagcgacgacgaggagggcggcggcggcggcgaggcggccgacatgcggacgctcttctcgtccctcagcttctcgtccgaccccacatcatccgagttctaccgcaccaacggcggccgcagcggcaacggcaacgccagcaggaggagccacaggaacacggcgagtcgtcgtcgcggccgccgcgcgcgcgcgccacggcgtgcgctgtcgagatccagcggcggcgacccggcagcaccgcccgacgccttccggccgctggtgtccgtggagacgacgaggcgcactacggagcgcagcgagaggagcaaggaagacaagggtctcaataacgccaagaagctgacgatgacgatgctgggcgcggccgcagccgcggaggaggaggccgccggcgcgggcatggctgtggtgaagcgctcgagcaacccttacctggacttccgcagctccatggtggagatggtggtggagcggcgcatcgccagcgtggggaagatggaggagctcctgggctcgtacctctcgctcaactcgccgcgccaccacccggccatcctcgctgccttcgaggacgtctgggaggccgtcttcggcgaggagtgactcgactgggagcgtcaagcgtgatctctttcagagtactgtttcaaaacttctacgtacatgccaatgtataaattggcaccgttttgccacgccgagatgctgtggtgctcatcgtatgtaacgagcttcatatacatggtgataattgagcgcctgagtggctgagttgttctacgaaaaaaaaaaaaaaaaaa

SEQ ID NO: 1124 - DNA, 2937 bp, Sorghum bicolor
atgagaggacaaatccttgcctgcctccctctgaatctgatcacactcctctcgctcttcctgagctgcacctgccaaatcgattcccaaacacacgccctcctccagttcaaggccgggttgaacgaccctctgaaccacctcgtgtcatggacgaacgccacctccaagtgccgcttcttcggcgtccggtgcgacgacgatggctccggcacggtcaccgagatctcgctgtcgaacatgaacctctccggcgggatctcgccgtccgtcggggcgctgcacggcctagcgcggctgcagctcgactccaactcgctgtcggggcccgtgccgcctgagctggcgaaatgcacgcagctcaggttcctgaacctatcctacaacagcctcgccggagagctgccggacctgtccgcgctgacggcgctccaggccctcgacgtcgagaacaattacttcaccgggcgcttcccggcgtgggtcggcaacctgtccggcctgaccacgctcagcgtcggcatgaacagctacgacccaggggagacgccgccgagcatcggcaacctcaggaacctgacgtacctgtacctggccggcagcagcttgacgggggtgataccggactccatcttcgggctcaccgcgctggagacgctggacatgtccatgaacaacctcgccggcgcgatcccgccggccatcggaaacctccggaacctgtggaaaatcgagctgtacaagaacaacctcaccggcgagctcccaccggagctgggggaactgaccaagctgcgggagatcgacgtgtcccggaaccagatcagcggcggcatcccggcggcgttcgcggcgctcacggggttcacggtgatccagctctaccacaacaacctgtccgggccgatcccggaggagtggggcgacctgcggtacctgacgagcttctccatctacgagaaccggttctccggcgagttcccggccaacttcggccggttctcaccgctcaacagcgtcgacatctccgagaacggcttcgtcgggccattcccgaggtacctgtgccatggcaacaacctcgagtaccttctcgctctccagaacggcttctccggtgagttcccggaggagtacgcggtgtgcaagagcctgcaacgcttccggatcaacaagaaccggttcaccggcgacctcccggaaggcctgtgggggctcccggcggcgacgatcatcgacgtgtccgacaacgggttcaccggagccatgtcgccgctgatcgggcaggcgcagagcctcaaccagctgtggctgcagaacaacaagctcggcggagcaataccgccggaaatcggccggctcggccaggtgcagaagctctacctgtccaacaacaccttctcgggctccataccgtcggagatcggcagcctgtcgcagctgacggcgctgcacctggaggacaacgcgttcagcggcgccttgccggacgacatcggcggctgcatcaggctcgtcgagatcgacgtctcccagaacgcgctgtcggggccgattccggcctcgctgtcgctgctgtcgtcgctcaactcgctcaacctctccaacaacgagctcagcgggccgatcccgacgagcctccaggcgctcaaactcagctccatcgacttctcctcgaaccagctcaccgggaacgtgccgccggggcttctggtgctcaccggcggcggccaggcgtttgcccggaaccccggcctctgcgtggacggcaggtccgacctcagcgcctgcaatgtggacggcggccgcaaggacggcctcctcgccaggaagtcgcagcttgtgctggtgctggtccttgtctcggcgacgctgctgctggtggccggcatcgtgtttgtgagctaccggagcttcaagctcgaggaggtgaagaagagggacctggagcacggcgacgggtgcgggcagtggaagctggagtcgttccacccactggagctggacgccgacgagatctgcgccgtcggggaggagaacctgatagggtcgggcggaacggggcgtgtgtaccggctggagctcaagggccgcggcggcgccggcgccggcggagtggtggccgtgaagcggctgtggaagagcaacgcggcgcgggtgatggccgccgagatggccatcctcggcaaggtccggcaccggaacatcctgaagctgcacgcgtgcctgtcgcgcggcgagctcaacttcatcgtctacgagtacatgccgcgcggcaacctgcaccaggcgctccggcgggaggccaagggcagcgggcggccggagctggactggccgcgccggtgcaagatcgcgctcggcgccgccaaggggatcatgtacctccaccacgactgcacgccggccgtcatccaccgcgacatcaagtccaccaacatcctgctcgacgaggactacgaggccaagatcgccgacttcggcatcgccaaggtcgccgcggatgcctccgactccgagttcagctgcttcgccggaacccatggctacctcgcgcccgagctggcctactcgctcagagtgacggagaagacggacgtgtacagcttcggcgtggtgctgctggagctggtcaccggccggagcccgatcgaccggcggttcggcgagggcagggacatcgtgtactggctgtccagcaagctcgcctcggagagcctcgacgacgtgctggacccgcgggtggccgtggtggccagggagagggacgacatgctcaaggtgctcaagatcgccgtgctttgcaccgccaagctgccggcggggcggccgaccatgagggacgtggtgaagatgctcaccgacgccggcgcggggccctgcagcccgcgtggacagccgccggtaagggtctgcagcaacaagagctgctgctga

SEQ ID NO: 1125 - DNA, 2023 bp, Zea mays; identical to SEQ ID NO: 1101

SEQ ID NO: 1126 - DNA, 1074 bp, Zea mays
acacacacacgactagcaggcacagcagcaccgactagtcaatctctacttgcctacacagcagaaggaaccagacagggaagtagggaaccagagaaagcatagcaatggtgcggaagccgatccacgctgacgacgccggcgctaagagcacggaggcgagcaaggagaggaaggggttgtggtcgccggaggaggacgagcggctcttcacccacatcacctaccacgtcgtctccacctggagctccgtcgcgcagctagcaggcctgcggaggagcggcaagagctgccggctgcggtggctgaactacctgcgcccggacctcaagaaggagcccatctccaagcgcgaggaggagaccatcatctccctgcagcagtcgctcggcaaccggtggtcgactatcgcggcgaggatgccaggcaggacggacaacgagatcaagaactactggaactcccgcatcaggaagcgcctcaacgccgccgcctccagagctgcaggctgcggcgacggcggtgacagcgcggccgagccatcgggggccgcggccgcgggaggaaaggaggattcggccaacgctgcgccgccgccagcggcccagcctacgcccatcccggcgcggttcccggtcttcgggtgccagctgcccgacggagccggcggcggcatttcgtctcccggcagcggcaagagtccacagtcgtcgactactgcgagtatgcggcagaacgcgggtgacgagagcgatgcgagcgacggtggcggtggcgacagcgacatggtccatttcctctcgttcgatgatctggattatcccggggatttgctcattgatgtgccgggcgccatggacgcgtgggagagccaactgtgctatgcgaatccgatgatgagctcgctctgttgatccacactaccaattgcatatagcacagccattgtcttgttcccgctaatcatatataggttgtatgaattgtttatgtgaaatttcactgggttttttggagaaggaatgcatgatgacgtgtgggtattcctattaaaaaggaaaaaaaaaaaaaaaa

SEQ ID NO: 1127 - DNA, 1638 bp, Zea mays
gctcggcccagcagagggagcatcgcaattcacaccagcgcagcgcgacgaggggaagaggagtttctcagccgcagtcgccgaaccacacgccgccgaggccgtaggcgcgcttgctgtcccgccgcccgcatggcaccgaagcgcccggccgccgcagcggcggcggcctcggggtcggcgtccgaggcatccgacgcggaggcggacgtgggccaccagccgtcctccccatccccgtccaagacgccgccgaccaaccctaaccctaagtccgctgccgctggccccgccgaggactccaccgcggccggatccgactccgaggccgcgtacgactctgacgcggaccaccgccccgcgcaccggaaggcggcggtagcggcgtccccatcgcgcaagcccaggagccccaggccgcgctcccgctcccgctccccggacgcagcctcgtactccgacggcgcggcctcagatgccgacgctgaccctgccgcccgagacggcgccgactccgccgacgacggcaacgcctctccgctcgcgctcccgcgcctatcccgcgccgaggctgccgccatcaagcccctcagctcgcgccccatggatccgccgcgccgctccatggtacactctttctccgagctgcgctcgaagcgcccccgcagcgccgccgtcccgtcatccgttgagcagctcaagaggccgacgcggctctggagcctccgtgacgagatcgtcatcctgcggggcttggtcacgtaccgcgccaagcgtggggtcctccccggcgccatgtatgacatttctatgttccaaggccacatccagagcgagctcagtgttaacgtaacccccacgcagctcagtgacaaggtacggcgtctcaagcagaagtacaaccagcttgcgtcccgtggcaagaacgggcgggatccagacttgcccacccagcatgaacagagtgtttatgagattggcaagaaggtatggggaacaagtacgggtggtgatgggtatgagattggtggtgacagccaagaggagcatgaaattggagagagtgacgaggatgtggagagtgggtgggatgaacgtgcccgcaagaacaggaggctgatgccaatcactatggcaaatggacacggatctgggttcggggctggcagagggaagtttgatgttgagaagggaaaggatgcttatccatacctttgggagactgtagaggatctgtcaaaggagcacccgaatggggtagcattcaagaaagcctttgagctgatcgaaggcgccagagcgcgtgggatggaggagaagctacgaaaattcaggctgacagagatcagacaccagctgcgacgtatggaattgatgaaggagacagtgaagatggtgcttgatgcgctggaaggttgactgagtaatgatcttctggtgggtgagttgtgcaatgtttaaaggagcaatcagtgtcttcttttgtttctagatagagtttctgtgactgaattacttgacttgcatagacaagttgcacttgtgtctcttgggtgctaacttttgcattatatggtatacagtttctatgctcacttaagtttggttacttaagttcggtttgatgcaaaaaaaatg

SEQ ID NO: 1128 - DNA, 1078 bp, Zea mays
gcagctccgctcgtcgatcagctctcggctgaccactcaccgccagtgggtgcctgccgaccaggtctcgccaccgccgccgccgccgcggtagagaggggagggagagggagagggagaaaaaactggcccagatcgagaggtacagcacgaaaaagagaggcaagagagataggggaccggagggcggcgggccggggcccaagaccgaggggctcgtgcgcaggaagctgatgaggctcctgtcgctcgtccccttcggctgccgtgctggacccatcgacgacgcgccgccgcccgtggaccacgctgccgccgccgccgcgaggaggcgccggaggaggagggccaacagagccgcccagctgctgggggctgctgcgggtgcgccgcagcagtggcgcccctcgctcggcgacatctgcgaggagtacagcagcagcaccgacgccgtcaaggtcaggaaggcggcgtcctgggacctcgcccgggcgctgccccgcgcgcacggtggcaagcagtaccggtacttatctatctatctatttatatacctgtcagagattgtcactgtgtcatgtctctacgtatgtacgtctaatctgccgagaacgacatgatatgcatggttgtacacacacaggcaccttgagagcgcgtcgtccctgccagcgttcgcgccgacggcgttcctgttctgatcatggcgtcggcgacggcggcgactcgtcgtcatccacgaggacgacgacggcggtgaagacaataagaaccaaccaaaaccactacgcgaagcatatatacagattactgtcaacgtattgtagaaccaaggatctatgtataaatatatgtgtgcgtccatatcatcatcggaccggaataaagctagcaatctctcttcttcacgatcgagagatagcgcgcgtgcgtgtaattaagtattatagatgcatgtatgatgcatgcgtgtgtgtatctatatatcatgtgatggtttgtatatgagctagctatagctagagtcgtgtaatagtatactacaaactaagctaatacaatatccaagtttgctata

SEQ ID NO: 1129 - DNA, 1508 bp, Zea mays
ccctccccgcccttggcaacaagtgcgtaacacgcgacgaggccacacacacagccgtgacagcccgcgctctcacgctcatgtcaatgacgccatccatggagatcgacctgcacgtcgtgcgcgcggcgcgcgtgctgggtcgtggcgccatgggcacggtattcctcgccgttgacggcggcaccggggaggcctacgcgctcaaggtcttcgacaagcgctccgctgcggcggcgtcgaggccggccgcgggcgccgacgcggcgcggcgcgcgcagtgggaggtgtccgtgctgtccaggctcgcgcacccgcacctgccgtccctgctgggctgcgccgagacgcccgacctactggggtgggcgctgccctactgtccaggcggggacctcaacgagctccgccacgcgcagcccgaccgcgtgttctcccccgcggccatccggttctacgtcgccgaggtggtgtccgcgctcgccgagctccacgccgccgggatcgcgtaccgcgacctcaagcccgagaacgtgctcctccgcgccgacggccacgtcatgctgaccgactttgacctctcacggcagctcccgccgcccaggtccccctccgcatccacgtccacgtcgtcgtcgtcgtgctcggcgacatcgtcgccgctgcctcagacccagacgacccacatgaagaacatcttcaagagaagcgagtccgctgtgaccgcgcccacctccggacaggaggaaccacgcaacctcgcctggtacctgagcaaaagcatcgacggcggcagcgaccaggtcaagaaggcgaaatcggccagggtaacgccggtggaccgcggcaaggagctgccgagcttctgccccgctgccgcagccgcagccggagagcggtcgttctcgttcgtgggcaccgaggagtacgtggcgccggaggtggtgcgcggcgacgggcacgagttcgcggtcgactggtgggcgctcggggtgctggtctacgagatgtcccacgggcggacgccgttccggggccggagccggaaggagacgttccggaacgtgctgctccgggagccggggttcacggcggacgcgcggcggcggtggccggagctaacggacctcgtctcgcggctgctggagaagaatcccgcgcggaggctgggtttcgccggcggcgccgacgaggtccgggcgcacccgttcttcgccggggtggcgtgggacctgctcggggacgtgtcccggccgccctacattcccgcgccgcccgatgacagtattgcctcctgcgaggggttcagcgtggcggaatacttcgataggcttcaccagcctccgctgtcgccggcgaagcactcgcccgaggaagagctcttgccggagttctgacaccggttgttcccgctcgagattcgtgctccctgttgtttccgttttgttgcaccatcaaagatcactatatcgttaaataatggatctcggtgatatgcgtgaacagag

SEQ ID NO: 1130 - DNA, 1792 bp, Zea mays
cacacacacagcttccctctcttccattcttccattagccatccagtcaacaagtcgtgcgcagcgcagtggcaagagctagctaggagattgatccggcctagttctgttcagcatgaggaaggtgtgcgccaacccagacagagaggtcggcctcgacacagtgctcgaggtgcccgtcccggaccagctccaccacgatccgtcgtcgtcgtcgtcgggccacggccggcgccggcgacgcacgctcaaggcgtgggtgcggtcgcgcatggaccagcgccaccggcggcacagctcgccgccttcccaggcggacgtgcagctcatgctcggggtggtcggcgcgccgctggtgccgcagccagtgcaggcgaggaaggccatggtggccggagaggacatcaaggaagagccccttgaggtgtccaaggcgaagtacatcgtggagcagtacgtcgcggcgtctgggggcgagcgggcgctgagcgcggcgacgagcatgtacgcggtggggaaggtgctgatgaggacgaggtcgtcgtcgacgacgaccaagcaggggcagaaagcccgcaggacgggaatggtgggcgtggtccacggcggcgccgagatcgccggcggcctcgtgctgtggcagaaggggccggaggtgtggtgcgtggagatggtggtggccggcggcaccaagatgagcgccgggagcgacggcagagtcgcctggcgccagacgccctggcagcaggctcacgcttcgcgggggcccccgagacctctccgtcgatgcgtccagggtcttaacccgagatcaacggcgaacctgttctcgacagccacgtgggtcggcgagaagagcgtcgacggcgacgactgcttcgtgctccgcgtcgacgccgacccgctggccctgcgcgcccggagcggcgacgacgtcgaggtcgtcaggcacgccgtgtgggggtacttcagccagaggacggggctgctgtcccgcctcgaggacagccacctgctgcgcgtccgcgcgacgaagggctcgccgctggcccagacgaccacgtactgggagacttccatggactcgtccatcggcgactaccgcgccgtcgacggcatcaacgtcgcgcacgccggccgcaccgtcgtctcgctgtcccggttcggcggcagcaccaacgacgacagcgctggatccgaatcggccggcgtgctcggcaggaggacgtgcacgtgcatggaggagaattggagcatcgaggaggtcgacttcaacgtcgtgggcctgtccgcggagtgcttcttgcctcctagagacatggtagtagtaccttgcagtcctaaaccagtcgacgatgagaaggggcagtgtggccgccttgaccacagctgcaagaaagacgacgctccagctgcacttgacgtcaggaacaagaacggtaatggcggtgccggtggtgtccatcgtcctgcgacggcaagaaaggctcttgtaacggcggcgacagggctaccctggtccgggactgccaaggttgtggccgtcgaaaccttcgacaccaccgctgagtaattagtattattactttgtatatgctgcgtagttacggaggcgtgcgcgtgttgcgcgccccgtacgtgacgtctggtagctggcaagaacagtaccctgtagtttcattttgctatgtatagtgcacagtacgagatatgcgtagaacccatgaacctttttctcctctggagttctactgtttttccataacctgcaagaatacatatgctgtacggt

SEQ ID NO: 1131 - DNA, 1698 bp, Sorghum bicolor
accacgcatcgcccccgctccgcattgccccccgtcgccgccaaaatctcagcgcaatttcgcgcggagtttaggccttgtgggagggagtggaggtgtgacaggagcagcagcaagcccgccatggacccgtgcccgttcgtgcgggtgctggtcggcaacctcgcgctcagaatgccggtggcgccgccggccgccggtgccggcgccggcgtgcacccgtccacgtcgccgtgctactgcaagatccggctcgggaagatgccggtccagagcgtcccggcgccgctcgtggtctccgacggcggcgagcagacgccggcgtcgggggccctcgccgccgcgttccacctgtccaaggctgacctggagtggttcaacgggaagccgtctctcttctcgtcgcgcggggaggccagcctgaaggtgtcggtctacgccggccgcaaggggagtacctgcggcgtcagttccgggcggctgcttgggaaggctacgatcccgctcgatctcaagggcgcagaggccaagcccgccgtgctgcacagcggctggatctccatcgggaagcgagcagggaagggcaaccccgcggcgacggagctcagcctcactgtccgcgcggagccggacccgcgatttgtcttcgagttcgacggggagccggagtgtagcccgcaggtgctgcaggtgggcagcgccatgaagcagcccatgttcacctgcaagttcggatgccgcagcaacagcgacctgcgcaggcccgggatgcagccggagcgtgacgccggcgcgtcggccaaggagcgcaaggggtggtcggtgacggtgcacgacctgaagggctcccccgtggcgatggcgtccatggtcacgcctttcgtgccgtcgccgggcacggaccgcgtgagccgctccaacccgggcgcgtggctcatcctccgccccgctggcgacggcgcctgggagccctgggcgcgcctcgagtgctggcgcgagcgcggcggcgccggcgcgtccgacagcctgggctaccacttcgacctcctcgtccccggcgcggaccacgccgtcgcactcgccgactcctccatcccctcctccaagggcggcaagttcgccatcgacctgaccgccgcgcagccgctcagccgcggcggcacgccaggatgcagcccgagaggaagcggcgacctgagcaactggcccctgggcaactaccgcggcttcgtcatgtccgccgcggtccagggcgagggccggtgcagcaaaccgactgtcgaggtcggggtggcgcacatcgggtgcgccgaggacgcggcggcattcgtggccctcgcggcggccgtggacctgagcatggacgcgtgcaggctcttctcccaccggctgaggaaggaactctcgcacctgcgggctgacctactccggtgacccatcggccatcggaccggcggcaacaacgaatcgcgagcaaattgtacagaaagtagttgaggcagatttgtgctttagagtgcgctagtttgttggagtagttcgattcgagctggtgatcgtctagttgatcgtggtcacctactttttttttcgtgagcgctgagtgtggtgcggtgtgattttttggttggttgctaagctttagccatgtagggtgtcctcttttttggatcgctccataatttagagcaatttgtg

SEQ ID NO: 1132 - DNA, 2415 bp, Sorghum bicolor
ctcaatcgctccctgagttagagctgtcgtcaagaagagaaataactcagaaaaaaacaagggagcccctcgatcctctcggtgactgtctcgaataagctccggtgctgctccatgctttgaacctctccaactcatgacaagaaagccccctgcagtctgcagctgattgcaggggacgtctgctgcctacagctctcggtcggatgccatagatgagctgcggaagggtccccatggagtgcggccacgactgcgttgttccacggcctcaggaacaccaggcgccgctcaaatgcgagagcccgacgctttcttctgaagaattccttcagttcaagaggaaggccaccacgatcgtggaggagtacttctccacggacgacgtcgcggcgacggcgaacgagctgcgggagctccgcgtgccgtgctaccactactacttcgtcaagaagctggtgtccgtggcgatggaccgccacgacagagagaaggagatggcggccgtgctgctgtcctcgctctacggcgacgtcgtcgaccggccgcagctctgcaagggcttctgcaagctcaccgagtcctgcgacgacctctccgtcgacacgcccgacgccgtcgacatcctcgccgtgttcgtcgcccgcgccgtcgtcgacgacatgctgccgccggcgttcctggccaagcagagcgcgtgcttgcccgacgggtgcaagggcgccgaggtcctccgcagggcggagaagagctacctgtccgtgccgcaccacggcgagatcgtcctgcagaggtggggcggcagcaagcggatcacggtggaggaggccaaggccaagatatccgacatcctggaggagtacctcgccgccggagataggtgcgaggccttgcggtgcatcagggacctcaagatccccttcttccaccacgacgtcgtcaagcgcgcgctcgttctcgccgtggagcgcggcggtgcgtccgaggcccatatcctggacctgctcaagtcggcgtcggaggaaggggttatcaacgagagccagatcgctaaagggttcgaccgcttgatcgactctctagacgatctgacgcttgacgtgccgaatgcgaggtgccttgtgcaatcggtgatccataaggcttcgtcggagggctggctgtgcgtgtcgtgcttgaaaccgttgccaccggagcccaaaaagagcagcgaggtcgacgacgcggcggtgcggcagttcaaggcgaaggccgttttgatcataaaggagtacttcttgaccggcgacatcatcgaggtcttgagctggttggaggcagagaacttctcgtgctgtccctccttcaatgccatcttcgtccagaagctggtcaacgccgcgatggaccggaagagccgcgagaaggagatggcgtcggtgctgctctcctcgctctgcatgccgccggaggacgtcgtggcagggttccacctccttatcgaggccgccgaggacgccgcgctggacaacccggccatagtcgaggacctgaccatgttctttgctaggtccgtggttgacgaggtgatcgcgccgtcggacctggaggcaatggaggaggacgccagccgcgtcaaggcagatggctccaccggcatgctggcgctccggaacgcccgtgcgctgctcggcgcgaagctctccgcggagcggatcctgcggtgctggggcggcggcggcagcggcaaagcaggctgggagctggaagaggtgaaggacaagatcggcaagctgctgcaggagtacgactgcggcggcgacatccgggaggcgtgccgatgcatcaaggatctcggcatgcccttcttccaccacgaggtggtgaagaaggcgctggtggcgatcatcgagaagcggggcaaagacgagcgcctctgggggctcctcagcgagtgctacggccgcggtctgatcacgcccaaccagatgaccaagggcttcgacagggtggccgactgcgtcgacgacctcgcactcgacgtgcctgacgccgcgaagcagctcggctgctgcatcgaccgcgccaagaaggaaggatggctggacccgtccttctcgatgacgaggccagggcagccagttgccaatggcgtttgttcgtgagcagccggttacgttcaggatgcagcactgcaattccattacctggggagttcgtctgcaacttttagtacttttatatatcacactatatatacttgtactatgtatatcaacaggagcaagagagggactatatagaagtatatatgtcgccacaacccacaacaattttggtataggattggaagcagatcttccatcttaggagtttgcatggcgtttagcggagaggacttgtgaattggagagtttatgtttcccagcatttgtt

SEQ ID NO: 1133 - DNA, 1358 bp, Zea mays
cagcacaatcgcctcgccttcccttccccaccagcccgtctctctcttctctctgactctctctctcgtagccgcgtccacctcgcagcagcaagcaagcgcgaccaaatggcgcctctaggagacggcggagctgctgccgcggcggcgtccaacaacctggtggtgtcgttcggcgagatgctgatcgacttcgtccccgacgtggccgggctgtcgctggccgagtcgggcggcttcgtcaaggcacccggcggcgcgcccgccaacgtcgcctgcgccatcgccaagctcggcggatcctccgccttcgtaggcaagttcggcgacgacgagttcgggcacatgctggtgaacatcctgaagcagaacaacgtgaacgcggaggggtgcctgttcgacaagcacgcgcggacggcgctggccttcgtgacgctcaagcacgacggggagcgcgagttcatgttttacaggaacccgagcgcggacatgctgctgacggaggcggagctggacctgggcctggtgcggcgcgccagggtgttccactacggctccatctcgctcatctccgagccgtgccgctcggcgcacatggccgccatgcgcgcagccaaggccgcgggcgtgctctgctcctacgaccccaacgtgcgcctcccgctctggccgtcgcccgacgccgcacgcgagggcatcctcagcatctggaaggaggccgacttcatcaaggtcagcgacgacgaggtggccttcctcacgcgcggggacgccaacgacgagaagaacgtgctgtccctgtggtttgacgggctcaagctgctcgtcgtcaccgacggggacaagggatgcaggtacttcaccaaggacttcaagggcagcgtgcccggcttcaaggtcgacaccgtcgacaccaccggcgccggcgacgccttcgtcggctccctcctcgtcaacgtcgccaaggacgactccatcttccacaacgaggagaagctccgcgaggctctcaagttctccaacgcctgcggcgccatctgcaccaccaagaagggcgccatcccggcgctgcccacggtcgccaccgcccaggacctcatcgccaaggccaactagatggccgcacgccccgccgttccaccacgtcactgtcccccgccgccccgcccctcgtcgtcgacgtcctcggtttcggttcattaggtagatcgagtcttagcgtccgtctctgcgcctctacgctgagacggtttgtttgggttaattaagttagctttcgtggagatttcgccccggggcatcaataaaatgttggcatgcgtggtgggatgctaaaaaaaaaaaaaaaaaaaaaaaaa

SEQ ID NO: 1134 - DNA, 1116 bp, Zea mays
gacgccgcctccgctcccgtcgcagtcgcagcacattcaccctacctcactcgccctccccaccctcccctccagaccctcacacggtcacaccaccggcgccgcccgccctgtatggcctactactcgggcggcggcaagctgtcggcggtggacgccatcctggcggaggcggcggacctggtggcgctcgagcaggtcgccaagctcaacacggcccacctcgatgacgactccgcgcttccgtccagcctcgaggcccgcttccgcaagctcaagtccctcccctcgcccgccgcagtgccgcccgtcagcaccctcgcccgcagcgccaccgcgccgcgcccggcccccgctctgcccggccccgatcctcccgctcctgctccgcctgtgcatcacccggtccacgaagacccgccgccgggagacgcggagacgaagggcggcgggtcctcgccgcggcaggctcgcgccccggcacccgcacccacggtccacgccgacgacgccaaggacctagatcagctgttcgggtcggcgccgcggggccggccgacactgcgggagcggaacagggggagcgactcctcctccgtctccccctcgccgccgccgccgccgcgccaggcgtgctgcttcggcttctcccccaagaagcccctgcggagggcgccgtcggccaagggcaagaagaaggaggtctgccacgggtcccgcgacgtcctcggcgtcgacgccgacgagtggggcgacgagaacaggaggatcgccaccgagctcagggagcagcagcgccggctcaggaaggcgctggaggaccaggtgcaggtcagcagggagaccgccaagatggcgcgctgggtcaagcaggcgtccgcgcgcatgacgcacgccgaggccatcgacgacctgctcagtgactgcgaggacgacctcaaatgagctcacgccgacgctttgctcgtcggttcttccactgtctttgtcttgttggtgatcacaagtctgtcaaaaatgctcatatgttttcatgagtgcatttgcatccatgctttggtacaatgcttatacagaagaagcagagtcacgaaacaatgctatttcttttatgtc

SEQ ID NO: 1135 - DNA, 2080 bp, Zea mays
gtcattagccagcgcctcgatctccttcgattcaatcgtttgacattgatatggcgttcgctgaggaggagacgacgaggtacctcggcacgaacctcatcgagagctgcggcgactcggaggacgggctcgccggctgggctccgtccggctcgtgcacgctctccgcgcacgccgacgaggacgcgtctcttccttcgctggcagccgcattgtccgccgccgccggcggcgacgacgaaggcgacgactctgacgaggacgaattccagcagcgcgcgccgaggcccagcggccggtacgtcctggccgcgcgccgcgcgagcgacaaggacgggctctgccgcgcggtctcgcgcgccccgatcaggcccaacgtaacgtaccgggtggccgggtgggtcggcctgggcgccgccgtggacggctcccacgccgttcacgtcgaggtccgcgtcgacggtggtggccgcccggtcggtggcggcgtggctgtggtcgagtcggggaagtggggccagatcaagggctcgttccgtgtcgactgcgatgagccaccgcgccacgccaaggtctacgtccacgggccgccggccggggtggacctcaaggtcacgacggatctgcaggtgtgcgcggtgaacaagattccgaggctcaggcacctcaggaagaaggccgacaaggtgcgcaagcgtgacgtggtcctcaaggtgagccggcggacggacgtcgacgacgacgacacgacggcgagcgtcgccggggcgcacatccaggtggtccaggtccagaacagcgtccccatcggcagctgcatcaccaaggcgggcatgcagaacccggagtacgtggacttcttcaccaagcacttcgactgggccgtgctcgagaacgagctcaagtggtactacacggaggccgtgcgggggcaggtgagctacgccgacgccgacgagctcatcgacttctgcgaccgccacggcaagcccgtgcgcgggcactgcatcttctgggccgtggagaactcggtgcagccgtgggtccgcgcgctcagcgccgaccagctccgggcggccgtggaggcccggctgcggggcctcgtgtcgcgctacgcaggccggttcccgcactacgaggtcaacaacgagatgctccacggggcattctaccagcagcgcctcggcgacgacatcaacgcgcacatgttccgggagacggcgcagatcgacccggcgccggcgctgttcgtcaacgactacaacgtggagagcgccaacgaccccaacgccacgccggagaagtacgtggcgctggtcacggacctgcagaggcggggcgcgcccgtgggcgggatcggcgtccagggccacgtcacgcaccccgtcggggacatcatctgcgacgcgctggacaagctcgccgtcacggggctgcccatctggatcacggagctggacgtgtcggccgccgacgagtccgtgcgcgccgacgacctggagatcgtgctgcgggaggcgttcgcgcacccggccgtcgagggcatcatgctctggggcttcatgcagggccacatgtggcgctcccacggccagctcgtcaacgccgacggcaagtacacccaggcaggcaacatgttcgcgggcctccgccgggagtggacgtcgcacgcgcgggggaaggtggacagcatcggcaacttcaagttcagagggttccacggcacgtaccaggtgctgcttacgacgcccgccggagaggtgaagaagcggacgttcgacgtacacaagggggatgcgccgctcgtgctggacatggatttctagctttccattacatcgtacacattggtcacccaccggttattacagttacgacaaggattagtacgatctagaacttatatatttgtgtacaaattatgtgtggtatattgggattggtgtgatgcttagacattatagtagtgaagaaaaaataagaatctttagtcccggattgtgtagatgattggtactattgtactcagtatttattatgacagactgcagtaaataaacaaaaggattaccttttttcc

SEQ ID NO: 1136 - DNA, 1415 bp, Zea mays
cacgcccgcctcgaactctcgaagcttcgagcacgccacaacccaacggcgcgcgggcggcgggcccgtgagcgtgcagtgctgagtacacacgccgagcggcgccactccgggttagcagcaacaatactgtgggattatatgagatgagaaggagactactagactagcagccgtatcactcactactcgctgcccgcgcccgatcgggcgcactgccctgtggtgtactggtgtgtcacgcccctcgtcactcaccccgtcacccgcaaccccatcttctattcttcccgacggcgctcctggcagcaggaacaagatgtccaatagggccacacattggtgttatgcctgtcggcggccaattcgtctccgtgggcaggatatcgcatgccccaactgcaatgatggttttatccaggaaattagtgagatgggtggcatattgaacacttatgggctaattgaaccagactttgaagagcgtcgagctagaagattcggaatgatggatgccatgtcttcccttatgcggcaacggatggaagaaatgggaagagatggtttgtttgatattcgtggtagacaaggaacaggtactgaatatggaaggaggccaactgctgttcctacattggtatttggcggcatcccttctcctggagttgatagcggtgatgttaatgttgtcctcaggggaggccgcagagttggcgctgcccaaccaaatttcagtagtttagttgttggtcccagtctggaagccctttttgagcagctacttctccagaacaaccgtcaaggcccagcacctgctccacagtcagctattgactccatgcctgtggtaaagataaaccgcaggcatcttgacgacgatccacagtgcgcagtttgcaaagacaaattcgaggttggagcagaggcacgggagatgccatgcaagcacctgtaccatactgactgcatcatcccctggctggttcagcacaattcttgccctgtttgccgccatccactgccatcacagagatcaggcagtaccagtagcgcccggccttcagcttactacaacgaagccgctgatcctcctggggtcaccagagcagatcttgaacctgctccaagagacggtggcagggaaagccaggaaaggcgccgctccttctcgtttctgtggccgtttggcccgtcgagttccagatccagttcttaccagtacgaacagaatgttgatgagcctgcagtatacgatccaaaccagatagcatattctgagtggcactatgaccactgactgaaaccctgcagcaatcgcaagctatctgcaattcgtgccttcaaccctcagctttggagaggcattcatcagctgtaatggctgcttgccgtataaaaaaaggatggttcttgcc

SEQ ID NO: 1137 - DNA, 2023 bp, Zea mays; identical to SEQ ID NO: 1101

SEQ ID NO: 1138 - DNA, 3036 bp, Sorghum bicolor
atggcccacctccagctcacggcgctcgccggcggcgccgacgacgagatggaggaggtcgcgttgctgggctcctacgacgaggaggccggggtggggccggagggggaggaccaggcggaggccggcatgcggcgggtgcaggtgcgcgtcaccggcatgacgtgctccgcgtgcacgggcgccgtcgaggccgcgctctccgcccgccgaggcgtgcgccgcgccgccgtgtcgctgctccagaaccgcgcccacgtcgtcttcgaccccgcactcgccaaggtccctttatcagtgggatcgatagaatggaagcaatctccagacgatgacattgtagaagcaatagaagatgctgggttcgaagcggaaattcttcctgactctactgtttctcagccaaaatcacagaagactttgtcaggacaatttaggatagggggaatgacttgtgctgcatgcgtgaactcggttgaggggatcttaaaaaaattgccaggtgtaaaaagagcagttgttgcattagcgacctcattgggtgaagttgaatatgatccttctgccattagcaaagatgaaattgttcaggccatcgaggatgctggttttgatgctgcgctgttgcaaagtagtgagcaagacaaagccttattaactgtcacagggttgcattttgagggagatgtagatgtattgcatgatatactgaagaaaatggaagggttgcgtcagtttggtgtagattttgcgaaatcagaagttgacattgtatttgaccctgaagtagttggtttgagacagattgtagataccatcgagatggaaagcaacaatagactgaaagctcatgtacagaatccatacatacgagctgcttcaaatgatgcacaggaggcaaataagacgcttcaccttcttcgctttagtttattcctaagtattcctgtatttttcatccgcatggtatgccctcacatacctctgattagttcattcctactcatgcactttgggccatttcgtattggagatctgttgaagtggattctggtgaccatggtacagtttgttgttggcaaacgattctatgttgcagcttatagggccctaagacatggctctacaaatatggatgtcttagttgttattggcactactgcttcatatgtctactctgtttgtgcacttctttatggggcattcactggatttcatcctccaatatattttgagacgagtgcaatgataattacatttgtgctatttgggaagtatcttgaggtgcttgcgaaaggaaagacatcagatgctatcaagaagcttgtagagcttgctcctgctacagctcttctacttctgaaggacaaagagggaaaatattcaggagagaaggagattgacgcatcgttagtacaacctggtgatgccttaaaagtgcttcctggttcaaaggttcctgcagacggtatcgtcatttggggtacaagtcatgtcaatgagagtatggtaaccggtgaatctgtaccaatctccaaggaagtatccagtctagtaattggaggcacaatgaacttgcatggtattcttcatatacaagcgactaaagtaggatctgggacagttctgagccagataatttctcttgttgaaactgcccagatgtctaaggcccctattcagaagtttgctgattatgtagctagcattttcgttcctattgtcatcaccctgtccttcttgacatttcttgcatggtttctatgtggatggttgggagcatatccaaactcatggtctgctgaaagtagcaattgctttgttttctccctcatgttctccatatctgttgtggtgattgcttgtccatgtgctcttggtctggcaacaccaactgctgttatggtagcaactggagttggggctagtcatggagtacttgtaaagggcggagatgccctggagagagctcagaatgtgaaatatgttattttcgacaagaccggaacactgacccaaggaaaggctactgtaacaacagcaaagattttttcaggaatggatctgggggactttctcacattggtagcatctgctgaggcaagcagtgagcatccacttgcaaaagctatcttggattatacatttcatttccatttctttggcaaacttacctcagcaaaagacaacattaatagaagaaaagaagagatactttctcagtggcttctggaagttgcggacttttctgccttgcctggcaaagggattcaatgttggatcaatgggaagaaaattttggtagggaatcgtgcattgataactgaaaatggggtaaacattccagaagaagctgaatgtttcttggtagacatggagctgaatgcaaaaactggtattctcgtagcatatgatggagacttcattggcttgattgggataactgatcccttgaaaagggaggctgctgtggttatacaaggtctaaaaaagatgggtgttcatccagttatggtcactggggacaactggaggactgcacgagcagttgcaaaggaggttggcattgacgacgtgagagccgaggttatgccagccggaaaagccaatgtaatccgctctctgcaaaaggatggcagtgttgtcgcaatggtcggagatggcatcaacgactcgcctgccctggccgccgctgatgttggtatggctatcggtgcaggcactgacattgctattgaggcggctgactatgtgctcgtccggaacaacctggaggatgtgatcacagctattgacctctcaaggaagacattcagcaggatccggtggaactacttctttgccatggcgtacaacgtgatcgccatccccgtggctgctggcgcgctgtttcccttcaccggggtccagatgccgccttggctggctggcgcgtgcatggcattctcgtccgtcagcgtggtgtgttcgtcgctgctgctgaggaggtataggaaaccgaggctcaccaccgtgcttcagataacagtggaatag

SEQ ID NO: 1139 - DNA, 1688 bp, Sorghum bicolor
atccttcgactagatgcataagaaaaccatttcatctccacccttttcttccccagatatatccacaacttctctctctactgtctcctccccctgtccgctgtccccaacacaccctctctctctctctctctagagagtagacccaggaaagagggaagaggcgatggatatggccatcgacacgccatcgccggcgccgccacccacgccgccggcgccttcggcggcggcggggcggcagacgcgtgcggcggaggcggtgcgtctggagcaccagctggtgcgcgtgcctctcgagtccctccgcgccaccgtccgctcgaaccaccgcctcgccgagaaggagatcgccgccgtcctctcctccgcctccgcggcccccgccgagagcagcgccgccgccgtcgaccacctcacctccctcgtctcccgcctccacggcctcaagcgcaagatggaagagggcgcacgggtggaggagctgcaggtgcagcgctgccgggcgcgtctggatcggctggcgactgccagcaccggtgacgatgctgagtgggaggacattcggctgaagaggatcctggtcgattacatgcttcggatgtcctactacgattccgccaccaagctcgctgagacttctggtattcaggaactcgttgatattgatgtcttcctggatgcgaaaagagtaattgattctcttcagaataatgaagttgctcctgctttagcttggtgtgcagaaaacaagtcccgactaaagaaatcgaagagtaagctcgagtttttactgaggcttcaagaatttgtggaatttgtcaaggctaagaattgcattcaggctatagcatatgctcgaaaacaccttgctccctggggcaatatgcacatgaaagaattgcagcgtgttacagcaacattggtttttagaagcaatactaattgtactccatacaagatattgtttgagcaagagcgctgggactatcttgttgacattttcaagcaagacttttgcaagttgtatggcatgaccctagagccgttgctgaacatatacctgcaagcaggcctgacagctctgaagaccccattctgcactgagggtagctgccctagggaagaccccttgtccctggagggcttcaggaaactagccgagcctctgcccttctctaagcaacaccactcgaagctcgtctgttacatcaccaaggagctcatggacactgagaacccacctcgggttctgccgaacggctatgtctacagtgagaaggcgcttcaagagatgtccaagaaaaatgacgggaagattacatgccccaggacaggagatgtttgcgacttctcagagtgtgtcagggctttcatctcctaatcatgaaatacactctgatttgtgtggcttgggagtctggagtgaatgtacatagagtggtcagcgcattgtgcgtcatgttaagttaattgaattaacctgcaatgttaaactggctggatgttggaagtatctcatctgcctctcgattgttgcatctgtgttctgtgagactgacgtttttcatgttccaagtttccacgccttccaaagttcatcaactgtataaccaggaggcttcagatcccatccatgtaaagttcagttttgcaaagcgaagttatgaaaaggatcaccagagttt

SEQ ID NO: 1140 - DNA, 1341 bp, Zea mays
ggaaatagaagagactatgaaggtgaggagatcggaaccagttctagtccatgcgaccggagccgcgaccacccaagaggattccctgagcagggtgctctcgcagtactaccccttcgagggtcggctggccgtacgcgaggacgggaggctcgccgtgcggaacgaccgccgcggtgtccccttcgttgacgcggtgtccgattacgagctgcaggtggtctgtgacgcaacggccccgggttctgagcttctcggtgacctcgtctacgtcagcatgcagcacgagaacgccctggaagcgccgatgctgaccgtgcaggtgaccacgttcaagtgcggcggctttgtcctcgggctcgccatgaaccactgcttggcagacggccagtccgccgccgagttcatctgctcctgggcggagaccgcgcgtggtgtggccatgtcgacgccgccgtacctcgaccgcacggtgcagcgcgccaggccgatcccgacggttgacttcgcacatgacgagttcgcagagatcgaggacgtctccggcctcgccggcacattcggcaaggagccgtgcgtttaccgctccttcactttcgacgcaggcaagctgcacaggctgaagcaagccgcaagcgagcaagggcaaggaggcaccaagagctccgtcttcgtcgcgctcacggctttcgtgtgggtatcaaggacgcgggccctgcggatgctccccgatcagaagagcaagctgctgttcgcggtggacgcccgtctgcgcgtcgacccgcccttgccgcccggcttctggggtaacgccatcatcttcgcctgctgcatctccactgccagggatctcctcagcaaaccactgtccgcggctgcccgttccatcagagaagccatcgtccgcaccgacgacgcgttcatccgttccgccgttgactacatcgagttgaacagcggtgctcgcccgtcgctaatggcaaccaccctggtcactgcttggaatcgactcaggtttcgcgcggcggacttcggatggggtgaagcaatctactcggggccggcggagctgccgcagaaggaggtggccatgtttctgcgcggcgtgagtgacagccagagcacagtgctggttattgggatgcctgtgtcatgtatgcaagcattccaagaaacggtagatctgctgtgaaatgtgtgtgtcttcacaagttaaaaaaaacagaagccttctgactgtatgagggaggaaaatttggtgatttatattctgcagtgatctattgtacgcatgaccagtggctcatgtttacaaacaatatgatttacattcactcgatc

SEQ ID NO: 1141 - DNA, 1718 bp, Sorghum bicolor
catccatccatccatccgccgttccgttcctcagctggccggccggttccatccatcccagagagcccagctcggtcggcagctgcagcaatccggcgagacagagagagagagagagaggcgatccgagaaccactctcggcaacccaatccggcgcgcgtgcgtttgtgaatggtgaacggcgagccggcgggggcggagtgcacgcgggcgtcgctgctggggaggtatgagatcgggcggaccctcggggaaggcaacttcggcaaggtgaagtacgcgcgccacatcggcaccggcggccacttcgccatcaagatcctcgaccgcagcaagatcctctccctccgcatcgacgaccagattaggagggagatcgggacgctcaagctgctcaagcacccaaatgtcgtccgcttgcacgaggttgctgctagtaaaacaaagatttacatggtgcttgagtttgttaatggaggcgagctcttcgacaagattgctataaagggaaaactgtctgaacatgagggcaggaggcttttccagcagctaattgatggtgtcagctactgccatgataaaggtgtctaccacagagaccttaagccagagaatgtccttgttgataggaaaggcaacatcaagatctctgacttcggcctcagtgctctacctcaacatctcgggaatgatggacttctgcacacaacatgtggcagccccaattacatagctcctgaggttttgcaaaacagaggttacgatggctccttgtcagatatctggtcttgtggagtaattctttatgtgatgcttgttggttaccttccctttgatgataggaatcttgttgttctttatcagaagattttcaagggagactgtcagatcccaaagtggctctcacctgccgcacaggaccttcttaaaaggatccttgaaccaaatccaatgaagaggatcaacatcacagggatcagagagcatgagtggttcaagaaggactatgtacctgctgttccatacgatgatgatgaagatgtcctttccggttcagttctctcaataaaagagcaaattgaagaaccagcacaagaaaagtgtactcatatcaatgcttttcagttgatcggaatggcttcttcccttgatctttctggtttatttgaggaagaggatgcagctcaaagaaagattcggttcacttcaacgcatccacccaaggatttattcgacaagattgagagcgttgcgatggagatgggattcgaagttcataggggggcaagcaagctcaaagtcttgaagaatagcaaatgttccaagaagtccaggaatccgtcatcatttttggtgtgcactgaggtgtttgagcttgggccatcattatatgttgtagaacttaggaaatcccatggggactctacattgtatagacagctgtgcgagaggctctcggatgagctaggggcctgcaagacagagcagattatgaggactgaatcactgagtgacgatctttcgagcctcgatggcgaagcgttccctctatctgggttctgatcattgcttccctatgtggttttgggcagaggggatgaggaacatgctcgttcctgatgcaattctagattaggatcatgaatatagtgtacaaagcgagcggtgcaaattagccaccaagttgaatatatatatataataatataagaaatga

SEQ ID NO: 1142 - DNA, 1764 bp, Zea mays
ggcggagttggaggcggagcatttaccggcggcagcctctgcctagtacactggagtcgctgcgaaacggagagacggagactcttggactggaggcatgatggaggcaaagcaggcggcgcccgaccggctctcctccctcccagcggagctgcaggacgagatcctcatccgcctcgacctcagggacgccgtgcgcacctccgcgctctcccgcacctggcgggacctctggaagtcgctctcggtgatctccctctccttccccttcggcacgcacccttccgtcgtcgacagcgtcctcctccgctacatcggcccccgcgtctctctcttccgcatctgtgtcgacgacgcatgtgccgaccgcatcgacgactggctcatcgcgctctcccgctaccgtgtcgagtccatcgacatgtgtggcacactcagatcactcggcaacttcaatctctactcctccatcttctccttaggtgatctcgtgtctctgctgctgaaaaactgccgcatcccacccctccccgtaggattccccggcttccccgcgctccagaagctagtcctcgcctatgttatcttcccatcgaacgggttcaaacaattggaggctatcattcgtcgctcacccttgcttcataccctgcatatgtttgacgtgttcatccctggtgaatacccagactcagtgatcgaggcgcccaatctccgtgtcctgtcaatctattcaccgtatgactatcgatggcgatttggagagctgtcgtgtctcgaatatgccaacattcatgtgttccactgtccgcagcatgaacatgattttggagttttccttgctcggtttgctcacgttcaaaagttcggtctcttctctccggctgtcgatgttaagatgccttatacacttccattcaccttttataacttgaagaaattgcagttatgtgtggatttcaatgaaattcactccattttgtccatgtttaccatgctaaggagctgtcacaaccttcaaaacttaaaaatagagtcgcggcacgacagttatgagagttttgaggcagattgggagttcttaaatgctctgtggactgatggcatgtgtgccaatcttcaaattgtgcgcatgattgatatcatttcgcttccgaatgaaacttcatttatgaagcttatactttctaaagcaactcttcttcacacattatatgttggcgcacacccatatgattttgatgatcacataattgacatgctaaaatgcgaaagagcttcagctcaagctcgtgtacagtttgaaggttcggagcaacagtggtagatgtggtggcaacattggttcgcttgaatgagacaagacccgcttttcctgcaccctgctgaagtgtttttttgtttgtctccgtcatcacaatgatacacgaatcatgtagaaaatggcttatccagggaaccggcttgatttgtttgtcttgttgagaagaagctgatgtggtattagttgttcatttgttcattagggatatccgtggcagcaagcgcccagagtcgtttggtttttgcctgagtaggtgaaattcggacctccagaacttgttgcttgctgagctcgccatggagtgtttgtttctagctaacgttcttctctgtttggtgaaagctgctcccctttacttcatactcctgtttgttttgttgtccggttccagttaacgagctgaatctatttccaacattagtttccctgatttctatttg

SEQ ID NO: 1143 - DNA, 1765 bp, Sorghum bicolor
tctcccgggtcctttccctgctgacctgccgaccattggcaacggcggccaggccgccatagcagtccaccaccaccatacgtgctcgctcgctctttatttaatgccgtgtgcgcggttcgattgagcagcggcggcggggcggcgacggtggccatcatatctcaggtgggtgtgctgtgtgtgttcctccttccttgctagcaaggtccaaaaaccagaaatggcggccgccttctcctccaccgttggagctccggcctccaccccgagcaggagcagcttcctcgggaagaagctcagcaagcagcaggtgtctgcggcggcggccgtgaactactaccatggcaagagctccagcagcgccgccgccaacgttaacaggttcaaggtgatggcggccaaggaggtggacgagacgaagcagtcggaccaggacaggtggaagggcctggcctacgacgtctcggacgaccagcaggatatcaccaggggcaagggcatgatcgactccctcttccaggcgcccatgggggacggcacccacgtcgccgtgctcagctcctacgactacatcagccagggccaaaagacttacagcttcgacaacatgatggatggtttctacatatccaagagcttcatggacaagctcgtggtccacctctccaagaacttcatgagcctgccaaacatcaaagttcccctgatcctgggtatctggggaggcaaaggtcaggggaagtccttccaatgcgagctcgtcttctccaagatgggcatcatccccatcatgatgagcgccggcgagctggagagcggcaacgccggagagcccgccaagctcatcaggcagcggtaccgtgaggctgccgacctcatctccaagggcaagatgtcctgcctgttcatcaacgatctggacgccggcgcaggtcgcatgggcggcaccacccagtacacggtgaacaaccagatggtgaacgccaccctgatgaacatcgccgacaaccccaccaacgtgcagctcccggggatgtacaacaaggtggacaacgcccgggtgcccatcatcgtcaccggcaacgacttctccacgctgtacgcgccgctcatccgtgatggacgtatggagaagttctactgggcgcccacccgcgaggaccgcatcggcgtctgcaagggcatcttccgcaccgacggcgtcgacgaggagcacgtcgtccagctcgtcgacaccttcccgggccagtccatcgacttcttcggcgccctgcgtgcccgggtgtacgacgacgaggtgcgccggtgggtggccgagaccggcgtcgagaacatcgccaagaagctcgtcaactccaaggagggcccgccgacgttcgagcagcccaagatgacgatcgagaagctcttggagtacggccacatgctggtggcggagcaggagaacgtcaagcgtgtgcagcttgctgacaagtacctcaacgaggctgctcttggtgcagccaacgaggacgccatgaagactggcaacttcttcaagtagagcaacgacaatagcgcacctcttgctattgtttttttattttttatataagtacgaccgggggtggggggtgggggagggggggatatgatgatcccccacctgtttgattatatattgggtggctctcaaacaagtagccatatgtttgaggttacaaatagttcatcgaaagttcataaagataaaatttacacaacttctttgtcctcgtcggtt

SEQ ID NO: 1144 - DNA, 1128 bp, Zea mays
cagctcactccctcctcctccagtttcgtcagctcatcatcatcataaaccgaacacagagctctcgattccattccaggatgctgctgaacccggcgtcagaggcgtcggtgctagacaccatccggcagcacctcctcgaggagccagccgacgagagcttcgggagcctggtggcggaccagtggagcggctcgctcccgttccgcaccgacgacgccgacgacatggtggtgttcggggcgctgcaggacgccttcgcctacggctggctgcccgacggctcattcgtgcacgtgaagcccgagccggtgcggtcccccgactcgtcctcctacccctgctcctacgacggctcaccctgcttcggcctcctggacccggagccgccgctgacgcccggcaccaccacgcccagtagtagggggcaggaggaggccgcggcggccatggcccggggcaagcactacaggggggtgaggcagcgcccgtggggcaagttcgcggcggagatcagggaccccgccaggaacggcgcgcgcgtctggctcggcacgtacgacaccgccgaggacgccgcgctcgcctacgaccgcgccgcctaccgcatgcgcggctcgcgcgcgctcctcaacttcccgctccgcatcggctccggggacaagcgcccgtcgccggcgccgcccgagcccgccacctcctcggactcctcctcgtcttcggccagcggctcgcacaagaggcggaagcgaggcgaggccgcggctgccaacatggccatggcgctggtgcccccgccctcccagcttaaccggccggcccagccgtggttccctgccgcgccggtcgagcaggcggcgatggctccgcgcgtggagcagatcgtcgtctagtctagccatgcgccggcgaaagcgggggcaaggccctgcgctgcacttgcgtgacagctccaccggatggaatgcgaatatgcgataaagctcgggatgccgctgttgctccttgcaactggcgcaagtggaagaagctgtctctgtgtgtaatcaagtgtcttgtctgcggacgaattttcggtatgtgcgtcgttgtcactgctcgggattgtgctgctgctgataagttcgg

SEQ ID NO: 1145 - DNA, 1541 bp, Zea mays
ctccagcgagcaagcaagctatagctagctagtagccaagcagaagccaaatacccaaaggcgagcgatggcgcccggaagcatcgccagccggtggcgcgagctccagggcgcggactcctggtcggggctgctggacccgctggacatcgacctgcgcgcgaacctgatcgcctacggcgagctcacgcaggccacctacgacgggttcaaccaggagcggcggtcgccgcacgccggcgcctgcgtgttcggctactccaacctgctggccggctcgggcgccgcggcggccgggagctacgccgtcaccaggttcatctacgccacgtcggcgctccccggcgtgcccgaggcgttcctgctgctgccgctgccggacctgctgcccgagtcctggagccgggagtccaactggatgggctacgtcgccgtcgccaccgacgacggcgtcgccgcgctcggccgccgcgacatcctcgtcgcgtggcgcggcaccatgcgcggcctcgagtgggtcaacgacttcgacttcacgcccgtgtccgccgcgcccgtgctgggccccgccgccgccgccaacccgttcgccttggtgcaccggggcttcctctccgtgtacacgtccagcaacccggactccaagtacaaccagaccagcgccagagaccaggtcctggcggaggtgagcaggctggtggcactgtacaaggacgaggtgacgagcatcacggtgtgcgggcacagcctgggcgcgtcgctggcgacgctgaacgccgtggacctcgcggccaacggcgtgaacgcgccgccggccgggtcgtcgcagccgccgtgccccgtgacggcgctggtgttcgcgagcccgcgcgtcggggacggcaacttcaagagggcgatcgcgtcgttcccggacctgcgggcgctccacgtgaagaacgccggcgacatcgtgccgacgtacccgccgctggggtacgtggacgtggccgtgcagctgcccatcgccacggggcggtcgccgtacctgcggcagcccgggacgatcgcgacgctgcacaacctcgagtgctacctgcacggcgtggccggcgagcagggcagcgccggggggttcaggctggaggtggaccgcgacgtcgcgctggtcaacaagggcgaggacgcgctcaaggaccagtacccggtgcccgcccagtggtgggtcgccaagaacaagtgcatggtcaagggcgccgacggccactatgcgctccaggacttcgagcagatctgatcagtggtcagagcgagctcgccgctgcatgccatgcatgatgcaggtgtcgtgcgtgctcgtaaactactactacctctctatcggtcgatcacgatgtatgaagtatgaataatgagcgtcgtcgatacgcatgcgtgtatgatcatccagattcaggttgtgtgtgtgatgcttctcacctcttcctcctacgaaccggagattgtgacggggagtcagttatatttataaataaaccatcctctgattgtgattgtgtctc

SEQ ID NO: 1146 - DNA, 2036 bp, Zea mays
aatttcaaagcgtgaagctctgctcacgtcgtcgcctccgcgtccgccacccactcaacaacgcggcggcgaatcgcgggcggttcgccgccgaccgccgccgcctttccctcgccagccccccgctcctgaagcaatggtactggaccacgccatcaggggctcggcggcccgcagggctgagacccaaaccctagcgccagtgctgctcatgggcccgccgcctccaccgccgatcccaccgacgacggggatgtacctcccggggcccccaccccccgggacgctcctgccgcacccgatgcacatggcgctcccgcgtgaggtcatcatttacatggacgagtgtcggagccgctccctcctcaagttcatttccgacgcggggattgtgccttcgctagaggacgagcggaggagggagcgggtagtacgcgagctcggcaagatagtaatggattgggcaaagagggtggcctacgagcagggcaactggcactggatcgcttcagccacggtgttgaccttcggttcctatgccctgggggcgtatggacctgaatctgatattgatgtcctctgtattggtccttgtattgcatcgctgcaacaccatttttttgttgtcctgcgacaaatgctcgaagggaggccagaagtatcagaattgcattcaattgaaggagctaaggttccattgatgcgttttaaattcaatgggattttagttgactttccttatgttcaactcccagtgatcaatgctgcagaggctatgcatgcatttgatccccatgttctagaaaatgtggatgggccaagttggagatgtctatctggagtccgtgctaatagacaaatcattcaattagttcccaatatgaagaaatttcaatatttgttgcggtgcctcaaactatgggcaagaaaaagaggacttcattgccatctacttggcttcttcgctggaattcatttggctatccttgctgcatatgtttgccgcagacatccgaatgctagtataaatactctgttgtctttgttcttcgacatttttgttcactggccttggcctcttccagtgagtttgcttgatccgcctgttccttgtcggggtcctgatgggtgctccctcatgcccataatgttgccatgtattccaccagaattttgctcctctagtacaacagaaagtactttcagcaaaatcaaagaagaactttggcgtggctatgctctaagcaaggataccagaagtactgattttaactggagttggctctttgcaccttttccatatggtgcaagatacaaatgctttctccgcatagttctctctgctccgatgggagaagaattgcgtgactgggttggatgggtgaaatcacgattccgcaaccttcttctcaagctggagagtcttggtgtttactgtgaccctgatccctcagaacaagttgatcataccatcactgatccaaatgttgtattcttctggggtctcatctatagaaggaatattcaaatatgtataagttctctcaaagaagatttcatgaaaagtgtctgcaataacatctatggaaaggaaaaatgtgcccattcagacatcacaatgtccattgttgggcctccccagctgccaaaaagtgtctttgatctctcagtttactctgaaaagctgccacaacatatgatggggcaccaactaatgaagcagaactacaatgcagtcagttaggctcagctgtcatattgcgtgcgagcttcatatgtcaatatcacaacagcaagaagctgctgttgaagtcgttttcaacatcagatttgaatttttttttactgccctttttagatgtaggggcttgttcatgcctcgggaacaaggaatatgggagattttttccttgtgaagctggatgtcgatagctggatctcttcaagcatccagcaaaatgagatggaagcatctcttgaagcattcaagcgacttattcctgttaaaaaaaaaaaaaagaaaaaaaaaaaaaaaa

SEQ ID NO: 1147 - DNA, 2075 bp, Zea mays
agcaatgaacatagagctagctaagaggatcaaactgaggggagcgttcattgacctggctgctacgcggaggcctggtggacgtagcagcagcaaggccgcgtggatttgtcccatttgttttgtttaatagtaatataatcgtggacagagcagaggcttttgcgtgtgcgtttaccagttgcccatccgggttacatctcacggaatctgaggctgaggcgacggagcgcaagcaagcaagcaagcgaaagggcagggctgcctgccacacaagagacaagggaagaggagaagggtagacgagtagacgactgtgatgaggctagaagaagagcaggcaggagctataagtaccccgcccccttccaccctctccttccacctccctcccttgctgcctcatccattccagagctgcgaagacagacagacagagagaaagagggatcgacggagcaaggcggggccgtgtccggtcacacacgagcgagccctctcggccgcgcgtttgtgaatggtgaacggcgagcggcgggcggacgcggagtgcacgcgggcgtcgctgctggggaggtatgagatcgggcggaccctcggcgagggcaacttcggcaaggtgaagtacgcgcgccacatcgccagcggcggccacttcgccatcaagatcctcgaccgcagcaagatcctctccctccgcatcgacgaccagatcaggagggagatcgggacgctcaagctgctcaagcacccgaatgtcgtccgcttgcacgaggttgctgccagtaaaacgaagatctacatggtgcttgagtttgtcaacggcggcgagctcttcgacaagatcgctatcaaggggaaactgtccgaacacgagggcaggaggctcttccagcagctaatcgacggcgtcagctattgccatgacagaggtgtctaccaccgagacctcaagccagagaatgtccttgttgatcggaagggcaccatcaagatctctgacttcggcctcagcgctctacctcaacatctcgggagtgacggacttctgcacacaacatgtggcagccccaactacatagctcctgaggttctgcaaaacagaggctatgacggctccttgtcagatctctggtcgtgtggggtgatcctctacgtgatgcttgttggctgccttcccttcgacgacaggaacctcgtcgttctttatcagaagattttcaagggagactgtcagatccccaagtggctttcgcctgccgcgcaggaccttctcaagaggatcctccaaccgaatccgatgaagaggatcaacgtcgcggggatcagggagcacgagtggttcaagaaggactacgtgcctgctgttccgcacgatgatgacgaagacgtccttcctagtccagctccctcgataaagccaatcgatgagccggcgcaagagaagtgttctcctatcaacgcttttcagttgatcgggatggcctcttcccttgacctttctggtttcttcgaggaagaggatgcagcgcaaagaaagattcggttcacttcgacgcacccacccaaggatctatttgacaagatcgagagcgttgtcatggagatgggattcaaagtccataggggggcaggcaagctcaaggtcttgaagaatagcaagtgttccaggaacccgtcatcattgttggtgtgcaccgaggtgtttgagctcggtccatcattatatgtcgtagagcttaggaaatcccacggagactctacgttgtatagacagctgtgcgaaaggctctccgatgagctaggtgcctgcaagacagaccagatcgcgaggactgaatcatcgagtgacgacctctcgagcgtcgatggcgaagcgttccctctatctgggttctgatcatattgctttccctgtgttgttttgggaacaggggatgaggaacatgctcgttcctgatgcaattctagattaggatcatgaatatagtgtacaaagccagcggcggcggcggtgcaaattagccaccgggttgaatataaataatatatatatatgatatgttgcatcttct

SEQ ID NO: 1148 - DNA, 1261 bp, Zea mays
caaaacacaagacctacttttcttacacaacttcaagatgccttctttcacctccaagactcttctcgccgccgttgccggtgccatgggcgttgctgctcacggtcacgtttcctccatcaacgtcgctggcgccgtctacgacggtttcgatgctagctctgctcctttcgaccagaaccccaagacccttatcgcctggtccaccactgcctccgacaacggtttcgtcgcccctgatgccttcggcaccggcgacatcatctgccaccgcgatgctaagaacgccaagggccacgccaaggtcaaggcaggcgatcagatctacatcaaatgggatacgtggccagagagccacaaaggccccgtcattgacatgttggcctcttgcggttccgctggttgtgagtccgttgacaaggagaccctcaagttcttcaagatcgacgaggctggtcttgtcaagtccggtaaccccggtacttacgcctctgacgagctgattgccaacgacaacggctggctcatcgagatccccgagaacatcaagcccggttcttacgttctccgtcacgagatcattgctctccacgccgctggccaggagaatggtgctcagaactaccctcagtgcttcaacctcgagatctctggttctggctctgagctccctgagggcaccctcggaactgagctgtacaagtccaccgagaagggcatcgtcttcgatctttacaacaaccctaccagctaccccatccctggccctgccatgaccattaagtcccccaaggttacccagggcaagctcgctgagaagtccaagggtacccccaccactggctctggctctgactccggctccggctctgccgcccctgagactcccgctcagactgaggctcccgccgctggtacctccgctgccgcccctgttgctacttccgctgccgctgaggagccctctgcccccgttgagacctcccctgctgcccaggagcctgccactcctgtccagactgaggctcctgccgctaccaagcctgccaagactggctgcaaggccaagcgtggcatgaaggcccgccgtcacgctcgcgacctcatgaactaagcaaaccactaagcgtggttgtgtatgaaaggtctttttacaaggacaaaagcctgtctatcctgaatgggatgaatctttgagtattctgctgtatatatgtgacctcgagtccaagatataattcaattacattgattatcattc

SEQ ID NO: 1149 - DNA, 1754 bp, Sorghum bicolor
gtaaatatatagatatatggaggaggaggggttccgatggagcagagcgggctctttcgtcctgttctacttggtcttgttcctgtccgcggccgtgtcgtcggaggccaacatcggcgacttcgacgactactggcggcagcgcaagctcatggccgacgccgcggcagaggccacgtacaagcatgacccgctcgaggtcaccaaccaactcaaccgcgcagtgcacagatccgtcgagaaggaggacatgagcacgcggcggcgggcgatgatggggcacaagaagggtaagctcaacaacgggccgtgcgaggcgacgaacccgatcgaccgttgctggcggtgccggcaggactgggcgacggaccggaagcggctggctcggtgcgcccagggcttcggtcgcaacaccaccggcggtctggccggcaagttctacgtggtgacggacggcaccgacgacgacgtggtgaaccctcgccccggcacgctccggtgggccgtcatccagatcgagccgctgtggatcaccttcgccaggacgatgatcatcacgctcaaggaggagctcatcatccagggcgacaagaccatcgacggccggggcgcgcaggtgcggatcgccaacggcgcgcagctgacggtgcagttcgccaacaacgtcatcatccacaacgtgcacatcaacgacatcatgtcctccaacaagaacggcggcaacatccgggactcgccggaccacttcggctggcgcaccgtctccgacggcgacggcatcaccctcttcggctccaccaacgtgtggctcgaccacctctccctctccaactgccaggacggcctcatcgacgtcatcgtcaagtccacgggcgtcaccatctccaactgccacatgaccaaccacaacgacgtcatgctcttcagctccagcgacaagcaccccgaggaccagatcatgcagatcaccgtcgccttcaaccacttcggcagaggcctcgtgcagaggatgccgaggtgccgctgggggttcttccacgtcgtcaacaacgactacacgcactggctcatgtacgccatcggcggcagcaaggcgccgaccatcatcagccaggggaaccgctacatcgcgccgcccaacctggcggcgaagctggtcacaaagcaccatgacgcgccggagtcggagtggaagaactgggtgtggcactcggagaacgacctcttcatggagggagccaacttcaccgtcagcggcggccagaagatcaacaggaatttccacaagaaggacctcatcaagcccaagaacgggtcctacgtcaccaggctcacgcgatacgccggcgcgctcgcctgcaggcccggcaagccctgctagtactacgtgctacccacaccacgtacacaacagctagctatatatggacggctgacagaagaccattataagcaccgatcgatcgatcgttaagaaacctgtggggtgaattattaacgaccctgtaggttgttgtaacatattagtaacatgcattcgccggccggtctcgccatgtaagaaacaggggccccggccggccggagttgttgaaagcgcgacagaccagagaacgcgtctgtgtgtgtactgtgttgaggtcctagaggagagagagagagagagaggaagaaagagtgctagctcctcaaacagaagatgcacatatccacaaagccccagaattaattgctctgttgtcgactactatgtc

SEQ ID NO: 1150 - DNA, 1964 bp, Zea mays
aatagaagagactatgaaggtgaggagatcggaaccagttctagtccatgcgaccggagccgcgaccacccaagagtactacttcctctcgaacctggataggaatgtcgccgtgctcatgaaaacagtccacatcttcagcgtgtcatgtgacgatgtggcaacgctgctcagggattccctgagcagggtgctctcgcagtactaccccttcgagggtcggctggccgtacgcgaggacgggaggctcgccgtgcggaacgaccgccgcggtgtccccttcgttgacgcggtgtccgattacgagctgcaggtggtctgtgacgcaacggccccgggttctgagcttctcggtgacctcgtctacgtcagcatgcagcacgagaacgccctggaagcgccgatgctgaccgtgcaggtgaccacgttcaagtgcggcggctttgtcctcgggctcgccatgaaccactgcttggcagacggccagtccgccgccgagttcatctgctcctgggcggagaccgcgcgtggtgtggccatgtcgacgccgccgtacctcgaccgcacggtgcagcgcgccaggccgatcccgacggttgacttcgcacatgacgagttcgcagagatcgaggacgtctccggcctcgccggcacattcggcaaggagccgtgcgtttaccgctccttcactttcgacgcaggcaagctgcacaggctgaagcaagccgcaagcgagcaagggcaaggaggcaccaagagctccgtcttcgtcgcgctcacggctttcgtgtgggtatcaaggacgcgggccctgcggatgctccccgatcagaagagcaagctgctgttcgcggtggacgcccgtctgcgcgtcgacccgcccttgccgcccggcttctggggtaacgccatcatcttcgcctgctgcatctccactgccagggatctcctcagcaaaccactgtccgcggctgcccgttccatcagagaagccatcgtccgcaccgacgacgcgttcatccgttccgccgttgactacatcgagttgaacagcggtgctcgcccgtcgctaatggcaaccaccctggtcactgcttggaatcgactcaggtttcgcgcggcggacttcggatggggtgaagcaatctactcggggccggcggagctgccgcagaaggaggtggccatgtttctgcgcggcgtgagtgacagccagagcacagtgctggttattgggatgcctgtgtcatgtatgcaagcattccaagaaacggtagatctgctgtgaaatgtgtgtgtcttcacaagttaaaaaaaacagaagccttctgactgtatgagggaggaaaatttggtgatttatattctgcagtgatctattgtacgcatgaccagtggctcatgtttacaaacaatatgatttacattcactcgatcaggattatgcccccaagatctgatcaaacgttgggtaaacaaaagcattcgataaaaatatttggcttcggccagactggacgcaaggtggactatttgtacgtctaacttctctgcaacactctggttggacgaagtcttatgttagtggtctccttcgtcgccgaaggtcccataagaaaaaacaccttcgaaagattgacacaaagtcgaagctatcaatcagagagctttagagtacatttccaaatgcaccgacttaaagatgaaatcaccaatcgacccatgataacttatattatgattgtaaacatttttaaagggcatgaatgtaatttctcgcaggctgcgtcctgtgcctatacatagtcctgcactgttcacgttatcctgtattcgctcgtgcgtaacacttggatttttgccttctgtcaagccgaaggtataaatgtaattaaatattgtatttaaatatccaagtttatataatgaagacatgtgaatgatattatatgtttattcatgtt

SEQ ID NO: 1151 - DNA, 1542 bp, Zea mays
ccggaacatccatcgatctccccccagcggcgaggagagccggcggccacaggaaggagaaatggcttccgcacacaacgctctccgggtgtttttcatcctagccgtggtatgtgccgtatgcacagcgaaaaggacaggagccaacaaggaagaatcggcggcagcccccggtggcgctgctggaggcagcggcgggacgttcgacatctccaagctcggcgcgaccagcgacggcaagacggactgcacaaaggcagtccaggacgcgtggacgtcagcgtgcgaagcgaccggaagcgccacggtggtgatccccaagggcgactacctggtcggccctctcaacttcactgggccatgcaaggggagcaacatcgccatccagctggatggcaacctgctgggatcaaacgacctggacaagtacacggcgagctggatcgaattgtctcacgttaacaacatcgggatcaccggctcgggcacgctggacggccaggggaccgccgtttatagcaagagcaagaccgacaacgtgaaggcgatgcccaacacactggtgctgtttcacgtgatcaacgccactgtcgccggaatcaaactactcaactccaagttcttccacatcaacatcgacaactcagagagcatcaccgtgaaggacgtgaacatcaccgcgcccgccgacgttgagaacacggacggcgtccacgtcggaggctcctccaagatcagcatcctcaactcgaccatcggcaccggcgacgactgcgtctcgattgggcccgggtgcaacggcgtcttggtggacagcatcacctgcggccccgggcagggcatcagcgtcggctgcctaggccgctacaaggacgagaaggacgtgagcgacatcacggtgcggaactgcgtgctcaagaacaccaccaacggcgtgcgcatcaagtcgtacgtggacgccgagtccgtgctgacggcctcccatctcaccttcgagaacatcaggatggaggaggtggccaaccccatcgtcatcgaccagtacttctgcccgcagaaggtatgccctggcaagcggagcaactcctcgcatgtctccgtcaaggacgtcacgttccgcaacatcaccggcacgtcgtccacgcccgaggccatcagcctgctctgctcggagacgcagccatgcagcggcgtctccctcatcgatgtcaacgtggagtacgccggcaagaacaacaaaaccatggccgtctgcagcaacgccaagggcaccgccaagggaagcatcgaggcactggcttgcctggtctgatgatgaccttccttttgcatgcatgcatggtatctcatccttgatgatgatctagctcactagttctttttaatttccgcttcattcgcttttccaaattcgattgtgtttcagccaagttgtttagcgggacatctcttgtctgatcttcctgctaaatagagttggactcctatatatagaggccttccggcacatataatatacgtcggaccaatattattgtgatc

SEQ ID NO: 1152 - DNA, 1768 bp, Sorghum bicolor
gtctcctccccacccaccggccaccggaataggaacaatcaagccagattcagctcgtgattgcaagtatgcgatgacgacgccgtgcccgggcgccgcggccgtgcgcgtccagtggacggcgcgctccctggcgggggcgtttctcgacctcacgctcgcctgggcctgcctctgcctcgccgcgctcgccgccgccgcggcccgcttcctcgcgttgcttggcctcccgctcccctgcacctgcgcacgccctcacctgccttgtatcctcgcctttctggcgtgctacccgtcccgcgccgtcgggtccctccacgccgccctccgcgcccgcttccccttcgccggccccaccgacgacgaggaccgccgtcaggagggggcggaggaagatggggaggagcaggccgtcgacgcgcgggaggaggaagcggatcttcgtcgccgcgaggaggcgcgcgccgagctgcagcgggagctcgagaaagagcgcagcgccgcggcgtcggcggccgaggaggccatgtccatgatcctgcgcctgcagaaggagaagtcggcgcttgagatcgaggcgcgacagcagcgccgcaccgctgacgagcgctgcgccttctacgaggacgaggtcgaggagctccgggacatcgtgctcgtgcgggagcgcgaggcgcgcgcgctgcgcaaggaggtggacgcctaccgacgcctgctcgggcttggccctgccgaggatgacgaggaggaggatgacgagcaggagatggtcacaccgcatagtttcctcatgtccgaaggagagcccagctcgtccagatcggtcgatgcgaatcggatgcagcattttcggaataattcttctgggttcagcttcaagacgccatcactgcgtgagcaactaattgtgccgcctcttactgcggatcggatcaatgtgggaagcgatgatagtgttgctgttcagacgccagccaaagttcccacacctcaatcaaggctggagctagatagctctgaggacgaggatgaggatgatggagcagagacggtggaaatcctccccctgtccgcccggagccaagatttggatcaaggtggcgatttccacgttgatgctgcaccaggtatggaatctacttgtgccaaggatacttgcaccaaggaacagacagctcatgcatttcaggaagtcgagtgtccgggtatagacaagattgtcaacaatgaccagacagcaagtaagaatgatgccaatgtctatgatgtgcatgtggtcgatgacatacgcttctcaacagaggtcaagggcctgattggccgaagcttctcagaggcaacaatgcaggcagagagattacagactcgagctgctgcagatgatctccttgggaagagtctgaatgccattaaaggtgcacaggacaagataaggcatgcagcaaatgaaaggaggcagtcattacagttgcaactcttagaggacatagctaatcagcttcagggaatcaaggatgctgcagaagcagggagacaagtgtactgtgctactcctaaaagctccaagaggagctagggagttgtattacgccactaatgctgtaatgcatgttggcgtcgtacataagttgtttttgggtttgtagactaggtctgttgatttgttggttcaacaagtttgctgcttcctttttaaataagtacgtattggctattgctctgtacatgtatatatataaacaacacgggattcgtcccattgtttgtt

SEQ ID NO: 1153 - DNA, 1397 bp, Zea mays
aatcgcatccactactggagccaaagccagcttgatcggtgacgatttattagctagccgtcgtctgatagctcaattggttagctgattaacgtggtgcagaagaagaagttgagctagctagcgatggtggtttcaatattgactcacccgttcatggctgcggcggcgtgcgtcgccgtcgcgttggctctgttggccacgaccagcagcgcgcagctggacccgcacttctacgacaaggcgtgcccggcggcgctccccaccatcaagaggctcgtggaggaggctgtggccgcggagccccgcatgggcgcgtcgctgctgcggctgcacttccacgactgcttcgtcaacgggtgcgacgggtccatcctgctggacgacacgcccttcttcaccggcgagacgatggccgcgccgaacgccaactccgtccgcggcttcgacgtgatcgaccgcattaagggcgccgtcaacgccgcctgcaggggcaacgtggtctcctgcgccgacgtcgtcgccatcgcggcacgcgactccgtcgtcgcgctgggagggccgtcgtacgacgtgccgctgggccgccgggacgcgcggacggcgagccaggcggcggcgaacagcagcatcccggcgccgaccttcggcatcgaccgcctggcctccaacttcgcgtcgcacggcctctccctgcaggacctcgtcgcgctctcgggagcgcacacgctggggttctcccgctgcaccaacttccgagaccgcctctacaacgagaccgccaccctggacggctccctcgccgcctcgctccgggccgcgtgccctcgggccgccggcaccggcgacgacagcctcgcgccgctcgaccccacgcccgcgcggttcgacgccgcctacttcgcctcgctgctgcggaaccggggagtgctgcactcggaccagcagctgttcgccggcggccccggcgtcgcggacgccctcgtgaggttgtacgccgccgacaccgacgccttcaggagggacttcgcggacgccatggtgaggatgggcagcctcagcccgctcaccgggagcaacggcgagattcgctacaactgccggaaggtgaactactcttgagtgaatttggttcacatctgatgcaggaaggtctagaaccatgtcagcgtgctgtggaatccacagctgttcttgcgctcgtgtcaaacaaacatagtgttcttgttatttgagttaagttttctacatttatgttgttttgtcaccggtaaagaagagctttattacggctgtttcttattttgctgtattctttcgtttatttaatttgattggcagtttgtgaggtttgcaaggtaaaaaaaaaaaaaaaaaaaaaaaaaaaaaaaaaaaaa

SEQ ID NO: 1154 - DNA, 1269 bp, Zea mays
actgacagctcgccgaggggccgcgccgcgctcgagacccgtcgatggcgaggcggagcctggcggtcgacgcaaccgcaggcgccgcatcccgggttcggttcgcgcccacctccaataacctgctcgtctcctcatgggattcggggctgcggttgtacgatgccgacgagggcacgctcagggtcaacgtggagtcagaggcggcattcctcgactgctgcttcgaggatgagtctgcagcgtttgcctgcggctctgatggatctgtgagaaggtacgacttccactcaggttcgcaggatacggtggggctccatgaagatgcactagcctgcattgagttctcttcactgaccggtcagattatgacaggcagccttgacaagaagctaaagctttgggattcaaaaacaagaaatgtaagcccgagcggcaccataaccttaaattcagatgtggcctcaatttctatatgcggcatttacatattagctgcagttgagagaaatgtttatctttatgacatgaggaatctaacaagaccagttgatgaaaaagactgtcctctggattatcaaattcgatgccttcatacttctctagagtggaatgcttatgttgctggctctgtggatggagttgttgcattgaagtatcttgatcgtggaacagatagagatttgggatatgcatttcgttgtcatccaaattccagaaacggaaaatggaatctggtccctgtaaattgcatctcagttcatccctgcaacagaactttcgttacgggagatgataaaggatgcactattgtttgggatgctcaattgaaaaagaagctgattgagcttccaatgtatttgggcagtgtggcgtcagtggcatacaaccataatggccaacttctggcggttgcctcaaactattttttagaagtggataaagaggagcaacaccaccaggtattcattgaaactgtggagaacttcaaaggcaagtcccgtgtgggatagagccttctaacaaaacatgttctgttcatctgttgtattgtattttgtctaccatacatgttaaaggtcaccaagatgtgacagcatgttgtattatgttgtatgactaagcattttttttaggaaaaacgacataatatggctaagcaatacttgtatatattggttacatctagtctgagacagctgtggtgtgttgtaactcttttgagcttttgcaaccagtattgctgttctggtaaaaaaaaaaaaaaaa

SEQ ID NO: 1155 - DNA, 1602 bp, Zea mays
atggaggagtgcaccttcacctcggcggccatggccgtggggttcctgctggtcgtgtacctgtacgagccgtactggaaggtgcggcacgtgccggggcccgttccgctgccgttcgtcggccacctccacctgctggcgaggcacggcccggacgtcttcctcgtgctcgccaagaagtacgggccaatcttcaggttccacatgggaaggcaacctttggtcatcgtggccaacgcagagctctgcaaggaggtcggcatcaagaagttcaagagcatgccgaaccggagcttaccttcggccatcgccaattccccgatccacctcaaaggcctcttctcgacaagggattcacggtggtcggcgttgcgaaacatcatcgtctccatctaccagccctcgcacctggcggggctgatcccgagcatgcagtcgcacatcgagcgcgcggccacgaacctggacgacggcggcgaggccgaggtcgccttctccaagctcgcgctcagcctcgccaccgacgtgatcggacaggcggcgttcggcgcggacttcggcctgaccacaaagcctgccgcgccgccccctcaccacggaccaccacgacagcacggcgaggaagacggagacggtagtcacagcaccaggtcgtcggagttcataaagatgcacatccactcgaccacgtcgctgaagatggacctgtcggggtcgctgtccaccatcgtcggcacgctcctgcccgtgctgcagtggccgctacggcagctgctcctgcgggtcccgggcgccgccgacagggagatccagcgcgtcaacggcgcgctctgccggatgatggacggcatcgtggccgacagggtggccgcgagggagcgcgcgccccaagcccagcggcagaaagacttcctgtccgtggtcctcgccgcgcgcgacagcgacgcggccgcgcggaagctgctcacgccggactacctcagcgctctcacctacgagcacctcctcgccgggtcggccaccacggccttcacgctgtcctccgtgctctacctcgtcgcccagcacccgcgggtggaggagaagctgctgagggaggttgacgcgttcggacctccggaccgcgttcccacggcggaagatcttcagagccgcttcccctacaccgatcaggtgctgaaggaatcgatgagatttttcatggtctcgccgctggttgcgcgggagacctctgagcaggtggacatcgctggctatgtcctgcccaagagtacgtgggtgtggatggcaccgggggttctggcaaaggaccccgtcaacttccctgagccagagctcttccggccggagcggttcgaccctgccggcgacgagcagaagaggcggcacccctacgcgttcatcccgttcggaatcggtcccaggatttgcatcggccagaggttctccatccaggagatcaagcttgcgctgatccacctctaccggcagtacgtgttccggcactctccaagcatggagtcccctttggagtttcagttcggtgttgtgctcaacttcaaacatggagtgaagcttcagtccatcaagaggcacaaatgt

SEQ ID NO: 1156 - DNA, 933 bp, Zea mays
atggccgcggtggatctgaccccaaggacgcccaagaaggcctacggcggcgacggcggcgcctactacgagtggagccccgccgacctgcccatgctcgccgtcgcctccatcggcgccgccaagctctcgctcgccgccggcggcctctccctccccagctactccgactccgccaaggtcgcctacgtcctacaaggcgtcggtacctgcggcctcgtcctccccgaggcgacgaaggagaaggtggtggcggtgaaggagggcgacgcgctggcgctgcccttcggcgcggtgacgtggtggcacaacggccccgccgcgcaggccgacctcacggtgctcttcctcggcgacacctccaagggccacaagcgggggcagttcaccaacttccagctcacggggtccgcgggcatcttcacgggcctgtccaccgagttcgtgtcgcgcgcgtgggatctgccggagcccgacgccgcgaggctggtgtcgagccagccggcctcgggcatcgtcaagctgcccgcctccgccgccgcgctcccggcgccctcgccgcaggaccgcgccggggtggcgctcaactgcctggtggcgccgctggacgtggacatccccggcgggggccgcgtcgtggtgctcaacacggccaacctgccgctggtgcgcgaggtcgggctcggcgccgacctggtccgcatcgacgcccactccatgtgctccccgggcttctcgtgcgactcggcgtaccaggtcacgtacatcgtgcgcggcagcggccgggtgcaggtggtcgggcccgacgggaggcgcgtgctggagacccgcatcgagggcgggtccctcttcatcgtgccccgcttccatgtcgtgtccaagatcgccgacgcgtccgggatggagtggttctccatcatcaccaccccgaag

SEQ ID NO: 1157 - DNA, 1020 bp, Sorghum bicolor
atggcggctctgccgcccttctcgccgcggcggcccttctcgtcgccgtgcttcatcctctgcttcctactcggcttcgtcgcgggcctcttccccttcgcgcaccgccacctccacctcgacctccaccacctcccgctcccggtcccggaccctcctcctactcctcctcctgccgcgccgacccaggcggccccgactccgccgccgacgacgacgaccctgatcgtcgtcacgccgacccgcgcgcgcccgctgcaggcgtactacctgcaccgcctcgcgcacacgctccgcctcgtgccccagccgctgctctggctcgtcgtcgaccgcggcgccgccacgcgcgagaccgccgccctgctccgcggctgcggcctcatgtaccgccacctcccttcctcccaccgcggcgacgcgcccgatgatgctcgccggagaggggcgacccatgagcacccggcggagcgcggcctgcagcggcgccagaggaacgcggcgctcgaccacatcgagcaccaccgcatccacggcctcgtctacttcgccgacgaggacaacgtgtattcccttgacctcttccatcagcttcgcggcataaggagttttggcacctggccagtcgcaatgctgggcgtgggcaagagcaagacacttctggaagggccagtttgtgacagcagccaggtggtaggatggcacacgaacgagagggacaagaggcaacgaaggtttcatgtgaatacttcgggctttgctttcaatagcagtatgctctgggatgccgacaagagggctcatcaggcgtggaattacatccggctgctggacacggtcagagatgggtttcaggcaacaacatttgtagaacagcttgtagaagatgaaacttatatggagggcataccaactggttgttcaaaaattatgaatgttaatcttcatctagaagataaacatcttgtatatccaaagggatggcaaatgacagaaaacctggatgtattaattcctctc

SEQ ID NO: 1158 - DNA, 1215 bp, Zea mays
atgggttgcttttctacattttgcaagaaaagaagggcaacgcggcaaccaagttcccaccataatgaagacgtacctggctgttcaaatataacaaaatacacttacaaggagctagtaagggcgacaaataactttaacccattgaacaaaattggtgagggtggttttggttccgtttacaagggacagctcaggaatggtacagttattgctgtcaaggtcctttcgtcggagtcaagacaaggagtaagggagtttctgaatgaactcgtggcaatttccgacatctcacatgataatcttgtgaaactttatgggtattgtgcggaaggagaccaaagaatccttgtttacaatcatcttgaaaataatagccttgcacaaacacttctaggctccagccacagcaatatccagtttgattggaaaacacgagtaaatatttgccttggcattgcacggggattagcatacctccatcatggtgtcagtccccacattgttcatcgagacattaaagcaagcaatatacttcttgatagggaccttaccccaaaaatctctgattttggtctagcaaagcttcttccaccaaacgcaacacatgttagcacaagagttgcaggaacactgggttatttggctcctgagtatgctattcgaggacaggtgacacgcaaatcagatgtgtacagctttggcgtgctgcttctggaaattgtttgcgggagatcaaacagcgatacaagattagcatacggagatcagatactcctcgaaaagttcccagagatcaccaacggggctctcctcttgcagacatggatgcactacgagcaggggagtctggagaggatcatagacaggtccttgggcggcggcgacctggacgtggcgcaggcctgcaggttcctgaaggtcgggctgctgtgcacgcaggacgtgacgaggcaccggcccgacatgccgagggtcgtcgccatgctgacgggcgagtgggacgtcgagccggagacggtcagcaagcccgccataatcagcgacttcatggacctcaaggtcaggagcacgaggaaagcgagcgacaacgtggccacgccgcctacgtcctcctcgacgttcctgtcctccctcatggcgcactcctcgcccttgctgtcgaacgagtccacgcaggcctccatggcgttcaccggggtgtcggatcgcgag

SEQ ID NO: 1159 - DNA, 1638 bp, Sorghum bicolor
atggcgtcgccgcaccttcccttcctctccttccccaaaaccctaccgccaccacctccaccgctcaagccccacgcccaccgcacctccctcgccgtcgccgctgctcctgctcccccgcccgccccgcctgacggcgcggggcccgccgcgcccacgcgtggcgaccgcttcctcggccgccagctggccaccgaggccgccgcgcgcgtgctcgcgcccgacgacgccgacaggcgccgccgacgcaaggagaagcgccgggcactgtcgcggaagccctccggcctcgcctcttgctacgggtgcggcgccccgctgcagacggcggaggaggccgcgccgggatacgtagaccccgacacgtacgaactgaaaaagaggcaccaccaactgagaaccgttctatgtggaaggtgcaagctgctctctcatggccacatggtcactgctgttggtggccacggcggttatcctgggggcaagcagtttgtttctgcggaacagctcagggagaagctgtcatacctccgtcacgagaaagcactgatagtcaaattggttgacatcgttgacttcaatgggagtttcctggcacgagtacgtgactttgctggtgcaaatccgattattcttgtgataacaaaggttgatctccttcccagagacactgatttgaattgcataggcgactgggttgtcgagtcagttgtcaagaagaagcttaatgtccttagtgtccatttgacaagctcaaagtcactggtcggtatcacaggggttatatcagagattcaacaggaaaagaagggccgagatgtatatatactgggttctgcaaatgttgggaaatctgcatttatcagtgcaatgctaagaacaatggcatacaaggatccggtggcagcggcagctcaaaaatacaagcctatacagtctgctgttcctggaacaacccttggccctattcaaattgaagcatttttaggcggagggaaattgtatgatacacctggagtccaccttcaccataggcaggcagcagttatccatgctgatgatctgccttctcttgcaccacaaagtcgtttgaaagggcgatgttttcccgctaatgatacagatgttgaattgagtgggaattcattattctgggctgggctagtccgcattgatgttgtcaaggctcttccacgcgcacggctgacattctatgggcccaagaagctaaagattaatatggtcccgacaacagaagcagatcaattttacgagactgaagttggagttacattgactccaccaactggtaaggagagagctgaaggatggcaagggcttcaaggtgttcgcgagttgaagataaagtatgaggaacgtgacaggcctgcttgtgacatcgcgatctctgggcttgggtggatttctgtggagccatcaggcgtgccctcaaacagctctgatgacaatgtcgaggaagaatacgatggcggtgagctgcatctggtagtacatgtacccaaaccggttgaggtcttcgtccgccccccattgcctgttggtaaagcagcgtcgcaatggtaccagtatcaagagctcacagaggaagaagaggagttgaggcctaaatggcactac

SEQ ID NO: 1160 - DNA, 2184 bp, Zea mays
atggcttccagcctcgtgaatctgctcctcatggaggtggcggccatcgtcagcattgttctgctcgcaatcctcgttgtgctcagctcttacggccgccgttctggccatccggcactccgcctcttcgtttggtccgcatccactctgttcctcccgctcgtgtcctacgccgtctccgcggcggccaaatgggacgcagcgcgcgtccctttgctactcgcctggacagtcttcctccagatcctgcgcaacaccatcgacacctcccgctcctcgagttcgaccatcaacagcagcggctccaacggaagcaagttccggccgtccgttgagcagctggcgaggatgggttgggtggcgttcctcatcatcagcagtggcggtaccgccgggagcccgctgctgaccggcgtcctgctctggctgtgggtgctcagcctcctcaagctcatccacaggctcgtcgctgccgagctcgccaagaactcgttcgctgtcggcctcaactcgtacctagtcgccgactacatgaagcaactccatgggcatgggcatagtcaagcagctggccagcgtggactagaagtgcctgcttactttgtgatgggtgaggagaaactgcctatcaagcctgggccgcaggggtactacattgacagcactgaagctccgccttcattgtccatggacgacgcggggcatgtcgtcaccgtggacaggatatggtcgctttcctcatccggcgaccctctcctcgcatcctgcccgcagatcaaggacctctgcctctcttttgctctattcaagctccagctccggcggttcattgggtgcccactcgccgaagccggctgtcaccgtgctatggcatttgtgcaggacggtctccttgctggtagtggtagcgcagagagggtgttccaggtggtcgaggccgagctgtccttcctcgccgacttcctgtactcgaagctcaccgtcttctatgccagcgggtggtggttcccagcactcaactcaatcctcgtactggccacgtggatcagctgtctagcagccggcggcgccatcgtgcacgacatgacgaacccaggcacggcactcgccgtggactaccacatgctccgggattacctgcaacaccacgacacggtgttccacgtcattgttggccttgacatacttgtctccgtctcattcatcgtctccattgtgttcatggaaggatgggagatcgccaactacgtctgttccgactggatcaaggtgtccaccatctgcgagtacacccgacgtccatcgtggcagaagtcgctgtgggcgcgtcgtaagctcagccgcctattttggctccgacccatgcgacaatgggatgaccgattctgccaggtgtcaatattgcagcttcggttctgctactatggctgcatctcacagcaagtcgaccgaatcgtgaagaagaccgtcgcagtgcccgcaacggtgaaatctgccattgtgaagacgctcagagcaaaccagggtaggctcgggaacggcgagctatccttgcaaggcaacggagtcggtaacctctcctgggcttgtcgtattaaagccagcgacgacaatgccatggacagcttatccgagcagatcctcgtgtggcatctcgccacgaggctcgtcgagctcaagtgctctcaaggagctcatggtgacagtggcaatgacacatatggggagagcgatctagaggtggttgcgacacagttgtcccgttactgcgcctacctagtggcgctgaagtcgtccctcctgccggaccaccgcgcatggacagaggagctctacaagggcgtggtggaggaggtgacaagggtgctggcacgatgcgcgggaccagttgcggggtacgagcgcgcttcgatgtgcctcagcgggagcatgaacgccacgttgagaaaggcatccaaactcgggcggcagctagtagaggaggtcagtgacgaggagttgttgtggaaggtgctcgccgagttctgggcagaatttgtcctgtacctcgcgccgtcagacaacgtggcctcgcactcaaagtctctctaccacggtggcgagttcataaccgtgttgtgggcgttgcttggtcacgctggcattgtcgggcgcccggagacggagagcactgagaactcagcc

SEQ ID NO: 1161 - DNA, 1278 bp, Zea mays
atgttcgtgatcgaggacaagggcggcgccatcgcgctgatgctggcgtcgctcctgttcctgggcacctggccggccgtgctcaccctgctggagcgccggggccgcctgccgcagcacacgtacctggactactccatcaccaacctcctcgcggccgtgctcatcgcgctcaccttcggccagctcggggacagcaggcgcggcatgcccaacttcttcacgcagctcggccaggacaactggccctctgtgctgttcgccatggccgggggcgtcgtgctcagcgtcggcaacctctccacccagtacgcttgggcctatgtgggcctctccgtcactgaggtcatcagctccagcatggtggtggtcataggcaccacgctgaactacttcctggacaaccgcatcaacagggcagagattctgttccctggtgtggcgtgcttcctcgtcgccgtcatccttggctccgctgtccattcctccaatgcagctgacaatgagcagaaactcggtgcctccacgaatgcctacaaactcgggacaagtggaaatgtggaaccaagcaaacaagctgtagacagaggtgttcattgtctatctgaagaagaaagaacaaatctaatttcagatgctcccaaagacttggaggagagtggagcctctggaatccggcaacctgacaaagctgaggcaggcactgcagagtacctcattgagcttgaagaacggcgatcaattaaggtattcggttcaaacaccttcatcgggctggggatcgtcttcttcgcgggcgtgtgcttctcgctcttctccccggcgttcaacctggccactaacgaccagtggcacacgctcagggacggcgtgccgcacctggtggtgtacaccgccttcttctacttctccatctcctgcttcgtcgtcggcgtcggactcaacgtcctgttcctctaccgccccatggccggcgtgccccgctcctccctcggggcctacctcagggactgggacggccgccagtgggcgctcctcgccggcctgctctgcggcttcggcaacggcttccagttcatgggcggccaggccgcagggtacgccgccgctgacgctgtccaggccctgccgctcgtcagcaccttctggggcgtactgctcttcggggagtaccgcaagtcgtcgcggaagacctacgtcctgctcggcttcatgctcttcatgttcgtcgccgctgtcgccgtgctcatggcttcgtcaggtcacaggagcacagag

SEQ ID NO: 1162 - DNA, 1515 bp, Sorghum bicolor
atgtctccttacctgctgcttgccgccgccgcgcttatcgccttcctctacatcatcaagaaccgcaggagcagcaagctcccgccgtccccgccgtcgctaccgctgatcggccaccttcacctcatcggccgcctcgcgcaccgatccttgcacgagctgcagcttcgctatggcggcggcggcggtctcctcttcctgcaactcgggcgcaggcggaccttggtcgtgtccactgccgcggcggcagcggacctgttcaggaaccacgacctcgccttcgcctcgcgcgcgcgcagcgtgggaggggataagatgacgtatggctgcagcaacgtgtcgttcgcgccgtacggcgagaactggcgcctgggcaagaagatcgcggtggtccacctcctctccccgcggcgcgtggagtcgttcgcgcccgtgcgggccgccgaggtagccgcgctcgtcgcgtggacacgctgcgccgcggaggcacgggaggccgtggagatgagggagctcctgtacgggtacaccaacgcggtggtcacccgcgcggccaccggtgccgccggagtaacagcagacaagatgaaacagctgatggggaacgccgaggcgctgatggcgggcttccaacctgaggacgtgctgccggacgcgccggcgaggtttgtgagatgggcgacgggcctcgataagaagctcgacgacatgggcgaggcatgggacaagttcctgtccgagatagtggccgcgcacaagaagggggacgacggtgcaggggaggacgatgaggacttcttggacgtcttgcttcggctgagggaagaaggtaccggcgggctcgagctcacagacgatcgcatcaaagctatcatcaaggatatgatattcgccgcaactgaaacatcatctcaaacgctagaatggaccatggccgaactcatggccaacccgcgggtgatgagcaagctccaggacgagatagcgcgagtcgtcagcgccgatcagacgaccattgctgaaccggacctgagcaaaatggagtacctgaaggcagtgttcaaagaggtgcttcggctccacgcaccagcgccgctcctcgtcccgcacgaatcaacgacgccagcggtcgtgcagggctacgagatcccggccaagacggcgctcttcgtcaacgtgtgggccatcgggcgggaccctgctgtgtgggacacagcggacgtgttccgcccggagcggttcatggccggcagcccctccgtggactttagagggaccgactaccagctcatcccgttcggcgccggtcggaggatctgcccgggcatcagcttcgcgctgccggtcttggagctcgcgctcgtcagcctcctgcatcacttcgaatgggagctccccgccggcatgcgtccggcggacctcgacatgggcgaggcaccggggctgacgacgccccggcaggtaccccttgtcctagtccccaagtgcaagacgctcgttcaggcggcactacag

SEQ ID NO: 1163 - DNA, 1359 bp, Zea mays
atgcatgtgtacatgtctctcggaaggaaaagcccgcaagatcggatcgatcacttacttggctactgctgcctgctgctgcaggtgctccaggaacaagtgccgtccaccagatccaggctcggcatgttcgtgatcgaggacaagggcggcgccatcgcgctgatgctggcgtcgctcctgttcctgggcacctggccggccgtgctcaccctgctggagcgccggggccgcctgccgcagcacacgtacctggactactccatcaccaacctcctcgcggccgtgctcatcgcgctcaccttcggccagctcggggacagcaggcgcggcatgcccaacttcttcacgcagctcggccaggacaactggccctctgtgctgttcgccatggccgggggcgtcgtgctcagcgtcggcaacctctccacccagtacgcttgggcctatgtgggcctctccgtcactgaggtcatcagctccagcatggtggtggtcataggcaccacgctgaactacttcctggacaaccgcatcaacagggcagagattctgttccctggtgtggcgtgcttcctcgtcgccgtcatccttggctccgctgtccattcctccaatgcagctgacaatgagcagaaactcggtgcctccacgaatgcctacaaactcgggacaagtggaaatgtggaaccaagcaaacaagctgtagacagagatgctcccaaagacttggaggagagtggagcctctggaatccggcaacctgacaaagctgaggcaggcactgcagagtacctcattgagcttgaagaacggcgatcaattaaggtattcggttcaaacaccttcatcgggctggggatcgtcttcttcgcgggcgtgtgcttctcgctcttctccccggcgttcaacctggccactaacgaccagtggcacacgctcagggacggcgtgccgcacctggtggtgtacaccgccttcttctacttctccatctcctgcttcgtcgtcggcgtcggactcaacgtcctgttcctctaccgccccatggccggcgtgccccgctcctccctcggggcctacctcagggactgggacggccgccagtgggcgctcctcgccggcctgctctgcggcttcggcaacggcttccagttcatgggcggccaggccgcagggtacgccgccgctgacgctgtccaggccctgccgctcgtcagcaccttctggggcgtactgctcttcggggagtaccgcaagtcgtcgcggaagacctacgtcctgctcggcttcatgctcttcatgttcgtcgccgctgtcgccgtgctcatggcttcgtcaggtcacaggagcacagag

SEQ ID NO: 1164 - DNA, 1233 bp, Zea mays
atgttcgtggtcgaggacaagggcggcgccatcgcgctgatgctggcgtcgctgctgttcctgggcacgtggccggccgtgctgacgctgctggagcgccgaggccggctgccgcagcacacgtacctggactactccgtcacgaacctcctcgcggccgtgctcatcgcgctcaccttcggccagctcgggggcgccaggcgcggcatgcccaacttcctcacgcagctcggccagcccaactggccttccgtgctgttcgccatggccggaggcgtcgtgctcagcgtcgggaacctctccacccagtacgcttgggcctacgtcggtctctccgtcaccgaggtcgtcagctccagcatggtggtcgtcattggcacgacgctgaactacttcctggacaaccgcatcaacagggcagagattctgtttcccggcgtggcatgcttccttgttgctgtcatccttggctctgctgtccacgcctccaacgcagctgacaacgaggagaagctcagtgcctccacaaatgcctaccagcttggtaggacagctggggctgcggaaccaagcaagcatgtcctagacaaagatgttgccaaggacttggagaatggagtctctggaacaaagcaagctgacaaagcggaggcaggcaccgcagaatacctcattcaactcgaagagcggcggtcaatcaaggtattcggttcaaacacgttcatcggtctggggatcgtgttcttcgcgggggcgtgcttctcgctcttctccccggcgttcaacctggcaaccaacgaccagtggcgcacgctcaggggcggcgtgccgcacctggtggtctacaccgccttcttctacttctccgtcgcgtgcttcgccgtcggcgtcggcctcaacgtgctgttcctctaccgccccatggccggggtgcccaggtcctccctcggggcctacctcggggactgggacggccggcactgggcgctcctcgccggcctgctctgcggcttcggcaacggcctccagttcacgggcgggcaggccgcgggctacgccgccgccgacgcggtccaggcgctgccgctcgtcagcaccttctggggcgtactgctctttggggagtaccgcaagtcgtcgcggaagacgtacctcctgctcggcttcatgctcttcatgttcgtcgccgccgtcgccgtgctcatggcttcgtcaggtcacaggaccacagag

SEQ ID NO: 1165 - DNA, 1371 bp, Zea mays
atggcgtccaccaacgcaatcgatttccaactcacccaggcccgggcgctgctgtccgaattcgacaaccggctccgcgagattgattccaagtgggagacccgcgtcggcgtcctcgaaacgaaagttgcggactctgctcgaaatctggagacgatctccaaggagatccgcgacggggtggtggcgcagttggcggcggccgaggcgggtgtggatttccggatccgcctgcttgagacggggaccatcattcgcgtcgctgcgctcgagtcgactgcccacgccttcgagctgtggcgtcctcacgtcgacttgtcgatcgacagtctcttctcctccattgacgcggtttgtaccgaggtcgagaaattggggatccaccggttcccaggaccgcgtcccagcgatggcgcagcagcaccggggaccgcgacgcaaccggaaccctcttctcatcggccacgttcatcgcctccgcccgaggtccatgacggcgacgatgacgatgaagaaattgacgatgacgatgacgacgacgacgacgacgacgacgacgacgacgacgacgacgacgacgacgacgacgaggattatgagggcttcacagacgaagagctggacaaattcgaaagcgccttcggatggggttctacattcttgagtgatcctcaagttctttgtatggactcgagtgatccacaaaacccccctcgtattggccggcaaaattatgagccgctcaccgcacaggagtttttttcactgcgccacaattggcaacagctgctcgatggcaagaagacatacctccgcccaccaaagaacaaccgtgttgccaagcacagttatgctaactgcacctttgtaaccccagaacctcttgagaaggcactacaatgtcaggagccgctatctgattttggtcggaaatatgcagaaaattctatagttcagcaaaagtttaagattcttagtgaacattatgcgcacgtcagacaaatgcgaatggatggatcatctttttacagagctttccttttctcttacttggaaaaccttgggaaaatgcaagctagtcatgctgaggtcactcgcttaatggaatgtgtggcaaggtccagagagaaattttgtcgtttacattggaatgatgcgtacttctcaaatcctgaagcatttttctcaagtgttgtttctgagttcgagcaattggtcaattcagttgccaatgggctaaatgctgatgagctttacaagagaagcctacatgagattacatcatccaggagtgaggatacaaatttttttgggatgtgttgtttatttgttctctatgtaacattttctttggttagttctttgtttgtt

SEQ ID NO: 1166 - DNA, 1002 bp, Sorghum bicolor
atgcccgtcggctcccgacggaggccgccgccgtcgcaccaccgtcgcgccatgacacccgcctccgtctccgcccccgcccccggcgccgccgccgctcccacaaagccgctctacctccgcggtccggtcatcgcgggcgccgccgcgctggccgcgttcctcctcctcgccgccgcctacgccaccaggcgagccggttccccaccgaccgccctcctcgctcacccagctgttgccaccaggttcttctccttcgacctggtccgcgagtaccctcacgacccggacgccttcacccagggtctcttatacgcggaaaatgacactcttttcgagtccactggcctctaccacaggtcttcagtccgaaaggttgatcttcagacgggaaaggttttggttaatcaccaaatggacggacaaatgtttggagaaggtttaactcttctcggccacagattgtttcaggttacctggttgaagaacgacgggtttatatatgatcaacataacttctccaaacgcacgagttttacccataaaatgcgagatggttggggtttggcgactgatggaaaagttctttttggcagtgatggcacttcaatgctgtataagctggatccaaagtcacttgaagtcatgaaagtggtgactgtcaagtatcacggtgatgaagtcccctaccttaatgagctggagtatgtagatggtgaagtctgggcaaatgtctggcagacagattgcatagctagagtgtcccctgaagatggcctagtggtgggctggatctttcttcatgagctgaggcggcagttgtggaactcaggcaatacgaatattgatgtcttaaacgggatagcttgggatgaaagaaaccacagattatttgtgacagggaaactgtggccaaagctctatgagatcaagctacgggcagtagatggtccagcagatggatctgtagaaaaactttgtccaaaagccagcttctatcgc

SEQ ID NO: 1167 - DNA, 1164 bp, Zea mays
atgatctcccttctcctccgggcacctggatcaccatacgtcccttgcccccacttcttcccgctcttctatccccaccgcctcctctccgccaccaaatgcgtcgctacaaaaccattcgccgtcgaggactacctcgtcgccacatgcggcctcacccaagcacaggccctcaaggcgtcgaagcatgtctcccatctgaaggatccctcgaaagccgacgcggtcgtcgccttcctctccaacctcggcctgtccagcgccgagatcaccgacgtcgtgaccagggaccccaaagtcctctgctccgacgtggagagatccctcaccgctcgcgtcgccgagctcaccgacctcgggttttcacgtccggagatcgtccgccttctcatcgttggcatgaaccacttccgccatagctcgcttcgcctcaatcttgagttttggatctcggtctttggctctctcgacgagctcattcgggcgctcagaattaacgccgctctcctcagcacaaggattgaggaggtctgcaagcccaacctggagctccttcaagagtgtggtataaatgtttctgatatctccaacagcttcatgtcccgtgtgctcaccagggaccctaagagcctgcaggaagctttggctcgccttcatgagttcagaatccagccgggctctcaacctttcttccgtgggctttatacatttgcaatccttggcagcgggaagataaccaagagcattcagctgtttgagaagcttggatggtcaaaggaccatatagtatcagcggtgaagagagacccgactatattgggtttcaccgaggagagggttcgaagaaacatggaattcttgatcagggttgtcggattggaggtaccatacatcgcacgaaggccagcgctgataaattatagtattgaccgtcggttgttgccacggaattgcttgatcaattttctcagggcaaaggggttgttcaatgacgaggctagtttcctttctgtcgccgctataggcgatgagaaatttcggcgccgatacgtgcatccttacgaggaggattttccaggccttgctgctgcttttgcttctagctgtgctggagaacaccaatgggaacggctatataagatgacaggcgaaaataaagaaagc

SEQ ID NO: 1168 - DNA, 906 bp, Zea mays
atggcccggcgtcgcctgcagcaaccgcaccgtcgtctcgctcgacatctccggctacaacctctccggcacgctgccccccgctatcgccgacctcgctggcctccgtttcttctccgccgccgccaactccttctccggagacattccgcccgccatcgccgccctccgcgacctccgccacctcaacctctccaacaaccagttcaacggcacatcgtgcggctgctggccttctgctcggggcccgaggcgaagctgctggtgtacgagtacatggtgaacggcagcctcggggaggcgctgcaccgcgctggcgctgatgatggcggcggcggtgtggtgctgtcgtgggcgtcgcgtctccgcgtggcgacggaggctgccaaggggctgtgctacctgcaccacgactgctcgccgccgatcctgcaccgggacgtcaagtccaacaacatcctgctggacgcgcgcatggaggcccacgtggcggacttcgggctggccaagttcctgggcggcagcggcgcctccgagtgcatgtccgccgtcgcaggatcatacggctacatcgcaccagagtacgcgtacacgctcaaggtggacgagaagagtgacgtgtacagcttcggcgtggtcctgctggagctcatcacggggctgaagccggtgggggagcacctcggcgacgacgcggtggacctggtgcagtgggcgcgcgcccggagctctgcagggggcggcgtcctggcgctgctggaccctcgcctcggcggcgacgtcccggtggcggaggcggcgcatgtgctgttcgtgtcgatgctatgcgtgcaggagcacagcgtggagcgccccaccatgcgcgaggtcgtccagatgctgcagcaggcacggcaccagcctagc

SEQ ID NO: 1169 - DNA, 1185 bp, Zea mays
atgaacaacctccggaagcgcatgatctcccttctcctccgggcacctggatcaccatacgtcccttgcccccacttcttcccgctcttctatccccaccgcctcctctccgccatcaaatgcgtcgctacaaaaccattcgccgtcgaggactacctcgtcgccacatgcggcctcacccaagcacaggccctcaaggcgtcgaagcatgtctcccatctgaaggatccctcgaaagccgacgcggtcgtcgccttcctctccaacctcggcctgtccagcgccgagatcaccgacgtcgtgaccagggaccccaaagtcctctgctccgacgtggagagatccctcaccgctcgcgtcgccgagctcaccgacctcgggttttcacgtccggagatcgtccgccttctcatcgttggcatgaaccacttccgccatagctcgcttcgcctcaatcttgagttttggatctcggtctttggctctctcgacgagctcattcgggcgctcagaattaacgccgctctcctcagcacaaggattgaggaggtctgcaagcccaacttggagctccttcaagagtgtggtataaatgtttctgatatctccaacagcttcatgtcccgtgtgctcaccagggaccctaagagcctgcaggaagctttggctcgccttcatgagttcagaatccagccgggctctcaacctttcttccgtgggctttatacatttgcaatccttggcagcgggaagataaccaagagcattcagctgtttgagaagcttggatggtcaaaggaccatatagtatcagcggtgaagagagacccgactatattgggtttcaccgaggagagggttcgaagaaacatggaattcttgatcagggttgtcggattggaggtaccatacatcgcacgaaggccagcgctgataaattatagtattgaccgtcggttgttgccacggaattgcttgatcaattttctcagggcaaaggggttgttcaatgacgaggctagtttcctttctgtcgccgctataggcgatgagaaatttcggcgccgatacgtgcatccttacgaggaggattttccaggccttgctgctgcttttgcttctagctgtgctggagaacaccaatgggaacggctatataagatgacaggcgaaaataaagaaagc

SEQ ID NO: 1170 - DNA, 1542 bp, Zea mays
atgcgcctaatggctgttctggttgatggatgccggggactgaggggtggtgctatggctggtgtgatccatgggcacgcacaacacggagatcctatgtttcaggagtttatgggccgattactgcgccgggtgtgctcgccgttgtttgagatggtcaggagctgggtgctagaaggggaattggaggatgtatttgcagagttttttatcgttgggcagccagtgaaagcagaatctttgtggcgggagggctaccttattcaatctgatatgcttccagctttcatatctccagtgctcgcaaaacggattcttagaactggcaagtcaatcaactttcttagagtatgctgtgacgatagtggctgggctgatgctgctgccgaggctgctgcatatgttggcactacaacatctcggggtggccttggttatggggagactgatgctttggaggcattggtggttgaggcagccaagaggattgatcgacatttgatggatgtcattcataagcggtaccgatttaaggaccactgccttgccattaagcgttacttgcttcttgggcagggtgattttgtccagtatcttatggacgttgttggccccgagttatcagagccagcaaataggattagctccttccaattggctggcttgcttgagactgcaatccgagcatccaatgcacaatatgatgactgtgatatcttggaccggataaaggtaaagatgatggatcatggggatggtgatcgtggctgggatgtcttctctttggagtatgatgctagggtccccctggacactgtgttcacagcttcagttatgaagatgtatctcaaggttttcaacttcttgtggaagctcaaacgcgtagatcactcccttaccggagtgtggaagactatgaaacctaactgcattgtttcttctccattttacaaggaaggaacaagcatcagagctcaatttgtatcagttcttcgtaaatgtcaagttctattcaatgagatgaatcactttgtgaccaatttccaatactacattatgtttgaggtcctggaggtttcgtgggcccgtttttctgatgaaatggatgcagcaaaggatttagatgaccttctcttagcacacgataaatatctcaactcgatactggagaaggccctgcttggtgaacattcccaaggacttttgaggaatctgtttgaactgtttgacattattttacagtttcgaagccatgctgatcgatggtttgaaaggatatatgagttgcagctaaggggaaagggtaaatcaaaatcaaaggatacaggttcatggtttgatggcggcagaaaagctatgatccaactagctggagaacttttctggaaaatgggtgaagacctggatagcatcgcaaaggattatacagcttctcttgatgcttttattacgcagctgcccatgcaacagcacgtcgatttgaagttccttctcttccgccttgacttcactgaatattacagtcgtgtttcctccaacaaa

SEQ ID NO: 1171 - DNA, 1893 bp, Sorghum bicolor
atgaccgtcgaggacgtgaagctgcaggcggcgaaggcgaacggcggcggccatggggccaaggaccagttccccgtcggcatgcgcgtgctcgccgtcgacgacgatcccacctgcctcaagctcctcgagaagctcttgcaacactgccagtaccatgtgacaacaactggacaggcagccacggccctaaagctgctgagggagaagaaggaccagtttgaccttgtgatcagcgatgtccacatgccggacatggacggcttcaagctcctcgagcttgtgggcctcgagatggacctcccggtcattatgctgtctgcaaatggggagacacaaacagtcatgaagggtattacccatggagcatgtgactacctgctcaagccagtgcggattgagcagttgaggactatatggcagcatgtggttagaaggaggagttgtgatgccaagaacaatggtaatgataacgatgattccggtaagaagttgcaggtggtgagtgctgaaggtgacaatggtggtggtaatcgcaacaagagaacttcccgcaggggtagggatgataatggagatgacggtgatgattctgatgagaacagtaatgagaatggagactcatcaacccagaagaagccaagggtcgtgtggtctgttgaattacaccgaaagtttgtggctgctgtcaaccagcttggcattgacaaggctgttccaaagaaaatattggatctcatgaatgtcgagaacatcacaagggagaatgttgcaagtcatctgcagaagtatcggctgtatctgaaaagactcagtgcagatgcaagcaggcaggctaacctaactgctgcatttggaggaagaaaccctgcttatgtcaacatgggactagatgccttcaggcaatacaatgcatatgggagataccggccagttccaaccactaaccattcacagccaaacaacctccttgcaaggatgaactctcctgcatttggtatgcatggtttgctgccttcgcagccgcttcagattggacacacccagaacaatatgagcacttccgtaggcaatgtcggggggatgaacaacggcaacctgatcaggggtgcgcatatgccactgcaggatactagcaaatgctttcctactggcccttctggtaattcatttgcgaacatatcaaacagcatacaattggttacgacaaataacttgccattacagtctcttgagccaagcaaccaacaacaccttggtcggctgcagtcttctgcagacccattcaactcatttgttggtgagtctccccagtttccagatcttggaagatgcaacactacctggccaactgcggtctcatcctccaacgttcaggagcttggtcagaaggacagaattgtgaatgggcccaagcttgagcctctctcaagctttacagaagcatccagtcagattcccttgctgggaaatgaaatgcagagccaagtagcatcactagccagcaacggtcttccaatgccgttcactcaggaagcggcgcccttcgcatatggaagcagcacgaactcaagagagatgctgaataacaaccttgcacttagtaattcaggcatcaactcttcattgccgaaccttcgcatagacggttctgttgttccgaggcagacactggacggtggtaattcaggtggagtcccccctctgcaagatggcaggattgatcatcaagctgttagtagtcatctaagctataacaacgaactcatgatggggacaagtaggctgcaaaggggactcagtggtggtctggatgacattgtcgtggacatgtttaggccggaccgcgcagacgatggcgtccccttcattgatggggactgggaactggtc

SEQ ID NO: 1172 - DNA, 1476 bp, Zea mays
atgtccgatcaccgagcgaagcggccgtccgacggcgcagccactgtggcatcgccggcggcgaagcgcgcccgcgacccgcccgcgccggcgttacccacgaacaaggaagctcccgacatggcccccaagacccgcatcttctgcgacatcctggcctcccgcgccgacgacgaggaactgaatgccgagctcgacaaggccgacatccgcgtaagcatcgctgacgtcgagcaggtgctccgcttctcctacgcgcacccgcgcgccgccgccgccttctttcgctgggcgggataccggtacctcggccacgagcactccccctactcgtggaacctcctcgtcgacatcctcggtaagaatcgtctcttcgagcccatgtgggacacagtcaaatctatgcagtcgcagcagctgctctcgctcgccactttcgcctccatattctcctccctggcggcgacccccggcggttccccgctcaaggcgttcatggacatgccccgctacggcatgacccgcgacacgccggcgctcaactcgctcctctccgcgctgtgtcgtgccaaccgcctcgacgacgctcgcgccgcgatcccagtagcccgcgccgaggctggcacgcgcccggatgccgactcctacgccatcctcctcgagggcagcgaggccgccgccgatctgcgggttgcgcgcgaggtgttcgacgaaatggtgcaggccattggattttatcctgacaacgtgcctgcctatgactccttcctcactacgcttgtttcaagtgactcctccacggcgctaccggaagcaatggagtacctaaatgtcttgagcaggcacggctgttcgccaggagagaagttcttccgtgctgctcttgctgcacaccttgaggcacgacaattgcgcggagccatgaatctctgggatgactttgttgggcgtcgaggactcgtcccagatatggaaatgtacaacacaatgatcaagctgcagggcagtctcgggcatgctgagctgatagtgggttatctcgacgacatgatctccaatggagtcttccctgataccaacacatacaatgtggtcctccagcttttgttgaagggaaagaagcaccgagaggcagcggcaatatttagcgagatggtcaagaacgaatgttggccaaacgagggaaattgttcacttgcacttcgcatgtttttggatacacactattgggagactgggatcaaagtctggtgctgcatggtggagaatggcttgccacctttacaggagtgtgggaacatgcttgtagcaaagctgaaggatgacaggctacctgaggcatgcaaatatgcagaagacatgattgatcggggtatcaagttgagttcagcgacactgtccaagctgaagcagcgcctgcagaggattaagaaaggagagatccatgatcacctgcttgcaaaatggaaggcacat

SEQ ID NO: 1173 - DNA, 1893 bp, Zea mays; identical to SEQ ID NO: 1102

SEQ ID NO: 1174 - DNA, 273 bp, Sorghum bicolor
cggagtttaccgcccgatttgggctgcattcccaaacaacccgactcgttgacggcgcctcgtggtgcggcagggtccgggccggacggggctctcaccctcccaggtgtccctttccagggaacttgggcccggtccgtcgctgaggacgcctctccagactacaattcaggtgacgaagccacccgattctcaagctgggctggtcccggttcgctcgccgttactaggggaatccttgtaagtttcttctcctccgcttatttatatgct

SEQ ID NO: 1175 - DNA, 1098 bp, Sorghum bicolor
atggcagggccggcgccggatcgggccgccctgactgtggggccgggcatggacatgccgatcatgcacgacagcgaccggtacgagctcgtgcgcgacatcggctccggcaacttcggcgttgcccgcctcatgcgcgaccgccgcaccagcgaactcgtcgccgtcaagtacatagagcgcggcgagaagatagatgagaatgtccagcgtgagataattaaccatagatcattgaaacaccctaacattattaggtttaaagaggttattttaacaccgacccaccttgctattgtcatggaatatgcctctggtggtgagctttttgagagaatatgtaagaacgtgcgattcagtgaagatgaggctcgctacttcttccagcagctcatttcaggagtaagctactgccattcaatgcaagtatgccaccgtgatctgaagctggagaacacacttctagatgggagtgatgctcctcgcttgaagatatgtgacttcggctattccaagtcatctgttcttcattcccagccgaagtccactgttggaacacctgcttatattgcacctgaagttctgttgaaaaaagaatacgatggcaagattgctgatgtttggtcatgtggtgtaaccctctatgtaatggttgttggtgcatatccttttgaagacccagaagagcctaagaacttccgcaagacaattcagcgcatcttgaacgttcagtacgcaattccagacaacgtgaacatatctccagagtgcaggcatctaatttcgaggatttttgttggagatcctgctatgcgaataacaatccctgaaatccggaatcatagttggttcctgaagaaccttcctgctgatctgatggatgatgatagcatgagcaaccaatatgaggagcctgaccagccaatgcagaccatggatcagatcatgcagattttgacagaggccaccataccacctgcctgttctcgcagtataaatgtcctagctgatggattggacatggacgacgacatggatgatcttgactctgactcagatcttgatgttgacagcagcggtgagattgtgtacgcaatg

SEQ ID NO: 1176 - DNA, 1299 bp, Zea mays
atgaaggtggaggtggtggagacgacgctggtgccgccgagcgaggcgacgccgcggcacgcgctgtggctgtccaacctggacctggcggtgcccaagacccacaccccgctcgtctactactacccgaggcccgccggcgccggcgccggggaggagggaaagggagagggagaagggtcgttcttcgacccggcgcgcctgcgggaggcgctgtccagggcgctggtgcccttctacccgctggcggggcggctggcggccggcccgggcggccggctcgagatcgactgcaccggcgagggcgcgctgttctgcgtcgcgcgggccgacttcaccggcgacgagatgttcgccgacttcgagccctcccccgaggcgcgccgcctgctcgtgccattcgccgcgtccggcgacccgccctgcgtgctcgccatggtccaggtgaccttcctcaagtgcggcggcgtggccgtgggcacgggcatgcaccacgtgacgatggacggcgccggcgcgatccagttcatccgggcgtggacggcgctggcgcgcggggaggcccccgcgtggacgccgtcgcacgaccggacgctcctgcgcgcgcgctccccgccgcacgtccccgcctgcgagcacccggtctactccccggcctacctcaacggggcgccgcggcccttcgtgacgcgcgtctacgccgtgccgcccaagctgctggcgggcatccggtcgcgctgcgcgccgggcgcgtccacgtactgcgcggtgacggcgcacctgtggcgcgccatgtgcgtcgcccggggcctcccggcgggcagcgacacgcggctgcgcgtcccggccaacgtccggcagcgcctgcgcccgccgctcccggcgtcctacttcggcaacgccatcgtgcgggacctggtcaccgtgcgggtggccgacgtgctgtcgcagccgctgggcttcgtggcggagcggatcaagcgcgcggtggcccgcgtcgacgacgcccgcgtgcgctccgtcgtcgactacctggagcttgagtcggacaagggcaaccaggcggcgcgcggccagttcatgcccgagtccgacctgtgggtcgtcagcttgctcggcatgcccatccacgacgccgacttcggctggggccgccccgggttcgtggcccccgcgcagatgttcggcagcggcacggcgtacgtcacgcagggacgcgacaaggacgaccccatcaacgtgctcttcgcgctcgagccagagtacctgaacaccttcgagaaggccttctacggggag

SEQ ID NO: 1177 - DNA, 1077 bp, Zea mays
atggcagggccggcgccggatcgggccgccctgactgtggggccgggcatggacatgccaatcatgcacgacagcgaccggtacgagctcgtgcgcgatatcggctccggcaacttcggcgttgcccgcctcatgcgcgaccgccgcaccagcgaactcgtcgccgtcaagtacatcgagcgcggcgagaagatagatgagaatgtccagcgtgagataattaaccatagatcattgaagcaccctaacattattaggtttaaagaggttattttaacaccgacccatcttgctattgtcatggaatatgcctctggcggtgagctttttgagaggatatgtaagaacgtgcgattcagtgaagatgaggctcgctacttcttccagcagcttatttcaggacaagtatgccaccgtgatttgaagttggagaacacacttctagatgggagtgacgctcctcgcttgaagatttgcgatttcggttattccaagtcatctgttcttcattcccagccgaagtccactgttggaacacctgcttatattgcacctgaagttttgttgaaaaaagaatatgatggcaagattgctgacgtttggtcatgtggtgtaaccctctatgtaatggttgttggcgcatatccttttgaagatccagaagagcctaagaacttccgcaagacaattcagcgtatcttgaatgttcagtacgcaattccagacaacgtgaacatatctccagagtgcaggcatctaatttcgaggatttttgttggcgatcctgctacgcgaataacaatccctgaaatccggaatcatagttggttcctgaagaaccttcctgctgatctgatggatgatgatagcatgagcaaccaatatgaggagcctgaccagccaatgcagaccatggatcagatcatgcagattttaacagaggccaccataccacctgcctgttctcgcagtataaatgtcctagctgatggactggacatggacgacgacatggatgatcttgattccgactcagatcttgatattgacagcagcggtgagattgtgtacgcaatg

SEQ ID NO: 1178 - DNA, 1536 bp, Sorghum bicolor
atggaagtggtggcgtcggcgccggggaaggtgctcatcgcgggaggatacctcgtgctggagcgccccaacgccggcctggtcctcagcaccaccgcccgcttctacgccgtcgtccgccccatccgcgacagcctccccgccgactcctgggcctgggcgtggacggatgtgaaagtgacttcccctcagctctcccgggaggccacatacaagttgtctctaacgaaatcgacactgcaattgacgtctgcaagggaatctacaaacccttttgttgagcaggccatacagttctccgtagcagctgctaaatcgatcatcactgataaggacaagaaggatgctatagataagctgctgttgcaaggtctgaacattacaattcttggttgcaatgatttctattcttatagaaagcagatcgaagcacgtggtcttcctcttactacggaggtattgctttcattgcctccattctcttcaattacatttaactcagaggttgctaatggaacaacgactggagagaaatgtaaacctgaagtagccaaaactggacttgggtcatcagctgccatgaccacatcagttgttgcagctcttcttcactaccttggtgctgttaacctttcatgtccgggacaaccttccggtgataatgcaactggacgaggtcttgacttggttcacgctattgcccaaagtgcacattgtatagcacaagggaaaattggaagtggttttgatgttagtgctgctgtctatgggagtcaacgctatgtaaggttttctccagaaatactctcctcggctcaggctacaggtgggactttcttgccagatgtagtatccgatattgttacacaaaggtgggatcatgagaataaacagttttcattaccccctctgatgacccttctccttggggaacctggaaccggaggatcatctactccatcaatggttggatctgtgaaacggtggcagaagtctgaccctgagaaatccaaagatacatggagtaaactggccattgccaattcagcgctggagaaccaactgagaatcttaaaaggactttctgaaaatcaccgggaggcatatgagtctgtagtgcggtcctgtagtcatctcacatatgggaagtggacagaggtggctactaaccaagatcaagaattaattgttagatcattgttggctgcaagggatgcttcccttgagataaggcttcacatgcgagagatgggtatagcagccggtgttccaattgagccagattcacaaacacagctactagatgccactatgaatatggagggtgttttactggctggagttcctggagctggtggtttcgatgcagtattctcagtgactttgggggatgcaaataatgctgtagcaaatgcttggagctcagctggcgttctgccacttcttgtacgagaagactgccgtggtgtttcattggaagatgctgacccaagaacaagggaggtctcagcagctgtatcgtccattcagattaat

SEQ ID NO: 1179 - DNA, 1098 bp, Zea mays
atggcagggccggcgccggatcgggccgccctgactgtggggccgggcatggacatgccaatcatgcacgacagcgaccggtacgagctcgtgcgcgatatcggctccggcaacttcggcgttgcccgcctcatgcgcgaccgccgcaccagcgaactcgtcgccgtcaagtacatcgagcgcggcgagaagatagatgagaatgtccagcgtgagataattaaccatagatcattgaagcaccctaacattattaggtttaaagaggttattttaacaccgacccatcttgctattgtcatggaatatgcctctggcggtgagctttttgagaggatatgtaagaacgtgcgattcagtgaagatgaggctcgctacttcttccagcagcttatttcaggagtaagctactgccattcaatgcaagtatgccaccgtgatttgaagttggagaacacacttctagatgggagtgacgctcctcgcttgaagatttgcgatttcggttattccaagtcatctgttcttcattcccagccgaagtccactgttggaacacctgcttatattgcacctgaagttttgttgaaaaaagaatatgatggcaagattgctgacgtttggtcatgtggtgtaaccctctatgtaatggttgttggcgcatatccttttgaagatccagaagagcctaagaacttccgcaagacaattcagcgtatcttgaatgttcagtacgcaattccagacaacgtgaacatatctccagagtgcaggcatctaatttcgaggatttttgttggcgatcctgctacgcgaataacaatccctgaaatccggaatcatagttggttcctgaagaaccttcctgctgatctgatggatgatgatagcatgagcaaccaatatgaggagcctgaccagccaatgcagaccatggatcagatcatgcagattttaacagaggccaccataccacctgcctgttctcgcagtataaatgtcctagctgatggactggacatggacgacgacatggatgatcttgattccgactcagatcttgatgttgacagcagcggtgagattgtgtacgcaatg

SEQ ID NO: 1180 - DNA, 1059 bp, Zea mays
atgggggacgccgccgccgccgcagcctccacgtccgctcccaccacgcccacctccattctcatctgcctggaagacggcagcgaccttctcgccgatgccgacgatggcgccggcactgacctagttgtcgcccgcgacgagcgtctgcttgtcgtggaccaggacgaggagtatgtagcgctgctcctgtccaaggagagcgcgtcaggcggcggcggcggcccggtggaggaaatggaggactggatgaaggccgcgcgctccggatgcgtccgctggatcatcaagaccacggcgatgttccggttcggcgggaagaccgcttacgtcgcggtgaattacctcgatcgcttcctggcgcaacggcgagtcaatagggagcatgcgtggggtctgcagctgctcatggtggcgtgcatgtcgctggcgaccaagctggaggagcagcacgctccgcggctgtcggagttgccgctggacgcgtgcgagttcgcgttcgaccgcgcgtccgtgctgcggatggagctcctcgtcctgggcaccctcgagtggcggatggtcgccgtcacccccttcccctacatcagctgcttcgcggcgcggttcgggcaggacgagcgccgggcggtcctcgtgcgcgccgtggagtgcgtcttcgcggcgatcagagcgatgagctcggtggagtaccagccgtcgaccatcgccgtagcatccatcctcgtcgctcgcggcagggagacgcccgccgacaatctggacgcgctcaaggcgatcctgggctcatcatttccacagctagacaccgggcatgtgtactcctgctacagcgcaatgattcgggaggacgacaagtcgccgacgcagtcgacgtcgacgtcgacgggggtggcgtcctcgggcgtctctgtcgccgcgcacgccggggggagcgggagtcccagccccccgggcgcttccgtgtccgtgggcgccaataatgccgctggcaccgccccgccggcaaccacggacaaccgcaacaagaggagacggttgcgctcacctcagcgacag

SEQ ID NO: 1181 - DNA, 1191 bp, Zea mays
atgccgatctcctccacgctcgccacacgcctccgcaccggtcattcttccgcacccaaacccgcacggcggagcccctacaccagacccaagcccagcggcggcgccaaggcctcccgcccttccccccgccttgatccagcgaccacgagacctctcgaaccctctcagaaggcggtgcgatccggtttgggtcgccgtgccgagcccgatgtgcccgacgcgcgcgcggctgagtcgaagccgaaactggcgcatggagacgataggccgccccttgaggagaagcgccgctgcagcggtgagggcggattcgtcttcctctgcgcccttgctggacacaccgaggctatcggtgggatttctctgccgtctggttcgaacaagctctactccggcagcgtcgacggatctgttcgcatctgggactgcaattccggcaagtgtgttgatgtcatcaagatgggaggcaaggttagctgcatgatcacccatggcccatgggtactcattggaattccaaagtttgtggaggcatggaacacaaagacagggatgaaactaagatttcaagggccttctagtctggtttgttccatggctatcacggatgagatgctgtttgctggtactggagatggtcgcatcatggcctggagatttcctgctaaggaaagtaacactgaaccagtgttgatcctcagtggccatcaacggccagtgatttcactgtctatctcggcaagaagactttactctggctcactggacaagaccatcaaagcatgggaccttacaactcggcagtgtgtccaaacactctctgagcataaagctgctgtaacatctgtgctttgttgggatgagaagttattatcttgctcccttgacaagactgtaaaactctggactctgtcagagtcaggaaaccttcaagtcaaatatacccatgctgaggagaatggtttgcgcacactcttcggcatgcaccgagttgggaagacgccagttctcttgtgctccctccacaacagcaatcgcgtccgcttgctcgacttgccatcgttcgacgggattggaacactgttgtccacgaaggaagttaggaccatcgagcttgcggctggtgggctgctcttcaccggagactgctccggcgagctgaaagtgtggaggtgggcgcccaaggac

SEQ ID NO: 1182 - DNA, 1020 bp, Zea mays
atggaggtcgaataccacgagctcttcacctgcggctggctgcccgctgccgcatcgcccaaggcgctcgtcttcctctgccacggctacggcatggagtgcagtggcttcatgagagaatgcggcgtgcggctggcggcggccgggtacggcgtgttcgggatggactacgagggccacggcaagtcgatgggcgcgcgctgctacatccgcagtttccgccgcctcgtcgacgactgcggccatttcttcaagtccgtctgcgagcttgaggagtaccggggcaagagccggttcctgtacggcgagtccatgggtggcgcggtggcgctgctgctgcacaccgaggaccccgccttctgggacggcgccgtcctcgtggcgcccatgtgcaagatatcggagaaggtgaagccgcaccctctggtgatcacgctcctgacgcaggtggaggacgtgatccccaggtggaagatcgtgcccaccaagcaggacgtcatcgacgccgccttcaaggaccccgtcaagcgtgaaaagatcaggaggaaccagctgatctaccaggacaagccgcggctcaagactgcgttggagatgctcaggaccagcatgtacatagaagacagcttgtcacaggtgacgctgccgttcttcgtcctgcacggcgaggccgacacggtgacggacccggaggtgagccgcgcgctgtacgagcgttcggccagcgccgacaagaccatcaagctgtacccggggatgtggcacggcctcaccgccggggagcccgacgagaacgtggaggccatcttctccgacatcgtgtcctggctcaaccaccgcagccggagctgggccgtggaggaacgccatatgaccaggaagctggcgccagctccggccaagtccatcgaaggccacggcaccgtggacggcaaagtgcacacacaacaagggcgccctcggcggcgccagggcttcctctgcgggcttgccggccggacgcatcaccacgcggagatg

SEQ ID NO: 1183 - DNA, 993 bp, Zea mays
atggcgaagcagtcgtgctgccacaagaagaagcttaggagagggctctggtcccccgaggaggacgagaagctcatgaaccacattgccaagtacggccacggctgctggagctccgtacccaagcttgcaggcctcgacaggtgtggcaagagctgcaggctgaggtggataaactacctgaggccagacctcaagaggggcacattctcgcaagaggaggaggacctcatcatacacctccactccttgctgggaaacaagtggtctcagattgcggcccagctgcctggccggacggacaacgaggtcaagaacttctggaactcgtacatcaagaagaggctcagggagcgcggcatcgaccccgccacccaccagccgctcgccgagcctgccgccgcagccactgccaccaccaccaccacggtctcccgccgcgcggtgtttggggacgtcgacctcatcccgactactactactactacaatccaggtgccgccgccgtcgttcgagggcggcccaatgctggagagcgtgaagctagcggtggagctggactggcccgtcgctggcgacggggtaacgtcaaggccatgctacctgcaggggggctgcttcgacatggacgcgctgcagcagcactgcggctccatcccgccggtgccggtcgtcccgtcggcctccgccagctccagcacgctgacctcgatggcggaagcggaacactgcagcaccaacaacgtcgccgccggcggcaacctcccatggctggagctcggggcaaacgcggtggctgacgccggcggccacgtcgtcggcagctgctacgccggcgcgctggacgagctcaggtggtcggagtacttcgacagtgccttccaggccgccgagagccagcaaggcgccctgcagccggggcagtgtgtctacggcggcaaggatgacgtcccggtgcacttcgacgtccatggcgggctaagcaactggtgc

SEQ ID NO: 1184 - DNA, 1545 bp, Sorghum bicolor
atggtggccaagaagccgcgggtcgtcgtagtgggcgcgggcgtggccggcctcacggcggcgcaccggctgtgcgccggaggcggggacaggttcgaggtgacggtcgtggaggccggcgcccgcgcgggcgggcgggtgctcacgtccgagttcgcgggccaccgcgtcgagatgggcgccacgtggattcagggcatcgacgggagccccgtgtacgcgctcgcgcgcgacgccggcgcgctcgcctgcgacagggacgctcccccgtacgagcgcatggacgggtcccccgaccgcgtgctcacggtcgccgagggcggcgaggtggtcgacgcggaccgcgtggccaggccggtcgaggagctgtacaggggcatgatggaggccgcgcgcgccggcgagtccagcggcggagggagtgtcgaggagtacctgaggcgcggcctccgagcgtaccaggcggcgcgccagggcggcaaggagctggaggggatcgaggacgcgctgctcgccatgcacatcaaccgggagcggacggacacctccgccgacgagctcggggacctcgacctcgccgcggagggcgagtaccgggacttcccaggcgagcacgtcacgatccccggcgggtactctcgcgtcgtcgaccgcctcgtcgcggcactcccgccgggcaccgtccgcctcggcctccgcctccgccgcctcgactggagcgacacccccgtgcgccttcacttcgccgaggatggcgcgacgacggcgatcaccgccgaccacgtcatcctcacggtgtcgctgggcgtcctcaaggcgagcatcggcaaggacgcccacgccgcgggcggggtcgccttcgacccaccgctcccgcagttcaagcgcgacgccgtcgcgaggctcggcttcggcgtcgtgaacaagctgttcatggagctggaggccgtgccagcggcgaaaccggaaggcgacggaggtggcggcggcggcggcggcagcgaacacccgctagccatgtctgcgccaccggagttcccgttcctacacatggcgttccgggggcacgtatcggagatcccgtggtggatgcgcggcaccgagtcgatctgccccgtccacgggggctccagcgtcgcgctggcgtggttcgccgggcgggaggccgagtacctcgagtcgctccccgacgacgaggtcatccgcggggtccaggccacgatggactccttcctcccggccccggacccgcgcgacggggccaaggcgacgtcacggtggagggtgaagcggatcaagaggagcgggtgggcaacggacccgctcttcctggggtcctacagctacgtggccgtcgggtccagcggcgaggacctcgaacggatggccgagccgctgccacgcgggtcgaacgttggcggtgcgccgccgcttcgcgtcctgttcgccggcgaggcgacgcaccggacgcactactcgacgacgcacgccgcgtacctgagcggtgtgagggaggccgagcggctgctgcagcactacggaaat

SEQ ID NO: 1185 - DNA, 1695 bp, Zea mays
atggagttcgcctcccgcagtcgacccaccaccacagcagccgacgacgaagaaaacgactgtcttcgccgcttccccgaccatccgccgtcgcagccgcagggacacggcgagcccaatacatccggggtagacgctgcactactggcgaggaggcagaaactgctgttggagctgctcaagggatccatccaacagggcttgatcttgcgtgagctcgtggagactgagcacgccatgggctttattgccggcagccacaatcctgtgccagcactcccacaggatttcttgcgttgctggacgccgtcgatgtctactttggaagcgcatctccgccagccatgcccttgtggctgtggaaactccatggcggtcagggcacctccagtgaacccacacttggagcggtcatcgcatgcacccgagcaaacaaggccaggcaatgatgctgagcagcatcaagaggacaggtcatctggggtgaggacacatccatttaacggccattttaaactgtgtcattcaccgagcaagcagactccagtgccaggcaaagctggtgtcaatcagatgcggccatcgtccggacaccaacaggccattgtttgggaaaagattggtgtggaggttgttcataacatgcagccgttgaacgaaatcaagaaccacagcagtgaggggcagaaggccgtagactctgccattgaggtttgtgtaaagaaacccatacaacagcgtcttcagtacaaaccagtggatcaggagaatgcagcaaacaatgagcatgcacctgagcagacaaggcaaggcaatgatgctgagcatcatcaagagggcaggtcatctggagtgaggacacatccatttaacggctactttgaactgtgtcgttcaccgagcaagcagattccactggcaggcaaagctggtatcaatcaggtgcgtccattgtcaggacaccaacagggtgttgtttgggaaaagattggtgtggaggtagttcataacatgcagccattgcacgaaatcaagaatccgagcagtgaggggcggaaggccatagactctggcattgaggattgtgtaaagaaacccatgcatcatcgtcttcagtacaaaccagtggatcaggagaatgcagcaagtaatgaccagaagagtacagagttcaacgagccaacagctgagggaacttccgctggggtgaaaaggaagctgaccaccccaagctcacctgtcaagaagcagaagccactcgggcaatggagctgcactatctgccaggctaacccagctagccagcgccaacttgagcaacaccttgccggcaagcggcaccagtcaaatgtcgcagcactgcaaccatctcagagcaacagcagcagccctgagcctgacacaaaagcgacgcccgcgaggagcaggatcatcgcgacgaacgcgcagcaagacggcaagcaggatgtgccggagaacagatggacgtgtacactctgccgggccaagtgctacactgaattgaactactacagccatctcgggggcttgtggcaccgggagaaggcacaggccaggcgcgaggagcacttgaggttctactgctcggtgtgcgacctgcaatgcaacagcgagaaaatgctggagtcacacctcggcggtaggaggcatcgggagactctggaggcgcgcgac

SEQ ID NO: 1186 - DNA, 1674 bp, Zea mays
atgactgtgccttgtgcagtggacccattgctggtgattagggaagcgctgctgtcacagcttcagaaggatcgtcttcgccaggagatcatccaggttgagttggctaagatagagcgtgccatggtcctgtgcaagtgcaacagctcacatcatggtattgccgctgatgatgtggaatggactaggcctgctcccttcaccttcagggagcagtccatgcgaccttggcgatggtcagtcagtcaagaatgttatgtcgatgtggatgaggtccatgatcgaaagcaaaaggagggaaggcacaggagtgtagtgttgaagtctgagaagcctgccatggaagatggtgaatgcttgagaccttgttgtaatggtaaggcaagtcaggagaattcaaaagtcgaagatcagaaatcacaagaatccagtgagaccatacagcccaagacgactttgccttcagtgaaatgggaactgacaggaataacaataccagttaagaaaaagaaacgacaccagaaactgagttgtgaaatctgccaggtgcaagcaactagtgagcacagcttacaagaacaccgtgcagggcgtaagcaccaattaaaagaagcaattgatcagaaggtacaattaacagaagaatcctcttccagcacagagcagaaaacatcctcgataaaatggagctgcagtacatgccaggccaacggtacaagcgaatcagacctgaaggagcatctaaatggaagaacacaccgacaaaacattaaagcgcaactcatggagagtgatggcattgctaagactaatgagctgcaggaaccagagtgccctaagaacaatgcaccacaacattcagagaagccacctccgatgagttctacccattgcctagcgaactctactcatgaattggagttacgagggcaccttttagctaagcctcaagctctactggacgaaatcagtaacctgtcaaggaattctgagtcgcgagaagccacggtgcttccgaacattgcaccgcaacatacagagcagactccaggatcaaattgtagcatacttcaagctgattctgattgcaaattagacttggagcaccaatttggagcgaagatacaccaactgaatgtccaggacctacttgaagaagccaagaaaacaggagattttccaccagaaattgccaaggaccagcaaccgccctctgaatggggttgtgttatctgtcaggcaaaatgttactccgcacctcaattcgctcagcactgcagaggcaagaaacaccaaaagaaggtggaggcactacaaggaggcgtggatgccaaatcaagtaatctgacgacagtgcacaaagcagcttcaaatggtcctgactgcagcagttcgagttcagagaaggtggaggatcagacagcattgtggtcgtgcggggtttgcaatgtgcagtgcaacagcgagagtatgcttgcaggccattgtaaggaggaggaacatatggagaaacagaagttgcgggatttctgcgaggtctgcaatttgaagtgcaacagcgaaaagatgcttgctcaccatctttctgggagtaagcaccagaaaaggctcagtgcgaacaagcgaaatgcagttgtggcttgggtcccggtggcactgaggggaattgtacag

SEQ ID NO: 1187 - DNA, 1449 bp, Zea mays
atggaggatcaggcgctggcgccgctgctgcagccgctcccgctcggcgaaacgggggccatcaaggggcgcgcgaggcgggcggcgctggagtggtgggtggagtcgaagaagctatggcacatcgtgggcccggccatcttccaacggatcgcgctgtacggggtcaacgtcgtcacgcagtccttcatcggccacctcggcgacctcgagctcgccgccttctccattgctgccaccgtcgtcgggggcttcaacttcggtttcctgctgggaatggcgagcgcgctggagacgctgtgcgggcaggcgttcggcgccaagaagcaccacatgctgggggtgtacctgcagcgctcctggatcgtgctcctcatcttcgccgccgcgctgacgccgacgtacatcttcatggaggacctgctgctgctgatcgggcagtccccggagctgtcgcggctggcggggcagatgagcgtgtggctgctcccgcagcacttcgccatggcgatgctgctcccgctcacgcggttcctgcagagccagctgaagaactgggtgaccgcgatcaccgcggccgtcgcgctcgccatccacgtcgtcgccacctacgtgctagtgcgtctcctcgacttcggcatcgtcggggccgtcgcctccgcggacatggcgtggtggctggtcgtgctgggccagtacgtctacgtcgtcggcggctggtgcccgctgtcgtggaaggggttcaccatggaggcgttcgccgacttctgggagttcatcaagctctcctcggcctccggagtgatgctctgcttggagaactggtactaccgagtgttggtgttgctgacagggtacctggacaacgctgaaatcgctgtggatgcactctccatatgtcagacgatcaacggatgggagatgatgatcccgttcggcttcttagcagcaaccggggtgcgagtcgcaaatgagctcggcgcagggagcggcaaaggtgcgcgcttcgccatcgtggtgtccatcacgacgtccgtggtgatcggcctcgtcttctggtgcctcatcctctacttcgacgacaagatcgcgcttctcttcacgtccagcgcggtcgtgctcgacgccgtgcaccacctgtccgtgctgctcgcattcaccatcctgctcaacagtgtgcagcccgtcctctcaggggtggccgttggttcaggatggcaagcactggtcgcctacgtcaacgtcggcagctactacctcatcggagttcccttgggtatcgtactcggttggccgctgcacttcggagtagggggaatctggtccgggatgattggagggaccgccgttcaaacgctcatactggcatacctcactgccaaatgtgattggcacgaagaggcgaagttagctagtatgagaatgaagaagtgggccgacgagtcgaaa

SEQ ID NO: 1188 - DNA, 1566 bp, Zea mays
atggcgccccgcgcccgcgtcgccacgtacaaggtgtgctgggtcggcgggtgcttcagctccgacatcctcaaggccatggaggtcgccgtgacggacggcgtcgacgtgctctcgctctcccttggcggcggcacggcggagtactaccgcgacagcatcgcggtgggcgctttcagcgccatggagaaggggatcttcgtgtcctgctccgcgggcaatgccggcccgggcgccgcgacgctgtccaacggcgcgccgtggatcaccaccgtgggcgccgggaccatcgaccgcgacttccccgcctacgtcacgctcggcaacggcaagaactacacgggggtgtccctgtacagcggcaagccgttgcccaccacgccgatgcccttcatctacgcggggaacgcgtccaacagcagcatgggccagctctgcatgtccggcagcctgatcccggagaaggtggccggcaagatcgtcctttgcgaccgcggcaccaatgccagggtccagaagggcttcgtcgtcaaagacgccggcggcgccggcatggttctcgccaacaccgccgccaacggcgaggagctcgtcgccgacgcgcacgttctcccgggctccggcgtgggggagaaagccggcaacgccatgagggactacgccatgtcggatccgaaagcgacggccaccatcgtgttcgccgggacgaaggtcggcgtcaagccgtctcccgtcgtcgcggcattctcctcccggggccccaacactgtgacgtcgagcgtcctgaagccggacatcatcgcgcccggcgtgaacatcctggcggcgtggtcggggtccgtcggcccgtcggggctccccggcgacggccgccgcgtcggcttcaacatcatctccggcacgtccatgtcgtgcccgcacgtgagcgggctcgccgcgctgctccgcgcggcgcacccggagtggagcccggcagccatccggtcggcgctgatgacgacggcgtacaacgagtaccccggcggcggcaacggcatcctggacgtggccacggggcggccggccacgccgctggacgtgggcgccggccacgtcgaccccgcgaaggccgtcgacccggggctggtgtacgacatcgcggcggcggactacgtggacttcctctgcgccaacaactacgaggcggcgcagatcgcggcgctcaccaggcagcacgcgtccgaggggtgcagcgccaaccgcacctacgcggtgaccgcgctcaactacccgtccttctccgtggcgttcccggccgccggcggcacggcgaagcacacccgcacggtaaccaacgtcgggcagcccgggacgtacaaggtggccgcgagcgccgccgccggcggcaccccggtgacggtgaccgtggagccgtcgacgctgagcttcagcagggccggcgagaagcagagctacacggtgagcttcacggcgggcgggatgccgtcgggcaccaacgggttcgggcggctcgtctggtccagcgaccaccacgtggtcgccagcccgatcgcggcgacgtggacc

SEQ ID NO: 1189 - DNA, 927 bp, Zea mays
atggcggcaaccgcaatgtgcccctccccctcggccgcaataactcgccacatccatgctcgtcgctcctgtgctgctgcttccttgtccctccgccgctcgggcttcctggggcgcgtcgtgctggccgcggtgccggtggccgtggacgccacccggcgccgccgcgtctccgtgtcggtgcggatggcctgggacggtccgctctcgtcggtgcgcctcatcatgcagagcaggaacgcgaagctgagcgagaagctcaaggagcacatcgaggacaaggtgggtcgggcggtgtccaagcactgccacctggtccgggaggtagacgtgcgcctctccgcgcgcggcggcgagctcggccggggccccaagacgtcgcgctgcgagatcaccctcttcaccaagcgccatggcgtcctgcgcgccgaggaggacgccgagtccacctacgccagcatcgacctcgccgccgccatcgtcaagcgcaagctccgcaagatcaaggagaaggagacggaggtgcgccgcggcggagacgctgacggcgtctgggacgagatcccgccggccgacctgctgccccccgccgaggccgacgacctggaggcggccgtgggcgctgaggacgaggagacggtgctcgccaaggtggtgcgcaccaaggtgttcgagatgccgccgctcacggtggaggaggcgctggagcagctggagaacgtggaccacgacttctactgcttcagggacgaggccacggggcaggtgaacatcctctaccgcaggaaggaaggcggatacggcctcatcatccccaagaacgacggcaaagtggataccgttggcgttgtgccaccacccgccgtcgctgcggagccggagccggagccgtcctacgcagtgcacgccgctgacaacaacaactcc

SEQ ID NO: 1190 - DNA, 1578 bp, Zea mays
atgctgccggctggcctcagcagcatgcagcatgtgcaagagatcgacctgtcctggaataacttcaacggtgagatcttggccaacatcggaaactgcattgagttgacagtgctcgacctctcacacaactcgcttgccggcaacctcccttcgacactcagccagctgaagaacctggaaagcctcaatgtcgcgaacaacaacctcagtggtgagatccccattagcctggccaattgcgacaggctgaaatatctcaatctgtcatacaacgacttcagcggcggcgtccccaccaccggccctttcgtgaatttcagctgtctctcctacctcggcaaccgtcgcctctctggtcctgtgctcaggcgttgcggaggtcgccaccgctcgtggtaccagtcccggaagttcgtagtcatcttgtgtgtctgctcggcggctctggcgttcgcgctgacgatcctctgcactgtcagcgtccgcaagatccgcgagcgggtcgcggcaatgcgggaggacatgttcagtggccgccgcggcggcggctcgtcgccagtgatgaagtacaagttcccccggatcacgtacagggagctggtcgaggccaccgaggagttcagcgaggaccggcttgtcgggacgggcagctacgggcgggtgtaccgcggcacgctacgcgacggcaccatggtggccgtgaaggtgctgcagctccagacggggaactcgaccaagagcttcaaccgcgagtgccaggtcctgaagcgcatccggcaccggaacctcatgcgcatcgtcacggcgtgtagcctgccggacttcaaggcgctggtgctgccgttcatggccaacggcagcctcgagcggtgcctctacgcggggccaccggcggagctgagccttgtgcagcgggtcaacatctgtagcgacatcgccgaggggatggcctacctgcaccaccactcgccggtcaaggtcatccactgcgacctcaagccgagcaacgtcctcatcaacgacgacatgaccgcgctcgtctctgacttcggcatctccaggctcgtcatgagcatcggcggggtggccaacactgccgacgtcggcgcctccacggcgaacatgctgtgcggctccatcggatacatccctccagagtacggctacggctcgaatccgacgacaaagggcgacgcgtacagcttcggtgtgctggtgctggaaatggtgacaaggaggaagccaaccgacgacatgttcgacgccggactgagcctgcacaagtgggttaagacccactaccacggccgcgccgacgcagtggtcgaccaggcactggtgcgcatggtccgggaccagacgcccgaggtgagaaggatgtcggacgtggccatcggtgagctactggagcttggcatcctctgtacccaagagcaatcgtccgctcggccaaccatgatggacgcagccgacgacctggaccgcctcaagcggtacctcggcggcgacaccacggccaccttcgcgtcatcgctgggattctcctccaccacgctagaagtggaagacatcgat

SEQ ID NO: 1191 - DNA, 2931 bp, Zea mays
atgggtggagggcaaatgcttgcctgccttcctctaggtctgatcacgctcctctcgctctcgctgagctccagctgccaaatcgacccccaaacacatgccctcctccagttcaaggacggtctgaacgaccccctgaaccacctcgcgtcatggacgaacgccacctccgggtgccgcttcttcggcgtccggtgcgacgacgacggctccggcacggtcaccgagatctcgctgtccaacatgaacctcaccggcgggatctcgccctccgtcggggccctgcacggcctggcgcgcctgcagctcgactccaactcgctgtcggggcccgtgccgcctgagctggccaaatgcacgcagctccgcttcctgaacctgtcctacaacagcctcgccggggagctgccggacctgtccgcgctgacggcgctccaggccctcgacgtcgagaacaatgccttcaccggccgcttcccggagtgggtcagcaacctgtccggcctgaccacgctcagcgtcggcatgaacagctacggcccaggggagacgccgcggggcatcggcaatctcaggaacctgacgtacctgttcctcgcgggcagcagcttgacgggggtcataccggactccatcttcgggctcaccgagctggagacgctggacatgtccatgaacaatctcgtcggcaccatcccaccggccatcggaaacctccggaacctgtggaaggtcgagctgtacaagaacaacctcgcgggcgagctcccgccggagctcggggagctcaccaagctgcgagagatcgacgtgtcccagaaccagatcagcggcggcatcccagcggcgttcgcggcgctcacggggttcacggtgatccagctctaccacaacaacctgtcggggccgatcccggaggagtggggagacctgcggtacctgacgagcttctccatctacgagaaccggttctccggcgggttcccgcgcaacttcggccggttctcaccgctcaacagcgtcgacatctccgagaacgccttcgacgggcctttcccgaggtacctgtgccacggcaacaacctccagttccttctcgctctccagaacggcttctccggtgagttcccggaggagtacgcggcgtgcaacagcctgcaacgcttccggatcaacaagaaccggttcaccggcgacctaccggaaggcctgtgggggctcccagcggcgacgatcatcgacgtgtccgacaacgggttcaccggagccatgtcgccgctgatcgggcaggcgcagagcctcaaccagctgtggctgcagaacaaccacctcagcggggcaataccgccggaaatcggccggcttgggcaggtgcagaagctctacctatccaacaacaccttctctggctccataccgtcggagatcggcagcctgtcgcagctgacggcgctgcacctggaggacaacgcgttcagcggcgccttgccggacgacatcggcggctgcttgaggctcgtcgagatcgacgtctcccagaacgcactgtccgggccgattccggcctcgctgtcgctgctgtcgtcgctcaactcgctgaacctttcctgcaacgagctcagcgggccgatcccgacgagcctccaggcgctcaagctcagctccatcgacttctcctcgaaccagctcaccgggaacgtgccgccggggcttctggtgctcagcggcggcacccaggcgtttgcccggaaccccggcctctgcattgacggcaggtccaacctcggcgtctgcaacgtggacggcggccacaaggacagcctcgccaggaagtcgcagcttgtgctcgtgccggcccttgtctcggcgatgctgctgctcgtggccggcatcctgtttatcagctaccggagcttcaagctcgaggagctcaagaagagagacctggagcacggcgacgggtgcgggcagtggaagctggagtcgttccacccgctggacctggatgctgacgagatctgcgccgtcggggaggagaacctgatcgggtcgggcggcacggggcgcgtgtaccggctggagctcaagggccgtggcggcggcagcggcggcgtggtggccgtgaagcggctgtggaagggcaacgcggcgcgagtgatggccgccgagatggccatcctcggcaaggtccggcaccggaacatcctcaagcttcacgcgtgtctgtcgcgcggcgagctcaactttatcgtgtacgagtacatgccgcgcggcaacctgcaccaggcgctccggcgggaggccaagggcagcgggcgcccggagctggactggcggcggcggagcaagatcgctctcggcgcggccaaggggatcatgtacctccaccacgactgcacgccggccatcatccaccgcgacatcaagtccaccaacatcctgctcgacgaggactacgaggccaagatcgccgacttcggcattgccaaggtcgccgaggattcctccgactccgagttcagctgcttcgccggaacgcatggctacctcgcgcccgagctggcctactcgctcaaagtgacggagaagacggacgtgtacagcttcggcgtggtgctgctggagctggtcaccggccggagcccgatcgacccgcgcttcggcgagggcagggacatcgtgttctggctttccagcaagctcgcctcggagagcctccacgacgtcctggacccgcgggtcgccgtgcttcccagggagagggacgacatgctcaaggtgctcaagatcgccgtgctttgcaccgcaaagctgccggcgggcaggccgaccatgagggacgttgtgaagatgctcaccgacgccggcacggggccctgcagcccgcgcggacagccgccgtcaagggtctgcagcaacaagagctgctgc

SEQ ID NO: 1192 - DNA, 2334 bp, Zea mays
atggcgaccaccatcaccaggctcttgcaccacctggcgctcttactcctcgttgtccagttcgccgacgcagttttcgtcccaaagaccaagaactacgctgtgctgaagcctcagtcatggggcaccacctacatagtccatgccaacttcctcgccaagccgccccacttcggctccctgaaggagtggtaccgttccatggtgaccacccacgcctcttccactcgggcggcgagctccagcagcatcctgtacacctacgacaccgtcatgcacggcttcgcggtccagcttactggcgacgaggcccggctcatgtccagcgcgcccggcgtgatcggcgtgtacgaggacagggtgctctaccctcagaccacgaggtcgccggggttcatgggcctcgaacccggcaacggcgcctggaagcagaccgacttcggtgacggcgtcatcatcggtttcatcgacggcggcatatggcccgagagcgcgagcttcaacgacagcgggctcggccccgtccggtcggggtggcggggcaagtgcgtcgacgcccacggcttcgacgccaacttgtgcaacaacaagctggttggagccaaggccttcagcgctgctgcggacgccgtggcgggtaggaagagccgtggcgtcccgtccccgagggacaaggatgggcacggcacacacgtggcctctacggccgccggtgctgaggtccggaacgccagcctctacgcgttctcccaggggaccgctcggggaatggcgcccaaggcgaggatcgccatgtacaaggcatgcagcgagaatggctgcatgcatgcggacatcgtagcagcggtggacgctgcggtgaaggacggcgttgacatcatctccatatccctcggacgaagttttcccatagccttccacgatgacgtcctcgcggtcgccttgtttggtgcagagcgcaaaggcgtcttcgtcgtcgtagccggcggcaatgccggcccgcaggcagctagggtggtcaactcagcgccgtggatgaccaccgtaggcgccgccaccgtggacaggctgttcccggcgcacctcacgctcgggaacggcgtcgtgctcgccggccagtccctttataccatgcatgccaagggcacgcccatgatcccgttagtgtccacggacggcatcaattcgtggacgcccgacacggtcatggggaaaatcgtggtgtgcatgttcggagcaagcgacgcggatggcatcttgttgcagaatgctggtggagcagggatagttgatgtggattcttacgagtggtctcgtgatggttccgcgctttattccttcacccttccgggtctcacgctcagctacaccgccggcgagaagctcagggcgtacatggtctcggtgccctatccggtggcgtccttgagcttcggctgtgagacggtcatcagccgcaagaatcgggcgccggtggtggcgggattctcgtcgcgtggccccaatcctgccgcacccgagctcctcaagcccgatgtcgtcgcgccgggagtgaacattcttgcggcctggtcaggcgacgcaccactagcgggggtcttcgttcccgatgggaggagagcgaactacaacatcatatcggggacttccatggcgtgcccgcacgtcgctggcatcgcggcactgatcaagaagaagcacccaagctggacgccggccatggtacggtcggcgctgatgacgaccgccgggacggtcgacaacagaggcggacacatcctcgacaacggtcacacggacacccttggccgcaccgacaacgtcagggtcgcgacgccgctggtggccggtgccgggcacgtccacccggacctcgctctggacccgggcctcgtctacgacgccggcgagcgcgactatgtcgacttcctgtgcgccctgaactacaccgcggaacagatgcggcggttcgttccggacttcgtcaagtgcacgggaacgctcgccggcggccccgccggcctgaactacccgtcattcgtcgtggccttcgacagccgcaccgacgtcgtccgcacactgacgcggaccgtgaccaaagtgtccgaggaggcggaggtgtacaccgcgactgtcgtcgcgccggagcacgtgaaggtgactgtcacgccgacgaccttggagttcaaggagcatatggagacgaggagctactcggtggagttcagaaatgaagccggatggcaccgagaggcagggtgggacttcgggcagatcatctgggcgaacgggaagcataaagtcaggagcccggtggcgttccagtggaagaac

SEQ ID NO: 1193 - DNA, 2349 bp, Zea mays
atggcgacaaccatcaccaggctcttgcaccacctagcgctgttcctcctcattgtcgagttcgccgacgcagttctcatcccaaagaccaagaaccacgctgcgttgaagcctcaggcatcgagcaccacctacatcgttcatgccaacgacctcgccaagccgccccactttcgctccctggaggagtggtaccgttccatggtgatcacccacgcctcttccactcgggcggcgagctccagcagcatcctgtacacctacgacaccgtcatgcacgggttcgcggtccagctcactggcgacgaggcccggctcatgtccagcgcgcccggcgtcatcggcgtgtacgaggacagggtgctctaccctcaaaccacgaggtcgccggggttcatgggtctcgaacccggcaacggcgcctggaagcaggccgacttcggtgacggcgtcatcatcggcttcgtcgacaccggcatatggcccgagagcgcgagcttcgacgacagcgggctcggccccgtccggtcgagctggcggggcaagtgcgtcgacgcccacgacttcaacgctagcttgtgcaacaacaagctggtcggagccaaggccttcatcactcctgctgcggacgccgtggaagagaggaagagccgtggcgtctcctccccgagggacaaggaaggacacggcacgcacgtggcctcgacggccgccggtgctgaggtccggaacgccagcctctacatgttctcccgggggaccgcgcggggaatggcacccaaggcgaggatcgccatgtacaaggcatgcggcgtgggaggctactgcaggaatgcggacatcgtagcggcggtggacgctgcggtgaaggacggcgttgacatcatttccatgtccgtcggaggagctcgtcccacagccttccacgacgacgtcgtcgcgatcgccctcttcggtgcggagcgcaaaggcgtcttcgtcgtcctctctgctggcaacaacggcccgcaggcaactacggtgatcaactcggcgccgtggatgaccaccgtaggcgccgccaccgtggaccggcagtacccggcgcagctcacgctcgggaacggcgtcgtgctcgccggtcagtccctttataccatgcatgccaagggcacacacatgatccagttagtgtccacggacgtcttcaataggtggcacagctggacgcccgacacggtcatgggaaaaatcatggtgtgcatgcacgaagcaagcgacgtggatggcatcatcttgcagaatgctggtggagcagggatagttgatgtggatcctcaggagtggtctcgagatggttccgtggcatatgccttcactcttccgggtctcacgcttagctacaccgctggcgagaagctcagggcgtacatggcatcggtgccctatccggtggcgtccttcagcttcgcctgtgagacggtcattggccgcaacaaccgggcgccggtggtggcgggattctcgtcgcggggccccaaccttgtcgcactagagctcctcaagcccgacgtcgtcgcgccgggagtgaacattcttgcggcctggtcgggcgacgcatctgtctcgggatattccgacgacggcaggagagccgactacaacatcatctccggaacgtccatgtcgtgcccccacgtcgctggcatcgcggcgctgatcaagaagaagcacccaagctggacgcctgccatggtacggtcggcgctgatgacgacggcccgtacggtcgacaaccgaggcggatatatcctcgacaacggtcatagcgtcatcgtgggccgcagaatcgacaacttcagggtcgcgacgccgctggtggccggggccgggcacgtccagccggacctcgcgctggacccgggcctcgtctacgacgccggcgagcacgactacgtccacttcctgtgcgccctgaactacaccgctgagcagatgcggcggttcgttccggacttcgtcaactgcacaggaacgctcgccggcggccccgccagcctcaactacccgtcgttcgtcgtggccttcgagaactgcaccgacgtacgcacgctgacgcggacgctgaccaaagtgtccgaggaggcggagacgtacagtgtcaccgtcgtggcgccggagcacgtgaaggtgaccgtcacgccgacgaccttggagttcaaggagcagatggagacgaggagctactcggtggagttcagaaatgaagccggagggaacccggaggcaggcgggtgggacttcgggcagatcagctgggagaacgggaagcataaagtcaggagcccggtggcgttccactggaagaac

SEQ ID NO: 1194 - DNA, 1251 bp, Zea mays
atgcgcacgcccttcgtggatcctcacagcgccgccggccggctcaagcagcgcctggcaaggatcctcacgcgctccacctgcaccaccaataacgccgctgccgccagctcgggcggcacggccacggccacggccttcgtcagcctcgccaagaccaacaacgcccacaccgccgcctcctcatctcacccggagccggaagcgccgccctccccgtacttctgcacgccctgcacctacgactacgagcgccccaaggccgaccgcgggacgcgcccgcgccgcacccgcagcgcctcgctcatacacatctccgtcgactgcacgggcggggccgcctccggccgccgctccgcccactccgacgcgccgcttctgcagcacctcttgtcggaacaggtgccggcgagggacgtcgtcggcggcacgaagcagagcaagagcggcggcaggagcaagctgacgacgacgcggtcgtctccgtcggcgtcgaggcggcactgctcgtcgtcgtcctcctcctggggccgcgcccgcgcgcgccggcccagcagcacgcccacgccctacagctggtcgtcgtcgtcgtcgtcgcggtcgtccgccaccgcgacggacgacgagctcgcgccgttcagcggcagcgacgacgaggagggcggcggcggcggcgaggcggccgacatgcggacgctcttctcgtccctcagcttctcgtccgaccccacatcatccgagttctaccgcaccaacggcggccgcagcggcaacggcaacgccagcaggaggagccacaggaacacggcgagtcgtcgtcgcggccgccgcgcgcgcgcgccacggcgtgcgctgtcgagatccagcggcggcgacccggcagcaccgcccgacgccttccggccgctggtgtccgtggagacgacgaggcgcactacggagcgcagcgagaggagcaaggaagacaagggtctcaataacgccaagaagctgacgatgacgatgctgggcgcggccgcagccgcggaggaggaggccgccggcgcgggcatggctgtggtgaagcgctcgagcaacccttacctggacttccgcagctccatggtggagatggtggtggagcggcgcatcgccagcgtggggaagatggaggagctcctgggctcgtacctctcgctcaactcgccgcgccaccacccggccatcctcgctgccttcgaggacgtctgggaggccgtcttcggcgaggag

SEQ ID NO: 1195 - DNA, 2934 bp, Sorghum bicolor
atgagaggacaaatccttgcctgcctccctctgaatctgatcacactcctctcgctcttcctgagctgcacctgccaaatcgattcccaaacacacgccctcctccagttcaaggccgggttgaacgaccctctgaaccacctcgtgtcatggacgaacgccacctccaagtgccgcttcttcggcgtccggtgcgacgacgatggctccggcacggtcaccgagatctcgctgtcgaacatgaacctctccggcgggatctcgccgtccgtcggggcgctgcacggcctagcgcggctgcagctcgactccaactcgctgtcggggcccgtgccgcctgagctggcgaaatgcacgcagctcaggttcctgaacctatcctacaacagcctcgccggagagctgccggacctgtccgcgctgacggcgctccaggccctcgacgtcgagaacaattacttcaccgggcgcttcccggcgtgggtcggcaacctgtccggcctgaccacgctcagcgtcggcatgaacagctacgacccaggggagacgccgccgagcatcggcaacctcaggaacctgacgtacctgtacctggccggcagcagcttgacgggggtgataccggactccatcttcgggctcaccgcgctggagacgctggacatgtccatgaacaacctcgccggcgcgatcccgccggccatcggaaacctccggaacctgtggaaaatcgagctgtacaagaacaacctcaccggcgagctcccaccggagctgggggaactgaccaagctgcgggagatcgacgtgtcccggaaccagatcagcggcggcatcccggcggcgttcgcggcgctcacggggttcacggtgatccagctctaccacaacaacctgtccgggccgatcccggaggagtggggcgacctgcggtacctgacgagcttctccatctacgagaaccggttctccggcgagttcccggccaacttcggccggttctcaccgctcaacagcgtcgacatctccgagaacggcttcgtcgggccattcccgaggtacctgtgccatggcaacaacctcgagtaccttctcgctctccagaacggcttctccggtgagttcccggaggagtacgcggtgtgcaagagcctgcaacgcttccggatcaacaagaaccggttcaccggcgacctcccggaaggcctgtgggggctcccggcggcgacgatcatcgacgtgtccgacaacgggttcaccggagccatgtcgccgctgatcgggcaggcgcagagcctcaaccagctgtggctgcagaacaacaagctcggcggagcaataccgccggaaatcggccggctcggccaggtgcagaagctctacctgtccaacaacaccttctcgggctccataccgtcggagatcggcagcctgtcgcagctgacggcgctgcacctggaggacaacgcgttcagcggcgccttgccggacgacatcggcggctgcatcaggctcgtcgagatcgacgtctcccagaacgcgctgtcggggccgattccggcctcgctgtcgctgctgtcgtcgctcaactcgctcaacctctccaacaacgagctcagcgggccgatcccgacgagcctccaggcgctcaaactcagctccatcgacttctcctcgaaccagctcaccgggaacgtgccgccggggcttctggtgctcaccggcggcggccaggcgtttgcccggaaccccggcctctgcgtggacggcaggtccgacctcagcgcctgcaatgtggacggcggccgcaaggacggcctcctcgccaggaagtcgcagcttgtgctggtgctggtccttgtctcggcgacgctgctgctggtggccggcatcgtgtttgtgagctaccggagcttcaagctcgaggaggtgaagaagagggacctggagcacggcgacgggtgcgggcagtggaagctggagtcgttccacccactggagctggacgccgacgagatctgcgccgtcggggaggagaacctgatagggtcgggcggaacggggcgtgtgtaccggctggagctcaagggccgcggcggcgccggcgccggcggagtggtggccgtgaagcggctgtggaagagcaacgcggcgcgggtgatggccgccgagatggccatcctcggcaaggtccggcaccggaacatcctgaagctgcacgcgtgcctgtcgcgcggcgagctcaacttcatcgtctacgagtacatgccgcgcggcaacctgcaccaggcgctccggcgggaggccaagggcagcgggcggccggagctggactggccgcgccggtgcaagatcgcgctcggcgccgccaaggggatcatgtacctccaccacgactgcacgccggccgtcatccaccgcgacatcaagtccaccaacatcctgctcgacgaggactacgaggccaagatcgccgacttcggcatcgccaaggtcgccgcggatgcctccgactccgagttcagctgcttcgccggaacccatggctacctcgcgcccgagctggcctactcgctcagagtgacggagaagacggacgtgtacagcttcggcgtggtgctgctggagctggtcaccggccggagcccgatcgaccggcggttcggcgagggcagggacatcgtgtactggctgtccagcaagctcgcctcggagagcctcgacgacgtgctggacccgcgggtggccgtggtggccagggagagggacgacatgctcaaggtgctcaagatcgccgtgctttgcaccgccaagctgccggcggggcggccgaccatgagggacgtggtgaagatgctcaccgacgccggcgcggggccctgcagcccgcgtggacagccgccggtaagggtctgcagcaacaagagctgctgc

SEQ ID NO: 1196 - DNA, 1476 bp, Zea mays; identical to SEQ ID NO: 1172

SEQ ID NO: 1197 - DNA, 804 bp, Zea mays
atggtgcggaagccgatccacgctgacgacgccggcgctaagagcacggaggcgagcaaggagaggaaggggttgtggtcgccggaggaggacgagcggctcttcacccacatcacctaccacgtcgtctccacctggagctccgtcgcgcagctagcaggcctgcggaggagcggcaagagctgccggctgcggtggctgaactacctgcgcccggacctcaagaaggagcccatctccaagcgcgaggaggagaccatcatctccctgcagcagtcgctcggcaaccggtggtcgactatcgcggcgaggatgccaggcaggacggacaacgagatcaagaactactggaactcccgcatcaggaagcgcctcaacgccgccgcctccagagctgcaggctgcggcgacggcggtgacagcgcggccgagccatcgggggccgcggccgcgggaggaaaggaggattcggccaacgctgcgccgccgccagcggcccagcctacgcccatcccggcgcggttcccggtcttcgggtgccagctgcccgacggagccggcggcggcatttcgtctcccggcagcggcaagagtccacagtcgtcgactactgcgagtatgcggcagaacgcgggtgacgagagcgatgcgagcgacggtggcggtggcgacagcgacatggtccatttcctctcgttcgatgatctggattatcccggggatttgctcattgatgtgccgggcgccatggacgcgtgggagagccaactgtgctatgcgaatccgatgatgagctcgctctgt

SEQ ID NO: 1198 - DNA, 1284 bp, Zea mays
atggcaccgaagcgcccggccgccgcagcggcggcggcctcggggtcggcgtccgaggcatccgacgcggaggcggacgtgggccaccagccgtcctccccatccccgtccaagacgccgccgaccaaccctaaccctaagtccgctgccgctggccccgccgaggactccaccgcggccggatccgactccgaggccgcgtacgactctgacgcggaccaccgccccgcgcaccggaaggcggcggtagcggcgtccccatcgcgcaagcccaggagccccaggccgcgctcccgctcccgctccccggacgcagcctcgtactccgacggcgcggcctcagatgccgacgctgaccctgccgcccgagacggcgccgactccgccgacgacggcaacgcctctccgctcgcgctcccgcgcctatcccgcgccgaggctgccgccatcaagcccctcagctcgcgccccatggatccgccgcgccgctccatggtacactctttctccgagctgcgctcgaagcgcccccgcagcgccgccgtcccgtcatccgttgagcagctcaagaggccgacgcggctctggagcctccgtgacgagatcgtcatcctgcggggcttggtcacgtaccgcgccaagcgtggggtcctccccggcgccatgtatgacatttctatgttccaaggccacatccagagcgagctcagtgttaacgtaacccccacgcagctcagtgacaaggtacggcgtctcaagcagaagtacaaccagcttgcgtcccgtggcaagaacgggcgggatccagacttgcccacccagcatgaacagagtgtttatgagattggcaagaaggtatggggaacaagtacgggtggtgatgggtatgagattggtggtgacagccaagaggagcatgaaattggagagagtgacgaggatgtggagagtgggtgggatgaacgtgcccgcaagaacaggaggctgatgccaatcactatggcaaatggacacggatctgggttcggggctggcagagggaagtttgatgttgagaagggaaaggatgcttatccatacctttgggagactgtagaggatctgtcaaaggagcacccgaatggggtagcattcaagaaagcctttgagctgatcgaaggcgccagagcgcgtgggatggaggagaagctacgaaaattcaggctgacagagatcagacaccagctgcgacgtatggaattgatgaaggagacagtgaagatggtgcttgatgcgctggaaggt

SEQ ID NO: 1199 - DNA, 384 bp, Zea mays
atgcatggttgtacacacacaggcaccttgagagcgcgtcgtccctgccagcgttcgcgccgacggcgttcctgttctgatcatggcgtcggcgacggcggcgactcgtcgtcatccacgaggacgacgacggcggtgaagacaataagaaccaaccaaaaccactacgcgaagcatatatacagattactgtcaacgtattgtagaaccaaggatctatgtataaatatatgtgtgcgtccatatcatcatcggaccggaataaagctagcaatctctcttcttcacgatcgagagatagcgcgcgtgcgtgtaattaagtattatagatgcatgtatgatgcatgcgtgtgtgtatctatatatcatgtgatggtttgtata

SEQ ID NO: 1200 - DNA, 1314 bp, Zea mays
atgtcaatgacgccatccatggagatcgacctgcacgtcgtgcgcgcggcgcgcgtgctgggtcgtggcgccatgggcacggtattcctcgccgttgacggcggcaccggggaggcctacgcgctcaaggtcttcgacaagcgctccgctgcggcggcgtcgaggccggccgcgggcgccgacgcggcgcggcgcgcgcagtgggaggtgtccgtgctgtccaggctcgcgcacccgcacctgccgtccctgctgggctgcgccgagacgcccgacctactggggtgggcgctgccctactgtccaggcggggacctcaacgagctccgccacgcgcagcccgaccgcgtgttctcccccgcggccatccggttctacgtcgccgaggtggtgtccgcgctcgccgagctccacgccgccgggatcgcgtaccgcgacctcaagcccgagaacgtgctcctccgcgccgacggccacgtcatgctgaccgactttgacctctcacggcagctcccgccgcccaggtccccctccgcatccacgtccacgtcgtcgtcgtcgtgctcggcgacatcgtcgccgctgcctcagacccagacgacccacatgaagaacatcttcaagagaagcgagtccgctgtgaccgcgcccacctccggacaggaggaaccacgcaacctcgcctggtacctgagcaaaagcatcgacggcggcagcgaccaggtcaagaaggcgaaatcggccagggtaacgccggtggaccgcggcaaggagctgccgagcttctgccccgctgccgcagccgcagccggagagcggtcgttctcgttcgtgggcaccgaggagtacgtggcgccggaggtggtgcgcggcgacgggcacgagttcgcggtcgactggtgggcgctcggggtgctggtctacgagatgtcccacgggcggacgccgttccggggccggagccggaaggagacgttccggaacgtgctgctccgggagccggggttcacggcggacgcgcggcggcggtggccggagctaacggacctcgtctcgcggctgctggagaagaatcccgcgcggaggctgggtttcgccggcggcgccgacgaggtccgggcgcacccgttcttcgccggggtggcgtgggacctgctcggggacgtgtcccggccgccctacattcccgcgccgcccgatgacagtattgcctcctgcgaggggttcagcgtggcggaatacttcgataggcttcaccagcctccgctgtcgccggcgaagcactcgcccgaggaagagctcttgccggagttc

SEQ ID NO: 1201 - DNA, 1455 bp, Zea mays
atgaggaaggtgtgcgccaacccagacagagaggtcggcctcgacacagtgctcgaggtgcccgtcccggaccagctccaccacgatccgtcgtcgtcgtcgtcgggccacggccggcgccggcgacgcacgctcaaggcgtgggtgcggtcgcgcatggaccagcgccaccggcggcacagctcgccgccttcccaggcggacgtgcagctcatgctcggggtggtcggcgcgccgctggtgccgcagccagtgcaggcgaggaaggccatggtggccggagaggacatcaaggaagagccccttgaggtgtccaaggcgaagtacatcgtggagcagtacgtcgcggcgtctgggggcgagcgggcgctgagcgcggcgacgagcatgtacgcggtggggaaggtgctgatgaggacgaggtcgtcgtcgacgacgaccaagcaggggcagaaagcccgcaggacgggaatggtgggcgtggtccacggcggcgccgagatcgccggcggcctcgtgctgtggcagaaggggccggaggtgtggtgcgtggagatggtggtggccggcggcaccaagatgagcgccgggagcgacggcagagtcgcctggcgccagacgccctggcagcaggctcacgcttcgcgggggcccccgagacctctccgtcgatgcgtccagggtcttaacccgagatcaacggcgaacctgttctcgacagccacgtgggtcggcgagaagagcgtcgacggcgacgactgcttcgtgctccgcgtcgacgccgacccgctggccctgcgcgcccggagcggcgacgacgtcgaggtcgtcaggcacgccgtgtgggggtacttcagccagaggacggggctgctgtcccgcctcgaggacagccacctgctgcgcgtccgcgcgacgaagggctcgccgctggcccagacgaccacgtactgggagacttccatggactcgtccatcggcgactaccgcgccgtcgacggcatcaacgtcgcgcacgccggccgcaccgtcgtctcgctgtcccggttcggcggcagcaccaacgacgacagcgctggatccgaatcggccggcgtgctcggcaggaggacgtgcacgtgcatggaggagaattggagcatcgaggaggtcgacttcaacgtcgtgggcctgtccgcggagtgcttcttgcctcctagagacatggtagtagtaccttgcagtcctaaaccagtcgacgatgagaaggggcagtgtggccgccttgaccacagctgcaagaaagacgacgctccagctgcacttgacgtcaggaacaagaacggtaatggcggtgccggtggtgtccatcgtcctgcgacggcaagaaaggctcttgtaacggcggcgacagggctaccctggtccgggactgccaaggttgtggccgtcgaaaccttcgacaccaccgctgag

SEQ ID NO: 1202 - DNA, 1308 bp, Sorghum bicolor
atggacccgtgcccgttcgtgcgggtgctggtcggcaacctcgcgctcagaatgccggtggcgccgccggccgccggtgccggcgccggcgtgcacccgtccacgtcgccgtgctactgcaagatccggctcgggaagatgccggtccagagcgtcccggcgccgctcgtggtctccgacggcggcgagcagacgccggcgtcgggggccctcgccgccgcgttccacctgtccaaggctgacctggagtggttcaacgggaagccgtctctcttctcgtcgcgcggggaggccagcctgaaggtgtcggtctacgccggccgcaaggggagtacctgcggcgtcagttccgggcggctgcttgggaaggctacgatcccgctcgatctcaagggcgcagaggccaagcccgccgtgctgcacagcggctggatctccatcgggaagcgagcagggaagggcaaccccgcggcgacggagctcagcctcactgtccgcgcggagccggacccgcgatttgtcttcgagttcgacggggagccggagtgtagcccgcaggtgctgcaggtgggcagcgccatgaagcagcccatgttcacctgcaagttcggatgccgcagcaacagcgacctgcgcaggcccgggatgcagccggagcgtgacgccggcgcgtcggccaaggagcgcaaggggtggtcggtgacggtgcacgacctgaagggctcccccgtggcgatggcgtccatggtcacgcctttcgtgccgtcgccgggcacggaccgcgtgagccgctccaacccgggcgcgtggctcatcctccgccccgctggcgacggcgcctgggagccctgggcgcgcctcgagtgctggcgcgagcgcggcggcgccggcgcgtccgacagcctgggctaccacttcgacctcctcgtccccggcgcggaccacgccgtcgcactcgccgactcctccatcccctcctccaagggcggcaagttcgccatcgacctgaccgccgcgcagccgctcagccgcggcggcacgccaggatgcagcccgagaggaagcggcgacctgagcaactggcccctgggcaactaccgcggcttcgtcatgtccgccgcggtccagggcgagggccggtgcagcaaaccgactgtcgaggtcggggtggcgcacatcgggtgcgccgaggacgcggcggcattcgtggccctcgcggcggccgtggacctgagcatggacgcgtgcaggctcttctcccaccggctgaggaaggaactctcgcacctgcgggctgacctactccgg

SEQ ID NO: 1203 - DNA, 1926 bp, Sorghum bicolor
atgagctgcggaagggtccccatggagtgcggccacgactgcgttgttccacggcctcaggaacaccaggcgccgctcaaatgcgagagcccgacgctttcttctgaagaattccttcagttcaagaggaaggccaccacgatcgtggaggagtacttctccacggacgacgtcgcggcgacggcgaacgagctgcgggagctccgcgtgccgtgctaccactactacttcgtcaagaagctggtgtccgtggcgatggaccgccacgacagagagaaggagatggcggccgtgctgctgtcctcgctctacggcgacgtcgtcgaccggccgcagctctgcaagggcttctgcaagctcaccgagtcctgcgacgacctctccgtcgacacgcccgacgccgtcgacatcctcgccgtgttcgtcgcccgcgccgtcgtcgacgacatgctgccgccggcgttcctggccaagcagagcgcgtgcttgcccgacgggtgcaagggcgccgaggtcctccgcagggcggagaagagctacctgtccgtgccgcaccacggcgagatcgtcctgcagaggtggggcggcagcaagcggatcacggtggaggaggccaaggccaagatatccgacatcctggaggagtacctcgccgccggagataggtgcgaggccttgcggtgcatcagggacctcaagatccccttcttccaccacgacgtcgtcaagcgcgcgctcgttctcgccgtggagcgcggcggtgcgtccgaggcccatatcctggacctgctcaagtcggcgtcggaggaaggggttatcaacgagagccagatcgctaaagggttcgaccgcttgatcgactctctagacgatctgacgcttgacgtgccgaatgcgaggtgccttgtgcaatcggtgatccataaggcttcgtcggagggctggctgtgcgtgtcgtgcttgaaaccgttgccaccggagcccaaaaagagcagcgaggtcgacgacgcggcggtgcggcagttcaaggcgaaggccgttttgatcataaaggagtacttcttgaccggcgacatcatcgaggtcttgagctggttggaggcagagaacttctcgtgctgtccctccttcaatgccatcttcgtccagaagctggtcaacgccgcgatggaccggaagagccgcgagaaggagatggcgtcggtgctgctctcctcgctctgcatgccgccggaggacgtcgtggcagggttccacctccttatcgaggccgccgaggacgccgcgctggacaacccggccatagtcgaggacctgaccatgttctttgctaggtccgtggttgacgaggtgatcgcgccgtcggacctggaggcaatggaggaggacgccagccgcgtcaaggcagatggctccaccggcatgctggcgctccggaacgcccgtgcgctgctcggcgcgaagctctccgcggagcggatcctgcggtgctggggcggcggcggcagcggcaaagcaggctgggagctggaagaggtgaaggacaagatcggcaagctgctgcaggagtacgactgcggcggcgacatccgggaggcgtgccgatgcatcaaggatctcggcatgcccttcttccaccacgaggtggtgaagaaggcgctggtggcgatcatcgagaagcggggcaaagacgagcgcctctgggggctcctcagcgagtgctacggccgcggtctgatcacgcccaaccagatgaccaagggcttcgacagggtggccgactgcgtcgacgacctcgcactcgacgtgcctgacgccgcgaagcagctcggctgctgcatcgaccgcgccaagaaggaaggatggctggacccgtccttctcgatgacgaggccagggcagccagttgccaatggcgtttgttcg

SEQ ID NO: 1204 - DNA, 1005 bp, Zea mays
atggcgcctctaggagacggcggagctgctgccgcggcggcgtccaacaacctggtggtgtcgttcggcgagatgctgatcgacttcgtccccgacgtggccgggctgtcgctggccgagtcgggcggcttcgtcaaggcacccggcggcgcgcccgccaacgtcgcctgcgccatcgccaagctcggcggatcctccgccttcgtaggcaagttcggcgacgacgagttcgggcacatgctggtgaacatcctgaagcagaacaacgtgaacgcggaggggtgcctgttcgacaagcacgcgcggacggcgctggccttcgtgacgctcaagcacgacggggagcgcgagttcatgttttacaggaacccgagcgcggacatgctgctgacggaggcggagctggacctgggcctggtgcggcgcgccagggtgttccactacggctccatctcgctcatctccgagccgtgccgctcggcgcacatggccgccatgcgcgcagccaaggccgcgggcgtgctctgctcctacgaccccaacgtgcgcctcccgctctggccgtcgcccgacgccgcacgcgagggcatcctcagcatctggaaggaggccgacttcatcaaggtcagcgacgacgaggtggccttcctcacgcgcggggacgccaacgacgagaagaacgtgctgtccctgtggtttgacgggctcaagctgctcgtcgtcaccgacggggacaagggatgcaggtacttcaccaaggacttcaagggcagcgtgcccggcttcaaggtcgacaccgtcgacaccaccggcgccggcgacgccttcgtcggctccctcctcgtcaacgtcgccaaggacgactccatcttccacaacgaggagaagctccgcgaggctctcaagttctccaacgcctgcggcgccatctgcaccaccaagaagggcgccatcccggcgctgcccacggtcgccaccgcccaggacctcatcgccaaggccaac

SEQ ID NO: 1205 - DNA, 828 bp, Zea mays
atggcctactactcgggcggcggcaagctgtcggcggtggacgccatcctggcggaggcggcggacctggtggcgctcgagcaggtcgccaagctcaacacggcccacctcgatgacgactccgcgcttccgtccagcctcgaggcccgcttccgcaagctcaagtccctcccctcgcccgccgcagtgccgcccgtcagcaccctcgcccgcagcgccaccgcgccgcgcccggcccccgctctgcccggccccgatcctcccgctcctgctccgcctgtgcatcacccggtccacgaagacccgccgccgggagacgcggagacgaagggcggcgggtcctcgccgcggcaggctcgcgccccggcacccgcacccacggtccacgccgacgacgccaaggacctagatcagctgttcgggtcggcgccgcggggccggccgacactgcgggagcggaacagggggagcgactcctcctccgtctccccctcgccgccgccgccgccgcgccaggcgtgctgcttcggcttctcccccaagaagcccctgcggagggcgccgtcggccaagggcaagaagaaggaggtctgccacgggtcccgcgacgtcctcggcgtcgacgccgacgagtggggcgacgagaacaggaggatcgccaccgagctcagggagcagcagcgccggctcaggaaggcgctggaggaccaggtgcaggtcagcagggagaccgccaagatggcgcgctgggtcaagcaggcgtccgcgcgcatgacgcacgccgaggccatcgacgacctgctcagtgactgcgaggacgacctcaaa

SEQ ID NO: 1206 - DNA, 1773 bp, Zea mays
atggcgttcgctgaggaggagacgacgaggtacctcggcacgaacctcatcgagagctgcggcgactcggaggacgggctcgccggctgggctccgtccggctcgtgcacgctctccgcgcacgccgacgaggacgcgtctcttccttcgctggcagccgcattgtccgccgccgccggcggcgacgacgaaggcgacgactctgacgaggacgaattccagcagcgcgcgccgaggcccagcggccggtacgtcctggccgcgcgccgcgcgagcgacaaggacgggctctgccgcgcggtctcgcgcgccccgatcaggcccaacgtaacgtaccgggtggccgggtgggtcggcctgggcgccgccgtggacggctcccacgccgttcacgtcgaggtccgcgtcgacggtggtggccgcccggtcggtggcggcgtggctgtggtcgagtcggggaagtggggccagatcaagggctcgttccgtgtcgactgcgatgagccaccgcgccacgccaaggtctacgtccacgggccgccggccggggtggacctcaaggtcacgacggatctgcaggtgtgcgcggtgaacaagattccgaggctcaggcacctcaggaagaaggccgacaaggtgcgcaagcgtgacgtggtcctcaaggtgagccggcggacggacgtcgacgacgacgacacgacggcgagcgtcgccggggcgcacatccaggtggtccaggtccagaacagcgtccccatcggcagctgcatcaccaaggcgggcatgcagaacccggagtacgtggacttcttcaccaagcacttcgactgggccgtgctcgagaacgagctcaagtggtactacacggaggccgtgcgggggcaggtgagctacgccgacgccgacgagctcatcgacttctgcgaccgccacggcaagcccgtgcgcgggcactgcatcttctgggccgtggagaactcggtgcagccgtgggtccgcgcgctcagcgccgaccagctccgggcggccgtggaggcccggctgcggggcctcgtgtcgcgctacgcaggccggttcccgcactacgaggtcaacaacgagatgctccacggggcattctaccagcagcgcctcggcgacgacatcaacgcgcacatgttccgggagacggcgcagatcgacccggcgccggcgctgttcgtcaacgactacaacgtggagagcgccaacgaccccaacgccacgccggagaagtacgtggcgctggtcacggacctgcagaggcggggcgcgcccgtgggcgggatcggcgtccagggccacgtcacgcaccccgtcggggacatcatctgcgacgcgctggacaagctcgccgtcacggggctgcccatctggatcacggagctggacgtgtcggccgccgacgagtccgtgcgcgccgacgacctggagatcgtgctgcgggaggcgttcgcgcacccggccgtcgagggcatcatgctctggggcttcatgcagggccacatgtggcgctcccacggccagctcgtcaacgccgacggcaagtacacccaggcaggcaacatgttcgcgggcctccgccgggagtggacgtcgcacgcgcgggggaaggtggacagcatcggcaacttcaagttcagagggttccacggcacgtaccaggtgctgcttacgacgcccgccggagaggtgaagaagcggacgttcgacgtacacaagggggatgcgccgctcgtgctggacatggatttc

SEQ ID NO: 1207 - DNA, 975 bp, Zea mays
atgtccaatagggccacacattggtgttatgcctgtcggcggccaattcgtctccgtgggcaggatatcgcatgccccaactgcaatgatggttttatccaggaaattagtgagatgggtggcatattgaacacttatgggctaattgaaccagactttgaagagcgtcgagctagaagattcggaatgatggatgccatgtcttcccttatgcggcaacggatggaagaaatgggaagagatggtttgtttgatattcgtggtagacaaggaacaggtactgaatatggaaggaggccaactgctgttcctacattggtatttggcggcatcccttctcctggagttgatagcggtgatgttaatgttgtcctcaggggaggccgcagagttggcgctgcccaaccaaatttcagtagtttagttgttggtcccagtctggaagccctttttgagcagctacttctccagaacaaccgtcaaggcccagcacctgctccacagtcagctattgactccatgcctgtggtaaagataaaccgcaggcatcttgacgacgatccacagtgcgcagtttgcaaagacaaattcgaggttggagcagaggcacgggagatgccatgcaagcacctgtaccatactgactgcatcatcccctggctggttcagcacaattcttgccctgtttgccgccatccactgccatcacagagatcaggcagtaccagtagcgcccggccttcagcttactacaacgaagccgctgatcctcctggggtcaccagagcagatcttgaacctgctccaagagacggtggcagggaaagccaggaaaggcgccgctccttctcgtttctgtggccgtttggcccgtcgagttccagatccagttcttaccagtacgaacagaatgttgatgagcctgcagtatacgatccaaaccagatagcatattctgagtggcactatgaccac

SEQ ID NO: 1208 - DNA, 1476 bp, Zea mays; identical to SEQ ID NO: 1172

SEQ ID NO: 1209 - DNA, 3033 bp, Sorghum bicolor
atggcccacctccagctcacggcgctcgccggcggcgccgacgacgagatggaggaggtcgcgttgctgggctcctacgacgaggaggccggggtggggccggagggggaggaccaggcggaggccggcatgcggcgggtgcaggtgcgcgtcaccggcatgacgtgctccgcgtgcacgggcgccgtcgaggccgcgctctccgcccgccgaggcgtgcgccgcgccgccgtgtcgctgctccagaaccgcgcccacgtcgtcttcgaccccgcactcgccaaggtccctttatcagtgggatcgatagaatggaagcaatctccagacgatgacattgtagaagcaatagaagatgctgggttcgaagcggaaattcttcctgactctactgtttctcagccaaaatcacagaagactttgtcaggacaatttaggatagggggaatgacttgtgctgcatgcgtgaactcggttgaggggatcttaaaaaaattgccaggtgtaaaaagagcagttgttgcattagcgacctcattgggtgaagttgaatatgatccttctgccattagcaaagatgaaattgttcaggccatcgaggatgctggttttgatgctgcgctgttgcaaagtagtgagcaagacaaagccttattaactgtcacagggttgcattttgagggagatgtagatgtattgcatgatatactgaagaaaatggaagggttgcgtcagtttggtgtagattttgcgaaatcagaagttgacattgtatttgaccctgaagtagttggtttgagacagattgtagataccatcgagatggaaagcaacaatagactgaaagctcatgtacagaatccatacatacgagctgcttcaaatgatgcacaggaggcaaataagacgcttcaccttcttcgctttagtttattcctaagtattcctgtatttttcatccgcatggtatgccctcacatacctctgattagttcattcctactcatgcactttgggccatttcgtattggagatctgttgaagtggattctggtgaccatggtacagtttgttgttggcaaacgattctatgttgcagcttatagggccctaagacatggctctacaaatatggatgtcttagttgttattggcactactgcttcatatgtctactctgtttgtgcacttctttatggggcattcactggatttcatcctccaatatattttgagacgagtgcaatgataattacatttgtgctatttgggaagtatcttgaggtgcttgcgaaaggaaagacatcagatgctatcaagaagcttgtagagcttgctcctgctacagctcttctacttctgaaggacaaagagggaaaatattcaggagagaaggagattgacgcatcgttagtacaacctggtgatgccttaaaagtgcttcctggttcaaaggttcctgcagacggtatcgtcatttggggtacaagtcatgtcaatgagagtatggtaaccggtgaatctgtaccaatctccaaggaagtatccagtctagtaattggaggcacaatgaacttgcatggtattcttcatatacaagcgactaaagtaggatctgggacagttctgagccagataatttctcttgttgaaactgcccagatgtctaaggcccctattcagaagtttgctgattatgtagctagcattttcgttcctattgtcatcaccctgtccttcttgacatttcttgcatggtttctatgtggatggttgggagcatatccaaactcatggtctgctgaaagtagcaattgctttgttttctccctcatgttctccatatctgttgtggtgattgcttgtccatgtgctcttggtctggcaacaccaactgctgttatggtagcaactggagttggggctagtcatggagtacttgtaaagggcggagatgccctggagagagctcagaatgtgaaatatgttattttcgacaagaccggaacactgacccaaggaaaggctactgtaacaacagcaaagattttttcaggaatggatctgggggactttctcacattggtagcatctgctgaggcaagcagtgagcatccacttgcaaaagctatcttggattatacatttcatttccatttctttggcaaacttacctcagcaaaagacaacattaatagaagaaaagaagagatactttctcagtggcttctggaagttgcggacttttctgccttgcctggcaaagggattcaatgttggatcaatgggaagaaaattttggtagggaatcgtgcattgataactgaaaatggggtaaacattccagaagaagctgaatgtttcttggtagacatggagctgaatgcaaaaactggtattctcgtagcatatgatggagacttcattggcttgattgggataactgatcccttgaaaagggaggctgctgtggttatacaaggtctaaaaaagatgggtgttcatccagttatggtcactggggacaactggaggactgcacgagcagttgcaaaggaggttggcattgacgacgtgagagccgaggttatgccagccggaaaagccaatgtaatccgctctctgcaaaaggatggcagtgttgtcgcaatggtcggagatggcatcaacgactcgcctgccctggccgccgctgatgttggtatggctatcggtgcaggcactgacattgctattgaggcggctgactatgtgctcgtccggaacaacctggaggatgtgatcacagctattgacctctcaaggaagacattcagcaggatccggtggaactacttctttgccatggcgtacaacgtgatcgccatccccgtggctgctggcgcgctgtttcccttcaccggggtccagatgccgccttggctggctggcgcgtgcatggcattctcgtccgtcagcgtggtgtgttcgtcgctgctgctgaggaggtataggaaaccgaggctcaccaccgtgcttcagataacagtggaa

SEQ ID NO: 1210 - DNA, 1215 bp, Sorghum bicolor
atggatatggccatcgacacgccatcgccggcgccgccacccacgccgccggcgccttcggcggcggcggggcggcagacgcgtgcggcggaggcggtgcgtctggagcaccagctggtgcgcgtgcctctcgagtccctccgcgccaccgtccgctcgaaccaccgcctcgccgagaaggagatcgccgccgtcctctcctccgcctccgcggcccccgccgagagcagcgccgccgccgtcgaccacctcacctccctcgtctcccgcctccacggcctcaagcgcaagatggaagagggcgcacgggtggaggagctgcaggtgcagcgctgccgggcgcgtctggatcggctggcgactgccagcaccggtgacgatgctgagtgggaggacattcggctgaagaggatcctggtcgattacatgcttcggatgtcctactacgattccgccaccaagctcgctgagacttctggtattcaggaactcgttgatattgatgtcttcctggatgcgaaaagagtaattgattctcttcagaataatgaagttgctcctgctttagcttggtgtgcagaaaacaagtcccgactaaagaaatcgaagagtaagctcgagtttttactgaggcttcaagaatttgtggaatttgtcaaggctaagaattgcattcaggctatagcatatgctcgaaaacaccttgctccctggggcaatatgcacatgaaagaattgcagcgtgttacagcaacattggtttttagaagcaatactaattgtactccatacaagatattgtttgagcaagagcgctgggactatcttgttgacattttcaagcaagacttttgcaagttgtatggcatgaccctagagccgttgctgaacatatacctgcaagcaggcctgacagctctgaagaccccattctgcactgagggtagctgccctagggaagaccccttgtccctggagggcttcaggaaactagccgagcctctgcccttctctaagcaacaccactcgaagctcgtctgttacatcaccaaggagctcatggacactgagaacccacctcgggttctgccgaacggctatgtctacagtgagaaggcgcttcaagagatgtccaagaaaaatgacgggaagattacatgccccaggacaggagatgtttgcgacttctcagagtgtgtcagggctttcatctcc

SEQ ID NO: 1211 - DNA, 1173 bp, Zea mays
atgaaggtgaggagatcggaaccagttctagtccatgcgaccggagccgcgaccacccaagaggattccctgagcagggtgctctcgcagtactaccccttcgagggtcggctggccgtacgcgaggacgggaggctcgccgtgcggaacgaccgccgcggtgtccccttcgttgacgcggtgtccgattacgagctgcaggtggtctgtgacgcaacggccccgggttctgagcttctcggtgacctcgtctacgtcagcatgcagcacgagaacgccctggaagcgccgatgctgaccgtgcaggtgaccacgttcaagtgcggcggctttgtcctcgggctcgccatgaaccactgcttggcagacggccagtccgccgccgagttcatctgctcctgggcggagaccgcgcgtggtgtggccatgtcgacgccgccgtacctcgaccgcacggtgcagcgcgccaggccgatcccgacggttgacttcgcacatgacgagttcgcagagatcgaggacgtctccggcctcgccggcacattcggcaaggagccgtgcgtttaccgctccttcactttcgacgcaggcaagctgcacaggctgaagcaagccgcaagcgagcaagggcaaggaggcaccaagagctccgtcttcgtcgcgctcacggctttcgtgtgggtatcaaggacgcgggccctgcggatgctccccgatcagaagagcaagctgctgttcgcggtggacgcccgtctgcgcgtcgacccgcccttgccgcccggcttctggggtaacgccatcatcttcgcctgctgcatctccactgccagggatctcctcagcaaaccactgtccgcggctgcccgttccatcagagaagccatcgtccgcaccgacgacgcgttcatccgttccgccgttgactacatcgagttgaacagcggtgctcgcccgtcgctaatggcaaccaccctggtcactgcttggaatcgactcaggtttcgcgcggcggacttcggatggggtgaagcaatctactcggggccggcggagctgccgcagaaggaggtggccatgtttctgcgcggcgtgagtgacagccagagcacagtgctggttattgggatgcctgtgtcatgtatgcaagcattccaagaaacggtagatctgctg

SEQ ID NO: 1212 - DNA, 1389 bp, Sorghum bicolor
atggtgaacggcgagccggcgggggcggagtgcacgcgggcgtcgctgctggggaggtatgagatcgggcggaccctcggggaaggcaacttcggcaaggtgaagtacgcgcgccacatcggcaccggcggccacttcgccatcaagatcctcgaccgcagcaagatcctctccctccgcatcgacgaccagattaggagggagatcgggacgctcaagctgctcaagcacccaaatgtcgtccgcttgcacgaggttgctgctagtaaaacaaagatttacatggtgcttgagtttgttaatggaggcgagctcttcgacaagattgctataaagggaaaactgtctgaacatgagggcaggaggcttttccagcagctaattgatggtgtcagctactgccatgataaaggtgtctaccacagagaccttaagccagagaatgtccttgttgataggaaaggcaacatcaagatctctgacttcggcctcagtgctctacctcaacatctcgggaatgatggacttctgcacacaacatgtggcagccccaattacatagctcctgaggttttgcaaaacagaggttacgatggctccttgtcagatatctggtcttgtggagtaattctttatgtgatgcttgttggttaccttccctttgatgataggaatcttgttgttctttatcagaagattttcaagggagactgtcagatcccaaagtggctctcacctgccgcacaggaccttcttaaaaggatccttgaaccaaatccaatgaagaggatcaacatcacagggatcagagagcatgagtggttcaagaaggactatgtacctgctgttccatacgatgatgatgaagatgtcctttccggttcagttctctcaataaaagagcaaattgaagaaccagcacaagaaaagtgtactcatatcaatgcttttcagttgatcggaatggcttcttcccttgatctttctggtttatttgaggaagaggatgcagctcaaagaaagattcggttcacttcaacgcatccacccaaggatttattcgacaagattgagagcgttgcgatggagatgggattcgaagttcataggggggcaagcaagctcaaagtcttgaagaatagcaaatgttccaagaagtccaggaatccgtcatcatttttggtgtgcactgaggtgtttgagcttgggccatcattatatgttgtagaacttaggaaatcccatggggactctacattgtatagacagctgtgcgagaggctctcggatgagctaggggcctgcaagacagagcagattatgaggactgaatcactgagtgacgatctttcgagcctcgatggcgaagcgttccctctatctgggttc

SEQ ID NO: 1213 - DNA, 1227 bp, Zea mays
atgatggaggcaaagcaggcggcgcccgaccggctctcctccctcccagcggagctgcaggacgagatcctcatccgcctcgacctcagggacgccgtgcgcacctccgcgctctcccgcacctggcgggacctctggaagtcgctctcggtgatctccctctccttccccttcggcacgcacccttccgtcgtcgacagcgtcctcctccgctacatcggcccccgcgtctctctcttccgcatctgtgtcgacgacgcatgtgccgaccgcatcgacgactggctcatcgcgctctcccgctaccgtgtcgagtccatcgacatgtgtggcacactcagatcactcggcaacttcaatctctactcctccatcttctccttaggtgatctcgtgtctctgctgctgaaaaactgccgcatcccacccctccccgtaggattccccggcttccccgcgctccagaagctagtcctcgcctatgttatcttcccatcgaacgggttcaaacaattggaggctatcattcgtcgctcacccttgcttcataccctgcatatgtttgacgtgttcatccctggtgaatacccagactcagtgatcgaggcgcccaatctccgtgtcctgtcaatctattcaccgtatgactatcgatggcgatttggagagctgtcgtgtctcgaatatgccaacattcatgtgttccactgtccgcagcatgaacatgattttggagttttccttgctcggtttgctcacgttcaaaagttcggtctcttctctccggctgtcgatgttaagatgccttatacacttccattcaccttttataacttgaagaaattgcagttatgtgtggatttcaatgaaattcactccattttgtccatgtttaccatgctaaggagctgtcacaaccttcaaaacttaaaaatagagtcgcggcacgacagttatgagagttttgaggcagattgggagttcttaaatgctctgtggactgatggcatgtgtgccaatcttcaaattgtgcgcatgattgatatcatttcgcttccgaatgaaacttcatttatgaagcttatactttctaaagcaactcttcttcacacattatatgttggcgcacacccatatgattttgatgatcacataattgacatgctaaaatgcgaaagagcttcagctcaagctcgtgtacagtttgaaggttcggagcaacagtgg

SEQ ID NO: 1214 - DNA, 1320 bp, Sorghum bicolor
atggcggccgccttctcctccaccgttggagctccggcctccaccccgagcaggagcagcttcctcgggaagaagctcagcaagcagcaggtgtctgcggcggcggccgtgaactactaccatggcaagagctccagcagcgccgccgccaacgttaacaggttcaaggtgatggcggccaaggaggtggacgagacgaagcagtcggaccaggacaggtggaagggcctggcctacgacgtctcggacgaccagcaggatatcaccaggggcaagggcatgatcgactccctcttccaggcgcccatgggggacggcacccacgtcgccgtgctcagctcctacgactacatcagccagggccaaaagacttacagcttcgacaacatgatggatggtttctacatatccaagagcttcatggacaagctcgtggtccacctctccaagaacttcatgagcctgccaaacatcaaagttcccctgatcctgggtatctggggaggcaaaggtcaggggaagtccttccaatgcgagctcgtcttctccaagatgggcatcatccccatcatgatgagcgccggcgagctggagagcggcaacgccggagagcccgccaagctcatcaggcagcggtaccgtgaggctgccgacctcatctccaagggcaagatgtcctgcctgttcatcaacgatctggacgccggcgcaggtcgcatgggcggcaccacccagtacacggtgaacaaccagatggtgaacgccaccctgatgaacatcgccgacaaccccaccaacgtgcagctcccggggatgtacaacaaggtggacaacgcccgggtgcccatcatcgtcaccggcaacgacttctccacgctgtacgcgccgctcatccgtgatggacgtatggagaagttctactgggcgcccacccgcgaggaccgcatcggcgtctgcaagggcatcttccgcaccgacggcgtcgacgaggagcacgtcgtccagctcgtcgacaccttcccgggccagtccatcgacttcttcggcgccctgcgtgcccgggtgtacgacgacgaggtgcgccggtgggtggccgagaccggcgtcgagaacatcgccaagaagctcgtcaactccaaggagggcccgccgacgttcgagcagcccaagatgacgatcgagaagctcttggagtacggccacatgctggtggcggagcaggagaacgtcaagcgtgtgcagcttgctgacaagtacctcaacgaggctgctcttggtgcagccaacgaggacgccatgaagactggcaacttcttcaag

SEQ ID NO: 1215 - DNA, 810 bp, Zea mays
atgctgctgaacccggcgtcagaggcgtcggtgctagacaccatccggcagcacctcctcgaggagccagccgacgagagcttcgggagcctggtggcggaccagtggagcggctcgctcccgttccgcaccgacgacgccgacgacatggtggtgttcggggcgctgcaggacgccttcgcctacggctggctgcccgacggctcattcgtgcacgtgaagcccgagccggtgcggtcccccgactcgtcctcctacccctgctcctacgacggctcaccctgcttcggcctcctggacccggagccgccgctgacgcccggcaccaccacgcccagtagtagggggcaggaggaggccgcggcggccatggcccggggcaagcactacaggggggtgaggcagcgcccgtggggcaagttcgcggcggagatcagggaccccgccaggaacggcgcgcgcgtctggctcggcacgtacgacaccgccgaggacgccgcgctcgcctacgaccgcgccgcctaccgcatgcgcggctcgcgcgcgctcctcaacttcccgctccgcatcggctccggggacaagcgcccgtcgccggcgccgcccgagcccgccacctcctcggactcctcctcgtcttcggccagcggctcgcacaagaggcggaagcgaggcgaggccgcggctgccaacatggccatggcgctggtgcccccgccctcccagcttaaccggccggcccagccgtggttccctgccgcgccggtcgagcaggcggcgatggctccgcgcgtggagcagatcgtcgtc

SEQ ID NO: 1216 - DNA, 1206 bp, Zea mays
atggcgcccggaagcatcgccagccggtggcgcgagctccagggcgcggactcctggtcggggctgctggacccgctggacatcgacctgcgcgcgaacctgatcgcctacggcgagctcacgcaggccacctacgacgggttcaaccaggagcggcggtcgccgcacgccggcgcctgcgtgttcggctactccaacctgctggccggctcgggcgccgcggcggccgggagctacgccgtcaccaggttcatctacgccacgtcggcgctccccggcgtgcccgaggcgttcctgctgctgccgctgccggacctgctgcccgagtcctggagccgggagtccaactggatgggctacgtcgccgtcgccaccgacgacggcgtcgccgcgctcggccgccgcgacatcctcgtcgcgtggcgcggcaccatgcgcggcctcgagtgggtcaacgacttcgacttcacgcccgtgtccgccgcgcccgtgctgggccccgccgccgccgccaacccgttcgccttggtgcaccggggcttcctctccgtgtacacgtccagcaacccggactccaagtacaaccagaccagcgccagagaccaggtcctggcggaggtgagcaggctggtggcactgtacaaggacgaggtgacgagcatcacggtgtgcgggcacagcctgggcgcgtcgctggcgacgctgaacgccgtggacctcgcggccaacggcgtgaacgcgccgccggccgggtcgtcgcagccgccgtgccccgtgacggcgctggtgttcgcgagcccgcgcgtcggggacggcaacttcaagagggcgatcgcgtcgttcccggacctgcgggcgctccacgtgaagaacgccggcgacatcgtgccgacgtacccgccgctggggtacgtggacgtggccgtgcagctgcccatcgccacggggcggtcgccgtacctgcggcagcccgggacgatcgcgacgctgcacaacctcgagtgctacctgcacggcgtggccggcgagcagggcagcgccggggggttcaggctggaggtggaccgcgacgtcgcgctggtcaacaagggcgaggacgcgctcaaggaccagtacccggtgcccgcccagtggtgggtcgccaagaacaagtgcatggtcaagggcgccgacggccactatgcgctccaggacttcgagcagatc

SEQ ID NO: 1217 - DNA, 1605 bp, Zea mays
atggtactggaccacgccatcaggggctcggcggcccgcagggctgagacccaaaccctagcgccagtgctgctcatgggcccgccgcctccaccgccgatcccaccgacgacggggatgtacctcccggggcccccaccccccgggacgctcctgccgcacccgatgcacatggcgctcccgcgtgaggtcatcatttacatggacgagtgtcggagccgctccctcctcaagttcatttccgacgcggggattgtgccttcgctagaggacgagcggaggagggagcgggtagtacgcgagctcggcaagatagtaatggattgggcaaagagggtggcctacgagcagggcaactggcactggatcgcttcagccacggtgttgaccttcggttcctatgccctgggggcgtatggacctgaatctgatattgatgtcctctgtattggtccttgtattgcatcgctgcaacaccatttttttgttgtcctgcgacaaatgctcgaagggaggccagaagtatcagaattgcattcaattgaaggagctaaggttccattgatgcgttttaaattcaatgggattttagttgactttccttatgttcaactcccagtgatcaatgctgcagaggctatgcatgcatttgatccccatgttctagaaaatgtggatgggccaagttggagatgtctatctggagtccgtgctaatagacaaatcattcaattagttcccaatatgaagaaatttcaatatttgttgcggtgcctcaaactatgggcaagaaaaagaggacttcattgccatctacttggcttcttcgctggaattcatttggctatccttgctgcatatgtttgccgcagacatccgaatgctagtataaatactctgttgtctttgttcttcgacatttttgttcactggccttggcctcttccagtgagtttgcttgatccgcctgttccttgtcggggtcctgatgggtgctccctcatgcccataatgttgccatgtattccaccagaattttgctcctctagtacaacagaaagtactttcagcaaaatcaaagaagaactttggcgtggctatgctctaagcaaggataccagaagtactgattttaactggagttggctctttgcaccttttccatatggtgcaagatacaaatgctttctccgcatagttctctctgctccgatgggagaagaattgcgtgactgggttggatgggtgaaatcacgattccgcaaccttcttctcaagctggagagtcttggtgtttactgtgaccctgatccctcagaacaagttgatcataccatcactgatccaaatgttgtattcttctggggtctcatctatagaaggaatattcaaatatgtataagttctctcaaagaagatttcatgaaaagtgtctgcaataacatctatggaaaggaaaaatgtgcccattcagacatcacaatgtccattgttgggcctccccagctgccaaaaagtgtctttgatctctcagtttactctgaaaagctgccacaacatatgatggggcaccaactaatgaagcagaactacaatgcagtcagt

SEQ ID NO: 1218 - DNA, 1380 bp, Zea mays
atggtgaacggcgagcggcgggcggacgcggagtgcacgcgggcgtcgctgctggggaggtatgagatcgggcggaccctcggcgagggcaacttcggcaaggtgaagtacgcgcgccacatcgccagcggcggccacttcgccatcaagatcctcgaccgcagcaagatcctctccctccgcatcgacgaccagatcaggagggagatcgggacgctcaagctgctcaagcacccgaatgtcgtccgcttgcacgaggttgctgccagtaaaacgaagatctacatggtgcttgagtttgtcaacggcggcgagctcttcgacaagatcgctatcaaggggaaactgtccgaacacgagggcaggaggctcttccagcagctaatcgacggcgtcagctattgccatgacagaggtgtctaccaccgagacctcaagccagagaatgtccttgttgatcggaagggcaccatcaagatctctgacttcggcctcagcgctctacctcaacatctcgggagtgacggacttctgcacacaacatgtggcagccccaactacatagctcctgaggttctgcaaaacagaggctatgacggctccttgtcagatctctggtcgtgtggggtgatcctctacgtgatgcttgttggctgccttcccttcgacgacaggaacctcgtcgttctttatcagaagattttcaagggagactgtcagatccccaagtggctttcgcctgccgcgcaggaccttctcaagaggatcctccaaccgaatccgatgaagaggatcaacgtcgcggggatcagggagcacgagtggttcaagaaggactacgtgcctgctgttccgcacgatgatgacgaagacgtccttcctagtccagctccctcgataaagccaatcgatgagccggcgcaagagaagtgttctcctatcaacgcttttcagttgatcgggatggcctcttcccttgacctttctggtttcttcgaggaagaggatgcagcgcaaagaaagattcggttcacttcgacgcacccacccaaggatctatttgacaagatcgagagcgttgtcatggagatgggattcaaagtccataggggggcaggcaagctcaaggtcttgaagaatagcaagtgttccaggaacccgtcatcattgttggtgtgcaccgaggtgtttgagctcggtccatcattatatgtcgtagagcttaggaaatcccacggagactctacgttgtatagacagctgtgcgaaaggctctccgatgagctaggtgcctgcaagacagaccagatcgcgaggactgaatcatcgagtgacgacctctcgagcgtcgatggcgaagcgttccctctatctgggttc

SEQ ID NO: 1219 - DNA, 1074 bp, Zea mays
atgccttctttcacctccaagactcttctcgccgccgttgccggtgccatgggcgttgctgctcacggtcacgtttcctccatcaacgtcgctggcgccgtctacgacggtttcgatgctagctctgctcctttcgaccagaaccccaagacccttatcgcctggtccaccactgcctccgacaacggtttcgtcgcccctgatgccttcggcaccggcgacatcatctgccaccgcgatgctaagaacgccaagggccacgccaaggtcaaggcaggcgatcagatctacatcaaatgggatacgtggccagagagccacaaaggccccgtcattgacatgttggcctcttgcggttccgctggttgtgagtccgttgacaaggagaccctcaagttcttcaagatcgacgaggctggtcttgtcaagtccggtaaccccggtacttacgcctctgacgagctgattgccaacgacaacggctggctcatcgagatccccgagaacatcaagcccggttcttacgttctccgtcacgagatcattgctctccacgccgctggccaggagaatggtgctcagaactaccctcagtgcttcaacctcgagatctctggttctggctctgagctccctgagggcaccctcggaactgagctgtacaagtccaccgagaagggcatcgtcttcgatctttacaacaaccctaccagctaccccatccctggccctgccatgaccattaagtcccccaaggttacccagggcaagctcgctgagaagtccaagggtacccccaccactggctctggctctgactccggctccggctctgccgcccctgagactcccgctcagactgaggctcccgccgctggtacctccgctgccgcccctgttgctacttccgctgccgctgaggagccctctgcccccgttgagacctcccctgctgcccaggagcctgccactcctgtccagactgaggctcctgccgctaccaagcctgccaagactggctgcaaggccaagcgtggcatgaaggcccgccgtcacgctcgcgacctcatgaac

SEQ ID NO: 1220 - DNA, 1362 bp, Sorghum bicolor
atggaggaggaggggttccgatggagcagagcgggctctttcgtcctgttctacttggtcttgttcctgtccgcggccgtgtcgtcggaggccaacatcggcgacttcgacgactactggcggcagcgcaagctcatggccgacgccgcggcagaggccacgtacaagcatgacccgctcgaggtcaccaaccaactcaaccgcgcagtgcacagatccgtcgagaaggaggacatgagcacgcggcggcgggcgatgatggggcacaagaagggtaagctcaacaacgggccgtgcgaggcgacgaacccgatcgaccgttgctggcggtgccggcaggactgggcgacggaccggaagcggctggctcggtgcgcccagggcttcggtcgcaacaccaccggcggtctggccggcaagttctacgtggtgacggacggcaccgacgacgacgtggtgaaccctcgccccggcacgctccggtgggccgtcatccagatcgagccgctgtggatcaccttcgccaggacgatgatcatcacgctcaaggaggagctcatcatccagggcgacaagaccatcgacggccggggcgcgcaggtgcggatcgccaacggcgcgcagctgacggtgcagttcgccaacaacgtcatcatccacaacgtgcacatcaacgacatcatgtcctccaacaagaacggcggcaacatccgggactcgccggaccacttcggctggcgcaccgtctccgacggcgacggcatcaccctcttcggctccaccaacgtgtggctcgaccacctctccctctccaactgccaggacggcctcatcgacgtcatcgtcaagtccacgggcgtcaccatctccaactgccacatgaccaaccacaacgacgtcatgctcttcagctccagcgacaagcaccccgaggaccagatcatgcagatcaccgtcgccttcaaccacttcggcagaggcctcgtgcagaggatgccgaggtgccgctgggggttcttccacgtcgtcaacaacgactacacgcactggctcatgtacgccatcggcggcagcaaggcgccgaccatcatcagccaggggaaccgctacatcgcgccgcccaacctggcggcgaagctggtcacaaagcaccatgacgcgccggagtcggagtggaagaactgggtgtggcactcggagaacgacctcttcatggagggagccaacttcaccgtcagcggcggccagaagatcaacaggaatttccacaagaaggacctcatcaagcccaagaacgggtcctacgtcaccaggctcacgcgatacgccggcgcgctcgcctgcaggcccggcaagccctgc

SEQ ID NO: 1221 - DNA, 1272 bp, Zea mays
atgaaggtgaggagatcggaaccagttctagtccatgcgaccggagccgcgaccacccaagagtactacttcctctcgaacctggataggaatgtcgccgtgctcatgaaaacagtccacatcttcagcgtgtcatgtgacgatgtggcaacgctgctcagggattccctgagcagggtgctctcgcagtactaccccttcgagggtcggctggccgtacgcgaggacgggaggctcgccgtgcggaacgaccgccgcggtgtccccttcgttgacgcggtgtccgattacgagctgcaggtggtctgtgacgcaacggccccgggttctgagcttctcggtgacctcgtctacgtcagcatgcagcacgagaacgccctggaagcgccgatgctgaccgtgcaggtgaccacgttcaagtgcggcggctttgtcctcgggctcgccatgaaccactgcttggcagacggccagtccgccgccgagttcatctgctcctgggcggagaccgcgcgtggtgtggccatgtcgacgccgccgtacctcgaccgcacggtgcagcgcgccaggccgatcccgacggttgacttcgcacatgacgagttcgcagagatcgaggacgtctccggcctcgccggcacattcggcaaggagccgtgcgtttaccgctccttcactttcgacgcaggcaagctgcacaggctgaagcaagccgcaagcgagcaagggcaaggaggcaccaagagctccgtcttcgtcgcgctcacggctttcgtgtgggtatcaaggacgcgggccctgcggatgctccccgatcagaagagcaagctgctgttcgcggtggacgcccgtctgcgcgtcgacccgcccttgccgcccggcttctggggtaacgccatcatcttcgcctgctgcatctccactgccagggatctcctcagcaaaccactgtccgcggctgcccgttccatcagagaagccatcgtccgcaccgacgacgcgttcatccgttccgccgttgactacatcgagttgaacagcggtgctcgcccgtcgctaatggcaaccaccctggtcactgcttggaatcgactcaggtttcgcgcggcggacttcggatggggtgaagcaatctactcggggccggcggagctgccgcagaaggaggtggccatgtttctgcgcggcgtgagtgacagccagagcacagtgctggttattgggatgcctgtgtcatgtatgcaagcattccaagaaacggtagatctgctg

SEQ ID NO: 1222 - DNA, 1248 bp, Zea mays
atggcttccgcacacaacgctctccgggtgtttttcatcctagccgtggtatgtgccgtatgcacagcgaaaaggacaggagccaacaaggaagaatcggcggcagcccccggtggcgctgctggaggcagcggcgggacgttcgacatctccaagctcggcgcgaccagcgacggcaagacggactgcacaaaggcagtccaggacgcgtggacgtcagcgtgcgaagcgaccggaagcgccacggtggtgatccccaagggcgactacctggtcggccctctcaacttcactgggccatgcaaggggagcaacatcgccatccagctggatggcaacctgctgggatcaaacgacctggacaagtacacggcgagctggatcgaattgtctcacgttaacaacatcgggatcaccggctcgggcacgctggacggccaggggaccgccgtttatagcaagagcaagaccgacaacgtgaaggcgatgcccaacacactggtgctgtttcacgtgatcaacgccactgtcgccggaatcaaactactcaactccaagttcttccacatcaacatcgacaactcagagagcatcaccgtgaaggacgtgaacatcaccgcgcccgccgacgttgagaacacggacggcgtccacgtcggaggctcctccaagatcagcatcctcaactcgaccatcggcaccggcgacgactgcgtctcgattgggcccgggtgcaacggcgtcttggtggacagcatcacctgcggccccgggcagggcatcagcgtcggctgcctaggccgctacaaggacgagaaggacgtgagcgacatcacggtgcggaactgcgtgctcaagaacaccaccaacggcgtgcgcatcaagtcgtacgtggacgccgagtccgtgctgacggcctcccatctcaccttcgagaacatcaggatggaggaggtggccaaccccatcgtcatcgaccagtacttctgcccgcagaaggtatgccctggcaagcggagcaactcctcgcatgtctccgtcaaggacgtcacgttccgcaacatcaccggcacgtcgtccacgcccgaggccatcagcctgctctgctcggagacgcagccatgcagcggcgtctccctcatcgatgtcaacgtggagtacgccggcaagaacaacaaaaccatggccgtctgcagcaacgccaagggcaccgccaagggaagcatcgaggcactggcttgcctggtc

SEQ ID NO: 1223 - DNA, 1500 bp, Sorghum bicolor
atgacgacgccgtgcccgggcgccgcggccgtgcgcgtccagtggacggcgcgctccctggcgggggcgtttctcgacctcacgctcgcctgggcctgcctctgcctcgccgcgctcgccgccgccgcggcccgcttcctcgcgttgcttggcctcccgctcccctgcacctgcgcacgccctcacctgccttgtatcctcgcctttctggcgtgctacccgtcccgcgccgtcgggtccctccacgccgccctccgcgcccgcttccccttcgccggccccaccgacgacgaggaccgccgtcaggagggggcggaggaagatggggaggagcaggccgtcgacgcgcgggaggaggaagcggatcttcgtcgccgcgaggaggcgcgcgccgagctgcagcgggagctcgagaaagagcgcagcgccgcggcgtcggcggccgaggaggccatgtccatgatcctgcgcctgcagaaggagaagtcggcgcttgagatcgaggcgcgacagcagcgccgcaccgctgacgagcgctgcgccttctacgaggacgaggtcgaggagctccgggacatcgtgctcgtgcgggagcgcgaggcgcgcgcgctgcgcaaggaggtggacgcctaccgacgcctgctcgggcttggccctgccgaggatgacgaggaggaggatgacgagcaggagatggtcacaccgcatagtttcctcatgtccgaaggagagcccagctcgtccagatcggtcgatgcgaatcggatgcagcattttcggaataattcttctgggttcagcttcaagacgccatcactgcgtgagcaactaattgtgccgcctcttactgcggatcggatcaatgtgggaagcgatgatagtgttgctgttcagacgccagccaaagttcccacacctcaatcaaggctggagctagatagctctgaggacgaggatgaggatgatggagcagagacggtggaaatcctccccctgtccgcccggagccaagatttggatcaaggtggcgatttccacgttgatgctgcaccaggtatggaatctacttgtgccaaggatacttgcaccaaggaacagacagctcatgcatttcaggaagtcgagtgtccgggtatagacaagattgtcaacaatgaccagacagcaagtaagaatgatgccaatgtctatgatgtgcatgtggtcgatgacatacgcttctcaacagaggtcaagggcctgattggccgaagcttctcagaggcaacaatgcaggcagagagattacagactcgagctgctgcagatgatctccttgggaagagtctgaatgccattaaaggtgcacaggacaagataaggcatgcagcaaatgaaaggaggcagtcattacagttgcaactcttagaggacatagctaatcagcttcagggaatcaaggatgctgcagaagcagggagacaagtgtactgtgctactcctaaaagctccaagaggagc

SEQ ID NO: 1224 - DNA, 993 bp, Zea mays
atggtggtttcaatattgactcacccgttcatggctgcggcggcgtgcgtcgccgtcgcgttggctctgttggccacgaccagcagcgcgcagctggacccgcacttctacgacaaggcgtgcccggcggcgctccccaccatcaagaggctcgtggaggaggctgtggccgcggagccccgcatgggcgcgtcgctgctgcggctgcacttccacgactgcttcgtcaacgggtgcgacgggtccatcctgctggacgacacgcccttcttcaccggcgagacgatggccgcgccgaacgccaactccgtccgcggcttcgacgtgatcgaccgcattaagggcgccgtcaacgccgcctgcaggggcaacgtggtctcctgcgccgacgtcgtcgccatcgcggcacgcgactccgtcgtcgcgctgggagggccgtcgtacgacgtgccgctgggccgccgggacgcgcggacggcgagccaggcggcggcgaacagcagcatcccggcgccgaccttcggcatcgaccgcctggcctccaacttcgcgtcgcacggcctctccctgcaggacctcgtcgcgctctcgggagcgcacacgctggggttctcccgctgcaccaacttccgagaccgcctctacaacgagaccgccaccctggacggctccctcgccgcctcgctccgggccgcgtgccctcgggccgccggcaccggcgacgacagcctcgcgccgctcgaccccacgcccgcgcggttcgacgccgcctacttcgcctcgctgctgcggaaccggggagtgctgcactcggaccagcagctgttcgccggcggccccggcgtcgcggacgccctcgtgaggttgtacgccgccgacaccgacgccttcaggagggacttcgcggacgccatggtgaggatgggcagcctcagcccgctcaccgggagcaacggcgagattcgctacaactgccggaaggtgaactactct

SEQ ID NO: 1225 - DNA, 966 bp, Zea mays
atggcgaggcggagcctggcggtcgacgcaaccgcaggcgccgcatcccgggttcggttcgcgcccacctccaataacctgctcgtctcctcatgggattcggggctgcggttgtacgatgccgacgagggcacgctcagggtcaacgtggagtcagaggcggcattcctcgactgctgcttcgaggatgagtctgcagcgtttgcctgcggctctgatggatctgtgagaaggtacgacttccactcaggttcgcaggatacggtggggctccatgaagatgcactagcctgcattgagttctcttcactgaccggtcagattatgacaggcagccttgacaagaagctaaagctttgggattcaaaaacaagaaatgtaagcccgagcggcaccataaccttaaattcagatgtggcctcaatttctatatgcggcatttacatattagctgcagttgagagaaatgtttatctttatgacatgaggaatctaacaagaccagttgatgaaaaagactgtcctctggattatcaaattcgatgccttcatacttctctagagtggaatgcttatgttgctggctctgtggatggagttgttgcattgaagtatcttgatcgtggaacagatagagatttgggatatgcatttcgttgtcatccaaattccagaaacggaaaatggaatctggtccctgtaaattgcatctcagttcatccctgcaacagaactttcgttacgggagatgataaaggatgcactattgtttgggatgctcaattgaaaaagaagctgattgagcttccaatgtatttgggcagtgtggcgtcagtggcatacaaccataatggccaacttctggcggttgcctcaaactattttttagaagtggataaagaggagcaacaccaccaggtattcattgaaactgtggagaacttcaaaggcaagtcccgtgtggga

SEQ ID NO: 1226 - DNA, 1602 bp, Artificial sequence
  Mir resistant mutated nucleotide sequence
atggaggagtgcaccttcacctcggcggccatggccgtggggttcctgctggtcgtgtacctgtacgagccgtactggaaggtgcggcacgtgccggggcccgttccgctgccgttcgtcggccacctccacctgctggcgaggcacggcccggacgtcttcctcgtgctcgccaagaagtacgggccaatcttcaggttccacatgggaaggcaacctttggtcatcgtggccaacgcagagctctgcaaggaggtcggcatcaagaagttcaagagcatgccgaaccggagcttaccttcggccatcgccaattccccgatccacctcaaaggcctcttctcgacaagggattcacggtggtcggcgttgcgaaacatcatcgtctccatctaccagccctcgcacctggcggggctgatcccgagcatgcagtcgcacatcgagcgcgcggccacgaacctggacgacggcggcgaggccgaggtcgccttctccaagctcgcgctcagcctcgccaccgacgtgatcggacaggcggcgttcggcgcggacttcggcctgaccacaaagcctgccgcgccgccccctcaccacggaccaccacgacagcacggcgaggaagacggagacggtagtcacagcaccaggtcgtcggagttcataaagatgcacatccactcgaccacgtcgctgaagatggacctgtcggggtcgctgtccaccatcgtcggcacgctcctgcccgtgctgcagtggccgctacggcagctgctcctgcgggtcccgggcgccgccgacagggagatccagcgcgtcaacggagcattatgtagaatgatggacggcatcgtggccgacagggtggccgcgagggagcgcgcgccccaagcccagcggcagaaagacttcctgtccgtggtcctcgccgcgcgcgacagcgacgcggccgcgcggaagctgctcacgccggactacctcagcgctctcacctacgagcacctcctcgccgggtcggccaccacggccttcacgctgtcctccgtgctctacctcgtcgcccagcacccgcgggtggaggagaagctgctgagggaggttgacgcgttcggacctccggaccgcgttcccacggcggaagatcttcagagccgcttcccctacaccgatcaggtgctgaaggaatcgatgagatttttcatggtctcgccgctggttgcgcgggagacctctgagcaggtggacatcgctggctatgtcctgcccaagagtacgtgggtgtggatggcaccgggggttctggcaaaggaccccgtcaacttccctgagccagagctcttccggccggagcggttcgaccctgccggcgacgagcagaagaggcggcacccctacgcgttcatcccgttcggaatcggtcccaggatttgcatcggccagaggttctccatccaggagatcaagcttgcgctgatccacctctaccggcagtacgtgttccggcactctccaagcatggagtcccctttggagtttcagttcggtgttgtgctcaacttcaaacatggagtgaagcttcagtccatcaagaggcacaaatgt

SEQ ID NO: 1227 - DNA, 1602 bp, Artificial sequence
  Mir resistant mutated nucleotide sequence
atggaggagtgcaccttcacctcggcggccatggccgtggggttcctgctggtcgtgtacctgtacgagccgtactggaaggtgcggcacgtgccggggcccgttccgctgccgttcgtcggccacctccacctgctggcgaggcacggcccggacgtcttcctcgtgctcgccaagaagtacgggccaatcttcaggttccacatgggaaggcaacctttggtcatcgtggccaacgcagagctctgcaaggaggtcggcatcaagaagttcaagagcatgccgaaccggagcttaccttcggccatcgccaattccccgatccacctcaaaggcctcttctcgacaagggattcacggtggtcggcgttgcgaaacatcatcgtctccatctaccagccctcgcacctggcggggctgatcccgagcatgcagtcgcacatcgagcgcgcggccacgaacctggacgacggcggcgaggccgaggtcgccttctccaagctcgcgctcagcctcgccaccgacgtgatcggacaggcggcgttcggcgcggacttcggcctgaccacaaagcctgccgcgccgccccctcaccacggaccaccacgacagcacggcgaggaagacggagacggtagtcacagcaccaggtcgtcggagttcataaagatgcacatccactcgaccacgtcgctgaagatggacctgtcggggtcgctgtccaccatcgtcggcacgctcctgcccgtgctgcagtggccgctacggcagctgctcctgcgggtcccgggcgccgccgacagggagatccagcgcgtcaacggcgcattatgtagaatgatggacggcatcgtggccgacagggtggccgcgagggagcgcgcgccccaagcccagcggcagaaagacttcctgtccgtggtcctcgccgcgcgcgacagcgacgcggccgcgcggaagctgctcacgccggactacctcagcgctctcacctacgagcacctcctcgccgggtcggccaccacggccttcacgctgtcctccgtgctctacctcgtcgcccagcacccgcgggtggaggagaagctgctgagggaggttgacgcgttcggacctccggaccgcgttcccacggcggaagatcttcagagccgcttcccctacaccgatcaggtgctgaaggaatcgatgagatttttcatggtctcgccgctggttgcgcgggagacctctgagcaggtggacatcgctggctatgtcctgcccaagagtacgtgggtgtggatggcaccgggggttctggcaaaggaccccgtcaacttccctgagccagagctcttccggccggagcggttcgaccctgccggcgacgagcagaagaggcggcacccctacgcgttcatcccgttcggaatcggtcccaggatttgcatcggccagaggttctccatccaggagatcaagcttgcgctgatccacctctaccggcagtacgtgttccggcactctccaagcatggagtcccctttggagtttcagttcggtgttgtgctcaacttcaaacatggagtgaagcttcagtccatcaagaggcacaaatgt

SEQ ID NO: 1228 - DNA, 1602 bp, Artificial sequence; identical to SEQ ID NO: 1227
  Mir resistant mutated nucleotide sequence

SEQ ID NO: 1229 - DNA, 1602 bp, Artificial sequence; identical to SEQ ID NO: 1227
  Mir resistant mutated nucleotide sequence

SEQ ID NO: 1230 - DNA, 1602 bp, Artificial sequence
  Mir resistant mutated nucleotide sequence
atggaggagtgcaccttcacctcggcggccatggccgtggggttcctgctggtcgtgtacctgtacgagccgtactggaaggtgcggcacgtgccggggcccgttccgctgccgttcgtcggccacctccacctgctggcgaggcacggcccggacgtcttcctcgtgctcgccaagaagtacgggccaatcttcaggttccacatgggaaggcaacctttggtcatcgtggccaacgcagagctctgcaaggaggtcggcatcaagaagttcaagagcatgccgaaccggagcttaccttcggccatcgccaattccccgatccacctcaaaggcctcttctcgacaagggattcacggtggtcggcgttgcgaaacatcatcgtctccatctaccagccctcgcacctggcggggctgatcccgagcatgcagtcgcacatcgagcgcgcggccacgaacctggacgacggcggcgaggccgaggtcgccttctccaagctcgcgctcagcctcgccaccgacgtgatcggacaggcggcgttcggcgcggacttcggcctgaccacaaagcctgccgcgccgccccctcaccacggaccaccacgacagcacggcgaggaagacggagacggtagtcacagcaccaggtcgtcggagttcataaagatgcacatccactcgaccacgtcgctgaagatggacctgtcggggtcgctgtccaccatcgtcggcacgctcctgcccgtgctgcagtggccgctacggcagctgctcctgcgggtcccgggcgccgccgacagggagatccagcgcgtcaacggagcgttatgtagaatgatggacggcatcgtggccgacagggtggccgcgagggagcgcgcgccccaagcccagcggcagaaagacttcctgtccgtggtcctcgccgcgcgcgacagcgacgcggccgcgcggaagctgctcacgccggactacctcagcgctctcacctacgagcacctcctcgccgggtcggccaccacggccttcacgctgtcctccgtgctctacctcgtcgcccagcacccgcgggtggaggagaagctgctgagggaggttgacgcgttcggacctccggaccgcgttcccacggcggaagatcttcagagccgcttcccctacaccgatcaggtgctgaaggaatcgatgagatttttcatggtctcgccgctggttgcgcgggagacctctgagcaggtggacatcgctggctatgtcctgcccaagagtacgtgggtgtggatggcaccgggggttctggcaaaggaccccgtcaacttccctgagccagagctcttccggccggagcggttcgaccctgccggcgacgagcagaagaggcggcacccctacgcgttcatcccgttcggaatcggtcccaggatttgcatcggccagaggttctccatccaggagatcaagcttgcgctgatccacctctaccggcagtacgtgttccggcactctccaagcatggagtcccctttggagtttcagttcggtgttgtgctcaacttcaaacatggagtgaagcttcagtccatcaagaggcacaaatgt

SEQ ID NO: 1231 - DNA, 933 bp, Artificial sequence
  Mir resistant mutated nucleotide sequence
atggccgcggtggatctgaccccaaggacgcccaagaaggcctacggcggcgacggcggcgcctactacgagtggagccccgccgacctgcccatgctcgccgtcgcctccatcggcgccgccaagctctcgctcgccgccggcggcctctccctccccagctactccgactccgccaaggtcgcctacgtcctacaaggcgtcggtacctgcggcctcgtcctccccgaggcgacgaaggagaaggtggtggcggtgaaggagggcgacgcgctggcgctgcccttcggcgcggtgacgtggtggcacaacggccccgccgcgcaggccgacctcacggtgctcttcctcggcgacacctccaagggccacaagcgggggcagttcaccaacttccagctcacggggtccgcgggcatcttcacgggcctgtccaccgagttcgtgtcgcgcgcgtgggatctgccggagcccgacgccgcgaggctggtgtcgagccagccggcctcgggcatcgtcaaattaccagcaagtgcagccgcgctcccggcgccctcgccgcaggaccgcgccggggtggcgctcaactgcctggtggcgccgctggacgtggacatccccggcgggggccgcgtcgtggtgctcaacacggccaacctgccgctggtgcgcgaggtcgggctcggcgccgacctggtccgcatcgacgcccactccatgtgctccccgggcttctcgtgcgactcggcgtaccaggtcacgtacatcgtgcgcggcagcggccgggtgcaggtggtcgggcccgacgggaggcgcgtgctggagacccgcatcgagggcgggtccctcttcatcgtgccccgcttccatgtcgtgtccaagatcgccgacgcgtccgggatggagtggttctccatcatcaccaccccgaag

SEQ ID NO: 1232 - DNA, 933 bp, Artificial sequence
  Mir resistant mutated nucleotide sequence
atggccgcggtggatctgaccccaaggacgcccaagaaggcctacggcggcgacggcggcgcctactacgagtggagccccgccgacctgcccatgctcgccgtcgcctccatcggcgccgccaagctctcgctcgccgccggcggcctctccctccccagctactccgactccgccaaggtcgcctacgtcctacaaggcgtcggtacctgcggcctcgtcctccccgaggcgacgaaggagaaggtggtggcggtgaaggagggcgacgcgctggcgctgcccttcggcgcggtgacgtggtggcacaacggccccgccgcgcaggccgacctcacggtgctcttcctcggcgacacctccaagggccacaagcgggggcagttcaccaacttccagctcacggggtccgcgggcatcttcacgggcctgtccaccgagttcgtgtcgcgcgcgtgggatctgccggagcccgacgccgcgaggctggtgtcgagccagccggcctcgggcatcgtcaagttaccagcaagtgcagccgcgctcccggcgccctcgccgcaggaccgcgccggggtggcgctcaactgcctggtggcgccgctggacgtggacatccccggcgggggccgcgtcgtggtgctcaacacggccaacctgccgctggtgcgcgaggtcgggctcggcgccgacctggtccgcatcgacgcccactccatgtgctccccgggcttctcgtgcgactcggcgtaccaggtcacgtacatcgtgcgcggcagcggccgggtgcaggtggtcgggcccgacgggaggcgcgtgctggagacccgcatcgagggcgggtccctcttcatcgtgccccgcttccatgtcgtgtccaagatcgccgacgcgtccgggatggagtggttctccatcatcaccaccccgaag

SEQ ID NO: 1233 - DNA, 933 bp, Artificial sequence
  Mir resistant mutated nucleotide sequence
atggccgcggtggatctgaccccaaggacgcccaagaaggcctacggcggcgacggcggcgcctactacgagtggagccccgccgacctgcccatgctcgccgtcgcctccatcggcgccgccaagctctcgctcgccgccggcggcctctccctccccagctactccgactccgccaaggtcgcctacgtcctacaaggcgtcggtacctgcggcctcgtcctccccgaggcgacgaaggagaaggtggtggcggtgaaggagggcgacgcgctggcgctgcccttcggcgcggtgacgtggtggcacaacggccccgccgcgcaggccgacctcacggtgctcttcctcggcgacacctccaagggccacaagcgggggcagttcaccaacttccagctcacggggtccgcgggcatcttcacgggcctgtccaccgagttcgtgtcgcgcgcgtgggatctgccggagcccgacgccgcgaggctggtgtcgagccagccggcctcgggcatcgtcaaactgccagcaagtgcagccgcgctcccggcgccctcgccgcaggaccgcgccggggtggcgctcaactgcctggtggcgccgctggacgtggacatccccggcgggggccgcgtcgtggtgctcaacacggccaacctgccgctggtgcgcgaggtcgggctcggcgccgacctggtccgcatcgacgcccactccatgtgctccccgggcttctcgtgcgactcggcgtaccaggtcacgtacatcgtgcgcggcagcggccgggtgcaggtggtcgggcccgacgggaggcgcgtgctggagacccgcatcgagggcgggtccctcttcatcgtgccccgcttccatgtcgtgtccaagatcgccgacgcgtccgggatggagtggttctccatcatcaccaccccgaag

SEQ ID NO: 1234 - DNA, 933 bp, Artificial sequence
  Mir resistant mutated nucleotide sequence
atggccgcggtggatctgaccccaaggacgcccaagaaggcctacggcggcgacggcggcgcctactacgagtggagccccgccgacctgcccatgctcgccgtcgcctccatcggcgccgccaagctctcgctcgccgccggcggcctctccctccccagctactccgactccgccaaggtcgcctacgtcctacaaggcgtcggtacctgcggcctcgtcctccccgaggcgacgaaggagaaggtggtggcggtgaaggagggcgacgcgctggcgctgcccttcggcgcggtgacgtggtggcacaacggccccgccgcgcaggccgacctcacggtgctcttcctcggcgacacctccaagggccacaagcgggggcagttcaccaacttccagctcacggggtccgcgggcatcttcacgggcctgtccaccgagttcgtgtcgcgcgcgtgggatctgccggagcccgacgccgcgaggctggtgtcgagccagccggcctcgggcatcgtcaaattacccgcaagtgcagccgcgctcccggcgccctcgccgcaggaccgcgccggggtggcgctcaactgcctggtggcgccgctggacgtggacatccccggcgggggccgcgtcgtggtgctcaacacggccaacctgccgctggtgcgcgaggtcgggctcggcgccgacctggtccgcatcgacgcccactccatgtgctccccgggcttctcgtgcgactcggcgtaccaggtcacgtacatcgtgcgcggcagcggccgggtgcaggtggtcgggcccgacgggaggcgcgtgctggagacccgcatcgagggcgggtccctcttcatcgtgccccgcttccatgtcgtgtccaagatcgccgacgcgtccgggatggagtggttctccatcatcaccaccccgaag

SEQ ID NO: 1235 - DNA, 933 bp, Artificial sequence
  Mir resistant mutated nucleotide sequence
atggccgcggtggatctgaccccaaggacgcccaagaaggcctacggcggcgacggcggcgcctactacgagtggagccccgccgacctgcccatgctcgccgtcgcctccatcggcgccgccaagctctcgctcgccgccggcggcctctccctccccagctactccgactccgccaaggtcgcctacgtcctacaaggcgtcggtacctgcggcctcgtcctccccgaggcgacgaaggagaaggtggtggcggtgaaggagggcgacgcgctggcgctgcccttcggcgcggtgacgtggtggcacaacggccccgccgcgcaggccgacctcacggtgctcttcctcggcgacacctccaagggccacaagcgggggcagttcaccaacttccagctcacggggtccgcgggcatcttcacgggcctgtccaccgagttcgtgtcgcgcgcgtgggatctgccggagcccgacgccgcgaggctggtgtcgagccagccggcctcgggcatcgtcaaattaccagccagtgccgccgcgctcccggcgccctcgccgcaggaccgcgccggggtggcgctcaactgcctggtggcgccgctggacgtggacatccccggcgggggccgcgtcgtggtgctcaacacggccaacctgccgctggtgcgcgaggtcgggctcggcgccgacctggtccgcatcgacgcccactccatgtgctccccgggcttctcgtgcgactcggcgtaccaggtcacgtacatcgtgcgcggcagcggccgggtgcaggtggtcgggcccgacgggaggcgcgtgctggagacccgcatcgagggcgggtccctcttcatcgtgccccgcttccatgtcgtgtccaagatcgccgacgcgtccgggatggagtggttctccatcatcaccaccccgaag

SEQ ID NO: 1236 - DNA, 1020 bp, Artificial sequence
  Mir resistant mutated nucleotide sequence
atggcggctctgccgcccttctcgccgcggcggcccttctcgtcgccgtgcttcatcctctgcttcctactcggcttcgtcgcgggcctcttccccttcgcgcaccgccacctccacctcgacctccaccacctcccgctcccggtcccggaccctcctcctactcctcctcctgccgcgccgacccaggcggccccgactccgccgccgacgacgacgaccctgatcgtcgtcacgccgacccgcgcgcgcccgctgcaggcgtactacctgcaccgcctcgcgcacacgctccgcctcgtgccccagccgctgctctggctcgtcgtcgaccgcggcgccgccacgcgcgagaccgccgccctgctccgcggctgcggcctcatgtaccgccacctcccttcctcccaccgcggcgacgcgcccgatgatgctcgccggagaggggcgacccatgagcacccggcggagcgcggcctgcagcggcgccagaggaacgcggcgctcgaccacatcgagcaccaccgcatccacggcctcgtctacttcgccgacgaggacaacgtgtattcccttgacctcttccatcagcttcgcggcataaggagttttggcacatggcccgtagccatgttaggcgtgggcaagagcaagacacttctggaagggccagtttgtgacagcagccaggtggtaggatggcacacgaacgagagggacaagaggcaacgaaggtttcatgtgaatacttcgggctttgctttcaatagcagtatgctctgggatgccgacaagagggctcatcaggcgtggaattacatccggctgctggacacggtcagagatgggtttcaggcaacaacatttgtagaacagcttgtagaagatgaaacttatatggagggcataccaactggttgttcaaaaattatgaatgttaatcttcatctagaagataaacatcttgtatatccaaagggatggcaaatgacagaaaacctggatgtattaattcctctc

SEQ ID NO: 1237 - DNA, 1020 bp, Artificial sequence
  Mir resistant mutated nucleotide sequence
atggcggctctgccgcccttctcgccgcggcggcccttctcgtcgccgtgcttcatcctctgcttcctactcggcttcgtcgcgggcctcttccccttcgcgcaccgccacctccacctcgacctccaccacctcccgctcccggtcccggaccctcctcctactcctcctcctgccgcgccgacccaggcggccccgactccgccgccgacgacgacgaccctgatcgtcgtcacgccgacccgcgcgcgcccgctgcaggcgtactacctgcaccgcctcgcgcacacgctccgcctcgtgccccagccgctgctctggctcgtcgtcgaccgcggcgccgccacgcgcgagaccgccgccctgctccgcggctgcggcctcatgtaccgccacctcccttcctcccaccgcggcgacgcgcccgatgatgctcgccggagaggggcgacccatgagcacccggcggagcgcggcctgcagcggcgccagaggaacgcggcgctcgaccacatcgagcaccaccgcatccacggcctcgtctacttcgccgacgaggacaacgtgtattcccttgacctcttccatcagcttcgcggcataaggagttttggcacctggcccgtagccatgttaggcgtgggcaagagcaagacacttctggaagggccagtttgtgacagcagccaggtggtaggatggcacacgaacgagagggacaagaggcaacgaaggtttcatgtgaatacttcgggctttgctttcaatagcagtatgctctgggatgccgacaagagggctcatcaggcgtggaattacatccggctgctggacacggtcagagatgggtttcaggcaacaacatttgtagaacagcttgtagaagatgaaacttatatggagggcataccaactggttgttcaaaaattatgaatgttaatcttcatctagaagataaacatcttgtatatccaaagggatggcaaatgacagaaaacctggatgtattaattcctctc

SEQ ID NO: 1238 - DNA, 1020 bp, Artificial sequence; identical to SEQ ID NO: 1237
  Mir resistant mutated nucleotide sequence

SEQ ID NO: 1239 - DNA, 1020 bp, Artificial sequence; identical to SEQ ID NO: 1237
  Mir resistant mutated nucleotide sequence

SEQ ID NO: 1240 - DNA, 1020 bp, Artificial sequence
  Mir resistant mutated nucleotide sequence
atggcggctctgccgcccttctcgccgcggcggcccttctcgtcgccgtgcttcatcctctgcttcctactcggcttcgtcgcgggcctcttccccttcgcgcaccgccacctccacctcgacctccaccacctcccgctcccggtcccggaccctcctcctactcctcctcctgccgcgccgacccaggcggccccgactccgccgccgacgacgacgaccctgatcgtcgtcacgccgacccgcgcgcgcccgctgcaggcgtactacctgcaccgcctcgcgcacacgctccgcctcgtgccccagccgctgctctggctcgtcgtcgaccgcggcgccgccacgcgcgagaccgccgccctgctccgcggctgcggcctcatgtaccgccacctcccttcctcccaccgcggcgacgcgcccgatgatgctcgccggagaggggcgacccatgagcacccggcggagcgcggcctgcagcggcgccagaggaacgcggcgctcgaccacatcgagcaccaccgcatccacggcctcgtctacttcgccgacgaggacaacgtgtattcccttgacctcttccatcagcttcgcggcataaggagttttggcacatggccagtagccatgttaggcgtgggcaagagcaagacacttctggaagggccagtttgtgacagcagccaggtggtaggatggcacacgaacgagagggacaagaggcaacgaaggtttcatgtgaatacttcgggctttgctttcaatagcagtatgctctgggatgccgacaagagggctcatcaggcgtggaattacatccggctgctggacacggtcagagatgggtttcaggcaacaacatttgtagaacagcttgtagaagatgaaacttatatggagggcataccaactggttgttcaaaaattatgaatgttaatcttcatctagaagataaacatcttgtatatccaaagggatggcaaatgacagaaaacctggatgtattaattcctctc

SEQ ID NO: 1241 - DNA, 1215 bp, Artificial sequence
  Mir resistant mutated nucleotide sequence
atgggttgcttttctacattttgcaagaaaagaagggcaacgcggcaaccaagttcccaccataatgaagacgtacctggctgttcaaatataacaaaatacacttacaaggagctagtaagggcgacaaataactttaacccattgaacaaaattggtgagggtggttttggttccgtttacaagggacagctcaggaatggtacagttattgctgtcaaggtcctttcgtcggagtcaagacaaggagtaagggagtttctgaatgaactcgtggcaatttccgacatctcacatgataatcttgtgaaactttatgggtattgtgcggaaggagaccaaagaatccttgtttacaatcatcttgaaaataatagccttgcacaaacacttctaggctccagccacagcaatatccagtttgattggaaaacacgagtaaatatttgccttggcattgcacggggattagcatacctccatcatggtgtcagtccccacattgttcatcgagacattaaagcaagcaatatacttcttgatagggaccttaccccaaaaatctctgattttggtctagcaaagcttcttccaccaaacgcaacacatgttagcacaagagttgcaggaacactgggttatttggctcctgagtatgctattcgaggacaggtgacacgcaaatcagatgtgtacagctttggcgtgctgcttctggaaattgtttgcgggagatcaaacagcgatacaagattagcatacggagatcagatactcctcgaaaagttcccagagatcaccaacggggctctcctcttgcagacatggatgcactacgagcaggggagtctggagaggatcatagacaggtccttgggcggcggcgacctggacgtggcgcaggcctgcaggttcctgaaggtcgggctgctgtgcacgcaggacgtgacgaggcaccggcccgacatgccacgagtagtagcaatgttaacgggcgagtgggacgtcgagccggagacggtcagcaagcccgccataatcagcgacttcatggacctcaaggtcaggagcacgaggaaagcgagcgacaacgtggccacgccgcctacgtcctcctcgacgttcctgtcctccctcatggcgcactcctcgcccttgctgtcgaacgagtccacgcaggcctccatggcgttcaccggggtgtcggatcgcgag

SEQ ID NO: 1242 - DNA, 1215 bp, Artificial sequence
  Mir resistant mutated nucleotide sequence
atgggttgcttttctacattttgcaagaaaagaagggcaacgcggcaaccaagttcccaccataatgaagacgtacctggctgttcaaatataacaaaatacacttacaaggagctagtaagggcgacaaataactttaacccattgaacaaaattggtgagggtggttttggttccgtttacaagggacagctcaggaatggtacagttattgctgtcaaggtcctttcgtcggagtcaagacaaggagtaagggagtttctgaatgaactcgtggcaatttccgacatctcacatgataatcttgtgaaactttatgggtattgtgcggaaggagaccaaagaatccttgtttacaatcatcttgaaaataatagccttgcacaaacacttctaggctccagccacagcaatatccagtttgattggaaaacacgagtaaatatttgccttggcattgcacggggattagcatacctccatcatggtgtcagtccccacattgttcatcgagacattaaagcaagcaatatacttcttgatagggaccttaccccaaaaatctctgattttggtctagcaaagcttcttccaccaaacgcaacacatgttagcacaagagttgcaggaacactgggttatttggctcctgagtatgctattcgaggacaggtgacacgcaaatcagatgtgtacagctttggcgtgctgcttctggaaattgtttgcgggagatcaaacagcgatacaagattagcatacggagatcagatactcctcgaaaagttcccagagatcaccaacggggctctcctcttgcagacatggatgcactacgagcaggggagtctggagaggatcatagacaggtccttgggcggcggcgacctggacgtggcgcaggcctgcaggttcctgaaggtcgggctgctgtgcacgcaggacgtgacgaggcaccggcccgacatgccgcgagtagtagcaatgttaacgggcgagtgggacgtcgagccggagacggtcagcaagcccgccataatcagcgacttcatggacctcaaggtcaggagcacgaggaaagcgagcgacaacgtggccacgccgcctacgtcctcctcgacgttcctgtcctccctcatggcgcactcctcgcccttgctgtcgaacgagtccacgcaggcctccatggcgttcaccggggtgtcggatcgcgag

SEQ ID NO: 1243 - DNA, 1215 bp, Artificial sequence; identical to SEQ ID NO: 1242
  Mir resistant mutated nucleotide sequence

SEQ ID NO: 1244 - DNA, 1215 bp, Artificial sequence; identical to SEQ ID NO: 1242
  Mir resistant mutated nucleotide sequence

SEQ ID NO: 1245 - DNA, 1215 bp, Artificial sequence
  Mir resistant mutated nucleotide sequence
atgggttgcttttctacattttgcaagaaaagaagggcaacgcggcaaccaagttcccaccataatgaagacgtacctggctgttcaaatataacaaaatacacttacaaggagctagtaagggcgacaaataactttaacccattgaacaaaattggtgagggtggttttggttccgtttacaagggacagctcaggaatggtacagttattgctgtcaaggtcctttcgtcggagtcaagacaaggagtaagggagtttctgaatgaactcgtggcaatttccgacatctcacatgataatcttgtgaaactttatgggtattgtgcggaaggagaccaaagaatccttgtttacaatcatcttgaaaataatagccttgcacaaacacttctaggctccagccacagcaatatccagtttgattggaaaacacgagtaaatatttgccttggcattgcacggggattagcatacctccatcatggtgtcagtccccacattgttcatcgagacattaaagcaagcaatatacttcttgatagggaccttaccccaaaaatctctgattttggtctagcaaagcttcttccaccaaacgcaacacatgttagcacaagagttgcaggaacactgggttatttggctcctgagtatgctattcgaggacaggtgacacgcaaatcagatgtgtacagctttggcgtgctgcttctggaaattgtttgcgggagatcaaacagcgatacaagattagcatacggagatcagatactcctcgaaaagttcccagagatcaccaacggggctctcctcttgcagacatggatgcactacgagcaggggagtctggagaggatcatagacaggtccttgggcggcggcgacctggacgtggcgcaggcctgcaggttcctgaaggtcgggctgctgtgcacgcaggacgtgacgaggcaccggcccgacatgccaagggtagtagcaatgttaacgggcgagtgggacgtcgagccggagacggtcagcaagcccgccataatcagcgacttcatggacctcaaggtcaggagcacgaggaaagcgagcgacaacgtggccacgccgcctacgtcctcctcgacgttcctgtcctccctcatggcgcactcctcgcccttgctgtcgaacgagtccacgcaggcctccatggcgttcaccggggtgtcggatcgcgag

SEQ ID NO: 1246 - DNA, 1638 bp, Artificial sequence
  Mir resistant mutated nucleotide sequence
atggcgtcgccgcaccttcccttcctctccttccccaaaaccctaccgccaccacctccaccgctcaagccccacgcccaccgcacctccctcgccgtcgccgctgctcctgctcccccgcccgccccgcctgacggcgcggggcccgccgcgcccacgcgtggcgaccgcttcctcggccgccagctggccaccgaggccgccgcgcgcgtgctcgcgcccgacgacgccgacaggcgccgccgacgcaaggagaagcgccgggcactgtcgcggaagccctccggcctcgcctcttgctacgggtgcggcgccccgctgcagacggcggaggaggccgcgccgggatacgtagaccccgacacgtacgaactgaaaaagaggcaccaccaactgagaaccgttctatgtggaaggtgcaagctgctctctcatggccacatggtcactgctgttggtggccacggcggttatcctgggggcaagcagtttgtttctgcggaacagctcagggagaagctgtcatacctccgtcacgagaaagcactgatagtcaaattggttgacatcgttgacttcaatgggagtttcctggcacgagtacgtgactttgctggtgcaaatccgattattcttgtgataacaaaggttgatctccttcccagagacactgatttgaattgcataggcgactgggttgtcgagtcagttgtcaagaagaagcttaatgtccttagtgtccatttgacaagctcaaagtcactggtcggtatcacaggggttatatcagagattcaacaggaaaagaagggccgagatgtatatatactgggttctgcaaatgttgggaaatctgcatttatcagtgcaatgctaagaacaatggcatacaaggatccggtggcagcggcagctcaaaaatacaagcctatacagtctgctgttcctggaacaacccttggccctattcaaattgaagcatttttaggcggagggaaattgtatgatacacctggagtccaccttcaccataggcaggcagcagttatccatgctgatgatctgccttctcttgcaccacaaagtcgtttgaaagggcgatgttttcccgctaatgatacagatgttgaattgagtgggaattcattattctgggctgggctagtccgcattgatgttgtcaaggctcttccacgcgcacggctgacattctatgggcccaagaagctaaagattaatatggtcccgacaacagaagcagatcaattttacgagactgaagttggagttacattgactccaccaactggtaaggagagagctgaaggatggcaagggcttcaaggtgttcgcgagttgaagataaagtatgaggaacgtgacaggcctgcttgtgacatcgcgatctctgggcttgggtggatttctgtggagccatcaggcgtgccctcaaacagctctgatgacaatgtcgaggaagaatacgatggcggtgagctgcatctggtagtacatgtacccaaaccggttgaggtcttcgtccgccccccattgcctgttggtaaggccgcaagccagtggtatcagtatcaagagctcacagaggaagaagaggagttgaggcctaaatggcactac

SEQ ID NO: 1247 - DNA, 1638 bp, Artificial sequence
  Mir resistant mutated nucleotide sequence
atggcgtcgccgcaccttcccttcctctccttccccaaaaccctaccgccaccacctccaccgctcaagccccacgcccaccgcacctccctcgccgtcgccgctgctcctgctcccccgcccgccccgcctgacggcgcggggcccgccgcgcccacgcgtggcgaccgcttcctcggccgccagctggccaccgaggccgccgcgcgcgtgctcgcgcccgacgacgccgacaggcgccgccgacgcaaggagaagcgccgggcactgtcgcggaagccctccggcctcgcctcttgctacgggtgcggcgccccgctgcagacggcggaggaggccgcgccgggatacgtagaccccgacacgtacgaactgaaaaagaggcaccaccaactgagaaccgttctatgtggaaggtgcaagctgctctctcatggccacatggtcactgctgttggtggccacggcggttatcctgggggcaagcagtttgtttctgcggaacagctcagggagaagctgtcatacctccgtcacgagaaagcactgatagtcaaattggttgacatcgttgacttcaatgggagtttcctggcacgagtacgtgactttgctggtgcaaatccgattattcttgtgataacaaaggttgatctccttcccagagacactgatttgaattgcataggcgactgggttgtcgagtcagttgtcaagaagaagcttaatgtccttagtgtccatttgacaagctcaaagtcactggtcggtatcacaggggttatatcagagattcaacaggaaaagaagggccgagatgtatatatactgggttctgcaaatgttgggaaatctgcatttatcagtgcaatgctaagaacaatggcatacaaggatccggtggcagcggcagctcaaaaatacaagcctatacagtctgctgttcctggaacaacccttggccctattcaaattgaagcatttttaggcggagggaaattgtatgatacacctggagtccaccttcaccataggcaggcagcagttatccatgctgatgatctgccttctcttgcaccacaaagtcgtttgaaagggcgatgttttcccgctaatgatacagatgttgaattgagtgggaattcattattctgggctgggctagtccgcattgatgttgtcaaggctcttccacgcgcacggctgacattctatgggcccaagaagctaaagattaatatggtcccgacaacagaagcagatcaattttacgagactgaagttggagttacattgactccaccaactggtaaggagagagctgaaggatggcaagggcttcaaggtgttcgcgagttgaagataaagtatgaggaacgtgacaggcctgcttgtgacatcgcgatctctgggcttgggtggatttctgtggagccatcaggcgtgccctcaaacagctctgatgacaatgtcgaggaagaatacgatggcggtgagctgcatctggtagtacatgtacccaaaccggttgaggtcttcgtccgccccccattgcctgttggtaaggccgcgagccagtggtatcagtatcaagagctcacagaggaagaagaggagttgaggcctaaatggcactac

SEQ ID NO: 1248 - DNA, 1638 bp, Artificial sequence
  Mir resistant mutated nucleotide sequence
atggcgtcgccgcaccttcccttcctctccttccccaaaaccctaccgccaccacctccaccgctcaagccccacgcccaccgcacctccctcgccgtcgccgctgctcctgctcccccgcccgccccgcctgacggcgcggggcccgccgcgcccacgcgtggcgaccgcttcctcggccgccagctggccaccgaggccgccgcgcgcgtgctcgcgcccgacgacgccgacaggcgccgccgacgcaaggagaagcgccgggcactgtcgcggaagccctccggcctcgcctcttgctacgggtgcggcgccccgctgcagacggcggaggaggccgcgccgggatacgtagaccccgacacgtacgaactgaaaaagaggcaccaccaactgagaaccgttctatgtggaaggtgcaagctgctctctcatggccacatggtcactgctgttggtggccacggcggttatcctgggggcaagcagtttgtttctgcggaacagctcagggagaagctgtcatacctccgtcacgagaaagcactgatagtcaaattggttgacatcgttgacttcaatgggagtttcctggcacgagtacgtgactttgctggtgcaaatccgattattcttgtgataacaaaggttgatctccttcccagagacactgatttgaattgcataggcgactgggttgtcgagtcagttgtcaagaagaagcttaatgtccttagtgtccatttgacaagctcaaagtcactggtcggtatcacaggggttatatcagagattcaacaggaaaagaagggccgagatgtatatatactgggttctgcaaatgttgggaaatctgcatttatcagtgcaatgctaagaacaatggcatacaaggatccggtggcagcggcagctcaaaaatacaagcctatacagtctgctgttcctggaacaacccttggccctattcaaattgaagcatttttaggcggagggaaattgtatgatacacctggagtccaccttcaccataggcaggcagcagttatccatgctgatgatctgccttctcttgcaccacaaagtcgtttgaaagggcgatgttttcccgctaatgatacagatgttgaattgagtgggaattcattattctgggctgggctagtccgcattgatgttgtcaaggctcttccacgcgcacggctgacattctatgggcccaagaagctaaagattaatatggtcccgacaacagaagcagatcaattttacgagactgaagttggagttacattgactccaccaactggtaaggagagagctgaaggatggcaagggcttcaaggtgttcgcgagttgaagataaagtatgaggaacgtgacaggcctgcttgtgacatcgcgatctctgggcttgggtggatttctgtggagccatcaggcgtgccctcaaacagctctgatgacaatgtcgaggaagaatacgatggcggtgagctgcatctggtagtacatgtacccaaaccggttgaggtcttcgtccgccccccattgcctgttggtaaggccgcatcgcagtggtatcagtatcaagagctcacagaggaagaagaggagttgaggcctaaatggcactac

SEQ ID NO: 1249 - DNA, 2184 bp, Artificial sequence
  Mir resistant mutated nucleotide sequence
atggcttccagcctcgtgaatctgctcctcatggaggtggcggccatcgtcagcattgttctgctcgcaatcctcgttgtgctcagctcttacggccgccgttctggccatccggcactccgcctcttcgtttggtccgcatccactctgttcctcccgctcgtgtcctacgccgtctccgcggcggccaaatgggacgcagcgcgcgtccctttgctactcgcctggacagtcttcctccagatcctgcgcaacaccatcgacacctcccgctcctcgagttcgaccatcaacagcagcggctccaacggaagcaagttccggccgtccgttgagcagctggcgaggatgggttgggtggcgttcctcatcatcagcagtggcggtaccgccgggagcccgctgctgaccggcgtcctgctctggctgtgggtgctcagcctcctcaagctcatccacaggctcgtcgctgccgagctcgccaagaactcgttcgctgtcggcctcaactcgtacctagtcgccgactacatgaagcaactccatgggcatgggcatagtcaagcagctggccagcgtggactagaagtgcctgcttactttgtgatgggtgaggagaaactgcctatcaagcctgggccgcaggggtactacattgacagcactgaagctccgccttcattgtccatggacgacgcggggcatgtcgtcaccgtggacaggatatggtcgctttcctcatccggcgaccctctcctcgcatcctgcccgcagatcaaggacctctgcctctcttttgctctattcaagctccagctccggcggttcattgggtgcccactcgccgaagccggctgtcaccgtgctatggcatttgtgcaggacggtctccttgctggtagtggtagcgcagagagggtgttccaggtggtcgaggccgagctgtccttcctcgccgacttcctgtactcgaagctcaccgtcttctatgccagcgggtggtggttcccagcactcaactcaatcctcgtactggccacgtggatcagctgtctagcagccggcggcgccatcgtgcacgacatgacgaacccaggcacggcactcgccgtggactaccacatgctccgggattacctgcaacaccacgacacggtgttccacgtcattgttggccttgacatacttgtctccgtctcattcatcgtctccattgtgttcatggaaggatgggagatcgccaactacgtctgttccgactggatcaaggtgtccaccatctgcgagtacacccgacgtccatcgtggcagaagtcgctgtgggcgcgtcgtaagctcagccgcctattttggctccgacccatgcgacaatgggatgaccgattctgccaggtgtcaatattgcagcttcggttctgctactatggctgcatctcacagcaagtcgaccgaatcgtgaaaaaaacagtagccgtaccagcaacggtgaaatctgccattgtgaagacgctcagagcaaaccagggtaggctcgggaacggcgagctatccttgcaaggcaacggagtcggtaacctctcctgggcttgtcgtattaaagccagcgacgacaatgccatggacagcttatccgagcagatcctcgtgtggcatctcgccacgaggctcgtcgagctcaagtgctctcaaggagctcatggtgacagtggcaatgacacatatggggagagcgatctagaggtggttgcgacacagttgtcccgttactgcgcctacctagtggcgctgaagtcgtccctcctgccggaccaccgcgcatggacagaggagctctacaagggcgtggtggaggaggtgacaagggtgctggcacgatgcgcgggaccagttgcggggtacgagcgcgcttcgatgtgcctcagcgggagcatgaacgccacgttgagaaaggcatccaaactcgggcggcagctagtagaggaggtcagtgacgaggagttgttgtggaaggtgctcgccgagttctgggcagaatttgtcctgtacctcgcgccgtcagacaacgtggcctcgcactcaaagtctctctaccacggtggcgagttcataaccgtgttgtgggcgttgcttggtcacgctggcattgtcgggcgcccggagacggagagcactgagaactcagcc

SEQ ID NO: 1250 - DNA, 2184 bp, Artificial sequence
  Mir resistant mutated nucleotide sequence
atggcttccagcctcgtgaatctgctcctcatggaggtggcggccatcgtcagcattgttctgctcgcaatcctcgttgtgctcagctcttacggccgccgttctggccatccggcactccgcctcttcgtttggtccgcatccactctgttcctcccgctcgtgtcctacgccgtctccgcggcggccaaatgggacgcagcgcgcgtccctttgctactcgcctggacagtcttcctccagatcctgcgcaacaccatcgacacctcccgctcctcgagttcgaccatcaacagcagcggctccaacggaagcaagttccggccgtccgttgagcagctggcgaggatgggttgggtggcgttcctcatcatcagcagtggcggtaccgccgggagcccgctgctgaccggcgtcctgctctggctgtgggtgctcagcctcctcaagctcatccacaggctcgtcgctgccgagctcgccaagaactcgttcgctgtcggcctcaactcgtacctagtcgccgactacatgaagcaactccatgggcatgggcatagtcaagcagctggccagcgtggactagaagtgcctgcttactttgtgatgggtgaggagaaactgcctatcaagcctgggccgcaggggtactacattgacagcactgaagctccgccttcattgtccatggacgacgcggggcatgtcgtcaccgtggacaggatatggtcgctttcctcatccggcgaccctctcctcgcatcctgcccgcagatcaaggacctctgcctctcttttgctctattcaagctccagctccggcggttcattgggtgcccactcgccgaagccggctgtcaccgtgctatggcatttgtgcaggacggtctccttgctggtagtggtagcgcagagagggtgttccaggtggtcgaggccgagctgtccttcctcgccgacttcctgtactcgaagctcaccgtcttctatgccagcgggtggtggttcccagcactcaactcaatcctcgtactggccacgtggatcagctgtctagcagccggcggcgccatcgtgcacgacatgacgaacccaggcacggcactcgccgtggactaccacatgctccgggattacctgcaacaccacgacacggtgttccacgtcattgttggccttgacatacttgtctccgtctcattcatcgtctccattgtgttcatggaaggatgggagatcgccaactacgtctgttccgactggatcaaggtgtccaccatctgcgagtacacccgacgtccatcgtggcagaagtcgctgtgggcgcgtcgtaagctcagccgcctattttggctccgacccatgcgacaatgggatgaccgattctgccaggtgtcaatattgcagcttcggttctgctactatggctgcatctcacagcaagtcgaccgaatcgtgaagaagacagtagccgtaccagcaacggtgaaatctgccattgtgaagacgctcagagcaaaccagggtaggctcgggaacggcgagctatccttgcaaggcaacggagtcggtaacctctcctgggcttgtcgtattaaagccagcgacgacaatgccatggacagcttatccgagcagatcctcgtgtggcatctcgccacgaggctcgtcgagctcaagtgctctcaaggagctcatggtgacagtggcaatgacacatatggggagagcgatctagaggtggttgcgacacagttgtcccgttactgcgcctacctagtggcgctgaagtcgtccctcctgccggaccaccgcgcatggacagaggagctctacaagggcgtggtggaggaggtgacaagggtgctggcacgatgcgcgggaccagttgcggggtacgagcgcgcttcgatgtgcctcagcgggagcatgaacgccacgttgagaaaggcatccaaactcgggcggcagctagtagaggaggtcagtgacgaggagttgttgtggaaggtgctcgccgagttctgggcagaatttgtcctgtacctcgcgccgtcagacaacgtggcctcgcactcaaagtctctctaccacggtggcgagttcataaccgtgttgtgggcgttgcttggtcacgctggcattgtcgggcgcccggagacggagagcactgagaactcagcc

SEQ ID NO: 1251 - DNA, 2184 bp, Artificial sequence; identical to SEQ ID NO: 1250
  Mir resistant mutated nucleotide sequence

SEQ ID NO: 1252 - DNA, 2184 bp, Artificial sequence
  Mir resistant mutated nucleotide sequence
atggcttccagcctcgtgaatctgctcctcatggaggtggcggccatcgtcagcattgttctgctcgcaatcctcgttgtgctcagctcttacggccgccgttctggccatccggcactccgcctcttcgtttggtccgcatccactctgttcctcccgctcgtgtcctacgccgtctccgcggcggccaaatgggacgcagcgcgcgtccctttgctactcgcctggacagtcttcctccagatcctgcgcaacaccatcgacacctcccgctcctcgagttcgaccatcaacagcagcggctccaacggaagcaagttccggccgtccgttgagcagctggcgaggatgggttgggtggcgttcctcatcatcagcagtggcggtaccgccgggagcccgctgctgaccggcgtcctgctctggctgtgggtgctcagcctcctcaagctcatccacaggctcgtcgctgccgagctcgccaagaactcgttcgctgtcggcctcaactcgtacctagtcgccgactacatgaagcaactccatgggcatgggcatagtcaagcagctggccagcgtggactagaagtgcctgcttactttgtgatgggtgaggagaaactgcctatcaagcctgggccgcaggggtactacattgacagcactgaagctccgccttcattgtccatggacgacgcggggcatgtcgtcaccgtggacaggatatggtcgctttcctcatccggcgaccctctcctcgcatcctgcccgcagatcaaggacctctgcctctcttttgctctattcaagctccagctccggcggttcattgggtgcccactcgccgaagccggctgtcaccgtgctatggcatttgtgcaggacggtctccttgctggtagtggtagcgcagagagggtgttccaggtggtcgaggccgagctgtccttcctcgccgacttcctgtactcgaagctcaccgtcttctatgccagcgggtggtggttcccagcactcaactcaatcctcgtactggccacgtggatcagctgtctagcagccggcggcgccatcgtgcacgacatgacgaacccaggcacggcactcgccgtggactaccacatgctccgggattacctgcaacaccacgacacggtgttccacgtcattgttggccttgacatacttgtctccgtctcattcatcgtctccattgtgttcatggaaggatgggagatcgccaactacgtctgttccgactggatcaaggtgtccaccatctgcgagtacacccgacgtccatcgtggcagaagtcgctgtgggcgcgtcgtaagctcagccgcctattttggctccgacccatgcgacaatgggatgaccgattctgccaggtgtcaatattgcagcttcggttctgctactatggctgcatctcacagcaagtcgaccgaatcgtgaaaaaaaccgtagccgtaccagcaacggtgaaatctgccattgtgaagacgctcagagcaaaccagggtaggctcgggaacggcgagctatccttgcaaggcaacggagtcggtaacctctcctgggcttgtcgtattaaagccagcgacgacaatgccatggacagcttatccgagcagatcctcgtgtggcatctcgccacgaggctcgtcgagctcaagtgctctcaaggagctcatggtgacagtggcaatgacacatatggggagagcgatctagaggtggttgcgacacagttgtcccgttactgcgcctacctagtggcgctgaagtcgtccctcctgccggaccaccgcgcatggacagaggagctctacaagggcgtggtggaggaggtgacaagggtgctggcacgatgcgcgggaccagttgcggggtacgagcgcgcttcgatgtgcctcagcgggagcatgaacgccacgttgagaaaggcatccaaactcgggcggcagctagtagaggaggtcagtgacgaggagttgttgtggaaggtgctcgccgagttctgggcagaatttgtcctgtacctcgcgccgtcagacaacgtggcctcgcactcaaagtctctctaccacggtggcgagttcataaccgtgttgtgggcgttgcttggtcacgctggcattgtcgggcgcccggagacggagagcactgagaactcagcc

SEQ ID NO: 1253 - DNA, 2184 bp, Artificial sequence
  Mir resistant mutated nucleotide sequence
atggcttccagcctcgtgaatctgctcctcatggaggtggcggccatcgtcagcattgttctgctcgcaatcctcgttgtgctcagctcttacggccgccgttctggccatccggcactccgcctcttcgtttggtccgcatccactctgttcctcccgctcgtgtcctacgccgtctccgcggcggccaaatgggacgcagcgcgcgtccctttgctactcgcctggacagtcttcctccagatcctgcgcaacaccatcgacacctcccgctcctcgagttcgaccatcaacagcagcggctccaacggaagcaagttccggccgtccgttgagcagctggcgaggatgggttgggtggcgttcctcatcatcagcagtggcggtaccgccgggagcccgctgctgaccggcgtcctgctctggctgtgggtgctcagcctcctcaagctcatccacaggctcgtcgctgccgagctcgccaagaactcgttcgctgtcggcctcaactcgtacctagtcgccgactacatgaagcaactccatgggcatgggcatagtcaagcagctggccagcgtggactagaagtgcctgcttactttgtgatgggtgaggagaaactgcctatcaagcctgggccgcaggggtactacattgacagcactgaagctccgccttcattgtccatggacgacgcggggcatgtcgtcaccgtggacaggatatggtcgctttcctcatccggcgaccctctcctcgcatcctgcccgcagatcaaggacctctgcctctcttttgctctattcaagctccagctccggcggttcattgggtgcccactcgccgaagccggctgtcaccgtgctatggcatttgtgcaggacggtctccttgctggtagtggtagcgcagagagggtgttccaggtggtcgaggccgagctgtccttcctcgccgacttcctgtactcgaagctcaccgtcttctatgccagcgggtggtggttcccagcactcaactcaatcctcgtactggccacgtggatcagctgtctagcagccggcggcgccatcgtgcacgacatgacgaacccaggcacggcactcgccgtggactaccacatgctccgggattacctgcaacaccacgacacggtgttccacgtcattgttggccttgacatacttgtctccgtctcattcatcgtctccattgtgttcatggaaggatgggagatcgccaactacgtctgttccgactggatcaaggtgtccaccatctgcgagtacacccgacgtccatcgtggcagaagtcgctgtgggcgcgtcgtaagctcagccgcctattttggctccgacccatgcgacaatgggatgaccgattctgccaggtgtcaatattgcagcttcggttctgctactatggctgcatctcacagcaagtcgaccgaatcgtgaaaaaaacagtcgccgtcccagcaacggtgaaatctgccattgtgaagacgctcagagcaaaccagggtaggctcgggaacggcgagctatccttgcaaggcaacggagtcggtaacctctcctgggcttgtcgtattaaagccagcgacgacaatgccatggacagcttatccgagcagatcctcgtgtggcatctcgccacgaggctcgtcgagctcaagtgctctcaaggagctcatggtgacagtggcaatgacacatatggggagagcgatctagaggtggttgcgacacagttgtcccgttactgcgcctacctagtggcgctgaagtcgtccctcctgccggaccaccgcgcatggacagaggagctctacaagggcgtggtggaggaggtgacaagggtgctggcacgatgcgcgggaccagttgcggggtacgagcgcgcttcgatgtgcctcagcgggagcatgaacgccacgttgagaaaggcatccaaactcgggcggcagctagtagaggaggtcagtgacgaggagttgttgtggaaggtgctcgccgagttctgggcagaatttgtcctgtacctcgcgccgtcagacaacgtggcctcgcactcaaagtctctctaccacggtggcgagttcataaccgtgttgtgggcgttgcttggtcacgctggcattgtcgggcgcccggagacggagagcactgagaactcagcc

SEQ ID NO: 1254 - DNA, 1278 bp, Artificial sequence
  Mir resistant mutated nucleotide sequence
atgttcgtgatcgaggacaagggcggcgccatcgcgctgatgctggcgtcgctcctgttcctgggcacctggccggccgtgctcaccctgctggagcgccggggccgcctgccgcagcacacgtacctggactactccatcaccaacctcctcgcggccgtgctcatcgcgctcaccttcggccagctcggggacagcaggcgcggcatgcccaacttcttcacgcagctcggccaggacaactggccctctgtgctgttcgccatggccgggggcgtcgtgctcagcgtcggcaacctctccacccagtacgcttgggcctatgtgggcctctccgtcactgaggtcatcagctccagcatggtggtggtcataggcaccacgctgaactacttcctggacaaccgcatcaacagggcagagattctgttccctggtgtggcgtgcttcctcgtcgccgtcatccttggctccgctgtccattcctccaatgcagctgacaatgagcagaaactcggtgcctccacgaatgcctacaaactcgggacaagtggaaatgtggaaccaagcaaacaagctgtagacagaggtgttcattgtctatctgaagaagaaagaacaaatctaatttcagatgctcccaaagacttggaggagagtggagcctctggaatccggcaacctgacaaagctgaggcaggcactgcagagtacctcattgagcttgaagaacggcgatcaattaaggtattcggttcaaacaccttcatcgggctggggatcgtcttcttcgcgggcgtgtgcttctcgctcttctccccggcgttcaacctggccactaacgaccagtggcacacgctcagggacggcgtgccgcacctggtggtgtacaccgccttcttctacttctccatctcctgcttcgtcgtcggcgtcggactcaacgtcctgttcctctaccgccccatggccggcgtgccccgctcctccctcggggcctacctcagggactgggacggccgccagtgggcgctcctcgccggcctgctctgcggcttcggcaacggcttccagttcatgggcggccaggccgcagggtacgccgccgctgacgctgtccaagcattaccattagtatcaacattctggggcgtactgctcttcggggagtaccgcaagtcgtcgcggaagacctacgtcctgctcggcttcatgctcttcatgttcgtcgccgctgtcgccgtgctcatggcttcgtcaggtcacaggagcacagag

SEQ ID NO: 1255 - DNA, 1278 bp, Artificial sequence
  Mir resistant mutated nucleotide sequence
atgttcgtgatcgaggacaagggcggcgccatcgcgctgatgctggcgtcgctcctgttcctgggcacctggccggccgtgctcaccctgctggagcgccggggccgcctgccgcagcacacgtacctggactactccatcaccaacctcctcgcggccgtgctcatcgcgctcaccttcggccagctcggggacagcaggcgcggcatgcccaacttcttcacgcagctcggccaggacaactggccctctgtgctgttcgccatggccgggggcgtcgtgctcagcgtcggcaacctctccacccagtacgcttgggcctatgtgggcctctccgtcactgaggtcatcagctccagcatggtggtggtcataggcaccacgctgaactacttcctggacaaccgcatcaacagggcagagattctgttccctggtgtggcgtgcttcctcgtcgccgtcatccttggctccgctgtccattcctccaatgcagctgacaatgagcagaaactcggtgcctccacgaatgcctacaaactcgggacaagtggaaatgtggaaccaagcaaacaagctgtagacagaggtgttcattgtctatctgaagaagaaagaacaaatctaatttcagatgctcccaaagacttggaggagagtggagcctctggaatccggcaacctgacaaagctgaggcaggcactgcagagtacctcattgagcttgaagaacggcgatcaattaaggtattcggttcaaacaccttcatcgggctggggatcgtcttcttcgcgggcgtgtgcttctcgctcttctccccggcgttcaacctggccactaacgaccagtggcacacgctcagggacggcgtgccgcacctggtggtgtacaccgccttcttctacttctccatctcctgcttcgtcgtcggcgtcggactcaacgtcctgttcctctaccgccccatggccggcgtgccccgctcctccctcggggcctacctcagggactgggacggccgccagtgggcgctcctcgccggcctgctctgcggcttcggcaacggcttccagttcatgggcggccaggccgcagggtacgccgccgctgacgctgtccaagccttaccattagtatcaacattctggggcgtactgctcttcggggagtaccgcaagtcgtcgcggaagacctacgtcctgctcggcttcatgctcttcatgttcgtcgccgctgtcgccgtgctcatggcttcgtcaggtcacaggagcacagag

SEQ ID NO: 1256 - DNA, 1278 bp, Artificial sequence
  Mir resistant mutated nucleotide sequence
atgttcgtgatcgaggacaagggcggcgccatcgcgctgatgctggcgtcgctcctgttcctgggcacctggccggccgtgctcaccctgctggagcgccggggccgcctgccgcagcacacgtacctggactactccatcaccaacctcctcgcggccgtgctcatcgcgctcaccttcggccagctcggggacagcaggcgcggcatgcccaacttcttcacgcagctcggccaggacaactggccctctgtgctgttcgccatggccgggggcgtcgtgctcagcgtcggcaacctctccacccagtacgcttgggcctatgtgggcctctccgtcactgaggtcatcagctccagcatggtggtggtcataggcaccacgctgaactacttcctggacaaccgcatcaacagggcagagattctgttccctggtgtggcgtgcttcctcgtcgccgtcatccttggctccgctgtccattcctccaatgcagctgacaatgagcagaaactcggtgcctccacgaatgcctacaaactcgggacaagtggaaatgtggaaccaagcaaacaagctgtagacagaggtgttcattgtctatctgaagaagaaagaacaaatctaatttcagatgctcccaaagacttggaggagagtggagcctctggaatccggcaacctgacaaagctgaggcaggcactgcagagtacctcattgagcttgaagaacggcgatcaattaaggtattcggttcaaacaccttcatcgggctggggatcgtcttcttcgcgggcgtgtgcttctcgctcttctccccggcgttcaacctggccactaacgaccagtggcacacgctcagggacggcgtgccgcacctggtggtgtacaccgccttcttctacttctccatctcctgcttcgtcgtcggcgtcggactcaacgtcctgttcctctaccgccccatggccggcgtgccccgctcctccctcggggcctacctcagggactgggacggccgccagtgggcgctcctcgccggcctgctctgcggcttcggcaacggcttccagttcatgggcggccaggccgcagggtacgccgccgctgacgctgtccaagcactgccactggtatcaacattctggggcgtactgctcttcggggagtaccgcaagtcgtcgcggaagacctacgtcctgctcggcttcatgctcttcatgttcgtcgccgctgtcgccgtgctcatggcttcgtcaggtcacaggagcacagag

SEQ ID NO: 1257 - DNA, 1278 bp, Artificial sequence
  Mir resistant mutated nucleotide sequence
atgttcgtgatcgaggacaagggcggcgccatcgcgctgatgctggcgtcgctcctgttcctgggcacctggccggccgtgctcaccctgctggagcgccggggccgcctgccgcagcacacgtacctggactactccatcaccaacctcctcgcggccgtgctcatcgcgctcaccttcggccagctcggggacagcaggcgcggcatgcccaacttcttcacgcagctcggccaggacaactggccctctgtgctgttcgccatggccgggggcgtcgtgctcagcgtcggcaacctctccacccagtacgcttgggcctatgtgggcctctccgtcactgaggtcatcagctccagcatggtggtggtcataggcaccacgctgaactacttcctggacaaccgcatcaacagggcagagattctgttccctggtgtggcgtgcttcctcgtcgccgtcatccttggctccgctgtccattcctccaatgcagctgacaatgagcagaaactcggtgcctccacgaatgcctacaaactcgggacaagtggaaatgtggaaccaagcaaacaagctgtagacagaggtgttcattgtctatctgaagaagaaagaacaaatctaatttcagatgctcccaaagacttggaggagagtggagcctctggaatccggcaacctgacaaagctgaggcaggcactgcagagtacctcattgagcttgaagaacggcgatcaattaaggtattcggttcaaacaccttcatcgggctggggatcgtcttcttcgcgggcgtgtgcttctcgctcttctccccggcgttcaacctggccactaacgaccagtggcacacgctcagggacggcgtgccgcacctggtggtgtacaccgccttcttctacttctccatctcctgcttcgtcgtcggcgtcggactcaacgtcctgttcctctaccgccccatggccggcgtgccccgctcctccctcggggcctacctcagggactgggacggccgccagtgggcgctcctcgccggcctgctctgcggcttcggcaacggcttccagttcatgggcggccaggccgcagggtacgccgccgctgacgctgtccaagcattaccgttagtatcaacattctggggcgtactgctcttcggggagtaccgcaagtcgtcgcggaagacctacgtcctgctcggcttcatgctcttcatgttcgtcgccgctgtcgccgtgctcatggcttcgtcaggtcacaggagcacagag

SEQ ID NO: 1258 - DNA, 1515 bp, Artificial sequence
  Mir resistant mutated nucleotide sequence
atgtctccttacctgctgcttgccgccgccgcgcttatcgccttcctctacatcatcaagaaccgcaggagcagcaagctcccgccgtccccgccgtcgctaccgctgatcggccaccttcacctcatcggccgcctcgcgcaccgatccttgcacgagctgcagcttcgctatggcggcggcggcggtctcctcttcctgcaactcgggcgcaggcggaccttggtcgtgtccactgccgcggcggcagcggacctgttcaggaaccacgacctcgccttcgcctcgcgcgcgcgcagcgtgggaggggataagatgacgtatggctgcagcaacgtgtcgttcgcgccgtacggcgagaactggcgcctgggcaagaagatcgcggtggtccacctcctctccccgcggcgcgtggagtcgttcgcgcccgtgcgggccgccgaggtagccgcgctcgtcgcgtggacacgctgcgccgcggaggcacgggaggccgtggagatgagggagctcctgtacgggtacaccaacgcggtggtcacccgcgcggccaccggtgccgccggagtaacagcagacaagatgaaacagctgatggggaacgccgaggcgctgatggcgggcttccaacctgaggacgtgctgccggacgcgccggcgaggtttgtgagatgggcgacgggcctcgataagaagctcgacgacatgggcgaggcatgggacaagttcctgtccgagatagtggccgcgcacaagaagggggacgacggtgcaggggaggacgatgaggacttcttggacgtcttgcttcggctgagggaagaaggtaccggcgggctcgagctcacagacgatcgcatcaaagctatcatcaaggatatgatattcgccgcaactgaaacatcatctcaaacgctagaatggaccatggccgaactcatggccaacccgcgggtgatgagcaagctccaggacgagatagcgcgagtcgtcagcgccgatcagacgaccattgctgaaccggacctgagcaaaatggagtacctgaaggcagtgttcaaagaggtgcttcggctccacgcaccagcgccgctcctcgtcccgcacgaatcaacgacgccagcggtcgtgcagggctacgagatcccggccaagacggcgctcttcgtcaacgtgtgggccatcgggcgggaccctgctgtgtgggacacagcggacgtgttccgcccggagcggttcatggccggcagcccctccgtggactttagagggaccgactaccagctcatcccgttcggcgccggtcggaggatctgcccgggcatcagcttcgcgctgccggtcctagaattagcattagtatcattactgcatcacttcgaatgggagctccccgccggcatgcgtccggcggacctcgacatgggcgaggcaccggggctgacgacgccccggcaggtaccccttgtcctagtccccaagtgcaagacgctcgttcaggcggcactacag

SEQ ID NO: 1259 - DNA, 1515 bp, Artificial sequence
  Mir resistant mutated nucleotide sequence
atgtctccttacctgctgcttgccgccgccgcgcttatcgccttcctctacatcatcaagaaccgcaggagcagcaagctcccgccgtccccgccgtcgctaccgctgatcggccaccttcacctcatcggccgcctcgcgcaccgatccttgcacgagctgcagcttcgctatggcggcggcggcggtctcctcttcctgcaactcgggcgcaggcggaccttggtcgtgtccactgccgcggcggcagcggacctgttcaggaaccacgacctcgccttcgcctcgcgcgcgcgcagcgtgggaggggataagatgacgtatggctgcagcaacgtgtcgttcgcgccgtacggcgagaactggcgcctgggcaagaagatcgcggtggtccacctcctctccccgcggcgcgtggagtcgttcgcgcccgtgcgggccgccgaggtagccgcgctcgtcgcgtggacacgctgcgccgcggaggcacgggaggccgtggagatgagggagctcctgtacgggtacaccaacgcggtggtcacccgcgcggccaccggtgccgccggagtaacagcagacaagatgaaacagctgatggggaacgccgaggcgctgatggcgggcttccaacctgaggacgtgctgccggacgcgccggcgaggtttgtgagatgggcgacgggcctcgataagaagctcgacgacatgggcgaggcatgggacaagttcctgtccgagatagtggccgcgcacaagaagggggacgacggtgcaggggaggacgatgaggacttcttggacgtcttgcttcggctgagggaagaaggtaccggcgggctcgagctcacagacgatcgcatcaaagctatcatcaaggatatgatattcgccgcaactgaaacatcatctcaaacgctagaatggaccatggccgaactcatggccaacccgcgggtgatgagcaagctccaggacgagatagcgcgagtcgtcagcgccgatcagacgaccattgctgaaccggacctgagcaaaatggagtacctgaaggcagtgttcaaagaggtgcttcggctccacgcaccagcgccgctcctcgtcccgcacgaatcaacgacgccagcggtcgtgcagggctacgagatcccggccaagacggcgctcttcgtcaacgtgtgggccatcgggcgggaccctgctgtgtgggacacagcggacgtgttccgcccggagcggttcatggccggcagcccctccgtggactttagagggaccgactaccagctcatcccgttcggcgccggtcggaggatctgcccgggcatcagcttcgcgctgccggtcttggaattagcattagtatcattactgcatcacttcgaatgggagctccccgccggcatgcgtccggcggacctcgacatgggcgaggcaccggggctgacgacgccccggcaggtaccccttgtcctagtccccaagtgcaagacgctcgttcaggcggcactacag

SEQ ID NO: 1260 - DNA, 1515 bp, Artificial sequence; identical to SEQ ID NO: 1259
  Mir resistant mutated nucleotide sequence

SEQ ID NO: 1261 - DNA, 1515 bp, Artificial sequence; identical to SEQ ID NO: 1259
  Mir resistant mutated nucleotide sequence

SEQ ID NO: 1262 - DNA, 1515 bp, Artificial sequence; identical to SEQ ID NO: 1259
  Mir resistant mutated nucleotide sequence

SEQ ID NO: 1263 - DNA, 1359 bp, Artificial sequence
  Mir resistant mutated nucleotide sequence
atgcatgtgtacatgtctctcggaaggaaaagcccgcaagatcggatcgatcacttacttggctactgctgcctgctgctgcaggtgctccaggaacaagtgccgtccaccagatccaggctcggcatgttcgtgatcgaggacaagggcggcgccatcgcgctgatgctggcgtcgctcctgttcctgggcacctggccggccgtgctcaccctgctggagcgccggggccgcctgccgcagcacacgtacctggactactccatcaccaacctcctcgcggccgtgctcatcgcgctcaccttcggccagctcggggacagcaggcgcggcatgcccaacttcttcacgcagctcggccaggacaactggccctctgtgctgttcgccatggccgggggcgtcgtgctcagcgtcggcaacctctccacccagtacgcttgggcctatgtgggcctctccgtcactgaggtcatcagctccagcatggtggtggtcataggcaccacgctgaactacttcctggacaaccgcatcaacagggcagagattctgttccctggtgtggcgtgcttcctcgtcgccgtcatccttggctccgctgtccattcctccaatgcagctgacaatgagcagaaactcggtgcctccacgaatgcctacaaactcgggacaagtggaaatgtggaaccaagcaaacaagctgtagacagagatgctcccaaagacttggaggagagtggagcctctggaatccggcaacctgacaaagctgaggcaggcactgcagagtacctcattgagcttgaagaacggcgatcaattaaggtattcggttcaaacaccttcatcgggctggggatcgtcttcttcgcgggcgtgtgcttctcgctcttctccccggcgttcaacctggccactaacgaccagtggcacacgctcagggacggcgtgccgcacctggtggtgtacaccgccttcttctacttctccatctcctgcttcgtcgtcggcgtcggactcaacgtcctgttcctctaccgccccatggccggcgtgccccgctcctccctcggggcctacctcagggactgggacggccgccagtgggcgctcctcgccggcctgctctgcggcttcggcaacggcttccagttcatgggcggccaggccgcagggtacgccgccgctgacgctgtccaagcattaccattagtatcaacattctggggcgtactgctcttcggggagtaccgcaagtcgtcgcggaagacctacgtcctgctcggcttcatgctcttcatgttcgtcgccgctgtcgccgtgctcatggcttcgtcaggtcacaggagcacagag

SEQ ID NO: 1264 - DNA, 1359 bp, Artificial sequence
  Mir resistant mutated nucleotide sequence
atgcatgtgtacatgtctctcggaaggaaaagcccgcaagatcggatcgatcacttacttggctactgctgcctgctgctgcaggtgctccaggaacaagtgccgtccaccagatccaggctcggcatgttcgtgatcgaggacaagggcggcgccatcgcgctgatgctggcgtcgctcctgttcctgggcacctggccggccgtgctcaccctgctggagcgccggggccgcctgccgcagcacacgtacctggactactccatcaccaacctcctcgcggccgtgctcatcgcgctcaccttcggccagctcggggacagcaggcgcggcatgcccaacttcttcacgcagctcggccaggacaactggccctctgtgctgttcgccatggccgggggcgtcgtgctcagcgtcggcaacctctccacccagtacgcttgggcctatgtgggcctctccgtcactgaggtcatcagctccagcatggtggtggtcataggcaccacgctgaactacttcctggacaaccgcatcaacagggcagagattctgttccctggtgtggcgtgcttcctcgtcgccgtcatccttggctccgctgtccattcctccaatgcagctgacaatgagcagaaactcggtgcctccacgaatgcctacaaactcgggacaagtggaaatgtggaaccaagcaaacaagctgtagacagagatgctcccaaagacttggaggagagtggagcctctggaatccggcaacctgacaaagctgaggcaggcactgcagagtacctcattgagcttgaagaacggcgatcaattaaggtattcggttcaaacaccttcatcgggctggggatcgtcttcttcgcgggcgtgtgcttctcgctcttctccccggcgttcaacctggccactaacgaccagtggcacacgctcagggacggcgtgccgcacctggtggtgtacaccgccttcttctacttctccatctcctgcttcgtcgtcggcgtcggactcaacgtcctgttcctctaccgccccatggccggcgtgccccgctcctccctcggggcctacctcagggactgggacggccgccagtgggcgctcctcgccggcctgctctgcggcttcggcaacggcttccagttcatgggcggccaggccgcagggtacgccgccgctgacgctgtccaagccttaccattagtatcaacattctggggcgtactgctcttcggggagtaccgcaagtcgtcgcggaagacctacgtcctgctcggcttcatgctcttcatgttcgtcgccgctgtcgccgtgctcatggcttcgtcaggtcacaggagcacagag

SEQ ID NO: 1265 - DNA, 1359 bp, Artificial sequence
  Mir resistant mutated nucleotide sequence
atgcatgtgtacatgtctctcggaaggaaaagcccgcaagatcggatcgatcacttacttggctactgctgcctgctgctgcaggtgctccaggaacaagtgccgtccaccagatccaggctcggcatgttcgtgatcgaggacaagggcggcgccatcgcgctgatgctggcgtcgctcctgttcctgggcacctggccggccgtgctcaccctgctggagcgccggggccgcctgccgcagcacacgtacctggactactccatcaccaacctcctcgcggccgtgctcatcgcgctcaccttcggccagctcggggacagcaggcgcggcatgcccaacttcttcacgcagctcggccaggacaactggccctctgtgctgttcgccatggccgggggcgtcgtgctcagcgtcggcaacctctccacccagtacgcttgggcctatgtgggcctctccgtcactgaggtcatcagctccagcatggtggtggtcataggcaccacgctgaactacttcctggacaaccgcatcaacagggcagagattctgttccctggtgtggcgtgcttcctcgtcgccgtcatccttggctccgctgtccattcctccaatgcagctgacaatgagcagaaactcggtgcctccacgaatgcctacaaactcgggacaagtggaaatgtggaaccaagcaaacaagctgtagacagagatgctcccaaagacttggaggagagtggagcctctggaatccggcaacctgacaaagctgaggcaggcactgcagagtacctcattgagcttgaagaacggcgatcaattaaggtattcggttcaaacaccttcatcgggctggggatcgtcttcttcgcgggcgtgtgcttctcgctcttctccccggcgttcaacctggccactaacgaccagtggcacacgctcagggacggcgtgccgcacctggtggtgtacaccgccttcttctacttctccatctcctgcttcgtcgtcggcgtcggactcaacgtcctgttcctctaccgccccatggccggcgtgccccgctcctccctcggggcctacctcagggactgggacggccgccagtgggcgctcctcgccggcctgctctgcggcttcggcaacggcttccagttcatgggcggccaggccgcagggtacgccgccgctgacgctgtccaagcactgccactggtatcaacattctggggcgtactgctcttcggggagtaccgcaagtcgtcgcggaagacctacgtcctgctcggcttcatgctcttcatgttcgtcgccgctgtcgccgtgctcatggcttcgtcaggtcacaggagcacagag

SEQ ID NO: 1266 - DNA, 1359 bp, Artificial sequence
  Mir resistant mutated nucleotide sequence
atgcatgtgtacatgtctctcggaaggaaaagcccgcaagatcggatcgatcacttacttggctactgctgcctgctgctgcaggtgctccaggaacaagtgccgtccaccagatccaggctcggcatgttcgtgatcgaggacaagggcggcgccatcgcgctgatgctggcgtcgctcctgttcctgggcacctggccggccgtgctcaccctgctggagcgccggggccgcctgccgcagcacacgtacctggactactccatcaccaacctcctcgcggccgtgctcatcgcgctcaccttcggccagctcggggacagcaggcgcggcatgcccaacttcttcacgcagctcggccaggacaactggccctctgtgctgttcgccatggccgggggcgtcgtgctcagcgtcggcaacctctccacccagtacgcttgggcctatgtgggcctctccgtcactgaggtcatcagctccagcatggtggtggtcataggcaccacgctgaactacttcctggacaaccgcatcaacagggcagagattctgttccctggtgtggcgtgcttcctcgtcgccgtcatccttggctccgctgtccattcctccaatgcagctgacaatgagcagaaactcggtgcctccacgaatgcctacaaactcgggacaagtggaaatgtggaaccaagcaaacaagctgtagacagagatgctcccaaagacttggaggagagtggagcctctggaatccggcaacctgacaaagctgaggcaggcactgcagagtacctcattgagcttgaagaacggcgatcaattaaggtattcggttcaaacaccttcatcgggctggggatcgtcttcttcgcgggcgtgtgcttctcgctcttctccccggcgttcaacctggccactaacgaccagtggcacacgctcagggacggcgtgccgcacctggtggtgtacaccgccttcttctacttctccatctcctgcttcgtcgtcggcgtcggactcaacgtcctgttcctctaccgccccatggccggcgtgccccgctcctccctcggggcctacctcagggactgggacggccgccagtgggcgctcctcgccggcctgctctgcggcttcggcaacggcttccagttcatgggcggccaggccgcagggtacgccgccgctgacgctgtccaagcattaccgttagtatcaacattctggggcgtactgctcttcggggagtaccgcaagtcgtcgcggaagacctacgtcctgctcggcttcatgctcttcatgttcgtcgccgctgtcgccgtgctcatggcttcgtcaggtcacaggagcacagag

SEQ ID NO: 1267 - DNA, 1233 bp, Artificial sequence
  Mir resistant mutated nucleotide sequence
atgttcgtggtcgaggacaagggcggcgccatcgcgctgatgctggcgtcgctgctgttcctgggcacgtggccggccgtgctgacgctgctggagcgccgaggccggctgccgcagcacacgtacctggactactccgtcacgaacctcctcgcggccgtgctcatcgcgctcaccttcggccagctcgggggcgccaggcgcggcatgcccaacttcctcacgcagctcggccagcccaactggccttccgtgctgttcgccatggccggaggcgtcgtgctcagcgtcgggaacctctccacccagtacgcttgggcctacgtcggtctctccgtcaccgaggtcgtcagctccagcatggtggtcgtcattggcacgacgctgaactacttcctggacaaccgcatcaacagggcagagattctgtttcccggcgtggcatgcttccttgttgctgtcatccttggctctgctgtccacgcctccaacgcagctgacaacgaggagaagctcagtgcctccacaaatgcctaccagcttggtaggacagctggggctgcggaaccaagcaagcatgtcctagacaaagatgttgccaaggacttggagaatggagtctctggaacaaagcaagctgacaaagcggaggcaggcaccgcagaatacctcattcaactcgaagagcggcggtcaatcaaggtattcggttcaaacacgttcatcggtctggggatcgtgttcttcgcgggggcgtgcttctcgctcttctccccggcgttcaacctggcaaccaacgaccagtggcgcacgctcaggggcggcgtgccgcacctggtggtctacaccgccttcttctacttctccgtcgcgtgcttcgccgtcggcgtcggcctcaacgtgctgttcctctaccgccccatggccggggtgcccaggtcctccctcggggcctacctcggggactgggacggccggcactgggcgctcctcgccggcctgctctgcggcttcggcaacggcctccagttcacgggcgggcaggccgcgggctacgccgccgccgacgcggtccaagcattaccattagtatcaacattctggggcgtactgctctttggggagtaccgcaagtcgtcgcggaagacgtacctcctgctcggcttcatgctcttcatgttcgtcgccgccgtcgccgtgctcatggcttcgtcaggtcacaggaccacagag

SEQ ID NO: 1268 - DNA, 1233 bp, Artificial sequence
  Mir resistant mutated nucleotide sequence
atgttcgtggtcgaggacaagggcggcgccatcgcgctgatgctggcgtcgctgctgttcctgggcacgtggccggccgtgctgacgctgctggagcgccgaggccggctgccgcagcacacgtacctggactactccgtcacgaacctcctcgcggccgtgctcatcgcgctcaccttcggccagctcgggggcgccaggcgcggcatgcccaacttcctcacgcagctcggccagcccaactggccttccgtgctgttcgccatggccggaggcgtcgtgctcagcgtcgggaacctctccacccagtacgcttgggcctacgtcggtctctccgtcaccgaggtcgtcagctccagcatggtggtcgtcattggcacgacgctgaactacttcctggacaaccgcatcaacagggcagagattctgtttcccggcgtggcatgcttccttgttgctgtcatccttggctctgctgtccacgcctccaacgcagctgacaacgaggagaagctcagtgcctccacaaatgcctaccagcttggtaggacagctggggctgcggaaccaagcaagcatgtcctagacaaagatgttgccaaggacttggagaatggagtctctggaacaaagcaagctgacaaagcggaggcaggcaccgcagaatacctcattcaactcgaagagcggcggtcaatcaaggtattcggttcaaacacgttcatcggtctggggatcgtgttcttcgcgggggcgtgcttctcgctcttctccccggcgttcaacctggcaaccaacgaccagtggcgcacgctcaggggcggcgtgccgcacctggtggtctacaccgccttcttctacttctccgtcgcgtgcttcgccgtcggcgtcggcctcaacgtgctgttcctctaccgccccatggccggggtgcccaggtcctccctcggggcctacctcggggactgggacggccggcactgggcgctcctcgccggcctgctctgcggcttcggcaacggcctccagttcacgggcgggcaggccgcgggctacgccgccgccgacgcggtccaagcgttaccattagtatcaacattctggggcgtactgctctttggggagtaccgcaagtcgtcgcggaagacgtacctcctgctcggcttcatgctcttcatgttcgtcgccgccgtcgccgtgctcatggcttcgtcaggtcacaggaccacagag

SEQ ID NO: 1269 - DNA, 1233 bp, Artificial sequence
  Mir resistant mutated nucleotide sequence
atgttcgtggtcgaggacaagggcggcgccatcgcgctgatgctggcgtcgctgctgttcctgggcacgtggccggccgtgctgacgctgctggagcgccgaggccggctgccgcagcacacgtacctggactactccgtcacgaacctcctcgcggccgtgctcatcgcgctcaccttcggccagctcgggggcgccaggcgcggcatgcccaacttcctcacgcagctcggccagcccaactggccttccgtgctgttcgccatggccggaggcgtcgtgctcagcgtcgggaacctctccacccagtacgcttgggcctacgtcggtctctccgtcaccgaggtcgtcagctccagcatggtggtcgtcattggcacgacgctgaactacttcctggacaaccgcatcaacagggcagagattctgtttcccggcgtggcatgcttccttgttgctgtcatccttggctctgctgtccacgcctccaacgcagctgacaacgaggagaagctcagtgcctccacaaatgcctaccagcttggtaggacagctggggctgcggaaccaagcaagcatgtcctagacaaagatgttgccaaggacttggagaatggagtctctggaacaaagcaagctgacaaagcggaggcaggcaccgcagaatacctcattcaactcgaagagcggcggtcaatcaaggtattcggttcaaacacgttcatcggtctggggatcgtgttcttcgcgggggcgtgcttctcgctcttctccccggcgttcaacctggcaaccaacgaccagtggcgcacgctcaggggcggcgtgccgcacctggtggtctacaccgccttcttctacttctccgtcgcgtgcttcgccgtcggcgtcggcctcaacgtgctgttcctctaccgccccatggccggggtgcccaggtcctccctcggggcctacctcggggactgggacggccggcactgggcgctcctcgccggcctgctctgcggcttcggcaacggcctccagttcacgggcgggcaggccgcgggctacgccgccgccgacgcggtccaagcactgccactggtatcaacattctggggcgtactgctctttggggagtaccgcaagtcgtcgcggaagacgtacctcctgctcggcttcatgctcttcatgttcgtcgccgccgtcgccgtgctcatggcttcgtcaggtcacaggaccacagag

SEQ ID NO: 1270 - DNA, 1233 bp, Artificial sequence
  Mir resistant mutated nucleotide sequence
atgttcgtggtcgaggacaagggcggcgccatcgcgctgatgctggcgtcgctgctgttcctgggcacgtggccggccgtgctgacgctgctggagcgccgaggccggctgccgcagcacacgtacctggactactccgtcacgaacctcctcgcggccgtgctcatcgcgctcaccttcggccagctcgggggcgccaggcgcggcatgcccaacttcctcacgcagctcggccagcccaactggccttccgtgctgttcgccatggccggaggcgtcgtgctcagcgtcgggaacctctccacccagtacgcttgggcctacgtcggtctctccgtcaccgaggtcgtcagctccagcatggtggtcgtcattggcacgacgctgaactacttcctggacaaccgcatcaacagggcagagattctgtttcccggcgtggcatgcttccttgttgctgtcatccttggctctgctgtccacgcctccaacgcagctgacaacgaggagaagctcagtgcctccacaaatgcctaccagcttggtaggacagctggggctgcggaaccaagcaagcatgtcctagacaaagatgttgccaaggacttggagaatggagtctctggaacaaagcaagctgacaaagcggaggcaggcaccgcagaatacctcattcaactcgaagagcggcggtcaatcaaggtattcggttcaaacacgttcatcggtctggggatcgtgttcttcgcgggggcgtgcttctcgctcttctccccggcgttcaacctggcaaccaacgaccagtggcgcacgctcaggggcggcgtgccgcacctggtggtctacaccgccttcttctacttctccgtcgcgtgcttcgccgtcggcgtcggcctcaacgtgctgttcctctaccgccccatggccggggtgcccaggtcctccctcggggcctacctcggggactgggacggccggcactgggcgctcctcgccggcctgctctgcggcttcggcaacggcctccagttcacgggcgggcaggccgcgggctacgccgccgccgacgcggtccaagcattaccgttagtatcaacattctggggcgtactgctctttggggagtaccgcaagtcgtcgcggaagacgtacctcctgctcggcttcatgctcttcatgttcgtcgccgccgtcgccgtgctcatggcttcgtcaggtcacaggaccacagag

SEQ ID NO: 1271 - DNA, 1371 bp, Artificial sequence
  Mir resistant mutated nucleotide sequence
atggcgtccaccaacgcaatcgatttccaactcacccaggcccgggcgctgctgtccgaattcgacaaccggctccgcgagattgattccaagtgggagacccgcgtcggcgtcctcgaaacgaaagttgcggactctgctcgaaatctggagacgatctccaaggagatccgcgacggggtggtggcgcagttggcggcggccgaggcgggtgtggatttccggatccgcctgcttgagacggggaccatcattcgcgtcgctgcgctcgagtcgactgcccacgccttcgagctgtggcgtcctcacgtcgacttgtcgatcgattcattatttagtagtatagacgcggtttgtaccgaggtcgagaaattggggatccaccggttcccaggaccgcgtcccagcgatggcgcagcagcaccggggaccgcgacgcaaccggaaccctcttctcatcggccacgttcatcgcctccgcccgaggtccatgacggcgacgatgacgatgaagaaattgacgatgacgatgacgacgacgacgacgacgacgacgacgacgacgacgacgacgacgacgacgacgacgaggattatgagggcttcacagacgaagagctggacaaattcgaaagcgccttcggatggggttctacattcttgagtgatcctcaagttctttgtatggactcgagtgatccacaaaacccccctcgtattggccggcaaaattatgagccgctcaccgcacaggagtttttttcactgcgccacaattggcaacagctgctcgatggcaagaagacatacctccgcccaccaaagaacaaccgtgttgccaagcacagttatgctaactgcacctttgtaaccccagaacctcttgagaaggcactacaatgtcaggagccgctatctgattttggtcggaaatatgcagaaaattctatagttcagcaaaagtttaagattcttagtgaacattatgcgcacgtcagacaaatgcgaatggatggatcatctttttacagagctttccttttctcttacttggaaaaccttgggaaaatgcaagctagtcatgctgaggtcactcgcttaatggaatgtgtggcaaggtccagagagaaattttgtcgtttacattggaatgatgcgtacttctcaaatcctgaagcatttttctcaagtgttgtttctgagttcgagcaattggtcaattcagttgccaatgggctaaatgctgatgagctttacaagagaagcctacatgagattacatcatccaggagtgaggatacaaatttttttgggatgtgttgtttatttgttctctatgtaacattttctttggttagttctttgtttgtt

SEQ ID NO: 1272 - DNA, 1371 bp, Artificial sequence
  Mir resistant mutated nucleotide sequence
atggcgtccaccaacgcaatcgatttccaactcacccaggcccgggcgctgctgtccgaattcgacaaccggctccgcgagattgattccaagtgggagacccgcgtcggcgtcctcgaaacgaaagttgcggactctgctcgaaatctggagacgatctccaaggagatccgcgacggggtggtggcgcagttggcggcggccgaggcgggtgtggatttccggatccgcctgcttgagacggggaccatcattcgcgtcgctgcgctcgagtcgactgcccacgccttcgagctgtggcgtcctcacgtcgacttgtcgatcgactcattatttagtagtatagacgcggtttgtaccgaggtcgagaaattggggatccaccggttcccaggaccgcgtcccagcgatggcgcagcagcaccggggaccgcgacgcaaccggaaccctcttctcatcggccacgttcatcgcctccgcccgaggtccatgacggcgacgatgacgatgaagaaattgacgatgacgatgacgacgacgacgacgacgacgacgacgacgacgacgacgacgacgacgacgacgacgaggattatgagggcttcacagacgaagagctggacaaattcgaaagcgccttcggatggggttctacattcttgagtgatcctcaagttctttgtatggactcgagtgatccacaaaacccccctcgtattggccggcaaaattatgagccgctcaccgcacaggagtttttttcactgcgccacaattggcaacagctgctcgatggcaagaagacatacctccgcccaccaaagaacaaccgtgttgccaagcacagttatgctaactgcacctttgtaaccccagaacctcttgagaaggcactacaatgtcaggagccgctatctgattttggtcggaaatatgcagaaaattctatagttcagcaaaagtttaagattcttagtgaacattatgcgcacgtcagacaaatgcgaatggatggatcatctttttacagagctttccttttctcttacttggaaaaccttgggaaaatgcaagctagtcatgctgaggtcactcgcttaatggaatgtgtggcaaggtccagagagaaattttgtcgtttacattggaatgatgcgtacttctcaaatcctgaagcatttttctcaagtgttgtttctgagttcgagcaattggtcaattcagttgccaatgggctaaatgctgatgagctttacaagagaagcctacatgagattacatcatccaggagtgaggatacaaatttttttgggatgtgttgtttatttgttctctatgtaacattttctttggttagttctttgtttgtt

SEQ ID NO: 1273 - DNA, 1371 bp, Artificial sequence
  Mir resistant mutated nucleotide sequence
atggcgtccaccaacgcaatcgatttccaactcacccaggcccgggcgctgctgtccgaattcgacaaccggctccgcgagattgattccaagtgggagacccgcgtcggcgtcctcgaaacgaaagttgcggactctgctcgaaatctggagacgatctccaaggagatccgcgacggggtggtggcgcagttggcggcggccgaggcgggtgtggatttccggatccgcctgcttgagacggggaccatcattcgcgtcgctgcgctcgagtcgactgcccacgccttcgagctgtggcgtcctcacgtcgacttgtcgatcgatagtttatttagtagtatagacgcggtttgtaccgaggtcgagaaattggggatccaccggttcccaggaccgcgtcccagcgatggcgcagcagcaccggggaccgcgacgcaaccggaaccctcttctcatcggccacgttcatcgcctccgcccgaggtccatgacggcgacgatgacgatgaagaaattgacgatgacgatgacgacgacgacgacgacgacgacgacgacgacgacgacgacgacgacgacgacgacgaggattatgagggcttcacagacgaagagctggacaaattcgaaagcgccttcggatggggttctacattcttgagtgatcctcaagttctttgtatggactcgagtgatccacaaaacccccctcgtattggccggcaaaattatgagccgctcaccgcacaggagtttttttcactgcgccacaattggcaacagctgctcgatggcaagaagacatacctccgcccaccaaagaacaaccgtgttgccaagcacagttatgctaactgcacctttgtaaccccagaacctcttgagaaggcactacaatgtcaggagccgctatctgattttggtcggaaatatgcagaaaattctatagttcagcaaaagtttaagattcttagtgaacattatgcgcacgtcagacaaatgcgaatggatggatcatctttttacagagctttccttttctcttacttggaaaaccttgggaaaatgcaagctagtcatgctgaggtcactcgcttaatggaatgtgtggcaaggtccagagagaaattttgtcgtttacattggaatgatgcgtacttctcaaatcctgaagcatttttctcaagtgttgtttctgagttcgagcaattggtcaattcagttgccaatgggctaaatgctgatgagctttacaagagaagcctacatgagattacatcatccaggagtgaggatacaaatttttttgggatgtgttgtttatttgttctctatgtaacattttctttggttagttctttgtttgtt

SEQ ID NO: 1274 - DNA, 1371 bp, Artificial sequence
  Mir resistant mutated nucleotide sequence
atggcgtccaccaacgcaatcgatttccaactcacccaggcccgggcgctgctgtccgaattcgacaaccggctccgcgagattgattccaagtgggagacccgcgtcggcgtcctcgaaacgaaagttgcggactctgctcgaaatctggagacgatctccaaggagatccgcgacggggtggtggcgcagttggcggcggccgaggcgggtgtggatttccggatccgcctgcttgagacggggaccatcattcgcgtcgctgcgctcgagtcgactgcccacgccttcgagctgtggcgtcctcacgtcgacttgtcgatcgattcattattcagtagtatagacgcggtttgtaccgaggtcgagaaattggggatccaccggttcccaggaccgcgtcccagcgatggcgcagcagcaccggggaccgcgacgcaaccggaaccctcttctcatcggccacgttcatcgcctccgcccgaggtccatgacggcgacgatgacgatgaagaaattgacgatgacgatgacgacgacgacgacgacgacgacgacgacgacgacgacgacgacgacgacgacgacgaggattatgagggcttcacagacgaagagctggacaaattcgaaagcgccttcggatggggttctacattcttgagtgatcctcaagttctttgtatggactcgagtgatccacaaaacccccctcgtattggccggcaaaattatgagccgctcaccgcacaggagtttttttcactgcgccacaattggcaacagctgctcgatggcaagaagacatacctccgcccaccaaagaacaaccgtgttgccaagcacagttatgctaactgcacctttgtaaccccagaacctcttgagaaggcactacaatgtcaggagccgctatctgattttggtcggaaatatgcagaaaattctatagttcagcaaaagtttaagattcttagtgaacattatgcgcacgtcagacaaatgcgaatggatggatcatctttttacagagctttccttttctcttacttggaaaaccttgggaaaatgcaagctagtcatgctgaggtcactcgcttaatggaatgtgtggcaaggtccagagagaaattttgtcgtttacattggaatgatgcgtacttctcaaatcctgaagcatttttctcaagtgttgtttctgagttcgagcaattggtcaattcagttgccaatgggctaaatgctgatgagctttacaagagaagcctacatgagattacatcatccaggagtgaggatacaaatttttttgggatgtgttgtttatttgttctctatgtaacattttctttggttagttctttgtttgtt

SEQ ID NO: 1275 - DNA, 1002 bp, Artificial sequence
  Mir resistant mutated nucleotide sequence
atgcccgtcggctcccgacggaggccgccgccgtcgcaccaccgtcgcgccatgacacccgcctccgtctccgcccccgcccccggcgccgccgccgctcccacaaagccgctctacctccgcggtccggtcatcgcgggcgccgccgcgctggccgcgttcctcctcctcgccgccgcctacgccaccaggcgagccggttccccaccgaccgccctcctcgctcacccagctgttgccacacgattttttagttttgatctggtccgcgagtaccctcacgacccggacgccttcacccagggtctcttatacgcggaaaatgacactcttttcgagtccactggcctctaccacaggtcttcagtccgaaaggttgatcttcagacgggaaaggttttggttaatcaccaaatggacggacaaatgtttggagaaggtttaactcttctcggccacagattgtttcaggttacctggttgaagaacgacgggtttatatatgatcaacataacttctccaaacgcacgagttttacccataaaatgcgagatggttggggtttggcgactgatggaaaagttctttttggcagtgatggcacttcaatgctgtataagctggatccaaagtcacttgaagtcatgaaagtggtgactgtcaagtatcacggtgatgaagtcccctaccttaatgagctggagtatgtagatggtgaagtctgggcaaatgtctggcagacagattgcatagctagagtgtcccctgaagatggcctagtggtgggctggatctttcttcatgagctgaggcggcagttgtggaactcaggcaatacgaatattgatgtcttaaacgggatagcttgggatgaaagaaaccacagattatttgtgacagggaaactgtggccaaagctctatgagatcaagctacgggcagtagatggtccagcagatggatctgtagaaaaactttgtccaaaagccagcttctatcgc

SEQ ID NO: 1276 - DNA, 1002 bp, Artificial sequence
  Mir resistant mutated nucleotide sequence
atgcccgtcggctcccgacggaggccgccgccgtcgcaccaccgtcgcgccatgacacccgcctccgtctccgcccccgcccccggcgccgccgccgctcccacaaagccgctctacctccgcggtccggtcatcgcgggcgccgccgcgctggccgcgttcctcctcctcgccgccgcctacgccaccaggcgagccggttccccaccgaccgccctcctcgctcacccagctgttgccacccgattttttagttttgatctggtccgcgagtaccctcacgacccggacgccttcacccagggtctcttatacgcggaaaatgacactcttttcgagtccactggcctctaccacaggtcttcagtccgaaaggttgatcttcagacgggaaaggttttggttaatcaccaaatggacggacaaatgtttggagaaggtttaactcttctcggccacagattgtttcaggttacctggttgaagaacgacgggtttatatatgatcaacataacttctccaaacgcacgagttttacccataaaatgcgagatggttggggtttggcgactgatggaaaagttctttttggcagtgatggcacttcaatgctgtataagctggatccaaagtcacttgaagtcatgaaagtggtgactgtcaagtatcacggtgatgaagtcccctaccttaatgagctggagtatgtagatggtgaagtctgggcaaatgtctggcagacagattgcatagctagagtgtcccctgaagatggcctagtggtgggctggatctttcttcatgagctgaggcggcagttgtggaactcaggcaatacgaatattgatgtcttaaacgggatagcttgggatgaaagaaaccacagattatttgtgacagggaaactgtggccaaagctctatgagatcaagctacgggcagtagatggtccagcagatggatctgtagaaaaactttgtccaaaagccagcttctatcgc

SEQ ID NO: 1277 - DNA, 1002 bp, Artificial sequence; identical to SEQ ID NO: 1276
  Mir resistant mutated nucleotide sequence

SEQ ID NO: 1278 - DNA, 1002 bp, Artificial sequence; identical to SEQ ID NO: 1276
  Mir resistant mutated nucleotide sequence

SEQ ID NO: 1279 - DNA, 1002 bp, Artificial sequence
  Mir resistant mutated nucleotide sequence
atgcccgtcggctcccgacggaggccgccgccgtcgcaccaccgtcgcgccatgacacccgcctccgtctccgcccccgcccccggcgccgccgccgctcccacaaagccgctctacctccgcggtccggtcatcgcgggcgccgccgcgctggccgcgttcctcctcctcgccgccgcctacgccaccaggcgagccggttccccaccgaccgccctcctcgctcacccagctgttgccacaaggttttttagttttgatctggtccgcgagtaccctcacgacccggacgccttcacccagggtctcttatacgcggaaaatgacactcttttcgagtccactggcctctaccacaggtcttcagtccgaaaggttgatcttcagacgggaaaggttttggttaatcaccaaatggacggacaaatgtttggagaaggtttaactcttctcggccacagattgtttcaggttacctggttgaagaacgacgggtttatatatgatcaacataacttctccaaacgcacgagttttacccataaaatgcgagatggttggggtttggcgactgatggaaaagttctttttggcagtgatggcacttcaatgctgtataagctggatccaaagtcacttgaagtcatgaaagtggtgactgtcaagtatcacggtgatgaagtcccctaccttaatgagctggagtatgtagatggtgaagtctgggcaaatgtctggcagacagattgcatagctagagtgtcccctgaagatggcctagtggtgggctggatctttcttcatgagctgaggcggcagttgtggaactcaggcaatacgaatattgatgtcttaaacgggatagcttgggatgaaagaaaccacagattatttgtgacagggaaactgtggccaaagctctatgagatcaagctacgggcagtagatggtccagcagatggatctgtagaaaaactttgtccaaaagccagcttctatcgc

SEQ ID NO: 1280 - DNA, 1164 bp, Artificial sequence
  Mir resistant mutated nucleotide sequence
atgataagtttattattaagagcacctggatcaccatacgtcccttgcccccacttcttcccgctcttctatccccaccgcctcctctccgccaccaaatgcgtcgctacaaaaccattcgccgtcgaggactacctcgtcgccacatgcggcctcacccaagcacaggccctcaaggcgtcgaagcatgtctcccatctgaaggatccctcgaaagccgacgcggtcgtcgccttcctctccaacctcggcctgtccagcgccgagatcaccgacgtcgtgaccagggaccccaaagtcctctgctccgacgtggagagatccctcaccgctcgcgtcgccgagctcaccgacctcgggttttcacgtccggagatcgtccgccttctcatcgttggcatgaaccacttccgccatagctcgcttcgcctcaatcttgagttttggatctcggtctttggctctctcgacgagctcattcgggcgctcagaattaacgccgctctcctcagcacaaggattgaggaggtctgcaagcccaacctggagctccttcaagagtgtggtataaatgtttctgatatctccaacagcttcatgtcccgtgtgctcaccagggaccctaagagcctgcaggaagctttggctcgccttcatgagttcagaatccagccgggctctcaacctttcttccgtgggctttatacatttgcaatccttggcagcgggaagataaccaagagcattcagctgtttgagaagcttggatggtcaaaggaccatatagtatcagcggtgaagagagacccgactatattgggtttcaccgaggagagggttcgaagaaacatggaattcttgatcagggttgtcggattggaggtaccatacatcgcacgaaggccagcgctgataaattatagtattgaccgtcggttgttgccacggaattgcttgatcaattttctcagggcaaaggggttgttcaatgacgaggctagtttcctttctgtcgccgctataggcgatgagaaatttcggcgccgatacgtgcatccttacgaggaggattttccaggccttgctgctgcttttgcttctagctgtgctggagaacaccaatgggaacggctatataagatgacaggcgaaaataaagaaagc

SEQ ID NO: 1281 - DNA, 1164 bp, Artificial sequence
  Mir resistant mutated nucleotide sequence
atgatcagtttattattaagagcacctggatcaccatacgtcccttgcccccacttcttcccgctcttctatccccaccgcctcctctccgccaccaaatgcgtcgctacaaaaccattcgccgtcgaggactacctcgtcgccacatgcggcctcacccaagcacaggccctcaaggcgtcgaagcatgtctcccatctgaaggatccctcgaaagccgacgcggtcgtcgccttcctctccaacctcggcctgtccagcgccgagatcaccgacgtcgtgaccagggaccccaaagtcctctgctccgacgtggagagatccctcaccgctcgcgtcgccgagctcaccgacctcgggttttcacgtccggagatcgtccgccttctcatcgttggcatgaaccacttccgccatagctcgcttcgcctcaatcttgagttttggatctcggtctttggctctctcgacgagctcattcgggcgctcagaattaacgccgctctcctcagcacaaggattgaggaggtctgcaagcccaacctggagctccttcaagagtgtggtataaatgtttctgatatctccaacagcttcatgtcccgtgtgctcaccagggaccctaagagcctgcaggaagctttggctcgccttcatgagttcagaatccagccgggctctcaacctttcttccgtgggctttatacatttgcaatccttggcagcgggaagataaccaagagcattcagctgtttgagaagcttggatggtcaaaggaccatatagtatcagcggtgaagagagacccgactatattgggtttcaccgaggagagggttcgaagaaacatggaattcttgatcagggttgtcggattggaggtaccatacatcgcacgaaggccagcgctgataaattatagtattgaccgtcggttgttgccacggaattgcttgatcaattttctcagggcaaaggggttgttcaatgacgaggctagtttcctttctgtcgccgctataggcgatgagaaatttcggcgccgatacgtgcatccttacgaggaggattttccaggccttgctgctgcttttgcttctagctgtgctggagaacaccaatgggaacggctatataagatgacaggcgaaaataaagaaagc

SEQ ID NO: 1282 - DNA, 1164 bp, Artificial sequence; identical to SEQ ID NO: 1281
  Mir resistant mutated nucleotide sequence

SEQ ID NO: 1283 - DNA, 1164 bp, Artificial sequence
  Mir resistant mutated nucleotide sequence
atgatatccttattattaagagcacctggatcaccatacgtcccttgcccccacttcttcccgctcttctatccccaccgcctcctctccgccaccaaatgcgtcgctacaaaaccattcgccgtcgaggactacctcgtcgccacatgcggcctcacccaagcacaggccctcaaggcgtcgaagcatgtctcccatctgaaggatccctcgaaagccgacgcggtcgtcgccttcctctccaacctcggcctgtccagcgccgagatcaccgacgtcgtgaccagggaccccaaagtcctctgctccgacgtggagagatccctcaccgctcgcgtcgccgagctcaccgacctcgggttttcacgtccggagatcgtccgccttctcatcgttggcatgaaccacttccgccatagctcgcttcgcctcaatcttgagttttggatctcggtctttggctctctcgacgagctcattcgggcgctcagaattaacgccgctctcctcagcacaaggattgaggaggtctgcaagcccaacctggagctccttcaagagtgtggtataaatgtttctgatatctccaacagcttcatgtcccgtgtgctcaccagggaccctaagagcctgcaggaagctttggctcgccttcatgagttcagaatccagccgggctctcaacctttcttccgtgggctttatacatttgcaatccttggcagcgggaagataaccaagagcattcagctgtttgagaagcttggatggtcaaaggaccatatagtatcagcggtgaagagagacccgactatattgggtttcaccgaggagagggttcgaagaaacatggaattcttgatcagggttgtcggattggaggtaccatacatcgcacgaaggccagcgctgataaattatagtattgaccgtcggttgttgccacggaattgcttgatcaattttctcagggcaaaggggttgttcaatgacgaggctagtttcctttctgtcgccgctataggcgatgagaaatttcggcgccgatacgtgcatccttacgaggaggattttccaggccttgctgctgcttttgcttctagctgtgctggagaacaccaatgggaacggctatataagatgacaggcgaaaataaagaaagc

SEQ ID NO: 1284 - DNA, 1164 bp, Artificial sequence; identical to SEQ ID NO: 1283
  Mir resistant mutated nucleotide sequence

SEQ ID NO: 1285 - DNA, 906 bp, Artificial sequence
  Mir resistant mutated nucleotide sequence
atggcccggcgtcgcctgcagcaaccgcaccgtcgtctcgctcgacatctccggctacaacctctccggcacgctgccccccgctatcgccgacctcgctggccaccattcttattaagaagacgccaactccttctccggagacattccgcccgccatcgccgccctccgcgacctccgccacctcaacctctccaacaaccagttcaacggcacatcgtgcggctgctggccttctgctcggggcccgaggcgaagctgctggtgtacgagtacatggtgaacggcagcctcggggaggcgctgcaccgcgctggcgctgatgatggcggcggcggtgtggtgctgtcgtgggcgtcgcgtctccgcgtggcgacggaggctgccaaggggctgtgctacctgcaccacgactgctcgccgccgatcctgcaccgggacgtcaagtccaacaacatcctgctggacgcgcgcatggaggcccacgtggcggacttcgggctggccaagttcctgggcggcagcggcgcctccgagtgcatgtccgccgtcgcaggatcatacggctacatcgcaccagagtacgcgtacacgctcaaggtggacgagaagagtgacgtgtacagcttcggcgtggtcctgctggagctcatcacggggctgaagccggtgggggagcacctcggcgacgacgcggtggacctggtgcagtgggcgcgcgcccggagctctgcagggggcggcgtcctggcgctgctggaccctcgcctcggcggcgacgtcccggtggcggaggcggcgcatgtgctgttcgtgtcgatgctatgcgtgcaggagcacagcgtggagcgccccaccatgcgcgaggtcgtccagatgctgcagcaggcacggcaccagcctagc

SEQ ID NO: 1286 - DNA, 906 bp, Artificial sequence
  Mir resistant mutated nucleotide sequence
atggcccggcgtcgcctgcagcaaccgcaccgtcgtctcgctcgacatctccggctacaacctctccggcacgctgccccccgctatcgccgacctcgctggcctcctttcttattaagaagacgccaactccttctccggagacattccgcccgccatcgccgccctccgcgacctccgccacctcaacctctccaacaaccagttcaacggcacatcgtgcggctgctggccttctgctcggggcccgaggcgaagctgctggtgtacgagtacatggtgaacggcagcctcggggaggcgctgcaccgcgctggcgctgatgatggcggcggcggtgtggtgctgtcgtgggcgtcgcgtctccgcgtggcgacggaggctgccaaggggctgtgctacctgcaccacgactgctcgccgccgatcctgcaccgggacgtcaagtccaacaacatcctgctggacgcgcgcatggaggcccacgtggcggacttcgggctggccaagttcctgggcggcagcggcgcctccgagtgcatgtccgccgtcgcaggatcatacggctacatcgcaccagagtacgcgtacacgctcaaggtggacgagaagagtgacgtgtacagcttcggcgtggtcctgctggagctcatcacggggctgaagccggtgggggagcacctcggcgacgacgcggtggacctggtgcagtgggcgcgcgcccggagctctgcagggggcggcgtcctggcgctgctggaccctcgcctcggcggcgacgtcccggtggcggaggcggcgcatgtgctgttcgtgtcgatgctatgcgtgcaggagcacagcgtggagcgccccaccatgcgcgaggtcgtccagatgctgcagcaggcacggcaccagcctagc

SEQ ID NO: 1287 - DNA, 906 bp, Artificial sequence; identical to SEQ ID NO: 1286
  Mir resistant mutated nucleotide sequence

SEQ ID NO: 1288 - DNA, 906 bp, Artificial sequence; identical to SEQ ID NO: 1286
  Mir resistant mutated nucleotide sequence

SEQ ID NO: 1289 - DNA, 906 bp, Artificial sequence
  Mir resistant mutated nucleotide sequence
atggcccggcgtcgcctgcagcaaccgcaccgtcgtctcgctcgacatctccggctacaacctctccggcacgctgccccccgctatcgccgacctcgctggccgccgttcttattaagaagacgccaactccttctccggagacattccgcccgccatcgccgccctccgcgacctccgccacctcaacctctccaacaaccagttcaacggcacatcgtgcggctgctggccttctgctcggggcccgaggcgaagctgctggtgtacgagtacatggtgaacggcagcctcggggaggcgctgcaccgcgctggcgctgatgatggcggcggcggtgtggtgctgtcgtgggcgtcgcgtctccgcgtggcgacggaggctgccaaggggctgtgctacctgcaccacgactgctcgccgccgatcctgcaccgggacgtcaagtccaacaacatcctgctggacgcgcgcatggaggcccacgtggcggacttcgggctggccaagttcctgggcggcagcggcgcctccgagtgcatgtccgccgtcgcaggatcatacggctacatcgcaccagagtacgcgtacacgctcaaggtggacgagaagagtgacgtgtacagcttcggcgtggtcctgctggagctcatcacggggctgaagccggtgggggagcacctcggcgacgacgcggtggacctggtgcagtgggcgcgcgcccggagctctgcagggggcggcgtcctggcgctgctggaccctcgcctcggcggcgacgtcccggtggcggaggcggcgcatgtgctgttcgtgtcgatgctatgcgtgcaggagcacagcgtggagcgccccaccatgcgcgaggtcgtccagatgctgcagcaggcacggcaccagcctagc

SEQ ID NO: 1290 - DNA, 1185 bp, Artificial sequence
  Mir resistant mutated nucleotide sequence
atgaacaacctccggaagcgcatgataagtttattattaagagcacctggatcaccatacgtcccttgcccccacttcttcccgctcttctatccccaccgcctcctctccgccatcaaatgcgtcgctacaaaaccattcgccgtcgaggactacctcgtcgccacatgcggcctcacccaagcacaggccctcaaggcgtcgaagcatgtctcccatctgaaggatccctcgaaagccgacgcggtcgtcgccttcctctccaacctcggcctgtccagcgccgagatcaccgacgtcgtgaccagggaccccaaagtcctctgctccgacgtggagagatccctcaccgctcgcgtcgccgagctcaccgacctcgggttttcacgtccggagatcgtccgccttctcatcgttggcatgaaccacttccgccatagctcgcttcgcctcaatcttgagttttggatctcggtctttggctctctcgacgagctcattcgggcgctcagaattaacgccgctctcctcagcacaaggattgaggaggtctgcaagcccaacttggagctccttcaagagtgtggtataaatgtttctgatatctccaacagcttcatgtcccgtgtgctcaccagggaccctaagagcctgcaggaagctttggctcgccttcatgagttcagaatccagccgggctctcaacctttcttccgtgggctttatacatttgcaatccttggcagcgggaagataaccaagagcattcagctgtttgagaagcttggatggtcaaaggaccatatagtatcagcggtgaagagagacccgactatattgggtttcaccgaggagagggttcgaagaaacatggaattcttgatcagggttgtcggattggaggtaccatacatcgcacgaaggccagcgctgataaattatagtattgaccgtcggttgttgccacggaattgcttgatcaattttctcagggcaaaggggttgttcaatgacgaggctagtttcctttctgtcgccgctataggcgatgagaaatttcggcgccgatacgtgcatccttacgaggaggattttccaggccttgctgctgcttttgcttctagctgtgctggagaacaccaatgggaacggctatataagatgacaggcgaaaataaagaaagc

SEQ ID NO: 1291 - DNA, 1185 bp, Artificial sequence
  Mir resistant mutated nucleotide sequence
atgaacaacctccggaagcgcatgatcagtttattattaagagcacctggatcaccatacgtcccttgcccccacttcttcccgctcttctatccccaccgcctcctctccgccatcaaatgcgtcgctacaaaaccattcgccgtcgaggactacctcgtcgccacatgcggcctcacccaagcacaggccctcaaggcgtcgaagcatgtctcccatctgaaggatccctcgaaagccgacgcggtcgtcgccttcctctccaacctcggcctgtccagcgccgagatcaccgacgtcgtgaccagggaccccaaagtcctctgctccgacgtggagagatccctcaccgctcgcgtcgccgagctcaccgacctcgggttttcacgtccggagatcgtccgccttctcatcgttggcatgaaccacttccgccatagctcgcttcgcctcaatcttgagttttggatctcggtctttggctctctcgacgagctcattcgggcgctcagaattaacgccgctctcctcagcacaaggattgaggaggtctgcaagcccaacttggagctccttcaagagtgtggtataaatgtttctgatatctccaacagcttcatgtcccgtgtgctcaccagggaccctaagagcctgcaggaagctttggctcgccttcatgagttcagaatccagccgggctctcaacctttcttccgtgggctttatacatttgcaatccttggcagcgggaagataaccaagagcattcagctgtttgagaagcttggatggtcaaaggaccatatagtatcagcggtgaagagagacccgactatattgggtttcaccgaggagagggttcgaagaaacatggaattcttgatcagggttgtcggattggaggtaccatacatcgcacgaaggccagcgctgataaattatagtattgaccgtcggttgttgccacggaattgcttgatcaattttctcagggcaaaggggttgttcaatgacgaggctagtttcctttctgtcgccgctataggcgatgagaaatttcggcgccgatacgtgcatccttacgaggaggattttccaggccttgctgctgcttttgcttctagctgtgctggagaacaccaatgggaacggctatataagatgacaggcgaaaataaagaaagc

SEQ ID NO: 1292 - DNA, 1185 bp, Artificial sequence; identical to SEQ ID NO: 1291
  Mir resistant mutated nucleotide sequence

SEQ ID NO: 1293 - DNA, 1185 bp, Artificial sequence
  Mir resistant mutated nucleotide sequence
atgaacaacctccggaagcgcatgatatccttattattaagagcacctggatcaccatacgtcccttgcccccacttcttcccgctcttctatccccaccgcctcctctccgccatcaaatgcgtcgctacaaaaccattcgccgtcgaggactacctcgtcgccacatgcggcctcacccaagcacaggccctcaaggcgtcgaagcatgtctcccatctgaaggatccctcgaaagccgacgcggtcgtcgccttcctctccaacctcggcctgtccagcgccgagatcaccgacgtcgtgaccagggaccccaaagtcctctgctccgacgtggagagatccctcaccgctcgcgtcgccgagctcaccgacctcgggttttcacgtccggagatcgtccgccttctcatcgttggcatgaaccacttccgccatagctcgcttcgcctcaatcttgagttttggatctcggtctttggctctctcgacgagctcattcgggcgctcagaattaacgccgctctcctcagcacaaggattgaggaggtctgcaagcccaacttggagctccttcaagagtgtggtataaatgtttctgatatctccaacagcttcatgtcccgtgtgctcaccagggaccctaagagcctgcaggaagctttggctcgccttcatgagttcagaatccagccgggctctcaacctttcttccgtgggctttatacatttgcaatccttggcagcgggaagataaccaagagcattcagctgtttgagaagcttggatggtcaaaggaccatatagtatcagcggtgaagagagacccgactatattgggtttcaccgaggagagggttcgaagaaacatggaattcttgatcagggttgtcggattggaggtaccatacatcgcacgaaggccagcgctgataaattatagtattgaccgtcggttgttgccacggaattgcttgatcaattttctcagggcaaaggggttgttcaatgacgaggctagtttcctttctgtcgccgctataggcgatgagaaatttcggcgccgatacgtgcatccttacgaggaggattttccaggccttgctgctgcttttgcttctagctgtgctggagaacaccaatgggaacggctatataagatgacaggcgaaaataaagaaagc

SEQ ID NO: 1294 - DNA, 1185 bp, Artificial sequence; identical to SEQ ID NO: 1293
  Mir resistant mutated nucleotide sequence

SEQ ID NO: 1295 - DNA, 1542 bp, Artificial sequence
  Mir resistant mutated nucleotide sequence
atgcgcctaatggctgttctggttgatggatgccggggactgaggggtggtgctatggctggtgtgatccatgggcacgcacaacacggagatcctatgtttcaggagtttatgggccgattactgcgccgggtgtgctcgccgttgtttgagatggtcaggagctgggtgctagaaggggaattggaggatgtatttgcagagttttttatcgttgggcagccagtgaaagcagaatctttgtggcgggagggctaccttattcaatctgatatgcttccagctttcatatctccagtgctcgcaaaacggattcttagaactggcaagtcaatcaactttcttagagtatgctgtgacgatagtggctgggctgatgctgctgccgaggctgctgcatatgttggcactacaacatctcggggtggccttggttatggggagactgatgctttggaggcattggtggttgaggcagccaagaggattgatcgacatttgatggatgtcattcataagcggtaccgatttaaggaccactgccttgccattaagcgttacttgcttcttgggcagggtgattttgtccagtatcttatggacgttgttggccccgagttatcagagccagcaaataggattagctccttccaattggctggcttgcttgagactgcaatccgagcatccaatgcacaatatgatgactgtgatatcttggaccggataaaggtaaagatgatggatcatggggatggtgatcgtggctgggatgtcttctctttggagtatgatgctagggtccccctggacactgtgttcacagcttcagttatgaagatgtatctcaaggttttcaacttcttgtggaagctcaaacgcgtagatcactcccttaccggagtgtggaagactatgaaacctaactgcattgtttcttctccattttacaaggaaggaacaagcatcagagctcaatttgtatcagttcttcgtaaatgtcaagttctattcaatgagatgaatcactttgtgaccaatttccaatactacattatgtttgaggtcctggaggtttcgtgggcccgtttttctgatgaaatggatgcagcaaaggatttagatgaccttctcttagcacacgataaatatctcaactcgatactggagaaggccctgcttggtgaacattcccaaggacttttgaggaatctgtttgaactgtttgacattattttacagtttcgaagccatgctgatcgatggtttgaaaggatatatgagttgcagctaaggggaaagggtaaatcaaaatcaaaggatacaggttcatggtttgatggcggcagaaaagctatgatccaactagctggagaacttttctggaaaatgggtgaagacctggatagcatcgcaaaggattatacagcttctcttgatgcttttattacgcagctgcccatgcaacagcacgtcgatctaaaatttttattatttagacttgacttcactgaatattacagtcgtgtttcctccaacaaa

SEQ ID NO: 1296 - DNA, 1542 bp, Artificial sequence
  Mir resistant mutated nucleotide sequence
atgcgcctaatggctgttctggttgatggatgccggggactgaggggtggtgctatggctggtgtgatccatgggcacgcacaacacggagatcctatgtttcaggagtttatgggccgattactgcgccgggtgtgctcgccgttgtttgagatggtcaggagctgggtgctagaaggggaattggaggatgtatttgcagagttttttatcgttgggcagccagtgaaagcagaatctttgtggcgggagggctaccttattcaatctgatatgcttccagctttcatatctccagtgctcgcaaaacggattcttagaactggcaagtcaatcaactttcttagagtatgctgtgacgatagtggctgggctgatgctgctgccgaggctgctgcatatgttggcactacaacatctcggggtggccttggttatggggagactgatgctttggaggcattggtggttgaggcagccaagaggattgatcgacatttgatggatgtcattcataagcggtaccgatttaaggaccactgccttgccattaagcgttacttgcttcttgggcagggtgattttgtccagtatcttatggacgttgttggccccgagttatcagagccagcaaataggattagctccttccaattggctggcttgcttgagactgcaatccgagcatccaatgcacaatatgatgactgtgatatcttggaccggataaaggtaaagatgatggatcatggggatggtgatcgtggctgggatgtcttctctttggagtatgatgctagggtccccctggacactgtgttcacagcttcagttatgaagatgtatctcaaggttttcaacttcttgtggaagctcaaacgcgtagatcactcccttaccggagtgtggaagactatgaaacctaactgcattgtttcttctccattttacaaggaaggaacaagcatcagagctcaatttgtatcagttcttcgtaaatgtcaagttctattcaatgagatgaatcactttgtgaccaatttccaatactacattatgtttgaggtcctggaggtttcgtgggcccgtttttctgatgaaatggatgcagcaaaggatttagatgaccttctcttagcacacgataaatatctcaactcgatactggagaaggccctgcttggtgaacattcccaaggacttttgaggaatctgtttgaactgtttgacattattttacagtttcgaagccatgctgatcgatggtttgaaaggatatatgagttgcagctaaggggaaagggtaaatcaaaatcaaaggatacaggttcatggtttgatggcggcagaaaagctatgatccaactagctggagaacttttctggaaaatgggtgaagacctggatagcatcgcaaaggattatacagcttctcttgatgcttttattacgcagctgcccatgcaacagcacgtcgatttgaaatttttattatttagacttgacttcactgaatattacagtcgtgtttcctccaacaaa

SEQ ID NO: 1297 - DNA, 1542 bp, Artificial sequence; identical to SEQ ID NO: 1296
  Mir resistant mutated nucleotide sequence

SEQ ID NO: 1298 - DNA, 1542 bp, Artificial sequence; identical to SEQ ID NO: 1296
  Mir resistant mutated nucleotide sequence

SEQ ID NO: 1299 - DNA, 1542 bp, Artificial sequence; identical to SEQ ID NO: 1296
  Mir resistant mutated nucleotide sequence

SEQ ID NO: 1300 - DNA, 1893 bp, Artificial sequence
  Mir resistant mutated nucleotide sequence
atgaccgtcgaggacgtgaagctgcaggcggcgaaggcgaacggcggcggccatggggccaaggaccagttccccgtcggcatgcgcgtgctcgccgtcgacgacgatcccacctgcctcaagctcctcgagaagctcttgcaacactgccagtaccatgtgacaacaactggacaggcagccacggccctaaagctgctgagggagaagaaggaccagtttgaccttgtgatcagcgatgtccacatgccggacatggacggcttcaagctcctcgagcttgtgggcctcgagatggacctcccggtcattatgctgtctgcaaatggggagacacaaacagtcatgaagggtattacccatggagcatgtgactacctgctcaagccagtgcggattgagcagttgaggactatatggcagcatgtggttagaaggaggagttgtgatgccaagaacaatggtaatgataacgatgattccggtaagaagttgcaggtggtgagtgctgaaggtgacaatggtggtggtaatcgcaacaagagaacttcccgcaggggtagggatgataatggagatgacggtgatgattctgatgagaacagtaatgagaatggagactcatcaacccagaagaagccaagggtcgtgtggtctgttgaattacaccgaaagtttgtggctgctgtcaaccagcttggcattgacaaggctgttccaaagaaaatattggatctcatgaatgtcgagaacatcacaagggagaatgttgcaagtcatctgcagaagtatcggctgtatctgaaaagactcagtgcagatgcaagcaggcaggctaacctaactgctgcatttggaggaagaaaccctgcttatgtcaacatgggactagatgccttcaggcaatacaatgcatatgggagataccggccagttccaaccactaaccattcacagccaaacaacctccttgcaaggatgaactctcctgcatttggtatgcatggtttgctgccttcgcagccgcttcagattggacacacccagaacaatatgagcacttccgtaggcaatgtcggggggatgaacaacggcaacctgatcaggggtgcgcatatgccactgcaggatactagcaaatgctttcctactggcccttctggtaattcatttgcgaacatatcaaacagcatacaattggttacgacaaataacttgccattacagtctcttgagccaagcaaccaacaacaccttggtcggctgcagtcttctgcagacccattcaactcatttgttggtgagtctccccagtttccagatcttggaagatgcaacactacctggccaactgcggtctcatcctccaacgttcaggagcttggtcagaaggacagaattgtgaatgggcccaagcttgagcctctctcaagctttacagaagcatccagtcagattcccttgctgggaaatgaaatgcagagccaagtagcatcactagccagcaacggtcttccaatgccgttcactcaggaagcggcgcccttcgcatatggaagcagcacgaactcaagagagatgctgaataacaaccttgcacttagtaattcaggcatcaactcttcattgccgaaccttcgcatagacggttctgttgttccgaggcagacactggacggtggtaattcaggtggagtcccccctctgcaagatggcaggattgatcatcaagctgttagtagtcatctaagctataacaacgaactcatgatggggacaagtaggctgcaaaggggactcagtggtggtctggatgacattgtcgtggacatgtttcgaccagatagagccgatgacggagtccccttcattgatggggactgggaactggtc

SEQ ID NO: 1301 - DNA, 1476 bp, Artificial sequence
  Mir resistant mutated nucleotide sequence
atgtccgatcaccgagcgaagcggccgtccgacggcgcagccactgtggcatcgccggcggcgaagcgcgcccgcgacccgcccgcgccggcgttacccacgaacaaggaagctcccgacatggcccccaagacccgcatcttctgcgacatcttagcaagtagagcagatgatgaagaactgaatgccgagctcgacaaggccgacatccgcgtaagcatcgctgacgtcgagcaggtgctccgcttctcctacgcgcacccgcgcgccgccgccgccttctttcgctgggcgggataccggtacctcggccacgagcactccccctactcgtggaacctcctcgtcgacatcctcggtaagaatcgtctcttcgagcccatgtgggacacagtcaaatctatgcagtcgcagcagctgctctcgctcgccactttcgcctccatattctcctccctggcggcgacccccggcggttccccgctcaaggcgttcatggacatgccccgctacggcatgacccgcgacacgccggcgctcaactcgctcctctccgcgctgtgtcgtgccaaccgcctcgacgacgctcgcgccgcgatcccagtagcccgcgccgaggctggcacgcgcccggatgccgactcctacgccatcctcctcgagggcagcgaggccgccgccgatctgcgggttgcgcgcgaggtgttcgacgaaatggtgcaggccattggattttatcctgacaacgtgcctgcctatgactccttcctcactacgcttgtttcaagtgactcctccacggcgctaccggaagcaatggagtacctaaatgtcttgagcaggcacggctgttcgccaggagagaagttcttccgtgctgctcttgctgcacaccttgaggcacgacaattgcgcggagccatgaatctctgggatgactttgttgggcgtcgaggactcgtcccagatatggaaatgtacaacacaatgatcaagctgcagggcagtctcgggcatgctgagctgatagtgggttatctcgacgacatgatctccaatggagtcttccctgataccaacacatacaatgtggtcctccagcttttgttgaagggaaagaagcaccgagaggcagcggcaatatttagcgagatggtcaagaacgaatgttggccaaacgagggaaattgttcacttgcacttcgcatgtttttggatacacactattgggagactgggatcaaagtctggtgctgcatggtggagaatggcttgccacctttacaggagtgtgggaacatgcttgtagcaaagctgaaggatgacaggctacctgaggcatgcaaatatgcagaagacatgattgatcggggtatcaagttgagttcagcgacactgtccaagctgaagcagcgcctgcagaggattaagaaaggagagatccatgatcacctgcttgcaaaatggaaggcacat

SEQ ID NO: 1302 - DNA, 1476 bp, Artificial sequence
  Mir resistant mutated nucleotide sequence
atgtccgatcaccgagcgaagcggccgtccgacggcgcagccactgtggcatcgccggcggcgaagcgcgcccgcgacccgcccgcgccggcgttacccacgaacaaggaagctcccgacatggcccccaagacccgcatcttctgcgacatcctggcaagtagagcagatgatgaagaactgaatgccgagctcgacaaggccgacatccgcgtaagcatcgctgacgtcgagcaggtgctccgcttctcctacgcgcacccgcgcgccgccgccgccttctttcgctgggcgggataccggtacctcggccacgagcactccccctactcgtggaacctcctcgtcgacatcctcggtaagaatcgtctcttcgagcccatgtgggacacagtcaaatctatgcagtcgcagcagctgctctcgctcgccactttcgcctccatattctcctccctggcggcgacccccggcggttccccgctcaaggcgttcatggacatgccccgctacggcatgacccgcgacacgccggcgctcaactcgctcctctccgcgctgtgtcgtgccaaccgcctcgacgacgctcgcgccgcgatcccagtagcccgcgccgaggctggcacgcgcccggatgccgactcctacgccatcctcctcgagggcagcgaggccgccgccgatctgcgggttgcgcgcgaggtgttcgacgaaatggtgcaggccattggattttatcctgacaacgtgcctgcctatgactccttcctcactacgcttgtttcaagtgactcctccacggcgctaccggaagcaatggagtacctaaatgtcttgagcaggcacggctgttcgccaggagagaagttcttccgtgctgctcttgctgcacaccttgaggcacgacaattgcgcggagccatgaatctctgggatgactttgttgggcgtcgaggactcgtcccagatatggaaatgtacaacacaatgatcaagctgcagggcagtctcgggcatgctgagctgatagtgggttatctcgacgacatgatctccaatggagtcttccctgataccaacacatacaatgtggtcctccagcttttgttgaagggaaagaagcaccgagaggcagcggcaatatttagcgagatggtcaagaacgaatgttggccaaacgagggaaattgttcacttgcacttcgcatgtttttggatacacactattgggagactgggatcaaagtctggtgctgcatggtggagaatggcttgccacctttacaggagtgtgggaacatgcttgtagcaaagctgaaggatgacaggctacctgaggcatgcaaatatgcagaagacatgattgatcggggtatcaagttgagttcagcgacactgtccaagctgaagcagcgcctgcagaggattaagaaaggagagatccatgatcacctgcttgcaaaatggaaggcacat

SEQ ID NO: 1303 - DNA, 1476 bp, Artificial sequence; identical to SEQ ID NO: 1302
  Mir resistant mutated nucleotide sequence

SEQ ID NO: 1304 - DNA, 1476 bp, Artificial sequence; identical to SEQ ID NO: 1302
  Mir resistant mutated nucleotide sequence

SEQ ID NO: 1305 - DNA, 1476 bp, Artificial sequence; identical to SEQ ID NO: 1302
  Mir resistant mutated nucleotide sequence

SEQ ID NO: 1306 - DNA, 1893 bp, Artificial sequence
  Mir resistant mutated nucleotide sequence
atgaccgtcgacgagctgaagctgcaggcgagggccagcggcggccacggcgccaaggaccagttccccgtcggcatgcgcgtgctcgccgtcgacgacgacccgacctgcctcaagatcctcgagaacctcttgctccgctgccagtaccatgtgacaacaacgggacaggcagccacggccttgaagctgctgagggagaagaaggaccagtttgaccttgtgatcagcgacgtccacatgccggacatggacggcttcaagctcctcgagcttgtgggcctcgagatggacctcccggtcattatgctgtctgcaaatggggagacacagacagtcatgaaggggattacccatggagcatgtgactacctgctgaagccagtgcgtattgagcagctgaggactatatggcagcatgtggttaggcggaggagttgtgacgccaagaacagtggcaatgacaacgatgattcgggtaaaaagttgcaggtggtgagcgctgaaggtgacaatggcggtgttaatcgcaacaagagaatttcacgcaagggtagggatgataatggtgatgacggtgatgattctgatgacaacagtaatgagaatggagactcgtcgagccagaagaagccaagggttgtgtggtctgttgaattgcaccgaaagtttgtggctgctgtcaaccagcttggcattgacaaggctgttccaaagaaaatattggatcttatgaatgttgagaacatcacaagggagaacgttgcaagtcatctgcagaagtatcggctgtatctgaaaagactcagcgcagatgcaagcaggcaggctaacctaactgctgcatttggaggaagaaaccctgcttatgtgaacatgggactagacgccttcaggcagtacaatgcatatgggagataccggccagttccaaccactaaccattcacagccaaacaacctccttgcaaggatgaactctcctgcatttggtatgcatggtctgctgccttcgcagccacttcagattggacacaaccagaacaatctgagcacttccctagggaatgtcggggggatgaacaacggcaacctgatcaggggtgcgcatatgccactgcaggatactagcaaatgctttcctactggcccttctggtaattcgttcgcgaacatatcaaacagcacacaactggttacgacaaacaacttgccattacagtctcttgagccaagcaaccaacaacaccttggtcggctgcattcctctgcagaccctttcaactcatttgttggtgagcccccccagtttgcagatcttggaaggtgcaacaccacctggccaaccgcggtctcatcatccaatgttcaggagattggccagaaggacaggatcgtgaataggcccaagcttgagcctctctcaagctttacagaagcatccagtcagatccctttgctgggaagtgaaatgcagagccaccaagtagcatcactagccagcaacggtcttccgatgccgttcactcaggaagcggtgcccttcgcttatggaagcagcacgaactcgagagagatgctgaataacaaccttgcgcttagtaattcaggcgtcaactctacattgccgaaccttcgcatagacggttctgttgttccagggcagacactgggtggtagcaattcaggtggttgtgttgtcccccctctgcaagatggcaggattgatcaccaagctgtcagcagtcatctaaactacaacaacgaactcatggggacaggtaggctgcaaaggggacttagtggtggtctggatgacattgtcgtggacatgtttcgaccagatagagccgatgacggagtctccttcattgatggggactgggaactggtc

SEQ ID NO: 1307 - DNA, 273 bp, Artificial sequence
  Mir resistant mutated nucleotide sequence
cggagtttaccgcccgatttgggctgcattcccaagcagccagatagcctaacagcgcctcgtggtgcggcagggtccgggccggacggggctctcaccctcccaggtgtccctttccagggaacttgggcccggtccgtcgctgaggacgcctctccagactacaattcaggtgacgaagccacccgattctcaagctgggctggtcccggttcgctcgccgttactaggggaatccttgtaagtttcttctcctccgcttatttatatgct

SEQ ID NO: 1308 - DNA, 273 bp, Artificial sequence
  Mir resistant mutated nucleotide sequence
cggagtttaccgcccgatttgggctgcattcccaaacagccagatagcctaacagcgcctcgtggtgcggcagggtccgggccggacggggctctcaccctcccaggtgtccctttccagggaacttgggcccggtccgtcgctgaggacgcctctccagactacaattcaggtgacgaagccacccgattctcaagctgggctggtcccggttcgctcgccgttactaggggaatccttgtaagtttcttctcctccgcttatttatatgct

SEQ ID NO: 1309 - DNA, 273 bp, Artificial sequence
  Mir resistant mutated nucleotide sequence
cggagtttaccgcccgatttgggctgcattcccaagcagcccgatagcctaacagcgcctcgtggtgcggcagggtccgggccggacggggctctcaccctcccaggtgtccctttccagggaacttgggcccggtccgtcgctgaggacgcctctccagactacaattcaggtgacgaagccacccgattctcaagctgggctggtcccggttcgctcgccgttactaggggaatccttgtaagtttcttctcctccgcttatttatatgct

SEQ ID NO: 1310 - DNA, 273 bp, Artificial sequence
  Mir resistant mutated nucleotide sequence
cggagtttaccgcccgatttgggctgcattcccaagcagccagacagcctaacagcgcctcgtggtgcggcagggtccgggccggacggggctctcaccctcccaggtgtccctttccagggaacttgggcccggtccgtcgctgaggacgcctctccagactacaattcaggtgacgaagccacccgattctcaagctgggctggtcccggttcgctcgccgttactaggggaatccttgtaagtttcttctcctccgcttatttatatgct

SEQ ID NO: 1311 - DNA, 1098 bp, Artificial sequence
  Mir resistant mutated nucleotide sequence
atggcagggccggcgccggatcgggccgccctgactgtaggaccaggaatggatatgccgatcatgcacgacagcgaccggtacgagctcgtgcgcgacatcggctccggcaacttcggcgttgcccgcctcatgcgcgaccgccgcaccagcgaactcgtcgccgtcaagtacatagagcgcggcgagaagatagatgagaatgtccagcgtgagataattaaccatagatcattgaaacaccctaacattattaggtttaaagaggttattttaacaccgacccaccttgctattgtcatggaatatgcctctggtggtgagctttttgagagaatatgtaagaacgtgcgattcagtgaagatgaggctcgctacttcttccagcagctcatttcaggagtaagctactgccattcaatgcaagtatgccaccgtgatctgaagctggagaacacacttctagatgggagtgatgctcctcgcttgaagatatgtgacttcggctattccaagtcatctgttcttcattcccagccgaagtccactgttggaacacctgcttatattgcacctgaagttctgttgaaaaaagaatacgatggcaagattgctgatgtttggtcatgtggtgtaaccctctatgtaatggttgttggtgcatatccttttgaagacccagaagagcctaagaacttccgcaagacaattcagcgcatcttgaacgttcagtacgcaattccagacaacgtgaacatatctccagagtgcaggcatctaatttcgaggatttttgttggagatcctgctatgcgaataacaatccctgaaatccggaatcatagttggttcctgaagaaccttcctgctgatctgatggatgatgatagcatgagcaaccaatatgaggagcctgaccagccaatgcagaccatggatcagatcatgcagattttgacagaggccaccataccacctgcctgttctcgcagtataaatgtcctagctgatggattggacatggacgacgacatggatgatcttgactctgactcagatcttgatgttgacagcagcggtgagattgtgtacgcaatg

SEQ ID NO: 1312 - DNA, 1098 bp, Artificial sequence
  Mir resistant mutated nucleotide sequence
atggcagggccggcgccggatcgggccgccctgactgtgggaccaggaatggatatgccgatcatgcacgacagcgaccggtacgagctcgtgcgcgacatcggctccggcaacttcggcgttgcccgcctcatgcgcgaccgccgcaccagcgaactcgtcgccgtcaagtacatagagcgcggcgagaagatagatgagaatgtccagcgtgagataattaaccatagatcattgaaacaccctaacattattaggtttaaagaggttattttaacaccgacccaccttgctattgtcatggaatatgcctctggtggtgagctttttgagagaatatgtaagaacgtgcgattcagtgaagatgaggctcgctacttcttccagcagctcatttcaggagtaagctactgccattcaatgcaagtatgccaccgtgatctgaagctggagaacacacttctagatgggagtgatgctcctcgcttgaagatatgtgacttcggctattccaagtcatctgttcttcattcccagccgaagtccactgttggaacacctgcttatattgcacctgaagttctgttgaaaaaagaatacgatggcaagattgctgatgtttggtcatgtggtgtaaccctctatgtaatggttgttggtgcatatccttttgaagacccagaagagcctaagaacttccgcaagacaattcagcgcatcttgaacgttcagtacgcaattccagacaacgtgaacatatctccagagtgcaggcatctaatttcgaggatttttgttggagatcctgctatgcgaataacaatccctgaaatccggaatcatagttggttcctgaagaaccttcctgctgatctgatggatgatgatagcatgagcaaccaatatgaggagcctgaccagccaatgcagaccatggatcagatcatgcagattttgacagaggccaccataccacctgcctgttctcgcagtataaatgtcctagctgatggattggacatggacgacgacatggatgatcttgactctgactcagatcttgatgttgacagcagcggtgagattgtgtacgcaatg

SEQ ID NO: 1313 - DNA, 1098 bp, Artificial sequence; identical to SEQ ID NO: 1312
  Mir resistant mutated nucleotide sequence

SEQ ID NO: 1314 - DNA, 1098 bp, Artificial sequence; identical to SEQ ID NO: 1312
  Mir resistant mutated nucleotide sequence

SEQ ID NO: 1315 - DNA, 1299 bp, Artificial sequence
  Mir resistant mutated nucleotide sequence
atgaaggtggaggtggtggagacgacgctggtgccgccgagcgaggcgacgccgcggcacgcgctgtggctgtccaacctggacctggcggtgcccaagacccacaccccgctcgtctactactacccgaggcccgccggcgccggcgccggggaggagggaaagggagagggagaagggtcgttcttcgacccggcgcgcctgcgggaggcgctgtccagggcgctggtgcccttctacccgctggcggggcggctggcggccggcccgggcggccggctcgagatcgactgcaccggcgagggcgcgctgttctgcgtcgcgcgggccgacttcaccggcgacgagatgttcgccgacttcgagccctcccccgaggcgcgccgcctgctcgtgccattcgccgcgtccggcgacccgccctgcgtgctcgccatggtccaggtgaccttcctcaagtgcggcggcgtggccgtgggcacgggcatgcaccacgtgacgatggacggcgccggcgcgatccagtttataagagcatggacagcactggcgcgcggggaggcccccgcgtggacgccgtcgcacgaccggacgctcctgcgcgcgcgctccccgccgcacgtccccgcctgcgagcacccggtctactccccggcctacctcaacggggcgccgcggcccttcgtgacgcgcgtctacgccgtgccgcccaagctgctggcgggcatccggtcgcgctgcgcgccgggcgcgtccacgtactgcgcggtgacggcgcacctgtggcgcgccatgtgcgtcgcccggggcctcccggcgggcagcgacacgcggctgcgcgtcccggccaacgtccggcagcgcctgcgcccgccgctcccggcgtcctacttcggcaacgccatcgtgcgggacctggtcaccgtgcgggtggccgacgtgctgtcgcagccgctgggcttcgtggcggagcggatcaagcgcgcggtggcccgcgtcgacgacgcccgcgtgcgctccgtcgtcgactacctggagcttgagtcggacaagggcaaccaggcggcgcgcggccagttcatgcccgagtccgacctgtgggtcgtcagcttgctcggcatgcccatccacgacgccgacttcggctggggccgccccgggttcgtggcccccgcgcagatgttcggcagcggcacggcgtacgtcacgcagggacgcgacaaggacgaccccatcaacgtgctcttcgcgctcgagccagagtacctgaacaccttcgagaaggccttctacggggag

SEQ ID NO: 1316 - DNA, 1299 bp, Artificial sequence
  Mir resistant mutated nucleotide sequence
atgaaggtggaggtggtggagacgacgctggtgccgccgagcgaggcgacgccgcggcacgcgctgtggctgtccaacctggacctggcggtgcccaagacccacaccccgctcgtctactactacccgaggcccgccggcgccggcgccggggaggagggaaagggagagggagaagggtcgttcttcgacccggcgcgcctgcgggaggcgctgtccagggcgctggtgcccttctacccgctggcggggcggctggcggccggcccgggcggccggctcgagatcgactgcaccggcgagggcgcgctgttctgcgtcgcgcgggccgacttcaccggcgacgagatgttcgccgacttcgagccctcccccgaggcgcgccgcctgctcgtgccattcgccgcgtccggcgacccgccctgcgtgctcgccatggtccaggtgaccttcctcaagtgcggcggcgtggccgtgggcacgggcatgcaccacgtgacgatggacggcgccggcgcgatccagttcataagagcatggacagcactggcgcgcggggaggcccccgcgtggacgccgtcgcacgaccggacgctcctgcgcgcgcgctccccgccgcacgtccccgcctgcgagcacccggtctactccccggcctacctcaacggggcgccgcggcccttcgtgacgcgcgtctacgccgtgccgcccaagctgctggcgggcatccggtcgcgctgcgcgccgggcgcgtccacgtactgcgcggtgacggcgcacctgtggcgcgccatgtgcgtcgcccggggcctcccggcgggcagcgacacgcggctgcgcgtcccggccaacgtccggcagcgcctgcgcccgccgctcccggcgtcctacttcggcaacgccatcgtgcgggacctggtcaccgtgcgggtggccgacgtgctgtcgcagccgctgggcttcgtggcggagcggatcaagcgcgcggtggcccgcgtcgacgacgcccgcgtgcgctccgtcgtcgactacctggagcttgagtcggacaagggcaaccaggcggcgcgcggccagttcatgcccgagtccgacctgtgggtcgtcagcttgctcggcatgcccatccacgacgccgacttcggctggggccgccccgggttcgtggcccccgcgcagatgttcggcagcggcacggcgtacgtcacgcagggacgcgacaaggacgaccccatcaacgtgctcttcgcgctcgagccagagtacctgaacaccttcgagaaggccttctacggggag

SEQ ID NO: 1317 - DNA, 1299 bp, Artificial sequence
  Mir resistant mutated nucleotide sequence
atgaaggtggaggtggtggagacgacgctggtgccgccgagcgaggcgacgccgcggcacgcgctgtggctgtccaacctggacctggcggtgcccaagacccacaccccgctcgtctactactacccgaggcccgccggcgccggcgccggggaggagggaaagggagagggagaagggtcgttcttcgacccggcgcgcctgcgggaggcgctgtccagggcgctggtgcccttctacccgctggcggggcggctggcggccggcccgggcggccggctcgagatcgactgcaccggcgagggcgcgctgttctgcgtcgcgcgggccgacttcaccggcgacgagatgttcgccgacttcgagccctcccccgaggcgcgccgcctgctcgtgccattcgccgcgtccggcgacccgccctgcgtgctcgccatggtccaggtgaccttcctcaagtgcggcggcgtggccgtgggcacgggcatgcaccacgtgacgatggacggcgccggcgcgatccagtttatcagagcatggacagcactggcgcgcggggaggcccccgcgtggacgccgtcgcacgaccggacgctcctgcgcgcgcgctccccgccgcacgtccccgcctgcgagcacccggtctactccccggcctacctcaacggggcgccgcggcccttcgtgacgcgcgtctacgccgtgccgcccaagctgctggcgggcatccggtcgcgctgcgcgccgggcgcgtccacgtactgcgcggtgacggcgcacctgtggcgcgccatgtgcgtcgcccggggcctcccggcgggcagcgacacgcggctgcgcgtcccggccaacgtccggcagcgcctgcgcccgccgctcccggcgtcctacttcggcaacgccatcgtgcgggacctggtcaccgtgcgggtggccgacgtgctgtcgcagccgctgggcttcgtggcggagcggatcaagcgcgcggtggcccgcgtcgacgacgcccgcgtgcgctccgtcgtcgactacctggagcttgagtcggacaagggcaaccaggcggcgcgcggccagttcatgcccgagtccgacctgtgggtcgtcagcttgctcggcatgcccatccacgacgccgacttcggctggggccgccccgggttcgtggcccccgcgcagatgttcggcagcggcacggcgtacgtcacgcagggacgcgacaaggacgaccccatcaacgtgctcttcgcgctcgagccagagtacctgaacaccttcgagaaggccttctacggggag

SEQ ID NO: 1318 - DNA, 1299 bp, Artificial sequence
  Mir resistant mutated nucleotide sequence
atgaaggtggaggtggtggagacgacgctggtgccgccgagcgaggcgacgccgcggcacgcgctgtggctgtccaacctggacctggcggtgcccaagacccacaccccgctcgtctactactacccgaggcccgccggcgccggcgccggggaggagggaaagggagagggagaagggtcgttcttcgacccggcgcgcctgcgggaggcgctgtccagggcgctggtgcccttctacccgctggcggggcggctggcggccggcccgggcggccggctcgagatcgactgcaccggcgagggcgcgctgttctgcgtcgcgcgggccgacttcaccggcgacgagatgttcgccgacttcgagccctcccccgaggcgcgccgcctgctcgtgccattcgccgcgtccggcgacccgccctgcgtgctcgccatggtccaggtgaccttcctcaagtgcggcggcgtggccgtgggcacgggcatgcaccacgtgacgatggacggcgccggcgcgatccagtttatacgggcatggacagcactggcgcgcggggaggcccccgcgtggacgccgtcgcacgaccggacgctcctgcgcgcgcgctccccgccgcacgtccccgcctgcgagcacccggtctactccccggcctacctcaacggggcgccgcggcccttcgtgacgcgcgtctacgccgtgccgcccaagctgctggcgggcatccggtcgcgctgcgcgccgggcgcgtccacgtactgcgcggtgacggcgcacctgtggcgcgccatgtgcgtcgcccggggcctcccggcgggcagcgacacgcggctgcgcgtcccggccaacgtccggcagcgcctgcgcccgccgctcccggcgtcctacttcggcaacgccatcgtgcgggacctggtcaccgtgcgggtggccgacgtgctgtcgcagccgctgggcttcgtggcggagcggatcaagcgcgcggtggcccgcgtcgacgacgcccgcgtgcgctccgtcgtcgactacctggagcttgagtcggacaagggcaaccaggcggcgcgcggccagttcatgcccgagtccgacctgtgggtcgtcagcttgctcggcatgcccatccacgacgccgacttcggctggggccgccccgggttcgtggcccccgcgcagatgttcggcagcggcacggcgtacgtcacgcagggacgcgacaaggacgaccccatcaacgtgctcttcgcgctcgagccagagtacctgaacaccttcgagaaggccttctacggggag

SEQ ID NO: 1319 - DNA, 1299 bp, Artificial sequence
  Mir resistant mutated nucleotide sequence
atgaaggtggaggtggtggagacgacgctggtgccgccgagcgaggcgacgccgcggcacgcgctgtggctgtccaacctggacctggcggtgcccaagacccacaccccgctcgtctactactacccgaggcccgccggcgccggcgccggggaggagggaaagggagagggagaagggtcgttcttcgacccggcgcgcctgcgggaggcgctgtccagggcgctggtgcccttctacccgctggcggggcggctggcggccggcccgggcggccggctcgagatcgactgcaccggcgagggcgcgctgttctgcgtcgcgcgggccgacttcaccggcgacgagatgttcgccgacttcgagccctcccccgaggcgcgccgcctgctcgtgccattcgccgcgtccggcgacccgccctgcgtgctcgccatggtccaggtgaccttcctcaagtgcggcggcgtggccgtgggcacgggcatgcaccacgtgacgatggacggcgccggcgcgatccagtttataagagcgtggacagcgctggcgcgcggggaggcccccgcgtggacgccgtcgcacgaccggacgctcctgcgcgcgcgctccccgccgcacgtccccgcctgcgagcacccggtctactccccggcctacctcaacggggcgccgcggcccttcgtgacgcgcgtctacgccgtgccgcccaagctgctggcgggcatccggtcgcgctgcgcgccgggcgcgtccacgtactgcgcggtgacggcgcacctgtggcgcgccatgtgcgtcgcccggggcctcccggcgggcagcgacacgcggctgcgcgtcccggccaacgtccggcagcgcctgcgcccgccgctcccggcgtcctacttcggcaacgccatcgtgcgggacctggtcaccgtgcgggtggccgacgtgctgtcgcagccgctgggcttcgtggcggagcggatcaagcgcgcggtggcccgcgtcgacgacgcccgcgtgcgctccgtcgtcgactacctggagcttgagtcggacaagggcaaccaggcggcgcgcggccagttcatgcccgagtccgacctgtgggtcgtcagcttgctcggcatgcccatccacgacgccgacttcggctggggccgccccgggttcgtggcccccgcgcagatgttcggcagcggcacggcgtacgtcacgcagggacgcgacaaggacgaccccatcaacgtgctcttcgcgctcgagccagagtacctgaacaccttcgagaaggccttctacggggag

SEQ ID NO: 1320 - DNA, 1077 bp, Artificial sequence
  Mir resistant mutated nucleotide sequence
atggcagggccggcgccggatcgggccgccctgactgtaggaccaggaatggatatgccaatcatgcacgacagcgaccggtacgagctcgtgcgcgatatcggctccggcaacttcggcgttgcccgcctcatgcgcgaccgccgcaccagcgaactcgtcgccgtcaagtacatcgagcgcggcgagaagatagatgagaatgtccagcgtgagataattaaccatagatcattgaagcaccctaacattattaggtttaaagaggttattttaacaccgacccatcttgctattgtcatggaatatgcctctggcggtgagctttttgagaggatatgtaagaacgtgcgattcagtgaagatgaggctcgctacttcttccagcagcttatttcaggacaagtatgccaccgtgatttgaagttggagaacacacttctagatgggagtgacgctcctcgcttgaagatttgcgatttcggttattccaagtcatctgttcttcattcccagccgaagtccactgttggaacacctgcttatattgcacctgaagttttgttgaaaaaagaatatgatggcaagattgctgacgtttggtcatgtggtgtaaccctctatgtaatggttgttggcgcatatccttttgaagatccagaagagcctaagaacttccgcaagacaattcagcgtatcttgaatgttcagtacgcaattccagacaacgtgaacatatctccagagtgcaggcatctaatttcgaggatttttgttggcgatcctgctacgcgaataacaatccctgaaatccggaatcatagttggttcctgaagaaccttcctgctgatctgatggatgatgatagcatgagcaaccaatatgaggagcctgaccagccaatgcagaccatggatcagatcatgcagattttaacagaggccaccataccacctgcctgttctcgcagtataaatgtcctagctgatggactggacatggacgacgacatggatgatcttgattccgactcagatcttgatattgacagcagcggtgagattgtgtacgcaatg

SEQ ID NO: 1321 - DNA, 1077 bp, Artificial sequence
  Mir resistant mutated nucleotide sequence
atggcagggccggcgccggatcgggccgccctgactgtgggaccaggaatggatatgccaatcatgcacgacagcgaccggtacgagctcgtgcgcgatatcggctccggcaacttcggcgttgcccgcctcatgcgcgaccgccgcaccagcgaactcgtcgccgtcaagtacatcgagcgcggcgagaagatagatgagaatgtccagcgtgagataattaaccatagatcattgaagcaccctaacattattaggtttaaagaggttattttaacaccgacccatcttgctattgtcatggaatatgcctctggcggtgagctttttgagaggatatgtaagaacgtgcgattcagtgaagatgaggctcgctacttcttccagcagcttatttcaggacaagtatgccaccgtgatttgaagttggagaacacacttctagatgggagtgacgctcctcgcttgaagatttgcgatttcggttattccaagtcatctgttcttcattcccagccgaagtccactgttggaacacctgcttatattgcacctgaagttttgttgaaaaaagaatatgatggcaagattgctgacgtttggtcatgtggtgtaaccctctatgtaatggttgttggcgcatatccttttgaagatccagaagagcctaagaacttccgcaagacaattcagcgtatcttgaatgttcagtacgcaattccagacaacgtgaacatatctccagagtgcaggcatctaatttcgaggatttttgttggcgatcctgctacgcgaataacaatccctgaaatccggaatcatagttggttcctgaagaaccttcctgctgatctgatggatgatgatagcatgagcaaccaatatgaggagcctgaccagccaatgcagaccatggatcagatcatgcagattttaacagaggccaccataccacctgcctgttctcgcagtataaatgtcctagctgatggactggacatggacgacgacatggatgatcttgattccgactcagatcttgatattgacagcagcggtgagattgtgtacgcaatg

SEQ ID NO: 1322 - DNA, 1077 bp, Artificial sequence; identical to SEQ ID NO: 1321
  Mir resistant mutated nucleotide sequence

SEQ ID NO: 1323 - DNA, 1077 bp, Artificial sequence; identical to SEQ ID NO: 1321
  Mir resistant mutated nucleotide sequence

SEQ ID NO: 1324 - DNA, 1536 bp, Artificial sequence
  Mir resistant mutated nucleotide sequence
atggaagtggtggcgtcggcgccggggaaggtgctcatcgcgggaggatacctcgtgctggagcgccccaacgccggcctggtcctcagcaccaccgcccgcttctacgccgtcgtccgccccatccgcgacagcctccccgccgactcctgggcatgggcatggacagacgtgaaagtgacttcccctcagctctcccgggaggccacatacaagttgtctctaacgaaatcgacactgcaattgacgtctgcaagggaatctacaaacccttttgttgagcaggccatacagttctccgtagcagctgctaaatcgatcatcactgataaggacaagaaggatgctatagataagctgctgttgcaaggtctgaacattacaattcttggttgcaatgatttctattcttatagaaagcagatcgaagcacgtggtcttcctcttactacggaggtattgctttcattgcctccattctcttcaattacatttaactcagaggttgctaatggaacaacgactggagagaaatgtaaacctgaagtagccaaaactggacttgggtcatcagctgccatgaccacatcagttgttgcagctcttcttcactaccttggtgctgttaacctttcatgtccgggacaaccttccggtgataatgcaactggacgaggtcttgacttggttcacgctattgcccaaagtgcacattgtatagcacaagggaaaattggaagtggttttgatgttagtgctgctgtctatgggagtcaacgctatgtaaggttttctccagaaatactctcctcggctcaggctacaggtgggactttcttgccagatgtagtatccgatattgttacacaaaggtgggatcatgagaataaacagttttcattaccccctctgatgacccttctccttggggaacctggaaccggaggatcatctactccatcaatggttggatctgtgaaacggtggcagaagtctgaccctgagaaatccaaagatacatggagtaaactggccattgccaattcagcgctggagaaccaactgagaatcttaaaaggactttctgaaaatcaccgggaggcatatgagtctgtagtgcggtcctgtagtcatctcacatatgggaagtggacagaggtggctactaaccaagatcaagaattaattgttagatcattgttggctgcaagggatgcttcccttgagataaggcttcacatgcgagagatgggtatagcagccggtgttccaattgagccagattcacaaacacagctactagatgccactatgaatatggagggtgttttactggctggagttcctggagctggtggtttcgatgcagtattctcagtgactttgggggatgcaaataatgctgtagcaaatgcttggagctcagctggcgttctgccacttcttgtacgagaagactgccgtggtgtttcattggaagatgctgacccaagaacaagggaggtctcagcagctgtatcgtccattcagattaat

SEQ ID NO: 1325 - DNA, 1536 bp, Artificial sequence
  Mir resistant mutated nucleotide sequence
atggaagtggtggcgtcggcgccggggaaggtgctcatcgcgggaggatacctcgtgctggagcgccccaacgccggcctggtcctcagcaccaccgcccgcttctacgccgtcgtccgccccatccgcgacagcctccccgccgactcctgggcctgggcctggacagacgtgaaagtgacttcccctcagctctcccgggaggccacatacaagttgtctctaacgaaatcgacactgcaattgacgtctgcaagggaatctacaaacccttttgttgagcaggccatacagttctccgtagcagctgctaaatcgatcatcactgataaggacaagaaggatgctatagataagctgctgttgcaaggtctgaacattacaattcttggttgcaatgatttctattcttatagaaagcagatcgaagcacgtggtcttcctcttactacggaggtattgctttcattgcctccattctcttcaattacatttaactcagaggttgctaatggaacaacgactggagagaaatgtaaacctgaagtagccaaaactggacttgggtcatcagctgccatgaccacatcagttgttgcagctcttcttcactaccttggtgctgttaacctttcatgtccgggacaaccttccggtgataatgcaactggacgaggtcttgacttggttcacgctattgcccaaagtgcacattgtatagcacaagggaaaattggaagtggttttgatgttagtgctgctgtctatgggagtcaacgctatgtaaggttttctccagaaatactctcctcggctcaggctacaggtgggactttcttgccagatgtagtatccgatattgttacacaaaggtgggatcatgagaataaacagttttcattaccccctctgatgacccttctccttggggaacctggaaccggaggatcatctactccatcaatggttggatctgtgaaacggtggcagaagtctgaccctgagaaatccaaagatacatggagtaaactggccattgccaattcagcgctggagaaccaactgagaatcttaaaaggactttctgaaaatcaccgggaggcatatgagtctgtagtgcggtcctgtagtcatctcacatatgggaagtggacagaggtggctactaaccaagatcaagaattaattgttagatcattgttggctgcaagggatgcttcccttgagataaggcttcacatgcgagagatgggtatagcagccggtgttccaattgagccagattcacaaacacagctactagatgccactatgaatatggagggtgttttactggctggagttcctggagctggtggtttcgatgcagtattctcagtgactttgggggatgcaaataatgctgtagcaaatgcttggagctcagctggcgttctgccacttcttgtacgagaagactgccgtggtgtttcattggaagatgctgacccaagaacaagggaggtctcagcagctgtatcgtccattcagattaat

SEQ ID NO: 1326 - DNA, 1536 bp, Artificial sequence; identical to SEQ ID NO: 1325
  Mir resistant mutated nucleotide sequence

SEQ ID NO: 1327 - DNA, 1536 bp, Artificial sequence; identical to SEQ ID NO: 1325
  Mir resistant mutated nucleotide sequence

SEQ ID NO: 1328 - DNA, 1536 bp, Artificial sequence
  Mir resistant mutated nucleotide sequence
atggaagtggtggcgtcggcgccggggaaggtgctcatcgcgggaggatacctcgtgctggagcgccccaacgccggcctggtcctcagcaccaccgcccgcttctacgccgtcgtccgccccatccgcgacagcctccccgccgactcctgggcgtgggcgtggacagacgtgaaagtgacttcccctcagctctcccgggaggccacatacaagttgtctctaacgaaatcgacactgcaattgacgtctgcaagggaatctacaaacccttttgttgagcaggccatacagttctccgtagcagctgctaaatcgatcatcactgataaggacaagaaggatgctatagataagctgctgttgcaaggtctgaacattacaattcttggttgcaatgatttctattcttatagaaagcagatcgaagcacgtggtcttcctcttactacggaggtattgctttcattgcctccattctcttcaattacatttaactcagaggttgctaatggaacaacgactggagagaaatgtaaacctgaagtagccaaaactggacttgggtcatcagctgccatgaccacatcagttgttgcagctcttcttcactaccttggtgctgttaacctttcatgtccgggacaaccttccggtgataatgcaactggacgaggtcttgacttggttcacgctattgcccaaagtgcacattgtatagcacaagggaaaattggaagtggttttgatgttagtgctgctgtctatgggagtcaacgctatgtaaggttttctccagaaatactctcctcggctcaggctacaggtgggactttcttgccagatgtagtatccgatattgttacacaaaggtgggatcatgagaataaacagttttcattaccccctctgatgacccttctccttggggaacctggaaccggaggatcatctactccatcaatggttggatctgtgaaacggtggcagaagtctgaccctgagaaatccaaagatacatggagtaaactggccattgccaattcagcgctggagaaccaactgagaatcttaaaaggactttctgaaaatcaccgggaggcatatgagtctgtagtgcggtcctgtagtcatctcacatatgggaagtggacagaggtggctactaaccaagatcaagaattaattgttagatcattgttggctgcaagggatgcttcccttgagataaggcttcacatgcgagagatgggtatagcagccggtgttccaattgagccagattcacaaacacagctactagatgccactatgaatatggagggtgttttactggctggagttcctggagctggtggtttcgatgcagtattctcagtgactttgggggatgcaaataatgctgtagcaaatgcttggagctcagctggcgttctgccacttcttgtacgagaagactgccgtggtgtttcattggaagatgctgacccaagaacaagggaggtctcagcagctgtatcgtccattcagattaat

SEQ ID NO: 1329 - DNA, 1098 bp, Artificial sequence
  Mir resistant mutated nucleotide sequence
atggcagggccggcgccggatcgggccgccctgactgtaggaccaggaatggatatgccaatcatgcacgacagcgaccggtacgagctcgtgcgcgatatcggctccggcaacttcggcgttgcccgcctcatgcgcgaccgccgcaccagcgaactcgtcgccgtcaagtacatcgagcgcggcgagaagatagatgagaatgtccagcgtgagataattaaccatagatcattgaagcaccctaacattattaggtttaaagaggttattttaacaccgacccatcttgctattgtcatggaatatgcctctggcggtgagctttttgagaggatatgtaagaacgtgcgattcagtgaagatgaggctcgctacttcttccagcagcttatttcaggagtaagctactgccattcaatgcaagtatgccaccgtgatttgaagttggagaacacacttctagatgggagtgacgctcctcgcttgaagatttgcgatttcggttattccaagtcatctgttcttcattcccagccgaagtccactgttggaacacctgcttatattgcacctgaagttttgttgaaaaaagaatatgatggcaagattgctgacgtttggtcatgtggtgtaaccctctatgtaatggttgttggcgcatatccttttgaagatccagaagagcctaagaacttccgcaagacaattcagcgtatcttgaatgttcagtacgcaattccagacaacgtgaacatatctccagagtgcaggcatctaatttcgaggatttttgttggcgatcctgctacgcgaataacaatccctgaaatccggaatcatagttggttcctgaagaaccttcctgctgatctgatggatgatgatagcatgagcaaccaatatgaggagcctgaccagccaatgcagaccatggatcagatcatgcagattttaacagaggccaccataccacctgcctgttctcgcagtataaatgtcctagctgatggactggacatggacgacgacatggatgatcttgattccgactcagatcttgatgttgacagcagcggtgagattgtgtacgcaatg

SEQ ID NO: 1330 - DNA, 1098 bp, Artificial sequence
  Mir resistant mutated nucleotide sequence
atggcagggccggcgccggatcgggccgccctgactgtgggaccaggaatggatatgccaatcatgcacgacagcgaccggtacgagctcgtgcgcgatatcggctccggcaacttcggcgttgcccgcctcatgcgcgaccgccgcaccagcgaactcgtcgccgtcaagtacatcgagcgcggcgagaagatagatgagaatgtccagcgtgagataattaaccatagatcattgaagcaccctaacattattaggtttaaagaggttattttaacaccgacccatcttgctattgtcatggaatatgcctctggcggtgagctttttgagaggatatgtaagaacgtgcgattcagtgaagatgaggctcgctacttcttccagcagcttatttcaggagtaagctactgccattcaatgcaagtatgccaccgtgatttgaagttggagaacacacttctagatgggagtgacgctcctcgcttgaagatttgcgatttcggttattccaagtcatctgttcttcattcccagccgaagtccactgttggaacacctgcttatattgcacctgaagttttgttgaaaaaagaatatgatggcaagattgctgacgtttggtcatgtggtgtaaccctctatgtaatggttgttggcgcatatccttttgaagatccagaagagcctaagaacttccgcaagacaattcagcgtatcttgaatgttcagtacgcaattccagacaacgtgaacatatctccagagtgcaggcatctaatttcgaggatttttgttggcgatcctgctacgcgaataacaatccctgaaatccggaatcatagttggttcctgaagaaccttcctgctgatctgatggatgatgatagcatgagcaaccaatatgaggagcctgaccagccaatgcagaccatggatcagatcatgcagattttaacagaggccaccataccacctgcctgttctcgcagtataaatgtcctagctgatggactggacatggacgacgacatggatgatcttgattccgactcagatcttgatgttgacagcagcggtgagattgtgtacgcaatg

SEQ ID NO: 1331 - DNA, 1098 bp, Artificial sequence; identical to SEQ ID NO: 1330
  Mir resistant mutated nucleotide sequence

SEQ ID NO: 1332 - DNA, 1098 bp, Artificial sequence; identical to SEQ ID NO: 1330
  Mir resistant mutated nucleotide sequence

SEQ ID NO: 1333 - DNA, 1059 bp, Artificial sequence
  Mir resistant mutated nucleotide sequence
atgggggacgccgccgccgccgcagcctccacgtccgctcccaccacgcccacctccattctcatctgcctggaagacggcagcgaccttctcgccgatgccgacgatggcgccggcactgacctagttgtcgcccgcgacgagcgtctgcttgtcgtggaccaggacgaggagtatgtagcgctgctcctgtccaaggagagcgcgtcaggcggcggcggcggcccggtggaggaaatggaggactggatgaaagcagcaagaagtggctgtgtccgctggatcatcaagaccacggcgatgttccggttcggcgggaagaccgcttacgtcgcggtgaattacctcgatcgcttcctggcgcaacggcgagtcaatagggagcatgcgtggggtctgcagctgctcatggtggcgtgcatgtcgctggcgaccaagctggaggagcagcacgctccgcggctgtcggagttgccgctggacgcgtgcgagttcgcgttcgaccgcgcgtccgtgctgcggatggagctcctcgtcctgggcaccctcgagtggcggatggtcgccgtcacccccttcccctacatcagctgcttcgcggcgcggttcgggcaggacgagcgccgggcggtcctcgtgcgcgccgtggagtgcgtcttcgcggcgatcagagcgatgagctcggtggagtaccagccgtcgaccatcgccgtagcatccatcctcgtcgctcgcggcagggagacgcccgccgacaatctggacgcgctcaaggcgatcctgggctcatcatttccacagctagacaccgggcatgtgtactcctgctacagcgcaatgattcgggaggacgacaagtcgccgacgcagtcgacgtcgacgtcgacgggggtggcgtcctcgggcgtctctgtcgccgcgcacgccggggggagcgggagtcccagccccccgggcgcttccgtgtccgtgggcgccaataatgccgctggcaccgccccgccggcaaccacggacaaccgcaacaagaggagacggttgcgctcacctcagcgacag

SEQ ID NO: 1334 - DNA, 1059 bp, Artificial sequence
  Mir resistant mutated nucleotide sequence
atgggggacgccgccgccgccgcagcctccacgtccgctcccaccacgcccacctccattctcatctgcctggaagacggcagcgaccttctcgccgatgccgacgatggcgccggcactgacctagttgtcgcccgcgacgagcgtctgcttgtcgtggaccaggacgaggagtatgtagcgctgctcctgtccaaggagagcgcgtcaggcggcggcggcggcccggtggaggaaatggaggactggatgaaggcagcaagaagtggctgtgtccgctggatcatcaagaccacggcgatgttccggttcggcgggaagaccgcttacgtcgcggtgaattacctcgatcgcttcctggcgcaacggcgagtcaatagggagcatgcgtggggtctgcagctgctcatggtggcgtgcatgtcgctggcgaccaagctggaggagcagcacgctccgcggctgtcggagttgccgctggacgcgtgcgagttcgcgttcgaccgcgcgtccgtgctgcggatggagctcctcgtcctgggcaccctcgagtggcggatggtcgccgtcacccccttcccctacatcagctgcttcgcggcgcggttcgggcaggacgagcgccgggcggtcctcgtgcgcgccgtggagtgcgtcttcgcggcgatcagagcgatgagctcggtggagtaccagccgtcgaccatcgccgtagcatccatcctcgtcgctcgcggcagggagacgcccgccgacaatctggacgcgctcaaggcgatcctgggctcatcatttccacagctagacaccgggcatgtgtactcctgctacagcgcaatgattcgggaggacgacaagtcgccgacgcagtcgacgtcgacgtcgacgggggtggcgtcctcgggcgtctctgtcgccgcgcacgccggggggagcgggagtcccagccccccgggcgcttccgtgtccgtgggcgccaataatgccgctggcaccgccccgccggcaaccacggacaaccgcaacaagaggagacggttgcgctcacctcagcgacag

SEQ ID NO: 1335 - DNA, 1059 bp, Artificial sequence
  Mir resistant mutated nucleotide sequence
atgggggacgccgccgccgccgcagcctccacgtccgctcccaccacgcccacctccattctcatctgcctggaagacggcagcgaccttctcgccgatgccgacgatggcgccggcactgacctagttgtcgcccgcgacgagcgtctgcttgtcgtggaccaggacgaggagtatgtagcgctgctcctgtccaaggagagcgcgtcaggcggcggcggcggcccggtggaggaaatggaggactggatgaaagccgccagaagtggctgtgtccgctggatcatcaagaccacggcgatgttccggttcggcgggaagaccgcttacgtcgcggtgaattacctcgatcgcttcctggcgcaacggcgagtcaatagggagcatgcgtggggtctgcagctgctcatggtggcgtgcatgtcgctggcgaccaagctggaggagcagcacgctccgcggctgtcggagttgccgctggacgcgtgcgagttcgcgttcgaccgcgcgtccgtgctgcggatggagctcctcgtcctgggcaccctcgagtggcggatggtcgccgtcacccccttcccctacatcagctgcttcgcggcgcggttcgggcaggacgagcgccgggcggtcctcgtgcgcgccgtggagtgcgtcttcgcggcgatcagagcgatgagctcggtggagtaccagccgtcgaccatcgccgtagcatccatcctcgtcgctcgcggcagggagacgcccgccgacaatctggacgcgctcaaggcgatcctgggctcatcatttccacagctagacaccgggcatgtgtactcctgctacagcgcaatgattcgggaggacgacaagtcgccgacgcagtcgacgtcgacgtcgacgggggtggcgtcctcgggcgtctctgtcgccgcgcacgccggggggagcgggagtcccagccccccgggcgcttccgtgtccgtgggcgccaataatgccgctggcaccgccccgccggcaaccacggacaaccgcaacaagaggagacggttgcgctcacctcagcgacag

SEQ ID NO: 1336 - DNA, 1059 bp, Artificial sequence
  Mir resistant mutated nucleotide sequence
atgggggacgccgccgccgccgcagcctccacgtccgctcccaccacgcccacctccattctcatctgcctggaagacggcagcgaccttctcgccgatgccgacgatggcgccggcactgacctagttgtcgcccgcgacgagcgtctgcttgtcgtggaccaggacgaggagtatgtagcgctgctcctgtccaaggagagcgcgtcaggcggcggcggcggcccggtggaggaaatggaggactggatgaaagcggcgagaagtggctgtgtccgctggatcatcaagaccacggcgatgttccggttcggcgggaagaccgcttacgtcgcggtgaattacctcgatcgcttcctggcgcaacggcgagtcaatagggagcatgcgtggggtctgcagctgctcatggtggcgtgcatgtcgctggcgaccaagctggaggagcagcacgctccgcggctgtcggagttgccgctggacgcgtgcgagttcgcgttcgaccgcgcgtccgtgctgcggatggagctcctcgtcctgggcaccctcgagtggcggatggtcgccgtcacccccttcccctacatcagctgcttcgcggcgcggttcgggcaggacgagcgccgggcggtcctcgtgcgcgccgtggagtgcgtcttcgcggcgatcagagcgatgagctcggtggagtaccagccgtcgaccatcgccgtagcatccatcctcgtcgctcgcggcagggagacgcccgccgacaatctggacgcgctcaaggcgatcctgggctcatcatttccacagctagacaccgggcatgtgtactcctgctacagcgcaatgattcgggaggacgacaagtcgccgacgcagtcgacgtcgacgtcgacgggggtggcgtcctcgggcgtctctgtcgccgcgcacgccggggggagcgggagtcccagccccccgggcgcttccgtgtccgtgggcgccaataatgccgctggcaccgccccgccggcaaccacggacaaccgcaacaagaggagacggttgcgctcacctcagcgacag

SEQ ID NO: 1337 - DNA, 1059 bp, Artificial sequence
  Mir resistant mutated nucleotide sequence
atgggggacgccgccgccgccgcagcctccacgtccgctcccaccacgcccacctccattctcatctgcctggaagacggcagcgaccttctcgccgatgccgacgatggcgccggcactgacctagttgtcgcccgcgacgagcgtctgcttgtcgtggaccaggacgaggagtatgtagcgctgctcctgtccaaggagagcgcgtcaggcggcggcggcggcccggtggaggaaatggaggactggatgaaagcagcacgcagtggctgtgtccgctggatcatcaagaccacggcgatgttccggttcggcgggaagaccgcttacgtcgcggtgaattacctcgatcgcttcctggcgcaacggcgagtcaatagggagcatgcgtggggtctgcagctgctcatggtggcgtgcatgtcgctggcgaccaagctggaggagcagcacgctccgcggctgtcggagttgccgctggacgcgtgcgagttcgcgttcgaccgcgcgtccgtgctgcggatggagctcctcgtcctgggcaccctcgagtggcggatggtcgccgtcacccccttcccctacatcagctgcttcgcggcgcggttcgggcaggacgagcgccgggcggtcctcgtgcgcgccgtggagtgcgtcttcgcggcgatcagagcgatgagctcggtggagtaccagccgtcgaccatcgccgtagcatccatcctcgtcgctcgcggcagggagacgcccgccgacaatctggacgcgctcaaggcgatcctgggctcatcatttccacagctagacaccgggcatgtgtactcctgctacagcgcaatgattcgggaggacgacaagtcgccgacgcagtcgacgtcgacgtcgacgggggtggcgtcctcgggcgtctctgtcgccgcgcacgccggggggagcgggagtcccagccccccgggcgcttccgtgtccgtgggcgccaataatgccgctggcaccgccccgccggcaaccacggacaaccgcaacaagaggagacggttgcgctcacctcagcgacag

SEQ ID NO: 1338 - DNA, 1191 bp, Artificial sequence
  Mir resistant mutated nucleotide sequence
atgccgatctcctccacgctcgccacacgcctccgcaccggtcattcttccgcacccaaacccgcacggcggagcccctacaccagacccaagcccagcggcggcgccaaggcctcccgcccttccccccgccttgatccagcgaccacgagacctctcgaaccctctcagaaagcagtaaggagtggactaggtcgccgtgccgagcccgatgtgcccgacgcgcgcgcggctgagtcgaagccgaaactggcgcatggagacgataggccgccccttgaggagaagcgccgctgcagcggtgagggcggattcgtcttcctctgcgcccttgctggacacaccgaggctatcggtgggatttctctgccgtctggttcgaacaagctctactccggcagcgtcgacggatctgttcgcatctgggactgcaattccggcaagtgtgttgatgtcatcaagatgggaggcaaggttagctgcatgatcacccatggcccatgggtactcattggaattccaaagtttgtggaggcatggaacacaaagacagggatgaaactaagatttcaagggccttctagtctggtttgttccatggctatcacggatgagatgctgtttgctggtactggagatggtcgcatcatggcctggagatttcctgctaaggaaagtaacactgaaccagtgttgatcctcagtggccatcaacggccagtgatttcactgtctatctcggcaagaagactttactctggctcactggacaagaccatcaaagcatgggaccttacaactcggcagtgtgtccaaacactctctgagcataaagctgctgtaacatctgtgctttgttgggatgagaagttattatcttgctcccttgacaagactgtaaaactctggactctgtcagagtcaggaaaccttcaagtcaaatatacccatgctgaggagaatggtttgcgcacactcttcggcatgcaccgagttgggaagacgccagttctcttgtgctccctccacaacagcaatcgcgtccgcttgctcgacttgccatcgttcgacgggattggaacactgttgtccacgaaggaagttaggaccatcgagcttgcggctggtgggctgctcttcaccggagactgctccggcgagctgaaagtgtggaggtgggcgcccaaggac

SEQ ID NO: 1339 - DNA, 1191 bp, Artificial sequence
  Mir resistant mutated nucleotide sequence
atgccgatctcctccacgctcgccacacgcctccgcaccggtcattcttccgcacccaaacccgcacggcggagcccctacaccagacccaagcccagcggcggcgccaaggcctcccgcccttccccccgccttgatccagcgaccacgagacctctcgaaccctctcagaaggcagtaaggagtggactaggtcgccgtgccgagcccgatgtgcccgacgcgcgcgcggctgagtcgaagccgaaactggcgcatggagacgataggccgccccttgaggagaagcgccgctgcagcggtgagggcggattcgtcttcctctgcgcccttgctggacacaccgaggctatcggtgggatttctctgccgtctggttcgaacaagctctactccggcagcgtcgacggatctgttcgcatctgggactgcaattccggcaagtgtgttgatgtcatcaagatgggaggcaaggttagctgcatgatcacccatggcccatgggtactcattggaattccaaagtttgtggaggcatggaacacaaagacagggatgaaactaagatttcaagggccttctagtctggtttgttccatggctatcacggatgagatgctgtttgctggtactggagatggtcgcatcatggcctggagatttcctgctaaggaaagtaacactgaaccagtgttgatcctcagtggccatcaacggccagtgatttcactgtctatctcggcaagaagactttactctggctcactggacaagaccatcaaagcatgggaccttacaactcggcagtgtgtccaaacactctctgagcataaagctgctgtaacatctgtgctttgttgggatgagaagttattatcttgctcccttgacaagactgtaaaactctggactctgtcagagtcaggaaaccttcaagtcaaatatacccatgctgaggagaatggtttgcgcacactcttcggcatgcaccgagttgggaagacgccagttctcttgtgctccctccacaacagcaatcgcgtccgcttgctcgacttgccatcgttcgacgggattggaacactgttgtccacgaaggaagttaggaccatcgagcttgcggctggtgggctgctcttcaccggagactgctccggcgagctgaaagtgtggaggtgggcgcccaaggac

SEQ ID NO: 1340 - DNA, 1191 bp, Artificial sequence
  Mir resistant mutated nucleotide sequence
atgccgatctcctccacgctcgccacacgcctccgcaccggtcattcttccgcacccaaacccgcacggcggagcccctacaccagacccaagcccagcggcggcgccaaggcctcccgcccttccccccgccttgatccagcgaccacgagacctctcgaaccctctcagaaagcggtaaggagtggactaggtcgccgtgccgagcccgatgtgcccgacgcgcgcgcggctgagtcgaagccgaaactggcgcatggagacgataggccgccccttgaggagaagcgccgctgcagcggtgagggcggattcgtcttcctctgcgcccttgctggacacaccgaggctatcggtgggatttctctgccgtctggttcgaacaagctctactccggcagcgtcgacggatctgttcgcatctgggactgcaattccggcaagtgtgttgatgtcatcaagatgggaggcaaggttagctgcatgatcacccatggcccatgggtactcattggaattccaaagtttgtggaggcatggaacacaaagacagggatgaaactaagatttcaagggccttctagtctggtttgttccatggctatcacggatgagatgctgtttgctggtactggagatggtcgcatcatggcctggagatttcctgctaaggaaagtaacactgaaccagtgttgatcctcagtggccatcaacggccagtgatttcactgtctatctcggcaagaagactttactctggctcactggacaagaccatcaaagcatgggaccttacaactcggcagtgtgtccaaacactctctgagcataaagctgctgtaacatctgtgctttgttgggatgagaagttattatcttgctcccttgacaagactgtaaaactctggactctgtcagagtcaggaaaccttcaagtcaaatatacccatgctgaggagaatggtttgcgcacactcttcggcatgcaccgagttgggaagacgccagttctcttgtgctccctccacaacagcaatcgcgtccgcttgctcgacttgccatcgttcgacgggattggaacactgttgtccacgaaggaagttaggaccatcgagcttgcggctggtgggctgctcttcaccggagactgctccggcgagctgaaagtgtggaggtgggcgcccaaggac

SEQ ID NO: 1341 - DNA, 1191 bp, Artificial sequence
  Mir resistant mutated nucleotide sequence
atgccgatctcctccacgctcgccacacgcctccgcaccggtcattcttccgcacccaaacccgcacggcggagcccctacaccagacccaagcccagcggcggcgccaaggcctcccgcccttccccccgccttgatccagcgaccacgagacctctcgaaccctctcagaaagcagtgaggagtggactaggtcgccgtgccgagcccgatgtgcccgacgcgcgcgcggctgagtcgaagccgaaactggcgcatggagacgataggccgccccttgaggagaagcgccgctgcagcggtgagggcggattcgtcttcctctgcgcccttgctggacacaccgaggctatcggtgggatttctctgccgtctggttcgaacaagctctactccggcagcgtcgacggatctgttcgcatctgggactgcaattccggcaagtgtgttgatgtcatcaagatgggaggcaaggttagctgcatgatcacccatggcccatgggtactcattggaattccaaagtttgtggaggcatggaacacaaagacagggatgaaactaagatttcaagggccttctagtctggtttgttccatggctatcacggatgagatgctgtttgctggtactggagatggtcgcatcatggcctggagatttcctgctaaggaaagtaacactgaaccagtgttgatcctcagtggccatcaacggccagtgatttcactgtctatctcggcaagaagactttactctggctcactggacaagaccatcaaagcatgggaccttacaactcggcagtgtgtccaaacactctctgagcataaagctgctgtaacatctgtgctttgttgggatgagaagttattatcttgctcccttgacaagactgtaaaactctggactctgtcagagtcaggaaaccttcaagtcaaatatacccatgctgaggagaatggtttgcgcacactcttcggcatgcaccgagttgggaagacgccagttctcttgtgctccctccacaacagcaatcgcgtccgcttgctcgacttgccatcgttcgacgggattggaacactgttgtccacgaaggaagttaggaccatcgagcttgcggctggtgggctgctcttcaccggagactgctccggcgagctgaaagtgtggaggtgggcgcccaaggac

SEQ ID NO: 1342 - DNA, 1191 bp, Artificial sequence
  Mir resistant mutated nucleotide sequence
atgccgatctcctccacgctcgccacacgcctccgcaccggtcattcttccgcacccaaacccgcacggcggagcccctacaccagacccaagcccagcggcggcgccaaggcctcccgcccttccccccgccttgatccagcgaccacgagacctctcgaaccctctcagaaagcagtacgaagtggactaggtcgccgtgccgagcccgatgtgcccgacgcgcgcgcggctgagtcgaagccgaaactggcgcatggagacgataggccgccccttgaggagaagcgccgctgcagcggtgagggcggattcgtcttcctctgcgcccttgctggacacaccgaggctatcggtgggatttctctgccgtctggttcgaacaagctctactccggcagcgtcgacggatctgttcgcatctgggactgcaattccggcaagtgtgttgatgtcatcaagatgggaggcaaggttagctgcatgatcacccatggcccatgggtactcattggaattccaaagtttgtggaggcatggaacacaaagacagggatgaaactaagatttcaagggccttctagtctggtttgttccatggctatcacggatgagatgctgtttgctggtactggagatggtcgcatcatggcctggagatttcctgctaaggaaagtaacactgaaccagtgttgatcctcagtggccatcaacggccagtgatttcactgtctatctcggcaagaagactttactctggctcactggacaagaccatcaaagcatgggaccttacaactcggcagtgtgtccaaacactctctgagcataaagctgctgtaacatctgtgctttgttgggatgagaagttattatcttgctcccttgacaagactgtaaaactctggactctgtcagagtcaggaaaccttcaagtcaaatatacccatgctgaggagaatggtttgcgcacactcttcggcatgcaccgagttgggaagacgccagttctcttgtgctccctccacaacagcaatcgcgtccgcttgctcgacttgccatcgttcgacgggattggaacactgttgtccacgaaggaagttaggaccatcgagcttgcggctggtgggctgctcttcaccggagactgctccggcgagctgaaagtgtggaggtgggcgcccaaggac

SEQ ID NO: 1343 - DNA, 1020 bp, Artificial sequence
  Mir resistant mutated nucleotide sequence
atggaggtcgaataccacgagctcttcacctgcggctggctgcccgctgccgcaagcccaaaagcattagtatttctctgccacggctacggcatggagtgcagtggcttcatgagagaatgcggcgtgcggctggcggcggccgggtacggcgtgttcgggatggactacgagggccacggcaagtcgatgggcgcgcgctgctacatccgcagtttccgccgcctcgtcgacgactgcggccatttcttcaagtccgtctgcgagcttgaggagtaccggggcaagagccggttcctgtacggcgagtccatgggtggcgcggtggcgctgctgctgcacaccgaggaccccgccttctgggacggcgccgtcctcgtggcgcccatgtgcaagatatcggagaaggtgaagccgcaccctctggtgatcacgctcctgacgcaggtggaggacgtgatccccaggtggaagatcgtgcccaccaagcaggacgtcatcgacgccgccttcaaggaccccgtcaagcgtgaaaagatcaggaggaaccagctgatctaccaggacaagccgcggctcaagactgcgttggagatgctcaggaccagcatgtacatagaagacagcttgtcacaggtgacgctgccgttcttcgtcctgcacggcgaggccgacacggtgacggacccggaggtgagccgcgcgctgtacgagcgttcggccagcgccgacaagaccatcaagctgtacccggggatgtggcacggcctcaccgccggggagcccgacgagaacgtggaggccatcttctccgacatcgtgtcctggctcaaccaccgcagccggagctgggccgtggaggaacgccatatgaccaggaagctggcgccagctccggccaagtccatcgaaggccacggcaccgtggacggcaaagtgcacacacaacaagggcgccctcggcggcgccagggcttcctctgcgggcttgccggccggacgcatcaccacgcggagatg

SEQ ID NO: 1344 - DNA, 993 bp, Artificial sequence
  Mir resistant mutated nucleotide sequence
atggcgaagcagtcgtgctgccacaagaagaagcttaggagagggctctggtcccccgaggaggacgagaagctcatgaaccacattgccaagtacggccacggctgctggagctccgtacccaagcttgccggattagatcgatgcggaaagagctgcaggctgaggtggataaactacctgaggccagacctcaagaggggcacattctcgcaagaggaggaggacctcatcatacacctccactccttgctgggaaacaagtggtctcagattgcggcccagctgcctggccggacggacaacgaggtcaagaacttctggaactcgtacatcaagaagaggctcagggagcgcggcatcgaccccgccacccaccagccgctcgccgagcctgccgccgcagccactgccaccaccaccaccacggtctcccgccgcgcggtgtttggggacgtcgacctcatcccgactactactactactacaatccaggtgccgccgccgtcgttcgagggcggcccaatgctggagagcgtgaagctagcggtggagctggactggcccgtcgctggcgacggggtaacgtcaaggccatgctacctgcaggggggctgcttcgacatggacgcgctgcagcagcactgcggctccatcccgccggtgccggtcgtcccgtcggcctccgccagctccagcacgctgacctcgatggcggaagcggaacactgcagcaccaacaacgtcgccgccggcggcaacctcccatggctggagctcggggcaaacgcggtggctgacgccggcggccacgtcgtcggcagctgctacgccggcgcgctggacgagctcaggtggtcggagtacttcgacagtgccttccaggccgccgagagccagcaaggcgccctgcagccggggcagtgtgtctacggcggcaaggatgacgtcccggtgcacttcgacgtccatggcgggctaagcaactggtgc

SEQ ID NO: 1345 - DNA, 993 bp, Artificial sequence
  Mir resistant mutated nucleotide sequence
atggcgaagcagtcgtgctgccacaagaagaagcttaggagagggctctggtcccccgaggaggacgagaagctcatgaaccacattgccaagtacggccacggctgctggagctccgtacccaagcttgcaggattagatcgatgcggaaagagctgcaggctgaggtggataaactacctgaggccagacctcaagaggggcacattctcgcaagaggaggaggacctcatcatacacctccactccttgctgggaaacaagtggtctcagattgcggcccagctgcctggccggacggacaacgaggtcaagaacttctggaactcgtacatcaagaagaggctcagggagcgcggcatcgaccccgccacccaccagccgctcgccgagcctgccgccgcagccactgccaccaccaccaccacggtctcccgccgcgcggtgtttggggacgtcgacctcatcccgactactactactactacaatccaggtgccgccgccgtcgttcgagggcggcccaatgctggagagcgtgaagctagcggtggagctggactggcccgtcgctggcgacggggtaacgtcaaggccatgctacctgcaggggggctgcttcgacatggacgcgctgcagcagcactgcggctccatcccgccggtgccggtcgtcccgtcggcctccgccagctccagcacgctgacctcgatggcggaagcggaacactgcagcaccaacaacgtcgccgccggcggcaacctcccatggctggagctcggggcaaacgcggtggctgacgccggcggccacgtcgtcggcagctgctacgccggcgcgctggacgagctcaggtggtcggagtacttcgacagtgccttccaggccgccgagagccagcaaggcgccctgcagccggggcagtgtgtctacggcggcaaggatgacgtcccggtgcacttcgacgtccatggcgggctaagcaactggtgc

SEQ ID NO: 1346 - DNA, 993 bp, Artificial sequence; identical to SEQ ID NO: 1345
  Mir resistant mutated nucleotide sequence

SEQ ID NO: 1347 - DNA, 993 bp, Artificial sequence; identical to SEQ ID NO: 1345
  Mir resistant mutated nucleotide sequence

SEQ ID NO: 1348 - DNA, 993 bp, Artificial sequence
  Mir resistant mutated nucleotide sequence
atggcgaagcagtcgtgctgccacaagaagaagcttaggagagggctctggtcccccgaggaggacgagaagctcatgaaccacattgccaagtacggccacggctgctggagctccgtacccaagcttgccggcttagatcgatgcggcaagagctgcaggctgaggtggataaactacctgaggccagacctcaagaggggcacattctcgcaagaggaggaggacctcatcatacacctccactccttgctgggaaacaagtggtctcagattgcggcccagctgcctggccggacggacaacgaggtcaagaacttctggaactcgtacatcaagaagaggctcagggagcgcggcatcgaccccgccacccaccagccgctcgccgagcctgccgccgcagccactgccaccaccaccaccacggtctcccgccgcgcggtgtttggggacgtcgacctcatcccgactactactactactacaatccaggtgccgccgccgtcgttcgagggcggcccaatgctggagagcgtgaagctagcggtggagctggactggcccgtcgctggcgacggggtaacgtcaaggccatgctacctgcaggggggctgcttcgacatggacgcgctgcagcagcactgcggctccatcccgccggtgccggtcgtcccgtcggcctccgccagctccagcacgctgacctcgatggcggaagcggaacactgcagcaccaacaacgtcgccgccggcggcaacctcccatggctggagctcggggcaaacgcggtggctgacgccggcggccacgtcgtcggcagctgctacgccggcgcgctggacgagctcaggtggtcggagtacttcgacagtgccttccaggccgccgagagccagcaaggcgccctgcagccggggcagtgtgtctacggcggcaaggatgacgtcccggtgcacttcgacgtccatggcgggctaagcaactggtgc

SEQ ID NO: 1349 - DNA, 1545 bp, Artificial sequence
  Mir resistant mutated nucleotide sequence
atggtggccaagaagccgcgggtcgtcgtagtgggcgcgggcgtggccggcctcacggcggcgcaccggctgtgcgccggaggcggggacaggttcgaggtgacggtcgtggaggccggcgcccgcgcgggcgggcgggtgctcacgtccgagttcgcgggccaccgcgtcgagatgggcgccacgtggattcagggcatcgacgggagccccgtgtacgcgctcgcgcgcgacgccggcgcgctcgcctgcgacagggacgctcccccgtacgagcgcatggacgggtcccccgaccgcgtgctcacggtcgccgagggcggcgaggtggtcgacgcggaccgcgtggccaggccggtcgaggagctgtacaggggcatgatggaggccgcgcgcgccggcgagtccagcggcggagggagtgtcgaggagtacctgaggcgcggcctccgagcgtaccaggcggcgcgccagggcggcaaggagctggaggggatcgaggacgcgctgctcgccatgcacatcaaccgggagcggacggacacctccgccgacgagctcggggacctcgacctcgccgcggagggcgagtaccgggacttcccaggcgagcacgtcacgatccccggcgggtactctcgcgtcgtcgaccgcctcgtcgcggcactcccgccgggcaccgtccgcctcggcctccgcctccgccgcctcgactggagcgacacccccgtgcgccttcacttcgccgaggatggcgcgacgacggcgatcaccgccgaccacgtcatcctcacggtgtcgttaggagtattaaaagcatcaatcggcaaggacgcccacgccgcgggcggggtcgccttcgacccaccgctcccgcagttcaagcgcgacgccgtcgcgaggctcggcttcggcgtcgtgaacaagctgttcatggagctggaggccgtgccagcggcgaaaccggaaggcgacggaggtggcggcggcggcggcggcagcgaacacccgctagccatgtctgcgccaccggagttcccgttcctacacatggcgttccgggggcacgtatcggagatcccgtggtggatgcgcggcaccgagtcgatctgccccgtccacgggggctccagcgtcgcgctggcgtggttcgccgggcgggaggccgagtacctcgagtcgctccccgacgacgaggtcatccgcggggtccaggccacgatggactccttcctcccggccccggacccgcgcgacggggccaaggcgacgtcacggtggagggtgaagcggatcaagaggagcgggtgggcaacggacccgctcttcctggggtcctacagctacgtggccgtcgggtccagcggcgaggacctcgaacggatggccgagccgctgccacgcgggtcgaacgttggcggtgcgccgccgcttcgcgtcctgttcgccggcgaggcgacgcaccggacgcactactcgacgacgcacgccgcgtacctgagcggtgtgagggaggccgagcggctgctgcagcactacggaaat

SEQ ID NO: 1350 - DNA, 1545 bp, Artificial sequence
  Mir resistant mutated nucleotide sequence
atggtggccaagaagccgcgggtcgtcgtagtgggcgcgggcgtggccggcctcacggcggcgcaccggctgtgcgccggaggcggggacaggttcgaggtgacggtcgtggaggccggcgcccgcgcgggcgggcgggtgctcacgtccgagttcgcgggccaccgcgtcgagatgggcgccacgtggattcagggcatcgacgggagccccgtgtacgcgctcgcgcgcgacgccggcgcgctcgcctgcgacagggacgctcccccgtacgagcgcatggacgggtcccccgaccgcgtgctcacggtcgccgagggcggcgaggtggtcgacgcggaccgcgtggccaggccggtcgaggagctgtacaggggcatgatggaggccgcgcgcgccggcgagtccagcggcggagggagtgtcgaggagtacctgaggcgcggcctccgagcgtaccaggcggcgcgccagggcggcaaggagctggaggggatcgaggacgcgctgctcgccatgcacatcaaccgggagcggacggacacctccgccgacgagctcggggacctcgacctcgccgcggagggcgagtaccgggacttcccaggcgagcacgtcacgatccccggcgggtactctcgcgtcgtcgaccgcctcgtcgcggcactcccgccgggcaccgtccgcctcggcctccgcctccgccgcctcgactggagcgacacccccgtgcgccttcacttcgccgaggatggcgcgacgacggcgatcaccgccgaccacgtcatcctcacggtgtcgctgggagtactgaaagcatcaatcggcaaggacgcccacgccgcgggcggggtcgccttcgacccaccgctcccgcagttcaagcgcgacgccgtcgcgaggctcggcttcggcgtcgtgaacaagctgttcatggagctggaggccgtgccagcggcgaaaccggaaggcgacggaggtggcggcggcggcggcggcagcgaacacccgctagccatgtctgcgccaccggagttcccgttcctacacatggcgttccgggggcacgtatcggagatcccgtggtggatgcgcggcaccgagtcgatctgccccgtccacgggggctccagcgtcgcgctggcgtggttcgccgggcgggaggccgagtacctcgagtcgctccccgacgacgaggtcatccgcggggtccaggccacgatggactccttcctcccggccccggacccgcgcgacggggccaaggcgacgtcacggtggagggtgaagcggatcaagaggagcgggtgggcaacggacccgctcttcctggggtcctacagctacgtggccgtcgggtccagcggcgaggacctcgaacggatggccgagccgctgccacgcgggtcgaacgttggcggtgcgccgccgcttcgcgtcctgttcgccggcgaggcgacgcaccggacgcactactcgacgacgcacgccgcgtacctgagcggtgtgagggaggccgagcggctgctgcagcactacggaaat

SEQ ID NO: 1351 - DNA, 1545 bp, Artificial sequence; identical to SEQ ID NO: 1350
  Mir resistant mutated nucleotide sequence

SEQ ID NO: 1352 - DNA, 1545 bp, Artificial sequence; identical to SEQ ID NO: 1350
  Mir resistant mutated nucleotide sequence

SEQ ID NO: 1353 - DNA, 1545 bp, Artificial sequence; identical to SEQ ID NO: 1350
  Mir resistant mutated nucleotide sequence

SEQ ID NO: 1354 - DNA, 1695 bp, Artificial sequence
  Mir resistant mutated nucleotide sequence
atggagttcgcctcccgcagtcgacccaccaccacagcagccgacgacgaagaaaacgactgtcttcgccgcttccccgaccatccgccgtcgcagccgcagggacacggcgagcccaatacatccggggtagacgctgcactactggcgaggaggcagaaactgctgttggagctgctcaagggatccatccaacagggcttgatcttgcgtgagctcgtggagactgagcacgccatgggctttattgccggcagccacaatcctgtgccagcactcccacaggatttcttgcgttgctggacgccgtcgatgtctactttggaagcgcatctccgccagccatgcccttgtggctgtggaaactccatggcggtcagggcacctccagtgaacccacacttggagcggtcatcgcatgcacccgagcaaacaaggccaggcaatgatgctgagcagcatcaagaggacaggtcatctggggtgaggacacatccatttaacggccattttaaactgtgtcattcaccgagcaagcagactccagtgccaggcaaagctggtgtcaatcagatgcggccatcgtccggacaccaacaggccattgtttgggaaaagattggtgtggaggttgttcataacatgcagccgttgaacgaaatcaagaaccacagcagtgaggggcagaaggccgtagactctgccattgaggtttgtgtaaagaaacccatacaacagcgtcttcagtacaaaccagtggatcaggagaatgcagcaaacaatgagcatgcacctgagcagacaaggcaaggcaatgatgctgagcatcatcaagagggcaggtcatctggagtgaggacacatccatttaacggctactttgaactgtgtcgttcaccgagcaagcagattccactggcaggcaaagctggtatcaatcaggtgcgtccattgtcaggacaccaacagggtgttgtttgggaaaagattggtgtggaggtagttcataacatgcagccattgcacgaaatcaagaatccgagcagtgaggggcggaaggccatagactctggcattgaggattgtgtaaagaaacccatgcatcatcgtcttcagtacaaaccagtggatcaggagaatgcagcaagtaatgaccagaagagtacagagttcaacgagccaacagctgagggaacttccgctggggtgaaaaggaagctgaccaccccaagctcacctgtcaagaagcagaagccactcgggcaatggagctgcactatctgccaggctaacccagctagccagcgccaattagaacagcatttagcaggaaagcggcaccagtcaaatgtcgcagcactgcaaccatctcagagcaacagcagcagccctgagcctgacacaaaagcgacgcccgcgaggagcaggatcatcgcgacgaacgcgcagcaagacggcaagcaggatgtgccggagaacagatggacgtgtacactctgccgggccaagtgctacactgaattgaactactacagccatctcgggggcttgtggcaccgggagaaggcacaggccaggcgcgaggagcacttgaggttctactgctcggtgtgcgacctgcaatgcaacagcgagaaaatgctggagtcacacctcggcggtaggaggcatcgggagactctggaggcgcgcgac

SEQ ID NO: 1355 - DNA, 1695 bp, Artificial sequence
  Mir resistant mutated nucleotide sequence
atggagttcgcctcccgcagtcgacccaccaccacagcagccgacgacgaagaaaacgactgtcttcgccgcttccccgaccatccgccgtcgcagccgcagggacacggcgagcccaatacatccggggtagacgctgcactactggcgaggaggcagaaactgctgttggagctgctcaagggatccatccaacagggcttgatcttgcgtgagctcgtggagactgagcacgccatgggctttattgccggcagccacaatcctgtgccagcactcccacaggatttcttgcgttgctggacgccgtcgatgtctactttggaagcgcatctccgccagccatgcccttgtggctgtggaaactccatggcggtcagggcacctccagtgaacccacacttggagcggtcatcgcatgcacccgagcaaacaaggccaggcaatgatgctgagcagcatcaagaggacaggtcatctggggtgaggacacatccatttaacggccattttaaactgtgtcattcaccgagcaagcagactccagtgccaggcaaagctggtgtcaatcagatgcggccatcgtccggacaccaacaggccattgtttgggaaaagattggtgtggaggttgttcataacatgcagccgttgaacgaaatcaagaaccacagcagtgaggggcagaaggccgtagactctgccattgaggtttgtgtaaagaaacccatacaacagcgtcttcagtacaaaccagtggatcaggagaatgcagcaaacaatgagcatgcacctgagcagacaaggcaaggcaatgatgctgagcatcatcaagagggcaggtcatctggagtgaggacacatccatttaacggctactttgaactgtgtcgttcaccgagcaagcagattccactggcaggcaaagctggtatcaatcaggtgcgtccattgtcaggacaccaacagggtgttgtttgggaaaagattggtgtggaggtagttcataacatgcagccattgcacgaaatcaagaatccgagcagtgaggggcggaaggccatagactctggcattgaggattgtgtaaagaaacccatgcatcatcgtcttcagtacaaaccagtggatcaggagaatgcagcaagtaatgaccagaagagtacagagttcaacgagccaacagctgagggaacttccgctggggtgaaaaggaagctgaccaccccaagctcacctgtcaagaagcagaagccactcgggcaatggagctgcactatctgccaggctaacccagctagccagcgccaacttgaacagcatcttgcaggaaagcggcaccagtcaaatgtcgcagcactgcaaccatctcagagcaacagcagcagccctgagcctgacacaaaagcgacgcccgcgaggagcaggatcatcgcgacgaacgcgcagcaagacggcaagcaggatgtgccggagaacagatggacgtgtacactctgccgggccaagtgctacactgaattgaactactacagccatctcgggggcttgtggcaccgggagaaggcacaggccaggcgcgaggagcacttgaggttctactgctcggtgtgcgacctgcaatgcaacagcgagaaaatgctggagtcacacctcggcggtaggaggcatcgggagactctggaggcgcgcgac

SEQ ID NO: 1356 - DNA, 1695 bp, Artificial sequence; identical to SEQ ID NO: 1355
  Mir resistant mutated nucleotide sequence

SEQ ID NO: 1357 - DNA, 1695 bp, Artificial sequence; identical to SEQ ID NO: 1355
  Mir resistant mutated nucleotide sequence

SEQ ID NO: 1358 - DNA, 1695 bp, Artificial sequence; identical to SEQ ID NO: 1355
  Mir resistant mutated nucleotide sequence

SEQ ID NO: 1359 - DNA, 1674 bp, Artificial sequence
  Mir resistant mutated nucleotide sequence
atgactgtgccttgtgcagtggacccattgctggtgattagggaagcgctgctgtcacagcttcagaaggatcgtcttcgccaggagatcatccaggttgagttggctaagatagagcgtgccatggtcctgtgcaagtgcaacagctcacatcatggtattgccgctgatgatgtggaatggactaggcctgctcccttcaccttcagggagcagtccatgcgaccttggcgatggtcagtcagtcaagaatgttatgtcgatgtggatgaggtccatgatcgaaagcaaaaggagggaaggcacaggagtgtagtgttgaagtctgagaagcctgccatggaagatggtgaatgcttgagaccttgttgtaatggtaaggcaagtcaggagaattcaaaagtcgaagatcagaaatcacaagaatccagtgagaccatacagcccaagacgactttgccttcagtgaaatgggaactgacaggaataacaataccagttaagaaaaagaaacgacaccagaaactgtcatgcgagatatgtcaagtacaagcaactagtgagcacagcttacaagaacaccgtgcagggcgtaagcaccaattaaaagaagcaattgatcagaaggtacaattaacagaagaatcctcttccagcacagagcagaaaacatcctcgataaaatggagctgcagtacatgccaggccaacggtacaagcgaatcagacctgaaggagcatctaaatggaagaacacaccgacaaaacattaaagcgcaactcatggagagtgatggcattgctaagactaatgagctgcaggaaccagagtgccctaagaacaatgcaccacaacattcagagaagccacctccgatgagttctacccattgcctagcgaactctactcatgaattggagttacgagggcaccttttagctaagcctcaagctctactggacgaaatcagtaacctgtcaaggaattctgagtcgcgagaagccacggtgcttccgaacattgcaccgcaacatacagagcagactccaggatcaaattgtagcatacttcaagctgattctgattgcaaattagacttggagcaccaatttggagcgaagatacaccaactgaatgtccaggacctacttgaagaagccaagaaaacaggagattttccaccagaaattgccaaggaccagcaaccgccctctgaatggggttgtgttatctgtcaggcaaaatgttactccgcacctcaattcgctcagcactgcagaggcaagaaacaccaaaagaaggtggaggcactacaaggaggcgtggatgccaaatcaagtaatctgacgacagtgcacaaagcagcttcaaatggtcctgactgcagcagttcgagttcagagaaggtggaggatcagacagcattgtggtcgtgcggggtttgcaatgtgcagtgcaacagcgagagtatgcttgcaggccattgtaaggaggaggaacatatggagaaacagaagttgcgggatttctgcgaggtctgcaatttgaagtgcaacagcgaaaagatgcttgctcaccatctttctgggagtaagcaccagaaaaggctcagtgcgaacaagcgaaatgcagttgtggcttgggtcccggtggcactgaggggaattgtacag

SEQ ID NO: 1360 - DNA, 1449 bp, Artificial sequence
  Mir resistant mutated nucleotide sequence
atggaggatcaggcgctggcgccgctgctgcagccgctcccgctcggcgaaacgggggccatcaaggggcgcgcgaggcgggcggcgctggagtggtgggtggagtcgaagaagctatggcacatcgtgggcccggccatcttccaacggatcgcgctgtacggggtcaacgtcgtcacgcagtccttcatcggccacctcggcgacctcgagctcgccgccttctccattgctgccaccgtcgtcgggggcttcaacttcggtttcctgctgggaatggcgagcgcgctggagacgctgtgcgggcaggcgttcggcgccaagaagcaccacatgctgggggtgtacctgcagcgctcctggatcgtgctcctcatctttgcagcagcattaacaccaacgtacatcttcatggaggacctgctgctgctgatcgggcagtccccggagctgtcgcggctggcggggcagatgagcgtgtggctgctcccgcagcacttcgccatggcgatgctgctcccgctcacgcggttcctgcagagccagctgaagaactgggtgaccgcgatcaccgcggccgtcgcgctcgccatccacgtcgtcgccacctacgtgctagtgcgtctcctcgacttcggcatcgtcggggccgtcgcctccgcggacatggcgtggtggctggtcgtgctgggccagtacgtctacgtcgtcggcggctggtgcccgctgtcgtggaaggggttcaccatggaggcgttcgccgacttctgggagttcatcaagctctcctcggcctccggagtgatgctctgcttggagaactggtactaccgagtgttggtgttgctgacagggtacctggacaacgctgaaatcgctgtggatgcactctccatatgtcagacgatcaacggatgggagatgatgatcccgttcggcttcttagcagcaaccggggtgcgagtcgcaaatgagctcggcgcagggagcggcaaaggtgcgcgcttcgccatcgtggtgtccatcacgacgtccgtggtgatcggcctcgtcttctggtgcctcatcctctacttcgacgacaagatcgcgcttctcttcacgtccagcgcggtcgtgctcgacgccgtgcaccacctgtccgtgctgctcgcattcaccatcctgctcaacagtgtgcagcccgtcctctcaggggtggccgttggttcaggatggcaagcactggtcgcctacgtcaacgtcggcagctactacctcatcggagttcccttgggtatcgtactcggttggccgctgcacttcggagtagggggaatctggtccgggatgattggagggaccgccgttcaaacgctcatactggcatacctcactgccaaatgtgattggcacgaagaggcgaagttagctagtatgagaatgaagaagtgggccgacgagtcgaaa

SEQ ID NO: 1361 - DNA, 1449 bp, Artificial sequence
  Mir resistant mutated nucleotide sequence
atggaggatcaggcgctggcgccgctgctgcagccgctcccgctcggcgaaacgggggccatcaaggggcgcgcgaggcgggcggcgctggagtggtgggtggagtcgaagaagctatggcacatcgtgggcccggccatcttccaacggatcgcgctgtacggggtcaacgtcgtcacgcagtccttcatcggccacctcggcgacctcgagctcgccgccttctccattgctgccaccgtcgtcgggggcttcaacttcggtttcctgctgggaatggcgagcgcgctggagacgctgtgcgggcaggcgttcggcgccaagaagcaccacatgctgggggtgtacctgcagcgctcctggatcgtgctcctcatcttcgcagcagcattaacaccaacgtacatcttcatggaggacctgctgctgctgatcgggcagtccccggagctgtcgcggctggcggggcagatgagcgtgtggctgctcccgcagcacttcgccatggcgatgctgctcccgctcacgcggttcctgcagagccagctgaagaactgggtgaccgcgatcaccgcggccgtcgcgctcgccatccacgtcgtcgccacctacgtgctagtgcgtctcctcgacttcggcatcgtcggggccgtcgcctccgcggacatggcgtggtggctggtcgtgctgggccagtacgtctacgtcgtcggcggctggtgcccgctgtcgtggaaggggttcaccatggaggcgttcgccgacttctgggagttcatcaagctctcctcggcctccggagtgatgctctgcttggagaactggtactaccgagtgttggtgttgctgacagggtacctggacaacgctgaaatcgctgtggatgcactctccatatgtcagacgatcaacggatgggagatgatgatcccgttcggcttcttagcagcaaccggggtgcgagtcgcaaatgagctcggcgcagggagcggcaaaggtgcgcgcttcgccatcgtggtgtccatcacgacgtccgtggtgatcggcctcgtcttctggtgcctcatcctctacttcgacgacaagatcgcgcttctcttcacgtccagcgcggtcgtgctcgacgccgtgcaccacctgtccgtgctgctcgcattcaccatcctgctcaacagtgtgcagcccgtcctctcaggggtggccgttggttcaggatggcaagcactggtcgcctacgtcaacgtcggcagctactacctcatcggagttcccttgggtatcgtactcggttggccgctgcacttcggagtagggggaatctggtccgggatgattggagggaccgccgttcaaacgctcatactggcatacctcactgccaaatgtgattggcacgaagaggcgaagttagctagtatgagaatgaagaagtgggccgacgagtcgaaa

SEQ ID NO: 1362 - DNA, 1449 bp, Artificial sequence
  Mir resistant mutated nucleotide sequence
atggaggatcaggcgctggcgccgctgctgcagccgctcccgctcggcgaaacgggggccatcaaggggcgcgcgaggcgggcggcgctggagtggtgggtggagtcgaagaagctatggcacatcgtgggcccggccatcttccaacggatcgcgctgtacggggtcaacgtcgtcacgcagtccttcatcggccacctcggcgacctcgagctcgccgccttctccattgctgccaccgtcgtcgggggcttcaacttcggtttcctgctgggaatggcgagcgcgctggagacgctgtgcgggcaggcgttcggcgccaagaagcaccacatgctgggggtgtacctgcagcgctcctggatcgtgctcctcatctttgccgccgccttaacaccaacgtacatcttcatggaggacctgctgctgctgatcgggcagtccccggagctgtcgcggctggcggggcagatgagcgtgtggctgctcccgcagcacttcgccatggcgatgctgctcccgctcacgcggttcctgcagagccagctgaagaactgggtgaccgcgatcaccgcggccgtcgcgctcgccatccacgtcgtcgccacctacgtgctagtgcgtctcctcgacttcggcatcgtcggggccgtcgcctccgcggacatggcgtggtggctggtcgtgctgggccagtacgtctacgtcgtcggcggctggtgcccgctgtcgtggaaggggttcaccatggaggcgttcgccgacttctgggagttcatcaagctctcctcggcctccggagtgatgctctgcttggagaactggtactaccgagtgttggtgttgctgacagggtacctggacaacgctgaaatcgctgtggatgcactctccatatgtcagacgatcaacggatgggagatgatgatcccgttcggcttcttagcagcaaccggggtgcgagtcgcaaatgagctcggcgcagggagcggcaaaggtgcgcgcttcgccatcgtggtgtccatcacgacgtccgtggtgatcggcctcgtcttctggtgcctcatcctctacttcgacgacaagatcgcgcttctcttcacgtccagcgcggtcgtgctcgacgccgtgcaccacctgtccgtgctgctcgcattcaccatcctgctcaacagtgtgcagcccgtcctctcaggggtggccgttggttcaggatggcaagcactggtcgcctacgtcaacgtcggcagctactacctcatcggagttcccttgggtatcgtactcggttggccgctgcacttcggagtagggggaatctggtccgggatgattggagggaccgccgttcaaacgctcatactggcatacctcactgccaaatgtgattggcacgaagaggcgaagttagctagtatgagaatgaagaagtgggccgacgagtcgaaa

SEQ ID NO: 1363 - DNA, 1449 bp, Artificial sequence; identical to SEQ ID NO: 1362
  Mir resistant mutated nucleotide sequence

SEQ ID NO: 1364 - DNA, 1449 bp, Artificial sequence
  Mir resistant mutated nucleotide sequence
atggaggatcaggcgctggcgccgctgctgcagccgctcccgctcggcgaaacgggggccatcaaggggcgcgcgaggcgggcggcgctggagtggtgggtggagtcgaagaagctatggcacatcgtgggcccggccatcttccaacggatcgcgctgtacggggtcaacgtcgtcacgcagtccttcatcggccacctcggcgacctcgagctcgccgccttctccattgctgccaccgtcgtcgggggcttcaacttcggtttcctgctgggaatggcgagcgcgctggagacgctgtgcgggcaggcgttcggcgccaagaagcaccacatgctgggggtgtacctgcagcgctcctggatcgtgctcctcatctttgcggcggcgttaacaccaacgtacatcttcatggaggacctgctgctgctgatcgggcagtccccggagctgtcgcggctggcggggcagatgagcgtgtggctgctcccgcagcacttcgccatggcgatgctgctcccgctcacgcggttcctgcagagccagctgaagaactgggtgaccgcgatcaccgcggccgtcgcgctcgccatccacgtcgtcgccacctacgtgctagtgcgtctcctcgacttcggcatcgtcggggccgtcgcctccgcggacatggcgtggtggctggtcgtgctgggccagtacgtctacgtcgtcggcggctggtgcccgctgtcgtggaaggggttcaccatggaggcgttcgccgacttctgggagttcatcaagctctcctcggcctccggagtgatgctctgcttggagaactggtactaccgagtgttggtgttgctgacagggtacctggacaacgctgaaatcgctgtggatgcactctccatatgtcagacgatcaacggatgggagatgatgatcccgttcggcttcttagcagcaaccggggtgcgagtcgcaaatgagctcggcgcagggagcggcaaaggtgcgcgcttcgccatcgtggtgtccatcacgacgtccgtggtgatcggcctcgtcttctggtgcctcatcctctacttcgacgacaagatcgcgcttctcttcacgtccagcgcggtcgtgctcgacgccgtgcaccacctgtccgtgctgctcgcattcaccatcctgctcaacagtgtgcagcccgtcctctcaggggtggccgttggttcaggatggcaagcactggtcgcctacgtcaacgtcggcagctactacctcatcggagttcccttgggtatcgtactcggttggccgctgcacttcggagtagggggaatctggtccgggatgattggagggaccgccgttcaaacgctcatactggcatacctcactgccaaatgtgattggcacgaagaggcgaagttagctagtatgagaatgaagaagtgggccgacgagtcgaaa

SEQ ID NO: 1365 - DNA, 1566 bp, Artificial sequence
  Mir resistant mutated nucleotide sequence
atggcgccccgcgcccgcgtcgccacgtacaaggtgtgctgggtcggcgggtgcttcagctccgacatcctcaaggccatggaggtcgccgtgacggacggcgtcgacgtgctctcgctctcccttggcggcggcacggcggagtactaccgcgacagcatcgcggtgggcgctttcagcgccatggagaaggggatcttcgtgtcctgctccgcgggcaatgccggcccgggcgccgcgacgctgtccaacggcgcgccgtggatcaccaccgtgggcgccgggaccatcgaccgcgacttccccgcctacgtcacgctcggcaacggcaagaactacacgggggtgtccctgtacagcggcaagccgttgcccaccacgccgatgcccttcatctacgcggggaacgcgtccaacagcagcatgggccagctctgcatgtccggcagcctgatcccggagaaggtggccggcaagatcgtcctttgcgaccgcggcaccaatgccagggtccagaagggcttcgtcgtcaaagacgccggcggcgccggcatggttctcgccaacaccgccgccaacggcgaggagctcgtcgccgacgcgcacgttctcccgggctccggcgtgggggagaaagccggcaacgccatgagggactacgccatgtcggatccgaaagcgacggccaccatcgtgttcgccgggacgaaggtcggcgtcaagccgtctcccgtcgtcgcggcattctcctcccggggccccaacactgtgacgtcgagcgtcctgaagccggacatcatcgcgcccggcgtgaacatcctggcggcgtggtcggggtccgtcggcccgtcggggctccccggcgacggccgccgcgtcggcttcaacatcatctccggcacgtccatgtcgtgcccgcacgtgagcgggctcgccgcgctgctccgcgcggcgcacccggagtggagcccggcagccatccggtcggcgctgatgacgacggcgtacaacgagtaccccggcggcggaaatggaatattagatgtagccacggggcggccggccacgccgctggacgtgggcgccggccacgtcgaccccgcgaaggccgtcgacccggggctggtgtacgacatcgcggcggcggactacgtggacttcctctgcgccaacaactacgaggcggcgcagatcgcggcgctcaccaggcagcacgcgtccgaggggtgcagcgccaaccgcacctacgcggtgaccgcgctcaactacccgtccttctccgtggcgttcccggccgccggcggcacggcgaagcacacccgcacggtaaccaacgtcgggcagcccgggacgtacaaggtggccgcgagcgccgccgccggcggcaccccggtgacggtgaccgtggagccgtcgacgctgagcttcagcagggccggcgagaagcagagctacacggtgagcttcacggcgggcgggatgccgtcgggcaccaacgggttcgggcggctcgtctggtccagcgaccaccacgtggtcgccagcccgatcgcggcgacgtggacc

SEQ ID NO: 1366 - DNA, 1566 bp, Artificial sequence
  Mir resistant mutated nucleotide sequence
atggcgccccgcgcccgcgtcgccacgtacaaggtgtgctgggtcggcgggtgcttcagctccgacatcctcaaggccatggaggtcgccgtgacggacggcgtcgacgtgctctcgctctcccttggcggcggcacggcggagtactaccgcgacagcatcgcggtgggcgctttcagcgccatggagaaggggatcttcgtgtcctgctccgcgggcaatgccggcccgggcgccgcgacgctgtccaacggcgcgccgtggatcaccaccgtgggcgccgggaccatcgaccgcgacttccccgcctacgtcacgctcggcaacggcaagaactacacgggggtgtccctgtacagcggcaagccgttgcccaccacgccgatgcccttcatctacgcggggaacgcgtccaacagcagcatgggccagctctgcatgtccggcagcctgatcccggagaaggtggccggcaagatcgtcctttgcgaccgcggcaccaatgccagggtccagaagggcttcgtcgtcaaagacgccggcggcgccggcatggttctcgccaacaccgccgccaacggcgaggagctcgtcgccgacgcgcacgttctcccgggctccggcgtgggggagaaagccggcaacgccatgagggactacgccatgtcggatccgaaagcgacggccaccatcgtgttcgccgggacgaaggtcggcgtcaagccgtctcccgtcgtcgcggcattctcctcccggggccccaacactgtgacgtcgagcgtcctgaagccggacatcatcgcgcccggcgtgaacatcctggcggcgtggtcggggtccgtcggcccgtcggggctccccggcgacggccgccgcgtcggcttcaacatcatctccggcacgtccatgtcgtgcccgcacgtgagcgggctcgccgcgctgctccgcgcggcgcacccggagtggagcccggcagccatccggtcggcgctgatgacgacggcgtacaacgagtaccccggcggcggcaatggcatattagatgtagccacggggcggccggccacgccgctggacgtgggcgccggccacgtcgaccccgcgaaggccgtcgacccggggctggtgtacgacatcgcggcggcggactacgtggacttcctctgcgccaacaactacgaggcggcgcagatcgcggcgctcaccaggcagcacgcgtccgaggggtgcagcgccaaccgcacctacgcggtgaccgcgctcaactacccgtccttctccgtggcgttcccggccgccggcggcacggcgaagcacacccgcacggtaaccaacgtcgggcagcccgggacgtacaaggtggccgcgagcgccgccgccggcggcaccccggtgacggtgaccgtggagccgtcgacgctgagcttcagcagggccggcgagaagcagagctacacggtgagcttcacggcgggcgggatgccgtcgggcaccaacgggttcgggcggctcgtctggtccagcgaccaccacgtggtcgccagcccgatcgcggcgacgtggacc

SEQ ID NO: 1367 - DNA, 1566 bp, Artificial sequence; identical to SEQ ID NO: 1366
  Mir resistant mutated nucleotide sequence

SEQ ID NO: 1368 - DNA, 1566 bp, Artificial sequence; identical to SEQ ID NO: 1366
  Mir resistant mutated nucleotide sequence

SEQ ID NO: 1369 - DNA, 927 bp, Artificial sequence
  Mir resistant mutated nucleotide sequence
atggcggcaaccgcaatgtgcccctccccctcggccgcaataactcgccacatccatgctcgtcgctcctgtgctgctgcttccttgtccctccgccgctcgggcttcctggggcgcgtcgtgctggccgcggtgccggtggccgtggacgccacccggcgccgccgcgtctccgtgtcggtgcggatggcctgggacggtccgctctcgtcggtgcgcctcatcatgcagagcaggaacgcgaagctgagcgagaagctcaaggagcacatcgaggacaaggtgggtcgggcggtgtccaagcactgccacctggtccgggaggtagacgtgcgcctctccgcgcgcggcggcgagctcggccggggccccaagacgtcgcgctgcgagatcaccctcttcaccaagcgccatggcgtcctgcgcgccgaggaggacgccgagtccacctacgccagcatcgacctcgccgccgccatcgtcaagcgcaagctccgcaagatcaaggagaaggagacggaggtgcgccgcggcggagacgctgacggcgtctgggacgagatcccgccggccgacctgctgccccccgccgaggccgacgacctggaggcagcagtaggagcagaagatgaagagacggtgctcgccaaggtggtgcgcaccaaggtgttcgagatgccgccgctcacggtggaggaggcgctggagcagctggagaacgtggaccacgacttctactgcttcagggacgaggccacggggcaggtgaacatcctctaccgcaggaaggaaggcggatacggcctcatcatccccaagaacgacggcaaagtggataccgttggcgttgtgccaccacccgccgtcgctgcggagccggagccggagccgtcctacgcagtgcacgccgctgacaacaacaactcc

SEQ ID NO: 1370 - DNA, 927 bp, Artificial sequence
  Mir resistant mutated nucleotide sequence
atggcggcaaccgcaatgtgcccctccccctcggccgcaataactcgccacatccatgctcgtcgctcctgtgctgctgcttccttgtccctccgccgctcgggcttcctggggcgcgtcgtgctggccgcggtgccggtggccgtggacgccacccggcgccgccgcgtctccgtgtcggtgcggatggcctgggacggtccgctctcgtcggtgcgcctcatcatgcagagcaggaacgcgaagctgagcgagaagctcaaggagcacatcgaggacaaggtgggtcgggcggtgtccaagcactgccacctggtccgggaggtagacgtgcgcctctccgcgcgcggcggcgagctcggccggggccccaagacgtcgcgctgcgagatcaccctcttcaccaagcgccatggcgtcctgcgcgccgaggaggacgccgagtccacctacgccagcatcgacctcgccgccgccatcgtcaagcgcaagctccgcaagatcaaggagaaggagacggaggtgcgccgcggcggagacgctgacggcgtctgggacgagatcccgccggccgacctgctgccccccgccgaggccgacgacctggaggcggcggtaggagcggaagatgaagagacggtgctcgccaaggtggtgcgcaccaaggtgttcgagatgccgccgctcacggtggaggaggcgctggagcagctggagaacgtggaccacgacttctactgcttcagggacgaggccacggggcaggtgaacatcctctaccgcaggaaggaaggcggatacggcctcatcatccccaagaacgacggcaaagtggataccgttggcgttgtgccaccacccgccgtcgctgcggagccggagccggagccgtcctacgcagtgcacgccgctgacaacaacaactcc

SEQ ID NO: 1371 - DNA, 927 bp, Artificial sequence; identical to SEQ ID NO: 1370
  Mir resistant mutated nucleotide sequence

SEQ ID NO: 1372 - DNA, 927 bp, Artificial sequence; identical to SEQ ID NO: 1370
  Mir resistant mutated nucleotide sequence

SEQ ID NO: 1373 - DNA, 927 bp, Artificial sequence
  Mir resistant mutated nucleotide sequence
atggcggcaaccgcaatgtgcccctccccctcggccgcaataactcgccacatccatgctcgtcgctcctgtgctgctgcttccttgtccctccgccgctcgggcttcctggggcgcgtcgtgctggccgcggtgccggtggccgtggacgccacccggcgccgccgcgtctccgtgtcggtgcggatggcctgggacggtccgctctcgtcggtgcgcctcatcatgcagagcaggaacgcgaagctgagcgagaagctcaaggagcacatcgaggacaaggtgggtcgggcggtgtccaagcactgccacctggtccgggaggtagacgtgcgcctctccgcgcgcggcggcgagctcggccggggccccaagacgtcgcgctgcgagatcaccctcttcaccaagcgccatggcgtcctgcgcgccgaggaggacgccgagtccacctacgccagcatcgacctcgccgccgccatcgtcaagcgcaagctccgcaagatcaaggagaaggagacggaggtgcgccgcggcggagacgctgacggcgtctgggacgagatcccgccggccgacctgctgccccccgccgaggccgacgacctggaggccgccgtaggagccgaagatgaagagacggtgctcgccaaggtggtgcgcaccaaggtgttcgagatgccgccgctcacggtggaggaggcgctggagcagctggagaacgtggaccacgacttctactgcttcagggacgaggccacggggcaggtgaacatcctctaccgcaggaaggaaggcggatacggcctcatcatccccaagaacgacggcaaagtggataccgttggcgttgtgccaccacccgccgtcgctgcggagccggagccggagccgtcctacgcagtgcacgccgctgacaacaacaactcc

SEQ ID NO: 1374 - DNA, 1578 bp, Artificial sequence
  Mir resistant mutated nucleotide sequence
atgctgccggctggcctcagcagcatgcagcatgtgcaagagatcgacctgtcctggaataacttcaacggtgagatcttggccaacatcggaaactgcattgagttgacagtgctcgacctctcacacaactcgcttgccggcaacctcccttcgacactcagccagctgaagaacctggaaagcctcaatgtcgcgaacaacaacctcagtggtgagatccccattagcctggccaattgcgacaggctgaaatatctcaatctgtcatacaacgacttcagcggcggcgtccccaccaccggccctttcgtgaatttcagctgtctctcctacctcggcaaccgtcgcctctctggtcctgtgctcaggcgttgcggaggtcgccaccgctcgtggtaccagtcccggaagttcgtagtcatcttgtgtgtctgctcggcggctttagcatttgcattaacaatactctgcactgtcagcgtccgcaagatccgcgagcgggtcgcggcaatgcgggaggacatgttcagtggccgccgcggcggcggctcgtcgccagtgatgaagtacaagttcccccggatcacgtacagggagctggtcgaggccaccgaggagttcagcgaggaccggcttgtcgggacgggcagctacgggcgggtgtaccgcggcacgctacgcgacggcaccatggtggccgtgaaggtgctgcagctccagacggggaactcgaccaagagcttcaaccgcgagtgccaggtcctgaagcgcatccggcaccggaacctcatgcgcatcgtcacggcgtgtagcctgccggacttcaaggcgctggtgctgccgttcatggccaacggcagcctcgagcggtgcctctacgcggggccaccggcggagctgagccttgtgcagcgggtcaacatctgtagcgacatcgccgaggggatggcctacctgcaccaccactcgccggtcaaggtcatccactgcgacctcaagccgagcaacgtcctcatcaacgacgacatgaccgcgctcgtctctgacttcggcatctccaggctcgtcatgagcatcggcggggtggccaacactgccgacgtcggcgcctccacggcgaacatgctgtgcggctccatcggatacatccctccagagtacggctacggctcgaatccgacgacaaagggcgacgcgtacagcttcggtgtgctggtgctggaaatggtgacaaggaggaagccaaccgacgacatgttcgacgccggactgagcctgcacaagtgggttaagacccactaccacggccgcgccgacgcagtggtcgaccaggcactggtgcgcatggtccgggaccagacgcccgaggtgagaaggatgtcggacgtggccatcggtgagctactggagcttggcatcctctgtacccaagagcaatcgtccgctcggccaaccatgatggacgcagccgacgacctggaccgcctcaagcggtacctcggcggcgacaccacggccaccttcgcgtcatcgctgggattctcctccaccacgctagaagtggaagacatcgat

SEQ ID NO: 1375 - DNA, 1578 bp, Artificial sequence
  Mir resistant mutated nucleotide sequence
atgctgccggctggcctcagcagcatgcagcatgtgcaagagatcgacctgtcctggaataacttcaacggtgagatcttggccaacatcggaaactgcattgagttgacagtgctcgacctctcacacaactcgcttgccggcaacctcccttcgacactcagccagctgaagaacctggaaagcctcaatgtcgcgaacaacaacctcagtggtgagatccccattagcctggccaattgcgacaggctgaaatatctcaatctgtcatacaacgacttcagcggcggcgtccccaccaccggccctttcgtgaatttcagctgtctctcctacctcggcaaccgtcgcctctctggtcctgtgctcaggcgttgcggaggtcgccaccgctcgtggtaccagtcccggaagttcgtagtcatcttgtgtgtctgctcggcggctctggcatttgcactgacaatactctgcactgtcagcgtccgcaagatccgcgagcgggtcgcggcaatgcgggaggacatgttcagtggccgccgcggcggcggctcgtcgccagtgatgaagtacaagttcccccggatcacgtacagggagctggtcgaggccaccgaggagttcagcgaggaccggcttgtcgggacgggcagctacgggcgggtgtaccgcggcacgctacgcgacggcaccatggtggccgtgaaggtgctgcagctccagacggggaactcgaccaagagcttcaaccgcgagtgccaggtcctgaagcgcatccggcaccggaacctcatgcgcatcgtcacggcgtgtagcctgccggacttcaaggcgctggtgctgccgttcatggccaacggcagcctcgagcggtgcctctacgcggggccaccggcggagctgagccttgtgcagcgggtcaacatctgtagcgacatcgccgaggggatggcctacctgcaccaccactcgccggtcaaggtcatccactgcgacctcaagccgagcaacgtcctcatcaacgacgacatgaccgcgctcgtctctgacttcggcatctccaggctcgtcatgagcatcggcggggtggccaacactgccgacgtcggcgcctccacggcgaacatgctgtgcggctccatcggatacatccctccagagtacggctacggctcgaatccgacgacaaagggcgacgcgtacagcttcggtgtgctggtgctggaaatggtgacaaggaggaagccaaccgacgacatgttcgacgccggactgagcctgcacaagtgggttaagacccactaccacggccgcgccgacgcagtggtcgaccaggcactggtgcgcatggtccgggaccagacgcccgaggtgagaaggatgtcggacgtggccatcggtgagctactggagcttggcatcctctgtacccaagagcaatcgtccgctcggccaaccatgatggacgcagccgacgacctggaccgcctcaagcggtacctcggcggcgacaccacggccaccttcgcgtcatcgctgggattctcctccaccacgctagaagtggaagacatcgat

SEQ ID NO: 1376 - DNA, 1578 bp, Artificial sequence; identical to SEQ ID NO: 1375
  Mir resistant mutated nucleotide sequence

SEQ ID NO: 1377 - DNA, 1578 bp, Artificial sequence; identical to SEQ ID NO: 1375
  Mir resistant mutated nucleotide sequence

SEQ ID NO: 1378 - DNA, 1578 bp, Artificial sequence; identical to SEQ ID NO: 1375
  Mir resistant mutated nucleotide sequence

SEQ ID NO: 1379 - DNA, 2931 bp, Artificial sequence
  Mir resistant mutated nucleotide sequence
atgggtggagggcaaatgcttgcctgccttcctctaggtctgatcacgctcctctcgctctcgctgagctccagctgccaaatcgacccccaaacacatgccctcctccagttcaaggacggtctgaacgaccccctgaaccacctcgcgtcatggacgaacgccacctccgggtgccgcttcttcggcgtccggtgcgacgacgacggctccggcacggtcaccgagatctcgctgtccaacatgaacctcaccggcgggatctcgccctccgtcggggccctgcacggcctggcgcgcctgcagctcgactccaactcgctgtcggggcccgtgccgcctgagctggccaaatgcacgcagctccgcttcctgaacctgtcctacaacagcctcgccggggagctgccggatttaagtgcattaacagcactccaggccctcgacgtcgagaacaatgccttcaccggccgcttcccggagtgggtcagcaacctgtccggcctgaccacgctcagcgtcggcatgaacagctacggcccaggggagacgccgcggggcatcggcaatctcaggaacctgacgtacctgttcctcgcgggcagcagcttgacgggggtcataccggactccatcttcgggctcaccgagctggagacgctggacatgtccatgaacaatctcgtcggcaccatcccaccggccatcggaaacctccggaacctgtggaaggtcgagctgtacaagaacaacctcgcgggcgagctcccgccggagctcggggagctcaccaagctgcgagagatcgacgtgtcccagaaccagatcagcggcggcatcccagcggcgttcgcggcgctcacggggttcacggtgatccagctctaccacaacaacctgtcggggccgatcccggaggagtggggagacctgcggtacctgacgagcttctccatctacgagaaccggttctccggcgggttcccgcgcaacttcggccggttctcaccgctcaacagcgtcgacatctccgagaacgccttcgacgggcctttcccgaggtacctgtgccacggcaacaacctccagttccttctcgctctccagaacggcttctccggtgagttcccggaggagtacgcggcgtgcaacagcctgcaacgcttccggatcaacaagaaccggttcaccggcgacctaccggaaggcctgtgggggctcccagcggcgacgatcatcgacgtgtccgacaacgggttcaccggagccatgtcgccgctgatcgggcaggcgcagagcctcaaccagctgtggctgcagaacaaccacctcagcggggcaataccgccggaaatcggccggcttgggcaggtgcagaagctctacctatccaacaacaccttctctggctccataccgtcggagatcggcagcctgtcgcagctgacggcgctgcacctggaggacaacgcgttcagcggcgccttgccggacgacatcggcggctgcttgaggctcgtcgagatcgacgtctcccagaacgcactgtccgggccgattccggcctcgctgtcgctgctgtcgtcgctcaactcgctgaacctttcctgcaacgagctcagcgggccgatcccgacgagcctccaggcgctcaagctcagctccatcgacttctcctcgaaccagctcaccgggaacgtgccgccggggcttctggtgctcagcggcggcacccaggcgtttgcccggaaccccggcctctgcattgacggcaggtccaacctcggcgtctgcaacgtggacggcggccacaaggacagcctcgccaggaagtcgcagcttgtgctcgtgccggcccttgtctcggcgatgctgctgctcgtggccggcatcctgtttatcagctaccggagcttcaagctcgaggagctcaagaagagagacctggagcacggcgacgggtgcgggcagtggaagctggagtcgttccacccgctggacctggatgctgacgagatctgcgccgtcggggaggagaacctgatcgggtcgggcggcacggggcgcgtgtaccggctggagctcaagggccgtggcggcggcagcggcggcgtggtggccgtgaagcggctgtggaagggcaacgcggcgcgagtgatggccgccgagatggccatcctcggcaaggtccggcaccggaacatcctcaagcttcacgcgtgtctgtcgcgcggcgagctcaactttatcgtgtacgagtacatgccgcgcggcaacctgcaccaggcgctccggcgggaggccaagggcagcgggcgcccggagctggactggcggcggcggagcaagatcgctctcggcgcggccaaggggatcatgtacctccaccacgactgcacgccggccatcatccaccgcgacatcaagtccaccaacatcctgctcgacgaggactacgaggccaagatcgccgacttcggcattgccaaggtcgccgaggattcctccgactccgagttcagctgcttcgccggaacgcatggctacctcgcgcccgagctggcctactcgctcaaagtgacggagaagacggacgtgtacagcttcggcgtggtgctgctggagctggtcaccggccggagcccgatcgacccgcgcttcggcgagggcagggacatcgtgttctggctttccagcaagctcgcctcggagagcctccacgacgtcctggacccgcgggtcgccgtgcttcccagggagagggacgacatgctcaaggtgctcaagatcgccgtgctttgcaccgcaaagctgccggcgggcaggccgaccatgagggacgttgtgaagatgctcaccgacgccggcacggggccctgcagcccgcgcggacagccgccgtcaagggtctgcagcaacaagagctgctgc

SEQ ID NO: 1380 - DNA, 2931 bp, Artificial sequence
  Mir resistant mutated nucleotide sequence
atgggtggagggcaaatgcttgcctgccttcctctaggtctgatcacgctcctctcgctctcgctgagctccagctgccaaatcgacccccaaacacatgccctcctccagttcaaggacggtctgaacgaccccctgaaccacctcgcgtcatggacgaacgccacctccgggtgccgcttcttcggcgtccggtgcgacgacgacggctccggcacggtcaccgagatctcgctgtccaacatgaacctcaccggcgggatctcgccctccgtcggggccctgcacggcctggcgcgcctgcagctcgactccaactcgctgtcggggcccgtgccgcctgagctggccaaatgcacgcagctccgcttcctgaacctgtcctacaacagcctcgccggggagctgccggacttaagtgcattaacagcactccaggccctcgacgtcgagaacaatgccttcaccggccgcttcccggagtgggtcagcaacctgtccggcctgaccacgctcagcgtcggcatgaacagctacggcccaggggagacgccgcggggcatcggcaatctcaggaacctgacgtacctgttcctcgcgggcagcagcttgacgggggtcataccggactccatcttcgggctcaccgagctggagacgctggacatgtccatgaacaatctcgtcggcaccatcccaccggccatcggaaacctccggaacctgtggaaggtcgagctgtacaagaacaacctcgcgggcgagctcccgccggagctcggggagctcaccaagctgcgagagatcgacgtgtcccagaaccagatcagcggcggcatcccagcggcgttcgcggcgctcacggggttcacggtgatccagctctaccacaacaacctgtcggggccgatcccggaggagtggggagacctgcggtacctgacgagcttctccatctacgagaaccggttctccggcgggttcccgcgcaacttcggccggttctcaccgctcaacagcgtcgacatctccgagaacgccttcgacgggcctttcccgaggtacctgtgccacggcaacaacctccagttccttctcgctctccagaacggcttctccggtgagttcccggaggagtacgcggcgtgcaacagcctgcaacgcttccggatcaacaagaaccggttcaccggcgacctaccggaaggcctgtgggggctcccagcggcgacgatcatcgacgtgtccgacaacgggttcaccggagccatgtcgccgctgatcgggcaggcgcagagcctcaaccagctgtggctgcagaacaaccacctcagcggggcaataccgccggaaatcggccggcttgggcaggtgcagaagctctacctatccaacaacaccttctctggctccataccgtcggagatcggcagcctgtcgcagctgacggcgctgcacctggaggacaacgcgttcagcggcgccttgccggacgacatcggcggctgcttgaggctcgtcgagatcgacgtctcccagaacgcactgtccgggccgattccggcctcgctgtcgctgctgtcgtcgctcaactcgctgaacctttcctgcaacgagctcagcgggccgatcccgacgagcctccaggcgctcaagctcagctccatcgacttctcctcgaaccagctcaccgggaacgtgccgccggggcttctggtgctcagcggcggcacccaggcgtttgcccggaaccccggcctctgcattgacggcaggtccaacctcggcgtctgcaacgtggacggcggccacaaggacagcctcgccaggaagtcgcagcttgtgctcgtgccggcccttgtctcggcgatgctgctgctcgtggccggcatcctgtttatcagctaccggagcttcaagctcgaggagctcaagaagagagacctggagcacggcgacgggtgcgggcagtggaagctggagtcgttccacccgctggacctggatgctgacgagatctgcgccgtcggggaggagaacctgatcgggtcgggcggcacggggcgcgtgtaccggctggagctcaagggccgtggcggcggcagcggcggcgtggtggccgtgaagcggctgtggaagggcaacgcggcgcgagtgatggccgccgagatggccatcctcggcaaggtccggcaccggaacatcctcaagcttcacgcgtgtctgtcgcgcggcgagctcaactttatcgtgtacgagtacatgccgcgcggcaacctgcaccaggcgctccggcgggaggccaagggcagcgggcgcccggagctggactggcggcggcggagcaagatcgctctcggcgcggccaaggggatcatgtacctccaccacgactgcacgccggccatcatccaccgcgacatcaagtccaccaacatcctgctcgacgaggactacgaggccaagatcgccgacttcggcattgccaaggtcgccgaggattcctccgactccgagttcagctgcttcgccggaacgcatggctacctcgcgcccgagctggcctactcgctcaaagtgacggagaagacggacgtgtacagcttcggcgtggtgctgctggagctggtcaccggccggagcccgatcgacccgcgcttcggcgagggcagggacatcgtgttctggctttccagcaagctcgcctcggagagcctccacgacgtcctggacccgcgggtcgccgtgcttcccagggagagggacgacatgctcaaggtgctcaagatcgccgtgctttgcaccgcaaagctgccggcgggcaggccgaccatgagggacgttgtgaagatgctcaccgacgccggcacggggccctgcagcccgcgcggacagccgccgtcaagggtctgcagcaacaagagctgctgc

SEQ ID NO: 1381 - DNA, 2931 bp, Artificial sequence
  Mir resistant mutated nucleotide sequence
atgggtggagggcaaatgcttgcctgccttcctctaggtctgatcacgctcctctcgctctcgctgagctccagctgccaaatcgacccccaaacacatgccctcctccagttcaaggacggtctgaacgaccccctgaaccacctcgcgtcatggacgaacgccacctccgggtgccgcttcttcggcgtccggtgcgacgacgacggctccggcacggtcaccgagatctcgctgtccaacatgaacctcaccggcgggatctcgccctccgtcggggccctgcacggcctggcgcgcctgcagctcgactccaactcgctgtcggggcccgtgccgcctgagctggccaaatgcacgcagctccgcttcctgaacctgtcctacaacagcctcgccggggagctgccggatctgagtgcactgacagcactccaggccctcgacgtcgagaacaatgccttcaccggccgcttcccggagtgggtcagcaacctgtccggcctgaccacgctcagcgtcggcatgaacagctacggcccaggggagacgccgcggggcatcggcaatctcaggaacctgacgtacctgttcctcgcgggcagcagcttgacgggggtcataccggactccatcttcgggctcaccgagctggagacgctggacatgtccatgaacaatctcgtcggcaccatcccaccggccatcggaaacctccggaacctgtggaaggtcgagctgtacaagaacaacctcgcgggcgagctcccgccggagctcggggagctcaccaagctgcgagagatcgacgtgtcccagaaccagatcagcggcggcatcccagcggcgttcgcggcgctcacggggttcacggtgatccagctctaccacaacaacctgtcggggccgatcccggaggagtggggagacctgcggtacctgacgagcttctccatctacgagaaccggttctccggcgggttcccgcgcaacttcggccggttctcaccgctcaacagcgtcgacatctccgagaacgccttcgacgggcctttcccgaggtacctgtgccacggcaacaacctccagttccttctcgctctccagaacggcttctccggtgagttcccggaggagtacgcggcgtgcaacagcctgcaacgcttccggatcaacaagaaccggttcaccggcgacctaccggaaggcctgtgggggctcccagcggcgacgatcatcgacgtgtccgacaacgggttcaccggagccatgtcgccgctgatcgggcaggcgcagagcctcaaccagctgtggctgcagaacaaccacctcagcggggcaataccgccggaaatcggccggcttgggcaggtgcagaagctctacctatccaacaacaccttctctggctccataccgtcggagatcggcagcctgtcgcagctgacggcgctgcacctggaggacaacgcgttcagcggcgccttgccggacgacatcggcggctgcttgaggctcgtcgagatcgacgtctcccagaacgcactgtccgggccgattccggcctcgctgtcgctgctgtcgtcgctcaactcgctgaacctttcctgcaacgagctcagcgggccgatcccgacgagcctccaggcgctcaagctcagctccatcgacttctcctcgaaccagctcaccgggaacgtgccgccggggcttctggtgctcagcggcggcacccaggcgtttgcccggaaccccggcctctgcattgacggcaggtccaacctcggcgtctgcaacgtggacggcggccacaaggacagcctcgccaggaagtcgcagcttgtgctcgtgccggcccttgtctcggcgatgctgctgctcgtggccggcatcctgtttatcagctaccggagcttcaagctcgaggagctcaagaagagagacctggagcacggcgacgggtgcgggcagtggaagctggagtcgttccacccgctggacctggatgctgacgagatctgcgccgtcggggaggagaacctgatcgggtcgggcggcacggggcgcgtgtaccggctggagctcaagggccgtggcggcggcagcggcggcgtggtggccgtgaagcggctgtggaagggcaacgcggcgcgagtgatggccgccgagatggccatcctcggcaaggtccggcaccggaacatcctcaagcttcacgcgtgtctgtcgcgcggcgagctcaactttatcgtgtacgagtacatgccgcgcggcaacctgcaccaggcgctccggcgggaggccaagggcagcgggcgcccggagctggactggcggcggcggagcaagatcgctctcggcgcggccaaggggatcatgtacctccaccacgactgcacgccggccatcatccaccgcgacatcaagtccaccaacatcctgctcgacgaggactacgaggccaagatcgccgacttcggcattgccaaggtcgccgaggattcctccgactccgagttcagctgcttcgccggaacgcatggctacctcgcgcccgagctggcctactcgctcaaagtgacggagaagacggacgtgtacagcttcggcgtggtgctgctggagctggtcaccggccggagcccgatcgacccgcgcttcggcgagggcagggacatcgtgttctggctttccagcaagctcgcctcggagagcctccacgacgtcctggacccgcgggtcgccgtgcttcccagggagagggacgacatgctcaaggtgctcaagatcgccgtgctttgcaccgcaaagctgccggcgggcaggccgaccatgagggacgttgtgaagatgctcaccgacgccggcacggggccctgcagcccgcgcggacagccgccgtcaagggtctgcagcaacaagagctgctgc

SEQ ID NO: 1382 - DNA, 2931 bp, Artificial sequence
  Mir resistant mutated nucleotide sequence
atgggtggagggcaaatgcttgcctgccttcctctaggtctgatcacgctcctctcgctctcgctgagctccagctgccaaatcgacccccaaacacatgccctcctccagttcaaggacggtctgaacgaccccctgaaccacctcgcgtcatggacgaacgccacctccgggtgccgcttcttcggcgtccggtgcgacgacgacggctccggcacggtcaccgagatctcgctgtccaacatgaacctcaccggcgggatctcgccctccgtcggggccctgcacggcctggcgcgcctgcagctcgactccaactcgctgtcggggcccgtgccgcctgagctggccaaatgcacgcagctccgcttcctgaacctgtcctacaacagcctcgccggggagctgccggatttatccgcattaacagcactccaggccctcgacgtcgagaacaatgccttcaccggccgcttcccggagtgggtcagcaacctgtccggcctgaccacgctcagcgtcggcatgaacagctacggcccaggggagacgccgcggggcatcggcaatctcaggaacctgacgtacctgttcctcgcgggcagcagcttgacgggggtcataccggactccatcttcgggctcaccgagctggagacgctggacatgtccatgaacaatctcgtcggcaccatcccaccggccatcggaaacctccggaacctgtggaaggtcgagctgtacaagaacaacctcgcgggcgagctcccgccggagctcggggagctcaccaagctgcgagagatcgacgtgtcccagaaccagatcagcggcggcatcccagcggcgttcgcggcgctcacggggttcacggtgatccagctctaccacaacaacctgtcggggccgatcccggaggagtggggagacctgcggtacctgacgagcttctccatctacgagaaccggttctccggcgggttcccgcgcaacttcggccggttctcaccgctcaacagcgtcgacatctccgagaacgccttcgacgggcctttcccgaggtacctgtgccacggcaacaacctccagttccttctcgctctccagaacggcttctccggtgagttcccggaggagtacgcggcgtgcaacagcctgcaacgcttccggatcaacaagaaccggttcaccggcgacctaccggaaggcctgtgggggctcccagcggcgacgatcatcgacgtgtccgacaacgggttcaccggagccatgtcgccgctgatcgggcaggcgcagagcctcaaccagctgtggctgcagaacaaccacctcagcggggcaataccgccggaaatcggccggcttgggcaggtgcagaagctctacctatccaacaacaccttctctggctccataccgtcggagatcggcagcctgtcgcagctgacggcgctgcacctggaggacaacgcgttcagcggcgccttgccggacgacatcggcggctgcttgaggctcgtcgagatcgacgtctcccagaacgcactgtccgggccgattccggcctcgctgtcgctgctgtcgtcgctcaactcgctgaacctttcctgcaacgagctcagcgggccgatcccgacgagcctccaggcgctcaagctcagctccatcgacttctcctcgaaccagctcaccgggaacgtgccgccggggcttctggtgctcagcggcggcacccaggcgtttgcccggaaccccggcctctgcattgacggcaggtccaacctcggcgtctgcaacgtggacggcggccacaaggacagcctcgccaggaagtcgcagcttgtgctcgtgccggcccttgtctcggcgatgctgctgctcgtggccggcatcctgtttatcagctaccggagcttcaagctcgaggagctcaagaagagagacctggagcacggcgacgggtgcgggcagtggaagctggagtcgttccacccgctggacctggatgctgacgagatctgcgccgtcggggaggagaacctgatcgggtcgggcggcacggggcgcgtgtaccggctggagctcaagggccgtggcggcggcagcggcggcgtggtggccgtgaagcggctgtggaagggcaacgcggcgcgagtgatggccgccgagatggccatcctcggcaaggtccggcaccggaacatcctcaagcttcacgcgtgtctgtcgcgcggcgagctcaactttatcgtgtacgagtacatgccgcgcggcaacctgcaccaggcgctccggcgggaggccaagggcagcgggcgcccggagctggactggcggcggcggagcaagatcgctctcggcgcggccaaggggatcatgtacctccaccacgactgcacgccggccatcatccaccgcgacatcaagtccaccaacatcctgctcgacgaggactacgaggccaagatcgccgacttcggcattgccaaggtcgccgaggattcctccgactccgagttcagctgcttcgccggaacgcatggctacctcgcgcccgagctggcctactcgctcaaagtgacggagaagacggacgtgtacagcttcggcgtggtgctgctggagctggtcaccggccggagcccgatcgacccgcgcttcggcgagggcagggacatcgtgttctggctttccagcaagctcgcctcggagagcctccacgacgtcctggacccgcgggtcgccgtgcttcccagggagagggacgacatgctcaaggtgctcaagatcgccgtgctttgcaccgcaaagctgccggcgggcaggccgaccatgagggacgttgtgaagatgctcaccgacgccggcacggggccctgcagcccgcgcggacagccgccgtcaagggtctgcagcaacaagagctgctgc

SEQ ID NO: 1383 - DNA, 2931 bp, Artificial sequence
  Mir resistant mutated nucleotide sequence
atgggtggagggcaaatgcttgcctgccttcctctaggtctgatcacgctcctctcgctctcgctgagctccagctgccaaatcgacccccaaacacatgccctcctccagttcaaggacggtctgaacgaccccctgaaccacctcgcgtcatggacgaacgccacctccgggtgccgcttcttcggcgtccggtgcgacgacgacggctccggcacggtcaccgagatctcgctgtccaacatgaacctcaccggcgggatctcgccctccgtcggggccctgcacggcctggcgcgcctgcagctcgactccaactcgctgtcggggcccgtgccgcctgagctggccaaatgcacgcagctccgcttcctgaacctgtcctacaacagcctcgccggggagctgccggatttaagtgcgttaacagcgctccaggccctcgacgtcgagaacaatgccttcaccggccgcttcccggagtgggtcagcaacctgtccggcctgaccacgctcagcgtcggcatgaacagctacggcccaggggagacgccgcggggcatcggcaatctcaggaacctgacgtacctgttcctcgcgggcagcagcttgacgggggtcataccggactccatcttcgggctcaccgagctggagacgctggacatgtccatgaacaatctcgtcggcaccatcccaccggccatcggaaacctccggaacctgtggaaggtcgagctgtacaagaacaacctcgcgggcgagctcccgccggagctcggggagctcaccaagctgcgagagatcgacgtgtcccagaaccagatcagcggcggcatcccagcggcgttcgcggcgctcacggggttcacggtgatccagctctaccacaacaacctgtcggggccgatcccggaggagtggggagacctgcggtacctgacgagcttctccatctacgagaaccggttctccggcgggttcccgcgcaacttcggccggttctcaccgctcaacagcgtcgacatctccgagaacgccttcgacgggcctttcccgaggtacctgtgccacggcaacaacctccagttccttctcgctctccagaacggcttctccggtgagttcccggaggagtacgcggcgtgcaacagcctgcaacgcttccggatcaacaagaaccggttcaccggcgacctaccggaaggcctgtgggggctcccagcggcgacgatcatcgacgtgtccgacaacgggttcaccggagccatgtcgccgctgatcgggcaggcgcagagcctcaaccagctgtggctgcagaacaaccacctcagcggggcaataccgccggaaatcggccggcttgggcaggtgcagaagctctacctatccaacaacaccttctctggctccataccgtcggagatcggcagcctgtcgcagctgacggcgctgcacctggaggacaacgcgttcagcggcgccttgccggacgacatcggcggctgcttgaggctcgtcgagatcgacgtctcccagaacgcactgtccgggccgattccggcctcgctgtcgctgctgtcgtcgctcaactcgctgaacctttcctgcaacgagctcagcgggccgatcccgacgagcctccaggcgctcaagctcagctccatcgacttctcctcgaaccagctcaccgggaacgtgccgccggggcttctggtgctcagcggcggcacccaggcgtttgcccggaaccccggcctctgcattgacggcaggtccaacctcggcgtctgcaacgtggacggcggccacaaggacagcctcgccaggaagtcgcagcttgtgctcgtgccggcccttgtctcggcgatgctgctgctcgtggccggcatcctgtttatcagctaccggagcttcaagctcgaggagctcaagaagagagacctggagcacggcgacgggtgcgggcagtggaagctggagtcgttccacccgctggacctggatgctgacgagatctgcgccgtcggggaggagaacctgatcgggtcgggcggcacggggcgcgtgtaccggctggagctcaagggccgtggcggcggcagcggcggcgtggtggccgtgaagcggctgtggaagggcaacgcggcgcgagtgatggccgccgagatggccatcctcggcaaggtccggcaccggaacatcctcaagcttcacgcgtgtctgtcgcgcggcgagctcaactttatcgtgtacgagtacatgccgcgcggcaacctgcaccaggcgctccggcgggaggccaagggcagcgggcgcccggagctggactggcggcggcggagcaagatcgctctcggcgcggccaaggggatcatgtacctccaccacgactgcacgccggccatcatccaccgcgacatcaagtccaccaacatcctgctcgacgaggactacgaggccaagatcgccgacttcggcattgccaaggtcgccgaggattcctccgactccgagttcagctgcttcgccggaacgcatggctacctcgcgcccgagctggcctactcgctcaaagtgacggagaagacggacgtgtacagcttcggcgtggtgctgctggagctggtcaccggccggagcccgatcgacccgcgcttcggcgagggcagggacatcgtgttctggctttccagcaagctcgcctcggagagcctccacgacgtcctggacccgcgggtcgccgtgcttcccagggagagggacgacatgctcaaggtgctcaagatcgccgtgctttgcaccgcaaagctgccggcgggcaggccgaccatgagggacgttgtgaagatgctcaccgacgccggcacggggccctgcagcccgcgcggacagccgccgtcaagggtctgcagcaacaagagctgctgc

SEQ ID NO: 1384 - DNA, 2334 bp, Artificial sequence
  Mir resistant mutated nucleotide sequence
atggcgaccaccatcaccaggctcttgcaccacctggcgctcttactcctcgttgtccagttcgccgacgcagttttcgtcccaaagaccaagaactacgctgtgctgaagcctcagtcatggggcaccacctacatagtccatgccaacttcctcgccaagccgccccacttcggctccctgaaggagtggtaccgttccatggtgaccacccacgcctcttccactcgggcggcgagctccagcagcatcctgtacacctacgacaccgtcatgcacggcttcgcggtccagcttactggcgacgaggcccggctcatgtccagcgcgcccggcgtgatcggcgtgtacgaggacagggtgctctaccctcagaccacgaggtcgccggggttcatgggcctcgaacccggcaacggcgcctggaagcagaccgacttcggtgacggcgtcatcatcggtttcatcgacggcggcatatggcccgagagcgcgagcttcaacgacagcgggctcggccccgtccggtcggggtggcggggcaagtgcgtcgacgcccacggcttcgacgccaacttgtgcaacaacaagctggttggagccaaggccttcagcgctgctgcggacgccgtggcgggtaggaagagccgtggcgtcccgtccccgagggacaaggatgggcacggcacacacgtggcctctacggccgccggtgctgaggtccggaacgccagcctctacgcgttctcccaggggaccgctcggggaatggcgcccaaggcgaggatcgccatgtacaaggcatgcagcgagaatggctgcatgcatgcggacatcgtagcagcggtggacgctgcggtgaaggacggcgttgacatcatctccatatccctcggacgaagttttcccatagccttccacgatgacgtcctcgcggtcgccttgtttggtgcagagcgcaaaggcgtcttcgtcgtcgtagccggcggcaatgccggcccgcaggcagctagggtggtcaactcagcgccgtggatgaccaccgtaggcgccgccaccgtggacaggctgttcccggcgcacctcacgctcgggaacggcgtcgtgctcgccggccagtccctttataccatgcatgccaagggcacgcccatgatcccgttagtgtccacggacggcatcaattcgtggacgcccgacacggtcatggggaaaatcgtggtgtgcatgttcggagcaagcgacgcggatggcatcttgttgcagaatgctggtggagcagggatagttgatgtggattcttacgagtggtctcgtgatggttccgcgctttattccttcacccttccgggtctcacgctcagctacaccgccggcgagaagctcagggcgtacatggtctcggtgccctatccggtggcgtccttgagcttcggctgtgagacggtcatcagccgcaagaatcgggcgccggtggtggcgggattctcgtcgcgtggccccaatcctgccgcacccgagctcctcaagcccgatgtcgtcgcgccgggagtgaacattcttgcggcctggtcaggcgacgcaccactagcgggggtcttcgttcccgatgggaggagagcgaactacaacatcatatcggggacttccatggcgtgcccgcacgtcgctggcatcgcggcactgatcaagaagaagcacccaagctggacgccggccatggtcagaagcgcattaatgacaaccgccgggacggtcgacaacagaggcggacacatcctcgacaacggtcacacggacacccttggccgcaccgacaacgtcagggtcgcgacgccgctggtggccggtgccgggcacgtccacccggacctcgctctggacccgggcctcgtctacgacgccggcgagcgcgactatgtcgacttcctgtgcgccctgaactacaccgcggaacagatgcggcggttcgttccggacttcgtcaagtgcacgggaacgctcgccggcggccccgccggcctgaactacccgtcattcgtcgtggccttcgacagccgcaccgacgtcgtccgcacactgacgcggaccgtgaccaaagtgtccgaggaggcggaggtgtacaccgcgactgtcgtcgcgccggagcacgtgaaggtgactgtcacgccgacgaccttggagttcaaggagcatatggagacgaggagctactcggtggagttcagaaatgaagccggatggcaccgagaggcagggtgggacttcgggcagatcatctgggcgaacgggaagcataaagtcaggagcccggtggcgttccagtggaagaac

SEQ ID NO: 1385 - DNA, 2334 bp, Artificial sequence
  Mir resistant mutated nucleotide sequence
atggcgaccaccatcaccaggctcttgcaccacctggcgctcttactcctcgttgtccagttcgccgacgcagttttcgtcccaaagaccaagaactacgctgtgctgaagcctcagtcatggggcaccacctacatagtccatgccaacttcctcgccaagccgccccacttcggctccctgaaggagtggtaccgttccatggtgaccacccacgcctcttccactcgggcggcgagctccagcagcatcctgtacacctacgacaccgtcatgcacggcttcgcggtccagcttactggcgacgaggcccggctcatgtccagcgcgcccggcgtgatcggcgtgtacgaggacagggtgctctaccctcagaccacgaggtcgccggggttcatgggcctcgaacccggcaacggcgcctggaagcagaccgacttcggtgacggcgtcatcatcggtttcatcgacggcggcatatggcccgagagcgcgagcttcaacgacagcgggctcggccccgtccggtcggggtggcggggcaagtgcgtcgacgcccacggcttcgacgccaacttgtgcaacaacaagctggttggagccaaggccttcagcgctgctgcggacgccgtggcgggtaggaagagccgtggcgtcccgtccccgagggacaaggatgggcacggcacacacgtggcctctacggccgccggtgctgaggtccggaacgccagcctctacgcgttctcccaggggaccgctcggggaatggcgcccaaggcgaggatcgccatgtacaaggcatgcagcgagaatggctgcatgcatgcggacatcgtagcagcggtggacgctgcggtgaaggacggcgttgacatcatctccatatccctcggacgaagttttcccatagccttccacgatgacgtcctcgcggtcgccttgtttggtgcagagcgcaaaggcgtcttcgtcgtcgtagccggcggcaatgccggcccgcaggcagctagggtggtcaactcagcgccgtggatgaccaccgtaggcgccgccaccgtggacaggctgttcccggcgcacctcacgctcgggaacggcgtcgtgctcgccggccagtccctttataccatgcatgccaagggcacgcccatgatcccgttagtgtccacggacggcatcaattcgtggacgcccgacacggtcatggggaaaatcgtggtgtgcatgttcggagcaagcgacgcggatggcatcttgttgcagaatgctggtggagcagggatagttgatgtggattcttacgagtggtctcgtgatggttccgcgctttattccttcacccttccgggtctcacgctcagctacaccgccggcgagaagctcagggcgtacatggtctcggtgccctatccggtggcgtccttgagcttcggctgtgagacggtcatcagccgcaagaatcgggcgccggtggtggcgggattctcgtcgcgtggccccaatcctgccgcacccgagctcctcaagcccgatgtcgtcgcgccgggagtgaacattcttgcggcctggtcaggcgacgcaccactagcgggggtcttcgttcccgatgggaggagagcgaactacaacatcatatcggggacttccatggcgtgcccgcacgtcgctggcatcgcggcactgatcaagaagaagcacccaagctggacgccggccatggtaagaagcgcattaatgacaaccgccgggacggtcgacaacagaggcggacacatcctcgacaacggtcacacggacacccttggccgcaccgacaacgtcagggtcgcgacgccgctggtggccggtgccgggcacgtccacccggacctcgctctggacccgggcctcgtctacgacgccggcgagcgcgactatgtcgacttcctgtgcgccctgaactacaccgcggaacagatgcggcggttcgttccggacttcgtcaagtgcacgggaacgctcgccggcggccccgccggcctgaactacccgtcattcgtcgtggccttcgacagccgcaccgacgtcgtccgcacactgacgcggaccgtgaccaaagtgtccgaggaggcggaggtgtacaccgcgactgtcgtcgcgccggagcacgtgaaggtgactgtcacgccgacgaccttggagttcaaggagcatatggagacgaggagctactcggtggagttcagaaatgaagccggatggcaccgagaggcagggtgggacttcgggcagatcatctgggcgaacgggaagcataaagtcaggagcccggtggcgttccagtggaagaac

SEQ ID NO: 1386 - DNA, 2334 bp, Artificial sequence; identical to SEQ ID NO: 1385
  Mir resistant mutated nucleotide sequence

SEQ ID NO: 1387 - DNA, 2334 bp, Artificial sequence; identical to SEQ ID NO: 1385
  Mir resistant mutated nucleotide sequence

SEQ ID NO: 1388 - DNA, 2334 bp, Artificial sequence
  Mir resistant mutated nucleotide sequence
atggcgaccaccatcaccaggctcttgcaccacctggcgctcttactcctcgttgtccagttcgccgacgcagttttcgtcccaaagaccaagaactacgctgtgctgaagcctcagtcatggggcaccacctacatagtccatgccaacttcctcgccaagccgccccacttcggctccctgaaggagtggtaccgttccatggtgaccacccacgcctcttccactcgggcggcgagctccagcagcatcctgtacacctacgacaccgtcatgcacggcttcgcggtccagcttactggcgacgaggcccggctcatgtccagcgcgcccggcgtgatcggcgtgtacgaggacagggtgctctaccctcagaccacgaggtcgccggggttcatgggcctcgaacccggcaacggcgcctggaagcagaccgacttcggtgacggcgtcatcatcggtttcatcgacggcggcatatggcccgagagcgcgagcttcaacgacagcgggctcggccccgtccggtcggggtggcggggcaagtgcgtcgacgcccacggcttcgacgccaacttgtgcaacaacaagctggttggagccaaggccttcagcgctgctgcggacgccgtggcgggtaggaagagccgtggcgtcccgtccccgagggacaaggatgggcacggcacacacgtggcctctacggccgccggtgctgaggtccggaacgccagcctctacgcgttctcccaggggaccgctcggggaatggcgcccaaggcgaggatcgccatgtacaaggcatgcagcgagaatggctgcatgcatgcggacatcgtagcagcggtggacgctgcggtgaaggacggcgttgacatcatctccatatccctcggacgaagttttcccatagccttccacgatgacgtcctcgcggtcgccttgtttggtgcagagcgcaaaggcgtcttcgtcgtcgtagccggcggcaatgccggcccgcaggcagctagggtggtcaactcagcgccgtggatgaccaccgtaggcgccgccaccgtggacaggctgttcccggcgcacctcacgctcgggaacggcgtcgtgctcgccggccagtccctttataccatgcatgccaagggcacgcccatgatcccgttagtgtccacggacggcatcaattcgtggacgcccgacacggtcatggggaaaatcgtggtgtgcatgttcggagcaagcgacgcggatggcatcttgttgcagaatgctggtggagcagggatagttgatgtggattcttacgagtggtctcgtgatggttccgcgctttattccttcacccttccgggtctcacgctcagctacaccgccggcgagaagctcagggcgtacatggtctcggtgccctatccggtggcgtccttgagcttcggctgtgagacggtcatcagccgcaagaatcgggcgccggtggtggcgggattctcgtcgcgtggccccaatcctgccgcacccgagctcctcaagcccgatgtcgtcgcgccgggagtgaacattcttgcggcctggtcaggcgacgcaccactagcgggggtcttcgttcccgatgggaggagagcgaactacaacatcatatcggggacttccatggcgtgcccgcacgtcgctggcatcgcggcactgatcaagaagaagcacccaagctggacgccggccatggtccggagcgcattaatgacaaccgccgggacggtcgacaacagaggcggacacatcctcgacaacggtcacacggacacccttggccgcaccgacaacgtcagggtcgcgacgccgctggtggccggtgccgggcacgtccacccggacctcgctctggacccgggcctcgtctacgacgccggcgagcgcgactatgtcgacttcctgtgcgccctgaactacaccgcggaacagatgcggcggttcgttccggacttcgtcaagtgcacgggaacgctcgccggcggccccgccggcctgaactacccgtcattcgtcgtggccttcgacagccgcaccgacgtcgtccgcacactgacgcggaccgtgaccaaagtgtccgaggaggcggaggtgtacaccgcgactgtcgtcgcgccggagcacgtgaaggtgactgtcacgccgacgaccttggagttcaaggagcatatggagacgaggagctactcggtggagttcagaaatgaagccggatggcaccgagaggcagggtgggacttcgggcagatcatctgggcgaacgggaagcataaagtcaggagcccggtggcgttccagtggaagaac

SEQ ID NO: 1389 - DNA, 2349 bp, Artificial sequence
  Mir resistant mutated nucleotide sequence
atggcgacaaccatcaccaggctcttgcaccacctagcgctgttcctcctcattgtcgagttcgccgacgcagttctcatcccaaagaccaagaaccacgctgcgttgaagcctcaggcatcgagcaccacctacatcgttcatgccaacgacctcgccaagccgccccactttcgctccctggaggagtggtaccgttccatggtgatcacccacgcctcttccactcgggcggcgagctccagcagcatcctgtacacctacgacaccgtcatgcacgggttcgcggtccagctcactggcgacgaggcccggctcatgtccagcgcgcccggcgtcatcggcgtgtacgaggacagggtgctctaccctcaaaccacgaggtcgccggggttcatgggtctcgaacccggcaacggcgcctggaagcaggccgacttcggtgacggcgtcatcatcggcttcgtcgacaccggcatatggcccgagagcgcgagcttcgacgacagcgggctcggccccgtccggtcgagctggcggggcaagtgcgtcgacgcccacgacttcaacgctagcttgtgcaacaacaagctggtcggagccaaggccttcatcactcctgctgcggacgccgtggaagagaggaagagccgtggcgtctcctccccgagggacaaggaaggacacggcacgcacgtggcctcgacggccgccggtgctgaggtccggaacgccagcctctacatgttctcccgggggaccgcgcggggaatggcacccaaggcgaggatcgccatgtacaaggcatgcggcgtgggaggctactgcaggaatgcggacatcgtagcggcggtggacgctgcggtgaaggacggcgttgacatcatttccatgtccgtcggaggagctcgtcccacagccttccacgacgacgtcgtcgcgatcgccctcttcggtgcggagcgcaaaggcgtcttcgtcgtcctctctgctggcaacaacggcccgcaggcaactacggtgatcaactcggcgccgtggatgaccaccgtaggcgccgccaccgtggaccggcagtacccggcgcagctcacgctcgggaacggcgtcgtgctcgccggtcagtccctttataccatgcatgccaagggcacacacatgatccagttagtgtccacggacgtcttcaataggtggcacagctggacgcccgacacggtcatgggaaaaatcatggtgtgcatgcacgaagcaagcgacgtggatggcatcatcttgcagaatgctggtggagcagggatagttgatgtggatcctcaggagtggtctcgagatggttccgtggcatatgccttcactcttccgggtctcacgcttagctacaccgctggcgagaagctcagggcgtacatggcatcggtgccctatccggtggcgtccttcagcttcgcctgtgagacggtcattggccgcaacaaccgggcgccggtggtggcgggattctcgtcgcggggccccaaccttgtcgcactagagctcctcaagcccgacgtcgtcgcgccgggagtgaacattcttgcggcctggtcgggcgacgcatctgtctcgggatattccgacgacggcaggagagccgactacaacatcatctccggaacgtccatgtcgtgcccccacgtcgctggcatcgcggcgctgatcaagaagaagcacccaagctggacgcctgccatggtcagaagcgcattaatgacaacggcccgtacggtcgacaaccgaggcggatatatcctcgacaacggtcatagcgtcatcgtgggccgcagaatcgacaacttcagggtcgcgacgccgctggtggccggggccgggcacgtccagccggacctcgcgctggacccgggcctcgtctacgacgccggcgagcacgactacgtccacttcctgtgcgccctgaactacaccgctgagcagatgcggcggttcgttccggacttcgtcaactgcacaggaacgctcgccggcggccccgccagcctcaactacccgtcgttcgtcgtggccttcgagaactgcaccgacgtacgcacgctgacgcggacgctgaccaaagtgtccgaggaggcggagacgtacagtgtcaccgtcgtggcgccggagcacgtgaaggtgaccgtcacgccgacgaccttggagttcaaggagcagatggagacgaggagctactcggtggagttcagaaatgaagccggagggaacccggaggcaggcgggtgggacttcgggcagatcagctgggagaacgggaagcataaagtcaggagcccggtggcgttccactggaagaac

SEQ ID NO: 1390 - DNA, 2349 bp, Artificial sequence
  Mir resistant mutated nucleotide sequence
atggcgacaaccatcaccaggctcttgcaccacctagcgctgttcctcctcattgtcgagttcgccgacgcagttctcatcccaaagaccaagaaccacgctgcgttgaagcctcaggcatcgagcaccacctacatcgttcatgccaacgacctcgccaagccgccccactttcgctccctggaggagtggtaccgttccatggtgatcacccacgcctcttccactcgggcggcgagctccagcagcatcctgtacacctacgacaccgtcatgcacgggttcgcggtccagctcactggcgacgaggcccggctcatgtccagcgcgcccggcgtcatcggcgtgtacgaggacagggtgctctaccctcaaaccacgaggtcgccggggttcatgggtctcgaacccggcaacggcgcctggaagcaggccgacttcggtgacggcgtcatcatcggcttcgtcgacaccggcatatggcccgagagcgcgagcttcgacgacagcgggctcggccccgtccggtcgagctggcggggcaagtgcgtcgacgcccacgacttcaacgctagcttgtgcaacaacaagctggtcggagccaaggccttcatcactcctgctgcggacgccgtggaagagaggaagagccgtggcgtctcctccccgagggacaaggaaggacacggcacgcacgtggcctcgacggccgccggtgctgaggtccggaacgccagcctctacatgttctcccgggggaccgcgcggggaatggcacccaaggcgaggatcgccatgtacaaggcatgcggcgtgggaggctactgcaggaatgcggacatcgtagcggcggtggacgctgcggtgaaggacggcgttgacatcatttccatgtccgtcggaggagctcgtcccacagccttccacgacgacgtcgtcgcgatcgccctcttcggtgcggagcgcaaaggcgtcttcgtcgtcctctctgctggcaacaacggcccgcaggcaactacggtgatcaactcggcgccgtggatgaccaccgtaggcgccgccaccgtggaccggcagtacccggcgcagctcacgctcgggaacggcgtcgtgctcgccggtcagtccctttataccatgcatgccaagggcacacacatgatccagttagtgtccacggacgtcttcaataggtggcacagctggacgcccgacacggtcatgggaaaaatcatggtgtgcatgcacgaagcaagcgacgtggatggcatcatcttgcagaatgctggtggagcagggatagttgatgtggatcctcaggagtggtctcgagatggttccgtggcatatgccttcactcttccgggtctcacgcttagctacaccgctggcgagaagctcagggcgtacatggcatcggtgccctatccggtggcgtccttcagcttcgcctgtgagacggtcattggccgcaacaaccgggcgccggtggtggcgggattctcgtcgcggggccccaaccttgtcgcactagagctcctcaagcccgacgtcgtcgcgccgggagtgaacattcttgcggcctggtcgggcgacgcatctgtctcgggatattccgacgacggcaggagagccgactacaacatcatctccggaacgtccatgtcgtgcccccacgtcgctggcatcgcggcgctgatcaagaagaagcacccaagctggacgcctgccatggtaagaagcgcattaatgacaacggcccgtacggtcgacaaccgaggcggatatatcctcgacaacggtcatagcgtcatcgtgggccgcagaatcgacaacttcagggtcgcgacgccgctggtggccggggccgggcacgtccagccggacctcgcgctggacccgggcctcgtctacgacgccggcgagcacgactacgtccacttcctgtgcgccctgaactacaccgctgagcagatgcggcggttcgttccggacttcgtcaactgcacaggaacgctcgccggcggccccgccagcctcaactacccgtcgttcgtcgtggccttcgagaactgcaccgacgtacgcacgctgacgcggacgctgaccaaagtgtccgaggaggcggagacgtacagtgtcaccgtcgtggcgccggagcacgtgaaggtgaccgtcacgccgacgaccttggagttcaaggagcagatggagacgaggagctactcggtggagttcagaaatgaagccggagggaacccggaggcaggcgggtgggacttcgggcagatcagctgggagaacgggaagcataaagtcaggagcccggtggcgttccactggaagaac

SEQ ID NO: 1391 - DNA, 2349 bp, Artificial sequence; identical to SEQ ID NO: 1390
  Mir resistant mutated nucleotide sequence

SEQ ID NO: 1392 - DNA, 2349 bp, Artificial sequence; identical to SEQ ID NO: 1390
  Mir resistant mutated nucleotide sequence

SEQ ID NO: 1393 - DNA, 2349 bp, Artificial sequence
  Mir resistant mutated nucleotide sequence
atggcgacaaccatcaccaggctcttgcaccacctagcgctgttcctcctcattgtcgagttcgccgacgcagttctcatcccaaagaccaagaaccacgctgcgttgaagcctcaggcatcgagcaccacctacatcgttcatgccaacgacctcgccaagccgccccactttcgctccctggaggagtggtaccgttccatggtgatcacccacgcctcttccactcgggcggcgagctccagcagcatcctgtacacctacgacaccgtcatgcacgggttcgcggtccagctcactggcgacgaggcccggctcatgtccagcgcgcccggcgtcatcggcgtgtacgaggacagggtgctctaccctcaaaccacgaggtcgccggggttcatgggtctcgaacccggcaacggcgcctggaagcaggccgacttcggtgacggcgtcatcatcggcttcgtcgacaccggcatatggcccgagagcgcgagcttcgacgacagcgggctcggccccgtccggtcgagctggcggggcaagtgcgtcgacgcccacgacttcaacgctagcttgtgcaacaacaagctggtcggagccaaggccttcatcactcctgctgcggacgccgtggaagagaggaagagccgtggcgtctcctccccgagggacaaggaaggacacggcacgcacgtggcctcgacggccgccggtgctgaggtccggaacgccagcctctacatgttctcccgggggaccgcgcggggaatggcacccaaggcgaggatcgccatgtacaaggcatgcggcgtgggaggctactgcaggaatgcggacatcgtagcggcggtggacgctgcggtgaaggacggcgttgacatcatttccatgtccgtcggaggagctcgtcccacagccttccacgacgacgtcgtcgcgatcgccctcttcggtgcggagcgcaaaggcgtcttcgtcgtcctctctgctggcaacaacggcccgcaggcaactacggtgatcaactcggcgccgtggatgaccaccgtaggcgccgccaccgtggaccggcagtacccggcgcagctcacgctcgggaacggcgtcgtgctcgccggtcagtccctttataccatgcatgccaagggcacacacatgatccagttagtgtccacggacgtcttcaataggtggcacagctggacgcccgacacggtcatgggaaaaatcatggtgtgcatgcacgaagcaagcgacgtggatggcatcatcttgcagaatgctggtggagcagggatagttgatgtggatcctcaggagtggtctcgagatggttccgtggcatatgccttcactcttccgggtctcacgcttagctacaccgctggcgagaagctcagggcgtacatggcatcggtgccctatccggtggcgtccttcagcttcgcctgtgagacggtcattggccgcaacaaccgggcgccggtggtggcgggattctcgtcgcggggccccaaccttgtcgcactagagctcctcaagcccgacgtcgtcgcgccgggagtgaacattcttgcggcctggtcgggcgacgcatctgtctcgggatattccgacgacggcaggagagccgactacaacatcatctccggaacgtccatgtcgtgcccccacgtcgctggcatcgcggcgctgatcaagaagaagcacccaagctggacgcctgccatggtccggagcgcattaatgacaacggcccgtacggtcgacaaccgaggcggatatatcctcgacaacggtcatagcgtcatcgtgggccgcagaatcgacaacttcagggtcgcgacgccgctggtggccggggccgggcacgtccagccggacctcgcgctggacccgggcctcgtctacgacgccggcgagcacgactacgtccacttcctgtgcgccctgaactacaccgctgagcagatgcggcggttcgttccggacttcgtcaactgcacaggaacgctcgccggcggccccgccagcctcaactacccgtcgttcgtcgtggccttcgagaactgcaccgacgtacgcacgctgacgcggacgctgaccaaagtgtccgaggaggcggagacgtacagtgtcaccgtcgtggcgccggagcacgtgaaggtgaccgtcacgccgacgaccttggagttcaaggagcagatggagacgaggagctactcggtggagttcagaaatgaagccggagggaacccggaggcaggcgggtgggacttcgggcagatcagctgggagaacgggaagcataaagtcaggagcccggtggcgttccactggaagaac

SEQ ID NO: 1394 - DNA, 1251 bp, Artificial sequence
  Mir resistant mutated nucleotide sequence
atgcgcacgcccttcgtggatcctcacagcgccgccggccggctcaaacaaagattagcccgaatattaacgcgctccacctgcaccaccaataacgccgctgccgccagctcgggcggcacggccacggccacggccttcgtcagcctcgccaagaccaacaacgcccacaccgccgcctcctcatctcacccggagccggaagcgccgccctccccgtacttctgcacgccctgcacctacgactacgagcgccccaaggccgaccgcgggacgcgcccgcgccgcacccgcagcgcctcgctcatacacatctccgtcgactgcacgggcggggccgcctccggccgccgctccgcccactccgacgcgccgcttctgcagcacctcttgtcggaacaggtgccggcgagggacgtcgtcggcggcacgaagcagagcaagagcggcggcaggagcaagctgacgacgacgcggtcgtctccgtcggcgtcgaggcggcactgctcgtcgtcgtcctcctcctggggccgcgcccgcgcgcgccggcccagcagcacgcccacgccctacagctggtcgtcgtcgtcgtcgtcgcggtcgtccgccaccgcgacggacgacgagctcgcgccgttcagcggcagcgacgacgaggagggcggcggcggcggcgaggcggccgacatgcggacgctcttctcgtccctcagcttctcgtccgaccccacatcatccgagttctaccgcaccaacggcggccgcagcggcaacggcaacgccagcaggaggagccacaggaacacggcgagtcgtcgtcgcggccgccgcgcgcgcgcgccacggcgtgcgctgtcgagatccagcggcggcgacccggcagcaccgcccgacgccttccggccgctggtgtccgtggagacgacgaggcgcactacggagcgcagcgagaggagcaaggaagacaagggtctcaataacgccaagaagctgacgatgacgatgctgggcgcggccgcagccgcggaggaggaggccgccggcgcgggcatggctgtggtgaagcgctcgagcaacccttacctggacttccgcagctccatggtggagatggtggtggagcggcgcatcgccagcgtggggaagatggaggagctcctgggctcgtacctctcgctcaactcgccgcgccaccacccggccatcctcgctgccttcgaggacgtctgggaggccgtcttcggcgaggag

SEQ ID NO: 1395 - DNA, 1251 bp, Artificial sequence
  Mir resistant mutated nucleotide sequence
atgcgcacgcccttcgtggatcctcacagcgccgccggccggctcaaacagagattagcccgaatattaacgcgctccacctgcaccaccaataacgccgctgccgccagctcgggcggcacggccacggccacggccttcgtcagcctcgccaagaccaacaacgcccacaccgccgcctcctcatctcacccggagccggaagcgccgccctccccgtacttctgcacgccctgcacctacgactacgagcgccccaaggccgaccgcgggacgcgcccgcgccgcacccgcagcgcctcgctcatacacatctccgtcgactgcacgggcggggccgcctccggccgccgctccgcccactccgacgcgccgcttctgcagcacctcttgtcggaacaggtgccggcgagggacgtcgtcggcggcacgaagcagagcaagagcggcggcaggagcaagctgacgacgacgcggtcgtctccgtcggcgtcgaggcggcactgctcgtcgtcgtcctcctcctggggccgcgcccgcgcgcgccggcccagcagcacgcccacgccctacagctggtcgtcgtcgtcgtcgtcgcggtcgtccgccaccgcgacggacgacgagctcgcgccgttcagcggcagcgacgacgaggagggcggcggcggcggcgaggcggccgacatgcggacgctcttctcgtccctcagcttctcgtccgaccccacatcatccgagttctaccgcaccaacggcggccgcagcggcaacggcaacgccagcaggaggagccacaggaacacggcgagtcgtcgtcgcggccgccgcgcgcgcgcgccacggcgtgcgctgtcgagatccagcggcggcgacccggcagcaccgcccgacgccttccggccgctggtgtccgtggagacgacgaggcgcactacggagcgcagcgagaggagcaaggaagacaagggtctcaataacgccaagaagctgacgatgacgatgctgggcgcggccgcagccgcggaggaggaggccgccggcgcgggcatggctgtggtgaagcgctcgagcaacccttacctggacttccgcagctccatggtggagatggtggtggagcggcgcatcgccagcgtggggaagatggaggagctcctgggctcgtacctctcgctcaactcgccgcgccaccacccggccatcctcgctgccttcgaggacgtctgggaggccgtcttcggcgaggag

SEQ ID NO: 1396 - DNA, 1251 bp, Artificial sequence
  Mir resistant mutated nucleotide sequence
atgcgcacgcccttcgtggatcctcacagcgccgccggccggctcaaacaacgcttagcccgaatattaacgcgctccacctgcaccaccaataacgccgctgccgccagctcgggcggcacggccacggccacggccttcgtcagcctcgccaagaccaacaacgcccacaccgccgcctcctcatctcacccggagccggaagcgccgccctccccgtacttctgcacgccctgcacctacgactacgagcgccccaaggccgaccgcgggacgcgcccgcgccgcacccgcagcgcctcgctcatacacatctccgtcgactgcacgggcggggccgcctccggccgccgctccgcccactccgacgcgccgcttctgcagcacctcttgtcggaacaggtgccggcgagggacgtcgtcggcggcacgaagcagagcaagagcggcggcaggagcaagctgacgacgacgcggtcgtctccgtcggcgtcgaggcggcactgctcgtcgtcgtcctcctcctggggccgcgcccgcgcgcgccggcccagcagcacgcccacgccctacagctggtcgtcgtcgtcgtcgtcgcggtcgtccgccaccgcgacggacgacgagctcgcgccgttcagcggcagcgacgacgaggagggcggcggcggcggcgaggcggccgacatgcggacgctcttctcgtccctcagcttctcgtccgaccccacatcatccgagttctaccgcaccaacggcggccgcagcggcaacggcaacgccagcaggaggagccacaggaacacggcgagtcgtcgtcgcggccgccgcgcgcgcgcgccacggcgtgcgctgtcgagatccagcggcggcgacccggcagcaccgcccgacgccttccggccgctggtgtccgtggagacgacgaggcgcactacggagcgcagcgagaggagcaaggaagacaagggtctcaataacgccaagaagctgacgatgacgatgctgggcgcggccgcagccgcggaggaggaggccgccggcgcgggcatggctgtggtgaagcgctcgagcaacccttacctggacttccgcagctccatggtggagatggtggtggagcggcgcatcgccagcgtggggaagatggaggagctcctgggctcgtacctctcgctcaactcgccgcgccaccacccggccatcctcgctgccttcgaggacgtctgggaggccgtcttcggcgaggag

SEQ ID NO: 1397 - DNA, 1251 bp, Artificial sequence
  Mir resistant mutated nucleotide sequence
atgcgcacgcccttcgtggatcctcacagcgccgccggccggctcaaacaaagactggcccgaatactgacgcgctccacctgcaccaccaataacgccgctgccgccagctcgggcggcacggccacggccacggccttcgtcagcctcgccaagaccaacaacgcccacaccgccgcctcctcatctcacccggagccggaagcgccgccctccccgtacttctgcacgccctgcacctacgactacgagcgccccaaggccgaccgcgggacgcgcccgcgccgcacccgcagcgcctcgctcatacacatctccgtcgactgcacgggcggggccgcctccggccgccgctccgcccactccgacgcgccgcttctgcagcacctcttgtcggaacaggtgccggcgagggacgtcgtcggcggcacgaagcagagcaagagcggcggcaggagcaagctgacgacgacgcggtcgtctccgtcggcgtcgaggcggcactgctcgtcgtcgtcctcctcctggggccgcgcccgcgcgcgccggcccagcagcacgcccacgccctacagctggtcgtcgtcgtcgtcgtcgcggtcgtccgccaccgcgacggacgacgagctcgcgccgttcagcggcagcgacgacgaggagggcggcggcggcggcgaggcggccgacatgcggacgctcttctcgtccctcagcttctcgtccgaccccacatcatccgagttctaccgcaccaacggcggccgcagcggcaacggcaacgccagcaggaggagccacaggaacacggcgagtcgtcgtcgcggccgccgcgcgcgcgcgccacggcgtgcgctgtcgagatccagcggcggcgacccggcagcaccgcccgacgccttccggccgctggtgtccgtggagacgacgaggcgcactacggagcgcagcgagaggagcaaggaagacaagggtctcaataacgccaagaagctgacgatgacgatgctgggcgcggccgcagccgcggaggaggaggccgccggcgcgggcatggctgtggtgaagcgctcgagcaacccttacctggacttccgcagctccatggtggagatggtggtggagcggcgcatcgccagcgtggggaagatggaggagctcctgggctcgtacctctcgctcaactcgccgcgccaccacccggccatcctcgctgccttcgaggacgtctgggaggccgtcttcggcgaggag

SEQ ID NO: 1398 - DNA, 2934 bp, Artificial sequence
  Mir resistant mutated nucleotide sequence
atgagaggacaaatccttgcctgcctccctctgaatctgatcacactcctctcgctcttcctgagctgcacctgccaaatcgattcccaaacacacgccctcctccagttcaaggccgggttgaacgaccctctgaaccacctcgtgtcatggacgaacgccacctccaagtgccgcttcttcggcgtccggtgcgacgacgatggctccggcacggtcaccgagatctcgctgtcgaacatgaacctctccggcgggatctcgccgtccgtcggggcgctgcacggcctagcgcggctgcagctcgactccaactcgctgtcggggcccgtgccgcctgagctggcgaaatgcacgcagctcaggttcctgaacctatcctacaacagcctcgccggagagctgccggatttaagtgcattaacagcactccaggccctcgacgtcgagaacaattacttcaccgggcgcttcccggcgtgggtcggcaacctgtccggcctgaccacgctcagcgtcggcatgaacagctacgacccaggggagacgccgccgagcatcggcaacctcaggaacctgacgtacctgtacctggccggcagcagcttgacgggggtgataccggactccatcttcgggctcaccgcgctggagacgctggacatgtccatgaacaacctcgccggcgcgatcccgccggccatcggaaacctccggaacctgtggaaaatcgagctgtacaagaacaacctcaccggcgagctcccaccggagctgggggaactgaccaagctgcgggagatcgacgtgtcccggaaccagatcagcggcggcatcccggcggcgttcgcggcgctcacggggttcacggtgatccagctctaccacaacaacctgtccgggccgatcccggaggagtggggcgacctgcggtacctgacgagcttctccatctacgagaaccggttctccggcgagttcccggccaacttcggccggttctcaccgctcaacagcgtcgacatctccgagaacggcttcgtcgggccattcccgaggtacctgtgccatggcaacaacctcgagtaccttctcgctctccagaacggcttctccggtgagttcccggaggagtacgcggtgtgcaagagcctgcaacgcttccggatcaacaagaaccggttcaccggcgacctcccggaaggcctgtgggggctcccggcggcgacgatcatcgacgtgtccgacaacgggttcaccggagccatgtcgccgctgatcgggcaggcgcagagcctcaaccagctgtggctgcagaacaacaagctcggcggagcaataccgccggaaatcggccggctcggccaggtgcagaagctctacctgtccaacaacaccttctcgggctccataccgtcggagatcggcagcctgtcgcagctgacggcgctgcacctggaggacaacgcgttcagcggcgccttgccggacgacatcggcggctgcatcaggctcgtcgagatcgacgtctcccagaacgcgctgtcggggccgattccggcctcgctgtcgctgctgtcgtcgctcaactcgctcaacctctccaacaacgagctcagcgggccgatcccgacgagcctccaggcgctcaaactcagctccatcgacttctcctcgaaccagctcaccgggaacgtgccgccggggcttctggtgctcaccggcggcggccaggcgtttgcccggaaccccggcctctgcgtggacggcaggtccgacctcagcgcctgcaatgtggacggcggccgcaaggacggcctcctcgccaggaagtcgcagcttgtgctggtgctggtccttgtctcggcgacgctgctgctggtggccggcatcgtgtttgtgagctaccggagcttcaagctcgaggaggtgaagaagagggacctggagcacggcgacgggtgcgggcagtggaagctggagtcgttccacccactggagctggacgccgacgagatctgcgccgtcggggaggagaacctgatagggtcgggcggaacggggcgtgtgtaccggctggagctcaagggccgcggcggcgccggcgccggcggagtggtggccgtgaagcggctgtggaagagcaacgcggcgcgggtgatggccgccgagatggccatcctcggcaaggtccggcaccggaacatcctgaagctgcacgcgtgcctgtcgcgcggcgagctcaacttcatcgtctacgagtacatgccgcgcggcaacctgcaccaggcgctccggcgggaggccaagggcagcgggcggccggagctggactggccgcgccggtgcaagatcgcgctcggcgccgccaaggggatcatgtacctccaccacgactgcacgccggccgtcatccaccgcgacatcaagtccaccaacatcctgctcgacgaggactacgaggccaagatcgccgacttcggcatcgccaaggtcgccgcggatgcctccgactccgagttcagctgcttcgccggaacccatggctacctcgcgcccgagctggcctactcgctcagagtgacggagaagacggacgtgtacagcttcggcgtggtgctgctggagctggtcaccggccggagcccgatcgaccggcggttcggcgagggcagggacatcgtgtactggctgtccagcaagctcgcctcggagagcctcgacgacgtgctggacccgcgggtggccgtggtggccagggagagggacgacatgctcaaggtgctcaagatcgccgtgctttgcaccgccaagctgccggcggggcggccgaccatgagggacgtggtgaagatgctcaccgacgccggcgcggggccctgcagcccgcgtggacagccgccggtaagggtctgcagcaacaagagctgctgc

SEQ ID NO: 1399 - DNA, 2934 bp, Artificial sequence
  Mir resistant mutated nucleotide sequence
atgagaggacaaatccttgcctgcctccctctgaatctgatcacactcctctcgctcttcctgagctgcacctgccaaatcgattcccaaacacacgccctcctccagttcaaggccgggttgaacgaccctctgaaccacctcgtgtcatggacgaacgccacctccaagtgccgcttcttcggcgtccggtgcgacgacgatggctccggcacggtcaccgagatctcgctgtcgaacatgaacctctccggcgggatctcgccgtccgtcggggcgctgcacggcctagcgcggctgcagctcgactccaactcgctgtcggggcccgtgccgcctgagctggcgaaatgcacgcagctcaggttcctgaacctatcctacaacagcctcgccggagagctgccggacttaagtgcattaacagcactccaggccctcgacgtcgagaacaattacttcaccgggcgcttcccggcgtgggtcggcaacctgtccggcctgaccacgctcagcgtcggcatgaacagctacgacccaggggagacgccgccgagcatcggcaacctcaggaacctgacgtacctgtacctggccggcagcagcttgacgggggtgataccggactccatcttcgggctcaccgcgctggagacgctggacatgtccatgaacaacctcgccggcgcgatcccgccggccatcggaaacctccggaacctgtggaaaatcgagctgtacaagaacaacctcaccggcgagctcccaccggagctgggggaactgaccaagctgcgggagatcgacgtgtcccggaaccagatcagcggcggcatcccggcggcgttcgcggcgctcacggggttcacggtgatccagctctaccacaacaacctgtccgggccgatcccggaggagtggggcgacctgcggtacctgacgagcttctccatctacgagaaccggttctccggcgagttcccggccaacttcggccggttctcaccgctcaacagcgtcgacatctccgagaacggcttcgtcgggccattcccgaggtacctgtgccatggcaacaacctcgagtaccttctcgctctccagaacggcttctccggtgagttcccggaggagtacgcggtgtgcaagagcctgcaacgcttccggatcaacaagaaccggttcaccggcgacctcccggaaggcctgtgggggctcccggcggcgacgatcatcgacgtgtccgacaacgggttcaccggagccatgtcgccgctgatcgggcaggcgcagagcctcaaccagctgtggctgcagaacaacaagctcggcggagcaataccgccggaaatcggccggctcggccaggtgcagaagctctacctgtccaacaacaccttctcgggctccataccgtcggagatcggcagcctgtcgcagctgacggcgctgcacctggaggacaacgcgttcagcggcgccttgccggacgacatcggcggctgcatcaggctcgtcgagatcgacgtctcccagaacgcgctgtcggggccgattccggcctcgctgtcgctgctgtcgtcgctcaactcgctcaacctctccaacaacgagctcagcgggccgatcccgacgagcctccaggcgctcaaactcagctccatcgacttctcctcgaaccagctcaccgggaacgtgccgccggggcttctggtgctcaccggcggcggccaggcgtttgcccggaaccccggcctctgcgtggacggcaggtccgacctcagcgcctgcaatgtggacggcggccgcaaggacggcctcctcgccaggaagtcgcagcttgtgctggtgctggtccttgtctcggcgacgctgctgctggtggccggcatcgtgtttgtgagctaccggagcttcaagctcgaggaggtgaagaagagggacctggagcacggcgacgggtgcgggcagtggaagctggagtcgttccacccactggagctggacgccgacgagatctgcgccgtcggggaggagaacctgatagggtcgggcggaacggggcgtgtgtaccggctggagctcaagggccgcggcggcgccggcgccggcggagtggtggccgtgaagcggctgtggaagagcaacgcggcgcgggtgatggccgccgagatggccatcctcggcaaggtccggcaccggaacatcctgaagctgcacgcgtgcctgtcgcgcggcgagctcaacttcatcgtctacgagtacatgccgcgcggcaacctgcaccaggcgctccggcgggaggccaagggcagcgggcggccggagctggactggccgcgccggtgcaagatcgcgctcggcgccgccaaggggatcatgtacctccaccacgactgcacgccggccgtcatccaccgcgacatcaagtccaccaacatcctgctcgacgaggactacgaggccaagatcgccgacttcggcatcgccaaggtcgccgcggatgcctccgactccgagttcagctgcttcgccggaacccatggctacctcgcgcccgagctggcctactcgctcagagtgacggagaagacggacgtgtacagcttcggcgtggtgctgctggagctggtcaccggccggagcccgatcgaccggcggttcggcgagggcagggacatcgtgtactggctgtccagcaagctcgcctcggagagcctcgacgacgtgctggacccgcgggtggccgtggtggccagggagagggacgacatgctcaaggtgctcaagatcgccgtgctttgcaccgccaagctgccggcggggcggccgaccatgagggacgtggtgaagatgctcaccgacgccggcgcggggccctgcagcccgcgtggacagccgccggtaagggtctgcagcaacaagagctgctgc

SEQ ID NO: 1400 - DNA, 2934 bp, Artificial sequence
  Mir resistant mutated nucleotide sequence
atgagaggacaaatccttgcctgcctccctctgaatctgatcacactcctctcgctcttcctgagctgcacctgccaaatcgattcccaaacacacgccctcctccagttcaaggccgggttgaacgaccctctgaaccacctcgtgtcatggacgaacgccacctccaagtgccgcttcttcggcgtccggtgcgacgacgatggctccggcacggtcaccgagatctcgctgtcgaacatgaacctctccggcgggatctcgccgtccgtcggggcgctgcacggcctagcgcggctgcagctcgactccaactcgctgtcggggcccgtgccgcctgagctggcgaaatgcacgcagctcaggttcctgaacctatcctacaacagcctcgccggagagctgccggatctgagtgcactgacagcactccaggccctcgacgtcgagaacaattacttcaccgggcgcttcccggcgtgggtcggcaacctgtccggcctgaccacgctcagcgtcggcatgaacagctacgacccaggggagacgccgccgagcatcggcaacctcaggaacctgacgtacctgtacctggccggcagcagcttgacgggggtgataccggactccatcttcgggctcaccgcgctggagacgctggacatgtccatgaacaacctcgccggcgcgatcccgccggccatcggaaacctccggaacctgtggaaaatcgagctgtacaagaacaacctcaccggcgagctcccaccggagctgggggaactgaccaagctgcgggagatcgacgtgtcccggaaccagatcagcggcggcatcccggcggcgttcgcggcgctcacggggttcacggtgatccagctctaccacaacaacctgtccgggccgatcccggaggagtggggcgacctgcggtacctgacgagcttctccatctacgagaaccggttctccggcgagttcccggccaacttcggccggttctcaccgctcaacagcgtcgacatctccgagaacggcttcgtcgggccattcccgaggtacctgtgccatggcaacaacctcgagtaccttctcgctctccagaacggcttctccggtgagttcccggaggagtacgcggtgtgcaagagcctgcaacgcttccggatcaacaagaaccggttcaccggcgacctcccggaaggcctgtgggggctcccggcggcgacgatcatcgacgtgtccgacaacgggttcaccggagccatgtcgccgctgatcgggcaggcgcagagcctcaaccagctgtggctgcagaacaacaagctcggcggagcaataccgccggaaatcggccggctcggccaggtgcagaagctctacctgtccaacaacaccttctcgggctccataccgtcggagatcggcagcctgtcgcagctgacggcgctgcacctggaggacaacgcgttcagcggcgccttgccggacgacatcggcggctgcatcaggctcgtcgagatcgacgtctcccagaacgcgctgtcggggccgattccggcctcgctgtcgctgctgtcgtcgctcaactcgctcaacctctccaacaacgagctcagcgggccgatcccgacgagcctccaggcgctcaaactcagctccatcgacttctcctcgaaccagctcaccgggaacgtgccgccggggcttctggtgctcaccggcggcggccaggcgtttgcccggaaccccggcctctgcgtggacggcaggtccgacctcagcgcctgcaatgtggacggcggccgcaaggacggcctcctcgccaggaagtcgcagcttgtgctggtgctggtccttgtctcggcgacgctgctgctggtggccggcatcgtgtttgtgagctaccggagcttcaagctcgaggaggtgaagaagagggacctggagcacggcgacgggtgcgggcagtggaagctggagtcgttccacccactggagctggacgccgacgagatctgcgccgtcggggaggagaacctgatagggtcgggcggaacggggcgtgtgtaccggctggagctcaagggccgcggcggcgccggcgccggcggagtggtggccgtgaagcggctgtggaagagcaacgcggcgcgggtgatggccgccgagatggccatcctcggcaaggtccggcaccggaacatcctgaagctgcacgcgtgcctgtcgcgcggcgagctcaacttcatcgtctacgagtacatgccgcgcggcaacctgcaccaggcgctccggcgggaggccaagggcagcgggcggccggagctggactggccgcgccggtgcaagatcgcgctcggcgccgccaaggggatcatgtacctccaccacgactgcacgccggccgtcatccaccgcgacatcaagtccaccaacatcctgctcgacgaggactacgaggccaagatcgccgacttcggcatcgccaaggtcgccgcggatgcctccgactccgagttcagctgcttcgccggaacccatggctacctcgcgcccgagctggcctactcgctcagagtgacggagaagacggacgtgtacagcttcggcgtggtgctgctggagctggtcaccggccggagcccgatcgaccggcggttcggcgagggcagggacatcgtgtactggctgtccagcaagctcgcctcggagagcctcgacgacgtgctggacccgcgggtggccgtggtggccagggagagggacgacatgctcaaggtgctcaagatcgccgtgctttgcaccgccaagctgccggcggggcggccgaccatgagggacgtggtgaagatgctcaccgacgccggcgcggggccctgcagcccgcgtggacagccgccggtaagggtctgcagcaacaagagctgctgc

SEQ ID NO: 1401 - DNA, 2934 bp, Artificial sequence
  Mir resistant mutated nucleotide sequence
atgagaggacaaatccttgcctgcctccctctgaatctgatcacactcctctcgctcttcctgagctgcacctgccaaatcgattcccaaacacacgccctcctccagttcaaggccgggttgaacgaccctctgaaccacctcgtgtcatggacgaacgccacctccaagtgccgcttcttcggcgtccggtgcgacgacgatggctccggcacggtcaccgagatctcgctgtcgaacatgaacctctccggcgggatctcgccgtccgtcggggcgctgcacggcctagcgcggctgcagctcgactccaactcgctgtcggggcccgtgccgcctgagctggcgaaatgcacgcagctcaggttcctgaacctatcctacaacagcctcgccggagagctgccggatttatccgcattaacagcactccaggccctcgacgtcgagaacaattacttcaccgggcgcttcccggcgtgggtcggcaacctgtccggcctgaccacgctcagcgtcggcatgaacagctacgacccaggggagacgccgccgagcatcggcaacctcaggaacctgacgtacctgtacctggccggcagcagcttgacgggggtgataccggactccatcttcgggctcaccgcgctggagacgctggacatgtccatgaacaacctcgccggcgcgatcccgccggccatcggaaacctccggaacctgtggaaaatcgagctgtacaagaacaacctcaccggcgagctcccaccggagctgggggaactgaccaagctgcgggagatcgacgtgtcccggaaccagatcagcggcggcatcccggcggcgttcgcggcgctcacggggttcacggtgatccagctctaccacaacaacctgtccgggccgatcccggaggagtggggcgacctgcggtacctgacgagcttctccatctacgagaaccggttctccggcgagttcccggccaacttcggccggttctcaccgctcaacagcgtcgacatctccgagaacggcttcgtcgggccattcccgaggtacctgtgccatggcaacaacctcgagtaccttctcgctctccagaacggcttctccggtgagttcccggaggagtacgcggtgtgcaagagcctgcaacgcttccggatcaacaagaaccggttcaccggcgacctcccggaaggcctgtgggggctcccggcggcgacgatcatcgacgtgtccgacaacgggttcaccggagccatgtcgccgctgatcgggcaggcgcagagcctcaaccagctgtggctgcagaacaacaagctcggcggagcaataccgccggaaatcggccggctcggccaggtgcagaagctctacctgtccaacaacaccttctcgggctccataccgtcggagatcggcagcctgtcgcagctgacggcgctgcacctggaggacaacgcgttcagcggcgccttgccggacgacatcggcggctgcatcaggctcgtcgagatcgacgtctcccagaacgcgctgtcggggccgattccggcctcgctgtcgctgctgtcgtcgctcaactcgctcaacctctccaacaacgagctcagcgggccgatcccgacgagcctccaggcgctcaaactcagctccatcgacttctcctcgaaccagctcaccgggaacgtgccgccggggcttctggtgctcaccggcggcggccaggcgtttgcccggaaccccggcctctgcgtggacggcaggtccgacctcagcgcctgcaatgtggacggcggccgcaaggacggcctcctcgccaggaagtcgcagcttgtgctggtgctggtccttgtctcggcgacgctgctgctggtggccggcatcgtgtttgtgagctaccggagcttcaagctcgaggaggtgaagaagagggacctggagcacggcgacgggtgcgggcagtggaagctggagtcgttccacccactggagctggacgccgacgagatctgcgccgtcggggaggagaacctgatagggtcgggcggaacggggcgtgtgtaccggctggagctcaagggccgcggcggcgccggcgccggcggagtggtggccgtgaagcggctgtggaagagcaacgcggcgcgggtgatggccgccgagatggccatcctcggcaaggtccggcaccggaacatcctgaagctgcacgcgtgcctgtcgcgcggcgagctcaacttcatcgtctacgagtacatgccgcgcggcaacctgcaccaggcgctccggcgggaggccaagggcagcgggcggccggagctggactggccgcgccggtgcaagatcgcgctcggcgccgccaaggggatcatgtacctccaccacgactgcacgccggccgtcatccaccgcgacatcaagtccaccaacatcctgctcgacgaggactacgaggccaagatcgccgacttcggcatcgccaaggtcgccgcggatgcctccgactccgagttcagctgcttcgccggaacccatggctacctcgcgcccgagctggcctactcgctcagagtgacggagaagacggacgtgtacagcttcggcgtggtgctgctggagctggtcaccggccggagcccgatcgaccggcggttcggcgagggcagggacatcgtgtactggctgtccagcaagctcgcctcggagagcctcgacgacgtgctggacccgcgggtggccgtggtggccagggagagggacgacatgctcaaggtgctcaagatcgccgtgctttgcaccgccaagctgccggcggggcggccgaccatgagggacgtggtgaagatgctcaccgacgccggcgcggggccctgcagcccgcgtggacagccgccggtaagggtctgcagcaacaagagctgctgc

SEQ ID NO: 1402 - DNA, 2934 bp, Artificial sequence
  Mir resistant mutated nucleotide sequence
atgagaggacaaatccttgcctgcctccctctgaatctgatcacactcctctcgctcttcctgagctgcacctgccaaatcgattcccaaacacacgccctcctccagttcaaggccgggttgaacgaccctctgaaccacctcgtgtcatggacgaacgccacctccaagtgccgcttcttcggcgtccggtgcgacgacgatggctccggcacggtcaccgagatctcgctgtcgaacatgaacctctccggcgggatctcgccgtccgtcggggcgctgcacggcctagcgcggctgcagctcgactccaactcgctgtcggggcccgtgccgcctgagctggcgaaatgcacgcagctcaggttcctgaacctatcctacaacagcctcgccggagagctgccggatttaagtgcgttaacagcgctccaggccctcgacgtcgagaacaattacttcaccgggcgcttcccggcgtgggtcggcaacctgtccggcctgaccacgctcagcgtcggcatgaacagctacgacccaggggagacgccgccgagcatcggcaacctcaggaacctgacgtacctgtacctggccggcagcagcttgacgggggtgataccggactccatcttcgggctcaccgcgctggagacgctggacatgtccatgaacaacctcgccggcgcgatcccgccggccatcggaaacctccggaacctgtggaaaatcgagctgtacaagaacaacctcaccggcgagctcccaccggagctgggggaactgaccaagctgcgggagatcgacgtgtcccggaaccagatcagcggcggcatcccggcggcgttcgcggcgctcacggggttcacggtgatccagctctaccacaacaacctgtccgggccgatcccggaggagtggggcgacctgcggtacctgacgagcttctccatctacgagaaccggttctccggcgagttcccggccaacttcggccggttctcaccgctcaacagcgtcgacatctccgagaacggcttcgtcgggccattcccgaggtacctgtgccatggcaacaacctcgagtaccttctcgctctccagaacggcttctccggtgagttcccggaggagtacgcggtgtgcaagagcctgcaacgcttccggatcaacaagaaccggttcaccggcgacctcccggaaggcctgtgggggctcccggcggcgacgatcatcgacgtgtccgacaacgggttcaccggagccatgtcgccgctgatcgggcaggcgcagagcctcaaccagctgtggctgcagaacaacaagctcggcggagcaataccgccggaaatcggccggctcggccaggtgcagaagctctacctgtccaacaacaccttctcgggctccataccgtcggagatcggcagcctgtcgcagctgacggcgctgcacctggaggacaacgcgttcagcggcgccttgccggacgacatcggcggctgcatcaggctcgtcgagatcgacgtctcccagaacgcgctgtcggggccgattccggcctcgctgtcgctgctgtcgtcgctcaactcgctcaacctctccaacaacgagctcagcgggccgatcccgacgagcctccaggcgctcaaactcagctccatcgacttctcctcgaaccagctcaccgggaacgtgccgccggggcttctggtgctcaccggcggcggccaggcgtttgcccggaaccccggcctctgcgtggacggcaggtccgacctcagcgcctgcaatgtggacggcggccgcaaggacggcctcctcgccaggaagtcgcagcttgtgctggtgctggtccttgtctcggcgacgctgctgctggtggccggcatcgtgtttgtgagctaccggagcttcaagctcgaggaggtgaagaagagggacctggagcacggcgacgggtgcgggcagtggaagctggagtcgttccacccactggagctggacgccgacgagatctgcgccgtcggggaggagaacctgatagggtcgggcggaacggggcgtgtgtaccggctggagctcaagggccgcggcggcgccggcgccggcggagtggtggccgtgaagcggctgtggaagagcaacgcggcgcgggtgatggccgccgagatggccatcctcggcaaggtccggcaccggaacatcctgaagctgcacgcgtgcctgtcgcgcggcgagctcaacttcatcgtctacgagtacatgccgcgcggcaacctgcaccaggcgctccggcgggaggccaagggcagcgggcggccggagctggactggccgcgccggtgcaagatcgcgctcggcgccgccaaggggatcatgtacctccaccacgactgcacgccggccgtcatccaccgcgacatcaagtccaccaacatcctgctcgacgaggactacgaggccaagatcgccgacttcggcatcgccaaggtcgccgcggatgcctccgactccgagttcagctgcttcgccggaacccatggctacctcgcgcccgagctggcctactcgctcagagtgacggagaagacggacgtgtacagcttcggcgtggtgctgctggagctggtcaccggccggagcccgatcgaccggcggttcggcgagggcagggacatcgtgtactggctgtccagcaagctcgcctcggagagcctcgacgacgtgctggacccgcgggtggccgtggtggccagggagagggacgacatgctcaaggtgctcaagatcgccgtgctttgcaccgccaagctgccggcggggcggccgaccatgagggacgtggtgaagatgctcaccgacgccggcgcggggccctgcagcccgcgtggacagccgccggtaagggtctgcagcaacaagagctgctgc

SEQ ID NO: 1403 - DNA, 1476 bp, Artificial sequence; identical to SEQ ID NO: 1301
  Mir resistant mutated nucleotide sequence

SEQ ID NO: 1404 - DNA, 1476 bp, Artificial sequence; identical to SEQ ID NO: 1302
  Mir resistant mutated nucleotide sequence

SEQ ID NO: 1405 - DNA, 1476 bp, Artificial sequence; identical to SEQ ID NO: 1302
  Mir resistant mutated nucleotide sequence

SEQ ID NO: 1406 - DNA, 1476 bp, Artificial sequence; identical to SEQ ID NO: 1302
  Mir resistant mutated nucleotide sequence

SEQ ID NO: 1407 - DNA, 1476 bp, Artificial sequence; identical to SEQ ID NO: 1302
  Mir resistant mutated nucleotide sequence

SEQ ID NO: 1408 - DNA, 804 bp, Artificial sequence
  Mir resistant mutated nucleotide sequence
atggtgcggaaaccaatacatgcagatgatgcaggcgctaagagcacggaggcgagcaaggagaggaaggggttgtggtcgccggaggaggacgagcggctcttcacccacatcacctaccacgtcgtctccacctggagctccgtcgcgcagctagcaggcctgcggaggagcggcaagagctgccggctgcggtggctgaactacctgcgcccggacctcaagaaggagcccatctccaagcgcgaggaggagaccatcatctccctgcagcagtcgctcggcaaccggtggtcgactatcgcggcgaggatgccaggcaggacggacaacgagatcaagaactactggaactcccgcatcaggaagcgcctcaacgccgccgcctccagagctgcaggctgcggcgacggcggtgacagcgcggccgagccatcgggggccgcggccgcgggaggaaaggaggattcggccaacgctgcgccgccgccagcggcccagcctacgcccatcccggcgcggttcccggtcttcgggtgccagctgcccgacggagccggcggcggcatttcgtctcccggcagcggcaagagtccacagtcgtcgactactgcgagtatgcggcagaacgcgggtgacgagagcgatgcgagcgacggtggcggtggcgacagcgacatggtccatttcctctcgttcgatgatctggattatcccggggatttgctcattgatgtgccgggcgccatggacgcgtgggagagccaactgtgctatgcgaatccgatgatgagctcgctctgt

SEQ ID NO: 1409 - DNA, 804 bp, Artificial sequence
  Mir resistant mutated nucleotide sequence
atggtgcggaagccaatacatgcagatgatgcaggcgctaagagcacggaggcgagcaaggagaggaaggggttgtggtcgccggaggaggacgagcggctcttcacccacatcacctaccacgtcgtctccacctggagctccgtcgcgcagctagcaggcctgcggaggagcggcaagagctgccggctgcggtggctgaactacctgcgcccggacctcaagaaggagcccatctccaagcgcgaggaggagaccatcatctccctgcagcagtcgctcggcaaccggtggtcgactatcgcggcgaggatgccaggcaggacggacaacgagatcaagaactactggaactcccgcatcaggaagcgcctcaacgccgccgcctccagagctgcaggctgcggcgacggcggtgacagcgcggccgagccatcgggggccgcggccgcgggaggaaaggaggattcggccaacgctgcgccgccgccagcggcccagcctacgcccatcccggcgcggttcccggtcttcgggtgccagctgcccgacggagccggcggcggcatttcgtctcccggcagcggcaagagtccacagtcgtcgactactgcgagtatgcggcagaacgcgggtgacgagagcgatgcgagcgacggtggcggtggcgacagcgacatggtccatttcctctcgttcgatgatctggattatcccggggatttgctcattgatgtgccgggcgccatggacgcgtgggagagccaactgtgctatgcgaatccgatgatgagctcgctctgt

SEQ ID NO: 1410 - DNA, 804 bp, Artificial sequence
  Mir resistant mutated nucleotide sequence
atggtgcggaaaccgatacatgcagatgatgcaggcgctaagagcacggaggcgagcaaggagaggaaggggttgtggtcgccggaggaggacgagcggctcttcacccacatcacctaccacgtcgtctccacctggagctccgtcgcgcagctagcaggcctgcggaggagcggcaagagctgccggctgcggtggctgaactacctgcgcccggacctcaagaaggagcccatctccaagcgcgaggaggagaccatcatctccctgcagcagtcgctcggcaaccggtggtcgactatcgcggcgaggatgccaggcaggacggacaacgagatcaagaactactggaactcccgcatcaggaagcgcctcaacgccgccgcctccagagctgcaggctgcggcgacggcggtgacagcgcggccgagccatcgggggccgcggccgcgggaggaaaggaggattcggccaacgctgcgccgccgccagcggcccagcctacgcccatcccggcgcggttcccggtcttcgggtgccagctgcccgacggagccggcggcggcatttcgtctcccggcagcggcaagagtccacagtcgtcgactactgcgagtatgcggcagaacgcgggtgacgagagcgatgcgagcgacggtggcggtggcgacagcgacatggtccatttcctctcgttcgatgatctggattatcccggggatttgctcattgatgtgccgggcgccatggacgcgtgggagagccaactgtgctatgcgaatccgatgatgagctcgctctgt

SEQ ID NO: 1411 - DNA, 804 bp, Artificial sequence
  Mir resistant mutated nucleotide sequence
atggtgcggaaaccaatccatgcagatgatgcaggcgctaagagcacggaggcgagcaaggagaggaaggggttgtggtcgccggaggaggacgagcggctcttcacccacatcacctaccacgtcgtctccacctggagctccgtcgcgcagctagcaggcctgcggaggagcggcaagagctgccggctgcggtggctgaactacctgcgcccggacctcaagaaggagcccatctccaagcgcgaggaggagaccatcatctccctgcagcagtcgctcggcaaccggtggtcgactatcgcggcgaggatgccaggcaggacggacaacgagatcaagaactactggaactcccgcatcaggaagcgcctcaacgccgccgcctccagagctgcaggctgcggcgacggcggtgacagcgcggccgagccatcgggggccgcggccgcgggaggaaaggaggattcggccaacgctgcgccgccgccagcggcccagcctacgcccatcccggcgcggttcccggtcttcgggtgccagctgcccgacggagccggcggcggcatttcgtctcccggcagcggcaagagtccacagtcgtcgactactgcgagtatgcggcagaacgcgggtgacgagagcgatgcgagcgacggtggcggtggcgacagcgacatggtccatttcctctcgttcgatgatctggattatcccggggatttgctcattgatgtgccgggcgccatggacgcgtgggagagccaactgtgctatgcgaatccgatgatgagctcgctctgt

SEQ ID NO: 1412 - DNA, 804 bp, Artificial sequence
  Mir resistant mutated nucleotide sequence
atggtgcggaaaccaatacacgcagatgatgcaggcgctaagagcacggaggcgagcaaggagaggaaggggttgtggtcgccggaggaggacgagcggctcttcacccacatcacctaccacgtcgtctccacctggagctccgtcgcgcagctagcaggcctgcggaggagcggcaagagctgccggctgcggtggctgaactacctgcgcccggacctcaagaaggagcccatctccaagcgcgaggaggagaccatcatctccctgcagcagtcgctcggcaaccggtggtcgactatcgcggcgaggatgccaggcaggacggacaacgagatcaagaactactggaactcccgcatcaggaagcgcctcaacgccgccgcctccagagctgcaggctgcggcgacggcggtgacagcgcggccgagccatcgggggccgcggccgcgggaggaaaggaggattcggccaacgctgcgccgccgccagcggcccagcctacgcccatcccggcgcggttcccggtcttcgggtgccagctgcccgacggagccggcggcggcatttcgtctcccggcagcggcaagagtccacagtcgtcgactactgcgagtatgcggcagaacgcgggtgacgagagcgatgcgagcgacggtggcggtggcgacagcgacatggtccatttcctctcgttcgatgatctggattatcccggggatttgctcattgatgtgccgggcgccatggacgcgtgggagagccaactgtgctatgcgaatccgatgatgagctcgctctgt

SEQ ID NO: 1413 - DNA, 1284 bp, Artificial sequence
  Mir resistant mutated nucleotide sequence
atggcaccgaagcgcccggccgccgcagcggcggcggcctcggggtcggcgtccgaggcatccgacgcggaggcggacgtgggccaccagccgtcctccccatccccgtccaagacgccgccgaccaaccctaaccctaagtccgctgccgctggccccgccgaggactccaccgcggccggatccgactccgaggccgcgtacgactctgacgcggaccaccgccccgcgcaccggaaggcggcggtagcggcgtccccatcgcgcaagcccaggagccccaggccgcgctcccgctcccgctccccggacgcagcctcgtactccgacggcgcggcctcagatgccgacgctgaccctgccgcccgagacggagcagatagtgcagatgatggaaacgcctctccgctcgcgctcccgcgcctatcccgcgccgaggctgccgccatcaagcccctcagctcgcgccccatggatccgccgcgccgctccatggtacactctttctccgagctgcgctcgaagcgcccccgcagcgccgccgtcccgtcatccgttgagcagctcaagaggccgacgcggctctggagcctccgtgacgagatcgtcatcctgcggggcttggtcacgtaccgcgccaagcgtggggtcctccccggcgccatgtatgacatttctatgttccaaggccacatccagagcgagctcagtgttaacgtaacccccacgcagctcagtgacaaggtacggcgtctcaagcagaagtacaaccagcttgcgtcccgtggcaagaacgggcgggatccagacttgcccacccagcatgaacagagtgtttatgagattggcaagaaggtatggggaacaagtacgggtggtgatgggtatgagattggtggtgacagccaagaggagcatgaaattggagagagtgacgaggatgtggagagtgggtgggatgaacgtgcccgcaagaacaggaggctgatgccaatcactatggcaaatggacacggatctgggttcggggctggcagagggaagtttgatgttgagaagggaaaggatgcttatccatacctttgggagactgtagaggatctgtcaaaggagcacccgaatggggtagcattcaagaaagcctttgagctgatcgaaggcgccagagcgcgtgggatggaggagaagctacgaaaattcaggctgacagagatcagacaccagctgcgacgtatggaattgatgaaggagacagtgaagatggtgcttgatgcgctggaaggt

SEQ ID NO: 1414 - DNA, 1284 bp, Artificial sequence
  Mir resistant mutated nucleotide sequence
atggcaccgaagcgcccggccgccgcagcggcggcggcctcggggtcggcgtccgaggcatccgacgcggaggcggacgtgggccaccagccgtcctccccatccccgtccaagacgccgccgaccaaccctaaccctaagtccgctgccgctggccccgccgaggactccaccgcggccggatccgactccgaggccgcgtacgactctgacgcggaccaccgccccgcgcaccggaaggcggcggtagcggcgtccccatcgcgcaagcccaggagccccaggccgcgctcccgctcccgctccccggacgcagcctcgtactccgacggcgcggcctcagatgccgacgctgaccctgccgcccgagacggcgcagatagtgcagatgatggcaacgcctctccgctcgcgctcccgcgcctatcccgcgccgaggctgccgccatcaagcccctcagctcgcgccccatggatccgccgcgccgctccatggtacactctttctccgagctgcgctcgaagcgcccccgcagcgccgccgtcccgtcatccgttgagcagctcaagaggccgacgcggctctggagcctccgtgacgagatcgtcatcctgcggggcttggtcacgtaccgcgccaagcgtggggtcctccccggcgccatgtatgacatttctatgttccaaggccacatccagagcgagctcagtgttaacgtaacccccacgcagctcagtgacaaggtacggcgtctcaagcagaagtacaaccagcttgcgtcccgtggcaagaacgggcgggatccagacttgcccacccagcatgaacagagtgtttatgagattggcaagaaggtatggggaacaagtacgggtggtgatgggtatgagattggtggtgacagccaagaggagcatgaaattggagagagtgacgaggatgtggagagtgggtgggatgaacgtgcccgcaagaacaggaggctgatgccaatcactatggcaaatggacacggatctgggttcggggctggcagagggaagtttgatgttgagaagggaaaggatgcttatccatacctttgggagactgtagaggatctgtcaaaggagcacccgaatggggtagcattcaagaaagcctttgagctgatcgaaggcgccagagcgcgtgggatggaggagaagctacgaaaattcaggctgacagagatcagacaccagctgcgacgtatggaattgatgaaggagacagtgaagatggtgcttgatgcgctggaaggt

SEQ ID NO: 1415 - DNA, 1284 bp, Artificial sequence; identical to SEQ ID NO: 1414
  Mir resistant mutated nucleotide sequence

SEQ ID NO: 1416 - DNA, 1284 bp, Artificial sequence; identical to SEQ ID NO: 1414
  Mir resistant mutated nucleotide sequence

SEQ ID NO: 1417 - DNA, 1284 bp, Artificial sequence
  Mir resistant mutated nucleotide sequence
atggcaccgaagcgcccggccgccgcagcggcggcggcctcggggtcggcgtccgaggcatccgacgcggaggcggacgtgggccaccagccgtcctccccatccccgtccaagacgccgccgaccaaccctaaccctaagtccgctgccgctggccccgccgaggactccaccgcggccggatccgactccgaggccgcgtacgactctgacgcggaccaccgccccgcgcaccggaaggcggcggtagcggcgtccccatcgcgcaagcccaggagccccaggccgcgctcccgctcccgctccccggacgcagcctcgtactccgacggcgcggcctcagatgccgacgctgaccctgccgcccgagacggagccgatagtgccgatgatggaaacgcctctccgctcgcgctcccgcgcctatcccgcgccgaggctgccgccatcaagcccctcagctcgcgccccatggatccgccgcgccgctccatggtacactctttctccgagctgcgctcgaagcgcccccgcagcgccgccgtcccgtcatccgttgagcagctcaagaggccgacgcggctctggagcctccgtgacgagatcgtcatcctgcggggcttggtcacgtaccgcgccaagcgtggggtcctccccggcgccatgtatgacatttctatgttccaaggccacatccagagcgagctcagtgttaacgtaacccccacgcagctcagtgacaaggtacggcgtctcaagcagaagtacaaccagcttgcgtcccgtggcaagaacgggcgggatccagacttgcccacccagcatgaacagagtgtttatgagattggcaagaaggtatggggaacaagtacgggtggtgatgggtatgagattggtggtgacagccaagaggagcatgaaattggagagagtgacgaggatgtggagagtgggtgggatgaacgtgcccgcaagaacaggaggctgatgccaatcactatggcaaatggacacggatctgggttcggggctggcagagggaagtttgatgttgagaagggaaaggatgcttatccatacctttgggagactgtagaggatctgtcaaaggagcacccgaatggggtagcattcaagaaagcctttgagctgatcgaaggcgccagagcgcgtgggatggaggagaagctacgaaaattcaggctgacagagatcagacaccagctgcgacgtatggaattgatgaaggagacagtgaagatggtgcttgatgcgctggaaggt

SEQ ID NO: 1418 - DNA, 384 bp, Artificial sequence
  Mir resistant mutated nucleotide sequence
atgcatggttgtacacacacaggcaccttgagagcgcgtcgtccctgccaaagaagcagaaggagaagatcctgttctgatcatggcgtcggcgacggcggcgactcgtcgtcatccacgaggacgacgacggcggtgaagacaataagaaccaaccaaaaccactacgcgaagcatatatacagattactgtcaacgtattgtagaaccaaggatctatgtataaatatatgtgtgcgtccatatcatcatcggaccggaataaagctagcaatctctcttcttcacgatcgagagatagcgcgcgtgcgtgtaattaagtattatagatgcatgtatgatgcatgcgtgtgtgtatctatatatcatgtgatggtttgtata

SEQ ID NO: 1419 - DNA, 384 bp, Artificial sequence
  Mir resistant mutated nucleotide sequence
atgcatggttgtacacacacaggcaccttgagagcgcgtcgtccctgccagagaagcagaaggagaagatcctgttctgatcatggcgtcggcgacggcggcgactcgtcgtcatccacgaggacgacgacggcggtgaagacaataagaaccaaccaaaaccactacgcgaagcatatatacagattactgtcaacgtattgtagaaccaaggatctatgtataaatatatgtgtgcgtccatatcatcatcggaccggaataaagctagcaatctctcttcttcacgatcgagagatagcgcgcgtgcgtgtaattaagtattatagatgcatgtatgatgcatgcgtgtgtgtatctatatatcatgtgatggtttgtata

SEQ ID NO: 1420 - DNA, 384 bp, Artificial sequence
  Mir resistant mutated nucleotide sequence
atgcatggttgtacacacacaggcaccttgagagcgcgtcgtccctgccaacgtagccgtaggcgtcgttcctgttctgatcatggcgtcggcgacggcggcgactcgtcgtcatccacgaggacgacgacggcggtgaagacaataagaaccaaccaaaaccactacgcgaagcatatatacagattactgtcaacgtattgtagaaccaaggatctatgtataaatatatgtgtgcgtccatatcatcatcggaccggaataaagctagcaatctctcttcttcacgatcgagagatagcgcgcgtgcgtgtaattaagtattatagatgcatgtatgatgcatgcgtgtgtgtatctatatatcatgtgatggtttgtata

SEQ ID NO: 1421 - DNA, 384 bp, Artificial sequence
  Mir resistant mutated nucleotide sequence
atgcatggttgtacacacacaggcaccttgagagcgcgtcgtccctgccaaagatcgagaaggagaagatcctgttctgatcatggcgtcggcgacggcggcgactcgtcgtcatccacgaggacgacgacggcggtgaagacaataagaaccaaccaaaaccactacgcgaagcatatatacagattactgtcaacgtattgtagaaccaaggatctatgtataaatatatgtgtgcgtccatatcatcatcggaccggaataaagctagcaatctctcttcttcacgatcgagagatagcgcgcgtgcgtgtaattaagtattatagatgcatgtatgatgcatgcgtgtgtgtatctatatatcatgtgatggtttgtata

SEQ ID NO: 1422 - DNA, 384 bp, Artificial sequence
  Mir resistant mutated nucleotide sequence
atgcatggttgtacacacacaggcaccttgagagcgcgtcgtccctgccaacgcagccgcaggcgccgctcctgttctgatcatggcgtcggcgacggcggcgactcgtcgtcatccacgaggacgacgacggcggtgaagacaataagaaccaaccaaaaccactacgcgaagcatatatacagattactgtcaacgtattgtagaaccaaggatctatgtataaatatatgtgtgcgtccatatcatcatcggaccggaataaagctagcaatctctcttcttcacgatcgagagatagcgcgcgtgcgtgtaattaagtattatagatgcatgtatgatgcatgcgtgtgtgtatctatatatcatgtgatggtttgtata

SEQ ID NO: 1423 - DNA, 1314 bp, Artificial sequence
  Mir resistant mutated nucleotide sequence
atgtcaatgacgccatccatggagatcgacctgcacgtcgtgcgcgcggcgcgcgtgctgggtcgtggcgccatgggcacggtattcctcgccgttgacggcggcaccggggaggcctacgcgctcaaggtcttcgacaagcgctccgctgcggcggcgtcgaggccggccgcgggcgccgacgcggcgcggcgcgcgcagtgggaggtgtccgtgctgtccaggctcgcgcacccgcacctgccgtccctgctgggctgcgccgagacgcccgacctactggggtgggcgctgccctactgtccaggcggggacctcaacgagctccgccacgcgcagcccgaccgcgtgttctcccccgcggccatccggttctacgtcgccgaggtggtgtccgcgctcgccgagctccacgccgccgggatcgcgtaccgcgacctcaagcccgagaacgtgctcctccgcgccgacggccacgtcatgctgaccgactttgacctctcacggcagctcccgccgcccaggtccccctccgcatccacgtccacgtcgtcgtcgtcgtgctcggcgacatcgtcgccgctgcctcagacccagacgacccacatgaagaacatcttcaagagaagcgagtccgctgtgaccgcgcccacctccggacaggaggaaccacgcaacctcgcctggtacctgagcaaaagcatcgacggcggcagcgaccaggtcaagaaggcgaaatcggccagggtaacgccggtggaccgcggcaaggagctgccgagcttctgccccgctgccgcagccgcagccggagagcggtcgttctcgttcgtgggcaccgaggagtacgtggcgccggaggtggtgcgcggcgacgggcacgagttcgcggtcgactggtgggcgctcggggtgctggtctacgagatgtcccacgggcggacgccgttccggggccggagccggaaggagacgttccggaacgtgctgctccgggagccggggttcacggcggacgcgcggcggcggtggccggagctaacggacctcgtctcgcggctgctggagaagaatcccgcgcggaggctgggttttgcaggaggagcagatgaagtacgggcgcacccgttcttcgccggggtggcgtgggacctgctcggggacgtgtcccggccgccctacattcccgcgccgcccgatgacagtattgcctcctgcgaggggttcagcgtggcggaatacttcgataggcttcaccagcctccgctgtcgccggcgaagcactcgcccgaggaagagctcttgccggagttc

SEQ ID NO: 1424 - DNA, 1314 bp, Artificial sequence
  Mir resistant mutated nucleotide sequence
atgtcaatgacgccatccatggagatcgacctgcacgtcgtgcgcgcggcgcgcgtgctgggtcgtggcgccatgggcacggtattcctcgccgttgacggcggcaccggggaggcctacgcgctcaaggtcttcgacaagcgctccgctgcggcggcgtcgaggccggccgcgggcgccgacgcggcgcggcgcgcgcagtgggaggtgtccgtgctgtccaggctcgcgcacccgcacctgccgtccctgctgggctgcgccgagacgcccgacctactggggtgggcgctgccctactgtccaggcggggacctcaacgagctccgccacgcgcagcccgaccgcgtgttctcccccgcggccatccggttctacgtcgccgaggtggtgtccgcgctcgccgagctccacgccgccgggatcgcgtaccgcgacctcaagcccgagaacgtgctcctccgcgccgacggccacgtcatgctgaccgactttgacctctcacggcagctcccgccgcccaggtccccctccgcatccacgtccacgtcgtcgtcgtcgtgctcggcgacatcgtcgccgctgcctcagacccagacgacccacatgaagaacatcttcaagagaagcgagtccgctgtgaccgcgcccacctccggacaggaggaaccacgcaacctcgcctggtacctgagcaaaagcatcgacggcggcagcgaccaggtcaagaaggcgaaatcggccagggtaacgccggtggaccgcggcaaggagctgccgagcttctgccccgctgccgcagccgcagccggagagcggtcgttctcgttcgtgggcaccgaggagtacgtggcgccggaggtggtgcgcggcgacgggcacgagttcgcggtcgactggtgggcgctcggggtgctggtctacgagatgtcccacgggcggacgccgttccggggccggagccggaaggagacgttccggaacgtgctgctccgggagccggggttcacggcggacgcgcggcggcggtggccggagctaacggacctcgtctcgcggctgctggagaagaatcccgcgcggaggctgggtttcgcaggaggagcagatgaagtacgggcgcacccgttcttcgccggggtggcgtgggacctgctcggggacgtgtcccggccgccctacattcccgcgccgcccgatgacagtattgcctcctgcgaggggttcagcgtggcggaatacttcgataggcttcaccagcctccgctgtcgccggcgaagcactcgcccgaggaagagctcttgccggagttc

SEQ ID NO: 1425 - DNA, 1314 bp, Artificial sequence
  Mir resistant mutated nucleotide sequence
atgtcaatgacgccatccatggagatcgacctgcacgtcgtgcgcgcggcgcgcgtgctgggtcgtggcgccatgggcacggtattcctcgccgttgacggcggcaccggggaggcctacgcgctcaaggtcttcgacaagcgctccgctgcggcggcgtcgaggccggccgcgggcgccgacgcggcgcggcgcgcgcagtgggaggtgtccgtgctgtccaggctcgcgcacccgcacctgccgtccctgctgggctgcgccgagacgcccgacctactggggtgggcgctgccctactgtccaggcggggacctcaacgagctccgccacgcgcagcccgaccgcgtgttctcccccgcggccatccggttctacgtcgccgaggtggtgtccgcgctcgccgagctccacgccgccgggatcgcgtaccgcgacctcaagcccgagaacgtgctcctccgcgccgacggccacgtcatgctgaccgactttgacctctcacggcagctcccgccgcccaggtccccctccgcatccacgtccacgtcgtcgtcgtcgtgctcggcgacatcgtcgccgctgcctcagacccagacgacccacatgaagaacatcttcaagagaagcgagtccgctgtgaccgcgcccacctccggacaggaggaaccacgcaacctcgcctggtacctgagcaaaagcatcgacggcggcagcgaccaggtcaagaaggcgaaatcggccagggtaacgccggtggaccgcggcaaggagctgccgagcttctgccccgctgccgcagccgcagccggagagcggtcgttctcgttcgtgggcaccgaggagtacgtggcgccggaggtggtgcgcggcgacgggcacgagttcgcggtcgactggtgggcgctcggggtgctggtctacgagatgtcccacgggcggacgccgttccggggccggagccggaaggagacgttccggaacgtgctgctccgggagccggggttcacggcggacgcgcggcggcggtggccggagctaacggacctcgtctcgcggctgctggagaagaatcccgcgcggaggctgggttttgccggaggagccgatgaagtacgggcgcacccgttcttcgccggggtggcgtgggacctgctcggggacgtgtcccggccgccctacattcccgcgccgcccgatgacagtattgcctcctgcgaggggttcagcgtggcggaatacttcgataggcttcaccagcctccgctgtcgccggcgaagcactcgcccgaggaagagctcttgccggagttc

SEQ ID NO: 1426 - DNA, 1314 bp, Artificial sequence
  Mir resistant mutated nucleotide sequence
atgtcaatgacgccatccatggagatcgacctgcacgtcgtgcgcgcggcgcgcgtgctgggtcgtggcgccatgggcacggtattcctcgccgttgacggcggcaccggggaggcctacgcgctcaaggtcttcgacaagcgctccgctgcggcggcgtcgaggccggccgcgggcgccgacgcggcgcggcgcgcgcagtgggaggtgtccgtgctgtccaggctcgcgcacccgcacctgccgtccctgctgggctgcgccgagacgcccgacctactggggtgggcgctgccctactgtccaggcggggacctcaacgagctccgccacgcgcagcccgaccgcgtgttctcccccgcggccatccggttctacgtcgccgaggtggtgtccgcgctcgccgagctccacgccgccgggatcgcgtaccgcgacctcaagcccgagaacgtgctcctccgcgccgacggccacgtcatgctgaccgactttgacctctcacggcagctcccgccgcccaggtccccctccgcatccacgtccacgtcgtcgtcgtcgtgctcggcgacatcgtcgccgctgcctcagacccagacgacccacatgaagaacatcttcaagagaagcgagtccgctgtgaccgcgcccacctccggacaggaggaaccacgcaacctcgcctggtacctgagcaaaagcatcgacggcggcagcgaccaggtcaagaaggcgaaatcggccagggtaacgccggtggaccgcggcaaggagctgccgagcttctgccccgctgccgcagccgcagccggagagcggtcgttctcgttcgtgggcaccgaggagtacgtggcgccggaggtggtgcgcggcgacgggcacgagttcgcggtcgactggtgggcgctcggggtgctggtctacgagatgtcccacgggcggacgccgttccggggccggagccggaaggagacgttccggaacgtgctgctccgggagccggggttcacggcggacgcgcggcggcggtggccggagctaacggacctcgtctcgcggctgctggagaagaatcccgcgcggaggctgggttttgcaggcggcgcagatgaagtacgggcgcacccgttcttcgccggggtggcgtgggacctgctcggggacgtgtcccggccgccctacattcccgcgccgcccgatgacagtattgcctcctgcgaggggttcagcgtggcggaatacttcgataggcttcaccagcctccgctgtcgccggcgaagcactcgcccgaggaagagctcttgccggagttc

SEQ ID NO: 1427 - DNA, 1314 bp, Artificial sequence; identical to SEQ ID NO: 1426
  Mir resistant mutated nucleotide sequence

SEQ ID NO: 1428 - DNA, 1455 bp, Artificial sequence
  Mir resistant mutated nucleotide sequence
atgaggaaggtgtgcgccaacccagacagagaggtcggcctcgacacagtgctcgaggtgcccgtcccggaccagctccaccacgatccgtcgtcgtcgtcgtcgggccatggaagaagaagaaggagaacgctcaaggcgtgggtgcggtcgcgcatggaccagcgccaccggcggcacagctcgccgccttcccaggcggacgtgcagctcatgctcggggtggtcggcgcgccgctggtgccgcagccagtgcaggcgaggaaggccatggtggccggagaggacatcaaggaagagccccttgaggtgtccaaggcgaagtacatcgtggagcagtacgtcgcggcgtctgggggcgagcgggcgctgagcgcggcgacgagcatgtacgcggtggggaaggtgctgatgaggacgaggtcgtcgtcgacgacgaccaagcaggggcagaaagcccgcaggacgggaatggtgggcgtggtccacggcggcgccgagatcgccggcggcctcgtgctgtggcagaaggggccggaggtgtggtgcgtggagatggtggtggccggcggcaccaagatgagcgccgggagcgacggcagagtcgcctggcgccagacgccctggcagcaggctcacgcttcgcgggggcccccgagacctctccgtcgatgcgtccagggtcttaacccgagatcaacggcgaacctgttctcgacagccacgtgggtcggcgagaagagcgtcgacggcgacgactgcttcgtgctccgcgtcgacgccgacccgctggccctgcgcgcccggagcggcgacgacgtcgaggtcgtcaggcacgccgtgtgggggtacttcagccagaggacggggctgctgtcccgcctcgaggacagccacctgctgcgcgtccgcgcgacgaagggctcgccgctggcccagacgaccacgtactgggagacttccatggactcgtccatcggcgactaccgcgccgtcgacggcatcaacgtcgcgcacgccggccgcaccgtcgtctcgctgtcccggttcggcggcagcaccaacgacgacagcgctggatccgaatcggccggcgtgctcggcaggaggacgtgcacgtgcatggaggagaattggagcatcgaggaggtcgacttcaacgtcgtgggcctgtccgcggagtgcttcttgcctcctagagacatggtagtagtaccttgcagtcctaaaccagtcgacgatgagaaggggcagtgtggccgccttgaccacagctgcaagaaagacgacgctccagctgcacttgacgtcaggaacaagaacggtaatggcggtgccggtggtgtccatcgtcctgcgacggcaagaaaggctcttgtaacggcggcgacagggctaccctggtccgggactgccaaggttgtggccgtcgaaaccttcgacaccaccgctgag

SEQ ID NO: 1429 - DNA, 1455 bp, Artificial sequence
  Mir resistant mutated nucleotide sequence
atgaggaaggtgtgcgccaacccagacagagaggtcggcctcgacacagtgctcgaggtgcccgtcccggaccagctccaccacgatccgtcgtcgtcgtcgtcgggccacggaagaagaagaaggagaacgctcaaggcgtgggtgcggtcgcgcatggaccagcgccaccggcggcacagctcgccgccttcccaggcggacgtgcagctcatgctcggggtggtcggcgcgccgctggtgccgcagccagtgcaggcgaggaaggccatggtggccggagaggacatcaaggaagagccccttgaggtgtccaaggcgaagtacatcgtggagcagtacgtcgcggcgtctgggggcgagcgggcgctgagcgcggcgacgagcatgtacgcggtggggaaggtgctgatgaggacgaggtcgtcgtcgacgacgaccaagcaggggcagaaagcccgcaggacgggaatggtgggcgtggtccacggcggcgccgagatcgccggcggcctcgtgctgtggcagaaggggccggaggtgtggtgcgtggagatggtggtggccggcggcaccaagatgagcgccgggagcgacggcagagtcgcctggcgccagacgccctggcagcaggctcacgcttcgcgggggcccccgagacctctccgtcgatgcgtccagggtcttaacccgagatcaacggcgaacctgttctcgacagccacgtgggtcggcgagaagagcgtcgacggcgacgactgcttcgtgctccgcgtcgacgccgacccgctggccctgcgcgcccggagcggcgacgacgtcgaggtcgtcaggcacgccgtgtgggggtacttcagccagaggacggggctgctgtcccgcctcgaggacagccacctgctgcgcgtccgcgcgacgaagggctcgccgctggcccagacgaccacgtactgggagacttccatggactcgtccatcggcgactaccgcgccgtcgacggcatcaacgtcgcgcacgccggccgcaccgtcgtctcgctgtcccggttcggcggcagcaccaacgacgacagcgctggatccgaatcggccggcgtgctcggcaggaggacgtgcacgtgcatggaggagaattggagcatcgaggaggtcgacttcaacgtcgtgggcctgtccgcggagtgcttcttgcctcctagagacatggtagtagtaccttgcagtcctaaaccagtcgacgatgagaaggggcagtgtggccgccttgaccacagctgcaagaaagacgacgctccagctgcacttgacgtcaggaacaagaacggtaatggcggtgccggtggtgtccatcgtcctgcgacggcaagaaaggctcttgtaacggcggcgacagggctaccctggtccgggactgccaaggttgtggccgtcgaaaccttcgacaccaccgctgag

SEQ ID NO: 1430 - DNA, 1455 bp, Artificial sequence
  Mir resistant mutated nucleotide sequence
atgaggaaggtgtgcgccaacccagacagagaggtcggcctcgacacagtgctcgaggtgcccgtcccggaccagctccaccacgatccgtcgtcgtcgtcgtcgggccatggcagaagaagaaggcgaacgctcaaggcgtgggtgcggtcgcgcatggaccagcgccaccggcggcacagctcgccgccttcccaggcggacgtgcagctcatgctcggggtggtcggcgcgccgctggtgccgcagccagtgcaggcgaggaaggccatggtggccggagaggacatcaaggaagagccccttgaggtgtccaaggcgaagtacatcgtggagcagtacgtcgcggcgtctgggggcgagcgggcgctgagcgcggcgacgagcatgtacgcggtggggaaggtgctgatgaggacgaggtcgtcgtcgacgacgaccaagcaggggcagaaagcccgcaggacgggaatggtgggcgtggtccacggcggcgccgagatcgccggcggcctcgtgctgtggcagaaggggccggaggtgtggtgcgtggagatggtggtggccggcggcaccaagatgagcgccgggagcgacggcagagtcgcctggcgccagacgccctggcagcaggctcacgcttcgcgggggcccccgagacctctccgtcgatgcgtccagggtcttaacccgagatcaacggcgaacctgttctcgacagccacgtgggtcggcgagaagagcgtcgacggcgacgactgcttcgtgctccgcgtcgacgccgacccgctggccctgcgcgcccggagcggcgacgacgtcgaggtcgtcaggcacgccgtgtgggggtacttcagccagaggacggggctgctgtcccgcctcgaggacagccacctgctgcgcgtccgcgcgacgaagggctcgccgctggcccagacgaccacgtactgggagacttccatggactcgtccatcggcgactaccgcgccgtcgacggcatcaacgtcgcgcacgccggccgcaccgtcgtctcgctgtcccggttcggcggcagcaccaacgacgacagcgctggatccgaatcggccggcgtgctcggcaggaggacgtgcacgtgcatggaggagaattggagcatcgaggaggtcgacttcaacgtcgtgggcctgtccgcggagtgcttcttgcctcctagagacatggtagtagtaccttgcagtcctaaaccagtcgacgatgagaaggggcagtgtggccgccttgaccacagctgcaagaaagacgacgctccagctgcacttgacgtcaggaacaagaacggtaatggcggtgccggtggtgtccatcgtcctgcgacggcaagaaaggctcttgtaacggcggcgacagggctaccctggtccgggactgccaaggttgtggccgtcgaaaccttcgacaccaccgctgag

SEQ ID NO: 1431 - DNA, 1455 bp, Artificial sequence
  Mir resistant mutated nucleotide sequence
atgaggaaggtgtgcgccaacccagacagagaggtcggcctcgacacagtgctcgaggtgcccgtcccggaccagctccaccacgatccgtcgtcgtcgtcgtcgggccatggacggcggcggaggcggacgctcaaggcgtgggtgcggtcgcgcatggaccagcgccaccggcggcacagctcgccgccttcccaggcggacgtgcagctcatgctcggggtggtcggcgcgccgctggtgccgcagccagtgcaggcgaggaaggccatggtggccggagaggacatcaaggaagagccccttgaggtgtccaaggcgaagtacatcgtggagcagtacgtcgcggcgtctgggggcgagcgggcgctgagcgcggcgacgagcatgtacgcggtggggaaggtgctgatgaggacgaggtcgtcgtcgacgacgaccaagcaggggcagaaagcccgcaggacgggaatggtgggcgtggtccacggcggcgccgagatcgccggcggcctcgtgctgtggcagaaggggccggaggtgtggtgcgtggagatggtggtggccggcggcaccaagatgagcgccgggagcgacggcagagtcgcctggcgccagacgccctggcagcaggctcacgcttcgcgggggcccccgagacctctccgtcgatgcgtccagggtcttaacccgagatcaacggcgaacctgttctcgacagccacgtgggtcggcgagaagagcgtcgacggcgacgactgcttcgtgctccgcgtcgacgccgacccgctggccctgcgcgcccggagcggcgacgacgtcgaggtcgtcaggcacgccgtgtgggggtacttcagccagaggacggggctgctgtcccgcctcgaggacagccacctgctgcgcgtccgcgcgacgaagggctcgccgctggcccagacgaccacgtactgggagacttccatggactcgtccatcggcgactaccgcgccgtcgacggcatcaacgtcgcgcacgccggccgcaccgtcgtctcgctgtcccggttcggcggcagcaccaacgacgacagcgctggatccgaatcggccggcgtgctcggcaggaggacgtgcacgtgcatggaggagaattggagcatcgaggaggtcgacttcaacgtcgtgggcctgtccgcggagtgcttcttgcctcctagagacatggtagtagtaccttgcagtcctaaaccagtcgacgatgagaaggggcagtgtggccgccttgaccacagctgcaagaaagacgacgctccagctgcacttgacgtcaggaacaagaacggtaatggcggtgccggtggtgtccatcgtcctgcgacggcaagaaaggctcttgtaacggcggcgacagggctaccctggtccgggactgccaaggttgtggccgtcgaaaccttcgacaccaccgctgag

SEQ ID NO: 1432 - DNA, 1455 bp, Artificial sequence
  Mir resistant mutated nucleotide sequence
atgaggaaggtgtgcgccaacccagacagagaggtcggcctcgacacagtgctcgaggtgcccgtcccggaccagctccaccacgatccgtcgtcgtcgtcgtcgggccatggacgccgccgcaggcgcacgctcaaggcgtgggtgcggtcgcgcatggaccagcgccaccggcggcacagctcgccgccttcccaggcggacgtgcagctcatgctcggggtggtcggcgcgccgctggtgccgcagccagtgcaggcgaggaaggccatggtggccggagaggacatcaaggaagagccccttgaggtgtccaaggcgaagtacatcgtggagcagtacgtcgcggcgtctgggggcgagcgggcgctgagcgcggcgacgagcatgtacgcggtggggaaggtgctgatgaggacgaggtcgtcgtcgacgacgaccaagcaggggcagaaagcccgcaggacgggaatggtgggcgtggtccacggcggcgccgagatcgccggcggcctcgtgctgtggcagaaggggccggaggtgtggtgcgtggagatggtggtggccggcggcaccaagatgagcgccgggagcgacggcagagtcgcctggcgccagacgccctggcagcaggctcacgcttcgcgggggcccccgagacctctccgtcgatgcgtccagggtcttaacccgagatcaacggcgaacctgttctcgacagccacgtgggtcggcgagaagagcgtcgacggcgacgactgcttcgtgctccgcgtcgacgccgacccgctggccctgcgcgcccggagcggcgacgacgtcgaggtcgtcaggcacgccgtgtgggggtacttcagccagaggacggggctgctgtcccgcctcgaggacagccacctgctgcgcgtccgcgcgacgaagggctcgccgctggcccagacgaccacgtactgggagacttccatggactcgtccatcggcgactaccgcgccgtcgacggcatcaacgtcgcgcacgccggccgcaccgtcgtctcgctgtcccggttcggcggcagcaccaacgacgacagcgctggatccgaatcggccggcgtgctcggcaggaggacgtgcacgtgcatggaggagaattggagcatcgaggaggtcgacttcaacgtcgtgggcctgtccgcggagtgcttcttgcctcctagagacatggtagtagtaccttgcagtcctaaaccagtcgacgatgagaaggggcagtgtggccgccttgaccacagctgcaagaaagacgacgctccagctgcacttgacgtcaggaacaagaacggtaatggcggtgccggtggtgtccatcgtcctgcgacggcaagaaaggctcttgtaacggcggcgacagggctaccctggtccgggactgccaaggttgtggccgtcgaaaccttcgacaccaccgctgag

SEQ ID NO: 1433 - DNA, 1308 bp, Artificial sequence
  Mir resistant mutated nucleotide sequence
atggacccgtgcccgttcgtgcgggtgctggtcggcaacctcgcgctcagaatgccggtggcgccgccggccgccggtgccggcgccggcgtgcacccgtccacgtcgccgtgctactgcaagatccggctcgggaagatgccggtccagagcgtcccggcgccgctcgtggtctccgacggcggcgagcagacgccggcgtcgggggccctcgccgccgcgttccacctgtccaaggctgacctggagtggttcaacgggaagccgtctctcttctcgtcgcgcggggaggccagcctgaaggtgtcggtctacgccggccgcaaggggagtacctgcggcgtcagttccgggcggctgcttgggaaggctacgatcccgctcgatctcaagggcgcagaggccaagcccgccgtgctgcacagcggctggatctccatcgggaagcgagcagggaagggcaaccccgcggcgacggagctcagcctcactgtccgcgcggagccggacccgcgatttgtcttcgagttcgacggggagccggagtgtagcccgcaggtgctgcaggtgggcagcgccatgaagcagcccatgttcacctgcaagttcggatgccgcagcaacagcgacctgcgcaggcccgggatgcagccggagcgtgacgccggcgcgtcggccaaggagcgcaaggggtggtcggtgacggtgcacgacctgaagggctcccccgtggcgatggcgtccatggtcacgcctttcgtgccgtcgccgggcacggaccgcgtgagccgctccaacccgggcgcgtggctcatcctccgccccgctggcgacggcgcctgggagccctgggcgcgcctcgagtgctggcgcgagcgcggcggcgccggcgcgtccgacagcctgggctaccacttcgacctcctcgtccccggcgcggaccacgccgtcgcactcgccgactcctccatcccctcctccaagggcggcaagttcgccatcgacctgaccgccgcgcagccgctcagccgcggcggcacgccaggatgcagcccgagaggaagcggcgacctgagcaactggcccctgggcaactaccgcggcttcgtcatgtccgccgcggtccagggcgagggccggtgcagcaaaccgactgtcgaggtcggggtggcgcatataggatgtgcagaagatgcagcggcattcgtggccctcgcggcggccgtggacctgagcatggacgcgtgcaggctcttctcccaccggctgaggaaggaactctcgcacctgcgggctgacctactccgg

SEQ ID NO: 1434 - DNA, 1308 bp, Artificial sequence
  Mir resistant mutated nucleotide sequence
atggacccgtgcccgttcgtgcgggtgctggtcggcaacctcgcgctcagaatgccggtggcgccgccggccgccggtgccggcgccggcgtgcacccgtccacgtcgccgtgctactgcaagatccggctcgggaagatgccggtccagagcgtcccggcgccgctcgtggtctccgacggcggcgagcagacgccggcgtcgggggccctcgccgccgcgttccacctgtccaaggctgacctggagtggttcaacgggaagccgtctctcttctcgtcgcgcggggaggccagcctgaaggtgtcggtctacgccggccgcaaggggagtacctgcggcgtcagttccgggcggctgcttgggaaggctacgatcccgctcgatctcaagggcgcagaggccaagcccgccgtgctgcacagcggctggatctccatcgggaagcgagcagggaagggcaaccccgcggcgacggagctcagcctcactgtccgcgcggagccggacccgcgatttgtcttcgagttcgacggggagccggagtgtagcccgcaggtgctgcaggtgggcagcgccatgaagcagcccatgttcacctgcaagttcggatgccgcagcaacagcgacctgcgcaggcccgggatgcagccggagcgtgacgccggcgcgtcggccaaggagcgcaaggggtggtcggtgacggtgcacgacctgaagggctcccccgtggcgatggcgtccatggtcacgcctttcgtgccgtcgccgggcacggaccgcgtgagccgctccaacccgggcgcgtggctcatcctccgccccgctggcgacggcgcctgggagccctgggcgcgcctcgagtgctggcgcgagcgcggcggcgccggcgcgtccgacagcctgggctaccacttcgacctcctcgtccccggcgcggaccacgccgtcgcactcgccgactcctccatcccctcctccaagggcggcaagttcgccatcgacctgaccgccgcgcagccgctcagccgcggcggcacgccaggatgcagcccgagaggaagcggcgacctgagcaactggcccctgggcaactaccgcggcttcgtcatgtccgccgcggtccagggcgagggccggtgcagcaaaccgactgtcgaggtcggggtggcgcacataggatgtgcagaagatgcagcggcattcgtggccctcgcggcggccgtggacctgagcatggacgcgtgcaggctcttctcccaccggctgaggaaggaactctcgcacctgcgggctgacctactccgg

SEQ ID NO: 1435 - DNA, 1308 bp, Artificial sequence
  Mir resistant mutated nucleotide sequence
atggacccgtgcccgttcgtgcgggtgctggtcggcaacctcgcgctcagaatgccggtggcgccgccggccgccggtgccggcgccggcgtgcacccgtccacgtcgccgtgctactgcaagatccggctcgggaagatgccggtccagagcgtcccggcgccgctcgtggtctccgacggcggcgagcagacgccggcgtcgggggccctcgccgccgcgttccacctgtccaaggctgacctggagtggttcaacgggaagccgtctctcttctcgtcgcgcggggaggccagcctgaaggtgtcggtctacgccggccgcaaggggagtacctgcggcgtcagttccgggcggctgcttgggaaggctacgatcccgctcgatctcaagggcgcagaggccaagcccgccgtgctgcacagcggctggatctccatcgggaagcgagcagggaagggcaaccccgcggcgacggagctcagcctcactgtccgcgcggagccggacccgcgatttgtcttcgagttcgacggggagccggagtgtagcccgcaggtgctgcaggtgggcagcgccatgaagcagcccatgttcacctgcaagttcggatgccgcagcaacagcgacctgcgcaggcccgggatgcagccggagcgtgacgccggcgcgtcggccaaggagcgcaaggggtggtcggtgacggtgcacgacctgaagggctcccccgtggcgatggcgtccatggtcacgcctttcgtgccgtcgccgggcacggaccgcgtgagccgctccaacccgggcgcgtggctcatcctccgccccgctggcgacggcgcctgggagccctgggcgcgcctcgagtgctggcgcgagcgcggcggcgccggcgcgtccgacagcctgggctaccacttcgacctcctcgtccccggcgcggaccacgccgtcgcactcgccgactcctccatcccctcctccaagggcggcaagttcgccatcgacctgaccgccgcgcagccgctcagccgcggcggcacgccaggatgcagcccgagaggaagcggcgacctgagcaactggcccctgggcaactaccgcggcttcgtcatgtccgccgcggtccagggcgagggccggtgcagcaaaccgactgtcgaggtcggggtggcgcatatagggtgtgcagaagatgcagcggcattcgtggccctcgcggcggccgtggacctgagcatggacgcgtgcaggctcttctcccaccggctgaggaaggaactctcgcacctgcgggctgacctactccgg

SEQ ID NO: 1436 - DNA, 1308 bp, Artificial sequence
  Mir resistant mutated nucleotide sequence
atggacccgtgcccgttcgtgcgggtgctggtcggcaacctcgcgctcagaatgccggtggcgccgccggccgccggtgccggcgccggcgtgcacccgtccacgtcgccgtgctactgcaagatccggctcgggaagatgccggtccagagcgtcccggcgccgctcgtggtctccgacggcggcgagcagacgccggcgtcgggggccctcgccgccgcgttccacctgtccaaggctgacctggagtggttcaacgggaagccgtctctcttctcgtcgcgcggggaggccagcctgaaggtgtcggtctacgccggccgcaaggggagtacctgcggcgtcagttccgggcggctgcttgggaaggctacgatcccgctcgatctcaagggcgcagaggccaagcccgccgtgctgcacagcggctggatctccatcgggaagcgagcagggaagggcaaccccgcggcgacggagctcagcctcactgtccgcgcggagccggacccgcgatttgtcttcgagttcgacggggagccggagtgtagcccgcaggtgctgcaggtgggcagcgccatgaagcagcccatgttcacctgcaagttcggatgccgcagcaacagcgacctgcgcaggcccgggatgcagccggagcgtgacgccggcgcgtcggccaaggagcgcaaggggtggtcggtgacggtgcacgacctgaagggctcccccgtggcgatggcgtccatggtcacgcctttcgtgccgtcgccgggcacggaccgcgtgagccgctccaacccgggcgcgtggctcatcctccgccccgctggcgacggcgcctgggagccctgggcgcgcctcgagtgctggcgcgagcgcggcggcgccggcgcgtccgacagcctgggctaccacttcgacctcctcgtccccggcgcggaccacgccgtcgcactcgccgactcctccatcccctcctccaagggcggcaagttcgccatcgacctgaccgccgcgcagccgctcagccgcggcggcacgccaggatgcagcccgagaggaagcggcgacctgagcaactggcccctgggcaactaccgcggcttcgtcatgtccgccgcggtccagggcgagggccggtgcagcaaaccgactgtcgaggtcggggtggcgcatataggatgcgcagaagatgcagcggcattcgtggccctcgcggcggccgtggacctgagcatggacgcgtgcaggctcttctcccaccggctgaggaaggaactctcgcacctgcgggctgacctactccgg

SEQ ID NO: 1437 - DNA, 1926 bp, Artificial sequence
  Mir resistant mutated nucleotide sequence
atgagctgcggaagggtccccatggagtgcggccacgactgcgttgttccacggcctcaggaacaccaggcgccgctcaaatgcgagagcccgacgctttcttctgaagaattccttcagttcaagaggaaggccaccacgatcgtggaggagtacttctccacggacgacgtcgcggcgacggcgaacgagctgcgggagctccgcgtgccgtgctaccactactacttcgtcaagaagctggtgtccgtggcgatggaccgccacgacagagagaaggagatggcggccgtgctgctgtcctcgctctacggcgacgtcgtcgaccggccgcagctctgcaagggcttctgcaagctcaccgagtcctgcgacgacctctccgtcgacacgcccgacgccgtcgacatcctcgccgtgttcgtcgcccgcgccgtcgtcgacgacatgctgccgccggcgttcctggccaagcagagcgcgtgcttgcccgacgggtgcaagggcgccgaggtcctccgcagggcggagaagagctacctgtccgtgccgcaccacggcgagatcgtcctgcagaggtggggcggcagcaagcggatcacggtggaggaggccaaggccaagatatccgacatcctggaggagtacctcgccgccggagataggtgcgaggccttgcggtgcatcagggacctcaagatccccttcttccaccacgacgtcgtcaagcgcgcgctcgttctcgccgtggagcgcggcggtgcgtccgaggcccatatcctggacctgctcaagtcggcgtcggaggaaggggttatcaacgagagccagatcgctaaagggttcgaccgcttgatcgactctctagacgatctgacgcttgacgtgccgaatgcgaggtgccttgtgcaatcggtgatccataaggcttcgtcggagggctggctgtgcgtgtcgtgcttgaaaccgttgccaccggagcccaaaaagagcagcgaggtcgacgacgcggcggtgcggcagttcaaggcgaaggccgttttgatcataaaggagtacttcttgaccggcgacatcatcgaggtcttgagctggttggaggcagagaacttctcgtgctgtccctccttcaatgccatcttcgtccagaagctggtcaacgccgcgatggaccggaagagccgcgagaaggagatggcgtcggtgctgctctcctcgctctgcatgccgccggaggacgtcgtggcagggttccacctccttatcgaggccgccgaggacgccgcgctggacaacccggccatagtcgaggacctgaccatgttctttgctaggtccgtggttgacgaggtgatcgcgccgtcggacctggaggcaatggaggaggacgccagccgcgtcaaggcagatggctccaccggcatgctggcgctccggaacgcccgtgcgctgctcggcgcgaagctctccgcggagcggatcctgcggtgctggggcggcggcggcagcggcaaagcaggctgggagctggaagaggtgaaggacaagatcggcaagctgctgcaggagtacgactgcggcggcgacatccgggaggcgtgccgatgcatcaaggatctcggcatgcccttcttccaccacgaggtggtgaagaaggcgctggtggcgatcatcgagaagcggggcaaagacgagcgcctctgggggctcctcagcgagtgctacggccgcggtctgatcacgcccaaccagatgaccaagggcttcgacagggtagcagattgtgtagatgatttagcactcgacgtgcctgacgccgcgaagcagctcggctgctgcatcgaccgcgccaagaaggaaggatggctggacccgtccttctcgatgacgaggccagggcagccagttgccaatggcgtttgttcg

SEQ ID NO: 1438 - DNA, 1926 bp, Artificial sequence
  Mir resistant mutated nucleotide sequence
atgagctgcggaagggtccccatggagtgcggccacgactgcgttgttccacggcctcaggaacaccaggcgccgctcaaatgcgagagcccgacgctttcttctgaagaattccttcagttcaagaggaaggccaccacgatcgtggaggagtacttctccacggacgacgtcgcggcgacggcgaacgagctgcgggagctccgcgtgccgtgctaccactactacttcgtcaagaagctggtgtccgtggcgatggaccgccacgacagagagaaggagatggcggccgtgctgctgtcctcgctctacggcgacgtcgtcgaccggccgcagctctgcaagggcttctgcaagctcaccgagtcctgcgacgacctctccgtcgacacgcccgacgccgtcgacatcctcgccgtgttcgtcgcccgcgccgtcgtcgacgacatgctgccgccggcgttcctggccaagcagagcgcgtgcttgcccgacgggtgcaagggcgccgaggtcctccgcagggcggagaagagctacctgtccgtgccgcaccacggcgagatcgtcctgcagaggtggggcggcagcaagcggatcacggtggaggaggccaaggccaagatatccgacatcctggaggagtacctcgccgccggagataggtgcgaggccttgcggtgcatcagggacctcaagatccccttcttccaccacgacgtcgtcaagcgcgcgctcgttctcgccgtggagcgcggcggtgcgtccgaggcccatatcctggacctgctcaagtcggcgtcggaggaaggggttatcaacgagagccagatcgctaaagggttcgaccgcttgatcgactctctagacgatctgacgcttgacgtgccgaatgcgaggtgccttgtgcaatcggtgatccataaggcttcgtcggagggctggctgtgcgtgtcgtgcttgaaaccgttgccaccggagcccaaaaagagcagcgaggtcgacgacgcggcggtgcggcagttcaaggcgaaggccgttttgatcataaaggagtacttcttgaccggcgacatcatcgaggtcttgagctggttggaggcagagaacttctcgtgctgtccctccttcaatgccatcttcgtccagaagctggtcaacgccgcgatggaccggaagagccgcgagaaggagatggcgtcggtgctgctctcctcgctctgcatgccgccggaggacgtcgtggcagggttccacctccttatcgaggccgccgaggacgccgcgctggacaacccggccatagtcgaggacctgaccatgttctttgctaggtccgtggttgacgaggtgatcgcgccgtcggacctggaggcaatggaggaggacgccagccgcgtcaaggcagatggctccaccggcatgctggcgctccggaacgcccgtgcgctgctcggcgcgaagctctccgcggagcggatcctgcggtgctggggcggcggcggcagcggcaaagcaggctgggagctggaagaggtgaaggacaagatcggcaagctgctgcaggagtacgactgcggcggcgacatccgggaggcgtgccgatgcatcaaggatctcggcatgcccttcttccaccacgaggtggtgaagaaggcgctggtggcgatcatcgagaagcggggcaaagacgagcgcctctgggggctcctcagcgagtgctacggccgcggtctgatcacgcccaaccagatgaccaagggcttcgacagggtggcagattgtgtggatgatttagcactcgacgtgcctgacgccgcgaagcagctcggctgctgcatcgaccgcgccaagaaggaaggatggctggacccgtccttctcgatgacgaggccagggcagccagttgccaatggcgtttgttcg

SEQ ID NO: 1439 - DNA, 1926 bp, Artificial sequence; identical to SEQ ID NO: 1438
  Mir resistant mutated nucleotide sequence

SEQ ID NO: 1440 - DNA, 1926 bp, Artificial sequence; identical to SEQ ID NO: 1438
  Mir resistant mutated nucleotide sequence

SEQ ID NO: 1441 - DNA, 1926 bp, Artificial sequence
  Mir resistant mutated nucleotide sequence
atgagctgcggaagggtccccatggagtgcggccacgactgcgttgttccacggcctcaggaacaccaggcgccgctcaaatgcgagagcccgacgctttcttctgaagaattccttcagttcaagaggaaggccaccacgatcgtggaggagtacttctccacggacgacgtcgcggcgacggcgaacgagctgcgggagctccgcgtgccgtgctaccactactacttcgtcaagaagctggtgtccgtggcgatggaccgccacgacagagagaaggagatggcggccgtgctgctgtcctcgctctacggcgacgtcgtcgaccggccgcagctctgcaagggcttctgcaagctcaccgagtcctgcgacgacctctccgtcgacacgcccgacgccgtcgacatcctcgccgtgttcgtcgcccgcgccgtcgtcgacgacatgctgccgccggcgttcctggccaagcagagcgcgtgcttgcccgacgggtgcaagggcgccgaggtcctccgcagggcggagaagagctacctgtccgtgccgcaccacggcgagatcgtcctgcagaggtggggcggcagcaagcggatcacggtggaggaggccaaggccaagatatccgacatcctggaggagtacctcgccgccggagataggtgcgaggccttgcggtgcatcagggacctcaagatccccttcttccaccacgacgtcgtcaagcgcgcgctcgttctcgccgtggagcgcggcggtgcgtccgaggcccatatcctggacctgctcaagtcggcgtcggaggaaggggttatcaacgagagccagatcgctaaagggttcgaccgcttgatcgactctctagacgatctgacgcttgacgtgccgaatgcgaggtgccttgtgcaatcggtgatccataaggcttcgtcggagggctggctgtgcgtgtcgtgcttgaaaccgttgccaccggagcccaaaaagagcagcgaggtcgacgacgcggcggtgcggcagttcaaggcgaaggccgttttgatcataaaggagtacttcttgaccggcgacatcatcgaggtcttgagctggttggaggcagagaacttctcgtgctgtccctccttcaatgccatcttcgtccagaagctggtcaacgccgcgatggaccggaagagccgcgagaaggagatggcgtcggtgctgctctcctcgctctgcatgccgccggaggacgtcgtggcagggttccacctccttatcgaggccgccgaggacgccgcgctggacaacccggccatagtcgaggacctgaccatgttctttgctaggtccgtggttgacgaggtgatcgcgccgtcggacctggaggcaatggaggaggacgccagccgcgtcaaggcagatggctccaccggcatgctggcgctccggaacgcccgtgcgctgctcggcgcgaagctctccgcggagcggatcctgcggtgctggggcggcggcggcagcggcaaagcaggctgggagctggaagaggtgaaggacaagatcggcaagctgctgcaggagtacgactgcggcggcgacatccgggaggcgtgccgatgcatcaaggatctcggcatgcccttcttccaccacgaggtggtgaagaaggcgctggtggcgatcatcgagaagcggggcaaagacgagcgcctctgggggctcctcagcgagtgctacggccgcggtctgatcacgcccaaccagatgaccaagggcttcgacagggtagccgattgtgtagatgatttagcactcgacgtgcctgacgccgcgaagcagctcggctgctgcatcgaccgcgccaagaaggaaggatggctggacccgtccttctcgatgacgaggccagggcagccagttgccaatggcgtttgttcg

SEQ ID NO: 1442 - DNA, 1005 bp, Artificial sequence
  Mir resistant mutated nucleotide sequence
atggcgcctctaggagacggcggagctgctgccgcggcggcgtccaacaacctggtggtgtcgttcggcgagatgctgatcgacttcgtccccgacgtggccgggctgtcgctggccgagtcgggcggcttcgtcaaggcacccggcggcgcgcccgccaacgtcgcctgcgccatcgccaagctcggcggatcctccgccttcgtaggcaagttcggcgacgacgagttcgggcacatgctggtgaacatcctgaagcagaacaacgtgaacgcggaggggtgcctgttcgacaagcacgcgcggacggcgctggccttcgtgacgctcaagcacgacggggagcgcgagttcatgttttacaggaacccgagcgcggacatgctgctgacggaggcggagctggacctgggcctggtgcggcgcgccagggtgttccactacggctccatctcgctcatctccgagccgtgccgctcggcgcacatggccgccatgcgcgcagccaaggccgcgggcgtgctctgctcctacgaccccaacgtgcgcctcccgctctggccgtcgcccgacgccgcacgcgagggcatcctcagcatctggaaggaggccgacttcatcaaggtcagcgacgacgaggtggccttcctcacgcgcggggacgccaacgacgagaagaacgtgctgtccctgtggtttgacgggctcaagctgctcgtcgtcaccgacggggacaagggatgcaggtacttcaccaaggacttcaagggcagcgtgcccggcttcaaggtcgacaccgtcgatacaacaggagcaggagatgcattcgtcggctccctcctcgtcaacgtcgccaaggacgactccatcttccacaacgaggagaagctccgcgaggctctcaagttctccaacgcctgcggcgccatctgcaccaccaagaagggcgccatcccggcgctgcccacggtcgccaccgcccaggacctcatcgccaaggccaac

SEQ ID NO: 1443 - DNA, 1005 bp, Artificial sequence
  Mir resistant mutated nucleotide sequence
atggcgcctctaggagacggcggagctgctgccgcggcggcgtccaacaacctggtggtgtcgttcggcgagatgctgatcgacttcgtccccgacgtggccgggctgtcgctggccgagtcgggcggcttcgtcaaggcacccggcggcgcgcccgccaacgtcgcctgcgccatcgccaagctcggcggatcctccgccttcgtaggcaagttcggcgacgacgagttcgggcacatgctggtgaacatcctgaagcagaacaacgtgaacgcggaggggtgcctgttcgacaagcacgcgcggacggcgctggccttcgtgacgctcaagcacgacggggagcgcgagttcatgttttacaggaacccgagcgcggacatgctgctgacggaggcggagctggacctgggcctggtgcggcgcgccagggtgttccactacggctccatctcgctcatctccgagccgtgccgctcggcgcacatggccgccatgcgcgcagccaaggccgcgggcgtgctctgctcctacgaccccaacgtgcgcctcccgctctggccgtcgcccgacgccgcacgcgagggcatcctcagcatctggaaggaggccgacttcatcaaggtcagcgacgacgaggtggccttcctcacgcgcggggacgccaacgacgagaagaacgtgctgtccctgtggtttgacgggctcaagctgctcgtcgtcaccgacggggacaagggatgcaggtacttcaccaaggacttcaagggcagcgtgcccggcttcaaggtcgacaccgtcgacacaacaggagcaggagacgcattcgtcggctccctcctcgtcaacgtcgccaaggacgactccatcttccacaacgaggagaagctccgcgaggctctcaagttctccaacgcctgcggcgccatctgcaccaccaagaagggcgccatcccggcgctgcccacggtcgccaccgcccaggacctcatcgccaaggccaac

SEQ ID NO: 1444 - DNA, 1005 bp, Artificial sequence
  Mir resistant mutated nucleotide sequence
atggcgcctctaggagacggcggagctgctgccgcggcggcgtccaacaacctggtggtgtcgttcggcgagatgctgatcgacttcgtccccgacgtggccgggctgtcgctggccgagtcgggcggcttcgtcaaggcacccggcggcgcgcccgccaacgtcgcctgcgccatcgccaagctcggcggatcctccgccttcgtaggcaagttcggcgacgacgagttcgggcacatgctggtgaacatcctgaagcagaacaacgtgaacgcggaggggtgcctgttcgacaagcacgcgcggacggcgctggccttcgtgacgctcaagcacgacggggagcgcgagttcatgttttacaggaacccgagcgcggacatgctgctgacggaggcggagctggacctgggcctggtgcggcgcgccagggtgttccactacggctccatctcgctcatctccgagccgtgccgctcggcgcacatggccgccatgcgcgcagccaaggccgcgggcgtgctctgctcctacgaccccaacgtgcgcctcccgctctggccgtcgcccgacgccgcacgcgagggcatcctcagcatctggaaggaggccgacttcatcaaggtcagcgacgacgaggtggccttcctcacgcgcggggacgccaacgacgagaagaacgtgctgtccctgtggtttgacgggctcaagctgctcgtcgtcaccgacggggacaagggatgcaggtacttcaccaaggacttcaagggcagcgtgcccggcttcaaggtcgacaccgtcgataccaccggagcaggagatgcattcgtcggctccctcctcgtcaacgtcgccaaggacgactccatcttccacaacgaggagaagctccgcgaggctctcaagttctccaacgcctgcggcgccatctgcaccaccaagaagggcgccatcccggcgctgcccacggtcgccaccgcccaggacctcatcgccaaggccaac

SEQ ID NO: 1445 - DNA, 1005 bp, Artificial sequence; identical to SEQ ID NO: 1444
  Mir resistant mutated nucleotide sequence

SEQ ID NO: 1446 - DNA, 1005 bp, Artificial sequence
  Mir resistant mutated nucleotide sequence
atggcgcctctaggagacggcggagctgctgccgcggcggcgtccaacaacctggtggtgtcgttcggcgagatgctgatcgacttcgtccccgacgtggccgggctgtcgctggccgagtcgggcggcttcgtcaaggcacccggcggcgcgcccgccaacgtcgcctgcgccatcgccaagctcggcggatcctccgccttcgtaggcaagttcggcgacgacgagttcgggcacatgctggtgaacatcctgaagcagaacaacgtgaacgcggaggggtgcctgttcgacaagcacgcgcggacggcgctggccttcgtgacgctcaagcacgacggggagcgcgagttcatgttttacaggaacccgagcgcggacatgctgctgacggaggcggagctggacctgggcctggtgcggcgcgccagggtgttccactacggctccatctcgctcatctccgagccgtgccgctcggcgcacatggccgccatgcgcgcagccaaggccgcgggcgtgctctgctcctacgaccccaacgtgcgcctcccgctctggccgtcgcccgacgccgcacgcgagggcatcctcagcatctggaaggaggccgacttcatcaaggtcagcgacgacgaggtggccttcctcacgcgcggggacgccaacgacgagaagaacgtgctgtccctgtggtttgacgggctcaagctgctcgtcgtcaccgacggggacaagggatgcaggtacttcaccaaggacttcaagggcagcgtgcccggcttcaaggtcgacaccgtcgatacaacaggcgcaggcgatgcattcgtcggctccctcctcgtcaacgtcgccaaggacgactccatcttccacaacgaggagaagctccgcgaggctctcaagttctccaacgcctgcggcgccatctgcaccaccaagaagggcgccatcccggcgctgcccacggtcgccaccgcccaggacctcatcgccaaggccaac

SEQ ID NO: 1447 - DNA, 828 bp, Artificial sequence
  Mir resistant mutated nucleotide sequence
atggcctactactcgggcggcggcaagctgtcggcggtggacgccatcctggcggaggcggcggacctggtggcgctcgagcaggtcgccaagctcaacacggcccacctcgatgacgactccgcgcttccgtccagcctcgaggcccgcttccgcaagctcaagtccctcccctcgcccgccgcagtgccgcccgtcagcaccctcgcccgcagcgccaccgcgccgcgcccggcccccgctctgcccggccccgatcctcccgctcctgctccgcctgtgcatcacccggtccacgaagacccgccgccgggagacgcggagacgaagggcggcgggtcctcgccgcggcaggctcgcgccccggcacccgcaccaacagtacatgcagatgatgcaaaggacctagatcagctgttcgggtcggcgccgcggggccggccgacactgcgggagcggaacagggggagcgactcctcctccgtctccccctcgccgccgccgccgccgcgccaggcgtgctgcttcggcttctcccccaagaagcccctgcggagggcgccgtcggccaagggcaagaagaaggaggtctgccacgggtcccgcgacgtcctcggcgtcgacgccgacgagtggggcgacgagaacaggaggatcgccaccgagctcagggagcagcagcgccggctcaggaaggcgctggaggaccaggtgcaggtcagcagggagaccgccaagatggcgcgctgggtcaagcaggcgtccgcgcgcatgacgcacgccgaggccatcgacgacctgctcagtgactgcgaggacgacctcaaa

SEQ ID NO: 1448 - DNA, 828 bp, Artificial sequence
  Mir resistant mutated nucleotide sequence
atggcctactactcgggcggcggcaagctgtcggcggtggacgccatcctggcggaggcggcggacctggtggcgctcgagcaggtcgccaagctcaacacggcccacctcgatgacgactccgcgcttccgtccagcctcgaggcccgcttccgcaagctcaagtccctcccctcgcccgccgcagtgccgcccgtcagcaccctcgcccgcagcgccaccgcgccgcgcccggcccccgctctgcccggccccgatcctcccgctcctgctccgcctgtgcatcacccggtccacgaagacccgccgccgggagacgcggagacgaagggcggcgggtcctcgccgcggcaggctcgcgccccggcacccgcacccacagtacatgcagatgatgcaaaggacctagatcagctgttcgggtcggcgccgcggggccggccgacactgcgggagcggaacagggggagcgactcctcctccgtctccccctcgccgccgccgccgccgcgccaggcgtgctgcttcggcttctcccccaagaagcccctgcggagggcgccgtcggccaagggcaagaagaaggaggtctgccacgggtcccgcgacgtcctcggcgtcgacgccgacgagtggggcgacgagaacaggaggatcgccaccgagctcagggagcagcagcgccggctcaggaaggcgctggaggaccaggtgcaggtcagcagggagaccgccaagatggcgcgctgggtcaagcaggcgtccgcgcgcatgacgcacgccgaggccatcgacgacctgctcagtgactgcgaggacgacctcaaa

SEQ ID NO: 1449 - DNA, 828 bp, Artificial sequence; identical to SEQ ID NO: 1448
  Mir resistant mutated nucleotide sequence

SEQ ID NO: 1450 - DNA, 828 bp, Artificial sequence; identical to SEQ ID NO: 1448
  Mir resistant mutated nucleotide sequence

SEQ ID NO: 1451 - DNA, 1773 bp, Artificial sequence
  Mir resistant mutated nucleotide sequence
atggcgttcgctgaggaggagacgacgaggtacctcggcacgaacctcatcgagagctgcggcgactcggaggacgggctcgccggctgggctccgtccggctcgtgcacgctctccgcgcacgccgacgaggacgcgtctcttccttcgctggcagccgcattgtccgccgccgccggcggcgacgacgaaggcgacgactctgacgaggacgaattccagcagcgcgcgccgaggcccagcggccggtacgtcctggccgcgcgccgcgcgagcgacaaggacgggctctgccgcgcggtctcgcgcgccccgatcaggcccaacgtaacgtaccgggtggccgggtgggtcggcctgggcgccgccgtggacggctcccacgccgttcacgtcgaggtccgcgtcgacggtggtggccgcccggtcggtggcggcgtggctgtggtcgagtcggggaagtggggccagatcaagggctcgttccgtgtcgactgcgatgagccaccgcgccacgccaaggtctacgtccacgggccgccggccggggtggacctcaaggtcacgacggatctgcaggtgtgcgcggtgaacaagattccgaggctcaggcacctcaggaagaaggccgacaaggtgcgcaagcgtgacgtggtcctcaaggtgagccggcggacggacgtcgacgacgacgacacgacggcgagcgtcgccggggcgcacatccaggtggtccaggtccagaacagcgtccccatcggcagctgcatcaccaaggcgggcatgcagaacccggagtacgtggacttcttcaccaagcacttcgactgggccgtgctcgagaacgagctcaagtggtactacacggaggccgtgcgggggcaggtgagctacgccgacgccgacgagctcatcgacttctgcgaccgccacggcaagcccgtgcgcgggcactgcatcttctgggccgtggagaactcggtgcagccgtgggtccgcgcgctcagcgccgaccagctccgggcggccgtggaggcccggctgcggggcctcgtgtcgcgctacgcaggccggttcccgcactacgaggtcaacaacgagatgctccacggggcattctaccagcagcgcctcggcgacgacatcaacgcgcacatgttccgggagacggcgcagatcgacccggcgccggcgctgttcgtcaacgactacaacgtggagagcgccaacgaccccaacgccacgccggagaagtacgtggcgctggtcacggacctgcagaggcggggcgcgcccgtgggcgggatcggcgtccagggccacgtcacgcaccccgtcggggacatcatctgcgacgcgctggacaagctcgccgtcacggggctgcccatctggatcacggagctggacgtgtcggccgccgacgaaagtgtaagagcagatgatttagagatcgtgctgcgggaggcgttcgcgcacccggccgtcgagggcatcatgctctggggcttcatgcagggccacatgtggcgctcccacggccagctcgtcaacgccgacggcaagtacacccaggcaggcaacatgttcgcgggcctccgccgggagtggacgtcgcacgcgcgggggaaggtggacagcatcggcaacttcaagttcagagggttccacggcacgtaccaggtgctgcttacgacgcccgccggagaggtgaagaagcggacgttcgacgtacacaagggggatgcgccgctcgtgctggacatggatttc

SEQ ID NO: 1452 - DNA, 1773 bp, Artificial sequence
  Mir resistant mutated nucleotide sequence
atggcgttcgctgaggaggagacgacgaggtacctcggcacgaacctcatcgagagctgcggcgactcggaggacgggctcgccggctgggctccgtccggctcgtgcacgctctccgcgcacgccgacgaggacgcgtctcttccttcgctggcagccgcattgtccgccgccgccggcggcgacgacgaaggcgacgactctgacgaggacgaattccagcagcgcgcgccgaggcccagcggccggtacgtcctggccgcgcgccgcgcgagcgacaaggacgggctctgccgcgcggtctcgcgcgccccgatcaggcccaacgtaacgtaccgggtggccgggtgggtcggcctgggcgccgccgtggacggctcccacgccgttcacgtcgaggtccgcgtcgacggtggtggccgcccggtcggtggcggcgtggctgtggtcgagtcggggaagtggggccagatcaagggctcgttccgtgtcgactgcgatgagccaccgcgccacgccaaggtctacgtccacgggccgccggccggggtggacctcaaggtcacgacggatctgcaggtgtgcgcggtgaacaagattccgaggctcaggcacctcaggaagaaggccgacaaggtgcgcaagcgtgacgtggtcctcaaggtgagccggcggacggacgtcgacgacgacgacacgacggcgagcgtcgccggggcgcacatccaggtggtccaggtccagaacagcgtccccatcggcagctgcatcaccaaggcgggcatgcagaacccggagtacgtggacttcttcaccaagcacttcgactgggccgtgctcgagaacgagctcaagtggtactacacggaggccgtgcgggggcaggtgagctacgccgacgccgacgagctcatcgacttctgcgaccgccacggcaagcccgtgcgcgggcactgcatcttctgggccgtggagaactcggtgcagccgtgggtccgcgcgctcagcgccgaccagctccgggcggccgtggaggcccggctgcggggcctcgtgtcgcgctacgcaggccggttcccgcactacgaggtcaacaacgagatgctccacggggcattctaccagcagcgcctcggcgacgacatcaacgcgcacatgttccgggagacggcgcagatcgacccggcgccggcgctgttcgtcaacgactacaacgtggagagcgccaacgaccccaacgccacgccggagaagtacgtggcgctggtcacggacctgcagaggcggggcgcgcccgtgggcgggatcggcgtccagggccacgtcacgcaccccgtcggggacatcatctgcgacgcgctggacaagctcgccgtcacggggctgcccatctggatcacggagctggacgtgtcggccgccgacgagagtgtaagagcagatgatttagagatcgtgctgcgggaggcgttcgcgcacccggccgtcgagggcatcatgctctggggcttcatgcagggccacatgtggcgctcccacggccagctcgtcaacgccgacggcaagtacacccaggcaggcaacatgttcgcgggcctccgccgggagtggacgtcgcacgcgcgggggaaggtggacagcatcggcaacttcaagttcagagggttccacggcacgtaccaggtgctgcttacgacgcccgccggagaggtgaagaagcggacgttcgacgtacacaagggggatgcgccgctcgtgctggacatggatttc

SEQ ID NO: 1453 - DNA, 1773 bp, Artificial sequence
  Mir resistant mutated nucleotide sequence
atggcgttcgctgaggaggagacgacgaggtacctcggcacgaacctcatcgagagctgcggcgactcggaggacgggctcgccggctgggctccgtccggctcgtgcacgctctccgcgcacgccgacgaggacgcgtctcttccttcgctggcagccgcattgtccgccgccgccggcggcgacgacgaaggcgacgactctgacgaggacgaattccagcagcgcgcgccgaggcccagcggccggtacgtcctggccgcgcgccgcgcgagcgacaaggacgggctctgccgcgcggtctcgcgcgccccgatcaggcccaacgtaacgtaccgggtggccgggtgggtcggcctgggcgccgccgtggacggctcccacgccgttcacgtcgaggtccgcgtcgacggtggtggccgcccggtcggtggcggcgtggctgtggtcgagtcggggaagtggggccagatcaagggctcgttccgtgtcgactgcgatgagccaccgcgccacgccaaggtctacgtccacgggccgccggccggggtggacctcaaggtcacgacggatctgcaggtgtgcgcggtgaacaagattccgaggctcaggcacctcaggaagaaggccgacaaggtgcgcaagcgtgacgtggtcctcaaggtgagccggcggacggacgtcgacgacgacgacacgacggcgagcgtcgccggggcgcacatccaggtggtccaggtccagaacagcgtccccatcggcagctgcatcaccaaggcgggcatgcagaacccggagtacgtggacttcttcaccaagcacttcgactgggccgtgctcgagaacgagctcaagtggtactacacggaggccgtgcgggggcaggtgagctacgccgacgccgacgagctcatcgacttctgcgaccgccacggcaagcccgtgcgcgggcactgcatcttctgggccgtggagaactcggtgcagccgtgggtccgcgcgctcagcgccgaccagctccgggcggccgtggaggcccggctgcggggcctcgtgtcgcgctacgcaggccggttcccgcactacgaggtcaacaacgagatgctccacggggcattctaccagcagcgcctcggcgacgacatcaacgcgcacatgttccgggagacggcgcagatcgacccggcgccggcgctgttcgtcaacgactacaacgtggagagcgccaacgaccccaacgccacgccggagaagtacgtggcgctggtcacggacctgcagaggcggggcgcgcccgtgggcgggatcggcgtccagggccacgtcacgcaccccgtcggggacatcatctgcgacgcgctggacaagctcgccgtcacggggctgcccatctggatcacggagctggacgtgtcggccgccgacgaatccgtaagagcagatgatttagagatcgtgctgcgggaggcgttcgcgcacccggccgtcgagggcatcatgctctggggcttcatgcagggccacatgtggcgctcccacggccagctcgtcaacgccgacggcaagtacacccaggcaggcaacatgttcgcgggcctccgccgggagtggacgtcgcacgcgcgggggaaggtggacagcatcggcaacttcaagttcagagggttccacggcacgtaccaggtgctgcttacgacgcccgccggagaggtgaagaagcggacgttcgacgtacacaagggggatgcgccgctcgtgctggacatggatttc

SEQ ID NO: 1454 - DNA, 1773 bp, Artificial sequence
  Mir resistant mutated nucleotide sequence
atggcgttcgctgaggaggagacgacgaggtacctcggcacgaacctcatcgagagctgcggcgactcggaggacgggctcgccggctgggctccgtccggctcgtgcacgctctccgcgcacgccgacgaggacgcgtctcttccttcgctggcagccgcattgtccgccgccgccggcggcgacgacgaaggcgacgactctgacgaggacgaattccagcagcgcgcgccgaggcccagcggccggtacgtcctggccgcgcgccgcgcgagcgacaaggacgggctctgccgcgcggtctcgcgcgccccgatcaggcccaacgtaacgtaccgggtggccgggtgggtcggcctgggcgccgccgtggacggctcccacgccgttcacgtcgaggtccgcgtcgacggtggtggccgcccggtcggtggcggcgtggctgtggtcgagtcggggaagtggggccagatcaagggctcgttccgtgtcgactgcgatgagccaccgcgccacgccaaggtctacgtccacgggccgccggccggggtggacctcaaggtcacgacggatctgcaggtgtgcgcggtgaacaagattccgaggctcaggcacctcaggaagaaggccgacaaggtgcgcaagcgtgacgtggtcctcaaggtgagccggcggacggacgtcgacgacgacgacacgacggcgagcgtcgccggggcgcacatccaggtggtccaggtccagaacagcgtccccatcggcagctgcatcaccaaggcgggcatgcagaacccggagtacgtggacttcttcaccaagcacttcgactgggccgtgctcgagaacgagctcaagtggtactacacggaggccgtgcgggggcaggtgagctacgccgacgccgacgagctcatcgacttctgcgaccgccacggcaagcccgtgcgcgggcactgcatcttctgggccgtggagaactcggtgcagccgtgggtccgcgcgctcagcgccgaccagctccgggcggccgtggaggcccggctgcggggcctcgtgtcgcgctacgcaggccggttcccgcactacgaggtcaacaacgagatgctccacggggcattctaccagcagcgcctcggcgacgacatcaacgcgcacatgttccgggagacggcgcagatcgacccggcgccggcgctgttcgtcaacgactacaacgtggagagcgccaacgaccccaacgccacgccggagaagtacgtggcgctggtcacggacctgcagaggcggggcgcgcccgtgggcgggatcggcgtccagggccacgtcacgcaccccgtcggggacatcatctgcgacgcgctggacaagctcgccgtcacggggctgcccatctggatcacggagctggacgtgtcggccgccgacgaaagtgtgagagcagatgatttagagatcgtgctgcgggaggcgttcgcgcacccggccgtcgagggcatcatgctctggggcttcatgcagggccacatgtggcgctcccacggccagctcgtcaacgccgacggcaagtacacccaggcaggcaacatgttcgcgggcctccgccgggagtggacgtcgcacgcgcgggggaaggtggacagcatcggcaacttcaagttcagagggttccacggcacgtaccaggtgctgcttacgacgcccgccggagaggtgaagaagcggacgttcgacgtacacaagggggatgcgccgctcgtgctggacatggatttc

SEQ ID NO: 1455 - DNA, 975 bp, Artificial sequence
  Mir resistant mutated nucleotide sequence
atgtccaatagggccacacattggtgttatgcctgtcggcggccaattcgtctccgtgggcaggatatcgcatgccccaactgcaatgatggttttatccaggaaattagtgagatgggtggcatattgaacacttatgggctaattgaaccagactttgaagagcgtcgagctagaagattcggaatgatggatgccatgtcttcccttatgcggcaacggatggaagaaatgggaagagatggtttgtttgatattcgtggtagacaaggcaccggaacagagtacggccgaaggccaactgctgttcctacattggtatttggcggcatcccttctcctggagttgatagcggtgatgttaatgttgtcctcaggggaggccgcagagttggcgctgcccaaccaaatttcagtagtttagttgttggtcccagtctggaagccctttttgagcagctacttctccagaacaaccgtcaaggcccagcacctgctccacagtcagctattgactccatgcctgtggtaaagataaaccgcaggcatcttgacgacgatccacagtgcgcagtttgcaaagacaaattcgaggttggagcagaggcacgggagatgccatgcaagcacctgtaccatactgactgcatcatcccctggctggttcagcacaattcttgccctgtttgccgccatccactgccatcacagagatcaggcagtaccagtagcgcccggccttcagcttactacaacgaagccgctgatcctcctggggtcaccagagcagatcttgaacctgctccaagagacggtggcagggaaagccaggaaaggcgccgctccttctcgtttctgtggccgtttggcccgtcgagttccagatccagttcttaccagtacgaacagaatgttgatgagcctgcagtatacgatccaaaccagatagcatattctgagtggcactatgaccac

SEQ ID NO: 1456 - DNA, 975 bp, Artificial sequence
  Mir resistant mutated nucleotide sequence
atgtccaatagggccacacattggtgttatgcctgtcggcggccaattcgtctccgtgggcaggatatcgcatgccccaactgcaatgatggttttatccaggaaattagtgagatgggtggcatattgaacacttatgggctaattgaaccagactttgaagagcgtcgagctagaagattcggaatgatggatgccatgtcttcccttatgcggcaacggatggaagaaatgggaagagatggtttgtttgatattcgtggtagacaaggaaccggaacagagtacggacgaaggccaactgctgttcctacattggtatttggcggcatcccttctcctggagttgatagcggtgatgttaatgttgtcctcaggggaggccgcagagttggcgctgcccaaccaaatttcagtagtttagttgttggtcccagtctggaagccctttttgagcagctacttctccagaacaaccgtcaaggcccagcacctgctccacagtcagctattgactccatgcctgtggtaaagataaaccgcaggcatcttgacgacgatccacagtgcgcagtttgcaaagacaaattcgaggttggagcagaggcacgggagatgccatgcaagcacctgtaccatactgactgcatcatcccctggctggttcagcacaattcttgccctgtttgccgccatccactgccatcacagagatcaggcagtaccagtagcgcccggccttcagcttactacaacgaagccgctgatcctcctggggtcaccagagcagatcttgaacctgctccaagagacggtggcagggaaagccaggaaaggcgccgctccttctcgtttctgtggccgtttggcccgtcgagttccagatccagttcttaccagtacgaacagaatgttgatgagcctgcagtatacgatccaaaccagatagcatattctgagtggcactatgaccac

SEQ ID NO: 1457 - DNA, 975 bp, Artificial sequence; identical to SEQ ID NO: 1456
  Mir resistant mutated nucleotide sequence

SEQ ID NO: 1458 - DNA, 975 bp, Artificial sequence; identical to SEQ ID NO: 1456
  Mir resistant mutated nucleotide sequence

SEQ ID NO: 1459 - DNA, 975 bp, Artificial sequence
  Mir resistant mutated nucleotide sequence
atgtccaatagggccacacattggtgttatgcctgtcggcggccaattcgtctccgtgggcaggatatcgcatgccccaactgcaatgatggttttatccaggaaattagtgagatgggtggcatattgaacacttatgggctaattgaaccagactttgaagagcgtcgagctagaagattcggaatgatggatgccatgtcttcccttatgcggcaacggatggaagaaatgggaagagatggtttgtttgatattcgtggtagacaaggcacaggaacagagtacggccgaaggccaactgctgttcctacattggtatttggcggcatcccttctcctggagttgatagcggtgatgttaatgttgtcctcaggggaggccgcagagttggcgctgcccaaccaaatttcagtagtttagttgttggtcccagtctggaagccctttttgagcagctacttctccagaacaaccgtcaaggcccagcacctgctccacagtcagctattgactccatgcctgtggtaaagataaaccgcaggcatcttgacgacgatccacagtgcgcagtttgcaaagacaaattcgaggttggagcagaggcacgggagatgccatgcaagcacctgtaccatactgactgcatcatcccctggctggttcagcacaattcttgccctgtttgccgccatccactgccatcacagagatcaggcagtaccagtagcgcccggccttcagcttactacaacgaagccgctgatcctcctggggtcaccagagcagatcttgaacctgctccaagagacggtggcagggaaagccaggaaaggcgccgctccttctcgtttctgtggccgtttggcccgtcgagttccagatccagttcttaccagtacgaacagaatgttgatgagcctgcagtatacgatccaaaccagatagcatattctgagtggcactatgaccac

SEQ ID NO: 1460 - DNA, 1476 bp, Artificial sequence; identical to SEQ ID NO: 1301
  Mir resistant mutated nucleotide sequence

SEQ ID NO: 1461 - DNA, 1476 bp, Artificial sequence; identical to SEQ ID NO: 1302
  Mir resistant mutated nucleotide sequence

SEQ ID NO: 1462 - DNA, 1476 bp, Artificial sequence; identical to SEQ ID NO: 1302
  Mir resistant mutated nucleotide sequence

SEQ ID NO: 1463 - DNA, 1476 bp, Artificial sequence; identical to SEQ ID NO: 1302
  Mir resistant mutated nucleotide sequence

SEQ ID NO: 1464 - DNA, 1476 bp, Artificial sequence; identical to SEQ ID NO: 1302
  Mir resistant mutated nucleotide sequence

SEQ ID NO: 1465 - DNA, 3033 bp, Artificial sequence
  Mir resistant mutated nucleotide sequence
atggcccacctccagctcacggcgttagcaggaggagcagatgatgaaatggaggaggtcgcgttgctgggctcctacgacgaggaggccggggtggggccggagggggaggaccaggcggaggccggcatgcggcgggtgcaggtgcgcgtcaccggcatgacgtgctccgcgtgcacgggcgccgtcgaggccgcgctctccgcccgccgaggcgtgcgccgcgccgccgtgtcgctgctccagaaccgcgcccacgtcgtcttcgaccccgcactcgccaaggtccctttatcagtgggatcgatagaatggaagcaatctccagacgatgacattgtagaagcaatagaagatgctgggttcgaagcggaaattcttcctgactctactgtttctcagccaaaatcacagaagactttgtcaggacaatttaggatagggggaatgacttgtgctgcatgcgtgaactcggttgaggggatcttaaaaaaattgccaggtgtaaaaagagcagttgttgcattagcgacctcattgggtgaagttgaatatgatccttctgccattagcaaagatgaaattgttcaggccatcgaggatgctggttttgatgctgcgctgttgcaaagtagtgagcaagacaaagccttattaactgtcacagggttgcattttgagggagatgtagatgtattgcatgatatactgaagaaaatggaagggttgcgtcagtttggtgtagattttgcgaaatcagaagttgacattgtatttgaccctgaagtagttggtttgagacagattgtagataccatcgagatggaaagcaacaatagactgaaagctcatgtacagaatccatacatacgagctgcttcaaatgatgcacaggaggcaaataagacgcttcaccttcttcgctttagtttattcctaagtattcctgtatttttcatccgcatggtatgccctcacatacctctgattagttcattcctactcatgcactttgggccatttcgtattggagatctgttgaagtggattctggtgaccatggtacagtttgttgttggcaaacgattctatgttgcagcttatagggccctaagacatggctctacaaatatggatgtcttagttgttattggcactactgcttcatatgtctactctgtttgtgcacttctttatggggcattcactggatttcatcctccaatatattttgagacgagtgcaatgataattacatttgtgctatttgggaagtatcttgaggtgcttgcgaaaggaaagacatcagatgctatcaagaagcttgtagagcttgctcctgctacagctcttctacttctgaaggacaaagagggaaaatattcaggagagaaggagattgacgcatcgttagtacaacctggtgatgccttaaaagtgcttcctggttcaaaggttcctgcagacggtatcgtcatttggggtacaagtcatgtcaatgagagtatggtaaccggtgaatctgtaccaatctccaaggaagtatccagtctagtaattggaggcacaatgaacttgcatggtattcttcatatacaagcgactaaagtaggatctgggacagttctgagccagataatttctcttgttgaaactgcccagatgtctaaggcccctattcagaagtttgctgattatgtagctagcattttcgttcctattgtcatcaccctgtccttcttgacatttcttgcatggtttctatgtggatggttgggagcatatccaaactcatggtctgctgaaagtagcaattgctttgttttctccctcatgttctccatatctgttgtggtgattgcttgtccatgtgctcttggtctggcaacaccaactgctgttatggtagcaactggagttggggctagtcatggagtacttgtaaagggcggagatgccctggagagagctcagaatgtgaaatatgttattttcgacaagaccggaacactgacccaaggaaaggctactgtaacaacagcaaagattttttcaggaatggatctgggggactttctcacattggtagcatctgctgaggcaagcagtgagcatccacttgcaaaagctatcttggattatacatttcatttccatttctttggcaaacttacctcagcaaaagacaacattaatagaagaaaagaagagatactttctcagtggcttctggaagttgcggacttttctgccttgcctggcaaagggattcaatgttggatcaatgggaagaaaattttggtagggaatcgtgcattgataactgaaaatggggtaaacattccagaagaagctgaatgtttcttggtagacatggagctgaatgcaaaaactggtattctcgtagcatatgatggagacttcattggcttgattgggataactgatcccttgaaaagggaggctgctgtggttatacaaggtctaaaaaagatgggtgttcatccagttatggtcactggggacaactggaggactgcacgagcagttgcaaaggaggttggcattgacgacgtgagagccgaggttatgccagccggaaaagccaatgtaatccgctctctgcaaaaggatggcagtgttgtcgcaatggtcggagatggcatcaacgactcgcctgccctggccgccgctgatgttggtatggctatcggtgcaggcactgacattgctattgaggcggctgactatgtgctcgtccggaacaacctggaggatgtgatcacagctattgacctctcaaggaagacattcagcaggatccggtggaactacttctttgccatggcgtacaacgtgatcgccatccccgtggctgctggcgcgctgtttcccttcaccggggtccagatgccgccttggctggctggcgcgtgcatggcattctcgtccgtcagcgtggtgtgttcgtcgctgctgctgaggaggtataggaaaccgaggctcaccaccgtgcttcagataacagtggaa

SEQ ID NO: 1466 - DNA, 3033 bp, Artificial sequence
  Mir resistant mutated nucleotide sequence
atggcccacctccagctcacggcgctcgcaggaggagcagatgatgaaatggaggaggtcgcgttgctgggctcctacgacgaggaggccggggtggggccggagggggaggaccaggcggaggccggcatgcggcgggtgcaggtgcgcgtcaccggcatgacgtgctccgcgtgcacgggcgccgtcgaggccgcgctctccgcccgccgaggcgtgcgccgcgccgccgtgtcgctgctccagaaccgcgcccacgtcgtcttcgaccccgcactcgccaaggtccctttatcagtgggatcgatagaatggaagcaatctccagacgatgacattgtagaagcaatagaagatgctgggttcgaagcggaaattcttcctgactctactgtttctcagccaaaatcacagaagactttgtcaggacaatttaggatagggggaatgacttgtgctgcatgcgtgaactcggttgaggggatcttaaaaaaattgccaggtgtaaaaagagcagttgttgcattagcgacctcattgggtgaagttgaatatgatccttctgccattagcaaagatgaaattgttcaggccatcgaggatgctggttttgatgctgcgctgttgcaaagtagtgagcaagacaaagccttattaactgtcacagggttgcattttgagggagatgtagatgtattgcatgatatactgaagaaaatggaagggttgcgtcagtttggtgtagattttgcgaaatcagaagttgacattgtatttgaccctgaagtagttggtttgagacagattgtagataccatcgagatggaaagcaacaatagactgaaagctcatgtacagaatccatacatacgagctgcttcaaatgatgcacaggaggcaaataagacgcttcaccttcttcgctttagtttattcctaagtattcctgtatttttcatccgcatggtatgccctcacatacctctgattagttcattcctactcatgcactttgggccatttcgtattggagatctgttgaagtggattctggtgaccatggtacagtttgttgttggcaaacgattctatgttgcagcttatagggccctaagacatggctctacaaatatggatgtcttagttgttattggcactactgcttcatatgtctactctgtttgtgcacttctttatggggcattcactggatttcatcctccaatatattttgagacgagtgcaatgataattacatttgtgctatttgggaagtatcttgaggtgcttgcgaaaggaaagacatcagatgctatcaagaagcttgtagagcttgctcctgctacagctcttctacttctgaaggacaaagagggaaaatattcaggagagaaggagattgacgcatcgttagtacaacctggtgatgccttaaaagtgcttcctggttcaaaggttcctgcagacggtatcgtcatttggggtacaagtcatgtcaatgagagtatggtaaccggtgaatctgtaccaatctccaaggaagtatccagtctagtaattggaggcacaatgaacttgcatggtattcttcatatacaagcgactaaagtaggatctgggacagttctgagccagataatttctcttgttgaaactgcccagatgtctaaggcccctattcagaagtttgctgattatgtagctagcattttcgttcctattgtcatcaccctgtccttcttgacatttcttgcatggtttctatgtggatggttgggagcatatccaaactcatggtctgctgaaagtagcaattgctttgttttctccctcatgttctccatatctgttgtggtgattgcttgtccatgtgctcttggtctggcaacaccaactgctgttatggtagcaactggagttggggctagtcatggagtacttgtaaagggcggagatgccctggagagagctcagaatgtgaaatatgttattttcgacaagaccggaacactgacccaaggaaaggctactgtaacaacagcaaagattttttcaggaatggatctgggggactttctcacattggtagcatctgctgaggcaagcagtgagcatccacttgcaaaagctatcttggattatacatttcatttccatttctttggcaaacttacctcagcaaaagacaacattaatagaagaaaagaagagatactttctcagtggcttctggaagttgcggacttttctgccttgcctggcaaagggattcaatgttggatcaatgggaagaaaattttggtagggaatcgtgcattgataactgaaaatggggtaaacattccagaagaagctgaatgtttcttggtagacatggagctgaatgcaaaaactggtattctcgtagcatatgatggagacttcattggcttgattgggataactgatcccttgaaaagggaggctgctgtggttatacaaggtctaaaaaagatgggtgttcatccagttatggtcactggggacaactggaggactgcacgagcagttgcaaaggaggttggcattgacgacgtgagagccgaggttatgccagccggaaaagccaatgtaatccgctctctgcaaaaggatggcagtgttgtcgcaatggtcggagatggcatcaacgactcgcctgccctggccgccgctgatgttggtatggctatcggtgcaggcactgacattgctattgaggcggctgactatgtgctcgtccggaacaacctggaggatgtgatcacagctattgacctctcaaggaagacattcagcaggatccggtggaactacttctttgccatggcgtacaacgtgatcgccatccccgtggctgctggcgcgctgtttcccttcaccggggtccagatgccgccttggctggctggcgcgtgcatggcattctcgtccgtcagcgtggtgtgttcgtcgctgctgctgaggaggtataggaaaccgaggctcaccaccgtgcttcagataacagtggaa

SEQ ID NO: 1467 - DNA, 3033 bp, Artificial sequence; identical to SEQ ID NO: 1466
  Mir resistant mutated nucleotide sequence

SEQ ID NO: 1468 - DNA, 3033 bp, Artificial sequence; identical to SEQ ID NO: 1466
  Mir resistant mutated nucleotide sequence

SEQ ID NO: 1469 - DNA, 3033 bp, Artificial sequence; identical to SEQ ID NO: 1466
  Mir resistant mutated nucleotide sequence

SEQ ID NO: 1470 - DNA, 1215 bp, Artificial sequence
  Mir resistant mutated nucleotide sequence
atggatatggccatcgacacgccatcgccggcgccgccacccacgccgccggcgccttcggcggcggcggggcggcagacgcgtgcggcggaggcggtgcgtctggagcaccagctggtgcgcgtgcctctcgagtccctccgcgccaccgtccgctcgaaccaccgcctcgccgagaaggagatcgccgccgtcctctcctccgcctccgcggcccccgccgagagcagcgccgccgccgtcgaccacctcacctccctcgtctcccgcctccacggcctcaagcgcaagatggaagagggcgcacgggtggaggagctgcaggtgcagcgctgccgggcgcgtctggatcggctggcgactgccagcaccggtgacgatgctgagtgggaggacattcggctgaagaggatcctggtcgattacatgttaagaatgagttattatgattccgccaccaagctcgctgagacttctggtattcaggaactcgttgatattgatgtcttcctggatgcgaaaagagtaattgattctcttcagaataatgaagttgctcctgctttagcttggtgtgcagaaaacaagtcccgactaaagaaatcgaagagtaagctcgagtttttactgaggcttcaagaatttgtggaatttgtcaaggctaagaattgcattcaggctatagcatatgctcgaaaacaccttgctccctggggcaatatgcacatgaaagaattgcagcgtgttacagcaacattggtttttagaagcaatactaattgtactccatacaagatattgtttgagcaagagcgctgggactatcttgttgacattttcaagcaagacttttgcaagttgtatggcatgaccctagagccgttgctgaacatatacctgcaagcaggcctgacagctctgaagaccccattctgcactgagggtagctgccctagggaagaccccttgtccctggagggcttcaggaaactagccgagcctctgcccttctctaagcaacaccactcgaagctcgtctgttacatcaccaaggagctcatggacactgagaacccacctcgggttctgccgaacggctatgtctacagtgagaaggcgcttcaagagatgtccaagaaaaatgacgggaagattacatgccccaggacaggagatgtttgcgacttctcagagtgtgtcagggctttcatctcc

SEQ ID NO: 1471 - DNA, 1173 bp, Artificial sequence
  Mir resistant mutated nucleotide sequence
atgaaggtgaggagatcggaaccagttctagtccatgcgaccggagccgcgaccacccaagaggattccctgagcagggtgctctcgcagtactaccccttcgagggtcggctggccgtacgcgaggacgggaggctcgccgtgcggaacgaccgccgcggtgtccccttcgttgacgcggtgtccgattacgagctgcaggtggtctgtgacgcaacggccccgggttctgagcttctcggtgacctcgtctacgtcagcatgcagcacgagaacgccctggaagcgccgatgctgaccgtgcaggtgaccacgttcaagtgcggcggctttgtcctcgggctcgccatgaaccactgcttggcagacggccagtccgccgccgagttcatctgctcctgggcggagaccgcgcgtggtgtggccatgtcgacgccgccgtacctcgaccgcacggtgcagcgcgccaggccgatcccgacggttgacttcgcacatgacgagttcgcagagatcgaggacgtctccggcctcgccggcacattcggcaaggagccgtgcgtttaccgctccttcactttcgacgcaggcaagctgcacaggctgaagcaagccgcaagcgagcaagggcaaggaggcaccaagagctccgtcttcgtcgcgctcacggctttcgtgtgggtatcaaggacgcgggccctgcggatgctccccgatcagaagagcaagctgctgttcgcggtggacgcccgtctgcgcgtcgacccgcccttgccgcccggcttctggggtaacgccatcatcttcgcctgctgcatctccactgccagggatctcctcagcaaaccactgtccgcggctgcccgttccatcagagaagcaatagtaagaacagatgatgcattcatccgttccgccgttgactacatcgagttgaacagcggtgctcgcccgtcgctaatggcaaccaccctggtcactgcttggaatcgactcaggtttcgcgcggcggacttcggatggggtgaagcaatctactcggggccggcggagctgccgcagaaggaggtggccatgtttctgcgcggcgtgagtgacagccagagcacagtgctggttattgggatgcctgtgtcatgtatgcaagcattccaagaaacggtagatctgctg

SEQ ID NO: 1472 - DNA, 1173 bp, Artificial sequence
  Mir resistant mutated nucleotide sequence
atgaaggtgaggagatcggaaccagttctagtccatgcgaccggagccgcgaccacccaagaggattccctgagcagggtgctctcgcagtactaccccttcgagggtcggctggccgtacgcgaggacgggaggctcgccgtgcggaacgaccgccgcggtgtccccttcgttgacgcggtgtccgattacgagctgcaggtggtctgtgacgcaacggccccgggttctgagcttctcggtgacctcgtctacgtcagcatgcagcacgagaacgccctggaagcgccgatgctgaccgtgcaggtgaccacgttcaagtgcggcggctttgtcctcgggctcgccatgaaccactgcttggcagacggccagtccgccgccgagttcatctgctcctgggcggagaccgcgcgtggtgtggccatgtcgacgccgccgtacctcgaccgcacggtgcagcgcgccaggccgatcccgacggttgacttcgcacatgacgagttcgcagagatcgaggacgtctccggcctcgccggcacattcggcaaggagccgtgcgtttaccgctccttcactttcgacgcaggcaagctgcacaggctgaagcaagccgcaagcgagcaagggcaaggaggcaccaagagctccgtcttcgtcgcgctcacggctttcgtgtgggtatcaaggacgcgggccctgcggatgctccccgatcagaagagcaagctgctgttcgcggtggacgcccgtctgcgcgtcgacccgcccttgccgcccggcttctggggtaacgccatcatcttcgcctgctgcatctccactgccagggatctcctcagcaaaccactgtccgcggctgcccgttccatcagagaagccatagtaagaacagatgatgccttcatccgttccgccgttgactacatcgagttgaacagcggtgctcgcccgtcgctaatggcaaccaccctggtcactgcttggaatcgactcaggtttcgcgcggcggacttcggatggggtgaagcaatctactcggggccggcggagctgccgcagaaggaggtggccatgtttctgcgcggcgtgagtgacagccagagcacagtgctggttattgggatgcctgtgtcatgtatgcaagcattccaagaaacggtagatctgctg

SEQ ID NO: 1473 - DNA, 1173 bp, Artificial sequence; identical to SEQ ID NO: 1472
  Mir resistant mutated nucleotide sequence

SEQ ID NO: 1474 - DNA, 1173 bp, Artificial sequence; identical to SEQ ID NO: 1472
  Mir resistant mutated nucleotide sequence

SEQ ID NO: 1475 - DNA, 1173 bp, Artificial sequence
  Mir resistant mutated nucleotide sequence
atgaaggtgaggagatcggaaccagttctagtccatgcgaccggagccgcgaccacccaagaggattccctgagcagggtgctctcgcagtactaccccttcgagggtcggctggccgtacgcgaggacgggaggctcgccgtgcggaacgaccgccgcggtgtccccttcgttgacgcggtgtccgattacgagctgcaggtggtctgtgacgcaacggccccgggttctgagcttctcggtgacctcgtctacgtcagcatgcagcacgagaacgccctggaagcgccgatgctgaccgtgcaggtgaccacgttcaagtgcggcggctttgtcctcgggctcgccatgaaccactgcttggcagacggccagtccgccgccgagttcatctgctcctgggcggagaccgcgcgtggtgtggccatgtcgacgccgccgtacctcgaccgcacggtgcagcgcgccaggccgatcccgacggttgacttcgcacatgacgagttcgcagagatcgaggacgtctccggcctcgccggcacattcggcaaggagccgtgcgtttaccgctccttcactttcgacgcaggcaagctgcacaggctgaagcaagccgcaagcgagcaagggcaaggaggcaccaagagctccgtcttcgtcgcgctcacggctttcgtgtgggtatcaaggacgcgggccctgcggatgctccccgatcagaagagcaagctgctgttcgcggtggacgcccgtctgcgcgtcgacccgcccttgccgcccggcttctggggtaacgccatcatcttcgcctgctgcatctccactgccagggatctcctcagcaaaccactgtccgcggctgcccgttccatcagagaagcaatcgtaagaacagatgatgcattcatccgttccgccgttgactacatcgagttgaacagcggtgctcgcccgtcgctaatggcaaccaccctggtcactgcttggaatcgactcaggtttcgcgcggcggacttcggatggggtgaagcaatctactcggggccggcggagctgccgcagaaggaggtggccatgtttctgcgcggcgtgagtgacagccagagcacagtgctggttattgggatgcctgtgtcatgtatgcaagcattccaagaaacggtagatctgctg

SEQ ID NO: 1476 - DNA, 1389 bp, Artificial sequence
  Mir resistant mutated nucleotide sequence
atggtgaacggcgagccggcgggggcggagtgcacgcgggcgtcgctgctggggaggtatgagatcgggcggaccctcggggaaggcaacttcggcaaggtgaagtacgcgcgccacatcggcaccggcggccacttcgccatcaagatcctcgaccgcagcaagatcttaagtttaagaatagatgatcaaattaggagggagatcgggacgctcaagctgctcaagcacccaaatgtcgtccgcttgcacgaggttgctgctagtaaaacaaagatttacatggtgcttgagtttgttaatggaggcgagctcttcgacaagattgctataaagggaaaactgtctgaacatgagggcaggaggcttttccagcagctaattgatggtgtcagctactgccatgataaaggtgtctaccacagagaccttaagccagagaatgtccttgttgataggaaaggcaacatcaagatctctgacttcggcctcagtgctctacctcaacatctcgggaatgatggacttctgcacacaacatgtggcagccccaattacatagctcctgaggttttgcaaaacagaggttacgatggctccttgtcagatatctggtcttgtggagtaattctttatgtgatgcttgttggttaccttccctttgatgataggaatcttgttgttctttatcagaagattttcaagggagactgtcagatcccaaagtggctctcacctgccgcacaggaccttcttaaaaggatccttgaaccaaatccaatgaagaggatcaacatcacagggatcagagagcatgagtggttcaagaaggactatgtacctgctgttccatacgatgatgatgaagatgtcctttccggttcagttctctcaataaaagagcaaattgaagaaccagcacaagaaaagtgtactcatatcaatgcttttcagttgatcggaatggcttcttcccttgatctttctggtttatttgaggaagaggatgcagctcaaagaaagattcggttcacttcaacgcatccacccaaggatttattcgacaagattgagagcgttgcgatggagatgggattcgaagttcataggggggcaagcaagctcaaagtcttgaagaatagcaaatgttccaagaagtccaggaatccgtcatcatttttggtgtgcactgaggtgtttgagcttgggccatcattatatgttgtagaacttaggaaatcccatggggactctacattgtatagacagctgtgcgagaggctctcggatgagctaggggcctgcaagacagagcagattatgaggactgaatcactgagtgacgatctttcgagcctcgatggcgaagcgttccctctatctgggttc

SEQ ID NO: 1477 - DNA, 1389 bp, Artificial sequence
  Mir resistant mutated nucleotide sequence
atggtgaacggcgagccggcgggggcggagtgcacgcgggcgtcgctgctggggaggtatgagatcgggcggaccctcggggaaggcaacttcggcaaggtgaagtacgcgcgccacatcggcaccggcggccacttcgccatcaagatcctcgaccgcagcaagatcctcagtctcagaatagatgatcaaattaggagggagatcgggacgctcaagctgctcaagcacccaaatgtcgtccgcttgcacgaggttgctgctagtaaaacaaagatttacatggtgcttgagtttgttaatggaggcgagctcttcgacaagattgctataaagggaaaactgtctgaacatgagggcaggaggcttttccagcagctaattgatggtgtcagctactgccatgataaaggtgtctaccacagagaccttaagccagagaatgtccttgttgataggaaaggcaacatcaagatctctgacttcggcctcagtgctctacctcaacatctcgggaatgatggacttctgcacacaacatgtggcagccccaattacatagctcctgaggttttgcaaaacagaggttacgatggctccttgtcagatatctggtcttgtggagtaattctttatgtgatgcttgttggttaccttccctttgatgataggaatcttgttgttctttatcagaagattttcaagggagactgtcagatcccaaagtggctctcacctgccgcacaggaccttcttaaaaggatccttgaaccaaatccaatgaagaggatcaacatcacagggatcagagagcatgagtggttcaagaaggactatgtacctgctgttccatacgatgatgatgaagatgtcctttccggttcagttctctcaataaaagagcaaattgaagaaccagcacaagaaaagtgtactcatatcaatgcttttcagttgatcggaatggcttcttcccttgatctttctggtttatttgaggaagaggatgcagctcaaagaaagattcggttcacttcaacgcatccacccaaggatttattcgacaagattgagagcgttgcgatggagatgggattcgaagttcataggggggcaagcaagctcaaagtcttgaagaatagcaaatgttccaagaagtccaggaatccgtcatcatttttggtgtgcactgaggtgtttgagcttgggccatcattatatgttgtagaacttaggaaatcccatggggactctacattgtatagacagctgtgcgagaggctctcggatgagctaggggcctgcaagacagagcagattatgaggactgaatcactgagtgacgatctttcgagcctcgatggcgaagcgttccctctatctgggttc

SEQ ID NO: 1478 - DNA, 1389 bp, Artificial sequence; identical to SEQ ID NO: 1477
  Mir resistant mutated nucleotide sequence

SEQ ID NO: 1479 - DNA, 1389 bp, Artificial sequence; identical to SEQ ID NO: 1477
  Mir resistant mutated nucleotide sequence

SEQ ID NO: 1480 - DNA, 1389 bp, Artificial sequence; identical to SEQ ID NO: 1477
  Mir resistant mutated nucleotide sequence

SEQ ID NO: 1481 - DNA, 1227 bp, Artificial sequence
  Mir resistant mutated nucleotide sequence
atgatggaggcaaagcaggcggcgcccgaccggctctcctccctcccagcggagctgcaggacgagatcctcatccgcctcgacctcagggacgccgtgcgcacctccgcgctctcccgcacctggcgggacctctggaagtcgctctcggtgatctccctctccttccccttcggcacgcacccttccgtcgtcgacagcgtcctcctccgctacatcggcccccgcgtctctctcttccgcatctgtgtcgacgacgcatgcgcagatagaatagatgattggctcatcgcgctctcccgctaccgtgtcgagtccatcgacatgtgtggcacactcagatcactcggcaacttcaatctctactcctccatcttctccttaggtgatctcgtgtctctgctgctgaaaaactgccgcatcccacccctccccgtaggattccccggcttccccgcgctccagaagctagtcctcgcctatgttatcttcccatcgaacgggttcaaacaattggaggctatcattcgtcgctcacccttgcttcataccctgcatatgtttgacgtgttcatccctggtgaatacccagactcagtgatcgaggcgcccaatctccgtgtcctgtcaatctattcaccgtatgactatcgatggcgatttggagagctgtcgtgtctcgaatatgccaacattcatgtgttccactgtccgcagcatgaacatgattttggagttttccttgctcggtttgctcacgttcaaaagttcggtctcttctctccggctgtcgatgttaagatgccttatacacttccattcaccttttataacttgaagaaattgcagttatgtgtggatttcaatgaaattcactccattttgtccatgtttaccatgctaaggagctgtcacaaccttcaaaacttaaaaatagagtcgcggcacgacagttatgagagttttgaggcagattgggagttcttaaatgctctgtggactgatggcatgtgtgccaatcttcaaattgtgcgcatgattgatatcatttcgcttccgaatgaaacttcatttatgaagcttatactttctaaagcaactcttcttcacacattatatgttggcgcacacccatatgattttgatgatcacataattgacatgctaaaatgcgaaagagcttcagctcaagctcgtgtacagtttgaaggttcggagcaacagtgg

SEQ ID NO: 1482 - DNA, 1227 bp, Artificial sequence
  Mir resistant mutated nucleotide sequence
atgatggaggcaaagcaggcggcgcccgaccggctctcctccctcccagcggagctgcaggacgagatcctcatccgcctcgacctcagggacgccgtgcgcacctccgcgctctcccgcacctggcgggacctctggaagtcgctctcggtgatctccctctccttccccttcggcacgcacccttccgtcgtcgacagcgtcctcctccgctacatcggcccccgcgtctctctcttccgcatctgtgtcgacgacgcatgtgcagatagaatagatgattggctcatcgcgctctcccgctaccgtgtcgagtccatcgacatgtgtggcacactcagatcactcggcaacttcaatctctactcctccatcttctccttaggtgatctcgtgtctctgctgctgaaaaactgccgcatcccacccctccccgtaggattccccggcttccccgcgctccagaagctagtcctcgcctatgttatcttcccatcgaacgggttcaaacaattggaggctatcattcgtcgctcacccttgcttcataccctgcatatgtttgacgtgttcatccctggtgaatacccagactcagtgatcgaggcgcccaatctccgtgtcctgtcaatctattcaccgtatgactatcgatggcgatttggagagctgtcgtgtctcgaatatgccaacattcatgtgttccactgtccgcagcatgaacatgattttggagttttccttgctcggtttgctcacgttcaaaagttcggtctcttctctccggctgtcgatgttaagatgccttatacacttccattcaccttttataacttgaagaaattgcagttatgtgtggatttcaatgaaattcactccattttgtccatgtttaccatgctaaggagctgtcacaaccttcaaaacttaaaaatagagtcgcggcacgacagttatgagagttttgaggcagattgggagttcttaaatgctctgtggactgatggcatgtgtgccaatcttcaaattgtgcgcatgattgatatcatttcgcttccgaatgaaacttcatttatgaagcttatactttctaaagcaactcttcttcacacattatatgttggcgcacacccatatgattttgatgatcacataattgacatgctaaaatgcgaaagagcttcagctcaagctcgtgtacagtttgaaggttcggagcaacagtgg

SEQ ID NO: 1483 - DNA, 1227 bp, Artificial sequence
  Mir resistant mutated nucleotide sequence
atgatggaggcaaagcaggcggcgcccgaccggctctcctccctcccagcggagctgcaggacgagatcctcatccgcctcgacctcagggacgccgtgcgcacctccgcgctctcccgcacctggcgggacctctggaagtcgctctcggtgatctccctctccttccccttcggcacgcacccttccgtcgtcgacagcgtcctcctccgctacatcggcccccgcgtctctctcttccgcatctgtgtcgacgacgcatgcgccgatagaatagatgattggctcatcgcgctctcccgctaccgtgtcgagtccatcgacatgtgtggcacactcagatcactcggcaacttcaatctctactcctccatcttctccttaggtgatctcgtgtctctgctgctgaaaaactgccgcatcccacccctccccgtaggattccccggcttccccgcgctccagaagctagtcctcgcctatgttatcttcccatcgaacgggttcaaacaattggaggctatcattcgtcgctcacccttgcttcataccctgcatatgtttgacgtgttcatccctggtgaatacccagactcagtgatcgaggcgcccaatctccgtgtcctgtcaatctattcaccgtatgactatcgatggcgatttggagagctgtcgtgtctcgaatatgccaacattcatgtgttccactgtccgcagcatgaacatgattttggagttttccttgctcggtttgctcacgttcaaaagttcggtctcttctctccggctgtcgatgttaagatgccttatacacttccattcaccttttataacttgaagaaattgcagttatgtgtggatttcaatgaaattcactccattttgtccatgtttaccatgctaaggagctgtcacaaccttcaaaacttaaaaatagagtcgcggcacgacagttatgagagttttgaggcagattgggagttcttaaatgctctgtggactgatggcatgtgtgccaatcttcaaattgtgcgcatgattgatatcatttcgcttccgaatgaaacttcatttatgaagcttatactttctaaagcaactcttcttcacacattatatgttggcgcacacccatatgattttgatgatcacataattgacatgctaaaatgcgaaagagcttcagctcaagctcgtgtacagtttgaaggttcggagcaacagtgg

SEQ ID NO: 1484 - DNA, 1227 bp, Artificial sequence
  Mir resistant mutated nucleotide sequence
atgatggaggcaaagcaggcggcgcccgaccggctctcctccctcccagcggagctgcaggacgagatcctcatccgcctcgacctcagggacgccgtgcgcacctccgcgctctcccgcacctggcgggacctctggaagtcgctctcggtgatctccctctccttccccttcggcacgcacccttccgtcgtcgacagcgtcctcctccgctacatcggcccccgcgtctctctcttccgcatctgtgtcgacgacgcatgcgcagacagaatagacgactggctcatcgcgctctcccgctaccgtgtcgagtccatcgacatgtgtggcacactcagatcactcggcaacttcaatctctactcctccatcttctccttaggtgatctcgtgtctctgctgctgaaaaactgccgcatcccacccctccccgtaggattccccggcttccccgcgctccagaagctagtcctcgcctatgttatcttcccatcgaacgggttcaaacaattggaggctatcattcgtcgctcacccttgcttcataccctgcatatgtttgacgtgttcatccctggtgaatacccagactcagtgatcgaggcgcccaatctccgtgtcctgtcaatctattcaccgtatgactatcgatggcgatttggagagctgtcgtgtctcgaatatgccaacattcatgtgttccactgtccgcagcatgaacatgattttggagttttccttgctcggtttgctcacgttcaaaagttcggtctcttctctccggctgtcgatgttaagatgccttatacacttccattcaccttttataacttgaagaaattgcagttatgtgtggatttcaatgaaattcactccattttgtccatgtttaccatgctaaggagctgtcacaaccttcaaaacttaaaaatagagtcgcggcacgacagttatgagagttttgaggcagattgggagttcttaaatgctctgtggactgatggcatgtgtgccaatcttcaaattgtgcgcatgattgatatcatttcgcttccgaatgaaacttcatttatgaagcttatactttctaaagcaactcttcttcacacattatatgttggcgcacacccatatgattttgatgatcacataattgacatgctaaaatgcgaaagagcttcagctcaagctcgtgtacagtttgaaggttcggagcaacagtgg

SEQ ID NO: 1485 - DNA, 1320 bp, Artificial sequence
  Mir resistant mutated nucleotide sequence
atggcggccgccttctcctccaccgttggagctccggcctccaccccgagcaggagcagcttcctcgggaagaagctcagcaagcagcaggtgtctgcggcggcggccgtgaactactaccatggcaagagctccagcagcgccgccgccaacgttaacaggttcaaggtgatggcggccaaggaggtggacgagacgaagcagtcggaccaggacaggtggaagggcctggcctacgacgtctcggacgaccagcaggatatcaccaggggcaagggcatgatcgactccctcttccaggcgcccatgggggacggcacccacgtcgccgtgctcagctcctacgactacatcagccagggccaaaagacttacagcttcgacaacatgatggatggtttctacatatccaagagcttcatggacaagctcgtggtccacctctccaagaacttcatgagcctgccaaacatcaaagttcccctgatcctgggtatctggggaggcaaaggtcaggggaagtccttccaatgcgagctcgtcttctccaagatgggcatcatccccatcatgatgagcgccggcgagctggagagcggcaacgccggagagcccgccaagctcatcaggcagcggtaccgtgaggctgccgacctcatctccaagggcaagatgtcctgcctgttcatcaacgatctggacgccggcgcaggtcgcatgggcggcaccacccagtacacggtgaacaaccagatggtgaacgccaccctgatgaacatcgccgacaaccccaccaacgtgcagctcccggggatgtacaacaaggtggacaacgcccgggtgcccatcatcgtcaccggcaacgacttctccacgctgtacgcgccgctcatccgtgatggacgtatggagaagttctactgggcgcccacccgcgaggaccgcatcggcgtctgcaagggaatatttagaacagatggagtagacgaggagcacgtcgtccagctcgtcgacaccttcccgggccagtccatcgacttcttcggcgccctgcgtgcccgggtgtacgacgacgaggtgcgccggtgggtggccgagaccggcgtcgagaacatcgccaagaagctcgtcaactccaaggagggcccgccgacgttcgagcagcccaagatgacgatcgagaagctcttggagtacggccacatgctggtggcggagcaggagaacgtcaagcgtgtgcagcttgctgacaagtacctcaacgaggctgctcttggtgcagccaacgaggacgccatgaagactggcaacttcttcaag

SEQ ID NO: 1486 - DNA, 1320 bp, Artificial sequence
  Mir resistant mutated nucleotide sequence
atggcggccgccttctcctccaccgttggagctccggcctccaccccgagcaggagcagcttcctcgggaagaagctcagcaagcagcaggtgtctgcggcggcggccgtgaactactaccatggcaagagctccagcagcgccgccgccaacgttaacaggttcaaggtgatggcggccaaggaggtggacgagacgaagcagtcggaccaggacaggtggaagggcctggcctacgacgtctcggacgaccagcaggatatcaccaggggcaagggcatgatcgactccctcttccaggcgcccatgggggacggcacccacgtcgccgtgctcagctcctacgactacatcagccagggccaaaagacttacagcttcgacaacatgatggatggtttctacatatccaagagcttcatggacaagctcgtggtccacctctccaagaacttcatgagcctgccaaacatcaaagttcccctgatcctgggtatctggggaggcaaaggtcaggggaagtccttccaatgcgagctcgtcttctccaagatgggcatcatccccatcatgatgagcgccggcgagctggagagcggcaacgccggagagcccgccaagctcatcaggcagcggtaccgtgaggctgccgacctcatctccaagggcaagatgtcctgcctgttcatcaacgatctggacgccggcgcaggtcgcatgggcggcaccacccagtacacggtgaacaaccagatggtgaacgccaccctgatgaacatcgccgacaaccccaccaacgtgcagctcccggggatgtacaacaaggtggacaacgcccgggtgcccatcatcgtcaccggcaacgacttctccacgctgtacgcgccgctcatccgtgatggacgtatggagaagttctactgggcgcccacccgcgaggaccgcatcggcgtctgcaagggcatatttagaacagatggcgtagacgaggagcacgtcgtccagctcgtcgacaccttcccgggccagtccatcgacttcttcggcgccctgcgtgcccgggtgtacgacgacgaggtgcgccggtgggtggccgagaccggcgtcgagaacatcgccaagaagctcgtcaactccaaggagggcccgccgacgttcgagcagcccaagatgacgatcgagaagctcttggagtacggccacatgctggtggcggagcaggagaacgtcaagcgtgtgcagcttgctgacaagtacctcaacgaggctgctcttggtgcagccaacgaggacgccatgaagactggcaacttcttcaag

SEQ ID NO: 1487 - DNA, 1320 bp, Artificial sequence; identical to SEQ ID NO: 1486
  Mir resistant mutated nucleotide sequence

SEQ ID NO: 1488 - DNA, 1320 bp, Artificial sequence; identical to SEQ ID NO: 1486
  Mir resistant mutated nucleotide sequence

SEQ ID NO: 1489 - DNA, 1320 bp, Artificial sequence
  Mir resistant mutated nucleotide sequence
atggcggccgccttctcctccaccgttggagctccggcctccaccccgagcaggagcagcttcctcgggaagaagctcagcaagcagcaggtgtctgcggcggcggccgtgaactactaccatggcaagagctccagcagcgccgccgccaacgttaacaggttcaaggtgatggcggccaaggaggtggacgagacgaagcagtcggaccaggacaggtggaagggcctggcctacgacgtctcggacgaccagcaggatatcaccaggggcaagggcatgatcgactccctcttccaggcgcccatgggggacggcacccacgtcgccgtgctcagctcctacgactacatcagccagggccaaaagacttacagcttcgacaacatgatggatggtttctacatatccaagagcttcatggacaagctcgtggtccacctctccaagaacttcatgagcctgccaaacatcaaagttcccctgatcctgggtatctggggaggcaaaggtcaggggaagtccttccaatgcgagctcgtcttctccaagatgggcatcatccccatcatgatgagcgccggcgagctggagagcggcaacgccggagagcccgccaagctcatcaggcagcggtaccgtgaggctgccgacctcatctccaagggcaagatgtcctgcctgttcatcaacgatctggacgccggcgcaggtcgcatgggcggcaccacccagtacacggtgaacaaccagatggtgaacgccaccctgatgaacatcgccgacaaccccaccaacgtgcagctcccggggatgtacaacaaggtggacaacgcccgggtgcccatcatcgtcaccggcaacgacttctccacgctgtacgcgccgctcatccgtgatggacgtatggagaagttctactgggcgcccacccgcgaggaccgcatcggcgtctgcaagggaatctttagaacagatggagtagacgaggagcacgtcgtccagctcgtcgacaccttcccgggccagtccatcgacttcttcggcgccctgcgtgcccgggtgtacgacgacgaggtgcgccggtgggtggccgagaccggcgtcgagaacatcgccaagaagctcgtcaactccaaggagggcccgccgacgttcgagcagcccaagatgacgatcgagaagctcttggagtacggccacatgctggtggcggagcaggagaacgtcaagcgtgtgcagcttgctgacaagtacctcaacgaggctgctcttggtgcagccaacgaggacgccatgaagactggcaacttcttcaag

SEQ ID NO: 1490 - DNA, 810 bp, Artificial sequence
  Mir resistant mutated nucleotide sequence
atgctgctgaacccggcgtcagaggcgtcggtgctagacaccatccggcagcacctcctcgaggagccagccgacgagagcttcgggagcctggtggcggaccagtggagcggctcgttaccatttagaacagatgatgcagacgacatggtggtgttcggggcgctgcaggacgccttcgcctacggctggctgcccgacggctcattcgtgcacgtgaagcccgagccggtgcggtcccccgactcgtcctcctacccctgctcctacgacggctcaccctgcttcggcctcctggacccggagccgccgctgacgcccggcaccaccacgcccagtagtagggggcaggaggaggccgcggcggccatggcccggggcaagcactacaggggggtgaggcagcgcccgtggggcaagttcgcggcggagatcagggaccccgccaggaacggcgcgcgcgtctggctcggcacgtacgacaccgccgaggacgccgcgctcgcctacgaccgcgccgcctaccgcatgcgcggctcgcgcgcgctcctcaacttcccgctccgcatcggctccggggacaagcgcccgtcgccggcgccgcccgagcccgccacctcctcggactcctcctcgtcttcggccagcggctcgcacaagaggcggaagcgaggcgaggccgcggctgccaacatggccatggcgctggtgcccccgccctcccagcttaaccggccggcccagccgtggttccctgccgcgccggtcgagcaggcggcgatggctccgcgcgtggagcagatcgtcgtc

SEQ ID NO: 1491 - DNA, 1206 bp, Artificial sequence
  Mir resistant mutated nucleotide sequence
atggcgcccggaagcatcgccagccggtggcgcgagctccagggcgcggactcctggtcggggctgctggacccgctggacatcgacctgcgcgcgaacctgatcgcctacggcgagctcacgcaggccacctacgacgggttcaaccaggagcggcggtcgccgcacgccggcgcctgcgtgttcggctactccaacctgctggccggctcgggcgccgcggcggccgggagctacgccgtcaccaggttcatctacgccacgtcggcgctccccggcgtgcccgaggcgttcctgctgctgccgctgccggacctgctgcccgagtcctggagccgggagtccaactggatgggctacgtagcagtagcaacagatgatggagtcgccgcgctcggccgccgcgacatcctcgtcgcgtggcgcggcaccatgcgcggcctcgagtgggtcaacgacttcgacttcacgcccgtgtccgccgcgcccgtgctgggccccgccgccgccgccaacccgttcgccttggtgcaccggggcttcctctccgtgtacacgtccagcaacccggactccaagtacaaccagaccagcgccagagaccaggtcctggcggaggtgagcaggctggtggcactgtacaaggacgaggtgacgagcatcacggtgtgcgggcacagcctgggcgcgtcgctggcgacgctgaacgccgtggacctcgcggccaacggcgtgaacgcgccgccggccgggtcgtcgcagccgccgtgccccgtgacggcgctggtgttcgcgagcccgcgcgtcggggacggcaacttcaagagggcgatcgcgtcgttcccggacctgcgggcgctccacgtgaagaacgccggcgacatcgtgccgacgtacccgccgctggggtacgtggacgtggccgtgcagctgcccatcgccacggggcggtcgccgtacctgcggcagcccgggacgatcgcgacgctgcacaacctcgagtgctacctgcacggcgtggccggcgagcagggcagcgccggggggttcaggctggaggtggaccgcgacgtcgcgctggtcaacaagggcgaggacgcgctcaaggaccagtacccggtgcccgcccagtggtgggtcgccaagaacaagtgcatggtcaagggcgccgacggccactatgcgctccaggacttcgagcagatc

SEQ ID NO: 1492 - DNA, 1206 bp, Artificial sequence
  Mir resistant mutated nucleotide sequence
atggcgcccggaagcatcgccagccggtggcgcgagctccagggcgcggactcctggtcggggctgctggacccgctggacatcgacctgcgcgcgaacctgatcgcctacggcgagctcacgcaggccacctacgacgggttcaaccaggagcggcggtcgccgcacgccggcgcctgcgtgttcggctactccaacctgctggccggctcgggcgccgcggcggccgggagctacgccgtcaccaggttcatctacgccacgtcggcgctccccggcgtgcccgaggcgttcctgctgctgccgctgccggacctgctgcccgagtcctggagccgggagtccaactggatgggctacgtcgcagtcgcaacagatgatggagtcgccgcgctcggccgccgcgacatcctcgtcgcgtggcgcggcaccatgcgcggcctcgagtgggtcaacgacttcgacttcacgcccgtgtccgccgcgcccgtgctgggccccgccgccgccgccaacccgttcgccttggtgcaccggggcttcctctccgtgtacacgtccagcaacccggactccaagtacaaccagaccagcgccagagaccaggtcctggcggaggtgagcaggctggtggcactgtacaaggacgaggtgacgagcatcacggtgtgcgggcacagcctgggcgcgtcgctggcgacgctgaacgccgtggacctcgcggccaacggcgtgaacgcgccgccggccgggtcgtcgcagccgccgtgccccgtgacggcgctggtgttcgcgagcccgcgcgtcggggacggcaacttcaagagggcgatcgcgtcgttcccggacctgcgggcgctccacgtgaagaacgccggcgacatcgtgccgacgtacccgccgctggggtacgtggacgtggccgtgcagctgcccatcgccacggggcggtcgccgtacctgcggcagcccgggacgatcgcgacgctgcacaacctcgagtgctacctgcacggcgtggccggcgagcagggcagcgccggggggttcaggctggaggtggaccgcgacgtcgcgctggtcaacaagggcgaggacgcgctcaaggaccagtacccggtgcccgcccagtggtgggtcgccaagaacaagtgcatggtcaagggcgccgacggccactatgcgctccaggacttcgagcagatc

SEQ ID NO: 1493 - DNA, 1206 bp, Artificial sequence; identical to SEQ ID NO: 1492
  Mir resistant mutated nucleotide sequence

SEQ ID NO: 1494 - DNA, 1206 bp, Artificial sequence; identical to SEQ ID NO: 1492
  Mir resistant mutated nucleotide sequence

SEQ ID NO: 1495 - DNA, 1206 bp, Artificial sequence
  Mir resistant mutated nucleotide sequence
atggcgcccggaagcatcgccagccggtggcgcgagctccagggcgcggactcctggtcggggctgctggacccgctggacatcgacctgcgcgcgaacctgatcgcctacggcgagctcacgcaggccacctacgacgggttcaaccaggagcggcggtcgccgcacgccggcgcctgcgtgttcggctactccaacctgctggccggctcgggcgccgcggcggccgggagctacgccgtcaccaggttcatctacgccacgtcggcgctccccggcgtgcccgaggcgttcctgctgctgccgctgccggacctgctgcccgagtcctggagccgggagtccaactggatgggctacgtagccgtagccacagatgatggagtcgccgcgctcggccgccgcgacatcctcgtcgcgtggcgcggcaccatgcgcggcctcgagtgggtcaacgacttcgacttcacgcccgtgtccgccgcgcccgtgctgggccccgccgccgccgccaacccgttcgccttggtgcaccggggcttcctctccgtgtacacgtccagcaacccggactccaagtacaaccagaccagcgccagagaccaggtcctggcggaggtgagcaggctggtggcactgtacaaggacgaggtgacgagcatcacggtgtgcgggcacagcctgggcgcgtcgctggcgacgctgaacgccgtggacctcgcggccaacggcgtgaacgcgccgccggccgggtcgtcgcagccgccgtgccccgtgacggcgctggtgttcgcgagcccgcgcgtcggggacggcaacttcaagagggcgatcgcgtcgttcccggacctgcgggcgctccacgtgaagaacgccggcgacatcgtgccgacgtacccgccgctggggtacgtggacgtggccgtgcagctgcccatcgccacggggcggtcgccgtacctgcggcagcccgggacgatcgcgacgctgcacaacctcgagtgctacctgcacggcgtggccggcgagcagggcagcgccggggggttcaggctggaggtggaccgcgacgtcgcgctggtcaacaagggcgaggacgcgctcaaggaccagtacccggtgcccgcccagtggtgggtcgccaagaacaagtgcatggtcaagggcgccgacggccactatgcgctccaggacttcgagcagatc

SEQ ID NO: 1496 - DNA, 1605 bp, Artificial sequence
  Mir resistant mutated nucleotide sequence
atggtactggaccacgccatcaggggctcggcggcccgcagggctgagacccaaaccctagcgccagtgctgctcatgggcccgccgcctccaccaccaatacccccaacaacagggatgtacctcccggggcccccaccccccgggacgctcctgccgcacccgatgcacatggcgctcccgcgtgaggtcatcatttacatggacgagtgtcggagccgctccctcctcaagttcatttccgacgcggggattgtgccttcgctagaggacgagcggaggagggagcgggtagtacgcgagctcggcaagatagtaatggattgggcaaagagggtggcctacgagcagggcaactggcactggatcgcttcagccacggtgttgaccttcggttcctatgccctgggggcgtatggacctgaatctgatattgatgtcctctgtattggtccttgtattgcatcgctgcaacaccatttttttgttgtcctgcgacaaatgctcgaagggaggccagaagtatcagaattgcattcaattgaaggagctaaggttccattgatgcgttttaaattcaatgggattttagttgactttccttatgttcaactcccagtgatcaatgctgcagaggctatgcatgcatttgatccccatgttctagaaaatgtggatgggccaagttggagatgtctatctggagtccgtgctaatagacaaatcattcaattagttcccaatatgaagaaatttcaatatttgttgcggtgcctcaaactatgggcaagaaaaagaggacttcattgccatctacttggcttcttcgctggaattcatttggctatccttgctgcatatgtttgccgcagacatccgaatgctagtataaatactctgttgtctttgttcttcgacatttttgttcactggccttggcctcttccagtgagtttgcttgatccgcctgttccttgtcggggtcctgatgggtgctccctcatgcccataatgttgccatgtattccaccagaattttgctcctctagtacaacagaaagtactttcagcaaaatcaaagaagaactttggcgtggctatgctctaagcaaggataccagaagtactgattttaactggagttggctctttgcaccttttccatatggtgcaagatacaaatgctttctccgcatagttctctctgctccgatgggagaagaattgcgtgactgggttggatgggtgaaatcacgattccgcaaccttcttctcaagctggagagtcttggtgtttactgtgaccctgatccctcagaacaagttgatcataccatcactgatccaaatgttgtattcttctggggtctcatctatagaaggaatattcaaatatgtataagttctctcaaagaagatttcatgaaaagtgtctgcaataacatctatggaaaggaaaaatgtgcccattcagacatcacaatgtccattgttgggcctccccagctgccaaaaagtgtctttgatctctcagtttactctgaaaagctgccacaacatatgatggggcaccaactaatgaagcagaactacaatgcagtcagt

SEQ ID NO: 1497 - DNA, 1605 bp, Artificial sequence
  Mir resistant mutated nucleotide sequence
atggtactggaccacgccatcaggggctcggcggcccgcagggctgagacccaaaccctagcgccagtgctgctcatgggcccgccgcctccaccgccgatacccccgacaacagggatgtacctcccggggcccccaccccccgggacgctcctgccgcacccgatgcacatggcgctcccgcgtgaggtcatcatttacatggacgagtgtcggagccgctccctcctcaagttcatttccgacgcggggattgtgccttcgctagaggacgagcggaggagggagcgggtagtacgcgagctcggcaagatagtaatggattgggcaaagagggtggcctacgagcagggcaactggcactggatcgcttcagccacggtgttgaccttcggttcctatgccctgggggcgtatggacctgaatctgatattgatgtcctctgtattggtccttgtattgcatcgctgcaacaccatttttttgttgtcctgcgacaaatgctcgaagggaggccagaagtatcagaattgcattcaattgaaggagctaaggttccattgatgcgttttaaattcaatgggattttagttgactttccttatgttcaactcccagtgatcaatgctgcagaggctatgcatgcatttgatccccatgttctagaaaatgtggatgggccaagttggagatgtctatctggagtccgtgctaatagacaaatcattcaattagttcccaatatgaagaaatttcaatatttgttgcggtgcctcaaactatgggcaagaaaaagaggacttcattgccatctacttggcttcttcgctggaattcatttggctatccttgctgcatatgtttgccgcagacatccgaatgctagtataaatactctgttgtctttgttcttcgacatttttgttcactggccttggcctcttccagtgagtttgcttgatccgcctgttccttgtcggggtcctgatgggtgctccctcatgcccataatgttgccatgtattccaccagaattttgctcctctagtacaacagaaagtactttcagcaaaatcaaagaagaactttggcgtggctatgctctaagcaaggataccagaagtactgattttaactggagttggctctttgcaccttttccatatggtgcaagatacaaatgctttctccgcatagttctctctgctccgatgggagaagaattgcgtgactgggttggatgggtgaaatcacgattccgcaaccttcttctcaagctggagagtcttggtgtttactgtgaccctgatccctcagaacaagttgatcataccatcactgatccaaatgttgtattcttctggggtctcatctatagaaggaatattcaaatatgtataagttctctcaaagaagatttcatgaaaagtgtctgcaataacatctatggaaaggaaaaatgtgcccattcagacatcacaatgtccattgttgggcctccccagctgccaaaaagtgtctttgatctctcagtttactctgaaaagctgccacaacatatgatggggcaccaactaatgaagcagaactacaatgcagtcagt

SEQ ID NO: 1498 - DNA, 1605 bp, Artificial sequence; identical to SEQ ID NO: 1497
  Mir resistant mutated nucleotide sequence

SEQ ID NO: 1499 - DNA, 1605 bp, Artificial sequence; identical to SEQ ID NO: 1497
  Mir resistant mutated nucleotide sequence

SEQ ID NO: 1500 - DNA, 1605 bp, Artificial sequence; identical to SEQ ID NO: 1497
  Mir resistant mutated nucleotide sequence

SEQ ID NO: 1501 - DNA, 1380 bp, Artificial sequence
  Mir resistant mutated nucleotide sequence
atggtgaacggcgagcggcgggcggacgcggagtgcacgcgggcgtcgctgctggggaggtatgagatcgggcggaccctcggcgagggcaacttcggcaaggtgaagtacgcgcgccacatcgccagcggcggccacttcgccatcaagatcctcgaccgcagcaagatcttaagtttaagaatagatgatcaaatcaggagggagatcgggacgctcaagctgctcaagcacccgaatgtcgtccgcttgcacgaggttgctgccagtaaaacgaagatctacatggtgcttgagtttgtcaacggcggcgagctcttcgacaagatcgctatcaaggggaaactgtccgaacacgagggcaggaggctcttccagcagctaatcgacggcgtcagctattgccatgacagaggtgtctaccaccgagacctcaagccagagaatgtccttgttgatcggaagggcaccatcaagatctctgacttcggcctcagcgctctacctcaacatctcgggagtgacggacttctgcacacaacatgtggcagccccaactacatagctcctgaggttctgcaaaacagaggctatgacggctccttgtcagatctctggtcgtgtggggtgatcctctacgtgatgcttgttggctgccttcccttcgacgacaggaacctcgtcgttctttatcagaagattttcaagggagactgtcagatccccaagtggctttcgcctgccgcgcaggaccttctcaagaggatcctccaaccgaatccgatgaagaggatcaacgtcgcggggatcagggagcacgagtggttcaagaaggactacgtgcctgctgttccgcacgatgatgacgaagacgtccttcctagtccagctccctcgataaagccaatcgatgagccggcgcaagagaagtgttctcctatcaacgcttttcagttgatcgggatggcctcttcccttgacctttctggtttcttcgaggaagaggatgcagcgcaaagaaagattcggttcacttcgacgcacccacccaaggatctatttgacaagatcgagagcgttgtcatggagatgggattcaaagtccataggggggcaggcaagctcaaggtcttgaagaatagcaagtgttccaggaacccgtcatcattgttggtgtgcaccgaggtgtttgagctcggtccatcattatatgtcgtagagcttaggaaatcccacggagactctacgttgtatagacagctgtgcgaaaggctctccgatgagctaggtgcctgcaagacagaccagatcgcgaggactgaatcatcgagtgacgacctctcgagcgtcgatggcgaagcgttccctctatctgggttc

SEQ ID NO: 1502 - DNA, 1380 bp, Artificial sequence
  Mir resistant mutated nucleotide sequence
atggtgaacggcgagcggcgggcggacgcggagtgcacgcgggcgtcgctgctggggaggtatgagatcgggcggaccctcggcgagggcaacttcggcaaggtgaagtacgcgcgccacatcgccagcggcggccacttcgccatcaagatcctcgaccgcagcaagatcctcagtctcagaatagatgatcaaatcaggagggagatcgggacgctcaagctgctcaagcacccgaatgtcgtccgcttgcacgaggttgctgccagtaaaacgaagatctacatggtgcttgagtttgtcaacggcggcgagctcttcgacaagatcgctatcaaggggaaactgtccgaacacgagggcaggaggctcttccagcagctaatcgacggcgtcagctattgccatgacagaggtgtctaccaccgagacctcaagccagagaatgtccttgttgatcggaagggcaccatcaagatctctgacttcggcctcagcgctctacctcaacatctcgggagtgacggacttctgcacacaacatgtggcagccccaactacatagctcctgaggttctgcaaaacagaggctatgacggctccttgtcagatctctggtcgtgtggggtgatcctctacgtgatgcttgttggctgccttcccttcgacgacaggaacctcgtcgttctttatcagaagattttcaagggagactgtcagatccccaagtggctttcgcctgccgcgcaggaccttctcaagaggatcctccaaccgaatccgatgaagaggatcaacgtcgcggggatcagggagcacgagtggttcaagaaggactacgtgcctgctgttccgcacgatgatgacgaagacgtccttcctagtccagctccctcgataaagccaatcgatgagccggcgcaagagaagtgttctcctatcaacgcttttcagttgatcgggatggcctcttcccttgacctttctggtttcttcgaggaagaggatgcagcgcaaagaaagattcggttcacttcgacgcacccacccaaggatctatttgacaagatcgagagcgttgtcatggagatgggattcaaagtccataggggggcaggcaagctcaaggtcttgaagaatagcaagtgttccaggaacccgtcatcattgttggtgtgcaccgaggtgtttgagctcggtccatcattatatgtcgtagagcttaggaaatcccacggagactctacgttgtatagacagctgtgcgaaaggctctccgatgagctaggtgcctgcaagacagaccagatcgcgaggactgaatcatcgagtgacgacctctcgagcgtcgatggcgaagcgttccctctatctgggttc

SEQ ID NO: 1503 - DNA, 1380 bp, Artificial sequence; identical to SEQ ID NO: 1502
  Mir resistant mutated nucleotide sequence

SEQ ID NO: 1504 - DNA, 1380 bp, Artificial sequence; identical to SEQ ID NO: 1502
  Mir resistant mutated nucleotide sequence

SEQ ID NO: 1505 - DNA, 1380 bp, Artificial sequence; identical to SEQ ID NO: 1502
  Mir resistant mutated nucleotide sequence

SEQ ID NO: 1506 - DNA, 1074 bp, Artificial sequence
  Mir resistant mutated nucleotide sequence
atgccttctttcacctccaagactcttctcgccgccgttgccggtgccatgggcgttgctgctcacggtcacgtttcctccatcaacgtcgctggcgccgtctacgacggtttcgatgctagctctgctcctttcgaccagaaccccaagacccttatcgcctggtccaccactgcctccgacaacggtttcgtcgcccctgacgcatttggaacaggagatataatctgccaccgcgatgctaagaacgccaagggccacgccaaggtcaaggcaggcgatcagatctacatcaaatgggatacgtggccagagagccacaaaggccccgtcattgacatgttggcctcttgcggttccgctggttgtgagtccgttgacaaggagaccctcaagttcttcaagatcgacgaggctggtcttgtcaagtccggtaaccccggtacttacgcctctgacgagctgattgccaacgacaacggctggctcatcgagatccccgagaacatcaagcccggttcttacgttctccgtcacgagatcattgctctccacgccgctggccaggagaatggtgctcagaactaccctcagtgcttcaacctcgagatctctggttctggctctgagctccctgagggcaccctcggaactgagctgtacaagtccaccgagaagggcatcgtcttcgatctttacaacaaccctaccagctaccccatccctggccctgccatgaccattaagtcccccaaggttacccagggcaagctcgctgagaagtccaagggtacccccaccactggctctggctctgactccggctccggctctgccgcccctgagactcccgctcagactgaggctcccgccgctggtacctccgctgccgcccctgttgctacttccgctgccgctgaggagccctctgcccccgttgagacctcccctgctgcccaggagcctgccactcctgtccagactgaggctcctgccgctaccaagcctgccaagactggctgcaaggccaagcgtggcatgaaggcccgccgtcacgctcgcgacctcatgaac

SEQ ID NO: 1507 - DNA, 1074 bp, Artificial sequence
  Mir resistant mutated nucleotide sequence
atgccttctttcacctccaagactcttctcgccgccgttgccggtgccatgggcgttgctgctcacggtcacgtttcctccatcaacgtcgctggcgccgtctacgacggtttcgatgctagctctgctcctttcgaccagaaccccaagacccttatcgcctggtccaccactgcctccgacaacggtttcgtcgcccctgatgcatttggaacaggagatataatctgccaccgcgatgctaagaacgccaagggccacgccaaggtcaaggcaggcgatcagatctacatcaaatgggatacgtggccagagagccacaaaggccccgtcattgacatgttggcctcttgcggttccgctggttgtgagtccgttgacaaggagaccctcaagttcttcaagatcgacgaggctggtcttgtcaagtccggtaaccccggtacttacgcctctgacgagctgattgccaacgacaacggctggctcatcgagatccccgagaacatcaagcccggttcttacgttctccgtcacgagatcattgctctccacgccgctggccaggagaatggtgctcagaactaccctcagtgcttcaacctcgagatctctggttctggctctgagctccctgagggcaccctcggaactgagctgtacaagtccaccgagaagggcatcgtcttcgatctttacaacaaccctaccagctaccccatccctggccctgccatgaccattaagtcccccaaggttacccagggcaagctcgctgagaagtccaagggtacccccaccactggctctggctctgactccggctccggctctgccgcccctgagactcccgctcagactgaggctcccgccgctggtacctccgctgccgcccctgttgctacttccgctgccgctgaggagccctctgcccccgttgagacctcccctgctgcccaggagcctgccactcctgtccagactgaggctcctgccgctaccaagcctgccaagactggctgcaaggccaagcgtggcatgaaggcccgccgtcacgctcgcgacctcatgaac

SEQ ID NO: 1508 - DNA, 1074 bp, Artificial sequence
  Mir resistant mutated nucleotide sequence
atgccttctttcacctccaagactcttctcgccgccgttgccggtgccatgggcgttgctgctcacggtcacgtttcctccatcaacgtcgctggcgccgtctacgacggtttcgatgctagctctgctcctttcgaccagaaccccaagacccttatcgcctggtccaccactgcctccgacaacggtttcgtcgcccctgacgcctttggaacaggagatataatctgccaccgcgatgctaagaacgccaagggccacgccaaggtcaaggcaggcgatcagatctacatcaaatgggatacgtggccagagagccacaaaggccccgtcattgacatgttggcctcttgcggttccgctggttgtgagtccgttgacaaggagaccctcaagttcttcaagatcgacgaggctggtcttgtcaagtccggtaaccccggtacttacgcctctgacgagctgattgccaacgacaacggctggctcatcgagatccccgagaacatcaagcccggttcttacgttctccgtcacgagatcattgctctccacgccgctggccaggagaatggtgctcagaactaccctcagtgcttcaacctcgagatctctggttctggctctgagctccctgagggcaccctcggaactgagctgtacaagtccaccgagaagggcatcgtcttcgatctttacaacaaccctaccagctaccccatccctggccctgccatgaccattaagtcccccaaggttacccagggcaagctcgctgagaagtccaagggtacccccaccactggctctggctctgactccggctccggctctgccgcccctgagactcccgctcagactgaggctcccgccgctggtacctccgctgccgcccctgttgctacttccgctgccgctgaggagccctctgcccccgttgagacctcccctgctgcccaggagcctgccactcctgtccagactgaggctcctgccgctaccaagcctgccaagactggctgcaaggccaagcgtggcatgaaggcccgccgtcacgctcgcgacctcatgaac

SEQ ID NO: 1509 - DNA, 1074 bp, Artificial sequence
  Mir resistant mutated nucleotide sequence
atgccttctttcacctccaagactcttctcgccgccgttgccggtgccatgggcgttgctgctcacggtcacgtttcctccatcaacgtcgctggcgccgtctacgacggtttcgatgctagctctgctcctttcgaccagaaccccaagacccttatcgcctggtccaccactgcctccgacaacggtttcgtcgcccctgacgcattcggaacaggagatataatctgccaccgcgatgctaagaacgccaagggccacgccaaggtcaaggcaggcgatcagatctacatcaaatgggatacgtggccagagagccacaaaggccccgtcattgacatgttggcctcttgcggttccgctggttgtgagtccgttgacaaggagaccctcaagttcttcaagatcgacgaggctggtcttgtcaagtccggtaaccccggtacttacgcctctgacgagctgattgccaacgacaacggctggctcatcgagatccccgagaacatcaagcccggttcttacgttctccgtcacgagatcattgctctccacgccgctggccaggagaatggtgctcagaactaccctcagtgcttcaacctcgagatctctggttctggctctgagctccctgagggcaccctcggaactgagctgtacaagtccaccgagaagggcatcgtcttcgatctttacaacaaccctaccagctaccccatccctggccctgccatgaccattaagtcccccaaggttacccagggcaagctcgctgagaagtccaagggtacccccaccactggctctggctctgactccggctccggctctgccgcccctgagactcccgctcagactgaggctcccgccgctggtacctccgctgccgcccctgttgctacttccgctgccgctgaggagccctctgcccccgttgagacctcccctgctgcccaggagcctgccactcctgtccagactgaggctcctgccgctaccaagcctgccaagactggctgcaaggccaagcgtggcatgaaggcccgccgtcacgctcgcgacctcatgaac

SEQ ID NO: 1510 - DNA, 1074 bp, Artificial sequence
  Mir resistant mutated nucleotide sequence
atgccttctttcacctccaagactcttctcgccgccgttgccggtgccatgggcgttgctgctcacggtcacgtttcctccatcaacgtcgctggcgccgtctacgacggtttcgatgctagctctgctcctttcgaccagaaccccaagacccttatcgcctggtccaccactgcctccgacaacggtttcgtcgcccctgacgcatttggcacaggcgatataatctgccaccgcgatgctaagaacgccaagggccacgccaaggtcaaggcaggcgatcagatctacatcaaatgggatacgtggccagagagccacaaaggccccgtcattgacatgttggcctcttgcggttccgctggttgtgagtccgttgacaaggagaccctcaagttcttcaagatcgacgaggctggtcttgtcaagtccggtaaccccggtacttacgcctctgacgagctgattgccaacgacaacggctggctcatcgagatccccgagaacatcaagcccggttcttacgttctccgtcacgagatcattgctctccacgccgctggccaggagaatggtgctcagaactaccctcagtgcttcaacctcgagatctctggttctggctctgagctccctgagggcaccctcggaactgagctgtacaagtccaccgagaagggcatcgtcttcgatctttacaacaaccctaccagctaccccatccctggccctgccatgaccattaagtcccccaaggttacccagggcaagctcgctgagaagtccaagggtacccccaccactggctctggctctgactccggctccggctctgccgcccctgagactcccgctcagactgaggctcccgccgctggtacctccgctgccgcccctgttgctacttccgctgccgctgaggagccctctgcccccgttgagacctcccctgctgcccaggagcctgccactcctgtccagactgaggctcctgccgctaccaagcctgccaagactggctgcaaggccaagcgtggcatgaaggcccgccgtcacgctcgcgacctcatgaac

SEQ ID NO: 1511 - DNA, 1362 bp, Artificial sequence
  Mir resistant mutated nucleotide sequence
atggaggaggaggggttccgatggagcagagcgggctctttcgtcctgttctacttggtcttgttcctgtccgcggccgtgtcgtcggaggccaacatcggcgacttcgacgactactggcggcagcgcaagctcatggccgacgccgcggcagaggccacgtacaagcatgacccgctcgaggtcaccaaccaactcaaccgcgcagtgcacagatccgtcgagaaggaggacatgagcacgcggcggcgggcgatgatggggcacaagaagggtaagctcaacaacgggccgtgcgaggcgacgaacccgatcgaccgttgctggcggtgccggcaggactgggcgacggaccggaagcggctggctcggtgcgcccagggcttcggtcgcaacaccaccggcggtctggccggcaagttctacgtggtaacagatggaacagatgatgatgtggtgaaccctcgccccggcacgctccggtgggccgtcatccagatcgagccgctgtggatcaccttcgccaggacgatgatcatcacgctcaaggaggagctcatcatccagggcgacaagaccatcgacggccggggcgcgcaggtgcggatcgccaacggcgcgcagctgacggtgcagttcgccaacaacgtcatcatccacaacgtgcacatcaacgacatcatgtcctccaacaagaacggcggcaacatccgggactcgccggaccacttcggctggcgcaccgtctccgacggcgacggcatcaccctcttcggctccaccaacgtgtggctcgaccacctctccctctccaactgccaggacggcctcatcgacgtcatcgtcaagtccacgggcgtcaccatctccaactgccacatgaccaaccacaacgacgtcatgctcttcagctccagcgacaagcaccccgaggaccagatcatgcagatcaccgtcgccttcaaccacttcggcagaggcctcgtgcagaggatgccgaggtgccgctgggggttcttccacgtcgtcaacaacgactacacgcactggctcatgtacgccatcggcggcagcaaggcgccgaccatcatcagccaggggaaccgctacatcgcgccgcccaacctggcggcgaagctggtcacaaagcaccatgacgcgccggagtcggagtggaagaactgggtgtggcactcggagaacgacctcttcatggagggagccaacttcaccgtcagcggcggccagaagatcaacaggaatttccacaagaaggacctcatcaagcccaagaacgggtcctacgtcaccaggctcacgcgatacgccggcgcgctcgcctgcaggcccggcaagccctgc

SEQ ID NO: 1512 - DNA, 1362 bp, Artificial sequence
  Mir resistant mutated nucleotide sequence
atggaggaggaggggttccgatggagcagagcgggctctttcgtcctgttctacttggtcttgttcctgtccgcggccgtgtcgtcggaggccaacatcggcgacttcgacgactactggcggcagcgcaagctcatggccgacgccgcggcagaggccacgtacaagcatgacccgctcgaggtcaccaaccaactcaaccgcgcagtgcacagatccgtcgagaaggaggacatgagcacgcggcggcgggcgatgatggggcacaagaagggtaagctcaacaacgggccgtgcgaggcgacgaacccgatcgaccgttgctggcggtgccggcaggactgggcgacggaccggaagcggctggctcggtgcgcccagggcttcggtcgcaacaccaccggcggtctggccggcaagttctacgtggtgacagatggaacagatgatgatgtggtgaaccctcgccccggcacgctccggtgggccgtcatccagatcgagccgctgtggatcaccttcgccaggacgatgatcatcacgctcaaggaggagctcatcatccagggcgacaagaccatcgacggccggggcgcgcaggtgcggatcgccaacggcgcgcagctgacggtgcagttcgccaacaacgtcatcatccacaacgtgcacatcaacgacatcatgtcctccaacaagaacggcggcaacatccgggactcgccggaccacttcggctggcgcaccgtctccgacggcgacggcatcaccctcttcggctccaccaacgtgtggctcgaccacctctccctctccaactgccaggacggcctcatcgacgtcatcgtcaagtccacgggcgtcaccatctccaactgccacatgaccaaccacaacgacgtcatgctcttcagctccagcgacaagcaccccgaggaccagatcatgcagatcaccgtcgccttcaaccacttcggcagaggcctcgtgcagaggatgccgaggtgccgctgggggttcttccacgtcgtcaacaacgactacacgcactggctcatgtacgccatcggcggcagcaaggcgccgaccatcatcagccaggggaaccgctacatcgcgccgcccaacctggcggcgaagctggtcacaaagcaccatgacgcgccggagtcggagtggaagaactgggtgtggcactcggagaacgacctcttcatggagggagccaacttcaccgtcagcggcggccagaagatcaacaggaatttccacaagaaggacctcatcaagcccaagaacgggtcctacgtcaccaggctcacgcgatacgccggcgcgctcgcctgcaggcccggcaagccctgc

SEQ ID NO: 1513 - DNA, 1362 bp, Artificial sequence; identical to SEQ ID NO: 1512
  Mir resistant mutated nucleotide sequence

SEQ ID NO: 1514 - DNA, 1362 bp, Artificial sequence; identical to SEQ ID NO: 1512
  Mir resistant mutated nucleotide sequence

SEQ ID NO: 1515 - DNA, 1362 bp, Artificial sequence
  Mir resistant mutated nucleotide sequence
atggaggaggaggggttccgatggagcagagcgggctctttcgtcctgttctacttggtcttgttcctgtccgcggccgtgtcgtcggaggccaacatcggcgacttcgacgactactggcggcagcgcaagctcatggccgacgccgcggcagaggccacgtacaagcatgacccgctcgaggtcaccaaccaactcaaccgcgcagtgcacagatccgtcgagaaggaggacatgagcacgcggcggcgggcgatgatggggcacaagaagggtaagctcaacaacgggccgtgcgaggcgacgaacccgatcgaccgttgctggcggtgccggcaggactgggcgacggaccggaagcggctggctcggtgcgcccagggcttcggtcgcaacaccaccggcggtctggccggcaagttctacgtggtaacggatggaacggatgatgatgtggtgaaccctcgccccggcacgctccggtgggccgtcatccagatcgagccgctgtggatcaccttcgccaggacgatgatcatcacgctcaaggaggagctcatcatccagggcgacaagaccatcgacggccggggcgcgcaggtgcggatcgccaacggcgcgcagctgacggtgcagttcgccaacaacgtcatcatccacaacgtgcacatcaacgacatcatgtcctccaacaagaacggcggcaacatccgggactcgccggaccacttcggctggcgcaccgtctccgacggcgacggcatcaccctcttcggctccaccaacgtgtggctcgaccacctctccctctccaactgccaggacggcctcatcgacgtcatcgtcaagtccacgggcgtcaccatctccaactgccacatgaccaaccacaacgacgtcatgctcttcagctccagcgacaagcaccccgaggaccagatcatgcagatcaccgtcgccttcaaccacttcggcagaggcctcgtgcagaggatgccgaggtgccgctgggggttcttccacgtcgtcaacaacgactacacgcactggctcatgtacgccatcggcggcagcaaggcgccgaccatcatcagccaggggaaccgctacatcgcgccgcccaacctggcggcgaagctggtcacaaagcaccatgacgcgccggagtcggagtggaagaactgggtgtggcactcggagaacgacctcttcatggagggagccaacttcaccgtcagcggcggccagaagatcaacaggaatttccacaagaaggacctcatcaagcccaagaacgggtcctacgtcaccaggctcacgcgatacgccggcgcgctcgcctgcaggcccggcaagccctgc

SEQ ID NO: 1516 - DNA, 1272 bp, Artificial sequence
  Mir resistant mutated nucleotide sequence
atgaaggtgaggagatcggaaccagttctagtccatgcgaccggagccgcgaccacccaagagtactacttcctctcgaacctggataggaatgtcgccgtgctcatgaaaacagtccacatcttcagcgtgtcatgtgacgatgtggcaacgctgctcagggattccctgagcagggtgctctcgcagtactaccccttcgagggtcggctggccgtacgcgaggacgggaggctcgccgtgcggaacgaccgccgcggtgtccccttcgttgacgcggtgtccgattacgagctgcaggtggtctgtgacgcaacggccccgggttctgagcttctcggtgacctcgtctacgtcagcatgcagcacgagaacgccctggaagcgccgatgctgaccgtgcaggtgaccacgttcaagtgcggcggctttgtcctcgggctcgccatgaaccactgcttggcagacggccagtccgccgccgagttcatctgctcctgggcggagaccgcgcgtggtgtggccatgtcgacgccgccgtacctcgaccgcacggtgcagcgcgccaggccgatcccgacggttgacttcgcacatgacgagttcgcagagatcgaggacgtctccggcctcgccggcacattcggcaaggagccgtgcgtttaccgctccttcactttcgacgcaggcaagctgcacaggctgaagcaagccgcaagcgagcaagggcaaggaggcaccaagagctccgtcttcgtcgcgctcacggctttcgtgtgggtatcaaggacgcgggccctgcggatgctccccgatcagaagagcaagctgctgttcgcggtggacgcccgtctgcgcgtcgacccgcccttgccgcccggcttctggggtaacgccatcatcttcgcctgctgcatctccactgccagggatctcctcagcaaaccactgtccgcggctgcccgttccatcagagaagcaatagtaagaacagatgatgcattcatccgttccgccgttgactacatcgagttgaacagcggtgctcgcccgtcgctaatggcaaccaccctggtcactgcttggaatcgactcaggtttcgcgcggcggacttcggatggggtgaagcaatctactcggggccggcggagctgccgcagaaggaggtggccatgtttctgcgcggcgtgagtgacagccagagcacagtgctggttattgggatgcctgtgtcatgtatgcaagcattccaagaaacggtagatctgctg

SEQ ID NO: 1517 - DNA, 1272 bp, Artificial sequence
  Mir resistant mutated nucleotide sequence
atgaaggtgaggagatcggaaccagttctagtccatgcgaccggagccgcgaccacccaagagtactacttcctctcgaacctggataggaatgtcgccgtgctcatgaaaacagtccacatcttcagcgtgtcatgtgacgatgtggcaacgctgctcagggattccctgagcagggtgctctcgcagtactaccccttcgagggtcggctggccgtacgcgaggacgggaggctcgccgtgcggaacgaccgccgcggtgtccccttcgttgacgcggtgtccgattacgagctgcaggtggtctgtgacgcaacggccccgggttctgagcttctcggtgacctcgtctacgtcagcatgcagcacgagaacgccctggaagcgccgatgctgaccgtgcaggtgaccacgttcaagtgcggcggctttgtcctcgggctcgccatgaaccactgcttggcagacggccagtccgccgccgagttcatctgctcctgggcggagaccgcgcgtggtgtggccatgtcgacgccgccgtacctcgaccgcacggtgcagcgcgccaggccgatcccgacggttgacttcgcacatgacgagttcgcagagatcgaggacgtctccggcctcgccggcacattcggcaaggagccgtgcgtttaccgctccttcactttcgacgcaggcaagctgcacaggctgaagcaagccgcaagcgagcaagggcaaggaggcaccaagagctccgtcttcgtcgcgctcacggctttcgtgtgggtatcaaggacgcgggccctgcggatgctccccgatcagaagagcaagctgctgttcgcggtggacgcccgtctgcgcgtcgacccgcccttgccgcccggcttctggggtaacgccatcatcttcgcctgctgcatctccactgccagggatctcctcagcaaaccactgtccgcggctgcccgttccatcagagaagccatagtaagaacagatgatgccttcatccgttccgccgttgactacatcgagttgaacagcggtgctcgcccgtcgctaatggcaaccaccctggtcactgcttggaatcgactcaggtttcgcgcggcggacttcggatggggtgaagcaatctactcggggccggcggagctgccgcagaaggaggtggccatgtttctgcgcggcgtgagtgacagccagagcacagtgctggttattgggatgcctgtgtcatgtatgcaagcattccaagaaacggtagatctgctg

SEQ ID NO: 1518 - DNA, 1272 bp, Artificial sequence; identical to SEQ ID NO: 1517
  Mir resistant mutated nucleotide sequence

SEQ ID NO: 1519 - DNA, 1272 bp, Artificial sequence; identical to SEQ ID NO: 1517
  Mir resistant mutated nucleotide sequence

SEQ ID NO: 1520 - DNA, 1272 bp, Artificial sequence
  Mir resistant mutated nucleotide sequence
atgaaggtgaggagatcggaaccagttctagtccatgcgaccggagccgcgaccacccaagagtactacttcctctcgaacctggataggaatgtcgccgtgctcatgaaaacagtccacatcttcagcgtgtcatgtgacgatgtggcaacgctgctcagggattccctgagcagggtgctctcgcagtactaccccttcgagggtcggctggccgtacgcgaggacgggaggctcgccgtgcggaacgaccgccgcggtgtccccttcgttgacgcggtgtccgattacgagctgcaggtggtctgtgacgcaacggccccgggttctgagcttctcggtgacctcgtctacgtcagcatgcagcacgagaacgccctggaagcgccgatgctgaccgtgcaggtgaccacgttcaagtgcggcggctttgtcctcgggctcgccatgaaccactgcttggcagacggccagtccgccgccgagttcatctgctcctgggcggagaccgcgcgtggtgtggccatgtcgacgccgccgtacctcgaccgcacggtgcagcgcgccaggccgatcccgacggttgacttcgcacatgacgagttcgcagagatcgaggacgtctccggcctcgccggcacattcggcaaggagccgtgcgtttaccgctccttcactttcgacgcaggcaagctgcacaggctgaagcaagccgcaagcgagcaagggcaaggaggcaccaagagctccgtcttcgtcgcgctcacggctttcgtgtgggtatcaaggacgcgggccctgcggatgctccccgatcagaagagcaagctgctgttcgcggtggacgcccgtctgcgcgtcgacccgcccttgccgcccggcttctggggtaacgccatcatcttcgcctgctgcatctccactgccagggatctcctcagcaaaccactgtccgcggctgcccgttccatcagagaagcaatcgtaagaacagatgatgcattcatccgttccgccgttgactacatcgagttgaacagcggtgctcgcccgtcgctaatggcaaccaccctggtcactgcttggaatcgactcaggtttcgcgcggcggacttcggatggggtgaagcaatctactcggggccggcggagctgccgcagaaggaggtggccatgtttctgcgcggcgtgagtgacagccagagcacagtgctggttattgggatgcctgtgtcatgtatgcaagcattccaagaaacggtagatctgctg

SEQ ID NO: 1521 - DNA, 1248 bp, Artificial sequence
  Mir resistant mutated nucleotide sequence
atggcttccgcacacaacgctctccgggtgtttttcatcctagccgtggtatgtgccgtatgcacagcgaaaaggacaggagccaacaaggaagaatcggcggcagcccccggtggcgctgctggaggcagcggcgggacgttcgacatctccaagctcggcgcgaccagcgacggcaagacggactgcacaaaggcagtccaggacgcgtggacgtcagcgtgcgaagcgaccggaagcgccacggtggtgatccccaagggcgactacctggtcggccctctcaacttcactgggccatgcaaggggagcaacatcgccatccagctggatggcaacctgctgggatcaaacgacctggacaagtacacggcgagctggatcgaattgtctcacgttaacaacatcgggatcaccggctcgggcacgctggacggccaggggaccgccgtttatagcaagagcaagaccgacaacgtgaaggcgatgcccaacacactggtgctgtttcacgtgatcaacgccactgtcgccggaatcaaactactcaactccaagttcttccacatcaacatcgacaactcagagagcatcaccgtgaaggacgtgaacatcaccgcgcccgccgacgttgagaacacggacggcgtccacgtcggaggctcctccaagatcagcatcctcaacagcacaataggaacaggagatgattgcgtctcgattgggcccgggtgcaacggcgtcttggtggacagcatcacctgcggccccgggcagggcatcagcgtcggctgcctaggccgctacaaggacgagaaggacgtgagcgacatcacggtgcggaactgcgtgctcaagaacaccaccaacggcgtgcgcatcaagtcgtacgtggacgccgagtccgtgctgacggcctcccatctcaccttcgagaacatcaggatggaggaggtggccaaccccatcgtcatcgaccagtacttctgcccgcagaaggtatgccctggcaagcggagcaactcctcgcatgtctccgtcaaggacgtcacgttccgcaacatcaccggcacgtcgtccacgcccgaggccatcagcctgctctgctcggagacgcagccatgcagcggcgtctccctcatcgatgtcaacgtggagtacgccggcaagaacaacaaaaccatggccgtctgcagcaacgccaagggcaccgccaagggaagcatcgaggcactggcttgcctggtc

SEQ ID NO: 1522 - DNA, 1248 bp, Artificial sequence
  Mir resistant mutated nucleotide sequence
atggcttccgcacacaacgctctccgggtgtttttcatcctagccgtggtatgtgccgtatgcacagcgaaaaggacaggagccaacaaggaagaatcggcggcagcccccggtggcgctgctggaggcagcggcgggacgttcgacatctccaagctcggcgcgaccagcgacggcaagacggactgcacaaaggcagtccaggacgcgtggacgtcagcgtgcgaagcgaccggaagcgccacggtggtgatccccaagggcgactacctggtcggccctctcaacttcactgggccatgcaaggggagcaacatcgccatccagctggatggcaacctgctgggatcaaacgacctggacaagtacacggcgagctggatcgaattgtctcacgttaacaacatcgggatcaccggctcgggcacgctggacggccaggggaccgccgtttatagcaagagcaagaccgacaacgtgaaggcgatgcccaacacactggtgctgtttcacgtgatcaacgccactgtcgccggaatcaaactactcaactccaagttcttccacatcaacatcgacaactcagagagcatcaccgtgaaggacgtgaacatcaccgcgcccgccgacgttgagaacacggacggcgtccacgtcggaggctcctccaagatcagcatcctcaactcgacaataggaacaggagatgattgcgtctcgattgggcccgggtgcaacggcgtcttggtggacagcatcacctgcggccccgggcagggcatcagcgtcggctgcctaggccgctacaaggacgagaaggacgtgagcgacatcacggtgcggaactgcgtgctcaagaacaccaccaacggcgtgcgcatcaagtcgtacgtggacgccgagtccgtgctgacggcctcccatctcaccttcgagaacatcaggatggaggaggtggccaaccccatcgtcatcgaccagtacttctgcccgcagaaggtatgccctggcaagcggagcaactcctcgcatgtctccgtcaaggacgtcacgttccgcaacatcaccggcacgtcgtccacgcccgaggccatcagcctgctctgctcggagacgcagccatgcagcggcgtctccctcatcgatgtcaacgtggagtacgccggcaagaacaacaaaaccatggccgtctgcagcaacgccaagggcaccgccaagggaagcatcgaggcactggcttgcctggtc

SEQ ID NO: 1523 - DNA, 1248 bp, Artificial sequence; identical to SEQ ID NO: 1522
  Mir resistant mutated nucleotide sequence

SEQ ID NO: 1524 - DNA, 1248 bp, Artificial sequence; identical to SEQ ID NO: 1522
  Mir resistant mutated nucleotide sequence

SEQ ID NO: 1525 - DNA, 1248 bp, Artificial sequence; identical to SEQ ID NO: 1522
  Mir resistant mutated nucleotide sequence

SEQ ID NO: 1526 - DNA, 1500 bp, Artificial sequence
  Mir resistant mutated nucleotide sequence
atgacgacgccgtgcccgggcgccgcggccgtgcgcgtccagtggacggcgcgctccctggcgggggcgtttctcgacctcacgctcgcctgggcctgcctctgcctcgccgcgctcgccgccgccgcggcccgcttcctcgcgttgcttggcctcccgctcccctgcacctgcgcacgccctcacctgccttgtatcctcgcctttctggcgtgctacccgtcccgcgccgtcgggtccctccacgccgccctccgcgcccgcttcccctttgcaggaccaacagatgatgaagaccgccgtcaggagggggcggaggaagatggggaggagcaggccgtcgacgcgcgggaggaggaagcggatcttcgtcgccgcgaggaggcgcgcgccgagctgcagcgggagctcgagaaagagcgcagcgccgcggcgtcggcggccgaggaggccatgtccatgatcctgcgcctgcagaaggagaagtcggcgcttgagatcgaggcgcgacagcagcgccgcaccgctgacgagcgctgcgccttctacgaggacgaggtcgaggagctccgggacatcgtgctcgtgcgggagcgcgaggcgcgcgcgctgcgcaaggaggtggacgcctaccgacgcctgctcgggcttggccctgccgaggatgacgaggaggaggatgacgagcaggagatggtcacaccgcatagtttcctcatgtccgaaggagagcccagctcgtccagatcggtcgatgcgaatcggatgcagcattttcggaataattcttctgggttcagcttcaagacgccatcactgcgtgagcaactaattgtgccgcctcttactgcggatcggatcaatgtgggaagcgatgatagtgttgctgttcagacgccagccaaagttcccacacctcaatcaaggctggagctagatagctctgaggacgaggatgaggatgatggagcagagacggtggaaatcctccccctgtccgcccggagccaagatttggatcaaggtggcgatttccacgttgatgctgcaccaggtatggaatctacttgtgccaaggatacttgcaccaaggaacagacagctcatgcatttcaggaagtcgagtgtccgggtatagacaagattgtcaacaatgaccagacagcaagtaagaatgatgccaatgtctatgatgtgcatgtggtcgatgacatacgcttctcaacagaggtcaagggcctgattggccgaagcttctcagaggcaacaatgcaggcagagagattacagactcgagctgctgcagatgatctccttgggaagagtctgaatgccattaaaggtgcacaggacaagataaggcatgcagcaaatgaaaggaggcagtcattacagttgcaactcttagaggacatagctaatcagcttcagggaatcaaggatgctgcagaagcagggagacaagtgtactgtgctactcctaaaagctccaagaggagc

SEQ ID NO: 1527 - DNA, 1500 bp, Artificial sequence
  Mir resistant mutated nucleotide sequence
atgacgacgccgtgcccgggcgccgcggccgtgcgcgtccagtggacggcgcgctccctggcgggggcgtttctcgacctcacgctcgcctgggcctgcctctgcctcgccgcgctcgccgccgccgcggcccgcttcctcgcgttgcttggcctcccgctcccctgcacctgcgcacgccctcacctgccttgtatcctcgcctttctggcgtgctacccgtcccgcgccgtcgggtccctccacgccgccctccgcgcccgcttccccttcgcaggaccaacagatgatgaagaccgccgtcaggagggggcggaggaagatggggaggagcaggccgtcgacgcgcgggaggaggaagcggatcttcgtcgccgcgaggaggcgcgcgccgagctgcagcgggagctcgagaaagagcgcagcgccgcggcgtcggcggccgaggaggccatgtccatgatcctgcgcctgcagaaggagaagtcggcgcttgagatcgaggcgcgacagcagcgccgcaccgctgacgagcgctgcgccttctacgaggacgaggtcgaggagctccgggacatcgtgctcgtgcgggagcgcgaggcgcgcgcgctgcgcaaggaggtggacgcctaccgacgcctgctcgggcttggccctgccgaggatgacgaggaggaggatgacgagcaggagatggtcacaccgcatagtttcctcatgtccgaaggagagcccagctcgtccagatcggtcgatgcgaatcggatgcagcattttcggaataattcttctgggttcagcttcaagacgccatcactgcgtgagcaactaattgtgccgcctcttactgcggatcggatcaatgtgggaagcgatgatagtgttgctgttcagacgccagccaaagttcccacacctcaatcaaggctggagctagatagctctgaggacgaggatgaggatgatggagcagagacggtggaaatcctccccctgtccgcccggagccaagatttggatcaaggtggcgatttccacgttgatgctgcaccaggtatggaatctacttgtgccaaggatacttgcaccaaggaacagacagctcatgcatttcaggaagtcgagtgtccgggtatagacaagattgtcaacaatgaccagacagcaagtaagaatgatgccaatgtctatgatgtgcatgtggtcgatgacatacgcttctcaacagaggtcaagggcctgattggccgaagcttctcagaggcaacaatgcaggcagagagattacagactcgagctgctgcagatgatctccttgggaagagtctgaatgccattaaaggtgcacaggacaagataaggcatgcagcaaatgaaaggaggcagtcattacagttgcaactcttagaggacatagctaatcagcttcagggaatcaaggatgctgcagaagcagggagacaagtgtactgtgctactcctaaaagctccaagaggagc

SEQ ID NO: 1528 - DNA, 1500 bp, Artificial sequence
  Mir resistant mutated nucleotide sequence
atgacgacgccgtgcccgggcgccgcggccgtgcgcgtccagtggacggcgcgctccctggcgggggcgtttctcgacctcacgctcgcctgggcctgcctctgcctcgccgcgctcgccgccgccgcggcccgcttcctcgcgttgcttggcctcccgctcccctgcacctgcgcacgccctcacctgccttgtatcctcgcctttctggcgtgctacccgtcccgcgccgtcgggtccctccacgccgccctccgcgcccgcttcccctttgccggaccaacagatgatgaagaccgccgtcaggagggggcggaggaagatggggaggagcaggccgtcgacgcgcgggaggaggaagcggatcttcgtcgccgcgaggaggcgcgcgccgagctgcagcgggagctcgagaaagagcgcagcgccgcggcgtcggcggccgaggaggccatgtccatgatcctgcgcctgcagaaggagaagtcggcgcttgagatcgaggcgcgacagcagcgccgcaccgctgacgagcgctgcgccttctacgaggacgaggtcgaggagctccgggacatcgtgctcgtgcgggagcgcgaggcgcgcgcgctgcgcaaggaggtggacgcctaccgacgcctgctcgggcttggccctgccgaggatgacgaggaggaggatgacgagcaggagatggtcacaccgcatagtttcctcatgtccgaaggagagcccagctcgtccagatcggtcgatgcgaatcggatgcagcattttcggaataattcttctgggttcagcttcaagacgccatcactgcgtgagcaactaattgtgccgcctcttactgcggatcggatcaatgtgggaagcgatgatagtgttgctgttcagacgccagccaaagttcccacacctcaatcaaggctggagctagatagctctgaggacgaggatgaggatgatggagcagagacggtggaaatcctccccctgtccgcccggagccaagatttggatcaaggtggcgatttccacgttgatgctgcaccaggtatggaatctacttgtgccaaggatacttgcaccaaggaacagacagctcatgcatttcaggaagtcgagtgtccgggtatagacaagattgtcaacaatgaccagacagcaagtaagaatgatgccaatgtctatgatgtgcatgtggtcgatgacatacgcttctcaacagaggtcaagggcctgattggccgaagcttctcagaggcaacaatgcaggcagagagattacagactcgagctgctgcagatgatctccttgggaagagtctgaatgccattaaaggtgcacaggacaagataaggcatgcagcaaatgaaaggaggcagtcattacagttgcaactcttagaggacatagctaatcagcttcagggaatcaaggatgctgcagaagcagggagacaagtgtactgtgctactcctaaaagctccaagaggagc

SEQ ID NO: 1529 - DNA, 1500 bp, Artificial sequence
  Mir resistant mutated nucleotide sequence
atgacgacgccgtgcccgggcgccgcggccgtgcgcgtccagtggacggcgcgctccctggcgggggcgtttctcgacctcacgctcgcctgggcctgcctctgcctcgccgcgctcgccgccgccgcggcccgcttcctcgcgttgcttggcctcccgctcccctgcacctgcgcacgccctcacctgccttgtatcctcgcctttctggcgtgctacccgtcccgcgccgtcgggtccctccacgccgccctccgcgcccgcttcccctttgcaggcccaacagatgatgaagaccgccgtcaggagggggcggaggaagatggggaggagcaggccgtcgacgcgcgggaggaggaagcggatcttcgtcgccgcgaggaggcgcgcgccgagctgcagcgggagctcgagaaagagcgcagcgccgcggcgtcggcggccgaggaggccatgtccatgatcctgcgcctgcagaaggagaagtcggcgcttgagatcgaggcgcgacagcagcgccgcaccgctgacgagcgctgcgccttctacgaggacgaggtcgaggagctccgggacatcgtgctcgtgcgggagcgcgaggcgcgcgcgctgcgcaaggaggtggacgcctaccgacgcctgctcgggcttggccctgccgaggatgacgaggaggaggatgacgagcaggagatggtcacaccgcatagtttcctcatgtccgaaggagagcccagctcgtccagatcggtcgatgcgaatcggatgcagcattttcggaataattcttctgggttcagcttcaagacgccatcactgcgtgagcaactaattgtgccgcctcttactgcggatcggatcaatgtgggaagcgatgatagtgttgctgttcagacgccagccaaagttcccacacctcaatcaaggctggagctagatagctctgaggacgaggatgaggatgatggagcagagacggtggaaatcctccccctgtccgcccggagccaagatttggatcaaggtggcgatttccacgttgatgctgcaccaggtatggaatctacttgtgccaaggatacttgcaccaaggaacagacagctcatgcatttcaggaagtcgagtgtccgggtatagacaagattgtcaacaatgaccagacagcaagtaagaatgatgccaatgtctatgatgtgcatgtggtcgatgacatacgcttctcaacagaggtcaagggcctgattggccgaagcttctcagaggcaacaatgcaggcagagagattacagactcgagctgctgcagatgatctccttgggaagagtctgaatgccattaaaggtgcacaggacaagataaggcatgcagcaaatgaaaggaggcagtcattacagttgcaactcttagaggacatagctaatcagcttcagggaatcaaggatgctgcagaagcagggagacaagtgtactgtgctactcctaaaagctccaagaggagc

SEQ ID NO: 1530 - DNA, 1500 bp, Artificial sequence
  Mir resistant mutated nucleotide sequence
atgacgacgccgtgcccgggcgccgcggccgtgcgcgtccagtggacggcgcgctccctggcgggggcgtttctcgacctcacgctcgcctgggcctgcctctgcctcgccgcgctcgccgccgccgcggcccgcttcctcgcgttgcttggcctcccgctcccctgcacctgcgcacgccctcacctgccttgtatcctcgcctttctggcgtgctacccgtcccgcgccgtcgggtccctccacgccgccctccgcgcccgcttcccctttgcaggacccacagatgatgaagaccgccgtcaggagggggcggaggaagatggggaggagcaggccgtcgacgcgcgggaggaggaagcggatcttcgtcgccgcgaggaggcgcgcgccgagctgcagcgggagctcgagaaagagcgcagcgccgcggcgtcggcggccgaggaggccatgtccatgatcctgcgcctgcagaaggagaagtcggcgcttgagatcgaggcgcgacagcagcgccgcaccgctgacgagcgctgcgccttctacgaggacgaggtcgaggagctccgggacatcgtgctcgtgcgggagcgcgaggcgcgcgcgctgcgcaaggaggtggacgcctaccgacgcctgctcgggcttggccctgccgaggatgacgaggaggaggatgacgagcaggagatggtcacaccgcatagtttcctcatgtccgaaggagagcccagctcgtccagatcggtcgatgcgaatcggatgcagcattttcggaataattcttctgggttcagcttcaagacgccatcactgcgtgagcaactaattgtgccgcctcttactgcggatcggatcaatgtgggaagcgatgatagtgttgctgttcagacgccagccaaagttcccacacctcaatcaaggctggagctagatagctctgaggacgaggatgaggatgatggagcagagacggtggaaatcctccccctgtccgcccggagccaagatttggatcaaggtggcgatttccacgttgatgctgcaccaggtatggaatctacttgtgccaaggatacttgcaccaaggaacagacagctcatgcatttcaggaagtcgagtgtccgggtatagacaagattgtcaacaatgaccagacagcaagtaagaatgatgccaatgtctatgatgtgcatgtggtcgatgacatacgcttctcaacagaggtcaagggcctgattggccgaagcttctcagaggcaacaatgcaggcagagagattacagactcgagctgctgcagatgatctccttgggaagagtctgaatgccattaaaggtgcacaggacaagataaggcatgcagcaaatgaaaggaggcagtcattacagttgcaactcttagaggacatagctaatcagcttcagggaatcaaggatgctgcagaagcagggagacaagtgtactgtgctactcctaaaagctccaagaggagc

SEQ ID NO: 1531 - DNA, 993 bp, Artificial sequence
  Mir resistant mutated nucleotide sequence
atggtggtttcaatattgactcacccgttcatggctgcggcggcgtgcgtcgccgtcgcgttggctctgttggccacgaccagcagcgcgcagctggacccgcacttctacgacaaggcgtgcccggcggcgctccccaccatcaagaggctcgtggaggaggctgtggccgcggagccccgcatgggcgcgtcgctgctgcggctgcacttccacgactgcttcgtcaacgggtgcgacgggtccatcctgctggacgacacgcccttcttcaccggcgagacgatggccgcgccgaacgccaactccgtccgcggcttcgacgtgatcgaccgcattaagggcgccgtcaacgccgcctgcaggggcaacgtggtctcctgcgccgacgtcgtcgccatcgcggcacgcgactccgtcgtcgcgctgggagggccgtcgtacgacgtgccgctgggccgccgggacgcgcggacggcgagccaggcggcggcgaacagcagcatcccggcgccgaccttcggcatcgaccgcctggcctccaacttcgcgtcgcacggcctctccctgcaggacctcgtcgcgctctcgggagcgcacacgctggggttctcccgctgcaccaacttccgagaccgcctctacaacgagaccgccaccctggacggctccctcgccgcctcgctccgggccgcgtgccctagagcagcaggaacaggagatgatagcctcgcgccgctcgaccccacgcccgcgcggttcgacgccgcctacttcgcctcgctgctgcggaaccggggagtgctgcactcggaccagcagctgttcgccggcggccccggcgtcgcggacgccctcgtgaggttgtacgccgccgacaccgacgccttcaggagggacttcgcggacgccatggtgaggatgggcagcctcagcccgctcaccgggagcaacggcgagattcgctacaactgccggaaggtgaactactct

SEQ ID NO: 1532 - DNA, 966 bp, Artificial sequence
  Mir resistant mutated nucleotide sequence
atggcgaggcggagcctggcggtcgacgcaaccgcaggcgccgcatcccgggttcggttcgcgcccacctccaataacctgctcgtctcctcatgggattcggggctgcggttgtacgatgccgacgagggcacgctcagggtcaacgtggagtcagaggcggcattcctcgactgctgcttcgaggatgagtctgcagcgtttgcctgcggctctgatggatctgtgagaaggtacgacttccactcaggttcgcaggatacggtggggctccatgaagatgcactagcctgcattgagttctcttcactgaccggtcagattatgacaggcagccttgacaagaagctaaagctttgggattcaaaaacaagaaatgtaagcccgagcggcaccataaccttaaattcagatgtggcctcaatttctatatgcggcatttacatattagctgcagttgagagaaatgtttatctttatgacatgaggaatctaacaagaccagttgatgaaaaagattgcccattagactaccagattcgatgccttcatacttctctagagtggaatgcttatgttgctggctctgtggatggagttgttgcattgaagtatcttgatcgtggaacagatagagatttgggatatgcatttcgttgtcatccaaattccagaaacggaaaatggaatctggtccctgtaaattgcatctcagttcatccctgcaacagaactttcgttacgggagatgataaaggatgcactattgtttgggatgctcaattgaaaaagaagctgattgagcttccaatgtatttgggcagtgtggcgtcagtggcatacaaccataatggccaacttctggcggttgcctcaaactattttttagaagtggataaagaggagcaacaccaccaggtattcattgaaactgtggagaacttcaaaggcaagtcccgtgtggga

SEQ ID NO: 1533 - DNA, 966 bp, Artificial sequence
  Mir resistant mutated nucleotide sequence
atggcgaggcggagcctggcggtcgacgcaaccgcaggcgccgcatcccgggttcggttcgcgcccacctccaataacctgctcgtctcctcatgggattcggggctgcggttgtacgatgccgacgagggcacgctcagggtcaacgtggagtcagaggcggcattcctcgactgctgcttcgaggatgagtctgcagcgtttgcctgcggctctgatggatctgtgagaaggtacgacttccactcaggttcgcaggatacggtggggctccatgaagatgcactagcctgcattgagttctcttcactgaccggtcagattatgacaggcagccttgacaagaagctaaagctttgggattcaaaaacaagaaatgtaagcccgagcggcaccataaccttaaattcagatgtggcctcaatttctatatgcggcatttacatattagctgcagttgagagaaatgtttatctttatgacatgaggaatctaacaagaccagttgatgaaaaagactgcccattagactaccagattcgatgccttcatacttctctagagtggaatgcttatgttgctggctctgtggatggagttgttgcattgaagtatcttgatcgtggaacagatagagatttgggatatgcatttcgttgtcatccaaattccagaaacggaaaatggaatctggtccctgtaaattgcatctcagttcatccctgcaacagaactttcgttacgggagatgataaaggatgcactattgtttgggatgctcaattgaaaaagaagctgattgagcttccaatgtatttgggcagtgtggcgtcagtggcatacaaccataatggccaacttctggcggttgcctcaaactattttttagaagtggataaagaggagcaacaccaccaggtattcattgaaactgtggagaacttcaaaggcaagtcccgtgtggga

SEQ ID NO: 1534 - DNA, 966 bp, Artificial sequence
  Mir resistant mutated nucleotide sequence
atggcgaggcggagcctggcggtcgacgcaaccgcaggcgccgcatcccgggttcggttcgcgcccacctccaataacctgctcgtctcctcatgggattcggggctgcggttgtacgatgccgacgagggcacgctcagggtcaacgtggagtcagaggcggcattcctcgactgctgcttcgaggatgagtctgcagcgtttgcctgcggctctgatggatctgtgagaaggtacgacttccactcaggttcgcaggatacggtggggctccatgaagatgcactagcctgcattgagttctcttcactgaccggtcagattatgacaggcagccttgacaagaagctaaagctttgggattcaaaaacaagaaatgtaagcccgagcggcaccataaccttaaattcagatgtggcctcaatttctatatgcggcatttacatattagctgcagttgagagaaatgtttatctttatgacatgaggaatctaacaagaccagttgatgaaaaagattgtccattagactaccagattcgatgccttcatacttctctagagtggaatgcttatgttgctggctctgtggatggagttgttgcattgaagtatcttgatcgtggaacagatagagatttgggatatgcatttcgttgtcatccaaattccagaaacggaaaatggaatctggtccctgtaaattgcatctcagttcatccctgcaacagaactttcgttacgggagatgataaaggatgcactattgtttgggatgctcaattgaaaaagaagctgattgagcttccaatgtatttgggcagtgtggcgtcagtggcatacaaccataatggccaacttctggcggttgcctcaaactattttttagaagtggataaagaggagcaacaccaccaggtattcattgaaactgtggagaacttcaaaggcaagtcccgtgtggga

SEQ ID NO: 1535 - DNA, 966 bp, Artificial sequence
  Mir resistant mutated nucleotide sequence
atggcgaggcggagcctggcggtcgacgcaaccgcaggcgccgcatcccgggttcggttcgcgcccacctccaataacctgctcgtctcctcatgggattcggggctgcggttgtacgatgccgacgagggcacgctcagggtcaacgtggagtcagaggcggcattcctcgactgctgcttcgaggatgagtctgcagcgtttgcctgcggctctgatggatctgtgagaaggtacgacttccactcaggttcgcaggatacggtggggctccatgaagatgcactagcctgcattgagttctcttcactgaccggtcagattatgacaggcagccttgacaagaagctaaagctttgggattcaaaaacaagaaatgtaagcccgagcggcaccataaccttaaattcagatgtggcctcaatttctatatgcggcatttacatattagctgcagttgagagaaatgtttatctttatgacatgaggaatctaacaagaccagttgatgaaaaagattgcccactggactaccagattcgatgccttcatacttctctagagtggaatgcttatgttgctggctctgtggatggagttgttgcattgaagtatcttgatcgtggaacagatagagatttgggatatgcatttcgttgtcatccaaattccagaaacggaaaatggaatctggtccctgtaaattgcatctcagttcatccctgcaacagaactttcgttacgggagatgataaaggatgcactattgtttgggatgctcaattgaaaaagaagctgattgagcttccaatgtatttgggcagtgtggcgtcagtggcatacaaccataatggccaacttctggcggttgcctcaaactattttttagaagtggataaagaggagcaacaccaccaggtattcattgaaactgtggagaacttcaaaggcaagtcccgtgtggga

SEQ ID NO: 1536 - protein, 447 aa, Zea mays
MVALTTWALLGTRMPRSTLFFPLYLMSIGQGGYQPSLQAFGADQLSIGDDDDDGDGDTEPGASSTPEEKAKVKSMFFRWWYFGMCSGSLLGNSTMSYVQDNLGWGLGFAIPCAVMALSVAAFFCCTPLYKRHRQVQQPKGTGIRPSPSSVFNFKSVLGASRKISLPPSRSSDDNGDAISELELQEKPLKTDEASESSPDEAAAAPGVAKVILGLLPIWAILLVFAVIFQQPMTFFTKQGMLMNHTIGVGVGSGSLVIPPAMLQSSITVSIILLVPMYDRMIVPLTNAVTGGSDGITVLQRIGVGMVLSVVAMVAAALVESRRLRAEPALLSIFWLLPQYVLLGVSDVFTVVGMQEFFYSQVPASMRTTGIGLYLSVFGVGGFLGASLITLLEMATARPGNARGWFSDDPREARIDNFYWFLALLCFVSFVVFTHLCKYYNDRSASGR

SEQ ID NO: 1537 - protein, 222 aa, Zea mays
MLVKKNNSTAMAAGVLPLASLNHISIVCRSVEASLRFYADVLGFVPIRRPGSFDFDGAWLFNYGIGVHLLQSEDPGSLPENKGEINPKDNHISFQCESMVAVERRLKEMGIPYVQRCVEEGGINVDQIFFHDPDAFMIEVCNCDNLPVVPLAAAADQRAPAVLGACKRAAAAVGVKQQQQQSSGGAVPSSAAPAAAAQRVPSAAQAPIVRVAEESTSHISCA

SEQ ID NO: 1538 - protein, 465 aa, Zea mays
MTIKGGDSWALLVLVVATACIGKIGGTVIASLIVRVPFREALTLGFLMNTKGLVELIVLNIGKDRHVLNDETFAILVLMALITTFITTPVVMTIYKPARRGAPYKNRTVQRANPHDEFRMMACFHSTRNIPTIINLMESSRGTRKRGITVYAMHLVELSERSSAICMVHKARRNGMPFWNRRRNGDGGGDQLVVAFETYQQLSRVSIRAMTAISDLETIHEDVVTSAHQKRAALIVLPFHKLHQIDGHMESLGDQYQHINQRVLHHAPCSVGILVDRGLGGVAQVAASDVSYTIVVIFFGGRDDREALAYGMRMVEHPGIGLHVLRFLLQSGGAASDDDASFLEEFRTKVANGNDSVRYEDRTVGGKEEVVEAIKATGRCNLFLVGQGTPCMPLVDWSTDSPELGPVGTYLALPEFSTVASVLVMKQYDPMAKHDDFVEEVADIAVDVDTPGPSNRGTNTSFHAG

SEQ ID NO: 1539 - protein, 409 aa, Zea mays
MRGTMPATDSSSSSSPAAAPLSSIGRSIRSLRRDQNQIHSFPPPPDATDAFQRRAAQLLADLPAADDVLSLAWTRRLLESFLLCLEEFRALLFGSGDSPAARPPLDRLVADFSDRAVKALDLCNAVRDGLDLVRQWRKHLAIAAAVLASSSDSSSPLGEAQIRRARKALTDLTILMLDDRDGGGVVGQRNRSFGRANEKPPRHHRRSSSGGSSGSGSGSHLRSLSWSVSRAWSAARQLQAIGGGLPVPRPHDNAATGGLASAVYTMGAVLFIVAFALVAAIPCQDRGLHAHFSVIRNLPCSAPITTLYERILDESKKKDRKNSCGLLKEIHQIELCSRHLMEITDAADFPLREDKDAVLREAAQDLVHLCESIKEGLDPLERQVREMFHRIVRTRTEILDCLSKPHGTG

SEQ ID NO: 1540 - protein, 315 aa, Zea mays
MEGSRNSPDRQSSGGSPEERGSGGSGGRGAGEPVRSRWTPKPEQILILESIFNSGMVNPPKDETVRIRKLLERFGAVGDANVFYWFQNRRSRSRRRQRQMQAAAAAAATAAAASSAANSSPGASATVGLPSGALQYPLVMSGSGTACQYEQQASSSSSSGSTGGSSLGLFALGAGVPSTGGGFFQESCGASSPLATGLMMGDVDRSGGSDDLFAISRQMGFAAASPVASASVAPPSTTAHHQQYYSCQSPTGTITVFINGVPMEVPSGPIDMRAIFGQDVLLVHSTGALLPVDDYGILTQSLQTGESYFLVARPT

SEQ ID NO: 1541 - protein, 327 aa, Zea mays
MPRPPTMVIQDDYIDMDLTPAATPEPSPASPRFEFQSAGAGAAGDRHREAAFASPADELFYKGNLLPLHLPPRLQLVQRLLQDQEQPPPLRGAKRDAESDATAAAAAERGDADAAAAASKVCAAKKPSWAKKLKVVKRWASKEYIRSLFLARPPLPSDIVAAAGGASASGHGIGSVSARGSVLEQEEVCQCQHRKSFSGIIRRVRLVATKAPGTSPLCSSSSSSSSSSTPSCRNANGFFFRTPASAAGATPALKRSSSAGSSEEGAIQGAIAHCKRSQLLQPGMVASAAARRSVSDVMFYSVTNTPRASSVTAGEVAQERRQEMCRG

SEQ ID NO: 1542 - protein, 322 aa, Zea mays
MSLSPADGAAYWLRWQVLVCGALIALPTVAAAALLPRLRSSAPPLRAADLWVPCWARLHPGWLLAYRAVALAAAVALLARLVVARGITVFYFYTQWTFLLVTIYFAFATAISAHGCLVYSRKSLRKADESRGLLNADVENRDVSNSVSGERKTDETNMMMSYYEQIVNERRAGFWGRCMEIIYQTSAGATMLTDVTYWGLLVPFFYRDKFGLALFTDGMHSLNAVFLLIDTLLNNMPFPWYRMSFFVFWSCAYVTFQWVLHACGGVSWWPYPFLDLSSSGAPLWYLGMAIAHVPCFFLYWLIVKAKHTYFQRMFPHAYVRAT

SEQ ID NO: 1543 - protein, 787 aa, Zea mays
MGRSYLEGGRDAGADLGYPLVAVCIDKDKNSQNALKWAIDSLVQKGQTIVLVHVNTKGTSGGVEDAAGFKQPTDPHMKDLFVPFRCFCTRKDINCKDVVLDEHDVAKSIIEFSAQAAVEKLVLGATTRGGFVRFKADIPTTISKGAPDFCSVYIVNKGKVSSQRNSTRAAPRVSPLRSQIQSSQIAATLKPEPPQSHRWSSSSRGHEHGETPRVDNFRSPFARGGPANTRKSYADLSHMSMPDSADISFVSSTGRRSVDHHPAIPPRMSNGSVDSYDHSFEMSRTPSKWGGDSFGGMDHTTFSQSSSSSFCSLGMQDDVEAEMKRLRLELKQTMDMYSTACKEALTAKQKAMELQRWKMEEEQKTQDSRITEDSAMAMIEREKARAKAAMEAAEASQRIAEMEVQKRISAEKKLLKEAEERKNRGGSGMSHEARYRRYSIEEIEQATDNFNDARKVGEGGYGPVYKGFLDHTQVAIKVLRPDAAQGRSQFQQEVEVLSCIRHPNMVLLLGACPEYGCLVYEYMASGSLDDCLFRRSGGAGGPVIPWQHRFRICAEIATGLLFLHQTKPEPLVHRDLKPGNILLDRNYVSKISDVGLARLVPPSVADTVTQYRMTSTAGTFCYIDPEYQQTGMLGVKSDVYSFGVMLLQIITAKPPMGLSHHVGRALERGELQDMLDPAVPDWPLEEAQCLAEMALRCCELRRKDRPDLGAVVLPELNRLRALGEDNMQYCGAIIRGGGGGGGMHSSSPFHSNISRSHAEMMIDSQYPRSVFSSRAGDSPMPPRRSNA

SEQ ID NO: 1544 - protein, 347 aa, Zea mays
MGGALLLALLLVSAAAAPQVLGVGNGDNHMRIIQEDIIETVNNHPSAGWTASRNPYFSNYTIAQFKHILGVKPAPQNALSNVPVKTYSRSLELPKEFDARSAWSRCSTIGNILDQGHCGSCWAFGAVECLQDRFCIHLNMSILLSVNDLLACCGFMCGDGCDGGYPIEAWRYFVQNGVVTDECDPYFDPVGCKHPGCEPAYPTPKCEKKCKEQNQVWQEKKHFSIDAYRINSDPHDIMAEVYKNGPVEVAFTVYEDFAHYKSGVYKHITGGIMGGHAVKLIGWGTSDAGEDYWLLANQWNRGWGDDGYFKIIRGKNECGIEEGVVAGMPSTKNMVPNFGGAVGRAIV

SEQ ID NO: 1545 - protein, 248 aa, Zea mays
MGTEYPTFADVSGARALLFLADSTPRLAPPSRPPALSEEFYCYSGSSSSYSGASTRSCVSDSAQRGRPVDPLRVLSVVASLRRIDPKVLAEATSALFHTDAEKKRKGVWIEIDSGGDDGQSERSSAVASEGSTVTAAASAGSTATSGRCRGAPRVGCAAGGKGPRRAEVIMQWFSQTQAGPATENDIRAAVGDNSGTSKAIRWLLKQEGGLRRAGNGGALDPYVYMAFTSLGGSPWLAVLQPGPHCCR

SEQ ID NO: 1546 - protein, 327 aa, Zea mays; identical to SEQ ID NO: 1541

SEQ ID NO: 1547 - protein, 568 aa, Zea mays
MGLQMIHGRPCALCCPSSSSSSSALWMRMQAQLPPKQSHHPLNGGRAISSESLAALAWHFLLRRRSRDGATALASSSGVLQIAEDKSSAANLTKHKVSAERKLLNDALDRTGVRYETESWMDEETSSWMDRDLTDSDLRYRLLMQNLEELETSLVGKDLEMDILEQLGALGSFNASVARGVSALHGRPDGSLLDDPEPETTPLDAGQEDSQMVVVRSGKSQERKLRRMRASSDEKGSRTSVKVNPPRRPKKSRKASSSQFISEWKSHPGQRRIIVREQSALLSTIKECAGLEKIREKMVKEGQEVSYHRWAEAAGVDEAELVSRLQAGYCCRDRLLVTTEWLVRCIARTYTGMGTALDDLLQAGKMGVLDGAEKFDSRKGCRFSTYVKYWIRKGMLALLAENSGVTLLPARMESIMRKVKEARRGIRYRQGRNPSDSEVAAAVGVSVANVRLARKCSRRAVSLYSEVAIGQDVKFAEVIPDESASPDEAALFRGQLRERLLLVLGRLPAREGRVLRLRHGLEDGRCRSLEEIGGIYGVSKEWIRKIEKSAMARLRDDDAVRRDLHDFV

SEQ ID NO: 1548 - protein, 483 aa, Zea mays; identical to SEQ ID NO: 1045

SEQ ID NO: 1549 - protein, 805 aa, Sorghum bicolor
MDLEFGRALRSPKRDSWKTTLLLAYQSLGVVYGDLSISPLYVYSSTFAEDIQHSDTNEEIFGVLSFVFWTLTLIPLIKYVSVVLRADDNGEGGTFALYSLICRHANVSLLPNRQIADEELSTYKLECPPEITDKSRIKVWLEKHRKLRVALLIMVMIGTCMVIGDGVLTPAISVFSAVSGLEFSLSKDHHEYAVIPITCVILAFLFALQHYGTHRVGFLFAPIVLAWLFCMSALGLYNIIHWNPHIYKALNPSHMFKFLKKTRKYGWMSLGGILLCMTGSEAMFADLGHFSYSAIQLAFTCLVYPALILAYMGQAAYLSRHHDFYSGSKVGFYIAVPDKIRWPVLILAILASVVGSQAIISGTFSIINQSQSLSCFPRVKVVHTSEKIHGQIYIPEINWLLMILCIAVTVGFRDTKHMGNASGLAVITVMLVTTFLTSLVIVLCWHRPPLLALAFLLFFGSIEALYFSASLIKFLEGAWLPILLALILMAVMLIWHYTTIKKYEFDLHNKVTLEWLLALGDKLGMVRVPGIGLVYTDLTSGVPANFSRFVTNLPAFHQVLVFVCVKSVPVPYVFPAERYLIGRVGPPGHRSYRCIVRYGYRDVHQDVDSFETELVETLATFIKLDASYRCSEASEREQEQELEPGERERRLTVIASHPLRHRASYDLQDSMQHSAASTVEMRATATAASADDDDDRRSPGRAEISSAAAGAKQVRFFIDSHVASPEFAENKQVAEELEALAAARECGTAFILGHSHVQCKPGSSVLKRLAVDVGYNFLRRNCRGPDVALRVPPASLLEVGMVYVL

SEQ ID NO: 1550 - protein, 489 aa, Oryza sativa Japonica Group
MEDEATSVAAPLLRPRGGVDAEAVKQQLWPAGARVAGEWWVESKKLWRVVGPAIFQRIALYGINVVSQAFIGHMGDLELAAFSIASTVVAGFNFGFLLGMASALETLCGQAFGAKKYHMLGVYLQRSWLVLLMFAVALTPTYVLMEDLLLLIGQPADLASLAGKMSVWLLPQHFAMAMLLPLTRFLQSQLKNWVTAVTAGVALALHLVITYLLVNTLHLGLLGAVAAANVAWWIVVLGQLVYVVGGWCPLSWKGFSMEAFADFWEFIKLSSASGVMLCLENWYYRVLVLLTGYLNNAEIAVDALSICLTINGWEMMIPFGFLAATGVRVANELGAGSGKGARFAIVVSVTTSVAIGLVFWCLIIAYNDKIALLFSSSKVVLDAVSDLSVLLAFTVLLNSVQPVLSGVAIGSGWQALVAYVNVGSYYLVGVPIGAILGWPLHFGVGGIWSGLIGGTAVQTLILAYLTISCDWDEEAKKASTRMEVWASSK

SEQ ID NO: 1551 - protein, 169 aa, Zea mays
MHPMNMTSCEFAAVRLPGHPALRPSRSRPSPTPPPPPAVANKKPAASSVRCTSSRRDDAEFGCNGGGGRIVDEGMVVLRRRIHEMEAAERGWDPPEEWAAWEKEWYATYDADVCQQLVGVLQAFLVNSRPGVGVGLVAVLMLAVPASAFVLVSLLLDASRAVVSNLHHH

SEQ ID NO: 1552 - protein, 670 aa, Zea mays
MEANPKNTFTIKVEDGKPGKDGRLAVGPVFRSVLAKDGFPQLEPDMKTSWDVFRVAAVKYADNRMLGWRPFKDGVPGPYLWKSYKEIYDEVLQAGSALQKLGVQPGSRVGIYGANCPQWIVAMQACNGYSLVCVPLYDTLGAGAVDYIIDHAEIDVVFIQDKKIKEILSPNCKSAKRLKALVAFTSATTEQNKEADQIGIKMYAWDDFLKVGKDNPRQPCPPQASDICTVMYTSGTSGQPKGVMLTHESHAMYVKGVDLFMDQFDDKMTTDDVFLSFLPLAHILDRMIEEYFFHKGASIGYYHGDLNALRDDIVELKPTLLVGVPRVYERIYEGILKAIAELRPLRRVIFNALYNRKLASMKAGYSHKTASPFADMLAFRKVKARLGGRLRLLISGGAPLSNEIEEFMRVTTCAYFIQGYGLTETLGPSTVCYIDDMALVGSAGVPATYTEIRLEEVPEMGYNPLGVPSRGEICIRGKSLFAGYYKSPELTNEAIVDGWFHTGDIGEMTPDGILKVIDRKKNIFKLSQGEYVAVEYLEKVYGFPPLVEDIWVYGDSFRSSLVAVVNPHQENTMKWAESNGYKGSFDEICKLEGLKEYILKELAAVAQKNKLRGFEYIKGVVLDPVPFDIERDLVTATMKKKRKNMLNYYQSEIDTIYKKLEAQKSAARAK

SEQ ID NO: 1553 - protein, 377 aa, Zea mays
MMDPALLDDVIRRLLEVKNLKPGKNAQLSESEIKQLCAAAKEIFLHQPNLLELEAPIKICGDVHGQYSDLLRLFDYGGYPPQANYLFLGDYVDRGKQSLETICLLLAYKVKYPENFFLLRGNHECASVNRIYGFYDECKRRFSVKLWKTFTDCFNCLPVSALIDEKILCMHGGLSPELNKLEQILNLSRPTDVPDTGLLCDLLWSDPSNEATGWAINDRGVSYTFGPDKVSEFLEKHDLDLICRAHQVVEDGYEFFASRQLVTMFSAPNYCGEFDNAGAMMSVDETLMCSFQILKPARKVLGGSTNNKIRLQVIERMVTMASLISGWLVSSTPVVDGGLFHHNHITAAATDRPNASSLPCWINTLVMYYLLCGSERM

SEQ ID NO: 1554 - protein, 153 aa, Sorghum bicolor
MDMVTAAAALPWGGGSPAWIDVPERSKSAFMELKRRKVHRYVIFKIDDRREEIVVEKTGAPGESYDDFTASLPADDCRYAVYDLDFVSDDNCRKSKIFFISWSPSDSRIRAKTIYAVSRNQFRHELDGVHFEIQATDPDDMDLEVLRGRANRT

SEQ ID NO: 1555 - protein, 527 aa, Hordeum vulgare subsp. vulgare
MAGSQVVDSGEKRLNELGYKQELRREMTLFKTLAISFSTMTLFTGITPLYGSSLQYAGPASLVWGWVVVSFFTWFVGIAMAEICSSFPTTGSLYFWAAHLAGPVWGPLASWCCAWLEAIGLIAGIGTQAYAGSQVLQSIILLCTGTNKGGGYLAPRWLFLVMYLALTFIWAVFNTFALEVIAFLDVISMWWQVVGGTVIVIMLPLVAKTTQPASYVFTHFQTTPDVTGISSGAYAVVLSLLVSQYSLYGYDAAAHLTEETKGADKNGPIAILSSIGIISVFGWVYILALTFSIQDFGYLYNTANETAGTFVPAQILYDAFHGRYGSSTGAIVLLFIIWGSFFFGGLSITTSAARVVYALSRDRGIPFSGVWRKIHPTRKVPGNAVWLCAAVCALLGLPILWINVVFTAITSIATIGWVGGYAVPIFARMVMREEDFRPGPFYLRWASRPVCLVAFLWICYTCSVFLLPTMYPIRMDTFNYAPIALGVVLGLIMLWWVVDARKWFKGPVRNIDDLQNGNGNDNANVKV

SEQ ID NO: 1556 - protein, 545 aa, Sorghum bicolor
MGSTAAASVLPVSAGTGQNLVLILDYGSQYTHLITRRVRQLGVLSLCVSGTAPLASLEGLRPRAVILSGGPHSVHAPGAPAFPEGFLDFAAAAGAHVLGVCYGMQLLVQSLGGAVVPGERQEYGKMDVQVTAASSALYGEAETGKRQTVWMSHGDEVVTLPQGFEVVARSVQGAVAAIEYREKRFYGLQYHPEVTHSAQGMETLRRFLFDVCGIKADWKMQDVLDEEIKTIQSTVGPDEHVICALSGGVDSTVAATLVHKAIGDRLHCVFVDNGLLRYKERERVMTTFESDLHLPVTCVDASEQFLSKLKGVEDPEQKRKIIGREFIAVFDDFAHKLEQKIGKRPEYLVQGTLYPDVIESCPPPGSGRTHSHTIKSHHNVGGLPKDMKLKLIEPLKLLFKDEVRKLGSILNVPDSFLKRHPFPGPGLAVRVLGDVTQGNALEVLRQVDEIFVQAIKDAGLYDKIWQAFAVFLPVQTVGVQGDQRTHSNAVVLRAITSEDGMTADWYYFDHAFLVDVVNKICNNVRGINRVCQDITSKPPATVEWE

SEQ ID NO: 1557 - protein, 371 aa, Zea mays
MQRGVSFPGGMAKECPPAELWLPDEFLDDDFFSEEEKAAVAAKSESDEEEGMDGLSRRAAGLVVGGGGDGSPAKAQVLAGSPQSILCGLHASGEDSPNGAASQVSSPPSSPLEKTPADHWDLLKEAAGQVARMRTTSGILVATNAGAHQRHPVPPLAQKLSAPAEAPKAAGANLPQAQPKNSMEHRRIQIARFNALKQQQLLKHMRERELAVATAAAWGTSVAGSHRAAGYRAPAPHVLSSSAWPTLQKQQQQQQQRAASPAGMRAVFVAPPGAKRECAGTGVFIPRQAGAPAEPKKRPAACAPVLLPARVVQALNLNVEDLGARPIYPGGFVLDHDALVSRSNALLASRASQQLHGASSREVNLPQEWTY

SEQ ID NO: 1558 - protein, 238 aa, Zea mays
MCPTKKEMSAESSGSASSWTSASASASTSTSPEHQTVWTSPPKRPAGRTKFRETRHPVFRGVRRRGSAGRWVCEVRVPGRRGCRLWLGTFDAAEAAARAHDAAMLAIAGASACLNFADSAWLLAVPASYASLAEVRRAVAEAVEDFQRREAAAGDDARSATSPTPSTSGTDDDAATDGEESSPATEVSSFQLDVFDNMSWDLYYASMAQGMLMELPSAVPAFGDDGYTNVADVPLWSY

SEQ ID NO: 1559 - protein, 380 aa, Sorghum bicolor
MGQSPSAPQGRGRSRSRNGSSSRWPHPGLGLDLGFLLGRKPRPGDEKPDLASWMRCFLSQRLPQPTAAAEETADAEGKAAGRREEEEVGAEDADHLVVMVNGLYGSSADWKFAAEQFVKRLPGKVFVHRSQSNYSKLTYDGVDLMGERLAEEVRQIVQRRRNLRKISFVAHSLGGLVTRYAIGKLYEPAMDETSSCDNDKPSDEQNVPGGGKIAGLEPINFITSATPHLGSRWNKQLPFLFGVPLLERTAAGTAHFIVGRTGKHLFLTDRDDRKPPLLLRMVEDCDDGKFMSALRSFKHRVAYANLKLTANDEKYPHVINVDKGNLEDHQQEGSVEDSLADSYEEMMIRGLTQVTWERVDVCFHKSWLRYNAHNNIQVRL

SEQ ID NO: 1560 - protein, 167 aa, Zea mays
MHSFGHRANAVATFAVTILAAICFAASFSDNFNTPTPTASVKILNLNWFQKEANGNDEVSMTLNISADLSSLFTWNTKQVFVFVAAEYETPQNALNQVSLWDGIIPAKEHAKFLIHTTNKYRFIDQGSNLKGKEFNLTMHWHIMPKTGKMFADKIVMTGYRLPELYR

SEQ ID NO: 1561 - protein, 654 aa, Sorghum bicolor
MALVPSGGAGACKDDAALGLPWSEMFRSASLRRPKQEADDAPPKKPALKKARAKEMKSKPSSVGAGAGAGSDMEGLSLEPDARLALYIAMAHAGLATALLVLYGLYLLLADFLRPLQWALLCSVPLRETQRALVAFWEPPLRGGLSAALLALPLAALRSSTATLADVRAALLRRPLPDSPAFPRLLRWLVSFFFFLVLFERLGAATALLLLVLALAFFAASPKLKRAASSRISSRPPSSRGLLLTGGILRHLKTLVALGLMLGMIAGFITGSIFFSYKIGLEGKDAVMSLKSHVEKSNYSEKIGLKKWMDDNDIPGLVDQYSGKIYDTVWEQVDQLAVQYNLTDFTSGFRHFLISQSVDPKSKALISSRPHPYSMKLQSIATCVKNREWVEIYRELDSFFRELLITREDLVVKAKGLALQGTEIAKRLLSSSTLVLGGSANLMLSIALRILSGAAEVVNFLSQLMVFLWVLYYLITVEGGGATEQIIDLLPVSKQVKDRCVEVIDHAISSVLLATAKIAIFQGGLTWLLFKFFKVHFVYTSTVLGFISALVPILPFWLSSIFATGELLMEGRYVLGLVVTVIHLMLMDYGTTTILEDIPGYNGYLTGLSIIGGMTLFPNALEGAILGPLIMTVVIALKNLYTEFVLADGEEASS

SEQ ID NO: 1562 - protein, 227 aa, Zea mays
MAKTTQPTAGMRDPLLPTSTAASPPPYLDPHPADSYTYTVFLVPVRLRRGLCRGGRCIVPCLTVLFLLALAGFLLWPADPDISLARLHLAHVSVVARPAVAVTISATLKVRVRNPDLFALDYTRLDVAIGYRGAGLGRVTSGGGRVRARAVSYVDANLQLDGIRVVEDAMYLLEDLAQGSVPFDTIAEVEGHLHFLFLSIPVKGRISCVMHINPHNQTIVHQDCYPE

SEQ ID NO: 1563 - DNA, 2350 bp, Zea mays
gccagagcgtcaagtctggttcgccgcacggcgtcgcgacgccgacggtcatgtcggggaagacgacgccgacgaaggcgacgctgagccggccatgcgttctggtcatagtgatggcgggcgtggagaggttcgcgaacaagggggtggggtcgaacctggtgacgtacctcaccagcgtcgtgggcatgagcacggcggcggcggccaagagcgtcatcgcctggaacggcgtcagcttcatgctgccgctcgtcagcgccgtcctggctgactccgcccactgggaccgctactgcaccatcgccgcctcctccttgctctacgtcttggtaactccatcatcgtcgtagcctcttaattaattcattcattacatgtccgataatctttatgacatattattagctgtctggcttagagtgcatgccaatcaggagttctggaacaagtatgaaatctagaattaatggctcctatgtccgtttctgaacattgtaataattaattacggtggaaccaaaatgagcaaatgcgatgcgatccttaaaaacacttctgaacctctgtttttttcatagcaaaacggaggtgaagcccactttgagggctagtttggaaactctatttttctaaaaaaaaaatctattttttctcagaaaaatagaaaatctttaaaaaatagggttccaaaccaaccctcaattattattactttgtctaaaaaacaggttaccaccactgtccctccttgtccagggaatggtagcgctcacgacatgggcgctgctggggacacggatgccgcgctccacgctcttcttcccgctctacctcatgtccatcgggcaaggcggataccagccttcgctgcaagcgttcggcgccgaccagctgagcatcggggacgacgacgacgacggtgacggcgacaccgagcccggcgcgtcgtcgacgccggaggagaaggccaaggtgaagagcatgttcttccggtggtggtacttcggcatgtgcagcggcagcctgctggggaactccaccatgtcgtacgtccaggacaacctgggctggggcctcggtttcgccatcccctgcgccgtcatggctctgtccgtcgcggcctttttctgctgcacccctctgtacaagcggcaccggcaggtgcagcagccgaagggcaccggtattaggccgtccccgagtagcgtcttcaacttcaagtcggttctcggcgctagccgaaagatcagtctgccgccgtcgagatcatcagacgacaatggcgacgccatttctgagcttgagttgcaagagaagccactgaaaactgatgaagcatcagagtcctcccctgacgaggctgccgctgctcccggcgtggccaaggtcatactcggcctcctgccgatctgggcgatcctgctcgtcttcgcggtgatcttccagcagccgatgaccttcttcaccaagcaaggcatgctgatgaaccacacgatcggcgtcggcgtcggctccggctccctggtgatcccgccggcgatgctgcagagctcgatcaccgtctccatcatcctgctcgtgcccatgtacgatcggatgatcgtcccgctgaccaacgccgtcacggggggcagcgacggcatcacggtgctccagcggatcggcgtcggcatggtcctctccgtggtggccatggtcgccgcggcgctcgtcgagtcgcggcggctccgcgcggagcccgccctgctgagcatcttctggctcctgccgcagtacgtcctgctgggggtctccgacgtgttcaccgtggtggggatgcaggagttcttctactcgcaggtgccggcctccatgaggaccaccggcatcgggctctacctcagcgtcttcggcgtcggcggattcctcggcgcgtccctcatcaccctgctcgagatggccacggcgaggcccggcaacgcccgcggatggttctctgacgacccgcgggaggcgcggatagataacttctactggttcttggctctcctctgcttcgtcagctttgtcgtcttcacgcacttgtgcaagtactacaacgacagatctgcgtcagggaggtaggatcgacccgagtaattaagctgggggtggacgagaggatcttcgatcttgattttgcttgacaccttgagtgaaaactcattacttgtattttcagggcgattctagctagagatagttcgtctgtgtaatgttttcagaaagacatgtaattcaggactctagacgtaatggttgtgttccaacacttgtacaaagcttgtcttgtgatttgataggcaaaagataatactctctccgattc

SEQ ID NO: 1564 - DNA, 1146 bp, Zea mays
accagaacaggcaacgcactactcgttcgtatctttaagcttgctgctgcagcgtaagaaaaagcagtctgcactcggtcggtcggtcgctctgttcagctagctgcatgctcggccaccatatctcctccagtacgttcgtcgttctccacgccgctatctggtctgcggtaagcagcagctagaggccgttgtgtaggctacacagaagatcatcgaggaggatgctggtgaagaagaacaacagcacggcgatggcggcgggcgtgctgccgctggcgtcgctgaaccacatcagcatcgtgtgccggtcggtggaggcgtcgctgcgcttctacgcggacgtgctcggcttcgtgcccatccgccgccccggctccttcgacttcgacggcgcctggctgttcaactacgggatcggcgtccacctactgcagtcggaggaccccggcagcctcccggagaataagggcgagatcaaccccaaggacaaccacatctccttccagtgcgagagcatggtggcggtggagcggcggctcaaggagatgggcatcccgtacgtgcagcgctgcgtggaggagggcggcatcaacgtggaccagatcttcttccacgacccggacgccttcatgatcgaggtctgcaactgcgacaacctccccgtcgtcccgctcgccgccgccgccgaccagcgcgcgcctgccgtcctcggcgcctgcaagcgggccgcggcggcggtcggcgtcaagcagcagcagcagcaaagcagcggcggcgccgtgccttcttccgccgccccggcggcggccgcgcagcgcgtgccgtcggcggcgcaggcgcccatcgtccgcgtcgccgaggagtcgacgtcgcacatttcgtgcgcgtgattcttcatgccaaatggcgaggacggtcagtgtcgtgccggcctgccggatgccgtcaccgcgacggtgaccgcgcgcactgcatgtctgcgtcgagccgtgacgaagcaggcacgatgcgtcgagtcacggcaaaaagcgtctagcgcgtcgtctctgtatatgcgagtgcgtcgtcgtgtagctccatgtgcaagcaaactactgcccttttgtagtaaagaataaaaccatgtgaaaaaaaaaaaaaaaa

SEQ ID NO: 1565 - DNA, 1738 bp, Zea mays
cgtgcttgccgccggattcgccaccgatgccattggcatccacgcgctctttggagcgttcattgtcggcatcatcgtccctaaggacgggccgttcgccggggttctcctggagaaggtggaggacctcatatctggcctgttcctgccgctctacttcgtgtccagcggcctcaagacgaacgtaatgaccataaagggcggtgactcgtgggccctcctagtcctcgtcgttgccaccgcgtgcataggcaagatcggcggcacggtgatcgcgtcgctcatcgtccgggtgccgttccgcgaggccctcacgctcgggttcctgatgaataccaaggggctcgtggagctcatcgtcctcaacatcggcaaggaccggcatgtccttaacgacgagactttcgccatcctcgtgctcatggcgctcatcacaaccttcatcacgacgccggtggtcatgacaatctacaagccagcgcggcggggggcgccgtacaagaaccgcaccgtccagcgcgcgaacccgcacgacgagttccgcatgatggcctgcttccacagcacgcgaaacatccccaccatcatcaacctgatggagtcctcgcgcggcacgcggaagcgtggcatcaccgtctacgccatgcacctcgtggagctctccgagagatcgtccgccatctgcatggtccacaaagctcgtcgcaacggcatgccgttctggaacaggcggcgcaacggcgacggcggcggcgaccagctcgttgtcgccttcgagacgtaccagcagctgagccgcgtgtctatccgggccatgacggccatctccgacctggaaacgatccacgaggacgtcgtcaccagcgcgcaccagaagcgagccgcgctcatcgtgctccccttccacaagctccaccagatcgacggccacatggagtcgcttggcgaccagtaccagcacatcaaccagcgcgtgctccaccacgctccctgctccgtaggcatcctcgtcgaccgcggcctcggcggtgtcgctcaggtggccgccagcgacgtgtcatacaccatcgttgtcatcttcttcggtggccgcgacgaccgcgaggccctggcctacggcatgcgcatggtcgagcacccaggcatcgggctgcacgtcctacgcttcttgctacagtccggcggcgccgccagcgacgacgacgcgtcgttccttgaagagttccgaaccaaggtggccaacgggaacgactctgtccgctatgaagacaggacagtgggagggaaagaggaagtcgttgaggcgatcaaggcaacagggcggtgcaacctgttcctcgtcggacagggcacgccctgcatgccgctggttgactggagcacggacagcccggagctcgggccggtgggtacttacctggcgctgccggaattctcgacggtggcatctgtgctggtcatgaaacagtacgatccgatggcgaagcacgacgacttcgtcgaggaggtggccgacatagcggtggacgttgacacgccgggccccagtaaccggggaaccaatactagcttccatgccggatgatacgtgctggtgttagatgtattattaacatgtcgagcagacaagactgattaacattatgtaatgtaatctcaaagtggtgtaaatggatggatcaaggtataggatcccctggagtgtccaaccggcaatccaaaccaattccttttttcg

SEQ ID NO: 1566 - DNA, 1694 bp, Zea mays
gccgtgtcgtgtcctctcgtctcgtctcgtctcgtctgcagtagcagtctccgcatccgctccctcctcctcctccgtcgatttggattcgcagcggcggcggcggccaatcaaagcaatcatcacccagtcgcccagcccaacagacgctccagtccccagccctcccacccgcatcgatcgatgcgaggcacaatgccggccaccgactcctcctcctcgtcgtcgccggcggcggcgccgctgtcctccatcggccgctccatccgctcgctccgccgtgaccagaaccagatccactccttcccgccgccgccagacgccacagacgccttccagcgccgcgccgcccaactcctggccgacctcccggcagccgacgacgtcctctccctcgcctggacgcgccgcctcctcgaatccttcctcctctgcctcgaggagttccgcgccctgctcttcggctccggggactcgcccgccgcgcggcccccgctcgaccgcctcgtcgccgacttctccgaccgcgccgtcaaggcgctcgacctctgcaacgccgtccgcgacggcctcgacctcgtccgccagtggcgcaagcacctcgccatcgccgcagccgtcctcgcctcgtcctctgattcctcctcgccgctcggggaggcccagatccgccgcgcccgcaaggcgctcaccgacctcaccatcctcatgctcgacgacagggacggcgggggcgtcgtcggccagcgcaaccgatccttcggccgcgccaacgagaagccccctcgccaccaccgccggagcagcagcggcgggagctccggctccggctccggctcccacctcaggtccctctcctggagcgtgtcccgggcctggtctgccgcgcgccagctgcaggccatcgggggaggactccccgtgccccgcccgcacgacaacgctgccacgggaggcctcgcctccgccgtctacaccatgggcgccgtcctcttcatcgtcgccttcgcgctcgtcgccgcaatcccgtgccaggaccgcggcctccacgcgcatttctccgtcatcaggaacctcccctgctcggcccccatcacaacgctctacgagcgcatcctcgacgagtccaagaagaaggaccgcaagaactcgtgcggcctgctcaaggagatccaccagattgagctctgctccaggcacctcatggagatcactgacgccgccgacttcccgttgcgcgaggacaaggacgccgtcttgcgggaggccgcgcaggacctagtgcacctgtgcgaatccatcaaggaagggctcgacccgctcgagcgccaggtcagagagatgttccacaggattgtgcgcacccgcacagaaatccttgactgcttgagtaagccacatggcaccgggtgatgggatacaggagattgccagcccgtttgcttgctgtgatgccccttaaccaaacattcttgtgaaatgcagcagcggtgttcagatgaggtagccttttctctgcataagttagcaactactgcatcatacaaatgcgtcttcatagaggcttgtccttctgttttatataaattggtttgtttattatttttatttcattttctcatctgtgtagattgtgaatccatacttggcagtgcttcgtagtaatggtctaatactatttgttccattctttt

SEQ ID NO: 1567 - DNA, 1266 bp, Zea mays
ctaaacggggtgcctctcttccagtcttcctcaagttatccacttctctctcgatcgaagtcgaagcacaaaccctactgcccgcccacctcccacgtagtgtgtgtgctactcgatcttgtgtccactctcgcccacacacaaacttccacacgaaccaaagattccaatctgaaccaacgttattctgtcgttctccgcctaaccagcaagcagtcgatcgatcgatggagggaagcagaaacagcccggacaggcagtcgtcgggcggcagccctgaggagcgcggaagcggcggtagcggaggccgtggcgccggggagccggtgcggtcgcggtggacgccgaagccggagcagatactgatcctcgagtccatcttcaacagcggcatggtcaacccgcccaaggatgaaaccgtccgcatccgcaagctgctcgagcgcttcggcgccgtcggtgacgccaacgtcttctactggttccagaaccgccgctcccgctcgcgccgccgccagcgccagatgcaggccgccgcggcggcggcggcaacagcggcggcggcctcctctgcggccaacagctctcccggagctagcgcaaccgtcggccttccttctggtgctctacaatatcccttggtcatgagcgggagcgggaccgcctgccagtatgagcagcaggcgagctcctcgtcgtcgtcgggaagcactgggggctcgtctcttgggctgttcgcgctcggagccggggtgcccagcaccggcggtgggttcttccaggagtcgtgtggcgcttcgtcgccactggcgacagggctgatgatgggggacgtggaccgcagtggcggcagcgacgatctcttcgccatctcccggcagatggggttcgcggcggcgagcccagtcgcctcggcttcggtggcgcctccgagcacaacggcacaccaccagcagtattactcatgtcaatcacctacagggacgatcacggtgttcatcaatggagttccaatggaggttcccagtggtccaatagacatgcgagccattttcggccaggacgtgctgctcgtccattccaccggggccctcctcccagtcgacgactatggaattctaacgcagagcttgcagacgggcgaaagctatttcttggtagcaaggccaacttaaaactgcccgcacctagttagattgtagcgcagtctctctgccggccggtctctactggatattcagatgggacgcagttcatgatcaatca

SEQ ID NO: 1568 - DNA, 1348 bp, Zea mays
caaaaccaaactgtaagcgcaccgcccaaaaccctataaaccatctcccatctctctggctcgctcgtctagcagatgcacagcagcaggcgtcccctgtcttcgtccttccgaaatcccaatcctccctccgagtcccccatcccaaaactcggagctccgaagctggcactggcatcgcggcaatgccgaggccgcccacaatggtgatccaggacgactacatcgacatggacctgaccccggcagccacaccggagccctcgccagcctcgccccgcttcgagttccagagcgccggcgccggcgccgccggcgacaggcatagggaggcggcgttcgcgtcccccgcggacgagctgttctacaagggcaacctgctgccgctccacctgccgccgcggctgcagctcgtgcagaggctcctccaggaccaggagcagccgccgccgctgcgaggggcgaagcgggatgcggagtcggatgccacggcggcggcggcggcagagcgaggagacgccgacgctgccgctgccgccagcaaggtgtgcgccgccaagaagccgtcttgggccaagaagctcaaggtggttaagcggtgggcgtcgaaggagtacatccggtcgctcttcctggccaggccgccgttgccgagcgacatcgtcgccgccgccggtggcgccagcgccagcggccacggcatcggcagcgtcagcgcgagggggagcgtcctagagcaggaggaggtgtgccagtgccagcaccgcaagtccttctccggcatcatccgccgggtgcgcctcgtggcgaccaaggcgcctgggacctcgccgctgtgctcctcctcgtcctcgtcctcctcgtcgtccacgccgtcgtgccgcaacgcaaacgggttcttcttccggacgccggcgtcggcggcgggggcgacgccggcgctgaagcggagcagcagcgccgggtcgtccgaggagggcgccatccagggcgccatcgcgcactgcaagcgttcccagctgctgcagcccgggatggtggcctcggcggcggcgcggaggagcgtcagcgacgtcatgttctactcggtgaccaacacgcccagagcctcttccgtgaccgccggcgaggtggcgcaggagaggaggcaggagatgtgcaggggctgatgatggccgatgacatgccacccatggatcaaaagcgacattcttttgtttcttttcttttttgtttattttgcttgtgaagatgatgagcaatgtgatgtgggttgctctggtgatgatcaggacgcaatgtgctgtgactgtttccccggttcccttgattctttgcgatcttctcc

SEQ ID NO: 1569 - DNA, 1292 bp, Zea mays
ggggagttgcttctcgcggtaccggtcaccggtggaaccaactccccaccacccgcccccgcgcccgcgggctccaggccgagccgaagctaggcgcgatgtcgctgtcaccggcggacggcgcagcgtactggctgcggtggcaggtcctcgtctgcggcgcgctcatcgcgctgcccacggtggccgcggcggcgctgctgccgcggctgcggagctcagcgccgcccctgcgcgcggccgacctctgggttccttgctgggcgcgcctccacccgggctggctccttgcctaccgcgccgtcgcgctcgccgccgctgtagcgcttctcgcgcgcctcgtcgtcgcgcgcggcatcaccgtcttctacttctacacccagtggacgtttctattagtcaccatatattttgcgtttgccacagctatatcagcccatggatgtttggtttactcaaggaaaagtttgaggaaagccgacgaatcccgtggacttcttaatgctgatgtcgaaaatcgtgatgtttccaattctgtttctggagagaggaaaacagatgagacaaatatgatgatgagctattatgaacaaatagtgaatgagagaagagctgggttctggggccggtgcatggaaatcatataccagactagcgcaggtgcaacaatgttgactgatgtcacatattggggccttcttgtgccatttttctaccgtgacaagtttgggttagctttgttcactgatggcatgcactccttaaatgctgtttttctacttattgacacacttctcaacaacatgccctttccctggtaccgaatgtctttctttgttttctggagctgcgcctatgtaacattccagtgggtccttcatgcttgtggaggcgtatcctggtggccgtacccatttctggacctttcatcatctggagctcctctatggtacctcggcatggccatcgctcatgtcccctgcttcttcctgtattggttgatcgtcaaggcgaagcacacttatttccaacggatgttcccacatgcttatgttagggcaacatagacccatttatctaatcacaggttaggataaactcataaacatgtataaataaatatctgtatcatactacttctgcacctgccgggcttaagtgtacacctgtatagtctcgtgaatttacagcccctttgagatgggtatgagacctgagaacacgccaggaccggcatgttgatcaatgaatcgcagaggttcactgtcacctgggaacacggtcttgtgctc

SEQ ID NO: 1570 - DNA, 2374 bp, Zea mays
atggggcggtcataccttgaaggcgggcgggacgcgggggcggaccttgggtacccgctggtggccgtgtgcatcgacaaggacaagaacagccagaacgcgctcaagtgggccatcgactcgctggtacagaaggggcagaccatcgtccttgtccacgtcaacaccaagggcacctccggcggcgtggaggacgcggccgggttcaagcagccgacggacccgcacatgaaggacctcttcgtcccgttccgatgcttctgcacccgcaaagacatcaattgcaaggacgtggtgctggacgagcacgacgtggccaagtccatcatcgagttctcggcgcaggcggccgtggagaagctcgtcctcggcgccacgacgaggggcggcttcgtccggttcaaggcggacatcccgaccaccatctccaagggcgccccagacttctgctcggtgtacatcgtcaacaaggggaaggtctcgtcgcagcgcaactccacccgcgccgcgccgcgggtgtcgccgctccggtcgcagatccagtcgtcgcagattgccgcaacgctcaagcccgagccgccgcagtcgcaccggtggtcctcgtcgtcgagaggccacgagcacggcgagacgccgcgggtggacaacttccgctcgccgttcgcgcgcgggggccccgcgaacacgcgcaagtcgtacgccgacctcagccacatgtccatgccggactcggccgacatctcgtttgtcagcagcaccggccgccggagcgtcgaccaccacccggcgatcccgccgcggatgtccaacggctccgtggacagctacgaccacagcttcgagatgtcacgcacgcccagcaagtggggcggcgactccttcggcggcatggaccacaccaccttctcgcagagcagcagctcttccttctgctccctcggcatgcaggacgacgtggaggcggagatgaagaggcttcgcctggagctcaagcagacaatggacatgtacagcacggcctgcaaggaggcgctgacggcgaaacagaaggccatggagctgcagcggtggaagatggaggaggagcagaagacgcaagactcgcggataacggaggactccgcgatggcgatgatcgagcgggagaaggctcgggcgaaggcggccatggaggcggcggaggcgtcgcagcggatcgcggagatggaggtccagaagcggatcagcgcggagaagaagctgctcaaggaggccgaggagcgcaagaaccgcggcggcagcggcatgtcccacgaggcccggtaccggcgctacagcatcgaggagatcgagcaggcgacggacaacttcaacgacgcgcgcaaggtgggcgagggcgggtacggccccgtgtacaagggcttcctcgaccacacgcaggtggccatcaaggtgctccggcccgacgcggcgcagggccggtcgcagttccagcaggaggtggaggtgctgagctgcatccggcaccccaacatggtgctcctcctcggcgcgtgcccggagtacggctgcctcgtgtacgagtacatggccagcggcagcctggacgactgcctgttccggcgctccggcggcgccggcgggcccgtcatcccgtggcagcaccggttccgcatctgcgccgagatcgcgacggggctgctgttcctgcaccagaccaagcccgagccgctggtgcaccgggacctcaagccggggaacatcctgctggaccgcaactacgtgagcaagatcagcgacgtcgggctggcgcggctcgtgccgccgtccgtcgccgacaccgtgacgcagtaccggatgacgtccaccgcggggaccttctgctacatcgacccggagtaccagcagacgggcatgctcggcgtcaagtccgacgtctactccttcggcgtcatgctgctgcagatcatcacggcgaagccgcccatggggctgtcgcaccacgtcggacgcgccctggagcgcggcgagctgcaggacatgctggaccccgccgtgcccgactggcccctggaggaggcgcagtgcctcgccgagatggcgctccggtgctgcgagctgcgccgcaaggaccggccggacctcggcgccgtcgtgctcccggagctcaaccggctgcgcgcgctcggcgaggacaacatgcagtactgcggcgccatcatcaggggtggcggcggcggcggcggcatgcacagctcgtcgccgttccacagcaacatctcacggtcacacgccgagatgatgatcgattcccagtacccaagatcagtgttcagctcaagagcgggcgattcgcccatgccgccgagaaggtcgaacgcttgacgggcatgaa

SEQ ID NO: 1571 - DNA, 1598 bp, Zea mays
attaatttagtcagcatcacatcgcaatcacaagactcctatacccaaacccacgccccccgcccccctattattctatatatataatacacacactagtgtggagtagtacttcaattggcgttggccgaagaagaggagaagcgaagcaagcaggcttcgagaacaagactgcagggggagggggaggaccaagcgaaaggggaactagagcaagatgggcggcgcactgctgcttgcgctcctcctcgtctctgctgctgccgcccctcaggtacttggagttggcaatggagacaatcacatgagaatcatccaggaggacatcatcgagacagtcaacaaccatcccagtgctgggtggacagcctcacgtaatccttacttttcaaactataccattgcgcaatttaagcacatacttggagtgaaaccagcaccacagaatgcactaagcaatgttcctgtcaaaacttattcaagatcactggaacttccaaaagagtttgacgctagatctgcatggtcccgttgcagcacaattgggaacatacttgatcaaggtcactgtggctcttgttgggcttttggtgctgtggagtgcctccaggaccgtttttgcattcacctcaacatgagcattttactttcagtcaatgacctactggcatgctgcggttttatgtgcggcgatgggtgtgatggaggctatcctatagaggcatggcgctactttgttcaaaatggtgttgttacggatgagtgtgatccatacttcgacccggtcggttgcaagcatcctggatgcgaacctgcttatcctacaccaaagtgtgaaaagaaatgcaaggagcagaaccaagtttggcaggaaaagaagcatttcagcattgatgcgtacagaataaattcagatccacatgacataatggcagaggtctacaaaaatggtcctgtagaagttgctttcacagtttacgaggatttcgcacactacaaatctggagtgtacaagcacatcaccggtggcattatgggtggccatgccgtcaagttgattggatggggaaccagtgatgctggagaagattactggcttctggcaaatcagtggaatagaggctggggcgatgatggatacttcaagatcataaggggcaaaaatgaatgtggcatcgaggagggcgttgttgctggaatgccatccacaaagaatatggttccaaacttcggcggtgccgttggaagagctatagtttaatggttacgtttgcatggcctcaaatgctgttggaattagctaaagtaattttaaaatgcaattgttaaagggccacgatggtgtatgtattttgtacactagctcatttcaaaggtcgttatgttgctggtgccacatcactttggtcaagtggaataatattaataagaactagaatttcgattcgaaaaaaaaaaaaaaaaaaaaaaaaaaaaaaaaaaaaaaaaaaaaaaaaaaaaaaaaaaaaaaaaaaaaaaaaaaaaaaaaaaaaaaaaaaaaaaaaaaaaaaaaaaaaaaaaaatttttttttaaaaaaaaaaaaaaaaaaaaaaaaaaa

SEQ ID NO: 1572 - DNA, 1342 bp, Zea mays
cttttcgaaaatcccccacagaatcccatccccccgggccccggcaaccgctggcgctgcctccagccctccaacaccacgaccgccgggcggctcctcctcctctgccggagagctcggcgggcggcatgggaacagagtatcccaccttcgccgacgtatccggggcccgcgcgctcctcttcctcgccgactccacaccccggctggccccgccttcgcgtcctcccgctctcagcgaggagttctactgctactcgggctcctcgtcctcctactccggcgcgtcgacgaggtcatgcgtctccgactcggcacagcgcggtcgccccgtcgatcccctacgcgtgctctccgtcgtcgcctccctccgccgcatcgaccctaaggtgctagccgaggccacaagcgcgctgttccataccgacgcagagaagaagcggaagggcgtgtggatcgagatcgacagcggtggtgacgacggccagagcgagaggagcagcgccgtggccagcgaggggagcaccgtcacggccgccgcgtccgcgggctccacggccacgtcggggagatgccgcggggctccgcgggtgggttgtgctgctggtggtaaggggccgaggagggcggaggtgatcatgcagtggttttcgcagacgcaagctgggccagcgacggagaacgacatccgcgccgccgtcggcgacaactccggcacgagcaaagcgatacgatggctgttgaagcaggagggcggcttgcggcgtgcaggcaatggtggtgccctggatccgtatgtttatatggcgtttaccagcctaggtggaagtccctggctcgctgtgctgcagcctggtccgcattgctgtcgctgaaagctgcatgagaaaggatgagatggtgtgcgacaaggtacggctccgtggtggagttgcctccggcggggcacccggaacaccttcccggtgcgtgcaagccattgtcgtagcccagagcagcgacgcacctcggctcgttgaaggtaaaccagttcttcaccctgtctccgaacgcgtggaagcagaactcggcgtagtctgcaaacgcctcccttcgattgggcacggcgtgcagctgggtcagactgactgacacatggttgaatcaatttgaaatttggtttctagatgtcgtctagtttgcaattcttacacaatctttgggctaagccagcccaggtactgttcatggagtgccaatgggaggtcataatggtagagatttgcatacggcgcgatacctgacttgtatgtatacatatatataaaggttaaccaggaatctgaatgtttcctgaaagaat

SEQ ID NO: 1573 - DNA, 1348 bp, Zea mays; identical to SEQ ID NO: 1568

SEQ ID NO: 1574 - DNA, 1934 bp, Zea mays
gcacgagctacaacacgggtacagtacaggtgaggagggagaaaacaaacgaacgaaataaagagagtacgcatgggtttgcagatgatccatggcaggccctgcgccttgtgctgcccgtcctcctcctcctcgtcctccgccttgtggatgaggatgcaggcccagctgcccccaaagcagtctcaccatccattgaacggaggaagggcaatctcctctgaatccctcgcggcactggcatggcatttcctgctaaggcgtcgcagcagggacggtgccacagctctcgcatcttcatccggggtgcttcaaatcgcagaggacaaatcatctgcggccaacttgacaaagcacaaggtgagtgcagaaaggaagctcctcaacgacgctcttgacagaactggtgtgcgatatgagactgagagctggatggatgaagagacatcgtcctggatggacagggatctcacggacagcgatttgcggtaccgcttgctaatgcagaacctcgaggaactggagaccagcttggttggtaaagacctggagatggacattcttgagcagcttggggctttgggatcgttcaacgcttctgtggccaggggtgtctcggcgttacatggtcgaccagatggctctctgcttgatgatccggagccggagacgactcctctggatgcggggcaagaagacagccaaatggtcgtcgtccggagtggcaagagccaggagaggaagctgagaaggatgagagcatcatcagatgagaaaggatccaggacctcggtgaaggtgaacccaccacgaagacccaagaaatcccgtaaggcgagtagcagccagtttatatccgagtggaaaagtcacccaggccaaaggaggatcattgtgcgtgagcaatcagcactgctgtccaccatcaaggaatgtgcaggtcttgagaagataagggagaagatggtgaaggaagggcaggaggtgagctaccacaggtgggcggaggcagctggggtggacgaggcagagctggtgagcaggctgcaggcaggttactgctgccgggacaggctactggtgaccaccgagtggctggtcaggtgcatcgcgagaacatacaccggcatggggacggccttggacgatctgcttcaggctgggaagatgggcgttcttgacggcgccgagaagttcgacagccggaaggggtgcaggttctccacgtacgtcaagtactggatcaggaaagggatgctcgctctgctggctgaaaactcaggagtcaccctgctgcctgcaagaatggagagcatcatgcgcaaggtgaaggaggcgcggcgtgggatccggtacaggcagggcaggaacccgtcggactcagaggttgccgccgccgtgggcgtgtcggtagccaacgtgaggctggcgcgcaagtgctctcgcagggccgtctcgctctactcggaggtcgcgatcggacaggacgtcaagttcgcggaggtgatcccggacgagtcggcgtctccggacgaggcggcgctgttccggggccagctgagggagcggctgctgctggtgctgggcaggctgcccgcgcgggaaggacgcgtgctgcggctgcggcacgggctggaggacgggcggtgcaggtcgctggaggagatcggcggcatctacggcgtctccaaggagtggatcaggaagatcgagaagtcggccatggccaggctccgggacgacgacgccgtgcgccgcgacctccacgacttcgtctagtctgtctgcagtgcactagaacaatttgttagctggtagggaacgatgtcatgtacgtagtaccatactatctatcagcagactgaaattgaagctgctattcacacgaaatatacaatgatagagatttgtgattcaaaaaaaaaaaaaaaaaa

SEQ ID NO: 1575 - DNA, 2165 bp, Zea mays; identical to SEQ ID NO: 1116

SEQ ID NO: 1576 - DNA, 2418 bp, Sorghum bicolor
atggatcttgagttcgggagagccctgagatccccaaagagggactcatggaagaccaccttgctgctggcctaccagagcttgggggtggtctatggagacctcagcatatctccgctgtacgtgtactcgagcaccttcgccgaggacatccagcactcggacacgaacgaggagatctttggcgtgctctccttcgtcttctggacgctcaccttgatccctctcatcaagtacgtctccgttgtcctacgagctgacgacaatggcgagggaggaacgtttgccctgtactctctgatttgcaggcacgccaatgtgagccttctcccgaaccggcagattgctgatgaggagctttccacctataaactggaatgccctcctgaaataaccgacaagtcccggatcaaagtgtggcttgagaagcacaggaagctgcgcgttgctctactgatcatggttatgattggcacatgcatggttatcggggatggcgttctcacgccagcaatatctgtgttctcagcagtttcaggccttgagttttctctgtccaaggatcaccatgaatatgctgtcattccaataacctgtgtcatattagcattcctatttgccctccaacactatggtacacaccgggttggattcctctttgccccgatagttctagcctggctattctgcatgagtgctcttggcctttataatatcatccactggaatcctcacatctacaaagctctaaatccttctcatatgttcaagttcttaaaaaagactagaaagtatggttggatgtcacttggtggaatcttgctctgcatgacagggtcggaagcaatgtttgcagatcttggacacttctcatacagtgcaatccagcttgctttcacttgtctagtttaccccgcactgattctggcatatatgggccaagctgcttacttatcaagacatcatgacttttactctggttcaaaagttggattttacatcgcagttccagataagatcagatggccagtgctcatattggcaatcttggcttcggtagttggaagtcaagcgatcatcagcggaacattctcaatcatcaatcagagccagtccctgagctgctttcctcgagtaaaagttgtacacacatctgagaaaattcatggccaaatatacattcctgagatcaattggttgctcatgatcctctgcattgctgtgaccgttggatttagggacaccaaacacatgggaaatgcatctggtttggctgtgatcacagtgatgctggtgaccacgttcctgacgtccttggtcatcgttctgtgctggcacaggccaccgctgctggcattggctttcctcctgttctttggatccatcgaggcgctctacttctctgcgtccctgatcaagttcctggaaggcgcgtggctgcccatcctgctggcgctgatcctgatggcggtcatgctcatctggcactacaccaccatcaagaagtacgagttcgacctgcacaacaaggtgacactggagtggctcctcgccctcggggacaagctgggcatggtccgcgtccccggcatcggcctcgtgtacacggacctgacgtcgggcgtcccggccaacttctcccggttcgtgaccaacctcccggcgttccaccaggtgctggtgttcgtgtgcgtcaagtcggtgccggtgccgtacgtgttcccggcggagcggtacctcatcgggcgcgtcggcccgccgggccaccgctcgtaccggtgcatcgtgcgctacggctaccgcgacgtgcaccaggacgtggactcgttcgagacggagctcgtggagaccctggccacgttcataaagctggacgcctcgtaccggtgcagcgaggccagcgagcgggagcaggagcaggagctggagcccggcgagcgggagcggcggctgaccgtgatcgcgagccacccgctcaggcaccgcgccagctacgacctccaggacagcatgcagcactcggcagcatccacggtggagatgcgcgccacggccaccgccgcctccgctgacgacgacgacgacagacggagccccgggcgcgcggagatcagctcggcggcagcgggggcgaagcaggtgcggttcttcatcgacagccacgtggcgagcccggagttcgcggagaacaagcaggtggcggaggagctggaggcgctggcggcggcccgggagtgcggcacggcgttcatcctggggcactcgcacgtccagtgcaagcccgggtcgtcggtgctcaagcggctggcggtggacgtcgggtacaacttcctgcggcgcaactgccgcggcccggacgttgcgctgcgcgtgcccccggcgtcgctgctggaggtcggcatggtgtacgtgctttga

SEQ ID NO: 1577 - DNA, 2065 bp, Oryza sativa Japonica Group
accgcgcgcgcagcactcgcaggagaggatcgagttaaccaagtacgaagcgagtagttagcgggcgagtacgtggtgtttgtcatggaggacgaggcgacgtcggtggcggcgccgctgctgcggccgcgcggcggcgttgacgcggaggcggtgaagcagcagctgtggccggccggcgcgagggtggcgggggagtggtgggtggagtcgaagaagctgtggcgcgtcgtcgggccggccatcttccagcggatcgcgctgtacgggatcaacgtcgtctcgcaggcgttcatcggccacatgggcgacctcgagcttgccgccttctccatcgcctccaccgtcgtcgccggcttcaacttcggtttcctgctgggcatggcgagcgcgctggagacgctgtgcgggcaggcgttcggcgccaagaagtaccacatgctgggcgtgtacctgcagcggtcgtggctggtgctcctcatgttcgccgtcgcgctgacgccgacgtacgtgctcatggaggacctgctgctgctgatcgggcagccggccgacctcgccagcctcgccggcaagatgagcgtctggctgctgccgcagcacttcgccatggcgatgctgctcccgctcacgcggttcctgcagtcccagctcaagaactgggtcaccgcggtcaccgccggcgtcgcgctcgcgctccacctcgtgatcacctacctgctcgtcaacaccctccacctgggcctcctcggcgccgtcgccgccgccaacgtggcgtggtggatcgtcgtgctggggcagttggtctacgtcgtcggcggctggtgcccgctgtcgtggaagggattctccatggaagcgttcgccgacttctgggagttcatcaagctctcctcggcctccggggtgatgctttgcttggagaactggtactacagggtgttggtgttgcttacagggtacctgaataacgctgaaatcgctgtggatgcactctccatatgcttgacgatcaacggatgggagatgatgattccttttggcttcttggctgcaactggcgtgcgggtggcaaacgagctcggcgccggcagcggcaagggcgcgcggttcgccatcgtggtgtccgtcaccacctccgtggcgatcggcctcgtcttctggtgcctcatcattgcctacaacgacaagatcgctctcctcttctcgtcgagcaaggtggtgctcgacgccgtcagcgacctgtccgtgctgctcgccttcaccgtcctcctcaacagcgtgcagcccgtcctctcaggtgtggccattggctcagggtggcaagcactcgtagcctacgtcaacgtcggtagctactacttggtcggagttcccatcggtgccatattgggctggccattgcatttcggagttgggggaatttggtccgggttgattggtggcacagctgttcagacactgatattagcctatctcactatcagctgtgattgggatgaagaggcaaagaaagcaagtacaaggatggaagtatgggccagctcaaaatgaagcaaccaagtaccaacagtgtgttggtgaggtttcttggacacacaaagggggcacttcagtgggcagcagaagaaccgcaacttctgctcagtacaaagaggcaaaccatcagaatagatcaagaagacgagaacattttggaaggcatagctggtgtttcacatatagacatattcacgttaccttaggctgcagacagccagtttctgaagacgctcgtttgccaagagaacattggagaagagtgcagaggcttgcgtagggtgatagtatgtgtgagttgggattatatttattagccttgtaacctgaaatttgcactcggttgcaagttgcgacatgtaagcactgagtatactatttaatggatattgcaactgcaagcctgtgtgttgttcgcggattgtaagacgtccggacactacaaaatgggccagacggtagcccattaccatcgtgtatgatatatatgcaccgaaacgaatccactcctacggtcctacctcac

SEQ ID NO: 1578 - DNA, 687 bp, Zea mays
cgcaatcaatcggagatcgatctcgtttccctctcttccttctcctatacaataccctgctcacttcttgaattgctccgcgccgaaacgcgcgcatgcaccccatgaacatgacgagctgcgaattcgccgccgtccgcctccctggccacccggcgctccggccgagccgcagtcgaccatctccgacgcccccgccgccacccgccgtagccaataagaaaccagctgcctcctccgtgcgttgcacgtcgtcccgccgcgacgatgcggagtttggctgcaacggcggcggcgggcgtatagtggacgaggggatggtcgtcctgcgccgacggatccacgagatggaagccgcggagcgcggctgggatcctcccgaggagtgggcggcgtgggagaaggaatggtacgccacgtacgacgccgacgtctgccagcagctcgtcggcgtcctccaggcgttcctcgtcaactcccggccaggcgtcggcgtgggcctcgtcgccgtgctcatgctcgcagttccggcctccgcctttgtcctcgtctcactcctcctcgacgcttcacgggcggtcgtctccaatctgcaccaccactgatcaaaacgacaacgtgtgcatgacattctttcgttccttaacgcgccatatacatacctaatgattctgaatttctgatgcg

SEQ ID NO: 1579 - DNA, 2231 bp, Zea mays
cggagcgagctcattctcaactcgactcaagagctctgcctcctccatcttcccttctctggcctccggagccacgctgatcagagatggaggcgaatccgaagaacaccttcacgatcaaagtggaggacgggaagcccgggaaggacggccggctggcggtcggaccggtgttccggagcgttctggccaaggatgggttcccgcagcttgagcctgacatgaagacatcatgggacgtgttcagggtagcagcagtcaagtatgccgacaaccggatgctcggatggcgtccgttcaaagatggagtgccagggccctacttgtggaaatcatacaaggagatctacgacgaggtgctgcaagcaggctctgcgttgcagaagctgggagtgcagccaggttcccgggtggggatctacggagcgaactgtcctcagtggatagtggcaatgcaggcttgcaatggctatagtctagtctgtgtcccactgtacgatactttaggtgcgggagctgtcgactacatcatcgatcatgccgagatcgatgttgtcttcatacaggacaagaaaataaaagagatactgtccccaaactgcaagtctgccaagagactgaaagcattggtggcgttcacttcggcgacaactgaacagaacaaagaagcggatcaaattgggatcaaaatgtatgcctgggacgatttcttgaaagtggggaaggataatcctcgtcaaccttgccctccgcaagcaagtgacatctgcactgtcatgtacacgagtgggacaagcggacagcccaaaggtgtgatgctgacccatgaaagccacgccatgtatgtgaaaggggtggacctcttcatggaccagtttgatgataagatgacaacagatgatgtcttcctgtcgtttctcccgcttgctcacatccttgaccgcatgatcgaagagtatttctttcacaaaggggcctcaattggctactaccacggagatctgaatgccttgagggacgacattgtggagctgaagccgactctactggttggggtgccccgagtgtacgaaaggatttatgaaggtatcttgaaggccattgcggaactcagacctctaagaagggtcatctttaatgctttgtacaaccgcaaactggcaagcatgaaagcaggctactcgcacaaaaccgcttcacctttcgcggacatgctggcttttcgcaaggtcaaggcaaggcttggaggtcgtcttcgcttactgatttcaggaggggctccgttgagtaatgagatcgaggagttcatgagagtgaccacctgtgcatacttcatccaaggctatggtttaacagaaacactgggacctagcactgtctgctacatcgacgacatggccctggtcggaagcgctggtgtgcctgccacctacaccgaaattcggctggaagaagtgcccgagatgggttataatccactcggcgttccttcgcgtggtgaaatctgcatccggggaaaatccctcttcgctgggtactacaaaagtccagaactcacaaacgaagccatcgttgatgggtggtttcatacaggtgacattggagagatgaccccagacgggatcttgaaggtgattgacagaaaaaagaacatatttaagctgtcgcaaggggagtatgttgcggttgagtacctggagaaagtttatggcttccctccactcgttgaagatatctgggtatacggggacagtttcagatcaagtttagttgcagtagtcaatccacaccaagaaaacacaatgaagtgggcagagtccaatggctacaagggttcttttgatgaaatctgcaaacttgaaggactcaaagagtacatcctgaaagagctggcagccgttgcgcagaagaacaagctacgaggcttcgagtacatcaaaggcgtagtgttggatcctgtgccttttgacatcgagagggatttggtgactgcaacaatgaagaagaagagaaagaatatgctgaactattaccagtctgagattgacacaatatacaaaaagctggaggcgcagaagagtgctgccagagctaagtgaagagatgtgccctattcgaccatcagctgaaaacaagggaaacgacaccgttgtaaatttcacattaatattgcgaagtaacaactcagggctatgagtaaggaataaaatgtatattgtgcctttgtctat

SEQ ID NO: 1580 - DNA, 1828 bp, Zea mays
aattgggcacagaagaggagacagagagacggagaggggagacccggtcactgccaatgccaagaacaagaaaccagagaggacagtcgtcaatccaatccgagtctcctccaaaaacccatcaatctgcaggaacgagagcagcaggagagcatcctaggaaaaaagttaggaccaactgaccgagcaaaaaaggtagcatctctgtatcaccaaggcaccgccgattcacagaccaaatccctcccccctcctctggtccatcccacacgtagagcagccggtatttcttcgatccgtgcttgcgctttttttttctctttgtaaagatttcgtttccctcccttttaactgttgtcgagaagtttcgacaagagtggtgtgagtgttgaagagctcctcaacatgatggatccggccttgcttgacgacgtcatacgccggctgctggaggtgaagaatctcaagcctgggaagaacgcgcagttgtcggagtcggagatcaagcagctctgcgctgccgccaaggagatcttcctgcaccagcccaacctgctggagctcgaggcgcccatcaaaatctgcggtgatgtccatggccagtactctgatctcctgaggctattcgattatggtggctatccgcctcaggccaactaccttttcttgggtgattatgtggatcgtggaaagcaaagcttggaaacaatatgtcttcttttggcctacaaggtcaagtacccagagaacttctttcttctaaggggaaaccatgaatgcgcatcagtaaatcgcatctatggtttttatgacgagtgcaaacgcagattcagtgtaaagctgtggaaaacattcactgactgttttaactgcttgccagtgtcagcattgatagacgaaaagatcctctgtatgcatggtggtctatctccagagttgaacaagctcgaacaaatacttaatctgagtcgccccacagacgtgcctgatactggattgctctgtgaccttctttggtctgatccttctaatgaagcaacaggatgggccataaatgatcgaggtgtttcatatacatttggtcctgataaagtttctgaattccttgagaagcatgatttggacctcatctgccgagcccatcaggttgtcgaagatggatatgagtttttcgctagccgccaactcgtaacaatgttttcagcccctaactactgtggagaatttgataacgctggtgccatgatgagtgtagatgagacattgatgtgctccttccaaatactgaaacctgcgaggaaggtgttgggtggttcaactaataacaaaatcaggcttcaagtcatcgagaggatggtgacaatggcaagcctgatatcaggttggttggtgagcagcacgccagtggtcgacggggggttgttccatcataatcatattacagcggctgcaactgacaggcccaatgcatcttctcttccatgttggatcaacactcttgtaatgtattatttactgtgcggatctgagaggatgtgaatgatttcatttgcgtcctcaagttcaaaagattcaggaaggcatgcttgaaataaaaatagccagaaacatgcaaggtgctccacgacgcagcacggcatttccagtgttttctttttgctgtctagttctgaatatattttaccgccagaccagcacgtaagcttgcctggcaatggtttttatttgttgctatgccatctcaaaagtcaaaaccatggatttatatcaaaagtcaaaagactttgagaagtatttaaaaaaaaaaaaaataaaaaaaaaaaaaaaa

SEQ ID NO: 1581 - DNA, 796 bp, Sorghum bicolor
cttgggccgtgtgatccccccctcctccgccgccctcggatcagcgccaccgcgccggaagaccgggatcgtgacggccacatggacatggttacggcggccgccgcgttgccatggggaggcggttccccggcgtggatcgacgtgccggagcggagcaagagcgcgttcatggagctgaagcggaggaaggtccaccggtacgtgatcttcaagatcgacgacaggagggaggagatcgtcgtcgagaagaccggcgcgcccggggagagctacgacgacttcacggcgtcgttgccggccgatgactgccggtacgccgtctacgacctggatttcgtcagcgacgacaactgccggaaaagcaagattttcttcatctcctggtctccttcagattctcgcatccgtgccaagaccatatatgcagtgtcaaggaaccaattccgtcatgagcttgatggggtgcactttgagatccaagccaccgaccctgatgacatggatctggaagttctcaggggccgtgctaacagaacctgatttcactagcgagcaaccaaaatgcggctcgggggtcgctgatctgaggcatgatgtagaagtaggctgccgatcacacccgagcttgcaatgttttttctctttctttgtttttggaggtatataggacctccgtgatgtttgtctaactagactagataggttccctctaatatgatttggaacctgtccttgttttataattgtctatgtagtatctatatgttgctgcgatgaatggatattatggatt

SEQ ID NO: 1582 - DNA, 2050 bp, Hordeum vulgare subsp. vulgare
gaagccaacaaacgcggcaccctacgctcctctctcttccccagcacacgagagggagctctgtcacgagaggacggacttttgccgctccgccgcaaagcctatataggctcccttcaccgctctcgctccctcccccgccgcacccttccccatatacggagtcccgaggcaggcatcaccgtacgtggacgcgcgcgtgccggtaggtataacccaagagggctcgggaagtcttggagaagggcggcggggacgggcgtcgccatggccgggtcacaggtggtggactccggggagaagcgcctcaacgagctcggctacaagcaggagctccggagggagatgacgctgttcaagacgctggccatctctttctccacgatgacgctcttcacgggcatcacgccgctgtacggcagcagcctccagtacgccgggccggccagcctcgtgtggggctgggtcgtcgtctccttcttcacctggttcgtcggcatcgcgatggccgagatctgctcctccttccctacaactggttcgctctatttctgggctgctcatcttgctggcccggtctggggtccattggcatcctggtgctgcgcttggctggaggccataggcctcattgccggaattggcacacaggcctatgcaggatcccaggtactgcagagcataatcctgctatgcaccggcactaacaaaggcggcggctacctggcccctcgctggctgttcctcgtcatgtacctcgcgttaaccttcatctgggccgtgttcaacacatttgcgttggaagtcatcgccttcctcgacgtcatctccatgtggtggcaggtggtcggcggcacggtgatagtgatcatgctgccgctggtggcgaagacgacgcagccggcgtcgtacgtgttcacgcatttccagacgacgccggatgtgaccgggatcagcagcggcgcctacgcggtggtcctgtccctcctggtgagccagtactccctgtacgggtacgacgcggcggcgcacctgacggaggagaccaagggcgccgacaagaacgggcccatcgccatcctctccagcatcggcatcatctccgtcttcggctgggtctacatcctcgccctcaccttcagcatccaggacttcggctacctctacaacaccgccaacgagaccgccggcaccttcgtcccggcgcagatactgtacgacgcgttccacggccggtacggcagctcgacgggcgccatcgtgctgctcttcatcatctggggctccttcttcttcggcggcctctccatcaccaccagcgccgcccgggtggtgtacgcgctgtcgcgggaccgcggcatccccttctccggcgtgtggcgcaagatccacccgacgcgcaaggtgcccgggaacgcggtgtggctgtgcgccgccgtgtgcgcgctgctgggcctgcccatcctgtggatcaacgtggtgttcacggccatcacctccatcgccactatcggctgggtggggggctacgcggtgcccatcttcgcgcgcatggtgatgcgggaggaggacttccgccccggccccttctacctccggtgggccagcaggcccgtctgcctcgtggcgttcctgtggatctgctacacctgctccgtcttcctgctccccaccatgtaccccatcaggatggacaccttcaactacgcgcccatcgcgctcggcgtcgtactggggctcatcatgctctggtgggtcgtcgacgccaggaagtggttcaagggacccgtcaggaacatcgacgatctgcaaaacggcaatggcaatgacaatgccaatgtcaaggtctgagacccgccaagtagccatgctcgagcaagtcattctttttcgttgggttgtgcgtgtgtgtgatgtaagtttaggttgtggagtggagacttggtatccgtcataccgaagaaactaggaataggtggatgcctcacgaaatcaaacattttcaagaaggaacagagccatgaatcgtgaagctgtcgtttgttcttcc

SEQ ID NO: 1583 - DNA, 2514 bp, Sorghum bicolor
acgcttcggcacgagcacttagcgcgcaccccctcaaaccctaaccccctctgctcccagccgccaacgccatgggctccactgccgccgcctccgtgctcccggtgtccgccggcaccggccagaacctcgtcctcatcctcgactacggctcgcagtacacccacctcatcacccgccgcgtgcgccagctcggcgtcctctccctatgcgtgtccggcacggcgccgctcgcctccctcgagggcctgcgcccgcgcgccgtcatcctctccggcgggccccactccgtccacgccccgggcgcgcctgcctttcccgaggggttcctggacttcgcggccgccgcgggcgcgcacgtgctcggcgtctgctacgggatgcagctcctcgtgcagtccctcggcggcgccgtcgtgcccggggagcgccaggagtacggcaagatggacgttcaggtgacggcggcctcctccgcgctctacggggaagcggagacggggaagcgccagacggtgtggatgagccatggcgacgaggtggtcacgctgccgcaaggctttgaggtggttgcgcgcagtgtgcagggcgccgtcgccgccatcgagtaccgggagaagcgcttttatgggctccaataccacccagaggttacacattcagcccaaggaatggaaacactgcgccgctttctttttgatgtttgtgggatcaaagctgattggaagatgcaagatgtgctcgatgaagaaatcaagaccatccaaagcaccgttggccctgatgagcatgttatctgtgcattgtcaggtggagttgattcgacggtcgcggccactctcgttcacaaggcaataggagataggcttcactgtgtttttgttgacaatggtctattgaggtacaaggagagagaacgagtaatgacaacctttgaaagtgatttgcacctgccagttacatgtgttgatgcctcagagcaatttctcagcaagttaaagggtgtcgaggacccagagcagaaaaggaagattattggcagggaattcatagctgtctttgatgactttgctcacaagctggaacagaagatagggaaaaggcctgaatatttagttcaagggactttgtaccctgatgtaattgaatcatgcccacctcctgggagtggaaggacacattcccacaccatcaaaagccatcacaatgtcggcggccttccaaaagatatgaagttaaaactcattgaaccactcaagctcctattcaaggatgaggtgcggaaattggggagtattttgaatgtcccagattcatttttgaagcgacacccatttcctgggcctggtcttgctgtacgtgtcctaggtgatgttacacaaggcaatgctttggaggttcttcgtcaggtggatgagatatttgttcaagctattaaagatgcaggcctctatgataaaatatggcaagcctttgctgttttcctgccagtacaaacagttggggttcagggtgaccagcgaacccattccaatgctgttgttttaagggcaatcaccagtgaggatggcatgactgcagattggtactattttgaccatgcattcctggtagatgtggtaaacaagatctgcaacaatgtgcggggcataaaccgtgtttgccaggacatcacatctaagccgcctgcaacggtggagtgggagtaggaacagatggtcttatgctgcgaagtgggatgggacaaataactaacctcatgatgctatggtggaaggaagagcaatttatcttttgatgctgggctcttttgatgctgggatgaagtaactaccctcatgatgctatggtggaaggattttattatgatggttgtcctcgtaaagcatgtactactgctggcagctgacttggtttcgtttttcgtattattaccaaaagtgtctgtgtcgtgctctctcgctctttgctccggtctgggttagcccaaaagtttaaacctgacttatcgactcatgccactctcaacacgttgcatgactaactctgggtaggatgatggcgatggctgatgacagttactgaagctgtattgtcaaactctactgaagctgaatcttgcaatatatgtgaaaaaaggggtacccagagctgtgcattcgttgtgaaaacaataatggttaccagctgttgatctgtttgaagacatgaatttcatgtagtggtgaggagcttcaccaaatgatccaccaacatatggtatcatttatcaagtacacttgcacgagtatcacaaaaggcagttaagaagaaatgtgaccatttatcaataaattaggttcatcatgaattgttacgtaatgggacatgtaaagaagtatcttgtaagtctgtgagcccaactgatgtaccaatgttatgttatgtatacatataacattgagattttgtaagccatttttcagagttacagctaccaccgctgctgctattggaagtcagattaacatgcac

SEQ ID NO: 1584 - DNA, 1691 bp, Zea mays
ccttctctcatccgtcctcacacaaagcagaagggggaggagttttaggggaggagggggcggcaggaggagccattattatttcttcttccagcggcaattcctggccaccaccgggcgcgctatattactccgggttcgtggacaagcatgcagaggggcgtgtccttccctggcggaatggcgaaggagtgcccgcccgccgagctctggctcccggacgagttcctggacgacgacttcttctccgaggaggagaaggcggcggtcgcggccaagagcgagagcgacgaggaggaagggatggacggcctctcgcgccgcgcggccgggctcgtcgtcgggggtggaggggacggttcccctgcaaaggcgcaagtgttagccggctcgccgcagtcgattctgtgcggcctgcatgcttccggggaggacagccccaacggcgcggcgtcgcaggtcagctcgccgccgtcgtcgccgctggagaagaccccggccgaccactgggacctgctcaaagaggcggccggccaggtggcccgcatgcgcacaactagcggcatcctggtggcaacgaacgcgggcgcacatcaaagacaccccgtcccgccgctggcgcagaagctctctgcgccggccgaggctccgaaggccgcgggtgccaacctccctcaggctcagccgaagaactcgatggaacatcgccggattcagattgctcgttttaatgcgctgaagcagcagcagctcctgaagcacatgcgggagcgggagctcgccgtcgctacggcggcggcgtggggcacgagcgttgccgggtctcatcgtgccgccgggtaccgtgcgccggcgccccatgtcctgagctcgtccgcgtggcccaccctccagaagcagcagcagcagcagcagcaaagggcggcgtccccggcgggcatgcgcgccgtcttcgtcgcccctcctggcgccaagcgcgagtgcgccggcaccggcgtgttcatcccccgccaggccggcgcccccgcggagcccaagaaaaggccagcagcgtgcgcccctgtccttctcccggcgcgcgtcgtgcaggcgctcaacctcaacgtcgaggacctcggggcccgtcccatctacccgggcggcttcgtcctcgaccacgatgcactggtgagccggagcaacgctctgctggcgagccgcgcgtcccagcagctccatggcgcttcgtcgcgcgaggtgaatctcccccaggaatggacgtactgagggcgccgattcgccaccgcaccgctgcaagatgactcgacgatcactccagattaacggggggtgtcaaaaaaaattactattgctattggtagcaataggtattataggtgttgttaggctagaagtaggaggcagcggtggtgtggcattacgcgccagcgttaggtgttcttttgtgcgggggtgatatattggttattttgggactgacggacgggttggtgatgagcaagagcgaaatcaatcatccgtggctctcgcaggtccgttgggggcggaggggagaaacagcaataataataataagtgggtgcttttgggggaggggagagaggggggtttggaactaatcctatgtttagctggttctggtactacgatggtttcccaagggaaaatcatcaagcattcagcagtctgtg

SEQ ID NO: 1585 - DNA, 944 bp, Zea mays
atcgcaaaataccactcgagcacaattcaagcagcagcgaaggtagccacaacatccactctactactcgagagctaagaaatcgttcaacaggtgatccagaacaagatgtgtccgaccaagaaggagatgagtgccgagtcgtcgggctcggcgagcagctggacttcggcctcggcctcggcctcgacctcgacctcgccggagcaccagaccgtgtggacgtcgccgccgaagcggcccgcggggcggaccaagttccgcgagacgcggcaccccgtgttccgtggcgtccggcgccgcggcagcgccgggcggtgggtgtgcgaggtgcgcgtgcccgggaggcgcgggtgcaggctctggctcggcacgttcgacgccgccgaggccgccgcgcgcgcgcacgacgccgccatgctcgccatcgccggcgcgagcgcgtgcctcaacttcgccgactccgcgtggctgctcgcggtccccgcctcgtacgccagccttgccgaggtccgccgtgcggtcgccgaggccgtggaggactttcagcgccgcgaggcggccgccggggacgacgcgcgctcggccacatcgccgacgccgtccacctcgggcaccgacgacgatgctgccactgacggcgaggagtcgtcaccggccacggaggtctcgtcgttccagctcgacgtgttcgataacatgagctgggatctatactacgcgagcatggcgcagggaatgctgatggagctgccgtccgcagttccggcgttcggagacgacggctacaccaatgtcgccgatgtgccactgtggagctactagaattgaggacgttgataccttgaatttctcttctttttccagttggctccccatgccaaattttgggactgtagtggtaatgaaaacagagcaagtttggaaaaggaaaacaaaaaaaa

SEQ ID NO: 1586 - DNA, 1143 bp, Sorghum bicolor
atgggccagtcccccagcgctccccagggacgcgggcgcagccgcagccgaaacgggagcagctcgcggtggccgcacccggggctcgggctcgacctggggttcctactcgggcgcaagccgcgccctggggacgagaagccggacctggcgagctggatgcggtgcttcctgtcgcagcgtctgccgcagcccaccgcggcggcggaggagacggcggacgcggagggtaaggccgccgggagacgagaggaggaggaggttggtgcggaggacgctgaccacctcgtcgtcatggtgaacgggctgtacgggagttcggcggattggaagtttgcagcggagcagtttgtgaagagattgcccggaaaagtcttcgtgcatcgtagtcagagcaattattcaaagttaacatatgatggagttgacttgatgggtgaaaggctagctgaggaggttcgacaaattgttcagagaagaagaaacttgaggaaaatatcttttgttgctcattcgcttggcggtttagtaacaagatatgcaataggaaaactttacgaacctgccatggatgaaacatcttcttgtgacaatgataagccttctgatgaacaaaatgtacctggtggtggtaaaatagctggtttagaaccaatcaattttattacatctgctacaccacacttgggctcaaggtggaataaacaacttccctttctttttggtgtcccacttttggagagaactgctgcaggaacagcacattttatagttggaagaactggtaaacatctattccttacagacagagatgacagaaagcctcctcttctcctacgaatggttgaagattgtgacgacgggaaattcatgtctgcattgcgctctttcaagcatcgtgttgcctatgctaatctcaagttaacagcaaatgatgaaaagtatcctcatgttattaatgtcgacaaaggaaatctagaggatcatcagcaagagggatctgtagaagattcactggcagatagttatgaagagatgatgatccgtggccttacacaagtgacctgggaacgtgtggacgtatgctttcataagagctggctaagatacaatgctcataataacatacaggtaaggctgtaa

SEQ ID NO: 1587 - DNA, 859 bp, Zea mays
aagcacttcccgagaaaaggaagacagagaaggaaactgcagtgaagtcgccggcgccgccgcgacaggaggaaggagcagcagcggcaggggaggcccggcgatctcttctgctgcgtgcggcgagggagtaaaaggagccgcgacaggatgcactcctttgggcaccgcgccaacgcggtggcaacgttcgcggtcaccatactggccgcgatttgcttcgccgcctccttctccgacaacttcaacaccccaacacccactgcctccgttaagatcttgaatctaaactggttccagaaggaggccaacggcaacgacgaggttagcatgacgctgaacatttcggccgacctttcgtctcttttcacgtggaacacaaaacaggtgtttgtttttgtggcagcagagtatgagactccacagaatgctttgaatcaagtttccctttgggatggcattatacctgcaaaggagcatgccaagtttttgatccataccacaaacaagtacagatttattgaccagggaagcaatctaaagggcaaggaattcaacttgacaatgcactggcacattatgccaaagactggcaaaatgtttgcagataagatagtaatgacaggctatcgtctccctgagctatacagatagtcagatagatcatggacaggactaagtggcctgcaagaagtgttagtggcagtggcataattgatcctgagcgttttgttctaatctaagtggagcatgtaaccttataagcttgtacttaagctgaaccaggcaaaacaaagttgtaatttgagaggatatgtatggttcaattttgatttgcctaacaaaaaaaaaaaaaaaa

SEQ ID NO: 1588 - DNA, 1965 bp, Sorghum bicolor
atggcgctcgtgccgagcggcggcgcgggcgcttgcaaggacgacgccgccctcgggctgccgtggtccgagatgttccgctcagcctcgctccgccggcccaagcaggaagcagacgacgcgccacccaagaagccggcgctgaagaaggcgagggccaaggagatgaagtccaagccgtcgtcggtgggagctggggccggggctgggtccgacatggaggggctgtcgctggagcccgacgcgcgcctggcgctctacatcgccatggcgcacgcgggcctcgccaccgcgctgctcgtgctctacggcctctacctgctgctcgccgacttcctccgcccgctgcagtgggcgctgctctgctccgtcccgctccgcgagacgcagcgcgcgctcgtcgccttctgggagcccccgctccgcggcggccttagcgccgcactgctcgcgctgccgctcgccgcgctccggtcctcgaccgccaccctcgccgacgtgcgcgccgccctcctgcgccgcccgctcccagactcgccggcgttcccgcgcctcctccgctggctcgtatccttctttttcttcctcgtcctcttcgagcgcctcggcgccgccaccgcgctgctgctcctcgtgctcgcgctcgccttcttcgccgcgtcccccaagctgaagcgcgccgcctcctcacgcatctccagtcggcctccctcctcgcgcggcctcctcttaactggaggcatcctccgccaccttaagacactagtcgcccttggtctcatgcttggtatgatcgccgggttcataactggcagcatcttcttctcctacaagattgggctagagggcaaggacgccgtcatgtccctcaagtcccatgtcgagaagagcaactactctgagaagattggcctcaagaagtggatggacgacaatgacatccctggcttggtcgatcagtactctggcaagatctatgacaccgtgtgggagcaggtcgaccaattggctgtgcagtacaaccttacagatttcactagtggcttccgccatttcttgatcagccaatcagttgacccaaagagcaaggcgctcatcagttccagaccacacccatattcaatgaagttgcaatcaattgcgacatgtgtgaagaacagagagtgggtggagatttacagggagcttgattcgttctttagggagctgttgatcacaagagaggatttggtggtcaaggccaaggggctggctttgcagggaacagaaatcgcaaagaggctgctgtccagcagcacattggtgctgggcggtagtgccaatctgatgttatcaattgctctccgcattctctcaggtgcggctgaggtggtgaatttcctgtcacaactgatggtgttcttgtgggtgctgtattacctcattactgtggagggaggcggagctacagagcaaatcattgatcttttgccagtgtcaaaacaagtaaaggaccgctgtgttgaggtcatcgatcatgccattagtagtgtcttgttggccactgccaagattgccatatttcaaggggggctgacatggctgctgttcaagttcttcaaagtgcattttgtgtacacatcaactgtgcttggattcatcagcgcacttgtgccaatacttccattttggctgtcctcaatatttgccacaggggagcttctcatggaagggagatatgtgcttggactggtggtaactgtgatacacctcatgctcatggattatggcacaactaccattctggaggatatacctgggtacaatgggtatctcacaggcctaagcataattggtggcatgacactgtttcccaatgctctggagggtgcaatattaggtccccttataatgacggttgttatagcgttgaagaacttgtacacagagtttgtgcttgctgatggagaggaggccagcagctag

SEQ ID NO: 1589 - DNA, 1044 bp, Zea mays
cgcaccatcatcaccagttcagtccaccgttccgccggcccgcccgtacccgcctgcgcctacacatcgctgctccaggtccccatggcgaagactacgcaacccaccgcggggatgcgggatcccctgctccccacctccaccgccgcctcaccgccgccctacctcgacccgcatcccgccgactcctacacctacacggtcttccttgtccccgttcgcctccgccgcggcctctgtcgcggcggccgttgcatcgtcccctgcctcaccgttctcttcctcctcgcgctcgcgggcttcctcctctggcccgcggacccggacatctccctggcccgcctccacctagcgcacgtctccgtcgtggcacgccctgccgtcgccgtcactatatccgccacgctcaaggttcgcgttcgcaatcctgacctcttcgcgctcgactacacccgcctcgacgtcgctatcggctaccgcggtgcggggcttggccgggtaacatccggcggcggacgggtccgggcgcgcgctgtctcgtacgtcgacgccaacctgcagctcgacggcatacgcgtcgtcgaggacgcgatgtacctgctcgaggacctcgcgcaaggatccgtgcccttcgacaccatcgccgaggtcgagggccacctccacttccttttcctcagcatcccggtcaaggggagaatatcttgcgtaatgcatattaatccacacaaccaaaccatagtacatcaggactgctatcctgagtgaattgcttatggcgtggaaatgtggaagggtgtaagctatgttgccttgcgaatggatcgtttgatttgtttctaaccttcgcttccagtcgtggttgtaaaagtaagaaccaaccaaggggtgtttgaatgtaattgagctaatagttagttcgctaaaaaattactaagtagaattagctaactaacaaataacaatctaactattagataatttgatgaaaatagcttgtttggttggctttaatccgtaccgacttctatagtgttttgtctc

SEQ ID NO: 1590 - DNA, 1341 bp, Zea mays
atggtagcgctcacgacatgggcgctgctggggacacggatgccgcgctccacgctcttcttcccgctctacctcatgtccatcgggcaaggcggataccagccttcgctgcaagcgttcggcgccgaccagctgagcatcggggacgacgacgacgacggtgacggcgacaccgagcccggcgcgtcgtcgacgccggaggagaaggccaaggtgaagagcatgttcttccggtggtggtacttcggcatgtgcagcggcagcctgctggggaactccaccatgtcgtacgtccaggacaacctgggctggggcctcggtttcgccatcccctgcgccgtcatggctctgtccgtcgcggcctttttctgctgcacccctctgtacaagcggcaccggcaggtgcagcagccgaagggcaccggtattaggccgtccccgagtagcgtcttcaacttcaagtcggttctcggcgctagccgaaagatcagtctgccgccgtcgagatcatcagacgacaatggcgacgccatttctgagcttgagttgcaagagaagccactgaaaactgatgaagcatcagagtcctcccctgacgaggctgccgctgctcccggcgtggccaaggtcatactcggcctcctgccgatctgggcgatcctgctcgtcttcgcggtgatcttccagcagccgatgaccttcttcaccaagcaaggcatgctgatgaaccacacgatcggcgtcggcgtcggctccggctccctggtgatcccgccggcgatgctgcagagctcgatcaccgtctccatcatcctgctcgtgcccatgtacgatcggatgatcgtcccgctgaccaacgccgtcacggggggcagcgacggcatcacggtgctccagcggatcggcgtcggcatggtcctctccgtggtggccatggtcgccgcggcgctcgtcgagtcgcggcggctccgcgcggagcccgccctgctgagcatcttctggctcctgccgcagtacgtcctgctgggggtctccgacgtgttcaccgtggtggggatgcaggagttcttctactcgcaggtgccggcctccatgaggaccaccggcatcgggctctacctcagcgtcttcggcgtcggcggattcctcggcgcgtccctcatcaccctgctcgagatggccacggcgaggcccggcaacgcccgcggatggttctctgacgacccgcgggaggcgcggatagataacttctactggttcttggctctcctctgcttcgtcagctttgtcgtcttcacgcacttgtgcaagtactacaacgacagatctgcgtcagggagg

SEQ ID NO: 1591 - DNA, 666 bp, Zea mays
atgctggtgaagaagaacaacagcacggcgatggcggcgggcgtgctgccgctggcgtcgctgaaccacatcagcatcgtgtgccggtcggtggaggcgtcgctgcgcttctacgcggacgtgctcggcttcgtgcccatccgccgccccggctccttcgacttcgacggcgcctggctgttcaactacgggatcggcgtccacctactgcagtcggaggaccccggcagcctcccggagaataagggcgagatcaaccccaaggacaaccacatctccttccagtgcgagagcatggtggcggtggagcggcggctcaaggagatgggcatcccgtacgtgcagcgctgcgtggaggagggcggcatcaacgtggaccagatcttcttccacgacccggacgccttcatgatcgaggtctgcaactgcgacaacctccccgtcgtcccgctcgccgccgccgccgaccagcgcgcgcctgccgtcctcggcgcctgcaagcgggccgcggcggcggtcggcgtcaagcagcagcagcagcaaagcagcggcggcgccgtgccttcttccgccgccccggcggcggccgcgcagcgcgtgccgtcggcggcgcaggcgcccatcgtccgcgtcgccgaggagtcgacgtcgcacatttcgtgcgcg

SEQ ID NO: 1592 - DNA, 1395 bp, Zea mays
atgaccataaagggcggtgactcgtgggccctcctagtcctcgtcgttgccaccgcgtgcataggcaagatcggcggcacggtgatcgcgtcgctcatcgtccgggtgccgttccgcgaggccctcacgctcgggttcctgatgaataccaaggggctcgtggagctcatcgtcctcaacatcggcaaggaccggcatgtccttaacgacgagactttcgccatcctcgtgctcatggcgctcatcacaaccttcatcacgacgccggtggtcatgacaatctacaagccagcgcggcggggggcgccgtacaagaaccgcaccgtccagcgcgcgaacccgcacgacgagttccgcatgatggcctgcttccacagcacgcgaaacatccccaccatcatcaacctgatggagtcctcgcgcggcacgcggaagcgtggcatcaccgtctacgccatgcacctcgtggagctctccgagagatcgtccgccatctgcatggtccacaaagctcgtcgcaacggcatgccgttctggaacaggcggcgcaacggcgacggcggcggcgaccagctcgttgtcgccttcgagacgtaccagcagctgagccgcgtgtctatccgggccatgacggccatctccgacctggaaacgatccacgaggacgtcgtcaccagcgcgcaccagaagcgagccgcgctcatcgtgctccccttccacaagctccaccagatcgacggccacatggagtcgcttggcgaccagtaccagcacatcaaccagcgcgtgctccaccacgctccctgctccgtaggcatcctcgtcgaccgcggcctcggcggtgtcgctcaggtggccgccagcgacgtgtcatacaccatcgttgtcatcttcttcggtggccgcgacgaccgcgaggccctggcctacggcatgcgcatggtcgagcacccaggcatcgggctgcacgtcctacgcttcttgctacagtccggcggcgccgccagcgacgacgacgcgtcgttccttgaagagttccgaaccaaggtggccaacgggaacgactctgtccgctatgaagacaggacagtgggagggaaagaggaagtcgttgaggcgatcaaggcaacagggcggtgcaacctgttcctcgtcggacagggcacgccctgcatgccgctggttgactggagcacggacagcccggagctcgggccggtgggtacttacctggcgctgccggaattctcgacggtggcatctgtgctggtcatgaaacagtacgatccgatggcgaagcacgacgacttcgtcgaggaggtggccgacatagcggtggacgttgacacgccgggccccagtaaccggggaaccaatactagcttccatgccgga

SEQ ID NO: 1593 - DNA, 1227 bp, Zea mays
atgcgaggcacaatgccggccaccgactcctcctcctcgtcgtcgccggcggcggcgccgctgtcctccatcggccgctccatccgctcgctccgccgtgaccagaaccagatccactccttcccgccgccgccagacgccacagacgccttccagcgccgcgccgcccaactcctggccgacctcccggcagccgacgacgtcctctccctcgcctggacgcgccgcctcctcgaatccttcctcctctgcctcgaggagttccgcgccctgctcttcggctccggggactcgcccgccgcgcggcccccgctcgaccgcctcgtcgccgacttctccgaccgcgccgtcaaggcgctcgacctctgcaacgccgtccgcgacggcctcgacctcgtccgccagtggcgcaagcacctcgccatcgccgcagccgtcctcgcctcgtcctctgattcctcctcgccgctcggggaggcccagatccgccgcgcccgcaaggcgctcaccgacctcaccatcctcatgctcgacgacagggacggcgggggcgtcgtcggccagcgcaaccgatccttcggccgcgccaacgagaagccccctcgccaccaccgccggagcagcagcggcgggagctccggctccggctccggctcccacctcaggtccctctcctggagcgtgtcccgggcctggtctgccgcgcgccagctgcaggccatcgggggaggactccccgtgccccgcccgcacgacaacgctgccacgggaggcctcgcctccgccgtctacaccatgggcgccgtcctcttcatcgtcgccttcgcgctcgtcgccgcaatcccgtgccaggaccgcggcctccacgcgcatttctccgtcatcaggaacctcccctgctcggcccccatcacaacgctctacgagcgcatcctcgacgagtccaagaagaaggaccgcaagaactcgtgcggcctgctcaaggagatccaccagattgagctctgctccaggcacctcatggagatcactgacgccgccgacttcccgttgcgcgaggacaaggacgccgtcttgcgggaggccgcgcaggacctagtgcacctgtgcgaatccatcaaggaagggctcgacccgctcgagcgccaggtcagagagatgttccacaggattgtgcgcacccgcacagaaatccttgactgcttgagtaagccacatggcaccggg

SEQ ID NO: 1594 - DNA, 945 bp, Zea mays
atggagggaagcagaaacagcccggacaggcagtcgtcgggcggcagccctgaggagcgcggaagcggcggtagcggaggccgtggcgccggggagccggtgcggtcgcggtggacgccgaagccggagcagatactgatcctcgagtccatcttcaacagcggcatggtcaacccgcccaaggatgaaaccgtccgcatccgcaagctgctcgagcgcttcggcgccgtcggtgacgccaacgtcttctactggttccagaaccgccgctcccgctcgcgccgccgccagcgccagatgcaggccgccgcggcggcggcggcaacagcggcggcggcctcctctgcggccaacagctctcccggagctagcgcaaccgtcggccttccttctggtgctctacaatatcccttggtcatgagcgggagcgggaccgcctgccagtatgagcagcaggcgagctcctcgtcgtcgtcgggaagcactgggggctcgtctcttgggctgttcgcgctcggagccggggtgcccagcaccggcggtgggttcttccaggagtcgtgtggcgcttcgtcgccactggcgacagggctgatgatgggggacgtggaccgcagtggcggcagcgacgatctcttcgccatctcccggcagatggggttcgcggcggcgagcccagtcgcctcggcttcggtggcgcctccgagcacaacggcacaccaccagcagtattactcatgtcaatcacctacagggacgatcacggtgttcatcaatggagttccaatggaggttcccagtggtccaatagacatgcgagccattttcggccaggacgtgctgctcgtccattccaccggggccctcctcccagtcgacgactatggaattctaacgcagagcttgcagacgggcgaaagctatttcttggtagcaaggccaact

SEQ ID NO: 1595 - DNA, 981 bp, Zea mays
atgccgaggccgcccacaatggtgatccaggacgactacatcgacatggacctgaccccggcagccacaccggagccctcgccagcctcgccccgcttcgagttccagagcgccggcgccggcgccgccggcgacaggcatagggaggcggcgttcgcgtcccccgcggacgagctgttctacaagggcaacctgctgccgctccacctgccgccgcggctgcagctcgtgcagaggctcctccaggaccaggagcagccgccgccgctgcgaggggcgaagcgggatgcggagtcggatgccacggcggcggcggcggcagagcgaggagacgccgacgctgccgctgccgccagcaaggtgtgcgccgccaagaagccgtcttgggccaagaagctcaaggtggttaagcggtgggcgtcgaaggagtacatccggtcgctcttcctggccaggccgccgttgccgagcgacatcgtcgccgccgccggtggcgccagcgccagcggccacggcatcggcagcgtcagcgcgagggggagcgtcctagagcaggaggaggtgtgccagtgccagcaccgcaagtccttctccggcatcatccgccgggtgcgcctcgtggcgaccaaggcgcctgggacctcgccgctgtgctcctcctcgtcctcgtcctcctcgtcgtccacgccgtcgtgccgcaacgcaaacgggttcttcttccggacgccggcgtcggcggcgggggcgacgccggcgctgaagcggagcagcagcgccgggtcgtccgaggagggcgccatccagggcgccatcgcgcactgcaagcgttcccagctgctgcagcccgggatggtggcctcggcggcggcgcggaggagcgtcagcgacgtcatgttctactcggtgaccaacacgcccagagcctcttccgtgaccgccggcgaggtggcgcaggagaggaggcaggagatgtgcaggggc

SEQ ID NO: 1596 - DNA, 966 bp, Zea mays
atgtcgctgtcaccggcggacggcgcagcgtactggctgcggtggcaggtcctcgtctgcggcgcgctcatcgcgctgcccacggtggccgcggcggcgctgctgccgcggctgcggagctcagcgccgcccctgcgcgcggccgacctctgggttccttgctgggcgcgcctccacccgggctggctccttgcctaccgcgccgtcgcgctcgccgccgctgtagcgcttctcgcgcgcctcgtcgtcgcgcgcggcatcaccgtcttctacttctacacccagtggacgtttctattagtcaccatatattttgcgtttgccacagctatatcagcccatggatgtttggtttactcaaggaaaagtttgaggaaagccgacgaatcccgtggacttcttaatgctgatgtcgaaaatcgtgatgtttccaattctgtttctggagagaggaaaacagatgagacaaatatgatgatgagctattatgaacaaatagtgaatgagagaagagctgggttctggggccggtgcatggaaatcatataccagactagcgcaggtgcaacaatgttgactgatgtcacatattggggccttcttgtgccatttttctaccgtgacaagtttgggttagctttgttcactgatggcatgcactccttaaatgctgtttttctacttattgacacacttctcaacaacatgccctttccctggtaccgaatgtctttctttgttttctggagctgcgcctatgtaacattccagtgggtccttcatgcttgtggaggcgtatcctggtggccgtacccatttctggacctttcatcatctggagctcctctatggtacctcggcatggccatcgctcatgtcccctgcttcttcctgtattggttgatcgtcaaggcgaagcacacttatttccaacggatgttcccacatgcttatgttagggcaaca

SEQ ID NO: 1597 - DNA, 2361 bp, Zea mays
atggggcggtcataccttgaaggcgggcgggacgcgggggcggaccttgggtacccgctggtggccgtgtgcatcgacaaggacaagaacagccagaacgcgctcaagtgggccatcgactcgctggtacagaaggggcagaccatcgtccttgtccacgtcaacaccaagggcacctccggcggcgtggaggacgcggccgggttcaagcagccgacggacccgcacatgaaggacctcttcgtcccgttccgatgcttctgcacccgcaaagacatcaattgcaaggacgtggtgctggacgagcacgacgtggccaagtccatcatcgagttctcggcgcaggcggccgtggagaagctcgtcctcggcgccacgacgaggggcggcttcgtccggttcaaggcggacatcccgaccaccatctccaagggcgccccagacttctgctcggtgtacatcgtcaacaaggggaaggtctcgtcgcagcgcaactccacccgcgccgcgccgcgggtgtcgccgctccggtcgcagatccagtcgtcgcagattgccgcaacgctcaagcccgagccgccgcagtcgcaccggtggtcctcgtcgtcgagaggccacgagcacggcgagacgccgcgggtggacaacttccgctcgccgttcgcgcgcgggggccccgcgaacacgcgcaagtcgtacgccgacctcagccacatgtccatgccggactcggccgacatctcgtttgtcagcagcaccggccgccggagcgtcgaccaccacccggcgatcccgccgcggatgtccaacggctccgtggacagctacgaccacagcttcgagatgtcacgcacgcccagcaagtggggcggcgactccttcggcggcatggaccacaccaccttctcgcagagcagcagctcttccttctgctccctcggcatgcaggacgacgtggaggcggagatgaagaggcttcgcctggagctcaagcagacaatggacatgtacagcacggcctgcaaggaggcgctgacggcgaaacagaaggccatggagctgcagcggtggaagatggaggaggagcagaagacgcaagactcgcggataacggaggactccgcgatggcgatgatcgagcgggagaaggctcgggcgaaggcggccatggaggcggcggaggcgtcgcagcggatcgcggagatggaggtccagaagcggatcagcgcggagaagaagctgctcaaggaggccgaggagcgcaagaaccgcggcggcagcggcatgtcccacgaggcccggtaccggcgctacagcatcgaggagatcgagcaggcgacggacaacttcaacgacgcgcgcaaggtgggcgagggcgggtacggccccgtgtacaagggcttcctcgaccacacgcaggtggccatcaaggtgctccggcccgacgcggcgcagggccggtcgcagttccagcaggaggtggaggtgctgagctgcatccggcaccccaacatggtgctcctcctcggcgcgtgcccggagtacggctgcctcgtgtacgagtacatggccagcggcagcctggacgactgcctgttccggcgctccggcggcgccggcgggcccgtcatcccgtggcagcaccggttccgcatctgcgccgagatcgcgacggggctgctgttcctgcaccagaccaagcccgagccgctggtgcaccgggacctcaagccggggaacatcctgctggaccgcaactacgtgagcaagatcagcgacgtcgggctggcgcggctcgtgccgccgtccgtcgccgacaccgtgacgcagtaccggatgacgtccaccgcggggaccttctgctacatcgacccggagtaccagcagacgggcatgctcggcgtcaagtccgacgtctactccttcggcgtcatgctgctgcagatcatcacggcgaagccgcccatggggctgtcgcaccacgtcggacgcgccctggagcgcggcgagctgcaggacatgctggaccccgccgtgcccgactggcccctggaggaggcgcagtgcctcgccgagatggcgctccggtgctgcgagctgcgccgcaaggaccggccggacctcggcgccgtcgtgctcccggagctcaaccggctgcgcgcgctcggcgaggacaacatgcagtactgcggcgccatcatcaggggtggcggcggcggcggcggcatgcacagctcgtcgccgttccacagcaacatctcacggtcacacgccgagatgatgatcgattcccagtacccaagatcagtgttcagctcaagagcgggcgattcgcccatgccgccgagaaggtcgaacgct

SEQ ID NO: 1598 - DNA, 1041 bp, Zea mays
atgggcggcgcactgctgcttgcgctcctcctcgtctctgctgctgccgcccctcaggtacttggagttggcaatggagacaatcacatgagaatcatccaggaggacatcatcgagacagtcaacaaccatcccagtgctgggtggacagcctcacgtaatccttacttttcaaactataccattgcgcaatttaagcacatacttggagtgaaaccagcaccacagaatgcactaagcaatgttcctgtcaaaacttattcaagatcactggaacttccaaaagagtttgacgctagatctgcatggtcccgttgcagcacaattgggaacatacttgatcaaggtcactgtggctcttgttgggcttttggtgctgtggagtgcctccaggaccgtttttgcattcacctcaacatgagcattttactttcagtcaatgacctactggcatgctgcggttttatgtgcggcgatgggtgtgatggaggctatcctatagaggcatggcgctactttgttcaaaatggtgttgttacggatgagtgtgatccatacttcgacccggtcggttgcaagcatcctggatgcgaacctgcttatcctacaccaaagtgtgaaaagaaatgcaaggagcagaaccaagtttggcaggaaaagaagcatttcagcattgatgcgtacagaataaattcagatccacatgacataatggcagaggtctacaaaaatggtcctgtagaagttgctttcacagtttacgaggatttcgcacactacaaatctggagtgtacaagcacatcaccggtggcattatgggtggccatgccgtcaagttgattggatggggaaccagtgatgctggagaagattactggcttctggcaaatcagtggaatagaggctggggcgatgatggatacttcaagatcataaggggcaaaaatgaatgtggcatcgaggagggcgttgttgctggaatgccatccacaaagaatatggttccaaacttcggcggtgccgttggaagagctatagtt

SEQ ID NO: 1599 - DNA, 744 bp, Zea mays
atgggaacagagtatcccaccttcgccgacgtatccggggcccgcgcgctcctcttcctcgccgactccacaccccggctggccccgccttcgcgtcctcccgctctcagcgaggagttctactgctactcgggctcctcgtcctcctactccggcgcgtcgacgaggtcatgcgtctccgactcggcacagcgcggtcgccccgtcgatcccctacgcgtgctctccgtcgtcgcctccctccgccgcatcgaccctaaggtgctagccgaggccacaagcgcgctgttccataccgacgcagagaagaagcggaagggcgtgtggatcgagatcgacagcggtggtgacgacggccagagcgagaggagcagcgccgtggccagcgaggggagcaccgtcacggccgccgcgtccgcgggctccacggccacgtcggggagatgccgcggggctccgcgggtgggttgtgctgctggtggtaaggggccgaggagggcggaggtgatcatgcagtggttttcgcagacgcaagctgggccagcgacggagaacgacatccgcgccgccgtcggcgacaactccggcacgagcaaagcgatacgatggctgttgaagcaggagggcggcttgcggcgtgcaggcaatggtggtgccctggatccgtatgtttatatggcgtttaccagcctaggtggaagtccctggctcgctgtgctgcagcctggtccgcattgctgtcgc

SEQ ID NO: 1600 - DNA, 981 bp, Zea mays; identical to SEQ ID NO: 1595

SEQ ID NO: 1601 - DNA, 1704 bp, Zea mays
atgggtttgcagatgatccatggcaggccctgcgccttgtgctgcccgtcctcctcctcctcgtcctccgccttgtggatgaggatgcaggcccagctgcccccaaagcagtctcaccatccattgaacggaggaagggcaatctcctctgaatccctcgcggcactggcatggcatttcctgctaaggcgtcgcagcagggacggtgccacagctctcgcatcttcatccggggtgcttcaaatcgcagaggacaaatcatctgcggccaacttgacaaagcacaaggtgagtgcagaaaggaagctcctcaacgacgctcttgacagaactggtgtgcgatatgagactgagagctggatggatgaagagacatcgtcctggatggacagggatctcacggacagcgatttgcggtaccgcttgctaatgcagaacctcgaggaactggagaccagcttggttggtaaagacctggagatggacattcttgagcagcttggggctttgggatcgttcaacgcttctgtggccaggggtgtctcggcgttacatggtcgaccagatggctctctgcttgatgatccggagccggagacgactcctctggatgcggggcaagaagacagccaaatggtcgtcgtccggagtggcaagagccaggagaggaagctgagaaggatgagagcatcatcagatgagaaaggatccaggacctcggtgaaggtgaacccaccacgaagacccaagaaatcccgtaaggcgagtagcagccagtttatatccgagtggaaaagtcacccaggccaaaggaggatcattgtgcgtgagcaatcagcactgctgtccaccatcaaggaatgtgcaggtcttgagaagataagggagaagatggtgaaggaagggcaggaggtgagctaccacaggtgggcggaggcagctggggtggacgaggcagagctggtgagcaggctgcaggcaggttactgctgccgggacaggctactggtgaccaccgagtggctggtcaggtgcatcgcgagaacatacaccggcatggggacggccttggacgatctgcttcaggctgggaagatgggcgttcttgacggcgccgagaagttcgacagccggaaggggtgcaggttctccacgtacgtcaagtactggatcaggaaagggatgctcgctctgctggctgaaaactcaggagtcaccctgctgcctgcaagaatggagagcatcatgcgcaaggtgaaggaggcgcggcgtgggatccggtacaggcagggcaggaacccgtcggactcagaggttgccgccgccgtgggcgtgtcggtagccaacgtgaggctggcgcgcaagtgctctcgcagggccgtctcgctctactcggaggtcgcgatcggacaggacgtcaagttcgcggaggtgatcccggacgagtcggcgtctccggacgaggcggcgctgttccggggccagctgagggagcggctgctgctggtgctgggcaggctgcccgcgcgggaaggacgcgtgctgcggctgcggcacgggctggaggacgggcggtgcaggtcgctggaggagatcggcggcatctacggcgtctccaaggagtggatcaggaagatcgagaagtcggccatggccaggctccgggacgacgacgccgtgcgccgcgacctccacgacttcgtc

SEQ ID NO: 1602 - DNA, 1449 bp, Zea mays; identical to SEQ ID NO: 1187

SEQ ID NO: 1603 - DNA, 2415 bp, Sorghum bicolor
atggatcttgagttcgggagagccctgagatccccaaagagggactcatggaagaccaccttgctgctggcctaccagagcttgggggtggtctatggagacctcagcatatctccgctgtacgtgtactcgagcaccttcgccgaggacatccagcactcggacacgaacgaggagatctttggcgtgctctccttcgtcttctggacgctcaccttgatccctctcatcaagtacgtctccgttgtcctacgagctgacgacaatggcgagggaggaacgtttgccctgtactctctgatttgcaggcacgccaatgtgagccttctcccgaaccggcagattgctgatgaggagctttccacctataaactggaatgccctcctgaaataaccgacaagtcccggatcaaagtgtggcttgagaagcacaggaagctgcgcgttgctctactgatcatggttatgattggcacatgcatggttatcggggatggcgttctcacgccagcaatatctgtgttctcagcagtttcaggccttgagttttctctgtccaaggatcaccatgaatatgctgtcattccaataacctgtgtcatattagcattcctatttgccctccaacactatggtacacaccgggttggattcctctttgccccgatagttctagcctggctattctgcatgagtgctcttggcctttataatatcatccactggaatcctcacatctacaaagctctaaatccttctcatatgttcaagttcttaaaaaagactagaaagtatggttggatgtcacttggtggaatcttgctctgcatgacagggtcggaagcaatgtttgcagatcttggacacttctcatacagtgcaatccagcttgctttcacttgtctagtttaccccgcactgattctggcatatatgggccaagctgcttacttatcaagacatcatgacttttactctggttcaaaagttggattttacatcgcagttccagataagatcagatggccagtgctcatattggcaatcttggcttcggtagttggaagtcaagcgatcatcagcggaacattctcaatcatcaatcagagccagtccctgagctgctttcctcgagtaaaagttgtacacacatctgagaaaattcatggccaaatatacattcctgagatcaattggttgctcatgatcctctgcattgctgtgaccgttggatttagggacaccaaacacatgggaaatgcatctggtttggctgtgatcacagtgatgctggtgaccacgttcctgacgtccttggtcatcgttctgtgctggcacaggccaccgctgctggcattggctttcctcctgttctttggatccatcgaggcgctctacttctctgcgtccctgatcaagttcctggaaggcgcgtggctgcccatcctgctggcgctgatcctgatggcggtcatgctcatctggcactacaccaccatcaagaagtacgagttcgacctgcacaacaaggtgacactggagtggctcctcgccctcggggacaagctgggcatggtccgcgtccccggcatcggcctcgtgtacacggacctgacgtcgggcgtcccggccaacttctcccggttcgtgaccaacctcccggcgttccaccaggtgctggtgttcgtgtgcgtcaagtcggtgccggtgccgtacgtgttcccggcggagcggtacctcatcgggcgcgtcggcccgccgggccaccgctcgtaccggtgcatcgtgcgctacggctaccgcgacgtgcaccaggacgtggactcgttcgagacggagctcgtggagaccctggccacgttcataaagctggacgcctcgtaccggtgcagcgaggccagcgagcgggagcaggagcaggagctggagcccggcgagcgggagcggcggctgaccgtgatcgcgagccacccgctcaggcaccgcgccagctacgacctccaggacagcatgcagcactcggcagcatccacggtggagatgcgcgccacggccaccgccgcctccgctgacgacgacgacgacagacggagccccgggcgcgcggagatcagctcggcggcagcgggggcgaagcaggtgcggttcttcatcgacagccacgtggcgagcccggagttcgcggagaacaagcaggtggcggaggagctggaggcgctggcggcggcccgggagtgcggcacggcgttcatcctggggcactcgcacgtccagtgcaagcccgggtcgtcggtgctcaagcggctggcggtggacgtcgggtacaacttcctgcggcgcaactgccgcggcccggacgttgcgctgcgcgtgcccccggcgtcgctgctggaggtcggcatggtgtacgtgctt

SEQ ID NO: 1604 - DNA, 1467 bp, Oryza sativa Japonica Group
atggaggacgaggcgacgtcggtggcggcgccgctgctgcggccgcgcggcggcgttgacgcggaggcggtgaagcagcagctgtggccggccggcgcgagggtggcgggggagtggtgggtggagtcgaagaagctgtggcgcgtcgtcgggccggccatcttccagcggatcgcgctgtacgggatcaacgtcgtctcgcaggcgttcatcggccacatgggcgacctcgagcttgccgccttctccatcgcctccaccgtcgtcgccggcttcaacttcggtttcctgctgggcatggcgagcgcgctggagacgctgtgcgggcaggcgttcggcgccaagaagtaccacatgctgggcgtgtacctgcagcggtcgtggctggtgctcctcatgttcgccgtcgcgctgacgccgacgtacgtgctcatggaggacctgctgctgctgatcgggcagccggccgacctcgccagcctcgccggcaagatgagcgtctggctgctgccgcagcacttcgccatggcgatgctgctcccgctcacgcggttcctgcagtcccagctcaagaactgggtcaccgcggtcaccgccggcgtcgcgctcgcgctccacctcgtgatcacctacctgctcgtcaacaccctccacctgggcctcctcggcgccgtcgccgccgccaacgtggcgtggtggatcgtcgtgctggggcagttggtctacgtcgtcggcggctggtgcccgctgtcgtggaagggattctccatggaagcgttcgccgacttctgggagttcatcaagctctcctcggcctccggggtgatgctttgcttggagaactggtactacagggtgttggtgttgcttacagggtacctgaataacgctgaaatcgctgtggatgcactctccatatgcttgacgatcaacggatgggagatgatgattccttttggcttcttggctgcaactggcgtgcgggtggcaaacgagctcggcgccggcagcggcaagggcgcgcggttcgccatcgtggtgtccgtcaccacctccgtggcgatcggcctcgtcttctggtgcctcatcattgcctacaacgacaagatcgctctcctcttctcgtcgagcaaggtggtgctcgacgccgtcagcgacctgtccgtgctgctcgccttcaccgtcctcctcaacagcgtgcagcccgtcctctcaggtgtggccattggctcagggtggcaagcactcgtagcctacgtcaacgtcggtagctactacttggtcggagttcccatcggtgccatattgggctggccattgcatttcggagttgggggaatttggtccgggttgattggtggcacagctgttcagacactgatattagcctatctcactatcagctgtgattgggatgaagaggcaaagaaagcaagtacaaggatggaagtatgggccagctcaaaa

SEQ ID NO: 1605 - DNA, 507 bp, Zea mays
atgcaccccatgaacatgacgagctgcgaattcgccgccgtccgcctccctggccacccggcgctccggccgagccgcagtcgaccatctccgacgcccccgccgccacccgccgtagccaataagaaaccagctgcctcctccgtgcgttgcacgtcgtcccgccgcgacgatgcggagtttggctgcaacggcggcggcgggcgtatagtggacgaggggatggtcgtcctgcgccgacggatccacgagatggaagccgcggagcgcggctgggatcctcccgaggagtgggcggcgtgggagaaggaatggtacgccacgtacgacgccgacgtctgccagcagctcgtcggcgtcctccaggcgttcctcgtcaactcccggccaggcgtcggcgtgggcctcgtcgccgtgctcatgctcgcagttccggcctccgcctttgtcctcgtctcactcctcctcgacgcttcacgggcggtcgtctccaatctgcaccaccac

SEQ ID NO: 1606 - DNA, 2010 bp, Zea mays
atggaggcgaatccgaagaacaccttcacgatcaaagtggaggacgggaagcccgggaaggacggccggctggcggtcggaccggtgttccggagcgttctggccaaggatgggttcccgcagcttgagcctgacatgaagacatcatgggacgtgttcagggtagcagcagtcaagtatgccgacaaccggatgctcggatggcgtccgttcaaagatggagtgccagggccctacttgtggaaatcatacaaggagatctacgacgaggtgctgcaagcaggctctgcgttgcagaagctgggagtgcagccaggttcccgggtggggatctacggagcgaactgtcctcagtggatagtggcaatgcaggcttgcaatggctatagtctagtctgtgtcccactgtacgatactttaggtgcgggagctgtcgactacatcatcgatcatgccgagatcgatgttgtcttcatacaggacaagaaaataaaagagatactgtccccaaactgcaagtctgccaagagactgaaagcattggtggcgttcacttcggcgacaactgaacagaacaaagaagcggatcaaattgggatcaaaatgtatgcctgggacgatttcttgaaagtggggaaggataatcctcgtcaaccttgccctccgcaagcaagtgacatctgcactgtcatgtacacgagtgggacaagcggacagcccaaaggtgtgatgctgacccatgaaagccacgccatgtatgtgaaaggggtggacctcttcatggaccagtttgatgataagatgacaacagatgatgtcttcctgtcgtttctcccgcttgctcacatccttgaccgcatgatcgaagagtatttctttcacaaaggggcctcaattggctactaccacggagatctgaatgccttgagggacgacattgtggagctgaagccgactctactggttggggtgccccgagtgtacgaaaggatttatgaaggtatcttgaaggccattgcggaactcagacctctaagaagggtcatctttaatgctttgtacaaccgcaaactggcaagcatgaaagcaggctactcgcacaaaaccgcttcacctttcgcggacatgctggcttttcgcaaggtcaaggcaaggcttggaggtcgtcttcgcttactgatttcaggaggggctccgttgagtaatgagatcgaggagttcatgagagtgaccacctgtgcatacttcatccaaggctatggtttaacagaaacactgggacctagcactgtctgctacatcgacgacatggccctggtcggaagcgctggtgtgcctgccacctacaccgaaattcggctggaagaagtgcccgagatgggttataatccactcggcgttccttcgcgtggtgaaatctgcatccggggaaaatccctcttcgctgggtactacaaaagtccagaactcacaaacgaagccatcgttgatgggtggtttcatacaggtgacattggagagatgaccccagacgggatcttgaaggtgattgacagaaaaaagaacatatttaagctgtcgcaaggggagtatgttgcggttgagtacctggagaaagtttatggcttccctccactcgttgaagatatctgggtatacggggacagtttcagatcaagtttagttgcagtagtcaatccacaccaagaaaacacaatgaagtgggcagagtccaatggctacaagggttcttttgatgaaatctgcaaacttgaaggactcaaagagtacatcctgaaagagctggcagccgttgcgcagaagaacaagctacgaggcttcgagtacatcaaaggcgtagtgttggatcctgtgccttttgacatcgagagggatttggtgactgcaacaatgaagaagaagagaaagaatatgctgaactattaccagtctgagattgacacaatatacaaaaagctggaggcgcagaagagtgctgccagagctaag

SEQ ID NO: 1607 - DNA, 1131 bp, Zea mays
atgatggatccggccttgcttgacgacgtcatacgccggctgctggaggtgaagaatctcaagcctgggaagaacgcgcagttgtcggagtcggagatcaagcagctctgcgctgccgccaaggagatcttcctgcaccagcccaacctgctggagctcgaggcgcccatcaaaatctgcggtgatgtccatggccagtactctgatctcctgaggctattcgattatggtggctatccgcctcaggccaactaccttttcttgggtgattatgtggatcgtggaaagcaaagcttggaaacaatatgtcttcttttggcctacaaggtcaagtacccagagaacttctttcttctaaggggaaaccatgaatgcgcatcagtaaatcgcatctatggtttttatgacgagtgcaaacgcagattcagtgtaaagctgtggaaaacattcactgactgttttaactgcttgccagtgtcagcattgatagacgaaaagatcctctgtatgcatggtggtctatctccagagttgaacaagctcgaacaaatacttaatctgagtcgccccacagacgtgcctgatactggattgctctgtgaccttctttggtctgatccttctaatgaagcaacaggatgggccataaatgatcgaggtgtttcatatacatttggtcctgataaagtttctgaattccttgagaagcatgatttggacctcatctgccgagcccatcaggttgtcgaagatggatatgagtttttcgctagccgccaactcgtaacaatgttttcagcccctaactactgtggagaatttgataacgctggtgccatgatgagtgtagatgagacattgatgtgctccttccaaatactgaaacctgcgaggaaggtgttgggtggttcaactaataacaaaatcaggcttcaagtcatcgagaggatggtgacaatggcaagcctgatatcaggttggttggtgagcagcacgccagtggtcgacggggggttgttccatcataatcatattacagcggctgcaactgacaggcccaatgcatcttctcttccatgttggatcaacactcttgtaatgtattatttactgtgcggatctgagaggatg

SEQ ID NO: 1608 - DNA, 459 bp, Sorghum bicolor
atggacatggttacggcggccgccgcgttgccatggggaggcggttccccggcgtggatcgacgtgccggagcggagcaagagcgcgttcatggagctgaagcggaggaaggtccaccggtacgtgatcttcaagatcgacgacaggagggaggagatcgtcgtcgagaagaccggcgcgcccggggagagctacgacgacttcacggcgtcgttgccggccgatgactgccggtacgccgtctacgacctggatttcgtcagcgacgacaactgccggaaaagcaagattttcttcatctcctggtctccttcagattctcgcatccgtgccaagaccatatatgcagtgtcaaggaaccaattccgtcatgagcttgatggggtgcactttgagatccaagccaccgaccctgatgacatggatctggaagttctcaggggccgtgctaacagaacc

SEQ ID NO: 1609 - DNA, 1581 bp, Hordeum vulgare subsp. vulgare
atggccgggtcacaggtggtggactccggggagaagcgcctcaacgagctcggctacaagcaggagctccggagggagatgacgctgttcaagacgctggccatctctttctccacgatgacgctcttcacgggcatcacgccgctgtacggcagcagcctccagtacgccgggccggccagcctcgtgtggggctgggtcgtcgtctccttcttcacctggttcgtcggcatcgcgatggccgagatctgctcctccttccctacaactggttcgctctatttctgggctgctcatcttgctggcccggtctggggtccattggcatcctggtgctgcgcttggctggaggccataggcctcattgccggaattggcacacaggcctatgcaggatcccaggtactgcagagcataatcctgctatgcaccggcactaacaaaggcggcggctacctggcccctcgctggctgttcctcgtcatgtacctcgcgttaaccttcatctgggccgtgttcaacacatttgcgttggaagtcatcgccttcctcgacgtcatctccatgtggtggcaggtggtcggcggcacggtgatagtgatcatgctgccgctggtggcgaagacgacgcagccggcgtcgtacgtgttcacgcatttccagacgacgccggatgtgaccgggatcagcagcggcgcctacgcggtggtcctgtccctcctggtgagccagtactccctgtacgggtacgacgcggcggcgcacctgacggaggagaccaagggcgccgacaagaacgggcccatcgccatcctctccagcatcggcatcatctccgtcttcggctgggtctacatcctcgccctcaccttcagcatccaggacttcggctacctctacaacaccgccaacgagaccgccggcaccttcgtcccggcgcagatactgtacgacgcgttccacggccggtacggcagctcgacgggcgccatcgtgctgctcttcatcatctggggctccttcttcttcggcggcctctccatcaccaccagcgccgcccgggtggtgtacgcgctgtcgcgggaccgcggcatccccttctccggcgtgtggcgcaagatccacccgacgcgcaaggtgcccgggaacgcggtgtggctgtgcgccgccgtgtgcgcgctgctgggcctgcccatcctgtggatcaacgtggtgttcacggccatcacctccatcgccactatcggctgggtggggggctacgcggtgcccatcttcgcgcgcatggtgatgcgggaggaggacttccgccccggccccttctacctccggtgggccagcaggcccgtctgcctcgtggcgttcctgtggatctgctacacctgctccgtcttcctgctccccaccatgtaccccatcaggatggacaccttcaactacgcgcccatcgcgctcggcgtcgtactggggctcatcatgctctggtgggtcgtcgacgccaggaagtggttcaagggacccgtcaggaacatcgacgatctgcaaaacggcaatggcaatgacaatgccaatgtcaaggtc

SEQ ID NO: 1610 - DNA, 1635 bp, Sorghum bicolor
atgggctccactgccgccgcctccgtgctcccggtgtccgccggcaccggccagaacctcgtcctcatcctcgactacggctcgcagtacacccacctcatcacccgccgcgtgcgccagctcggcgtcctctccctatgcgtgtccggcacggcgccgctcgcctccctcgagggcctgcgcccgcgcgccgtcatcctctccggcgggccccactccgtccacgccccgggcgcgcctgcctttcccgaggggttcctggacttcgcggccgccgcgggcgcgcacgtgctcggcgtctgctacgggatgcagctcctcgtgcagtccctcggcggcgccgtcgtgcccggggagcgccaggagtacggcaagatggacgttcaggtgacggcggcctcctccgcgctctacggggaagcggagacggggaagcgccagacggtgtggatgagccatggcgacgaggtggtcacgctgccgcaaggctttgaggtggttgcgcgcagtgtgcagggcgccgtcgccgccatcgagtaccgggagaagcgcttttatgggctccaataccacccagaggttacacattcagcccaaggaatggaaacactgcgccgctttctttttgatgtttgtgggatcaaagctgattggaagatgcaagatgtgctcgatgaagaaatcaagaccatccaaagcaccgttggccctgatgagcatgttatctgtgcattgtcaggtggagttgattcgacggtcgcggccactctcgttcacaaggcaataggagataggcttcactgtgtttttgttgacaatggtctattgaggtacaaggagagagaacgagtaatgacaacctttgaaagtgatttgcacctgccagttacatgtgttgatgcctcagagcaatttctcagcaagttaaagggtgtcgaggacccagagcagaaaaggaagattattggcagggaattcatagctgtctttgatgactttgctcacaagctggaacagaagatagggaaaaggcctgaatatttagttcaagggactttgtaccctgatgtaattgaatcatgcccacctcctgggagtggaaggacacattcccacaccatcaaaagccatcacaatgtcggcggccttccaaaagatatgaagttaaaactcattgaaccactcaagctcctattcaaggatgaggtgcggaaattggggagtattttgaatgtcccagattcatttttgaagcgacacccatttcctgggcctggtcttgctgtacgtgtcctaggtgatgttacacaaggcaatgctttggaggttcttcgtcaggtggatgagatatttgttcaagctattaaagatgcaggcctctatgataaaatatggcaagcctttgctgttttcctgccagtacaaacagttggggttcagggtgaccagcgaacccattccaatgctgttgttttaagggcaatcaccagtgaggatggcatgactgcagattggtactattttgaccatgcattcctggtagatgtggtaaacaagatctgcaacaatgtgcggggcataaaccgtgtttgccaggacatcacatctaagccgcctgcaacggtggagtgggag

SEQ ID NO: 1611 - DNA, 1113 bp, Zea mays
atgcagaggggcgtgtccttccctggcggaatggcgaaggagtgcccgcccgccgagctctggctcccggacgagttcctggacgacgacttcttctccgaggaggagaaggcggcggtcgcggccaagagcgagagcgacgaggaggaagggatggacggcctctcgcgccgcgcggccgggctcgtcgtcgggggtggaggggacggttcccctgcaaaggcgcaagtgttagccggctcgccgcagtcgattctgtgcggcctgcatgcttccggggaggacagccccaacggcgcggcgtcgcaggtcagctcgccgccgtcgtcgccgctggagaagaccccggccgaccactgggacctgctcaaagaggcggccggccaggtggcccgcatgcgcacaactagcggcatcctggtggcaacgaacgcgggcgcacatcaaagacaccccgtcccgccgctggcgcagaagctctctgcgccggccgaggctccgaaggccgcgggtgccaacctccctcaggctcagccgaagaactcgatggaacatcgccggattcagattgctcgttttaatgcgctgaagcagcagcagctcctgaagcacatgcgggagcgggagctcgccgtcgctacggcggcggcgtggggcacgagcgttgccgggtctcatcgtgccgccgggtaccgtgcgccggcgccccatgtcctgagctcgtccgcgtggcccaccctccagaagcagcagcagcagcagcagcaaagggcggcgtccccggcgggcatgcgcgccgtcttcgtcgcccctcctggcgccaagcgcgagtgcgccggcaccggcgtgttcatcccccgccaggccggcgcccccgcggagcccaagaaaaggccagcagcgtgcgcccctgtccttctcccggcgcgcgtcgtgcaggcgctcaacctcaacgtcgaggacctcggggcccgtcccatctacccgggcggcttcgtcctcgaccacgatgcactggtgagccggagcaacgctctgctggcgagccgcgcgtcccagcagctccatggcgcttcgtcgcgcgaggtgaatctcccccaggaatggacgtac

SEQ ID NO: 1612 - DNA, 714 bp, Zea mays
atgtgtccgaccaagaaggagatgagtgccgagtcgtcgggctcggcgagcagctggacttcggcctcggcctcggcctcgacctcgacctcgccggagcaccagaccgtgtggacgtcgccgccgaagcggcccgcggggcggaccaagttccgcgagacgcggcaccccgtgttccgtggcgtccggcgccgcggcagcgccgggcggtgggtgtgcgaggtgcgcgtgcccgggaggcgcgggtgcaggctctggctcggcacgttcgacgccgccgaggccgccgcgcgcgcgcacgacgccgccatgctcgccatcgccggcgcgagcgcgtgcctcaacttcgccgactccgcgtggctgctcgcggtccccgcctcgtacgccagccttgccgaggtccgccgtgcggtcgccgaggccgtggaggactttcagcgccgcgaggcggccgccggggacgacgcgcgctcggccacatcgccgacgccgtccacctcgggcaccgacgacgatgctgccactgacggcgaggagtcgtcaccggccacggaggtctcgtcgttccagctcgacgtgttcgataacatgagctgggatctatactacgcgagcatggcgcagggaatgctgatggagctgccgtccgcagttccggcgttcggagacgacggctacaccaatgtcgccgatgtgccactgtggagctac

SEQ ID NO: 1613 - DNA, 1140 bp, Sorghum bicolor
atgggccagtcccccagcgctccccagggacgcgggcgcagccgcagccgaaacgggagcagctcgcggtggccgcacccggggctcgggctcgacctggggttcctactcgggcgcaagccgcgccctggggacgagaagccggacctggcgagctggatgcggtgcttcctgtcgcagcgtctgccgcagcccaccgcggcggcggaggagacggcggacgcggagggtaaggccgccgggagacgagaggaggaggaggttggtgcggaggacgctgaccacctcgtcgtcatggtgaacgggctgtacgggagttcggcggattggaagtttgcagcggagcagtttgtgaagagattgcccggaaaagtcttcgtgcatcgtagtcagagcaattattcaaagttaacatatgatggagttgacttgatgggtgaaaggctagctgaggaggttcgacaaattgttcagagaagaagaaacttgaggaaaatatcttttgttgctcattcgcttggcggtttagtaacaagatatgcaataggaaaactttacgaacctgccatggatgaaacatcttcttgtgacaatgataagccttctgatgaacaaaatgtacctggtggtggtaaaatagctggtttagaaccaatcaattttattacatctgctacaccacacttgggctcaaggtggaataaacaacttccctttctttttggtgtcccacttttggagagaactgctgcaggaacagcacattttatagttggaagaactggtaaacatctattccttacagacagagatgacagaaagcctcctcttctcctacgaatggttgaagattgtgacgacgggaaattcatgtctgcattgcgctctttcaagcatcgtgttgcctatgctaatctcaagttaacagcaaatgatgaaaagtatcctcatgttattaatgtcgacaaaggaaatctagaggatcatcagcaagagggatctgtagaagattcactggcagatagttatgaagagatgatgatccgtggccttacacaagtgacctgggaacgtgtggacgtatgctttcataagagctggctaagatacaatgctcataataacatacaggtaaggctg

SEQ ID NO: 1614 - DNA, 501 bp, Zea mays
atgcactcctttgggcaccgcgccaacgcggtggcaacgttcgcggtcaccatactggccgcgatttgcttcgccgcctccttctccgacaacttcaacaccccaacacccactgcctccgttaagatcttgaatctaaactggttccagaaggaggccaacggcaacgacgaggttagcatgacgctgaacatttcggccgacctttcgtctcttttcacgtggaacacaaaacaggtgtttgtttttgtggcagcagagtatgagactccacagaatgctttgaatcaagtttccctttgggatggcattatacctgcaaaggagcatgccaagtttttgatccataccacaaacaagtacagatttattgaccagggaagcaatctaaagggcaaggaattcaacttgacaatgcactggcacattatgccaaagactggcaaaatgtttgcagataagatagtaatgacaggctatcgtctccctgagctatacaga

SEQ ID NO: 1615 - DNA, 1962 bp, Sorghum bicolor
atggcgctcgtgccgagcggcggcgcgggcgcttgcaaggacgacgccgccctcgggctgccgtggtccgagatgttccgctcagcctcgctccgccggcccaagcaggaagcagacgacgcgccacccaagaagccggcgctgaagaaggcgagggccaaggagatgaagtccaagccgtcgtcggtgggagctggggccggggctgggtccgacatggaggggctgtcgctggagcccgacgcgcgcctggcgctctacatcgccatggcgcacgcgggcctcgccaccgcgctgctcgtgctctacggcctctacctgctgctcgccgacttcctccgcccgctgcagtgggcgctgctctgctccgtcccgctccgcgagacgcagcgcgcgctcgtcgccttctgggagcccccgctccgcggcggccttagcgccgcactgctcgcgctgccgctcgccgcgctccggtcctcgaccgccaccctcgccgacgtgcgcgccgccctcctgcgccgcccgctcccagactcgccggcgttcccgcgcctcctccgctggctcgtatccttctttttcttcctcgtcctcttcgagcgcctcggcgccgccaccgcgctgctgctcctcgtgctcgcgctcgccttcttcgccgcgtcccccaagctgaagcgcgccgcctcctcacgcatctccagtcggcctccctcctcgcgcggcctcctcttaactggaggcatcctccgccaccttaagacactagtcgcccttggtctcatgcttggtatgatcgccgggttcataactggcagcatcttcttctcctacaagattgggctagagggcaaggacgccgtcatgtccctcaagtcccatgtcgagaagagcaactactctgagaagattggcctcaagaagtggatggacgacaatgacatccctggcttggtcgatcagtactctggcaagatctatgacaccgtgtgggagcaggtcgaccaattggctgtgcagtacaaccttacagatttcactagtggcttccgccatttcttgatcagccaatcagttgacccaaagagcaaggcgctcatcagttccagaccacacccatattcaatgaagttgcaatcaattgcgacatgtgtgaagaacagagagtgggtggagatttacagggagcttgattcgttctttagggagctgttgatcacaagagaggatttggtggtcaaggccaaggggctggctttgcagggaacagaaatcgcaaagaggctgctgtccagcagcacattggtgctgggcggtagtgccaatctgatgttatcaattgctctccgcattctctcaggtgcggctgaggtggtgaatttcctgtcacaactgatggtgttcttgtgggtgctgtattacctcattactgtggagggaggcggagctacagagcaaatcattgatcttttgccagtgtcaaaacaagtaaaggaccgctgtgttgaggtcatcgatcatgccattagtagtgtcttgttggccactgccaagattgccatatttcaaggggggctgacatggctgctgttcaagttcttcaaagtgcattttgtgtacacatcaactgtgcttggattcatcagcgcacttgtgccaatacttccattttggctgtcctcaatatttgccacaggggagcttctcatggaagggagatatgtgcttggactggtggtaactgtgatacacctcatgctcatggattatggcacaactaccattctggaggatatacctgggtacaatgggtatctcacaggcctaagcataattggtggcatgacactgtttcccaatgctctggagggtgcaatattaggtccccttataatgacggttgttatagcgttgaagaacttgtacacagagtttgtgcttgctgatggagaggaggccagcagc

SEQ ID NO: 1616 - DNA, 681 bp, Zea mays
atggcgaagactacgcaacccaccgcggggatgcgggatcccctgctccccacctccaccgccgcctcaccgccgccctacctcgacccgcatcccgccgactcctacacctacacggtcttccttgtccccgttcgcctccgccgcggcctctgtcgcggcggccgttgcatcgtcccctgcctcaccgttctcttcctcctcgcgctcgcgggcttcctcctctggcccgcggacccggacatctccctggcccgcctccacctagcgcacgtctccgtcgtggcacgccctgccgtcgccgtcactatatccgccacgctcaaggttcgcgttcgcaatcctgacctcttcgcgctcgactacacccgcctcgacgtcgctatcggctaccgcggtgcggggcttggccgggtaacatccggcggcggacgggtccgggcgcgcgctgtctcgtacgtcgacgccaacctgcagctcgacggcatacgcgtcgtcgaggacgcgatgtacctgctcgaggacctcgcgcaaggatccgtgcccttcgacaccatcgccgaggtcgagggccacctccacttccttttcctcagcatcccggtcaaggggagaatatcttgcgtaatgcatattaatccacacaaccaaaccatagtacatcaggactgctatcctgag

SEQ ID NO: 1617 - DNA, 1341 bp, Artificial sequence
  Mir resistant mutated nucleotide sequence
atggtagcgctcacgacatgggcgctgctggggacacggatgccgcgctccacgctcttcttcccgctctacctcatgtccatcgggcaaggcggataccagccttcgctgcaagcgttcggcgccgaccagctgagcatcggggacgacgacgacgacggtgacggcgacaccgagcccggcgcgtcgtcgacgccggaggagaaggccaaggtgaagagcatgttcttccggtggtggtacttcggcatgtgcagcggcagcctgctggggaactccaccatgtcgtacgtccaggacaacctgggctggggcctcggtttcgccatcccctgcgccgtcatggctctgtccgtcgcggcctttttctgctgcacccctctgtacaagcggcaccggcaggtgcagcagccgaagggcaccggtattaggccgtccccgagtagcgtcttcaacttcaagtcggttctcggcgctagccgaaagatcagtctgccgccgtcgagatcatcagacgacaatggcgacgccatttctgagcttgagttgcaagagaagccactgaaaactgatgaagcatcagagtcctcccctgacgaggctgccgctgctcccggcgtggccaaggtcatactcggcctcctgccgatctgggcgatcctgctcgtcttcgcggtgatcttccagcagccgatgaccttcttcaccaagcaaggcatgctgatgaaccacacgatcggcgtcggcgtcggctccggctccctggtgatcccgccggcgatgctgcagagctcgatcacagtaagtataatattattagtaccaatgtacgatcggatgatcgtcccgctgaccaacgccgtcacggggggcagcgacggcatcacggtgctccagcggatcggcgtcggcatggtcctctccgtggtggccatggtcgccgcggcgctcgtcgagtcgcggcggctccgcgcggagcccgccctgctgagcatcttctggctcctgccgcagtacgtcctgctgggggtctccgacgtgttcaccgtggtggggatgcaggagttcttctactcgcaggtgccggcctccatgaggaccaccggcatcgggctctacctcagcgtcttcggcgtcggcggattcctcggcgcgtccctcatcaccctgctcgagatggccacggcgaggcccggcaacgcccgcggatggttctctgacgacccgcgggaggcgcggatagataacttctactggttcttggctctcctctgcttcgtcagctttgtcgtcttcacgcacttgtgcaagtactacaacgacagatctgcgtcagggagg

SEQ ID NO: 1618 - DNA, 1341 bp, Artificial sequence
  Mir resistant mutated nucleotide sequence
atggtagcgctcacgacatgggcgctgctggggacacggatgccgcgctccacgctcttcttcccgctctacctcatgtccatcgggcaaggcggataccagccttcgctgcaagcgttcggcgccgaccagctgagcatcggggacgacgacgacgacggtgacggcgacaccgagcccggcgcgtcgtcgacgccggaggagaaggccaaggtgaagagcatgttcttccggtggtggtacttcggcatgtgcagcggcagcctgctggggaactccaccatgtcgtacgtccaggacaacctgggctggggcctcggtttcgccatcccctgcgccgtcatggctctgtccgtcgcggcctttttctgctgcacccctctgtacaagcggcaccggcaggtgcagcagccgaagggcaccggtattaggccgtccccgagtagcgtcttcaacttcaagtcggttctcggcgctagccgaaagatcagtctgccgccgtcgagatcatcagacgacaatggcgacgccatttctgagcttgagttgcaagagaagccactgaaaactgatgaagcatcagagtcctcccctgacgaggctgccgctgctcccggcgtggccaaggtcatactcggcctcctgccgatctgggcgatcctgctcgtcttcgcggtgatcttccagcagccgatgaccttcttcaccaagcaaggcatgctgatgaaccacacgatcggcgtcggcgtcggctccggctccctggtgatcccgccggcgatgctgcagagctcgatcaccgtaagtataatattattagtaccaatgtacgatcggatgatcgtcccgctgaccaacgccgtcacggggggcagcgacggcatcacggtgctccagcggatcggcgtcggcatggtcctctccgtggtggccatggtcgccgcggcgctcgtcgagtcgcggcggctccgcgcggagcccgccctgctgagcatcttctggctcctgccgcagtacgtcctgctgggggtctccgacgtgttcaccgtggtggggatgcaggagttcttctactcgcaggtgccggcctccatgaggaccaccggcatcgggctctacctcagcgtcttcggcgtcggcggattcctcggcgcgtccctcatcaccctgctcgagatggccacggcgaggcccggcaacgcccgcggatggttctctgacgacccgcgggaggcgcggatagataacttctactggttcttggctctcctctgcttcgtcagctttgtcgtcttcacgcacttgtgcaagtactacaacgacagatctgcgtcagggagg

SEQ ID NO: 1619 - DNA, 1341 bp, Artificial sequence; identical to SEQ ID NO: 1618
  Mir resistant mutated nucleotide sequence

SEQ ID NO: 1620 - DNA, 1341 bp, Artificial sequence; identical to SEQ ID NO: 1618
  Mir resistant mutated nucleotide sequence

SEQ ID NO: 1621 - DNA, 666 bp, Artificial sequence
  Mir resistant mutated nucleotide sequence
atgctggtgaagaagaacaacagcacggcgatggcggcgggcgtgctgccgctggcgtcgctgaaccacatcagcatcgtgtgccggtcggtggaggcgtcgctgcgcttctacgcggacgtgctcggcttcgtgcccatccgccgccccggctccttcgacttcgacggcgcctggctgttcaactacgggatcggcgtccacctactgcagtcggaggaccccggcagcctcccggagaataagggcgagatcaaccccaaggacaaccacatctccttccagtgcgagagcatggtggcggtggagcggcggctcaaggagatgggcatcccgtacgtgcagcgctgcgtggaggagggcggcatcaacgtggaccagatcttcttccacgacccggacgccttcatgatcgaggtctgcaactgcgacaacctccccgtcgtcccgctcgccgccgccgccgaccagcgcgcgcctgccgtcctcggcgcctgcaagcgggccgcggcggcggtcggcgtcaagcagcagcagcagcaaagcagcggcggcgccgtgccttcttccgccgccccggcggcggccgcgcagcgcgtgccgtcggcggcgcaagcaccaatagtaagagtagcagaggagtcgacgtcgcacatttcgtgcgcg

SEQ ID NO: 1622 - DNA, 666 bp, Artificial sequence
  Mir resistant mutated nucleotide sequence
atgctggtgaagaagaacaacagcacggcgatggcggcgggcgtgctgccgctggcgtcgctgaaccacatcagcatcgtgtgccggtcggtggaggcgtcgctgcgcttctacgcggacgtgctcggcttcgtgcccatccgccgccccggctccttcgacttcgacggcgcctggctgttcaactacgggatcggcgtccacctactgcagtcggaggaccccggcagcctcccggagaataagggcgagatcaaccccaaggacaaccacatctccttccagtgcgagagcatggtggcggtggagcggcggctcaaggagatgggcatcccgtacgtgcagcgctgcgtggaggagggcggcatcaacgtggaccagatcttcttccacgacccggacgccttcatgatcgaggtctgcaactgcgacaacctccccgtcgtcccgctcgccgccgccgccgaccagcgcgcgcctgccgtcctcggcgcctgcaagcgggccgcggcggcggtcggcgtcaagcagcagcagcagcaaagcagcggcggcgccgtgccttcttccgccgccccggcggcggccgcgcagcgcgtgccgtcggcggcgcaagcgccaatagtaagagtagcggaggagtcgacgtcgcacatttcgtgcgcg

SEQ ID NO: 1623 - DNA, 666 bp, Artificial sequence
  Mir resistant mutated nucleotide sequence
atgctggtgaagaagaacaacagcacggcgatggcggcgggcgtgctgccgctggcgtcgctgaaccacatcagcatcgtgtgccggtcggtggaggcgtcgctgcgcttctacgcggacgtgctcggcttcgtgcccatccgccgccccggctccttcgacttcgacggcgcctggctgttcaactacgggatcggcgtccacctactgcagtcggaggaccccggcagcctcccggagaataagggcgagatcaaccccaaggacaaccacatctccttccagtgcgagagcatggtggcggtggagcggcggctcaaggagatgggcatcccgtacgtgcagcgctgcgtggaggagggcggcatcaacgtggaccagatcttcttccacgacccggacgccttcatgatcgaggtctgcaactgcgacaacctccccgtcgtcccgctcgccgccgccgccgaccagcgcgcgcctgccgtcctcggcgcctgcaagcgggccgcggcggcggtcggcgtcaagcagcagcagcagcaaagcagcggcggcgccgtgccttcttccgccgccccggcggcggccgcgcagcgcgtgccgtcggcggcgcaagcacccatagtaagagtagcagaggagtcgacgtcgcacatttcgtgcgcg

SEQ ID NO: 1624 - DNA, 666 bp, Artificial sequence
  Mir resistant mutated nucleotide sequence
atgctggtgaagaagaacaacagcacggcgatggcggcgggcgtgctgccgctggcgtcgctgaaccacatcagcatcgtgtgccggtcggtggaggcgtcgctgcgcttctacgcggacgtgctcggcttcgtgcccatccgccgccccggctccttcgacttcgacggcgcctggctgttcaactacgggatcggcgtccacctactgcagtcggaggaccccggcagcctcccggagaataagggcgagatcaaccccaaggacaaccacatctccttccagtgcgagagcatggtggcggtggagcggcggctcaaggagatgggcatcccgtacgtgcagcgctgcgtggaggagggcggcatcaacgtggaccagatcttcttccacgacccggacgccttcatgatcgaggtctgcaactgcgacaacctccccgtcgtcccgctcgccgccgccgccgaccagcgcgcgcctgccgtcctcggcgcctgcaagcgggccgcggcggcggtcggcgtcaagcagcagcagcagcaaagcagcggcggcgccgtgccttcttccgccgccccggcggcggccgcgcagcgcgtgccgtcggcggcgcaagcaccaatcgtaagagtagcagaggagtcgacgtcgcacatttcgtgcgcg

SEQ ID NO: 1625 - DNA, 1395 bp, Artificial sequence
  Mir resistant mutated nucleotide sequence
atgaccataaagggcggtgactcgtgggcattattggtattagtagtagccaccgcgtgcataggcaagatcggcggcacggtgatcgcgtcgctcatcgtccgggtgccgttccgcgaggccctcacgctcgggttcctgatgaataccaaggggctcgtggagctcatcgtcctcaacatcggcaaggaccggcatgtccttaacgacgagactttcgccatcctcgtgctcatggcgctcatcacaaccttcatcacgacgccggtggtcatgacaatctacaagccagcgcggcggggggcgccgtacaagaaccgcaccgtccagcgcgcgaacccgcacgacgagttccgcatgatggcctgcttccacagcacgcgaaacatccccaccatcatcaacctgatggagtcctcgcgcggcacgcggaagcgtggcatcaccgtctacgccatgcacctcgtggagctctccgagagatcgtccgccatctgcatggtccacaaagctcgtcgcaacggcatgccgttctggaacaggcggcgcaacggcgacggcggcggcgaccagctcgttgtcgccttcgagacgtaccagcagctgagccgcgtgtctatccgggccatgacggccatctccgacctggaaacgatccacgaggacgtcgtcaccagcgcgcaccagaagcgagccgcgctcatcgtgctccccttccacaagctccaccagatcgacggccacatggagtcgcttggcgaccagtaccagcacatcaaccagcgcgtgctccaccacgctccctgctccgtaggcatcctcgtcgaccgcggcctcggcggtgtcgctcaggtggccgccagcgacgtgtcatacaccatcgttgtcatcttcttcggtggccgcgacgaccgcgaggccctggcctacggcatgcgcatggtcgagcacccaggcatcgggctgcacgtcctacgcttcttgctacagtccggcggcgccgccagcgacgacgacgcgtcgttccttgaagagttccgaaccaaggtggccaacgggaacgactctgtccgctatgaagacaggacagtgggagggaaagaggaagtcgttgaggcgatcaaggcaacagggcggtgcaacctgttcctcgtcggacagggcacgccctgcatgccgctggttgactggagcacggacagcccggagctcgggccggtgggtacttacctggcgctgccggaattctcgacggtggcatctgtgctggtcatgaaacagtacgatccgatggcgaagcacgacgacttcgtcgaggaggtggccgacatagcggtggacgttgacacgccgggccccagtaaccggggaaccaatactagcttccatgccgga

SEQ ID NO: 1626 - DNA, 1395 bp, Artificial sequence
  Mir resistant mutated nucleotide sequence
atgaccataaagggcggtgactcgtgggccttattggtattagtagtagccaccgcgtgcataggcaagatcggcggcacggtgatcgcgtcgctcatcgtccgggtgccgttccgcgaggccctcacgctcgggttcctgatgaataccaaggggctcgtggagctcatcgtcctcaacatcggcaaggaccggcatgtccttaacgacgagactttcgccatcctcgtgctcatggcgctcatcacaaccttcatcacgacgccggtggtcatgacaatctacaagccagcgcggcggggggcgccgtacaagaaccgcaccgtccagcgcgcgaacccgcacgacgagttccgcatgatggcctgcttccacagcacgcgaaacatccccaccatcatcaacctgatggagtcctcgcgcggcacgcggaagcgtggcatcaccgtctacgccatgcacctcgtggagctctccgagagatcgtccgccatctgcatggtccacaaagctcgtcgcaacggcatgccgttctggaacaggcggcgcaacggcgacggcggcggcgaccagctcgttgtcgccttcgagacgtaccagcagctgagccgcgtgtctatccgggccatgacggccatctccgacctggaaacgatccacgaggacgtcgtcaccagcgcgcaccagaagcgagccgcgctcatcgtgctccccttccacaagctccaccagatcgacggccacatggagtcgcttggcgaccagtaccagcacatcaaccagcgcgtgctccaccacgctccctgctccgtaggcatcctcgtcgaccgcggcctcggcggtgtcgctcaggtggccgccagcgacgtgtcatacaccatcgttgtcatcttcttcggtggccgcgacgaccgcgaggccctggcctacggcatgcgcatggtcgagcacccaggcatcgggctgcacgtcctacgcttcttgctacagtccggcggcgccgccagcgacgacgacgcgtcgttccttgaagagttccgaaccaaggtggccaacgggaacgactctgtccgctatgaagacaggacagtgggagggaaagaggaagtcgttgaggcgatcaaggcaacagggcggtgcaacctgttcctcgtcggacagggcacgccctgcatgccgctggttgactggagcacggacagcccggagctcgggccggtgggtacttacctggcgctgccggaattctcgacggtggcatctgtgctggtcatgaaacagtacgatccgatggcgaagcacgacgacttcgtcgaggaggtggccgacatagcggtggacgttgacacgccgggccccagtaaccggggaaccaatactagcttccatgccgga

SEQ ID NO: 1627 - DNA, 1395 bp, Artificial sequence; identical to SEQ ID NO: 1626
  Mir resistant mutated nucleotide sequence

SEQ ID NO: 1628 - DNA, 1395 bp, Artificial sequence; identical to SEQ ID NO: 1626
  Mir resistant mutated nucleotide sequence

SEQ ID NO: 1629 - DNA, 1395 bp, Artificial sequence
  Mir resistant mutated nucleotide sequence
atgaccataaagggcggtgactcgtgggcactcttggtactcgtagtagccaccgcgtgcataggcaagatcggcggcacggtgatcgcgtcgctcatcgtccgggtgccgttccgcgaggccctcacgctcgggttcctgatgaataccaaggggctcgtggagctcatcgtcctcaacatcggcaaggaccggcatgtccttaacgacgagactttcgccatcctcgtgctcatggcgctcatcacaaccttcatcacgacgccggtggtcatgacaatctacaagccagcgcggcggggggcgccgtacaagaaccgcaccgtccagcgcgcgaacccgcacgacgagttccgcatgatggcctgcttccacagcacgcgaaacatccccaccatcatcaacctgatggagtcctcgcgcggcacgcggaagcgtggcatcaccgtctacgccatgcacctcgtggagctctccgagagatcgtccgccatctgcatggtccacaaagctcgtcgcaacggcatgccgttctggaacaggcggcgcaacggcgacggcggcggcgaccagctcgttgtcgccttcgagacgtaccagcagctgagccgcgtgtctatccgggccatgacggccatctccgacctggaaacgatccacgaggacgtcgtcaccagcgcgcaccagaagcgagccgcgctcatcgtgctccccttccacaagctccaccagatcgacggccacatggagtcgcttggcgaccagtaccagcacatcaaccagcgcgtgctccaccacgctccctgctccgtaggcatcctcgtcgaccgcggcctcggcggtgtcgctcaggtggccgccagcgacgtgtcatacaccatcgttgtcatcttcttcggtggccgcgacgaccgcgaggccctggcctacggcatgcgcatggtcgagcacccaggcatcgggctgcacgtcctacgcttcttgctacagtccggcggcgccgccagcgacgacgacgcgtcgttccttgaagagttccgaaccaaggtggccaacgggaacgactctgtccgctatgaagacaggacagtgggagggaaagaggaagtcgttgaggcgatcaaggcaacagggcggtgcaacctgttcctcgtcggacagggcacgccctgcatgccgctggttgactggagcacggacagcccggagctcgggccggtgggtacttacctggcgctgccggaattctcgacggtggcatctgtgctggtcatgaaacagtacgatccgatggcgaagcacgacgacttcgtcgaggaggtggccgacatagcggtggacgttgacacgccgggccccagtaaccggggaaccaatactagcttccatgccgga

SEQ ID NO: 1630 - DNA, 1227 bp, Artificial sequence
  Mir resistant mutated nucleotide sequence
atgcgaggcacaatgccggccaccgatagtagtagtagcagcagcccagcggcggcgccgctgtcctccatcggccgctccatccgctcgctccgccgtgaccagaaccagatccactccttcccgccgccgccagacgccacagacgccttccagcgccgcgccgcccaactcctggccgacctcccggcagccgacgacgtcctctccctcgcctggacgcgccgcctcctcgaatccttcctcctctgcctcgaggagttccgcgccctgctcttcggctccggggactcgcccgccgcgcggcccccgctcgaccgcctcgtcgccgacttctccgaccgcgccgtcaaggcgctcgacctctgcaacgccgtccgcgacggcctcgacctcgtccgccagtggcgcaagcacctcgccatcgccgcagccgtcctcgcctcgtcctctgattcctcctcgccgctcggggaggcccagatccgccgcgcccgcaaggcgctcaccgacctcaccatcctcatgctcgacgacagggacggcgggggcgtcgtcggccagcgcaaccgatccttcggccgcgccaacgagaagccccctcgccaccaccgccggagcagcagcggcgggagctccggctccggctccggctcccacctcaggtccctctcctggagcgtgtcccgggcctggtctgccgcgcgccagctgcaggccatcgggggaggactccccgtgccccgcccgcacgacaacgctgccacgggaggcctcgcctccgccgtctacaccatgggcgccgtcctcttcatcgtcgccttcgcgctcgtcgccgcaatcccgtgccaggaccgcggcctccacgcgcatttctccgtcatcaggaacctcccctgctcggcccccatcacaacgctctacgagcgcatcctcgacgagtccaagaagaaggaccgcaagaactcgtgcggcctgctcaaggagatccaccagattgagctctgctccaggcacctcatggagatcactgacgccgccgacttcccgttgcgcgaggacaaggacgccgtcttgcgggaggccgcgcaggacctagtgcacctgtgcgaatccatcaaggaagggctcgacccgctcgagcgccaggtcagagagatgttccacaggattgtgcgcacccgcacagaaatccttgactgcttgagtaagccacatggcaccggg

SEQ ID NO: 1631 - DNA, 1227 bp, Artificial sequence
  Mir resistant mutated nucleotide sequence
atgcgaggcacaatgccggccaccgacagtagtagtagcagcagcccagcggcggcgccgctgtcctccatcggccgctccatccgctcgctccgccgtgaccagaaccagatccactccttcccgccgccgccagacgccacagacgccttccagcgccgcgccgcccaactcctggccgacctcccggcagccgacgacgtcctctccctcgcctggacgcgccgcctcctcgaatccttcctcctctgcctcgaggagttccgcgccctgctcttcggctccggggactcgcccgccgcgcggcccccgctcgaccgcctcgtcgccgacttctccgaccgcgccgtcaaggcgctcgacctctgcaacgccgtccgcgacggcctcgacctcgtccgccagtggcgcaagcacctcgccatcgccgcagccgtcctcgcctcgtcctctgattcctcctcgccgctcggggaggcccagatccgccgcgcccgcaaggcgctcaccgacctcaccatcctcatgctcgacgacagggacggcgggggcgtcgtcggccagcgcaaccgatccttcggccgcgccaacgagaagccccctcgccaccaccgccggagcagcagcggcgggagctccggctccggctccggctcccacctcaggtccctctcctggagcgtgtcccgggcctggtctgccgcgcgccagctgcaggccatcgggggaggactccccgtgccccgcccgcacgacaacgctgccacgggaggcctcgcctccgccgtctacaccatgggcgccgtcctcttcatcgtcgccttcgcgctcgtcgccgcaatcccgtgccaggaccgcggcctccacgcgcatttctccgtcatcaggaacctcccctgctcggcccccatcacaacgctctacgagcgcatcctcgacgagtccaagaagaaggaccgcaagaactcgtgcggcctgctcaaggagatccaccagattgagctctgctccaggcacctcatggagatcactgacgccgccgacttcccgttgcgcgaggacaaggacgccgtcttgcgggaggccgcgcaggacctagtgcacctgtgcgaatccatcaaggaagggctcgacccgctcgagcgccaggtcagagagatgttccacaggattgtgcgcacccgcacagaaatccttgactgcttgagtaagccacatggcaccggg

SEQ ID NO: 1632 - DNA, 1227 bp, Artificial sequence
  Mir resistant mutated nucleotide sequence
atgcgaggcacaatgccggccaccgattcctcctccagcagcagcccagcggcggcgccgctgtcctccatcggccgctccatccgctcgctccgccgtgaccagaaccagatccactccttcccgccgccgccagacgccacagacgccttccagcgccgcgccgcccaactcctggccgacctcccggcagccgacgacgtcctctccctcgcctggacgcgccgcctcctcgaatccttcctcctctgcctcgaggagttccgcgccctgctcttcggctccggggactcgcccgccgcgcggcccccgctcgaccgcctcgtcgccgacttctccgaccgcgccgtcaaggcgctcgacctctgcaacgccgtccgcgacggcctcgacctcgtccgccagtggcgcaagcacctcgccatcgccgcagccgtcctcgcctcgtcctctgattcctcctcgccgctcggggaggcccagatccgccgcgcccgcaaggcgctcaccgacctcaccatcctcatgctcgacgacagggacggcgggggcgtcgtcggccagcgcaaccgatccttcggccgcgccaacgagaagccccctcgccaccaccgccggagcagcagcggcgggagctccggctccggctccggctcccacctcaggtccctctcctggagcgtgtcccgggcctggtctgccgcgcgccagctgcaggccatcgggggaggactccccgtgccccgcccgcacgacaacgctgccacgggaggcctcgcctccgccgtctacaccatgggcgccgtcctcttcatcgtcgccttcgcgctcgtcgccgcaatcccgtgccaggaccgcggcctccacgcgcatttctccgtcatcaggaacctcccctgctcggcccccatcacaacgctctacgagcgcatcctcgacgagtccaagaagaaggaccgcaagaactcgtgcggcctgctcaaggagatccaccagattgagctctgctccaggcacctcatggagatcactgacgccgccgacttcccgttgcgcgaggacaaggacgccgtcttgcgggaggccgcgcaggacctagtgcacctgtgcgaatccatcaaggaagggctcgacccgctcgagcgccaggtcagagagatgttccacaggattgtgcgcacccgcacagaaatccttgactgcttgagtaagccacatggcaccggg

SEQ ID NO: 1633 - DNA, 1227 bp, Artificial sequence; identical to SEQ ID NO: 1632
  Mir resistant mutated nucleotide sequence

SEQ ID NO: 1634 - DNA, 1227 bp, Artificial sequence; identical to SEQ ID NO: 1632
  Mir resistant mutated nucleotide sequence

SEQ ID NO: 1635 - DNA, 945 bp, Artificial sequence
  Mir resistant mutated nucleotide sequence
atggagggaagcagaaacagcccggacaggcagtcgtcgggcggcagccctgaggagcgcggaagcggcggtagcggaggccgtggcgccggggagccggtgcggtcgcggtggacgccgaagccggagcagatactgatcctcgagtccatcttcaacagcggcatggtcaacccgcccaaggatgaaaccgtccgcatccgcaagctgctcgagcgcttcggcgccgtcggtgacgccaacgtcttctactggttccagaaccgccgctcccgctcgcgccgccgccagcgccagatgcaggccgccgcggcggcggcggcaacagcggcggcggcctcctctgcggccaacagctctcccggagctagcgcaaccgtcggccttccttctggtgctctacaatatcccttggtcatgagcgggagcgggaccgcctgccagtatgagcagcaagcatcaagtagcagcagcagcggaagcactgggggctcgtctcttgggctgttcgcgctcggagccggggtgcccagcaccggcggtgggttcttccaggagtcgtgtggcgcttcgtcgccactggcgacagggctgatgatgggggacgtggaccgcagtggcggcagcgacgatctcttcgccatctcccggcagatggggttcgcggcggcgagcccagtcgcctcggcttcggtggcgcctccgagcacaacggcacaccaccagcagtattactcatgtcaatcacctacagggacgatcacggtgttcatcaatggagttccaatggaggttcccagtggtccaatagacatgcgagccattttcggccaggacgtgctgctcgtccattccaccggggccctcctcccagtcgacgactatggaattctaacgcagagcttgcagacgggcgaaagctatttcttggtagcaaggccaact

SEQ ID NO: 1636 - DNA, 945 bp, Artificial sequence
  Mir resistant mutated nucleotide sequence
atggagggaagcagaaacagcccggacaggcagtcgtcgggcggcagccctgaggagcgcggaagcggcggtagcggaggccgtggcgccggggagccggtgcggtcgcggtggacgccgaagccggagcagatactgatcctcgagtccatcttcaacagcggcatggtcaacccgcccaaggatgaaaccgtccgcatccgcaagctgctcgagcgcttcggcgccgtcggtgacgccaacgtcttctactggttccagaaccgccgctcccgctcgcgccgccgccagcgccagatgcaggccgccgcggcggcggcggcaacagcggcggcggcctcctctgcggccaacagctctcccggagctagcgcaaccgtcggccttccttctggtgctctacaatatcccttggtcatgagcgggagcgggaccgcctgccagtatgagcagcaagcaagcagtagcagcagcagcggaagcactgggggctcgtctcttgggctgttcgcgctcggagccggggtgcccagcaccggcggtgggttcttccaggagtcgtgtggcgcttcgtcgccactggcgacagggctgatgatgggggacgtggaccgcagtggcggcagcgacgatctcttcgccatctcccggcagatggggttcgcggcggcgagcccagtcgcctcggcttcggtggcgcctccgagcacaacggcacaccaccagcagtattactcatgtcaatcacctacagggacgatcacggtgttcatcaatggagttccaatggaggttcccagtggtccaatagacatgcgagccattttcggccaggacgtgctgctcgtccattccaccggggccctcctcccagtcgacgactatggaattctaacgcagagcttgcagacgggcgaaagctatttcttggtagcaaggccaact

SEQ ID NO: 1637 - DNA, 945 bp, Artificial sequence
  Mir resistant mutated nucleotide sequence
atggagggaagcagaaacagcccggacaggcagtcgtcgggcggcagccctgaggagcgcggaagcggcggtagcggaggccgtggcgccggggagccggtgcggtcgcggtggacgccgaagccggagcagatactgatcctcgagtccatcttcaacagcggcatggtcaacccgcccaaggatgaaaccgtccgcatccgcaagctgctcgagcgcttcggcgccgtcggtgacgccaacgtcttctactggttccagaaccgccgctcccgctcgcgccgccgccagcgccagatgcaggccgccgcggcggcggcggcaacagcggcggcggcctcctctgcggccaacagctctcccggagctagcgcaaccgtcggccttccttctggtgctctacaatatcccttggtcatgagcgggagcgggaccgcctgccagtatgagcagcaagcatcatccagcagcagcagcggaagcactgggggctcgtctcttgggctgttcgcgctcggagccggggtgcccagcaccggcggtgggttcttccaggagtcgtgtggcgcttcgtcgccactggcgacagggctgatgatgggggacgtggaccgcagtggcggcagcgacgatctcttcgccatctcccggcagatggggttcgcggcggcgagcccagtcgcctcggcttcggtggcgcctccgagcacaacggcacaccaccagcagtattactcatgtcaatcacctacagggacgatcacggtgttcatcaatggagttccaatggaggttcccagtggtccaatagacatgcgagccattttcggccaggacgtgctgctcgtccattccaccggggccctcctcccagtcgacgactatggaattctaacgcagagcttgcagacgggcgaaagctatttcttggtagcaaggccaact

SEQ ID NO: 1638 - DNA, 981 bp, Artificial sequence
  Mir resistant mutated nucleotide sequence
atgccgaggccgcccacaatggtgatccaggacgactacatcgacatggacctgaccccggcagccacaccggagccctcgccagcctcgccccgcttcgagttccagagcgccggcgccggcgccgccggcgacaggcatagggaggcggcgttcgcgtcccccgcggacgagctgttctacaagggcaacctgctgccgctccacctgccgccgcggctgcagctcgtgcagaggctcctccaggaccaggagcagccgccgccgctgcgaggggcgaagcgggatgcggagtcggatgccacggcggcggcggcggcagagcgaggagacgccgacgctgccgctgccgccagcaaggtgtgcgccgccaagaagccgtcttgggccaagaagctcaaggtggttaagcggtgggcgtcgaaggagtacatccggtcgctcttcctggccaggccgccgttgccgagcgacatcgtcgccgccgccggtggcgccagcgccagcggccacggcatcggcagcgtcagcgcgagggggagcgtcctagagcaggaggaggtgtgccagtgccagcaccgcaagtccttctccggcatcatccgccgggtgcgcctcgtggcgaccaaggcgcctgggacctcgccgctgtgctcctcctcgagtagcagtagtagcagcagtacaccgtcgtgccgcaacgcaaacgggttcttcttccggacgccggcgtcggcggcgggggcgacgccggcgctgaagcggagcagcagcgccgggtcgtccgaggagggcgccatccagggcgccatcgcgcactgcaagcgttcccagctgctgcagcccgggatggtggcctcggcggcggcgcggaggagcgtcagcgacgtcatgttctactcggtgaccaacacgcccagagcctcttccgtgaccgccggcgaggtggcgcaggagaggaggcaggagatgtgcaggggc

SEQ ID NO: 1639 - DNA, 981 bp, Artificial sequence
  Mir resistant mutated nucleotide sequence
atgccgaggccgcccacaatggtgatccaggacgactacatcgacatggacctgaccccggcagccacaccggagccctcgccagcctcgccccgcttcgagttccagagcgccggcgccggcgccgccggcgacaggcatagggaggcggcgttcgcgtcccccgcggacgagctgttctacaagggcaacctgctgccgctccacctgccgccgcggctgcagctcgtgcagaggctcctccaggaccaggagcagccgccgccgctgcgaggggcgaagcgggatgcggagtcggatgccacggcggcggcggcggcagagcgaggagacgccgacgctgccgctgccgccagcaaggtgtgcgccgccaagaagccgtcttgggccaagaagctcaaggtggttaagcggtgggcgtcgaaggagtacatccggtcgctcttcctggccaggccgccgttgccgagcgacatcgtcgccgccgccggtggcgccagcgccagcggccacggcatcggcagcgtcagcgcgagggggagcgtcctagagcaggaggaggtgtgccagtgccagcaccgcaagtccttctccggcatcatccgccgggtgcgcctcgtggcgaccaaggcgcctgggacctcgccgctgtgctcctcctcgtccagctcctccagcagctccacaccgtcgtgccgcaacgcaaacgggttcttcttccggacgccggcgtcggcggcgggggcgacgccggcgctgaagcggagcagcagcgccgggtcgtccgaggagggcgccatccagggcgccatcgcgcactgcaagcgttcccagctgctgcagcccgggatggtggcctcggcggcggcgcggaggagcgtcagcgacgtcatgttctactcggtgaccaacacgcccagagcctcttccgtgaccgccggcgaggtggcgcaggagaggaggcaggagatgtgcaggggc

SEQ ID NO: 1640 - DNA, 981 bp, Artificial sequence; identical to SEQ ID NO: 1639
  Mir resistant mutated nucleotide sequence

SEQ ID NO: 1641 - DNA, 981 bp, Artificial sequence; identical to SEQ ID NO: 1639
  Mir resistant mutated nucleotide sequence

SEQ ID NO: 1642 - DNA, 981 bp, Artificial sequence; identical to SEQ ID NO: 1639
  Mir resistant mutated nucleotide sequence

SEQ ID NO: 1643 - DNA, 966 bp, Artificial sequence
  Mir resistant mutated nucleotide sequence
atgtcgctgtcaccggcggacggcgcagcgtactggctgcggtggcaggtcctcgtctgcggcgcgctcatcgcgctgcccacggtggccgcggcggcgctgctgccgcggctgcggagctcagcgccgcccctgcgcgcggccgacctctgggttccttgctgggcgcgcctccacccgggctggctccttgcctaccgcgccgtcgcgctcgccgccgctgtagcgttattagcaagattagtagtagcacgcggcatcaccgtcttctacttctacacccagtggacgtttctattagtcaccatatattttgcgtttgccacagctatatcagcccatggatgtttggtttactcaaggaaaagtttgaggaaagccgacgaatcccgtggacttcttaatgctgatgtcgaaaatcgtgatgtttccaattctgtttctggagagaggaaaacagatgagacaaatatgatgatgagctattatgaacaaatagtgaatgagagaagagctgggttctggggccggtgcatggaaatcatataccagactagcgcaggtgcaacaatgttgactgatgtcacatattggggccttcttgtgccatttttctaccgtgacaagtttgggttagctttgttcactgatggcatgcactccttaaatgctgtttttctacttattgacacacttctcaacaacatgccctttccctggtaccgaatgtctttctttgttttctggagctgcgcctatgtaacattccagtgggtccttcatgcttgtggaggcgtatcctggtggccgtacccatttctggacctttcatcatctggagctcctctatggtacctcggcatggccatcgctcatgtcccctgcttcttcctgtattggttgatcgtcaaggcgaagcacacttatttccaacggatgttcccacatgcttatgttagggcaaca

SEQ ID NO: 1644 - DNA, 966 bp, Artificial sequence
  Mir resistant mutated nucleotide sequence
atgtcgctgtcaccggcggacggcgcagcgtactggctgcggtggcaggtcctcgtctgcggcgcgctcatcgcgctgcccacggtggccgcggcggcgctgctgccgcggctgcggagctcagcgccgcccctgcgcgcggccgacctctgggttccttgctgggcgcgcctccacccgggctggctccttgcctaccgcgccgtcgcgctcgccgccgctgtagcgcttcttgcaagacttgtagtagcacgcggcatcaccgtcttctacttctacacccagtggacgtttctattagtcaccatatattttgcgtttgccacagctatatcagcccatggatgtttggtttactcaaggaaaagtttgaggaaagccgacgaatcccgtggacttcttaatgctgatgtcgaaaatcgtgatgtttccaattctgtttctggagagaggaaaacagatgagacaaatatgatgatgagctattatgaacaaatagtgaatgagagaagagctgggttctggggccggtgcatggaaatcatataccagactagcgcaggtgcaacaatgttgactgatgtcacatattggggccttcttgtgccatttttctaccgtgacaagtttgggttagctttgttcactgatggcatgcactccttaaatgctgtttttctacttattgacacacttctcaacaacatgccctttccctggtaccgaatgtctttctttgttttctggagctgcgcctatgtaacattccagtgggtccttcatgcttgtggaggcgtatcctggtggccgtacccatttctggacctttcatcatctggagctcctctatggtacctcggcatggccatcgctcatgtcccctgcttcttcctgtattggttgatcgtcaaggcgaagcacacttatttccaacggatgttcccacatgcttatgttagggcaaca

SEQ ID NO: 1645 - DNA, 966 bp, Artificial sequence; identical to SEQ ID NO: 1644
  Mir resistant mutated nucleotide sequence

SEQ ID NO: 1646 - DNA, 966 bp, Artificial sequence; identical to SEQ ID NO: 1644
  Mir resistant mutated nucleotide sequence

SEQ ID NO: 1647 - DNA, 966 bp, Artificial sequence; identical to SEQ ID NO: 1644
  Mir resistant mutated nucleotide sequence

SEQ ID NO: 1648 - DNA, 2361 bp, Artificial sequence
  Mir resistant mutated nucleotide sequence
atggggcggtcataccttgaaggcgggcgggacgcgggggcggaccttgggtacccgctggtggccgtgtgcatcgacaaggacaagaacagccagaacgcgctcaagtgggccatcgactcgctggtacagaaggggcagaccatcgtccttgtccacgtcaacaccaagggcacctccggcggcgtggaggacgcggccgggttcaagcagccgacggacccgcacatgaaggacctcttcgtcccgttccgatgcttctgcacccgcaaagacatcaattgcaaggacgtggtgctggacgagcacgacgtggccaagtccatcatcgagttctcggcgcaggcggccgtggagaagctcgtcctcggcgccacgacgaggggcggcttcgtccggttcaaggcggacatcccgaccaccatctccaagggcgccccagacttctgctcggtgtacatcgtcaacaaggggaaggtctcgtcgcagcgcaactccacccgcgccgcgccgcgggtgtcgccgctccggtcgcagatccagtcgtcgcagattgccgcaacgctcaagcccgagccgccgcagtcgcatagatggagtagcagcagccgcggccacgagcacggcgagacgccgcgggtggacaacttccgctcgccgttcgcgcgcgggggccccgcgaacacgcgcaagtcgtacgccgacctcagccacatgtccatgccggactcggccgacatctcgtttgtcagcagcaccggccgccggagcgtcgaccaccacccggcgatcccgccgcggatgtccaacggctccgtggacagctacgaccacagcttcgagatgtcacgcacgcccagcaagtggggcggcgactccttcggcggcatggaccacaccaccttctcgcagagcagcagctcttccttctgctccctcggcatgcaggacgacgtggaggcggagatgaagaggcttcgcctggagctcaagcagacaatggacatgtacagcacggcctgcaaggaggcgctgacggcgaaacagaaggccatggagctgcagcggtggaagatggaggaggagcagaagacgcaagactcgcggataacggaggactccgcgatggcgatgatcgagcgggagaaggctcgggcgaaggcggccatggaggcggcggaggcgtcgcagcggatcgcggagatggaggtccagaagcggatcagcgcggagaagaagctgctcaaggaggccgaggagcgcaagaaccgcggcggcagcggcatgtcccacgaggcccggtaccggcgctacagcatcgaggagatcgagcaggcgacggacaacttcaacgacgcgcgcaaggtgggcgagggcgggtacggccccgtgtacaagggcttcctcgaccacacgcaggtggccatcaaggtgctccggcccgacgcggcgcagggccggtcgcagttccagcaggaggtggaggtgctgagctgcatccggcaccccaacatggtgctcctcctcggcgcgtgcccggagtacggctgcctcgtgtacgagtacatggccagcggcagcctggacgactgcctgttccggcgctccggcggcgccggcgggcccgtcatcccgtggcagcaccggttccgcatctgcgccgagatcgcgacggggctgctgttcctgcaccagaccaagcccgagccgctggtgcaccgggacctcaagccggggaacatcctgctggaccgcaactacgtgagcaagatcagcgacgtcgggctggcgcggctcgtgccgccgtccgtcgccgacaccgtgacgcagtaccggatgacgtccaccgcggggaccttctgctacatcgacccggagtaccagcagacgggcatgctcggcgtcaagtccgacgtctactccttcggcgtcatgctgctgcagatcatcacggcgaagccgcccatggggctgtcgcaccacgtcggacgcgccctggagcgcggcgagctgcaggacatgctggaccccgccgtgcccgactggcccctggaggaggcgcagtgcctcgccgagatggcgctccggtgctgcgagctgcgccgcaaggaccggccggacctcggcgccgtcgtgctcccggagctcaaccggctgcgcgcgctcggcgaggacaacatgcagtactgcggcgccatcatcaggggtggcggcggcggcggcggcatgcacagctcgtcgccgttccacagcaacatctcacggtcacacgccgagatgatgatcgattcccagtacccaagatcagtgttcagctcaagagcgggcgattcgcccatgccgccgagaaggtcgaacgct

SEQ ID NO: 1649 - DNA, 2361 bp, Artificial sequence
  Mir resistant mutated nucleotide sequence
atggggcggtcataccttgaaggcgggcgggacgcgggggcggaccttgggtacccgctggtggccgtgtgcatcgacaaggacaagaacagccagaacgcgctcaagtgggccatcgactcgctggtacagaaggggcagaccatcgtccttgtccacgtcaacaccaagggcacctccggcggcgtggaggacgcggccgggttcaagcagccgacggacccgcacatgaaggacctcttcgtcccgttccgatgcttctgcacccgcaaagacatcaattgcaaggacgtggtgctggacgagcacgacgtggccaagtccatcatcgagttctcggcgcaggcggccgtggagaagctcgtcctcggcgccacgacgaggggcggcttcgtccggttcaaggcggacatcccgaccaccatctccaagggcgccccagacttctgctcggtgtacatcgtcaacaaggggaaggtctcgtcgcagcgcaactccacccgcgccgcgccgcgggtgtcgccgctccggtcgcagatccagtcgtcgcagattgccgcaacgctcaagcccgagccgccgcagtcgcacagatggagtagcagcagccgcggccacgagcacggcgagacgccgcgggtggacaacttccgctcgccgttcgcgcgcgggggccccgcgaacacgcgcaagtcgtacgccgacctcagccacatgtccatgccggactcggccgacatctcgtttgtcagcagcaccggccgccggagcgtcgaccaccacccggcgatcccgccgcggatgtccaacggctccgtggacagctacgaccacagcttcgagatgtcacgcacgcccagcaagtggggcggcgactccttcggcggcatggaccacaccaccttctcgcagagcagcagctcttccttctgctccctcggcatgcaggacgacgtggaggcggagatgaagaggcttcgcctggagctcaagcagacaatggacatgtacagcacggcctgcaaggaggcgctgacggcgaaacagaaggccatggagctgcagcggtggaagatggaggaggagcagaagacgcaagactcgcggataacggaggactccgcgatggcgatgatcgagcgggagaaggctcgggcgaaggcggccatggaggcggcggaggcgtcgcagcggatcgcggagatggaggtccagaagcggatcagcgcggagaagaagctgctcaaggaggccgaggagcgcaagaaccgcggcggcagcggcatgtcccacgaggcccggtaccggcgctacagcatcgaggagatcgagcaggcgacggacaacttcaacgacgcgcgcaaggtgggcgagggcgggtacggccccgtgtacaagggcttcctcgaccacacgcaggtggccatcaaggtgctccggcccgacgcggcgcagggccggtcgcagttccagcaggaggtggaggtgctgagctgcatccggcaccccaacatggtgctcctcctcggcgcgtgcccggagtacggctgcctcgtgtacgagtacatggccagcggcagcctggacgactgcctgttccggcgctccggcggcgccggcgggcccgtcatcccgtggcagcaccggttccgcatctgcgccgagatcgcgacggggctgctgttcctgcaccagaccaagcccgagccgctggtgcaccgggacctcaagccggggaacatcctgctggaccgcaactacgtgagcaagatcagcgacgtcgggctggcgcggctcgtgccgccgtccgtcgccgacaccgtgacgcagtaccggatgacgtccaccgcggggaccttctgctacatcgacccggagtaccagcagacgggcatgctcggcgtcaagtccgacgtctactccttcggcgtcatgctgctgcagatcatcacggcgaagccgcccatggggctgtcgcaccacgtcggacgcgccctggagcgcggcgagctgcaggacatgctggaccccgccgtgcccgactggcccctggaggaggcgcagtgcctcgccgagatggcgctccggtgctgcgagctgcgccgcaaggaccggccggacctcggcgccgtcgtgctcccggagctcaaccggctgcgcgcgctcggcgaggacaacatgcagtactgcggcgccatcatcaggggtggcggcggcggcggcggcatgcacagctcgtcgccgttccacagcaacatctcacggtcacacgccgagatgatgatcgattcccagtacccaagatcagtgttcagctcaagagcgggcgattcgcccatgccgccgagaaggtcgaacgct

SEQ ID NO: 1650 - DNA, 2361 bp, Artificial sequence
  Mir resistant mutated nucleotide sequence
atggggcggtcataccttgaaggcgggcgggacgcgggggcggaccttgggtacccgctggtggccgtgtgcatcgacaaggacaagaacagccagaacgcgctcaagtgggccatcgactcgctggtacagaaggggcagaccatcgtccttgtccacgtcaacaccaagggcacctccggcggcgtggaggacgcggccgggttcaagcagccgacggacccgcacatgaaggacctcttcgtcccgttccgatgcttctgcacccgcaaagacatcaattgcaaggacgtggtgctggacgagcacgacgtggccaagtccatcatcgagttctcggcgcaggcggccgtggagaagctcgtcctcggcgccacgacgaggggcggcttcgtccggttcaaggcggacatcccgaccaccatctccaagggcgccccagacttctgctcggtgtacatcgtcaacaaggggaaggtctcgtcgcagcgcaactccacccgcgccgcgccgcgggtgtcgccgctccggtcgcagatccagtcgtcgcagattgccgcaacgctcaagcccgagccgccgcagtcgcatcggtggagtagcagcagccgcggccacgagcacggcgagacgccgcgggtggacaacttccgctcgccgttcgcgcgcgggggccccgcgaacacgcgcaagtcgtacgccgacctcagccacatgtccatgccggactcggccgacatctcgtttgtcagcagcaccggccgccggagcgtcgaccaccacccggcgatcccgccgcggatgtccaacggctccgtggacagctacgaccacagcttcgagatgtcacgcacgcccagcaagtggggcggcgactccttcggcggcatggaccacaccaccttctcgcagagcagcagctcttccttctgctccctcggcatgcaggacgacgtggaggcggagatgaagaggcttcgcctggagctcaagcagacaatggacatgtacagcacggcctgcaaggaggcgctgacggcgaaacagaaggccatggagctgcagcggtggaagatggaggaggagcagaagacgcaagactcgcggataacggaggactccgcgatggcgatgatcgagcgggagaaggctcgggcgaaggcggccatggaggcggcggaggcgtcgcagcggatcgcggagatggaggtccagaagcggatcagcgcggagaagaagctgctcaaggaggccgaggagcgcaagaaccgcggcggcagcggcatgtcccacgaggcccggtaccggcgctacagcatcgaggagatcgagcaggcgacggacaacttcaacgacgcgcgcaaggtgggcgagggcgggtacggccccgtgtacaagggcttcctcgaccacacgcaggtggccatcaaggtgctccggcccgacgcggcgcagggccggtcgcagttccagcaggaggtggaggtgctgagctgcatccggcaccccaacatggtgctcctcctcggcgcgtgcccggagtacggctgcctcgtgtacgagtacatggccagcggcagcctggacgactgcctgttccggcgctccggcggcgccggcgggcccgtcatcccgtggcagcaccggttccgcatctgcgccgagatcgcgacggggctgctgttcctgcaccagaccaagcccgagccgctggtgcaccgggacctcaagccggggaacatcctgctggaccgcaactacgtgagcaagatcagcgacgtcgggctggcgcggctcgtgccgccgtccgtcgccgacaccgtgacgcagtaccggatgacgtccaccgcggggaccttctgctacatcgacccggagtaccagcagacgggcatgctcggcgtcaagtccgacgtctactccttcggcgtcatgctgctgcagatcatcacggcgaagccgcccatggggctgtcgcaccacgtcggacgcgccctggagcgcggcgagctgcaggacatgctggaccccgccgtgcccgactggcccctggaggaggcgcagtgcctcgccgagatggcgctccggtgctgcgagctgcgccgcaaggaccggccggacctcggcgccgtcgtgctcccggagctcaaccggctgcgcgcgctcggcgaggacaacatgcagtactgcggcgccatcatcaggggtggcggcggcggcggcggcatgcacagctcgtcgccgttccacagcaacatctcacggtcacacgccgagatgatgatcgattcccagtacccaagatcagtgttcagctcaagagcgggcgattcgcccatgccgccgagaaggtcgaacgct

SEQ ID NO: 1651 - DNA, 2361 bp, Artificial sequence
  Mir resistant mutated nucleotide sequence
atggggcggtcataccttgaaggcgggcgggacgcgggggcggaccttgggtacccgctggtggccgtgtgcatcgacaaggacaagaacagccagaacgcgctcaagtgggccatcgactcgctggtacagaaggggcagaccatcgtccttgtccacgtcaacaccaagggcacctccggcggcgtggaggacgcggccgggttcaagcagccgacggacccgcacatgaaggacctcttcgtcccgttccgatgcttctgcacccgcaaagacatcaattgcaaggacgtggtgctggacgagcacgacgtggccaagtccatcatcgagttctcggcgcaggcggccgtggagaagctcgtcctcggcgccacgacgaggggcggcttcgtccggttcaaggcggacatcccgaccaccatctccaagggcgccccagacttctgctcggtgtacatcgtcaacaaggggaaggtctcgtcgcagcgcaactccacccgcgccgcgccgcgggtgtcgccgctccggtcgcagatccagtcgtcgcagattgccgcaacgctcaagcccgagccgccgcagtcgcatagatggtccagcagcagccgcggccacgagcacggcgagacgccgcgggtggacaacttccgctcgccgttcgcgcgcgggggccccgcgaacacgcgcaagtcgtacgccgacctcagccacatgtccatgccggactcggccgacatctcgtttgtcagcagcaccggccgccggagcgtcgaccaccacccggcgatcccgccgcggatgtccaacggctccgtggacagctacgaccacagcttcgagatgtcacgcacgcccagcaagtggggcggcgactccttcggcggcatggaccacaccaccttctcgcagagcagcagctcttccttctgctccctcggcatgcaggacgacgtggaggcggagatgaagaggcttcgcctggagctcaagcagacaatggacatgtacagcacggcctgcaaggaggcgctgacggcgaaacagaaggccatggagctgcagcggtggaagatggaggaggagcagaagacgcaagactcgcggataacggaggactccgcgatggcgatgatcgagcgggagaaggctcgggcgaaggcggccatggaggcggcggaggcgtcgcagcggatcgcggagatggaggtccagaagcggatcagcgcggagaagaagctgctcaaggaggccgaggagcgcaagaaccgcggcggcagcggcatgtcccacgaggcccggtaccggcgctacagcatcgaggagatcgagcaggcgacggacaacttcaacgacgcgcgcaaggtgggcgagggcgggtacggccccgtgtacaagggcttcctcgaccacacgcaggtggccatcaaggtgctccggcccgacgcggcgcagggccggtcgcagttccagcaggaggtggaggtgctgagctgcatccggcaccccaacatggtgctcctcctcggcgcgtgcccggagtacggctgcctcgtgtacgagtacatggccagcggcagcctggacgactgcctgttccggcgctccggcggcgccggcgggcccgtcatcccgtggcagcaccggttccgcatctgcgccgagatcgcgacggggctgctgttcctgcaccagaccaagcccgagccgctggtgcaccgggacctcaagccggggaacatcctgctggaccgcaactacgtgagcaagatcagcgacgtcgggctggcgcggctcgtgccgccgtccgtcgccgacaccgtgacgcagtaccggatgacgtccaccgcggggaccttctgctacatcgacccggagtaccagcagacgggcatgctcggcgtcaagtccgacgtctactccttcggcgtcatgctgctgcagatcatcacggcgaagccgcccatggggctgtcgcaccacgtcggacgcgccctggagcgcggcgagctgcaggacatgctggaccccgccgtgcccgactggcccctggaggaggcgcagtgcctcgccgagatggcgctccggtgctgcgagctgcgccgcaaggaccggccggacctcggcgccgtcgtgctcccggagctcaaccggctgcgcgcgctcggcgaggacaacatgcagtactgcggcgccatcatcaggggtggcggcggcggcggcggcatgcacagctcgtcgccgttccacagcaacatctcacggtcacacgccgagatgatgatcgattcccagtacccaagatcagtgttcagctcaagagcgggcgattcgcccatgccgccgagaaggtcgaacgct

SEQ ID NO: 1652 - DNA, 2361 bp, Artificial sequence
  Mir resistant mutated nucleotide sequence
atggggcggtcataccttgaaggcgggcgggacgcgggggcggaccttgggtacccgctggtggccgtgtgcatcgacaaggacaagaacagccagaacgcgctcaagtgggccatcgactcgctggtacagaaggggcagaccatcgtccttgtccacgtcaacaccaagggcacctccggcggcgtggaggacgcggccgggttcaagcagccgacggacccgcacatgaaggacctcttcgtcccgttccgatgcttctgcacccgcaaagacatcaattgcaaggacgtggtgctggacgagcacgacgtggccaagtccatcatcgagttctcggcgcaggcggccgtggagaagctcgtcctcggcgccacgacgaggggcggcttcgtccggttcaaggcggacatcccgaccaccatctccaagggcgccccagacttctgctcggtgtacatcgtcaacaaggggaaggtctcgtcgcagcgcaactccacccgcgccgcgccgcgggtgtcgccgctccggtcgcagatccagtcgtcgcagattgccgcaacgctcaagcccgagccgccgcagtcgcatagatggagttcgtcgtcgcgcggccacgagcacggcgagacgccgcgggtggacaacttccgctcgccgttcgcgcgcgggggccccgcgaacacgcgcaagtcgtacgccgacctcagccacatgtccatgccggactcggccgacatctcgtttgtcagcagcaccggccgccggagcgtcgaccaccacccggcgatcccgccgcggatgtccaacggctccgtggacagctacgaccacagcttcgagatgtcacgcacgcccagcaagtggggcggcgactccttcggcggcatggaccacaccaccttctcgcagagcagcagctcttccttctgctccctcggcatgcaggacgacgtggaggcggagatgaagaggcttcgcctggagctcaagcagacaatggacatgtacagcacggcctgcaaggaggcgctgacggcgaaacagaaggccatggagctgcagcggtggaagatggaggaggagcagaagacgcaagactcgcggataacggaggactccgcgatggcgatgatcgagcgggagaaggctcgggcgaaggcggccatggaggcggcggaggcgtcgcagcggatcgcggagatggaggtccagaagcggatcagcgcggagaagaagctgctcaaggaggccgaggagcgcaagaaccgcggcggcagcggcatgtcccacgaggcccggtaccggcgctacagcatcgaggagatcgagcaggcgacggacaacttcaacgacgcgcgcaaggtgggcgagggcgggtacggccccgtgtacaagggcttcctcgaccacacgcaggtggccatcaaggtgctccggcccgacgcggcgcagggccggtcgcagttccagcaggaggtggaggtgctgagctgcatccggcaccccaacatggtgctcctcctcggcgcgtgcccggagtacggctgcctcgtgtacgagtacatggccagcggcagcctggacgactgcctgttccggcgctccggcggcgccggcgggcccgtcatcccgtggcagcaccggttccgcatctgcgccgagatcgcgacggggctgctgttcctgcaccagaccaagcccgagccgctggtgcaccgggacctcaagccggggaacatcctgctggaccgcaactacgtgagcaagatcagcgacgtcgggctggcgcggctcgtgccgccgtccgtcgccgacaccgtgacgcagtaccggatgacgtccaccgcggggaccttctgctacatcgacccggagtaccagcagacgggcatgctcggcgtcaagtccgacgtctactccttcggcgtcatgctgctgcagatcatcacggcgaagccgcccatggggctgtcgcaccacgtcggacgcgccctggagcgcggcgagctgcaggacatgctggaccccgccgtgcccgactggcccctggaggaggcgcagtgcctcgccgagatggcgctccggtgctgcgagctgcgccgcaaggaccggccggacctcggcgccgtcgtgctcccggagctcaaccggctgcgcgcgctcggcgaggacaacatgcagtactgcggcgccatcatcaggggtggcggcggcggcggcggcatgcacagctcgtcgccgttccacagcaacatctcacggtcacacgccgagatgatgatcgattcccagtacccaagatcagtgttcagctcaagagcgggcgattcgcccatgccgccgagaaggtcgaacgct

SEQ ID NO: 1653 - DNA, 1041 bp, Artificial sequence
  Mir resistant mutated nucleotide sequence
atgggcggcgcattattattagcattattattagtatctgctgctgccgcccctcaggtacttggagttggcaatggagacaatcacatgagaatcatccaggaggacatcatcgagacagtcaacaaccatcccagtgctgggtggacagcctcacgtaatccttacttttcaaactataccattgcgcaatttaagcacatacttggagtgaaaccagcaccacagaatgcactaagcaatgttcctgtcaaaacttattcaagatcactggaacttccaaaagagtttgacgctagatctgcatggtcccgttgcagcacaattgggaacatacttgatcaaggtcactgtggctcttgttgggcttttggtgctgtggagtgcctccaggaccgtttttgcattcacctcaacatgagcattttactttcagtcaatgacctactggcatgctgcggttttatgtgcggcgatgggtgtgatggaggctatcctatagaggcatggcgctactttgttcaaaatggtgttgttacggatgagtgtgatccatacttcgacccggtcggttgcaagcatcctggatgcgaacctgcttatcctacaccaaagtgtgaaaagaaatgcaaggagcagaaccaagtttggcaggaaaagaagcatttcagcattgatgcgtacagaataaattcagatccacatgacataatggcagaggtctacaaaaatggtcctgtagaagttgctttcacagtttacgaggatttcgcacactacaaatctggagtgtacaagcacatcaccggtggcattatgggtggccatgccgtcaagttgattggatggggaaccagtgatgctggagaagattactggcttctggcaaatcagtggaatagaggctggggcgatgatggatacttcaagatcataaggggcaaaaatgaatgtggcatcgaggagggcgttgttgctggaatgccatccacaaagaatatggttccaaacttcggcggtgccgttggaagagctatagtt

SEQ ID NO: 1654 - DNA, 1041 bp, Artificial sequence
  Mir resistant mutated nucleotide sequence
atgggcggcgcactgctgctggcactgctgctggtatctgctgctgccgcccctcaggtacttggagttggcaatggagacaatcacatgagaatcatccaggaggacatcatcgagacagtcaacaaccatcccagtgctgggtggacagcctcacgtaatccttacttttcaaactataccattgcgcaatttaagcacatacttggagtgaaaccagcaccacagaatgcactaagcaatgttcctgtcaaaacttattcaagatcactggaacttccaaaagagtttgacgctagatctgcatggtcccgttgcagcacaattgggaacatacttgatcaaggtcactgtggctcttgttgggcttttggtgctgtggagtgcctccaggaccgtttttgcattcacctcaacatgagcattttactttcagtcaatgacctactggcatgctgcggttttatgtgcggcgatgggtgtgatggaggctatcctatagaggcatggcgctactttgttcaaaatggtgttgttacggatgagtgtgatccatacttcgacccggtcggttgcaagcatcctggatgcgaacctgcttatcctacaccaaagtgtgaaaagaaatgcaaggagcagaaccaagtttggcaggaaaagaagcatttcagcattgatgcgtacagaataaattcagatccacatgacataatggcagaggtctacaaaaatggtcctgtagaagttgctttcacagtttacgaggatttcgcacactacaaatctggagtgtacaagcacatcaccggtggcattatgggtggccatgccgtcaagttgattggatggggaaccagtgatgctggagaagattactggcttctggcaaatcagtggaatagaggctggggcgatgatggatacttcaagatcataaggggcaaaaatgaatgtggcatcgaggagggcgttgttgctggaatgccatccacaaagaatatggttccaaacttcggcggtgccgttggaagagctatagtt

SEQ ID NO: 1655 - DNA, 1041 bp, Artificial sequence; identical to SEQ ID NO: 1654
  Mir resistant mutated nucleotide sequence

SEQ ID NO: 1656 - DNA, 1041 bp, Artificial sequence; identical to SEQ ID NO: 1654
  Mir resistant mutated nucleotide sequence

SEQ ID NO: 1657 - DNA, 1041 bp, Artificial sequence; identical to SEQ ID NO: 1654
  Mir resistant mutated nucleotide sequence

SEQ ID NO: 1658 - DNA, 744 bp, Artificial sequence
  Mir resistant mutated nucleotide sequence
atgggaacagagtatcccaccttcgccgacgtatccggggcccgcgcgctcctcttcctcgccgactccacaccccggctggccccgccttcgcgtcctcccgctctcagcgaggagttctactgttatagcggaagtagcagtagttactccggcgcgtcgacgaggtcatgcgtctccgactcggcacagcgcggtcgccccgtcgatcccctacgcgtgctctccgtcgtcgcctccctccgccgcatcgaccctaaggtgctagccgaggccacaagcgcgctgttccataccgacgcagagaagaagcggaagggcgtgtggatcgagatcgacagcggtggtgacgacggccagagcgagaggagcagcgccgtggccagcgaggggagcaccgtcacggccgccgcgtccgcgggctccacggccacgtcggggagatgccgcggggctccgcgggtgggttgtgctgctggtggtaaggggccgaggagggcggaggtgatcatgcagtggttttcgcagacgcaagctgggccagcgacggagaacgacatccgcgccgccgtcggcgacaactccggcacgagcaaagcgatacgatggctgttgaagcaggagggcggcttgcggcgtgcaggcaatggtggtgccctggatccgtatgtttatatggcgtttaccagcctaggtggaagtccctggctcgctgtgctgcagcctggtccgcattgctgtcgc

SEQ ID NO: 1659 - DNA, 744 bp, Artificial sequence
  Mir resistant mutated nucleotide sequence
atgggaacagagtatcccaccttcgccgacgtatccggggcccgcgcgctcctcttcctcgccgactccacaccccggctggccccgccttcgcgtcctcccgctctcagcgaggagttctactgctatagcggaagtagcagtagttactccggcgcgtcgacgaggtcatgcgtctccgactcggcacagcgcggtcgccccgtcgatcccctacgcgtgctctccgtcgtcgcctccctccgccgcatcgaccctaaggtgctagccgaggccacaagcgcgctgttccataccgacgcagagaagaagcggaagggcgtgtggatcgagatcgacagcggtggtgacgacggccagagcgagaggagcagcgccgtggccagcgaggggagcaccgtcacggccgccgcgtccgcgggctccacggccacgtcggggagatgccgcggggctccgcgggtgggttgtgctgctggtggtaaggggccgaggagggcggaggtgatcatgcagtggttttcgcagacgcaagctgggccagcgacggagaacgacatccgcgccgccgtcggcgacaactccggcacgagcaaagcgatacgatggctgttgaagcaggagggcggcttgcggcgtgcaggcaatggtggtgccctggatccgtatgtttatatggcgtttaccagcctaggtggaagtccctggctcgctgtgctgcagcctggtccgcattgctgtcgc

SEQ ID NO: 1660 - DNA, 744 bp, Artificial sequence
  Mir resistant mutated nucleotide sequence
atgggaacagagtatcccaccttcgccgacgtatccggggcccgcgcgctcctcttcctcgccgactccacaccccggctggccccgccttcgcgtcctcccgctctcagcgaggagttctactgttacagcggaagtagcagtagttactccggcgcgtcgacgaggtcatgcgtctccgactcggcacagcgcggtcgccccgtcgatcccctacgcgtgctctccgtcgtcgcctccctccgccgcatcgaccctaaggtgctagccgaggccacaagcgcgctgttccataccgacgcagagaagaagcggaagggcgtgtggatcgagatcgacagcggtggtgacgacggccagagcgagaggagcagcgccgtggccagcgaggggagcaccgtcacggccgccgcgtccgcgggctccacggccacgtcggggagatgccgcggggctccgcgggtgggttgtgctgctggtggtaaggggccgaggagggcggaggtgatcatgcagtggttttcgcagacgcaagctgggccagcgacggagaacgacatccgcgccgccgtcggcgacaactccggcacgagcaaagcgatacgatggctgttgaagcaggagggcggcttgcggcgtgcaggcaatggtggtgccctggatccgtatgtttatatggcgtttaccagcctaggtggaagtccctggctcgctgtgctgcagcctggtccgcattgctgtcgc

SEQ ID NO: 1661 - DNA, 744 bp, Artificial sequence
  Mir resistant mutated nucleotide sequence
atgggaacagagtatcccaccttcgccgacgtatccggggcccgcgcgctcctcttcctcgccgactccacaccccggctggccccgccttcgcgtcctcccgctctcagcgaggagttctactgttattcgggaagttcgagtagttactccggcgcgtcgacgaggtcatgcgtctccgactcggcacagcgcggtcgccccgtcgatcccctacgcgtgctctccgtcgtcgcctccctccgccgcatcgaccctaaggtgctagccgaggccacaagcgcgctgttccataccgacgcagagaagaagcggaagggcgtgtggatcgagatcgacagcggtggtgacgacggccagagcgagaggagcagcgccgtggccagcgaggggagcaccgtcacggccgccgcgtccgcgggctccacggccacgtcggggagatgccgcggggctccgcgggtgggttgtgctgctggtggtaaggggccgaggagggcggaggtgatcatgcagtggttttcgcagacgcaagctgggccagcgacggagaacgacatccgcgccgccgtcggcgacaactccggcacgagcaaagcgatacgatggctgttgaagcaggagggcggcttgcggcgtgcaggcaatggtggtgccctggatccgtatgtttatatggcgtttaccagcctaggtggaagtccctggctcgctgtgctgcagcctggtccgcattgctgtcgc

SEQ ID NO: 1662 - DNA, 744 bp, Artificial sequence
  Mir resistant mutated nucleotide sequence
atgggaacagagtatcccaccttcgccgacgtatccggggcccgcgcgctcctcttcctcgccgactccacaccccggctggccccgccttcgcgtcctcccgctctcagcgaggagttctactgttatagcggcagtagcagtagttactccggcgcgtcgacgaggtcatgcgtctccgactcggcacagcgcggtcgccccgtcgatcccctacgcgtgctctccgtcgtcgcctccctccgccgcatcgaccctaaggtgctagccgaggccacaagcgcgctgttccataccgacgcagagaagaagcggaagggcgtgtggatcgagatcgacagcggtggtgacgacggccagagcgagaggagcagcgccgtggccagcgaggggagcaccgtcacggccgccgcgtccgcgggctccacggccacgtcggggagatgccgcggggctccgcgggtgggttgtgctgctggtggtaaggggccgaggagggcggaggtgatcatgcagtggttttcgcagacgcaagctgggccagcgacggagaacgacatccgcgccgccgtcggcgacaactccggcacgagcaaagcgatacgatggctgttgaagcaggagggcggcttgcggcgtgcaggcaatggtggtgccctggatccgtatgtttatatggcgtttaccagcctaggtggaagtccctggctcgctgtgctgcagcctggtccgcattgctgtcgc

SEQ ID NO: 1663 - DNA, 981 bp, Artificial sequence
  Mir resistant mutated nucleotide sequence
atgccgaggccgcccacaatggtgatccaggacgactacatcgacatggacctgaccccggcagccacaccggagccctcgccagcctcgccccgcttcgagttccagagcgccggcgccggcgccgccggcgacaggcatagggaggcggcgttcgcgtcccccgcggacgagctgttctacaagggcaacctgctgccgctccacctgccgccgcggctgcagctcgtgcagaggctcctccaggaccaggagcagccgccgccgctgcgaggggcgaagcgggatgcggagtcggatgccacggcggcggcggcggcagagcgaggagacgccgacgctgccgctgccgccagcaaggtgtgcgccgccaagaagccgtcttgggccaagaagctcaaggtggttaagcggtgggcgtcgaaggagtacatccggtcgctcttcctggccaggccgccgttgccgagcgacatcgtcgccgccgccggtggcgccagcgccagcggccacggcatcggcagcgtcagcgcgagggggagcgtcctagagcaggaggaggtgtgccagtgccagcaccgcaagtccttctccggcatcatccgccgggtgcgcctcgtggcgaccaaggcgcctgggacctcgccgctgtgctcctccagcagtagcagtagtagcagcagtacgccgtcgtgccgcaacgcaaacgggttcttcttccggacgccggcgtcggcggcgggggcgacgccggcgctgaagcggagcagcagcgccgggtcgtccgaggagggcgccatccagggcgccatcgcgcactgcaagcgttcccagctgctgcagcccgggatggtggcctcggcggcggcgcggaggagcgtcagcgacgtcatgttctactcggtgaccaacacgcccagagcctcttccgtgaccgccggcgaggtggcgcaggagaggaggcaggagatgtgcaggggc

SEQ ID NO: 1664 - DNA, 981 bp, Artificial sequence
  Mir resistant mutated nucleotide sequence
atgccgaggccgcccacaatggtgatccaggacgactacatcgacatggacctgaccccggcagccacaccggagccctcgccagcctcgccccgcttcgagttccagagcgccggcgccggcgccgccggcgacaggcatagggaggcggcgttcgcgtcccccgcggacgagctgttctacaagggcaacctgctgccgctccacctgccgccgcggctgcagctcgtgcagaggctcctccaggaccaggagcagccgccgccgctgcgaggggcgaagcgggatgcggagtcggatgccacggcggcggcggcggcagagcgaggagacgccgacgctgccgctgccgccagcaaggtgtgcgccgccaagaagccgtcttgggccaagaagctcaaggtggttaagcggtgggcgtcgaaggagtacatccggtcgctcttcctggccaggccgccgttgccgagcgacatcgtcgccgccgccggtggcgccagcgccagcggccacggcatcggcagcgtcagcgcgagggggagcgtcctagagcaggaggaggtgtgccagtgccagcaccgcaagtccttctccggcatcatccgccgggtgcgcctcgtggcgaccaaggcgcctgggacctcgccgctgtgctcctcctcgagttcgagtagttcgtcgagtacgccgtcgtgccgcaacgcaaacgggttcttcttccggacgccggcgtcggcggcgggggcgacgccggcgctgaagcggagcagcagcgccgggtcgtccgaggagggcgccatccagggcgccatcgcgcactgcaagcgttcccagctgctgcagcccgggatggtggcctcggcggcggcgcggaggagcgtcagcgacgtcatgttctactcggtgaccaacacgcccagagcctcttccgtgaccgccggcgaggtggcgcaggagaggaggcaggagatgtgcaggggc

SEQ ID NO: 1665 - DNA, 981 bp, Artificial sequence; identical to SEQ ID NO: 1664
  Mir resistant mutated nucleotide sequence

SEQ ID NO: 1666 - DNA, 981 bp, Artificial sequence; identical to SEQ ID NO: 1664
  Mir resistant mutated nucleotide sequence

SEQ ID NO: 1667 - DNA, 981 bp, Artificial sequence; identical to SEQ ID NO: 1664
  Mir resistant mutated nucleotide sequence

SEQ ID NO: 1668 - DNA, 1704 bp, Artificial sequence
  Mir resistant mutated nucleotide sequence
atgggtttgcagatgatccatggcaggccctgtgcactatgttgtccaagtagttcctcctcgtcctccgccttgtggatgaggatgcaggcccagctgcccccaaagcagtctcaccatccattgaacggaggaagggcaatctcctctgaatccctcgcggcactggcatggcatttcctgctaaggcgtcgcagcagggacggtgccacagctctcgcatcttcatccggggtgcttcaaatcgcagaggacaaatcatctgcggccaacttgacaaagcacaaggtgagtgcagaaaggaagctcctcaacgacgctcttgacagaactggtgtgcgatatgagactgagagctggatggatgaagagacatcgtcctggatggacagggatctcacggacagcgatttgcggtaccgcttgctaatgcagaacctcgaggaactggagaccagcttggttggtaaagacctggagatggacattcttgagcagcttggggctttgggatcgttcaacgcttctgtggccaggggtgtctcggcgttacatggtcgaccagatggctctctgcttgatgatccggagccggagacgactcctctggatgcggggcaagaagacagccaaatggtcgtcgtccggagtggcaagagccaggagaggaagctgagaaggatgagagcatcatcagatgagaaaggatccaggacctcggtgaaggtgaacccaccacgaagacccaagaaatcccgtaaggcgagtagcagccagtttatatccgagtggaaaagtcacccaggccaaaggaggatcattgtgcgtgagcaatcagcactgctgtccaccatcaaggaatgtgcaggtcttgagaagataagggagaagatggtgaaggaagggcaggaggtgagctaccacaggtgggcggaggcagctggggtggacgaggcagagctggtgagcaggctgcaggcaggttactgctgccgggacaggctactggtgaccaccgagtggctggtcaggtgcatcgcgagaacatacaccggcatggggacggccttggacgatctgcttcaggctgggaagatgggcgttcttgacggcgccgagaagttcgacagccggaaggggtgcaggttctccacgtacgtcaagtactggatcaggaaagggatgctcgctctgctggctgaaaactcaggagtcaccctgctgcctgcaagaatggagagcatcatgcgcaaggtgaaggaggcgcggcgtgggatccggtacaggcagggcaggaacccgtcggactcagaggttgccgccgccgtgggcgtgtcggtagccaacgtgaggctggcgcgcaagtgctctcgcagggccgtctcgctctactcggaggtcgcgatcggacaggacgtcaagttcgcggaggtgatcccggacgagtcggcgtctccggacgaggcggcgctgttccggggccagctgagggagcggctgctgctggtgctgggcaggctgcccgcgcgggaaggacgcgtgctgcggctgcggcacgggctggaggacgggcggtgcaggtcgctggaggagatcggcggcatctacggcgtctccaaggagtggatcaggaagatcgagaagtcggccatggccaggctccgggacgacgacgccgtgcgccgcgacctccacgacttcgtc

SEQ ID NO: 1669 - DNA, 1704 bp, Artificial sequence
  Mir resistant mutated nucleotide sequence
atgggtttgcagatgatccatggcaggccctgcgcactatgctgcccaagtagttcctcctcgtcctccgccttgtggatgaggatgcaggcccagctgcccccaaagcagtctcaccatccattgaacggaggaagggcaatctcctctgaatccctcgcggcactggcatggcatttcctgctaaggcgtcgcagcagggacggtgccacagctctcgcatcttcatccggggtgcttcaaatcgcagaggacaaatcatctgcggccaacttgacaaagcacaaggtgagtgcagaaaggaagctcctcaacgacgctcttgacagaactggtgtgcgatatgagactgagagctggatggatgaagagacatcgtcctggatggacagggatctcacggacagcgatttgcggtaccgcttgctaatgcagaacctcgaggaactggagaccagcttggttggtaaagacctggagatggacattcttgagcagcttggggctttgggatcgttcaacgcttctgtggccaggggtgtctcggcgttacatggtcgaccagatggctctctgcttgatgatccggagccggagacgactcctctggatgcggggcaagaagacagccaaatggtcgtcgtccggagtggcaagagccaggagaggaagctgagaaggatgagagcatcatcagatgagaaaggatccaggacctcggtgaaggtgaacccaccacgaagacccaagaaatcccgtaaggcgagtagcagccagtttatatccgagtggaaaagtcacccaggccaaaggaggatcattgtgcgtgagcaatcagcactgctgtccaccatcaaggaatgtgcaggtcttgagaagataagggagaagatggtgaaggaagggcaggaggtgagctaccacaggtgggcggaggcagctggggtggacgaggcagagctggtgagcaggctgcaggcaggttactgctgccgggacaggctactggtgaccaccgagtggctggtcaggtgcatcgcgagaacatacaccggcatggggacggccttggacgatctgcttcaggctgggaagatgggcgttcttgacggcgccgagaagttcgacagccggaaggggtgcaggttctccacgtacgtcaagtactggatcaggaaagggatgctcgctctgctggctgaaaactcaggagtcaccctgctgcctgcaagaatggagagcatcatgcgcaaggtgaaggaggcgcggcgtgggatccggtacaggcagggcaggaacccgtcggactcagaggttgccgccgccgtgggcgtgtcggtagccaacgtgaggctggcgcgcaagtgctctcgcagggccgtctcgctctactcggaggtcgcgatcggacaggacgtcaagttcgcggaggtgatcccggacgagtcggcgtctccggacgaggcggcgctgttccggggccagctgagggagcggctgctgctggtgctgggcaggctgcccgcgcgggaaggacgcgtgctgcggctgcggcacgggctggaggacgggcggtgcaggtcgctggaggagatcggcggcatctacggcgtctccaaggagtggatcaggaagatcgagaagtcggccatggccaggctccgggacgacgacgccgtgcgccgcgacctccacgacttcgtc

SEQ ID NO: 1670 - DNA, 1704 bp, Artificial sequence
  Mir resistant mutated nucleotide sequence
atgggtttgcagatgatccatggcaggccctgtgccctatgttgtccaagtagttcctcctcgtcctccgccttgtggatgaggatgcaggcccagctgcccccaaagcagtctcaccatccattgaacggaggaagggcaatctcctctgaatccctcgcggcactggcatggcatttcctgctaaggcgtcgcagcagggacggtgccacagctctcgcatcttcatccggggtgcttcaaatcgcagaggacaaatcatctgcggccaacttgacaaagcacaaggtgagtgcagaaaggaagctcctcaacgacgctcttgacagaactggtgtgcgatatgagactgagagctggatggatgaagagacatcgtcctggatggacagggatctcacggacagcgatttgcggtaccgcttgctaatgcagaacctcgaggaactggagaccagcttggttggtaaagacctggagatggacattcttgagcagcttggggctttgggatcgttcaacgcttctgtggccaggggtgtctcggcgttacatggtcgaccagatggctctctgcttgatgatccggagccggagacgactcctctggatgcggggcaagaagacagccaaatggtcgtcgtccggagtggcaagagccaggagaggaagctgagaaggatgagagcatcatcagatgagaaaggatccaggacctcggtgaaggtgaacccaccacgaagacccaagaaatcccgtaaggcgagtagcagccagtttatatccgagtggaaaagtcacccaggccaaaggaggatcattgtgcgtgagcaatcagcactgctgtccaccatcaaggaatgtgcaggtcttgagaagataagggagaagatggtgaaggaagggcaggaggtgagctaccacaggtgggcggaggcagctggggtggacgaggcagagctggtgagcaggctgcaggcaggttactgctgccgggacaggctactggtgaccaccgagtggctggtcaggtgcatcgcgagaacatacaccggcatggggacggccttggacgatctgcttcaggctgggaagatgggcgttcttgacggcgccgagaagttcgacagccggaaggggtgcaggttctccacgtacgtcaagtactggatcaggaaagggatgctcgctctgctggctgaaaactcaggagtcaccctgctgcctgcaagaatggagagcatcatgcgcaaggtgaaggaggcgcggcgtgggatccggtacaggcagggcaggaacccgtcggactcagaggttgccgccgccgtgggcgtgtcggtagccaacgtgaggctggcgcgcaagtgctctcgcagggccgtctcgctctactcggaggtcgcgatcggacaggacgtcaagttcgcggaggtgatcccggacgagtcggcgtctccggacgaggcggcgctgttccggggccagctgagggagcggctgctgctggtgctgggcaggctgcccgcgcgggaaggacgcgtgctgcggctgcggcacgggctggaggacgggcggtgcaggtcgctggaggagatcggcggcatctacggcgtctccaaggagtggatcaggaagatcgagaagtcggccatggccaggctccgggacgacgacgccgtgcgccgcgacctccacgacttcgtc

SEQ ID NO: 1671 - DNA, 1704 bp, Artificial sequence
  Mir resistant mutated nucleotide sequence
atgggtttgcagatgatccatggcaggccctgtgcattgtgttgtccaagtagttcctcctcgtcctccgccttgtggatgaggatgcaggcccagctgcccccaaagcagtctcaccatccattgaacggaggaagggcaatctcctctgaatccctcgcggcactggcatggcatttcctgctaaggcgtcgcagcagggacggtgccacagctctcgcatcttcatccggggtgcttcaaatcgcagaggacaaatcatctgcggccaacttgacaaagcacaaggtgagtgcagaaaggaagctcctcaacgacgctcttgacagaactggtgtgcgatatgagactgagagctggatggatgaagagacatcgtcctggatggacagggatctcacggacagcgatttgcggtaccgcttgctaatgcagaacctcgaggaactggagaccagcttggttggtaaagacctggagatggacattcttgagcagcttggggctttgggatcgttcaacgcttctgtggccaggggtgtctcggcgttacatggtcgaccagatggctctctgcttgatgatccggagccggagacgactcctctggatgcggggcaagaagacagccaaatggtcgtcgtccggagtggcaagagccaggagaggaagctgagaaggatgagagcatcatcagatgagaaaggatccaggacctcggtgaaggtgaacccaccacgaagacccaagaaatcccgtaaggcgagtagcagccagtttatatccgagtggaaaagtcacccaggccaaaggaggatcattgtgcgtgagcaatcagcactgctgtccaccatcaaggaatgtgcaggtcttgagaagataagggagaagatggtgaaggaagggcaggaggtgagctaccacaggtgggcggaggcagctggggtggacgaggcagagctggtgagcaggctgcaggcaggttactgctgccgggacaggctactggtgaccaccgagtggctggtcaggtgcatcgcgagaacatacaccggcatggggacggccttggacgatctgcttcaggctgggaagatgggcgttcttgacggcgccgagaagttcgacagccggaaggggtgcaggttctccacgtacgtcaagtactggatcaggaaagggatgctcgctctgctggctgaaaactcaggagtcaccctgctgcctgcaagaatggagagcatcatgcgcaaggtgaaggaggcgcggcgtgggatccggtacaggcagggcaggaacccgtcggactcagaggttgccgccgccgtgggcgtgtcggtagccaacgtgaggctggcgcgcaagtgctctcgcagggccgtctcgctctactcggaggtcgcgatcggacaggacgtcaagttcgcggaggtgatcccggacgagtcggcgtctccggacgaggcggcgctgttccggggccagctgagggagcggctgctgctggtgctgggcaggctgcccgcgcgggaaggacgcgtgctgcggctgcggcacgggctggaggacgggcggtgcaggtcgctggaggagatcggcggcatctacggcgtctccaaggagtggatcaggaagatcgagaagtcggccatggccaggctccgggacgacgacgccgtgcgccgcgacctccacgacttcgtc

SEQ ID NO: 1672 - DNA, 1704 bp, Artificial sequence; identical to SEQ ID NO: 1669
  Mir resistant mutated nucleotide sequence

SEQ ID NO: 1673 - DNA, 1449 bp, Artificial sequence
  Mir resistant mutated nucleotide sequence
atggaggatcaggcgctggcgccgctgctgcagccgctcccgctcggcgaaacgggggccatcaaggggcgcgcgaggcgggcggcgctggagtggtgggtggagtcgaagaagctatggcacatcgtgggcccggccatcttccaacggatcgcgctgtacggggtcaacgtcgtcacgcagtccttcatcggccacctcggcgacctcgagctcgccgccttctccattgctgccaccgtcgtcgggggcttcaacttcggtttcctgctgggaatggcgagcgcgctggagacgctgtgcgggcaggcgttcggcgccaagaagcaccacatgctgggggtgtacctgcagcgctcctggatcgtgctcctcatcttcgccgccgcgctgacgccgacgtacatcttcatggaggacctgctgctgctgatcgggcagtccccggagctgtcgcggctggcggggcagatgagcgtgtggctgctcccgcagcacttcgccatggcgatgctgctcccgctcacgcggttcctgcagagccagctgaagaactgggtgaccgcgatcaccgcggccgtcgcgctcgccatccacgtcgtcgccacctacgtgctagtgcgtctcctcgacttcggcatcgtcggggccgtcgcctccgcggacatggcgtggtggctggtcgtgctgggccagtacgtctacgtcgtcggcggctggtgcccgctgtcgtggaaggggttcaccatggaggcgttcgccgacttctgggagttcatcaagctctcctcggcctccggagtgatgctctgcttggagaactggtactaccgagtgttggtgttgctgacagggtacctggacaacgctgaaatcgctgtggatgcactctccatatgtcagacgatcaacggatgggagatgatgatcccgttcggcttcttagcagcaaccggggtgcgagtcgcaaatgagctcggcgcagggagcggcaaaggtgcgcgcttcgccatcgtggtgtccatcacgacgtccgtggtaataggattagtattttggtgtctcatcctctacttcgacgacaagatcgcgcttctcttcacgtccagcgcggtcgtgctcgacgccgtgcaccacctgtccgtgctgctcgcattcaccatcctgctcaacagtgtgcagcccgtcctctcaggggtggccgttggttcaggatggcaagcactggtcgcctacgtcaacgtcggcagctactacctcatcggagttcccttgggtatcgtactcggttggccgctgcacttcggagtagggggaatctggtccgggatgattggagggaccgccgttcaaacgctcatactggcatacctcactgccaaatgtgattggcacgaagaggcgaagttagctagtatgagaatgaagaagtgggccgacgagtcgaaa

SEQ ID NO: 1674 - DNA, 1449 bp, Artificial sequence
  Mir resistant mutated nucleotide sequence
atggaggatcaggcgctggcgccgctgctgcagccgctcccgctcggcgaaacgggggccatcaaggggcgcgcgaggcgggcggcgctggagtggtgggtggagtcgaagaagctatggcacatcgtgggcccggccatcttccaacggatcgcgctgtacggggtcaacgtcgtcacgcagtccttcatcggccacctcggcgacctcgagctcgccgccttctccattgctgccaccgtcgtcgggggcttcaacttcggtttcctgctgggaatggcgagcgcgctggagacgctgtgcgggcaggcgttcggcgccaagaagcaccacatgctgggggtgtacctgcagcgctcctggatcgtgctcctcatcttcgccgccgcgctgacgccgacgtacatcttcatggaggacctgctgctgctgatcgggcagtccccggagctgtcgcggctggcggggcagatgagcgtgtggctgctcccgcagcacttcgccatggcgatgctgctcccgctcacgcggttcctgcagagccagctgaagaactgggtgaccgcgatcaccgcggccgtcgcgctcgccatccacgtcgtcgccacctacgtgctagtgcgtctcctcgacttcggcatcgtcggggccgtcgcctccgcggacatggcgtggtggctggtcgtgctgggccagtacgtctacgtcgtcggcggctggtgcccgctgtcgtggaaggggttcaccatggaggcgttcgccgacttctgggagttcatcaagctctcctcggcctccggagtgatgctctgcttggagaactggtactaccgagtgttggtgttgctgacagggtacctggacaacgctgaaatcgctgtggatgcactctccatatgtcagacgatcaacggatgggagatgatgatcccgttcggcttcttagcagcaaccggggtgcgagtcgcaaatgagctcggcgcagggagcggcaaaggtgcgcgcttcgccatcgtggtgtccatcacgacgtccgtggtgataggattagtgttttggtgtctcatcctctacttcgacgacaagatcgcgcttctcttcacgtccagcgcggtcgtgctcgacgccgtgcaccacctgtccgtgctgctcgcattcaccatcctgctcaacagtgtgcagcccgtcctctcaggggtggccgttggttcaggatggcaagcactggtcgcctacgtcaacgtcggcagctactacctcatcggagttcccttgggtatcgtactcggttggccgctgcacttcggagtagggggaatctggtccgggatgattggagggaccgccgttcaaacgctcatactggcatacctcactgccaaatgtgattggcacgaagaggcgaagttagctagtatgagaatgaagaagtgggccgacgagtcgaaa

SEQ ID NO: 1675 - DNA, 1449 bp, Artificial sequence; identical to SEQ ID NO: 1674
  Mir resistant mutated nucleotide sequence

SEQ ID NO: 1676 - DNA, 1449 bp, Artificial sequence; identical to SEQ ID NO: 1674
  Mir resistant mutated nucleotide sequence

SEQ ID NO: 1677 - DNA, 1449 bp, Artificial sequence
  Mir resistant mutated nucleotide sequence
atggaggatcaggcgctggcgccgctgctgcagccgctcccgctcggcgaaacgggggccatcaaggggcgcgcgaggcgggcggcgctggagtggtgggtggagtcgaagaagctatggcacatcgtgggcccggccatcttccaacggatcgcgctgtacggggtcaacgtcgtcacgcagtccttcatcggccacctcggcgacctcgagctcgccgccttctccattgctgccaccgtcgtcgggggcttcaacttcggtttcctgctgggaatggcgagcgcgctggagacgctgtgcgggcaggcgttcggcgccaagaagcaccacatgctgggggtgtacctgcagcgctcctggatcgtgctcctcatcttcgccgccgcgctgacgccgacgtacatcttcatggaggacctgctgctgctgatcgggcagtccccggagctgtcgcggctggcggggcagatgagcgtgtggctgctcccgcagcacttcgccatggcgatgctgctcccgctcacgcggttcctgcagagccagctgaagaactgggtgaccgcgatcaccgcggccgtcgcgctcgccatccacgtcgtcgccacctacgtgctagtgcgtctcctcgacttcggcatcgtcggggccgtcgcctccgcggacatggcgtggtggctggtcgtgctgggccagtacgtctacgtcgtcggcggctggtgcccgctgtcgtggaaggggttcaccatggaggcgttcgccgacttctgggagttcatcaagctctcctcggcctccggagtgatgctctgcttggagaactggtactaccgagtgttggtgttgctgacagggtacctggacaacgctgaaatcgctgtggatgcactctccatatgtcagacgatcaacggatgggagatgatgatcccgttcggcttcttagcagcaaccggggtgcgagtcgcaaatgagctcggcgcagggagcggcaaaggtgcgcgcttcgccatcgtggtgtccatcacgacgtccgtggtaatcggattagtattttggtgtctcatcctctacttcgacgacaagatcgcgcttctcttcacgtccagcgcggtcgtgctcgacgccgtgcaccacctgtccgtgctgctcgcattcaccatcctgctcaacagtgtgcagcccgtcctctcaggggtggccgttggttcaggatggcaagcactggtcgcctacgtcaacgtcggcagctactacctcatcggagttcccttgggtatcgtactcggttggccgctgcacttcggagtagggggaatctggtccgggatgattggagggaccgccgttcaaacgctcatactggcatacctcactgccaaatgtgattggcacgaagaggcgaagttagctagtatgagaatgaagaagtgggccgacgagtcgaaa

SEQ ID NO: 1678 - DNA, 2415 bp, Artificial sequence
  Mir resistant mutated nucleotide sequence
atggatcttgagttcgggagagccctgagatccccaaagagggactcatggaagaccaccttgctgctggcctaccagagcttgggggtggtctatggagacctcagcatatctccgctgtacgtgtactcgagcaccttcgccgaggacatccagcactcggacacgaacgaggagatctttggcgtattaagttttgtattttggacactcaccttgatccctctcatcaagtacgtctccgttgtcctacgagctgacgacaatggcgagggaggaacgtttgccctgtactctctgatttgcaggcacgccaatgtgagccttctcccgaaccggcagattgctgatgaggagctttccacctataaactggaatgccctcctgaaataaccgacaagtcccggatcaaagtgtggcttgagaagcacaggaagctgcgcgttgctctactgatcatggttatgattggcacatgcatggttatcggggatggcgttctcacgccagcaatatctgtgttctcagcagtttcaggccttgagttttctctgtccaaggatcaccatgaatatgctgtcattccaataacctgtgtcatattagcattcctatttgccctccaacactatggtacacaccgggttggattcctctttgccccgatagttctagcctggctattctgcatgagtgctcttggcctttataatatcatccactggaatcctcacatctacaaagctctaaatccttctcatatgttcaagttcttaaaaaagactagaaagtatggttggatgtcacttggtggaatcttgctctgcatgacagggtcggaagcaatgtttgcagatcttggacacttctcatacagtgcaatccagcttgctttcacttgtctagtttaccccgcactgattctggcatatatgggccaagctgcttacttatcaagacatcatgacttttactctggttcaaaagttggattttacatcgcagttccagataagatcagatggccagtgctcatattggcaatcttggcttcggtagttggaagtcaagcgatcatcagcggaacattctcaatcatcaatcagagccagtccctgagctgctttcctcgagtaaaagttgtacacacatctgagaaaattcatggccaaatatacattcctgagatcaattggttgctcatgatcctctgcattgctgtgaccgttggatttagggacaccaaacacatgggaaatgcatctggtttggctgtgatcacagtgatgctggtgaccacgttcctgacgtccttggtcatcgttctgtgctggcacaggccaccgctgctggcattggctttcctcctgttctttggatccatcgaggcgctctacttctctgcgtccctgatcaagttcctggaaggcgcgtggctgcccatcctgctggcgctgatcctgatggcggtcatgctcatctggcactacaccaccatcaagaagtacgagttcgacctgcacaacaaggtgacactggagtggctcctcgccctcggggacaagctgggcatggtccgcgtccccggcatcggcctcgtgtacacggacctgacgtcgggcgtcccggccaacttctcccggttcgtgaccaacctcccggcgttccaccaggtgctggtgttcgtgtgcgtcaagtcggtgccggtgccgtacgtgttcccggcggagcggtacctcatcgggcgcgtcggcccgccgggccaccgctcgtaccggtgcatcgtgcgctacggctaccgcgacgtgcaccaggacgtggactcgttcgagacggagctcgtggagaccctggccacgttcataaagctggacgcctcgtaccggtgcagcgaggccagcgagcgggagcaggagcaggagctggagcccggcgagcgggagcggcggctgaccgtgatcgcgagccacccgctcaggcaccgcgccagctacgacctccaggacagcatgcagcactcggcagcatccacggtggagatgcgcgccacggccaccgccgcctccgctgacgacgacgacgacagacggagccccgggcgcgcggagatcagctcggcggcagcgggggcgaagcaggtgcggttcttcatcgacagccacgtggcgagcccggagttcgcggagaacaagcaggtggcggaggagctggaggcgctggcggcggcccgggagtgcggcacggcgttcatcctggggcactcgcacgtccagtgcaagcccgggtcgtcggtgctcaagcggctggcggtggacgtcgggtacaacttcctgcggcgcaactgccgcggcccggacgttgcgctgcgcgtgcccccggcgtcgctgctggaggtcggcatggtgtacgtgctt

SEQ ID NO: 1679 - DNA, 2415 bp, Artificial sequence
  Mir resistant mutated nucleotide sequence
atggatcttgagttcgggagagccctgagatccccaaagagggactcatggaagaccaccttgctgctggcctaccagagcttgggggtggtctatggagacctcagcatatctccgctgtacgtgtactcgagcaccttcgccgaggacatccagcactcggacacgaacgaggagatctttggcgtgttaagttttgtgttttggacactcaccttgatccctctcatcaagtacgtctccgttgtcctacgagctgacgacaatggcgagggaggaacgtttgccctgtactctctgatttgcaggcacgccaatgtgagccttctcccgaaccggcagattgctgatgaggagctttccacctataaactggaatgccctcctgaaataaccgacaagtcccggatcaaagtgtggcttgagaagcacaggaagctgcgcgttgctctactgatcatggttatgattggcacatgcatggttatcggggatggcgttctcacgccagcaatatctgtgttctcagcagtttcaggccttgagttttctctgtccaaggatcaccatgaatatgctgtcattccaataacctgtgtcatattagcattcctatttgccctccaacactatggtacacaccgggttggattcctctttgccccgatagttctagcctggctattctgcatgagtgctcttggcctttataatatcatccactggaatcctcacatctacaaagctctaaatccttctcatatgttcaagttcttaaaaaagactagaaagtatggttggatgtcacttggtggaatcttgctctgcatgacagggtcggaagcaatgtttgcagatcttggacacttctcatacagtgcaatccagcttgctttcacttgtctagtttaccccgcactgattctggcatatatgggccaagctgcttacttatcaagacatcatgacttttactctggttcaaaagttggattttacatcgcagttccagataagatcagatggccagtgctcatattggcaatcttggcttcggtagttggaagtcaagcgatcatcagcggaacattctcaatcatcaatcagagccagtccctgagctgctttcctcgagtaaaagttgtacacacatctgagaaaattcatggccaaatatacattcctgagatcaattggttgctcatgatcctctgcattgctgtgaccgttggatttagggacaccaaacacatgggaaatgcatctggtttggctgtgatcacagtgatgctggtgaccacgttcctgacgtccttggtcatcgttctgtgctggcacaggccaccgctgctggcattggctttcctcctgttctttggatccatcgaggcgctctacttctctgcgtccctgatcaagttcctggaaggcgcgtggctgcccatcctgctggcgctgatcctgatggcggtcatgctcatctggcactacaccaccatcaagaagtacgagttcgacctgcacaacaaggtgacactggagtggctcctcgccctcggggacaagctgggcatggtccgcgtccccggcatcggcctcgtgtacacggacctgacgtcgggcgtcccggccaacttctcccggttcgtgaccaacctcccggcgttccaccaggtgctggtgttcgtgtgcgtcaagtcggtgccggtgccgtacgtgttcccggcggagcggtacctcatcgggcgcgtcggcccgccgggccaccgctcgtaccggtgcatcgtgcgctacggctaccgcgacgtgcaccaggacgtggactcgttcgagacggagctcgtggagaccctggccacgttcataaagctggacgcctcgtaccggtgcagcgaggccagcgagcgggagcaggagcaggagctggagcccggcgagcgggagcggcggctgaccgtgatcgcgagccacccgctcaggcaccgcgccagctacgacctccaggacagcatgcagcactcggcagcatccacggtggagatgcgcgccacggccaccgccgcctccgctgacgacgacgacgacagacggagccccgggcgcgcggagatcagctcggcggcagcgggggcgaagcaggtgcggttcttcatcgacagccacgtggcgagcccggagttcgcggagaacaagcaggtggcggaggagctggaggcgctggcggcggcccgggagtgcggcacggcgttcatcctggggcactcgcacgtccagtgcaagcccgggtcgtcggtgctcaagcggctggcggtggacgtcgggtacaacttcctgcggcgcaactgccgcggcccggacgttgcgctgcgcgtgcccccggcgtcgctgctggaggtcggcatggtgtacgtgctt

SEQ ID NO: 1680 - DNA, 2415 bp, Artificial sequence; identical to SEQ ID NO: 1679
  Mir resistant mutated nucleotide sequence

SEQ ID NO: 1681 - DNA, 2415 bp, Artificial sequence; identical to SEQ ID NO: 1679
  Mir resistant mutated nucleotide sequence

SEQ ID NO: 1682 - DNA, 2415 bp, Artificial sequence
  Mir resistant mutated nucleotide sequence
atggatcttgagttcgggagagccctgagatccccaaagagggactcatggaagaccaccttgctgctggcctaccagagcttgggggtggtctatggagacctcagcatatctccgctgtacgtgtactcgagcaccttcgccgaggacatccagcactcggacacgaacgaggagatctttggcgtactcagttttgtattttggacactcaccttgatccctctcatcaagtacgtctccgttgtcctacgagctgacgacaatggcgagggaggaacgtttgccctgtactctctgatttgcaggcacgccaatgtgagccttctcccgaaccggcagattgctgatgaggagctttccacctataaactggaatgccctcctgaaataaccgacaagtcccggatcaaagtgtggcttgagaagcacaggaagctgcgcgttgctctactgatcatggttatgattggcacatgcatggttatcggggatggcgttctcacgccagcaatatctgtgttctcagcagtttcaggccttgagttttctctgtccaaggatcaccatgaatatgctgtcattccaataacctgtgtcatattagcattcctatttgccctccaacactatggtacacaccgggttggattcctctttgccccgatagttctagcctggctattctgcatgagtgctcttggcctttataatatcatccactggaatcctcacatctacaaagctctaaatccttctcatatgttcaagttcttaaaaaagactagaaagtatggttggatgtcacttggtggaatcttgctctgcatgacagggtcggaagcaatgtttgcagatcttggacacttctcatacagtgcaatccagcttgctttcacttgtctagtttaccccgcactgattctggcatatatgggccaagctgcttacttatcaagacatcatgacttttactctggttcaaaagttggattttacatcgcagttccagataagatcagatggccagtgctcatattggcaatcttggcttcggtagttggaagtcaagcgatcatcagcggaacattctcaatcatcaatcagagccagtccctgagctgctttcctcgagtaaaagttgtacacacatctgagaaaattcatggccaaatatacattcctgagatcaattggttgctcatgatcctctgcattgctgtgaccgttggatttagggacaccaaacacatgggaaatgcatctggtttggctgtgatcacagtgatgctggtgaccacgttcctgacgtccttggtcatcgttctgtgctggcacaggccaccgctgctggcattggctttcctcctgttctttggatccatcgaggcgctctacttctctgcgtccctgatcaagttcctggaaggcgcgtggctgcccatcctgctggcgctgatcctgatggcggtcatgctcatctggcactacaccaccatcaagaagtacgagttcgacctgcacaacaaggtgacactggagtggctcctcgccctcggggacaagctgggcatggtccgcgtccccggcatcggcctcgtgtacacggacctgacgtcgggcgtcccggccaacttctcccggttcgtgaccaacctcccggcgttccaccaggtgctggtgttcgtgtgcgtcaagtcggtgccggtgccgtacgtgttcccggcggagcggtacctcatcgggcgcgtcggcccgccgggccaccgctcgtaccggtgcatcgtgcgctacggctaccgcgacgtgcaccaggacgtggactcgttcgagacggagctcgtggagaccctggccacgttcataaagctggacgcctcgtaccggtgcagcgaggccagcgagcgggagcaggagcaggagctggagcccggcgagcgggagcggcggctgaccgtgatcgcgagccacccgctcaggcaccgcgccagctacgacctccaggacagcatgcagcactcggcagcatccacggtggagatgcgcgccacggccaccgccgcctccgctgacgacgacgacgacagacggagccccgggcgcgcggagatcagctcggcggcagcgggggcgaagcaggtgcggttcttcatcgacagccacgtggcgagcccggagttcgcggagaacaagcaggtggcggaggagctggaggcgctggcggcggcccgggagtgcggcacggcgttcatcctggggcactcgcacgtccagtgcaagcccgggtcgtcggtgctcaagcggctggcggtggacgtcgggtacaacttcctgcggcgcaactgccgcggcccggacgttgcgctgcgcgtgcccccggcgtcgctgctggaggtcggcatggtgtacgtgctt

SEQ ID NO: 1683 - DNA, 1467 bp, Artificial sequence
  Mir resistant mutated nucleotide sequence
atggaggacgaggcgacgtcggtggcggcgccgctgctgcggccgcgcggcggcgttgacgcggaggcggtgaagcagcagctgtggccggccggcgcgagggtggcgggggagtggtgggtggagtcgaagaagctgtggcgcgtcgtcgggccggccatcttccagcggatcgcgctgtacgggatcaacgtcgtctcgcaggcgttcatcggccacatgggcgacctcgagcttgccgccttctccatcgcctccaccgtcgtcgccggcttcaacttcggtttcctgctgggcatggcgagcgcgctggagacgctgtgcgggcaggcgttcggcgccaagaagtaccacatgctgggcgtgtacctgcagcggtcgtggctggtgctcctcatgttcgccgtcgcgctgacgccgacgtacgtgctcatggaggacctgctgctgctgatcgggcagccggccgacctcgccagcctcgccggcaagatgagcgtctggctgctgccgcagcacttcgccatggcgatgctgctcccgctcacgcggttcctgcagtcccagctcaagaactgggtcaccgcggtcaccgccggcgtcgcgctcgcgctccacctcgtgatcacctacctgctcgtcaacaccctccacctgggcctcctcggcgccgtcgccgccgccaacgtggcgtggtggatcgtcgtgctggggcagttggtctacgtcgtcggcggctggtgcccgctgtcgtggaagggattctccatggaagcgttcgccgacttctgggagttcatcaagctctcctcggcctccggggtgatgctttgcttggagaactggtactacagggtgttggtgttgcttacagggtacctgaataacgctgaaatcgctgtggatgcactctccatatgcttgacgatcaacggatgggagatgatgattccttttggcttcttggctgcaactggcgtgcgggtggcaaacgagctcggcgccggcagcggcaagggcgcgcggttcgccatcgtggtgtccgtcaccacctccgtggcaataggattagtattttggtgtctcatcattgcctacaacgacaagatcgctctcctcttctcgtcgagcaaggtggtgctcgacgccgtcagcgacctgtccgtgctgctcgccttcaccgtcctcctcaacagcgtgcagcccgtcctctcaggtgtggccattggctcagggtggcaagcactcgtagcctacgtcaacgtcggtagctactacttggtcggagttcccatcggtgccatattgggctggccattgcatttcggagttgggggaatttggtccgggttgattggtggcacagctgttcagacactgatattagcctatctcactatcagctgtgattgggatgaagaggcaaagaaagcaagtacaaggatggaagtatgggccagctcaaaa

SEQ ID NO: 1684 - DNA, 1467 bp, Artificial sequence
  Mir resistant mutated nucleotide sequence
atggaggacgaggcgacgtcggtggcggcgccgctgctgcggccgcgcggcggcgttgacgcggaggcggtgaagcagcagctgtggccggccggcgcgagggtggcgggggagtggtgggtggagtcgaagaagctgtggcgcgtcgtcgggccggccatcttccagcggatcgcgctgtacgggatcaacgtcgtctcgcaggcgttcatcggccacatgggcgacctcgagcttgccgccttctccatcgcctccaccgtcgtcgccggcttcaacttcggtttcctgctgggcatggcgagcgcgctggagacgctgtgcgggcaggcgttcggcgccaagaagtaccacatgctgggcgtgtacctgcagcggtcgtggctggtgctcctcatgttcgccgtcgcgctgacgccgacgtacgtgctcatggaggacctgctgctgctgatcgggcagccggccgacctcgccagcctcgccggcaagatgagcgtctggctgctgccgcagcacttcgccatggcgatgctgctcccgctcacgcggttcctgcagtcccagctcaagaactgggtcaccgcggtcaccgccggcgtcgcgctcgcgctccacctcgtgatcacctacctgctcgtcaacaccctccacctgggcctcctcggcgccgtcgccgccgccaacgtggcgtggtggatcgtcgtgctggggcagttggtctacgtcgtcggcggctggtgcccgctgtcgtggaagggattctccatggaagcgttcgccgacttctgggagttcatcaagctctcctcggcctccggggtgatgctttgcttggagaactggtactacagggtgttggtgttgcttacagggtacctgaataacgctgaaatcgctgtggatgcactctccatatgcttgacgatcaacggatgggagatgatgattccttttggcttcttggctgcaactggcgtgcgggtggcaaacgagctcggcgccggcagcggcaagggcgcgcggttcgccatcgtggtgtccgtcaccacctccgtggcgataggattagtattttggtgtctcatcattgcctacaacgacaagatcgctctcctcttctcgtcgagcaaggtggtgctcgacgccgtcagcgacctgtccgtgctgctcgccttcaccgtcctcctcaacagcgtgcagcccgtcctctcaggtgtggccattggctcagggtggcaagcactcgtagcctacgtcaacgtcggtagctactacttggtcggagttcccatcggtgccatattgggctggccattgcatttcggagttgggggaatttggtccgggttgattggtggcacagctgttcagacactgatattagcctatctcactatcagctgtgattgggatgaagaggcaaagaaagcaagtacaaggatggaagtatgggccagctcaaaa

SEQ ID NO: 1685 - DNA, 1467 bp, Artificial sequence; identical to SEQ ID NO: 1684
  Mir resistant mutated nucleotide sequence

SEQ ID NO: 1686 - DNA, 1467 bp, Artificial sequence; identical to SEQ ID NO: 1684
  Mir resistant mutated nucleotide sequence

SEQ ID NO: 1687 - DNA, 1467 bp, Artificial sequence
  Mir resistant mutated nucleotide sequence
atggaggacgaggcgacgtcggtggcggcgccgctgctgcggccgcgcggcggcgttgacgcggaggcggtgaagcagcagctgtggccggccggcgcgagggtggcgggggagtggtgggtggagtcgaagaagctgtggcgcgtcgtcgggccggccatcttccagcggatcgcgctgtacgggatcaacgtcgtctcgcaggcgttcatcggccacatgggcgacctcgagcttgccgccttctccatcgcctccaccgtcgtcgccggcttcaacttcggtttcctgctgggcatggcgagcgcgctggagacgctgtgcgggcaggcgttcggcgccaagaagtaccacatgctgggcgtgtacctgcagcggtcgtggctggtgctcctcatgttcgccgtcgcgctgacgccgacgtacgtgctcatggaggacctgctgctgctgatcgggcagccggccgacctcgccagcctcgccggcaagatgagcgtctggctgctgccgcagcacttcgccatggcgatgctgctcccgctcacgcggttcctgcagtcccagctcaagaactgggtcaccgcggtcaccgccggcgtcgcgctcgcgctccacctcgtgatcacctacctgctcgtcaacaccctccacctgggcctcctcggcgccgtcgccgccgccaacgtggcgtggtggatcgtcgtgctggggcagttggtctacgtcgtcggcggctggtgcccgctgtcgtggaagggattctccatggaagcgttcgccgacttctgggagttcatcaagctctcctcggcctccggggtgatgctttgcttggagaactggtactacagggtgttggtgttgcttacagggtacctgaataacgctgaaatcgctgtggatgcactctccatatgcttgacgatcaacggatgggagatgatgattccttttggcttcttggctgcaactggcgtgcgggtggcaaacgagctcggcgccggcagcggcaagggcgcgcggttcgccatcgtggtgtccgtcaccacctccgtggcaatcggattagtattttggtgtctcatcattgcctacaacgacaagatcgctctcctcttctcgtcgagcaaggtggtgctcgacgccgtcagcgacctgtccgtgctgctcgccttcaccgtcctcctcaacagcgtgcagcccgtcctctcaggtgtggccattggctcagggtggcaagcactcgtagcctacgtcaacgtcggtagctactacttggtcggagttcccatcggtgccatattgggctggccattgcatttcggagttgggggaatttggtccgggttgattggtggcacagctgttcagacactgatattagcctatctcactatcagctgtgattgggatgaagaggcaaagaaagcaagtacaaggatggaagtatgggccagctcaaaa

SEQ ID NO: 1688 - DNA, 507 bp, Artificial sequence
  Mir resistant mutated nucleotide sequence
atgcaccccatgaacatgacgagctgcgaattcgccgccgtccgcctccctggccacccggcgctccggccgagccgcagtcgaccatctccgacgcccccgccgccacccgccgtagccaataagaaaccagctgcctcctccgtgcgttgcacgtcgtcccgccgcgacgatgcggagtttggctgcaacggcggcggcgggcgtatagtggacgaggggatggtcgtcctgcgccgacggatccacgagatggaagccgcggagcgcggctgggatcctcccgaggagtgggcggcgtgggagaaggaatggtacgccacgtacgacgccgacgtctgccagcagctcgtcggcgtcctccaggcgttcctcgtcaactcccggccaggcgtcggcgtgggcctcgtcgccgtgctcatgctcgcagttccggcctccgcctttgtattagtaagcttattattagatgcttcacgggcggtcgtctccaatctgcaccaccac

SEQ ID NO: 1689 - DNA, 507 bp, Artificial sequence
  Mir resistant mutated nucleotide sequence
atgcaccccatgaacatgacgagctgcgaattcgccgccgtccgcctccctggccacccggcgctccggccgagccgcagtcgaccatctccgacgcccccgccgccacccgccgtagccaataagaaaccagctgcctcctccgtgcgttgcacgtcgtcccgccgcgacgatgcggagtttggctgcaacggcggcggcgggcgtatagtggacgaggggatggtcgtcctgcgccgacggatccacgagatggaagccgcggagcgcggctgggatcctcccgaggagtgggcggcgtgggagaaggaatggtacgccacgtacgacgccgacgtctgccagcagctcgtcggcgtcctccaggcgttcctcgtcaactcccggccaggcgtcggcgtgggcctcgtcgccgtgctcatgctcgcagttccggcctccgcctttgtcttagtcagcttattattagatgcttcacgggcggtcgtctccaatctgcaccaccac

SEQ ID NO: 1690 - DNA, 507 bp, Artificial sequence; identical to SEQ ID NO: 1689
  Mir resistant mutated nucleotide sequence

SEQ ID NO: 1691 - DNA, 507 bp, Artificial sequence; identical to SEQ ID NO: 1689
  Mir resistant mutated nucleotide sequence

SEQ ID NO: 1692 - DNA, 507 bp, Artificial sequence
  Mir resistant mutated nucleotide sequence
atgcaccccatgaacatgacgagctgcgaattcgccgccgtccgcctccctggccacccggcgctccggccgagccgcagtcgaccatctccgacgcccccgccgccacccgccgtagccaataagaaaccagctgcctcctccgtgcgttgcacgtcgtcccgccgcgacgatgcggagtttggctgcaacggcggcggcgggcgtatagtggacgaggggatggtcgtcctgcgccgacggatccacgagatggaagccgcggagcgcggctgggatcctcccgaggagtgggcggcgtgggagaaggaatggtacgccacgtacgacgccgacgtctgccagcagctcgtcggcgtcctccaggcgttcctcgtcaactcccggccaggcgtcggcgtgggcctcgtcgccgtgctcatgctcgcagttccggcctccgcctttgtactcgtaagcctcctcctcgatgcttcacgggcggtcgtctccaatctgcaccaccac

SEQ ID NO: 1693 - DNA, 2010 bp, Artificial sequence
  Mir resistant mutated nucleotide sequence
atggaggcgaatccgaagaacaccttcacgatcaaagtggaggacgggaagcccgggaaggacggccggctggcggtcggaccggtgttccggagcgttctggccaaggatgggttcccgcagcttgagcctgacatgaagacatcatgggacgtgttcagggtagcagcagtcaagtatgccgacaaccggatgctcggatggcgtccgttcaaagatggagtgccagggccctacttgtggaaatcatacaaggagatctacgacgaggtgctgcaagcaggctctgcgttgcagaagctgggagtgcagccaggttcccgggtggggatctacggagcgaactgtccacaatggatcgtagccatgcaggcttgcaatggctatagtctagtctgtgtcccactgtacgatactttaggtgcgggagctgtcgactacatcatcgatcatgccgagatcgatgttgtcttcatacaggacaagaaaataaaagagatactgtccccaaactgcaagtctgccaagagactgaaagcattggtggcgttcacttcggcgacaactgaacagaacaaagaagcggatcaaattgggatcaaaatgtatgcctgggacgatttcttgaaagtggggaaggataatcctcgtcaaccttgccctccgcaagcaagtgacatctgcactgtcatgtacacgagtgggacaagcggacagcccaaaggtgtgatgctgacccatgaaagccacgccatgtatgtgaaaggggtggacctcttcatggaccagtttgatgataagatgacaacagatgatgtcttcctgtcgtttctcccgcttgctcacatccttgaccgcatgatcgaagagtatttctttcacaaaggggcctcaattggctactaccacggagatctgaatgccttgagggacgacattgtggagctgaagccgactctactggttggggtgccccgagtgtacgaaaggatttatgaaggtatcttgaaggccattgcggaactcagacctctaagaagggtcatctttaatgctttgtacaaccgcaaactggcaagcatgaaagcaggctactcgcacaaaaccgcttcacctttcgcggacatgctggcttttcgcaaggtcaaggcaaggcttggaggtcgtcttcgcttactgatttcaggaggggctccgttgagtaatgagatcgaggagttcatgagagtgaccacctgtgcatacttcatccaaggctatggtttaacagaaacactgggacctagcactgtctgctacatcgacgacatggccctggtcggaagcgctggtgtgcctgccacctacaccgaaattcggctggaagaagtgcccgagatgggttataatccactcggcgttccttcgcgtggtgaaatctgcatccggggaaaatccctcttcgctgggtactacaaaagtccagaactcacaaacgaagccatcgttgatgggtggtttcatacaggtgacattggagagatgaccccagacgggatcttgaaggtgattgacagaaaaaagaacatatttaagctgtcgcaaggggagtatgttgcggttgagtacctggagaaagtttatggcttccctccactcgttgaagatatctgggtatacggggacagtttcagatcaagtttagttgcagtagtcaatccacaccaagaaaacacaatgaagtgggcagagtccaatggctacaagggttcttttgatgaaatctgcaaacttgaaggactcaaagagtacatcctgaaagagctggcagccgttgcgcagaagaacaagctacgaggcttcgagtacatcaaaggcgtagtgttggatcctgtgccttttgacatcgagagggatttggtgactgcaacaatgaagaagaagagaaagaatatgctgaactattaccagtctgagattgacacaatatacaaaaagctggaggcgcagaagagtgctgccagagctaag

SEQ ID NO: 1694 - DNA, 2010 bp, Artificial sequence
  Mir resistant mutated nucleotide sequence
atggaggcgaatccgaagaacaccttcacgatcaaagtggaggacgggaagcccgggaaggacggccggctggcggtcggaccggtgttccggagcgttctggccaaggatgggttcccgcagcttgagcctgacatgaagacatcatgggacgtgttcagggtagcagcagtcaagtatgccgacaaccggatgctcggatggcgtccgttcaaagatggagtgccagggccctacttgtggaaatcatacaaggagatctacgacgaggtgctgcaagcaggctctgcgttgcagaagctgggagtgcagccaggttcccgggtggggatctacggagcgaactgtcctcaatggatcgtagccatgcaggcttgcaatggctatagtctagtctgtgtcccactgtacgatactttaggtgcgggagctgtcgactacatcatcgatcatgccgagatcgatgttgtcttcatacaggacaagaaaataaaagagatactgtccccaaactgcaagtctgccaagagactgaaagcattggtggcgttcacttcggcgacaactgaacagaacaaagaagcggatcaaattgggatcaaaatgtatgcctgggacgatttcttgaaagtggggaaggataatcctcgtcaaccttgccctccgcaagcaagtgacatctgcactgtcatgtacacgagtgggacaagcggacagcccaaaggtgtgatgctgacccatgaaagccacgccatgtatgtgaaaggggtggacctcttcatggaccagtttgatgataagatgacaacagatgatgtcttcctgtcgtttctcccgcttgctcacatccttgaccgcatgatcgaagagtatttctttcacaaaggggcctcaattggctactaccacggagatctgaatgccttgagggacgacattgtggagctgaagccgactctactggttggggtgccccgagtgtacgaaaggatttatgaaggtatcttgaaggccattgcggaactcagacctctaagaagggtcatctttaatgctttgtacaaccgcaaactggcaagcatgaaagcaggctactcgcacaaaaccgcttcacctttcgcggacatgctggcttttcgcaaggtcaaggcaaggcttggaggtcgtcttcgcttactgatttcaggaggggctccgttgagtaatgagatcgaggagttcatgagagtgaccacctgtgcatacttcatccaaggctatggtttaacagaaacactgggacctagcactgtctgctacatcgacgacatggccctggtcggaagcgctggtgtgcctgccacctacaccgaaattcggctggaagaagtgcccgagatgggttataatccactcggcgttccttcgcgtggtgaaatctgcatccggggaaaatccctcttcgctgggtactacaaaagtccagaactcacaaacgaagccatcgttgatgggtggtttcatacaggtgacattggagagatgaccccagacgggatcttgaaggtgattgacagaaaaaagaacatatttaagctgtcgcaaggggagtatgttgcggttgagtacctggagaaagtttatggcttccctccactcgttgaagatatctgggtatacggggacagtttcagatcaagtttagttgcagtagtcaatccacaccaagaaaacacaatgaagtgggcagagtccaatggctacaagggttcttttgatgaaatctgcaaacttgaaggactcaaagagtacatcctgaaagagctggcagccgttgcgcagaagaacaagctacgaggcttcgagtacatcaaaggcgtagtgttggatcctgtgccttttgacatcgagagggatttggtgactgcaacaatgaagaagaagagaaagaatatgctgaactattaccagtctgagattgacacaatatacaaaaagctggaggcgcagaagagtgctgccagagctaag

SEQ ID NO: 1695 - DNA, 2010 bp, Artificial sequence; identical to SEQ ID NO: 1694
  Mir resistant mutated nucleotide sequence

SEQ ID NO: 1696 - DNA, 2010 bp, Artificial sequence; identical to SEQ ID NO: 1694
  Mir resistant mutated nucleotide sequence

SEQ ID NO: 1697 - DNA, 2010 bp, Artificial sequence
  Mir resistant mutated nucleotide sequence
atggaggcgaatccgaagaacaccttcacgatcaaagtggaggacgggaagcccgggaaggacggccggctggcggtcggaccggtgttccggagcgttctggccaaggatgggttcccgcagcttgagcctgacatgaagacatcatgggacgtgttcagggtagcagcagtcaagtatgccgacaaccggatgctcggatggcgtccgttcaaagatggagtgccagggccctacttgtggaaatcatacaaggagatctacgacgaggtgctgcaagcaggctctgcgttgcagaagctgggagtgcagccaggttcccgggtggggatctacggagcgaactgtccacagtggatcgtagccatgcaggcttgcaatggctatagtctagtctgtgtcccactgtacgatactttaggtgcgggagctgtcgactacatcatcgatcatgccgagatcgatgttgtcttcatacaggacaagaaaataaaagagatactgtccccaaactgcaagtctgccaagagactgaaagcattggtggcgttcacttcggcgacaactgaacagaacaaagaagcggatcaaattgggatcaaaatgtatgcctgggacgatttcttgaaagtggggaaggataatcctcgtcaaccttgccctccgcaagcaagtgacatctgcactgtcatgtacacgagtgggacaagcggacagcccaaaggtgtgatgctgacccatgaaagccacgccatgtatgtgaaaggggtggacctcttcatggaccagtttgatgataagatgacaacagatgatgtcttcctgtcgtttctcccgcttgctcacatccttgaccgcatgatcgaagagtatttctttcacaaaggggcctcaattggctactaccacggagatctgaatgccttgagggacgacattgtggagctgaagccgactctactggttggggtgccccgagtgtacgaaaggatttatgaaggtatcttgaaggccattgcggaactcagacctctaagaagggtcatctttaatgctttgtacaaccgcaaactggcaagcatgaaagcaggctactcgcacaaaaccgcttcacctttcgcggacatgctggcttttcgcaaggtcaaggcaaggcttggaggtcgtcttcgcttactgatttcaggaggggctccgttgagtaatgagatcgaggagttcatgagagtgaccacctgtgcatacttcatccaaggctatggtttaacagaaacactgggacctagcactgtctgctacatcgacgacatggccctggtcggaagcgctggtgtgcctgccacctacaccgaaattcggctggaagaagtgcccgagatgggttataatccactcggcgttccttcgcgtggtgaaatctgcatccggggaaaatccctcttcgctgggtactacaaaagtccagaactcacaaacgaagccatcgttgatgggtggtttcatacaggtgacattggagagatgaccccagacgggatcttgaaggtgattgacagaaaaaagaacatatttaagctgtcgcaaggggagtatgttgcggttgagtacctggagaaagtttatggcttccctccactcgttgaagatatctgggtatacggggacagtttcagatcaagtttagttgcagtagtcaatccacaccaagaaaacacaatgaagtgggcagagtccaatggctacaagggttcttttgatgaaatctgcaaacttgaaggactcaaagagtacatcctgaaagagctggcagccgttgcgcagaagaacaagctacgaggcttcgagtacatcaaaggcgtagtgttggatcctgtgccttttgacatcgagagggatttggtgactgcaacaatgaagaagaagagaaagaatatgctgaactattaccagtctgagattgacacaatatacaaaaagctggaggcgcagaagagtgctgccagagctaag

SEQ ID NO: 1698 - DNA, 1131 bp, Artificial sequence
  Mir resistant mutated nucleotide sequence
atgatggatccggccttgcttgacgacgtcatacgccggctgctggaggtgaagaatctcaagcctgggaagaacgcgcagttgtcggagtcggagatcaagcagctctgcgctgccgccaaggagatcttcctgcaccagcccaacctgctggagctcgaggcgcccatcaaaatctgcggtgatgtccatggccagtactctgatctcctgaggctattcgattatggtggctatccgcctcaggccaactaccttttcttgggtgactacgtagacagaggcaaacaaagcttggaaacaatatgtcttcttttggcctacaaggtcaagtacccagagaacttctttcttctaaggggaaaccatgaatgcgcatcagtaaatcgcatctatggtttttatgacgagtgcaaacgcagattcagtgtaaagctgtggaaaacattcactgactgttttaactgcttgccagtgtcagcattgatagacgaaaagatcctctgtatgcatggtggtctatctccagagttgaacaagctcgaacaaatacttaatctgagtcgccccacagacgtgcctgatactggattgctctgtgaccttctttggtctgatccttctaatgaagcaacaggatgggccataaatgatcgaggtgtttcatatacatttggtcctgataaagtttctgaattccttgagaagcatgatttggacctcatctgccgagcccatcaggttgtcgaagatggatatgagtttttcgctagccgccaactcgtaacaatgttttcagcccctaactactgtggagaatttgataacgctggtgccatgatgagtgtagatgagacattgatgtgctccttccaaatactgaaacctgcgaggaaggtgttgggtggttcaactaataacaaaatcaggcttcaagtcatcgagaggatggtgacaatggcaagcctgatatcaggttggttggtgagcagcacgccagtggtcgacggggggttgttccatcataatcatattacagcggctgcaactgacaggcccaatgcatcttctcttccatgttggatcaacactcttgtaatgtattatttactgtgcggatctgagaggatg

SEQ ID NO: 1699 - DNA, 1131 bp, Artificial sequence
  Mir resistant mutated nucleotide sequence
atgatggatccggccttgcttgacgacgtcatacgccggctgctggaggtgaagaatctcaagcctgggaagaacgcgcagttgtcggagtcggagatcaagcagctctgcgctgccgccaaggagatcttcctgcaccagcccaacctgctggagctcgaggcgcccatcaaaatctgcggtgatgtccatggccagtactctgatctcctgaggctattcgattatggtggctatccgcctcaggccaactaccttttcttgggtgattacgtagatagaggcaaacaaagcttggaaacaatatgtcttcttttggcctacaaggtcaagtacccagagaacttctttcttctaaggggaaaccatgaatgcgcatcagtaaatcgcatctatggtttttatgacgagtgcaaacgcagattcagtgtaaagctgtggaaaacattcactgactgttttaactgcttgccagtgtcagcattgatagacgaaaagatcctctgtatgcatggtggtctatctccagagttgaacaagctcgaacaaatacttaatctgagtcgccccacagacgtgcctgatactggattgctctgtgaccttctttggtctgatccttctaatgaagcaacaggatgggccataaatgatcgaggtgtttcatatacatttggtcctgataaagtttctgaattccttgagaagcatgatttggacctcatctgccgagcccatcaggttgtcgaagatggatatgagtttttcgctagccgccaactcgtaacaatgttttcagcccctaactactgtggagaatttgataacgctggtgccatgatgagtgtagatgagacattgatgtgctccttccaaatactgaaacctgcgaggaaggtgttgggtggttcaactaataacaaaatcaggcttcaagtcatcgagaggatggtgacaatggcaagcctgatatcaggttggttggtgagcagcacgccagtggtcgacggggggttgttccatcataatcatattacagcggctgcaactgacaggcccaatgcatcttctcttccatgttggatcaacactcttgtaatgtattatttactgtgcggatctgagaggatg

SEQ ID NO: 1700 - DNA, 1131 bp, Artificial sequence
  Mir resistant mutated nucleotide sequence
atgatggatccggccttgcttgacgacgtcatacgccggctgctggaggtgaagaatctcaagcctgggaagaacgcgcagttgtcggagtcggagatcaagcagctctgcgctgccgccaaggagatcttcctgcaccagcccaacctgctggagctcgaggcgcccatcaaaatctgcggtgatgtccatggccagtactctgatctcctgaggctattcgattatggtggctatccgcctcaggccaactaccttttcttgggtgactatgtagacagaggcaaacaaagcttggaaacaatatgtcttcttttggcctacaaggtcaagtacccagagaacttctttcttctaaggggaaaccatgaatgcgcatcagtaaatcgcatctatggtttttatgacgagtgcaaacgcagattcagtgtaaagctgtggaaaacattcactgactgttttaactgcttgccagtgtcagcattgatagacgaaaagatcctctgtatgcatggtggtctatctccagagttgaacaagctcgaacaaatacttaatctgagtcgccccacagacgtgcctgatactggattgctctgtgaccttctttggtctgatccttctaatgaagcaacaggatgggccataaatgatcgaggtgtttcatatacatttggtcctgataaagtttctgaattccttgagaagcatgatttggacctcatctgccgagcccatcaggttgtcgaagatggatatgagtttttcgctagccgccaactcgtaacaatgttttcagcccctaactactgtggagaatttgataacgctggtgccatgatgagtgtagatgagacattgatgtgctccttccaaatactgaaacctgcgaggaaggtgttgggtggttcaactaataacaaaatcaggcttcaagtcatcgagaggatggtgacaatggcaagcctgatatcaggttggttggtgagcagcacgccagtggtcgacggggggttgttccatcataatcatattacagcggctgcaactgacaggcccaatgcatcttctcttccatgttggatcaacactcttgtaatgtattatttactgtgcggatctgagaggatg

SEQ ID NO: 1701 - DNA, 1131 bp, Artificial sequence
  Mir resistant mutated nucleotide sequence
atgatggatccggccttgcttgacgacgtcatacgccggctgctggaggtgaagaatctcaagcctgggaagaacgcgcagttgtcggagtcggagatcaagcagctctgcgctgccgccaaggagatcttcctgcaccagcccaacctgctggagctcgaggcgcccatcaaaatctgcggtgatgtccatggccagtactctgatctcctgaggctattcgattatggtggctatccgcctcaggccaactaccttttcttgggtgactacgtggacagaggcaaacaaagcttggaaacaatatgtcttcttttggcctacaaggtcaagtacccagagaacttctttcttctaaggggaaaccatgaatgcgcatcagtaaatcgcatctatggtttttatgacgagtgcaaacgcagattcagtgtaaagctgtggaaaacattcactgactgttttaactgcttgccagtgtcagcattgatagacgaaaagatcctctgtatgcatggtggtctatctccagagttgaacaagctcgaacaaatacttaatctgagtcgccccacagacgtgcctgatactggattgctctgtgaccttctttggtctgatccttctaatgaagcaacaggatgggccataaatgatcgaggtgtttcatatacatttggtcctgataaagtttctgaattccttgagaagcatgatttggacctcatctgccgagcccatcaggttgtcgaagatggatatgagtttttcgctagccgccaactcgtaacaatgttttcagcccctaactactgtggagaatttgataacgctggtgccatgatgagtgtagatgagacattgatgtgctccttccaaatactgaaacctgcgaggaaggtgttgggtggttcaactaataacaaaatcaggcttcaagtcatcgagaggatggtgacaatggcaagcctgatatcaggttggttggtgagcagcacgccagtggtcgacggggggttgttccatcataatcatattacagcggctgcaactgacaggcccaatgcatcttctcttccatgttggatcaacactcttgtaatgtattatttactgtgcggatctgagaggatg

SEQ ID NO: 1702 - DNA, 1131 bp, Artificial sequence; identical to SEQ ID NO: 1699
  Mir resistant mutated nucleotide sequence

SEQ ID NO: 1703 - DNA, 459 bp, Artificial sequence
  Mir resistant mutated nucleotide sequence
atggacatggttacggcggccgccgcgttgccatggggaggcggttccccggcgtggatcgacgtgccggagcggagcaagagcgcgttcatggagctgaagcggaggaaggtccaccggtacgtgatcttcaagatcgacgacaggagggaggagatcgtcgtcgagaagaccggcgcgcccggggagagctacgacgacttcacggcgtcgttgccggccgatgactgccggtacgccgtctacgacctggatttcgtcagcgacgacaactgccggaaaagcaagattttcttcataagttggagcccaagcgacagccgcatccgtgccaagaccatatatgcagtgtcaaggaaccaattccgtcatgagcttgatggggtgcactttgagatccaagccaccgaccctgatgacatggatctggaagttctcaggggccgtgctaacagaacc

SEQ ID NO: 1704 - DNA, 459 bp, Artificial sequence
  Mir resistant mutated nucleotide sequence
atggacatggttacggcggccgccgcgttgccatggggaggcggttccccggcgtggatcgacgtgccggagcggagcaagagcgcgttcatggagctgaagcggaggaaggtccaccggtacgtgatcttcaagatcgacgacaggagggaggagatcgtcgtcgagaagaccggcgcgcccggggagagctacgacgacttcacggcgtcgttgccggccgatgactgccggtacgccgtctacgacctggatttcgtcagcgacgacaactgccggaaaagcaagattttcttcatcagttggagcccaagcgacagccgcatccgtgccaagaccatatatgcagtgtcaaggaaccaattccgtcatgagcttgatggggtgcactttgagatccaagccaccgaccctgatgacatggatctggaagttctcaggggccgtgctaacagaacc

SEQ ID NO: 1705 - DNA, 459 bp, Artificial sequence; identical to SEQ ID NO: 1704
  Mir resistant mutated nucleotide sequence

SEQ ID NO: 1706 - DNA, 459 bp, Artificial sequence
  Mir resistant mutated nucleotide sequence
atggacatggttacggcggccgccgcgttgccatggggaggcggttccccggcgtggatcgacgtgccggagcggagcaagagcgcgttcatggagctgaagcggaggaaggtccaccggtacgtgatcttcaagatcgacgacaggagggaggagatcgtcgtcgagaagaccggcgcgcccggggagagctacgacgacttcacggcgtcgttgccggccgatgactgccggtacgccgtctacgacctggatttcgtcagcgacgacaactgccggaaaagcaagattttcttcatatcctggagcccaagcgacagccgcatccgtgccaagaccatatatgcagtgtcaaggaaccaattccgtcatgagcttgatggggtgcactttgagatccaagccaccgaccctgatgacatggatctggaagttctcaggggccgtgctaacagaacc

SEQ ID NO: 1707 - DNA, 459 bp, Artificial sequence; identical to SEQ ID NO: 1706
  Mir resistant mutated nucleotide sequence

SEQ ID NO: 1708 - DNA, 1581 bp, Artificial sequence
  Mir resistant mutated nucleotide sequence
atggccgggtcacaggtggtggactccggggagaagcgcctcaacgagctcggctacaagcaggagctccggagggagatgacgctgttcaagacgctggccatctctttctccacgatgacgctcttcacgggcatcacgccgctgtacggcagcagcctccagtacgccgggccggccagcctcgtgtggggatgggtagtagtaagttttttcacctggttcgtcggcatcgcgatggccgagatctgctcctccttccctacaactggttcgctctatttctgggctgctcatcttgctggcccggtctggggtccattggcatcctggtgctgcgcttggctggaggccataggcctcattgccggaattggcacacaggcctatgcaggatcccaggtactgcagagcataatcctgctatgcaccggcactaacaaaggcggcggctacctggcccctcgctggctgttcctcgtcatgtacctcgcgttaaccttcatctgggccgtgttcaacacatttgcgttggaagtcatcgccttcctcgacgtcatctccatgtggtggcaggtggtcggcggcacggtgatagtgatcatgctgccgctggtggcgaagacgacgcagccggcgtcgtacgtgttcacgcatttccagacgacgccggatgtgaccgggatcagcagcggcgcctacgcggtggtcctgtccctcctggtgagccagtactccctgtacgggtacgacgcggcggcgcacctgacggaggagaccaagggcgccgacaagaacgggcccatcgccatcctctccagcatcggcatcatctccgtcttcggctgggtctacatcctcgccctcaccttcagcatccaggacttcggctacctctacaacaccgccaacgagaccgccggcaccttcgtcccggcgcagatactgtacgacgcgttccacggccggtacggcagctcgacgggcgccatcgtgctgctcttcatcatctggggctccttcttcttcggcggcctctccatcaccaccagcgccgcccgggtggtgtacgcgctgtcgcgggaccgcggcatccccttctccggcgtgtggcgcaagatccacccgacgcgcaaggtgcccgggaacgcggtgtggctgtgcgccgccgtgtgcgcgctgctgggcctgcccatcctgtggatcaacgtggtgttcacggccatcacctccatcgccactatcggctgggtggggggctacgcggtgcccatcttcgcgcgcatggtgatgcgggaggaggacttccgccccggccccttctacctccggtgggccagcaggcccgtctgcctcgtggcgttcctgtggatctgctacacctgctccgtcttcctgctccccaccatgtaccccatcaggatggacaccttcaactacgcgcccatcgcgctcggcgtcgtactggggctcatcatgctctggtgggtcgtcgacgccaggaagtggttcaagggacccgtcaggaacatcgacgatctgcaaaacggcaatggcaatgacaatgccaatgtcaaggtc

SEQ ID NO: 1709 - DNA, 1581 bp, Artificial sequence
  Mir resistant mutated nucleotide sequence
atggccgggtcacaggtggtggactccggggagaagcgcctcaacgagctcggctacaagcaggagctccggagggagatgacgctgttcaagacgctggccatctctttctccacgatgacgctcttcacgggcatcacgccgctgtacggcagcagcctccagtacgccgggccggccagcctcgtgtggggctgggtagtagtaagttttttcacctggttcgtcggcatcgcgatggccgagatctgctcctccttccctacaactggttcgctctatttctgggctgctcatcttgctggcccggtctggggtccattggcatcctggtgctgcgcttggctggaggccataggcctcattgccggaattggcacacaggcctatgcaggatcccaggtactgcagagcataatcctgctatgcaccggcactaacaaaggcggcggctacctggcccctcgctggctgttcctcgtcatgtacctcgcgttaaccttcatctgggccgtgttcaacacatttgcgttggaagtcatcgccttcctcgacgtcatctccatgtggtggcaggtggtcggcggcacggtgatagtgatcatgctgccgctggtggcgaagacgacgcagccggcgtcgtacgtgttcacgcatttccagacgacgccggatgtgaccgggatcagcagcggcgcctacgcggtggtcctgtccctcctggtgagccagtactccctgtacgggtacgacgcggcggcgcacctgacggaggagaccaagggcgccgacaagaacgggcccatcgccatcctctccagcatcggcatcatctccgtcttcggctgggtctacatcctcgccctcaccttcagcatccaggacttcggctacctctacaacaccgccaacgagaccgccggcaccttcgtcccggcgcagatactgtacgacgcgttccacggccggtacggcagctcgacgggcgccatcgtgctgctcttcatcatctggggctccttcttcttcggcggcctctccatcaccaccagcgccgcccgggtggtgtacgcgctgtcgcgggaccgcggcatccccttctccggcgtgtggcgcaagatccacccgacgcgcaaggtgcccgggaacgcggtgtggctgtgcgccgccgtgtgcgcgctgctgggcctgcccatcctgtggatcaacgtggtgttcacggccatcacctccatcgccactatcggctgggtggggggctacgcggtgcccatcttcgcgcgcatggtgatgcgggaggaggacttccgccccggccccttctacctccggtgggccagcaggcccgtctgcctcgtggcgttcctgtggatctgctacacctgctccgtcttcctgctccccaccatgtaccccatcaggatggacaccttcaactacgcgcccatcgcgctcggcgtcgtactggggctcatcatgctctggtgggtcgtcgacgccaggaagtggttcaagggacccgtcaggaacatcgacgatctgcaaaacggcaatggcaatgacaatgccaatgtcaaggtc

SEQ ID NO: 1710 - DNA, 1581 bp, Artificial sequence; identical to SEQ ID NO: 1709
  Mir resistant mutated nucleotide sequence

SEQ ID NO: 1711 - DNA, 1581 bp, Artificial sequence; identical to SEQ ID NO: 1709
  Mir resistant mutated nucleotide sequence

SEQ ID NO: 1712 - DNA, 1581 bp, Artificial sequence
  Mir resistant mutated nucleotide sequence
atggccgggtcacaggtggtggactccggggagaagcgcctcaacgagctcggctacaagcaggagctccggagggagatgacgctgttcaagacgctggccatctctttctccacgatgacgctcttcacgggcatcacgccgctgtacggcagcagcctccagtacgccgggccggccagcctcgtgtggggatgggtcgtcgtcagttttttcacctggttcgtcggcatcgcgatggccgagatctgctcctccttccctacaactggttcgctctatttctgggctgctcatcttgctggcccggtctggggtccattggcatcctggtgctgcgcttggctggaggccataggcctcattgccggaattggcacacaggcctatgcaggatcccaggtactgcagagcataatcctgctatgcaccggcactaacaaaggcggcggctacctggcccctcgctggctgttcctcgtcatgtacctcgcgttaaccttcatctgggccgtgttcaacacatttgcgttggaagtcatcgccttcctcgacgtcatctccatgtggtggcaggtggtcggcggcacggtgatagtgatcatgctgccgctggtggcgaagacgacgcagccggcgtcgtacgtgttcacgcatttccagacgacgccggatgtgaccgggatcagcagcggcgcctacgcggtggtcctgtccctcctggtgagccagtactccctgtacgggtacgacgcggcggcgcacctgacggaggagaccaagggcgccgacaagaacgggcccatcgccatcctctccagcatcggcatcatctccgtcttcggctgggtctacatcctcgccctcaccttcagcatccaggacttcggctacctctacaacaccgccaacgagaccgccggcaccttcgtcccggcgcagatactgtacgacgcgttccacggccggtacggcagctcgacgggcgccatcgtgctgctcttcatcatctggggctccttcttcttcggcggcctctccatcaccaccagcgccgcccgggtggtgtacgcgctgtcgcgggaccgcggcatccccttctccggcgtgtggcgcaagatccacccgacgcgcaaggtgcccgggaacgcggtgtggctgtgcgccgccgtgtgcgcgctgctgggcctgcccatcctgtggatcaacgtggtgttcacggccatcacctccatcgccactatcggctgggtggggggctacgcggtgcccatcttcgcgcgcatggtgatgcgggaggaggacttccgccccggccccttctacctccggtgggccagcaggcccgtctgcctcgtggcgttcctgtggatctgctacacctgctccgtcttcctgctccccaccatgtaccccatcaggatggacaccttcaactacgcgcccatcgcgctcggcgtcgtactggggctcatcatgctctggtgggtcgtcgacgccaggaagtggttcaagggacccgtcaggaacatcgacgatctgcaaaacggcaatggcaatgacaatgccaatgtcaaggtc

SEQ ID NO: 1713 - DNA, 1635 bp, Artificial sequence
  Mir resistant mutated nucleotide sequence
atgggctccactgccgccgcctccgtgctcccggtgtccgccggcaccggccagaacttagtattaatattagattatggatcgcagtacacccacctcatcacccgccgcgtgcgccagctcggcgtcctctccctatgcgtgtccggcacggcgccgctcgcctccctcgagggcctgcgcccgcgcgccgtcatcctctccggcgggccccactccgtccacgccccgggcgcgcctgcctttcccgaggggttcctggacttcgcggccgccgcgggcgcgcacgtgctcggcgtctgctacgggatgcagctcctcgtgcagtccctcggcggcgccgtcgtgcccggggagcgccaggagtacggcaagatggacgttcaggtgacggcggcctcctccgcgctctacggggaagcggagacggggaagcgccagacggtgtggatgagccatggcgacgaggtggtcacgctgccgcaaggctttgaggtggttgcgcgcagtgtgcagggcgccgtcgccgccatcgagtaccgggagaagcgcttttatgggctccaataccacccagaggttacacattcagcccaaggaatggaaacactgcgccgctttctttttgatgtttgtgggatcaaagctgattggaagatgcaagatgtgctcgatgaagaaatcaagaccatccaaagcaccgttggccctgatgagcatgttatctgtgcattgtcaggtggagttgattcgacggtcgcggccactctcgttcacaaggcaataggagataggcttcactgtgtttttgttgacaatggtctattgaggtacaaggagagagaacgagtaatgacaacctttgaaagtgatttgcacctgccagttacatgtgttgatgcctcagagcaatttctcagcaagttaaagggtgtcgaggacccagagcagaaaaggaagattattggcagggaattcatagctgtctttgatgactttgctcacaagctggaacagaagatagggaaaaggcctgaatatttagttcaagggactttgtaccctgatgtaattgaatcatgcccacctcctgggagtggaaggacacattcccacaccatcaaaagccatcacaatgtcggcggccttccaaaagatatgaagttaaaactcattgaaccactcaagctcctattcaaggatgaggtgcggaaattggggagtattttgaatgtcccagattcatttttgaagcgacacccatttcctgggcctggtcttgctgtacgtgtcctaggtgatgttacacaaggcaatgctttggaggttcttcgtcaggtggatgagatatttgttcaagctattaaagatgcaggcctctatgataaaatatggcaagcctttgctgttttcctgccagtacaaacagttggggttcagggtgaccagcgaacccattccaatgctgttgttttaagggcaatcaccagtgaggatggcatgactgcagattggtactattttgaccatgcattcctggtagatgtggtaaacaagatctgcaacaatgtgcggggcataaaccgtgtttgccaggacatcacatctaagccgcctgcaacggtggagtgggag

SEQ ID NO: 1714 - DNA, 1113 bp, Artificial sequence
  Mir resistant mutated nucleotide sequence
atgcagaggggcgtgtccttccctggcggaatggcgaaggagtgcccgcccgccgagctctggctcccggacgagttcctggacgacgacttcttctccgaggaggagaaggcggcggtcgcggccaagagcgagagcgacgaggaggaagggatggacggcctctcgcgccgcgcggccgggctcgtcgtcgggggtggaggggacggttcccctgcaaaggcgcaagtgttagccggctcgccgcagtcgattctgtgcggcctgcatgcttccggggaggacagccccaacggcgcggcgtcgcaggtcagctcgccgccgtcgtcgccgctggagaagaccccggccgaccactgggacctgctcaaagaggcggccggccaggtggcccgcatgcgcacaactagcggcatcctggtggcaacgaacgcgggcgcacatcaaagacaccccgtcccgccgctggcgcagaagctctctgcgccggccgaggctccgaaggccgcgggtgccaacctccctcaggctcagccgaagaactcgatggaacatcgccggattcagattgctcgttttaatgcgctgaagcagcagcagctcctgaagcacatgcgggagcgggagctcgccgtcgctacggcggcggcgtggggcacgagcgttgccgggtctcatcgtgccgccgggtaccgtgcgccggcgccccatgtcctgagctcgtccgcgtggcccaccctccagaagcagcagcagcagcagcagcaaagggcggcgtccccggcgggcatgcgcgccgtcttcgtcgcccctcctggcgccaagcgcgagtgcgccggcaccggcgtgttcatcccccgccaggccggcgcccccgcggagcccaagaaaaggccagcagcgtgcgcccctgtccttctcccggcgcgcgtcgtgcaggcgctcaacctcaacgtcgaggacctcggggcccgtcccatctacccgggaggatttgtattagatcatgacgcactggtgagccggagcaacgctctgctggcgagccgcgcgtcccagcagctccatggcgcttcgtcgcgcgaggtgaatctcccccaggaatggacgtac

SEQ ID NO: 1715 - DNA, 1113 bp, Artificial sequence
  Mir resistant mutated nucleotide sequence
atgcagaggggcgtgtccttccctggcggaatggcgaaggagtgcccgcccgccgagctctggctcccggacgagttcctggacgacgacttcttctccgaggaggagaaggcggcggtcgcggccaagagcgagagcgacgaggaggaagggatggacggcctctcgcgccgcgcggccgggctcgtcgtcgggggtggaggggacggttcccctgcaaaggcgcaagtgttagccggctcgccgcagtcgattctgtgcggcctgcatgcttccggggaggacagccccaacggcgcggcgtcgcaggtcagctcgccgccgtcgtcgccgctggagaagaccccggccgaccactgggacctgctcaaagaggcggccggccaggtggcccgcatgcgcacaactagcggcatcctggtggcaacgaacgcgggcgcacatcaaagacaccccgtcccgccgctggcgcagaagctctctgcgccggccgaggctccgaaggccgcgggtgccaacctccctcaggctcagccgaagaactcgatggaacatcgccggattcagattgctcgttttaatgcgctgaagcagcagcagctcctgaagcacatgcgggagcgggagctcgccgtcgctacggcggcggcgtggggcacgagcgttgccgggtctcatcgtgccgccgggtaccgtgcgccggcgccccatgtcctgagctcgtccgcgtggcccaccctccagaagcagcagcagcagcagcagcaaagggcggcgtccccggcgggcatgcgcgccgtcttcgtcgcccctcctggcgccaagcgcgagtgcgccggcaccggcgtgttcatcccccgccaggccggcgcccccgcggagcccaagaaaaggccagcagcgtgcgcccctgtccttctcccggcgcgcgtcgtgcaggcgctcaacctcaacgtcgaggacctcggggcccgtcccatctacccgggcggctttgtattagatcatgacgcactggtgagccggagcaacgctctgctggcgagccgcgcgtcccagcagctccatggcgcttcgtcgcgcgaggtgaatctcccccaggaatggacgtac

SEQ ID NO: 1716 - DNA, 1113 bp, Artificial sequence; identical to SEQ ID NO: 1715
  Mir resistant mutated nucleotide sequence

SEQ ID NO: 1717 - DNA, 1113 bp, Artificial sequence; identical to SEQ ID NO: 1715
  Mir resistant mutated nucleotide sequence

SEQ ID NO: 1718 - DNA, 1113 bp, Artificial sequence; identical to SEQ ID NO: 1715
  Mir resistant mutated nucleotide sequence

SEQ ID NO: 1719 - DNA, 714 bp, Artificial sequence
  Mir resistant mutated nucleotide sequence
atgtgtccgaccaagaaggagatgagtgccgagtcgtcgggctcggcgagcagctggacttcggccagcgcaagcgcaagcacaagcacatcgccggagcaccagaccgtgtggacgtcgccgccgaagcggcccgcggggcggaccaagttccgcgagacgcggcaccccgtgttccgtggcgtccggcgccgcggcagcgccgggcggtgggtgtgcgaggtgcgcgtgcccgggaggcgcgggtgcaggctctggctcggcacgttcgacgccgccgaggccgccgcgcgcgcgcacgacgccgccatgctcgccatcgccggcgcgagcgcgtgcctcaacttcgccgactccgcgtggctgctcgcggtccccgcctcgtacgccagccttgccgaggtccgccgtgcggtcgccgaggccgtggaggactttcagcgccgcgaggcggccgccggggacgacgcgcgctcggccacatcgccgacgccgtccacctcgggcaccgacgacgatgctgccactgacggcgaggagtcgtcaccggccacggaggtctcgtcgttccagctcgacgtgttcgataacatgagctgggatctatactacgcgagcatggcgcagggaatgctgatggagctgccgtccgcagttccggcgttcggagacgacggctacaccaatgtcgccgatgtgccactgtggagctac

SEQ ID NO: 1720 - DNA, 714 bp, Artificial sequence
  Mir resistant mutated nucleotide sequence
atgtgtccgaccaagaaggagatgagtgccgagtcgtcgggctcggcgagcagctggacttcggcctcggcatcggcatcgacatcgacatcgccggagcaccagaccgtgtggacgtcgccgccgaagcggcccgcggggcggaccaagttccgcgagacgcggcaccccgtgttccgtggcgtccggcgccgcggcagcgccgggcggtgggtgtgcgaggtgcgcgtgcccgggaggcgcgggtgcaggctctggctcggcacgttcgacgccgccgaggccgccgcgcgcgcgcacgacgccgccatgctcgccatcgccggcgcgagcgcgtgcctcaacttcgccgactccgcgtggctgctcgcggtccccgcctcgtacgccagccttgccgaggtccgccgtgcggtcgccgaggccgtggaggactttcagcgccgcgaggcggccgccggggacgacgcgcgctcggccacatcgccgacgccgtccacctcgggcaccgacgacgatgctgccactgacggcgaggagtcgtcaccggccacggaggtctcgtcgttccagctcgacgtgttcgataacatgagctgggatctatactacgcgagcatggcgcagggaatgctgatggagctgccgtccgcagttccggcgttcggagacgacggctacaccaatgtcgccgatgtgccactgtggagctac

SEQ ID NO: 1721 - DNA, 714 bp, Artificial sequence; identical to SEQ ID NO: 1720
  Mir resistant mutated nucleotide sequence

SEQ ID NO: 1722 - DNA, 714 bp, Artificial sequence; identical to SEQ ID NO: 1720
  Mir resistant mutated nucleotide sequence

SEQ ID NO: 1723 - DNA, 714 bp, Artificial sequence; identical to SEQ ID NO: 1720
  Mir resistant mutated nucleotide sequence

SEQ ID NO: 1724 - DNA, 1140 bp, Artificial sequence
  Mir resistant mutated nucleotide sequence
atgggccagtcccccagcgctccccagggacgcgggcgcagccgcagccgaaacgggagcagctcgcggtggccgcacccggggctcgggctcgacctggggttcctactcgggcgcaagccgcgccctggggacgagaagccggacctggcgagctggatgcggtgcttcctgtcgcagcgtctgccgcagcccaccgcggcggcggaggagacggcggacgcggagggtaaggccgccgggagacgagaggaggaggaggttggtgcggaggacgctgaccacctcgtcgtcatggtgaacgggctgtacgggagttcggcggattggaagtttgcagcggagcagtttgtgaagagattgcccggaaaagtcttcgtgcatcgtagtcagagcaattattcaaagttaacatatgatggagttgacttgatgggtgaaaggctagctgaggaggttcgacaaattgttcagagaagaagaaacttgaggaaaatatcttttgttgctcattcgcttggcggtttagtaacaagatatgcaataggaaaactttacgaacctgccatggatgaaacatcttcttgtgacaatgataagccttctgatgaacaaaatgtacctggtggtggtaaaatagctggtttagaaccaatcaattttattacatctgctacaccacacttgggctcaaggtggaataaacaacttccctttctttttggtgtcccacttttggagagaactgctgcaggaacagcacattttatagttggaagaactggtaaacatctattccttacagacagagatgacagaaaaccaccattattattgaggatggttgaagattgtgacgacgggaaattcatgtctgcattgcgctctttcaagcatcgtgttgcctatgctaatctcaagttaacagcaaatgatgaaaagtatcctcatgttattaatgtcgacaaaggaaatctagaggatcatcagcaagagggatctgtagaagattcactggcagatagttatgaagagatgatgatccgtggccttacacaagtgacctgggaacgtgtggacgtatgctttcataagagctggctaagatacaatgctcataataacatacaggtaaggctg

SEQ ID NO: 1725 - DNA, 1140 bp, Artificial sequence
  Mir resistant mutated nucleotide sequence
atgggccagtcccccagcgctccccagggacgcgggcgcagccgcagccgaaacgggagcagctcgcggtggccgcacccggggctcgggctcgacctggggttcctactcgggcgcaagccgcgccctggggacgagaagccggacctggcgagctggatgcggtgcttcctgtcgcagcgtctgccgcagcccaccgcggcggcggaggagacggcggacgcggagggtaaggccgccgggagacgagaggaggaggaggttggtgcggaggacgctgaccacctcgtcgtcatggtgaacgggctgtacgggagttcggcggattggaagtttgcagcggagcagtttgtgaagagattgcccggaaaagtcttcgtgcatcgtagtcagagcaattattcaaagttaacatatgatggagttgacttgatgggtgaaaggctagctgaggaggttcgacaaattgttcagagaagaagaaacttgaggaaaatatcttttgttgctcattcgcttggcggtttagtaacaagatatgcaataggaaaactttacgaacctgccatggatgaaacatcttcttgtgacaatgataagccttctgatgaacaaaatgtacctggtggtggtaaaatagctggtttagaaccaatcaattttattacatctgctacaccacacttgggctcaaggtggaataaacaacttccctttctttttggtgtcccacttttggagagaactgctgcaggaacagcacattttatagttggaagaactggtaaacatctattccttacagacagagatgacagaaagccaccattattattgaggatggttgaagattgtgacgacgggaaattcatgtctgcattgcgctctttcaagcatcgtgttgcctatgctaatctcaagttaacagcaaatgatgaaaagtatcctcatgttattaatgtcgacaaaggaaatctagaggatcatcagcaagagggatctgtagaagattcactggcagatagttatgaagagatgatgatccgtggccttacacaagtgacctgggaacgtgtggacgtatgctttcataagagctggctaagatacaatgctcataataacatacaggtaaggctg

SEQ ID NO: 1726 - DNA, 1140 bp, Artificial sequence
  Mir resistant mutated nucleotide sequence
atgggccagtcccccagcgctccccagggacgcgggcgcagccgcagccgaaacgggagcagctcgcggtggccgcacccggggctcgggctcgacctggggttcctactcgggcgcaagccgcgccctggggacgagaagccggacctggcgagctggatgcggtgcttcctgtcgcagcgtctgccgcagcccaccgcggcggcggaggagacggcggacgcggagggtaaggccgccgggagacgagaggaggaggaggttggtgcggaggacgctgaccacctcgtcgtcatggtgaacgggctgtacgggagttcggcggattggaagtttgcagcggagcagtttgtgaagagattgcccggaaaagtcttcgtgcatcgtagtcagagcaattattcaaagttaacatatgatggagttgacttgatgggtgaaaggctagctgaggaggttcgacaaattgttcagagaagaagaaacttgaggaaaatatcttttgttgctcattcgcttggcggtttagtaacaagatatgcaataggaaaactttacgaacctgccatggatgaaacatcttcttgtgacaatgataagccttctgatgaacaaaatgtacctggtggtggtaaaatagctggtttagaaccaatcaattttattacatctgctacaccacacttgggctcaaggtggaataaacaacttccctttctttttggtgtcccacttttggagagaactgctgcaggaacagcacattttatagttggaagaactggtaaacatctattccttacagacagagatgacagaaaacctcctttattattgaggatggttgaagattgtgacgacgggaaattcatgtctgcattgcgctctttcaagcatcgtgttgcctatgctaatctcaagttaacagcaaatgatgaaaagtatcctcatgttattaatgtcgacaaaggaaatctagaggatcatcagcaagagggatctgtagaagattcactggcagatagttatgaagagatgatgatccgtggccttacacaagtgacctgggaacgtgtggacgtatgctttcataagagctggctaagatacaatgctcataataacatacaggtaaggctg

SEQ ID NO: 1727 - DNA, 1140 bp, Artificial sequence; identical to SEQ ID NO: 1726
  Mir resistant mutated nucleotide sequence

SEQ ID NO: 1728 - DNA, 1140 bp, Artificial sequence
  Mir resistant mutated nucleotide sequence
atgggccagtcccccagcgctccccagggacgcgggcgcagccgcagccgaaacgggagcagctcgcggtggccgcacccggggctcgggctcgacctggggttcctactcgggcgcaagccgcgccctggggacgagaagccggacctggcgagctggatgcggtgcttcctgtcgcagcgtctgccgcagcccaccgcggcggcggaggagacggcggacgcggagggtaaggccgccgggagacgagaggaggaggaggttggtgcggaggacgctgaccacctcgtcgtcatggtgaacgggctgtacgggagttcggcggattggaagtttgcagcggagcagtttgtgaagagattgcccggaaaagtcttcgtgcatcgtagtcagagcaattattcaaagttaacatatgatggagttgacttgatgggtgaaaggctagctgaggaggttcgacaaattgttcagagaagaagaaacttgaggaaaatatcttttgttgctcattcgcttggcggtttagtaacaagatatgcaataggaaaactttacgaacctgccatggatgaaacatcttcttgtgacaatgataagccttctgatgaacaaaatgtacctggtggtggtaaaatagctggtttagaaccaatcaattttattacatctgctacaccacacttgggctcaaggtggaataaacaacttccctttctttttggtgtcccacttttggagagaactgctgcaggaacagcacattttatagttggaagaactggtaaacatctattccttacagacagagatgacagaaaaccaccacttcttttgaggatggttgaagattgtgacgacgggaaattcatgtctgcattgcgctctttcaagcatcgtgttgcctatgctaatctcaagttaacagcaaatgatgaaaagtatcctcatgttattaatgtcgacaaaggaaatctagaggatcatcagcaagagggatctgtagaagattcactggcagatagttatgaagagatgatgatccgtggccttacacaagtgacctgggaacgtgtggacgtatgctttcataagagctggctaagatacaatgctcataataacatacaggtaaggctg

SEQ ID NO: 1729 - DNA, 501 bp, Artificial sequence
  Mir resistant mutated nucleotide sequence
atgcactcctttgggcaccgcgccaacgcggtggcaacgttcgcggtcaccatactggccgcgatttgcttcgccgcctccttctccgacaacttcaacaccccaacacccactgcctccgttaagatcttgaatctaaactggttccagaaggaggccaacggcaacgacgaggttagcatgacgctgaacatttcggcagatttaagcagcttatttacatggaacacaaaacaggtgtttgtttttgtggcagcagagtatgagactccacagaatgctttgaatcaagtttccctttgggatggcattatacctgcaaaggagcatgccaagtttttgatccataccacaaacaagtacagatttattgaccagggaagcaatctaaagggcaaggaattcaacttgacaatgcactggcacattatgccaaagactggcaaaatgtttgcagataagatagtaatgacaggctatcgtctccctgagctatacaga

SEQ ID NO: 1730 - DNA, 501 bp, Artificial sequence
  Mir resistant mutated nucleotide sequence
atgcactcctttgggcaccgcgccaacgcggtggcaacgttcgcggtcaccatactggccgcgatttgcttcgccgcctccttctccgacaacttcaacaccccaacacccactgcctccgttaagatcttgaatctaaactggttccagaaggaggccaacggcaacgacgaggttagcatgacgctgaacatttcggcagacttaagcagcttatttacatggaacacaaaacaggtgtttgtttttgtggcagcagagtatgagactccacagaatgctttgaatcaagtttccctttgggatggcattatacctgcaaaggagcatgccaagtttttgatccataccacaaacaagtacagatttattgaccagggaagcaatctaaagggcaaggaattcaacttgacaatgcactggcacattatgccaaagactggcaaaatgtttgcagataagatagtaatgacaggctatcgtctccctgagctatacaga

SEQ ID NO: 1731 - DNA, 1962 bp, Artificial sequence
  Mir resistant mutated nucleotide sequence
atggcgctcgtgccgagcggcggcgcgggcgcttgcaaggacgacgccgccctcgggctgccgtggtccgagatgttccgctcagcctcgctccgccggcccaagcaggaagcagacgacgcgccacccaagaagccggcgctgaagaaggcgagggccaaggagatgaagtccaagccgtcgtcggtgggagctggggccggggctgggtccgacatggaggggctgtcgctggagcccgacgcgcgcctggcgctctacatcgccatggcgcacgcgggcctcgccaccgcgctgctcgtgctctacggcctctacctgctgctcgccgacttcctccgcccgctgcagtgggcgctgctctgctccgtcccgctccgcgagacgcagcgcgcgctcgtcgccttctgggagcccccgctccgcggcggccttagcgccgcactgctcgcgctgccgctcgccgcgctccggtcctcgaccgccaccctcgccgacgtgcgcgccgccctcctgcgccgcccgctcccagactcgccggcgttcccgcgcctcctccgctggctcgtatccttctttttcttcctcgtcctcttcgagcgcctcggcgccgccaccgcgctgctgctcctcgtgctcgcgctcgccttcttcgccgcgtcccccaagctgaagcgcgccgcctcctcacgcatctccagtcggcctccctcctcgcgcggcctcctcttaactggaggcatcctccgccaccttaagacactagtcgcccttggtctcatgcttggtatgatcgccgggttcataactggctcaatattttttagttataaaattgggctagagggcaaggacgccgtcatgtccctcaagtcccatgtcgagaagagcaactactctgagaagattggcctcaagaagtggatggacgacaatgacatccctggcttggtcgatcagtactctggcaagatctatgacaccgtgtgggagcaggtcgaccaattggctgtgcagtacaaccttacagatttcactagtggcttccgccatttcttgatcagccaatcagttgacccaaagagcaaggcgctcatcagttccagaccacacccatattcaatgaagttgcaatcaattgcgacatgtgtgaagaacagagagtgggtggagatttacagggagcttgattcgttctttagggagctgttgatcacaagagaggatttggtggtcaaggccaaggggctggctttgcagggaacagaaatcgcaaagaggctgctgtccagcagcacattggtgctgggcggtagtgccaatctgatgttatcaattgctctccgcattctctcaggtgcggctgaggtggtgaatttcctgtcacaactgatggtgttcttgtgggtgctgtattacctcattactgtggagggaggcggagctacagagcaaatcattgatcttttgccagtgtcaaaacaagtaaaggaccgctgtgttgaggtcatcgatcatgccattagtagtgtcttgttggccactgccaagattgccatatttcaaggggggctgacatggctgctgttcaagttcttcaaagtgcattttgtgtacacatcaactgtgcttggattcatcagcgcacttgtgccaatacttccattttggctgtcctcaatatttgccacaggggagcttctcatggaagggagatatgtgcttggactggtggtaactgtgatacacctcatgctcatggattatggcacaactaccattctggaggatatacctgggtacaatgggtatctcacaggcctaagcataattggtggcatgacactgtttcccaatgctctggagggtgcaatattaggtccccttataatgacggttgttatagcgttgaagaacttgtacacagagtttgtgcttgctgatggagaggaggccagcagc

SEQ ID NO: 1732 - DNA, 1962 bp, Artificial sequence
  Mir resistant mutated nucleotide sequence
atggcgctcgtgccgagcggcggcgcgggcgcttgcaaggacgacgccgccctcgggctgccgtggtccgagatgttccgctcagcctcgctccgccggcccaagcaggaagcagacgacgcgccacccaagaagccggcgctgaagaaggcgagggccaaggagatgaagtccaagccgtcgtcggtgggagctggggccggggctgggtccgacatggaggggctgtcgctggagcccgacgcgcgcctggcgctctacatcgccatggcgcacgcgggcctcgccaccgcgctgctcgtgctctacggcctctacctgctgctcgccgacttcctccgcccgctgcagtgggcgctgctctgctccgtcccgctccgcgagacgcagcgcgcgctcgtcgccttctgggagcccccgctccgcggcggccttagcgccgcactgctcgcgctgccgctcgccgcgctccggtcctcgaccgccaccctcgccgacgtgcgcgccgccctcctgcgccgcccgctcccagactcgccggcgttcccgcgcctcctccgctggctcgtatccttctttttcttcctcgtcctcttcgagcgcctcggcgccgccaccgcgctgctgctcctcgtgctcgcgctcgccttcttcgccgcgtcccccaagctgaagcgcgccgcctcctcacgcatctccagtcggcctccctcctcgcgcggcctcctcttaactggaggcatcctccgccaccttaagacactagtcgcccttggtctcatgcttggtatgatcgccgggttcataactggcagcatattttttagttataaaattgggctagagggcaaggacgccgtcatgtccctcaagtcccatgtcgagaagagcaactactctgagaagattggcctcaagaagtggatggacgacaatgacatccctggcttggtcgatcagtactctggcaagatctatgacaccgtgtgggagcaggtcgaccaattggctgtgcagtacaaccttacagatttcactagtggcttccgccatttcttgatcagccaatcagttgacccaaagagcaaggcgctcatcagttccagaccacacccatattcaatgaagttgcaatcaattgcgacatgtgtgaagaacagagagtgggtggagatttacagggagcttgattcgttctttagggagctgttgatcacaagagaggatttggtggtcaaggccaaggggctggctttgcagggaacagaaatcgcaaagaggctgctgtccagcagcacattggtgctgggcggtagtgccaatctgatgttatcaattgctctccgcattctctcaggtgcggctgaggtggtgaatttcctgtcacaactgatggtgttcttgtgggtgctgtattacctcattactgtggagggaggcggagctacagagcaaatcattgatcttttgccagtgtcaaaacaagtaaaggaccgctgtgttgaggtcatcgatcatgccattagtagtgtcttgttggccactgccaagattgccatatttcaaggggggctgacatggctgctgttcaagttcttcaaagtgcattttgtgtacacatcaactgtgcttggattcatcagcgcacttgtgccaatacttccattttggctgtcctcaatatttgccacaggggagcttctcatggaagggagatatgtgcttggactggtggtaactgtgatacacctcatgctcatggattatggcacaactaccattctggaggatatacctgggtacaatgggtatctcacaggcctaagcataattggtggcatgacactgtttcccaatgctctggagggtgcaatattaggtccccttataatgacggttgttatagcgttgaagaacttgtacacagagtttgtgcttgctgatggagaggaggccagcagc

SEQ ID NO: 1733 - DNA, 1962 bp, Artificial sequence; identical to SEQ ID NO: 1732
  Mir resistant mutated nucleotide sequence

SEQ ID NO: 1734 - DNA, 1962 bp, Artificial sequence; identical to SEQ ID NO: 1732
  Mir resistant mutated nucleotide sequence

SEQ ID NO: 1735 - DNA, 1962 bp, Artificial sequence; identical to SEQ ID NO: 1732
  Mir resistant mutated nucleotide sequence

SEQ ID NO: 1736 - DNA, 681 bp, Artificial sequence
  Mir resistant mutated nucleotide sequence
atggcgaagactacgcaacccaccgcggggatgcgggatcccctgctccccacctccaccgccgcctcaccgccgccctacctcgacccgcatcccgccgactcctacacctacacggtcttccttgtccccgttcgcctccgccgcggcctctgtcgcggcggccgttgcatcgtcccctgcctcaccgttctcttcctcctcgcgctcgcgggcttcctcctctggcccgcggacccggacatctccctggcccgcctccacctagcacatgtaagtgtagtagccagacctgccgtcgccgtcactatatccgccacgctcaaggttcgcgttcgcaatcctgacctcttcgcgctcgactacacccgcctcgacgtcgctatcggctaccgcggtgcggggcttggccgggtaacatccggcggcggacgggtccgggcgcgcgctgtctcgtacgtcgacgccaacctgcagctcgacggcatacgcgtcgtcgaggacgcgatgtacctgctcgaggacctcgcgcaaggatccgtgcccttcgacaccatcgccgaggtcgagggccacctccacttccttttcctcagcatcccggtcaaggggagaatatcttgcgtaatgcatattaatccacacaaccaaaccatagtacatcaggactgctatcctgag

SEQ ID NO: 1737 - DNA, 681 bp, Artificial sequence
  Mir resistant mutated nucleotide sequence
atggcgaagactacgcaacccaccgcggggatgcgggatcccctgctccccacctccaccgccgcctcaccgccgccctacctcgacccgcatcccgccgactcctacacctacacggtcttccttgtccccgttcgcctccgccgcggcctctgtcgcggcggccgttgcatcgtcccctgcctcaccgttctcttcctcctcgcgctcgcgggcttcctcctctggcccgcggacccggacatctccctggcccgcctccacctagcgcatgtaagtgtagtagccagacctgccgtcgccgtcactatatccgccacgctcaaggttcgcgttcgcaatcctgacctcttcgcgctcgactacacccgcctcgacgtcgctatcggctaccgcggtgcggggcttggccgggtaacatccggcggcggacgggtccgggcgcgcgctgtctcgtacgtcgacgccaacctgcagctcgacggcatacgcgtcgtcgaggacgcgatgtacctgctcgaggacctcgcgcaaggatccgtgcccttcgacaccatcgccgaggtcgagggccacctccacttccttttcctcagcatcccggtcaaggggagaatatcttgcgtaatgcatattaatccacacaaccaaaccatagtacatcaggactgctatcctgag

SEQ ID NO: 1738 - DNA, 681 bp, Artificial sequence; identical to SEQ ID NO: 1737
  Mir resistant mutated nucleotide sequence

SEQ ID NO: 1739 - DNA, 681 bp, Artificial sequence; identical to SEQ ID NO: 1737
  Mir resistant mutated nucleotide sequence

SEQ ID NO: 1740 - DNA, 681 bp, Artificial sequence
  Mir resistant mutated nucleotide sequence
atggcgaagactacgcaacccaccgcggggatgcgggatcccctgctccccacctccaccgccgcctcaccgccgccctacctcgacccgcatcccgccgactcctacacctacacggtcttccttgtccccgttcgcctccgccgcggcctctgtcgcggcggccgttgcatcgtcccctgcctcaccgttctcttcctcctcgcgctcgcgggcttcctcctctggcccgcggacccggacatctccctggcccgcctccacctagcacacgtaagtgtagtagccagacctgccgtcgccgtcactatatccgccacgctcaaggttcgcgttcgcaatcctgacctcttcgcgctcgactacacccgcctcgacgtcgctatcggctaccgcggtgcggggcttggccgggtaacatccggcggcggacgggtccgggcgcgcgctgtctcgtacgtcgacgccaacctgcagctcgacggcatacgcgtcgtcgaggacgcgatgtacctgctcgaggacctcgcgcaaggatccgtgcccttcgacaccatcgccgaggtcgagggccacctccacttccttttcctcagcatcccggtcaaggggagaatatcttgcgtaatgcatattaatccacacaaccaaaccatagtacatcaggactgctatcctgag

SEQ ID NO: 1741 - DNA, 27 bp, Artificial sequence
  Target Mimic Example for miRNA which was Downregulated under Drought Stress
atcctatcgaagctctaacaagtgcgg

SEQ ID NO: 1742 - DNA, 25 bp, Artificial sequence
  Target Mimic Example for miRNA which was Downregulated under Drought Stress
ctaccgtcctttctatgcccacatc

SEQ ID NO: 1743 - DNA, 27 bp, Artificial sequence
  Target Mimic Example for miRNA which was Downregulated under Drought Stress
attatgcttcgcgactactacgtactc

SEQ ID NO: 1744 - DNA, 23 bp, Artificial sequence
  Target Mimic Example for miRNA which was Downregulated under Drought Stress
cacttgatgcctacccagttcct

SEQ ID NO: 1745 - DNA, 25 bp, Artificial sequence
  Target Mimic Example for miRNA which was Downregulated under Drought Stress
ttgctcatttctctacccccttttt

SEQ ID NO: 1746 - DNA, 25 bp, Artificial sequence
  Target Mimic Example for miRNA which was Downregulated under Drought Stress
atttgagacaccctaccgctcgctt

SEQ ID NO: 1747 - DNA, 24 bp, Artificial sequence
  Target Mimic Example for miRNA which was Downregulated under Drought Stress
tcccccatagtctacagcccatct

SEQ ID NO: 1748 - DNA, 26 bp, Artificial sequence
  Target Mimic Example for miRNA which was Downregulated under Drought Stress
atctgtgcctactctactactttcct

SEQ ID NO: 1749 - DNA, 25 bp, Artificial sequence
  Target Mimic Example for miRNA which was Downregulated under Drought Stress
atttcacttcttctaagcacttcct

SEQ ID NO: 1750 - DNA, 24 bp, Artificial sequence
  Target Mimic Example for miRNA which was Downregulated under Drought Stress
agaataccagtctatacagtacct

SEQ ID NO: 1751 - DNA, 26 bp, Artificial sequence
  Target Mimic Example for miRNA which was Downregulated under Drought Stress
atgcttcgcgactctaacgtactcat

SEQ ID NO: 1752 - DNA, 25 bp, Artificial sequence
  Target Mimic Example for miRNA which was Downregulated under Drought Stress
cggtgacgggtactacaaatagcat

SEQ ID NO: 1753 - DNA, 25 bp, Artificial sequence
  Target Mimic Example for miRNA which was Downregulated under Drought Stress
tctcccccttgactatcaatgccat

SEQ ID NO: 1754 - DNA, 26 bp, Artificial sequence
  Target Mimic Example for miRNA which was Downregulated under Drought Stress
aatagccacatccctacattgcactg

SEQ ID NO: 1755 - DNA, 26 bp, Artificial sequence
  Target Mimic Example for miRNA which was Downregulated under Drought Stress
tctcttccccctactatatctccacg

SEQ ID NO: 1756 - DNA, 26 bp, Artificial sequence
  Target Mimic Example for miRNA which was Downregulated under Drought Stress
caatcacttccatctatcctctcatc

SEQ ID NO: 1757 - DNA, 24 bp, Artificial sequence
  Target Mimic Example for miRNA which was Downregulated under Drought Stress
agcctcgactcctagtatcctagc

SEQ ID NO: 1758 - DNA, 27 bp, Artificial sequence
  Target Mimic Example for miRNA which was Downregulated during Salt Stress
agccctgctgctccctacatgagcaaa

SEQ ID NO: 1759 - DNA, 25 bp, Artificial sequence
  Target Mimic Example for miRNA which was Downregulated during Salt Stress
attctttcgtacctacttcagcttt

SEQ ID NO: 1760 - DNA, 24 bp, Artificial sequence
  Target Mimic Example for miRNA which was Downregulated during Salt Stress
ctcctctgcatctagtcccttcct

SEQ ID NO: 1761 - DNA, 24 bp, Artificial sequence
  Target Mimic Example for miRNA which was Downregulated during Salt Stress
aggcctaagacctagattccaaat

SEQ ID NO: 1762 - DNA, 24 bp, Artificial sequence
  Target Mimic Example for miRNA which was Downregulated during Salt Stress
tggtgacgagactagtgggatctg

SEQ ID NO: 1763 - DNA, 24 bp, Artificial sequence
  Target Mimic Example for miRNA which was Downregulated during Salt Stress
tggtgacgagactagtgggatatg

SEQ ID NO: 1764 - DNA, 24 bp, Artificial sequence
  Target Mimic Example for miRNA which was Downregulated during Salt Stress
aattgagtgcactagcgctggtga

SEQ ID NO: 1765 - DNA, 24 bp, Artificial sequence
  Target Mimic Example for miRNA which was Downregulated during Salt Stress
agaatctgcatctagccccttcca

SEQ ID NO: 1766 - DNA, 24 bp, Artificial sequence
  Target Mimic Example for miRNA which was Downregulated during Salt Stress
gtacccttctactatccaaatcca

SEQ ID NO: 1767 - DNA, 24 bp, Artificial sequence
  Target Mimic Example for miRNA which was Downregulated during Salt Stress
ctcctctgcatctagaccctgcca

SEQ ID NO: 1768 - DNA, 27 bp, Artificial sequence
  Target Mimic Example for miRNA which was Downregulated during Heat Shock
gagcccggtccgctctatattcgtgcc

SEQ ID NO: 1769 - DNA, 27 bp, Artificial sequence
  Target Mimic Example for miRNA which was Downregulated during Heat Shock
gccgggccttagagctaccaaaaggag

SEQ ID NO: 1770 - DNA, 27 bp, Artificial sequence
  Target Mimic Example for miRNA which was Downregulated during Heat Shock
cgcccctgtttgccctagatgtactgt

SEQ ID NO: 1771 - DNA, 27 bp, Artificial sequence
  Target Mimic Example for miRNA which was Downregulated during Heat Shock
atgctagcccggtcctacatattattt

SEQ ID NO: 1772 - DNA, 27 bp, Artificial sequence
  Target Mimic Example for miRNA which was Downregulated during Heat Shock
cctcatactgtgtcctaccttgtcccc

SEQ ID NO: 1773 - DNA, 27 bp, Artificial sequence
  Target Mimic Example for miRNA which was Downregulated during Heat Shock
gagtctgtcccctgctagtttttcata

SEQ ID NO: 1774 - DNA, 21 bp, Artificial sequence
  Target Mimic Example for miRNA which was Downregulated during Heat Shock
cgcgctatctactgccggatt

SEQ ID NO: 1775 - DNA, 21 bp, Artificial sequence
  Target Mimic Example for miRNA which was Downregulated during Heat Shock
aaggaccgctatcgcaatgct

SEQ ID NO: 1776 - DNA, 24 bp, Artificial sequence
  Target Mimic Example for miRNA which was Downregulated during Heat Shock
agggactcccgctactcgtcagct

SEQ ID NO: 1777 - DNA, 23 bp, Artificial sequence
  Target Mimic Example for miRNA which was Downregulated during Heat Shock
aggaccgtcgctacaacgctttg

SEQ ID NO: 1778 - DNA, 23 bp, Artificial sequence
  Target Mimic Example for miRNA which was Downregulated during Heat Shock
taccagttctctagagtaggttg

SEQ ID NO: 1779 - DNA, 22 bp, Artificial sequence
  Target Mimic Example for miRNA which was Downregulated during Heat Shock
taagtttctctatctcctccgg

SEQ ID NO: 1780 - DNA, 23 bp, Artificial sequence
  Target Mimic Example for miRNA which was Downregulated during Heat Shock
agaatacaatctatcgggcggcg

SEQ ID NO: 1781 - DNA, 23 bp, Artificial sequence
  Target Mimic Example for miRNA which was Downregulated during Heat Shock
taccgtccgcctagcagacgacg

SEQ ID NO: 1782 - DNA, 21 bp, Artificial sequence
  Target Mimic Example for miRNA which was Downregulated during Heat Shock
acaacccgctaactcgttgag

SEQ ID NO: 1783 - DNA, 25 bp, Artificial sequence
  Target Mimic Example for miRNA which was Downregulated during Heat Shock
gcagggacatagctatcaacgcgag

SEQ ID NO: 1784 - DNA, 22 bp, Artificial sequence
  Target Mimic Example for miRNA which was Downregulated during Heat Shock
tacgaccggctagcgtggacag

SEQ ID NO: 1785 - DNA, 22 bp, Artificial sequence
  Target Mimic Example for miRNA which was Downregulated during Heat Shock
aggccgtgcctagatccggatc

SEQ ID NO: 1786 - DNA, 23 bp, Artificial sequence
  Target Mimic Example for miRNA which was Downregulated during Heat Shock
tcggttcccgctaacaggcgtgc

SEQ ID NO: 1787 - DNA, 23 bp, Artificial sequence
  Target Mimic Example for miRNA which was Downregulated during Heat Shock
tcaggtcccgctaacaggcgtgc

SEQ ID NO: 1788 - DNA, 22 bp, Artificial sequence
  Target Mimic Example for miRNA which was Downregulated during Heat Shock
tagaggaccctagtcgcaatgc

SEQ ID NO: 1789 - DNA, 23 bp, Artificial sequence
  Target Mimic Example for miRNA which was Downregulated during Heat Shock
cagactataactattcgggcggc

SEQ ID NO: 1790 - DNA, 24 bp, Artificial sequence
  Target Mimic Example for miRNA which was Downregulated during Heat Shock
agggacgtagtctacaaggcgagc

SEQ ID NO: 1791 - DNA, 28 bp, Artificial sequence
  Target Mimic Example for miRNA which was Downregulated during Heat Shock
ttccaaggttggcggctagccgttaagc

SEQ ID NO: 1792 - DNA, 28 bp, Artificial sequence
  Target Mimic Example for miRNA which was Downregulated during Heat Shock
ttccaaagttggcggctagccgttaagc

SEQ ID NO: 1793 - DNA, 21 bp, Artificial sequence
  Target Mimic Example for miRNA which was Downregulated during Heat Shock
ccctatacctaccaagtttga

SEQ ID NO: 1794 - DNA, 23 bp, Artificial sequence
  Target Mimic Example for miRNA which was Downregulated during Heat Shock
tacgaacgggctacgtggacgga

SEQ ID NO: 1795 - DNA, 21 bp, Artificial sequence
  Target Mimic Example for miRNA which was Downregulated during Heat Shock
tttcagtgctagatcgtggca

SEQ ID NO: 1796 - DNA, 24 bp, Artificial sequence
  Target Mimic Example for miRNA which was Downregulated during Heat Shock
ttcgggcctccctaggattttcaa

SEQ ID NO: 1797 - DNA, 26 bp, Artificial sequence
  Target Mimic Example for miRNA which was Downregulated during Heat Shock
agtcggactagagctatcaacctcaa

SEQ ID NO: 1798 - DNA, 24 bp, Artificial sequence
  Target Mimic Example for miRNA which was Downregulated during Heat Shock
ttttcgagcctctaccaccagagt

SEQ ID NO: 1799 - DNA, 25 bp, Artificial sequence
  Target Mimic Example for miRNA which was Downregulated during Heat Shock
aagcacattgcgctatcagcatcct

SEQ ID NO: 1800 - DNA, 24 bp, Artificial sequence
  Target Mimic Example for miRNA which was Downregulated during Heat Shock
cccatgtgttcctaccagtccgcc

SEQ ID NO: 1801 - DNA, 24 bp, Artificial sequence
  Target Mimic Example for miRNA which was Downregulated during Heat Shock
tgagtacgaccctagggcgtggac

SEQ ID NO: 1802 - DNA, 26 bp, Artificial sequence
  Target Mimic Example for miRNA which was Downregulated during Heat Shock
tgccccgcttccgctaaaccacggaa

SEQ ID NO: 1803 - DNA, 24 bp, Artificial sequence
  Target Mimic Example for miRNA which was Downregulated during Heat Shock
cgaggaccgtcctagtaatgcttt

SEQ ID NO: 1804 - DNA, 25 bp, Artificial sequence
  Target Mimic Example for miRNA which was Downregulated during Heat Shock
cgaggaccgtcgctactatgctttg

SEQ ID NO: 1805 - DNA, 25 bp, Artificial sequence
  Target Mimic Example for miRNA which was Downregulated during Heat Shock
gtctcgtcccgcctaaacgaatcca

SEQ ID NO: 1806 - DNA, 22 bp, Artificial sequence
  Target Mimic Example for miRNA which was Downregulated during Heat Shock
tcgcgctatctactgccaggtt

SEQ ID NO: 1807 - DNA, 23 bp, Artificial sequence
  Target Mimic Example for miRNA which was Downregulated during Heat Shock
taccagttctctaaagtcggttg

SEQ ID NO: 1808 - DNA, 25 bp, Artificial sequence
  Target Mimic Example for miRNA which was Downregulated during Heat Shock
ccagactacaatctattgggcggcg

SEQ ID NO: 1809 - DNA, 23 bp, Artificial sequence
  Target Mimic Example for miRNA which was Downregulated during Heat Shock
taccgtccgcctagctgacgacg

SEQ ID NO: 1810 - DNA, 23 bp, Artificial sequence
  Target Mimic Example for miRNA which was Downregulated during Heat Shock
taccgtctgcctagccgacgacg

SEQ ID NO: 1811 - DNA, 23 bp, Artificial sequence
  Target Mimic Example for miRNA which was Downregulated during Heat Shock
taccgtccgcctaaccgacgacg

SEQ ID NO: 1812 - DNA, 23 bp, Artificial sequence
  Target Mimic Example for miRNA which was Downregulated during Heat Shock
agcaactcgactagcattccgcc

SEQ ID NO: 1813 - DNA, 23 bp, Artificial sequence
  Target Mimic Example for miRNA which was Downregulated during Heat Shock
tcggtcctctctaggattttcaa

SEQ ID NO: 1814 - DNA, 25 bp, Artificial sequence
  Target Mimic Example for miRNA which was Downregulated during Heat Shock
agccaaactccactacacctgacaa

SEQ ID NO: 1815 - DNA, 22 bp, Artificial sequence
  Target Mimic Example for miRNA which was Downregulated during Heat Shock
gccgggcctctatggagcaaaa

SEQ ID NO: 1816 - protein, 358 aa, Zea mays
MERFGLDGGGGGGELPPGFRFHPTDEELITYYLLRKAVDGSFCGRAIAEIDLNKCEPWELPGKAKMGEKEWYFYSLRDRKYPTGLRTNRATVAGYWKATGKDREIRSGRTGALVGMKKTLVFYRGRAPKGQKTHWVMHEYRLEGAYAYHFLPSSTRQDEWVIARVFQKPGEVPPAARKHRLGALSSTTGTAAGDSCFSDSTSASIGGASSSSTPGPLFASAAAAVANAGAADGDTSSYCGGAANHGNLVTGRELVPCFSTATINGPLVAAALGIGQPYNAAPLPFEQQPPPPAFLPSLRSLQDNLQLPPFLSAGGLGGGGALHWLPAGGMEVKVEGRSAPPQMAVGPGQLDGAFGWSF

SEQ ID NO: 1817 - protein, 393 aa, Sorghum bicolor
MERFGVLGTRLGLDGVGIGGGGGGGELPPGFRFHPTDEELITYYLLRKAVDGSFCGRAIAEIDLNKCEPWELPDKAKMGEKEWYFYSLRDRKYPTGLRTNRATVAGYWKATGKDREIRSGRSGALVGMKKTLVFYRGRAPKGHKTHWVMHEFRLDGTYAYHFLPTSTRDEWVIARVFQKPGEVPPARKQHHRLGGLSSAGESCFSDSTSASIGGGGGASASSAPRPLPLTVTDASSLSLFAANAAADGDTSSYCGGHGGGAANTGNKLVTGRELVPCFSTSTTTGAALDAAALGIGQPYNAAVPPPLAFEAPPLPTPAFFPNLRSSLQVQDNHLQLPLFLSAGGGGGLSGTLGGGALHHWPFAGMEVKVEGRSAPPQMAVGPGQLDGAFGWGF

SEQ ID NO: 1818 - protein, 373 aa, Oryza sativa Indica Group
MERCSVLGLGGGGGGGGRLDGELPPGFRFHPTDEELITYYLLRKVVDGSFNGRAIAEIDLNKCEPWELPEKAKMGEKEWYFYSLRDRKYPTGLRTNRATGAGYWKATGKDREIRSARTGALVGMKKTLVFYRGRAPKGQKTQWVMHEYRLDGTYAYHFLSSSTRDEWVIARIFTKPGVFPVVRKGRLGISGGGGDTSCFSDSTSASVGGGGGTSASSALRAPLAEASLFAAAAAPAVDGADSSNYGGGGGGGSATATANLVTGLELVPCFSTTAHMDASFGTGQYNPAPLAVEPPPPPPAFFPSLRSLQENLQLPLFLSGGMQAGVSSQPLSGSGAFHWQSGMDVKVEGAVGRAPPQMAVGPGQLDGAFAWGF

SEQ ID NO: 1819 - protein, 373 aa, Oryza sativa Japonica Group
MERCSVLGLGGGGGGGGRLDGELPPGFRFHPTDEELITYYLLRKVVDGSFNGRAIAEIDLNKCEPWELPEKAKMGEKEWYFYSLRDRKYPTGLRTNRATGAGYWKATGKDREIRSARTGALVGMKKTLVFYRGRAPKGQKTQWVMHEYRLDGTYAYHFLSSSTRDEWVIARIFTKPGVFPVVRKGRLGISGGGGDTSCFSDSTSASVGGGGGTSASSALRAPLAEASLFAAAAAPAVDGADSSNYGGGGGAGSATATANLVTGLELVPCFSTTAHMDASFGTGQYNPAPLAVEPPPPPPAFFPSLRSLQENLQLPLFLSGGMQAGVSSQPLSGGGAFHWQSGMDVKVEGAVGRAPPQMAVGPGQLDGAFAWGF

SEQ ID NO: 1820 - protein, 275 aa, Zea mays
MEARMPPGFRFHPRDDELVMDYLLQKLSGHGHHAGAAIVVDVDLNKCEPWDLPDSACVGGKEWYFFSLRDRKYATGQRTNRATHSGYWKATGKDRAVVAGGEVAVGMRKTLVFYRGRAPRGKKTEWVMHEFRLHPHAAPCLLAAAAPNKEDWVLCRVFYKSRTTSPRPESEDARDGTPSAEPQLPAALPLAPLADTYAAPTVAEQVYCFSGLPALPFRRPVSLGDLLEFDASEKESVTTAMTSVSNNTSSVLELAPNCNWNQENGMSRMWSPLGI

SEQ ID NO: 1821 - protein, 282 aa, Zea mays
MSSSISMMEARMPPGFRFHPRDDELVMDYLLQKLSGHGHHAGAAIVVDVDLNKCEPWDLPDSACVGGKEWYFFSLRDRKYATGQRTNRATHSGYWKATGKDRAVVAGGEVAVGMRKTLVFYRGRAPRGKKTEWVMHEFRLHPHAAPCLLAAAAPNKEDWVLCRVFYKSRTTSPRPESEDARDGTPSAEPQLPAALPLAPLADTYAAPTVAEQVYCFSGLPALPFRRPVSLGDLLEFDASEKESVTTAMTSVSNNTSSVLELAPNCNWNQENGMSRMWSPLGI

SEQ ID NO: 1822 - protein, 284 aa, Zea mays
MSSSISMMEARMPPGFRFHPRDDELVMDYLLQKLSGHGHHAGAAIVVDVDLNKCEPWDLPDSACVGGKEWYFFSLRDRKYATGQRTNRATHSGYWKATGKDRAVVAGGEDAVAVGMRKTLVFYRGRAPRGRKTEWVMHEFRLHPHAAPCLLPAAAANKEDWVLCRVFYKSRTTTPRPESEDARDGTPSAESQLPAALPLAPLADTYAAPTVAEKVYCLSGLPELPFRRPVSLGDLLAFEASEKESVTTVMTSVSNNTSSVLELTPNCNWNQENGMSRMWSPLGI

SEQ ID NO: 1823 - protein, 289 aa, Sorghum bicolor
MSSSISMMEARMPPGFRFHPRDDELVLDYLLDKLSGHGHGGGAAIVDVDLNKCEPWDLPESACVGGKEWYFFNLRDRKYATGQRTNRATRSGYWKATGKDRAVVAGGDGGEDAAAVVGMRKTLVFYRGRAPKGRKTEWVMHEFRLHPHAAPSLPAAATKEDWVLCRVFYKSRTTTPRPASDDAQDGTPSAEPQLSAALPLGPLADTYTAFGGAPTVFEQVSCFSGLPALPFKRPVSLGDLLAFDTSEKESIGTVMSSVSNNSSSVLELTPNCNWNQENDMLQMWNPLGI

SEQ ID NO: 1824 - protein, 631 aa, Zea mays
MAGRGRPRPGSHQALVVAAVILLLAAASGAGAGSPDRPAPGPPLFLPLTRSYPNASRLAASLRRGLGDGVHPNARMRLHDDLLTNGYYTTRLYIGTPPQEFALIVDSGSTVTYVPCSSCEQCGNHQDPRFQPDLSSSYSPVKCNVDCTCDSDKKQCTYERQYAEMSSSSGVLGEDIVSFGRESELKPQHAIFGCENSETGDLFSQHADGIMGLGRGQLSIMDQLVEKGVISDSFSLCYGGMDIGGGAMVLGGMLAPPDMIFSNSDPLRSPYYNIELKEIHVAGKALRVESRIFNSKHGTVLDSGTTYAYLPEQAFVAFKEAVTSKVHSLKKIRGPDPSYKDICFAGAGRNVSKLHEVFPDVDMVFGNGQKLSLTPENYLFRHSKVDGAYCLGVFQNGKDPTTLLGGIIVRNTLVTYDRHNEKIGFWKTNCSELWERLHIGDTPSPAPSSDTSSEHDMSPAPAPSNLPEFDVGLITVDMSINVTYPNLKPHLHELAELIAKELEIDSRQVRVMNITSQGNSTLIRWGIFPAESDNAMSNATAMGIIYRLTQHHVQLPENLGSYQLLEWNVQPLPRRSWFQEHVVSMLLGILLVILVTLSAFLVVLVWRKKFSGQAAYRPVDSVVPEQELQPL

SEQ ID NO: 1825 - protein, 632 aa, Sorghum bicolor
MASRGRPRPGSLQDLAAAAIAILLLSAASGAAAGSPDRPAPGPPLFLPLTRSYPNASRLAASSRRGLGDGAHPNARMRLHDDLLTNGYYTTRLYIGTPPQEFALIVDSGSTVTYVPCASCEQCGNHQDPRFQPDLSSSYSPVKCNVDCTCDSDKKQCTYERQYAEMSSSSGVLGEDIVSFGRESELKPQRAVFGCENSETGDLFSQHADGIMGLGRGQLSIMDQLVEKGVISDSFSLCYGGMDIGGGAMVLGGVPAPSDMVFSHSDPLRSPYYNIELKEIHVAGKALRVDSRVFNSKHGTVLDSGTTYAYLPEQAFVAFKDAVTSKVHSLKKIRGPDPNYKDICFAGAGRNVSKLHEVFPDVDMVFGNGQKLSLTPENYLFRHSKVDGAYCLGVFQNGKDPTTLLGGIIVRNTLVTYDRHNEKIGFWKTNCSELWERLHISDAPSPAPSSDTNSETDMSPAPAPSSLPEFDVGLITVDMSINVTYPNLKPHLHELAELIAKELEIDSSQVRVMNITSQGNSTLIRWGIFPAESDNAMSNATAMGIIYRLTQHHVQLPENLGSYQLLEWNVQPLPRRSWFQEHVVSILLGILLVVLVTLSALLVVLVWRKKFSGQTAYRPVDSVAPEQELQPL

SEQ ID NO: 1826 - protein, 631 aa, Oryza sativa Japonica Group
MASRRSRRLGSLVPFAAAVVLLLLIASAAAAAAGSPDRAGPARPPLVLPLTLAYPNATRLPASSARRGLGDGHNPNARMRLHDDLLTNGYYTTRLYIGTPSQEFALIVDSGSTVTYVPCATCEQCGNHQDPRFQPDLSSTYSPVKCNVDCTCDNERSQCTYERQYAEMSSSSGVLGEDIMSFGKESELKPQRAVFGCENTETGDLFSQHADGIMGLGRGQLSIMDQLVEKGVISDSFSLCYGGMDVGGGTMVLGGMPAPPDMVFSHSNPVRSPYYNIELKEIHVAGKALRLDPKIFNSKHGTVLDSGTTYAYLPEQAFVAFKDAVTNKVNSLKKIRGPDPNYKDICFAGAGRNVSQLSEVFPDVDMVFGNGQKLSLSPENYLFRHSKVEGAYCLGVFQNGKDPTTLLGGIVVRNTLVTYDRHNEKIGFWKTNCSELWERLHISEVPSSAPSDSEGDMAPAPAPSGLPEFDVGLITVDMSINVTYPNLKPHLHELAELIAKELDIDSRQVRVMNVTSQGNSTLIRWGIFPAGPSNSMTNTTAMGIIYRLTQHHVQLPENLGSYQLLEWNVQPLSKRSWFRDHVVSILLGILLVVLLTLSALLVLIVWRKKFRGQAAYRPVDSAVPEQELQPL

SEQ ID NO: 1827 - protein, 641 aa, Oryza sativa Japonica Group
MASRRSRRLGSLVPFAAAVVLLLLIASAAAAAAGSPDRAGPARPPLVLPLTLAYPNATRLPASSARRGLGDGHNPNARMRLHDDLLTNGYYTTRLYIGTPSQEFALIVDSGSTVTYVPCATCEQCGNHQSESPNIIEAHDPRFQPDLSSTYSPVKCNVDCTCDNERSQCTYERQYAEMSSSSGVLGEDIMSFGKESELKPQRAVFGCENTETGDLFSQHADGIMGLGRGQLSIMDQLVEKGVISDSFSLCYGGMDVGGGTMVLGGMPAPPDMVFSHSNPVRSPYYNIELKEIHVAGKALRLDPKIFNSKHGTVLDSGTTYAYLPEQAFVAFKDAVTNKVNSLKKIRGPDPNYKDICFAGAGRNVSQLSEVFPDVDMVFGNGQKLSLSPENYLFRHSKVEGAYCLGVFQNGKDPTTLLGGIVVRNTLVTYDRHNEKIGFWKTNCSELWERLHISEVPSSAPSDSEGDMAPAPAPSGLPEFDVGLITVDMSINVTYPNLKPHLHELAELIAKELDIDSRQVRVMNVTSQGNSTLIRWGIFPAGPSNSMTNTTAMGIIYRLTQHHVQLPENLGSYQLLEWNVQPLSKRSWFRDHVVSILLGILLVVLLTLSALLVLIVWRKKFRGQAAYRPVDSAVPEQELQPL

SEQ ID NO: 1828 - protein, 642 aa, Oryza sativa Indica Group
MASRRSRRLGSLVPFAAAVVLLLLIASAAAAAAAGSPDRAGPARPPLVLPLTLAYPNATRLPASSARRGLGDGHNPNARMRLHDDLLTNGYYTTRLYIGTPSQEFALIVDSGSTVTYVPCATCEQCGNHQSESPNIIEAHDPRFQPDLSSTYSPVKCNVDCTCDNERSQCTYERQYAEMSSSSGVLGEDIMSFGKESELKPQRAVFGCENTETGDLFSQHADGIMGLGRGQLSIMDQLVEKGVISDSFSLCYGGMDVGGGTMVLGGMPAPPDMVFSHSNPVRSPYYNIELKEIHVAGKALRLDPKIFNSKHGTVLDSGTTYAYLPEQAFVAFKDAVTNKVNSLKKIRGPDPNYKDICFAGAGRNVSQLSEVFPDVDMVFGNGQKLSLSPENYLFRHSKVEGAYCLGVFQNGKDPTTLLGGIVVRNTLVTYDRHNEKIGFWKTNCSELWERLHISEVPSSAPSDSEGDMAPAPAPSGLPEFDVGLITVDMSINVTYPNLKPHLHELAELIAKELDIDSRQVRVMNVTSQGNSTLIKWGIFPAGHSNSMTNTTAMGIIYRLTQHHVQLPENLGSYQLLEWNVQPLSKRSWFRDHVVSILLGILLVVLLTLSALLVLIVWRKKFRGQAAYRPVDSAVPEQELQPL

SEQ ID NO: 1829 - protein, 631 aa, Hordeum vulgare subsp. vulgare
MASRGWRRPLGSLPALALALFLLAVAAAAAGSPDRAAPSRPPLVLPLTLSYPNASRVASSRSRRGLAEGGRPSARMRLHDDLLTNGYYTTRLHIGTPPQEFALIVDSGSTVTYVPCASCEQCGNHQDPRFQPDLSSTYSPVKCNVDCTCDSDKNQCTYERQYAEMSSSSGVLGEDIVSFGTESELKPQRAVFGCENSETGDLFSQHADGIMGLGRGQLSIMDQLVDKGVIGDSFSMCYGGMDIGGGAMVLGAMPAPPGMIYTHSNAVRSPYYNIELKEMHVAGKALRVDPRIFDGKHGTVLDSGTTYAYLPEQAFVAFKDAVSSQVHPLKKIRGPDSNYKDICFAGAGRNVSQLSEVFPKVDMVFGNGQKLSLSPENYLFRHSKVEGAYCLGVFQNGKDPTTLLGGIVVRNTLVTYDRHNEKIGFWKTNCSELWERLQSGGAPSPAPSNDPGPQADLSPAPAPSGLPEFDVGLITVYMSINVTYPNLKPHLHELAELLAKELEIDSSQVRVMNVTGQGNSTLIRWDIFPAGSSDSMSNATAMGIIYRLQHHVQLPEHLGSYQLLEWNVQQPISRRSWLQEHVVSILVGVLLVVFLSLSAFLGLYLWRKKFRGQAAYRPVGSVGPEQELQPL

SEQ ID NO: 1830 - protein, 631 aa, Hordeum vulgare subsp. vulgare
MASRGWRRPLGSLPALALALFLLAVAAAAAGSPDRAAPSRPPLVLPLTLSYPNASRVASSRSRRGLAEGGRPSARMRLHDDLLTNGYYTTRLHIGTPPQEFALIVDSGSTVTYVPCASCEQCGNHQDPRFQPDLSSTYSPVKCNVDCTCDSDKNQCTYERQYAEMSSSSGVLGEDIVSFGTESELKPQRAVFGCENSETGDLFSQHADGIMGLGRGQLSIMDQLVDKGVIGDSFSMCYGGMDIGGGAMVLGAMPAPPGMIYTHSNAVRSPYYNIELKEMHVAGKALRVDPRIFDGKHGTVLDSGTTYAYLPEQAFVAFKDAVSSQVHPLKKIRGPDPNYKDICFAGAGRNVSQLSEVFPKVDMVFGNGQKLSLSPENYLFRHSKVEGAYCLGVFQNGKDPTTLLGGIVVRNTLVTYDRHNEKIGFWKTNCSELWERLQSGGAPSPAPSNDPGPQADLSPAPAPSGLPEFDVGLITVYMSINVTYPNLKPHLHGLAELLAKELEIDSSQVRVMNVTGQGNSTLIRWDIFPAGSSDSMSNATAMGIIYRLQHHVQLPEHLGSYQLLGWNVQQPISRRSWLQEHVVSILVGVLLVVFLSLSAFLGLYLWRKKFRGQAAYRPVGSVGPEQELQPL

SEQ ID NO: 1831 - protein, 357 aa, Zea mays
MERFGLDGGGGGGELPPGFRFHPTDEELITYYLLRKAVDGSFCGRAIAEIDLNKCEPWELPDKAKMGEKEWYFYSLRDRKYPTGLRTNRATVAGYWKATGKDREIRSGRTGALVGMKKTLVFYRGRAPKGQKTHWVMHEYRLEGAYAYHFLPSSTRDEWVIARVFQKPGEVPPAARKHRLGALSSTTGTAAGDSCFSDSTSASIGGASSSSTPGPLFASAAAAVANAGAADGDTSSYCGGAANHGNLVTGRELVPCFSTATINGPLVAAALGIGQPYNAAPLPFEQQPPPPAFLPSLRSLQDNLQLPPFLSAGGLGGGGALHWLPAGGMEVKVEGRSAPPQMAVGPGQLDGAFGWSF

SEQ ID NO: 1832 - protein, 218 aa, Sorghum bicolor
MASSWVSRLPLAVLLLVACSSSTAAATSYTVGDGSGWTTGVDYTSWAASKNFKVGDNLVFNYAKGLHTVVEVSAAEYMACTAANPLGSDSSGATTVALKTPGTHYFVCSITGHCGAGMKLAVTVGGSNSPATTPTPTTPRTSPTTPYTTPTTPTTTTPYTTPTTPYTTPTCSGGGGGTTATPGMTPFMSYPSAAGLGSAALAGFGLVWCVIVQVALLY

SEQ ID NO: 1833 - protein, 362 aa, Zea mays
MEGAMTTRSKHRRHEEDQEMTMVELRRGPWTLEEDNLLMNYIACHGEGRWNLLARCSGLKRTGKSCRLRWLNYLKPDIKRGNLAPEEQLLILELHSKWGNRWSRIAQHLPGRTDNEIKNYWRTRVQKQARQLRVDANSAVFRDAVRCYWMPRLLEKTMAAAAASTSGEVLLPPLPPPPQLHPSRVAGLLASSSSSPVQRDTSDSDYLPQRYHHHPVDPSPSASSTVSSSAALAPVPCFSELSWVDQYGYGPYYSYGANLDDGAGVFDDSAALEEGLGLDALDLGPADDSDVAHSDATLLDYLNSACAGGGTMMMAVTGGGGGVQSSGCGATGGADADYRPSPCTWRTDELGDPRQHQWGGGI

SEQ ID NO: 1834 - protein, 334 aa, Zea mays
MEGAMTTRSKHRRHEEDQEMTMVELRRGPWTLEEDNLLMNYIACHGEGRWNLLARCSGLKRTGKSCRLRWLNYLKPDIKRGNLAPEEQLLILELHSKWGNRWSRIAQHLPGRTDNEIKNYWRTRLLEKTMAAAAASTSGEVLLPPLPPPPQLHPSRVAGLLASSSSSPVQRDTSDSDYLPQRYHHHPVDPSPSASSTVSSSAALAPVPCFSELSWVDQYGYGPYYSYGANLDDGAGVFDDSAALEEGLGLDALDLGPADDSDVAHSDATLLDYLNSACAGGGTMMMAVTGGGGGVQSSGCGATGGADADYRPSPCTWRTDELGDPRQHQWGGGI

SEQ ID NO: 1835 - protein, 330 aa, Zea mays
MTTRSKHRRHEEDQEMTMVELRRGPWTLEEDNLLMNYIACHGEGRWNLLARCSGLKRTGKSCRLRWLNYLKPDIKRGNLAPEEQLLILELHSKWGNRWSRIAQHLPGRTDNEIKNYWRTRLLEKTMAAAAASTSGEVLLPPLPPPPQLHPSRVAGLLASSSSSPVQRDTSDSDYLPQRYHHHPVDPSPSASSTVSSSAALAPVPCFSELSWVDQYGYGPYYSYGANLDDGAGVFDDSAALEEGLGLDALDLGPADDSDVAHSDATLLDYLNSACAGGGTMMMAVTGGGGGVQSSGCGATGGADADYRPSPCTWRTDELGDPRQHQWGGGI

SEQ ID NO: 1836 - protein, 389 aa, Sorghum bicolor
MSQRKGASMAAAVTSSKHHEDQEMMMELRRGPWTLEEDNLLMNYIACHGEGRWNLLARCSGLKRTGKSCRLRWLNYLKPDIKRGNLTPEEQLLILELHSKWGNRWSRIAQHLPGRTDNEIKNYWRTRVQKQARQLRVDANSAVFRDAVRCYWMPRLLEKMAATSTAHDLHGELLPPAPPLHPSHVVAGMASSSSPIHGSHDHEQDPTSNAPAGSGYYHQRYPVDPSPSTSTTSGSTSAAALPPVPCFSELSWVDQYGYGPYSYTTDLDGAAGVSSFDDDSAALESLGLDGLDLGPAEADSDVLYSDTTLLDYLNSTCAGGGTMMTMMGGGVGGGSVVHNSCGGAMGGCGDDVAEYGRPTSSSSWRTDELVFQASARKLGDHQHQWGGGI

SEQ ID NO: 1837 - protein, 316 aa, Sorghum bicolor
MFLADKYSSLLPSLHQHHSKPSRRRSQQLKGEADRFGAALAARLRGLLPLPASQLAALARVADLLALTLADAGDALAGAGEGDASAAAVAAHLDAGVALLDACNAIAVRLDRLRRRRLLARLALHLLSSTSSSPSGRARARAALADRGDHPAASPSPLAPLPSLPFEQPRGRLSAAARVLAAVDAVSSLAAAAAAAILVGGPASFPRVSGGGDLPWAEPFNAVSGQLAALEGAGEVGAVDEAVRSLASALDAGTDNEAAVRPAAQELERRTEELAPRLDRLSDAVGGVFRAALGLRNAELGCFMVGPAGKPCSKYP

SEQ ID NO: 1838 - protein, 309 aa, Zea mays
MFLADKYRSLLPSSHQQPHSKPSRRRQQQQQLLQQEGEADRFGAARLGSLLPLPASPLAALARVADVLALTLADAGPALAGADPAVAAHLDAGVALLDACNAISAGLDRLRRRLLLARLALHLVLSPSPSGGRARARAALADRGDHPAPSPLPSLPFEQPRGRLSAAARVLAAVDAISSLAAAAAAAVLVGGPVTFPRVSGGVGDLPWAEPFNAVSGQLAALGDGEVASLDEAVRRLASALDASGEGAADDEAAVRAAAQEAERRAEEVAPLLDHLSDAVGGVFRAALGLRNAEVDSFMVGPAGKPCST

SEQ ID NO: 1839 - protein, 308 aa, Zea mays
MFLADKYRSLLPSSHQQPHSKPSRRRQQQQQLLQQEGEADRFGAALAARLGSLLPLPASPLAALARVADLLALTLADAGPALAAADPAVAAHLDAGVALLDACNAISAGLDRLRRRLLLARLALHLVLSPSPSGGRARARAALADRGDHPAPSPLPSLPFEQPRGRLSAAARVLAAVDAISSLAAAAAAAVLVGGPVTFPRVSGGDLPWAEPFNAVSGQLAALGAGEVASLDEAVRRLASALDASGEGAADGETAVRAAAQEAERRAEEVAPLLDHLSDAVGGVFRAALGLRNAEVDSFMVGPAGKAV

SEQ ID NO: 1840 - protein, 278 aa, Sorghum bicolor
MAGIVVVFDFDKTIIDVDSDNWVVDNLGFTELFERLLPTMPWNTLMDTMMGELHAAGKTLGDVAEVLRAAPIDPRVPAAIKAAYALGCDLRVLSDANAFFIETVLEHHGIRGCFSQINTNPSHVDADGRLRIGPYHAAPHGCGVGTCPPNMCKGLVLDRILREAAAGTTGRSTKRVIYLGDGRGDYCPSLRLAREDFMMPRRGYPVWDLIREDPARVQAEVHPWADGADLEETLLRLVGRALVEEAALPPPLDCKLESTMPVAAQDGGMPIMPLGVKN

SEQ ID NO: 1841 - protein, 276 aa, Zea mays
MAGVVVVFDFDKTIIDVDSDNWVVDSLGFTEPFERLLPTMPWNTLMDTMMGELHAHGRTLDDVAEALRAAPVVAGVPAAIKAAYALGCDLRVLSDANAFFIDTVLAHHGLLGCFSQINTNPSHPDADADGRLRIGPYHDLHGCGVGTCPPNMCKGQVLDRILREASSSAAGRKRVVYLGDGRGDYCPALRLAREDFVMPRRGFPVWDLICEDPARLQAEVHPWADGAELEETLLRLVGRARVEEAALLPPLDCKLESMPVAAQEGMGPIMPLGVKH

SEQ ID NO: 1842 - protein, 283 aa, Zea mays
MAGIVVVFDFDKTIIDVDSDNWVVDSLGLTDLFERLLPTTPWNTLMDTMMGELHARGRTLAEVTEALRAAPIDPRVPAAVRAAHALGCDLRVLSDANAFFIHTVLDHHGLLDCFSQINTNPSRVDAHGRLRIGPCHDPRAAPHGCGVGTCPPNMCKGLVLDRILREAEAEAASSAKPRVIYLGDGRGDYCPALRLARTDFVMPRRGYPVWDLICEDPARLQAEVHPWTDGAELEETLLRLVRRALVEDAALPPPPPPPLDCKLESMPVAAQDGMPIVPLGVKN

SEQ ID NO: 1843 - protein, 285 aa, Zea mays
MAGIVVVFDFDKTIIDVDSDNWVVDSLGLTDLFERLLPTTPWNTLMDTMMGELHARGRTLAEVTEALRAAPIDPRVPAAVRAAHALGCDLRVLSDANAFFIHTVLDHHGLLACFSQVNTNPSRVDAHGRLRIGPCHDPRAAPHGCGVGTCPPNMCKGLVLDRILREAEAEAETASSAKPRVIYLGDGRGDYCPALRLARTDFVMPRRGYPVWDLICEDPARLQAEVHPWTDGAELEETLLRLVRRAVVEDAALPPPPPPPLDCKLESMPVAAQDGMPIVPLGVKN

SEQ ID NO: 1844 - protein, 274 aa, Hordeum vulgare subsp. vulgare
MAGVVVVFDFDKTIIDVDSDNWVVDGLGATELFDRLLPTMPWNTLIDTVMGELHAQGKTLRDVADVLRAAPIDPHVVAAIRAAYSLGCDLRVLSDANRFFIEAVLDHHGLRGYFSEINTNPSRVDADGRLRIAPHHDFHAGPHGCGLGTCPPNMCKGQVLDRIRASSATADGTKRFIYLGDGRGDYCPSLRLAREDFMMPRKGFPVWELICENPGLLQAEVHPWSDGKDMEETLLRLISRVLVEESQLLPLDCKLESLPVAVQDGMPMPLGVKN

SEQ ID NO: 1845 - protein, 274 aa, Hordeum vulgare subsp. vulgare
MAGVVVVFDFDKTIIDVDSDNWVVDGLGATELFDRLLPTMPWNTLIDTVMGELHAQGKTLRDVADVLRAAPIDPHVVAAIRAAYSLGCDLRVLSDANRFFIEAVLDHHGLRGYFSEINTNPSRVDADGRLRIAPHHDFHAGPHGCGLGTCPPNMCKGQVLDRIRASSATADGTKRFIYLGDGRGDYCPSLRLAREDFMMPRKGFPVWELICENPGLLQAEVHPWSDGKDMEETLLRLISRVLVEESQLLPLDCKLESLPVAVQDGVPMPLGVKN

SEQ ID NO: 1846 - protein, 274 aa, Oryza sativa Indica Group
MAGIVVVFDFDKTIIDVDSDNWVVDGLGATEEFERLLPTMPWNTLMDTMMGELHARGKSLSDVAGVLRSAPLDPRVVAAIKACYGLGCDLRILSDANRFFIDTILDHHGLTGYFSEINTNPSAVDAATGRLRIAPYHDFHAGPHGCGLGICPPNMCKGQVLDRIRASAGAAGKRVIYLGDGRGDYCPSLRLGRDDFMMPRRGFPVWELICEDPSLLQAEVHPWADGAEMEETLLRLVGRVLLEERNLPPLDCKLESLPAVAVQDGMPMTLRIKN

SEQ ID NO: 1847 - protein, 274 aa, Oryza sativa Japonica Group
MAGIVVVFDFDKTIIDVDSDNWVVDGLGTTEEFERLLPTMPWNTLMDTMMGELHASGKSLADVAGVLRSAPLDPRVVAAIKACYGLGCDLRILSDANRFFIDTILDHHGLTGYFSEINTNPSAVDAATGRLRIAPYHDFHAGPHGCGLGICPPNMCKGQVLDRIRASAGAAGKRVIYLGDGRGDYCPSLRLGRDDFMMPRRGFPVWELICEDPSLLHAEVHSWADGAEMEETLLRLVGRVLLEERNLPPLDCKLESLPAVAVQDGMPMTLRIKN

SEQ ID NO: 1848 - protein, 274 aa, Oryza sativa Japonica Group
MAGIVVVFDFDKTIIDVDSDNWVVDGLGATEEFERLLPTMPWNTLMDTMMGELHASGKSLADVAGVLRSAPLDPRVVAAIKACYGLGCDLRILSDANRFFIDTILDHHGLTGYFSEINTNPSAVDAATGRLRIAPYHDFHAGPHGCGLGICPPNMCKGQVLDRIRASAGAAGKRVIYLGDGRGDYCPSLRLGRDDFMMPRRGFPVWELICEDPSLLHAEVHSWADGAEMEETLLRLVGRVLLEERNLPPLDCKLESLPAVAVQDGMPMTLRIKN

SEQ ID NO: 1849 - protein, 378 aa, Sorghum bicolor
MALLLVLSSSLQALVVAAASAAAAGGRPPPAMFVFGDSTLDVGNNNYLPGPDVPRANKPYYGIDFPGSLPTGRFSNGYNIADYLAKSMGFASSPPPYLSLAPSTSRLVLTPRGNGVSYASGGAGILDSTNAGNNIPLSKQVQYFKSTKSQMATKLGSRATNLLLSNSVFLFSVGSNDLFVFATAQASESQNKSAAEQQRDVATLYTSLISNYSATITELHAMGARKFGIINVGLLGCVPAARLSSHGATGACLDGLNELASGLDDALASLLASLASRLPGFVYSLADYYGLSAATFEDPAASGYTDVADACCGGGRLGAEADCLPNATVCSNRDQHAFWDRVHPCQRGTMLAAQNFYDSRPGRYTAPINFKQLAYTSL

SEQ ID NO: 1850 - protein, 378 aa, Zea mays
MSLLPCLLVLSSLQAPAIVAASAAAGGRPPAMFVFGDSTLDVGNNNYLAGPGVPQANKPYYGIDFPGSVPTGRFSNGYNIADYLAKSMGFASSPPPYLSLAPSTGRLVLTARGSGVSYASGGAGILDSTNAGNNIPLSKQVQYFKSTKAQLVTKLGSRATHLLLSRSVFLFSVGSNDLFVFATAQASAHNNKSAADQQRDVATLYASLISNYSATITELHTMGARKFAIINVGLLGCVPVARLSGGTKTGACLDGLNELASGLDDALAVLLASLASRLPGFTYSLADYYGLSMATFDDPGASGYTDVADACCGGGRFGAEADCLPNATVCSNRDQHAFWDRVHPCQRGAMLTAQNFYDSRPGRYTAPINFKQLASTSL

SEQ ID NO: 1851 - protein, 191 aa, Zea mays
MTACGNVPIFKDGKGCGSCYEVRCKEKPECSGNPVTVFITDMNYEPIAPYHFDLSGKAFGSLAKPGLNDKLRHCGIMDVEFRRVRCKYPAGQKIVFHIEKGCNPNYVAVLVKFVADDGDIVLMEIQDKLSAEWKPMKLSWGAIWRMDTAKALKGPFSIRLTSESGKKVIAKDIIPANWRPDAVYTSNVQFY

SEQ ID NO: 1852 - protein, 245 aa, Zea mays
  misc_feature (9)..(9): Xaa can be any naturally occurring amino acid
GPPKVPPGXNITTNYNGKWLTARATWYGQPNGAGAPDNGGACGIKNVNLPPYSGMTACGNVPIFKDGKGCGSCYEVRCKEKPECSGNPVTVYITDMNYEPIAPYHFDLSGKAFGSLAKPGLNDKIRHCGIMDVEFRRVRCKYPAGQKIVFHIEKGCNPNYLAVLVKYVADDGDIVLMEIQDKLSAEWKPMKLSWGAIWRMDTAKALKGPFSIRLTSESGKKVIAKDVIPANWRPDAVYTSNVQFY

SEQ ID NO: 1853 - protein, 269 aa, Zea mays
MGSLANNIMVVGAVLAALVVGGSCGPPKVPPGPNITTNYNGKWLTARATWYGQPNGAGAPDNGGACGIKNVNLPPYSGMTACGNVPIFKDGKGCGSCYEVRCKEKPECSGNPVTVFITDMNYEPIAPYHFDLSGKAFGSLAKPGLNDKLRHCGIMDVEFRRVRCKYPAGQKIVFHIEKGCNPNYVAVLVKFVADDGDIVLMEIQDKLSAEWKPMKLSWGAIWRMDTAKALKGPFSIRLTSESGKKVIAKDIIPANWRPDAVYTSNVQFY

SEQ ID NO: 1854 - protein, 269 aa, Zea mays
MGSLANNIMVVGAVLAALVAGGSCGPPKVPPGPNITTNYNGKWLTARATWYGQPNGAGAPDNGGACGIKNVNLPPYSGMTACGNVPIFKDGKGCGSCYEVRCKEKPECSGNPVTVYITDMNYEPIAPYHFDLSGKAFGSLAKPGLNDKIRHCGIMDVEFRRVRCKYPAGQKIVFHIEKGCNPNYLAVLVKYVADDGDIVLMEIQDKLSAEWKPMKLSWGAIWRMDTAKALKGPFSIRLTSESGKKVIAKDVIPANWRPDAVYTSNVQFY

SEQ ID NO: 1855 - protein, 269 aa, Zea mays
MGSLVNNIMVVGAVLAALVAGGSCGPPKVPPGPNITTNYNGKWLTARATWYGQPNGAGAPDNGGACGIKNVNLPPYSGMTACGNVPIFKDGKGCGSCYEVRCKEKPECSGNPVTVYITDMNYEPIAPYHFDLSGKAFGSLAKPGLNDKIRHCGIMDVEFRRVRCKYPAGQKIVFHIEKGCNPNYLAVLVKYVADDGDIVLMEIQDKLSAEWKPMKLSWGAIWRMDTAKALKGPFSIRLTSESGKKVIAKDVIPANWRPDAVYTSNVQFY

SEQ ID NO: 1856 - protein, 269 aa, Zea mays
MGSLANNIMVVGVVLAALVAGGSCGPPKVPPGPNITTNYNGKWLTARATWYGQPNGAGAPDNGGACGIKNVNLPPYSGMTACGNVPIFKDGKGCGSCYEVRCKEKPECSGNPVTVYITDMNYEPIAPYHFDLSGKAFGSLAKPGLNDKIRHCGIMDVEFRRVRCKYPAGQKIVFHIEKGCNPNYLAVLVKYVADDGDIVLMEIQDKLSAEWKPMKLSWGAIWRMDTAKALKGPFSIRLTSESGKKVIAKDVIPPNWRPDAVYTSNVQFY

SEQ ID NO: 1857 - protein, 265 aa, Paspalum notatum
MGSLAKIVAVAAVLAALVAGGSCGPPKVPPGPNITTNYNGKWLPAKATWYGQPNGAGPDDNGGACGIKNVNLPPYNGFTACGNPPIFKDGKGCGSCYEIRCNKPECSGQPVTVFITDMNYEPIAPYHFDLSGKAFGAMAKPGLNDKLRHYGIFDLEFRRVRCKYQGGQKIVFHVEKGSNPNYLAMLVKFVADDGDIVLMELKEKSSDWKPMKLSWGAIWRMDTPKALVPPFSIRLTSESGKKVIAQDVIPVNWKPDTVYNSNVQF

SEQ ID NO: 1858 - protein, 266 aa, Sorghum bicolor
MGSLANKIVAMAAVLAALVTGGSCAPKKFPPGPNITTNYNGQWLVARATWYGQPNGAGPDDNGGACGIKNVNLPPYNGFTACGNVPIFKDGKGCGSCYEVRCKEMPECSGNPITVFITDMNYEPIAPYHFDFSGKAFGSLAKPGLNDKLRHCGIMNVEFRRVRCKLGGKIMFHVEKGSNPNYLAVLVKNVADDGNIVLMELEDKASPGFKPMKQSWGAVWRFDTPKPIKGPFSIRLTSESGKKLVAPNVIPASWKPDTLYNSNIQF

SEQ ID NO: 1859 - protein, 269 aa, Oryza sativa Japonica Group
MGSLTTNIVLAVAVVAALVGGGSCGPPKVPPGPNITTNYNAPWLPARATWYGQPYGSGSTDNGGACGIKNVNLPPYNGMISCGNVPIFKDGRGCGSCYEVKCEQPAACSKQPVTVFITDMNYEPISAYHFDFSGKAFGAMACPGKETELRKAGIIDMQFRRVRCKYPGGQKVTFHVEKGSNPNYLAVLVKFVADDGDVIQMDLQEAGLPAWRPMKLSWGAIWRMDTATPLKAPFSIRVTTESGKSLIAKDVIPVNWMPDAIYVSNVQFY

SEQ ID NO: 1860 - protein, 269 aa, Oryza sativa Indica Group
MGSLTTNIVLAVAVVAALVGGGSCGPPKVPPGPNITTNYNAPWLPARATWYGQSYGSGPADNGGACGIKNVNLPPYNGMISCGNVPIFKDGRGCGSCYEVKCEQPAACSKQPVTVFITDMNYEPISAYHFDFSGKAFGAMACPGKETELRKAGIIDMQFRRVRCKYPGGQKVTFHVEKGSNPNYLAVLVKFVADDGDVIQMDLQEAGLPAWRPMKLSWGAIWRMDTATPLKAPFSIRVTTESGKSLIAKDVIPVNWMPDAIYVSNVQFY

SEQ ID NO: 1861 - protein, 517 aa, Sorghum bicolor
MMAGPGRAHGHRNRLRRLIPRLLLLVFALYAASFAIYLLLQSESESQSQSHHQSPPDPTPMTEAREGVGAPPSSQKPWPRLPSFLPWVSSRAPPPHTCEAYFGNGFSRLVDVLPAGGGGGWFRCHHSETLGSSICEGARVRLDPALIAMSRGGEPLEQVMGRAEEEELPKYEPGALQVEGPAAGRTAPLVDAGFLNDYVPTGGIGMHTMKALLESARVVPPGELHCSQWVEEPTLLVTRFEYANLFHTITDWYSAYVSSRVTNLPNRPNVIFVDGHCKAQLEETWEALFSSVTYAKNFSGPVCFRHAILSPLGYETALFKGLSESFSCEGASAESLREKTDYEKTSRLSEFGEMIVASFDLLQDDIMSSKKSNGLNVLFVRREDYLAHPRHSGKVESRLSNEQEVYDAIDKWAQGLKCKVNVVNGLFAHMTMKEQLRAILEASVVIGAHGAGLTHLVSATPDTKVLEIISSMYRRPHFALISHWKSLEYHAINLPGSFARITDAISELRKILEGLGC

SEQ ID NO: 1862 - protein, 514 aa, Zea mays
MMAGRAHGHRNRLRRLIPRLLLLLVAVYAASFAIYLLLQSHSHHQSPPDPTPRTEARDGVLAPSSSQKPWPRLPSFLPWVSSAVPPPPLHTCEAYFGNGFSRRVDVLPAGRGSGGGGWFRCHHSETLGSSICEGARVRLDPALIAMSRGGEPLEQVMGRAEEEELPKYEPGALQVEGPAAGMPVPLVDAGFLNDYVPTGGIGMHTMRALLESTRVVPPGELHCSQWVEEPTLLVTRFEYANLFHTITDWYSAYVSSRVTNLPNRPNVVFLDGHCKAQLEETWEALFSSVTYAKNFTVPVCFRHAILSPLGYETAMFKGLSESFSCEGASVDSLREKPDYEKTARLSEFGEMIVASFDLLQDDIMSSKKSNGLNVLFVRREDYLAHPRHSGKVESRLSNEQEVYDAIDKWAQGLKCKVNVVNGLFAHMTMKEQLRAILEASVVIGAHGAGLTHLVSATPDTKVLEIISSMYRRPHFALISHWKSLEYHAINLPGSFARVTDVINELRKILEGLGC

SEQ ID NO: 1863 - protein, 512 aa, Zea mays
MMAGRAHGHRNRLRRLIPRLLLLLVAVYAASFAIYLLLQSHSHHQSPPDPTPRTEARDGVLAPSSSQKPWPRLPSFLPWVSSAVPPPPLHTCEAYFGNGFSRRVDVLPAGRGSGGGGWFRCHHSETLGSSICEGARVRLDPALIAMSRGGEPLEQVMGRAEEEELPKYEPGALQVEGPAAGMPVPLVDAGFLNDYVPTGGIGMHTMRALLESTRVVPPVHCSQWVEEPTLPVTRFEYASLFHTITDWYSAYVSSRVTNLPDRPNVVFVDGHCKAQLEETWEALFSSVTYAKNFTVPVCFRHAILSPLGYETAMFKGLSESFSCEGASVDSLREKPDYEKTARLSEFGEMIVASFDLLQDDIMSSKKSNGLNVLFVRREDYLAHPRHSGKVESRLSNEQEVYDAIDKWAQGLKCKVNVANGLFAHMTMKEQLRAILEASVVIGAHGAGLTHLVSATPDTKVLEIISSMYRRPHFALISHWKSLEYHAINLPGSFARVTDVINELRKILEGLGC

SEQ ID NO: 1864 - protein, 515 aa, Saccharum officinarum
MMAGRAHGHRNRLRRLIPRLLLLVFAVYAASFAIYLLLQSPQSESHHQSPPDPTPRTEARDGVGAPPYSHKPWPRLPSCLPWVYSAAPPHTCEAYFGNGFSRRVDVLPAGRGGGGGWFRCHHSETLGSSICEGARVRLDPALIAMSRGGEPLEQVMGRAEEEELPKYEPSALQVEGPAAGKTAPLVDAGFLNDYVPNGGIRMHTMRALLDSARVVPPGELHCSQWVEEPTLLVTRFEYANLFHTITDWYSAYVSSRVTNLPDRPNVVFVDGHCKAPLEQTWEALFSNVTYIKSFSGPVCFRRAVLSPLGYETALFKGLSESFSCEGASAQSLRNRPDHQKTARLSEFGEMIIASFDLLEDGIVPSKKTSTGLKVLFVRREDYLAHPRHSGKVESRLSNEQEVFGAVEKWAKKGQKCKINVVNGLFAHMSMKEQLQAILEASVIIGAHGAGLTHLVSATPDTKVLEIISSFYRRPHFALISHWKALEYHAINLPGSYASIPDVTSELSNILKGLGC

SEQ ID NO: 1865 - protein, 453 aa, Sorghum bicolor
LEAVKAWGAAVLAEPWPRFRSVLPWVSSRAPPPHTAKAYFGNGFSRLVDVLPAGGGGGWFRGHHSETLGSSICEGARVRLDPALIAMSRGGEPLEQVMGRAEEEELPKYEPGALQVEGPAAGRTAPLVDAGFLNDYVPTGGIGMHTMKALLESARVVPPHLLLQWVEEPTLLVTRFEYANLFHTITDWYSAYVSSRVTNLPNRPNVIFVDGHCKAQLEETWEALFSSVTYAKNFSGPVCFRHAILSPLGYETALFKGLSESFSCEGASAESLREKTDYEKTSRLSEFGEMIVASFDLLQDDIMSSKKSNGLNVLFVRREDYLAHPRHSGKVESRLSNEQEVYDAIDKWAQGLKCKVNVVNGLFAHMTMKEQLRAILEASVVIGAHGAGLTHLVSATPDTKVLEIISSMYRRPHFALISHWKSLEYHAINLPGSFARITDAISELRKILEGLGC

SEQ ID NO: 1866 - protein, 533 aa, Oryza sativa Japonica Group
MMPVRTYHHHHHHNNSNNHRLRRIIPRVLLAVFAIYAVSFAAYLLRHQSPHPHPHPAADPERDAVDAAGGGGGGGAVDRVRVEAPSSQKPWPRLPSFLPWTSASVRPPPKHSCEGYFGNGFSRLVDVLPARGGGGGGWFRCHHSETLRSSICEGGRVRLDPGLIAMSRGGEPLDQVMGRAEEEELPKYEPGALQVEAAAKRTGPLVEAGFLDAYVPTGGIGMHTMRSLLDSGRVVPPGELHCSQWVEEPTLLVTRFEYANLFHTITDWYSAYVSSRVTDLPNRPNVVFVDGHCKAQLEQTWEALFSNVTYVKNFSGPVCFRHAILSPLGYETALFKGLSESFSCEGASAESLREKPDHQKTARLSEFGEMILASFDLLRDDILSSKTSNGLNVLFVRREDYLAHPRHSGKVESRLSNEKEVYDAIEGWAKGQKCKINVINGLFAHMNMKEQLRAIQEASVVIGAHGAGLTHLVSATPDTKVLEIISSMYRRPHFALISHWKSLEYHAINLPGSYARVTDVINELSNILKGFGC

SEQ ID NO: 1867 - protein, 511 aa, Hordeum vulgare subsp. vulgare
MMAGRNHHQSHGQRLRRLIPCILVVVFAVHAVSFALYLLLQPHHPPPNPGKPEAQSHERVQAPSPQKPWPRLPSLLPWTADPSLPPRSCEAYFGNGFSRRVEVLPEGRGGGGWFLCHHSETLGSSICEGARVRLDPALMAMSRGGEPIDQVMGRKEEEELPRYESGALVVEGGAAGKRGPLVEPGFLDAHMPTNGIGTHTMRALLDSARVVPPGELHCSQWVEEPTLLVTRFEYANLFHTITDWYSAYVSSRVTNLPDRPNVVFVDGHCKAPLEQTWEALFSNVTYIKSFSGPVCFRRAVLSPLGYETALFKGLSESFSCEGASAQSLRNRPDHQKTARLSEFGEMIIASFDLLEDGIVPSKKTSTGLKVLFVRREDYLAHPRHSGKVESRLSNEQEVFGAVEKWAKKGQKCKINVVNGLFAHMSMKEQLQAILEASVIIGAHGAGLTHLVSATPDTKVLEIISSFYRRPHFALISHWKALEYHAINLPGSYASIPDVTSELSNILKGLGC

SEQ ID NO: 1868 - protein, 508 aa, Hordeum vulgare
MMAGRNHHQSHGQRLRRLIPCILVVVFAVHAVSFALYLLLQPHHPPPNPGKPEAQTHERVQAPSPQKPWPRLPSLLPWTADPSLPPRSCEAYFGNGFSRRVEVLPEGRGGGGWFLCHHSETLGSSICEGARVRLDPALMAMSRGGEPLDQVMGRAEEEELPKYEPGALQVEAAAKRRGPLVEPGFLDAHVPTNGIGMHTMRALLDSARVVPPLHCSQWVEEPTLLVTRFEYANLFHTITDWYSAYVSSRVTNLPDRPNVVFVDGHCKAPLEQTWEALFSNVTYIKSFSGPVCFRRAVLSPLGYETALFKGLSESFSCEGASAQSLRNRPDHQKTARLSEFGEMIIASFDLLEDGIVPSKKTSTGLKVLFVRREDYLAHPRHSGKVESRLSNEQEVFGAVEKWAKKGQKCKINVVNGLFAHMSMKEQLQAILEASVIIGAHGAGLTHLVSATPDTKVLEIISSFYRRPHFALISHWKALEYHAINLPGSYASIPDVTSELSNILKGLGC

SEQ ID NO: 1869 - protein, 480 aa, Zea mays; identical to SEQ ID NO: 874

SEQ ID NO: 1870 - protein, 311 aa, Sorghum bicolor
MAACVDKWQPTHAGRLSGAIYRFLPDGATDRAVTTAAPASASGGDDDVWEELRAEAQADADAEPLLRKFYGDLVLTRQSLEAALAAHLSAKLCIPGVLPQDALRDLLAAALAAHPDAGRATRADLRAARDRDAACERMVHCFLYYKGFLALQAHRAAHGLWSDGRSAAALLLQSRASEVFGVDIHPGARIGSGILFDHATGIVIGETAVVGNDVSILHGVTLGGTGKESGDRHPKVGDGVLIGAGASVLGNVRIGAGAKIGAGAVVLRDVPEGTTAVGNPAKAVGKKAVPQRRPEEQPGVTMEQGWSDYVI

SEQ ID NO: 1871 - protein, 313 aa, Zea mays
MAACVDKWHPTHAGRLTGAIYRYLPDGATDRAVAAAAAAPASASGGDDDDVWDELRAEAEADGDAEPLLRKYYADLVLSRPSLEAALAAHLSANVCVPGALPQDALRDLLAAALAARPESGPAARADLPAARDRDGCGRMVHCFLYYKGFLALQAHRAAHGLWCEGPSAPAFLLQSRASEVFGVDIHPGARIGSGILFDHATGIVIGETAVVGNDVSILHGVTLGGTGKESGDRHPKVGDGVLIGAGASVLGNVRVGAGAKIGAGAVVLRDVPEGTTAVGNPAKAVGKKAAPQRRPEEQPGVTMEQGWSAYVI

SEQ ID NO: 1872 - protein, 317 aa, Oryza sativa Indica Group
MAACVDKWPPAAYLCRLPEKFYCVLPDCTATDRPVVTASAAPAPAPAASGSSGDYVWDVLRAEAQDDADDEPLLRKFYHDLVLSRPSLESALASLLATKLCIPGALPQDQLRDLLAGALAAHPEAGRAARADLVAARDRDPACAKMVHCFLYYKGFLALQAHRAAHALWSDNRRAPALLLQSRASEVFGVDIHPGARIGCGILLDHATGVVIGETAVVGYDVSILHGVTLGGTGKESGDRHPKVGDGVLIGAGASVLGNVHIGDGAKIGAGAVVLRDVADGTTAVGNPAKPIIGKKAAPLRRPEELPGVTMEQRWSD

SEQ ID NO: 1873 - protein, 315 aa, Oryza sativa Japonica Group
MAACVDKWPPAAYLCRLPEKFYCVLPDCTATDRPVVTASAAPAPAASGSSGDYVWDVLRAEAQDDADDEPLLRKFYHDLVLSRPSLESALASLLAAKLCIPGALPQDQLRDLLAGALAAHPEAGRAARADLVAARDRDPACAKMVHCFLYYKGFLALQAHRAAHALWSDNRRAPALLLQSRASEVFGVDIHPGARIGCGILLDHATGVVIGETAVVGYDVSILHGVTLGGTGKESGDRHPKVGDGVLIGAGASVLGNVHIGDGAKIGAGAVVLRDVADGTTAVGNPAKPIIGKKAAPQRRPEELPGVTMEQRWSD

SEQ ID NO: 1874 - protein, 314 aa, Hordeum vulgare subsp. vulgare
MAACVDKWNPAYSCHRISRSIYRFMPDCTITAPTGAAVNGSGGSCNGGDQVWEELYGEAQADAEDEPLLGMLYYELVLSHPSLEAALAAHLSAKLCIQGALPQDALRDILVGALAAHPEAIRHTRADLLAARDRDPACAKMVHCFLYYKGFLALQAHRAAHALWSEGRRPPALLLQSRASEVFGVDIHPGARIGGGILLDHATGIVIGETAVIGDDVSILHGVTLGGTGKVCGDRHPKVGDGVLIGAGASVLGNVRIGAGAKIGAGAVVLRDVECGTTAVGNPAKPIGKKAAPSLRPEEQPGVTMEQRWSDYVI

SEQ ID NO: 1875 - protein, 301 aa, Oryza sativa Japonica Group
MAACVDKWPAAYPCRLPDKFYCALPDCTTTDRPVAPAPAASGSSGDYVWDALRAEAQDDADDEPLLRKFYHDLVLSRPSLESALASLLAAKLCIPGALPQDQLRDLLAGALAAHPEAGRAARADLAAARDRDPACAKMVHCFLYYRGFLALQAHRAAHALWSDNRRAPALLLQSRASEVFGVDIHPGARIGGGILLDHATGVVIGETAVVGYGVSILHAVTLGGTGKESGDRHPKVGDGVLIGAGASVLGNVHIGDGAEIGAGAIVLRDVADGTTAKPIIGKKAEPQRELPGVTMEQRWSD

SEQ ID NO: 1876 - protein, 196 aa, Sorghum bicolor
MVVYTQEHVYRHPWDRVTAAAWRKFTDPASRTALSHVADVHTLHRRLDSDTGRLHAARSITVRSPPLPFVLRRLLPSAASSPNGAALCHCVETSLVDAQRRAMDVVVRNVSLRGLIEVEERASYRPHPDRPDDWTQFRQETTIRCRPLAALAAVAEKVETRCAERFLQNSAKGREVVERICRYLEAESAGAAPSVI

SEQ ID NO: 1877 - protein, 196 aa, Zea mays
MVVYTQEHVYRHPWDRVTAAAWRKFTDPASCTALSHVADVHTLHRRLDSDTGRLQAARSITVRSPPLPFVLRRLLPSAAASPNGAALCHCVETSLVDAQRRAMDVVVRNVSLRGLIEVEERASYRPHPDRPDDWTQFRQETTIRCRPLAALAAVAEKVETRCAERFLQNSAKGREVVERICRYLEAESAGAAPSVT

SEQ ID NO: 1878 - protein, 196 aa, Zea mays
  misc_feature (39)..(39): Xaa can be any naturally occurring amino acid
MVVYTQEHVYRHPWDRVTAAAWRKFTDPASCTALSHVAXVHTLHRRLDSDTGRLQAARSITVRSPPLPFVLRRLLPSAAASPNGAALCHCVETSLVDAQRRAMDVVVRNVSLRGLIEVEERASYRPHPDRPDDWTQFRQETTIRCRPLAALAAVAEKVETRCAERFLQNSAKGREVVERICRYLEAESAGAAPSVT

SEQ ID NO: 1879 - protein, 196 aa, Hordeum vulgare subsp. vulgare
MVVYTQEHVYRHPWDRVTAAAWRKFTDPASRTALSHVADVHTLQRRVDTDAGRLHAARSITVRSPPLPFILRRLLPAAAASPSGAAICHCVETSVVDAPRRAMDIVVRNVSLRGIIEVEERSTFRPHPDRPDDWTQFRQETTIRCRPLAKLAAVAEKVETRCAERFLQNSAKGREVVERICRYLEAEAAGAAPSAV

SEQ ID NO: 1880 - protein, 196 aa, Oryza sativa Japonica Group
MVVYTQEHVYRHPWDRVTAAAWRKFTDPASRTALSHVADVHTLHRRVDPEAGRLQAARSITVRSPPLPFILRRLLPAAASSPSGAALCHCVETSLVDAPRRAMDVVVRNVSLRGLIEVEERSTYRPHPERPEEWTQFRQETTIRCRPLSALAAVAEKVETRCAERFLQNSAKGREVVERICRYLEAEAAGAASSAI

SEQ ID NO: 1881 - protein, 196 aa, Oryza sativa Japonica Group
MVVYTQEHVYRHPWDRVTAAAWRKFTDPASRTALSHVADVHTLHRRVDPEAGRLQAARSITVRSPRFPFILRRLLPAAASSPSGAALCHCVETSLVDAPRRAMDVVVRNVSLRGLIEVEERSTYRPHPERPEEWTQFRQETTIRCRPLSALAAVAEKVETRCAERFLQNSAKGREVVERICRYLEAEAAGAASSAI

SEQ ID NO: 1882 - protein, 521 aa, Sorghum bicolor
MSAGEILRAELSSRTPPFGLRLWVVIGICIWALILCVLGFMCFWSVHRRNKKPGNGNKPCCDKIPVSQIPDVSKEIAVDEVREQHHAVVHNLRVQQESHHTLAVQEKPHHEKDSGKMLGHLVRSKSSDADNLSQCSSAAYQCERAGSSYSGDEGSSGNARRQYAQYATVSASPLVGLPEFSHLGWGHWFTLRDLEHATNRFSKENVIGEGGYGVVYRGRLINGTDVAVKKLLNNMGQAEKEFRVEVEAIGHVRHKNLVRLLGYCVEGIHRMLVYEYVNNGNLEQWLHGAMRQHGVLTWEARMKIVLGIAKALAYLHEAIEPKVVHRDIKSSNILIDEEFNGKLSDFGLAKLLGAGKSHITTRVMGTFGYVAPEYANTGLLNERSDVYSFGVLLLESVTGRDPVDYGRPANEVHLVEWLKMMVGSRRAEEVVDPDMELKPTTRALKRALLVALRCVDPDSEKRPTMGQVVRMLEAEDVPSREDRRSRRAHSSNADSESKASSSEFEISSDRRELGPSARFQS

SEQ ID NO: 1883 - protein, 508 aa, Zea mays
MSAGGVLRAELSSRTPPFGLRLWIVIGICIWALILFILGFMCFWSLHRRKPGKPCDKVPLSQIPDVSKEIAVDEAREQAVVHSLRVQESHTLSVQEKKHCEKDSGKMLAHLVRSKSSDADNLSQCSSAFQCERAGSSYSGDEGSSGNARRQYSQTVSASPLVGLPEFSHLGWGHWFTLRDLEHATNRFSKENVIGEGGYGVVYRGRLINGTDVAIKKLLNNMGQAEKEFRVEVEAIGHVRHKNLVRLLGYCVEGIHRMLVYEYVNNGNLEQWLHGAMRQHGVLTWEARMKIILGIAKALAYLHEAIEPKVVHRDIKSSNILVDEEFNGKLSDFGLAKLLGAGKSHITTRVMGTFGYVAPEYANTGLLNERSDVYSFGVLLLESVTGRDPVDYGRPANEVHLVEWLKMMVGTRRAEEVVDPDMELKPATRALKRALLVALRCVDPDSEKRPTMGQVVRMLEAEDVPSREDRRSRRGHSGNADSESKASSSEFEISSDRRELGPSARFQS

SEQ ID NO: 1884 - protein, 504 aa, Zea mays
GVLRAELSSRTPPFGLRLWIVIGICIWALILFILGFMCFWSLHRRKPGKPCDKVPLSQIPDVSKEIAVDEAREQAVVHSLRVQESHTLSVQEKKHCEKDSGKMLAHLVRSKSSDADNLSQCSSAFQCERAGSSYSGDEGSSGNARRQYSQTVSASPLVGLPEFSHLGWGHWFTLRDLEHATNRFSKENVIGEGGYGVVYRGRLINGTDVAIKKLLNNMGQAEKEFRVEVEAIGHVRHRNLVRLLGYCVEGIHRMLVYEYVNNGNLEQWLHGAMRQHGVLTWEARMKIILGIAKALAYLHEAIEPKVVHRDIKSSNILVDEEFNGKLSDFGLAKLLGAGKSHITTRVMGTFGYVAPEYANTGLLNERSDVYSFGVLLLESVTGRDPVDYGRPANEVHLVEWLKMMVGTRRAEEVVDPDMELKPATRALKRALLVALRCVDPDSEKRPTMGQVVRMLEAEDVPSREDRRSRRGHSGNADSESKASSSEFEISSDRRELGPSARLQS

SEQ ID NO: 1885 - protein, 513 aa, Zea mays
MSTTGEILRSELSSRTPPFGLRLWIVIGICIWVAILFIIGFMCFWSIYRRKPTKSSFDSTNDIPVSQIPDVSKEIAVDEVREHAAVQTFHVHESCRALAVQEKPCEKDSGRMLGHLVRSKSSDADNLSQCSSAAYQCERAASSYSGDEGSSGNARRQYPTVSASPLVGLPEFSHLGWGHWFTLRDLEHATNRFSKENVIGEGGYGIVYRGRLVNGTDVAIKKLLNNMGQAEKEFRVEVEAIGHVRHKNLVRLLGYCVEGIHRMLVYEYVNNGNLEQWLHGAMRQHGVLTWEARMKVVLGIAKALAYLHEAIEPKVVHRDIKSSNILIDEEFNGKLSDFGLAKLLGAGKSHITTRVMGTFGYVAPEYANTGLLNEKSDVYSFGVLLLEAVTGRDPVDYGRPANEVHLVEWLKMMVGTRRAEEVVDPDMELKPAIRALKRALLVALRCVDPDAEKRPTMGQVVRMLEAEDVPSREDRRSRRGHSSNADNESKASSSEFEISSDRRELGPSSRFQA

SEQ ID NO: 1886 - protein, 509 aa, Oryza sativa Japonica Group
MSTGETLRAELSSRTPPFGLRLWIVIGISIWVVIFFILGFMCLWSIYRRKPKKSFDKIPVSQIPDVSKEIAVDEVREHAVVENFRVQESHAISVQEKHYEKDSGKMLAHLVRSKSSDADNLSQCSSVYQCDRAGSSYSGDEGSSGNARRHFSQYATVSASPLVGLPEFSHLGWGHWFTLRDLEHATNRFSKENVIGEGGYGVVYRGRLINGTDVAIKKLLNNMGQAEKEFRVEVEAIGHVRHKNLVRLLGYCVEGIHRMLVYEYVNNGNLEQWLHGAMRQHGVLTWEARMKVVLGIAKALAYLHEAIEPKVVHRDIKSSNILIDEEFNGKLSDFGLAKMLGAGKSHITTRVMGTFGYVAPEYANTGLLNEKSDVYSFGVLLLEAVTGRDPVDYGRPANEVHLVEWLKMMVGTRRSEEVVDPDMEVKPTIRALKRALLVALRCVDPDSEKRPTMGHVVRMLEAEDVPSREDRRSRRGNTANADTESKTSSSEFEISGDRRDSGPSARFQP

SEQ ID NO: 1887 - protein, 519 aa, Sorghum bicolor
MSTTGEILRTELSSRTPPFGLRLWIVIGICIWVAILFILGFMCFWSIYRRKPSKSSFDSTNTIPVSQIPDVSKEIAVDEVREHAAVQSFHVHESRTLAVAVQEKHCEKKDSGKMLGHLVRSKSSDADNLSQCSSAYQCEKAASSYSGDEGNSGNAIARRQYSQYPTVSASPLVGLPEFSHLGWGHWFTLRDLEHATSRFSKENVIGEGGYGIVYRGRLINGTDVAIKKLLNNMGQAEKEFRVEVEAIGHVRHKNLVRLLGYCVEGIHRMLVYEYVNNGNLEQWLHGAMRQHGVLTWEARMKVILGIAKALAYLHEAIEPKVVHRDIKSSNILIDEEFNGKLSDFGLAKLLGAGKSHITTRVMGTFGYVAPEYANTGLLNEKSDVYSFGVLLLEAVTGRDPVDYGRPANEVHLVEWLKMMVGTRRAEEVVDPDMELKPAIRALKRALLVALRCVDPDAEKRPTMGQVVRMLEAEDVPSREDRRSRRGHSNNADSESKASSSEFEISSDRRELGPSSRFQP

SEQ ID NO: 1888 - protein, 513 aa, Zea mays
MSTTGEILRSELSSRTPPFGLRLWIVIGICIWVAILFIIGFMCFWSIYRRKPTKSSFDSTNDIPVSQIPDVSKEIAVDEVREHAAVQTFHVHESCRALAVQEKPCEKDSGRMLGHLVRSKSSDADNLSQCSSAAYQCERAASSYSGDEGSSGNARRQYPTVSASPLVGLPEFSHLGWGHWFTLRDLEHATNRFSKENVIGEGGYGIVYRGRLVNGTDVAIKKLLNNMGQAEKEFRVEVEAIGHVRHKNLVRLLGYCVEGIHRMLVYEYVNNGNLEQWLHGAMRQHGVLTWEARMKVVLGIAKALAYLHEAIEPKVVHRDIKSSNILIDEEFNGKLSDFGLAKLLGAGKSHITTRVMGTFGYVAPEYANTGLLNEKSDVYSFGVLLLEAVTGRDPVDYGRPANEVHLVEWLKMMVGTRRAEEVVDPDMELKPAIRALKRALLVALRCVDPDAEKRPTMGQVVRMLEAEDVPSREDRRSRRGHSSNADNESKASSSEFEISSDRRESGPSSRFQA

SEQ ID NO: 1889 - protein, 510 aa, Oryza sativa Indica Group
MSTGETLRAELSSRTPPFGLRLWIVIGISIWVVIFFILGFMCLWSIYRRKPKKSFDKIPVSQIPDVSKEIAVDEVREHAVVENFRVQESHAISVQEKHYEKDSGKMLAHLVRSKSSDADNLSQCSSVYQCDRAGSSYSGDEGSSGNARRHFSQYATVSASPLVGLPEFSHLGWGHWFTLRDLEHATNRFSKENVIGEGGYGVVYRGRLINGTDVAIKKLLNNMGQAEKEFRVEVEAIGHVRHKNLVRLLGYCVEGIHRMLVYEYVNNGNLEQWLHGAMRQHGVLTWEARMKVVLGIAKALAYLHEAIEPKVVHRDIKSSNILIDEEFNGKLSDFGLAKMLGAGKSHITTRVMGTFGYVAPEYANTGLLNEKSDVYSFGVLLLEAVTGRDPVDYGRPANEVHLVEWLKMMVGTRRAEEVVDPDMEVKPTIRALKRALLVALRCVDPDSEKRPTMGHVVRMLEAEDVPSREVDRRSRRGNTANADTESKTSSSEFEISGDRRDSGPSARFQL

SEQ ID NO: 1890 - protein, 513 aa, Zea mays
MSTTGEILRSELSSRTPPFGLRLWIVIGICIWVAILFIIGFMCFWSIYRRKPTKSSFDSTNDIPVSQIPDVSKEIAVDEVREHAAVQTFHVHESCRALAVQEKPCEKDSGRMLGHLVRSKSSDADNLSQCSSAAYQCERAASSYSGDEGSSGNARRQYPTVSASPLVGLPEFSHLGWGHWFTLRDLEHATNRFSKENVIGEGGYGIVYRGRLVNGTDVAIKKLLNNMGQAEKEFRVEVEAIGHVRHKNLVRLLGYCVEGIHRMLVYEYVNNGNLEQWLHGAMRQHGVLTWEARMKVVLGIAKALAYLHEAIEPKVVHRDIKSSNILIDEEFNGKLSDFGLAKLLGAGKSHITTRVMGTFGYVAPEYANTGLLNEKSDVYSFGVLLLEAVTGRDPVDYGRPANEVHLVEWLKMMVGTRRAEEVVDPDMELKPAIRALKRALLVALRCVDPDAEKRPTMGQVVRMLEAEDVPSREDRRSRRGHSSHADNESKASSSEFEISSDRRESGPSSRFQA

SEQ ID NO: 1891 - protein, 510 aa, Oryza sativa Japonica Group
MSTGETLRAELSSRTPPFGLRLWIVIGISIWVVIFFILGFMCLWSIYRRKPKKSFDKIPVSQIPDVSKEIAVDEVREHAVVENFRVQESHAISVQEKHYEKDSGKMLAHLVRSKSSDADNLSQCSSVYQCDRAGSSYSGDEGSSGNARRHFSQYATVSASPLVGLPEFSHLGWGHWFTLRDLEHATNRFSKENVIGEGGYGVVYRGRLINGTDVAIKKLLNNMGQAEKEFRVEVEAIGHVRHKNLVRLLGYCVEGIHRMLVYEYVNNGNLEQWLHGAMRQHGVLTWEARMKVVLGIAKALAYLHEAIEPKVVHRDIKSSNILIDEEFNGKLSDFGLAKMLGAGKSHITTRVMGTFGYVAPEYANTGLLNEKSDVYSFGVLLLEAVTGRDPVDYGRPANEVHLVEWLKMMVGTRRSEEVVDPDMEVKPTIRALKRALLVALRCVDPDSEKRPTMGHVVRMLEAEDVPSREVDRRSRRGNTANADTESKTSSSEFEISGDRRDSGPSARFQP

SEQ ID NO: 1892 - protein, 207 aa, Zea mays
MVSLKLQKRLAASYLKCGKGKVWLDPNEVSEISMANSRQNIRKLVKDGFIIKKPHKIHSRSRARRAHDAKQKGRHSGYGKRRGTREARLPTKVLWMRRMRVLRRLLRKYREAKKIDKHMYHDMYMKVKGNAFKNKRVLMESIHKSKAEKAREKTLSDQFEAKRAKSKASRERKIARREERLAQGPREITPPVSSTAPATGAPKKAKK

SEQ ID NO: 1893 - protein, 207 aa, Sorghum bicolor
MVSLKLQKRLAASVLKCGKGKVWLDPNEVSEISMANSRQNIRKLVKDGFIIKKPQKIHSRSRARRAHEAKQKGRHSGYGKRRGTREARLPTKVLWMRRMRVLRRLLRKYREAKKIDKHMYHDMYMKVKGNSFKNKRVLMESIHKSKAEKAREKTLSDQFEAKRAKSKASRERKIARREERLAQGPKDITPPVSATAQATGAPKKAKK

SEQ ID NO: 1894 - protein, 207 aa, Sorghum bicolor
MVSLKLQKRLAASVLKCGKGKVWLDPNEVSEISMANSRQNIRKLVKDGFIIKKPQKIHSRSRARRAHEAKQKGRHSGYGKRRGTREARLPTKILWMRRMRVLRRLLRKYREAKKIDKHMYHDMYMKVKGNMFKNKRVLMESIHKSKAEKLREKTLSDQFEAKRAKSKASRERKIARREERLAQGPREPTAPVSATAPSAGAPKKAKK

SEQ ID NO: 1895 - protein, 207 aa, Zea mays
MVSLKVPKRLAASVLKCGKGKVWLDPNEVSEISMANSRHNIRKLVKDGFIIKKPQKIHSRSRARRAHEAKQKGRHSGYGKRRGTREARLPTKVLWMRRMRVLRRLLRKYREAKKIDKHMYHDMYMKVKGNSFKNKRVLMESIHKSKAEKAREKTLSDQFEARRAKSKASRERKNARREERLAQGPREIPPPVSATAPTTGAPKKAKK

SEQ ID NO: 1896 - protein, 207 aa, Zea mays
MVSLKLQKRLAASVLKCGKGKVWLDPNEVSEISMANSRQNIRKLVKDGFIIRKPQKVHSRSRARRAHEAKQKGRHSGYGKRRGTREARLPTKILWMRRMRVLRRLLRKYREAKKIDKHMYHDMYMKVKGNMFKNKRVLMESIHKSKAEKAREKTLSDQFEAKRAKSKASRERKIARREERLAQGPREPTAPVAAPAPSTGVPKKAKK

SEQ ID NO: 1897 - protein, 207 aa, Zea mays
MVSLKLQKRLAASVLKCGKGKVWLDPNEVSEISMANSRQNIRKLVKNGFIIRKPQKVHSRSRARRAHEAKQKGRHSGYGKRRGTREARLPTKILWMRRMRVLRRLLCKYREAKKIDKHMYHDMYMKVKGNMFKNKRVLMESIHKSKAEKAREKTLSDQFEAKRAKSKASRERKIARREERLAQGPREPTAPVAAPAPSTGVPKKAKK

SEQ ID NO: 1898 - protein, 206 aa, Oryza sativa Indica Group
MVSLKLQKRLASSVLKCGKGKVWLDPNEVNEISMANSRQNIRKLVKDGFIIKKPQKIHSRSRARRAHEAKQKGRHSGYGKRRGTREARLPTKILWMRRMRVLRRLLRKYREAKKIDKHMYHDMYMKVKGNMFKNKRVLMESIHKSKAEKAREKTLSDQFEAKRAKSKASRERKIARREERLAQGPREPAAPAVPAQTAAAPKKSKK

SEQ ID NO: 1899 - protein, 206 aa, Oryza sativa Japonica Group
MVSLKLQKRLASSVLKCGKGKVWLDPNEVNEISMANSRQNIRKLVKDGFIIKKPQKIHSRSRARRAHEAKQKGRHSGYGKRRGTREARLPTKILWMRRMRVLRRLLRKYREAKKIDKHMYHDMYMKVKGNMFKNKRVLMESIHKSKAEKAREKTLSDQFEAKRAKSKASRERKIARRDERLAQGPREPAAPAVPAQTAAAPKKYKK

SEQ ID NO: 1900 - protein, 208 aa, Oryza sativa Japonica Group
MVSLKLQKRLAASVLKCGKGKVWLDPNEVNEISMANSRQNIRKLVKDGFIIKKPQKIHSRSRARRAHEAKQKGRHSGYGKRRGTREARLPTKILWMRRMRVLRRLLRKYREAKKIDKHMYHDMYMKVKGNMFKNKRVLMESIHKSKAEKAREKTLSDQFEAKRAKSKASRERKIARREERLAQGPREPAAPAAAAPAQTAAAPKKAKK

SEQ ID NO: 1901 - protein, 208 aa, Zea mays
MVSLKPQKRLAAGVLKCGKGKVWLDPNEVYEISMANSRQNIRKLVKDGFIIKKPQKIHSRSRARRAHEAKQKGRHSGYGKRRGTREARLPTKILWMRRMRVLRRLLRKYREAKKIDKHMYHDMYMKVKGNMFKNKRVLMESIHKSKAEKAREKTLSDQFEAKRAKSKASRERKIARREERLAQGPREPAAAPVSATAPFAAAPKKAKK

SEQ ID NO: 1902 - protein, 395 aa, Oryza sativa Indica Group
MAPPPAFSLPTAVLAWGSGEDGQLGMGGYEEEDWARGVAALDALAVSAVVAGSRNSLAICADGRLFTWGWNQRGTLGHPPETKTESSPAPVDALAGVSIVQAAIGGWHCLAVDDKGRAYAWGGNEYGQCGEEAERKEDGTRALRRDIPIPQRCAPKLKVRQVAAGGTHSVVLTQDGHVWTWGQPWPPGDIKQISTPVRVQGLENVKVIAVGAFHNLALTEDGILWAWGNNEYGQLGTGDTQPRSQPIRVEGLSDLSLVDIAAGGWHSTALTKEGEVYAWGRGEHGRLGFGDDKSSHMVPQKVELLAGEDIIQVSCGGTHSVALTRDGRMFSYGRGDHGRLGYGRKVTTGHPMEVPIDLPPPGTSGGDSGGQWQARYVACGGRHTLAIATWTEADE

SEQ ID NO: 1903 - protein, 395 aa, Oryza sativa Japonica Group
MAPPPASSLPTAVLAWGSGEDGQLGMGGYEEEDWARGVAALDALAVSAVVAGSRNSLAICADGRLFTWGWNQRGTLGHPPETKTESSPAPVDALAGVSIVQAAIGGWHCLAVDDKGRAYAWGGNEYGQCGEEAERKEDGTRALRRDIPIPQGCAPKLKVRQVAAGGTHSVVLTQDGHVWTWGQPWPPGDIKQISTPVRVQGLENVKVIAVGAFHNLALTEDGILWAWGNNEYGQLGTGDTQPRSQPIRVEGLSDLSLVDIAAGGWHSTALTKEGEVYAWGRGEHGRLGFGDDKSSHMVPQKVELLAGEDIIQVSCGGTHSVALTRDGRMFSYGRGDHGRLGYGRKVTTGHPMEVPIDLPPPGTSGGDSGGQWQARYVACGGRHTLAIATWTEADE

SEQ ID NO: 1904 - protein, 391 aa, Zea mays
MAAPPRATAVLAWGSGEDGQLGMGGNEEKDWAHCVEALGSYAVTAVVAGSRNSLAICEDGRLFTWGWNQRGTLGHPPKTKTESSPGPVHALAGLKIVQAAIGGWHCLAVDDNGHAYAWGGNEYGQCGEEPERKEDGTRALRRDIPTPQRCAPKLKVRQVAAGGTHSVVLTQEGHVWTWGQPWPPGDIKQISTPVRVQGLEKVRVIAVGAFHNLALTEDGILWAWGNNEYGQLGTGDTQPRSHPIRVEGLSDLSLVDIAAGGWHSTALTIQGEVYAWGRGEHGRLGFGDDKSSRMVPLKVELLAGEDIVQVSCGGTHSVALTRDGRMFSYGRGDHGRLGYGRKLTTGQPMGVDIDLPPPKTRSSRDGQWQAKYVACGGRHTLAIVVWAETTD

SEQ ID NO: 1905 - protein, 389 aa, Hordeum vulgare subsp. vulgare
MAPPSRPVAVLAWGSGEDGQLGMGGCDEKDRARCICALDAYAVSAVVAGSRNSLAICDDGSLFTWGWNQRGTLGHPPETKTESSPAHVDALVGVKIVQAAIGGWHCLAVDDKGRAYAWGGNEYGQCGEEPERKEDGTRALRRDIPIPQRCALKLKVRQVAAGGTHSVVLTQEGHVWTWGQPWPPGDIKNISTPVRVQGLEQVSMIAVGAFHNLALSVDRILWAWGNNEYGQLGIGDTQPRSQPIRVEGLSNLSLVDIAAGGWHSAALTKEGEVYAWGRGEHGRLGFGDDKSSHMVPLQVQLLAGEDIVQVSCGGTHSVVLTSDGRIFSYGRGDHGRLGDGRKVTTGHPMEVPINLPPPKTSTSSEGLWQANYVACGGRHTLAIVTWTDM

SEQ ID NO: 1906 - protein, 395 aa, Vitis vinifera
MASKPKAIISWGSGEDGQLGIGNNEEKEWVCAVKALAAQNVCSVVAGSRNSLAICEDGKLFTWGWNQRGTLGHPPETKTENIPSQVKALANAKIVQAAIGGWHCLAVDDQGRAYAWGGNEYGQCGEEPERKDDTGRPLRRDITIPQRCASKLSVRQVAAGGTHSVVLTREGHVWTWGQPWPPGDIKQISTPVRVQGLEKVRLIAVGAFHNLALLEDGILWAWGNNEYGQLGTGDTQPRSQPIAVQGLSDLTLVDIAAGGWHSTALTDDGGVYGWGRGEHGRLGFGDDKSSKMVPQKVQLLVEENIVQISCGGTHSVALTRDGRMFSFGRGDHGRLGYGRKVTTGHPMEVPINLPPATNLSGSGAGGHWCSKLVACGGRHTLAIVEWLAHEPEQLI

SEQ ID NO: 1907 - protein, 392 aa, Populus trichocarpa
MATESSVIAWGSGEDGQLGIGNNEEKEWVCIVKALEPYKVRSVVAGSRNSLAICDDGKLFTWGWNQRGTLGHPPETKTENIPSQVKALANVNIVQAAIGGWHCLAVDDQGRAYAWGGNEYGQCGEEPERKDDTGRPLRRDIVIPQRCASKLVVRQVAAGGTHSVVLTREGHVWSWGQPWPPGDIKQISVPVRVQGLERVRLIAVGAFHNLALQEDGTLWAWGNNEYGQLGTGDTQPRSQPITVQGLSGLTLVDIAAGGWHSTALTDDGEVYGWGRGEHGRLGFGDNDKSSKMVPQRVNLLVGEDIVQVSCGGTHSVALTRDGRMYTFGRGDHGRLGYGRKVTTGQPMEVPIDIPPPKNLTDSGDAGRWIAKLVASGGRHTLAIVEWHTGDSK

SEQ ID NO: 1908 - protein, 393 aa, Ricinus communis
MATHTSLIAWGAGEDGQLGIGINEEKEWVCVVNALEPYKVRSVVAGSRNSLAICDDGKLFTWGWNQRGTLGHPAETKTENIPSQVKALNNVNIVQAAIGGWHCLAVDDQGRAYAWGGNEYGQCGEEPERKDDTGKTLRRDIVIPQRCAPKLVVRQVAAGGTHSVVLTREGHVWTWGQPWPPGDIKQISVPVRVQGLEKVKLIAVGAFHNLALQEDGTLWAWGNNEYGQLGTGDTQPRSQPIPVQGLSGLTLVDIAAGGWHSTALTDDGEVYGWGRGEHGRLGFGDNDKSSKMVPQKVNLLAGEDIVQLSCGGTHSVALTQDGRMFSFGRGDHGRLGYGKKVTTGQPVEVPTDIPPPKSLSGTEEAEGHWIAKLVACGGRHTLAIVEWKVDESK

SEQ ID NO: 1909 - protein, 390 aa, Picea sitchensis
MESDHAVLAWGSGEDGQLGVGNMEDKDWVCSIQALASHGKRVVSVVAGSRNSLAICEDGQLFTWGWNQRGTLGHPPESKTESTPTQVKALENVKIVQAAIGGWHCLAVDDQGQAYAWGGNEYGQCGEEPERKEDGSKVLRRDIAIPQRCAPQLRVRQVAAGGTHSVVLTHNGHVWTWGQPWPPGDIKQISTPVRVQGLENVQLIAVGAFHNLALLEEGEVWAWGNNEYGQLGTGDTQPRSQPVPVQGLSGLILADIAAGGWHSTALTTDAEVYAWGRGEHGRLGFGDDKSSKMVPQKVHLLAGETIAQVSCGGTHSVARTADGRIFSYGRADHGRLGYGRKVTTGHPMEVPIGIRPPKNAAENSGCWFVKLVACGGRHTLATASWESEEL

SEQ ID NO: 1910 - protein, 396 aa, Arabidopsis lyrata subsp. lyrata
MASATSVIAWGSGEDGQLGLGTDEEKELASVVEALEPFNVRSVVGGSRNSLAICDDGKLFTWGWNQRGTLGHPPETKTESTPSLVKSLASVKIVQAAIGGWHCLAVDDQGRAYAWGGNEYGQCGEEPSKDETGRPVRRDIVIPKRCAPQLTVRQVAAGGTHSVVLTREGYVWTWGQPWPPGDIKQISIPVRVQGLENVRLIAVGAFHNLALKEDGTLWAWGNNEYGQLGTGDTQPRSFPIPVQGLDDLTLVDIAAGGWHSTALTNEGEVYGWGRGEHGRLGFGDNDKSSKMLPQKVNLLAGEDIIQVSCGGTHSVALTRDGRIFSFGRGDHGRLGYGRKVTTGQPLELPIDIPPLEGRFNHTDEEDDGKWIAKHVACGGRHTLAIVEWKFDQEGTE

SEQ ID NO: 1911 - protein, 753 aa, Zea mays
MPAMGRSSRACSLLGSTHLLLLLLLSVGSAVAQNGSTWKTLSGKAPAVVAKGGFSGLFPDSSDYAYQFVGISSSPDTTVWCDVRLTKDGAGICLPSINMDNCTIIASVFPQGKKTYKVNGVSTAGWFSVDYTSTVLLQNVSLKQSVLSRTPAYDGLFQINPVENIFTLYKAPAVWLNVQHDSFYSQFKLSMRSYILSLSKQFIVDYISSPEVNFLTSISGRVSKKTKLVFRFLDERSIEPSTNQTYGSMLKNLTFVKTFASGILVPKSYIWPVTPDNYLLPYTSVVDDAHKAGLEIYAADFANDLTISYNYSFDPLAEYLFFIDNGAFSVDGVLTDFPITPSEAVGCFSNLNTSKIDHAKPLVISHNGASGDYPDCTDQAYEKAVADGADVIDCPVQVTKDGILICMSSVDLMDVTTVAKSQFASQVTTINSLKAGSGVFTFNLTWDDISKNLKPMISNPMSTYNLYRNPRNKNAGNFMRLSDFLTFANGKDLSGIMITVEHAAFMAEELGFGVVDAVIKALDDSGYSKQTAQNVMIQSTNSSVLVKFKQETKYNLVYMIEESVRDAAPSSLADIKKFADAVSVGTTSVFPETHYYLTNQTNKLVPTLKSAGLQVYVYVLMNEFASQPNDFFADATSQINAYVQSAKVDGVITDFPGTAHRYKLNSCTSMGKNMPLFMQPPQPGGLLSTILPDAQPPAAAPMPLLTDADVAEPALPPVSNTTTAASPSHAALRMRTHVLSIATLLMLCASLLI

SEQ ID NO: 1912 - protein, 749 aa, Oryza sativa Japonica Group
MGRGSHGCSVLGSSLLLLFCLGSAAAQKASTWKTLSGNPPAIIAKGGFSGLFPDSSDFAYGFVAAASSPDTALWCDVQLTKDGAGICLPDIRMDNCTNIANVYPKGKKTYSVNGVSTPGWFSVDYDSTGLSKVNLVQSLFSRVPYYDGTLPILPVESVFANYKAPAVWLNVQHDSFYSQFNLSMRSYILSVSKQYIADYISSPEVNFLTSLSGRVNKKTKLVFRLLNELAVEPSTNQTYGSMLKNLTFIKTFASGILVPKNYIWPVTQDNYLQPSTSVVGDAHKAGLEVYAADFANDFLLSYNYSYDPLTEYLNFIDNGAFSVDGVLTDFPITPSEAIGCFSNLNNSKTDNAKPLIISHNGASGDYPDCTDLAYQKAVTDGADVIDCPVQVTKDGIPICMSSIDLMDVTTVSTSQFSSQTTVIKDIKNGAGVYSFNLTWDDIAKNLKPKISNPMTTFDVYRNPRNKNAGSFMRLSDFLAFAKGKELSGVMISIEHAAFMAEKLGFGVVDAVIKALDDSGYSKQTAQKVMIQSTNSSVLVKFKEQTKYNLVYMLEEDVRDAAPSSLADIKKFANAVSVRTTSIYPESKHYLINQTSHIVQTLQSAGLPVYVYVLMNEFVSQPNDFFADATTQINTYVQKKGAGVDGIITDFPATVHRYRLSPCTSKESNLPTFMLPVQPGGLSGTIIDPAAQPPAMAPMPLLTDSDVAESPLPPVKNVTAPAPGASRAIKMRTDASIIVALLVLCASLII

SEQ ID NO: 1913 - protein, 753 aa, Sorghum bicolor
MGRRSSRACSLLGSAQLLLLLLSLALGSAAAQKGSTWKTLSGKAPVIVAKGGFSGLFPESSLYAYQILGSLSSPDTVMWCDVRLTKDGGGICLPSIDMDNCTTIANFFPQGKKTYNVNGVSTVGWFSVDYTSTDLLNVSLKQSVLSRTGVYDGIFPIIPVENVYTQFNPVAVWLNVQQDSFYSQFKLSMRSYILSLLKNFVVDYISSPEVNFLTSISGRVSKKTKLVFRFLDERSIEPSTNQTYGSMLKNLTFVKTFASGILVPKSYIWPVTPDNYLLPYTSVVDDAHKAGLEIYAADFANDFTISYNYSYDPLAEYLSFIDNGAFSVDGVLSDFPITPSEAVDCFSNLNNSKIDHAKPLVISHNGASGDYPDCTDQAYEKAVADGADVIDCPVQVTKDGILICMSSVDLMNATTVAKSQFASQVTTINDLKAGPGVFTFNLTWDDISKNLKPMISNPAIGFNQYRNPRNKNAGNFMRLSDFLTFAKGKDLSGIMITVEHAAFMAEELGFGVVDAVIKALDDSGYSKQTAQSVMIQSTNSSVLVKFKQETKYNLVYMIEENVRDAAPSSLADIKKFASAVSVSTTSVFPEDHYYLTNQTNNLVKSLKSAGLQVYAYVLMNEFGTQPNDFFADATVQINAYVHVRGANVDGVITDFPGTAHRYKLNSCTSMGKNAPPFMSPPKPGDLLTTMPPFAQPPAAAPMPLLTDADVAEPALPPVSNTTTPASPSDAALMMRTDVSILITLLMLCASLLI

SEQ ID NO: 1914 - protein, 389 aa, Zea mays
MATPLRATAVLAWGSGEDGQLGMGGNEEKDWPHFVEALGPYAVTAVVAGSRNSLAICDDGRLFTWGWNQRGTLGHPPETKTESSPGPVDALAGFKIVQAAIGGWHCLAVDDKGRAYAWGGNEYGQCGEEPERKEDGTRALRRDIPIPQRCALKLKVRQVAAGGTHSVVLTQEGHVWTWGQPWPPGDIKQISTPVRVQGLEKVRVIAVGAFHNLALTEDVILWAWGNNEYGQLGTGDTQPRSQPIRVEGLSDLSLVDIAAGGWHSTALTIDGEVYAWGRGEHGRLGFGDDKSSHMVPLKVELLAGEDIVQVSCGGTHSVALARDGRMFSYGRGDHGRLGYGRKVTTGHPMELPINLPPLSSSRDGRWQAKYVACGGRHTLAIAEWTEATD

SEQ ID NO: 1915 - protein, 396 aa, Arabidopsis thaliana
MASATSVIAWGSGEDGQLGLGTDEEKELASVVDALEPFNVRSVVGGSRNSLAICDDGKLFTWGWNQRGTLGHPPETKTESTPSLVKSLANVKIVQAAIGGWHCLAVDDQGRAYAWGGNEYGQCGEEPSKDETGRPVRRDIVIPKRCAQQLTVRQVAAGGTHSVVLTREGYVWTWGQPWPPGDIKQISVPVRVQGLENVRLIAVGAFHNLALKEDGTLWAWGNNEYGQLGTGDTQPRSYPIPVQGLDDLTLVDIAAGGWHSTALTNEGEVYGWGRGEHGRLGFGDNDKSSKMLPQKVNLLAGEDIIQVSCGGTHSVALTRDGRIFSFGRGDHGRLGYGRKVTTGQPLELPIHIPPPEGRFNHTDEEDDGKWIAKHVACGGRHTLAIVEWKYDQEETE

SEQ ID NO: 1916 - protein, 312 aa, Sorghum bicolor
MLPLISPPRPGAAGPRAIANAGATAPATARPAVILPGLGNNTGDYARLAAALRDDHGLPAAVVARVTRPDWLRNAAGLADASYWRGTLRPRPVLDWYLKRVDDAVSEARELCAPGGKISLIAHSAGGWLARVYMAEFEASDISLLLTLGTPHLPPPKGVPGVIDQTRGLLNYVEKNCAPAVYTPELRYVCIAGRYIQGAPLLGNSAAASDEILAVDTPSEGGEAVITGSNDKSTRSSVTWRARFVGQGYKQVCGQADVWGDGVVPEMAAHLEGALNISFDGVYHSPVGSDDEQRPWYGSPAILKQWVHHLLS

SEQ ID NO: 1917 - protein, 310 aa, Zea mays
MLPLLSPPRPRAARPRASATVSATARPAVILPGLGNNTGDYARLAAALRDDHGLPAAVVARVTRPDWLRNAAGLADASYWRGTLRPRPVLDWYLKRVDDAVSEARELCAPGGKISLIGHSAGGWLARVYMAEFDASDISLLLTLGTPHLPPPKGVPGVIDQTRGLLNYVEENCAPAVYTPELRYVCIAGRYIQGAPLLGNSAAASDEILAADTPSEGGHAVIVSSSDNSTSTPSAVSWRARFVGQGYKQVCGRADVWGDGVVPEMAAHLEGALNVSFDGVYHSPVGSDDEQRPWYGSPAILKQWVHHLLS

SEQ ID NO: 1918 - protein, 307 aa, Oryza sativa Indica Group
MLSLLLPPARPRAAVSPDVTASAPRRPAVILPGLGNNTADYARLAAALRDDHGVPAVAVARVSRPDWLRNAAGLVDPSYWRCNLRPRPVLDWYLKRVDEAVSEARELSPNEGISLIGHSAGGWLARVYMEEFDASDISLLLTLGTPHLPPPKGTPGVIDQTRGLLTYVEKNCAPAVYTPELKYVCIAGRYIQGAPLTGNTIATTDDILAVDTPSDIAEAVMVSTNDKSTQSGPTLRARFIGQGYKQVCGRADVWGDGVVPEVSAHLEGALNISFDGVYHSPVGSDDEQRPWYGSPAILKQWVHHLLS

SEQ ID NO: 1919 - protein, 300 aa, Oryza sativa Japonica Group
MLSLLLPPARPRAAVSPDARVVVAQGLGNNTADYARLAAALRDDHGVPAVAVARVSRPDWLRNAAGLVDPSYWRCNLRPRPVLDWYLKRVDEAVSEARELSPNEGISLIGHSAGGWLARVYMEEFDASDISLLLTLGTPHLPPPKGTPGVIDQTRGLLTYVEKNCAPAVYTPELKYVCIAGRYIQGAPLTGNTIATTDDILAVDTPSDIAEAVMVSTNDKSTQSGPTLRARFIGQGYKQVCGRADVWGDGVVPEVSAHLEGALNISFDGVYHSPVGSDDEQRPWYGSPAILKQWVHHLLS

SEQ ID NO: 1920 - protein, 306 aa, Hordeum vulgare subsp. vulgare
MLSLLPPARLRAAPSDVPVTAPRRPAVILPGLGNNTGDYARLGAALRDGHGVPSVVARVSRPDWLRNAAGLADPSYWRGTLRPRPVLDWYLNRVEEAVSEARELGSPDGKLSLIGHSAGGWLARVYMEEFGTSDISLLLTLGTPHLPPPKGVSGVIDQTRGLLNYVEKNCAPAVYTPELRYVCIAGRYIQGAPLTGSSLAATTDELVAVDAPSEVAEAVMVSADNKTAPTGPTFRARFVGQGYKQVCGRADVWGDGVVPEVSAHLEGALNISFDGVYHSPVGSDDEERPWYGSPAILEQWVHHLLS

SEQ ID NO: 1921 - protein, 412 aa, Sorghum bicolor
MAEICCEEAKSTPATAVAAASVSAAAAAVAVASSALERRRRRLEMRRFRVATDPEAPVAEDVRATKRQRLLARTVSGSCPDAGSDSDRPALPERLPRYGVTSVCGRRREMEDMVSIRPDFLPGTSTQHFFGVFDGHGCSHVATLCQDMMHEVVADEHRKAGCGEETAWKGVMERSFARLDEQAASWATSRSRDEPACRCEQQMPLRCDHVGSTAVVAVVSPTHVVVANAGDSRAVLSRAGVAVPLSVDHKPDRPDELARIEAAGGRVIYWDGARVLGVLAMSRAIGDGYLKPFVSSEPEVTVTERTDDDECLILASDGLWDVVTNEMACEVVRACFRSNGPPQAPAARPNGVAALPAADADDENGPAVVKGVSKEDSDRACSDAAMLLAKLALARRSADNVSVVVVDLRRGI

SEQ ID NO: 1922 - protein, 408 aa, Zea mays
  misc_feature (156)..(156): Xaa can be any naturally occurring amino acid
MAEICCEEAKSTPATAVAAASVSATAAAAAAVAVASSALERRRRRLEMRRFRVASDPEELVADDVRAAKRQRLARTLSGSCPDAGSDSDRPALPRYGVTSVCGRRREMEDTVSIRPDFLPGTSKHNFFGVFDGHGCSHVATMCQDNMHEVVADEHXKAASGEETAWKGVMERSFSRLDEQAASWATSRSRDEPACRCEQQMPLRCDHVGSTAVVAVVSPSHVVVANAGDSRAVLSRGGVPVPLSVDHKPDRPDELARIEAAGGRVIYWDGARVLGVLAMSRAIGDRYLKPFVSSEPEVTVTERTDDDECLILASDGLWDVVTNEMACEVVRACFRSNGPPAPAARPNGVALPAAGAGAEDGSAVVKGVGKEDSDKACSDAAMLLAKLALARRSADNVSVVVVDLRRGI

SEQ ID NO: 1923 - protein, 414 aa, Oryza sativa Japonica Group
MAEICCEEAMSPPATATAAVAAAVSASAAAAVSSAIDRRRRRMEMRRIRIASDLELQAGEDGRPGKRQRLARTASGAPRPDEDSASERPSCGRTEEFPRYGVTAVCGRRREMEDAVSIRPDFLPASGKFHFYGVFDGHGCSHVATTCQDRMHEIVAEEHNKGASGEVAPWRDVMEKSFARMDGEVGNRASTRSDDEPACPCEQQTPSRRDHAGSTAVVAVVSPTQVVVANAGDSRAVISRAGVPVALSVDHKPDRPDELERIEAAGGRVIYWDGARVLGVLAMSRAIGDGYLKPYVTSEPEVTVTERTDDDECLILASDGLWDVVTNEMACEVVRACFHNNGPPAPAARPSGVPSSAEAAETENGGAASVKGISKAESSDKACSDAAMLLTKLALARRSADNVSVVVVDLRRGL

SEQ ID NO: 1924 - protein, 393 aa, Hordeum vulgare subsp. vulgare
MAEICCQEAKSPPATAATVATVSASAAAAAAVASSVMDRRRRRLELKRFRLATDLEQSAAEYAGARKRPRIPRTVSGPCPDAASASENTERCPRYGFSSVCGRRREMEDAVSIRPGFLPGPGKSHFFGVFDGHGCSHAATTCQELMHEAVAEEHDKAEEPVWKEVMERSFARLDERAANWATTRSSEEPACRCEQKMPSRCDHVGSTAVVAVVNPTQIVVANAGDSRAVLSRAGVPVALSVDHKPDRPDELERIQAAGGRVIYWDGARVLGVLAMSRAIGDGYLKPFVTAEPEVTVTERSDADDCLILASDGLWDVVTNEMACDVARACFRSNGPPGPPQAQPGGEAKTSEGVSKAESDQACSDAAMLLAKLALARGSSDNVSVVVVDLRRGS

SEQ ID NO: 1925 - protein, 1694 aa, Zea mays
MSGDHAKKEMETGEKPTTSHGSTSSEESRTKREEKKKSSSNKGKEKKSSSHHKEKKEKSSSHKPHRSGDKQKRMRKVVYYETDTSSTSTSGSDAASVTSKRQERKKYSKIPLRYPRISKHTPLLSVPLGKPPTFDGEDYARWSDLMRFHLTSLHKSIWDVVEFGAQVPSVGDKDYDEDEVAQIEHFNSQATTILLASLSREEYNKVQGLKSAKEVWDVLKTAHEGDELTKITKRETIEGELGRFRLRKGEEPQHMYNRLKTLVNQVCNLESKKWDDHEMVKVILRSLIFLNPTQVQLIRGNPRYTKMTPEEVIGNFVSFECMIEGSRKINKLDDPSTSEAQPVAFKATEEKKEESTPSRQPIDASKLDNEEMALVIKSFRQILKQRRGKDYKSRSKKVCYKCGKPGHFIAKCPLSSDSDRDNDKKGKRREKKRYYKKKGGDAHVYREWDSDESSSDSSDDEDAANIAVTKGLLFPNVGHKCLMAKDGKRKKVKSRSSTKYETSSDDNASDEEDNLRILFANLNMEQKEKLNELISAIHEKDDLLDSQEDLLIKENKKHVKVKNAYALEIEKCEKLSNNNDDLLARIEELNISLASLRSENEKLITKAKDFDVCKVTISDLRDKNDILHAKIVELNSCKPSTSTIEHVTICTRCRDIDVDAIHDHMILIKQQNDHIAKLDAKIAEHNLENEKFKFARSMLYNGRRPGIKDGIGFQRGDNVKISAPPKRLSNFVKGKAPMPQDNEGYILYPAGYPENKIRKIHSRKSHSGSNHAFMYKSETSSSRQPTRAKLPKKKITIASNDHNISFKTFDASYVLTNKSGKVYASGGSSWILDSGCTNHMTGEKKMFSSYEKNQDSQRAITFGDGNQGLVKGLGKIAISPDHSISNVFLVDSLDYNLLSVSQLCQMGYNCLFTDVGVTVFRRSDDSIAFKGVLEGQLYLVDFDRAELDNCLIAKTNMGWLWHRRLAHVGMKNLHKLLKGEHILGLTNVHFEKDRICSACQAGKQVGAHHPHKNIMTTDRPLELLHMDLFGPIAYISIGGSKYCLVIVDDYSRFTWVFFLQEKSQTQETLKGFLRRTQNEFGLRIKKIRSDNGTEFKNSQIEGFLEEEGIKHEFSSPYTPQQNGVVERKNQTLLDMARTMLDEYKTSDRFWAEAVNTACYAINRGRKSKFAPKTVEGFLLGYDSNTRAYRVFNKSTGLVEVSCDVVFDETNGSQVEQVDLDEIGIEEAPCIALRNMSIGDVCPKESEEPPNAQDQPSSSTQASPPTQNEDEAQVDEVEDQANEPPQDDVNDQGGDANDQDKEDEEQRPPHPRVHQAIQRDHPVDTILGDIHKGVTTRSRVAHFCEHYSFVSSIEPHRVDEALQDSDWVVAMQEELNNFTRNEVWHLVPRPNQNVVGTKWVFRNKQDEHGVVTRNKARLVAKGYSQVEGLDFGETYAPVARLESIRILLAYATYHGFKLYQMDVKSAFLNGPIKEEVYVEQPPGFEDSEYPNHVYRLSKALYGLKQAPRAWYECLRDFLIANGFKVGKADPTLFTKTLDNDLFVCQIYVDDIIFGSTNESTCEEFSRIMTQKFEMSMMGELKYFLGFQVKQLQEGTFICQTKYTQDILTKFGMKDAKPIKTPMGTNGHLDLDTGGKSVDQKNISVYFVYVFGVMLISLYALCLFVLWRIEEPVAEDPGEQQVEVAEQELIEGKLCP

SEQ ID NO: 1926 - protein, 2319 aa, Zea mays
MSTQRDHVDPLLEEIPVTSSGEEVDPKVLDLAMKIAEKMFLKMKEEDARKKAEEEESRRKAEEDKGKGTFDYNDDLVDLLVSKVLSKVSLNTEGSSTKSKGNDFSKVQFDYSRNYIPNFSSAPLGKLPTLSELNYDEWADKMKSHLIGVHPSLWEIVNVGMYKPAQGEEMTPEMMQEVHRNAQAVSIIKGSLCPEEYRKVQGREDARDIWNILRMSHEGDPKAKRHRVEALESELARYDWTKGESLQSLFDRLMVLVNKIRVLGSEDWSDSKVTRLFMRAYKEKDKSLARMIRDRDDYEDMTPHQLFAKIQQHESEEAPIKTRDSHALITNEQDNLKKSKDHKAKKVVETSSDEDSSSDEDTAMFIKTFKKFVRKNDKFQRKGKKRACYECGQTGHFIADCPNKKEQEAKKEYKKDKFKKGGKTKGYFKKKKYGQAHIGEEWNSDDESSSSEEEEVVANVAIQSTSSAQLFTNLQDDSYIPTCLMAKGDKVTLFSNDFSNDDDDDQIAMKNKMIKEFGLNGYNVITKLMEKLDKRKATLDAQEDLLILEKERNLELQELIHNKDIEVINLKTSIDNLANEKNALESSMLSLNVQNQELQVQLENCKNINAPTLVFESKSSSNDNSCKHCAKYHASCCLTNHARKHSPQVKVEEILKRCSSNDGLKKVEPKYKSLKPNNGRRGLGFNSSKENPSTVHKGWRSPKFIEGTTLYDALGRIHSSNDKSSQVYSSGGSSWVLDSGCTNHMTGEKDMFHTLQLTQEAQEIVFGDSGKSKVIGIGKIPISDQQSLSNVLLVDSLSYNLLSVSQLCGMGYNCLFSDVDVKILRREDSSVAFTGRLKGKLYLVDFTTSKVTPETCLVAKSDKGWLWHRRLAHVGMRNLAKLQKDNHIIGLTNVVFEKDRVCGACQAGKQHGVPHQSKNVVTTKRPLELLHMDLFGPVAYISIGGSKYGLVIVDDFSRFTWVFFLSDKGETQEILKKFMRRAQNEFELKIKKVRSDNGTEFKNTGVEEFLGEEGIKHEFSVPYTPQQNGVVERKNRTLIEAARTMLDEYKTPDNFWAEAVNTACHAINRLYLHKIYKKTAYELLTGNKPKVDYFRVFGCKCFILNKKVKSSKFAPRVDEGFLLGYASNAHGYRVFNNSTGLVEIAIDVTFDESNGSQGHVSNDTVGNEKLPCESIKKLAIGEVRPQERDDEEGTLWMTNEVVDVGARVVSDNVSTQANPSTSSHPNHEENHQRMPTVVEDEQENIDGEVPLDQVTNEEEQIQRHPSVPHPRVHHTIQRDHPVDNILGSIRRGVTTRSRLANFCEFYSFVSSLEPLKVEEALDDPDWITAMQEELNNFTRNEVWSLVQRPKQNVIGTKWVFRNKQDENGVVTKNKARLVAQGYTQVEGLDFGETYAPVARLESIRILIAYATNHDFKLYQMDVKSAFLNGPLQERVYVEQPPGFEDPKKPNHVYLLHKALYGLKQAPRAWYDCLKDFLIKNGFTIGKADSTLFTRKVDNELFVCQIYVDDIIFGSTNEKFCEEFSKVMTNRFEMSMMGELKYFLGFQVKQLKEGTFLCQTKYTQDMLKKFGMEKAKHAKTPMPSNGHLDLNEEGKPVDQKLYRSMIGSLLYLCASRPDIMLSVCMCARFQANPKDCHLVAVKRILRYLVHTQNLGLWYPKGSFFDLLGYSDSDYAGCKVDRKSTTGTCQFLGRSLVSWSSKKQNCVALSTAEAEYIAAGACCAQLLWMKQTLRDFGCEFNKIPLLCDNESAIKLANNPVQHSRTKHIDIRRHFLRDHEAKGDIELFHAWEPASDDDGGKDDAVDLPPASAPVIRGLVLHRAEARRAGNEPVTDFTASGGSALLQDLRFQNPVLRIRDARIDGNRFWTLHHVDFYNSVILPKKHQPILHQRYINWEGCEAIGDPEMSQALRACERKQMKNIMTFQYDWNDEVIAQFYSTLWIKLADEESHYNYPFLNFFIEGSWYKVSYRRFAHILGFSDEDISGDKIKIHDFRQPTRDEAKDLHLSESGKYWESTNIHKYYCYINSLCRMTLIPKGGNQMNILGESKVLLSFMKPNSSERINVFDMIWQEIIHAACFPLKGCLHAPFIMKMIEVVTQFRFEKGTRHQSYTPFWIDPNNPAGRLRKAPSSSRGHTSAGPSAGAGAAAGASRPSPGRGSPTPRGRGRGRGRGRGMGARLAHGFAAFFSMCRNIAADVHEVARRQRETDDNLRRQASALGTPFAPRSPDVPLHPPPPDVNEWYQQAYGVPFSSADDVEEETFFDDPEQFDPPPYHGDPGQSSSYPPPQDPSGSAPPPAQSGEEHFAYDLAQHLFAPHQPPPHW

SEQ ID NO: 1927 - protein, 1706 aa, Zea mays
MSGDHAKKEMETGEKPTTSHGSTSSEESRTKRKEKKKDSSQRKEKKSSSSHHKEKKEKSSSHKPHRKGDKHKRMRKVVYYETDTSSTSTSDSDAPSVTSKRQERKKYSKIPLHYPRISKHTPLLSVPLGKPPTFDGEDYARWSDLMRFHLISLHKSIWDVVEFGAQVPSVGDENYDEDEVAQIEHFNSQATTILLASLSREEYNKVQGLKSAKEIWDVLKTAHEGDELTKITKRETIEGELGRFRLRKGEEPQHMYNRLKTLVNQVRNLGSKKWDDHEVVNVILRSLIFLNPTQVQLIRGNPRYTKMTPEEVIGHFVSFECMIEGSRKINELGDPSEAQPVAFKATEEKKEESTPSRQPIDASKLDNEEMALVIKSFRQILKQRRGKDYKSRSKKVCYKCGKPGHFIAKCPISSDSDRGDDKKGRRKEKKRYYKKKGGDAHVCREWDSDESSSDSSDDEDAANIAVTKGLLFPNVGHKCLMAKDGKKKKVKSNSSTKYESSSDDNASDEEDNLRSLFANLNIAQKEKLNELVSAIHEKDDLLDAQEDCLIKENKKHVKVKNAYALEVEKCQKLSSELSTCREMIDNLRNENAILNAKVDSHVCNVSITNLRDDNVDLLAKIDELNVSLASLKLENEDLIAKAKDFDVCKVTISNLKDKNDILHAKIVELDSCKPSTSTIEHVTICARCRDIDVNAIHDHMILIKQQNDHIAKLDAKIAEHNLENEKFKFARSMLYNGRRPGIKDGIGFQRGDNVKISAPPKRLSNFVKGKAPMPQDNEGYILYPAGYPEDKIRKIHSRKSHSGPNHAFMYKGETSSSRQPTRAKLPRKKTPNASNDHAISFKTFDASYVLTNKSGKVYASGGSSWILDSGCTNHMTGEKKMFSSYEKNQDPQRAITFGDGNQGLVKDYNLLSVSQLCQMGYNCLFTDIGVTVFRRSDDSIAFKGVLEGQLYLVDFDRAELDTCLIAKTNMGWLWHRRLAHVGMKNLHKLLKGEHILGLTNVHFEKDRICSACQAGKQVGSHHPHKNIMTTNRPLELLHMDLFGPIAYISIGGSKYCLVIVDDYSRFTWEKSQTQETLKGFLRRAQNEFGLRIKKIRSDNGTEFKNSQIEGFLEEEGIKHEFSSPYTPQQNGVVERKNRTLLDMARTMLDEYKTSDRFWAEAVNTACYAINRLYLHRILKKTSYELLTGKKPNISYFRVFGSKCFILVKRGRKSKFAPKTVEGFLLGYDSNTRAYRVFNKSTGLVEVSCDVVFDETNGSQIEQVDLDEIGEEETPCIALRNMSIGDVCPKESEEPPIAQDQPSSSMQASPPTQNEDGAQVDEEEDQSNEPPQDDGNDQGGDANDQEKEDEEEPRPPHPRVHQAIQRDHPVDTILGDIHKGVTTRSRVAHFCEHYSFVSSIEPHRVEEALQDSDWVVAMQEELNNFTRNEVWHLVPRPNQNVVGTKWVFRNKQDEHGVVTRNKARLVAKGYSQVEGLDFGETYAPVARLESIRILLAYATYHGFKLYQMDVKSAFLNGPIKEEVYVEQPPGFEDSEYPNHVYKLSKALYGLKQAPRAWYECLRDFLIANGFKVGKADPTLFTKTLNNDLFVCQIYVDDIIFGSTNESTCEEFSRIMTQKFEMSMMGELKYFLGFQVEQLQEGTFISQTKYTQDILTKFGMKDAKPIKTPMGTNGHLDLDTGGKSVDQKGIHIRFNWLFGCRLGGVQNQ

SEQ ID NO: 1928 - protein, 1071 aa, Zea mays
MDPKGKGMVVNDKEKDSIFNEPRDDKPTDSGSSHKKRDGKRKRRIKKIIYYDSDASSSSLRDDDNDDDSSSKRKTMELVEGELGRFMMIRGEEPTQTYNRLKTLVNKIRSYGSTRWTDHDVVQLMLRSFTVIDPHLVNLICENPRYTKMTPEEVLGKFVSRRMMVKEARYMDDALNGPLSIYESQPVALKATSSKEALPSKVAQVEAAVLNKDEMALIIKRFKTALKGRKEYSNKNKTRGNRSCFKCGKTDHFIAQCPDNDNDQGQEKSGKREKKNYRNAKGEAHLGKEWDSDCSSSDSNDEGLAASAFDKSSLFPNERHTCLMAKEKKVHIRDTPKYTSSSDEESSDDEVDYSDLFKGLDRAKVEKINELIDALNEKDRLLEKQEDILYEEHDKFVSVQKSLALEIKRNEMLSSELCACHESVSSLKNSNDELKAKLEEVNKTSSCVEHVFICNRCKDFDVDACDEHLASIAKLNDEVASLNAQFMTCKVEFDKLKFARDAYTVGRHPSIKDGLSFRKETKNLTSQRAPVLNKEKGKAPMASSSQKNHAYIYDRKYPRNAYNDKCYNHAAYNDSHAMFASSSTFAHGRSRPRRNYATSHASRKVCNGPTTVYHACDTSFVLSCKNTKVVARKLGSKCKGDKTCIWVPKAIVTNLVGPNTSWVYASRGSSWIIDSGCTNHMTGEKKMFTSYVKNKDSQDTFIFGDGNQGKVKGLGRIAITNEHSISNVFLVESLRRSDGSLAFKGVLDIKLYLVDFSRENAGLDACLIAKTNMGWLWHRRLAHVGMKNLHKLLKGDHVLGLTDVCFEKDRPCVACQEGKQDKSETQGTLKRFLRRAQNEFELKTPQQNGMVERKNRTLIDMARTMLREFKTPERFWSEAVNTACRAINRLYLHRLLKKTSYKLLTGNKPNLSYFHVFGSKCYIMVKKGRHSKFAPKTVEGFLLGYDSNTKAYRVFNKSSRLVEVSSDVVFDETNGSPREQVDLDDIDEDEVPTATMRTMAIGDVRPQELQEQDQPSSSTLVYPPTQDDVQVPQEEGQNQGGAQKEQVMEEEAPRVPPTQVQATIQRHHPVD

SEQ ID NO: 1929 - protein, 800 aa, Zea mays
EKSQTQETLKGFLRRAQNEFGLRIKKIRSDNGTEFKNSQIEGFLEEEGIKHEFSSPYTPQQNGVVERKNRTLLDMARTMLDEYKTPDRFWAEAVNTACYAINRLYLHRILKKTSYELLTGKKPNISYFRVFGSKCFILVKRGRKSKFAPKTVEGFLLGYDSNTRAYRVFNKSTGLVEVSCDVVFDETNGSQVEQVDLDEIGNEEAPCIALRNMSIGDVCPKESEEPPNAQDQPSSSMQASPPTQNEDEAQNDEEQNQEDEPPQDDSNNQGGDANDQEKEDEEEPRPPHPRVHQAIQRDHPVDTILGDIHKGVTTRSRVAHFCEHYSFVSSIEPHRVEEALQDSDWVVAMQEELNNFTRNEVWHLVPRPNQNVVGTKWVFRNKQDEHGVVTRNKARLVAKGYSQVEGLDFGETYAPVARLESIRILLAYATYHGFKLYQMDVKSAFLNGPIKEEVYVEQPPGFEDSEYPNHVYRLSKALYGLKQAPRAWYECLRDFLIANGFKVGKADPTLFTKILKNDLFVCQIYVDDIIFGSTNESTCEEFSRIMTQKFEMSMMGELKYFLGFQVKQLQEGTFISQTKYTQDILTKFGMKDAKPIKTPMGTNGHLDLDTGGAKGSHLANKKTKCWIQQRSNKATEGTSGWRHRTVRCAPDSVRCARRLRFLPFARGLRLQPFALGNSRRPARYNSPDCPNLGDDERPFPGRRELVPPSGVLSQPKHQVAHLDVSGPNPSDPWLESLQNHAVGTLYLPIRYGVSHGGPVHPDVVILAEVQELSAGELGAIVGDDGVRDPKAMDDVGEERH

SEQ ID NO: 1930 - protein, 476 aa, Zea mays
MTGEKKMFTSYVKNKDSQDSIIFGDGNQGKVKGLGKIAISNEHSISNVFLVESLGYNLLSVSQLCNMGYNCLFTNIDVSVFRRSDGSLAFKGLLDGKLYLVDFSKEEAGLDACLIAKTSMGWLWHRRLAHVGMKNLHKLLKGEHVIGLTNVQFEKDRPCAACQAGKQVGGAHHSKNVMTTSRPLELLHMDLFGPVAYLSIGGSKYGLVIVDDFSRFTWVFFLQDKSKTQGTLKRFLRRAQNEFELKVKKIRSDNGSEFKNLQVEEFLEEEGIKHEFSAPYTPQQNGVVERKNRTLIDMARIMLGEFKTPERFWSEAMNTACHAINRVYLHRLLKKTSYELLTGNKPNVSYFRVFGSKCYILVKKGRNSKFAPKAVEGFLLGYDSNTKAYRVFNKSSGLVEVSSDVVFDETNGSPREQVVDLDDVDEEDVPTAAIRTMAIGDVRPQEQLEQDQLSSSTMVHPPTQDNEQVPQVEAHD

SEQ ID NO: 1931 - protein, 425 aa, Zea mays
MGCGPSIPDKYTIGGKGRKRRSVIQEVAVFVPTIRIPVASDIAHPLRGIVSKDLVDRLSTLRAHVASLAEEIYHADVSAVQELQHALEEYLPVVLGLTTKESRLESSVQFRWKTLDDDQECCLASAWYEVLSVVHMMAMLALFEANLLLIPKSSQGGGERKVAEDAKKDVVDSLLRASGCLDYSVHRILVQIPAQVKKGFPSYLQEGMLEAISIQALAQCVEIQLGLASECEKATLSVKRRLACEQVSYFSQAHYCLSGCDTSDSYGKKLLLFLKWKWMEAKAVAYYYHGLVLDKGGEPANHISAVCCLSAADDLLSDSKRACLSFCLANPVTRVPPPWGVMKNMHKKIPDVAYKKFQAHGHLFEQNKNSALQSVPDLPEFALSLRPDGYELPSTDSIWDNVDGQPQIQSLKEHMIDDEDEVGTK

SEQ ID NO: 1932 - protein, 424 aa, Oryza sativa Indica Group
MGCGASIPKKCKVGGKGKKRRSVIQEVAVFVPTIRIPVDSDVAHPLRGLVSKELVDRLSKFRDRVVALSEDIYCADVSDVSELQHALEEYLPVVLGLTMKESRLESSVEFRWRTLDDDQECCLSSAWYEVLSVIHMMAMLELFEANLILIPKNGQVGGERKVSEDAKKDVVDSLLRASGCLDYCVHRILVQIPAQVKKSFPSYFQEGMLEAISIQALAQCVEIQLGLASECEKATLSVKRRLACELVSYFSQAHYCLSGCDTSDSFGKKLLLFLKWKCMEAKAVAYYYHGLVLDKGNEASSHISAVCCLSAADDLVADSKRACLSFCLANPITRVPPPWGIMRNMHKKIPDSACKRFQMYGYLFEQDNNSALQSLPDLPEFALSLRPEGYELPSTDSIWDNVDSQPQIQSLKEHLDDEDEVETK

SEQ ID NO: 1933 - protein, 424 aa, Oryza sativa Japonica Group
MGCGASIPKKCKVGGKGKKRRSVIQEVAIFVPTIRIPVDSDVAHPLRGLVSKELVDRLSKFRDRVVALSEDIYCADVSDVSELQHALEEYLPVVLGLTMKESRLESSVEFRWRTLDDDEECCLSSAWYEVLSVIHMMAMLALFEANLILIPKNGQVGGERKVSEDAKKDVVDSLLRASGCLDYCVHRILVQMPAQVKKSFPSYFQEGMLEAISIQALAQCVEIQLGLASECEKATLSVKRRLACELVSYFSQAHYCLSGCDTSDSFGKKLLLFLKWKCMEAKAVAYYYHGLVLDKGNEASSHISAVCCLSAADDLVADSKRACLSFCLANPITRVPPPWGIMRNMHKKIPDSACKRFQMYGYLFEQDNNSALQSLPDLPEFALSLRPEGYELPSTDSIWDNVDSQPQIQSLKEHLDDEDEVETK

SEQ ID NO: 1934 - protein, 491 aa, Sorghum bicolor
MLRSPGNSPRRLSPSQTPAPSTPRPASPTPSTATASASASSKRRRPEVLDEDTYVAAIERIIERDFFPDLPRLRDRLDWLQAVRSRDPLILRDAQLKILDRRRRVQRRGPVPTPTPATSTALRSPSFLTTPAGSVAGGVGAPEEEDDIADAHSLDGFFCRFTSEDNESFSRILDKVNQRRRERYAHLLEPAEAENKPLLEDTKLDRITDGYGTSGQPPSTLEGAKFVAKNLLMYYPADRGEAPLTEEERAERLKGMTKEIDKSNTRLHGRSSADDARPKEEEAAILYAPVAGSTPGGMAYHDPDKLKKYDLEDLRKTPNPFYLESDKKADNGYSFVRTPSPAPGVDESPFMTWGEIDGTPLRLDPDETPGGSERAHFKIPPPPARDVKAHLLSRDAARKIKERSKIFHRPPLPSPVRGGSASPRTLSPAAQKFVRNAISKSAKSTNTIDESLRASYRGSTPSASTPKTRFSRDPGLASRSPSTRQGSTPPW

SEQ ID NO: 1935 - protein, 492 aa, Zea mays
MLRSPGNSPRRLSPSPTPAHSTPRPASPPPSTAPSSKRRRSEVLDEDTYVAAIERIIERDYFPDLPRLRDRLDWLQAVRSHDPLILRDAQLKILDRRRRAQRHAAGPVPTPTPATSTALRSPSFLTTPAGSVAGGVGGPDADHDDDVAAAVSLDGFFRRFTSEDNDSFSRILDKVNQRRRERYAHLLEPPPPTEAGSKASEGAKRDRITDGYGTSGQPPSTLEGAKFTAKNQLMYYPADQGEAPLTEEERAERLRGMTKEINKPNTRLHGRATADDARPKEEGAAILYALVAGSTPGGMAYHDPDKLKKYDLEDLRKTPNPFYLESDKKAGNGYSFVRTPSPAPGVDESPFMTWGEIDGTPLRLDSDETPGGSERAHFKMPPPPARDVKAHLLSRDAARKIKERSNTFHRPPLPSPARGVSASPRTLSRAAQKFVRNAITKSAKSSSAIDESLRASYRGSTPSASTPKSRFSKDPGLASRSPSTRQGSTPPW

SEQ ID NO: 1936 - protein, 493 aa, Hordeum vulgare subsp. vulgare
MLRSPGHSPRQLTPSPSPAPSTPRPTSPTPSSASASASALATTSSKRRRPEVLDEDTYVVAIERIIERDFFPDLPRLRDRLDWLQAVRSRDPLLLRDAQLKILDRRRRLQRNGPLPTPTPATSTALRSPSFLATPSVAPSTTGDPEDEDEDVSAAFSLDDFFRRYTSEDNESFSRILEKVNHRRRERYAHLLEPGEVADKQLLEDAKRDRITDGYGTSGQSPSTLEGAKFTAKNLLMYHPADRGEAPLTDEELAVRLKGLTKEIDKSNTRLHGKALAEDGRPKEEEAAAILYALVAGSTPGGMAYNDPDKGKKYDLEDLRKTPNPFYIESGKKADNGYSFVKTPSPAPGADESPFMTWGDIDGTPLRLDPDETPGGSERSHFKIPPPPVRDVKAHLLSRDAAKKIKARTHMFHKPPLPSPVRGGSASPRNLSPAAQKFVRNAIAKSTQTIDESLRASYRGSTPSAGTPKTRFSTDPGLGSRSPSARKGSTPPW

SEQ ID NO: 1937 - protein, 500 aa, Oryza sativa Indica Group
MLRSPGHSPRHLSPSPAPSTPRPSSPTPSSASASALAAAATTTTSSKRRRPEVLDEDTYVAAVERIIERDFFPDLPRLRDRLDWLQALRSRDPLVLRDAQLKILERRRRAQRQRQGGPVPTPTPATSTALRSPSFLATPSVAPSVAGDEGADVDDDVEAALSLDDFFRRFTSEDNESFSRILEKVNHRRRERYAHLLEPGEVAKAPQLEDAKRDRITDGYGTSGQPLSTLEGAKFTAKNLLMYYPADRGEAPLTDEERAERLKGMTKEIDRSNTRFHGKSSVDDGAKEEEAAAILYAPVAGSTPGGMAYHDPDKAKKYDLEDLRKTPNPFYVESGKNANNGYSFVRTPSPAPGVDESPFMTWGEIDGTPLRLDPEETPGGSGGSDRAHFKIPPPPARDVKAHLLSRDAARKIKERTKMFHKPPLPSPVRGGSASPRTFSPAAQKFVRNAIAKSSRTIDESLRASYRGTTPSATTPKTRFSRDPSLGSRSPSTRQGSTPPW

SEQ ID NO: 1938 - protein, 504 aa, Oryza sativa Japonica Group
MLRSPGHSPRHLSPSPAPSTPRPSSPTPSSASASASASALAAAATTTTSSKRRRPEVLDEDTYVAAVERIIERDFFPDLPRLRDRLDWLQALRSRDPLVLRDAQLKILERRRRAQRQRQGGPVPTPTPATSTALRSPSFLATPSVAPSVAGDEGADVDDDVEAALSLDDFFRRFTSEDNESFSRILEKVNHRRRERYAHLLEPGEVAKAPQLEDAKRDRITDGYGTSGQPLSTLEGAKFTAKNLLMYYPADRGEAPLTDEERAERLKGMTKEIDRSNTRFHGKSSVDDGAKEEEAAAILYAPVAGSTPGGMAYHDPDKAKKYDLEDLRKTPNPFYVESGKNANNGYSFVRTPSPAPGVDESPFMTWGEIDGTPLRLDPEETPGGSGGSDRAHFKIPPPPARDVKAHLLSRDAARKIKERTKMFHKPPLPSPVRGGSASPRTFSPAAQKFVRNAIAKSSRTIDESLRASYRGTTPSATTPKTRFSRDPSLGSRSPSTRQGSTPPW

SEQ ID NO: 1939 - protein, 473 aa, Oryza sativa Japonica Group
MLRSPGHSPRHLSPSPAPSTPRPSSPTPSSASASASASALAAAATTTTSSKRRRPEVLDEDTYVAAVERIIERDFFPDLPRLRDRLDWLQALRSRDPLVLRDAQLKILERRRRAQRQRQGGPGADVDDDVEAALSLDDFFRRFTSEDNESFSRILEKVNHRRRERYAHLLEPGEVAKAPQLEDAKRDRITDGYGTSGQPLSTLEGAKFTAKNLLMYYPADRGEAPLTDEERAERLKGMTKEIDRSNTRFHGKSSVDDGAKEEEAAAILYAPVAGSTPGGMAYHDPDKAKKYDLEDLRKTPNPFYVESGKNANNGYSFVRTPSPAPGVDESPFMTWGEIDGTPLRLDPEETPGGSGGSDRAHFKIPPPPARDVKAHLLSRDAARKIKERTKMFHKPPLPSPVRGGSASPRTFSPAAQKFVRNAIAKSSRTIDESLRASYRGTTPSATTPKTRFSRDPSLGSRSPSTRQGSTPPW

SEQ ID NO: 1940 - protein, 329 aa, Zea mays
MVASTASRLSPPRFSTPSPSLHPPNRRSRFSPVRAAKLEAVLSIGAHLIPHPRKAASGGEDAFFANSDAGGVFAIADGVSGWAEKNVNPALFSRELMRNSSNFLNDEAVSHDPQILLMKAHAATSSIGSATVIIAMLEKTGTLKIASVGDCGLKVIRKGQVMFSISPQEHYFDCPYQISSEAEGQTYKDALVCSVNLMEGDIIVSGSDGLFDNIFDQEIVSIISESPSVDEAAKALAELARKHSVDVRFDSPYSMEARSRGFDVPWWKKLLGGKLIGGKMDDITVVVAQVKTVVVPEDEVQGGDTEEQKGNEQGAAAVVAYKMNDEEVA

SEQ ID NO: 1941 - protein, 331 aa, Oryza sativa Japonica Group
MAASSTATRLSPPRLHAPTTPSPHLPLRRSRFSPLRAAKLEAVLTIGTHLIPHPRKAETGGEDAFFVNGDDGGVFAVADGVSGWAEKDVNPALFSRELMAHTSTFLKDEEVNHDPQLLLMKAHAATTSVGSATVIIAMLEKTGILKIASVGDCGLKVIRKGQVMFSTCPQEHYFDCPYQLSSEAIGQTYLDALVCTVNLMEGDMIVSGSDGFFDNIFDQEIVSVISESPGVDEAAKALAELARKHSVDVTFDSPYSMEARSRGFDVPSWKKFIGGKLIGGKMDDITVIVAQVKAVMIPDDEGVDEEKGQGDEQGSAVAVASSEQKEDSITT

SEQ ID NO: 1942 - protein, 331 aa, Oryza sativa Indica Group
MAASSTATRLSPPRLHAPTTPSPHLPLRRSRFSPLRAAKLEAVLSIGTHLIPHPRKAETGGEDAFFVNGDDGGVFAVADGVSGWAEKDVNPALFSRELMAHTSTFLKDDEVNHDPQLLLMKAHAATTSVGSATVIIAMLEKTGILKIASVGDCGLKVIRKGQVMFSTCPQEHYFDCPYQLSSEAIGQTYLDALVCTVNLMEGDMIVSGSDGFFDNIFDQEIVSVISESPGVDEAAKALAELARKHSVDVTFDSPYSMEARSRGFDVPSWKKFIGGKLIGGKMDDITVIVAQVKAVMIPDDEGVDEEKGQGDEQGSAVAVASSEQKEDSITT

SEQ ID NO: 1943 - protein, 322 aa, Hordeum vulgare subsp. vulgare
MAASTASRLSPPRLHAAPNHPLRRSRFSPLRAAKLEAVLSIGTHVIPHPRKVETGGEDAFFVGGDGGGVFAIADGVSGWAEKNVNPALFSRELMANSSTFIKDEEVSQDPQILLMKAHAATSSIGSATVIVAMLEKTGTLKIASVGDCGLKVIRKGQVMFSTCPQEHYFDCPYQLSSEAIGQTSQDALVCTVNLMEGDMIVSGSDGFFDNIFDQEILAVINGSPGTDEAAKALAELARKHSVDVTFDSPYSMEARSRGFDVPWWKKLLGAKLVGGKMDDITVIVAQVKTVVIPDDEGSGIELEKVGGEQLAAAGVASAEQSE

SEQ ID NO: 1944 - protein, 484 aa, Sorghum bicolor
MNTNYSALPLTSPSIELQAKSNASANANVNGHAKISKQDSFLGEVEDGGGGAGEHDDLPLIGDGPAGPPEGSGVPAAVFNLATSIIGAGIMALPATMKVLGVAAGLVSILVMGVLSEITVELLVRFSAYCRALSYGEVVHRAMGRPASVVAQMCVIINNAGVLVVYLIIIGDVMSGSLKHIGVMDQLIGHGEWDNRKLLILVVLVIFLAPLCALEKIDSLSLSSAASVALAVVFVVVSCIIALIKIAEGKISMPRMGPDFSSRAAMLDLLVVIPIMTNAFICHFNVQPIYNELKEKTPRNMYKVGRISTVLCVVVYALTALSGYLLFGEDTESDVLTNFDKDLGIRFSSLLNYIVRIGYVIHLVLVFPVVHFSLRQTVDALIFGELATPSRKKTLTLTVVLLALIYLGSTMIPNIWMAFKFTGATTGLALGFMFPALVALRLDKEGSRLGHGERLLSLGLLGLSIVVSVIGVVGNVYTLKSKSE

SEQ ID NO: 1945 - protein, 487 aa, Zea mays
MNTNYSALPLTSPSIELQPNGAKSSAAANGVLNGHAKISRQDSFLGEVEDDGGGAGEHDELPLIGDGPAGPPEGSDVTAAVFNLATSIIGAGIMALPATMKVLGVAAGLVSILVMGVLSEITVELLVRFSAHCRALSYGEVVHRAMGRPASIVAQMCVIINNAGVLVVYLIIIGDVMSGSLKHIGVMDQLVGHGEWDNRKLLILVVLVIFLAPLCALEKIDSLSMSSAASVALAVVFVVVSSIIALIKIAEGKISMPRMGPDFSSRAAMLDLLVVIPIMTNAFICHFNVQPIYNELKEKTPQNMYKVGRISTVLCVAVYALTALSGYLLFGEDTESDVLTNFDKDLGIRFSSLLNYIVRIGYVIHLVLVFPVVHFSLRQTVEALIFGELATPSRKRTFTLTVVLLALIYLGSTMIPNIWIAFKFTGATTGLALGFMFPALVALRLDKEGSRLGHGERLLALGLLGLSILVSVIGVVGNVYTLKSKSE

SEQ ID NO: 1946 - protein, 487 aa, Zea mays
MNTNYSALPLTSPSIELQPNGAKSSAAANGVLNGHAKISRQDSFLGEVEDDGGGAGEHDELPLIGDGPAGPPEGSDVTAAVFNLATSIIGAGIMALPATMKVLGVAAGLVSILVMGVLSEITVELLVRFSAHCRALSYGEVVHRAMGRPASIVAQMCVIINNAGVLVVYLIIIGDVMSGSLKHIGVMDQLVGHGEWDNRKLLILVVLVIFLAPLCALEKIDSLSMSSAASVALAVVFVVVSSIIALIKIAEGKISMPRMGPDFSSRAAMLDLLVVIPIMTNAFICHFNVQPIYNELKEKTPQNMYKVGRISTVLCVAVYALTALSGYLLFGEDTESDVLTNFDKDLGIRFSSLLNYIVRIGYVIHLVLVFPVVHFSLRQTVEALIFGELATPSRKRTFTLTVVLLALIYLGSTMIPNIWMAFKFTGATTGLALGFMFPALVALRLDKEGSHLGHGERLLALGLLGLSILVSVIGVVGNVYTLKSKSE

SEQ ID NO: 1947 - protein, 477 aa, Oryza sativa Japonica Group
MNTNYSSLPLTSIELQSNQRTSEVANGVGYNGHAKISKQDSFLVDGENDDLPLIGDGPAGPPEGSGVPAAVFNLATSIIGAGIMALPATMKVLGVAVGLVSILVMGILSEVTIELLVRFAVYCRALSYGEVVHKALGRPASIVAQMCVIINNAGVLIVYLIIIGDVMSGSLKHIGVMDQLIGHGEWDNRRLLILVVLVIFLSPLCALEKIDSLSLSSAASVALAVVFVVVSCIIALVKVVEGKISMPRMGPDFSSRAAMLDLLVVIPIMTNAYICHFNVQPIYNELKEKTPHNMYKIGRITTVLCVVVYALTAVSGYLLFGEDTESDVLTNFDKDLGIRFSSILNFIVRIGYVIHLVLVFPVVHFSLRQTVDSLIFGELAPHSRKKMLTLTVVLLALIYLGSTMIPNIWVAFKFTGATTGLALGFIFPALIALRLDKEGKSLGKGERLLSIVMLGLAMVVSIIGVIGNVYSLRSKSA

SEQ ID NO: 1948 - protein, 486 aa, Oryza sativa Indica Group
MNTNYSSLPLTSIELQSNQRTSEVANGVGYNGHAKISKQDSFLVDGDAAAGGGGGENDDLPLIGDGPAGPPEGSGVPAAVFNLATSIIGAGIMALPATMKVLGVAVGLVSILVMGILSEVTIELLVRFAVYCRALSYGEVVHKALGRPASIVAQMCVIINNAGVLIVYLIIIGDVMSGSLKHIGVMDQLIGHGEWDNRRLLILVVLVIFLSPLCALEKIDSLSLSSAASVALAVVFVVVSCIIALVKVVEGKISMPRMGPDFSSRAAMLDLLVVIPIMTNAYICHFNVQPIYNELKEKTPHNMYKIGRITTVLCVVVYALTAVSGYLLFGEDTESDVLTNFDKDLGIRFSSILNFIVRIGYVIHLVLVFPVVHFSLRQTVDSLIFGELAPHSRKKMLTLTVVLLALIYLGSTMIPNIWVAFKFTGATTGLALGFIFPALIALRLDKEGKSLGKGERLLSIVMLGLAMVVSIIGVIGNVYSLRSKSA

SEQ ID NO: 1949 - protein, 494 aa, Hordeum vulgare subsp. vulgare
MVNSNYSALPLTATAIELQSAHPPPHPPKSGAAANGAAHAKLTKQDSFLGEVEDDDAHATAAEHDELPLIGDDGPAGPPEGSGVSGAVFNLATSIIGAGIMALPATMKVLGVAVGLVSILVMGVLSEVTIELLVRFSVRCRALSYGELVHRALGRPASVVAQFCIIVNNAGILVVYLIIIGDVMSGSLKHMGVMDQLIGHGEWDNRRLLILFVLVVFLSPLCALEKIDSLSLSSAASVGLAVVFVAVSCMIAVVKLVEGKLAAPRMGPDFSSRAAILDLLVVIPIMTNAYICHFNVQPIYNELKEKTPRNMYNVGRISTVLCVVVYALTAISGYLLFGDDTESDVLTNFDKDLGIKFSTVLNYIVRIGYIIHLVLVFPVVHFSLRQTVDSLVFGELAPHSRKRMLSLTVVLLALIYLGSTMIPNIWMAFKFTGATTGLALGFMFPALVALRLDKEGECLGRGERLLSLGMLGLAIVVSVVGVVGNVYSLRSKSE

SEQ ID NO: 1950 - protein, 470 aa, Hordeum vulgare subsp. vulgare
MVNSNYSALPLTATAIELQSAHPPPHPPKSGAAANGAAHAKLTKQDSFLGEVEDDDAHATAAEHDELPLIGDDGPAGPPEGSGVSGAVFNLATSILVMGVLSEVTIELLVRFSVRCRALSYGELVHRALGRPASVVAQFCIIVNNAGILVVYLIIIGDVMSGSLKHMGVMDQLIGHGEWDNRRLLILFVLVVFLSPLCALEKIDSLSLSSAASVGLAVVFVAVSCMIAVVKLVEGKLAAPRMGPDFSSRAAILDLLVVIPIMTNAYICHFNVQPIYNELKEKTPRNMYNVGRISTVLCVVVYALTAISGYLLFGDDTESDVLTNFDKDLGIKFSTVLNYIVRIGYIIHLVLVFPVVHFSLRQTVDSLVFGELAPHSRKRMLSLTVVLLALIYLGSTMIPNIWMAFKFTGATTGLALGFMFPALVALRLDKEGECLGRGERLLSLGMLGLAIVVSVVGVVGNVYSLRSKSE

SEQ ID NO: 1951 - protein, 461 aa, Oryza sativa Japonica Group
MASATTATPRSPSKIRSWSTAMPPPAAAAARTTTCRSSASAPLGHRGPPACPPRCSTSPPPLSAPGIMALPATMKVLGVAVGLVSILVMGILSEVTIELLVRFAVYCRALSYGEVVHKALGRPASIVAQMCVIINNAGVLIVYLIIIGDVMSGSLKHIGVMDQLIGHGEWDNRRLLILVVLVIFLSPLCALEKIDSLSLSSAASVALAVVFVVVSCIIALVKVVEGKISMPRMGPDFSSRAAMLDLLVVIPIMTNAYICHFNVQPIYNELKEKTPHNMYKIGRITTVLCVVVYALTAVSGYLLFGEDTESDVLTNFDKDLGIRFSSILNFIVRIGYVIHLVLVFPVVHFSLRQTVDSLIFGELAPHSRKKMLTLTVVLLALIYLGSTMIPNIWVAFKFTGATTGLALGFIFPALIALRLDKEGKSLGKGERLLSIVMLGLAMVVSIIGVIGNVYSLRSKSA

SEQ ID NO: 1952 - protein, 453 aa, Zea mays
MRRCAEAIARAVVEFLDAVILAFIRSCFGARPRRGSGLRVRPTPAPPRSPSLSAHLAAVSWSSSFQDALVRGDRAAEVIWDEEGLVRDGRFHEDLADGCGIDEELRREASYLKLCGTISETPAELRNEQSYENNLETTNECDSKLTYGPPANCKLLFEANSSQGQRNPRCEERHSLRSILNSEDAGRHHGAEYVPRSASSEKRLFQNMQHKPLDSGGSPFPTPLVLRDDMQTPGTAYASHRGTSISGKRVRTRKQFIYPVLRSIENRLQQIELTEDSSPLASSDPLKERDLGADSTKDPTQASSTSVVKSGLSETPSYSAPDPNASYGVEESLSKSNSDEKNAALSLSRWLKSSSADAENQDDEDCSFLTEKPVFMVAPDLNLDTSNPTPRLPKAWDGNGIPNTTTRYREDQRVSWHTTPFEQRLLKVLSDEDRCPPRKVVRGKLFHLEETAE

SEQ ID NO: 1953 - protein, 426 aa, Zea mays
MRRCAEAIARAVVEFLDAVILAFIRSCFGARPRRGSGLRDALVRGDRAAEVIWDEEGLVRDGRFHEDLADGCGIDEELRREASYLKLCGTISETPAELRNEQSYENNLETTNECDSKLTYGPPANCKLLFEANSSQGQRNPRCEERHSLRSILNSEDAGRHHGAEYVPRSASSEKRLFQNMQHKPLDSGGSPFPTPLVLRDDMQTPGTAYASHRGTSISGKRVRTRKQFIYPVLRSIENRLQQIELTEDSSPLASSDPLKERDLGADSTKDPTQASSTSVVKSGLSETPSYSAPDPNASYGVEESLSKSNSDEKNAALSLSRWLKSSSADAENQDDEDCSFLTEKPVFMVAPDLNLDTSNPTPRLPKAWDGNGIPNTTTRYREDQRVSWHTTPFEQRLLKVLSDEDRCPPRKVVRGKLFHLEETAE

SEQ ID NO: 1954 - protein, 442 aa, Sorghum bicolor
MRQCAEAIAKTVLAFLDAVILGCLRSCFGARPRRGSGRREALVHRDRAVAAEVVWDDEEGLVRDGRIHDELADYAGIDEELRHEASYLKLCGTISETPSELRSEESYENNLENTNECDNKPTSVPPANCMLLFEANASERREGRQSLRCEQNTEDAGHYQGAEFVPHSASSEKRLLQNIQHKPLDSSGSPFPTPLVLRDDMQTPGTAYASHRGTSVSGKRVRTRKQFIYPVLRSIENRLQQTELTEDSSPLASSNPLKGRNLEADSIKDPTQISSTSVVKSGLSETPPSYLAPDANASYSVKEAQSPDELLDGKGLPKSNSDEKNAALSLSRWLKSSSTDAENQGDVKCPAKDQSNEKPVFMTSDLNLDTDNPTPRLPKAWDGNGIPNTTTRYKEDQRVNWHTTPFEQRLLKVLSDEDRCPPRKVVRGKLFQLEEKAEWRTG

SEQ ID NO: 1955 - protein, 1694 aa, Zea mays; identical to SEQ ID NO: 1925

SEQ ID NO: 1956 - protein, 478 aa, Sorghum bicolor
MAEENVRELPPNFPAGRKRSPQWRAEQLRGLIRMIDEKEAEISAALHEDLAKPHMESYLHEISLTKSSCKFAINGLKNWMKPEKVPASITTFPSSAQIVPEPLGVVLIISAWNYPFILSIDPVIGAIAAGNAVVLKPSEIAPATSSVLANLLPKYVDNSCIKVVEGGVPETTALLEQRWDKIFYTGSGTVARIVMAAAAKHLTPVALELGGKSPVVVDSNVDLHVAVKRIVVGKWGCNNGQACIAPDYIITTKSFAPELVASLKRVLVRFYGEDPLQSADLSRIVNSKQFKRLQDLIEEKRVADKIVFGGEADEEQLKIAPTVLLDVPQDSAIMTGEIFGPLLPIVTVEKIEESFNLINAKPKPLAAYLFTKNKKLQEEFVANVPAGGMLVNDTALHLANPYLPFGGVGDSGMGCYHGKFGFDCFSHKKAVLIRGFGGEANARYPPYTTEKQKILRGLINGSFIALILALLGFPREKR

SEQ ID NO: 1957 - protein, 478 aa, Zea mays
MAEETVRELRASFAAGRTRPAEWRAAQLKGLIRMIDEKEAEISAALHEDLAKPHMESFLHEISLTKSSCKFALKGLKNWMKPEKVPAAITTFPSSAQIVPEPLGVVLIISAWNYPFILSIDPVIGAIAAGNAVVLKPSEIAPATSSLLAKLLPEYVDNSCIKVVEGSVPETTALLEQRWDKIFYTGNGTVGRIVMAAAAKHLTPVALELGGKSPVIVDSNVDLHVAAKRIVVGKWGCNNGQACIAPDYIITTKSFAPELVASFKRVLERFYGEDPLQSADLSRIVNSKQFKRLTNLIEEKRVADKIVYGGKADEKQLKISPTLLLDVPEDSEIMTGEIFGPLLPIVTVEKIEESFDLINAKPKPLAAYLFTKNRKLQEEFVASVPAGGMLVNDTALHLTNPYMPFGGVGDSGMGCYHGKFGFDCFSHKKGVLIRGFGGEANARYPPYTTEKQKILRGLINGSFIALILALLGFPREKR

SEQ ID NO: 1958 - protein, 478 aa, Zea mays
MAEETVQELRASFASGRTRRAEWRAEQLKGLIRMIDEKEAEISAALHEDLAKPHMESYLHEISITRSSCKFALDGLKSWMKPEKIPAALTTFPSSAQIVPEPLGVVLIISAWNYPFILSIDPVIGAIAAGNAVVLKPSEIAPATSSLLAKLLPEYVDNSCIKVVEGGVAETTSLLEQRWDKIFYTGNGTVGRIVMAAAAKHLTPVALELGGKSPVVVDSNVDLHVAVKRIVVGKWGCNNGQACIAPDYIITTKSFAPELVASLKRVLERFYGEDPLQSADLSRIVNSKHFRRLTELIEEKSVADKIVYGGEVDEKQLKIAPTLLLDVPQDSAIMTGEIFGPLLPIVTVEKIEESFDLINARPKPLAAYLFTKNKKLQEEFVADVPAGGMLVNDTVLHLANPYMPFGGVGDSGMGCYHGKFGFDCFSHKKGVLVRGFGGEANARYPPYTTEKQKILRGLINGSFIALILALLGFPREKR

SEQ ID NO: 1959 - protein, 481 aa, Zea mays
MAGMAEETVRELRASFAAGRTRPAEWRAAQLKGLIRMIDEKEAEISAALHEDLAKPHMESFLHEISLTKSSCKFALKGLKNWMKPEKVPAAITTFPSSAQIVPEPLGVVLIISAWNYPFILSIDPVIGAIAAGNAVVLKPSEIAPATSSLLAKLLPEYVDNSCIKVVEGSVPETTALLEQRWDKIFYTGNGTVGRIVMAAAAKHLTPVALELGGKSPVIVDSNVDLHVAAKRIVVGKWGCNNGQACIAPDYIITTKSFAPELVASFKRVLERFYGEDPLQSADLSRIVNSKQFKRLTNLIEEKRVADKIVYGGKADEKQLKISPTLLLDVPEDSEIMTGEIFGPLLPIVTVEKIEESFDLINAKPKPLAAYLFTKNRKLQEEFVASVPAGGMLVNDIALHLTNPYMPFGGVGDSGMGCYHGKFGFDCFSHKKGVLIRGFGGEANARYPPYTTEKQKILRGLINGSFIALILALLGFPREKR

SEQ ID NO: 1960 - protein, 478 aa, Zea mays
MAEETVRELRASFAAGQTRPAEWRAAQLKGLIRMIDEKEAEISAALHEDLAKPHMESFLHEISLTKSSCKFALKGLKNWMKPEKVPAAITTFPSSAQIVPEPLGVVLIISAWNYPFILSIDPVIGAIAAGNAVVLKPSEIAPATSSLLAKLLPEYVDNSCIKVVEGSVPETTALLEQRWDKIFYTGNGTVGRIVMAAAAKHLTPVALELGGKSPVIVDSNVDLHVAAKRIVVGKWGCNNGQACIAPDYIITTKSFAPELVASFKRVLERFYGEDPLESADLSRIVNSKQFKRLTNLIEEKRVADKIVYGGKADEKQLKISPTLLLDVPEDSEIMTGEIFGPLLPIVTVEKIEESFDLINAKPKPLAAYLFTKNRKLQEEFVASVPAGGMLVNDTALHLTNPYMPFGGVGDSGMGCYHGKFGFDCFSHKKGVLIRGFGGEANARYPPYTTEKQKILRGLINGSFIALILALLGFPREKR

SEQ ID NO: 1961 - protein, 482 aa, Oryza sativa Japonica Group
MAEEEVAAVVGELRGSFRSGRTRAAEWRAAQLRGIVRMVEEREGDISDALHSDLAKPRMESYLHEISLAKAACTFALKGLKNWMKPEKVPAALTTFPSTAQIVSEPLGVVLVISAWNYPFLLSIDPVIGAIAAGNAVVLKPSEIAPATSALFAKLLPEYVDSSCIKVVEGGVPETTALLEQKWDKIFYTGSGNVGRIVMAAAAKHLTPVALELGGKCPAIVDSNTDLHVTMKRLAVGKWGCNNGQACIAPDYVITTKSFAPELVDSLKRVLKRFYGEDPLQSEDLSRIVNSNHFRRLTNLIEDKKVAQKIVYGGQTDEKQLKIAPTVLLDVPLDTTLMAEEIFGPLLPIVTVDKIEDSIQFINSRTKPLAAYLFTKDKKLQEEFVSNVPAGGMLVNDVALHLANPHLPFGGVGDSGIGSYHGKFSFDCFTHKKAVLIRGFGGEATARYPPYTIEKQKILRGLINGSFFALILALLGFPKERR

SEQ ID NO: 1962 - protein, 494 aa, Oryza sativa Japonica Group
MAEEEVAAVVGELRGSFRSGRTRAAEWRAAQLRGIVRMVEEREGDISDALHSDLAKPRMESYLHEISLAKAACTFALKGLKNWMKPEKMLIMLTLINDDQVPAALTTFPSTAQIVSEPLGVVLVISAWNYPFLLSIDPVIGAIAAGNAVVLKPSEIAPATSALFAKLLPEYVDSSCIKVVEGGVPETTALLEQKWDKIFYTGSGNVGRIVMAAAAKHLTPVALELGGKCPAIVDSNTDLHVTMKRLAVGKWGCNNGQACIAPDYVITTKSFAPELVDSLKRVLKRFYGEDPLQSEDLSRIVNSNHFRRLTNLIEDKKVAQKIVYGGQTDEKQLKIAPTVLLDVPLDTTLMAEEIFGPLLPIVTVDKIEDSIQFINSRTKPLAAYLFTKDKKLQEEFVSNVPAGGMLVNDVALHLANPHLPFGGVGDSGIGSYHGKFSFDCFTHKKAVLIRGFGGEATARYPPYTIEKQKILRGLINGSFFALILALLGFPKERR

SEQ ID NO: 1963 - protein, 489 aa, Hordeum vulgare subsp. vulgare
MEPERAVVMEPTAAALMAELRGSFREGRTRPAEWRTAQLRSLVRMIEEKEDDISDALHADLAKPRMEAYLHEISLAKGACMFALKGLKNWMKPDKVPSAITTFPSTAQIVPEPMGVVLVISAWNYPFLLSIEPVIGAIAAGNAVVLKPSEISPATSSLFAKLLPEYLDRSCIKVVEGGVSETSALLEQKWDKIFYTGNGYVARVVLTAAAKHLTPVALELGGKCPVIVDSNVDLHVAAKRIAVGKWGCNNGQACIAPDYIITTKAFVTELVDSLKRVLERFYGEDPLQSADLSRIVNISHFHRLAKLLDDKKVAEKILLGGQTDMEQLKIAPTVLVDVPLDTELMKGEIFGPMLPIITVDKIEEGITHINAGAKPLAAYLFTKDKKLQQDFVSNVSAGGMLVNDVALHLTNPHLPFGGVGDSGTGSYHGKFSFDCFTHRKAVLIRGFGGEANARYPPYTAEKQRILRGLIKGSFFALILALLGFPREKR

SEQ ID NO: 1964 - protein, 627 aa, Eulaliopsis binata
MPGLPLPQPLNQNIGREYAYPGSTGRAFRQQLRTALSPDEKLAAERDLALYCKPVELYNIIQRRAVKNPLFIQRCLLYNIHARRKKRIQITISLSRSTNTELQAHDIFPLYVLLARPTSNLSLEGHSPIYRFSRVRLLTSFSELGNKDNSEATFIIPDVKSLSTSHPCNLDIIFISCGQVGQSNGEDNCSGNHVEGSPLQMLEGKCSWGKIPTNLLASSLESCVNLSLGHIVELASKITMRPSFLEPKFLEQDSCLTFCSHKVDATGSYQLQLCMSAQEAGARDMSLSPYSSYLYDDVPPSSLSDIIRLRSGNVLFNYKYHNNTMQETEVTEDFCCPFCYVRCGSFKGLGCHLNSSHDLFHYEFWISEDYQIVNVSLKADAWRTELIAEGVDPRHQTFSYRSRFKKRRRSKTTTDKIRHVHSHIMESGSPEDAQAGSEDNCVQGENGTSVANASIDPAQSLHGSNLSPPTVLQFGKTRKLSERADPRNRQLLQKRQFFHSHRAQPMALEQVFSDRDSEDEVDDDIADFEDRRMLDDFVDVTKDEKLIMHMWNSFVRKQRVLADGHIPWACEAFSQLHGRQLVQNPAQLRGWRFFMIKLWNHNILDARTMDTCNTVLQSFQEESTGLK

SEQ ID NO: 1965 - protein, 626 aa, Zea mays
MPGLPLPQSLNKNIGCEYAYPGSTGQAFRQQLRTALSPDEKLTAEKDLALYCKPVELYNIIQRRAMKNPLFIQRCLLYNIHARRKKRIQITISLSGSTNTELQTDYLFPLYVLLARPTSNLSLEGHSPIYRFSRVCLLTSFSEHGNKDSSEATFIIPDVKSLSTSRACNLDIIFISCGQVGQSNGEDNCSGNHVEASSLQMLEGKCSWGKIPTNLLASSLESCVNLSLGHIVELASKVTMRSSFLEPKFLEQDNCLTFCSHKVDAVGSYKLQLCMSAQEAGARDMSLSPHSSYSYNDVPPSSLSDIIRLRSGNVLFNYKYYSNTMQETEVTEDFSCPFCYVRCGSFKGLGCHLNSSHDLFHYEFWISEEYQVVNVSLKADAWRTELFAEGVDPRHQTFSYRSRFKKRRRSKTTMEKIRHVHSHIMESGSPGDEAGSEDNFVQGENGTSVANASIDPAQSLHGSNLSPPTVLQFGKTRKLSERSDPRNRQLLQKRQFFHSHRAQPMQLEQVFSDRDSGDEVDDDIADFEDRRMLDDFVDVTKDEKLIMHMWNSFVRKQRVLADGHIPWACEAFSQLHGRQLIQNPALLWGWRFFMIKLWNHNILDARTMNTCNTVLQILQEESTGLK

SEQ ID NO: 1966 - protein, 626 aa, Zea mays
MPGLPLPQSLNQNIGCEYAYPGSTGQAFRQQLRTALSPDEKLTAEKDLALYCKPVELYNIIQRRAMKNPLFIQRCLLYNIHARRKKRIQITISLSGSTNTELQTHYVFPLYVLLARPTSNLSLEGHSPIYRFSRVCLLTSFSEHGNKDNSEATFIIPDVKSLSTSRACNHDIIFISCGQVGQSNGEDNCSGNHVEDSSLQMLEGKCSWGKIPTNLLASSLESCVNLSLGHIVELASKVTMRPSFLEPKFLEQDSCLTFCSHKVDAVGSYKLQLCMSAQEAGARDMSLSPYSSYSYNDVPPSSLSDIIRLRSGNVLFNYKYYNNTMQETEVTEDFSCPFCYVRCGSFKGLGCHLNSSHDLFHYEFWISEEYQVVNVSLKADAWRTELFAEGVDPRHQTFSYRSRFKKRRRSKNTMEKIRHVHSHIMESGSPEDEAGSEDNFVQGENGTSVANASIDPAQSLHGSNLSPPTVLQFGKTRKLSERSDPRNRQLLQKRQFFHSHRAQPMQLEQVFSDRDSEDEVDDDIADFEDRRMLDDFVDVTKDEKLIMHMWNSFVRKQRVLADGHIPWACEAFSQLHGRQLIQNPALLWGWRFFMIKLWNHNILDARTMNTCNTVLQILQEESTGLK

SEQ ID NO: 1967 - protein, 629 aa, Dendrocalamus latiflorus
MPGLPLPARDAANIGCGFGYPRSADQMCRQQSRARLSPDEQLAAEENFALYCKPVELYNIIQRRAIKNPAFLQRCLLYKIHARRKKRIQITISLSGGANTELQEHNIFPLYALLARPTSNVSLEGHSPYRFSRACLLTSFNEFGNKDHTEATFMIPDVKNLSTSRACNLNIILISCGQAGQTLGENTFSGNHVEGSALQKLEGKCFWGKIPICLLGSSLENDVDLTLGHTVELASTVSMSPSFLEPKFLEQDSCLTFCSHKVDATGSHQLQVSISAQEAGARDMSESPYSSYSYSDVPPSSLPHIIRLRAGNVLFNYKYYNNTMQKTEVTEDFSCPFCLVSCGSFKGLGCHLNSSHDLFHFEFWISEECQAVNVSLKTDAWRTELVAEGVDPRHQTFSYCSRFKKRRRFEITTEKISHVHPHIVDSGSPEDAQAGSEDDYAQRENGISVAHASVDPANSLHGSNLSPPTVLQFGKTRKLSVERADPRNRQLLQKRQFFHSHRAQPMALEQVFSDRDSEDEVDDDIADFEDRRMLDDFVDVTKDEKLIMHMWNSFVRKQRVLADGHIPWACEAFSRLHGQQLVQNSALLRCWRFFMIKLWNHSLLDARTMNTCNTILEGYQNESPDPKQT

SEQ ID NO: 1968 - protein, 638 aa, Triticum aestivum
MPGLPLPQSLNQNIGCEYAYPGSTGQAFRQQLRTALSPDEQLAAEESFALYCKPVELYNIIQRRAIRNPAFLQRCLHYKIHASRKKRIQITVSLSRGTNTELPEQNIFPLYVLLATPTSNISLEGHSPIYRFSRACLLTAFSEFGNKGRTKATFIIPDIKNLSTSRACNLNIILISCVSEGQVGENRGEHNCSVDHVEGSALQKLEGKCFWGKIPIDLLGSSLENCVTLNLGHTVELASAVSMSPSFLEPKFMEQDSCLTFCSHKVDATGSYQLQVGISAQEAGAKDMSESPYSSYSYSGVPPSSLPHIIRLRAGNVLFNFKYYNNTMQKTEVTEDFACPFCLVKCGSYKGLGCHLNSSHDLFHFEFWISEECQAVNVSLKTDVWRTELVAEGVDPRHQTFSYSSRFKKRRRLGMLGTTAEKISHVHPHIMDSDSPEDAQAVSEDDFVQREEDDISAPRASVDPAQSLHGSNLSPPTVLQFGKTRKLSAERADPRNRQLLQKRQFFHSHRAQPMALEQVFSDRDSEDEVDDDIADFEDKRMLEDFVDVTDDEKLIMHMWNSFVRKQRVLADGHIPWACEAFSRLHGKHLVQNPPLLWSWRFLMIKLWNHSLLDARAMNVCGTILQGYQNESGLDPKKM

SEQ ID NO: 1969 - protein, 606 aa, Oryza sativa Japonica Group
YQMCRHQPRARLSPDEQLAAEESFALYCKPVELYNIIQRRSIKNPAFLQRCLLYKIHARRKKRSLITISLSGGTNKELRAQNIFPLYVLLARPTNNVSLEGHSPIYRFSRACLLTSFHEFGNKDYTEATFVIPDVKNLATSRACSLNIILISCGRAEQTFDDNNCSGNHVEGSTLQKLEGKCFWGKIPIDLLASSLGNCVSLSLGHTVEMSSTVEMTPSFLEPKFLEDDSCLTFCSQKVDATGSFQLQVSISAQEAGAKDMSESPYSVYSYNDVPPSSLTHIIRLRSGNVLFNYKYYNNTMQKTEVTEDFSCPFCLVPCGSFKGLGCHLNASHDLFHYEFWISEECQAVNVSLKTDSWRTELLAEGVDPRHQTFSYRSRFKKRKRVEISSDKIRHVHPHIVDSGSPEDAQAGSEDDYVQRENGSSVAHASVDPANSLHGSNLSAPTVLQFGKTRKLSVERADPRNRQLLQKRQFFHSHRAQPMALEQVFSDRDSEDEVDDDIADFEDRRMLDDFVDVTKDEKLIMHMWNSFVRKQRVLADGHIPWACEAFSQFHGQELVQNPALLWCWRFFMVKLWNHSLLDARAMNACNTILEGYLNGSSDPKKN

SEQ ID NO: 1970 - protein, 604 aa, Oryza sativa Japonica Group
MCRHQPRARLSPDEQLAAEESFALYCKPVELYNIIQRRSIKNPAFLQRCLLYKIHARRKKRSLITISLSGGTNKELRAQNIFPLYVLLARPTNNVSLEGHSPIYRFSRACLLTSFHEFGNKDYTEATFVIPDVKNLATSRACSLNIILISCGRAEQTFDDNNCSGNHVEGSTLQKLEGKCFWGKIPIDLLASSLGNCVSLSLGHTVEMSSTVEMTPSFLEPKFLEDDSCLTFCSQKVDATGSFQLQVSISAQEAGAKDMSESPYSVYSYNDVPPSSLTHIIRLRSGNVLFNYKYYNNTMQKTEVTEDFSCPFCLVPCGSFKGLGCHLNASHDLFHYEFWISEECQAVNVSLKTDSWRTELLAEGVDPRHQTFSYRSRFKKRKRVEISSDKIRHVHPHIVDSGSPEDAQAGSEDDYVQRENGSSVAHASVDPANSLHGSNLSAPTVLQFGKTRKLSVERADPRNRQLLQKRQFFHSHRAQPMALEQVFSDRDSEDEVDDDIADFEDRRMLDDFVDVTKDEKLIMHMWNSFVRKQRVLADGHIPWACEAFSQFHGQELVQNPALLWCWRFFMVKLWNHSLLDARAMNACNTILEGYLNGSSDPKKN

SEQ ID NO: 1971 - protein, 601 aa, Eulaliopsis binata
MCLQHCSARLSPDEQLAAEKSFALYCKPVELYNIIQRRAVKNPPFIQRSLLYKIQARRKKRIQITVSLSASTNTQAQNIFPLYVLLARPTSNISLDGHSPIYRFSRVSLLTNFSEFGNEGKTEATFIIPNVKNLSTSRACNLSIIFISCGQVGQIIGEDSCSGNDVLRSSLQKLEGKCSWGKILTNRLASSLEQCVTLSTGDAVDLASTVTMNPSFLEPKFLEQDSCLTFCSHKVDATGSYQLQVSISAEEAGARELLLSPYYCNYSYNNVPPSLLPEIIRLRAGNVLFNYKYYNNTMQKTEVTEDFSCPFCLVPCGSFKGLGCHLNSTHDLFHYEFWISEECQAVNVSLKVDAWKTEFVAEGVDPRHQTFSYCSRFKKRRRLETTAKKIRHVHPHIMEPGSHEDAQAGSEDDYVQRENGLSVEHASVDHSQPVHGSNLSPPTVLQFGKSRKLSAERSDPRNRQLLQKRQFFHSHRAQPMPLEQVFSDHDSEDEVDDDIADFEDRRMLDDFVDVTKDEKLIMHMWNSFVRKQRVLADGHIPWACEAFSRCHGQRLVQNPALLWGWRFFMIKLWSHSLLDARAMNTCNTILQGYQDGSSDPK

SEQ ID NO: 1972 - protein, 637 aa, Hordeum vulgare subsp. vulgare
MPGLPLPARDAADTGCEFSYPQSADQMRQQQLRARLSPDEQLAAEESFALYCKPVELYNIIQRRAIRNPAFLQRCLHYKIHASRKKRIQITVSLSRGTNTELPEQNVFPLYVLLATPTTNISLEGHSPIYRFSRACLLTSFSECGSKGRTKATFTIPDIKNLSTSRACNLNIILISCVSEGQVEENVGEHNCSVNHVEGSALQKLEGKCFWGKIPIDLLGSSLENCVTLNLGHTVELASAVSMSPSFLEPKFMEQDSCLTFCSHKVDATGSYQLQVGISAQEAGARDMSESPYSSYSYSGVPPSSLPHIIRLRAGNVLFNFKYYNNTMQKTEVTEDFACPFCLVKCGSYKGLGCHLNSSHDLFHFEFWISEECQAVNVSLKTDVWRTELVAEGVDPRHQTFSYSSRLKKRRRLGMLGTTAEKISHVHPHIMDSDSPEDAQAVSEGDFVQREEDDISAPRASVDPAQSLHDSNLSPPTVLQFGKTRKLSAERADPRNRQLLQKRQFFHSHRAQPMALEQVFSDRDSEDEVDDDIADFEDRRMLDDFVDVTNDEKLIMHMWNSFVRKQRVLADGHIPWACEAFSRLHGKHLVQNPPLLWSWRFLMIKLWNHSLLDARAMNVCGTILQGYQNESSDPKNI

SEQ ID NO: 1973 - protein, 637 aa, Hordeum vulgare
MPGLPLPARDAADTGCEFSYPQSADQMRHQQLRARLSPDEQLAAEESFALYCKPVELYNIIQRRAIRNPAFLQRCLHYKIHASRKKRIQITVSLSRGTNTELPEQNVFPLYVLLATPTTNISLEGHSPIYRFSWACLLTSFSECGSKGRTKATFTIPDIKNLSTSRACNLNIILISCVSEGQVEENVGEHNCSVNHVEGSALQKLEGKCFWGKIPIDLLGSSLENCVTLNLGHTVELASAVSMSPSFLEPKFMEQDSCLTFCSHKVDATGSYQLQVGISAQEAGARDMSESPYSSYSYSGVPPSSLPHIIRLRAGNVLFNFKYYNNTMQKTEVTEDFACPFCLVKCGSYKGLGCHLNSSHDLFHFEFWISEECQAVNVSLKTDVWRTELVAEGVDPRHQTFSYSSRFKKRRRLGMLGTTAEKISHVHPHIMDSDSPEDAQAVSEGDFVQREEDDISAPRASVDPAQSLHDSNLSPPTVLQFGKTRKLSAERADPRNRQLLQKRQFFHSHRAQPMALEQVFSDRDSEDEVDDDIADFEDRRMLDDFVDVTNDEKLIMHMWNSFVRKQRVLADGHIPWACEAFSRLHGKHLVQNPPLLWGWRFLMIKLWNHSLLDARAMNVCGTILQGYQNESSDPKSI

SEQ ID NO: 1974 - protein, 626 aa, Zea mays; identical to SEQ ID NO: 1966

SEQ ID NO: 1975 - protein, 696 aa, Sorghum bicolor
MVNFGKKLMADQLEEWREYYINYKMMKKKVKQYVQQTQTGGKNRDQVLKEFSRMLDDQIEKVVLFLLQQQGHLARRIEKLGVQRAMLMQQSDVSQICQLRQAYREVGYDLVKLLRFLDMNATGIRKILKKFDKRFGYKFTDYYVSTRANHPYSQLQQIFKQVGVVAVVGALSRNLAYLQDHQGYLANIYDYPSLILKDPVIEQINHSVQKLTHSTSFLQFLGQHALIVPEDMQSGSDLDDDKDYHFLSLLLNLVNTFLYMVNTYIIVPTADDYSVSLGAAATVCGVIIGSMAVAQIFSSVYFSAWSNKSYFRPLVFSSIMLFLGNLLYALAYDLNSLTALIVGRLLCGLGSARAVNRRYISDCVPLKSRMQASAGFVSASALGMACGPGLAGLLQTKFKIYGLTFNQNTLPGWVMCVAWLAYLFWLWISFKEPGHIASENSVNTQSSDSGRPVSGNLEDGVREPLLIDAKAGPDDDVEDNDDNDDDPEESHRPATSLAAAYRLLTPSVKVQLLIYFMLKFAMEILLSESSVVTTFYFKWTTSTVAIFLAVLGLTVLPVNVIVGSYVTNLFQDRQILVASEIMVLIGIVMSFRFTPHYSVPQYVTSALITFVFAEVLEGVNLSLLSRVMSSRLSRGTYNGGLLSTEAGTLARVAADMTITAAGNLGQSRLLNATLLPSLVICLASIVATFCTYNSLY

SEQ ID NO: 1976 - protein, 692 aa, Zea mays
MVNFGKKLMADQLEEWREYYINYKMMKKKVKQYVQQTQTGGKNRDQVLKEFSRMLDDQIEKIVLFLLQQQGHLARRIENLGEQRVVLMERSDVSQICQIRQAYREVGYDLVKLLRFLDSNATGIRKILKKFDKRFGYKFTDYYVSTRANHPYSQLQQIFKQVGVVAVVGALSRNLSYLQDHQGSLANIYDYPSLILKDPVIEQINHSVQKLTHSTSFLQFLGQHALIVPGDMQSGSDLGDDKDYHFLSLLLNLVNTFLYMVNTYIIVPTADDYSVSLGAAATVCGVIIGSMAVAQIFSSVYFSAWSNRSYFRPLVFSCIMLFLGNLLYALAYDLNSLTVLIAGRLLCGLGSARAVNRRYISDCVPLKTRLQASAGFVSASALGMACGPALAGLLQTKFKIYGLTFNQNTLPGWVMCLAWIAYLFWLWISFKEPGHIATENSVSTQSSDSGRRVSGNLEGGLGEPLLIDAKAGQDEDDEDNDDPEESHTPATSLAAAYRLLTPSVKVQLLIYFMLKFAMEILLSESSVVTTFYFKWTTSTVAIFLAVLGLTVLPVNVIVGSYVTNLFQDRQILVASEIMVLIGIVMSFCFTPHYSVPQYVTSALITFVFAEVLEGVNLSLLSRVMSSRLSRGTYNGGLLSTEAGTLARVAADMTITAAGYLGQGRLLNATLLPSLVICLASIVATFCTYNSLY

SEQ ID NO: 1977 - protein, 692 aa, Zea mays
MVNFGKKLMADQLEEWREYYINYKMMKKKVKQYVQQTQTGGKNRDQVLKEFSRMLDDQIEKIVLFLLQQQGHLARRIENLGEQRVVLMERSDVSQICQIRQAYREVGYDLVKLLRFLDSNATGIRKILKKFDKRFGYKFTDYYVSTRANHPYSQLQQIFKQVGVVAVVGALSRNLSYLQDHQGSLANIYDYPSLILKDPVIEQINHSVQKLTHSTSFLQFLGQHALIVPGDMQSGSDLGDDKDYHFLSLLLNLVNTFLYMVNTYIIVPTADDYSVSLGAAATVCGVIIGSMAVAQIFSSVYFSAWSNRSYFRPLVFSCIMLFLGNLLYALAYDLNSLTVLIAGRLLCGLGSARAVNRRYISDCVPLKTRLQASAGFVSASALGMACGPALAGLLQTKFKIYGLTFNQNTLPGWVMCLAWIAYLFWLWISFKEPGHIATENSVSTQSSDSGRRVSGNLEGGLGEPLLIDAKAGQDEDDEDNDDPEESHTPATSLAAAYRLLTPSVKVQLLIYFMLKFAMEILLSESSVVTTFYFKWTTSTVAIFLAVLGLTVLPVNVIVGSYVTNLFQDRQILVASEIMVLIGIVMSFCFTPHYSVPQYVTSALITFVFAEVLEGVNLSLLSRVMSSRLSRGTYNVGLLSTEAGTLARVAADMTITAAGYLGQGRLLNATLLPSLVICLASIVATFCTYNSLY

SEQ ID NO: 1978 - protein, 697 aa, Oryza sativa Japonica Group
MVNFGKRLMADQLEEWKEYYINYKMMKKKVKQYVQQTQNGGRNREQVLKEFSRMLDDQIEKIVLFLLQQQGHLASRIEKLGEERALLMEQADASQISELREAYREVGIDLMKLLRFVDMNATGIRKILKKFDKRFGYKFTDYYVSTRANHPCSQLQQIFKQVGIVAVVGALSRNLAFLQDHQGNFPSIYDHPSITLKDPIIEQINHSVQKLTHATNLLQFIGQHALIIPEDMHSGSEDLVDDQSYHFMSLLLNLANTFLYMVNTYIIVPTADDYSVSLGAAATVCGVIIGSMAVAQVFSSVYFSAWSNKSYFRPLVFSSIMLFLGNLLYALAYDVNSLTVLIVGRLLCGLGSARAVNRRYISDCVPLKTRLQASAGFVSASALGMACGPALAGLLQTNFKIYGFTFDQNTLPGWIMCLAWITYLFWLWISFKEPDHIVRENSVNTPSSDSGHRRNSNLEDGLAQPFLIDAKESLDENGEDNDENEEDPEDSHKPATSLAAAYRLLTPSVKVQLLIYFMLKFAMEILLSESSVVTTFYFNWSTSTVAMFLAVLGLTVLPVNVIVGSYVTNLFQDRQILVASEIMVLIGIAMSFRFTSHYSVPQYVSSALITFVFAEVLEGVNLSLLSRVMSSRLSRGTYNGGLLSTEAGTLARVAADMTITAAGYLGQNSLLNVTLLPSFVICVASIVATFCTYNSLY

SEQ ID NO: 1979 - protein, 697 aa, Hordeum vulgare subsp. vulgare
MVNFGKVLVSDQLEEWKEYYINYKMMKKKVKQYVQQTQSGGRNHEQVLKEFSRMLDEQIEKVVLFLLKQQGHLASRIEKLGQQRAILTEHCDISQVSQVREAYRQVGLDLVKLLRFVDMNATGIRKILKKFDKRFGYRFTDYYVSTRANHPYSQLQPIFKQVGIVAVAGALTRNLASLQDHQGSFISIYDHPSITLKDPVIEQINNSVQKLTNSTTFLKFLGQHALIVPEDVQTSSEDLVDDQSYHFMSLMLNLVNTFLYMVNTYIIVPTADDYSVSLGAAATVCGVIIGSMAVAQVFSSVYFSAWSNKSYFRPLVFSSIMLFSGNLLYALAYDLNSLTVLIVGRLLCGLGSARAVNRRYISDCVPLKIRLKASAGFVSASALGMACGPALAGLLQTEFKIYEVTFNQNTLPGWIMCFAWVANLVWLWISFKEPDHFAQENALSTQSSESGHGRSDNLESGLAQPLLTEAKERRNENAEDNGDNEEGRKESHKPATSIAAAYRLLTPSVKVQLLIYFMLKFAMEILLSESSVVTTFYFNWSTSTVAIFLAVLGLTVLPVNVIVGSYITNLFQDRQILVASEIMVLIGIASSFHFSSSYCVAQYVVSALITFVFAEVLEGVNLSLLSRVMSSRLSRGTYNGGLLSTEAGTLARVAADMTITAAGYLGQSQLLNATLLPSLVICVASIAATFGTYNTLY

SEQ ID NO: 1980 - protein, 725 aa, Oryza sativa Japonica Group
MGIVGNVTVRKSSKKLMPNEGEIQVLNDKMVNFGKKLMADQVEEWKGYYINYKLMKKMLKQYVQQTQLGGKDREQVLKEFSRILDEQIERIVLFLLQQQGHLANRIEELGEQRAALLEQHDISQVFQLREAYREVGRDLIKLLRFVDMNATGIRKILKKFDKRFGYRFTDYYVTTRANHPYSQLQQVFKQVGIVAVVGALSRNLAYLQDHEGSVLSIYDHPSVTLKDPIIDQVNHAVQKLTHATSFLQFLGQHALIIQEDVQSGSEDLVDDQSYHFMSLILNLVNTFLYMVNTYIIVPTADDYAVSLGAAATVCGVIIGSMAVAQVFSSVYFSAWSNRSYFRPLVFSSIMLFAGNLLYALAYDLNSLTVLLIGRLLCGLGSARAVNRRYISDCVPLKIRLQASAGFVSASALGMACGPALAGLLQTRFKIYSLTFDQSTLPGWVMCIAWLVYLLWLWISFKEPGHFAKSSDTAQPAESGHQVNANLEEGLAQPLLTGSEEGQDQNAEDNDDNEEESKNSHGPATSISSAYKLLTPSVKVQLLIYFMLKYAMEILLSESSVITTYYFNWSTSAVAIFLAILGCTVLPVNAIVGSYITNLFEDRQILVASEIMVLIGIIMSFRYTPHYSVPQYVLSALITFVFAEVLEGVNLSLLSRVMSSRLARGTYNGGLLSTEAGTLARVVADATITAAGYLGPDLLLNITLLPPLVICIASLVATFCTYNTLY

SEQ ID NO: 1981 - protein, 696 aa, Oryza sativa Japonica Group
MVNFGKKLMADQVEEWKGYYINYKLMKKMLKQYVQQTQLGGKDREQVLKEFSRILDEQIERIVLFLLQQQGHLANRIEELGEQRAALLEQHDISQVFQLREAYREVGRDLIKLLRFVDMNATGIRKILKKFDKRFGYRFTDYYVTTRANHPYSQLQQVFKQVGIVAVVGALSRNLAYLQDHEGSVLSIYDHPSVTLKDPIIDQVNHAVQKLTHATSFLQFLGQHALIIQEDVQSGSEDLVDDQSYHFMSLILNLVNTFLYMVNTYIIVPTADDYAVSLGAAATVCGVIIGSMAVAQVFSSVYFSAWSNRSYFRPLVFSSIMLFAGNLLYALAYDLNSLTVLLIGRLLCGLGSARAVNRRYISDCVPLKIRLQASAGFVSASALGMACGPALAGLLQTRFKIYSLTFDQSTLPGWVMCIAWLVYLLWLWISFKEPGHFAKSSDTAQPAESGHQVNANLEEGLAQPLLTGSEEGQDQNAEDNDDNEEESKNSHGPATSISSAYKLLTPSVKVQLLIYFMLKYAMEILLSESSVITTYYFNWSTSAVAIFLAILGCTVLPVNAIVGSYITNLFEDRQILVASEIMVLIGIIMSFRYTPHYSVPQYVLSALITFVFAEVLEGVNLSLLSRVMSSRLARGTYNGGLLSTEAGTLARVVADATITAAGYLGPDLLLNITLLPPLVICIASLVATFCTYNTLY

SEQ ID NO: 1982 - protein, 696 aa, Oryza sativa Indica Group
MVNFGKKLMADQVEEWKGYYINYKLMKKMLKQYVQQTQLGGKDREQVLKEFSRILDEQIERIVLFLLQQQGHLANRIEELGEQRAALLEQHDISQVFQLREAYREVGRDLIKLLRFVDMNATGIRKILKKFDKRFGYRFTDYYVTTRANHPYSQLQQVFKQVGIVAVVGALSRNLAYLQDHEGSVLSIYDHPSVTLKDPIIDQVNHAVQKLTHATSFLQFLGQHALIIQEDVQSGSEDLVDDQSYHFMSLILNLVNTFLYMVNTYIIVPTADDYAVSLGAAATVCGVIIGSMAVAQVFSSVYFSAWSNRSYFRPLVFSSIMLFAGNLLYALAYDLNSLTVLLIGRLLCGLGSARAVNRRYISDCVPLKIRLQASAGFVSASALGMACGPALAGLLQTRFKIYSLTFDQSTLPVWVMCIAWLVYLLWLWISFTEPGHFAKSSDTAQPAESGHQVNANLEEGLAQPLLTGSEEGQDQNAEDNDDNEEESKNSHGPATSISSAYKLLTPSVKVQLLIYFMLKYAMEILLSESSVITTYYFNWSTSAVAIFLAILGCTVLPVNAIVGSYITNLFEDRQILVASEIMVLIGIIMSFRYTPHYSVPQYVLSALITFVFAEVLEGVNLSLLSRVMSSRLARGTYNGGLLSTEAGTLARVVADATITAAGYLGPDLLLNITLLPPLVICIASLVATFCTYNTLY

SEQ ID NO: 1983 - protein, 696 aa, Sorghum bicolor
MVNFGKKLMADQVEEWKGYYINYKLMKKMLKQYVQQTQHGGKDREQVLKDFSRILDDQIERIVLFLLQQQGHLASRIEELGEKRIVLLEEYDISQVYQLHDAYREVGLDLIKLLRFVDVNATGIRKILKKFDKRFGYKFTDYYVTTRANHPYSQLQQVFKQVGIVAVVGALSRNLEYLQHHEGSFVSIYDRPAVTLKDPIIDQVNNAVQKLTHATNFMQFLGQHSLIVQEDAQSGSEDLVDDQSYHFMSLMLNLVNTFLYMVNTYIIVPTADDYAVSLGAAATVCGVIIGSMAVAQVFSSVYFSAWSNKSYFKPLVFSSIMLFLGNLLYALAYDLNSLIVLLIGRLLCGLGSARAVNRRYISDCVPLKMRLQASAGFVSASALGMACGPALAGFLQIKFKIYSLTFNQSTLPGWVMCIAWFIYLLWLWLTFKEPEHFTKTLVSEQPSESGCQGNSNLEEGLAQPLLVGIEQRQEENSEDNDDTELASESSHEPATSIASAYRLLTPSVKAQLLIYFMLKYAMEILLSESSVVTTYYFSWTTSVVAIFLAILGLTVLPVNAIVGSYITNLFEDRQILLASEVMVLIGIIMSFRFTPHYSIPQYVISALITFVFAEVLEGVNLSLLSRVMSSRLSRGTYNGGLLSTEAGTLARVVADATITAAGYLGTDLLLNITLVPSLVICIVSIAATLYTYNNLY

SEQ ID NO: 1984 - protein, 698 aa, Vitis vinifera
MVAFGKKLKERQIQEWQGYYINYKLMKKKVKQYVQQIEGGAQNRRHVLKDFSRMLDTQIEKIVLFLLEQQGLLASRIAKLGEQHDALQQQPDISQISELREAYRAVGRDLLKLLFFVEINAIGLRKILKKFDKRFGYRFTDYYVKTRANHPYSQLQQVFKHVGVGAVVGAISRNLGDLQDRQGSYLSIYDQPALPLQDPVIDSIKAAVDRLTHSTNFLHFLAQHALIMQEELPTAVEEHVDDQRYHFMSLLLNLANTFLYMVNTYIVVPTADNYSMSLGAAATVCGVVIGAMAVAQVFSSVYFSAWSNKSYYRPLIFSSIVLFVGNTMYALAYDLDSIVVLLLGRLFCGLGSARAVNRRYISDCVPLKIRMQASAGFVSASALGMACGPALAGLLQINFKIYKITFNEDTLPGWVMAVAWLVYLIWLWISFKEPVRETQESNIQQESNAEPVENDALEKGLAQPLLLSSEDKQEDEDGDQDNDVSEEAPEESRGPATSIGSAYRLLTPSVKVQLLIYFMLKYAMEILLSESSVVTTYYFNWSTSTVAIFLACLGLTVLPVNIAVGSYISNMFEDRQILLASEIMVLIGILLSFNIIIPYSVPQYVCSGLIMFVSAEVLEGVNLALLSRVMSSRLSRGTYNGGLLSTEAGTIARVIADGTITLVGYLGESKLLNITLLPSLLICISSIIATFFTYNSLY

SEQ ID NO: 1985 - protein, 542 aa, Sorghum bicolor
MDSAANSVGESVGESPAPAPAPEPQTPPAEPVTKGRGLRRWRRIPREQHHEGSPASPGAGTGAGATAGEDLAAQLHKRRYGPAADEPKGKQDAAAAEEVESSVASVESSFVPLEASPPPAPAPALTRLDPNLGHLIATAGFSVGAGGADSDNSDDRTSKSSTAASAPRHDFSSVGFGRERDRARSRAPGAAHGKGIRAARVRGASARVASSPAEAENSRSSVESNLRSSNAAHARRSSSGVTSNGVHKVLFPDGHQSDDEPPSADLRYATGGFYKENGSVIGRLANCDSDSNNHIFDEASAGKFENGGTHSGLDPYAESVALLQSAQEALENEIQKFVEIREETDEDSTTHQSEIEWSSSPVEELNEKIKMLESKLEEATMVINKQDSKIIELDALSQVQPQNTIACNNDLLSLPSDVDQLLLEKLEAEIQCFILTRAWQDWKLLTKDQFALNETQKSLLADHKSLETKLRHAENRAMMLEEMVDKLESQCKELSETSEVLKLQARASRVSLFCSVQFVLLCLAMGTLLVRFLPSSPDVVPT

SEQ ID NO: 1986 - protein, 538 aa, Zea mays
MDSGANSIGESVGESPSLALAPEPQTRPAEPVTKGRGLRRWRRIPREQHQEGSPGSPGADTGVGASAGEDLAAQLHKRRYGPAADEPKGKQDPAAAEEVESSVASVESSFVPLEASPPPAPTRLDPNLGHLIATAGFSVGAGGADSDNSDDRTSKLSTAASAPRHDFSSVGFGRERDRARSRAPGAAHGKGIRAARVRGATMRVASSPAEAGNSRSSVESNLRSSNAAHARRSSAGVTSNGVHKILFPDGHQSDDEPPSGDMRYGTGRFYKENGSIEGRLGNCDSDSNHHTFDEASVGKFENGGTHSGLDLYGESMALLQSAQEALENEIQKFVEIRKETDEDSTAHQSEIEWSSSPVEELNEKIKMLELKLEEATMLINERDSEILELDALSHVQPQNTVACNNYPLSLQSDVDRLFLEKMEAEIQCFILTRASQDWKLLTMDQFALNEAQKSLLSDHKSLETKLRHAENRAMMLEEMVDKLESQCKALSETSEVLKLQAGASRASLFCSIQFVLLCIAIGTLLVRFLSSSPEIVPT

SEQ ID NO: 1987 - protein, 532 aa, Zea mays
MDSGANSVGESVGESPVPAPAPQTRPAEPVTKGRGLRRWRRIPREQHHEGSPVSPGLGNSAGASAGEDLAAQLHKRRYGPADDKPKGKQDAAAEEVESSVASVKSSFVPLEVSPPPPPTLTRLDPNLGHLIATTGFSVGAGGADSDNSDDRTSKSSTAASAPRHDFSSVGFGRERDRARSRAPSAAHGKSIRAARVRGASSTAEADHSRSSVESNLRSSNAAHARRSITDVTSNGVHKVLFPDGQQSDDEPPSAGLRYATGGVCKENGSVVGILGNCDTGSNNHTFDEASVGKFENGETHSYLDPYVESMALLQSAQEALENEIQKFVEIRKETDEDSTIHQSEIEWSSSPVEELNEKIKMLEWKLEEATMLIKERDSKILELDALSQVQPHDTIACNDDLLSLQSDADQLLLEKMEAEIQCFILTRASHDWKLLAKNQFALNEAQKSLLTDHKSLETKLRHAENRAMMLEDMVDKLDSQCKELSEISEVLKLQARASRASLFCSVQFILLCIAIGTILVRFLPPSPEIVPT

SEQ ID NO: 1988 - protein, 532 aa, Zea mays
MDSGANSVGESVGESPVAAPAPQTRPAEPVTKGRGLRRWRRIPREQHHEGSPVSPGLGNSAGASAGEDLAAQLHKRRYGPADDKPKGKQDAAAEEVESSVASVKSSFVPLEASPPPPPTLTRLDPNLGHLIATTGFSVGAGGADSDNSDDRTSKSSTAASAPRHDFSSVGFGRERDRARSRAPSAAHGKSIRAARVRGASSTAEADNSRSSVESNLRSSNAAHARRSITDVTSNGVHKVLFPDGQQSDDESPSAGLRYATGGVCKENGSVVGILGNCDTGSNNHTFDEASVGKFENGETHSYLDPYVESMALLQSAQEALENEIQKFVEIRKETDEDSTIHQSEIEWSSSPVEELNEKIKMLEWKLEEATMLIKERDSKILELDALSQVQPHDTIACNDDLLSLQSDADQLLLEKMEAEIQCFILTRASHDWKLLAKNQFALNEAQKSFLTDHKSLETKLRHAENRAMMLEDMVDKLDSQCKELSEISEVLKLQARASRASLFFSVQFVLLCIAIGTILVRFLPSSPEIVPT

SEQ ID NO: 1989 - protein, 507 aa, Zea mays
MTPPVASLLPERAAPLINKKVVTRWRPLKLVYDHDIRLGQVPEKCSFRTLREFVAKRFPSSKAVLIKYKDADGDLVTITSTEELRLAELFIDKVGHEVVENGREDDNKLPVLRLHLVEVSPEQEPTLPLEEEKLEEDEELLINGEDSTLHALAVVTDAEVVKQDVENRSADQSVETGKNDCGHAECKEAEIDDWLLQFADLFRNQVGIDADAHLDLHELGMELCSEALEETVTSMEAQVLFELAASKFQEVAALALFNWGNVHMCEARKRIPLDESAPKEVMAAQLRTAYYWVKERYALAGHKYEEALKIKPDFHEGLLALGQQHFETAKLHWSYALADKADLSTWDSLETFKLFDSAEQNMRAATEMWEKVEEQRMAELKEPGACDKDGVLRKRQHGAGGQPELTPEEAAEQAAVMRQQIHLFWGNMLFERSQVEFKLSVGDWKTNLDASVERFKLAGASESDILTVLKNHFSNVASECEEKKVMTSGTEISQTNDNVEDKCVVET

SEQ ID NO: 1990 - protein, 544 aa, Oryza sativa Japonica Group
MSKFNPSPPSPKLVPFSNSPPSSANASAAESSQKVTPTPLVPSSLSLKDKALMDKKVVTRSRPLKLVYDHDIRLAQMPEKCSFRTLREVVASRFPSSKAVLIKYKDADGDLVTITCSAELRLAESCVDIAGSEVIEDGARHGQKLPMLRLHIVEVSPDQEPPMPTEEEKLEQDNELLVKGEDNSPHASAAVVTDAEVTKQDVENVVAEAEQNTLTGKKDCGHAECKEAEIDDWLLQFADLFRNQVGVDADAHLDLHELGMELCSEALEETVTSEEAQALFEMAAAKFQEVAALALFNWGNVHMCAARKRIPLDESAPKKVMSAQLCTAYDWVRDRYALAGSKYEEALKIKPDFYEGLLALGQQHFETAKLHWSFALADKVDLSAWDSSQTFKLFDSAEHKMRAATEMWEKVEEQRMAELKEPSSEALKKRKKQHNADGQGELTPEEAAEQAAVMRQQIHLFWGNMLFERSQVEFKLDIADWKKNLDASIERFKLAGASESDISAVLKNHFSNTVSECEDKKIMTLDTGISQISNNIEDKCILES

SEQ ID NO: 1991 - protein, 390 aa, Zea mays
MAPSCYDAAASMLLCAEEHSSILWYDEEEEELEAVGRRRGRSPGYGDDFGADLFPPQSEECVAGLVERERDHMPGPCYGDRLRGGGGCLCVRREAVDWIWKAYTHHRFRPLTAYLAVNYLDRFLSLSEVPDGKDWMTQLLAVACVSLAAKMEETAVPQCLDLQVGDARYVFEAKTVQRMELLVLTTLNWRMHAVTPFSYVDYFLNKLSNGGSTAPRSCWLLQSAELILRAARGTGCVGFRPSEIAAAVAAAVAGDVDDADGVENACCAHVDKERVLRCQEAIGSMASSAAIDGDATVPPKSARRRSSPVPVPVPVPQSPVGVLDAAACLSYRSEEAATATATSAASHGPPGSSSSSSTSPVTSKRRKLASRCDGSCSDRSKRAPAQWTKE

SEQ ID NO: 1992 - protein, 388 aa, Zea mays
MAPSCYDAAASMLLCAEEHSSILWYDEEEEELEAVGRRRGRSPGYGDDFGADLFPPQSEECVAGLVERERDHMPGPCYGDRLRGGGGCLCVRREAVDWIWKAYTHHRFRPLTAYLAVNYLDRFLSLSEVPDCKDWMTQLLAVACVSLAAKMEETAVPQCLDLQEVGDARYVFEAKTVQRMELLVLTTLNWRMHAVTPFSYVDYFLNKLNNGGSTAPRSCWLLQSAELILRAARGTGCVGFRPSEIAAAVAAAVAGDVDDADGVENACCAHVDKERVLRCQEAIGSMASSAAIDDATVPPKSARRRSSPVPVPQSPVGVLDAAPCLSYRSEEAATATATATSAASHGAPGSSSSSSTSPVTSKRRKLASRCDGSCSDRSKRAPAQWTKE

SEQ ID NO: 1993 - protein, 373 aa, Sorghum bicolor
MAPSCYDVAASMLLCAEEHSSILCFEEEEEEELQVVGRKRARSPEPDYGDDFGVDLFPPQSEECVAGLVEKEREHMPRSDYGERLRGGGGDGIDLCVRREAIDWIWKVYTYYNFRPLTAYLAVNYLDRFLSRYELPDGKDWMTQLLSVACVSLAAKMEETAVPQSLDLQVGDARYVFEAKTIQRMELLVLSTLNWRMQAVTPFSYMDYFLNKLNGGNAAPRSWFFQSAELILCAARGTCCIGFRPSEIAAAVAAAVVVGEGNVAGIENACLHVDKERVLLCQDAIQSMSMASSAIDTVPPKSASGSGRTSTSSPVPVPWSPVGVLDAAGCLSYKSEDDAAGAAATVAAASHGASGSSSSSPPVTSKRRKLTSR

SEQ ID NO: 1994 - protein, 338 aa, Zea mays
MAPSCYDVAASMLLCAEEHSSILCFEEEEEELEAVGRKRGRSPGYGDDFGVDLFPPQTEECVAGLVEREREHMPRADYGQRLRGDGVDLCVRQEAIDCIWKVYTYYNFRPLTAYLAVNYLDRFLSLYKLPEGKGWMTQLLSVACVSLAAKMEETAVPQCLDLQVGDARFVFEAKTIQRMELLVLTTLNWRMQAVTPFSYVDYFLNRLSGGNAALRNCLFQSAELILCAARGTSCIGFRPSEIAAAVAAAVVGEVDVAGIENACAHVDKERVLRCQEAIQSMAFPVPVPQSPVGVLDAGYLSYKSEDDAAAAATAASHGASGSSSSSPVTSKRRKLTSR

SEQ ID NO: 1995 - protein, 172 aa, Zea mays
MQVPGRELGGWWIKCVLNTHTHSKEHASTRQGAGWVVDQVCAGGVGATQISICFVQPDEIRARQINLLPGGEAAQVRGADADADQPPRASLLVASCRMSTSTPSCGSSTYRTTEPRMKQFRTDSMWGYLSWSTTRVFSSLMLRYWSTEWSVPRIARSFLSSTVTSFPTSSLK

SEQ ID NO: 1996 - protein, 386 aa, Sorghum bicolor
MAPPRSLAGAAIAAAAAAIVLSCLFYRRKCARLAARVREVEASLVAAAEKVAAERRGRVRAQQSLRRALSQQEPRSDEARPAKATAPASYPLAPIGTVQSCFSTRNGTPRQPLVVTLARATVALDPARVPAAALEGLASYSHCWILYVFHLNTDLDKLWKDPARSKLKAKVRVPRLKGGKMGVLATRSPHRPNPIGLSVAKVEAVDGHALLLSGVDLVDGTPVLDIKPYLPYSDSVKGAAVPNWLEVDGALAVESVHFSEHFISALPTCWMHVQKQSLYASADEFQDLIKQVLSWDIRSISQRTRPHQVSMEADANGHCGEGTDDDHSDAGHCGVVYHLHLEGIDVSYRIDQGSNIVVEDAALLPDVVQKRHGYLAWRDKLGSSVL

SEQ ID NO: 1997 - protein, 386 aa, Zea mays
MAPPRSLAGAAIAATAAAIILSCLFYRRKCARLAARVRELEASLAVTAEKAAAERRGRVRAQQSLRALSQLEPGSDEARPTKAAASASYPLVPIGTVESCFSTRNGTPRQPLVVTLARATLVLDPARVPAAALEGLASYSHCWILYVFHLNTDLDKLWKDPARSKLKAKVRVPRLKGGKMGVLATRSPHRPNPIGLSVAKVEAVNGHTLLLSGVDLVDGTPVLDIKPYLPYSDSVKGAAVPSWLEVDGALAVESVHFSEHFISALSTCWMHVQMSLYASADEFQDLIKQALSWDIRSISQRNRPHQVSVEADANGHCGEDTDDDHHHRDTGRYGVVYHLHLEGIDVSYRIDQGSNIFVEDATLLPDAVQKRHGYLAWRDKLGSSVL

SEQ ID NO: 1998 - protein, 420 aa, Zea mays
MAPPRSLAGAAIAATAAAIILSCNLSLFPHLIVSSSKFPASTSPPSPTCLSGYPTGLFYRRKCARLAARVRELEASLAVTAEKAAAERRGRVRAQQSLRALSQLEPGSDEARPTKAAASASYPLVPIGTVESCFSTRNGTPRQPLVVTLARATLVLDPARVPAAALEGLASYSHCWILYVFHLNTDLDKLWKDPARSKLKAKVRVPRLKGGKMGVLATRSPHRPNPIGLSVAKVEAVNGHTLLLSGVDLVDGTPVLDIKPYLPYSDSVKGAAVPSWLEVDGALAVESVHFSEHFISALSTCWMHVQQMSLYASADEFQDLIKQALSWDIRSISQRNRPHQVSVEADANGHCGEDTDDDHHHRDTGRYGVVYHLHLEGIDVSYRIDQGSNIFVEDATLLPDAVQKRHGYLAWRDKLGSSVL

SEQ ID NO: 1999 - protein, 384 aa, Hordeum vulgare subsp. vulgare
MARFAALAAAAAAAILSGLLYRRRCGRLTARVQELEDSLADAVEKAAAERRGRVRAQQSLRRALSEQGTSPGKEKPDKAPASYPMAAIGTVQSCFSTRNGTPRQPLVVPLARATVVLNPARVAAEALEGLASYSHCWILYVFHLNTDLDKMWKDPARSKLKAKVRVPRLKGGKMGVLATRSPHRPNPIGLSVAKVEAVDGHAILLSGVDLVDGTPVLDIKPYLPYSDSVNGAAIPNWLEVDGALAVESIHFSEHFISSLSNCWAHVQKQALYASADEFQDLIKEVLSWDIRSLSQRLRPHQVNIKSEADDYGSEAHEDCRNKEDYQAAVSCPIVVYHLHLEGIDVSYKIDENSNIVVDDAALLPSAANQNKSSYLTWRDKLSTL

SEQ ID NO: 2000 - protein, 384 aa, Hordeum vulgare subsp. vulgare
MARFAALAAAAAAAILSGLLYRRRCGRLTARVQELEDSLADAVEKAAAERRGRVRAQQSLRRALSEQGTSPGKEEPDKAPASYPMAAIGTVQSCFSTRNGTPRQPLVVPLARATVVLNPARVAAEALEGLASYSHCWILYVFHLNTDLDKMWKDPARSKLKAKVRVPRLKGGKMGVLATRSPHRPNPIGLSVAKVEAVDGHAILLSGVDLVDGTPVLGIKPYLPYSDSVNGAAIPNWLEVDGALAVESIHFSEHFISSLSNCWAHVQKQALYASADEFQDLIKEVLSWDIRSLSQRLRPHQVNIKSEADDYGSEAHEDCRNKEDYQAAVSCPIVVYHLHLEGIDVSYKIDENSNIVVDDAALLPSAANQNKSSYLTWRDKLSTL

SEQ ID NO: 2001 - protein, 391 aa, Oryza sativa Japonica Group
MARQQVAAAAAVAAIAGAAAVLASELYSRRCRRLATRVRELEASLAAATEKAAAERRGRVRAQQSLRKALSEQELSSDEKKKLSQSPKSFPMASIGVVQSCFSTRNGTPRQPLVVPLARATVMLDPARVPAEALEGLADYSHCWILYVFHLNTDLDKMWNDPARSKLKAKVRVPRLKGGKMGVLATRSPHRPNPIGLSVAKVEAVDGHSILLSGVDLVDGTPVLDIKPYLPYSDGVKGAAIPNWLEVDGALAVESIHFSEHFISSLSDCWMHVKKQSLYASADEFQDLVKEVLSWDIRSLSQRIRPHDVTIKDVTDNGGSKIDNGCSNDEDRQSVDPSTSVVYHLHLEGIDVSYRIDQDSNIVVENAALLSSAVNQHRYSYLTWREKVSIL

SEQ ID NO: 2002 - protein, 416 aa, Oryza sativa Japonica Group
MARQQVAAAAAVAAIAGAAAVLASELYSRRCRRLATRVRELEASLAAATEKAAAERRGRVRAQQSLRKALSEQELSSDEKKKLSQSPKSFPMASIGVVQSCFSTRNGTPRQPLVVPLARATVMLDPARVPAEALEGLADYSHCWILYVFHLNTDLDKMWNDPARSKLKAKVRVPRLKGGKMGVLATRSPHRPNPIGLSVAKVEAVDGHSILLSGVDLVDGTPVLDIKPYLPYSDGVKGAAIPNWLEVDGALAVESIHFSEHFISSLSDCWMHVKKQSLYASADEFQDLVKEVLSWDIRSLSQRIRPHDVTIKDVTDNGGSKIDNGCSNDEDRQSVDPSTSVVYHLHLEGIDVSYRIDQDSNIVVENAALLSSAVNQHRYSYLTWREKREQCCSGRDNAYRNRRDSLQIAKSQFRQY

SEQ ID NO: 2003 - protein, 405 aa, Oryza sativa Indica Group
MARPQAAVAATLAAVAAAAAVLSSQLYRRRCRRLASRVRELEASLAAATEKAAAERRGRVRAQQSLRKALSEQELSSDEKKKLSKSPKSFPMASIGVVQSCFSTRNGTPRQPLVVPLARATVVLDPARVPAEALEGLADYSHCWILYVFHLNTDLDKMWNDPARSKLKAKVRVPRLKGGKMGVLATRSPHRPNPIGLSVAKVEAVDGHSILLSGVDLVDGTPVLDIKPYLPYSDSVKGAAIPNWLEVDGALAVESIHFSEHFISALSDCWMHVQKQSLYASADEFQDLVKEVLSWDIRSLSQRIRPHEVTIKDVTDNGRSKIDNGCNNDEDRQSVDSSTSVVYHLHLEGIDVSYRIDQDSNIVVENAALLSSAVNQHQYNYLTWREKVAIRPNPIAHSTLCPRPI

SEQ ID NO: 2004 - protein, 387 aa, Zea mays
MAPPRSLAGAAIAATAAAIILSCLFYRRKCARLAARVRELEASLAVTAEKAAAERRGRVRAQQSLRALSQLEPGSDEARPTKAAASASYPLVPIGTVESCFSTRNGTPRQPLVVTLARATLVLDPARVPAAALEGLASYSHCWILYVFHLNTDLDKLWKDPARSKLKAKVRVPRLKGGKMGVLATRSPHRPNPIGLSVAKVEAVNGHTLLLSGVDLVDGTPVLDIKPYLPYSDSVKGAAVPSWLEVDGALAVESVHFSEHFISALSTCWMHVQQMSLYASADEFQDLIKQALSWDIRSISQRNRPHQVSVEADANGHCGEDTDDDHHHRDTGRYGVVYHLHLEGIDVSYRIDQGSNIFVEDATLLPDAVQKRHGYLAWRDKLGSSVL

SEQ ID NO: 2005 - protein, 344 aa, Zea mays
MEHDVHHQQAMELPPGFRFHPTDEELITHYLARKAADARFAPRAVGEADLNKCEPWDLPSRATMGEKEWYFFCVKDRKYPTGLRTNRATESGYWKATGKDREIFRSKALVGMKKTLVFYTGRAPRGGKTGWVMHEYRLHGKHASSSRLMPSSVRAGASKDEWVLCRVFKKSIEPPPSVGKRSSVACTGMMLVEDVVGPPSMSMEDDLAACALPPLMDVSGGGGANMAAASIELLAPPAPHVTCFSNALEGQFFLNPPCLHPSTSPLRLASMVQAQAQYDGDAGMVLQLLQEAGGWYSKLGEGERLSGGASQDTGVTSEVNVNPAEISSTRHHIMDPEAASFWGF

SEQ ID NO: 2006 - protein, 362 aa, Sorghum bicolor
MEHDVHHHHHQQPEEAMELPPGFRFHPTDEELITHYLARKAADPRFAPRAVGVADLNKCEPWDLPYRATMGEKEWYFFCVKDRKYPTGLRTNRATESGYWKATGKDREIFRGKALVGLKKTLVFYTGRAPRGGKTGWVMHEYRLHGKHAAAAAAASSSSSLIPSVRAGASKDDWVLCRVFKKSIEPPSSVAGGSKRSSSSVACMGMEDVVGPSRSMADDFAASTLPPLMDVSGGSGGNMSLSAAAAAAASIELTTPPAPHVTCFSNTLEGHFLTPPTCLLPSAAATASPFLASMAQYDGDAGVGGMVHELLQEAGGWYSKLGERERLSGGASQDTGVTSEVNPAEISSTRHHMDHEASFWGF

SEQ ID NO: 2007 - protein, 420 aa, Zea mays; identical to SEQ ID NO: 1998

SEQ ID NO: 2008 - protein, 386 aa, Sorghum bicolor; identical to SEQ ID NO: 1996

SEQ ID NO: 2009 - protein, 223 aa, Zea mays
MAPPRSLAGAAIAATAAAIILSCLFYRRKCARLAARVRELEASLAVTAEKAAAERRGRVRAQQSLRALSQLEPGSDEARPTKAAASASYPLVPIGTVESCFSTRNGTPRQPLVVTLARATLVLDPARVPAAALEGLASYSHCWILYVFHLNTDLDKLWKDPARSKLKAKVRVPRLKGGKMGVLATRSPHRPNPIGLSVAKVEAVNGHTLLLSGVDLVDGTVPI

SEQ ID NO: 2010-2014 - skipped (5 entries)

SEQ ID NO: 2015 - DNA, 1259 bp, Zea mays
atggagcggttcggcctggacggcggcggtggcggtggcgagctgccgccggggttccggttccacccgacggacgaggagctcatcacctactacctcctccgcaaggccgtggacggcagcttctgcggccgcgccatcgcggagatcgacctgaacaagtgcgagccatgggagctcccgggtaaggcgaagatgggggagaaggagtggtacttctacagcctccgcgaccgcaagtacccgacgggcctgcgcaccaaccgcgccacggtggccggctactggaaggccaccggcaaggaccgcgagatccgcagcggccgcaccggcgcgctggtgggcatgaagaagacgctcgtcttctaccgcggccgcgcccccaagggacagaagacgcactgggtcatgcacgagtaccgcctcgagggcgcctacgcctaccatttcctccccagctccacaaggcaggacgagtgggtgatcgcgagggtgttccagaagcccggcgaggtcccacctgcagcccgcaagcaccgcctcggcgcccttagcagcactaccggcaccgccgcgggcgattcctgcttctcggactctacctcggcctccatcggcggcgcgtcgtcgtcatccacgcctggcccgctgttcgcgtcggcggccgccgccgtggccaatgccggcgccgccgacggcgacaccagctcctactgcggcggcgctgccaaccatggcaacctggtcaccggccgtgagctcgtgccctgcttctccactgccaccattaacggccccctagttgccgccgcgctcggcatcgggcagccgtacaacgcagccccgctgccgttcgagcagcagccgccgcctccggccttcctgccgagcctgcgttcccttcaggacaacctccagcttccaccgttcctctcagcaggcggtctgggcggcggcggggctctccactggctccccgccggcggcatggaggtcaaggtcgagggccgctcggcgccaccgcagatggctgtcggccccggccagctcgatggcgctttcggctggagcttctagttcttcgctgcactacatggttgtgcccatctatctagctagtagtggtttcttcatgcgttgtacgttaagcttggttaatcaactgctagtaagtgactgggtcgtcgttctaagtaatgtagtaactgtgttgtagtctctcatctaactgcagtagcagctttatttgttcgtggatt

SEQ ID NO: 2016 - DNA, 1602 bp, Sorghum bicolor
ctccatccccaaaacagaagagcttcccttcactactcccacagcacagctgctgctgtgccgagggaggagcagcttcgttcggcgggaaggccggagacggagacgacgacgatggagcggttcggcgtgctgggcacgcggctgggcctggacggcgtcggcatcggcggaggaggaggtggaggcgagctgccgccggggttccggttccacccgacggacgaggagctcatcacctactacctcctccgcaaggccgtcgacggcagcttctgcggccgcgccatcgccgagatcgacctcaacaagtgcgagccatgggagctcccagacaaggcgaagatgggggagaaggagtggtacttctacagcctccgcgaccgcaagtacccgacggggctgcgcaccaaccgcgccacggtggccgggtactggaaggccaccggcaaggaccgcgagatccgcagcggccgctccggcgcgctggtcggcatgaagaagacgctcgtcttctaccgcggccgcgcacccaaaggacacaagacgcactgggtcatgcacgagttccgcctcgacggcacctacgcctaccatttcctccccacctccacaagggatgagtgggtgatcgcgagggtgttccagaagcccggcgaggtcccacccgcccgcaagcaacaccaccgcctcggcggcctgagcagcgccggcgagtcctgcttctcggactccacctcggcctccatcggcggcggcggaggcgcgtcggcttcatccgcgcctcgcccgctgccgctcacggtcacggacgcctcatcgctgtcgctgtttgcggccaatgccgccgccgacggcgacaccagctcctactgcggcggccacggcggtggcgccgccaacactggcaacaaactggtcaccggccgtgagctcgtgccctgcttctccactagcaccaccaccggcgccgccctggatgccgccgcgctcggcatcgggcagccgtacaacgcagcagtcccgccgccgctggccttcgaggcgccgccgctgccgactccggccttcttcccgaacctgcgttcgtccctgcaggtgcaggacaaccacctccagctgccactgttcctctccgcaggcggaggaggcggcctgtccgggacgctgggtggcggggctctccaccactggcccttcgccggcatggaggtcaaggtcgagggccgctccgcgccgccgcagatggccgtcggccccggccagctcgatggcgccttcggctggggcttctagctgcccctgctgcatgcacacaccgctacatggacagggatcgatcgatatgcccctacgtccacatggttgtgctaatctatctagcctcgtacggactacgtaattaataaccaatcaatcagtcgattagtagtagtgatttgatttctgcatgcgttgtcgttaattaagcttggttaattagctgctggtagtaagtgttagggtcgtcgtcgatctatatgttgtaatgtagtgtaacaactgtggtttatctctcactgcagtagcaggatgtgactgaccggccgaccatgggttggt

SEQ ID NO: 2017 - DNA, 1122 bp, Oryza sativa Japonica Group
atggagcggtgcagcgtgctggggctgggcggtggcgggggcgggggcgggcggctggacggcgagctgccgccggggttccggttccacccgacggacgaggagctgatcacctactacctgctgcggaaggtggtggacgggagcttcaacgggcgcgccatcgcggagatcgacctgaacaagtgcgagccgtgggagctgccggagaaggccaagatgggggagaaggagtggtacttctacagcctccgcgaccgcaagtaccccacgggactccgcaccaaccgcgccacgggcgccggctactggaaggccaccggcaaggaccgcgagatccgcagcgcccgcaccggcgccctcgtcggcatgaagaagaccctcgtcttctaccgcggccgcgcccccaagggccagaagacccagtgggtcatgcacgagtaccgcctcgacggcacctacgcctaccacttcctctcctcctccacccgggatgagtgggtgatagccaggatcttcaccaagcccggcgtgttccccgtcgtccgcaagggccgcctcggcataagtggcggcggcggcgacacctcgtgcttctcggactccacctccgcctccgtcggcggcgggggcggcacctccgcctcgtcggcgctgcgcgcgccgctggctgaggcctcgctgttcgccgccgccgcggcgccagccgttgacggcgccgacagcagcaactacggcgggggcggcggcgccggcagcgccaccgccaccgccaacttggtcaccggccttgagctcgtgccctgcttctccaccacagcccacatggatgcctcgttcggcaccgggcagtacaacccggccccgctggccgtcgagccgccgccgccgccgccggccttcttcccgagcctccgctcgctgcaggagaacctgcagctgccgctgttcctctccggcggcatgcaggcgggcgtgtcgtcgcagccgctcagcggcggcggggccttccactggcagtccggcatggacgtcaaggtcgagggcgccgtcggccgcgcgccgccgcagatggccgttggccccggccagctcgacggcgcctttgcatggggcttctag

SEQ ID NO: 2018 - DNA, 825 bp, Zea mays
atggaggcgagaatgcctccggggttcaggttccaccccagggatgacgagctcgtgatggactacctcctacaaaagctctccggccatggccaccatgccggcgctgccatcgtcgtcgacgtcgacctcaacaagtgcgagccatgggacctcccagattccgcgtgcgtgggtgggaaggagtggtacttcttcagcctgcgcgaccgcaagtacgcgacggggcagcgcactaaccgcgccacgcactccggctactggaaggccaccggcaaggaccgcgccgtcgtcgccggcggcgaggtggcggtggggatgcgcaagacgctggtcttctaccggggccgcgcgcccagggggaagaagacggagtgggtcatgcacgagttccgcctccacccccatgccgcgccgtgcctgctagcagcagctgcgccaaacaaggaggactgggtgctatgcagggtgttctacaagagcagaacaaccagcccaaggccagaatctgaagacgcccgggacggcaccccatcagctgaaccgcaactgccggctgccctgccgcttgcgcccctcgctgacacctacgccgccccaacggttgcagagcaggtgtactgcttctccggtctgccggcactgccattcagaagaccagtgagccttggggaccttctggagttcgacgcctccgagaaggaatctgtcacgacagcgatgaccagtgtctcgaacaacactagttcagtgctggagctggctccaaattgcaactggaaccaggaaaatggcatgtcacggatgtggagcccccttgggata

SEQ ID NO: 2019 - DNA, 1046 bp, Zea mays
gcagcacatatcaattagtaactagctaggtagaagaagatgagctcgtcgatcagcatgatggaggcgagaatgcctccggggttcaggttccaccccagggatgacgagctcgtgatggactacctcctacaaaagctctccggccatggccaccatgccggcgctgccatcgtcgtcgacgtcgacctcaacaagtgcgagccatgggacctcccagattccgcgtgcgtgggtgggaaggagtggtacttcttcagcctgcgcgaccgcaagtacgcgacggggcagcgcactaaccgcgccacgcactccggctactggaaggccaccggcaaggaccgcgccgtcgtcgccggcggcgaggtggcggtggggatgcgcaagacgctggtcttctaccggggccgcgcgcccagggggaagaagacggagtgggtcatgcacgagttccgcctccacccccatgccgcgccgtgcctgctagcagcagctgcgccaaacaaggaggactgggtgctatgcagggtgttctacaagagcagaacaaccagcccaaggccagaatctgaagacgcccgggacggcaccccatcagctgaaccgcaactgccggctgccctgccgcttgcgcccctcgctgacacctacgccgccccaacggttgcagagcaggtgtactgcttctccggtctgccggcactgccattcagaagaccagtgagccttggggaccttctggagttcgacgcctccgagaaggaatctgtcacgacagcgatgaccagtgtctcgaacaacactagttcagtgctggagctggctccaaattgcaactggaaccaggaaaatggcatgtcacggatgtggagcccccttgggatatgagatagatctgtgttgtttgctggatctggatgtatggagtgttagtactgagtggccagtagggttctgctgcttagatttgattagcagtgtgacttgcagattgtgtagattagattatccgttattggactaatggcttggcgtagtatttgtac

SEQ ID NO: 2020 - DNA, 1416 bp, Zea mays
gctccattccctcactgcccagttgggcggccttcaaaacgcagcctctctctctctctctctctgtaagacgggaaactccagcacatagtaattggtaactagctaggtagaagaagatgagctcgtcgatcagcatgatggaagcgagaatgcctccgggtttcaggttccaccccagggatgacgagctcgtgatggactacctcctacaaaagctctccggccatggccaccacgccggcgctgccatcgtcgtcgacgtcgacctcaacaagtgcgagccatgggacctcccagattccgcgtgcgtgggtgggaaggagtggtacttcttcagcctgcgcgaccgcaagtacgcgacggggcagcgcaccaaccgcgccacgcactccggctactggaaggccaccggcaaggaccgcgccgtcgtcgccggcggcgaggatgcggtggcggtggggatgcgcaagacgctggtcttctaccggggccgcgcgcccagggggaggaagacggagtgggtcatgcacgagttccgcctccacccccatgccgcgccgtgcctgctaccagcagctgcggcaaacaaggaggactgggtgctatgcagggtgttctacaagagcagaacaaccacgccaaggccagaatctgaagacgcccgggacggcaccccatcagctgagtcgcaactgccggctgccctgccgcttgcgcccctcgctgacacctacgccgccccaacggttgcagagaaggtgtactgcttatccggtctgccggaactgccattcagaagaccagtgagccttggggaccttctggcgttcgaggcatctgagaaggagtctgtcacgacagtgatgaccagtgtctcgaacaacactagttcagtgctggagctgactccaaattgcaactggaaccaggaaaatggcatgtcacggatgtggagcccccttgggatatgagatagatctgtgttgtttgctggatctggatgtatggagtcttagtactgagtggccagtagggttctgctgcttagatttgattagcagtgtgacttgcagattgtgtagattagattatccgttattggactaatggcttggcgtagtatttgtacatattgctactgaaggaacagtgtccttatccttgtttggcgtagtatttgtacatagcacctgctaaacttcagacaatcagtgaaagacaaatgtgtacattgtaacatagtgttaagaaactctgagagttgctaaaaaaaaaaaaaaaaaaaaaaaaaaaaaaaaaaaaaaaaaaaaaaaaaaaaaaaaaaaaaaaaaaaaaaaaaaaaaaaaaaaaaaaaaaaaaaaaaaaaaaaaaaaaaaaaaaaaaaaaaaaaaaaaaaaaaaaaaaaaaaaaaaa

SEQ ID NO: 2021 - DNA, 1152 bp, Sorghum bicolor
gactgaaactgcagcagatagtagggtagaagatgagctcgtcgatcagcatgatggaggcgagaatgcccccggggttcaggttccatcccagggacgacgagctcgtgctggactacctcctcgacaagctctccggccatggccatggcggcggcgcagccatcgtcgacgtcgacctcaacaagtgcgagccatgggaccttccagaatctgcgtgcgtcggtggaaaggagtggtacttcttcaacctgcgcgaccgcaagtacgcgacggggcagcgcaccaaccgcgccacgcgctccggctactggaaggccaccggcaaggaccgcgccgtcgtcgccggcggcgacggcggcgaggatgcggcggcggtggtggggatgcgcaagacgctggtgttctaccggggccgagcgcccaaggggaggaagacggagtgggtgatgcacgagttccgcctccatccacacgccgcgccgtcgctaccagctgcggcaacgaaggaggactgggtgctatgcagggtgttctacaagagcagaacaaccaccccaaggccagcatctgacgatgcccaggacggcaccccatcagctgagccacaactgtctgctgccctgccgcttgggccgctggctgacacatacactgccttcggtggtgccccaacggtttttgagcaggtgtcctgcttctccggtctgccagcactgccgttcaagagaccagtgagccttggggaccttctggcgttcgacacctctgagaaggaatccatcgggacagtgatgagcagtgtctcaaacaacagtagttcagtactggagctgactccaaattgcaactggaaccaggaaaatgacatgttacagatgtggaaccccctagggatatgagatagatctgtgttgtttcgttgatagtggttgtgaagtgctgtcccaggtctggagtgctagtactgagtgtacatgcagattaaatttgattagtagtgtgacatacagattacagattagattattcattattggactaatggcttggcgtagtatttgtacataggattgctaatgaaggaaccgtgtccttgtatcttgttcagttgttcatatttctctgttctcaaaatatgtttctaagtgc

SEQ ID NO: 2022 - DNA, 2107 bp, Zea mays
ggagagcctaccccctccctcattccccgcgcgacgaggccgcttaatggcgggtcgcggccggcctcggccgggctcgcaccaggctctcgtcgtcgccgccgtcatcctactcctggccgccgcgtccggggccggcgctggatcccccgatcggcccgcgccggggccgccgctgttcctcccgctcacgcgctcgtaccccaacgccagccggctcgccgcctcgctgcggcgcggcctcggcgacggggtccaccccaacgcgcgcatgcgcctccacgacgatctcctcaccaacgggtactacacgacgaggctgtacatcgggacgcccccgcaggagttcgcgctgatcgttgactccgggagcaccgtcacctacgtgccctgctcctcctgcgagcagtgtggcaaccaccaggatccacgatttcaacctgacctctccagttcatattcaccagtaaaatgcaacgttgattgtacttgtgacagtgacaaaaaacagtgcacttatgaaaggcagtatgctgaaatgagctccagcagtggggtgcttggtgaggacatagtgtcttttggcagagagagtgaacttaagccacagcatgctatttttggctgtgaaaattctgaaactggagatttgttcagtcagcatgctgatggtataatggggctgggtcgtggtcaacttagcataatggatcagcttgttgaaaagggtgtcataagtgattcgttctcattgtgctatggtggcatggatattggtggcggtgctatggtactcggtggaatgcttgctcctccagacatgattttttcaaactcggaccctctccgcagcccatattacaacattgagttaaaagaaatacatgttgctggaaaggcactgcgggtggaatcaaggatcttcaacagcaaacatgggactgttttggatagtgggaccacatatgcttatttgccagagcaagcttttgtggcttttaaagaagctgtgacaagcaaagtacattctcttaagaaaattcgtggccctgatccaagttataaggatatctgctttgcaggtgctggaaggaacgtctcaaagctgcatgaggtatttccagatgttgacatggtatttggaaatggacagaagctctcactcacacctgaaaattatttattccggcactccaaagttgacggggcttattgcttgggtgtattccaaaatggtaaagatccaacaacactattaggaggtatcattgttcgtaatacacttgtgacctatgaccgtcacaatgaaaagattgggttctggaaaactaactgttcagagttgtgggagaggttacatatcggtgacactccttcaccagccccttcaagtgatacaagttcagaacatgatatgtcgcctgctcctgcccctagtaatttgccagagtttgatgttggtctcatcaccgttgatatgtctataaatgttacttacccaaatttgaaacctcatctccatgagctggccgagctgatagctaaagagctggagattgactcacgtcaggttagagttatgaatattacgagccaaggaaattctactctgattagatggggtattttcccagcagaatccgataatgctatgtccaacgcaacagcaatgggtatcatatatcggttaactcagcatcatgttcagttgcctgaaaatcttggcagttatcagttgcttgagtggaatgtgcagcctttgccgagaaggtcatggtttcaagaacatgtagtctctatgctgcttgggattttactagtaattttggtcactttgtcagcctttttagtagtacttgtttggagaaagaaatttagtggtcaagcagcctacagacctgttgattcagtggtccccgagcaagaactccagccactataatccaaattaaagctgtttgacggaacaacatatagatgattctttggtagagatacccttgtgcgggggggttacgcatcacagcggcacgcatctgctgctggagtaagcccttctttgtatgtaacacaagctacaagtttacagaagaagcactgtatgatt

SEQ ID NO: 2023 - DNA, 2273 bp, Sorghum bicolor
gcgcgacgaggccgcttcatggcgagtcggggccggcctcggccgggctcgctccaggacctcgccgccgccgccatcgccatcctcctcctgtccgccgcgtccggggccgccgctggatcccccgatcggcccgcgccggggccgccgctgttcctcccgctcacgcgctcgtaccccaacgccagccggctcgccgcctcgtcgaggcgcggcctcggcgacggggcgcaccccaacgcgcgcatgcgcctccacgacgatctcctcaccaacgggtactacacgacgaggctgtacatcgggacgcccccgcaggagttcgcgttgatcgttgactccgggagcaccgtcacctacgtgccctgcgcctcctgcgagcagtgcggcaaccaccaggatccacgatttcaacctgatctctccagttcatattcacctgtgaaatgcaacgtcgattgtacttgtgacagtgacaaaaaacagtgcacttatgagaggcagtatgctgaaatgagctccagcagtggggtgcttggtgaggacattgtgtcttttggcagagagagtgaacttaagccacagcgtgctgtttttggctgtgaaaattctgaaactggagatttgttcagtcagcatgctgatggtataatgggcctgggtcgtggtcaacttagcataatggatcagcttgttgaaaagggtgtcataagcgattcattctcattgtgctatggcggtatggatattggtggtggtgctatggtgcttggtggagtgcctgctccttctgacatggttttttcacattctgaccctctccgcagtccatattacaacattgagttaaaggaaatacatgttgctggaaaggcactgcgggtagattcaagggtctttaacagcaaacatgggactgttttggatagtgggaccacatatgcctatttgccagagcaagctttcgtggcttttaaagatgctgtgacaagtaaagtgcattctctcaagaaaattcgtggccctgatccaaattataaggatatctgctttgcaggtgctggaaggaacgtctcaaagctacatgaggtatttccagatgttgacatggtatttggaaatggacagaagctgtctcttacacctgaaaattatttattccggcactccaaagttgatggggcttattgcttgggtgtattccaaaatggtaaagatccaacaacactattaggaggcatcattgttcgtaatacacttgtgacctatgaccgtcacaatgaaaagattggcttttggaaaactaactgttcagagttgtgggagaggctacatatcagtgacgctccatcaccagccccttcaagtgatacaaattcagaaactgatatgtcacctgctcctgcccctagtagcttgccagagtttgatgttggtctcattaccgttgatatgtccataaatgttacttacccgaatctgaaacctcatctgcatgagttggccgagctgatagctaaagaactggagattgactctagtcaggttcgagttatgaatatcacgagccaaggaaattctactctgattagatggggtattttcccagcagaatctgataatgctatgtccaacgcaacagcaatgggtatcatctatcggttaactcagcatcatgttcagttgcctgaaaatcttggcagttatcaattgctcgagtggaatgtgcagcctttaccgagaaggtcatggtttcaagaacatgtagtctctatactgcttgggattttactagttgttttggtcactttgtcagcccttttagtagtacttgtttggagaaagaaatttagtggtcaaactgcctacagacctgttgattcagtggctcccgagcaagaactacagccactataattcaaagctgtttggcggacatatagatgattctttggtagagataccttgtacggggttacatatcacagcggctcgcgtctactgctggagtaagcccctctttgtatgtaacacaagctacaagcttacagaagaggcacagtatgattacatgacttctccattcaaaacttagaagcgctgttcataaactgtctagttattcagatcaagagctcccctcttgtgcttactgtagaaggttttgttcatgtaatgtagattaagtaggggtagagaagagactaagcacacccgcagaacgaaatgatgtaatatctatttgataagtgctgagggtatttggcttcttc

SEQ ID NO: 2024 - DNA, 2310 bp, Oryza sativa Japonica Group
ccccttccttcctcctcctcggctcggcgcgacgagtcctcgccatggcgagtcgccggtcgcgtcggctcggctcgctcgtgcccttcgccgccgcggtggtcctcctcctcctcatcgcttccgccgccgccgccgccgcgggatcccccgatcgggccggccccgcgcggccgccgctggtgctcccgctcacgctcgcctaccccaacgccacccgcctccccgcctcctcggccaggcgcggcctcggcgatggacacaaccccaacgcccgcatgcgcctccacgatgatctcctcaccaacgggtattacacgacgaggctgtacatcgggacgccttcgcaggagttcgcgctgatcgtggactccgggagcaccgtcacctacgttccctgcgccacctgcgagcagtgcggcaaccaccaggatccacgattccaacctgatctctccagtacatattcaccagtaaaatgcaatgttgattgtacttgtgataatgagaggagtcaatgcacttatgagaggcagtatgctgaaatgagctccagcagtggtgtgcttggcgaggacattatgtcatttggcaaagaaagtgaacttaagccacagcgtgctgtttttggctgtgaaaacaccgaaacaggagatttgttcagtcaacatgctgatggtattatggggctgggccgtggtcaacttagcataatggatcagcttgttgagaagggtgtcattagtgattcattctctctgtgctatggtggaatggatgttggtggtggtactatggtacttggtgggatgcctgctcctcctgacatggttttctctcattcaaaccctgtccgcagcccgtattacaacattgagttaaaggaaatacatgttgccggaaaggcattgcggttagacccaaagatattcaacagcaaacatggcactgtcttagatagtggaaccacatatgcttacctgcctgaacaagcatttgttgcatttaaagatgctgtgacaaataaagtaaattctctgaagaaaatccgtggcccagatccaaattataaagacatctgctttgcaggtgctggaaggaacgtctcccaattatcagaggtatttccagatgttgacatggtatttggaaatgggcagaagctttcgctttcacctgaaaactatttgttccggcattcgaaggttgaaggggcttattgcttgggtgtgtttcagaatggaaaagatccgacaacactattagggggaattgttgtccgtaatactcttgtaacctatgaccgtcacaatgagaagattggcttttggaaaactaactgttcagagttgtgggagaggctccatattagtgaagttccttcatcagcaccttcagattcagagggagatatggcaccagctcctgctcctagtggtttgcctgaatttgatgttggcctaatcactgttgatatgtccataaatgttacttatccaaacctgaaacctcacctccatgagctggctgagcttatagctaaagagctggacattgactcccgtcaggttcgagttatgaatgttacaagccaaggaaactctactctaatcagatgggggatttttccagctggaccttctaattctatgactaatacaacagcaatgggtatcatttatcggttgacccaacatcacgtccagttgcctgaaaatcttggcagttatcagttacttgaatggaatgtgcagcctttatccaagaggtcatggttccgagatcatgtagtctctatactgcttggaattttgctagttgttttgctgactttatcggcccttttagtactgattgtctggagaaagaaatttagaggtcaagcggcatatagacctgtggattcagcagttcctgagcaagagctccaaccgctataatttggagtggttcaacggagtaaacatataggcgattctttggtagaaataccgttgtgcgggctgccatgttgcagcgggttcacatccgctgctgggagttgccctttttctttgtatgtaacacaagctacaagcttacagaagaagcacaagattacataacttctcgattcagcacttagagcctctgttcataaactgtctagcgattcagatcaagagcttcctcttgtagcttacagtagaagaaggttttgttcgtgtaatgtagattaagtagaatagagcaaggcacaaaagcacagcagccatggacggaatgttgtattatctagtatctgataagtgctgaggatattcggcttct

SEQ ID NO: 2025 - DNA, 2377 bp, Hordeum vulgare subsp. vulgare
ggacaagtcgtcgcctcggcctcggcccgggcctcgtcgcccgcccgccccccctcggcacaacgacctcgaccctcccccattcctcgcgcggcgcgaccgaccatggcgagccgcggctggcgtcgtccgctcggctcgctgccagccctcgccctggccctcttcctcctcgccgtcgccgccgccgcggctggatcccccgaccgagccgccccctcgcggccgccgctggtgctcccgctcacgctctcctaccccaacgcgagccgggtcgcgtcgtccaggtccaggagagggctcgccgaaggaggccgccccagcgcccgcatgcgcctccacgacgatctcctcaccaacgggtattacacgacgcggctgcacatcgggacgcccccgcaggagttcgcgctgatcgtcgactccgggagcaccgtcacctacgtgccctgcgcctcctgcgagcagtgtggcaaccaccaggatccaaggtttcaacctgatctctccagtacatattcaccagtaaaatgtaatgttgattgcacttgtgatagtgataagaaccagtgcacttatgagaggcagtatgctgaaatgagctccagcagcggggtacttggtgaggacattgtgtcgtttggcacagaaagtgaacttaagccacagcgtgctgtttttggctgtgaaaattctgaaactggagatttgttcagccagcatgctgatggcataatggggttgggccgtggtcaacttagcataatggatcagcttgttgacaagggtgtcataggtgattcattctctatgtgctatggtggaatggatattggtggtggtgctatggtacttggtgcaatgcctgcccctcctggcatgatatacacacattcaaacgctgtccgcagcccatattacaacattgagttgaaggaaatgcatgttgctggaaaggcattgcgggtagacccaaggatctttgacggcaaacatgggactgtcttggatagtgggaccacatatgcatacctcccagaacaagcttttgtagcttttaaagacgctgtgtcaagccaggtccatcccctcaagaaaatccgtggacctgactcaaattacaaggacatctgctttgcaggtgctggaaggaacgtctcccagttatcagaggtctttccaaaggttgacatggtatttggaaatggacagaagctctcactttcacctgaaaattatttattccggcactccaaagtcgaaggggcttattgcttgggtgtcttccaaaatgggaaagatccaacaactctattaggtggaatcgttgttcgcaatactcttgtaacctatgaccgccacaatgaaaagattggattttggaaaactaactgttcagagttgtgggagagactccagagtggtggggctccttcaccagcaccttcaaatgatccaggtccacaagcagatttatcgccagctcctgctccaagtggtttgccagaatttgatgttggtctcatcactgtttatatgtcgataaatgttacatatccaaacctgaaacctcacctacatgagttggctgagctgttagctaaagagctggagatagattccagtcaggtacgagttatgaatgttactgggcagggaaactctacactaatcagatgggatattttcccagctggatcttctgattctatgtctaatgcaacagcaatgggtatcatttatcggctacaacatcatgttcagttgcctgaacatcttggcagttatcagttacttgagtggaatgtgcagcaacctatatcgagaaggtcatggttgcaagaacatgttgtctccatactggttggagttttgctagtagttttcctgtctttatcggcctttttaggactgtatctgtggaggaagaaatttagaggtcaagctgcatatagacctgtgggctcagtggggcctgagcaagaactccaaccgctataaccgctataatattggagctctttgactgggcaacaaataggtaattctttggtagagatactactatgtgggctaccatattgcggaggtacacatctgctgttggagtagcccttttcctttgtatgtaacacaaagcatctagcttacagaagaagcacatgattacatgacttgttggttcaaaacttagagaattagttcataaactatctagcgattcagatcaagggctccctcttgaggcttacagtagaagaaggttttgttcatgtaatgtagattaaatagaatagaccagacacaaatcgcactggtggacgcaatgttgtaatatctatttgataaggaccgatgacctttttgcttcttcagt

SEQ ID NO: 2026 - DNA, 2406 bp, Hordeum vulgare subsp. vulgare
tgaatttccgacattgcccctcccccttcctctaacaagtcgtcgcctcggcctcggcccgggcctcgtcgcccgcccgccccccctcggcacaacgacctcgaccctcccccattcctcgcgcggcgcgaccgaccatggcgagccgcggctggcgtcgtccgctcggctcgctgccagccctcgccctggccctcttcctcctcgccgtcgccgccgccgcggctggatcccccgaccgagccgccccctcgcggccgccgctggtgctcccgctcacgctctcctaccccaacgcgagccgggtcgcgtcgtccaggtccaggagagggctcgccgaaggaggccgccccagcgcccgcatgcgcctccacgacgatctcctcaccaacgggtattacacgacgcggctgcacatcgggacgcccccgcaggagttcgcgctgatcgtcgactccgggagcaccgtcacctacgtgccctgcgcctcctgcgagcagtgtggcaaccaccaggatccaaggtttcaacctgatctctccagtacatattcaccagtaaaatgtaatgttgattgcacttgtgatagtgataagaaccagtgcacttatgagaggcagtatgctgaaatgagctccagcagcggggtacttggtgaggacattgtgtcgtttggcacagaaagtgaacttaagccacagcgtgctgtttttggctgtgaaaattctgaaactggagatttgttcagccagcatgctgatggcataatggggttgggccgtggtcaacttagcataatggatcagcttgttgacaagggtgtcataggtgattcattctctatgtgctatggtggaatggatattggtggtggtgctatggtacttggtgcaatgcctgcccctcctggcatgatatacacacattcaaacgctgtccgcagcccatattacaacattgagttgaaggaaatgcatgttgctggaaaggcattgcgggtagacccaaggatctttgacggcaaacatgggactgtcttggatagtgggaccacatatgcatacctcccagaacaagcttttgtagcttttaaagacgctgtgtcaagccaggtccatcccctcaagaaaatccgtggacctgacccaaattacaaggacatctgctttgcaggtgctggaaggaacgtctcccagttatcagaggtctttccaaaggttgacatggtatttggaaatggacagaagctctcactttcacctgaaaattatttattccggcactccaaagtcgaaggggcttattgcttgggtgtcttccaaaatgggaaagatccaacaactctattaggtggaatcgttgttcgcaatactcttgtaacctatgaccgccacaatgaaaagattggattttggaaaactaactgttcagagttgtgggagagactccagagtggtggggctccttcaccagcaccttcaaatgatccaggtccacaagcagatttatcgccagctcctgctccaagtggtttgccagaatttgatgttggtctcatcactgtttatatgtcgataaatgttacatatccaaacctgaaacctcacctacatgggttggctgagctgttagctaaagagctggagatagattccagtcaggtacgagttatgaatgttactgggcagggaaactctacactaatcagatgggatattttcccagctggatcttctgattctatgtctaatgcaacagcaatgggtatcatttatcggctgcaacatcatgttcagttgcctgaacatcttggcagttatcagttacttgggtggaatgtgcagcaacctatatcgagaaggtcgtggttgcaagaacatgttgtctccatactggttggagttttgctagtagttttcctgtctttatcggcctttttaggactgtatctgtggaggaagaaatttagaggtcaagctgcatatagacctgtgggctcagtggggcctgagcaagaactccaaccgctataaccgctataatattggagctctttgactgggcaacaaataggtaattctttggtagagatactactatgtgggctaccatattgcggaggtacacatctgctgttggagtagcccttttcctttgtatgtaacacaaagcatctagcttacagaagaagcacatgattacatgacttgttggttcaaaacttagagaattagttcataaactatctagcgattcagatcaagggctccctcttgaggcttacagtagaagaaggttttgttcatgtaatgtagattaaatagaatagaccagacacaaatcgcactggtggacgcaatgttgtaatatctatttgataaggaccgatgacctttttgcttcttc

SEQ ID NO: 2027 - DNA, 1371 bp, Zea mays
aaacaaaaaaagggccttcacttgactccacagccacagctagctgctgtggtgaagagtagcaggttcggcggccgggagggggcagccaacacgacgatggagcggttcggcctggacggcggcggtggcggtggcgagctgccgccggggttccggttccacccgacggacgaggagctcatcacctactacctcctccgcaaggccgtggacggcagcttctgcggccgcgccatcgcggagatcgacctgaacaagtgcgagccatgggagctcccggacaaggcgaagatgggggagaaggagtggtacttctacagcctccgcgaccgcaagtacccgacgggcctgcgcaccaaccgcgccacggtggccggctactggaaggccaccggcaaggaccgcgagatccgcagcggccgcaccggcgcgctggtgggcatgaagaagacgctcgtcttctaccgcggccgcgcccccaagggacagaagacgcactgggtcatgcacgagtaccgcctcgagggcgcctacgcctaccatttcctccccagctccacaagggacgagtgggtgatcgcgagggtgttccagaagcccggcgaggtcccacctgcagcccgcaagcaccgcctcggcgcccttagcagcactaccggcaccgccgcgggcgattcctgcttctcggactctacctcggcctccatcggcggcgcgtcgtcgtcatccacgcctggcccgctgttcgcgtcggcggccgccgccgtggccaatgccggcgccgccgacggcgacaccagctcctactgcggcggcgctgccaaccatggcaacctggtcaccggccgtgagctcgtgccctgcttctccactgccaccattaacggccccctagttgccgccgcgctcggcatcgggcagccgtacaacgcagccccgctgccgttcgagcagcagccgccgcctccggccttcctgccgagcctgcgttcccttcaggacaacctccagcttccaccgttcctctcagcaggcggtctgggcggcggcggggctctccactggctccccgccggcggcatggaggtcaaggtcgagggccgctcggcgccaccgcagatggctgtcggccccggccagctcgatggcgctttcggctggagcttctagttcttcgctgcactacatggttgtgcccatctatctagctagtagtggtttcttcatgcgttgtacgttaagcttggttaatcaactgctagtaagtgactgggtcgtcgttctaagtaatgtagtaactgtgttgtagtctctcatctaactgcagtagcagctttatttgttcgtggactaaaaaaaaaaaaaaaa

SEQ ID NO: 2028 - DNA, 657 bp, Sorghum bicolor
atggcttcttcctgggtttctcggttgcctctggcagtgctgctgctcgtggcctgctcctcctccacggcagcggccaccagctacaccgtcggcgacgggtccggctggacgaccggcgtcgattacacatcttgggccgcctccaaaaacttcaaagtcggggacaatctggtgttcaactacgcgaaagggctgcacacggtggtggaggtgagcgcggcggagtacatggcgtgcacggcggccaacccgctgggctccgacagcagcggcgcgaccaccgtggccctcaagacgcccggcacccactacttcgtgtgcagcatcacggggcactgcggcgccgggatgaagctcgccgtgaccgtcggcggctccaactcccctgccaccacgccgaccccgacgaccccgcgcacgtccccgaccacgccctacacgacgccgacgaccccgactaccaccacgccgtacacgactccgaccacgccctacacgacgccgacgtgctctggcggcggtggtggcaccacggcgaccccgggcatgactccgttcatgtcataccccagcgcggccggcctcggatcggcggcgttggctggatttggactggtttggtgtgtgatcgtccaggtagcgctgctctactag

SEQ ID NO: 2029 - DNA, 1646 bp, Zea mays
ctcctctcatcaactcatcgtgttcttcttttccaatccctacactgcttgctagttgctacacacacccactgatgacccacaactttaaaggtgtagctgtgatatctagtgctagtgcatggctatatatatacgcgtctataagtagtaggttgcaccctccaaggggttcatcattcattccctcacccccttcccttagaagctgcaggtgcagtgcatgcaaggagacaggccacgatactgtctgagatggaaggggccatgacgacgagaagcaagcatcgtcgtcatgaggaggaccaggagatgacgatggtggagctgaggagaggcccctggacgctcgaggaagacaacctcctcatgaactacattgcttgccacggcgagggccgctggaatctcctggcccgctgctccgggctgaagaggaccggcaagagctgccggctgaggtggctcaactacctcaagccggacatcaagcgcggcaacctggcgccggaggagcagctcctcatcctggagctccactccaagtgggggaaccggtggtccaggatagcgcagcacctgccggggcggaccgacaacgagatcaagaactactggcggacgcgggtgcagaagcaggcgcggcagctgcgcgtggacgccaacagcgccgtgttccgcgacgccgtccgctgctactggatgccgcgcctgctcgagaagacgatggccgccgccgcggcatccacgtccggcgaagtgctgctgccgccgctaccgccgccgccgcaactgcacccctcgcgcgtcgccggcttattggcctcttcctcctcgtcgccagtccagcgggacaccagcgacagcgactacctgccgcagcggtaccaccaccaccccgtcgacccgagcccgagcgcgtcgtcgacggtttcctcgtcggccgcgctcgcgccggtgccctgcttctccgaactgagctgggtcgaccagtacgggtacggcccttattacagttacggcgccaacctcgacgacggcgccggcgtgttcgacgactcggcagcgctggaggaaggcctcggcctggacgcgctggacctgggtccggccgacgacagcgacgtcgcccactcggacgcgacgctgctggactacctcaactccgcgtgcgccggcggcggcaccatgatgatggctgtgacgggcggcggcggcggcgtccaaagcagcggctgcggcgccacgggaggtgccgacgccgactaccggccgtcgccgtgcacgtggcggacggacgagctcggcgatcctcgtcagcatcaatggggaggaggaatctagaagcaatcaaagagagcttgcttctcggcacgtctctctctctctctccctctccctctccctcccaaagcgacgatcgatcgatcgagatgtcacactagttaattagtggatcggagctagatagcaggtagcaagatgcgtgagtggcgataaaaaaacattaggggccgggggcggggccgggcatattctgctgttaattcgaccgatcattcgttcgatcgtgtagtagagatgtgtggtttgatgtcgtataattcgcgtacgtacaatcgtactacatgcatgttcatttgggt

SEQ ID NO: 2030 - DNA, 1376 bp, Zea mays
cacccccttcccttagaagctgcaggtgcagtgcatgcaaggagacaggccacgatactgtctgagatggaaggggccatgacgacgagaagcaagcatcgtcgtcatgaggaggaccaggagatgacgatggtggagctgaggagaggcccctggacgctcgaggaagacaacctcctcatgaactacattgcttgccacggcgagggccgctggaatctcctggcccgctgctccgggctgaagaggaccggcaagagctgccggctgaggtggctcaactacctcaagccggacatcaagcgcggcaacctggcgccggaggagcagctcctcatcctggagctccactccaagtgggggaaccggtggtccaggatagcgcagcacctgccggggcggaccgacaacgagatcaagaactactggcggacgcgcctgctcgagaagacgatggccgccgccgcggcatccacgtccggcgaagtgctgctgccgccgctaccgccgccgccgcaactgcacccctcgcgcgtcgccggcttattggcctcttcctcctcgtcgccagtccagcgggacaccagcgacagcgactacctgccgcagcggtaccaccaccaccccgtcgacccgagcccgagcgcgtcgtcgacggtttcctcgtcggccgcgctcgcgccggtgccctgcttctccgaactgagctgggtcgaccagtacgggtacggcccttattacagttacggcgccaacctcgacgacggcgccggcgtgttcgacgactcggcagcgctggaggaaggcctcggcctggacgcgctggacctgggtccggccgacgacagcgacgtcgcccactcggacgcgacgctgctggactacctcaactccgcgtgcgccggcggcggcaccatgatgatggctgtgacgggcggcggcggcggcgtccaaagcagcggctgcggcgccacgggaggtgccgacgccgactaccggccgtcgccgtgcacgtggcggacggacgagctcggcgatcctcgtcagcatcaatggggaggaggaatctagaagcaatcaaagagagcttgcttctcggcacgtctctctctctctctccctctccctctccctcccaaagcgacgatcgatcgatcgagatgtcacactagttaattagtggatcggagctagatagcaggtagcaagatgcgtgagtggcgataaaaaaacattaggggccgggggcggggccgggcatattctgctgttaattcgaccgatcattcgttcgatcgtgtagtagagatgtgtggtttgatgtcgtataattcgcgtacgtacaatcgtactacatgcatgttcatttgggtatt

SEQ ID NO: 2031 - DNA, 1356 bp, Zea mays
atcattcattccctcacccccttcccttagaagctgcaggtgcagtgcatgcaaggagacaggccacgatactgtctgagatggaaggggccatgacgacgagaagcaagcatcgtcgtcatgaggaggaccaggagatgacgatggtggagctgaggagaggcccctggacgctcgaggaagacaacctcctcatgaactacattgcttgccacggcgagggccgctggaatctcctggcccgctgctccgggctgaagaggaccggcaagagctgccggctgaggtggctcaactacctcaagccggacatcaagcgcggcaacctggcgccggaggagcagctcctcatcctggagctccactccaagtgggggaaccggtggtccaggatagcgcagcacctgccggggcggaccgacaacgagatcaagaactactggcggacgcgcctgctcgagaagacgatggcggccgccgcggcatccacgtccggcgaagtgctgctgccgccgctaccgccgccgccgcaactgcacccctcgcgcgtcgccggcttattggcctcttcctcctcgtcgccagtccagcgggacaccagcgacagcgactacctgccgcagcggtaccaccaccaccccgtcgacccgagcccgagcgcgtcgtcgacggtttcctcgtcggccgcgctcgcgccggtgccctgcttctccgaactgagctgggtcgaccagtacgggtacggcccttattacagttacggcgccaacctcgacgacggcgccggcgtgttcgacgactcggcagcgctggaggaaggcctcggcctggacgcgctggacctgggtccggccgacgacagcgacgtcgcccactcggacgcgacgctgctggactacctcaactccgcgtgcgccggcggcggcaccatgatgatggctgtgacgggcggcggcggcggcgtccaaagcagcggctgcggcgccacgggaggtgccgacgccgactaccggccgtcgccgtgcacgtggcggacggacgagctcggcgatcctcgtcagcatcaatggggaggaggaatctagaagcaatcaaagagagcttgcttctcggcacgtctctctctctctctctccctctccctctccctcccaaagcgacgatcgatcgatcgagatgtcacactagttaattagtggatcggagctagatagcaggtagcaagatgcgtgagtggcgataaaaaaacattaggggccggggccgggcatattctgctgttaattcgaccgatcattcgttcgatcgtgtagtagagagatgtgtggtttgatgtcgaaaaaaaaaaaaaaaaaa

SEQ ID NO: 2032 - DNA, 1506 bp, Sorghum bicolor
gggttcatcattcatcagtgtcatcaccttagaaggtgcatgcaaggagacaggccacaataatgtctcagaggaaaggggcctccatggctgctgcagtgacgagcagcaagcaccatgaggatcaggagatgatgatggagctcaggagaggcccctggacgcttgaggaagacaacctcctcatgaactacattgcttgccacggcgagggccgctggaatctcctcgcccgttgctccgggttgaagaggaccggcaagagctgccggctgaggtggctcaactacctcaagcctgacatcaagcgcggcaacctcacgccggaggagcagctcctcatcctcgagctccattccaagtggggaaacaggtggtcgaggatcgcgcagcacctgccagggcggacggacaacgagatcaagaactactggcggacgcgggtgcagaagcaggcgcggcagctccgggtggacgccaacagcgccgtcttccgcgacgccgtccgctgctactggatgccgcgcctgctcgagaagatggccgccacgtcgaccgcgcacgacctccacggcgagctgctgccgccggcgccgccgctccacccctcgcacgtcgtcgccggcatggcctcttcctcctcgccgatccacggcagccatgaccatgagcaggacccgacgagcaacgcgccggcgggcagcggctactaccaccagcggtacccggtcgacccgagcccgagcacgtcgacgacgtccgggtcaacctcggccgccgcgctcccgccggtgccctgcttctccgaactgagctgggtcgaccagtacggctacggcccttacagttacaccaccgacctcgacggcgccgcgggcgtgtcgtcgttcgacgacgactcggccgcgctggagagcctcggcctggacgggctggacctcgggccggccgaggccgacagcgacgtgttgtactcggacacgacgctgctggactacctcaactccacatgcgccggcggcggcaccatgatgacgatgatgggcggcggcgtcggcggcggtagcgtcgtccacaacagctgcggcggcgccatgggcggatgcggcgacgacgtcgccgagtacgggcgcccgacgtcgtcgtcgtcgtggcggacggacgagctcgtgttccaggcgtcggcgaggaagctcggtgatcatcagcatcaatggggaggaggaatctagaagcaatcgatcgaatcgagagaggttgctagctagctcactaaagcctagctagctataggctatagctagaaggatgaagatgatgatgatgatgatgggcgcgcacagcaggttgcttcttgcgacgtctctctcccaaagcgatgatcgagatgtcacactagttaaattagtggagctagctagatgcgtcagtggcgatccaaaatcgaccttagcaggcgagcgacgtacgtacgttccgatcgatcgatcgagatatctcttgctg

SEQ ID NO: 2033 - DNA, 1243 bp, Sorghum bicolor
gcacaccagacaccgcccgccgcgaacaccaagcctgatcagcatcccagcccagatgttcctcgccgacaagtacagctcgctgctgccctccctccaccagcaccactccaagcccagccgccgccggagccagcagctgaagggggaggcggaccggttcggcgcggcgctggccgcgcgcctccggggcctgctgccgctgccggcctcccagctcgcggcgctcgcgcgggtggccgacctcctcgctctcacgctcgcggacgccggcgacgcgctcgccggcgccggcgagggcgacgcgtccgctgctgcggtcgccgcacaccttgacgccggggtcgcgctcctcgacgcctgcaacgccatcgccgtccgcctcgaccgcctccgcaggcgccgccttctcgcgcgcctcgcgctccacctcctttcatcaacctcctcctcgccgtccgggcgcgcgcgcgcgcgcgcggcgctcgcggaccgcggtgaccacccagcggcgtccccgtcccctctggcgccgctcccttcgctcccgttcgagcagccccgcgggcggctctcggccgccgcgcgcgtgcttgccgccgtggacgccgtctcctcgctcgcggcagcggccgcggccgccatcctcgtcggaggacccgccagcttcccccgggtatccggcggcggcgacctcccctgggcagagccgttcaacgcggtgtccggccagctcgcggcgctcgaaggcgccggcgaggtgggcgccgtcgacgaggccgtccggagtctcgcgtcggcgctggacgccgggaccgacaacgaggcggcggtgcgccccgcggcacaggagttggagaggcgcaccgaggagctcgcgccgcggctagaccgcctgtcggacgccgtcggcggcgtgttccgcgccgcgctgggcctccgcaacgccgagctcggctgcttcatggtgggacccgcggggaagccgtgtagtaaatacccgtagtcgtagctgtatatgtatacttacaatactgtactgggatactgctacagctgtaagtggagtgaagttgatgagtcgtgcagtacagggcgagttgggtgtgggatcatgtgtgtcagtgtcaaaggacgaggaggccactagttgcattttgcataattttggatatgtggcatccactgctgtatctgtatgggaaaggggaaaaaatgttgcaatctggtggtgtaatttcgc

SEQ ID NO: 2034 - DNA, 1394 bp, Zea mays
cccctagaaaaagcccggctgcccgcctccctccctccctctatatcctcccctccgccaccgccccccctctctctcctcagctcaccagacgccgccgccgcgaacgacgaatcctcagcctcccagtcccagcccagatgttcctcgccgacaagtacaggtcgctgctgccctcctcccaccagcagccccactccaagcccagccgccgccgccagcagcagcagcagctgctgcagcaggagggggaggcggaccggttcggcgcggcgcgcctcgggagcctgcttcctttgccggcctccccgctcgcggcgctcgcgcgggtggccgacgtcctcgcgctcacgctcgccgacgcgggccccgcgctcgccggcgccgaccctgccgtcgccgcccacctcgacgcgggcgtcgcgctcctcgacgcctgcaacgccatatccgcgggcctcgaccgcctccgcaggcgcctcctcctcgcgcgcctcgcgctccacctcgtcctctccccctccccctccggggggcgagcacgcgcgcgcgcggcgctcgcggaccgcggcgaccacccggcgccgtccccgctcccttcgctcccgttcgagcagccccgcgggcggctctcggccgccgcgcgcgtcctcgccgccgtggacgccatctcctcgctcgcggcagcggccgcggccgccgtcctcgtcggaggacccgtcactttcccccgggtatccggcggcgtcggcgacctcccctgggcggagccgttcaacgcggtgtccggccagctcgcggcgctcggcgacggcgaggtggcatcgttagacgaggccgtccggaggctcgcgtcggcgctggacgcctccggcgagggtgctgccgacgacgaggcggccgtgcgcgctgcggcgcaggaggcggagaggcgcgccgaggaggtcgcgccgctgctggaccacctgtctgacgccgtcggcggcgtgttccgcgccgcgctgggcctccgcaacgccgaggtggactccttcatggtgggacccgcgggtaagccgtgtagcacataaccgtcgcttcgtgtggactactcgtagctgtctgtctgtatagtgtatacagtagtgtactgtgataggggtactgctacagctcagtggagagttgagtcgtgcagtggatcagtggaaatcatgtatgttagtgtcaacgacgaggatgaggccacagatcatacatgcactagttgcatcatcttgggtacgtggcatcctgtgctgtacgggaaggggagaacgttgcaatctggccgtgcagtttcgcggcacgtaacaacaacagtatgtgtgtataatttgtggagaaaaaaaaaaaaaaaaaaaaaaaaaaaaaaa

SEQ ID NO: 2035 - DNA, 1453 bp, Zea mays
acgtcgcgtcgcgcacgccgtactgcccgcccgcccgacccttttcacacccccgacgcaaccgcatcgccgtcgccgtcctgcccgcctccggcctccctccctctatatccttccctcccccaccaccccctctctctcctcatcagctcacccacagcctgatcagcctcccagtcccagcccagatgttcctcgccgacaagtacaggtcgctgctgccctcctcccaccagcagccccactccaagcccagccgccgccgccagcagcagcagcagctgctgcagcaggagggggaggcggaccggttcggcgcggcgctggcggcgcgcctcgggagcctgcttcctctgccggcctccccgctcgcggcgctcgcgcgggtggccgacctcctcgcgctcacgctcgccgacgcgggccccgcgctcgccgccgccgacccggccgtcgccgcccacctcgacgcgggcgtcgcgctcctcgacgcctgcaacgccatctccgcgggcctcgaccgcctccgcaggcgcctcctcctcgcgcgcctcgcgctccacctcgtcctctccccctccccctccggggggcgagcacgcgcgcgcgcggcgctcgcggaccgcggcgaccacccggcgccgtccccgctcccttcgctcccgttcgagcagccccgcgggcggctctcggccgccgcgcgcgtcctcgccgccgtggacgccatctcctcgctcgcggcagcggccgcggccgccgtcctcgtcggaggacccgtcactttcccccgcgtgtccggcggcgacctcccgtgggcggagccgttcaacgcggtgtccggccagctcgcggcgctcggcgccggcgaggtggcatcgttagacgaggccgtccggaggctcgcgtcggcgctggacgcctccggcgagggtgctgccgacggcgagacggccgtgcgcgctgcggcgcaggaggcggagaggcgcgccgaggaggtcgcgccgctgctggaccacctgtctgacgccgtcggcggcgtgttccgcgccgcgctgggcctccgcaacgccgaggtggactccttcatggtgggacccgcggggaaagccgtctagcacataaccgtcgcttcgtgtggactcgtagctgtgtgtatagtgtatacagtagtgtactgggataggggtactgctacagctcagtggagagttgagtcgtgcagtggatcagtggaaatcatgtatgttagtgtcaacgacgaggatgaggccacagatcatacatacactagttgcatcatcttgggtacgtggcatcctgtgctgtacgggaaggggagaacgttgctatctggccgtgtagtttcgcggcacataacaacaacagtatgtgtgtataatttgggaaaagtgagttgcacttcccttttcctctccaaaaaaaaaaaaaaaaa

SEQ ID NO: 2036 - DNA, 1289 bp, Sorghum bicolor
agccatcgatccaccgcaaacaagctcgacgacacaaagcagctagcatcgtagccagccagccgccctaaaaaccagccagctaaacccatggccgggatcgtggtggtgttcgacttcgacaagacgatcatcgacgtggacagcgacaactgggtggtcgacaacctgggcttcaccgagctgttcgagcgcctcctccccaccatgccctggaacacgctcatggacaccatgatgggtgagctccacgcggccggcaagaccctgggcgacgtcgccgaggtgctgagggcggcgcccatcgacccgcgcgtgcccgccgccatcaaggccgcgtacgcgctgggctgcgacctgcgcgtgctcagcgacgccaacgccttcttcatcgagaccgtcctggagcaccacggcatccgtggctgcttctcccagatcaacaccaaccccagccacgtcgacgccgacggccgcctccgcatcgggccctaccacgccgccccgcacggctgcggcgtcggcacctgcccgcccaacatgtgcaagggcctggtgctcgaccgcatcctccgcgaggcggccgccgggacgaccgggaggtcgacgaagcgcgtcatctacctcggcgacggccgcggcgactactgcccgtcgctgcggctggcccgggaggacttcatgatgccgcgcaggggttaccccgtgtgggacctcatccgcgaggaccccgcgcgggtgcaggcggaggtgcacccgtgggccgacggcgccgacctggaggagacgctgctgcgcctcgtcgggagggcgctcgtggaggaggccgcgctgccgccgccgctcgactgcaagctcgagtccaccatgcccgttgccgcgcaggacggcggcatgcccatcatgccgctcggcgtcaagaactgatgccgtcttgtctctggttgagaatctgatattattgccggttcgggttcgttgtgagagctcgagcaagtgcgggcgaggcacggcgtacgatacgatggattaatagtagcgtttgttaactgtattattgactaattttgtgtgcgtgtggtgtattccctccggatcgagcctgtcactgctgaattggctatggctcgttgtatcttctttgctaccgacaaaagataaaattaatggatgaaatcccttacgatttacgacaagcaaaattcatgcgcgtgcttccctgttaggcagggcactacaatctgtagccacaattacgcaattagcggcgaaattcattcaaatttagt

SEQ ID NO: 2037 - DNA, 1185 bp, Zea mays
gatccaccgcaaacaagctcctgacaacccacgccacgacgacacaacaaagcaccgcagctactaaacccatggccggggtcgtggtggtgttcgacttcgacaagacgatcatcgacgtcgacagcgacaactgggtcgtggacagcctcggcttcaccgagccgttcgagcgcctcctgcccaccatgccctggaacacgctcatggacaccatgatgggggagctgcacgcgcacggcaggaccctggacgacgtcgccgaggcgctccgtgcggcgcccgtcgtcgcgggcgtccccgccgccatcaaggccgcctacgcgctcggctgcgacctgcgcgtcctcagcgacgccaacgccttcttcatcgacaccgtcctggcgcaccacggcctgctgggctgcttctcccagatcaacaccaaccccagccaccccgacgccgacgccgacggccgcctccgcatcgggccctaccacgacctgcacgggtgcggcgtcggcacctgcccgcccaacatgtgcaagggccaggtgctggaccgcatcctccgcgaggcgtcgtcgtcggccgccggcaggaagcgcgtcgtgtacctgggcgacggccgcggcgactactgcccggcgctgcggctggcaagggaggacttcgtcatgccgcgcaggggcttccccgtgtgggacctcatctgcgaggaccccgcgcggctgcaggcggaggtgcacccctgggccgacggcgccgagctggaggagacgctgctgcgcctcgtcgggagggcgcgcgtggaggaggccgcactgctgccgccgctcgactgcaagctcgagtccatgcccgttgccgcgcaggagggcatgggacccatcatgccgctcggcgtcaagcactgacgatacacgcagcagtgcagtctctggtttgctggttaatgctggtttggttcgggttggacgaacgattagtaagtagctcgaataattagtataactgtatcggctaattttatgtgtttgtgtgtgtgctgtgtggtgtatgcctccgcatcgagctgcctgtcactgctgaattggctctgcctcgctgtgtatcttattcttacctacagaaagagtaccacgagcaaataaaaaaaaaaaaaaaaaaaaaaaaaaaaaagaaaacaaaaaaaaaaaa

SEQ ID NO: 2038 - DNA, 1188 bp, Zea mays
atcgatccagtgcaaacaagctcgctcgcaagcgcaacccacccacgtctaccacacgaagcatcgtagccagccacccatccagccagctaaacccacacatggccgggatcgtggtggtgttcgacttcgacaagacgatcatcgacgtggacagcgacaactgggtggtggacagcctcggcctcaccgacctgttcgagcgcctcctccccaccacgccctggaacacgctcatggacacgatgatgggggagctgcacgcgcggggcaggacgctggccgaggtgaccgaggcgctcagggcggcgcccatcgacccgcgcgtgcccgccgccgtcagggccgcgcacgcgctcggctgcgacctgcgcgtgctcagcgacgccaacgccttcttcatccacaccgtcctggaccaccacggcctgctcgactgcttctcccagatcaacaccaaccccagccgcgtcgacgcccacggccgactccgcatcgggccctgccacgacccgcgcgcggcgccgcacggctgcggcgtcggcacctgcccgcccaacatgtgcaagggcctcgtgctggaccgcatcctccgcgaggccgaggccgaggccgcatcctccgcgaagccgcgcgtcatctacctgggcgacggccgcggcgactactgcccggcgctgcggctggcgcgcacagacttcgtgatgccccgcaggggttaccccgtctgggacctcatctgcgaggaccccgcgcgcctgcaggcggaggtgcacccctggaccgacggcgccgagctggaggagacgctgctgcgcctcgtgcggagggcgctcgtggaggacgccgcgctgccgccgccgccgccgccgccgctcgactgcaagctcgagtccatgcccgtcgccgcgcaggacggtatgcccatcgtgccgctgggcgtcaagaactgatactgtctctggttcagaattgaggtcgccggttagaactccaacaaattccgggcgaggcacggcgtaccgttagtagcgtttcactaattttgtgcgtgtgtggtgtatccctcctgatcgagtcttgttgctgctgaattggctacgactcgttgtatcttactaaaaaaaaaaggtaaagttaataatggattagacatgatactatttgtctctaaaaaaaaaaaaaaaa

SEQ ID NO: 2039 - DNA, 1223 bp, Zea mays
caagctcgctcgcaagcgcaacccacccacgtctacggtctaccacacgaagcatcgtagccagccagccagctaaacccacaccacacatggccgggatcgtggtggtgttcgacttcgacaagacgatcatcgacgtggacagcgacaactgggtggtggacagcctcggcctcaccgacctgttcgagcgcctcctccccaccacgccctggaacacgctcatggacacgatgatgggggagctgcacgcgcggggcaggacgctggccgaggtgaccgaggcgctcagggcggcgcccatcgacccgcgcgtgcccgccgccgtcagggccgcgcacgcgctcggctgcgacctgcgcgtgctcagcgacgccaacgccttcttcatccacaccgtcctggaccaccacggcctgctcgcctgcttctcccaggtcaacaccaaccccagccgcgtcgacgcccacggccgactccgcatcgggccctgccacgacccgcgcgcggcgccgcacggctgcggcgtcggcacctgcccgcccaacatgtgcaagggcctcgtgctggaccgcatcctccgcgaggccgaggccgaggccgagaccgcatcctccgcgaagccgcgcgtcatctacctgggcgacggccgcggcgactactgcccggcgctgcggctggcgcgcacagacttcgtgatgccccgcaggggttaccccgtctgggacctcatctgcgaggaccccgcgcgcctgcaggcggaggtgcacccctggaccgacggcgccgagctggaggagacgctgctgcgcctcgtgcggagggcggtcgtggaggacgccgcgctgccgccgccgccgccgccgccgctcgactgcaagctcgagtccatgcccgtcgccgcgcaggacggtatgcccatcgtgccgctgggcgtcaagaactgatactgtctctggttcagaattgaggtcgccggttagagctccaacaaattccgggcgaggcacggcgtaccgttagtagcgtttcactaattttgtgcgtctgtggtgtatccgtcctgatcgagtctgttgctgctgaattggttacgactcgttgtatcttactaaaaaaggtaaagttaataatggattagacatggtactatttgtttcttggtttcgaattaaagctagctattcagactacagcatcctgcaatcgaaatatgcagagac

SEQ ID NO: 2040 - DNA, 1267 bp, Hordeum vulgare subsp. vulgare
gatcgtcaaaagcctcaacgcacacgcacgcacagcacacgcacacaagtcccaactcgcaggtcaagtccaagaagaaggaccgtcgagatggccggcgtcgtggtggtgttcgacttcgacaagaccatcatcgacgtcgacagcgacaactgggtcgtcgacggcctgggcgccaccgagctcttcgaccgcctgctgcccaccatgccgtggaacaccctcatcgacaccgttatgggggagctgcacgcgcagggcaagaccctccgcgacgtcgccgacgtgctccgggccgcgcccatcgacccgcacgtcgtcgccgccatcagggccgcctacagcctcggctgcgacctcagggtcctcagcgacgccaaccgcttcttcatcgaggccgtcctcgaccaccacggcctccggggctacttctccgagatcaacaccaaccccagccgcgtcgacgccgacggccgcctccgcatcgcgccgcaccacgacttccacgccggcccgcacggctgcggcctcggcacctgcccgcccaacatgtgcaagggccaggtgctcgaccgcatccgcgcctcctccgccacggcggacggcacgaaacgcttcatctacctcggcgacgggcgcggcgactactgcccgtcgctgcggctcgccagggaggacttcatgatgccgcgcaagggattccccgtgtgggagctcatctgcgagaacccgggactgctccaggccgaggtgcacccatggagcgacggcaaggacatggaggagacgctgctgcggctcatcagccgggtgctcgtcgaggagagccagctgctgccgctcgactgcaagctcgagtcgctgccggtggccgtccaggacggcatgcccatgccgctcggcgtcaagaactgatccatccatccatccatccatccatccatccgtgcttcattacgattaatttggggattctgtatctgatatatcttctgattctgatttgcttgcctgattagctggtgtgtacgagtttgggtaggccgttgcaggaaactaattaagggtgaggtgttggagcgccaatggcgaactcgataataatgtatgaggcttgcagtattagctagtgtagcagtattattgactaatttgtgagtagagtatcttcgttgggccgcctggcaatggtgaaggctcgctgtatcccatctatctatggattgacaaaaagaataagtacatgagttgatctctgacgaaagtc

SEQ ID NO: 2041 - DNA, 1121 bp, Hordeum vulgare subsp. vulgare
gatcgtcaaaagcctcaacgcacacgcacgcacagcacacgcacacaagtcccaactcgcaggtcaagtccaagaagaaggaccgtcgagatggccggcgtcgtggtggtgttcgacttcgacaagaccatcatcgacgtcgacagcgacaactgggtcgtcgacggcctgggcgccaccgagctcttcgaccgcctgctgcccaccatgccgtggaacaccctcatcgacaccgttatgggggagctgcacgcgcagggcaagaccctccgcgacgtcgccgacgtgctccgggccgcgcccatcgacccgcacgtcgtcgccgccatcagggccgcctacagcctcggctgcgacctcagggtcctcagcgacgccaaccgcttcttcatcgaggccgtcctcgaccaccacggcctccggggctacttctccgagatcaacaccaaccccagccgcgtcgacgccgacggccgcctccgcatcgcgccgcaccacgacttccacgccggcccgcacggctgcggcctcggcacctgcccgcccaacatgtgcaagggccaggtgctcgaccgcatccgcgcctcctccgccacggcggacggcacgaaacgcttcatctacctcggcgacgggcgcggcgactactgcccgtcgctgcggctcgccagggaggacttcatgatgccgcgcaagggattccccgtgtgggagctcatctgcgagaacccgggactgctccaggccgaggtgcacccatggagcgacggcaaggacatggaggagacgctgctgcggctcatcagccgggtgctcgtcgaggagagccagctgctgccgctcgactgcaagctcgagtcgctgccggtggccgtccaggacggcgtgcccatgccgctcggcgtcaagaactgatccatccatccatccatccatccatccatccgtgcttcattacgattaatttggggattctgtatctgatatatcttctgattctgatttgcttgcctgattagctggtgtgtacgagtttgggtaggccgttgcaggaaactaattaagggtgaggtgttggagcgccaatggcgaactcgataataatgtatgaggcttgcagt

SEQ ID NO: 2042 - DNA, 825 bp, Oryza sativa Japonica Group
atggccgggatcgtggtggtgttcgacttcgacaagacgatcatcgacgtcgacagcgacaactgggtcgtggacgggctcggcacgacggaggagttcgagcggctgctgcccaccatgccgtggaacaccctcatggacaccatgatgggcgagctccacgcgagcggcaagtcgctcgccgacgtcgcgggcgtgctcaggtcggcgccgctcgacccgcgcgtcgtcgccgccatcaaggcctgctacggcctgggctgcgacctccggatcctcagcgacgccaaccgcttcttcatcgacaccatcctcgaccaccacggcctcacgggttacttctccgagatcaacaccaacccgagcgccgtcgacgccgccaccggccgcctccgcatcgcgccgtaccacgacttccacgccggcccgcacgggtgcggcctcgggatctgcccgcccaacatgtgcaagggccaggtgctcgaccgcatccgcgcctccgccggcgccgccggcaagagggtcatctacctcggtgacggccgcggcgactactgcccgtcgctccgcctcggccgcgacgacttcatgatgccacgcaggggcttccccgtgtgggagctcatctgcgaggacccgtcgctgctccacgcggaggtgcactcgtgggccgacggcgccgagatggaggagacgctgctgcggctggtcggcagggtgctcctcgaggagaggaacctgccgccgctcgactgcaagctcgagtcgttgccggccgtcgccgtgcaggacggcatgcccatgacgctccggatcaagaactga

SEQ ID NO: 2043 - DNA, 1100 bp, Oryza sativa Japonica Group
atcagatcaaagcaagcaaacaacaacaaaaaccacttctcgtgggtagaagagagagagagcgaggcgatttcgaccaagaagatggccgggatcgtggtggtgttcgacttcgacaagacgatcatcgacgtcgacagcgacaactgggtcgtggacgggctcggcgcgacggaggagttcgagcggctgctgcccaccatgccgtggaacaccctcatggacaccatgatgggcgagctccacgcgagcggcaagtcgctcgccgacgtcgcgggcgtgctcaggtcggcgccgctcgacccgcgcgtcgtcgccgccatcaaggcctgctacggcctgggctgcgacctccggatcctcagcgacgccaaccgcttcttcatcgacaccatcctcgaccaccacggcctcacgggttacttctccgagatcaacaccaacccgagcgccgtcgacgccgccaccggccgcctccgcatcgcgccgtaccacgacttccacgccggcccgcacgggtgcggcctcgggatctgcccgcccaacatgtgcaagggccaggtgctcgaccgcatccgcgcctccgccggcgccgccggcaagagggtcatctacctcggtgacggccgcggcgactactgcccgtcgctccgcctcggccgcgacgacttcatgatgccacgcaggggcttccccgtgtgggagctcatctgcgaggacccgtcgctgctccacgcggaggtgcactcgtgggccgacggcgccgagatggaggagacgctgctgcggctggtcggcagggtgctcctcgaggagaggaacctgccgccgctcgactgcaagctcgagtcgttgccggccgtcgccgtgcaggacggcatgcccatgacgctccggatcaagaactgatcaatggcggcgacgaacgtacgcatgatttcgagcgcgaaacggctagctcgaacaatgtgtgtgtgaggattgcgatacgggtataattttaactattgactgatttttgcgctacgcgtgattgagcctgcgattagtagaggctcattgtatcttgtccgatcaattgaagtaaaacatttggcttg

SEQ ID NO: 2044 - DNA, 1137 bp, Sorghum bicolor
atggcgttgctgcttgtgctatcgtcgtccctgcaagcgctggtcgtcgccgccgcttctgcggcagctgcaggtggccggccgccgccggcgatgtttgtgttcggggactcgacgctggacgtgggcaacaacaactacttgccggggccggacgtgccccgggccaacaagccctactatggtatcgacttcccgggctcccttcccactggacgattcagcaatggctacaacatcgctgactacctagcgaagagcatggggttcgcgtctagtcctccgccatacctatcgctggcaccaagcaccagccgtctggtcctcacacctcgtggcaatggcgtcagctatgcttcgggaggagctgggattctcgactccactaacgcaggcaacaacatcccattgtcgaagcaggtgcagtacttcaagtccaccaagtcacagatggccaccaagctgggctcccgtgcgaccaacctcctgctctccaactccgtcttcctcttcagcgtcggcagcaacgacctgttcgtcttcgcaaccgcgcaggcgtcggagtcgcagaacaagtcagctgccgagcagcagcgcgacgtcgccacgctctacactagcctcatttccaactactcagcaaccatcacggagctgcacgccatgggcgcgaggaagttcggcatcatcaacgtggggctactgggctgcgtccccgctgcgcggctgtcgtcgcacggggcgacgggcgcgtgcttggacggcctgaacgagctcgcgtcgggcctggacgacgccctggcgtccctgttggccagcctcgcctcacggctgccgggcttcgtctactcgctcgccgactactacggcctgtcggcggccaccttcgaggacccggcggcgtcggggtacacggacgtcgccgacgcctgctgcgggggcgggaggctcggcgccgaggcggactgcctgcccaacgccacggtgtgcagcaaccgcgaccagcacgcgttctgggaccgggtgcatccttgccagcgggggacgatgctggccgcgcaaaacttctatgacagccgcccgggacgatacacggcgcccatcaacttcaagcagctggcttacacaagtttatga

SEQ ID NO: 2045 - DNA, 1502 bp, Zea mays
ctccacacaactcacagctttttcagtgtgggctagtagtaggtagctgtattagaagtttagaaccagtgacccaccgtggtggtggtggtgggctacagccactcagccatgtcgttgctgccgtgcctgctcgtgctatcgtccctgcaagcgccggccatcgtcgctgcttctgcagctgcaggtggccgaccgccggcgatgtttgtgttcggggactccacgctggatgtgggcaacaacaactacttggcggggccgggcgtgccccaggccaacaagccctactacggtatcgacttcccgggctccgttcccactggacgattcagcaatggctacaacatcgctgactacctcgcaaagagcatggggttcgcgtctagtcctccgccatacctgtcgttggcacctagcaccggccgtctggtcctcacagctcgtggcagcggtgtcagctatgcttccggaggagctgggatcctcgactccactaacgcgggcaacaacatcccattgtcgaagcaggtgcagtacttcaagtccaccaaggcacagttggtcacgaagctgggctcccgtgcgacccacctcctgctctccaggtccgtcttcctcttcagcgtcggcagcaacgacctattcgtcttcgccaccgcgcaggcgtctgcgcacaacaacaagtcagctgccgaccagcagcgtgacgtcgccacgctctacgcaagcctcatctccaactactcagcaaccatcactgagctgcacaccatgggcgcgaggaagttcgccatcatcaacgtggggctgctcggctgcgtccccgtggcgcggctgtccggcgggacgaagacgggcgcgtgcttggacggcctgaacgagctcgcgtcgggcctggacgacgccctcgcggtcctgctcgccagcctcgcctcccgcctgccgggcttcacctactcgctcgccgactactacggcctgtcgatggccaccttcgacgacccgggggcgtcggggtacacggacgtcgccgacgcgtgctgcgggggcgggaggttcggcgccgaggcggactgcctgcccaacgccacggtgtgcagcaaccgcgaccagcacgcgttctgggacagggtgcacccttgccagcgcggggcgatgctcaccgcgcaaaacttctacgacagccgcccgggccgatacacagcgcccatcaacttcaagcagctggcttccaccagtttatgaattatgatgatcttcatatggatagaacaaaggaaaaccaccgtacgtcgagtatatacacagggcctatccttaattattatcccttaattaatttattttccaaccttcaagtttatacgtatagtatatttaatgtctatggaacactatgtaacaataatatgaaagtttttttgacctgaaattgtaagagaaaccctcaagctcaaagcatgcggtggatttaattttcacagacggattcagtcgcc

SEQ ID NO: 2046 - DNA, 827 bp, Zea mays
  misc_feature (327)..(327): n is a, c, g, or t
atgacggcgtgcggcaacgtccccatcttcaaggacggcaagggctgtggctcatgctacgaggtgagatgcaaggaaaaacctgagtgctcgggcaatcctgtcacggtgttcatcacagacatgaactacgagcctatcgctccctaccacttcgacttgagcggcaaggccttcggctccctggcaaagcccgggctcaacgacaagcttcgccactgcggcatcatggacgtcgagttcagaagggtgcggtgcaagtaccccgctgggcagaagatcgtgttccacatcgagaagggctgcaaccccaactacgtggccgtnctggtgaagtttgtggcggacgatggcgacatcgtgctgatggaaatccaggacaagttgtcggctgagtggaagcccatgaagctctcttggggcgccatctggaggatggacactgccaaggcgctcaagggccccttctctatccgcctcaccagcgagtccggcaagaaggtcatcgctaaagacatcatcccggcgaactggagacccgatgccgtctacacttccaacgtccaattctactagactttgaattgccttcgattcatcggcgcggcgggctatggacctgcagcagcaagctaattaagttggccgatatatatataatatataatggaagccctgggctttgattattggggaagccccaaccagaatgcggataggccaccaccgcatgattgcgttagcatttatgctggtataaccaaattatataattttcatatactatgcaatgaatctaagaaggcagttcacctaaaaaaaaaaaa

SEQ ID NO: 2047 - DNA, 1088 bp, Zea mays
cgacaatgggatccctcgctaataacatcatggtcgtgggcgccgtccttgcggcgcttgtcgtcggcgggtcgtgcgggcccccgaaggtgccgcccggccccaacatcaccaccaactacaacggcaagtggctcaccgccagggccacctggtacggtcagcccaacggtgccggcgctcctgacaacggcggtgcgtgcgggatcaagaacgtgaacctgccaccctacagcggcatgacggcgtgcggcaacgtccccatcttcaaggacggcaagggctgtggctcatgctacgaggtgagatgcaaggaaaaacctgagtgctcgggcaatcctgtcacggtgttcatcacagacatgaactacgagcctatcgctccctaccacttcgacttgagcggcaaggccttcggctccctggcaaagcccgggctcaacgacaagcttcgccactgcggcatcatggacgtcgagttcagaagggtgcggtgcaagtaccccgctgggcagaagatcgtgttccacatcgagaagggctgcaaccccaactacgtggccgtgctggtgaagtttgtggcggacgatggcgacatcgtgctgatggaaatccaggacaagttgtcggctgagtggaagcccatgaagctctcttggggcgccatctggaggatggacactgccaaggcgctcaagggccccttctctatccgcctcaccagcgagtccggcaagaaggtcatcgctaaagacatcatcccggcgaactggagacccgatgccgtctacacttccaacgtccaattttactagactttgaattgccttcgattcatccggcgcggcgggctatggacctgcagcagcaagctaattaagttggccgatatatatataatatataatggaagccctgggctttgattattggggaagccccaaccagaatgcggataggccaccacccgcatgattgcgttagcatttatgctggtataaccaaattatataattttcatatactatgcaatgaatttaagaaggcagttcacctaaaaaaaaaaaaaaaaaaaaaaaaaaaaaaaa

SEQ ID NO: 2048 - DNA, 1080 bp, Zea mays
ggcatttcgaataacacaggtgagcgcgacgatgggatccctcgttaataacatcatggtcgtgggcgccgtccttgcggcgctcgtcgccggcgggtcgtgcgggcccccgaaggtgccacccggccccaacatcaccaccaactacaacggcaagtggctcaccgctagggccacctggtacggtcagcccaacggtgccggcgctcctgacaacggcggtgcgtgcgggatcaagaacgtgaacctgccaccctacagcggcatgacggcgtgcggcaacgtccccatcttcaaggacggcaagggctgcggctcatgctacgaggtgagatgcaaggaaaaacctgagtgctcgggcaatccagtcacggtgtacatcactgacatgaactacgagcctatcgctccctaccacttcgacttgagcggcaaggccttcggctccctggcaaagcccgggctcaacgacaagattcgccactgcggcatcatggacgtcgagttcagaagggtgcgatgcaagtaccccgccgggcagaagatcgtgttccacatcgagaagggctgcaaccccaactacctggccgtgctggtgaagtatgtggcggacgacggcgacatcgtgctgatggaaatccaggacaagttgtcggctgagtggaagcccatgaagctctcttggggcgccatctggaggatggacactgccaaggcgctcaagggccccttctccatccgcctcaccagcgagtccggcaagaaggtcatcgccaaagacgtcatcccggcgaactggagacccgatgccgtctacacttccaacgtccaattctactagactttgaattcccttcgattcatccggcacagcgggctatggaccttcagcagcaagctaattaagttggcagcatgcaccgctaaccttatatactactgagacttccaaattctagtatatgtaatccttttgttcgggttcatgatcgaattccaaagagtggaaaacaagcaaaaggttaaatatacatgccatttttggaggcatttttttcatgaaaaaaaaaaaaaaaaaaa

SEQ ID NO: 2049 - DNA, 1092 bp, Zea mays
atttcgaataacacagttgagcgcgacgatgggatccctcgctaataacatcatggtcgtgggtgtcgtccttgcagcgctcgtcgccggcgggtcatgcgggcccccgaaggtgccgcccggtcccaacatcaccaccaactacaacggcaagtggctcaccgccagggccacctggtacggtcagcccaacggtgccggcgctcctgacaacggcggtgcgtgcgggatcaagaacgtgaacctgccaccctacagcggcatgacggcgtgcggcaacgtccccatcttcaaggacggcaagggctgcggctcatgctacgaggtgagatgcaaggaaaaacctgagtgctcgggcaatccagtcacggtgtacatcactgacatgaactacgagcctatcgctccctaccacttcgacttgagcggcaaggccttcggctccctggcaaagcccgggctcaacgacaagattcgccactgcggcatcatggacgtcgagttcagaagggtgcgatgcaagtaccccgccgggcagaagatcgtgttccacatcgagaagggctgcaaccccaactacctggccgtgctggtgaagtatgtggcggacgacggcgacatcgtgctgatggaaatccaggacaagttgtcggctgagtggaagcccatgaagctctcttggggcgccatctggaggatggacactgccaaggcgctcaagggccccttctccatccgcctcaccagcgagtccggcaagaaggtcatcgccaaagacgtcatcccgccgaactggagacccgatgccgtctacacttccaacgtccaattctactagactttgaattcccttcgattcatccggcgcggtgggctatggacctgcagcagcaagctaattaagtttatatatattgcatgagagagcatgcaccgctaaccatatatactactgagacttctgaattctagtatatgtaatccttttgtttgggtttaggaggcaattctaatcatgtatgccgaattccaaagagtggaaaacaagcaaaatgttaaatatacatgccattttcggaggcaatttttttc

SEQ ID NO: 2050 - DNA, 1095 bp, Paspalum notatum
gaaaaaccgcaccgcgacacactccgacgagacggcattcgaataagcagcagcagcagaaaataagcaagaagtaatgggatccctcgccaagatcgtggccgtggcggccgtgctggcggcgctcgtcgccggcgggtcctgcggcccccccaaggtgccgcccggccccaacatcaccaccaactacaacggcaagtggctgccggccaaggccacctggtacggccagcccaacggcgccggacccgacgacaacggcggtgcgtgcgggatcaagaacgtgaacctgccgccctacaacggcttcacggcctgcggcaaccctcccatcttcaaggatggcaagggatgtggctcatgctacgagatcagatgcaataagccagagtgctccggccagccggtgacggtgttcatcaccgacatgaactacgagcccattgccccctaccacttcgacctcagcggcaaggccttcggcgccatggccaagcccggcctcaacgacaagctccgccactacggcatcttcgacctggagttcaggagggtccggtgcaagtaccagggcgggcagaagatcgtgttccacgtggagaagggctccaaccccaactacctagcgatgctggtcaagttcgtggcggacgacggcgacatcgtgctcatggagctcaaggagaagagctcggactggaagccgatgaagctctcctggggcgccatctggaggatggacacgcccaaggcgctagtgccccccttctccatccgcctcaccagcgagtccggcaagaaggtcatcgcccaggacgtcattcccgtgaactggaagcccgacacggtctacaattccaacgtccagttctagatcgacttgtttctttaccatgcatcatgcgcatgcacttgatccgtctttttttttccctatgaggcaatggacagcatgcatgcaccattaaccatatatatgttgagaattttgaattattgtaatatgtaatccggccgggcacacattttttgctcgatcgagtcaatcaatgccaaaacagtggtttttaaaaaaaaaaaaaaaaaaaaaaaaaa

SEQ ID NO: 2051 - DNA, 1068 bp, Sorghum bicolor
agtcacaaacacacagagcgacattcgtcgaatatcacagttgagcgcaaagaagacacccgcgatgggatccctcgccaacaaaatcgtggccatggcggctgtccttgcggcgctcgtcaccggcggctcgtgcgcgcccaagaagttcccgcctggccccaacatcacaaccaactacaacggccaatggctcgttgccagggccacctggtacggccagcccaacggtgccggccctgacgacaatggcggtgcgtgcgggatcaagaacgtgaacctgccaccctacaacggcttcacggcctgcggtaacgtccccatcttcaaggacggcaagggctgcggctcatgctacgaggtgagatgcaaggaaatgccggagtgttcgggcaacccgatcacggtgttcatcaccgacatgaactacgagcccattgcaccctaccactttgacttcagcggcaaggccttcggctccctggcaaagcccgggctcaacgacaagctccgccactgcggcatcatgaacgtggagttcaggagggtgcggtgcaagcttgggggcaagatcatgttccacgttgagaaggggtccaaccccaactacctggccgtgctggtcaagaacgtggcggacgacggcaacatcgtgctcatggaactcgaggacaaggcgtcgccggggttcaagccgatgaagcaatcctggggcgccgtgtggaggtttgacacacccaagccgatcaagggccccttctccatccgcctcaccagcgagtccggcaagaagctcgtcgccccaaacgtcatcccggcatcctggaagcccgacaccctctacaactccaacatccagttctaatagactttgcatgcccttcatccggcagcaagccaagttggccgctcatgtttatttgcaccagagaatgcaccgctaataaatagtagtactgagtcttctgcattctagctagtatgtgatccctgttgttgttcgggttcatgatcaaattccaaacagtggaaaataaaaagattgaatatatgtgtcaccattgatgg

SEQ ID NO: 2052 - DNA, 1119 bp, Oryza sativa Japonica Group
atccatctcaccaccaaaaaaaaaaggaaaaaaaaacaaaacacaccaagccaaataaaagcgacaatgggatcgctcaccaccaacatcgtcctcgccgtcgccgtggtggcagcgctggtcggcggcgggtcgtgcggcccgcccaaggtgccacccggcccgaacatcacgaccaactacaacgccccgtggctccccgccagggccacctggtacggccagccctacggctccggctccaccgacaatggtggcgcgtgcgggatcaagaacgtcaacctgcctccctacaacggcatgatctcctgcggcaacgtcccaatcttcaaggacggcaggggatgcggctcatgctacgaggtgaagtgtgagcagccggcggcgtgctcgaagcagccggtgacggtgttcatcacggacatgaactacgagcccatctcggcgtaccacttcgacttctccggcaaggcgttcggcgccatggcttgcccggggaaggagaccgagctccgcaaggccggcatcatcgacatgcagttcaggagggtgcgctgcaagtaccccggcggccagaaggtcaccttccacgtcgagaagggctccaaccccaactacctcgccgtgctcgtcaagttcgtcgccgacgacggtgacgtcatccagatggacctccaggaggccggattgccagcgtggaggcccatgaagctgtcgtggggcgccatctggaggatggacaccgccacgccactcaaggcacccttctccattcgcgtcaccaccgagtccggcaagagcctcatcgccaaagacgtcatcccggtcaactggatgccagacgccatctacgtatcaaacgtccagttctattgagatcggacggaaacgatcctcctaatttatttccctattaatttgttcaaatggtttccttctataacctatatttttcccgttgttagaaatggttccatttcctcctacagcttactttaagatagttgcgcttgtatatctgcgccatcttgtaagttgtaagatgctgaagaacactatgaattctgagcatctgattctccgggaagatttactatgataaacaacagtttgatttac

SEQ ID NO: 2053 - DNA, 1554 bp, Sorghum bicolor
atgatggcaggcccgggccgagctcatggccacagaaaccgcctccgccgcctcatcccgcggctcctcctcctcgtcttcgccctctacgccgcctccttcgcgatctacctcctcctccagtccgagtccgagtcccagtcccagtcccaccaccagtcgccgccggaccctaccccgatgactgaagcccgtgaaggcgtcggggcgccgccgtcctcgcagaagccgtggccgcgcctcccctccttcctaccctgggtgtccagccgagcgccgccgccgcacacctgcgaggcctacttcggcaacggcttctcccgcctcgtggacgtcctccctgcgggcggcggcggcggctggttccggtgccaccacagcgagacgctgggaagctcgatctgcgagggcgccagggtgcggcttgacccggcgctcatcgcgatgtcccgcggcggggagcctctggagcaggtgatgggccgcgccgaggaggaggagctgcccaagtacgagcccggcgcgctgcaggttgaggggccggcggcgggtaggacagcgcccctggtggacgctgggttcctcaacgactacgtgcccaccggcgggatcggtatgcacactatgaaggcgctgctcgagtcagcgcgcgttgtgccgcccggtgagctacactgctcccagtgggttgaagaaccgacactgttggtcactcgttttgaatatgcgaaccttttccacacaattacagactggtacagtgcatatgttagttccagagtcacgaatttaccaaaccgtcctaatgttatattcgtggatgggcattgcaaggcacaattggaggaaacatgggaagcacttttctcaagtgtgacatatgctaagaatttctctggtcctgtttgtttccgacatgccattctttcaccattgggctatgagactgccttgtttaagggccttagcgagagcttcagctgtgaaggtgcctccgcagagtccctccgagaaaaaacggactatgagaaaacatcacggttatctgaattcggggaaatgattgtagcttcgtttgatcttctgcaggatgacatcatgtcatccaaaaaatcaaatgggctcaatgttctctttgttcggcgagaagactacttggcccacccccgccacagtggtaaggttgaatccagactaagcaatgagcaggaggtgtatgatgcaattgacaagtgggcacaaggcctgaaatgcaaagtgaatgtcgtcaacggtctttttgcccacatgaccatgaaggagcaactgcgtgctatcctggaagcttcagtggtaataggggctcatggagccggtctaacacacttagtttcagcaactcctgatacaaaggttcttgagattatcagcagcatgtaccggcgcccacattttgcactgatctcacactggaagtctttagagtaccatgccataaatctccctgggtcatttgcaaggatcacagatgccatcagtgagttgagaaaaatactggaaggtctcggatgctga

SEQ ID NO: 2054 - DNA, 2752 bp, Zea mays
atgatggctggcagagctcatggccacagaaaccgcctccgccgcctcatcccgcggctcctcctcctcctcgtcgccgtctacgccgcctccttcgcgatctacctcctcctccagtcccattcccaccaccagtcgccgccggaccccacccccaggactgaagcccgtgacggtgtcctggcgccgtcgtcctcgcagaagccgtggccgcgcctcccctccttcctgccctgggtgtccagcgccgtgccgccgccgccgctgcacacctgcgaggcctacttcggcaacggcttctcccgccgcgtggacgtcctgcccgcgggccgcggcagcggcggcggcggctggttccggtgccaccacagcgagacgctgggaagctcgatctgcgagggcgccagggttcggcttgacccggcgctcatcgcgatgtcgcgcggcggggagccgctggagcaggtgatgggccgcgccgaggaggaggagctacccaagtacgagcccggcgcgctgcaggtggaggggccggcggcgggtatgccggtgcccctggtggacgcagggttcctcaacgactacgtacccaccggcgggatcgggatgcacactatgagggcgctgctcgagtcgacgcgcgttgtgccacccggtgagctgcactgctcccaggtactatttgccttgctatctactagcagagtagcagttgacttgctcattgatgacaagtggtttgttaattaatttctgaaatccagtaattaggaagagtagagtcagctcagtgttcgaataggagtatttaatgaaagtctgtttgatccagccctcatgctggatatactgagccatcgtatggatatttgtttgtgttttaagaagactacgagaagaaataggatctaagaatgatgtctgcgtccaatttatatccaaaatagaacatcgtgggagtatagtactagtagtatatagactctgtttttggttatttggtttcgtatgaatttgttcaattaatgctgcagttatctggtgattctatcatataattatttcagttactttgaatgtgagttgattgcaatgttccagttttgtcagaatagctagatatatattctatctgtatcattgaacaaaatgagcgtccttggtcatacctttctgagactcaaaagtgtagctttttaggctcttattggattagaggtttctcatgcaattttttatttatgtttcttcttacattccttcatctctggaattcagtactcccttcttaactgtattatcaaacttgttattgcagtgggttgaagaaccgacacttctggtcactcgtttcgaatatgcgaaccttttccacacaattacggactggtacagtgcatatgttagttccagagtcacgaatttaccaaaccgtcctaatgttgtattcttggatggccattgcaaggtatgtgatgcgctgtgtactttgttactggttcacttcattctgtttgttgcttgagttatgagcaacaagtctgtttcttcagctattactggggtaaacaacaggcggtcacatttttgtatgcttgatcttttgtttgtatcgtgcaatgataacacagcatagtgatcttcctgttttttcctcatttattctgccatattttcctcatgtttggagaacaattgcaatcagaagcagttcttgattgtaacccgatctgtcagtttctttgttctacattttagtcaaatagcgccccctgttatatttttggcagctagccttgatgcttcatccattttttttgtttttttgcattgtacccatccttgaatgtatgcctggcttccagattatatttttcctccattatgccattttatttcagatttagcatgacttaatatgatattctattgctaggtagcagccaacttatttatttatacaatgatttgtgtttcttttccctctcttgaatattcttgtcaagtgacagatgtgatctgatttccacaggcacaattagaggaaacatgggaagcacttttctcaagtgtgacatatgctaagaacttcactgttcctgtttgtttccgacatgccattctttcaccattgggctatgagactgccatgtttaagggtcttagcgagagcttcagctgtgaaggtgcctccgtagattcactccgagaaaaaccagactatgaaaaaactgcacggttatctgaattcggggaaatgattgtagcttcttttgatcttctgcaggatgacatcatgtcatccaaaaaatcgaatggactcaatgttctctttgttcgacgagaagactacctggcccacccgcgccacagtggtaaggttgaatcgagactaagcaatgagcaggaggtgtatgatgcaattgacaagtgggcacaaggcctgaaatgcaaagtgaatgtcgtgaacggtctttttgcccacatgaccatgaaggagcaactccgtgctatcctggaagcttcagtggtaataggggctcatggggctggtctaacacacttggtttcagcaactcctgatacaaaggttcttgagattatcagcagcatgtaccggcgcccacattttgcacttatctcacactggaagtctttagagtaccatgccataaatctccctggatcatttgcaagggtcacagatgtcatcaacgagttgagaaaaatactggaaggtctcggatgctga

SEQ ID NO: 2055 - DNA, 1574 bp, Zea mays
ggagagtgcgagaccacagcggctcgccggcggcgatgatggctggcagagctcatggccacagaaaccgcctccgccgcctcatcccgcggctcctcctcctcctcgtcgccgtctacgccgcctccttcgcgatctacctcctcctccagtcccattcccaccaccagtcgccgccggaccccacccccaggactgaagcccgtgacggtgtcctggcgccgtcgtcctcgcagaagccgtggccgcgcctcccctccttcctgccctgggtgtccagcgccgtgccgccgccgccgctgcacacctgcgaggcctacttcggcaacggcttctcccgccgcgtggacgtcctgcccgcgggccgcggcagcggcggcggcggctggttccggtgccaccacagcgagacgctgggaagctcgatctgcgagggcgccagggttcggcttgacccggcgctcatcgcgatgtcgcgcggcggggagccgctggagcaggtgatgggccgcgccgaggaggaggagctacccaagtacgagcccggcgcgctgcaggtggaggggccggcggcgggtatgccggtgcccctggtggacgcagggttcctcaacgactacgtacccaccggcgggatcgggatgcacactatgagggcgctgctcgagtcgacgcgcgttgtgccacccgtccactgctcccagtgggttgaagaacctacacttccggttactcgttttgaatatgcgagccttttccacacaattacagactggtacagtgcatatgttagttccagagtcacgaatttacctgaccgtcctaatgttgttttcgtggatggtcattgcaaggcacaattagaggaaacatgggaagcacttttctcaagtgtgacatatgctaagaacttcactgttcctgtttgtttccgacatgccattctttcaccattgggctatgagactgccatgtttaagggtcttagcgagagcttcagctgtgaaggtgcctccgtagattcactccgagaaaaaccagactatgaaaaaactgcacggttatctgaattcggggaaatgattgtagcttcttttgatcttctgcaggatgacatcatgtcatccaaaaaatcgaatggactcaatgttctctttgttcgacgagaagactacctggcccacccgcgccacagtggtaaggttgaatcgagactaagcaatgagcaggaggtgtatgatgcaattgacaagtgggcacaaggcctgaaatgcaaagtgaatgtcgcgaacggtctttttgcccacatgaccatgaaggagcaactccgtgctatcctggaagcttcagtggtaataggggctcatggggctggtctaacacacttggtttcagcaactcctgatacaaaggttcttgagattatcagcagcatgtaccggcgcccacattttgcacttatctcacactggaagtctttagagtaccatgccataaatctccctggatcatttgcaagggtcacagatgtcatcaacgagttgagaaaaatactggaaggtctcggatgctga

SEQ ID NO: 2056 - DNA, 1916 bp, Saccharum officinarum
gagacaccccttcgatctgcgcgagaccccagcggctcgccggcggcgatgatggcgggccgagctcatggccacagaaaccgcctccgccgcctcatcccgcggctcctcctcctcgtcttcgccgtctacgccgcctccttcgcgatctacctcctcctccagtccccccagtccgagtcccaccaccagtcgccgccggaccccaccccgaggactgaagcccgtgacggcgtcggggcgccaccgtactcgcacaagccgtggccgcgcctcccctcctgcctaccctgggtgtacagcgccgcgccgccgcacacctgcgaggcctacttcggcaacggcttctcccgccgcgtggacgtcctccccgcgggccgcgggggcggcggcggctggttccggtgccaccacagcgagacgctgggaagctcgatctgcgagggcgccagggtgcggcttgacccggcgctcatcgcgatgtcccgcggcggggagccgctggagcaggtgatgggccgcgccgaggaggaggagctgcccaagtacgagcccagcgcgctgcaggttgaggggccggccgcgggtaagaccgcacccctggtggacgcggggttcctcaacgactacgtgcccaacggcgggatcaggatgcacactatgagggcgctgctcgactccgcgcgcgtcgtgccgcccggtgagctccactgctcccagtgggttgaagaaccgacacttctggtcacacgatttgagtatgcaaaccttttccacacaattacagactggtacagtgcatatgttagttccagagtcacgaatttacctgaccgtcctaatgttgttttcgtggatggtcattgcaaggcaccactggagcaaacatgggaagcacttttttcgaatgtgacctatatcaagagcttctctggccctgtttgtttccggcgtgcagttctttcaccattgggctacgagactgctctatttaaggggcttagcgaaagcttcagctgtgaaggagcctcagctcagtcccttagaaatagaccggaccaccagaaaactgcacggttgtctgaatttggggagatgattatagcttcttttgatcttctggaggatgggatcgtgccgtctaaaaagacatcaactgggctcaaggttctctttgttcggagggaagattacttggcccacccacgtcacagtgggaaggttgaatctaggctaagcaatgagcaggaggtattcggtgcagtagagaagtgggcaaaaaaaggtcagaagtgcaaaataaatgtggtgaatggtctttttgcgcacatgagcatgaaggagcagctccaggctatcctggaagcttcagttataataggggctcatggggctggtctgacacacctggtttcggccacaccagacacaaaagttcttgagataatcagcagcttctatcggcgcccacattttgccttgatctcacactggaaggcattggaatatcatgccataaatctccctggatcatatgcaagtatcccagatgttaccagtgagttgagcaatatactgaaaggtctcggatgctgacacggaggtattttcttagcgttgaggcattcatcgtgaaaatcgccgcgagcattgttgagtggataattctgtttggttgatatacactggtcgcgctagccacgcccatgcttgcagtttcagttggagatcagtctcccctggttgttcattcaattcaatcacgcccgtggtctaggagccacacagcccctttcctccgcagaggaattttctgctgccagatgtagaacgatattccgctgacaagctactgatgacatgaagaaacccaattgacactgtccattccgttctctcgacgtgttcgccacggt

SEQ ID NO: 2057 - DNA, 1369 bp, Sorghum bicolor
ctggaagccgtgaaggcttggggcgccgccgtcctcgcagaaccgtggccgcgcttccggtcggtcctaccctgggtgtccagccgagcgcccccgccgcacaccgcgaaggcctacttcggcaacggcttctcccgcctcgtggacgtcctccctgcgggcggcggcggcggctggttccggggccaccacagcgagacgctgggaagctcgatctgcgagggcgccagggtgcggcttgacccggcgctcatcgcgatgtcccgcggcggggagcctctggagcaggtgatgggccgcgccgaggaggaggagctgcccaagtacgagcccggcgcgctgcaggttgaggggccggcggcgggtaggacagcgcccctggtggacgctgggttcctcaacgactacgtgcccaccggcgggatcggtatgcacactatgaaggcgctgctcgagtcagcgcgcgttgtgccgccccacctgttattgcagtgggttgaagaaccgacactgttggtcactcgttttgaatatgcgaaccttttccacacaattacagactggtacagtgcatatgttagttccagagtcacgaatttaccaaaccgtcctaatgttatattcgtggatgggcattgcaaggcacaattggaggaaacatgggaagcacttttctcaagtgtgacatatgctaagaatttctctggtcctgtttgtttccgacatgccattctttcaccattgggctatgagactgccttgtttaagggccttagcgagagcttcagctgtgaaggtgcctccgcagagtccctccgagaaaaaacggactatgagaaaacatcacggttatctgaattcggggaaatgattgtagcttcgtttgatcttctgcaggatgacatcatgtcatccaaaaaatcaaatgggctcaatgttctctttgttcggcgagaagactacttggcccacccccgccacagtggtaaggttgaatccagactaagcaatgagcaggaggtgtatgatgcaattgacaagtgggcacaaggcctgaaatgcaaagtgaatgtcgtcaacggtctttttgcccacatgaccatgaaggagcaactgcgtgctatcctggaagcttcagtggtaataggggctcatggagccggtctaacacacttagtttcagcaactcctgatacaaaggttcttgagattatcagcagcatgtaccggcgcccacattttgcactgatctcacactggaagtctttagagtaccatgccataaatctccctgggtcatttgcaaggatcacagatgccatcagtgagttgagaaaaatactggaaggtctcggatgctgaaacagag

SEQ ID NO: 2058 - DNA, 2105 bp, Oryza sativa Japonica Group
gaccgcttccgagatccgttcaaccccgatctacgccgccgagaacctcgccggcggcgacgacgacgagcacctcgccggcggcggaaggcgatgatgcctgtacgcacgtaccaccaccaccaccaccacaacaacagcaacaaccatcggctacgccgcatcatcccccgagtcctcctcgccgtcttcgccatctacgccgtctcgttcgcggcgtacctcctccgccaccagtcgccgcacccgcacccgcaccctgccgctgaccccgagcgcgacgccgtggacgcagccggaggaggcggaggaggaggagccgtggaccgtgtgcgggtagaagcgccgtcctcgcagaagccatggcctcgcctcccctccttcctcccgtggacgtccgcctccgttcggccgccgccgaagcactcctgtgaggggtacttcgggaacgggttctcccgcctcgtggacgtgctccccgcgcggggcggcggcggcggcgggtggttccggtgccaccacagcgagacgctgcgcagctcgatctgcgagggcgggagggtgcggctcgacccggggctcatcgcgatgtcgcgcggcggcgagccgctcgaccaggtgatgggccgcgccgaggaggaggagctgcccaagtacgagcccggcgcgctgcaggtggaggcggcggcgaagaggacggggccgttggtggaagcggggttcctcgacgcctacgtgcccaccggcgggatcgggatgcacacgatgaggtcgctgctcgactcggggcgcgtcgtgccgcccggcgagctacactgctcgcagtgggttgaagaaccaacacttctagtaactcgttttgaatatgcaaaccttttccacacaattacggactggtacagtgcatatgtcagttccagagtcacggatttacctaaccgccctaatgtggtctttgtggatggacattgcaaggcacaactggagcaaacatgggaagcacttttctcaaatgtgacatatgttaagaatttctctggccctgtttgttttcgacatgcaattctttcaccattgggctatgagactgcgctatttaagggccttagtgagagctttagctgcgaaggtgcttctgcggagtccctcagagaaaagcctgatcaccagaaaacggcaaggttgtctgaatttggtgagatgattttagcttcttttgatcttctgagggatgacatactgtcatccaaaacatcaaatgggctcaatgttctctttgttcggcgagaggactacttggcccatccacgccacagtggaaaggttgaatctagactaagcaatgagaaggaggtatatgatgcaattgagggctgggcaaaaggtcagaaatgcaaaataaatgtcatcaatggtctttttgcccacatgaacatgaaggagcaactgcgtgctatacaggaagcttcagtagtaataggggcacatggggctggtctaactcacttggtttcagctaccccagatacaaaagtccttgaaatcatcagcagcatgtatcgacgcccacattttgcattgatctcacactggaagagcttagagtatcatgccataaatctccctggatcatatgcaagggtaacagatgttatcaatgagttgagtaatatactgaaaggttttggatgctgagacagagctaggtattcatcaggaaagtcaccatactaacaacacaaatgcttacaatttcaatggatgggaaggaggttatttgcatctgtgatctgtgaactgatgcattaccagggctcatcacttcatcggaggaatttttatgctgccaaatgcagagagagattgtgctgacaagtgacaatctttaatctgcatatcgtgtggaacaagaaggcaatccttccccccttcctgacatcagccgacgacatgaaaaccaatccatgctgcgcacacttttctaccatgaattcatggtcttgaggaccgatcctcaaactgtaattgtaattcatcatttgggacattcggcgacaattcttgtatgttaatgcataatgttgagtgcttctcccccactgttc

SEQ ID NO: 2059 - DNA, 2020 bp, Hordeum vulgare subsp. vulgare
gacgcgtaacggcttcctcttcccccccatcgtcttcgagtccacacggcccccggatctacggaaccccgacggcgcggagcgcactccggcggccggcgatgatggccgggcgcaatcaccaccaaagccacggccagagactccgtcgcctcatcccgtgcatcctcgtcgtcgtgttcgccgtccacgccgtctccttcgctctctacctcctcctccagccccaccatcctcctccaaaccccgggaagcccgaagctcaatcccatgagagagtccaagcgccgtctccccagaagccgtggccgcgcctcccgtccctcctcccctggaccgccgacccatcgttgccgccgcgctcctgcgaggcctacttcgggaacggcttctcccgtcgcgtggaagtcctcccggaggggcgcgggggcggcgggtggttcctgtgccaccacagcgagacgctgggcagctcgatctgcgagggcgcgcgggtgcggctcgacccggcgctcatggcgatgtcgcgcggcggcgagccgatcgaccaggtgatgggccgcaaggaggaggaggagctgcccaggtacgaatccggtgcgctggtggtggaggggggcgcggcggggaagagggggcccttggtcgagcccgggttcctcgatgcccacatgcccactaacgggatcgggacgcacaccatgagagcgctgctcgactccgcgcgtgtcgtgccgcccggtgagctccactgctcccagtgggttgaagaaccaacacttctggtcacacgatttgagtatgcaaaccttttccacacaattacagactggtacagtgcatatgttagttccagagtcacgaatttacctgaccgtcctaatgttgttttcgtggatggtcattgcaaggcaccactggagcaaacatgggaagcacttttttcgaatgtgacctatatcaagagcttctctggccctgtttgtttccggcgtgcagttctttcaccattgggctacgagactgctctatttaaggggcttagcgaaagcttcagctgtgaaggagcctcagctcagtcccttagaaatagaccggaccaccagaaaactgcacggttgtctgaatttggggagatgattatagcttcttttgatcttctggaggatgggatcgtgccgtctaaaaagacatcaactgggctcaaggttctctttgttcggagggaagattacttggcccacccacgtcacagtgggaaggttgaatctaggctaagcaatgagcaggaggtattcggtgcagtagagaagtgggcaaaaaaaggtcagaagtgcaaaataaatgtggtgaatggtctttttgcgcacatgagcatgaaggagcagctccaggctatcctggaagcttcagttataataggggctcatggggctggtctgacacacctggtttcggccacaccagacacaaaagttcttgagataatcagcagcttctatcggcgcccacattttgccttgatctcacactggaaggcattggaatatcatgccataaatctccctggatcatatgcaagtatcccagatgttaccagtgagttgagcaatatactgaaaggtctcggatgctgacacggaggtattttcttagcgttgaggcattcatcgtgaaaatcgccgcgagcattgttgagtggataattctgtttggttgatatacactggtcgcgctagccacgcccatgcttgcagtttcagttggagatcagtctcccctggttgttcattcaattcaatcacgcccgtggtctaggagccacacagcccctttcctccgcagaggaattttctgctgccagatgtagaacgatattccgctgacaagctactgatgacatgaagaaacccaattgacactgtccattccgttctctcgacgtgttcgccacggtcctgcagatagatcaaactgtaattgtaattttatagtttgggcttgaacgtttttgtgttgc

SEQ ID NO: 2060 - DNA, 1942 bp, Hordeum vulgare
  misc_feature (1873)..(1873): n is a, c, g, or t
gcggagcgcactccggcggccggcgatgatggccgggcgcaatcaccaccaaagccacggccagagactccgtcgcctcatcccgtgcatcctcgtcgtcgtgttcgccgtccacgccgtctccttcgctctctacctcctcctccagccccaccatcctcctccaaaccccgggaagcccgaagctcaaacccatgagagagtccaagcgccgtctccccagaagccgtggccgcgcctcccgtccctcctcccctggaccgccgacccatcgttgccgccgcgctcctgcgaggcctacttcgggaacggcttctcccgtcgcgtggaagtcctcccggaggggcgcgggggcggcgggtggttcctgtgccaccacagcgagacgctgggcagctcgatctgcgagggcgcgcgggtgcggctcgacccggcgctcatggcgatgtcgcgcggcggcgagccgctcgaccaggtgatgggccgcgccgaggaggaggagctgcccaagtacgagcccggcgcgctgcaggtggaggcggcggcgaagaggagggggcccttggtcgagccggggttcctcgacgcccacgtgcccaccaacgggatcgggatgcacaccatgagagcgctgctcgactccgcgcgtgtcgtgccgcccctccactgctcccagtgggttgaagaaccaacacttctggtcacacgatttgagtatgcaaaccttttccacacaattacagactggtacagtgcatatgttagttccagagtcacgaatttacctgaccgtcctaatgttgttttcgtggatggtcattgcaaggcaccactggagcaaacatgggaagcacttttttcgaatgtgacctatatcaagagcttctctggccctgtttgtttccggcgtgcagttctttcaccattgggctacgagactgctctatttaaggggcttagcgaaagcttcagctgtgaaggagcctcagctcagtcccttagaaatagaccggaccaccagaaaactgcacggttgtctgaatttggggagatgattatagcttcttttgatcttctggaggatgggatcgtgccgtctaaaaagacatcaactgggctcaaggttctctttgttcggagggaagattacttggcccacccacgtcacagtgggaaggttgaatctaggctaagcaatgagcaggaggtattcggtgcagtagagaagtgggcaaaaaaaggtcagaagtgcaaaataaatgtggtgaatggtctttttgcgcacatgagcatgaaggagcagctccaggctatcctggaagcttcagttataataggggctcatggggctggtctgacacacctggtttcggccacaccagacacaaaagttcttgagataatcagcagcttctatcggcgcccacattttgccttgatctcacactggaaggcattggaatatcatgccataaatctccctggatcatatgcaagtatcccagatgttaccagtgagttgagcaatatactgaaaggtctcggatgctgacacggaggtattttcttagcgttgaggcattcatcgtgaaaatcgccgcgagcattgttgagtggataattctgtttggttgatatacactggtcgcgctagccacgcccatgcttgcagtttcagttggagatcagtctcccctggttgttcattcaattcaatcacgcccgtggtctaggagccacacagcccctttcctccgcagaggaattttctgctgccagatgtagaacgatattccgctgacaagctactgatgacatgaagaaacccaattgacactgtccattccgttctctcgacgtgttcgccacggtncctgcagatggatcaaactgtaattgtaattttatagtttgggcttgaacgtttttgtgttgcaatgtg

SEQ ID NO: 2061 - DNA, 1906 bp, Zea mays; identical to SEQ ID NO: 875

SEQ ID NO: 2062 - DNA, 936 bp, Sorghum bicolor
atggctgcctgtgtcgacaagtggcaacccacgcacgccggccgcctctccggcgccatctaccgcttcttgccggacggcgccacggaccgcgcggtgaccaccgctgcgccggcgtccgcgagcggcggcgacgacgacgtctgggaggagctgcgcgcggaggcgcaggccgacgcggacgccgagccgctcctgcgcaagttctacggcgacctcgtgctgacgcgccagtcgctggaggccgccctcgcggcgcacctgtcggccaagctctgcatccccggcgtgctgccgcaggacgcgctgcgggacctcctggccgccgcgctggccgcgcacccggacgccggccgcgccacgcgcgccgacctccgggcggcgcgcgaccgcgacgcggcctgcgaacggatggtgcactgcttcctctactacaagggcttcctcgccctgcaggcgcaccgcgccgcgcacgggctctggtccgatggccgctcggccgccgcgctcctccttcagagccgggcgtccgaggtgttcggcgtcgacatccaccccggcgcgcgcattggctcgggcatcctgttcgaccacgccacgggcatcgtcatcggcgagacggccgtcgtcgggaacgacgtctccatcctgcacggcgtcacgctcggaggcacggggaaggagtccggcgaccggcaccccaaggtcggggatggggtgctgatcggcgccggcgccagcgtgctcggcaatgtgcggattggagccggggcgaagatcggagctggggcggtcgttctacgggacgtgccggagggaaccacggccgtcgggaaccccgcgaaggcggtcgggaagaaggcggtgccgcagcggcggccggaagagcagcccggggtgaccatggagcaagggtggtcggactacgtgatttga

SEQ ID NO: 2063 - DNA, 1172 bp, Zea mays
cacgcatggctgcctgtgtcgacaagtggcaccccacgcacgccggccgcctcaccggcgccatctaccgctacttgccggacggcgccacggaccgcgcggtggccgccgccgccgccgcgccggcgtccgcgagcggcggcgacgacgacgacgtctgggacgagctgcgcgcggaggccgaggccgacggcgacgccgagcctctgctccgcaagtactacgccgacctcgtcctgtcgcgcccgtcgctggaggccgccctcgccgcgcacctgtcggccaacgtctgcgtccccggcgcgctgccgcaggacgcgctccgggacctcctggccgccgcactggccgcgcgcccggagtccggcccggccgcgcgcgccgacctcccggcggcgcgcgaccgcgacggctgcggccggatggtgcactgcttcctctactacaagggcttcctcgccctgcaggcgcaccgcgccgcgcacgggctgtggtgcgagggcccgtccgcgccggccttcctcctccagagccgcgcgtccgaggtgttcggcgtcgacatccaccccggcgcgcgcattggttcggggatcctgttcgaccacgccacgggcatcgtcatcggcgagacggccgtcgttgggaacgacgtctccatcctgcacggcgtcaccctcggcggcacgggaaaggagtccggcgaccggcacccgaaggtcggggacggggtgctgatcggcgccggcgccagcgtgctcggcaatgtgcgcgttggagccggggcgaagattggagcaggggcggtcgtgctacgggacgtgccggaggggaccacggccgtcgggaaccccgccaaggcggtcgggaagaaggcggcgccgcagcggcggccggaagagcagcctggggtcaccatggagcaagggtggtcggcatacgtgatttgataacttccagagggtctgtttgcaaatatttagtgcaggagagtttccctcccagaagatatttagtcaagtcgttattgagagataggtgcattgccgttgctgcattgcataaagagggagctcaattaggcattgagccctagagcaactccatatttttctttgttttgcgtgaggggaataacaatactatatgcatctgataagttatcggttgcttgt

SEQ ID NO: 2064 - DNA, 948 bp, Oryza sativa Japonica Group
atggcagcctgcgtcgacaagtggccgccggcggcgtacctgtgccgcctgccggagaagttctactgcgtcttgccggactgcaccgctacggaccgtccggtggtcaccgcatcggcggcgccggcgccggccgctagcgggagcagcggcgactacgtgtgggacgtgctgcgcgccgaggcgcaggacgacgcggacgacgagccgctcctccgcaagttctaccacgacctcgtcctgtcgcggccgtcgctggagtccgcgctcgcctcgctgctggcggccaagctctgcatccccggcgcgctgccgcaggaccagctccgggacctcctcgccggcgcgctcgccgcgcacccggaggccgggcgcgccgcgcgcgccgacctcgtcgcggcgcgcgaccgcgacccggcctgcgccaagatggtccactgcttcctctactacaagggcttcctggcactgcaggcccaccgcgcggcgcacgcgctctggtccgacaaccgcagggcgccggctctcctcctccagagccgcgcctccgaggtgttcggcgtcgacatccaccccggtgcgcgcattggctgcggcatcctgctcgaccacgccacgggcgtcgtcatcggcgagacggccgtcgtcggctacgacgtgtccatcctgcacggggtgacgctgggcggcacggggaaggagtccggcgaccggcaccccaaggtcggggacggtgtgctgatcggcgccggggcgagcgtgctcggcaatgtgcacattggcgacggagcgaagatcggagccggcgcagtcgtgctacgggacgtggcggacggaaccacggccgtcgggaacccagcgaagccgatcatcggcaagaaggcggcgccgcaacggcggccggaagagcttcccggggtaaccatggagcagagatggtcggattga

SEQ ID NO: 2065 - DNA, 1093 bp, Hordeum vulgare subsp. vulgare
gagccccgccagctctctctctccggtcgcttacatctctctctctctctcggcgcagcagcagttccctctcactttctctctctagctgcgcgtggtcggacatggcagcctgcgtcgacaagtggaacccagcatactcctgccaccgcatctcccgatccatctaccggttcatgccggactgcacaataaccgcaccgacgggcgcggccgtgaacgggagcgggggcagctgcaacggcggcgaccaagtctgggaggagctgtacggcgaggcgcaggccgacgcggaggacgagccgctgctgggcatgctctactacgagctcgtcctgtcgcacccgtcgctggaggccgccctcgcggcgcacctgtccgcaaagctgtgcatccagggcgcgctgccgcaggacgcgctccgggacatcctcgtcggcgcgctggccgcgcacccggaggcgatccgccacacgcgcgccgacctcctcgcggcgcgcgaccgcgacccggcatgcgccaagatggtccactgcttcctctactacaagggcttcctcgccctgcaggcccaccgcgccgcgcacgcgctctggtccgagggccgccggccgccggccctgctcctccagagccgcgcctccgaggtgttcggcgtcgacatccaccccggggcgcgcattggcggaggcatcctgctcgaccacgccacgggcatcgtcatcggcgagacggcggtcataggcgacgacgtgtctatcctgcacggcgtgacgctgggcggcacggggaaggtatgcggcgaccggcaccccaaggtcggggacggggttctcatcggcgccggggccagcgtgctgggcaatgtgcgcatcggtgccggagcgaagatcggtgcgggcgcagtcgtgcttagagacgtggagtgcggaaccacggccgtcggaaacccggcgaagccgatcgggaagaaggcggcgccgtcgcttcggccagaagagcaaccaggggtgaccatggagcagaggtggtcggattacgtgatatgaagttcgtgtgacgtgtttagtgcaagcaagagattttccctccg

SEQ ID NO: 2066 - DNA, 906 bp, Oryza sativa Japonica Group
atggcagcctgcgtcgataagtggccggcggcgtacccgtgccgcctgccggataagttctactgcgccttgccggactgcaccaccacggaccgtccggtggcgccggcgccggcggctagcgggagcagcggcgactacgtgtgggacgcgctgcgcgccgaggcgcaggacgacgcggacgacgagccgctcctccgcaagttctaccacgacctcgtcctgtcgcggccgtcgctggagtccgcgctcgcctcgctgctggcggccaagctctgcatccccggcgcgctgccgcaggaccagctccgggacctcctcgccggcgcgctcgccgcgcacccggaggccgggcgcgccgcgcgcgccgacctcgccgcggcgcgcgaccgcgacccggcctgcgccaagatggtccactgcttcctctactacaggggcttcctggcactgcaggcccaccgcgcggcgcacgcgctctggtccgacaaccgcagggcgccggccctccttctccagagccgcgcctccgaggtgttcggcgtcgacatccaccccggggcgcgcattggcggcggcatcctgctcgaccacgccacgggcgtcgtcatcggcgagacggccgtcgtcggctacggcgtgtccatcctgcacgccgtgacgctgggcggcacggggaaggagtccggcgaccggcaccccaaggtcggggacggtgtgctgatcggcgccggggcgagcgtgctcggcaatgtgcacattggcgacggagcggagatcggagccggtgcaatcgtgctacgggacgtggcggacggaaccacggccaagccgatcatcggcaagaaggcggagccgcaacgagagcttcccggggtaaccatggagcagagatggtcggattga

SEQ ID NO: 2067 - DNA, 897 bp, Sorghum bicolor
atggtggtgtacacgcaggagcatgtgtaccggcacccgtgggaccgggtgacggcggcggcgtggcgcaagttcacggacccggcctcccggacggcgctctcccacgtcgccgacgtccacaccctccaccgccgcctcgactccgacacgggccgcctccacgccgcgcgctccatcaccgtgcggtccccgccgctccctttcgtcctccgccgcctcctcccgtccgccgcgtcgtccccaaacggcgccgcgctctgccactgcgtcgagacctcgctcgtggacgcccagcgccgcgccatggacgtcgtcgtgcgcaacgtcagcctccggggcctcatcgaggtcgaggagcgcgcctcctacaggccccacccggaccggcccgacgactggacgcagttcaggcaggagaccacgatccggtgccgcccgctcgcggccctcgccgccgtcgctgagaaggtcgagacccggtgcgccgagaggttcctgcagaatagcgccaaggggagggaggtcgtcgagcggatctgccggtacctcgaggccgagtccgccggtgccgcgccctccgtaatctgatccgccctgatctggtttgcgcatccttacttgatccgaacggatccaaagggttcctcgatctgtgctgtctgcgcacggagaaatcgaaccccgcctgctaggcgattgtttttactttgtttcatttcttgtgtatgatgaaatgatgagctgaattcggaatagaataaagcttgtggccatagacttgtttcttctgttgactgtggaaccgttttaaccccctgattttgatcatgcgccttgccaaattgtaatctgccaataattttagaaagattatattctgccatgaaatcactg

SEQ ID NO: 2068 - DNA, 981 bp, Zea mays
ccccattcctacctttcttctcctccacctcgtcaggcaccctcaaaccctcgccgcaagaaagaagaggtcaatcaaatcgaaccaaaacctcccgaccccacaaggccaagctcatttccatggtggtgtacacgcaggaacatgtgtaccggcacccgtgggaccgggtgacagcggcggcgtggcgcaagttcacggatccggcctcctgtacggcgctctcccacgtcgcagacgttcacaccctacaccgccgcctcgactccgacacgggccgcctccaggccgcgcgctccatcaccgtgcggtccccgccgctccctttcgtcctgcgccgactcctcccgtccgccgcggcgtccccaaacggcgccgcgctctgccactgcgtcgagacctcgctcgtggacgcccagcgccgcgccatggacgtcgtcgtgcgcaacgtcagcctccggggcctcatcgaggtcgaggagcgcgcctcctacagaccacatccggaccggcccgacgactggacgcagttcaggcaggagaccacgatccggtgccgcccgctcgcggccctcgccgccgtcgctgagaaggtcgagacccggtgcgccgagaggtttctgcagaatagcgccaaggggagggaggtcgtcgagcggatctgccggtacctcgaggccgagtccgccggcgccgcgccctccgtaacctgatctcgtttgcacatctttgcttgatccgaacggatccaagggttcctcgatctgtgctgtgtgcgcccggataaatcgaaccccgcctgctaggcgcttgcttttcttcattttttgtgtgtgaaatgatgagctgaattcggaatagaataaagcttctggtcatacttgtttcttctgttgtaagtatgtggaaccgctttaacctccctgattttgatcatgagccttgccaaattctaatttgctaataaatttaaatgctatg

SEQ ID NO: 2069 - DNA, 1016 bp, Zea mays
ctcactcactcactccccccattcctacctttcttctcctccacctcgtcaggcaccctcaaaccctcgccgcaagaaagaagaggtcaatcaaatcgaaccaaaacctcccgaccccacaaggccaagctcatttccatggtggtgtacacgcaggaacatgtgtaccggcacccgtgggaccgggtgacagcggcggcgtggcgcaagttcacggatccggcctcctgtacggcgctctcccacgtcgcagwcgttcacaccctacaccgccgcctcgactccgacacgggccgcctccaggccgcgcgctccatcaccgtgcggtccccgccgctccctttcgtcctgcgccgactcctcccgtccgccgcggcgtccccaaacggcgccgcgctctgccactgcgtcgagacctcgctcgtggacgcccagcgccgcgccatggacgtcgtcgtgcgcaacgtcagcctccggggcctcatcgaggtcgaggagcgcgcctcctacagaccacatccggaccggcccgacgactggacgcagttcaggcaggagaccacgatccggtgccgsccgctcgcggccctcgccgccgtcgctgagaaggtcgagacccggtgcgccgagaggtttytgcagaatagcgccaaggggagggaggtcgtcgagcggatctgccggtacctcgaggccgagtccgccggcgccgcgccctccgtaacctgatctcgtttgcacatctttgcttgatccgaacggatccaagggttcctcgatctgtgctgtgtgcgcccggataaatcgaaccccgcctgctaggcgcttgcttttcttcattttttktgtgtgaaatgatgagctgaattcggaatagaataaagcttctggtcatacttgtttcttctgttgtaagtatgtggaaccgctttaacctccctgattttgatcatgagccttgccaaattctaatttgstaataaatttaaatgctatgraatcamtgawktttgttg

SEQ ID NO: 2070 - DNA, 922 bp, Hordeum vulgare subsp. vulgare
ggaaccgaatcgaatcgaggagcgaaatccaaaaccccgcgagccaggcacccaccccgaccccccggccatggtggtctacacccaggagcacgtctaccggcacccgtgggaccgcgtgacggcggcggcgtggcgcaagttcacggacccggcctcccgcacggcgctctcccacgtcgccgacgtgcacaccctgcagcgccgcgtcgacacggacgccggccgcctccacgccgcgcgctccatcaccgtccgctccccgccgctccccttcatcctgcgccgtctcctcccggccgccgccgcctccccctcgggcgccgccatctgccactgcgtcgagacctccgtcgtcgacgccccgcgccgcgccatggacatcgtcgtccgcaacgtcagtctccgcggcatcatcgaggtggaggagcgatccaccttccgcccccacccggaccgccccgacgactggacgcagttcaggcaggagaccaccatccgctgccgcccgctcgccaagctcgccgccgtcgccgagaaggtcgagacccgctgcgccgagaggttcctgcagaacagcgccaaggggagggaggtcgtcgagcggatctgccgctacctcgaggccgaggcggccggcgccgcgccttccgccgtctgatccgcactggtttgcgctccctctctcttggccgttctggatctgatcgaatccaaggtttcgctcgatctgtgctgcgggtgcagacccaggcctcgcgtcgaggcctccttttgtttttttaatttaattttgttttgtatatgagctgaatcctgaacggaataaagcttgtgagcatagacttcattgctgtgttgtaagtggagaatttttaaccctcttttgcgcatattcttgttgagctacattctgatctgc

SEQ ID NO: 2071 - DNA, 1100 bp, Oryza sativa Japonica Group
ggttcggatttgccttcctttccaaaccagagagcggtttacagaaaaccgcctttctcttcttccgtcttcttccctttccatttctcccttttcctacctcgcctcgccgcccgcaccgagcaaactcaaaccctcgccgcaagaaagaaaaacaaatcgagagaaaaaaccctcgctgctcgccgccccaagcgaagccagccatggtggtgtacacgcaggagcacgtgtaccggcacccgtgggaccgcgtcacggcggcggcgtggcggaagttcaccgacccggcgtcgcgcacggcgctctcccacgtcgccgacgtccacaccctccaccgccgcgtcgacccggaggcggggcggctgcaggctgcgcgctccatcacggtgcgctccccgccgctccccttcatcctccgccgcctcctccccgccgcggcgtcgtccccgtccggcgcggcgctctgccactgcgtcgagacctcgctcgtcgacgcgccgcgccgcgccatggacgtcgtcgtccgcaacgtctccctccgcggcctcatcgaggtcgaggagcggtccacctaccggccgcacccggagcggcccgaggagtggacgcagttcaggcaggagaccacgatccggtgccgaccgctctcggccctcgccgccgtcgcggagaaggtcgagacccgctgcgccgagagattcctgcagaacagcgccaaggggagggaggtcgtcgagcggatctgccggtatctcgaggccgaggccgccggtgctgcatcctccgccatctgagttggcctggtttgcgcctcctcacttggccttccttgatctgatcggatcgaaggattcgctcgatctgtgctgcgtgcgcgcggcgggacctcgcctcttggccaggtcccttgcagttttccatttttttttatgaaatgatgagctgaatcctgaatggaataaagcttctggacatatacttaatttcttcttgaccgtggaaccatgttaaccccaatttgtgcctgttcttgttaagcatattcagatatgctatgacatttctagttgttattgtgctgatttgacgaattcgtt

SEQ ID NO: 2072 - DNA, 1970 bp, Sorghum bicolor
atgtccgcgggcgaaatcctgagggcggagttatcttccaggacgccgccgttcggcctgcggctatgggttgtgattggcatctgtatctgggcgctaatcctgtgcgtcctgggcttcatgtgtttctggtccgtacaccggaggaacaagaagcctggcaacggcaacaagccctgctgcgataagatcccggtgtcccaaatcccggacgtctccaaagagattgcggtggacgaggtgcgggagcagcaccacgccgttgtccacaacctccgtgtgcagcaggaaagccatcacacgctggccgttcaggagaagccccaccacgagaaggattcggggaagatgctggggcacctggttaggagcaagtcgagcgacgctgataacctgagccagtgcagctccgcggcgtaccagtgcgaaagggctgggagctcatactctggcgacgaaggtagctcgggcaatgcgaggaggcagtatgctcagtatgcgaccgtctccgcgtcgccgctggttggtctcccggagttctcgcacctgggttggggccattggtttactttgagggatttggagcatgcgacgaatcggttttctaaggagaatgtcattggggaaggtgggtatggagttgtttaccgtggtcgcctcataaatggtactgatgttgcagtaaagaagctccttaataacatgggtcaagctgaaaaggagttcagggttgaagttgaggcaattggacatgtcaggcataagaatcttgtccgccttcttggatattgcgtcgagggaatacacaggatgcttgtgtatgagtacgtgaataatggaaatttagaacagtggcttcatggtgcaatgcgtcaacatggtgttcttacttgggaagctcggatgaaaatcgttcttggaattgctaaggcgcttgcttatttacatgaagccatagaaccaaaagttgtgcaccgtgatatcaaatctagtaatatactaattgatgaagaattcaatggcaagctttctgattttggattggccaagctcttgggtgcaggaaagagccatatcacaactcgagttatgggaacttttgggtatgtcgcccctgaatatgccaacacaggcctgttaaatgagaggagcgatgtctacagttttggggtgctactactggaatcagtaactgggagggatccagttgactatggtcggcctgctaatgaggtgcatctggttgagtggctcaaaatgatggttggctcgagaagagctgaggaggtggtggatcctgacatggagttgaaacctaccactcgggctctgaagcgtgcccttctagtggcactgcggtgtgttgacccagactctgagaaaagacccactatgggacaggttgttcggatgctcgaggcagaagatgtcccatcgcgggaggaccgtcggagccggagggcccacagcagtaacgcagacagcgagtctaaggcaagctcaagtgaattcgagataagcagtgatcgaagagagttgggaccgtccgcgaggtttcagtcctaacccctgatgagagcacagcagatcctgatggccaagaactcggttttggactagcggtgagcattggaggaacgcggtgtgggtggggctggtcggtagagataggaaggacattgcatttctggagggcattgcattttgtactgtagagattggaaggtcattgcatttctggaggaggtaggtattatccttggtagtggccagcttagaatgcagagtgagatggatcccctgagagaaaagattcagacttgctgcgaatcttactcggtattctgctggtgcggcggcagcagcagcttgtacagacatttcttttctgtctttcgttaggacttgctggctagcagaaaatatggtctccttcctaatgtgatgagtgttgagtgacttgaaccatc

SEQ ID NO: 2073 - DNA, 3914 bp, Zea mays
ccgccggcggagtcctgagggcagagttatcttccaggacgccgccgttcggcctgaggctatggattgtgattggcatctgtatctgggcgctaatcctgttcatcctaggcttcatgtgcttctggtccctacaccggaggaagccgggcaagccctgcgacaaggttccgctgtcccaaatccctgacgtctccaaggagattgcggtggacgaggcgcgggagcaagctgttgtccacagcctccgtgtgcaggagagccacacactgtccgtgcaggagaagaagcactgcgaaaaggattcggggaaaatgctcgcgcacctggttaggagcaagtcgagcgatgcagataatctgagccagtgcagctccgcgttccagtgcgaaagggctgggagctcgtattctggtgacgaaggcagctcgggcaatgctaggaggcagtactctcagaccgtctccgcgtcgccattggttggtctccctgagttctcgcatctgggttgggggcattggtttactttgagggatttggagcatgcgacgaatcggttttctaaggagaatgtcattggagaaggtgggtatggagtagtttaccgtggccgcctcataaatggtactgatgttgcaataaagaagctccttaataacatgtaagaacccccggagtttatttttaacctaaaggacaccttccatatcggacatgaaatattgttctgctctcagcatacccacaatgtttgatatgtcattgtaggggccaagcagaaaaggagttcagggttgaagttgaggcaattggacatgtcaggcataagaatcttgtccgccttcttggatattgcgtggagggaatacacaggtgaagctaatttctgatcaattgcactgacagatggatagattttctcttagttcagcttccatatgtatgtacctgattgttgttgatacatacataatcacattctaggttcatgataaaatctttaactttaaaccctaaaaagttctaacaattcatctaactttgagaatgcatctgtactagtacattcattgagctattgcaatttcagctcatgatagatcataatcattcggtaatattgtgtctatagcaatatggaggaatcattttgccaacatatgattatgatttcccagattactattttggtacagcttattactccatttcaatctgttatacctcccgattaaaaactcagtgccgtcaaacacattgtctcctgcactttcttcctccacttcatccatgctgtcattaatcatatcacagggctcttaagtacaacagggcttcacacataagataagatatcattgtacaaggcaaaaggcaaacaaccatgcttaatgtgtattgcgcatatataaaagcaacaggaaagctatattcaacactgagctaatttgtgcccacttatgtgtttctgggatcaaaataatttggaatggaattttagattgggtctcaagttgtgtccatgtgcttttcatgtgccctgtggagtgtggacacatcaattgatgagtctcagagataatccgggagaacttccttgaaggaaactaatctggtaataagcaaaacaggaactttacagaagagttgggttgatgccatatataacttttgatttgccatttcggataaaagatggtaacctaaccggcatcattttgtctgtagcgtattctaggcactatgaactcaagccagtcgttatctgctttgctgatgtatccaacactgatgtcgcatcactggccactgttggtggttgtaacatggttcaaaggcttctagtgtctagtgaggcctttctggccattgctgccaatgaggcatggactccatgaactaaacttccatatgtgggtgataagagtcatttgccctggcagtgtcaaatctacaagacccaggctacccagttaatcatacattcatacctactgctgcactgtactacctgctgtacaagccacacatttaaataatttttggaactaaaattgtgataccctgattactagtctgttacaagaaacttttcatttggcacttaatatatgcatttcactctttaattaatattagcttgaaatctgaataaataaatgaaatatagttgtcatgccttctaataatatatgtttctccacatttaaaaaagaaaagaaaatgtatttatagcagtcatctgagaactgttgtaaataacagtgttttttatttagtatatgtgaactgaagggagcagaatcatgctcccttagttttagttgtttacaatgggcaacaattctttgtagttaggcatttgtcaatgagaagacttgactttagtttgtattgaaacaaacttagatgctgttaatgtttatatgcattctccatccacattcagcacttccagtggttaatatattaccatggaaatctatatgtttcatacatcatatattgttttttaatctatttgagtgttctcattatcatatcctcttactccaggatgcttgtgtatgagtacgtgaacaatggaaatttagaacagtggcttcatggtgccatgcgtcagcatggtgttcttacttgggaagcccggatgaaaatcattcttggaattgctaaggcgtaagacatggaccattcaatattttgtctcttctttgatgcatatgttttgccatctaaggcatttttataattgatgatatactacaggcttgcttatttacatgaagccatagaaccaaaagttgtgcaccgtgatatcaaatctagcaatatcctagttgatgaagaattcaatggcaagctttctgattttggattggccaagctcttgggtgcagggaagagtcatatcacaactcgagttatgggaactttcgggtatgttgtttgcttgatattctttcatttttgtagtaccttgcttgactaactggaacatgtggtattacagtaggaacctttacatgttgagggatttgtttttcatgtttttagagcagtataaagttttgtggtgcttcacatgacatgaaaagaaccattcaccttttgttgctactgtttcaggtatgtggcccctgaatatgccaacactggtctgttaaatgagaggagtgatgtctacagttttggagtgctactactggaatcagttactgggagggacccagttgactatggtcggccagctaatgaggtgagcgtctgctgtcatatcatgcttgcagaacagcccatacgagagaccatctgtttcacagaaaagcagcatctaactactatcggagacgatgcatttcagtttttaggagtatgggtatcttgacttccatttattgtggcaagtgtgctttctaaaatttgcacgagcaacaattccttgtcagcttcgatcgttaataatcagctacaacatggagacggtgcaggtacatctggtcgagtggctcaaaatgatggttggcacgagaagagctgaggaggtggtggatcctgacatggagttgaaacctgccactcgggctctgaagcgtgcccttctagtggcactgcggtgtgttgatccggactctgagaaaagacccactatggggcaggttgtccggatgctcgaggcagaagatgtcccgtcacgggaggttgtacttctgctcccccctccccccctcctgatacaaacatactgctcttttgtgtaacaagtctgaatcttgtgttttgatcctgtgaaggaccgccggagccggaggggccacagcggtaacgcagacagcgagtctaaggcaagctcaagtgagttcgagataagcagtgatcgaagagagttggggccgtccgcgaggttccagtcc

SEQ ID NO: 2074 - DNA, 1552 bp, Zea mays
cggagtcctgagggcagagttatcttccaggacgccgccgttcggcctgaggctatggattgtgattggcatctgtatctgggcgctaatcctgttcatcctaggcttcatgtgcttctggtccctacaccggaggaagccgggcaagccctgcgacaaggttccgctgtcccaaatccctgacgtctccaaggagattgcggtggacgaggcgcgggagcaagctgttgtccacagcctccgtgtgcaggagagccacacactgtccgtgcaggagaagaagcactgcgaaaaggattcggggaaaatgctcgcgcacctggttaggagcaagtcgagcgatgcagataatctgagccagtgcagctccgcgttccagtgcgaaagggctgggagctcgtattctggtgacgaaggcagctcgggcaatgctaggaggcagtactctcagaccgtctccgcgtcgccattggttggtctccctgagttctcgcatctgggttgggggcattggtttactttgagggatttggagcatgcgacgaatcggttttctaaggagaatgtcattggagaaggtgggtatggagtagtttaccgtggccgcctcataaatggtactgatgttgcaataaagaagctccttaataacatgggccaagcagaaaaggagttcagggttgaagttgaggcaattggacatgtcaggcataggaatcttgtccgccttcttggatattgcgtggagggaatacacaggatgcttgtgtatgagtacgtgaacaatggaaatttagaacagtggcttcatggtgccatgcgtcagcatggtgttcttacttgggaagcccggatgaaaatcattcttggaattgctaaggcgcttgcttatttacatgaagccatagaaccaaaagttgtgcaccgtgatatcaaatctagcaatatcctagttgatgaagaattcaatggcaagctttctgattttggattggccaagctcttgggtgcagggaagagtcatatcacaactcgagttatgggaactttcgggtatgtggcccctgaatatgccaacactggtctgttaaatgagaggagtgatgtctacagttttggagtgctactactggaatcagttactgggagggacccagttgactatggtcggccagctaatgaggtacatctggtcgagtggctcaaaatgatggttggcacgagaagagctgaggaggtggtggatcctgacatggagttgaaacctgccactcgggctctgaagcgtgcccttctagtggcactgcggtgtgttgatccggactctgagaaaagacccactatggggcaggttgtccggatgctcgaggcagaagatgtcccgtcacgggaggaccgccggagccggaggggccacagcggtaacgcagacagcgagtctaaggcaagctcaagtgagttcgagataagcagtgatcgaagagagttggggccgtccgcgaggctccagtcctaacccctgacgagaactcggttttggactagcgatgaa

SEQ ID NO: 2075 - DNA, 2336 bp, Zea mays
tctctctccactcatcatcagttcagtcatcagtgtagtgaaactttatcgtttgctcgcttgcttgcttccctagtactgtcggcccttttctcccttcccaatccatccaccccctccctccccagcaagaaagcattgcatcccctctccccggagcggagagccggcgggccggcctcccatcgcatggccaccgcactgacgtgacgccgccgagggattgaggacccaagacctccagctggaggaatcgggagaggaaggagcggtcgcgcgcccttcgccacgtcttgcgtcgtcggggggcccggcccttcgccgacgacgacgagcacccaccacgtacgcccgccacctctccctccccttcatgccgcaccccaaaccctaatgttgctgaggaacagagatgtcgacgacaggcgaaatcctgaggtcggagctatcttccaggacgccgccgttcggcctgaggctatggattgtcattggcatctgcatctgggtggcgatcctcttcatcataggcttcatgtgcttctggtccatataccggaggaagcccaccaagtcgtccttcgacagtaccaatgacatcccggtgtcccagatcccggacgtctccaaggagattgcggtggacgaggtgcgtgagcacgctgccgtgcagaccttccatgtgcacgagagctgccgcgcgctggccgtgcaggagaagccctgcgagaaggattccgggagaatgctggggcacctggtcaggagcaagtcgagcgacgctgataatctcagccagtgcagctcggcggcgtaccagtgcgagagggctgcaagctcgtactctggcgacgagggcagctcgggcaacgccaggaggcagtatcccactgtctccgcgtctccgctggttggtctccccgagttttcgcatctcggatggggccattggtttactctcagggatttggagcatgcgaccaatcgcttctccaaggagaatgtcattggggaaggtggatatgggattgtttaccgaggtcgcctcgttaatgggaccgatgtcgcaattaaaaagctccttaataacatgggtcaggcagaaaaggagttcagggttgaggttgaggcaattgggcacgtcaggcataagaatcttgtacgccttctaggatactgtgtcgagggtatccacaggatgcttgtgtacgagtatgtgaataatgggaacttagaacagtggcttcatggtgcaatgcgtcagcacggtgttcttacttgggaggcccggatgaaagtcgttcttggaattgccaaggcgcttgcttatttacatgaagccatagaaccaaaagttgtacaccgtgatatcaaatcgagcaatatcttaattgatgaagaattcaatggcaagctttctgattttggactggccaagctcttgggtgctgggaagagccatatcacaacacgagttatgggcacattcgggtatgtggctcccgagtatgccaatacaggtctgttaaatgagaagagcgatgtctacagttttggggtgctactactggaagcagtgactgggagggatccagttgactatggtcggcctgctaatgaggttcatctggtggagtggctgaaaatgatggttggcactagaagagccgaggaggtggtggatcctgacatggagttgaagccagcgattcgtgctctgaagcgtgctcttctagtggcactgcgatgtgtagacccagatgctgagaaaaggcccactatgggtcaggttgttcggatgctcgaggcagaagacgtgccttcacgggaggaccgtcggagccggagaggccacagcagcaacgcagacaacgagtccaaggcaagttcaagcgagtttgagataagcagtgaccgaagagagttggggccgtcatcgaggttccaggcctaactcccagtgagagcacggcagattaccatctccaagaacccggtttcagttcagtacgccgggttatcccttaccttgcttgctcgatcatggactcagcaggccgttcgaaatatttgggaatccgtgcggggtggggctttattggatggttggtactgatagagataggggaaggatttgcatcttgtgctggagtaggtattttactcccatttccttggtggtgggcggagtcggatcgattccgtgggaggggaggttgagacttgtcgtggatctggatgtggatcctattcgtgttctgtttgcccagcagcatgtacagaaactttattattattccctggttcttggtttaaaaaaaaaaaaaaaaaaaaaa

SEQ ID NO: 2076 - DNA, 2418 bp, Oryza sativa Japonica Group
accctccctactctctccacttccactctcaccggccaccgcgcgctctctctctctctctcccccttctcccgcaagattcttcccccaaatcccacccgatccaccgccgccgcccgctcgccggagtcccatcgctgccaccgccgccggagccgcggcccgacgcccgccgggcctgcttgctgtgtgtgtgaggaggtggagttgctcgcgctcgttcccgcggccacctccgcctgctgctgcttctgcttccgctggcattgcggggaggtcgtgtgccgggggacgtgggggctcgtgttggagcgcggctgccggtgaggtggggggtgcggcgcggcgcggctcgcgcttgtgcgccggtggcgcgggcgcggggggaagcgtacgggggagggggagtgtggcggcggcggcgcgcggggtagggacgggcgccgccaccaccaccggctcgttcgctggcaggcgctacgcgtccagatccgtacgccggttgttgagaagtgaagatgtcgacaggtgaaaccctgcgtgcagagctatcatccaggacgccgcctttcggtttgaggctatggattgtgattggaatcagtatttgggtggtgatcttctttatactaggtttcatgtgcctctggtccatataccgaaggaagccgaagaagtcctttgataagattccagtatctcaaatcccggatgtttccaaggagattgcagtagatgaagttcgtgagcatgctgttgtcgaaaacttccgtgtgcaagaaagccacgcgatatcggtgcaggagaaacattacgagaaagattcagggaaaatgctggcacacttggttaggagtaaatcgagtgatgccgataatttgagccaatgcagctcggtgtaccaatgtgatagggctggtagctcgtattctggtgatgaaggcagctcgggcaatgctaggaggcacttttctcaatatgcaactgtctcagcatcccctctggttggtctcccagaattctctcatctgggctggggtcattggtttactctgagagatttggagcatgcaacaaatcggttttccaaggagaatgtcattggagagggtggatatggggtagtttaccgtggtcgactcataaatggaactgacgtcgcaataaagaagcttcttaataatatgggccaggcagaaaaggagttcagggttgaagttgaggctattggccacgtcaggcataagaatcttgtccgccttctaggatattgtgttgagggaatccacaggatgcttgtatacgaatatgtgaataacgggaacttagaacagtggcttcatggtgccatgcgccaacatggtgttcttacctgggaagcccgaatgaaagttgttcttggaattgctaaagcgcttgcttatttacatgaagcaatagagccaaaagttgtacaccgggatatcaaatcaagcaacatactaatcgatgaagaattcaatggcaaactttctgattttggcttggctaagatgctgggtgcagggaagagccatatcacaactcgagttatgggaacttttgggtatgtggcccctgagtatgccaacacaggtctgttaaacgagaagagtgatgtctacagttttggtgtgctattactggaagcagtgactggtagagatccagttgattatggccggcctgctaatgaggtgcatctagtggagtggctcaaaatgatggttggcacaagaagatctgaagaggtagttgaccctgacatggaggtcaaaccgaccattcgggctcttaagcgtgctctcctagtggcactgaggtgcgtcgacccagactctgagaaaagacctactatgggtcatgttgttcggatgctcgaggcagaagatgtcccatcccgtgaggaccggaggagccggaggggcaacactgccaatgcagataccgagtccaagacaagctcaagcgaattcgagataagtggcgatagaagggactcagggccatcagcaaggtttcaaccctaagaagacggtgatcatagtcaagaacaatggcttcaaaactctatgcagtaacatggtggttggcagagaaaaaggggtatttctggagggcattgcattttgtattgtaggtctgcatggcggtagagactggagagagcacagtgtctgatgatggatacccggagacctgtaattcccattcagtattctgtttgctagtcaagcagcttgtacagatcgttgtctgttccattttttcattcttctggtttttttgtttaggaggctcttggattaccagtacgaaccgctgtctcttttctagaatcaccaacatggaacctatcaatatttactactagtactacgacttgctttcttcttgctg

SEQ ID NO: 2077 - DNA, 2488 bp, Sorghum bicolor
gtactgtcggcccatttctccacctccccagtccatccatccatccatccattacccagcaagcaagcattgccttccctctcccccggagcggagagccgcccgcccgcccggcctcccatggccacctcctcccgctccgtcccgcactgacgtgacgccgccgagggattgaggacccaagacctccagctggaggaagaggagtcggaaggagcggccgcgcgcccttcgccaagacttgcgtcgtcgggtggcccggcccttcgccggcgacgacaagcacccaccacgtacgcccgccacctcctcctccccttcatgccgcaccccaaaccctaatgttgctgaggagcagcgatgtcgacgactggcgaaatcctgcggacggagctatcttccaggacaccgccgttcggcctgaggctatggattgtgattggtatctgcatctgggtggcgatcctgttcatcctaggcttcatgtgcttctggtccatataccggaggaagcccagcaagtcgtccttcgacagtaccaataccatcccggtgtcccagattccggacgtctccaaggagattgcggtggacgaggtgcgtgagcacgctgctgtccagagcttccatgtgcacgagagccgcacactggcggtggcggtgcaggagaagcactgcgagaagaaggattctgggaaaatgctggggcacctggtcaggagcaagtcgagtgacgctgataatctgagccagtgcagctcggcgtaccagtgcgagaaggctgcaagctcatattctggtgatgaaggcaactcgggcaatgctatcgctaggaggcagtactctcagtatccaactgtctccgcgtctccgttggttggtctccccgagttttcgcacctaggatggggccattggtttactctcagggatttggagcatgcgacgagtcggttctctaaggagaatgtcattggggaaggtggatatggcattgtttaccggggtcgactcattaatgggactgatgttgcaattaaaaagcttcttaataacatgggtcaggcagaaaaggagttcagggttgaagttgaggcaattgggcatgtcaggcataagaatctggtccgccttctaggatattgcgtcgagggtatccacaggatgcttgtgtatgagtatgtgaataatgggaacttagaacagtggcttcatggtgcaatgcgtcagcacggtgttcttacttgggaggcccggatgaaagtcattcttggaattgccaaggcgcttgcttatttacatgaagccatagaaccaaaagttgtacaccgtgatatcaaatcgagcaatattttaattgatgaagaattcaatggcaagctttctgattttggattggccaagctcttgggtgctgggaagagccatatcacaactcgagttatgggaacatttgggtatgtggctcctgagtatgccaatactggtctgttaaatgagaagagcgatgtctacagttttggggtgctactactggaagcagtgactgggagggatccagttgactatggtcggcctgctaatgaggttcatctggtggagtggctgaaaatgatggttggcactagaagagcggaggaggtagtggatcccgacatggagttgaaaccagcgattcgtgctctgaagcgcgcacttctagtggcactgaggtgtgtggacccagatgctgagaaaaggcccactatgggtcaggttgttcggatgctcgaggcagaagacgtcccatcacgggaggaccgccggagccggaggggccacagcaacaacgcagacagcgagtccaaggcaagctcaagcgagtttgagataagcagtgatcgaagagagttaggaccgtcatcgaggttccagccctaactccctgtcagagagcacagcagatcaccaggttcaagaactcggtttcagttcagttcgccgggttgtctcttgctggctcgctcatgcattcagtgggccgttcgaaagattgacctatttgtgaatccgcgctggttttcacactggcggggctttggatggtggtaatggttgttggtactggctttggatggtgggcattggttggtacttgttagagatataggaaggacatggacattgcattttgtactgtaggtattacctttccttggtggtagccagcgtagagggcagagttggatcgattccctgggagattgagacttgtcgtggttcctattcgtgttctgtttgtctagcagcttgtacagaaactttattattgtctggttcttggttaggattcatggcgagtagaaaagatagtcggctctttcctgatgtgatcagtggcttgaaggttgaagcgtcaaccttttcgtatccggtattcatttccaatggaatctatgctgttcatttatgtgaaatttctgtaaaaatcgaagcagactgaatgaat

SEQ ID NO: 2078 - DNA, 3630 bp, Zea mays
tcgacgacaggcgaaatcctgaggtcggagctatcttccaggacgccgccgttcggcctgaggctatggattgtcattggcatctgcatctgggtggcgatcctcttcatcataggcttcatgtgcttctggtccatataccggaggaagcccaccaagtcgtccttcgacagtaccaatgacatcccggtgtcccagatcccggacgtctccaaggagattgcggtggacgaggtgcgtgagcacgctgccgtgcagaccttccatgtgcacgagagctgccgcgcgctggccgtgcaggagaagccctgcgagaaggattccgggagaatgctggggcacctggtcaggagcaagtcgagcgacgctgataatctcagccagtgcagctcggcggcgtaccagtgcgagagggctgcaagctcgtactctggcgacgagggcagctcgggcaacgccaggaggcagtatcccactgtctccgcgtctccgctggttggtctccccgagttttcgcatctcggatggggccattggtttactctcagggatttggagcatgcgaccaatcgcttctccaaggagaatgtcattggggaaggtggatatgggattgtttaccgaggtcgcctcgttaatgggaccgatgtcgcaattaaaaagctccttaataacatgtaagaagctctggttattgttttagccttaaagaccatcttggtacatagcttgaaatattactctgccctctttgatagtctcgcagcatcttgatagcgtttggtatgtcactgtaggggtcaggcagaaaaggagttcagggttgaggttgaggcaattgggcacgtcaggcataagaatcttgtacgccttctaggatactgtgtcgagggtatccacaggtgaaactaattcctgaacaattgtgctataactgtttgctctctgctactttatatatgtacttgaaatacaactatgactactaatccacatataatcatgaagctccaagcccttaacaaaatctagcacttgaccgcactttgagaaagcatatcccttggtatattcattcaactgcaacatttcatcctttgagatttttttgatgatcgttaattcattattatgatctacttagcttcatgtgcaaccagtcatgtttgtgcaaccgtgcaatcaagtgatcaagtgcattcaatcaaaatccaacggtgactgctattttaggtggaagaggttaaatgtaaaatagcgttcaccattggattttaattgaatggaccagatcgcttgattgcatggttacaccaacatggctgattgcacaggatattttccccctcaaaattgatggcttgggagcttcctggcctagacaaatatgccagtctacgaagcaaacatgccttacatctgtaaaactaggtgcagtgaaatatggtactcaacaacagtccttagtcagaagccaaacatagatgatttactgggctgtcaacatcatattatacctctagaagatcttgcacgccaaatttagcgttaatgtctcatgtctgatataatgccaagaataactgtgcctaatgataatacaagtcttcataatttcaattgataccataaataggttttctaaagacaactgatcatttgaaagtttgatgatctatttgtaccagctaccacatgttacaagaatttttgcaactaaagttgtgagataatgatttctatgttttgaagaaaattgtcacttgtcacacaagatatgcacttttaatttttacctgcctgaataaatgaatatgaatataccacctctggaaaaagcaaagtgaagtgtatatttatcctagtaatctgaaaattgttgcaaaccactacagtatttctccttttcccccaatttgatccctttttttggttgctggctgatagttgatctttatgtaacataattttcttaatgaaatgatacacaactcttctatgtgttcgacaaaaaaatgaattgaacatagctgagtcatgctccttaaatttgactttctatttcactgccttcatactgattcagtgaaacattgtcaattatatatgtttgtgaggtgatgctattagagcctttttactttctccatctaggttcagcccgattgaacatttaaagtggtgtatggacaccattcaaatatatatgcttcatacgccatattgttatttaatctattttagcgttctcctaatcatatcattttattccaggatgcttgtgtacgagtatgtgaataatgggaatttagaacagtggcttcatggtgcaatgcgtcagcacggtgttcttacttgggaggcccggatgaaagtcgttcttggaattgccaaggcgtaagaaatgaaaccattcacaattttgcatcttttatatgcatacatttattaaattaagatgttgtctacaactgaacactatacaggcttgcttatttacatgaagccatagaaccaaaagttgtacaccgtgatatcaaatcgagcaatatcttaattgatgaagaattcaatggcaagctttctgattttggactggccaagctcttgggtgctgggaagagccatatcacaacacgagttatgggcacattcgggtatgtttttttatgggaacattccgaagtatgtcttttcttcactaactggaacctatagtcttcacacgcagtaggaagtttacatacagagcttagttttccattttttaagaagaattagctctgcaggggaagcaaccattcatctttttatttcaccacggtttcaggtatgtggctcccgagtatgccaatacaggtctgttaaatgagaagagcgatgtctacagttttggggtgctactactggaagcagtgactgggagggatccagttgactatggtcggcctgctaatgaggtgagcatctgctattgtagtatcgcctcgtgcatatactgaagcaagaagtccatactatttacaatacgtttcacaacaaaacagcatctgcttggtaggaggcataatatttgtcagatgtatttatatcttgtgtttatgccttgtagccttacggcaatagtacttttatatgtatgcttggagctgtgtccgatctgaatgttgaccagctacaaaagccctattaataacatggtggttgtgcaggttcatctggtggagtggctgaaaatgatggttggcactagaagagccgaggaggtggtggatcctgacatggagttgaagccagcgattcgtgctctgaagcgcgctcttctagtggcactgcgatgtgtagacccagatgctgagaaaaggcccactatgggtcaggttgttcggatgctcgaggcagaagacgtgccttcacgggaggtttgttgtacatcttgagctttgttctgtcgataccgtaattccttgtgcagttgttctaaatcttgtgctgtgtgatcctctgaaggaccgtcggagccggagaggccacagcagcaacgcagacaacgagtccaaggcaagttcaagcgagtttgagataagcagtgaccgaagagagtcggggccgtcatcgaggttccaggcc

SEQ ID NO: 2079 - DNA, 2151 bp, Zea mays
gaaagcattgcatcccctctccccggagcggagagccggcgggccggcctcccatcgcatggccaccgcactgacgtgacgccgccgagggattgaggacccaagacctccagctggaggaatcgggagaggaaggagcggtcgcgcgcccttcgccacgtcttgcgtcgtcggggggcccggcccttcgccgacgacgacgagcacccaccacgtacgcccgccacctctccctccccttcatgccgcaccccaaaccctaatgttgctgaggaacagagatgtcgacgacaggcgaaatcctgaggtcggagctatcttccaggacgccgccgttcggcctgaggctatggattgtcattggcatctgcatctgggtggcgatcctcttcatcataggcttcatgtgcttctggtccatataccggaggaagcccaccaagtcgtccttcgacagtaccaatgacatcccggtgtcccagatcccggacgtctccaaggagattgcggtggacgaggtgcgtgagcacgctgccgtgcagaccttccatgtgcacgagagctgccgcgcgctggccgtgcaggagaagccctgcgagaaggattccgggagaatgctggggcacctggtcaggagcaagtcgagcgacgctgataatctcagccagtgcagctctgcggcgtaccagtgcgagagggctgcaagctcgtactctggcgacgagggcagctcgggcaacgccaggaggcagtatcccactgtctccgcgtctccgctggttggtctccccgagttttcgcatctcggatggggccattggtttactctcagggatttggagcatgcgaccaatcgcttctccaaggagaatgtcattggggaaggtggatatgggattgtttaccgaggtcgcctcgttaatgggaccgatgtcgcaattaaaaagctccttaataacatgggtcaggcagaaaaggagttcagggttgaggttgaggcaattgggcacgtcaggcataagaatcttgtacgccttctaggatactgtgtcgagggtatccacaggatgcttgtgtacgagtatgtgaataatgggaacttagaacagtggcttcatggtgcaatgcgtcagcacggtgttcttacttgggaggcccggatgaaagtcgttcttggaattgccaaggcgcttgcttatttacatgaagccatagaaccaaaagttgtacaccgtgatatcaaatcgagcaatatcttaattgatgaagaattcaatggcaagctttctgattttggactggccaagctcttgggtgctgggaagagccatatcacaacgcgagttatgggcacattcgggtatgtggctcccgagtatgccaatacaggtctgttaaatgagaagagcgatgtctacagttttggggtgctactactggaagcagtgactgggagggatccagttgactatggtcggcctgctaatgaggttcatctggtggagtggctgaaaatgatggttggcactagaagagccgaggaggtggtggatcctgacatggagttgaaaccagcgattcgtgctctgaagcgtgctcttctagtggcactgcgatgtgtagacccagatgctgagaaaaggcccactatgggtcaggttgttcggatgctcgaggcagaagacgtgccttcacgggaggaccgccggagccggagaggccacagcagccacgcagacaacgagtccaaggcaagttcaagcgagtttgagataagcagtgaccgaagagagtcggggccgtcatcgaggttccaggcctaactcccagtgagagcacggcagattaccatctccaagaacccggtttcagttcagtacgccgggttatcccttaccttgcctgctcgatcatggactcaggccgttcgaaatatttgggaatccttgcggggtggggctttattggatggttggtactgatagagataggggaaggcttgcatcttgtgctggagtaggtattttactcccatttccttggtggtgggcggagtcggatcgattccgtgggaggggaggttgagacttgtggatgtggatcctattcgtgttctgtttgcccagcagcatgtacagaaactttattatt

SEQ ID NO: 2080 - DNA, 1028 bp, Zea mays
ctccgccccacgcagctgaggagctgatcctcaccggcgtcgccatcgtaatcgccttggacagcggcaccagaacctctgcctccgcaggtgcttgctggtatcattacaatctggtagttttagtggttgggcttgacttcctactattcagaaacacagtaccgagaagtctttaggtggggtcaaagatggtgtcgctgaagttgcaaaagcgccttgccgcgagctacctcaagtgtgggaaaggcaaggtgtggcttgacccaaatgaagttagtgagatctccatggcaaactcccgccagaatatccggaagttggttaaggatgggtttatcatcaagaagcctcataagatccactctagatcccgtgcaagaagggcacatgacgccaagcaaaagggacgccactcaggatatggtaagcgtaggggtaccagggaggctaggctacccaccaaggttctgtggatgaggaggatgcgtgtgctgaggcgccttctccgcaagtatcgtgaggccaagaagattgacaagcacatgtatcatgacatgtacatgaaggtcaaaggtaacgccttcaagaacaagagggtgcttatggagagtatccacaagtccaaggctgagaaggccagagagaagacactttctgaccagtttgaggccaagcgcgccaagagcaaggcgagccgtgagaggaagatcgctaggagggaggagaggttggcccagggtccacgagaaataacaccacctgtctcatccacagctccagctactggggcaccgaagaaagcaaagaagtgaagtattgaaataaagctgtagctttctagtccagtactgcactttcttttataagctctagtcaaattttggagcgcctgaactgttttgctgttatataacttagtgtattgataaattcgactatcacatctggattattctgctggataatgtccgtgtctttgatgtttgtgttaaattcctattctggatggaaaaaaaaaaaaaaaa

SEQ ID NO: 2081 - DNA, 1017 bp, Sorghum bicolor
ggcgctgatcctctccggtgtcgccatcgcctccagaacctccgcctcgtcagggtgcttgctattatcattgcaatctgatagttgcagtggttggggttgacttcctgctattcagaaaacgagtagcgagagcttatcggttgggccaaagatggtgtcgctgaagctgcaaaagcgccttgccgcgagtgttctaaagtgtggaaaaggcaaagtgtggcttgatccaaatgaagttagtgagatctccatggcgaactcccgccagaacatccggaagttggttaaggatgggtttatcatcaagaagcctcagaagatccactctagatcccgtgcaagaagggcacatgaggccaagcagaaggggcgccactcaggatatggaaagcgtaggggaaccagggaggctaggctccccaccaaggttctgtggatgaggaggatgcgtgtgcttaggcgcctgctccgcaagtatcgtgaggccaagaagattgacaagcacatgtatcatgatatgtacatgaaggtcaaaggtaactcgttcaagaacaagagggtacttatggagagtatccacaagtccaaggccgagaaggccagagagaagacactttctgatcagtttgaggctaagcgcgccaagagcaaggcaagccgtgaaaggaagattgctaggagggaggagaggttggcccagggcccaaaagatataactccaccagtctcagccacagcccaagccactggggcaccgaagaaagcaaagaagtgaaatattgaaacaaagctgtagctttctagtccagtacttcataagcactagccaaattttggagcgcctgaactattttgctgttatataactttttgtcttgatattcgaatatcatatctggatttttatgttggataatgtagtagagatgtctatgcagagttttgttgggacaggaatccccaaaaatgtttatttggatcagattatctcgggaaatgtggttatgttttatg

SEQ ID NO: 2082 - DNA, 968 bp, Sorghum bicolor
accacttgagccccctgcgccgcctgccgcattcccctgcgtcgccaccacacgcacacggaagcgagagcttatcggcggcggcgaagatggtgtcgctgaagctgcagaagcgcctcgccgcgagcgtcctcaagtgcggcaaaggcaaagtctggcttgaccccaatgaagtcagcgagatctccatggccaactcccgccagaacatccggaagttggttaaggatgggtttatcatcaagaagccccagaagatccactcaagatcccgtgcaagaagggcacatgaggccaagcagaagggaaggcactctggatatggcaagcgcaggggtaccagggaggctaggctccccaccaagattctgtggatgaggaggatgcgtgttctgaggcgcctgctccgcaagtaccgtgaggccaagaagattgacaagcacatgtatcatgacatgtacatgaaggtcaagggtaacatgttcaagaacaagagggtgcttatggagagtatccacaagtccaaggctgagaagctcagagagaagacactttctgatcagtttgaggccaagcgtgcaaagagcaaggcgagccgcgagaggaagattgctaggagggaggagaggttggcacagggcccgagagaaccaacagcaccagtctcagccactgctccatctgctggggcaccaaagaaagcaaagaagtgaagtattgaaacaaagctgcttgctagtactatataagcataattttggagcacctgaactattttgctgttatatagtttggtgtcttgatattctgagtgtcatatctcgactgttctgttggataatgcagtagagttgtttatggagtttcgttggaacaggatccccaaaaaatgtttatttgacagatgatctacagatgatgatctctggatgtgtggttatcttttatgaaaattagtcttatatctt

SEQ ID NO: 2083 - DNA, 1117 bp, Zea mays
cattttgggcacgtagccgccgtcgccgcctcgctttctcctcttccgccccaccccggtgaggcgctgatccatcgcctcggacagcggctccagaacctccgcgttgcagttgcagtggttggggttggcttcgtgctattcagaaacacagtagcgagaactattcggtggggccgaagatggtgtcgctgaaggtgccaaagcgcctcgccgcaagcgttctcaagtgtgggaaaggcaaagtgtggcttgaccccaatgaagttagtgagatctccatggcgaactcccgccataacatccggaagttggttaaggatgggtttatcatcaagaagcctcagaaaatccactctagatctcgtgcaagaagggcgcacgaggctaagcagaagggacggcactcaggatatgggaagcgtagaggtaccagggaggctaggctccccaccaaggtactgtggatgaggaggatgcgcgtgctgaggcgcctgctccgcaagtaccgcgaggccaagaagatcgacaagcacatgtaccacgatatgtacatgaaggtcaaaggtaactcgttcaagaacaagagggtgcttatggagagcatccacaagtccaaggctgagaaggccagggagaagacgctctccgatcagttcgaggccaggcgcgccaagagcaaggcgagtcgcgagaggaagaatgctaggagggaagagaggctggcccagggcccaagagaaataccaccaccagtctcagccacagctcccactaccggggcaccgaagaaagcaaagaagtgaagtattgaaacaaagctgcagctttctagtccagtacttcgtaattttggagcgccctgatcaattttgctgttatacagcttcgtgtcttttattttccaaaagctaccgtacctggattgttagagatgtttacgcagagtttctttggaagaggatccgctcaaaaatgtttatttggatcagatggtctcaggaaatgtggttatgttttatggaaatttatcctgttgctatttgattgatcaattgacgatggtgccccattwaaaaaaaaaaaaaaaaaaaaaaaargaaaaaaaaaaaaaaaa

SEQ ID NO: 2084 - DNA, 936 bp, Zea mays
ctccgccgcctgccgcactctcctgcgacgccacaaccacacgttcacggtagcgagagcttatcgtcgtcggcggtgaagatggtgtcgctgaagctgcagaagcggctcgccgctagcgtcctcaagtgtgggaaaggcaaagtctggcttgaccccaatgaagtcagcgagatctccatggctaactcccgccagaacatccggaagttggttaaggatgggtttatcatcaggaagcctcagaaggttcactctaggtcccgtgcaagaagggcacatgaggccaagcagaagggaaggcactctggatacggcaagcgcaggggtaccagggaggctaggctccccaccaagattctgtggatgaggaggatgcgtgttctgaggcgcctgctccgcaagtaccgtgaggccaagaagatcgacaagcacatgtatcatgacatgtacatgaaggtcaagggtaatatgtttaagaacaagagggtgcttatggagagtatccacaagtccaaggctgagaaggccagagagaagacactttctgatcagtttgaggccaagcgtgcaaagagcaaggcaagccgtgagaggaagattgctaggagggaggagaggctggcccagggcccaagagaaccaacagcacctgtcgcagccccagctccatctactggggtgccaaagaaagcaaagaagtgaagtatggaaacaaagctgtagctttttggtactatataagcatgactttggagcacctgaagtattttgctgttatatagttcgtgtctcaatattctgagtcttgtatctctaccgttctgttggataatgcatgccgtaagagttgtttatggagcttttgttgttacaggacccctaaaaatgtttgtttgacggatgtttggaattgtggtcatgtttatgaaaatt

SEQ ID NO: 2085 - DNA, 1089 bp, Zea mays
atatccacacctgagtcccctccgccgcctgccgcactctcccgcgacgccaccaccacacgttcacggtagcgagagcttatcgtcgtcggcggcgaagatggtgtcgctgaagctgcagaagcggctcgccgcgagcgtcctcaagtgtgggaaaggcaaagtctggcttgaccccaatgaagtcagcgagatctccatggctaactcccgccagaacatccggaagttggttaagaatgggtttatcatcaggaagcctcagaaggttcactctaggtcccgtgcaagaagggcacatgaggccaagcagaagggaaggcactctggatatggcaagcgcaggggtaccagggaggctaggctccccaccaagattctgtggatgaggaggatgcgtgttctgaggcgcctgctctgcaagtaccgtgaggccaagaagatcgacaagcacatgtatcatgacatgtacatgaaggtcaagggtaatatgtttaagaacaagagggtgcttatggagagtatccacaagtccaaggctgagaaggccagagagaagacactttctgatcagtttgaggccaagcgtgcaaagagcaaggcaagccgtgagaggaagattgctaggagggaggagaggctggcccagggcccaagagaaccaacagcacctgtcgcagccccagctccatctactggggtgccaaagaaagcaaagaagtgaagtatggaaacaaagctgtagctttttggtactatataagcatgactttggagcacctgaagtattttgctgttatatagtttcgtgtctcaaatattctgagtcttgtatgtattctgcctgcgtttcagattcagattttttttttattttggacccaatcaaccctgcactgccttgtcgaggaccgtggtccgtggatggcaatggttcttacttcttactggttatattatatatgctgcaagattgctagggggaaaaaaaaaaaaaaaaaaaaaaaaaaaaaaaaaaaaatcgtaaaaaaaaaaaaaaaaaaaaaaaaaaaaaaaaaaaaaaaaaaaacttaaaaaaaaaaaaaaaaa

SEQ ID NO: 2086 - DNA, 1502 bp, Oryza sativa Japonica Group
atggtttccctcaagctgcagaagcggctcgcctccagcgtgctcaaatgcggcaagggcaaggtctggctcgaccccaatgaggtcaacgagatctccatggccaactcccgtgagaactcccctcctcgtccctcccccccataaccctccccttgccctaccgtatgatgttctgtgcctgctacttgtgtggtgttgatgcgtgatttgcttagatctgaagccatgctgctaatccgcgcgaaaatttttgcccccggcgattctggtaggaatattttattgcttcgtgggaatcgcgtgctcccagttctataggagttgttaggttgttgtgctgggtgtatttgtttggaagagaacattagagaaatggccagtatattgaccttggagtgtatgctatctagattggaccatgcagtgttgttaccgattgatcaaggttgtcgttaggggttctaatccaaggcgctgttctgggaatgtgactaactgtcctctatagtgattaatatacaaagagacaaggggatgcctggcgcatttagatatgcatgtgcatttgtgcttcttcgttgagttattcgttacctaaatcagttaggatgctggcaattcatgcccaaatgatgattaccattaaaggatcagttttttgtcagttttgcaattgcaattccaacttctaaagctcattggttcattttgattctgcatcaccatttgtacaactgtggtatgatcctgtctgagcgtatgaattatggtgtagcttatctgcaagcgagtttgtgtaatgtcctattggaataggtcacaactcatttcctgcaagaaccaataaaatatcctattaattatttactgttctagatactgaagtttgttgccctgtatatatctgtgactcatatcacatgcctgaaattcttggaaggctatctgattttttttcctttgtgcttgcaggtcagaacatccgtaagttggtcaaggatgggttcattatcaagaagccccagaagattcactccaggtcccgtgcacggagagcccatgaggccaagcagaagggacgtcactctggctatggtgcgttgtgtacaattaagttcattgttattttagtgtgaaaatgtctctgcgtattccttattctgccattttgcaggtaagcgtaggggtaccagggaggctaggctccccaccaagatcctgtggatgaggaggatgcgtgtgctcaggcgtttgctgcgcaagtatcgtgaggccaagaagattgacaagcacatgtatcatgacatgtacatgaaggtcaagggtaacatgttcaagaacaagcgtgttctcatggaaagtatccacaagtctaaggctgagaaggcaagagagaagacactctctgaccagtttgaggctaagcgtgccaagagcaaggccagtcgtgagaggaagattgccaggcgtgacgagaggttggctcaggtgagacgatt

SEQ ID NO: 2087 - DNA, 1121 bp, Oryza sativa Japonica Group
ttgcaccccctcgcgcctccaccacacactcccacccaggtaaggagagggaggaggaagggaacctcgaaggcggcggcggcggcggcggagatggtttccctcaagctgcagaagcggctcgccgccagcgtgctcaagtgcggcaagggcaaggtctggctcgaccccaatgaggtcaacgagatctccatggccaactcccgtcagaacatccgtaagttggtcaaggatggattcatcatcaagaagccccagaagattcactccaggtcccgagcacggagagcccatgaggctaagcagaagggacgtcactctggctatggtaagcgtaggggtacaagggaggctaggctccccaccaagatcctgtggatgaggaggatgcgtgtgctcaggcgtttgctgcgcaagtatcgtgaggccaagaagattgacaagcacatgtatcatgacatgtacatgaaggtcaagggtaacatgttcaagaacaagcgtgttcttatggaaagtatccacaagtctaaggctgagaaggcaagagagaagacactctctgaccagtttgaggctaagcgtgccaagagcaaggcaagccgtgagaggaagattgccaggagggaggagaggttggctcagggcccaagagagccagcagctcctgcagcggcagctcctgctcaaactgcagcggcacctaagaaggcaaagaagtgaacacctggcttgaagtgtggtcgtcttagtgaaaccagtggaggtgttagctgaattttgaaatacgaaccgtttggcctagtatttaagtatcttccaaagtctgataccttgaacattatgtttcatgctgctggatgtagtagatgcttatgcaaagttgttttttcaaaggttgatggtgatcttaaccttataatttgtttgcttcaatttcttcatgcctgatcagaaattaacgtctttaccatccggtagtgtaccaatgctaagtgattgcattagtggccgtaaaattccggacagacgttgcttggcatggggtgtttgattggtcgtcatgttcttaacctgaatctttctggagccttggggaaagtgtatccaggaacacgttggct

SEQ ID NO: 2088 - DNA, 874 bp, Zea mays
caagacacaaccccactcacccggcagggaggccctcttcgtcggcggaggccatggtttccctcaagccgcagaagaggctcgccgcgggagtcctaaaatgtggcaaggggaaggtgtggcttgaccccaacgaggtctacgagatctcgatggctaactcgcgtcagaacattcgtaagctggtgaaggatggattcataattaagaagccacagaaaatccactcaaggtcccgggcaaggagggcccatgaggccaagcagaaggggaggcactctggttacggtaagcgcaggggtaccagggaggctaggctccccaccaagatcctttggatgcgcaggatgcgtgtcctcaggcgtctgctgcgcaagtatcgtgaagcaaagaaaatcgacaaacacatgtaccacgatatgtatatgaaagtaaaaggaaacatgtttaaaaataagagggtactcatggagagcatccacaagtcaaaggccgagaaggccagagagaagactctctcggatcagtttgaggccaagcgagccaagagcaaggcttcccgtgagagaaagattgcaaggagggaggagagattggctcagggcccaagggaacctgcggcagcaccagtatcagctactgctccgtttgcagctgcaccaaagaaggcgaagaagtgaaaaaggtggtcttctagttctaggacctaattttggagcgccccaactcttttgctgttacatatccaagctgtcagatatctgtaataacatcttatctcgtttttcatgttggacaatgtagtagagttgtttgtcccaagtgtatttggaacgaattttcacagaatctgcttaatgcttcggtggaaccc

SEQ ID NO: 2089 - DNA, 1642 bp, Oryza sativa Japonica Group
gtgcgcggcgcacgaaaacccgcacctcctccgcctccgcgcgcccctgctcggcggcctcctctcctctcccacccatggcgcccccaccggcttcctccctccccacggccgtcctcgcatggggttcgggggaggacgggcagctgggcatgggcggctacgaggaggaggactgggcgcggggagtcgccgcgctcgacgcgctcgccgtctccgccgtcgtcgccggcagccgcaactccctcgccatctgcgccgatggccgcctcttcacgtgggggtggaaccagcgcggcacgctcgggcacccgccggagaccaagacggagagctccccggcccccgtcgatgccctcgccggcgtcagcatcgtgcaggcggcgatcggcggatggcattgcctcgcggtggacgacaaggggagagcatacgcttgggggggcaacgagtatgggcagtgtggggaggaggctgagaggaaggaagatggaaccagggctctcaggagggacattccgatcccgcaggggtgtgcccccaagctgaaagtccggcaagttgctgctggagggacacactcggtcgtcttgacacaagatggccatgtttggacatggggacaaccatggcctccaggcgatatcaagcaaatatctacaccagtgcgggtgcaaggccttgagaatgtaaaggtgattgctgtaggtgcattccataatttggctctaacagaagatggaattttgtgggcatggggtaacaatgagtatggtcaactgggcactggagatactcaaccaagatcgcaaccaatccgtgttgaaggattatctgacctttcattggttgacattgctgctggaggttggcattcaactgcattaactaaagagggagaggtgtatgcttgggggagaggagagcatgggaggcttggatttggagatgataaaagtagtcacatggttccccaaaaggttgagcttcttgctggagaggatattattcaggtatcatgtggaggaacccattcagttgcgctaactcgtgatggacgaatgttttcttacggtagaggtgaccatggccgtctgggctacggcaggaaggtcacgacgggccacccgatggaagtccccatcgacctgccgccgccgggaaccagcggcggcgactccggcgggcaatggcaggcgaggtacgtcgcctgcggcgggaggcacacgctggccatcgcgacatggacggaggcagacgagtaatcgatcgcctcttggttttttaaagccaaatcccggagctggtacagataatactaccgagtacttttcgtgcaataagacaaggctaatgttaaaatgatctctgagatgtatgagctgagtgatgaataaacaaggaggaataaaagaatcgggatttttctttctgctgagataaataagcatggccatctcatcttctcgctatgaatgatttccaagtgaattcattaccctagggaaggaaaaacaaaagttgagaaatgacaacttttgtgacgtaatctgttcctttcttctttcctcccaaacttatttttaaatattattttttatcctcccgcaaagttaattattaaggtttgaaagttgtatgc

SEQ ID NO: 2090 - DNA, 1466 bp, Zea mays
cgaaaacccacatccaccgcggcgccacaccgcgtgcgtcggctgcttgctgccccgtgttccttggctcccgccgacaccgagcgccgacaccgagcgccgccaccgccatggctgccccgccccgcgccaccgcggtcctcgcgtggggttccggggaggacgggcagcttggcatgggcgggaacgaggagaaggactgggcacactgcgtggaggcactcggttcctacgccgtcaccgccgtcgtagccggtagccgcaactccctcgccatctgcgaagacggccgcctcttcacttgggggtggaaccagcgcggcacgctcgggcacccgccgaagaccaagacggagagctcccctggccccgtccacgccctcgcggggttgaagatcgtccaggcggcgattggtgggtggcattgccttgcagttgacgacaatgggcacgcctacgcctgggggggaaacgagtacgggcagtgcggtgaggagcctgagaggaaggaggacgggacgagggcgctcaggagggacatcccgaccccacagcggtgcgcacccaagctcaaagtccggcaagtagctgctggagggacacattcagtggttttgactcaagaaggtcacgtttggacatggggacagccatggcctcctggtgatatcaagcaaatatcgacaccagtacgcgtgcaaggccttgagaaagtgagggtcattgctgtaggtgcattccataatttggcactcacagaggatggaattttgtgggcatggggtaataatgagtatggtcagctggggactggagatacccaaccaagatcacaccctatacgcgttgaaggactatctgatctctcactggttgacattgctgctggaggctggcattcaactgcactaactatacagggagaggtgtatgcttgggggagaggagaacacgggaggcttggatttggagatgataagagtagtcgcatggtccccctaaaggttgagcttctagctggagaggatattgttcaggtatcatgtggaggaacacattcagttgctctaactcgagatggccggatgttttcttatgggaggggcgaccatggccgtctgggctacggcaggaagctgacgacaggccagcccatgggagtggacattgacctgccgccgcccaagacccgcagcagccgggacgggcagtggcaggcgaagtacgtggcttgtggcgggcggcacaccctggctattgtggtgtgggcagagaccaccgactgatcacggagtgatcaacttcctgaatcctaatctgggtgcaaatctgagtttgacaatcctgctagataattatagtgttagtgaaataagcataagttatgcgacattaggcatcataaatttttatgtatgtgcttaatttggcaaggaacaaaaatagtcgggaagaggactttgtgc

SEQ ID NO: 2091 - DNA, 1403 bp, Hordeum vulgare subsp. vulgare
gagaaggtaggcggccctcaccaaccccaatcccacctcccggacagggccgcaacaaaagcctccagcgctgcattcttgcgctatctccccaccgcttcccggccacctcagaccttgagccgcgcaccgccgccgacccctccccacaccccatatggcgccgccttcccgccccgtagccgtcctcgcatggggttcgggggaagacgggcagctgggcatgggcgggtgcgacgagaaggaccgggcccgctgcatctgcgctctggatgcgtacgccgtctccgccgtcgtagccggcagccgcaactccctcgccatatgcgacgacggcagcctcttcacttgggggtggaatcagcggggaacgctcgggcacccgccggagaccaagacagagagctccccggcgcatgtcgacgccctcgtcggtgtcaagatcgtgcaggcagcgatcggcggctggcattgcctcgcggtggacgacaaggggcgggcttacgcttgggggggcaacgagtatgggcagtgcggggaggagcctgagaggaaggaagatggcacaagggctctcaggagggacatccccatcccgcagcgatgcgctctcaagctcaaagttcggcaagttgctgcgggtggcactcattcagtggttttgacacaagaaggtcatgtttggacatggggacaaccgtggcctccgggtgatatcaaaaacatatctacgccagtacgtgtgcaagggcttgagcaagtgagcatgattgctgtaggggcattccataatttggcactgtcagtagacagaatcttgtgggcatggggtaataatgaatatggccagctggggattggagatacccaaccgagatcacaaccaatccgtgttgaagggctatctaacctttcattggttgacattgctgctggaggttggcattcagccgcattaactaaagaaggagaggtatatgcttggggaagaggagaacatgggaggctcggctttggggatgataagagcagccacatggtgccactacaggttcagcttctagctggagaggatattgttcaggtatcatgtggagggacccattcagttgtgctaaccagtgacggccggatattctcttacgggaggggcgatcatggccgtctaggcgacggtaggaaggtgactacgggtcacccaatggaagtgcccataaacttgccgccaccaaagaccagcaccagctccgaagggctatggcaagcgaactacgttgcctgtggcggacggcacacactggccatcgtgacatggaccgatatgtaactaggcataatcactgagtgtatgaaatgaaattgtggtaacagtaatggagaataagaactagaaattgtgcact

SEQ ID NO: 2092 - DNA, 1614 bp, Vitis vinifera
cggcagaatcagcttccaattccccaacttgcgtcaccaagcactcagccactcaccgcaatagcagcatacataacagaggcaaggcaaacttgaagccttccacttttgagtcccagaaatggcctccaaacccaaagccataatctcatggggctccggcgaagatggccagttgggaatcgggaacaacgaagagaaggagtgggtttgcgccgtcaaagctctcgccgcccagaatgtttgctccgttgtcgccggcagtcgcaactctctcgccatttgcgaagacggcaagttgtttacatggggatggaaccaaagaggaactctgggacatccgccggagactaagactgagaacattcccagtcaggttaaggctcttgccaatgctaagattgttcaggcggctattggtggttggcactgtttggcggttgatgatcaaggccgggcttatgcttggggtgggaatgagtatggtcaatgtggtgaagaacccgaaaggaaagatgacactggcaggcctttgaggagagatattaccattcctcagcgttgtgcatcaaaactttcagtccgccaggtagctgctgggggtactcattcagtggtgctcacgcgcgaaggacatgtatggacatggggacaaccatggccccctggtgacataaaacaaatttcaactcctgtgcgagtacaaggccttgaaaaagtgaggctaattgcagttggggcatttcataatctggctctcttggaggatggaatcttatgggcatggggtaacaacgaatatggacaacttggaactggtgatactcaaccaagatcacaacccattgctgttcaagggctatctgatcttacgttggttgatattgctgcgggaggatggcattctacagcattgacagatgacggaggggtgtatggttggggtagaggagaacatggaaggcttggatttggagatgacaagagcagtaaaatggtgccccaaaaggttcagcttctagtcgaggagaacatagttcagatatcttgtgggggcactcactctgttgcattaacacgcgatggacgaatgttttcatttgggcgaggggaccatgggcgccttggctatgggaggaaggtgaccactggccatccgatggaagtacctataaacctcccaccagcaactaatctcagtggcagtggagctggaggacattggtgctccaaacttgttgcttgtggtggtcgtcatactttggcaatagtagaatggctggcccatgaacctgaacagttgatatgaaagaactgtatcgcgaggtctagtctacctacaagccaaacttttatatgacacacatacagtcaaagagattaaactcaaaataaagtgatataagaaaggacattttcatatatttactgtcagcctttttcttttcaaactgtttggctgatttcttacccaaaacttatatgctctgctcttatatcgtccatatgggttttcaggttttgggttcttgttattttgtcaccttagctactagacttgtgggtgggccacttattgttgacatcaatatcttatgggactgcacttctcta

SEQ ID NO: 2093 - DNA, 1179 bp, Populus trichocarpa
atggcaactgagtcctctgtgattgcctggggatcaggtgaggatggacaactagggataggaaataacgaagaaaaagaatgggtttgcattgtcaaagctcttgagccttacaaagttcgctctgttgttgctggaagccgcaactctcttgccatttgtgatgacggcaagttgtttacttggggttggaaccaaagagggacattagggcatccaccggagaccaagactgagaacattcctagccaggtcaaggctcttgctaatgtcaacattgttcaggcggctattggtggatggcattgtttggctgttgatgatcaaggacgtgcttatgcttggggtggaaatgaatatggccagtgtggtgaagaacccgagaggaaagatgacactgggaggcctttgagaagggatatagtcattccccaacgttgtgcatcaaaacttgtagttcgccaggtagctgctgggggaactcactctgtggttctcacacgtgaagggcatgtatggagctggggtcaaccatggcctcctggagacataaagcagatatctgtccctgtgcgtgtacaaggccttgaaagagtgaggctcattgcagttggagcatttcataatttagctcttcaagaagatggaactttatgggcttggggtaataatgaatatggacagcttggaaccggtgatacccagccaagatctcaacctattactgtccaaggactttctggtctcactttggttgatattgctgctggtggatggcattctactgcattgactgatgatggggaggtgtatggctggggaagaggtgaacatggaaggttgggttttggagataatgacaagagcagtaaaatggttccccaaagggttaatcttttagtaggggaggacattgttcaggtatcttgtggcgggactcattcagttgcattgacacgtgatggacggatgtatacatttggtcgaggtgaccatggacgacttggatatgggaggaaggtgactacaggccaaccaatggaagtgccaatagacatcccaccccctaaaaatcttactgacagtggagatgcgggacgctggattgctaaacttgttgctagtggaggtcgccataccctggccattgtggaatggcacactggtgattctaaatag

SEQ ID NO: 2094 - DNA, 1182 bp, Ricinus communis
atggctactcacacttcccttattgcttggggggcaggtgaagatgggcaattaggaattgggattaatgaagagaaagaatgggtttgtgttgttaatgctcttgagccttataaagttcgctctgttgttgctggtagtcgtaactctcttgctatttgtgatgatgggaagttgtttacttggggttggaaccaaagagggacacttggacacccagctgaaaccaagactgagaatattcctagccaggttaaggctcttaacaatgtcaacattgttcaggctgctattggtgggtggcattgtttggctgttgatgatcaaggccgtgcatacgcttggggtgggaatgagtatgggcagtgtggcgaagaacctgaacggaaggatgacactgggaagactttgagacgggatatagtgattcctcagcgttgtgctccaaagcttgtggttcgccaggtagctgctggaggtactcactctgtagtgcttacacgtgaaggacatgtgtggacttggggccaaccatggcctcctggagacataaagcagatttctgttcctgtgcgggtccaaggccttgaaaaggtgaagctcattgcggttggggcatttcataatttagctcttcaagaagatggaactttgtgggcatggggtaacaatgaatatggacaacttgggactggggatacgcaacctagatcacaacctattcctgtacaagggctctctggtctcactttggttgatattgctgctggcggatggcattctactgcattaactgatgacggagaggtatatggatggggtagaggagaacatggcaggcttggatttggagataatgacaagagcagtaaaatggtgcctcaaaaggttaatcttttagctggggaagacattgttcagttatcttgtggcgggacgcattcagtggcattgacacaagatggacgaatgttttcatttgggcggggtgaccatggacgtcttggatatggaaagaaagtgacaaccggtcaaccagtggaagtgccaactgacatccctcctcctaagagtcttagtggcactgaagaagccgagggacattggattgctaaactggtcgcttgcggcggacggcatactctagcaatagtagagtggaaggttgacgaatcaaaataa

SEQ ID NO: 2095 - DNA, 1513 bp, Picea sitchensis
ggggaggcagcagcatataattcgtcactttcgagcggtggaaagtgtagtggcattactggaatggagtcagatcacgcagtactcgcctggggttcaggagaggatgggcagttgggagtggggaacatggaggataaggattgggtctgcagcatccaagccctggcatcgcacggaaagcgcgtcgtctctgtggtggctggcagtagaaactctcttgccatctgtgaagatggtcagctatttacgtggggatggaaccagcggggcacattgggtcatcctcctgaaagcaagactgagagcactcccacccaggtgaaggctctggagaatgtaaagatcgttcaggcagccattgggggatggcattgtttggcagtggatgaccaagggcaggcttatgcttggggtggaaatgaatatgggcaatgtggagaagagccagaaaggaaggaggacggcagcaaagtgttaaggcgggatatagcgattcctcagcgctgtgccccgcaacttcgcgttcgtcaggtggcagctggaggcacacactctgtagtgcttacacataacgggcatgtctggacatggggtcaaccgtggcctccaggggatataaaacagatttctactccggttcgtgtgcaaggcttggaaaatgtgcagctgattgctgttggtgcattccacaatcttgctcttctggaggaaggagaagtctgggcgtggggaaacaatgaatatggacaacttgggacaggcgacacccagccaagatcacagcctgttcctgtccaagggctttctggtctcattttggctgatattgcagcaggaggatggcattccacagcattaacaactgatgcagaggtatatgcatggggcagaggtgagcatggaaggttaggctttggtgatgacaaaagcagcaaaatggtgccacaaaaggtgcatctccttgcaggtgaaaccattgcacaggtgtcttgtgggggaacacactcagttgcacgcacagctgatggacggatattttcttatggaagagcagatcatggtcgtcttggatatggacgaaaagtgacaactgggcacccaatggaagtgccaataggcatacgaccccctaaaaatgctgccgaaaacagtggttgctggtttgtcaagcttgttgcatgtggaggtcggcatacacttgctactgcttcatgggaatcagaagagctttaaacgcttaaatgaatgtcagttttcatgtaattggatttgcttcaaacactcttttccataagagactctattcctagtaactgtattagtattttttacactgtaggcaggctctactgttgtgcttttttatgtcaacaaatcacggggatgggtaagatctgtatttagtcaaatattccaatgaaagaaacatattcgaaagaacttcaaagtacttgctacatgtatacatgcttgtattgattttgtgttcttgcaaaaaaaaaaaaaaaaa

SEQ ID NO: 2096 - DNA, 1397 bp, Arabidopsis lyrata subsp. lyrata
gtatctctcactttgggttccatggcttcagctacttccgtcatagcctggggctctggagaagacgggcaactaggacttggaaccgatgaagaaaaggaattggcttccgtcgtcgaagctcttgagcctttcaacgttcgctccgtcgtcggtggtagccgcaattccctcgccatttgcgatgatggcaagctgtttacatggggttggaatcaaaggggtacattaggacaccctccagagacaaaaacagaaagcacccctagtctagttaagtctctagccagcgtcaagattgttcaggcagctattggtggttggcattgtttagctgttgatgatcaaggccgagcatatgcttggggtggaaatgaatatggacagtgtggtgaagagccttccaaggatgagacaggtaggcctgtgcggagggatattgtaatccctaagcgttgtgccccacaacttactgtccgacaggtagctgcagggggtactcactctgtggttctaacccgtgaaggttatgtatggacttggggtcaaccgtggcctcccggtgacataaaacaaatatctattcctgtcagagttcagggtcttgaaaatgttcgtctgattgctgttggagcatttcataatttggctctgaaagaagatgggactttgtgggcttggggcaataatgaatatggacaacttggaactggagatacacaaccaagatcttttccgattccagtccaaggccttgatgatctcactttggttgatatcgctgcgggtggatggcattcaacagctttaaccaatgaaggagaggtgtatggttggggaagaggagaacatggaaggctcggatttggtgacaatgacaagagcagtaaaatgcttccgcagaaagttaatctcttagctggagaagacatcattcaggtctcttgtggcggaactcattcagtcgctttgacaagagacggtaggatcttctcgtttggtcggggagaccacggtagactcgggtatggaagaaaagtgactacgggacaaccattggagcttcctatagacattccacccctagaaggacggttcaatcacaccgatgaagaagacgatggaaaatggatagctaaacatgtagcttgtggtggccgacacactctagcaattgtggaatggaagtttgatcaagagggaacagaataaccatgaagaagatagagagagcaaaaaaaaaaattacacaagagggactctggagataagcatttgttatagagaaaaggggagcaaaagcatatggttaagcttttgacactcccatgaatgatgaatctatatcaaaaagaggaagaactaatatataatatcatcatgattttgtttttgat

SEQ ID NO: 2097 - DNA, 2653 bp, Zea mays
ctcctccctgtctcgtctcctcgtcgtggccacctcttcctctgctcccccttccaggggtcgttcttggagccccagttcctcgagctgcgtccgccggtggtcgcgtaggtggcggatgcccgcaatggggaggagcagccgcgcctgctcccttcttggttcaactcacctgctcctcctgctgctgctctcggtcggctccgccgtcgcccagaatggctctacctggaagaccctgagcggcaaggctccagcagtcgttgctaagggcgggttctccggactatttcccgattccagtgactatgcttatcagtttgttggcatatctagttcccctgacaccaccgtgtggtgtgatgttcggctgacgaaggatggtgctggtatctgcctaccgagcataaacatggataactgcacaataatagccagtgttttcccacaagggaagaagacctacaaggttaatggtgtatctacagcgggctggttctccgtagactatacaagcactgttctgctgcaaaacgtatctttgaagcaatcggtcctatctcgtacccctgcatatgatggtttgttccaaataaatcctgttgaaaatattttcaccttatataaggcacctgctgtttggttaaatgtccagcacgacagtttctacagccagtttaagcttagcatgagaagctatatcctgtccttatcgaaacaattcattgtcgattacatctcatcgcctgaagtgaacttcctcaccagtatatctggaagagttagcaagaagacaaagcttgtgttccgatttctcgacgaacgctctattgagccatcaacaaaccagacatatggctcaatgctgaaaaatctgacatttgtcaagacttttgcctctggaatacttgttcccaaaagctatatctggcctgttacaccagataattacctgctgccttatacttcagtggttgatgatgctcacaaagcaggactagaaatctatgctgctgattttgcaaatgacttaaccatcagctataactacagctttgatccattagcggaatatcttttcttcattgataacggtgccttctctgttgatggtgtattgactgatttcccgattactccttcagaggcagttggttgctttagtaacctgaacaccagcaagattgatcatgctaaacctctagttatctcgcataatggtgctagtggtgactacccagactgcactgaccaagcttatgaaaaggcagttgccgatggtgcggatgtcattgactgtcctgttcaagtgactaaagatggcatactgatatgcatgagctctgttgacctaatggatgttactactgttgcaaaatcacaatttgcttcgcaagtaactaccatcaacagtctgaaggctgggtctggagtcttcaccttcaaccttacttgggatgatatttctaagaacctaaagcccatgatatcgaacccaatgagcacctataatctgtacagaaatcctagaaacaagaacgcaggaaacttcatgagattgtcagactttttgacctttgcaaacggaaaggatttgtcaggaatcatgataactgttgagcatgctgcattcatggcagaggagcttgggtttggtgtggtagatgcagtgatcaaagcacttgatgactctggttatagcaaacagactgcccagaatgttatgattcagtcaaccaacagctcagttctggtgaagttcaagcaggaaaccaagtacaaccttgtctacatgatcgaagaaagtgtccgagatgccgcaccttcctcccttgcggacattaagaagtttgctgatgctgtttctgttggcaccacatctgttttcccggaaacccattactatttgacaaaccagaccaataagcttgttccgacccttaagtctgccggcctccaagtttacgtttacgtgctcatgaatgagtttgcttcccagccaaatgacttcttcgcagacgccacttcacagatcaatgcttatgtgcaaagtgctaaggtggatggtgtcatcactgatttccctgggactgctcacagatacaaactgaactcctgcacgagcatgggaaagaacatgccactattcatgcagcctccgcaaccaggtggcctcctttcaaccattctcccagatgcacagccaccagcagcagcgccaatgccgctcttgacggacgctgacgtcgcagaaccagcccttcctccggtcagcaacaccaccacggctgcatcgccttcgcatgccgccctcagaatgcgaacccatgtcttgagcatcgccacattgctgatgctatgtgcttccctcctcatctgaagatagtcctgctcaacatcatacgcggcgtggcgcattagagctgaggattttcacattgagctgctaatagcaattctttccaccacctttatgtagctatttttttcttgttctgtccggtgttttggaggatggatggatgttcagcttgatacctcaaaggtggcacttgagcgtgctgccagctgtctctaggtacattttggtacatacgtgtggtgatacattgtccatgtcaccgtttctactgccaacctgcctgtggagggc

SEQ ID NO: 2098 - DNA, 2823 bp, Oryza sativa Japonica Group
ccttctcctgttggcttcatcaccacagctcagcagcatcatcgccttcgccttcgcctccctcccttctccccgtctccatttcttttgtctctctctcgctcttcaaatccagctgctgccgtacgaacgcgcattgcctcagcagttcttggctcctcgcctcgcctccggttcgcctccggttcgcccccatctcggggttggaggtgagcttggagctccctgttcttggaggagccgctggttcagctggtggtgttcttcgatggggaggggcagccatggctgctccgttcttgggtcgtcgctgctgctgctgttctgtctgggctccgccgccgcgcagaaggcctcgacttggaagacactgagcggcaatcctccagcaatcatcgccaagggcgggttttcaggcctttttcctgattccagtgattttgcttatggctttgttgcggcggccagctctccggatacagccctgtggtgtgatgttcaattaaccaaggatggtgcaggcatctgccttccggacatacgaatggataattgcacaaacatagctaatgtttatccaaaggggaagaagacttacagtgtcaatggtgtatctacgcctgggtggttttccgtggactatgacagcactgggttgagtaaagtaaacttggtacaatccctattctcccgtgtgccttactatgatggaactttacccatacttcctgttgaatctgtatttgctaattataaggcccctgctgtttggctaaatgtgcagcatgacagtttctatagccagtttaatctgagtatgagaagctatatcctgtctgtttcaaaacaatatattgctgactacatctcatcacctgaagtgaacttccttaccagtttatcaggaagagttaacaagaagacaaagcttgtgtttcggcttcttaatgaactcgctgttgagccatctacaaaccagacatatggctcaatgttgaaaaatctaacattcatcaagacttttgcatctggaatacttgtccctaagaactatatctggcctgtaacacaagacaattatctgcagcccagcacatcggtcgttggtgatgctcataaagcaggactagaagtttatgccgctgattttgcaaatgactttttgctcagctacaactacagctatgatccattaacagaatatcttaacttcattgataatggtgccttctctgttgacggtgtattgactgatttccctattaccccttcagaggccattggttgctttagtaacctcaacaacagcaagacagacaatgcgaaacctctcatcatctcccacaatggtgctagtggtgactacccagattgcactgacctagcttatcaaaaggcagttactgatggtgcagatgtcatcgactgtcccgtacaagtaaccaaagatggcatacctatatgcatgagttccattgacctaatggatgtcactactgtttcaacgtcacaattttcttctcaaacgactgtcataaaagatatcaagaatggtgctggagtctattccttcaacctcacatgggatgatattgcgaagaacctgaagcccaagatatcaaacccaatgaccacatttgatgtgtacagaaatcctagaaacaagaatgcaggaagtttcatgagactatcggacttcttggcctttgcaaaaggaaaggagttgtcaggagtcatgatcagtatagagcatgctgcattcatggcagaaaaacttggatttggtgtagtagatgcggtgatcaaagcccttgatgactccggctatagcaaacagactgcccagaaagtcatgattcagtcaaccaacagctcagtactagtgaagttcaaggagcaaaccaagtacaaccttgtttacatgcttgaggaggatgtcagagatgctgcaccttcctcccttgcagatatcaagaagtttgctaatgctgtttcagtccgcacaacgtccatttacccggagagcaaacattatttgataaaccagaccagtcatatcgtccagaccctgcagtccgctggccttcccgtttatgtttacgtgctcatgaacgagtttgtttcgcaaccgaatgacttcttcgcagacgccacaacacagatcaacacatacgtgcagaagaaaggtgctggagtggatgggatcatcacagatttccctgcgacggtgcacagatacagactgagcccctgcacgagcaaggaaagcaacttgccgaccttcatgctgcctgtccagcccggtggcctcagcgggaccatcatcgatccagctgcacagccaccagcaatggcgccaatgcctctcttgacggactccgacgtcgcggaatcacccctaccgccggtcaagaacgtcacagctccagccccgggcgcttcacgagccatcaagatgcggaccgacgcctcgatcatcgtcgcgctgctggtgctatgcgcttctctgatcatatgatctaagtgtagtcttcacctctcctgtgtagcagaagcatggcggggctagagcttttgagaatttgtgttgagctacggatagttattctttttattttaccactcctacgtagccattcttttctcttctttttttttcttttgctgtattcttggggatggatgttcagcttgataccttgacgcctggcactattgtgggctgccgcccctagctactacattttggtacatatgtgtgatgcaatgaattgtttcagtttctggccgtatatctgaaatctgtctgaaatgctagttggg

SEQ ID NO: 2099 - DNA, 3034 bp, Sorghum bicolor
cttctcctccggtatctgtatcccacccagacacagctcagcagcagcatcgcatcgcctcgcccccgatttcttttgtctctctctatctccagtcttaaaaatccaacgccaacgcggccgccggacgcgcattgctctccctccctggctcgtctcctaatcatcgccacctcttcctctgctccccctcccaggggccgttcttggagctccggttccttgagctgcgcctgcgtctgctgctgacgccgccgccggtggtcgcgtaggtggtggcggcccgcaatggggagaaggagcagccgcgcctgctcccttcttggttccgcccagctgctcctgctgctgctctcgctcgcgctcggctccgccgccgcccagaagggctccacatggaagaccctcagcggcaaggctccagtaatcgttgctaagggcgggttctctggtctatttcctgagtccagtctatatgcttatcagattcttgggagtcttagctcccctgacacagtcatgtggtgtgatgttcggttgacaaaggatggcggtggtatctgcctaccaagcatagacatggataactgcacaacgatagccaatttttttccacaagggaagaagacctacaatgttaatggtgtatctacggtgggatggttctccgtggactacacaagcactgatctgctaaatgtatctctgaagcaatcggtcctatctcgtaccggtgtatatgatggtatctttccaataattcctgttgaaaatgtttacacccagtttaatcccgttgctgtttggttaaatgtccagcaagacagtttctacagccagtttaagcttagcatgagaagctatatcctgtctttattgaaaaattttgttgtcgattacatctcatcgcctgaagtgaacttcctcaccagtatatctggaagagttagcaagaagacgaagcttgtgttccgctttcttgacgaacgctctattgagccatcgacaaatcagacttatggctcaatgttgaaaaatctaacgtttgtcaagacttttgcctctggaatacttgttcccaaaagctatatctggcctgttacaccagataattacctgctgccttatacttcagttgttgatgatgctcacaaagcagggctagaaatctatgctgctgattttgcaaatgactttactatcagctataactacagctatgatccattagcagaatatctttccttcattgataatggtgccttctctgtcgatggtgtattgagtgattttccaattactccttcagaggcagttgattgctttagtaacctgaacaacagcaagatcgatcatgctaaacctctagttatctctcataatggtgctagcggtgactacccagactgcaccgaccaagcttatgaaaaggcagttgctgatggtgcagatgtcattgactgtcctgttcaagtgaccaaagatggcatactgatatgcatgagttctgttgacctcatgaatgctactactgttgcaaaatcacaatttgcttcgcaagtaactaccatcaacgatctaaaggctgggcctggagtcttcaccttcaacctcacttgggatgatatttctaagaacctaaagcccatgatatcgaacccagcgatcggctttaaccagtacagaaatcccagaaacaagaatgcaggaaatttcatgagattatcagactttttgacctttgcaaagggaaaggatttgtcaggaatcatgataactgttgagcatgctgccttcatggcagaggagcttggatttggtgtggtagatgcagtgatcaaagcccttgatgactctggttatagcaagcagactgcccagagtgttatgattcagtcaaccaacagctcagttctagtgaagttcaagcaggaaaccaagtacaaccttgtctacatgattgaagaaaatgtcagagatgctgcaccttcctcccttgcagatattaagaagtttgctagtgctgtttctgttagcaccacatctgttttcccggaagaccattattatttgacaaaccagaccaataatcttgttaagtcccttaagtctgctggcctccaagtttacgcttacgtgctcatgaatgagtttggtactcaaccaaatgacttcttcgcagacgccactgtacagattaatgcttatgtgcatgtgcgaggtgctaatgtggatggggtcatcactgatttccctgggactgctcacagatacaaattgaactcctgcacgagcatgggaaagaacgcaccaccctttatgtcgcctccaaaacctggtgacctccttacaaccatgcccccatttgcacaaccaccagcagcggcgccaatgccgctcttgacggatgctgacgtcgcagaaccagccctacctccagtcagtaacaccaccacgcctgcatcgccttcggatgctgccctcatgatgcggactgatgtctcgatcctcatcacattgctgatgctatgtgcttccctcctcatctgaagatagtcctgcacaacatcatacgcggcgtggcgcattagagttgaggatttcacattgagctgctaatagcaattctttccaccacctttatgtagcgattctttttcttgttctatccggtgttttggaggatggatggatgttcagcttgataccccaacggtgacacctgtgtgtgctgccgctgcctctaggtacattttggtacatatgtgtggtgatacattgttcaggtcatctttcctactgccaacctgccgctggagggcaagatattgactgcaacattacttgggtttgttagaatgcgctccaatccatctcaatccacatggattcgaagggattgtggtgtaaacttagttaattttctaccataatctctgccaacccgtgtgaactgggggtgaatttgtgtgtatccaaaattccaaacaagcgcttgggagctttgaaaaggagtaaaatatatttgaggccc

SEQ ID NO: 2100 - DNA, 1627 bp, Zea mays
cggaaacccacctccacggcggcaccccgtgcgtcggctgcttgctgccccagtgccgccccgcgttcccttcgctcccgccgacaccgacgccgccactgccaccgccggcatggcgaccccgctccgcgccaccgcggtcctcgcgtggggttccggggaggacgggcagctgggcatgggcgggaacgaggagaaggactggccccacttcgttgaggcgctggggccctacgccgtcaccgccgtcgtcgccggcagccgcaactccctcgccatctgcgacgacggccgcctgttcacatggggatggaaccaacgcggcacgctcgggcacccgccggagaccaagacggagagctccccgggccccgtcgacgctctcgcgggtttcaagatcgtccaggcggcgattggcgggtggcattgcctcgcagttgacgacaaggggcgcgcctacgcctggggtggaaacgagtacgggcagtgtggtgaggagcctgagaggaaggaggacgggacgagggcgctcaggagggacatcccgatcccgcagcggtgcgcgctcaagctcaaagtccggcaagtagccgctggagggacacattcagtagttttgactcaagaaggtcacgtctggacatggggacagccatggcctccgggtgatatcaagcaaatatctacacctgtacgtgtgcaaggccttgagaaagtgagggtcattgctgtaggtgcattccataatttggcactaacggaggatgtaattttgtgggcatggggtaataatgagtatggtcagctggggactggagatacccaaccaagatcacaaccgatacgtgtcgaagggctatctgatctctcactggttgacattgctgctggaggctggcattcaactgcactaactatagatggagaggtgtatgcttgggggagaggagagcacgggaggcttggatttggagatgataagagtagtcacatggtgcccctaaaggttgagcttctagctggagaggatattgttcaggtatcatgtggaggaacacattcagttgcgctagctcgagatggccgaatgttttcttacgggaggggcgaccatggccgtctaggctacggcaggaaggtgacgacgggccaccccatggaattgcccatcaacctgccgccgctcagcagcagccgcgacggtcggtggcaggcgaaatacgtggcttgtggcgggcggcacaccctcgctattgcggagtggacagaggccactgattgatcaccgtttgtggaataagcacaaggccggtgccaacgggcgtaggtggggctgcagtcgatggcgctgccggccgccgcggtcggtacttaccagaagtagttcagtaccgactgccattgccatgtgtcgtcttttaattagttgatgtccaataaattcataagttttttttaaaaaagtctaagtaatctgaaaaggtatttatgaattatgtaacttttttactttttggtattatgtattttttatgttttatgagttatgtaaattttatttatgatttataaattacatactgtgtatttatattcatgaactatatacttttttatttgtttactt

SEQ ID NO: 2101 - DNA, 1397 bp, Arabidopsis thaliana
gtatctctcacttttgtttcaatggcttcagctacttccgtcatagcctggggttctggagaagatgggcaactaggacttggaaccgatgaagaaaaggaattggcttccgtcgtcgacgctcttgagcctttcaacgttcgctccgtcgtcggtggtagccgcaattccctcgccatttgcgatgatggcaagctgtttacatggggttggaatcaaaggggtacattaggacacccacctgagacaaaaacagaaagcaccccaagtctagttaagtctcttgccaacgtcaagattgttcaggcagctattggtggctggcattgtttagctgtcgatgatcaaggccgagcatatgcttggggtggaaatgaatatggacagtgtggtgaagagccttccaaggatgagacaggtaggcctgtgcggagggatattgtaatacctaagcgttgtgcccagcaacttacagtccgacaggtagctgcagggggtactcactctgtggttctaacccgtgaaggttatgtatggacttggggtcaaccgtggcctcccggtgacataaaacaaatttctgttcctgtaagagttcagggtcttgaaaacgttcgtctgattgctgtgggagcatttcataacttggctctgaaagaagatgggactttgtgggcttggggtaataatgaatatggacaacttggaactggagacacacaaccgagatcgtatcctattcctgtccaaggccttgacgatctcactttggttgatatcgctgcgggtggatggcattcaacagctttaaccaatgaaggagaggtttatggttggggaagaggagagcatggaaggctcgggtttggtgacaatgataagagcagtaaaatgcttccgcagaaagttaatctcttagctggagaagacatcattcaggtctcttgtggcggaactcattcagtcgctttgacaagagacggtaggatcttctcgtttggtcggggagaccacggtagactcgggtatggaagaaaagtaactacgggacaaccattggagcttcctatacacattccaccaccagaaggacggttcaaccacaccgatgaagaagacgatggaaaatggatagctaaacatgtagcttgtggtggccgacacactctagcaattgtggaatggaagtatgatcaggaggaaacagaataaccatgaagaagatagagcgagcaaaaaaacaaaaacacaagagggactctagagataagcatttgttatagagaaaaggggagcaaaagcatatggttaagcttttgacactcccatgaatgatgaatctatatgaaagaggaagaactaaatataatatcatcatgattttgtttttgataata

SEQ ID NO: 2102 - DNA, 1166 bp, Sorghum bicolor
atgctcccgctcatctctcctccgcgccctggtgccgcagggccccgcgccatcgccaacgcaggcgccactgcccccgccaccgccaggccggccgtcatcctcccagggctcgggaacaacacgggcgactacgcgcggctcgccgcggcgctacgggacgaccacggcctccccgcggccgtcgtggcgcgggtcacccgccccgactggctccgcaacgccgcgggcctcgccgacgccagctactggcggggcaccctccgcccgcgccccgtgctcgactggtacctgaagagggtggatgacgcggtgtctgaggcgagggagctatgcgcaccaggtgggaagatatcactgatagcgcattcagctgggggctggctcgcgcgtgtgtacatggcggagtttgaggcttccgacataagtttactgctcacccttggcacccctcacttgcctcctccaaaaggtgtacctggggtaattgatcagactagaggactactgaactacgtcgagaagaattgtgctccagcagtttatacaccagaattaagatatgtgtgcattgctggaaggtacattcaaggtgctcctcttctggggaactccgcagctgcttctgatgagatccttgcagttgacactccttcagaaggaggtgaggctgttattacgggtagcaatgacaaatctactcggtcaagtgtcacgtggagagcccggttcgtcgggcaagggtacaaacaggtttgtggccaagcggatgtgtggggcgacggcgtcgtacctgaaatggcagcgcatctggaaggagcactgaacataagctttgacggcgtgtaccactctcctgtaggctctgatgatgaacaaaggccctggtatggctctccagcaatcctcaagcagtgggtgcatcaccttctcagttgagatggcgtacaagagctagctgccggaacagaaactggaatgtgtcctacatctggcatgccaccaggcccaccgaaggggaactttttcttggcctgaaatagtgaaattgaggggcatgatatagcatcgtaaatcttgaagggggcaattgtgtattgtcagcttctgtagacaattcaacctgaggtctttttgtctaatatatattagacgtagtatatctc

SEQ ID NO: 2103 - DNA, 1223 bp, Zea mays
cctcttcgagaggcgcacgccgcgccacggcgagccactccactccgactcggcaccggcgacatgctcccgctcctctctcctccgcgccctcgtgccgcgcgaccccgcgccagcgccaccgtctccgccaccgccaggccggccgtcatcctcccagggctcgggaacaacacgggcgactacgcgcggctcgccgcggcgctgcgggacgaccacggcctccccgcggccgtcgtggcgcgggtcacccgccccgactggctccgcaacgccgcgggcctcgccgacgccagctactggcggggcaccctccgcccgcgccccgtgctcgactggtacctgaagagggtggacgacgcggtgtccgaggcgagggagctatgcgcgccaggagggaagatatcactgatagggcattcagctgggggctggctcgcgcgcgtgtacatggcagagtttgatgcttccgacataagtctactcctcacccttggcactcctcacctgcctcctccaaagggtgtacctggggtaattgatcagactagaggactactgaactacgtcgaggagaattgtgctccagcagtttatacaccagaattaagatacgtgtgcattgctggaaggtacattcaaggtgctcctcttctggggaactctgcagctgcttctgatgagatcctcgcagctgacactccttcagaaggaggccatgctgttattgtcagtagcagtgacaattctacatctactccatcagctgtctcgtggcgagcccggttcgttgggcaaggttacaagcaggtttgtgggcgagcagatgtgtggggcgacggcgttgttcctgagatggcagcgcatctggagggagcgctgaacgtaagctttgacggtgtgtaccactctccggtaggttccgatgatgaacaaaggccctggtatggctctccggcgatcctcaagcagtgggtgcatcaccttctcagctgagatagtgacatacaagaggagctagctgccggaacagacagaaactgggatgtgtcctgcagctgacatgacaccattggccaccaaagggcaaaggggaactttttctctgaaattgaggtgcatgatatagcatggcagatccctggttgtgtgttgtcagtctctgtagataatttaagcatttaacctgaggtctttttgtccaatcttttctctgctatctc

SEQ ID NO: 2104 - DNA, 903 bp, Oryza sativa Japonica Group
atgctctccctcctcctcccgcccgcgcggccgcgcgccgccgtctcccccgacgcgcgtgtcgtagtggcgcaggggctcgggaacaacacggcggactacgcgcggctcgcggcggcgctgcgggacgaccacggggtgccggccgtcgccgtcgcgcgggtgtcgaggcccgactggctccgcaacgccgccggcctcgtcgaccccagctactggcgatgcaacctccgcccgcgccccgtgcttgactggtacctgaaaagagtcgatgaagctgtatctgaggcgagagaactatctcctaatgaaggcatatcattgatagggcattcagctgggggctggctggcgcgtgtgtacatggaagaatttgatgcttcagacataagtttactgctcacacttggcactcctcacttaccacctccaaaaggtactcctggggtaattgaccaaactagaggactactgacctatgttgagaagaattgtgccccagcagtttacactccagaactaaaatatgtgtgcattgctggaaggtacattcaaggtgctcctttaactgggaacaccatcgctactacagatgatattctcgctgtggatactccatcagatatagctgaagcagtcatggtcagtaccaacgacaaatctactcaatcaggcccaaccttgagagcccgcttcattggacaaggctacaagcaggtctgtggccgtgctgatgtgtggggagacggcgtcgttcccgaggtgtcggcgcatctagaaggcgcactgaacataagcttcgacggcgtgtaccactctcctgtaggttctgacgatgagcagaggccgtggtatggttcaccggcaatcctcaagcagtgggtacatcatctcctcagttga

SEQ ID NO: 2105 - DNA, 1251 bp, Hordeum vulgare subsp. vulgare
ggccgatagagttgttcttccagaggcggacgccgcgccagcgccacggcgaggcacccaccaccgtccaccgccatgctctccctcctcccgcccgcgcggctccgcgccgcgccctccgacgtccccgtcaccgcgccgcgccgcccggccgtcatcctcccagggctcgggaacaacacgggcgactacgcgcggctgggcgcggcgctgcgggacggccacggcgtgccgtccgtcgtcgcgcgggtgtcgcgccccgactggctccgcaacgccgccggcctcgccgaccccagctactggcggggcaccctccgcccgcgccccgtcctcgactggtacctgaaccgagtggaggaggcggtgtccgaggccagggagctaggctctccagacgggaagctgtcgttgatagggcattcagctgggggctggctcgcgcgcgtgtacatggaggaattcgggacttctgacataagtttactgctcacgcttggcactccccacctgccacctcccaaaggtgtttctggcgtaattgaccaaactagaggactactgaactacgtcgagaagaattgtgcccctgcagtttacacaccagaactacgatatgtatgcattgctggaaggtatattcagggtgctcctttaactggaagctcccttgctgctaccacagatgagcttgtcgccgtggatgccccgtcagaagtagctgaagcagtcatggtcagtgccgataacaaaaccgctccgacaggccccaccttccgggcccgtttcgtcggacaaggctacaaacaggtttgcggccgcgccgacgtctggggagatggggtcgtccccgaagtgtcagcgcatctggagggcgcactgaatataagcttcgacggcgtgtaccattctcctgtaggttctgatgatgaagagaggccctggtatggctcaccagcgatcctagagcaatgggtgcaccatctccttagttgattccacagaagctttaccaactccaaaagtttgtcaacaaaatggtgtactgccatgccccttttcactagtgaacagcacagcataacatcatatatacagtaatcatgtacagaagatgcagctgtactctcttctcatactgttccagagtgcgtctagatgtctcaggcctcggcgctccttgtatcgtgtaaccatgattctcaaaaaagaagaaaaagatgcagtctgtgtctgtacacagcttaggcc

SEQ ID NO: 2106 - DNA, 1714 bp, Sorghum bicolor
gtttcgcttcgcgtctgcgctgctgctgctatttccatttcctttgcatccatttccggggggacagagcggaggggtcgcctgcgttgcttcgcgtgggtagcgtgcttcgtttagtaggcctctcgccaatttccgaggtcgacggcgacgtgcgctcggcggacgggcagacaaaatctagagagccttgggcttgttgccaggcgcgcctgtacgtaacgtacgcgccgttgtgggagacagccacttgctctcgcctccaatggccgagatctgctgcgaggaagccaagtccacgccggcaaccgccgtggctgcggcttcagtctccgcggcggccgccgccgtggcagtcgcctcctcggcgttggagaggaggcgacgcaggttggagatgaggaggttccgcgtcgcgactgatcccgaggcgccggtcgcggaggacgtccgcgctaccaagcggcagaggctgctggcgcgcacggtgtccggctcctgccccgacgcgggctcggactccgacaggccggccctgccggagcggttgcctaggtacggggtcacctccgtctgcggccgacggcgcgagatggaggacatggtctccatcaggccggacttcctgcccggcaccagcacgcaacacttcttcggcgtcttcgacggccacggctgctcccacgtagcgacgctgtgccaggacatgatgcatgaggtggtcgcggacgagcacaggaaggctggttgtggcgaagagacggcgtggaagggcgtcatggagaggagcttcgcgcgattggacgagcaggccgccagctgggcgaccagccgcagccgcgacgagcccgcctgccggtgcgagcagcagatgcccttgcgttgcgatcacgtggggtccaccgccgtggtcgccgtcgtcagccccacacacgtagtcgtcgccaacgccggcgactcccgtgccgtcctctcccgcgccggcgtcgccgttccgctctctgtcgaccacaagcctgatcgacctgacgagctggcccgcatcgaggcggcgggcggccgcgtcatttactgggatggtgctcgtgttctcggcgtcctcgccatgtctcgagccataggcgatggatacctaaagccgttcgtgtcgtcggagccggaggtaacggtgacggagcgcaccgacgacgacgagtgcctgatcctggccagcgacggcctgtgggacgtcgtgaccaacgagatggcgtgcgaggtcgtccgggcgtgcttccgcagcaacggcccgccgcaggcgccggccgctcggccgaacggcgtggctgccctcccggcagccgacgcggacgacgagaacggacccgcggttgtcaagggcgtgagcaaggaggattccgacagggcgtgctccgacgcggccatgctgctggcgaagctggcgctggcccggcggagcgccgataatgttagcgtggtcgtcgtggatctccgccgaggcatatgatgatccttggagcagagcaaaatcatatgctccatgattgctttcttttagcccttttcgaaatccaacctaatttctcccccatttttcccatccttctgttttgatttagtattaatagtagttactaatcagatgaatatagacgcttctcaaacgaggtactaaagctaatcaggaacaaggaacaaaaaaacagcgaattgttgg

SEQ ID NO: 2107 - DNA, 1635 bp, Zea mays
gtgcccgtttcgcctcgcgcctgcgttgctctgctatttccatttccattgcacccatttccggggtcgcctgcgttgcttcgcgtgggagcgtgattcgtttaggcctctcgccaatttcggagggcgacggcgacgtgctttcggcgggcgggcagagaaaatctagagtcttgggtttgccagacgcgcctttgtgggagacagacacttgctctcgcctccaatggccgagatctgctgcgaggaagccaagtcgacgccggcaaccgccgtggctgcggcttcagtctccgccacggccgcagcggccgcagccgtggcagtggcctcctcggcgttagagaggaggcgacgcaggctggagatgaggaggttccgcgtcgcgagcgatcccgaggagctggtcgcggatgacgtccgcgctgccaagcggcagaggctggcgcgcacgctgtccggctcctgccccgacgcgggctcggactccgacaggccggccctgcccaggtacggggtcacctccgtctgcggccgacggcgcgagatggaggacacggtctccatcaggccggacttcctgcccggcaccagcaagcacaacttcttcggcgtcttcgacggccacggctgctcccacgtagcgacgatgtgccaggacaacatgcacgaggttgtcgcggacgagcacamgaaggctgcctctggcgaggagacggcgtggaagggcgtgatggagaggagcttctcgcgattggatgagcaggccgccagctgggcgaccagccgcagccgcgacgagcctgcctgcaggtgcgagcagcagatgcccttgcgctgcgatcacgtggggtccaccgccgtggtcgccgtcgttagccccagccacgtagtcgtcgccaacgccggcgactcgcgcgccgtcctctcccgcggcggcgtccccgttccgctctccgtcgaccacaagcctgaccgacctgacgagctggctcgcatcgaggcggcgggtggccgcgtcatttactgggatggtgcccgtgttctcggcgtcctcgccatgtctcgagccataggggataggtacctaaagccgtttgtgtcgtcggagccggaggtaacggtgacggagcgcaccgacgacgacgagtgtctgatcctggccagcgacggcctgtgggacgtcgtgaccaacgagatggcgtgcgaggtcgtccgggcgtgcttccgtagcaacggtccgccggcgccggccgctcgcccgaacggcgtggccctcccggcagccggcgcgggcgccgaggacggatcggcggttgtcaagggtgtgggcaaggaggactccgacaaggcgtgctccgacgcggccatgctgctggcaaagctggcgctggcccggcggagcgccgacaatgttagcgtggtcgtcgtggatctccgccggggcatatgattctcggagcgaagcagagcagggcaaaatcatatgctccatgcttgaaactagctcttctgaaatccacgctaatttctcccccattttgaccatccttctattttgatgtagtattagtagtagatcctgatcagatgaatataatagacgcttttcttctctcaaaaaaaaaaaaaaaa

SEQ ID NO: 2108 - DNA, 1753 bp, Oryza sativa Japonica Group
ccttctcttctactccccccaccacccccgccttcgtgcttgcgtgtcgtcgcctcacctcgcgcctccgctactactgcttgtctgctgctgcagctgctgttattaccataccgcgggagaaggggggccgaacccgaaggcgtgcgagagggaggtgaggtgaggtggagccgtggaggcgcttgtttcgcgtgcgagacggtgcttcgtttcgcctcacgttttccgagggctacggcgacttggtgggagcgcggagaaaatctagcgagccgtcggagttgggtggcgcgcggccggctgtgcttctgaaggaggagtaattggagtagttgcttgccatggccgagatctgctgcgaggaggccatgtcgccgccggccactgccacggctgctgtcgcggcagcggtctccgcctcggccgccgcagccgtctcctcggcgatagacaggcggcgccgcaggatggagatgaggcgcatccgcatcgcaagtgatctcgagctgcaggccggagaggatgggcgccctggaaagcggcagaggctggcgcgcacggcgtctggcgccccgcgtcctgacgaggattcggcgtctgagcggccgagttgtggccgtacggaggagttcccgaggtatggggtcaccgctgtgtgcggccgccgtcgcgagatggaagacgccgtgtccatcagaccggacttcttgccggcatccggcaagttccatttttacggcgtcttcgacggccatggctgctcccatgttgcgacgacgtgccaggacaggatgcacgagattgtcgccgaggagcacaacaagggggcctccggcgaagtggcgccttggagggatgtgatggagaagagcttcgcgcggatggatggggaggtcggtaaccgggcgtccacccgcagcgacgacgagcccgcctgcccgtgcgagcagcagacgccttcgcgtcgcgaccacgcgggttccaccgccgtcgtcgccgtcgttagcccaacacaggtcgtcgtcgccaacgccggcgactcccgcgccgtcatctcccgtgccggcgtccccgtcgcactatccgttgaccacaaacccgatcggcccgacgagctggaacgaatcgaggcggcgggcggccgcgtcatttactgggacggcgcccgggtgctcggcgtcctcgccatgtctcgagccatcggggatgggtaccttaagccgtacgtgacgtcggagccggaggtgaccgtgacggagcgcaccgacgacgatgagtgcctgatcctggccagcgacgggctatgggacgtcgtgaccaacgagatggcgtgtgaggtcgtgagggcgtgcttccacaacaacggtccgccggcaccggccgcgcggccgagcggcgtgccctcctcggccgaggcggcggaaaccgagaacggaggagccgcatcggtgaaggggataagcaaggcggagtcctccgacaaggcgtgctccgacgcggccatgctgctgacgaagttggcgctggcgcggcggagcgcggacaatgtcagcgtcgtcgtcgtagatctccgccggggattgtgattcttggcgcaatattctatgctccatgattgctttctttcttcttcttttttttattctaagttaatttttcccttcaaatttcttccttatttctctgtttagttttagttttactactagctcctaccaagataaatgaatataatagccttttttttcgc

SEQ ID NO: 2109 - DNA, 1704 bp, Hordeum vulgare subsp. vulgare
ggtttcggctcgcgcctctgctgctgcttagcttctgctgccgccatagcccatagccacaccacctggcctgggttagggagagcgagcggaaggaaggggctgtcgtggtttgtcgaggtgtttcgtgtaggcctcgggatttccgtcgccgacgtgcggcggagggcagcggaaacctaggggacgtccggtcggggtcgagcgagcggttacttgccaatggccgagatctgctgccaggaagccaagtcgccgccggcgacagccgccacggtggccacggtctcggcttcggctgcggccgccgcggccgttgcctcgtcggtgatggacaggcggcgccgcaggttggagctcaagcgcttccgcctcgccaccgacctcgagcagtcggccgcggagtacgccggcgcccgcaagcgccccaggataccgcggacggtgtctggcccgtgtcccgacgctgcctcggcgtccgagaacacggagcgttgccccaggtacggcttctcctcggtgtgcggccgtcgtcgcgagatggaggacgccgtctccatcaggccggggttcttgcccggccccggcaagtcccacttcttcggcgtcttcgatggccacggctgctcacacgcggcgacgacgtgccaggagctgatgcatgaggcggtggcggaggagcacgacaaggcggaggagcctgtgtggaaagaggtgatggagaggagcttcgcgcggctggacgagcgggccgcgaactgggcgacaacccgcagcagcgaggagcctgcatgccgctgcgagcagaagatgccctcgcggtgcgaccacgtgggatccaccgccgtcgtggccgtcgtcaaccccacccagatcgtcgtcgccaacgccggcgactcccgtgccgtcctttcccgcgctggtgtccccgttgcgctctccgtcgaccacaagcctgaccggccggacgagctggagcgcatccaggcggcgggcgggcgcgtcatctactgggacggtgcccgggtgctcggcgtcctcgccatgtcccgagccataggggatggctacctgaagccgttcgtgacggcggagccggaggtgacggtgacggagcgcagcgacgccgacgattgcctgatcctggccagcgacgggctgtgggacgtggtgaccaacgagatggcgtgcgacgtcgccagggcgtgcttccggagcaacggcccgccggggccgccgcaggcgcagccgggcggcgaggccaagactagcgagggggtgagcaaggcggagtccgaccaggcgtgctccgacgcagccatgctgctggcgaagctggcgctggcgcgggggagctccgacaacgtcagcgtcgtggtcgtggatctgcgccggggatcgtgattcttggagcagaattggtgctccatgattgattgcttctcgttgtcctatttttttttttttaaatccatgctaatttcttccttccgttccctcgttcgtaaatttatcttggctgtgtcgatgtagtagtattagatctagtacgggttagtatagtttctaatccttctacccacccaaaaaaaaaaagttgaacggagaagctcagctgttggaccgcatcgtacgtacgtacacggaagatatttgagatatgttgatacgcagatttttaaatctatgaaagctcgtcatgcc

SEQ ID NO: 2110 - DNA, 1426 bp, Zea mays
gacgggggaaaagaagatgttcacctcctacgtcaagaataaggattcccaagattcaatcatattcggcgatgggaaccaaggcaaggtgaaaggtttaggcaagattgcaatatcaaatgagcactctatctctaatgtgtttttagttgagtctcttggatataatttactatctgttagtcaactatgtaatatgggatataattgtctatttacaaatatagatgtgtctgtctttagaagaagtgatggttcattagcttttaagggtttattagacggcaaactttatttagttgatttttcaaaagaggaggctggtctagatgcatgcttaattgctaagactagcatgggctggctgtggcatcgccgcttagcacatgtggggatgaagaaccttcacaagcttctaaagggagaacacgtgataggtttgactaacgtgcaattcgaaaaagatagaccttgtgcagcttgtcaagcaggtaaacaagtgggaggagcacatcacagcaagaatgtgatgaccacttcaagacctctggagctgctgcatatggacctcttcggacccgtcgcctatctgagcataggaggaagtaagtatggtctagttattgttgatgacttttcccgcttcacttgggtgttctttttgcaggataagtctaaaacccaagggaccctcaagcgcttccttaggagagctcaaaatgagtttgagctcaaggtgaagaagataaggagcgacaacgggtccgaattcaagaatcttcaagtggaggagttccttgaggaggaagggatcaagcacgagttctccgctccttacacacctcagcaaaatggtgtggtagagaggaagaacaggacactcattgatatggcgaggattatgcttggagagtttaagacccccgagcgtttttggtcggaagccatgaatacggcttgccacgccatcaacagggtctatcttcaccgcctcctcaagaagacttcatatgagctgctaactggtaacaaacccaatgtatcgtactttcgtgtatttgggagtaaatgctacattctagtgaagaagggtaggaattccaaatttgctcccaaagctgtagaagggtttttattaggttatgactcaaatacaaaggcatatagggtcttcaacaaatcatcgggtttggttgaagtctctagcgacgttgtatttgatgagactaatggctctccaagagagcaagttgttgatcttgatgatgtagatgaagaagatgttccaacggccgcgatacgcaccatggcgattggagatgtgcggcctcaggaacaattggagcaagatcaactgtcttcctcaactatggtgcatcccccaacccaagataacgaacaggtacctcaagtggaggcgcatgat

SEQ ID NO: 2111 - DNA, 1817 bp, Zea mays
ggacgaggaggcgggtgccgctcctgtggcttcgccatgtgctctcgccccgcgtcctcggctcctccctcctcggtatctacatgccattatgccaagatctcccactctccgatctgaccagggccgggccaccgcagccatttgcgtctgctcttcccgaatccctgtctcgctttgccctccgtttctccagctataaagccggggggtcctgtggcgtgtgacctttttataccggatgtgcagcgcagggtcaacttcgtcaggtttcttggctccaacaaccttcctgggtcactctaaactgtaaagagatggggtgtggcccatcaatccccgacaagtacacgataggtgggaaggggcgcaagcgccggagcgtcatacaggaggttgccgtgttcgtgcccaccatccgcatcccagtggcctctgacatagctcatccgctcaggggaatagtttccaaggatcttgtcgaccgactctccacactccgtgcccatgtcgcctcgctggctgaagaaatctatcacgcggacgtatcagctgttcaagaactgcagcatgcgctagaggagtacttgccagttgttcttggtttaacaacgaaagagagccgtcttgaatcgtcagtacagttcagatggaagaccttagacgacgaccaggagtgttgtctggcgagcgcgtggtatgaggtgctctcggtggtccacatgatggccatgcttgcgttgtttgaggctaacctattgctcatcccaaagagcagccaaggtggtggtgaaaggaaggtagcagaagacgcaaagaaggatgtcgtcgattcattgctcagggcgtcgggatgcttagactactccgtgcatcgcatacttgttcagatacctgcgcaagtcaagaagggttttcccagttacttgcaggagggcatgcttgaggccatctcaattcaggcattggctcagtgtgtggaaatacagcttggcttggcttctgaatgtgagaaggcaacgctgtcagtaaagaggaggctagcttgtgagcaagtcagctatttttctcaggctcactattgtctgtcgggatgcgatacgagtgactcgtacgggaagaagcttctgctgttcctcaagtggaagtggatggaggccaaggctgtagcgtattactaccatggtctggtgctcgacaagggcggcgaaccggcaaaccatatcagtgcagtctgctgcctctctgcagctgatgacctgctctcagacagcaaaagggcttgcttgagtttttgcttggcaaatcctgtcacgagggtgcctcctccttggggtgtcatgaaaaacatgcacaaaaagatcccagatgtcgcttacaagaagttccaagcgcacgggcatctgtttgagcaaaacaagaacagcgcactccaatccgttcctgacctaccagagtttgcgctgtcgctgagaccggatggatacgagttgccaagcactgattcgatctgggataatgttgatggccaacctcagattcaaagcctcaaggagcatatgatagatgacgaagatgaagtaggcacaaaatgatagttctcacttccaaatgcttcttttcattgtaccaccaaaagtagcagagctcaaaaacgcttaatccaaaatgttttggattcagcatatggctcaactgaaaaaggaatcgcgatctctgtattattgcaagtattaccatatgatatagtaaagtcttatgtgtaatagaatcataaataatagttggtttcttgctgtaatcgcctttaattttac

SEQ ID NO: 2112 - DNA, 1650 bp, Oryza sativa Japonica Group
gatgtgcagggtcaaaacaaacacacacacacacatctgtctcttcttcaggtttcaggtctcctggctgctttgcttctgctgcctctgtgtggggctccagccttgctcagattgatgattggtgatccaaccatcttcatcacttacagagatggggtgtggtgcatcaatccctaagaaatgcaaggtaggagggaaggggaagaagcgccggagcgtcatacaggaggttgccatattcgtgccgacaattcgcattccggtggacagtgatgttgcccatccactcagaggactagtatccaaggagctcgtcgaccgcctctcaaagttcagagaccgcgttgtcgcgctctctgaagatatctattgcgcggatgtttcggatgtttcagagttacagcatgcccttgaggagtacttgccagttgttcttggtttaacaatgaaagaaagccgtcttgaatcatcggtggaattcagatggaggaccttggatgatgacgaagagtgttgtctttcaagtgcatggtatgaagttctgtcagtcatccacatgatggcgatgcttgcattgtttgaagccaacctgatacttattccgaagaacggtcaagttggaggtgaaaggaaggtatcagaagatgcaaagaaggatgtcgtcgattcgttgctcagagcatcaggatgtttagattactgcgtgcaccgtatacttgtacagatgccggcacaagtcaagaaaagttttcctagttattttcaggaaggtatgcttgaggccatttcaattcaagcattggctcagtgtgtagaaatacaacttggattggcttcagagtgtgagaaggcaactctgtcagtaaagaggaggctagcctgtgagctagtcagttatttctcacaggctcactattgcttatcgggatgcgacacgagcgactcgtttgggaagaagctcctgctgtttctgaagtggaaatgcatggaagccaaggcagtagcatactactaccatggccttgtgcttgacaaaggcaatgaagccagcagccacatcagtgcagtgtgctgcctctctgcagctgatgatctagttgcagatagcaagagggcttgtttgagcttctgcttggcaaaccccatcacaagggtacctcctccttggggtatcatgaggaatatgcacaagaaaatcccagattctgcgtgcaagagattccaaatgtatggatatctttttgaacaagacaataacagtgcacttcaatccttaccagatctaccagaatttgcgctgtcgctgagacccgaagggtatgaactgcctagcactgattcaatctgggataatgttgatagccagcctcagattcagagcctcaaggagcatctggatgatgaagacgaagtggaaacaaaatgatacttcagacatccaaaacgcttcatttcattgtgccatgaaaagtagcattagtactagcaaagacatcggaatgctcaattcagaagtgtttggattcagcatatggcattgagccaaaaagaaatcagaatatgtaccttctgtgtagttgaaagtatctatcactgattataaacagaatcaacaataataggaaagaagggtgtttcttatttttc

SEQ ID NO: 2113 - DNA, 1844 bp, Sorghum bicolor
ctttccccttctccgatcccccaatcggccgacttccatccgtaaccctagtcccatcgccgccgccacgatgctccgctcgccgggcaattcgccccgccgcctctcgccgtcgcagactcccgcaccctccacccctcgcccggcctccccgaccccctccaccgccaccgcctccgcctccgcctcttcgaagcgccgccggccggaggtgctcgacgaggacacctacgtcgccgccatcgagcgcatcatcgagcgggacttcttcccggacctcccccgcctccgcgaccgcctcgattggctccaggctgtgcggtcccgcgacccgctcatcctccgcgatgcgcagctcaagatcctggaccgccgccgccgcgtccagcgccgtgggcccgtccccaccccgacgccggccacctccactgcgctccgctccccgtccttcctcaccacccctgccggatccgttgccggcggcgtgggagctcccgaggaggaggacgacatcgcggacgcgcactccctcgacggcttcttctgccgcttcaccagcgaggacaacgagtccttctctcgcattctagacaaggtaaaccaacgccgccgcgagcgctacgcccacttactggagcctgcggaggcagagaataaaccattgttggaggacaccaagctcgataggataacagatgggtatggtacatcagggcaaccaccgagtacacttgaaggcgccaagttcgtggcaaagaacctgctcatgtattatccggctgaccgtggggaagcgcctctcacagaggaggaacgtgcagagcggctcaaggggatgaccaaggagatagacaaatcaaacactaggttacatggcagatcctcggctgatgatgcaaggcccaaggaggaggaggctgccatattgtacgcaccagttgcaggctctactccaggaggtatggcctaccatgatcctgacaagttgaagaagtatgatttagaggatctgaggaagacgccgaaccctttctacctcgagtcagacaaaaaggccgacaatgggtatagttttgtgaggacaccatcaccggcacctggtgtggatgagtcgccgttcatgacatggggtgagattgatggaacaccgctgaggctggaccccgatgagacaccaggtggtagtgagagagcacattttaagatcccaccacctcctgctcgtgatgtcaaggcgcacctgctttcaagggatgctgctaggaaaataaaggagcgttctaagatcttccataggccgcccttaccatcccctgtgaggggaggcagtgcaagccccagaaccctctcaccagctgcacaaaaatttgtgaggaatgccatctcaaagtcggcaaagtccacaaacaccattgatgaatctctccgtgcaagctacagaggttcaaccccatctgcaagcactcccaagacaaggttttcaagagacccaggcctcgcgtcgcgatctccatcaacaaggcagggttccacccctccctggtgatttttagtaagcctcttaatgttatttcagaaaatagataaatgacccatcctgtactgtaacaaattgtataatgatgaaagattggaagtgatgcttgtttagtgtttactttcaatatctgagcacacttaccaaatcactgtcatgagcatatctttgcgtgctaagttgcaacatgcacctcaattttcaacggcatctgggcaggcccagctcgtcctttgtcgccttgttgcctctggaacaatgggttcaacaaaaactcatggcactgaaatacaaattcatggtaaat

SEQ ID NO: 2114 - DNA, 1735 bp, Zea mays
acctgagtacctgacacacagcgaaacgccgaaaccgcgtcaagttccccttctgcgatcccccaatcgccgtaaccctagactcgccaccgccggcgcgatgctccgctcgccgggcaattcgccccgccgcctctcaccgtcgcccacacccgcgcactccacccctcgcccggcctccccgcccccctccaccgccccctcctcgaagcgccgccggtcggaagtgctcgacgaggacacctacgtcgccgccatcgagcgcatcatcgagcgcgactacttccccgacctgccccgcctccgggaccgcctcgactggctgcaggccgtgcggtcccacgacccgctcatcctacgcgacgcgcagctcaagatcctagaccgccgccgccgcgcccagcgccacgcggcggggcccgtccccacgccgacgccggccacctccaccgcgctccgctccccgtcctttctcaccacccccgccggatccgtcgccggcggcgtgggaggtcccgacgccgaccacgacgacgacgtcgcggccgcggtctccctcgacggcttcttccgccgcttcaccagcgaggacaacgactccttctcgcgcatcctagacaaggtgaaccagcgccgccgcgagcgctacgcgcacctgctggagccgccgccgcctaccgaggcggggagcaaagcgtcagagggcgccaagcgcgacaggatcacggacgggtacggtacatcggggcagccaccgagtacgctcgagggcgccaagttcacggcaaagaaccagctcatgtactacccggctgaccagggggaagcgcccctcacggaggaggagcgcgcagagcggctcagggggatgaccaaggagataaacaagccgaacaccaggctacatggcagagccacggctgatgacgcgaggcccaaggaggagggggctgccatactttacgcgctagttgcaggctctactccgggagggatggcctaccacgaccctgacaagttgaagaagtacgatctggaggacctgaggaagaccccgaaccctttctacctcgagtcggacaagaaggccggcaacgggtacagttttgtgaggacgccgtcgccggcacccggcgtggacgagtcgccgttcatgacgtggggtgagatcgatggaacgccgctgaggctggactcggatgagacgccgggcggtagcgagagagcgcatttcaagatgccgccgcctcctgctcgcgatgtcaaggcgcacctgctttcgagggacgccgctcggaaaataaaggagcggtctaataccttccataggccgcccctaccctcccctgcgaggggtgtcagcgcaagccctagaaccctctcgcgggccgcacaaaaattcgtgaggaacgccatcaccaagtcggcgaagtcctccagcgccattgacgaatctctccgtgcaagctacagaggctcgaccccatctgcgagcactcccaagtcaaggttttcaaaagaccctggcctcgcatcgcgttctccatccacaaggcagggttccacccctccctggtgagtgttagtaaaccacttaatgttatttcataaaatgggtaggtggcccatcctgtactgtaacaaattgtataatgatggaagacatgaaatgatgaagtgatgcttatttactcttatattatctgagccacccttacaaaaaaaaaaaaaaaaa

SEQ ID NO: 2115 - DNA, 1832 bp, Hordeum vulgare subsp. vulgare
ggaaacagaactcgtcttcttcccctccccgatccccaattccccaacacctaaccctagcccaagagccgccggcgagatgctccgctcccccggccactcccctcgccagctcaccccgtcgccctcccccgccccgtccacccctcgccccacctcccccaccccttcctccgcctccgcctcagcgtccgccctcgccaccacctcttccaagcgccgccgcccggaggtgctcgacgaggacacctacgtcgtcgccatcgagcgcatcatcgagcgcgacttcttccccgacctgccccgcctccgcgaccgcctcgactggctccaggccgtgcgctcccgggacccgctcctactccgcgacgctcagctcaagatcctcgatcgccgccgccgtctccagcgcaacggccccctccccaccccgacgcctgccacctccaccgcgctccgctcgccgtccttcctcgcgaccccctccgtcgccccatccaccacaggcgaccccgaggatgaggacgaggacgtctccgctgcgttctcgcttgacgacttcttccgccgctacaccagcgaggacaacgaatccttctcgcgcatcctggagaaggtcaaccaccgccgccgcgagcgctatgcccacctcctggagcctggcgaggtggcggataaacagctgttggaggatgctaagcgcgacagaataactgatggctatggtacatctgggcagtcaccgagtacgttggagggtgccaagtttacggccaagaacctgctcatgtaccaccctgccgaccgaggtgaagcacctctcactgatgaggagcttgcggtgcggctgaaggggctcaccaaggagatcgacaagtcaaacaccaggttacatggaaaagctctggctgaagacgggaggcccaaggaggaggaggcagccgccatactgtatgctctagttgcaggctccactcctggaggaatggcgtacaatgatcctgacaaaggaaagaagtatgatttggaggatctaaggaagacaccaaacccgttttacattgaatcagggaagaaggcagacaatgggtacagtttcgtgaaaacaccatcgccagcacctggcgctgatgagtccccgttcatgacatggggcgatatcgatggaacaccactgaggttggatcctgatgagacacctgggggtagtgagaggtcacatttcaagatcccacctccacctgttcgagatgtgaaggcacacctgctgtccagggacgccgcgaagaagataaaggcacgaacacatatgtttcacaagccaccgctaccatcgcctgtgagaggaggcagtgcaagccccaggaatctgtctcctgcagcacaaaagtttgtgaggaatgctatcgcaaaatccacacaaaccattgatgagtctctccgtgcaagttacagagggtcgacgccatctgcaggcaccccaaagacaaggttttcaactgacccaggcttgggatcacggtctccttcggcgagaaaaggttccacccctccatggtgattttagtaaatcccaatgttatatatatccagttcataaactgataaatgctatccatgtattgtatcggaaacaaatgatggtagttttttcagcttggaaatcttagagggcttgccaggtcattaaactattcttcatttgcatggctggctccctcagtgtattatgattttgcaaaggtcttactaaaatatgccttgacaccaaatttcctgttttatagattgtagacattttactcttatcagaacataaaatctaggtgctg

SEQ ID NO: 2116 - DNA, 2164 bp, Oryza sativa Japonica Group
aatcacaaaccaaccagattcacccaaacgccgaaccaaacttcgcatccccgaatccccgatccccaaatccctaaccctagcctcgcccgccgccaccgccaccgccgccgccgccgcgatgctccgctcgccgggccactccccgcgccacctctccccgtccccggcgccgtccacgcctcgcccctcctccccgacgccctcgtccgcctccgcctccgcctccgcatcggccctcgccgccgccgccactaccaccacctcctccaagcgccgccgcccggaggtgctcgacgaggacacctacgtcgcggccgtcgagcggatcatcgagcgggacttcttcccggacctcccgcgcctccgcgaccgcctcgactggctccaggccctgcgctcccgcgacccgctcgtcctccgcgacgcgcagctcaagatcctcgagcgccgccgccgcgcccagcgccagcgccagggcggccccgtgcccaccccgacgccggccacctccaccgcgctccgctccccgtccttcctcgccaccccctccgtcgccccctccgtcgccggcgacgagggcgccgacgtcgacgacgacgtcgaggccgcgctctcgctcgacgacttcttccgccgcttcaccagcgaggacaacgagtccttctcccgcatcctcgagaaggtgaaccaccgccgccgcgagcgctatgcccacctgctggagcctggtgaggtggcgaaggcgccccagttggaggacgccaagcgcgacaggataaccgatgggtacggcacgtcggggcagccgctgagcaccttggagggtgccaagttcacggccaagaacctgctcatgtactacccggctgaccgtggggaggccccgcttactgatgaggagcgcgccgagcggctcaaggggatgaccaaggagatcgacaggtcgaacaccaggttccatgggaagtcttctgttgatgatggtgcaaaggaggaggaggcagctgctatactttatgcgccagttgcaggttccactcccggaggtatggcataccatgatcctgataaagcgaagaagtacgatttggaggatctaaggaagactccaaacccattctacgttgagtcagggaagaatgcaaacaatgggtatagttttgtgagaacgccatcgccagcacctggcgtggatgagtcaccgttcatgacatggggtgagattgatggaacaccactgagactggacccagaggagacaccgggtggttctgggggaagtgatagggcgcatttcaagatcccacctccgcctgctcgggatgtaaaggcacatctgctgtcaagggatgcagcaaggaagataaaggagcgcactaaaatgttccacaagccaccgctaccatcgcctgtgaggggaggaagtgcaagcccaaggaccttctctcctgcagcacagaagtttgttaggaatgccattgcaaagtcctctcgtaccattgatgagtcgctccgagcgagctacagaggtacaaccccatctgcaaccactccaaagacaaggttttcaagagacccaagcttgggatcacgatctccatcgacaagacagggttccacccctccctggtgatttcaataaaactcattgttgcttatttgaccctccttttcaaaaacgaacatccgtggtgaattaacggtgttaagttagggtttataggaaatccactccagaaatgagatgtaaaatctgcaattcctgtgcaattccaccttgggcccggcattgtggacggagtacagcttccgggggcgcagccgcgcaggttgtgacagtgcacgggcacgtcttggccggggtagacccgctcgtcgtcggtgaagtagatgctgtcgctggcgcaccacggcaggtgccgcgcgtcggtgacgaacgccataccgggtccctgtattagtattagttctcatagtatgttttttgagaggaattcaatttcatctaaaattgcttggtgaagcaaacatgtaaggatttgaggaatggttcactgaggaactgataggcttgagaggaactgattggctcgagagggatcttgtctatgatatatattgaaaactttaaaatcaatatgtggttatttcagttagtatc

SEQ ID NO: 2117 - DNA, 1194 bp, Zea mays
gtggcatgtctgcctccacccctccgccaccaccacagccgttgccttcgccgcgagcgaccgtagcgaggtgattgcaatggtggcctccactgcttcccgcctctcgcccccgcgcttcagcaccccttccccgtctcttcatcctccaaaccgccgctcgcgcttctcccctgttcgcgcagccaagttggaagctgtgctgtctattggtgctcatctaatcccacacccaagaaaggctgcaagtggcggagaagatgctttctttgccaatagcgatgctggcggagtatttgccattgcagatggtgtctcgggatgggcagaaaagaatgtcaatccagctctattctctcgagagctcatgagaaacagctctaatttcctcaatgatgaggcggtcagtcatgatcctcagattcttctcatgaaagctcatgctgcaacttcttctattggatctgcaacagtaatcatcgccatgcttgagaagaccgggactctaaaaattgcaagtgtgggagattgtgggttgaaagttattcgtaaagggcaagtaatgttctctatatcccctcaagaacattattttgactgcccataccagataagctcagaggcagagggtcaaacatataaggatgcattggtttgcagtgtaaatcttatggagggtgatataattgtgagtggttcagatggactttttgacaatatctttgaccaagagattgtttccataatttctgagtcgccaagtgtagatgaagctgcaaaagcattggcggagcttgcaagaaaacactcggtggatgtcagattcgattcaccctactcaatggaggcccggagtagggggttcgatgtcccctggtggaagaagctacttggaggcaaactaataggcggtaagatggatgacatcacagttgttgtcgcacaagtgaagacagtagtggtcccagaggacgaggttcagggtggcgacacagaagaacaaaaggggaatgagcagggcgctgcagctgtggttgcatacaaaatgaatgatgaagaagtagcttgagttctgggaccatcctcattttcattctcttcattttacttttctgtgatgactgtattatactgcacataaaggaattgaagcaaaataaatttgtgtgattgtgtttaaaaaaaaaaaaaaaa

SEQ ID NO: 2118 - DNA, 1359 bp, Oryza sativa Japonica Group
gagcgagcgagcgattcacggtggccgcgggcgacggaggcgaggcgaggaggagatagagcagcagcaagccagccatggcggcctcctccactgctacccgcctctcgccgcctcgcctccacgcacccactaccccttctccccatctcccgcttcgccgctcgcgcttctcccctcttcgcgccgccaagttggaagctgtgttaactattggaactcatctaataccacacccaagaaaggctgagactggcggagaagatgctttctttgtgaacggcgatgatggtggagtgtttgccgtcgcagatggagtttcaggatgggcagaaaaggatgtcaatccggctctgttttctcgagagctcatggcacacacttctacttttctcaaggatgaggaggtcaatcatgatcctcagcttcttctaatgaaggctcatgctgcaacaacttctgttggatctgcaactgtaatcattgcaatgcttgagaagacagggattctaaaaattgcaagtgtgggagattgtggtttgaaagtaattagaaaaggccaagtaatgttctctacatgtcctcaagaacattactttgactgcccataccagttaagctctgaagcaattggtcaaacgtatctggatgcactggtttgcacagtaaatcttatggagggtgatatgattgtcagtggctcagatggattttttgacaatatattcgatcaagagatcgtttctgtcatttccgagtctccaggggtagatgaagctgcaaaagcactagcagagcttgcaaggaagcattcagtggatgtcacctttgattcaccctactcaatggaggctcggagtcggggttttgatgtcccctcgtggaaaaagttcattggagggaaactaataggtggtaagatggatgacattacggttattgttgcacaggtgaaggcagtgatgatcccagatgatgagggtgttgatgaagaaaagggtcaaggggatgagcaaggcagtgctgttgccgttgcatcctctgaacagaaggaagactcaattaccacataaacagtaaaatcaatgataccgcaatcacaatgtaactactgattcttcaaagcgacgttcttcgtgcgccgccattttctattttatgtcttcctccttatcttttctctaaggatgtacatttgtaagtttctactggagggaatacaactcaatcaaaatactcatgtacagccgaattccctgcagaattgagtcgctacgaatacacctctctttcatttattgctgaaaattgtgactttccttttatacaagtcacccatttacatatgcattctatctc

SEQ ID NO: 2119 - DNA, 1231 bp, Hordeum vulgare subsp. vulgare
gcactaccactagcgcctcccccatttgctgcgggcgacggaggatagcagcgcggcggcacagcagccagaggacggccatggcggcttccaccgcgtcacgcctctcgccccctcgcctccacgctgctcccaaccacccgctccggcgctcgcgcttctcccctctgcgcgccgccaagttggaggctgtgttatctattggaactcatgtaatcccacacccaagaaaggttgagaccgggggagaagatgctttctttgtgggcggtgatggtggtggagtatttgccattgcagatggcgtttcaggatgggcagaaaagaatgtcaacccagctctgttttctcgagagcttatggcaaacagctctacttttatcaaagatgaggaggttagtcaggatcctcaaattcttctaatgaaggctcatgctgcaacttcttccattggatctgctacagtaatcgtcgcgatgcttgagaagactggaaccctgaaaattgcgagtgtgggcgactgtggtttgaaagttattcgaaaaggccaagtgatgttctctacatgcccgcaagaacattactttgattgtccataccagctaagctccgaggcaattggtcaaacatctcaagatgcactggtttgcactgtaaatcttatggagggtgatatgatagtcagtggctcagatggattcttcgacaatatatttgatcaagagatccttgctgtcattaatgggtctccaggcacagatgaagctgcaaaagctttagcggagctcgcgagaaaacattcagtggatgtaacattcgattcaccctactcgatggaggcccggagtaggggttttgatgttccttggtggaagaagctacttggagctaagctagtaggtggtaagatggatgacattacggtcattgtcgcgcaagtgaagacggtggtgatcccagatgatgagggtagtggaattgaactggagaaagtgggtggtgagcaactcgctgctgctggagttgcatccgctgaacagagtgaatgaaaaggttgtatatgttgaatagaaattcattttcttttccattttggtcatgttgtactataccgcagtccaaagaaatcgaagtgaaatgtacgggcatatttgctagttgccatgaatttaatttaagagatctggttcatgagatgcgagacctagtaataacttatttttattttctc

SEQ ID NO: 2120 - DNA, 2074 bp, Sorghum bicolor
gcaagagagataaagctcagatctctcgccactgttcaacgccccaatcctccctctcagtccaccctttggtgcttcccaactcccaagcccctttggtgctcaccaagattcatcttcttccaccgttgtatccccaaatctcctccgcagggaatatattttgttgttttgatttccaacgcccctttctacagcaagcaattttgtgttttttagtcgtagattgggcgcgaatttccttccattcgtcggagattcaggcattcggattttattcttcgcgcaatttgttcctgtatccggtcttgccaagaattttccaccccctcttggcttcctgatccatctttgatgcgccaagaggcgagatgaacacgaattactcggcgctcccattgacctccccctccatcgagctccaggccaaatctaacgcctccgccaatgccaacgtcaacggccacgctaagatctccaagcaagattcgttcttgggcgaggtggaggacggcggcggcggggccggtgagcacgacgacctgccgctcatcggcgacgggcccgccgggccgccagaggggtccggcgtgcccgccgccgtgttcaacctcgcgacctccatcatcggggccggcattatggcgctcccggccaccatgaaggtgcttggagtcgccgctgggctcgtctcgatcctggtcatgggggtcctatccgagatcaccgtcgagctgctcgtgaggttctcggcctactgccgcgcgctgtcgtacggcgaggtcgtgcacagggcgatgggccggccagcgagcgtcgtggcgcagatgtgcgtcatcatcaacaacgcaggcgtcctggtggtgtatctgattatcatcggagacgtgatgtcagggtcactgaagcacatcggcgtcatggatcaactgattggccatggcgagtgggataaccggaagctgctgatcttggtggttcttgtcatcttccttgcgccattgtgcgcgcttgagaagattgactcactgagtttatcatctgctgcgtcagttgcccttgctgttgtgtttgtggttgtgtcctgcatcattgctttgatcaagatcgctgagggcaagatcagtatgccgaggatggggccagatttcagctcgcgagcagcaatgctagacctgctcgtcgtgatacccatcatgactaatgccttcatctgccatttcaatgtgcagccgatctacaatgaactcaaggagaagacgccacggaacatgtacaaggttgggaggatcagcactgtgctatgtgtagtggtgtatgccctgactgccctctcagggtatctcttgttcggtgaggacaccgagtccgatgtgctcaccaacttcgacaaggatctcgggatcagattcagctctttgctcaactacattgtcaggattgggtatgtcatccacctggtcctcgtcttcccagttgtccacttctcgctcaggcagacagtggacgcactgatctttggggagctggcgacccctagcaggaagaaaacactcacactgacagtggtgcttctagcgctcatctaccttggctcaacaatgataccgaacatctggatggccttcaagttcactggagctaccacagggttagcgttgggtttcatgttcccggctctggtggcattgaggctggacaaggaagggagtcgcttgggacatggggagaggctcctgtcacttgggttgctggggctatcaatagttgttagcgtcatcggagtcgttggaaatgtatacaccttgaagagtaagtctgaatgatctcttgaagatggacaggttggtagctagggttagaggaagctttacatcatgacgacacatggtgtgttgcaatgacaggcaaacagaccgtgtaaacatggcgactatacactaggtcaaaaatgatattaagagagcctcaggatcctatatgcatttttacttcagaggtttaacactggaccatcctccagggaattctttttgtacttcggaccagattcttcaatgtatcgatttgattg

SEQ ID NO: 2121 - DNA, 2119 bp, Zea mays
agccacagttcaacgccccaatcctgcctcttagtccaacccggcaaccccaacctcttggtgcttcccaaattccaactcccaagcccttgttgctcaccaagattcatcttctccccccaatctcctccgcagggaaatagttgttttggtttccgactcccctgctgcatagcataggcactcattcctccctttcgacagcaagcaattttgtgttctcagttgtagattgggcgagattttccttccatccgtgggtgattcaggcattaggattcaatcggcacaatttgttcctgtatccgctcttgccaagaatttcccatctccctatttgctttctgatccatcttcgatgcgctaagaggcgagatgaatacgaattactcggctctcccattgacttccccctccatcgagctccaacccaacggggccaaatctagcgccgccgccaatggcgtcctcaacggccacgctaaaatctccaggcaggattcgttcttgggcgaggtggaggacgacggcggcggggccggtgagcacgacgagctgccgctcatcggcgacggccctgccgggccgccagaggggtccgacgtgaccgccgccgtgttcaacctcgcgacatccatcatcggggccggcattatggcgctcccggctaccatgaaggtgctcggagtcgccgctgggctcgtctcgatcctggtcatgggggtcctgtccgagatcaccgtcgagctgctcgtgagattctcggcccactgccgcgcgctatcgtacggcgaggtcgtgcacagggcgatgggccgcccggcgagcatcgtggcgcagatgtgcgtcatcatcaacaacgcaggggtcctggtggtgtatctgatcatcatcggagacgtgatgtcagggtcactgaagcacatcggcgtcatggatcagctggttggccatggcgagtgggataaccggaagctgctgatcttggtggtccttgtcatcttcctcgcaccattgtgtgcgcttgagaagattgactcactgagcatgtcatctgccgcgtcggttgcccttgccgttgtgtttgtggtggtgtccagcatcattgctttgatcaagatcgccgagggcaagatcagtatgccgaggatgggtccagatttcagctcccgtgcagcaatgctggacctgctcgtcgtgatacccatcatgactaatgccttcatctgccatttcaatgtgcagccgatctacaacgagctcaaggagaagacaccacagaacatgtacaaggttggcaggatcagcaccgtgctatgcgtggcggtgtatgccctgactgccctctcggggtacctcttgttcggcgaggacaccgagtccgacgtgctcaccaacttcgacaaggatctcgggataagattcagctctctgctcaactacattgtcaggatagggtatgtcatccacctggtcctcgtcttcccagttgtccacttctcgctgaggcagacagtggaggcgctgatcttcggggagctggcaacccctagcaggaagagaacattcacattgacagtggtgcttctagcactcatctaccttggctcgacaatgatacccaacatctggatagccttcaagttcaccggagctaccacagggctggcgttgggtttcatgttcccggccctggtggcattgaggctggacaaggaagggagtcgcttgggacatggggagaggctccttgcgcttggtttgctggggctatcaattcttgttagcgtcatcggagtcgttggaaatgtatacaccttgaagagtaagtctgaatgacctccccaagatggcaagttgatagctagggttagaggaacctttgcatcatgaagacacatggtgtgttgctacaactggcatacagatcgtgtaaacatggtgactatacactaggtcaaaatgtattacattcgagagagcctcagcatcctatatccgttttttacttcagaggtttaactgtggaccattctcgagggaattctttttgtacttcggaccagattgttttcgatgtatcgatttcattgtgttcttacaaaaaaaaaaaaaaaaa

SEQ ID NO: 2122 - DNA, 2301 bp, Zea mays
gtaaattaaaaaatacaaatatgcaagagagatagagctcagatctctcgccacagttcaacgccccaatcctgcctcttagtccaacccggcaaccccaacctcttggtgcttcccaaattccaactcccaagcccttggtgctcaccaagattcatcttctccccccaatctcctccgcagggaaatagttgttttggtttccgactcccctgctgcatagcataggcactcattcctccctttcgacagcaagcaattttgtgttctcagttgtagattgggcgagattttccttccatccgtgggtgattcaggcattaggattcaatcggcacaatttgttcctgtatccgctcttgccaagaatttcccatctccctatttgctttctgatccatcttcgatgcgctaagaggcgagatgaatacgaattactcggctctcccattgacttccccctccatcgagctccaacccaacggggccaaatctagcgccgccgccaatggcgtcctcaacggccacgctaaaatctccaggcaggattcgttcttgggcgaggtggaggacgacggcggcggggccggtgagcacgacgagctgccgctcatcggcgacggccctgccgggccgccagaggggtccgacgtgaccgccgccgtgttcaacctcgcgacatccatcatcggggccggcattatggcgctcccggctaccatgaaggtgctcggagtcgccgctgggctcgtctcgatcctggtcatgggggtcctgtccgagatcaccgtcgagctgctcgtgagattctcggcccactgccgcgcgctatcgtacggcgaggtcgtgcacagggcgatgggccgcccggcgagcatcgtggcgcagatgtgcgtcatcatcaacaacgcaggggtcctggtggtgtatctgatcatcatcggagacgtgatgtcagggtcactgaagcacatcggcgtcatggatcagctggttggccatggcgagtgggataaccggaagctgctgatcttggtggtccttgtcatcttcctcgcaccattgtgtgcgcttgagaagattgactcactgagcatgtcatctgccgcgtcggttgcccttgccgttgtgtttgtggtggtgtccagcatcattgctttgatcaagatcgccgagggcaagatcagtatgccgaggatgggtccagatttcagctcccgtgcagcaatgctggacctgctcgtcgtgatacccatcatgactaatgccttcatctgccatttcaatgtgcagccgatctacaacgagctcaaggagaagacaccacagaacatgtacaaggttggcaggatcagcaccgtgctatgcgtggcggtgtatgccctgactgccctctcggggtacctcttgttcggcgaggacaccgagtccgacgtgctcaccaacttcgacaaggatctcgggataagattcagctctctgctcaactacattgtcaggatagggtatgtcatccacctggtcctcgtcttcccagttgtccacttctcgctgaggcagacagtggaggcgctgatcttcggggagctggcaacccctagcaggaagagaacattcacattgacagtggtgcttctagcactcatctaccttggctcgacaatgatacccaacatctggatggccttcaagttcaccggagctaccacagggctggcgttgggtttcatgttcccggccctggtggcattgaggctggacaaggaagggagtcacttgggacatggggagaggctccttgcgcttggtttgctggggctatcaattcttgttagcgtcatcggagtcgttggaaatgtatacaccttgaagagtaagtctgaatgacctccccaagatggcaagttgatagctagggttagaggaacctttgcatcatgaagacacatggtgtgttgctacaactggcatacagatcgtgtaaacatggtgactatacactaggtcaaaatgtattacattcgagagagcctcagcatcctatatccgttttttacttcagaggtttaactgtggaccattctcgagggaattctttttgtacttcggaccagattgttttcgatgtatcgatttcattgtgttcttacatgagggctctagagtcactctttgatcagcaaccaaaaaaaaagattggttctgatgtactttgaggagatttttgtttccctatgtcagtaagttggtctgtttgggggcatacaattcttgcactttttttatactaaaccttcatct

SEQ ID NO: 2123 - DNA, 2260 bp, Oryza sativa Japonica Group
acttttatgagagagaaggaagaacagagagagagagagagaggagggagaagaaaaaaaataatcgaaaataaaataaaataaagagagagatagaaccccagatctctccacagtttcaacgcctcaaatctctcaactctcgtcccaatccttaggtacacgcctccctctctttcctccaatttttgttcggagggaggacgaatttcagttcttgtttctgtttcgatctccaaccaaatctggcccaagaaaatttgagtttcttgtgtggtagatgccaccaatgtgtgccaagcccctctgagatctcaccggctgatcagctgatgtagtttgcagtcgaattttgttccgtttttgggggcaagattgtgttcttggagctgtagattggttatacatttttttttccatttcttggctcagttttgtccattcgacgaggaatttctcgtcgtgtttgttgttgattgattgatccaatctttgatgcgccaagaagcaagatgaacacgaattactcgtccctcccattgacctccatcgagctccaatccaaccagcgcacatccgaggtcgccaatggcgtcggctacaacggccacgccaagatctccaagcaagattcgttcctggtcgacggcgagaacgacgacctgccgctcatcggcgacggccccgccgggccacccgagggctccggcgtgcccgccgcggtgttcaacctcgccacctccatcatcggcgccggcattatggccctcccggccaccatgaaggttctcggcgtcgccgtcggcctcgtctccatcctggtcatggggatcctctccgaggtcaccattgagctgctcgtgaggttcgccgtgtactgccgcgcgctgtcctacggcgaggtggtgcacaaggcgctcggccgtccggcgagcatcgtggcgcagatgtgcgtcatcatcaacaatgccggcgtgctcatcgtgtacctcatcatcatcggagatgtgatgtcagggtcactgaagcacattggtgtcatggatcagttgatcgggcatggcgagtgggataaccggaggctgctgatcttggtggttcttgtgatctttctctccccgttgtgcgcgctcgagaagatcgattcgttgagcttgtcgtctgctgcatcggtcgcgcttgctgtcgtgtttgtggttgtgtcatgcatcattgcgctggtgaaggttgttgagggtaagatcagtatgccgaggatggggccggattttagctcgagggcagcaatgctggatttgctcgtcgtgataccgatcatgacgaacgcctacatctgccatttcaatgttcagccaatctacaatgagctcaaggagaagacacctcacaacatgtacaagattgggaggatcaccactgtgctatgtgttgtggtatatgcactgactgcggtctcagggtacctcttgttcggcgaagacactgaatctgatgtgctcaccaactttgacaaggatctcgggatcagattcagctcaatcctcaacttcattgtcaggattgggtatgtcatccatctggttctcgtcttcccggttgtccacttctcgcttaggcagacggtggactcgttgatctttggcgagttagcgccccatagcaggaaaaagatgctcaccttgacagtggtgctcttggcactcatctatcttggctcgacgatgataccaaacatctgggtggccttcaagttcaccggtgcgacgacggggttggcactggggttcattttcccggcccttattgcattgagattggacaaggaaggcaagtctttaggtaagggtgagaggctcctgtcaattgtgatgcttggtttggccatggttgttagcattattggagtaattggaaatgtatacagcctgaggagcaagtctgcatgatctatcatgatgaacaatttagtagggttagtgcattgccatggcagtcatacagactgtattagcatggtcagatacagaagacagcagaggtactacttgagcaaagctcagatacattttgtttacctttagaggtgcaggagcatttcttgaaggtttttgtttttgggagcttggactagattgacagattctttgatgtatttgcatttattggtaaggcagcacaagatgataagaagctggttgtgttgtactgcgaggttgttgcctgtctactacatgaaaagaaaagaaacgatatgtttggc

SEQ ID NO: 2124 - DNA, 2203 bp, Hordeum vulgare subsp. vulgare
gcggtagcgctgcctggccggaagaatgggaagcaacgaggcaacagcaggggagggacgaagctcaccagatctccgccctccaacccatccatccatccatccgtcgccggcggcggcacatccgcctcgccaggatcctcgtcggtccctgctccggcagagcatacggatctccggttgtgtgtttctccgcccgaatctcgccaagaaccgagatttgccccggcggctgcggccaatgccggcctggttcccgtgacgccttcccggcctgcgtggcggggatcgggatcctggcccctttcccgcgcggtgacctggttcttgctttgccggagcggcggattgggcggagatttccattttttttctatcccctgtttccggccgcaggatcggcctctcgtcgccgtcgatcttgcttttgggcgccagcgccattggcgcgccggggagcatggtgaactctaactactcggcgctcccgctcaccgccaccgccatcgagctgcagtccgcccacccgccgccgcatcctcccaaatctggcgccgcagccaatggcgcggcacacgccaagctcaccaagcaggactccttcctgggtgaggtcgaggacgacgacgcccacgccaccgccgccgagcacgacgagctgccgctcatcggcgacgacggcccagcgggtccccccgagggctcgggggtctccggcgcggtgttcaacctcgcgacctccatcatcggggcgggcatcatggcgcttccggcgaccatgaaggtgctcggcgtcgccgtggggctcgtctccatcctcgtcatgggggtgctctctgaggtcaccatcgagctgctcgtccggttctcggtgcgctgccgcgcgctgtcctacggcgagctcgtgcaccgggcgctcggccgcccggccagcgtcgtcgcgcagttctgcatcatcgtcaacaacgccgggatcctcgtcgtctacctcatcatcataggcgacgtcatgtccgggtcgctcaagcacatgggcgtcatggaccagctcatcggccacggcgagtgggacaaccggaggctgctcatcctgttcgtcctcgtggtgtttctatccccgttgtgtgccctcgagaagattgactcgctgagcttgtcgtctgctgcgtctgtcgggctcgccgttgtttttgtggcggtctcgtgcatgatcgcggttgtgaagctcgtcgagggcaagctcgccgcgccgaggatggggccggattttagctcgagggcggcgatccttgaccttctcgttgtgatacccatcatgaccaatgcctacatctgccatttcaacgtgcagcccatctacaatgagctcaaggagaagacgccccgcaacatgtacaacgtcggccggatctccaccgtgctctgcgtcgtcgtgtacgcgctgaccgccatctcgggttacctcctgtttggcgacgacaccgagtccgacgtgctcaccaacttcgacaaggaccttgggatcaagttcagcacggtgctcaactacattgtgaggatcgggtacatcatccacctggtcctcgtcttcccggtcgtccacttctcgctgaggcagacggtggactcgctggtcttcggcgagctcgcgccccacagcaggaagaggatgctctccctgacagtggttctgctggcccttatctacctcggctcgaccatgatacccaacatctggatggccttcaagttcaccggcgcaacgacggggctggcattgggcttcatgttcccagccctcgtggcgctgcggctggacaaggagggggagtgcctggggcgcggcgagaggctcttgtcgctcggaatgctggggctggccatcgtcgtgagcgtcgtcggggtcgtgggaaacgtgtacagcctgaggagcaagtctgagtgagtgatggattgatcatcaggattactatatttctagggcttgttatacagagactgtattaccactgccagaatacactagttagcaggtacaccagttccagctgagctgctgagcaaagctcatcatactacacattttgttcacctacagggttgtttcatatgttgttggtgggcattcttgtacttttggaccatattctttgatgtatttttcttcttctatttgttcttagatatatatatatatttatac

SEQ ID NO: 2125 - DNA, 2250 bp, Hordeum vulgare subsp. vulgare
gggaagaatgggaagcaacgaggcaacagcaggggagggacgaagctcaccagatctccgccctccaacccatccatccatccatccgtcgccggcggcggcacatccgcctcgccaggatcctcgtcggtccctgctccggcagagcatacggatctccggttgtgtgtttctccgcccgaatctcgccaagaaccgagatttgccccggcggctgcggccaatgccggcctggttcccgtgacgccttcccggcctgcgtggcggggatcgggatcctggcccctttcccgcgcggtgacctggttcttgctttgccggagcggcggattgggcggagatttccattttttttctatcccctgtttccggccgcaggatcggcctctcgtcgccgtcgatcttgcttttgggcgccagcgccattggcgcgccggggagcatggtgaactctaactactcggcgctcccgctcaccgccaccgccatcgagctgcagtccgcccacccgccgccgcatcctcccaaatctggcgccgcagccaatggcgcggcacacgccaagctcaccaagcaggactccttcctgggtgaggtcgaggacgacgacgcccacgccaccgccgccgagcacgacgagctgccgctcatcggcgacgacggcccagcgggtccccccgagggctcgggggtctccggcgcggtgttcaacctcgcgacctccatcctcgtcatgggggtgctctctgaggtcaccatcgagctgctcgtccggttctcggtgcgctgccgcgcgctgtcctacggcgagctcgtgcaccgggcgctcggccgcccggccagcgtcgtcgcgcagttctgcatcatcgtcaacaacgccgggatcctcgtcgtctacctcatcatcataggcgacgtcatgtccgggtcgctcaagcacatgggcgtcatggaccagctcatcggccacggcgagtgggacaaccggaggctgctcatcctgttcgtcctcgtggtgtttctatccccgttgtgtgccctcgagaagattgactcgctgagcttgtcgtctgctgcgtctgtcgggctcgccgttgtttttgtggcggtctcgtgcatgatcgcggttgtgaagctcgtcgagggcaagctcgccgcgccgaggatggggccggattttagctcgagggcggcgatccttgaccttctcgttgtgatacccatcatgaccaatgcctacatctgccatttcaacgtgcagcccatctacaatgagctcaaggagaagacgccccgcaacatgtacaacgtcggccggatctccaccgtgctctgcgtcgtcgtgtacgcgctgaccgccatctcgggttacctcctgtttggcgacgacaccgagtccgacgtgctcaccaacttcgacaaggaccttgggatcaagttcagcacggtgctcaactacattgtgaggatcgggtacatcatccacctggtcctcgtcttcccggtcgtccacttctcgctgaggcagacggtggactcgctggtcttcggcgagctcgcgccccacagcaggaagaggatgctctccctgacagtggttctgctggcccttatctacctcggctcgaccatgatacccaacatctggatggccttcaagttcaccggcgcaacgacggggctggcattgggcttcatgttcccagccctcgtggcgctgcggctggacaaggagggggagtgcctggggcgcggcgagaggctcttgtcgctcggaatgctggggctggccatcgtcgtgagcgtcgtcggggtcgtgggaaacgtgtacagcctgaggagcaagtctgagtgagtgatggattgatcatcaggattactatatttctagggcttgttatacagagactgtattaccactgccagaatacactagttagcaggtacaccagttccagctgagctgctgagcaaagctcatcatactacacattttgttcacctacagggttgtttcatatgttgttggtgggcattcttgtacttttggaccatattctttgatgtatttttcttcttctatttgttcttagatatatatatatatttatacatgtgtatcctgggtcttctttctgatcgaggcaatgaatcaacccgggttttgtactgaggttacttcttgtttgcctatgatatgacgaaagctgcattcagaaaatctaccttattaatgaattttgcattcag

SEQ ID NO: 2126 - DNA, 1871 bp, Zea mays
ccctcacctcgctcgcctacgtacgtctctctctctccgccgcgaccccccacaggcggcgccggcgccggcgcccgcgctgcagctaaaccaaaccctaagccacggccaccgccctacgccgcgggctctccgcgatgcgccggtgcgcggaggcgatcgcgagggccgtggtcgagttcctcgacgccgtcatcctggccttcatccgctcgtgcttcggcgcgcgcccccgccgcggctccggcctccgagtaagaccaacccctgcccctcctcgctctccgtccctaagcgctcatctggcggctgtctcgtggtcatcatcgtttcaggatgcgctcgtgcgcggggatcgggccgcggaggtcatctgggatgaggaaggcttggtaagggacggacgatttcatgaggatttggctgacgggtgtggaattgatgaggagctcagacgcgaggcaagttacctgaagctatgcggcactatctctgaaaccccagctgaactacgcaatgagcaatcgtatgaaaacaatttggaaactactaatgagtgtgatagcaagctcacgtatggaccaccggcaaattgcaaattgctgtttgaagctaattcatcacaagggcaacgcaatcccagatgtgaggagcgtcactcgctcaggtctatactgaacagtgaagatgctgggcgtcatcatggagctgaatatgttcctcgttcagcttcctcggaaaagaggctgtttcaaaacatgcaacacaagccacttgattctggtggttcgccgtttccaactcctctagttctcagggatgacatgcagacccctgggacagcatacgcttcacacagagggacctctatatctggaaagcgtgtgcggactcggaaacaattcatataccctgtcctcagatccatcgagaacagacttcagcagattgaactgacagaagactcttcaccattggcatcgtccgatcctctaaaggagagagacttgggagcagattctaccaaggatccaacccaagcgtcttcaacttcagtggtcaaatcaggactgtctgaaactccatcatattctgcacctgatcctaatgcctcatatggagtagaagaatcactgtcaaaatccaactcggatgaaaagaacgctgcactgagcctgtcccgctggctgaaatcttcctccgcagatgctgagaatcaagatgatgaagactgcagctttctaactgagaagcctgtcttcatggttgcacctgatctcaacttggataccagtaaccctactcctaggttgcccaaggcatgggatggcaacggtatccccaacacaacgaccagatacagagaggatcagagggtcagttggcacaccacgccatttgaacaaagactgctgaaggtgttgtctgatgaggaccgttgccctccaaggaaagtcgtccgggggaagctgttccatctcgaggagacagctgagtagcgggcagggttatcatattagcccaactgtgatgaggctgccagcgacctgttatgaaactgagctcagaagctggtaccgtcatgcatgctgctgaaggtgccgtgtacaaatagcataatttctgttggggtgtgatgctgtgtataaatgacagtttgagctgggttgtgaatatgagttactgtaccgtcatgcatgcagcattgttggctcactgctcacaagcacaccggtctgtagctcactctatggtcgcaccagcactgacatgagtgaaacgtacatttgttttctatgtatttgtgtctgaatacaggcttcaaggccttatgtgtcacatacaggcatgaaaagaaaattgttacatac

SEQ ID NO: 2127 - DNA, 1611 bp, Zea mays
cctcgctcgcctacgtacgtctctctctctccgccgcgaccccccacaggcggcgccggcgccggcgcccgcgctgcagctaaaccaaaccctaagccacggccaccgccctacgccgcgggctctccgcgatgcgccggtgcgcggaggcgatcgcgagggccgtggtcgagttcctcgacgccgtcatcctggccttcatccgctcgtgcttcggcgcgcgcccccgccgcggctccggcctccgagatgcgctcgtgcgcggggatcgggccgcggaggtcatctgggatgaggaaggcttggtaagggacggacgatttcatgaggatttggctgacgggtgtggaattgatgaggagctcagacgcgaggcaagttacctgaagctatgcggcactatctctgaaaccccagctgaactacgcaatgagcaatcgtatgaaaacaatttggaaactactaatgagtgtgatagcaagctcacgtatggaccaccggcaaattgcaaattgctgtttgaagctaattcatcacaagggcaacgcaatcccagatgtgaggagcgtcactcgctcaggtctatactgaacagtgaagatgctgggcgtcatcatggagctgaatatgttcctcgttcagcttcctcggaaaagaggctgtttcaaaacatgcaacacaagccacttgattctggtggttcgccgtttccaactcctctagttctcagggatgacatgcagacccctgggacagcatacgcttcacacagagggacctctatatctggaaagcgtgtgcggactcggaaacaattcatataccctgtcctcagatccatcgagaacagacttcagcagattgaactgacagaagactcttcaccattggcatcgtccgatcctctaaaggagagagacttgggagcagattctaccaaggatccaacccaagcgtcttcaacttcagtggtcaaatcaggactgtctgaaactccatcatattctgcacctgatcctaatgcctcatatggagtagaagaatcactgtcaaaatccaactcggatgaaaagaacgctgcactgagcctgtcccgctggctgaaatcttcctccgcagatgctgagaatcaagatgatgaagactgcagctttctaactgagaagcctgtcttcatggttgcacctgatctcaacttggataccagtaaccctactcctaggttgcccaaggcatgggatggcaacggtatccccaacacaacgaccagatacagagaggatcagagggtcagttggcacaccacgccatttgaacaaagactgctgaaggtgttgtctgatgaggaccgttgccctccaaggaaagtcgtccgggggaagctgttccatctcgaggagacagctgagtagcgggcagggttatcatattagcccaactgtgatgaggctgccagcgacctgttatgaaactgagctcagaagctggtaccgtcatgcatgctgctgaaggtgccgtgtacaaatagcataatttctgttggggtgtgatgctgtgtataaatgacagtttgagctgggttgtgaatatgagttactgtaccgtcatgca

SEQ ID NO: 2128 - DNA, 1329 bp, Sorghum bicolor
atgcgccagtgcgcggaggccatcgcgaagaccgtgctggccttcctcgacgccgtcatcctgggctgcctccgctcatgcttcggcgcgcgcccccgccgcggctccggccggcgagaggcactcgtgcacagggatcgggccgtggcggcggaggtcgtctgggatgacgaggaaggtttggtaagggatggacgaattcatgatgaattggctgactatgctggaattgatgaggagcttagacatgaggccagttacctgaagctatgcggcactatttctgaaaccccatctgaacttcgcagtgaagagtcatatgaaaacaatttggaaaatactaatgagtgtgataacaagcccacttctgtaccaccagcaaactgtatgttgctgtttgaagctaatgcatcagaaagacgtgaggggcgtcagtcgctcaggtgtgaacagaatactgaagatgctggccattatcagggagctgaatttgttcctcattcagcttcctcggaaaagagactgcttcaaaacatccagcacaagcctcttgattctagtggttcgcccttcccaactcctctagttctcagggatgatatgcagacccctggaacagcctatgcttcacatagagggacttctgtatctggaaagcgtgtgcggaccaggaaacagttcatataccctgtcctcagatccattgagaacagacttcaacagactgaactgacagaagattcttcaccattggcatcatccaatcctctaaaagggagaaacttggaagcagattctatcaaggatccaacccaaatatcttcaacttcagtggttaaatcaggattgtctgaaactcctccgtcatatttagcacctgatgctaatgcttcatactcagtaaaagaagcacagtctcctgacgagctactggatggcaaaggactaccaaaatccaactcagatgagaagaatgctgcattgagcctgtcccgctggctgaaatcttcctccacagatgctgagaatcaaggtgatgttaagtgtccagccaaggatcaatcgaatgagaagcctgtcttcatgacatctgatctgaacttggataccgataacccaactcctagattacccaaggcatgggatggcaacggcattcccaacacaaccacgagatataaagaggaccaaagggtcaattggcacaccacgccatttgaacaaagactgctgaaggtgttatctgatgaggaccgatgccctccaaggaaagtcgtccgggggaagttgttccaacttgaggagaaagctgagtggaggaccgggtag

SEQ ID NO: 2129 - DNA, 1955 bp, Sorghum bicolor
agtccaatccaatccctcgggcaatccatccatccatccagtgagcggagcgcgcgtgtatatatacatacacacggccggccggccgccgccgcaggcccgcagcaggcgtcgctcctaccgccaccggccggactcccccccccccccccccaacttgtccccatccgcttgcccccccccccttcttcttcttcttcttctaaaaattgctctgctcccctgttacccaggccccgagggaggaaaaaaaagatggcggaagaaaacgtgcgggaactgcccccgaacttcccggcggggcggaagcggtccccccaatggcgcgcggaacaactcaggggactcatccggatgatcgacgagaaggaggccgagatcagcgccgcgctccatgaagacctcgccaagccgcacatggagtcctatctccacgagatctcactgacaaagtcgtcgtgcaagtttgcgatcaacgggctcaagaactggatgaagcccgaaaaggtacctgcgtccataactacattcccgtcctccgctcaaatcgtgccggagcccctcggtgtcgtgctcatcatctcagcttggaactaccctttcatactctctattgacccggtcattggagcaatcgccgctggaaatgccgttgttctgaagccatcagaaatagcgccagctacctcgtcagtgttagcaaatctgctacccaagtatgttgataactcctgcattaaagttgtggagggaggcgttccagaaacaaccgcactgttggaacagagatgggataagatcttctacacaggtagtggaactgtagcacgcatagtgatggcagcagccgcaaagcatttaaccccggtggctttggagcttggtgggaaatcccctgttgttgtggattcgaatgttgatcttcatgttgccgttaagaggattgttgttggcaaatggggatgcaacaatggccaagcgtgcattgctccagattacatcataacgacgaaatcattcgcaccagagctggtggcctctttgaaaagagtcttggtaaggttctatggggaggatcctctgcaatcagcagacttgtctcgtattgtgaattcgaagcaattcaagagattgcaagatttgatagaggaaaaaagagttgctgacaagattgtgttcggcggcgaggctgatgaggagcaattaaaaattgctcctacagtattgttagatgttccccaagattcagcaattatgacaggggaaatatttgggcccttgcttccgattgtgacggtcgaaaagattgaggaaagcttcaacctgatcaacgccaagccaaagccactcgctgcctaccttttcaccaagaacaagaagctgcaagaggagtttgtagccaacgtccctgcaggagggatgcttgtgaacgataccgcgctacatctcgccaacccatacttgccctttggcggcgtgggcgacagcgggatggggtgctaccacggcaagttcggcttcgactgcttcagccacaagaaggcggtgctgatccgcggctttggtggcgaggcgaacgccaggtacccgccctacacgacggagaagcagaagatcctgagaggactcatcaacggcagcttcatcgccctcatccttgctctcctcggcttccccagggagaagcgttagatctatgatctatgatccgtcctcttgtcggatccggtacagcattttgttcgtgttcgtcgtcaggtgcacagtatacaccatcatatgctgtcaaatagatgcaacaactgcgtgccgtgtgctttgtgttacacggttgtataatgcatatatgttgtcacattgacatgtacgtaagggagtttgcataaataagtgttatgtgtctgtcaattattcagtgtgcagaatggatattggataggatgcgtggctgtggt

SEQ ID NO: 2130 - DNA, 2110 bp, Zea mays
tcgcccgccgcacgtcacgacatgcccttctccctgctagtgctgccaccgctcccgctgaaaaagattagttattttttatttttatttttaataattgaacctcttctgccgtctcttctccctccttgagtactacttcctggcaatttatcttctccgacatcaacaagtgattgctcgcggccccgcaagcgagagagaacttttcaacccaaacgaacagtccaatccaattcctagggcaatccggtgaacgtgtgcgtgtgtgtatatatacacacggccgccgccgccgcaggcctcgctcctaccgccaccggactcccctttcgcgtccgcttcgcttgttgttgctgtgctctcctgttaccgggacccggaggaaggaaggaaggatggcggggatggcggaggagacggtgcgggagctgcgcgcgagcttcgcggcggggcggacgcgcccggccgagtggcgggcggcgcagctcaaggggctcatccggatgatcgacgagaaggaagccgagatcagcgccgcgctccacgaggacctcgccaagccgcatatggagtccttcctccacgagatatcacttacaaagtcgtcgtgcaagtttgcgctcaaggggctcaagaactggatgaagcccgagaaggtacctgcggccataactacattcccgtcctccgcccaaatcgtgccggagcccctcggcgtcgtgctcatcatctcagcctggaactaccctttcatactctctatcgacccagtcattggagcaatcgctgctggaaatgctgttgttctgaagccatcagaaatagcgccagctacctcgtcactgttagcaaagctgctacccgagtatgttgacaactcctgcattaaagttgtggagggaagcgttccagaaacaaccgcactcttggaacagagatgggataagatcttctacacaggtaatggaactgtaggacgtatagtgatggcagcagccgcaaagcatctgaccccggtagctctggagcttggtgggaaatcccctgttatcgtggattcaaatgttgatctgcatgttgctgctaagaggattgttgttggcaaatggggatgcaacaacggccaagcatgcattgctccagattacatcataacgacaaaatcatttgcaccggagctggtggcctctttcaaaagagttttggaaaggttctatggggaggatcctctgcaatcagcagacttgtctcgtattgtgaattcgaagcagttcaaaagattgacaaatttgatagaagaaaaaagagttgctgacaagattgtgtacggcggcaaggctgatgagaagcaactaaaaatttctcctacactattgttagatgttcccgaagattcagaaattatgacaggcgaaatatttgggcccttgcttcctattgtgacggtcgaaaagattgaggaaagcttcgacttgatcaatgccaagcctaagccactagccgcctaccttttcaccaagaataggaagctgcaagaggagtttgtggcgagcgtccctgcaggagggatgcttgtaaacgacactgcgctacatctcaccaacccgtacatgcccttcggcggcgtcggcgacagcgggatgggctgttaccacggcaagttcggcttcgactgcttcagccacaagaagggagtcctgatccgcggctttggcggggaggcgaacgccaggtacccgccctacacgacggagaagcaaaagatcctgaggggcctcatcaacggcagcttcatcgccctcatccttgccctcctgggcttccccagggagaagcgttagatgctccggcctctttttggtttcggtacagcctttgtagtccctgttcgtcgtcaggtgcacagtatacaccgtcatatgctgtcaaatagatgcaatgcaacgactgcgcgccgtgcttgtgttgcaagcgtggataatgcatatattatattgtagcattgacatgatgtgcgttattgcattttactgtacgtaagggagttggataaataagtgtgatttgtttgtcaattattcagtgttgagaaaaaaaaaaaaaaaaa

SEQ ID NO: 2131 - DNA, 1818 bp, Zea mays
cgcctaccgccacctgactccctctgccttctcgtcgctctgctcctccgttgccgtgaccctaagggaggaggacgaggaggaggaggaggaggggaaggaacggagggatggcggaggagacggtgcaggagctgcgcgcgagcttcgcgtcggggcggacgcgccgggccgagtggcgggcggagcagctcaaggggctcatccggatgatcgacgagaaggaggccgagatcagcgccgcgctccatgaggacctggccaagccgcacatggagtcctacctccacgagatatcgattacaaggtcctcgtgcaagtttgccctcgacgggctcaagagctggatgaagcccgagaagatacctgcggccttaaccacgttcccgtcctctgctcaaatcgtgccggagcccctcggtgtggtgctcatcatctcagcctggaactaccctttcatactctcgatcgacccagtcattggagcaatcgcagctggaaatgctgttgttctgaagccgtcagaaatagcgccagctacctcgtcattgctagcgaagctgctgcccgagtacgttgataactcctgtattaaagtcgtggagggaggcgttgcagaaacaacctcactcctggaacagagatgggataagatcttctacacaggtaatggaaccgtaggacgcatcgtgatggcagcagccgcaaagcatctaactccggtggctctggagcttggtgggaaatcccctgttgttgtggactcaaatgttgaccttcatgttgccgtcaagaggatcgttgttggcaaatggggatgcaacaacggccaagcatgcattgccccagactacatcataacgacaaaatcatttgcgccagagctggtggcctccttgaaaagggttttggaaaggttttacggggaggatcctctgcagtcagcggacctgtctcgtatcgtgaattcgaagcacttcaggagactgacggaattgatagaagagaaaagcgttgctgacaagatcgtgtacggcggcgaggttgatgagaagcagctaaaaattgctcctacactgttgctcgacgtcccccaggattcagcaatcatgaccggggaaatatttgggcccttgcttcctatcgtgacggtggaaaagatcgaggagagcttcgacttgatcaacgccaggcctaagccgcttgccgcctaccttttcaccaagaacaagaagctgcaggaggagtttgtggcggacgtgcctgcaggagggatgcttgtgaacgacaccgtgctacatctcgccaacccgtacatgcccttcggcggcgtcggcgacagcgggatggggtgctaccacggcaagttcgggttcgactgcttcagccacaagaagggggtcctggtccgcggctttggcggcgaggcgaacgccaggtacccgccctacacgacggagaagcagaagatcctgagggggctcatcaacggcagcttcatcgcgctcatccttgccctcctgggcttcccgagggagaagcgttagatgggccttctaactgggcccagtacaagcgttttgttcgtgttcgatggatggcacagtatatacactgccatgtgctgccaaatagatgcaaaccgtgcttgtgttacacggctgtgtaatgcattatattgttgcattgacatgtgggttaccgaattgtacgtaagggagttgcattaataagtgtggtctgcctgtcaattatcaagtgttcacaatggatacttcgacggatgcatcatgcattcatgcatggatgtggcatatc

SEQ ID NO: 2132 - DNA, 2111 bp, Zea mays
aatcgcccgccgcacgtcacgacatgcccttctccctgctagtgctgccaccgctcccgctgaaaaagattagttattttttatttttatttttaataattgaacctcttctgccgtctcttctccctccttgagtactacttcctggcaatttatcttctccgacatcaacaagtgattgctcgcggccccgcaagcgagagagaacttttcaacccaaacgaacagtccaatccaattcctagggcaatccggtgaacgtgtgcgtgtgtgtatatatacacacggccgccgccgccgcaggcctcgctcctaccgccaccggactcccctttcgcgtccgcttcgcttgttgttgctgtgctctcctgttaccgggacccggaggaaggaaggaaggatggcggggatggcggaggagacggtgcgggagctgcgcgcgagcttcgcggcggggcggacgcgcccggccgagtggcgggcggcgcagctcaaggggctcatccggatgatcgacgagaaggaagccgagatcagcgccgcgctccacgaggacctcgccaagccgcatatggagtccttcctccacgagatatcacttacaaagtcgtcgtgcaagtttgcgctcaaggggctcaagaactggatgaagcccgagaaggtacctgcggccataactacattcccgtcctccgcccaaatcgtgccggagcccctcggcgtcgtgctcatcatctcagcctggaactaccctttcatactctctatcgacccagtcattggagcaatcgctgctggaaatgctgttgttctgaagccatcagaaatagcgccagctacctcgtcactgttagcaaagctgctacccgagtatgttgacaactcctgcattaaagttgtggagggaagcgttccagaaacaaccgcactcttggaacagagatgggataagatcttctacacaggtaatggaactgtaggacgtatagtgatggcagcagccgcaaagcatctgaccccggtagctctggagcttggtgggaaatcccctgttatcgtggattcaaatgttgatctgcatgttgctgctaagaggattgttgttggcaaatggggatgcaacaacggccaagcatgcattgctccagattacatcataacgacaaaatcatttgcaccggagctggtggcctctttcaaaagagttttggaaaggttctatggggaggatcctctgcaatcagcagacttgtctcgtattgtgaattcgaagcagttcaaaagattgacaaatttgatagaagaaaaaagagttgctgacaagattgtgtacggcggcaaggctgatgagaagcaactaaaaatttctcctacactattgttagatgttcccgaagattcagaaattatgacaggcgaaatatttgggcccttgcttcctattgtgacggtcgaaaagattgaggaaagcttcgacttgatcaatgccaagcctaagccactagccgcctaccttttcaccaagaataggaagctgcaagaggagtttgtggcgagcgtccctgcaggagggatgcttgtaaacgacattgcgctacatctcaccaacccgtacatgcccttcggcggcgtcggcgacagcgggatgggctgttaccacggcaagttcggcttcgactgcttcagccacaagaagggagtcctgatccgcggctttggcggggaggcgaacgccaggtacccgccctacacgacggagaagcaaaagatcctgaggggcctcatcaacggcagcttcatcgccctcatccttgccctcctgggcttccccagggagaagcgttagatgctccgcctctttttggtttcggtacagcctttgtagtccctgttcgtcgtcaggtgcacagtatacaccgtcatatgctgtcaaatagatgcaatgcaacgactgcgcgccgtgcttgtgttgcaagcgtggataatgcatatattatattgtagcattgacatgatgtgcgttattgcattttactgtacgtaagggagttggataaataagtgtgatttgtttgtcaattattcagtgttgagaaaaaaaaaaaaaaaaa

SEQ ID NO: 2133 - DNA, 1853 bp, Zea mays
gtgcgtgtgtatatacatacacacggccgccgccgccgcaggcctcgctcctaccgccaccggactcccctttcgcgtccgcttctcttgttgttgctgtgctctcctgttaccgggacccggaggaaggcaggaaggaaggaaggaaggaaggcggggatggcggaggagacggtgcgggagctgcgcgcgagcttcgcggcggggcagacgcgcccggccgagtggcgggcggcgcagctcaaggggctcatccggatgatcgacgagaaggaagccgagatcagcgccgcgctccacgaggacctcgccaagccgcatatggagtccttcctccacgagatatcacttacaaagtcgtcgtgcaagtttgcgctcaaggggctcaagaactggatgaagcccgagaaggtacctgcggccataactacattcccgtcctccgcccaaatcgtgccggagcccctcggcgtcgtgctcatcatctcagcctggaactaccctttcatactctctatcgacccagtcattggagcaatcgctgctggaaatgctgttgttctgaagccatcagaaatagcgccagctacctcgtcactgttagcaaagctgctacccgagtatgttgacaactcctgtattaaagttgtggagggaagcgttccagaaacaaccgcactcttggaacagagatgggataagatcttctacacaggtaatggaactgtaggacgtatagtgatggcagcagccgcaaagcatctgaccccggtagctctggagcttggtgggaaatcccctgttatcgtggattcaaatgttgatctccatgttgctgctaagaggattgttgttggcaaatggggatgcaacaacggccaagcatgcattgctccagattacatcataacgacaaaatcatttgcaccggagctggtggcctctttcaaaagagttttggaaaggttctatggggaggatcctctggaatcagcagacttgtctcgtattgtgaattcgaagcagttcaaaagattgacaaatttgatagaagaaaaaagagttgctgacaagattgtgtacggcggcaaggctgatgagaagcaactaaaaatttctcctacactattgttagatgttcctgaagattcagaaattatgacaggcgaaatatttgggcccttgcttcctattgtgacggtcgaaaagattgaggaaagcttcgacttgatcaatgccaagcctaagccactagccgcctaccttttcaccaagaataggaagctgcaagaggagtttgtggcaagcgtccctgcaggagggatgcttgtaaacgacactgcgctacatctcaccaacccgtacatgcccttcggcggcgtcggcgacagcgggatggggtgctaccacggcaagttcggcttcgactgcttcagccacaagaagggagtcctgatccgcggctttggcggggaggcgaacgccaggtacccgccctacacgacggagaagcagaagatcctgaggggcctcatcaacggcagcttcatcgccctcatccttgccctcctgggcttccccagggagaagcgttagatgctccggcctcttgtcggtttcggtacagcctttttagtccctgttcgtcgtcaggtgcacagtatacaccgtcatattctgtcaaatagatgcaatgcaacgactgcgcgccgtgcttgtgttgcaagcgtggataatgcatatatattgtagcattgacatgatgtgcgttattgcattacgtaagggagttggataaataagtgtgatttgtttgtcaattattcagtgttgagaatggatgatacttgcat

SEQ ID NO: 2134 - DNA, 1720 bp, Oryza sativa Japonica Group
ggctgcttcctcctgactcctctcctgcattctctcgcttctgacggcggcaactaagctttttgggattcgattcgaggaggaggtgatggcggaggaggaggtggcggcggtggtgggggagctgagggggagcttcaggtccgggaggacgagggcggcggagtggcgggcggcgcagctgcgggggatcgtgaggatggtggaggagagggagggggacatctccgacgcgctccactccgacctcgccaagcctcgcatggagtcctacctccacgagatatcattggcaaaggcagcctgcacatttgccttgaaggggttgaagaattggatgaaacctgagaaggtacctgccgccctcactacattcccatcaactgcacaaattgtgtcagagcctcttggtgtcgtcctagtcatctcagcatggaactaccctttcttgctctccatcgacccagtcataggagcaattgctgctgggaatgccgttgtgctgaagccatcagaaattgcaccagccacctcagcattgttcgccaagctgctacctgaatacgttgatagctcttgcataaaagtggtggagggaggcgttccagaaacaaccgcactcttagaacaaaagtgggataagatcttctacacaggtagcggaaatgtgggccgcatagtgatggcagcagctgcaaagcatcttacccctgtggctctagagcttggtggaaaatgccctgcaattgttgattctaatactgatcttcatgttaccatgaagaggctagctgttggcaagtggggatgtaacaacgggcaggcatgcattgctccagactacgttataacaacaaaatcatttgctccagagctggttgactctttaaaaagagttttgaaaaggttctatggggaggatcctttgcaatcagaagacttgtcccgtattgtgaattctaaccatttccgtagattgacaaatttgatagaggataagaaagtcgcccaaaagattgtatatggtggccaaacagatgagaagcaactaaaaatagctcctactgtgttgttagatgttcctcttgatacaacactcatggcagaggaaatttttggtcccttacttcccattgtaacagttgacaagattgaagatagcatccagttcatcaactcaaggaccaagccacttgcagcctatcttttcaccaaggacaagaaactgcaagaggaatttgtgtccaatgtcccagcaggaggaatgcttgtaaatgatgttgccctgcatctcgccaatccgcacctgccatttggcggagtcggcgacagcgggatcggctcctaccatggcaaattcagcttcgattgtttcacccacaagaaggccgtcctgatccgcggcttcggaggggaggcaactgctaggtacccaccttacacgattgagaagcagaagatcctgagaggactgataaacggcagcttctttgcactgattcttgccctcctgggcttccccaaagagaggcgttagaaaactttcagtagtttcagtacagtacttgtgcatttgagtgagtgcaggccatgctgtcaatggaagccatttcctgcatgttgttttacacaggtgtacattatatttgtcggattttcttgtgtaacttattgaaaattctactacacagggttacataaataaacatgatttgtcagt

SEQ ID NO: 2135 - DNA, 4275 bp, Oryza sativa Japonica Group
agggggagcttcaggtccgggaggacgagggcggcggagtggcgggcggcgcagctgcgggggatcgtgaggatggtggaggagagggagggggacatctccgacgcgctccactccgacctcgccaagcctcgcatggagtcctacctccacgaggtgagcgccgcctttgttgttctttctctccatggagaattcgatgatgagattgggataggataggataggattgaactttacttttttctgctctgtttgaactttgtttttcgtggccaagattgttgggattggcaagaactgcaaacttgggggttgattctttgattctgatttcgtcttggctgaaagtagaatcagatatttcatcttgactggaaagaaatttagttctgaaagtaaaattagtttttgatgattatattcagagcccagattgctgctgtgtagatcgaggtgattttgagttaaaattaatttttctttggcgttttgagaggtgattgaagtaaaattaaatttctttggtgttttgaggcgatgattggagtagaattaaatttcttttttggtgctggatagatcgaggtgatgtgttgttgaacactcgctgctgctgctgctgttttttctggtggtgtccactgctttttgggaaagtagcgattctctctagtcgtatcttttcatgtgcgcttgacgcatacaaatgttgaaatcgttgcgtgctccgctaatttagtggtggtcaaacactccacaccggcgttgcttccacgaattcctccctccgtttggtcccagattggtagacgttcttgtcagattatttttattattattgtcgttcttatcggattattattattattattattattattattattattattattattattattattattattattattattactactgtttctgctattgttattggttcgcctgaaaattggtgtgtctttttttaatttattattaaaaggtgcaactttgtatgtatcgctacatgctgtgttcttcaattctgttccattgtttatctgagctctgtttgtccaatcctggaattccttcattgagtgtttccttgcgtttttgagatgcattctttaagacgtcactgtacaactcaagctaggaatatactgatttgagtgtaattaatctgcctctctatcaatagaagaggaaaaaaataataatcttttgctgctatttacttcacaatttatgctcatatttctcagaaaaaggcagtagtagtggaatacaagttgagatattcttctcacctgtcacttcaagattgattttttttaaccttctaatttagcagctagtaacgacttcttgcttgactgccttttcatgaccagatatcattggcaaaggcagcctgcacatttgccttgaaggggttgaagaattggatgaaacctgagaaggtagtactactatttcttttgcatgttcagtctccagtactatccattaaaagtttattcttttgttgatcagatgctaatcatgctaaccctcataaatgatgatcaggtacctgccgccctcactacattcccatcaactgcacaaattgtgtcagagcctcttggtgtcgtcctagtcatctcagcatggaactaccctttctgtaagttaaatggtgcattcatgtttcatactcgtaattgcataaacaccgttattccatagagtaatgctattgagtagggattaattgcaatttttggtgaaggttggaagatattgtttctatggattagtttgttgcatgatgtccaaagtttgtgtcatgctttttatgtgcttgaggattggttgcattcatagttggtatctttccttttcattggtactattctttttcaatattactcctttccattgcaattaactatatgagtccttaaaaaaaccccactatctgtaacagttctccagttcttcaatatctgagcattagtttcagcactacttgaaaaatggggatcctcttataaatattctcctttttctgtgcaccaaacacaaacttgagctttcttttttggtccttgagaaaatgagaaggcacctgcttttttaagtactattaatatgtggtactacctattggcatctctacattatgaaggttctgtgcggtaccgcaaattaacactagaaaggtatctcctgtcttggtgtaatgaataacatttttggcctgcttgcagaccttcgaaaatttaagacaagttcccaacccccacaccaccaccaaaggcggtcctcactggttcgaatttctaatcacctcacatttttcttttgtagtgctctccatcgacccagtcataggagcaattgctgctgggaatgccgttgtgctgaagccatcagaaattgcaccagccacctcagcattgttcgccaagctgctacctgaatacgttgatagctcttgcataaaagtggtggagggaggcgttccagaaacaaccgcactcttagaacaaaagtgggataagatcttctacacaggttaacttcttatcttgcatagttttccagtatgctaatgatttttttttttttttgctttagctgctgggtacttcactaaattattcatccattctgttttgctgttaagacgctaaagtgtagatattcctttgaaactgcaggtagcggaaatgtgggccgcatagtgatggcagcagctgcaaagcatcttacccctgtggctctagagcttggtggaaaatgccctgcaattgttgattctaatactgatcttcatgtaaacatctgctcctgaactgtcaagtctttagatagttacatatagaaacactcttgtttctcaagatctcctaacatttttcttctccatgtaggttaccatgaagaggctagctgttggcaagtggggatgtaacaacgggcaggcatgcattgctccagactacgttataacaacaaaatcatttgctccagagctggtaaagaataccatgcacattagacctaaagaagttatagagctaattaaagtcctatttgcttagccatgaagctttcctttttgtaggttgactctttaaaaagagttttgaaaaggttctatggggaggatcctttgcaatcagaagacttgtcccgtattgtgaattctaaccatttccgtagattgacaaatttgatagaggataagaaagtcgcccaaaagattgtatatggtggccaaacagatgagaagcaactgtaagaatttaatttgaaatctgacattactgttgggctactagcaaaaggagtttgattgatctttaacactttgtttccatacattgcagaaaaatagctcctactgtgttgttagatgttcctcttgatacaacactcatggcagaggaaatttttggtcccttacttcccattgtaacagtaagtggtttttctcggcctttgtcatgtttctcttataattaatatcgcgttacctcttaaaattctcttagaaccatataaaacagaaggttgaaacacatatacatgaacataatttcccaaattaaagtgagaagtggtacaattccattaaaaaatggtattttccaggttggttctagtggcaaaattagagctatacttctaagatctttgtgtagtttcatcatgccataattttatctcgccaagtcaacatatgttggctttgctggtacaatcttagtatctgattctgtttggactggttcctaggttgacaagattgaagatagcatccagttcatcaactcaaggaccaagccacttgcagcctatcttttcaccaaggacaagaaactgcaagaggaatttgtgtccaatgtcccagcaggaggaatgcttgtaaatgatgttgccctgcatgtaagtagtcctcctccctgaaaccctgaactgaaagtaacaacatttgctcacagcatgctgatctgattgattttcatctgctttccaccacagctcgccaatccgcacctgccatttggcggagtcggcgacagcgggatcggctcctaccatggcaaattcagcttcgattgtttcacccacaagaaggccgtcctgatccgcggcttcggaggggaggcaactgctaggtacccaccttacacgattgagaagcagaagatcctgagaggactgataaacggcagcttctttgcactgattcttgccctcctgggcttccccaaagagaggcgt

SEQ ID NO: 2136 - DNA, 1810 bp, Hordeum vulgare subsp. vulgare
ggatctccatctccatctccatccccgggtgcacacttctctcctacccccaccatccctcccctgtttctcgccttatctccattgccgcctgccgccacttcagcctgggcttgagctagccatggaaccggagcgagctgttgtcatggagccgacggcggcggcgttgatggcggagctgcggggcagcttcagggagggccggacgcggccggccgagtggcggacggcgcagctcaggtcgctcgtcaggatgatcgaggagaaggaggacgacatcagcgacgcgctccacgccgacctcgccaagccgcgcatggaggcctacctccacgagatatcgctagcgaaaggggcctgtatgtttgccctgaaggggctcaagaattggatgaagcctgacaaggtaccttctgccataactacattcccatccactgctcaaatcgtgccggagcccatgggtgtcgttctcgtcatatcagcctggaactatcctttcttgctatctatcgagcccgtcattggagcaattgctgctgggaatgctgttgtgctcaagccatcggaaatttcgccagcgacatcttcattgttcgcgaagctgctaccagagtaccttgatagatcatgtataaaagttgtggagggaggtgtctctgaaacaagtgcactcttagaacaaaaatgggataagatcttctacacaggaaatggatatgtcgctcgcgtagtgttgacagcagctgcaaagcatctaacccctgttgctctggagctcggtggaaaatgccctgttattgtcgactctaacgtcgatctgcatgttgctgctaagaggattgctgttggtaaatggggatgtaacaatggccaggcatgcattgctccggattacatcataacgacaaaagcgtttgttacagagctggtcgactctttgaaaagagtcttggaaaggttctacggggaggatccgttgcaatcggcggacctgtctcgtattgtaaatattagccatttccaccgattagcaaagttgctagatgataagaaagtcgccgaaaagattctgctcggtggccagacagatatggagcaactaaaaatagctcctacggtgctggtagatgttcctcttgatacagaactcatgaagggggaaatatttggccccatgcttccaattataacggtcgacaagattgaagaaggcatcacgcacatcaacgccggggcgaagccactcgcggcctacctcttcaccaaggacaagaaactgcaacaagatttcgtctcaaacgtctcggcaggaggcatgctcgtcaacgacgtcgccctacacctgacgaacccgcatttgccgttcggcggcgtgggcgacagcggcacggggtcgtaccacggcaagttcagcttcgactgcttcactcaccggaaggcggtgctgatccgcgggtttggcggcgaggcgaacgcgaggtacccaccctacacggcagagaagcagaggatcctcaggggcctcatcaagggcagcttctttgcgctgatccttgcgctcctgggattcccaagggagaagcgctagctgagctgagccccctcccttctccagtacagcatagcaggattattcatgttctgcactgtaaagtgttagtgcgcgagcgtgttcaacaggtgtaaaatatgggactactatccgatatctggatgtaagtcgatttaatttcttacataaacaaaccttgtttgccggttaatccagcgtgaaggatgaagaggataacgccctgcttgcaag

SEQ ID NO: 2137 - DNA, 1984 bp, Eulaliopsis binata
agaaagaactcgtggtgggtccgggtcgcaagaccctaggtgttcgttcgtcagcaacgaaaccagcgaggatgcccggcctgcctctgcctcaaccgttaaatcagaatatcggacgcgaatatgcttatcctgggtcgaccggccgggccttccgccagcagctaagaactgcattgtctccagatgagaaacttgctgctgaaagagatttggctctgtattgcaagccagtcgagctctacaatattattcaacggcgagctgtgaaaaacccactttttattcaaagatgtcttctttacaatatacacgcgaggaggaaaaagaggattcagataaccatatcactttctagaagtacaaatactgagttgcaggcacatgatatctttcctctttatgttctgttagctagacctactagtaacctttcacttgaagggcattctccaatttatcgattcagtcgggttcgcttgcttacttcttttagtgaacttggaaataaggacaacagtgaagccacattcattattcctgatgtgaagagtttgtcaacctcccatccttgcaaccttgacatcatctttattagctgtgggcaagtcggacaaagtaatggtgaagataactgctctgggaaccatgtggaaggttctcctctccagatgcttgaagggaaatgctcctggggtaaaataccaactaatttacttgcttcgtctttggagagttgtgtcaatttaagtttgggacatattgtggagttggcatctaaaattacaatgagaccaagcttcttagagccaaaatttctggagcaagacagttgcttgacattttgctctcataaggttgatgctacgggttcatatcagctacagctatgcatgtccgcacaagaggctggtgcaagagacatgtctttgtctccgtatagtagttacttatatgatgatgtcccaccttcatcattatcagatatcataaggttaagatctgggaatgtactttttaattacaagtaccacaataatacgatgcaagagactgaagtcactgaagatttctgttgtccgttttgctatgtacgatgtggaagcttcaagggtctgggatgccatttaaactcatcgcatgacctattccactatgagttttggatatctgaagactaccagattgttaatgttagcctgaaggccgatgcttggagaaccgagcttattgctgagggcgttgatccgaggcatcaaacgttttcttaccgctcaaggtttaagaagcgtagacgatcaaagaccacaactgataaaatcaggcatgtacattcacatattatggaatcagggtcacctgaagatgcccaggcaggatctgaggacaactgtgtgcaaggggagaatgggacttctgtagcaaatgcttcgattgatcctgctcaatctttacatggcagcaatctttcaccaccaacagtactacagtttgggaagacgaggaagctatctgagcgagctgaccctagaaatcggcaactcctgcaaaaacggcagttcttccattctcacagagcgcagccaatggcactggaacaagtattctcggaccgtgatagtgaagatgaagttgatgatgatattgctgactttgaggatagaagaatgcttgatgattttgttgatgttacaaaagacgaaaaacttattatgcatatgtggaattcattcgttcggaaacaaagagtgctagcggatggtcatataccttgggcctgtgaggcattctctcagttgcatggacgacaacttgtacagaatcccgctcaactgcggggctggcgtttcttcatgattaaactttggaaccacaacatcttagatgcccgcaccatggacacatgcaacacagtacttcaaagtttccaagaagaaagcacaggcctaaagtaattttgatgcttcggaccaaagatttaagg

SEQ ID NO: 2138 - DNA, 2073 bp, Zea mays
gaccctaggtgttcgtcagcagcgaggatgcccggcctgcctctgcctcaatcgttaaataagaatattggatgtgaatatgcctatcctgggtctacaggccaggccttccgtcagcagctaagaactgcattgtctccagatgagaaacttaccgctgaaaaagatttggctctgtattgcaagccagtcgagctctacaatattattcaacggcgagccatgaaaaatcccctttttattcaaagatgccttctttataatatacatgcgaggaggaaaaagaggattcagataaccatatcactttctggaagtacaaatactgagttgcaaacagattacctctttcctctttatgttctgttagctagacccactagtaacctttcacttgaagggcattctccaatttatcgattcagtcgggtttgcttgcttacttcctttagtgaacatggaaataaggacagcagtgaagctacattcatcattcctgacgtgaagagtttgtcaacctcccgtgcttgcaaccttgatattatctttatcagctgtgggcaagttgggcaaagtaatggtgaagataactgctctgggaaccatgtggaagcttcttctctccaaatgcttgaagggaaatgctcctggggtaaaataccaactaatttacttgcttcatctttggagagttgtgtcaatttaagtttgggacatattgtggagttggcatctaaagttacaatgagatcaagcttcttagagccaaaatttctggagcaagacaattgcttgacattttgctctcataaggttgatgctgtgggttcatataaactacaactatgcatgtccgcacaagaggctggtgcaagagatatgtctttgtctccacatagtagttactcatataatgatgtcccaccctcgtcattatcagatatcataaggttaagatctggcaatgtactttttaattacaagtactacagtaatacaatgcaagagactgaagtcactgaagatttctcttgtccattttgctatgtacgatgtggaagcttcaagggtctaggatgccatttaaactcgtcacatgatctattccactatgagttttggatatccgaagagtaccaggttgttaatgttagtctgaaggctgatgcttggagaacagagctttttgcggagggcgttgatccaaggcatcaaacattttcttatcgctcaaggtttaagaagcgtagacgatcaaagacaacaatggagaaaatcaggcatgtacactcacatattatggagtcaggttcacctggagacgaggcaggatctgaggacaactttgtgcaaggggagaatgggacttctgtagcaaatgcttcgattgatcctgctcaatctttacatggcagcaatctttcaccaccaacagtactacagtttgggaagacaaggaagctatctgagagatctgaccctagaaatcggcaactcctgcaaaaacgacagttcttccattctcacagggcgcagccaatgcaactggagcaagtgttctcggaccgtgatagtggagatgaagttgatgatgatattgctgacttcgaggatagaagaatgcttgatgattttgttgatgttacgaaagatgaaaaacttattatgcatatgtggaattcgtttgttcgaaaacaaagagtgttagctgatggtcatataccttgggcctgcgaggcattctcccagttgcatggacgacaacttatacaaaatcctgctctgctgtggggttggcgtttcttcatgattaaactttggaaccataacattttagatgcccgcactatgaacacatgcaatacagtccttcaaattttacaagaagaaagcacaggactaaagtaattttgatgcttctgatgaaaattcaagggaagaagatttctttaccatttccaagaagaaagcatagaattggagtaactttttattgataatttcattcatatctattgtcaattgtattaatggtttttaaaagagacaaatcatgtctaactctcacgctgt

SEQ ID NO: 2139 - DNA, 2195 bp, Zea mays
tctcgctgccccgcttgaccgcctgctagcgctgcagtttgatgctgatgacctgatccctccgttgggtaggttcttgggcgcggaaagaacaaagaactcgtggtgggtccgggtccgcaagaccctaggtgttcgtcagcagcgaggatgcccggcctgcctctgcctcaatcgttaaatcagaatattggatgtgaatatgcctatcctgggtctacaggccaggccttccgtcagcagctaagaactgcattgtctccagatgagaaacttaccgctgaaaaagatttggctctgtattgcaagccagtcgagctctacaatattattcaacggcgagccatgaaaaatcccctttttattcaaagatgccttctttataatatacatgcgaggaggaaaaagaggattcagataaccatatcactttctggaagtacaaatactgagttgcaaacacattatgtctttcctctttatgttctgttagctagacccactagtaacctttcacttgaagggcattctccaatttatcgattcagtcgggtttgcttgcttacttcctttagtgaacatggaaataaggacaacagtgaagctacattcatcattcctgacgtgaagagtttgtcaacctcccgtgcttgcaaccatgatattatctttattagctgtgggcaagttggacaaagtaatggtgaagataactgctctgggaaccatgtggaagattcttctctccaaatgcttgaagggaaatgctcctggggtaaaataccaactaatttacttgcttcatctttggagagttgtgtcaatttaagtttgggacatattgtggagttggcatctaaagttacaatgagaccaagcttcttagagccaaaatttctggagcaagacagttgcttgacattttgctctcataaggttgatgctgtgggttcatataaactacaactatgcatgtccgcacaagaggctggtgcaagagatatgtctttgtctccatatagtagttactcatataatgatgtcccaccttcgtcattatcagatatcataaggttaagatctggcaatgtactttttaattacaagtactacaataatacaatgcaagagactgaagtcactgaagatttctcttgtccattttgctatgtacgatgtggaagcttcaagggtctaggatgccatttaaactcatcacatgatctattccactatgagttttggatatctgaagagtaccaggttgttaatgttagtctgaaggctgatgcttggagaacagagctttttgcggagggcgttgatccaaggcatcaaacattttcttatcgctcaaggtttaagaagcgtagacgatcaaagaacacaatggagaaaatcaggcatgtacactcacatattatggaatcaggttcacctgaagatgaggcaggatctgaggacaactttgtgcaaggggagaatgggacttctgtagcaaatgcttcgattgatcctgctcaatctttacatggcagcaatctttcaccaccaacagtactacagtttgggaagacaaggaagctatctgagagatctgaccctagaaatcggcaactcctgcaaaaacgacagttcttccattctcacagggcgcagccaatgcaactggagcaagtgttctcggaccgtgatagtgaagatgaagttgatgatgatattgctgacttcgaggatagaagaatgcttgatgattttgttgatgttacgaaagatgaaaaacttattatgcatatgtggaattcatttgttcgaaaacaaagagtgttagctgatggtcatataccttgggcctgcgaggcattctcccagttgcatggacgacaacttatacaaaatcctgctctgctgtggggttggcgtttcttcatgattaaactttggaaccataacattttagatgcccgcactatgaacacatgcaatacagtccttcaaattttacaagaagaaagcacaggactaaagtaattttgatgcttctgatgaaaattcaagggaagaagatttctttaccatttccaagaagaaagcatagaattggagtaactttttattgataatttcattcatatctattgtcaattgtattaatggtttttaaaagagacaaatcatgtctaactctcacgctg

SEQ ID NO: 2140 - DNA, 2518 bp, Dendrocalamus latiflorus
gcgggggggggacgacaggtcaagcagcagaggcgtgcgtcgcccccagattctctcgactcccaaccccgccgccgccgtacttccgtcggaacccaccaggagagccgtcgatagatctcctccgccccgcccgctaccggagatccatccggagcacggcctctgctcccggcgcttgtgtgcgcgcggattccggtggggggtcctgcgacctcgcaggacccgaggtgctcgtcggcggcgaggatgcctggcctaccgctacctgcccgggacgcagcgaatattggatgtggatttggttatccccggtctgcagaccagatgtgccgtcaacagtcaagagctcgattgtccccagatgagcagcttgctgccgaagaaaattttgcgttgtactgcaagccagttgagctgtacaatattattcagcgacgagccattaaaaatcccgcttttcttcaaagatgccttctttacaagatacatgcaagacggaaaaaaaggattcaaataaccatttcactttctggaggtgcaaatactgagttgcaagaacataatatctttcctctttatgccctattagctagacctactagtaatgtttcgcttgaagggcattctccatatcggttcagtcgggcttgtttgctgacatcttttaatgaattcggaaataaagaccacactgaagccacattcatgattcctgatgtgaagaatttatcaacctcccgagcttgcaaccttaacattatccttattagctgtgggcaagctgggcaaacacttggtgaaaataccttctctgggaaccatgtggaaggttctgctctccaaaagcttgaagggaaatgtttctggggtaaaataccaatttgtttacttggttcgtctttggagaatgatgtggacttaactttgggacatactgtggagttggcttctaccgttagtatgagcccaagcttcttagagccaaaatttctggagcaggacagttgcttgacattttgctctcataaggttgatgcaacgggttcacatcaactacaagtaagcatatctgctcaagaggctggtgcaagggacatgtctgagtctccttatagtagttactcatatagtgatgttccgccttcatcattaccacatattataaggttaagagctggtaatgtgctttttaactacaagtactacaacaatactatgcaaaagaccgaagtgactgaagatttttcttgccccttttgcttggtatcatgtggaagcttcaagggtctgggatgtcacttaaactcatcgcatgacctattccactttgagttttggatatctgaagagtgccaggctgttaatgttagtctgaagactgatgcctggagaactgagcttgtggctgagggagttgatccaagacatcaaacattttcctactgctcaaggtttaagaagcgtagaaggtttgaaatcacaactgagaaaattagtcatgtgcatccacatattgtggattcwggttcacctgaagatgcccaggcagggtctgaagatgactatgcgcaaagggaaaatgggatttctgtagcacatgcttctgttgatcctgctaactcgttacatggcagcaatctttcaccaccgacagtactacagtttgggaagacaaggaagctatctgttgagcgagctgaccccagaaaccggcaactcctgcaaaaacgtcagttcttccattctcacagggcacagccaatggcattggaacaagttttttcagatcgtgatagtgaagacgaagttgatgatgatatcgccgactttgaagatagaaggatgcttgatgattttgttgatgttacaaaagatgagaagcttattatgcatatgtggaattcatttgttcggaaacaaagggtgctagccgatggtcatataccttgggcctgcgaggcattctcccggcttcatggacaacaacttgtgcaaaactctgctctgctgcggtgctggcgtttctttatgattaaactctggaatcacagcctactagatgcccgcaccatgaacacctgcaacaccattcttgaaggataccaaaatgaaagcccggatcccaaacaaacttgaccgatagaaatcattggccaactcaagtagaatgtactggtacgtgtattggttctggtcatttcaagagctttttttgaaccaaaagcttttgtgaagaactggatgctagcatgtgtttggaggaaagaagctttaggagcagctttgctttgggaagaagagggggcaaaactgcaccctaggcttaggctgtcattgttttattgaggactgcaccctaggcttaggctgtcattgttttattgaggactgcaccctaggctttggctgtcattgcttattctcttctatttattgatggtattgaaactgtaatagtccggatgagtatgaatttgtatgaattattattcgttgtattcaaaaaaaaaaaaaa

SEQ ID NO: 2141 - DNA, 2101 bp, Triticum aestivum
gggtccgggtccgcaagaccctaggtgttcgtcagcagcgaggatgcccggcctgcctctgcctcaatcgttaaatcagaatattggatgtgaatatgcctatcctgggtctacaggccaggccttccgtcagcagctaagaactgcattgtctccagatgagcagcttgctgctgaagaaagtttcgcgttgtactgcaagccagttgagctatacaatatcattcagcggcgagccattagaaatcccgcttttctgcaaagatgccttcattacaagatacatgcaagccgaaaaaagaggattcagataacggtatcactatctcgaggtacaaatactgagttgccagaacagaatatctttcctctttatgttctgttggctacacctaccagtaatatttcgcttgaagggcattctccgatatatcgattcagtcgggcttgtttgcttaccgcttttagtgaatttggtaataaaggtcgcaccaaagctacattcataattccagacatcaagaatttatcaacctcccgagcttgcaaccttaacattatccttatcagctgcgtttcggaagggcaagttggggaaaatcgtggtgaacataactgctctgtggaccatgtggaaggctctgctctccaaaagcttgaagggaaatgtttctggggtaaaataccaattgatctacttggttcgtctttggagaactgtgtaactttaaatttgggacatacagtggagttggcttctgcagttagtatgagcccaagtttcttagagccgaaatttatggagcaggacagttgcttgacattttgctctcataaggttgatgctacgggttcatatcaactccaagtaggcatatctgctcaagaagctggtgcaaaagacatgtctgaatctccatatagtagttactcatacagtggtgtcccaccttcttcattaccacatatcataaggttgagagctggtaatgtgcttttcaacttcaagtactacaacaatactatgcaaaagactgaagtcactgaagattttgcttgccccttctgcttggtaaaatgtggaagctacaagggtttggggtgtcacttgaactcatcacatgacctattccactttgagttttggatatctgaagaatgccaggctgttaatgttagtctgaagactgatgtctggagaactgagcttgtggctgagggagttgatccaagacatcaaacattttcctactcctcaaggtttaagaagcgtagaaggttgggaatgttgggaaccacagctgagaaaataagccatgtacatccacatatcatggattcagattcacctgaagacgcccaggcagtgtctgaagacgactttgtgcagagggaggaagatgatatttctgcaccacgtgcttctgttgatcctgctcaatcattacatggtagcaatctttcaccacccacagtactacagtttgggaagacaaggaaactatctgcggagcgagctgatcccagaaaccggcaactcctgcagaaacgtcagtttttccattctcacagggcacagccaatggcactggaacaagttttctcggaccgtgatagtgaagatgaagttgatgatgacatcgccgattttgaagataaacggatgcttgaggattttgttgacgtcacagacgatgagaaacttattatgcatatgtggaattcatttgttcggaaacaaagggtgctagctgatggtcatattccttgggcctgtgaggcattctcccggcttcatggaaaacatcttgtacagaatcctcctctactatggagctggcgtttccttatgattaaactctggaaccacagtctattagatgcccgcgccatgaatgtctgcggcacaattcttcaaggctaccaaaatgaaagcggcttggaccccaagaaaatgtgagttgagcatagtgcgctcattataatttaaatcaagtgggtgtttggaggaggccttaggagcatgttaaagagaggtgaaagctgcacctgaggccatggaggactattctcgattttatttatcgatcggttgtgttaa

SEQ ID NO: 2142 - DNA, 2320 bp, Oryza sativa Japonica Group
aattagggtggggtggtaggcgaaattactaacttaccctcgccatttcgacgcctcctccgtggtgtcgtcgtgcgcgagctatgctgagtttgcccttgcccaccgcttccgcctccgccgatccccatccctcccgcgagcaggagcaggagcaggagcagggctagccgtcgttcctcctgctgcttccgccgcatccatcctgataccagatgtgccgccaccagccaagggctcggctctctcccgatgagcagcttgcagctgaagaaagcttcgcattatactgcaagccggtcgagttgtataatatcattcagcgccgatccattaaaaatcctgcttttcttcaaagatgccttctttacaagattcacgcaagacggaagaagaggagcctgataaccatatcactttctggaggcacaaataaagaactgcgggcacaaaatatctttcctctttatgttctgttagctagacctactaataatgtttcacttgaagggcattctccgatatatcgattcagtcgtgcttgtttgttgacttcttttcatgaatttggaaataaagactacactgaagcaacattcgtcattcctgatgtgaagaacttagcaacctcccgagcttgcagccttaatattatccttatcagctgtggacgagctgagcaaacttttgatgacaataactgttctgggaaccatgtggaaggctctactctccaaaagcttgaagggaagtgtttctggggtaaaataccaatcgatcttcttgcttcatctttgggaaattgtgtgagcttaagtttgggacataccgtggaaatgtcttccacggttgagatgaccccaagcttcttagagccaaaatttctggaggatgacagttgcttgacattttgctctcagaaggttgatgctactggttcatttcaactgcaagttagcatatctgctcaagaggctggtgcaaaagacatgtccgagtctccttatagtgtttattcatataatgatgtgccaccttcgtcattgacacatattataaggttgagatctggcaatgtgctttttaactacaaatactacaataatactatgcaaaaaaccgaagtcactgaagatttttcttgcccattttgcttggtaccatgtggcagctttaagggtctaggatgtcacctaaacgcatcgcatgaccttttccattatgagttttggatatctgaagagtgccaggctgttaatgttagtctgaagactgattcttggagaacagagcttttggctgagggagttgatccaagacatcaaacattttcgtaccgctcaagatttaagaagcgtaaaagggtggaaatctcaagtgataaaattaggcatgtacatccacatattgtggattcaggatcacctgaagatgcccaggcaggatctgaagacgattacgtgcagagggaaaatggtagttctgtagcacacgcttctgttgatcctgctaattcattacacggtagcaatctttcagcaccaacagtgttacagtttgggaagacaagaaagctgtctgttgaacgagctgatcccagaaatcggcagctcctacaaaaacgccagttctttcattctcacagggctcaaccaatggcattggagcaagttttctcagatcgtgatagtgaagatgaagttgatgatgacattgctgattttgaagatagaagaatgcttgatgattttgttgatgttacaaaagacgagaaacttattatgcatatgtggaattcatttgttcggaaacaaagggtactagcggatggccatattccctgggcatgcgaagcattctcgcagtttcatggacaagaacttgtacaaaatccagctctactatggtgttggaggttttttatggtcaaactctggaaccacagtctactggatgcgcgagccatgaatgcctgcaacacaattcttgaaggctacctgaacggaagctcggatccaaagaaaaattgacgcatacaaatcattggccaacctgtagagtaaaatgcacttgtactggttctggccattccaatagtttgttttgtttttggaaaaaaagatgtctgaagaattgaaagctaacatgtgttttggagggaagaaaattgaaggctggggcggtcattgtttcatttagaactcttctcgattctatttattgtaattgatgttactcataactgtagagcagtatcaagaccaaactgtaatgatatggttagcaatatttacataaaagtttattttgtttgttgttt

SEQ ID NO: 2143 - DNA, 1935 bp, Eulaliopsis binata
acgcctccctctccttcttccccaggaatattggagatgtgtcttcaacactgtagtgctcgattgtctccagatgagcaactcgctgcagaaaaaagttttgccttgtattgcaagccagttgagctctacaatattatccagaggcgagccgttaaaaatcccccttttattcaaagatcccttctatataagatacaggcaaggagaaaaaagaggattcagataactgtatcactttctgcaagtacaaatacacaagcacagaatatctttcccctttatgtacttttagctagacctaccagtaatatttcgcttgatgggcattctccgatatatcgattcagtagggtttctttgcttacaaattttagcgaatttggaaatgaaggcaaaactgaagccacattcatcatccctaatgtgaagaatttgtcaacctcccgtgcttgcaaccttagcattatatttattagctgtgggcaagtaggacaaattattggtgaagatagctgctctgggaatgatgtgttaagatcttccctccaaaagcttgaagggaaatgctcctggggtaaaatactgactaataggcttgcgtcctctttggagcaatgtgtgactttaagtacaggagatgctgtggatttggcttctacagttacaatgaacccaagcttcttagagccaaaatttctggaacaagacagttgcttgacattttgctctcataaggttgatgctacgggttcataccagttacaagtatccatatccgcagaagaggctggtgcaagagagttacttttgtctccttattattgtaactactcatataataatgtcccaccttcgttattaccggaaatcataaggttgagagctggaaatgtactttttaattacaagtactacaataatacaatgcaaaagactgaagttactgaggatttttcctgcccattttgcttggtaccatgtggaagcttcaagggactgggatgccacttaaactcaacacatgatctgttccactatgagttctggatatctgaagagtgccaggctgtgaatgttagtctgaaggttgatgcctggaaaactgagtttgtggcagagggagttgatccaaggcatcaaacattttcctactgctcgaggtttaagaagcgtagaaggttggaaaccacagctaagaaaatcaggcatgttcacccgcatattatggaaccaggatcacatgaagatgcccaggcagggtctgaagatgactatgtacaaagagagaacgggctttctgtagaacatgcttcagttgaccatagtcagcctgtacatgggagcaatctttcaccaccaacagtgctacagtttgggaagtcgaggaagctatctgctgagcgatctgaccccagaaatcgacaactgctgcaaaagcgtcagttcttccattcacacagggcacagccaatgccattggaacaagtcttctcagatcatgatagtgaagacgaggtcgatgatgatattgccgactttgaggatagaaggatgcttgatgattttgttgatgttacaaaagatgagaagcttattatgcatatgtggaattcatttgttcgaaaacaaagggtgctagctgatggccatataccttgggcctgcgaggcattctccagatgccacggacaacggcttgtacaaaaccctgccctgctgtggggctggcgttttttcatgattaaactctggagccacagccttcttgatgcccgcgccatgaatacttgcaacacaattcttcaaggctaccaagacggaagttcggaccccaagtaaatttaatacaaaaaaattgctggccaacttgtgtaaaatggcattggatgttgatctgccaattccaggggttgaaccccaaaacaactatgg

SEQ ID NO: 2144 - DNA, 2494 bp, Hordeum vulgare subsp. vulgare
ggaaaaactaagttcttcgtctcgtgctcccttctggcccaatgcggttctaaatctctctccgccgcctcgccgtcgtcgccgcctcacggccggaacgtcgccgccactcacgcgcctcgacgccgccactcacgcgcctcgacgccgccgccatcgctatccctgctctctccacccgtccgcgagcttcgacatcggtctttgagtccccgccggttgatgccccttgttaaatccgcccgtccgcgaccctgaggcgctcggcggcggcgaggagatgcctggcctacctttacctgcccgggacgcagcggacactgggtgtgaatttagttaccctcagtctgcagaccagatgcgacagcaacagttgagagctcgattatctccagatgagcagcttgctgctgaagaaagtttcgcgttgtactgcaagccggttgagctatacaatatcattcaacggcgagccattaggaatcccgcttttctgcaaagatgccttcactacaagatacatgcaagccgaaaaaagaggattcagataactgtatcactatctcgaggtacaaataccgagttgccagaacagaatgtctttcctctttacgttctattagctacacctactactaatatttcacttgaagggcattctccgatatatcgattcagtcgggcctgtttgcttacgtcttttagtgaatgtggtagtaaaggtcgcaccaaagctacattcacaattccagacatcaagaatttatctacctcccgagcttgcaaccttaacattatccttatcagctgtgtttcggaagggcaagttgaggaaaatgttggtgaacataactgctctgtgaaccatgtggaaggctctgctctccaaaagcttgaagggaaatgcttctggggtaaaataccaattgatctacttggttcgtctttggagaactgtgtaactttaaatttgggacatacagtggagttggcttctgcagttagtatgagcccaagtttcttagagccgaaatttatggagcaggacagttgcttgacattttgctctcataaggttgatgctacgggttcatatcaactccaagtaggaatatctgctcaagaggctggtgcaagagacatgtctgaatctccatatagtagttactcatacagtggtgtcccaccttcatcattaccacatatcataaggttgagagctggtaatgtgcttttcaacttcaagtactacaacaatactatgcaaaagactgaagtcactgaagattttgcctgccccttctgcttggtaaagtgtggaagctacaagggtttggggtgtcacttgaactcatcacatgacctattccactttgagttctggatatctgaagaatgccaggctgttaatgttagcctgaagactgatgtctggagaactgagcttgtggctgagggagttgatccaagacatcaaacgttttcctactcctcaaggcttaagaagcgtagaaggttgggaatgttgggaaccacagctgagaaaataagccatgtgcatccacatatcatggattcagattcacctgaagatgcccaggcagtgtctgaaggtgactttgtgcagagggaggaagacgatatttctgcaccacgtgcttctgttgatcctgcccaatcattacatgatagcaatctttcaccacccacagtactacagtttgggaaaacaaggaaactatccgcggagcgagctgatcccagaaaccgacaactcctgcagaaacgtcagtttttccattctcacagggcacagccaatggcactggaacaagttttctcggatcgtgatagtgaagatgaagttgatgatgacatcgcagattttgaagatagacggatgcttgatgattttgttgatgtcacgaatgatgagaaacttattatgcatatgtggaattcatttgttcggaaacaaagggtgctagctgatggtcatattccttgggcctgtgaggcattctcccggcttcatggaaaacatcttgtacagaatcctcctctactatggagctggcgtttccttatgattaaactgtggaaccacagtctattagatgcccgtgccatgaatgtctgcggcacaattcttcaaggctaccaaaatgaaagctcggaccccaagaatatatgagttgagcatagtgcgctaattataatttaaatcaagtgggtatttggaggaggccgtaggagcaggttaaagaggtgaaagctgcacctaaggccatggaggaccattctcaattctatttaccgaccggtcgtatttacaaggactgttgttcgtcgtgttctgttccatgtataagcgcctttagtgtcgcataacttgtcgtatggtctgcaaacttgaatcagtgttgtcaagttctcttctttgctgtaatgaaacctatctgaaattatatcttgcgtaagcgtgtgcaaaatt

SEQ ID NO: 2145 - DNA, 2448 bp, Hordeum vulgare
caatgcggttctaaatctctctccgccgcctcgccgtcgtcgccgcctcacggccggaacgtcgccgccactcacgcgcctcgacgccgccactcacgcgcctcgacgccgccgccatcgctatccctgctctctccacccgtccgcgagcttcgacatcggtctttgagtccccgccggttgatgccccttgttaaatccgcccgtccgcgaccctgaggcgctcggcggcggcgaggagatgcctggcctacctttacctgcccgggacgcagcggacactgggtgtgaatttagttaccctcagtctgcagaccagatgcgacaccaacagttgagagctcgattatctccagatgagcagcttgctgctgaagaaagtttcgcgttgtactgcaagccggttgagctatacaatatcattcaacggcgagccattaggaatcccgcttttctgcaaagatgccttcactacaagatacatgcaagccgaaaaaagaggattcagataactgtatcactatctcgaggtacaaataccgagttgccagaacagaatgtctttcctctttacgttctattagctacacctactactaatatttcacttgaagggcattctccgatatatcgattcagttgggcctgtttgcttacgtcttttagtgaatgtggtagtaaaggtcgcaccaaagctacattcacaattccagacatcaagaatttatctacctcccgagcttgcaaccttaacattatccttatcagctgtgtttcggaagggcaagttgaggaaaatgttggtgaacataactgctctgtgaaccatgtggaaggctctgctctccaaaagcttgaagggaaatgcttctggggtaaaataccaattgatctacttggttcgtctttggagaactgtgtaactttaaatttgggacatacagtggagttggcttctgcagttagtatgagcccaagtttcttagagccgaaatttatggagcaggacagttgcttgacattttgctctcataaggttgatgctacgggttcatatcaactccaagtaggaatatctgctcaagaggctggtgcaagagacatgtctgaatctccatatagtagttactcatacagtggtgtcccaccttcatcattaccacatatcataaggttgagagctggtaatgtgcttttcaacttcaagtactacaacaatactatgcaaaagactgaagtaactgaagattttgcctgccccttctgcttggtaaagtgtggaagctacaagggtttggggtgtcacttgaactcatcacatgacctattccactttgagttctggatatctgaagaatgccaggctgttaatgttagcctgaagactgatgtctggagaactgagcttgtggctgagggagttgatccaagacatcaaacgttttcctactcctcaaggtttaagaagcgtagaaggttgggaatgttgggaaccacagctgagaaaataagccatgtgcatccacatatcatggattcagattcacctgaagatgcccaggcagtgtctgaaggtgactttgtgcagagggaggaagacgatatttctgcaccacgtgcttctgttgatcctgcccaatcattacatgatagcaatctttcaccacccacagtactacagtttgggaaaacaaggaaactatccgcggagcgagctgatcccagaaaccgacaactcctgcagaaacgtcagtttttccattctcacagggcacagccaatggcactggaacaagttttctcggatcgtgatagtgaagatgaagttgatgatgacatcgcagattttgaagatagacggatgcttgatgattttgttgatgtcacgaatgatgagaaacttattatgcatatgtggaattcatttgttcggaaacaaagggtgctagctgatggtcatattccttgggcctgtgaggcattctcccggcttcatggaaaacatcttgtacagaatcctcctctactatggggctggcgtttccttatgattaaactgtggaaccacagtctattagatgcccgtgccatgaatgtctgcggcacaattcttcaaggctaccaaaatgaaagctcggaccccaagagtatatgagttgagcatagtgcgctaattataatttaaatcaagtgggtatttggaggaggccgtaggagcaggttaaagaggtgaaagctgcacctaaggccatggaggaccattctcaattctatttaccgaccggtcgtatttacaaggactgttgttcgtcgtgttctgttccatgtataagcgcctttagtgtcgcataacttgtcgtatggtctgcaaacttgaatcagtgttgtcaagttctcttctttgctgtaatgaaacctatctgaaattaaaaaaaaaaaaaaaaaaaa

SEQ ID NO: 2146 - DNA, 2195 bp, Zea mays; identical to SEQ ID NO: 2139

SEQ ID NO: 2147 - DNA, 2346 bp, Sorghum bicolor
atggttaatttcggtaagaaattgatggcagaccagttggaggagtggcgagaatattatattaattataagatgatgaagaaaaaggtgaaacagtatgtacagcagacccaaactggtggaaaaaatcgtgaccaggttcttaaggagttctcaaggatgcttgatgaccagattgaaaaggttgtactatttcttctgcaacaacaaggtcatcttgctaggaggatcgagaaattaggagtacagcgtgccatgcttatgcaacagtctgatgtatcccaaatttgtcaactacgccaggcttacagggaagttgggtatgatcttgtgaagctacttaggtttcttgatatgaatgctactggtatccggaagatacttaagaagttcgataagcgctttggctataagttcacagattattacgtctctactcgagcaaaccatccttattctcagcttcagcagatcttcaagcaagtgggagtcgtcgccgttgttggtgctttgtctcgcaaccttgcttatctacaagatcatcaaggatacttagcaaatatctatgattacccatcactcatcttgaaggatcccgtcatagaacaaataaatcattcagtacagaaactcacacactccacaagctttctgcaatttttagggcaacatgcacttatcgttccggaggatatgcagagtggctcagatctcgatgatgacaaggattaccatttcctgtcactgctgctaaacttagtaaacacgtttctgtacatggttaacacatacatcatcgttccaactgctgatgactattcagtgagcctcggagctgcagcgactgtttgcggtgtgattatcggatcaatggcagtcgcccaaatcttctcctcagtatatttcagtgcctggtcgaacaaatcgtacttcagacccctggtatttagcagcattatgctatttctggggaacctgttgtatgctttggcatatgatcttaattccctaactgctcttattgtcggtcgactactgtgcggtttgggttcggccagagccgtgaaccgccgctacatcagcgactgtgtacccctgaaaagcaggatgcaggcatctgctgggtttgtcagtgctagtgctcttggaatggcatgtggtcctggtcttgccggtctgctgcagacaaaatttaagatctatgggcttacattcaatcagaacaccttacctgggtgggtcatgtgtgttgcttggcttgcatatttgttctggttgtggatttcattcaaagagccaggccatattgcttcagagaattcagtcaacacgcagtcatctgattctggccgtccagtaagcggtaatttggaggatggcgtcagagagcctttgctcatagatgcgaaggcaggaccggatgacgatgttgaggacaatgacgacaacgatgacgaccccgaggaatctcatagacccgcgacatcgcttgctgcagcatacagattgctgacaccatctgtgaaggttcagctactgatctactttatgctcaagttcgccatggaaatcctactctcggagtcaagtgttgtgaccacgttctatttcaagtggacaactagtaccgtggcaatctttctagcagttcttggcctgacggttcttcccgttaatgtcatcgtcgggagctatgtcaccaacttgttccaggacaggcaaattctggtggcctccgagatcatggtgttgatcggcattgtcatgagcttccgcttcacccctcactactccgttccccaatatgtcacgtcagctctcatcaccttcgtattcgccgaggtgctcgaaggagtgaacctgtccctcctctctcgcgtgatgtcgtcgaggctctcccgcgggacctacaacggcgggctgctctcgacggaggccggaacgctggcccgcgtcgccgccgacatgactatcacggcggcgggcaacctggggcagagccgcctcctgaacgccaccctcctgccgtccctggtgatctgtttagcctctatcgtcgcgacgttctgcacttacaactcactctactgatgaccgatgaaaccaaccgctctagctcctcttatacacgtttggctgagctgtggagcgtcttgcagtgacgctgtaaaattttccaggctgccgcagctaatgtaagctaagctgcgagtggtccaccatgtgtgccgaagcctctaatgttgcaaacttgctacggctgtaacagaaacatgtacgggttaaataaactgccctactgatgatctaatataacaacgagagtctgacgcggcaagttcgaaa

SEQ ID NO: 2148 - DNA, 2579 bp, Zea mays
caagcacatactgacacacacacacacacacaagcccattgcattcgccaaacattcgcccacgcgccattgtagcgcacgagctcccgaagccctcatcgccgtgccgttcgtctcgccggatcgatcgctccgcccctgctcctggctttggtgccgtatgcccgtccgtctccatagggcttgcattctctctgctttgatttgacggatcgcaggagttgacgagccgcacgccctagctcgtacgtgaaaaaaacgtggccacgtttcaggtgctgaaaccaagatggttaatttcggtaagaaattgatggcagaccagttggaggagtggcgagagtactatattaattataagatgatgaagaaaaaggtaaaacagtatgtacagcagacccaaactggtggaaaaaatcgtgaccaggttcttaaggagttctcaaggatgcttgatgatcagattgaaaagattgtgctatttcttctgcaacaacaaggtcatcttgctaggaggatcgagaatttaggagaacagcgtgtcgtgcttatggaacggtctgatgtatcccaaatttgtcaaatacgccaggcttacagggaagttggatatgatcttgtgaagctacttaggtttcttgattcgaacgctactggtatccggaagatacttaagaagttcgataagcgctttggctataagtttacagattattacgtctctactcgagcaaaccatccttattctcagctccagcagatcttcaagcaagtgggagtcgtggctgttgttggtgctttgtctcgcaacctttcttatctacaagatcatcaaggaagcctagcaaatatctatgattacccatcactcatcttgaaggatcccgtcatagaacaaataaatcactcagtacagaaactcacacactccacaagctttctgcaatttctagggcagcatgcacttatcgttccgggggatatgcagagcggctcagatctcggtgatgacaaggattaccatttcctgtcactgctgctgaacctagtaaacacgtttctgtacatggttaacacatacatcatcgttccaactgccgatgactattcagtaagcctcggagctgcagcgactgtttgcggtgtgattatcggatcaatggcagttgcacaaatcttctcctcggtatatttcagtgcctggtcgaacagatcgtacttcagacccctcgtatttagctgcatcatgttgtttctggggaacctattgtatgctttggcatacgatctgaattccctaactgttcttattgctggccggctactgtgcggtttgggttcggccagagccgtgaaccgccgctacatcagcgactgtgtacccctgaaaaccaggctgcaggcgtcggctgggtttgtcagcgctagcgctcttggaatggcatgtggtcccgctcttgccggtctgctgcagacaaagtttaagatttatgggcttacattcaatcagaacaccttgcctgggtgggtcatgtgccttgcttggattgcatatttgttctggctgtggatttcattcaaagagccgggccacattgccacagagaattcagtcagcacgcaatcatctgattctggccgtcgagtaagcggtaacttggagggtggcctcggagagcctttgctcatagacgcaaaggcagggcaggatgaggacgacgaggacaatgacgaccccgaagaatctcatacacctgccacatcgcttgctgcagcatacagattgctgacaccatctgtgaaggttcagctactgatctacttcatgctcaagttcgccatggaaatcctactctcggagtcgagtgtcgtgaccacgttctatttcaagtggacaactagtaccgtggcgatctttctggcagttcttggtctgacggttctcccagttaatgtcatcgttgggagctacgtcaccaacctgttccaggacaggcaaatcctggtggcctccgagatcatggtgttgatcggcatcgtcatgagcttctgcttcacccctcactactccgtcccccagtatgtcacgtcagctctcatcacgttcgtgttcgccgaggtgctcgaaggggtgaacttgtccctcctctcccgcgtgatgtcgtcgaggctctcccgcgggacctacaacggcgggctgctctcgacggaggccggcacgctggcccgcgttgccgctgacatgaccatcacggccgctggctatctggggcagggccgcctcctgaacgccaccctcctgccgtccttggtgatctgtctagcatctatcgtcgcgacgttctgcacttacaactcactctactgattaccggtcgatgaactcctctccctcttatacaagttgccgaattgcgtcttgcagtgacgctgaaaattttcgggctgctgctgctaatgtaaactgctgcggcctgcgggtggacgagcggtccatgtgtatcgacgcctgtagtgttgcgaacttgctacggctgtaacatgacacgtgcgcgttaaataaaatgccctactgaagt

SEQ ID NO: 2149 - DNA, 2648 bp, Zea mays
ctgacacacacacacacacacaagcccattgcattcgccaaacattcgcccacgcgccattgtagcgcacgagctcccgaagccctcatcgccgtgccgttcgtctcgccggatcgatcgctccgcccctgctcctggctttggtgccgtatgcccgtccgtctccatagggcttgcattctctctgctttgatttgacggtacccagctgaagcacacaaattgcctccgtttgccggtcctgtgcgtgcgcgatcgagttttgttgatggtcatctagcaggatcgcaggagttgacgagccgcacgccctagctcgtacgtgaaaaaaacgtggccacgtttcaggtgctgaaaccaagatggttaatttcggtaagaaattgatggcagaccagttggaggagtggcgagagtactatattaattataagatgatgaagaaaaaggtaaaacagtatgtacagcagacccaaactggtggaaaaaatcgtgaccaggttcttaaggagttctcaaggatgcttgatgatcagattgaaaagattgtgctatttcttctgcaacaacaaggtcatcttgctaggaggatcgagaatttaggagaacagcgtgtcgtgcttatggaacggtctgatgtatcccaaatttgtcaaatacgccaggcttacagggaagttggatatgatcttgtgaagctacttaggtttcttgattcgaacgctactggtatccggaagatacttaagaagttcgataagcgctttggctataagtttacagattattacgtctctactcgagcaaaccatccttattctcagctccaacagatcttcaagcaagtgggagtcgtggctgttgttggtgctttgtctcgcaacctttcttatctacaagatcatcaaggaagcctagcaaatatctatgattacccatcactcatcttgaaggatcccgtcatagaacaaataaatcactcagtacagaaactcacacactccacaagctttctgcaatttctagggcagcatgcacttatcgttccgggggatatgcagagcggctcagatctcggtgatgacaaggattaccatttcctgtcactgctgctgaacctagtaaacacgtttctgtacatggttaacacatacatcatcgttccaactgccgatgactattcagtaagcctcggagctgcagcgactgtttgcggtgtgattatcggatcaatggcagttgcacaaatcttctcctcggtatatttcagtgcctggtcgaacagatcgtacttcagacccctcgtatttagctgcatcatgttgtttctggggaacctattgtatgctttggcatacgatctgaattccctaactgttcttattgctggccggctactgtgcggtttgggttcggccagagccgtgaaccgccgctacatcagcgactgtgtacccctgaaaaccaggctgcaggcgtcggctgggtttgtcagcgctagcgctcttggaatggcatgtggtcccgctcttgccggtctgctgcagacaaagtttaagatttatgggcttacattcaatcagaacaccttgcctgggtgggtcatgtgccttgcttggattgcatatttgttctggctgtggatttcattcaaagagccgggccacattgccacagagaattcagtcagcacgcaatcatctgattctggccgtcgagtaagcggtaacttggagggtggcctcggagagcctttgctcatagacgcaaaggcagggcaggatgaggacgacgaggacaatgacgaccccgaagaatctcatacacctgccacatcgcttgctgcagcatacagattgctgacaccatctgtgaaggttcagctactgatctacttcatgctcaagttcgccatggaaatcctactctcggagtcgagtgtcgtgaccacgttctatttcaagtggacaactagtaccgtggcgatctttctggcagttcttggtctgacggttctcccagttaatgtcatcgttgggagctacgtcaccaacctgttccaggacaggcaaatcctggtggcctccgagatcatggtgttgatcggcatcgtcatgagcttctgcttcacccctcactactccgtcccccagtatgtcacgtcagctctcatcacgttcgtgttcgccgaggtgctcgaaggggtgaacttgtccctcctctcccgcgtgatgtcgtcgaggctctcccgcgggacctacaacgtcgggctgctctcgacggaggccggcacgctggcccgcgttgccgctgacatgaccatcacggccgctggctatctggggcagggccgcctcctgaacgccaccctcctgccgtccttggtgatctgtctagcatctatcgtcgcgacgttctgcacttacaactcactctactgattaccggtcgatgaactcctctccctcttatacaagttgccgaattgcgtcttgcagtgacgctgaaaattttcgggctgctgctgctaatgtaaactgctgcggcctgcgggtggacgagcggtccatgtgtatcgacgcctgtagtgttgcgaacttgctacggctgtaacatgacacgtgcgcgttaaataaaatgccctactg

SEQ ID NO: 2150 - DNA, 2603 bp, Hordeum vulgare subsp. vulgare
ggtagccgaccacacaagatacagccgaacccagccattgcattcgcgcatactggtacgcatacgcacgccattaccattgcgccgcgctcttccgaaatcccggcctcctcatccccttcccggtgcctcccgttcgcaagggatcactgtaggcgcgatcggttcgttgatggtcatctaaattcaggagattgcttcgccgaacaagggaagggaggagccgccgaagaacacgcggccgcgtttcaggtaggtagcgaaacgccaagatggttaattttgggaaggtactggtgtcggatcaattggaggagtggaaagaatactatattaattacaaaatgatgaagaaaaaggtaaaacagtatgttcagcagactcaaagtggtggaagaaatcatgaacaggttcttaaagagttctcgaggatgcttgatgagcagattgaaaaggttgtgctctttctactgaaacagcaaggtcatcttgctagcaggatcgagaaattgggacaacagcgtgccatacttacagaacattgcgatatatcacaagtttctcaagtgcgagaggcttataggcaagttggacttgatcttgtgaagctccttagatttgttgatatgaatgctactggcatccggaagattcttaagaagttcgataagcgcttcggctatcgatttacagattattatgtctcaactcgtgcaaatcatccttattctcagcttcaaccgatcttcaagcaagtgggtatcgtagctgttgctggtgctttgacgcgtaaccttgcatctctgcaagatcaccagggaagctttatatccatctatgatcatccatcaatcaccctgaaggaccctgtcatcgaacaaataaataattcagtacagaaactcacgaacagcacaaccttcctgaaattcctaggacagcacgcactgattgttccagaagacgtgcaaactagctcagaggatcttgtcgatgaccagagctaccatttcatgtcgctgatgctcaacctagtgaacacattcctctacatggtgaacacatacatcattgtgcctactgcagatgactattcggtgagccttggtgctgcggcgactgtttgcggtgtgattatcgggtcgatggcagttgcccaagtgttctcttcagtttattttagtgcctggtccaacaagtcgtactttagacccctcgtattcagcagcatcatgctgttttccgggaatctgctgtacgcgttggcgtatgatctgaattccttaactgttctcatagttggccggctgctctgcgggttgggttctgccagagccgtgaaccgtcggtatatcagcgactgtgtgcctctcaaaatccggctgaaagcctccgcaggattcgtcagtgctagtgcacttggaatggcatgcggtcctgcgctggctggcttgctgcagactgaattcaagatctatgaagtaacttttaatcagaacaccttgccagggtggatcatgtgctttgcttgggttgcgaatttggtttggctatggatttcattcaaagagccagatcactttgctcaagagaatgctctcagcacacagtcatctgaatctggccatggacgaagtgataatttggagagcggtttagcacagcctttgctcacagaggcaaaggagaggcggaatgaaaacgcagaggataacggcgacaatgaagaaggccgtaaagagagtcataaaccagcaacatcgattgctgcagcatacagattgctcacgccatccgtgaaggttcagttattgatctacttcatgctcaagtttgcaatggagattctactctccgaatctagtgtcgtcactacgttctattttaactggtccacgagcaccgtggccatctttctagctgttctcgggctgacggttcttccggttaatgtcattgttggaagctatatcaccaacctgtttcaggacaggcaaatcttggtggcgtctgagatcatggtcctgatcggcatcgcctcgagcttccacttcagctccagctactgcgtcgcacagtacgtcgtgtcggccctcatcacgtttgtattcgccgaggttcttgaaggggtcaacctgtccctcctctcccgggtgatgtcgtcgaggctctcccggggcacctacaacggcgggctcctctcgacggaggccgggacgctggcccgcgtcgccgcggacatgacgatcaccgccgcggggtacctggggcagagccagctcctgaacgccaccctgctcccgtccctggtcatctgcgtagcctccatcgccgcgacgttcggcacttacaacaccctgtactgacaaacggcgccccacgatgcacttgaagctaagcatggaccaatatgcgcggcgaggccaagctgctagtcgaagctttgtggcgtcgctgtaaatgttaggccctcgctgccagtgcgaggtgctgcgtttgtggtgtaccgtgtatggaagcttgtggtatcaaactagcaaatgttgtagcagacacacggttctaataaagccgtactgatccatccaatgcttttttagaac

SEQ ID NO: 2151 - DNA, 2705 bp, Oryza sativa Japonica Group
acccctccctcagcttcccttcccatctgcccgtcttcttcttcttcctcctcctcctgccctacccgcggccgcgcgatataaatacatcaccctccccatccgcctctccgccagcaaaccagcacagccgtacgccgccggcaactgcgttcgcgcgagcgcctgtccgcgttgtacatatttgtgagtaatccgtcacctctgtacgcagcacgcacatgccgccgccaaagcgcagatgattccagtctttccctacttttgaatctgtgcctgatgaatctgcgtcgtcgtgctgtagcactagcgagtgtttcccttgcgacgtagagtttgctgatgttcatctaattagcccggaggactcgggaatcagaattcaccgtggtgtcagggagaaaaagtggatcgaacttcggatcacctggtaccatttgtttacgatacaggtattgaacgacaagatggttaattttggaaagaagttgatggctgatcaagtagaagaatggaaaggatactatattaactacaaattgatgaagaaaatgttgaagcaatacgttcagcagacccaacttggtggaaaagatcgagagcaagtacttaaagagttctcaagaattcttgatgaacagattgaaaggattgtactttttctgctacaacaacaaggccaccttgctaataggattgaggaattgggagaacagcgtgctgctcttctagaacagcatgatatatcccaagtttttcaactacgagaggcttatagagaagttgggcgagatcttataaagcttctccgttttgttgatatgaatgctactggtataaggaagattctaaagaaattcgataagcgctttggctataggtttacagactattatgtcaccactcgtgcaaaccatccttattctcagcttcaacaagtctttaagcaagtggggattgtagctgttgtaggagctttatcgcgcaaccttgcatatctgcaagatcatgaaggaagtgttttgtccatctatgatcatccatcagttaccttaaaggaccctatcatagaccaagtaaatcatgcggtacaaaaacttacacatgcgacgagttttctgcaattcttaggtcaacatgcacttatcatccaagaggacgtgcaaagtgggtcggaggatcttgtcgatgatcaaagttaccatttcatgtctttgatactcaacctagtgaacacctttctttacatggtgaacacatatatcattgtgccaactgctgatgactacgctgtaagccttggagctgcagcgacagtttgtggcgtaatcatcggatcaatggcagttgctcaagtgttctcctcagtttatttcagtgcatggtcaaataggtcatacttcagacctcttgtattcagtagcatcatgttattcgctgggaatctgctatatgcattagcatatgacctgaattctctgacagttctcctgattggccggctactatgcgggttaggctctgcaagagctgtgaaccgtcgatatatcagcgattgtgtgcctctcaaaatcaggctacaggcctctgcaggattcgtcagtgctagtgctcttggcatggcatgtggccctgctcttgctggtttactccagacaagatttaagatatactcactcacttttgatcagagcacgttgcctgggtgggtcatgtgcattgcttggcttgtttacttgctgtggctgtggatatcattcaaagagccgggacactttgctaagagttcagacacggcacagcctgctgaatctggccatcaagtcaatgctaatctggaggaaggtctagcgcaaccattgcttacaggctcagaagagggacaagaccaaaatgctgaggataatgacgataacgaagaggagtctaaaaattctcacgggccagcaacttcaatcagttcagcatacaaattgttgacaccatctgtgaaggtccagctattgatatactttatgctcaagtacgctatggaaatcttgctctctgaatcaagtgtcatcaccacatactattttaactggtctacaagcgctgtggctatctttttagcgattcttgggtgtactgttctccctgtcaacgccattgttggaagctacattacaaatttattcgaggacaggcaaattttggtggcatctgaaatcatggtcctcattggtataatcatgagcttccgttacacccctcactactccgttccgcagtacgtcttgtccgctctcatcacatttgtgtttgctgaggtcctcgaaggagtgaacctgtcgttgctttcacgagtaatgtcgtcgaggctcgcgcgaggaacctacaacggcggcctcctgtcgacagaggccgggacgctggcccgtgtagttgcagacgcgacgattaccgcggcgggttatctaggcccggacctcctgctcaacatcactctgctgccacctcttgtcatctgcatagcctccctcgttgcaacattctgcacatacaacaccctgtactaaggaagttgcctctctctgcacactgtagagccggttaaactttattcatgctcacattgggttgtattttacatgtatctgcatgcggtagcattctttgtttgtacaagtccttaaacagttcaataaaatgttcttctgtaaatc

SEQ ID NO: 2152 - DNA, 3894 bp, Oryza sativa Indica Group
ttaattttggaaagaagttgatggctgatcaagtagaagaatggaaagggtatgcttttggtacttattttttatgaacaaaataattttcttcattgattacacactactatgtaaaaaaaattatatgccttcctattatgatacctaaaaatgaaacagaagttgagtacccatcaaactattacgtcaatctataatgatttttttaatgaactatgatgaaatttgaaggttatgatgtggactccataagcaattttcacaagccagttcctccatattaacaaatttcctgcagaaatcttatgatttcctcatcttgatattactagatactatattaactacaaattgatgaagaaaatgttgaagcaatacgttcagcagacccaacttggtggaaaagatcgagagcaagtacttaaagagttctcaagaattcttgatgaacaggtatatatgcaaacatttctttttttaattaattataaagatatattattggatcaacttgtttatttcatctattgttggtttaataaagaactcgtgtttcttaaaatggtatcattgttttgattagctaaaattcatacttgctgtttcacttcagattgaaaggattgtactttttctgctacaacaacaaggccaccttgctaataggattgaggaattgggagaacagcgtgctgctcttctagaacagcatgatatatcccaagtttttcaactacgagaggcttatagagaagttgggcgagatcttataaagcttctccgttttgttgatatgaatgctactggtataaggaagattctaaagaaattcgataagcgctttggctataggtttaccgactattatgtcaccactcgtgcaaaccatccttattctcagcttcaacaagtctttaagcaagtggtaatttttctggcattttacatgattagggacacttgattttcttctgtctctcacagctaaccagcattccttttgtccacttctaccaatgcaggggattgtagctgttgtaggagctttatcgcgcaaccttgcatatctgcaagatcatgaaggaagtgttttgtccatctatgatcatccatcagttaccttaaaggttttatgtcttgactgttacattatctgaatttggaactagttttctacatatcttttgcatgatgtaagagtgtaatgtgactattttctgatattcaggaccctatcatagaccaagtaaatcatgcggtacaaaaacttacacatgcgacgagttttctgcaattcttaggtcaacatgcacttatcatccaagaggacgtgcaaagtgggtcggaggatcttgtcgatgatcaaagttaccatttcatgtctttgatactcaacctagtgaacacctttctttacatggtgaacacatatatcattgtgccaactgctgatgactacgctgtaagccttggagctgcagcgacagtttgtggcgtaatcatcggatcaatggcagttgctcaagtgttctcctcagtttatttcagtgcatggtcaaataggtcatacttcagacctcttgtattcagtagcatcatgttattcgctgggaatctgctatatgcattagcatatgacctgaattctctgacagttctcctgattggccggctactatgcgggtacgtagaatttatttttctatttgttttaaaccctattactcagtacctcttgctaatgaattataatcatgttgaggtaggactacaatttagtatggtaaatattgctggctcttaatatttaccaccaaccctgtttgtcttcttctcgattattcatcagtatttctggattgaaatttactgatcataatacaatactcatatgcaggttaggctctgcaagagctgtgaaccgtcgatatatcagcgattgtgtgcctctcaaaatcaggctacaggcctctgcaggattcgtcagtgctagtgctcttggcatggcatgtggccctgctcttgctggtttactccagacaagatttaagatatactcactcacttttgatcagagcacgttgcctgtgtgggtcatgtgcattgcttggcttgtttacttgctgtggctgtggatatcattcacagagccgggacactttgctaagagttcagacactgcacagcctgctgaatctggtaagttctcaacccacaggaagagtgactagcaaatatattccttccgaaaactaaacacaacatgattctgttgatttggaagtgcaaatgttgcctgtaaagaattttttttatcagcatcaggatttttgttttctaatatagagttattttttgattaaaaataggccatcaagtcaatgctaatctggaggaaggtctagcgcaaccattgcttacaggctcagaagagggacaagaccaaaatgctgaggataatgacgataacgaagaggagtctaaaaattctcacgggccagcaacttcaatcagttcagcatacaaattgttgacaccatctgtgaaggtttcctcctttcccctcgtcaacttcttttcttttattccagatcaacgttgcagcatacacgaaaaacaagttcacaaactaatcaagttgggttcttataactataaatgaactgcagaacataaaatgaagagaagtatctcggtgtcagcatcttactgtccacaacaatagtagctatgctgcggttgtatttacacttccaaaaatacaatttcaagaaaaaaaaagttcttcattagcattacttcgattgctttttttcaagctattggttagctttataatatatttaattaagccctataagcaataaatcgtctgtcatttcatctctttcaaactaggcctaatactgacacatgagtgctccgcactgtcaagattactctcaactctcatgttaagtttattttttatccgttggatgcatcatctttctatgttttgttttgcaatacattacatggacgctcatttctcaggtccagctattgatatactttatgctcaagtacgctatggaaatcttgctctctgaatcaagtgtcatcaccacatactattttaactggtctacaagcgctgtggctatctttttagcgattcttgggtgtactgttctccctgtcaacgccattgttggaagctacattacaaatttattcgaggacaggtaatttttatgctcgttaagtgcactttgtatccctcgcccaaaaaaaggattttgaaggtctaaataaagtccattcaaaatgatttcatgaaagcatgtaattaagggtattgttaacggctgctttgtacatggtattttgcaggcaaattttggtggcatctgaaatcatggtcctcattggtataatcatgagcttccgttacacccctcactactccgttccgcagtacgtcttgtccgctctcatcacatttgtgtttgctgaggtcctcgaaggtatgtaaacgcaaccacctcaaaatgatcgttcatcacacagcccttcagcagcatgacatctgacggcacaaagcgagatctgaatcaagcaaacgcatgctgttgctttaaccaccgttttccatttctgacgaacattgcaggagtgaacctgtcgttgctttcacgagtaatgtcgtcgaggctcgcgcgaggaacctacaacggcggcctcctgtcgacagaggccgggacgctggcccgtgtagttgcagacgcgacgattaccgcggcgggttatctaggcccggacctcctgctcaacatcactctgctgccacctcttgtcatctgcatagcctccctcgttgcaacattctgcacatacaacaccctgtac

SEQ ID NO: 2153 - DNA, 2320 bp, Sorghum bicolor
atggttaatttcggaaagaaattgatggctgatcaagtggaagaatggaaaggatactacatcaattacaagctgatgaagaaaatgttaaagcaatatgtccaacagacccagcatggtgggaaagatcgtgaacaagttcttaaagatttttcaaggattcttgatgaccagattgaaaggatcgtgctttttctgctacaacaacaaggccatcttgccagtaggattgaggagttgggagaaaaacgcattgttcttctagaagagtatgacatatcacaagtttatcagctacatgatgcatacagagaagtcgggcttgatctcataaagcttctccgctttgttgatgtgaatgctactggtatacgcaagatactaaagaaatttgataaacgctttggctacaagttcactgattattatgtcaccactcgtgcaaatcatccttattctcagcttcagcaagtctttaagcaagtgggaattgtagctgttgtaggtgcattatcgcgcaaccttgaatatctgcaacatcatgaaggaagttttgtatccatctatgatcgtccagcagttaccttaaaggaccctattatcgaccaagtaaacaatgcagtacagaagctcacgcatgccacaaattttatgcaattcttgggacaacactcacttattgtccaggaagatgcgcaaagcgggtcggaggatcttgttgatgatcagagctaccatttcatgtccctgatgcttaatctagttaacacattcctttacatggtgaatacatatatcattgtgccgactgcagatgactatgctgtaagccttggggctgctgcaactgtctgtggtgtaattattggatcaatggcagtcgctcaagtgttctcctcagtctacttcagtgcctggtcaaataagtcctacttcaaacctcttgtattcagtagcattatgctgtttcttggaaacctattatatgcattggcatatgatctgaattcactaatagttctcctgattggacgactgctatgtgggctaggctctgcaagagcagtgaaccgtcgctatatcagtgactgtgtgcctctcaagatgaggctacaagcctccgccgggttcgttagtgctagtgctcttggcatggcatgtggccctgctcttgctggttttctccagattaaattcaagatatattcgctgacttttaatcagagcacgttgcctggatgggtcatgtgcattgcttggtttatttacttgttgtggctgtggcttacattcaaggagccagaacacttcactaaaaccctggtcagcgaacaaccatcagaatctggttgccaaggaaattctaacttggaggaaggtctagctcaacccttgcttgtaggtatagaacaaaggcaggaggagaactcagaagataatgatgatactgaattagcctcagaaagctctcatgagccagcaacatcaattgcttcagcatacagattgctaactccatctgtgaaggcccagctattgatatacttcatgctcaagtacgcaatggaaatactactctcggaatcgagcgttgtcaccacatactattttagctggactactagtgttgtggctatcttcctagcgattcttggattaacggttcttccagtaaatgccattgttggaagctacattacaaatttgtttgaggataggcaaattttgttggcatctgaagtcatggttctcatcggtataatcatgagctttcgtttcacacctcattactccattcctcaatatgtcatttcagctctcatcacatttgtatttgctgaggtgcttgaaggagtgaatctgtccttgctctcacgagtaatgtcatcgaggctttcccgagggacctacaatggtggactcctttcgacagaggctgggacgttggcccgtgtagttgcagatgccacgattactgcagctggttatcttggcacggacctccttctcaatatcactcttgtcccatctcttgtgatctgcatagtctccatcgcagccacactctacacttacaacaatctctattgaagctcttagctgtacaagtgtacaacaatgttcctaagctaaagcgattcttgcccacaatgggtttgtatacgattcctgcccacaatgggtttgtatatctgttcaagcatggtttgtaaacattttgatcaagttggtatgcaaaatttcttgtatttagtgtatttatgtaaaaattcatcctgtaaataattatgaactatgagcctctattgctggcttatgt

SEQ ID NO: 2154 - DNA, 2795 bp, Vitis vinifera
gagactgttccgaagaaagctcgtctgagttctaccatttttatctctctgcaaattcgtagattcaataaatagatttccaccgttcggttttcgcaaatccaatctgagcagaacaggctgctgtgcttacctttgattccggtttgtgtgaatttcgaaattcggtttgtgtccgaatctccaaagatccgatttccgtgtagtacagagattccgtgctttttcgatctcgcgtcgttttatcggtgatttaattctggccttggtctcctgttttattttttgaggctttacgctttggatgcgtcattgtttacgtgttcgttgatggtcatctaagtttcttccgacgcgataattgacattcgagcgaaggtcttgaaatcgtctttggtgagagatggttgcctttgggaaaaagctgaaagaaagacaaatccaggaatggcaagggtattacatcaactacaaattgatgaagaagaaagtaaaacaatatgttcaacaaattgaaggtggagcacaaaatcgccgtcatgttcttaaggacttctctagaatgctggatactcagattgaaaagattgtcctctttctgttggaacaacaagggctactagcaagcaggatagccaagcttggagaacaacatgatgctcttcagcagcagccagatatttctcaaatatctgaactacgagaagcttatagagcagtgggacgagatctgttaaagcttcttttttttgttgagataaatgctattggtttgcgaaagatcctgaagaagtttgataaacgctttggctatagattcactgattactatgttaaaacccgtgctaatcatccttattcccagttgcagcaagtgttcaagcatgtgggagtaggggctgttgtgggagccatatctcgcaatcttggagatcttcaggaccgtcaaggaagctacttatcaatttatgatcaacctgcccttcctctccaggatcctgtgattgattcaataaaagcagccgtagacaggttaacacactcaacaaacttccttcactttttggcccaacatgcacttattatgcaagaagagttacctactgctgttgaggagcatgtagacgatcagagataccattttatgtcacttctgttaaacttggcaaatacatttctttatatggtcaatacgtatattgttgtcccaacagcggataactactccatgagtcttggagctgcagcaacagtttgtggtgttgtgattggggcaatggctgttgctcaagtgttctcttcagtgtattttagtgcttggtcaaataaatcatactacagacctcttatattcagcagtattgttctctttgtgggaaataccatgtatgcactggcttatgaccttgattcaatagtggttctcctacttggtcgtcttttctgtggattgggctctgctagagctgttaatcgacggtatatcagtgattgtgtaccactaaaaattcgcatgcaggcttctgcaggttttgttagtgccagtgctcttggaatggcatgtggtcctgctcttgctggattgcttcaaattaatttcaagatctacaagatcacatttaacgaagacactttgcctggttgggttatggctgtggcatggctggtttatttaatttggctatggatctcatttaaagagcctgttcgcgagacccaagagagcaatattcagcaggaatctaatgctgaaccagtagagaatgatgcacttgaaaagggtcttgctcaaccattgctcttaagttcagaagacaagcaagaagatgaagatggtgaccaagacaatgatgtgagtgaagaagctcctgaggagtctcgtgggccagccacttctattggttcagcatatagattacttactccctctgtaaaggttcaactattgatttatttcatgctcaaatatgcaatggagattttactctcagaatctagtgttgttaccacatattacttcaattggtccacgagcacagtggcaatctttcttgcatgtcttggcctaacagttcttccagtaaacattgctgttggaagctacataagcaacatgtttgaggataggcaaattttactggcatctgaaataatggttctcattggcatactcctaagcttcaacataataattccatactctgttccacaatatgtctgctcaggactcatcatgtttgtttctgctgaagtccttgaaggtgtcaatctggcactcctctctcgggttatgtcatcaaggctttctcgtggaacctacaatggtggactgctttcaactgaagctgggacaatcgctcgagtaattgcagatggcacaataaccttggttggttacttgggtgagagtaagctactgaatatcaccctacttccttcacttctcatctgcatatcctccatcattgctaccttctttacctacaactctctctattaattcatttctcttgcatcaaaagatgtagtgtctccaaatccattccatttccctcagtatttctcaggtattctttgctatataatttttcttttcttttctgtttggtcctgtatgcatgctgtataatatgcgaaaactagctccttaattcccaattggattttcataattttttgagccttcagtgaagaggtcctctgtattgcaagttcagcaaccttttccattcttttgttgttgattcaaagtatatcatcaattactaatacatcctgccccttctagttgaatt

SEQ ID NO: 2155 - DNA, 1917 bp, Sorghum bicolor
ccaggcccgagctggggaattccgatcccaacagcccccaccaaggcctcgcgccgatcccaaggactcgtgcctcccgtcctccgatgccgcaactcatcccatccggcttctgaagccgcggcctccgacgtcaattccggtggcgggcggcatggattccgccgccaacagcgtcggcgagtctgtgggcgagtctccggcgccagcgccggcgccggagccgcagacaccgccggccgaaccggtcaccaagggccgcgggctccgccggtggcgccgtatcccgcgcgagcagcaccacgaggggtctccggcgagccccggggccggtaccggcgcaggtgctacagcgggtgaggacttggcggcgcagctccacaagcggcgttacggccctgccgccgacgagcccaagggaaagcaagacgcggcggctgcagaggaggtcgagagctcggtcgcgtcggtggagtccagcttcgtgccgctggaggcgtccccaccgccggcgccggcgccggcgctgaccaggttggacccgaatctaggccacctgattgccaccgccggtttctcggtgggcgccggcggcgccgattcggacaacagcgacgaccgcaccagcaagtcgtccacggccgccagcgcgccgcgccacgacttctcgtccgtcggcttcggccgggagcgcgacagggcgcgatcccgcgcccccggcgccgctcacggcaagggcatccgtgctgctcgtgtgcgcggcgctagtgcgcgcgttgcctcctcccctgctgaagcagagaattctcgctccagcgtcgagtccaacctccgaagctctaacgctgctcatgcgcggcgatctagttctggcgtcacaagcaacggtgttcacaaggttctattccctgatggtcatcaaagtgacgacgaacctccaagtgcagacctgcggtatgctacaggaggtttctacaaggagaatgggagtgtaatagggagattggcgaactgtgactctgattccaacaatcatatctttgatgaagccagtgctggcaagtttgagaatggagggactcattcaggtttggatccgtatgctgagtcggtggcgttgcttcagtcggcacaagaagcgcttgagaatgagatccaaaagtttgtggaaatcagggaagaaactgatgaagattccacaactcaccaaagtgaaatagaatggagcagctctcctgtagaagaattaaatgagaagataaagatgctcgagtcgaagctggaagaagccaccatggtcatcaataagcaggattcaaaaataattgaactagatgcactcagccaagtacaaccacagaataccatagcatgtaacaacgatctgctgtctctaccatctgatgtagaccaactgctcttggagaagctggaggcagagattcagtgctttatccttacaagagcttggcaggattggaaactcctgaccaaggatcaatttgctcttaacgagacacagaaatcccttctggcggatcacaaatctttagaaactaagctgaggcacgctgagaacagggcgatgatgctggaggagatggtggataaactagagtcacaatgcaaggagctctccgagacttcagaagttctgaagctgcaggccagagctagcagggtctccttgttctgctcggtccagtttgtgctgctatgcctagccatggggaccctcctcgttcgctttctgccctcctctcccgatgttgtacctacttgaggttagagaattatgccagtcagcctttgtgtagccattgtcgaaaaatttttttctttaaattttttgggcccaaaccccctcaaaattttttttttttggcccacaaaccaagtttttggggaaattttttt

SEQ ID NO: 2156 - DNA, 1995 bp, Zea mays
caaggactcctgcctccgatgcggcaactcatcccatccggcttctaaagccgcggcccctgtggtcaattccggtggccggcggcatggattccggcgccaacagcatcggcgagtcggtgggcgagtcgccgtcgctggcgctggcgccggagccgcagacacggccggccgagccggtcaccaagggtcgcgggctccgccggtggcgccgtatcccgcgcgagcagcaccaggaggggtctccgggtagccccggggccgataccggcgttggagctagcgcgggtgaggacttggcggcgcagctccacaagcgtcgttacggtcctgccgccgacgagcccaagggaaagcaggacccggctgcagcagaggaggtcgagagctcggtcgcgtccgtggagtccagcttcgtgccgctggaggcgtccccaccgccggcgccgactaggttggacccgaatctaggccacctgattgccaccgctggtttctcggtgggcgccggcggcgccgattcggacaacagcgacgaccgcaccagcaagttgtccacggccgccagcgcgccgcgccacgacttctcgtccgtcggcttcggccgggagcgcgacagggcgcggtcccgcgcccccggcgctgctcacggcaagggcatccgtgctgcacgtgtgcgcggcgccactatgcgtgttgcctcttcccctgctgaagcggggaattctcgctccagcgtcgagtccaacctccggagctctaacgctgctcatgcgcggcgatctagtgctggcgtcacaagcaacggtgttcacaagattctgttccctgatggtcatcaaagtgacgatgaacctccaagtggggacatgcggtatggtacaggacgtttctacaaggagaatgggagtatagaagggagattggggaactgtgactccgactccaaccatcatacctttgatgaagcgagcgtgggcaagtttgagaatggagggactcattcaggtttggatctgtatggtgagtcgatggcgttacttcagtcggcacaagaagcgcttgagaatgagatccaaaagtttgtggaaatcaggaaagaaactgacgaagattccacagctcaccaaagtgaaatcgaatggagcagctcacctgtagaagaactaaatgagaagataaagatgctcgaattgaaactggaagaggccaccatgctcatcaatgagcgggattcagaaatacttgaactagatgcactcagccatgtacaaccacagaatacagtagcatgtaacaactatccgctgtccctacagtctgatgtagaccggctgttcctggagaagatggaagcagagattcagtgctttatccttacaagagcttctcaggactggaaactcctgacaatggatcaatttgctcttaacgaggcacagaaatcccttctgtcggatcacaaatccctagaaactaaactgaggcacgccgagaacagggcgatgatgctggaggagatggtggataaactagagtcgcaatgcaaggcgctgtctgagacttcagaagttctgaagctgcaggccggagctagcagggcctctttgttctgctcgatccagtttgtgctgctgtgcatagccattgggaccctcctcgttcgcttcctgtcctcttctccggagattgtacctacttgaggttagagaattatgccagtcagcctttatgtaggcgttgttgaacggttgtttactgtaacttattagggcatcaatcgccttacagattttcgttttttgtaccatcaactcgattttgctagtaatttctttatgaatacgagtttactccacttctgggttctctggattctggaaatgccacatgtgtagttttttttctatggtcggtataatgttcgaaagggaatctcgtcaccttggtggtttatgctgagagatctgtcatgatgctttatgtgttgtttgc

SEQ ID NO: 2157 - DNA, 1869 bp, Zea mays
ccaagggctcgccccgatcccaaggactcgtgcctctcgtcctccgatgtggcaactcatcccatccggcttctaaagccgcggccaaggttgtcaattccggtggcaggcggcatggattccggcgccaacagcgtcggcgagtcggtgggcgagtcgccggtgcccgcgccggcgcctcagacacggccagccgaaccggtcacaaagggccgcgggctccgccggtggcgtcgtatcccgcgcgagcagcaccacgaggggtctccggtgagccccgggctcggtaacagtgctggtgctagcgcgggtgaggacttggcagcgcagctccacaagcgtcgttacggtcctgccgacgacaagcccaagggaaagcaggacgcggctgcagaggaggtggagagctcggtcgcgtccgtgaagtcaagcttcgtgccgctggaggtgtccccacctccgccgccgacgctgactaggttggacccgaatctgggccacctgattgccaccaccggtttctcggtgggagccggcggcgccgattcggacaacagcgatgaccgcaccagcaagtcttccacggccgccagcgcgccgcgccacgacttctcgtctgtcggcttcggccgggagcgcgacagggcgcgatcccgcgcccccagcgctgctcacggcaagagcatccgtgctgcacgtgtgcgcggcgcctcctccacggctgaagcagaccattctcgctccagcgtcgagtccaacctccgaagctctaacgctgctcatgcgcggcgatctattaccgacgtcacaagcaacggtgttcacaaggttctattccctgatggtcaacaaagtgacgacgaacctccaagtgctggcctgcggtatgctacaggaggtgtctgcaaggagaatgggagtgtagtagggatattggggaactgtgacactggttccaacaatcatacctttgatgaagcgagtgtgggcaagtttgagaatggagagactcattcatacttggatccgtatgttgagtcgatggcactgcttcagtcggcacaagaagcgcttgagaatgagatccaaaagtttgtggaaatcaggaaagaaactgatgaagattccacaattcaccaaagtgaaatagaatggagcagctcacctgtagaagagttaaatgagaagataaagatgctcgagtggaagctggaagaagccaccatgctcatcaaggagcgagattcaaaaatacttgaactagatgcactcagccaagtacaaccacatgataccatagcatgtaacgatgatctgctgtctttacagtctgatgcagaccaactgctcttggagaagatggaggcagagattcagtgttttatcctgacaagagcttcgcacgattggaaactcctggccaagaatcaatttgctcttaacgaggcacagaaatcccttctgacggatcacaaatccttagaaaccaaattgcggcatgccgagaacagggcgatgatgctggaggatatggtggataaactagactcgcaatgcaaggagctgtctgagatttcagaagttctgaagctgcaggccagagctagcagagcctccttgttctgctcggtccagtttatactgctatgcatagccatcgggaccatcctcgttcgcttcctgccgccttctccggagattgtacctacttgaggttagagaattaggccaatcagcccagcctttgattaggcattgttgcaatattgttcactgttacttgttaggcatcaatcgccttacaaattttcgtctttgtaccatcaactcgattttgctagtaacttcttatgaatatgaatttactgt

SEQ ID NO: 2158 - DNA, 1991 bp, Zea mays
aggtttgtttactgatagtctgatactgtctgtttcctcttgccttccactccctggatctccagttccaggctaggcccgagctggggaattccgatccccccaccaagggctcgccccgatcccaaggactcgtgcctctcgccctccgatgtggcaactcatcccatccggcttctaaagccgcggccaaggttgtcaattccggtggcaggcggcatggattccggcgccaacagcgtcggcgagtcggtgggcgagtcgccggtggccgcgccggcgcctcagacacggccagccgaaccggtcacaaagggccgcgggctccgccggtggcgtcgtatcccgcgcgagcagcaccacgaggggtctccggtgagccccgggctcggtaacagtgctggagctagcgcgggtgaggacttggcagcgcagctccacaagcgtcgttacggtcctgccgacgacaagcccaagggaaagcaggacgcggctgcagaggaggtggagagctcggtcgcgtccgtgaagtcaagcttcgtgccgctggaggcgtccccacctccgccgccgacgctgactaggttggacccgaatctgggccacctgattgccaccaccggtttctcggtgggagccggcggcgccgattcggacaacagcgatgaccgcaccagcaagtcttccacggccgccagcgcgccgcgccacgacttctcgtctgtcggcttcggccgggagcgcgacagggcgcgatcccgcgcccccagcgctgctcacggcaagagcatccgtgctgcacgtgtgcgcggcgcctcctccacggctgaagcagacaattctcgctccagcgtcgagtccaacctccgaagctctaacgctgctcatgcgcggcgatctattaccgacgtcacaagcaacggtgttcacaaggttctattccctgatggtcaacaaagtgacgacgaatctccaagtgcaggcctgcggtatgctacaggaggtgtctgcaaggagaatgggagtgtagtagggatattggggaactgtgacactggttccaacaatcatacctttgatgaagcgagtgtgggcaagtttgagaatggagagactcattcatatttggatccgtatgttgagtcgatggcactgcttcagtcggcacaagaagcgcttgagaatgagatccaaaagtttgtggaaatcaggaaagaaactgatgaagattccacaattcaccaaagtgaaatagaatggagcagctcacctgtagaagagttaaatgagaagataaagatgcttgagtggaagctggaagaagccaccatgctcatcaaggagcgagattcaaaaatacttgaactagatgcactcagccaagtacaaccacatgataccatagcatgtaacgatgatctgctgtctttacagtctgatgcagaccaactgctcttggagaagatggaggcagagattcagtgttttatcctgacaagagcttcgcacgattggaaactcctggccaagaatcaatttgctcttaacgaggcacagaaatcctttctgacggatcacaaatccttagaaaccaaattgcggcatgccgagaacagggcgatgatgctggaggatatggtggataaactagactcgcaatgcaaggagctgtctgagatttcagaagttctgaagctgcaggccagagctagcagagcctccttgttcttctcggtccagtttgtactgctatgcatagccatcgggaccatcctcgttcgcttcctgccgtcttctccggagattgtacctacttgaggttagagaattaggccaatcagcccagcctttgattaggcattgttgcaagattgttcactgttacttgttaggcatcaatcgccttacaaatttccatctttgtaccatcaactcgattttgctagtaacttctttatgaatatgaatttactgtaaaaaaaaaaaaaaaa

SEQ ID NO: 2159 - DNA, 2607 bp, Zea mays
ccggcgcaaaaaagaagaagccggccaccgccgccgccgccgccgccgcaaagccgccgcccgcctcggttgagctgaaggcaacgccgtcctcgtcttctttacccgcggcgaacggtgcggcgccccaccaggtggtggacgcgggcgtcctcttgcgccgcgcacacgagctcaaggaggagggcaaccgcctgtttcagtcgcgcgactacgccggggcgctgcgccaatacgagctggcgctccgcctcgccccgcgcggccatcccgaccgcgccgtcttccacagcaatcgcgcggcatgcctcctccagctccgccccgtagaccacgaggccgtcgcgcaggagtgctccctcgcgctccaggccgagccacgctttccgcgcgctctcctccgccgcgcccgcgcgctcgaggcgctcggccgccacgagctcgccctcgccgacgcgctggcgctccttgcgctcgaccctgaccaccgcgaagccatcgacctctcctaccgactacgctcccgtgtcaacgcatcctctgctgcctccgcttcctcggcacccgagcccaccagccggccctcccccgctgcccttggtgcctccgccgttgtcgccggacttggccattccctccccgctcgctcattccctaagaaacaaccaccaccagcctctcctgctaacttgcagccaaatctcgcagtgattccaaaatctaacccgccaccgttgcccaagctggtgcctttctccaattctccgccatcttcaaccaagcctttggctgcagatagctccgagaaggccatgacgcctccagttgcctctttgctaccggaaagagcggcaccacttataaataaaaaggttgtgacgagatggaggcctctcaagctggtgtatgaccacgacattaggcttgggcaggttccagagaaatgcagcttccgaacacttcgtgagtttgtagctaagaggttcccatcatccaaggcagtgttgattaaatataaggatgctgatggtgatctagttaccatcacatcaacagaagagctccggttagctgaattattcattgataaagttggccacgaggttgtagaaaatgggagggaggatgacaataagctcccggtgttgaggctgcaccttgttgaagttagcccagaacaggaaccaactttgccattggaagaagagaagttggaggaggatgaggaattgttgatcaatggtgaagatagcactttacatgctttagcagtggtaaccgacgcagaggtggtgaagcaagatgttgagaacagatctgctgatcaaagtgtggagacagggaagaatgattgtggccatgccgagtgcaaggaagctgagattgatgattggttgcttcagtttgcagatttgttccggaaccaggttgggattgatgcagatgcacatttagacctgcatgagttgggcatggagctgtgctccgaggctctcgaggaaactgtgacaagcatggaggctcaggtcctttttgagttggctgcttctaaatttcaggaggttgctgctttggccttattcaattggggaaatgtgcacatgtgtgaagcaaggaagcgcatccctctcgatgaatctgctccaaaggaagtcatggctgctcagctccgcacagcttattattgggtgaaggagaggtatgctcttgcagggcacaaatatgaggaggcccttaaaatcaagccagacttccatgaagggcttcttgctttaggccagcaacacttcgagactgcaaagcttcattggtcatatgcactggcagataaggctgacctatctacctgggattctttggaaacattcaagctttttgatagcgctgagcagaacatgagggctgcaacagagatgtgggagaaggtggaagaacagagaatggcagagttaaaagaaccaggcgcatgtgataaggatggggtactgaggaaaaggcagcacggtgcaggtggtcaaccggagttgacaccagaagaagcagctgagcaggcagcagtaatgaggcaacagattcacctcttctggggtaatatgcttttcgagcgttcccaagtggagtttaagctcagtgttggtgactggaagacaaatcttgatgcatctgttgaaaggtttaagttggctggagcttcagaatcagatattttgacagtgttgaaaaatcacttttctaatgtagcctctgagtgtgaagagaagaaagtcatgacttcaggcacagaaatttcccaaacaaatgacaatgttgaggataagtgtgtggttgaaacctaagttttcatggttcaaggtgaatgacatcaatgtgtatcatattcatcaattgcttgataggctttatttgttcttggtattatcatggtcctttgtcattacatctaggcgagagcttcaagcacactgagttttgtgattgccattgccaactggtgcagagtcgacatgctccatgaaatcttgataatttactagaggtcttagatttctgaatatatgttatcattcttctaccagttttagtggtatttgatgttgagttagtttt

SEQ ID NO: 2160 - DNA, 2491 bp, Oryza sativa Japonica Group
tgggcaaatccggcgcaaaaaagaagaaacccgccgccgccgcctccgcctccgccgccgccaccaaatcatctcccgccgcaacagagccgaaggcaccgacgcagtcccagccccccgcggccaacggggcggcgccgcatctggtggaccccgccgtgctcctgcgccgcgcgcacgagctcaaggaggaaggcaaccgcctgttccagtcccgcgactacggcggcgcgctgcggcagtacgagctcgctctccgcctcgccccgcgcggccaccccgaccgcgccgtcttccacagcaaccgcgccgcctgcctcctccagctccgccccgtcgaccacaaggccgtcgccgaggagtgctccctcgctctccaggcggagccgctcttcccgcgcgcgctccttcgccgcgcccgcgcgctcgaggcgctcggtcgccacgagctcgcgcttaccgacgcccttgccctcctcgctctcgaccccgaccaccaggacgccgtcgacctcgtccaccgcctccgctcccgcattctatccccgtcctcctcagcctcaggctctgccacctccacccccgaaccaactagccgcccctcccctgctgctcttggtgcctccgctgttgttgccggcctaggcccgtccctccccgctcgccctttccccaagaaaccatcacctcctcctccgcctgctcaacaacagcaatcggttcctccaatgtcaaaatttaatccgtcgccaccatcgcccaagttggtgcctttctccaactctccgccatcttctgccaacgcatcagctgctgagagctcccagaaggtcacgccgacacctctggttccctcttcactttcgttgaaagacaaagcgctgatggacaagaaggttgtcacaagatcaaggccgctcaagctggtgtacgatcatgatataaggcttgcgcagatgccagaaaaatgcagcttccgaacactccgtgaagttgtggcatcacgattcccatcgtccaaggctgtgctgattaagtataaggatgctgatggtgatctggttaccattacttgttccgcagaacttcgattggccgagtcctgtgttgatatagctggcagtgaggtgatagaagatggtgcacggcatggtcagaaacttccaatgttgagacttcacattgttgaagtaagcccagatcaggagcctccaatgccaacagaagaggagaagctggagcaggataatgagttgctggtgaaaggtgaagataactctccacatgcttcagcagctgtggtgactgatgcagaggtgacgaaacaagatgtggagaatgtagttgctgaagctgaacagaacaccctgacagggaagaaagattgtggccatgctgagtgcaaggaagctgaaattgatgattggcttcttcagttcgcagatttattccggaaccaggttggtgttgatgcagatgcacatctggacctgcatgaactgggaatggagctgtgctctgaggcgcttgaggaaacggttacaagtgaggaggcacaagccctctttgagatggctgcagctaaattccaagaggttgctgctttggccctattcaactggggaaatgtgcacatgtgtgccgcaaggaaacgcattcccctagatgaatcggctccaaagaaagtcatgtcagctcagctctgcacagcttatgattgggtgcgagataggtatgctcttgcagggagcaagtacgaggaggctcttaaaatcaagccggacttttatgaagggctacttgctttaggccagcaacattttgagactgcaaagcttcattggtcatttgcactagcagacaaggttgacctgtctgcttgggattcttcacagacattcaagctttttgacagtgctgagcacaagatgagggctgcaacagaaatgtgggagaaagtagaagagcaaagaatggcagaattaaaagaaccatctagcgaggcactgaagaaaaggaagaagcaacataatgcagatggtcaaggggagttgactccagaggaggcagctgagcaggcagcagtaatgaggcagcaaattcacctgttctggggtaatatgctttttgagcgttctcaagtggaattcaaacttgatatcgctgattggaagaagaatcttgatgcgtccattgaaaggtttaagttggctggagcgtcagaatcagatatctctgcagtcttgaagaaccatttttccaacacagtttctgagtgtgaagataagaaaatcatgactttagatacaggaatctcccaaataagtaacaatattgaggacaagtgtatccttgaaagctaggttttcatggttttaagttggataacatccatgcccatattcttatctgttcttgataatattttcctgatgttgttttatgacctcctaattagggattacagcacaatgaattttccgttacctgc

SEQ ID NO: 2161 - DNA, 1638 bp, Zea mays
cacgcgcaccagcccaccgcccagcactccagccgccagaacagagtctacggcgccgccgtcgcacgacaggagagggagagagagagagacgcgggctttgacttgccgccggtgcgtccgtgcgtgcctggtgggaggagtgggagacgccggtacagtacaggagccatggcgccgagctgctacgacgcggcagcgtccatgctcctctgcgccgaggagcacagcagcatcctgtggtacgacgaggaggaggaggagctggaggcggtcgggagaaggagaggccggtcgccgggctacggggacgacttcggcgcggacttgttcccgccgcagtcggaggaatgcgtggccggtctggtggagcgggaacgggaccacatgccggggccgtgctacggcgacaggctgcgcggcggcggcggctgtctctgcgtccgccgggaggccgtcgactggatttggaaggcttacacgcaccacaggttccgccctctcactgcctacttggcagtgaactacctcgatcgcttcctctcgctgtctgaggtgccggacggcaaggactggatgacgcagctcctcgcggtggcgtgcgtttctctggccgccaagatggaggaaaccgccgtcccgcagtgcctggaccttcaggtcggagacgcgcggtacgtgttcgaggcgaagacggtccagaggatggagctcctggttctaacaaccctcaactggaggatgcatgccgtgacgccgttctcctacgtggattacttcctgaacaagctcagcaacggcggcagcacggcgccgaggagctgctggctcttgcagtccgcggagcttatcttgcgtgcggccagaggaaccggctgcgtcgggttcaggccgtccgagatcgccgccgcggttgcagccgccgtggccggagacgtggacgacgcggacggcgtcgagaacgcctgctgcgctcacgtagataaggagcgggtgttgcggtgccaggaagcgatcgggtccatggcgtcctcggcggccattgacggcgacgctaccgtgccaccgaaatctgcgagacgcaggagctcccccgtgcccgtgcccgtgcccgtgccgcagagccctgtgggggtgctggacgcggccgcctgcctcagctacaggagcgaagaggcagcgactgcgactgcgacttctgctgcctcacatgggccccctggctcttcaagctcgtcctcgacctccccggtgaccagcaaaaggaggaaactcgccagccgatgtgatggatcgtgcagtgaccggtcaaagcgcgcgcccgcccaatggaccaaagagtgaattgactagggcgtttgcttgctttctgatcaaagagtgcatcgagaggcggcagaatggaggaaaggggattttggcatgacgagggcaaaggagttgatgaataaagacgcgacgaggtggacagtacctaaattgctgatcttttctttgcaaggggagtaggggggaccttgctgggggtgggtagtagacagcccagcacaaaacctggttggtgtgccacgaccacaatggccgcgccagccatggctttgtaggaaacacaagggcgctagaggagatccgatggga

SEQ ID NO: 2162 - DNA, 1958 bp, Zea mays
ctccgtccgtccgtcctcccgtcctcttccttgtgccttgtcctgcttctccactcgccactgccgcattctgcccaagtttgccgtactgccgcattccaccagccacccaccaggccaccacccagcactccagccgccagaacagagtctacggcgccgccgtcgcacgacaggagagggagagggagagagacgcgggctttgacttgccgccggtgcgtccgtgcgtgcctggtgggaggagtgggagacgccggtacagtacaggagccatggcgccgagctgctacgacgcggcagcgtccatgctcctctgcgccgaggagcacagcagcatcctgtggtacgacgaggaggaggaggagctggaggcggtcgggagaaggagaggccggtcgccgggctacggggacgacttcggcgcggacttgttcccgccgcagtcggaggaatgcgtggccggtctggtggagcgggaacgggaccacatgccggggccgtgctacggcgacaggctgcgcggcggcggcggctgtctctgcgtccgccgggaggccgtcgactggatttggaaggcttacacgcaccacaggttccgccctctcactgcctacttggcagtgaactacctcgatcgcttcctctcgctgtctgaggtgccggactgcaaggactggatgacgcagctcctcgcggtggcgtgcgtttctctggccgccaagatggaggaaaccgccgtcccgcagtgcctggaccttcaggaggtcggagacgcgcggtacgtgttcgaggcgaagacggtccagaggatggagctcctggttctaacaaccctcaactggaggatgcatgccgtgacgccgttctcctacgtggattacttcctgaacaagctcaacaacggcggcagcacggcgccgaggagctgctggctcttgcagtccgcggagcttatcttgcgtgcggccagaggaaccggctgcgtcgggttcaggccgtccgagatcgccgccgcggttgcagccgccgtggccggagacgtggacgacgcggacggcgtcgagaacgcctgctgcgctcacgtagataaggagcgggtgttgcggtgccaggaagcgatcgggtccatggcgtcctcggcggccattgacgacgctaccgtgccaccgaaatctgcgagacgcaggagctcccccgtgcccgtgccgcagagccctgtgggggtgctggacgcggctccctgcctcagctacaggagcgaagaggcagcgactgcgactgcgactgcgacttctgctgcctcacatggggcccctggctcttcaagctcgtcctcgacctccccggtgaccagcaaaaggaggaaactcgccagccgatgtgatggatcgtgcagtgaccggtcaaagcgcgcgcccgcccaatggaccaaagagtgaattgactagggcgtctgcttgctttctgatcaaagagtgcattgagaggcggcaaaatggaggaataaaggggattttggcatgacgagggcaaaggagttgatgaataaagacgcgacgaggtggacaacacctaaattgccgatcttttctttgcaaggggagtaggggacctgcttgggcctgggggagggtagtagacagcccagcacaaaaacctggttggtgtgccacgaccacaatgggcgcgccagccatggctttgtaggaaacacaagggcgctagaggagatccgatgggatgactcagaataaagatagtggagggaccagaccgtatgcagtatgtgcaacaactaggcactggcatgcttatgctcaagtaatctgataacttgaatgttgtgtatccgacaaactgcttctgtgaagagagaaatgcaggtagacgatgaatgtatgtgacaaaaagaatgtccgacccagatgagaaaataaaatatgaatccatgacaa

SEQ ID NO: 2163 - DNA, 1749 bp, Sorghum bicolor
atggcgccgagctgctacgacgtggccgcgtccatgctcctctgcgccgaggagcacagcagcatcctgtgctttgaggaggaagaggaggaggagttgcaagtggtggggagaaagagagcccggtcgccggagccggactacggggacgatttcggcgtggatttgttcccgccgcagtcggaggaatgcgtggccggtctggtggagaaggagcgggaacacatgccgaggtccgactacggcgagaggctgcgcggcggcggcggcgacggcatcgatctctgcgtccgccgggaagccatcgactggatttggaaggtttacacatactacaactttcgtcctctcactgcctacttggcagtgaactatcttgatcgtttcctctcacggtacgagctgccggacggcaaggactggatgacacaactcctctcggtggcgtgcgtttctctagccgccaagatggaggaaactgccgtccctcaatctctggaccttcaggtcggagatgcgcgctatgtgtttgaggccaagacgatccagagaatggagctccttgttctgagcaccctcaattggaggatgcaggccgtgacacctttctcctacatggattacttcctaaacaagctcaatggtggcaacgcggcgccaagaagctggttctttcaatccgcagagcttatcctctgtgcagccagaggaacctgctgcatagggtttaggccgtctgagatcgccgcggcagttgcggcagccgtggtcgtcggagaagggaacgtcgcaggcattgagaacgcctgccttcacgtagacaaggagcgggtgttgctgtgccaggacgcgatccagtccatgtccatggcgtcctcggccattgacactgtgccaccaaagtctgcgagcggcagcggcaggacctccacctcctcccctgtgcctgtgccatggagccctgtaggggtgctggacgctgctggctgcctcagctacaagagcgaagacgatgccgccggggcagcagcgactgttgctgctgcctcacatggggcctctggctcttcaagctcatcgcccccagtgaccagcaaaaggcgaaaactcaccagccgatgatgcattgttgcagtgaccggtcaaagtgcgtgcccaatgagcagagtgaactgactaggactagtctagtctgcttttgattttctttttttaccgcgccaagaaaggtcaaatggctcccgattgcaacggaggtggtggttgtgctgtgtgagatggatgtgcattgagaggcgaaaagggaggggattttgacatgacgagaggagtctgggcaagagcaagaagttgatgaataaagatgtgaggtggacaacacctaaattgctgagcttttctttgcaaggaccggaggagaggagggagacagacaggcagccacaagcttggtgtgccacaaagggcgcaccatggctttgtgggaacacaaagctggaggagatcgatgaatgagatgatcagaataaaggtggtgaagggcctggagggaccaggccgtaggcaatatgtaggagaactaggcactgacctgcctatctttgagtattatctgataaattgctttagtagtttctagtattttttttttatttttcagtttcattgtgaagagaaaaatgtaggagaggagaaatgtatttgtgacccaaaaaaaagttgatccagatgaataaattatgaggctaa

SEQ ID NO: 2164 - DNA, 1666 bp, Zea mays
cagccggaccagagaggcggagactacagcgccggcgtcgcacggcaggagagggagacgcagccggaaaaaggcgcagactttgacttgctggtgtccggtgggagtgagatacgccggtacagagccatggcaccgagctgctacgacgtggccgcgtccatgctcctctgcgccgaggagcacagcagcatcctgtgttttgaggaggaggaggaggagttggaggcggtcgggagaaagagaggccggtcgccgggctatggggacgatttcggcgtggatttgttcccgccgcagacggaggaatgcgtggccggtctggtggagcgggagcgggagcacatgcctagggcggactatggccagaggctgcgcggcgacggcgtcgatctctgcgtccgccaggaggccatcgactgtatttggaaggtctacacatactacaactttcgtcctcttactgcctacttggcagtgaactatctcgatcgtttcctctcactgtacaagctgccggaaggcaagggctggatgacacaactcctttcggtggcgtgtgtttctctggctgccaagatggaggaaaccgccgtcccgcaatgtctggaccttcaggtcggagatgcacgttttgtgttcgaggcgaagacgatccagagaatggagctccttgttctaaccaccctcaactggaggatgcaggccgtgacacctttctcctatgtggattacttcctaaacaggctcagtggcggcaatgcggccctaagaaattgcctgtttcaatccgcggagcttatcttgtgtgcagctagaggaaccagctgcatagggtttaggccgtctgagatcgcggccgcagttgcagctgctgtggtcggagaagtggacgttgcaggcattgagaacgcctgcgcccacgtagataaggagagggtgttgcggtgccaggaggcgatccagtccatggcgttccctgtgcctgtgccgcagagccctgtgggggtgctggacgcgggctacctcagctacaagagcgaagacgatgccgcggcagcagcgactgctgcttcacatggggcctctggctcttcaagctcctctccggtgaccagcaaaaggagaaaactcaccagccgatgatgggttgcagtgacctgccaaaccgcgccactcgtctccgtgatgtgtgaagtgcaacgacgctggtgatgtgtgaagtgccttagcggcaaaaagacgggattttgacatgtcgaggggggcaagaagttgatgaataaaggtgtgaggtggacaacacctaaattgctgagctcttctttgcaagcaccggaggaggtagacagccagcacaaacttggtgtgccacaaagggcgcaccattgctttgtaggaacacaaagctggagggagatcgatgagatgatcagaataaagatggtgtagtcctggagtgggccagatcgtaggcaataatatctacaagaactaggcacactgaccagcctatgttggagtatctgataaattgctttagtaggttctagtattctttctttctttagtttcatcctgaagagaatctcggtgaccgagaaatgtatgtgacaaaataagagaagtcgacactgatgattaaaccaaaaaaaaaaaaaaaaaa

SEQ ID NO: 2165 - DNA, 867 bp, Zea mays
cgaacggccggtcgagcgccgccgcccttggctgggtcttcactcagtccttcgccggcgacgagcgtccacctggtgtctactgaactgagcagacagtagcaagagccactatgctgttcttctcctacttcaaggagctcgtggggaaggaggtgacggtggaactcaagaatgacctggcgatccgcgggacgctccactcggtagaccagtacctcaacatcaagctggaaaacacccgcgttgtcgaccaggacaagtatccccacatgctgtcagtgcggaactgcttcatccggggctcggtggtgcggtacgtgctgctcccgcaggacggcgtggacgtggacatcctgcacgacgccaccaggagggaggcgcgcggaggctgatcggcatcggcatcggcccccctcacctgtgctgcttctcccccggggaggagattgatctgccttgccctgatctcgtctggttgtacgaaacatatgctgatctgagtggccccaactcccccagcacacacttgatccaccacccacccagctccctgcctggtacttgcatgttccttgctgtgtgtgtgtgtgttcagcacacacttgatccaccacccacccagctccctgcctggtacttgcatgttccttgctgtgtgtgtgtgtgttcagcacacacttgatccaccacccacccagctccctgcctggtacttgcatgttccttgctgtttgtgtgtgtgtctgtcagtcagtaatgctgtttgaccaagagggttagcgtaaccgaacaagccctaacggagtaacggacgctgtagcggttgatgaatcacaagagtcccaatgtaagcggggttgaatc

SEQ ID NO: 2166 - DNA, 1161 bp, Sorghum bicolor
atggcgccgccgcgaagcctcgccggcgccgccatagctgccgccgccgcagccatcgtcctctcatgcttgttctacaggcgcaaatgcgctcgtctggccgcgcgggtccgcgaggtggaggcctcactggtagccgctgcagagaaggtcgctgccgagcgccgtggcagagtgcgggcccagcagtcgctgagaagggctctgagtcagcaggagcctcgctccgacgaggcgaggccggccaaggccaccgccccagcatcttacccgctggcaccgattggcactgtccagtcctgcttctccaccaggaatggtacaccaaggcagcctttggtagttacgctggccagggcaactgtggcgcttgatccagcccgagtccccgcagcagccctggagggactagctagttactcacattgctggattctttatgtttttcaccttaacactgatcttgataaactgtggaaagatcctgctaggtctaagctaaaagctaaggtaagggtaccgagattgaaagggggcaagatgggggttttggcaactagatcaccacatcggcctaatccaatcggactcagcgtagcaaaggtggaggcagtggatgggcacgctcttttgctttctggagtagatttggttgatggcacgcctgtgcttgatattaaaccatacctgccatattctgacagtgttaaaggtgcagctgttcccaattggttagaggttgatggtgcattagctgtggagtctgtccatttttccgaacacttcatttctgcgcttcccacctgctggatgcatgtacagaagcagtcactctatgcttcagcagacgagtttcaggatctgatcaagcaggtcctttcctgggacatcagatcgatctcacagcggacccgtccccatcaagtgagcatggaagctgatgccaacggccactgtggcgaaggcactgatgatgaccatagcgacgcaggtcactgcggtgtggtttaccacctacatcttgaaggcatcgatgtatcgtacagaatcgatcagggctccaacattgtcgtcgaggacgccgcccttcttccggatgtcgtccagaaacggcatggttatttggcgtggagggataaacttggcagcagcgttttgtag

SEQ ID NO: 2167 - DNA, 1424 bp, Zea mays
acgaaacccatgtcttagcgcggccttggtgccgtcgactcgacgcgctccaccatggcgccgccgcgaagcctcgccggcgccgccatagctgccacagccgcagccatcatcctctcatgcttgttctacaggcgcaaatgcgctcgtctggccgcgcgggtccgcgagttggaggcgtcactggcggtcactgcagagaaggccgccgccgagcgccgcggcagagtgcgggcccagcagtcactgagggctctgagtcagctggagcctggttccgacgaagcgaggccgaccaaggccgccgcctcagcatcttacccgctggtgccgattggtactgtcgagtcctgcttctccactaggaacggtacaccaaggcagcctttggtagttacattagccagggcaactttggtgcttgatccagcccgagtcccagcagcagcgctggaggggctagctagttactcacattgctggatcctttatgtttttcatctgaacactgatcttgataaactgtggaaagatcctgctaggtctaagctaaaagcaaaggtaagggtaccgagattgaaagggggcaagatgggggttttggcaactagatcgccacatcggcccaatccaatcggactcagcgtagcaaaggtggaggcggtgaatggacatactcttttgctttctggagtagatttggttgatggcacgccagtccttgatattaaaccatacctgccatattctgacagtgttaaaggtgcagctgttcccagttggttagaggttgacggtgcgttagcggtggagtcagtccatttttccgaacacttcatttctgcgctctccacctgctggatgcatgtacagatgtcgctgtatgcttcagcagacgagttccaggatctgatcaagcaggccctttcctgggacatcaggtcgatatcacagcggaaccgtccccatcaagtgagcgtggaagctgatgccaacggccactgtggcgaagacactgatgatgaccaccaccacagggacacaggtcgctacggtgtggtttaccacttacatcttgaaggcatcgatgtgtcgtataggatcgatcagggctccaacattttcgtcgaggacgccacccttcttccagacgccgtccagaaacggcatggttatttggcgtggagggacaaacttggcagcagcgttttgtagcatggccatggcgcagcgttttgttatcgttttcaggagtgctgcagtgtggtgtaggatgtcagtagtgatgccaatgaatttgaatgtggtggcgtctagtatctgaattggatttggaacgtataccccctgttttgcgttgagtctctgatttcttgatgttacacacaagcagaggatctggcagatcataaaaaaaaaaaaaa

SEQ ID NO: 2168 - DNA, 1544 bp, Zea mays
cgcggccttggtgccgtcgactcgacgcgctccaccatggcgccgccgcgaagcctcgccggcgccgccatagctgccacagccgcagccatcatcctctcatgtaacctctcactcttccctcacctcatcgtttctagctccaagttcccagcatcaacctctcctccctcaccaacgtgcctatccggctatcccacaggcttgttctacaggcgcaaatgcgctcgtctggccgcgcgggtccgcgagttggaggcgtcactggcggtcactgcagagaaggccgccgccgagcgccgcggcagagtgcgggcccagcagtcactgagggctctgagtcagctggagcctggttccgacgaagcgaggccgaccaaggccgccgcctcagcatcttacccgctggtgccgattggtactgtcgagtcctgcttctccactaggaacggtacaccaaggcagcctttggtagttacattagccagggcaactttggtgcttgatccagcccgagtcccagcagcagcgctggaggggctagctagttactcacattgctggatcctttatgtttttcatctgaacactgatcttgataaactgtggaaagatcctgctaggtctaagctaaaagcaaaggtaagggtaccgagattgaaagggggcaagatgggggttttggcaactagatcgccacatcggcccaatccaatcggactcagcgtagcaaaggtggaggcggtgaatggacatactcttttgctttctggagtagatttggttgatggcacgccagtccttgatattaaaccatacctgccatattctgacagtgttaaaggtgcagctgttcccagttggttagaggttgacggtgcgttagcggtggagtcagtccatttttccgaacacttcatttctgcgctctccacctgctggatgcatgtacagcagatgtcgctgtatgcttcagcagacgagttccaggatctgatcaagcaggccctttcctgggacatcaggtcgatatcacagcggaaccgtccccatcaagtgagcgtggaagctgatgccaacggccactgtggcgaagacactgatgatgaccaccaccacagggacacaggtcgctacggtgtggtttaccacttacatcttgaaggcatcgatgtgtcgtataggatcgatcagggctccaacattttcgtcgaggacgccacccttcttccagacgccgtccagaaacggcatggttatttggcgtggagggacaaacttggcagcagcgttttgtagcatggccatggcgcagcgttttgttatcgttttcaggagtgctgcagtgtggtgtaggatgtcagtagtgatgccaatgaatttgaatgtggtggcgtctagtatctgaattggatttggaacgtataccccctgttttgcgttgagtctctgatttcttgatgttacacacaagcagaggatctggcagatcataagtacattgaaaaaaagatgagaaaaaggtgacatccgttgagagaact

SEQ ID NO: 2169 - DNA, 1269 bp, Hordeum vulgare subsp. vulgare
gtgcaccttccggtatggcgcgattcgccgccctcgccgccgccgcggccgccgccatcctctcaggcctgctctacagacgcaggtgcggccgcttgaccgcgcgggtgcaggagctagaggactccctggccgacgccgtggagaaggccgccgcagagcgccgcggcagggttcgggctcagcagtcactacgaagggccctgagcgagcaggggacgagcccgggtaaggagaagccggacaaggccccggcgtcgtacccgatggcagcgatcggcaccgtgcagtcctgcttctccactagaaatggcacaccgagacagcctttggtggtgccgctggccagagcgaccgtggtgcttaatcctgcccgtgttgcggccgaagcgctagagggacttgctagttactcgcattgttggatcctctacgtgttccatctgaacaccgatcttgataaaatgtggaaagaccctgctagatccaagctaaaagcaaaggtgagagtgcctagattgaaagggggcaagatgggggttttggcaactagatctccgcatcggcctaatccaattggactcagtgtagcaaaggtggaggcagtggatggtcatgcgattttgctttctggagtagatttggttgatggcacgcctgtacttgatatcaaaccatatctgccatattctgatagcgtgaatggcgcggctattcctaattggttagaggttgatggtgcattagctgtggagtctatccacttctctgagcacttcatttcttcactttccaactgctgggcgcatgtacaaaagcaggcactctatgcctcagcagacgagtttcaggatctgatcaaggaggtgctctcctgggacatcagatcattgtctcagcgactccgccctcaccaggtgaacattaaaagcgaggcggatgattatggtagcgaagctcatgaggattgcagaaacaaagaagattaccaagccgctgtctcctgcccgatcgtagtctaccaccttcatctggaaggcattgatgtgtcatacaaaatcgatgaaaattccaacattgttgttgacgatgcagcccttcttcccagtgctgcaaaccaaaacaagtctagctacctaacatggagggataagcttagcactttgtaggagagtagtatacaaaacttttggcaagtcgcaggagcacaagctgcacaatgctgtacaatatcatgaggttgatgaattcagtagcaatcagtactcc

SEQ ID NO: 2170 - DNA, 1300 bp, Hordeum vulgare subsp. vulgare
gcgtatggcgcgattcgccgccctcgccgccgccgcggccgccgccatcctctcaggcctgctctacagacgcaggtgcggccgcttgaccgcgcgggtgcaggagctagaggactccctggccgacgccgtggagaaggccgccgcagagcgccgcggcagggttcgggctcagcagtcactacgaagggccctgagcgagcaggggacgagcccgggtaaggaggagccggacaaggccccggcgtcgtacccgatggcagcgatcggcaccgtgcagtcctgcttctccactagaaatggcacaccgagacagcctttggtggtgccgctggccagagcgaccgtggtgcttaatcctgcccgtgttgcggccgaagcgctagagggacttgctagttactcgcattgttggatcctctacgtgttccatctgaacaccgatcttgataaaatgtggaaagaccctgctagatccaagctaaaagcaaaggtgagagtgcctagattgaaagggggcaagatgggggttttggcaactagatctccgcatcggcctaatccaattggactcagtgtagcaaaggtggaggcagtggatggtcatgcgattttgctttctggagtagatttggttgatggcacgcctgtacttggtatcaaaccatatctgccatattctgatagcgtgaatggcgcggctattcctaattggttagaggttgatggtgcattagctgtggagtctatccacttctctgagcacttcatttcttcactttccaactgctgggcgcatgtacaaaagcaggcactctatgcctcagcagacgagtttcaggatctgatcaaggaggtgctctcctgggacatcagatcattgtctcagcgactccgccctcaccaggtgaacattaaaagcgaggcggatgattatggtagcgaagctcatgaggattgcagaaacaaagaagattaccaagccgctgtctcctgcccgatcgtagtctaccaccttcatctggaaggcattgatgtgtcatacaaaatcgatgaaaattccaacattgttgttgacgatgcagcccttcttcccagtgctgcaaaccaaaacaagtctagctacctaacatggagggataagcttagcactttgtaggagagtagtatacaaaacttttggcaagtcgcaggagcacaagctgcacaatgctgtacaatatcatgaggttgatgaattcagtagcaatcagtactccataatgcacctgaatttttagagaatatataatgattcgcc

SEQ ID NO: 2171 - DNA, 1415 bp, Oryza sativa Japonica Group
gctggtctggacgccgcctccgccgccgccgccatggcgcggcagcaagtcgccgccgcggccgccgtcgccgccatcgccggcgctgccgccgttcttgcaagcgagctctacagtcggaggtgccgtcggttggcgacgagggtccgggagctggaggcctcgcttgccgccgccacggagaaggccgccgccgagcgccgcggtagggttcgggcgcagcagtcgctaaggaaggctctgagcgagcaagagctcagctcggatgagaagaagaagctgagccaatcccccaagtcgttccccatggcttcgatcggtgtcgtgcagtcatgcttctccactaggaatgggacgccgaggcagcctttggtggtgccacttgccagagcaaccgtgatgcttgatccagcccgtgtccctgcggaagcgcttgagggacttgccgattactcgcactgctggatcctttatgtgttccatctgaacactgaccttgataaaatgtggaatgaccctgctaggtccaagctaaaagcaaaagtgagagtacctaggttgaaagggggcaagatgggggttctggcaactagatctccacaccggcctaatccaattggactcagtgtagcgaaggttgaggcggtggatgggcattcaattttgctttctggagtagatttggttgatggcacgcccgtgcttgatatcaaaccgtatctgccatattctgatggtgttaaaggtgcagctattcctaattggttagaggttgacggtgcattagctgtggagtctatccacttttctgagcacttcatttcttcactttctgattgctggatgcatgtaaaaaagcaatcactctacgcttcagcagatgagtttcaggatcttgtcaaggaagtgctctcctgggacatcaggtcgctgtctcagcggatccgtccccatgatgtgaccataaaagatgtcactgataatggcggcagcaaaattgacaacggttgcagcaacgatgaggatcgccaatccgttgacccgtccactagcgtggtctaccaccttcatctagaaggcattgatgtgtcatacagaattgaccaagattccaacattgttgttgagaatgcagcccttctctccagtgctgtgaaccaacaccggtacagctacttaacatggagggaaaaggtaagcattttgtaggagcatatattagagctcattatctgaaaaacaaatagagctcatgcagtaaactgtatgcatgaaaaaaatatatattagagctaattaccatggagtaaagctgtatgcaatcttatgaaattctactctaaaatgtcatgaggtcaatggattctctagcttttctcatttaaagaaagaatttgagagtgtttctctttcag

SEQ ID NO: 2172 - DNA, 1379 bp, Zea mays
cacttccatcgaagctacgaaacccatgtcttagcgcggccttggtgccgtcgactcgacgcgctccaccatggcgccgccgcgaagcctcgccggcgccgccatagctgccacagccgcagccatcatcctctcatgcttgttctacaggcgcaaatgcgctcgtctggccgcgcgggtccgcgagttggaggcgtcactggcggtcactgcagagaaggccgccgccgagcgccgcggcagagtgcgggcccagcagtcactgagggctctgagtcagctggagcctggttccgacgaagcgaggccgaccaaggccgccgcctcagcatcttacccgctggtgccgattggtactgtcgagtcctgcttctccactaggaacggtacaccaaggcagcctttggtagttacattagccagggcaactttggtgcttgatccagcccgagtcccagcagcagcgctggaggggctagctagttactcacattgctggatcctttatgtttttcatctgaacactgatcttgataaactgtggaaagatcctgctaggtctaagctaaaagcaaaggtaagggtaccgagattgaaagggggcaagatgggggttttggcaactagatcgccacatcggcccaatccaatcggactcagcgtagcaaaggtggaggcggtgaatggacatactcttttgctttctggagtagatttggttgatggcacgccagtccttgatattaaaccatacctgccatattctgacagtgttaaaggtgcagctgttcccagttggttagaggttgacggtgcgttagcggtggagtcagtccatttttccgaacacttcatttctgcgctctccacctgctggatgcatgtacagcagatgtcgctgtatgcttcagcagacgagttccaggatctgatcaagcaggccctttcctgggacatcaggtcgatatcacagcggaaccgtccccatcaagtgagcgtggaagctgatgccaacggccactgtggcgaagacactgatgatgaccaccaccacagggacacaggtcgctacggtgtggtttaccacttacatcttgaaggcatcgatgtgtcgtataggatcgatcagggctccaacattttcgtcgaggacgccacccttcttccagacgccgtccagaaacggcatggttatttggcgtggagggacaaacttggcagcagcgttttgtagcatggccatggcgcagcgttttgttatcgttttcaggagtgctgcagtgtggtgtaggatgtcagtagtgatgccaatgaatttgaatgtggtggcgtctagtatctgaattggatttggaacgtataccccctgttttgcgttg

SEQ ID NO: 2173 - DNA, 1592 bp, Zea mays
aaatctcccccttaacaactccactcccgcggaaaaaaaacccatatccctccggcataaacccaaaaaggttagcagcctcctcctactcgatctcccagatccgcactatctctgatgctacctgcttctttattactagctgtatcgatcgatcgatccagcgttgtttagctgacgagtcctgtttaattctgcgtgtttagctgcaagcagtgtgaccaaaagcaggcctgacggcgatcctcggctctctagccaggcagcaggagatggagcacgacgtgcaccaccagcaggccatggagctgccgccggggttccgattccaccccaccgacgaggagctcatcacgcactacctcgccaggaaggccgccgacgcccgcttcgccccgcgcgccgtcggcgaggccgacctcaacaagtgcgagccatgggacctgccatcccgggcgacgatgggcgagaaggagtggtacttcttctgcgtcaaggaccgcaagtacccgacgggactgaggacgaaccgggccaccgagtcgggatactggaaggcgacgggcaaggacagggagatcttcaggagcaaggccctcgtcggcatgaagaagacgctcgtcttctacacggggagggcgcccaggggaggcaagaccggctgggtcatgcacgagtaccgcctccacggcaagcacgccagcagcagccgcctcatgccgtcgtcggtcagagctggcgcgtcaaaggacgagtgggtgctgtgcagggtgttcaagaagagcatcgagccgccgccgtcagtgggcaagaggtcgtcggtcgcgtgtacggggatgatgttggtggaggacgtcgtgggaccgccgtccatgtccatggaggacgacctcgccgcgtgcgcgctgcctccgctgatggacgtgtccggcggtggcggcgccaacatggcggcggcgtccatcgagctgctggcgccaccggcaccacacgtgacctgcttctccaacgcgctggagggccagttcttcctgaacccaccctgcctccacccctccacgtcgccgctccgcctggcgagcatggtgcaggcgcaggcgcagtacgacggcgacgcgggcatggtgctccagctcctgcaggaggccggcgggtggtacagcaagctgggcgagggggagcggctgagcggcggcgcgtcgcaggacaccggcgtcacctcggaggtgaacgtgaaccccgccgagatctcctcgacgcggcaccacataatggaccccgaggcggcctccttctggggcttctgaacttcccccacatcttttttttccgcgatcgctaaaaattggattagaattagtcactggattggaaactgggattgtaattgtgccgttgaatattgctatatgcaaaatggggcaaaaaaaacaaaaagttgtgaacgaagtgtgtgtgtatatataatatatatatgcgcgcgcgcctgtgtgcacggtactatatatcccgcgacaaaattgtatttatgatgatagaattgtgtttaaaaaaaagggtcctattttggatcggaaaaaaaaaaaaaaaaa

SEQ ID NO: 2174 - DNA, 1462 bp, Sorghum bicolor
ttccccttaacaactccactctctcccggaaaaatccatccgtccataaaacccaaaaagtctcatcaggtttagttgcaaagcagcgatcaaaagcaggcctagacgacggcgatcctcagctcagtagccaggcaggagatggagcacgacgtgcaccaccaccaccatcagcagccggaggaggccatggagctgccgccggggttccgattccaccccaccgacgaggagctcatcacgcactacctcgccaggaaggccgccgacccccgcttcgccccgcgcgccgtcggcgtggccgacctcaacaagtgcgagccatgggacctgccatatcgggcgacgatgggggagaaggagtggtacttcttctgcgtcaaggaccgcaagtacccgacggggctgaggacgaaccgggccaccgagtccggctactggaaggcgacgggtaaggacagggagatcttcaggggcaaggccctcgtcggcttgaagaagacgctcgtcttctacacggggagggctcccaggggcggcaagaccggctgggtcatgcacgagtaccgcctccatggcaagcacgccgccgccgccgccgccgccagcagcagcagcagcctcatcccgtcggtcagagctggcgcgtcaaaggacgactgggtgctgtgcagggtgttcaagaagagcatcgagccgccgtcgtcagtggccggcggcagcaagaggtcatcatcatcggttgcgtgcatggggatggaggacgtcgtggggccgtccaggtccatggcggacgacttcgccgcgtccacgctgcccccgctgatggacgtgtccggcggcagcggcggcaacatgtcactttcagcggcggcggcggctgcggcgtccatcgagctgacgacgccaccggcaccacacgtgacctgcttctccaacacgctggagggccacttcctgaccccaccaacctgcctcctcccctccgccgccgccaccgcctcgccgttcctggcgagcatggcgcagtacgacggcgacgcgggcgtgggcggcatggtgcacgagctcctgcaggaggccggcgggtggtacagcaagctgggcgagagggagcggctgagcggcggcgcgtcgcaggacaccggcgtcacctcggaggtgaaccccgccgagatctcctcgacgcggcaccacatggatcacgaggcctccttttggggcttctgatgaactcccccgtcttttccgttatcgttaaaaaattggattagaattagtcactggattggaaatggagattgtattgtgctattgaatgaatactgttatgtgcaaatggggcaaaaaaaaaagttgtgaacaaagcatatatgcttgtgtagtactaaatcgatttggttttagaggaactcagcgtgtaattgttatgtgaacacttagataatctcgtagcgtatat

SEQ ID NO: 2175 - DNA, 1544 bp, Zea mays; identical to SEQ ID NO: 2168

SEQ ID NO: 2176 - DNA, 1161 bp, Sorghum bicolor; identical to SEQ ID NO: 2166

SEQ ID NO: 2177 - DNA, 1335 bp, Zea mays
ttggtgccgtcgactcgacgcgctccaccatggcgccgccgcgaagcctcgccggcgccgccatagctgccacagccgcagccatcatcctctcatgcttgttctacaggcgcaaatgcgctcgtctggccgcgcgggtccgcgagttggaggcgtcactggcggtcactgcagagaaggccgccgccgagcgccgcggcagagtgcgggcccagcagtcactgagggctctgagtcagctggagcctggttccgacgaagcgaggccgaccaaggccgccgcctcagcatcttacccgctggtgccgattggtactgtcgagtcctgcttctccactaggaacggtacaccaaggcagcctttggtagttacattagccagggcaactttggtgcttgatccagcccgagtcccagcagcagcgctggaggggctagctagttactcacattgctggatcctttatgtttttcatctgaacactgatcttgataaactgtggaaagatcctgctaggtctaagctaaaagcaaaggtaagggtaccgagattgaaagggggcaagatgggggttttggcaactagatcgccacatcggcccaatccaatcggactcagcgtagcaaaggtggaggcggtgaatggacatactcttttgctttctggagtagatttggttgatggcacggtaccaatttgagcatttccagtccttgatattaaaccatacctgccatattctgacagtgttaaaggtgcagctgttcccagttggttagaggttgacggtgcgttagcggtggagtcagtccatttttccgaacacttcatttctgcgctctccacctgctggatgcatgtacagcagatgtcgctgtatgcttcagcagacgagttccaggatctgatcaagcaggccctttcctgggacatcaggtcgatatcacagcggaaccgtccccatcaagtgagcgtggaagctgatgccaacggccactgtggcgaagacactgatgatgaccaccaccacagggacacaggtcgctacggtgtggtttaccacttacatcttgaaggcatcgatgtgtcgtataggatcgatcagggctccaacattttcgtcgaggacgccacccttcttccagacgccgtccagaaacggcatggttatttggcgtggagggacaaacttggcagcagcgttttgtagcatggccatggcgcagcgttttgttatcgttttcaggagtgctgcagtgtggtgtaggatgtcagtagtgatgccaatgaatttgaatgtggtggcgtctagtatctgaattggatttggaacg

SEQ ID NO: 2178-2182 - skipped (5 entries)

SEQ ID NO: 2183 - protein, 366 aa, Zea mays
MWRVFVKCTELQRTFYKTPLTQHRWMWRMWSGLILLMGAPTLLAHKIRSHSKKASSHGCDCEWTDRSNEAALEPVHEALDPGQDTALLFFNICLLLGLLGVAVDDVVEEAGTASMAVAVAESPPHDRLPEPPDHLFHLLILLVVAVLVVLISVAEPLPRRHILLLVLVVVVVEVEPVPLHAHALCRLWGGGSLLLLLLVLDVVETVAAHVVVEVEAEPPPQHLVLPRPDCRRALVVVPVGVGERRRLLACNSHLPLSVAVRERAIRVRLGHGHLLPRLPGHLCGCGQDGKVAHCLLAPRAVARTRELVRRVTVDPVVAFQPEVVVVVEPVRRQAEEFEPMLLLLRRDGLLFSGAGGARLSVDRGVG

SEQ ID NO: 2184 - protein, 722 aa, Sorghum bicolor
MPGMPTDGVGAIVPFTGEPGQGAPPVRPIRHGVPPPIFRIYVSWSSGNLLQVACLRPPNSEGGGGTEEVVGSVVEVNLGDGGSEAEEKIDEAEMRRIEYGSVPAFALLQSRKNTLADAATMSHLPSVPDHAEWWQYVLEYSKTIGNLLGNPDPPVFMIEDPKTILKVREKPTSLRAAWELLEIFYVDKHLQGWLPERLVDWLADFDSLLSTMASTVYSKLSNFQKKLINLQIVEDDPDYWNGLSAALSVGWLDIVVNMLRFHGSYQLDQMDNRETENGLVEAVAVLVSTMPRLRPNLPSGKLGQCCKTRPDFIKAWEKWRGQVTKLECSAFWIQCGHQKTRDGLKNLLHIMMGNINELTDATYHWLELFASHFLYIKPFTVGFEGMHHLAQKCIQLKPSSSTNGLTGLILGVLSENTEVVLAECTKNFGPWLVTHAMELLTADNDYADVMLHEERPNLGGISIEELHRLVYAQVLCSHSLTWQIAPTYLSSCLNQGLGLLEILLLKQPIQDNCLVLKTLEICRLYELENVSTIIMKIAGIYHWKHGRKGTGVYWFQQAHDKICLDRIAQQLFEHIGKSVTDDSFKQWEGLLELLGSDIGSAGGLEFLHRYRDFKRSLQQALDRRCGEAARQTVDFLIQLMKNPSTPQRFWLPLLHDSVELLNSKLCPLMNVAETTLLLNKLQELSMAKLRPDFSSNHLPSHAISSVRLALASNLARAILGDP

SEQ ID NO: 2185 - protein, 733 aa, Zea mays
MPGMPTDGGGAMVPFTGEPGQGAPPPAPVRPIRHGVAPPIFRIYVSWSSGNLLQVACLRPPNSDGGGGTEEVVGSVVEVNLGDGGSGGSEAEEKIDEAEMRRIEYGSVPAFALLQSRKNTLADVATMSHVPSVPDHAEWWQYVLEYSKTIGSLLGNPDPSGFMIEEPKTILKVREKPTSLRAAWELLEIFYVDKRLQGWLPERLVDWLADFDSLLSTMASTVYSKLSNFQKKLVNLQIVEDDPDYWNGLSAALSVGWLDIVVNMLRFHGSYQLDQMDSRETENGLVEAVAVLVSMMPRMRPNLPTGKLGQCCKTRPDFIKAWEKWRGQVTKLECSAFWIQCGHQKTRDGLKNLLHIMMGNIKEITAATSHWLELFASHFLYIKPFTVGFEGMHHLAQKCIQLMPSSGTNGLTGLIIGVMSENPEVVLAECTKNFGPWLVTHAMELLTADNDYADIMLHEERPNLGGISIEELHRLVYAQVLCCHPLTWQIAPTYLSSCLNQGLGLLEILLLKQPIQDNCLVLKTLEICRLYELENVSTIIMKIAGIYRWKHGRKGTGVYWFQQARDKVCLDRIAQQLFEHIGKSVTDDSFKQWEGLLELLGSDIGSAGGLEFLHRYRDFKRSLQQALDRRCGEAARQTVDFLIQLMKNPSTPQRFWLPLLHDSVELLNSKLSPLMDVAETTLLLNKLQELSMAKLRPDFSSNHLPSHAMSSVRLALASNLARAVLEDRSPSTL

SEQ ID NO: 2186 - protein, 731 aa, Hordeum vulgare subsp. vulgare
MPGMPADSGGAIVRFSGEPKHAASAPPVRPIRHGVPPPISRVYISWSSGNLLQVACLRPPNPEEGAGRGAEEVAGSVVEVNLGVGAGNGGAEVEGEVDDAEMRRIEYGSVPAFALLQSRKNALADAAAMQHMHSVSEHAEWWQYVLEYSKTIGNLLGNPDSLPAFMIEDPRAILKVREKPTSLKAAWELLEIFYVDKELHSWLPERLVDWLADYDSLLTKTDGTVYCKLNNFQKKLINLQIVENDDDYWNGLSAALSVGWLDVVVNMLRFHGSYQLDQMDNRETENGLVEAVAVLVSTMPRMRPDLPKGKLGQCCKTRPDFIKTWEKWRGQVSKLECSAFWIQCSHQKTRDGLKNLLHIMLGNIKDLTAATSHWLELFASHFLYIRPFTVGFEGMHHLAQKCIQLKPSFDTNGLTGLLNGILSENPEVVLAECTTKFGPWMVAHGMELLAADNDYADIMLHEERPNFGGISIEELHRLVYAQVLCSHSLTWQIAPTYLSSCLNQGLGLLEILLLKQPIQDNRLVLKTLELCRLYELEDVGTNIMKIAGIYHWKHGRKGTGVYWFQQAHDKVRLDRIAQQLFERIGKSVADDNFKQWEGLLELLGSDIGSAGGLEFLHRYRDFKRSLQQALEGRTGEAARQTVEFLIQLMRNPSTPQRFWLPLLHDSVKLLNCKPHPLLNVAETTLLLNKLQELSMAKLRPDFCSNHLPIHALSSVRLALGSNLARAILEEA

SEQ ID NO: 2187 - protein, 733 aa, Oryza sativa Japonica Group
MPGMLMDGGGAIVPFSGEPGHAVAAAPPVRNIRHGVAPPISRVYVSFSSGNLLQVACLRPPNPEGGGDRGAEEVSGGRVVEVNLGGGGSGPGGADAEEIDEAEMRRIEYGSVPAFALLQSRKNALVDGSGMSRLPSVSEHAEWWQYVLEYSKTIGSLLGNPDSLSAYMIDDPKMILKVKEKPTSLKAAWELLEIFFVDKQLQTWLPERLVDWLADYDSLLTKTENTIYRTLINFQKKLINLQVVEDDPDYWSGLSAALSVGWLDIVVNMLRFHGSYQLDQMDSRETENGLVEAVAVLVSTMPRMRPDLPSGKLGQCCKTRPDFIKALEKWRGQVSKLECSAFWIQCGHQKTRDGLKSLLHIMLGNIKNLTASTSHWLELFASHLLYIRPFTVGFEGMHQLAQKCIQLKPSADNSGLTGLLTGILSENREVVLAECTKNFGPWMVTHAMELLTADNDYADMMLHEERPNFGGISIEELHRLVYAQVLCSHALTWQIAPTYLSSCLNQGLGLLEILLLKQPIQDNRVVLKTLEICRLYELENVSTNIMKIAGIYHWKHGRKGTGVYWFQQANDKVRLDRIAQQLFEHIGKSVTDDSFKQWEGLLELLGSDIGSAGGLEFLHRYRDFKRSLQMAQEGRTGESVRQTVEFLIQLMRNPSTPQRFWLPLLHDSVRLLNCKPCPLLNVAETTLLLNKLQELSLAKLRPDFSNIHLPSHALNSVRLALASNLARAILEEP

SEQ ID NO: 2188 - protein, 701 aa, Oryza sativa Japonica Group
MPGMLMDGGGAIVPFSGEPGHAVACLRPPNPEGGGDRGAEEVSGGRVVEVNLGGGGSGPGGADAEEIDEAEMRRIEYGSVPAFALLQSRKNALVDGSGMSRLPSVSEHAEWWQYVLEYSKTIGSLLGNPDSLSAYMIDDPKMILKVKEKPTSLKAAWELLEIFFVDKQLQTWLPERLVDWLADYDSLLTKTENTIYRTLINFQKKLINLQVVEDDPDYWSGLSAALSVGWLDIVVNMLRFHGSYQLDQMDSRETENGLVEAVAVLVSTMPRMRPDLPSGKLGQCCKTRPDFIKALEKWRGQVSKLECSAFWIQCGHQKTRDGLKSLLHIMLGNIKNLTASTSHWLELFASHLLYIRPFTVGFEGMHQLAQKCIQLKPSADNSGLTGLLTGILSENREVVLAECTKNFGPWMVTHAMELLTADNDYADMMLHEERPNFGGISIEELHRLVYAQVLCSHALTWQIAPTYLSSCLNQGLGLLEILLLKQPIQDNRVVLKTLEICRLYELENVSTNIMKIAGIYHWKHGRKGTGVYWFQQANDKVRLDRIAQQLFEHIGKSVTDDSFKQWEGLLELLGSDIGSAGGLEFLHRYRDFKRSLQMAQEGRTGESVRQTVEFLIQLMRNPSTPQRFWLPLLHDSVRLLNCKPCPLLNVAETTLLLNKLQELSLAKLRPDFSNIHLPSHALNSVRLALASNLARAILEEP

SEQ ID NO: 2189 - protein, 602 aa, Oryza sativa Japonica Group
MCLLLILLCFVRWQYVLEYSKTIGSLLGNPDSLSAYMIDDPKMILKVKEKPTSLKAAWELLEIFFVDKQLQTWLPERLVDWLADYDSLLTKTENTIYRTLINFQKKLINLQVVEDDPDYWSGLSAALSVGWLDIVVNMLRFHGSYQLDQMDSRETENGLVEAVAVLVSTMPRMRPDLPSGKLGQCCKTRPDFIKALEKWRGQVSKLECSAFWIQCGHQKTRDGLKSLLHIMLGNIKNLTASTSHWLELFASHLLYIRPFTVGFEGMHQLAQKCIQLKPSADNSGLTGLLTGILSENREVVLAECTKNFGPWMVTHAMELLTADNDYADMMLHEERPNFGGISIEELHRLVYAQVLCSHALTWQIAPTYLSSCLNQGLGLLEILLLKQPIQDNRVVLKTLEICRLYELENVSTNIMKIAGIYHWKHGRKGTGVYWFQQANDKVRLDRIAQQLFEHIGKSVTDDSFKQWEGLLELLGSDIGSAGGLEFLHRYRDFKRSLQMAQEGRTGESVRQTVEFLIQLMRNPSTPQRFWLPLLHDSVRLLNCKPCPLLNVAETTLLLNKLQELSLAKLRPDFSNIHLPSHALNSVRLALASNLARAILEEP

SEQ ID NO: 2190 - protein, 649 aa, Oryza sativa Indica Group
MPGMLMDGGGAIVPFSGEPGHAVAAAPPVRNIRHGVAPPISRVYVSFSSGNLLQVACLRPPNPEGGGDRGAEEVSGGRVVEVNLGGGGSGPGGADAEEIDEAEMRRIEYGSVPAFALLQSRKNALVDGSGMSRLPSVSEHAEWWQYVLEYSKTIGSLLGNPDSLSAYMIDDPKMILKVKEKPTSLKAAWELLEIFFVDKQLQTWLPERLVDCLLTKTENTIYRTLINFQKKLINLQVVEDDPDYWSGLSAALSVGWLDIVTENGLVEAVAVLVSTMPRMRPDLPSGKLGQCCKTRPDFIKALEKWRGQGFEGMHQLAQKCIQLKPSADNSRLTGLLTGILSENTEVVLAECTKNFGPWMVTHAMELLTADNDYADMMLHEERPNFGGISIEELHRLVYAQVLCSHALTWQIAPTYLSSCLNQGLGLLEILLLKQPIQDNRVVLKTLEICRLYELENVSTNIMKIAGIYHWKHGRKGTGVYWFQQANDKVRLDRIAQQLFEHIGKSVTDDSFKQWEGLLELLGSDIGSAGGLEFLHRYRDFKRSLQMAQEGRTGESVRQTVEFLIQLMRNPSTPQRFWLPLLHDSVRLLNCKPCPLLNVAETTLLLNKLQELSLAKLRPDFSNIHLPSHALNSVRLALASNLARAILEEP

SEQ ID NO: 2191 - protein, 630 aa, Zea mays
MKFDLSMEMDDSHGTMVNKSEENDFEKKGTSDPVVYQLVRVEGDGTLVPATEDDVLQFEHFLHNEKVDLPPIEDADHVEEFFNNDCMLLKKPDLEDGSSKLETVEAHTQKLGANLEENILQSLDDSLSPPSDFRIHSQHSDKLLTEQGANVTRQDNASTETTKSTVLNDSCCAEKYKADACSRSVCDTSTDPSVSGVNSSMPDFSILRGEVCLDDLTIRELQEAFRATFGRQTNVKDKIWLKRRITMGLTNSYDVPSSGCVVKDYKIVGKDAKNDMSDMDERAKTGLRATSVVIYPGNEGDSPSSSYYQSEDQEDSSKRVPIHNDEPQGNLLGEQCTDKRTRKPTKRYIEELSDIETHDSTVKNSSPAKRPAHDELLMNPRVAPFNETGSLGTIYPTRKDTFGGFSVHVPYVSRMRRGRPRKDFISFAVTIYDKGPSVEPKGIQPSVEMILVKDGDKGNHLRKVPEVPLKVSSENEHAEAVDSKGVRNLQAKVCSAVSKPKIKHGLTRKHHRAWTLSEVVKLVDGVARYGAGKWSEIRKLSFASYSYRTSVDLKDKWRNLIRATQTQLPAQKDGACPRKTNPSIIPIPPSILLRVKELHELQSQGGGFTAPVKFSGQDGKVLQGKGSGFL

SEQ ID NO: 2192 - protein, 387 aa, Sorghum bicolor
MARLLLLLGAAMVLLASAATAQDCLSATFSGGRTFGKCNSMPTLSASLHWTYHPENGTADVAFRAPSDTSGWVGWGINPTSGNSMVGSSVFIASQDSSGVVSVLMTYLETTSQPALTNNTFKFNVPIGPAAEYSDGAYTIYATVELPGNSTQQYTVWQAGPTSNGAIAQHPLSPSNRASTQSLDFLSGSSTAASNSKLHRRNIHGLLNAIAWGILIPIGAIIARYLRVFESADPAWFYLHIVCQCSGYILGVAGWGLGLKLGSESAGITYKPHRNLGIAIFSLATLQVFALLLRPDKKNKYRLYWNIYHHSVGYSVIVLSAINIFKGLDILQPASGYKTAYIVILATLGGIALCLEAITWPIAIRKRRRNAADKAAVGNGNGWQQGA

SEQ ID NO: 2193 - protein, 387 aa, Zea mays
MSRLLLLGAAVLLLASAATAQDCLSATFSGGRTFGRCNNLPSLIASLHWTYHPENGTADVAFRAPSDASGWVAWGINPDRGGSMGGSSVFVASPSQDGSGAVSILMTHLESTSPSLTNNTLKFKVPVGPAAEYSNGAYTIFAMVELPGNSTQQFTVWQAGATSNGAISPHPTAPANLASTQRLDFLSGSSTAASNSRLHRRNIHGMLNAIAWGVLIPVGAIIARYLRVFESADPAWFYLHIACQCSGYILGVAGWGLGLKLGSESAGVTYQPHRSIGIAIFCLATLQVFALLLRPDKKNRYRLYWNIYHHSVGYSVIVLGAVNIFKGLDILKPASGYKTAYIVVLATLGGVALCLEAITWPIAIRKRRRNAADKASNGNGNGWQQGA

SEQ ID NO: 2194 - protein, 385 aa, Zea mays
MSRLLLLGAAVLLLASAATAQDCLSATFSGGRTFGRCNNLPSLSASLHWTYHPENGTADVAFRAPSDASGWVAWGINPDRGGSMGGSSVFVASPSQDGSGAVSILMTHLESTSPSLTNNTLKFKVPVGPAAEYSNGAYTIFATVELPGNSTQQFTVWQAGATSNGAISPHPTAPANLASTQRLDFLSGSSTAASNSRLHRRNIHGMLNAIAWGVLIPVGAIIARYLRVFESADPAWFYLHIACQCSGYILGVAGWGLGLKLGSESAGVTYQPHRSIGIAIFCLATLQVFALLLRPDKKNRYRLYWNIYHHSVGYSVIVLGAVNIFKGLDILKPDSGYKTAYIVVLATLGGVALCLEAITWPIAIRKRRRNAADKASNGNGWQQGA

SEQ ID NO: 2195 - protein, 385 aa, Zea mays
MARLLLLLGASVLLLASAVTAQDCLSATFSGGRTFGKCNSLPSLSASLHWTYHPENGTADVAFRAPSDPSGWVAWGINPDSGGSMAGSSVFVASQDGSGAVSILMTNLESTSPSLTNTTALKFKVPAGPAAEYSDRAYTIYATVELPRNSTQQFTVWQAGPATSNGGISPHPTAPANLASTQRLDFLSGSSTAASNSKLHRRNIHGMLNAIAWGVLIPTGAIIARYLRVFESADPAWFYLHIACQCSGYVLGVAGWGLGLKLGSESAGVTYQPHRSIGIAIFCLATLQVLALLLRPDKKNKYRLYWNIYHHSVGYAVIVLSAVNIFKGLHILEPASGYKTAYIVILATLAGIALCLEAITWPIAIRKRRRNADKASGGNGWQQGA

SEQ ID NO: 2196 - protein, 386 aa, Zea mays
MARLLLLLLGASVLLLASAVTAQDCLSATFSGGRTFGKCNSLPSLSASLHWTYHPENGTADVAFRAPSDPSGWVAWGINPDSGGSMEGSSVFVASQDGSGAVSILMTNLESTSPSLTNTTALKFKVPAGPAAEYSDRAYTIYATVELPRNSTQQFTVWQAGPATSNGGISPHPTAPANLASTQRLDFLSGSSTAAPNSKLHRRNIHGMLNAIAWGVLIPTGAIIARYLRVFESADPAWFYLHIACQCSGYVLGVAGWGLGLKLGSESAGVTYQPHRSIGIAIFCLATLQVLALLLRPDKKNKYRLYWNIYHHSVGYAVIVLSAVNIFKGLHILEPASGYKTAYIVILATLAGIALCLEAITWPIAIRKRRRNADKASGGNGWQQGA

SEQ ID NO: 2197 - protein, 474 aa, Sorghum bicolor
MANASKHLQPSSNAGNDRKYQGTLVASPAKAIAPKCVNRIMPSKQLILGGDSIGHVASFLIKVVALEAVRRVSKARCPFIWNSVQALQILVYPPFSWIQRWAPLKFLVQGIQKLSMPLLFLSVTTTVSELSSKRDDEPDNNTEHSETPSETNEVASTSGTSDAADGTKEIVQENWLVLLFRELEKQGITLPERFTEDELRRFYVAANGDFSSLLSSVKKTIRWRETFHILTLQELDKWSHLVFWHGFDTMLRPCLVIRLGLACSSIPPRDRPRFGQAVVSQIDHGVVNLTNEEDSRITVLLDCHGISPFRFPMQMMRSFITVVQENYPNRLGVLFVIRLPPVVRVIAQTFLQVLKPSTKQKLRFEGDSYKKTLAEFLQVVPAFLGGKCSCPQCEKPRNSSVIQAGEGSKSQPRLVSVDDGSPVTDFDFDEEEIPSAYSCENAIRAAIIGLLMMCIFVAFLAGMNDPTSVSPSAQ

SEQ ID NO: 2198 - protein, 474 aa, Zea mays
MANASKHLQPSSQAGNDKKYQGTLVASPAKAISPKCVNRIVPSKQLILGGGSIGHVASFLIKVVALEAVRRVSKTRCPFIWNSVQALQILVYPPFSWIQRWAPLGFLVQGIQKLSMPLLFLSVTTTVSELSSKHDDEPDNNTEHSETPSETNELASTSGTSDAADGTKEIVQENWLVLLFRELEKQGITLPERFTEDELRRFYVAANGDFQSLLSSVKKTIHWRETFHILTLQELDRWSHLVFWHGFDTMLRPCLVVRLGLACSSIPPHDRPRFGQAVVSQIDHGVVNLINEEDSRITVLLDCHGISPFRFPMQMMRSFITVVQENYPNRLGVLFVIRLPPVVRVIAQTFLQVLKPATKQKLRFEGDSYKKALAEFLQAVPAFLGGKCSCPRCESPRDDSVIQAGEGSKKQPRLVSVDDGLPVTDLDFDLDEEIPSPYSCENAIRAAIIGLLMVCIFVAFLAGMIDPASVPASA

SEQ ID NO: 2199 - protein, 473 aa, Zea mays
MANASKHLQPSSKSGNDRKYQGTLVASPAKDISPKCANHIVPSKQLILGGDSIGHLASILIKVVALEAVRRVSKARYPFIWNSVQALQILVYPPFSWIQRWAPLKFLVQGIQKLSMPLLFLSVTTTVSELSSKRDDEPDNNTEHSETPSETNELTSTSGTSDAADGTKEIVQENWLVLLFRELEKQGITLPERFTEDELRRFYIAANGDFSSLLSSVKKTIRWRETFHILTLQELDKWSHLVFWHGFDTMLRPCLVIRLGLACSSIPPCDRPHFGQAVVSQIDHGVVNLTNGEDSRITVLLDCHGISPFRFPMQMMRSFVTVAQENYPNRLGLLFVVRLRPVVRVIAQTFLQVLKPSTKQKLRFEGDSYRKTLAEFLQAVPAFLGGKCSCPRCEKPRNSSVVQAGEGSKNQPRLVSVDTGSPVVDFDFDEEEIPSPYSCENAIRAAIIGLLMVCIFIAFLAGMNDPASVPPSA

SEQ ID NO: 2200 - protein, 469 aa, Zea mays
MANASKHLQPSSKSGNDRKYQGTLVASPAKDISPKCANRIVPSKQLILGGDSIGHLASILIKVVALEAVRRVSKARYPFIWNSVQALQILVYPPFSWIQRWAPLKFLVQGIQKLSMPLLFLSVTTTVSELSSKRDDEPDNNTEHSETNELASTSGTSDAADGTKEIVQENWLVLLFRELEKQGITLPERFTEDELRRFYVAANGDFSSLLSSVKKTIRWRETFHILTLQELDKWSHLVFWHGFDTMLRPCLVIRLGLACSSIPPCDRPRFGQAVVSQIDHGVVNLTNKEDSRITVLLDCHGISPFRFPMQMMRSFVTVAQENYPNRLGVLFVVRLPPVVRVIAQTFLQVLKPSTKQKLRFEGDSYKKTLAEFLQAVPAFLGGKCSCPRCEKPRNSSVVQAGEGSKNQARLVSVDGGSPVVDFDFDEEEIPSPYSCENAIRAAIICLLMVCIFIAFLAGMNDPASVPPSA

SEQ ID NO: 2201 - protein, 474 aa, Oryza sativa Japonica Group
MASSSKNFQSSSKPGSDRKYQGALVASPAKAISPKTVKQIVPGKHLILSGESTSHLASFLVKVIALEVVRRFSKARCPFIWNSIQALQVLGYPPFRWIQQWAPLKFIVQGIQKLSTPLLFLSVTTTLCDRSSKRNDELGSNTEAPDVPSESDETASTSGIRDVADGTKDTEPDNWLISLFKELEKQGITLPERFNEDELRRFYIAANGDFSSLLSSVKKTIRWRETFHILTLHELEKWSHLVFWHGFDTMLRPCLIVRLGLACSSLAPSDRPRFGQAVVSQIDNGIVYLTNKEDPRITVLLDCHGISPFRFPMQMMRSFITIVQENYPNRLGVLFIVRLPPVVRVIAQTLIQVLKPSTKQKLRFEGESYKKTLAEFLQIVPTFLGGKCSCPQCEKPRNISVIQAGEGSKSQPRQITIDDGSPVASMNFDEAELPSPYSCENAIRAAIIGVLMLWVFIAFLAGMNDPESISSHAP

SEQ ID NO: 2202 - protein, 477 aa, Hordeum vulgare subsp. vulgare
MANFTKNFQSSSKSDSEKKYQGTLVASPAKAISPKTIKHIVPKQLILSRESTAHVASFLVKVIALEVVRRISKAKCPFVWNSIQALQVLGYPPFRWIQRWAPLKFVVQGIQKLSTPLLFLSVTSTLGDLSSKSDEADDGPSIPTGAPDLPAEPHETASTSDTREAADGDGTKDIIVSENWLVLLFKELEKQGITLPERFSEDELRRFHMAANGDFSSLVSSIKKTIHWRETFHILTLQELEKWSHLVFWHGFDTTLRPCLVIRLGLACSTIAPRDRPRFGQAVVSQIDHGIIHLTNEEDPRITVLLDCHGISPFRFPMQMMRSFVNLVQENYPNRLGVLIVVRLPPVVRVIAHTFIQLLKPSTKQKLRFEGESYKKTLAEFLQIVPAFLGGKCNCSRCKKPRDSSLIQAGEGSRSRSLISAGSRSPVSDLDFDEELEELPSPYNCENAIRAAVIGLLMVWIFVAFLAGMNDPQQPIS

SEQ ID NO: 2203 - protein, 631 aa, Sorghum bicolor; identical to SEQ ID NO: 1029

SEQ ID NO: 2204 - protein, 631 aa, Zea mays
MTVDELKLQARASGGHGAKDQFPVGMRVLAVDDDPTCLKILENLLLRCQYHVTTTGQAATALKLLREKKDQFDLVISDVHMPDMDGFKLLELVGLEMDLPVIMLSANGETQTVMKGITHGACDYLLKPVRIEQLRTIWQHVVRRRSCDAKNSGNDNDDSGKKLQVVSVEGDNGGVNRNKRISRKGRDDNGDDGDDSDDNSNENGDSSSQKKPRVVWSVELHRKFVAAVNQLGIDKAVPKKILDLMNVENITRENVASHLQKYRLYLKRLSADASRQANLTAAFGGRNPAYVNMGLDAFRQYNAYGRYRPVPTTNHSQPNNLLARMNSPAFGMHGLLPSQPLQIGHNQNNLNTSLGNVGGMNNGNLIRGAHMPLQDTSKCFPTGPSGNSFANISNSTQLVTTNNLPLQSLEPSNQQHLGRLHSSADPFNSFVGEPPQFADLGRCNTTWPTAVSSSNVQEIGQKDRIVNRPKLEPLSSFTEASSQIPLLGNEMQSHQVASLASNGLPMPFTQEAVPFAYGSSTNSREMLNNNLALSNSGVNSTLPNLRIDGSVVPGQTLGGSNSGGCVVPPLQDGRIDHQAVSSHLNYSNELMGTSRLQRGLSGGLDDIVVDMFRPDRADDGVPFIDGDWELV

SEQ ID NO: 2205 - protein, 631 aa, Zea mays
  misc_feature (489)..(489): Xaa can be any naturally occurring amino acid
MTVDELKLQARASGGHGAKDQFPVGMRVLAVDDDPTCLKILENLLLRCQYHVTTTGQAATALKLLREKKDQFDLVISDVHMPDMDGFKLLELVGLEMDLPVIMLSANGETQTVMKGITHGACDYLLKPVRIEQLRTIWQHVVRRRSCDAKNSGNDNDDSGKKLQVVSAEGDNGGVNRNKRISRKGRDDNGDDGDDSDDNSNENGDSSSQKKPRVVWSVELHRKFVAAVNQLGIDKAVPKKILDLMNVENITRENVASHLQKYRLYLKRLSADASRQANLTAAFGGRNPAYVNMGLDAFRQYNAYGRYRPVPTTNHSQPNNLLARMNSPAFGMHGLLPSQPLQIGHNQNNLSTSLGNVGGMNNGNLIRGAHMPLQDTSKCFPTGPSGNSFANISNSTQLVTTNNLPLQSLEPSNQQHLGRLHSSADPFNSFVGEPPQFADLGRCNTTWPTAVSSSNVQEIGQKDRIVNRPKLEPLSSFTEASSQIPLLGXEMQSHQVASLASNGLPMPFTQEAVPFAYGSSTNSREMLNNNLALSNSGVNSTLPNLRIDGSVVPGQTLGGSNSGGCVVPPLQDGRIDHQAVSSHLNYNNELMGTGRLQRGLSGGLDDIVVDMFRPDRADDGVSFIDGDWELV

SEQ ID NO: 2206 - protein, 626 aa, Oryza sativa Japonica Group
MTVEERQGRVGGHGVSGGGGGRDQFPVGMRVLAVDDDPTCLKILENLLLRCQYHVTTTGQAATALKLLRENKDQFDLVISDVHMPDMDGFKLLELVGLEMDLPVIMLSANGETQTVMKGITHGACDYLLKPVRLEQLRTIWQHVIRRKNCDAKNRGNDDDAGQKAQGMNNEGESIGANRNKRQSRKSRDENGDDGDDSDENSNENGDSSTQKKPRVVWSVELHRKFVAAVNQLGIEKAVPKKILDLMNVENITRENVASHLQKYRLYLKRLSTDASRQANLAAAFGGRNPAYINMNSFGNYNAYGRYRTVPTAGHTQANNILTRMNSPSAFGVHGLLHSQPIQLGHAQNNLSTSLNDLGGLNNGNMIRGAQMSTILTGPSGNSFPNISNGAPLATANRSLQPLESSNQQHLSRVHSSSADPFSTLVGESPQFPDLGRTTNTWQTAVPSNIQDRGHNDNMSQATLHMNGPKIEPVSSFTSSNQIPLLGNEMQGQVASLASNVPIAFNQDTSPFNYGSSTNSRDMLNNSHVFSNSSINTSLPNLSLDNPAVPRQTLDRGNTGIVSPMQDGRIHHQAVSNQLNYNDDLMRTTGLQRGLSGGLDDIVVDMFRPDREDDGVPYIDGDWELV

SEQ ID NO: 2207 - protein, 626 aa, Oryza sativa Indica Group
MTVEERQGRVGGHGVSGGGGGRDQFPVGMRVLAVDDDPTCLKILENLLLRCQYHVTTTGQAATALKLLRENKDQFDLVISDVHMPDMDGFKLLELVGLEMDLPVIMLSANGETQTVMKGITHGACDYLLKPVRLEQLRTIWQHVIRRKNCDAKNRGNDDDAGQKAQGMNNEGESIGANRNKRQSRKSRDENGDDGDDSDENSNENGDSSTQKKPRVVWSVELHRKFVAAVNQLGIEKAVPKKILDLMNVENITRENVASHLQKYRLYLKRLSTDASRQANLAAAFGGRNPAYINMNSFGNYNAYGRYRTVPTAGHTQANNILTRMNSPSAFGVHGLLHSQPIQLGHAQNNLSTSLNDLGGLNNGNMIRGAQMSTILTGPSGNSFPNISNGAPLATANRSLQPLESSSQQHLSRVHSSSADPFSTLVGESPQFPDLGRTTNTWQTAVPSNIQDRGHNDNMSQATLHMNGPKIEPVSSFTSSNQIPLLGNEMQGQVASLASNVPIAFNQDTSPFNYGSSTNSRDMLNNSHVFSNSSINTSLPNLSLDNPAVPKQTLDRGNTGIVSPMQDGRIHHQAVSNQLNYNDDLMRTTGLQRGLSGGLDDIVVDMFRPDREDDGVPYIDGDWELV

SEQ ID NO: 2208 - protein, 623 aa, Hordeum vulgare subsp. vulgare
MTVEGRVGGGDGGGKDKFPVGMRVLAVDDDPTCLKVLENLLRRCDYHVTTTGQAATALRMLRENKDQFDLVISDVHMPDMDGFKLLELVGLEMDLPVIMLSANGETQTVMKGITHGACDYLLKPVRLEQLKTIWQHVIRRNTKNRGSDNDDASQKGPNAEGENGGANRNKRQSRRDRDENGDDGDDSDENSNDNGDSSSQKKPRVVWSVELHRKFVAAVNQLGIDKAVPKKILDLMNVENITRENVASHLQKYRLYLKRMSMDASRQANLVAALGGRNPAYSNMNSMDVFRHYNNAYGRYRPVPTSTHSQSNNLVARMNSPSAYGMHGLLSPQSQPLHLGHAQNNNLGTSLNDLGVNNGNLIRTAHMSTMVTGTSGNTFANISNGAQLAPTNRAVQPLESSNRQHLGRINSSSTDSFSSFTSDSPHFPDLGRSSNTWQTAVPSNIQQLGQNGSMSQASFHGNGPRMEPVSSYAPPSNQITSLGNEMQNQVAPLASNTLPMVFNQGAAPFTFGNSTNSREAHNSNLAFSNSGINTSLPNLRIDNSIMPRQTLDGGNTGGVPSLQDGKIDQQAVGNQLNYSNNDLVGTSGLQRELSGGLDDIVVDMFRPDNDTGGIFIDTDWGLV

SEQ ID NO: 2209 - protein, 514 aa, Sorghum bicolor
MEADIASRYEIPRTAQFLRDCAYNRVALQFPDEMLKDAAAVARALRRELASGGAGGGVRVFVMADTAYNSCCVDEVGASHIDAQCVVHYGHACMSPTSNLPAYFVFGKAQLDIHACASTLLECSRTSNKRILVLYGLEYAYALDDLRQAFMESCKSNSCNPEVQYAEVLCSVMSPSSSTTEENTIPQSSGTSCNRDITRNSDVATFLDNHYGMKCSSSTQKYSLGGITWDISVDEKMEDYLIFWIGQDNSAFANIVLTFNKCEIVRYDAIENQLTADISHLMKILRRRYYLVEKAKDANIIGILVGTLGAAGYLHIIEQMKELIKAAGKKSYTLVMGRPNSAKLANFPECEVFIYVSCAQTALLDSKDFLAPVITPFEAVLAFSRGREWTGEYLLDFKDLITLEKQEVVSTTEEARFSFIKGVYVEDNCPQENEEQSETSLALAEVTEKALSIQNQHNDAVLYKGGAMSSIDYLKARSYRGLTGEYEGPVPNSILVGRTGRAAGYSDEKTENAQ

SEQ ID NO: 2210 - protein, 514 aa, Zea mays
MEADIAFRYEIPRTAQFLRDGAYTRVALQFPDEMLKDAAAVARALRRELASGGADSGVRVFVMADTAYNSCCVDEVGASHIDAQCVVHYGHACMSPTSNLPAFFVFGKAPLDVHACAGTLLECSRKSNKRILVLYGLEYAYALDDLRQTFMESCKSNSGNHEVQYAEVLCSVMSPSSSTTEENKIPQSSGPSCNGDISRNSESATFLNNRNGMECSSSTQKYSLAGMTWNISVEEKMEDYFIFWIGQDSSAFANIVLTFNKCEIVRYDAIENQLTADVSHLMKILRRRYYLVEKAKDANIIGILVGTLGVAGYLHIIEQMKDLIKAAGKKSYTLVMGRPNSAKLANFPECEVFIYVSCAQTALLDSKDFLAPVITPFEAVLAFGRGREWTGEYLLDFKDLITSEKQEAASTTGEARFSFIKGVYVEDNCPQENEEQSETSLALAEVTEKALSIQNQHNDAVLYQGRAMSSIDYLKARSYRGLTGEYEGPVPDSVLVGRMGRAAGYSDEKTESAQ

SEQ ID NO: 2211 - protein, 506 aa, Oryza sativa Japonica Group
MGDDIDARYEVPRTAEFIRARAYTRVALQFPDEMLRDAAAVAQALRRELGGGGVKLFVMADTAYNSCCVDEVGASHIDAQCVVHYGHACMSPTSNLPAFFVFGKTPLDTDACGRSLLECSRESDKRILVFYGLEYAHALDDLKAVVAELYKSHSRSVEVQYADVLCSVMSPSSAAEVEHGQSDGSTHSDDLSIQSDVATFVNNCCNVEGSTRKYSLGGLTWSTSIDDNMEDYLLYWIGQDNSAFANIVLTFNKCDIVRYDTVANQPSRDVSHLMKILRRRYYLVEKAKDANIVGILVGTLGVAGYLHIIEQMKDLIKAAGKKSYTLVMGRPNSAKLANFPECEVFVYVSCAQTALLDSKDFLAPVITPFEAVLAFSRGREWTGEYLLDFKDLITTDKPEISSTTEEARFSFIKGGYVEDNCLEDNEEQPETSLALAEVTEKALSIKNQNNDAVLYQGGAKSAIDYLKARSYRGLTGEYEGPAPDSVLTGRTGRAAGYNNEKKEITQ

SEQ ID NO: 2212 - protein, 658 aa, Oryza sativa Japonica Group
MGDDIDARYEVPRTAEFIRARAYTRVALQFPDEMLRDAAAVAQALRRELGGGGVKLFVMADTAYNSCCVDEVGASHIDAQCVVHYGHACMSPTSNLPAFFVFGKTPLDTDACGRSLLECSRESDKRILVFYGLEYAHALDDLKAVVAELYKSHSRSVEVQYADVLCSVMSPSSAAEVEHGQSDGSTHSDDLSIQSDVATFVNNCCNVEGSTRKYSLGGLTWSTSIDDNMEDYLLYWIGQDNSAFANIVLTFNKCDIVRYDTVANQPSRDVSHLMKILRRRYYLVEKAKDANIVGILVGTLGVAGYLHIIEQMKDLIKAAGKKSYTLVMGRPNSAKLANFPECEVFVYVSCAQTALLDSKDFLAPVITPFEAVLAFSRGREWTGEYLLDFKDLITTDKPEISSTTEEARFSFIKGGYVEDNCLEDNEEQPETSLALAEVTEKALSIKNQNNDAVLYQGGAKSAIDYLKARSYRGLTGEYEGPAPDSVLTGRTGRAAVFHICKSAIWFLCTKVAVNTGRNSQQDHIVLQSRLDAPYADSKLMTAGKKNMITPLIGNEMVIRINQQEHTCHKERRDSPLNSSSFNISEGCIILSMPEKDEFIPVKVHMIFSSLGTSPIVELDLSDFKAVHNKIAEFWELIFVEGKMAFIKRLIQELQAADI

SEQ ID NO: 2213 - protein, 507 aa, Hordeum vulgare subsp. vulgare
MDDVSSRYEIPRTAEFLRGHAYTRVALQFPDELLKDAAAVARALRTELGGGTKLFVMADTAYNSCCVDEVGASNIDAQCVVHYGHSCMSPTSNLPAFFVLGKAPLDISSCCRSLLYCSRESNKPVLALCGLEYAHALEDLKRATVELCKSDCQNSKIHYAEVLCSEMSPSSSPAAEEQCSQSNGSTRNDGFPAHNDDLATLVNSCCNVEGSTRKYNLGGLTWRISTDEKMDDYLLYWIGQDNSAFANVALTFNKCDIVRYDTIANQFSRDVSHLMKILRRRYYLVEKAKDASIVGILVGTLGVAGYLDIIEQMKNLIKAAGKKSYTLVMGRPNSAKLANFPECEVFVYVSCAQTALLDSKEFLAPVITPFEAVLAFSRGREWTGEYLLDFKELISSEKPEVASRSEEARFSFIKGGYVEDDCPEENEEHSETSLALAELTEKALSTRNQNSDAVLYQGGAKSAIEYLQARSYRGMTGEYEGPAPDSVLVGRTGRAAGYSDEKTKSPQ

SEQ ID NO: 2214 - protein, 409 aa, Oryza sativa Japonica Group
MATAASASASASPAAAFGAKTRRPGPSPSPSPSPASAFARPSPRASAAGRLHASLHLGGASATGSSIVSNASGIHLAAPVLAPLAVPKMTGAVGAHKNVLLFHCEEMRELAEQVVARNDDIELRSISWRTFADGFPNLFISNAHTIRGQHVAFLASFSSPSVIFEQLSIIYALPKLFISSFTLILPFFPTGTSERMEDEGDVATAFTLARILSNIPISRGGPSSLVIFDIHALQERFYFGDSVLPCFESGIPLLKSRLQELPDSDNITIAFPDDGAWKRFYKQLQHFPMVVCNKVREGEQRIVRIKEGDPRGRHVVIVDDLVQSGGTLIECQKVLAEHGAAKVSAYVTHGIFPNKSWEKFQPDNGEGPGHGLSHFWITDSCPLTVNAVKDRQPFEILSLAGPIASALQI

SEQ ID NO: 2215 - protein, 407 aa, Oryza sativa Indica Group
MATAASASASASPAAAFGAKTRRPGPSPSPSPASAFARPSPRASAAGRLHASLHLGGASATGSSIVSNASGIHLAAPVLAPLAVPKMTGAVGAHKNVLLFHCEEMRELAEQVVARNDDIELRSISWRTFADGFPNLFISNAHTIRGRHVAFLASFSSPSVIFEQLSIIYALPKLFISSFTLILPFFPTGTSERMEDEGDVATAFTLARILSNIPISRGGPSSLVIFDIHALQERFYFGDSVLPCFESGIPLLKSRLQELPDSDNITIAFPDDGAWKRFYKQLQHFPMVVCNKVREGEQRIVRIKEGDPRGRHVVIVDDLVQSGGTLIECQKVLAEHGAAKVSAYVTHGIFPNKSWEKFQPDNGESPGHGLSHFWITDSCPLTVNAVKDRQPFEILSLAGPIASALQI

SEQ ID NO: 2216 - protein, 407 aa, Sorghum bicolor
MATAASAFPGAFGVKTPAPARGLSAHPALTPSPAFARPLPRTPACGRSRASLHLGGVGAASSSAAAAGNGTGLHVPPTTAPLAVPKMAGSMKTHKNVLLFYCEEMRDLARQVVARNDDIELRSISWRKFPDGYPNLFISNAHNIRGQHVAFLASFSSPSVIFEQLSVIYNLPKLFISSFTLILPFFPTGTSERMEDEGDVATAFTLARFLSNIPISRGGPSSLVIFDIHALQERFYFGDSVLPCFESGIPLLKSRLQELPDSHNITIAFPDDGAWKRFYKQLQHFPMVVCNKVREGEQRIVRIKEGDPRGRHVVIVDDLVQSGGTLIECQKVLAAHGAAKVSAYVTHGIFPNNSWEKFQHDNGEGPEHGLSHFWLTDSCPLTVNAVKGRRPFEILSLAGPIASALQI

SEQ ID NO: 2217 - protein, 321 aa, Oryza sativa Japonica Group
MTGAVGAHKNVLLFHCEEMRELAEQVVARNDDIELRSISWRTFADGFPNLFISNAHTIRGQHVAFLASFSSPSVIFEQLSIIYALPKLFISSFTLILPFFPTGTSERMEDEGDVATAFTLARILSNIPISRGGPSSLVIFDIHALQERFYFGDSVLPCFESGIPLLKSRLQELPDSDNITIAFPDDGAWKRFYKQLQHFPMVVCNKVREGEQRIVRIKEGDPRGRHVVIVDDLVQSGGTLIECQKVLAEHGAAKVSAYVTHGIFPNKSWEKFQPDNGEGPGHGLSHFWITDSCPLTVNAVKDRQPFEILSLAGPIASALQI

SEQ ID NO: 2218 - protein, 399 aa, Hordeum vulgare subsp. vulgare
MATAASASASPAALRAKTPAPTAHPGPKPSLAFPWPSPGASASASGRLHASLHLGGVRSNGTGLHVLHPDVTPLAVPKMAGGAGAQKSILLYHCEEMGDLARQVAARNDDIELCTISWRKFPDGFPDLFIPNAQNIRGRHVAFLASFSSPGVIFEQISIIYNLPKLFIASFTLILPFFPTGTSERMEDEGDVATAFTLARSLSHIPISRGGPTSLVIFDIHALQERFYFGDSILPCFESGIPLLKSRLQELPDSDNIAIAFPDDGAWKRFYKQLQHFPMIICNKVREGDQRIVRIKEGDARGRHVVIVDDLVQSGGTLIECQKVLAAHGAAKVSAYVTHGIFPNKSWEKFKPDNGEGPEHALSHFWITDSCPLTVEAVKDRRPFEILSLADSIASALQI

SEQ ID NO: 2219 - protein, 321 aa, Zea mays
MAGSMKTHKNVLLFYCEEMRDLAQQVVARNDDIELRSISWRTFPDGYPNLFISNAHNIRGQHVAFLASFSSPSVIFEQLSVIYNLPKLFISSFTLILPFFPTGTSERMEDEGDVATAFTLARFLSNIPISRGGPSSLVIFDIHALQERFYFGDSVLPCFESGIPLLKSKLQELPDSHNITIAFPDDGAWKRFYKQLQHFPMVICNKVREGEQRIVRIKEGDPRGRHVVIVDDLVQSGSTLIECQKVLAAHGAAKVSAYVTHGIFPNSSWEKFQHDNGEGPEHGLSHFWLTDSCPLTVKAVKGRRPFEILSLAGPIASALQI

SEQ ID NO: 2220 - protein, 157 aa, Sorghum bicolor
MQASRARLFKEYKEVQREKSADPDIQLICDDSNIFKWTALIKGPSETPYEGGVFQLAFAIPEQYPLLPPQVRFLTKIFHPNVHFKTGEICLDILKNAWSPAWTLQSVCRAIIALMAHPEPDSPLNCDSGNLLRSGDIRGFQSMAKMYTKLAAMPKKS

SEQ ID NO: 2221 - protein, 157 aa, Zea mays
MQASRARLFKEYKEVQREKSADPDIQLICDDSNIFKWTALIKGPSETPYEGGVFQLAFAIPEQYPLLPPQVRFLTKIFHPNVHFKTGEICLDILKNAWSPAWTLQSVCRAIIALMAHPEPDSPLNCDSGNLLRSGDIRGYQSMARMYTRLAAMPKKG

SEQ ID NO: 2222 - protein, 157 aa, Zea mays
MQASRARLFKEYKEVQREKSADPDIQLICDDSNIFKWTALIKGPSETPYEGGVFQLAFAIPEQYPLLPPQVRFLTKIFHPNVHFKTGEICLDILKNAWSPAWTFQSVCRAIIALMAHPEPDSPLNCDSGNLLRSGDIRGYQSMARMYTRLAAMPKKG

SEQ ID NO: 2223 - protein, 157 aa, Oryza sativa Japonica Group
MQASRARLFKEYKEVQREKSADPDIQLICDDSNIFKWTALIKGPSETPFEGGVFQLAFSIPEQYPLLPPQVRFLTKIFHPNVHFKTGEICLDILKNAWSPAWTLQSVCRAIIALMAHPEPDSPLNCDSGNLLRSGDIRGYQSMARMYTRLAAMPKKG

SEQ ID NO: 2224 - protein, 157 aa, Zea mays
MQASRARLFKEYKEVQREKSADPDIQLICDDSNIFKWTALIKGPSETPYEGGVFQLAFAIPEQYPLLPPQVRFLTKTFHPNVHFKTGEICLDILKNAWSPIWTLQSVCRAIIALMAHPEPDSPLNCDSGNLLRSGDIRGYQSMARMYTRLAAMPKKG

SEQ ID NO: 2225 - protein, 157 aa, Vitis vinifera
MQASRARLFKEYKEVQREKAADPDIQLVCDDSNIFKWTALIKGPSETPFEGGVFQLAFAVPEQYPLQPPQVRFLTKIFHPNVHFKTGEICLDILKNAWSPAWTLQSVCRAIIALMAHPEPDSPLNCDSGNLLRSGDIRGYQSMARMYTRLAAMPKKG

SEQ ID NO: 2226 - protein, 157 aa, Hevea brasiliensis
MQASRARLFKEYKEVQREKAVDPDIQLVCDDSNIFKWTALIKGPTETPYEGGVFQLAFSVPEQYPLQPPQVRFLTKIFHPNVHFKTGEICLDILKNAWSPAWTLQSVCRAIIALMAHPEPDSPLNCDSGNLLRSGDIRGYQSMARMYTRLAASPKKG

SEQ ID NO: 2227 - protein, 155 aa, Lolium temulentum
ASRARLFKEYKEVQREKSADPDIQLICDDSNIFKWTAIIKGPSETPFEGGVFQLAFSIPEQYPLLPPQVRFLTKIFHPNVHFKTGEICLDILKNAWSPAWTLQSVCRAIIALMAHPEADSPLNCDSGNLLRSGDIRGYQSMARMYTRLAAMPKKG

SEQ ID NO: 2228 - protein, 157 aa, Arabidopsis lyrata subsp. lyrata
MQASRARLFKEYKEVQREKVADPDIQLVCDDTNIFKWTALIKGPSETPYEGGVFQLAFAVPEPYPLQPPQVRFLTKIFHPNVHFKTGEICLDILKNAWSPAWTLQSVCRAIIALMAHPEPDSPLNCDSGNLLRSGDVRGFNSMARMYTRLAAMPKKG

SEQ ID NO: 2229 - protein, 157 aa, Arabidopsis thaliana
MQASRARLFKEYKEVQREKVADPDIQLICDDTNIFKWTALIKGPSETPYEGGVFQLAFSVPEPYPLQPPQVRFLTKIFHPNVHFKTGEICLDILKNAWSPAWTLQSVCRAIIALMAHPEPDSPLNCDSGNLLRSGDVRGFNSMAQMYTRLAAMPKKG

SEQ ID NO: 2230 - protein, 476 aa, Sorghum bicolor
MAAATIRSPTRAAAAGGPAAAPTQQRSVLRVASSAASASSSSARTRRGAAAMQPAKAVAAEAASPAVEMGNGAAVAGMQRPDAMGRFGKFGGKYVPETLMHALTELENAFHALATDEEFQKELDGILKDYVGRESPLYFAERLTEHYKRADGTGPLIYLKREDLNHTGAHKINNAVAQALLAKRLGKQRIIAETGAGQHGVATATVCARFGLQCIIYMGAQDMERQALNVFRMRLLGAEVRAVHSGTATLKDATSEAIRDWVTNVETTHYILGSVAGPHPYPMMVREFHKVIGKETRRQAMDKWGGKPDVLVACVGGGSNAMGLFHEFVEDQDVRLIGVEAAGHGVDTDKHAATLTKGEVGVLHGSMSYLLQDDDGQVIEPHSISAGLDYPGVGPEHSFLKDIGRAEYDSVTDQEALDAFKRVSRLEGIIPALETSHALAYLEKLCPTLPDGVRVVVNCSGRGDKDVHTASKYLDV

SEQ ID NO: 2231 - protein, 443 aa, Zea mays
PGPPPPAPEGRRRRGRGRNAAGQAVAAEASPAAVEMGNGAAAPGLQRPDAMGRFGRFGGKYVPETLMHALTELESAFHALATDDEFQKELDGILKDYVGRESPLYFAERLTEHYKRADGTGPLIYLKREDLNHTGAHKINNAVAQALLAKRLGKQRIIAETGAGQHGVATATVCRRFGLQCIIYMGAQDMERQALNVFRMRLLGAEVRAVHSGTATLKDATSEAIRDWVTNVETTHYILGSVAGPHPYPMMVREFHKVIGKETRRQAMDKWGGKPDVLVACVGGGSNAMGLFHEFVEDQDVRLVGLEAAGHGVDTDKHAATLTKGQVGVLHGSMSYLLQDDDGQVIEPHSISAGLDYPGVGPEHSFLKDIGRAEYDSVTDQEALDAFKRVSRLEGIIPALETSHALAYLEKLCPTLADGVRVVVNCSGRGDKDVHTASKYLDV

SEQ ID NO: 2232 - protein, 478 aa, Oryza sativa Indica Group
MAAAAAAVGNPNAAAAAASVSASRVGAGALRAGGLRVAAGGSVARRGGAVVAAAMRPAKAVASPAKEAAGEVNGAAPGGFARPDAFGRFGKFGGKYVPETLMHALTELEAAFHALAGDEDFQKELDGILKDYVGRETPLYFAERLTEHYKRADGTGPKIYLKREDLNHTGAHKINNAVAQVLLAKRLGKERIIAETGAGQHGVATATVCARFGLQCIIYMGAQDMERQALNVFRMKLLGAEVRAVHSGTATLKDATSEAIRDWVTNVENTHYILGSVAGPHPYPMMVREFHKVIGKETRRQAMEKWGGKPDVLVACVGGGSNAMGLFHEFVDDQDIRMIGVEAAGYGVDTDKHAATLTKGEVGVLHGSLSYVLQDDDGQVIEPHSISAGLDYPGVGPEHSFLKDIGRAEYDSVTDQEALDAFKRVSRLEGIIPALETSHALAYLEKLCPTLPDGVRVVVNCSGRGDKDVHTASKYLDV

SEQ ID NO: 2233 - protein, 389 aa, Zea mays
GRFGGKYVPETLMHALTELENAFHALATDDEFQKELDGILKDYVGRESPLYFAERLTEHYKRADGTGPLIYLKREDLNHRGAHKINNAVAQALLAKRLGKQRIIAETGAGQHGVATATVCARFGLQCIIYMGAQDMERQALNVFRMKLLGAEVRAVHSGTATLKDATSEAIRDWVTNVETTHYILGSVAGPHPYPMMVREFHKVIGKETRRQAMHKWGGKPDVLVACVGGGSNAMGLFHEFVEDQDVRLIGVEAAGHGVDTDKHAATLTKGQVGVLHGSMSYLLQDDDGQVIEPHSISAGLDYPGVGPEHSFLKDIGRAEYDSVTDQEALDAFKRVSRLEGIIPALETSHALAYLEKLCPTLPDGVRVVLNCSGRGDKDVHTASKYLDV

SEQ ID NO: 2234 - protein, 529 aa, Oryza glaberrima
MAAAAAAVGNPNAAAAAASVSASRVGAGALRAGGLRVAAGGSVARRGGAVVAAAMRPAKAVASPAKEAAGEVNGAAPGGFARPDAFGRFGKFGGKYVPETLMHALTELEAAFHALAGDEDFQVTARRAGSPLRFSGFGARLFDSRSIFRLGFIFFNPLGKLHHFISSPNWLKQKELDGILKDYVGRETPLYFAERLTEHYKRADGTGPKIYLKREDLNHTGAHKINNAVAQVLLAKRLGKERIIAETGAGQHGVATATVCARFGLQCIIYMGAQDMERQALNVFRMKLLGAEVRAVHSGTATLKDATSEAIRDWVTNVENTHYILGSVAGPHPYPMMVREFHKVIGKETRRQAMEKWGGKPDVLVACVGGGSNAMGLFHEFVDDQDIRMIGVEAAGYGVDTDKHAATLTKGEVGVLHGSLSYVLQDDDGQVIEPHSISAGLDYPGVGPEHSFLKDIGRAEYDSVTDQEALDAFKRVSRLEGIIPALETSHALAYLEKLCPTLPDGVRVVVNCSGRGDKDVHTASKYLDV

SEQ ID NO: 2235 - protein, 458 aa, Vitis vinifera
MAASAKTPISRTQTTSLYKPYSSSPQLPFKLLKLTPTPCAAKGLSICCALQMEPKVGPGSQVPDSFGRFGKFGGKYVPETLMHALTELESAFRALSGDVEFQKELDGILKDYVGRESPLYFAERLTEHYKRHNGEGPLIYLKREDLNHTGAHKINNAVAQALLAKRLGKTRIIAETGAGQHGVATATVCARFGLQCIVYMGAQDMERQALNVFRMRLLGAEVRAVHAGTATLKDATSEAIRDWVTNVETTHYILGSVAGPHPYPMMVRDFHAVIGKETRKQAMEKWGGKPDVLVACVGGGSNAMGLFYEFVDDEDVRLIGVEAAGFGLDSGKHAATLTRGEVGVLHGAMSYLLQDDDGQIIEPHSISAGLDYPGVGPEHSFLKDLGRAEYHSITDEEALEAFKRLSRLEGIIPALETSHALAYLEKLCPTLPNGTKVVLNCSGRGDKDVHTAIKHLQV

SEQ ID NO: 2236 - protein, 407 aa, Vitis vinifera
MEPKVGPGSQVPDSFGRFGKFGGKYVPETLMHALTELESAFRALSGDVEFQKELDGILKDYVGRESPLYFAERLTEHYKRHNGEGPLIYLKREDLNHTGAHKINNAVAQALLAKRLGKTRIIAETGAGQHGVATATVCARFGLQCIVYMGAQDMERQALNVFRMRLLGAEVRAVHAGTATLKDATSEAIRDWVTNVETTHYILGSVAGPHPYPMMVRDFHAVIGKETRKQAMEKWGGKPDVLVACVGGGSNAMGLFYEFVDDEDVRLIGVEAAGFGLDSGKHAATLTRGEVGVLHGAMSYLLQDDDGQIIEPHSISAGLDYPGVGPEHSFLKDLGRAEYHSITDEEALEAFKRLSRLEGIIPALETSHALAYLEKLCPTLPNGTKVVLNCSGRGDKDVHTAIKHLQV

SEQ ID NO: 2237 - protein, 470 aa, Arabidopsis thaliana
MAASGTSATFRASVSSAPSSSSQLTHLKSPFKAVKYTPLPSSRSKSSSFSVSCTIAKDPPVLMAAGSDPALWQRPDSFGRFGKFGGKYVPETLMHALSELESAFYALATDDDFQRELAGILKDYVGRESPLYFAERLTEHYRRENGEGPLIYLKREDLNHTGAHKINNAVAQALLAKRLGKKRIIAETGAGQHGVATATVCARFGLECIIYMGAQDMERQALNVFRMRLLGAEVRGVHSGTATLKDATSEAIRDWVTNVETTHYILGSVAGPHPYPMMVRDFHAVIGKETRKQALEKWGGKPDVLVACVGGGSNAMGLFHEFVNDTEVRMIGVEAAGFGLDSGKHAATLTKGDVGVLHGAMSYLLQDDDGQIIEPHSISAGLDYPGVGPEHSFFKDMGRAEYYSITDEEALEAFKRVSRLEGIIPALETSHALAYLEKLCPTLSDGTRVVLNFSGRGDKDVQTVAKYLDV

SEQ ID NO: 2238 - protein, 474 aa, Polygonum tinctorium
MAVSTSSALKSQTSSYSSLSQSRLSAFQFSDSHPKSIRFAQKPLSRCPSISCVMTREDLGAKSLKADAADQEPLLLQRPDSFGRFGKFGGKYVPETLMHALDELETAFHSLATDVEFQKELDGILKDYVGRETPLYFAERLTEHYKRPNGEGPQIYLKREDLNHTGAHKINNAVAQALLAKRLGKTRIIAETGAGQHGVATATVCARFGLECIVYMGAQDMERQSLNVFRMRLLGAEVRGVHSGTATLKDATSEAIRDWVTNVETTHYILGSVAGPHPYPMMVREFHAVIGKETRKQALEKWGGKPDVLVACVGGGSNAMGLFHEFVDDKDVRLIGVEAAGFGLDSGKHAATLTKGEVGVLHGAMSYLLQDDDGQVIEPHSISAGLDYPGVGPEHSFLKDMKRAEYYSITDEEALEAFRRLSRLEGIIPALETSHALAYLEKLCPTLADGTRVVLNCSGRGDKDVHTAIKHLKM

SEQ ID NO: 2239 - protein, 491 aa, Zea mays
MASACPLTLRFLFSCILLQTICCSGVSVELSYDSAQVKALSSSAVTEYRVTVTDKRRAYYVFQKPFVCRDKPCRSSEPIAAAGSFVNEAIAGAKRHEPEANGELAVVAEIEGAGVVPHVKSRVAPSAVAMSSGREKRLLGVLVDVPSPRRELGEARATARDEFSPVSNPATTPVSNPVTVPATNPMPPGFVTVPSTNPGNGIATNPNLPPLYPEPTTPGTMPMPDPTTTPVTVPPAFTNPVAAPNTMPGTAVTNPATTPTQFPGSSPVTNPVTTYPYPQQGGMPATTPPAVYQPPATAMPGTVQPGAPTVAGQAAWCVAKSGLMDTALQDGIDYACGVGGADCSAIQPMGACYNPNTLQAHASYAFNSYFQRNPSAASCDFGGAGMLVNVNPSSGTCVYQTPAGFGAGYSPGTTGVGVPSGYTPGMSGAVGGGSGSTVLNANDPGGNSMYDDGYDNPTGLTAGSASLSCGGRVVVCLIWMVTFAFVREKML

SEQ ID NO: 2240 - protein, 488 aa, Zea mays
MLDEMYLICLPEIEMVFSSIPGVSVELSYDSAQVKALSSSAVTEYRVTVTDKRRAYYVFQKPFVCRDKPCRSSEPIAAAGSFVNEAIAGAKRHEPEANGELAVVAEIEGAGVVPHVKSRVAPSAVAMSSGREKRLLGVLVDVPSPRRELGEARATARDEFSPVSNPATTPVSNPVTVPATNPMPPGFVTVPSTNPGNGIATNPNLPPLYPEPTTPGTMPMPDPTTTPVTVPPAFTNPVAAPNTMPGTAVTNPATTPTQFPGSSPVTNPVTTYPYPQQGGMPATTPPAVYQPPATAMPGTVQPGAPTVAGQAAWCVAKSGLMDTALQDGIDYACGVGGADCSAIQPMGACYNPNTLQAHASYAFNSYFQRNPSAASCDFGGAGMLVNVNPSSGTCVYQTPAGFGAGYSPGTTGVGVPSGYTPGMSGAVGGGSGSTVLNANDPGGNSMYDDGYDNPTGLTAGSASLSCGGRVVVCLIWMVTFAFVREKML

SEQ ID NO: 2241 - protein, 615 aa, Sorghum bicolor
MAAASPLALTFFFCCILLLQTICCSGVFVELSYDSTQVKTLSSSVVTEYRVMVTAKQHAYLFLKPFVCREKPCRSEPLAAGGSFVNEVLGPNRRLNVSNIVVTATDTQLGALRRTLQSFHASLGAAGLAASVKVSPELSLSSLRVVAKDRDRARKKRWGKVMEFVRRTGSFVLVQVETEAEANGEVAVDAEIEEAVAEVAALLRAGAGVVLHVKSRAAPIAVAMAKLGGDTSREKRLLGVLVDVSSPRRELGEARATAHDEFSPVSNPATTPVSNPVTVPATNPVANPMAPGFVTVPSTNPGNGFATNPNMPPLYPEPTTPATMPMPDPTTPTMPPVTVPSPFTNPVSAPTTMPGTVTNPAAPAVTNPATTPSQFPGTSPVTNPVTTYPQQGGVGVGGGMPATQPVYQPPATTMPGTGTVQPGAPTMAGQAWCVAKSGLMDTTLQDAMDYACGMGGADCSAIQPMGACYNPNTLQAHASYAFNSYFQRNPSAASCDFGGAGMLVNVNPSSGTCMYQTSSGFGAGYSPGTTGGGVPGGYTPGMSGTGYNPAGGMSGTMGGGSGSTVLNANNPGGSMYGGYDNPTGLTAGSAPVSCGGWVVLCLVWMVTFAFVKERV

SEQ ID NO: 2242 - protein, 610 aa, Zea mays
MAAASCPVALAFFSSSCILLLLQTICCSGVFVELSYDSTQVKVLSSSVVTDGYRVMVTDKQRAYLFLKPFACREKPCGSEPPAGSSISDVLGPDRRLNVSGIVVTATGTRQLGALLRTLRSLQASLGDAGLAERVKVSPELSMSSLRVVGKDRARATKKRRWGKVLEFVRRTRSLVFVRVDTEAGANGEVAVIEEAAALVAAVLDADVGVVLHIKSRAVPSAAAMEKLTGRGEKRSLGVLVDVSSPRRDRELGEARATAHDEFSPVSNPATTPVSNPVTVPATNPVPNPMSPGFVTVPSTNPGNGFASNTNLPPLYPEPTTAPVTMPTPDPTTTMPPPVTVPSPFANPVAAPTTTMPGTVTNPATTPSQFPPVTNPVTTYPYPQQGGMPGTTPEVYQPPATTTPGTAQQGAPSVTGQGQAWCVAKSGLMDAALQDGIDYACGAGGADCSAIQPMGTCYNPNTLQAHASYAFNSYFQRNPSATSCDFGGAGILVNVNPSSGTCVYQTSAGFGAGYSPGTTTGGGGVPSGYTPGMPGAGYGAAGGGVSGTMGGGSGSTVLNANNPGGNSMYGGYDNTAGLTAGSAPLPCGGGGWAVLCLVWMVTFAFVKEKV

SEQ ID NO: 2243 - protein, 331 aa, Zea mays
MDAAVSTLTALAIFASTVEHAAYRSVQGYRVVGRKGGGWVRWERWVERQFVLSLSFPRCVEVALPAAAPRILPAGWRSRPVFREGQTVDTWRCIVAFDSVAAVAPSSPPPPVLSPFVNPQLQYLSNLYNDLLMVFRFREEKTVPQLVNSKQPIRCGEQGKTSDLGDASESDSDGDCQSGKELAPPVQKHTRANRKHIDSITLVDIAQYFHLPIRDASKTLKIGVSILKRKCRQYGIPRWPHRKIKSLDSLIHDLEFVLAREDEDEEEEKQLQKDRLAAAINALTKRKSMLESEKETIQQKPAMDLMAETKLFREDVFKRRYRAKSSVMDMD

SEQ ID NO: 2244 - protein, 331 aa, Zea mays
MDAAVSTLTALAIFASTVGHAAYRSVQGYRVVGRKGGGWVRWERWVERQFVLSLSFPRCVEVALPAAAPRILPAGWRSRPVFREGQTVDTWRCIVAFDSVAAVAPSSPPPPVLSPFVNPQLQYLSNLYNDLLMVFRFREEKTVPQLVNSKQPIRCGEQGKTSDLGDASESDSDGDCQSGKELAPPVQKHTRANRKHIDSITLVDIAQYFHLPIRDASKTLKIGVSILKRKCRQYGIPRWPHRKIKSLDSLIHDLEFVLAREDEDEEEEKQLQKDRLAAAINALTKRKSMLESEKETIQQKPAMDLMAETKLFREDVFKRRYRAKSSVMDMD

SEQ ID NO: 2245 - protein, 331 aa, Zea mays
MDAAVSTLTALAIFASTVEHAAYRSVQGYRVVGRKGGGWVRWERWVERQFVLSPSFPRCVEVALPAAAPRILPAGWRSRPVFREGQTVDTWRCIVAFDSVAAVAPSSPPPPVLSPFVNPQLQYLSNLYNDLLMVFRFREEKTVPQLVNSKQPIRCGEQGKTSDLGDASESDSDGDCQSGKELAPPVQKHTRANRKHIDSITLVDIAQYFHLPIRDASKTLKIGVSILKRKCRQYGIPRWPHRKIKSLDSLIHDLEFVLAREDEDEEEEKQLQKDRLAAAINALTKRKSMLESEKETIQQKPAMDLMAETKLFREDVFKRRYRAKSSVMDMD

SEQ ID NO: 2246 - protein, 337 aa, Sorghum bicolor
MDTAVSTLTALAIFASTVEHAAYRSVHGYRVVGRKRGGWVRWERWVERQFVLSLSFPPCLEVALPAAAPRILPAGWRTRPVFREGQTVEDTWRCIVAFDSVAAVAPSSPPPPVLSPLVNPQLQYLPNLYNDLLKVFQFQEEKKVSQLVNSKKQPIRSGEQGKTSDLADASESDSEGDSQSDKELAPPVQKHIRANRKHIDSITLVDIAQYFHLPLRDASKTLKIGVSILKRKCRQYGIARWPHRKIKSLDSLIHDLEYVLAREDDEEEEKQLQKERLAAAITALAKRKSMLESEKETIQQKPTMDLMAETKLFREDVFKRRYRAKSSVMDDMDFGMV

SEQ ID NO: 2247 - protein, 656 aa, Sorghum bicolor
MDLKQSFSTTIFCVLLLFCVGCRCRPLEIEATQTATLKVDATPQLARKIPETLFGIFFEEINHAGAGGIWAELVNNRGFEAGGPHTPSNIDPWSIIGDDSSIFVATDRTSCFSRNIVALRMEVLCNDCPAGGVGVYNPGFWGMNIEDGKAYNLVMYVKSPETTDLTVSLTSSDGLQNLASATITVSGTSNWTKVEQKLVAKGTNRTSRLQIKTNKKGVVWLDQVSLMPEDTYKGHGFRTELISMLLDLKPRFLRFPGGCFVEGEWLRNAFRWRESIGPWEERPGHFGDVWHYWTDDGLGYYEFLQLAEDLGAAPIWVFNNGISHNDEVDTVAIAPFVKDVLDSLEFARGSADSTWGSVRAAMGHPEPFPVKHVAIGNEDCGKKFYRGNYLKFYNAIREAYPDIQMISNCDGSSRPLDHPADLYDFHVYTDSKTLFNMRSQFDRTSRSGPKAFVSEYAVWRSDAGRGSLLASLAEAAFLTGLEKNSDIVQMASYAPLFVNNNDQTWNPDAIVFNSWQHYGTPSYWMQTLFRESSGAMIHPINMSSRYSSSLAASAITWQDSENSFLRVKVVNFGSDTVSLTISTSGLQASVNSLGSTATVLTSGNVMDENSFSNPNKVAPVKSQLSNAGEQMQVTLAPHSFTTFDLALAQSKLVAEM

SEQ ID NO: 2248 - protein, 656 aa, Zea mays
MDLKQAFSGTIFCLLLLFCVGCRCRTLEIEATQTAALKVDASPQLARKIPETLFGIFFEEINHAGAGGIWAELVSNRGFEAGGSHTPSNIDPWSIIGDDSSVFVATDRTSCFSRNIVALRMEVLCDDCPAGGVGVYNPGFWGMNIEDGKAYNLVMYVQSPETKDLTVSLTSSDGLQNLASATITVSGTSNWTKVEQKLVAKGTNRTSRLQITTNKKGVVWLDQVSLMPEDTYKGHGFRTELISMLLDLKPRFLRFPGGCFVEGDWLRNAFRWRESIGPWEERPGHFGDVWHYWTDDGLGYYEFLQLAEDLGAAPIWVFNNGISHNDEVDTVAIAPFVKDVLDSLEFARGSADSTWGSVRAAMGHPEPFLVKHVAIGNEDCGKKFYRGNYLKFYNAIREAYPDIQMISNCDGSSRPLDHPADLYDFHVYTDSKTLFNMRSTFDRTSRSGPKAFVSEYAVWRSDAGRGSLLASLAEAAFLTGLEKNSDIVQMASYAPLFVNDNDQTWNPDAIVFNSWQHYGTPSYWMQTIFRESSGAMIHPVNISSRYSSSLAASAITWQDAENSFLRVKVVNFGSDTVNLTVSTSGLGASVNALGSTATVLTSGNVMDENSFSNPNKVAPVKSQLSNAAEQMQVTLAPHSFTAFDLALAEPKLVAEI

SEQ ID NO: 2249 - protein, 680 aa, Zea mays
MVDACMHGRHAGPTRIDKWKRMGITSNDAAPRAVLLRFLFLLCIGCKCLASEVEATQTATLAVDASPQLARKIPDTLFGIFFEEINHAGAGGIWAELVSNRGFEAGGLHTPSNIDPWSIIGDDSSVFVETDRTSCFSRNIVALRMEVLCDNCPTGGVGVYNPGFWGMNIEEGKVYNLVMFVKSPETTDLTVSLTSSNGLQNLASATVTVSGESNWIKVEQKLVAKGTNRTSRLQITTNKKGVVWFDQVSLMPEDTYKGHGFRTELISMILDLKPRFLRFPGGCFVEGGWLRNAFRWRESIGPWEERPGHFGDVWHYWTDDGLGYYEFLQLAEDLGTEPIWVFNNGVSHNDEVDTVAIAPFVKDVLDSIEFARGSANSTWGSVRAAMGHPEPFPVKYVAIGNEDCGKKFYRGNYLKFYNAIRQAYPDIQMISNCDGSSTPLDHPADLYDFHVYNDSKTLFNMKSTFDRTSRSGPKAFVSEYAVWRGDAGRGSLLASLAEAAFLTGLEKNSDIVSMASYAPLFVNDNDQTWNPDAIVFNSWQHYGTPSYWMQTLFRESSGAMFHPTTISSSYSGSLAASAITWQDSENSFLRVKVINFGSDAVTLTISTSGLQASINALGSTATVLTSADVMDENSFSNPTKVVPVKSDLSNAAEQMQVTLAPRSFSSFDLALAQSKLVAEM

SEQ ID NO: 2250 - protein, 680 aa, Zea mays
MVDACMHGRHAGPTRIDKWKRMGITSNDAAPRAVLLRFLFLLCIGCKCLASEVEATQTATLAVDASPQLARKIPDTLFGIFFEEINHAGAGGIWAELVSNRGFEAGGLHTPSNIDPWSIIGDDSSVFVETDRTSCFSRNIVALRMEVLCDNCPTGGVGVYNPGFWGMNIEEGKVYNLVMFVKSPETTDLTVSLTSSNGLQNLASATVTVSGESNWIKVEQKLVAKGTNRTSRLQITTNKKGVVWFDQVSLMPEDTYKGHGFRTELISMILDLKPRFLRFPGGCFVEGGWLRNAFRWRESIGPWEERPGHFGDVWHYWTDDGLGYYEFLQLAEDLGTEPIWVFNNGVSHNDEVDTVAIAPFVKDVLDSIEFARGSANSTWGSVRAAMGHPEPFPVKYVAIGNEDCGKKFYRGNYLKFYNAIRQAYPDIQMISNCDGSSTPLDHPADLYDFHVYNDSKTLFNMKSTFDRTSRSGPKAFVSEYAVWRGDAGRGSLLASLAEAVFLTGLEKNSDIVSMASYAPLFVNDNDQTWNPDAIVFNSWQHYGTPSYWMQTLFRESSGAMFHPTTISSSYSGSLAASAITWQDSENSFLRVKVINFGSDAVTLTISTSGLQASINALGSTATVLTSADVMDENSFSNPTKVVPVKSDLSNAAEQMQVTLAPRSFSSFDLALAQSKLVAEM

SEQ ID NO: 2251 - protein, 658 aa, Oryza sativa Indica Group
MASRESFMSTIFFFLLLFSLGCKCIASELHLHATQTAVLKVDASPQLARQIPDTLFGIFFEEINHAGAGGIWAELVSNRGFEAGGPHTPSNIDPWSIIGDDSSIFVATDRTSCFSRNTVALRMEVLCDNCPAGGVGIYNPGFWGMNIEDGKIYNLVMYVKSPETVELTVSLTSSDGLQNLASTTIPVSGASNWTKLEQKLVAQGTNRTSRLQITTNKKGVVWFDQVSLMPADTYKGHGFRTELISMMLDLKPRFLRFPGGCFVEGEWLRNAFRWRESIGPWEERPGHFGDVWHYWTDDGLGYYEFLQLSEDLGAAPIWVFNNGISHNDEVDTAAIAPFVKDVLDSLEFARGNADSTWGSVRAAMGHPEPFPVKYVAIGNEDCGKKFYRGNYLKFYNAIREAYPDIQMISNCDASSSPLDHPADLYDFHVYTDSKTLFSMKNTFDRSSRNGPKAFVSEYAVWRSDAGRGSLLASLAEAAFLTGLEKNSDVVQMASYAPLFVNNNDQTWNPDAIVFNSWQQYGTPSYWMQTLFGESSGAMFHPVTITSSYSGSLAASAITWQDSENSFLRVKIINFGSDPVSLTISATGLQARVNALGSTATVITSSNVMDENSFSNPNKVVPVKSQLSNAAEQMQVTLAPHSFSSFDLALAQSKLVAEM

SEQ ID NO: 2252 - protein, 658 aa, Oryza sativa Japonica Group
MASRESFMSTIFFFLLLFSLGCKCIASELHLHATQTAVLKVDASPQLARQIPDTLFGIFFEEINHAGAGGIWAELVSNRGFEAGGPHTPSNIDPWSIIGDDSSIFVATDRTSCFSRNTVALRMEVLCDNCPAGGVGIYNPGFWGMNIEDGKIYNLVMYVKSPETVELTVSLTSSDGSQNLASTTIPVSGASNWTKLEQKLVAQGTNRTSRLQITTNKKGVVWFDQVSLMPADTYKGHGFRTELISMMLDLKPRFLRFPGGCFVEGEWLRNAFRWRESIGPWEERPGHFGDVWHYWTDDGLGYYEFLQLSEDLGAAPIWVFNNGISHNDEVDTAAIAPFVKDVLDSLEFARGNADSTWGSVRAAMGHPEPFPVKYVAIGNEDCGKKFYRGNYLKFYNAIREAYPDIQMISNCDASSSPLDHPADLYDFHVYTDSKTLFSMKNTFDRSSRNGPKAFVSEYAVWRSDAGRGSLLASLAEAAFLTGLEKNSDVVQMASYAPLFVNNNDQTWNPDAIVFNSWQQYGTPSYWMQTLFGESSGAMFHPVTITSSYSGSLAASAITWQDSENSFLRVKIINFGSDPVSLTISATGLQARVNALGSTATVLTSSNVMDENSFSNPNKVVPVKSQLSNAAEQMQVTLAPHSFSSFDLALAQSKLVAEM

SEQ ID NO: 2253 - protein, 656 aa, Hordeum vulgare
MGSRQVFVPTIACVLLLFCFGCKCIASELQATQTATLKVDASSQLARKIPDTLFGMFFEEINHAGAGGIWAELVSNRGFEAGGLHTPSNIDPWSIIGDDSSIFVATDRTSCFSRNIIALRMEVLCDDCPASGVGIYNPGFWGMNIEDGKTYNLVMYVKSAEAAELTVSLASSDGLQNLASVTVPVAGTSNWTKVEQKLIAKGTNRTSRLQITSNKKGVVWFDQVSLMPSDTFKGHGFRTELISMLLDLKPRFLRFPGGCFVEGEWLRNAFRWRESIGPWEERPGHFGDVWHYWTDDGLGYYEFLQLSEDLGAAPIWVFNNGISHNDEVSTAAIAPFVKDVLDSLEFARGSANSTWGSVRAAMGHPEPFPVKYVAIGNEDCGKKYYLGNYLKFYNAIRESYPDIQMISNCDGSSKPLDHPADLYDFHVYTDSKTLFNMKGTFDKTSRTGPKAFVSEYAVWRTDAGRGSLLGSLAEAAFLTGLEKNSDIVHMASYAPLFVNDNDQTWNPDAIVFNSWQQYGTPSYWMQKFFRESSGAMIHPITISSSYSGSLAASAITWQDSGNNFLRVKIVNFGSDTVSLTISVSGLQASINALGSNATVLTSSNVKDENSFSNPTKVVPVTSQLHNAAEQMQVTLAAHSFSSFDLALAQSELVAEM

SEQ ID NO: 2254 - protein, 660 aa, Oryza sativa Japonica Group
MGSREPFLSAIFFFFFLLLFCLGCKCIASELHLHTTQTAVLKVDASLQHARQIPDTLFGIFFEEINHAGAGGIWAELVSNRGFEAGGPHTPSNIDPWSIIGDDSSIFVATDRTSCFSRNTVALRMEVLCDNCPAGGVGIYNPGFWGMNIEDGKTYNLVMYVKSPETVELTVSLTSSDGSQNLASSTIPVSGASNWTKLEQKLVAKGTNRTSRLQITTTKKGVVWFDQVSLMSADTYKGHGFRTELISMMLDLKPRFLRFPGGCFVEGEWLRNAFRWRESIGPWEERPGHFGDVWHYWTDDGLGYYEFLQLSEDLGAAPIWVFNNGISHNDEVDTAAIAPFVKDVLDSLEFARGSADSTWGSVRAAMGHPEPFPVKYVAIGNEDCGKKFYRGNYLKFYNAIREAYPDIQMISNCDASSRPLDHPADLYDFHVYTDSKTLFSMKSAFDRSSRNGPKAFVSEYAVWRSDAGRGSLLASLAEAAFLTGLEKNSDVVQMASYAPLFVNNNDQTWNPDAIVFNSWQQYGTPSYWMQTLFRESSGAMFHPITITSSYSGSLAASAITWQDSENSFLRVKIINFGSDPVSLTISATGLQARVNALGSTATVITSSNVMDENSFSNPNKVVPVKSQLSNAAEQMQVTLAPHSFSSFDLALAQSKLVAEM

SEQ ID NO: 2255 - protein, 657 aa, Oryza sativa Indica Group
MGSREPFLSAIFFFFLLLFCLGCKCIASELHLHTTQTAVLKVDASPQHARQIPDTLFGIFFEEINHAGAGGIWAELVSNRGFEAGGPHTPSNIDPWSIIGDDSSIFVATDRTSCFSRNTVALRMEVLCDNCPAGGVGIYNPGFWGMNIEDGKTYNLVMYVKSPETVELTVSLTSSDGSQNLASSTIPVSGASNWTKLEQKLVAKGTNRTSRLQITTTKKGVVWFDQVSLMPADTYKGHGFRTELISMMLDLKPRFLRFPGGCFVEGEWLRNAFRWRESIGPWEERPGHFGDVWHYWTDDGLGYYEFLQLSEDLGAAPIWVFNNGISHNDEVDTAAIAPFVKDVLDSLEFARGSADSTWGSVRAAMGHPEPFPVKYVAIGNEDCGKKFYRGNYLKFYNAIREAYPDIQMISNCDASSRPLDHPADLYDFHVYTDSKTLFSMKSAFDRSSRNGPKAFVSEYAVWRSDAGRGSLLASLAEAAFLTGLEKNSDVVQMASYAPLFVNNNDQTWNPDAIVFNSWQQYGTPSYWMQTLFRESSGAMFHPITITSSYSGSLAASAITWQDSENSFLRIINFGSDPVSLTISATGLQARVNALGSTATVITSSNVMDENSFSNPNKVVPVKSQLSNAAEQMQVTLAPHSFSSFDLALAQSKLVAEM

SEQ ID NO: 2256 - protein, 697 aa, Oryza sativa Japonica Group
MGSREPFLSAIFFFFFLLLFCLGCKCIASELHLHTTQTAVLKVDASLQHARQIPDTLFGIFFEEINHAGAGGIWAELVSNRGFEAGGPHTPSNIDPWSIIGDDSSIFVATDRTSCFSRNTVALRMEVLCDNCPAGGVGIYNPGFWGMNIEDGKTYNLVMYVKSPETVELTVSLTSSDGSQNLASSTIPVSGASNWTKLEQKLVAKGTNRTSRLQITTTKKGVVWFDQVSLMSADTYKGHGFRTELISMMLDLKPRFLRFPGGCFVEGEWLRNAFRWRESIGPWEERPGHFGDVWHYWTDDGLGYYEFLQLSEDLGAAPIWVFNNGISHNDEVDTAAIAPFVKDVLDSLEFARGSADSTWGSVRAAMGHPEPFPVKYVAIGNEDCGKKFYRGNYLKFYNAIREAYPDIQMISNCDASSRPLDHPADLYDFHVYTDSKTLFSMKSAFDRSSRNGPKAFVSEYAVWRSDAGRGSLLASLAEAAFLTGLEKNSDVVQMASYAPLFVNNNDQTWNPDAIVFNSWQQYGTPSYWMQTLFRESSGAMFHPITITSSYSGSLAASAITWQDSENSFLRIINFGSDPVSLTISATGLQARVNALGSTATVITSSNVMDENSFSNPNKVVPVKSQLSNAAEQMQVTLAPNSFSSFDLAPCPVQTRGRDVKQEHKVSDRNTRNTRDVICEYQNAVHICACILKHYCIV

SEQ ID NO: 2257 - protein, 667 aa, Sorghum bicolor
MAPASAMELEAPPPASASAAAAKEIKSPEVLPEPSSLSALQRKKLGAHFLESDERRFSRGCRTPLGGGYDEPPSSAAGAGGTTPVNIRGEPIRDLSRTGGWVAAFFIFGNEMAERMAYFGLSVNMVIFMFKVMHRPFTSSANAVNNFLGISQASSVLGGFLADAYLGRYWTIAIFTTMYLLGLIALTVSASVPALVPTQEGCDKLAMLLGACAPAAPWQMAYLQTALYVTAFGAAGIRPCVSSFGADQFDERSAGYKRRLDRFFNLFYLAVTLGAIAAFTAVVYIQMQHGWAAAFGTLALAMGASNALFFVGTPLYRHRLPGGSPLTRVAQVLVAAFRKRNAAFDSGDFVGLYEVAGAKSAIRGSAKIDHTDDFRWLDKAALQLEGDLAGGGEEAVNPWRLCTVTQVEEVKILLRLLPVPACTVMLSVVLTEFLTLSVQQAYTLNTRVAALHLPVTCMPVFPCLAIFLILALYYQTFAPLARRLTGHPHGASQLQRVGLGLFFSILSVAWAGLFERYRRGYAVRHGYLALFLTPMPDLSAYWLLIQYCLIGVAEVFCLVALLEFLYQEAPDAMRSVGSAYAAVAGGLGCFVASAINTAVDAATRNDAEGRPSWLAQNINVGRFDYLYWLLAVLSTINLLVFVYFAKRYKYRVRVDTQQTTVVVNNKQ

SEQ ID NO: 2258 - protein, 661 aa, Zea mays
MAPASETELQAPPPPPASAKEIKSPEVLPEPGSLSALQRKKLGAHFMESDERRVSRARTPLGAAYEPPSAAAGGGGTTPVNIRGEPIQDLSRTGGWVAAFFIFGNEMAERMAYFGLSVNMVIFMFKVMHRPFASSANAVNNFLGISQASSVLGGFLADAYLGRYWTIAIFTTMYLLGLIALTVSASVPALVPPQEGCDKLAMLLGACAPAAPWQMAYLQTALYVTALGAAGIRPCVSSFGADQFDERSPEYKRRLDRFFNLFYLAVTLGAIAAFTAVVYIQMQHGWAAAFGTLALAMGTSNALFFVGTPLYRHRLPGGSPLTRVAQVLVAAFRKRDAAFDSGDFVGLYEVAGAKSAIRGSAKIDHTDDFRWLDKAALQLEGDLAGGEDEEAVNPWRLCTVTQVEEVKILLRLLPVPACTVMLSVVLTEFLTLSVQQAYTLNTRVAALHLPVTCMPVFPCLAIFLILALYYQTFAPLARRLTGHPHGASQLQRVGLGLFFSILSVAWAGLFERYRRGYAVRHGYLGLFLTPMPDLSAYWLLIQYCLIGVAEVFCLVALLEFLYQEAPDAMRSVGSAYAAVAGGLGCFVASAINTAVDAATRDDEEGRPSWLAQNINVGRFDYLYWLLAVLSTVNLLIFVFFAKRYKYRVRVDVPTTVAVDKQ

SEQ ID NO: 2259 - protein, 903 aa, Sorghum bicolor
MMQQLRRSQPSPCHLRGSRFTGAGLPARPMLALGAAAARRSRPETVQLSACHAAAASAQPRPRAVADSALGASSTSVQVRGKLLLQNFFADDGSDSQRQLRLSIQLVSATVAGPDGRGVKAEASVLDAVVGSGDTELDVDLTWDEALGAPGAVVVKNHSDFPVYLRLLSMPTRVLGADDKAATTAAVHFACNGWVYPVDKHPYRLFFTNDACVKEETPSSLLKYREDELAVLRGDGETADRPFQPWDRVYDYALYNDLGNPDLRRDLARPVLGGSREYPYPRRTKTGRPAAKTDPQSESRAPLDEEIYVPCDERVGFGSVPAPTLPPLGGHFSSLADVYRLFGLDDVGRLPEAKGVINSGAPFPVVPQVISVNPTHWRKDEEFARQMIAGANPVCIKRVTKFPLTSELDRGVFGDQDSKITEDHVEKNMGGMTLQQAVEEGRLYVVDHHDWVMPYLKRINELPGEEEKAEVSQRKVYAARTLLFLNREDSTLKPLAIELSSPHPEKEQLGAVSTVYTPPDSRDDDDDGITAGRFSVWELAKAHAAANDTVENNFVTHWLNTHASMEPIVIAANRQLSVLHPIHRLLKPHFRKTLHINAVARQIVVGSGDQRKDGSVFRGIHEVTYFPSRYNMEMSSMAYRAWNFTGLALPNDLINRGVAKGDAKKPETLELVIKDDYPYAADGLEMWAAIKDWVADYCAIYYGDDGAVARDSELQGWWSEVRNVGHGDLSDAPWWPAMDCLADLVETCTTIVWLGSAYHAAISFGQYDYQGFIPNGPSLTTRPVPDPEVTVTVAESDFLESVTPVAEALGFMSISSGPLGLVGTEVYLGQRPDTEQWTSERSAAEALAVFRARLEEVAGNIERRNADPALKNRTGPVEVPYTLLKPTAQPGPVLRGIPNSITV

SEQ ID NO: 2260 - protein, 892 aa, Sorghum bicolor
MMQQLRRSQPSPCHLRGSRFTGAGLPARPMLALGAAAARRSRPETVQLSACHAAAASAQPRPRAVADSALGASSTSVQVRGKLLLQNFFADDGSDSQRQLRLSIQLVSATVAGPDGRGVKAEASVLDAVVGSGDTELDVDLTWDEALGAPGAVVVKNHSDFPVYLRLLSMPTRVLGADDKAATTAAVHFACNGWVYPVDKHPYRLFFTNDACVKEETPSSLLKYREDELAVLRGDGETADRPFQPWDRVYDYALYNDLGNPDLRRDLARPVLGGSREYPYPRHPQSESRAPLDEEIYVPCDERVGFGSVPAPTLPPLGGHFSSLADVYRLFGLDDVGRLPEAKGVINSGAPFPVVPQVISVNPTHWRKDEEFARQMIAGANPVCIKRVTKFPLTSELDRGVFGDQDSKITEDHVEKNMGGMTLQQAVEEGRLYVVDHHDWVMPYLKRINELPGEEEKAEVSQRKVYAARTLLFLNREDSTLKPLAIELSSPHPEKEQLGAVSTVYTPPDSRDDDDDGITAGRFSVWELAKAHAAANDTVENNFVTHWLNTHASMEPIVIAANRQLSVLHPIHRLLKPHFRKTLHINAVARQIVVGSGDQRKDGSVFRGIHEVTYFPSRYNMEMSSMAYRAWNFTGLALPNDLINRGVAKGDAKKPETLELVIKDDYPYAADGLEMWAAIKDWVADYCAIYYGDDGAVARDSELQGWWSEVRNVGHGDLSDAPWWPAMDCLADLVETCTTIVWLGSAYHAAISFGQYDYQGFIPNGPSLTTRPVPDPEVTVTVAESDFLESVTPVAEALGFMSISSGPLGLVGTEVYLGQRPDTEQWTSERSAAEALAVFRARLEEVAGNIERRNADPALKNRTGPVEVPYTLLKPTAQPGPVLRGIPNSITV

SEQ ID NO: 2261 - protein, 892 aa, Zea mays
MMQQLRHSQPSPCLCGLRAARPMLALGAAASRSRPAGKLQPSVCLGLGHVAPAAARGQPRPRAVADSALGASPTSVHVGGKLLLQNFAADSQQRLKLSIQLVSATVADPDGRGVKAEASVLDAVVGSGDSELDVDLIWDEALGAPGAVVVKNHSDFPVYLRLLSVPAGVGGADDEAAAVHFACNGWVYPVDKHPYRLFFTNDACVKEETPSALLKYREDELGALRGDGETTERPFQPWDRVYDYALYNDLGNPDLRQDLARPVLGGSQEYPYPRRTKTGRPAAKTDPRSESRAPLDEEIYVPCDERVGFASIPAPTLPPLGGHFRSLADVYRLFGLDDLGRLPEAKAVINSGAPFPVVPQVISVNPTHWRKDEEFARQMIAGANPVCIKRVTKFPLASELDRGVFGDQDSKITKDHVEKNMGGMTVQQAVEEGRLYVVDHHDWVMPYLKRINELPASEEKAEVSQRKVYAARTLLFLDGEDSSMLRPLAIELSSPHPEKEQLGAVSTVYTPPDSGDDGITAGRFSTWELAKVYASANDAAENNFVTHWLNTHASMEPIVIAANRQLSVLHPIHRLLKPHFRKTLHINAVARQIIVGSGDQRKDGSVFRGIDEVTYFPSKYNMEMSSKAYKAWNFTDLALPNDLIKRGLAKGDPKKPETVELAIKDYPYAVDGLDMWAAIKKWVADYCAIYYADDGAVARDSELQGWWSEVRNVGHGDLADAPWWPAMDCVADLVETCATVVWLSSAYHASISFGQYDYLGFVPNGPSITTRPVPGPDAGAEVTESDFLASVTPVTEALGFMSIASGPMGLKGTEVYLGQRPDTEQWTRERRAAEALAEFRARLEEVAGNIDRRNADPALKNRTGQVEVPYTLLKPTAQPGLVLRGIPNSITV

SEQ ID NO: 2262 - protein, 870 aa, Zea mays
MLALGAAASRSRPAGKLQPSVCLGLGHVAPAAARGQPRPRAVADSALGASPTSVHVGGKLLLQNFAADSQQRLKLSIQLVSATVADPDGRGVKAEASVLDAVVGSGDSELDVDLIWDEALGAPGAVVVKNHSDFPVYLRLLSVPAGVGGADDEAAAVHFACNGWVYPVDKHPYRLFFTNDACVKEETPSALLKYREDELGALRGDGETTERPFQPWDRVYDYALYNDLGNPDLRQDLARPVLGGSQEYPYPRRTKTGRPAAKTDPRSESRAPLDEEIYVPCDERVGFASIPAPTLPPLGGHFRSLADVYRLFGLDDLGRLPEAKAVINSGAPFPVVPQVISVNPTHWRKDEEFARQMIAGANPVCIKRVTKFPLASELDRGVFGDQDSKITKDHVEKNMGGMTVQQAVEEGRLYVVDHHDWVMPYLKRINELPASEEKAEVSQRKVYAARTLLFLDGEDSSMLRPLAIELSSPHPEKEQLGAVSTVYTPPDSGDDGITAGRFSTWELAKVYASANDAAENNFVTHWLNTHASMEPIVIAANRQLSVLHPIHRLLKPHFRKTLHINAVARQIIVGSGDQRKDGSVFRGIDEVTYFPSKYNMEMSSKAYKAWNFTDLALPNDLIKRGLAKGDPKKPETVELAIKDYPYAVDGLDMWAAIKKWVADYCAIYYADDGAVARDSELQGWWSEVRNVGHGDLADAPWWPAMDCVADLVETCATVVWLSSAYHASISFGQYDYLGFVPNGPSITTRPVPGPDAGAEVTESDFLASVTPVTEALGFMSIASGPMGLKGTEVYLGQRPDTEQWTRERRAAEALAEFRARLEEVAGNIDRRNADPALKNRTGQVEVPYTLLKPTAQPGLVLRGIPNSITV

SEQ ID NO: 2263 - protein, 200 aa, Zea mays
  misc_feature (85)..(85): Xaa can be any naturally occurring amino acid
  misc_feature (124)..(124): Xaa can be any naturally occurring amino acid
MHAPRRFKKAFMAQLLLSLRAAGHASKSMGLRERRDAVRLSSDVAMALASARARAAPRSTVWARALIARHAAEQRNEALMRRIMXGAGYEMAAAAVRARKEARCRRIVRRSRRVCSGVGRKRRXLLAAEGGGGIRCSAMAAARRMVKARLQVLRSLVPGGEAMGGLSLLTETLDYVVCLKAQVELMQRLCKGSCSQSQLG

SEQ ID NO: 2264 - protein, 207 aa, Sorghum bicolor
MHAPRRFKKAFMAQLLLSLRAAGQASKSMGLRERRDAVRLSSDVAMALASSARARPSAARSTAWARALVARHAAEQRNEALLRRIMGGAGYEMAAAAAAAARVRKEARSRRIVRRSRRVCSAAAAGRKRRSLLQLAAGSGGGSRCSAMVAASRMVKARLQVLRSLVPGGEAMRGLSLLTETLDYVVCLKTQVELLQCLCKGSRSQLG

SEQ ID NO: 2265 - protein, 448 aa, Zea mays
MSGAGADTAPSSDDKRQHHQRTFRDAARRRLQRDAIERAIRAPLGTVLRDHALVHLPPAAAARLRLVHPSWALALASPLFAVAHAATPRRASGFFSASASAPAGFLPLDAADTVPSPALAFLPASSPPAVLSSSRGLACCFSPADDAYFVCNPATGAWHGVPCPPRRITWPRPAVVVLFDAGVYNFCGDYTLVCAFESAPGSGIYCFAVFASGTGAWRIAGAVAPAEGLVPASGVAAGGTAWWRTDIGTAVGYNPATGRVDLALCPGDSARWEIGSAAGRLHCAVRDGGDVLVFRLDDRRGGWELATVVSVCEILQRPWQPETTFELSDSEDDDDDEAAAGQAELERVGAVIAVANRYSRSRVRVPRDDVRLLPFQGADVEVVLLSGWRVVAFETVTRRRREAVLPVPGQPTTKDWGVVEYIAHTNTLALVGPVVFMEPPDDQEEVSS

SEQ ID NO: 2266 - protein, 451 aa, Sorghum bicolor
MSGAGADTAPSSDDGGQHQHQQRAFRDRDAARRRLRLERELAIARAIRAPLATVVRDHALVHLPPAAAARLRLVHPSWARALASPLFAVAHAATPRRASGLFVAPAPTTAGYFLPLDAADTVPSPALAFLPASSPPTVLSSSHGLACCFSPADDAYFVCNPATGSWHGVPCPPCRITWPRPAVVVLFDAGVYNFRGDYALVCAFESEPGSGIYCFAVFASGTGVWWVADAVAPAEGLVPSSGVDAGGTAWWRTAIGTAVGYNPVTGRVDLALCPGDSAQWEIGSAAGTLHCAVRDGGDVMVFRLDRHGGWEVAAAVSVAEILQRPWQPELAYELSDSEDDEEEEAAGQAEVERAGAVLAVANRYSMVRVPSDVVRLLPFQGAEAEVVLLAGRRVVALETVTRRRREAVLPDQPAGKDWSAVEYAAHTNTLALVAPVVFMEPPDDQEEVVAS

SEQ ID NO: 2267 - protein, 554 aa, Sorghum bicolor
MAAEGGSNLAVLDALDSARTQMYHMKAIVIAGMGFFTDAYDLFCITTVSKLLGRIYYPNDNLYLDKPKPGTLPVSTNNLVTGVALVGTLMGQLVFGYFGDKLGRKRVYGITLVLMAACAIGSGLSFGSTRHAVIGTLCFFRFWLGFGIGGDYPLSATIMSEYSNKKTRGAFIAAVFAMQGVGIIFAGLVSMVISGILLRYNPAPSWTEDHDSSLGDQLPAADYMWRIVLMLGAFPALATFYWRMKMPETARYTALIEGNAKQAANDMQKVMDVEIQSEQDKLARYKAANDYPLLSREFAQRHGLHLIGTATTWFLLDIAFYSQNLTQKDIFPAIKLTSPAGDINPLKEVFEISKAMFLVALLGTFPGYWVTVALIDKMGRYLIQLIGFFMMSVFMLLMGIMYDDLKNKYTTLFALFYALTFFFANFGPNSTTFVLPAELFPTRVRSTCHAISAASGKAGAIVAAFGVQSLTLKGDIASIKKALIILAVTNMLGFFFTFLVPETMGRSLEEISGEDGNAGNGPGVPAGAAMGAADVSKDDKIPVSSTEWQSSMQA

SEQ ID NO: 2268 - protein, 554 aa, Zea mays
MAAPGGSNLAVLDALDSARTQMYHMKAIVIAGMGFFTDAYDLFCISTVSKLLGRIYYPDDNLYIDKPKPGTLPVSVNNMVTGVALVGTLMGQLVFGYFGDKLGRKRVYGITLVLMAACAIGSGLSFGSSAHAVIGTLCFFRFWLGFGIGGDYPLSATIMSEYSNKKTRGAFIAAVFAMQGVGIIFAGLVSMIVSGILLHYHPAPAWKENHDRSWQDQMPAADYMWRIVLMIGAFPALATFYWRMKMPETARYTALIEGNAKQAANDMQKVMDVEIQAEQDKLARYKAANDYPLLSREFARRHGLHLIGTATTWFLLDIAFYSQNLTQKDIFPAIKLTSPVDDINALKEVFEISKAMFLVALLGTFPGYWVTVALIDKMGRYLIQLIGFFMMSVFMLLMGVMYNDLKNKHTTLFALFYALTFFFANFGPNSTTFVLPAELFPTRVRSTCHAISAASGKAGAIVAAFGVQSLTLKGDVGHIKKALIILSVTNILGFFFTFLVPETMGRSLEEISGEDGNVENGPGAPAGVAMGVADVSKDDKMPVSSTEWQSSMHA

SEQ ID NO: 2269 - protein, 555 aa, Oryza sativa Japonica Group
MADADGGSNLAVLDALDSARTQMYHMKAIVIAGMGFFTDAYDLFCISTVSKLLGRLYYQPDGSTDSKPGALSKTANNMVIGVALVGTLMGQLVFGYFGDKLGRKRVYGVTLILMAACAIGSGLSFGSSRKAVIGTLCFFRFWLGFGIGGDYPLSATIMSEYSNKKTRGAFIAAVFAMQGVGIIFAGLVSMIVSSIFLTYNKAPSYKGNHDLSRQMPAADYVWRIVLMIGAFPALATFYWRMKMPETARYTAIIDGNAKQAANDMQKVLSIEIEAEQEKLAKFNAANNYPLLSMEFARRHGLHLIGTTTTWFLLDIAFYSQNLTQKDIFPAMGLISGAAEVNALTEMFQISKASFLVALLGTFPGYWVTVALIDKMGRYMIQLIGFFMMSMFMLAMGILYDYLKTHHFLFGLLYALTFFFANFGPNSTTFVLPAELFPTRVRSTCHAISAAAGKAGAIVAAFGIQKLTYNSQVKSIKKALIILSITNMLGFFFTFLVPETMGRSLEEISGEDGNTGAGGGGAPAAANAGVGVSASDVSRDEKFPASSTEWQTSMHA

SEQ ID NO: 2270 - protein, 555 aa, Oryza sativa Indica Group
MADADGGSNLAVLDALDSARTQMYHMKAIVIAGMGFFTDAYDLFCISTVSKLLGRLYYQPDGLTDSKPGALSKTANNMVIGVALVGTLMGQLVFGYFGDKLGRKRVYGVTLILMAACAIGFGLSFGSSRKAVIGTLCFFRFWLGFGIGGDYPLSATIMSEYSNKKTRGAFIAAVFAMQGVGIIFAGLVSMIVSSIFLTYNKAPSYKGNHDLSRQMPAADYVWRIVLMIGAFPALATFYWRMKMPETARYTAIIDGNAKQAANDMQKVLSIEIEAEQEKLAKFNAANNYPLLSMEFARRHGLHLIGTTTTWFLLDIAFYSQNLTQKDIFPAMGLISGAAEVNALTEMFQISKASFLVALLGTFPGYWVTVALIDKMGRYMIQLIGFFMMSMFMLAMGILYDYLKTHHFLFGLLYALTFFFANFGPNSTTFVLPAELFPTRVRSTCHAISAAAGKAGAIVAAFGIQKLTYNSQVKSIKKALIILSITNMLGFFFTFLVPETMGRSLEEISGEDGNTGAGGGGAPAAANAGVGVSASDVSRDEKFPASSTEWQTSMHA

SEQ ID NO: 2271 - protein, 569 aa, Zea mays
MAPVGDHIVDISSDEEDLFIGTSLNILLEPLDPVKWVDEVCGVADYVAGEDIDDLMIMSEISAPPVLQKIAKPDELVVMGELSSPPAPQQKASANGGCHEDDDDCVVLDGDPDKAITVAEEGSLGDGSSDELQIVAEKGPVACRDFPHSRHSCSNLPFSTTSHVKHCSMCHCFVCDAPAPCKYWGNSTSADDHCHATDKDSKWTCMRQIFKQKLLPASFLEKHQNGVYSTMTPPRQQHMQCHVSVPQSPSVSHGSHPSLTIQSPLLNEGSQNQQRHPSVRVSLSVGATVSSPRAGRGTGNAHIAQSTHSHAIFKRAGAVAPVFATRNASQFCPSAPDDLLLQQALSHASQPVQVAPTTNAFTGASQNNHFQRSFSAPIAPQVQQGQPAARYQVAINGMHAVGPQLARSTSLTTQRTQCLPEPAIIDVSTTSWQDILATVASNLGVADYNTSTPESQHVTVDSLAMHPTANHGLDLQHEPIAESENLTYSLLHDSSNGAAGGSVQADGPMQTPENLDHLIGQSNPVPNEAHLDDFAGAPANQLPIEEEEAHQPEMSRLEPTNILFEFDWV

SEQ ID NO: 2272 - protein, 570 aa, Zea mays
MAPVGDHIVDISSDEEDLFIGTSLNILLEPLDPVKWVDEVCGVADYVAGEDIDDLMIMSEISAPPVLQKIAKPDELVVMGELSSPPAPQQKASANGGCHEDDDDCVVLDGDPDKAITVAEEGSLGDGSSDELQIVAEKGPVACRDFPHSRHSCSNLPFSTTSHVKHCSMCHCFVCDAPAPCKYWGNSTSADDHCHATDKDSKWTCMRQIFKQKLLPASFLEKHQNGVYSTMTPPRQQHMQCHVSVPQSPSVSHGSHPSLTIQSPLLNEGSQNQQRHPSVRVSLSVGATVSSPRAGRGTGNAHIAQSTHSHAIFKRAGAVAPVFATRNASQFCPSAPDDLLLQQALSHASQPVQVAPTTNAFTGASQNNHFQRSFSAPIAPQVQQGQPAARYQVAINGMHAVGPQLARSTSLTTQRTQCLPEPAIIDVSTTSWQDILATVASNLGVADYNTSTPESQHVTVDSLAMHPTANHGLDLQHEPIAESENLTYSLLHDSSNGAAGGSVQADGPMQTPENLDHLIGQSNPVPNEAHLDDFAGAPANQLPIEEEEEAHQPEMSRLEPTNILFEFDWV

SEQ ID NO: 2273 - protein, 559 aa, Sorghum bicolor
MAPVGNHVVDISSDEEDLFMGTSLKLPEPLDPPVNLSRFMDHICGVADYVTGEDIDDLMIMNEISAPPVLHKTANADELVVMGEFSSPPALQQKKASADGVCHEDDDDCVVLDGDPDKVVTVADAGSAGDGSSDELQIVAEKGPIACRDFPHSRHLCSNLPFSTTTHVKHCTMCHCFVCDAPAPCKYWGNSNSADDHCHATDKDSKWRNMRQTFKKKLLPASFPEKHQNGVYSTMSPPRQCHVSVPQSPPISHGSHPSLSIQSPLLNEGSQNRQRHPSVRVSLSVEATVGSPRAGRGTGNAHVAQSTRSHAIFKRAGAVAPIFATRNASQFCPSGPDDLLMPQALSHASQPVQVAPTTNAFTGTSQNNRFQRSFSAPIAPQVQQGQPAGYYEVAINGVHATGPQLARSTSATQRTQCLPEPAIIIDVGTSSWQDILATVASDLGVEDYNMGIPESQHVTVDSQTMHPTANHGFRLQNEPIAESKNFTYSLVHDSAGGSVQADGPMQTSENLGHLIGQSNPVPNEAHLNDFSGAPADELPIEDAAHEPEIPNILLQFDWD

SEQ ID NO: 2274 - protein, 567 aa, Sorghum bicolor
MKNSVTERSFLMESDEEEDDAAAVEDGKRRGHGHGGGDESGDDDDDGSDSSSPCDSPRVVAARCSQPSSYTQQWPQSYRQSIDMYSSVHSPNLSFLGTPSLSRLSNSFLTNSFRGKPPEIISSLIKPLLPTSIASASDDQQHQQHEDVWKSSHYLPPSRKASSLQRIPEDQRPMVGGHEVGPYRQCSYTQGVMNGVNVLCGVGILSTPYAVKQGGWLGLVILAVLGALAWYTGILLRRCLDSKDGLETYPDIGHAAFGTAGRIIISACCVEYLILESDNLSKLFPDAHLTIGGLTLDSHVLFAILTALIVMPTTWLRDLSCLSFISAGGVIASIVIVSCLFWVGLVDHVGTVKVEGTALNLPGIPIAIGLYGYCYSGHGVFPNIYSSLKKRNQFSAVLFTCIALSTVLFAGAAIMGYIMFGESTESQFTLNLPPDLVASKIAVWTTVTNPITKYALTMTPLALSLEELLPPNQQTYPNIMMLRSALVVSSLIIALSVPFFGLVMSLVGSFLTMFVAYILPCACFLSILRSKVTWYQVVLCVFIIAVGLCCAGVGTYSSLSKIIQQYH

SEQ ID NO: 2275 - protein, 570 aa, Zea mays
MRNSVSERSFLIESDDDDDAAVEDGKRRGLGGGGGGDDDDDGSDSSSPCDSPRVVAARCSQPSSYTQQWPQSYRQSIDMYSSVHSPNLSFLGTPSLSRLSNSFLTNSFRGKPPEIISSLIKPLLPTSIASASDDQQQQQHEDVRKSSHYLPPSRKASSLQRIPEDQRPMVGGHEVGPYRQCSYTQGVMNGVNVLCGVGILSTPYAVKQGGWLGLVILAVLGALAWYTGILLRRCLDSKDGLETYPDIGHAAFGTAGRIIISIILYMELYACCIEYLILESDNLSKLFPNAHLTMGNLTLDSHMLFAILTALVVMPTTWLRDLSCLSFISAGGVIASIVIVSCLFWVGLVDHVGTVESEGTALNLPGIPIAIGLYGYCYSGHGVFPNIYSSLKKSNQFPAVLFTCIALSTVLFAAAAIMGYIMFGESTESQFTLNLPPNLVASKIAVWTTVTNPITKYALTMTPLALSLEELLPPNKQTYPNIMMLRSALVVSSLIIALSVPFFGLVMSLVGSFLTMFVAYILPCACFLSILRSKVTWYQVVLCVFIIVVGLCCVGVGTYSSLSKIIQKYQ

SEQ ID NO: 2276 - protein, 569 aa, Zea mays
MRNSVSERSFLIESDDDDDAAVEDGKRRGLGGGGGDDDDGSDSSSPCDSPRVVAARCSQPSSYTQQWPQSYRQSIDMYSSVHSPNLSFLGTPSLSRLSNSFLTNSFRGKPPEIISSLIKPLLPTSIASASDDHQQQQQHEDVRKSSHYLPPSRKASSLQRIPEDQRPMVGGHEVGPHRQCSYSQGVMNGVNVLCGVGILSTPYAVKQGGWLGLVILAVLGALAWYTGILLRRCLDSKDGLETYPDIGHAAFGTAGRIIISIILYMELYACCIEYLILESDNLSKLFPNAHLTMGNLTLDSHMLFAILTALVVMPTTWLRDLSCLSFISAGGVIASIVIVSCLFWVGLVDHVGTVESEGTALNLPGIPIAIGLYGYCYSGHGVFPNIYSSLKKSNQFPAVLFTCIALSTVLFAAAAIMGYIMFGESTESQFTLNLPPNLVASKIAVWTTVTNPITKYALTMTPLALSLEELLPPNKQTYPNIMILRSALVVSSLIIALSVPFFGLVMSLVGSFLTMFVAYILPCACFLSILRSKVTWYQVVLCVFIIVVGLCCVGVGTYSSLSKIIQKYQ

SEQ ID NO: 2277 - protein, 576 aa, Sorghum bicolor
MRSSVSERSLIIESDDDDNDDRPQSQPSAAAARSRRRHHQHEEGSGSGSGSGSDSDSGSSSSSCATPRGHAQATASSYTQQWPQSYRQSINILSSVQSPNLSFLGTPTLSRLSNSFITNSFRGKTPEIISNLVKPLLRPTTSDDLQQQHEERKSSQYLLPSRKPSLQQIPEDQKPVPVAHEVSPYHKCSYTQAVVNGINVLCGVGILSTPYAIKQGGWLGLVILCLFAILAWYTGVLLRRCLDSKEGLETYPDIGHAAFGTTGRIAISIILYVELYACCIEYLILEGDNLSKLFPNAHLTIGSLTVNSHVLFAILTTIIVMPTTWLRDLSCLSYLSAGGVIASILGVICLFWVGVVDNVDFENKGTALNLPGIPIAIGLYGYCYSGHGVFPNIYSSLKNRNQFPSILFTCIGLSTILFAGAAVMGYKMFGEATQSQFTLNLPENLVVSKIAVWTTVANPITKYALTITPLAMSLEELLPPNQQKYSNIVMLRSALVVSTLLIALSVPFFGLVMALVGSLLTMLVTYILPCACFLAILRRKVSWHQVAACSFIIMVGVCCACVGTYSSLSKIIQNYT

SEQ ID NO: 2278 - protein, 571 aa, Sorghum bicolor
MRSPVPERSLIIESDDDDDTQSAVATNWIGHGHGHDEEEPEQEPGSDSDSSSSSSSCATPRRGPSSPAYTQQWPQSYRQSIDILSSVHSSNLSFLGTPTLSRLSNSFLAITDSFRGKAPETISNFVKPLLGPTSSDEQQQQQHEDTRKSSQYIMPSRKSSLEQIPEDQKPLVVGHEASRNRNCSYTQGVMNGINVLCGVGILSTPYAIKQGGWIGLVILCLFALLAWYTGVLLRHCLDSKEGLETYPDIGHAAFGSTGRIVISIILYVELYACCIEYLILESDNLTKLFPTAHLTIGSLTLNSHVFFAILTTIIVMPTTWLRDLSCLSYISAGGVIASILVVICLFLVGVVNDVGFENEGTALNLPGIPIAIGLYGYCYSGHGVFPNIYSSLKNRNQFPSILFTCIGLSTFLYAGAAVMGYKMFGEATESQFTLNLPDNSLISKVAVWTTVANPITKYALTIIPLAMSLEELLPPNQQKYSTIIMLRSSLVMSTLLIALSVPFFGLVMALVGSLFAMLVTYILPCACFLAILKTKVGWHQIAACSFIIAVGVCCACVGTYSSLSKIIQNYT

SEQ ID NO: 2279 - protein, 571 aa, Oryza sativa Japonica Group
MRSHEMNNSSSRYASEEERGSNSFLIESEEEEEDEEAHPHSSILLKDADSDSDSDDSSCATPRPSSYATHQWPQSYRQSIDIYSSVQSPNLSFLGTPTLSRLSNSFLTNSFRGKTPEILSNLVKPLLRPSSSSDDQQQQQQHDDDTRKSSQYLLPSRKPSLQQIPEDQKPLVPAHEVPAYQQCSYTQAVMNGINVLCGVGILSTPYAIKQGGWLGLVILCLFAVLAWYTGVLLRRCLDSKEGLETYPDIGHAAFGTTGRIAISIILYIELYACCIEYLILESDNLSKLFPNAHLTIGSMTLNSHVFFAILTTLIVMPTTWLRDLSCLSYLSAGGVIASILVVVCLCWVGVVDHVGFENKGTALNLPGIPIAIGLYGYCYSGHGVFPNIYSSLKNRNQFPSILFTCIGLSSILFAGAAVMGYKMFGESTESQFTLNLPENLVVSKVAVWTTVANPITKYALTITPLAMSLEELLPPNQQKYANIIMLRSSLVVSTLLIALSVPFFGLVMALVGSLLTMLVTYILPCACFLAILKRKVTWHQIAACSFIIVVGVCCACVGTYSSLSKIIQNYT

SEQ ID NO: 2280 - protein, 567 aa, Zea mays
MRSSVSERSLIIESDDDDDDHPQSRSSAAARSRRRHHQHEEDSAAGSDSDSGSSSSSCGTPRGPATDSSYTQQWPQSYRQSIDILSSVQSPNLSFLGTPTLSRLSNSFRGKTPEIISNLVKPLLRPTTSDDHHHHHQQQPEERKSSQYLLPSRKPSLQQIPEDQKPVPVAHEVSPYHKCTYTQAVVNGINVLCGVGILSTPYAIKQGGWLGLVILCLFAILAWYTGVLLRRCLDSKEGLETYPDIGHAAFGATGRIAISIILYVELYACCIEYLILEGDNLSKLFPNAHLSVGSLTMNSHVLFTILTTIIVMPTTWLRDLSCLSYLSAGGVFASILGVICLFWVGVVDNVGFENKGTALNLPGIPIAIGLYGYCYSGHGVFPNIYSSLKKRNQFPSILFTCIGLSTILFAGAAVMGYKMFGEATQSQFTLNLPENLVVSKIAVWTTVANPITKYALTITPLTMSLEELLPPNQQKYSNIVMLRSALVVSTLLIALSVPFFGLVMALVGSLLTMLVTYILPCACFLAILRRKVSWHQVAVCSFIIVVGVCCACVGTYSSLSKIIQNYT

SEQ ID NO: 2281 - protein, 267 aa, Zea mays
MAAQALLSGRQLLGRPVQSAVSRSSARKAPFVVRASSSPPAKQGADRQLWFASKQSLSYLDGTLPGDYGFDPLGLSDPEGTGGFIEPKWLAYGEVINGRYAMLGAVGAIAPEIFGKMGIIPPETALPWFKTGVIPPAGTYNYWADSYTLFVFNMALMGFAEHRRLQDWYNPGSMGKQYFLGLEKFLAGSGDPSYPGGPLFNPLGFGKTEKEMNELKLKEIKNGRLAMLAILGYFIQGLVTGVGPFQNLLDHLADPVNNNVLTSLKFH

SEQ ID NO: 2282 - protein, 275 aa, Lycoris aurea
MATTQALLSSMEAGRQLLGGRPVQWTPSRSFSSSRKASFVVKAASTPPVKQGADRQLWFASKQSLSYLDGSLPGDFGFDPLGLSDPEGTGGFIEPKWLAYGEIINGRYAMLGVAGAIAPEILGKLGLIPPETALPWFQTGVIPPAGTYSYWADPYTLFVLEMALMGFAEHRRFQDWAKPGSMGKQYFLGFEKFLGGSGDPAYPGGPIFNPLGFGKDEKSMKELKLKEVKNGRLAMLAILGFFIQGLVTGVGPFQNLLDHLADPVNNNVLTSLKFH

SEQ ID NO: 2283 - protein, 275 aa, Lycoris aurea
MATTQALLSSMEAGRQLLGGRPVQWTPTRSFSSSRKASFVVKAASTPPVKQGADRQLWFASKQSLSYLDGSLPGDFGFDPLGLSDPEGTGGFIEPKWLAYGEIINGRYAMLGVAGAIAPEILGKLGLIPPETALPWFQTGVIPPAGTYSYWADPYTLFVLEMALMGFAEHRRFQDWAKPGSMGKQYFLGFEKFLGGSGDPAYPGGPIFNPLGFGKDERSMKELKLKEVKNGRLAMLAILGFFIQGLVTGVGPFQNLLDHLADPVNNNVLTSLKFH

SEQ ID NO: 2284 - protein, 273 aa, Solanum lycopersicum
MATQALISSSSISTSAEAARQIIGSRISQSVTRKASFVVRAASTPPVKQGANRQLWFASKQSLSYLDGSLPGDFGFDPLGLSDPEGTGGFIEPKWLAYGEVINGRFAMLGAAGAIAPEILGKAGLIPQETALAWFQTGVIPPAGTYNYWADNYTLFVLEMALMGFAEHRRFQDWAKPGSMGKQYFLGLEKGLGGSGDPAYPGGPLFNPLGFGKDEKSMKELKLKEIKNGRLAMLAILGYFIQALVTGVGPYQNLLDHLADPVNNNVLTSLKFH

SEQ ID NO: 2285 - protein, 273 aa, Solanum lycopersicum
MATQALISSSSISTSAEAARQIIGSRISQSVTRKASFVVRAASTPPVKQGANRQLWFASKQSLSYLDGRLPGDFGFDPLGLSDPEGTGGFIEPKWLAYGEVINGRFAMLGAAGAIAPEILGKAGLIPQETALAWFQTGVIPPAGTYNYWADNYTLFVLEMALMGFAEHRRFQDWAKPGSMGKQYFLGLEKGLGGSGDPAYPGGPLFNPLGFGKDEKSMKELKLKEIKNGRLAMLAILGYFIQALVTGVGPYQNLLDHLADPVNNNVLTSLKFH

SEQ ID NO: 2286 - protein, 274 aa, Vitis vinifera
MAAQALVSSSLTSSVETARQILGSRPLQSPSRKSSSFVVRAASTPPVKQGADRPLWFASKQSLTYLDGSLPGDYGFDPLGLSDPEGTGGFIEPRWLAYGEVINGRYAMLGAVGAIAPEILGKLGLIPPETALPWFKTGVFPPAGTYNYWADPYTLFVFEMALMGFAEHRRFQDWANPGSMGKQYFLGLEKYLGGSGDPAYPGGPLFNPLGFGKDEKSLKDLKLKEVKNGRLAMLAILGYFAQGPVTGVGPLQNLLDHLADPVNNNIITSLKFHN

SEQ ID NO: 2287 - protein, 269 aa, Oryza sativa Japonica Group
MAAQALLSGRQLLGRPLQSSVSRSSSSRKAPFMVRAEATPPAKQGADRQLWFASKQSLSYLDGTLPGDFGFDPLGLSDPEGTGGFIEPRWLAYGEVFNGRTAMMGVVGMVAPELLGKLGLVPAETAIPWFQTGVIPPAGTYTYWADPYTLFVFELALVGFAEHRRFQDWYTPGSMGKQYFLGLEKYLAGSGEPAYPGGPLFNPLGFGTKSEAEMKELKLKEIKNGRLAMLAFLGFSVQALFTGVGPVQNLLDHLADPVHNNILTSLKFH

SEQ ID NO: 2288 - protein, 273 aa, Arabidopsis lyrata subsp. lyrata
MAAQALVSSSLTSSVQTARQIFGSKPVASASQKKSSFVVKATATPPVKQGANRPLWFASSQSLSYLDGSLPGDYGFDPLGLSDPEGTGGFIEPRWLAYGEIINGRFAMLGAAGAIAPEILGKAGLIPPETALPWFQTGVIPPAGTYTYWADNYTLFVLEMALMGFAEHRRLQDWYNPGSMGKQYFLGLEKGLAGSGNPAYPGGPFFNPLGFGKDEKSLKELKLKEVKNGRLAMLAILGYFIQGLVTGVGPYQNLLDHLADPVNNNVLTSLKFH

SEQ ID NO: 2289 - protein, 273 aa, Arabidopsis thaliana
MAAQALVSSSLTSSVQTARQIFGSKPVASASQKKSSFVVKAAATPPVKQGANRPLWFASSQSLSYLDGSLPGDYGFDPLGLSDPEGTGGFIEPRWLAYGEIINGRFAMLGAAGAIAPEILGKAGLIPAETALPWFQTGVIPPAGTYTYWADNYTLFVLEMALMGFAEHRRLQDWYNPGSMGKQYFLGLEKGLAGSGNPAYPGGPFFNPLGFGKDEKSLKELKLKEVKNGRLAMLAILGYFIQGLVTGVGPYQNLLDHLADPVNNNVLTSLKFH

SEQ ID NO: 2290 - protein, 274 aa, Populus trichocarpa
MAAQALVSSSLTSSVETARKVLGARPTQSPFVSSRKSSFVVRAASTPPVKQGNRQLWFASKQSLSYLDGSLPGDFGFDPLGLSDPEGTGGFIEPKWLAYGEIINGRYAMLGAVGAIAPEILGKAGLIPPETALPWFRTGVIPPAGTYSYWADPYTLFVFEMALMGFAEHRRLQDWAKPGSMGKQYFLGFEKYLGGSGEPAYPGGPLFNPLGFGKDEKSLKDLKLKEVKNGRLAMLAILGYFVQGLVTGVGPYQNLLDHLADPVHNNILTSLKFH

SEQ ID NO: 2291 - protein, 848 aa, Zea mays
MSHLLEREADTAFLPHLDQRDGVEAWLILRRCTPASFNVASTDPNNEVSSAVTADALAKAAPALFASRAPRPSLKYLELLLQAEIDFDHIDLPTAAAAEHIVAQVTGNNAVSVVEDQLRCTLFLTRNFLSSHHQAVSKEWDMVAVVHPVCNVGEKKVDAICTGQIEHLLLHHLKRSPTSIGAKAVFDEMQQSTNSATTTPASSALTTTTTTTMAAPATWLDAQPAVSTCSSASSAQEDTPIPLLFLRGGLSMMDNVLPANSTFLSTNISLSNMECLREFMLHLKLGTARFTICDESVVNLWSSPVERVVQQQTWLQLELTNSGLDLWPISWQSQQVYFGTHHGFAAWPRSHGTILVFDFSNTLSWNNSMSIVASCSTNTLLAKDDGDSMNRCFSWCWKPPWLHPGQSKFRDFLWWSFWYFQFVRSKYYGCRASQLLTPWTPPMTLCLVGDDLVVMLVIPSMLLLSRCYFSGVECVLAAADPLFSTFHAERELFWKPPWQHLVPNTRSEIQLLMEFVYLNTGVCRSLHMITKFSKQYFVGLFLLITREKFMSGRIMLALLPLLKLFTSGGARIVNASSLASELKRMPNEKLRNDLSNIDIWDEDRIQAVLNTFLEDLRSGRLEEAGWPVMLPAYSLSKMVINLYTRIIARRYPEMRINCVRPGFVTTDISWNLGVLTPKQGARGPVMLALLPDDGPTGWYRDEMGDKMGSLLFFKMVKYSSLVEGFCGVQFSFPNILLCKSWSQELATNTESHLLPEMLEAANGYICHELHLMLTSIGVTHMIDCGKYLIGVIDLLTPWDPSIVVFNLKFLMLWLEGKPNLKKGEMSVLMRWKTVWWLMAGRVRLVCII

SEQ ID NO: 2292 - protein, 471 aa, Oryza sativa Japonica Group
MAAAVGNPNAAAAASISASRVGAGALRAGGLRVAAGRRGAGAVVAAAMRPAKAVASPAKEAAGEVNGAASGGFARPDAFGRFGKFGGKYVPETLMHALTELEAAFHALAGDEDFQKELDGILKDYVGRETPLYFAERLTEHYKRADGTGPMIYLKREDLNHTGAHKINNAVAQVLLAKRLGKERIIAETGAGQHGVATATVCARFGLQCIIYMGAQDMERQALNVFRMKLLGAEVRAVHSGTATLKDATSEAIRDWVTNVENTHYILGSVAGPHPYPMMVREFHKVIGKETRRQAMEKWGGKPDVLVACVGGGSNAMGLFHEFVDDQDIRMIGVEAAGYGVDTDKHAATLTKGEVGVLHGSLSYVLQDDDGQVIEPHSISAGLDYPGVGPEHSFLKDIGRAEYDSVTDQEALDAFKRVSRLEGIIPALETSHALAYLEKLCPTLPDGVRVVVNCSGRGDKDVHTASKYLDV

SEQ ID NO: 2293 - protein, 466 aa, Camptotheca acuminata
MAVYTNPACRTNTSAFPGPYRPYSNPSRFSFNLDKFRPRTSAIKVPSICCTIAREMEKERSEREPDVLQRPDSFGRFGKFGGKYVPETLMYALTELESAFRSLSGDQVFQKELDGILKDYVGRESPLYFAERLTLHYKRPNGEGPEIYLKREDLNHTGAHKINNAVAQALLAKRLGKKRIIAETGAGQHGVATATVCARFGLQCVIYMGAQDMERQALNVFRMRLLGAEVRAVHSGTATLKDATSEAIRDWVTNVESTHYILGSVAGPHPYPMMVREFHAVIGKETRKQALEKWGGKPDVLVACVGGGSNAMGLFHEFVDDKDVRMIGVEAAGFGLDSGKHAATLTKGEVGVLHGAMSYLLQDDDGQIIEPHSISAGLDYPGVGPEHSFLKDIGRAEYYCCTDEEALEAFKRLSRLEGIIPALETSHALAFLEKLCPTLPNGTKVVLNCSGRGDKDVHTAIKHLQV

SEQ ID NO: 2294 - protein, 475 aa, Arabidopsis thaliana
MATASTAATFRPSSVSASSELTHLRSPSKLPKFTPLPSARSRSSSSFSVSCTIAKDPAVVMADSEKIKAAGSDPTMWQRPDSFGRFGKFGGKYVPETLMHALSELETAFYSLATDEDFQRELAEILKDYVGRESPLYFAERLTEHYRRENGEGPLIYLKREDLNHTGAHKINNAVAQALLAKRLGKKRIIAETGAGQHGVATATVCARFGLQCIIYMGAQDMERQALNVFRMRLLGAEVRGVHSGTATLKDATSEAIRDWVTNVETTHYILGSVAGPHPYPMMVRDFHAVIGKETRKQAMEKWGGKPDVLVACVGGGSNAMGLFHEFVDDTEVRMIGVEAAGFGLDSGKHAATLTKGDVGVLHGAMSYLLQDDDGQIIEPHSISAGLDYPGVGPEHSFLKDVGRAEYFSVTDEEALEAFKRVSRLEGIIPALETSHALAHLEKLCPTLPDGARVVLNFSGRGDKDVQTAIKYLEV

SEQ ID NO: 2295 - protein, 104 aa, Sorghum bicolor
MAKAQAMAALMLTVLVVLAASAEMAHGVCNLSSAGIRACQPAAAIRNPTEQPSAECCAALAGADLACLCRYKNAAGVWVRFYRIDINRAMGLPGKCGLAMPANC

SEQ ID NO: 2296 - protein, 103 aa, Zea mays
MAKAGATAVLVTVLVVLAASAEMAHGVCNLSSAGIRACQPAAAIRNPTDQPSSECCAALAGADLACLCRYKNAAGVWVRFYRIDINRAMGLPGKCGLAMPANC

SEQ ID NO: 2297 - protein, 403 aa, Zea mays
MPLPAAMRSSMLRGRCNLFLPFAARCSQAGGGGGGGCSLLLPRRWQSSLPQLDHVADRSNEESGGEIDWDNLGFGLTPTDYMYVTRCSPEDRGDFPRGELCRYGNIELSPSSGVLNYAQGLFEGMKAYRRPDRAGYTLFRPEENARRMQRGAERMCMPAPSVEQFVHAVRQTVLANRRWVPPQGKGALYLRPLLVGSGPILGLAPAPEYTFLIYAAPVGNYFKEGLAPINLVVHDEFHRAMPGGTGGVKTIANYAPVLRAQMDAKSKGFTDVLYLDSVHKRYLEEVSSCNVFVVKGGVVATPDTRGTILPGITRKSVIELARDRGYKVEERLVSIDDLVAADEVFCTGTAVVVAPVSTVTYQGERYEFRTGPDTVSQELYTTLTSIQMGMAAEDSKGWTVAVE

SEQ ID NO: 2298 - protein, 397 aa, Hordeum vulgare subsp. vulgare
MAVLSSAKRVLPCASAGGVSGGLRALLGTDGGGRSLLPSRWKSSLPQLDPVDRSDEESGGDIDWDNLGFGLTPTDYMYVMRCSREEGGFSRGELARYGNIELSPSSGVLNYGQGLFEGLKAYRRSDGAGYMLFRPEENARRMQHGAGRMCMPSPSVEQFVHAVKQTVLANRRWVPPQGKGALYIRPLLIGSGAILGLAPAPEYTFMIYAAPVGTYFKEGMAAINLLVEEEIHRAMPGGTGGVKTISNYAPVLKPQMDAKSKGFADVLYLDAVHKRYVEEASSCNLFVVKGGAVATPATTAGTILPGVTRRSIIELARDDGYQVEERLVSIDDLVGADEVFCTGTAVGVTPVSTITYQGTRHEFRTGEDTLSRKLYTTLTSIQMGLAEDKKGWTVAID

SEQ ID NO: 2299 - protein, 415 aa, Oryza sativa Japonica Group
MAAAAAAASSAKRALLPWARDAHHALARALQGCGGGGGLGLRGALPTAGGRWSLLQCRWRSSLPQLDSADRSDEESGGEIDWDNLGFGLTPTDYMYVMRCSLEDGVFSRGELSRYGNIELSPSSGVINYGQGLFEGLKAYRAANQQGSYMLFRPEENARRMQHGAERMCMPSPSVEQFVHAVKQTVLANRRWVPPQGKGALYIRPLLIGSGPILGLAPAPEYTFLIYAAPVGTYFKEGLAPINLVVEDSIHRAMPGGTGGVKTITNYAPVLKAQMDAKSRGFTDVLYLDAVHKTYLEEASSCNLFIVKDGVVATPATVGTILPGITRKSVIELARDRGYQVEERLVSIDDLVGADEVFCTGTAVVVAPVSSVTYHGQRYEFRTGHDTLSQTLHTTLTSIQMGLAEDKKGWTVAID

SEQ ID NO: 2300 - protein, 416 aa, Oryza sativa Japonica Group
MAAAAAAASSAKRALLPWARDAHHALARALQGCGGGGGLGLRGALPTAGGRWSLLQCRWRSSLPQLDSADRSDEESGGEIDWDNLGFGLTPTDYMYVMRCSLEDGVFSRGELSRYGNIELSPSSGVINYGQGLFEGLKAYRAANQQGSYMLFRPEENARRMQHGAERMCMPSPSVEQFVHAVKQTVLANRRWVPPQGKGALYIRPLLIGSGPILGLAPAPEYTFLIYAAPVGTYFKEGLAPINLVVEDSIHRAMPGGTGGVKTITNYAPVLKAQMDAKSRGFTDVLYLDAVHKTYLEEASSCNLFIVKDGVVATPATVGTILPGITRKSVIELARDRGYQQVEERLVSIDDLVGADEVFCTGTAVVVAPVSSVTYHGQRYEFRTGHDTLSQTLHTTLTSIQMGLAEDKKGWTVAID

SEQ ID NO: 2301 - protein, 425 aa, Oryza sativa Japonica Group
MAAAAAAASSAKRALLPWARDAHHALARALQGCGGGGGLGLRGALPTAGGRWSLLQCRWRSSLPQLDSADRSDEESGGEIDWDNLGFGLTPTDYMYVMRCSLEDGVFSRGELSRYGNNGAQPLLRRHQLRPGLSRSPVHTHGLFEGLKAYRAANQQGSYMLFRPEENARRMQHGAERMCMPSPSVEQFVHAVKQTVLANRRWVPPQGKGALYIRPLLIGSGPILGLAPAPEYTFLIYAAPVGTYFKEGLAPINLVVEDSIHRAMPGGTGGVKTITNYAPVLKAQMDAKSRGFTDVLYLDAVHKTYLEEASSCNLFIVKDGVVATPATVGTILPGITRKSVIELARDRGYQVEERLVSIDDLVGADEVFCTGTAVVVAPVSSVTYHGQRYEFRTGHDTLSQTLHTTLTSIQMGLAEDKKGWTVAID

SEQ ID NO: 2302 - protein, 412 aa, Zea mays
MAALTSAKGALLPSWARSSSSGHGGDLWRVLGKALATAGGGGGGGCSLLLPRRWQSSLPQLDHVADRSNEESGGEIDWDNLGFGLTPTDYMYVTRCSPEDRGDFPRGELCRYGNIELSPSSGVLNYAQGLFEGMKAYRRPDRAGYTLFRPEENARRMQRGAERMCMPAPSVEQFVHAVRQTVLANRRWVPPQGKGALYLRPLLVGSGPILGLAPAPEYTFLIYAAPVGNYFKEGLAPINLVVHDEFHRAMPGGTGGVKTIANYAPVLRAQMDAKSKGFTDVLYLDSVHKRYLEEVSSCNVFVVKGGVVATPDTRGTILPGITRKSVIELARDRGYKVEERLVSIDDLVAADEVFCTGTAVVVAPVSTVTYQGERYEFRTGPDTVSQELYTTLTSIQMGMAAEDSKGWTVAVE

SEQ ID NO: 2303 - protein, 416 aa, Oryza sativa Japonica Group; identical to SEQ ID NO: 2300

SEQ ID NO: 2304 - protein, 534 aa, Sorghum bicolor
MVVAVALQLAALLALLLALWRLAWRPHAVARSFARQGVGGPPYTFLAGSLPEAKRLLMAGRRGVPPLDAACHDIMPVLLPQFHRWVADYGRTFLFWIGPIPALLSTDLQLIKQVLTDRTGLYQKDFMIPVLKFLFGNGVILINGDDWKRHRKVVLPAFNHETIKSMSAVTAEVTKQMMRQWREQIIIQGSGDKESAEIDMIHAFNDLTAKVNGRVAFGTSHRDVEEVIVLMREMQKLATAATLDAPILWYLPTRRNLQVRRLNKQLRSKIISIMQARLAADGAKKCGGRGGAGGGDLLGLLLEAWTPQQQQQHGNNGETLTTDEVIDECKTFFAAGQETTATLLTWAMFLLAVHPEWQHKVREEVVREFSCTSDGDGDEVPHADVLAKLKLLYMVLLETSRLYPPIVYIQRRAASDAVLGGIKVPQGTVISIPIAMLHRDKQVWGLDADEFNPMRFEHGLTKAAKDPKALLAFSLGPRVCTGQSFGIVEVQVVMAMILRRFSFSLSPEYVHKPKYLLSLTPKLGMPLIVRIVDG

SEQ ID NO: 2305 - protein, 527 aa, Zea mays
MVVAVQLAALLALLLALWRLVWRPHAVARSFARQGIRGPPYTFLAGSLPEAKRLLMAGRRGTAPLDAGCHDIMPVLLPQFLRWVADYGRTLLFWIGPIPAVLSTDLQLIKQVLTDRTGLYQKDFMIPVLKFLFGNGVILINGDDWKRHRKVVLPAFNHETIKSMSAVTAEVTEQMMQQWRGQIHGSEEESAEIDMIHAFNDLTSKVNGRVAFGTSHREVEEVIVLMREMQKLATAATLDAPILWYLPTRRNLHVRRLNKQLRSKIMSIMQARLAADGADRRGGRGGAVSGGGDLLGLLLEAWTPQPQQHGNGGETLTTDEVIDECKTFFAAGQETTATLLVWAMFLLAVHPEWQDKVREEVVREFCTGDDGEVPHADVLAKLKLLYMVLLETSRLYPPIVYIQRRAAWDAVLGGIKVPQGTVISIPIAMLHRDKQVWGPDADEFNPMRFEHGLTKAAKDPKALLSFSLGPRVCTGQSFGIVEVQVVMAMILRRFSFSLSPKYVHKPKYLLSLTPKLGMPLIVRNVDG

SEQ ID NO: 2306 - protein, 524 aa, Hordeum vulgare subsp. vulgare
MAALQLAALLALLLALWHLVWRPRAVARSFARQGVRGPPYTFLAGSLPEAKRLIMAGRRGVPPLDAGCHDIMPILLPQFHRWVADYGKTFLFWVGPIPAVFSTDLQLIKQVLTDRTGLYQKDFMIPVLKSLFGNGVILINGDDWKRHRKVVLPAFNHEKIKSMSAVTAEVTRQMVHQWREQIHQSNIDKKGVEIDMIHAFNDLTAKINGRVAFGTSHRDVEEVIVLMREMQKIATASTLDAPILWYLPTRRNLHVRRLNKQLRSKIMSIMQARLAADGAKYGRGDTMGCGDGLLGLLLEAWTPHGQGSGGDTLTTDEVIDECKTFFAAGQETTATLLVWTMFLLAVHPQWQDKVREEVLREFPGGDDDDVMPNADILTKLKLLNMVLLETSRLYPPIVYIQRRAASDSVLGGIKVPQGTIISIPIGMLHRDKEVWGPDADEFNPIRFEHGVTKAAKDSKALLSFSLGPRVCTGQNFGIVQVQVVMAMILSKFSISLSPEYVHKPKYLLSLTPRLGMPIILRNLL

SEQ ID NO: 2307 - protein, 444 aa, Zea mays
  misc_feature (103)..(103): Xaa can be any naturally occurring amino acid
MVRKETAMRLPPQHQGLEVKIPSFFRCPISLDVMRSPVSLCTGVTYDRASIQQWLDSGNTTCPATMLPLPSTDLVPNLTLRSLIAHWAASAASCSPTAAGGAXVADSSSARTSSPASLVRQVASSGVDPSPALRELAAYLSDDDVDDFEKNALVGAGRAAETVASVLRRRAEETGVEGVEAATRVLALILASDGIDDSNKKRVATGLAADAAASTASLARVMRGGSDLEARIDAAKLAELLLANAAGEAKAAATKSSELLAELVRLVGTVDETGALDRNAVDAGLSCLAAICGSCRAARGEMVRLGAVPAAVRALRASTESGASAKALRVLESAVGCAEGRAALCANAEDAIPAVVGKMMKAGRDGAEAAVAVLWAVCHRYQDRRAADAAAAAEGGLTRLLLLMQSGCSPAARQMALELLKIYRVNAKSCLAGYDSKTTHIMPF

SEQ ID NO: 2308 - protein, 471 aa, Hordeum vulgare subsp. vulgare
GSPSSLPLCCRFHARTSPPRKNGAEQVAIAMVRKDKTTTGMRLPPQHQGLEVKIPSFFRCPISLDVMRSPVSLCTGVTYDRASIQRWLDSGNTTCPATMLPLPSTDLTPNLTLRSLISHWSASAASCSPVAGSAAFFAGPSPAALVRQVASSGADPSAALRELAAYLSDDDVDEFEKNALVGAGSAAETVAAVLRRKGEQISVAGVEAAVRVLAAIVALDGIEDANKRRVAAGLAVDASASTASLARVLRGGSGLEARIDAARLAEFLLANAGADAKVAVAESSELVTELVRLVGPVDEKGGLDKKAMDTGLSCLAAIAGSRRSARADMVRLGAVPAAARALHATTEPSSSAKALRILESAVGCAEGRAALCKDAEQTVPAVLDKMMKSGRDGAEAAVAVLWAVCHKYKDRRAADAAAASEGGLTRLILLLQSGCSAAARQMALELLKIYKVNAKSCLAGYDSKTTHIMPF

SEQ ID NO: 2309 - protein, 423 aa, Sorghum bicolor
MVRKETAMRLPPQHQALEVKIPSFFRCPISLDVMRSPVSLCTGVTYDRASIQRWLDSGNTTCPATMLPLRSTDLVPNLTLRSLIAHWAASAASCSPTATDNSSATRTSSPASLVRQVASAGVDPSPALRELAAYLSDDDVDDFEKNALLGAGRAAETVASVLRRRPEETGVEGVEAATRVLAKILASDGIDDANKKRVATGLTADAAASAASLARVMRRGSGGLEARVDAARLAELLLANAADEAAKAAVAESSELLAELVRLVGTVDEKGALERNAVDAGLSCLAAAICVCGGSRRAWARGEMVRLGAVQAAVRALRAATTEPGASAKALRVLESAVGCAEGRAALPAVAVLWAVCHRYRDRRAADAAAAAEGGLTRLLLLMQSGCSPAARQMALELLKIYRVNAKSCLAGYDSKTTHIMPF

SEQ ID NO: 2310 - protein, 451 aa, Oryza sativa Japonica Group
MGRKESSTTTTTTAAAAAAATRSMRLPPQHQALEVKIPSFFRCPISLDVMRSPVSLCTGVTYDRASIQRWLDSGNTTCPATMLPLPSTDLVPNLTLRSLISHWSSSSPATSGDASVTSSPAGLVRQVASPDADPSAALRQLAAYLSDDDVDEFEKNALVGAGGAAEAVASVLRRKGEREVGVEGCEAAVRVLAAVVAMDGVEDANKRRVAAGLAADAAASAASLARVMRGASGLEARVDAARLVEFLLANAADEAREAVAESAELVAELVRLVGPADEKGSLDARAVGAGLSCLATISRSRRAARAEMVRAGTVRAAARALRATAADPAASARALRVLESAVGCAEGRAALCEDAEQAVPAVVGRMMKAGRDGAEAAEAVLWAVCHKYRDRRDADAAEASEGGLTRLLLLLQSGCSPAARQMALELLKIYKVNAKSCLAGYDSKTTHIMPF

SEQ ID NO: 2311 - protein, 505 aa, Oryza sativa Japonica Group
MDPSSSSSSSSPFSTPFHSISSTSTLRPQLAIAIVATPSVCGRNEIEQQPSMVRKEMGGGGGRLAAEYQGLEVKVPTFFRCPISLDVMRSPVSLCTGVTYDRASIQRWIDSGNTTCPATMLPLPSTDLVPNLTLRRLIALWASTAAPSSPAAPSAVGPTPAAAAAELLRRVAAPGVDPCPALRKLAAFLSDDDVDEFDKNALARAGGAAETVASVLRRRGKGDDDDGGVEAVEAAVRVLAVLATSDCIEEENRRRVAAALAAGGAAPSVAASLARVMRSGSGLEARVDAARLVESLLRDGARGATAPGVRAAVAESEELVAELIRLVGPTDEKGSLDAQAVDAGLSCLAAIVAATRRARAEMVRLGAVPAAVRVLATDHHGGSHAQALRVLEAAVGCAEGRAAVCEVAEAAIPAVVSRMMRCGGMGGAEAAVSVLWAVCHRYRDRRAVEAAAASEGGLTKLLLLMQSGCSPAARQMASELLKMFKVNAKSCLAGYDSKTTHIMPF

SEQ ID NO: 2312 - protein, 465 aa, Oryza sativa Indica Group
MVRKEMGGGGGRLAAEYQGLEVKVPTFFRCPISLDVMRSPVSLCTGVTYDRASIQRWIDSGNTTCPATMLPLPSTDLVPNLTLRRLIALWASTAAPPSSSSSPVAASAVGPTPAAAAAELLRRVGAPGVDPCPALRKLAAFLSDDDVDEFDKNALARAGGAAETVASVLRRRGKGGDDGDDDAGGVEAVEAAVRVLAVLATSDCIEEENRRRVAAVLAAGGAAPSVAASLARVMRSGSGLEARVDAARLVESLLRDGAGAATPGVRAALAESEELVAELIRLVGPADGKGSLDARAVDAGLSCLAAIVAGTRRARAEMVRLGAVPAAVRVLATDQRGVGGSHSHAQALRVLEAAVGSAEGRAAVCEVAEAAIPAVVSRMMRCGGMGGAEAAVSVLWAVCHRYRDRRAVEAAAASKGGLTKLLLLMQSGCSPAARQMASELLKMFKVNAKSCLAGYDSKTTHIMPF

SEQ ID NO: 2313 - protein, 286 aa, Zea mays
MHIREEEATPSTVTGIMSTLTSAGQQKLKEPISPGGGSASVAGSAAERNNGGRGKGKTEIKRIENTTNRQVTFCKRRNGLLKKAYELSVLCDAEVALIVFSSRGRLYEYANNSVKGTIERYKKATSDNSSAAGTIAEVTIQHYKQESARLRQQIVNLQNSNRALIGDSITTMSHKELKHLETRLDKALGKIRAKKNDVLCSEVEYMQRREMELQNDNLYLRSRVDENERAQQTANMMGAPSTSEYQQHGFTPYDPIRSFLQFNIVQQPQFYSQQEDRKDFNDQGGR

SEQ ID NO: 2314 - protein, 554 aa, Zea mays
MASTCLAPASLSTPLLSDSIARAPAANGHATNHRHHHHDDSDGAAAVSVCDDGGGDPFAFLSEDRPPRDRGPSPADPFRNGTPAWGGGVYAWSRTLLLLPVALVRLALFGLSIAIGYAATWVALRGWADTHGRPRVGGGPMPAWRRRLMWITRISARCILFSFGYHWIRKKGRPARRELAPIVVSNHISYIEPIFFFYELFPTIVSSESHDALPFVGTIIRAMQVIYVDRFSPASRKAAVNEIKRKAACNSFPRVLLFPEGTTTNGRFLISFQHGAFIPGYPVQPVVVRYPHVHFDQSWGNISLLKLMFKMFTQFHNFMEVEYLPVVYPPEIKQENALHFAEDTSYAMARALNVLPTSYSYGDSMIMARAIEAGKVNGSNYMVEMAWVKDIYGVSTAEAMDLLEHFLAMNPDNDGRVKAQDFWAHFGLDCSPLCKKIFHYFDLGIKESITFRQFLVGCAHLRKQPLFQGACETAFEKCRDPETSEISRAQLADVLRLSMLLPSGDRMLDLFKTFDIDGDEKISKDDFMTCLGRFPFLIAFFAAPINGEVYIEIV

SEQ ID NO: 2315 - protein, 555 aa, Sorghum bicolor
MASTSPTPASLSTPLLSDSIAPAANGHATNHRHSHHHDDSDGAAAAASVCCDDGGDPFAFLAEDRPPRDRGAPSPADPFRNGTPAWGGGAYAWARTLLLLPVAAVRLVLFGLAIAIGYAATWVALRGWANTHGRPREGGGPMPAWRRRLMWITRISARCILFSFGYHWIRKKGRPAPRELAPIVVSNHISYIEPIFFFYELFPTIVSSESHDALPFVGTIIRAMQVIYVDRFSPASRKAAVNEIKRKAACNSFPRVLLFPEGTTTNGRFLISFQHGAFIPGYPVQPVVVRYPHVHFDQSWGNISLLKLMFKMFTQFHNFMEVEYLPVVYPPEIKQENALHFAEDTSYAMARALNVLPTSYSYGDSMIMARAVEAGKVNCSNYMVEMAWVKDIYGVSTAEAMELLEHFLAMNPDNDGRVKAEDFWAHFGLDCSPLCKKIFHYFDLGIKESITFRQFLVGCAHLRKQPLFQGSCETAFEKCRDPETSEISRAQLADILRSSMLLPSDDKMVELFKTFDIDGDEKISRDDFMTCLGRFPFLIAFFAARINGEVYIEIV

SEQ ID NO: 2316 - protein, 555 aa, Hordeum vulgare subsp. vulgare
MASRNHGPTPASSLATPLLSDSITPTTPTRAANGHARGHDGHDDPCAAASVCDGGGDPFAFLSEDRRPPRPPGPSPADPFRNRTPALGGLYGWVRTLLLAPVAVVRLVLFGLSIAIGYAATWVALRGWTDSRERPREGAGPMPAWRRRLMWVTRLSARCILFSFGYHWITRKGRPAPRELAPIVVSNHVSYIDPIYFFYELFPTIVSSDSHDAIPFVGTIIRAMQVIYVDRFSPASRKSAVNEIKRKAAGNSFPRVLLFPEGTTTNGRFLISFQHGAFIPGYPVQPVVVRYPHVHFDQSWGNISLVALMFKMFTQFHNFMEVEYLPIVYPPEIKQENALHFAENTSFAMAHALNVLPTSYSYADSMIASRAEEAGKANCSSYMVEMAWVKEVYGVSTAEAMELLEHFLAMNPDSDGRVKAQDFWALFGLDCSPLCKKIFHYFDFENKESITFRQFLVGCAHLKKQPLFEGVCETAFEKCKAPGTSDISLAQLANALRSGMVPPADDGMLKLFEMFDIDDDDKISKDDFVGCLARFPFMIALFAGRINGEVYIEIV

SEQ ID NO: 2317 - protein, 556 aa, Oryza sativa Japonica Group
MASRNPSPASLSTPLLSDSISPTPTTNGHAGHHNHDDDDEESPTVCGGDGGGGGDPFAFLSEDRPAWWSPRGVSPADPFRNGTPGWCGAYELVRALVCAPVAAARLVLFGLSIAVGYAATWVALRGWVDVRERAAQEGAGPMPAWRRRLMWITRISARCILFSFGYHWIRRKGKPAPRELAPIVVSNHVSYIEPIYFFYELFPTIVSSDSHDSIPFVGTIIRAMQVIYVDRFSPASRKSAVNEIKRKAACNSFPRVLLFPEGTTTNGRFLISFQHGAFIPGYPVQPVIVRYPHVHFDQSWGNISLGKLMFKMFTQFHNFMEVEYLPVVYPPEIKQENALHFAENTSYAMAHALNVIPTSYSYGDSMIMARAVEDGKVNCSNYMVEMAWVKETYGVSTSEAMALLEDFLCMSPDKDGRVNAQDFWAHFGLNCTPLCKKIFQYFDFEAKESITFRQFLIGCAHLRKQPSFQDACETAFERCRNPLTSHIGREQLADVLRSSMLELMTDNGMMKLFKTLDVDDDDGISKDDLMASLRKLPFMIALFAGRINGEVYIEIV

SEQ ID NO: 2318 - protein, 556 aa, Oryza sativa Indica Group
MASRNPSPASLSTPLLSDSISPTPTTNGHAGHHNHHDDDEESPTVCGGDGGGGGDPFAFLSEDRPAWWSPRGVSPADPFRNGTPGWCGAYELVRALVCAPVAAARLVLFGLSIAVGYAATWVALRGWVDVRERAAQEGAGPMPAWRRRLMWITRISARCILFSFGYHWIRRKGKPAPRELAPIVVSNHVSYIEPIYFFYELFPTIVSSDSHDSIPFVGTIIRAMQVIYVDRFSPASRKSAVNEIKRKAACNSFPRVLLFPEGTTTNGRFLISFQHGAFIPGYPVQPVIVRYPHVHFDQSWGNISLGKLMFKMFTQFHNFMEVEYLPVVYPPEIKQENALHFAENTSYAMAHALNVIPTSYSYGDSMIMARAVEDGKVNCSNYMVEMAWVKETYGVSTSEAMALLEDFLCMSPDKDGRVNAQDFWAHFGLNCTPLCKKIFQYFDFEAKESITFRQFLIGCAHLRKQPSFQDACETAFERCRNPLTSHIGREQLADVLRSSMLELMTDNGMMKLFKTLDVDDDDGISKDDLMASLRKLPFMIALFARRINGEVYIEIV

SEQ ID NO: 2319 - protein, 510 aa, Oryza sativa Japonica Group
MASRNPSPASLSTPLLSDSISPTPTTNGHAGHHNHDDDDEESPTVCGGDGGGGGDPFAFLSEDRPAWWSPRGVSPADPFRNGTPGWCGAYELVRALVCAPVAAARLVLFGLSIAVGYAATWVALRGWVDVRERAAQEGAGPMPAWRRRLMWITRISARCILFSFGYHWIRRKGKPAPRELAPIVVSNHVSYIEPIYFFYELFPTIVSSDSHDSIPFVGTIIRAMQVIYVDRFSPASRKSAVNEIKRKAACNSFPRVLLFPEGTTTNGRFLISFQHGAFIPGYPVQPVIVRYPHVHFDQSWGNISLGKLMFKMFTQFHNFMEVEYLPVVYPPEIKQENALHFAENTSYAMAHALNVIPTSYSYGDSMIMARAVEDGKVNCSNYMVEMAWVKEIFQYFDFEAKESITFRQFLIGCAHLRKQPSFQDACETAFERCRNPLTSHIGREQLADVLRSSMLELMTDNGMMKLFKTLDVDDDDGISKDDLMASLRKLPFMIALFAGRINGEVYIEIV

SEQ ID NO: 2320 - protein, 701 aa, Zea mays
MEPPRKNKSSGMQVKEEVKLEDGNDLLVKRRRTELPGSIVQLQQKIEVFDMENKVPDGLSVEDSTGKDPMDVLTRYAAQNSGQGNSCSNEPAISRLTKICKAIGWKEPSYDFEEQGPPHNRMTTQFHLLDPHYDEHHRGRLIAEGQVLPVLRSRTHDRFLDMRYDDRYTPLLERAGLDVVSFQVRRGLPTINIAAITALVDRWRPETHTFHLPCGEMTVTLRDSQKQLGLSIRGRPVTGQAAPGGWRQRVEAFLGREVPTDTPGSHTSGVSLAWLRQSFGECPAAADDQTVSYYCRAWVLHLFGSVLFPDATGDSASWMFLPCLTDWDMAGGYSWASAVLSFLYRQLCEACRRTAKNASLGGCVYLLQLWMWSHLPVGRPIEFAPRPWFDVVGLRLRPTAAYRWDQVQAPFARHQRAYVEYSNELDALTPSMVSWQPYDEPPLPHIQLSSACTTDEDIYLLRCPLICFYAVEYHLPHRVARQFGLRQEFPVEPFSTSVELHKFDRQKQKKITDFEAHHQVYIDEWDQMHDLLYQSDQSHTNYNFREYISWYVGVTRCKLKGQWTSADYAELESSDDEDTSYDLVTRHGTHVEAAPILDRVGNSMMQSVVDIEHFSKTTSDDRTLAFLSRLSRRLRCAAARCGCRISAVVNIQHTLQHHGDTSLGLGAITVAQGSSRTTRDAFASHKEDEDDIKIPLDKIGP

SEQ ID NO: 2321 - protein, 593 aa, Zea mays
MLPNNVSASPVLYATAVVGAVPEQVWGMGLCRGDANASSCLACLTQAFQDLPNDCSYNKDAAIYYDPCTLHYSDVHTLADDDTGPTTMSYNINNNANVTSDPARFERLLAALVNATAEHAASNSTRRFATGEADADFDRQFPKVYALAQCTPDQTPAQCRKCLAGLISQSLDGFQNNIGGRVLWVNCTWRYETSPFFNGPAMVRLASSSSPPAAAAAGGGERKYSVFIVVLAVVLPTLAALNLVFCFCFWRRPAPQAKQSQPMYSTEAEDVETVDSMMIDVSALRAATGNFDESNKLGEGGFGAVYKGVLPDGDEIAVKRLSKSSTQGVEELKNELALVARLRHRNLVRLVGVCLEQQERLLVYEFVPNRSLDLVLFGTDTREPLSWEQRYRIINGIARGLQYLHEDSQLKVVHRDLKASNILLDVEMNPKISDFGLARIFGRDQTQAVTSRVVGTYGYLAPEYLMRGNYSVKSDAFSFGVMVLEIVTGRKNNGSSHKSGDLLTTVWEHWEAGTVAELVDPSLGGSFPEGDVLRCIHIGLLCVQGDPAARPVMSSVVTMLGTDTVTLQAPSKPGFFARKSGTSTTVSADDGSI

SEQ ID NO: 2322 - protein, 648 aa, Zea mays
MAPHLLAVAVAVAAIIATVSLLAPGAAAYPWPVCGTSNDFEPNSTYQANLNLLAAMLPNNVSASPVLYATAVVGAVPEQVWGMGLCRGDANASSCLACLTQAFQDLPNDCSYNKDAAIYYDPCTLHYSDVHTLADDDTGPTTMSYNINNNANVTSDPARFERLLAALVNATAEHAASNSTRRFATGEADADFDRQFPKVYALAQCTPDQTPAQCRKCLAGLISQSLDGFQNNIGGRVLWVNCTWRYETSPFFNGPAMVRLASSSSPPAAAAAGGGERKYSVFIVVLAVVLPTLAALNLVFCFCFWRRPAPQAKQSQPMYSTEAEDVETVDSMMIDVSALRAATGNFDESNKLGEGGFGAVYKGVLPDGDEIAVKRLSKSSTQGVEELKNELALVARLRHRNLVRLVGVCLEQQERLLVYEFVPNRSLDLVLFGTDTREPLSWEQRYRIINGIARGLQYLHEDSQLKVVHRDLKASNILLDVEMNPKISDFGLARIFGRDQTQAVTSRVVGTYGYLAPEYLMRGNYSVKSDAFSFGVMVLEIVTGRKNNGSSHKSGDLLTTVWEHWEAGTVAELVDPSLGGSFPEGDVLRCIHIGLLCVQGDPAARPVMSSVVTMLGTDTVTLQAPSKPGFFARKSGTSTTVSADDGSI

SEQ ID NO: 2323 - protein, 606 aa, Zea mays
MLPNNVSASPVLYATAVVGAVPEQVWGMGLCRGDANASSCLACLTQAFQDLPNDCSYNKDAAIYYDPCTLHYSDVHTLADDDTGPTTMSYNINNNANVTSDPARFERLLAALVNATAEHAASNSTRRFATGEADADFDRQFPKVYALAQCTPDQTPAQCRKCLAGLISQSLDGFQNNIGGRVLWVNCTWRYETSPFFNGPAMVRLASSSSPPAAAAAGGGERKYSVFIVVLAVVLPTLAALNLVFCFCFWRRPAPQAKQSQPMYSTEAEDVETVDSMMIDVSALRAATGNFDESNKLGEGGFGAVYKPDSCWRTGVSFVQGVLPDGDEIAVKRLSKSSTQGVEELKNELALVARLRHRNLVRLVGVCLEQQERLLVYEFVPNRSLDLVLFGTDTREPLSWEQRYRIINGIARGLQYLHEDSQLKVVHRDLKASNILLDVEMNPKISDFGLARIFGRDQTQAVTSRVVGTYGYLAPEYLMRGNYSVKSDAFSFGVMVLEIVTGRKNNGSSHKSGDLLTTVWEHWEAGTVAELVDPSLGGSFPEGDVLRCIHIGLLCVQGDPAARPVMSSVVTMLGTDTVTLQAPSKPGFFARKSGTSTTVSADDGSI

SEQ ID NO: 2324 - protein, 672 aa, Sorghum bicolor
MAHHLLPLLAVLAAAAALLVAPPVAAYPWPVCGQSNYFKPNGTYQAHLDFVAATLPKNASASRSLFATTVVGTIPEQLWAMALCRGDVNATDCFTCLTQAFRDLPNDCSYDMDGTIYYDQCILHYSDVLTFPGAGTGPTTDTYAVNFNTNVTSDPAQFTSLLAALINATVAYAADNSTRLFATGEADFNQEFPKVYSLAQCTPDQTPAHCRNCLAKAVAKYQGSFYDYIGGRVLGINCSYRYEIVSFFNGPAMVRLASPSSGAPASAPAPAPAPASALQPTVGTPPAAGKGGKEYGIPVVIVAVLLPSIAALNLVAWLCYWKRQRPIEQAKQKYPMYSAGAEDTETVDSMMMDVSTLRAATGDFDETNKLGEGGFGAVYKGVLPDGDEIAVKRLSKSSTQGVEELKNELALVAKLKHKNLVRLIGVCLEQQERLLVYEFVPNRSLDLILFDTENHKREQLDWGQRYTIINGIARGLQYLHEDSQLKVVHRDLKASNILLDANMSPKISDFGLARIFSRDQTQAVTNRVVGTYGYMAPEYMMRGNYSVKSDAFSFGVMVLEIVTGRKNNSNNDGTQQSGDLLTTVWEHWETGTVVELVDPNMGGGSIPEDDVLRCIHIGLLCVQGDPAARPVMSSVVVMLGSNTVTLQAPSKPAFCARNNSNTAVSSTAPLQG

SEQ ID NO: 2325 - protein, 656 aa, Sorghum bicolor
MAHHALSLPLATILAVAVALLLARRAAGYPWYVCGSSSNFVANSTYQAHLDLVTATLPKNASSSPDLFATAVVGTIPEQLWAMGLCRGDVNASTCFNCLTQGFQEVPDDCPYDRDASIYYDFCTVRYSDVHTLRNDDDTGPMINTYVETNDGNVTAADAARFKRLLADLIDATVEYAANSSRRFATGEADFNGQETTIPKVYSVAQCTPDQTPAECHRCLERMVEATLEAFNGSIGGRVLGVDCTYRYETAPFYNGQAMVRLAQPSSSRAPAPAPALQPTAAGEGGRKHRVSWVVLAVVLPTLAAMNLVACLYLRRRRRLLIGQAKHQKPPMYYTEAEDTEMVDSMMMDVSTLRAATGDFNESNKLGEGGFGAVYKGVLPDGEEIAVKRLSSSSSQGVEELKNELALVAKLKHRNLVRLIGVCLEQQERLLVYEFVPNRSLDLILFGTDNREQQLSWEQRYKIINGIARGLQYLHEDSQLKVVHRDLKASNILLDESMNPKISDFGMARIFGQEQTQAVTSRVVGTYGYMAPEYMMRGNYSVKSDAFSFGVMVLEIVTGRKNSNEGCNLLTTVWMHWEARKMAELVEPSMGNSFPEGDVLRCVHIGLLCVQADPAARPVMSSVVMMLGSDTVTLQVPSKPGFFARNNSANTAASTV

SEQ ID NO: 2326 - protein, 667 aa, Hordeum vulgare subsp. vulgare
MAHHRVLSVVIVAAALLASPAAGVYPWTICGLSTYAAKSQYLANINRIGAMLPRNASQSPDLFATALVGAVPQQVWALALCRGDANASYCFTCLDQAFQDLPNACPYSRDSTIYYDSCVLHYSNIQSRPDDDTTYNPTRPLRNNFNATAEPARFQRVVAALLNATVNYAVTNSTRLYASGEADFDRELPKVYAWAQCTPDLSPERCRDCLAMNIKTSAPLFTDAIGARILGMRCSYRYETTPFFNGPVMVRLAGTSPSSGAPASAPAMVPNVLTPPAAAGEGRKYSVPGMVLIVLLPTAAAINIVVCFLLWRRRRPLAEAKQPYTGYSGEAEDIESVDSMLIDISTLRAATGDFAEANKLGEGGFGAVYKGTLPDGEEIAVKRLSKSSTQGVKELKNELALVAKLKHKNLVRLVGVCLEHEERLLVYEFVPNRSLDKILFDTEKREQLDWGKRYKIINGIARGLQYLHEDSQLKVVHRDLKASNILLDTNMNPKISDFGLARLFGRDQTQAVTSRVVGTYGYMAPEYVMRGNYSVKSDAFSFGVMVLEIVTGRKNNDCYNSQQSEDLLTTIWEHWTAGTVLATMDPSIGSSFSESDVRRCVHVGLLCVQGNPAERPVMSSVVMMLGGETVSLSAPSKPAFYARNAGADHSVVIASTVSTVSLQDGPA

SEQ ID NO: 2327 - protein, 556 aa, Oryza sativa Indica Group
MAFKREEKKEEPETPRYRDRAKERREDQNPDYEPTELGSFHAVAPPGADLRLADAHKISIEKSKYLGGDLEHTHLVKGLDYALLHKVRSEIEKKPEAEDGKDTQSRSTKEDQAVSFRTAAAKSVYQWIIKPQSIIKSNEMFLPGRMAFIYNMEDGLTNDIPTTLHRSKADCSVPEEMVTVSVDGSVLDRIAKIMSYLRLGSSGKVLKKKKKERDTKGKNSLASGDYDEVARPGQTNGSALKHQFEKDMPPPPPPRNNNLSKNEKPSVPVARADEDDIFVGDGVDYSVPNKEMSQSPVSEDMDESPHNHQKQSYFTEEKPIYGPIPPSDPAQAWPQPNAYDAIQAQMVAAGYQGEWSGYQYGEQQMAYPEQYMQQSAQDCDVLADPNITQDPRLMTQADKDRGLGSVFKRDDERLKQLREKDAREKDPNFISDSYSECYPGYQEYNHEIAGSDEEDDLSKMDMGGRAKGRLHRWDFETEEEWATYNDQKEAMPKAAFQFGVKMQDGRKTRKQNKDQKLTNDLHKINKILARKKGDKDGGDDGGHYDDDMPSGKKQRA

SEQ ID NO: 2328 - protein, 567 aa, Oryza sativa Japonica Group
MSSKKNYYKEKMMRRKEEKKEEPETPRYRDRAKERREDQNPDYEPTELGSFHAVAPPGADLRLADAHKISIEKSKYLGGDLEHTHLVKGLDYALLHKVRSEIEKKPEAEDGKDTQSRSTKEDQAVSFRTAAAKSVYQWIIKPQSIIKSNEMFLPGRMAFIYNMEDGLTNDIPTTLHRSKADCSVPEEMVTVSVDGSVLDRIAKIMSYLRLGSSGKVLKKKKKERDTKGKNSLASGDYDEVARPGQTNGSALKHQFEKDMPPPPPPRNNNLSKNEKPSAPVARADEDDIFVGDGVYYSVPNKEMSQSPVSEDMDESPHNHQKQSYFTEEKPIYGPIPPSDPAQAWPQPNAYDAIQAQMVAAGYQGEWSGYQYGEQQMAYPEQYMQQSAQDCDVLADPNITQDPRLMTQADKDRGLGSVFKRDDERLKQLREKDAREKDPNFISDSYSECYPGYQEYNHEIAGSDEEDDLSKMDMGGRAKGRLHRWDFETEEEWATYNDQKEAMPKAAFQFGVKMQDGRKTRKQNKDQKLTNDLHKINKILARKKGDKDGGHDGGHYDDDMPSGKKQRA

SEQ ID NO: 2329 - protein, 564 aa, Sorghum bicolor
MSSKKNYYKEKMMRRKEEKKEEPETPRYRDRAKERREDQNPDYEPTELGSFHAVAPPGTDLRLADAHKISIEKSKYLGGDLEHTHLVKGLDYALLHKVRSEIEKKPDAEDGKDAKSRATKEDQAISFRTATLQSVYQWIIKPQSIIKENELFLPGRMSFIYNMEEGVTNDIPTTLHRSKADCPIPEEMVTVSVDGSVLDRIAKIMTYLRLGSSGKVLKKKKKERDIKGKSNLASGDYDESVKPSQINGSTLKHQSDMPPPPAPPPRNNNFNGKEKQPVPVSRADDDDIFVGDGVDYSVPNKEMSQSPVSDMDESPHNHQKQSNFTEPMYGPVPPSEPAQAWQQQNGYDAVQAQMAAAGYQGDWSSYVYAEQQLGYPEQYVQQSTQEYDVLADPSLSQDPRFMTQADKDRGLGSVFKRDDQRLNQLREKDARERDPNFISDSYSECYPGYQEYNNEIAGSDDEDDLSKMDMGGRAKGRLHRWDFETEEEWAKYNDQKEAMPKAAFQFGVKMQDGRKTRKQNKDQKLTNDLHKINKILARKKGEKDGAEDGGHYDDDLPSSKKQRG

SEQ ID NO: 2330 - protein, 543 aa, Oryza sativa Indica Group
MSSKKNYYKEKLMRRKEEKKEEPETPRYRDRAKERREDQNLDYEPTELGSFHAVAPPGADLRLADVHKISIEKSKYLGGDLEHTHLVKGLDYALLHKVRSEIEKKPDAEDGKDTQTRSTKEDQAVSFRTATAKSVYKWIIKPQSIIKSNEMFLPGQMAFIYNMEMVTVSVDGSVLDRIAKIMSYLRLGSSGKVLKKKKKERDTKGNNSLASGDYDEVARPGQTGSSLKHQFQKDMPPPPPPRNNNLSKNEEQSIPVARADEDDIFVGDGVDYSVPNKEMSHSPVSEDMDESPHNHQKQSYFTEEKPVYGPIPPSDPAQAWPQTNGYDAIQAQMVAAGYQGEWSGYQYGEQQMPYPEQYMQQSTQDYDVLADPNIAQDPRLMTQADKDRGLGSVFKRDDERLKQLREKDSREKDPNFISDSYSECYPGYQEYNHEIAGSDEEDDLSKMDMGGRAKGRLHRWDFETEEEWAKYNDQKEAMPKAAFQFGVKMQDGRKTRKQNKDQKLTNDLHKINKILARKKGDKDGGDDGGHYDDDLPSGKKQRA

SEQ ID NO: 2331 - protein, 565 aa, Zea mays
MSSKKNYYKEKLMRRKEEKKEEPETPRYRDRAKERREDQNPDYEPTELGSFHAVAPPGNDLRLADAHKISIEKSKYLGGDLEHTHLVKGLDYALLHKVRSEIEKKPEAEDGKDTKSRAAKEDQAVSFRTATAKSVYQWIIKPQSIIKENELFLPGRMSFIYNMEEGVTNDIPTTLHRSKADCPVPEEMVTVSVDGSVLERIAKIMTYLRLGSSGKVLKKKKKERDIKGKSNLASGDYGESVKPSQTNGSTLKHQSDMPPPPAPPPRNNNFNGKEKQPVPVSREDDDDIFVGDGVDYLVPNKEMSQSPVSDMDESPHNHQKQSNFTEPLYGPVPPSESAQAWQQPNTYDAAVQAQMAAAGYQGDWSSYVYAEQQLGYPEQYVQQSTQEYDVLADPSISQDPRFMTQADKDRGLGSVFKRDDQRLNQLREKDARERDPNFISDSYSECYPGYQEYNNEIAGSDDEDDLSKMDMGGRAKGRLHRWDFETEEEWAKYNDQKEAMPKAAFQFGVKMQDGRKTRKQNKDQKLTNDLHKINKILARKKGEKDGAEDGGHYDDDLPSSKKQRG

SEQ ID NO: 2332 - protein, 565 aa, Zea mays
MSSKKNYYKEKLMRRKEEKKEEPETPRYRDRAKERREDQNPDYEPTELGSFHAVAPPGNDLRLADAHKISIEKSKYLGGDLEHTHLVKGLDYALLHKIRSEIEKKPEAEDGKDTTSRAAKEDQAVSFRTATAKSVYQWIIKPQSIIKENELFLPGRMSFIYNMEEGVTNDIPTTLHRSKADCPVPEEMVTVSVDGSVLERIAKIMTYLRLGSSGKVLKKKKKERDIKGKSNLASGDYGESVKPSQTNGSTLKHQSDMPPPPAPPPQNNNFNGKEKQPVPVSREDDDDIFVGDGVDYLVPNKEMSQSPVSDMDESPHNHQKQSNFTEPLYGPVPPSESAQAWQQPNTYDAAVQAQMAAAGYQGDWSSYVYAEQQLGYPEQYVQQSTQEYDVLADPSISQDPRFMTQADKDRGLGSVFKRDDQRLNQLREKDARERDPNFISDSYSECYPGYQEYNNEIAGSDDEDDLSKMDMGGRAKGRLHRWDFETEEEWAKYNDQKEAMPKAAFQFGVKMQDGRKTRKQNKDQKLTNDLHKINKILARKKGEKDGAEDGGHYDDDLPSSKKQRG

SEQ ID NO: 2333 - protein, 536 aa, Oryza sativa Japonica Group
MSSKKNYYKEKLMRRKEEKKEEPETPRYRDRAKECREDQNLDYEPTELGSFHAVAPPGADLRLADVHKISIEKSKYLGGDLEHTHLVKGLDYALLHKVRSEIEKKPDAEDGKDTQTRSTKEDQAVSFRTATAKEDGLTNDIPTTLHRSKADCAVPEEMVTVSVDGSVLDRIAKIMSYLRLGSSGKVLKKKKKERDTKGNNSLASGDYDEVARPGQTGSSLKHQFQKDMPPPPPPRNNNLSKNEEQSIPVARADEDDIFVGDGVDYSVPNKEMSHSPVSEDMDESPHNHQKQSYFTEEKPVYGPIPPSDPAQAWPQTNGYDAIQAQMVAAGYQGEWSGYQYGEQQMPYPEQYMQQSTQDYDVLADPNIAQDPRLMTQADKDRGLGSVFKRDDERLKQLREKDSREKDPNFISDSYSECYPGYQEYNHEIAGSDEEDDLSKMDMGGRAKGRLHRWDFETEEEWAKYNDQKEAMPKAAFQFGVKMQDGRKTRKQNKDQKLTNDLHKINKILARKKGDKDGGDDGGHYDDDLPSGKKQRA

SEQ ID NO: 2334 - protein, 570 aa, Hordeum vulgare subsp. vulgare
MSSTQKKKSNYKEKMARRKEENKKEEPETPRYRDRAKERREDQNPDYEPTELGSFHAVAPPGADLRLEDAQKISIEKSKYLGGDLEHTHLVKGLDFALLNKVRSEIDKKPDAEDGKDAKARETKEDRAVSFRTAIAKSVYQWTVKQQQSMIKANDMFLPGRMAFIYNMEDGLNSDIPTTLHRSKADCPVPEEMVTVSVDGSVLDRIAKIMSYLRLGSSGKVLKKKKKERDTKGKNNLAGGVYNETVRPAQSDGSVQKYHSEKDMLPPPPPPPRKSNFSEKEKHSVPVARADDDDIFIGDGVDYAVPNKEMSQSPISEDMDESPRIHQNQSNLNEPVYGPIQPSEPAQAWQQPMDGYDAIQAQMAAAGYQGEWSGYQYAEQQLAYPEQYMQQGTLGYDVLVDPNISQDPKLMTQADKDKGLGSVFKRDDDRLKQLREKDAREKDPNFISDSYSECYPGYQGYNQEIAGSDDEDDLSKMDMGGRAKGRLHRWDFETEEEWAKYNDQKEAMPKAAFQFGVKMQDGRKTRKQNKDQKLSNDLNKINKILARKKGDKDGEGHYDDDLPSGKKQRA

SEQ ID NO: 2335 - protein, 566 aa, Vitis vinifera
MASSKRNHKEKIIRRKEEKPEEPELPKYRDRAKERREDQNPDYEPTELGSFHAVAPPGTVDLRSTDANKISIEHSKYLGGDVEHTHLVKGLDYALLHKVRSEIEKKPEVGDDADGKSRVSNEDQPLSFRTATAKSVYQWIVKPQTVVKSNEMFLPGRMAFIFSMEGGFSSDIPTTLHRSKADCPVPEEMVTVGVDGSVLDRIAKIMSYLRLGSSGKVLKKKKKERDVKGKISTVGNEFDEEKKPSKLDGGMSKNQTERESLPPPLPPRKNYVDSREKHGPSVARSEQDDIFVGDGVEYDIPSKDMSQSPVSEDMEESPRNKERISYLSEPAYGPVPPSEPQEWQQTNGYDAMQAQALAAGYQGDWQEYQYAEQMAYPEQYLQQNMQTYDVQAGMGIPQDPRFMTQEEKDRGLGSVFKRDDQRLQQLREKDAREKDPNFISESYSECYPGYQEYNREVVDSDDEDDLSKMDMGGRAKGRLHRWDFETEEEWATYNEQKEAMPKAAFQFGVKMQDGRKTRKQNKDQKLTNELHKINKILARKKMEKGEMNDDGGRYDDDSQPGKKLRI

SEQ ID NO: 2336 - protein, 579 aa, Sorghum bicolor
MGSRHGLRRGGQAAAVFSACPFLAFAVLLALPGLAAGDTHYYTFNVQMTNVTRLCVTKSIPTVNGQFPGPKLVVREGDRLVVKVHNHINYNVSFHWHGVRQLRNGWADGPAYITQCPIQGGQSYVYDFTITGQRGTLWWHAHFSWLRVHLYGPLVILPKRGEGYPFPRPYKEVPILFGEWFNADTEAVINQALQTGGGPNVSDAYTFNGLPGPTYNCSSKDTYKLKVKPGRTYMLRLINSALNDELFFGIANHTLTVVEADANYVKPFTVNTLVISPGQTMNVLLTTPPNPASPAYAMAIAPYTNTQGTFDNTTAAAVLEYAPTTTTLPPLPLPALPLYNDTGAVTNFSRNFRSLNSAQYPAQVPAAVDRHLLFTVGLGTDPCPSNQTCQGPNGTKFAASINNNSFFRPRTALLEAHYQRRYAGVLLADFPTTPPHPFNYTGTPPNNTFVQHGTRVVPLRFNTSVELVLQGTSIQGAESHPLHLHGYDFFVVGQGFGNFDPVNDPPNYNLADPVERNTISVPTAGWVAVRFLADNPGVWLMHCHFDVHLSWGLSMAWLVNDGPLPNQKMLPPPSDLPKC

SEQ ID NO: 2337 - protein, 582 aa, Zea mays
MGARRGLRRGQAAAAAFSACPFLALAVVLLALPELAAGDTHYYTFNVQMTNVTRLCVTKSIPTVNGEFPGPKLVVREGDRLVVKVHNHINYNVSFHWHGVRQLRNGWADGPSYITQCPIQGGQSYVYDFTVTGQRGTLWWHAHFSWLRVHLYGPLVILPKRGEGYPFPRPYKEVPILFGEWFNADTEAVINQALQTGAGPNVSDAYTFNGLPGPTYNCSSKDTYKLKVKPGRTYMLRLINSALNDELFFGIANHTLTVVEADASYVKPFTVSTLVISPGQTMNVLLTTAPSPASPAYAMAIAPYTNTQGTFDNTTAAAVLEYAPTTTRNNTLPPLPALPLYNDTGAVSNFSRNFRSLNSARYPARVPVAVDRHLLFTVGLGTDPCPYTNQTCQGPNGTKFAASVNNNSFFRPRTALLEAHYRRRYAGVLLADFPTAPPHPFNYTGTPPNNTFVQHGTRVVPLRFNASVELVLQGTSIQGAESHPLHLHGYNFFVVGQGFGNFDPVNDPPGYNLADPVERNTISVPTAGWVAVRFLADNPGVWLMHCHFDVHLSWGLSMAWLVNDGPLPNEKMLPPPSDLPKC

SEQ ID NO: 2338 - protein, 588 aa, Zea mays
MGARRGLRRGQAAAAAFSACPFLALAVVLLALPELAAGDTHYYTFNVQMTNVTRLCVTKSIPTVNGEFPGPKLVVREGDRLVVKVHNHINYNVSFHWHGVRQLRNGWADGPSYITQCPIQGGQSYVYDFTVTGQRGTLWWHAHFSWLRVHLYGPLVILPKRGEGYPFPRPYKEVPILFGEWFNADTEAVINQALQTGAGPNVSDAYTFNGLPGPTYNCSSKDTYKLKVKAREGRTCSRLHQLRPQTNELFFGIANHTLTVVEADASYVKPFTVSTLVISPGQTMNVLLTTAPSPASPAYAMAIAPYTNTQGTFDNTTAAAVLEYAPTPPPVATRNNTLPPLPALPLYNDTGAVSNFSRNFRSLNSARYPARVPAAVDRHLLFTVGLGTDPCPYTNQTCQGPNGTKFAASVNNNSFFRPRTALLEAHYRRRYAGVLLGDFPTAPPHPFNYTGTPPNNTFVQHGTRVVPLRFNASVELVLQGTSIQGAESHPLHLHGYNFFVVGQGFGNFDPVNDPPGYNLADPVERNTISVPTAGWVAVRFLADNPGVWLMHCHFDVHLSWGLSMAWLVNDGPLPNEKMLPPPSDLPKC

SEQ ID NO: 2339 - protein, 582 aa, Zea mays
MAVGRRLSPACLLLLRLTVALVVLTALPELAAARTRRYTFNVTMATVTRLCVTKSVPTVNGQFPGPRLVVREGDRLVVQVHNNINSNVTFHWHGVRQLRSGWADGPSYITQCPIRPGQSYAYDFRIVGQRGTLWWHAHFSWLRATLYGPLVILPPRGVPYPFPKPDRQVTLMLGEWFNADPEAVIKQALQTGGAPNVSDAYTFNGLPGPTYNCSSGDDTFRLRVRPGRTYLLRLVNAALNDELFFAVANHTLTVVQADASYVKPFAAATLVISPGQTMDVLLTASASAAPSSAFAIAVAPYTNTVGTFDNTTAVAVVEYGPHQSAAALRSLPLPALPRYNDTAAVANFSAMFRSLASARYPARVPRTVDRRFFFTVGLGADPCRSRVNGTCQGPNGTRFAASMNNVSFAMPRTTSLLQAHYQRRYSGVLAANFPAVPPTRFDYTGAPPNNTFVTHGTRVVPLSFNTTVEVVLQDTSVLGAESHPLHLHGYDFFVVGTGFGNYDATNDTARYNLVDPVQRNTVSVPTAGWVAIRFVADNPGVWIMHCHLDVHLTWGLAMAWLVNDGPLPNQKLPPPPSDIPRC

SEQ ID NO: 2340 - protein, 540 aa, Oryza sativa Japonica Group
MATVTRLCVTKSVPTVNGQFPGPKLVVREGDTLVIRVTNNINNNVTFHWHGIRQVRSGWADGPAYITQCPIRSGGSYVYRFTVTGQRGTLWWHAHFSWLRATLYGPLVILPPRGVAYPFPKPHREVPLLLGEWFNADPEAVIKQALQTGGGPNVSDAYTFNGLPGPTYNCSSSNDTFKLRVRPGKTYLLRLINAALNDELFFGVANHTLMVVQADASYVKPFAATALVISPGQTMDVLLTAAANNPPSRSFAIAVAPYTNTVGTFDNTTAVAVLEYYGAATSAAALRSLPLPSLPAYNDTGAVANFSASFRSLASAQYPARVPRTVDRHFFFAVGLGADPCQSPVNGTCQGPNNTRFAASMNNVSFVMPRTSLLQAHYQRRYNGVLAANFPAAPRTPFNYTGTPPNNTFVTHGTRVVPLSFNTTVEVVLQDTSILGAESHPLHLHGYDFYVVGTGFGNYDASNDTAKYNLVDPVQRNTISVPTAGWVAIRFVADNPGVWIMHCHLDVHLSWGLSMAWLVNDGPLPNQKLPPPPSDIPMCS

SEQ ID NO: 2341 - protein, 544 aa, Sorghum bicolor
MATVTRLCVTKSIPTVNGRFPGPRIVVREGDRLVVQVHNNINNNVTFHWHGVRQLRSGWSDGPSFITQCPIRPGQSYAYDFRIVGQRGTLWWHAHFSWLRATLYGPLVILPPRGVPYPFPKPHAEVPLMLGEWFNADPEAVIKQALQTGGGPNVSDAYTFNGLPGPTYNCSGGGAGDTFKLRVKPGKTYLLRLVNAALNDELFFAVANHTLTVVQADASYVKPFTADTLVISPGQTMDVLLTAAAATAPSSTAAYAIAVAPYTNTVGTFDNTTAIAVLEYYGAPPQSAAALRNLPLPALPLYNDTGAVANFSAKFRSLASAQYPALVPRTVDRRFFFAVGLGADPCQSRVNGTCQGPNGTRFAATMNNVSFTMPKTSLLQAHYQRRYSGVLTANFPGVPPTPFNYTGTPPNNTFVTHGTRVVPLSFNTTVEVVLQDTSILGAESHPLHLHGYDFFVVGQGFGNYDAGNDTAKYNLVDPVQRNTISVPTAGWVAIRFVADNPGVWIMHCHLDVHLSWGLAMAWLVNDGPLPNQKLPPPPSDIPRC

SEQ ID NO: 2342 - protein, 872 aa, Zea mays
MSPAVASASSGDRIRTYEDFVRVHAYLLAAAGIPPSLHQRLYRKLADEVFDGGEVFAVEPCEDGRQRRLVLTADQSLGKESDVFLVDHAWSFRLPDALKQLREVPGLAERMAALMCVDLDRKIEEDEQDDDESGSLEHVSQVVEKERARVQERSDSTAWLELEELGIDDDMLVALDLSANFPNLVALNLWGNKLRDPEKVMQEIRKCTKLKALWLNENPVLGKSIDKAVLDGLSGLEIYNSHFTSKAGEWALGFCADIVGVDNPCSSVESTLFGSIGTIDLSDRCIHKLPEVFSPSKLPSLSKLNVRGNPLDQISGDDLLKLFGGFTQLQELEVDIPGPLGNSAISILESLPNLSLLNGVDSSSIIESGKHIVDSALEPRLPEWSPEEPLAERVIGAMWLYLMTYRLADDEKIDETPVWYVMDELGSAMRHSDNANFRIAPFLFMPEGKLHTAISYTILWPTHDVHTGEECTRDFLFGIGEDKQRSARLTAWFRTPENYFIQEFRRYQEQLQSNSICSSTKIEETQTPSTKSVRPRDGRVLRVYTDIPHVEEFLTRPEFVLTTDPKEADIIWVSMQVDSEVKNAVGLTDQQYTNQFPFEACLVMKHHLAETIHKAWGSPEWLQPTYNLETHLSPLIGDYCVRKRDGMDNLWIMKPWNMARTIDTTVTGDLSAIIRLMETGPKICQKYIERPALFQGRKFDLRYIVLVRSIRPLEIFLSDVFWVRLANNQYTLEKTSFFEYETHFTVMNYIGRMNHMNTPEFVKGFEKEHQVKWLDIHESVRSTIRHIFEAAAAVHPEMQNPFSRAIYGVDIMLDNRFKPKVLEVTYCPDCGRACKYDTQALVGSQDTIRGRDFFNSVFGCLFLDEQTHVLPL

SEQ ID NO: 2343 - protein, 870 aa, Oryza sativa Japonica Group
MSPAAASPDDRIRSYEDFARVHAYLLAASGIPPSLHQRLYRKLADEVFDGGEAFSVEPCEGGRQRRLVLAAEWTLGRESDVFLVDHAWSFRLSDALKQLREVPGLAERMAALMCVDLDERTELEEADEQDNGNGGSLESALEVVEKERTRIQEKGSDFAAWLELEELGIDDDMLIALDLSSKFPNMVALNLWGNKLQDPEKIMKGIGECRRLKALWLNENPALKEGVDKVILDGLPELEIYNSHFTRKAGEWALGFCGDIIGADNPCSSAESIPLENIASLDLSDRCIHKLPVVFSPRKLSSLLSLNIRGNPLDQMSSDDLLKLISGFTQLQELEVDIPGSLGNSAISILECLPNLSLLNGINVASIIESGKHIIDSALKPRLPEWSPQESLPERVIGAMWLYLMTYRLADEEKIDETPVWYVMDELGSAMRHSDDANFRIAPFLFMPDGKLASAISYTILWPVHDVHTGEECTRDFLFGVGEDKQRSARLTAWFHTPENYFIQEFRKYKEQLQSSSICPSRKVTPVTKSIRPSDGHALRVFTDIPQVEEFLTRPEFVLTSDPKEADIIWVSMQVDSELKNALGLTDQQYTNQFPFEACLVMKHHLAETIHKAWGSPEWLQPTYNLETHLSPLIGDYCVRKRDGMDNLWIMKPWNMARTIDTTVTGDLSAIIRLMETGPKICQKYIECPALFQGRKFDLRYIVFVRSICPLEIFLSDVFWVRLANNQYTLEKTSFFEYETHFTVMNYIGRMNHMNTPEFVKEFEKEHQVKWLEIHGRIRDMIRCVFESATAVHPEMQNPFSRAIYGVDVMLDNKFNPKILEVTYCPDCTRACKYDTQALVGSQGVIRGTEFFNTVFGCLFLDELKDVSPL

SEQ ID NO: 2344 - protein, 874 aa, Oryza sativa Japonica Group
MSPAAASPDDRIRSYEDFARVHAYLLAASGIPPSLHQRLYRKLADEVFDGGEAFSVEPCEGGRQRRLVLAAEWTLGRESDVFLVDHAWSFRLSDALKQLREVPGLAERMAALMCVDLDERTELEEADEQDNGNGGSLESALEVVEKERTRIQEKGSDFAAWLELEELGIDDDMLIALDLSSKFPNMVALNLWGNKLQDPEKIMKGIGECRRLKALWLNENPALKEGVDKVILDGLPELEIYNSHFTRKAGEWALGFCGDIIGADNPCSSAESIPLENIASLDLSDRCIHKLPVVFSPRKLSSLLSLNIRGNPLDQMSSDDLLKLISGFTQLQELEVDIPGSLGNSAISILECLPNLSLLNGINVASIIESGKHIIDSALKPRLPEWSPQESLPERVIGAMWLYLMTYRLADEEKIDETPVWYVMDELGSAMRHSDDANFRIAPFLFMPDGKLASAISYTILWPVHDVHTGEECTRDFLFGVGEDKQRSARLTAWFHTPENYFIQARNLEFRKYKEQLQSSSICPSRKVTPVTKSIRPSDGHALRVFTDIPQVEEFLTRPEFVLTSDPKEADIIWVSMQVDSELKNALGLTDQQYTNQFPFEACLVMKHHLAETIHKAWGSPEWLQPTYNLETHLSPLIGDYCVRKRDGMDNLWIMKPWNMARTIDTTVTGDLSAIIRLMETGPKICQKYIECPALFQGRKFDLRYIVFVRSICPLEIFLSDVFWVRLANNQYTLEKTSFFEYETHFTVMNYIGRMNHMNTPEFVKEFEKEHQVKWLEIHGRIRDMIRCVFESATAVHPEMQNPFSRAIYGVDVMLDNKFNPKILEVTYCPDCTRACKYDTQALVGSQGVIRGTEFFNTVFGCLFLDELKDVSPL

SEQ ID NO: 2345 - protein, 723 aa, Zea mays
MSPAVASASSGDRIRTYEDFVRVHAYLLAAAGIPPSLHRRLYRKLADEVFDGGEVFAVEPCEDGRQRRLVLTADQSLGKESDVFLVDHAWSFRLPDALKQLREVPGLAERMAALMCVDLDRKIEADEQDDDESGSLEHVSQVVEKERARVQERSDSTAWLELEELGIDDDMLVALDLSANFPNLVALNLWGNKLRDPEKVMQEIRKCTKLKALWLNENPVLGKSIDKAVFDGLSGLEIYNSHFTSKAGEWALGFCADIVGADNPCSSVESTLFGSIGTIDLSDRCIHKLPEVFSPSKLPSLSKLNIRGNPLDQISGDDLLKLFGGFTQLQELEVDIPGPLGNSAISILESLPNLSLLNGVDSSSIIESGKHIVDSALEPRLPEWSPEEPLAERVIGAMWLYLMTYRLADDEKIDETPVWYVMDELGSAMRHSDNANFRIAPFLFMPEGKLHTAISYTILWPTHDVHTGEECTRDFLFGIGEDKQRSARLTAWFRTPENYFIQEFRRYQEQLQSNSICSSTKIEETQTPSTKSVRSRDGRVLRVYTDIPHVEEFLTRPEFVLTTDPKEADIIWVSMQVDSEVKNAVGLTDQQYTNQFPFEACLVMKHHLAETVHKAWGSPEWLQPTYNLETHLSPLIGDYCVRKRDGMDNLWIMKPWNMARTIDTTVTGDLSAIIRLMETGPKICQKYIERPALFQGRKFDLRYIVLVRSIRPLEIFLSDVFWV

SEQ ID NO: 2346 - protein, 872 aa, Hordeum vulgare subsp. vulgare
MSPAAAAPAPRDDRIRSFEDFARVHQFLLIAAGVPPSLHRRLYRKLADEVFDGGESFSVEPCEEGRQRRLVLASGAPLGSEADVFLVDHAWSFRLSDALKQLREVPGLAERMAALMCVDLDRRIEVEEADEQDSEKGGGLEHVLQVVEKERIRIQESGGDFAAWLELEELGIDDDMLVALDLSANFPNLVALNLWGNKLQDPEKVMREIGKCGRLKALWLNENPILNQCTEKDVLDGLPELEIYNSHFTMKAREWALGFCGDMIGAENPCLSVGNIPLDNIVTLDLSDRSIHKLPEVFSSSKLSSLSKLNIRGNPLDQMSGDDLLKLFSLFTQLQELEVDIPGPLGNSAISILESLPNITLLNGVNASSIVESAKHVVDSALKPRVPEWSPEESLAERVIGAMWLYLMTYRLADEEKFDETPIWYVMDELGSAMRHSDDANFRIAPFLFMPEGKLSSAISYTILWPICDVHTGEECTRDFLFGIGEDKQRSARLTAWFHTPENYFIQEFRKYQEQLQSTSICPTKETPSTRSVRPSDGRPLRVFTDIPQVEEFLTRPEFVLTTDPKDADIIWAGMQIDSELKSSLGLTDQQYMNQFPFEACLVMKHHLADTIHRAWGSPEWLQPTYNLETHLSQLIGGYSVRKRDGMDNLWIMKPWNMARTIDTTVSGDLSAIIRLMETGPKICQKYIECPALFQGRKFDLRYIVLVRSICPLDILLCDVFWVRLANNQYTLEKTSLFEYETHFTVMNYNGRMNHMNTPEFVKEFEKEHQVKWLEIHESIRDMIRRVFESTSAVHPEMQNSFCRAIYGVDVMLDNRFKPKILEVTYCPDCTRACQYDTQALVGSQGPIKGSDFFNTVFGCLFLDDLTNVSPL

SEQ ID NO: 2347 - protein, 832 aa, Oryza sativa Indica Group
MSPAAASPDDRIRSYEDFARVHAYLLAASGIPPSLHQRLYRKLADEVFDGGEAFSVEPCEGGRQRRLVLAAEWTLGRESDVFLVDHAWSFRLSDALKQLREVPGLAERMAALMCVDLDERTELEEADEQDNGNGGSLESALENMVALNLWGNKLQDPEKIMKGIGECRRLKALWLNENPALKEGVDKVILDGLPELEIYNSHFTRKAGEWALGFCGDIIGADNPCSSAESIPLENIASLDLSDRCIHKLPVVFSPRKLSSLLSLNIRGNPLDQMSSDDLLKLISGFTQLQELEVDIPGSLGNSAISILECLPNLSLLNGINVASIIESGKHIIDSALKPRLPEWSPQESLPERVIGAMWLYLMTYRLADEEKIDETPVWYVMDELGSAMRHSDDANFRIAPFLFMPDGKLASAISYTILWPVHDVHTGEECTRDFLFGVGEDKQRSARLTAWFHTPENYFIQARNLEFRKYKEQLQSSSICPSRKVTPVTKSIRPSDGHALRVFTDIPQVEEFLTRPEFVLTSDPKEADIIWVSMQVDSELKNALGLTDQQYTNQFPFEACLVMKHHLAETIHKAWGSPEWLQPTYNPETHLSPLIGDYCVRKRDGMDNLWIMKPWNMARTIDTTVTGDLSAIIRLMETGPKICQKYIECPALFQGRKFDLRYIVFVRSICPLEIFLSDVFWVRLANNQYTLEKTSFFEYETHFTVMNYIGRMNHMNTPEFVKEFEKEHQVKWLEIHGRIRDMIRCVFESATAVHPEMQNPFSRAIYGVDVMLDNKFNPKILEVTYCPDCTRACKYDTQALVGSQGVIRGTEFFNTVFGCLFLDELKDVSPL

SEQ ID NO: 2348 - protein, 837 aa, Oryza sativa Japonica Group
MSPAAASPDDRIRSYEDFARVHAYLLAASGIPPSLHQRLYRKLADEVFDGGEAFSVEPCEGGRQRRLVLAAEWTLGRESDVFLVDHAWSFRLSDALKQLREVPGLAERMAALMCVDLDERTELEEADEQDNGNGGSLESALEVVEKERTRIQEKGSDFAAWLELEELGIDDDMLIALDLSSKFPNMVALNLWGNKLQDPEKIMKGIGECRRLKALWLNENPALKEGVDKVILDGLPELEIYNSHFTRKAGEWALGFCGDIIGADNPCSSAESIPLENIASLDLSDRCIHKLPVVFSPRKLSSLLSLNIRGNPLDQMSSDDLLKLISGFTQLQELEVDIPGSLGNSAISILECLPNLSLLNGINVASIIESGKHIIDSALKPRLPEWSPQESLPERVIGAMWLYLMTYRLADEEKIDETPVWYVMDELGSAMRHSDDANFRIAPFLFMPDGKLASAISYTILWPVHDVHTGEECTRDFLFGVGEDKQRSARLTAWFHTPENYFIQARNLVCKLVEFRKYKEQLQSSSICPSRKVTPVTKSIRPSDGHALRVFTDIPQVEEFLTRPEFVLTSDPKEADIIWAWGSPEWLQPTYNLETHLSPLIGDYCVRKRDGMDNLWIMKPWNMARTIDTTVTGDLSAIIRLMETGPKICQKYIECPALFQGRKFDLRYIVFVRSICPLEIFLSDVFWVRLANNQYTLEKTSFFEYETHFTVMNYIGRMNHMNTPEFVKEFEKEHQVKWLEIHGRIRDMIRCVFESATAVHPEMQNPFSRAIYGVDVMLDNKFNPKILEVTYCPDCTRACKYDTQALVGSQGVIRGTEFFNTVFGCLFLDELKDVSPL

SEQ ID NO: 2349 - protein, 785 aa, Oryza sativa Japonica Group
MSPAAASPDDRIRSYEDFARVHAYLLAASGIPPSLHQRLYRKLADEVFDGGEAFSVEPCEGGRQRRLVLAAEWTLGRESDVFLVDHAWSFRLSDALKQLREVPGLAERMAALMCVDLDERTELEEADEQDNGNGGSLESALEVVEKERTRIQEKGSDFAAWLELEELGIDDDMLIALDLSSKFPNMVALNLWGNKLQDPEKIMKGIGECRRLKALWLNENPALKEGVDKVILDGLPELEIYNSHFTRKAGEWALGFCGDIIGADNPCSSAESIPLENIASLDLSDRCIHKLPVVFSPRKLSSLLSLNIRGNPLDQMSSDDLLKLISGFTQLQELEVDIPGSLGNSAISILECLPNLSLLNGINVASIIESGKHIIDSALKPRLPEWSPQESLPERVIGAMWLYLMTYRLADEEKIDETPVWYVMDELGSAMRHSDDANFRIAPFLFMPDGKLASAISYTILWPVHDVHTGEECTRDFLFGVGEDKQRSARLTAWFHTPENYFIQEFRKYKEQLQSSSICPSRKVTPVTKSIRPSDGHALRVFTDIPQVEEFLTRPEFVLTSDPKEADIIWVSMQVDSELKNALGLTDQQYTNQFPFEACLVMKHHLAETIHKAWGSPEWLQPTYNLETHLSPLIGDYCVRKRDGMDNLWIMKPWNMARTIDTTVTGDLSAIIRLMETGPKICQKYIECPALFQGRKFDLRYIVFVRSICPLEIFLSDVFWVRLANNQYTLEKTSFFEYETHFTVMNYIGRMNHMNTPEFVKEFEKEHQGQLAFFSLYYACLVTDF

SEQ ID NO: 2350 - protein, 302 aa, Sorghum bicolor
MSGTPAASSSLQAALSYCVRQVRAYDYHHYLCLLHLPPAMRKAAFTFRAFNVETAKAMDVVSDPRTGLMRLLWWKDAVDKVFANKLVEHPVAQALSSVVADHKVSKHWLKRSVEARINDANHDEGTIPETSTELERYAEDTQSTILYMTLQAGGIQSTVADHAASHIGKASGLLLLLKALPHHVNKQGTVPYIPASVAEECGLLTREGGRSEVRMDERLPDAVFKVASVAEAHLHKARELASSVPKKAIPVLLPAVPAQVLLDTLRRCEFNVFDSRLSRGVHGVSPLWYQLKLNWNAWRNKY

SEQ ID NO: 2351 - protein, 302 aa, Oryza sativa Japonica Group
MGSTAAAGGNLRTALSYCVQQVRNYDYHHYLCLLHLPPAMRKAAFAFRAFNIETAKAMDVVSDPKTGLMRLLWWKDVVDKVFANKLVEHPVAQVLSSVVSEHKISKHWLKRSVEARINDANRDDYAIPETISELERYAEDTQSTILYMTLQAGGIQSTIADHAASHIGKASGLLLLLKALPHHVSKQGRIPYIPASIAEECGLLTREGGRSEVRMGDELPDAVFKVASVADAHLQKARELASSVPAEAIPVLLPGVPAQVLLDSLRRREFNVFDSRLSRGVHGISPLWYQIKLIWHSVRKKY

SEQ ID NO: 2352 - protein, 302 aa, Hordeum vulgare subsp. vulgare
MSGGTAASASLRTALSYCVQQVRSYDYHNYLCLLHLPPAMRKAAFTFRAFNVETAKAMDVVSDPRKGLMRLLWWKDVVDKVYANKTVEHPVALALSSLLSEQKVSKHWLKRSLEARINDGNRDDDAIPENIPELERYAEDTQSTILYMTLQAGGIQSTIADHAASHIGKASGLLLLLKALPHHVSKQGKIPYIPASVAEECGLLAREGGRTEVRMGDALPDAVFKVASVAEAHLQKARELAASVPAEAVPVLLPAVPAQVLLDSLRRREFNVFDSRLSSGVHGISPLWYQLKLNWHAWRNKY

SEQ ID NO: 2353 - protein, 316 aa, Zea mays
MAYWRSPQMIMAKLPMAPAASSSLRTALSYYVRQVRAYDYHHYLCLLHLAPAVCKAAFTFRAFNIETARAMDVVFDPRAGLMCLLWWKEGVDKIFGNKLVEHPVAQALSSIIADHKVSKHWLKRSVEARINDANREEGTIPRTSVKLERYVEDTQSTILYMTLQAGRIQSTVADHAASHIGKASGLLLLLKALPHHVNKQGTVHYIPASVAEECGLLITREGGRSEVRAGERLLDVVFKVASVAEAHLHKARELAPSVPKEAIPVLLPALPAQVLLDTLRRCEFNVFDPWLSRGVHGVSPLWYQLKLNWNAWRSRY

SEQ ID NO: 2354 - protein, 269 aa, Zea mays
MSGGTPAASSSLRTSLSYYVRQVRAYDYHHYLCLLHLAPAVRKAAFTFRTFNIETARAMDVVFDPRAGLMRLLWWKEGVDKIFGNKLVEHPVAQALSSIIADHKVSKHWLKRSVEARINDANREEGTIPRTSAKLERYVEDTQSTILYMTLQAGGIQSTVADHAASHIGKASGLLLLLKALPHHVNNQGTVHYIPASVAEECGLLITREGGRSEVRAGERLLDVVFKVASVAEAHLHKARELAPSVPKEAIPMLLPALPAQVLLDTLRR

SEQ ID NO: 2355 - protein, 260 aa, Zea mays
MSGGTPAASSSLRAALSYCVRQVRAYDYHHYLCLLHLAPAVRKAAFTFRAFNIQTARAMDVVSDPRTGLMRLLWWKEAVDKVFGNKLVEHLVAHALSSVIADHKVSKHWLKRSVEARINDTNREEGTIPGTSAELERYAEDTQSTILYMTLQAGGIQSTVADHAASHIGKASGLLLLLKALPHHVNKQGTVHYIPASVAEECGLLITREGGRSEVRAGVRLPDVVFKVTSVAEAHLHKARELASSVPKEAIPVLLPALPA

SEQ ID NO: 2356 - DNA, 1804 bp, Zea mays
cgcaacaccgttggatgtggagggtttttgtaaaatgtacagagttgcaaagaacattttacaaaacccccctgacacaacaccgttggatgtggaggatgtggtctggattgattttgctcatgggagcaccaacgctccttgcgcacaagatacgttctcatagtaaaaaggcaagcagccatggctgtgactgtgagtggacggatcgctcgaatgaggcagctctagaaccggttcatgaggcccttgatccaggccaggacaccgctctcctcttcttcaacatctgcctgcttcttggcctcctcggcgtggcggtggacgatgtggtggaagaagcgggaacggcgtccatggccgtggccgtggccgaatctcctcctcatgatcgccttcctgaaccgccggaccatctcttccatttgctcatcctcctcgtcgtcgctgtcctcgtcgtgctcatcagcgtggcggagccgcttcctcgccgccatattcttctcctcgtcctcgtcgtggtggtggtggaagtggaaccggtgccgcttcatgcccatgctctctgtcgtctgtggggcggtggtagcctcctcctcctcctcctcgtgttggacgtggtggagacggtggcggcgcatgtcgtggtggaagtggaagcggaaccacctccgcagcatctcgtgcttccacgccctgactgccgccgcgctctcgtcgtcgtgcccgtcggcgtcggcgaacggcgacggctgctcgcttgtaatagccacctccccctctccgtcgctgtccgggagagagcgatccgggtccggctcggccacgggcatctcctcccccgcctccctggccacctctgcggatgcgggcaagatggcaaggtggctcactgcctgctcgcgcctcgcgccgtggccagaacaagggaacttgtgcgacgcgtcacggtagatcccgtggtggcgtttcaaccagaggtggtggtggtggtggagccggtgagaaggcaggcggaggagttcgaacccatgctgctgctgctccgccgggatggcctcctcttcagtggcgctggcggtgcccgcctcagcgtggaccgtggggtcggatagcacgttgtcgtcgctgacggccacggcggcggttgattcgggctcggtgtcgtgctctgctgcgactgcgagggcaccgcagtgcgcgacggcgaggagggagaggacgaggaggaggagcgcggcggtggctgacagtcgagccatggttgcgtgctcgggaagcgaacgcggtgactaggactacgacgctatgccggggcgcggaggtcagcttctgcatttgtaggcatgttgcgggacccacagtgcatgaggtggtggtgaggtgaccgcggagctgaaagtcaaacggcttactggaggctacagtaaagtatggccgtatggggcggttgcatttttttttttattctatgttgatgttctgtttggtagtgattcgtcagtcaccgagaaccgattataccctccgtagaaaaataaactgccctccattcacacacaccgcgacacttacggttatcaaaaacaaacacacggcatacatcagcacaagaagccaaaatcaaaattaagcaacagggttcgcaccgacgtcattttcacctgactgtaccatcttcagcgatctacaaattgtcagccagtggctaattttcagtttaatcacttatatttacctaaatttacatgatccggtagttggatttgcgtatgcagtgacgtcaccatggattgatctttgt

SEQ ID NO: 2357 - DNA, 2513 bp, Sorghum bicolor
aagcgcaacgatagacgttcacacaaaattcccgcttcctgtcttacccctccaaaaccctagtccgtcctcgcctcctcgccggcgacgaggatgcctggtatgccgacggacggtgtcggcgcaatcgtaccttttacaggggagcctggccaaggggcgccacccgtgcggccaatccgccacggcgtgccgccgcccatcttccgcatctacgtctcctggtccagcggcaaccttctgcaggtcgcgtgcctccgcccgccgaattcggaaggtggcggcggcacagaggaggtcgttgggagtgtggtggaggtgaatctcggcgacggtggctcggaggccgaggagaaaattgacgaggcggagatgcggcggatcgagtacgggtcggtgccggccttcgcgctgctgcagagcaggaagaacaccctcgcagatgctgctactatgtcgcacttgccctcagtccccgatcatgcagaatggtggcaatatgtgcttgaatacagcaaaaccattggcaatctccttgggaacccagaccctcctgttttcatgattgaagaccccaagacaattcttaaggttagggaaaaaccgacaagtttaagggctgcttgggagttgttggagatattctatgttgataaacatttgcaaggctggcttcctgagcgtcttgttgattggttagccgattttgacagcctgttgtcaacgatggcgagcacggtgtactctaagctcagcaatttccagaaaaaactcattaacttgcagattgttgaagatgatcctgattactggaatggtttgtcagcagcactttcagttggatggcttgatattgtggtgaatatgctacggtttcatggatcgtaccaattagatcagatggataaccgtgagacagaaaatggattggtcgaggctgttgctgttcttgtatcaacgatgccccgcttgagaccaaatttgccatctggtaaattaggtcagtgctgcaaaacaagacctgattttatcaaggcatgggaaaagtggcgaggtcaagtaactaaactggagtgcagtgcattttggatccagtgtggccaccaaaaaacccgtgatggtttgaagaatttgcttcatattatgatggggaacataaacgaactcactgatgctacttaccattggctggagctgtttgcttctcattttctttatataaaaccatttacagtgggttttgaagggatgcaccatttagcacagaaatgcatacagcttaagccatcctctagcactaatggattaacaggcctcattcttggtgtcctttcagaaaatacagaggttgtcttggcagaatgcacaaaaaattttggcccttggctggtcacacatgctatggaacttctgacagctgataatgactatgcggatgttatgttgcatgaagagagacctaacttaggtggtataagcatagaggaactgcaccggctagtctatgctcaagttttgtgttctcattctttaacttggcagattgcgcctacttatctgtcctcatgtctaaaccaaggcctaggactcttggagattctacttctcaagcaacccatacaagataattgcctagtactcaagactttggaaatttgccgattgtacgaactggagaatgttagtacaatcatcatgaagattgctggcatttatcattggaagcatggacgaaaaggaactggtgtatactggttccagcaagctcatgataaaatttgccttgacagaattgctcaacagttgttcgaacacattgggaagtcagtgacagatgatagttttaagcaatgggaaggactgctcgagctccttggttctgacattggtagtgcaggcggtcttgagttccttcacaggtaccgggatttcaagaggtctctgcaacaagctctagacagaaggtgtggtgaggctgctcgacaaactgtggattttttaatacagcttatgaaaaacccatccacaccgcaacgtttctggctacctcttctacatgactcggtggagctacttaatagcaaactctgccctcttatgaatgttgctgagacgacattgttgctcaacaagctacaagagctatcaatggccaagctgcgccctgatttttccagtaatcacctaccaagccatgcgataagctctgtgagattggctttggcatcaaatctggcacgtgccattcttggagacccgtaatccaagcacattttagcacaggagtatgacattcagtttgctagtggattgtgaccatgttcatgttgcttggggcctcctggcaattcaaatgatcaggtttgagaaaagattgatcgtaggtctgctctggcagagcagttcaatagatgtatcacacattgtactcttgcatttgtgttgccaatgcacgcagcttgctgagcgctgtattttgaactttgaaggaaagcaagtaatggcatgttgtt

SEQ ID NO: 2358 - DNA, 2476 bp, Zea mays
caaaattcccgctcactgtcttacgcctccaaaaccctagcccgtgctcggccggcgacgaggatgcctggtatgccgacggacggtggcggcgcaatggtaccttttacaggggagcctggccaaggggcgcccccgccggcacccgtgcggccaatccgccacggcgtggcgccgcccatcttccgcatctacgtctcctggtccagcggcaaccttctgcaggtcgcgtgcctccgcccgccgaattcggacggtggcggcggcacggaggaggtcgttgggagtgtggtggaggtgaatctcggcgacggtggcagcggtggctcggaggccgaggagaaaattgacgaggcggagatgcggaggatcgagtacgggtcagtgccggccttcgcgctgctgcagagcaggaagaacaccctcgcagatgttgctactatgtcgcacgtgccctcagtccctgatcatgcagaatggtggcaatatgtgcttgaatacagcaaaaccattggcagtctccttgggaacccagacccttctggtttcatgattgaagaacccaagacaattcttaaggttagggagaaacccacaagtttaagggctgcttgggagttgctggagatattctatgttgataaacgtttgcaaggctggcttcctgagcgtcttgttgattggttagccgattttgacagcctgctgtcaacgatggcgagcacggtgtactctaagctcagcaatttccagaaaaaactcgttaacttacagattgttgaagacgatcctgattactggaatggtttgtcagcagcactttcggttggatggcttgatattgtggtgaatatgctacggtttcatggatcgtaccaattagatcagatggatagccgtgagacagaaaatggattggtcgaggctgttgctgttcttgtatcaatgatgccccgcatgagaccgaatttgccaactggtaaattaggccagtgctgcaaaacaagacctgattttatcaaggcatgggaaaagtggcgaggtcaagtaactaaactggagtgcagtgcattttggatccagtgcggccaccaaaaaacccgtgatggtttgaagaatttgcttcatattatgatggggaacataaaggaaattactgctgctacttcccattggctggagctgtttgcttctcattttctttacataaaaccatttactgtgggttttgaagggatgcaccatttagcacagaaatgcatacagcttatgccatcctctggcactaatggattaacaggcctcattatcggtgttatgtcagaaaatccagaggttgtcttggcagaatgcacaaaaaattttggcccttggctggtcacacatgctatggaacttctgacagctgataatgactatgcggatattatgttgcatgaagagcgacctaacttaggcggtataagcatagaggaacttcaccgattagtctatgctcaagttttatgttgtcatcctttaacttggcagatcgcgccgacttatctgtcctcatgtctaaaccaaggcctaggactcttggagattctacttcttaagcaacccatacaagataattgcctagtactcaagactttggaaatttgccgattgtacgaactggagaatgttagtacaatcatcatgaagattgctggcatttatcgttggaagcatggacgaaaaggaactggtgtatactggttccagcaagctcgtgataaagtttgtcttgatagaattgctcaacagttattcgaacacattgggaagtcagtgacagacgatagttttaagcaatgggaagggctgctcgagctccttggttctgacattggtagtgcaggcggtcttgagttccttcacaggtaccgggatttcaagaggtctctgcaacaagctctagacagaaggtgtggtgaggctgctcgacaaactgtggattttttaatacagcttatgaaaaacccatccacacctcaacgtttctggctaccccttctacatgattcggtggagctacttaatagcaaactcagccctcttatggatgttgctgagacgacattgttgctcaacaagctgcaagagctgtcaatggccaagctgcgccctgatttttccagtaatcacctaccaagccatgcgatgagctctgtgagattggctctggcatcaaatctggcacgtgccgttcttgaagaccgtagtccaagcacactttagcacaggagtatgacgtccagtttgctggtggattgtgaccatgtttgcttggggcctcctgacaattcaaatgatcgggtttgagaaagattgaccatgtaacatacattgtactctgcttgcttgcttagtgcatttgtgtcgcgaatgcatgcatcatgctgagcgctgtggtttgaaggaaagaaataaaggatcgacatgttgcttg

SEQ ID NO: 2359 - DNA, 2559 bp, Hordeum vulgare subsp. vulgare
ggacgccgccccaaatcctccccgccgcccctcccaccaaaaccctagctcttgctcgctggcgatgccgggcatgccggccgacagcgggggcgccatcgtccgtttctcgggggaaccaaagcacgcggcgtcggcaccgcctgtgcggcccatccgccacggcgtgccgccgcccatctcccgcgtctacatctcctggtcaagcggcaacctcctgcaggtcgcctgcctacggcctccgaatccggaggaaggcgccggccgcggcgcggaggaggttgccgggagcgtggtagaggtgaacctcggcgtcggcgctggcaatggcggcgcggaggtcgagggggaggtcgatgatgcggagatgcggcggatcgagtacggttcagtaccggccttcgcgctgctgcagagcaggaagaacgccctcgcagatgctgctgctatgcagcacatgcactcggtctcagagcacgcggaatggtggcaatatgtgctcgaatacagcaaaaccatcggtaatcttcttggcaatccagattctcttcctgctttcatgattgaagacccgagggcaattcttaaggttagagagaagcctactagtttaaaggctgcctgggaattgttggagatattctatgttgacaaagagttacacagctggcttccggagcgactcgttgattggttagctgattacgacagcctcttgaccaagacggatggcacggtgtattgcaagctcaataatttccaaaaaaagctaatcaacctgcagattgttgaaaatgatgatgattactggaatggattatcggcagcactgtcagttggatggcttgatgtcgtggtgaatatgctacgttttcatggatcataccaattggatcagatggacaaccgtgagacagaaaacgggttggttgaggctgttgcagttcttgtctcaaccatgccgcgcatgagaccggatttaccaaagggtaaattaggccagtgctgtaaaacaagacctgatttcatcaagacatgggaaaaatggcgaggtcaagtaagtaaactggagtgcagtgcattttggattcagtgcagtcaccaaaaaactcgtgatggtttgaagaatctgcttcacatcatgttgggaaatataaaggacctcactgctgctacttcccattggctggaactattcgcttctcattttctttatataagaccatttacggtgggctttgaagggatgcatcacttagcacagaaatgcatacaacttaagccgtctttcgacactaatggattaacaggcctccttaatggaatcctatcagaaaatccagaggttgtcttggcggaatgcacaacaaaatttggaccttggatggttgcacacggtatggagctgttggcagctgataatgactatgcagatattatgctgcatgaagagcggcctaactttggtggcataagcatagaagaactgcaccggctagtctacgctcaagttctgtgttctcattctttaacttggcagatcgcaccgacttatctgtcctcgtgtctaaaccaaggtctaggtctgctggagattctactcctcaagcaacccatacaagataaccgtctagtgctgaagactttggaactttgtcgtttgtatgaactggaggatgttggtacgaacatcatgaagattgcaggcatttaccattggaagcatggtagaaaaggaactggggtttactggtttcagcaagctcatgataaagtacgacttgatagaattgctcaacaattatttgaacgcattgggaagtcagttgcagatgataattttaagcaatgggaagggttgctcgagctactaggttcagacattggtagtgcaggtggtcttgagttccttcacaggtaccgggatttcaagagatcccttcaacaggcactagaaggaagaaccggcgaggctgctcggcagaccgtggagtttcttatacagctaatgagaaatccttctacaccacaacgtttctggctgccccttctacatgactcagtgaaactacttaactgcaaaccccaccctttattgaatgttgccgagacgaccttgttgctcaataagctacaagaactgtcaatggccaagctgcgtcctgacttctgcagtaatcacctaccaatccatgcactgagctctgtcaggttggccctgggatcaaacctcgcccgtgccattcttgaagaagcttgaatgctgtatctggtggaggattggctccagtttggtggcgttgctcggcagttaccaggctcagtattttgttgttgttgagaagagtttgaattcgtttcgctctggttcagcggctctgccatagatgtaccatctattgtttttagctttggtgatctcagctgtctgtcgtattttatacgaagcggggtgctcgtgactgtatcattgggtaaaaaacccggcatgttgctaaaaatctagtgtactcacagtgagcctgtcgaaaaagaaagtacagtgcttagcccgttgcc

SEQ ID NO: 2360 - DNA, 2624 bp, Oryza sativa Japonica Group
ttctagtctgaaggctaacctgtagacttgtacagtacctcagttacccgggcccccgaacccccaaacccccgccgtctcccgcttccaaaaccctagctcatcgtcgtccggcggcggggatgccagggatgctgatggacggcggcggcgccatcgtgccgttctcgggagaaccaggccacgcggtggcggcggccccgcccgtgcggaacatccgccacggcgtggccccgcccatctcccgcgtctacgtttccttttctagcggcaacctcctgcaggtcgcctgcctccgcccaccgaatccggagggtggcggagaccgtggggcggaggaggtctccggggggagagtggtggaggtaaacctcggaggtggcggtagcgggcctggcggcgcggatgcggaggagatcgatgaggcggaaatgcggaggatcgagtacgggtcggtaccggcgtttgcgctgcttcagagcaggaagaacgcgctcgtagatggctccggtatgtcgcgcttgccctcagtctcggagcacgcagaatggtggcaatatgtgcttgaatacagtaaaaccatcggtagtctccttgggaacccagattctctttctgcttacatgattgatgacccaaagatgatccttaaggtcaaggagaagcctactagtttaaaggctgcgtgggagttgctagagatattctttgttgataaacagttgcaaacttggcttccagagcgtcttgttgattggttagccgactatgacagcctcttgaccaagacagagaacacgatatatcgcacgctgatcaatttccagaaaaagctcatcaacctgcaggttgttgaagatgatcctgattattggagtggattatcagcagctctatcggttggatggcttgatattgtggtgaatatgctacgttttcatggatcataccaattggatcagatggacagccgtgagacagaaaatgggttggttgaagctgttgctgttcttgtgtcaacaatgccacgcatgcgaccagatttgccatcgggtaaattaggccagtgttgtaaaacaagaccagattttataaaggcattggaaaaatggcgaggtcaagtaagtaaactggagtgcagtgcattctggattcagtgcggtcaccaaaaaactcgtgatggtctgaagagtttgcttcatattatgttggggaacataaagaacctcactgcttctacttcacattggctggagctctttgcttctcatttactttatataaggccattcacagtgggttttgaagggatgcatcagttagcacaaaagtgcatacagcttaaaccgtctgctgacaatagcggattgacaggcctccttactggtatcctttcagaaaatagagaggttgtcttggctgaatgcacaaaaaattttggtccttggatggtcacacatgctatggagctgctgactgctgacaatgactatgcggatatgatgttgcatgaagagaggcctaacttcggtggtataagcatagaggagctgcacaggcttgtttatgctcaagttttgtgctctcatgctttaacatggcagattgcaccaacttatctgtcctcatgtctaaaccaaggcctagggctgttggagattctgcttctgaagcaacccatacaagataatcgtgttgtattgaagactttggaaatttgccgcttgtatgagctggagaatgttagtacaaatatcatgaagattgctggcatttatcattggaaacatggtaggaaaggaactggagtttactggttccagcaagctaatgataaagttcgtcttgacagaattgctcaacaattattcgaacatattggcaagtcggtcacagatgatagttttaagcaatgggaggggctgcttgagttactaggttctgacatcggtagtgcaggtggtcttgagttccttcacaggtaccgagatttcaaaaggtcccttcagatggcacaagaaggaaggactggcgagtctgttcggcaaaccgtggagtttcttatacagctgatgagaaatccttctacacctcaacgtttctggctaccacttttacatgactcggtgaggcttctcaattgcaaaccctgcccattgttaaatgttgctgaaacgactttgttgctcaacaagctacaagaactgtcattggccaaacttcggcctgacttttccaacattcacctaccaagccatgcattgaactccgtcagattagctctagcatcaaaccttgcgcgtgcaattcttgaagaaccttaagtaatagttctatttggggtatgagtgccacatccactttgctggaagtttgacggcgttaatcgtcagttgattaccagtaactgtatgttccttgggaagaggttgaacttgtgttcactctgaatgagcaaaggttgaacttgtgttccttcatgaatgagcaattgtgtcatgcatgtatatgtaccggacattgtatttttagctttagtgataccttagatgttacttatgtacaaagaaatgctagtaaatgtattttagaatgggcacaatattgtattccttgtttcttcc

SEQ ID NO: 2361 - DNA, 2149 bp, Zea mays
ctcttctctagatcgcgacgaggcggactccccactcctgctgcccggagcgaagcggaccgcgtccccgccgcgtggcctgatcgatccctcagctctgccggtcgggccaatgctgcgtgcatcgagctgccgctgatcacgattatagggtttaatacttgtatattttgattgtcacaaatgttggatgaagtttgacttatctatggaaatggatgactcacatggcaccatggttaataaaagtgaagagaatgactttgaaaagaaaggcacttctgatcctgtggtttatcagctagttcgggttgaaggtgatggaacacttgttcctgctacagaggatgatgttttgcagtttgaacatttccttcacaacgagaaggttgatcttcctcctattgaagatgcagaccatgtggaagagtttttcaacaatgactgcatgttactgaagaagcctgacttggaagatggatcttccaaattggagactgtggaagcacacacacaaaaattgggtgccaacttagaggaaaacatattacagtcattggatgattcccttagtcctccctcagactttagaattcatagtcagcattcagataaattgcttacagaacaaggggcaaacgtcactcgacaggacaatgcttcaactgagactacaaaatcgacagtgttaaatgactcttgctgtgctgaaaaatataaggctgatgcctgctcaagatctgtatgcgacacatctacagatccatctgtttcgggagttaatagttccatgcctgatttttccatattaagaggagaagtctgtttggatgatcttactattagagaacttcaggaggcgtttagagccacgtttggccggcagactaatgtcaaagacaagatatggctcaaaagacggattacaatgggcttgactaattcctacgatgttccaagttcaggttgtgtagttaaagactacaaaattgttggcaaggatgccaaaaatgatatgtcagacatggatgaaagagctaagactgggcttagagctacttctgtggttatatatccaggaaacgaaggggactctccatctagctcttactatcagagcgaggaccaggaagattcttccaagagggtgccgatccataatgatgaaccacaaggaaatctgctaggcgagcaatgcactgacaagcgaactagaaagccaacaaaaagatacatagaggagctatcagacattgagactcatgactcaactgtaaaaaattcttcaccagcaaaaaggcctgcacatgatgaactgttaatgaacccgcgagtagcacctttcaatgagactggttctctgggcacaatctatcctactagaaaggatacctttggaggatttagtgtacacgttccttacgtttcaaggatgagaagggggcgccctaggaaggacttcatttcatttgcggtaacaatctacgataagggaccctcggttgaacctaaagggattcagccatcagttgagatgatattagtgaaggatggtgacaagggaaaccacctgaggaaagtacctgaggttccactaaaggttagttctgagaacgagcatgcagaagcagttgatagcaaaggggttcggaacctacaagcaaaggtctgcagtgctgtttccaagcctaaaataaagcatggtttaacgcggaagcatcatcgagcatggacattgagtgaggtcgtgaagctggtggatggtgtggctcggtatggagctggcaagtggtctgagattagaaaactgtccttcgcctcgtattcctaccgcacttcagtggatctcaaggataaatggcgtaatctgatcagagcaacccagacacagcttccggcgcaaaaagatggtgcctgtccacggaagactaacccttctatcataccaataccaccatccattttgttgcgagtgaaggagctacatgagctgcagtcgcaagggggtggcttcacagccccagtcaagttctctgggcaggacggcaaggttctacagggaaaaggctcgggttttttgtgatccgtgtaatgcagatatacgtgtacgcttctggacgatgtggtatatatgagtaaatattatttg

SEQ ID NO: 2362 - DNA, 1599 bp, Sorghum bicolor
accagctgcagctccgaccaagctagctgccttcatctatcgagtcaccggtcacatcacagctgatatcgaggcgacgcgccggtcgccggcgaggtgctccatccagctcccaccaaaaaccactaatagccatggcgcggctcctcctcctcctcggggccgccatggtgctcttggcgtccgcggccacggcgcaggactgcctgtccgcgacgttcagcggcgggcggaccttcggcaagtgcaacagcatgccgacgctcagcgccagcctgcactggacgtaccacccggagaacggcaccgcggacgtggcgttccgcgcgccgtcggacaccagcggctgggtcggctggggcatcaaccccactagcggcaacagcatggtcggcagcagcgtcttcatcgcgtcgcaggacagcagcggcgtggtgtccgtcctcatgacctacctggagaccaccagccaacccgcactaaccaacaacaccttcaagttcaacgtgcccatcggccccgccgccgagtactccgacggcgcctacaccatctacgccaccgtagagcttcccgggaactccacgcagcagtacacggtgtggcaggccggccctaccagcaacggtgccatcgcccaacacccgctttcgccatccaacagggcaagcacccagagtctggacttcctctcggggtcaagcaccgccgcgtcaaactccaagcttcaccgccgtaacattcacggactgctgaacgcgattgcctggggcatcctgatcccgatcggcgccatcatcgcccggtacctgcgcgtgttcgagtcggcggacccggcatggttctacctgcacatcgtctgccagtgctccggctacatcctgggcgtggccggctggggcctggggctgaagctgggcagcgagtccgcgggcatcacctacaagccccaccgcaacctcggcatcgccatcttcagcctggccaccctgcaggtgttcgcgctgctgctcaggcccgacaagaagaacaagtacaggctctactggaacatctaccaccactccgtcggctactccgtcatcgtgctcagcgccatcaacatcttcaaggggctcgacatcctccagccggccagcgggtacaagaccgcctacattgtcatcctggccacgctcggcggcatcgcgctctgcctcgaggccatcacctggcccatcgccatccggaagcgcaggcggaacgccgccgacaaggcggccgtcggcaacggcaacggctggcagcagggtgcgtagggagtaccagatatcatcgccgggcgtgtgcatagcacagtgcgtgcgtgtgtgtgtgtgttttgatgcgagggaggaatgtgacatcgatgtgctgatggcgttgttcagagagatttgttgcagtgtgtgtgttctttattgttactactagtagtctagtaccgctgggctctgtagaaggtgtagctcctttttcttctggtttattttactagggttctataatggcatttgtacacatttcttcttcttattattattgatgtacgattactttgattagtgtatggtttcgatc

SEQ ID NO: 2363 - DNA, 1586 bp, Zea mays
aagcaagccttcatctatcgagtcgcccgtcaccacagctgatattgaggcgacgcgccggccgtccagatcaaccaaaaaagagaaaaaaaaacagtagccatgtcgcggctcctcctcctcggggccgccgtgctgctgctcgcgtcggccgccacggcgcaggactgcctgtccgcgacgttcagcggcgggcggaccttcgggcggtgcaacaacctgccgtcgctgatcgccagcctgcactggacgtaccacccggagaacggcaccgcggacgtggcgttccgcgcgccgtcggacgccagcggctgggtcgcctggggcatcaaccccgaccgcggcggcagcatgggcggcagcagcgtcttcgtggcctcgccctcgcaggacggcagcggcgcggtgtccatcctcatgacccacctggagagcacgtcgcccagcctaaccaacaacaccctcaagttcaaggtgcccgtcggccccgccgccgagtactccaacggcgcctacaccatcttcgccatggtggagcttcccggcaactccacgcagcagttcacggtgtggcaggccggcgcgaccagcaacggtgccatctcccctcacccgacggcgccggccaacttggccagcacccagaggctggacttcctctccgggtccagcaccgccgcctcaaactccaggcttcaccgccgtaacatccacggcatgctgaacgcgatcgcctggggcgtcctgatccccgtcggcgccatcatcgcgcggtacctgcgcgtgttcgagtccgcggacccggcgtggttctacctgcacatcgcgtgccagtgctccggctacatcctgggcgtggccggctggggcctggggctgaagctcggcagcgagtcggccggcgtcacctaccagccgcaccgcagcatcggcatcgccatcttctgcctggccacgctgcaggtgttcgcgctgctgctccggcccgacaagaagaacaggtacaggctgtactggaacatctaccaccactccgtcggctactccgtcatcgtcctcggcgccgtcaacatcttcaaggggctcgacatcctcaagccggccagcggctacaagaccgcctacattgtcgtcctggccacgctcggcggcgtcgcgctctgcctcgaggccatcacgtggcccatcgccatccggaagcgcaggcgtaacgccgccgacaaggcgtccaacggcaacggcaacggctggcagcagggtgcgtaggggcctgatcgctgggcttgtgcgcgtgcgtgtgtttgtgctatagttttgatgcgagagagaggtctgatatcgatgtgctgatgccgttgttcagagagacatcgttgctgatgtgtttctttcctgttactactgcctctgtagtctgtactcctacctagaagagtagctcctttgattttttttcttctgttttgttgttgaattttattagggttctatagtgccatttgtacacattttttcccttcttattgatgtacgtacgactgctttgattactgtatggtttcagtcagtcaaaaaaaaaaaaaaaa

SEQ ID NO: 2364 - DNA, 1554 bp, Zea mays
tatcgagtcgcccgtcaccacagctgatattgaggcgacgcgccggccgtccagatcaaccaaaaaagaaaaaaagaaaaaacagtagccatgtcgcggctcctcctcctcggggccgccgtgctgctgctcgcgtcggccgccacggcgcaggactgcctgtccgcgacgttcagcggcgggcggaccttcgggcggtgcaacaacctgccgtcgctgagcgccagcctgcactggacgtaccacccggagaacggcaccgcggacgtggcgttccgcgcgccgtcggacgccagcggctgggtcgcctggggcatcaaccccgaccgcggcggcagcatgggcggcagcagcgtcttcgtggcctcgccctcgcaggacggcagcggcgcggtgtccatcctcatgacccacctggagagcacgtcgcccagcctaaccaacaacacgctcaagttcaaggtgcccgtcggccccgccgccgagtactccaacggcgcctacaccatattcgccacggtggagcttcccggcaactccacgcagcagttcacggtgtggcaggccggcgcgaccagcaacggtgccatctcccctcacccgacggcgccggccaacttggccagcacccagaggctggacttcctctccgggtccagcaccgccgcctcaaactccaggcttcaccgccgtaacatccacggcatgctgaacgcgatcgcctggggcgtcctgatccccgtcggcgccatcatcgcgcggtacctgcgcgtgttcgagtccgcggacccggcgtggttctacctgcacatcgcgtgccagtgctccggctacatcctgggcgtggccggctggggcctggggctgaagctcggcagcgagtcggccggcgtcacctaccagccgcaccgcagcatcggcatcgccatcttctgcctggccacgctgcaggtgttcgcgctgctgctccggcccgacaagaagaacaggtacaggctgtactggaacatctaccaccactccgtcggctactccgtcatcgtcctcggtgccgtcaacatcttcaaggggctcgacatcctcaagccggacagcggctacaagaccgcctacattgtcgtcctggccacgctcggcggcgtcgcgctctgcctcgaggccatcacgtggcccatcgccatccggaagcgcaggcgtaacgccgccgacaaggcgtccaacggcaacggctggcagcagggtgcgtagggggccaggtcgatcgccgggctttgtgcgcgtgtgtcgttgtgctatagttttgatgcgagagagaggtctgatatcgatgtgctgatgccgttgttcagagagagagatcgttgctgatgtgtttctttcctgttactactgcctctgtagtctgtactcctacctagaagagtagctcctttgattttttttcttctgttttgttgttgaattttattagggttctatagtgccatttgtacacattttttcccttcttattgatgtacgtacgactgctttgattattgtatggtttcagtc

SEQ ID NO: 2365 - DNA, 1530 bp, Zea mays
gctgcagctccgaccaagcctgcttgctgccttcgtccatctcaagtatccatggcgcggctcctcctcctcctcggggcctccgtgctgctgctcgcgtccgccgtcacggcgcaggactgcctgtccgcgacgttcagcggcgggcggaccttcgggaagtgcaacagcctgccgtcgctcagcgccagcctgcactggacgtaccacccggagaacggcacggccgacgtggcgttccgcgcgccgtcggaccccagcggctgggtcgcctggggcatcaaccccgacagcggcggcagcatggccgggagcagcgtcttcgtcgcctcgcaggacggcagcggcgccgtgtccatcctcatgaccaacctggagagcaccagccccagcctcactaacaccaccgccctcaagttcaaggtgcccgccggccccgccgccgagtactccgaccgcgcgtacaccatctacgccacggtggagcttccccggaactccacgcagcagttcacggtgtggcaggccggcccggcgaccagcaacggtggcatctcccctcacccgacggcgccggccaacttggccagcacccagcggctggacttcctctccggctccagcaccgccgcgtcaaactccaagcttcaccgccgtaacatccacgggatgctgaacgcgattgcgtggggcgtcctgatccccaccggcgccatcatcgcgcgctacctgcgcgtgttcgagtccgcggacccagcatggttctacctccacatcgcctgccagtgctccggctacgtcctcggcgtggccggctggggcctggggctgaagctgggcagcgagtccgccggcgtcacctaccagccccaccgcagcatcggcatcgccatcttctgcctggccaccctccaggtgctggcgctgctgctcaggcccgacaagaagaacaaatacaggctctactggaacatctaccatcactccgtcggctacgccgtcatcgtcctcagcgccgtcaacatcttcaaggggctccacatcctcgagccggccagcggctacaagaccgcctacattgtcatcctggccacgctcgccggcatcgcgctctgcctcgaggccatcacgtggcccatcgccatccggaagcgcaggcgcaacgccgacaaggcgtccggcggcaacggctggcagcagggtgcgtagtagggaccagatcgcccggcttgtgcttagttttgaatgcgagagagggatgtgatatcgatgtgctcatttcgttgttcagacttcagagggatcgttgctgcctgtgctttctttctcttcctgttattactacctctctagtctgtacttgtacgtagaagagtagctccttattttttttaattattagggttctataatggcatttgtacacatttaaaaaaaaaaaaaaaaaaaaaaaaaaaaaaaaaaaaaaaaaaaaaaaaaaaaaaaaaaaaaaaaaaaaaaaaaaaaaaaaaaaaaaaaaaaaaaaaaaac

SEQ ID NO: 2366 - DNA, 1412 bp, Zea mays
cctgtttgctgccttcgtccatcaagtatccatggcgcggctcctcctcctcctcctcggggcctccgtgctgctgctcgcgtccgccgtcacggcgcaggactgcctgtccgcgacgttcagcggcgggcggacgttcggcaagtgcaacagcctgccgtcgctcagcgccagcctgcactggacgtaccacccggagaacggcacggccgacgtggcgttccgcgcgccgtcggaccccagcggctgggtcgcctggggcatcaaccccgacagcggcggcagcatggaagggagcagcgtcttcgtcgcctcgcaggacggcagcggcgccgtgtccatcctcatgaccaacctggagagcaccagccccagcctcaccaacaccaccgccctcaagttcaaggtgcccgccggccccgccgccgagtactccgaccgcgcgtacaccatctacgccacggtggagcttccccggaactccacgcagcagttcacggtgtggcaggccggcccagcgaccagcaacggtggcatctcccctcacccgacggcgccggccaacttggccagcacccagcggctggacttcctctccggctccagcaccgccgcgccaaactccaagcttcaccgccgtaacatccacgggatgctgaacgcgattgcgtggggcgtcctgatccccacgggcgccatcatcgcgcgctacctgcgcgtgttcgagtccgcggacccggcatggttctacctccacatcgcctgccagtgctccggctacgtcctcggcgtggccggctggggcctggggctgaagctgggcagcgagtccgccggcgtcacctaccagccccaccgcagcatcggcatcgccatcttctgcctggccaccctccaggtgctggcgctgctgctcaggcccgacaagaagaacaagtacaggctctactggaacatctaccaccactccgtcggctacgccgtcatcgtcctcagcgccgtcaacatcttcaaggggctccacatcctcgagccggccagcggctacaagaccgcctacattgtcatcctggccacgctcgccggcatcgcgctctgcctcgaggccatcacgtggcccatcgccatccggaagcgcaggcggaacgccgacaaggcgtccggcggcaacggctggcagcagggtgcgtagtagggaccagatcgcccggcttgtgcttagttttgaatgcgagagagggatgtgatatcgatgtgctcatgtcgttgttcagagggatcgttgctgcctgtgctttctttctcttcctgttattactacctctctagtctgtacttgtttatttattttatttatgtttcttctgttttgtttatttattttattattagggttccatattgccatttgt

SEQ ID NO: 2367 - DNA, 2177 bp, Sorghum bicolor
tctgttctgttcttccgcccccacccacggcacggatctctctctcttcttctcgtcgtgccccgcggccgcgggagtgttcgtgttcctcactcctcccgcttccttccccgacactccctcagatccgcgcccgttttcccgatccacgcgacgcgagggggcattccagccctaaagcggccggtgagctggcctccttccgccgacgcggaccacctggagggaatttatcctggagccgtcttcctcctcgcctcctctcgcggcgcggcgcggaggcgggagacactcggaggtccagctgtgtttggattgatttcttcgtctgtggtggctagaggcacctggtttctttttgctgaagctggtggtacatgtgaacagcagggcctgtcttctgtctctgcttttgcttctaagcaatggcgaatgcaagcaagcacttgcaaccttcaagcaatgcaggcaatgacaggaagtaccagggcacgttggtcgcttctccagcaaaggccattgcgcctaagtgtgtgaaccgcatcatgccatcgaagcaactgatcttgggtggggattcaataggccatgtggcatcatttctgattaaagtcgttgctcttgaggcagtcagaagagtttctaaagcaagatgccctttcatttggaattctgttcaagcattgcagatccttgtgtatcctccatttagttggatccaaagatgggcaccactcaaatttctcgtgcagggaattcagaaactatccatgccactgttgtttctgtcagtcacaacaacagtaagtgagctgtcttccaagcgcgacgatgaaccagataacaatacagaacattccgagacgccttctgaaacaaatgaagtggcatcaacttctggtacaagcgatgctgctgatggcacaaaggaaatcgtgcaagagaactggcttgtgttacttttcagggagcttgagaagcaaggcatcactttgcccgagaggtttactgaagatgagttacgcagattttatgtcgctgcaaatggtgacttttcaagtttactctcatcggttaagaagacaattcgttggagggaaacatttcacatacttacattgcaagaacttgataaatggtctcacttagtcttttggcatggatttgacacgatgcttcggccttgtttagtaattcgtctcggacttgcatgctccagcataccacctcgtgacagaccccgtttcgggcaagcagtagtttctcaaattgaccatggtgttgtaaatttgaccaatgaagaagattcaagaattaccgttttgctggattgccatgggatttctccattcagatttccaatgcaaatgatgaggtcatttatcactgtagttcaagaaaattacccgaatcgtcttggtgtattgtttgttatccgccttcctccagttgtcagagttattgcacagacatttcttcaagttttgaaaccatcaacaaagcagaagttacgtttcgagggagattcatacaagaagacattggcagagttcttgcaggttgtgccagcgtttctgggcggtaaatgcagctgcccacaatgtgagaagcctcgtaatagttcagtgatacaggctggggaagggagcaagagccagcctcgcttggtcagcgttgatgacggatcgcctgtcacagacttcgacttcgatgaagaagagatcccatcagcctatagctgcgagaacgccatcagggctgcaataattggcctgctgatgatgtgcatcttcgttgcgtttctggctgggatgaacgatcccacatctgtttcgcccagtgcccagtgagagctatggaatcgcctactctcctatagactattagatcttagattgtcagttccgagtaatagagtatatatatgtgttgctgctaggatgctagggtgttgttttccttggcaacttcttctcggttgtcgtcagaccgccatgatagtgctgtgtctcaatatgagcgcagatgaataatatcctgtgtgtggcaaatgttggatcacagttcagtttgagcccgtcgatgtctctcttaacgggttttctgtattagggcaatgtgatttctcgttagtgtaagtcaaagttgaatggtttcagctctttatatagattatt

SEQ ID NO: 2368 - DNA, 1996 bp, Zea mays
ctcttcccccgcgcggcggccgcgggagtgttcgtgttcctcacttctcccgcttgcgtccccgacactccctcagatccgcggccgtttcccgatccgaggggcattccagccctaaatagcggccggtgagcaggtctccttccgccggcgcggaccacctggagggagtttatcctggagccgtcttcctcctcgcctccttttgcggcgcggcgcggaggccggagtcgcttggaggcccagctgtgtttgggttgatttcttcgtttgtcgcagggcctgtcttctgcctctgcttttgcttcgaagcaatggcgaatgcaagcaagcacttgcaaccttcaagtcaagcaggcaatgacaagaagtatcagggcacgctggttgcttcaccagcaaaggccatttcacctaagtgtgtgaaccgcattgtgccatcgaagcaactgatcttgggtgggggttcaataggccatgtggcatcatttctgatcaaggtcgttgctcttgaggcagtgagaagagtttctaaaacaagatgccctttcatatggaattctgttcaagcattgcagatccttgtgtatcctccatttagctggatccaaagatgggcaccgctcggatttctcgtgcagggaattcagaaactatccatgccactgttgtttctgtcagtcacaacaacagtaagtgagctgtcttccaagcatgatgatgaaccagataacaatacagaacattctgagacaccttccgaaacaaatgaattggcgtcaacttctggcacaagcgatgctgctgatggcacaaaggaaatcgtgcaagagaactggcttgtgttacttttcagggagcttgagaagcaaggcatcactttgcctgagaggtttactgaagatgagttacgcagattttatgttgctgcaaatggcgactttcaaagtttactctcttcggttaagaagacaattcattggagggaaacatttcacatacttacattgcaagaacttgatagatggtctcacttagtcttttggcatgggtttgacacgatgcttcggccttgtttagtagttcgtcttggacttgcatgctctagcatacctcctcatgatagaccccgtttcgggcaagcagtagtttctcaaattgaccatggcgttgtaaatttgatcaatgaagaagattcaaggattaccgttttactggattgccatgggatttcgccattcagatttccaatgcaaatgatgaggtcgttcatcactgtggttcaagaaaactacccgaatcgtcttggggtattgtttgtcatccgtcttcctccagttgtcagagttattgcacagacatttcttcaagtcttgaaaccagctacaaagcagaagttgcgttttgagggagattcgtacaagaaggcattggcggagttcctgcaggctgtgccagcgtttctgggcggtaaatgcagctgcccgcgatgtgagagtcctcgtgatgattcagtgatacaggcaggggaagggagcaagaagcagccccgcttggtcagcgttgatgacgggttacctgtcacagacttggacttcgacttggatgaagagatcccatcaccttatagctgcgagaacgccatcagggctgcgataatcggcctgctgatggtgtgcatcttcgtcgcgtttctggctgggatgatcgaccctgcatccgttccagccagtgcctgagagcttgtggaatagagcatgcacgtacatgtgttgctaattaggatgcagggtgctgtatttcttggcaggcttcttgtatgttgtcgtcagaccgccatagagcgctttctcccagtgtgagcgagcgcatgaataatatatatcctctgtgtcaaatgttggttagcagttcaattcgggcctactagatttcactattttcttttttatcttgatcgggcctactgaatttttgcaaaaaaaaaaaaaaaaaa

SEQ ID NO: 2369 - DNA, 2088 bp, Zea mays
aacaatttccttccagccgcgacctgtctctgcctgttcttctgccccgatcggccggccgatcccacccacgcatctctctcggccgcggccgcggccgcggtagtgttcgtgttcctcactcctcccgcttccttccccgacactacctcagctcagatccgcggcggtttcccggtccctggatctaaagcggccggtgagcaggcctcccctccttccgccgacgcggaccacctggtgggaatttatcctggagccgtcttcctcctcgcctcctctcgcggcgcggcgcggaggccggaatcacttggaggtctagctgtgtttggattgatttctttcttcgtttgtggtggctagaggcacctggtttgtttcttgccgaagcccgtggtacatgtgaacagcagggcttgtcttctgcttttgcttcttagcaatggcgaatgcaagcaaacacttgcaaccttcaagcaaatcaggcaatgacagaaagtaccagggcacactggttgcttctccagcaaaggacatttcaccgaagtgtgcgaatcacattgttccatcgaaacaactgatcttgggtggggattcaataggccatctggcatcgattctgattaaggtcgttgctctcgaggcagtcagaagagtttctaaagcaagataccctttcatatggaattctgttcaagcattgcaaatccttgtgtatcctccatttagttggatccaaagatgggcaccactcaaatttcttgtgcagggaattcagaaactttccatgccactgttgtttttgtcagtcacaacaacagtaagtgagctgtcttccaagcgtgatgatgaaccagataacaatacagaacattctgaaacaccttctgaaacaaatgaattgacatcaacttctggcacaagcgatgctgctgatggcacaaaggaaatcgtacaagagaactggcttgtgttacttttcagggagcttgagaagcaaggcatcactttacctgagaggtttactgaagatgaattacgcagattttatattgctgcaaatggcgacttttcaagtttactctcttcggttaagaagacaattcgttggagggaaacgtttcacatacttacactgcaagaacttgataaatggtctcacttagtcttttggcatggatttgacacaatgcttcggccttgtttagtaattcgtcttggacttgcatgctccagcataccaccttgtgatagaccccattttgggcaagcagtagtttctcaaattgaccatggtgttgtaaatttgaccaacggagaagattcaagaattaccgttttgctggattgccatgggatttccccattcagatttccaatgcaaatgatgaggtcatttgtcactgtagctcaagaaaactacccaaatcgtcttggactattgtttgttgtccgccttcgtccagttgttagagttattgcacagacatttcttcaagttttgaaaccatctacaaagcagaagttacgttttgagggagattcatacaggaagacgttggcggagttcttgcaggccgtgccagcgtttctgggcggtaaatgcagctgcccacgatgcgagaagcctcgtaatagttcagtggtgcaggcaggggaagggagcaagaaccagcctcgcttggtcagcgttgataccggatcacctgtcgtggacttcgacttcgatgaagaagagatcccatcaccttatagctgcgagaacgccatcagggctgcgataatcggcctgctgatggtgtgcatcttcatcgcgtttttggctgggatgaacgaccctgcatccgttccgcccagtgcctgagagctatggaatcgcctaatctcccatagtagagcttagattgtcagttgagtatatacacatatgtgttgctatttaggatgctactagggtgttgtaatccctggcagcttctttctcggttgtcgtcagatcgccatacagtgttctctcctaatgtgagcggagcagatgaataaatatcctgcgtgtggcaaatgttgttaacaaaaaaaaaaaaaaaa

SEQ ID NO: 2370 - DNA, 2082 bp, Zea mays
tttgccaaattcctccttctaccccgagcgcaacaatttcctcccagccgcgacctgtctctgtctgttcttctgccccgatcggccgatcccacccacgcatctctctccgcgcccgcggtagtgttcgtgttcctcactcctcccgcttccttccccgacactgcctcagctcagatccgcggcggtttcccggtccctggatctaaagcggccggtgagcaggcctccttccgccgacgcggaccacctggagggaatttatcctggagccgtcttcctcctcgcctcctctcgcggcgcggcgcggaggccggaatcacttggaggtctagctgtgtgtggattgatttcttcgtttgtggtggctagaggcacctggtttgtttcttgccgaagcccgtggtacatgtgaacagcagggcctgtcttctgcttttgcttcttagcaatggcgaatgcaagcaaacacttgcaaccttcaagcaaatcaggcaatgacagaaagtaccagggcacactggttgcttctccagcaaaggacatttcaccgaagtgtgcgaatcgcattgttccatcgaaacaactgatcttgggtggggattcaataggccatctggcatcgattctgattaaggtcgttgctctcgaggcagtcagaagagtttctaaagcaagataccctttcatatggaattctgttcaagcattgcaaatccttgtgtatcctccatttagttggatccaaagatgggcaccactcaaatttcttgtgcagggaattcagaaactatccatgccactgttgtttttgtcagtcacaacaacagtaagtgagctgtcctccaagcgtgatgatgaaccagataacaatacagaacattctgaaacaaatgaattggcatcaacttctggcacaagtgatgctgctgatggcacaaaggaaatcgtacaagagaactggcttgtgttacttttcagggagcttgagaagcaaggcatcactttacccgagaggtttactgaagatgaattacgcagattttatgttgctgcaaatggtgacttttcaagtttactctcttcggttaagaagacaattcgttggagggaaacgtttcacatacttacactgcaagaacttgataaatggtctcacttagtcttttggcatggatttgacacgatgcttcggccttgtttagtaattcgtcttggacttgcatgctccagcataccaccttgtgatagaccccgttttgggcaagcagtagtttctcaaattgaccatggtgttgtaaatttgaccaacaaagaagattcaagaattaccgttttgctggattgccatgggatttctccattcagatttccaatgcaaatgatgaggtcatttgtcactgtagctcaagaaaactacccaaatcgtcttggagtattgtttgttgtccgccttcctccagttgtcagagttattgcacagacatttcttcaagttttgaaaccatctacaaagcagaagttacgttttgagggagattcatacaagaagacgttggcggagttcttgcaggccgtgccagcgtttctgggcggtaaatgcagctgcccacgatgtgagaagcctcgtaatagttcagtggtgcaggcaggggaagggagcaagaaccaggctcgcttggtcagcgttgatggcggatcacctgtcgtggacttcgacttcgatgaagaagagatcccatcaccttatagctgcgagaacgccatcagggctgcgataatctgcctgctgatggtgtgcatcttcatcgcgtttctggctgggatgaacgaccctgcatccgttccgcccagtgcctgagagctatggaatcgcctagtctcccatagtagagcttagattgtcagttgagtatatacacatctgtgttgctatttaggatgctactagggtgttgtattccctggcagcttctttctcggttgtcgtcagatcgccttctctcctaatgtgagcggagcagatgaataaatatcctgtgtgtggcaaatgttggttagcagttcaattagcccttcgat

SEQ ID NO: 2371 - DNA, 2363 bp, Oryza sativa Japonica Group
gtgtgcgccgtgcgcgtgtcctctgccccttcccttctccccatctcgcctcgctcccttcccttctcttgcccaccgccaccgccccgcacccacccacctctgcctagatccgtctccaccatcgatctccctcccatccccggatgcgcaaggtggaaggcaagatcgaaccctaaccggcgacggaggaggagcggctccaccaccaccacctcgaaggagttgacaggcgggggatggattctgcagcgtgatttcatttgtgctccatttcctgctggttcgatgcaactgctttgtaactgttgattgatgtggtgatacatttcaaaaccagggattagattctgtttatgcctatgcttcataaatcataacgatggccagttcaagcaaaaacttccagtcatcaagcaaaccaggcagtgacaggaagtaccagggtgcattggttgcttctccagcaaaagccatttcacccaagacagtcaagcagatcgtgccaggaaaacatttaatcttgagcggggagtctacaagtcatctggcatcttttttggtaaaggttattgccttggaagtagtaagaagattttcaaaagcaagatgcccttttatatggaattctattcaagcattgcaagttcttgggtaccctccatttaggtggattcaacagtgggcgccactcaaatttattgtgcaaggcattcagaaattatcgacaccactgttgtttctttctgtcacaacaacattatgtgaccggtcctctaagcgcaatgatgaattgggtagcaatacagaagctcctgatgtaccttctgaatcagatgaaacagcatcaacttctggtataagggatgttgctgatggcacaaaggataccgagccagataactggctcatatcactgttcaaggaacttgagaaacaaggcatcactttgcctgaaaggttcaatgaggatgaactacgcagattttacattgcagccaatggtgacttttcaagtttgctctcttcagttaagaagacaattcgttggagggaaaccttccatatacttacattgcacgaactcgagaagtggtcccatttagttttttggcatggattcgatactatgcttcggccctgtttaatagtccgtcttggtcttgcatgctctagtctagccccttctgatagacctcggtttgggcaagcagtagtttctcaaatcgacaatggtattgtatacttgaccaacaaagaagatccgagaataactgttttgctggattgtcatgggatttctccattcagatttccaatgcaaatgatgaggtcgtttatcactatagttcaagaaaactatccaaatcgtcttggggtactatttattgtgcgtcttcctcctgttgtcagagtaattgcgcagactcttattcaggttctgaaaccatccacaaagcagaagttgcgttttgagggagaatcatataagaagacattagccgagttcttgcagattgtgccaacttttcttggtggcaaatgcagctgcccgcaatgtgagaagccgcgtaatatttcagtaatacaggcaggggaaggcagcaagagccaacctcgccagataaccattgatgatggatcacctgtcgcaagcatgaactttgatgaggcggagcttccatctccttatagctgcgagaatgccataagggctgccatcattggtgttctaatgctgtgggtcttcattgcatttctcgctgggatgaacgacccagagtccatctcgtcccatgccccctaaagggccttgcatttttttgccatgtcaaccaggatccacagaaccacctgagctgtcagttgtcttccatttgcatctgtggttgctagaggcgtttttcatagcagattttcgtggtctgtactatgtgcgccacatgctaaagcatcaaaagagtatcttcgagtcgctcactgggaggtcatatgaggtgtgcgattcagcattaccttgaaatagtcagttagaacaagacaattccttgttttgttttggtgccatcttagtatatatagtagtattagtttgtctgtaagtttgccgacttgtcagtttatcgtgggtggctatatagtatctagaagatggttcttacacttaatacttcctggaaaattctacgaacgctacttgaaaactggaatttctcatctgagaagccaggtccctgtgctatgtatgggtgaacggagaatccagtctggtgctgaactactaatgaatgaatgcacgtgcttgtcgaactcctaaataatatcttttttaaataaaatctttctacatatgattttcttgt

SEQ ID NO: 2372 - DNA, 1752 bp, Hordeum vulgare subsp. vulgare
ggggaacgcgccgcacccgcacccgcagctggagatccctcccagtcccggccccggctcacgagcccgccgaatccgccgccctctcctcgccagggacgcgccggagaaggaccggacaggcctcctccctctccgcctcccctcccgccacctctccaccgcgcaggcgatccgccccggccgccgatctcctcgctggaatggcgaattttaccaaaaacttccagtcttcaagcaaatcagacagtgaaaagaaataccagggtaccctggttgcttctccagcaaaggccatttcaccaaagacgataaagcatatcgtgccaaaacaattgatcttaagcagggagtcaacagctcatgtggcatcctttttggtgaaggttattgctcttgaggtagtgaggaggatttctaaagcaaaatgcccttttgtatggaattctattcaagcactgcaagttcttggatatcctccatttaggtggattcaacgatgggcaccactcaaatttgtcgtgcaaggcattcagaaattatccacaccactgttgtttctatctgtcacatctacactgggtgatctttcttctaagagcgatgaagccgatgacggacccagtatccctacaggagcccctgaccttcctgctgaaccacatgagacagcgtcgacttctgatacaagggaggctgctgatggggatggcacaaaggatattattgtttctgagaattggctggtgctacttttcaaggaacttgaaaaacaaggaatcactttgcctgagaggttcagtgaggatgaactacgcagattccacatggcagcaaatggtgacttttcaagcttggtctcttcaattaagaagacaatccactggagggaaacttttcacatacttacattgcaagaacttgagaaatggtcccatttggtcttttggcatgggtttgacactacgcttcgtccttgcttagtaatccgccttggactcgcgtgctctactatagcccctcgtgatagacctcgttttgggcaagccgtagtttctcagattgaccatggtattatacatttgaccaacgaagaagatccaagaattactgttttgctggattgccatgggatttctccattcagatttccgatgcaaatgatgaggtcatttgtcaacttggttcaagaaaactacccaaatcgtcttggagtattaattgttgtccgtcttcctccagttgtcagagttattgcgcatacttttattcaactcctgaaaccatccacaaagcagaagctgcgtttcgagggggaatcgtacaagaagacgttagccgagttcttacagatcgtcccagctttcctcggcggcaaatgcaactgctctcgatgcaagaagcctcgagacagttcactaatccaggcaggggaggggagcaggagcaggagccttatcagcgccggctccaggtcaccagtctcggacctggacttcgacgaggaactggaggagcttccatccccttacaactgcgagaacgcgataagggccgcggtgatcggcctgctgatggtgtggatttttgtcgcctttctcgctgggatgaatgacccccagcagcccatttcttagcctcctgacccccctgtctcctgacagttcatagaactgtctacccgtgtcactagtgtagcgttactgtatgttgtttgttcctctttgaggttgactgtatgttgtttctcgc

SEQ ID NO: 2373 - DNA, 2411 bp, Sorghum bicolor; identical to SEQ ID NO: 1100

SEQ ID NO: 2374 - DNA, 2262 bp, Zea mays
cttgcttgggtgatccgggtgcctggtttctcggttccgcggcttccgctgctgttggattcgccgagccggagccggagccgccggagatgaccgtcgacgagctgaagctgcaggcgagggccagcggcggccacggcgccaaggaccagttccccgtcggcatgcgcgtgctcgccgtcgacgacgacccgacctgcctcaagatcctcgagaacctcttgctccgctgccagtaccatgtgacaacaacgggacaggcagccacggccctgaagctgctgagggagaagaaggaccagtttgaccttgtgatcagcgacgtccacatgccggacatggacggcttcaagctcctcgagcttgtgggcctcgagatggacctcccggtcattatgctgtctgcaaatggggagacacagacagtcatgaaggggattacccatggagcatgtgactacctgctgaagccagtgcgtattgagcagctgaggactatatggcagcatgtggttaggcggaggagttgtgacgccaagaacagtggcaatgacaacgatgattcgggtaaaaagttgcaggtggtgagcgttgaaggtgacaatggcggtgttaatcgcaacaagagaatttcacgcaagggtagggatgataatggtgatgacggtgatgattctgatgacaacagtaatgagaatggagactcgtcgagccagaagaagccaagggttgtgtggtctgttgaattgcaccgaaagtttgtggctgctgtcaaccagcttggcattgacaaggctgttccaaagaaaatattggatcttatgaatgttgagaacatcacaagggagaacgttgcaagtcatctgcagaagtatcggctgtatctgaaaagactcagcgcagatgcaagcaggcaggctaacctaactgctgcatttggaggaagaaaccctgcttatgtgaacatgggactagacgccttcaggcagtacaatgcatatgggagataccggccagttccaaccactaaccattcacagccaaacaacctccttgcaaggatgaactctcctgcatttggtatgcatggtctgctgccttcgcagccacttcagattggacacaaccagaacaatctgaacacttccctagggaatgtcggggggatgaacaacggcaacttgatcaggggtgcgcatatgccactgcaggatactagcaaatgctttcctactggcccttctggtaattcgttcgcgaacatatcaaacagcacacaactggttacgacaaacaacttgccattacagtctcttgagccaagcaaccaacaacaccttggtcggctgcattcctctgcagaccctttcaactcatttgttggtgagcccccccagtttgcagatcttggaaggtgcaacaccacctggccaaccgcggtctcatcatccaatgttcaggagattggccagaaggacaggatcgtgaataggcccaagcttgagcctctctcaagctttacagaagcatccagtcagatccctttgctgggaaatgaaatgcagagccaccaagtagcatcactagccagcaacggtcttccgatgccgttcactcaggaagcggtgcccttcgcttatggaagcagcacgaactcgagagagatgctgaataacaaccttgcgcttagtaattcaggcgtcaactctacattgccgaaccttcgcatagacggttctgttgttccagggcagacactgggtggtagcaattcaggtggttgtgttgtcccccctctgcaagatggcaggattgatcaccaagctgtcagcagtcatctaaactacagcaacgaactcatggggacaagtaggctgcaaaggggactcagtggtggtctggatgacattgtcgtggacatgtttaggccggaccgcgcagacgatggcgtccccttcattgatggggactgggaactggtctagcaggtttcagttctctacatcaagtctgccttcgtgtgagattttccgcatttgtggttgtggaggggttcggcgcttgattggtccaaagttgtttatagtagcaagattgcatcacaaatgccctttgcatttggtttttcagtttagcgaccaggttccagtgtcacgtccgaatatcaactatgtggtatttgctaccttaactcgtatggctatgttttcaagtcaggtgttaactgtggctatcgtgatatatacagcatggttatgagcc

SEQ ID NO: 2375 - DNA, 1893 bp, Zea mays
atgaccgtcgacgagctgaagctgcaggcgagggccagcggcggccacggcgccaaggaccagttccccgtcggcatgcgcgtgctcgccgtcgacgacgacccgacctgcctcaagatcctcgagaacctcttgctccgctgccagtaccatgtgacaacaacgggacaggcagccacggccttgaagctgctgagggagaagaaggaccagtttgaccttgtgatcagcgacgtccacatgccggacatggacggcttcaagctcctcgagcttgtgggcctcgagatggacctcccggtcattatgctgtctgcaaatggggagacacagacagtcatgaaggggattacccatggagcatgtgactacctgctgaagccagtgcgtattgagcagctgaggactatatggcagcatgtggttaggcggaggagttgtgacgccaagaacagtggcaatgacaacgatgattcgggtaaaaagttgcaggtggtgagcgctgaaggtgacaatggcggtgttaatcgcaacaagagaatttcacgcaagggtagggatgataatggtgatgacggtgatgattctgatgacaacagtaatgagaatggagactcgtcgagccagaagaagccaagggttgtgtggtctgttgaattgcaccgaaagtttgtggctgctgtcaaccagcttggcattgacaaggctgttccaaagaaaatattggatcttatgaatgttgagaacatcacaagggagaacgttgcaagtcatctgcagaagtatcggctgtatctgaaaagactcagcgcagatgcaagcaggcaggctaacctaactgctgcatttggaggaagaaaccctgcttatgtgaacatgggactagacgccttcaggcagtacaatgcatatgggagataccggccagttccaaccactaaccattcacagccaaacaacctccttgcaaggatgaactctcctgcatttggtatgcatggtctgctgccttcgcagccacttcagattggacacaaccagaacaatctgagcacttccctagggaatgtcggggggatgaacaacggcaacctgatcaggggtgcgcatatgccactgcaggatactagcaaatgctttcctactggcccttctggtaattcgttcgcgaacatatcaaacagcacacaactggttacgacaaacaacttgccattacagtctcttgagccaagcaaccaacaacaccttggtcggctgcattcctctgcagaccctttcaactcatttgttggtgagcccccccagtttgcagatcttggaaggtgcaacaccacctggccaaccgcggtctcatcatccaatgttcaggagattggccagaaggacaggatcgtgaataggcccaagcttgagcctctctcaagctttacagaagcatccagtcagatccctttgctgggaartgaaatgcagagccaccaagtagcatcactagccagcaacggtcttccgatgccgttcactcaggaagcggtgcccttcgcttatggaagcagcacgaactcgagagagatgctgaataacaaccttgcgcttagtaattcaggcgtcaactctacattgccgaaccttcgcatagacggttctgttgttccagggcagacactgggtggtagcaattcaggtggttgtgttgtcccccctctgcaagatggcaggattgatcaccaagctgtcagcagtcatctaaactacaacaacgaactcatggggacaggtaggctgcaaaggggacttagtggtggtctggatgacattgtcgtggacatgtttaggccggaccgcgcagacgatggcgtctccttcattgatggggactgggaactggtc

SEQ ID NO: 2376 - DNA, 2354 bp, Oryza sativa Japonica Group
tttggtggtggtgctcgctctcgctcaccctgctttgacctttggatttttatttttaaggatccaagaaagtgctgtttcttgggttgcttggaggtggaggagtttgggagattgtttgtgtttgattgattggttgattgattggaggaagatgacggtggaggagaggcaggggagggtgggaggccatggtgtgagcggcggcggcggcgggagagaccagttcccggtcggcatgcgggtgctcgccgtcgacgacgaccccacctgcctcaagatcctcgagaacctcctgcttcgatgccagtatcacgtgacaacaactggtcaggcggccacggccctgaagctgctcagggagaacaaggaccagtttgacctggtgatcagcgacgtccacatgccggacatggatggcttcaaactccttgagcttgtcggcctcgagatggacctcccagtcattatgttgtctgcgaacggggaaacacaaactgtcatgaagggtataacccatggtgcatgtgactatcttctgaagccagtgcgtcttgagcagctaaggacgatatggcaacatgtgattaggcgtaagaattgtgatgctaagaaccgtggtaacgatgatgacgctggtcagaaggcacagggaatgaacaatgaaggtgagagtattggtgctaaccgcaacaagaggcagtcacggaaaagtagagatgagaatggagatgatggtgatgattctgatgagaacagtaatgagaatggagactcatcaacacagaagaagccaagggtcgtgtggtctgttgagctgcaccgaaagtttgtggctgctgttaaccagcttggcatcgagaaggctgttccaaagaaaatattggatctcatgaatgtagagaacatcaccagggagaatgttgctagtcatttgcagaagtatcggctgtaccttaaacggttgagcactgatgcaagcaggcaggctaaccttgcagctgcatttggaggaaggaaccctgcttacataaacatgaattcatttggaaactacaacgcatatggtagataccgtacagtcccaactgctggccatacccaggcaaacaacattcttactaggatgaactccccttctgcgtttggtgttcatggtttgctgcattcacagccaattcagttaggacatgcccaaaataatctgagcacttcactgaatgatttaggagggcttaataatggtaacatgatcagaggtgcacagatgtcaacaattctaactggtccttctggtaactcctttccaaacatatcgaatggtgcaccgctggcaactgcaaacagatcactgcaacctcttgagtcgagcaatcagcaacaccttagtcgggtgcattcatcttctgcagatccatttagcacacttgttggtgagtctccccagtttcctgatcttggaagaaccaccaatacttggcaaactgcggttccatccaacattcaggatcgtggtcacaatgataacatgtcgcaagccaccctgcatatgaatggccccaaaattgaacctgtctcaagcttcacatcatccaatcagattccgctgctgggaaatgagatgcagggccaagtagcatcactagctagcaatgttccaatagcattcaatcaggacacatcaccattcaactatggaagcagcacaaactcaagagacatgctaaataacagccatgtatttagtaactccagcatcaacacatcgttgcccaaccttagcttagacaatccggctgtaccaaggcagacactggatcgtgggaatacgggcattgtttctcccatgcaagatggaaggattcatcaccaagctgttagcaatcagctaaactataatgacgatcttatgcggacaactgggctgcaaaggggtctcagtggtggtctagatgacattgttgttgacatgtttaggccggaccgcgaagacgacggcgttccttacatcgatggggactgggagctggtctagccagcctccatttcaatcattagtccgcgtacgaggtttttctgcattcgcggtgtcggctgctgattggtccatgctcacttgtcagcacaaagtggtgttcatagtggctagccttcatcacaagtgcatttcacatttggcttcttttttcagcttagtgattattagttggccagtcagtctgtgaaatttatgtggagaaacggctatgtggtgtgtttttatcatgacttatactataataactatgttagttcaggtataaccggttatcctgataatatagtatgcttggtaaaattctcgttaatcatcg

SEQ ID NO: 2377 - DNA, 2286 bp, Hordeum vulgare subsp. vulgare
ggtaggatccagggacgccgttcgccggggcattaggtgatccggctgggctgtgttgggctcgcggcggaggaggggaaggaccgaaggaagatgaccgtggaggggagggtcggcgggggggacggcggcggcaaggacaagttcccggtgggcatgcgcgtgctcgccgtcgacgacgaccccacctgcctcaaggtcctcgagaacctcctgcgccgctgcgactaccatgttaccaccactgggcaggcagccaccgccctcaggatgctcagggagaacaaggaccagtttgacctcgtgatcagcgatgtccacatgccggacatggatggtttcaagctcctcgagcttgtcggtctggagatggacctcccagtcattatgttgtctgcaaatggggagacacagacagtcatgaagggcataactcatggagcatgtgactacctgctaaagccggtgcgtcttgagcagctgaagacaatatggcaacatgtgattaggcggaataccaagaaccgtggtagtgacaacgatgatgccagtcagaaggggccgaatgctgaaggtgagaatggtggcgctaaccgcaacaagaggcagtcacggagggatagagatgagaatggagatgatggtgacgattctgatgagaacagtaatgacaacggcgactcgtcatcccagaagaagccaagggttgtgtggtctgtggagctgcaccggaagtttgtagctgctgtcaaccagcttggcattgacaaggctgttccaaagaagatattggacctcatgaacgtagagaacatcaccagggagaatgttgctagtcatctgcagaagtaccggctgtatctgaaaaggatgagtatggatgcaagcagacaggctaacctagttgctgcacttggaggaaggaatcctgcttacagcaatatgaattcaatggatgtcttcaggcactacaacaacgcgtacggtagataccgaccagttccaaccagcacccattcccagtcaaataaccttgttgcaaggatgaactccccttctgcatatggaatgcatgggttgctgtctccacagtcgcagccacttcaccttggccatgcccagaataataatctgggcacttccctgaatgatttaggggtcaataatggtaacctgatcagaactgcacacatgtcaacgatggtgactggtacctctggtaacacttttgcaaacatatcaaatggtgcacaattggctcctacaaatagggcagttcagcctcttgaatcaagcaacaggcaacaccttggtcggataaattcgtcttcgacagactcatttagctcattcactagcgattctccccactttccagatcttggaagaagtagtaacacctggcaaactgcagttccatccaacattcagcaacttggtcagaacggcagcatgtcccaagcaagttttcatgggaatggtccaaggatggaacctgtctcaagctatgcaccaccatcaaatcagattacatctctaggaaatgagatgcagaatcaagttgcgccactagctagcaatacccttccaatggtattcaatcagggtgcagcgccattcacctttggaaacagcacaaactcgagagaggcacacaatagcaaccttgcgttcagcaattcaggcatcaacacttctttgccaaaccttcgcattgacaattcgattatgccaaggcagactctggatggcgggaatacaggcggtgttccctctctgcaggatggcaagattgatcagcaagctgttggtaatcagctcaattacagcaacaatgatctcgtggggacgagtgggctgcaaagggagctcagtggtggtttggatgacattgttgttgacatgttcaggccggataacgatactggtggcattttcatcgacacggactgggggctggtctagccagtctgctttcaccaagtcccatgcgcgagattttccgcatttgtgtggtgtctgctgctgatttgtccatcatatgcaattgcctgctcaaagttgtccatagtagcaagccttcatcacaaatgccttttgcatttggttttctcagtttagcgtttggttccgtgttagtcgtccagtattcagagttatattgggtaacaactatatgctgtttgggtccgtgactcgcataattatattaattcaggtataccctgtttatcgtaagatatagtatgcttggtatgcaagtgaattcttcgtgttaattgttgg

SEQ ID NO: 2378 - DNA, 2021 bp, Sorghum bicolor; identical to SEQ ID NO: 914

SEQ ID NO: 2379 - DNA, 2003 bp, Zea mays
cggcggcgggttacctcccaacagcccgaccatggaagccgacatcgctttcaggtatgagatcccccggaccgcccagttcctccgcgacggcgcctacaccagggtcgcgctccagttccccgacgagatgctgaaggatgctgctgcggtggcgagggcgttgcggcgggagcttgcctccggcggcgccgacagtggggttagggtgttcgtgatggccgacacggcgtacaactcctgctgcgtggacgaggtgggcgcgtcccacatcgatgcgcagtgcgtcgtccactacggccacgcctgcatgagcccaacatcaaatttgccagctttctttgtatttgggaaggcaccgttggatgtccacgcatgtgccggcacattgctggagtgctcaaggaaaagcaataagcgcattctggttttatatggactagagtacgcatatgcattggatgaccttagacagactttcatggagtcatgtaaatcaaattctggcaatcatgaagtccagtatgcagaagttctatgttcagttatgagtccatcatcaagtactacagaagaaaacaaaattcctcagtcgagtggcccctcttgtaatggggatatctccagaaacagcgagtcggcaacattcctgaataatcgtaatggcatggaatgttccagttccacacaaaagtacagccttgctggcatgacatggaatatttcagttgaggagaaaatggaggactatttcatattttggattggacaagatagctcagcatttgccaacatagtgcttaccttcaataaatgtgaaatagttagatatgatgcaatagaaaatcaactcacagcggacgtctctcatctgatgaaaattcttaggcgaagatattacctcgtggagaaggcgaaggatgcaaatattattggcattttggtgggaactctgggtgtagctggttatcttcatataatcgaacaaatgaaagatctgatcaaggccgctggaaagaaatcctatacattggtcatgggtaggcctaattctgccaagcttgcgaattttccagagtgcgaagtttttatttatgtttcttgtgcccaaactgctctgctggatagcaaggattttttagctccagttattacaccttttgaagctgtactagcttttggcaggggaagagagtggaccggagagtatcttttggatttcaaggatttgatcacttcagagaaacaagaagctgcgagcacaacaggagaagcacgcttttcttttatcaaaggtgtctatgtggaagataattgccctcaagaaaatgaggaacaatcggaaacgtcgctcgctctggctgaggtaactgaaaaggcactgagcatccaaaaccagcacaacgacgctgtcctttaccaaggaagagcaatgtcctcaatcgactacctcaaggcacgttcctaccgtggtctaactggagaatacgaaggcccagttcctgattcagtcttggtaggcagaatgggcagggcagctggttacagtgacgagaaaactgagagcgcacagtgaaggtagcattatgcgagttgatcagttgctacaggctccccttttttggcggtgaaaaaccaggagggtgcacaatgattcaatcatgcagcctggatggtttaccaacctgtgtacttttgtttaggtgggctaacaggtttatagacaattgtcaacatttttttattgttgagaatacctgtttctagtcccagggaacaatactttggatgctgttcaatcaggtggcttttttgctattaggaactactagtgtgtgcctaatcagtttgtatgcaatagtgagagctatctcactgatgtggggaagccttttttttttctttctaacaactgtggcatgtgttcagaagatgagatgtacactattcacaacatgcactgtactcatccattatgtttgtacaagacaccaaatttactc

SEQ ID NO: 2380 - DNA, 1977 bp, Oryza sativa Japonica Group
atgggcgacgacatcgacgcgaggtacgaggtcccccgcacggcggagttcatccgcgcccgcgcctacaccagggtcgcgctccagttcccggacgagatgctcagggacgcggcggcggtggcgcaggcgctgcggcgggagctaggcggcggtggggtaaagctgttcgtgatggccgacacggcgtacaactcgtgctgcgtcgacgaggtgggcgcgtcccacatcgatgcccagtgcgtcgtccactacggccacgcctgcatgagcccaacatccaatttgcctgctttcttcgtgtttgggaaaacaccattggataccgatgcttgtggccgctcattgttggagtgctcgagagaaagtgataaacgcatcctggttttttatggattagagtatgcacatgcattggatgatcttaaagcagtagttgcggaattatacaaatcacattctcgcagtgttgaagttcagtatgcagatgttctctgttcagttatgagcccaagctctgctgcagaagtggaacacggtcaatccgatggaagcactcatagtgatgatttatctatacaaagtgatgtagcgacatttgtgaataattgttgcaacgtggaaggatccacacgcaagtatagccttggaggactaacatggtctacatccatagatgataatatggaggactatttgttatattggataggacaagataactcagcatttgccaacattgtgcttaccttcaataaatgtgatatagttaggtatgatacagtagcaaatcaaccatcaagggatgtctctcatctgatgaaaatacttaggcgcagatattaccttgtggagaaggcgaaggatgcaaatattgttggcattttggtggggaccctgggtgttgctggttatcttcacatcattgagcaaatgaaagatctgatcaaggctgctggaaagaaatcatatacgttagtcatgggccgacctaattccgcaaaacttgctaatttccctgagtgtgaagtttttgtttatgtttcttgtgcccaaactgctctattggatagcaaagattttttagctccagtcattacgcctttcgaagctgtattagcttttagcaggggaagggaatggacaggagagtatcttctagatttcaaggatttgatcactacagataaaccagaaatttcaagcacaactgaagaagcaagattttcctttatcaaaggtggctatgtggaagataattgccttgaagataacgaggaacagccagagacatcgcttgcacttgctgaggtaacagagaaggcgctaagtataaaaaatcagaataatgatgcagttctttaccaaggaggagcaaagtctgcgatcgactatctcaaggcacgatcctaccgtggtctcaccggagaatacgagggtccagcaccagactcggtcttgacaggcagaacagggagagctgccgtattccatatttgcaaatctgcaatttggttcctctgtaccaaggtggctgtaaatactggcagaaacagccagcaagatcacattgttttgcaaagccggctagatgctccatatgctgattcaaagctcatgactgctggaaaaaagaacatgatcacaccacttattggaaatgaaatggtaattaggatcaaccagcaggagcacacctgtcacaaagaaaggagagactcgccgttgaactcaagctccttcaatatctcggaaggttgcattatattgtcgatgccagagaaagacgagttcatcccggtgaaggtccacatgatcttttcgagcttagggacaagccccattgtggaactcgatctcagtgattttaaagcagtgcacaataagatcgcagagttttgggaactcatctttgttgaaggcaagatggctttcatcaaaagactcatccaagagctccaggcagcggatatttga

SEQ ID NO: 2381 - DNA, 1828 bp, Hordeum vulgare subsp. vulgare
ggagctctcctgctgctttgcgcttccctccctccgagcgggattcactctcgccggtgaatccccccaccatggacgacgtcagctcgaggtacgagatcccgcggacggccgagttcctacggggccacgcctacaccagggtcgccctccagttcccggacgagctgctcaaggacgcggcggcggtggcgcgggcgctgcggacggagctcggcggcgggaccaagctgttcgtgatggccgacaccgcgtacaactcgtgctgcgtcgacgaggtgggggcgtccaacatcgacgcccagtgcgtcgtccactacggccactcctgcatgagcccaacatcgaatttgccagctttcttcgtattagggaaagcaccattggacatcagttcgtgttgccgctcattgctgtactgctcgagggaaagcaataaacccgttcttgcgttatgtgggttagagtatgcacatgctttggaagatcttaaaagagccactgtggaattatgcaaatcagattgtcaaaattccaaaatccattatgcagaagttctgtgttcggaaatgagtccgtcatcaagtcctgctgcagaagagcaatgttctcaatccaatggaagcactcgtaatgatggttttcctgcacacaatgatgatttggcaacacttgttaacagttgctgtaatgtggaagggtccacgcgcaagtataatcttggaggccttacatggcgcatatccaccgatgagaaaatggacgactatttgttatattggattggacaagataactctgcttttgccaacgttgcacttactttcaataaatgtgatatagttagatacgacacaatagcaaatcaattctcaagggatgtctctcatctgatgaaaatacttaggcgcagatattaccttgtggagaaggcaaaggatgcaagtattgttggcattttggtgggaactctaggcgttgctggttaccttgacataatcgagcaaatgaaaaatctgatcaaagctgctggaaagaaatcttatacactggtcatgggacggcctaattctgctaagcttgccaattttcctgagtgtgaagttttcgtatatgtttcttgtgcccaaactgctttattggatagcaaagaatttttagccccagttatcacaccatttgaagctgtattagcttttagcagaggaagagaatggactggagaatatcttttggatttcaaggaattgattagttcggagaaaccagaagttgcaagcagaagtgaagaagcacgtttttcttttatcaaaggcggctatgtggaagatgattgccctgaagaaaacgaggagcattcagaaacgtcacttgcactggccgagctaacggagaaagccctaagcacccgaaaccaaaatagcgatgcagttctttaccaaggaggcgcgaagtctgcgattgaatacctccaggcccggtcctaccgcggtatgactggagaatacgagggtccagcgccagactcggtcttggtaggcaggacagggagggctgctggttactcggatgagaaaacgaagagcccacaatgaaggaatgctgtgtgcatttgcatactggacagttttgtcgggagagcctgttggttcattttagcggggaaattggcacttctggatggcgttttactggcttagggcctttgggttttgtatactagaaactgctgtattcatagggtcaattttgttgtgagtcatgaggcgcatgtgaaaactgtggcgctttgccaaattaagtagatcttggtgaccctgtcttaacc

SEQ ID NO: 2382 - DNA, 1626 bp, Oryza sativa Japonica Group
atcatctccccggcacgcgccacacgcgtatgtaacgcaacgcaccgcggggactcgcgcggctcgaccacatcagtcccaacgacccccccccccccccgggcctcggcagcggcgcgggcagggatggcaacggccgcctccgcctccgcctccgcctcccccgccgcggcgttcggcgccaaaacccgacgcccgggccccagccccagccccagcccgagccccgcatccgcattcgcgaggccttccccccgcgcctcggccgccggcaggctccacgcaagcctccacctcggcggcgcgagcgccacgggcagcagcatcgtcagcaacgccagcggcatccacctggcggcccccgtgctcgcgccgttggccgtgccgaagatgaccggcgccgtcggggcgcacaagaacgtcctgctcttccactgcgaggagatgcgggagctcgccgagcaggtggtcgcccggaacgacgacatcgagctgcgctccatctcatggaggacatttgccgatgggtttccaaatttattcatctcgaatgcccacacaatccgcggacaacatgttgctttcttagcatcatttagttcgccaagtgtcatatttgagcaactatcaattatatatgctctgccaaagctgtttatttcgtcattcactcttatactcccatttttccctactgggacgtctgagcggatggaagatgaaggagatgttgccacagccttcacacttgctagaattttgtcaaatataccaatatcaagaggcggtccttcaagtctagtgatctttgatattcatgctttgcaagagagattctactttggagactcagtcttgccatgttttgagagtggcattcccctactcaaaagtaggcttcaggaactacctgattctgacaatataaccatagcttttcctgatgacggtgcatggaaacggttctataagcaacttcaacatttcccaatggttgtatgcaacaaagttagagaaggggaacagagaatagtacggataaaagagggggatcctagaggccgccatgttgttatagttgatgacttggtacagtcaggtggtacattgattgaatgccagaaagtattggcagagcatggagcagcaaaggttagtgcatacgtgacacatggcattttccccaacaagtcgtgggagaaatttcagcctgataatggagagggtccgggtcatgggctaagccacttctggattactgattcatgccctctcactgtcaatgcggtcaaggacaggcagccgtttgaaattctcagtctggcaggacctattgcttctgctcttcagatttagcaaattcactatgtttgcttggccaaccgggatattgtttagttcattcttcccccacattttcaggctcttggatttttttctctttctagaaaggatatgttcttaatgtttattgaaacctcaggtgaaaattccatgaattggttaaacggcaaggatattcataggatagtttgcttaataatctgactgaaaagaagtcaacgagtcgagctatgttctataaataaaactgtccaataaactttctgctgagttttctcttgc

SEQ ID NO: 2383 - DNA, 1574 bp, Sorghum bicolor
agccacctcggctgtttggatttgggctactcggcaacaaacctcctccccctttaccgcggcgtgcggcggatggcaacggccgcctccgccttccccggcgcgttcggcgtcaaaaccccagccccagcccgtgggctgagcgcgcacccggccctcaccccgagccccgcattcgcgaggcctttgccgcgcacccccgcctgcggcaggtcccgcgccagcctccacctcggcggcgtgggcgcggccagcagcagcgccgccgccgccggcaacggcaccgggctccacgtgccccccacgaccgcgccgctcgccgtgcccaagatggccggctccatgaagacgcacaagaacgtcctgctcttctactgcgaggagatgcgggacctcgcgcggcaggtggtcgcccggaacgatgacatcgagctgcgctccatctcatggaggaaatttcccgatggatacccgaatttgttcatctcgaacgcccacaacattcgtgggcagcatgttgcctttttggcctcgtttagctcgcccagtgtcatatttgagcaactatctgtcatatataatctgccaaagttgtttatttcttcatttactcttatactcccgttttttccaaccgggacttctgagcgcatggaagatgaaggagatgttgcaaccgcctttacacttgccagatttttgtcaaatataccaatatcacgaggtggaccttcgagtttagtaatttttgatatccatgctttgcaggagagattctactttggagactcagtcttaccatgttttgagagtggcatccccttgctaaaaagtaggcttcaggagctacctgattcccataatataaccatagcatttccagatgacggtgcatggaagcgcttctataagcaacttcaacattttcctatggttgtatgtaacaaagttagagaaggggagcaaagaattgtacggataaaagagggagatcctagaggacgtcatgttgttatagtggatgatttggttcagtctggtggtacattgattgagtgccagaaagtactggcagctcatggagcagcaaaggtcagtgcatacgtgacacatggcatttttcccaataactcatgggaaaaatttcagcatgataatggagagggtccggagcacggcctgagccacttttggcttactgattcatgcccccttactgtcaacgcggtgaagggcaggcggccatttgaaattctaagtctggccggacctatagcttctgctctccagatttaggaaaatctggtctgctcgatcccttgggatattgttggctattcagttcattcttctttcttttttctttgaggaatttggtgctttccttccgacagctatagagcatatcgcaatgtatttaatagaaatagagaagcttaaaatggcagatcttcactgcagcgtctgcttggcgaaaagcattcgtagtcgtaggattgcctgttcaataatttgactgagcaagtcaagtgtcgatctgtgttctataaataaaactctcgaataaagtttca

SEQ ID NO: 2384 - DNA, 1551 bp, Hordeum vulgare subsp. vulgare
gacctgccacatcagaaccagtctcgtcccctcccggcgcgcgtgacaggcgaagcagaccgaagatggcaacggccgcctccgcctccgcctcccccgccgccctccgcgccaaaaccccagccccgaccgcgcacccaggcccgaaacccagcctcgcattcccgtggccttcccccggggcttccgcctccgcctccggcaggctccacgccagcctccacctcggcggggtccgcagcaacggcaccggcctccacgtgctgcaccccgacgtcacgccgctggccgtgccgaagatggccggcggcgcgggggcgcagaagagcatcctgctctaccactgcgaggagatgggggatctcgcccgccaggtggccgcccggaacgacgacatcgagctctgcaccatctcctggaggaagtttcccgatggattcccagatttgttcataccaaatgcccagaacattcgtgggagacatgttgctttcttagcatcatttagctcgcctggtgtcatttttgagcaaatatcgataatatataatctgccaaagctgttcattgcttcatttactttgatactgccatttttcccaactgggacttccgagcgtatggaagacgaaggagatgttgcaactgcctttacacttgctagaagcttgtcacacataccaatttccagaggtggacctaccagtttagtgatttttgatattcatgctttgcaggaaagattctactttggagactcaatcttaccatgttttgagagcggcatccccttgttgaaaagtaggttacaggagctacctgattctgataatatagccatagcttttccagatgatggcgcatggaagcgcttctataagcaacttcaacattttcctatgattatatgcaacaaagttagagaaggtgatcaaagaattgtgcgtataaaagagggagatgctagaggccgtcatgttgttatagtggatgacttggtgcagtctggtggtactttgattgaatgccagaaagtgctggctgctcatggagcagcaaaagttagtgcatacgtgacgcacggcattttccccaacaaatcatgggagaaatttaagcctgataatggagagggtccggagcatgccctgagccacttttggattaccgactcgtgccctctcacagtcgaggcagtcaaggacaggcggccatttgaaattctcagcctggctgattccatcgcttccgctcttcagatttagcaagctgatttggtctgctcgctcctctgggatattgtttaattcatttttctagcacattctcctcccacctttcttttcgagtagtttctctcggctgggatattgtttagttcatcttctgatctttattattcctgagaaacctcacatcacatcctacatcttcacctcggggaagtgttcgatggagtagggtatagtgtatgcctaataacttggcaggacaggccaagcgagtcatacgtctgctatataaataaaaaagatcgagtaattttatctg

SEQ ID NO: 2385 - DNA, 1622 bp, Zea mays
tctgccaacgccgctactcggcgcaccttggcttgctatttcgccaacaacctcctccctctttaccgcggcgtgccgcgtgcggcgggcgcggatggcaacggccgcctccgcctccccctcccccggcgcgttcggcgccaaaacccctgccccagcccgtgggctgagcacgcacccggtcctgaccccgagccccgcattcgcgaggtcttcgccgcgcacccccgcctgcggcaggtcccgcgccagcctccacatcggcggcctgggctcgaccagcagcagcagctgccgccgccgccggcaacggaaccgggctccacgtgccccccacggtcgcgccgctcgccgtgcctaagatggccggctccatgaagacccataagaacgtcctgctcttctactgcgaggagatgcgggacctcgcgcagcaggtggtcgcccggaacgatgacatcgaactgcgatccatctcatggaggacatttccggacggatacccgaatctgttcatctcgaatgcccataacattcgtgggcagcatgttgcctttttggcttcgtttagctcgcccagcgtcatatttgagcaactatctgtcatatataatctgccaaagttgtttatttcttcgtttactcttatactcccgtttttcccaaccgggacttctgagcgcatggaagatgagggagatgttgcaaccgcctttacacttgccagatttttgtcaaatataccaatatcacgaggcgggccatcgagtttagtaattttcgatatccatgctttgcaggagagattctactttggagactcagtcttaccatgttttgagagtggcatccccttgctgaaaagtaagcttcaggagctacctgattcccataatataactatagcatttccagatgacggtgcatggaaacgcttctataagcagcttcaacattttcctatggttatatgtaacaaagttagagaaggggagcagagaattgtacggataaaggagggagatcctagaggccgtcatgttgttatagtggatgacttggtccagtctggcagtactttgattgagtgccagaaagtactggctgctcatggagctgcaaaggtcagtgcatatgtgacacatggcattttccccaatagctcatgggagaaatttcagcatgacaatggagagggtccggagcatggcctgagccacttttggcttactgattcatgcccccttactgtcaaggcggtgaagggcagacggccatttgaaattctaagtctggccggacctattgcttctgctctccagatttaggcaaatctggtctgctcgatccttcgggatattgtgactattcagttagttcttctttcctttgttgctgttgaggaatttggtgttttcctttgtacagctattgagtgtctcgcaatgtatttactagaaaaccataaaatggcagatcttcactgcagggtctgcttggcagaaagcattcgtagtcgtagtattagctgttaataatttgactgagcaagtcaagcgttgatctgtgttctagtataaataaaactctcgaataagtttcagtgaaaaaaaaaaaaaaaa

SEQ ID NO: 2386 - DNA, 914 bp, Sorghum bicolor
gactcggctaccgctctacgccaggttcccacgtcttcatcaggcccttctccaagcacccaccagttaattgcagttttcgctaagcgtctttgggatatcaagtttgttgttgtccaagaagaagaaatatgcaggcttctagggctaggcttttcaaagagtataaggaggtacagagagagaaatcagctgatcctgatatccagttgatttgtgatgattcaaacatattcaaatggactgctctcatcaagggaccctcagagactccttatgaaggtggtgtcttccagcttgcctttgctatcccggagcaatatcctctactacctccccaagttcgatttctgaccaaaattttccacccaaacgtgcatttcaagactggtgaaatttgcttggatatcttgaagaatgcatggagccctgcatggaccctccaatctgtttgtagggctataattgcattgatggctcatccagagccagacagtccacttaactgtgactcaggcaatcttctacgatccggtgacatcagaggctttcaatcgatggcaaaaatgtatacaaaacttgctgcaatgccaaagaaaagctaagtttgcatgatgtaatggaacatcgatggcaaaatgtatacaaaaattgctgcaatgccaaagaaaagctaagtttccaggatgtaatggaagtgttttaaatagcgggctaagacatttagcggttcatgtctaaaacagctaatagcggagctaaatcgggctatgcggaatatagcggctaaattgtacatgaacacaaatagcggcactctgcctcaaaaggctatagcgggctatagcggcagctatagcgggatatttaaaactatgaatggaacacatgtataaggcatgttgttagagaaa

SEQ ID NO: 2387 - DNA, 1009 bp, Zea mays
acaggcaacgtcctcatcttcatctcccaggttttcccctccaatcacccccaggtcttcctctcgcgagttgcggtctcgcggccccctccaccgaccgccgcctcctcacaaccgcggaagctgcttccctctccattggacgcggccagcttccatctctcggtcacctccctctacatcccacggccgctaccaccttccctctacctcacacggccgccggcctctccaaggtctgcacacgcattcagcgacgcatttgcctatatcagcactgtggtcataactctagtagagaaaggagaagatgcaggcatctagggcaaggcttttcaaggagtacaaggaggtacaacgagagaagtcagctgaccctgatatccaattaatatgtgatgattccaacatattcaagtggactgctcttatcaagggcccttctgaaacaccttatgaaggtggtgtgtttcaacttgcgttcgcaattccagagcagtatcctctactgcctcctcaagttcgatttttaaccaaaattttccacccaaatgtgcatttcaagacaggtgaaatttgtcttgatatattgaagaatgcatggagccctgcatggacccttcagtctgtttgtagagcgataattgctctgatggcccatcctgaaccagacagcccacttaactgtgattcaggcaatctcctgcggtcgggtgacatcagaggctatcaatcaatggcccgcatgtatacaaggctggctgccatgccaaagaaaggttagatgtagaacatgtgccaagccaagagcctatgtcagtccatatgttgtcaggtttgctgtgtgctgtctgtctgtgaacttggtggttcttgtttcctaataagtcctaaccattcatgtgtgtgtattctgtattctgtatcccggattcccgatgcttggtctgtgatgtaataaatcctggaattcaacagttgttacttctgatcaaaaaaaaaaaaaaaa

SEQ ID NO: 2388 - DNA, 960 bp, Zea mays
ctccaatcacccccaggtcttcctctcgcgagttgcggtctcgcggccccctccgccgaccgccgcctcctcacaaccgcggaagctgcttccctctccattggacgcggccagcttccatctctcggtcacctccctctacatcccacggccgctaccaccttccctctacctcacacggcagccggcctctccaaggtctgcacacgcattcagcgacgcatttgcctatatcagcactgtggtcataactctagtagagaaaggagaagatgcaggcatctagggcaaggcttttcaaggagtacaaggaggtacaacgagagaagtcagctgaccctgatatccagttaatatgtgatgattccaacatattcaagtggactgctcttatcaagggcccttctgaaacaccttatgaaggtggtgtgtttcaacttgcgttcgcaattccagagcagtatcctctactgcctcctcaagttcgatttttaaccaaaattttccacccaaatgtgcatttcaagacaggtgaaatttgtcttgatatattgaagaatgcatggagccctgcatggacctttcagtctgtttgtagagcgataattgctctgatggcccatcctgaaccagacagcccacttaactgtgattcaggcaatctcctgcggtcgggtgacatcagaggctatcaatcaatggcccgcatgtatacaaggctggctgccatgccaaagaaaggttagatgtagaacatgtgccaagccaagagcctatgtcagtccatatgttgtcaggtttgctgtgtgctgtctgtctgtgaacttggtggttcttgtttcctaataagtcctaaccattcatgtgtgtgtattctgtattctgtatcccggattcccgatgcttggtctgtgatgtaataaatcctggaattcaacagttgttacttctgatctattt

SEQ ID NO: 2389 - DNA, 855 bp, Oryza sativa Japonica Group
gcgtcttcccgttcgtcctcctgtccggtccgagtccctctgacgacgcgactttccccacgccgggatcgagctccggggaggggagctgcgagctgaaacactttgtcatatcagtcaacagtagagaggagaccagatgcaggcatctagagctaggctctttaaggagtataaggaggtgcagcgagaaaagtcagctgatccagatatccagttaatctgcgatgattcaaacatattcaagtggactgctcttatcaagggcccttcggagacaccttttgaaggtggtgtatttcaacttgcattctctattcctgagcaataccctctccttcctccgcaagttcgcttcttgaccaaaattttccacccgaatgtgcatttcaagacaggtgagatttgcctggatatcttgaagaatgcgtggagcccagcatggacactacaatccgtttgtagagccataattgcattgatggcccatcctgaaccagacagtccacttaactgtgactcaggcaacctcctgcgctcaggcgacatcagaggctatcaatccatggcaagaatgtatactaggttggctgccatgccaaagaaaggttaactccagggtgcaaaaggaaatatgcgccaagcgaaggcatggctgattcatgtgatttgctctgttaagtgtaactcttactgtcaccatgtgaacatctggtacttattttcttacctcactcttatggatgtatgccctggagtgaagagaagaaaaacatgcattgtaatgcttggtctatatgatgtcataaatataactgggttcggtacttctaatgcactgtccattgttcaatt

SEQ ID NO: 2390 - DNA, 941 bp, Zea mays
agaagctcctccggtcctcccttctctccgtagaaacatttcccgacgggtgtttcccacgccggaatggaccagccggcaccataagcccaagattcgtttgatgagtttgtacgatactggctctacagttaggagaacacatttaatctaccttcactagcattcagtaatgcctttgcctaaatcagacctggggtcataactctttagtagagaaccaagaagatgcaggcatctagggcaaggcttttcaaggagtacaaggaggtacagcgagagaagtcagctgaccctgatatccaattaatatgtgatgattctaacatattcaagtggactgctcttatcaagggcccttctgaaacaccttatgaaggtggtgtgtttcaacttgcattcgcaattccagagcagtatcctctgctgcctcctcaagttcgatttttgaccaaaactttccacccaaatgtgcatttcaagacaggtgagatttgtctggatatattgaagaatgcatggagccctatatggacccttcagtctgtttgtagagccataattgctctgatggcccaccctgaaccagacagcccacttaactgtgattcaggcaatctcctgcggtccggtgatatcagaggctatcaatcaatggcccgcatgtatacaaggctggcggccatgccaaagaaaggttagccgtaaaacatgtgccaggccaagagcctattgtccatgcatggctacatgttgtcaggtctgccttgtgctgtctgtatgaactttgtggttcttgattcatgaaatactaaccgttcgtgtgttgcgtgtgtgtctggggtaatgagaggacactcgggttctcgatggtgttggtctgtgatgtatttagtaataagaaaataaaaaatgatttctcgacaaaaaaaaaaaaaaaa

SEQ ID NO: 2391 - DNA, 951 bp, Vitis vinifera
aaaaaacagaggaaaatcaaagaaatctgtgtttggattacttctattccatcgttttcttcggttttctctgctgccaatcgttgtcaagggacattcacatctttgacctttgaggcatattagatttgccaagcagcaaacaagatgcaggcatcaagagctaggcttttcaaggaatacaaagaggtgcagcgggagaaagcagcagatccagatattcaacttgtctgtgatgattccaacatattcaaatggactgctcttatcaagggaccatcggagacaccttttgagggtggtgttttccagcttgcttttgctgttcctgaacagtatcctttgcaacctcctcaagttcggttcttaacaaagatatttcatccaaatgtgcattttaagacaggagagatttgccttgatatcttgaagaatgcatggagcccagcttggacactccagtctgtatgtagggctataattgctttaatggctcatccagagcctgatagcccactaaactgtgattcaggcaatcttctacgatctggtgatataagaggataccaatccatggctaggatgtacactaggcttgcggccatgcccaagaaagggtgaagtattggagcgctgtttgtattcttggatgtcaaaagatcatattgttactatcctgcaagaactcctacgtcaaaacctcaaaaaaagaaagaaaaaaaacttcaaattctgaatgggacatgtaattggtggcttgctgttgtattgaaagacgtgactctacatttaataagcagctgatttttaagacgatagatgtctacatttaataaccgcagaactttttattcgaactgcaagggaggagataatttttttttttgtttacatatcattaagtcttacatgtaagagttaataatcccacaaaaaagataggattcagaa

SEQ ID NO: 2392 - DNA, 759 bp, Hevea brasiliensis
gtaacttccatcgcatctgagatagcttatcagttatttggtcaccgttggatttataggctttctgaagtctattgggttaccaagaagggactagcatgcaggcatcaagggcaaggctgttcaaggaatacaaagaggtgcagcgtgagaaagcagttgatcctgatattcaattagtttgtgacgattccaacatctttaagtggactgctcttatcaagggaccaacagagactccttatgagggcggagtcttccaacttgccttttctgttccagagcagtatcctctgcagcctcctcaagtgcggttcttgacaaaaatatttcatccaaatgtgcattttaagacaggagagatatgtcttgatatcttgaagaatgcatggagcccagcctggacacttcagtctgtttgcagggctataattgctttgatggctcaccctgaacctgatagccctttgaactgtgattcaggcaatcttctacgttctggtgatatcagaggttatcaatccatggcaagaatgtatactagacttgcagcgtcaccaaagaaagggtgaatatgtgcagtgaatttctgtggtcattagagcatgttgcgatgagtgttgagccatcatgataaatgccaaaataattttctgagttgttgaagtcaaactattgttgtatgctttagctttaaacctgactaattgaattattcaacaaccttgttgggtaaaaaaaaacaaaaaaaaaaaaaaa

SEQ ID NO: 2393 - DNA, 464 bp, Lolium temulentum
gcatctagggcaaggctcttcaaggagtacaaggaggtgcagcgagaaaagtcagctgacccagatatccaattaatctgcgatgattccaacatattcaagtggactgctataatcaagggcccatcagagacgccttttgaaggtggtgtatttcaacttgcattctcaattcctgagcagtatcctctactgcctccacaagtccgcttcctgaccaaaattttccacccaaatgttcacttcaagacaggtgaaatatgcctggatatattgaagaatgcatggagccctgcgtggaccctacaatctgtttgcagagccattattgcgttgatggcccatccggaagcggatagcccacttaactgtgactcaggcaacctcctgcgctcaggcgacatcagaggctaccagtccatggcgcggatgtatactaggctagctgccatgccaaagaaagg

SEQ ID NO: 2394 - DNA, 474 bp, Arabidopsis lyrata subsp. lyrata
atgcaggcatcaagagcgagactctttaaagaatacaaagaggttcagcgagagaaagtagctgatccagatattcaattggtgtgtgatgataccaacatattcaaatggaccgctcttatcaagggaccgtcggagactccttatgaaggcggtgtttttcagcttgcttttgctgttcctgaaccatatcctttgcaacctcctcaagtgcgattcttgaccaaaatatttcatccaaatgtgcatttcaagacaggggaaatttgcctcgacatattgaagaatgcgtggagtcccgcttggacgcttcagtccgtgtgtagagctatcatagcattgatggctcatcctgagccggacagtcctcttaactgcgactcagggaatcttctaagatctggggatgtgagagggttcaattcaatggcacgcatgtacacgcgcctcgccgcaatgccaaagaaaggatga

SEQ ID NO: 2395 - DNA, 745 bp, Arabidopsis thaliana
acataatcatcgctattctctctctctctctctctctctctctctctcgctctcatatttgcagttgacaattcgttctctttgggaaattagagatgcaggcatcaagagcgcgactgtttaaagaatacaaagaggtacagcgagagaaagtagcagatcctgatattcaattgatctgtgacgataccaacatattcaaatggaccgctcttatcaaaggaccttcggagactccttacgaaggcggtgtttttcagcttgctttttctgttcctgaaccttatcctttgcaacctcctcaagttcgattcttgaccaagatattccatcctaatgttcatttcaagacaggagaaatatgtctcgacattttgaagaatgcttggagtcctgcttggacgcttcagtctgtgtgtagagctatcatagcattgatggctcatcctgagccggacagtcctcttaactgcgactcagggaatcttctaagatctggtgatgtgagagggttcaattcaatggcacaaatgtatacacgcctcgccgctatgcctaagaaaggatgatgatgatgatgatcctcttgctttttttttgtttttttttttgaaatttgtaatgatattgatttgcgagagtgaatacattattaacgagaagaagatgattcttctttattagttcacaatattacaatctgtcaagttgtcatatcttcttgtttaaggaatttgtcaaacca

SEQ ID NO: 2396 - DNA, 1685 bp, Sorghum bicolor; identical to SEQ ID NO: 915

SEQ ID NO: 2397 - DNA, 2752 bp, Oryza glaberrima
ggaggtgaacggggcggcgccgggggggttcgcgaggcccgacgcgttcgggaggttcgggaagttcgggggcaagtacgtgcccgagacgctgatgcacgcgctcaccgagctcgaggccgcgttccacgccctcgccggcgacgaggatttccaggtaaccgcccgccgtgctggatcccccctccgatttagtggatttggtgctcgcttattcgattcgcgaagtatatttcgtttgggttttattttcttcaacccccttggaaaactccaccatttcatttcgtcgccgaattggttgaaacaggtccgtatattttgttttttttttgcggattaatggcgattgcttcgattgtatccttatagtttgtttcttttttgtgtgtggattaacgctagtaatgcgtgatactttgtgtgttcgagatctctggtttgtggtagaggggagaagtcacatcaatttgcagaaccaatcgtcgtttgagacagattgattttttgacgaagattcggttttcgtctgtgtccctttccgacaactgcagccacatgacttttgagcccctattcttcagacagcggtttcactgtatttgatctgtagttgcatcaccttacagagaccaaatgcatttcgatagtttgtttcatttatcactgcaatgcctgcaacttcatatgattcctgaatcatgcgaaatgtttagaagtggtagtagtcattttgattgctagggagattatgaaatgacaagagagttgtgtttgacaccaccttcctgctctttgcagaaagaacttgatggtatcctcaaggattacgtcggccgtgagaccccgctgtactttgcggagcgattgactgagcactacaagcgcgctgatggcacaggccccaagatttacctcaagagggaggatcttaaccacactggcgcccacaagatcaacaatgctgtcgcgcaagtcttgcttgccaagcggcttggaaaggaacgtatcatcgctgagactggcgctggccagcacggtgttgccactgccacggtgtgcgcgaggtttgggctgcagtgcatcatctacatgggtgctcaggatatggagaggcaggcacttaatgttttcaggatgaagcttcttggagcagaggtacgatggaaacttgtgcatctttgtgcttgcaatcatgtactcttgtttcgatatgaatgtacaattgtttctcaacttgatttggtgatcccttttgctgaaacaggtgagggcagtacattctgggacagcaactttgaaggatgccacctcggaggccatccgcgactgggtcaccaacgtcgagaacactcactacattttgggatcagttgctggtccgcacccatacccgatgatggtgagagagttccataaggtgattggcaaggagacccgtagacaggccatggagaagtggggtggcaagcctgatgtcttggttgcttgtgttggtggtggatcaaatgccatgggtctcttccatgagttcgttgatgatcaagatataagaatgattggagtggaggctgctggctatggtgtagacactgacaagcatgctgccactttgacaaagggagaagtgggagttctccatggatcattgagttatgtgttgcaggatgatgatggacaagttattgaaccccactccattagtgctgggtgagtattctattgttggcattgacagtaattcatttttacagcagttgggctaatcatctatgctgttttgaatgataggctggactaccctggtgttgggcctgagcatagctttttgaaggatattggacgtgctgaatatgacagtgtgacagatcaggaggcactggatggtatgtgtttcagtgtcactatctaccagttctcttctctgatattttccttccacttgataaatgccaatagtatatctgtttgatggtggggaactggggactgctgatgagtaagagtaggctaatagaaccaacaaatgttaaaaactgttattctaaatagcatatattgtgaatgttctgaactttcttgatacaagtttaagcagggctaaggcaccaatattgttgtttggcccctttaccatcttagtgatatcagagcgactatggtttggttgtctgtaactctgtatctgattcacgtgttagacaaaaactgatttacactggaaattgagctttgcggtcgagttagtcgggtatccgaaagtgaccctgaattatagataagaccaggcaagttcttaacatgctgactcagtcgtttgcaaaccgtcagtctgccacacacatatgttaaacatttagttgatgttctgatcttgattgttgcgacttgttttaacataatcccaagtactaaaatgcgtaaagttatgttggaagtctttcacatcttcactgacataattataaacatttactagttcatgtcccaatctttgattaattttgcaatatctaactctttaagtgctatgctcaaaatctaactaattccttttcgaatgctatcttcacatgcagctttcaagcgcgtctctcggctggagggcatcatccctgctctggagacatcccatgcgctcgcctacctggagaagctctgcccaacgctgcccgacggcgtgagggtggtggtgaactgcagtggaagaggagacaaggatgtccacacagccagcaagtaccttgatgtc

SEQ ID NO: 2398 - DNA, 1641 bp, Vitis vinifera
tataaactcgctctttctctccaaccaaacataaaatatggccgcctctgcaaaaaccccaatctccagaacccagaccacgtctctctataagccctacagcagttctccccaattgcccttcaaactcctcaagcttacacctaccccttgcgccgccaaagggctgtccatttgctgtgccctgcaaatggagcccaaggttggacctggttcgcaggtgccggattcgtttggccggttcgggaaattcggagggaagtacgttcccgaaactctgatgcatgccctcaccgagctggagtctgcattccgggctctctctggagacgtagaatttcagaaagaactagatggaatattgaaggactatgttggcagggagagccctctttattttgcagagcggcttacggagcactataagcgtcacaatggtgaagggccactcatttacctcaagagggaagatctgaaccatactggggctcacaagattaacaatgctgttgcccaagctctgcttgccaagcgtttgggaaaaacacgcattattgctgaaactggtgctggtcagcatggagttgcaactgcaactgtatgtgctcggtttggattgcagtgtattgtttatatgggtgcccaagatatggaaaggcaggcacttaatgttttcagaatgcggcttcttggggctgaggttagagctgttcatgctgggacagctactctgaaagatgcaacatcagaagctatacgagactgggtgactaatgtggagacaacccattatattttgggttctgttgctgggccccatccttatcccatgatggtcagggacttccatgcagtgattggcaaagaaacaagaaaacaggcaatggaaaagtggggaggcaaaccagatgtgctggttgcatgtgtaggtggaggttccaatgccatggggcttttttatgaatttgttgatgatgaagacgttaggctgattggtgtggaggcagcaggttttggcttagatagcggtaaacacgctgctaccttgactagaggggaggttggggtcttgcatggcgcgatgagttatttattacaagatgatgatggacaaataattgagcctcattctattagtgctggcctggattaccctggagttgggccagagcatagctttctgaaagatttaggacgtgctgaataccatagcatcactgatgaagaagcattggaagctttcaagagattatctcgacttgaaggcataatccctgctctggagacatcgcatgccctggcttatttggagaagctgtgcccaaccctcccaaatgggactaaggttgtacttaattgcagtgggagaggagataaggatgttcatacagccattaagcatttgcaggtttgatggtgtttgtgtggtgccattgatttgaaccttatgcttgaagagatgtggttttgagtcccctaatctgcaattctttcccttggtaataatgttgtgtgtcttgaaaagactgtcttatttatatatgaatactatgggttagtagaagagtgtgattgtttttgaatggttgagacatcggacccgtagcggaatcatacggcaacaaagctatttgttctctt

SEQ ID NO: 2399 - DNA, 3186 bp, Vitis vinifera
atggagcccaaggttggacctggttcgcaggtgccggattcgtttggccggttcgggaaattcggagggaagtacgttcccgaaactctgatgcatgccctcaccgagctggagtctgcattccgggctctctctggagacgtagaatttcaggttctttctttcttcttcttttccttttatttgggttttcgtttttcgttttttggtttcaattgaaattgtttctggatttcttttgtttctggtttttagtgggaagcaacttctgggcttttctggtttttaataagaatgagtttctattttggttaggaaaatggtttcagaggtgtaaggaattgatttttgtcatgtttggtatgggatattgaagttatgatatatgtttggttgctgggaaaacagagggaacgcgaactttatatgtttgggtttgaaaacggtttcaggggtgcgaacattcaactttgttatgccttaattggatttatcgatcttctaaagtctgcttaattgctgagaaaactcagggggggaatctgctttaggtttgttgttaatgatggggcttggaattattgggtttcaaagttcaaatctttttttcccttttgattgatgtttatatgcatccaaacagggcatttggaaaaacagaattcaggaactggttatgggaaatggagtatcaacccttatagcaaaaaattaaattgattatggttttcatggacggaccaaaaccacaatggattaggaagtttacaactttatcatagacattaattccaatgtactctgttgagcatagagagggtgtcttctgcaactacattatataaactacaagggaattgctgtgtttatctacatgtgtctgtgtgtatatttatatttttgtgcttgtttttgagatgtatgtttatgattgcagaaagaactagatggaatattgaaggactatgttggcagggagagccctctttattttgcagagcggcttacggagcactataagcgtcacaatggtgaagggccactcatttacctcaagagggaagatctgaaccatactggggctcacaagattaacaatgctgttgcccaagctctgcttgccaagcgtttgggaaaaacacgcattattgctgaaactggtgctggtcagcatggagttgcaactgcaactgtatgtgctcggtttggattgcagtgtattgtttatatgggtgcccaagatatggaaaggcaggcacttaatgttttcagaatgcggcttcttggggctgaggtttgtttattattgctattatttgctggtcttttgaattgtctattcagcgtgatgcactactttattgtttgcaaattagtgcaaatttttttagttcagtaattctttgtttcatgatgttgtgatgaaattatgatgtgggagaacctctgttgcggtcataatgtcctgtatctttcagacgctgtgttagtaatgctaccatgtcctcagccggtgacctctatataaataatttgtgttttgtgtgaagcaatatcatattgcttctgttatataccttcggcagtgcttgtttatacaaatctgcgtcactaaattgaattatagaaaacataagtcacctgtttgctaataaataagaaggatagcattctagagtaactgccattgttgttcgactgggtcaaaattacttgttgagtaggttgtagattggctattagttgtcaataatgtttattactgtgtatttctcatttagctccttgtgctatctgtaatatggctgtcctggtaattcttcgtttaactgtaaactgaaccatttcaatacaggttagagctgttcatgctgggacagctactctgaaagatgcaacatcagaagctatacgagactgggtgactaatgtggagacaacccattatattttgggttctgttgctgggccccatccttatcccatgatggtcagggacttccatgcagtgattggcaaagaaacaagaaaacaggcaatggaaaagtggggaggcaaaccagatgtgctggttgcatgtgtaggtggaggttccaatgccatggggcttttttatgaatttgttgatgatgaagacgttaggctgattggtgtggaggcagcaggttttggcttagatagcggtaaacacgctgctaccttgactagaggggaggttggggtcttgcatggcgcgatgagttatttattacaagatgatgatggacaaataattgagcctcattctattagtgctgggtaagacaattattaattttttgtgattagtcttaacttatttttgctgctaactaaccctaccaattttactgtgaatagcctggattaccctggagttgggccagagcatagctttctgaaagatttaggacgtgctgaataccatagcatcactgatgaagaagcattggaaggtatcaaaattttacacttcaattttctttcttgggtctgtcagatctttcatagtattctaaatgtgaatttggtaatttgaatttcccatgtaggagttggtctgccatttcatgaggggtttcttcttaattcatttacatagaaatttggaagcttaatccatgagtttcaaataagatccttgttataatagaaatcatccaacttgtcacaaatcttctaatctttcatcagtcaattcattgttttcttcttgcagcgctatttctttttcgtaaaaaaaaattgtgctctagcttttgaatttttattcttttgagttactctacattttgtttcctccaaatactttcaccatagcttgaccagagtggatgtactggaacacttgacattccaaattagagaagagttgtgtctgcctctctactagtgttgcataaaatttgtcttgctcaattaccgttgtatatcaatcattccccttttcctcattttcattatttgatttttgctgggtttgctattatgcagctttcaagagattatctcgacttgaaggcataatccctgctctggagacatcgcatgccctggcttatttggagaagctgtgcccaaccctcccaaatgggactaaggttgtacttaattgcagtgggagaggagataaggatgttcatacagccattaagcatttgcaggttt

SEQ ID NO: 2400 - DNA, 1671 bp, Arabidopsis thaliana
tttcaaggagaagaatatatttgactcagagagagattcattcagtaatggcagcctcaggcacctctgctactttcagagcctccgtttcttcagctccttcctcttcttcccaattgacccatttgaaatcacccttcaaagctgtcaaatatacgcctctgccatcgtctcgctccaagtcatcatccttctccgtctcctgcaccatcgccaaggacccgcctgttctcatggccgccggatctgacccggccctgtggcaacgacccgattcgttcggtcggtttgggaagtttggtgggaagtatgtacctgaaacccttatgcacgctctatctgagcttgaatccgctttctatgctcttgccaccgacgatgatttccagagagagttggctggaatcttgaaggactatgtgggtagagaaagtcctctgtattttgcagagaggcttacggagcattacaggcgcgagaatggcgaagggcctcttatatacttgaagagagaagacttgaatcacacaggagctcacaagattaacaacgctgtggctcaggctcttcttgctaagcggttggggaagaagaggattattgctgagacaggagcgggtcaacatggtgtggctacagctactgtgtgtgcccgttttggtttggagtgtattatctatatgggtgctcaagatatggagagacaagcactcaatgtgttcagaatgcgacttcttggtgccgaggtgagaggagtccactctggaacagcgacattgaaggatgcgacatctgaagcgataagagattgggtgacaaatgtggagactacccattacatattgggatctgtggcgggtcctcatccttaccccatgatggtcagagactttcacgctgtgattggtaaagaaacaaggaaacaagcgttggagaaatggggcgggaagccggatgtcttggtggcttgtgtcggtggtggttcaaacgctatgggactcttccatgaatttgtgaatgacacagaggtccggatgatcggtgtggaagcagcgggattcggattggacagtggcaaacacgctgctacattgacaaagggagatgttggtgtcctccatggagctatgagttacttgctgcaagatgatgatggacaaatcattgaaccacactccatcagtgcaggattggactaccctggagtcggacccgagcacagtttctttaaagacatgggacgggctgaatactatagcataaccgacgaagaagcgttggaagcgttcaagagagtgtcgcggttagagggaatcattccagcactggagacctcacacgcactagcttacctcgagaagctatgtcccacattatcagacgggacgagagtggtcttgaacttcagcggaagaggagataaagatgttcagacagtggctaaatatcttgatgtttgaagagagaaacacttatgtttgtttttcagttattcagacagaatgaaatcctttttgtacttgtaatctgtttgtactttacttctctctggtcagtacgtttccaacaaaattggaaatagaaaaagattacgaagagaacgaaatttgaataaatgtattatcaataaaataaaaaacatttcatattggaaatagtcttatgttcctc

SEQ ID NO: 2401 - DNA, 1696 bp, Polygonum tinctorium
gttctctcctcctccattcatggccgtctctacaagctctgctctgaaatcacagacctcctcctattcctcgctctctcaatcccgattgagcgccttccagttctccgattcgcaccccaaatccatcagattcgcacagaaacccctctctcgctgcccctcgatctcctgcgtgatgacacgggaggatttgggggccaagagcctcaaggcggatgcggcagatcaggagccgctcctcctccagcggcccgattcgtttgggaggtttgggaagtttgggggaaagtatgtgcctgagactcttatgcacgctctcgatgagctcgaaaccgccttccattctctcgccacggacgtcgaatttcagaaggaacttgatgggatcttgaaggattatgttggtagagaaactcccctttactttgcagagaggcttaccgagcattataagcgccctaatggtgaagggccgcagatttatctcaaaagggaggatcttaaccacactggggctcacaaaatcaacaatgctgttgctcaagcattacttgcaaagaggctgggaaagacccgaattattgctgaaactggagccggccagcatggagttgcaactgctacagtttgtgctaggtttggcttggagtgtatagtatatatgggtgctcaggacatggaaaggcaatcactaaatgttttcaggatgcggcttcttggagctgaggtgaggggagttcattccggtactgccacacttaaagatgctacatctgaagcaataagggattgggtgaccaatgtggagacaactcattacattttgggttcagttgctggtcctcacccataccccatgatggtaagagagttccatgcagtaattggtaaagaaacacggaagcaagctcttgagaaatggggtgggaagccagatgtattggttgcatgtgttggaggagggtcaaacgcaatgggactcttccatgagtttgttgatgataaggatgtcagattgattggcgtggaggctgctggttttggcttagatagcggcaagcatgctgccaccttgaccaaaggagaagttggtgtgcttcatggagccatgagttacctactgcaggatgatgatggccaggttatagagcctcattcaataagtgccgggctggattaccctggagttggacccgaacacagctttctgaaggacatgaagcgtgctgagtactacagtattacagatgaagaggcattggaagcattcaggagactttcccgacttgaaggcataattcctgctttggagacatctcacgcattggcctatttggagaagctctgtccaaccctcgcggatggtactagggtcgtgctcaactgtagtggccgaggggacaaagacgtgcacactgctataaagcatttgaagatgtagtttggtcgctttaccttatcgtctcaacgtcttagctgctcgaatgattccggttctgggtctgggtatctaaaatttatgtgccgtaattctgctgtcgaaattttgattagcaagccagggatcaaagtcttgtttgttagtgcatgctggatcaaagttccattatagaacaaattgtttgttttacagagtcaagcttgtattggatgtggaattacagaataagaaataaacccttttttgcgcctc

SEQ ID NO: 2402 - DNA, 1737 bp, Zea mays; identical to SEQ ID NO: 916

SEQ ID NO: 2403 - DNA, 1855 bp, Zea mays
ctgccgtttgcttggccatctccagctcactcccccctcgctagaggtagagcctgctctgctcagctcagccgcatccttgcctccactgcaaagatctctctcccttcttcaatggcatctgcctgccctcttactctcagattcctcttctcctgcatcctccttcaaacaatctgctgttcagctggcgcatatgcttgatgaaatgtatctgatctgccttcctgaaatagaaatggtgttttcttccattccaggagtatctgtggagctatcatacgattcagcacaggtcaaggcgctgtccagctcagccgtcaccgagtacagagtcacggtcaccgacaagcggcgtgcctattacgtcttccagaagccgtttgtgtgcagagacaagccatgcagatcgtcggagcctatcgccgccgccggctcatttgtcaacgaggctattgctggtgccaaacggcatgagccagaggcaaacggcgagctcgccgtggttgcggagatcgaaggggccggcgtcgtgccccacgtcaagagccgtgtggctccaagcgcggtggcaatgagtagcggccgggagaagaggctcttgggtgtcctggtcgacgtgccctcccctcggcgggagctcggcgaggcaagagccacggcgcgcgacgagttctctccggtcagcaacccggcgacgactcccgtgagcaacccagtcaccgtgccggccaccaacccgatgcccccgggcttcgtcaccgtgccatcgaccaacccgggcaacgggatcgcgaccaacccgaacctgccgccgttgtacccggagccgacgacgccgggcaccatgcccatgcctgacccgacgacgacgcccgtgaccgtgccacccgccttcacgaatccggtcgccgcgccgaacaccatgccggggacggcggtgacgaacccggcgacgacgccgacgcagttccctggctcgtcgcctgtcaccaacccggtgaccacgtatccgtacccgcagcagggcggcatgccggcaacaacgccgccagcggtgtaccagcctccggcgacggcgatgcccggcacggtgcagccgggcgcgccgaccgtggcagggcaggcggcgtggtgcgtcgccaagtcggggctcatggacaccgccctccaggacgggatcgactacgcgtgcggcgtcggcggggccgactgctcggccatccagcccatgggcgcctgctacaaccccaacacgctgcaggcccacgcctcctacgccttcaacagctacttccagcgcaacccgtcggcggcgagctgcgacttcggcggcgccggcatgctcgtcaatgtcaacccaagctcaggaacttgcgtgtaccagacaccagcaggtttcggcgccggttacagcccggggacgacgggcgtcggtgtgcctagcggttacactccggggatgtcgggcgccgtgggagggggctccggctccacggtgctgaacgccaacgaccccgggggtaactccatgtacgacgacggctacgacaacccgacggggctcaccgccggctcggcgtcgctgtcctgcggcggccgggtcgtcgtgtgcctcatctggatggtcacctttgcatttgtcagggagaaaatgttgtagagcccacctcgagctgctggaaggaaataggatcacactgctgtcacatgtttgtttgttaatcagttgtgtcgtgctgtacatatacgatcgagtgagtttctcatatgcgagatgagatgacgagtacatgttttttatgtcggttgtacaggagtggattcaaagatgaaaatgggattggagcaattc

SEQ ID NO: 2404 - DNA, 1848 bp, Sorghum bicolor
atggcagctgccagccctcttgctctcacattcttcttctgctgtatcctcctccttcaaacaatctgctgttcaggcgtatttgtggagctatcatatgattcgacacaggtcaagacactatcgagctcagtcgtcaccgagtacagagtcatggtcactgccaagcagcatgcctacctcttcttgaagccgttcgtgtgcagagagaagccatgcagatcggagcctctcgccgccggtggctcatttgttaacgaagttcttggtcctaaccggcgtctcaacgtcagcaacatcgtcgtcacggccaccgacacgcagctcggagcgctgcgccgcactttgcagtcgtttcacgcttctctcggcgccgccggattggcggcgagcgtcaaggtctcgccggagctctcgctgtcttctctgcgagtcgtcgccaaggatcgtgatcgtgccagaaagaagcggtggggcaaggtcatggagttcgtcaggaggacaggctcgtttgttcttgttcaggtggagacagaggcagaagcaaacggtgaggttgcggtggacgcggagatcgaagaggccgttgctgaggttgccgccctgttgcgcgccggcgccggcgtcgtgctccacgtcaagagccgtgcggctccaatcgcggtggcaatggcaaagctgggcggcgataccagccgggagaagaggctcttgggtgttctggtggacgtgtcctcccctcggcgggagctcggcgaggcaagagcgacggcgcacgacgagttctctccggtcagcaacccggcgacgacgcccgtgagcaacccagtgaccgtgccggccacgaaccccgtggccaacccgatggctccgggattcgtcaccgtgccgtcgaccaacccgggcaacgggttcgcgaccaacccgaacatgccgccgctgtacccggagccgacgacgccggccaccatgcccatgcctgacccgacgacgccgacgatgccgccggtgaccgtgccatcccctttcacgaacccggtctccgcgccgaccaccatgccgggtacagtgacaaacccggcagcccctgccgtgacgaatccggcaacgacgccgtcgcagttcccgggcacgtcgccggtcaccaacccggtgaccacgtacccgcagcagggcggcgtcggcgtcggtggcggcatgccggcaacgcagccagtgtaccagcctccggcgacgacaatgcccggcaccggcacggtgcagccgggcgcgcccaccatggccgggcaggcatggtgcgtcgccaagtcggggctcatggacaccaccctccaggacgcgatggactacgcgtgcggcatgggcggcgccgactgctcggccatccagcccatgggcgcctgctacaaccccaacacgctgcaggcgcacgcctcctacgccttcaacagctacttccagcgcaacccgtcggcggcgagctgcgacttcggtggcgccggcatgctcgtcaacgtcaacccaagctcaggaacttgcatgtaccagacatcatcaggtttcggcgccggttacagcccggggacgacgggcggcggcgtgcccggcggttacactccggggatgtcgggcaccggttacaacccagcgggagggatgtcgggcaccatgggagggggctccggttccacggtgctgaacgccaacaaccctgggggctccatgtacggcggctacgacaacccgacggggctcaccgcggggtcggcgccggtgtcctgcggcggctgggtcgtcctgtgcctcgtctggatggtcacctttgcgttcgtcaaggagagagtgtag

SEQ ID NO: 2405 - DNA, 2112 bp, Zea mays
cctagttccttcaccactgccatttgttttggccatctggtgctcatttccctcgccaccacaggctgctcagctcagccacatacttgcttgcaaagatccgtctctctctctctctctctctccctccctcccttcttcaatggcggcggcttcctgccctgttgccctcgcattcttctcctcctcctgtattctcctcctccttcaaacaatctgttgttcaggagtatttgtggagctatcatacgactcgacacaggtcaaggtactgtccagctcagtggtcactgacggctacagagtgatggtcactgacaagcagcgcgcctacctcttcctgaagccgtttgcgtgcagagagaagccatgcggatcggagccccccgccggctcgtccatcagcgatgttctcggtcccgaccgccggctcaacgtcagcggcatcgtcgtgacggccaccggcacgcggcagctcggcgcgcttctccgcactttgcggtcgcttcaggcttctctcggcgacgctgggttggcggagcgcgtcaaggtctcgccggagctctcgatgtcttctctgcgggtcgtgggcaaggatcgcgctcgtgcgaccaagaagcggcggtggggcaaggtcctggagttcgtcaggaggacacgctcgttggtctttgttcgtgtggacacggaggcgggagcgaacggggaggtcgcggtgatcgaagaggccgccgctctagttgccgctgtgctggacgctgacgtcggcgtcgtgctccacatcaagagccgtgcggttccaagcgcggcggcaatggaaaagcttaccggccggggggagaagaggtcgttgggtgttctggtggacgtgtcgtctcctcggcgggaccgggagctcggcgaggcgagagcgacggcgcacgacgagttttctccggtcagtaacccggcgacgacgcccgtgagcaaccctgtgaccgtgccggccacgaaccccgtgcccaacccgatgtccccgggattcgtcaccgtgccgtcgaccaacccgggcaacgggttcgcgagcaacacgaacctgccgccgctgtaccccgagccgacgacggcgccggtcaccatgcccacgcctgacccgacgacgacgatgccgccgcccgtgaccgtgccgtcccccttcgcgaacccggtcgccgcgccgacgaccaccatgccggggacggtgacgaacccggccacgaccccgtcgcagttcccaccggtcaccaacccggtgaccacgtacccgtacccgcagcagggcggcatgccgggaacgacgccggaggtgtaccagcctcccgcgacgacgacgcccggcacagcgcagcagggcgcgccgtctgtgaccgggcaggggcaggcgtggtgcgtcgccaagtcggggctcatggacgccgccctccaggacgggatcgactacgcgtgcggcgcgggcggcgccgactgctcggccatccagcccatgggcacctgctacaaccccaacacgctgcaggcgcacgcctcgtacgccttcaacagctacttccagcggaacccgtcggcgaccagctgcgacttcggaggcgccggcattctcgtcaacgtcaacccaagctcgggaacttgcgtgtaccagacatcagcaggtttcggcgccggttacagcccgggtacgacgacgggcggcggtggcgtgcccagcggttacactccggggatgccgggcgccggttacggcgcagcgggaggaggggtgtcgggcaccatgggagggggctccggctcgacggtgctgaacgcaaacaaccccggcggcaactcgatgtacggcggctacgacaacacggcggggctcaccgccggctcggcgccgctaccctgcggcggcggcggctgggccgtcctgtgcctcgtctggatggtcaccttcgcatttgtcaaggagaaagtgtagtgtggaaggagcccgcctcgaggggctggaaggaataggatcacactgccacgtgtttgttactcagttatgtagtgttgtgttgtacagatgagtgagatgttttttccctttagaggccaaaaaaaaaaaaaaaa

SEQ ID NO: 2406 - DNA, 993 bp, Zea mays
atggacgccgccgtctccaccctcaccgctctcgccatcttcgcgagcaccgtcgagcacgccgcctacaggagcgtgcaggggtatagggtggtcgggaggaaaggcggcgggtgggtccgttgggagaggtgggtggagcggcagttcgtcctctccctctccttcccacggtgcgtcgaggttgccctgcccgccgccgcgccgcggatactgccagcggggtggcgcagccggccggtgttccgcgagggacagaccgtcgacacttggcgttgcattgtggcattcgactccgtcgccgccgtcgctccgtcctccccgccgccgcccgtgctctcccccttcgtgaacccacagctgcagtatctgtctaatctgtacaatgacctgctgatggtgtttcggtttcgagaagagaaaacggtcccacaactcgttaattcaaagcaacccatccgttgtggtgaacaggggaaaacttctgatttgggtgatgcatcggagtccgattcggatggggattgtcaatctggcaaagaacttgcaccaccagttcagaagcatacaagagccaaccggaagcatatagatagcattactttagttgatatagctcagtacttccatcttccaatccgagatgcatcaaagacactcaagattggggtcagcatattgaagaggaaatgccgacagtatgggatacctcgttggcctcaccggaagatcaagtcacttgactctctcattcatgaccttgagttcgtgctagcaagagaggatgaggatgaggaggaggagaagcagctgcagaaggacaggctggctgctgcgataaacgccctcacaaaacggaagagcatgctggagagcgagaaggaaaccatacagcagaaaccggccatggacctgatggctgaaaccaagctattcagggaagatgttttcaagaggagatatagggccaaaagttcagtcatggatatggat

SEQ ID NO: 2407 - DNA, 1455 bp, Zea mays
atgctcctccacgtcagaagcccgccgtcctctttgtcctctccggctctccccaccgccagaaaggaaacggacccaacgcgatcgaagtccactgccgtcttcactgctgccaggcgccagccacggcccacggccaatgcaattgcagttgcagttgcaattgcacggcacccatttccagagccgtcctcaattagctagtcaaatctcgctatcctttccccaccatccagatcttccctttcatggacgccgccgtctccaccctcaccgctctcgccatcttcgcgagcaccgtcgggcacgccgcctacaggagcgtgcaggggtatagggtggtcgggaggaaaggcggcgggtgggtccgttgggagaggtgggtggagcggcagttcgtcctctccctctccttcccacggtgcgtcgaggttgccctgcccgccgccgcgccgcggatactgccagcggggtggcgcagccggccggtgttccgcgagggacagaccgtcgacacttggcgttgcattgtggcattcgactccgtcgccgccgtcgctccgtcctccccgccgccgcccgtgctctcccccttcgtgaacccacagctgcagtatctgtctaatctgtacaatgacctgctgatggtgtttcggtttcgagaagagaaaacggtcccacaactcgttaattcaaagcaacccatccgttgtggtgaacaggggaaaacttctgatttgggtgatgcatcggagtccgattcggatggggattgtcaatctggcaaagaacttgcaccaccagttcagaagcatacaagagccaaccggaagcatatagatagcattactttagttgatatagctcagtacttccatcttccaatccgagatgcatcaaagacactcaagattggggtcagcatattgaagaggaaatgccgacagtatgggatacctcgttggcctcaccggaagatcaagtcacttgactctctcattcatgaccttgagttcgtgctagcaagagaggatgaggatgaggaggaggagaagcagctgcagaaggacaggctggctgctgcgataaacgccctcacaaaacggaagagcatgctggagagcgagaaggaaaccatacagcagaaaccggccatggacctgatggctgaaaccaagctattcagggaagatgttttcaagaggagatatagggccaaaagttcagtcatggatatggattagcatttctctttagctgataatacctggtgtaaaaagatatggctgatcgaacctgtttgtaaagagataatcgatccatgtgtaccgccagttatatggtagctggtagctgctctcgtcataaccttcattttgttctgatggtgtctgttaattgtactcttcttgggtgaactgaactgctggagaacttaaaaaaaaaaaaaaaaaa

SEQ ID NO: 2408 - DNA, 1262 bp, Zea mays
cactgctgccaggcgccagccacggcccacggccaatgcaattgcagttgcagttgcaattgcacggcacccatttccagagccgtcctcaattagctagtcaaatctcgctatcctttccccaccatccagatcttccctttcatggacgccgccgtctccaccctcaccgctctcgccatcttcgcgagcaccgtcgagcacgccgcctacaggagcgtgcaggggtatagggtggtcgggaggaaaggcggcgggtgggtccgttgggagaggtgggtggagcggcagttcgtcctctccccctccttcccacggtgcgtcgaggttgccctgcccgccgccgcgccgcggatactgccagcggggtggcgcagccggccggtgttccgcgagggacagaccgtcgacacttggcgttgcattgtggcattcgactccgtcgccgccgtcgctccgtcctccccgccgccgcccgtgctctcccccttcgtgaacccacagctgcagtatctgtctaatctgtacaatgacctgctgatggtgtttcggtttcgagaagagaaaacggtcccacaactcgttaattcaaagcaacccatccgttgtggtgaacaggggaaaacttctgatttgggtgatgcatcggagtccgattcggatggggattgtcaatctggcaaagaacttgcaccaccagttcagaagcatacaagagccaaccggaagcatatagatagcattactttagttgatatagctcagtacttccatcttccaatccgagatgcatcaaagacactcaagattggggtcagcatattgaagaggaaatgccgacagtatgggatacctcgttggcctcaccggaagatcaagtcacttgactctctcattcatgaccttgagttcgtgctagcaagagaggatgaggatgaggaggaggagaagcagctgcagaaggacaggctggctgctgcgataaacgccctcacaaaacggaagagcatgctggagagcgagaaggaaaccatacagcagaaaccggccatggacctgatggctgaaaccaagctattcagggaagatgttttcaagaggagatatagggccaaaagttcagtcatggatatggattagcatttctctttagctgataatacctggtgtaaaaagatatggctgatcgaacctgtttgtaaagagataatcgatccatgtgtaccgccagttatatggtagctggtagctgctctcgtcat

SEQ ID NO: 2409 - DNA, 1359 bp, Sorghum bicolor
gccacagccacagccagtgcaattgcacggcagccaattttcagagcagcagtagctatttagcgattcctcaattagccagtcaaatctccacatcctttccccaccatccactttcctcccaaggctcccatggacaccgccgtctccaccctcaccgctctcgccatcttcgcgagcaccgtcgagcacgccgcctacaggagcgtgcacgggtacagggtggtcgggaggaaacgcggcgggtgggttcggtgggagaggtgggtggagcggcagttcgtcctctccctctccttcccaccgtgcctcgaggtcgccctgcccgccgccgcgccgcggatactgccagcggggtggcggacccggccggtgttccgcgagggacagaccgtggaggacacctggcgttgcattgtggcattcgactccgtcgccgccgtcgcaccgtcctccccgccgccgcccgtgctctcccccctcgtgaacccgcagctgcagtatctgcctaatctgtacaacgacctgctgaaggtgtttcagtttcaggaagagaaaaaggtctcacagctcgttaattcaaaaaagcaacccatccgttctggtgagcaggggaaaacttctgatctggctgatgcgtcggagtctgattcggaaggggattctcaatctgacaaagaacttgcaccaccagttcagaagcatataagagccaacaggaagcatatagatagcattactttagttgatatagctcagtacttccatcttccactccgagatgcatcaaagacactcaagatcggggtcagcatactgaagaggaaatgccgacaatatgggatagctcgttggccgcaccggaaaatcaagtcacttgactccctcattcatgaccttgagtacgtgctggcaagagaggacgacgaggaggaggagaagcagctgcagaaggagaggctggctgctgcgataacggccctcgcaaagcggaagagcatgctggaaagcgagaaggaaaccatacagcagaaaccgaccatggacttgatggctgaaaccaagctgttcagggaagatgttttcaagaggagatatagggccaaaagttcagtcatggatgatatggatttcggtatggtttagcatttctatttagctgataatagctggtgtaaaaagatatgggctggctgaacctggttgtaaagagataatctctccatgtgtatcgccagtttatatgatagtagctggttgctgctctcttcataaactttgctttgttctgatggtgcctgttaattttgctctactggggcaaactgaactgactggagaactgaacgtagcatggtt

SEQ ID NO: 2410 - DNA, 2622 bp, Sorghum bicolor
aaatgctttgggaaataagatgcaagtgatgatggatgcggataaggcgacagcgccgcggacagccatgggccccacgtgtcggcgggcgcgcgcagccaaccgccgccgaacgaagccaacaaccccggcaaggcaagcaactgcggccacgccgcgaccctgacgtccgccgtctccggcaccggataggtctccctcccccacacccctcgcgtgccttccgtagcccgtaggcacgcacgcttcccttcaaagccactgcttcgccttcttcttcttcttcttcttctgctacttaagcgcagggcgggcactcgcatccggacatccggtagctccatcacttcttgctttggaaaggaggcaacggatggtggatgcatgacacactcattgcattagtgcttaccacaagtggaagcctatggatctcaagcaatccttctctactacaatcttctgcgttctgcttctattctgtgtgggctgcagatgtcggcctttagaaatagaggccacccagacagcaaccctcaaggttgatgccacgccacagcttgcccggaagatccctgaaacattatttgggatattttttgaggagattaaccatgcaggggccggtggcatatgggcagagcttgtcaataacagaggtttcgaagctggaggccctcatactccatcaaacattgacccgtggtccatcattggagatgactcctctatattcgtggcgactgatcgtacatcatgtttcagccgaaacattgttgctctgaggatggaggtcctctgtaatgactgtccagctggtggtgttggtgtttacaacccaggtttttggggcatgaacatagaagatgggaaggcttacaatcttgttatgtatgttaagtctccggaaacaacggatttaacagtttcattaacaagctctgacggattgcaaaacttggcttcagctacgataacagtttctggcacatcaaattggacaaaagtggagcagaagctggttgctaaaggaaccaatagaacctcaaggcttcaaataaaaactaacaaaaaaggagttgtatggcttgatcaagtatcactcatgcctgaagacacatacaagggacatggtttccgcacagaacttatatccatgcttttggatttgaaaccacggttcttgagatttcctggaggttgttttgtagaaggtgagtggctaagaaatgcattcagatggagagaatctattggtccatgggaagagaggcctggacactttggggatgtttggcattactggactgatgatgggcttggatattatgagtttcttcagcttgcggaggacctgggtgctgccccaatctgggtattcaacaatggaatcagccacaatgatgaagttgatactgtagctattgctccttttgtaaaggatgtattggacagtctagaatttgcaagggggagtgcagattcaacatggggctctgttagggctgcaatgggacaccctgaacctttcccagttaaacatgtcgcgattggaaatgaagattgcgggaaaaagttttaccgtggtaattacctcaaattctacaatgctataagagaggcatatccagacattcaaatgatttcaaactgtgatggttcatctagaccacttgaccatcctgcagatttgtatgacttccatgtctatactgattctaagactttgtttaacatgaggagccaatttgacagaacatcccgtagtggacccaaggcttttgtgagtgagtatgctgtctggagaagtgatgcgggcagaggaagtcttctcgcttcattggctgaagctgctttccttactggtctggagaaaaacagtgacattgttcagatggcaagttacgctccactattcgtgaataacaatgatcaaacgtggaacccggatgctattgtcttcaactcctggcaacattacggaactcctagttactggatgcagacacttttccgtgagtccagtggtgccatgatccatccaattaatatgagttcccggtactcaagctcgctagctgcatctgcaattacgtggcaggactcagagaatagcttccttagagtaaaggttgtaaactttgggtcggacactgttagcctcacgatctccacaagtggacttcaggccagtgtcaactcgctgggatcaaccgccactgttctcacatctggcaacgttatggatgagaactctttcagtaacccaaacaaggttgcgccggtgaaaagccagctgagcaacgctggggagcagatgcaggtcacgctggctcctcactccttcaccacgttcgatctggcgctggctcagtccaagcttgtggcagagatgtgatcaatgtgttagcatcttgataaaaaaaagctttgtataccacgatacagatatatatacctactgtactacatgaataaaaatcacatcaggtttgtttggtgtttgattttgatttgcttcctccgtacgtgtttgctgtgcatggcagatactcagaccttgtctggttacttgggcattttttaacgcttgattggtaggactccttattttttcaccgc

SEQ ID NO: 2411 - DNA, 2453 bp, Zea mays
cgccgcggcgcgaccctgacgcccgccgtctccggcacccgataggcctcctccccacacccctcgcgtggcttccgtggcccgtagcccggcgcgcttcccttcaaagccactgcttcgcctcctccttctacttaagcgcagccggccccggccggcattcgcatccggtagctcgatcacttcttcctctggattttgggaaggaggcatcggacgtcggatgcatgacacactcattgcattagcgcctacgcctaccgcaagtggaagcctatggatctcaagcaagccttctctggtacaatcttctgccttctgcttctattctgcgtgggctgcagatgtcggactttggaaatagaggccacccagacagcagccctcaaggttgatgcctcgccacagcttgcccggaagatccctgaaacactgtttgggatattttttgaggagatcaaccatgcaggagctggtggcatatgggcagagcttgtcagtaacagaggtttcgaagctggaggctctcatactccatcaaacatcgacccgtggtccatcattggagatgactcctccgtgttcgtggcgactgatcgtacatcatgtttcagtcgaaacattgttgctctgaggatggaggtcctctgtgatgactgtccagctggtggtgttggtgtttataacccaggtttttggggcatgaacatagaagatgggaaggcctacaatctcgttatgtatgttcagtccccagaaacaaaggatctaacagtttcattaacaagctctgatgggttgcaaaacttggcttcagctacaataacagtttctggcacatcaaattggacaaaagtggagcagaagctggttgctaaaggaaccaatagaacatcaaggcttcaaataacaacgaacaaaaaaggagttgtttggcttgatcaagtatcactcatgcctgaagacacatacaagggacatggtttccgcacagaacttatatccatgcttttggatttgaaaccacgattcttgagatttcctggaggttgttttgtagaaggtgactggctaagaaatgcattcagatggagagagtcaattggtccatgggaagagaggcctggacacttcggggatgtttggcattactggactgatgatgggcttggatattatgagttccttcagcttgcggaggacctgggtgctgccccaatctgggtattcaacaatggaataagccacaatgatgaagttgatactgtagctattgccccttttgtaaaggatgtattggacagtctagaatttgcaagggggagtgcagattcaacatggggctctgttagggctgcaatggggcaccctgaacctttcctggtcaaacatgtcgcaattggaaatgaagattgcgggaaaaagttctaccgtggtaattacctcaaattctacaatgctataagagaggcctatccagacattcagatgatttcaaactgtgatggttcatctagaccacttgaccatcctgcggatttgtatgatttccatgtctatactgattctaagactttgtttaacatgaggagcacatttgacagaacatcacgtagtggacctaaggcctttgtgagcgagtacgctgtctggagaagtgacgcgggtagaggcagtcttcttgcttcgttggctgaagctgctttcctcactggtctggagaagaacagtgatatcgttcagatggcaagttacgctccactcttcgtgaacgacaatgaccaaacgtggaacccggacgctattgtcttcaactcctggcaacactatggaactcctagctactggatgcagacgattttccgcgagtcaagcggcgccatgattcatccggttaatatcagttcccggtactcgagttcgctggccgcgtctgcgatcacgtggcaggatgcagagaatagcttcctgagagtgaaggtcgtgaacttcgggtcggacaccgttaacctcacggtctccacgagcggactcggggccagcgtcaacgcgctgggatcaaccgccaccgtcctcacgtctggcaacgtcatggacgagaactccttcagtaacccgaacaaggttgcgccggtgaaaagccagctgagcaacgccgcggagcagatgcaggtcacgctggctcctcactccttcaccgccttcgatctggcgctggctgagcccaagcttgtggcggagatatgatgtgtgtgctgcacattacagtacacaaacagcgcgcggatggcagcaaccagagggtgtggagtgtggtgtgctgttagcgatcttgatcgataaaaaaggctttgtactggtgtaccacgatacaggataacgtactacgtactgttgcttcatgaaataaaaaccacatcaggtttttgcttggtgttggttggtttcctttc

SEQ ID NO: 2412 - DNA, 2245 bp, Zea mays
cacccgcagacggggagctcgcgtcttccttcggatggtggatgcatgcatgcatggtagacacgccggcccaaccagaattgacaagtggaagcgtatgggtattaccagcaacgacgcggcccctcgtgccgtcctcctccgcttcttgtttctgctctgcataggctgcaaatgcctggcatcagaggtagaggccacccagacggcgaccctcgcggtggacgcctcgccgcagcttgctcggaagatccctgatacactgttcgggatcttctttgaggagatcaaccatgcaggggctggtggcatatgggctgaacttgttagtaacagagggtttgaagctggaggcctccatactccatcaaacattgacccatggtccatcattggagacgactcctctgtatttgtggagaccgatcgcacatcatgtttcagtcgaaacatcgttgctctcaggatggaggtcctttgcgataactgtcctactggtggtgttggtgtttacaacccagggttctggggcatgaacatagaagaaggaaaggtctacaatcttgttatgtttgttaagtcaccagaaacaactgacttgacagtttcactaacaagctctaacgggttgcaaaatctggcttcagctacagtaacagtttccggcgaatcaaactggataaaagtggagcaaaagttggttgctaaaggaaccaatagaacctcaaggcttcaaataacaactaacaagaaaggagttgtctggtttgatcaagtatcactcatgcctgaagacacatacaagggacatggctttcgcacagaacttatatccatgattttggatttaaaaccacgattcttgagatttcctggaggctgctttgtagaaggtggctggttaagaaatgcctttaggtggagagaatctattggtccatgggaagagagacctggacacttcggggatgtttggcattactggactgatgatggccttggatactatgaatttcttcagcttgcggaggacctgggtactgaaccaatctgggtattcaacaatggagtcagccacaatgatgaagttgatactgttgctattgctccttttgtaaaggatgtattggacagtatagaatttgcaagggggagtgcaaattcaacatggggctctgttagggctgcaatgggccaccctgaaccattcccagtgaaatatgttgcaataggaaatgaagattgtgggaaaaaattttaccgcggtaactacctcaagttctacaatgctataagacaggcctatccagacattcaaatgatttcaaactgcgatggttcatctacaccacttgatcatcctgctgatttatacgacttccatgtctataatgattctaagactttgttcaacatgaagagcacatttgacagaacatctcgtagtggacccaaggcttttgtaagtgagtacgctgtttggagaggtgatgcaggtagaggaagtcttcttgcttcattggcagaagctgctttccttactggactggagaagaatagtgacattgtttccatggcaagttacgcgccactattcgtaaacgacaatgaccagacgtggaacccagacgcaatcgtcttcaactcctggcagcattacggcactcccagttactggatgcagacgcttttccgcgagtctagtggtgctatgttccatccaacgacaatcagctccagctactcaggttcacttgcagcgtctgcgattacctggcaggactccgagaacagcttcctaagagtaaaggtcataaacttcgggtcagatgctgtgaccctgacaatctccacaagtgggctccaggccagtatcaacgctctgggatcaaccgccactgttctcacatcagcagatgtgatggatgaaaactccttcagcaacccaaccaaggttgtgccggtaaagagcgatctgagcaatgctgcagagcagatgcaggtcacgctggctcctcgctccttcagctcgttcgatctcgccctggctcagtccaagcttgtagcggagatgtgagctaggctggtacactagtatacaatacaacgtgtgaagtgtggtacacaaataccagcaaccacaggggttgccaagctgttgttagcatcttgaacacatggctttgtattgtgtataatgacatgatgctgatactaatctctattatataaagcactagtttct

SEQ ID NO: 2413 - DNA, 2267 bp, Zea mays
atccaattcctatgccctgcacccgcagacggggagctcgcgtcttccttcggatggtggatgcatgcatgcatggtagacacgccggcccaaccagaattgacaagtggaagcgtatgggtattaccagcaacgacgcggcccctcgtgccgtcctcctccgcttcttgtttctgctctgcataggctgcaaatgcctggcatcagaggtagaggccacccagacggcgaccctcgcggtggacgcctcgccgcagcttgctcggaagatccctgatacactgttcgggatcttctttgaggagatcaaccatgcaggggctggtggcatatgggctgaacttgttagtaacagagggtttgaagctggaggcctccatactccatcaaacattgacccatggtccatcattggagacgactcctctgtatttgtggagaccgatcgcacatcatgtttcagtcgaaacatcgttgctctcaggatggaggtcctttgcgataactgtcctactggtggtgttggtgtttacaacccagggttctggggcatgaacatagaagaaggaaaggtctacaatcttgttatgtttgttaagtcaccagaaacaactgacttgacagtttcactaacaagctctaacgggttgcaaaatctggcttcagctacagtaacagtttccggcgaatcaaactggataaaagtggagcaaaagttggttgctaaaggaaccaatagaacctcaaggcttcaaataacaactaacaagaaaggagttgtctggtttgatcaagtatcactcatgcctgaagacacatacaagggacatggctttcgcacagaacttatatccatgattttggatttaaaaccacgattcttgagatttcctggaggctgctttgtagaaggtggctggttaagaaatgcctttaggtggagagaatctattggtccatgggaagagagacctggacacttcggggatgtttggcattactggactgatgatggccttggatactatgaatttcttcagcttgcggaggacctgggtactgaaccaatctgggtattcaacaatggagtcagccacaatgatgaagttgatactgttgctattgctccttttgtaaaggatgtattggacagtatagaatttgcaagggggagtgcaaattcaacatggggctctgttagggctgcaatgggccaccctgaaccattcccagtgaaatatgttgcaataggaaatgaagattgtgggaaaaaattttaccgcggtaactacctcaagttctacaatgctataagacaggcctatccagacattcaaatgatttcaaactgcgatggttcatctacaccacttgatcatcctgctgatttatacgacttccatgtctataatgattctaagactttgttcaacatgaagagcacatttgacagaacatctcgtagtggacccaaggcttttgtaagtgagtacgctgtttggagaggtgatgcaggtagaggaagtcttcttgcttcattggcagaagctgttttccttactggactggagaagaatagtgacattgtttccatggcaagttacgcgccactattcgtaaacgacaatgaccagacgtggaacccagacgcaatcgtcttcaactcctggcagcattacggcactcccagttactggatgcagacgcttttccgcgagtctagtggtgctatgttccatccaacgacaatcagctccagctactcaggttcacttgcagcgtctgcgattacctggcaggactccgagaacagcttcctaagagtaaaggtcataaacttcgggtcagatgctgtgaccctgacaatctccacaagtgggctccaggccagtatcaacgctctgggatcaaccgccactgttctcacatcagcagatgtgatggatgaaaactccttcagcaacccaaccaaggttgtgccggtaaagagcgatctgagcaatgctgcagagcagatgcaggtcacgctggctcctcgctccttcagctcgttcgatctcgccctggctcagtccaagcttgtagcggagatgtgagctaggctggtacactagtatacaatacaacgtgtgaagtgtggtacacaaataccagcaaccacaggggttgccaagctgttgttagcatcttgaacacatggctttgtattgtgtataatgacatgatgctgatactaatctctattatacaaaaaaaaaaaaaaaaaa

SEQ ID NO: 2414 - DNA, 2284 bp, Oryza sativa Japonica Group
acttaacaccaaagcctcggtctgtgtctgtccgccccccaacgcctcgccggcgcccagcttctcttccttccttccttgttgaggtctgaggtcttggatggtggccttatgacacacggcctgcactagtgtttacagctccaagtatggcttccagagaatccttcatgagtaccattttcttcttcttgcttctgttctccctcggctgcaagtgtatagcttcagagttacacttacatgcgacccagactgcggtcctcaaggttgatgcctcaccgcaacttgctcgacagatccctgacacactatttggaatattttttgaggaaatcaaccatgcaggggctggtggaatatgggctgaacttgttagtaacagaggttttgaagctggaggccctcataccccatcaaacattgatccatggtccataattggtgatgactcttccatatttgtggcgactgatcgaacgtcatgttttagtcggaatactgttgctctaaggatggaggttctctgtgataattgcccagctggtggtgttggcatttataacccagggttctggggcatgaacatagaagatggaaagatctacaatttagtgatgtatgttaaatcaccagaaactgtggagttgacagtttccttaacaagttctgatgggtcgcaaaatttggcttcaactaccataccggtttctggtgcatcgaattggacaaaactggagcagaagttggttgctcaaggaacaaatagaacctcaaggcttcaaataacaactaacaagaagggagttgtatggtttgatcaagtatcgctcatgcctgcagacacttacaagggacatggttttcgcacagaacttatatctatgatgttggacttaaaaccacgattcttgagattccctggaggttgctttgtggagggggaatggttaaggaacgcattcaggtggagggaatctattggtccatgggaagagaggcctggacactttggggatgtttggcattactggactgatgatggccttggatattatgaatttctccagctttctgaggatctgggtgctgccccaatctgggtgttcaacaatggaatcagccataatgatgaagttgatactgctgcgattgctccttttgtaaaagacgtattggacagtctagaatttgcaagggggaatgcagattcaacatggggttctgttagagctgcaatggggcaccccgaaccattccctgtcaaatacgtcgcaattggaaatgaagattgtgggaaaaaattttaccgcggtaattacctcaagttttataatgctataagggaggcctatccagacattcaaatgatttcaaattgtgatgcttcatcaagtccacttgaccatcctgctgatttatatgatttccatgtctatactgattctaagactttgttttcaatgaagaatacatttgatagatcatctcgtaatgggcccaaggcttttgtcagtgaatatgctgtttggagaagtgatgcaggtagaggaagtctacttgcttcattggcagaggcagctttccttactggactggagaagaatagtgatgttgttcagatggcaagttatgcaccactcttcgtgaacaacaatgatcaaacgtggaacccagacgccattgtatttaactcctggcaacaatatggaactcctagttactggatgcagactcttttcggtgaatctagcggtgctatgtttcatccagttacaatcacttccagctactctggttctctggcagcatctgcaattacttggcaggattctgaaaatagcttcttaagagtaaagattataaactttgggtctgatccagtgagcctcacgatctctgcaactgggcttcaggcccgtgttaatgcactgggatcaactgccactgttctcacatccagtaatgtgatggatgagaactcttttagtaacccgaataaggttgttcctgtcaaaagccagctttccaatgcagcagagcagatgcaagtcacgcttgctcctcactctttctcctcattcgatcttgcgcttgcccagtccaaactcgtggcagagatgtgaagcagcaacacaaggttagcgacagaaacacaagaaatacacgagatgtgatatgcgaataccagaatgctgtccatatatgtgcatgtatcttgaagcactactgtatagtgtaatacacagggaatgatgaataaaattcactcctggcttacttc

SEQ ID NO: 2415 - DNA, 2451 bp, Hordeum vulgare
caaccaaccaaccgccgaagcggcccactccggcaagcaactggccgtggcctccggcgtccgatcgccatccggagccacccttcccttcaaagccactgcttcctcgccgtggcggcttcgcctacttaagcgcgcgcctccgctgctcctgcactcactcgcaggatcctgactccgcctccgtcttcctcatccgcttgcgcttgctgctggctgtgggtgggattcatgacacacggactacattagtgctctttacaagatgaagcgtatgggttccagacaagtgttcgttcctaccatcgcatgcgtgctgctcctattctgctttggatgcaaatgcatagcatcggaattacaagcgacacagacggccaccctcaaggttgatgcctcatcacagcttgcccgaaagataccagacacactgtttgggatgttttttgaggagatcaaccatgcaggagccggtggcatatgggcagaacttgttagtaatagaggttttgaagctggaggactccatacgccatcaaatattgacccatggtctataattggcgacgactcttccatatttgtggcgactgatcgtacatcatgtttcagtcgaaacattatcgctcttaggatggaggttctctgtgatgactgcccagccagtggtgttggcatttacaaccctgggttctggggcatgaacatagaagatggaaagacctacaatctagttatgtatgttaaatcagcagaagctgcagaattgacagtttcattagcaagctccgatgggttgcagaatcttgcttctgttactgtaccagttgctggcacttccaactggacaaaagtggagcaaaaattgattgctaaagggacaaacagaacctcaagacttcagataacatctaacaagaagggagttgtatggtttgatcaagtatcactcatgccttcagacacgttcaagggacatggttttcgcaccgaactgatatccatgcttttggatctaaaaccacgattcttgagatttcctggtggttgcttcgttgaaggcgaatggttaagaaatgcattcaggtggagggaatctattggtccatgggaagagaggcctggacacttcggagatgtttggcattactggactgacgatggccttggatattatgagtttcttcagctttctgaagacctgggggctgctccaatctgggtattcaacaatggaatcagccacaatgatgaagttagtaccgctgccattgccccttttgtaaaggatgtattggatagtctagaatttgcaagggggagtgcaaactcaacatggggctctgttagagctgcaatggggcatcctgaaccgttcccagtcaaatatgttgcaatcggaaatgaagattgtgggaaaaaatactacctcggtaattacctcaagttctacaatgctataagagaatcctatccagacattcagatgatttcaaattgtgatggttcatctaaaccacttgaccatcctgctgatctgtatgacttccatgtctacaccgattctaagacattgtttaacatgaagggtacgtttgataaaacttctcggactggtcccaaggcctttgtcagtgagtatgcggtatggagaactgatgcaggtagaggaagccttcttggttcactggcagaggctgccttccttactgggctggagaagaacagtgatattgttcatatggcaagttatgcaccgctctttgtaaacgacaacgatcaaacgtggaatccagatgctatcgtcttcaactcctggcaacaatacggaactcctagttactggatgcagaagtttttccgcgaatctagtggtgccatgattcatccaattacaatcagttccagctactctggttctctagcagcatctgctatcacctggcaggattccgggaataacttcctgagagtaaagattgtgaacttcgggtcggacaccgtgagcctcacaatctctgtgtccgggctccaggctagcatcaacgcgctggggtcaaacgctactgttctcacgtccagcaatgtaaaggatgaaaattctttcagtaacccaaccaaggtcgtgcccgtgacaagtcagttgcataacgccgcggaacagatgcaggtcacgctcgctgcccactccttctcctcgttcgaccttgcgcttgctcagtccgagcttgtcgcagagatgtgaagcagcgacacggcgttagtgacacgtggaaacaggattaatacacgaggcgtgatatggaaatggaggagcttgtcagtaattatgcttatatcttgataaagcactcactgtacagtgtaagaaagaggagatactcatacatacagcagtactaaataaagtccatatcaggccgatttgcagttaaaaaaaaaaaaaaaaaa

SEQ ID NO: 2416 - DNA, 2272 bp, Oryza sativa Japonica Group
gtcctgctcctaatcctcgcggcagcttgcttggcgctcgcctccctcggccgcacttctttcttcctgattcctgacgtcttggatggtgcgctttattatgacacacgacctgcactagtgtttacagctccaagtatgggttccagagaacccttcctgagtgccatcttcttcttcttcttcttgcttttgttctgcctcggctgcaagtgtatagcttcagagttacacttacacacgacccagactgcggtcctcaaggttgatgcctcactgcaacatgctcgacagatccccgacacgctatttggaatattttttgaggaaatcaaccatgcaggagctggtggaatatgggctgaacttgttagtaacagaggttttgaagctggaggccctcataccccatcaaacattgatccatggtccataattggagatgactcttccatatttgtggcgactgatcgaacgtcatgtttcagtcggaatactgttgctctaaggatggaggttctctgtgacaattgcccagctggtggtgttggcatttataacccaggattctggggcatgaacatagaagatggaaagacctacaatttagtgatgtatgttaaatcaccagaaactgtggagttgacagtttccttgacaagttctgatgggtcgcaaaatctggcttcaagtaccataccggtttctggtgcgtcgaattggacaaaactggagcagaagttggttgctaaaggaacaaatagaacctcaaggcttcaaataacaactaccaagaagggagttgtatggtttgatcaagtctctctcatgtctgcagacacttacaagggacatggttttcgcacagaactaatatctatgatgttggacttaaaaccacgattcttgagattccctggaggttgcttcgtggagggtgaatggttaagaaacgcattcaggtggagggaatctattggtccatgggaagagaggcctggacactttggggatgtttggcattactggactgatgatggccttggatattatgagtttctccagctttctgaggacctgggcgctgccccaatctgggtgtttaacaatggaatcagccataatgatgaagttgatactgctgcaattgctccttttgtaaaagacgtattggacagtctagaatttgcaagggggagtgcagattcgacatggggttctgttagagctgcaatggggcaccctgaaccattccctgtcaaatacgttgcaattggaaatgaagattgtgggaaaaaattttaccgcggtaattacctcaagttttataatgctataagggaggcctatccggacattcaaatgatttcaaattgtgatgcttcatcaagaccacttgaccatcctgctgatttatatgacttccatgtctatactgattctaagactttgttttcgatgaagagtgcatttgatagatcatctcgtaatgggcccaaggcttttgtcagtgaatatgctgtttggagaagtgatgcaggtagaggaagtctacttgcttcattggcagaagctgctttccttactggactggagaagaatagtgatgttgttcagatggcaagttatgcaccactgttcgtgaacaacaatgatcaaacgtggaacccagacgccattgtatttaactcctggcaacaatacggaactcctagttactggatgcagactcttttccgtgaatctagcggtgctatgtttcatccaattacaatcacttccagctactctggttctctggcagcatctgcaattacttggcaggattctgaaaatagcttcttaagagtaaagattataaactttgggtctgatccagtgagcctcacgatctctgcaactgggcttcaggcccgtgttaacgcactgggatcaactgccactgttatcacatccagcaatgtgatggatgagaactcttttagtaacccgaataaggttgttcctgtcaaaagccagctttccaatgcagcagagcagatgcaagtcacgcttgctcctcactctttctcctcattcgatcttgcgcttgcccagtccaaactcgtggcagagatgtgaagcaggaacacaaggttagcgacagaaacacaagaaatacacgagatgtgatatgcgaataccagaatgcagtccatatatgtgcatgtatcttgaagcactactgtatagtgtaatacacaggaaatgatgaataaaattcactccaggc

SEQ ID NO: 2417 - DNA, 2268 bp, Sorghum bicolor
ccgcttcagtgacgtctgacgacgcctcacttgttccgttgtactcctagctgcaaggcggcgtcggcggctgctactgctgctgccgagcagggcttcacacccccctgctcctgcaaagatttgattgctttcgccggatggctccggcgtccgcgatggagctggaagcaccgcccccggcgtcagcatcggcggcggcggccaaggagatcaagtcgccggaggtgctgccggagccaagctcgctgtcggcgctgcagcggaagaagctgggcgcgcacttcctggagagcgacgagcgccgcttctcccgcggctgcaggacgccgctgggcggaggctacgacgagccgccctcctctgccgccggcgccggcggcaccacgccggtgaacatccgcggcgagccgatccgggacctgtcgaggaccggtgggtgggtggcggccttcttcatcttcggcaacgagatggcggagcggatggcctacttcggcctctccgtcaacatggtcatcttcatgttcaaggtcatgcaccgccctttcaccagctccgccaacgccgtcaacaacttcctcggcatctcccaggcgtcctccgtgctgggcgggttcctcgccgacgcctacctggggcgttactggaccatcgccatcttcaccaccatgtacctgctgggcctcatcgcgctcaccgtcagcgccagcgtgccggcgctcgtgcccacgcaggaggggtgcgacaagctcgccatgctgctgggcgcctgcgcgcccgccgcgccctggcagatggcgtacctccagacggcgctctacgtcacggcgttcggcgccgccgggatccggccctgcgtctcctccttcggcgccgaccagttcgacgagcgcagcgccgggtacaagcgccgcctcgaccgcttcttcaacctcttctacctcgccgtcacgctcggcgccatcgccgcattcacggccgtcgtgtacatccagatgcagcacggctgggccgcggcgttcggcacgctcgcgctcgccatgggcgcctccaacgcgctcttcttcgtcggcacgccgctctaccgccaccgcctgcccgggggaagcccgctcacccgggtggcgcaggtgctcgtcgccgccttcaggaagcggaacgccgccttcgacagcggcgacttcgtcggcctctacgaggtcgccggcgccaagtccgccatccgtggcagcgccaagatcgaccacaccgacgacttcagatggcttgacaaggccgcgctgcagctggaaggtgacctcgccggcggcggggaggaggcggtgaacccgtggcgtctgtgcacggtgacgcaggtggaggaggtgaagatcctgctgcggctgctgccggtgccggcgtgcacggtgatgctgagcgtggtcctgaccgagttcctgaccctgtcggtgcagcaggcgtacacgctcaacacccgcgtggcggcgctgcacctgccggtgacgtgcatgccggtgttcccctgcctcgccatcttcctcatcctggcgctctactaccagaccttcgcgccgctggcgcgccgcctcacgggccacccgcacggcgcctcccagctgcagcgcgtcgggctgggactcttcttctccatcctctccgtcgcctgggcggggctcttcgagcgctaccgccgaggctacgccgtccgccacggctacctcgcgctcttcctcacgcccatgccggacctcagcgcctactggctgctcatccagtactgcctcatcggcgtggccgaggtgttctgcctcgtcgcgctcctcgagttcctgtaccaggaggcgcccgacgccatgcgcagcgtcggctccgcctacgccgccgtcgccggaggcctcggctgcttcgtggcgtcggcgatcaacaccgccgtggatgccgcgacgcggaacgacgccgaggggcggccgtcgtggctggcgcagaacatcaacgtcggcaggttcgactacctgtactggctgctcgccgtgctcagcaccatcaacctgctcgtcttcgtctactttgccaagcggtacaagtacagggtcagggtcgacacgcagcagaccacagtcgttgttaataataaacagtagccggccattagcacaatgataaggatttgctgagtttggtctcgaccgtggatgtgctgtaacaaaggattaccgggaataccataacatcgaacattttttgcaaatacagcttaacagaaac

SEQ ID NO: 2418 - DNA, 2449 bp, Zea mays
catgttcatggctagatccggcagcatatagcggcagggtgagatatttctagctactgcagtgtgcagcgcgggaacgtaggacggacggagcaggggtcccgtcgtcatctcacttcgtccctgtcgcgcttaatgctgccattaaactgactgcttgcagctcatccgtgctggcgagctccactaataaatgcgtgcgtatctgtgtgcatcgcggcagccggcagggaagggctggacaggattgcgcgtctgcgcttcagtctccagttcccggtgacgacgcccactagtctctactagataggcagcgccggctgctgctgctgccgccgccgatcagggctttcgcctgccgcccgcatggctccggcgtccgagacggagctgcaagcaccaccaccaccaccggcgtcggctaaggagatcaagtcgccggaggtgctgccggagccaggctcgctgtcagcgctgcagcgcaagaagctgggtgcgcacttcatggagagcgacgagcgccgcgtctcccgcgccaggacacctctcggcgccgcctatgaaccgccctccgccgccgctggcggcggcggcaccacgccggtcaacatccgcggcgagcccatccaggacctgtcgaggaccggggggtgggtggccgccttcttcatcttcggcaacgagatggcggagcgcatggcctacttcgggctctccgtcaacatggtcatcttcatgttcaaggtgatgcaccgcccgttcgccagctccgccaacgccgtcaacaacttcctcggcatctcccaggcgtcctccgtgctgggtggcttcctcgccgacgcctacctggggcgctactggaccatcgccatcttcaccaccatgtacctgctggggctcatcgcgctcaccgtgagcgccagcgtgccggcgctcgtgccgccgcaggagggctgcgacaagctcgccatgctgctgggcgcctgcgcgcccgccgcgccctggcagatggcctacctccagacggcgctctacgtgacggcgttgggcgcggcggggatccggccctgcgtctcctccttcggcgccgaccagttcgacgagcgcagccccgagtacaagcgccggctcgaccgcttcttcaacctcttctacctcgccgtcacgctcggcgccatcgccgccttcacggccgtggtctacatccagatgcagcacggctgggcggcggcgttcggcacgctggcgctggccatgggcacctccaacgcgctcttcttcgtgggcacgccgctgtaccgccaccggctgccggggggcagcccgctcacgcgggtggcgcaggtgctcgtcgccgccttcaggaagcgggacgcggccttcgacagcggcgacttcgtcggcctgtacgaggtcgccggcgccaagtccgccatccgtggcagcgccaagattgaccacaccgacgacttcagatggcttgacaaggccgcgctgcagctggagggtgacctcgccggcggcgaggacgaggaggcggtgaacccgtggcgtctgtgcacggtgacgcaggtggaggaggtgaagatcctgctgcggctgctgccggtgccggcgtgcacggtgatgctgagcgtggtcctcaccgagttcctcacgctgtcggtgcagcaggcctacacgctgaacacccgcgtggcggcgctgcacctgcccgtgacgtgcatgccggtgttcccctgcctggccatcttcctcatcctggcgctctactaccagaccttcgccccgctggcgcgccgcctgacgggccacccacacggcgcctcccagctgcagcgcgtcgggctgggcctcttcttctccatcctgtccgtggcctgggcggggctcttcgagcggtaccgccgcgggtacgccgtccgccacggatacctcggcctcttcctcacgcccatgccggacctcagcgcctactggctgctcatccagtactgcctcatcggcgtggccgaggtgttctgcctcgtcgcgctcctggagttcctgtaccaggaggcgcccgacgcgatgcgcagcgtcgggtccgcgtacgccgccgtcgccggcgggctcggctgcttcgtggcgtcggcgatcaacaccgcggtggacgccgcgacgcgggacgatgaggaggggcggccgtcgtggctggcgcagaacatcaacgtgggcaggttcgactacctgtactggctgctcgccgtgctcagcactgtcaacctgctcattttcgtcttctttgccaagcggtacaagtacagggtcagggtcgacgtgccgaccacagttgctgttgataagcagtagctagccgctagcgccattacaaggatttgagtttggatgtgctgtaactattgattactgggaataccataaaacatagatcttgtaccgtcgcggc

SEQ ID NO: 2419 - DNA, 2871 bp, Sorghum bicolor
atgatgcagcagctccgtcgcagccagccgagcccgtgtcatctccgcggctcgcgcttcacgggcgcggggctgccggcacgcccgatgctcgctctcggcgcggcagcagctcgccgttcgcggcccgaaaccgtgcaactgagcgcctgccacgccgcggccgcgtcggcccagccccgtccccgtgccgtcgccgactcggcgctgggagcctcgtcgacgagcgtgcaggttagaggcaagctgctgctgcagaacttcttcgccgacgacggctccgacagccagcggcagctcaggctctccatccagcttgtcagcgccaccgtcgccggtcccgatgggcgcggggtgaaggcggaggcgtcggtgctggacgccgtcgttggcagcggggacaccgagctcgacgtggacctgacctgggacgaggcgctgggcgcgcccggcgccgtggtggtgaagaaccactccgacttccccgtgtacctgaggctgctgagcatgccgaccagagtcctcggcgccgacgacaaggccgccaccaccgccgccgtccacttcgcgtgcaacggatgggtctatcccgtcgacaagcacccgtaccgcctcttcttcaccaacgatgcgtgtgtcaaggaagaaacgccaagctccctgctcaagtacagggaggacgagctcgccgtgctccggggagacggcgagacggcagaccggccgttccagccgtgggaccgcgtgtacgactacgcgctgtacaacgacctggggaacccagaccttcgaagggacttggcgcgccccgtgctgggaggatctcgagagtacccctaccctcggcgtaccaagaccggccggccagccgccaaaacagatcctcagtcggagagcagagcgccgctggacgaagagatctacgtcccctgcgacgagcgcgtcggcttcggcagcgtccccgcgccgacgcttccgccgctgggcgggcacttcagctcgctcgcggacgtctaccgtctcttcggcctcgacgacgtcggccggctcccggaggccaagggggtcatcaacagcggcgcgccgttccccgttgttccccaggtcatctcagtgaacccgacacactggcggaaggacgaggagttcgctcggcaaatgatcgccggggcgaacccggtgtgcatcaagcgcgtcaccaagttcccgctgacgagcgagcttgaccgcggagtgttcggcgaccaggacagcaagataaccgaggaccatgttgagaagaacatgggtggcatgacgctgcagcaggccgtagaggagggaaggctgtacgtcgtggaccaccacgactgggtgatgccatacctgaagcgcatcaacgagctcccaggcgaggaggagaaggccgaggtgtcgcagaggaaggtgtacgccgccagaacgcttctgttcctgaatcgcgaggactcgacgctcaaaccgctcgcgatcgagctcagctcgccgcacccggagaaggagcagctcggcgcggtgagcacggtgtacactccaccggacagcagggacgacgacgacgacggcatcacggccgggaggttctcggtttgggagctggccaaggcccacgccgccgccaacgacaccgtcgagaacaacttcgtcactcactggctcaacacgcacgcgtccatggagccgatcgtgatcgcggcgaaccggcagctgagcgtgctgcacccgatccacaggctcctcaagccgcacttccggaagacgctccacatcaacgccgtcgcgcgccagatcgtcgtcggctcgggcgaccaaagaaaggacggcagcgtcttccgtggcatacacgaggtcacctacttccccagcaggtacaacatggagatgtcctccatggcatacagggcctggaacttcacaggccttgctctccccaatgatctcatcaacagaggtgtggcaaaaggggacgcgaagaagccagagacgctggagctggtgataaaggacgactacccatacgcggcggacgggctcgaaatgtgggcggcgatcaaggactgggtggcggactactgcgccatctactacggcgacgacggcgccgtggcgagggacagcgagctgcaggggtggtggagcgaggtgaggaacgtggggcacggcgacctgtcggacgcgccgtggtggccggcgatggactgcctcgcggacctcgtggagacctgcaccaccatcgtctggctgggctcggcgtaccacgcggccatcagcttcgggcagtacgactaccagggcttcatcccgaacgggccctcactcaccacgcggccggtgccggatccggaggtgacggtgacggtggcggagtcggacttcctggagagcgtcacgccggtggccgaggcgctcgggttcatgtccatctcctcgggcccgctggggctggtggggacggaggtgtacctggggcagcggccggacacggagcagtggacgagcgagcggagcgcggccgaggcgctggcggtgttccgggcgaggttggaggaggtcgcggggaacatcgagaggcggaacgctgaccctgcgttgaagaaccggacggggcccgtggaggtgccctatacgctgctcaagccgacggcacagcctggaccggtgctccgtggcatacccaacagcatcaccgtttgagcggagcgccgccgtagccaactgtgtacgatatgtggactcgtggagtatcatcgtcggaataataaggtggactactggccgtaatagttggcgtttgtagaccggcgctagcttgcgtgaaattctccaccacacaaaataaataaatacgagaaa

SEQ ID NO: 2420 - DNA, 4828 bp, Sorghum bicolor
tacctagtataatacaacattgcatgtcctccagactgaccgcaaaatagtgactctccaaccaccacaagagcacaggctttaggaacagttagatttacttttacccacctttgctgcgtgcactttataatgcacacgtactgctactgatcactgaatcatgcgaatgcgatttccactcgctctatcatcgtaccacacctttcccatcaggcacacactgggctcactatagctagctagctagctaggaggtgcaaatgcaaagtgctgtgctctgtgcaggctgaagcagccaatcgcaatcggggtacgaaaggtttcctatcctagcaagattaataatatagttaaatgtttgactataaaccaaactataagagttaagtcatacgatagttatctcctatttgactataaaaagtttttttttattatcaatcgggttatgaaacgtttcaccgtccgagcaaggttaataatagagtcagctaagtcatacaatagtcttctatttgactataatttctcacgtacactattgtttgagtctacatatatttatgttttcgtgtccagcttgatgctagaatacaagccaaactcttttctctctcccgtcttgtcttctctcctctatatcattaaaaatgctaactaactaagctcattattgtgtgctctcttatccttgcaggctcgcgccacgcctggctgtccgcgcgcggggtcccaagcaaagcttgttaggtgtggggcgcgtggtggacaatattgttcctctctttgtccttcatcaccccagttggtcggtcggtccatcgggccccgttcgcgagctcgtgtttcacatgcgactactaacgtgcaatgcactggatgatttctggacacgcatgcatatatcagtgacgatcagtctcccgtgacctccatcctctaacccaccacggcagcaacctcgtgccggacgacacatttcccctgtcgatccacgatgatgcagcagctccgtcgcagccagccgagcccgtgtcatctccgcggctcgcgcttcacgggcgcggggctgccggcacgcccgatgctcgctctcggcgcggcagcagctcgccgttcgcggcccgaaaccgtgcaactgagcgcctgccacgccgcggccgcgtcggcccagccccgtccccgtgccgtcgccgactcggcgctgggagcctcgtcgacgagcgtgcaggttagaggcaagctgctgctgcagaacttcttcgccgacgacggctccgacagccagcggcagctcaggctctccatccagcttgtcagcgccaccgtcgccggtacgcgaccgagcctacccggccatgcatgcacagcacaagacaactctctgtttcgggaggttattgccagtacgtgggccacgtacacacacacatgttcggaaactaacattgtgccatggatctatgcatgtgtacgtacgtgcaggtcccgatgggcgcggggtgaaggcggaggcgtcggtgctggacgccgtcgttggcagcggggacaccgagctcgacgtggacctgacctgggacgaggcgctgggcgcgcccggcgccgtggtggtgaagaaccactccgacttccccgtgtacctgaggctgctgagcatgccgaccagagtcctcggcgccgacgacaaggccgccaccaccgccgccgtccacttcgcgtgcaacggatgggtctatcccgtcgacaagcacccgtaccgcctcttcttcaccaacgatgtacgtgcgtgcagtgcagcttgctaacccttgctcaccgacgagcgaacgaacctgacaacaagtgcatgcacacgctcgaaacttccatcacatatttcttctgcaggcgtgtgtcaaggaagaaacgccaagctccctgctcaagtacagggaggacgagctcgccgtgctccggggagacggcgagacggcagaccggccgttccagccgtgggaccgcgtgtacgactacgcgctgtacaacgacctggggaacccagaccttcgaagggacttggcgcgccccgtgctgggaggatctcgagagtacccctaccctcggcgtaccaagaccggccggccagccgccaaaacaggcccgtgcccgtgttcacgatctcagtttcccaaaaatgagccgaaatatgctggaactattgtacttgtagcactagtataggagaagacaatctcgcttgctctcattaattttgttttgctacctcatcgtacgtgcatcatcagatcctcagtcggagagcagagcgccgctggacgaagagatctacgtcccctgcgacgagcgcgtcggcttcggcagcgtccccgcgccgacgcttccgccgctgggcgggcacttcagctcgctcgcggacgtctaccgtctcttcggcctcgacgacgtcggccggctcccggaggccaagggggtcatcaacagcggcgcgccgttccccgttgttccccaggtcatctcaggtactgcgaccgtcggttgcaactaacaatgcaaggtgtcatggtgaatgtgcatgctcaaagggaaggaaaaactgttttttttcttctgtttggtgcagtgaacccgacacactggcggaaggacgaggagttcgctcggcaaatgatcgccggggcgaacccggtgtgcatcaagcgcgtcaccaagttcccgctgacgagcgagcttgaccgcggagtgttcggcgaccaggacagcaagataaccgaggaccatgttgagaagaacatgggtggcatgacgctgcagcaggtgtgctgcacaattggcacttttctagctaggacctaggagatctttcagacaaatgttttttgggggaaaatatgcagtttttgttttctttcttgtctgaaagatagtcgggttatgcgtgtttgtatggccaggccgtagaggagggaaggctgtacgtcgtggaccaccacgactgggtgatgccatacctgaagcgcatcaacgagctcccaggcgaggaggagaaggccgaggtgtcgcagaggaaggtgtacgccgccagaacgcttctgttcctgaatcgcgaggactcgacgctcaaaccgctcgcgatcgagctcagctcgccgcacccggagaaggagcagctcggcgcggtgagcacggtgtacactccaccggacagcagggacgacgacgacgacggcatcacggccgggaggttctcggtttgggagctggccaaggcccacgccgccgccaacgacaccgtcgagaacaacttcgtcactcactggtatgtccacggctcgatcgattcctacacgacgctggcacaaacaagatcgacgaggtcaatgtgacaatgtgtgtccatgtgctttaggctcaacacgcacgcgtccatggagccgatcgtgatcgcggcgaaccggcagctgagcgtgctgcacccgatccacaggctcctcaagccgcacttccggaagacgctccacatcaacgccgtcgcgcgccagatcgtcgtcggctcgggcgaccaaagaaaggacggcagcgtcttccgtggcatacacgaggtcacctacttccccagcaggtacaacatggagatgtcctccatggcatacagggcctggaacttcacaggccttgctctccccaatgatctcatcaacaggtaatagtaatactagtactccatacgaaatgacaggcattaattcgtccatgtcatagcaacagcatgtcatcagttcatcacgatggctgctctgaattctctacgtacagaggtgtggcaaaaggggacgcgaagaagccagagacgctggagctggtgataaaggacgactacccatacgcggcggacgggctcgaaatgtgggcggcgatcaaggactgggtggcggactactgcgccatctactacggcgacgacggcgccgtggcgagggacagcgagctgcaggggtggtggagcgaggtgaggaacgtggggcacggcgacctgtcggacgcgccgtggtggccggcgatggactgcctcgcggacctcgtggagacctgcaccaccatcgtctggctgggctcggcgtaccacgcggccatcagcttcgggcagtacgactaccagggcttcatcccgaacgggccctcactcaccacgcggccggtgccggatccggaggtgacggtgacggtggcggagtcggacttcctggagagcgtcacgccggtggccgaggcgctcgggttcatgtccatctcctcgggcccgctggggctggtggggacggaggtgtacctggggcagcggccggacacggagcagtggacgagcgagcggagcgcggccgaggcgctggcggtgttccgggcgaggttggaggaggtcgcggggaacatcgagaggcggaacgctgaccctgcgttgaagaaccggacggggcccgtggaggtgccctatacgctgctcaagccgacggcacagcctggaccggtgctccgtggcatacccaacagcatcaccgtttgagcggagcgccgccgtagccaactgtgtacgatatgtggactcgtggagtatcatcgtcggaataataaggtggactactggccgtaatagttggcgtttgtagaccggcgctagcttgcgtgaaattctccaccacacaaaataaataaatacgagaaatggttgagtgtgagacgttttaaaatctttgacttataatctagataatatttttaattattaaaaggcacaataagtccctcaactattactcgggactcaatttca

SEQ ID NO: 2421 - DNA, 2909 bp, Zea mays
aacccacggaagcaagacaaaagctcgtgctggacgacatctcccctgtcgatccacgaccatgatgcagcagctccgtcacagccagccgagcccgtgcctctgcggcctgcgggcggcacggcctatgctcgccctcggcgcagcagcatcccgttcgcggcccgccggaaaactgcaaccgagcgtctgcctcggcctcggccatgtagccccagccgcggcgagaggacagccccgtccccgtgccgttgccgactcggcgctgggagcatcgcctacgagcgtgcatgtcggaggcaagctgctgctgcagaacttcgccgccgacagccagcagcggctcaagctctccatccagcttgtcagcgccaccgtggccgatcccgacgggcgcggggtgaaggcggaggcgtcggtgctggacgccgtcgtgggcagcggggacagcgagctcgacgtggacctgatctgggacgaggcgctgggcgcgcccggcgcggtggtggtgaagaaccactccgacttccccgtgtacctgaggctgctgagcgtgccggccggcgtcggcggcgccgacgacgaggccgccgccgtccacttcgcctgcaacggatgggtgtaccccgtcgacaagcacccgtaccgcctcttcttcaccaacgacgcgtgtgtcaaggaagaaacgccgagcgccctgctcaagtaccgggaggacgagctcggcgcgctccggggagacggcgagacgacggagcgaccgttccagccgtgggaccgcgtgtacgactacgcgctgtacaacgacctggggaacccagacctgcgccaggacctggcgcgccccgtgctgggaggatcccaggagtacccgtaccctcggcgtaccaagaccggccgaccagccgccaaaacagatcctcggtcggagagcagagcgccgctggacgaagagatctacgtcccctgcgacgagcgcgtcggcttcgccagcatccccgcgccgacgcttccgccgctgggcgggcacttcaggtccctcgccgatgtctaccgcctcttcggcctcgacgacctcggccggctcccggaggccaaggcggtcatcaacagcggcgcgccgttccccgtcgtgcctcaggtcatttcagtgaacccgacacattggcggaaggacgaagagttcgcgcggcagatgatcgccggggcgaacccggtgtgcatcaagcgcgtcaccaagttcccgctggcgagcgagcttgaccgcggggtgttcggcgaccaggacagcaagataaccaaggaccatgtcgagaagaacatgggcggcatgacggtgcagcaggccgtagaggaggggaggctgtacgtcgtggaccaccacgactgggtgatgccatacctgaagcgcatcaacgagctccctgcgagcgaggagaaggcggaggtgtcgcagaggaaggtgtacgccgccagaacgctcctgttcctggacggcgaggactcgtcgatgctcagaccgctggcgatcgagctcagctcgccgcacccggagaaggagcagctcggcgcggtcagcacggtgtacactccaccggacagcggggacgacggcatcacggccgggaggttctcaacctgggaactggcaaaggtttacgcctctgccaacgacgcagccgagaacaacttcgtcactcactggctcaacacgcacgcatccatggagccgatcgtgatcgcggcgaaccggcagctgagcgtgctgcacccaatccacaggctcctcaagccgcacttccggaagacgctccacatcaacgccgtcgcacgccagatcatcgtcggctcgggtgaccagaggaaggacggcagcgtcttccgtggcatagacgaggtcacgtacttccccagcaagtacaacatggagatgtcctccaaggcgtacaaagcctggaacttcacggaccttgctcttcccaacgatctcatcaagagaggtctggcaaaaggagatccaaagaagccagagacggtggagctggcgataaaggactacccgtacgcggtggacgggctcgacatgtgggcggcgatcaagaagtgggtggctgactactgcgccatctactacgccgacgacggcgcggtggcgagggacagcgagctgcaggggtggtggagcgaggtcaggaacgtggggcacggcgacctggcggacgcgccgtggtggccggcgatggactgcgtcgccgacctcgtggagacctgcgccaccgtcgtctggctgagctcggcgtaccacgcgtccatcagcttcgggcagtacgactacctgggcttcgtcccgaacgggccctccatcaccacgcggccggtgccgggcccggacgccggggcggaggtcacggagtcggacttcctggcgagcgtcacgccggtcaccgaggcgctcggcttcatgtccatcgcctcggggccgatggggctcaagggcacggaggtgtacctggggcagcgcccggacacggagcagtggacgcgcgagcggagggcggccgaggcgctggcggagttccgggcgaggttggaggaggtcgcgggcaacatcgacaggcggaacgcggaccctgcgctgaagaaccggacggggcaggtggaggtgccctatacgctgctcaagccgacggcacagcccggactggtgctccgtggcatacccaacagcatcaccgtttgagcagcagagcgccgtcggcagctgtcagctgtgtacagtacagaataataaggtggtcgtgtttggcgctatctccaccacataaacgtgaaaatgtttttttttgaaaaaaaaaaaaaaaaaaaaaaaaaaaaaaaaaaaaaaaaaaaaaaaaaaaaaaaaaaaaaaa

SEQ ID NO: 2422 - DNA, 3089 bp, Zea mays
ctccgtcacagccagccgagcccgtgcctctgcggcctgcgggcggcacggcctatgctcgccctcggcgcagcagcatcccgttcgcggcccgccggaaaactgcaaccgagcgtctgcctcggcctcggccatgtagccccagccgcggcgagaggacagccccgtccccgtgccgttgccgactcggcgctgggagcatcgcctacgagcgtgcatgtcggaggcaagctgctgctgcagaacttcgccgccgacagccagcagcggctcaagctctccatccagcttgtcagcgccaccgtggccgatcccgacgggcgcggggtgaaggcggaggcgtcggtgctggacgccgtcgtgggcagcggggacagcgagctcgacgtggacctgatctgggacgaggcgctgggcgcgcccggcgcggtggtggtgaagaaccactccgacttccccgtgtacctgaggctgctgagcgtgccggccggcgtcggcggcgccgacgacgaggccgccgccgtccacttcgcctgcaacggatgggtgtaccccgtcgacaagcacccgtaccgcctcttcttcaccaacgacgcgtgtgtcaaggaagaaacgccgagcgccctgctcaagtaccgggaggacgagctcggcgcgctccggggagacggcgagacgacggagcgaccgttccagccgtgggaccgcgtgtacgactacgcgctgtacaacgacctggggaacccagacctgcgccaggacctggcgcgccccgtgctgggaggatcccaggagtacccgtaccctcggcgtaccaagaccggccgaccagccgccaaaacagatcctcggtcggagagcagagcgccgctggacgaagagatctacgtcccctgcgacgagcgcgtcggcttcgccagcatccccgcgccgacgcttccgccgctgggcgggcacttcaggtccctcgccgatgtctaccgcctcttcggcctcgacgacctcggccggctcccggaggccaaggcggtcatcaacagcggcgcgccgttccccgtcgtgcctcaggtcatttcagtgaacccgacacattggcggaaggacgaagagttcgcgcggcagatgatcgccggggcgaacccggtgtgcatcaagcgcgtcaccaagttcccgctggcgagcgagcttgaccgcggggtgttcggcgaccaggacagcaagataaccaaggaccatgtcgagaagaacatgggcggcatgacggtgcagcaggccgtagaggaggggaggctgtacgtcgtggaccaccacgactgggtgatgccatacctgaagcgcatcaacgagctccctgcgagcgaggagaaggcggaggtgtcgcagaggaaggtgtacgccgccagaacgctcctgttcctggacggcgaggactcgtcgatgctcagaccgctggcgatcgagctcagctcgccgcacccggagaaggagcagctcggcgcggtcagcacggtgtacactccaccggacagcggggacgacggcatcacggccgggaggttctcaacctgggaactggcaaaggtttacgcctctgccaacgacgcagccgagaacaacttcgtcactcactggctcaacacgcacgcatccatggagccgatcgtgatcgcggcgaaccggcagctgagcgtgctgcacccaatccacaggctcctcaagccgcacttccggaagacgctccacatcaacgccgtcgcacgccagatcatcgtcggctcgggtgaccagaggaaggacggcagcgtcttccgtggcatagacgaggtcacgtacttccccagcaagtacaacatggagatgtcctccaaggcgtacaaagcctggaacttcacggaccttgctcttcccaacgatctcatcaagagaggtctggcaaaaggagatccaaagaagccagagacggtggagctggcgataaaggactacccgtacgcggtggacgggctcgacatgtgggcggcgatcaagaagtgggtggctgactactgcgccatctactacgccgacgacggcgcggtggcgagggacagcgagctgcaggggtggtggagcgaggtcaggaacgtggggcacggcgacctggcggacgcgccgtggtggccggcgatggactgcgtcgccgacctcgtggagacctgcgccaccgtcgtctggctgagctcggcgtaccacgcgtccatcagcttcgggcagtacgactacctgggcttcgtcccgaacgggccctccatcaccacgcggccggtgccgggcccggacgccggggcggaggtcacggagtcggacttcctggcgagcgtcacgccggtcaccgaggcgctcggcttcatgtccatcgcctcggggccgatggggctcaagggcacggaggtgtacctggggcagcgcccggacacggagcagtggacgcgcgagcggagggcggccgaggcgctggcggagttccgggcgaggttggaggaggtcgcgggcaacatcgacaggcggaacgcggaccctgcgctgaagaaccggacggggcaggtggaggtgccctatacgctgctcaagccgacggcacagcccggactggtgctccgtggcatacccaacagcatcaccgtttgagcagcagagcgccgtcggcagctgtcagctgtgtacagtacagaataataaggtggtcgtgtttggcgctatctccaccacataaacgtgaaaatgtttttttttgaattatatggacatgcagggccgcagcccgtaagcctggccccagtttcggttttctgtttttttttttttttgcctcgatctggtgatcagcaagccacgtcggtccgggtgatctcgctaccggagatagaatgtgtacacgaaacctaataggtttttactccattaggatacgaggttgagtcaattttcatacctatagatttgttaatgagcataaatttatacccgacgagttcatgagtataagtttattatgtgaaccttgggtttttaaacccgaccaaacttagtgtatattgtcattttatttt

SEQ ID NO: 2423 - DNA, 1266 bp, Zea mays
aagctcctacagcactacaaacccatccatcacctttttctcctactcttccttccaagaaccaattggaagaaaaacagaaagcgaaggaacgaacgaagctagccattgcttgtttgtcgcgattgacaccaatgcatgccccgaggaggttcaagaaggccttcatggcgcagcttctgctgagcctgcgtgcggccggccacgcgtccaagtccatgggcctccgggagcgccgggacgccgtgcggctctcctccgacgtagcgatggcgctggcgtccgcgcgggcccgcgcggcgccacgctcgacggtttgggcccgcgcgctcatcgccaggcacgcggcggagcagcgcaacgaggcgctcatgcgccgcatcatggscggcgccggctacgagatggccgccgcggcggtgagggccaggaaggaggctcggtgccggaggatcgtgaggaggtcgcgccgggtatgcagcggcgtcgggaggaagaggaggascttgctggcggcggagggcggcggaggcatcagatgcagcgcaatggcggcggccaggaggatggtgaaggcgaggctgcaggtgctgaggagccttgtgcctggaggggaggcgatgggtggcctctccctactcaccgagacgctggattacgttgtgtgcctcaaggcacaggtggagctaatgcaacgcttgtgcaaaggatcctgttcccagtcccagcttggctgaggagatgacatcatgtctcacatctcaggggacggagcagcaactgcgagactgcaggggccatgcatgcacaaaaggcaaggaccgcaagcaactgaagccgtctggatgggtgggcgtggcagagctccgatgaattgtctccgtgagccaactttactatacatatagctagcagtactagacgtaccggtgtaatgtaactactgtccaagtacatgtcgctgcaaagatgggcttggttttgctgtatcacctcacaggagaggatgaacacaagccatcatccatttggtgagtcatgttttgtcgttaaataataactagcaaatcttggtttattgggtgggcaaaatataatattctcttgcacgtggattctggagtcttgaagagatgggcatctttgtggtcaaaggctctgttggtgtatgttcagaatatggcataatattactagcatgtatgtaccggtaaggataacaaagaggtggtgtgatcaatggtgatctaaaaaaaaaaaaaaaaa

SEQ ID NO: 2424 - DNA, 624 bp, Sorghum bicolor
atgcatgccccgaggaggttcaagaaggccttcatggcgcagctcctgctgagcctgcgtgcggcagggcaggcatccaagtcgatgggcctccgggagcgccgggacgccgtgcggctgtcctccgacgtggcgatggcgctggcgtcctccgcacgggcccgcccgagcgcggcgcgctcgacggcgtgggcgcgcgcgctcgtcgctaggcacgcggcggagcagcgcaacgaggcgctcctgcgccgtatcatgggcggcgccggctacgagatggccgccgcggcggcggcggcggcgagggtcaggaaggaagcccggagcaggaggatcgtgcggaggtcacgccgggtttgcagcgccgccgccgccgggaggaagaggaggagcttgctgcagctggcggcgggcagcggtggtggaagcagatgcagtgcaatggtggcggccagtaggatggtgaaggcgaggctgcaggtgctgaggagccttgtgcccggaggggaggcgatgcgtggcctctccctgctcaccgagacgctggactacgttgtgtgtctcaagacgcaggtggagctcttgcaatgcctctgcaaaggatcccgttcccagctgggctga

SEQ ID NO: 2425 - DNA, 1529 bp, Zea mays
ggacgagcagtgatcgccccccgaacttccaagacggttgctgcagcagtgcagcgcaacatccatccgcgaccaaacttccgtatcaccgatccatcaccggccatgtcaggcgccggcgcggacacagcgccgtcgagcgacgacaagcgccagcaccatcagcgcacgttccgggacgcggcgcggcggcggctgcagcgggacgcgatcgagcgcgccatcagggcgccgctgggcaccgtgctccgcgaccacgcgctcgtgcacctcccgccggccgccgcggcgcgcctccgcctcgtgcacccgtcgtgggcgctggcgctcgcgtcgccgctcttcgccgtcgcgcacgccgctaccccgcgcagagcctcgggcttcttctccgcgtccgcgtccgcgcccgcgggctttctcccgcttgacgccgccgataccgtgccgtccccggcgctggccttcctcccggcctcgtcgccgcccgccgtgctgtcgtcctcgcgcggcctcgcgtgctgcttctctccggctgacgacgcctacttcgtgtgcaacccggcgacgggggcctggcacggcgtcccgtgcccgccgcgccggatcacctggccgcgccccgcggtcgtcgtgctcttcgacgccggtgtctacaacttctgcggcgactacacgctcgtctgcgccttcgagtcggcgccggggtccggcatctactgcttcgcggtgttcgcgtcggggaccggcgcgtggcggatcgccggcgcggtcgcgcccgccgaggggctcgtccctgcctcgggcgtcgcggctggcgggacggcctggtggcggacggacatcggcaccgccgtcgggtacaaccctgccacgggccgcgttgacctcgcgctgtgccccggggacagcgcccggtgggagatcggctccgccgcgggcaggctgcactgcgccgtgcgcgacggcggcgacgtcctggtgttccggctcgacgacaggcgcggtggctgggagctggccaccgtggtctccgtctgcgagatactgcagcggccttggcaaccggagaccacttttgagctgtccgactccgaggacgacgacgacgacgaggcggcggcgggtcaggcagagttggagcgcgtgggtgctgtcattgccgtggccaacaggtacagcaggagcagggtacgggtgccgagagacgacgtgaggctgctgccgtttcagggcgccgatgtggaggtggtgctgctgtccggctggagggtggtggcgttcgagacggtgacgcggcgccggcgtgaggccgtcctgccggtgccgggtcagccgaccaccaaggattggggcgttgtggagtacatcgcgcacaccaacacgctcgcgctggtcggccccgtggtgttcatggagcctccggatgatcaggaagaggtgtcatcgtaatctcttggaaaaattttcagtgcctcatacgccacgcttagatctacgtacagaaataatcaagcttgtgattgcgc

SEQ ID NO: 2426 - DNA, 1356 bp, Sorghum bicolor
atgtccggcgccggcgcggacacagcgccgtcgagcgacgacgggggccagcaccagcaccagcagcgcgcgttccgggaccgggacgcggcgcgtcggcggctgcggctggagcgcgagctcgcgatcgcgcgcgccatccgggcgccgctggccaccgtggtccgcgaccacgcgctcgtgcacctcccgccggccgcagcggcgcgcctccgcctggtgcacccgtcgtgggcgcgggcgctcgcgtccccgctcttcgccgtcgcgcacgccgccaccccgcgcagggcctcaggcctcttcgtcgcgcccgcaccaacgaccgcgggctacttcctcccgctcgacgccgccgacaccgtgccgtccccggccttggccttcctcccggcctcatcgccgcccaccgtgctgtcgtcctcgcacggcctcgcgtgctgcttctccccggccgacgacgcctacttcgtgtgcaacccggcgacggggtcctggcacggcgtgccgtgccctccgtgccggatcacctggccgcgccccgcggtcgtcgtcctcttcgacgccggcgtctacaacttccgcggagactacgcgctcgtctgcgccttcgagtcggagccgggctccggcatctactgcttcgcggtgttcgcgtctgggactggcgtgtggtgggtcgccgacgcggtcgcgcccgccgaggggctcgtcccttcctcgggcgtcgatgccggcgggacggcgtggtggcggacggccatcggcaccgccgtcgggtacaaccctgtcacgggccgtgtcgacctcgcgctgtgccctggggacagcgcccagtgggagatcggctcggccgcgggcacgctgcactgcgccgtgcgcgacggcggcgacgtcatggtgttccggctcgacaggcacggtggctgggaggtggccgccgcggtctctgttgccgagatactgcagcggccttggcaaccggagctcgcttacgagctgtccgactccgaggacgacgaggaggaggaggcggcgggtcaggcagaggtggagcgcgcgggggctgtccttgccgtggcgaacaggtacagcatggtacgggtgccgagcgacgtcgtgaggctgctgccgttccagggcgccgaggcggaggtggtgctgctggccggcaggagagtggtggcgttagagacggtgacgcggcggcggcgtgaggccgtcctgccggatcagccggccggcaaggattggagcgccgtggagtacgccgcgcacaccaacacgctcgcgctggtcgcgcccgtggtgttcatggagcctccagacgatcaggaagaggtggtggcatcttga

SEQ ID NO: 2427 - DNA, 1665 bp, Sorghum bicolor; identical to SEQ ID NO: 917

SEQ ID NO: 2428 - DNA, 1985 bp, Zea mays
cgggatcaggtttgcacaggcagccacgccacgcggacacctgccttacattgccggcgcgcttgcgtgactgggcgcggcgagatggcggcgccgggcgggtcgaacctggcggtgctggacgcgctggactcggcgcgcacccagatgtaccacatgaaggccatagtcatcgccggcatgggcttcttcaccgacgcctacgacctcttctgcatctccaccgtgtccaagctgctcggccgcatctactacccggacgacaacctgtacatagacaagcccaagcccggcactctgcccgtgtccgtcaacaacatggtgacaggcgtcgcgctcgtcggcacgctcatgggccagctcgtcttcggctacttcggcgacaagctcgggcggaagcgcgtgtacggcatcacgctcgtgctgatggccgcctgcgccatcggctcgggcctctcgttcggcagctcggcgcacgccgtcatcggcacgctctgcttcttccgcttctggctcggcttcggcatcggcggggactacccgctgtccgcgaccatcatgtccgagtactccaacaagaagacgcggggcgcgttcatcgccgcggtgttcgcgatgcagggcgtcggcatcatcttcgcggggctcgtgtccatgatcgtctcgggcatcctcctgcactaccacccggcgccggcgtggaaggagaaccacgaccggtcgtggcaggaccagatgccggcggcggactacatgtggcgcatcgtcctgatgatcggcgcgttcccggcgctggccacgttctactggcggatgaagatgcccgagacggcaaggtacaccgcgctcatcgagggcaacgccaagcaggcggccaacgacatgcagaaggtgatggacgtcgagatccaggccgagcaggacaagctcgcgaggtacaaggcggcgaacgactacccgctgctgtcgagggagttcgcccggcgccacggcctgcacctcatcggcacggccaccacgtggttccttctcgacatagccttctacagccagaacctgacccagaaagacatcttcccggcgatcaaactgacgagccccgtcgacgacataaacgccctcaaggaggtgttcgagatttccaaggccatgttcctcgtcgcactcctcggcaccttccccggctactgggtcaccgtcgcgctcatcgacaaaatgggcaggtacctgatccagctcatcggtttcttcatgatgtctgtcttcatgctactgatgggcgtcatgtacaacgacctcaagaacaaacacaccacgctcttcgccctcttctacgcgctcaccttcttcttcgccaacttcggccccaacagcaccaccttcgtgctgccggccgagctattcccgacgcgcgtgcgctccacctgccacgccatcagcgccgcgtcaggcaaggccggcgccatcgtcgcggccttcggggtgcagagcctcacgctcaagggagacgtgggccacatcaagaaggcgctcatcatcctctccgtcaccaacatcctcggcttcttcttcaccttcctcgtcccggagaccatgggccgctcgctcgaggagatctccggggaggacggcaacgtcgaaaacggtcccggtgctcccgccggcgtggccatgggcgtcgcggacgtgagcaaggatgacaagatgcctgtttccagtactgagtggcagagctccatgcatgcgtgatcgagtaagcagataccaaaactacagtactacacagggggtgtggaatccatgtgatcacgcctcgaacgatctatttaatctactagggtttcaatatatatatattttagcctaagcataataaagatatgtaaagacatatggattatgtctcgggccatacaccgtatgcatggtctgagactagtatctataacaataatgttgccggtttgaaaaaaaaaaaaaaaaaa

SEQ ID NO: 2429 - DNA, 1668 bp, Oryza sativa Japonica Group
atggcggacgcggacgggggctcgaacctggcggtgctggacgcgctggactcggcgcgcacgcagatgtaccacatgaaggcgatcgtgatcgccggcatgggcttcttcaccgacgcctacgacctgttctgcatctccacggtgtccaagctgctcggccgtctctactaccagcccgatggctcgacggacagtaagccaggcgctctgtccaagaccgccaacaacatggtcatcggcgtcgcgctcgtcggcacgctcatgggccagcttgtcttcggctacttcggcgacaagctcggccggaagcgcgtctacggcgtcaccctcatcctgatggccgcctgcgccatcggctccggcctgtcgttcggcagctcgcgcaaggcagtcatcggcacgctgtgcttcttccgcttctggctcggcttcggcatcggcggggactacccgctgtcggccaccatcatgtccgagtactcaaacaagaagacgcgcggcgcgttcatcgccgcggtgttcgccatgcagggcgtcggcatcatcttcgcggggctcgtgtccatgatcgtctctagcatcttcctcacctacaacaaggcgccgtcgtacaaggggaaccatgacctctcgaggcagatgcccgcggctgactacgtgtggcgcatcgtcctgatgatcggcgcgttcccggcgttggcgaccttctactggcggatgaagatgccggagacggcgaggtacacggcgatcatcgatggcaacgcgaagcaggcggcgaacgacatgcagaaggtgctgtcgatcgagatagaggccgagcaggagaagctggccaagttcaacgcggccaacaactacccgctcctgtcgatggagttcgcccggcgccacggcctgcacctcatcggcacgacgaccacgtggttcctccttgacatcgccttctacagccagaacctgacccagaaggacatcttcccggctatgggcctgatcagcggcgctgccgaagtcaacgctctcacggagatgttccagatatccaaggcctcgttcctcgtcgctctcctcggcaccttccccggctactgggtcaccgtcgctctcatcgacaagatgggcaggtacatgatccagctgatcggtttcttcatgatgtccatgttcatgctggcgatgggcatcctgtacgactacctcaaaacccatcacttcctgttcgggctcctgtacgcgctcactttcttcttcgccaacttcgggccgaacagcaccaccttcgtgctgccggccgagctgttcccgacgcgcgtgcgctccacctgccacgccatcagtgccgcggcgggcaaggccggcgccatcgtcgcggccttcggcattcagaagctcacgtacaactctcaagtcaaaagcatcaagaaggcgctcatcatcctctccatcaccaacatgctcggcttcttcttcacgttcctcgtcccggagaccatgggtcggtcgctcgaggagatctccggcgaggacggcaacaccggcgccggtggcggcggcgcccctgccgctgccaatgccggcgttggcgtgagcgcttcggatgtgagcagggacgagaagttccctgcttcaagcaccgaatggcagacatccatgcacgcatga

SEQ ID NO: 2430 - DNA, 1755 bp, Oryza sativa Indica Group
ggcggacgcggacgggggctcgaacctggcggtgctggacgcgctggactcggcgcgcacgcagatgtaccacatgaaggcgatcgtgatcgccggcatgggcttcttcaccgacgcctacgacctgttctgcatctccacggtgtccaagctgctcggccgtctctactaccaacccgatggcttgacggacagtaagccaggcgctctgtccaagaccgccaacaacatggtcatcggcgtcgcgctcgtcggcacgctcatgggccagcttgtcttcggctacttcggcgacaagctcggccggaagcgcgtttacggcgtcaccctcatcctgatggccgcctgcgccatcgggttcggcctgtcgttcggcagctcgcgcaaggcagtcatcggcacgctgtgcttcttccgcttctggctcggcttcggcatcggcggggactacccgctgtcggccaccatcatgtccgagtactcaaacaagaagacgcgcggcgcgttcatcgccgcggtgttcgccatgcagggcgtcggcatcatcttcgcggggctcgtgtccatgatcgtctctagcatcttcctcacctacaacaaggcgccgtcgtacaaggggaaccatgacctctcgaggcagatgcccgcggctgactacgtgtggcgcatcgtcctgatgatcggcgcgttcccggcgttggcgaccttctactggcggatgaagatgccggagacggcgaggtacacggcgatcatcgatggcaacgcgaagcaggcggcgaacgacatgcagaaggtgctgtcgatcgagatagaggccgagcaggagaagctggccaagttcaacgcggccaacaactacccgctcctgtcgatggagttcgcccggcgccacggcctgcacctcatcggcacgacgaccacgtggttcctccttgacatcgccttctacagccagaacctgacccagaaggacatcttcccagctatgggcctgatcagcggcgctgccgaagtcaacgctctcacggagatgttccagatatccaaggcctcgttcctcgtcgctctcctcggcaccttccccggctactgggtcaccgtcgctctcatcgacaagatgggcaggtacgtacgaaccgtataaacatggacacttgatgcaaatgcaatcgatgcgaacatacacgaaatgaatgaattcatggtcacatatgcaggtacatgatccagctgatcggtttcttcatgatgtccatgttcatgctggcgatgggcatcctgtacgactacctcaaaacccatcacttcctgttcgggctcctgtacgcgctcactttcttcttcgccaacttcgggccgaacagcaccaccttcgtgctgccggccgagctgttcccgacgcgcgtgcgctccacctgccacgccatcagtgccgcggcgggcaaggccggcgccatcgtcgcggccttcggcattcagaagctcacgtacaactctcaagtcaaaagcatcaagaaggcgctcatcatcctctccatcaccaacatgctcggcttcttcttcacgttcctcgtcccggagaccatgggtcggtcgctcgaggagatctccggcgaggacggcaacaccggcgccggtggcggcggcgcccctgccgctgccaatgccggcgttggcgtgagcgcttcggatgtgagcagggacgagaagttccctgcttcaagcaccgaatggcagacatccatgcacgca

SEQ ID NO: 2431 - DNA, 2521 bp, Zea mays
tctgcagccggcccatatgaaggacaccacgtgaactcccccgacgactcagtgcgtcttcgccgccgttttcgtcgtcgcagattaaggttcccctcctctaacacgccggcgcttccccccctgccaccgcgacactcagtcgttgccgccgtcggctctgctgccgtggccaagcgcgttggcagcgaggattgctttagcttgcaggcactttccccacccccaccgccgctgatttcgccgttatgcggtgaagcccttcgcgttgacgggctaatcggctgcctgatttctattatgatggggtaggtgtgctcctggttcgcgtctcggaggaccctcgccgtttatcgatccagtgatgtggagctcacctttctccggctagcgttgtgtcaggggagagtgcttgttgatccctcgggagctggttgagttgtctttcgtttgtgggaaatctgtgcggcagcgtaaggttgctgattcggatggcaccggtgggggatcatattgtggacatcagctccgatgaggaggacttgttcatcggcacttccctaaatatactcctagaacccctcgaccccgttaaatgggtggatgaggtttgcggtgtggctgattatgtggccggggaggatatcgatgacctcatgattatgagtgagatatctgctccaccggtgttgcagaagatagccaagcctgatgagctcgtggttatgggtgagttgtcctcaccacctgccccgcagcagaaggccagtgctaatggtgggtgccatgaggatgatgatgattgtgtagttctagatggtgaccctgataaggcgattacagttgctgaagaggggagcttgggagatggcagttcggatgaattgcagatagtggcggagaaaggcccggtagcatgcagggacttccctcattcacggcattcatgctcaaacttgcctttcagcactacttctcacgtaaagcactgttccatgtgccactgttttgtatgtgacgcaccagctccttgcaaatattggggtaacagtacatcagctgatgatcattgccatgctacagacaaggattcaaaatggacatgcatgaggcaaatattcaagcaaaaattgttgccagcatcttttctagaaaaacaccagaacggcgtttactcaacaatgacaccacctagacagcaacatatgcagtgtcatgtttcagtcccacaatcgccttcggtgtcacatgggagtcacccttctcttaccatccaaagtcctcttcttaatgaagggagccaaaaccaacaaagacatccctcagtgagagtctcactgagtgtaggggcaacagtcagttctccaagagctggaagaggtactggcaatgctcacattgctcaaagtactcattcacatgcaatattcaagagagcaggggctgttgctccagtctttgcaacaagaaatgctagccaattctgtccttctgctccagatgatctccttttgcagcaggcattgtctcacgcttctcagcctgttcaagttgcgcctacaaccaatgctttcactggcgcttctcaaaataaccattttcagagatctttcagtgcgccgatagcacctcaggtgcaacaaggtcaacctgcggcacgttaccaggtcgccataaatggaatgcacgccgtagggccgcaacttgcacggtccacctcacttacaactcagagaacacaatgcctcccagaaccagcaataatagatgtcagcacaacaagctggcaagacatacttgctactgtggcatctaatctgggggtagcagattacaacacgagcacccctgagtctcagcatgtaacggttgactctctagccatgcatcccactgcaaaccatgggttggatcttcagcatgagcccattgcagaatcagagaacctgacatattcgcttctgcatgattcatccaatggcgcagcaggtggcagtgttcaggcagatggtcctatgcaaacaccagagaatttggaccatctgattggccagagcaatcctgttccaaatgaagctcacctggatgactttgcgggtgcccccgctaatcaattaccaatagaagaagaagaagctcatcagcctgagatgtcaaggctggagcctacaaacattctgttcgagttcgattgggtttaagcggtgacctgcctggctgcctcatcagcatatccctaacccatgaataataaatcagtgccattgacgtgcccctttctaggtctcctgcataggagacatgtctggtgtccccttgtacagtaattaggctatgtactagaagagtttcgccgtcatgttgtttgttatcatagtggtcagatgttgtggctcttcgggctttagatgttaacaggtctgaagtagaagggtgttgggtgggtgccaagatgcttgtctaaccactggtctacaatttgacaatgtaaggtattgagatacagatgcttgggttggat

SEQ ID NO: 2432 - DNA, 2526 bp, Zea mays
acgtgaactcccccgacgactcagtgcgtcttcgccgccgttttcgtcgtcgcagattaaggttcccctcctctaacacgccggcgcttccccccctgccaccgcgacactcagtcgtcgccgccgtcggctctgctgccgtggccaagcgcgttggcagcgaggattgctttagcttgcaggcactttccccacccccaccgccgctgatttcgccgttatgcggtgaagcccttcgcgttgacgggctaatcggctgcctgatttctattatgatggggtaggtgtgctcctggttcgcgtctcggaggaccctcgccgtttatcgatccagtgatgtggagctcacctttctccggctagcgttgtgtcaggggagagtgcttgttgatccctcgggagctggttgagttgtctttcgtttgtgggaaatctgtgcggcagcgtaaggttgctgattcggatggcaccggtgggggatcatattgtggacatcagctccgatgaggaggacttgttcatcggcacttccctaaatatactcctagaacccctcgaccccgttaaatgggtggatgaggtttgcggtgtggctgattatgtggccggggaggatatcgatgacctcatgattatgagtgagatatctgctccaccggtgttgcagaagatagccaagcctgatgagctcgtggttatgggtgagttgtcctcaccacctgccccgcagcagaaggccagtgctaatggtgggtgccatgaggatgatgatgattgtgtagttctagatggtgaccctgataaggcgattacagttgctgaagaggggagcttgggagatggcagttcggatgaattgcagatagtggcggagaaaggcccggtagcatgcagggacttccctcattcacggcattcatgctcaaacttgcctttcagcactacttctcacgtaaagcactgttccatgtgccactgttttgtatgtgacgcaccagctccttgcaaatattggggtaacagtacatcagctgatgatcattgccatgctacagacaaggattcaaaatggacatgcatgaggcaaatattcaagcaaaaattgttgccagcatcttttctagaaaaacaccagaacggcgtttactcaacaatgacaccacctagacagcaacatatgcagtgtcatgtttcagtcccacaatcgccttcggtgtcacatgggagtcacccttctcttaccatccaaagtcctcttcttaatgaagggagccaaaaccaacaaagacatccctcagtgagagtctcactgagtgtaggggcaacagtcagttctccaagagctggaagaggtactggcaatgctcacattgctcaaagtactcattcacatgcaatattcaagagagcaggggctgttgctccagtctttgcaacaagaaatgctagccaattctgtccttctgctccagatgatctccttttgcagcaggcattgtctcacgcttctcagcctgttcaagttgcgcctacaaccaatgctttcactggcgcttctcaaaataaccattttcagagatctttcagtgcgccgatagcacctcaggtgcaacaaggtcaacctgcggcacgttaccaggtcgccataaatggaatgcacgccgtagggccgcaacttgcacggtccacctcacttacaactcagagaacacaatgcctcccagaaccagcaataatagatgtcagcacaacaagctggcaagacatacttgctactgtggcatctaatctgggggtagcagattacaacacgagcacccctgagtctcagcatgtaacggttgactctctagccatgcatcccactgcaaaccatgggttggatcttcagcatgagcccattgcagaatcagagaacctgacatattcgcttctgcatgattcatccaatggcgcagcaggtggcagtgttcaggcagatggtcctatgcaaacaccagagaatttggaccatctgattggccagagcaatcctgttccaaatgaagctcacctggatgactttgcgggtgcccccgctaatcaattaccaatagaagaagaagaagaagctcatcagcctgagatgtcaaggctggagcctacaaacattctgttcgagttcgattgggtttaagcggtgacctgcctggctgcctcatcagcatatccctaacccatgaataataaatcagtgccattgacgtgcccctttctaggtctcctgcataggagacatgtctggtgtccccttgtacagtaattaggctatgtactagaagagtttcgccgtcatgttgtttgttatcatagtggtcagatgttgaggctcttcgggctttagatgttaacaggtttgaagtagaagggtgttgggtgggtggcaagatgcttgtctaaccactggtctaccatttgacaatgtaaggtattgaggtacagatgcttgggttggataccaaatttcgttgaaaaaaaaaaaaaaaa

SEQ ID NO: 2433 - DNA, 2152 bp, Sorghum bicolor
aacgggatgtacactggcagcgggatgaattaactgctggatttcttgggagatttgagagggaggtgataacagtctgcttcgcctgctctctctcctccccaggacaccagaaagaagtgatctttctcgccccctcttgttctggaacgagatcctctaatcctcgactctcctctgcttgaggcactttccccaccccaccgccgctggattttgccgtcacgcggtgcagcccttcgcgtcgacgggcaaatcggctgccggatgaactaaagtttgtgttatgatgggataggtgtgctcctgctcgcgtctctggggacatccggcgctacatgtggagctcacctttctccggctagcgttgtgtcagggggattgtttcttggtccctcgggagctggttgagttgtctttcgtttgtcggaaatctgtgcggcagcctaaaattgctgattcgggggtttggatggcaccggtggggaatcatgttgtggacatcagctccgatgaggaggacttgttcatgggcacttcactaaaactccccgaacccctcgaccccccagttaacttgtcacggtttatggatcacatctgcggtgtggctgattatgtgaccggggaggatatcgatgacctcatgattatgaatgagatatctgctccaccggtgttgcataagacagccaacgctgatgagctcgtggttatgggtgagttctcctcgccacctgcactgcagcagaagaaggccagtgctgatggtgtgtgccatgaggatgatgatgattgtgtagttctagatggtgaccctgataaggtggttacagttgctgatgcggggagcgcgggagatggcagttcggatgaattgcagatagtcgcggagaaaggcccgatagcatgcagggacttccctcattcgcgccatttatgctcaaacttgcctttcagcactactactcacgtgaagcattgtaccatgtgccactgttttgtatgtgacgctccagctccttgcaaatattggggtaacagtaactcagctgatgatcattgccatgctacagacaaggattcaaaatggagaaacatgaggcaaacattcaagaaaaaattgttgccagcatcttttccagaaaaacaccagaacggcgtttactcaacaatgtcaccacccagacagtgtcatgtttcagtcccacaatcgcctcccatatcacatgggagtcacccttctctttccatccaaagccctcttcttaatgaagggagccaaaaccgacagagacatccctcagtgagagtctcactgagtgtagaggcaacagtaggttctccaagagctggaagaggtactggcaatgctcatgttgctcaaagtactcgttcccatgcaatatttaaaagagcaggggctgttgctccaatctttgcaacaagaaatgctagccaattttgtccttctggtccagatgatctgcttatgccgcaggcattgtctcatgcatctcagcctgttcaagttgcacctacaaccaatgctttcactggcacttctcaaaataaccgttttcagagatctttcagtgcaccgatagcacctcaggtgcaacaaggtcaacctgcaggatattatgaggttgccataaatggagtgcacgccacagggccgcaacttgcacggtccacctcggcaactcagagaacacaatgcctcccagaaccagcaataataatagatgttggcacatcaagctggcaagacatacttgctactgtggcatctgatctgggggtagaagattacaatatgggcatccctgagtctcagcatgtaacggttgactctcaaaccatgcatcccactgcaaatcatgggttccgtcttcagaatgagcccattgcagaatcgaagaacttcacatattctcttgtgcatgattcagcaggtggcagtgttcaggcagatggtcctatgcaaacatcggagaatttgggccatctgattggccagagcaatcctgttccaaatgaagctcacctgaatgacttttcgggtgcccctgctgatgaattacctatagaagatgcagctcatgagcctgagataccgaacattttgcttcagttcgattgggattaa

SEQ ID NO: 2434 - DNA, 1704 bp, Sorghum bicolor; identical to SEQ ID NO: 918

SEQ ID NO: 2435 - DNA, 1890 bp, Zea mays
gtgggatatgaggaactcggtgtcggagcggagcttcctcatcgagagcgacgatgacgacgatgccgccgtggaggacgggaagcggcgcggccttggcggcggcggcggcggcgacgacgacgacgacgggtccgactcctcgtcgccgtgcgacagcccgcgggtggtggcggcgcggtgcagccagccgagttcgtacacgcagcaatggccgcagagctacaggcaatccattgacatgtacagcagtgtgcactctcccaacctgagcttcttgggcacgccatcactgagccggttgtccaactcgttcctcacaaactcattccgggggaagccacctgagatcatctccagcttaatcaagccattactgccgacaagcattgcttccgccagcgatgaccagcagcagcagcagcatgaggacgtccggaagagctcccattacctgccaccatcacgcaaggcgtcgtcgctgcagaggatccccgaggaccagagacctatggttgggggccatgaggtgggtccctaccggcagtgctcctatacccaaggggtcatgaacggagtgaatgtcttatgtggtgtggggatcctgtcaacaccttatgctgtcaagcagggtggctggcttggactggtgatactagcggtattgggtgcactggcttggtacactggcatacttctgcgccgttgcctggacagcaaggatgggctcgagacttaccctgacatcggacatgctgcctttggtactgctggccgtatcatcatctcgataatactgtatatggaactatatgcatgttgcattgagtatttgatcttagagagcgataacttatcaaagttgttcccaaatgcacacctaaccatgggtaacttgactctggattcacatatgctatttgccatcttgactgctcttgtcgtcatgcctaccacttggcttcgtgatctcagctgcctcagcttcatttcagctggtggagtcattgcatctatcgtcattgtctcctgcttgttctgggtgggacttgttgatcacgttggcacagtcgagagtgaagggacggcactgaaccttcctggaatccccattgccatcgggttgtatgggtattgctactcaggccatggagtgttcccaaacatctactcttctctgaagaaaagcaaccagttccctgctgttcttttcacctgtatcgctctgtctactgttctgttcgctgctgctgcaatcatgggatacattatgttcggtgaatctacagagtcccaattcacactgaacttacccccaaatcttgtggcttccaagattgcggtctggactacggtgacgaatccaataaccaaatatgcgctgaccatgactcctctagccctgagtttggaggaactgctacctccaaataagcagacatacccgaacataatgatgcttagatccgctctggtggtatcttcccttattattgctctgtccgttccattttttggacttgtcatgtcactggtcgggtcttttctcaccatgtttgtggcctatattctaccatgtgcctgctttttgtctatcctcaggagtaaagtgacctggtatcaggtagtactgtgtgtgttcatcattgtcgttggactttgctgtgttggtgttggcacgtactcttctctttctaagataatacaaaagtaccaatgaattgtgccctagaattatgtatgatgtgtccatgtgttttcgaatagccagttttcttttctgggatggtggcgctggtctggaagggggagggggatgtcattctttgtaaattttttgttggcatgagaggaagtggaggaatttgataaaatagggcaggttgtgtt

SEQ ID NO: 2436 - DNA, 2089 bp, Zea mays
accgcgctctctgctcccatccccgcctcgtccgttaccataaatctagcttgggctctaatctaaccgagggaacaggtgggatatgaggaactcggtgtcggagcggagcttcctcatcgagagcgacgatgacgacgatgccgccgtggaggacgggaagcggcgcggccttggcggcggcggcggcgacgacgacgacgggtccgactcctcgtcgccgtgcgacagcccgcgggtggtggcggcgcggtgcagccagccgagttcgtacacgcagcaatggccgcagagctacaggcaatccattgacatgtacagcagtgtgcactctcccaacctgagcttcttgggcacgccatcactgagccggttgtccaactcgttcctcacaaactcattccgggggaagccacctgagatcatctccagcttaatcaagccattactgccgacaagcattgcttccgccagcgatgaccaccagcagcagcagcagcatgaggacgtccggaagagctcccattacctgccaccatcacgcaaggcgtcgtcgctgcagaggatccccgaggaccagagacctatggttgggggccatgaggtgggtccccaccggcagtgctcctatagccaaggggtcatgaacggagtgaatgtcttatgtggtgtggggatcctgtcaacaccttatgctgtcaagcagggtggctggcttggactggtgatactagcagtattgggtgcactggcttggtacactggcatacttctgcgccgttgcctggacagcaaggatgggctcgagacttaccctgacatcggacatgctgcctttggtactgctggccgtatcatcatctcgataatcctgtatatggaactatatgcatgttgcattgagtatttgatcttagagagcgataacttatcaaagttgttcccaaatgcacacctaaccatgggtaacttgactctggattcacatatgctatttgccatcttgactgctcttgtcgtcatgcctaccacttggcttcgtgatctcagctgcctcagcttcatttcagctggtggagtcattgcatctatcgtcattgtctcctgcttgttctgggtgggacttgttgatcacgttggcacagtcgagagtgaagggacggcactgaaccttcctggaatccccattgccatcgggttgtatgggtattgctactcaggccatggagtgttcccaaacatctactcttctctgaagaaaagcaaccagttccctgctgttcttttcacctgtatcgctctgtctactgttctgttcgctgctgctgcaatcatgggatacattatgttcggtgaatctacagagtcccaattcacactgaacttacccccaaatcttgtggcttccaagattgcggtctggactacggtgacgaatccaataaccaaatatgcactgaccatgactcctctagccctgagtttggaggaactgctacctccaaataagcagacatacccgaacataatgatacttagatccgctctggtggtatcttcccttattattgctctgtccgttccattttttggacttgtcatgtcactggtcgggtcttttctcaccatgtttgtggcctatattctaccatgtgcctgctttttgtctatcctcaggagtaaagtcacctggtatcaggtagtactgtgtgtgttcatcattgtcgttggactttgctgtgttggtgttggcacgtactcttctctttctaagataatacaaaagtaccaatgaatttgccctagaattatgtatgatgtgtccatgtgttttcgaatagccagttttcttttctgggatggtggcgctggtctggaagggggagggggatgtcattcgttgtaaattttttgttggcatgagaggaagtggaggaatttcataaaatagggcaggttgtgttatcgaaggagtattttgtctgaaattgttctcgtgacggtagaggctgctgggaacgaccttctgttgacgctgccattttcgtttgacccatattgtttcttgtcttaaaaaaaaaaaaaaaaa

SEQ ID NO: 2437 - DNA, 2651 bp, Sorghum bicolor
gtccacgcaggcgcagaagcaggctcctttttcatcaggtccggagggactaggaggggcagggactgagagagagagagagagagagagagagagagagagcagccgtggagtggagtggagtggagcagactgattgagcccccaagatgaggagctccgtgtctgagcgcagcctcatcatcgagagcgacgacgacgacaacgacgaccgtccccaatcccagccatccgccgccgccgcccgcagcagaagacgccaccaccaacacgaggagggctccggctccggctccggctcaggatccgactccgattccggctcctcctcgtcgtcctgcgccaccccgcgtggtcacgctcaggccaccgcctcctcctacacccagcaatggccacagagctacaggcaatccatcaacattcttagtagcgtgcagtcaccaaatctgagcttcttggggaccccaactctaagcagattatccaactctttcatcaccaattcttttcggggtaaaacccctgaaatcatctctaatcttgttaagccacttcttcgccccactacaagtgatgaccttcagcagcagcatgaagaaagaaagagttcacagtaccttctgccttcgagaaaaccgtctttgcaacagattcctgaggatcaaaagccagtgccagttgctcatgaggtctctccctatcataaatgctcttacactcaggcggttgtgaacgggataaatgttctatgtggtgtgggaatcctatcaacgccttatgccatcaaacaagggggctggcttggactggtgatactctgtttatttgcaattctagcatggtatactggtgtgctcctgcgccgttgcctggacagcaaggagggccttgagacatacccagatattggccatgccgccttcgggaccaccggtcgtatagccatttcgataatcctgtatgtggaactatatgcctgttgcatcgagtatctgatattggaaggtgacaatttatcaaaattattccccaatgcacacctgaccatcgggagcttgacagtgaactcccatgtacttttcgcaatcttgactaccatcatagtcatgccgaccacttggctacgtgaccttagctgcctgagctacctttcagctggaggtgtcattgcatcaatccttggagtcatctgcctattctgggtaggtgttgttgataatgttgactttgagaacaaaggaactgcgctgaacctccctggaatccctattgcaattggattgtatggttattgctactcagggcatggggtgtttccaaacatctactcttctttgaagaaccgtaatcagttcccttcaatcctttttacttgcattgggctgtctaccattttatttgctggtgctgcggtgatgggatacaaaatgtttggtgaagccacacagtctcagttcacactgaacttaccagagaatttagtggtttcaaagattgcagtttggaccacggtggcaaatccaataaccaaatatgcattaaccataaccccactggctatgagtttggaagagttgctgccaccaaatcaacagaagtactcaaacatagtcatgcttagatcagccttggtggtgtcaaccctcctcattgctctatctgtacccttctttggacttgtgatggccttggttggttctttactcacgatgcttgtgacctatattctaccttgtgcgtgctttttagcaatcctgaggagaaaagtgagctggcaccaggtagcagcgtgctcattcatcatcatggtcggggtttgctgtgcatgtgtggggacatactcatctctgtcaaagataatccagaactacacatgagcgcacatgatatatacagctgttcctgcaaatccaaatttagttactcctacatatacagtaaccgaaccaccccattactcatgtgctcacactatgagccatacaagacaaaaattttgcccagcaaattagtcaagttgatgtaatgccagcatattagttaagtttatgtataataaatttgtgtgatgtcaatgcttgcatgttaatggatcaacacaaataagtctgtagcaaggatttaaggttgtatcatgcatatatgtaacaagacattatttgtgaacacaagatcaggtggattttgtgctatcattttttgtgaaccgactgccctgcgcctgtgtctgcctgcctaccttggatggtgccagcccaatccgttgaaagggtcacataggaagggagagaaggggaacctgctacagtgctgcccttgcattgggagaagccgcaacagcggagttttttgagcggctgagaaggtttgcgaagaagacgtcctgggagtttttcagttcgagacgggtggatgctgtttgctgtccactggtagacttttttttttcctttttttgttcaacatttcacggcagaagggagtggagtctggagtccatctggccattggtactttattttcttctttttttattaagcaactccaagccaatgatttgattgacagtgaggtaatggctgatggtaaattggattagggacctactatgttgtgctttagtattacctttgtgatgacgaaattta

SEQ ID NO: 2438 - DNA, 2136 bp, Sorghum bicolor
gcggatatattttagtggtgagatgagtgtacataggcagcaggggtttattcgttttgggtacttgtttcgaagagaagcagatttcgaggagacgaaggctgagtgagcaggagatgaggagcccggtgccggagcgtagcctcatcatcgagagcgatgacgacgacgacacccaatccgctgtcgccaccaactggataggacacgggcacggccacgacgaggaggagccggagcaggagcccggttcggactctgactcttcgtcgtcgtcttcgtcctgcgccaccccacgccgcggcccaagctcccccgcctacacccagcaatggccgcagagttacaggcaatcgattgacattcttagtagcgtgcactcatccaatctgagctttttggggactccaacgctgagcagactgtcaaattctttccttgccatcaccgattcttttcggggcaaagcccctgaaacaatctcaaactttgtcaagccacttcttggtcccacatcaagtgatgagcagcagcagcagcagcatgaagatacccgaaagagttctcagtacattatgccctcaagaaaatcatctttggaacaaatccctgaggatcaaaagccactggtagttggtcatgaggcgtctcgtaatcgaaattgctcttacacccagggagtgatgaatggaataaatgttctatgtggcgtgggaatcctatcaacaccttatgccatcaaacaagggggttggattgggctggtgatactctgtttatttgctttgcttgcatggtacactggcgtgctcctgcgtcattgcctggacagcaaggagggcctcgagacatacccagatattggccatgcagcctttggcagcacaggtcgcatagttatctcgataatactgtacgtggaattgtatgcatgttgcatcgagtatttgatattggagagtgacaatttgacaaaattattccccactgcacacctgaccattgggagcctgacgctgaactcacatgtattttttgcaatcttgactaccatcatagtcatgccaaccacctggctccgtgacctgagctgtttgagctacatttcagctgggggtgtcattgcatcaatccttgtggtcatttgcctgttcttggttggggttgtcaatgatgtcggctttgagaacgaagggactgcactgaaccttccaggaattcctattgcaatcggattatatggttactgctactcagggcatggggtatttccaaacatatattcctctctgaagaatcgcaaccagtttccttcaattctttttacatgcattgggctgtctacctttttgtatgctggtgctgcagtgatgggatacaaaatgtttggtgaagccacagagtcccaattcacactcaacttaccagataattccctcatttctaaggttgctgtttggacaacggtggcaaatccaataaccaaatatgcattaactattattccattggctatgagtttggaagagttgctgccaccaaaccaacaaaagtattctacaataatcatgcttagatcatctctggtgatgtcaaccctcctgattgctctatctgtgcctttctttggacttgtgatggccctggttggttccttgtttgccatgcttgtgacctatattcttccttgcgcatgttttttggcaatcctcaagacaaaagtggggtggcatcagatagcagcttgctcgttcatcatagctgtcggggtttgctgtgcctgcgtgggaacatactcatccctgtcaaagataatccagaactacacataatacagctgttcctgttatgcagctgcccaacaaaatcatgtgtgtgctatatgggccaagcatatacaagatgaaagtttaccctgcaattcactctatgcataataaattattggtgtcttatcatagggctcaacgatttgtactatggttttaaggtggtatatcatgcgtaagtaacattgttccttatggtgcgcaaaaaacaagttgatttggtattcttgcaattttatgatttgattgtatcaaaagttgaatggagcaagagtccatgaacttaataggatgtgccacttagttc

SEQ ID NO: 2439 - DNA, 2158 bp, Oryza sativa Japonica Group
atagtatgcatgtgtggagtcatccaatggttccttctcccttgcatcagctggggctaaaagtgtgtgtgcgacagtgagagagagagagagagagagaggagaactaatttaatcctaatcagttgcagacttgcagagcccaagagaggagaggagattccaagagaagagatgagatcccacgagatgaacaactcttcttctcgttatgcgtcagaggaggagcgcggcagcaacagcttcctcatcgagagcgaggaggaggaggaggacgaggaagcccacccccactcctccatcctcctcaaggatgccgactccgactccgactccgacgactcctcctgcgctaccccgcgcccaagctcctacgccacccaccaatggccgcaaagctacaggcaatcaatcgacatttatagtagcgtgcagtctcccaacctgagctttttgggaactccaactctaagcaggctctccaactcattcctcaccaactcttttcgtggcaaaacccctgaaattctctctaatcttgtcaagccacttctacgcccatcatcttcaagcgacgaccagcagcagcagcagcagcatgacgatgatacccgtaagagttcccagtacctgcttccctcaagaaaaccgtctttgcaacagatcccggaggatcaaaaaccattggtgccggctcatgaggtgccggcttatcaacaatgctcctacacccaggcagtgatgaatggaataaatgttctgtgtggtgtggggatcctatcgactccatatgccattaaacagggaggctggcttggactggtgatactttgcttatttgctgtgctcgcttggtacaccggagtgctccttcgacgttgtctggacagcaaggagggtcttgagacataccctgatattggtcatgccgcctttggcaccactggacgtatagcaatctcgataatcctgtacatcgaactgtatgcctgttgcattgagtatttgatattggagagcgacaatttgtcaaagttattccccaatgcacatctaaccattgggagcatgacactaaactctcatgtgttcttcgcaatcttgaccaccctcatagtcatgccaaccacttggctccgcgaccttagctgtctgagttatctttcagctgggggtgtcattgcatcaatccttgtagttgtctgcctatgctgggttggggttgttgaccatgttggttttgagaacaaagggactgcactgaatctcccaggaattcccatcgcaattggactgtatggttattgctactcaggacatggtgtgttcccgaacatctattcttctctgaagaatcgcaaccagtttccttctattcttttcacttgtattgggttgtcctcaattttgtttgccggtgctgctgtgatgggatataagatgtttggtgagtccactgaatctcagttcacgctgaacttaccagagaatttggtggtttcaaaggttgctgtctggaccacggtggcaaatccaataaccaaatatgcattgaccataaccccattggctatgagtttggaagaattgctgcctccaaatcagcagaagtatgcgaacataatcatgcttagatcctccctggtggtctcaaccctcctcattgctctatctgtccccttctttgggctagttatggcgttggttggttctttactcaccatgcttgtgacctacatccttccatgcgcctgtttcttggccatccttaagagaaaagtgacttggcatcagattgcagcttgctcattcatcatcgtggtaggggtttgctgcgcttgcgtggggacatactcatccctctccaagattatccagaactacacctgacctgagtggccagctgaggaacggagcactagctgcttatgtagtaataagaaaataattaatcatccttctatagccctgcacataccggaacaaagttttgcccgggaactggagtcgacttgatcaattatatatgtataatataattagtttggatcgtttgtttaatttgtggcaactccaggcatgttaatgtataattaacgataaaaacaccacagtaccacatagtggagttttgttaatgataaaaataaataatgct

SEQ ID NO: 2440 - DNA, 1996 bp, Zea mays
cgcggagtggaggacgagtggtgttgcccacgcagcgcagacgcagtctccttttcatcatcaagtccggagggagagccggagaaccggttcagccagcagagtcgccaaaacaaaagcaaaatgaggagctccgtctctgagcgcagcctcatcatcgagagcgacgacgacgacgacgaccatccccaatcccggtcatccgccgccgcccgcagcagaagacgccaccaccaacacgaggaggactccgccgcaggatccgactccgattccggttcctcctcgtcctcctgcggcaccccgcgcggtccggccaccgactcctcctacacccagcaatggccacagagctacaggcagtccatcgacattcttagtagcgtgcagtcaccaaatctgagcttcttgggaaccccaactctaagcagattgtccaactcttttcggggtaaaacccctgaaatcatctccaatcttgttaagccacttcttcgccccactacaagtgatgaccaccaccaccaccaccagcagcagcctgaagaaagaaagagttctcagtaccttctgccttcgagaaaaccatctttgcaacagattcctgaggatcaaaagccagtgccagttgctcatgaggtgtctccgtatcataaatgcacttacacccaagcagttgtgaatggaataaatgttctatgtggtgtgggaatcctatcaacaccttatgccatcaaacaaggcgggtggcttggactggtgatactctgtttatttgcaattctagcttggtatactggtgtgctcctgcgccgctgcctggacagcaaggagggccttgagacatacccagatattggtcatgccgcctttggagccaccggccgtatagccatctcaataatcctgtatgtggaactgtatgcctgttgcatcgagtatctgatattggaaggtgacaatttatcaaaattattccctaatgcgcacctgagcgttgggagcttgacaatgaactcccatgtacttttcacaatcttgactaccatcatagtcatgccgaccacttggcttcgtgaccttagctgcctgagctacctttcagctggaggtgtttttgcatcaatccttggagtcatctgcctattctgggtaggagttgttgataatgttggctttgagaacaaaggaactgctctgaacctccctggaatccctattgcaattggattgtatggttattgctactcagggcatggggtgtttccaaacatctactcttctctgaagaagcgcaatcagttcccttcaatcctttttacttgcattgggctgtctaccattttatttgctggtgcagcggtgatgggatacaaaatgtttggtgaagccacacagtctcagtttacactgaacttaccagagaatttagtggtttcaaagattgcagtttggaccacggtggcaaatccaataaccaaatatgcattaaccataaccccactgactatgagtttggaagagttgcttccaccaaatcaacagaagtactcaaacatagtcatgcttagatcagccctggtggtgtcaaccctcctcattgctctatctgtacccttttttggacttgtgatggccttagttggttctttacttacgatgcttgtgacctatattctaccttgcgcgtgctttttagcaattcttaggagaaaagtgagctggcaccaggtagcagtatgctcgttcatcatcgtggttggggtttgctgcgcttgtgtgggaacatactcgtctctgtcaaagataatccagaactacacatgatacagttgttcctgcaatccaaatttatgtccaaactcaatgagccaaactgcccagcaaattagtcaagtcgatgtatcataaatttgtgagatgtccatgtttgcatgttaatggatcaacacaaataatacgtttgtggcaaggatttgagacaatatttctgaac

SEQ ID NO: 2441 - DNA, 1096 bp, Zea mays; identical to SEQ ID NO: 919

SEQ ID NO: 2442 - DNA, 984 bp, Lycoris aurea
aaactgtacaatttcttagtagagagaaggcaaagaacaagaaatggcgacaactcaagctcttctatcttcaatggaggctggaaggcaactcttaggtggaaggcctgttcagtggactccatcaagatcattcagttcttcaagaaaggcatcctttgttgttaaagcagcctctacgccccctgttaagcaaggagcagacaggcagctatggtttgcatccaagcaatccctctcctacttagatggaagcctaccaggtgacttcggatttgacccattgggcctatcggacccggaaggcactggaggcttcatcgagcccaaatggctagcctacggtgagatcatcaacggacgttacgccatgcttggcgtggccggggcgatcgcacccgagatcctcggaaaactcggcctgatcccacccgagactgccctcccgtggttccaaaccggtgtcatcccacccgccggtacctacagctactgggctgacccatacactctattcgtactcgaaatggccctgatgggcttcgctgagcaccgaagatttcaagattgggccaagcctggatcgatgggaaaacagtacttcttagggtttgagaagttcttgggtgggtctggtgacccggcataccctggtgggcccattttcaacccactgggctttggtaaggatgagaagtccatgaaggagttgaaattgaaggaggtgaagaatggaaggttggctatgttggcaattttggggttttttattcagggtttggtgactggggttgggcctttccaaaacctcttggatcacttggctgatccagtgaataacaacgtattgaccagcctcaagttccattagtttggttggttttttcttctccttgtaacaaaattgtagcatgtggggactttgtaattgatattggacaagcttttattgcctgcccgtagcatgttcacaaaaaaaaaaaa

SEQ ID NO: 2443 - DNA, 975 bp, Lycoris aurea
aaaaaaaaacctgtacaatttcgtagtagagagaaggcaaagaacaagaaatggcgacaactcaagctcttttatcttcaatggaggctggaaggcaactcttaggtggaaggcctgttcagtggactccaactagatcattcagttcttcaagaaaggcatcctttgttgttaaagcagcctctacgccccctgttaagcaaggagcagacaggcagctatggtttgcatccaagcaatccctctcctacttagatggaagcctaccaggtgacttcggatttgacccattgggcctatcggacccggaaggcactggaggcttcatcgagcccaaatggctagcctacggtgagatcatcaacggacgttacgccatgcttggcgtggccggggcgatcgcacccgagatcctcggaaaactcggcctgatcccacccgagactgccctcccgtggttccagaccggtgtcatcccacccgccggtacctacagctactgggctgacccatacactctattcgtactcgaaatggccctgatgggcttcgctgagcaccgaagatttcaagattgggccaagcctggatcgatgggaaaacagtacttcttagggtttgagaagttcttgggtgggtctggtgacccggcataccctggtgggcccattttcaacccactgggctttggtaaggatgagaggtccatgaaggagttgaaattgaaggaggtgaagaatggaaggttggctatgttggcaattttggggttttttattcagggtttggtgactggggttgggcctttccaaaacctcttggatcacttggctgatccagtgaataacaacgtattgaccagcctcaagttccattagtttggttggttttttcttctccttgtaacaaaattgtagcatgtggggactttgtttgatattggacaagcttttattgcctgccaaaaaaaaaaaa

SEQ ID NO: 2444 - DNA, 1084 bp, Vitis vinifera
ccctgtgttttgtgttctatccagggctatttggtcttattcttcttcttcttcttcatcgtccaaactcaaaactcaatcagaaacaacaagaaatggctgctcaggccttggtttcatcttctcttacttcctcagtggagactgccagacagatacttgggtcaaggcctctgcaatctccatcaaggaagtcttcttcctttgtggtcagggcagcttctactccaccagtcaagcaaggagctgacaggcccctctggtttgcatccaagcagagccttacttacttggatggcagtcttccaggtgactatgggttcgatccactgggactttcagaccctgaaggcacaggagggttcatcgagccaagatggttagcctacggggaggtcatcaacgggcggtatgccatgctgggtgctgttggtgcgattgcgcctgagatactggggaagctgggcctcatcccaccggagaccgccctgccttggttcaaaaccggggtattccccccagcggggacatacaactactgggcagacccttacacactgtttgtattcgagatggcactgatgggatttgcagagcacaggagattccaagactgggccaacccagggtcaatggggaagcagtacttcctcgggcttgaaaaatacttgggagggtctggcgacccagcctacccaggaggcccactgttcaaccctctcgggtttggtaaagatgagaaatccctcaaggatctgaagctcaaagaggttaagaatgggagattggctatgttggccatattgggctactttgcacaagggcctgtgacaggagtcgggcccctccaaaacctgctggaccatttggcagaccctgtcaacaacaatatcataaccagcctcaagttccacaactaggagtctcatcctcttgttgatttgcttcacgattcactctctctatgtcctctcagctgtcacctctctctctccctcatatttgtaatattattatgtgaagacttggccttaaattttaatcaatcaatcagtaacaaaatcactgtttaaagactcaaaac

SEQ ID NO: 2445 - DNA, 1454 bp, Oryza sativa Japonica Group
atggcggctcaggctcttctctctgggaggcagctgctggggaggccattgcaatcttcagtctccaggtcttcttcctccaggaaggcacccttcatggtcagggcagaggccactccccctgccaaggtatatatgctgattgatttctactcttcctcaattcaaaattgaaagatattatgctgatctggttaaatttatgtttggtttggtttggtttcagcaaggtgctgacaggcagctgtggttcgcatccaagcagtccctgagctacctggatggcacgtaagttttcatgtggtaaaatttattcatgttgcaataaaagaggcgttaaggcctcatttgaaacgattttcgaagaatttttataggaatcaaccgtaaaattcatgcgtttcaaaaaaaaaaaaaggagcttaattaagatggtaggaactagccgtatccaactgaatttcatagtacagtagtacaatcaaaatgatcaaacttttcataggaaacaataatcaatagaccttccaaataaataaataaataaagagtaaatttcagagaacctttacttttatggtcaaagatgacctgtggcacataaccgcatgatttatcgtctacggacctcatcttttcgtttatgcttatccttatcagcgaaactttaaatttttaatcttaaatttagagctaattttcatgttttttttatcgaagtttatttttcagcctttgcttctaaagtttttattcacaaattatatctcgtttgtaaatatgccatggcttccataatattgatcgtgcgtgcatggaatcatggatggatgcaggcttccgggagacttcgggttcgacccgctggggctatcggacccggaggggaccggtgggttcatcgagccacggtggctggcctacggcgaggtgttcaacggccggacggcgatgatgggcgtcgtcggcatggtcgccccggagctcctcggcaagctgggcctcgtccccgccgagacggcgatcccgtggttccagaccggcgtgatcccccccgcgggcacctacacctactgggccgacccttacactctcttcgtcttcgagctcgccctcgtcggcttcgccgagcaccgccgcttccaggactggtacacgccgggctccatggggaagcagtacttcctcggcctcgagaagtacctcgccggctccggcgagccggcctaccccggcggcccgctcttcaacccgctcggcttcgggaccaagagcgaggcggagatgaaggagctcaagctcaaggagatcaagaatggcaggctcgccatgctcgccttcctcggcttctccgtccaggcgctcttcaccggggttggccccgtgcagaacctgcttgatcacctcgctgatcccgtccacaacaacatcctcaccagcctcaagttccatta

SEQ ID NO: 2446 - DNA, 1136 bp, Arabidopsis lyrata subsp. lyrata
aaaaccagttgtgctatttgaaaaccacaagtattggacctttgtttcttctaccctaacatagctcctgcagaccataactaaacaatcatcattttctcttggtgacagaagagaagagttgaggaacagagaaaatggcagcacaagcacttgtgtcttcttcacttacctcctctgttcagacagctagacagatatttggctcaaaaccagttgcgtctgcctcacagaagaagagttcctttgttgttaaggctacagcaactccacctgtcaagcaaggagcaaacagaccattgtggtttgcatcatcgcagagtctctcttacttggatggcagcttacctggagactatggatttgacccacttggtctttcagacccagagggaactggagggttcattgagccaagatggctagcatacggagagatcatcaacggacggtttgccatgttgggtgcagctggagctattgctcctgagattctaggaaaggctggtctgattccaccagagactgctcttccttggttccaaaccggtgtgattccaccagcagggacatacacttactgggcagacaattacactctctttgttctcgagatggctctgatgggattcgctgagcaccggaggttacaagactggtacaacccaggatctatgggaaaacagtacttcttggggttagagaagggtttggccggttcaggtaacccggcttaccccggtggacctttcttcaaccctctagggtttgggaaagatgagaagtccttgaaggagttgaaactcaaggaggtcaagaacggtagactggctatgctcgccatcctcggttactttatccaaggactagtgaccggtgtgggaccttaccagaacctgctcgatcacttggctgatcccgtcaacaacaacgtcttgaccagcctcaagttccactgaggtgatcatcatcctatgtgttttatgtctcttgtatcgtacaaatctttctatctttcgctaccattggcttcttcgtattgtaacaccctgtgtaaacatattcgtgttttgtaagaaatgacaatgtcaatggccaaacgaaaaacttttaggattaacagttggtatttgcaa

SEQ ID NO: 2447 - DNA, 1198 bp, Arabidopsis thaliana
aaaaccagttgggctatttgaaagccacaagtacttggaacctttgtttcttctaccctaacatagcccttgcaaaccataaccaaaccatcatcatcatcatctcttggtgacagaagaaaagagttgaggaacagagaaaatggcagcacaagcacttgtgtcttcttcacttacctcctctgttcagacagctagacagatatttggctcaaaaccagttgcgtctgcctcacagaagaagagttcctttgttgttaaagctgctgcaactccacctgtcaagcaaggagccaacagaccattgtggtttgcttcatcgcagagtctctcttacttggatggcagcttacctggtgactatggattcgaccctcttggtctttcagacccagaaggtactggaggattcattgagccaagatggctagcatacggagagatcatcaacggacggttcgccatgttgggtgcagctggagctattgctcctgagattttaggaaaggctggtctgattccagcagagactgctcttccttggttccaaaccggtgtgattccaccagcagggacatacacttactgggcagacaattacacactctttgttctcgagatggctctgatgggattcgctgagcaccggaggttacaggactggtacaacccaggatctatgggaaaacagtacttcttggggttagagaagggtttggccggttcaggtaacccggcttaccccggtggacctttcttcaaccctcttgggtttgggaaagatgagaagtcactgaaggagttgaaactcaaggaggtcaagaacggtagactggctatgctcgccatcctcggttactttatccaaggactagtgaccggtgtgggaccttatcagaacctgcttgatcacttggctgatcccgtcaacaacaacgtcttgaccagcctcaagttccactgaggtgatcatcatctcatgtgtttttatgtctcttgtatcgtacaatatttccatctttcgctaccattggcttcttcgtattgtaacaccctgtgtaaacatattcgtgttttgtaagaaatgacaatgtcaatggccaaacgaaaaaacttttaggattaacagttggcatttgcaaaccaaacaaagcggttagtatattcaaagaatgttatgaaatactgtacctgttat

SEQ ID NO: 2448 - DNA, 1170 bp, Populus trichocarpa
ggcccttattccctccctagtttttgtttattctaggcgagagctgcagtctatcagagtcatacttgtgtggtagcaggggcacgcacacacaaaaacacagaaagaaaaagaagaagaagaagaagaagaaggacaagggaaagggggagaaatggcagcacaagcactcgtgtcatcatctcttacctcttcagtggagactgctaggaaagtgctaggagcaagaccaacccagtcaccattcgtgtcctcaaggaaaagctcttttgttgttagagcagcttctactccccctgttaagcaaggaaacaggcagctgtggttcgcatcgaaacaaagcctgtcttacttggatggcagccttccaggtgacttcggattcgacccactcggactttcagaccctgaaggcacaggaggtttcattgagccaaaatggttagcctacggtgagatcattaacggacgatatgccatgttgggggcggttggtgccattgcaccagaaattcttggaaaggctggcctcatacctccggagaccgccctcccttggttcaggactggtgtcatcccaccggccgggacatacagctactgggcagatccatacacgctgtttgttttcgagatggcactcatgggattcgcagagcacaggaggttacaggactgggcaaaaccaggttccatgggcaagcagtatttcctgggattcgagaagtatttgggtgggtccggagaaccagcctaccctggcggacccttgtttaacccccttggatttgggaaagacgagaagtcgttgaaagacttgaagttgaaggaggtgaagaatggcaggttggctatgttggccatcttgggttactttgtgcaaggtctcgtgaccggagtcggaccataccaaaacctcctggatcacctggccgatcctgtccacaacaatatcttgaccagccttaaatttcattagggctcattcttgcctgtttggggataggaatagacccccctctgaacccctttccagtcctctcctactcattgtaaccattggtgtgaaaagctcttttgtaattctctgtaagaaaatctccctctcttgtttctcttgtgataatgaagcagcttaattaatggccataacaggtatgtgctcgggta

SEQ ID NO: 2449 - DNA, 3315 bp, Zea mays
cccttcctccaaccccgacgcgactgcctatgtcacaccagaggttgcggtggaatcggtgcacccggccgcacgcggacgcttcttcaacgacgattcgggtgccccgcttgactcggacgacgacagctccgtccacggcggccacggatccgtgatgtcccatctcctggagcgcgaggccgacaccgccttccttccccacttggatcagcgggatggagttgaggcgtggctcatcctgcgccggtgcactcccgcctccttcaacgtcgcctccaccgaccccaacaacgaggtctcgagcgccgttaccgcggacgcgctcgctaaggccgcgcccgcgctcttcgcttcgagggcgcccagaccatcgctcaagtacctggagctgcttctccaggcagaaatcgacttcgaccacattgacctaccgactgctgccgccgcagagcacatcgtcgcccaggtcaccggcaacaacgcggtgtccgtggtggaggaccaactcaggtgcaccctcttcctcacgcgtaacttcctgtcaagccaccaccaggccgtcagcaaggagtgggacatggtcgccgtcgtgcacccagtgtgcaacgtgggggaaaagaaggtggacgccatctgcactggccagatcgagcacctgctactgcatcacctcaagcgttcacctacctcgattggtgccaaggcggtgttcgatgaaatgcagcaaagcaccaattccgcgacaacgacacccgcatcctcagctctgacaacaacaactactacaaccatggctgcaccggccacctggctggacgcgcagcctgctgtgtcgacatgctcatcagcatcttctgctcaagaagatacaccaataccactcctcttccttcgcggtggactgagtatgatggataatgtcttacctgctaattctactttcctgtctaccaacatatcactcagcaacatggagtgtctgagagagtttatgcttcaccttaagctcggcaccgccagattcactatttgtgacgaaagtgtagtgaacctgtggtcgtcgccggtggagcgagttgttcagcaacaaacatggctacaacttgagttgacaaatagtggtcttgacctatggcctatctcatggcaatcgcaacaagtctattttggtactcaccatggattcgctgcatggcccaggagccatggcacaattcttgtcttcgattttagcaataccttgtcctggaacaactcaatgtcaattgttgcttcatgctcaaccaacacccttcttgccaaggatgatggagattctatgaaccggtgtttcagttggtgttggaagcctccatggttacatccaggtcagtcgaaattcagagatttcctctggtggtctttttggtatttccaatttgtcaggtccaagtattatgggtgcagagcatcacaattactaactccttggacaccacctatgacattatgtttggttggtgatgaccttgttgtgatgctagttattccaagtatgctactgttatctcggtgctattttagtggagtagaatgtgtgctggcagctgcagatccgttattttctacatttcatgctgagagagagttgttctggaagccaccttggcaacatctagttcctaacaccagatctgagatacagttgttgatggagtttgtctatctcaatacaggagtctgccgttctctgcacatgattactaaattttctaagcaatactttgttggcctatttttgctaattacaagggaaaaatttatgtctgggagaataatgttggctcttcttccacttctgaagctatttacatcaggaggagcaaggattgtcaatgcttcctcacttgcgtcggagctgaagagaatgccaaatgagaagttgcgaaacgatttgagcaacattgacatctgggacgaggaccggatacaagcagtactcaacacattcttggaagacctgaggagcggtcggctggaagaggctgggtggcccgtgatgctaccagcctacagcctgtcgaaaatggtcatcaatctgtacaccaggatcatagcaaggaggtatccggagatgcgcatcaactgtgtgcgacctggatttgtcacgacggacatcagctggaatctgggggtcctgacgcctaaacaaggtgcgagagggccagtcatgctagctctcctcccagatgatggaccaacgggttggtacagagatgaaatgggcgataagatgggcagcctattatttttcaaaatggtcaagtattcatcactagtcgagggattttgtggtgtgcagttttcatttcctaatattctattgtgcaagtcttggtcacaggagttagccaccaacacagaaagccatttactaccagaaatgctagaagcggccaatggttatatttgtcatgagcttcatcttatgcttacctctattggagtgacacatatgatcgattgtggtaaatatttgataggggttatcgacttgctaactccatgggatcctagcatagtggtcttcaacctcaagttcctgatgctttggcttgagggcaagccaaatcttaagaagggggaaatgtcagtactgatgagatggaaaacggtgtggtggctgatggcgggtcgcgtccgcctcgtgtgcatcatctgagcgatcgtgtatatgggccagaccgaagaaagtgaccggttgggcgcctgcgtgcgcgaggatagctgggcctggtttggcagcttgtaagcaagtagtacttatgcactacctgatggaagggtcaggattatcgaaaacatgaacaactattttctctctgcagaagatactccatccttcctgtgatcttccctaccttctcttgtatcttcctccactcctgctgtgtatcttcctccactcctgctgttcggttagggattagtgagtattgctaacagacggggacagaggatgtttgaaaagcgcagcatactcccgttgggcttcttgactgatttctccattactgatgatgtgcaaggccttcatagctttcttggaagattttccaccccaatcctgcatagcaaattccacaccaattccagccacccgcctgctacgtcttggagcattcgccttatagggctttgaagtcttctgatttgatgcaggtaatggaagaagggtttgtcaatagtcaaagtaaagtaaaactaaaagcgaccaggtctagaatcggaaccgtcgcctggtttgaaagctatgaagtagagtatgttcct

SEQ ID NO: 2450 - DNA, 1699 bp, Oryza sativa Japonica Group
actcaacctcttctcctccctatccattaattactcgcttcgtggtcggaatccatggccgccgccgtcgggaaccctaacgcggccgccgctgcgtcgatctcggcgtcgagggtcggtgcgggggcgttgcgcgcggggggcttgagggtggcggcggggaggaggggagcgggggctgtggtggcggcggcaatgcggccggcgaaggcggtggcgtcgccggcgaaggaggcggccggggaggtgaacggggcggcgtcgggggggttcgcgaggcccgacgcgttcgggaggttcgggaagttcgggggcaagtacgtgcccgagacgctgatgcatgcgctcaccgagctcgaggccgcgttccatgccctcgccggcgacgaagatttccagaaagaacttgatggtattctcaaggattacgtcggccgggagaccccgctgtactttgcggagcgattgactgagcactacaagcgcgctgatggcacaggccccatgatttacctcaagagggaggatcttaaccacactggcgcccacaagatcaacaatgctgtcgctcaagtcttgcttgccaagcggcttgggaaggaacgtatcatcgccgagactggcgccggccagcacggtgttgccactgccacggtgtgcgcgaggtttgggctgcagtgcatcatctacatgggtgctcaggatatggagaggcaggcacttaatgttttcaggatgaagcttcttggagcagaggtgagggcagtacattctgggacagcaactttgaaggatgccacctcggaggccatccgtgactgggtcaccaatgttgagaacactcactacattttgggatcagttgctggtccgcatccatacccgatgatggtgagagagttccataaggtgattggcaaggagacccgtagacaggccatggagaagtggggtggcaagcctgatgtcttggttgcttgtgttggtggtggatcaaacgccatgggtctcttccatgagttcgttgatgatcaagatataagaatgattggagtggaggctgctggctatggtgtagacactgacaaacatgctgccactttgacaaagggagaagtgggagttctccatggatcattgagctatgtgttgcaggatgatgatggacaagttattgaaccccactccattagtgctgggctggactaccctggtgttgggcctgagcatagctttttgaaggatattggacgtgctgaatatgacagcgtgacagatcaggaggcactggatgctttcaagcgcgtctctcggctggagggcatcatccctgctctggagacgtcccatgcgctcgcctacctggagaagctctgcccaacgctgcccgacggcgtgagggtggtggtgaactgcagtggaagaggagacaaggatgtccacacagccagcaagtaccttgatgtctgaaaaaactctagaggggctaaaaaatgatagcttttccatgagcagttttgaaagggtgcaatacaacagcagcaattgattagagctttgttatttggataaaaaagtaccaataatgcttggaagttcatattagctacaagagtatctttgtttgtttgtctttgtatctgaatgatgttattggcggagttggtaaatataactaaataaacaccaatctttctcc

SEQ ID NO: 2451 - DNA, 1854 bp, Arabidopsis thaliana
gccctattctcaccaacctcttctgactcttctctcattttctgttgttcacaaataagttaacgtggtaccgaactaccgatttcctccactattttattgaatttctggtcaaaaaacttaagtgttacataacgaatctataaaaagaaccctcactttcaaggtttttgtcagcaaaacatttgtcttcgtgtttgaaagctagataaaagattcactaaatggccaccgcaagcaccgctgctactttcagaccctcctccgtttcagcttcttccgaattaacccatctgagatcaccctccaaactccccaaatttacgcctctgccatcggctcgctcacggtcctcttcttcgttctccgtctcctgcaccatcgctaaggacccagctgttgtcatggcggactcggagaagattaaggccgctggatctgatccgactatgtggcaacgacctgattcattcggtcgtttcgggaagtttggcggcaagtacgtccccgaaactctaatgcacgccctctctgaactcgaaacggctttctattcgctcgccaccgacgaagatttccagagagaattagcagagatcttgaaagactacgttggtcgggaaagtcctctttactttgcagagaggctcacggagcattaccgccgtgaaaacggtgaagggccgctcatatacctcaaaagggaagacttgaaccacaccggtgctcacaagatcaacaacgctgtggctcaggctcttctcgccaagcgtctaggaaagaaacgaattattgctgagacaggggctggtcaacatggtgtagccacagctactgtgtgtgcacgtttcggtttgcagtgcattatctacatgggtgctcaagacatggagagacaagctcttaatgtgttcagaatgcgtcttctcggtgctgaggtaaggggagtccactctggaacagccactttaaaggacgcaacttctgaagctataagggattgggtgaccaatgtggagactacacattacatattgggatccgttgcgggtcctcatccttatcctatgatggtcagagactttcacgcggtgattggtaaagaaacaaggaaacaagcgatggagaaatggggcgggaagcctgatgttctggttgcttgtgtcggtggtggttcaaatgctatgggactcttccatgaatttgtcgatgacacagaggttcgaatgattggtgtggaagccgctggatttggattggacagcggcaaacatgctgccacattgacaaaaggagatgtcggtgtactccacggagctatgagttacttgctgcaagatgatgatggccaaatcattgaaccacactccatcagtgccggattggactaccctggagtcggacctgagcatagtttccttaaagacgtgggaagggctgaatactttagcgttactgatgaagaagcattagaagctttcaagagagtgtctcggttggagggaataatcccggcattggagacatcgcacgcattggcccatctggagaagctttgtccgacgttacctgatggagccagagtggtattaaacttcagtgggagaggcgacaaggatgttcagactgcaatcaagtatctcgaagtttaaagagtgtagattactttcattttcacacagtgctatttcttttatgtagtttgttagttctccttgcttatggtcgggaatccaaaagtttggatcaaagggttaagaagagaataagtgttatgaatgtatcatataaataaaaatgttctatggaacgtttgatgttcttataagcaattcgaactgttttgttcttgac

SEQ ID NO: 2452 - DNA, 678 bp, Sorghum bicolor
gcagcagccaaacctgctactgctacaagccaacaaaccaaggtccgcccctaacaagcagttcccaaagctacaacttgagcacacacataagcaaagccatggcaaaggcacaggcaatggccgcgctgatgctgaccgtcttggtggtcctggcggcgtctgccgagatggcgcacggcgtctgcaacctgtcgagcgccggcatccgggcgtgccagccggcggcagccatccgcaacccgacggagcagccgtcggccgagtgctgcgccgcgctggcgggggccgacctggcgtgcctgtgccggtacaagaacgccgccggcgtgtgggtgaggttctaccggatcgacatcaaccgcgccatggggctgccgggcaagtgcggcctcgccatgccagccaactgctgaggcatggtcaccgtgcgtcactggctcatccacaataatgcaatgcaactgctgatgccgcgcgcgcgtgctgcgtgcgtattctactgctatatatagctacgacatctatcgaataaatgaaggcgcacacaaagatatgtgtgtgtctcctgtgcttctcctgggtgcacgtactgcactatgttgagctgtgggtgagcttattgatcagtgcagaagtttgtatacattactattctcaaagatgtattacacagta

SEQ ID NO: 2453 - DNA, 662 bp, Zea mays
atcgcaactcaacacaagcagccaaacctgctagaagcctatacacggccaaggtccaccgttcccaaatctacgacttgagcaaaaaccacagctatagccatggcaaaggcaggggcaacggccgtgctggtgaccgtcctggtggtcctggcggcgtccgccgagatggcgcacggcgtctgcaacctgtcgagcgccggcatccgcgcgtgccagcccgcggcagccatccgcaacccgacagaccagccgtcgtctgagtgctgcgccgcgctggcgggggccgacctggcatgtctctgccggtacaagaacgccgccggcgtgtgggtgaggttctaccggatcgacatcaaccgcgccatggggctgccgggcaagtgcggccttgccatgccggccaactgctgatgtcacactgcaactgcatgcatgccgtgctgcgtgcgcagctaagtttacattacatgcgcgtcaaggcgtatgttctactgctatatagctacgacatctatgcaataaacgaaggcatgcactgatgcacacaatgatacgtgtctcttgtgcatgcagtgcaatatatgtcgatgaactatgggtgcgtacgtgagcttaagcttattaatcagtgaagaagtttatgtaaaaaaaaaaaaaaa

SEQ ID NO: 2454 - DNA, 1499 bp, Zea mays
cgttaacctctcgccgtgtggaagctggactgtgcggcccgcttttactcgtttccgtaaccgatcgtttcttcttaattcggccgtggccgccgccgcgtccaggacgatcgatgcctctccccgccgcgatgagatcatccatgctcagaggtcggtgtaacctcttcctccctttcgctgctcgctgttcgcaggccggaggaggaggcggcggcggatgctcccttctgctcccgcgccggtggcagtcgtcgctgccgcagctggaccacgtcgccgacaggtccaacgaggagagcggcggcgagatcgactgggacaacctcggcttcggcctcaccccgaccgactacatgtacgtcacgcggtgctcgccggaggaccgcggcgacttcccccgcggcgagctctgccgctacggcaacatcgagctcagcccctcctccggcgttctaaactacgcccagggcctgttcgagggaatgaaggcgtaccggcggccggaccgggccgggtacacgctgttccggccggaggagaacgcgcggcggatgcagcgcggcgccgagcgcatgtgcatgccggcgccgtcggtggagcagttcgtccacgccgtcaggcagacagtcctcgccaacaggcgctgggtgccgccgcaggggaagggagccctgtacctccggcctctgctcgtggggagcggcccgatccttgggctggctccggcccccgagtacaccttcctcatctacgccgcacccgttgggaactacttcaaggagggcctggcgcccatcaacctggtggtgcatgacgagttccaccgcgcgatgcccggcggcaccggcggggtcaagaccatcgccaactacgcgccggtgctgagggcgcagatggacgccaagagcaaggggttcacggacgtgctgtacctggactcggtccacaagcggtacctggaggaggtgtcgtcgtgcaacgtgttcgtcgtcaagggcggcgtggtcgccacgccggacacccggggcaccatcctgccgggcatcacgcgcaagagcgtcatcgagctcgccagggaccgcggatacaaggttgaggaacgcctggtttccatcgacgatctggtggccgcagacgaggtgttctgcaccgggaccgcggtggtggttgctcccgtgtcgacagtcacgtaccagggcgagaggtatgagttcagaacggggccggacacggtgtcgcaggagctgtacacgacgctgacatccattcagatgggcatggccgccgaggacagcaagggatggacagtagcagtagagtagattaataaggttggggaatgccatcgccacgacattggatcctacatcagtattgtcatccggtagaatgcatactcggttgatcagcatatgtagtgttgcagcaaattgaagaataaaccgtgtgtgttcgatggcgatcagtgacgaggccattgagcagccattgatttg

SEQ ID NO: 2455 - DNA, 4318 bp, Hordeum vulgare subsp. vulgare
ggatccttgcacgggtgtgtcccaaaccgccaagacgtattggcaaagaattgaagatcaatactttcaattcaaggccaagtatcccgataggacagcacgaacctttcggttactccaaggtcgttggaacgtgatcaagcatacttgtagccgttgggcggcttgcttggaacaagttcgcaatgctcctccaagtggaaccgtgaaatctgattatgtgagttggttcatgtgaaatggttccattagtttgcataatggaaaatgattccatcagtttgactttgtttttattgtgtaggaaaaaattgcccaacaacgatacaaagacatggaagcttccgaaggcaaaaaatttaaacttgagcattgttgggaattgctcaaaaactgcgacaagtgaaagttgcttgatagagaatccccgacgaagagaggttcatttacaaacatgaatgaagatgaagatgatgatggcccaagaaacttgaacaagctcgatggtgacaaaaaaacaaaggagaagatcaaaaggaaacacgaagcatcgaccttgcgggacaagatagatgccatgatgcaatcaaataaggtgttgctagcgaagtctttggaggcaaagatagagttggccgagaagaaggcacgagagaagcaagagaggtggaaattgctcaaggaagttgaggagagaaaagcacgtgccgctgaaaacaaaaccatgaccaaccttcttgccaaagagaataggatcatgacttgaaccgcaatgacatggacaaacatcatcaaagaatggcatgatatcacaacgagagaaatcttgaagaggaggatgcttgcgtgttacaatggcggcgatggtttctcgtctggaatcggaaccgatgatttcggtgccggagtacggacaagtgccggagtaggaacaagtggagccgatggattcgggggcggcgataacctcgatggtgcagactgaagagcgatcaggatgcatgaagtcctcttgcgtttgtcttttaaactatgctttcatttcacgcgtaaactatgttttattgtttaaatttgaactcatttgctggaatcgctatcaaattccaactatgttttattaaaaagtttttcggtttgcaggtcgacgcggtggcgtccaagcagaccccgcattgacgacccctataatagcatcttctatggatatcttttttacgagttcattttgggggtcaacccgtataatagcagaagccgcattgacgatccgtataataacatcttctgtaaaaatagagttgtccgcacccgtgccaacactaaataaaattacgaactgtaaatgatttttacgagtcggctttatatggtctgttaataatgttctcagtatggtagctcagcaggcgccacctcgccggacacgcggcagaggagtgcgagtgtgcgactgcgacttcctggttccctggaggtgccgtgccaggcgcggttgtactctttcactgcctcacggagcccactcagtgcatgggcctacagggtcaatcgccacggcagccatccatgtccgtcgatggttttgtttctatccaggaaaagcaagtttgctggtcctatagctttggcacaggctccccactccccagtagcagttcatagtctttctcaaatatctctgtcaaacattgccgaatccttccaggctgccaaatgcatgtgctaaattcgccctaaaaaccaatgcatgtgtttcataaaaagaaacaaaaatccaataaatgtggtcttctataagggtaggatacagctcggcgaatcgaacacttgccagactctccacgacctatatagaaacctcctcacgtacgcttaccatttgaactcgccagtgctgcgctctcgtccgaccacatagcgtctgcaaaccattcatttgctcgccgtgaaggatcgagttcttgaacagctttggcgatcgatctagggagcgcgggccgcccgggcgtgcgtgcatggctgtgctgtcttctgcgaagcgcgtcctcccgtgcgcctcggccggcggggtcagcggcggcctccgagctctactcgggacggtgcgtgtgcctgcgcgcttctctcgtgtgttacagttgagatccccatctatctacacaagcaccacaaaccatggccgccgggcctggcgtttttatttattcaccttgtttctgttgagaggagcatttctcccggccgtttgcgatcgatttatatatccgtgtccaagatgctctgccgtcctgcctccatgaggtcgatcggaactcacagcaggcgccttctctgtgtgcaggacggaggcggccgctctcttctcccgtcccggtggaagtcgtcgctgccgcagctggaccccgtcgacaggtgcgtgagtgacatgcaggttcattgttactttcctgtgattggttttgattcgtttgctgcagtccgatcgccaatggttttaagacattttgcgccgttcgtcacactcaacgcttgtgatgttttgccaccggggcatgcgtgtgcggttgggctgcaggtccgacgaggagagcggcggcgacatcgactgggacaacctcggcttcgggctcaccccgacggactacatgtacgtcatgcggtgctcgcgggaggagggcggcttctcccgcggcgagctcgcccgctacggcaacatcgagctcagcccctcctccggcgtcctcaactacggccaggggctgttcgaggggctgaaggcgtacaggcggtcggacggggccgggtacatgctgttccggccggaggagaacgcgcggcggatgcagcacggcgcgggccgcatgtgcatgccgtccccgtctgtcgagcagttcgtgcacgccgtcaagcagaccgtcctcgccaacaggcgctgggtacgtacgtggtggccattggtttactctttttttgacgtggccattggtttactctttcattcacgtgatgagtgcacgccatgctcatgagcttccatgaccgatcgatctctgcgctgcaaccacggtttcaggtgccgccgcaaggcaagggagcgctgtacatcaggccgctgctcatcgggagcggggcgatcctcgggctggcgccggcccccgagtacaccttcatgatctacgccgcgcctgtggggacatatttcaaggaaggcatggcggcgataaacctgctggtcgaggaggagatccaccgcgcgatgccgggcggcaccggcggggtcaagaccatctccaactacgcgccggtgaacatcctctctactcagtagccggtgatttcttcttcacgtcgtttctagaaaacgtgatgtatttttttttcccgtcaggtgctcaagccgcagatggacgcgaaaagcaaggggttcgcggacgtgctgtacctggacgcggtccacaagaggtacgtcgaggaggcctcctcctgcaacctcttcgtcgtcaagggcggcgccgtcgcgacgccggcgacgacggcagggaccatcctgccgggtgtcacgcgcaggagcatcatcgagctcgccagggatgacggctaccaggtcgatcaatgcaatccactccactccactactactgcccaccactcaactgtaccgtgacaacgaactcaagttgtggtatgtgcttgtcaagcaggtcgaagagcgcctcgtctccatcgacgatctcgtcggcgcagacgaagtgttctgcacgggaacggccgtcggcgtcaccccggtgtcgaccatcacctaccaagggacaaggtaaatcgaactcgtgcagatattcttcacgttgagctggctaatacaacaaagatgcttgttagattcagtgctgagatctgtactgattgttgtgcgtgcaggcacgagttcaggactggggaagacacgttgtcgaggaaattgtacacgactctcacatcgatccagatggggctggcagaggacaagaaaggatggacggtagcgattgattgattgattaggaaaagagcatgggcgcatgcagcgccagaagcatccagtattgttttagtattatctttgcaaatgtgaataattatcatggtgatcatatctcgcgctagaatttgaaagttacgtgccccggtcatcagcggcttcaaatttgggcacggaaagaaatcgatctgcttgacacttatttgccaatgcatcgtgttcaactgttcatgcatgacgacaacttggtggagacgtcacaactctaacattataatcacattagatgttgaattc

SEQ ID NO: 2456 - DNA, 1577 bp, Oryza sativa Japonica Group
aaacgactcgtgtatatctctcctcaccttggcgcgccaacggttggttacgaacgaggacgagctgagcctgagacgcgcgcttcccgttcgcacagccgcacaggtctcttgcatggctgctgctgctgctgctgcgtcgtccgcgaagcgcgcgctcctcccgtgggcacgcgacgcccaccacgcgctggccagggccctgcagggatgcggcggcggcggcggcctcggtctccgcggggcgctcccgacggccggaggcaggtggtctctgctccagtgccggtggaggtcgtcgctgccgcagctcgactccgccgacaggtccgatgaggaaagcggcggcgaaatcgactgggacaacctggggttcgggctgacgccgaccgactacatgtacgtcatgcggtgctcgctggaggacggcgtcttctcccgcggcgagctcagccgctacggcaacatcgagctcagcccctcctccggcgtcatcaactacggccaggggctcttcgagggtctgaaggcgtacagggcggcgaaccaacaggggtcgtacatgctgttccggccggaggagaacgcgcggcggatgcagcacggcgccgagcgcatgtgcatgccgtcgccgtcggtggagcagttcgtccacgccgtcaagcagaccgtcctcgccaaccgccgctgggtgccaccgcaaggaaagggggcgctgtacatcaggccgctgctcatcgggagcggaccgattctcgggctggctcccgccccggagtacacgttcctcatctacgccgcaccggttggaacgtacttcaaggagggtctagcgccgataaaccttgtcgtagaggactcgatacaccgggccatgccgggcggcaccggcggggtcaagacgatcaccaactacgcgccggtgctcaaggcgcagatggacgccaagagcagagggttcactgacgtgctgtacctcgacgcggtgcacaagacgtacctggaggaggcctcctcctgcaacctcttcatcgtcaaggacggcgtcgtcgccacgccggccaccgtgggaaccatcctgccggggatcacgcgcaagagcgtcatcgagctcgccagggaccgcggctatcaggttgaagaacggctcgtctccatcgacgatctggtcggcgcagacgaggtgttctgcaccggaacagcggtggtcgttgccccagtatcgagtgttacttaccatgggcaaaggtacgagttcaggactggacatgacacgttatcgcagacactgcacacgactctgacgtccatccagatgggcctggctgaggacaagaaaggatggacagtggcaatagattaaggatggattatgggcaaagggatcccgattattcctcatgtcatccaatgtagattattgtcgttttatatatcttcctgtagcgacagtgatcacagcgcaagtggaatttggacgaacaggaagcaaatgcagatcatcttactgcgtaatctctgtgtggccaataaaatcttgtcattgccaaatctttgagataactgaatagtacgct

SEQ ID NO: 2457 - DNA, 1740 bp, Zea mays
agacacatgggcgggtgcgtggtgcactggtgcttccatcgaactgtgctcgtttgattaatttgccctcctcttccttccctccagctaacccatcagccattggtaggtagcccgtgaacgaaggttgcaaccataactcttctcttcccacgagagagagagagagagagagagagagagagagagagagagagagagcttgaccgaaatccacataccgtgtatagctagtggtagcagtgcagccggccggggtctaaagaagggggaccgtacgtactgcatggccgcgttgacatctgcgaagggcgctctccttccgtcgtgggctcgcagcagcagcagcggccatggcggcgacttgtggagggtcctggggaaggcgttggctacggccggaggaggaggcggcggcggatgctcccttctgctcccgcgccggtggcagtcgtcgctgccgcagctggaccacgtcgccgacaggtccaacgaggagagcggcggcgagatcgactgggacaacctcggcttcggcctcaccccgaccgactacatgtacgtcacgcggtgctcgccggaggaccgcggcgacttcccccgcggcgagctctgccgctacggcaacatcgagctcagcccctcctccggcgttctaaactacgcccagggcctgttcgagggaatgaaggcgtaccggcggccggaccgggccgggtacacgctgttccggccggaggagaacgcgcggcggatgcagcgcggcgccgagcgcatgtgcatgccggcgccgtcggtggagcagttcgtccacgccgtcaggcagacagtcctcgccaacaggcgctgggtgccgccgcaggggaagggagccctgtacctccggcctctgctcgtggggagcggcccgatccttgggctggctccggcccccgagtacaccttcctcatctacgccgcacccgttgggaactacttcaaggagggcctggcgcccatcaacctggtggtgcatgacgagttccaccgcgcgatgcccggcggcaccggcggggtcaagaccatcgccaactacgcgccggtgctgagggcgcagatggacgccaagagcaaggggttcacggacgtgctgtacctggactcggtccacaagcggtacctggaggaggtgtcgtcgtgcaacgtgttcgtcgtcaagggcggcgtggtcgccacgccggacacccggggcaccatcctgccgggcatcacgcgcaagagcgtcatcgagctcgccagggaccgcggatacaaggttgaggaacgcctggtttccatcgacgatctggtggccgcagacgaggtgttctgcaccgggaccgcggtggtggttgctcccgtgtcgacagtcacgtaccagggcgagaggtatgagttcagaacggggccggacacggtgtcgcaggagctgtacacgacgctgacatccattcagatgggcatggccgccgaggacagcaagggatggacagtagcagtagagtagattaataaggttggggaatgccatcgccacgacattggatcctacatcagtattgtcatccggtagaatgcatactcggttgatcagcatatgtagtgttgcagcaaattgaagaataaaccgtgtgtgttcgatggcgatcagtgacgaggccattgagcagccattgatttgatctcaaaaaaaaaaaaaaaaaaaaaaaaaaaaaaaaaaaa

SEQ ID NO: 2458 - DNA, 1945 bp, Sorghum bicolor
gcgaggaactatatatagcatattattacgaatacaagcaagacgctccacccacatgacatggtagccgcacgcctgggtttcagtgagtgatttgggtggggcaaaacaaaaaaggacctccgatcaacaagcgccttacgcaccggcggacatggtggtggccgtggccttgcagctggcggcgctcctggcgctgctgctcgcgctgtggcgtctggcgtggcggccgcacgccgtggcgcggtcgttcgcgaggcagggcgtcggtggcccgccctacacgttcctggcagggtccttgccggaggcgaagcggctgctgatggccggccggagaggcgtgccgcccctcgacgccgcctgccacgacatcatgcccgtcctcctgccgcagttccacagatgggtcgcagactatgggagaacgtttctgttctggatcgggccgattcccgctctcttgtctacggatctacagctgattaagcaagtgctgacagacaggacgggcctgtatcagaaggacttcatgatccccgtgctcaagttcctcttcggcaacggtgtcatactgataaacggagacgattggaagcggcaccgtaaagtggttcttcctgcgttcaaccatgagacgatcaagagcatgtcggcggtgacggcagaggtaacgaagcagatgatgcggcaatggcgggagcagattattattcagggaagcggcgacaaggaatcggccgagatagacatgatccacgccttcaacgacctgaccgcaaaggtcaacggccgcgtcgccttcggcacgagccaccgggatgtcgaggaggtcatcgtcttgatgcgggagatgcagaagctcgccactgccgccacgctggatgctccaatactctggtatctgccaactcggcggaacctgcaagtccgacgtctgaacaaacagctgagaagcaagatcatatccatcatgcaggcgcggctggccgccgacggagctaagaagtgtggtgggcgcggcggcgccggcgggggcgacctactcgggctgttgctagaggcgtggacgccgcagcagcagcagcagcatggcaacaacggcgagacgctgacaaccgacgaggtgatcgacgagtgcaagaccttcttcgccgcggggcaggaaaccacggccacgctcctgacctgggccatgttcctgctcgccgtgcacccggagtggcagcacaaagtcagggaggaggtcgtccgggaattctcctgcaccagcgacggcgacggcgacgaggtcccccacgccgatgttctcgccaagctcaagctgctatacatggtgttgctggagacatcgcgcctgtaccctcccatcgtgtacatacagcggagggctgcatcggacgccgtccttggaggcatcaaggtgccccagggcacggtcatctcgatccccatcgccatgctgcaccgggacaagcaggtctggggcctcgacgccgacgagttcaaccccatgaggttcgagcatggcctcacaaaggccgccaaggatcccaaggcgctgctggctttctccctggggccgagagtgtgcactggccagagcttcggcatcgtggaagtacaggttgtcatggcgatgatcctcaggaggttctccttctccctctccccagagtatgttcacaagcccaagtatctcctgtccttgacacccaagcttgggatgcctctcatcgtcaggattgtggacggctgagaaagattgtaaaagctcgttcttgtgtgtgaaaatcaaaatatatatgatgactagtgtgtgtgataaatggtagtacgttacaattcattctgctctggagtagtaactatatggcacatatacaaggacgggcattaattaataattctaaagtaatgcaaaacaaactgcagacttatgttt

SEQ ID NO: 2459 - DNA, 1755 bp, Zea mays
gcatcggcggacatggtggtggccgtgcagctggccgctcttctcgcgctgctgctcgcgctgtggcgcctggtgtggcggccgcacgccgtggcgcggtcgttcgccaggcagggcatccggggcccgccctacacgttcctggcagggtccttgccggaggcgaagcggctgctgatggctggccggagagggacggcgcccctggacgccggctgccacgacatcatgcccgtactcctgccgcagtttctcagatgggtcgcggactatgggagaacgttgctgttctggatcgggccgattcccgctgtcttgtctactgatctacagctgattaagcaggttctgacagacaggacgggcctgtatcagaaggacttcatgatccccgtgctcaagttcctcttcggcaacggtgtcatattgataaacggagacgattggaagcggcaccgcaaagtggtcctccctgcgttcaaccatgagacgatcaagagcatgtcggcggtgacggcagaggtaacggagcagatgatgcagcaatggcgcggccagatacacggaagcgaagaggaatccgccgagatagacatgatccacgccttcaacgacctgacctccaaggtcaacggccgcgtcgccttcggcaccagccaccgggaagtcgaggaggtcatcgtactgatgcgggagatgcagaagctcgccactgcggccacgctcgatgctccaatactctggtatctgccaactcggcgtaacctgcacgtccggcgtctgaacaaacagctgagaagcaagatcatgtccatcatgcaggcgcggctggccgccgacggagctgataggcgtggtgggcgcggcggcgccgtttccggcggaggcgacctacttgggctgttgctagaggcgtggacgccgcagccgcagcagcacgggaacggcggcgagacgctgacaaccgacgaggtgatcgacgagtgcaagaccttcttcgccgcggggcaggaaaccacagctaccctcctggtctgggccatgttcctgctcgccgtgcacccggaatggcaggacaaagtcagggaggaggtcgtcagggaattctgcaccggcgacgacggcgaggttccccatgccgatgtcctcgccaagctcaagctgctatacatggtgttgctggagacgtcgcgcctctacccgccgatcgtgtacatacagcggagggctgcctgggacgccgtccttggaggcatcaaggtgccccagggcaccgtcatctccatccccattgccatgctgcaccgggacaagcaggtctggggccccgacgccgatgagttcaacccgatgaggttcgagcatggcctcacaaaggccgccaaggatcccaaggcgctgctgtctttctccctgggcccaagagtgtgcactggccagagcttcggcatcgtagaagtgcaggtcgtcatggcgatgatcctcaggaggttctccttctccctctccccaaagtatgttcacaagcccaagtatctcctgtccttgacacccaagcttgggatgcctctcatcgtcaggaatgtggatggctgagagagataatattgtaagagctcgttttgtgtgtgaaaatgaatacatgactagtgtgtgataaatggtactctctttgttttaaagtataaattgtttcaatttttctatgtatattgctttaacgactatacatttagacgaaaaaaaaaaaaaaaa

SEQ ID NO: 2460 - DNA, 1810 bp, Hordeum vulgare subsp. vulgare
gggctttcttggactgccgtttcgtccatgattacgccagcagaccaactcatcagctcgaccatcttctcttgataaaggcattgcaccggcaccgatgctcccaaccgcgcgcatgctagccggccgcacggcagggtttcagtaagaggccttaccagtctctcggcggcatggcggccctgcagctggccgctctccttgcgctgctgctcgcgctgtggcatctcgtgtggcggccgcgcgccgtggcgcggtcgttcgcgaggcagggggtccgagggccgccctacacgttcctcgccgggtccttgccggaggcgaagcggctgataatggctggccggagaggcgtgccgcccctggacgccgggtgccacgacatcatgcccatcctgctgccgcagttccatagatgggtcgccgattatgggaaaacatttctgttctgggtcgggccgattcccgcggtcttctctaccgatctgcagctgataaagcaagtgctcacagacaggacgggcctgtatcagaaggacttcatgatccccgtgctcaaatccctcttcggcaatggcgtcatattgataaacggcgatgattggaagcggcaccggaaagtagtccttcctgctttcaaccatgagaagattaagagcatgtcggcggtgacggcagaggtcacaaggcagatggtgcatcaatggcgcgagcagatacaccaaagcaacatcgacaagaaaggagttgagatagacatgatccacgccttcaacgacctgaccgcaaagataaacggtcgtgtcgcctttggcacaagccaccgggacgtcgaggaggtcatcgtcttgatgcgggagatgcaaaagatcgccactgcctccacgctggatgctccaatactctggtatcttccgactcggcgtaacttgcacgttcgacgtctgaacaaacagctcagaagcaagatcatgtcgataatgcaggcacggctggccgcagatggagccaaatatggtcgaggggacaccatgggctgcggagatggcctgctcgggctgctgttagaggcatggacgccgcacgggcaagggagcggcggcgatacactgacgaccgacgaggtgattgatgaatgcaagaccttcttcgccgcagggcaggaaaccacggccaccctcctcgtctggaccatgttcctgcttgccgtgcatccccagtggcaggacaaggtcagggaagaggtcctcagggagttccccggcggggacgatgacgatgtgatgcccaacgccgatattctcaccaaactgaagttgctaaacatggtattgcttgagacatcgcgtctgtaccctccaatcgtgtacatacaacggagggccgcctcggacagcgtcctcggaggcatcaaggtaccgcagggaacaatcatatcaatccccatcggcatgctgcatcgggacaaggaagtatggggccccgacgccgacgagttcaaccccataaggttcgagcacggcgtcacgaaggctgccaaagactccaaggcgctcttgtctttctctctaggaccgagagtatgcactggccagaactttggcatcgtgcaagtgcaagttgtcatggcgatgatcctcagcaagttctccatctccctctccccggagtatgttcacaagccaaagtatcttctgtctttgacacccaggcttgggatgcctatcattttgaggaatctactatagatgggtgagaaagatggaaaacttatgttcattttggtttatgagagtaaagtcattataat

SEQ ID NO: 2461 - DNA, 1674 bp, Zea mays
ccctttccctttctggccgcattccctcgtcctccggcagccgtcgccagcttccgatggtccggaaggagacggccatgaggctgcccccgcagcaccagggcctggaggtcaagatccccagcttcttccgctgccccatctcgctggacgtcatgcgctcgcccgttagcctctgcaccggcgtcacctacgaccgcgcctccatccagcagtggctcgactccggcaacaccacgtgcccggccaccatgctcccgctcccctccaccgacctcgtccccaacctcactctccgcagcctcatcgcccactgggccgcctccgccgcctcctgttcccccaccgccgccggcggcgccgkagtcgccgactcctcttcggcacgtacttcttctcccgcgagcctcgtccgccaggtggcttcgtccggcgtggacccctcgccggccctccgcgagctggcagcctatctctccgacgacgacgtcgacgacttcgaaaagaacgcgcttgtgggcgccggccgcgccgccgagaccgtcgcgtcagttcttcggagaagagccgaggaaaccggcgtcgaaggcgtggaggcggccacgagagtgctagccttgatcttggcctcggacggcatcgacgactcgaacaagaagcgggtggccactggcctcgccgcggacgcggcggcctcgaccgcgtcgctggcgcgcgtgatgcgcggcgggagcgacctggaggcgaggatcgacgcggccaagctggcggagctgttgctcgccaatgcggccggcgaggcgaaggcggcggcgaccaaatcgtccgagttgctggccgagctggtacgcctcgtgggcaccgtcgacgagacgggcgccctggacaggaacgccgtggacgccggcctctcctgcctggccgccatctgcgggtcgtgccgtgccgcgcgtggcgagatggtgcgccttggcgcggtcccggccgctgtgcgcgctctgcgcgcctcgacggagtccggcgcgtccgcgaaggcgctccgggtcctcgagtccgccgtgggctgcgccgagggccgtgccgcgctgtgcgccaacgcggaggacgccatccctgcggtggtgggcaagatgatgaaggctgggcgcgacggcgcggaggccgccgtggccgtgctctgggcggtctgccaccggtaccaggaccgccgggcggcggacgcggctgcggcggccgagggcgggctgacgaggctgctcctcctgatgcagagcgggtgctcgccggcggcgagacagatggcgctggagctgctgaagatatacagggtgaacgccaagagctgtctcgccggctacgactccaagaccacccacatcatgccgttctgaggaaccgaagcggacgagagtggtttgccgcgatcctgggtggctgttttgacatgatgaaatggattcaattcagtgaatcaattaaatcgcatggaacaggggaatgtgttcttgttcctgtgatgtttattgatttccactcccccctcctcttttctttggatgtaagtcggtagagaaacaaacaagaattagttcacgaggtgagatgaagaataatctgtacagacatgatcagaacaggcatagtggacaatttaaccgaaaaaaaaaaaaaaaa

SEQ ID NO: 2462 - DNA, 1618 bp, Hordeum vulgare subsp. vulgare
ggctctccctcctctctccccctttgctgccgcttccacgcacgcacctcacctccccgcaagaacggagcagagcaggtagccatagccatggtgaggaaggacaagaccaccaccggcatgaggctcccgccccagcaccaggggctggaggtcaagatccccagcttcttccgctgcccgatctccctcgacgtcatgcgctcgccggtcagcctctgcaccggcgtcacatacgaccgcgcctccatacagaggtggctcgactccggcaacaccacctgcccggccaccatgctcccactcccctccacggacctcacgcccaacctcaccctccgcagcctcatctcccactggtccgcctccgccgcctcctgctcgcccgtcgccggatccgccgccttcttcgccggcccttcccccgccgcactcgtccgccaggtcgcctcctccggcgccgacccctccgccgcgctccgcgagctggccgcctacctctccgacgacgacgtcgacgagttcgagaagaacgcgctcgtgggcgcaggctccgccgcggagaccgtcgcggccgtgcttagacggaagggtgagcagataagcgtcgcgggcgtggaggcggccgtccgggttctcgccgcgatcgtggcgctggatggcatcgaggacgcgaacaagaggcgggtggccgccggcctcgccgtcgacgcgtcggcctcgacggcgtcgctggcccgcgtcctgcggggcgggagcggcttggaggccagaattgacgcggcgaggctcgccgagttcttgctcgccaatgccggcgccgacgcaaaggtggctgtggcggaatcgtccgagctggtgacggagctggtacgactggtcgggcccgtcgacgagaagggcggccttgataagaaggccatggacaccggcctcagctgccttgcggccatcgcagggtcgcggcggtcggcgcgcgccgacatggtgcgcctcggcgctgtcccggccgccgcgcgcgcgctccacgccacgacggagcctagctcgtcagccaaagccctccggatcctcgagtccgccgtcggctgcgccgagggtcgggcggcgctgtgcaaggacgcggagcagacagttcctgccgtgctcgacaagatgatgaagtccgggcgcgatggcgccgaggccgcggtggccgtgctctgggcggtgtgccacaagtacaaggaccgcagggccgcggacgccgcggcggcgtccgagggcgggctgacgaggctgatcctgctgctgcagagcgggtgctcggcggcggcgaggcagatggcgctggagctgctcaagatttacaaggtgaacgccaagagctgcctcgccggctacgactccaagaccacccacatcatgccgttctgaccaagctaaacgaatggcttgcaagctcggaacaggggataattccttttttcttttctttcctttcatgtttattttgttttttaaatgtaagttttgatagggaaacagaagaattgattggtcgagagagaagaaggaaaataatatgtacagtacattggtagagagttttgacacaagcaaatgaagattgttaacc

SEQ ID NO: 2463 - DNA, 1830 bp, Sorghum bicolor
ggccgcattccctcgtcctccggccggcagccgtcgtcgccagcaggagcttccgatggtccggaaggagacggccatgaggctgcccccgcagcaccaggcgctggaggtcaagatccccagcttcttccgctgcccgatctcgctcgacgtcatgcgctcgcccgtcagcctctgcaccggcgtcacctacgaccgggcctccatccagcggtggctcgactccggcaacaccacgtgcccggccaccatgctcccgctccgctccaccgacctcgtccccaacctcaccctccgcagcctcatcgcgcactgggccgcctccgccgcctcctgctcccccaccgccaccgacaattcttcggcgacacggacctcttcccccgcgagcctcgtccggcaggtggcttccgccggcgtcgacccgtccccggccctccgcgagctggccgcctatctctccgacgacgacgtcgacgacttcgaaaagaacgcgctcttgggcgccggccgcgccgccgagaccgtcgcgtcggttctccggagaagacccgaggaaaccggcgtcgagggcgtggaggcggcaaccagagtgctggccaagatcttggcctcggacggcatcgacgacgcgaacaagaagcgggtggccaccggcctcaccgccgacgcggcggcctcggccgcgtcgctagcgcgcgtgatgcgccgcggtagcggcggcctggaggcgagggtcgacgcggcgaggctggcggagctgctgctcgccaatgccgcagacgaggcggcgaaggcggcggtggccgagtcgtccgagctgctggccgagctggtacggctcgtgggcaccgtcgacgagaagggcgccctggagaggaacgccgtggacgccggcctctcctgccttgccgcagccatctgcgtctgcggcggttcgcgccgcgcctgggcgcgcggcgagatggtgcgcctgggcgcggtccaggccgcggtgcgcgccctgcgcgccgccacgacggagcccggcgcgtccgcgaaggcgctccgcgtgctcgagtccgccgtgggctgcgccgagggccgcgccgcgctgcccgccgtggccgtgctctgggcggtctgccaccggtaccgggaccgccgcgcggcggacgcggccgcggcggcggagggcgggctgacgaggctgctcctgctgatgcagagcgggtgctcgccggcggcgaggcagatggcgctggagctgctcaagatttatagggtgaacgccaagagctgcctcgccggctacgactccaagaccacccacatcatgcccttctgaggaagcgaagcggacgagaatggcttgccggaatccttcctgggctagctgatcaaatggattcgatgaatcgattaaattgcaggcgatggtgttcttgttcctgtgatgtttcttgatatttttttccattttcttttgatgtaagtcgatagagaaacaaagaacaattggttcatggtggaggggagaagaataataatctgtacagttcatgggtagagtttttgacatgatcagaacaggcacaggggacaacttaaccaaagaattgattttttaggccaaagcaattggaagcgtttgattattcctcctgaaagatttgcgaattttcagagaaatgatgatcgacaggagatgtggaatgataaggttgttactggaagcaataatgcttgttgctgctcacatcaaaacttacgaagaagctgaacgacgacgatcacatcaaatgatttcatttcgaatcattggtctgcacttgtggtaatgcgtacgta

SEQ ID NO: 2464 - DNA, 1652 bp, Oryza sativa Japonica Group
acttccatttccaagaatcgaacggaggcgtctcgctatcgccatcgccatcgccatgggcaggaaggaatcgtcgacgacgacgacgacgacggcggcggcggcggcggcggcgacgaggagcatgaggctgccgccgcagcaccaggcgctggaggtgaagatcccgagcttcttccggtgccccatctccctcgacgtgatgcgctccccggtcagcctctgcaccggcgtcacctacgaccgcgcctccatccagcgatggctcgactccggcaacaccacctgccccgccaccatgctccccctcccttccaccgacctcgtccccaacctcaccctccgcagcctcatctcccactggtcctcctcctcccccgccacctccggcgatgcctctgtcacttcttcccccgcgggccttgtccgccaggtcgcgtcgcccgacgccgacccttccgcggcgctgcgccagctcgcggcgtacctctcggacgacgacgtcgacgagttcgagaagaacgcgctggtgggcgccggtggcgccgccgaggccgtggcctcggtgctccggaggaagggcgagcgggaggtcggcgtggaagggtgcgaggcggcggtgcgggtgctcgccgcggtcgtcgcgatggatggagtcgaggacgcgaacaagaggcgggtcgccgccgggctcgccgcggacgccgcggcgtcggcggcgtccctggcgcgcgtgatgcgcggagcgagcgggctggaggcgagggtcgacgcggcgaggctggtggagttcctgctcgccaatgccgccgacgaggcgagggaggcggtggccgagtcggccgagctcgtcgccgagctggtgcggctcgtcggccccgccgacgagaaggggagcctcgacgcgagggccgtcggcgcgggcctctcctgcctcgccaccatctcccggtcgcgccgcgccgcgcgcgccgagatggtccgcgccggcaccgtccgcgccgcggcgcgcgcgctgcgcgccacggcggcggacccggccgcgtccgccagggcgctccgggtcctcgagtccgccgtcggctgcgccgagggccgcgccgcgctctgcgaggacgccgagcaggccgtacccgcggtggtgggcaggatgatgaaggccggccgcgacggcgccgaggccgcggaggccgtgctatgggcggtctgccacaagtacagggaccggcgcgacgccgacgccgcggaggcgtcggagggcggcctgactcgcctcctcctgctgctgcagagcgggtgctcgccggcggcgaggcagatggcgctcgagctgctcaagatttacaaggtgaacgccaagagctgcctcgccggctacgactccaagaccacccacatcatgccgttctgaactgaaaaatcgaagcttttggtcagggccatcatggaacaggagatcaaccttcgtgttccgttcttttctttcttttcttcttttgttcttttctaaatgtaatttgatgatagagaaaacaggaggagatcgaattgatttgtggagggaagaagaaaaaaataatctgtacatgtgtagcgagagttttgataggaaaagaaaaatcaatgggaaattaaccgatgagttgttgatt

SEQ ID NO: 2465 - DNA, 1518 bp, Oryza sativa Japonica Group
atggacccctcatcctcctcctcctcctcctctcccttttctactccattccattccatctcctccacttccaccctcaggcctcagctcgccatcgccattgttgcaacaccaagtgtttgtggtcggaacgagatcgagcagcagccatccatggtgaggaaggagatgggcggcggcggcggcaggctcgcggcggagtaccagggcctggaggtgaaggtacccacgttcttccggtgccccatctccctcgacgtcatgcgctcgccggtgagcctctgcaccggcgtcacctacgaccgcgcctccatccagcgctggatcgactccggcaacaccacctgccccgccaccatgctcccgctcccctccaccgacctcgtccccaacctcaccctccgccgcctcatcgcgctctgggcctccacggccgcgccgtcgtcgccggcggcgccatcggctgttggccccaccccggctgctgcggcggcggagctcctccgccgggtcgcggcgcccggggtggacccgtgcccggcgctgcgcaagctcgcggcgttcctgtctgacgacgacgtcgacgagttcgacaagaacgcgctcgcgagggccggtggcgcggcggagaccgtggcgtcggtgctcaggaggagggggaagggtgatgatgatgatggcggcgtggaagccgtcgaggcggccgtccgggtgctcgcggtgctcgccacgtcggactgcatcgaggaggagaacaggaggcgcgtcgccgccgcgctcgccgcggggggcgccgcgccgtcggtggcggcgtcgctggcgcgcgtgatgcggagcgggagcgggctcgaggcccgcgtcgacgcggcgaggctggtggagtcgctgctccgggacggcgcgcgcggcgccaccgcgccgggggtgagggcggcggtcgccgagtcggaggagctggtcgcggagctgatccggctcgtcggccccacggacgagaagggcagcctcgacgcgcaggccgtggacgccggcctctcctgcctcgccgccatcgtcgccgcgacgcggcgcgcgcgcgccgagatggtccgtctcggcgccgtcccggccgccgtgcgcgtcctggccacggaccaccacggcgggtcgcacgcccaggcgctgcgcgtgctggaggccgccgtggggtgcgcggaggggcgcgcggcggtgtgcgaggtggcggaggcggcgatcccggcggtggtgtcgaggatgatgaggtgcggcgggatgggcggcgcggaggcggcggtgtcggtgctgtgggcggtgtgccaccggtacagggaccggcgcgcggtggaggcggcggcggcgtcggagggcgggctgacgaagctcctcctgctgatgcagagcgggtgctcgccggcggcgaggcagatggcgtcggagctcctcaagatgttcaaggtgaacgccaagagctgcctcgccggctacgactccaagaccacccacatcatgcctttctaa

SEQ ID NO: 2466 - DNA, 1351 bp, Zea mays; identical to SEQ ID NO: 920

SEQ ID NO: 2467 - DNA, 1882 bp, Zea mays
ctcccggccgtccatcgctcgcctcccctccctccctccccgccgctgtctccggcgacagccagcctcatcgtccatggcctctacatgcctagcccccgcctccctctccacgcccctgctctccgactccatcgcgcgcgcgcccgccgccaacgggcacgccaccaaccaccgacaccaccaccacgacgacagcgacggtgctgcggcggtctccgtttgcgacgacggcggcggggacccgttcgcgttcctctcggaggaccggccgccgagggaccgagggccgtccccggccgacccgttccgcaacggcacgccggcgtggggcggcggcgtgtacgcgtggtcgaggacgctgctgctcctgccggtcgcgttggtgcggctggcactgttcgggctctccatcgcgatcggctacgcggccacgtgggtggctctccgcgggtgggcggacacgcacgggaggccgcgggtgggcggcgggcctatgccggcgtggcgccgccggctcatgtggatcacgcggatctcagctcgctgcatcctcttctctttcgggtaccattggatcagaaagaaaggaaggcccgctcgtagggagctcgcacctattgttgtttccaatcatatctcgtacatagaacccatattcttcttctatgaattgttcccaaccattgtttcgtcagagtctcatgatgccctaccatttgttggaacaattattcgagcgatgcaggttatatatgttgacagattctcaccagcttctcggaaggctgctgtaaatgaaataaagagaaaggcagcttgcaatagcttcccgcgggtcctgttattccctgaaggtaccacaacaaatgggagattcctgatttcgttccaacatggtgcattcatacctggctaccctgttcaacctgttgttgtccgttatccacatgtgcactttgatcaatcatgggggaatatatcgttattaaagctcatgtttaagatgttcacccaatttcataatttcatggaggtagagtaccttcctgttgtctaccctcctgagatcaagcaagagaatgcccttcattttgcggaggataccagctatgctatggcacgtgccctcaatgtcttgccaacttcctattcatatggtgattctatgattatggcacgggcaatagaagctggaaaggtgaatggctcaaattacatggtagaaatggcttgggtaaaagatatttatggtgtgagcacagcagaagcaatggacctattggaacatttcctggcaatgaatccagataacgatggacgtgtgaaagcacaagatttttgggctcattttggtctggattgcagtcctctgtgtaagaagatatttcactactttgatttaggcattaaggaatcgattacgttccgtcagttcttggttgggtgcgcgcacctgaggaagcaaccgttgttccagggtgcctgtgagaccgcctttgagaagtgccgggatcctgaaacatctgagatctccagggcacagctagccgatgtcctgcggttaagcatgctgctgccgtctggtgatagaatgctggacctgttcaagacgtttgacatagatggcgacgaaaagatcagcaaggacgacttcatgacgtgtcttgggaggttcccgttcctgattgcgttctttgcagccccgatcaatggggaagtgtacatcgagatagtctgaaggcaaggcgatgccgtgtaagagtaaccaggcgcaggtagggccggggatccctccgtttatgcaatgggatacccacctgtatttgggttgcatcgagtggctgaccaatatagtgcgtcaattttgtttcgttgcttc

SEQ ID NO: 2468 - DNA, 2058 bp, Sorghum bicolor
atggcctctacaagccctacccccgcctccctctccacgcccttgctctccgactccatcgcgcccgccgccaacgggcacgccacaaaccaccgacactcccaccaccacgacgacagcgacggcgcggcggcggcggcctccgtgtgctgcgacgacggtggagacccgttcgcgttcctcgcggaggaccggccgccgcgggaccggggggcgccgtcccccgccgacccgttccgcaacggcacgccggcgtggggcggcggcgcgtacgcgtgggcgaggacgctgctgctccttcccgttgcggcggtccggctggtcctgtttgggctcgccatcgcgatcgggtacgcggccacgtgggtggctctccgcggctgggccaacacgcacggcaggccccgggagggcggcgggcctatgccggcgtggcgccgccggctcatgtggatcacgcggatctccgcccgctgcatcctcttctcattcgggtaccactggatcagaaagaaaggaaggcccgctcctagggaactcgcacctattgttgtttccaatcatatctcgtacatagaacccatattcttcttctatgaattgttcccaaccattgtttcgtccgagtctcatgatgccctaccatttgttggaacaattattcgagcgatgcaggttatatatgttgatagattctcaccagcttctcggaaggctgctgtaaatgaaataaagagaaaggcagcttgcaatagcttcccgcgggtcctgttattccctgaaggcaccacaacaaatgggagattcctgatttcgttccaacatggcgcattcatacctggctaccctgttcaaccagttgttgttcgttatccacatgtgcactttgatcaatcatgggggaatatatcattattaaagctcatgtttaagatgttcacccagtttcataatttcatggaggtagagtaccttcctgttgtctaccctcctgagatcaagcaagagaatgcccttcattttgcggaggataccagctatgctatggctcgcgccctcaatgtcttgccgacttcctattcatatggtgattctatgattatggcacgagcagtagaagctggaaaggtgaactgctcaaattacatggtagaaatggcttgggttaaagatatttatggtgtaagcacagcagaagcaatggaactattggaacatttcctggctatgaatccagataatgatggacgtgtgaaagcagaagatttttgggctcattttggcctggattgcagtcctctatgcaagaagatatttcactactttgatctaggcatcaaggaatcgattacgttccgtcagttcttggttgggtgcgcgcacctgaggaagcagccattgttccagggttcctgcgagaccgcctttgagaagtgccgggatcctgaaacatctgagatctccagggcacagctagctgatatcctgcggtcaagcatgctgctgccgtctgatgataagatggtggagctgttcaagacgttcgacatagatggtgacgaaaagataagcagggacgacttcatgacgtgtcttgggaggttcccgtttctgattgcgttctttgcagcccggatcaatggggaagtgtacatcgagatagtctgaatgcctgagtcaaggcgatgccgtgtaagagtaaaggctggagcagccagtgccaggcgcaggcaggggatccctccgtttatgcaaggggatacccaccggggctcctccactttgaaacaaaaccacccttagcgttgggttgcatcaagtggctgaccagtatagtgcgtcgattttgtttagttgcttcgttcaaattattatattgtcattacggaaatctgttgtgagatacgcggtggactagtagattgttgatggaactgaaaaatgcacatagaaagcatttgcaatctgaactgtaagaacatttttggacaaacaatgactctgtaaccttaagttgttcattcttgttagctgtagcactaaggcgagttgaacgtt

SEQ ID NO: 2469 - DNA, 2050 bp, Hordeum vulgare subsp. vulgare
gacgaccacaaaaacgatcgtcgtctcctcctccctccgctcgctatttgcttttcatataagccataactcgcctcctccattgctccttttttccagcctcccgcttcctccagccgtcgctgtccccaccgccccgccgccccatccatggcctctcgaaatcatggccctaccccggcctcctccctggccacgcccctcctctccgactccatcacgcccaccacccccacccgcgccgccaacggccacgcgcggggccacgacggccacgacgacccctgcgctgccgcctcggtgtgcgacggcggtggagacccgttcgcgttcctctcggaggaccgccggccgccgcggccgccgggcccgtcccccgccgacccgttccgcaacaggacgccggcgctgggcggcctgtacggatgggtcaggacgctgctgctcgcgccggtcgcggtggtgcggctcgtgctcttcgggctgtccatcgcgatcgggtacgccgccacgtgggtggcgctgcgcggctggaccgactcgcgggagcgcccgcgggagggcgccggccccatgccggcctggcgccgccgcctcatgtgggtcacccggctctccgcgcgctgcatcctcttctccttcgggtatcactggatcacaagaaaaggaaggcctgcgcctagagagcttgctcctattgtcgtttccaatcatgtatcatacatagaccccatatacttcttctatgaattgttcccaaccattgtttcatcggattcccatgatgccataccatttgttgggacaatcataagagcaatgcaggttatatacgttgatagattctcgccagcttcaaggaagtcagctgtgaatgaaataaagagaaaggcagctggcaatagctttccgcgtgtcctgttgttccccgaaggcacaacaacaaatgggagattcctgatttcattccaacatggagcattcatacctggctaccccgttcaaccagttgttgttcgttacccccatgtgcactttgaccaatcctggggaaacatatcactagtagcactcatgttcaagatgttcacccagtttcataacttcatggaggtagagtacctccctattgtctacccccctgagatcaagcaagagaatgcccttcattttgcagagaataccagctttgctatggcacacgcccttaatgttttaccgacatcttactcatatgctgattcaatgattgcatcaagagcagaagaagctggaaaggccaattgctcaagttatatggtggaaatggcttgggtaaaagaagtgtatggtgtaagcacagcagaagcaatggaactcttggagcactttttggctatgaatccagacagcgatggacgtgttaaagcacaagatttttgggctctttttggcctagattgcagtcctctatgcaagaagatatttcactacttcgattttgaaaataaggaatccatcacattccgacagttcttggtcgggtgtgcgcacctcaagaagcagccattatttgagggagtgtgcgaaactgccttcgagaaatgcaaggcccccgggacctctgacatatccctcgcacagctagccaatgccctgcggtcgggcatggttcctccagcagacgacgggatgttgaaactgttcgagatgtttgacattgacgacgacgacaaaataagcaaggacgacttcgtgggatgccttgcgaggttccctttcatgatcgccctcttcgccggccggatcaacggggaagtttacatcgagatagtttgatggttgatggagttgtaacccctcagtttattggttgctggagttgttacccctcctttatttaggggtggtcaaagtccagcttatacccccgccgctttgcgcatctcagactggctaaccagtacagcgcggcaattttgtttcatttgttcttggaggggatatgtgtagataggaatgttgtgacacaatggattctgcatatggttgttgaactggatgtgcacat

SEQ ID NO: 2470 - DNA, 1921 bp, Oryza sativa Japonica Group
tggcctcccgcctccgcctcctctcgcctcgcctccgccacccatggcttctcgaaaccctagccccgcctccctctccacgccgctcctctccgactccatctcgcccacgcccaccaccaacggccacgcggggcaccataaccacgacgacgacgacgaggagtcgccaacggtgtgcggcggcgatggcggaggagggggggacccgttcgcgttcctatcggaggatcggccggcgtggtggtcgccgcggggggtgtccccggccgacccgttccgcaacgggacgccggggtggtgcggggcgtacgagctcgtgagggcgctcgtgtgcgcgccggtggcggcggcgaggctggtgctgttcgggctctccatcgcggtggggtacgccgccacgtgggtggcgctccgcgggtgggtcgacgtgcgggagcgggcggcgcaggagggcgccgggcccatgccggcgtggcgccgccgcctcatgtggatcacgcggatctccgcgcgctgcatcctcttctccttcggataccattggataaggaggaaaggaaaacccgcgcctagagagcttgcacctatagttgtctcaaatcatgtatcatacatagaacccatatacttcttctatgagctgttcccgacaatcgtttcttcagattctcatgattccataccatttgttggaacaattatccgagcaatgcaggttatatatgttgacagattctcgccagcttcaaggaagtctgctgtaaatgaaataaagagaaaggcggcttgcaatagcttcccacgtgtcttgttattcccggaaggcacgacaacaaatggaagatttctgatttctttccaacatggtgcattcatacctggctaccctgttcaacctgttattgtgcgctatccacatgtgcactttgatcaatcatggggaaatatatcattaggaaagctcatgttcaagatgtttacccagtttcacaatttcatggaggtagagtacctccctgttgtttacccacctgagatcaagcaagagaatgcccttcattttgcagagaacactagctatgctatggcacatgcacttaatgttattccaacctcttattcatatggggattcaatgatcatggctcgagcagtggaagatggaaaggtgaactgctcaaattatatggtggagatggcttgggtaaaagaaacatatggtgtgagcacatcagaagcaatggcactcttggaagactttttgtgtatgagcccagacaaggacggacgtgtgaatgcgcaagatttttgggctcattttggccttaattgcacccctctttgcaagaagatatttcagtacttcgattttgaagccaaggaatccatcacattccgtcagttcttgattggatgtgcgcacctcaggaagcagccatcgtttcaggacgcctgcgaaaccgcgtttgagaggtgtaggaatcccctaacatctcacatcggcagggagcagctcgccgatgtcctgcggtcaagcatgcttgagctgatgaccgataatgggatgatgaagctgttcaagacgttggacgtcgacgatgacgacggaatcagcaaggatgacctgatggcatcccttaggaagctccccttcatgatcgcgctcttcgcgggccggatcaacggggaagtctacatcgagatagtttgatcgactggattgatcgcaggggagagcaaaaatggtggatgggagtttgtaacgcggtgggagacgacagacctccgtctgtttttagagggatggtttccaaccgcttcaccgtccatgtagctttctcaggcgtgttggactaaagtggctaaccggtatagtgcgcaattttgtttcatatcgtaaaaatatatatttatatcc

SEQ ID NO: 2471 - DNA, 2759 bp, Zea mays; identical to SEQ ID NO: 921

SEQ ID NO: 2472 - DNA, 2095 bp, Zea mays; identical to SEQ ID NO: 922

SEQ ID NO: 2473 - DNA, 2161 bp, Zea mays
atgcgttactgtaccaatggctccccacctcctggccgtggccgtggccgtggcggccatcatcgccaccgtctcgttgctggcgcccggcgccgctgcctacccgtggccagtttgtgggacgagcaacgacttcgagcccaacagcacataccaggccaacctcaacctcctcgccgccatgctgcccaacaacgtgtccgcatccccggtcctctacgccaccgccgtcgtcggcgccgtcccggagcaggtctggggcatgggactctgccgcggcgacgccaacgccagcagctgcctcgcctgcctcacccaggcgttccaggacctgcccaacgactgctcctacaacaaggacgccgccatctactacgacccctgcaccctccactactccgacgtccacaccctcgccgacgacgacaccggcccgacgaccatgtcgtacaacatcaacaacaacgccaacgtcacctcggacccggcccggttcgagcgcctcctcgccgccctcgtcaacgccaccgccgagcacgccgcgtccaactccacccggcgattcgccacgggggaggccgacgccgacttcgaccggcagttccccaaggtgtacgcgctggcgcagtgcacgccggaccagacgccggcgcagtgccgcaagtgcctcgccggcctcatatcgcagtcgctggacgggttccagaacaacatcggaggcagggtgctctgggtcaactgcacctggcggtacgagacctcgcccttcttcaatggaccggccatggtgcgcctggcatcgtcgtcgagccctccggcagcggcagcggcaggtggaggggagaggaagtacagcgtgttcatcgtggttcttgcagttgtgctgcccactctagctgccctgaatcttgtgttttgcttctgtttctggcggcggccagcaccacaggcaaagcagtcacagcccatgtattccaccgaagcagaggacgtggaaacggtggactccatgatgatcgacgtctccgccctgcgagccgcaacagggaatttcgacgagagcaacaagctcggcgaaggcgggtttggcgcggtgtacaagggcgtcctcccggacggcgacgagatagcggtgaagcgtctgtcgaagagctcgacgcagggagtggaggagctgaagaacgagctcgcgctggtcgccaggctgaggcacaggaacctcgtcaggctcgtcggcgtgtgcctggagcagcaagaacggctgctcgtctacgagtttgtccccaaccggagcctcgacctggtactcttcggtaccgacacgcgtgagccgctcagctgggagcagaggtacaggatcataaacggcatcgctcgaggcctgcagtacctccacgaggactcccagctcaaggtagtccaccgtgatctcaaggccagcaacatcctgctagacgtggagatgaaccccaagatctcagatttcggcctcgcgaggatcttcggccgggaccagacgcaggccgtcaccagccgcgttgtcggaacctatgggtacctagcaccagaatacctgatgcgcgggaactactccgtgaaatcggacgccttcagcttcggcgtcatggtgctggagatcgtcaccgggaggaagaacaacggcagctcccacaagtccggagacctcttgaccaccgtatgggagcactgggaggccgggacggtggcggagctggtggacccgtccctgggcggaagcttcccggagggcgacgtgctgaggtgcatccacatcggtctgctctgcgtccagggggaccccgctgcccgcccggtgatgtcgtccgtcgtgacgatgcttggaaccgacacggtcaccctccaggctccatccaagccgggattcttcgccagaaagagtggcactagcacgaccgtgtccgctgatgatgggtcgatttagagattgccactagagtacagagttgccagaaagagtagctcctttttttaacgatagccatctctatcgctaataagatcctgcgttttattagtatgggaggcatgggattattgaaggtctccttgactctaaagaaaatgtcttaggacagacttgagcctaaacgtctttgttcaaccaaaaaaaaaaaaaaaa

SEQ ID NO: 2474 - DNA, 2156 bp, Zea mays
ccacctcctggccgtggccgtggccgtggcggccatcatcgccaccgtctcgttgctggcgcccggcgccgctgcctacccgtggccagtttgtgggacgagcaacgacttcgagcccaacagcacataccaggccaacctcaacctcctcgccgccatgctgcccaacaacgtgtccgcatccccggtcctctacgccaccgccgtcgtcggcgccgtcccggagcaggtctggggcatgggactctgccgcggcgacgccaacgccagcagctgcctcgcctgcctcacccaggcgttccaggacctgcccaacgactgctcctacaacaaggacgccgccatctactacgacccctgcaccctccactactccgacgtccacaccctcgccgacgacgacaccggcccgacgaccatgtcgtacaacatcaacaacaacgccaacgtcacctcggacccggcccggttcgagcgcctcctcgccgccctcgtcaacgccaccgccgagcacgccgcgtccaactccacccggcgattcgccacgggggaggccgacgccgacttcgaccggcagttccccaaggtgtacgcgctggcgcagtgcacgccggaccagacgccggcgcagtgccgcaagtgcctcgccggcctcatatcgcagtcgctggacgggttccagaacaacatcggaggcagggtgctctgggtcaactgcacctggcggtacgagacctcgcccttcttcaatggaccggccatggtgcgcctggcatcgtcgtcgagccctccggcagcggcagcggcaggtggaggggagaggaagtacagcgtgttcatcgtggttcttgcagttgtgctgcccactctagctgccctgaatcttgtgttttgcttctgtttctggcggcggccagcaccacaggcaaagcagtcacagcccatgtattccaccgaagcagaggacgtggaaacggtggactccatgatgatcgacgtctccgccctgcgagccgcaacagggaatttcgacgagagcaacaagctcggcgaaggcgggtttggcgcggtgtacaagcctgacagctgctggcgcaccggtgtgtcatttgttcagggcgtcctcccggacggcgacgagatagcggtgaagcgtctgtcgaagagctcgacgcagggagtggaggagctgaagaacgagctcgcgctggtcgccaggctgaggcacaggaacctcgtcaggctcgtcggcgtgtgcctggagcagcaagaacggctgctcgtctacgagtttgtccccaaccggagcctcgacctggtactcttcggtaccgacacgcgtgagccgctcagctgggagcagaggtacaggatcataaacggcatcgctcgaggcctgcagtacctccacgaggactcccagctcaaggtagtccaccgtgatctcaaggccagcaacatcctgctagacgtggagatgaaccccaagatctcagatttcggcctcgcgaggatcttcggccgggaccagacgcaggccgtcaccagccgcgttgtcggaacctatgggtacctagcaccagaatacctgatgcgcgggaactactccgtgaaatcggacgccttcagcttcggcgtcatggtgctggagatcgtcaccgggaggaagaacaacggcagctcccacaagtccggagacctcttgaccaccgtatgggagcactgggaggccgggacggtggcggagctggtggacccgtccctgggcggaagcttcccggagggcgacgtgctgaggtgcatccacatcggtctgctctgcgtccagggggaccccgctgcccgcccggtgatgtcgtccgtcgtgacgatgcttggaaccgacacggtcaccctccaggctccatccaagccgggattcttcgccagaaagagtggcactagcacgaccgtgtccgctgatgatgggtcgatttagagattgccactagagtacagagttgccagaaagagtagctcctttttttaacgatagccatctctatcgctaataagatcctgcgttttattagtatgggaggcatgggattattgaaggtctccttgactctaaagaaaatgtcttaggacagacttgagcctaaacgtctttgttc

SEQ ID NO: 2475 - DNA, 2171 bp, Sorghum bicolor
atggctcaccacctcctgcccttgcttgccgttctcgccgccgccgccgcactgctcgtggcgccgcccgtcgcagcttacccgtggccagtgtgcggccagagcaactacttcaagcctaacggcacataccaggctcatctcgacttcgtcgcggccacgctgcccaagaacgcctccgcgtcccggtccctcttcgccaccaccgtcgtcggcaccatcccggagcagctctgggccatggcgctctgccgcggcgacgtcaacgccacggactgcttcacctgcctgactcaagccttcagagaccttccgaacgactgctcctacgacatggacggcaccatctactacgaccagtgcatcctccattactccgacgtgctcaccttccccggcgccggcaccggcccgacgaccgacacgtacgccgtcaacttcaacacaaatgtcacgtcggacccggcccagttcacgagcctcctggccgccctcatcaacgccaccgtcgcgtacgccgccgacaactccacgcggctgttcgcgacaggggaggctgacttcaaccaggagttccccaaggtgtacagcctggcgcagtgcacgccggatcagacgccggcgcactgtcggaactgcctcgccaaggccgtagcgaagtaccaggggtcgttctatgactacatcggaggcagggtgcttggcatcaactgcagctaccggtacgagatcgtgtccttcttcaatggaccggcgatggttcggctggcatcaccgagctctggagctccggcatcagcaccggcaccggcaccagcgccggcttcagctctgcaaccaactgttgggacgccgccggcagcagggaaagggggcaaagagtacggtatcccggtcgtgatcgttgcagttctactaccaagtattgcagccttgaaccttgttgcctggctctgttactggaagcgtcagcgaccaattgaacaggcgaaacagaaatatcccatgtattcagctggagctgaggacacggagacggtggactcaatgatgatggacgtgtccaccctgcgggccgcgacaggggatttcgacgagaccaacaagcttggcgaaggtggcttcggagcggtgtacaagggtgttctccccgatggcgatgagatagcggtgaagcgattgtcaaagagctcgacgcagggagtggaggagctgaagaacgagctcgcgctggtggccaagctgaagcacaagaatctcgtcaggctcatcggcgtctgcctggagcagcaggagcggctgctggtctacgagttcgtccccaatcgaagcctggacctcattctcttcgacactgagaatcacaaacgtgagcagctggactggggtcagaggtacacgatcataaacggcatcgctcgaggcctgcagtacctgcatgaagactctcagctcaaagtagtccaccgtgatctcaaggccagcaacatcctgctcgacgcaaatatgagccccaaaatctcagactttggcctcgcgaggatcttcagccgagaccagacacaggccgtcaccaaccgcgttgtcggaacctatgggtacatggcaccagaatacatgatgcgcgggaactactctgtcaagtctgatgcgttcagcttcggcgtcatggtgctggagatcgtcacggggaggaagaacaacagtaacaacgacggcacccagcagtctggagaccttttgaccactgtatgggagcactgggagaccgggacggtggtggagttggtagacccgaacatgggcggcggcagcatcccggaggacgatgtgctgaggtgcatccacatagggctgctgtgcgtccagggagaccccgcggctcggccggtgatgtcgtccgtcgtggtgatgcttggcagcaatacggtcaccctccaagcgccgtccaagccggcattctgcgccaggaacaactctaacacggccgtgtcgtcgacggcaccgctgcagggctagccgtgtggcccgaagcgcccaccactgtatccgtctagctgcaacttgtttttttcagatgaaaaagaattatattaacttatagctgaatacattatgatattacaagtactctgcaattggcctcagtttcattagtggccgctggctcg

SEQ ID NO: 2476 - DNA, 2249 bp, Sorghum bicolor
tctttctcgttctactatcacgaacaatggctcatcacgctctatctctacctctagccaccatcctcgcggtggcggtggcactactactagcccgccgcgctgcgggttacccgtggtatgtgtgcggctcaagcagcaacttcgtggctaacagcacataccaggctcatctcgacttggtcaccgccacccttcccaagaacgcctcctcgtccccggacctcttcgccaccgccgtcgtcggaaccatcccggagcagctctgggccatggggctctgccgcggcgacgtcaacgcctcgacatgcttcaactgcctcacccagggcttccaagaggtacccgacgattgcccctacgacagggacgctagcatctactacgacttctgtacggtgcgctactccgacgtccacactctacgcaacgacgacgacactggcccgatgataaacacgtacgtcgaaaccaacgacggaaatgtcacggcggcggacgcggcccggttcaagagactcctggccgacctcatcgacgccaccgtcgaatacgccgccaacagctcccggcggttcgccaccggggaggccgacttcaacggccaggagacgaccatccccaaggtgtacagcgtggctcagtgcacgccggaccagacgccggcggagtgccacaggtgcctcgagaggatggtggaggctaccctggaggcgttcaacggcagcatcggaggcagggtgcttggggttgattgcacctaccggtatgagaccgcgcccttctacaacggacaggccatggtgcggctggcacaaccaagctctagtagagcgccggcgccagcgccggctctgcagccgacggccgccggagaagggggacgaaagcaccgtgtgtcttgggtggttcttgcagttgtgctaccaactctagccgccatgaaccttgttgcctgcctctatttgcggcggcgccggcgactactaattggacaggccaaacaccaaaagccgcccatgtattacactgaagcagaggacaccgaaatggtggactccatgatgatggacgtctccaccctacgagccgctactggggatttcaatgagagcaacaagctcggcgaaggcggctttggtgccgtgtacaagggtgtcctcccagatggcgaggaaatagcggtgaagcgtctgtctagcagctcatcgcagggagtggaggagctaaagaacgagctcgctctagtggccaagctgaagcataggaacctcgtcaggctcatcggcgtctgcctagagcagcaagagcggttgctcgtgtacgagttcgtccccaaccggagtctcgatctgatactcttcggcactgataatcgtgagcagcagcttagctgggagcagaggtacaagatcataaacggcatcgctcgaggcttgcagtacctccatgaggactcccagctcaaggtggtgcaccgtgatctcaaggccagcaacatcctgctagatgagagcatgaaccccaagatctcagacttcggcatggccaggatctttggccaagaacagacgcaggccgtcaccagccgcgtcgtcggcacctatgggtacatggcaccggaatacatgatgcgggggaactactccgtgaagtcggacgcgtttagcttcggtgtcatggtgctggaaatcgtaacgggtcggaagaacagtaacgaaggctgcaatctcttgaccacagtatggatgcactgggaggccagaaagatggcagagttggtcgaaccgagcatgggcaacagtttcccggagggcgatgtgctgaggtgcgtccacatcggcctgctgtgcgtccaggcagaccctgcggcccggccggtgatgtcgtctgtcgtgatgatgctcggcagcgatacggtcaccctccaggttccatccaagccgggattcttcgccaggaacaacagcgccaacacagccgcgtcgacagtgtgactgaatggtaacatatatgtaccgttaccctgttaccaaaatgtatgcatgatatcaactaataagccgcgtaagcttgattcaacatgaaattttgcatacgcttactataaaatgtgcaaacacatggttgatatgtgtccatgtataagtgatgaatgattgtagtgtgcgtgagactaactatggcctgagatgtgtgtgcaatatatgcctcttggcttgtgatgtacaggagttaagtgttggtac

SEQ ID NO: 2477 - DNA, 2211 bp, Hordeum vulgare subsp. vulgare
gcagttccaccaccatccgtggcagagtaggctagtagcatggctcaccaccgggtcctgtctgtggtcatcgtcgccgccgcgctgctcgcttcccccgccgcgggagtatacccgtggacaatatgcggcctgagcacctacgctgccaagagccagtacctggccaacatcaaccgcatcggcgcgatgcttcccaggaacgcctcccagtcaccggacctgttcgccacggccctggtcggcgccgtccctcagcaagtctgggccctggcgctctgccgcggcgacgccaacgcctcctactgcttcacctgcctcgaccaggccttccaggacctgcccaacgcctgcccctacagccgggacagcaccatctactacgactcctgcgtgctccactactccaacatccagtcccgccccgacgacgacaccacctacaaccccacgcgcccgctccgcaacaacttcaacgccacggccgagccggcccggttccagcgcgtcgtcgccgcgctcctcaacgccaccgtcaactacgccgtcaccaactccacgcggctctatgcgtccggggaggccgacttcgaccgggagctccctaaggtgtacgcttgggcgcagtgcacgcctgacctttcgccggagaggtgccgggattgcctcgccatgaacatcaagacgtcggcgcctctgttcacggacgccatcggggccaggattcttgggatgaggtgcagctaccgctacgaaacgacgcccttcttcaatggcccggtgatggtgcggctggcaggaacgtcgcccagctctggcgcaccggcgtcggcgccggccatggttcccaacgttttgacaccaccggcggcggcaggagaagggagaaagtacagtgttcctggcatggttcttatagttcttctacctaccgcagcagccataaacattgtggtttgcttccttctctggaggaggcggcggccactggcagaagcaaagcagccatatacaggttattctggcgaggccgaggacattgaaagtgtggactcgatgctgatcgacatttcaactttacgagctgcaaccggggattttgcggaagccaacaagcttggcgaaggtggattcggtgcggtgtacaagggtactctcccagacggcgaagaaatagcagtgaagagactgtcgaagagctcaacacaaggagtgaaggagctgaagaatgaactcgccttggttgccaagcttaagcacaagaacctcgtcaggcttgtcggcgtctgcctggagcacgaggagaggctgctcgtctacgagttcgtcccaaaccggagcctcgataagatcctattcgacacagagaaacgcgagcaacttgattggggaaagaggtacaagatcataaacgggatcgctcgaggcctgcagtacctccacgaagattcccagctcaaagtcgtccaccgtgacctcaaagccagcaatatcttgctagacaccaacatgaaccccaagatctcggacttcggcctcgccaggctcttcgggcgagaccagacgcaggccgtcaccagccgagtcgttggaacatatgggtacatggcgccggagtacgtgatgcgcgggaactactctgtgaagtcggacgcgttcagcttcggggtcatggtgctggagatcgtgacggggaggaagaacaacgactgctacaactcccagcagtctgaagatctattaaccacgatatgggagcactggacggccggaacagtgctggctacgatggacccgagcatcggcagcagcttctcggagagcgacgtccgaaggtgcgtccacgtagggcttctgtgcgttcaggggaacccggcggaaaggccggtgatgtcgtcggtggtcatgatgctcggaggcgaaacagtctctctcagcgccccgtccaagccggcgttctatgcaaggaacgccggtgccgatcactcggtcgtcatcgcgtccaccgtgtccaccgtgtccttgcaggatggtcctgcttagcaagttcagtttgcagattaatggatgcctcgcgcttaagggcatgtaaagaaaccttattttctttaaaaaaagaagaaaaggaggaccactctgcgtaggtgatacacacattctgtgaagatgtacttcattgaaaaaaaaagattgagagatgtctttcaatgc

SEQ ID NO: 2478 - DNA, 2305 bp, Oryza sativa Japonica Group
atcggaggccgtcgtctccgtctccccgtttgctactccggcgccggcgaggccacctcggtcgtttccctccctcctccacccactcgccttcccggccgccgcggagctctgcccccccccactctccctacgtctagctgcgctacttgttgtctcccccacctctcttcctctgccgccgcacagcttgccttcctcgtcgtctcgtctccttcagcgccggcgagaagccccccggccgccgagcttgccccgtctccggcggctaggcgctgccgcctcctgaccacgcgggttttctgcccctgccgctgaccccacccaccgccggcttgctagggcttattggataagatgtcgtccaagaagaactactacaaggagaagatgatgcggcggaaagaggagaaaaaagaagaaccagagacaccaaggtatcgagatcgtgctaaggagcgtcgtgaagatcaaaaccctgattatgaacctacagagcttggttcatttcatgctgtggcacctcctggagcagatttaaggctagcagatgcacacaagatatctattgagaaaagcaaatatctcggaggtgatctggaacatacacatttggtcaaaggcttggactatgctctacttcacaaagtacgaagtgaaatagaaaagaagcctgaagcagaagatggaaaggatacacagtcaaggtctacaaaagaagatcaagcagtctcattccgcactgcagctgcaaagtctgtctatcaatggatcataaagccacaaagcatcataaagtcgaatgaaatgtttcttcctggtcggatggcatttatttacaacatggaggatggacttaccaatgatattccgacaacacttcacaggagcaaagctgattgctctgttccagaggagatggtaactgtcagtgtggatggttctgtacttgataggattgctaaaatcatgtcataccttcgacttggatcatctgggaaagtcttgaagaaaaagaaaaaggagagggacacaaaagggaagaacagtttagcaagtggtgactacgatgaggtagctagacctggccaaactaatgggtctgctctgaaacatcaatttgaaaaggatatgccaccgccgccaccccctcgaaataataatttaagcaaaaatgagaaaccgtctgctccagttgctagagcagatgaagatgacatttttgttggagatggggtttactattctgttcctaacaaggaaatgagccagagccctgtctctgaagatatggatgagtccccacataaccatcagaagcagtcctatttcactgaagagaaacctatctatgggcccatcccaccatctgaccctgctcaagcttggccacaaccgaatgcgtacgatgctattcaagctcaaatggtagctgctggatatcaaggggagtggtcaggctatcagtatggcgaacaacagatggcttatccagaacagtacatgcaacaaagcgctcaggactgtgatgtactagctgatccaaatataacccaggatccaaggttgatgactcaagcagataaagacagaggtcttggttctgttttcaaacgcgatgatgaaaggcttaaacagctgagggagaaagatgcacgggagaaagatcctaattttatctcggatagttactccgagtgctatcctggttatcaggagtataatcatgagattgcaggcagcgatgaagaagatgatttatcgaagatggacatgggtggccgggctaagggccgtcttcacaggtgggactttgagacagaagaggagtgggccacatacaacgaccagaaggaagccatgccgaaggctgcattccagtttggggtgaagatgcaggatggcaggaagacgaggaagcagaacaaggaccagaagctcacgaatgacctccacaaaatcaacaagatacttgcgagaaagaaaggtgacaaagatggagggcatgatggcgggcattacgatgatgatatgccaagtgggaagaagcaacgtgcctgatgctattagacacttatagtttatcctgcgagaggtaaaactgtatttgtactaggaattacagtgccatgaacacctgacagttgtaatgttctgcgttttggccggtgcagaagggaaaaagaacgggatggccatgctttcgagctgaaacagtgataatatgtagctcatccatttttataacagaacagcccgtaatttgctttgttttactacgaaaagaaaaaaacatcgaaagtcc

SEQ ID NO: 2479 - DNA, 2215 bp, Sorghum bicolor
atcctgaacccgccccgtcgaacaccagaggaatccgagggcaaaaatcgaaaaagtcactccggcaccgccgccctgcccgccccggcgcgccagtctcccgccgcctctctagcctccacccaccctcgagcggcgcgtctcccaccgtcgctcggtttcccaccggcacagcccggctttgcctccgccactccgcttcccgccgcggcgccgtccgacgccgccgactccgtctgctcccttgcctccgctcgttcccatcttacgccgccgtagctactgtgagcagggatacagaagagagggagagaagatgtcgtccaagaagaactactataaggagaagatgatgcggcggaaagaggagaaaaaagaagaaccagagacacctaggtatcgtgatcgtgctaaggagcgtcgcgaagatcagaacccagattatgaacctacagaacttggttcatttcatgcagtggcacctcctgggactgatttgaggttggcagatgcccacaagatttcaattgagaaaagcaaatatctcggaggtgatttggagcatacacatctggtcaagggcttggactatgctctacttcacaaagtacggagtgaaattgaaaagaaacctgatgcagaggatgggaaggatgcaaagtcaagggcaacaaaagaagatcaggcaatctccttccgcactgcaactttgcagtctgtctaccaatggatcataaagcctcaaagcataattaaggagaatgaattgtttcttcctggtcggatgtcatttatttacaacatggaggagggagtaacaaatgatattccaacaactcttcataggagcaaagctgattgcccaattccagaggagatggttactgttagcgtggatggttctgtacttgacaggattgctaaaattatgacataccttcggcttggatcatcagggaaggtcttgaagaaaaagaaaaaggagagagatataaaagggaagagcaatttggcaagtggtgactatgatgagtctgtaaaaccttcccaaattaatggttctactctgaaacatcaatcagatatgccaccaccaccagctccaccccctcggaacaataatttcaatggaaaggagaaacaaccagtccctgtttcaagagcagatgatgatgacatttttgttggagatggagttgactattcagttcctaacaaggaaatgagtcagagccctgtttctgatatggatgaatccccacataaccatcagaagcagtccaatttcactgaacccatgtatggcccagtaccaccatctgaacctgctcaagcttggcaacagcagaacgggtatgatgctgttcaagcccagatggcagctgctggatatcaaggtgactggtcaagctatgtgtatgcagaacagcagttgggttatccagaacagtatgtgcagcaaagcacccaggaatacgatgtgttagctgaccctagtctatcccaggatccgaggttcatgactcaagcagacaaggatcggggtttaggttctgttttcaaacgtgatgatcaaaggcttaatcagctgagggaaaaagatgcacgggagagagatccaaattttatttcagatagttactcagagtgttatcctggttaccaggagtataataatgagattgcaggaagcgatgatgaagatgatttatcgaagatggatatgggtggacgggcgaagggccgtcttcacaggtgggactttgagactgaagaggagtgggccaagtacaacgatcagaaagaagccatgccaaaggctgccttccagtttggggtgaagatgcaggacggcaggaagaccaggaagcagaataaggaccagaagctcacgaacgacctccacaagatcaacaagatcctggctaggaagaagggcgagaaagatggggcggaagatggcggtcactatgatgatgatttacctagctcgaagaaacagcgtggctgaagctgtcaccttttgtttctcctgccaatacagtaggcaggcgaacattgtatgaagagttacagtgccatgtttagctggcagctgtatcctgcgtttgtttaaggtggccggtaggaaattatgttgatgctattgagctgaaaccatggaagaagtatgcctgtatacgtaattttataagaaaagaaaaggcagagcttt

SEQ ID NO: 2480 - DNA, 2262 bp, Zea mays
aacagcggaacacgagggccaaatcgaaaaaatcacttcgcctccgccctccaggcttcctcggctcctcgcacccccacccagcggtgcctccgtgccgtctcccaccgctgctcgggcttcccgccgcacagcccggcttgcctccgccactccgtttcccgccgcaccgccatccgaatccgccgcagcctgctccctgctatcaagccacgttgcctcgctcatcttccgccgccgcagggatacagaggagagagagagagagggagagaaaagatgtcatcgaagaagaactactataaggagaagttgatgcggcggaaagaggagaaaaaagaagagccagagacacccaggtaccgcgatcgtgctaaggagcggcgtgaagatcaaaacccagattatgaacctacagaacttggttcgtttcatgcagtggcacctcctgggaatgatttgaggctggcagatgctcacaagatctcaattgagaaaagcaaatatctcggaggtgatttggagcatacacatctggtcaagggcttggactatgctctacttcataaagtacggagtgaaattgaaaagaaacctgaggcagaggatgggaaggatacaaagtcaagggcagcaaaagaagatcaggcagtctccttccgcaccgcaactgcaaagtctgtgtaccaatggatcataaagcctcaaagcataattaaagagaatgaattgtttcttcctggccggatgtcatttatttacaacatggaggagggagtaaccaatgatattccaacaactcttcataggagcaaagctgattgtccagttccagaggagatggtaactgtcagtgtggatggttcagtacttgaaagaattgctaaaattatgacataccttcggcttggatcatcagggaaggtcttgaagaaaaagaaaaaggagagagatataaaagggaagagcaatttggcaagtggtgactatggcgagtcagtaaaaccttcccaaactaatggttctactctgaaacatcaatcagatatgccaccaccaccggctccaccccctcggaacaataatttcaatgggaaggagaaacaaccagtccctgtttctagagaagatgatgatgacatttttgttggagatggagttgactatttagttcctaacaaggaaatgagtcagagccctgtctctgatatggatgaatccccacataaccatcagaagcagtccaatttcactgaaccgctgtatggcccagttccaccatctgaatctgctcaagcttggcaacaaccgaacacgtacgatgctgctgttcaagctcagatggcagctgctggatatcaaggtgactggtcaagctatgtgtatgcggaacagcagttgggttatccagaacagtatgtgcagcaaagcacccaggaatacgatgtgttagcggaccctagtatatcccaggatccgaggttcatgactcaggcggacaaggatcggggtttaggttctgttttcaaacgtgatgatcaaaggcttaatcagctgagggaaaaagatgcacgggagagagatccaaattttatttcagatagttactcagagtgttatcctgggtaccaggagtataataatgagattgcaggaagcgatgatgaagatgatttatcgaagatggatatgggtggacgggcaaagggccgtcttcacaggtgggactttgagactgaagaggagtgggccaagtacaacgaccagaaagaagccatgccaaaggctgccttccagtttggggtgaagatgcaggacggcaggaagacgaggaagcagaacaaggaccagaagctcactaatgacctccacaagatcaacaagatcctggctaggaagaagggcgagaaagatggggcggaagatggcggtcactacgacgatgatttacctagctcgaagaaacagcgtggctgaagctgtcatttttcgtttctcctgctggttatggcattctacgggagagttacgatggtgtttagctggcagctgtatcatgatgctttcatttaaggtggcatcaggacataatacatgtcaaaaactttacaaccgtggtcgatattttaacaggaacagaatgacccttggtgattttgtttgtcttgtaaaacatatcgaaattgtataaaatgtcaaaaatctaaaatctaaaaaaaaaaaaaaaaaaaaaaaaaaaaaaaaaaaaaaaaaaaaaaaaaa

SEQ ID NO: 2481 - DNA, 2135 bp, Zea mays
gaaaaaatcacttcgcctccgccctccaggcttcctcggctcctcgcacccccacccagcggtgcctccgtgccgtctcccaccgctgctcgggcttcccgcggcacagcccggcttgcctccgccactccgtttcccgccgcaccgccatccgaatccgccgcagcctgctccctgctatcaagccacgttgcctcgctcatcttccgccgccgcagggatacagaggagagagagagagggagagaaaatatgtcatcgaagaagaactactataaggagaagttgatgcggcggaaagaggagaaaaaagaagagcctgagacacccaggtaccgcgatcgtgctaaggagcggcgtgaagatcaaaacccagattatgaacctacagaacttggttcgtttcatgcagtggcacctcctgggaatgatttgaggctggcagatgctcacaagatctcaattgagaaaagcaaatatctcggaggtgatttggagcatacacatctggtcaagggcttggactatgctctacttcataaaatacggagtgaaattgaaaagaaacctgaggcagaggatgggaaggatacaacgtcaagggcagcaaaagaagatcaggcagtctccttccgcaccgcaactgcaaagtctgtgtaccaatggatcataaagcctcaaagcataattaaagagaatgaattgtttcttcctggccggatgtcatttatttacaacatggaggagggagtaaccaatgatattccaacaactcttcataggagcaaagctgattgtccagttccagaggagatggtaactgtcagtgtggatggttcagtacttgaaagaattgctaaaattatgacataccttcggcttggatcatcagggaaggtcttgaagaaaaagaaaaaggagagagatataaaagggaagagcaatttggcaagtggtgactatggtgagtcagtaaaaccttcccaaactaatggttctactctgaaacatcaatcagatatgccaccaccaccggctccaccccctcagaacaataatttcaatgggaaggagaaacaaccagtccctgtttctagagaagatgatgatgacatttttgttggagatggagttgactatttagttcctaacaaggaaatgagtcagagccctgtctctgatatggatgaatccccacataaccatcagaagcagtccaatttcactgaaccgctgtatggcccagttccaccatctgaatctgctcaagcttggcaacaaccgaacacgtacgatgctgctgttcaagctcagatggcagctgctggatatcaaggtgactggtcaagctatgtgtatgcggaacagcagttgggttatccagaacagtatgtgcagcaaagcacccaggaatacgatgtgttagcggaccctagtatatcccaggatccgaggttcatgactcaggcggacaaggatcggggtttaggttctgttttcaaacgtgacgatcaaaggcttaatcagctgagggaaaaagatgcaagggagagagatccaaattttatttcagatagttactcagagtgttatcctgggtaccaggagtataataatgagattgcaggaagcgatgatgaagatgatttatcgaagatggatatgggtggacgggcaaagggccgtcttcacaggtgggactttgagactgaagaggagtgggccaagtacaacgaccagaaagaagccatgccaaaggctgccttccagtttggggtgaagatgcaggacggcaggaagacgaggaagcagaacaaggatcagaagctcactaatgacctccacaagatcaacaagatcctggctaggaagaagggcgagaaagatggggcggaagatggcggtcactacgacgatgatttacctagctcgaagaaacagcgtggctgaagctgtcatttttcgtttctcctgctggttatggcattctacgggagagttacgatggtgtttagctggcagctgtatcatgatgctttcatttaaggtggcatcaggacataatacatgtcaaaaactttacaaccgtggtcgatattttaacaggaacagaatgatcaaaaaaaaaaaaaaaa

SEQ ID NO: 2482 - DNA, 1611 bp, Oryza sativa Japonica Group
atgtcgtccaagaagaactactacaaggagaagctgatgcggcggaaagaggagaaaaaggaagaaccagagacacctaggtatcgagatcgtgctaaggagtgccgtgaagatcaaaaccttgactatgaacctacagagcttggttcatttcatgctgtggcacctcccggagcagatttaaggctagcagatgtacacaagatatctattgagaaaagcaaatatcttggaggtgatttggaacatacacatttggtcaaaggtttggactatgctctacttcacaaagtacgaagtgaaatagaaaagaagcctgatgcagaggatgggaaggatacacagacaaggtcaacaaaagaagatcaggcagtctcattccgcactgcaactgcaaaggaggatggacttaccaatgatatcccaacaactcttcacaggagcaaagctgattgcgctgttccagaggagatggtaactgtcagtgtggatggttctgtacttgataggattgctaaaatcatgtcataccttcgacttggatcatctgggaaagtcttgaagaaaaagaaaaaggagagggacacaaaagggaataacagtttagcaagtggtgactatgatgaggtagccagacctggccaaacaggttcttctctgaaacatcaatttcaaaaggacatgccgccgccgccaccccctcgaaataataacttaagcaagaatgaggaacagtctattcctgttgctagagcagatgaagatgacatttttgttggagatggagttgactattctgttcctaacaaggaaatgagccatagccctgtctctgaagatatggatgagtccccacataaccatcaaaagcagtcctatttcactgaagagaaacctgtctatgggcccatcccaccatcggaccctgctcaagcttggccacaaacgaatggatacgatgctattcaagctcaaatggtagctgctggatatcaaggggagtggtcaggctatcagtatggtgaacaacagatgccttatccagaacagtacatgcaacaaagcactcaggactatgatgtattagctgatccaaatatagcccaggatccaaggttgatgactcaagcagataaagatagaggtcttggttctgttttcaaacgtgatgatgaaaggcttaagcagctgagggaaaaagattcacgggagaaagatcctaattttatctcagatagttactccgagtgttatcctggttatcaggagtataatcatgagattgcaggcagcgatgaagaagatgatttgtcgaagatggacatgggtggccgggctaaggggcgtcttcataggtgggactttgagacggaagaggagtgggccaaatacaacgaccagaaggaagcgatgccgaaagctgcattccagtttggagtgaagatgcaggatggcaggaagacgaggaagcagaacaaggaccagaagctcacgaatgacctacacaagattaacaagatacttgcgaggaagaaaggtgacaaagatggaggggatgatggtgggcattatgatgatgatctacctagtggcaagaagcagcgcgcctga

SEQ ID NO: 2483 - DNA, 2296 bp, Hordeum vulgare subsp. vulgare
ggaccacagacccgaggagctccgagtatccgcccatcccggccactctcgtccgaacccgactgtctacgccgccgccgccggagctcctgtccgccgcccgctaactcagcgcaaactccagtatcattataaacccgaggtagcaggcaccaaccaccacctcgcatcccgtgccccccctccccctcgtggaaacccctcgtccccgtgctagggttgcagccgtagccctccggcgtttgtttcccaggacacagggaagatgtcgtcgacgcagaagaagaagagcaactataaggagaagatggcgcggcgaaaagaggagaacaaaaaagaagaaccagagacaccaaggtaccgagatcgtgcgaaggagcgtcgtgaagatcaaaaccctgactatgaacctacagagcttggttcgtttcatgctgtggcacctcctggagcagatttgaggctagaagatgcccaaaagatttcaattgagaaaagcaaataccttggaggtgatctggagcatactcatttggtcaaagggttggattttgctctactaaacaaagtacgtagtgaaattgacaagaagcctgatgcagaggatgggaaggatgccaaggcgagggaaacaaaagaagaccgagcagtctcattccgcactgcaattgcaaagtctgtctaccagtggactgtaaagcaacaacaaagcatgataaaggcgaatgacatgtttcttcctggccggatggcatttatttacaatatggaggatggacttaacagtgatattccaacgactcttcacaggagtaaagctgattgccctgtcccagaggaaatggtcactgtcagcgtggatggctctgtacttgacaggattgccaaaatcatgtcataccttagacttggatcatcagggaaggtcttgaagaagaagaaaaaggagagggatacaaaagggaagaataatttggcaggcggtgtttacaacgagacagtaagacctgcccaaagtgatggttctgttcagaaataccactcagaaaaagatatgctaccacctccacccccacccccacgaaagagtaacttcagtgaaaaggagaaacattctgtccctgttgctagagcagatgacgatgacatattcattggagatggagttgactatgctgttcctaacaaggaaatgagccagagccccatctctgaggatatggatgaatccccacgtatccatcagaaccagtccaatttgaatgaacctgtgtatggtcctattcaaccatctgaacctgctcaagcttggcaacagccaatggatggttatgatgctattcaagcccaaatggcagctgctggataccaaggcgagtggtcaggctatcagtatgctgaacagcagctggcttatccagaacagtacatgcaacagggtactctgggatacgatgtattggttgacccaaatatatcccaggatccaaagttgatgactcaagcagacaaggataagggtctaggttctgtcttcaagcgtgatgatgacaggcttaagcagctgagggaaaaagatgcgcgggagaaagacccaaattttatttcagatagttactctgagtgttatcctggttatcagggttataatcaagagatagcagggagtgacgatgaagatgatttgtcaaagatggatatgggtggacgggcgaagggccgtcttcaccggtgggactttgagacggaagaagagtgggcgaaatacaatgatcagaaggaagccatgccaaaggcggcattccagtttggggtgaagatgcaggatggcaggaagaccaggaagcagaacaaggatcagaagctcagcaacgacctcaacaagatcaacaagatcctggcgaggaaaaagggtgataaagacggagaagggcattacgatgacgatctacccagcgggaagaaacagcgagcttgatctaactggtcatccattgttttcccgtctgtcttgttagaaccgagaaacagccatgcttttgtgagctgaaacgattagatctgtcgctcagtgctgttttatgtatgcacctgtattttcattttttatggaaatcagtcttgcatggcattcgttgtagaatatgtaaagcagatggtcccatctagtcaggtcaggcaaaagtacaagatatgccatgagaagccatgtaaaaatgtgggaaacgattataatctgctgctcttgtctttgaaaaggacgtttcgtttcaatgggatgcttttggttgctcgc

SEQ ID NO: 2484 - DNA, 1903 bp, Vitis vinifera
gaggggaatggtaagagccctagagtggggaaccatagaaattatcatcaatggcgtcgtcgaagaggaatcataaagagaagataattcgtcgaaaagaagagaaaccagaagaaccggagctaccgaagtatagggatcgtgcaaaggagcggagagaggatcaaaatccggattacgaaccaactgaactcggctcttttcatgcggttgctcctcctggcaccgtcgaccttaggtcaactgacgccaacaagatatccatcgagcacagcaagtacctcggaggggatgtggaacacacgcatttggtcaaaggcttggactatgctttgcttcataaagtgagaagtgagattgaaaagaaaccggaagttggagatgatgctgatggaaagtccagagtatccaatgaggaccagccattgtcatttcgcactgcaactgcaaagtcagtgtatcagtggattgtcaagccccaaactgttgtcaagtcaaacgagatgttcctccctggtagaatggcatttatttttagcatggagggtggattttctagtgacattccaacgaccctgcatagaagtaaagctgactgtccagtgccggaggaaatggttactgtcggcgttgatggttctgtgctggaccgaattgctaaaatcatgtcatatcttcgcctgggatcatctgggaaggttctcaagaagaagaagaaggagagagatgtcaaaggaaagatatcaactgttggtaatgaatttgatgaagagaagaagccatcaaagcttgatggtggaatgtcaaagaatcaaaccgaaagggaaagcctgccaccacctttacctcccaggaaaaattatgttgattcaagagagaaacatggtccatctgttgctagatctgaacaggatgacatatttgttggggatggtgttgaatatgatattcccagtaaagacatgagtcagagccctgtctccgaggacatggaggagtctcctcgaaacaaggaaagaatttcctatctcagtgaacctgcttatggtccagttccgccctctgagcctcaggaatggcaacaaacgaatggatatgatgctatgcaagcacaagcattggctgctggctaccagggagactggcaggagtaccaatatgctgagcaaatggcttatcctgaacaatatctccagcagaacatgcaaacatatgatgtgcaggcaggtatgggcattcctcaggatccacgcttcatgactcaagaagagaaggatcggggtttggggtccgtgttcaagcgggatgatcaaaggctgcagcaactgagggagaaagatgctcgagagaaggatcccaacttcatatcagaaagttactctgaatgctatcctgggtatcaggagtacaaccgtgaggttgtggacagtgatgatgaagatgacttgtcaaaaatggacatgggtggacgtgctaagggtcgtctacatcggtgggactttgaaacagaggaggaatgggcaacatataacgagcagaaggaagcaatgccaaaagctgcattccagtttggtgtgaagatgcaagatggtagaaagacaagaaagcaaaacaaggaccagaagctcaccaacgagctccacaagatcaacaagatacttgccagaaagaaaatggagaagggtgagatgaatgatgatggaggccgctatgatgatgattcacaacctgggaagaagcttcggatatgaagcttttagaagagttggttgatgcaacttttgtactatttgtaggataatttttttgttgatctggagcctgtattgcactaagttttttagggcaaaggaaagtgaagtttgtcataaattcttgctaatgtagtaatcggtttcccttt

SEQ ID NO: 2485 - DNA, 1932 bp, Sorghum bicolor; identical to SEQ ID NO: 887

SEQ ID NO: 2486 - DNA, 2156 bp, Zea mays
gcaccacttcacttgcttcaaagcgcaaacacacaagaagggcggagctgttgtcatcctgacaatgggcgcgcgtcgtggtctccggcgaggccaagccgccgccgccgccttctccgcatgtcccttcctcgccctcgccgtcgtcctcctcgccttgccggagctcgcagccggcgacacccactactacacgttcaacgtgcaaatgaccaacgtgacacggctgtgcgtgactaagagcatcccgacggtgaacggggagttcccggggccgaagctggtcgtgcgggaaggcgaccgcctcgtggtcaaggttcacaaccacatcaactacaatgtctcgttccactggcacggcgtccggcagctgcgcaacgggtgggcggacgggccgtcgtacatcacgcagtgcccgatccagggcgggcagagctacgtgtacgacttcaccgtcacggggcagcgcggcacgctgtggtggcacgcgcacttctcctggctgcgcgtgcacctctacggcccgctcgtcatcctccccaagcgcggcgagggctacccgttcccgcgcccctacaaggaggtgcccatcctcttcggcgaatggttcaacgcggacacggaggccgtcatcaaccaggccctgcaaacaggcgccggcccaaacgtctccgatgcctacaccttcaatgggcttccaggcccgacatataactgctcgtctaaagacacgtacaagctgaaggtgaagcccgggaggacgtacatgctccggctcatcaactccgccctcaacgacgagctcttcttcggcatcgccaaccacacgctcaccgtcgtcgaggcggacgccagctacgtcaagccattcaccgtcagcacgctcgtcatttcaccggggcagaccatgaacgtgctcctcacgacggcccccagccccgcctccccggcctacgccatggcgatcgcgccctacaccaacacgcagggcacgttcgacaacaccaccgccgcggccgtcctcgagtacgccccgacgacgaccaggaacaacaccctgcctcccctaccggccctgccgctgtacaacgacaccggcgcggtgtccaacttctcgcgcaatttccgcagcytgaacagcgcgcgctacccggcgcgcgtgccggtggcggtggaccggcacctgctgttcaccgtggggctcggcacggacccgtgcccgtacaccaaccagacgtgccagggccccaacggcaccaagttcgcggcgtccgtcaacaacaactccttcttccgcccccggaccgcgctcctcgaggcgcactaccggcgccgctacgccggcgtgctcctggccgacttccccacggccccgccgcacccgttcaactacacgggcaccccgcccaacaacacgttcgtgcagcacggcacgcgggtggtgccgctccgcttcaacgcctccgtggagctggtgctgcagggcaccagcatccagggcgccgagagccacccgctgcacctgcacggctacaacttcttcgtggtcggccaagggttcggcaacttcgacccggtgaacgacccgcccgggtacaacctcgccgaccccgtagagcgcaacaccatcagcgtgcccaccgccggctgggtcgccgtccggttcctcgccgacaacccgggcgtgtggctgatgcattgccacttcgacgtgcacttgagctggggcctgtccatggcgtggcttgtcaacgacggcccgctgccgaacgagaagatgttgcccccgccatccgacctcccaaaatgctgatgacgactggtcgtttatcacccgatcgaggggtagatgggcatttaggaaggttctcctgcttcctgcacgtctgcctacttcctttccttacgatgtttggaactatttggtttggactatttaattaccgtgtgccgatttttggcgagtgcttggatttcgcgatcctcgctgaatccccttttgaaacatgttaatctgtatctatgtaacgacaacgtttgttctgcggttacttgttctttttttaccccctttctgaacattcagcacgcattggtgtattcacatggtcaaatacaatgtaacaatgatgtctgtaacaaaaaaaaaaaaaaaa

SEQ ID NO: 2487 - DNA, 2044 bp, Zea mays
cttgcttcaaagcgcaaacacacaagaagggcggagctgttgtcatcctgacaatgggcgcgcgtcgtggtctccggcgaggccaagccgccgccgccgccttctccgcatgtcccttcctcgccctcgccgtcgtcctcctcgccttgccggagctcgcagccggcgacacccactactacacgttcaacgtgcaaatgaccaacgtgacacggctgtgcgtgactaagagcatcccgacggtgaacggggagttcccggggccgaagctggtcgtgcgggaaggcgaccgcctcgtggtcaaggttcacaaccacatcaactacaatgtctcgttccactggcacggcgtccggcagctgcgcaacgggtgggcggacgggccgtcgtacatcacgcagtgcccgatccagggcgggcagagctacgtgtacgacttcaccgtcacggggcagcgcggcacgctgtggtggcacgcgcacttctcctggctgcgcgtgcacctctacggcccgctcgtcatcctccccaagcgcggcgagggctacccgttcccgcgcccctacaaggaggtgcccatcctcttcggcgaatggttcaacgcggacacggaggccgtcatcaaccaggccctgcaaacaggcgccggcccaaacgtctccgatgcctacaccttcaatgggcttccaggcccgacatataactgctcgtctaaagacacgtacaagctgaaggtgaaagcccgggaaggacgtacatgctcccggcttcatcaactccgccctcaaacgaacgagctcttcttcggcatcgccaaccacacgctcaccgtcgtcgaggcggacgccagctacgtcaagccattcaccgtcagcacgctcgtcatttcaccggggcagaccatgaacgtgctcctcacgacggcccccagccccgcctccccggcctacgccatggcgatcgcgccctacaccaacacgcagggcacgttcgacaacaccaccgccgcggccgtcctcgagtacgccccgacgccgccgcccgtcgccaccaggaacaacaccctgccccccctaccggccctgccgctgtacaacgacaccggcgcggtgtccaacttctcgcgcaacttccgcagcctgaacagcgcgcggtacccggcgcgcgtgccggcggcggtggaccggcacctgctgttcaccgtggggctcggcacggacccgtgcccgtacaccaaccagacgtgccagggccccaacggcaccaagttcgcggcgtccgtcaacaacaactccttcttccgcccccggaccgcgctcctcgaggcgcactaccggcgccgctacgccggcgtgctcctgggcgacttccccacggccccgccgcacccgttcaactacacgggcaccccgcccaacaacacgttcgtgcagcacggcacgcgggtggtgccgctccgcttcaacgcctccgtggagctggtgctgcagggcaccagcatccagggcgccgagagccacccgctgcacctgcacggctacaacttcttcgtggtcggccaagggttcggcaacttcgacccggtgaacgacccgcccgggtacaacctcgccgaccccgtagagcgcaacaccatcagcgtgcccaccgccggctgggtcgccgtccggttcctcgccgacaacccgggcgtgtggctgatgcattgccacttcgacgtgcacttgagctggggcctgtccatggcgtggcttgtcaacgacggcccgctgccgaacgagaagatgttgcccccgccatccgacctcccaaaatgctgatgacgactggtcgtttatcacccgatcgaggggtagatgggcatttaggaaggttctcctgcttcctgcacgtctgcctacttcctttccttacgatgtttggaactatttggtttggactatttaattaccgtgtgccgatttttggcgagtgcttggatttcgcgatcctcgctgaatccccttttgaaacatgttaatctgtatctatgtaaaaaaaaaaa

SEQ ID NO: 2488 - DNA, 2188 bp, Zea mays
ctctctctctctctctctctctctctctctctctctctctctcgcttcagttcggttcggacacagctagctagctgatcgatcgagaggcgagagcaagcaatggccgtcggccgtcgtctctcccctgcgtgcctcctcctccttcgtctcaccgtcgccctcgtggtcctcaccgccctgccggagctcgccgctgcccgcacccgccgctacacgttcaatgtgacgatggcaacggtgacgcgcctgtgcgtgacgaagagcgtccccacggtgaacgggcagttcccggggccgaggctcgtcgtgcgcgagggagaccgactcgtggtgcaggtccacaacaacatcaacagcaacgtaacgttccactggcacggcgtccggcagctgcgcagcgggtgggcggacgggccgtcctacatcacgcagtgcccgatccggcccggccagagctacgcctacgacttccgcatcgtggggcagcgcggcacgctctggtggcacgcgcacttctcctggctccgagccacgctctacggcccgctcgtcatcctcccgccgcgcggcgtcccctacccgttcccaaagcccgacagacaagtcaccctcatgctcggtgagtggttcaacgcggacccggaggccgtgatcaagcaggcgctgcagaccggcggggccccgaacgtctccgacgcctacaccttcaacggcctgcctggccccacctacaactgctcctccggcgacgacacgttcaggctgcgggtgaggcccggccggacgtacttgctgcgcctcgtcaacgcggcgctcaacgacgagctcttcttcgcggtggccaaccacacgctgacggtggtgcaggcggacgccagctacgtcaagccgttcgcggccgccacgctggtcatctcgccgggccagaccatggacgtgctcctcaccgcctccgcctccgccgccccgtcgtccgccttcgccatcgccgtcgcgccctacaccaacaccgtcggcacgttcgacaacaccaccgccgtcgccgtcgtcgagtacggcccgcaccagtccgccgcggcgctccggagcctgcccttgccggcgctcccgcggtacaacgacacggccgcggtggccaacttctcggccatgttccggagcctcgcgagcgcgcggtacccggcgcgcgtgccgcggaccgtggaccgcaggttcttcttcaccgtcgggctgggcgcggacccgtgccggagccgcgtcaacggcacgtgccagggccccaacggcaccaggttcgccgcgtccatgaacaacgtgtccttcgccatgcccaggaccacctccctcctgcaggcgcactaccagcgccgctacagcggcgtgctcgcggccaacttccccgccgtgccgcccacgcgcttcgactacaccggcgcgccgcccaacaacacgttcgtcacccacggcacccgggtcgtgccgctcagcttcaacaccaccgtcgaggtggtgctgcaggacaccagcgtcctgggcgccgagagccacccgctgcacctgcacggctacgacttcttcgtcgtcggcacgggcttcggcaactacgacgccaccaacgacaccgccagatacaacctcgtcgacccggtgcagcggaacaccgtcagcgtccccaccgccggctgggtcgccatccgcttcgtcgccgacaaccccggcgtgtggatcatgcattgccacctggacgtgcacctgacctggggtctggcaatggcgtggctcgtcaacgacgggccgctgcccaaccagaagctgccacctccaccgtccgatatccccaggtgttgatacaatcacgagacattagtctgcagtggttttgatccgtgcacgcgcacatggcggaaccgactcaaatcgattggcctgtgcaacgcgaattttgtgatgatgtctggttttgtcgctgcactgtttcggagacatacaagatccgtaaaagcaagtttattggggtcatgtgtcgttgcgccatttttcttttttttaacgattgtttcatcgcaacttttgtttttttaatgctggacattgttagtgcgtccagtgtgtaaggtatatgttacatatataatgtatcagtcgattggaccagctaatgattcttttttatcaaaaaaaaaaa

SEQ ID NO: 2489 - DNA, 1635 bp, Sorghum bicolor
atggcaacggtgacgcggctgtgcgtgacgaagagcatccccacggtgaacggccggttcccggggccgaggatcgtcgtgcgcgagggcgaccgcctcgtggtgcaggtccacaataacatcaacaacaacgtcacgttccactggcacggcgtccggcagctgcgcagcgggtggtcggacggtccgtcgttcatcacgcagtgcccgatccgtcccgggcagagctacgcctacgacttccgcatcgtggggcagcgcggcacgctgtggtggcacgcgcacttctcctggctccgcgccacgctctacggcccgctcgtcatcctcccgccgcgcggcgtcccctacccgttccccaagccccacgccgaagtgcccctcatgctcggcgagtggttcaacgccgacccggaggccgtcatcaagcaggcgctgcagaccggcggtgggccgaacgtctccgacgcctacaccttcaacggcctgcctggcccgacctacaactgctccggcggcggcgccggcgacacgttcaagctgagggtcaagcccggcaagacgtacctgctgcggctcgtgaacgcggcgctcaacgacgagctcttcttcgcggtcgccaaccacacgctgacggtggtgcaggcggacgccagctacgtgaagccgttcacggccgacacgctggtcatctcgccggggcagaccatggacgtgctcctcaccgcggccgccgcgaccgccccttcctcgaccgccgcctacgccatcgccgtcgcgccctacaccaacacggtcggcacgttcgacaacaccacggccatcgccgtcctcgagtactacggcgcgccgccgcagagcgccgcggcgctccggaacctcccgctccccgcgctgccgctgtacaacgacacaggcgcggtggccaacttctcggcgaagttccggagcctcgcgagcgcgcagtacccggcgctggtgccgcggacggtggaccggaggttcttcttcgccgtcgggctcggcgccgacccgtgccagagcagggtgaacgggacgtgccaggggcccaacggcaccaggttcgcggcgaccatgaacaacgtgtcgttcaccatgcccaagacgtcgctcctccaggcgcactaccagcggcggtacagcggcgtgctcacggccaacttccccggggtgccgccgacgccgttcaactacacggggacgccgcccaacaacacgttcgtcacgcacggcaccagggtggtgccgctcagcttcaacaccaccgtcgaggtggtgctgcaggacaccagcattttgggcgccgagagccacccgctgcacctgcacggctacgacttcttcgtcgtcggccaggggttcggcaactacgacgccggcaacgacacggccaagtacaacctcgtcgacccggtgcagcggaacaccatcagcgtgcccaccgccggctgggtcgccatccgcttcgttgccgacaaccccggcgtgtggatcatgcattgccacctggacgtgcacctcagctggggtctggcaatggcgtggctcgtcaacgacgggccgctgcccaaccagaagctgccgcctccgccgtccgatatccccaggtgttga

SEQ ID NO: 2490 - DNA, 2729 bp, Zea mays; identical to SEQ ID NO: 888

SEQ ID NO: 2491 - DNA, 2883 bp, Oryza sativa Japonica Group
tttcaccagtcgctagctcaagcctctaaacccttcttctccccagctcaccccgttcgccgccgccgacgccgctcgccgggggctatcgccatgtcgccggccgccgcctcaccggatgatcgcatccggagctacgaggatttcgcgagggtgcacgcgtacctgctggccgcatccgggatcccgccgtcgctgcaccagcggctttaccgcaagctcgccgacgaggtgttcgacggcggggaggccttctcggtagagccctgcgagggagggaggcagcggaggctcgttctcgccgctgagtggactctagggagggagtccgatgtcttcctcgtcgaccacgcctggtccttccgcctctccgatgcgcttaagcagttgagggaagtaccaggactggctgaaagaatggcagcattgatgtgtgtggatctggacgagagaactgaacttgaagaagcagatgaacaggacaatgggaatggagggagtttggagagtgccttggaggtagttgagaaagaaaggactagaatccaggagaagggaagtgactttgcagcatggctggaacttgaggagcttggaattgatgatgacatgctaatagctttggatctatcttcaaaatttccgaatatggtagccctcaacctatggggaaacaagcttcaggatccagagaaaataatgaaaggaataggggaatgtagaaggctaaaggcactttggttgaatgagaaccctgcactgaaggaaggtgttgacaaagttattcttgacggtctacctgaattggaaatatacaattcacattttacgaggaaagctggagaatgggctttaggtttctgtggggatattattggagcagacaatccctgttcctcagcggaaagcataccattggagaatattgcgtctctcgatctctcagataggtgtatccacaaactaccagtggtgttctctcctagaaaactttcctccctgttgagcttgaacatccgtggtaatcctttggatcaaatgtccagtgacgatctcttgaagttaattagtggatttacccagttacaagagttggaggttgatattcctggctctcttggaaacagtgctatttccattcttgagtgtcttcctaatctatctttgctaaatggtatcaatgtggcaagtataatagagagtggtaagcatataattgattctgcacttaaaccacgtctgcctgaatggtcaccacaagaatcccttcctgaaagagttattggtgcaatgtggttatatcttatgacataccggcttgctgatgaagaaaagatcgatgaaacacctgtttggtatgtcatggatgagctgggttcagctatgcgccacagtgacgatgcaaacttcagaatagcacctttcctgttcatgcccgatggtaaactagcttctgccataagttacacaattttgtggcctgttcatgatgttcatactggagaagagtgcactcgtgatttcttgtttggtgttggcgaggacaaacaacgctcggctaggcttacagcctggttccacacaccagagaattattttatccaggaattcagaaagtacaaggaacaacttcaatcaagcagtatctgtccttcaagaaaagtaacaccggtgaccaaaagtatccgtccaagtgatggccatgcacttcgagtatttaccgacataccccaagtagaggagtttctaacacgtccagaatttgttctcacatctgatccaaaggaagctgacatcatttgggtaagcatgcaagtggattcggaattaaagaatgcactaggacttacagaccaacaatatacaaatcaatttcctttcgaagcttgcctggtcatgaaacatcacttggcagagactatccacaaggcatggggttcacctgaatggcttcaacctacgtataacctggagacacatttatctccactcattggagattactgtgtgagaaagagagatggtatggataacttatggattatgaagccttggaatatggcaagaacaattgacactactgttactggtgatttatctgctatcattagactcatggagacaggtcccaaaatatgccaaaaatatatcgaatgccctgcacttttccaaggaaggaagtttgatctgcggtatattgttttcgtccgcagtatatgccctttagagatatttctttctgatgtgttttgggttaggttagcaaacaatcagtacactctggagaaaacaagcttttttgaatatgaaacccatttcaccgtgatgaattatattggaaggatgaaccatatgaacacaccagagtttgtcaaggagtttgagaaggagcaccaagttaaatggctggagatccatggacgcatacgggatatgatacgatgtgtctttgagtcagccacagctgttcatcctgagatgcagaacccgttctctagggctatctatggggttgatgtcatgcttgataataaattcaatccgaagattttggaggtgacatattgtccggactgcacgagggcatgcaaatatgacactcaagctctcgtgggaagccagggtgtcatcaggggcactgaatttttcaatacagtgtttggctgcctctttctggacgagcttaaagatgtatcgccgctgtaatcaccacaacaaggttgctgtaacaccgaagttcaacacaatacacgcacatgtgagttgtgatcctgtcgttttatatgccatacatatcaaatttgctcagtacaattacaaagggggtgtgatgctgcctcctgcctgtaccatgcttcggatcagattgaaatgagcttgacg

SEQ ID NO: 2492 - DNA, 2273 bp, Zea mays
cttctccccactccgccctcggacccgccgccgccgccgcttgccgggtctatagccatgtcaccagcggttgcctctgcctcatctggcgaccgcatacgaacctacgaagacttcgtgcgggtacacgcgtacctgctggccgcggcgggcatcccgccgtcgctgcaccggaggctgtaccgcaagctcgcggacgaggtcttcgacggcggggaggtctttgccgtagagccgtgcgaggacgggaggcagcggcgcctcgtgctcaccgccgatcagtctctaggaaaagagtccgatgtcttcctcgtcgaccatgcgtggtccttccgcctccctgatgcgctcaagcagttgagggaagtaccaggattggctgaaaggatggcagcattaatgtgtgtcgatttggaccgcaagattgaagcagatgagcaggatgatgacgagagtgggagcttggagcatgtatcgcaagtagtcgagaaagaaagggctagagttcaggagagaagtgattctacagcttggctggaacttgaagaacttggaattgatgatgacatgctagtagccttggatctatctgcaaattttccgaatctggtagctctgaacctatggggaaacaagctgcgggatccagagaaagttatgcaagaaatcaggaagtgcacaaagctaaaggcactttggttgaacgagaatcctgttcttggcaaaagtattgacaaagctgttttcgatggcctctctggattggaaatatacaattcacattttacaagtaaagccggagagtgggcactaggtttttgcgcagacattgttggagcagataatccctgttcttctgtggaaagcacattgtttgggagcattgggactattgacctttctgatagatgcattcacaagctaccagaggtgttctctcctagtaaattgccatctctgtcaaaattgaacattcgtggtaatcctctggatcaaatttctggcgatgatctcttaaagctatttggtggattcactcagttacaagagttggaggttgacattcctggccctctgggaaacagtgcaatctccattcttgagtctcttcctaatttatctttgctaaatggcgtggattcctcaagcataatagagagtgggaagcatatagttgactctgcacttgaaccacggcttccagaatggtcacctgaagaaccccttgctgaaagagttattggcgcaatgtggttgtatcttatgacataccggcttgctgatgatgaaaagattgacgaaacacctgtttggtatgtcatggacgagttgggctcagccatgcgccacagtgataatgcaaacttcagaatagctccattcttgttcatgccagaagggaaactgcacactgctataagttacacaattctgtggcccactcatgatgttcatactggagaagagtgtacccgggatttcttgtttggtattggtgaggataaacagcgttcagctaggcttacagcttggttccgcacacctgagaactactttattcaggaattcaggaggtaccaggaacagcttcaatcaaatagcatttgttcttcgacaaaaatagaagagacacagacaccctcaaccaaaagtgtacgctcaagggatggtcgcgtccttcgagtatatactgacatacctcatgtagaggagtttttaacacggccagaatttgttctcacgactgatccaaaggaagctgacatcatctgggtaagcatgcaagtagattcagaagtaaagaatgctgtagggctcacagaccaacaatacacaaaccaatttccttttgaagcttgcctggtcatgaagcaccaccttgcggagaccgtccacaaggcttggggctcacctgaatggcttcaacctacatataacctggaaacccatttgtctccactcattggtgattattgtgtgaggaaacgagatggcatggacaatttatggatcatgaagccttggaacatggcgagaacaatcgataccacagttactggtgatttgtctgctatcatcagacttatggagacaggccccaagatatgccaaaaatatattgaacgccctgcacttttccaaggaaggaagtttgatcttcggtacattgttttagtccgtagtatccgccctttggaaatatttctgtctgatgttttctgggtatgacctgaaattctgatgatacttgataaatccctttggccattatc

SEQ ID NO: 2493 - DNA, 2882 bp, Hordeum vulgare subsp. vulgare
gaggggttaagaaacatctaaaccctccttctccccccaaccgccgccgccgcggtgaactatcgcgatgtcgcccgctgccgccgcccccgcgccacgcgatgaccgcatccgcagcttcgaggacttcgcgagggtgcaccagttcctgctgattgcggccggcgtgccgccgtcgctgcatcggcggctgtaccgcaagctcgccgacgaggtgttcgacggcggggagagcttctccgtcgagccctgcgaggaagggaggcagcgccgcctcgtgctcgcctccggggcgcctcttgggagcgaggcggacgtcttcctcgtcgaccacgcgtggtccttccgcctctccgatgcgctcaagcagctacgtgaagtaccaggattggccgagagaatggcagctctaatgtgcgtggatctggataggagaattgaggtcgaagaggcagatgagcaagacagtgaaaagggtggtggtttggagcatgtcttgcaggttgtggagaaagaaaggattagaatccaggagtcgggaggtgattttgcagcatggctggagcttgaggagctcggaatcgatgatgatatgttagttgcactggatttatctgccaattttccgaatctggtagccctcaatctatgggggaacaagctgcaggatccagaaaaagtaatgcgagaaatcggaaagtgtggaaggttaaaggcactttggttgaatgagaaccctatccttaaccaatgcactgagaaagatgttcttgatggtcttcctgaattggaaatctataattcacattttacaatgaaagctagagagtgggctttaggtttctgcggagatatgattggagcagaaaatccctgtttgtctgtgggaaacataccattggataatattgtgactcttgacctttctgataggtccatccacaaactacctgaggtgttctcctctagtaaactgtcatctctttcaaagttgaacatccgtggcaatcctttggaccaaatgtctggcgatgatctcttgaagttatttagtttgtttacacagttacaggagttggaggtagacattcctggccctcttggaaacagtgcaatttccattcttgaatctcttcccaatataactttgctgaatggtgtcaatgcgtcaagtatagttgagagcgctaagcatgtagtggactctgcacttaaaccacgtgttccagaatggtcacctgaagaatccctggctgaaagagttattggtgcaatgtggctgtatcttatgacctaccggcttgctgatgaagaaaagtttgatgaaacacccatttggtatgtcatggatgagttgggctcagccatgcgccatagtgatgatgctaactttagaatagctccttttttgttcatgccagaaggaaaattatcttctgctataagttacacaattctgtggcctatttgtgatgttcatactggagaagaatgtacccgagatttcttgtttggtattggcgaagacaaacaacgctcagctaggcttacagcttggttccacacaccagagaactattttattcaggaattcaggaagtaccaggagcagcttcaatcaactagtatttgtcctacaaaagagacgccctcaaccagaagtgtacgtccaagtgatggccgtccacttcgagtatttactgatataccccaagtagaggagttcttaacacgcccagaatttgttctcacaactgatccaaaggatgcagacatcatctgggcaggcatgcaaattgattctgaattaaagagttcactaggtctcacagaccaacagtacatgaatcagtttccttttgaggcttgtctggtcatgaagcaccacctagcggataccatccacagggcatggggctcacctgagtggcttcaacctacatataacctagagacccatttgtctcaactaattggtggatactctgtgaggaaacgggatggtatggataacttatggatcatgaagccttggaatatggcaaggacaattgataccactgtcagtggtgatctatctgcaatcatcagacttatggagacgggtcccaagatatgccaaaagtatattgagtgccctgcgcttttccaaggaagaaagtttgatctccggtacattgttttggtccgcagtatatgccctttggatatacttctttgtgatgttttttgggtcaggttagcaaacaatcagtacactttggagaaaactagcctttttgagtacgagacccattttactgtgatgaattataatggaaggatgaaccatatgaatactccagagttcgtcaaggagtttgagaaggagcatcaagttaaatggctggagattcatgaaagcatacgtgatatgataaggcgtgtctttgagtcaacctcagctgtccatcctgagatgcagaattcattctgcagggccatttatggcgttgatgttatgcttgataatagattcaagccaaagattttggaggtgacatattgtccggactgcacgagggcgtgccaatatgacacacaagctctcgttggaagccagggccccatcaaaggcagtgattttttcaacacggtgtttggctgcctctttctcgacgacttgacgaatgtgtcaccactgtaatagtcttgtcgaaaagctgttgtaacaccaatgttcttgcaccttgagatggattagggatgttgtacgttcatgcatcaaggaactgacatccatgaaaggatagggcacccgtgaactctgaaatgatattgtgagtgaagcttaagatggaatttgcttgtgttgcttaataaatattgctgcttccgattct

SEQ ID NO: 2494 - DNA, 1345 bp, Sorghum bicolor; identical to SEQ ID NO: 889

SEQ ID NO: 2495 - DNA, 1435 bp, Oryza sativa Japonica Group
atcgatctcccccgccgccgccgccttctggcttctccctccgactccgatccgccgccgccgcctccctacctccatctccatctccatgaccgcctgcgcctcctcctactcaagtccggtccggcaacaacctccttcactcataaagcccggaaactactgagacctcctctttcacatctcaaacagagttcatgggtagtacagctgcagcgggtggtaacctgcgaaccgccctctcgtactgtgtgcagcaagttcgcaactatgattatcaccactatctctgccttctccacctacctccagctatgcgcaaggctgcattcgccttccgagccttcaacattgagacggcaaaggccatggatgttgtctcggaccctaagactggccttatgcgcctcctctggtggaaagatgtagtcgacaaggtctttgcaaacaagctggttgagcaccctgttgcccaggtgctctcttctgttgtgtccgagcacaagattagcaagcattggctcaagaggtctgtggaggcaaggataaacgatgcaaaccgggatgattatgccattcctgagacaatttctgaattggagaggtatgcagaggacacccaatctaccatcctttacatgacgttgcaagctggtgggatacagtcaactatcgctgatcatgccgcctcacacataggcaaagctagtgggctgctactgctactcaaggctttgcctcaccatgtgagtaagcaagggaggataccgtatatcccagcaagtatagctgaggagtgcggtctgcttacacgggaaggtggccgatcagaggtcaggatgggagatgagctcccagatgcagttttcaaggttgcatctgttgctgatgctcacctgcagaaggcgcgggagctggcctcttctgtgccagcggaagcaatccctgtactcctcccaggggtaccagcccaggtccttctggactccttacgacgccgtgaattcaacgtctttgattcacggttgtcaaggggagttcatgggatatctcctttgtggtaccagataaagctcatctggcactcggtgcggaagaagtactgactaactcatccacacaagcacccataaagagctcgggttagttgtgtgtctttttttttaccaaaatgcaataaggttgataaacagattgaaaaactctgacttgttggttggtgcatgtatctgagcaatgtcgatgtacgttcctctctaggatacacaagtgttgttcgaattgttcgttttgtttgcgatccgtttttgcacgaagcagaggaatgtaacagggtggatgctgtttttttctttctgttgagtttgttgtgcaattgcttgccaacgagctactggctttttatgcttgctaagcattggtcatattcacctag

SEQ ID NO: 2496 - DNA, 1204 bp, Hordeum vulgare subsp. vulgare
gaagtccacacccacatccgcctcctcctcccctgctctggtgatctgcgctgctccggtggtctccgccgccacgtgtcttatacacgcctggaggggaactcatgagcgggggcaccgcagcgagtgccagcctgcggacagccctgtcgtactgcgtccagcaggtccggagctatgactaccacaactacctctgcctgctccacctgccgcccgcgatgcgcaaggccgcgttcaccttccgggccttcaacgtcgagacggccaaggccatggacgtcgtctccgacccccgcaagggcctcatgcgcctcctctggtggaaggacgtggtcgacaaggtctacgccaacaagacggtcgagcaccccgtcgccctcgcgctctcctcgctcctctccgagcagaaggtcagcaagcactggctcaagcggtcgctggaggcaaggataaacgacgggaaccgggacgacgacgccattcctgagaacatcccggagctggagaggtacgcggaggacacccagtcgaccatcctgtacatgacgctgcaggctggtgggatacagtccactattgctgatcatgccgcctcgcacatcggtaaggccagtgggctgctgctgctgctcaaggcgctgcctcaccatgtcagcaagcaagggaagataccgtacatcccggccagtgtggccgaggagtgcgggctgcttgcacgggagggtggccggacagaggtcaggatgggcgatgcgctcccggatgcagttttcaaggttgcgtctgttgccgaagctcacctgcagaaggcacgggagctggcagcgtctgtgccagcagaggcggttcccgtgctccttccagccgtgccggcccaggtccttctggactccctgaggcgccgagaattcaacgtcttcgactcgcgcttgtctagtggagtccatggcatatcccctctgtggtaccagctaaagctaaactggcatgcgtggcgaaacaagtactgaattcatccatactgtgcgaaccgtgtttgttgaaagcgcaggtcagcgggcgttttagctcagactgaacccagggtatccatttactggaatgtaataagcttgataatgaagaaaggctctgctgcctgctccaactggctgtttctgagcaattttgataattgatatagcttcctttttcattggac

SEQ ID NO: 2497 - DNA, 1827 bp, Zea mays
atcttcgttctctgatgccatcccggcgacgccccggctcccagcgactctaaccctagcctctcgagctcctccccaacgccatcgctcgtccgccatcgccacgagctccttcgccgttgtcgtcgctcgtccccatgagctccccatccccacggctcccaacgactctccatctagcaaagcagtacataaaggtaacagccacctgatcctccatccccacgagctcgtctgtcgtcgccacctaatccacatcgagctctccgacgtcgtccccttccactcgacaagggaccttccttcctgatacaggaaggcagggttcatgagtggcggcacgcctgcagcaaggaaaaatttgctattttgccactctcaattttggctgcctgttattatgccatcccgtgtctatgactggtgggaccgtctgtgtctatgatttgtgggtccgatggcatactggcgaagcccacaaatgataatggcaaaattgccaatggctcctgcagcaagcagtagcctgcggacagcactctcatactacgtgaggcaagtccgcgcctatgactaccaccactacctctgccttctccacctggccccggccgtgtgcaaggccgcgttcaccttccgcgccttcaacatcgagacagcaagggccatggatgtggtgttcgacccccgagccggcctcatgtgcctcctctggtggaaggagggggtcgacaagatctttggcaacaagctagtcgagcacccagttgcccaggcgctctcttcgatcatcgcagaccacaaggttagcaagcactggctgaagcggtccgtggaggcgaggatcaacgacgccaaccgtgaggaaggcaccattcctaggacgagcgtgaagttggagaggtatgtggaggacacccagtccaccatcctttacatgaccttgcaggctggcagaatacagtccaccgtggctgaccacgccgcctctcacatcggcaaggccagcgggcttctgttactgctcaaggcgctgccgcaccatgtaaataagcaagggacggtacattatatcccagctagtgtggccgaggaatgcggcctgctcatcacacgggagggcggcaggtcggaggtcagggcaggcgagaggctgctagacgtagttttcaaggtcgcatctgttgcggaggctcacctgcataaggcgcgagagttggcaccgtccgtgcccaaagaggcgatccctgtgctcctcccagccttgccggcccaggtcctcctggataccctgcgaaggtgtgagttcaacgtgtttgatccttggctgtcgaggggagtccacggggtctctcctctgtggtaccagctgaagcttaactggaacgcgtggcgaagcaggtactaatgaggaggaggaaccttttgccctcagccatgggagctgttgctgttccttgtagcaaaaagctttttattgggggtttttgacataacagagattgaataactacttgcggcagatttgaagctgttagggtttagggttattcaattgtgccatgggagctgttgctgttccttgtagcaaaaagctttttattggtggtttttgacatagcagagattgaataactacttgcggcagatttgaagctgttgaatatgtgtcgtgcttttcgttgtgtttgtgggctgggctcatttacattgcacaattgcaacactgacagtgactgttttatttttcttttggaacatacaatgcctgtttgtattaatacagcagaaagcagacaatattttttgataaaaaaaaaaaaaaaa

SEQ ID NO: 2498 - DNA, 1450 bp, Zea mays
ccggcgaccgacgcctcccgaccatcctcccaacgactagcgtcaggcaccccagcctcgggcgccgcgaagctattagccccgtggacgcggcggcggcggcggctccggctgccacaccaacacagacaggcaatggctaggcaaggcgcaagaagaggaggggaagtcgaaaataatttagcagcggaagcggaagcagcagcacgaggtgggtggggcagcggcagcgggggaccttccttcctgatacaggaaggcagggttcatgagtggcggcacgcctgcagcaagcagtagcctgcggacatcactctcatactacgtgaggcaagtccgcgcctatgactaccaccactacctctgccttctccacctggccccggccgtgcgcaaggccgcgttcaccttccgcaccttcaacatcgagacagcaagggccatggatgtggtgttcgacccccgagccggcctcatgcgcctcctctggtggaaggagggggtcgacaagatctttggcaacaagctagtcgagcacccagttgcccaggcgctctcttcgatcatcgcagaccacaaggttagcaagcactggctgaagcggtccgtggaggcgaggatcaacgacgccaaccgtgaggaaggcaccattcctaggacgagcgcgaagttggagaggtatgtggaggacacccagtccaccatcctttacatgaccttgcaggctggcggaatacagtccaccgtggctgaccacgccgcctctcacatcggcaaggccagcgggcttctgttactgctcaaggcgctgccgcaccatgtaaataatcaagggacggtacattatatcccagctagtgtggccgaggaatgcggcctgctcatcacacgggagggcggcaggtcggaggtcagggcaggcgagaggctgctagacgtagttttcaaggtcgcatctgttgcggaggctcacctgcataaggcgcgagagttggcaccgtccgtgcccaaagaggcgatccctatgctcctcccagccttgccggcccaggtcctcctggataccctgcgaaggtgagttcaacgtgtttgatccttggctgtcgaggggagtccacggggtctctcctctgtggtaccagctgaagcttaactggaacgcgcggcgaagcaggtactaatgaggaggaggaaccttttgccctcagccatgggagctgttgctgttccttgtagcaaaaagctttttattgggggtttttgacatagcagagattgaataactacttgcggcagatttgaagctgttagggtttagggttattcaattgtgccatgggagctgttgctgttccttgtagcaaaaagctttttattggtgttttttgacatagcagagattgaataactacttgcggcagatttgaagctgttgaatatgtgtcgtgct

SEQ ID NO: 2499 - DNA, 1861 bp, Zea mays
gtttgtagatggttctaggtctctcctcgtaccagcgtctccaaatctcacgctctctcctcctccccatctccaatctcgcactctcctctcccaaaaaacctcatcttccccgctcgtctgcattctcggccatcggcggcgctccagagttccaggccaggagaagctagagttacaaatcgtagtccgtgagaaccagttgaatttcatcaatcttatcaggtcatctcaagttcagtgactctcaaccagcctacaacgacggaaaggaagttggcaccttcaagggtcctcaaacattgctgcaccggacgttgtgtcgtgtatcattgaatgaagcacacctaggttagcaaaggcatgccagattctacatgttccaagaatgacaacatttagtccatcctgaaatacatcaagatccatgcccttcgcggtgcgcctccgatggccagccgtcgtcaccgcgctctaactctccggtgcgcggtaatggcctccctagcaatcaccacatcaggtggtctcccttcctcagtcgcccatcccaccttctaggctgctagagaccttccttcctgatataggaaggcagggttcatgagcggcggcacgcctgcagcaagcagtagcctgcgggcagcactctcatactgcgtgaggcaagtccgcgcctatgactaccaccactacctctgccttctccacctggccccggccgtgcgcaaggccgcgttcaccttccgcgccttcaacatccagacagcaagggccatggatgtggtgtccgacccccggaccggcctcatgcgcctcctctggtggaaggaggcggtcgacaaggtctttggcaacaagctggtcgagcacctagttgcccacgcgctctcttcggtcatcgcagaccataaggttagcaagcactggctgaagcggtccgtggaggcgaggatcaacgacaccaaccgtgaggaaggcaccattcctgggacgagcgcggagttggagaggtatgcagaggacacccagtccaccatcctttacatgaccctgcaggctggcggaatacagtctaccgtggctgaccacgccgcctctcacatcggcaaggccagcgggcttctgttactgctcaaggcgctgccgcaccatgtaaataagcaagggacggtacattatatcccagctagtgtggccgaggaatgcggcctgctcatcacacgggagggtggcaggtcggaggtcagggcgggcgtgaggctgccagacgtagttttcaaggtcacatctgttgcagaggctcacctgcacaaggcgcgggagttggcatcgtccgtgcccaaagaggcgatccctgtgctcctcccagccttgccggcctaggtcctcctagataccctgcgaaggtgtgagttcaacgtgtttgatcctcggctgtcgaggggagtccacgaggtctctcctctgtggtaacagctgaagcttaactggaacgcgtggcgaagcaggtactaatgaggaggaggaactttttgccctcaaccatgggagctgctgttgttccttgtagcaaaaagctttttattggggggtttttgacatagcagagattgaataagatgagtagggtctgctacttgcagcagatttgaagctgttgaatatgtgtcgtgctttctgttgtgtttgtgggttgggctcatttacattgcacaattgcaacactgacaatgcctattttatttttgttttggaacatacaatgcctgtttgtattcatacagcagaaagcagacactatttttttgataaactcaattagttactctatagtttataaaattcctgttttcggttc

SEQ ID NO: 2500 - protein, 1615 aa, Canis familiaris
MPEPSTTEGRRIQGELKNLLEGAAVRRTESSASRRQGYPSEPHAATSRFVREASVYTGRTRNTAPAAPGRLSNEHHHRDRRAHLDERVRRGYHPRHGGRYDSGEDRSPSPEPPGTQAFSRAIRRAPFPTRFRPPTTITKYSGETRPELWLADYRLACQLGGTDDDNLIIRNLPLFLSDTARAWLEHLPPGQISNWDDLVQAFAGNFRGTYVRPGNSWDLRSCRQQPGESLRDYIRRFSKQCTELPNITDSDVIGAFLAGTTCRDLVSKLGRKTPTRASELMDIATRFASGQEARGAKKKGKKKSQAKRDAADADLVAVAEYKNPRKPPGGANLFDKMLKELCPYHQGPVKHTLEECVMLRRYRAGPPAEGDRARDDDKKEDHQAGEFPEVRDCFMIYGGQAANASARHRKQERREVCSVKVAAPAYLDWSDKPITFDRADHPDHVPSPGKHPLVVDPVIGDVRLTKVLMDGGSSLNIIYAETLGLLRVDLSSVRAGAAPFHGIIPGKRVQPLGQLDLPVCFGTPSNFRRETLTFEVVGFRGTYHAVLGRPCYAKFMAVPNYTYLKLKMPGPNGVITVGPTYKHAFECDVECVEYAEALAESEALIADLESLSKEVPDVKRHAGNFEPAETVKFVPLDPSGGASKQIQIGSRDVVEHSLDIRAGARPVKQPLRRFDEEKRRAIGEEIHKLMAAGFIKEVFHPEWLANPVLVRKKGGKWRMCVDYTGLNKACPKVPYPLPRIDQIVDSTAGCETLSFLDAYSGYHQIRMKESDQLATSFITPFGMYCYVTMPFGMRNAGATYQRCMNHVFGEHIGRTVEAYVDDIVVKTRKASDLLSDLEVTFRCLKAKGVKLNPEKCVFGVPRGMLLGFIVSERGIEANPEKIAAITSMGPIKDLKGVQRVMGCLAALSCFISCLGERGLPLYRLLRKAECFTWTPEAEEALGNLKALLTKAPILVPPAAEEALLVYVAATTQVVNAAIVVERQEEGHALPVQRPVYFVSEVLSETKIRYPQVQKLLYAVILTRRKLRHYFESHPVTVVSSFPLGEIIQCREASDGIAKWAVEIMGETISFAPRKAIKSQVLVDFVAEWVDTQLPTAPIQPELWTMFFDGSLMKTGAGACLLFISPLGKHIRYVLRLHFPASNNVAEYEALVNGLRIAIELGVRRLDASGDSQLVIDQMEAYCDEVRRLEDKFYGLELNHIARRYNETADELAKIASGRTTVPSDVFSRDLHRPSVKIDDTPELRRDVHVEGEQSGVTPDRNWQTPYLQYLHRGELHLDRAELYHRSPSSILQRCISIAEGQELLREIHSGACGHHAAPRALVGNAFRQGFYWPTAVADATRIVRTCEGCQFYARQTHLPAQALQTIPITWPFAVWGLDLVGPLQKAPGGYTHLLVAIDKFSKWIEVRPLNSIRSEQAVAFFTNIIHRFGVPNSIITDNGTQFTGRKFLDFCEDHHIRVDWAAVAHPMTNGQVERANGMILQGLKPRIYNDLNKFGKRWMKELPSVVWSLRTTPSRATGFTPFFLVYGAEAILPTDLEYGSPRTRAYTDQSNQASREDSLDQLEEARDKALLHSARYQQSLRRYHARGVRSRDLQVGDLVLWLRQDARGRQKLTPP

SEQ ID NO: 2501 - protein, 2003 aa, Zea mays
MGSLQQPFQPGTVLRFGSLEFMSLDGSYDMILLPPPCDSDNGGRQPARRRRNRRSLPRVVEEQHSSSPRPLPRRRRRRRGNQGQAGGGTSSAVERVNGADAPTGGTSGIDLAFETKTSAVSPQHANSKQTDNASTLAKGLLGVTLVPETTVQSVPDVTSSPPVDQEVPTDSHLTPFGFSLDPPSDFTLADTLIEASPNPLGLGNPSAMRDFMTACDYCLSDCSDGSRSLDDEDCGPSHECFHVDLGGPSEGNHLGMPENGDLPRPVPRVDILRELAVVPVQAGGHDPQLEQIRGVQAGLDEGAGTLELIRQDIGQEWAGQPPAREVHHLPQGIQHRIADDVKVRPPPASSGVGQNLAAAAMLLRAMPEPSTTEGRRIQGELKNLLEGAAVRRAESFASRRQGYPSEHRATTSRFMREASVHTGRTRDTAPAAPGRLGNEHHHRNRQAHLDERVCRGYHPRRGGRYDSGEDRSPSPEPPGPQAFSRAIQRASFPTRFRTPTTITKYSGETRPELWLVDYRLACQLGGTDDDNLVIRNLPLFLSDTARAWLEHLPPGQISNWDDLVQAFAGNFQGMYVRPGNSWDLRSYRQHSGESLWDYIRRFSKQRTELPNITDSDVIGAFLAGTTCHDLVSKLGRKTPTRASELMDIATKFASGQEAHKNPRKPPGGANLFDKMLKESCPYHQGPVKHTLEECAMLRRHFHRARPPAEGGRAHDDDKKEGHQAGEFPEVRDCFMIYGGQAANASARHRKQERREVCSIKVAAPVYLDWSDKPITFDQADHPDHVPSPGKYPLVVDPIIGDVRLTKFLMDGGSSLNIIYAETLGLLHVDLSSVRAGAAPFHGIIAGKRVQPLGQLDLPVRFGTPSNFRRETLTFEVVGFRGNYHAVLGRPCYTKFMVVPNYTYLKLKMSGPNGVITVGPTYRHAFECDVECVEYAEALAESEALIADLESLSKEVPDVKRHAGNFEPKETEAVLVDFLHVNADVFAWSPSDMPGIPRDVAEHSPDIRAGARPVKQPLRRFDEEKRRAIGEEIHKLMAAGFIKEVFHPEWLANPVLVRKKGGKWRMCVDYTGLNKACPKVPYPLPRIDQIMDSTAGCETLSFLDAYSGYHQIRMKESDQLVTSFITPFGMYCYVTMPFGLRNAGAMYQRCMNHVFGEHIGRMVEAYVDDIVVKTRKASDLLSDLEATFRCLKAKGVKLNPEKCVFGVPRGMLLGFIVSKRGIEANPEKIAAITSMGLIKDLKGVQRVMGCLAALSRFISRLGERGLPLYRLLRKAECFTWTPEAEEALGNLKALLTNAPILVPHAAGEALLIYVAATTQVVSAAIVVERREEGHALPIQRPVYFISEVLSETKIRYPQIQKLLYAVILTRRKLRHYFESHPATVVSSFPLGEIIQCREASGRIAKWAVEIMSEAISFVPRKAIKSQVLADFVVEWVDTQLPTVPIQPELWTMFFDGSLMKTGADAGLLFISPLGKHLRYVLRLHFPASNNVAEYEALVNGLRIAIELGMEAYRDEVRRLEDKFYGLELNHIARRYNETADELAKIASGRTTVPPDVFSRDLHQPSVKINDTPEPEAPSPEPEAPSAQPEVPSSQSEAPSARPEAPLAQPEVPSAQSEPPSARPEAPSARPEAPSVQPEVPSTPEGEALRVEEERSGVTPNRNWQTPLYISTEESYPSTEPKLGGWRDAPSRSSCWGMGRCSTTAAPQASFSDASPSPKVRSSYETYTRGLAAITQHLEPLLETPSDKKAPGGYTHLLVAIDKFSKWIEVRPLNSIRSEQAVAFFTNIIHRFGVPNSIITDNGTQFTGRKFLDFCEDHHIRVDWAAVAHPMTNGQELPSVVWSLRTTPSRATGFTPFFLVYGAEAILPTDLEYGSPRTRAYADQSNQTSREDSLDQLEEARDMALLHSVRYQQSLRRYHARGVRSRDLQVGDLVLRLRQDARGRHKLTPPWEGPFVIAKVLKPGMYKLANSQGEVYSKLGTSNSYVASTLKRLSSCSYTSLPCKV

SEQ ID NO: 2502 - protein, 1854 aa, Zea mays
MGSLQQPLRPGTVLRFGTLEFMSFDGSYDMILLPPPRDYDNGGRQPARRRRNRRRLSRVVEGQHSGSLRSLPCQRRRRRGRQGQVGGRASSAVERIDAPDAPTEGTPDVDLAFKTEASAVPPRHADPEQEDDAGALAESLQDVALEPEMTVQPVPDVTTSLLVDQKVPTNSHLASFRLGLNPPNDLVLAGALTEASATPLRFSMRSPWDRLTDVSTYGPSGSEEDDDPSIGWDFSGLGNPSAVRDFMTTCDYCLSDCSDGSRSLGDESCGPSRECFHIELGDPSEGNHLGMPEDGDLPRPVPRADIPRELAVVPAPAGGYDPQLEQVREAQARLNEGTGALEPIRRDVGQAWVGQPLAGEIRHLPQGLQHRVANDVRIRPPPASSGVGQNLATAAMLIRAMPEPSTTEGRRIQGELKNLLEGAAARRAESTASRRQGYPSEPHAATSRFMREASVYTGRTCNTAPAAPGHLGNEHHRRDRRAHLDERGTYVRPGNSWDLRSCRQQPGESLRDYIRRFSKQRTELPNITDSDVIGAFLAGTTCRDLVSKLGRKTPTRASELMDIATKFASGQEAVEAIFRKDKQPQGRPSEGAPEASAPRGAKKKGKKKSQSKRDAADADLVAAAEYKNPRKPPGGANLFDKMLKEPCPYHQGPVKHTLEECVMLRCHFHRAGPPAEGGRARDDDKNEDHLAGEFPEVRDCFMIYGGHAANTSARHRKQERREVCSVKVAAPVYLDWSDKPITFDQADHPDHVPSPGKYPLVVDPVIGDVRLTKVLMDGGSCLNIIYAETLKLLRVDLSSVRAGAAPFHGIIPGKRVQPLGRLDLPVCFGTPSNFRRETLTFEVVGFRGTYHAVLGRPCYAKFMAVPNYTYLKLKMLGPNGVITVGPTYKHAFECDVECVEYAEALAESEALIADLENLSKEVPDVKRHAGNFEPAETVKAVPLDPSGDTTKQVPYPLPRIDQIVDSIAGCETLSFLDAYSGYHQIRMKESDQLATSFITPFGMYCYVTMPFSLRNAGATYQRCMNHVFGEHIGRTVEAYVDDIVVKTRKASDLLSDLEVTFRCLKAKGVKLNPEKCVFGVPRGMLLGFIVSERGIEANPEKIAAITSMGPIKDLKGVQRVMGCLAALSRFISHLGERGLPLYRLLRKAECFAWTPEAEEALGNLKALLTKAPVLVPPADGEALLVYVAATTQVVSAAIVVERQEEGHALPVQRPVYFISEVLSETKIRYPQVQKLLYAVILTRRKLRHYFESHPVTVVSSFPLGEIIQCREASGRIAKWAVEIMGETISFAPRKAIKSQVLADFVAEWVDTQLPTTPIQPELWTMFFDGSLMKTGAGAGLLFISPLGKHLRYVLRLHFPASNNVAEYEALVNGLRIAIELGVIRLDARGDSQLVIDQVMKNSHCRDPKMEAYCDEVRRLEDKFFGLELNHIARRYNETADELAKIASGRTTVPPDVFSRDLHQPSVKLDDAPEPEVPSAQPEVPSAPEGEALNVEEGQSGATPDQDWQAPYLQYLRRGELPLDQVEARRVARRAKSFVLLGDEEELYHRSPSGILQRCISIAEGRELLQEIHSGACGHHAAPRALVGNAFRQGFYWPTAVADATRIVRTCEGCQFYAKRTHLPAQALQTIPITWPFAVWGLDLVGPLQKAPGGYTHLLVAIDKFSKWIEVRPLNSIRSEQAVAFFTNIIHRFGVPNSIITDNGTQFTGKKFLDFCEDHHIRVDWAAVAHPMSNGQVERANGMILQGLKPRIYNDLNKFGKRWMKELPSVVWSLRTTPSRATGFTPFFLVYGAEAILPTDLEYGSPRARAYTEQSNQASREESLDQLEEARDRALLHSARYQQSLRCYHARGVQS

SEQ ID NO: 2503 - protein, 479 aa, Sorghum bicolor
MDGDGATTTTAVQGGGGGSHVLLLPFPGMQGHANPMLQLGRRLAFHGLRPTLVVSRHVLSTTTSASRSSCPFPVAAISDGFDAGGISSCPDVAEYVRRMEAAGSETLAALLDAERHAGRAVRVLVYDSHLPWARRVARAAGVAAAAFMTQMCAVDLVYGEAWAGRVALPLADGGELRRSGRLAVELGPDDVPPFVAAPQWYPAFTESALSQFDGLELADDVLVNSFRDLEPTEADYLASTWRAKTIGPTLPSFYLDDGRLPRNKTYGYGVDLFSSTDHQAQAPPCPCMAWLDKQEPGSVVLASYGTVANLDAAQLEELGNGLCDSGKPFVWVLRSDEAEKLSRQLGGKCKEKGLVVPFCPQLEVLAHKATGCFLTHCGWNSTIESMATGVPMAAMPQWADQPTTAKYVESAWGIGVRMRKGLVRREEVERCIREVMEGERKDEFRQNAARWMKKAKEAMQEGGSSDKNIAEFAAKYLSV

SEQ ID NO: 2504 - protein, 465 aa, Zea mays
MDDGAATTIVQGGDAHVLLLPFPGMQGHANPMLQLGRRLAFHGLRPTLVVSRHVLSTTSTSRSCPIPVAAISDGFDDGGISSCPDTAEYVRRMEAAGSETLAGLLDAEARAGRPVRVLVYDSHLPWARRVARAAGVAAAAFMTQMCAVGLVYGEAWAGRVALPLADGAALRGRLAVELGPDDVPPFVAAPEWYPAFTESALSQFDGLEHADDVLVNSFRDLEPMEADYLESTWRAKTVGPTLPSFYLDDGRLPCDKTYGVDLFSSIDSEAAPCMTWLDKQEPCSVVLASYGTVANLNKEQLDELGNGLCDSGKPFVWVLRSNEAEKLSRQLGGRCKERGLIVPFCPQLEVLAHKATGCFLTHCGWNSTIESIASGVPMVAMPQWADQPTTAKYVESAWGIGVRMRKGSLVRKEVERCIREVMGGERKHVYGRNAARWMHKAKEAMQEGGSSDKNIAEFAAKYLPK

SEQ ID NO: 2505 - protein, 464 aa, Hordeum vulgare subsp. vulgare
MDAAVTTVQGTGGRVLLLPFPGMQGHANPMLQLGRRLAYHGLRPTLVLTRHVLSTTPISTTQCPFPVAAISDGFDAGGIASCADTAEYLRRMEAAGSDTLSRLLLADDDPVRVLVYDSHLPWARRVACEAGVAAAAFFTQMCAVDVVYGEVFAGRVALPLADGSALRGRLSVELGPDDVPPFVAAPQWYPAFTESALSQFDGLDQADHVLVNSFRDLEPMEAGYMESKWGAKTVGPTLPSFYLEDDRLPSNKTYGFNLVSSSALCMAWLDKQAPCSVLLASYGTVANLDTTQLEELGHGLCNSRQPFLWVLRSNEADKLPQELHDKCNMKGLIVPFCPQLEVLAHRATGCFLTHCGWNSTTEAIVAGVPMVAIPQWADQPTAAKYVENAWGIGLRARRDEKGLVTREEVERCIKEVMGREEYKRNSCMWMQKAKEAMQEGGSSDNNIADFAAKYLSNLEIILSC

SEQ ID NO: 2506 - protein, 447 aa, Zea mays; identical to SEQ ID NO: 1536

SEQ ID NO: 2507 - protein, 542 aa, Zea mays
MSGKTTPTKATLSRPCVLVIVMAGVERFANKGVGSNLVTYLTSVVGMSTAAAAKSVIAWNGVSFMLPLVSAVLADSAHWDRYCTIAASSLLYVLGMVALTTWALLGTRMPRSTLFFPLYLMSIGQGGYQPSLQAFGADQLSIGDDDDDGDGDTEPGASSTPEEKAKVKSMFFRWWYFGMCSGSLLGNSTMSYVQDNLGWGLGFAIPCAVMALSVAAFFCCTPLYKRHRQVQQPKGTGIRPSPSSVFNFKSVLGASRKISLPPSRSSDDNGDAISELELQEKPLKTDEASESSPDEAAAAPGVAKVILGLLPIWAILLVFAVIFQQPMTFFTKQGMLMNHTIGVGVGSGSLVIPPAMLQSSITVSIILLVPMYDRMIVPLTNAVTGGSDGITVLQRIGVGMVLSVVAMVAAALVESRRLRAEPALLSIFWLLPQYVLLGVSDVFTVVGMQEFFYSQVPASMRTTGIGLYLSVFGVGGFLGASLITLLEMATARPGNARGWFSDDPREARIDNFYWFLALLCFVSFVVFTHLCKYYNDRSASGR

SEQ ID NO: 2508 - protein, 538 aa, Sorghum bicolor
MSEKTPPPTTTTTKAATLSRPCVLIIAMAGVERFANKGVGSNLVTYLTGVVGMSTAAAAKSVIAWNGVSFMLPLVSAILADSYWDDRYCTIAVSSLLYVLGMVALTTWALLRTRMRRSTLFFPLYLMSIGQGGYQPSLQAFGADQLSIGDDDDDDTEPSATPEEKAKVKSMFFQWWYFGMCSGSLLGNSTMSYVQDNFGWGLGFAIPSAVMAISVAAFFCCTPLYKQQTQAKGSGNKPSPNSVFKVLKSILASRKISLPSRDDNGDAASELELQEKPLKAEPADDTKESSLDDEAAPGVAKVILGLLPIWAILLVFAVIFQQPMTFFTKQGMLMDHTIGVGSGSFVIPPAMLQSSITVSIILLVPMYDRMIIPLINAVTGGSDGITVLQRIGVGMVLSVVAMVTAALVESWRLRVAPAVRLTIFWLLPQYVLLGISDVFTVVGMQEFFYTQVPASMRTTGIGLYLSVFGVGGFLGAFLITALEMATARPGNARGWFSDDPREARLDNFYWFLALLCFISFVIFTHLCKYYNGKSASGR

SEQ ID NO: 2509 - protein, 589 aa, Sorghum bicolor
MGTYKCCIFFTRRFALADTSTPEDVRALFSRYAGGSPYMLADDLRRYLAAWGGADGEVPEQIIDRILQDRSRTPRFGRPALTVDDFLHFLFSEDLNPPLRHSKVNQDMNAPLSHYFIYTGHNSYLTGNQLSSDCSDVPIIKALQIGVRVIELDIWPNSSKDDIDVLHGRTLTAPVSLIKCLRSIKEYAFVASPYPVIITLEDHLTPDLQAKVAKMVLEVFGDILYYPESKHLQEFPSPEALKGRVMLSTKPPKEYLEAKGGTMKEREIEAQFKKGEREEAAWGVEVPDIHEEMQVANRNDDDLLYRERGADGDDEKKTKHVAAEYKHLITIKAGKPKGPLVDALKNDPDKVRRLSLSEQELAKVAARHGPNIVSFTHRNMLRIYPKGTRFNSSNYNPFLGWVHGAQMVAFNMQGHGRALWLMHGFYKANGCCGYVKKPDFLMQTCPDGKVFDPEADLPVKATLKVKVYMGEGWQKDFKQTHFDTYSPPDFYVKVGIAGVPLDSVMRKTKAVEDSWVPVWEEEFTFPLTVPEIAVLRVEVHEQDVSEDDFGGQTALPVAELRPGIRAVPLFDHKGLKFRSVKLLMCFEFA

SEQ ID NO: 2510 - protein, 630 aa, Digitaria sanguinalis
MPKRDKGARPRVSPPHTPPPGTESEAEGADDEAGASSAAEMGTYKCCIFFTHKFAIDDTTTPEDVRTLFSRYSGGSPYMGPDDLRRYLANWGGAGGEVAEQIVDRVLQDRSRTPRFGRPALTVDDFMHFLFSEDLNPPLRHSKVHQDMNAPLSHYFIHTGHNSYLTGNQLSSDCSDVPIIKALQLGVRVIELDIWPNSSKDDIDVLHGRTLTAPVSLIKCLRSIKQYAFVASPYPVIITLEDHLTPDLQAKVAQMVLEVFGDMLYYPESKHLQEFPSPEALKGRVMLSTKPPKEYLEAKGGTIKDREIEHQFKKGEKEEAAWGVEVPDIQDEMKVADRNEDDILFRERGLDDDDEQKTCKHVAPEYKHLITIKAGKPKGALVDALKNDPDKVRRLSLSEQELAKVASNHGPNIVSFTHRNMLRIYPKGTRFNSSNYNPFLGWVHGAQMVAFNMQGHGRALWLMHGFFQANGGCGYVQKPDFLMQTCPDGKVFDPKADLPVKATLKVKVYMGEGWHKDFKQTHFDTYSPPDFYVEVGIAGVPLDSVMRKTKAVEDNWVPVWEEEFAFPLTVPEIAVLRVEVHEQDVSEDDFGGQTALPVEELRPGICAVPLFDHKGHKFNNVKLLMRFEFT

SEQ ID NO: 2511 - protein, 551 aa, Zea mays
MLADDLRRYLAAWGGADGEVPEQIIDRILQDRSRTPRFGRPALTVDDFLHFLFSEDLNPPLRYSKVHQDMNAPLSHYFIYTGHNSYLTGNQLSSDCSDVPIIKALQLGVRVIELDIWPNSCKDDIDVLHGRTLTAPVSLIKCLRSIKEYAFVASPYPVIITLEDHLTPDLQERVAKMVLEVFGDILYYPESKHLQEFPSPEALKGRVMLSTKPPKEYLEAKGDTMKEKEIEARIKRGEREAAAWGVEVPDIQDEMQVADKDEDELLYRERGADGDDGKETKHVAAEYKHLITIKAGKPKGPLVDAIKNDPDKVRRLSLSEQELAKVAAHHGPNIVSFTHRNMLRIYPKGTRFNSSNYNPFLGWVHGAQMVAFNMQGYGRALWLMHGFYKANGGCGYVKKPDFLMQTCPDGKVFDSKADLPVKATLKVKVYMGEGWQKDFKQTHFDSYSPPDFYVKVGIAGVPLDSVMRKTKAVEDSWVPVWEEEFAFPLTVPEIAVLRVEVHEQDVNEDDFGGQTALPVAELRPGIRAVPLFDHKGLKFKSVKVLMSFEFA

SEQ ID NO: 2512 - protein, 639 aa, Oryza sativa Japonica Group
MHARCAFRLTRLRREPDAEPGRAGKQGKSVCAAKVHEGGAGAGDAQMGTYKCCIFFTRRFALSDASTPGDVRMLFTRHAGGAPYMGIDELRRYLAASGEAHVDADTAERIIDRVLQERSRTPRFGKPSLTIDDFQYFLFSEDLNPPICHSKEVHHDMNAPLSHYFIYTGHNSYLTGNQLSSDCSDIPIIKALQIGVRVIELDMWPNSSKDDVDILHGRTLTAPVSLIKCLKSIKEYAFVASPYPVIITLEDHLTSDLQAKVAKMVLEVFGDTLYYPESKHLQEFPSPEALRGRVILSTKPPKEYLESKGGTMKDRDIEPQFSKGQNEEAVWGTEVPDIQDEMQTADKHENDILYTQRDVEEDDEKKMCQHHPLEYKHLITIKAGKPKGAVVDALKGDPDKVRRLSLSEQELAKVAAHHGRNIVSFTHKNLLRIYPKGTRFNSSNYNPFLGWVHGAQMVAFNMQGYGRSLWLMHGFYKANGGCGYVKKPDFMMQTCPDGNVFDPKADLPVKKTLKVKVYMGEGWQSDFKQTYFDTYSPPDFYAKVGIAGVPSDSVMQKTKAVEDSWVPVWEEEFVFPLTVPEIALLRVEVHEYDVSEDDFGGQTALPVSELRPGIRTVPLFDHKGLKFKSVKLLMRFEFV

SEQ ID NO: 2513 - protein, 639 aa, Oryza sativa Indica Group
MHARCAFRLTRLRREPDAEPGRAGKQGKSVCAAKVHEGGAGAGDAQMGTYKCCIFFTRRFALSDASTPGDVRMLFTRHAGGAPYMGIDELRRYLAASGEAHVDADTAERIIDRVLQERSRTPRFGKPSLTIDDFQYFLFSEDLNPPICHSKEVHHDMNAPLSHYFIYIGHNSYLTGNQLSSDCSDIPIIKALQIGVRVIELDMWPNSSKDDVDILHGRTLTAPVSLVKCLKSIKEYAFVASPYPVIITLEDHLTSDLQAKVAKMVLEVFGDTLYYPESKHLQEFPSPEALRGRVILSTKPPKEYLESKGGTMKDRDIEPQFSKGQNEEAVWGTEVPDIQDEMQTADKHENDILYTQRDVEEDDEKKMCQHHPLEYKHLITIKAGKPKGAVVDALKGDPDKVRRLSLSEQELAKVAAHHGRNIVSFTHKNLLRIYPKGTRFNSSNYNPFLGWVHGAQMVAFNMQGYGRSLWLMHGFYKANGGCGYVKKPDFMMQTCPDGNVFDPKADLPVKKTLKVKVYMGEGWQSDFKQTYFDTYSPPDFYAKVGIAGVPSDSVMQKTKAVEDSWVPVWEEEFVFPLTVPEIALLRVEVHEYDVSEDDFGGQTALPVSELRPGIRTVPLFDHKGLKFKSVKLLMRFEFV

SEQ ID NO: 2514 - protein, 594 aa, Oryza sativa Japonica Group
MGTYKCCIFFTRRFALSDASTPGDVRMLFTRHAGGAPYMGIDELRRYLAASGEAHVDADTAERIIDRVLQERSRTPRFGKPSLTIDDFQYFLFSEDLNPPICHSKEVHHDMNAPLSHYFIYTGHNSYLTGNQLSSDCSDIPIIKALQIGVRVIELDMWPNSSKDDVDILHGRTLTAPVSLIKCLKSIKEYAFVASPYPVIITLEDHLTSDLQAKVAKMVLEVFGDTLYYPESKHLQEFPSPEALRGRVILSTKPPKEYLESKGGTMKDRDIEPQFSKGQNEEAVWGTEVPDIQDEMQTADKQHENDILYTQRDVEEDDEKKMCQHHPLEYKHLITIKAGKPKGAVVDALKGDPDKVRRLSLSEQELAKVAAHHGRNIVSFTHKNLLRIYPKGTRFNSSNYNPFLGWVHGAQMVAFNMQGYGRSLWLMHGFYKANGGCGYVKKPDFMMQTCPDGNVFDPKADLPVKKTLKVKVYMGEGWQSDFKQTYFDTYSPPDFYAKVGIAGVPSDSVMQKTKAVEDSWVPVWEEEFVFPLTVPEIALLRVEVHEYDVSEDDFGGQTALPVSELRPGIRTVPLFDHKGLKFKSVKLLMRFEFV

SEQ ID NO: 2515 - protein, 472 aa, Zea mays
MLADDLRRYLAAWGGADGEVPEQIIDRILQDRSRTPRFGRPALTVDDFLHFLFSEDLNPPLRYSKVHQDMNAPLSHYFIYTGHNSYLTGNQLSSDCSDVPIIKALQLGVRVIELDIWPNSCKDDIDVLHGRTLTAPVSLIKCLRSIKEYAFVASPYPVIITLEDHLTPDLQERVAKMVLEVFGDILYYPESKHLQEFPSPEALKGRVMLSTKPPKEYLEAKGDTMKEKEIEARIKRGEREAAAWGVEVPDIQDEMQVADKDEDELLYRERGADGDDGKETKHVAAEYKHLITIKAGKPKGPLVDAIKNDPDKVRRLSLSEQELAKVAAHHGPNIVSFTHRNMLRIYPKGTRFNSSNYNPFLGWVHGAQMVAFNMQGYGRALWLMHGFYKANGGCGYVKKPDFLMQTCPDGKVFDSKADLPVKATLKVKVYMGEGWQKDFKQTHFDSYSPPDFYVKVCSLVEPVPTFRSQRCL

SEQ ID NO: 2516 - protein, 490 aa, Oryza sativa Japonica Group
MQVHHDMNAPLSHYFIYTGHNSYLTGNQLSSDCSDIPIIKALQIGVRVIELDMWPNSSKDDVDILHGRTLTAPVSLIKCLKSIKEYAFVASPYPVIITLEDHLTSDLQAKVAKMVLEVFGDTLYYPESKHLQEFPSPEALRGRVILSTKPPKEYLESKGGTMKDRDIEPQFSKGQNEEAVWGTEVPDIQDEMQTADKQHENDILYTQRDVEEDDEKKMCQHHPLEYKHLITIKAGKPKGAVVDALKGDPDKVRRLSLSEQELAKVAAHHGRNIVSFTHKNLLRIYPKGTRFNSSNYNPFLGWVHGAQMVAFNMQGYGRSLWLMHGFYKANGGCGYVKKPDFMMQTCPDGNVFDPKADLPVKKTLKVKVYMGEGWQSDFKQTYFDTYSPPDFYAKVGIAGVPSDSVMQKTKAVEDSWVPVWEEEFVFPLTVPEIALLRVEVHEYDVSEDDFGGQTALPVSELRPGIRTVPLFDHKGLKFKSVKLLMRFEFV

SEQ ID NO: 2517 - protein, 607 aa, Sorghum bicolor
MGTTYKCCLIFKRRFHARDAPPPEDVRALFSLHTGGGTHMGADGLRRYLDATQEEASRLDDAEVERLLEQIRLQQHQGGHRARLPRLARPLLALDDFHRYLFSHDLNPPLRHHQVHHDMTRPLSHYFIYTGHNSYLTGNQLSSDCSDVPIIKALQRGVRVIELDMWPNSTKDDINILHGRTLTTPVSLIKCLISIKEYAFVASPYPVIITLEDHLPSELQEKVAKMVLDVFGDILYYPPDSDHLKEFPSPEQLKGRVLLSTKPPKEYLEAKADDTMKEGDADLHLAKGANDDAAWGKEVPDFQTEIQSAKKHDDDAPGHQREDDDDDDDEEEEQKMQPHLAPQYKHLITIRAGKPKGSLADALKSDPEKVRRLSLSEQQLAKVAEDHATEIVRFTQRNILRIYPKGTRVTSSNYNPFIGWVHGAQMVAFNMQGYGRALWLMHGFYKANGGCGYVKKPDFLMQTEPQVFDPREPQPVKKTLKVKVYMGDGWRMDFKQTHFDQYSPPDFYTRVGIAGVPADSVMKKTKAIEDNWMPVWEEEFSFPLTVPEIALLRVEVHEYDMSEKDDFGGQTVLPVSELRPGIRAVALFDRKGNKYNNVKLLMRFEFA

SEQ ID NO: 2518 - protein, 402 aa, Zea mays
MAKGRAHPSKRPTHQLILAAVLSVSVLLPLLVPAAATVAVAVAEGGGKQLAVGKDEGKLVAEGDAGGGGLVEENEFAGGFGSLDSMLQWAIGNSDPEKLKEGAVDVQKLSADELLERRQEIKELMEKLKMPSDADLMKIAIDDLNNSSISLEDRQRALQELLVLVEPIDNANDLEKLGGLLPVIQELNNANEEIRTTSAWVLGTASQNNELVQNQILGYGALARLVKMGYSTSTEEAAKALYAISSLIRNNVNGQEAFHSENGSAMLQHILVSNNIDVRLQKKAVFLVTDLADFQLNSGIAQLPFLSDRLFLKSIVDMLSRFDLDLHEKVLLAIKSLLKLSSTDVEDFEFYDLDSVLLRLGVQLEDLTPEDQKEFAVEVDALRREVQTLFQQKLKQGKATST

SEQ ID NO: 2519 - protein, 403 aa, Zea mays
MAKGRAHPSKRPTHQLLAAVLSVFVLLPLLVPAAATVAVAVAVAEGGGKQLAVGKDEGKLVSEGDAGGGGLVEENEFAGGFGSLDSMLQWAIGNSDPEKLKEGAADVQKLSADELLERRQEIKELMEKLKMPSDADLMKIAIDDLNNSSISLEDRQRALQELLVLVEPIDNANDLEKLGGLLPVIQELNNANEEIRTTSAWVLGTASQNNELVQNQILGYGALVRLVKMGYSTSTEEAAKALYAISSLIRNNVNGQEAFHSENGSAMLQHILVSNNIDVRLQKKAVFLVTDLADFQLNSGIAQLPFLSDRLFLKSIVDMLSRFDLDLHEKVLLAIKSLLKLSSTDVEDFEFYDLDSVLLRLGVQLEDLTPEDQKEFAVEVDALRREVQTLFQQKLKQGKATST

SEQ ID NO: 2520 - protein, 407 aa, Sorghum bicolor
MAKGRAHHSKRPTHQLLLAAVLSVSVLLPLFVPAAATVAVAEGDGVSALGGGKPLAVGKDEGKLVAEGDAGGGGSVEEDEFAGGFGSLDSMLQWAIGNSDPEKLKEEAADAQKLSEDELLKRRQEIKELMEKLKMPSDADLMKIAIDDLNNSSISLEDRQRALQELLVLVEPIDNANDLDKLGGLLPVIQELSNANEEIRTTSAWVLGTASQNNELVQNQILGYGALARLVKMGYSTSAEEAAKALYAISSLIRNNVNGQEAFHSENGSAMLQHILVSNNIDVRLQKKVVFLVTDLADFQLNSGIVQLPFLSERLFLKSIMDMLSRFDLDLQEKVLLAIKNLLKLSSTDVEDFEFCDLSNVLLRLGVQLEDLTPEDQKEFAVEVDALRREVQTLFQQKLKQGKATVA

SEQ ID NO: 2521 - protein, 410 aa, Oryza sativa Japonica Group
MAMAARARCSRQPNSHRLLAVVVLAAILLLPVASAAAAVVAAVAEGDGVENRSAARQWATGKDEGELVSGEESRGGGSVVEDEFAGGFGSLDSMLQWAIGNSDPDKLKEQAEGVQKLSADELLKRRMEIKELMEKLKMPSDADLMKIAIADLNNSSISLEDRQRALQELLILVEPIDNANDLDKLGGLVAVIQDLNNANEEIRTTSAWVLGKASQNNALVQNQILGYGALARLVKMGYATSAEEATKALYAISALVRDNINGQEAFHSENGSAMLQHILASNSVDVRLQKKAVFLVTDLADFQLNSGNSGLPFLSDRIFLKSLVDMLSRFDLDLQEKVLLAIKSLLKLSSTEATDFESCDLSSVLYRLGVQLEELPSEEQKEYAGEVDDLRREVQILFQDKLKEGTKTAL

SEQ ID NO: 2522 - protein, 410 aa, Oryza sativa Indica Group
MAMAARARYSRQPNSHRLLAVVVLTAILLLPVASAAAAVVAAVAEGDGVENRSAARQWATGKDEGEVVSGEESRGGGSVVEDEFAGGFGSLDSMLQWAIGNSDPDKLKEQAEGVQKLSADELLKRRMEIKELMEKLKMPSDADLMKIAIADLNNSSISLEDRQRALQELLILVEPIDNANDLDKLGGLVAVIQDLNNANEEIRTTSAWVLGKASQNNALVQNQILGYGALARLVKMGYATSAEEATKALYAISALVRDNINGQEAFHSENGSAMLQHILASNSVDVRLQKKAVFLVTDLADFQLNSGNSGLPFLSDRIFLKSLVDMLSRFDLDLQEKVLLAIKSLLKLSSTEATDFESSDLSSVLYRLGVQLEELPSEEQKEYAGEVDDLRREVQILFQDKLKEGTKTAL

SEQ ID NO: 2523 - protein, 417 aa, Hordeum vulgare subsp. vulgare
MAMAKARPRSARSSHRRCNLLLSVALLSALLLLPAATASAAVAVAVAAEGDEENRSRGAATQWATGKDEGELAAEREAAGEGSVVEDDFAGGFGSLDSMLQWAIGNSDPGRLKEEAADVQKLSEDELLKRRHEIKDLMEKLKMPSDADLMKIAIADLNNASISLEDRQRALQELLILVEPIDNANDLDKIGGLVPVIQDLNNANEEIRTTSAWILGTASQNNALVQSQILGYGALARLVKMGYSTSTKEAAKAMYAISALIRNNVNGQEAFALENGNAMLQHILGSNSVDVGLQKKAVFLLTDLADFQLNSGNSGLTFLSERVLLKSVTDMLSEFDLDLQEKVLLAIRSLLKLPSTDARDFESCGLDSVLYRLGVQLEELPSEDQKEYAGEVDALRREVLMFFQQKLKPGTAAAAAL

SEQ ID NO: 2524 - protein, 506 aa, Zea mays
MSTTEPLLSAGAEKKKGGKGPRVGIDEALSAHAGEFGRWQLRHFVAVSAAWALEALHTMVIIFADREPATVPVPCAAAGREWAGGGGSGAAASTVVEWGLVCGQRYKVGLAQAVFFAGCMIGAGVFGHLSDSFLGRKGALQVVCVLNAAFGLLTALSPNYWAYAALRLLTGFSAGSVGVLAFVLATEPVGPARRGAAGMSTFYFFSGGIAALAAVAALFQGSWRALYAVTSLPSLVFAVAVVPFFVSESPRWYLVRRRPDDALRVIRAIAATNGRAVPEDLRLKLDDEEPGNKDVGGSTAHAASSGSIVDVFRSPTTRVRLVLSVLINLLSSVVYYGLSLNVVNLKTNLYVTVVVNSLAEMPAYLLTALLLDHFGRKPLAIGTMLLSGVFCTAGSLVPGAGIMRVACGVVGIFGMAATYNLLFIYTAELFPTVVRNAALGCTAQAAQMGAIVAPLVVMLGERLPFAVFGASGIVGGLLVLYLPETMNKPLYDTMAGLEEGEKNVVK

SEQ ID NO: 2525 - protein, 528 aa, Sorghum bicolor
MSTTEPLLSACAGGGAGGNDGEEAGKKSRQSSSKGRRVCIDEALSSYAGEFGRWQLRHFVAVSAAWALEALHTMVIIFADREPPTSCAGGGWEWAGGGAAASSSTVAEWGLVCGERYKVGLAQAVFFAGCMIGAGVFGHLSDSFLGRKGSLQVVCILNAAFGLLTAASPNYWAYAALRLLTGFSTGSVGVLAFVLATEPVGPARRGAAGMSTFYFFSGGIAALAGVAALFPRSWRLLYVVTSIPSLVFAVAVVPFVSESPRWYLVRRRPDDALRVIRAIAATNGRAVPEDLTLKLDDEDEDDEEEQGKEGGAGMAKAAAAAASSGSIVDVFRSRTTRVRLVLSVLINLLTSVVYYGLSLNVVNLKTNLYVTVVVNSLAEMPAYLLTALLLDRFGRKPLAIGTMLLSGIFCTAGSLIPGAGIMRVARMACGVVGIFGMAATYNLLFIYTAELFPTVVRNAALGCTAQATQMGAIVAPLVVMLGERLPFAVFGASGIVGGLLVFYLPETMNKPLYDTMAGLEEGEKSVLK

SEQ ID NO: 2526 - protein, 517 aa, Hordeum vulgare subsp. vulgare
MSTEALLAASGGGGGGGAASRRLSIDDALAEHAGELGRWQLRHFVLVSAAWALEALHTMVIIFADREPAMRCPAGDGRCGDRCAGAAAGWEWAQGSASSTVAEWGLVCGERYKVGLVQAIFFAGCMIGAGVFGHLSDSFLGRKGSLQVVCFLNALFGLLTALSPSYRVYVVLRLLTGFSTGSIGLCAFVLATEPIGPSRRGTAGMSSFYFFSGGIAALAGVAAMFQSSWRLLYVVTSLPSLVFVLAVMPFVSESPRWYLVRRRTDDAMRVLRDIAATNGRRIPDGVTLKLDDEGDDVTGGKQIEESPPAPSSSGSILDVFRSRTTRARLVLSVLINLLCSVVYYGLSLNVVNLKTNLYVSVAVNSIAEMPAYLLTALLLDHFGRKPLGIGTMLLSGVFCIAGSLIAGVGAMRVVRMVCGVVGIFGMAATYNLLFIYTAELFPTVVRNAALGCTSQASQMGAILAPMVVVLGERVPFAVFGVSGIIGGLLVFYLPETMNKPLYDTMAGLEEGEKTPLK

SEQ ID NO: 2527 - protein, 521 aa, Oryza sativa Indica Group
MSTEALLAGGGGGGGGGEVKRRVSIDDALAWHAGEFGRWQLRHFVLVSSAWLLEALHTMVIIFADREPAMVCAAGDGRCGDRCAGAGAAAGTGWEWASGRASSTVSEWGLVCGERYKVGLVQAIFFAGCMIGAGVFGHLSDSFLGRKGSLQVVCVLNGVFGMLTAMAPNYWAYAALRLLTGFSAGSVGLCSFVLATEPVGPSRRGAAGMSTFYFFSGGIAALAGIAALFPTSWRMLYAVTSLPSLVFVVAVLPFVSESPRWYLVRRRADDAMRVVRAIASSNGRSIPDDVSLKLDDEGDDDNGAGAGKVVDSSASASGSIIDVFRSRTTRFRLVLSVVINLLASVVYYGLSLNVVNLKTNLYVSVLVNSLAEMPAYLLTALLLDRFGRKPLAIGTMLLSGISCSAGSLIAGAGAMRVARLACGVVGIFGMAATYNLLFIYTAELFPTAVRNAALGCTSQASQMGAILAPLVVVLGERVPFALLGVSGLVGGFLVFCLPETKNKPMYDTMAGLEEGEKTLLK

SEQ ID NO: 2528 - protein, 521 aa, Oryza sativa Japonica Group
MSTEALLAGGGGGGGGGEVKRRVSIDDALAWHAGEFGRWQLRHFVLVSSAWLLEALHTMVIIFADREPAMVCAAGDGRCGDRCAGAGAAAGTGWEWASGRASSTVSEWGLVCGERYKVGLVQAIFFAGCMIGAGVFGHLSDSFLGRKGSLQVVCVLNGVFGMLTAMAPNYWAYAALRLLTGFSAGSVGLCSFVLATEPVGPSRRGAAGMSTFYFFSGGIAALAGIAALFPTSWRMLYVVTSLPSLVFVVAVLPFVSESPRWYLVRRRADDAMRVVRAIASSNGRSIPDDVSLKLDDEGDDDNGAGAGKVVDSSASASGSIIDVFRSRTTRFRLVLSVVINLLASVVYYGLSLNVVNLKTNLYVSVLVNSLAEMPAYLLTALLLDRFGRKPLAIGTMLLSGISCSAGSLIAGAGAMRVARLACGVVGIFGMAATYNLLFIYTAELFPTAVRNAALGCTSQASQMGAILAPLVVVLGERVPFALFGVSGLVGGFLVFCLPETKNKPMYDTMAGLEEGEKTLLK

SEQ ID NO: 2529 - protein, 521 aa, Oryza sativa Japonica Group
MSTEALLAGGGGGGGGGEVKRRVSIDDALAWHAGEFGRWQLRHFVLVSSAWLLEALHTMVIIFADREPAMVCAAGDGRCGDRCAGAGAAAGTGWEWASGRASSTVSQWGLVCGERYKVGLVQAIFFAGCMIGAGVFGHLSDSFLGRKGSLQVVCVLNGVFGMLTAMAPNYWAYAALRLLTGFSAGSVGLCSFVLATEPVGPSRRGAAGMSTFYFFSGGIAALAGIAALFPTSWRMLYVVTSLPSLVFVVAVLPFVSESPRWYLVRRRADDAMRVVRAIASSNGRSIPDDVSLKLDDEGDDDNGAGAGKVVDSSASASGSIIDVFRSRTTRFRLVLSVVINLLASVVYYGLSLNVVNLKTNLYVSVLVNSLAEMPAYLLTALLLDRFGRKPLAIGTMLLSGISCSAGSLIAGAGAMRVARLACGVVGIFGMAATYNLLFIYTAELFPTAVRNAALGCTSQASQMGAILAPLVVVLGERVPFALFGVSGLVGGFLVFCLPETKNKPMYDTMAGLEEGEKTLLK

SEQ ID NO: 2530 - protein, 417 aa, Zea mays; identical to SEQ ID NO: 1052

SEQ ID NO: 2531 - protein, 255 aa, Sorghum bicolor
MAEQHREESGGSVLDKISDKLHGRGSGSSSSSSDSDDEHSSATAAVKAKIYRLFGREKPVHSVLGGGKPADLFLWRNKRISGGVLAGATAIWLLFEVMDYHLLTLLCHCLILTLAILFLWSNATTFINKSPPNIPEVKIPEDLAVNVARSLRYEINRGFATLREIGQGHDLKKFLIVIAGLWILSVLGSCCNFLTLSYIVFMVLYTVPVLYEKHEDKVDAFGEKAMVELKKYYAIFDEKCLSKIPKGPLKDKKQH

SEQ ID NO: 2532 - protein, 254 aa, Zea mays
MAEQHKEESGVTVLDKISDKLHGRGGGSSSSSDSDDERSSATAAVKAKIYRIFGREKPVHSVLGGGKPADLFLWRNKRISGGVLAGATAFWLLFEVMDYHLLTLLCHCLILTLAILFLWSNATTFINKSPPNIPEVKIPDDLAVNVARSLRYEINRGFATLREIGQGHDLKKFLIVIAGLWILSVLGSCCNFLTLSYIVFMVLYTVPVLYEKHEDKVDAFGEKAMVELKRYYAIFDEKCLSKIPKGPLKDKKQH

SEQ ID NO: 2533 - protein, 251 aa, Oryza sativa Japonica Group
MAEHKEEESLVESVMDKISDKLHGRGGSSSSSSDSDGERTADLKAKIYRLFGREKPVHSVLGGGKPADLFLWRNKKISVGVLAGATAIWLLFEVMDYHLLTLLCHCIILTLAMLFLWSNASTFINKSPPNIPEVKIPEDLAVNVARSLRFEINRGFATLREIGQGHDLKKFLIVVVGLWVLSVLGSCCNFLTLFYIVFMVLYTVPVLYEKYEDQIDAFGEKAMIELKKYYAIFDEKCLSKIPKGPLKNKKH

SEQ ID NO: 2534 - protein, 251 aa, Oryza sativa Indica Group
MAEHKEEESLVESVMDKISDKLHGRGGSSSSSSDSDGERTADLKAKIYRLFGREKPVHSVLGGGKPADLFLWRNKKISVGVLTGATAIWLLFEVMDYHLLTLLCHCIILTLAMLFLWSNASTFINKSPPNIPEVKIPEDLAVNVARSVRFEINRGFATLREIGLGHDLKKFLIVVAGLWVLSVLGSCCNFLTLFYIVFMVLYTVPVLYEKYEDQIDAFGEKAVIELKKYYAIFDEKCLSKIPKGPSKNKKH

SEQ ID NO: 2535 - protein, 257 aa, Zea mays
MADHKEEPVPESVMDKITEKFHGGDSSSSSSDSDDEKKGSSLASAAEAMKAKIYRLFGRERPVHSVLGGGKPADLILWRNRKISGGVLAGATAIWLLFEVMEYHLLTLVCHCLILSLAILFLWSNASTFINKSPPNIPEVKIPEDVAVNVALSLRYEINRGFATLREIGHGRDLKKFLIVIAGLWLLSVLGSCCNFLTLFYIVFVALYTVPVLYEKYEDKVDAFGEKAMTELKKYYAIFDEKCLSKIPKGPLKDKKH

SEQ ID NO: 2536 - protein, 257 aa, Hordeum vulgare subsp. vulgare
MSEQGAGQGSKEESLMDKITEKFHGSSSSSSSSDDEAGRAAGSSSSSVKAKIYRLFGREKPVHSVLGGGKPADLLLWRNKKISGGVLAGATAIWLLFEVLEYHLLTLLCHGFILTLGILFLWSNASAFVNKCPPNIPEVKIPEDLAVNVARSLRYEINRGFASLRAIGQGRDLKKFLIVVAGLWILSALGSSCNFLTLFYIVFMVLYTVPVLYEKYEDKIDAFGEKAMVELKKYYAIFDEKCLSKIPKGPSKDKKQH

SEQ ID NO: 2537 - protein, 253 aa, Zea mays
MADHKEEQSVMDKISEKFHGGDSSSSSDSDDEKKKGSSSASATEAMKAKIYRLFGRERPVHSVLGGGKPADLVLWRNKKISGGVLAGATAIWLLFEVMEYHLLTLVCHCLIVSLAILFLWSNASSFINKSPPNIPEVKIPEDVSVNVALTLRYEINRGFATLREIGHGHDLKKFLIVIAGLWLFSVLGSCCNFLTLFYIVFVALYTIPVLYEKYEDKVDAFGEKAMIELKKYYAIFDEKCLSKIPKGLKDKKH

SEQ ID NO: 2538 - protein, 253 aa, Oryza sativa Indica Group
MAEHKEEQSVMEKLSEKLHGDSSSSSSDSDDDKKGSSSSSSAAAMKAKIYRLFGRERPVHSVLGGGKPADLVLWRNKKISGGVLAGATAIWLLFEIMEYHLLTLVCHCLILSLAVLFLWSNASTFIHKSPPNIPEVKIPEDLTVNIALSLRYEINRGFATLREIGHGRDLKKFLIVIAGLWILSVLGSSCNFLTLFYIVFVALYTVPVLYEKYEDKIDAFGEKAEIELKKYYALFEEKCLSKIPKGPLKDKKH

SEQ ID NO: 2539 - protein, 253 aa, Oryza sativa Japonica Group
MAEHKEEQSVMEKLSEKLHGDSSSSSSDSDDDKKGSSSSSAAAAMKAKIYRLFGRERPVHSVLGGGKPADLVLWRNKKISGGVLAGATAIWLLFEIMEYHLLTLVCHCLILSLAVLFLWSNASTFIHKSPPNIPEVKIPEDLTVNIALSLRYEINRGFATLREIGHGRDLKKFLIVIAGLWILSVLGSSCNFLTLFYIVFVALYTVPVLYEKYEDKVDAFGEKAEIEFKKYYALFEEKCLSKIPKGPLKDKKH

SEQ ID NO: 2540 - protein, 254 aa, Zea mays
MAEQHKEESGVTVLDKISDKLHGRGGGSSSSSDSDDERSSATAAVKAKIYRIFGREKPVHSVLGGGKPADLFLWRNKRISGGVLAGATAFWLLFEVMDYHLLTLLCHCLILTLAILFLWSNATTFINKSPPNIPEVKIPDDLAVNFARSLRYEINRGFATLREIGQGHDLKKFLIVIAGLWILSVLGSCCNFLTLSYIVFMVLYTVPVLYEKHEDKVDAFGEKAMVELKKYYAIFDEKCLSKIPKGPLKDKKQH

SEQ ID NO: 2541 - protein, 367 aa, Sorghum bicolor
MPGGRKRPAPFAGFSPFARSLIFSASTSSCPKALPLPDASTSDADAETPRQDNMPRPPSKRAKLTEPSSDEVEDRGSSGSEEESFSTSGSDDGEDSSEELETVQADFAFFDPKPSDFHGVRLLLKTYLDSKPWDLTGFVDLILAQTTVGTVVKLADDDDEEGEGNGAEKANSSNNTDDDDLFGLISVLNLGRHAEQKCIKDLKEYLLAVCADKGTKKQLRSLLEDKASSVGLLVCRRFVNFPYELVPKLYDALFDEVSWATEDEPTKELRDSFRFKQYLLVVRMLERKTPAKHKSKKSKDDDEPVIYPKLEDEIFHKLSSWSFTFPIRSEQSAQQEMKDYKEMGLVMAIKADVVPKFRKKLEDLVSE

SEQ ID NO: 2542 - protein, 368 aa, Zea mays
MPGGRKRPAPFAGFSPFARSLIFSAATSSCPKSRPLPDASTAAETPRQDDMPRPPSKRAKRAEPSSDEVEDRGSSGSEEESFSTSGSDSDSDDGEESSEELETVQADFAFFDPKPSDFHGARLLLKTYLDSKPWDLTGFADLILAQTTVGTVVKLADDEEEEGEGNGVQKANSSTNNDDDDLFGLISVLNLGQHAEQKCIRDLKEYLLDVCPDKGTKKQLRSLLEEKASSVGLLVCRRFVNFPYELVPKLYDALFDEVSWATEDEPTQELRDSFRFKHYLLIVRMLERKTPPKHKSKANKDDDEPIIYPKFEDEIFHELSSWSFTFPIRSEESAQQEMKNYKEMGLVMAIKAGTVLKFRKKLGDLVSE

SEQ ID NO: 2543 - protein, 358 aa, Oryza sativa Japonica Group
MVGDRKRPAPFAGFSPFARSLLFSASSSKPLPPPEDPPAAAADEIPSGIAGSSRDMPPPKRAKRAEPSSDEERYSSDDESYSSDSDDSDDASEELDTVQADFAFYDPKPGDFHGVKLLLKTYLDSKPWDLTGFVDLILEQTTVGTVVKIADDEEDGEGNGADGSSTGGNDDLFGLISVLNLGRYSEHRCMKDLKDYLLAVCGDKDTKKKLKQMLGDKAPDVGLLVCRRFVNFPYELVPKMYESLFDEVSWATEDEPTQELRDSFRFKQYLMVVRVLERKTPAKQKAKNSTEEDEPIIYPKLEDEIFRELSSWSFTFPIRSEQSAQQEMKNYKEMGLVMAVKAEAIPKFRKKLEDLLSE

SEQ ID NO: 2544 - protein, 372 aa, Hordeum vulgare subsp. vulgare
MPAGRKRPAPAPFAGFSTFARSLLFSPVSGFSRLPLTYAPAAKPHQETVGMPPPPSKRAKQAEPSSDEEEERPSSDGNGDSDGDGDGDSDSSLECSSSDDDDDASQEMETVQADFAFFDPKPTDFHGVRLLLKTYLDSKPWDLTGFVDLVLEQTTVGTVVKMAEDEDGEANGGDRSDEGDDDDEDLFGLITVLNLGRYGESRCIKDLKEYLLAVCGDKDTKKKLKSLLEEKASTVGLLVCRRFVNFPYEMVPKMYDSLFDEVSWATEDEPTQELQDSFRFKQYLFLVRILERKTPPKQKSKNNKDEDEPVIYPKLEDEILHELSTWSFTFPIRAEQSAQQELKNYKEMGLVMCVKADVIPKFRKKLEALVSE

SEQ ID NO: 2545 - protein, 222 aa, Zea mays; identical to SEQ ID NO: 1537

SEQ ID NO: 2546 - protein, 221 aa, Zea mays
MVKSTTTMGAASCGGGVLPLASLNHISIVCRSVEASLRFYTDVLGFVPIRRPGSFDFGGAWLFNYGIGIHLLQSEDPGSLPPEKGEINPKDNHISFQCESMVAVERRLKEIGIPYVQRCVEEGGINVDQIFFHDPDGFMIEICNCDNLPVVPLAGDQQRAPAACRRAPAAVNTVKQQQQGSVVPASSAPVTTAAAQCMPSAATAAQAIRVAEESSSHISCA

SEQ ID NO: 2547 - protein, 219 aa, Sorghum bicolor
MVSSTTMAAASCGGVRAAGVLPLASLNHISIVCRNVEASLRFYTDVLGFVPIRRPGSFDFDGAWLFNYGIGIHLLQSEDPGSLPEKGEINPKDNHISFQCESMVAVERRLKEMGIPYVQRCVEEGGINVDQIFFHDPDGFMIEICNCDNLPVIPLAGAVQLGSCKRAAAAVVVGKQQQQQSSVVVVVPPPSPPVTATAAAHHQAIRVAEESSSSHISCA

SEQ ID NO: 2548 - protein, 492 aa, Sorghum bicolor
MAAHVLVVPFPAQGHMNPMVQFAKRLASKGVATTLVTTRFIQRTAGVDAHPAMVEAISDGHDEGGFASAAGVEEYLEKQTVAASASLASLIEARASSAADPFTCVVYDTYEDWVPPLARRMGLPAVPFSTQSCAVSAVYYHFSQGRLAVPPPPPAADGGDGGAAAARSEAFLGLPEMERSEFPSFVFDHGPYPTIAKQALKQFAHEGKDDWVLFNSFEDLESEVLAGLTKYMKARAIGPCVPLPAAETTGATGRRITYGANLVNPEDACIKWLDTKPHRSVAYVSFGSFASLDAAQTEELARGLLAAGKPFLWVVRATDEHQIPHHLLDEATASGAAMVVPWCPQLDVLAHPAVGCFVTHCGWNSTLEALSYGVPMVAMALWTDQPTNARNVELAWRAGARARRDAGAGAGAGMFLRGEVERCVRAVMDDGEEASAVRKAVGTWRDKARAAVAAGGSSDRNLDEFVQFVRAGATEKGKALVLKGGDVAGSEM

SEQ ID NO: 2549 - protein, 471 aa, Zea mays
MAPHVLVVPFPGQGHMNPMVQFAKRLASKGVATTLVTTRFIQRTADVDAHPAMVEAISDGHDEGGFASAAGVAEYLEKQAAAASASLASLVEARASSADAFTCVVYDSYEDWVLPVARRMGLPAVPFSTQSCAVSAVYYHFSQGRLAVPPGAAADGSDGGAGAAALSEAFLGLPEMERSELPSFVFDHGPYPTIAMQAIKQFAHAGKDDWVLFNSFEELETEVLAGLTKYLKARAIGPCVPLPTAGRTAGANGRITYGANLVKPEDACTKWLDTKPDRSVAYVSFGSLASLGNAQKEELARGLLAAGKPFLWVVRASDEHQVPRYLLAEATATGAAMVVPWCPQLDVLAHPAVGCFVTHCGWNSTLEALSFGVPMVAMALWTDQPTNARNVELAWGAGVRARRDAGAGVFLRGEVERCVRAVMDGGEAASAARKAAGEWRDRARAAVAPGGSSDRNLDEFVQFVRAGATEK

SEQ ID NO: 2550 - protein, 465 aa, Zea mays; identical to SEQ ID NO: 1538

SEQ ID NO: 2551 - protein, 905 aa, Zea mays
MMNLNLKQPLVLPAHHSNVVGSRLSSSSPSAAAASRRTGGGVSSRSGSRRHVRLPRISCSATEEVSGAVSSVTVERMLTVTASVEASPAIGQMYFQRAVDDIGDLLGKTLLLELVSSELDAKSGVEKTRVTAYAHKTLREGHYEAEFKVPASFGPVGAVLVENEHHKEVFIKEIKLVTGGDSSTAVTFDCNSWVHSKFDNPEKRIFFTLKSYLPSDTPKGLEDLRKKDLQALRGDGHGERKVFERVYDYDVYNDLGDPDKNPAHQRPVLGGNKQYPYPRRCRTGRPRTKKDPETEMREGHNYVPRDEQFSEVKQLTFGATTLRSGLHALLPALRPLLINKKDLRFPHFPAIDDLFSDGIPLPAQTGFDAIRTVVPRMVKLVEDTTDHVLRFEVPEMIERDRFSWFKDEEFARQTIAGLNPLCIQLLTEFPIKSKLDPEVYGPAESAITKEILEKQMNGALTVEQALAAKRLFILDYHDVFLPYVHKVRELQDATLYASRTIFFLTDLGTLMPLAIELTRPKSPTRPQWKRAFTHGPDATDAWLWKLAKAHVLTHDTGYHQLVSHWLRTHCCVEPYIIAANRQLSRLHPVYRLLHPHFRYTMEINALAREALINADGIIEESFWPGKYAVELSSVAYGATWQFDTEALPNDLIKRGLAVRGEDGELELTIKDYPYAHDGLLVWDSIRQWASEYVNVYYKSDEAVAADPELRAFWDEVRNVGHGDKKDEPWWPVLDTRDSLVETLTTIMWVTSGHHSAVNFGQYHFAGYFPNRPTTIRKNMPVEEGGPGEEMEKFLKQPETTLLDMLPTQMQAIKVMTTLDILSSHSPDEEYMGEFAEPSWLAEPMVKAAFEKFGGRMKEIEGFIDECNNNLDLKNRCGAGIVPYELLKPFSKPGVTGRGIPSSISI

SEQ ID NO: 2552 - protein, 911 aa, Zea mays
MIQMNMKQPLVLPAHRGNVIGSRLASSPSPVAAAAAAASRRRGVVSSPRSRLQRHMRLPRISCSATEEASGAVSAVTVEKMLTVTASVQAAPAIGQMYFQRALDDAGDFFGKTLLMELVSSEVDAKTGLEKPRVTAFAHKTLREGHYEAEFKVPASFGPVGAVLLENEHHKEIFIREIKLVTGSDSSTAVTFGCNSWVHSKFDNPEKRIFFTLKSYLPSDTPKGLEDLRKKDLQALRGDGHGERKASERVYDYDVYNDLGDPDKNPAHQRPVLGGSKRYPYPRRCRTGRPRTRKDPEAEVRHGHNYVPRDEQFSEVKQLTFGATTLRSGLHALLPAIRPMLIKRELRFPHFPAIDDLYSDGIPLPAQTGLGAIRSIVPRVVKLVEDTTEHVLRFELPDMIERDRFSWFKDEEFARQTIAGLNPLCIQLLTEFPIRSKLDPEVYGPAESAITKEILEKHMSGGAAMTVEQALAAKRLFILDYHDVFLPYVHRVRELPDTTLYGSRTVFFLTDLGTLMPLAIELVRPKSPTQPQWKRVFTHGPDATDAWLWKLAKAHVVTHDTGYHQLVSHWLRTHCCVEPYIIAANRQLSRLHPVYRLLHPHFRYTMEINALAREALINADGIIEESFWPGRYAVELSSAAYGATWQFDTEALPNDLVKRGLAVRRDDGELELTIKDYPYAHDGLMVWNTIRQWAADYVNVYYKSDEAVAADPELKAFWDEVRNVGHGDKKDEPWWPVLDTRDSLAETLTTIMWVTSGHHSAVNFGQYHFGGYFPNRPTTIRKSMPVEEEAGRDEEMKKFLKQPETTLLDMLPTQMQAIRVMTTLDILSSHSPDEEYMGELAEPSWLEEPMVKAAFEKFGGRMKEIEGFIDECNNNPELRNRCGAGIVPYELLKPFSKPGVTGRGIPNSISI

SEQ ID NO: 2553 - protein, 911 aa, Zea mays
MIQMNMKQPLVLPAHRGNVIGSRLASSPSPVAAAAAAASRRRGVVSSPRSRLQRHMRLPRISCSATEEASGAVSAVTVEKMLTVTASVQAAPAIGQMYFQRALDDAGDFFGKTLLMELVSSEVDAKTGLEKPRVTAFAHKTLREGHYEAEFKVPASFGPVGAVLLENEHHKEIFIREIKLVTGSDSSTAVTFGCNSWVHSKFDNPEKRIFFTLKSYLPSDTPKGLEDLRKKDLQALRGDGHGERKASERVYDYDVYNDLGDPDKNPAHQRPVLGGSKRYPYPRRCRTGRPRTRKDPEAEVRHGHNYVPRDEQFSEVKQLTFGATTLRSGLHALLPAIRPMLIKRELRFPHFPAIDDLYSDGIPLPAQTGLGAIRSIVPRVVKLVEDTTEHVLRFELPDMIERDRFSWFKDEEFARQTIAGLNPLCIQLLTEFPIRSKLDREVYGPAESAITKEILEKHMSGGAAMTVEQALAAKRLFILDYHDVFLPYVHRVRELPDTTLYGSRTVFFLTDLGTLMPLAIELVRPKSPTQPQWKRVFTHGPDATDAWLWKLAKAHVVTHDTGYHQLVSHWLRTHCCVEPYIIAANRQLSRLHPVYRLLHPHFRYTMEINALAREALINADGIIEESFWPGRYAVELSSAAYGATWQFDTEALPNDLVKRGLAVRRDDGELELTIKDYPYAHDGLMVWNTIRQWAADYVNVYYKSDEAVAADPELKAFWDEVRNVGHGDKKDEPWWPVLDTRDSLAETLTTIMWVTSGHHSAVNFGQYHFGGYFPNRPTTIRKSMPVEEEAGRDEEMKKFLKQPETTLLDMLPTQMQAIRVMTTLDILSSHSPDEEYMGELAEPSWLEEPMVKAAFEKFGGRMKEIEGFIDECNNNPELRNRCGAGIVPYELLKPFSKPGVTGRGIPNSISI

SEQ ID NO: 2554 - protein, 825 aa, Zea mays
MIQMNMKQPLVLPAHRGNVAGDFFGKTLLMELVSSEVDAKTGLEKPRVTAFAHKTLREGHYEAEFKVPASFGPVGAVLLENEHHKEIFIREIKLVTGSDSSTAVTFGCNSWVHSKFDNPEKRIFFTLKSYLPSDTPKGLEDLRKKDLQALRGDGHGERKASERVYDYDVYNDLGDPDKNPAHQRPVLGGSKRYPYPRRCRTGRPRTRKDPEAEVRHGHNYVPRDEQFSEVKQLTFGATTLRSGLHALLPAIRPMLIKRELRFPHFPAIDDLYSDGIPLPAQTGLGAIRSIVPRVVKLVEDTTEHVLRFELPDMIERDRFSWFKDEEFARQTIAGLNPLCIQLLTEFPIRSKLDPEVYGPAESAITKEILEKHMSGGAAMTVEQALAAKRLFILDYHDVFLPYVHRVRELPDTTLYGSRTVFFLTDLGTLMPLAIELVRPKSPTQPQWKRVFTHGPDATDAWLWKLAKAHVVTHDTGYHQLVSHWLRTHCCVEPYIIAANRQLSRLHPVYRLLHPHFRYTMEINALAREALINADGIIEESFWPGRYAVELSSAAYGATWQFDTEALPNDLVKRGLAVRRDDGELELTIKDYPYAHDGLMVWNTIRQWAADYVNVYYKSDEAVAADPELKAFWDEVRNVGHGDKKDEPWWPVLDTRDSLAETLTTIMWVTSGHHSAVNFGQYHFGGYFPNRPTTIRKSMPVEEEAGRDEEMKKFLKQPETTLLDMLPTQMQAIRVMTTLDILSSHSPDEEYMGELAEPSWLEEPMVKAAFEKFGGRMKEIEGFIDECNNNPELRNRCGAGIVPYELLKPFSKPGVTGRGIPNSISI

SEQ ID NO: 2555 - protein, 796 aa, Zea mays
MELVSSEVDAKTGLEKPRVTAFAHKTLREGHYEAEFKVPASFGPVGAVLLENEHHKEIFIREIKLVTGSDSSTAVTFGCNSWVHSKFDNPEKRIFFTLKSYLPSDTPKGLEDLRKKDLQALRGDGHGERKASERVYDYDVYNDLGDPDKNPAHQRPVLGGSKRYPYPRRCRTGRPRTRKDPEAEVRHGHNYVPRDEQFSEVKQLTFGATTLRSGLHALLPAIRPMLIKRELRFPHFPAIDDLYSDGIPLPAQTGLGAIRSIVPRVVKLVEDTTEHVLRFELPDMIERDRFSWFKDEEFARQTIAGLNPLCIQLLTEFPIRSKLDPEVYGPAESAITKEILEKHMSGGAAMTVEQALAAKRLFILDYHDVFLPYVHRVRELPDTTLYGSRTVFFLTDLGTLMPLAIELVRPKSPTQPQWKRVFTHGPDATDAWLWKLAKAHVVTHDTGYHQLVSHWLRTHCCVEPYIIAANRQLSRLHPVYRLLHPHFRYTMEINALAREALINADGIIEESFWPGRYAVELSSAAYGATWQFDTEALPNDLVKRGLAVRRDDGELELTIKDYPYAHDGLMVWNTIRQWAADYVNVYYKSDEAVAADPELKAFWDEVRNVGHGDKKDEPWWPVLDTRDSLAETLTTIMWVTSGHHSAVNFGQYHFGGYFPNRPTTIRKSMPVEEEAGRDEEMKKFLKQPETTLLDMLPTQMQAIRVMTTLDILSSHSPDEEYMGELAEPSWLEEPMVKAAFEKFGGRMKEIEGFIDECNNNPELRNRCGAGIVPYELLKPFSKPGVTGRGIPNSISI

SEQ ID NO: 2556 - protein, 896 aa, Hordeum vulgare subsp. vulgare
MIHLKQPLVLSAQSSNVASPLFVAGGQQRRASGAGRTCSGRRLSARRISCASTEEAVGVSTSVTTKERALTVTAIVTAQVPTSVYVARGLDDIQDLFGKTLLLELVSSELDPKTGRERERVKGFAHMTLKEGTYEAKMSVPASFGPVGAVLVENEHHREMFIKDIKLITGGDESIAITFDVASWVHSKFDDPEPRAFFTVKSYLPSQTPPGIEALRKKELETLRGDGHSERKFHERVYDYDTYNDLGDPDKNIDHKRPVLGTKEHPYPRRCRTGRPKTLYDPETETRSSPVYVPRDEQFSDVKGRTFSATTLRSGLHAILPALAPLLNNSQCFSHFPAIDALYSDGIPLPVDGHGGNSFNVINDVIPRVVQMIEDTTEHVLRFEVPEMLERDRFSWFRDEEFARQTLAGLNPICIRRLTEFPIVSKLDPAVYGPAESALSKEILEKMMNGRMTVEEAMEKKRLFLLDYHDVFLPYVHRVRELPDTTLYGSRTVFFLSDEGTLMPLAIELTRPQSPTKPQWKRAFTHGSDATESWLWKLAKAHVLTHDTGYHQLVSHWLRTHACVEPYIIATNRQLSRMHPVYRLLHPHFRYTMEINALAREALINADGIIEEAFWPGKYSIELSSVAYGAAWQFNTEALPEDLINRGLAVRRDDGELELAIKDYPYADDGLLIWGSIKQWASDYVDFYYKSDGDVAGDEELRAWWEEVRTKGHADKKDEPWWPVCDTKENLVQILTIIMWVTSGHHAAVNFGQYHYAGYFPNRPTVVRRNIPVEENRDDEMKKFMARPEEVLLQSLPSQMQAIKVMATLDILSSHSPDEEYMGEYAEPAWLAEPMVKAAFEKFSGRLKEAEGTIDMRNNNPENKNRCGAGIVPYELLKPFSEPGVTGRGIPNSISI

SEQ ID NO: 2557 - protein, 896 aa, Hordeum vulgare subsp. vulgare
MIHLKQPLVLSAQSSNVASPLFVAGGQQRRASGAGRTCSGRRLSARRISCASTEEAVGVSTSVTTKERALTVTAIVTAQVPTSVYVARGLDDIQDLFGKTLLLELVSSELDPKTGRERERVKGFAHMTLKEGTYEAKMSVPASFGPVGAVLVENEHHREMFIKDIKLITGGDESTAITFDVASWVHSKFDDPEPRAFFTVKSYLPSQTPPGIEALRKKELETLRGDGHSERKFHERVYDYDTYNDLGDPDKNIDHKRPVLGTKEHPYPRRCRTGRPKTLYDPETETRSSPVYVPRDEQFSDVKGRTFSATTLRSGLHAILPAVAPLLNNSHGFSHFPAIDALYSDGIPLPVDGHGGNSFNVINDVIPRVVQMIEDTTEHVLRFEVPEMLERDRFSWFRDEEFARQTLAGLNPICIRRLTEFPIVSKLDPAVYGPAESALSKEILEKMMNGRMTVEEAMEKKRLFLLDYHDVFLPYVHRVRELPDTTLYGSRTVFFLSDEGTLMPLAIELTRPQSPTKPQWKRAFTHGSDATESWLWKLAKAHVLTHDTGYHQLVSHWLRTHACVEPYIIATNRQLSRMHPVYRLLHPHFRYTMEINALAREALINADGIIEEAFLAGKYSIELSSVAYGAAWQFNTEALPEDLINRGLAVRRDDGELELAIKDYPYADDGLLIWGSIKQWASDYVDFYYKSDGDVAGDEELRAWWEEVRTKGHADKKDEPWWPVCDTKENLVQILTIIMWVTSGHHAAVNFGQYHYAGYFPNRPTVVRRNIPVEENRDDEMKKFMARPEEVLLQSLPSQMQAIKVMATLDILSSHSPDEEYMGEYAEPAWLAEPMVKAAFEKFSGRLKEAEGTIDMRNNNPENKNRCGAGIVPYELLKPFSEPGVTGRGIPNSISI

SEQ ID NO: 2558 - protein, 926 aa, Oryza sativa Japonica Group
MIHPNQPLALSAAKNASTVVVGSPLLAASPASSPAAACCSSQLQQRRAAGPGRRGAGRLAAPRCSTIEQAAGVSSAVTVDRTLTVTATVTVQPPIGVVYAARGIDDLTDLIGKTLLLELVSSELDPRTGKEKETVSAFAHRTMKQDTYEAEFAVPATFGPVGAVLVENEHHREMFVKEICLVTGADDSSAVTFDCNSWVHSKFDNPDRRIFFTVKSYLPAQTPKGIEALRKKELETLRGDGTGERKFFDRVYDYDVYNDLGDPDFKIEHLRPVLGGDEHPYPRRCRTGRPHTEIDPRTEKRRGPVYVPRDEQFSDVKGMTFSATTLRSGLHAMLPALEPLLANQELRFPHFPAIDGLYSVGIPLPAQLAAAGAATATAGGAAASSSTSTNIVGGVIPRLVRMIEDTTDHVLRFDVPEMFERDRFSWFRDEEFARQVLAGVNPICIQLLTEFPIVSKLDPEVYGPPESALTKELLESQIVESVTVEEAMAQRRLFILDYHDVFLPYVHRVRERPETTLYGSRTVFFLTGAGTLSPLAIELARPQSPTRPQWRRAFVHGPDATASWLWKLAKAHVLSHDTGYHQLVSHWLRTHCCVEPYIIAANRQLSRMHPVHRLLHPHFRYTMEINALARESLINADGIIEESFWPGRYAMELSSVAYAATWRFDAEALPEDLVRRGLAVRQEDGELELTIKDYPYANDGLLVWNSIKQWASDYIDFYYKSDEEVACDEEVRAWWEEVRTKGHADKKDEPWWPAVDTRDGLIGVLTTIMWVTSGHHAAVNFGQYHYGGYFPNRPTVMRKKMPVEENKEEEMKKFMEMPEHVLLDTMPSKMQAITIMATLDILSSHSPDEEYMGEHAEPAWLAEPRVKAAFERFAGRMKEIEGIVDERNNDPELRNRCGAGIVPYELLKPFSTPGVTGRGIPNSISI

SEQ ID NO: 2559 - protein, 671 aa, Sorghum bicolor
MSSNTKPAVSMLLQLLFLSLNLLAAFTTGDGQQFVYSGFSNNDLLVDGATMITSNGLLELTNGTDQQIGHAFYPTPLRFTRSPNGTVQSFSTSFVFAIQSVYTDLSAHGMAFIVAPSRNFSAALPGQFLGLTDIQNNGNSSNHFFTVELDTIENKEFSDINANHAGANVNGLKSLNSSSAGYYADEDGKFHNLSLISREAMQVWMDYDDSVSSITVTMAPLKVARPKKPLFTTTYNLTSVVTDVAYIGFSSATGTINVRHYVLGWSFNMSGPAPSIDISRLPELPRMSPKQSKVLQIVLPIASAAFVLAVGTVVFLLVRRHLKYAELREDWEVEFGPHRFSYKDLFYATEGFKDKHLLGIGGFGRVYKGILPVSKLEVAVKRVSHDSRQGMKEFIAEVVSIGRIQHRNLVRVLGYCRRRGELFLVYEYMPCGSVDKYLYGIEGKPILSWANRWHIIKGIASCLVYLHEEWEKVVIHRDIKPSNVLLDGDMNGRLGDFGLARLYDHDTDPQTTHVVGTIGYLAPELGHTSKATPLTDVFSFGTFLLEITCGRRPISESSQESQCMLVDWVLERWISGSLLETVDSRLQGNYNTAEACLALKLGLLCSHPFSNSRPTTRQVMQYLDGEMSLPEMTPTDMSFHMMAIMQNQGFDDYITGSTASIGTTSVVSSGR

SEQ ID NO: 2560 - protein, 683 aa, Zea mays
MSMLLQFLFLSLILLAASTTGGDGQQFAYSGFSTNDLVVDGATTITSNGLLELTNGTDQQTGHAFYPTPVQFTRSPNGTVQSFSTSFVFAILSVYTDLSAHGMAFVVAPSRNFPGALPGQFLGLTDIRNDGNASNHFFTVELDTIENKEFGDINANHAGANVNGLRSLNSSSAGYYADGDVNGGEFHFHNLSLISREAMQVWMDYDATASSITVTMAPSKAARPARPLFTATHNLTSVVTDAAYVGFSSATGTINTRHYVLGWSFAMNGPAPAIDVSRLPKLPRMGPKPLSKALEIVLPIATAAFVLAVGSAAFLLVRRHLKYAELREDWELEFGPHRFSYRDLLDATEGFKDELLLGVGGFGRVYKGTLPVSKLEVAVKRVSHDSRQGMKEFIAEVVSIGRIQHRNLVRVLGYCRRRGELFLVYEYMPSGSVDKYLYGNNEGTTRPVLSWEHRWRVVKGIASCLLYLHEEWEQVVVHRDIKPSNVLLDSDMNGRLGDFGLARLYDHDADPQTTHVVGTIGYLAPELGHTSKATPQTDVFSFGMFVLEITCGRRPVVVVVVGDDESSQEESQCMLVDWVLERWASSGALLETVDARLGGDYNAAEACLALKLGLLCSHPFSKSRPTARQVMQYLDGEVPLPEMAPTDMSLHMMAIMQNEGFDDYVVTGSTASIGTTSVVSGGR

SEQ ID NO: 2561 - protein, 669 aa, Oryza sativa Japonica Group
MSSSTLVLLQLLYLISLILPAFSANDDNQFAYSGFSGANLTMDGATITSGGLLELTNGTVQQKGHAFYPVPLRFVRSPNGSVLSFSASFVFAILSVYTDLSAHGMAFVIVPSMNFSAALPGQFLGLANIQSNGNSSNHFFAVELDTIQNKEFGDINANHAGVNMNGLRSEQSYYAGYYDDKDGNFHNLSLISREAMQVWVDYDSNNTQITVAMAPIKVARPMKPLFTASYNLTSVITDVAYVGFSSATGTINVRHCVLGWSFAINSPASAINLGKLPKLPRMGPKPRSKVLEIVLPVATASFVLTVGIIGLVLIRRHMRYTELREDWEVEFGPHRFSYKDLYHATEGFKNENLLGVGGFGRVYKGTLPVSKLEIAVKRVCHESRQGMKEFVAEIVSIGRLQHHNLVQLLGYCRRRGELFLVYDYMPNGSVDKYIHSIEGKTILTWAQRWHIIKGIASCLVYLHEEWEKAVIHRDIKASNVLLDGDMNGRLGDFGLARLYDHDDDPQTTHVVGTIGYLAPELGHTSKATPLTDVFAFGMFVLEVACGQRPINQSSLDSQTMLVDWVLEQWNKGSLVSTVDSRLEGNYNVREAVLAINLGLLCSHPFANARPSMRQVIHYLDGSIPLPEMSPTDLSYHMMTIMQNEGFDEYIMTSSSMVSNGTASAISNGR

SEQ ID NO: 2562 - protein, 699 aa, Oryza sativa Indica Group
MSSSTLVLLQLLYLISLILPAFSANDDNQFAYSGFSGANLTMDGATITSGGLLELTNGTVQQKGHAFYPVPLRFVRSPNGSVLSFSASFIFAILSVYTDLSAHGMAFVIVPSMNFSAALPGQFLGLANIQSNGNSSNHFFAVELDTIQNKEFGDINANHAGVNMNGLRSEQSYYAGYYDDKDGNFHNLSLISREAMQVWVDYDSNNTQITVAMAPIKVARPMKPLFTASYNLTSVITDVAYVGFSSATGTINVQHCVLGWSFAINSPASAINLGKLPKLPRMGPKPRSKVLEIVLPVATASFVLTVGIIGLVLIRRHMRYAELREDWEVEFGPHRFSYKDLYHATEGFKNENLLGVGGFGRVYKGTLPVSKLEIAVKRVCHESRQGMKEFVAEIVSIGRLQHHNLVQLLGYCRRRGELFLVYDYMPNGSVDKYIHSIEGKTILTWAQRWHIIKGIASCLVYLHEEWEKAVIHRDIKASNVLLDGDMNGRLGDFGLARLYDHDDDPQTTHVVGTIGYLAPELGHTSKATPLTDVFAFGMFVLEVACGQRPINQSSLDSQTMLVDWVLEQWNKGSLVSTVDSRLEGNYNVREAVLAINLGLLCSHPFANARPSMRQVIHYLDGSIPLPEMSPTDLSYHMMTIMQNEGFDEYIMTSSSMSEMLRHSSSTSAGLRRKWLKRSGRNGNGATGLGGYCSRAPFFV

SEQ ID NO: 2563 - protein, 699 aa, Oryza sativa Japonica Group
MSSSTLVLLQLLYLISLILPAFSANDDNQFAYSGFSGANLTMDGATITSGGLLELTNGTVQQKGHAFYPVPLRFVRSPNGSVLSFSASFVFAILSVYTDLSAHGMAFVIVPSMNFSAALPGQFLGLANIQSNGNSSNHFFAVELDTIQNKEFGDINANHAGVNMNGLRSEQSYYAGYYDDKDGNFHNLSLISREAMQVWVDYDSNNTQITVAMAPIKVARPMKPLFTASYNLTSVITDVAYVGFSSATGTINVRHCVLGWSFAINSPASAINLGKLPKLPRMGPKPRSKVLEIVLPVATASFVLTVGIIGLVLIRRHMRYTELREDWEVEFGPHRFSYKDLYHATEGFKNENLLGVGGFGRVYKGTLPVSKLEIAVKRVCHESRQGMKEFVAEIVSIGRLQHHNLVQLLGYCRRRGELFLVYDYMPNGSVDKYIHSIEGKTILTWAQRWHIIKGIASCLVYLHEEWEKAVIHRDIKASNVLLDGDMNGRLGDFGLARLYDHDDDPQTTHVVGTIGYLAPELGHTSKATPLTDVFAFGMFVLEVACGQRPINQSSLDSQTMLVDWVLEQWNKGSLVSTVDSRLEGNYNVREAVLAINLGLLCSHPFANARPSMRQVIHYLDGSIPLPEMSPTDLSYHMMTIMQNEGFDEYIMTSSSMSEMLRHSSSTSAGLRRKWLKRSGRNGNGATGLGGYCSRAPFFV

SEQ ID NO: 2564 - protein, 905 aa, Zea mays
MMNLNLKQPLVLPAHHSNVVGSRLSSSSPSAAAASRRTGGGVSSRSGSRRHVRLPRISCSATEEVSGAVSSVTVERMLTVTASVEASPAIGQMYFQRAVDDIGDLLGKTLLLELVSSELDAKSGVEKTRVTAYAHKTLREGHYEAEFKVPASFGPVGAVLVENEHHKEVFIKEIKLVTGGDSSTAVTFDCNSWVHSKFDNPEKRIFFTLKSYLPSDTPKGLEDLRKKDLQALRGDGHGERKVFERVYDYDVYNDLGDPDKNPAHQRPVLGGNKQYPYPRRCRTGRPRTKKDPETEMREGHNYVPRDEQFSEVKQLTFGATTLRSGLHALLPALRPLLINKKDLRFPHFPAIDDLFSDGIPLPAQTGFDAFRTVVPRMVKLVEDTTDHVLRFEVPEMIERDRFSWFKDEEFARQTIAGLNPLCIQLLTEFPIKSKLDPEVYGPAESAITKEILEKQMNGALTVEQALAAKRLFILDYHDVFLPYVHKVRELQDATLYASRTIFFLTDLGTLMPLAIELTRPKSPTRPQWKRAFTHGPDATDAWLWKLAKAHVLTHDTGYHQLVSHWLRTHCCVEPYIIAANRQLSRLHPVYRLLHPHFRYTMEINALAREALINADGIIEESFWPGKYAVELSSVAYGATWQFDTEALPNDLIKRGLAVRGEDGELELTIKDYPYAHDGLLVWDSIRQWASEYVNVYYKSDEAVAADPELRAFWDEVRNVGHGDKKDEPWWPVLDTRDSLVETLTTIMWVTSGHHSAVNFGQYHFAGYFPNRPTTIRKNMPVEEGGPGEEMEKFLKQPETTLLDMLPTQMQAIKVMTTLDILSSHSPDEEYMGEFAEPSWLAEPMVKAAFEKFGGRMKEIEGFIDECNNNLDLKNRCGAGIVPYELLKPFSKPGVTGRGIPSSISI

SEQ ID NO: 2565 - protein, 387 aa, Zea mays
MGGGDDRRAAALQRSSPWSVGERWRAHAGMVLVMLAYSGYHVLAKSVLNVGMNQVVFCVYRDLLALLVVAPVAFLRERRVRPPVTPQLLASFALLGFTGLYGNPLLCLVGLRYTNASYAAAFQPSIPVLTFLLAAIVGVEAISVFTKDGILKVTGTAVCVSGAILMALYRGPSLIALLRSMPTAWTSAPYHPATPDWFTPAVPVLEQGVEAWQLGVLCLIGNCLLVAVYLVVQAPVMIKYPASLSVTAYSYFFATTFMVLTGVCATSGLHEWALTKAEVIAVLYAGIVASCLSYSIMTWANKVLGPSLVALYNPLQPAFSTALSTVFLGDPVYLGSVIGGVSIIAGLYLVIWARYNQGQRAPTDGCLDPLIIVDNPRIHKTQESPFV

SEQ ID NO: 2566 - protein, 390 aa, Sorghum bicolor
MGDESNEREGTLLQRCSPHLCSVTAWRAHAGMVLVQLAFSGYHVLTKAVLNAGMNQVVFCVYRDLAALAILAPVAFLRERRLRPPVTPQLVACFALLGFTGLFVNPLLFLVGLRYTNASYAAAFEPSVPVFAFLLAVIAGVEAINIFSKDGILKVIGTVVCVSGALLMALYRGPSLIGLLGGATASPASENVTTIIPAAKWLTSTELEGGVETWFLGALCLIGHCFLVGAYLVMQVSVIKRYPASLSLTAYSYFFATVFMVFTGVVATNGLHEWALTNTEIIAVLYAGIVASCMSYALMTWANKILGPSLVALYNPLQPAFSTVLSTIFLGAPVYAGSIIGGVFIIAGLYLVTWARYNEVQRTTTDDYLDPLLVGHPRITKTQESSFMDP

SEQ ID NO: 2567 - protein, 302 aa, Sorghum bicolor
MAGGFVKTQKTNAYFKRFQVKFKRRRAGKTDYRARIRLINQDKNKYNTPKYRFVVRFTNKDITAQIVSASIAGDMVLAAAYSHELPRYGLEVGLTNYAAAYCTGLLLARRVLKIRDLDQEYEGNVEATGEDFSVEPAEGRRPFRALLDVGLIRTTTGNRVFGALKGALDGGLDIPHSDKRFAGFKKDDKQLDADIHRKYIYGLHVAEYMKNLADEEPEKYQAHFSEYIKKGIEADDMEALYKKVHAAIRADPSMAKSTKTPPKEHKRYNPKKLTYEQRKASLVERLNALNSSGDADDDEDDE

SEQ ID NO: 2568 - protein, 302 aa, Zea mays
MGGFVKTHKSNAYFKRFQVKFKRRRAGKTDYRARIRLINQDKNKYNTPKYRFVVRFTNKDITAQIISASIAGDMVLASAYSHELPRYGLEVGLTNYAAAYCTGLLLARRVLKTRGLDKEYEGNVEATGEDFSVEPADERRPFRALLDVGLIRTTTGNRVFGALKGALDGGLDIPHSEKRFAGFKKDDKQLDADIHRKYIYGGHVADYMRNLAEEEPEKYQSHFSEYIKKGIEADDMEALYKKVHAAIRADPSVVKSTKQPPKEHKRYNPKKLTYEQRKASLIERLNQLNSSGGADDDDEDDE

SEQ ID NO: 2569 - protein, 302 aa, Zea mays
MGGFVKTHKTNAYFKRFQVKFKRRRAGKTDYRARIRLINQDKNKYNTPKYRFVVRFTNKDITAQIISASIAGDMVLASAYSHELPRYGLEVGLTNYAAAYCTGLLLARRVLKIRGLDQEYEGNVEATGEDFSVEPADERRPFRALLDVGLIRTTTGNRVFGALKGALDGGLDIPHSEKRFAGFKKDDKQLDADTHRRYIYGGHVADYMKNLAEEEPEKYQSHFSAYIKKGVEADEIEALYKKVHAAIRADPSIVKSTKQPPKEHKRYNPKKLTYEQRKASLIERLNQLNSSGGADDDDEDDE

SEQ ID NO: 2570 - protein, 302 aa, Zea mays
MGGFVKTHKTNAYFKRFQVKFKRRRAGKTDYRARIRLINQDKNKYNTPKYRFVVRFTNKDITAQIISASIAGDMVLASAYSHELPRYGLEVGLTNYAAAYCTGLLLARRVLKIRGLDKEYEGNVEATGEDFSVEPADERRPFRALLDVGLIRTTTGNRVFGALKGALDGGLDIPHSEKRFAGFKKDDKQLDADTHRRYIYGGHVADYMKNLAEEEPEKYQSHFSAYIKKGVEAEEIEALYKKVHAAIRADPSVVKSTKQPPKEHKRYNPKKLTYEQRKASLIERLNQLNSSGGADDDDEDDE

SEQ ID NO: 2571 - protein, 301 aa, Hordeum vulgare subsp. vulgare
MVFVKNQKTRAYSKRFQVKFKRRRQGKTDYRARLRLTNQDKNKYNTPKYRFVVRFTNKDVTAQIVYATIAGDIVMAAAYSHELPRYGLEVGLTNYAAAYCTGLLLARRVLKCRDLDQEYEGNVEATGEDFSVEPSDERRPFRALLDVGLIRTTTGNRVFGALKGALDGGLDIPHSDKRFAGFKKDEKQLDAEIHRKYIYGGHVADYMKSLADEEPEKYQSHFSEYIKKGIEADGMEALYKKVHAAIRADPTIAKSTKEPPKTHKKYNPKKLTYEQRKASLVERLNALNSSGGADVDEDDDE

SEQ ID NO: 2572 - protein, 304 aa, Oryza sativa Indica Group
MGGFVKTQKTNAYYKRFQVKFKRRRQGKTDYRARIRLTNQDKNKYNTPKYRFVVRFTNKDITAQIVYATIAGDIVMAAAYSHELPRYGLEVGLTNYAAAYCTGLLLARRVLKLRGLDQEYEGNIEATGEDYYVEPADERRPFRALLDVGLIRTTTGNRVFGALKGALDGGLDIPHSDKRFAGFKKDEKQLDSDIHRKYIYGGHVADYMRSMAEEEPEKFQAHFSEYLKKGIDADGMEALYKKVHAAIRADPTMAKSTKKEPATHKRYNLKKLTYEQRKASLVERLNALNSSAGADDDDEEEDDE

SEQ ID NO: 2573 - protein, 304 aa, Oryza sativa Japonica Group
MGGFVKTQKTNAYHKRFQVKFKRRRQGKTDYRARIRLTNQDKNKYNTPKYRFVVRFTNKDITAQIVYATIAGDIVMAAAYSHELPRYGLEVGLTNYAAAYCTGLLLARRVLKLRGLDQEYEGNIEATGEDYYVEPADERRPFRALLDVGLIRTTTGNRVFGALKGALDGGLDIPHSDKRFAGFKKDEKQLDSDIHRKYIYGGHVADYMRSMAEEEPEKFQAHFSEYLKKGIDADGMEALYKKVHAAIRADPTMAKSTKKEPATHKRYNLKKLTYEQRKASLVERLNALNSSAGADDDDEEEDDE

SEQ ID NO: 2574 - protein, 304 aa, Oryza sativa Japonica Group
MGGFVKTQKTHAYFKRFQVKFKRRRQGKTDYRARIRLTNQDKNKYNTPKYRFVVRFTNKDITAQIVYATIAGDIVMAAAYSHELPRYGLEVGLTNYAAAYCTGLLLARRVLTLRGLDQEYEGNVEATGEDYYVEPADERRPFRALLDVGLIRTTTGNRVFGALKGALDGGLDIPHSDKRFAGFKKDEKQLDSDIHRKYIYGGHVADYMRSMAEEEPEKFQAHFSEYLKKGIDADGMESLYKKVHAAIRADPTMAKSTKKEPATHKRYNLKKLTYEQRKASLVERLNALNSSAGADDDDEEEDDE

SEQ ID NO: 2575 - protein, 301 aa, Oryza sativa Japonica Group
MGGFVKTQKTNAYHKRFQVKFKRRRQGKTDYRARIRLTNQDKNKYNTPKYRFVTNKDITAQIVYATIAGDIVMAAAYSHELPRYGLEVGLTNYAAAYCTGLLLARRVLKLRGLDQEYEGNIEATGEDYYVEPADERRPFRALLDVGLIRTTTGNRVFGALKGALDGGLDIPHSDKRFAGFKKDEKQLDSDIHRKYIYGGHVADYMRSMAEEEPEKFQAHFSEYLKKGIDADGMEALYKKVHAAIRADPTMAKSTKKEPATHKRYNLKKLTYEQRKASLVERLNALNSSAGADDDDEEEDDE

SEQ ID NO: 2576 - protein, 304 aa, Oryza sativa Japonica Group
MSLQGGFVKTQKTHAYFKRFQVKFKRRRQGKTDYRARIRLTNQDKNKYNTPKYRFVTNKDITAQIVYATIAGDIVMAAAYSHELPRYGLEVGLTNYAAAYCTGLLLARRVLTLRGLDQEYEGNVEATGEDYYVEPADERRPFRALLDVGLIRTTTGNRVFGALKGALDGGLDIPHSDKRFAGFKKDEKQLDSDIHRKYIYGGHVADYMRSMAEEEPEKFQAHFSEYLKKGIDADGMESLYKKVHAAIRADPTMAKSTKKEPATHKRYNLKKLTYEQRKASLVERLNALNSSAGADDDDEEEDDE

SEQ ID NO: 2577 - protein, 402 aa, Zea mays
MAGRREEWGGEVLQRQREEEEEEDEEEQEDEDFIDMDLSSAAARTPVAHEFEFMSAPLDRWGETLAASPADELFYKGKLLPLHLPPRIQMVEELLDGRGRGRGRDRDRDRELLFRGVSSTAPATPYESCNASPANSSCYGYGYASGELNVEEYFQEYAAGLALAEDAAAAPRKPWSRRLRFMRQLNLGLRLRASKAYLKTILFAARPGSPADEKSGLGAVAARGAREEIAAHGHGHLRAWTKNPFAQTRMNTRCVASHGGTSRAAAAAAGGRCKEREHGAHRRSFSSVIVRYSPSNKTSPVPALPPSSCSSSSASSSVRTSSGSSDGGVGPTLRRSSSASSEVENPVQGLIAYCKRSQQLASVRKSASDAGFRFLSSSASRIAAESESESDGLDELTEICRG

SEQ ID NO: 2578 - protein, 385 aa, Sorghum bicolor
MAGRREEGDGGEVQRQVEEEEEEDYIDMDLSSSAGAREFEFMSAPLDRWGEPLASPADELFYKGKLLPLHLPPRIQMVEELLDGRGGCSRGGSRELLHHLHGISISTAPATPYESCNASPANSCYVSGELNVEEYFQEYAAGLALADDDAAAATGGERKPWSRKLRFMRQLNLGLRLKASKAYLKTIFAANKPGNPDDLGAARGAREELAHGQPRAWRKKNPFAQIRSNRCIASHTGGVGVVGGSSRAAAPAGGRYKEREHGHRRSFSSVIVRYSSSNKTSSVPALPSSSSSSCSSSSSSSSASSSVRTSSESDGAGPALRRSSSASSEVENPIQGLIAYCKKSQQLASVRKSASDAGFRFLSSAASKIAAESDSLDELTEICRG

SEQ ID NO: 2579 - protein, 515 aa, Sorghum bicolor
MARAALRLGARSRALALLVLVSVALLPPVSSDDGYKHCEGVVRGWADSSTGREKDGDKLSLKDLLFFLHIPRTGGRTYFHCFLKKLYTNAQECPRSYDKLRFDPSHPDCKLVVSHDDYSLTSKLPRERTSVVTILRNPVDRVFSTYEFSVEVAARFLVHPNLTSAKLMTTRVLTKSRAVSTLDIWPWKYLVPWMREDLFARRDARGGDKVHSSKKVNAYDVEDMVMPLHQYINDPVAHEIIHNGATFQITGLTNNSYFDGAPEVRHCVRKHPDLGRIVLEVAKNRLDQMLYVGLTEDHEESARLFAHMVGAQVLSQSGTLNLDLKEDVPSETDSHSSMVEPEDEETNDHLNSTHGWQNNEALNSTNDEHGKGNMTVGKLMEAYETCIAKLRKSQSGRRKISLKKVQEANFSKEARKLVPEAILKQIISLNSLDMELYDHAKKIFTQEHLMLKAQQSMVGQHRQLAEQKEGWISIIFSDEICSPWMVVLLGIGITMIIVLVSFAVTTRKRTSKLKV

SEQ ID NO: 2580 - protein, 513 aa, Zea mays
MARAALRLGDRALALLVLVSVALLPLVSSDDGHKHCEGVVRGWADSSTGRVKDGDKLSLKDLLFFLHIPRTGGRTYFHCFLKKLYTNAQECPRSYDKLRFDPSHPDCKLVVSHDDYSLTSKLPRERTSVVTILRNPVDRVFSTYEFSVEVAARFLVHPNLTSAKLMTTRVLKKSRAVSTLDISPWKYLVPWMREDLFSRRDARGIDKVHSSKKVNAYDVEDMVMPLHQYINDPVAHEIIHNGATFQITGLTNNSYFDGAHEVRHCARKHPDLGRIVLEVAKNRLDQMLYVGLTEDHEESARLFAHMVGAQVLLQSGTLSLDLKEDLHSETDSHPSMVEPGDEEASEHLNNTHGWQNNEALNSTSDEQGKGNMTVGKLMEAYETCIAKLRKSQSSRRKISLKKVEEANFSKEARKLVPEAILKQIISLNSLDMELYDHAKKIFTQEHLMLKAQQSMAGQHRQLAEQEEGWIGTMCSDGTCSPWVVVLLGLGITTILVLATLAVTTRKRTSKLKV

SEQ ID NO: 2581 - protein, 511 aa, Zea mays
MARAALRLGVRALALLVLVSVALLPLVSSDDGYRHCEGVVRGWADASSGRVKDGDKLSLKDLLFFLHIPRTGGRTYFHCFLKKLYTNAQECPRSYDKLRFDPSHPDCKLVVSHDDYSLTSKLPRERTSVVTILRNPVDRVFSTYEFSVEVAARFLVHPNLTSAKLMTTRVLTKSRAVSTLDIWPWKYLVPWMREDLFARRDARGVYKVHSSKKVNAYDVDDMVMPLHRYINDPVAHEIIHNGATFQITGLTNNSYFDGAHEVRHCVRKHPDLGRIVLEVAKNRLDQMLYVGLTEDHEESARLFAHMVGAQVLSQSGTLTLDLKEDLPIETDSHPSMEPEDEETNGHLNSTHGWQNNEAMNSTNDEHGKGNMTVGKLMEAYETCIAKLWKSQSGRRKISLKKVQEANFSKEARKLVSEAILNQIISLNRLDMELYDHAKKIFTQEHLMLKAQQSMVGQHRQFGEQKGWIGAMCGDGICPPWMVVLVVLGISTIIVLVTLAVTTRKRTSKLKV

SEQ ID NO: 2582 - protein, 512 aa, Oryza sativa Indica Group
MAFGGLALALALLVVSVNLLQVASSDGDHARCEGVVKGWAASVAGSEGKDGDKLSLRDLLFFLHIPRTGGRTYFHCFLKKLYTNAEECPRSYDKLRFDPSHPDCKLVVSHDDYSFMSKLPSERTSVVTILRNPVDRVFSTYEFSVEVAARFLVHPNLTSAKLMTSRVLTKSRAVSTLDIWPWKYLVPWMREDLFARRDARGIDKVRSSHRVNAYDVEDMVMPLHQYINDPVAHEIIHNGATFQITGLTNNSYLSGAHEVRHCVRKHPDLGHFVLQVAKSRLDRMLYVGLTEEHEESARLFAHMVGAQVLSQSGALNLDIKDNQPTGNDSHSSTLDPEDEETNEHLNSTHGSQNNRALNAADTVKDDHGKGNLTVGKLMEAYEGCISKLRKSQSNRRKISLRKVEGANFSKEARWQVPEAVLEQIISLNSLDMELYEHAKKIFTQEHLMLKIQQSTVIQHKQLTDQKGWIEMVCSSWSCSPWKVVLFGLGVTITIALIILALTTRRRTFKLKV

SEQ ID NO: 2583 - protein, 592 aa, Oryza sativa Japonica Group
MGFAKYQTSSGEGLAGHRVFQRPAIWLRSLDTVRVKKGGAEAEEDGGWAQRNGASGEKENSCFRRDFPPTSTTRLFTSPRLGLGLVLRLLCLGTRRVNLLQVASSDGDHARCEGVVKGWAASVAGSEGKDGDKLSLRDLLFFLHIPRTGGRTYFHCFLKKLYTNAEECPRSYDKLRFDPSHPDCKLVVSHDDYSFMSKLPSERTSVVTILRNPVDRVFSTYEFSVEVAARFLVHPNLTSAKLMTSRVLTKSRAVSTLDIWPWKYLVPWMREDLFARRDARGIDKVRSSHRVNAYDVEDMVMPLHQYINDPVAHEIIHNGATFQITGLTNNSYLSGAHEVRHCVRKHPDLGHFVLQVAKSRLDRMLYVGLTEEHEESARLFAHMVGAQVLSQSGALNLDIKDNQPTGNDSHSSTLDPEDEETNEHLNSTHGSQNNRALNAADTVKDDHGKGNLTVGKLMEAYEGCISKLRKSQSNRRKISLRKVEGANFSKEARWQVPEAVLEQIISLNSLDMELYEHAKKIFTQEHLMLKIQQSTVIQHKQLTDQKGWIEMVCSSWSCSPWKVVLFGLGVTITIALIILALTTRRRTFKLKV

SEQ ID NO: 2584 - protein, 600 aa, Zea mays
  misc_feature (68)..(68): Xaa can be any naturally occurring amino acid
MKSLQEERAALVPSPWPQQQRKDGGEHDPEQLMDEDDGDDEEDLQDEQHTRTIRTSTKTAEASSSAEXRVPAWWRRRRAQKLVPTRGVGLVIAGLLVLVLLVVVGGGGNTSRRRWIHLDYASSFLLGSGGGGGLKQHQWPPHHVPSPAADLVPIPFSCGGNGSACPRRQTATSPPSPSPSSSSPPAATKSSSSKNKQPPPQCPDYFRFIHSDLSPWRETGITREAVERGRHRAAFRLVVVDGRAYVETYHRVFQTRDTFTQWGIAQLLARYPGRVPDLDLMFNCEDMPEVKVKPSEESSAPPLFRYCKDDSTVDIVFPDWSFWGWPEVNIRPWAPLLEEMAAEMGRLPWADREPYAYWKGNPTVSAERADLRRCNDSSSSGGTRVFWQDWGAAIRDGFRDSNLAKQCRYRYKIYVRGRSWSVSLKYILACDSPVLLIATPFKDFFSRGLVAGRHYWPIDPGARKCADINFAVHDWGNAHPEQARRMAEEGSGFARHQLSMDYVYDYMLHLLTQYAGLLRYKPTVPENAVELCAETVACPAAHHSNRREFDFMMQSRERYIADYQPCTLPPPFTDRHIREMTRRDQEVRANVHKMMTTVTP

SEQ ID NO: 2585 - protein, 594 aa, Sorghum bicolor
MKKSLEEQRDEEEGAALVPQHEHRQTISSPSPPHQDPEQSGDDDDDDAHHHHLVAAPAWWRRRAQKLVPTRGVGLVMAGLLVLALLVGSGSTSRWIHLDGYASLQSFLLGSGGGMKQHRWLPHHVPSPEADLVPIPFSCGNGTGSPGTCRRRRDTTTTTVQSSPSPSPSSMPPVASSSKVKSASKKLAPPPPPECPEYFRYIHSDLSPWRETGITREAVERGRHRAAFRLVVVDGRAYVETYHRVFQTRDTFTQWGIAQLLARYPGRVPDLDLMFNCEDMPEVRAADFAAAPSQAPPLFRYCKDDSTLDIVFPDWSFWGWPEVNIRPWAPLLEEMAAETARLPWAEREPYAYWKGNPGVSGERGDLLRCNDSSGEWRTRVFWQDWGAAIRDGFRNSNLAKQCRYRYKIFVRGRSWSVSQKYILACDSPVLLVATPFKDFFSRGLVAGKHYWPIDPGAGKCAGIKFAVDWGNAHPEQARRMAEEGSGFARHDLSMDYVYDYMLHLLTQYAALLRYKPTVPENAVELCAETVACPAAKNNNNREFDFMMESRERFVADYQPCTLPPPFTDDDIREMARRDQEVRANVHKLMTTMTP

SEQ ID NO: 2586 - protein, 409 aa, Zea mays; identical to SEQ ID NO: 1539

SEQ ID NO: 2587 - protein, 420 aa, Sorghum bicolor
MRGTMPATDSSSPAAAPLSSIGRSIAWSLRRDQNQIHSFPPPPPDDATDAFQRRAAHLLNNLLAPPAADDVLSLAWTRRLVDAFLLCLEEFRALLFGSGDAPAARPPLDRLVADFFDRAVKALDLCNAVRDGLDLVRQWRKHLAIAAAVLSSSSSPPPLGEAQIRRARKALTDLTILMLDDRDGGGVVGQRNRSFGRPANATNEKAARGHGQGHHRRSSSGGSSGSGSGSHLRSLSWSVSRAWSAARQLQAIGGGLPVPRPQDNAATGGLASAVYTMGAVLFIVAFALVAAIPCQDRGLHVHFSVPRNLACSGPITTLYERILDESKKKERKNSCGLLKEIHQIELSSRHLMEITDAAEFPLHEDKDVQVREAAQDLVHLCDTIKEGLDPLEREVRQMFHRIVRTRTEILDCLSKPHGTQ

SEQ ID NO: 2588 - protein, 425 aa, Oryza sativa
MPATDSSSAAAPLTSFGRSFLSHRRDQIPPPPPDHHSHSHTQHPSSSDLEIDAFHRHAADLLHDLLSDSNSDPSAPDLLSLAWTRRLLDSFLICLEEFRAILFALADSQPLSRPPLDRLLLDFLDRAVKALDLCNALRDGLDLIRQWRKHLAIAAAALAPAPAAQRGEAQIRRARKALTDLTILMLDDKDAGGVVGQRNRSFGRAGTTRDSLPHGHGHHRRSSSGGSSGSGSGSHLRSLSWSVSRTWSAARQLQAIGGGLTVPRANDIAATGGLASAVYAMGAVLFVVTWALVAAIPCQDRGLQAHLTAVPRTFPWAGPLITLFDRILDESKKKDRKHSCGLLKEIHQIERCSRQLMEVTDAAEFPLADDKDSEVQEATQELVQVCGSLKDGLDPLERQVREMFHRVVRTRTEILDYLSRPHNAG

SEQ ID NO: 2589 - protein, 427 aa, Oryza sativa Indica Group
MPATDSSSAAAPLTSFGRSFLSHRRDQIPPPPPDHHVPRPTPNTPLPPTSRSTPSTATPPTSSPTVLSDVQRPTPSAPDLLSLAWTRRLLDSFLIWLEEFRAILFALADSQPLSRPPLDRLLLDFLDRAVKALDLCNALRDGLDLIRQWRKHLAIAAAALAPAPAAQRGEAQIRRARKALTDLTILMLDDKDAGGVVGQRNRSFGRAGTTRDSLPHGHGHHRRSSSGGSSGSGSGSHLRSLSWSVSRTWSAARQLQAIGGGLTVPRANDIAATGGLASAVYAMGAVLFVVTWALVAAIPCQDRGLQAHLTAVPRTFPWAGPLITLFDRILDESKKKDRKHSCGLLKEIHQIERCSRQLMEVTDAAEFPLADDKDSEVQEATQELVQVCGSLKDGLDPLERQVREMFHRVVRTRTEILDYLSRPHNAG

SEQ ID NO: 2590 - protein, 490 aa, Oryza sativa Japonica Group
MTNQRRYKVREQSKRILHHKNIETYSTNIIIQPPKCCFNPDKRSWKRGEAIHPSINRLTLAPPPQCRPPIPRRRAAPLTSFGRSFLSHRRDQIPPPPPDHHSHSHTQHPSSSDLEIDAFHRHAADLLHDLLSDSNSDPSAPDLLSLAWTRRLLDSFLICLEEFRAILFALADSQPLSRPPLDRLLLDFLDRAVKALDLCNALRDGLDLIRQWRKHLAIAAAALAPAPAAQRGEAQIRRARKALTDLTILMLDDKDAGGVVGQRNRSFGRAGTTRDSLPHGHGHHRRSSSGGSSGSGSGSHLRSLSWSVSRTWSAARQLQAIGGGLTVPRANDIAATGGLASAVYAMGAVLFVVTWALVAAIPCQDRGLQAHLTAVPRTFPWAGPLITLFDRILDESKKKDRKHSCGLLKEIHQIERCSRQLMEVTDAAEFPLADDKDSEVQEATQELVQVCGSLKDGLDPLERQVREMFHRVVRTRTEILDYLSRPHNAG

SEQ ID NO: 2591 - protein, 371 aa, Sorghum bicolor
MGRLTPPPSEAAAVAPLLLVVVHVLLLAAAVSALPAINVTTMAFEDGYAPLFGHGNILRSADHRTVSLLLDRSTGSGFISSSMYQHGFFSASIKLPSDYTAGVVVAFYASNGDVFEKRHDELDFEFLGNIRGKPWRVQTNVYGNGSVGRGREERYVLPFDPTTEFHRYSILWTPAAVAFYVDDVPVREVRRSDAMGGDFPSKPMSVYATVWDASTWATSGGRYRVNYRYGPFVASFTDLALLGCRVDGPVAAIQQVLLPPVPSRCAADEEKLRASDVAVMTVEKQQAMRRFRERNMVYSYCYDTLRYPAAFPECDVVESERRRFKDSGHLRFAFRRRMGPRRSGGRAASRAAAAAASRDRDRDLKKRAADM

SEQ ID NO: 2592 - protein, 347 aa, Zea mays
MVCLTPAAAAPLLLVVVLAAAVSALPAINVTTMAFEDGYAPLFGHGNILRSADHRTVSLLLDRSTGSGFISSSMYQHGFFSASIKLPSDYTAGVVVAFYASNGDVFEKRHDELDFEFLGNIRGKPWRVQTNVYGNGSVGRGREERYVLPFDPTTEFHRYSILWTPAAVAFYVDDVPVREVRQSAAMGGDFPSKPMSVYATVWDASTWATAGGRYRVNYRYGPFVASFTDLALLGCRVDGPIQQTTAERCAAAAEALRASDVAVMTVEKQQAMRRFRERNMVYSYCYDTLRYPAAFPECDVVESERRRFKDTGHLRFALRRRMSPRRSHGRAASRDRVRELKKRAADM

SEQ ID NO: 2593 - protein, 504 aa, Sorghum bicolor
MPAAAQSVRAMAAAAAVVAMLLSTAAVAAAQHDYGDALHKCILFFEGQRSGRLPPDQRLRWRRDSGLHDGAAAGVDLTGGYYDAGDNVKFGFPMAFTATLMSWGLIDFGRSFGAHREEARKAVRWATDYLMKATARPNTVYVQVGDAFRDHACWERPEDMDTPRTVYKVDPSHPGSDVAAETAAALAAGSIVFRDADPAYSKRLLDRAVAVFEFADKYRGPYSSSLHAAVCPCYCDYSGYQDELLWGAAWLHKASRRREYREYIKRNEVVLGASDAINEFGWDNKHAGINVLISKEVLMGKDEYFQSFRVNADNFMCTLLPGISNHPQIQYSPGGLLFKVGSSNMQHVTQLSFLLLAYSNYLSHAGGRVSCGSSSASPVQLRRVAKRQVDYILGDNPLRMSYMVGYGARFPRRIHHRASSLPSVAAHPARIGCKAGAAYYASPAPNPNLLVGAVVGGPSDASDAFPDARAVFQQSEPTTYINAPLMGLLAYFSAHPNPAESGGD

SEQ ID NO: 2594 - protein, 497 aa, Oryza sativa Japonica Group
MAAAGGAVLLLVLATATSVTGQHDYSDALHKSILFFEGQRSGRLPPDQRLRWRRDSALNDGATAGVDLTGGYYDAGDNVKFGFPMAFTATLMSWGLIDFGRSFGAHAAEAREAVRWATDYLMKATATPNTVYVQVGDAFRDHSCWERPEDMDTPRTVYKVDPSHPGSDVAAETAAALAAASIVFRDADPDYSNRLLDRAIQVFEFADKYRGPYSSSLHAAVCPCYCDYSGYKDELLWGAAWLHKASRRREYRDYIKRNEVVLGASEAINEFGWDNKHAGINVLISKEVLMGKDEYFQSFRVNADNFICTLLPGISNHPQIQYSPGGLLFKVGNSNMQHVTSLSFLLLAYSNYLSHANVRVPCGTSSASPVQLRRVAKRQVDYILGDNPLRMSYMVGYGSRYPLRIHHRGSSLPSVAAHPAQIGCKAGATYYASAAPNPNLLVGAVVGGPSNTSDAFPDARAVFQQSEPTTYINAPLLGLLAYFSAHPNLAQSDLLYD

SEQ ID NO: 2595 - protein, 508 aa, Oryza sativa Japonica Group
MLAASLRVEAVAVVAAAVLVLLLSPAAVVVVAGQHDYGDALHKSILFFEGQRSGRLPPDQRLRWRRDSGLHDGAAASVDLTGGYYDAGDNVKFGFPMAFTATLMSWGLIDFGRSFGPHKEEARKAVRWATDYLMKATAKPNTVYVQVGDAFRDHSCWERPEDMDTPRTVYKVDPSHPGSDVAAETAAALAAGSIVFRDADPAYSKRLLDRAIAVFEFADKYRGPYSSSLHDAVCPCYCDFSGYKDELLWGAAWLHKASRRREYREYIKKNEVVLGASESINEFGWDNKHAGINVLISKEVLMGKDEYFQSFRVNADNFMCSLLPGISNHPQIQYSPGGLLFKVGGSNMQHVTSLSFLLLAYSNYLSHAGARVSCGAGGSASPTQLRRVAKRQVDYILGDNPLRMSYMVGYGARFPRRIHHRGSSLPSVAAHPARIGCKGGAAYYASAAPNPNLLVGAVVGGPSDATDAFPDARAVFQQSEPTTYINAPLMGLLAYFSAHPNPAEWADD

SEQ ID NO: 2596 - protein, 507 aa, Zea mays
  misc_feature (453)..(453): Xaa can be any naturally occurring amino acid
  misc_feature (479)..(479): Xaa can be any naturally occurring amino acid
MSAAASQSSVKAMAAAAAAVAMLLSAAAAVAAQHDYGDALHKCILFFEGQRSGRLPPDQRLRWRRDSGLHDGAAAGVDLTGGYYDAGDNVKFGFPMAFTATLMSWGLIDFGRSFGPHREEARKAVRWATDYLMKATAKRNTVYVQVGDAFRDHACWERPEDMDTPRTVYKVDPSHPGSDVAAETAAALAAGSIVFRDADPAYSKRLLDRAVAVFEFADKYRGPYSSSLHAAVCPCYCDYSGYQDELLWGAAWLHKATRRREYREYIKRNEVVLGASDAINEFGWDNKHAGINVLISKEVLMGKDEYFQSFRVNADNFMCTLLPGISNHPQIQYSPGGLLFKVGSSNMQHVTQLSFLLLAYSNYLSHAGGRVSCGSSSASPVQLRRVAKRQVDYILGDNPLRMSYMVGVRRAVPAADPPPPPAPLPSVAAHPARIGCKAGAAYYTSPAPNPNLXVGAVVGGPTDDSDAFPDARAVFQQSXPTTYINAPLMGLLAYFSAHPNPAESGGD

SEQ ID NO: 2597 - protein, 516 aa, Hordeum vulgare subsp. vulgare
LNFFRSAAAPVLPLAVRAAMGLSSALVLALLLLPAVASAGHHDYGDALHKSILFFEGQRSGRLPPDQRLRWRRDSGLHDGAAAGVDLTGGYYDAGDNVKFGFPMAFTATLMSWGLIDFGRSFGPHKEEARKAVRWATDYFMKATAKPNTVYVQVGDAFKDHSCWERPEDMDTPRTVYKVDPSHPGSDVAAETAAALAAGSIVFRDADPVYSQRLLDRAMAVFKFADRYRGAYSSSLHAAVCPCYCDFDGYQDELLWAAAWLHKASRRREYRQYIKKNEVVLGASDSINEFGWDNKHAGINVLISKEVLMGKDEYFQSFRVNANNFMCTLLPGISDHPQIQYSPGGLLFKVGGSNMQHVTSLSFLILAYSNYLSHAGAHVSCGGGGRTAPPTKLRQVAKRQVDYILGDNPLRMSYMVGYGPRFPRRIHHRGSSIPSVAAHPARIGCKAGAAYYATAAPNPNLLVGAVVGGPTDATDAFPDARAVFQQSEPTTYINAPLMGLLAYFSAHPNPAEWADD

SEQ ID NO: 2598 - protein, 503 aa, Hordeum vulgare subsp. vulgare
MASPARKAMVAAAAMLLLLLLLSTAAVAQHNYGDALHKSILFFEGQRSGRLPPDQRVRWRRDSALNDGATAGVDLTGGYYDAGDNVKFGFPMAFTTTLMSWGLIDFGKNFGSHGGEARAAVRWATDYLMKATATPNTVYVQVGDAFRDHSCWERPEDMDTPRTVYKVDPAHPGSDVAAETAAALAAGSIVFREADPAYSKRLLDRAISVFEFADKYRGAYSSSLYSAVCPCYCDYDGYQDELLWGAAWLHKASRQRVYRDYIKKNEVALGASDSINEFGWDNKHAGINILISKEVLMGKDSFFKSFQVNADNFICTLLPGISNHPQIEYSPGGLLFKVGNSNMQHVTSLSFLLLAYANYASHANVRVPCGGSSASPVVLRRVAKRQVDYILGDNPLRMSYMVGYGERFPRRIHHRGSSLPSVSAHPARIGCKAGAAYYGSSAPNPNLLVGAVVGGPSNTSDNFPDARAVFQQSEPTTYINAPLLGLLAYFSAHPNLPQSDGTD

SEQ ID NO: 2599 - protein, 411 aa, Zea mays
MAFTATLMSWGLIDFGRSFGPHREEARKAVRWATDYLMKATAKRNTVYVQVGDAFRDHACWERPEDMDTPRTVYKVDPSHPGSDVAAETAAALAAGSIVFRDADPAYSKRLLDRAVAVFEFADKYRGPYSSSLHAAVCPCYCDYSGYQDELLWGAAWLHKATRRREYREYIKRNEVVLGASDAINEFGWDNKHAGINVLISKEVLMGKDEYFQSFRVNADNFMCTLLPGISNHPQIQYSPGGLLFKVGSSNMQHVTQLSFLLLAYSNYLSHAGGRVSCGSSSASPVQLRRVAKRQVDYILGDNPLRMSYMVGYGARFPRRIHHRASSLPSVAAHPARIGCKAGAAYYTSPAPNPNLLVGAVVGGPTDDSDAFPDARAVFQQSEPTTYINAPLMGLLAYFSAHPNPAESGGD

SEQ ID NO: 2600 - protein, 500 aa, Zea mays
MARLVSTATKAMAVVVLAAASAALAAHDYGDALHKSILFFEGQRSGRLPPNQRLRWRQDSAIHDGAEAGVDLTGGYYDAGDNVKFGFPMAFTATLMSWGLIDFGRSFGAHEAEARDAVRWATDYLMKATATPGVVYVQVGDASRDHACWERPEDMDTPRTVYRVDAAHPGSDVAAETAAALAAGSIVFRDADPGYSRRLLGRAAEVFEFADRHRGAYSGSLRAAVCPCYCDYDGYQDELLWGAAWLHRASRRREYRDYIKRNEVALGASDAINEFGWDNKHAGINVLISKEVLMGKDEFFRSFRENADNFICSLLPGISGHPQIQYSPGGLLFKVGNSNMQHVTSLSFLLLVYSNYLSHADARVPCSSSSSAAAASPVQLRRVAKRQVDYILGDNPLRMSYMVGYGPRYPLRIHHRASSLPSVSAHPARIGCKAGAAYYASPAPNPNLLVGAVVGGPSNSTDAFPDARAVFQQSEPTTYINAPLLGLLAYFSQHPDPAQH

SEQ ID NO: 2601 - protein, 796 aa, Sorghum bicolor
MGRSYIDGGRDAGTTDLGYPLVAVCIDKDKNSQNALKWAIDSLVQKGQTIVLVHVNTKGTSGGVEDAAGFKQPTDPHMKDLFLPFRCFCTRKDIYCKDVVLDEHDVAKSIIEFSAHAAVEKLVLGATARGGFVRFKADIPTTISKGAPDFCTVYVVNKGKVSSQRNSIRPAPRVSPLRSQIQSLQSATAATPKPEPPPQSQRWSSSSRGQSDHGETPRVDNFRSPFARGGPGNTRKSYADLSHMSMPDSADISFVSSTGRRSVEQYSAIPPRMSNGSVDSYDHSFEMSRTPSKWGGDSFGGGMDHTTFSQSSSSSFCSLGMQDDVEAEMKRLRLELKQTMDMYSTACKEALTAKQKAMELQRWKMEEEQKTQDSRITEDSAMAMIEREKAKAKAAMEAAEASQRIAEMEVQKRISAEKKLLKEAEERKNRGGSGMSHEVRYRRYVIEEIEQATNNFDDTRKVGEGGYGPVYKGFLDHTQVAIKVLRPDAAQGRSQFQQEVEVLSCIRHPNMVLLLGACPEYGCLVYEYMASGSLDDCLFRRSGTGPVIPWQHRFRICAEIATGLLFLHQTKPEPLVHRDLKPGNILLDRNYVSKISDVGLARLVPPSVADTVTQYRMTSTAGTFCYIDPEYQQTGMLGTKSDIYSFGVMLLQIITAKPPMGLSHHVGRAIERGALLDMLDPAVPDWPLEEAQCLAEMALRCCELRRKDRPDLGAVVLPELNRLRALGEDNMQYCGGAMIRGGGGGCGGGGGMYSSPFHSNISRSHAAEMMVDSQYPRSVFNSRASDSPKPPRRSNA

SEQ ID NO: 2602 - protein, 788 aa, Zea mays
MGRSYLEGGRDAGADLGYPLVAVCIDKDKNSQNALKWAIDSLVQKGQTIVLVHVNTKGTSGGVEDAAGFKQPTDPHMKDLFVPFRCFCTRKDINCKDVVLDEHDVAKSIIEFSAQAAVEKLVLGATTRGGFVRFKADIPTTISKGAPDFCSVYIVNKGKVSSQRNSTRAAPRVSPLRSQIQSSQIAAMPKPEPPQSHRWSSSSRGHEHGETPRVDNFRSPFARGGPANTRKSYADLSHMSMPDSADISFVSSTGRRSVDHHPAIPPRMSNGSVDSYDHSFEMSRTPSKWGGDSFGGMDHTTFSQSSSSSFCSLGMQDDVEAEMKRLRLELKQTMDMYSTACKEALTAKQKAMELQRWKMEEEQKTQDSRITEDSAMAMIEREKARAKAAMEAAEASQRIAEMEVQKRISAEKKLLKEAEERKNRGGSGMSHEARYRRYSIEEIEQATDNFNDARKVGEGGYGPVYKGFLDHTQVAIKVLRPDAAQGRSQFQQEVEVLSCIRHPNMVLLLGACPEYGCLVYEYMASGSLDDCLFRRSGGAGGPVIPWQHRFRICAEIATGLLFLHQTKPEPLVHRDLKPGNILLDRNYVSKISDVGLARLVPPSVADTVTQYRMTSTAGTFCYIDPEYQQTGMLGVKSDVYSFGVMLLQIITAKPPMGLSHHVGRALERGELQDMLDPAVPDWPLEEAQCLAEMALRCCELRRKDRPDLGAVVLPELNRLRALGEDNMQYCGAIIRGGGGGGGGMHSSSPFHSNISRSHAEMMIDSQYPRSVFSSRAGDSPMPPRRSNA

SEQ ID NO: 2603 - protein, 789 aa, Zea mays
MGRSYLEGGRDAGADLGYPLVAVCIDKDKNSQNALKWAIDSLVQKGQTIVLVHVNTKGTSGGVEDAAGFKQPTDPHMKDLFVPFRCFCTRKDINCKDVVLDEHDVAKSIIEFSAQAAVEKLVLGATTRGGFVRFKADIPTTISKGAPDFCSVYIVNKGKVSSQRNSTRAAPRVSPLRSQIQSSQIAAMPKPEPPQSHRWSSSSRGHEHGETPRVDNFRSPFARGGPANTRKSYADLSHMSMPDSADISFVSSTGRRSVDHHPAIPPRMSNGSVDSYDHSFEMSRTPSKWGGDSFGGMDHTTFSQSSSSSFCSLGMQDDVEAEMKRLRLELKQTMDMYSTACKEALTAKQKAMELQRWKMEEEQKTQDSRITEDSAMAMIEREKARAKAAMEAAEASQRIAEMEVQKRISAEKKLLKEAEERKNRGGSGMSHEARYRRYSIEEIEQATDNFHDARKVGEGGYGPVYKGFLDHTQVAIKGLRPDAAQGRAQFPPEVEGLSCIRHPNWVLPPRPGPRSTAASCTSTWPAAAWTTACSRRSGGAGGPVIPWQHRFRICAEIATGLLFLHQTKPEPLVHRDLKPGNILLDRNYVSKISDVGLARLVPPSVADTVTQYRMTSTAGTFCYIDPEYQQTGMLGVKSDVYSFGVMLLQIITAKPPMGLSHHVGRALERGELQDMLDPAVPDWPLEEAQCLAEMALRCCELRRKDRPDLGAVVLPELNRLRALGEDNMQYCGAIIRGGGGGGGGMHSSSPFHSNISRSHAEMMIDSQYPRSVFSSRAGDSPMPPRRSNA

SEQ ID NO: 2604 - protein, 800 aa, Oryza sativa Japonica Group
MERYHDGKDLDTSSYPLVAVCIDKDKNSQNALKWAIDTLVQKGQIIVLVHVNTKGTSGNLLFYNSTKKSSGGVEDASGFKQPTDPHMRDLYRTFRCFCTRKDIQCKDVLLDDHDVAKSITEFCAVAAIEKLVVGATARGGFRFKADIPTTISKGAPDFCTVYVINKGKVSSVRNSTRQAPRVSPLRSQIQNMAAAAAKPEPATAMAPTPQKWSSSSRGHDHLETPKVDSYIRSPFARGPMGGATRKSYADLSHLSMPDSADISFVSSGRRSVEHNPVPARLSAASAESYDHSFETSRTPWGGDSFGGNDHTSFSQSSTSSFCSIGMDDVETEMKRLRLELKQTMDMYSTACKEALNAKQKAMELQRWKAEEEQRTHDARLTEESAMALIEREKAKAKAAMDAAEASQRIAELEVQKRITAEKKLLKEAEDRKNRGGGGGGMSHEIRYRRYSIEEIEHATDRFNDARKIGEGGYGPVYKGHLDHTAVAIKVLRPDAAQGRSQFQQEVEVLSCIRHPNMVLLLGACPEYGCLVYEYMANGSLDDCLFRRGGGGGGGGGPVIPWQHRFRIAAEIATGLLFLHQTKPEPLVHRDLKPGNILLDRNYVSKISDVGLARLVPPNVADNVTQYRMTSTAGTFCYIDPEYQQTGMLGVKSDVYSLGVMLLQIITAKPPMGLTHHVGRAMERGALADMLDPAVPDWPVEEAQCLAEMALRCCELRRKDRPDLGSAVLPELNRLRALGEDNMQFCGAIRGGVGGGLYSSSLLSTPSRSQAAEFMGDSQYPRSVFSSRTGESPMPLRRSNV

SEQ ID NO: 2605 - protein, 808 aa, Hordeum vulgare subsp. vulgare
MGRYDGGKEAADTQLGYPLVAVCIDKDKNSQNALKWAIDTIVGKGQTIVLVHVNTKGVSVGVEDAAGFKQPTDPHLKELFLPFRCFCTRKDIQCKDVVLDDNDVGKSIIEFAAHGAIEKLVTGACTRGGFVRFKADIPTTICKGAPDFCTVYVINKGNKVSAQRNSIRPAPRVSPLRSQIVNMSAAAAAKPPEPAMPVPANQKWSMSSRGNDNGETPRVDPFIRSPFTRGSMGPTRKSYADLSHMSMPDAADISFVSGGRRSTADSSDISFISSNGGGGRRSIDYYQQSAPRMSNGSSLDSYDHSFEMTPNKWGGDSFTGDMSFSQSSASSFCSSGMDDVEAEMKRLRLELKQTMDMYSTACKEALNAKQKANELQRWKAEEEQKRQDQHITEESALQMIEREKAKAKAAMEAAEASQRIAELEVQKRISAEKKLLKEAEERKHRGGGGGGGGGELRYRRYTIEEIEHATAHFDDARKVGEGGYGPVYNAYLDHTQVAIKVLRPDAAQGRSQFQQEVEVLSCIRHPNMVLLLGACPEYGCLVYEYMANGSLDDCLFRRGGATGGPVIPWQHRFRICAEIATGLLFLHQKKPEPLVHRDLKPGNILLDRNYVSKISDVGLARLVPPNVADNVTQYRMTSTAGTFCYIDPEYQQTGMLGVKSDVYSLGVMLLQIITAKPPMGLTHHIGRALERGTLGELLDPAVPDWPVEEAQCLAEMALRCCELRRKDRPDLGNVVLPELNRLRALGEDNMQFCGGAIQGGLGGGRHSSAYHSKTTASRAAEANNDPYPMKSVFSRASESAMPPRRSNV

SEQ ID NO: 2606 - protein, 744 aa, Oryza sativa Indica Group
MGNIGGSGVSLNRRLGRRGGVEDASGFKQPTDPHMRDLYRTFRCFCTRKDIQCKDVLLDDHDVAKSITEFCAVAAIEKLVVGATARGGFRFKADIPTTISKGAPDFCTVYVINKGKVSSVRNSTRQAPRVSPLRSQIQNMAAAAAKPEPATAMAPTPQKWSSSSRGHDHLETPKVDSYIRSPFARGPMGGATRKSYADLSHLSMPDSADISFVSSGRRSVEHNPVPARLSAASAESYDHSFETSRTPWGGDSFGGNDHTSFSQSSTSSFCSIGMDDVETEMKRLRLELKQTMDMYSTACKEALNAKQKAMELQRWKAEEEQRTHDARLTEESAMALIEREKAKAKAAMDAAEASQRIAELEVQKRITAEKKLLKEAEDRKNRGGGGGGMSHEIRYRRYSIEEIEHATDRFNDARKIGEGGYGPVYKGHLDHTAVAIKVLRPDAAQGRSQFQQEVEVLSCIRHPNMVLLLGACPEYGCLVYEYMANGSLDDCLFRRGGGGGPVIPWQHRFRIAAEIATGLLFLHQTKPEPLVHRDLKPGNILLDRNYVSKISDVGLARLVPPNVADNVTQYRMTSTAGTFCYIDPEYQQTGMLGVKSDVYSLGVMLLQIITAKPPMGLTHHVGRAMERGALADMLDPAVPDWPVEEAQCLAEMALRCCELRRKDRPDLGSAVLPELNRLRALGEDNMQFCGAIRGGVGGGLYSSSLLSTPSRSQAAEFMGDSQYPRSVFSSRTGESPMPPRRSNV

SEQ ID NO: 2607 - protein, 211 aa, Sorghum bicolor
MTMAASSALRLILGSSSASRRQILSEMGYKFTLLSADIDEKAIRKEKPEELVVALAHAKADAILEKMQNNGMMKEIVDSQETTLMITADQVVIHDGVIREKPSTPEEARKFIKGYSESHAATIGSVLVTNVKTGARREGWDKAEVYFHKIPDEVVESLIEEGNVFYVAGGLLVEHPLTSPLVEAIVGTIDSVMGLPKALTEKLIKESLSEP

SEQ ID NO: 2608 - protein, 209 aa, Zea mays
MAASSALRLILGSSSASRRQILSEMGYKFTLLSADIDEKAIRKENPEELVVALAHAKADAILEKMQNNGMMKEILDSQDTTLMITADQVVLHDGVIREKPSTPEEARKFIKGYSESHAATIGSVLVTNVKTGARREGWDKAEVYFHKIPDEVVESLIEEGDVFYVAGGLLVEHPLTSPLVEAIVGTIDSVMGLPKALTEKLIKESLSET

SEQ ID NO: 2609 - protein, 209 aa, Hordeum vulgare subsp. vulgare
MAASSALRLILGSSSASRRQILAEMGYQFKLLSADIDEKEIRKEKPEELVVALAHAKADAILDKMQNNGMMKEIVDSQETTLLITADQVVIHDGVIREKPTTPEEARKFIQGYSQSHAATIGSVLVTNVKTGTRREGWDKSEVYFHKIPNEVVESLIEEGNVFYVAGGLLVEHPLTSPLVEAIVGTIDSVMGLPKALTEQLINDSLQEP

SEQ ID NO: 2610 - protein, 209 aa, Oryza sativa Japonica Group
MAASSSLRLILGSSSASRRQILAEMGYSFTLLSADIDEKEIRKEKPEELVVALAHAKADAIMEKLRDNGMMKEILDSQETTLLITADQVVVHDGVIREKPSTPEEARKFIKGYSESHAATIGSVLVTNVKSGARKEGWDKAEVYFHKIPDEVVESLIEEGDVFYVAGGLLVEHPLTSPLVEAIVGTIDSVMGLPKSLTEKLIKESLEEP

SEQ ID NO: 2611 - protein, 238 aa, Oryza sativa Indica Group
MAASSSLRVITAPPKSLLFSFVTSRSLIRVGGWLTMQLILGSSSASRRQILAEMGYSFTLLSADIDEKEIRKEKPEELVVALAHAKADAIMEKLRDNGMMKEILDSQETTLLITADQVVVHDGVIREKPSTPEEARKFIKGYSESHAATIGSVLVTNVKSGARKEGWDKAEVYFHKIPDEVVESLIEEGDVFYVAGGLLVEHPLTSPLVEAIVGTIDSVMGLPKSLTEKLIKESLEEP

SEQ ID NO: 2612 - protein, 520 aa, Zea mays
MDHHRTPMENSASSKPPTPASTPNSRLASAPSPRHSATPPHASAPASAPAPASRTVYSDRFIPSRAGSNLALFDLGPSPSPAAAAASSSSSHEAGPAASSGSAPAAASPYCALLRAALFGLDTPDRVASSAAACSSSSSSPGLSPVGTPATGNIFRFKTEVRRNAKRALFSGGEEEEDALFPGIFTTRGAGPRKVPRSPYKVLDAPALQDDFYLNLVDWSSHNVLAVGLGNCVYLWNACSSKVTKLCDLGVDDNVCSVGWAQRGTHLAVGTNQGKVQIWDATRCKRIRTMESHRMRVGALAWSSSLLSSGSRDKSILHHDIRAQEDHVSKLTGHKSEVCGLKWSYDNRQLASGGNDNRLFVWNPHSVQPVLKYTEHTAAVKAIAWSPHLHGLLASGGGTADRCIRFWNTTTNAHLSCVDTGSQVCNLAWSKNVNELVSTHGYSQNQIIVWRYPTMSKLATLTGHTYRVLYLAISPDGQTIVTGAGDETLRFWNVFPSPKSQSSDSLSCVGGTSFVRSYIR

SEQ ID NO: 2613 - protein, 519 aa, Sorghum bicolor
MDHHLTPSPPSPMENSAAGPSSKPPTPASTPNSRLASAPSSRHSATTSHASAPSSAPTPASRTVYSDRFIPSRTGSNLALFDLAPSPSAASSSHEGGPAVSSGSATAASPYCALLRAALFGPDTPDRVASSATACSSSSSPGPSPVGTPATGNIFRFKTEVRRSAKRALFSGEEEEDALFPGIFTTRGAGPRKVPRSPYKVLDAPALQDDFYLNLVDWSSHNVLAVGLGNCVYLWNACSSKVTKLCDLGVDDNVCSVGWAQRGTHLAVGTNQGKVQIWDATRCKRIRTMESHRMRVGALAWSSSLLSSGSRDKSILHHDIRAQEDYVSKLTGHKSEVCGLKWSYDNRQLASGGNDNRLFVWNPHSVQPVLKYTEHTAAVKAIAWSPHLHGLLASGGGTADRCIRFWNTTTNTNLSCVDTGSQVCNLAWSKNVNELVSTHGYSQNQIIVWRYPTMSKLATLTGHTYRVLYLAISPDGQTIVTGAGDETLRFWNVFPSPKSQSSDSLSCIGGTSFVRSYIR

SEQ ID NO: 2614 - protein, 523 aa, Oryza sativa Japonica Group
MDHHHHHLPPPPPRSPMENSASSKPPTPASTPSSRLAAAPSSRVSSAAPHPSPSSSAPTPASRTVYSDRFIPSRAGSNLALFDLAPSPSHHDAAAAAASPGAPPPSGSTPASSPYCALLRAALFGPTTPDRVASSASACSSSSSAGASPVGSPATGNIFRFKAEVPRNAKRALFSDGDDEGVLFPGVFTTRGTGPRKIPRSPYKVLDAPALQDDFYLNLVDWSSHNILAVGLGNCVYLWNACSSKVTKLCDLGVDDNVCSVGWAQRGTHLAVGTNQGKVQVWDATRCKRIRTMESHRMRVGALAWNSSLLSSGSRDKSILHHDIRAQDDYISRLAGHKSEVCGLKWSYDNRQLASGGNDNRLYVWNQHSAHPVLKYTEHTAAVKAIAWSPHLHGLLASGGGTADRCIRFWNTTTNMHLNCVDTGSQVCNLVWSKNVNELVSTHGYSQNQIIVWRYPTMSKLATLTGHTYRVLYLAISPDGQTIVTGAGDETLRFWNVFPSPKSQSSDSLSSIGATSFVRSYIR

SEQ ID NO: 2615 - protein, 562 aa, Oryza sativa Japonica Group
MENSASSKPPTPASTPSSRLAAAPSSRVSSAAPHPSPSSSAPTPASRTVYSDRFIPSRAGSNLALFDLAPSPSHHDAAAAAASPGAPPPSGSTPASSPYCALLRAALFGPTTPDRVASSASACSSSSSAGASPVGSPATGNIFRFKAEVPRNAKRALFSDGDDEGVLFPGVFTTRGTGPRKIPRSPYKVLDAPALQDDFYLNLVDWSSHNILAVGLGNCVYLWNACSSKVTKLCDLGVDDNVCSVGWAQRGTHLAVGTNQGKVQVWDATRCKRIRTMESHRMRVGALAWNSSLLSSGSRDKSILHHDIRAQDDYISRLAGHKSEVCGLKWSYDNRQLASGGNDNRLYVWNQHSAHPVLKYTEHTAAVKAIAWSPHLHGLLASGGGTADRCIRFWNTTTNMHLNCVDTGSQVCNLVWSKNVNELVSTHGYSQNQIIVWRYPTMSKLATLTGHTYRVLYLAISPDGQTIVTGAGDETLRFWNVFPSPKSQSSDSLSSIGATSFVRSYIRQLGAGALMYTMLGLNNIGQLMMLIASKLEYAKEAGEFLVQCPIPAGVVSCTVALL

SEQ ID NO: 2616 - protein, 510 aa, Hordeum vulgare subsp. vulgare
MDQHHHQQGQPADGNSKPPTPSSTPTSRHATGAAAAPWPPSSASSAPPRGPASSSAPATPASRTVYSDRFIPSRTGSNLALFDLAPAPAPSATASSSSAGSAAPSPYCALLRAALFGPDTPDRLASSAAASSSSSPVGSPAGGNIFRFKAEVPRNAKRALFAAGDDQDLLFPGLFSPKGSGPRKIPRSPYKVLDAPALQDDFYLNLVDWSSHNVLSVGLGNCVYLWNACSSKVTKLCDLGADDTVCSVSWAQRGTHLAVGTNQGTVQIWDATRCKRMRTMESHRMRVGALAWNSSLLSSGSRDKNILHHDLRAPEDYVSKLTGHKSEVCGLKWSYDNRQLASGGNDNKLFVWNQHSVQPVLKYTEHTAAVKAIAWSPHLHGLLASGGGTADRCIRFWNTTTNTHLSSMDTGSQVCNLVWSKNVNELVSTHGYSQNQIIVWRYPTMSKLATLTGHTFRVLYLAISPDGQTIVTGAGDETLRFWNVFPSPKSQSSDSLSSIGATSFVRSYIR

SEQ ID NO: 2617 - protein, 691 aa, Zea mays
MASSPSPSPGTIRAPLPPSSATPSPATTTPTPASPAPVTQPNATPADPPSSPVAPPPVPSASTPPPQLTSPPPSLPPPPPDAVPPPPLVASPPPAPAAVVPPPSPPAPVAVPPPPTPAAPPKASPIHIRPPAAASPPPTILPTPNPPADPTPPTLAQPPPPRRRPPRTPQTEPPPLAPPPSGIPVKPSTSSPSPTSADPLIPTPSSPSPPGTTTPGSGSTPSVPAPAMAADPVRPVTTGGSNKSSSPASQSSGSPVDSGGMSSGAKAGIGAVVAILVLTSFVGAAFWYRKKRRRVHGYHAGFLMPSPASTTTQVLAKTNFSAGSPESKDSMPEFSMGNCRFFTYEELYQVTNGFSAQNLLGEGGFGSVYKGCLADGEFAVKKLKDGGGQGEREFHAEVDIISRVHHRHLVSLVGYCISDEQRLLVYDFVPNNTLHYHLHGLGVPVLEWPSRVKIAAGSARGIAYLHEDCHPRIIHRDIKSSNILLDNNFEALVADFGLARIAMDACTHVTTRVMGTFGYLAPEYASSGKLTERSDVFSFGVVLLELITGRKPVDASKPLGDESLVEWARPLLTQALETGNAGELVDARLNRNYNEVEMFRMIEAAAACIRHSASRRPRMSQVVRVLDSLADVDLTNGVQPGKSEMFNVANTAEIRMFQRMAFGSQDFRTDFSQSSWSSQSRGLDASGSRPL

SEQ ID NO: 2618 - protein, 213 aa, Zea mays
MKNECKHSLHAMAPHAGVACVVHIMFARAMQLLAIWLSSLSNFPMGLGTPAWVKGRSHESKSWTASCSMILAVPVSLNVMARCAAPMVSCVFMYMVSQNVSACVCCGGMVRADFATCLRACAVRLANASTCMFSTARLSMTGYLDACRPAVDVHTSGNGVREQMPATCGLTAPPCPLPPLPLPSACGRRPADSSATTARRTSREACPMIFIIL

SEQ ID NO: 2619 - protein, 212 aa, Zea mays
MSKHSLLAARRHLMLECKNMPNSRPRPHMIHIMFASVMQLLAIWLSSLSNLPMGLGTPAWVNGRSHESKSWTASCSMIFAVPVSLNAMARCAAPMASCVFMYIVSQVLRACACGGGIVRAATATCFRACAVRLANAATCMFSTAKLSMTGYLDAWRPAVAVQTSGNGAREQMPATSGLTAPPPCTLPLPFPNACGKRPADNNATRARRTSRG

SEQ ID NO: 2620 - protein, 641 aa, Sorghum bicolor
MATNSTVTVLILVAAAVLACAGGARGFYLPGVAPADFRKKDPLAVKVNQLSSIKTQLPYSYYSLPFCRPGTIVDSAENLGEVLRGDRIENSLYVFEMMEPRLCQIVCKITPSQDEAKDLKEKIEDEYRINMILDNLPLVVPIKRLDQEAPTVYQQGVHIGIKGQYSGSKEEKHFIHNHFTFLVKYHKDANTDLARIVAFEVKPYSIKHEPDGDWRGNATPLKTCDPHSRRLVVDSDSPQEVDANKDIIFTYDVNFEESPIKWASRWDTYLLMADDQIHWFSIVNSLMIVLFLSGMVAMIMLRTLYRDINKYNQLEDQEDAQEETGWKLVHGDVFRPPANADLLCVYVGTGVQFFGMLLVTLLFAILGLLSPSNRGGLMTAMLLLWVFMGLFAGYTSSRLYRMFKGSEWKNVTIKTALMFPGIVFAIFFVLNTLIWGEKSSGAVPFTTMFALVLLWFGISVPLVFVGSYLGFKKPAMEDPVRTNKIPRSIPEQPWYMNPVVSVLIGGILPFGAVFIELFFILTSIWLHQFYYIFGFLFLVFVILILTCAEITIVLCYFQLCGEDYQWWWRSYLTSGSSALYLFLYATFYFFTKLEITKTVSGVLYFGYMLIASYAFFVLTGTIGFYACFWFTRLIYSSVKID

SEQ ID NO: 2621 - protein, 640 aa, Zea mays
MATNSAVIVLLLVAAAVLACAGGARGFYLPGVAPAGFLKKDPLAVKVNQLSSIKTQLPYSYYSLPFCRPGTIVDSAENLGEVLRGDRIENSLYVFEMMEPRLCQIVCKIAPTQDEAKDLKEKIEDEYRINMILDNLPLVVPIKRLDQEAPTVYQQGVHIGIKGQYSGSKEEKHFIHNHFTFLVKYHKDDTGLARIVAFEVKPYSIKHEFDGDWKGNATLLKTCDPHSRRLVVDSDSPQEVDANKEIIFTYDINFEESPIKWASRWDTYLLMADDQIHWFSIVNSLMIVLFLSGMVAMIMLRTLYRDISKYNQLEDQEDAQEETGWKLVHGDVFRPPVNADLLCVYVGTGVQFLGMLLVTLLFAILGLLSPANRGGLMTAMLLLWVFMGLFAGYASSRLYRMFKGSQWKNVTIKTALMFPGIVFAIFLVLNALIWGEKSSGAVPFTTMFALVLLWFGISVPLVFIGSYLGFKKPAMEDPVRTNKIARPIPEQPWYMNPVVSVLIGGILPFGAVFIELFFILTSIWLHQFYYIFGFLFLVFVILILTCAEIAIVLCYFQLCGEDYQWWWRSYLTSGSSALYLFLYATFYFFTKLEITKTVSGVLYFGYMLIASYAFFVLTGTIGFYACFWFTRLIYSSVKID

SEQ ID NO: 2622 - protein, 645 aa, Oryza sativa Indica Group
MATREVPLLLLLLVVMVLAGAGAARGFYLPGVAPRDFRKKDQLAVKVNQLSSIKTQLPYSYYSLPFCRPATIVDSAENLGEVLRGDRIENSLYVFEMREPRLCQIVCKTALTHQEAKDFREKIDDEYRINMILDNLPLVVPIRSLLDDHDAPTSYQLGVHVGIKGQYAGSNEEKHFIYNHLSFLVKYHRDENTDLARIVGFEVKPFSTKHEYDGEWKENETRLKTCDPHSRRLVVDSDSPQEVEAGKEIIFTYDVNFEESDIKWASRWDSYLLMTDDQIHWFSIVNSLMIVLFLSGMLAMIMLRTLYRDISKYNQLETQEEAQEETGWKLVHGDVFRPPARAGTLCVFVGTGVQFLGMLLVTLLFAILGLLSPSNRGGLMTAMLLVWAFMGVLAGYAAARLYRGFRGSEWKAVAMRTALAFPGAAFAVFFVLNALIWGERSSGAVPFTTMTALVLLWFGISVPLVFVGSYLGFKRPAATEDYPVRTNKIPRPIPEQPWYMNPAMSVLIGGILPFGAVFIELFFILTSIWLHQFYYIFGFLFLVFAILVVTCAEIAVVLCYFQLCGEDYEWWWRSYLTAGSSALYLFLYAAFYFFTKLDITKVVSGVLYFGYMLIASAAFFVLTGTIGFYACFWFTRLIYSSVKID

SEQ ID NO: 2623 - protein, 645 aa, Oryza sativa Japonica Group
MATREVPLLLLLVVVMVLAGAGAARGFYLPGVAPRDFRKKDQLAVKVNQLSSIKTQLPYSYYSLPFCRPATIVDSAENLGEVLRGDRIENSLYVFEMREPRLCQIVCKTALTHQEAKDFREKIDDEYRINMILDNLPLVVPIRSLLDDHDAPTSYQLGVHVGIKGQYAGSNEEKHFIYNHLSFLVKYHRDENTDLARIVGFEVKPFSTKHEYDGEWKENETRLKTCDPHSRRLVVDSDSPQEVEAGKEIIFTYDVNFEESDIKWASRWDSYLLMTDDQIHWFSIVNSLMIVLFLSGMLAMIMLRTLYRDISKYNQLETQEEAQEETGWKLVHGDVFRPPARAGTLCVFVGTGVQFLGMLLVTLLFAILGLLSPSNRGGLMTAMLLVWAFMGVLAGYAAARLYRGFRGSEWKAVAMRTALAFPGAAFAVFFVLNALIWGERSSGAVPFTTMTALVLLWFGISVPLVFVGSYLGFKRPAATEDYPVRTNKIPRPIPEQPWYMNPAMSVLIGGILPFGAVFIELFFILTSIWLHQFYYIFGFLFLVFAILVVTCAEIAVVLCYFQLCSEDYEWWWRSYLTAGSSALYLFLYAAFYFFTKLDITKVVSGVLYFGYMLIASAAFFVLTGTIGFYACFWFTRLIYSSVKID

SEQ ID NO: 2624 - protein, 636 aa, Zea mays
MATTAHPALLLLIVLACAGAASGFYLPGVAPADFRKNDLLAVKVNQLSSIKTQLPYSYYSLPFCRPDTIVNSAENLGQVLRGDRIENSPYVFEMMEPKLCQIACKVVLTEQGAKDIMEKIHDEYRVNMILDNLPMVVPIERLDRDAPPFYQQGVHVGVKGHYAGSNEFKYFIHNHYSFLVKYNKDAQTDLARIVAFEVKPFSLKHEFDGDWKGNATRLKTCNTQSEHLIVNSDGPEEVKANKEIIFTYDVNFEESSIQWSSRWDTYLRTPDDHWFSIVNSLTTVLFLSVMVAMIMLRTLYRDISKYNQLEDQEEAQEESGWKLLHGDVFRPPANADLLCVYVGTGVQFFGMLLVTLLIAILGLLSPSNRGGFMTAMILLWVFMGLLAGYSTARLHKMFGGLEWDKVAIKTVLVFPGVVFVIFFALNMLLWGVKSSGAVPFTTMLALVFLWLGISMPLIFVGSYLGFRKPAIEGPVRTNKIPRLIPQQPWYMNPAVSVLVGGILPFGAVFMELFFILTTIWMHQFYYIFGFLFLVFVILIVTCAEITIVLCYFQLCSEDYQWWWRSYLTPGSSALYLFLYAAFYFFTKLQITKAVSGVLYFGYMLIAAYAFFVLTGTIGFYACFWFTRLIYSSVKID

SEQ ID NO: 2625 - protein, 636 aa, Zea mays
MATTAHPALPLLIVLACAGAASGFYLPGVAPADFRKNDLLAVKVNQLSSIKTQLPYSYYSLPFCRPDTIVNSAENLGQVLRGDRIENSPYVFEMMEPKLCQIACKVVLTEQGAKDIMEKIHDEYRVNMILDNLPMVVPIERLDRDAPPFYQQGVHVGVKGHYAGSNEFKYFIHNHYSFLVKYNKDAQTDLARIVAFEVKPFSLKHEFDGDWKGNATRLKTCNTQSEHLIVNSDGPEEVKANKEIIFTYDVNFEESSIQWSSRWDTYLRTPDDHWFSIVNSLTTVLFLSVMVAMIMLRTLYRDISKYNQLEDQEEAQEESGWKLLHGDVFRPPANADLLCVYVGTGVQFFGMLLVTLLIAILGLLSPSNRGGFMTAMILLWVFMGLLAGYSIARLHKMFGGLEWEKVAIKTVLVFPGVVFVIFFALNRLLWGVKSSGAVPFTTMLALVFLWLGISMPLIFVGSYLGFRKPAIQGPVRTNKIPRLIPQQPWYMNPAVSVLVGGILPFGAVFMELFFILTTIWMHQFYYIFGFLFLVFVILIVTCAEITIVLCYFQLCSEDYQWWWRSYLTPGSSALYLFLYAAFYFFTKLQITKAVSGVLYFGYMLIAAYAFFVLTGTIGFYACFWFTRLIYSSVKID

SEQ ID NO: 2626 - protein, 635 aa, Sorghum bicolor
MATTHPALLFLLVLACTGAASGFYLPGVAPADFRKNDLLAVKVNQLSSVKTQLPYSYYSLPFCRPDTISSSAENLGQVLRGDRIWNSPYLFEMMEPKLCQITCKIVLTEQEANDIKEKIEDEYRVNMILDNLPMVVPITMLDRNAPPYYQQGVHVGVKGMYAGSKDVMYFIYNHYSFLVKYNKEAQTDLARIVAFEVKPYSVKHEPDGDWKGNATRLKTCNPHSGHLVRNSDGPQQIEANKEIIFTYDVNFEESDIKWASRWDTYLRTRDDHWFIIVNSLTTVLFLSVMVAMIMLRTLYRDISKYNQLESQEEAQEESGWKLLHGDVFRPPVNADLLCVYVGTGVQFFGMFLVTLLIAILGLLSPSNRGGFMTAMLLLWVFMGLFAGYSTARLYKMFGGLEWKKVAIKTVLVFPGVVFVIFFALNMLLWGVKSSGAVPFTTMFALVFLWLGISMPLIFIGSYLGFKKPAIEDPVRTNKIPRLIPQQPWYMNPAVSMLIGGILPFGAVFMELFFILTTIWLHQFYYIFGFLFLVFVILIVTCAEITIVLCYFQLCNEDYKWWWRSYLTPGSSALYLFLYATFYFFTKLQITKAVSGVLYFGYMLIASYAFFVLTGTIGFYACFWFTRLIYSSVKID

SEQ ID NO: 2627 - protein, 639 aa, Sorghum bicolor
MAPSAWAVALAALCIVALAPPAAGFYLPGVAPNDFEKKDPLPVKVNKLTSIKTQLPYSYYSLPFCKPDTIVDSAENLGEVLRGDRIENSPYTFEMREPQMCQIVCKISVGEKEAKLLKEKIEDEYRVNMILDNLPLVVPIQRVDQEGAYFYQHGFHVGAKGKYSGSKDEKYFIHNHLSFTVKYHRDEQRDISRIVAFEVKPYSVKHEYEGQWNDKKTRLTTCDPHAQRIITSSESPQEVEVGKDIIFTYDVDFKESDIKWASRWDSYLLMTDDQIHWFSIVNSLMIVLFLSGMVAMIMLRTLYRDISKYNQLETQEEAQEETGWKLVHGDVFRPPSNSDWLCVYVGTGVQFFGMLLVTMVFAVLGFLSPSNRGGLMTAMLLLWVFMGLLAGYSSSRLYKLFKGSEWKNIALRTAFTFPGSVFAIFFFLNALIWGQKSSGAVPFTTMFALVLLWFGISVPLVFVGSFLGFKKPTIEDPVKTNKIPRQIPEQAWYMNPIFSILIGGILPFGAVFIELFFILTSIWLHQFYYIFGFLFLVFLILIVTCAEISIVLCYFQLCSEDYLWWWRSYLTSGSSALYLFLYATFYFFTKLEITKFVSAVLYFGYMLIASYAFFALTGTIGFYACFLFTRLIYSSVKIE

SEQ ID NO: 2628 - protein, 639 aa, Zea mays
MEPSAWAVAFAALCIVALAPPASGFYLPGVAPNDFEKKDPLPVKVNKLTSIKTQLPYSYYSLPFCKPDTIVDSAENLGEVLRGDRIENSPYTFEMREPQMCQVVCKISVGEKEAKLLKEKIEDEYRVNMILDNLPLVVPIQRVDQEGAYFYQHGFHVGAKGKYSGSKDEKYFIHNHLSFTVKYHRDEQRDVSRIVAFEVKPYSVKHEYEGQWNDKKTRLTTCDPHAQRIITSSESPQEVEVGKDIIFTYDVDFKESDIKWASRWDSYLLMTDDQIHWFSIVNSLMIVLFLSGMVAMIMLRTLYRDISKYNQLETQEEAQEETGWKLVHGDVFRPPSNSDWLCVYVGTGVQFFGMLLVTMVFAVLGFLSPSNRGGLMTAMLLLWVFMGLLAGYSSSRLYKLFKGSEWKNIALRTAFTFPGSVFAIFFFLNALIWGQKSSGAVPFTTMFALVLLWFGISVPLVFVGSFLGFKKPTIEDPVKTNKIPRQIPEQAWYMNPIFSILIGGILPFGAVFIELFFILTSIWLHQFYYIFGFLFLVFLILIVTCAEISIVLCYFQLCSEDYLWWWRSYLTSGSSALYLFLYATFYFFTKLEITKFVSAVMYFGYMLIASYAFFALTGTIGFYACFLFTRLIYSSVKIE

SEQ ID NO: 2629 - protein, 640 aa, Ricinus communis
MARDTLAAKWICFCALVLVVVPCNSFYLPGVAPADFLMGDELKVKVNKLTSTKTQLPYSYYSLPYCHPERIVDSAENLGEVLRGDRIENSPYVFKMREPQMCKILCRITLDAKTAKEFKEKIDDEYRVNMILDNLPLVFPIQRSDQENSIVYQHGFHVGLRGQYAGSKEQKHFIHNHLAFTVKYHKDAQTDSARIVGFEVKPFSVKHEFEGEWKKENTRLTTCDPHAKRLVTSSETPQEVEDKKDIIFTYDVEFQESDVKWASRWDTYLLMADDQIHWFSIVNSLMIVLFLSGMVAMIMLRTLYRDISKYNQLETQEEAQEETGWKLVHGDVFRPPMNSDLLCVYVGTGVQFFGMILVTMIFAALGFLSPSNRGGLMTAMLLLWVFMGLFAGYSSARLYKMFKGTEWKKITLKTACMFPAIVFAIFFVLNALIWGEKSSGAVPFGTMFALVFLWFGISVPLVFVGSYIGFKKPAIEDPVKTNKIPRQIPEQAWYMNPAFSILIGGILPFGAVFIELFFILTSIWLHQFYYIFGFLFIVFIILLVTCAEITIVLCYFQLCSEDYLWWWRSYLTSGSSALYLFLYAAFYFFTKLEITKPVSGILYFGYMLIVSYAFFVLTGAIGFYACFWFTRLIYSSVKID

SEQ ID NO: 2630 - protein, 315 aa, Zea mays; identical to SEQ ID NO: 1540

SEQ ID NO: 2631 - protein, 315 aa, Zea mays
MEGSRNSPDRQSSGGSPEERGSGGSGGRGAGEPVRSRWTPKPEQILILESIFNSGMVNPPKDETVRIRKLLERFGAVGDANVFYWFQNRRSRSRRRQRQMQAAAAAAATAAAASSAANSSPGASATVGLPSGALQYPLVMSGSGSACQYEQQASSSSSSGSTGGSSLGLFALGAGVPSTGGGFFQESCGASSPLATGLMMGDVDRSGGSDDLFAIFRQMGFAAATPVASASVTPPSTTAHHQQYYSCQSPTGTITVFINGVPMEVPSGPIDMRAIFGQDVLLVHSTGALLPVDDYGILTQSLQTGESYFLVARPT

SEQ ID NO: 2632 - protein, 323 aa, Sorghum bicolor
MEGSSNSPDRQSSGGSPEERGSGGSGGRGGTGEPVRSRWTPKPEQILILESIFNSGMVNPPKDETVRIRKLLERFGAVGDANVFYWFQNRRSRSRRRQRQMQAAAAAAAAAAAANSAPAASATAGGLPSGALQYPLAMGGGTACQYEQQASSSSSSGSTTGGSSLGQFALGAGVPGTGGGGYFQASCGASSPLATGLMGDVDSSSGGSDDLFAISRQMGFAATSPVASASVAPPSTTAHQQPYYSCQSPAATITVFINGVPMEVPRGPIDLRAMFGQDVMLVHSTGALLPVNDYGILTQSLQMGESYFLVISHIASLIYSIPF

SEQ ID NO: 2633 - protein, 328 aa, Oryza sativa Japonica Group
MEGSSNSPDRQSSGGSPPEERGGGGSGGGGGRSAAGEPVRSRWTPKPEQILILESIFNSGMVNPPKDETVRIRKLLERFGAVGDANVFYWFQNRRSRSRRRQRQMQAAAAAAAAAASSSSPSANTSPAAASAATVQVGLPPGAVVHTMAMGGSACQYEQQASSSSSSGSTGGSSLGLFAHGAGASGAGGYLQASCGASASASSALAPGLMGDVVDSGGSDDLFAISRQMGFVGSPRCSPASSPATPSSAATAAQQQFYSCQLPAATITVFINGVPMEMPRGPIDLRAMFGQDVMLVHSTGALLPVNDYGILMQSLQIGESYFLVARPP

SEQ ID NO: 2634 - protein, 328 aa, Oryza sativa Indica Group
MEGSSNSPDRQSSGGSPPEERGGGGSGGGGGRSAAGEPVRSRWTPKPEQILILESIFNSGMVNPPKDETVRIRKLLERFGAVGDANVFYWFQNRRSRSRRRQRQMQAAAAAAAAAASSSSPSANTSPAAASAATVQVGLPPVAVVHTMAMGGSACQYEQQASSSSSSGSTGGSSLGLFAHGAGASGAGGYLQASCGASASASSALAPGLMGDVVDSGGSDDLFAISRQMGFVGSPRCSPASSPATPSSAATAAQQQFYSCQLPAATITVFINGVPMEMPRGPIDLRAMFGQDVMLVHSTGALLPVNDYGILMQSLQIGESYFLVARPT

SEQ ID NO: 2635 - protein, 322 aa, Zea mays; identical to SEQ ID NO: 1542

SEQ ID NO: 2636 - protein, 322 aa, Zea mays
MSLSPADSAAYWLRWQVLVYGALIAFPAAAAAALLPRLRRAAPPLRAADLWVSCWARLHPGWLLAYRAFAFAAAVALLARLLVGHGLTVFYFYTQWTFLLVTIYFAFATAISAHGCWVYSRKSLRKSDESHGFLNADVENRDVSNSISGERKKDETKMMVSYYEQIVNERRAGFWGWCMQIIYQTSAGATMLTDVTFWGLLVPFFYRDKFGLALVTDGMHSLNAVFLLIDTVLNNMPFPWYRMAFFVFWSCAYVTFQWVLHACGSLSWWPYPFLDLSSSGAPLWYLGMAIAHIPCFFLYWLVVKAKHTYFPRMFPHAYVRTV

SEQ ID NO: 2637 - protein, 322 aa, Oryza sativa Japonica Group
MSSSAAAEDGEAAYWLRWQVFVCGALIVLPTAAAAALLPRLRRAAAPLRGTDLWVPCWARLHPGWLLGYRAFALAAAVALLVRLLVGHGIDVFFFYTQWTFLLVTIYFAFATAISAHGCWVYSKKNLKKADESHEFLSDDVENREFSTSSGEMKRDEEKITNYHEQIANEKRAGLWGRCMQIIYQTSAGATMLTDITFWGLLVPFFYRDKFGLSLITDGMHSLNAVLLLIDTFLNNMPFPWYRLAFFVFWSCSYVTFQWVLHACGAISWWPYPFLDLSSSGAPLWYLAMAIVHIPCFFLYWSIVKAKQTYFPRLFPHAYVRN

SEQ ID NO: 2638 - protein, 319 aa, Oryza sativa Indica Group
MSAAEDGAAAYWLRWQVLVCGALIVLPTAAAAALLPRLRRAAAPLRGTDLWVPCWARLHPGWLLGYRAFALAAAVALLVRLLLAHGVDVFFFYTQWTFLLVTIYFAFATAISAHGCWVYSNKNLKKADESHEFLSDDVENREFSTSSGEMKRDEEKITNYHEQIANEKRAGLWGRCMQIIYQTSAGATMLTDITFWGLLVPFFYRDKFGLSLVTDGMHSINAVLLLIDTFLNNMPFPWYRLAFFVFWSCSYVTFQWVLHACGAISWWPYPFLDLSSSGAPLWYLAMAIVHIPCFFLYWSIVKAKQTYFPRLFPHAYVRN

SEQ ID NO: 2639 - protein, 390 aa, Oryza sativa Japonica Group
MLTFPSNLRLRVYFRNFTASLAESRSDSQSQRRTPSTTQPQLPQNSPAPHLHCRYATRGSSKGQPRVAGGVMSSSAAAEDGEAAYWLRWQVFVCGALIVLPTAAAAALLPRLRRAAAPLRGTDLWVPCWARLHPGWLLGYRAFALAAAVALLVRLLVGHGIDVFFFYTWTFLLVTIYFAFATAISAHGCWVYSKKNLKKADESHEFLSDDVENREFSTSSGEMKRDEEKITNYHEQIANEKRAGLWGRCMQIIYQTSAGATMLTDITFWGLLVPFFYRDKFGLSLITDGMHSLNAVLLLIDTFLNNMPFPWYRLAFFVFWSCSYVTFQWVLHACGAISWPYPFLDLSSSGAPLYLAMAIVHIPCFFLYWSIVKAKQTYFPRLFPHAYVRN

SEQ ID NO: 2640 - protein, 346 aa, Hordeum vulgare subsp. vulgare
RGRVNSAASSSRATQLGFSSPPASRGDGGAMPTPADGAEYWLRWQVFVCGALIAVPTALAAALLPRLRRTAAPLRATDLWLPCWPRLHPAWLLGYRAFALAAAAALLVRDIIPHGPRVFFFYTQWTFLLVTIYFAVATAISAHGCWSYSKRSLRKADEYGDVENRDLSASISGGRKNGEMDKMASYYEQLANEKGAAFWGRCMQIIYQASAGATMLTDVTFWGLLVPFFYRDKFGLAMVTDGMHSVNLVLLLIDTLLNNMPFPWYRIAFFVFWSCSYVTFQWVIHASGALSWWPYPFLDLASPGAPLWYLAMAVAHVPCFSVYWLAVKAKRAYFPRMFPHTYVRTS

SEQ ID NO: 2641 - protein, 332 aa, Hordeum vulgare subsp. vulgare
ELGFSSPPASRGDGGAMPTPADGAEYWLRWQVFVCGALIAVPTALAAALLPRLRRTAAPLRATDLWLPCWPRLHPAWLLGYRAFALAAAAALLVRDIIPHGPRVFFFYTQWTFLLVTIYFAVATAISAHGCWSYSKRSLRKADEYGDVENRDLSASISGGRKNGEMDKMASYYEQLANEKGAAFWGRCMQIIYQASAGATMLTDVTFWGLLVPFFYRDKFGLAMVTDGMHSVNLVLLLIDTLLNNMPFPWYRIAFFVFWSCSYVTFQWVIHASGALSWWPYPFLDLASPGAPLWYLAMAVAHVPCFSVYWLAVKAKRAYFPRMFPHTYVRTS

SEQ ID NO: 2642 - protein, 384 aa, Sorghum bicolor
MGGDRRAAAALQRHWCPSWSVSERWRAHAGMVLVMLAYSGYHVLTKSVLNVGMNQVVFCVYRDLLAFAVLAPVAFLRERRVRPPVTPQLLASFALLGFTGLYGNPLLFLVGLRYTNASYAAAFQPSIPVLTFLLAAIVGVEAINIFTKDGVLKVIGTVVCVSGAILMALYRGSSLIGLTRSMPNAWASTSYPAAPNWLASAVLEHGVETWQLGVLCLVGNCLLVAVYLVIQAPVMKKYPASLSVTAYSYFFATIFMVLTGVSATNGLHEWALTKTEVIAVLYAGIVASCLSYSIMTWANKILGPSLVALYNPLQPAFSTVLSTIFLGDPVYIGSIIGGVSIIVGLYLVIWARYNEEQRAPMDGYLDPLIVDNPRIPKTEEISFI

SEQ ID NO: 2643 - protein, 767 aa, Zea mays
MGRSYLEGGRDAGADLGYPLVAVCIDKDKNSQNALKWAIDSLVQKGQTIVLVHVNTKGTSGGVEDAAGFKQPTDPHMKDLFVPFRCFCTRKDINCKDVVLDEHDVAKSIIEFSAQAAVEKLVLGATTRGGFVRFKADIPTTISKGAPDFCSVYIVNKGKVSSQRNSTRAAPRVSPLRSQIQSSQIAATLKPEPPQSHRWSSSSRGHEHGETPRVDNFRSPFARGGPANTRKSYADLSHMSMPDSADISFVSSTGRRSVDHHPAIPPRMSNGSVDSYDHSFEMSRTPSKWGGDSFGGMDHTTFSQSSSSSFCSLGMQDDVEAEMKRLRLELKQTMDMYSTACKEALTAKQKAMELQRWKMEEEQKTQDSRITEDSAMAMIEREKARAKAAMEAAEASQRIAEMEVQKRISAEKKLLKEAEERKNRGGSGMSHEARYRRYSIEEIEQATDNFNDARKVGEGGYGPVYKGFLDHTQVAIKVLRPDAAQGRSQFQQEVEVLSCIRHPNMVLLLGACPEYGCLVYEYMASGSLDDCLFRRSGGAGGPVIPWQHRFRICAEIATGLLFLHQTKPEPLVHRDLKPGNILLDRNYVSKISDVGLARLVPPSVADTVTQYRMTSTAGTFCYIDPEYQQTGMLGVKSDVYSFGVMLLQIITAKPPMGLSHHVGRALERGELQDMLDPAVPDWPLEEAQCLAEMALRCCELRRKDRPDLGAVVLPELNRLRALGEDNMQYCGAIIRGGGGGGMHSSSPFHSNISRSHAVHKLPSMRGS

SEQ ID NO: 2644 - protein, 775 aa, Oryza sativa Indica Group
MGKDGGDPGGGGGGGYPLVAVCIDKDKNSQNALKYATESLAHKGQTIVLVHVHTKGSSGGVEDAAGYKQPSDPQMKDLFLPFRCFCTRKDIHCKDVVLDDHDVSKAIVEFAAHAAIEKLVVGATARGGFVRFKAEISSSISKTAPDFSTVYVVSKGGKVTSVRQAVRQAPAVSPLRTMIQGPKPDNVSTQKWTPPPPPSTTRPDIAGTPKIQDNFIMSPFARGANTSVRKAFPDYSMPESSDISFISSGPRRSLDRYPPRLSSGSDAHDHHSFEATRPPSMWGGDSFGSDSQSSNSSFASSLPMEDMEAEMKRLRLELKQTMDMYSTACKEALTAKQKAMELQRWKTEEEQRSHETRLTEESAMALIEQEKAKARAAIEAAEASQRLAEMEAQKRISAEMKALKETEERLKSMGGGGSRGTVRYRKYTIEEIELATEHFADGRKIGEGGYGPVYKGHLDHTPVAIKVLRPDAAQGRSQFNQEVEVLSCIRHPNMVLLLGACPEYGCLVYEYMANGSLDDCLFRRGGGPVIPWQHRFRIAAEIATGLLFLHQTKPEPLVHRDLKPGNILLDRNYVSKISDVGLARLVPPSVADSVTQCHMTSAAGTFCYIDPEYQQTGMLGVKSDVYSLGVMLLQIVTAKPPMGLTHHVARALDHGTIVDMLDPAVHDWPVDEARCFAEISIRCCELRRKDRPDLATVVLPELNRLRALGEDNMQLCNTMSGGGRSSMHSSPYNSNSSMHQPHRQTDMAIEHSVGRSSYDADTSQQAMQGRRLNYN

SEQ ID NO: 2645 - protein, 772 aa, Oryza sativa Japonica Group
MGKDGGDPGGGGYPLVAVCIDKDKNSQNALKYATESLAHKGQTIVLVHVHTKGSSGGVEDAAGYKQPSDPQMKDLFLPFRCFCTRKDIHCKDVVLDDHDVSKAIVEFAAHAAIEKLVVGATARGGFVRFKAEISSSISKTAPDFSTVYVVSKGGKVTSVRQAVRQAPAVSPLRTMIQGPKPDNVSTQKWTPPPPPSTTRPDIAGTPKIQDNFIMSPFARGANTSVRKAFPDYSMPESSDISFISSGPRRSLDLYPPRLSSGSDAHDHHSFEATRPPSMWGGDSFGSDSQSSNSSFASSLPMEDMEAEMKRLRLELKQTMDMYSTACKEALTAKQKAMELQRWKTDEEQRSHETRLTEESAMALIEQEKAKARAAIEAAEASQRLAEMEAQKRISAEMKALKETEERLKSMGGGGSRGAVRYRKYTIEEIELATEHFADGRKIGEGGYGPVYKGHLDHTPVAIKVLRPDAAQGRSQFNQEVEVLSCIRHPNMVLLLGACPEYGCLVYEYMANGSLDDCLFRRGGGPVIPWQHRFRIAAEIATGLLFLHQTKPEPLVHRDLKPGNILLDRNYVSKISDVGLARLVPPSVADSVTQCHMTSAAGTFCYIDPEYQQTGMLGVKSDVYSLGVMLLQIVTAKPPMGLTHHVARALDHGTIVDMLDPAVHDWPVDEARCFAEISIRCCELRRKDRPDLATVVLPELNRLRALGEDNMQLCNTMSGGGRSSMHSSPYNSNSSMHQPHRQTDMAIEHSVGRSSYDADTSQQAMQGRRLNYN

SEQ ID NO: 2646 - protein, 682 aa, Zea mays
MPAATLAVRVAAILLLLARGGSGSAPGEFVLSGFASGNVTTSGAAVVTSSGILQLTNATNEVFGHGFYPVPFRFKDASSTPRSFSTTFVFAMVPRHDDAHGHGIAFALAPSPTVPGAVAGKNLGLFNTSDDTGKARSGVVAVELDTAKDEEFSDINDNHVGIDVNSLVSVSSAPAAYVDAGSLVNISLVSGEPLQAWVEYDGASMRLEVTVAPARKPRPAVPLVSSVVNLSSAVSDDTYVGFTAANGAASTSHYVLGWSFRLGDGRAMDLDASKLPPVPSSKKKTSRLNLVTLSLVVVVALLLASVAVAALVVRHRRFAEEQEDWEIQYGPHRISYKDLHAATRGFRDAIGEGGFGRVYHGVLQRPVNAEVAVKKVSHDSRQGLREFVSEIASMSRLRHRNLVQLLGYCRRRGELVLVYDYMVNGSLDRHLFDAGKPALSWEQRGKIVRDVAAGLLYLHEGWEQVVVHRDIKSANVLLDADMNGKLSDFGLARLYDHGSNPQTTHVIGTLGYLAPEMSKTGKATTSTDVFAFGAFLLEVACGRRPMERDDDLDLPGLVDLVLECWKAGRIVEARDKRIGKCDEADVELVLKLGLLCSHPDPRCRPSMRQAVQMLEGAAPVPETPPKDLASNSRLFYGYSESFDEFATMFPATSEVTSVTTQPSSSHSTGEGQQVSSEQITNV

SEQ ID NO: 2647 - protein, 698 aa, Sorghum bicolor
MPAAALAVRVAVLLLVARGGSAAGAAAVEFVLTGFAHDNVTTSGAAVVTSSGLLQLTNETNEVFGHGFYPVPLRFRDDASSSSSTGAPRPQSFSFSTTFVFAMVPRHDDAHGHGIAFALAPSPTVPGAVAGKNLGLFNTSNDTGRMRSGVVAVELDTARDEEFNDINDNHVGIDVNSLVSVGSAPAAYVDVGVGGSLVNVSVNLVSGEPLQAWVEYDGASMRLEVTVAPARKPRPSVPLVSSIVNLSSAVADDTYVGFTAANGAASSSHYVLGWSFRLGGGRAPDLDLSKLPSVPSSRSSKKTTSQLLVVTLSLAVVVALLLASVVVAVVVVRRRRFAEEEEDWEIEYGPHRIRYKDLHAATGGFRDVIGEGGFGRVYHGVLLRPAAAEVAVKKVSHDSRQGLREFVSEIASMSRLRHRNLVQLLGYCRRQGELILVYDYMVNGSLDRRLFDAGKPVLSWEQRGKIVRDVAAGLLYLHEGWEQVVVHRDIKSANVLLDADMNGKLSDFGLARLYDHGSNPQTTHVIGTLGYLAPEMSKTGKATTSTDVFAFGAFLLEVACGRRPMQRNDDVDSPGLVDLVLECWKAGRIVEARDPKIGKCDEADVELVLKLGLLCSHPDPRCRPSMRQAVQILEGAAPVPETPPKDLANNNRLFYGYSESFDEFATIFPATSEVTSVTTQPSSSHSTGEEQQVSSGSG

SEQ ID NO: 2648 - protein, 507 aa, Sorghum bicolor
MPDPTAKPPSPRPRRRRRLCGLCLGTALLALLVSALVHAVASPPRRPAPGPASARFSVVIDGGSTGTRAHVFATGHDGRPDLARSTVMRVSPGLSSFAADPARAGESLKPLIDFARDEIVGSGGAAREAEVRLMATAGLRLLEERAQEAILASCRDVLRASGFRFEDAWAKVIPGSDEGIYAWVAANYALGRLGGDPNKTVGIIELGGASAQLTFVSDEVLPPELSYNYTFGERTYTLYTNSFLNFGQNAAQDSFHEMLRSRGSSKNGTLADPCAPRGYSRNEEVMVRMSSTSRSTLENQYVDNGTGNFTECISSSLLLLQKGKEKCQYQHCHLGPTFVPELRGYFLATENFYFTSKFFGLKKSSSLSDFMFAGEQSCNQDLSTLRKKYPNRSDEDFSRYCFSMAYIVALLHDSLGVPLDDKRIEYSNQVGDVQVEWALGAFITLMQNTSLKPLHTAAEPIHSNRPLFAVLGMFLLCGVLFVSRWRKPKTKIIYDLEKGRYIITRIS

SEQ ID NO: 2649 - protein, 494 aa, Zea mays
MPDPTTKLPSPRPRRRRRLFSLCLGTALLALIVSALVHVVAQPPGPAPASARFSVIIDGGSTGTRAHVFAAGPDGRPDLARSTVMRVSPGLSSFAADPARAGESLKPLLDFARDKIGGAVREAEVRLMATAGLRLLEERAQEAILASCRDVLRASGFRFEDAWAKVIPGSDEGVYAWVAANYALGRLGGDPNKTVGIIELGGASAQLTFVSDEVLPPKLSYNYTFGETTYTLYTNSFLNFGQNAAQDSFHEMLRSRGSFKNGTLADPCAPRGYSRNEGASRSTLENQYVNNGTGNFTECISSSQLLLQKGKEKCQYQQCHLGSTFVPELRGYFLGTENLYFTSKFFGLKKSSSLSDFMFAGEQFCNQHLSSLRKRHPNRSDEDFSRYCFSMAYIVALLHDSLGVPLDDKRIEYSNQVGDIQVEWALGAFITLMQNTSLKPLHTTAESTHSNRPLFAVLGMFLLCGVLFVSRWRKPKTKIIYDLEKGRYIITRIS

SEQ ID NO: 2650 - protein, 504 aa, Zea mays
MPDPTTKPPSPRPRRRRRLCGLCLGTALLALLVAALVHVVAPLPRAASASARFSVIIDGGSTGTRAHVFVTGHDGSPDLALSTVMRVSPGLSSFAADPARAGESLKPLIDFARDKIDGAGSAAGEAEVRLMATAGLRLLEERTQEAILASCRDVLRASGFRFEDAWAKVIPGSDEGIYAWVAANYALGRLGGDPNRTVGIIELGGASAQLAFVSDEVLPPKLSYNYTFIETTYTLYTNSFLNFGQNAAQDSFHEMLRSRGSSENATLADPCAPRGYSRNEEMMLRMSGASRSTLENQYVDNGTGNFTECISSSLLLLQKGKEKCQYQQCHLGSTFVPELRGYFLATENFYFTSKFFGLKKSSSLSDFMFAGEQFCNQDLSTLRKKHPNRSDEDFSRYCFSMAYIVALLHDSLGVSLDDKRIEYSNQVGDIQVEWALGAFITLIQNASLKPLHTAVESTHSNRPLFAVLGMFLLCGVLFVSRWRKHKTKVIYDLEKGRYIITHIS

SEQ ID NO: 2651 - protein, 502 aa, Hordeum vulgare subsp. vulgare
MPEPTKPLSPRPSRGRCRLCGLCLGSALLAIVISTLVHLLSPPPQPAPSPRFSVIIDAGSTGTRAHVFSLGPDGRPDLARSAVMRVSPGLSSFAADTARAGESLRPLMGFAKEKVGGEVGAAATEVRLMATAGLRLLEESVREAILVSCRNALRSSGFRFEDSWAKVIPGSDEGVYAWVAANYALGTLGGDPHKTIGIIELGGASAQLTFVSDEVLPLELSTNFTFGETTYTLYSNSFLNFGQNAAQHSYHEILKSRGSSKNGTLVDPCAPKGFSRKRKVTARTSGASGSNLENQYVGNGSGNYKECRSSSLMMMQEGKEKCEHQQCHLGSNFVPELLGHFLATENFYFTSKFFGLDRSSSLSDFVVAGEQLCNKELSTLRQKYLNHSDEDFSRYCFSSAYIVALLHDSLGVPLDDKRIEYSNQVGDTHIEWALGAFIANTKHTILGASGAAAAPAHKHRPLLAVLGAFLACGVFLVLRWRKPKTRIIYDLEKGRYIITRIS

SEQ ID NO: 2652 - protein, 508 aa, Oryza sativa Japonica Group
MPDLTKPPSPRPRRRRCRLCGICLGTALLALLVSSLAHLFSPPQPQPQLQPPRPSPSSSPPRFAVIIDGGSTGSRAHVFATGPGGRPDLARSAVMRVTPGLSSFADEPARAGDSLRPLIDFAREKVGGAAAEVRLMATAGLRLQEGRLQEAILSSCRDVLRASGFRFEDSWAEVIPGSDEGIYAWVAANYALGTLGGDPHKTIGIIELGGASAQLTFVSDEVLPPELSRNFTFGGTTYTLYSNSFLNFGQNAAQESFREILRSKDSKNGTLVDPCAPKGYSRIKEVISRPSSASKSKLENQFADSGDGDFTVCRSSSLALLKKGNEECRYQQCQLGPTFVPELRGHFLATENFYFTSKFFGLKQSSSLSDFVLAGEQFCNKDLSTLRKMYPNRSDDDFSRYCFSSAYIVALLHDSLGVPLDDKRIEYSNQVGDTQVEWALGAFISNIKGVIVEPSATGRSAHRSRPLLAVLLGVFLLGGALCLARWRKPKTKIIYDLEKGRYIITRIS

SEQ ID NO: 2653 - protein, 508 aa, Oryza sativa Indica Group
MPDLTKPPSPRPRRRRCRLCGICLGTALLALLVSSLAHLFSPPQPQPQLQPPRPSPSSSPPRFAVIIDGGSTGSRAHVFATGPGGRPDLARSAVMRVTPGLSSFADEPARAGDSLRPLIDFAREKVGGAAAEVRLMATAGLRLQEGRLQEAILSSCRDVLRASGFRFEDSWAEVIPGSDEGIYAWVAANYALGTLGGDPHKTIGIIELGGASAQLTFVSDEVLPPELSRNFTFGGTTYTLYSNSFLNFGQNAAQESFREILRSKDSKNGTLVDPCAPKGYSRIKEVISRPSSASKSKLENQFADSGDGDFTVCRSSSLALLKKGNEECRYQQCQLGPTFVPELRGHFLATENFYFTSKFFGLKQSASLSDFVLAGEQFCNKDLSTLRQMYPNRSDDDFSRYCFSSAYIVALLHDSLGVPLDDKRIEYSNQVGDTQVEWALGAFISNIKGVIVEPSATGRSAHRSRPLLAVLLGVFLLGGALCLARWRKPKTKIIYDLEKGRYIITRIS

SEQ ID NO: 2654 - protein, 508 aa, Oryza sativa Japonica Group
MPDLTKPPSPRPRRRRCRLCGICLGTALLALLVSSLAHLFSPPQPQPQLQPPRPSPSSSPPRFAVIIDGGSTGSRAHVFATGPGGRPDLARSAVMRVTPGLSSFADEPARAGDSLRPLIDFAREKVGGAAAEVRLMATAGLRLQEGRLQEAILSSCRDVLRAPDSRFEDSWAEVIPGSDEGIYAWVAANYALGTLGGDPHKTIGIIELGGASAQLTFVSDEVLPPELSRNFTFGGTTYTLYSNSFLNFGQNAAQESFREILRSKDSKNGTLVDPCAPKGYSRIKEVISRPSSASKSKLENQFADSGDGDFTVCRSSSLALLKKGNEECRYQQCQLGPTFVPELRGHFLATENFYFTSKFFGLKQSSSLSDFVLAGEQFCNKDLSTLRKMYPNRSDDDFSRYCFSSAYIVALLHDSLGVPLDDKRIEYSNQVGDTQVEWALGAFISNIKGVIVEPSATGRSAHRSRPLLAVLLGVFLLGGALCLARWRKPKTKIIYDLEKGRYIITRIS

SEQ ID NO: 2655 - protein, 696 aa, Sorghum bicolor
MRSPPPTPPPWRPRRLHSVVPVLLLVVAALAARGVGADDLASDARALLAFRDAVGRRLAWNASDVAGACSWTGVSCENGRVAVLRLPGATLSGSVPAGTLGNLTALHTLSLRLNGLSGALPADLASAAALRNIFLNGNRLSGGFPQAILALPGIVRLSLGGNDLSGPIPAELGNLTHLRVLLLENNHFSGEISDVKLPPLQQFNVSFNQLNGSIPASLRSQPRSAFLGTGLCGGPLGPCPGEVSPSPAPAGQTPSPTPVPSGSGGGGGGGASGDGTNGGSGGENGHKSKKLSVGAIAGIAIGSALGAALLLFLLVCLCRRSGGTRTRSLEMPPPAPAAAAVAGGRKPPEMTSGAAVAPLTTIGHPNAPIGQSTSGKKLVFFGTAAAVAPFDLEDLLRASAEVLGKGAFGTTYKAVLESGATVAVKRLKDVTLSEPEFRERISEVGELQHEFIVPLRAYYYSKDEKLLVYDFMPMGSLSAVLHGNRSSGRTPLNWDLRSSIALAAARGVEYIHSTSSMASHGNIKSSNILLGKSYQARVSDNGLNTLVGPSSSPSRTTGYRAPEVIDSRRVSQKADVYSFGVLLLELVTGKAPSQAALNDEGVDLPRWVQSVNRSEWGSEVFDMELTRHQTGEEPLAQLVLLAMDCVAQVPDARPSMAHVVMRIEEIKKSSGASNIEQVDDQSSKAESEVQTNPFAT

SEQ ID NO: 2656 - protein, 684 aa, Zea mays
MRSPSPPPWRLRRIRFSFPMLLLVASLAGADDLASDARALVAFRDAVGRRLAWNASDVAGACSWTGVTCEHGRVAVLRLPGATLSGTVPAGTLGNLTALHTLSLRLNGLSGALPADLSSAAALRNVFLNGNRLSGGFPQAILALPGLVRLSLGGNDLSGPIPVELDNLTHLRVLLLENNRFSGEISDVKLPPLQQFNVSFNQLNGSIPASLRSQPRSAFLGTGLCGGPLGPCPGEVPPSPAPAGQTPSPTPVPSGRGGGGGGGGGTNGGSGVENGHKGKKLSGGAIAGIVIGSALGAALLLFLLVCLCRRSGGIRTRSLEMPPSSPAPAGGRKPPEMTSAAAVAPLTTIGHPNAPIVQSTSGKKLVFFGSSAAVASFKLEDLLRASAEVLGKGTFGTTYKAVLESGATLAVKRLKDVTLSEPEFRERISEIGELQHEFIVPLRAYYYSKDEKLLVYDFMPKGSLSAVLHGNITSGKTPLNWDLRSSIALAAARGVEYIHSTSSTASHGNIKSSNVLLGESYQAHVSDNGLTALVGPSSSPSRATGYRAPEVIDPRRVSQKADVYSFGVLLLELVTGKAPSQAALNDEGVNLPRWVQSVSRSEWGSEVFDIELMRHEADEELMAQLVLLALDCVAQVPEARPSMGHVVTRIEEIRKSSVTTNMEEEVDDQSSKAESEVPTNPFTS

SEQ ID NO: 2657 - protein, 694 aa, Zea mays
MRSPPPPPWRAGRLHSPLPMLLLFVAALAARAGADDLASDARALLAFRDAVGRRLTWNASDVAGACSWTGVSCENGRVAVLRLPGATLSGAVPAGTLGNLTALHTLSLRLNGLSGALPADLASAAALRNVFLNGNRLSGGFPQAILALPALVRLSLGGNDLSGPIPAELGSLTHLRVLLLENNRFSGEISDVKLPPLQQFNVSFNQLNGSIPASLRSQPRSAFLGTGLCGGPLGPCPGEVSPSPAPAGQTPSLTPVPSSGGGNGSGSGSGGTIGGNGGESGHKNKKLSGGAIAGIAIGSALGAGLLLFLLVCLCRRSGGTRTRSLEMPPPEAPAAAAAAGGRKPPEMTSGAAVAPLTTIGHPNAPIGQSTSGKKLVFFGSAAAVAPFDLEDLLRASAEVLGKGAFGTTYKAVLESGATVAVKRLKDVTLSEAEFRERISEIGELQHEFIVPLRAYYYSKDEKLLVYDFMPMGSLSAVLHGNVSSGRTPLNWDLRSSIALAAARGVEYIHSTTSTASHGNIKSSNVLLGKSYQARVSENGLTTLVGPSSSSSRTTGYRAPEVIDSRRVSQKADVYSFGVLLLELVTGKAPSQAALNDEGVDLPRWVQSVNRSEWGSLVFDMELMRHQTGEEPMAQLVLLAMDCTAQVPEARPSMAHVVMRIEEIKKSSVTPNIEQVDDQSSKAESEAAPTNPFAT

SEQ ID NO: 2658 - protein, 686 aa, Oryza sativa Japonica Group
MRAAWRPASGRRVALAAMVVLSVVVAAAMADDLAGDARALLAFRDAVGRHVAWNGSDPGGACSWTGVTCEGGRVAVLRLPGAALAGRVPEGTLGNLTALHTLSLRLNALAGALPGDLTSAAALRNVFLNGNRLSGEFPRAFLALQGLVRLAIGGNDLSGSIPPALGNLTRLKVLLLENNRFSGEIPDLKQPLQQFNVSFNQLNGSIPATLRTMPRSAFLGTGLCGGPLGPCPGEVSPSPAPGEQPVSPTPANNGDKGGNGGESGKKSKKLSGGAIAGIAIGSAVGAALLLFLLICLCCRSGRTKTRSMEMPPPPSSAPAVVAAGRKPPEMTSAAAVAPMATVGNPHAPLGQSTSGKKLIFFGSAAAVAPFDLEDLLRASAEVLGKGAFGTTYKAVLESGATVAVKRLKDVTLTEPEFRDRIADIGELQHEFIVPLRAYYYSKDEKLLVYDFMPMGSLSAVLHGNRGSGRTPLNWETRSSIALAAARGVEYIHSTSSSASHGNIKSSNVLLNKSYQARLSDNGLSALVGPSSAPSRASGYRAPEVTDPRRVSQKADVYSFGVLLLELLTGKAPSQAALNDEGVDLPRWVQSVVRSEWTAEVFDMELLRYQNVEEQMVQLLQLAIDCVAQVPDARPSMPHVVLRIEEIKKSSERLEGRDPQQQASNLEAGDDQTSKPESAEGLNPFAP

SEQ ID NO: 2659 - protein, 480 aa, Zea mays
MARAALRLGVRALALLVFVSVALLPLVSSDDGYRHCEGVVRGWADASSGRVKDGDKLSLKDLLFFLHIPRTGGRTYFHCFLKKLYTNAQECPRSYDKLRFDPSHPDCKLVVSHDDYSLTSKLPRERTSVVTILRNPVDRVFSTYEFSVEVAARFLVHPNLTSAKLMTTRVLTKSRAVSTLDIWPWKYLVPWMREDLFARRDARGVYKVHSSKKVNAYDVDDMVMPLHRYINDPVAHEIIHNGATFQITGLTNNSYFDGAHEVRHCVRKHPDLGRIVLEVAKNRLDQMLYVGLTEDHEESARLFAHMVGAQVLSQSGTLTLDLKEDLPIETDSHPSMEPEDEETNGHLNSTHGWQNNEAMNSTNDEHGKGNMTVGKLMEAYETCIAKLWKSQSGRRKISLKKVQEANFSKEARKLVSEAILNQIISLNRLDMELYDHAKKIFTQEHLMLKAQQSMVGQHRQFGEQKVCSNSKSTSSLCILF

SEQ ID NO: 2660 - protein, 353 aa, Zea mays
MARAALRLGVRALALLVFVSVALLPLVSSDDGYRHCEGVVRGWADASSGRVKDGDKLSLKDLLFFLHIPRTGGRTYFHCFLKKLYTNAQECPRSYDKLRFDPSHPDCKLVVSHDDYSLTSKLPRERTSVVTILRNPVDRVFSTYEFSVEVAARFLVHPNLTSAKLMTTRVLTKSRAVSTLDIWPWKYLVPWMREDLFARRDARGVYKVHSSKKVNAYDVDDMVMPLHRYINDPVAHEIIHNGATFQITGLTNNSYFDGAHEVRHCVRKHPDLGRIVLEVAKNRLDQMLYVGLTEDHEESARLFAHMVGAQVLSQSGTLTLDLKEDLPIETDSHPSMEPEDEETNGHLHTWLAE

SEQ ID NO: 2661 - protein, 506 aa, Zea mays
MSAAASQSSVKAMAAAAAAVAMLLSAAAAVAAQHDYGDALHKCILFFEGQRSGRLPPDQRLRWRRDSGLHDGAAAGVDLTGGYYDAGDNVKFGFPMAFTATLMSWGLIDFGRSFGPHREEARKAVRWATDYLMKATAKRNTVYVQVGDAFRDHACWERPEDMDTPRTVYKVDPSHPGSDVAAETAAALAAGSIVFRDADPAYSKRLLDRAVAVFEFADKYRGPYSSSLHAAVCPCYCDYSGYQDELLWGAAWLHKATRRREYREYIKRNEVVLGASDAINEFGWDNKHAGINVLISKEVLMGKDEYFQSFRVNADNFMCTLLPGISNHPQIQYSPGGLLFKVGSSNMQHVTQLSFLLLAYSNYLSHAGGRVSCGSSSASPVQLRRVAKRQVDYILGDNPLRMSYMVGYGARFPRRIHHRASSLPSVAAHPARIGCKAGAAYYTSPAPNPNLLVGAVVGGPTDDSDAFPDARAVFQQSEPTTYINAPLMGLLAYFSAHPNPAESGGD

SEQ ID NO: 2662 - protein, 497 aa, Oryza sativa Indica Group
MAAAGGAVLLLVLATATSVSGQHDYSDALHKSILFFEGQRSGRLPPDQRLRWRRDSALNDGATAGVDLTGGYYDAGDNVKFGFPMAFTATLMSWGLIDFGRSFGAHAAEAREAVRWATDYLMKATATPNTVYVQVGDAFRDHSCWERPEDMDTPRTVYKVDPSHPGSDVAAETAAALAAASIVFRDADPDYSNRLLDRAIQVFEFADKYRGPYSSSLHAAVCPCYCDYSGYKDELLWGAAWLHKASRRREYRDYIKRNEVVLGASEAINEFGWDNKHAGINVLISKEVLMGKDEYFQSFRVNADNFICTLLPGISNHPQIQYSPGGLLFKVGNSNMQHVTSLSFLLLAYSNYLSHANVRVPCGTSSASPVQLRRVAKRQVDYILGDNPLRMSYMVGYGSRYPLRIHHRGSSLPSVAAHPARIGCKAGATYYASAAPNPNLLVGAVVGGPSNTSDAFPDARAVFQQSEPTTYINAPLLGLLAYFSAHPNLAQSDLLHD

SEQ ID NO: 2663 - protein, 500 aa, Zea mays; identical to SEQ ID NO: 2600

SEQ ID NO: 2664 - protein, 741 aa, Sorghum bicolor
MTMPGSSARPSFSAFRGARWRADLGVIPGSAAVSTDDLRRAAADSRRRYANLRRRLLIDPHLSKDEEGAPDLIVENPLSQSPGSTWGQYFRNAELEKMLNQDLSRLYPELGDFFQTSTCQSMLGRVLLVWSLRYPEFGYRQGMHELLAPLLYVLHADVQHFRQVRDLHEELLGDDFDGQTFPDRSKLNRSDRKNNVEGRTAKFRSLSDLDPDTRDLFLINDAYGAEGELGIILSEKFMEHDAYSMFENLMNGAQGVVAITDFYSLSPAPESSTGLTPVREASSAIYHLLASVDSSLHSHLVELGVEPQYFALRWLRVLFGREFSLDSLLFIWDEILSSPNHSYCTEIMSRADYQFKVLCSPRGALILSMAVSMMLHLRSSLLGSEHATSCLVRLLNFPEDIDLNNLIEKAKLLQSFALEANLPSSPMRGNSLLTTPNYWEETWKILQPSMDQKGGGVFKMKGRGFLRRSLSNTESNVSRSKAANFENKDMTSTTQSTTDELHNADVVPAELINSVPHMLIEKQKHHVGKGTAEAIGSNSKNACETGQHDGYCSTSGEIRDPLGAASGYLSRSSSTTLSCGTEYDHDTHHLEETCGPCDDRVVNEPDPLFVHDGRTDEAATTDRTSGIVDTYPVQECRLCSADGKLKIKDDQNSTSDKGGQKETLAICSITNVADKELSRTLRSLGESMVENIQDIEMLFQPNSLSTSVEKLEKAIPRSTEQAKAVAALKELRKISDLLRQI

SEQ ID NO: 2665 - protein, 740 aa, Zea mays
MTMPGSPARPSFSALRGARWRAYLGVIPGFAAVSTDELRRAAADSRRRYANLRRRLLIDPHLSKDEEGAPDLIVENPLSQSPGSTWGQYFRNAELEKMLNQDLSRLYPELGDFFQTSTCQSMLGRVLLVWSLRYPEFGYRQGMHELLAPLLYVLHADVQHFRQVRDLHEELLGDDFDGQTFPDRSKLNRSDRKNSVEGRTGKIRSLADLDPDTRDLFLINDAYGAEGELGIILSEKFMEHDAYSMFENLMNGAQGVVAITDFYSLSSAPESSMGLTPVREASSAIYHLLASVDSSLHSHLVELGVEPQYFALRWLRVLFGREFSLDSLLFIWDEIFSSPNHSYCTDIRSRADYQFKVLCSPRGALILSMAVSMMLHLRSSLLGSEHATSCLVRLLNFPEDIDLKSLIEKAKLLQSFALEANLPSSSSRGNSLLSTPNYWEETWKILQPSMDQKGGGVLKMKGRGFLRRSLSSTESNVSRSKAANFENNDMTSTRQSTTDEFHNADVVPAELITSVPHMLIEKQKHHVGKGTAETIGSNSKNGCETGQHDGYCSTSGEIRDPLGAASGYLSRSSSITLSCGTEYDHDTHHLEEPCDPCDDRVVNEPDPLSVHNTGTDEAATTDRTSGIVDTYPVRQRRLCSVDGKLKIKTRNATSAKGDEKETLAICSISNVADKELSRTLRSLGESMVENIQDIELLLKPNSLSTSVEKLEEAIPGSTEQAKAVAALKELRKISDLLRQI

SEQ ID NO: 2666 - protein, 745 aa, Oryza sativa Indica Group
MPECPARERFSALRGARWRADLGVLPDCASVSTEEFRRAAADSRRRYANLRRRLLIDPHLSKDEENAPDLVVENPLSQNPESTWGQYFRNAELEKMLNQDLSRLYPELGNFFQTTICQSMLGRILLVWSLRYPELGYKQGMHELLAPLLYVLHADVHYFKQVRELHDELFSDDFDGQTFPDRIKLNRSDRTNTIEGSAAKIRSLDDLDSDTRDLFLINDAYGAEGELGIILSEKFMEHDAYCMFESLMHGSMNGAQGVVAITDFYSLSPAPESSTGLTPVREASSAIYHLLASVDSPLHSHLMELGVEPQYFALRWLRVLFGREFSLDNLLFIWDEIFSSPNHSYCADIKNQSDYQFKILCSHRGALILSMAVSMMLHLRSSLLGSEHATSCLVRLLNFPGDTDLKSLIDKAKLLQPFALEANLPSSPLRGKSPLNPPNYWEETWKILQMSEEKRSGGSINRMKVRGLFRRSSPNTESNVSRTKDANFEDSNSTSGTQSTADEHHRSGIVPVNLVNGTLHTPIRERTSHVEQCTAENMITTSNNVLEAGQPEVHRSSSVDVRDALGVACGNLSRDSSTSLSCGTEYDHETHHADEPCASHDDKVVSEPDPLPVHNDKIDEVTIAAIQTCALVDYQQSQQNKPCSVNGKSEVKYQQNFAVHEVGRKETFELGSSSDVADKELLGTLRLLGESMVENIEVIDLLFQPNLHSTSLDKSEEIVLGSIEQAKAKAALEGLKKISELLRRI

SEQ ID NO: 2667 - protein, 745 aa, Oryza sativa Japonica Group
MPECPARERFSALRGARWRADLGVLPDCASVSTEEFRRAAADSRRRYANLRRRLLIDPHLSKDEENAPDLAVENPLSQNPESTWGQYFRNAELEKMLNQDLSRLYPELGNFFQTTICQSMLGRILLVWSLRYPELGYKQGMHELLAPLLYVLHADVHYFKQVRELHDELFSDDFDGQTFPDRIKLNRSDRTNTIEGSAAKIRSLDDLDSDTRDLFLINDAYGAEGELGIILSEKFMEHDAYCMFESLMHGSMNGAQGVVAITDFYSLSPAPESSTGLTPVREASSAIYHLLASVDSPLHSHLMELGVEPQYFALRWLRVLFGREFSLDNLLFIWDEIFSSPNHSYCADIKNQSDYQFKILCSHRGALILSMAVSMMLHLRSSLLGSEHATSCLVRLLNFPGDTDLKSLIDKAKLLQPFALEANLPSSPLRGKSPLNPPNYWEETWKILQMSEEKRSGGSINRMKVRGLFRRSSPNTESNVSRTKDANFEDSNSTSGTQSTADEHHRSGIVPVNLVNGTLHTPIRERTSHVEQCTAENMITTSNNVLEAGQPEVHRSSSVDVRDALGVACGNLSRDSSTSLSCGTEYDHETHHADEPCASHDDKVVSEPDPLPVHNDKIDEVTIAAIQTCALVDYQQSQQNKPCSVNGKSEVKYQQNFAVHEVGRKETFELGSSSDVADKELLGTLRLLGESMVENIEVIDLLFQPNLHSTSLDKSEEIVLGSIEQAKAKAALEGLKKISELLRRI

SEQ ID NO: 2668 - protein, 787 aa, Zea mays; identical to SEQ ID NO: 1543

SEQ ID NO: 2669 - protein, 367 aa, Sorghum bicolor
MRSGRRMAAALVAVVWSSWALALAAAAQSYNAVFNFGDSITDTGNLCTNGRPSSITFTQPPYGETYFGTPTCRCCDGRVIPDFLSSKFGLPFLPPSKSTTADFKKGANMAITGATAMDAPFFRSLGLSDKIWNNGPISFQLQWFQQISSAVCGNDCKSYLGNSLFVFGEFGGNDYNAMLFGNYNADQASTYTPQIVSTIANGVEKLIAMGATDIVVPGVLPIGCFPIYLTIYGTSNSGDYDSLGCLKKFNDLSTNHNNQLQTQISSLQAKYKSARIMYADFYSAVYDMVKNPGSYGFSTVFQTCCGAGGGKYNYQNSARCGMSGASACSNPAAHLSWDGIHLTEAAYKQITDGWLNGPYCRPAILHS

SEQ ID NO: 2670 - protein, 366 aa, Zea mays
MRSGRLAVAVAVALAWAFAASAAAAAQKYNAIFNFGDSITDTGNLCTNGRPSQITFTQPPYGETYFGTPTCRCSDGRVIPDFLCSRFGLPFLPPSKSTTADFKKGANMAITGATAMDAPFFRSLGLSDKIWNNGPISFQLQWFQQVTSAVCGQDCKSYLANSLFVFGEFGGNDYNAMLFGNYNADQASTYTPQIVSAIAAGVEKLLAMGATDVVVPGVLPIGCFPIYLTVYGTSNSADYDALGCLKKFNDLSTNHNAQLQAQISALQAKYKSARIMYADFYSAVYDMVKNPGSYGFSSVFQACCGSGGGKYNYQNSARCGMSGASACSSPASHLSWDGIHLTEAAYKQITDGWLNGPYCRPAILHS

SEQ ID NO: 2671 - protein, 372 aa, Zea mays
MRSGRRMAAALVALAWALAAVAVAAAQKYNAIFNFGDSITDTGNLCTSGRPSQITFTQPPYGETYFGTPTCRCCDGRVIPDFLCSKFGLPFLPPSKSTTADFKEGANMAITGATAMDAPFFRSLGLSDKIWNNGPISFQLEWFQQVASAVCGGGQAQQADCKSYLANSLFVFGEFGGNDYNAMLFGNYSADQASTYTPQVVAAVASGVEKLVAMGATDIVVPGVLPIGCFPIYLTFYGTSSSADYDSLGCLRKFNDLSTNHNNQLQAQISGLQAKYKSARIMYADFYSAVYDMVKNPGSYGFSTAFQTCCGSGGGKYNYQNSARCGMPGASACSNPAAHLSWDGIHLTEAAYKQITDGWLNGPYCHPAILHS

SEQ ID NO: 2672 - protein, 367 aa, Oryza sativa Japonica Group
MGRQSSSAARRVVVVVCAAMVVAAAAAQKYNAVYNFGDSITDTGNLCTNGRPSQITFTQPPYGETYFGSPTCRCCDGRVVVDFLASKFGLPFLPPSKSTSADFKKGANMAITGATAMDANFFRSLGLSDKIWNNGPISFQIQWFQQISSSVCGQNCKSYLANSLFVFGEFGGNDYNAMLFGGYSADQASTYTSQIVDTISNGVEKLIAMGAVDVVVPGVLPIGCFPIYLTIYGTSSSSDYDSLGCLKKFNDLSTNHNNQLKTKISALQSKYKSARIMYADFYSGVYDMVRNPGNYGFSTVFETCCGSGGGKFNYNNNARCGMSGASACSNPASHLSWDGIHLTEAAYKQITDGWLNGPYCSPAILHS

SEQ ID NO: 2673 - protein, 369 aa, Hordeum vulgare subsp. vulgare
MARSSSPMARQLQLLLVVLCASWLALQAAAQKYNAVYSFGDSITDTGNLCTNGRPSAITFTQPPYGETYFGSPTCRCSDGRVIVDFLSTKYGLPFLPPSKSTSADFKKGANMAITGATAMDAPFFRSLGLSDKIWNNGPISFQLQWFQTITSSVCGSSCKSYLANSLFIFGEFGGNDYNAMLFGNYNTDQASTYAPQIVDTISAGVEKLVAMGATDVVVPGVLPIGCFPIYLTIYGTSSAADYDSLGCLKKFNDLSTYHNSLLQAKVSTLQAKYKSARIMYADFYAGVYDMVRSPSKYGFSSVFEACCGSGGGKYNYANSARCGMSGASACASPASHLSWDGIHLTEAAYKQITDGWLNGAFCHPAITH

SEQ ID NO: 2674 - protein, 362 aa, Hordeum vulgare subsp. vulgare
MARQLQLLLVVLCASWLALQAAAQKYNAVYSFGDSITDTGNLCTNGRPSAITFTQPPYGETYFGSPTCRCSDGRVIVDFLSTKYGLPFLPPSKSTSADFKKGANMAITGATAMDAPFFRSLGLSDKIWNNGPISFQLQWFQTITSSVCGSSCKSYLANSLFIFGEFGGNDYNAMLFGNYNTDQASTYAPQIVDTISAGVEKLVAMGATDVVVPGVLPIGCFPIYLTIYGTSSAADYDSLGCLKKFNDLSTYHNSLLQAKVSTLQAKYKSARIMYADFYAGVYDMVRSPSKYGFSSVFEACCGSGGGKYNYANSARCGMSGASACASPASHLSWDGIHLTEAAYKQITDGWLNGAFCHPAITH

SEQ ID NO: 2675 - protein, 378 aa, Zea mays
MGSQRQRHRAVTGLPAAGARMLALLCASSWVLVLTTAQNYSAIFNFGDSITDTGNLCTSGRPSQITFTQPPYGETYFGTPTCRCSDGRVVVDFLSTQFGLPFLPPSKSSSADFRQGANMAITGATAMDAPFFRSLGLSDKIWNNGPISFQLQWFQQIATSVCGQSCKSYLGNSLFVFGEFGGNDYNAMIFGGYSIEQARKYVPKIVNTISRGIDKLIAMGATDIVVPGVLPIGCFPIYLTIYQSSNGSDYDSLGCLNSFNDLSTYHNSLLQKRVDIIQSRHRKTARIMYADFYSAVYDMVRNPQSYGFSSVFETCCGSGGGKYNYQNSARCGMAGAAACSSPASHLSWDGIHLTEAAYKHITDAWLRGPYCRPPILHN

SEQ ID NO: 2676 - protein, 378 aa, Zea mays
MGSQRQRHRAVTGLPAAGARMLALLCASSWVLVLTTAQNYSAIFNFGDSITDTGNLCTSGRPSQITFTQPPYGETYFGTPTCRCSDGRVVVDFLSTQFGLPFLPPSKSSSADFSQGANMAITGATAMDAPFFRSLGLSDKIWNNGPISFQLQWFQQIATSVCGQSCKSYLGNSLFVFGEFGGNDYNAMIFGGYSIEQARKYVPKIVNTISRGIDKLIAMGATDIVVPGVLPIGCFPIYLTIYQSSNGSDYDSLGCLNSFNDLSTYHNSLLQKRVDIIQSRHRKTARIMYADFYSAVYDMVRNPQSYGFSSVFETCCGSGGGKYNYQNSARCGMAGAAACSSPASHLSWDGIHLTEAAYKHITDAWLKGPYCRPPILHN

SEQ ID NO: 2677 - protein, 365 aa, Sorghum bicolor
MASAVILTLMLCAAASWVVAAAAAQNYSAIFNFGDSITDTGNLCTNGRPSQITFTQPPYGETYFGTPTCRCSDGRVVVDFLSTQFGLPFLPPSKSSSADFKQGANMAITGATAMDAPFFRSLGLSDKIWNNGPISFQLQWFQQIATAVCGQSCKSYLANSLFVFGEFGGNDYNAMIFGGYTIEQARKYTPKIVNTISRGIDKLIGLGATDIVVPGVLPIGCFPIYLTIYQSSNSSDYDDLGCLKSFNDLSTYHNTLLQKRVDIIQSRHRKTARIMYADFYSAVYDMVRNPQTYGFSSVFETCCGSGGGKYNYQNSARCGMSGASACANPATHLSWDGIHLTEAAYKQITDGWLKGPYCRPPILHN

SEQ ID NO: 2678 - protein, 341 aa, Oryza sativa Japonica Group
MMGRQSSSAARRVVVVVCAAMVVAAAAAQKYNAVYNFGDSITDTGNLCTNGRVVVDFLASKFGLPFLPPSKSTSADFKKGANMAITGATAMDANFFRSLGLSDKIWNNGPISFQIQWFQQISSSVCGQNCKSYLANSLFVFGEFGGNDYNAMLFGGYSADQASTYTSQIVDTISNGVEKLIAMGAVDVVVPGVLPIGCFPIYLTIYGTSSSSDYDSLGCLKKFNDLSTNHNNQLKTKISALQSKYKSARIMYADFYSGVYDMVRNPGNYGFSTVFETCCGSGGGKFNYNNNARCGMSGASACSNPASHLSWDGIHLTEAAYKQITDGWLNGPYCSPAILHS

SEQ ID NO: 2679 - protein, 387 aa, Zea mays; identical to SEQ ID NO: 2565

SEQ ID NO: 2680 - protein, 347 aa, Zea mays; identical to SEQ ID NO: 1544

SEQ ID NO: 2681 - protein, 348 aa, Dactylis glomerata
MRGASLLLLVVLSAAAAAPQLVGAASGDHSLRIIQKDIIETINKHPNAGWTAGHNAYLANYTIEQFKHILGVKPTPPGLLAGVPTKTYSKSEELPKQFDARSKWSGCSTIGTILDQGHCGSCWAFGAVECLQDRFCIHQNINISLSANDLVACCGFMCGDGCDGGYPIKAWQYFVQSGVVTEECDPYFDQVGCKHPGCEPAYDTPKCEKKCKVQNQVWEEKKHFSINAYRVNSDPHDIMAEVYKNGPVEVAFTVYEDFAHYKSGVYKHVTGGVMGGHAVKLIGWGTSDAGEDYWLLANQWNRGWGDDGYFKIIRGKNECGIEEEVVAGMPSTKNMAGNHGSAFGTAIL

SEQ ID NO: 2682 - protein, 403 aa, Oryza sativa Japonica Group
MGMPLLLLLLILVAAGPQAGRAAKPIPNLQLMTKEGGSSRIIQDDIIKAINKHPNAGWTAARNPYFANYTVNNNTLLLLFSFFFLRGHLPVVVSIAYIKTFISCLFGGLNNPPVQTAQFKHILGVKPTPHSVLNDVPVKTYPRSLMLPKEFDARSAWSQCNTIGTILDQGHCGSCWAFGAVECLQDRFCIHFNMNISLSVNDLVACCGFMCGDGCDGGYPIMAWRYFVRNGVVTDECDPYFDQVGCKHPGCEPAYPTPVCEKKCKVQNQVWLEKKHFSVNAYRVNSDPHDIMAEVYQNGPVEVAFTVYEDFAHYKSGVYKHITGGMMGGHAVKLIGWGTTDAGEDYWLLANQWNRGWGDDGYFKIIRGTNECGIEEDVVAGMPSTKNMVRNYDSAFGVGTAIV

SEQ ID NO: 2683 - protein, 355 aa, Hordeum vulgare subsp. vulgare
MGGVGVSLALLAAAAAVVISAVAAAPQLVGAAKAEHSLGIIQEDIIQTVNDHPNAGWTAGHNPYFANYTIEQFKHILGVKPTPPGLLAGVPIKTHPKSADLPKEFDARTQWSSCSTIGNILDQGHCGACWAFAAVESLQDRFCIHLNMSVSLSVNDLLACCGFLCGSGCNGGYPISAWRYFRRSGVVTEECDPYFDQTGCQHPGCEPAYPTPKCHRKCKVENQVWKKNKHFSVNAYRVHSNPHDIMAEVYKNGPVEVAFTVYEDFAHYKSGVYKHITGGVMGGHAVKLIGWGTSDAGEDYWLLANQWNRGWGDDGYFKIIRGKNECGIEEDVTAGMPSTKNMDRNNDVAFGTAIL

SEQ ID NO: 2684 - protein, 344 aa, Hordeum vulgare subsp. vulgare
MGSGLLPLALLVVLSAAAAAPQLAGAAGGGHSLGIIQKGIIQTVNNHPNAGWTAGHNPYLANYTIEQFKHMLGVKPTPPGLLAGVRTKTHPRSEQLPKEFDARSKWSGCSTIGKILDQGHCGSCWAFGAVECLQDRFCIHHNMNISLSANDLVACCGFMCGDGCDGGYPISAWQYFVQNGVVTEECDPYFDQVGCKHPGCEPAYPTPVCEKKCKVQNQVWQEKKHFSIDAYQVNSDPHDIMAEVYKNGPVEVAFTVYEDFAHYKSGVYKHITGGVMGGHAVKLIGWGTSDAGEDYWLLANQWNRGWGDDGYFKIIRGKNECGIEEDVTAGMPSMKNIAGSAFAM

SEQ ID NO: 2685 - protein, 345 aa, Hordeum vulgare subsp. vulgare
MGGLLPLALLVVLSAAAAAPQLVGAARGDHSLPIIQEDIIRTVNSHPNAGWTAGHNPYLANYTIEQFKHILGVKPTPPGLLAGVPTKTYSRSEKAELPKEFDARSKWSGCSTIGKILDQGHCGACWAFGAVECLQDRFCIHHSVNVSLSVNDLVACCGFLCGDGCDGGYPIFAWQYFVENGVVTDECDPFFDQVGCQHPGCEPAYPTPVCEKKCKVQNQVWEEKKHFSIDAYQVNSDPHDIMAEVYKNGPVEVSFIIYEDFAHYKSGVYKQITGRMVGGHAAKLIGWGTSDAGEDYWLLANQWNRGWGDDGYFKIIRGTNECGIEGDVNAGMPSTKNIAGRAFAI

SEQ ID NO: 2686 - protein, 305 aa, Triticum aestivum
IIQTVNNHPNAGWTAGHNPYLANYTIEQFKHMLGVKPTPPGLRAAVRTKTHSRSEQLPKVFDARSKWSGCSTIGKILDQGHCGSCWAFGAVECLQDRFCIHHNMNITLSANDLVACCGFMCGDGCDGGYPISAWQYFVQNGVVTDECDPYFDQVGCKHPGCEPAYPTPVCEKKCKVQNQVWEEKKHFSINAYQVNSDPHDIMAEVYNNGPVEVAFTVYEDFAHYKSGVYKHITGGVMGGHAVKLIGWGTSDAGEDYWLLANQWNRGWGDDGYFKIIRGKNECGIEEDVTAGMPSTKNIAGSAFAI

SEQ ID NO: 2687 - protein, 353 aa, Triticum aestivum
MGGVGVSLALLVAVVLSAVAAAPQLAGTAKAEHSLGIIQKDIIQTVNKHPNAGWTAGHNPYFANYTIEQFKHILGVKPTPPGLLAGVPIKIHPEMDLPKEFDARTQWSSCSTIGNILDQGHCGACWAFAAVEALQDRFCIHLNMSVSLSVNDLLACCGFLCGSGCNGGYPISAWRYFRRSGVVTEECDPYFDQTGCQHPGCEPAYPTPKCQRKCKVENQAWKENKHFSVNAYRVHSNPHDIMAEVYKNGPVEVAFTYCQILDFAHYKSGVYKHITGGVMGGHAVKLIGWGTSDAGEDYWLLANQWNRGWGDDGYFKIIRGENECGIEGDVTAGMPSTKNTARNNDVAFGTAIL

SEQ ID NO: 2688 - protein, 248 aa, Zea mays; identical to SEQ ID NO: 1545

SEQ ID NO: 2689 - protein, 321 aa, Sorghum bicolor
MALLPCQPHGHATETFRKSPTKSQRPAPRGPGNRCLRHHRATAPPLPESAAGGMGAEYPTFEEVSAARVLLLLADSTPPPALPSPPPTLRYFPRLSRVICSSHHRIALHHRKLTEPPLRRASPHYSDEFFCYSGSSSSYSGVSARSCVSDSAQRGRPVDPLRVLSVVASLRRLDPKVLVEATSALFHTDKEKKRKGVWIEIDSGDDEDDQSERSSAVASEGSTVTAAASAGSTATSGRCRQAPRVGCAAGGTGKGLRRADVIMQWFSRPQAGPATENDIRAAVGDNSGTSKAIRWLLKQEGGLRRAGTGGSLDPYVYMVAD

SEQ ID NO: 2690 - protein, 328 aa, Zea mays
MDLASSDLAALGAAELVRVSASIPRAAPRTFALLTACLVFPLSFAVLAHSLFTHPILLRIQRATHSELAQWLRLFAYQFLYLIVLFTFSLLSTAAAVFTVASLYANKPASISSSLTALPPILPRLLRTFLWVSLLMLAYHLVFALTVLLLIVVFIPNASESESAPPSLAFVLFLVVVVFVFLGIHVYISALWHLASVISVLEPLCGLAAMAKSKDLLQGRTGTAATLVVSYFAVCGVTSVLFRAAVVKGRAEEGSFGLALPGRLLVGAVLLCVLVCVNLLGLLVQSVFYYACKAFHNQQIDRTALYEHLGGYLGEYVPLKSNIQMENL

SEQ ID NO: 2691 - protein, 327 aa, Sorghum bicolor
MELASTDLAALGAADLVRVSASIPRAAPRTFALLTACLVFPLSFAVLAHSLFTHPILRRIQGATHNELAQWLRLFAYQFLYLIVLFTFSLLSTAAAVFTVASLYAAKPASISASLTALPPILPRLLRTFLWVSLLMLAYHLVFALTVLLLLIVFIPNASESAAPPSLSFVLFLIVVVFVFLGIHVYISALWHLASVISVLEPLCGLAAMAKSKQLLQGRTGTAATLVVSYFAVCGVTSLLFRAAVVKGRAEEGSFGLALPGRLLVGAVLVCVLVCVNLLGLLVQSVFYYACKAFHNQQIDRTALYEHLGGYLGEYVPLKSNIQMENL

SEQ ID NO: 2692 - protein, 302 aa, Zea mays
MDLVSSDLAALGAVELVRVSASIPRAAPRTFALLTACLVFPLSFAVLAHSLFTHPILLRIRGAAHSGFAPWLGLFAYQFMYLIVLFTFSLLSTAAAVFTVASLYAGKPASVSSSLSALRPILPRLLRTFLWVSLLMLAYHLAFALAVLLLVVLVFLGIHVYISALWHLASVVSVLEPLCGLAAMAKSRQLLQGRTGTAATLVVSYFAVCGATSLLFRAAVVKGRTEEGSFGLALPGRLLVGAVLVCVLVSVNLLGLLVQSVFYYACKAFHSQQIDRTALYEHLGGYLGEYVPLKSNIQMENL

SEQ ID NO: 2693 - protein, 329 aa, Oryza sativa Indica Group
MELATHDLAALGAADLVRVSASIPRAAPRTFALLTAGLVFPLSAAVLVHSLFTHPIILRLQGANGDYSSSDSAQWLKLFAYQFLYLILLFTLSLLSTAAAVFTVASLYAAKPASIASSLAALPPILPRLLRTFLWVSLLMLAYHLVFALTVLLLLLLFAPSSSPPSLPFVLILVVVVFVFLAIHVYISALWHLASVISVLEPLCGLAAMTKSKQLLQGRTRTASVLVVSYFAACGVTAVLFRAAVVKGRGEEGSLGLSLPGRVLAGAVLVSVLVCVNLLGLLVQSVFYYACKAFHNQQIDRSALYEHLGGYLGEYVPLKSNIQMENLDA

SEQ ID NO: 2694 - protein, 329 aa, Oryza sativa Japonica Group
MELATHDLAALGAADLVRVSASIPRAAPRTFALLTAGLVFPLSAAVLVHSLFTHPIILRLQGANGDYSSSDSAQWLKLFAYQFLYLILLFTLSLLSTAAAVFTVASLYAAKPASIASSLAALPPILPRLLRTFLWVSLLMLAYHLVFALTVLLLLLLFAPSSSPPSLPFVLILVVVVFVFLAIHVYISALWHLASVISVLEPLCGLAAMTKSKQLLQGRTRTAGVLVVSYFAACGVTAVLFRAAVVKGRGEEGSLGLSLPGRVLAGAVLVSVLVCVNLLGLLVQSVFYYACKAFHNQQIDRSALYEHLGGYLGEYVPLKSNIQMENLDA

SEQ ID NO: 2695 - protein, 327 aa, Hordeum vulgare subsp. vulgare
MELATRDLAALGAGDLVRASAAIPRAAPRTFALLTACLVFPLSFAVLAHSLFTHPILRRIRTSDYTATSAQWVALFAYQFLYLIFLFTFSLLSTAAAVFTVASLYAAKPASISSSLSALPPILPRLLRTFLWVSLLMLAYHVGFVLTVVLLIVLIGPPVTASTPPPLSLLLALLAVAFLFLAIHVYISALWHLASVISVLEPVCGLAAMSKSRQLLQGRTRTASVLVFSYFAVCGLITALFRSAVVKGQGEEGSLDMSLAGRILIGALLVSVLVCVNLLGLLVQSVFYYACKAYHNQQIDRTALYEHLGGYLGEYVPLKSNIQMENL

SEQ ID NO: 2696 - protein, 323 aa, Sorghum bicolor
MELVSSEDLAAMGAAELVRVSASIPRAAPRTFALLTACLVWPLSIAVLAHTLFTDPLDILLRIHHAQWLRLWAYQFLYLVALYTFSILSTAAAVFTVASLYANKQPASMSSSLTAMPLILPRLLHTFACVPLLMGAYHLVFVLTVFGLINVCFVPNNDDAPDESPPLPLPFLLCNIVVAAVFVGIHDYVSALWHLAGVVSVVEPLCGLAALAKSKRLLQGRTGTATTLVGAYMTICGVTLLLFRDAVVEGSFGLALPWRLLVGAALVCVLVCANLLGLLVQSVFYYSCKAFHNQKIDRTELYEHLGGYLGETLKSNILQMENL

SEQ ID NO: 2697 - protein, 273 aa, Sorghum bicolor
MATDVPMTPELEQIDGEIHDIFRALQNGFQKMDKIKDSNRQAKQLEDLTVKMKECKRLIKEFDRILKDEESNNPPEINKQLNDRKQFMIKELNSYVTLRKTYQSSLGNNNKRVELFDMGAGSSEPAVEDNIQMASAMTNQQLIDAGRNQMDQTDQAIERSKMVVAQTVETGAQTAATLTAQTEQMKRIGNELDTVHFSLKKASKLVKEIGRQVATDKCIMAFLFLIVVGVIAIIVVKIVHPNNKNIRDIPGLAPPAQNYQNRRLLWAEAFIGP

SEQ ID NO: 2698 - protein, 275 aa, Zea mays
MASDVPMTPELEQIDGEIHDIFRALQNGFQKMDKIKDSNRQAKQLEDLTVKMKECKRLIKEFDRILKDEESNNPPEINKQLNDRKQFMIKELNSYVTLRKTYQSSLGNNNKRVELFDMGAGSSEPAAEDNIQMASAMTNQQLIDTGRNQMDQTDQAIERSKMVVAQTVETGAQTAATLTQQTEQMKRIGNELDTVHFSLKKASQLVKEIGRQVATDKCIMAFLFLIVLGVIAIIVVKIVHPNNKNIRDIPGLAPPAQNYQIHNRRLLWAEASIGM

SEQ ID NO: 2699 - protein, 275 aa, Oryza sativa Japonica Group
MASDVPMSPELEQIDGEVQDIFRALQNGFQKMDKIKDSSRQAKQLEDLTAKMKECKRLIKEFDRILKDEESNNPPEVHKQLNDRKQYMIKELNSYVTLRKTYQSSLGNNNKRVELFDMGAGSSEPAAEDNIQIASAMTNQQLMDAGREQMTQTDQAIDRSKMVVAQTIETGTQTASALSQQTEQMKRIGNELDTVHFSLKKASQLVKEIGRQVATDKCIMALLFLIVCGVIAIIVVKIVNPHNKNIRDIPGLAPPAQNFQISNRRLLSVEIIRGL

SEQ ID NO: 2700 - protein, 276 aa, Oryza sativa Indica Group
MASDVPMSPELEQIDGEVQDIFRALQNGFQKMDKIKDSSRQAKQLEDLTAKMKECKRLIKEFDRILKDEESNNPPEVHKQLNDRKQYMIKELNSYVTLRKTYQSSLGNNNKRVELFDMGAGSSEPAAEDNIQIASAMTNQQLMDAGREQMTQTDQAIDRSKMVVAQTIETGTQTASALSQQTEQMKRIGNELDTVHFSLKKASQLVKEIGRQVATDKCIMALLFLIVCGVIAIIVVKIVNPHNKNIRDIPGLAPPAQNFQISNRRLLSVEIIRGLL

SEQ ID NO: 2701 - protein, 275 aa, Oryza sativa Japonica Group
MASDVPMSPELEQIDGEVQDIFRALQNGFQKMDKIKDSSRQAKQLEDLTAKMKECKRLIKEFDRILKDEESNNPPEVHKQLNDRKQYMIKELNSYVTLRKTYQSSLGNNNKRVELFDMGAGSSEPAAEDNIQIASAMTNQQLMDAGREQMTQTDQAIDRSKMVVAQTIETGTQTASALSQQTERMKRIGNELDTVHFSLKKASQLVKEIGRQVATDKCIMALLFLIVCGVIAIIVVKIVNPHNKNIRDIPGLAPPAQNFQISNRRLLSVEIIRGL

SEQ ID NO: 2702 - protein, 280 aa, Oryza sativa Japonica Group
MASDVPMSPELEQVDGEIQDIFRALQNGFQKMDKIKDSNRQSKQLEDLTGKMRECKRLIKEFDRILKEDEKKNSADVNKQLNDKKQLMIKELNSYVTLRKTYQSSLGNKRIELFDTGNDQVAEDNTVQMASEMSNQQLMDAGRKQMDQTDQVIERSKKVVAQTVEVGSQTAAALSQQTEQMKRIGNELDSVHFSLKKASQMVKEIGRQVATDKCIMAFLFLIVCGVIAIIVVKVTSLVEIKTDPISSIVNPHNKNIRDIPGLAPPAQNRKLLSIESFGSL

SEQ ID NO: 2703 - protein, 269 aa, Sorghum bicolor
MGSDVPMSPELEQVDGEIQDIFRALQNGFQKMDKIKDSSRQSKQLEDLTAKMRECKRLIKEFDRILKDEEKKNTPDVNKQLNDKKQFMIKELNSYVTLRKTYQSSLGNKRIELFDTGNDQVADETPVQMASEMSNQELISAGRKQMDQTDQAIERSKMVVAQTVEVGAQTAATLSQQTDQMKRIGNELDSVHFSLKKASQMVKEIGRQVATDKCIMAFLFLIVCGVIAIIVVKIVNPHNKNIRDIPGLAPPAMNRKLLSVDAFGGLRAL

SEQ ID NO: 2704 - protein, 265 aa, Zea mays
MSTDVPMSPELEQVDGEIQDIFRALQNGFQKMDKIKDSSRQSKQLEDLTAKMRECKRLIKEFDRILKDEEKKNTPDVNKQLNDKKQFMIKELNSYVTLRKTYQSSLGNKRIELFDTGNDQVAEGTPVQMASEMSNQELISTGRKQMDQTDQAIERSKMVVAQTVEVGAQTAATLTQQTEQMKRIGNELDSVHFSLKKASQMVKEIGRQVATDKCIMAFLFLIVCGVIAIIVVKIVNPHNKNIRDIPGLAPPAMNRKLLSIDAAGL

SEQ ID NO: 2705 - protein, 266 aa, Oryza sativa Japonica Group
MASDVPMSPELEQVDGEIQDIFRALQNGFQKMDKIKDSNRQSKQLEDLTGKMRECKRLIKEFDRILKEDEKKNSADVNKQLNDKKQLMIKELNSYVTLRKTYQSSLGNKRIELFDTGNDQVAEDNTVQMASEMSNQQLMDAGRKQMDQTDQVIERSKKVVAQTVEVGSQTAAALSQQTEQMKRIGNELDSVHFSLKKASQMVKEIGRQVATDKCIMAFLFLIVCGVIAIIVVKIVNPHNKNIRDIPGLAPPAQNRKLLSIESFGSL

SEQ ID NO: 2706 - protein, 266 aa, Oryza sativa Japonica Group
MASDVPMGPELEQVDGEIQDIFRALQNGFQKMDKIKDSNRQSKQLEDLTGKMRECKRLIKEFDRILKEDEKKNSADVNKQLNDKKQLMIKELNSYVTLRKTYQSSLGNKRIELFDTGNDQVAEDNTVQMASEMSNQQLMDAGRKQMDQTDQVIERSKKVVAQTVEVGSQTAAALSQQTEQMKRIGNELDSVHFSLKKASQMVKEIGRQVATDKCIMAFLFLIVCGVIAIIVVKIVNPHNKNIRDIPGLAPPAQNRKLLSIESFGSL

SEQ ID NO: 2707 - protein, 358 aa, Oryza sativa Japonica Group
MGMPLLLLLLILVAAGPQAGRAAKPIPNLQLMTKEGGSSRIIQDDIIKAINKHPNAGWTAARNPYFANYTTAQFKHILGVKPTPHSVLNDVPVKTYPRSLMLPKEFDARSAWSQCNTIGTILDQGHCGSCWAFGAVECLQDRFCIHFNMNISLSVNDLVACCGFMCGDGCDGGYPIMAWRYFVRNGVVTDECDPYFDQVGCKHPGCEPAYPTPVCEKKCKVQNQVWLEKKHFSVNAYRVNSDPHDIMAEVYQNGPVEVAFTVYEDFAHYKSGVYKHITGGMMGGHAVKLIGWGTTDAGEDYWLLANQWNRGWGDDGYFKIIRGTNECGIEEDVVAGMPSTKNMVRNYDSAFGVGTAIV

SEQ ID NO: 2708 - protein, 355 aa, Hordeum vulgare subsp. vulgare
MGGVGVSLALLAAAAAVVISAVAAAPQLVGAAKAEHSLGIIQEDIIQTVNDHPNAGWTAGHNPYFANYTIEQFKHILGVKPTPPGLLAGVPIKTHPKSADLPKEFDARTQWSSCSTIGNILDQGHCGACWAFAAVESLQDRFCIHLNMSVSLSVNDLLACCGFLCGSGCNGGYPISAWRYFRRSGVVTEECDPYFDQTGCQHPGCEPAYPTPKCHRKCKVENQVWKKNKHSSVNAYRVHSNPHDIMAEVYKNGPVEVAFTVYEDFAHYKSGVYKHITGGVMGGHAVKLIGWGTSDAGEDYWLLANQWNRGWGGDGYFKIIRGKNECGIEEDVTAGMPSTKNMDRNNDVAFGTAIL

SEQ ID NO: 2709 - protein, 520 aa, Zea mays; identical to SEQ ID NO: 2612

SEQ ID NO: 2710 - protein, 400 aa, Zea mays
MMMMSSGRAGGGATAGRYPFTASQWQELEHQALIYKCLASGKPIPSYLMPPLRRILDSALATSPSLAYPPQPSLGWGCFGMGFTRKADEDPEPGRCRRTDGKKWRCSKEAYPDSKYCEKHMHRGKNRSRKPVEMSLATPAPAPAPAAATTATATSSPAPSYHRPAHDATPSPYHALYGGGGGGGGSPYSASARPGATGGGGAYHHAQHVSPFHLHLETTHPHPPPPYNYSADQRDYAYGHAAAKEVGEHAFFSDGAGERVDRQAAAGQWQFRQLGVETKPGPTPLFPVAGYGHGAASPYGVELGKDDDEQEERRRQHCFVLGADLRLERPSSGHGHGHGHDHDDAAAAQKPLRPFFDEWPHQKGDKAGSWMGLDGETQLSMSIPMAATDLPVTSRFRNDE

SEQ ID NO: 2711 - protein, 397 aa, Zea mays
MMMMSSGRAGGGATAGRYPFTASQWQELEHQALIYKCLASGKPIPSYLMPPLRRILDSALATSPSLAYPPQPSLGWGCFGMGFTRKADEDPEPGRCRRTDGKKWRCSKEAYPDSKYCEKHMHRGKNRSRKPVEMSLATPAPAPAPAAATTATATSSPAPSYHRPAHDATPSPYHALYGGGGGGGSPYSASARPGATGGGGAYHHAQHVSPFHLHLETTHPHPPPPYNYSADQRDYAYGHAAAKEVGEHAFFSDGAGERVDRQAAAGQWQFRQLGVETKPGPTPLFPVAGYGHGAASPYGVEMGKYDDEQEERRRQHCFVLGAGLRLERPSSGHGHGHDHDDAAAAQKPLRPFFDEWPHQKGDKAGSWMGLDGETQLSISIPMAATDLPVTSRFRNDE

SEQ ID NO: 2712 - protein, 393 aa, Sorghum bicolor
MMMMSGRAGGGATAGRYPFTASQWQELEHQALIYKCLASGKPIPSYLMPPLRRILDSALATSPSLAFPPQPSLGWGCFGMGFSRKPDEDPEPGRCRRTDGKKWRCSKEAYPDSKYCEKHMHRGKNRSRKPVEMSLATPAPASAVSSATSATAAAAAATTTTSSPAPSYRPAPTSHDASPYHALYGGGSPYSASARPAGGPGPYHHPAQVSPFHLHLETTHPHPPPSYYSVDQRDYAYGHATKEVVGEHAFFSDGAAERDRQHAAGQWQFKQLGMDTKPSPTSLFPVAGYGNGAGASPYGVDLGAKEDDEEERRRQQQQHCFVLGADLRLERPSSGHDAATAQKPLRPFFDEWPHEKGNKGGSWMGLDGETQLSMSIPMAASDLPVTSRYRNDE

SEQ ID NO: 2713 - protein, 397 aa, Oryza sativa Japonica Group
MMMMSGRPSGGAGGGRYPFTASQWQELEHQALIYKYMASGTPIPSDLILPLRRSFLLDSALATSPSLAFPPQPSLGWGCFGMGFGRKAEDPEPGRCRRTDGKKWRCSKEAYPDSKYCEKHMHRGKNRSRKPVEMSLATPPPPSSSATSAASNTSAGVAPTTTTTSSPAPSYSRPAPHDAAPYQALYGGPYAAATARTPAAAAYHAQVSPFHLQLDTTHPHPPPSYYSMDHKEYAYGHATKEVHGEHAFFSDGTEREHHHAAAGHGQWQFKQLGMEPKQSTTPLFPGAGYGHTAASPYAIDLSKEDDDEKERRQQQQQQQQQHCFLLGADLRLEKPAGHDHAAAAQKPLRHFFDEWPHEKNSKGSWMGLEGETQLSMSIPMAANDLPITTTSRYHNDD

SEQ ID NO: 2714 - protein, 396 aa, Oryza sativa
MMMMSGRPSGGAGGGRYPFTASQWQELEHQALIYKYMASGTPIPSDLILPLRRSFLLDSALATSPSLAFPPQPSLGWGCFGMGFGRKAEDPEPGRCRRTDGKKWRCSKEAYPDSKYCEKHMHRGKNRSRKPVEMSLATPPPPSSSATSAASNSSAGVAPTTTTTSSPAPSYSRPAPHDAAPYQALYGGPYAAATARTPAAAAYHAQVSPFHLHIDTTHPHPPPSYYSMDHKEYAYGHATKEVHGEHAFFSDGTEREHHHAAAGHGQWQFKQLGMEPKQSTTPLFPGAGYGHTAASPYAIDLSKEDDDEKERRQQQQQQQQHCFLLGADLRLEKPAGHDHAAAAQKPLRHFFDEWPHEKNSKGSWMGLEGETQLSMSIPMAANDLPITTTSRYHNDE

SEQ ID NO: 2715 - protein, 363 aa, Zea mays
MMMMSGRAATAGRYPFTASQWQELEHQALIYKCLASGKPIPSYLMPPLRRILDSALATSPSLAAFQPQPSLGWGGCFGMGFSRKPADEDPEPGRCRRTDGKKWRCSKEAYPDSKYCEKHMHRGKNRSRKPVEMSLATPAPPASSAATTSTSPAPSYHRPAPAAHDAVPYHAPYGAAYHHTQTQVMSPFHLHLETTHPHPPPPPPYYYADQRDYAYGKEVGERAFFSDGAGERDRQQQAAGQWQFKQLGTMEATKPCPTPTPLLPAAGYGVGQAKEDEEEETRRQQQQHCFVLGADLRLAERPSGAHDDAAQKPLRHFFDEWPHEKGSKAGWWIGGLDGETTQLSMSIPMAAAADLPVTSRYRT

SEQ ID NO: 2716 - protein, 384 aa, Sorghum bicolor; identical to SEQ ID NO: 2642

SEQ ID NO: 2717 - protein, 568 aa, Zea mays; identical to SEQ ID NO: 1547

SEQ ID NO: 2718 - protein, 565 aa, Zea mays
MLACRCCCYRLGGDYSVLCSNDARNDDGTPRQCAWLITMNGGRAISSESLAALAWHFLLRRRSRDGATALASSSGVLQIAEDKSSAANLTKHKVSAERKLLNDALDRTGVRYETESWMDEETSSWMDRDLTDSDLRYRLLMQNLEELETSLVGKDLEMDILEQLGALGSFNASVARGVSALHGRPDGSLLDDPEPETTPLDAGQEDSQVVVVRSGKSQERKLRRMRASSDEKGSRTSVKVNPPRRPKKSRKASSSQFISEWKSHPGQRRIIVREQSALLSTIKECAGLEKIREKMVKEGQEVSYHRWAEAAGVDEAELVSRLQAGYCCRDRLLVTTEWLVRCIARTYTGMGTALDDLLQAGKMGVLDGAEKFDSRKGCRFSTYVKYWIRKGMLALLAENSGVTLLPARMESIMRKVKEARRGIRYRQGRNPSDSEVAAAVGVSVANVRLARKCSRRAVSLYSEVAIGQDVKFAEVIPDESASPDEAALFRGQLRERLLLVLGRLPAREGRVLRLRHGLEDGRCRSLEEIGGIYGVSKEWIRKIEKSAMARLRDDDAVRRDLHDFV

SEQ ID NO: 2719 - protein, 529 aa, Sorghum bicolor
MHLLLKRRRDRSSRDIASSSGVLQITENKSAAANLTKHKQVMSAERKLLDDALDRTSVQYESWMDEETSFWMDRDNTNNNFQYGLLMQNLEELETSLAGKDLKILENDILAHIQQLGALRSFDASTAVGATLLDTLTHDQPDSSLLDQQIIEFDPETTPLDEEEQEDSQVVVVRSGKSEERKLKRVRASEKGSRISVKVNPRRPKKSSRKASSSQFISEWKSHPGRRRIIVREQSALLATIKECASLEKIREKMVKEGQEVSYHRWAEAAGMDEAELMSRLQTGYCCRERLLVTTEWLVRCIARSYTGMGTALDDLLQAGKMGVLDGAEKFDTRKGCRFSTYVKYWIRKGMLALLAENSGVTLLPARMESIMRKVKEARRGIRYSEGRNPSDSEVAAAVGVSVANVRLARKCSRRPVSLYSEIGIGQHAKFAEVIPDEAAAAAEAPDEAALFRGQLRERLLLVLGRLPAREGHVLRLRHGLEDGRCRSLEEIGGMYRVSKEWIRKIEKSAMARLRDDDDVRRDLHDFVC

SEQ ID NO: 2720 - protein, 483 aa, Zea mays; identical to SEQ ID NO: 1045

SEQ ID NO: 2721 - protein, 490 aa, Hordeum vulgare subsp. vulgare
MRGDDGGEEEEAAAAAAAPLLVPVPQQGKGGEGGRVAREWWEESKRLWRIVGPAIFQRVALYGINVVSQAFIGHIGDLELAAFSIASTVIAGFNFGFLLGMASALETLCGQAFGAKKHHMLGVYLQRSWIVLFLFALALTPTYVFTEDLLLLLGQAPELSRLAGKMSVWLIPQHFAMAMLLPLTRFLQSQLKNWVTAATAGVTLALHVLVTYLLVTRFQLGYAGVVVAADVAWWVVVLGQFLYVVCGGCPLSWRGFSVEAFADFWDFIKLSTASGVMLCLENWYYKVLVLLTGYLPNAEIAVDALSICLTINGWEMMIPIGFLAATGVRVANELGAGSGKGARFSIVVSITTSVVIGLVFWCLILTYNDQIALLFSSGKAVLDAVHNLSMLLAFTILLNSVQPVLSGVAIGSGWQALVAYVNIGSYYLVGVPIGVILGWPLGFGVRGIWSGLIGGTAVQTLVLVYLTMRCDWDDEAKTTSARMRKWASTK

SEQ ID NO: 2722 - protein, 805 aa, Sorghum bicolor; identical to SEQ ID NO: 1549

SEQ ID NO: 2723 - protein, 794 aa, Zea mays
MDLEFGRGLRSPKRDSWKTTLLLAYQSLGVVYGDLSISPLYVYKSTFAEDIQHSETNEEIFGVLSFVFWTLTLIPLVKYVSVVLRADDNGEGGTFALYSLICRHANVSLLPNRQIADEELSTYKLECPPEITDKSRIKVWLERHRKLRVALLVMVMIGTCMVIGDGVLTPAISVFSAVSGLEFSLSKDHREYAVIPITCVILAFLFALQHYGTHRVGFLFAPIVLAWLFCMSALGLYNIIHWNPQIYQALNPSYMFKFLKKTRKYGWMSLGGILLCMTGSEAMFADLGHFSYSAIQLAFTCLVYPALILAYMGQAAYLSKHHDFYSSSQVGFYIAVPDKIRWPVLILAILASVVGSQAIISGTFSIINQSLSLSCFPRVKVVHTSEKIHGQIYIPEINWLLMILCIAVTVGFRDTKHMGNASGLAVITVMLVTTFLTSLVIVLCWHRPPLLALAFLLFFGSIEALYFSASLIKFLEGAWLPILLALILMAVMLIWHYTTIKKYEFDLHNKVTLEWLLALGDRLGMVRVPGIGLVYTDLTSGVPANFSRFVTNLPAFHQVLVFVCVKSVPVPYVFPAERYLIGRVGPPGHRSYRCIVRYGYRDVHQDVDSFETELVETLATFITLDASYRCSEASERELELDPGEQERRLTVIASNPLRRRASYDLQDSVQHSAASTVEVRATAADSLSPRDAEISSAAGPKQVRFFIDSHVVSPEAAENKQVADELEALAAAREAGTAFILGHSHVQCKPGSSVLKRLAVDVGYNFLRRNCRGPDVALRVPPASLLEVGMVYVL

SEQ ID NO: 2724 - protein, 793 aa, Oryza sativa Japonica Group
MDLEFGRGMRSPQRDSWKTTLLLAYQSLGVVYGDLSISPLYVFKSTFAEDIQHSETNEEIFGVLSFVFWTLTLIPLIKYVSIVLRADDNGEGGTFALYSLICRHANVSLLPNRQIADEELSTYKLECSSERTDKSCIKVWLEKHKKLHTALLIMVLIGTCMVIGDGVLTPAISVFSAVSGLEFSLSKDHREYAVIPITCVILAFLFALQHYGTHRVGFLFAPIVLAWLICMSALGLYNIIHWNPHVYQALNPCYMFKFLKKTRKYGWMSLGGILLCMTGSEAMFADLGHFSYSAIQLAFTSLVYPALILAYMGQAAYLSKHHDFYSNSQVGFYIAVPDKVRWPVLVLAILASVVGSQAIISGTFSIINQSQSLSCFPRVKVVHTSDKIHGQIYIPEINWLLMILCIAVTVGFRDTKHMGNASGLAVITVMLVTTCLTSLVIMLCWRRPPVLALCFLLFFGSVEALYFSASLIKFLEGAWLPILLALFLMAVMLVWHYTTIKKYEFDLHNKVTLEWLLALGDKLGMVRVPGIGLVYTDLTSGVPANFSRFVTNLPAFHQVLVFVCVKSVPVPYVFPAERYLIGRVGPPGHRSYRCIVRYGYRDVHQDVDSFETELVESLATFIKLDASYRCSDASGGGGDHEPEEERGTRLAVIGSSHASYDIQDSVQHSSAASVETTTTRRRSGGGDDDGSPGGGGGRAKQVRFFIDSHVASPEAADNKQVAEELEALAAARDAGTAFILGHSHVQCKPGSSLLKRLAVDVGYNFLRRNCRGPDVALRVPPASLLEVGMVYVL

SEQ ID NO: 2725 - protein, 793 aa, Oryza sativa Indica Group
MDLEFGRGMRSPQRDSWKTTLLLAYQSLGVVYGDLSISPLYVFKSTFAEDIQHSETNEEIFGVLSFVFWTLTLIPLIKYVSIVLRADDNGEGGTFALYSLICRHANVSLLPNRQIADEELSTYKLECSSERTDKSCIKVWLEKHKKLHTALLIMVLIGTCMVIGDGVLTPAISVFSAVSGLEFSLSKDHREYAVIPITCVILAFLFALQHYGTHRVGFLFAPIVLAWLICMSALGLYNIIHWNPHVYQALNPCYMFKFLKKTRKYGWMSLGGILLCMTGSEAMFADLGHFSYSAIQLAFTSLVYPALILAYMGQAAYLSKHHDFYSNSQVGFYIAVPDKVRWPVLVLAILASVVGSQAIISGTFSIINQSQSLSCFPRVKVVHTSDKIHGQIYIPEINWLLMILCIAVTVGFRDTKHMGNASGLAVITVMLVTTCLTSLVIMLCWRRPPVLALCFLLFFGSVEALYFSASLIKFLEGAWLPILLALFLMAVMLVWHYTTIKKYEFDLHNKVTLEWLLALGDKLGMVRVPGIGLVYTDLTSGVPANFSRFVTNLPAFHQVLVFVCVKSVPVPYVFPAERYLIGRVGPPGHRSYRCIVRYGYRDVHQDVDSFETELVESLATFIKLDASYRCSDASGGGGDHEPEEERGARLAVIGSSHASYDIQDSVQHSSAASVETTTTRRRSGGGDDDGSPGGGGGRAKQVRFFIDSHVASPEAADSKQVAEELEALAAARDAGTAFILGHSHVQCKPGSSLLKRLAVDVGYNFLRRNCRGPDVALRVPPASLLEVGMVYVL

SEQ ID NO: 2726 - protein, 788 aa, Oryza sativa Japonica Group
MDPEFGRGMAPRKREPWRTTLLLAYQSLGVVYGDLSISPLYVYKSTFAEDITHSESNEEIFGVLSFVFWTLTLIPLIKYVSIVLRADDNGEGGTFALYSLICRHANVSLLPNRQVADEELSTYKLEYPPEVANRSRIKEWLEKHKTLQTALLIMVMIGTCMVIGDGVLTPAISVFSAVSGLELSLSRDQHEYAVIPITCVILVFLFALQHYGTHRVGFLFAPIVLAWLICMSMLGLYNIIHWNPQVYRALNPYYMLKFLRKTKKSGWMSLGGILLCMTGSEAMFADLGHFSYSAIQLAFTTLVYPALILGYMGQAAYLSKHHTLNSTYQIGYYISVPESVRWPVLVLAILASVVGSQAIISGTFSIINQSQSLSCFPRVKVVHTSENIHGQIYIPEINWLLMVLCIAVTVGFRDTKHMGNASGLAVITVMLVTTCLTSLVIMLCWHRSPALALVFFLFFGSIEVLYFSASLIKFREGAWLPIMLALILMAVMFIWHHTTIKKYEFDLHNKVTLEWLLALGDKLGMVRVPGIGLVYTDLTSGVPANFSRFVTNLPAFHRVLVFVCVKSVPVPHVLPAERYLVGRVGPAGHRSYRCIVRYGYRDVHQDVDSFEAELVESLATFIKLDALYHRCSDAGSGSEQLDDGRYERENALTVIGTNPLRRCLSYEASHDGVSSVDAARSPNGIVEVPAAAAAAPVTKKVRFVVEAASPEVEKGVVEELQELCEAREAGTAFILGHSHVQTKPGSSLLKKLAVGVGYNFLRRNCRGPDVVLRVPPASLLEVGMVYVL

SEQ ID NO: 2727 - protein, 782 aa, Phragmites australis
MDPEFGVGMAPRKREPWRTTLLLAYQSLGVVYGDLSISPLYVYKSTFAEDITHSETNEEIFGALSFVFWTLTLIPLLKYVSIVLRADDNGEGGTFALYSLICRHANVSLLPNRQVADEELSTYKLECPPEVSEKSRIKVWLEKHKKLHTALLVMVMIGTCMVIGDGVLTPALSVFSAVSGLELSLSKDQHEYAVIPITCSILVFLFALQHYGTHRVGFLFAPIILSWLLCMSAIGLYNIIHWNPQVYQALNPYYMLKFLKKTRKSGWMSLGGILLCMTGSEAMFADLGHFSYSSIQLAFTSLVYPSLILGYMGQAAYLSKHHNLDASYQIGFYIAVPESVRWPVLVLAILASVVGSQAIISGTFSIINQSQSLSCFPRVKVVHTSDKIHGQIYIPEVNWMLMILCIAVTVGFRNTKRMGNASGLAVITVMLVTTCLMSLVIMLCWHRSPAWALVFLLLFGSIEALYFSASLIKFLEGAWLPILLALILLAVMFVWHHTTIKKYEFDLHNKVTLEWLLALGDKLGMVRVPGIGLVYTDLTSGVPANFCRFVTNLPAFHRVLVFVCVKSVPVPHVLPAERYLVGRVGPPGHRSYRCIVRYGYRDVHQDVDSFETELVESLVTFIKLDALFRCSDAERRDSSYERENALTVIGSNPLRRHLDYDDSHEGASSVEMSAGIYSPNGIELAASAQGPAIKKQVRFAAASPRVDERVLEELHELCEAREAGTAFILGHSHVQTKPESSLLKKLAVGVGYNFLRRNCRGPDVALRVPPASLLEVGMVYVL

SEQ ID NO: 2728 - protein, 782 aa, Phragmites australis
MDPEFGVGMAPRKREPWRTTLLLAYQSLGVVYGDLSISPLYVYKSTFAEDIKHSETNEEIFGALSFVFWTLTLIPLLKYVSIVLRADDNGEGGTFALYSLICRHANVSLLPNRQVADEELSTYKLECPPEVSEKSRIKVWLEKHKKLHTALLVMVMIGTCMVIGDGVLTPALSVFSAVSGLELSLSRDQHEYAVIPITCSILVFLFALQHYGTHRVGFLFAPIILSWLLCMSAIGLYNIIHWNPQVYQALNPYYMLKFLKKTRKSGWMSLGGILLCMTGSEAMFADLGHFSYSSIQLAFTSLVYPSLILGYMGQAAYLSKHHNLDASYQIGFYIAVPESVRWPVLVLAILASVVGSQAIISGTFSIINQSQSLSCFPRVKVVHTSDKIHGQIYIPEVNWMLMILCIAVTVGFRNTKRMGNASGLAVITVMLVTTCLMSLVIMLCWHRSPAWALVFLLLFGSIEALYFSASLIKFLEGAWLPILLALILLAVMFVWHHTTIKKYEFDLHNKVTLEWLLALGDKLGMVRVPGIGLVYTDLTSGVPANFCRFVTNLPAFHRVLVFVCVKSVPVPHVLPAERYLVGRVGPPGHRSYRCIVRYGYRDVHQDVDSFETELVESLVTFIKLDALFRCSDAERRDSSYERENALTVIGSNPLRRHLDYDDSHEGASSVEMSAGIYSPNGIELAASAQGPAIKKQVRFAAASPRVDERVLEELHELCEAREAGTAFILGHSHVQTKPESSLLKKLAVGVGYNFLRRNCRGPDVALRVPPASLLEVGMVYVL

SEQ ID NO: 2729 - protein, 782 aa, Phragmites australis
MDPEFGVGMAPRKREPWRTTLLLAYQSLGVVYGDLSISPLYVYKSTFAEDITHSETNEEIFGALSFVFWTLTLIPLLKYVSIVLRADDNGEGGTFALYSLICRHANVSLLPNRQVADEELSTYKLECPPEVSEKSRIKVWLEKHKKLHTALLVMVMIGTCMVIGDGVLTPAISVFSAVSGLELSLSRDQHEYAVIPITCSILVFLFALQHYGTHRVGFLFAPIILSWLLCMSAIGLYNIIHWNPQVYQALNPYYMLKFLKKTRKSGWMSLGGILLCMTGSEAMFADLGHFSYSAIQLAFTSLVYPSLILGYMGQAAYLSKHHNLDASYQIGFYIAVPESVRWPVLVLAILASVVGSQAIISGTFSIINQSQSLSCFPRVKVVHTSDKIHGQIYIPEINWLLMILCIAVTVGFRNTKRMGNASGLAVITVMLVTTCLMSLVIMLCWHRSPAWALVFLLFFGSIEALYFSASLIKFLEGAWLPILLALILLAVMFVWHHTTIKKYEFDLHNKVTLEWLLALGDKLGMVRVPGIGLVYTDLTSGVPANFCRFVTNLPAFHRVLVFVCVKSVPVPHVLPAERYLVGRVGPPGHRSYRCIVRYGYRDVHQDVDSFEAELVESLVTFIKLDTLFRCSDAERRDSSYERENALTVIGSNPLRRHLDYDDSHEGASSVEMSAGIYSPNGIELAASAQEPAIKKQVRFAAASPRVDERVLEELHELCEAREAGTAFILGHSHVQTKPESSLLKKLAVGVGYNFLRRNCRGPDVALRVPPASLLEVGMVYVL

SEQ ID NO: 2730 - protein, 788 aa, Oryza sativa Japonica Group
MDPEFGRGMAPRKREPWRTTLLLAYQSLGVVYGDLSISPLYVYKSTFAEDITHSESNEEIFGVLSFVFWTLTLIPLIKYVSIVLRADDNGEGGTFALYSLICRHANVSLLPNRQVADEELSTYKLEYPPEVANRSRIKEWLEKHKTLQTALLIMVMIGTCMVIGDGVLTPAISVFSAVSGLELSLSRDQHEYAVIPITCVILVFLFALQHYGTHRVGFLFAPIVLAWLICMSMLGLYNIIHWNPQVYRALNPYYMLKFLRKTKKSGWMSLGGILLCMTGSEAMFADLGHFSYSAIQLAFTTLVYPALILGYMGQAAYLSKHHTLNSTYQIGYYISVPESVRWPVLVLAILASVVGSQAIISGTFSIINQSQSLSCFPRVKVVHTSENIHGQIYIPEINWLLMVLCIAVTVGFRDTKHMGNASGLAVITVMLVTTCLTSLVIMLCWHRSPALALVFFLFFGSIEVLYFSASLIKFREGAWLPIMLALILMAVMFIWHHTTIKKYEFDLHNKVTLEWLLALGDKLGMVRVPGIGLVYTDLTSGVPANFSRFVTNLPAFHRVLVFVCVKSVPVPHVLPAERYLVGRVGPAGHRSYRCIVRYGYRDVHQDVDSFEAELVESLATFIKLDALYHRCSDAGSGSEQLDDGRYERENALTVIGTNPLRRCLSYEASHDGVSSVDAARSPNGIVEVPAAAAAAPGDEEGEVRGGGGEPGGGEGRGGGAAGAVRGEGGRHGVHPGHSHVQTKPGSSLLKKLAVGVGYNFLRRNCRGPDVVLRVPPASLLEVGMVYVL

SEQ ID NO: 2731 - protein, 801 aa, Hordeum vulgare subsp. vulgare
ERSCYLADGQRILPELGSAAAMEPGKRETWRTTMLLAYQSLGVVYGDLSISPLYVYKSTFADDITHTDSNDEILGVLSFVFWTLTLVPLIKYVSIVLRAHDNGEGGTFALYSLICRHANVSLLPNRQLADEELSTYSLERPPEEVAHGSRVRRWLEGHRSLKTALLVMVMIGTCMVIGDGVLTPVISVFSAVSGLELSLSKHQHEYAVTPITCAIIVFLFALQHYGTHRVGFLFAPIILAWLICMSALGVYNIIYWNPQVYMALNPMYMLKFLRKTKKSGWMSLGGIVLCMTGSEAMFADLGHFSYSAIQLAFTSLVYPALILGYMGQAAYLTRHHNFDSSYQIGYYISVPEAVRWPVLVLAIMASVVGSQAIISGTFSIINQSQALSCFPRVKVVHTSAKVHGQIYIPEINWMLMVLCIAVTVGFRDTKHMGNASGLAVITVMLVTTCLTSLVMMLCWQRPPALALAFFVFFGSIEALYFSASLTKFLDGAWVPLLLALILVAVMFVWHHTTVKKYEFDLHNKVTMEWLLALCDRLGMVRVPGIGLVYTDLTSGVPANFSRFVTNLPAFHRVLVFVCVKSVPVPRVLPAERYLVGRVGPAGHRSYRCIVRYGYRDVHQDVDSFETELVESLASFIRLDALFRCSDARSDADYERENAFTVIGSNPLRRRISYDDTHDSASSVEIRVDSMTGSGTNTVELAAVPTAARVVKRVRFLVDPGSPEVEDKQMLEELHELCEAREAGTAFIMGHSHVKAKPGSSLLRRLAIGYGYNFLRRNCRGPDVVLRVPPASLLEVGMVYVL

SEQ ID NO: 2732 - protein, 820 aa, Sorghum bicolor
MKSPPVMDPEAPPPPGTPPYDDEEEEEEEEEEKARGARKRVPWRMTLSLAYQSLGVVYGDLSTSPLYVYKAAFAEDIQHSESNDEILGVLSFVFWTLTLVPLLKYVCVVLRADDHGEGGTFALYSLLCRHARAALLPPGRTAAGEEDKFLDGATKKATAQNGNAATLGGGAAASVRRLLQRHKVLQRVLLVLALVGTCMVIGDGVLTPAISVFSAVSGLELSMEKEHHKYVELPIACIILVCLFALQHYGTHRVGFIFAPVVITWLLCISVIGVYNIIHWEPTVYRALSPYYMYKFLRKTQRGGWMSLGGILLCVTGSEAMFADLGHFNQLSIQIAFTCMVYPALILAYMGQAAYLCKHHNMETDYRIGFYVSVPEKIRWPVMAIAILAAVVGSQAVITGTFSMIKQCTSLGCFPRVKIIHTSAKVHGQIYIPEINWILMILCLAVTIGFRNTKHLGNASGLAVITVMLVTTCLMSLVIVLCWHKSIFLAIAFIVFFGTIEALYFSAALIKFKEGAWVPIVLALIFILIMCIWHYGTIKKYEFDVQSKVSINWLLGLSPNLGIVRVRGIGLIHTELETGIPAIFSHFVTNLPAFHQVLIFMCIKNVPIPHVRPEERFLVGRIGPKQYRIYRCIVRYGYHDFHKDDIEFEKELVCSVAEFIRSGSSKLNGMPVEFDEEQHMAVVRSNSIRMLEEEATTVEKTVGPSHASREIQSPSPSPSPSPATPVVVPKKRVRFVLPAASPKPNAGVQEELQELSDAREAGMAFILGHSHVKAKSGSSFLRRFVINFCYDFLRRNSRGPNYAVSIPHASTLEVGMMYYI

SEQ ID NO: 2733 - protein, 812 aa, Zea mays
MKSPPVMDPEAPPSPPLPGTPPDDEEEKRGGRNGVPWRMTLSLAYQSLGVVYGDLSTSPLYVYKAAFAEDIQHTESNEEILGVLSFVFWTLTLVPLLKYVCVVLRADDHGEGGTFALYSLLCRHARAALLPPGRTAAGDEDQFLDGADGGTKKATAQNGNAVTLGGGAAASVRRLLERHKVLQRVLLVLALVGTCMVIGDGVLTPAISVFSAVSGLELSMEKEHHKYVELPIACIILVCLFALQHYGTHRVGFIFAPVVVTWLLCISVIGVYNIIHWEPTVYRALSPYYMYKFLRKTQRGGWMSLGGILLCVTGSEAMFADLGHFNQLSIQIAFTCMVYPALILAYMGQAAYLCKHHTMESDYRIGFYVSVPEKIRWPVMAIAILAAVVGSQAVITGTFSMIKQCTSLGCFPRVKIIHTSAKVHGQIYIPEINWILMILCLAVTIGFRNTKHLGNASGLAVITVMLVTTCLMSLVIVLCWHKSIFLAIGFIVFFGTIEALYFSAALIKFREGAWVPIVLAFIFILIMCIWHYGTIKRYEFDVQSKVSINWLLGLSPNLGIVRVRGIGLIHTELETGVPAIFSHFVTNLPAFHQVLIFMCIKNVPIPHVRPEERFLVGRIGPKQYRMYRCIVRYGYHDFHKDDIEFEKELVCSVAEFIRSGSSKLNGMPEEFDEEEQRMAVVRSNSIRMLEEEATVEKTVGPSQASREIRSPSPTPPPVVGPKKRVRFVLPAASPKPNAGVQEELQELSDAREAGMAFILGHSHVKAKSGSSFLRRFVINFCYDFLRRNSRGPNYAVSIPHASTLEVGMMYYI

SEQ ID NO: 2734 - protein, 830 aa, Hordeum vulgare subsp. vulgare
MKSSPSMDPEAAAARGTPPENTEGRRGEGKKRLPWRMTLSLAYQSLGVVYGDLSTSPLYVYKAAFADDIQHSETNEEILGVLSFVFWTLTLVPLLKYVCVVLRADDNGEGGTFALYSLLCRHARAALLPPGRGAEPGDEDQFSDAAGATAKKYLEYDNADALGGRGGGAAASVRRVLERHKVLQRVLLVLALVGTCMVIGDGVLTPAISVFSAVSGLELSMEKGHHKYVELPLACFILVCLFALQHYGTHRVGFIFAPIVIAWLLCISMIGVYNIVKWEPHVYQALSPYYMYKFLKKTQRGGWMSLGGILLCVTGSEAMFADLGHFNQLSIQIAFTCMVYPSLILAYMGQAAYLSKHHILEGDYRVGFYVSVPEIIRWPVLAIAILAAVVGSQAVITGTFSMIKQCTSLGCFPRVKIVHTSAQVHGQIYIPEINWILMILCLAVTIGFRDTKHLGNASGLAVITVMLVTTCLMSLVIVLCWHKSIFLAIGFIVFFGTIEALYFSAALIKFKEGAWVPIVLAFVFMMVMCIWHYGTIKKYEFDVQNKVSINWLLGLSPNLGIIRVRGIGLIHTELDSGIPAIFSHFVTNLPAFHQVLIFMCIKNVPIPHVSPNERFLVGRIGPKEYRIYRCIVRYGYHDVQMDDQEFEKDLVCSVAEFIRSGGGASKANGLTPDVADRDEERMTVVASGRMRMLEEEGLGGASASGSTVGPSRAPRGEREIRSPSPTPTPTPTPTPAMGVRKRVRFVLPASTPRPNAGVEEELRELTDAREAGMAFILGHCYVKAKTGSSFLRRLVINFGYDFLRRNSRGPSYAVTVPHASTLEVGMIYYV

SEQ ID NO: 2735 - protein, 843 aa, Oryza sativa Japonica Group
MKSPSPVDPESPSSPDCKGGSSSKRRRLPWRMTMSLAYQSLGVVYGDLSTSPLYVYKPAFAEDIQHSETNEEILGVLSFVFWTLTLVPLLKYVCVVLRADDNGEGGTFALYSLLCRHARAALLPPGGGGGGGEPGDKDQFLDAGADKKAAANGNALALSGRAGGGGAAAGVRRLLERHKVLQRVLLVLALVGTCMVIGDGVLTPAISVFSAVSGLELSMEKHQHKYVEVPIACFVLVCLFCLQHYGTHRVGFLFAPIVITWLLCISMIGVYNIVHWEPNVYRALSPYYMYKFLKKTQRGGWMSLGGILLCITGSEAMFADLGHFNQLSIQIAFTCMVYPSLILAYMGQAAYLCKHHIIESDYRIGFYVSVPEKIRWPVLAIAILAAVVGSQAVITGTFSMIKQCTALGCFPRVKIVHTSDKVHGQIYIPEINWILMILCLAITIGFRDTKHLGNASGLAVITVMLVTTCLMSLVIVLCWHKSIFLAFGFIIFFGTIEALYFSASLIKFREGAWVPIVLAFIFMAIMCIWHYGTIKKYEFDLQNKVSINWLLGLSPNLGIVRVRGIGLIHTELDSGIPAIFSHFVTNLPAFHQVLIFLCIKNVPIPHVSPEERFLVGRIGPKEYRIYRCIVRYGYHDVHKDDQEFEKELVCSVAEFIRSGAAAAADAAASFKPKNVCGGGAEESEKEEEERMSVIPSGSIRMMEEDGGAGAPSSEDTVGGSGSGSGRGSSRGGGGAREIMSPSPSPPPVVVAPRKRVRFVLPAASPRPDAGVREELQELMDAREAGMAFILGHSYVKAKSGSSFFRRLVINFCYDFLRRNSRGPNYAVTIPHASTLEVGMIYYV

SEQ ID NO: 2736 - protein, 843 aa, Oryza sativa Japonica Group
MKSPSPVDPESPSSPDCKGGSSSKRRRLPWRMTMSLAYQSLGVVYGDLSTSPLYVYKAAFAEDIQHSETNEEILGVLSFVFWTLTLVPLLKYVCVVLRADDNGEGGTFALYSLLCRHARAALLPPGGGGGGGEPGDEDQFLDAGADKKAAANGNALALSGRGGGGGAAAGVRRLLERHKVLQRVLLVLALVGTCMVIGDGVLTPAISVFSAVSGLELSMEKHQHKYVEVPIACFVLVCLFCLQHYGTHRVGFLFAPIVITWLLCISMIGVYNIVHWEPNVYRALSPYYMYKFLKKTQRGGWMSLGGILLCITGSEAMFADLGHFNQLSIQIAFTCMVYPSLILAYMGQAAYLCKHHIIESDYRIGFYVSVPEKIRWPVLAIAILAAVVGSQAVITGTFSMIKQCTALGCFPRVKIVHTSDKVHGQIYIPEINWILMILCLAITIGFRDTKHLGNASGLAVITVMLVTTCLMSLVIVLCWHKSIFLAFGFIIFFGTIEALYFSASLIKFREGAWVPIVLAFIFMAIMCIWHYGTIKKYEFDLQNKVSINWLLGLSPNLGIVRVRGIGLIHTELDSGIPAIFSHFVTNLPAFHQVLIFLCIKNVPIPHVSPEERFLVGRIGPKEYRIYRCIVRYGYHDVHKDDQEFEKELVCSVAEFIRSGAAAAADAAASSKPKNVCGGGAEESEKEEEERMSVIPSGSIRMMEEDGGAGAPSSEDTVGGSGSGSGRGSSRGGGGAREIMSPSPSPPPVVVAPRKRVRFVLPAASPRPDAGVREELQELMDAREAGMAFILGHSYVKAKSGSSFFRRLVINFCYDFLRRNSRGPNYAVTIPHASTLEVGMIYYV

SEQ ID NO: 2737 - protein, 779 aa, Vitis vinifera
  misc_feature (135)..(135): Xaa can be any naturally occurring amino acid
  misc_feature (632)..(632): Xaa can be any naturally occurring amino acid
  misc_feature (636)..(636): Xaa can be any naturally occurring amino acid
MMDLEGGVHANHAKKESWRAVLTLAYQSLGVVYGDLSTSPLYVYKSTFAEDIQHSETNEEIYGVLSFVFWTLTLVPLLKYVFIVLKADDNGEGGTFALYSLLCRHARVNSLPNCQSADEELSEYKKDGAGSTETXNFGSRLKSALEKHRVLQRFLLVLALIGTCMVIGDGVLTPAISVFSAVSGLELSMEKEHHKYVEVPAACIILIGLFALQHYGTHRVGFLFAPVVVTWLFCISAIGLYNIFHWNPHVYRALSPYYMYTFLKKTQRGGWMSLGGILLCITGSEAMFADLGHFSQLSIKIAFTSVVYPSLILAYMGQAAYLSQHHLIESDYRIGFYVSVPEKLRWPVLVIAILAAVVGSQAIITGTFSIIKQCSALGCFPRVKIVHTSSKIHGQIYIPEINWILMLLCLAVTIGFRDTNRLGNASGLAVITVMLVTTCLMSLVIVLCWHQSVFFAIGFIFFFGTIEALYFSASLIKFLEGAWVPIALAFIFLIVMYVWHYGTLKKYEFDVQNKISINWLLSLGPSLGIVRVRGIGIIHTELVSGIPAIFSHFVTNLPAFHQVLVFLCIKSVPVPHVRPEERFLVGHIGPREFRLYRCIVRYGYRDVHKDDLDFEKDLVCSVAESIRSGKVXINGXDDNSEKDEEKMTVVGSSSTHPEGIKMCDDDADNAQVAGTSELKEIRSPTVVRPRKRVRFIVPESPKIDRGAREELQELMEAREAGIAYILGHSYVKAKPGSSMVKKLVINYGYDFLRRNSRGPSYALCVPHASTLEVGMNYLV

SEQ ID NO: 2738 - protein, 792 aa, Sorghum bicolor
MDPEFGVGTAPRKREAWRTTLLLAYQSLGVVYGDLSISPLYVYKSTFAEDITHSEGNEEIYGALSFVFWTLTLIPLLKYVTIVLRAHDNGEGGTFALYSLICRHANVCLLPNRQLADQDLSTYSLQRPHDAAGTCAPSPVKAWLENHTKLHTALLVMVMIGTCMVIGDGVLTPAISVFSAVSGLELSLSKDQHEYAVIPITCAILVFLFALQHYGTHRVGFLFAPIILAWLLCMSTIGLYNIIRWNPQIYTALNPSYMIRFLRKTKKSGWMSLGGILLCMTGSEAMFADLGHFSYSSIQLAFTSLVYPSLILGYMGQAAYLSQHHNLDASYQIGFYIAVPESVRWPVLVLAILASVVGSQAIISGTFSIINQSQSLSCFPRVKVVHTSDKVHGQIYIPEVNWILMILCVAVTVGFRNTKHMGNASGLAVITVMLVTTCLMSLVIMLCWDRSPWLALAFFLFFGSIEALYFSASLIKFLEGAWLPIFLALILLAIMFVWHYTTIRKYEYDMHNKVTLEWLLALGDKLGMVRVPGIGLVYTDLTSGVPANFSRFVTNLPAFHRVLVFVCVKSVTVPHVLPAERYLVGRVGPPGHRSYRCIVRYGYRDVHQDVDSFETELVESLATFIKLDALFRCSDAGGEQRDSSYYERENALTVIGSNPLRRHMSLGYDDSHSHDDGASSDSDSVDGIELAASAPAPAAVKKQVRFAVPPPRSPGVDESVLEELHELCEAREAGTAFILGHSHVKTKPGSSLLKRLAVGVGYNFLRRNCRGPDVALRVPPASLLEVGMVYVL

SEQ ID NO: 2739 - protein, 793 aa, Zea mays
MDPEFGVGTAPQKGRRAWRTTLLLAYQSLGVVYGDLSISPLYVYKSTFAEDITHSETNQEIFGALSFVFWTLTLVPLLKYATIVLRADDSGEGGTFALYSLICRHANVSLLPNRQVADEELSTYRLERPREAAGRSGLLRAWLEKHTRLHTALLVMVMIGTCMVIGDGVLTPAISVFSAVSGLELSLSKDQHEYAVIPITCAILVFLFALQHYGTHRVGFLFAPIILAWLLCMSAIGLYNIVRWNPQIYQALNPVYMIRFLRKTKKSGWMSLGGILLCMTGSEAMFADLGHFSYSAIQLAFTSLVYPSLILGYMGQAAYLSQHHNLDASYQIGFYIAVPECVRWPVLVLAILASVVGSQAIISGTFSIINQSQSLSCFPRVKVVHTSDKVHGQIYIPEVNWILMILCVAVTVGFRNTKHMGNASGLAVITVMLVTTCLMPLVIMLCWDRSPWLALAFFLFFGSIEALYFSASLIKFLDGAWVPILLALILLAVMFVWHHTTIRKYEYDMHNKVTLEWLLALGDKLGMVRVPGIGLVYTDLTSGVPANFSRFVTNLPAFHRVLVFVCVKSVPVPHVLPAERYLVGRVGPPGHRSYRCIVRYGYRDVHQDVDSFETELVESLATFIKLDALFRCSDAAGDQQRDSSYYERENALTVIGSNPLRRHLALGYDDSHSHDDGASSAGSDRVDGIELAAAAPAPAVVKKQVRFAVAPPRSPGVDETVLEELHELCEAREAGTAFILGHSHVKTKPGSSILKRLAVGVGYNFLRRNCRGPDVVLRVPPASLLEVGMVYVL

SEQ ID NO: 2740 - protein, 533 aa, Oryza sativa Japonica Group
MAAAAAEGGGGGGVEEGVGESSSPPRDPAAAPAASGGSGGGGGGGAGGLNICNQVYERLVAEGNEEAAAPDFRAQLEAHFMRLPHSYQLDINVDKAEDVLVHQKVLAEAKDPDRRPAFHVRFLRIEEVDPTYDSDASEDGADDGDDLSVRQDTSYAHIHEVVFSTVDKPKLLSQLSALLSDIGLNIREAHVFSTFDNYSLDVFVVDGWPIEDTDGLHKALEASILRNEGSWSGSSHSSAAERTLPFQVKGGEWEIDKRLLKMGGMIASGSCGDLYHGTYLGEDVAVKILRSEHLNKNVWNEFTQEVYILREVQHTNVVRFIGACTKPPQFCIITEYMSGGSLYDFVHKQHNVLDLPTLLKFAVDVCRGMCYLHQRGIIHRDLKSANLLMDKDHVVKVADFGVARFQDQGGNMTAETGTYRWMAPEVINHQPYDNKADVFSFAIVLWELITSKIPYNTMTPLQAAVGVRQGLRPGLPENAHPQLLDLMRRCWEGIPSNRPPFSDILAELEDLLARVQGTSGEASQRQDDSGAKD

SEQ ID NO: 2741 - protein, 550 aa, Oryza sativa Japonica Group
MQGGGGGGVEEGVGESSSPPRDPAAAPAASGGSGGGGGGGAGGLNICNQVYERLVAEGNEEAAAPDFRAQLEAHFMRLPHSYQLDINVDKAEDVLVHQKVLAEAKDPDRRPAFHVRFLRLVVFGEKCHSTGGMMLTPTILSIEEVDPTYDSDASEDGADDGDDLSVRQDTSYAHIHEVVFSTVDKPKLLSQLSALLSDIGLNIREAHVFSTFDNYSLDVFVVDGWPIEDTDGLHKALEASILRNEGSWSGSSHSSAAERTLPFQVKGGEWEIDKRLLKMGGMIASGSCGDLYHGTYLGEDVAVKILRSEHLNKNVWNEFTQEVYILREVQHTNVVRFIGACTKPPQFCIITEYMSGGSLYDFVHKQHNVLDLPTLLKFAVDVCRGMCYLHQRGIIHRDLKSANLLMDKDHVVKVADFGVARFQDQGGNMTAETGTYRWMAPEVINHQPYDNKADVFSFAIVLWELITSKIPYNTMTPLQAAVGVRQGLRPGLPENAHPQLLDLMRRCWEGIPSNRPPFSDILAELEDLLARVQGTSGEASQRQDDSGAKD

SEQ ID NO: 2742 - protein, 524 aa, Oryza sativa Indica Group
MAAAAAEGGGGGGVEEGVGENSSPAGLPRGGARVRRAGTAVAVAVAREGLTSATSYQLDINVDKAEDVLVHQKVLAEAKDPDRRPAFHVRFLRLVVFGEKCHSTGGMMLTPTILSIEEVDPTYDSDASEDGADDGDDLSVRQDTSYAHIHEVVFSTVDKPKLLSQLSALLSDIGLNIREAHVFSTFDNYSLDVFVVDGWPIEDTDGLHKALEASILRNEGSWSGSSHSSAAERTLPFQVKGGEWEIDKRLLKMGGMIASGSCGDLYHGTYLGEDVAVKILRSEHLNKNVWNEFTQEVYILREVQHTNVVRFIGACTKPPQFCIITEYMSGGSLYDFVHKQHNVLDLPTLLKFAVDVCRGMCYLHQRGIIHRDLKSANLLMDKDHVVKVADFGVARFQDQGGNMTAETGTYRWMAPEVINHQPYDNKADVFSFAIVLWELITSKIPYNTMTPLQAAVGVRQGLRPGLPENAHPQLLDLMRRCWEGIPSNRPPFSDILAELEDLLARVQGTSGEASQRQDDSGAKD

SEQ ID NO: 2743 - protein, 525 aa, Zea mays
MVAAEGGPVEEGVGESSSPPRVDAAPAPSGSVGSGGRGGASDICAEVLERLVADGHAEASDPEFRDRLAAHFGRLPHSYQLDINVDKATDVLVHQNVLAEAKDPDRRPAFYVRFLRIEDIDPANDSDASEEGDGDGDDLSVRQDTPYTHIHEVVFSTIDKPKLLSQLSALLSDIGLNIREAHVFSTHDGYSLDVFVVDGWPIKDTDGLHKALEASILRNEGSWSGSSHSSAAERTLPFQVKGGEWEIDKRLLKMGGLIASGSCGDLYHGTYLGEDVAVKVLRAEHLNKNVWNEFTQEVYILREVQHTNVVRFIGACTKPPQFCIITEYMSGGSLYDFVHKQHNVLNLTTLLKFAVDVCRGMCYLHERGIIHRDLKTANLLMDNDHAVKVADFGVARFQDQGGIMTAETGTYRWMAPEVINHQPYDSKADVFSFAIVLWELITSKIPYDTMTPLQAAVGVRQGLRPGLPKKTHPKLLDLMQRCWEADPSDRPAFSDILAELEDLLAQAQGTSGKTVQDPSNSNAKD

SEQ ID NO: 2744 - protein, 525 aa, Zea mays
MVAAEGGPVEEGVGESSSPPRVDAAPAPSGSVGSGGRGGASDICAEVLERLVADGHAEASDPEFRDRLAAHFGRLPHSYQLDINVDKATDVLVHQNVLAEAKDPDRRPAFYVRFLRIEDIDPANDSDASEEGDGDGDDLSVRQDTPYTHIHEVVFSTIDKPKLLSQLSALLSDIGLNIREAHVFSTHDGYSLDVFVVDGWPIKDTDGLHKALEASILRNEGSWSGSSHSSAAERTLPFQVKGGEWEIDKRLLKMGGLIVSGSCGDLYHGTYLGEDVAVKVLRAEHLNKNVWNEFTQEVYILREVQHTNVVRFIGACTKPPQFCIITEYMSGGSLYDFVHKQHNVLNLTTLLKFAVDVCRGMCYLHERGIIHRDLKTANLLMDNDHAVKVADFGVARFQDQGGIMTAETGTYRWMAPEVINHQPYDSKADVFSFAIVLWELITSKIPYDTMTPLQAAVGVRQGLRPGLPKKTHPKLLDLMQRCWEADPSDRPAFSDILAELEDLLAQAQGTSGKTVQDPSNSNAKD

SEQ ID NO: 2745 - protein, 529 aa, Zea mays
MVAAEGGPGGAVEEGVGESSSPPREDAVPAPAGSGGSGGSGGAREICAQVLDRLVADGYAEASDPEFRDRLAAHFGRLPHSYQLDINVDKASDVLVHQNVLAEAKDPDRRPAFYVRFLRIEDMDSAYDSDASEEGDDDGDDLSVRQGTPYTHIHEIVFSTIDKPKLLSQLSALLSDIGLNIREAHVFSTHDGYSLDVFVVDGWPVQDADGLHKALEASILRNEGSWSGSSHSSAAERTLPFQVKGGEWEIDKRLLKMGGMVASGSCGDLYHGTYLGEDVAVKVIRAEHLNKNVWNEFTQEVYILREVQHKNVVRFIGACTKPPQFCIITEYMSGGSLYDFVHKQHNVLNLRTLLKFAVDVCRGMCYLHERGIIHRDLKTANLLMDKDHVVKVADFGVARFQDQGGVMTAETGTYRWMAPEVINHQPYDNKADVFSFAIVIWELITSKIPYESMTPLQAAVGVRQGLRPGLPKKTHPKVLDLMQRCWEADPSARPAFPDILAELEDLLAQVQGTPGKTAHAPSNNSNTKD

SEQ ID NO: 2746 - protein, 527 aa, Hordeum vulgare subsp. vulgare
MAVAAEGGGVEEGVGESSSPPRSAPPAPAVSGGSGGGGGAPRDICTQVFERLVADGNEEAAGPDFRVQLEAHFARLPFSYQLDINVDKSADVLVHQKVLAEAKDPLRRPAFRVRFLRVEDMDSAYGSDASDEGADDGDDLSVRQDTPYTHIHEIVFSTIDKPKLLSQLSALLSDIGLNIREAHVFSTVDGYSLDVFVVDGWPIEDTDGLHKALEASVLRNEGSWSGSSHSSAAERTLPFQVKGGEWEIDKRLLKMGEMIASGSCGDLFHGTYFGEDVAVKVLKAEHLNNNVWNEFTQEVYILREVHHTNVVRFIGACTKPPKFCIITEYMSGGSLYDYVHKQRNVVDLPTLLKFACDVCRGMCYLYQRGIIHRDLKTANLLMDKDHVVKVADFGVARFQDQGGIMTAETGTYRWMAPEVINHQPYDNKADVFSFAIVLWELLTSKIPYDTMTPLQAAVGVRQGLRPVLPEKTHPKLLDLLQRCWETIPSNRPAFPDILTELEGLLAGVQGTSGESSEQPKDISASTD

SEQ ID NO: 2747 - protein, 527 aa, Hordeum vulgare subsp. vulgare
MAVAAEGGGVEEGVGESSSPPRSAPPAPAVSGGSGGGGGAPRDICTQVFERLVADGNEEAAGPDFRVQLEAHFARLPFSYQLDINVDKSADVLVHQKVLAGAKDPLRRPAFRVRFLRVEDMDSAYGSDASDEGADDGDDLSVRQDTPYTHIHEIVFSTIDKPKLLSQLSALLSDIGLNIREAHVFSTVDGYSLDVFVVDGWPIEDTDGLHKALEASVLRNEGSWSGSSHSSAAERTLPFQVKGGEWEIDKRLLKMGEMIASGSCGDLFHGTYFGEDVAVKVLKAEHLNNNVWNEFTQEVYILREVHHTNVVRFIGACTKPPKFCIITEYMSGGSLYDYVHKQRNVVDLPTLLKFACDVCRGMCYLHQRGIIHRDLKTANLLMDKDHVVKVADFGVARFQDQGGIMTAETGTYRWMAPEVINHQPYDNKADVFSFAIVLWELLTSKIPYDTMTPLQAAVGVRQGLRPVLPEKTHPKLLDLLQRCWETIPSNRPAFPDILTELEGLLAGVQGTSGESSEQPKDISASTD

SEQ ID NO: 2748 - protein, 534 aa, Zea mays
MAAVAGDGGGGPEEGVGESSSPPRNPVLAPAPAASGGSGSGGGGRGGGLRDICREVFERLVNDGHRAGSELLAQLEAHFNRLPISYKLDVNIDKAEDVLIHQKVLAEAQDPDRRPAFTVRFLRLEEVNVDETTNSDAHEEGADIGEALSTRSKTSYAHIHEILFSTKDKPKLLSQLSALLSDIGLNIKEAHVFSTTDGYSLDVFVVDGWPVEETDGLHKALEVSILRNEGSWSGSESSASKRSLPFLAQDFESDIDTRLLKLVNKIASGSCGDMFLGTYSGEEVAVKVLNPQNLNKNVWSEFKQEINMLREVDHPNIVRFIGSCTKPPQFYIITECMSRGSLFDFLHNEHNVLDLPTLLKFALDVCQGMSYLHQKGIIHRDLKSGNLLLDKNDVVKVADFGLARFQDGGGDMTAETGTYRWMAPEVINHQPYDSKADVYSFALVLWELMTSKIPYNTMTPLQAAVGVRQGLRPQIPENTHPRLINLMQRCWEATPTDRPSFEEIIPELEDIQAQAQRTSGETSQTEEDHSCSKD

SEQ ID NO: 2749 - protein, 562 aa, Sorghum bicolor
MAAAAAAGDGGGGGPEEGVGESSSPPRDPAPAPSPSPAASGGSGGGGRGGGLRDICREVFERLVSDGHAAGSELLAQLEAHFNRLPISYKLDVNIDKAEDVLFHQKVLAEAKDPDRRPAFAVRFLRVTIFSSCVMCRMELGFVHIQQAVKLEEVNVDETTNSDAHEEGADNDEALSTRSKTYTHIHEILFSTKDKPKLLSQLSALLSDIGLNIREAHVFSTTDGYSLDVFVVDGWPIEETDGLHKALEASILRNEGSWSGSESSASERSLPFLAQDCETDIDTRLLKIVKKVASGSCGDMFLGTYSGEEVAVKVLNPENLNQNAWSEFKQEIYMLREVDHPNIVRFIGSCTKPPQFYIITECMSRGSLFDFLHNEHNVLDLPILLKFALDVCRGMSYLHQKGIIHRDLKSANLLLDKDHVVKVADFGLARFQDGGGAMTAETGTYRWMAPEVINHQPYDNKADVYSFALVLWELMTSKIPYNTMSPLQAAVGVRQGLRPQVPENAHPRLISLMQRCWEAIPTDRPSFAEIIPELEDIRAQAQRTSGETSQKQKDDGPGSSKD

SEQ ID NO: 2750 - protein, 390 aa, Oryza sativa Japonica Group
MASALETLCGQAFGAKKYHMLGVYLQRSWLVLLMFAVALTPTYVLMEDLLLLIGQPADLASLAGKMSVWLLPQHFAMAMLLPLTRFLQSQLKNWVTAVTAGVALALHLVITYLLVNTLHLGLLGAVAAANVAWWIVVLGQWVYVVGGWCPLSWKGFSMEAFADFWEFIKLSSASGVMLCLENWYYRVLVLLTGYLNNAEIAVDALSICLTINGWEMMIPFGFLAATGVRVANELGAGSGKGARFAIVVSVTTSVAIGLVFWCLIIAYNDKIALLFSSSKVVLDAVSDLSVLLAFTVLLNSVQPVLSGVAIGSGWQALVAYVNVGSYYLVGVPIGAILGWPLHFGVGGIWSGLIGGTAVQTLILAYLTISCDWDEEAKKASTRMEVWASSK

SEQ ID NO: 2751 - protein, 390 aa, Oryza sativa Indica Group
MASALETLCGQAFGAKKYHMLGVYLQRSWLVLLMFAVALTPTYVLMEDLLLLIGQPADLASLAGKMSVWLLPQHFAMAMLLPLTRFLQSQLKNWVTAVTAGVALALHLVITYLLVNTLHLGLLGAVAAANVAWWIVVLGQLVYVVGGWCPLSWKGFSMEAFADFWEFIKLSSASGVMLCLENWYYRVLVLLTGYLNNAEIAVDALSICLTINGWEMMIPFGFLAATGVRVANELGAGSGKGARFAIVVSVTTSVAIGLVFWCLIIAYNDKIALLFSSSKVVLDAVSDLSVLLAFTVLLNSVQPVLSGVAIGSGWQALVAYVNVGSYYLVGVPIGAILGWPLHFGVGGIWSGLIGGTAVQTLILAYLTISCDWDEEAKKASTRMEVWASSK

SEQ ID NO: 2752 - protein, 838 aa, Sorghum bicolor
MKSSSSAGGSSGTGTGSRSGSGSFNLRNLSKVILPPLGGPSGQSQSHGGSDKWVISPLDSRYRWWDTLMVVLVAYSAWVYPFEVAFMNASPKGGLEVADIVVDLFFAVDIVLTFFVAYIDHRTQLLVRDRRKITLRYLSTFFIMDVASTIPFQGLAYLVTGEVRENAAYSMLGVLRLWRLRRVKQFFTRLEKDIRFSYFWIRCARLVAVTLFLVHCAGCLYYLIADRYPHREKTWIGAVIPNFRQASLRIRYISSIYWSITTMTTVGYGDLHAENTVEMIFNIFYMLFNLGLTAYLIGNMTNLVVEGTRRTMEFRNSIRAASSFVGRNHLPPRLKQQILAYMCLKFRAESLNQQQLMDQLPKSICKSICEHLFVPVVKDVYLFNGVSREMLLSLVTKMKPEYIPPKEDVIVQNEAPDDVYVVVSGEVEVILFNGIDEHVKATLGTRDIFGEVSALSDRAQAFTFRTRTLSQLLRLKQATLKEAMQSRPEDSVVIIKNFLKHQVEMHGMKADDLLGDNTGEHDDDANVLTVAAMGNSGLLEDLLRAGKDADVGDAKGRTALHIAASNGYEDCVLVLLKHACNVNIKDAQGNTAMWNAIAAGHHKIFNILYHFARASNPHAGGDVLCFAARRGDLGALRELLKLGLDVDSEDHDGATALRVAMAEGHADAARFLIMNGASVDKASLDDDGSGSGAARLTMSPTELRELLQKRELGHSITIVDSPAVIPDGGSSGHSRPGRLQGTSSDNQCWPRVSVYKGHPFLRNRSSEAGKLINLPGTLEEFKAIVGEKLKVDAKKGLIVNDEGAEIDSIDVIRDNDKLFVVTEEDLRRLASMDSLSSS

SEQ ID NO: 2753 - protein, 849 aa, Zea mays
MKKNNSSIESTGGGVGGSGGTVSGSGSGSFNLRNLSKVILPPLGGPSGGQSQSHGGSDKWVVSPLDSRYRWWDTFMVVLVAYSAWVYPFEVAFMNASPKGGLEVADIVVDLFFAVDIVLTFFVAYIDGRTQLLVRDRKKITLRYLSTFFIMDVASTIPFQGLAYLITGEVRENAVYSMLGVLRLWRLRRVKQFFTRLEKDIRFSYFWIRSARLVAVTLFLVHCAGCLYYLIADRYPDRQKTWIGAVIPNFRQASLRIRYISSIYWSITTMTTVGYGDLHAQNNVEMIFNIFYMLFNLGLTAYLIGNMTNLVVEGTRRTMEFRNSIRAASSFVGRNHLPPRLKQQILAYMCLKFRAESLNQQQLMDQLPKSICKSICEHLFVPVVKDVYLFRGVSREMLLSLVTKMKPEYIPPKEDVIVQNEAPDDVYVVVSGEVEVILFDGIYEQVQATLGARDIFGEVSALSDRAQAFTFRTRTLSQLLRLKQATLKEAMQSRPEDSVVVIKNFLKHQVEMHGMKVEDLLGDNTGEHDDDAIVLTVAAMGNSGLLEDLLRAGKAADVGDAKGRTALHIAASKGYEDCVLVLLKHACNVNIRDAQGNTAMWNAIAAGHHKIFNLLYQFGRASNPRAGGDVMCLAARRGHLGALQELLKLGLDVDSEDHDGATALRVAMAEGHADAARFLILNGASVDKASLDDDGSGSGSGSGAARLAMSPTELRELLQKRELGHSITIHDSPAVVPNGGSSGHSRPGRLQSTSSDSQRWPRVSVYKGHPFLRNRTSEAGKLINLPGTMEEFKVIVGEKLKVDAEKALIVSDEGAEIDSIDVIRDNDKLFMVTEEDLRRLASMDWLSCE

SEQ ID NO: 2754 - protein, 838 aa, Zea mays
MKNNPSFENTCSAAAGGSGSGSFNVRNLSKVILPPLGGPSGQSQSHGGSDKWVISPLDSRYRWWDTLMVVLVAYSAWVYPFEVAFMNASPKGGLEVADMVVDLFFAVDIVLTFFVAYIDPRTQLLVRDRKKITLRYLSTFFIMDVASTIPFQSLAYLITGEVRENAAYSMLGVLRLWRLRRVKQLFTRLEKDIRFSYFWIRSARLIAVTLFLVHCAGCLYYLIADRYPDREKTWIGAVNPNFRQASLRIRYISSVYWSITTMTTVGYGDLHAQNTVEMIFNIFYMLFNLGLTAYLIGNMTNLVVEGTRRTMEFRNSVRTASSFVGRNHLPPRLKQQILAYMCLKFRAESLNQQQLMDQLPKSICKSICEHLFVPVVKDVYLFKGVSREMLLSLATKMKPEYIPPKEDVIVQNEAPDDVYVVVSGEVEVVLFDGVDERVEATLGTRNIFGEVSALSDRPQAPFTFRTRTLSQLLRLKQATLKEAMQSWPDDSVIIIKNYVKHQVEMHGMKADDSLGDNTSEHDDDANVLTVAAMGNSGLLEDLLRAGKDADVGDAMGRTALHIAASKGYEDCVLVLLKHACNANIRDAQGNTAMWNAIAAGHHKIFNILYHSARASNPHAGGDVMCLATRRGDLDALRELLKLGLDVDSEDHDGATALRVAMAEGHADAARFLITNGASVDKASLDDDGSGSGAARLTMSPTELHELLQKRELVHSITITDSPPVVPDGGSSGHSRPGRLQSTGSDNTRWPRVSIYRGHPFLRNRSSEAGKLINLPATMEEFIAVVGEKLKVDTEKALIVNDEGAEVDSIDVIRDNDKLFVVTEEDLTRLAPMDSVPSS

SEQ ID NO: 2755 - protein, 837 aa, Sorghum bicolor
MKNNSSFQSTGSAGGGGGSGTGERSGSGSLSLRYLSKIILPPLGGPPGQSQSHGGSDKWVISPLDSRYRWWDTLMVVLVAYSAWVYLFEVAFMNASPKGGLEVADIVVDLFFAVDIVLTFFVAYIDPRTQLLIRDRKKITFRYLSTFFIMDVASTVPFQALAYFITGEVRENGAYSVLGLLRLWRLRRVNQFFTRLEKDIRFSYFWIRCARLVAVTLFVVHSAGCLYYLIADRYPHPEKTWIGDVIPNFRQVSVWIRYITSVYWSITTMTTVGYGDLHARNTVEMIFNIFYMLFNLGLTAYLIGNMTNLVVEGTHRTMEFRNSIRAATSFVGRNHLPPRLKQQILAYMCLKFRAESLNQQQLMDQLPKSICKSICDHLFVPVVKDVYLFNGVSREMLLSLVTKMKPEYIPPREDVIVQNEAPDDVYVVVSGEVEVILFNGINERVEATLGTRDIFGEVSALSDRAQAFTFRTRTLSQLLRLKQATLKEAMQSRPEDNVVVIKNFLKHQVEMHGMEVEDLLGDNTGEHDNDANVLTAAMMGNSGLLEDLLRAGKDADVGDATGRTALHIAAAKVYEDCVLVLLKHACNVNIEDAQGNTAMWNAIAAGHHRIFNILYQFSRASNPHAGGDVLCLAARRGDLGMLRELLKLGLDVDSEDHDGATALRVAMAEGHADVARFLIMNGASVDKASLDDDGSGSGTARRTMSSTELRELLQKRELGHSITIVDSPAVIPDRLQSTGSNQQRWPRVSIYNGHPFLRNRSYEAGKLINLPGTMEEFIATVGEKLKVDAEKVLIVNDEGAEIDSIDVIRDNDKLFVVTGEDMRQLASMDSMSSSLCL

SEQ ID NO: 2756 - protein, 845 aa, Sorghum bicolor
MKKNSSFQSTGSAGGGSGTGTGSRSGSFNLRNLSKVILPPLGGPSAGQSPNNGGSDKWVISPLDSRYRWWDTLMVVMVAYSAWVYLFEVAFMNASPKGGLEVADIVVDLFFAVDIVLTFFVAYIDPRSQLLVCDRKKITFRYLSTFFIMDVASSIPFQAFAYFITGEVREDAVYSVLGLLRLWRLRRVNQFFTRLEKDIRFSYFWIRSARLVAVGRVTLFVVHCAGCLYYLIADRYPHSEKTWIGAVIPNFRQASLGIRYITAIYWSITTMTTVGYGDLCARNTIEMIFNIFYMFFNLGLTSYLIGNMTNLVVEGTGRTMEFRSSIRAASSFVGRNHLPPRLKQQILAHMCLKFRVENLNQQQLLDELPKPIYKSICEHLFVPVVKDVYLFNGVSREMLLSLVTKMRPEYIPPKEEVIVQNEAPDDVYVVVSGEVEVILFDGIDERVEATLGTRDIFGEVSALSDRAQAFTFRTRTLSQLLRLKQATLKEAMQNRPEDSVVVIKNFLKHHVEMHGINVEDLLIDNIGEHDDDANVLTVAAMGNSGLLEDLLRAGKDADVGDAKGRTALHIAASNGYEDCVLVLLKHACNVNIKDAQGNTAMWNAIAAGHHKIFNILYQFAHASNPHAGGDVLCLAARRGDLDALRELLKLGLDVDSEDHDGATALRVAMANGHVDVARFLIMNGASVDKANLDDDGSSAARLTMSPTELRELLQKRELGHSITIVDSSPAVVPDGGSSGHSRPGRLQSTSSDNQRSPRVSLYKGHPSLRNRSSEAGKLINLREATMGEFKAIIGEKLKVDAEKALIVNDEGAEIDSIDVIRDNDKLFVVTQEDLRRLATMNLSSS

SEQ ID NO: 2757 - protein, 855 aa, Oryza sativa Japonica Group
MKTSSFESASSSGGSGGGGGGGGGEGSGSFNLRNLSKLILPPLGVPAGGHAQSGHAGPNDRRVISPLDSRYRCWDTFMVVLVAYSAWVYPFEVAFMNASPKGGLEVADIVVDLFFAVDIVLTFFVAYIDSRTQLLVRDRRRIATRYLSTFFIMDVASTIPFQGLAYIVTGEVRESPAFSLLGILRLWRLRKVKQFFTRLEKDIRFNYFWIRCARLIAVTLFLVHCAGCLYYLIADRYPHREKTWIGAVIPDFQEASLWIRYTSSVYWSITTMTTVGYGDMHAQNTVEMIFNIFYMLFNLGLTAYLIGNMTNLVVEGTRRTMEFRNSIRAASNFVGRNHLPPRLKQQILAYMCLKFRAESLNQQQLMDQLPKSICKGICEYLFLPVVKDVYLFKGVSREVLLLMVTKMKPEYIPPKEDVIVQNEAPDDVYIVVSGEVEVIYSDGEAEERVVATLGTRGVFGEVSALSDRPQSFTLRTRTLCQLLRLRQAALKEAMQSKPEDSVVIIKNFLKHQIEMHDMKVEDLLGEDAAGEYDHGNIPCNLLTVAATGNSSFLEDLLKVGMDPDVGDSKGRTALHIAASKGYEDCVLVLLKQACNVNIKDAQGNTALWNAIAARHHKIFNILYHFARVSSPHHAAGDLLCLAARRGDLDTLRELLKHGLAVDSEDRDGATALRVALAEGHADVARLLVLNGASVDRAASHNEQQAAAAVSVDELRELMKTRELAHPVTIVVDSPSPAAAAVIREVGSSGDSRNGRRQSARSDGAHWPRVSIYRGHPFVRNRSSEAGKLINLPGTMEEFRIIIEEKLKVDARKTLIMNDEGAEIDSIDVIRDNDKLFIVTEEHMTAVASMDSVSGS

SEQ ID NO: 2758 - protein, 855 aa, Oryza sativa Indica Group
MKTSSFESASSSGGSGGGGGGGGGEGSGSFNLRNLSKLILPPLGVPAGGHAQSGHAGPNDRRVISPLDSRYRCWDTFMVVLVAYSAWVYPFEVAFMNASPKGGLEVADIVVDLFFAVDIVLTFFVAYIDSRTQLLVRDRRRIATRYLSTFFIMDVASTIPFQGLAYIVTGEVRESPAFSLLGILRLWRLRKVKQFFTRLEKDIRFNYFWIRCARLIAVTLFLVHCAGCLYYLIADRYPHREKTWIGAVIPDFQEASLWIRYTSSVYWSITTMTTVGYGDMHAQNTVEMIFNIFYMLFNLGLTAYLIGNMTNLVVEGTRRTMEFRNSIRAASNFVGRNHLPPRLKQQILAYMCLKFRAESLNQQQLMDQLPKSICKGICEYLFLPVVKDVYLFKGVSREVLLLMVTKMKPEYIPPKEDVIVQNEAPDDVYIVVSGEVEVIYSDGEAGERVVATLGTRGVFGEVSALSDRPQSFTLRTRTLCQLLRLRQAALKEAMQSKPEDSVVIIKNFLKHQIEMHDMKVEDLLGEDAAGEYDHGNIPCNLLTVAATGNSSFLEDLLKVGMDPDVGDSKGRTALHIAASKGYEDCVLVLLKQACNVNIKDAQGNTALWNAIAARHHKIFNILYHFARVSSPHHAAGDLLCLAARRGDLDTLRELLKHGLAVDSEDRDGATALRVALAEGHADVARLLVLNGASVDRAASHNEQQAAAAVSVDELRELMKTRELAHPVTIVVDSPSPAAAAVIREVGSSGDSRNGRRQSARSDGAHWPRVSIYRGHPFVRNRSSEAGKLINLPGTMEEFRIIIEEKLKVDARKTLIMNDEGAEIDSIDVIRDNDKLFIVTEEHMTAVASMDSVSGS

SEQ ID NO: 2759 - protein, 859 aa, Hordeum vulgare
MKIPSFQSKSSSGGASGSSTGFGSGSFNLRNLSKLMLPPLGHSLSQSTSGTDERVVSPLDSRYRCWETFMVILVAYSAWVYPFEVAFMEASPKGGLEVADMVVDIFFAVDIALTFFVAYIDSRTQLLVRDRKRITFRYLSTFFIMDVASTIPYQGIAYLVNGEVREGMVYSLLGLLRLWRLRKVKQFFTRLEKDIRFSYFWVRCARLIAVTLFLVHCAGCLYYMLADRYPDRDKTWIGAVIPNFRQESLWIRYISSIYWSITTMTTVGYGDLHAQNNLEMIFNIFYMLFNLGLTAYLIGNMTNLVVEGTRRTMEFRNSIRAASNFVCRNHLPPRLQQQILAYMCLKFRAESLNQQQLMDQLPKSICKSICEHLFLPVVKDVYLFKGISRDAQLLLVTKTKPEYIPPKEDVIVQNEAADDVYIIVSGEVEVIYFNGEREEVVGKLGTLDIFGEVSALSDRPQTFTFRTRTLSQLLRLKQATLREVMQSKPDDSALIVRNFLKHQIEVHDMKDLLGESIGAAGSGNIVPCNLLTVAATGNGGFLGDLLKVGMDPDVGDSKGRTALHIAASKGYDDCVQALLMHGCNVNIKDAQGNTALWQAIAARHHKVFSNLYHAARATNPRAGGDLLCLAARRGDLDTLRELLKHGLDVDSEGHDGATALRVALSEGQADVARFLVMNGASVDKAGLDDDGSAPQQTTLPAAELRELVKRREVGHPITIYDYDSPPAVCSSSGELRQGRFPIPGSARSSDSAHWPRVSIYKGHPFVRTHSSEAGKLVNLPATMEELKTVIGEKLKVDPEEALVVNHEGAEIDSVDVIRDNDKLFIVTQEHMRMLASMDSAAALPHTLSVGSSVSVASVI

SEQ ID NO: 2760 - protein, 859 aa, Hordeum vulgare subsp. vulgare
MKIPSFQSKSSSGGASGSSTGFGSGSFNLRNLSKLMLPPLGHSLSQSTSGTDERVVSPLDSRYRCWETFMVILVAYSAWVYPFEVAFMEASPKGGLEVADMVVDIFFAVDIALTFFVAYIDSRTQLLVRDRKRITFRYLSTFFIMGVASTIPYQGIAYLVNGEVREGMVYSLLGLLRLWRLRKVKQFFTRLEKDIRFSYFWVRCARLIAVTLFLVHCAGCLYYMLADRYPDRDKTWIGAVIPNFRQESLWIRYISSIYWSITTMTTVGYGDLHAQNNLEMIFNIFYMLFNLGLTAYLIGNMTNLVVEGTRRTMEFRNSIRAASNFVCRNHLPPRLQQQILAYMCLKFRAESLNQQQLMDQLPKSICKSICEHLFLPVVKDVYLFKGISRDAQLLLVTKTKPEYIPPKEDVIVQNEAADDVYIIVSGEVEVIYFNGEREEVVGKLGTLDIFGEVSALSDRPQTFTFRTRTLSQLLRLKQATLREVMQSKPDDSALIVRNFLKHQIEVHDMKDLLGESIGAAGSGNIVPCNLLTVAATGNGGFLGDLLKVGMDPDVGDSKGRTALHIAASKGYDDCVQALLMHGCNVNIKDAQGNTALWQAIAARHHKVFSNLYHAARATNPRAGGDLLCLAARRGDLDTLRELLKHGLDVDSEGHDGATALRVALSEGQADVARFLVMNGASVDKAGLDDDGSAPQQTTLPAAELRELVKRREVGHPITIYDYDSPPAVCSSSGELRQGRFPIPGSARSSDSAHWPRVSIYKGHPFVRTHSSEAGKLVNLPATMEELKTVIGEKLKVDPEEALVVNHEGAEIDSVDVIRDNDKLFIVTQEHMRMLASMDSAAALPHTLSVGSSVSVASVI

SEQ ID NO: 2761 - protein, 859 aa, Hordeum vulgare subsp. vulgare
MKIPSFQSKSSSGGASGSSTGFGSGSFNLRNLSKLMLPPLGHSLSQSTSGTDERVVSPLDSRYRCWETFMVILVAYSAWVYPFEVAFMEASPKGGLEVADMVVDIFFAVDIALTFFVAYIDSRTQLLVRDRKRITFRYLSTFFIMDVASTIPYQGIAYLVNGEVREGMVYSLLGLLRLWRLRKVKQFFTRLEKDIRFSYFWVRCARLIAVTLFLVHCAGCLYYMLADRYPDRDKTWIGAVIPNFRQESLWIRYISSIYWSITTMTTVGYGDLHAQNNLEMIFNIFYMLFNLGLTAYLIGNMTNLVVEGTRRTMEFRNSIRAASNFVCRNHLPPRLQQQILAYMCLKFRAESLNQQQLMDQLPKSICKSICEHLFLPVVKDVYLSKGISRDAQLLLVTKTKPEYIPPKEDVIVQNEAADDVYIIVSGEVEVIYFNGEREEVVGKLGTLDIFGEVSALSDRPQTFTFRTRTLSQLLRLKQATLREVMQSKPDDSALIVRNFLKHQIEVHDMKDLLGESIGAAGSGNIVPCNLLTVAATGNGGFLGDLLKVGMDPDVGDSKGRTALHIAASKGYDDCVQALLMHGCNVNIKDAQGNTALWQAIAARHHKVFSNLYHAARATNPRAGGDLLCLAARRGDLDTLRELLKHGLDVDSEGHDGATALRVALSEGQADVARFLVMNGASVDKAGLDDDGSAPQQTTLPAAELRELVKRREVGHPITIYDYDSPPAVCSSSGELRQGRFPIPGSARSSDSAHWPRVSIYKGHPFVRTHSSEAGKLVNLPATMEELKTVIGEKLKVDPEEALVVNHEGAEIDSVDVIRDNDKLFIVTQEHMRMLASMDSAAALPHTLSVGSSVSVASVI

SEQ ID NO: 2762 - protein, 489 aa, Oryza sativa Japonica Group; identical to SEQ ID NO: 1550

SEQ ID NO: 2763 - protein, 534 aa, Zea mays; identical to SEQ ID NO: 1013

SEQ ID NO: 2764 - protein, 545 aa, Sorghum bicolor
MEMGTVLGAMEEYTFTFLAMAVGFLVLVYLYEPYWKVRHVPGPVPLPLIGHLHLLAKHGPDVFPVLAKKHGPIFRFHVGRQPLIIVADAELCKEVGIKKFKSMPNRSLPSPIANSPIHRKGLFATRDSRWSAMRNVIVSIYQPSHLAGLMPTMESCIERAATTNLGDGEEVVFSKLALSLATDIIGQAAFGTDFGLSGKPVVPDDDMKGVDVVVGDAAKAKASSSEFINMHIHSTTSLKMDLSGSLSTIVGALVPFLQNPLRQVLLRVPGSADREINRVNGELRRMVDGIVAARAAERERAPAATAAQQHKDFLSVVLAARESDASTRELLSPDYLSALTYEHLIAGPATAAFTLSSVVYLVAKHPEVEEKLLREMDAFGPRGSVPTADDLQTKFPYLDQVVKESMRLFMVSPLVARETSERVEIGGYVLPKGAWVWMAPGVLAKDAHNFPDPELFRPERFDPAGDEQKKRHPYAFIPFGIGPRVCIGQKFAIQEIKLAIIHLYQHYVFRHSPSMESPLEFQFGIVVNFKHGVKLHVIKRHVENN

SEQ ID NO: 2765 - protein, 590 aa, Oryza sativa Indica Group
MPLHRILWERTVSQAYLTNNASRSCHTTSTARSDRLIARQREARQGESEISEMDISEVMGVTAEWAVTMVAMAVGLLVVAYLYEPYRKVWHVPGPVPVPLIGHLHLFAMHGPDVFSVLARKHGPVFRFHMGRQPLIIVADAELCKEVGIKKFKSIPNRSMPSPIANSPIHKKGLFFTRGPRWTSMRNMIISIYQPSHLSSLIPTMESCIQRATKNLDGQKEITFSGLSLSLATDVIGQAAFGTDFGLSKVPVTPDDSNIDKIVADTSVEAKASSEFIKMHMHATTSLKMDLSGSLSILVGMLLPFVQELFRQVLKRIPGMGDYKIDRVNRALRTQMDRIVAERGGAMEHDLAASHQRKDFLSVVLTARESNKSSRELLTPDYISALTYEHLLAGSTTTAFTLSTVLYLVAKHPEVEEKLLREIDGFGPRDRVPMADDLQTKFPYLDQVVKESMRFYMVSPLVARETHEQVEIGGYALPKGTWVWLAPGVLAKDPKNFPEPEVFRPERFDPNGEEERRRHPYAFIPFGIGPRVCIGQKFSIQEIKLSVIHLYRHYVFRHSPSMESPLEFQFAIICDFKYGVKLQVIKRHNA

SEQ ID NO: 2766 - protein, 538 aa, Oryza sativa Japonica Group
MEIISTVLGSTAEYAVTLVAMAVGLLLLGYLYEPYWKVRHVPGPVPLPFIGHLHLLAMHGPDVFTVLARKYGPVFRFHMGRQPLVMVADAELCKEVGVKKFKSIPNRSMPSAIANSLINQKGLCFTRGSRWTALRNMIISIYQPSHLASLIPTMQSCIECVSKNLDGQEDITFSDLALGFATDVIGQAAFGTDFGLSKISASSNDDDIDKIATDTSAEAKASSEFIRMHVHATTSLKMDLSGSLSIIIGQLLPFLQEPFRQVLKRIPWTADHEIDHVNLALGGQMDKIVAERAAAMERDQAAPHAQQRKDFLSVVLAARESNKSWRELLTPDYISALTYEHLLAGSATTAFTLSTVLYLVSKHPEVEEKLLREIDGFGPHDHAPTAEDLQTKFPYLDQACMPFFDIGRIYARETCEQVEIGGYALPKGTWVWLAPGVLAKDPKNFPEPEVFRPERFDPNGEEEKRRHPYAFIPFGIGPRACIGQKFSIQEIKLSVIHLYRNYVFRHSPSMESPLEFQYSIVCNFKYGVKLRVIKRHTA

SEQ ID NO: 2767 - protein, 188 aa, Sorghum bicolor
MGIDLVAGGRNKKTKRTAPKSDDVYLKLLVKLYRFLVRRTKSNFNAVILKRLFMSKTNRPPISLRRLVKFMEGKEEKNIAVIVGTVTDDKRIQEVPAMKVTALRFTETARARIVNAGGECLTFDQLALRAPLGENTVLLRGPKNAREAVRHFGKAPGVPHSHTKPYVRSKGRKFEKARGRRNSRGFKV

SEQ ID NO: 2768 - protein, 187 aa, Zea mays
MGIDLVAGGRNKKTKRTAPKSDDVYLKLLVKLYRFLVRRTKSNFNAVILKRLFMSKTNRPPISMRRLVKFMEGKEKNIAVIVGTVTDDKRIQEVPAMKVTALRFTETARARIVNAGGECLTFDQLALRAPLGENTVLLRGPKNAREAVRHFGKAPGVPHSHTKPYVRSKGRKFEKARGRRNSRGFKV

SEQ ID NO: 2769 - protein, 188 aa, Oryza sativa Japonica Group
MGIDLVAGGRNKKTKRTAPRSDDVYLKLLVKLYRFLVRRTKSNFNAVILKRLFMSKTNRPPLSLRRLAKFMEGKEENNIAVIVGTVTDDKRIQEIPKMKVTALRFTETARARIVNAGGECLTFDQLALRAPLGENTVLLRGPKNAREAVRHFGKAPGVPHSHTKPYVRSKGRKFEKARGRRNSRGFKV

SEQ ID NO: 2770 - protein, 188 aa, Hordeum vulgare subsp. vulgare
MGIDLVAGGRNKRTKRVAPKSDDVYLKLLVKLYRFLVRRTKSKFNAVILKRLFMSKTNRPPLSMRRLSNFMKGKEEKNIAVVVGTITDDMRIQEIPAMKVTALRFTETARARIVNAGGECLTFDQLALRAPTGENTILLRGPKNAREAVRHFGKAPGVPHSHTKPYVRSKGRKFEKARGRRNSRGFKV

SEQ ID NO: 2771 - protein, 188 aa, Triticum aestivum
MGIDLVAGGRNKRTKRVAPKSDDVYLKLLVKLYRFLVRRTKSKFNAVILKRLFMSKTNRPPLSMRRLSNFMKGKEEKNIAVVVGTITDDMRIQEVPAMKVTALRFTETARARIINAGGECLTFDQLALRAPTGENTILLRGPKNAREAVRHFGKAPGVPHSHTKPYVRSKGRKFEKVRGRRNSRGFKV

SEQ ID NO: 2772 - protein, 187 aa, Sorghum bicolor
MGIDLVAGGRNKKTKRTAPKSDDVYLKLLVKLYRFLVRRTKSNFNAVILKRLFMSKTNRPPLSMRRLVKFMEGKSDQIAVIVGTVTDDKRINEVPAMKVCALRFTETARARIINAGGECLTFDQLALRAPLGQNTVLLRGPKNAREAVKHFGPAPGVPHSHTKPYVRSKGRKFEKARGRRNSRGFKV

SEQ ID NO: 2773 - protein, 187 aa, Sorghum bicolor
MGIDLVAGGRNKKTKRTAPKSDDVYLKLLVKLYRFLVRRTKSNFNAVILKRLFMSKTNRPPLSLRRLVNFMEGKENQIAVIVGTVTDDKRVYEVPAMKVAALRFTETARARIVNAGGECLTFDQLALRAPLGQNTVLLRGPKNAREAVKHFGPAPGVPHSHTKPYVRSKGRKFEKARGRRNSRGFKV

SEQ ID NO: 2774 - protein, 187 aa, Zea mays
MGIDLVAGGRNKKTKRTAPKSDDVYLKLLVKLYRFLVRRTKSNFNAVILKRLFMSKTNRPPLSMRRLVRFMEGKGDQIAVIVGTVTDDKRISEVPAMKVCALRFTETARARIINAGGECLTFDQLALRAPLGQNTVLLRGPKNAREAVRHFGPAPGVPHSHTKPYVRSKGRKFEKARGRRNSRGFKV

SEQ ID NO: 2775 - protein, 187 aa, Oryza sativa Japonica Group
MGIDLVAGGRNKKTKRTAPKSDDVYLKLIVKLYRFLVRRTKSPFNAVILRRLFMSKTNRPPLSLRRLVRFMEGKENQIAVIVGTVTDDKRVYEVPAMKVAALRFTETARARIVNTGGECLTFDQLALRAPLGQNTVLLRGPKNAREAVKHFGPAPGVPHSNTKPYVRSKGRKFEKARGRRNSKGFKV

SEQ ID NO: 2776 - protein, 195 aa, Oryza sativa Japonica Group
MGIDLVAGGRNKKTKRTAPRSEDVYLKLIVKLYRFLVRRTKSHFNAVILKRLFMSKTNRPPLSMRRLVRFMEGKVPDRHAISGDQIAVIVGTVTDDKRIYEVPAMKVAALRFTETARARIINAGGECLTFDQLALRAPLGQNTVLLRGPKNAREAVKHFGPAPGVPHSNTKPYVRSKGRKFEKARGRRNSKGFKV

SEQ ID NO: 2777 - protein, 594 aa, Sorghum bicolor
MAAAPHQTGPAADSMIPLQSEPVLENNPSKSANAKDQILSGAENVSAGNARGASSLKSPKGPPEKPSSVGKAGEQPFVYQQNVYAPQPQPLYPGGYMNPSGQWEEYPHYVNMEGLHSVSPGIYNDNQSLMLSPGYASNPQMMYGAYSPVSTVGDGQQYFPVHYPFSSPYYQPPASPSMGYSSSATGISQGDPMLQQEYFLPDGLLYSPTPGYHHPFSSFDRAPTQPNNAPGLFGQGNLPLASGMHHGSMYGPGSYKGRQQGSKFGGTTPSWSSAGRRFGTFDLSGNQQRGSMPFGSHNGSLEFMNEQNRGPRATKPKTQDTENSSDEKNEKTVPLIDSELYNRSDFITEYKDAKFFVIKSYTEDHVHRSIKYNVWASTASGNRKLDSAYRAAKEKEEHCPIFLFFSVNGSGQFCGVAEMIGPVDFDRSVDYWQQDKWSGQFPVKWHIIKDVPNNLLRHIILENNDNKPVTNSRDTQEVKLEQGLQMLTIFKSHEAETTILEDFDFYEQREKALQENRRQQQPASTDPQKLVDTKAQGPVADISDAFAKAVQLKDIENSGTTPKAEGASAENGSAATAKVEGSADLNMGPAEESS

SEQ ID NO: 2778 - protein, 594 aa, Zea mays
MAAAPHRAQVPADSTAPLQTGPVLENNPSKSANAKDQILSGTENVTTGNARGASSLRSPNGPPEKASSVGKAGEQPYLYQQNVYAPQPQPLYPGGYMNPSGQWEEYPHYVNMEGLHSVSPGIYNDNQSLMLSAGYANNPQMMYGAYSPVSTAGDGQQYFPVHYSFSNPYYQPPASPSMGYSNSATGMSQGDPMLQQEYFLPDGLLYSPTPGYHQPFSSFDRALTQPNNAPGLFGQGSLPLASGMHHGSMYGPGSYKGRQYGSKFGGTTPSWSSAGRRFGTFDLSGNQQRGSMSFGSHNGSLEFMNEQNRGPRATKPKIQDTENSGDEKSEKTVPLIDSELYNRSDFITEYKDAKFFVIKSYTEDHVHRSIKYNVWASTASGNRKLDSAYRAAREKEEHCPIFLFFSVNGSGQFCGVAEMIGPVDFDRSVNYWQQDKWSGQFPVKWHIIKDVPNNLLRHIILENNDNKPVTNSRDTQEVKLEQGLQMLTIFKSHEAETTIVEDFDFYEQREKALQENRRQQHAASTDTQKLVDTKAQDAVADISDAFAKAVQLKNTENSGTTPKTEGASAEKGSAATAKVEGSANLNTGPVEESS

SEQ ID NO: 2779 - protein, 592 aa, Zea mays
MAAAPHQAQGPADSVIPLQSEPALDNNPSKSANARDQILSGTENVTTGNARGGSSLKSQKGPPEKASSVGKPGEQPFPYHQNVYAPQPQPLYPGGYMNPSGQWEEYPHYVSMEGLHSVSPGIYNDNQSLMLSPGYANNPQMMYGAYSPVSTVGDGQQYLPMHFPFSSPYYQPPASPSMGYSSSATGISQGDPMLQQEYFLPDGLLYSPTQGYHQPFSSFDRAPTQLNNAPGLFGQGNLPLASGMHHGSMYGPGSYKGRQQGSKFGGSTTSWSSAGRRFGTIDLSGNQQRGSMPFGSHNGSLEFMNEQNRGPRATKPKIQGTENTSGDERSEKIVPLIDSELYNRSDFITEYKDAKFFVIKSYTEDHVHRSIKYKVWASTASGNRKLDSAYHAAKEKEEHCPIFLFFSVNGSGQFCGVAEMIGPVDFDRSVDYWQQDKWSGQFPVKWHIIKDVPNNLLRHIILENNDSKPVTNSRDTQEVKLEQGLQMLTIFKNHEAETTIVEDFDFYEQREKALQENRRQQQPPTTYPQKLVDTNAQGPVADISDAFAKAVQLKDTANSGTTPKAEGASAENGSAATAKVEGSANLNTGPVE

SEQ ID NO: 2780 - protein, 604 aa, Oryza sativa Indica Group
MAEGERHRWRRHLERESEGEGKRFQDCMIPPQSEIVGENNASKSAAKEQILSSTNEKMTTSVPQGASSSKSPKGAQEKASFLGKGGEQPFYQPNVYAPQPQTIYSGGYLNHLGQWEEYPHYVNMEGLHSVSPGIYNDNQSIMLSPGYANNPQMMYGAYSPGVGDGQPYLPLHFPFSSPYYQPPASPSMGYSNSATGMSQGDPMLQQEYFLPDGLLYSPTPGYHQPFGSFDRASTQPSSTPGLFGQGNTPLAFGMHHGSMYAPGSYKPRQQGGKFGGTTPSWSSGRRFGTFDLSANQQKGSMPFGIQNGALEFLNEQNRGPRATKPKKQDTENSSIDDKNEKNVPLVDSELYNRPDFVTEYKDAKFFVIKSYTEDHVHRSIKYNVWASTASGNRKLDSAYRLAKEKEDYCPIFLFFSVNGSGQFCGVAEMIGPVDFDKSVDYWQQDKWSGQFPVKWHIIKDVPNNLLRHIILENNDNKPVTNSRDTQEVKLEHGLQMLTIFKNHESETNILEDFDFYEQREKALQENRRQQQPASPELQKPAENKALGELMAHISDTFGQTVQLKETENGESKPAVEGVSSADEASTATTKAEDGTASTNASPVE

SEQ ID NO: 2781 - protein, 577 aa, Oryza sativa Japonica Group
MIPPQSEIVGENNASKSAAKEQILSSTNEKMTTSVPQGASSSKSPKGAQEKASFLGKGGEQPFYQPNVYAPQPQTIYSGGYLNHLGQWEEYPHYVNMEGLHSVSPGIYNDNQSIMLSPGYANNPQMMYGAYSPGVGDGQPYLPLHFPFSSPYYQPPASPSMGYSNSATGMSQGDPMLQQEYFLPDGLLYSPTPGYHQPFGSFDRASTQPSSTPGLFGQGNTPLAFGMHHGSMYAPGSYKPRQQGGKFGGTTPSWSSGRRFGTFDLSANQQKGSMPFGIQNGALEFLNEQNRGPRATKPKKQDTENSSIDDKNEKNVPLVDSELYNRPDFVTEYKDAKFFVIKSYTEDHVHRSIKYNVWASTASGNRKLDSAYRLAKEKEDYCPIFLFFSVNGSGQFCGVAEMIGPVDFDKSVDYWQQDKWSGQFPVKWHIIKDVPNNLLRHIILENNDNKPVTNSRDTQEVKLEHGLQMLTIFKNHESETNILEDFDFYEQREKALQENRRQQQPASPELQKPAENKALGELMAHISDTFGQTVQLKETENGESKPAVEGVSSADEASTATTKAEDGTASTNASPVE

SEQ ID NO: 2782 - protein, 549 aa, Oryza sativa Japonica Group
MIPPQSEIVGENNASKSAAKEQILSSTNEKMTTSVPQGASSSKSPKGAQEKASFLGKGGEQPFYQPNVYAPQPQTIYSGGYLNHLGQWEEYPHYVNMEGLHSVSPGIYNDNQSIMLSPGYANNPQMMYGAYSPGVGDGQPYLPLHFPFSSPYYQPPASPSMGYSNSATGMSQGDPMLQQEYFLPDGLLYSPTPGYHQPFGSFDRASTQPSSTPGLFGQGNTPLAFGMHHGSMYAPGSYKPRQQGGKFGGTTPSWSSGRRFGTFDLSANQQKGSMPFGIQNGALEFLNEQNRGPRATKPKKQDTENSSIDDKNEKNVPLVDSELYNRPDFVTEYKDAKFFVIKSYTEDHVHRSIKYNVWASTASGNRKLDSAYRLAKEKEDYCPIFLFFSDKWSGQFPVKWHIIKDVPNNLLRHIILENNDNKPVTNSRDTQEVKLEHGLQMLTIFKNHESETNILEDFDFYEQREKALQENRRQQQPASPELQKPAENKALGELMAHISDTFGQTVQLKETENGESKPAVEGVSSADEASTATTKAEDGTASTNASPVE

SEQ ID NO: 2783 - protein, 311 aa, Zea mays; identical to SEQ ID NO: 1014

SEQ ID NO: 2784 - protein, 363 aa, Zea mays
MAAVDLTPRTPKKAYGGDGGAYYEWSPADLPMLAVASIGAAKLSLAAGGLSLPSYSDSAKVAYVLQGVGTCGLVLPEATKEKVVAVKEGDALALPFGAVTWWHNGPAAQADLTVLFLGDTSKGHKRGQFTNFQLTGSAGIFTGLSTEFVSRAWDLPEPDAARLVSSQPASGIVKLPASAAALPAPSPQDRAGVALNCLEAPLDVDIPGGGRVVVLNTANLPLVREVGLGADLVRIDAHSMCSPGFSCDSAYQVTYIVRGSGRVQVVGPDGRRVLETRIEGGSLFIVPRFHVVSKIADASGMEWFSIITTPNPVFSHLAGKTSVWKAISPEVLQASFNTTPEMEKLFRSKRLDSEIFFAPPSSN

SEQ ID NO: 2785 - protein, 363 aa, Zea mays
MAAVDLTPRTPKKAYGGDGGAYYEWSPADLPMLSVASIGAAKLSLAAGGLSLPSYSDSAKVAYVLQGAGTCGLVLPEATKEKVVAVKEGDALALPFGAVTWWHNGPAAQADLTVLFLGDTSKGHKRGQFTNFQLTGSAGIFTGLSTEFVSRAWDLPEPDAARLVSSQPASGIVKLPASAAALPAPSPQDRAGVALNCLEAPLDVDIPGGGRVVVLNTANLPLVREVGLGADLVRIDAHSMCSPGFSCDSAYQVTYIVRGSGRVQVVGPDGRRVLETRIEGGSLFIVPRFHVVSKIADASGMEWFSIITTPNPVFSHLAGKTSVWKAISPEVLQASFNTTPEMEKLFRSKRLDSEIFFAPPSSN

SEQ ID NO: 2786 - protein, 360 aa, Sorghum bicolor
MAAVDLTPKQPRKAYGGEGGSYYEWSPADLPMLGVASIGAAKLSLAAGGLALPSYSDSAKVAYVLQGTGTCGIVLPEATKEKVVAVKEGDALALPFGVLTWWHNAPTASTDLTVLFLGDTSKGHKPGQFTNFQLTGSTGIFTGLTTEFVSRAWDLPEADAAKLVSSQPASGIVKTSIALPTGSPKDREGMALNCLEAPLDVDIPGGGRVVVLNTVNLPLVKDVGLGADLVRIDAHSMCSPGFSCDSAYQVTYIVRGSGRVQVVGPDGKRVLETRAEGGVLFIVPRFHVVSKIADASGMEWFSIITTPNPIFSHLAGKTSVWKAVSAEVLQASFNTTPEMEQLFRSKRLDSEIFFAPPSSN

SEQ ID NO: 2787 - protein, 359 aa, Zea mays
MAPVDLTPRQPRKAYGGDAGAYYEWSPADLPMLGVASIGAAKLSLAAGGLSLPSYSDSSKVAYVLEGTGTCGIVLPEATKEKVLAVKEGDALALPFGVVTWWHNGPAAPTQLTVLFLGDTSKGHRPGQFTNFQLTGASGIFTGFSTEFVSRAWDLPEANAAALVSSQPASGIVRASSPLPAPSAQDREGVALNCLEAPLDVDIPGGGRVVVLNTANLPLVREVGLGADLVRIDAHSMCSPGFSCDSAYQVTYIVRGSGRVQVVGPDGVRVLETRVEGGFLFIVPRFHVVSKIADASGMEWFSIITTPNPIFSHLAGKTSVWKAISAEVLQASFNTTPEMEKLFRSKRLDSEIFFAPPSN

SEQ ID NO: 2788 - protein, 360 aa, Zea mays
MAPVDLTPKQPRKAYGGDGGAYYEWSPADLPMLGVASIGAAKLSLAAGGLALPSYSDSAKVAYVLQGTGTCGIVLPEATKEKVVAVKEGDALALPFGVVTWWHNGPAAPTPLTVLFLGDTSKGHRPGQFTNFQLTGATGIFTGFSTEFVSRAWDLPEADAAALVSSQPASGIVRASSSPLPAPSPRDREGVALNCLEAPLDVDIPGGGRVVVLNTANLPLVKEVGLGADLVRIDAHSMCSPGFSCDSAYQVTYIVRGSGRVQVVGPDGVRVLETRVEGGFLFIVPRFHVVSKIADASGMEWFSIITTPNPIFSHLAGKTSVWKAISAEVLQASFNTTPEMEKLFRSKRLDSEIFFAPPSN

SEQ ID NO: 2789 - protein, 360 aa, Zea mays
MAPVDLTPKQPRKAYGGDGGAYYEWSPADLPMLSVASIGAAKLSLAAGGLALPSYSDSAKVAYVLQGTGTCGIVLPEATKEKVVAVKEGDALALPFGVVTWWHNGPAAPTPLTVLFLGDTSKGHRPGQFTNFQLTGATGIFTGFSTEFVSRAWDLPEADAAALVSSQPASGIVRASSSPLPAPSPRDREGVAINCLEAPLDVDIPGGGRVVVLNTANLPLVKEVGLGADLVRIDAHSMCSPGFSCDSAYQVTYIVRGSGRVQVVGPDGVRVLETRVEGGFLFIVPRFHVVSKIADASGMEWFSIITTPNPIFSHLAGKTSVWKAISAEVLQASFNTTPEMEKLFRSKRLDSEIFFAPPSN

SEQ ID NO: 2790 - protein, 358 aa, Hordeum vulgare subsp. vulgare
MAVDLTPRQPAKAYGGEGGAYYEWSPAELPMLGVASIGAAKLSLAAGGMSLPSYSDSAKVAYVLQGKGTCGIVLPEATKEKVVAVKEGDALALPFGVVTWWHNTPESATELVVLFLGDTSKGHRPGQFTNFQLTGASGIFTGFSTEFVGRAWDLKEDDAAKLVSSQPASGIVKLSAGQKLPEPVDADRKDMALNCLEAKLDVDIPNGGRVVVLNTVNLPLVKEVGLGADLVRIDAHSMCSPGFSCDSAYQVTYIVRGSGRVQVVGPDGKRVLETRIEGGSLFIVPRFHVVSKIADASGMEWFSIITTPNPIFSHLAGKTSVWKAISPEVLEASFNTTPEMEKLFRSKRLDSEIFFAPN

SEQ ID NO: 2791 - protein, 359 aa, Oryza sativa Japonica Group
MASVDLTPRQARKAYGGDGGTYYEWSPADLPMLELANIGGAKLSLNAGGLALPSFSDSGKVAYVLQGKGTCGIVLPEASKEKVIAVKEGDSLALPFGVVTWWHNLPESPIELVILFLGDTSKAHKAGQFTNMQLTGATGIFTGFSTEFVGRAWDLAESDAVKLVSSQPASGIVKIKSGQKLPEPSAADREGMALNCLEAPLDVDIKNGGRVVVLNTANLPMVKEVGLGADLVRIDGHSMCSPGFSCDSAYQVTYFIRGSGRVQVVGADGKRVLDTHVEGGNLFIVPRFCVVSKIADASGLQWFSIITTPNPIFSHLAGKTSVWKAISPEVLEASFNATPEMEKLFRSKRIDSEIFFAPN

SEQ ID NO: 2792 - protein, 359 aa, Oryza sativa Japonica Group
MASVDLTPRQARKAYGGDGGTYYEWSPADLPMLELANIGGAKLSLNAGGLALPSFSDSGKVAYVLQGKGTCGIVLPEASKEKVIAVKEGDSLALPFGVVTWWHNLPESPIELVILFLGDTSKAHKAGQFTNMQLTGATGIFTGFFTEFVGRAWDLAESDAVKLVSSQPASGIVKIKSGQKLPEPSAADREGMALNCLEAPLDVDIKNGGRVVVLNTANLPMVKEVGLGADLVRIDGHSMCSPGFSCDSAYQVTYFIRGSGRVQVVGADGKRVLDTHVEGGNLFIVPRFCVVSKIADASGLQWFSIITTPNPIFSHLAGKTSVWKAISPEVLEASFNATPEMEKLFRSKRIDSEIFFAPN

SEQ ID NO: 2793 - protein, 802 aa, Sorghum bicolor
MEAMEAEEGPFLANDAKLHAGICRAFHPSVSKLSAIFPFIEASRPRSKSGIQALCSLHVALDKAKGLLQHCADCSRLYLAITSETVLLKFEKSRSQLQESLRRTGSIVTEDIGCKIVEIVGELEEIVFTLDRSEKEAGDELINLLQRNNKTNGSSDSGELEVFHMSALKLGITSSRAALTERRALKKLIEKARSDEDKRKELVVSYLYNLMRKYSKFFRSETGDDTDSQGSSPCSPTVLGMDDMYGPYSNGRAFSRQLSSIQSFNSRFGSFNSRLGSFNCRRGGGPRSENMSIPPEELRCPISLQLMYDPVIISSGQTYERICIEKWFNDGHSTCPKTQQQLAHLSLTPNYCVKALIASWCEQNEFPVPDGPPGTFDVNWRLAFSDTEATGCVSVESFDCTNAKSVKIVPMENVRKEEPANSESGTLDDSSCNDFELNEGYGNLLLLLHERSNMNKQCRLVEQIRYLLKDDEEARIQLGSNGFAEALVEFLRNAVNDGNEKAQEVGAMALFNLAVNNNRNKGLLLSAGVANLLEQMISNPRLSGPATALYLNLSCLPDAKAIIGSSQAVPFLVDRLYSQDASDTKGSSCKHDALYTLYNLSNHQASVPALLAAGIVDALHCLVTESPESEGLGWTEKALAVLISLAATQAGRKEIMSTPGLVSTLATLLDTGEPTEQEQAVSCLLVMCSADDKCIPPVLQEGVVPSLVSISAAGTGRGREKAQKLLKLFREQRQRDAPLPQQPQHQQQQLLQSQLVEGGNGGGGGAIVCHRESKPLCKSKSRKLGRTLSSLWKNRGFSLYQC

SEQ ID NO: 2794 - protein, 803 aa, Zea mays
MEAMEAEEGPFLANDAKLHAGICRAFHPSVSKLSTIFPFIEASRPRSKSGIQALCSLHVALDKAKGLLQHCADCSRLYLAITSETVLLKFEKSRSQLQESLRRIESIVTEDIGCKIVEIVGELEQIVFTLDRSEKEAGDELINLLQRNNKTNGSSDNGELEVFHISALKLGITSSRAALTERRALKKLIEKARSDEDKRKELVVSYLYNLMRKYSKFFRSETGDDTDSQGSSPCSPTVLGVDDMCSPYINGRAFGRQILSSQSFNSRFGSFNSRLGSFNCRRAAGGGPRSGNISVPPEELRCPISLQLMYDPVIISSGQTYERICIEKWFNDGHSTCPKTQQQLAHLSLTPNYCVKALIASWCESNDFPLPDGPPGTFDVNWRLASSDTEATGCVSVESFDCTSAKSVKIVLMEDARKEEPANSVSGTLDDGSCNDFDLNEGYGSLLLLLHERSNMDKQCRLVEQIRYLLKDDEEARIQLGSNGFAEALVEFLRNAVDDGNEKAQEVGAMALFNLAVNNNRNKGLLLSAGVAGLLEQMISNPRLSGPATALYLNLSCLPDAKAAIGSSQAVPFLVDCLYIQDASDTNGSSSKHDALYTLYNLSSHQASVSALLAAGIVDALHRLLAESAAPPEEGLGWTEKALAVLISLAATEAGRKEIVSTPGLVSTLATVLDTGEPTEQEQAVSCLLVMCSADDECVAAVLREGVVPSLVSVSAAGTGRGREKAQKLLKLFREQRQRDTAPAPQPQQQLLQSQLAEGGNGGGAIIACHHRESKPLFNVKSRKLGRTLSSLWKNRGFSLYQC

SEQ ID NO: 2795 - protein, 798 aa, Oryza sativa Indica Group
MDAMEAEEGPFLANDAKLHAGMYRAFHPAVSKLVAIFPFIEASRPRSKSGIQALCSLHVALDKAKGLLQHCADCSRLYLAITAETVLLKFEKARTQLQESLRRVEGIVTEEIGCKIVEIIAELEEVVFTLDQSEKEAGDEVINLLQRNRKMNSSSDSGELEVFHMAALKLGITSSRAALTERRALKKLIEKARSDEDKRKEYVVSYLYNLMRKYSKFFRSEAGDDTDSQGSSPCSPTVLGMEDMYGPYGNGRAFSRQLSSIQSFNSRFGSFNSRLGSFNCRRGGPRSENMSIPPEELRCPISLQLMYDPVIISSGQTYERVCIEKWFNDGHSTCPKTQQQLSHLSLTPNYCVKALIASWCEQNDFPVPDGPPGSFDVNWRLALSDSEATGCVSLESFDSINVKSVKVVPLDNVRKEEPANNESGTLDDSSCYDFDMNEGYRNLLLMLHEKTNLHIQCRLVEQIRYLLKDDEEARIQMGSNGFAEALVQFLRNAVQDGNEKAQEIGAMALFNLAVNNNRNKGLLLSAGVIDQLEQMISNPRLSAPATALYLNLSCLPEAKNIIGSSQAVSFLVDRLFSHEARDTKGSSCKHDALYTLYNLSNHQASVPSLLSAGIVEALHSLLSESPASEGLGWTEKALAVLISLAATQAGRKDIMSTPGLISTLAMLLDTGEPTEQEQSVSCLLVMCSADDKCIAPVLQEGVVPSLVSISATGTGKGKEKSQKLLKLFREQRQRDGAQPVPQQAQQQQQQQQQQAGETGNGTMVCRRDSKQLCKSKSRKLGRTLSSLWKNRSFSLYQC

SEQ ID NO: 2796 - protein, 800 aa, Oryza sativa Japonica Group
MDAMEAEEGPFLANDAKLHAGMYRAFHPAVSKLVAIFPFIEASRPRSKSGIQALCSLHVALDKAKGLLQHCADCSRLYLAITAETVLLKFEKARTQLQESLRRVEGIVTEEIGCKIVEIIAELEEVVFTLDQSEKEAGDEVINLLQRNRKMNSSSDSGELEVFHMAALKLGITSSRAALTERRALKKLIEKARSDEDKRKEYVVSYLYNLMRKYSKFFRSEAGDDTDSQGSSPCSPTILGMEDMYGPYGNGRAFSRQLSSIQSFNSRFGSFNSRLGSFNCRRSGPRSENMSIPPEELRCPISLQLMYDPVIISSGQTYERVCIEKWFNDGHSTCPKTQQQLSHLSLTPNYCVKALIASWCEQNDFPVPDGPPGSFDVNWRLALSDSEATGCVSLESFDSINVKSVKVVPLDNVRKEEPANNESGTLDDSSCYDFDMNEGYRNLLLMLHEKTNLHIQCRLVEQIRYLLKDDEEARIQMGSNGFAEALVQFLRNAVQDGNEKAQEIGAMALFNLAVNNNRNKGLLLSAGVIDQLEQMISNPRLSAPATALYLNLSCLPEAKNIIGSSQAVSFLVDRLFSHEARDTKGSSCKHDALYTLYNLSNHQASVPSLLSAGIVEALHSLLSESLASEGLGWTEKALAVLISLAATQAGRKDIMSTPGLISTLAMLLDTGEPTEQEQSVSCLLVMCSADDKCIAPVLQEGVVPSLVSISATGTGKGKEKSQKLLKLFREQRQRDGAQPVPQQAQQQQQQQQQQQQAGETGNGTMVCRRDSKQLCKSKSRKLGRTLSSLWKNRSFSLYQC

SEQ ID NO: 2797 - protein, 826 aa, Oryza sativa Japonica Group
MDAMEAEEGPFLANDAKLHAGMYRAFHPAVSKLVAIFPFIEASRPRSKSGIQALCSLHVALDKAKGLLQHCADCSRLYLAITAETVLLKFEKARTQLQESLRRVEGIVTEEIGCKYTIWYFLTSGPVGAQQIVEIIAELEEVVFTLDQSEKEAGDEVINLLQRNRKMNSSSDSGELEVFHMAALKLGITSSRAALTERRALKKLIEKARSDEDKRKEYVVSYLYNLMRKYSKFFRSEAGDDTDSQGSSPCSPTILGMEDMYGPYGNGRAFSRQLSSIQSFNSRFGSFNSRLGSFNCRRSGPRSENMSIPPEELRCPISLQLMYDPVIISSGQTYERVCIEKWFNDGHSTCPKTQQQLSHLSLTPNYCVKALIASWCEQNDFPVPDGPPGSFDVNWRLALSDSEATGCVSLESFDSINVKSVKVVPLDNVRKEEPANNESGTLDDSSCYDFDMNEGYRNLLLMLHEKTNLHIQCRLVEQIRYLLKDDEEARIQMGSNGFAEALVQFLRNAVQDGNEKAQEIGAMALFNLAVNNNRNKGLLLSAGVIDQLEQMISNPRLSAPATALYLNLSCLPEAKNIIGSSQAVSFLVDRLFSHEARDTKGSSCKHDALYTLYNLSNHQASVPSLLSAGIVEALHSLLSESLASEGLGWTEKALAVLISLAATQAGRKDIMSTPGLISTLAMLLDTGEPTEQEQSVSCLLVMCSADDKCIAPVLQEGVVPSLVSISATGTGKGKEKSQKLLKLFREQRQRDGAQPVPQQAQQQQQQQQQQQQAGETGNGTMVHSCRYLSSGGPTAQEIQHQTAQEGRRKYVSALTSTRILDQVFFQ

SEQ ID NO: 2798 - protein, 803 aa, Hordeum vulgare subsp. vulgare
MDAMEVEESPLLAIDAKLHAGMCRVFHPAVSKLLGIFPFIEASRPRSKSGIQALCSLHVALDKSKGLLQHCADCSRLYLAITAETVHLKFEKSRSQLQESLRRVESIVTEDIGHKIVEIIGELEEVVFTLDQSEKEAGDEIINLLQRNSKMNSSSDSGELEVFHMAALKLGITSSRAALTERRALKKLIEKARSGDDKRKEFVVSYLYNLMRKYSKFFRSEAGDDTDSQGSAPCSPTVLGMDDMYGTCGNSRAFSRQLSSIQSFNSRFGSFNSRLGSFNCRPSGPRSENMSIPPEELRCPISLQLMYDPVIVSSGQTYERVCIEKWFNDGHSTCPKTQQQLAHLSLTPNYCVKAMISSWCEQNDFPVPDGPPGSFDVNWRLALTDSQATGCVSVDSFDTSNIKGVKVVPLENERKEEAANSESGTLDDSSCFEFDMNEGYRNLLLVLNERNNILSQCRLVEQIRYLLKDDEEARIQMGSNGFAEALVQFLRYSVEEGNEKAQEVGAMALFNLAVNNNRNKGLLLSAGIVELLEQMTSNPRLAAAATALYLNLSCLTDAKSVIASTQAVPFLVDRLYNHDASDPKASSCKHDALYTLYNLSTHQASIPSLLSAGIVDALHTLLTDSSVSEGIGWTEKALAVAISLAATPAGRKEIMSTPGLVSTLAMLLDTGEPTEQEQAVSCLLAMCAGDDKCIAPVLQEGVVPSLVSVSATGTGRGREKAQKLLKLFREQRQRDGGQQAASQQQQVPQPQQQAAPEGGNGNGNGGVMVCHRESKPLCKYKSRKLGRTLSSLWKNRGFSLYQC

SEQ ID NO: 2799 - protein, 760 aa, Oryza sativa Japonica Group
MDAMEAEEGPFLANDAKLHAGMYRAFHPAVSKLVAIFPFIEASRPRSKSGIQALCSLHVALDKAKGLLQHCADCSRLYLAITAETVLLKFEKARTQLQESLRRVEGIVTEEIGCKIVEIIAELEEVVFTLDQSEKEAALTERRALKKLIEKARSDEDKRKEYVVSYLYNLMRKYSKFFRSEAGDDTDSQGSSPCSPTILGMEDMYGPYGNGRAFSRQLSSIQSFNSRFGSFNSRLGSFNCRRSGPRSENMSIPPEELRCPISLQLMYDPVIISSGQTYERVCIEKWFNDGHSTCPKTQQQLSHLSLTPNYCVKALIASWCEQNDFPVPDGPPGSFDVNWRLALSDSEATGCVSLESFDSINVKSVKVVPLDNVRKEEPANNESGTLDDSSCYDFDMNEGYRNLLLMLHEKTNLHIQCRLVEQIRYLLKDDEEARIQMGSNGFAEALVQFLRNAVQDGNEKAQEIGAMALFNLAVNNNRNKGLLLSAGVIDQLEQMISNPRLSAPATALYLNLSCLPEAKNIIGSSQAVSFLVDRLFSHEARDTKGSSCKHDALYTLYNLSNHQASVPSLLSAGIVEALHSLLSESLASEGLGWTEKALAVLISLAATQAGRKDIMSTPGLISTLAMLLDTGEPTEQEQSVSCLLVMCSADDKCIAPVLQEGVVPSLVSISATGTGKGKEKSQKLLKLFREQRQRDGAQPVPQQAQQQQQQQQQQQQAGETGNGTMVCRRDSKQLCKSKSRKLGRTLSSLWKNRSFSLYQC

SEQ ID NO: 2800 - protein, 302 aa, Zea mays
MASVIDGNGGSRLVVTELGHLKELAMQLEGHLGGSSPDLCKHLASQISSITDRSISLLITATSSSPHGGASDAPPFIRATTKKRKRMDKKRHEVRVGSAGGGGGDHPADDGYSWRKYGQKEILGAKHPRGYYRCTHKSSQGCAATKQVQRTDEDPAFFDVVYLGDHTCVQSQRAAATAGRQAAADAQAPEYDANLMVKTEGPALEPEQQRRGWEDAPTPFLFSSTPACLVPERSPFSAPSTSENWGVSPATSDSNHVVSFPPFEVAAAAAAQFEFEEVMSAIDRADGEFLEDLDIYVSSFLA

SEQ ID NO: 2801 - protein, 310 aa, Sorghum bicolor
MAASVVDGNGGSGGLVVTELGHVKELARQLEAQLGGSSPDLCKHLASQISSIAERSISLLITTSSGLAGARKRSAVPFVKGTKKRKTMDKKRHEVRVSSAAGDHPADDGHSWRKYGQKDILGAKHPRGYYRCTHRHSQGCAATKQVQRTDEDPTSFDVVYLGDHTCVQSQWAAAAGQAAADALAPEYNGKPGTNLTVKTEGPTVEPAEQQVQGWDAPTPFCFSSTPATATASWCLVPELSPPFSAPSTSNNWGVSPATSDSNHVVSFPPFEVAGDDVQFGRFEEVMSAIDRADGDGFLDDLDIDVSSFLV

SEQ ID NO: 2802 - protein, 340 aa, Sorghum bicolor; identical to SEQ ID NO: 1015

SEQ ID NO: 2803 - protein, 330 aa, Zea mays
MAALPFSTRRPFSSPCFILCFLLGFVAGLFPFAHRHLHLDLDLRHLPLADPPPAAPTQRALVRPPPTTTLIVVTPTRARPLQAYYLHRLAHTLRLVPQPLLWLVVDRGAATRETAALLRGCGLMYRHLPSQSHRDAPGARRTRPEHPAARGLRQRNAALDHIEHHRIHGLVYFADEDNVYSLDLFDQLRGIRSFGTWPVAMLGVGKSKTLVEGPVCDNSQVVGWHTNERTKRQRRFHVNTSGFAFNSSMLWDADKRARQAWNYIRLLDTVRDGFQATTFIEQLVEDETHMEGIPTGCSKIMNVNLRLEDKHLVYPKEWQMTENLDVLIPL

SEQ ID NO: 2804 - protein, 405 aa, Zea mays; identical to SEQ ID NO: 1016

SEQ ID NO: 2805 - protein, 401 aa, Triticum aestivum
MGCSPFFCYKSGATRQQISTHTEDLPGDINTIRYTYKELARATENFNPSNKIGEGGFGSVYKGRLRNGKLIAVKVLSVESRQGLKEFLNELMSISNISHGNLVSLYGYCVEGNQRILVYNYLENNSLAQTLLGSGRSNIQFNWRSRVNICLGIARGLAYLHDDVNPHIVHRDIKASNILLDKDLTPKISDFGLAKLLPPNASHISTRVAGTLGYLAPEYAIRGQVTRKSDVYSFGVLLLEIVSGRSNTSSRLPYEDQILLEKFPEVTNGVLLLQTWMYYEQGDLAKIIDSSAGDDLDIEQACRFLKVGLLCTQDVTRHRPTMSTVVSMLTGEKDVDSEKISKPATISDFMDLKIRSMRRENNIAFASSSTLLSTIMAHSSPLLSQETTQASITFTAISERE

SEQ ID NO: 2806 - protein, 401 aa, Triticum aestivum
MGCSPFFCYKSGATRQQISTHTEDLPGDINTIRYTYRELARATENFNPSNKIGEGGFGSVYKGRPRNGKLIAVKVLSVESRQGLKEFLNELMSISNISHGNLVSLYGYCVEGNQRILVYNYLENNSLAQTLLGSGRSNIQFNWRSRVNICLGIARGLAYLHDDVNPHIVHRDIKASNILLDKDLTPKISDFGLAKLLPPNASHISTRVAGTLGYLAPEYAIRGQVTRKSDVYSFGVLLLEIVSGRSNTSSRLPYEDQILLEKFPEVTNGVLLLQTWMYYEQGDLAKIIDSSAGDDMDIEQACRFLKVGLLCTQDVTRHRPTMSTVVSMLTGEKDVDSEKISKPATISDFMDLKIRSMRRENNIAFASSSTLLSTIMAHSSPLLSQETTQASITFTAISERE

SEQ ID NO: 2807 - protein, 401 aa, Hordeum vulgare subsp. vulgare
MGCSPFFCYRSGATRQQISTHTEDLPGDINTIRYTYRELARATENFNPSNKIGEGGFGSVYKGRLRNGKLIAVKVLSVESRQGLKEFLNELMSISNISHGNLVSLYGYCVEGNQRILVYNYLENNSLAQTLLGSGRNNIQFNWRSRVNICLGIARGLAYLHDDVNPHIVHRDIKASNILLDKDLTPKISDFGLAKLLPPNASHISTRVAGTLGYLAPEYAIRGQVTRKSDVYSFGVLLLEIVSGRSNTSSRLPYEDQILLEKFPEVTNGVLLLQTWMYYEQGDLAKIIDSSVGDDLDVEQACRFLKIGLLCTQDVTRHRPTMSTVVSMLTGEKDVESEKISKPATISDFMDLKIRSMRRENNIAFASSSTLLSTIMAHSSPLLSQETTQASITFTTISEHE

SEQ ID NO: 2808 - protein, 401 aa, Dasypyrum villosum
MGCSPFFCYKSGATRQQISTHTEDLLGDINTIRYTYKELAKATENFNPSNKIGEGGFGSVYKGRLRNGKLIAVKVLSVESRQGLKEFLNELMSISNISHGNLVSLYGYCVEGNQRILVYNYLENNSLAQTLLGSGRSNIQFNWRSRVNICLGIARGLAYLHDDVNPHIVHRDIKASNILLDKDLTPKISDFGLAKLLPPNASHISTRVAGTLGYLAPEYAIRGQVTRKSDVYSFGVLLLEIVSGRSNTSSRLPYEDQILLEKFPEVTNGVLLLQTWMYYEQGDLVKIIDSSVGDDLDIEQACRFLKVGLLCTQDVTRHRPTMSTVVSMLAGEKDVDSEKISKPATISDFMDLKIRSMRRENNIAFASSSTLLSTIMAHSSPLLSQETTQASLTFTAISECE

SEQ ID NO: 2809 - protein, 401 aa, Triticum aestivum
MGCSPFFCYKSGATRQQISTHTEDLPGDINTIRYTYKELARATENFNPSNKIGEGGFGSVYKGRLRNGKLIAVEVLSVESRQGLKEFLNELMSISNISHGNLVSLYGYRVEGNQRILVYNYLENNSLAQTLLGSGRSNIQFNWRSRVNICLGIARRLAYLHDDVNPHIVHRDIKASNILLDKDLTPKISDFGLAKLLPPNATHISTRVAGTLGCLAPEYAIRGQVTRKSDVYSFGVLLLEIVSGRSNTGSRLPYEDQILLEKFPEVTNGVLLLQTWMYYEQGDLAKIIDSSAGDDLDIEQACRFLKVGLLCTQDVTRHRPTMSTVVSMLTGEKDVDSEKISKPATISDFMDLKIRSMRRENNIAFASSPTLLSTIMAHSSPLLSQETTQASITFTTISERE

SEQ ID NO: 2810 - protein, 388 aa, Oryza sativa Japonica Group
MGCFCIFGKRRATRQQSSQHNDDPSGDMNITKFTYKELSRVTENFSPSNKIGEGGFGSVYKGKLRNGKLVAVKVLSLESRQGAKEFLNELMAISNVSHENLVKLYGYCVEGNQRILVYNYLENNSLAQTLLGYGHSNIQFNWATRVNICVGIARGLTYLHEVVNPHIVHRDIKASNILLDKDLTPKISDFGLAKLLPPDASHVSTRVAGTLGYLAPEYAIRGQVTRKSDVYSFGVLLLEIVSGRSNTNTRLPYEDQILLERTWVHYEEGDLEKIIDASLGDDLDVAQACMFLKIGLLCTQDVTKHRPTMSMVVRMLTGEMDVELAKISKPAIISDFMDLKVRSMRKEVDIVSSSTSTLLSSIMAHSSPLLSQETTEASMTFTAISDRE

SEQ ID NO: 2811 - protein, 397 aa, Oryza sativa Japonica Group
MGCFCIFGKRRATRQQSSQHNDDPSGDMNITKFTYKELSRVTENFSPSNKIGEGGFGSVYKGKLRNGKLVAVKVLSLESRQGAKEFLNELMAISNVSHENLVKLYGYCVEGNQRILVYNYLENNSLAQTLLGYGHSNIQFNWATRVNICVGIARGLTYLHEVVNPHIVHRDIKASNILLDKDLTPKISDFGLAKLLPPDASHVSTRVAGTFFTYSVLHDRGYLAPEYAIRGQVTRKSDVYSFGVLLLEIVSGRSNTNTRLPYEDQILLERTWVHYEEGDLEKIIDASLGDDLDVAQACMFLKIGLLCTQDVTKHRPTMSMVVRMLTGEMDVELAKISKPAIISDFMDLKVRSMRKEVDIVSSSTSTLLSSIMAHSSPLLSQETTEASMTFTAISDRE

SEQ ID NO: 2812 - protein, 427 aa, Oryza sativa Japonica Group
MRCEQKKRHHQLRTVLCGRCKLLSHGHMITAVGGHGGYPGGKQFVSADQLRDKLSYLRHEKALIIKLVDIVDFNGSFLARVRDFAGANPIILVITKVDLLPRDTDLNCIGDWVVEAVVKKKLNVLSVHLTSSKSLVGVTGVISEIQQEKKGRDVYILGSANVGKSAFISAMLRTMAYKDPVAAAAQKYKPIQSAVPGTTLGPIQIEAFLGGGKLYDTPGVHLHHRQAAVIHADDLPSLAPQSRLRARCFPANDTDVGLSGNSLFWGGLVRIDVVKALPRTRLTFYGPKKLKINMVPTTEADEFYEREVGVTLTPPAGKEKAEGWVGLQGVRELQIKYEESDRPACDIAISGLGWVAVEPLGVPSSNPDESAEEEDNESGELHLRVHVPKPVEIFVRPPLPVGKAASQWYRYQELTEEEEELRPKWHY

SEQ ID NO: 2813 - protein, 547 aa, Oryza sativa Japonica Group
MAAPPLLSLSQRLLFLSLSLPKPQLAPNPSSFSPTRAASTAPPPPEGAGPAAPSRGDRFLGTQLAAEAAARVLAPEDAERRRRRREKRKALARKPSAAACYGCGAPLQTADEAAPGYVHPATYDLKKRHHQLRTVLCGRCKLLSHGHMITAVGGHGGYPGGKQFVSADQLRDKLSYLRHEKALIIKLVDIVDFNGSFLARVRDFAGANPIILVITKVDLLPRDTDLNCIGDWVVEAVVKKKLNVLSVHLTSSKSLVGVTGVISEIQQEKKGRDVYILGSANVGKSAFISAMLRTMAYKDPVAAAAQKYKPIQSAVPGTTLGPIQIEAFLGGGKLYDTPGVHLHHRQAAVIHADDLPSLAPQSRLRARCFPANDTDVGLSGNSLFWGGLVRIDVVKALPRTRLTFYGPKKLKINMVPTTEADEFYEREVGVTLTPPAGKEKAEGWVGLQGVRELQIKYEESDRPACDIAISGLGWVAVEPLGVPSSNPDESAEEEDNESGELHLRVHVPKPVEIFVRPPLPVGKAASQWYRYQELTEEEEELRPKWHY

SEQ ID NO: 2814 - protein, 547 aa, Oryza sativa Indica Group
MAAPPLLSLSQRLLFLSLSLPKPQLAPNPSSFSPGRAVSTAPATPEGAGPAAPSRGDRFLGTQLAAEPAARVLAPEDAERRRRRREKRKALARKPSAAACYGCGAPLQTADEAAPGYVHPATYDLKKRHHQLRTVLCGRCKLLSHGHMITAVGGHGGYPGGKQFVSADQLRDKLSYLRHEKALIIKLVDIVDFNGSFLARVRDFAGANPIILVITKVDLLPRDTDLNCIGDWVVEAVVKKKLNVLSVHLTSSKSLVGVTGVISEIQQEKKGRDVYILGSANVGKSAFISAMLRTMAYKDPVAAAAQKYKPIQSAVPGTTLGPIQIEAFLGGGKLYDTPGVHLHHRQAAVIHADDLPSLAPQSRLRARCFPANDTDVGLSGNSLFWGGLVRIDVVKALPRTRLTFYGPKKLKINMVPTTEADEFYEREVGVTLTPPAGKEKAEGWVGLQVVRELQIKYEESDRPACDIAISGLGWVAVEPLGVPSSNPDESAEEEDNESGELHLRVHVPKPVEIFVRPPLPVGKAASQWYRYQELTEEEEELRPKWHY

SEQ ID NO: 2815 - protein, 540 aa, Zea mays
MASPHLPFLSFPKTLPPLPPPLKTHAHRTSLAAAPAPPPAPPDGAGPAAPTRGDRFLGRQLATEAAARVLAPEDADRRRRRKEKRRALARKPSGLASCYGCGAPLQTAEEAAPGYVDPDTYQLKKRHHQLRTVLCGRCKLLSHGHMVTAVGGHGGYPGGKKFVSAEQLREKLSYLRHEKALIVKLVDIVDFNGSFLARVRDFAGANPIILVITKVDLLPRDTDLNCIGDWVVESVVKKKLNVLSVHLTSSKSLVGITGVISEIHQERKGRDVYILGSANVGKSAFISAMLRTMAYKDPVAAAAQKYKPIQSAVPGTTLGPIQIEAFLGGGKLYDTPGVHLHHRQAAVIHADDLPSLAPQSRLKGRCFPANDTDVELSGNSLFWAGLVRIDVIKALPRSRLTFYGPKKLKINMVPTTEADQFYETEVGVTLTPPTGKERAEGWTGLQGVRELKIKYEERDRPACDIAISGLGWISVEPSGVPSNSAEEVYDGGELHLVVHVPKPVEVFMRPPLPVGKAASQWYRYQELTEEEEELRPKWHY

SEQ ID NO: 2816 - protein, 547 aa, Medicago truncatula
MALKTLSTFLTPLSLPNPKFPQIHSKPCLILCEFSRPSKSRLPEGTGAAAPSPGEKFLERQQSFEPTKLIPKQNNSKKKEKPLKASISVASCYGCGAPLQTSDNDAPGFVHSETYELKKKHHQLKTVLCGRCQLLSHGEMITAVGGHGGYSGGKQFITAEDLRQKLSHLRDAKALIVKLVDVVDFNGSFLSRVRDLAGANPIIMVVTKVDLLPRDTDFNCVGDWVVEAITRKKLNVLSVHLTSSKSLVGITGVISEIQKEKKGRDVYILGSANVGKSAFINALLKTMSYNDPVAAAAQRYKPVQSAVPGTTLGPIQINAFFGGGKLYDTPGVHLHHRQTAVVPSEDLSSLAPKSRLRGLSFPSSQVLSDNTNKGASTVNGLNGFSIFWGGLVRIDVLKALPETCLTFYGPKRMPIHMVPTEKADEFYQKELGVLLTPPSGREKAEHWRGLDSKRKLQIKFEDAERPACDIAISGLGWLSVEPVGRSHRFSQQNAIDTTGELLLAVHVPKPVEIFTRPPLPVGKAGAEWYEYAELTDKEQEMRPKWYF

SEQ ID NO: 2817 - protein, 583 aa, Sorghum bicolor
MAGGGGGGPGPGRVKAGSRPPWVGLAAAVWVQVAAGSAYVFPLYSHAIKEALGYNQQALTMLGVGNDVGENVGLVPGVLANRLPPWLILVIGSACAFFGFGTLWLAVTKTVAMPYWVLWIALCIGTNSSAWLGTAALVTNMRNFPLSRGTVAGLIKGYVAVSAAVYTETFNGMLGNSPTNLLLLLALGIPTACIVVMYFVRPCTPSLDEDNSTEHSHFMYTQISSVVLGIYLMVATILGDTLKLSQAVTYLLFGIMILLLLAPLAIPIKMTLYPNKQTKEKPSTLAPSYSTDSLSGADPENSQPLLGSASTTFATGTNESDDSTDLDLLLAEGEGAVNLKKKRGPRRGDDFTFLEALVKADFWLLFVVYFCGVGTGVTVLNNLAQIGMSVGANDTTILLCLFGFCNFVGRILGGSVSEHFVRSRMLPRPFWMMCTQIIMVVTFLLFATGLHSLIYVSTTLLGICYGVQFAVMIPTVSELFGLKDFGLMYNFMLLVNPLGAFFFSALLAGYIYDKEAARQHPGVLEPSDCYGPDCFRLTFYVCAIVCCCGTLLSVLFISRIKPVYQMLYASGSFRHPRSQQQLH

SEQ ID NO: 2818 - protein, 565 aa, Oryza sativa Japonica Group
GSRPPWVGLAAAVWVQVAAGSAYVFPLYSHAIKEALGYNQKALTMLGVANDVGENVGLVPGVLANRLPPWLILLIGSACALLGFGTLWLAVTKTLVMPYWVLCIALCIGTNSSAWLGTAALVTNMRNFPLSRGTVAGLIKGYVAVSAAVYTETFNGMLQNSPTNLLLLLALGIPTACVLVMYFVRPCTPSLDEDNAAEHSHFMFTQISSVVLGVYLMVATILGDTLKLSDAITYLLFGIMILLLLSPLAIPIKMTIYPNKPKREKTSTLALSYSTDSLSGPDQENSEPLLGGTSTFVTGANDSDEATDVDLLLAEGEGAVNLKKKRGPRRGDDFTFREALVKADFWLLFIVYFCGVGTGVTVLNNLAQVGMAVGADDTTILLCLFGFCNFVGRILGGSVSEYFVRSRMLPRPFWMMCTQIIMVITFLLFATGLHSLIYVSTTFLGICYGVQFAVMIPTVSELFGLKDFGLMYNFMLLVNPLGAFFFSALLAGYIYDKEAAKQQPGVLEPSTCLGPDCFRLTFYVCAIVCCCGTLVSVVFIARIKPVYQMLYASGSFRHPRSQQLH

SEQ ID NO: 2819 - protein, 577 aa, Hordeum vulgare subsp. vulgare
MAGGGGLGKVKAGSRPPWVGLAAAVWVQVAAGSAYVFPLYSHAVKEALGYNQKALTMLGVANDVGENVGLVPGVLANRLPPWLILLIGSACAFFGFGTVWLAVTKTVAMPYWVLCVALCVGTNSSAWLGTAALVTNMRNFPLSRGTVAGLIKGYVAVSAAVYTETFNGMLNNSPTNLLLLLALGIPVACVVVMYFVRPCTPSLDEDNATEHSHFVFTQVSSVVLGVYLMVATILGDTLKLSATITYLLFGIMILLLLSPLAIPIKMTLYPSKPKDEKASILVPSYSTDSLSGADQENGEPLLRGPSATFVPGSNDSDETDVDVLLAEGEGAVNMKKRKGPRRGDDFTFAEALVKADFWLLFIVYFCGVGTGVTALNNLAQIGTSVGANDTTVLLCLFGFCNFVGRILGGSISEYFVRTRMLPRPFWMMCTQIIMVITFLLFATGLHSLIYVSTTLLGICYGVQFAVMIPTVSELFGLKDFGLMYNFMLMVNPIGAFFFSALLAGYVYDKEAARQNPGVLDPANCFGPDCFRLTFYVCAMVCCCGTLICLVFIARIKPVYQMLYASGSFRHPRQQQLC

SEQ ID NO: 2820 - protein, 601 aa, Oryza sativa Japonica Group
MAGGGGGGGGGVGKVKAGSRPPWVGLAAAVWVQVAAGSAYVFPLYSHAIKEALGYNQKALTMLGVANDVGENVGLVPGVLANRLPPWLILLIGSACALLGFGTLWLAVTKTLVMPYWVPSDLQRLGMSFIGVCDHWKLCIALCIGTNSSAWLGTAALVTNMRNFPLSRGTVAGLIKGYVAVSAAVYTETFNGMLQNSPTNLLLLLALGIPTACVLVMYFVRPCTPSLDEDNAAEHSHFMFTQISSVVLGVYLMVATILGDTLKLSDAITYLLFGIMILLLLSPLAIPIKMTIYPNKPKREKTSTLALSYSTDSLSGPDQENSEPLLGGTSTFVTGANDSDEATDVDLLLAEGEGAVNLKKKRGPRRGDDFTFREALVKADFWLLFIVYFCGVGTGVTVLNNLAQVGMAVGADDTTILLCLFGFCNFVGRILGGSVSEYFVRSRMLPRPFWMMCTQIIMVITFLLFATGLHSLIYVSTTFLGICYGVQFAVMIPTVSELFGLKDFGLMYNFMLLVNPLGAFFFSALLAGYIYDKEAAKQQPGVLEPSTCLGPDCFRLTFYVCAIVCCCGTLVSVVFIARIKPVYQMLYASGSFRHPRSQQLH

SEQ ID NO: 2821 - protein, 624 aa, Oryza sativa Japonica Group
MAGGGGGGGGGVGKVKAGSRPPWVGLAAAVWVQVAAGSAYVFPLYSHAIKEALGYNQKALTMLGVANDVGENVGLVPGVLANRLPPWLILLIGSACALLGFGTLWLAVTKTLVMPYWVPSDLQRLGMSFIGVCDHWKVIAEVGMNTIFVGTFSITKYIDNLCIALCIGTNSSAWLGTAALVTNMRNFPLSRGTVAGLIKGYVAVSAAVYTETFNGMLQNSPTNLLLLLALGIPTACVLVMYFVRPCTPSLDEDNAAEHSHFMFTQISSVVLGVYLMVATILGDTLKLSDAITYLLFGIMILLLLSPLAIPIKMTIYPNKPKREKTSTLALSYSTDSLSGPDQENSEPLLGGTSTFVTGANDSDEATDVDLLLAEGEGAVNLKKKRGPRRGDDFTFREALVKADFWLLFIVYFCGVGTGVTVLNNLAQVGMAVGADDTTILLCLFGFCNFVGRILGGSVSEYFVRSRMLPRPFWMMCTQIIMVITFLLFATGLHSLIYVSTTFLGICYGVQFAVMIPTVSELFGLKDFGLMYNFMLLVNPLGAFFFSALLAGYIYDKEAAKQQPGVLEPSTCLGPDCFRLTFYVCAIVCCCGTLVSVVFIARIKPVYQMLYASGSFRHPRSQQLH

SEQ ID NO: 2822 - protein, 582 aa, Oryza sativa Indica Group
MAGGGGGGGGGVGKVKAGSRPPWVGLAAAVWVQVAAGSAYVFPLYSHAIKEALGYNQKALTMLGVANDVGENVGLVPGVLANRLPPWLILLIGSACALLGFGTLWLAVTKTLVMPYWVLCIALCIGTNSSAWLGTAALVTNMRNFPLSRGTVAGLIKGYVAVSAAVYTETFNGMLQNSPTNLLLLLALGIPTACVLVMYFVRPCTPSLDEDNAAEHSHFMFTQISSVVLGVYLMVATILGDTLKLSDAITYLLFGIMILLLLAPLAIPIKMTIYPNKPKREKTSTLALSYSTDSLSGPDQENSEPLLGGTSTFVTGANDSDEATDVDLLLAEGEGAVNLKKKRGPRRGDDFTFREALVKADFWLLFIVYFCGVGTGVTVLNNLAQVGMAVGADDTTILLCLFGFCNFVGRILGGSVSEYFVRSRMLPRPFWMMCTQIIMVITFLLFATGLHSLIYVSTTFLGICYGVQFAVMIPTVSELFGLKDFGLMYNFMLLVNPLGAFFFSALLAGYIYDKEAAKQQPGVLEPSTCLGPDCFRLTFYVCAIVCCCGTLVSVVFIARIKPVYQMLYASGSFRHPRSQQLH

SEQ ID NO: 2823 - protein, 601 aa, Oryza sativa Indica Group
MAGGGGGGGGGVGKVKAGSRPPWVGLAAAVWVQVAAGSAYVFPLYSHAIKEALGYNQKALTMLGVANDVGENVGLVPGVLANRLPPWLILLIGSACALLGFGTLWLAVTKTLVMPYWVPSDLQRLGMSFIGVCDHWKLCIALCIGTNSSAWLGTAALVTNMRNFPLSRGTVAGLIKGYVAVSAAVYTETFNGMLQNSPTNLLLLLALGIPTACVLVMYFVRPCTPSLDEDNAAEHSHFMFTQISSVVLGVYLMVATILGDTLKLSDAITYLLFGIMILLLLAPLAIPIKMTIYPNKPKREKTSTLALSYSTDSLSGPDQENSEPLLGGTSTFVTGANDSDEATDVDLLLAEGEGAVNLKKKRGPRRGDDFTFREALVKADFWLLFIVYFCGVGTGVTVLNNLAQVGMAVGADDTTILLCLFGFCNFVGRILGGSVSEYFVRSRMLPRPFWMMCTQIIMVITFLLFATGLHSLIYVSTTFLGICYGVQFAVMIPTVSELFGLKDFGLMYNFMLLVNPLGAFFFSALLAGYIYDKEAAKQQPGVLEPSTCLGPDCFRLTFYVCAIVCCCGTLVSVVFIARIKPVYQMLYASGSFRHPRSQQLH

SEQ ID NO: 2824 - protein, 421 aa, Zea mays
MAGGGGGPGPGRVKAGSRPPWVGLAAAVWVQVAAGSAYVFPLYSHAVKEALGYNQQALTMLGVGNDVGENVGLVPGLLANRLPPWLILVIGSACAFFGFGTLWLAVTKTVAMPYWVLWIALCIGTNSSAWLGTAALVTNMRNFPLSRGTVAGLIKGYVAVSAAVYTETFNGMLGNSPTNLLMLLALGIPTACIVVMYFVRPCTPSLDEDNSTEHSHFMYTQISSVVLGIYLMVATILGDTLKLSQAVTYLLFGIMILLLLAPLAIPIKMTLYPNKQTKEKASTLAPSYSTDSLSGADPENSQPLLGSASTTLATGTNESDDSTDLDLLLAEGEGAVNLKKKRGPRRGDDFTFLEALVKADFWLLFVVYFCGVGTGVTVLNNLAQIGMSVGANDTTILLCLFGFCNFAGRILGGSVSEYFVR

SEQ ID NO: 2825 - protein, 546 aa, Sorghum bicolor; identical to SEQ ID NO: 1017

SEQ ID NO: 2826 - protein, 561 aa, Hordeum vulgare subsp. vulgare
MASACPRPLFLSFPKSPAPPLAVPAKHHPSASVSLSTRARAASSSAAPSPSPSPPSDGVGPAAPTRGDVYLGRQLAAAAGARTRAPEEDAERRRRRKEKRRALAKKTPSGVACCYGCGAPLHTGEEGSPGHVEPATYDLKKRHNQLKTVLCGRCKLLSHGHMVTAVGGHGGYPGGKQFVSAEELREKLSYLRHEKALIVKLVDIVDFNGSFLARIRDFAGANPIVLVITKVDLLPRDTDLNCIGDWVVESVVRKKLNVLSVHLTSSKSLVGITGVISEIQQEKKARDVYILGSANVGKSAFISAMLKTMAYKDPVAAAAQKYKPIQSAVPGTTLGPIQIEAFLGGGKLYDTPGVHLHHRQAAVIHADDLPSLAPQSRLKGRCFPANDTDVGLSGNTLFWGGLVRIDIVKALPRTRLTFYGPKKLSINMVPTTEADEFYKREVGVTLTPPTGQERAEGWCGLQGVRELQIKYEELDRPASDIAISGLGWIAVEPLGVPSSDPDSSIEEEGGGSGELHLRVHVPKPVEVFVRAPLPVGKAASQWYRYQELTEVEEELRPKWHY

SEQ ID NO: 2827 - protein, 728 aa, Zea mays; identical to SEQ ID NO: 1018

SEQ ID NO: 2828 - protein, 755 aa, Sorghum bicolor
MASSLVNLLLMEVAAIASIVLLPILVVLSSYRHYSGHPALRLFVWSASTLFLPLVSYAVSAAAKWDAARVPLLLAWTVFLQILRNTIDTARSSTSTITSRGGSNGSKFRPSVEQLARMGWVAFLIISSGGAAGSPLLTGVLLWLWVLSLLKLIHRLVAAELAKNSFAVGLNSYLVADYMKQLHGHGQAGHGGGLEILPPPYFVKGEEKLPIKPRPHGYHIDHRSRTTATAAAPPSLSTDDLNAGHGHVVTVDRIWSLSSSGDPLLATCPQLKDLCLSFALFKLQLRRFIGCPLAEAGCHRAMAFVQDGLLAGSGGSPDPERVFRVVETELSFLADFLYSKLTVFYASGWWFPALNSILVLATWISCLAAGGAIVHDMMNPGTALAVDYQILRNYLQHHDTAFHVIVGLDILVSVSFIVSIVFTEGWEIANYVCSDWIKVSAICEYARRPAWRKSPWARRKLSRLLWLRPMQQWDDRFCQVSILQLRLCYCGCVSRQVDRILKKTVAVPAAVKSAIVAMLRTNKGRLGNGERSLQGNGVAGNLFWACRVKAGDDNAVDSLSEQILVWHLATRLVELKRSEGARARGGKLDDDDDDDDTDAGSELDLLVVVATRLSRYCAYLVALKPTLLPDHRAWTEELYEGVVEEVVRVLARCAGPVVRYERAATCLGGSMNATLRKASKLGRQLVEEVSDEALLWKVLADFWAELILYLAPSENVTSHSKSLYHGGEFITVLWALLGHAGIVGRPEADSTDISA

SEQ ID NO: 2829 - protein, 715 aa, Oryza sativa Indica Group
MASSLINLLLTEVAAIVSIVLLALLVVLSSYRRRSGHPALRLFVWAASTLFLPLVSYAVSAAAKWDAARVPLLLAWTVFLQMLRNTIDTARSSSSTIGNGSGSSKFRPSVEQLARMGWVAFLIVSSDGTAGSPQLTGVLLWLWVLSLAKLVHRLVAAELAKNSFAVGLNAYLISDYMKQLYGQDQGDHDVQAPPLLVMGEEKLQIEARPQGYRIGRTSPPPLCVDAGHVVTMDRICRLFSSGDPLVASNPQIKDTCLSFALFKLQLRRFVGCPIAEAGSRRAVAFVLDGLLGESHERVFRVIETELSFLADFLYSKLTVFYASGWWFPVLNSMLVFATWVSCLAAGGAIVHDMTCHGTTLASNYDNLREYLQNHDTVFHIIVGLDVLVTVSFIVAIVFTEGWEIATYVRSDWIKVSAICEYARRPSWRKSPWTRRNVGRVLPLKPMQRWDDRFGQTSILQLRPCYCGCVSRQVDRIAKSSATVPAAVKTAVVDTLRTNQGNLGNGVLSLQRNGVADKLAWACHHAGDERSVSEQILVWHVATRLLEIMRSEGAHGRHDDGDGDGGGDSDTVVVATRLSRYCAYLVALKPELLPDHPAWTEELYEGVVEEVSRVLARFAGAVVRYERAATCLGGSTNATLRKAAKLGRQLAEELGGDEELPWRVLADFWAELVVYLAPSENVTAHSKALRRGGEFITVLWALLGHAGIVSRPDTDV

SEQ ID NO: 2830 - protein, 715 aa, Oryza sativa Japonica Group
MASSLINLLLTEVAAIVSIVLLALLVVLSSYRRRSGHPALRLFVWAASTLFLPLVSYAVSAAAKWDAARVPLLLAWTVFLQMLRNTIDTARSSSSTIGNGSGSSKFRPSVEQLARMGWVAFLIVSSDGTAGSPQLTGVLLWLWVLSLAKLVHRLVAAELAKNSFAVGLNAYLISDYMKQLYGQDQGDHDVQAPPLLVMGEEKLQIEARPQGYRIGRTSPPPLCVDAGHVVTMDRICRLFSSGDPLVASNPQIKDTCLSFALFKLQLRRFVGCPIAEAGSRRSVAFVLDGLLGESHERVFRVIETELSFLADFLYSKLTVFYASGWWFPVLNSMLVFATWVSCLAAGGAIVHDMTCHGTTLASNYDNLREYLQNHDTVFHIIVGLDVLVTVSFIVAIVFTEGWEIATYVRSDWIKVSAICEYARRPSWRKSPWTRRNVGRVLPLKPMQRWDDRFGQTSILQLRPCYCGCVSRQVDRIAKSSATVPAAVKTAVVDTLRTNQGNLGNGVLSLQRNGVADKLAWACHHAGDERSVSEQILVWHVATRLLEIMRSEGAHGRHDDGDGDGGGDSDTVVVATRLSRYCAYLVALKPELLPDHPAWTEELYEGVVEEVSRVLARFAGAVVRYERAATCLGGSTNATLRKAAKLGRQLAEELGGDEELPWRVLADFWAELVVYLAPSENVTAHSKALRRGGEFITVLWALLGHAGIVSRPDTDV

SEQ ID NO: 2831 - protein, 426 aa, Zea mays; identical to SEQ ID NO: 1019

SEQ ID NO: 2832 - protein, 443 aa, Zea mays
MNRVLALACASSLLTCREVLQEQVPSTRSRLGMFVIEDKGGAIALMLASLLFLGTWPAVLTLLERRGRLPQHTYLDYSITNLLAAVLIALTFGQLGDSRRGMPNFFTQLGQDNWPSVLFAMAGGVVLSVGNLSTQYAWAYVGLSVTEVISSSMVVVIGTTLNYFLDNRINRAEILFPGVACFLVAVILGSAVHSSNAADNEQKLGASTNAYKLGTSGNVEPSKQAVDRDAPKDLEESGASGIRQPDKAEAGTAEYLIELEERRSIKVFGSNTFIGLGIVFFAGVCFSLFSPAFNLATNDQWHTLRDGVPHLVVYTAFFYFSISCFVVGVGLNVLFLYRPMAGVPRSSLGAYLRDWDGRQWALLAGLLCGFGNGFQFMGGQAAGYAAADAVQALPLVSTFWGVLLFGEYRKSSRKTYVLLGFMLFMFVAAVAVLMASSGHRSTE

SEQ ID NO: 2833 - protein, 411 aa, Zea mays
MFVIEDKGGAIALMLASLLFLGTWPAVLTLLERRGRLPQHTYLDYSITNLLAAVLIALTFGQLGDSRRGMPNFFTQLGQDNWPSVLFAMAGGVVLSVGNLSTQYAWAYVGLSVTEVISSSMVVVIGTTLNYFLDNRINRAEILFPGVACFLVAVILGSAVHSSNAADNEQKLGASTNAYKLGTSGNVEPSKQAVDRDAPKDLEESGASGIRQPDKAEAGTAEYLIELEERRSIKVFGSNTFIGLGIVFFAGVCFSLFSPAFNLATNDQWHTLRDGVPHLVVYTAFFYFSISCFVVGVGLNVLFLYRPMAGVPRSSLGAYLRDWDGRQWALLAGLLCGFGNGFQFMGGQAAGYAAADAVQALPLVSTFWGVLLFGEYRKSSRKTYVLLGFMLFMFVAAVAVLMASSGHRSTE

SEQ ID NO: 2834 - protein, 441 aa, Zea mays
MNRVLACASSLLTCREVLQEQVSSTRSRLGMFVIEDKGGAIALMLASLLFLGTWPAVLTLLERRGRLPQHTYLDYSITNLLAAVLIALTFGQLGDSRRGMPNFFTQLGQDNWPSVLFAMAGGVVLSVGNLSTQYAWAYVGLSVTEVISSSMVVVIGTTLNYFLDNRINRAEILFPGVACFLVAVILGSAVHSSNAADNEQKLGASTNAYKLGTSGTVEPSKQAVDRDAPKDLEESGASGIRQPDKAEAGTAEYLIELEERRSIKVFGSNTFIGLGIVFFAGVCFSLFSPAFNLATNDQWHTLRDGVPHLVVYTAFFYFSISCFVVGVGLNVLFLYRPMAGVPRSSFGAYLRDWDGRQWALLAGLLCGFGNGFQFMGGQAAGYAAADAVQALPLVSTFWGVLLFGEYRKSSRKTYVLLGFMLFMFVAAVAVLMASSGHRSTE

SEQ ID NO: 2835 - protein, 410 aa, Oryza sativa Japonica Group
MYIIEDKGGAIALMLASLFFLGTWPAVLTLLERRGRLPQHTYLDYSITNLLAAVLIALTFGQLGDSKPNMPNFFTQLSQDNWPSVLFAMAGGVVLSIGNLSTQYAWAYVGLSVTEVISSSMVVVIGTTLNYFLDNRINRAEILFPGVACFLVAVILGSAVHASNAADNEEKLNGSTNIYKLGENGSVEPNKEVIEKDAPKDLENGASATKYVAKAEAGTAEYLIELEERRSIKVFGSSTFIGLGIVFFSGVCFSLFSPAFNLATNDQWHTLKQGVPHLVVYTAFFYFSISCFVIGIGLNILFLYRPMAGVPKSSFKAYLNDWEGRQWALLAGFLCGFGNGFQFMGGQAAGYAAADAVQALPLVSTFWGILLFGEYRKSSRKTYILLGFMLFMFIVAVAVLMASSGHRSTK

SEQ ID NO: 2836 - protein, 445 aa, Oryza sativa Japonica Group
MDHVLGCATSLVSCQKVFEGPLVNSLLSIRQGGLKMYIIEDKGGAIALMLASLFFLGTWPAVLTLLERRGRLPQHTYLDYSITNLLAAVLIALTFGQLGDSKPNMPNFFTQLSQDNWPSVLFAMAGGVVLSIGNLSTQYAWAYVGLSVTEVISSSMVVVIGTTLNYFLDNRINRAEILFPGVACFLVAVILGSAVHASNAADNEEKLNGSTNIYKLGENGSVEPNKEVIEKDAPKDLENGASATKYVAKAEAGTAEYLIELEERRSIKVFGSSTFIGLGIVFFSGVCFSLFSPAFNLATNDQWHTLKQGVPHLVVYTAFFYFSISCFVIGIGLNILFLYRPMAGVPKSSFKAYLNDWEGRQWALLAGFLCGFGNGFQFMGGQAAGYAAADAVQALPLVSTFWGILLFGEYRKSSRKTYILLGFMLFMFIVAVAVLMASSGHRSTK

SEQ ID NO: 2837 - protein, 409 aa, Hordeum vulgare subsp. vulgare
MFIIEDKGGAIAIMCASLFFLGTWPAVLTLLERRGRLPQHTYLDYSITNLLAAVLIALTFGQLGDAKHNMPNFFTQLSQDNWPSVLFAMAGGIVLSIGNLSTQYAWAYVGLSVTEVISSSMVVVIGTTLNYFLDNRINRAEILFTGVACFLVAVILGSAVHASNAADNEKKLSESRNTYKIGTNGGTETGKKVIDKDAPKDMENGASAEYSTKAEAGTAEYLIELEERRSIKVFGSSTFIGLGIVFFSGICFSLFSPAINLATNDQWHTLKDGVPHLVVYTAFFYFSISCFVVGIGLNILFLYRPMAGVPKSSFKAYLNDWEGRQWALLAGFLCGFGNGFQFMGGQAAGYAAADAVQALPLVSTFWGILLFGEYRKSSKKTYTLLVFMLLMFIAAVATLMASAGHRSTK

SEQ ID NO: 2838 - protein, 411 aa, Zea mays; identical to SEQ ID NO: 1022

SEQ ID NO: 2839 - protein, 492 aa, Brachypodium distachyon
MDRALACASSLVPCQEVVEGPLLNSFLSIKQGLKMFIIEDKGGAIAIMCASLLFLGTWPAVLTLLERRGRLPQHTYLDYSITNLLAAVLIALTFGQLGDSKHNMPNFFTQLSQDNWPSVLFAMAGGVVLSIGNLSTQYAWAYVGLSVTEVISSSMVVVIGTTLNYFLDNRINKAEILFTGVGFFLVAVILGSLVHASNAADNAQKLSASTNSYKIGTTGDDMEPSKQVIDKDAPKDMENGASPTKYATKAEAGTAEYLIELEEQRSIKVFGSNTFIGLSIVFFAGVCFSLFSPAINLATNDQWHTLKDGVPHLVVYTAFFYFSISCFVIGIGLNILFLYRPMAGVPKSSFRAYLNDWEGRQWALLAGFLCGFGNGFQFMGGQAAGYAAADAVQLWHYCSSGIATCEHVLGHPAVRGVPEVVKENIHSACVHATHVHRRSSYADGFSRPQEHQMIDHYILLSVVLVYSFSCHKAKKFRQQSKGPDPGSHASTK

SEQ ID NO: 2840 - protein, 466 aa, Sorghum bicolor
MAAEGEASMHYTTDDALSLVGFGRFQTLVLAYSGLGWVAEAFEIMLLSFVGPAVEEDWGISGAEQGLIADRYGRRTGFLFTAVVTAIFGLLSAFSPNYASLLTLRFVVGLGLGAAHVLSTWFIEFVPAAKRGTWMVVFHVCWTVGTILEALLAWAVMPVLGWRWLLALSSAPCFGLLIFFPLTPESPRYLCSRGRTMDATVILERIARMNKGTLPPGVLIYRHEKHVDNNLGTSETALLIAEDNADIEEDTSSKSSGIVAFQALWSYDLIRSTFLLWFIYLATYFTYYGVILLTSELSNGRRTCASVKSHLMQPNSGNLYRDVLVTSLAEFPGLLLAALLVDRIGRKRSMGGMLLMCGAFLAPLSVQLGEGLVTTLLFCARTCIMGSFAVLYVYTPELYPASSRNTGVGITSSLGRIGSIVSPLVIVGLLESCRQKEAVFMIDLVLFLAGVTCAFFPRETKGCQIQ

SEQ ID NO: 2841 - protein, 484 aa, Zea mays
MAAEGEVSMHYTTDDALSLVGFGRFQTLVLAYSGLGWIAEAFEIMLLSFVGPAVEADWGISGAEQGLISSAVFAGMLIGSIAGGLIADRYGRRTGFLFTAVVTAVFGLLSAFSPNYASLLTLRFVVGLGLGAGHVLSTWFIEFVPAAKRGTWMVVFHACWTVGTILEALLAWAIMPVLGWRWLLALSSAPCFVLLIFFPLTPESPRYLCSRGRTMDATVILERIARMNKGTLPPGVLIFRPEKHVDNNLGTSETALLIAEDNTGIEEDTSSKSSGIVAFQALWSYDLIRSTFLLWFIYLANYFTYYGVILLTSELSNGKRRCASVRTHLMQPNSGNLYRDVLVTSLAEFPGLLLAALLVDRIGRKRSMGGMLLLCGVFLAPLSLQLGEGLVTTLLFCARTCIMGSFAVLYVYTPELYPAPSRNTGVGITSSLGRIGSIVSPLVIVGLLESCRRKEAVFVVDLVLFLAGVACALLPRETKGCQIQ

SEQ ID NO: 2842 - protein, 490 aa, Oryza sativa Indica Group
MAGGDAEEEEEEEETYTTDDALTRAGFGRFQALVLAYACVGWVAEAMEVMLLSFVGPSVKAEWGVSGAAEGLVSSVVFAGMLIGACLGGLISDRYGRRIGFLSTAVVTGIFGLLSAFSPNYASLLVLRFVVGLGLGAGHVLSTWFIEFVPAAKRGTWMVVFHCSWTVGTILEALLAWAVMPVLGWRWLLALSSAPCFILFIFFPVTPESPRYLCSVGRTMDARVILEKIARMNNSSLPPGILTYASTRRIDKVLDDSETALLITEDGGSGIDEHTSSKPGGITALRESWSYDLIRSTFLLWFVYLANYFAYYGVILLTSELSNGQRRCASVGINFMQPKDANLYRDVLVTSLAEFPGLVLAALLVDRIGRKVSLGIMLLLSCAFLAPLAVHLGQGSVTTLLFCARTCIMGGFAVLYVYTPEIYPASSRNTGVGITSSFGRIGSIVSPVVTVSLSENCRQKEAVFFMDLMLFLAAVACALIPLETKGRQIQ

SEQ ID NO: 2843 - protein, 491 aa, Oryza sativa Japonica Group
MAGGDAEEEEEEEEETYTTDDALTRAGFGRFQALVLAYACVGWVAEAMEVMLLSFVGPSVKAEWGVSGAAEGLVSSVVFAGMLIGACLGGLISDRYGRRIGFLSTAVVTGIFGLLSAFSPNYASLLVLRFVVGLGLGAGHVLSTWFIEFVPAAKRGTWMVVFHCSWTVGTILEALLAWAVMPVLGWRWLLALSSAPCFILFIFFPVTPESPRYLCSVGRTMDARVILEKIARMNNSSLPPGILTYASTRRIDKVLDDSETALLITEDGGSGIDEHTSSKPGGITALRESWSYDLIRSTFLLWFVYLANYFAYYGVILLTSELSNGQRRCASVGINFMQPKDANLYRDVLVTSLAEFPGLVLAALLVDRIGRKVSLGIMLLLSCAFLAPLAVHLGQGSVTTLLFCARTCIMGGFAVLYVYTPEIYPASSRNTGVGITSSFGRIGSIVSPVVTVSLSENCRQKEAVFFMDLMLFLAAVACALIPLETKGRQIQ

SEQ ID NO: 2844 - protein, 505 aa, Sorghum bicolor; identical to SEQ ID NO: 1020

SEQ ID NO: 2845 - protein, 506 aa, Sorghum bicolor
MSPYLLAAGALIVFLYVIKNRRSSKLPPSPPSLPLIGHLHLIGRLAHRSLHELQLRYGDGGSGLLFLQLGRRPTLVVFTAAAATDLFKNHDLAFASRPRSVGGDKLMYGCSNVSFAPYGENWRRGKKIAVVHLLSPRRVESFAPVRAAEVAALVARTRRAAEAGEAVQMRELLYGYTNAVVTRAATGAAGATAEKLKQLMGNSAALMAGFQPEDVLPDAPARFVRWATGLDKKLEDMAEVWDKFLSEIVAAHKEKGGGDAGEEDEDFLDVLLRLREEGADGLELTDDRIKATIEDMIAAATETSSQTLEWTMAELIANPRVLGKLQDEIVRVVNADQPAICEPDLSRMGYLKAVFKEVLRLHAPAPLLVPHESTTPAVVQGYEIPAKTALFVNVWAIGRDPAVWDAPDEFRPERFMGGSRSVDFRGTDYQLIPFGAGRRICPGISFAVPVLELALVSLLRHFEWELPAGMRPVDLDMGEAPGLTTPRRVPLVLVPKCRTLVQAALQ

SEQ ID NO: 2846 - protein, 505 aa, Zea mays
MPLYLLAAGALIVFLYVINNRRSSKLPPSPPSLPLIGHLHLIGRLAHRSLLELQLRYGGGGGLLFLQLGRRPTLVVSTAAVAADLFKNHDLAFASRPRSVGGDKLMYGCSNVSFAPYGENWRRGKKIAVVHLLSPRRVESFAPVRVAEVAALVARTRRTAEAGEAVEMRELLYGYTNAVVTRAATGAAGATAEKLKQLMGNSAALMAGFQPEDVLPDAPARFVRWATGLDKKIEDMAEAWDKFLSDIVAAHKEKGCGDAGEEAEDFLDVLLRLREEGADGLELTDDRIKATIEDMIAAATETSSQTLEWTMAELIANPRVMSKLQGEIARVVSADQTTIAEPDLNKMEYLRAVFKEVLRLHPPAPLLVPHESTTPAVVQGYEIPAKTALFVNVWAIGRDPAVWDAPDEFRPERFVGGSPSVDFRGTDYQFIPFGAGRRICPGINFALPVLELALVSLLHHFEWELPAGMRLEDLDMGEAPGLTTPRRIPLVLVPKRRTLVQTLLQ

SEQ ID NO: 2847 - protein, 508 aa, Sorghum bicolor
MSPYLLAAGALIVFLYVIKNHRSSNKLPPSPPSLPLIGHLHLIGRLAHRSLHELQLRYGGGGGLLYLQLGRRRTFIVSTAAAAADLFRNHDLAFASRPHSVSGDKLMYGCNNVSFAPYGGNWRRGKKIATVHLLSQRRVESFAPVRAAEVAALVARTRRAAEAGSAAVELRELLYGYTNAVITRAATGAAGATAERLKQLLGNSAALMVGFQPEDVLPDAPARFVRWATGLDKKLDDMAEAWDKFLSELVAAHKEKRDDDGAKDEDEDFLDVLLRLREEGTDGLELTEDRIKAITKDMIAAATETSTQTLEWTMAELVANPRVMRKLQDEIVRVVSDDQTAIAEPDLNKMEYLKAVFKEVLRLHPPAPLLVPHESTTPAVVQGYEIPAKTALFVNVWAIGRDPAAWDTPDEFRPERFMGGSPPVDFRGTDYQLIPFGAGRRICPGINFALPVLELALASLLRHFEWELPAGMRPGDLDMGEAPGLSTPRQVPLVLVPKRKTLVQAALE

SEQ ID NO: 2848 - protein, 506 aa, Sorghum bicolor
MFHYVVAAAGVLIVFLYAVKKRQSSKLPPSPPSLPVIGHLHLIGRLAHRSLRELQLRYGGSCGLLYLQLGRRRTLVVSTAAAAADLFRNHDLAFASRPHSVSGDKMMYGCNNVSFAPYGGNWRRGKKIAVVHLLSLRRVESFAPVRAAEVAALVAHTRRAAEAGEAVELRELLYGYTNAVVTRAATGAAGATAERLKQLLGNSAALMVGFQPEDVLPDVPARFVRWATGLDKKLDDMAKAWDKFLSEIVAAHKEKGAGGGGAGEQDGDFLDVLLRLREEDTDGVELTDDRIKGTVEDMIGGGTETTIQTLEWTMAELIANPRVTAKLKNEITRVVTADQPTISESDLNRMEYLKAVFKEVLRLHAPLPLLVPHESTAPAVVQGYEIPAKTGLYINVWAIGRDPAAWDAPEEFRPERFVGSSSPVDFRGNDYQFIPFGAGRRICPGINFALPVLELAVASLMRHFDWELPAGMQLTDLDMSETPGLMTPRRVPLVVVPRTVPQPALP

SEQ ID NO: 2849 - protein, 453 aa, Zea mays; identical to SEQ ID NO: 1021

SEQ ID NO: 2850 - protein, 411 aa, Zea mays; identical to SEQ ID NO: 1022

SEQ ID NO: 2851 - protein, 376 aa, Sorghum bicolor
MPRAATGAIAAAFLRAQAPHMAPPASRIARAFPGLATAAATRFAPSSFASSPRLALHPRLRSARSFYSGVARASSGGGTVSGSLTSEEDQRLQSELIFLGTGTSEGIPRVSCLTHPTKTCPVCSKAAEPGNPNRRRNTSILLRHATPSGTTNIVVDAGKFFYHSALQWFPTFGLRTIDGVIITHSHADAIGGLDCLRDWTNNVQSSIPIYVAERDYEVMKMTHYYLIDTSVVIPGAAVSALQFNIIKEEPFMVHNLEVIPLPVWHGQGYRSLGFRFGDVCYISDVSDIPEETYKLLENCELLIMDALRPDRSSSTHFGLPRALEEVRKIKPKKTLFTGMMHLMDHEKVNSDLARLMETEGLDIQLSYDGLSIPVRL

SEQ ID NO: 2852 - protein, 374 aa, Zea mays
MPRAATGAITAAFLRAQAPHMAPLASRIARAFPGLATAAATRFAPSSSASSPRLGLVPRLRSARSFSGARASPVSGAVSGSSTSEEGQQLQSELIFLGTGTSEGIPRVSCLTHPTKICPVCTKAAEPGNPNRRRNTSILLRHATPSGTTNIVVDAGKFFYHSALQWFPTFGLRTIDGVIITHSHADAIGGLDCLRDWTNNVQSSIPIYVAERDYEVMKMTHYYLIDTSVVIPGAAVSALQFNIIKEEPFMVHNLEVIPLPVWHGQGYRSLGFRFGDVCYISDVSDIPEETYKLLENCELLIMDALRPDRSSSTHFGLPRALEEVRKIKPKKTLFTGMMHLMDHEKVNSDLARLIGTDGLDIQLSYDGLRIPVRL

SEQ ID NO: 2853 - protein, 374 aa, Zea mays
MPRAATGGITAAFLRAQAPHMAPLASRIARAFPGLATAAATRFAPSSSASSPRLGLVPRLRSARSFSGARASPVSGAVSGSSTSEEGQQLQSELIFLGTGTSEGIPRVSCLTHPTKICPVCTKAAEPGNPNRRRNTSILLRHATPSGTTNIVVDAGKFFYHSALQWFPTFGLRTIDGVIITHSHADAIGGLDCLRDWTNNVQSSIPIYVAERDYEVMKMTHYYLVDTSVVIPGAAVSALQFNIIKEEPFMVHNLEVIPLPVWHGQGYRSLGFRFGDVCYISDVSDIPEETYKLLENCELLIMDALRPDRSSSTHFGLPRALEEVRKIKPTKTLFTGMMHLMDHEKVNSDLARLIGTDGLDIQLSYDGLRIPVRL

SEQ ID NO: 2854 - protein, 311 aa, Oryza sativa Japonica Group
MGAERTERSGTFCAVTRGPPVREKQRQQSELIFLGTGTSEGIPRVSCLTNPSKTCTVCTKAAEPGNRNRRRNTSILLRHATPSGTANILIDAGKFFYHSALQWFPAYGLRTIDAVIITHSHADAIGGLDCLRDWTNNVQPTIPIYVAERDYEVMKMTHYYLIDTSVVIPGAAVSALQFNIIKEEPFTVHNLEVIPLPVWHGQGYRSLGFRFGRVCYISDVSDIPKETYKLLEDCELLIMDALRPDRSSSTHFGLPRALEEVRKIKPKKTLFTGMMHLMDHEKVNNELAKLMETEGLDIQLSYDGLRVPVWL

SEQ ID NO: 2855 - protein, 370 aa, Hordeum vulgare subsp. vulgare
MSGATAALLRAHRVPMLHSPFACSLAAARSLGAHLPLRAPAPAAPLSSRLPLARLRSGASPRFFSSSCGAPGSAVSSSAAEHEEPRKSELIFLGTGTSEGVPRVSCLTHPSKTCPVCTKAAEPGNRNRRRNTSILLRHVTPSRTSNILIDAGKFFYHSALQWFPAFGLREIDAVIITHSHADAIGGLDCLRDWTNNVQPSIPIYVAPRDYEVMKMTHHYLVDTSTVIPGAAVSTLQFNIINEEPFTVQDLEVIPLPVWHGQGYRSLGFRFGDICYISDVSDIPDETYKLLEDCQLLILDALRPDRSSSTHFGLPRALEEVRKIKPKRTLFTGMMHLMDHEKVNDDLARLMETEGLDVQLSYDGLSIPVRL

SEQ ID NO: 2856 - protein, 365 aa, Oryza sativa Indica Group
MAGAGAGAGAIAALLRAAHVPPAPRARSIRGLAAARGLPPLVRATAAAIAPSSFCPYLPRLSSARSFSSSTSCSAGASLGGAVSTSPSEQEKQRQQSELIFLGTGTSEGIPRVSCLTNPSKTCTVCTKAAEPGNRNRRRNTSILLRHATPSGTANILIDAGKLRTIDAVIITHSHADAIGGLDCLRDWTNNVQPTIPIYVAERDYEVMKMTHYYLIDTSVVIPGAAVSALQFNIIKEEPFTVHNLEVIPLPVWHGQGYRSLGFRFGRVCYISDVSDIPKETYKLLEDCELLIMDALRPDRSSSTHFGLPRALEEVRKIKPKKTLFTGMMHLMDHEKVNNELAKLMETEGLDIQLSYDGLRVPVWL

SEQ ID NO: 2857 - protein, 539 aa, Sorghum bicolor
MESGGGEILPGPGLLVTSKPGGGRGGWRAALFILGNHADCKSSKMPSPTAAMGFFERIGFVGVSANLIMYLTGPLGMSTAAAAAGVNAWFGTVQVLPIVGALVADSRLGRYRAILAACVLYLLGFGMLTASSMLPTANSPPSASPTRLIIFYVGLYLLALAQGFFGPCGEAFGADQFTPSDSDNPTAPAFRSSYFNWFHFSMSWGYAIATAGLSYVEDNAGWTIGFGACWTAMVLCLTVFLLGTPTYHANQPVDGGTITAETVQKWAARFFRRKDTTPTDERLLLAPQRPEEERGLIAKLLPIWLTSLVFAVIYSQTYTLFTKQASTLDSHLGTATGLVVPPAALQCFIDVTFIVMIPLYDRVIVPFARRLTGHAAGITMLQRIGASMATSCVAMAVAALVEVRRLRVARDAGLVDQPEVALPMSLWWMIPQYVLMGLAAVLGMVGLEEFFYDQVPGTLRSVGLALCLSIFGVGSYASSLLVSLIDWATRSKGESWFSDNLNRGHLDYFYGLLAGLAAVEVAVFMYFANRYVYTNKAEL

SEQ ID NO: 2858 - protein, 487 aa, Zea mays
MLPYIYAVMGFFERIGFVGVSANLITYLTGPLGMSTAAAAAGVNAWSGTVQVLPLVGALVADSRLGRYRAILAACVLYLLSLGMLTASSMMLTASSPPSPSPARLTLFYVALYLLALAQGFFGPCGEAFGADQFTPSDIDDLSAPTLRSSYFNWFHFSMSWGYAIATAGLSYVQDNAGWTLGFGACWTAMVLCLVVFLLGTRTYRAAKQPIDGVQAWVARVFRRSGTTPTDERLLLAPQPEGGLIAKLLPIWLTSLVFAAIYSQTSTLFTKQASTLDRHLGTETGLVVPPAALQCLIDVTFIVMIPLYDRVIVPLARRLTGHASGITMLQRIGASMATSCVAMAVAALVEVRRLRVARDAGLVDRPDVALPMSLWWMIPQYVLMGLAAVLGMVGLEEFFYDQMPDALRSVGLALCLSIFGVGSYASSMLVSVIDWATRVKGESWFSDNLNRAHLDYFYWLLAGLAALEVAVFLHFANRYVYTKKAEL

SEQ ID NO: 2859 - protein, 309 aa, Zea mays
MAATIQYNRSNPAVKRILQEVKEMQSNPSPDFMSLPLEEDIFEWQFAILGPRDSEFEGGIYHGRIQLPSDYPFKPPSFMLLTPSGRFEIQKKICLSISNYHPEHWQPSWSVRTALVALIAFMPTNPGGALGSLDYKPEDRRALAIKSREVPPKFGSPQRQKLIDEIHEQMLSKAPPIPQTLPNVPNEELAPDSCDEHADKVDEGGNTSKSMSGSSSGHPVPEAESLAAENTGEASAVEVANHQVPEASRRESIPRVPSSLQNAAIATQKPKHDRLLTLAALGLTLAIMALVIKKFLKINGLGGFIEGKF

SEQ ID NO: 2860 - protein, 309 aa, Zea mays
  misc_feature (248)..(248): Xaa can be any naturally occurring amino acid
MAATIQYNRSNPAVKRILQEVKEMQSNPSPDFMSLPLEEDIFEWQFAILGPRDSEFEGGIYHGRIQLPSDYPFKPPSFMLLTPSGRFEIQKKICLSISNYHPEHWQPSWSVRTALVALIAFMPTNPGGALGSLDYKPEDRRALAIKSREVPPKFGSPQRQKLIDEIHEQMLSKAPPIPQTLPNVPNEELAPDSCDEHADKVDEGGNTSKSMSGSSSGHPVPEAESLAAENTGEASAVEVANHQVPEAXRRESIPRVPSSLQNAAIATQKPKHDRLLTLAALGLTLAIMALVIKKFLKINGLGGFIEGKF

SEQ ID NO: 2861 - protein, 313 aa, Oryza sativa Japonica Group
MEATAKYNRGNPAVKRILQEVKEMQSNPSPDFMAMPLEEDIFEWQFAILGPRDSEFEGGIYHGRIQLPSDYPFKPPSFMLLTPSGRFEIQKKICLSISNYHPEHWQPSWSVRTALVALIAFMPTPGGGALGSLDFKKEDRRALAIKSRETPPKFGSAERQKVIDEIHEQMLSRAPPVPQLLTNETNEETNQLPASDASDEHAHKAVGGVNTAGSNSDSVNNDLPRPDSESEIVQHIVEGRTEGVSNHSRANLSRENIPRVAPTPQNPVVAIQKPKHDRLLTLAAFGLTLAIMALVIKKFFKINGLAGYIEGKF

SEQ ID NO: 2862 - protein, 312 aa, Oryza sativa Indica Group
MEATAKYNRGNPAVKRILQEVKEMQSNPSPDFMAMPLEDIFEWQFAILGPRDSEFEGGIYHGRIQLPSDYPFKPPSFMLLTPSGRFEIQKKICLSISNYHPEHWQPSWSVRTALVALIAFMPTPGGGALGSLDFKKEDRRALAIKSRETPPKFGSAERQKVIDEIHEQMLGRAPPVPQLLTNETNEETNQLPASDASDEHAHKAVGGVNTAGSNSDSVNNDLPRPDSESEIVQHIVEGRTEGVSNHSRANLSRENIPRVAPTPQNPVVAIQKPKHDRLLTLAAFGLTLAIMALVIKKFFKINGLAGYIEGKF

SEQ ID NO: 2863 - protein, 304 aa, Hordeum vulgare subsp. vulgare
MAAAGKFNRSNPAVKRILQEVKEMQSNPSPDFMALPLEEDIFEWQFAILGPRDSEFEGGIYHGRIQLPSDYPFKPPSFMLLTPSGRFEIQKKICLSISNYHPEHWQPSWSVRTALVALIAFMPTNPGGALGSLDYKKEDRRALAIKSRETPPKFGSPERQSVIDEIHEQMLSKAPLVPQLLTIGSEEETNKTSPDTFDEHDVKAAGVNTSGSSSGSANNTDLPKPDSESEVAENIVGAQSDVIPRDNGPRVVIAPQNPVLTIQKPKHDRLLTLAAFGLTLAIMALVIKKFFKINGLAGYIEGKF

SEQ ID NO: 2864 - protein, 303 aa, Oryza sativa Japonica Group
MEATAKYNRGKPAVKRILQEVKEMQSNPEDIFEWQFAILGPRDSEFEGGIYHGRIQLPSDYPFKPPSFMLLTPSGRFEIQKKICLSISNYHPEHWQPSWSVRTALVALIAFMPTPGGGALGSLDFKKEDRRALAIKSRETPPKFGSAERQKVIDEIHEQMLSRAPPVPQLLTNETNEETNQLPASDASDEHAHKAVGGVNTAGSNSDSVNNDLPRPDSESEIVQHIVEGRTEGVSNHSRANLSRENIPRVAPTPQNPVVAIQKPKHDRLLTLAAFGLTLAIMALVIKKFFKINGLAGYIEGKF

SEQ ID NO: 2865 - protein, 457 aa, Zea mays; identical to SEQ ID NO: 1023

SEQ ID NO: 2866 - protein, 440 aa, Oryza sativa Japonica Group
MASRIASRLLRRSNATLGLIRSYSHARNYSSQLSALIPIGSQSSKLTRRRYYLPNASPYQLWSRSFASDNGDQVEAVVPFMGESVTDGTLANFLKKPGDRVEADEPIAQIETDKVTIDVASPEAGVIEKFIASEGDTVTPGTKVAIISKSAAPAETHVAPSEDSTPKETPPKAEETKPKLEEKSPKAEPPKMPLPPKTSPTEPQLPPKERERRVPMPRLRKRIANRLKDSQNTFAMLTTFNEVDMTNLMKLRSDYKDEFVTKHGVKLGLMSCFVKAAVTALQNQPIVNAVIDGDDIIYRDYVDISVAVGTSKGLVVPVIRDADNMNFADIEKGINALAKKATEGALSIDEMAGGTFTISNGGVYGSLISTPIINPPQSAILGMHSIVQRPVVVDGNILARPMMYLALTYDHRLIDGREAVYFLRRIKDVVEDPRRLLLDI

SEQ ID NO: 2867 - protein, 446 aa, Zea mays
MASRVASGLLRRRAGATLGLLRSYAHVRSYNSQLSALVSATSECSNLPRRCYYLPNPSPYQVWSRSFASDNGDKFEAVVPFMGESVTDGTLANFLKKPGDRVEADEPIAQIETDKVTIDVASPEAGVIEKLIASEGDTVTPGTKVAIISKSAQPAETHVAPSEEATSKESSPPKVEDKPKVEEKAPKVDPPKMQAPKPTAPSKTSPSEPQLPPKERERRVPMPRLRKRIANRLKDSQNTFAMLSTFNEVDMTNLMKLRSDYKDEFVTKHGVKLGLMSCFVKAAVSALQNQPIVNAVIDGDDIIYRDYVDISVAVGTSKGLVVPVIRDADTMNFADIEKGINNLAKKATEGALSIDDMAGGTFTISNGGVYGSLLSTPIINPPQSSILGMHSIVQRPVVVNGDILARPMMYLALTYDHRLIDGREAVFFLRRIKDVVEDPRRLLLDI

SEQ ID NO: 2868 - protein, 446 aa, Zea mays
MASRVASGLLRRRAGATLGLLRSYAHVRSYNSQLSALVSATSECSNLPRRCYYLPNPSPYQVWSRSFASDNGDKFEAVVPFMGESVTDETLANFLKKPGDRVEADEPIAQIETDKVTIDVASPEAGVIEKLIASEGDTVTPGTKVAIISKSAQPAETHVAPSEEATSKESSPPKVEDKPKVEEKAPKVDPPKMQAPKPTAPSKTSPSEPQLPPKERERRVPMPRLRKRIANRLKDSQNTFAMLSTFNEVDMTNLMKLRSDYKDEFVTKHGVKLGLMSCFVKAAVSALQNQPIVNAVIDGDDIIYRDYVDISVAVGTSKGLVVPVIRDADTMNFADIEKGINNLAKKATEGALSIDDMAGGTFTISNGGVYGSLLSTPIINPPQSSILGMHSIVQRPVVVNGDILARPMMYLALTYDHRLIDGREAVFFLRRIKDVVEDPRRLLLDI

SEQ ID NO: 2869 - protein, 446 aa, Zea mays
MHMSEATTVNFQVVTLTSPVFSILFQLLTIIHVFFSALVSATSECSNLPRCYYLPNPSPYQVWSRSFASDNGDKFEAVVPFMGESVTDGTLANFLKKPGDRVEADEPIAQIETDKVTIDVASPEAGVIEKLIASEGDTVTPGTKVAIISKSAQPAETHVAPSEEATSKESSPPKVEDKPKVEEKAPKVDPPKMQAPKPTAPSKTSPSEPQLPPKERERRVPMPRLRKRIANRLKDSQNTFAMLSTFNEVDMTNLMKLRSDYKDEFVTKHGVKLGLMSCFVKAAVSALQNQPIVNAVIDGDDIIYRDYVDISVAVGTSKGLVVPVIRDADTMNFADIEKGINNLAKKATEGALSIDDMAGGTFTISNGGVYGSLLSTPIINPPQSSILGMHSIVQRPVVVNGDILARPMMYLALTYDHRLIDGREAVFFLRRIKDVVEDPRRLLLDI

SEQ ID NO: 2870 - protein, 438 aa, Hordeum vulgare subsp. vulgare
MASRLASRLLLRRPAAVLSLLQSSRHARHFSTQLLEGAPRLPKPTCERYFLRNASPYQIWSRSFASENGDLVEAVVPFMGESVTDGTLANFLKKPGDRVEADEAIAQIETDKVTIDVSSPEAGVIEKFIASEGDTVTPGTKIAVISKSAAPSEAHVAPSEETSQKETPPPPPPEKPKVEQKSPKVESVKTQASKLASPSEPQLPPKERERRVSMPRLRKRIANRLKDSQNTFALLTTFNEVDMTNLMKLRTDYKDEFVKKHGVKLGLMSCFVKAAVSALQNQPIVNAVIDGDDIIYRDYIDVSVAVGTSKGLVVPVIRDTEGMNFADIEKGINSLAKKATEGALSIDEMAGGTFTISNGGVYGSLISTPIINPPQSAILGMHSIVQRPVVVDGDILARPMMYLALTYDHRLIDGREAVLFLRRIKDVVEDPRRLLLDI

SEQ ID NO: 2871 - protein, 450 aa, Oryza sativa Japonica Group
MDDRRGKGLEVDIRGTKHYASYGVINMSDISALSYLKVFMDAHCQLGNDQSEQTSLSFGRYFLSNASPYQPWTRSFASKNGDLVDAVVPFMGESITDGTLATFLKKPGDRVEADEPIAQIETDKVTMDVASPEAGIIEKFVASEGGIVTPGVKVAIISKSAAQSKTHTQSSEDTSQKHSTKPPSTKENKVEAKPPKVESSTTHESKLTSSSEPQLPPKERERRVPMPRLRKRIANRLKDSQNTFAMLITFNEVDMTNLMKLLSDYKDQFVEKHGVKLGLMSCFVKAAVSALQNQPIVNAVIDGDDIIYREYIDISVAVGTSKGLVVLVIHDIDAMNFADIEKGINNLAKKATEGAQSINNMAGGTFTISNGGVYGSLISTPIINSPQSSILGMHSIVQRLVVVNGSVLARPMMYLALMYDHRLIDGREAVLFLRRIKDVVEDPRRLLLDI

SEQ ID NO: 2872 - protein, 413 aa, Oryza sativa Japonica Group
MNGASSGGGGGAGAGGDGPLVYQRWKGNNVFVLQGRFIFGPDARSLYVTMFLIIAPASIFCLFVAKELMNNFSYGLGLPVMISAVVFTAYDLSLLLLTSGRDPGIIPRNAHPPEPEGLDGNAEVGSNQTPPMRLPRVKDVVVNGITVKTKYCDTCMLYRPPRCSHCSICNNCVERFDHHCPWVGQCIGLRNYRFFYMFVFSTTLLCLYVFGFCWVYIVKIRNSEQITIWKAMAKTPASIALLVYTFIAVWFVGGLSVFHLYLMSTNQTTYENFRYRYDQRANPYNRGVMENIKDIFFSAIPASKNNFRARVPVPQEQGLRPRPTNGFMSPNMGRAVGDIEMGRKPVAWDEPRMAADIGDLGAGLGNLLEDKDGRFRSASPDLSRDALAIGGLDDQGSSVMNPGRTSWGVEAGR

SEQ ID NO: 2873 - protein, 432 aa, Oryza sativa Japonica Group
MNGASSGGGGGAGAGGDGPLVYQRWKGNNDMYGVLGSEKDKKHEYLALVFVLQGRFIFGPDARSLYVTMFLIIAPASIFCLFVAKELMNNFSYGLGLPVMISAVVFTAYDLSLLLLTSGRDPGIIPRNAHPPEPEGLDGNAEVGSNQTPPMRLPRVKDVVVNGITVKTKYCDTCMLYRPPRCSHCSICNNCVERFDHHCPWVGQCIGLRNYRFFYMFVFSTTLLCLYVFGFCWVYIVKIRNSEQITIWKAMAKTPASIALLVYTFIAVWFVGGLSVFHLYLMSTNQTTYENFRYRYDQRANPYNRGVMENIKDIFFSAIPASKNNFRARVPVPQEQGLRPRPTNGFMSPNMGRAVGDIEMGRKPVAWDEPRMAADIGDLGAGLGNLLEDKDGRFRSASPDLSRDALAIGGLDDQGSSVMNPGRTSWGVEAGR

SEQ ID NO: 2874 - protein, 408 aa, Oryza sativa Japonica Group
MNGASSGGGGGAGAGGDGPLVYQRWKGNNGRFIFGPDARSLYVTMFLIIAPASIFCLFVAKELMNNFSYGLGLPVMISAVVFTAYDLSLLLLTSGRDPGIIPRNAHPPEPEGLDGNAEVGSNQTPPMRLPRVKDVVVNGITVKTKYCDTCMLYRPPRCSHCSICNNCVERFDHHCPWVGQCIGLRNYRFFYMFVFSTTLLCLYVFGFCWVYIVKIRNSEQITIWKAMAKTPASIALLVYTFIAVWFVGGLSVFHLYLMSTNQTTYENFRYRYDQRANPYNRGVMENIKDIFFSAIPASKNNFRARVPVPQEQGLRPRPTNGFMSPNMGRAVGDIEMGRKPVAWDEPRMAADIGDLGAGLGNLLEDKDGRFRSASPDLSRDALAIGGLDDQGSSVMNPGRTSWGVEAGR

SEQ ID NO: 2875 - protein, 412 aa, Oryza sativa Indica Group
MNGASSGGGGGGAGGDGPLVYQRWKGNNVFVLQGRFIFGPDARSLYVTMFLIIAPAAIFCVFVAKELMDNFSYGLGLPVMIAAVVFTAYDLSLLLLTSGRDPGIIPRNAHPPEPEGLDGNAEVGSNQTPPMRLPRVKDVVVNGITVKTKYCDTCMLYRPPRCSHCSICNNCVERFDHHCPWVGQCIGLRNYRFFYMFVFSTTLLCLYVFGFCWVYIVKIRNSEQVTIWKAMAKTPASIALLVYTFIAVWFVGGLSVFHLYLMSTNQTTYENFRYRYDQRANPYNRGVVENIKEIFFSAIPASKNNFRARVPVPQEQGLRPRPTNGFMSPNMGRAVGDIEMGRKPVAWDEPRMAAEIGDLGAGLGNLLEDKDSRFRNASPDLSRDALAIGGLDDQGSSVMNPGRTSWGVEAGR

SEQ ID NO: 2876 - protein, 406 aa, Zea mays
MNGASAGAGGEAPLVYKAWKGNNVFLLKGRFIFGPDARSLFITMFLIVAPVSIFCAFVAKELMDKFSYGLGLPVMIAAVLFTAYDLSLLLLTSGRDPGIIPRNAHPPEPEGFDGNAEVGANQTPPVRLPRVKDVVVNGITVKTKYCDTCMLYRPPRCSHCSICNNCVERFDHHCPWVGQCIGLRNYRFFYMFVFSTTLLCLYVFGFCWVFIIKIRNAEQITIWKAMTKTPASIALIIYTFIAVWFVGGLSVFHLYLMSTNQTTYENFRYRYDQRDNPYNKGVMENIKEIFFTTIPPSKNNFCGRVEQEHGLRPRPTNGFMSPNMGRAVGDIEMGRKPVAWDEPRMAAEIGDLGAGLSNLLEDKDGRFRTTSPDLSRDALAVGGGLEEHGSSAMNPGRSSWGVEAGR

SEQ ID NO: 2877 - protein, 419 aa, Hordeum vulgare subsp. vulgare
SRRGIAGPGGPAAMNGPSAGAGSGGEGKLVYQAWKGNNVFFLQGRFIFGPDARSLFVTMFLIIAPVTVFCVFVAKELMNGFSYGLGLPVMVVAVVFTAYDLSLLFLTSGRDPGIIPRNAHPPEPEGFEGNAEVGANQTPPLRLPRVKDVVVNGITVKTKYCDTCMLYRPPRCSHCSICNNCVERFDHHCPWVGQCIGLRNYRFFYMFVFSTTLLCLYVFGFSWVYIIKIRDAEQITIWKAMAKTPASIALVVYTFIAVWFVGGLSVFHLYLMSTNQTTYENFRYRYDQRANPYNRGVVENIKEIFFTPIPASRNDFGARVPQEQGLRPRSTNGFMSPNMGRAVGDIEMGRKPVAWDEPRMAAEIGDLGGLGNLLEDKDGRFRNTSPDLSRDALVVGGLDEQGSSVMNPPRTSWGVEAGR

SEQ ID NO: 2878 - protein, 391 aa, Sorghum bicolor
MNGASASAGVGTGAGAAGEAPLVYKAWKGNNVFLLKGRFIFGPDARSLFVTMFLIIAPASIFCAFVAKGLMDRFSYALGLPVMIAAVLFTAYDLSLLLLTSGRDPGIIPRNAHPPEPEGFDGNAEVGANQTPPVRLPRVKDVVVNGITVKTKYCDTCMLYRPPRCSHCSICNNCVERFDHHCPWVGQCIGLRNYRFFYMFVFSTTLLCLYVFGFCWVLIVKIRNAEQITIWKAMAKTPASIALVIYTFIAVWFVGGLSVFHLYLMSTNQKTSKRSSLQQSLLPRTTSVVGSTGAWSEASSTNGFMSPNMGRAVGDIEMGRKPVAWDEPRMAAEIGDLGAGLSNLLEDKDGRFRSASPDLSRDALAVGGGLEEQGSSAMNPGRSSWGVEAGR

SEQ ID NO: 2879 - protein, 870 aa, Oryza sativa Japonica Group
MDLAINPFSSGTRLRDMIRAIRACKTAAEERAVVRRECAAIRAAISEGDQDYRHRNMAKLMFIHMLGYPTHFGQMECLKLIAAAGFPEKRIGYLGLMLLLDERQEVLMLVTNSLKQDLNHSNQFIVGLALCALGNICSAEMARDLSPEVERLLQSREPNTKKKAALCSIRIVRKVPDLAENFMGSAVSLLKEKHHGVLISAVQLCAELCKASKEALEYLRKNCLDGLVRILRDVSNSSYAPEYDIAGITDPFLHIRVLKLMRILGQGDADCSEFVNDILAQVATKTESNKNAGNAILYECVETIMGIEATSGLRVLAINILGRFLSNRDNNIRYVALNMLMKAMEVDTQAVQRHRATILECVKDADVSIRKRALELVYLLVNDANAKSLTKELVDYLEVSDQDFKDDLTAKICSIVEKFSQDKLWYLDQMFKVLSLAGNYVKDDVWHALIVLISNASELQGYSVRSLYKALLACGEQESLVRVAVWCIGEYGEMLVNNVGMLDIEEPITVTESDAVDAVEVSLKRYSADVTTRAMCLVSLLKLSSRFPPTSERIKEIVAQNKGNTVLELQQRSIEFNSIIQRHQSIKSSLLERMPVIDEASYLAKRAASTQATISSDKLAAAATPGSSLKLPNGVAKPPPAPLADLLDLSSDDAPATTSAPTTAPNDFLQDLLGIGLTDTSTAGGAPSASTDILMDLLSIGSSPVQNGPPTVSNFSLPGQAETKVAPVTPQVVDLLDGLSSSTSLSDENTAYPPITAFQSAALKITFNFKKQSGKPQETTIHASFTNLTSNTFTDFIFQAAVPKFIQLRLDPASSNTLPASGNDSVTQSLSVTNNQHGQKPLAMRIRITYKVNGEDRLEQGQINNFPAGL

SEQ ID NO: 2880 - protein, 888 aa, Oryza sativa Indica Group
MDLAINPFSSGTRLRDMIRAIRACKTAAEERAVVRRECAAIRAAISEGDQDYRHRNMAKLMFIHMLGYPTHFGQMECLKLIAAAGFPEKRIGYLGLMLLLDERQENAMFCFEHLVVLNADRDLNHSNQFIVGLALCALGNICSAEMARDLSPEVERLLQSREPNTKKKAALCSIRIVRKVPDLAENFMGSAVSLLKEKHHGVLISAVQLCAELCKASKEALEYLRKNCLDGLVRILRDVSNSSYAPEYDIAGITDPFLHIRVLKLMRILGQGDADCSEFVNDILAQVATKTESNKNAGNAILYECVETIMGIEATSGLRVLAINILGRFLSNRDNNIRYVALNMLMKAMEVDTQAVQRHRATILECVKDADVSIRKRALELVYLLVNDANAKSLTKELVDYLEVSDQDFKDDLTAKICSIVEKFSQDKLWYLDQMFKVLSLAGNYVKDDVWHALIVLISNASELQGYSVRSLYKALLACGEQESLVRVAVWCIGEYGEMLVNNVGMLDIEEPITVTESDAVDAVEVSLKRYSADVTTRAMCLVSLLKLSSRFPPTSERIKEIVAQNKGNTVLELQQRSIEFNSIIQRHQSIKSSLLERMPVIDEASYLAKRAASTQATISSDKLAAAATPGSSLKLPNGVAKPPPAPLADLLDLSSDDAPATTSAPTTAPNDFLQDLLGIGLTDTSTAVQNGPPTVSNFSLPGQAETKVAPVTPQVVDLLDGLSSSTSLSGQILLPYYYLTLWSTYKMSYDSLRVAYAVRCVTRSENTAYPPITAFQSAALKITFNFKKQSGKPQETTIHASFTNLTSNTFTDFIFQAAVPKFIQLRLDPASSNTLPASGNDSVTQSLSVTNNQHGQKPLAMRIRITYKVNGEDRLEQGQINNFPAGL

SEQ ID NO: 2881 - protein, 869 aa, Hordeum vulgare subsp. vulgare
MDLSLNPFSSGTRLRDMIRAIRASKTAAEERAVVRRECAAIRAAISENDQDYRHRNMAKLMFIHMLGYPTHFGQMECLKLIAASGFPEKRIGYLGLTLLLDERQEVLMLVTNSLKQDLNHSNQFIVGLALCALGNICSAEMARDLAPEVERLLQTRDPNTKKKAALCSIRIVRKVPDLAENFMGSAASLLKEKHHGVLISVVQLCTELCKSSREALEYLRKHSVEGLVRILRDVSNSSYAPEYDIAGITDPFLHIRVLRLMRTLGQGDADCSEYVNDILAQVATKTESNKNAGNAILYECVETIMGIEATSGLRVLAINILGRFLSNRDNNIRYVALNMLMKAMAMDTLAVQRHRVTILECVKDADVSIRKRALELVYLLVNDTNVKPLTKELIDYLEVSDDDFKEDLTAKICSIVEKFSQDKLWYLDQMFKVLTLTGNFVKDDVWHALIVLISNASELQGYSVRSLYKALQACGTQESLVRVAVWCIGEYGEMLVNNISMLDVEEPITVTESDAVDALELALKRYSVDVTTRAMCLVALLKLSSRFPSTSKRIQVIVVQNKGNTVLELQQRSIEFNSIIQRHQSIKSSLLERMPVLDEASYLEKRAASSQATVSLTKSTPSAASGGSLKVPNGAVKPPPAPLADLLDLSSDDAPVTTSAPSTAPNDFLQDLLGIGLTDTSTAGGAPSASTDILMDLLSIGSYPVQNGPPATSNISSPGQVTKHAPGTPQVIDLLDGLSPSTPLPDVNAAYPSITAFQSATLKVTFNFKKQPGKPQETTMHASFTNLTSATLTNFMFQAAVPKFIQLRLDPASSSTLPASGNGSITQSLSVTNNQHGQKPLAMRIRISYKVNGEDRLEQGQISNFPAGL

SEQ ID NO: 2882 - protein, 867 aa, Zea mays
MDLAINPFSSGTRLRDMIRAIRACKTAAEERAVVRRECAAIRAAISEGDQDYRHRNMAKLMFIHMLGYPTHFGQMECLKLIAAAGFPEKRIGYLGLMLLLDERQEVLMLVTNSLKQDLNHSNQFIVGLALCALGNICSAEMARDLAPEVERLLQNRDPNTKKKAALCSVRIVRKVPDLAEIFMSAATSLLKEKHHGVLISAVQLCMELCNASNEALEYLRKNCLEGLVRILRDVSNSSYAPEYDIGGITDPFLHIRVLKLMRILGQGDADCSEYINDILAQVSTKTESNKNAGNAILYECVETIMSIEATSGLRVLAINILGRFLSNRDNNIRYVALNMLMKAIAVDTQAVQRHRATILECVKDADVSIRKRALELVYLLVNDTNVKPLTKELVDYLEVSDQDFKEDLTAKICSIVEKFSLDRLWYLDQMFRVLSLAGNHVKDDVWHALIVLVSNASELQGYSVRSLYKALQASSEQESLVRVAVWCIGEYGEMLVNNLSMLDMEEPITVVESDAVDAVEAALQRYSADVTTRAMCLVSLLKLSSRFPPTSERIKEIVAQNKGNTVLELQQRSIEFSSIIQRHQSMKSSLLERMPVLDEANYLVKRAASIQAAVPSVNSAPAITSGGPFKLPNGVGKPAAPLADLLDLSSDDAPVTTSAPTTAPNDFLQDLLGIGLTDSSPIGGAPSTSTDILMDLLSIGSSSVQNGPPTANFSLPGIETKSVAVTPQVVDLLDGLSSGTSLPDENATYPTITAFQSATLRITFSFKKQPGKPQETAISASFTNLATTTFTDFVFQAAVPKFIQLRLDPASSSTLPASGNGSVTQSLSVTNNQHGQKPLAMRIRMSYKVNGEDRLEQGQISNFPAGL

SEQ ID NO: 2883 - protein, 900 aa, Sorghum bicolor
MDTVEKIVEDFASDIALSPFSSGTSLREMIRAIRTCKTAAEERAVVRRECAAIRTAISENEPVLRHRNMAKLMFIHMLGYPTHFAQMECLKLIAATGYPEKRVGYLGLMLLLDERQEVLMLVTNSLKQDLNHTNQFIVGLALCALGNICSAEMARDLSPEVESLMRTRDVNTKKKAALCSIRIVRKVPDLAENFMGLAASLLKEKHHGVLISAIQLCTELCKASRDALEYLRKNCIEGLVRILRDVSNSSYAPEYDVSGIVDPFLHIRVLKLLRILGQGDADCSEYMNDILAQVATKTESNKNAGNAILYECVQTIMGIEATSGLRVLAINILGRFLSNRDNNIRYVALNMLMRAIAVDALAVQRHRTTILECVKDADASIRKRALELVYLLVNDTNVKPLTKELIDYLNIADPDFIGDLTVKICSIVEKFSQEKLWYLDQMFKVLSLAGNHVKDDICYALIVVLSNTAELQGYSVRSLYKALQSFGKQGSLVRVAVWCIGEYGEMLVNNVGMLDGEEPVKVTESDAVGIVEVALNRYSADVTTGAMCLVALLKLSSRFPSMSERVKQIVAQNKENVVLELQQRSIEFTSIIQRHQSIRSSLLERMPVLDEASYLVKRATATQATISADKLAPTVTPGSLKLPNGVAKPTSAPLADLLDLSSDGAPASTVASTTTPNDFLQDLLGIGGVSSSTTGVTSTASTDILMDLLSIGSSPSQNGTPVTDFHHPGQESKPVPAVPEAIDLLGSLSPETKPTPVVPQGMDLLDGLSSNTSVSGLENTTHPSITAFQSATLKITFDFKRKPGNPRETTIHATFTNLTSSTFTDFIFQAAVPKFIELRLDPASGNTVPANGNGSVTQGLNVTNNQQGQKPLAMRIRMSYKVNGKDRLEQGQVSNFPSGL

SEQ ID NO: 2884 - protein, 921 aa, Oryza sativa Indica Group
MDTVEKIVEDFASDIAMGPFSSGTRLRDMIRAIRACKTAAEERAVVRRECAEIREAIGENQQEIRHRNMAKLMFIHMLGYPTHFGQMECLKLIAAAGYPEKRIGYLGLMLLLDERQEVLMLVTNSLKQDLNHSNQFIVGLALCALGNICSAEMARDLSPEVERLMRSREVNTKKKAALCAIRIVRKVPDLAENFMGLASSLLKEKHHGILISAVQLCTELCKASKDALEYLRKNCVEGLVRILRDVSNSSYAPEYDVAGISDPFLHIRVLKLMRILGQGDADCSEYMNDILAQVATKNESNKNAANAILYECVQTIMGIEATSGLRVLAINILGRFLSNRDNNIRYVALNMLMRAITVDTQAVQRHRTTILECVKDADASIRKRALELVFLLVNDTNVKPLTKELVDYLDSADPDFKEDLTAKICSIVEKFSQEKLWYLDQMFKVLSLAGNHVKDDVWHALVVVISNASELQGYSVRLLYMALQAFVDQGSLVRVAVWCIGEYGEMLVNNVGMLQGEEPITVTESDAVDAVQLALNRYSADVTTRAMCLVALLKLSSRFPSTSERIKQIVSQNKKNIVLELQQRSIEFSSIIQRHQSIRPSLLERMPALDEASYLLRRASATQATLAADKPTPAVTPGGLKLPNGVAKPATSPLVDLLDLSSDDVPAITTASTTTAPNDFLQDLLGIGGISSSPAAAPSSASTDILIDLLSIGSSPSQNGPPAADSTPAQAITELFKINVPDTKPVSTISQVGAIVPEATDLLSSLSSSTSVSGTKSAPAVPQDMDLLDGLPSNTSVSGLVNHSSITAFQSATLKINFDFKKQPEKPHETTVHATFTNLTSSSYTDFVFQAAVPKFIQLRLDPASGNIVPASGNGSVTQGFSVTNNQHGQKPLAMRIRMSYKVNGEDRLEQGQVSNFPAGL

SEQ ID NO: 2885 - protein, 875 aa, Ricinus communis
MNPFSSGTRLRDMIRAIRACKTAAEERAVVRKECAAIRAAINENDQDYRHRNLAKLMFIHMLGYPTHFGQMECLKLIASAGFPEKRIGYLGLMLLLDERQEVLMLVTNSLKQDLNHSNQYIVGLALCALGNICSAEMARDLAPEVERLLQFRDPNIRKKAALCSIRIIKKVPDLAENFINPAAALLKEKHHGVLITGIQLCTDLCKVSPEALEYFRKKCTDGLVRTLRDVVNSPYAPEYDIAGITDPFLHIRLLRLLRMLGQGDADASDAMNDILAQVATKTESNKNAGNAILYECVETIMSIEDNGGLRVLAINILGRFLSNRDNNIRYVALNMLMKAITVDAQAVQRHRATILECVKDSDASIRKRALELVYLLVNESNVKPLTKELIEYLEVSDQEFKGDLTAKICSIVEKFSPEKIWYIDQMLKVLTEAGNFVKDEVWHALIVVISNASDLHGYVVRALYKAFQASAEQEILVRVAVWCIGEYGDLLVNNVGVLDIEDTITVTESDAVDVVEIAINRHASDLTTKAMALIALLKLSSRFPSCSQRVKDIIVQNKGSLVLELQQRSLEFNSIIEKHQSIRSALVERMPVLDEATFSGRRAGSLPTTVSTSSGASLNIPNGVAKPSAAPLVDLLDLSDDAPAPSSSGGDFLHDLLGVDLAPGSTQPGSNQAPKAGTNILLDLLSIGTPPVQSSSSTSDLLLSGQDNQTPITTLDALSSPFPSAQVKSSVGASPMMDLLDGFGPSPSKHEENGTVYPSIVAFESSNLRMTFNFSKSPGNPQTTIIQATFANLSPNAFTDFVFQAAVPKFLQLHLDPASSNTLPASGNGSLTQNLRVTNSQHGKKPLVMRIRIAYKMNGKDMLEEGQINNFPRDL

SEQ ID NO: 2886 - protein, 878 aa, Vitis vinifera
MNPFSSGTRLRDMIRAIRACKTAAEERAVVRKECAAIRASVSENDHDYRHRNLAKLMFIHMLGYPTHFGQMECLKLIAAAGFPEKRIGYLGLMLLLDERQEVLMLVTNSLKQDLNHNNQYIVGLALCALGNICSAEMARDLAPEVERLMQFRDPNIRKKAALCSIRIIRKVPDLAENFMHPATNLLKEKHHGVLITGVQLCTEICKVSVEALEHFRKKCTEVLVKVLKDVVNSPYAPEYDIAGITDPFLHIRLLRLLRVLGQGDADASDCMNDILAQVATKTESNKNAGNAILYECVETIMSIEDTSGLRVLAINILGRFLSNRDNNIRYVALNMLMKAITVDAQAVQRHRATILECVKDSDASIRKRALELIYVLVNDSNVKPLAKELIDYLEVSDPEFKGDLTAKICSIVEKFSPEKIWYIDQMLKVLSEAGNFVKDEVWHALIVVISNASDLHGYTVRSLYRAFQASVEQECLVRVAVWCIGEYGEMLVNNVGMLDIEEPITVTESDAVDVIEIAIKRHTSDLTTRAMALIALLKLSCRFPSCSERIRDIIVQCKGSLVLELQQRSIEFNSIIGKHQNIRSVLVERMPVLDEATYNGRRAGSMPATVSMSSGASLNLPNGVAKPPAAPLVDLLDLSSDDTPAPSSSGGDFLHDLLGVDLSVGSSLSGMTQVPKAGTDVLLDLLSIGTPPPAQSSLSTPDILSSSQDNKMPAPTLERLSSPSSISIQASSPAGAAPMMDLLDGFAPNLPLPEDNGPVYPSIVAFESSALRLTFNFSKTPANPQTTLVQASFTNLSPNIFTDFIFQAAVPKFLQLHLDSASGNTLPASGNGSITQNLRVTNSLHGKKPLVMRIRIAYKMNNKDVLEEGQINNFPRDL

SEQ ID NO: 2887 - protein, 473 aa, Sorghum bicolor
MAQKTVILYPSLGVGHLNPMVELAKVFLRRGLAVIIAVVDMPDKDSVSAEALDRLAAANPDIAFRLLPVPSCGTRPYSHPVMRAIDVLRVANPVLLGFLRALPAVDAIVLDMFCTDALDVAAELNTPAYFFFSSALADLAIMLHMPYYYPTAPSSFKDMPDTVLHFPGVPPIRALDMGATMQDRDSDVAKARLSQCARMLEARGILVNSFDWLEARALEALSRGLCTPGRSAPPVHCIGPLVLPGNRGGASERHACLEWLDAQPDQSVVFLSFGSLGTFSAPQLREIARGLESSGQRFLWVVRNPPEHRSNSGEPDLVLEPSLLPEGFLERTRERGFVVKNWAPQSEVLRHRSIGAFVTHCGWNSVLEGIASGVPMICWPLYAEQKMNKVHMVEEIKVGVVMEGYEEELVKAEEVEAKVRLVMSGDGEELRQRLLTAKEMTVEVLKEGGSSDVAFDKFLTDLMKNTCTENSAL

SEQ ID NO: 2888 - protein, 477 aa, Zea mays
MAHKTVILYPSLGVGHLNPMVELAKVFLRRGMAVVMAIVDSPDKDSVSAEALARLAAANPDIAFRHLPVPSRGTERCSTNPVMRAIDVLRAANPALLGFLRALPAVDALVLDMFCTDALDVAAELGVPAYIFFSSALGDLAVMLHLPYYYPTAPSSFKDTPETVLHFPGVPPIRALDMGATMQDRDSDVAKARLSQCARMLEARGILVNSFDWLEARALEALSRGLCTPGRSAPPVHCIGPLVLAGNKGGASERHACLEWLDAQPDRSVVFLSFGSLGRFSMPQLREIARGLENSGQRFLWVVRSPPEHRSNSVEPDLDLEPLLPEGFLERTRERGFAVKNWAPQSEVLRHLSIGAFVTHCGWNSALEGIASGVPMICWPLYAEQKMNKVHMVEELKVGVVMEGYEEELVKAEEVEAKVRLVMAPGSGDGEELRQRLVTAKDMAVEVLKEGGSSHVAFDAFLTDLLKNTRTEKSGFL

SEQ ID NO: 2889 - protein, 463 aa, Sorghum bicolor
MEKQMKTVVLYPSLGVGHLNPMVELGKVFLRSRLSVIIAVVDSPDAMGRLATANPDITFRHLPVPPTGKDKYSHPIMRTIDVLRVANPALRSFLRTLPAIDAVVVDMFCTDALDVAAELDIPAYFFFTSPLGHLAVNVHLPYNFPAVSLKDMPETMLHFPGVPPIRAMDMVTTVQDRESDITRARLRQCARMPEVRGFLVNSFDWLEARALKALRSGLCTPGRSTPPVYCIGPLVPPGNTGGSRERHACLEWLDTQPNRSVVLLSFGSMGIFSEPQLREMARGLESSGHRFLWVVRNPPEHQSSKSIEPDLEALLPDGFLERTREKGLVVKNWAPQMEVLRHDAVGAFITHCGWNSALEGIVSGVPMICWPLYSEQRMNKVHMVEEMKVGVAVQGYEKELVEADQVEAKVRLVMESDEGKKLRKRLAMAKKMAADALKEGGSSYMGLEKFLEGLKKSSPELKA

SEQ ID NO: 2890 - protein, 434 aa, Zea mays
MFLPKHPSPTRPGRTCLQPGVPLVRPRSRIPATTLSERRHLLRSSAAASSSFPSRDSPLSAAKGSSQNKPPDEIRRWKAVSPGMRESADPETETEDPSPPRTALWSARRRARAAWRKVVSWVPRKARSLVLLNLVTLIFASNISVVKQAEALLDPDLFNMLRFTIAAIPFVPLLLKSLRNMQILFRGLELGIWVSVAYLAQAMGLVTAGAGRASFISALTVIIVPFLDGLIGAEVPAHTWFGAFLSLFGVIMLELSGSPPCVGDLLNLLSAFSFAIHMLRTEHISRNIKKENFLTLVGCEVFVVAILSAASYTFKCFTQNVQHWNLKVWSPSELFGMAMLFPWPAILYTGILSTSFCLWAEVAAMRVVSATETAIIYGLEPVWGAAFAWVMLGERWGLTGFVGAIFIMAGSLMVQIYGSILDDVSRGDDYQMNI

SEQ ID NO: 2891 - protein, 446 aa, Zea mays
MASRVASGLLRRRAVATLGLLRSHTHVRNYSSQLSALIPATSQCSNLTRRRYYLPNPSLYQVWSRSFASDSGDKFEAVVPFMGESVTDGTLANFLKKPGDRVEADEPIAQIETDKVTIDVASPEAGVIEKLIASEGDTVTPGTKVAIISKSAQPAETHVAPSEEATSKGSSPPKVEEKSRVEEKAPKVEPPKMQAPKPTAPLKTSPSEPQLPPKERERRVPMPRLRKRIANRLKDSQNTFAMLSTFNEVDMTNLMKLRSDYKDEFVTKHGVKLGLMSCFVKAAVSALQNQPIVNAVIDGDDIIYRDYVDVSVAVGTSKGLVVPVIRDADTMNFADIEKGINNLAKKANEGALSIDDMAGGTFTISNGGVYGSLLSTPIINPPQSSILGMHSIVQRPVVVNGDILARPMMFLALTYDHRLIDGREAVFFLRRIKDVVEDPRRLLLDI

SEQ ID NO: 2892 - protein, 263 aa, Sorghum bicolor
MAWIWMVLAAGAVLLWAISLGRILSYSSPSCVPLSPQFMPPLRGDRRSRNVLLVVAHPDDESMFFAPTILFLKSKGHNIHILCMSRGNADGLGNTRKEELYHACETLKIPHEQVKVLDHPKLQDGFHEQWDHGLVAELTMEHVLLWAIDTIVTFDSYGVSGHPNHKDVHHGICKFLHANRQGNVEAWELASLNILRKYSGPVDIWLSSLISFSRSKQSIYTLVNSSPSRSYEAMAAHRSQWVWFRRLFVMFSSYTYINTLQKI

SEQ ID NO: 2893 - protein, 263 aa, Zea mays
MAWIWMVLAAGAVLLWAISLGRVLSSAAPSCVPSSPQFMPPLSGDRRSRNVLLVVAHPDDESMFFAPTILFLKSKGHSIHILCMSRGNADGLGDTRKEELYHACVSLKIPHEQVKVLDHPKLQDGFHEKWDHGLVAELTMEHVQLWAIDTIVTFDSYGVSGHPNHKDVHHGICKFLHTNRQGNVEAWELASLSILRKYSGPIDIWLSSLTSFAWTKQPIYTLVNSSPSRSYEAMAAHRSQWVWFRRLFVMFSSYTYINMLRRI

SEQ ID NO: 2894 - protein, 263 aa, Sorghum bicolor
MAWIWMVPVAGAVLLWAISLGRILSYPAPSCVPPSPQFMPPLRDDRRSRNVLLVVAHPDDESMFFAPTILFLKSKGHSIHILCMSRGDADGLGNTRKEELYHACDTLKIPHEQVKVLDHPKLQDGFHEKWDHGLVAELTVQHVQLWGIDTIVTFDSYGVSGHPNHKDLHHGVCKFLHANGQGNDETWELASLNILRKYSGPVDIWLSSLISFSRSKQSIYTVVNSRPSKSYEAMAAHRSQWVWFRRLFVIFSSYTYANVLKKI

SEQ ID NO: 2895 - protein, 272 aa, Zea mays
MAWIWMVLAAGAVLLWAISLGRVLSSAAPSCVPSSPQFMPPLSGDRRSRNVLLVVAHPDDESMFFAPTILFLKSKGHSIHILCMSRGNADGLGDTRKEELYHACVSLKFLKQIMSLQIPHEQVKVLDHPKLQDGFHEKWDHGLVAELTMEHVQLWAIDTIVTFDSYGVSGHPNHKDVHHGICKFLHTNRQGNVEAWELASLSILRKYSGPIDIWLSSLTSFAWTKQPIYTLVNSSPSRSYEAMAAHRSQWVWFRRLFVMFSSYTYINMLRRI

SEQ ID NO: 2896 - protein, 261 aa, Hordeum vulgare subsp. vulgare
MAWIWMLSVAGAVLLWAVSLGRILSSPTPYSLPPSPRFLPPLGDRRSRNVLLVLAHPDDESMFFTPTILFLKSKGHNIHVLCMSLGNADGLGDTRKEELYDACATLKIPAEQVAVLDHQKLQDGFHEKWDHGLLAELTMEQIQLWDIDTIVTFDSYGVSGHPNHRDVHHGICKLLHENQQGNIEAWELVSLNMFRKYSGAVDIWLSSLISSSSKQLMYCLVNCSPARTFEAMAAHRSQWVWFRRLFVTLSSYTYVNMLQKI

SEQ ID NO: 2897 - protein, 262 aa, Oryza sativa Indica Group
MAWIWMLMAAGAVLLWAVSLGRVLSSSSPACLPANSTFLSPPRGDRMSRNVLLVLAHPDDESMFFAPTILFLKSKGHSIHILCLSQGNADGLGNIRKEELYLACVTLKIPAEQVKVLDHSELQDGFHKNWDHGLIAELTLAQSQLWNIDTIVTFDSRGVSGHPNHCDVHHGICKLLRDNGQGHIEAWELVSLNIFRKYSGPVDIWLSSTLSSSSKQPTYTLVNNSPSRSFEAMASHKSQWVWFRRLFVLFSSYTYINVLQKI

SEQ ID NO: 2898 - protein, 262 aa, Oryza sativa Japonica Group
MAWIWMLMAAGAVLLWAVSLGRVLSSSSPACLPANSTFLSPPRGDRMSRNVLLVLAHPDDESMFFAPTILFLKSKGHSIHILCLSQGNADGLGNIRKEELYLACVTLKIPAEQVKVLDHSELQDGFHKNWDHGLIAELTLAQSQLWNIDTIVAFDSRGVSGHPNHCDVHHGICKLLRDNGQGHIEAWELVSLNIFRKYSGPVDIWLSSTLSSSSKQPTYTLVNNSPSRSFEAMASHKSQWVWFRRLFVLFSSYTYINVLQKI

SEQ ID NO: 2899 - protein, 429 aa, Zea mays
MRLPAGARLALLLARRSLSSSPRIPRAHTGIWSEAPSRSSPFSPPSSARRSFHGTRPVAARDYYDVLGVSKSASQAEIKKAYYGLAKKLHPDTNKGDADAERKFQEVQRAYETLKDEQKRSLYDQVGPDQYEKTASGGGGTGFEGGFGNPFEDIFGGGGGGGGMNDFFRNIFGDRDFGGRDVKVALELSFVEAVQGCSKTVTFQTSVTCEICGGAGVPPGTTPETCLSCRGSGFIFMQTGPFRMQSTCTKCGGSGKTVKEFCKACRGNKVVPGRKSVRLDILPGSDNEDTIKVVRSGGEDPDGRPGDLYVTLEVREDPVFRREKGDIHVDAVLNVTQAILGGTVQVPTLSGDVVLKIKPGTQPGQKVVLRGKGIKTRNSPYHGDQYVHFNVNIPENLTSRQRELIEEFAKEEQGEDEKDAKAAAGASGG

SEQ ID NO: 2900 - protein, 429 aa, Zea mays
  misc_feature (158)..(158): Xaa can be any naturally occurring amino acid
  misc_feature (160)..(160): Xaa can be any naturally occurring amino acid
MRLHAGARLALLLARRSLSSSPRIPRVHTGIRSEAPSRSSPFYPPSSARRSFHGTRPVAARDYYDVLGVSKSASQAEIKKAYYGLAKKLHPDTNKGDADAERKFQEVQRAYETLKDEQKRSLYDQVGPDQYEKTASGGGGTGFEGGFGNPFEDIFGGXGXGGGMNDFFRNIFGDRDFRGRDVKVALELSFMEAVQGCSKTVTFQTSVTCEICGGAGVPPGTTPETCLSCRGSGFIFMQTGPFRMQSTCTKCGGSGKTVKEFCKACRGNKVVPGRKSVRLDILPGLDNEDTIKVVRSGGEDPDGRPGDLYVTLEVREDPVFRREKGDIHVDAVLNVTQAILGGTVQVPTLSGDVVLKVKPGTQPGQKVVLRGKGIKTRNSPHYGDQYVHFNVNIPENLTSRQRELIEEFAKEEQGEDEKDAKAAAGASGG

SEQ ID NO: 2901 - protein, 429 aa, Zea mays
MRLHAGARLALLLARRSLSSSPRIPRVHTGIRSEAPSRSSPFYPPSSARRSFHGTRPVAARDYYDVLGVSKSASQAEIKKAYYGLAKKLHPDTNKGDADAERKFQEVQRAYETLKDEQKRSLYDQVGPDQYEKTASGGGGTGFEGGFGNPFEDIFGGGGGGGGMNDFFRNIFGDRDFRGRDVKVALELSFMEAVQGCSKTVTFQTSVTCEICGGAGVPPGTTPETCLSCRGSGFIFMQTGPFRMQSTCTKCGGSGKTVKEFCKACRGNKVVPGRKSVRLDILPGLDNEDTIKVVRSGGEDPDGRPGDLYVTLEVREDPVFRREKGDIHVDAVLNVTQAILGGTVQVPTLSGDVVLKVKPGTQPGQKVVLRGKGIKTRNSPHYGDQYVHFNVNIPENLTSRQRELIEEFAKEEQGEDEKDAKAAAGASGG

SEQ ID NO: 2902 - protein, 435 aa, Sorghum bicolor
MRLPAGARLALLLARRSLSSSASSSSRLPRAHRGIWSDAARVVPSRSSPFSSPSSAHRFFHGTRPVAARDYYDVLGVSKNASQSDIKKAYYGLAKKLHPDTNKGDADAERKFQEVQRAYETLKDEQKRSLYDQVGPDQYEKAASGGGGTGFEGGFGNPFEDIFSGGGGSGGMNDFFRNIFRDRDFGGRDVKVALELSFMEAVQGCSKTINYQTSVKCETCGGAGVPPGTKPETCPSCRGSGFMFMQTGPFRMQSTCTKCGGSGKTVKEFCKTCRGNKVVPGTKSVHLDILAGSDNEDTIKVVRSGGEDPDGRPGDLYVTLKVREDPVFRREKGDIHVDAVLNVTQAILGGTVQVPTLSGDVVLKVKPGTQPGQKVVLRGKGIKARNSPYYGDQYVHFNVTIPMNLTPRQRVLIEEFAKEEQGEDEKDAKAAGASG

SEQ ID NO: 2903 - protein, 442 aa, Oryza sativa Japonica Group
MRLPGDARLALLLARRRALPSSSPAASASPFHGSRAHGARWGDAFRAAAPAWRSPFSSPTSARLFHGTRPVAARDYYDVLGVSRNASQGEIKKAYYALAKKLHPDTNKGDSDAERKFQEVQRAYETLKDDQKRSLYDQVGPDQYEKASAGGGPGGAYEGGFGNPFEDIFGGGGGGGGMNDFFRNIFREREFSGHDAKVALEISFMEAVQGCTKTINFQTAVTCDTCKGAGVPPGTKPETCLACRGSGFIFMQTGPFRMQSTCTQCGGSGKTVKEFCKSCKGRKVVPGTKNIRLNIVPGTDDGDVIKLVRSGGADPDGGSPGDLYVTLKVREDPVFRREKGDIHVDAVLNVTQAILGGTVQVPTLSGDVVLKVKPGTQPGQKVVLRGKGIKTRNSSYYGDQYVHFNVNIPANLTPRQRVLIEEFAKEEQAEEEKDAKAAGASG

SEQ ID NO: 2904 - protein, 334 aa, Sorghum bicolor; identical to SEQ ID NO: 1024

SEQ ID NO: 2905 - protein, 334 aa, Zea mays
MSVGSRRRPPPPHHHRRAMTPASSVSVPAPVPAPPKPLYLRGPVIAGAVALAAFLLLAAAYATRRAGSPPAALLSHPAVSTRFFSFDLVREYPHDPAAFTQGILYAGNDTLFESTGLYGRSSVRKVELQTGKVLVNHQMDGDVFGEGLTLLGDRLFQVTWLKNDGFIYDRHNFSKCTSFTHKMRDGWGLATDGKVLFGSDGTSMLYKLDSKSLEVMKVVTVKYHGNQVPYLNELEYIDGEVWANVWQTDCIARVSPEDGLVVGWIFLHELRRQLWNSGNTNIDVLNGIAWDERRHRLFVTGKLWPKLYEIKLRAVDGPADGSVEKLCPKASFYR

SEQ ID NO: 2906 - protein, 316 aa, Zea mays
MTPASSVSVPAPVPAPPKPLYLRGPVIAGAVALAAFLLLAAAYATRRAGSPPAALLSHPAVSTRFFSFDLVREYPHDPAAFTQGILYAGNDTLFESTGLYGRSSVRKVELQTGKVLVNHQMDGDVFGEGLTLLGDRLFQVTWLKNDGFIYDRHNFSKCTSFTHKMRDGWGLATDGKVLFGSDGTSMLYKLDSKSLEVMKVVTVKYHGNQVPYLNELEYIDGEVWANVWQTDCIARVSPEDGLVVCWIFLHELRRQLWNSGNTNIDVLNGIAWDERRHRLFVTGKLWPKLYEIKLRAVDGPADGSVEKLCPKASFYR

SEQ ID NO: 2907 - protein, 342 aa, Oryza sativa Japonica Group
MPRRRALPPHRRATATATAMPPANLSISAPSAAAAPPPPLYLRRLPLIAAAALLFLLVIVVLAAAHPYGYAPWLANAAPAALLRRPVSTTFYSFDLLREYPHDPYAFTQGLLYGGNDTFFESTGLYHRSSVRRVDLKTGKVLVQHEMDGRLFGEGLTLLNDKLFQVVWMKNQGFIYDRHNFSKRESFTHKMSDGWGLATDGKVLFGSDGTSRLYQLDPKSIQVMKTVTVKYQDNEVPYLNELEYINGEVWANVWQTDCIARVSHEDGLVVGWIFLHELRQHLWNSGNTEIDVLNGIAWDEENQRLFVTGKLWPKIYEIKLRPVDGPQDGSVEKLCPKASFYR

SEQ ID NO: 2908 - protein, 388 aa, Zea mays; identical to SEQ ID NO: 1025

SEQ ID NO: 2909 - protein, 395 aa, Sorghum bicolor
MIHLRKRIVSLLPRTPTRVPCPHNSPLFYPHRLLSATKCVATTTNQFAVEDYLVATCGLTRAQALKASLRISHLKDASRPDAVVAFLSNLGLSSAEVTAVVTRDPKVLCSDVERTLTARVAELTDLGLSRPEIIRLLIVGMNHFRHGSLRLNVEFWISVFGSLDELMRVLRINNVLLSKNIEKVCKPNLALIQKCGIDVSEIPKSFMSRVLTVDPKRLLEALAHLHEYRIQQGSQLFIRGLYTFAILGSEKITKRIQLFEKLGWSKDHIVSAVKSDPNILGFTEERVRRSMEFLIGVVGLEVQYIAQRPALITCSIDRRLLPRNCLMNFLRAKGLFNDKPTFFSVASLSDKKFRRRYVHPYEERFPGLAAAFASSSAGEHQWERLYKMTGENRES

SEQ ID NO: 2910 - protein, 244 aa, Zea mays
MAWIWMVLAAGAVLLWAISLGRVLSSAAPSCVPSSPQFMPPLSGDRRSRNVLLVVAHPDDESMFFAPTILFLKSKGHSIHILCMSRGNADGLGDTRKEELYHACVSLKIPHEQVKVLDHPKLQDGFHEKWDHGLVAELTMEHVQLWAIDTIVTFDSYGVSGHPNHKDVHHGICKFLHTNRQGNVEAWELASLSILRKYSGPIDIWLSSLTSFAWTKQPIYTLVNSSPSRSYEAMAAHRKSVGLV

SEQ ID NO: 2911 - protein, 302 aa, Zea mays; identical to SEQ ID NO: 1026

SEQ ID NO: 2912 - protein, 263 aa, Sorghum bicolor; identical to SEQ ID NO: 2894

SEQ ID NO: 2913 - protein, 1135 aa, Zea mays
MDLSRFASGVGPSRVAPRAGLQIGAAENGFRACSLRRARHRGGGNGNLTAAASTLRGRGGLFYLAPTRRSHPSLRLFYLLPTRGSHLSLRARWRPRCQGNDSLAYVDGPLETAKGSGEVDDNVPTSSGSDDDRGLADVDGLREMLQRSRNELEVARVNSTMFEEKAQRISESAIAFKDRADGAQRDVCAAVATVQEIISKEADAKEAVQKATMALSMAEARLQLAAEALEANRGSVGPTEVSIEGMEQEALLSAQEEIKDCRAALSRCAEELSRVQDKKMELQKEVDRLTDLAGKAQMDASNAEEDVANIMVLAEQAVALEMEASQRVNDAEMVLLKAEKAIASIDTVVELPSPAEEQRSTEEDSVSEGYEYSSDVTDDVYVRDEVSSIERLMVGDLTVQGFEQLEPSREIYDEESSNKMSVEPQKEAESDSDKSKQGKKQEMERKEHTKEPLSAPKALVKRSSRFFSASFFSSKVDGEFTPTSVFRGLMKSVQKQAPKLVVGILLLGAGAFFLNRAEKSQLFQQQGIATSIGKVTSTTKPIVLEIRRIPQRVKKLIELLPHQEVNEEEASLFDILYLLLASVIFVPLFQKIPGGSPVLGYLAAGVLIGPYGLSIIRNVHETKAIAEFGVVFLLFNIGLELSVERLSSMKKYVFGLGSAQVLATTAAVGVIAHCFAALPGPAAIVVGSGLALSSTAVVLQVLQERGESTSRHGRATFSVLLFQVGFQAIAEAMGMAAVKAVAAITAIIAGGRLLLRPIYKQIAENQNAEIFSANTLLVIFGTSLLTARAGLSMALGAFLAGLLLAETEFSLQVESDIAPYRGLLLGLFFMTVGMSIDPKLLLSNFPAISVILSLLIIGKTLLVTFVGRVFGVSAIAAIRVGLLLAPGGEFAFVAFGEAVNQVSSTLDLLLMYTIVDHRNIYNCFVGISMALTPWLAAGGQFLASKFEQHDVRSLLPVESETDDLQDHIIILGFGRVGQIIAQLLSERLIPFVALDAGSDRVAAGRALDLPVYFGDSGSREVLHKIGAERACAAAITLDTPGANYRAVWALNKYFPNVKTFVRAHDVDHGVNLEKAGATAVVPETLEPSLQLAAAVLAQASFQARLPMSEIQETINEFRNRHLSELTEVCNYVIIQ

SEQ ID NO: 2914 - protein, 1162 aa, Zea mays
MDLSRFASGVGPSRVAPRAGLQIGAAENGFRACSLRRARHRGGGNGNLTAAASTLRGRGGLFYLAPTRRSHPSLRLFYLLPTRGSHLSLRARWRPRCQGNDSLAYVDGPLETAKGSGEVDDNVPTSSGSDDDRGLADVDGLREMLQRSRNELEVARVNSTMFEEKAQRISESAIAFKDRADGAQRDVCAAVATVQEIISKEADAKEAVQKATMALSMAEARLQLAAEALEANRGSVGPTEVSIEGMEQEALLSAQEEIKDCRAALSRCAEELSRVQDKKMELQKEVDRLTDLAGKAQMDASNAEEDVANIMVLAEQAVALEMEASQRVNDAEMVLLKAEKAIASIDTVVELPSPAEEQRSTEEDSVSEGYEYSSDVTDDVYVRDEVSSIERLMVGDLTVQGFEQLEPSREIYDEESSNKMSVEPQKEAESDSDKSKQGKKQEMERKEHTKEPLSAPKALVKRSSRFFSASFFSSKVDGEFTPTSVFRGLMKSVQKQAPKLVVGILLLGAGAFFLNRAEKSQLFQQQGIATSIGKVTSTTKPIVLEIRRIPQRVKKLIELLPHQEVNEEEASLFDILYLLLASVIFVPLFQKIPGGSPVLGYLAAGVLIGPYGLSIIRNVHETKAIAEFGVVFLLFNIGLELSVERLSSMKKYVFGLGSAQVLATTAAVGVIAHCFAALPGPAAIVVGSGLALSSTAVVLQERGESTSRHGRATFSVLLFQVGFQAIAEAMGMAAVKAVAAITAIIAGGRLLLRPIYKQIAENQNAEIFSANTLLVIFGTSLLTARAGLSMALGAFLAGLLLAETEFSLQVESDIAPYRGLLLGLFFMTVGMSIDPKLLLSNFPAISVILSLLIIGKTLLVTFVGRVFGVSAIAAIRVGLLLAPGGEFAFVAFGEAVNQVSSTLDLLLMYTIVDHRNIYNCFVGISMALTPWLAAGGQFLASKFEQHDVRSLLPVESETDDLQDHIIILGFGRVGQIIAQLLSERLIPFVALDAGSDRVAAGRALDLPVYFGDSGSREVLHKIGAERACAAAITLDTPGANYRAVWALNKYFPNVKTFVRAHDVDHGVNLEKAGATAVVPETLEPSLQLAAAVLAQASFQAKLPMSEIQETINEFRNRHLSELTELCATSGSSLGYGFSRATSKSKSFTSDDENQTVDGTLAI

SEQ ID NO: 2915 - protein, 1167 aa, Sorghum bicolor
MDLSRFASGVGPSRAAPRAGLQIGAAGNGFRPCTQRRARHRGGGGGYGSLTSTAAAAALRGRGGLFYLAPTRGSPPLSLRARGRPPRCQGNDSLAYVDGPLEAAKDSGEVTDEEATSSGSDDERGPGPADVDRLREMLHRSRNELEVARLNSTMFEEKAQRISESAIALKDRADGAQRDVSAAVATVQEIIGKEADAKEAVQKATMALSMAEARLQLAAEALEAKRGSVGPMEVSIEGVEEEALVSAQEEIKDCRMALSRCEEELGRVQDKKMELQKEVDRLTELAEKAQLDASKAEEDVANIMVLAEQAVALEMEAAQRVNDAEMLLGKAEKAISSVDTVVELTSSAEEQKSTEEDSISEGYEYSSDATDDVSVRDEVSSIERLMVGDLTVEGIEQLEPSREIYDEASSDKTSVEPQKEAEPDSDKSKQGKKQEMERKEVTKEPLSAPKALVKRSSRFFPASFFSSKVDGEFTPTSVFRGLMKSVQKQVPKLVVGILLLGSGAFFLNRAEKSQLFQQQGIATSIGKVTSTTKPIVREIRQIPQRVKKLIELLPHQEVNEEEASLFDILYLLLASVIFVPLFQKIPGGSPVLGYLAAGVLIGPYGLSIIRNVHGTKAIAEFGVVFLLFNIGLELSVERLSSMKKYVFGLGSAQVLATTAAVGMIAHRFAALPGPAAIVVGSGLALSSTAVVLQVLQERGESTSRHGRATFSVLLFQDLAVVVLLILIPLISPNSSKGGVGFQAIAEAMGMAAVKAVAAITAIMSGGRLLLRPIYKIIAENRNAEIFSANTLLVIFGTSLLTARAGLSMALGAFLAGLLLAETEFSLQVESDIAPYRGLLLGLFFMTVGMSIDPKLLLSNFPAISVILGLLIFGKTLLVTFVGRVFGVSTIAAIRVGLLLAPGGEFAFVAFGEAVNQGLLSPQLSSLLFLVVGISMALTPWLAAGGQFLASKFEQHDVRSLLPVESETDDLQDHIIILGFGRVGQIIAQLLSERLIPFVALDVRSDRVAVGRALDLPVYFGDAGSREVLHKVGAERACAAAITLDTPGANYRAVWALSKYFPNVKTFVRAHDVDHGVNLEKAGAMAVVPETLEPSLQLAAAVLAQAKLPMSEIQETISEFRNRHLSELTELCATTGSSLGYGFSRVTSKSKSVTPDDESETVDGALAI

SEQ ID NO: 2916 - protein, 1154 aa, Oryza sativa Japonica Group
MDLSRFTAPRPGLQIGAAGNGFRACSLRRLRYRVCGGNPMGASALGGCGSRSLFYLAPNHGSPLALRTRGRALRCQGNDSLAYVDGPLEGTNGSVVDNTEDEANSSGLDEEKGDDDAENLRDLLQKARKELEVARLNSTMFEEKAQRISESAIALKDRADKAQSDVSSAVTTIQEIISKEADAKEAVRTATMALSMAEARLQLASEALDAKRGSVGPMEVSIDDVEEEALASAQEEIKECQESLSKCEEELRRIQEKKMELQKEVDRLTELAERALLDASKAEEDVANIMVLAEQAVALEMEAAQRANDAELALQKAEKAISSVDAVVELPAPAEEQVSDEEDNVSEVYDYSSDAIDDIPERDEVSNVERLTVGDLAVEGIEQLESSREMSDDESTDKLLVEPQKEAEPDIDKSKQGKKQEIERKESQPSNAPKASLKRSSRFFPASFFSSKADGEFTPTSVFKGLMKSTRKHAPKLVVGIVLLGAGAFFLNRAEKSSQLFQQQEITTSIEEVTSTAKPIVREMRKIPQRVKKLIELLPHQEVNEEEASLFDILYLLLASVVFVPLFQKIPGGSPVLGYLAAGVLIGPYGLSIIRHVHGTKAIAEFGVVFLLFNIGLELSVERLSSMKKYVFGLGSAQVLATTAAVGMIAHRFAVLPGPAAIVIGSGLALSSTAVVLQVLQERGESTSRHGRATFSVLLFQDLAVVVLLILIPLISPNSSKGGVGFQAIAEAMGMAAVKAIAAITAIIAGGRLLLRPIYKQIAENRNAEIFSANTLLVIFGTSLLTARAGLSMALGAFLAGLLLAETEFSLQVESDIAPYRGLLLGLFFMTVGMSIDPKLLLSNFPAISVILGLLIIGKTMLVTFIGRVFGISTIAAVRVGLLLAPGGEFAFVAFGEAVNQGLLSPQLSSLLFLVVGISMALTPWLAAGGQFLASKFEQHDVRSLLPVESETDDLQDHIIILGFGRVGQIIAQLLSERLIPFVALDVRSDRVAVGRALDLPVYFGDAGSREVLHKVGAERACAAAITLDTPGANYRAVWALSKYFPNVKTFVRAHDVDHGVNLEKAGATAVVPETLEPSLQLAAAVLAQAKLPMSEIAATVNEFRNRHLSELTELCATSGSSLGYGYSRVMSISKSKTVTSDDESETVDGALAI

SEQ ID NO: 2917 - protein, 1146 aa, Hordeum vulgare subsp. vulgare
MDLSRFASPRPPGLQQIGAAAFRARGACSLRRPRHRGNLTVASALRGATGLFYAAAAPNHARLRLRRRCQGNDSLAYVDGPLEGTKGSSSSAAEAVDDAAGSDGDERARSAAAAVDVDGLRDLLQKARKELDVARLNSTMFEGKAQRISESAIALKDRADSAQTEVSSAVATVQEIISKEDDAKEAVRKATMALSMAEARLQLAAEALDAKRGSVGQLEVSLDDVEEEALASAQEEIKGCQASLSKCEEELGRIQGKKMELQKEVDRLTELAERALLDASKAEEDVSNIMVLAEQAVALEMEAAKRANDAELALQKAEKAVESVVELVPAADGHMSDEEDDLSDVYDYSGDGMLDISERDEVSDVERLMQIGDLAAEGIEPLEPSNEMPIEERTDKLLVEPQKEAEPDVVKPKQGKKQDTERKESSKSSLKRSSRFFSASFFSSKSDGEFTPTSVFRGLMISARKQAPALVAGILLIGAGAFFFNRAEKSSQLFQQPGIATTSIEEVTSTAKPVFREIRQLPQRIKKLIALLPHQEVNEEEASLFDVLYLLLASVVFVPLFQKIPGGSPVLGYLAAGVLIGPYGLSIIRNVHGTKAIAEFGVVFLLFNIGLELSVERLSSMKKYVFGLGSAQVLVTTAVVGLAAHRFAALPGPAAIVVGSGLALSSTAVVLQVLQERGESTSRHGRATFSVLLFQDLAVVVLLILIPLISPNSSKGGVGFQAILEAMGMAAVKAIAAITAIIAGGRLFLRPIYRQIAENRNAEIFSANTLLVIFGTSLLTARAGLSMALGAFLAGLLLAETEFSLQVESDIAPYRGLLLGLFFMTVGMSIDPKLFLSNFPAISLILGLLIIGKTLLVTFIGRVFGISTISAVRVGLLLAPGGEFAFVAFGEAVNQGLLSPQLSSLLFLVVGISMAMTPYLAAGGQFLASKFEQHDVRSLLPVESETDDLQGHIIILGFGRVGQIIAQLLSERLIPFVALDVRSDRVAVGRALDLPVYFGDAGSREVLHKVGAERACAAAITLDTPGANYRAVWALSKYFPNVKTFVRAHDVDHGVNLEKAGASAVVPETLEPSLQLAAAVLAQAKLPMSEIATTINEFRNRHLSELTELCSTSGSSLGYGFSRVMSKTKPLVSDDESDPIDGALAI

SEQ ID NO: 2918 - protein, 1146 aa, Hordeum vulgare subsp. vulgare
MDLSRFASPRPPGLQQIGAAAFRARGACSLRRPRHRGNLTVASALRGATGLFYAAAAPNHARLRLRRRCQGNDSLAYVDGPLEGTKGSSSSAAEAVDDAAGSDGDERARSAAAAVDVDGLRDLLQKARKELDVARLNSTMFKGKAQRISESAIALKDRADSAQTEVSSAVATVQEIISKEDDAKEAVRKATMALSMAEARLQLAAEALDAKRGSVGQLEVSLDDVEEEALASAQEEIKGCQASLSKCEEELGRIQGKKMELQKEVDRLTELAERALLDASKAEEDVSNIMVLAEQAVALEMEAAKRANDAELALQKAEKAVESVVELVPAADGHMSDEEDDLSDVYDYSGDGMLDISERDEVSDVERLMQIGDLAAEGIEPLEPSNEMPIEERTDKLLVEPQKEAEPDVVKPKQGKKQDTERKESSKSSLKRSSRFFSASFFSSKSDGEFTPTSVFRGLMISARKQAPALVAGILLIGAGAFFFNRAEKSSQLFQQPGIATTSIEEVTSTAKPVFREIRQLPQRIKKLIALLPHQEVNEEEASLFDVLYLLLASVVFVPLFQKIPGGSPVLGYLAAGVLIGPYGLSIIRNVHGTKAIAEFGVVFLLFNIGLELSVERLSSMKKYVFGLGSAQVLVTTAVVGLAAHRFAALPGPAAIVVGSGLALSSTAVVLQVLQERGESTSRHGRATFSVLLFQDLAVVVLLILIPLISPNSSKGGVGFQAILEAMGMAAVKAIAAITAIIAGGRLFLRPIYRQIAENRNAEIFSANTLLVIFGTSLLTARAGLSMALGAFLAGLLLAETEFSLQVESDIAPYRGLLLGLFFMTVGMSIDPKLFLSNFPAISLILGLLIIGKTLLVTFIGRVFGISTISAVRVGLLLAPGGEFAFVAFGEAVNQGLLSPQLSSLLFLVVGISMAMTPYLAAGGQFLASKFEQHDVRSLLPVESETDDLQGHIIILGFGRVGQIIAQLLSERLIPFVALDVRSDRVAVGRALDLPVYFGDAGSREVLHKVGAERACAAAITLDTPGANYRAVWALSKYFPNVKTFVRAHDVDHGVNLEKAGASAVVPETLEPSLQLAAAVLAQAKLPMSEIATTINEFRNRHLSELTELCSTSGSSLGYGFSRVMSKTKPLVSDDESDPIDGALAI

SEQ ID NO: 2919 - protein, 374 aa, Sorghum bicolor
MFLPKHPSSSRPWRPSLQPGAHLIRPRPRIPATTSSGRRHLLRPSAAASSGSPSRDSPLPVPPAKRSSKNKAPDEIGRSKAVRPGMRESAGPETETEDPSPQRTALWSARRRARAAWRKVASWVPSKARSLVLLNLVTLIFASNISVVKQAEALLDPDLFNMLRFTIAAIPFVPLLLKSLRDMQILFRGIELGIWVSLAYLAQAMGLVTADAGRASFISALTVIIVPFLDGLIGAEVPAHTWFGAFLSLLGVAMLELSGSPPCIGDLLNLVSAFSFAIHMLRTEHISKNIKEENFLTLVGCEVAAMRDVSATETAIIYGLEPVWGAAFAWAMLGERWGTTGFVGAILIIAGSLMVQIFGAIPDVSRGDNYQMNS

SEQ ID NO: 2920 - protein, 395 aa, Zea mays; identical to SEQ ID NO: 1027

SEQ ID NO: 2921 - protein, 698 aa, Zea mays
MDFGDDVMDGGSDAQRRKKRYHRHTPRQIQQLEAMFKECPHPDENQRMQLSRELGLEPRQIKFWFQNRRTQMKAQHERQDNCFLRAENDKIRCENIAMREALRSVICPTCGGPPVADDYFDEQKLRMENARLKEELDRVSSLTSKYLGRPITQLPPAQAALSMSSLDLSVGGLGSPSLDLDLLSGGSSGYPPFHLPMSVSEMERPMMAEMATRAMDELIRMAQAGEHLWVKAGGREVLNVDTYDSVFAKPGAASFRGPDVHVEGSRDSGLVFMSAVGLVDMFMDSSKWTEFFPAIVSKARTVDVLVNGMAGRSESLVLMYEELHVMSPVVPTREFCFLRYCRQIERGLWAIADISVDLQQHDARFGAPPSRSCRLPSGCLIADMADGSSKVTWVEHMEIEDRVPIHLLYRDLILSGAALGAHRWLAALQRACERCACLVPAGMPHRDIAVAGVTPEGKRSMMKLSQRMVSSFCASLSASQLHRWTTLSGPSDVGVRVTVHRSTDPGQPSGVVLSAATSIWLPVPCDRVFAFVRDEHRRSQWDVLSHGNPVQEVSRIPNGSHPGNCISLLRGLNASQNSMLILQESCTDGTGSLVVYAPIDIPAANVVMSGEDPSAIPLLPSGFTILPDGRPGAPSSSSAGGPLVGSPAAAGSLVTVAFQILVSSLPSSRLNAESVATVNSLISTTVEQIKAALNCASH

SEQ ID NO: 2922 - protein, 707 aa, Sorghum bicolor
MDFGDDVMDGGSDAQRRKKRYHRHTPRQIQQLEAMFKECPHPDENQRMQLSRELGLEPRQIKFWFQNRRTQMKAQHERQDNCFLRAENDKIRCENIAMREALRTVICHTCGGPPVTDDYFDEQKLRMENARLKEELDRVSSLTSKYLGRPITQLPPVQPLSMSSSLDLSVGGLGSPALGPSLDLDLLSGGSSGYPPFHLPMTVSEMERPMMAEMATRAMDELIRMAQAGEHLWVKTAGGGPDGREVLNVDTYDSIFAKPGGSFRGPDVHVEGSRDSGLVFMSAIGLVDMFMDSSKFTEFFPAIVSKARTMDVLVNGMAGRSDSLVLMYEELHMMSPVVPTREFCFLRYCRQIEHGLWAIADISVDLQQRDARFGAPPSRSCRLPSGCLIADMADGSSKVTWVEHMEIEDRVPIHLLYRDLILSGAAFGAHRWLAALQRACERCACLATAGMPHRDIAAAGVTPEGKRSMMKLSQRMVSSFCASLSASQLHRWTTLSGPNDVGVRVMVHRSTDPGQPSGVVLSAATSIWLPVPCDRVFAFVRDEHTRSQWDVLSHGNPVQEVSRIPNGSHPGNCISLLRGLNASQNSMLILQESCTDASGSLVVYAPIDIPAANVVMSGEDPSAIPLLPSGFTILPDGRPGASSSSSSAAGGTLGATAAAGSLVTVAFQILVSSLPSSKLNAESVATVNSLISTTVEQIKAALNCASH

SEQ ID NO: 2923 - protein, 685 aa, Hordeum vulgare subsp. vulgare
MDFGDDLAPGSDAHRRKKRYHRHTPRQIQQLEAMFKECPHPDENQRMHLSRELGLEPRQIKFWFQNRRTQMKAQHERADNCFLRAENDKIRCENIAMREALKNVICPTCGGPHSGADDYFDEHKLRMENAHLKEELDRVSSLTSKYLGRPITQLPSMQPLSMSSLELSVGGLGSPVALGPALDLDTLGGSSPFQLPAPVSDMERPMMAEMATRAMDELIRLAQAGEHLWVKTAGGREVLNVDTYDSIFAKPGSSSFRGPDVHVEGSRDSCLVLTTAIGLVDTFMDSSKWTEFFPTVVTRARTIDVLVNGMAGRSESLVLMYEELHVMSPVVPTREFCFLRYCRQIEQGLWAIADVSVDLQRDARYGAPPARSRRLPSGCLIADMSNGYSKVTWVEHMETEDKTPINQLYRDLVLSGAAFGAHRWLAALQRACERHACLVTPPHRDIAGVTLEGKRSMMRLSQRMVGSFCASLSASQQHRWTTLSGPGAGVDEAAGVRVMVHRSTDPGQPSGVVLSAATSIWLPVPCDRVFAFVRDENTRSQWDVLSHGNPVQEVSRIPNGSHPGNSISLLRGLNASQNSMLILQESCADASGSLVVYAPIDLPAANVVMSGEDPSAIPLLPSGFTILPDGRASSSGSVVTVAFQILVSSLPSSRLNAESVATVNSLIGTTVEQIKAALNCGGSSH

SEQ ID NO: 2924 - protein, 710 aa, Oryza sativa Japonica Group
MDFGDEPEGSDSQRRRKRYHRHTPRQIQQLEAMFKECPHPDENQRAQLSRELGLEPRQIKFWFQNRRTQMKAQHERADNCFLRAENDKIRCENIAIREALKNVICPTCGGPPVGEDYFDEQKLRMENARLKEELDRVSNLTSKYLGRPFTQLPPATPPMTVSSLDLSVGGMGGPSLDLDLLSGGSSGIPFQLPAPVSDMERPMMAEMATRAMDELIRLAQAGDHIWSKSPGGGVSGGDARETLNVDTYDSIFSKPGGSYRAPSINVEGSRESGLVLMSAVALADVFMDTNKWMEFFPSIVSKAHTIDVLVNGMGGRSESLILMYEELHIMTPAVPTREVNFVRYCRQIEQGLWAIADVSVDLQRDAHFGAPPPRSRRLPSGCLIADMANGYSKVTWVEHMEVEEKSPINVLYRDLVLSGAAFGAHRWLAALQRACERYASLVALGVPHHIAGVTPEGKRSMMKLSQRMVNSFCSSLGASQMHQWTTLSGSNEVSVRVTMHRSTDPGQPNGVVLSAATSIWLPVPCDHVFAFVRDENTRSQWDVLSHGNQVQEVSRIPNGSNPGNCISLLRGLNASQNSMLILQESCTDASGSLVVYSPIDIPAANVVMSGEDPSSIPLLPSGFTILPDGRPGSAAGASTSSAGPLAAARGGGGGGAGGGSVVTVAFQILVSSLPSSKLNAESVATVNGLITTTVEQIKAALNCSAHGHHP

SEQ ID NO: 2925 - protein, 734 aa, Oryza sativa Japonica Group
MDFGDEPEGSDSQRRRKRYHRHTPRQIQQLEAMFKECPHPDENQRAQLSRELGLEPRQIKFWFQNRRTQMKAQHERADNCFLRAENDKIRCENIAIREALKNVICPTCGGPPVGEDYFDEQKLRMENARLKEELDRVSNLTSKYLGRPFTQLPPATPPMTVSSLDLSVGGMGGPSLDLDLLSGGSSGIPFQLPAPVSDMERPMMAEMATRAMDELIRLAQAGDHIWSKSPGGGVSGGDARETLNVDTYDSIFSKPGGSYRAPSINVEGSRESGLVLMSAVALADVFMDTNKWMEFFPSIVSKAHTIDVLVNGMGGRSESLILMYEELHIMTPAVPTREVNFVRYCRQIEQGLWAIADVSVDLQRDAHFGAPPPRSRRLPSGCLIADMANGYSKVTWVEHMEVEEKSPINVLYRDLVLSGAAFGAHRWLAALQRACERYASLVALGVPHHIAGVTPEGKRSMMKLSQRMVNSFCSSLGASQMHQWTTLSGSNEVSVRVTMHRSTDPGQPNGVVLSAATSIWLPVPCDHVFAFVRDENTRSQVSHPLSPPLISLTHSLCPPLLLLQWDVLSHGNQVQEVSRIPNGSNPGNCISLLRGLNASQNSMLILQESCTDASGSLVVYSPIDIPAANVVMSGEDPSSIPLLPSGFTILPDGRPGSAAGASTSSAGPLAAARGGGGGGAGGGSVVTVAFQILVSSLPSSKLNAESVATVNGLITTTVEQIKAALNCSAHGHHP

SEQ ID NO: 2926 - protein, 700 aa, Sorghum bicolor
MDFGDEPEGSDSQRQRKRYHRHTPRQIQQLEAMFKECPHPDENQRAALSRELGLEPRQIKFWFQNRRTQMKAQHERADNCFLRAENDKIRCENITMREALKNVICPNCGGPPVAEDFFDEQKLRMENARLKEELDRVSSITSKYLGRPFTQMPPVPTMSMSSLDLSMGGMPGQQGHLGGPPSLDLDLLSGCSSGMPYQMPAPVTEMERPMMVDMATRAMDELIRLAQAGDQIWVKGMPGDAREMLNVATYDSLFSKPGVAFRPPDMNVEGSRDSGLVFMSAVALVDVFMDTNKWMEFFPGIVSKAQTVDVLVNGLGGRSESLIMMYEELHIMTPVVPTRELSFLRYCKQIEQGLWAIADVSLDGQRDAHYGMPSRSRRMPSGCLIADMSNGYSKVTWVEHMEIEQMLPINVLYRNLVLSGAAFGAHRWLAALQRACERFASVATLGVPHHDIAGVTPEGKRSMMKLSQRMVGSFCASLSSSPLQRWTLLSGTTDVSVRVSTHRSTDSGGQPNGVVLSAATSIWLPVPGDHVFAFVRDENARSQWDVLSHGNQVQEVSRIPNGSNPGNCISLLRGLNANQNSMLILQESCTDASGALVVYSPIDIPAANVVMSGEDPSGIPLLPSGFAILPDGRPGSGAGASSSVVLPLASQPGCVVTVAFQILVSNLPSSRLNAESVATVNSLIGTTVQQIKAALNCAGP

SEQ ID NO: 2927 - protein, 613 aa, Oryza sativa Indica Group
MDFGDEPEGSDSQRRRKRYHRHTPRQIQQLEAMFKECPHPDENQRAQLSRELGLEPRQIKFWFQNRRTQMKAQHERADNCFLRAENDKIRCENIAIREALKNVICPTCGGPPVGEDYFDEQKLRMENARLKEELDRVSNLTSKYLGRPFTQLPPATPPMTVSSLDLSVGGMGGPSLDLDLLSGGSSGIPFQLPAPVSDMERPMMAEMATRAMDELIRLAQAGDHIWSKSPGGGVSGGDARETLNVDTYDSIFSKPGGSYRAPSINVEGSRESGLVLMSAVALADVFMDTNKWMEFFPSIVSKAHTIDVLVNGMGGRSESLILMYEELHIMTPAVPTREVNFVRYCRQIEQGLWAIADVSVDLQRDAHFGAPPPRSRRLPSGCLIADMANGYSKVTWVEHMEVEEKSPINVLYRDLVLSGAAFGAHRWLAALQRACERYASLVALGVPHHIAGVTPEGKRSMMKLSQRMVNSFCSSLGASQMHQWTTLSGSNEVSVRVTMHRSTDPGQPNGVVLSAATSIWLPVPCDHVFAFVRDENTRSQWDVLSHGNQVQEVSRIPNGSNPGNCISLLRILVSSLPSSKLNAESVATVNGLITTTVEQIKAALNCSAHGHHP

SEQ ID NO: 2928 - protein, 514 aa, Zea mays; identical to SEQ ID NO: 1028

SEQ ID NO: 2929 - protein, 544 aa, Oryza sativa Japonica Group
DSGVSGNYLSLRRLAVWLAEPAVRMRLMAVLVDGCRGLRGGAMAGAIHGHAQHGDPTFQDFMGRLLRRVCSPLFEMVRSWVLEGELEDVFAEFFIVGQPVKAESLWQEGYLLQSDMLPAFISPVLAQRILRTGKSINFLKVCCDDNGWADAATEAAVCVGTTTSRGGLGYGQIDALEALVVEAAKRIDRHLMDVIHKRYRFKDHCLAIKRYLLLGQGDFVQYLMDVVGPELSEPANRISSFHLAGLLETAIRASNAQYDDRDILDRIKVKMMDHGDGDRGWDVFSLEYDARVPLDTVFTASVMKRYLKIFNFLWKLKRVDHSLTGIWKTMKPNCIVSSPFYKEGTNIRSQFVSVLRKCQVLFNEMNHFVTNFQYYIMFEVLEVSWARFSEEMDSAKDLDDLLLAHDKYLTSIVEKSLLGERSHGILRNLFALFDIILQFRSHADRWFERIYELQLRGKGKPKSKAKAKSKEVDSWVDGGRKAMIQLAGELFRKMGEDLDSIAKDYTSSLDAFIAQLPMQQHVDLKFLLFRLDFTEYYSRVSSNK

SEQ ID NO: 2930 - protein, 650 aa, Oryza sativa Indica Group
MDDHQTQDLVKELVHRLISAESGGGGRDAGGALQYTELVLDETEVSEAALVRDVLYACQGIDGRYVRFDKGSDAYDLPDGVRVPRSTRTLVRKLCELGWLFRKVRGFISDNISRSPSDAATEVGTVAQAFCSALQEELSDYYKLLAVLESYSLNPIPTPGSDSGVSGNYLSLRRLAVWLAEPAVRMRLMAVLVDGCRGLRGGAMAGAIHGHAQHGDPTFQDFMGRLLRRVCSPLFEMVRSWVLEGELEDVFAEFFIIGQPVKAESLWQEGYLLQSDMLPAFISPVLAQRILRTGKSINFLKVCCDDNGWADAATEAAVCVGTTTSRGGLGYGQIDALEALVVEAAKRIDRHLMDVIHKRYRFKDHCLAIKRYLLLGQGDFVQYLMDVVGPELSEPANRISSFHLAGLLETAIRASNAQYDDRDILDRIKVKMMDHGDGDRGWDVFSLEYDARVPLDTVFTASVMKRYLKIFNFLWKLKRYYIMFEVLEVSWARFSEEMDSAKDLDDLLLAHDKYLTSIVEKSLLGERSHGILRNLFALFDIILQFRSHADRWFERIYELQLRGKGKPKSKAKAKSKEVDSWVDGGRKAMIQLAGELFRKMGEDLDSIAKDYTSSLDAFIAQLPMQQHVDLKFLLFRLDFTEYYSRVSSNK

SEQ ID NO: 2931 - protein, 600 aa, Sorghum bicolor
MASAKETYRAELRAAARQLGERCLYSAAKWAAELLVGVEPDAAPVPSAVMDTPSSSSATSAGRLLHLHRSGGSSFRHRPRPAGGGTSSEAGTPLGGVSYVSTPIPDDDAFDSGGDKYLLAKTYFDCREYRRAAHVLQKQVGRKAVFLRCYALYMAGEKRKEAEMIELEGSLGKSNAVNQELIALEKELSTHKRTGSIDSFGLYLYGIVLRDKGCEGLARTILVESVNSYPWNWSAWSELQSLCTSSDILNKLNLKNHWMKDFFLASAYLELKMHEEALKRYERLMGVFRCSGYIQAQIATVQYSMRDLDEAEMIFEDLLRTDPFRVDSMDIYSNLLYAKESLTALSFLAHRVFLTDKYRPESCCIIANYYSLKGQHEKSVLYFQRALKLNRKYLSAWTLMGHEYVELKNTPAAIDAYRRAVDINPRDFRAWYGLGQIYEMMGMPFYALHYFRKSSYLQPNDARLWIAMAQCYESDPLQMIEEAIKCYERAADSNDTEGIALHQLAKLHGMLGQSEEAAFYYKKDLERMEVEERQGQNVVEALLFLAKYNKSIGKFEEAEDYCTRLLDYTGPEKETAKNLLQGIKRLQSGFPSMNTDHFAL

SEQ ID NO: 2932 - protein, 599 aa, Zea mays
MASAKESYRAELRASSRQLSERCLYSAAKWAAELLVGVELDAAPVPSAAMDSPSSSSAASAGRLLHLHRSGGSSFRHRPRPGGGSSSEAGTPLGGVSYVSTPIPDDDAFDSGGDKYLLAKTYFDCREYRRAAHVLQNQVGRKAVFLRCYALYMAGEKRKEAEMIELEGSLGKSNAVNQELVALEKELSTHRRTGSIDSFGLYLYGIVLRDKGCEGLARTILVESVNTYPWNWSAWSELQSLCTSSDILNNLNLKNHWMKDFFLASAYLELKMHEEALKRYERLMGVFRCSGYIQAQIATVQYSMRDLDEAEMIFEELLRTDPFRVDSMDIYSNLLYAKESLTALSFLAHRVFLTDKYRPESCCIIANYYSLKGQHEKSVLYFQRALKLNRKYLSAWTLMGHEYVELKNSPAAIDAYRRAVDINPRDFRALYGLGQIYEMMGMPFYALYYFRKSSYLQPNDARLWIAMAQCYESDPLQMIEEAIKCYERAANSNDTEGIALHQLAKLHGMLGQSEEAAFYYKKDLERMEVEERQGQNFVEALLFLAKHYKSIGRFEDAEHYCTRLLDYTGPEKETAKNMLQGIKRLQSGFPSMDIDHFAL

SEQ ID NO: 2933 - protein, 599 aa, Zea mays
MASAKESYRAELRASSRQLGERCLYSAAKWAAELLVGVELDGTPVPSAATDSPSSSSAASAGRLLHLHRSGGSSFRHRPRPGGGSSSEAGTPLGGVSYVSTPIPDDDAFDSGGDKYLLAKTYFDCREYRRAAHVLQNQVGRKAVFLRCYALYMAGEKRKEAEMIELEGSLGKSNAVNQELVALEKELSTHRRTGSIDSFGLYLYGIVLRDKGCEGLARTILVESVNTYPWNWSAWSELQSLCTSSDILNNLNLKNHWMKDFFLASAYLELKMHEEALKRYERLMGVFRCSGYIQAQIATVQYSMRDLDEAEMIFEELLRTDPFRVDSMDIYSNLLYAKESLTALSFLAHRVFLTDKYRPESCCIIANYYSLKGQHEKSVLYFQRALKLNRKYLSAWTLMGHEYVELKNSPAAIDAYRRAVDINPRDFRALYGLGQIYEMMGMPFYALYYFRKSSYLQPNDARLWIAMAQCYESDPLQMIEEAIKCYERAANSNDTEGIALHQLAKLHGMLGQSEEAAFYYKKDLERMEVEERQGQNFVEALLFLAKHHKSIGRFEDAEHYCTRLLDYTGPEKETAKNMLQGIKRLQSGFPSMDIDHFAL

SEQ ID NO: 2934 - protein, 597 aa, Oryza sativa Indica Group
MASSKETYRVELRAAARQLGERGLYSAAKWAAELLVGIEPDATPAPSLVMDTPSSSGSAASGGRLLHLHRSGGSSFRRRLRPGAAEAGTPLGGVSYVSTPIPDDDAFDVGGDRYLLAKTYFDCREYRRAAHVLRGQTGRKAVFLRCYALYTAGEKRKEEETVELEGSLGKSNAVNQELVALERELATHRRTGAIDSFCLYLYGIVLRDKGSEALARTVLVESVNSYPWNWSAWLELQSLCTSSDILNNLNIKNHWMKDFFLASAHLELKMHEEALKRYERLMGVFRCSDYIQAQIATVQYSMRDLDEADMIFEELLRTDPFRVDSMDVYSNLLYAKESSTALSFLAHRVFLTDKYRPESCCIIANYYSLKGQHEKSVLYFQRALKLNRKYLSAWTLMGHEFVELKNTPAAIDAYRRAVDINPRDYRAWYGLGQIYEMMGMPFYAVYYFRKSSYLQPNDARLWNAMAQCYESDQLQMIEEAIKCYERSANNNDTEGIALHQLAKLHGMLGQSEEAAFYYKKDLERMEVEERQGQNFVEALLFLAKHCKSIGRFEEAEHYCTRLLDYTGPERETAKSILQGLKRAQSVLPLMDIDHFAM

SEQ ID NO: 2935 - protein, 597 aa, Oryza sativa Japonica Group
MASSNETYRVELRAAARQLGERGLYSAAKWAAELLVGIEPDATPAPSSVMDTPSSSGSAASGGRLLHLHRSGGSSFRRRLRPGAAEAGTPLGGVSYVSTPIPDDDAFDVGGDRYLLAKTYFDCREYRRAAHVLRGQTGRKAVFLRCYALYTAGEKRKEEETVELEGSLGKSNAVNQELVALERELATHRRTGAIDSFCLYLYGIVLRDKGSEALARTVLVESVNSYPWNWSAWLELQSLCTSSDILNNLNIKNHWMKDFFLASAHLELKMHEEALKRYERLMGVFRCSDYIQAQIATVQYSMRDLDEADMIFEELLRTDPFRVDSMDVYSNLLYAKESSTALSFLAHRVFLTDKYRPESCCIIANYYSLKGQHEKSVLYFQRALKLNRKYLSAWTLMGHEFVELKNTPAAIDAYRRAVDINPRDYRAWYGLGQIYEMMGMPFYAVYYFRKSSYLQPNDARLWNAMAQCYESDQLQMIEEAIKCYERSANNNDTEGIALHQLAKLHGMLGQSEEAAFYYKKDLERMEVEERQGQNFVEALLFLAKHCKSIGRFEEAEHYCTRLLDYTGPERETAKSILQGLKRAQSVLPLMDIDHFAM

SEQ ID NO: 2936 - protein, 616 aa, Oryza sativa
MASSKETYRVELRAAARQLGERGLYSAAKWAAELLVGIEPDATPAPSLVMDTPSSSGSAASGGRLLHLHRSGGSSFRRRLRPGAAEAGTPLGGVSYVSTPIPDDDAFDVGGDRYLLAKTYFDCREYRRAAHVLRGQTGRKAVFLRCYALYTAGEKRKEEETVELEGSLGKSNAVNQELVALERELATHRRTGAIDSFCLYLYGIVLRDKGSEALARTVLVESVNSYPWNWSAWLELQSLCTSSDILNNLNIKNHWMKDFFLASAHLELKMHEEALKRYERLMGVFRCSDYIQAQIATVQYSMRDLDEADMIFEELLRTDPFRVDSMDVYSNLLYAKESSTALSFLAHRVFLTDKYRPESCCIIANYYSLKGQHEKSVLYFQRALKLNRKYLSAWTLMGHEFVELKNTPAAIDAYRRAVDINPRDYRAWYGLGQIYEMMGMPFYAVYYFRKSSYLQPNDARLWNAMAQCYESDQLQMIEEAIKCYERSANNNDTEGIALHQLAKLHGMLGQSEEAAFYYKKNLERMEVEERQAQNFVEALLFLAKHCKSIGRFEEAEHYCTRLLDYTGPERETAKSILQGLKRAQSVLPLMDIDHFAIKLHIAGDVDLVCMMISSSC

SEQ ID NO: 2937 - protein, 600 aa, Hordeum vulgare subsp. vulgare
MAAAKENYRVELRAAARQLGDRCLYSAAKWAAELLVGIEPDAAPSQSAAMGTPSSSGAAPGERLLHLYRSGGSSFRCRTRHGGGGGAAEAGTPLGGVSYVSTPIPDDDAFDAGADKYLLAKTYFDCREYRRAAHVLRSQVGRKAVFLRCYALYMAGEKRKEEETIELEGSLGKSNVVNKELVALERELSTHRRTGAIDSFGLYLYGIVLRDKGCEGMARTVLVESVNSYPWNWCAWLEIQSLCTSSDILNNLNLKNHWMKDFFIASAHLELKMHEEALKRYERLMGVFHCSDYIQAQIATVQYSMRDLDEADMIFEELLRTDPFRVDSMDIYSNLLYAKESLTALSFLAHRVFLTDKYRPESCCIIANYYSLKGQHEKSVLYFQRALKLNRKYLSAWTLMGHEFVELKNTPAAIDAYRRAVDINPRDYRAWYGLGQIYEMMGMPFYALYYFRKSSHLQPNDARLWIAMAQCYESDPLQMIEEAIKCYERAANTNDTEGIALHQLAKLHSMLGQAEEAAFYYKKDLERMEVEERQGQNFVEALLFLARHCKNMGRFEEAEHYCTRLLDYTGPEKETAKSILQGLKRAQSGFPPMDIDHFAL

SEQ ID NO: 2938 - protein, 577 aa, Vitis vinifera
MSSKDSCRNELRFAIRQLSDRCLYSAAKWAAEQLVGIEQDPAKFTPSHTRFQRGSSSIRRRFRTNEIASTPTAGVSYVSTPVLEEDEAVDGDFYLLAKSYFDCREYRRTAHVLRDQTGKKAVFLRCYALYLAGEKRKEEEMIELEGPLGKSDAVNHELVSLERELSTLRKNGTVDPFGLYLYGLVLKEKGSENLARTVLVESVNSYPWNWNAWTELQSLCTTIDILNSLNLNNHWMKDFFLASVYQELRMHNESLGKYEYLQGTFSFSNYIQAQIAKAQYSLREFEQVEIIFDELLRNDPYRVEDMDMYSNVLYAKECFSALSYLAHRVFLTDKYRPESCCIIGNYYSLKGQHEKSVVYFRRALKLNKNYLSAWTLMGHEYVEMKNTPAAVDAYRRAVDINPCDYRAWYGLGQAYEMMFMPYYALHYFRKSVFLQPNDSRLWIAMAQCYETDQLQMLEDAIKCYKRAANCNDTEAIALHQLAKLSKELKRSEEAAFYYKKDLERMEAEEREGPNMVEALLFLATYYKSQKRFEEAEIYCTRLLDYTGPEKETAKSLLRGMRKAQSGFPSMDIEHLPP

SEQ ID NO: 2939 - protein, 577 aa, Vitis vinifera
  misc_feature (244)..(244): Xaa can be any naturally occurring amino acid
MSSKDSCRNELRFAIRQLSDRCLYSAAKWAAEQLVGIEQDPAKFTPSHTRFQRGSSSIRRRFRTNEIASTPTAGVSYVSTPVLEEDEAVDGDFYLLAKSYFDCREYRRTAHVLRDQTGKKAVFLRCYALYLAGEKRKEEEMIELEGPLGKSDAVNHELVSLERELSTLRKNGTVDPFGLYLYGLVLKEKGSENLARTVLVESVNSYPWNWNAWTELQSLCTTIDILNSLNLNNHWMKDFFLASXYQELRMHNESLGKYEYLQGTFSFSNYIQAQIAKAQYSLREFEQVEIIFDELLRNDPYRVEDMDMYSNVLYAKECFSALSYLAHRVFLTDKYRPESCCIIGNYYSLKGQHEKSVVYFRRALKLNKNYLSAWTLMGHEYVEMKNTPAAVDAYRRAVDINPCDYRAWYGLGQAYEMMFMPYYALHYFRKSVFLQPNDSRLWIAMAQCYETDQLQMLEDAIKCYKRAANCNDTEAIALHQLAKLSKELKRSEEAAFYYKKDLERMEAEEREGPNMVEALLFLATYYKSQKRFEEAEIYCTRLLDYTGPEKETAKSLLRGMRKAQSGFPSMDIEHLPP

SEQ ID NO: 2940 - protein, 423 aa, Sorghum bicolor
MASDSSFYFVPLLLLLMLLLVSPTATAAQPSSEPGGNATAARLRPGKELLRHKRIRALLTKLNKPALKTIQSPDGDIIDCVPSHLQPAFDHPKLRGQKILDPPERPKNCNFTLGGSRVSEVVVQAWHATGEACPEGTVPIRRTTEKDLLRASSLRRYGRKPVRRGVRRDSTSSGHEHAVGYVNSEHYYGAKASVNVWSPRVGDPSEFSLSQIWVISGSFGNDLNTIEAGWQVSPELYGDSNPRFFTYWTTDAYQETGCYNHNCRGFVQTTNKIAVGAAITPESVYNGRQFDITLMIWKDPKHGHWWLELGPGLVVGYWPSYLFSHLARHANMVQFGGEVVNTRPSGSHTATQMGSGHFPREGFDRAAYFRNLQVVDWDNNLIPAANLKLLADHPGCYDIQGGSNSYWGSYFYYGGPGRNVKCP

SEQ ID NO: 2941 - protein, 425 aa, Zea mays
MASCGSFYFVPLLLLMLLLASPATAALVTSSQPGGNATAARPRPGMEQLKRKRIRALLTKLNKPALKTIQSSDGDIIDCVPSHLQPAFDHPKLRGEKILDPPERPKNRNFTFGGSGRSRVGEVVVQAWHATGEACPEGTVPIRRTTEKDLLRASSLRRYGRKPARRGVRRDSTSSGHEHAVGYVNSEQYYGAKASVNVWSPRIGDPSEFSLSQIWVLSGSFGNDLNTIEAGWQVSPELYGDSNPRFFTYWTTDAYQETGCYNHNCRGFVQTTNKIAIGAAITPESVYNGRQFDITLMLWKDPKHGHWWLELGPGLVVGYWPSHLFSHLARHANMVQFGGEVVNTRPSGSHTATQMGSGHFPREGFDRAAYFRNLQVVDWDNNLIPAANLKLLADHPGCYDIQGGTNSYWGSYFYYGGPGRNAKCP

SEQ ID NO: 2942 - protein, 410 aa, Zea mays
MLLLASPATAALVTSSQPGGNATAARPRPGMEQLKRKRIRALLTKLNKPALKTIQSSDGDIIDCVPSHLQPAFDHPKLRGEKILDPPERPKNRNFTFGGSGRSRVGEVVVQAWHATGEACPEGTVPIRRTTEKDLLRASSLRRYGRKPARRGVRRDSTSSGHEHAVGYVNSEQYYGAKASVNVWSPRIGDPSEFSLSQIWVLSGSFGNDLNTIEAGWQVSPELYGDSNPRFFTYWTTDAYQETGCYNHNCRGFVQTTNKIAIGAAITPESVYNGRQFDITLMLWKDPKHGHWWLELGPGLVVGYWPSHLFSHLARHANMVQFGGEVVNTRPSGSHTATQMGSGHFPREGFDRAAYFRNLQVVDWDNNLIPAANLKLLADHPGCYDIQGGTNSYWGSYFYYGGPGRNAKCP

SEQ ID NO: 2943 - protein, 434 aa, Oryza sativa Japonica Group
MACSFHFVPLLLLLTLLLLISSASRTAALPSMRSSSEDTASNATAAARLRPGKELLKYKRIRALLKKLNKPSLKTIQSPDGDLIDCVPSHLQPAFDHPKLKGQKLLDPPERPKNYNLTIAVSSSSSSRVGEVVVQAWHAAGEECPEGTVAIRRTTEKDLLRASSLRRYGRKPARRNIRRDSTSNGHEHAVGYVNNDNYYGAKASVNVWSPRIGDPSEFSLSQIWVISGSFGNDLNTIEAGWQVSPELYGDSNPRFFTYWTTDAYQETGCYNHNCRGFVQTTNKIAIGAAITPESVYNGRQFDITLMLWKDPKHGHWWLELGPGMVVGYWPSYLFTHLAHHGNMVQFGGEVVNTRPSGSHTATQMGSGHFPGEGFDRAAYFRNLQVVDWDNSLIPAANLKLLADHPACYDIQGGSNSYWGSYFYYGGPGRNVKCP

SEQ ID NO: 2944 - protein, 434 aa, Oryza sativa Indica Group
MACSFHFVPLLLLLTLLLLISSASSTAALPSMRSSSEDTASNATAAARLRPGKELLKYKRIRALLKKLNKPSLKTIQSPDGDLIDCVPSHLQPAFDHPKLKGQKLLDPPERPKNYNLTIAVSSSSSSRVGEVVVQAWHAAGEECPEGTVAIRRTTEKDLLRASSLRRYGRKPARWNIRRDSTSNGHEHAVGYVNNDNYYGAKASVNVWSPRIGDPSEFSLSQIWVISGSFGNDLNTIEAGWQVSPELYGDSNPRFFTYWTTDAYQETGCYNHNCRGFVQTTNKIAIGAAITPESVYNGRQFDITLMLWKDPKHGHWWLELGPGMVVGYWPSYLFTHLAHHGNMVQFGGEVVNTRPSGSHTATQMGSGHFPGEGFDRAAYFRNLQVVDWDNSLIPAANLKLLADHPACYDIQGGSNSYWGSYFYYGGPGRNVKCP

SEQ ID NO: 2945 - protein, 724 aa, Zea mays
  misc_feature (315)..(315): Xaa can be any naturally occurring amino acid
  misc_feature (486)..(486): Xaa can be any naturally occurring amino acid
  misc_feature (535)..(535): Xaa can be any naturally occurring amino acid
  misc_feature (642)..(642): Xaa can be any naturally occurring amino acid
MAAATVVGGTWTRTSRSSLSLVVVFLLLHMGVGATATPPRHHTAAASGITLRVDDYLHQVAVDNGLVQVTLSKPQGHITGVRYNGHRNLLHYDGSQNSGGYWDVVWNYPGSDQPGGMMDTLDSTEFKVVVSSEDQVELSFSSAYTPSSPTSVHLHVDKRLVVLKGSSGFYCYAILEHARDWPALNVTEARLAFKLNTDAFKYMAVSDDIQRYMPSAADRAEPRGAPLAYKEAVLLVNPQEPRFRGEVDDKYQYSMDNKDSTVHGWTTAGGVERSPNDNPVVGFWVITPSNEFKSGGPTKRELTSHVGPTTLTMFXGTHYVGNDIVLSISGGEYWKKVMGPVFVYLNSRPRRGGIGGCDHSRALWADAKAQARAEAGKWPYSFPKSPDFAKAGERGGVTGRLLVRDDDRFTTDDDNNDAAAAPMPVGTEAYVGLAAPGQAGSWVTECKGYQFWTATTATEDGFVFTIANVREGVYSLYAWVPGVLGXYVHASPVTVAVGGAVVDLGDLVFRPPRSGPTLWEIGVPDRKAAEFFVPXVDPRFANRLFLHKDRYRQYGLWARYAELYPDGDPVFTVGRSEPWKDWFFAHVTRKVGEGRYAPTTREIRFRLYRVVADGTYTLRVSLAAAHMSRLQVRVNGRGGGGXAELTTPEFGGGNAIARHGIHGVQWNFQFPIRGYLLREGDNSVSITQTRADGEFLGVLYDYVRLEAPPAHCRDPTATATTWRT

SEQ ID NO: 2946 - protein, 733 aa, Sorghum bicolor
MAAAAGTGTGMMTRSSSVLLLIVVTTVTLHISVVGASWWSPFSLPHRGGGAASRSSPATAAPGVTLRVDDYHHQVVVDNGVVQVTLSKPQGHITGVRYNGERNLLHFDGSENSGGYWDVVWNYRGSDQPRGMIDMLDSTEFKVVVSTEDQVELSFSSTYNPSRQDSVRLNVDKRLVMLKGSSGFYCYAIMEHTSDYPALNISEARLAFKLNTDKFNYMAISDDIQRYMPSAADRDEPRGTPLAYKEAVLLVNPQEPQFKGEVDDKYEYSMDNKDNAVHGWITGGGGPIVGFWVITPSNEFKSGGPMKRELTSHVGPTSLTMFLGTHYVGNDIVLSVGDGEYWKKVMGPVFIYLNSGPSRGGHVRALWDDAKAMARAEAGKWPYSFPESPDFAKADERGSVAGRLVVQDTFTSTAADVPALTTAYVGLAAPGQAGSWATECKGYQFWTTADASCGGGGGFSFTIGNVRPGVYSVYAWVPGVLGDYVSASSVTVTAGGAVVDLGELVFRPPRSGPTVWEIGVPDRTAAEFFVPDVDPRYANRLFINKDRYRQYGLWARYAELYPDGDPVFTVGQSDASKDWFFAHVTRKVGDGDGDGDGRYAATTREIRFTLDRVVADGTYTLRVALAAAQMSRLQVRVNGRGGGGLAAELTTPEFGGGNAIARHGIHGVEWSFEFPIRGYMLQEGENSVSITQTRAAGEFLGVLYDYLRLEAPPGSWRDPTTAARARTRTTRRA

SEQ ID NO: 2947 - protein, 521 aa, Sorghum bicolor
MGSLDTTPTATATFADINGSGGFQPLNADDVRSYLHKSVDFIYDYYKSVESLPVLPGVEPGYLRRLLQSVPPTSSAPFDIALKEVRDAVVPGMTHWASPNFFAFFPATNSAAAIAGELVASAMNTVGFTWQANPAATEMEVLALDWLAQLLRLPSTFMNRTAAAGRGSGGGVILGTTSEAMLVTLVAARDAALRRSGSVGVAGITSLAVYAADQTHSTFFKACRLAGFDPANIRSIATGPETDYALDPAKLLEIMLADVDAGLVPTYICATVGTTSSNAVDPVGAIADVAAMFDAWVHIDAAYAGSACICPEFRHHLAGVERVDSISMSPHKWLMTCLDCTCLWVRDAHRLTDSLETNPEYLKNDASESGNVTDLKDMQVGVGRRFRGLKLWMVMRTYGAAKLQEHIRSDVAMAKMFEEAVRADDRFEVVVPRNFALVCFRIRPEGAMTEEDAEEVNRELMERLNRTGKAYLAHTVVGGKFVLRFAVGSSLQEERHVRSAWELIKKTTTEIMEEARDVVEN

SEQ ID NO: 2948 - protein, 516 aa, Zea mays
MGSLDTTPTAAFADVAGGGFEPLNADDVRSYLHKSVDFIYDYYKSVESLPVLPGVEPGYLRRLLQSVPPTSSAPFDIALKEVRDAVVPGMTHWASPNFFAFFPSTNSAAAIAGELIASAMNTVGFTWQASPASTEMEVLALDWLAQLLRLPPTFMNRTAAAGRGTGGGGVILGTTSEAMLVTLVSARDAALRRAGSVGVAGITRLAVYAADQTHSTFFKACRLAGFDPANIRSIPTGPETDYALDPARLLEVMQADVDAGLVPTYVCATVGTTSSNAVDPVGAIADVAAVFNAWVHIDAAYAGSACICPEFRHHLDGVERVDSISMSPHKWLMTCLDCTCLWVRDTHRLTDSLETNPEYLKNDASESGTVTDLKDMQVGVGRRFRGLKLWMVMRTYGSAKLQEHIRSDVAMAKMFEDAVRADHRFEVVVPRNFALVCFRIRPQGTDLTEEDADVVNRELMERLNRTGKAYLAHTAIGGKFVLRFAVGSSLQEERHVRSAWELIKKTTTEIFEEETM

SEQ ID NO: 2949 - protein, 519 aa, Sorghum bicolor
MGSLDTNPTAFSAFGDDVSSGFQPLNPDDVRSYLHKAVDFISDYYKSVESLPVLPDVKPGYLRDQLRSAPPTSSAPFDVTMKELTASVVPGMTHWASPNFFAFFPATNSAAAIAGDLIASAMNTVGFTWQAAPAATEMEVLALDWLAQLLRLPSSFMNRTGAAGRGTGGGVILGTTSEAMLVTLVAARDAALRRSGSHGVSGLPRLAVYAADQTHSTFFKACRLAGFDPANIRSIPTGPETDYALDPARLLEVMRADVEAGLVPTYVCATVGTTSSNAVDSVGAIADVAAVFKAWVHIDAAYAGSACICPEFRHHLDGVERVDSISMSPHKWLLTCLDCTCLWVRDTHRLTDSLETNPEYLKNDASESGNVTDLKDMQVGVGRRFRGLKLWMVMRTYGAAKLQEHIRSDVAMAKMFEDAVRGDDRFEVVVPRNFALVCFRIKPHGGGMTEEDADEANHELMERLNRTGKAYLAHTVVGDRFVLRFAVGSSLQEERHVRSAWELINKTTSEIMQEHIAVE

SEQ ID NO: 2950 - protein, 515 aa, Zea mays
MGSLDTNPNAFSAFGVDATTGFQPLHPDDVRAYLHKAVDFISDYYKSVESLPVLPDVKPGYLRQQLRSAPPTSSAPFDVTMKELTDSVVPGMTHWASPNFFAFFPSTNSAAAIAGDLIASAMNTVGFTWQAAPAATEMEVLALDWLAQLLRLPPSFMNRTGAAGRGTGGGVILGTTSEAMLVTLVAARDAALRRTGSQGVSGLPRLAVYAADQTHSTFFKACRLAGFDPANIRSIPTGPETDYALDPARLFEVMQADVDAGLVPTYVCATVGTTSSNAVDPVGAIADVAAVFNAWVHIDAAYAGSACICPEFRHHLDGVERVDSISMSPHKWLLTCLDCTCLWVRDTHRLTDSLETNPEYLKNDASDSGNVTDLKDMQVGVGRRFRGLKLWMVMRTYGAAKLQEHIRSDVAMAKMFEDAVRSDNRFEVVVPRNFALVCFRIKPHGGGIMTEEDADEANRELMERLNRTGKAYLAHTVVGDRFVLRFAVGSSLQEERHVRSAWELINKTTTEIMQK

SEQ ID NO: 2951 - protein, 510 aa, Hordeum vulgare
MGSLGTNPTSFSAFPDDKAAFEPLNPEDVRAYLHKAVDFISDYYTNVESMPVLPNVKPGYLQDELTASPPTHSAPFDVTMKELRTSVVPGMTHWASPNFFAFFPSTNSAAAIAGDLIASAMNTVGFTWQASPAATEMEVLALDWLAQLLHLPTTFMNRTSTGRGTGGGVILGTTSEAMLVTLVAARDAALRRSGSVGVSDIPRLAVYAADQTHSTFFKACRLAGFDPANIRSIPTGPETNYGLDPAKLLEVMQADADAGLVPTYVCATVGTTSSNAVDPVGAVADVAAMFNAWVHVDAAYAGSACICPEFRHHLDGVERVDSISMSPHKWLLTCLDCTCLYVRDAHRLSDSLETNPEYLKNDVTDSGEVTDLKDMQVGVGRRFRGLKLWMVMRTYGTAKLQEHIRSDVAMAKMFEDSVRADNRFEVVVPRNFALVCFRIKARGDMTEEDADEVNRLLMENLNKTGKAYLAHTVVGDRFVLRFAVGSSLQEERHVRSAWDLIKKTTSSIMD

SEQ ID NO: 2952 - protein, 523 aa, Oryza sativa Japonica Group
MGSLDANPAAAYAAFAADVEPFRPLDADDVRSYLHKAVDFVYDYYKSVESLPVLPGVEPGYLLRLLQSAPPSSSAPFDIAMKELREAVVPGMTHWASPNFFAFFPATNSAAAIAGELIASAMNTVGFTWQAAPAATELEVLALDWLAQLLGLPASFMNRTVAGGRGTGGGVILGTTSEAMLVTLVAARDAALRRSGSNGVAGITRLTVYAADQTHSTFFKACRLAGFDPANIRSIPTGAETDYGLDPARLLEAMQADADAGLVPTYVCATVGTTSSNAVDPVGAVADVAARFAAWVHVDAAYAGSACICPEFRHHLDGVERVDSISMSPHKWLMTCLDCTCLYVRDTHRLTGSLETNPEYLKNHASDSGEVTDLKDMQVGVGRRFRGLKLWMVMRTYGAGKLQEHIRSDVAMAKTFEDLVRGDDRFEVVVPRNFALVCFRIRPRKSGAAIAAGEAEAEKANRELMERLNKTGKAYVAHTVVGGRFVLRFAVGSSLQEERHVRSAWELIKKTTTEIVADAGEDK

SEQ ID NO: 2953 - protein, 510 aa, Hordeum vulgare subsp. spontaneum
MGSLGTNPTSFSAFPDDKAAFEPLNPEDVRAYLHKAVDFISDYYTNVESMPVLPNVKPGYLQDELTASPPTYSAPFDVTMKEPRTSVVPGMTHWASPNFFAFFPSTNSAAAIAGDLIASAMNTVGFTWQASPAATEMEVLALDWLAQLLHLPTTFMNRTSTGRGTGGGVILGTTSEAMLVTLVAARDAALRRSGSVGVSHIPRLAVYAADQTHSTFFKACRLAGFDPANIRSIPTGPETNYGLDPAKLLEVMQADADAGLVPTYVCATVGTTFSNAVDPVGAVADVAAMFNAWVHVDAAYAGSACICPEFRHHLDGVERVDSISMSPHKWLLTCLDCTCLYVRDAHRLSDSLETNPEYLKNDATDSGEVTDLKDMQVGVGRRFRGLKLWMVMRTYGTAKLQEHIRSDVAMAKMFEDSVRADDRFEVVVPRNFALVCFRIKARGDMTEEDADEVNRLLMENLSKTGKAYLAHTVVGDRFVLRFAVGSSLQEERHVRSAWDLIKKTTSSIMD

SEQ ID NO: 2954 - protein, 514 aa, Oryza sativa Japonica Group
MGSLDTNPTAFSAFPAGEGETFQPLNADDVRSYLHKAVDFISDYYKSVESMPVLPNVKPGYLQDELRASPPTYSAPFDVTMKELRSSVVPGMTHWASPNFFAFFPSTNSAAAIAGDLIASAMNTVGFTWQASPAATEMEVLALDWLAQMLNLPTSFMNRTGEGRGTGGGVILGTTSEAMLVTLVAARDAALRRSGSDGVAGLHRLAVYAADQTHSTFFKACRLAGFDPANIRSIPTGAETDYGLDPARLLEAMQADADAGLVPTYVCATVGTTSSNAVDPVGAVADVAARFAAWVHVDAAYAGSACICPEFRHHLDGVERVDSISMSPHKWLMTCLDCTCLYVRDTHRLTGSLETNPEYLKNHASDSGEVTDLKDMQVGVGRRFRGLKLWMVMRTYGVAKLQEHIRSDVAMAKVFEDLVRGDDRFEVVVPRNFALVCFRIRAGAGAAAATEEDADEANRELMERLNKTGKAYVAHTVVGGRFVLRFAVGSSLQEEHHVRSAWELIKKTTTEMMN

SEQ ID NO: 2955 - protein, 502 aa, Triticum aestivum
MGSIPARSGLVTAFDELPPFHPLNDDDVRSYLHKAVDFISDYYKSVESMPVLPSVKPGYLRDELGASPPVHPAPFDIAMKELRASVVPGMTHWASPNFFAFFPATNSAAAIAGDLIASAMNTVGFTWQAAPAATEMEVLALDWLAQLLRLPRSFMNRTGASRGTGGSVILGTTSEAMLVTLAAARDIAMRRSGARIPDLAVYASDQTHSTFFKACRLAGFDPANFRSIPTGPETDYGVDPVKLLAAMQADAMAGLVPTYVCATVGTTSSNAVDPIGDVAKVAAMFNVWVHVDAAYAGSACICPEFRHHLNGVERVDSISMSPHKWLLTCLDCTCLYVRDARRLSQTLETDPEYLKNDASVSSDVTDLKDMQVGVGRRFRGLKLWMVMRTYGTANLQEHIRRDVTLAKMFEDLVHADDRFEIVVPRNFALVCFRIKTTGVRAADEVNRLLMANVNKTGKAYLTHTVVGGRLVLRFAVGSSLQEERHILSAWELIRKTSSEMMN

SEQ ID NO: 2956 - protein, 626 aa, Hordeum vulgare subsp. vulgare
MASGVHAAAEGVAALGISAAEWAEPCPALRRNLRLLSHDQVELARMLLNEGQGHLFEHWPEPGVDDDKKKSFFDQVCRLNSSYPGGLAAYIQNAKKLLADSKAGQNPYDGFTPSVPSGEALTFGDDNFVSLEAAGVKEARNAAFVLVAGGLGERLGYKGIKVALPRETTTGKCFLQHYIESILSLQEASCKMEGECHTKIPFAIMTSDDTNALTIKLLESNSYFGMEPSQVKILKQEKVACLADNDARLALDPNDKYKIQTKPHGHGDVHSLLYSSGLLEQWKSTGRRWVLFFQDTNGLLFNAIPSALGVSATKGYNVNSLAVPRKAKEAIGGITKLTHVDGRTMVINVEYNQLDPLLRATGHPDGDANCETGYSPYPGNINQLILELGPYIEELKKTHGAISEFVNPKYTDSTKTAFKSSTRLECMMQDYPKTLPPTAKVGFTVMDTWLAYAPVKNNPEDAAKVPKGNPFHSATSGEMAIYRANSLILRKAGAQISDPVVSTFNGQEVEVWPRVTWSPRWGLMFKDVKRKVHGNSSISQRSFLVINGQNIVIDGLSLDGALIANSVDEAEVKVTGHVENKGWTIRHVDHRDTSEKEETRIRGFKFEKVEQLEVNYTEPGKHCLSP

SEQ ID NO: 2957 - protein, 623 aa, Zea mays
MASGADAAALVTSGADEWAAACPPLRRNLQLLAPDEVELAKMLLNEGQIHLFEHWPEPGIDDDKKRGFFDQVRRLNSSYPGGLVSYIKNAKKLLADSKAGKNPYDGFTPSVPSGEILNFGDDNFVSLEAAGIKEAHNAAFVLVAGGLGERLGYKGIKVALPRETTTGKCFIQHYIESILVLQEASCKTVDDGCQKKIPFVIMTSDDTNALTIKLLESNSYFGMEPSQVKLLKQEKVACLADNDARLALDPSDKYKIQTKPHGHGDVHSLLYSSGLLEQWKSEGRKWVLFFQDTNGLLFNAIPSALGVSATKGYNVNSLAVPRKAKEAIGGITKLTHVDGRTMVINVEYNQLDPLLRATGYPDGDTNSETGYSPYPGNINQLILELGPYIEELKKTHGAISEFVNPKYTDSTKTSFKSSTRLECMMQDYPKTLPPSTKVGFTVMDTWLAYAPVKNNPEDAAKVPKGNPYHSATSGEMAIYRANSLILRKAGAQIADPVVDTFNGQEVEVWPRVTWSPRWGLTFQSVKEKVHGSCSVSQRSALVIDGRSVFLDGLSLDGTLIVNAVDGAEVKVTGHVENKGWTIRHVDYKDTSEKEEVRIRGFKFNKSEQLEVNYTEPGKHSLSA

SEQ ID NO: 2958 - protein, 616 aa, Oryza sativa Indica Group
MASDGNGAAAVAALGISGGGGDDWAPPLRRNLPLLAPHEVKLAKLLLSEGQSHLFEHWPEPGVDDDKKRNFFDQVCRLNSSYPGGLASYIQNARKLLADSKAGKNPYDGFSPSVPSGEVLTFGDDNFVSLEEAGVKEARHAAFVLVAGGLGERLGYKGIKVALPRETTTGKCFLQHYIESILALQEASCKLVEGECNTKIPFVIMTSDDTNALTVKLLESNSYFGMEPSQVHILKQEKVACLADNDARLALDPNDKYKIQTKPHGHGDVHALLYSSGLLEQWKSTGRKWVLFFQDTNGLLFNAIPSALGVSATKGYNVNSLAVPRKAKEAIGGITKLTHVDGRTMVINVEYNQLDPLLRATGHPDGDANCETGYSPYPGNINQLILEIGPYMEELQKTHGAISEFVNPKYTDSTKTAFKSSTRLECMMQDYPKTLPPSAKVGFTVMDAWLAYAPVKNNPEDAAKVPKGNPYHSATSGEMAIYRANSLILRKAGAQIADPVIDTFNGQEVEVWPRITWIPRWGLIFKDVKAKVHSNSSVSQRSALVINGKNITIQGLSLDGTLIVNAKDEAKFNVTGHIENKGWTIQHVDHKDTSEKEEIRIRGFKFNKVEQLELNY

SEQ ID NO: 2959 - protein, 616 aa, Oryza sativa Japonica Group
MASDGDGAAAVAALGISGGGGDDWAPPLRRNLPLLAPHEVKLAKLLLSEGQSHLFEHWPEPGVDDDKKRNFFDQVCRLNSSYPGGLASYIQNARKLLADSKAGKNPYDGFSPSVPSGEVLTFGDDNFVSLEEAGVKEARHAAFVLVAGGLGERLGYKGIKVALPRETTTGKCFLQHYIESILALQEASCKLVEGECNTKIPFVIMTSDDTNALTVKLLESNSYFGMEPSQVHILKQEKVACLADNDARLALDPNDKYKIQTKPHGHGDVHALLYSSGLLEQWKSTGRKWVLFFQDTNGLLFNAIPSALGVSATKGYNVNSLAVPRKAKEAIGGITKLTHVDGRTMVINVEYNQLDPLLRATGHPDGDANCETGYSPYPGNINQLILEIGPYMEELQKTHGAISEFVNPKYTDSTKTAFKSSTRLECMMQDYPKTLPPSAKVGFTVMDAWLTYAPVKNNPEDSAKVPKGNPYHSATSGEMAIYRANSLILRKAGAQIADPVIDTFNGQEVEVWPRITWIPRWGLIFKDVKAKVHSNSSVSQRSALVINGKNITIQGLSLDGTLIVNAKDEAKFNVTGHIENKGWTIQHVDHKDTSEKEEIRIRGFKFNKVEQLELNY

SEQ ID NO: 2960 - protein, 605 aa, Zea mays
MAPGADAGYGQWAAACPPLRRNLQLLSPDEVELAKMLLNEGQIHLFEHWPEPGVDDDNKRGFFDQVRRLNSSYPGGLVSYIQNAKKLLADSKVPSGEVFTFGNDNFVSLEAAGIKEACNAAFVLVAGGLGERLGYKGIKVALPRETTTGKCFLQHYIESILAFQEASCKMVDEGCQTKIPFVIMTSDDTNALTIKLLESNSYFGMEPSQVKILKQEKVACLADNDARLALDPSDKYKIQTKPHGHGDVHSLLYSSGLLEQWKTEGRKWVLFFQDTNGLLFNAIPSALGVSATKGYNVNSLAVPRKAKEAIGGITKLTHADGRTMVINVEYNQLDPLLRATGHPDGDSNCETGYSPYPGNINQLILELGPYIEELKKTHGAISEFVNPKYTDSTKTAFKSSTRLECMMQDYPKTLPPSAKVGFTVMDTWLAYAPVKNNPEDAAKVPKGNPYHSATSGEMAIYRANSLILRKAGAQIADPVVHTFNGQEVEVWPRVTWSPRWGLTFKSVKEKVHGNSSVSQRSALVINGQNVFLEGLSLDGTLVVNAIDEAEVKLTGHIQNKGWTIQHVDYKDTSEKEEIRIRGFKLEKIEQLEVNYTEPGNHSLSA

SEQ ID NO: 2961 - protein, 627 aa, Oryza sativa Indica Group
MASDGNGAAAVAALGISGGGGDDWAPPLRRNLPLLAPHEVKLAKLLLSEGQSHLFEHWPEPGVDDDKKRNFFDQVCRLNSSYPGGLASYIQNARKLLADSKAGKNPYDGFSPSVPSGEVLTFGDDNFVSLEEAGVKEARHAAFVLVAGGLGERLGYKGIKVALPRETTTGKCFLQHYIESILALQEASCKLVEGECNTKIPFVIMTSDDTNALTVKLLESNSYFGMEPSQVHILKQEKVACLADNDARLALDPNDKYKIQTKPHGHGDVHALLYSSGLLEQWKSTGRKWVLFFQDTNGLLFNAIPSALGVSATKGYNVNSLAVPRKAKEAIGGITKLTHVDGRTMVINVEYNQLDPLLRATGHPDGDANCETGYSPYPGNINQLILEIGPYMEELQKTHVVSPILVLLIMEVVLSYYATRYTDSTKTAFKSSTRLECMMQDYPKTLPPSAKVGFTVMDAWLAYAPVKNNPEDAAKVPKGNPYHSATSGEMAIYRANSLILRKAGAQIADPVIDTFNGQEVEVWPRITWIPRWGLIFKDVKAKVHSNSSVSQRSALVINGKNITIQGLSLDGTLIVNAKDEAKFNVTGHIENKGWTIQHVDHKDTSEKEEIRIRGFKFNKVEQLELNY

SEQ ID NO: 2962 - protein, 627 aa, Oryza sativa Japonica Group
MASDGDGAAAVAALGISGGGGDDWAPPLRRNLPLLAPHEVKLAKLLLSEGQSHLFEHWPEPGVDDDKKRNFFDQVCRLNSSYPGGLASYIQNARKLLADSKAGKNPYDGFSPSVPSGEVLTFGDDNFVSLEEAGVKEARHAAFVLVAGGLGERLGYKGIKVALPRETTTGKCFLQHYIESILALQEASCKLVEGECNTKIPFVIMTSDDTNALTVKLLESNSYFGMEPSQVHILKQEKVACLADNDARLALDPNDKYKIQTKPHGHGDVHALLYSSGLLEQWKSTGRKWVLFFQDTNGLLFNAIPSALGVSATKGYNVNSLAVPRKAKEAIGGITKLTHVDGRTMVINVEYNQLDPLLRATGHPDGDANCETGYSPYPGNINQLILEIGPYMEELQKTHVVSPILVLLIMEVVLSYYATRYTDSTKTAFKSSTRLECMMQDYPKTLPPSAKVGFTVMDAWLTYAPVKNNPEDSAKVPKGNPYHSATSGEMAIYRANSLILRKAGAQIADPVIDTFNGQEVEVWPRITWIPRWGLIFKDVKAKVHSNSSVSQRSALVINGKNITIQGLSLDGTLIVNAKDEAKFNVTGHIENKGWTIQHVDHKDTSEKEEIRIRGFKFNKVEQLELNY

SEQ ID NO: 2963 - protein, 614 aa, Cucumis melo
MASSLDSAALTLSNLSINGDFASSLPNLQKNLHLLSPQQVELAKILLELGQSHLFEHWAEPGVDDNEKKAFFDQVARLNSSYPGGLASYIKTARGLLADSKEGKNPFDGFTPSVPTGEVLTFGDDSFVSFEDRGVREARKAAFVLVAGGLGERLGYNGIKVALPAETTTGTCFLQSYIEYVLALREASNRLAGESETEIPFVIMTSDDTHTRTVELLESNSYFGMKPSQVKLLKQEKVACLDDNEARLAVDPHNKYRIQTKPHGHGDVHALLYSSGLLKNWHNAGLRWVLFFQDTNGLLFKAIPASLGVSATREYHVNSLAVPRKAKEAIGGITRLTHTDGRSMVINVEYNQLDPLLRATGFPDGDVNNETGYSPFPGNINQLILELGSYIEELSKTQGAIKEFVNPKYKDATKTSFKSSTRLECMMQDYPKTLPPSARVGFTVMDTWVAYAPVKNNPEDAAKVPKGNPYHSATSGEMAIYRANSLVLRKAGVKVADPVEQVFNGQEVEVWPRITWKPKWGLTFSEIKSKINGNCSISPRSTLVIKGKNVYLKDLSLDGTLIVNADEDAEVKVEGSVHNKGWTLEPVDYKDTSVPEEIRIRGFRINKIEQEERN

SEQ ID NO: 2964 - protein, 614 aa, Arabidopsis lyrata subsp. lyrata
MASTVDSNIFSSVPALQSNLGILSPDQIELAKILLENGQSHLFQQWPQLGVDDKQKLDFFDQIARLNSSYPGGLAAYIKTAKELLADSKLGKNPYDGFSPSVPSGENLTFGNENFIEMENRGVVEARNAAFVLVAGGLGERLGYNGIKVALPRETTTGICFLQHYIESILALQEASNKIASDGSQRDIPFIIMTSDDTHSRTLELLESNSYFGMKPTQVHLLKQEKVACLDDNDARLALDPHNKYSIQTKPHGHGDVHSLLYSSGLLHKWLDAGLKWVLFFQDTNGLLFNAIPASLGVSATKQYHVNSLAVPRKAKEAIGGITKLTHVDGRSMVINVEYNQLDPLLRASGFPDGDVNCETGFSPFPGNINQLILDLGPYKDELQKTGGAIKEFVNPKYKDSTKTAFKSSTRLECMMQDYPKTLPPTARVGFTVMDIWLAYAPVKNNPEDAAKVPKGNPYHSATSGEMAIYRANSLILQKAGVKVEEPVKQVLNGQEVEVWSRITWKPKWGMIFSDIKKKVSGNCEVSQRSTMAIKGRNVFIEDLSLDGALIVDSIDDAEVKLGGLIKNNGWTMESVDYKDTSVPEEIRIRGFRFNKVEQLEKYFTQPGKFSVED

SEQ ID NO: 2965 - protein, 614 aa, Arabidopsis thaliana
MASTVDSNFFSSVPALHSNLGLLSPDQIELAKILLENGQSHLFQQWPELGVDDKEKLAFFDQIARLNSSYPGGLAAYIKTAKELLADSKVGKNPYDGFSPSVPSGENLTFGTDNFIEMEKRGVVEARNAAFVLVAGGLGERLGYNGIKVALPRETTTGTCFLQHYIESILALQEASNKIDSDGSERDIPFIIMTSDDTHSRTLDLLELNSYFGMKPTQVHLLKQEKVACLDDNDARLALDPHNKYSIQTKPHGHGDVHSLLYSSGLLHKWLEAGLKWVLFFQDTNGLLFNAIPASLGVSATKQYHVNSLAVPRKAKEAIGGISKLTHVDGRSMVINVEYNQLDPLLRASGFPDGDVNCETGFSPFPGNINQLILELGPYKDELQKTGGAIKEFVNPKYKDSTKTAFKSSTRLECMMQDYPKTLPPTARVGFTVMDIWLAYAPVKNNPEDAAKVPKGNPYHSATSGEMAIYRANSLILQKAGVKVEEPVKQVLNGQEVEVWSRITWKPKWGMIFSDIKKKVSGNCEVSQRSTMAIKGRNVFIKDLSLDGALIVDSIDDAEVKLGGLIKNNGWTMESVDYKDTSVPEEIRIRGFRFNKVEQLEKKLTQPGKFSVED

SEQ ID NO: 2966 - protein, 464 aa, Sorghum bicolor
MEMQPQLADCSPDKLASVALTPRGRLDSQEGRWPAQEKDIDDWLPINARRNAKWWYSAFHNVTAMVGAGVLGLPYAMSELGWEVGITVLLLSWIITLYTLWQMVEMHEMVPGKRFDRYHELGQHAFGEKLGLWIVVPQQLVVEVGLNIVYMVTGGQSLQKFHDVVCGDKQCKDIKLTYFIMIFASCHFVLSQLPNFHSISGVSLAAAVMSLCYSTIAWIASVQKGKSPEVHYGLRATTTPGKVFGFFGALGDVAFAYAGHNVVLEIQATIPSTPEKPSKKPMWKGVVVAYIVVAVCYFPASLVGYWAFGNSVNENILVTLNKPKWLIALANMMVVVHLIGSYQVYAMPVFDMIETVLVRKFGFRPSLMLRLIARSVYVGFTMFVAITFPFFTALLSFFGGFAFAPTTYFLPCIMWLTIYKPKTFSISWFTNWICIVLGVLLMVLSPIGGLREIILKAKTYHFYQ

SEQ ID NO: 2967 - protein, 468 aa, Zea mays
MEMQPQLGDSSPEDKLASRPLTPGGRWSDSQWRPAEEKAIDDWLPINARRNAKWWYSAFHNVTAMVGAGVLGLPYAMSELGWGPGIAVLLLSWIITLYTLWQMVEMHEMVPGKRFDRYHELGQHAFGERLGLWIVVPQQLVVEVGLNIVYMVTGGTSLKKFHDTVCGDDDHRCKGRDIKLTYFIMIFASCHLVLSQLPNFHSISGVSLAAAVMSLCYSTIAWIASAQKGKSPDVHYGLRATTTPGKVFGFFGALGDVAFAYAGHNVVLEIQATIPSTPDKPSKKPMWKGVVVAYVVVAVCYFPASLVGYWAFGDGVDENILVTLRKPKWLIALANVMVVVHLIGSYQVYAMPVFDMIETVLVRKFGFRPSLMLRLVARSVYVGFTMFVAITFPFFSALLSFFGGFAFAPTTYFLPCIMWLTICKPKTFSISWFTNWICIVLGVLLMVLSPIGGLRQIILRAKTYHFYQ

SEQ ID NO: 2968 - protein, 454 aa, Sorghum bicolor
MKQARPPPPMEMRPPPTREMRPPSPMEDEAIDGWLPINARRNAKWWYSAFHNVTAMVGAGVLGLPYAMSQLGWEVGITVLILSWIITLYTLWQMVEMHEMVPGRRFDRYHELGQHAFGEKLGLWIVVPQQLVVEVGLNIVYMVTGGQSLQKFHDVVCDGKCKDIKLTYFIMIFASCHFVLSQLPNFHSISGVSLAAAVMSLCYSMIAWVASAHKGKSPEVHYGLRATTTPGKVFGFFGALGDVAFAYAGHNVVLEIQATIPSTPDKPSKKPMWKGVIVAYIIVAACYFPVSLVGYWAFGNSVNENILVSLRKPKWLVAMANMMVVVHLIGSYQLYAMPVFDMIETVLVRRFRFRPSLMLRLIARSVYVGFTMFVAITFPFFSALLSFFGGFAFAPTTYFLPCIMWLTICKPRAFSISWFTNWICIVLGVLLMVLSPLGGLRQIILTAKTYNFYQ

SEQ ID NO: 2969 - protein, 460 aa, Sorghum bicolor
MAAVQPSMETTQQGPPPAANYSPARDGGRSAEEKAAEIDNWLPINASRNAKWWYSAFHNVTAMVGAGVLGLPYAMSELGWGAGVTIMILSWIITLYTLWQMVEMHEMVPGKRFDRYHELGQHAFGERLGLWIVVPQQLVVEVGVNIVYMVTGGTSLKKFHDTVCESCKQLKLTYFIMIFASVHFVLSQLPNFNSISGVSLAAAVMSLSYSTIAWGASVDKGKAANVDYGMRATTTPGKVFGFLGALGTVAFAYAGHNVVLEIQATIPSTPEKPSKKPMWKGVVVAYIVVALCYFPVSFVGYWAFGNTVDSDILITLSRPKWLIALANMMVVIHVIGSYQIYAMPVFDMMETVLVKKLRFPPGLMLRLIARTVYVAFTMFIAITFPFFDGLLSFFGGFAFAPTTYFLPCIMWLAIYKPKRFSLSWFTNWICIILGVLLMVLAPIGGLRNIIISAKTYHFYQ

SEQ ID NO: 2970 - protein, 472 aa, Zea mays
MAAVQPSVEMTTQQGPPAASYSPARDGGGGRSAEDEEKEKAAAIDNWLPISATRNAKWWYSAFHNVTAMVGAGVLGLPYAMSQLGWGAGITIMLLSWVITLYTLWQMVEMHEMVPGKRFDRYHELGQHAFGDRLGLWIVVPQQLVVEVGVNIVYMVTGGTSLQKFHDVLVCGDAACEGGRKIRLTYFIMIFASCHFVLAQLPNFDSISGVSLAAAVMSLSYSTIAWGASVSKGRVPDVDYGLRATTPPGKVFGFLGALGTVAFAYAGHNVVLEIQATIPSTPEKPSKKPMWKGVVVAYLVVALCYFPVSFVGYWAFGDSVDGDILVTLNRPRWLIALANMMVVIHVIGSYQIYAMPVFDMIETVLVKKLRFPPGLTLRLIARTVYVAFTMFIAITFPFFDGLLSFFGGFAFAPTTYFLPCIMWLAIYKPKRFSLSWFTNWICIILGVLLMVLAPIGGLRQIIISAKTYKFYQ

SEQ ID NO: 2971 - protein, 446 aa, Zea mays
MQEQDVDDGGGRTTQQQEKSIDDWLPINSSRKAKWWYSAFHNVTAMVGAGVLGLPYAMSELGWGPGIAVMILSWIITLYTLWQMVEMHEMVPGKRFDRYHELGQHVFGDRLGLWIVVPQQLAVEVSLNIIYMVTGGQSLKKFHDVICDGGRCGGDLKLSYFIMIFASVHLVLSQLPNFNSISAVSLAAAVMSLSYSTIAWGASLHRGRREDVDYHLRATTTPGKVFGFLGGLGDVAFAYSGHNVVLEIQATIPSTPDKPSKKAMWKGAFVAYVVVAICYFPVTFVGYWAFGSGVDENILITLSKPKWLIALANMMVVVHVIGSYQVYAMPVFDMIETVLVKKMRFAPSLTLRLIARSVYVAFTMFLGITFPFFGGLLSFFGGLAFAPTTYFLPCIMWLKVYKPKRFGLSWFINWICIVIGVLLLILGPIGGLRQIILSATTYKFYQ

SEQ ID NO: 2972 - protein, 441 aa, Oryza sativa Indica Group
MAKQWWQDGRSAQEKAIDDWLPITSSRNAKWWYSAFHNVTAMVGAGVLSLPYAMSELGWGPGIAVLILSWIITLYTLWQMVEMHEMVPGKRFDRYHELGQHAFGEKLGLWIVVPQQLVVEVGVNIVYMVTGGKSLKKFHDVLCEGHGCKNIKLTYFIMIFASVHFVLSQLPNFNSISGVSLAAAVMSLSYSTIAWGASVDKGKVADVDYHLRATTSTGKVFGFFSALGDVAFAYAGHNVVLEIQATIPSTPEKPSKKPMWKGVVVAYIIVALCYFPVALVGYWAFGNHVDDNILITLSRPKWLIALANMMVVIHVIGSYQIYAMPVFDMIETVLVKKLRFPPGLTLRLIARTLYVAFTMFIAITFPFFGGLLGFFGGFAFAPTTYFLPCIMWLAIYKPRRFSLSWFTNWICIILGVMLMILSPIGGLRQIIIDAKTYKFYS

SEQ ID NO: 2973 - protein, 446 aa, Sorghum bicolor
MGTQAPENHSPTKDERSAGDKAIDDWLPITSSRNAKWWYSAFHNVTAMVGAGVLSLPYAMSKLGWGPGIVVLILSWIITLYTMWQMVEMHEMVPGKRFDRYHELGQHAFGQKLGLWIVVPQQLIVEVGGDIVFMVTGGKSLKKFHDVICDGKCKDIKLTYFIMIFASCHFVLSQLPNFNSISGVSLAAAVMSLSYSTIAWGVSLHKGKLPDVDYHVLAATTSEKAFNYFGALGDVAFAYAGHNVVLEIQATIPSTPENPSKKPMWKGVVVAYIMVAVCYFPVSFFGYWAFGNQVDDNILITLNKPKWLIALANMMVVIHVIGSYQIFAMPVFDMIETVLVKKLHFPPGLALRLIARSTYVALTTFVAITIPFFGGLLGFFGGFAFAPTTYFLPCIMWLAIYKPKRFSLSWFTNWVCILLGVVLMILAPIGALRQIILSAKTYRFYS

SEQ ID NO: 2974 - protein, 492 aa, Zea mays; identical to SEQ ID NO: 1030

SEQ ID NO: 2975 - protein, 488 aa, Hordeum vulgare subsp. vulgare
MSDRREKRPSDAADAAPEAKRAREPAAPAFPTYKDAPDLAPKIRLLCEILASSASDVEAALDDADVRVTTSDVEQVLRFSYAHPRGAAAFFRWAGHRHLHHQHSPYSWNLVIDLLGKNRLFDPMWDTVGSMRAQGLLSLATFASIFSSLAANPTSSPLKAFVEMPRYGMDRDTPALNSLLSALCRASRLDDARAAIPVARAEAGTRPDADSYAILLEGCEAAGNAAVAREVFDEMVHALDFDPANVPAYDSFLTTLVSSGSSTALSDAMEYLAVLRRYRCSPGEKFLRAALAAYLEARELRSAVVLWDEFVLRRGLVPDKEMYTTMIMLQGTLGHAEVTVKYLDEMAIYGVFPDADTYNVVLKLLLKGRKLREASAIFKEMVKNECWPNEANCSLALGMFLDTRDWDTGIKVWKCMAANSLPPLEEGGNMLVSKLKDEMLPEACKYAEDMIDQGIKLSSSTLTKLKHSLGKVKKGAIHDRLFAKWKAH

SEQ ID NO: 2976 - protein, 489 aa, Oryza sativa Japonica Group
MPDQRPKRPSDSVAAASPAAKRARDPSAPAFPTYRDAPDLPPKIRLLCEILASSAPDVDAALDDADVRVTSSDVEQVLRFSYAHPRAAVAFFRWAGHRHLRHQHSPYSWNLVVDLLGKNRLFEPMWDTVSSMRTQGLLSLATFASVFSSLAANPASSPLRAFVELPMYGMDRDTPALNSLLSALCRASRLDDARAAIPVARAEAGTRPDADSYAILLEGCEAAGDPHVAREVFDEMRHVIGFDPANVPAYDSFLTTLISSGSSTALMDAMDYLAILHRQRCSPGEKFFRAALAAHLKARELRGAVVLWNDFVVRRGLIPDKEMYSTMIMLQGTLGHPEVIVEYLDEMTFDGVFPDADTYNMVFQFLLKGRKLREASAIFSEMVKNEFWPNEANCSLALRMFLDTRDWDSGIKLWKCMVENGLPPLEESGNMLVSKLKDERLPEACKYAEDMIDRCIKLSSSTMSKLKQCLMKVYKGHIHDHLLRKWKAH

SEQ ID NO: 2977 - protein, 459 aa, Sorghum bicolor
MVGSGAAAGGGGDHARSKEAAGMMALHEALRNVCLSSDWTYSVFWTIRPRPRCRGGNGCKVGDDNGSLMLMWEDGFCRPRVAECLEDIDGEDPVRKAFIKMSIQLYNYGEGLMGKVASDKCHKWVFKEPSECEPNISNYWQSSFDALPPEWTDQFASGIQTIAVIQAGHGLLQLGSCKIIPEDLHFVLRMRHMFESLGYQSGFFLSQLFSSSRGASPTPPFPLKQQPPPAAARAPQQLFNWAGHHQPQLPPSPGAGASPLFPPGPGAFHPSSAARSMPPYPGGGKDEGGHMFHLPAAHHGSSKPPHMDEHQQTMGPGGEAPDGELRWPNGLSFFTALTGRADDAKLLFGGPGGGAGAADDEKAAADNAQTGHGGAENVEEYLSLESHSNKARKVESAAQSTKFKRSFTLPARMGSSTSPSPSPSVSASTAPAPPQQQGMEYRGPHEGGVYSDLMETFLE

SEQ ID NO: 2978 - protein, 463 aa, Zea mays
MVGSGAAGGGADHARSKEAAGMMALHEALRNVCLSSDWTYSVFWTIRPRPRCRGGNGCKVGDDNGSLMLMWEDGFCRPRVAECLEDMDGEDPVRKAFIKMSIQLYNYGEGLMGKVASDKCHKWVFKEPSECEPNISNYWQSSFDALPPEWTDQFASGIQTIAVIQAGHGLLQLGSCKIIPEDLHFVLRMRHMFESLGYQSGFFLSQLFSSSRGASPTPTPPFPLKQPPAAPAARAPPQLFSWPGHHQPQQLPSPAGASPLFPPGPGAFHPSSARPMPPFPGGKDEGHMFHLPPAAHHGTNKQPPQHMDEHHHHQQQPMVGAGGDAPDGDLRWPNGLSFFTALTGRADDAKLLFGGPGAGAGAADDDDKAAPDAHGGAENVEEYLSLESHSNKARKVESPAAQSTNKFKRSFTLPARMSSSSSTSAFPSVSASTAPPQQQQAGMEYRGPHEGGVYSDLMETFLE

SEQ ID NO: 2979 - protein, 516 aa, Hordeum vulgare subsp. vulgare
LAQRSYEPAHSPSGLDSLSPRGEKTQEAIKKSLGRVARRRTLPLAPPSSEGFYDAKGGREGERGKKGGKMVGSGAAGGGGGDHARSKEAAGMMALHEALRNVCLNSDWTYSVFWTIRPRPRCRGGNGCKVGDDNGSLMLMWEDGFCRPRMAECLEDMDGEDPVRKAFSKMSIQLYNYGEGLMGKVASDKCHKWVFKEPSECEPNIANYWQSSFDALPTEWTDQFASGIQTIAVIQAGHGLLQLGSCKIIPEDLHFVLRMRHMFESLGYQSGFFLSQLFSSSRGTSSTPSFPLKQPPPPARPPPQLFNWPGQPQLPHAAASPLFPPGPAAFHPSARSSMPHYPGNKDESHMYHLAPSQHGKPPHMDEHQHHQQQMAPGETPDGDLKWPNGMSFFTALTGRSDDPKLLFGGPGGGGGGADDGKPAQDAQTGHGGAENVEEYLSLGSHSNKARRMESAQSAKFKRSFTLPARMSSSNSPSPSVSASTGPAPPPQQQQGMEYRAQHEGSVYSDLMETFLE

SEQ ID NO: 2980 - protein, 434 aa, Zea mays
MVGSGADGGGGGDDARSKEAAGMMALHEALRNVCLDSDWTYSVFWTIRPRPRCRGGNGCMVGDDNGSLMLMWEDGFCRPRVAECLADMSGGEDPVRKAFIKMSIQLYNYGEGLMGKVASDKCHKWVFKEPSECEPNISNYWQSSFDALPPEWTDQFASGIQTIAVIQAGHGLLQLGSCKIIPEDLHFVLRMRHTFESLGYQSGFFLSQLFSSARGASPTPPPPAARPPPAQLFNWPGAHQPQLFPPGPGAFHHPSARAMPPLFPGGGKDEGHMFHIPPAHHGSKPLHMDELQHRHQQTMGAGGEAPDGELRWPNGLSFFTALTGRDDDAKLLFGGPGAADDEKAAPDAQTGHGGAGNVEEYLSLESHSDKAPSKVENGAQHSTKSKRSFTLPARVSSSTTTSPSVSASTAPQGMEYRGTHEGGVYSDLMETFLE

SEQ ID NO: 2981 - protein, 481 aa, Oryza sativa Japonica Group
MVGSGAAGGGGGGGGGGDHARSKEAAGMMALHEALRNVCLNSDWTYSVFWTIRPRPRCRGGNGCKVGDDNGSLMLMWEDGFCRPRVAECLEDIDGEDPVRKAFSKMSIQLYNYGEGLMGKVASDKCHKWVFKEPSECEPNIANYWQSSFDASPLAPLLLGGRDLITATTTHLINHLQKQAQHTATATVTIAVIQAGHGLLQLGSCKIIPEDLHFVLRMRHMFESLGYQSGFFLSQLFSSSRGTSPSPSSFPLKQQQPPPPQLFNWPGHAPPQLPPGASPLFPPGPAAFHPSSRPMPPFPGGGKDESHLFHLPPAAAAKQPQHMDEHHHHQQQPMAAPQQHGGEAPEGDLKWPNGLSFFTALTGRTEDAKFLFGGGGGGGADDGSKTAAAAQDAGHGGAENVEEYLSLESHSNKARRMESAQSTKFKRSFTLPARMSSSTTSTSPSVSASTAPAPPQQQQGMEYRGPHEGGVYSDLMETFLE

SEQ ID NO: 2982 - protein, 424 aa, Oryza sativa Indica Group
MMALHEALRNVCLNSDWTYSVFWTIRPRPRCRGGNGCKVGDDNGSLMLMWEDGFCRPRVAECLEDIDGEDPVRKAFSKMSIQLYNYGEGLMGKVASDKCHKWVFKEPSECEPNIANYWQSSFDATIAVIQAGHGLLQLGSCKIIPEDLHFVLRMRHMFESLGYQSGFFLSQLFSSSRGTSPSPSSFPLKQQQPPPPPAARPPPQLFNWPGHAPPQLPPGASPLFPPGPAAFHPSSRPMPPFPGGGKDESHLFHLPPAAAAKQPQHMDEHHHHQQQPMAAPQQHGGEAPEGDLKWPNGLSFFTALTGRTEDAKLLFGGGGGGGADDGSKTAAAAQDAGHGGAENVEEYLSLESHSNKARRMESAQSTKFKRSFTLPARMSSSTTSTSPSVSASTAPAPPQQQQGMEYRGPHEGGVYSDLMETFLE

SEQ ID NO: 2983 - protein, 312 aa, Zea mays
  misc_feature (295)..(295): Xaa can be any naturally occurring amino acid
MSSSSNSGKKPAPAGGRGGPTIRTLADINRGPAGFPGAGGGSSDDDEPQEYYTGGEKSGMLVQDPTRRNDVDAIFEQARQAGAIHGMPPFLGGESSSSRSFTGTGRLLTGETVPSAAPQEPVPIRIRHNIHLWNNGFTVDDGPLRYYDDPENEEFLESLKMSKCPKELVPTDGEHVDVSVIKRMEDYREPVRPQSAFQGVGRTLGGGPSPDESATPAPAPAAPAASRSAGIVVDDSQPFTSIQLRLADGTRMVARFNMHHTVGDIRSFIDASRPGTARPYQLQTGFPPKQLADPXQTVVQAGLANSVIMQKM

SEQ ID NO: 2984 - protein, 316 aa, Sorghum bicolor
MSSSSNGGKKPAASGGRGGPTIRTLSDLNRGPAGFPGAGGHGSGSDDDEPQEYYTGGEKSGMLVQDPTRRNDVDAIFEQARQAGALHGMPPFLGDESSGSRSFSGTGRLLTGETVPSAAPQEPAPVRIRHNIHLWNNGFSVDDGPLRYYDDPENAEFLESLKMSKCPRELVPTDGEHVDVSVIKRMEDYREPVRPRSAFQGVGRTLGGGPSPDESATPAPAPAPAAPAASRSVGIVVDDSQPFTSIQLRLADGTRMVARFNLHHTVGDIRSFIDASRPGATRPYQLQTGFPPKQLADPMQTVEQAGLANSVIMQKM

SEQ ID NO: 2985 - protein, 253 aa, Zea mays
MLVQDPTRRNDVDAIFEQARQAGAIHGMPPFLGGESSSSRSFTGTGRLLTGETVPSAAPQEPVPIRIRHNIHLWNNGFTVDDGPLRYYDDPENEEFLESLKMSKCPKELVPTDGEHVDVSVIKRMEDYREPVRPQSAFQGVGRTLGGGPSPDESATPAPAPAAPAASRSAGIVVDDSQPFTSIQLRLADGTRMVARFNMHHTVGDIRSFIDASRPGTARPYQLQTGFPPKQLADPTQTVVQAGLANSVIMQKM

SEQ ID NO: 2986 - protein, 313 aa, Zea mays
MSSSSNGGKKPAPGGGRRGPAIRTLADISRGPTGFPGAGGGDSGSDDDEPQEYYTGGEKSGMLVQDPTRRNDVDAIFEQARQAGIKGMPPLLDGESSSSRSFTGTGRLLTGETISSAAPQEPVPIRVRHNIHLWNNGFSVDDGPLRYYDDPENAEFLESLKMSKCPKELVPTDGEHVDASVIRRMEDYREPVRPRSAFQGVGRTLGGGPSPDESATAAPASAAPAASRSAGVVVDDSQPFTSIQLRLADGTRMVARFNMHHTVGDIRSFIDAARPGAARPYQLQTGFPPKQLADPTQTVEQAGLANSVIMQKM

SEQ ID NO: 2987 - protein, 311 aa, Oryza sativa Japonica Group
MSSSNNGGGGDKKPASGGRGGPTIRTLADISRGPSGFPGGGGGGGSDSDEPQEYYTGGEKSGMLVQDPTRRNTVDSIFEQARQMGALQDQPPPFEDQSSSSRSFTGTGRLLSGETAPAAPPPPGNVLHNIQFWNNGFTVDDGPLRDYDDPANADFIESIKKSQCPQELEPADRRTPVHVNVIKRLEDYQAPLRPPSPFQGVGRTLGGGSSAEESQAPAPATQEPRRSVGIVVDDSLPFTSIQLRLADGTRMVARFNMHHTVGDIRSFIDASRPGATRPYQLQTGFPPKQLADPAQTVEQAGLANSVIIQKM

SEQ ID NO: 2988 - protein, 341 aa, Oryza sativa Japonica Group
MSSSNNGGGGDKKPASGGRGGPTIRTLADISRGPSGFPGGGGGGGSDSDEPQEYYTGGEKRFVSFGSGIVPHTGRLFRCPQNSDYISDQLSGMLVQDPTRRNTVDSIFEQARQMGALQDQPPPFEDQSSSSRSFTGTGRLLSGETAPAAPPPPGNVLHNIQFWNNGFTVDDGPLRDYDDPANADFIESIKKSQCPQELEPADRRTPVHVNVIKRLEDYQAPLRPPSPFQGVGRTLGGGSSAEESQAPAPATQEPRRSVGIVVDDSLPFTSIQLRLADGTRMVARFNMHHTVGDIRSFIDASRPGATRPYQLQTGFPPKQLADPAQTVEQAGLANSVIIQKM

SEQ ID NO: 2989 - protein, 631 aa, Sorghum bicolor
MGMDGGGGKLPYSYAAHQDGGKLVKSFSRVEPRKFGLGLVAGFLLVTCAYFSTAKFDAIHIAMSKPRLHTVPSSVSAVPLGSARWWAPPPTPPTPTPSSNLISNKIWASETRPCPRRGARPRCSRKTTARLPLRVPGQDDAAPAAAGLLPPVSSEEAANGTQESGGLEDEELQVQDAVANPSKRSNDSAAAAAITTPSSSNGSSLAVVHSDPAILPAPAQPIPEVKQAVLDSETTPAREWKPLCDLTSNRRIDWCELDGDVRVLGANASVTLVAPPGADDRTFRAESWRIKPYPRKADPNAMHVVRVVTVQSVSGGGAPACTDRYDVPALVFSDRGYTGNYFHAFTDVILPLFLTARQYAGEVRLLVTDLQAWWVGKFSPVFKAISNYELVDLDKDPRVQCFRHVQVGLTSHDDFSIDPRRAPNGYSMVDFTAFMRATYGLPRGVAAADATKRPRLLLIARARTRRFVNTEEIVRGAERLGFEVVVSEGTHEVAPFAELANSCDAIMGVHGAGLTNMVFVPTGGVVIQVVPLGGLEFVAGYFRGPSRDMGLRYLEYRITPEESTLIDQYPRDHPIFTDPNGIKSKGWESLKDAYLDKQDVRLDMKRFRPTLKKAIAHLRKAKAKATNGGGN

SEQ ID NO: 2990 - protein, 625 aa, Zea mays
MGMDAGGGKLPYSYAGQQDGGKLVKSVSRVEPRRFGLGLVAGFLLVTCAYFSTAKFDAIQIAMTSRPVSSNAGGVGVGSLEVGGVVAAADTYNASRQGLDLGKKGPGATSMADEGSEAEALEKDGGKASSPSGPGVPAALLPPVSSEEAANSTLESGGLEDEELQVQDAVASGSKRSKDSAAAAAATRSANVSSPSVVHSHHAILPAPAQRIPEVKQADSETTPAREREWKPLCDVTSNRRIDWCELDGDVRVVGANASVTLVAPPGADNRTFRAESWRIKPYPRKADPNAMRFVRVLTVRSVASGSGEAACTDGGDDDVPALVFSDRGYTGNYFHAFTDVILPLFLTARRYAGEVRLLVADLQPWWVGKFLPVFRSISKYELVDLDRDPRVRCFRHVQVGLTSHADFSIDPRRAPNGYSMLDFTRFMRAAYGLPRGDVVAAAPARRPRLLVVARARTRRFVNTEEIVRGAEAVGFEAVVSEGTHEVAPFAELANGCDAIMGVHGAGLTNMVFLPTGGVVIQVVPLGGLEFVAGYFRGPSVDMGLRYLEYRIEPEESTLVDQYPRDHPIFTDPNGIKSKGWESLKDAYLDKQDVRLDMERFRPTLQEAIAHLRKAKAKANGDGNN

SEQ ID NO: 2991 - protein, 586 aa, Zea mays
MGMDAGGGKLPYSYAGQQDGGKLVKSVSRVEPRRFGLGLVAGFLLVTCAYFSTAKFDAIQIAMTSRPVSSNAGGVGVGSLEVGGVVAAADTYNASRQGLDLGKKGPGATSMADEGSEAEALEKDGGKASSPSGPGVPAALLPPVSSEEAANSTLESGGLEDEELQVQDAVASGSKRSKDSAAAAAATRSANVSSPSVVHSHHAILPAPAQRIPEVKQADSETTPAREREWKPLCDVTSNRRIDWCELDGDVRVVGANASVTLVAPPGADNRTFRAESWRIKPYPRKADRGYTGNYFHAFTDVILPLFLTARRYAGEVRLLVADLQPWWVGKFLPVFRSISKYELVDLDRDPRVRCFRHVQVGLTSHADFSIDPRRAPNGYSMLDFTRFMRAAYGLPRGDVVAAAPARRPRLLVVARARTRRFVNTEEIVRGAEAVGFEAVVSEGTHEVAPFAELANGCDAIMGVHGAGLTNMVFLPTGGVVIQVVPLGGLEFVAGYFRGPSVDMGLRYLEYRIEPEESTLVDQYPRDHPIFTDPNGIKSKGWESLKDAYLDKQDVRLDMERFRPTLQEAIAHLRKAKAKANGDGNN

SEQ ID NO: 2992 - protein, 681 aa, Zea mays
MGMDAGGGKLPYSYPAHQDGKLVKSFSRVEPRKFGLALVAGFLLVTCAYFSTAKFDAIHVAMISPVSGNAAGIGPLVGAANADTSDSKQRLDLGKQDPDDALSRSEEEEGSRADEVLEKDDGKASSSSGTDSGSNAPLEDTRRDETFVGDSGGASSAAGARSEAVPARHEHDDDAPAAALLPPVTSEGAANSTQGSGVLEDEELQVQDAVANPSKRSNDSAATRSSSSGRSPSVVHSDPAILPAPSQQIAPAAPQEADKALAVQHIPAIPEVKQSDSETPAREWKPLCDITSNRRIDWCELDGDVRVLGANASVTLVAPPGGADGRTFRAESWRIKPYPRKADPNAMRVVRVLTVRSVPGEAPACTDRHGVPALVFSDRGYTGNYFHAFTDVILPLFLTARQYAGEVRLLVTDLQAWWVGKFAPVFRSISNYELVDLDRDPRVHCFRHVQVGLTSHDDFSIDPRRAPNGYSMLDFTGFMRAAYGLPRGDVAAAAGPSSKRRPRLLLIARARTRRFVNAEEIVRGAEKLGFEVVVSEGTHEVAPFAELANSCDAIMGVHGAGLTNMVFVPTGGVVIQVVPLGGLEFVAGYFRGPSRDMGLRYLEYRITPEESTLINQYPRDHPIFTDPNGIKSKGWESLKDAYLDKQDVSLDMKRFRPTLKKAIAHIRKARAKANAGGGGNN

SEQ ID NO: 2993 - protein, 682 aa, Zea mays
MGMDAGGGKLPYSYPAHQDGKLVKSFSRVEPRKFGLALVAGFLLVTCAYFSTAKFDAIHVAMTVSPVSGNAAGIGPLVGAANADTSDSKQRLDLGKQDPDDALSRSEEEEGSRADEVLEKDDGKASSSSGTDSGSNAPLEDTRRDETFVGDSGGASSAAGARSEAVPARHEHDDDAPAAALLPPVTSEGAANSTQGSGVLEDEELQVQDAVANPSKRSNDSAATRSSSSGRSPSVVHSDPAILPAPSQQIAPAAPQEADKALAVQHIPAIPEVKQSDSETPAREWKPLCDITSNRRIDWCELDGDVRVLGANASVTLVAPPGGADGRTFRAESWRIKPYPRKADPNAMRVVRVLTVRSVPGEAPACTDRHGVPALVFSDRGYTGNYFHAFTDVILPLFLTARQYAGEVRLLVTDLQAWWVGKFAPVFRSISNYELVDLDRDPRVHCFRHVQVGLTSHDDFSIDPRRAPNGYSMLDFTGFMRAAYGLPRGDVAAAAGPSSKRRPRLLLIARARTRRFVNAEEIVRGAEKLGFEVVVSEGTHEVAPFAELANSCDAIMGVHGAGLTNMVFVPTGGVVIQVVPLGGLEFVAGYFRGPSRDMGLRYLEYRITPEESTLINQYPRDHPIFTDPNGIKSKGWESLKDAYLDKQDVSLDMKRFRPTLKKAIAHIRKARAKANAGGGGNN

SEQ ID NO: 2994 - protein, 681 aa, Zea mays
MGMDAGGGKLPYSYPAHQDGKLVKSFSRVEPRKFGLGLVAGFLLVTCAYFSTAKFDAIHVAMTVSPVSGNAAGIGPLVGAANADTSDSKQRLDLGKQDPDDALSRSEEEEGSRADEVLEKDDGKASSSSGTDSGSNAPLEDTRRDETFVGDSGGASSAAGARSEAVPARHEHDDDAPAAALLPPVTSEGAANSTQGSGVLEDEELQVQDAVANPSKRSNDSAATRSSSSGRSPSVVHSDPAILPAPSQQIAPAAPQEADKALAVQHIPAIPEVKQSDSETPAREWKPLCDITSNRRIDWCELDGDVRVLGANASVTLVAPPGGADGRTFRAESWRIKPYPRKADPNAMRVVRVLTVRSVPGEAPACTDRHGVPALVFSDRGYTGNYFHAFTDVILPLFLTARQYAGEVRLLVTDLQAWWVGKFAPVFRSISNYELVDLDRDPRVHCFRHVQVGLTSHDDFSIDPLRAPNGYSMLDFTGFMRAAYGLPRGDVAAAGPSSKRRPRLLVIARARTRRFVNAEEIVRGAVKLGFEVVVSEGTHEVAPFAELANSCDAIMGVHGAGLTNMVFVPTGGVVIQVVPLGGLEFVAGYFRGPSRDMGLRYLEYRITPEESTLINQYPRDHPIFTDPNGIKSKGWESLKDAYLDKQDVSLDMKRFRPTLKKAIAHIRKARAKANAGGGGNN

SEQ ID NO: 2995 - protein, 366 aa, Sorghum bicolor; identical to SEQ ID NO: 1033

SEQ ID NO: 2996 - protein, 366 aa, Zea mays
MAGPAPDRAALTVGPGMDMPIMHDSDRYELVRDIGSGNFGVARLMRDRRTTELVAVKYIERGEKIDENVQREIINHRSLKHPNIIRFKEVILTPTHLAIVMEYASGGELFERICKNVRFSEDEARYFFQQLISGVSYCHSMQVCHRDLKLENTLLDGSDAPRLKICDFGYSKSSVLHSQPKSTVGTPAYIAPEVLLKKEYDGKIADVWSCGVTLYVMAVGAYPFEDPEEPKNFRKTIQRILNVQYAIPDYVNISPECRHLISRIFVGDPAMRITITEIRNHSWFLKNLPADLMDDDSMSNQYEEPDQPMQTMDQIMQILTEATIPPACSRSINVLADGLDMDDDMDDLDSDSDLDVDSSGEIVYAM

SEQ ID NO: 2997 - protein, 366 aa, Zea mays
MAGPAPDRAALTVGPGMDMPIMHDSDRYELVRDIGSGNFGVARLMRDRRTTELVAVKYIERGEKIDENVQREIINHRSLKHPNIIRFKEVILTPTHLAIVMEYASGGELFERICKNVRFSEDEARYFFQQLISGVSYCHSMQVCHRDLKLENTLLDGSDAPRLKICDFGYSKSSVLHSQPKSTVGTPAYIAPEVLLKKEYDGKIADVWSCGVTLYVMAVGAYPFEDPEEPKNFRKTIQRILNVQYAIPDYVNISPECRHLISRIFVGDPAMRITITEIRNHSWFLKNLPADLMDDDSMSNQYEEPDQPMQTMDQIMQILTEATIPPACSRSINVLADGLDMDDDMDDLDSDSDLDVDSSGDIVYAM

SEQ ID NO: 2998 - protein, 359 aa, Zea mays
MAGPAPDRAALTVGPGMDMPIMHDSDRYELVRDIGSGNFGVARLMRDRRTSELVAVKYIERGEKIDENVQREIINHRSLKHPNIIRFKEVILTPTHLAIVMEYASGGELFERICKNVRFSEDEARYFFQQLISGQVCHRDLKLENTLLDGSDAPRLKICDFGYSKSSVLHSQPKSTVGTPAYIAPEVLLKKEYDGKIADVWSCGVTLYVMVVGAYPFEDPEEPKNFRKTIQRILNVQYAIPDNVNISPECRHLISRIFVGDPATRITIPEIRNHSWFLKNLPADLMDDDSMSNQYEEPDQPMQTMDQIMQILTEATIPPACSRSINVLADGLDMDDDMDDLDSDSDLDVDSSGEIVYAM

SEQ ID NO: 2999 - protein, 427 aa, Hordeum vulgare subsp. vulgare
GFISLSLLVGQCHELVAAEGGRGGLSSPSIRGGGRRGAATPADRTLAAAASSIRPPPSPPAMAGAAPDRAALTVGPGMDMPIMHDSDRYELVRDIGSGNFGVARLMRDRRTMELVAVKYIERGEKIDENVQREIINHRSLKHPNIIRFKEVILTPTHLAIVMEYASGGELFERICKNIRFSEDEARYFFQQLISGVSYCHSMQVCHRDLKLENTLLDGSPAPRLKICDFGYSKSSVLHSQPKSTVGTPAYIAPEVLLKKEYDGKIADVWSCGVTLYVMVVGAYPFEDPEEPKNFRKTIQRILSVQYSIPDNVDISPECRHLISRIFVGDPALRITIPEIRSHNWFLKNLPADLMDDDSMSSQYEEPEQPMQTMDQIMQILTEATIPPACSRINHILTDGFDMDDDMDDLESDSDLDIDSSGEIVYAM

SEQ ID NO: 3000 - protein, 371 aa, Oryza sativa Japonica Group
MAAAGAGAGAPDRAALTVGPGMDMPIMHDSDRYELVRDIGSGNFGVARLMRDRRTMELVAVKYIERGEKIDDNVQREIINHRSLKHPNIIRFKEVILTPTHLAIVMEYASGGELFERICKNVRFSEDEARYFFQQLISGVSYCHSMQVCHRDLKLENTLLDGSPAPRLKICDFGYSKSSVLHSQPKSTVGTPAYIAPEVLLKKEYDGKTADVWSCGVTLYVMVVGAYPFEDPEEPKNFRKTIQRILNVQYSIPENVDISPECRHLISRIFVGDPSLRITIPEIRSHGWFLKNLPADLMDDDSMSSQYEEPDQPMQTMDQIMQILTEATIPPACSRINHILTDGLDLDDDMDDLDSDSDIDVDSSGEIVYAM

SEQ ID NO: 3001 - protein, 363 aa, Vitis vinifera
MDRSAITVGPAMDVPIMHDSDRYELVRDIGSGNFGVARLMRDKQTGELVAVKYIERGEKIDENVQREIINHRSLRHPNIVRFKEVILTPTHLAIVMEYASGGELFERICNAGRFSEDEARFFFQQLVSGVSYCHAMQVCHRDLKLENTLLDGSSAPRLKICDFGYSKSSVLHSQPKSTVGTPAYIAPEVLLKKEYDGKIADVWSCGVTLYVMLVGAYPFEDPEEPKNFHKTIQRILKVQYSIPDYVHISPECRHLISRIFVADPATRITIAEIRNHDWFLKNLPADLMDETKMDNQYEEPEQPMQSIDEIMRIIGEAMIPAAGTQSLNQYLTGSLDIDDEMEEDLETDPDLDIDSSGEIVYAM

SEQ ID NO: 3002 - protein, 363 aa, Vitis vinifera
MDRSAITVGPAMDVPIMHDSDRYELVRDIGSGNFGVARLMRDKQTGELVAVKYIERGEKIDENVQREIINHRSLRHPNIVRFKEVILTPTHLAIVMEYASGGELFERICNAGRFSEDEARFFFQQLVSGVSYCHAMQVCHRDLKLENTLLDGSPAPRLKICDFGYSKSSVLHSQPKSTVGTPAYIAPEVLLKKEYDGKIADVWSCGVTLYVMLVGAYPFEDPEEPKNFHKTIQRILKVQYSIPDYVHISPECRHLISRIFVADPATRITIAEIRNHEWFLKNLPADLMDETKMDNQYEEPEQPMQSIDEIMRIIGEAMIPAAGTQSLNQYLTGSLDIDDEMEEDLETDPDLDIDSSGEIVYAM

SEQ ID NO: 3003 - protein, 316 aa, Sorghum bicolor
MVVPVIDFSKLELDGAERAETLEQIANGCEAWGFFQLVNHGIPLELLERVKKVCSDCYRLREAGFKASEPVRTLEALVAAEQRGEEVAPVDDLDWEDIFYIHDGCQWPSDPPAFKETMREYRAELRKLAERVMEAMDENLGLDRGTIKAAFSGDGRREPFFGTKVSHYPPCPRPDLITGLRAHTDAGGVILLFQDDRVGGLEVLKDGQWTDVQPLAGAIVVNTGDQIEVLSNGRYRSAWHRVLPMRDGNRRSIASFYNPANEATISPAAVATSGGAAYPKYMFGDYMDVYVKQKFQAKEPRFEAVKAAAPKSSPAA

SEQ ID NO: 3004 - protein, 316 aa, Sorghum bicolor
MVVPVIDFSKLELDGAERAETLAQIANGCEEWGFFQLVNHGIPLELLERVKKVCSDCYRLREAGFKASEPVRTLEALLDAERRGEEVAPVDDLDWEDIFYIHDGSQWPSDPPAFKETMREYRAELRKLAERVMEAMDENLGLDRGTIKAAFSGDGRHEPFFGTKVSHYPPCPRPDLITGLRAHTDAGGVILLFQDDKVGGLEVLKDGQWTDVQPLAGAIVVNTGDQIEVLSNGRYRSAWHRVLPMRDGNRRSIASFYNPASEATISPAAVATSGGEAYPKYMFGDYMDVYVKQKFQAKEPRFEAVKAAAPKSSPAA

SEQ ID NO: 3005 - protein, 314 aa, Zea mays
MVVPVIDFSKLDGAERAETLAQIANGCEEWGFFQLVNHGIPLELLERVKKVSSDCYRLREAGFKASEPVRTLEALVDAERRGEVVAPVDDLDWEDIFYIHDGCQWPSEPPAFKETMREYRAELRKLAERVMEAMDENLGLARGTIKDAFSSGGRHEPFFGTKVSHYPPCPRPDLITGLRAHTDAGGVILLFQDDRVGGLEVLKDGQWTDVQPLAGAIVVNTGDQIEVLSNGRYRSAWHRVLPMRDGNRRSIASFYNPANEATISPAAVQASGGDAYPKYVFGDYMDVYAKHKFQAKEPRFEAVKVAAPKSSPAA

SEQ ID NO: 3006 - protein, 314 aa, Zea mays
MVVPVIDFSKLDGAERAETLAQIANGCEEWGFFQLVNHGIPLELLERVKKVCSDCYRLREAGFKASEPVRTLEALVDAERRGEVVAPVDDLDWEDIFYIHDGCQWPSDPPAFKETMREYRAELRKLAERVMEAMDENLGLARGTIKDAFSGGGRHDPFFGTKVSHYPPCPRPDLITGLRAHTDAGGVILLFQDDKVGGLEVLKDGEWTDVQPLEGAIVVNTGDQIEVLSNGLYRSAWHRVLPMRDGNRRSIASFYNPANEATISPAAVQASGGDAYPKYLFGDYMDVYVKQKFQAKEPRFEAVKTGAPKSSPAA

SEQ ID NO: 3007 - protein, 314 aa, Zea mays
MVVPVIDFSKLDGAERAETLAQIANGCEEWGFFQLVNHGIPLELLERVKKVSSDCYRLREAGFKASEPVRTLEALVDAERRGEVVAPVDDLDWEDIFYIHDGCQWPSEPPAFKETMREYRAELRKLAERDMEAMDENLGLARGTIKDAFSSGGRHEPFFGTKVSHYPPCPRPDLITGLRAHTDAGGVILLFQDDRVGGLEVLKDGQWTDVQPLAGAIVVNTGDQIEVLSNGRYRSAWHRVLPMRDGNRRSIASFYNPANEATISPAAVQASGGDAYPKYVFGDYMDVYAKHKFQAKEPRFEAVKVAAPKSSPAA

SEQ ID NO: 3008 - protein, 308 aa, Hordeum vulgare subsp. vulgare
MVVPVIDFSKLDGAERAETMAQIADGCENWGFFQLVNHGIPLELLDRVKKVCSESYRLREAAFRSSEPVQTLERLVEAERRGEAVAPVDDMDWEDIFYLHDDNQWPSDPPAFKETMREYRAELKKLAERVMEAMDENLGLDKGRMKAAFTGDGLHAPFFGTKVSHYPPCPRPDLITGLRAHTDAGGVILLFQDDKVGGLEVLKDGQWLDVQPLPDAIVVNTGDQVEVLSNGRYRSAWHRVLPMRNGNRRSIASFYNPAFEAAISPAVGEGGAAAYPDYVFGDYMDVYNKQKFDAKEPRFEAVKAPKSA

SEQ ID NO: 3009 - protein, 308 aa, Hordeum vulgare subsp. vulgare
MVVPVIDFSKLDGAERAETMAQIADGCENWGFFQLVNHGIPLELLDRVKKVCSESYRLREAAFRSSKPVQTLERLVEAERRGEAVAPVDDMDWEDIFYLHDNNQWPSDPPAFKETMREYRSELKKLAERVMEAMDENLGLDKGRMKAAFTGDGLHAPFFGTKVSHYPPCPRPDLITGLRAHTDAGGVILLFQDDKVGGLEVLKDGQWLDVQPLADAIVVNTGDQVEVLSNGRYRSAWHRVLPMRNGNRRSIASFYNPAFEAAISPAVGEAGAAEYPDYVFGDYMDVYNKQKFEAKEPRFEAVKAPKAA

SEQ ID NO: 3010 - protein, 308 aa, Oryza sativa Japonica Group
MVVPVIDFSKLDGTAAERAETMAQIDNGCEEWGFFQLVNHGVPKELLDRVKKVCLESYRLREAAFMESEPVRTLEGLMAAERRGEAAAPVDDMDWEDIFYLHDDNQWPSNPPEFKETMREYRAALRGLAERVMEAMDENLGLDKGRMRRAFTGDGRHAPFFGTKVSHYPPCPRPDLITGLRAHTDAGGVILLFQDDRVGGLQVLRGGEWVDVQPLADAIVVNTGDQVEVLSNGRYRSAWHRVLPMRDGNRRSVASFYNPAFEATISPAVGAGGEYPEYVFGEYMDVYAKQKFDAKEPRFEAVKAPKSA

SEQ ID NO: 3011 - protein, 433 aa, Zea mays; identical to SEQ ID NO: 1034

SEQ ID NO: 3012 - protein, 433 aa, Sorghum bicolor
MKVEVVETTLVPPSEATPRHALWLSNLDLAVPKTHTPLVYYYPRPPDPDPEPDADAPAGEGSFFDPARLREALASALVAFYPLAGRLVVGQGGRIEIDCTGEGALFVVARADFTGDDMFRDFEPSPEARRLLVPFAESGDPPCVLAMVQVTFLKCGGVAVGTGMHHVTMDGAGAIQFIRAWTALARGESPTWAPSHDRTLLRARSPPHVPFEHPVYSPAYLNGSPRPFVTRVYTVPPKLLAGIRSRCAPGASTYCAVTAHLWRAMCVARALPADGETRLRVPANVRQRLRPPLPATYFGNAIVRDLVTVKVGDVLSQPLGFVADRIKRAVSRVDDALVRSVVDYLELEAEKGNQAARGQFMPESDLWVVSWLGMPIHDADFGWGRPGFVAPAQMFGSGTAYVTQGYDKDDPINVLFALEPEYLQTFEKAFYGE

SEQ ID NO: 3013 - protein, 433 aa, Hordeum vulgare subsp. vulgare
MKVEVVDTRLVTPSEPTPRHTLWLSNLDLAVPKTHTPLVYYYPSPAGDGDGGEKEAEGFFAPERLREALARALVPFYPLAGRMAAGPEGRLEIDCNGEGALFVVARADFTGDEMFRDFEPSPEARRLLVPFAASGDPPCLLAMVQVTFLKCGGVAVGTGMHHVTMDGAGAIQFIRTWTTLARGLDAASVYPTPPVHDRTVLRARSPPHVAFEHPVYSPSNLNGLPRPFVTRVYAVSPKLLAGIKSSCAPGVSTYCALTAHLWRAMCVARGLAPDAESRLRVPANIRQRLRPQLPANYFGNAIVRDLVTVRVGDVLSQPLGFVADRIKRAVARVDDAFVRSVIDYLELESEKGSQAARGQFMPETDLWVVSWLGMPIHDADFGWGCPKFVAPAQMFGSGTAYVTQAPDKDDGVSVLFALEPEYLQCFEKAFYGE

SEQ ID NO: 3014 - protein, 442 aa, Oryza sativa Indica Group
MKVEVVETTLVAPSEATPQHALWLSNLDLAVPKTHTPLVYYYPAPSPPPADAGAEAEAEAEGFFAPERLREALARALVPFYPLAGRLAAGPGGRLEIDCNGEGALFVVARADFTGDEMFTDFEPSPEARRLLVPFAASGEPPCVLAMVQVTFLKCGGVAVGTGMHHVTMDGAGAFQFIRTWTGLSRGLDAAAASPSLPSHDRTLLRARSPPHVPFEHPVYSPSYLNGLPRPFVTRVYSVPPKLLADIKGDCAPGVFTYGAVTAHLWRAMCVARGLPHDAESRLRVPANIRQRVRPPLPSPYFGNAIVRDLVTVPVRDILSQPLGFVAERIKHAVARVDDAFVRSVIDFLELESEKGNQAARGQFMPETDLWVVSWLGMPIYDADFGWGRPAFVAPAQMFGSGTAYVTQAPDKDDGSGGGVSVLFALEPEYIQCFEKAFYGTE

SEQ ID NO: 3015 - protein, 440 aa, Oryza sativa Japonica Group
MKVEVVETTLVAPSEATPQHALWLSNLDLAVPKTHTPLVYYYPAPSPPPADAGAEAEAEGFFAPERLREALARALVPFYPLAGRLAAGPGGRLEIDCNGEGALFVVARADFTGDEMFTDFEPSPEARRLLVPFAASGEPPCVLAMVQVTFLKCGGVAVGTGMHHVTMDGAGAFQFIRTWTGLSRGLDAAAASPSPPSHDRTLLRARSPPHVPFEHPVYSPSYLNGLPRPFVTRVYSVPPKLLADIKAACAPGVSTYGAVTAHLWRAMCVARGLPHDAESRLRVPANIRQRVRPPLPSPYFGNAIVRDLVTVPVRDILSQPLGFVAERIKHAVARVDDAFVRSVIDFLELESEKGNQAARGQFMPETDLWVVSWLGMPIYDADFGWGRPAFVAPAQMFGSGTAYVTQAPDKDDGSGGGVSVLFALEPEYIQCFEKAFYGTE

SEQ ID NO: 3016 - protein, 431 aa, Zea mays
MKVDVVGTTLVAPSEDTPHPELWLSNLDLAVPKTHTPLVYYYPAPAAGGDTDGEAAFFAPERLEAALAKALVPFYPLAGRLGVGEGGRLQIDCTGEGALFVVARADFAGEDVFSDYEPSPEVRRLFVPFAASGDPPCVMSMFQVTFLKCGGVVLGTGIHHVTMDGMGAFHFIQTWTGVARGLDTAEACGPLPFHDRTLLRARSPPAPAFDHPVYSPALLNGVPRPFVTRVYAVSPKLLAGIKSRCAPGVSTYCAVTAHLWRCMCVARGLAPGSDTRLRVPANVRHRLRPPLPRSYFGNAIVRDLVTTRVEDVLERPLGFVAQAIKDAVDRVNDAYVRSVVDYLEVESEKGSQAARGQLMPESDLWVVSWLGMPMYDADFGWGTPRFVAPAQMFGSGTAYVTQRANRDDGLAVLFGLEPEYLQCFEKVFYGE

SEQ ID NO: 3017 - protein, 431 aa, Zea mays
MKVDVVGTTLVAPSEDTPHPELWLSNLDLAVPKTHTPLVYYYPAPAAGGDTDGEAAFFAPERLEAALAKALVPFYPLAGRLGVGEGGRLQIDCTGEGALFVVARADFAGEDVFSDYEPSPEVRRLFVPFAASGDSPCVMSMFQVTFLKCGGVVLGTGIHHVTMDGMGAFHFIQTWTGVARGLDTAEACGPLPFHDRTLLRARSPPAPAFDHPVYSPALLNGVPRPFVTRVYAVSPKLLAGIKSRCAPGVSTYCAVTAHLWRCMCVARGLAPGSDTRLRVPANVRHRLRPPLPRSYFGNAIVRDLVTTRVEDVLERPLGFVAQAIKDAVDRVNDAYVRSVVDYLEVESEKGSQAARGQLMPESDLWVVSWLGMPMYDADFGWGTPRFVAPAQMFGSGTAYVTQRANRDDGLAVLFGLEPEYLQCFEKVFYGE

SEQ ID NO: 3018 - protein, 443 aa, Sorghum bicolor
MKVDVVGTTLVAPSEDTPRRELWLSNLDLAVPKTHTPLVYYYPAPAPAAATGTDDGGDRAAFFAPERLEAALARALVPFYPLAGRLGVGVGEGGRLRIDCNAQGALFVVARADFAGEDVFGDTDGGYEPSPEVRRMFVPFVPSGDPPCVMSMFQVTFLKCGGVVLGTGIHHVTMDGMGAFHFMQTWTGVARGLDVAEACGPLPPFHDRTLLRARSPPTPAFDHPVYSPSLLNGRPRPFVTRVYAVSPKLLADVKSRCAPGVSTYCAVTAHLWRCMCVARGLAPCSDTRLRVPANVRHRLRPALPRSYFGNAIVRDLVVARVEDVLDRPLGFVAQAIKDAVDRVDDAYVRSVVDYLEVESEKGSQAARGQLMPESDLWVVSWLGMPMYDADFGWGTPRFVAPAQMFGSGTAYVTQRANKDDGIAVLFGLEPQYLQCFEKVFYGE

SEQ ID NO: 3019 - protein, 438 aa, Hordeum vulgare subsp. vulgare
MMKVEVVESALVAPSEETPRRELWLSNLDLAVPKTHTPLVYYYPAPAPATAAPDADPAGFFSPERLRAALARALVLFYPLAGRLGREGEGGRLQIDCSGEGALFVVARAPDVAGDELFGSGYEPSPEIRRMFVPFAPSGDPPCLMAMFQVTFLKCGGVVLGTGIHHVTMDGMGAFHFIQTWTGLARGLALSEACPSPPFHDRTLLRARSPPRPEFDHPVYSPEYLNGAPRPFVTRVYSVSPKLLADLKSRCAPGASTYGAVTAHLWRCMCVARGLAAGSDTRLRVPANIRHRLRPPLPRQFFGNAIVRDLVTVKVGDVLAQPLGYVADTIRKAVEHVDDAYTRSVMDYLEVESEKGSQAARGQLMPESDLWVVSWLGMPMYDADFGWGAPRFVAPAQMFGSGTAYVTQRGADRDDGIAVLFALEPQYLHCFQDVFYGE

SEQ ID NO: 3020 - protein, 425 aa, Hordeum vulgare subsp. vulgare
PSEETPRRELWLSNLDLAVPKTHTPLVYYYPAPAPATAAPDADPAGFFSPERLRAALARALVLFYPLAGRLGREGEGGRLQIDCSGEGALFVVARAPDVAGDELFGSGYEPSPEIRRMFVPFAPSGDPPCLMAMFQVTFLKCGGVVLGTGIHHVTMDGMGAFHFIQTWTGLARGLALSEACPSPPFHDRTLLRARSPPRPEFDHPVYSPEYLNGAPRPFVTRVYSVSPKLLADLKSRCAPGASTYGAVTAHLWRCMCVARGLAAGSDTRLRVPANIRHRLRPPLPRQFFGNAIVRDLVTVKVGDVLAQPLGYVADTIRKAVEHVDDAYTRSVMDYLEVESEKGSQAARGQLMPESDLWVVSWLGMPMYDADFGWGAPRFVAPAQMFGSGTAYVTQRGADRDDGIAVLFALEPQYLHCFQDVFYGE

SEQ ID NO: 3021 - protein, 359 aa, Zea mays; identical to SEQ ID NO: 1035

SEQ ID NO: 3022 - protein, 231 aa, Sorghum bicolor
MALARRLLRLSPHLGTLPLPSPNSSNLIGTRTYISDMRRSAFVDRLLRSVRSEISSLSNFAPPPSPPPPTPFTVEDRPGEQWTRLRRVFPAAEGEEEEVRVDATLVDGALPASRSGADTGGPPRLHISVNVEVSKAARPGVVLTFECSAWPDEMEVRRVFPVRRGGPAPVQQYIGRQFSELDEEMQSAVQDYLEQIGVNDDLAAFLHAYMENKEHTELIRWLKNIECHIKK

SEQ ID NO: 3023 - protein, 230 aa, Zea mays
MALARRLLRLTPYLGTLSLPPPNSHLLRNRTYISDMRRSAFVDRLLRSVRSEISFLDNSAPPPPPPPPKPFTIEDRPGEQWARLRRVFPAAEGEEEEVRVDATLVDGALPPSRSGADTGGPPRMHISVKVEVSKAARPGVALTFECSAWPDEMEVRRVFPVRRGGPAPVQQYVGRQFSELDEEMQSAVQDYLEKIGVNDDLAAFLHAYMENKEHTELIRWLKNVECHIKK

SEQ ID NO: 3024 - protein, 277 aa, Zea mays
MSSGEDGYCSSDSPRAESPDQPQAAAAADADADAESPRAGAGPNKRDLHASSPAAKRSRRSVEKRVVSVPLAECGEGPPPSDSWAWRKYGQKPIKGSPYPRGYYRCSSSKGCPARKQVERSRADPAVLLVTYTFDHNHEAPRPKSSCCHQQGRPPAPKPDEPVAEQEDELGPEHEPEDEQEPEQKVVPGLAGPETAPATATLAPVAEEDESFDLGWFDQYPTWHRSALYAPLLPPEEWERELQGEDALFAGLGELPECAVVFGRRRELSLAATAPCS

SEQ ID NO: 3025 - protein, 272 aa, Zea mays
MSSGEDGYCSSDSPRAETPDQPQAAAAADADAESPRAGAGPNKRDLHASSPAAKRSRRWVEKRVVSVPLAECGEGPPPSDSWAWRKYGQKPIKGSPYPRGYYRCSSSKGCPARKQVERSRADPAVLLVTYTFDHNHEAPRPKSSCCHQQGRPPAPKPDEPVVAVAEQEDEPEDWQEPEQKVVLGLAGPETAPATATLAPAGEEDESFDLGWFDQYPTWHRSALYAPLLPPEEWERELQGEDALFAGLGELPECAVVFGRRRELSLAATAPCS

SEQ ID NO: 3026 - protein, 310 aa, Sorghum bicolor
MSSAEDGYCSSDSPRAESPDEPLLPAAVADADAESPRAAGSGMNKRERDLSDLPASPSSPLPPAKRSRRSVEKRVVSVPLAECGDRPRGATGEGPPPSDSWAWRKYGQKPIKGSPYPRGYYRCSSSKGCPARKQVERSRADPTVLLVTYTFDHNHEAPQPKSSSCHQQGKPSTRPPAPKPEPVVEQDELGPEHELAETEVPEQQEPVEEEQEQKVVPGLAGPEAEAEAEPTATVAPAAAEEDESFDFGWFDQYPTWHRSALYAPLLPPEEWERELQGEDALFAGLGELPECAVVFGRRRELSLATTAPCS

SEQ ID NO: 3027 - protein, 316 aa, Oryza sativa Japonica Group
MAAGEEVMDRSTSAEDGYCSAGTDSPRAESVDEQGAAEESSPRGGQKRELPSPSASPSSPLPPAAKRSRRSVEKRVVSVPIAECGDRPKGAGEGPPPSDSWAWRKYGQKPIKGSPYPRGYYRCSSSKGCPARKQVERSRADPTVLLVTYSFEHNHPWPQPKSSSCHASKSSPRSTAPKPEPVADGQHPEPAENESSASAELEVPEPEPEQESEPVVKQEEEQKEEQKAVVEPAAVTTTVAPAPAVEEEDENFDFGWIDQYHPTWHRSYAPLLPPEEWERELQGDDALFAGLGELPECAVVFGRRRELGLAATAPCS

SEQ ID NO: 3028 - protein, 316 aa, Oryza sativa Indica Group
MAAGEEVMDRSTSAEDGYCSAGTDSPRAESVDEQGAAEESSPRGGQKRELPSPSASPSSPLPPAAKRSRRSVEKRVVSVPIAECGDRPKGAGEGPPPSDSWAWRKYGQKPIKGSPYPRGYYRCSSSKGCPARKQVERSRADPTVLLVTYSFEHNHPWPQPKSSSCHASKSSPRSTAPKPEPAADGQQPEPAENESSASAELEVPEPEPEQESEPVVKQEEEQKEEQKAVVEPAAVTTTVAPAPAVEEEDENFDFGWIDQYHPTWHRSYAPLLPPEEWERELQGDDALFAGLGELPECAVVFGRRRELGLAATAPCS

SEQ ID NO: 3029 - protein, 316 aa, Oryza sativa Japonica Group
MAAGEEVMDRSTSAEDGYCSAGTDSPRAESVDEQGAAEESSPRGGQKRELPSPSASPSSPLPPAAKRSRRSVEKRVVSVPIAECGDRPKGAGEGPPPSDSWAWRKYGQKPIKGSPYPRGYYRCSSSKGCPARKQVERSRADPTVLLVTYSFEHNHPWPQPKSSSCHASKSSPRSTAPKPEPVADGQHPEPAENESSASAELEVPEPEPEQESEPVVKQEEEQKEEQKAVVEPAAVTTTVAPAPAVEEEDENFDFGWIDQYHPTWHRSYAPLLPPEEWERELQGDDALFAGLGELPECAVVFGRRRELGLAATGPCS

SEQ ID NO: 3030 - protein, 512 aa, Sorghum bicolor; identical to SEQ ID NO: 1036

SEQ ID NO: 3031 - protein, 512 aa, Zea mays
MEVVASAPGKVLIAGGYLVLERPNAGLVLSTTARFYAVVRPLRDSLPADSWTWAWTDVKVTSPQLSRVATYKLSLNKTTLQLTSSRESTNPFVEQAIQFSVAAAKATIIDKERKDVVDKLLLQGLNITIIGHNDFYSYRKQIEARGLPLTPEVLLSLPPFSSITFNSEVANGTMTGEKCKPEVAKTGLGSSAAMTTSVVAALLHYLGAVNLSCPGQSSGDNASGRELDLVHTIAQSAHCLAQGKIGSGFDVSAAVYGSQRYVRFSPEILSSAQAIGGTVLPDVVSDVLTQRWDHENKQFSLPPLMTLLLGEPGTGGSSTPSMVGSVKRWLKSDPEKSRDTWSKLAIANSTLENQLRILNGLSENHHEAYESMVRSCSHLTYGKWAEVATNQHQELIIRSLLAARDACLEIRLHMREMGIAAGVPIEPDSQTRLLDATMNMEGVLLAGVPGAGGFDAVFSVVLGDASNAVAHAWSSVGVLPLPVREDCRGVSLEDADPRTREVSAAVWSIQIN

SEQ ID NO: 3032 - protein, 512 aa, Zea mays
MEVVASAPGKVLIAGGYLVLERPNAGLVLSTTARFYAVVRPLRDSLPADSWTWAWTDVKVTSPQLSRVATYKLSLNKTTLQLTSSRESTNPFVEQAIQFSVAAAKATIIDKERKDVVDKLLLQGLNITIIGHNDFYSYRKQIEARGLPLTPEVLLSLPPFSSITFNSEVANGTMTGEKCKPEVAKTGLGSSAAMTTSVVAALLHYLGAVNLSCSGQSSGDNASGRELDLVHAIAQSAHCLAQGKIGSGFDVSAAVYGSQRYVRFSPEILSSAQAIGGTVLPDVVSDVLTQRWDHENKQFSLPPLMTLLLGEPGTGGSSTPSMVGSVKRWLKSDPEKSRDTWSKLAIANSTLENQLRILKGLSENHHEAYESMVRSCSRLTYGKWAEVATNQHQELIIRSLLAARDACLEIRLHMREMGIAAGVPIEPDSQTRLLDATMNMEGVLLAGVPGAGGFDAVFSVVLGDASNAVAHAWSSVGVLPLPVREDCRGVSLEDADPRTREVSAAVWSIQIN

SEQ ID NO: 3033 - protein, 499 aa, Zea mays
MEVVASAPGKVLIAGGYLVLERPNAGLVLSTTARFYAVVRPLRDSLPADAWAWAWTDVKVTSPQLSREATYKLSLTKSALQLTSARESTNPFVEQAIQFSVAAAKATIIDKERKDVVDKLLLQGLNITILGCNDFYSYRKQIEARGLPLTPEALLSLPPFSSITFNSEVANGTMTGEKCKPEVAKTGLGSSAAMTTSVVAALLHYLGVVSLSCPGQSSGDNTTRRELDLVHSIAQSAHCIAQGKIGSGFDVSAAVYGSQRYVRFSPEILSSQATGGTFLPDVVSDIVTQRWDHENKQFSLPPLMTLLLGEPGTGGSSTPSMVGSVKRWQKSDPEKCKDTWSKLAFANSALENQLRILKGLSENHREAYESWTEVATNQHQELIIKSLLAARDACLEIRLHMREMGIAAGVPIEPDSQTRLLDATMNMEGVLLAGVPGAGGFDAVFSVTLGDASNAVANAWSSAGVLPLLVREDCRGVSLEDADPRTREVSAAVSSIQIN

SEQ ID NO: 3034 - protein, 512 aa, Oryza sativa Japonica Group
MEVVASAPGKVLVAGGYLVLERPNAGLVLSTSARFYAIVRPLRDELSHDSWAWAWTDVKVTSPQLSREATYKLSLKKSTLQLTSSRESANPFVEQAVQFSVAAAKVTVTDKEGKEALDKLLLQGLHITILGCNDFYSYRKQIEARGLPLTPEVLLSLPPFCSITFNSEVANGTMTGENCKPEVAKTGLGSSAAMTTSVVAALLHYLGTVNLSCLGQSSGGNAAGRDLDLLHAIAQSAHCIAQGKIGSGFDVSAAVYGSQRYTRFSPEILSSAQVTGGHCMADVVADIVTQSWDHEKVKFSLPPLMSLLLGEPGTGGSSTPSMVGSVKQWQKSDPQKSKETWSKLGIANSVLENQLRNLNKLAEDHWEAYESVLRSCSRLTCSKWTEVATNQHQELIVRSLLAARDAFLEIRLHMREMGIAAGVPIEPESQTQLLDATMNMEGVLLAGVPGAGGFDAVFSVILGEASDAVAKAWSSAGVLPLLVREDPRGVSLEAGDPRTREVSTAVSSIQIN

SEQ ID NO: 3035 - protein, 528 aa, Oryza sativa Japonica Group
MEVVASAPGKVLVAGGYLVLERPNAGLVLSTSARFYAIVRPLRDELSHDSWAWAWTDVKVTSPQLSREATYKLSLKKSTLQLTSSRQVIDHLLGLWQQRSGLESANPFVEQAVQFSVAAAKVTVTDKEGKEALDKLLLQGLHITILGCNDFYSYRKQIEARGLPLTPEVLLSLPPFCSITFNSEVANGTMTGENCKPEVAKTGLGSSAAMTTSVVAALLHYLGTVNLSCLGQSSGGNAAGRDLDLLHAIAQSAHCIAQGKIGSGFDVSAAVYGSQRYTRFSPEILSSAQVTGGHCMADVVADIVTQSWDHEKVKFSLPPLMSLLLGEPGTGGSSTPSMVGSVKQWQKSDPQKSKETWSKLGIANSVLENQLRNLNKLAEDHWEAYESVLRSCSRLTCSKWTEVATNQHQELIVRSLLAARDAFLEIRLHMREMGIAAGVPIEPESQTQLLDATMNMEGVLLAGVPGAGGFDAVFSVILGEASDAVAKAWSSAGVLPLLVREDPRGVSLEAGDPRTREVSTAVSSIQIN

SEQ ID NO: 3036 - protein, 528 aa, Oryza sativa Indica Group
MEVVASAPGKVLVAGGYLVLERPNAGLVLSTSARFYAIVRPLRDELSHDSWAWAWTDVKVTSPQLSREATYKLSLKKSTLQLTSSRQVIDHLLGLWQQRSGLESANPFVEQAVQFSVAAAKVTVTDKERKEALDKLLLQGLHITILGCNDFYSYRKQIEARGLPLTPEVLLSLPPFCSITFNSEVANGTMTGENCKPEVAKTGLGSSAAMTTSVVAALLHYLGTVNLSCLGQSSSGNAAGRDLDLLHAIAQSAHCIAQGKIGSGFDVSAAVYGSQRYTRFSPEILSSAQVTGGHCMADVVADIVTQSWDHEKAKFSLPPLMSLLLGEPGTGGSSTPSMVGSVKQWQKSDPQKSKETWSKLGIANSVLENQLRNLNKLAEDHWEAYESVLRSCSCLTCSKWTEVATNQHQELIVRSLLAARDAFLEIRLHMREMGIAAGVPIEPESQTQLLDATMNMEGVLLAGVPGAGGFDAVFSVILGEASDAVAKAWSSAGVLPLLVREDPRGVSLEAGDPRTREVSTAVSSIQIN

SEQ ID NO: 3037 - protein, 1483 aa, Sorghum bicolor
MAAGWSSSWICGGEDDDGGRLTVASPCVQRTLIDCVNVVLLVAYVSTLAVAAACVRRRQRAATATAASRRSGAPGSGWVLLVVSSCCVAAAVAYGVTGLQDASDVRAAVPYFVRALVWIALAASLHVRPTRPARAVAVLWWVLFSLLVTAYNVEILAGGHGLDLAETISWPVSLLLLLCALGSLLRRGHGDASNDSGGLSEPLIGGKDDRAAVPTSELYRAGLFGQLAFSWLNPLLRVGRSKALDLGDIPLIADEDTAHHTSQKFAEDWSRHVGDKARSRRRVVGSNSLALVLLKCFLGEILLTGFYALLRTLSIAVAPLLLFAFVWYSNQEERDLRVGLVLVGCLLITKLIESLSQRHWFFTSRRTGMRIRSALMAVIFQKQLRLSSQGRKNHSTGEIVNYIAVDAYRLGDAISWLHMGWSSPLQLVFSVATLFWALKLGALPGLVPLVIFGFLNVPFAKMLQGYQAKFMVAQDERLRSTSEILNSMKIIKLQSWEDKFRQMIESLRDGEFKWLKETQMKKAYGAVMYWMSPTVVSAVMYTATAIMGSAPLNASTLFTVLATLRVMAEPVRFLPEILTMMIQYKVSLDRIEKFLLEDEIREEDVKRVPSDNSDVRVQVQDGNFSWKATGADLSLRNVNLRINRGEKVAVCGPVGSGKSSLLYALLGEIPRISGSVAVFGSVAYVSQSSWIQSGTVRDNILFGKPFHKELYDKAIKSCALDKDIENFDHGDLTEIGQRGLNMSGGQKQRIQLARAVYNDADVYLLDDPFSAVDAHTAAVLFYECVMTALAEKTVVLVTHQVEFLTETNRILVMEGGQVSQQGKYSELLGSGTAFEKLVSAHEASITALDTSASQQNQDQGQQAFDEYIVPSALQVIRQASDIEVTAKGPSAAIQLTEEEEKGIGDLGWKPYKDYINVPKAAFQFSGMCTSQVLFTCFQIASTYWLAVAVQMDSVSAALLVGAYSGLSIFSCCFAYFRSLFAANLGLKASKAFFGGLMDSVFKAPMSFFDSTPVGRILTRASSDLSILDFDIPYSMAFVATGAIEVVTTVLVMGTVTWQVLVVAIPVAITMIYVQRYYVSSARELVRINGTTKAPVMNYASESILGVVTIRAFAATERFIHSNMQLIDTDATLFFHTVAAQEWVLIRVEALQSLTIITAALFLVLVPPGAISPGFAGLCLSYALTLTAAQVFLTRFYSYLENYIISVERIKQYMHLPVEPPAIIPENRPPTSWPQEGRIDLQDLKIRYRPNAPLVLKGITCTFSAGNKIGVVGRTGSGKSTLISSLFRLVDPAGGKILIDKLDICSIGLKDLRTKLSIIPQEPTLFRGTVRTNLDPLGLHSDQEIWEALEKCQLKTAISSTSALLDTVVSDDGDNWSAGQRQLFCLGRVLLRRNKILVLDEATASIDSATDAILQKVIRQQFSSCTVITIAHRVPTVTDSDRVMVLSYGKLLEYETPAKLLEDKQSAFAKLVAEYWANTKRNST

SEQ ID NO: 3038 - protein, 1477 aa, Zea mays
MAGWSSSWICGEEDGGRLTLTVASKCVQRTLIDCVNVVLFIAYVCTLAAACVRRRQRSADASSGRSGAPSRWVLLVVSTCCVAAAVAYCVTALQDAYDIKTAVPYFVRGLVWIALAASLHAQPTRPARVVAVLWWVLLSLLATAYNSEILAGGHSLDLAEMIAWPVSLLLLLCALGSLLPRGDGHHYRDASNGSSGLSEPLIGNDRTVPTSELYRAGLFGQLAFSWLNPLLRVGRSKALDLGDIPLIATDDTAHHTSQQFTEAWSRHVSDKARSRRGVGSNSLALVLGKCFLSEILLTGFYAFLRMLSIAVAPLLLFGFVWYSNQEERDLRVGLSLVGCLLLAKLVESLSQRHWFFSSRRTGMRIRSALMAVIFQKQLRLSIQGRNNHSTGEIVNYIAVDAYRLGDAISWLHMGWTSPLQLVFAVATLFWALKLGALPGLVPLVIFGFLNVPFAKMLQGYQAKFMVAQDERLRSTSEILNSMKIIKLQSWEDKFRSTIESLRDGEFKWLRQTQMKKAYGAVMYWMSPTVVSAVMYTATAIMGSAPLNASTLFTVLATLRVMSEPVRMLPEVLTMMIQYKVALDRIEKFLLEDEIREDDVKRVPSDDSGVRVRVQAGNFSWKASGADLSLRNVNLRVNRGEKVAVCGPVGSGKSSLLYALLGEIPRLSGSVEVFGSVAYVSQSSWIQSGTVRDNILFGKPFNKELYDKAIKSCALDKDIENFDHGDLTEIGQRGLNMSGGQKQRIQLARAVYSDADVYLLDDPFSAVDAHTAAVLFYECVMTALAEKTVVLVTHQVEFLTETDRILVMEGGQVSQQGKYSELLGSGTAFEKLVSAHQSSITALDTSASQQNQVQGQQESDEYIVPSALQVIRQASDIDVTAKGPSAAIQLTEEEEKGIGDLGWKPYKEYINVSKGAFQFSGMCIAQVLFTCFQIASTYWLAVAVQMGNVSAALLVGAYSGLSIFSCFFAYFRSCFAAILGLKASKAFFGGLMDSVFKAPMSFFDSTPVGRILTRASSDLSILDFDIPYSMAFVATGGIEVVTTVLVMGTVTWQVLVVAIPVAVTMIYVQRHYVSSARELVRLNGTTKAPVMNYASESILGVVTIRAFAATERFIYSNMQLIDTDATLFFHTIAAQEWVLIRVEALQSLTIITAALFLVLVPPGAISPGFAGLCLSYALTLTSAQIFLTRFYSYLENYIISVERIKQYMHLPVEPPAIIPDSRPPTSWPQEGRIDLQDLKIRYRPNAPLVLKGITCTFAAGNKIGVVGRTGSGKSTLISSLFRLVDPAGGRILIDKLDICSIGLKDLRTKLSIIPQEPTLFRGTVRNNLDPLGQHSDEEIWEALEKCQLKTAISTTSALLDTVVSDDGDNWSAGQRQLFCLGRVLLRRNKILVLDEATASIDSATDAILQKVIRQQFSSCTVITIAHRVPTVTDSDKVMVLSYGKLLEYETPAKLLEDKQSAFAKLVAEYWANTKRNST

SEQ ID NO: 3039 - protein, 1475 aa, Hordeum vulgare subsp. vulgare
MPGAGTADKLGHPAMAFLGWSPSWTCGREDGGGLTLASPCVQRGLVDCVNGVLLVAYASALLAACVTGRWDGRGRSGGAWRRWGVAAVSACCVAVAATYAVAAFGGSADAAVTTASVVRALVWVAVAASLHLQPTRPASAVAVLWWTLFSLLITAYNAEVLAMGHVLDVAEAVAWAVNFLLLLCALGSLLLRRSRGHKDDDGLSEPLIDKAVHDSELYRAGLFSQLAFSWLNPLLRLGRTKALDLADIPLISSEDCARQASRRFSEAWSRHRQDKAQSGRSNGLALVLCKCFLTEIMIAGFYAFMRTLAIAISPILLFAFVRYSYQEEERDRRVGLSLVGCLLVIKLVESLSQRHWFFDSRRTGMRIRSALMAAIFQKRLKLSSQGRKNHSTGEIVNYIAVDAYRLGDALSWFHMAWSSPLQLAFAVGTLFWALRLGAIPGLVPLIIFGFLNMPFAKLLQGYQAKFMVAQDDRLRSTSEVLNSMKIIKLQSWEEKFRAMVESLRDAEFIWLRETQMKKAYGAVMYWMSPTVVSAVMFTATAILGSAPLNASTLFTVLATLRVMAEPVRFLPEILTMMIQYKVSLDRIEKFLVEEEIKEGAERAPPQNSDIRVHVQDANFSWNASAADLALRNINLSINQGEKVAVCGAVGSGKSSLLYALLREIPRTSGSVDVFGSLAYVSQNSWIQSGTVRDNILFGKPFDKELYEKATKSCALDKDIENFNHGDLTEIGQRGLNMSGGQKQRIQLARAVYSDADIYLLDDPFSAVDAHTAAVLFYDCVMTALSKKTVVLVTHQVEFLTETNRILVMEGGQVKQQGKYADLLESGTAFEKLVSAHQSSITALDTTSQENQVQGQQVLDDSIMPSTLLATRQPSEIEVSTKGPSVAQLTEEEEKGIGNLGWKPYKDYVQVSKGILPLCGMITAQVLFTVFQIMSTYWLAVAIQINVSSSLLVGAYSGIAIFSCCFAYLRSLFAATLGLKASKAFFTGLMDSVFKAPMSFFDSTPIGRILTRASSDLSILDFDIPYSMAFVVTGGIEVVTTVLVMGTVTWQVLLVAIPVAISMVYVQRYYVDSARELVRINGTTKAPVMNYASESILGVVTIRAFAATDRFIHNNLHLIDNDATMFFHTVAAQEWVLIRVEALQSLTIFTSSLFLILVPPGVISPGFAGLCLSYALSLTAAQVFLTRYYSYLENYIISVERIKQYMHLPSEPPTIIPDSRPPISWPQEGRIDLQDLKIKYRPNTPLVLKGITCTFPAGNRIGVVGRTGSGKSTLISSLFRLVDPVGGRILIDNLDICSIGLKDLRTKLSIIPQEPTLFRGTVRNNLDPLGQHSDDEIWEALEKCQLKRSISSTAALLDTVVSDDGDNWSVGQRQLFCLGRVLLRRNKILVLDEATASIDSATDAILQAVIRQQFTSCTVITIAHRVPTVTDSDRVMVLSYGKLLEYDTPAKLLEDKQSAFAKLVAEYWANCKRNST

SEQ ID NO: 3040 - protein, 366 aa, Zea mays; identical to SEQ ID NO: 1037

SEQ ID NO: 3041 - protein, 335 aa, Zea mays
MECEPEELQFLGVVGIYRFSAEILRGPHRPLFARIAAAFALPLSALFLLHVAISHALFTHIDSDDTALDASSPGTDTQRRLLSRLASDWLALLLFKSAYLLALLLLSLLSVAASVFSVASVYSAKRDALTFPRVLSVVPRVWRRLAATFLAAFALLFAYHAVAVLVFVGLLVAADNGSGLAGLLAFLVAVAYLLGLVYLGVVWHLASVVSVLEDHKGFAAMRKSKDLIRGKLVTAGAIFFTLNVVFAAVELGFRAWVVRGSGAASSRLLLGLIMLAALCCVVMLALVTQTVVYLVCKSYHHESLDKANISDHLEVYLGDYVPLKASDVQMEQFQV

SEQ ID NO: 3042 - protein, 339 aa, Hordeum vulgare subsp. vulgare
MECEPEELQFLGPVGIYRESVAILRAHRPLYARIAAAFVLPLSALFLAHIAISHALFSTIDSDDSALESSAPGTASQQRILQRLGADWAALVLFKAAYLLALLLFSLLSTAAAVFSVASVYSAKHDALTFPRVLSVVPRVWRRLAATFLAAFALLFAYHLVFVVVFIALLVATDNGSTLAGLLAFVVAIAYLVGLVYLSVVWHLASVVSVLEDYKGFQAMRKSKALIQGKLWTVVFIFVTLNLVFVVVEFAFRAWIVQGARHGLGAGGRLLLGLVILAALCSVVMVALVVQTVVYLVCKSYHHESIDKSNISDHLEVYLGDYVPLKASDVQMQHFGDEV

SEQ ID NO: 3043 - protein, 337 aa, Oryza sativa Japonica Group
MECEPEELQFLGMVGIYREAASILRAHRPLFARIAAAFVLPLSLLFLLHIAISHALFSHIDSDDSALDSAAPGTPAQRRLLHRLADDWLALLLFKAAYLLALLLFSLLSTAAAVFSVASVYSAKHDALSFPRVLSVVPRVWRRLAATFLAAFLLLFAYHLLFVAVFVALLVAADSGSGLAALLAFLLALAYIAGLVYLSVVWHLASVVSVLEDYKGFEAMRKSKALIQGKLWTASAIFFVLNVVFIVVEVAFRAWVVRGATHGLGAGSRLLLGLAMLAALCAVVMLALVVQTVVYLVCKSYHHESIDKSNLSDHLEVYLGEYVPLKASDVQMEQFNL

SEQ ID NO: 3044 - protein, 648 aa, Sorghum bicolor
MAKSEGPAIGIDLGTTYSCVGVWQHDRVEIIANDQGNRTTPSYVAFTDTERLIGDAAKNQVAMNPTNTVFDAKRLIGRRFSDPSVQSDMKLWPFKVIPGPGDKPMIVVNYKGEEKQFAAEEISSMVLIKMREIAEAYLGSTIKNAVVTVPAYFNDSQRQATKDAGVIAGLNVMRIINEPTAAAIAYGLDKKATSAGEKNVLIFDLGGGTFDVSLLTIEEGIFEVKATAGDTHLGGEDFDNRMVNHFVQEFKRKHKKDLSGNPRALRRLRTACERAKRTLSSTAQTTIEIDSLFEGIDFYSTITRARFEELNMDLFRKCMEPVEKCLRDAKMDKSSVHDVVLVGGSTRIPKVQQLLQDFFNGKELCKSINPDEAVAYGAAVQAAILSGEGNEKVQDLLLLDVTPLSLGLETAGGVMTVLIPRNTTIPTKKEQVFSTYSDNQPGVLIQVYEGERARTKDNNLLGKFELSGIPPAPRGVPQITVTFDIDANGILNVSAEDKTTGQKNKITITNDKGRLSKEEIEKMVQEAEKYKAEDEEVKKKVDAKNTLENYAYNMRNTIKDDKIASKLPAEDKKKIEDAVDSAISWLDSNQLAEVDEFEDKMKELEGICNPIIAKMYQGAGAGMGDAAGMDEDAPSGGSGAGPKIEEVD

SEQ ID NO: 3045 - protein, 648 aa, Zea mays
MAKSEGPAIGIDLGTTYSCVGVWQHDRVEIIANDQGNRTTPSYVGFTDTERLIGDAAKNQVAMNPTNTVFDAKRLIGRRFSDPSVQSDMKLWPFKVIPGPGDKPMIVVNYKGEEKQFAAEEISSMVLIKMKEIAEAYLGSTIKNAVVTVPAYFNDSQRQATKDAGVIAGLNVMRIINEPTAAAIAYGLDKKATSSGEKNVLIFDLGGGTFDVSLLTIEEGIFEVKATAGDTHLGGEDFDNRMVNHFVQEFKRKNKKDISGNPRALRRLRTACERAKRTLSSTAQTTIEIDSLFEGIDFYSTITRARFEELNMDLFRKCMEPVEKCLRDAKMDKSSVHDVVLVGGSTRIPKVQQLLQDFFNGKELCKSINPDEAVAYGAAVQAAILSGEGNEKVQDLLLLDVTPLSLGLETAGGVMTVLIPRNTTIPTKKEQVFSTYSDNQPGVLIQVYEGERARTKDNNLLGKFELSGIPPAPRGVPQITVTFDIDANGILNVSAEDKTTGQKNKITITNDKGRLSKEEIEKMVQEAEKYKAEDEEVKKKVDAKNALENYAYNMRNTIKDDKIASKLPAEDKKKIEDAVDGAISWLDSNQLAEVEEFEDKMKELEGICNPIIAKMYQGEGAGMGAAAGMDEDAPSGGSGAGPKIEEVD

SEQ ID NO: 3046 - protein, 649 aa, Sorghum bicolor
MAKGEGPAIGIDLGTTYSCVGVWQHDRVEIIANDQGNRTTPSYVAFTDTERLIGDAAKNQVAMNPTNTVFDAKRLIGRRFSDPSVQSDMKLWPFKVVAGPADKPMIVVNYKGEEKQFSAEEISSMVLTKMKEIAEAYLGSTIKNAVVTVPAYFNDSQRQATKDAGVISGLNVMRIINEPTAAAIAYGLDKKATSSGEKNVLIFDLGGGTFDVSLLTIEEGIFEVKATAGDTHLGGEDFDNRMVNHFVQEFKRKHKKDISGNPRALRRLRTACERAKRTLSSTAQTTIEIDSLYEGIDFYTTITRARFEELNMDLFRKCMEPVEKCLRDAKMDKSSVHDVVLVGGSTRIPKVQQLLQDFFNGKELCKSINPDEAVAYGAAVQAAILSGEGNEKVQDLLLLDVTPLSLGLETAGGVMTVLIPRNTTIPTKKEQVFSTYSDNQPGVLIQVYEGERARTKDNNLLGKFELSGIPPAPRGVPQITVCFDIDANGILNVSAEDKTTGQKNKITITNDKGRLSKEEIEKMVQEAEKYKAEDEEHKKKVDAKNSLENYAYNMRNTIKDDKIASKLGADDKKRIEDAIDGAISWLDSNQLAEADEFEDKMKELESICNPIIAKMYQGAGADMGGAAGMDEDAPAGGSSGAGPKIEEVD

SEQ ID NO: 3047 - protein, 649 aa, Zea mays
MAGKGDGPAIGIDLGTTYSCVGVWQHDRVEIIANDQGNRTTPSYVAFTDSERLIGDAAKNQVAMNPINTVFDAKRLIGRRFSDASVQSDIKLWPFKVISGPGEKPMIVVQHKGEEKQFAAEEISSMVLIKMREIAEAYLGSTIKNAVVTVPAYFNDSQRQATKDAGVIAGLNVLRIINEPTAAAIAYGLDKKATSVGEKNVLIFDLGGGTFDVSLLTIEEGIFEVKATAGDTHLGGEDFDNRMVNHFVQEFKRKNKKDITGNPRALRRLRTACERAKRTLSSTAQTTIEIDSLYEGIDFYSTITRARFEELNMDLFRKCMEPVEKCLRDAKMDKSTVHDVVLVGGSTRIPRVQQLLQDFFNGKELCKNINPDEAVAYGAAVQAAILSGEGNEKVQDLLLLDVTPLSLGLETAGGVMTVLIPRNTTIPTKKEQVFSTYSDNQPGVLIQVYEGERTRTRDNNLLGKFELSGIPPAPRGVPQITVCFDIDANGILNVSAEDKTTGQKNKITITNDKGRLSKEEIEKMVQDAEKYKSEDEEHKKKVEAKNSLENYSYNMRNTIKDEKIASKLPADDKKKIEDAIDAAISWLDANQLAEADEFEDKMKELESLCNPIIAKMYQGAGEDMGGAGGMDEDAPAGSGGPGPKIEEVD

SEQ ID NO: 3048 - protein, 649 aa, Oryza sativa Japonica Group
MAGKGEGPAIGIDLGTTYSCVGVWQHDRVEIIANDQGNRTTPSYVGFTDSERLIGDAAKNQVAMNPINTVFDAKRLIGRRFSDASVQSDIKLWPFKVIAGPGDKPMIVVQYKGEEKQFAAEEISSMVLIKMREIAEAYLGTTIKNAVVTVPAYFNDSQRQATKDAGVIAGLNVMRIINEPTAAAIAYGLDKKATSVGEKNVLIFDLGGGTFDVSLLTIEEGIFEVKATAGDTHLGGEDFDNRMVNHFVQEFKRKNKKDITGNPRALRRLRTACERAKRTLSSTAQTTIEIDSLYEGIDFYSTITRARFEELNMDLFRKCMEPVEKCLRDAKMDKSSVHDVVLVGGSTRIPRVQQLLQDFFNGKELCKNINPDEAVAYGAAVQAAILSGEGNEKVQDLLLLDVTPLSLGLETAGGVMTVLIPRNTTIPTKKEQVFSTYSDNQPGVLIQVYEGERTRTRDNNLLGKFELSGIPPAPRGVPQITVCFDIDANGILNVSAEDKTTGQKNKITITNDKGRLSKEEIEKMVQEAEKYKSEDEEHKKKVESKNALENYAYNMRNTIKDEKIASKLPAADKKKIEDAIDQAIQWLDGNQLAEADEFDDKMKELEGICNPIIAKMYQGAGADMAGGMDEDDAPPAGGSGAGPKIEEVD

SEQ ID NO: 3049 - protein, 648 aa, Nicotiana tabacum
MAGKGEGPAIGIDLGTTYSCVGVWQHDRVEIIANDQGNRTTPSYVGFTDSERLIGDAAKNQVAMNPINTVFDAKRLIGRRFSDASVQSDIKLWPFKVISGPGDKPMIVVNYKGEEKQFAAEEISSMVLIKMKEIAEAFLGSTVKNAVVTVPAYFNDSQRQATKDAGVISGLNVMRIINEPTAAAIAYGLDKKATSVGEKNVLIFDLGGGTFDVSLLTIEEGIFEVKATAGDTHLGGEDFDNRMVNHFVQEFKRKHKKDITGNPRALRRLRTACERAKRTLSSTAQTTIEIDSLYEGVDFYSTITRARFEELNMDLFRKCMEPVEKCLRDAKMDKSTVHDVVLVGGSTRIPKVQQLLQDFFNGKELCKSINPDEAVAYGAAVQAAILSGEGNEKVQDLLLLDVTPLSLGLETAGGVMTVLIPRNTTIPTKKEQVFSTYSDNQPGVLIQVYEGERARTRDNNLLGKFELSGIPPAPRGVPQITVCFDIDANGILNVSAEDKTTGQKNKITITNDKGRLSKEEIEKMVQEAEKYKAEDEEHKKKVEAKNALENYAYNMRNTIKDEKIGSKLSSDDKKKIEDAIDQAISWLDSNQLAEADEFEDKMKELESICNPIIAKMYQGAGGEAGAPMDDDAPPAGGSSAGPKIEEVD

SEQ ID NO: 3050 - protein, 648 aa, Triticum aestivum
MAKGEGPAIGIDLGTTYSCVGVWQHDRVEIIANDQGNRTTPSYVAFTDTERLIGDAAKNQVAMNPTNTVFDAKRLIGRRFSDPSVQSDMKLWPFKVIPGPADKPMIVVNYKGEEKQFAAEEISSMVLIKMREIAEAFLGNSVKNAVVTVPAYFNDSQRQATKDAGAIAGLNVLRIINEPTAAAIAYGLDKKATSTGEKNVLIFDLGGGTFDVSLLTIEEGIFEVKATAGDTHLGGEDFDNRMVNHFVQEFKRKHKKDITGNPRALRRLRTACERAKRTLSSTAQTTIEIDSLYEGVDFYTTITRARFEELNMDLFRKCMEPVEKCLRDAKMDKSTVHDVVLVGGSTRIPKVQQLLQDFFNGKELCKSINPDEAVAYGASVQAAILSGEGNEKVQDLLLLDVTPLSLGLETAGGVMTTLIPRNTTIPTKKEQVFSTYSDNQPGVLIQVYEGERARTKDNNLLGKFELSGIPPAPRGVPQITVCFDIDANGILNVSAEDKTTGQKNKITITNDKGRLSKEEIEKMVQEAERYKAEDEEHKKKVDAKNALENYAYNMRNTVKDDKIASKLGADDKKKVEEAIEGTISWLDANQLAEADEFEDKMKELEGICNPIIAKMYQGAAPDMGGGMGMDEDMPAGGGGAGPKIEEVD

SEQ ID NO: 3051 - protein, 648 aa, Hordeum vulgare subsp. vulgare
MAKGEGPAIGIDLGTTYSCVGVWQHDRVEIIANDQGNRTTPSYVAFTDTERLIGDAAKNQVAMNPTNTVFDAKRLIGRRFSDPSVQSDMKLWPFKVIPGPADKPMIIVNYKGEEKQFAAEEISSMVLIKMREIAEAFLGNSVKNAVVTVPAYFNDSQRQATKDAGAIAGLNVLRIINEPTAAAIAYGLDKKATSTGEKNVLIFDLGGGTFDVSLLTIEEGIFEVKATAGDTHLGGEDFDNRMVNHFVQEFKRKHKKDISGNPRSLRRLRTACERAKRTLSSTAQTTIEIDSLYEGVDFYTTITRARFEELNMDLFRKCMEPVEKCLRDAKMDKSTVHDVVLVGGSTRIPKVQQLLQDFFNGKELCKSINPDEAVAYGAAVQAAILSGEGNEKVQDLLLLDVTPLSLGLETAGGVMTTLIPRNTTIPTKKEQVFSTYSDNQPGVLIQVYEGERARTKDNNLLGKFELSGIPPAPRGVPQITVCFDIDANGILNVSAEDKTTGQKNKITITNDKGRLSKEEIEKMVQEAERYKAEDEEHKKKVDAKNALENYAYNMRNTVKDEKIASKLGADDKKKVEDAVEGTISWLDGNQLAEAEEFEDKMKELEGICNPIIAKMYQGAAPDMGGGMGMDEDMPAGGGGAGPKIEEVD

SEQ ID NO: 3052 - protein, 533 aa, Sorghum bicolor
MTLLEELFRAIELWLRIAKEQVPLVDPTLDPVLLVPGIAGSILEAVDEEGNKERVWVRILAAEHEFREKLWSKFDASTGKTVSVNEKTRITVPEDRYGLYAIDTLDPDLIIGDDTVYYYHDMIVEMIKWGYQEGKTLFGFGYDFRQSNRLSETLDRFSKKLESVYTSSGGKKINLITHSMGGLLVKCFISLHSDVFEKYVKSWIAIAAPFQGAPGYITTSLLNGMSFVEGWESRFFISKWCMQKLLLECPSIYELLANPNFKWKDTPLLQIWRENLDNDGKKSALLESYEPEEAIKMIEKALSSNEIIADGMHIPVPLNLDILNWAKETYDLLSSTKLPESVKFYNIYGIDYDTPHTVCYGSEKHPVSNLSHLLYAQGKYVYVDGDGSVPTESAKADGFDAVARVGVAADHRGIVCSHHVFRIVQHWLHAGEPDPFYDPLTDYVILPALYDIEKHCEKHGDVMSVTEDWEIISQSDGRTTRPGELPPMISTLTTSREGKEGTLEEAQATVVVHPEKQGRQHVEVRAVGVSHGG

SEQ ID NO: 3053 - protein, 533 aa, Oryza sativa Japonica Group
MAVLEDLIRAIELWLRIAKEQVPLVDPTLDPVLLVPGIGGSILEAVDEAGKKERVWVRILAADHEFRAHLWSKFDASTGKTVSVDEKTNIVVPEDRYGLYAIDTLDPDMIIGDDSVCYYHDMIVQMIKWGYQEGKTLFGFGYDFRQSNRLSETLDRFSRKLESVYIASGEKKINLITHSMGGLLVKCFMSLHSDVFEKYIKSWIAIAAPFQGAPGYITTSLLNGMSFVEGWESRFFISKWSMQQLLLECPSIYELLANSTFQWEDTPYLQIWRQKLDTNGKKSAMLESYEPDEAIKMIREALSKHEIISDGMHIPLPLDMDILRWAKETQDVLCNAKLPKSVKFYNIYGTDYDTAHTVRYGSEHHPISNLSDLLYTQGNYICVDGDGSVPVESAKADGLDAVARVGVAADHRGIVCDRHVFRIIQHWLHAGEPDPFYDPLNDYVILPTAFEIEKYHEKHGDITSVREDWEIISHRDDESKRPAELPPMFNTLSASREGEDGSLEEAQATIFVHPESKGRQHVEVRAVGVTHDG

SEQ ID NO: 3054 - protein, 412 aa, Zea mays
MIVEMIKWGYQEGKTLFGFGYDFRQSNRLSETLDRFSKKLESVYTASGGKKINLITHSMGGLLVKCFISLHSDTFEKYVKSWIAIAAPFQGAPGYITTSLLNGMSFVEGWESRFFISKWCMQQLLLECPSIYELLANPNFQWKDIPLLQIWRENLDNSGKKSALLESYEPEEAIMMIKEALSSNEIIADGMHIPVPLNLDILNWAKETYDLLCSTKLPESVKFYNIYGIDYDTPHTVCYGSERHPVSSLSSLLYAQGKYVYVDGDGSVPAESAKADGFNAVARVGVAADHRGIVCSRRVFRIVQHWLHAGEPDPFYDPLSDYVILPTLYEIEKHREKHGDVTSVAEDWEIISPNDGKTLRPGELPPMVSTLTTSREGKEGALEEAQATVVVHPEKKGRQHVQVRAVGVSHGG

SEQ ID NO: 3055 - protein, 412 aa, Zea mays
MIVEMIKWGYQEGKTLFGFGYDFRQSNRLSETLDRFSKKLESVYTASGGKKINLITHSMGGLLVKCFISLHSDTFEKYVKSWIAIAAPFQGAPGYITTSLLNGMSFVEGWESRFFISKWCMQQLLLECPSIYELLANPNFQWKDIPLLQIWRENLDNSGKKSALLESYEPEEAIMMIKEALSSNEIIADGMHIPVPLNLDILNWAKETYDLLCSTKLPESVKFYNIYGIDYDTPHTVCYGSEQHPVSSLSSLLYAQGKYVYVDGDGSVPAESAKADGFNAVARVGVAADHRGIVCSRRVFRIVQHWLHAGEPDPFYDPLSDYVILPTLYEIEKHREKHGDVTSVAEDWEIISPNDGKTLRPGELPPMVSTLTTSREGKEGALEEAQATVVVHPEKKGRQHVQVRAVGVSHGG

SEQ ID NO: 3056 - protein, 353 aa, Zea mays; identical to SEQ ID NO: 1038

SEQ ID NO: 3057 - protein, 349 aa, Zea mays
MGDAAASTSAPTTPTSILICLEDGSDLLADADDGAGTDLVVARDERLLVVDQDEEYVALLLSKESASGGGGPVEEMEDWMKAARSGCVRWIIKTTAMFRFGGKTAYVAVNYLDRFLAQRRVNREHAWGLQLLMVACMSLATKLEEHHAPRLSELPLDACEFAFDRASVLRMELLVLGTLEWRMVAVTPFPYISCFAARFRQDERRAVLVRAVECVFAAIRAMSSVEYQPSTIAVASILVARGRETPAGNLDALKAILGSSFPQLDTGHVYSCYSAMIREDDKSPTQSTSTSTGVASSGVSVAAHAGGSGSPSPPGASVSVGANNAAGTAPPATTDNRNKRRRLRSPQRQ

SEQ ID NO: 3058 - protein, 353 aa, Zea mays
  misc_feature (321)..(321): Xaa can be any naturally occurring amino acid
MGDAAAAAASTSAPTTPTSILICLEDGSDLLADADDGAGTDLVVAHDERLLVVDQDEEYVALLLSKESASGGCGPVEEMEDWMKAARSGCVRWIIKTTAMFRFGGKTAYVAVNYLDRFLAQRRVNREHAWGLQLLMVACMSLATKLEEHHAPRLSELPLDACEFAFDRASVLRMELLVLGTLEWRMVAVTPFPYISCFAARFRQDERRAVLVRAVECVFAAIRAMSSVEYQPSTIAVASILVARGRETPAGNLDALKAILGSSFPQLDTGHVYSCYSAMIREDDKSPTQSTSTSTSTGVASSGVSVAAHAGGSGSPSPGAXVSVGANNAAGTAPPATTDKRNKRRRLRSPQRQ

SEQ ID NO: 3059 - protein, 345 aa, Zea mays
MGDAAAAAATASTSAPATPTSILICLEDGSDLLSDAYDGAGATDFVVARDEHLLVEDQDEEYVALLLSKESAAVCAPAEEETEEWMKTARSGCVRWIIKTTAMFGFGGKTAYVAVTYLDRFLVQRRVNRGNEWALRLLTVACLSLAIKLEEEHAPRLSEFPLDEDEFDSASILRMELLVLGTLEWRMIAVTPFPYISYFAARFREDERRAILMRAVECVFAAIKVISSVEYRPSTIAVASILVARGREETPAGSLDALKAILGSSCPQLDTGHVYSCYRAMIREDDKSPTHSTSTGVASSGVSVAGNGSPSPGANNAAGSGPPATPDSHKHNHNQRRRLRSPQRQ

SEQ ID NO: 3060 - protein, 344 aa, Zea mays
MGDAAAAATASTSAPATPTSILICLEDGSDLLSDAYDGAGATDFVVARDEHLLVEDQDEEYVALLLSKESAAVCAPAEEETEEWMKTARSGCVRWIIKTTAMFGFGGKTAYVAVTYLDRFLVQRRVNRGNEWALRLLTVACLSLAIKLEEEHAPRLSEFPLDEDEFDSASILRMELLVLGTLEWRMIAVTPFPYISYFAARFREDERRAILMRAVECVFAAIKVISSVEYRPSTIAVASILVARGREETPAGSLDALKAILGSSCPQLDTGHVYSCYRAMVREDDKSPTHSTSTGVASSGVSVAGNGSPSPGANNAAGSGPPATLDSHKHNHNQRRRLRSPQRQ

SEQ ID NO: 3061 - protein, 355 aa, Sorghum bicolor
MGDAAAAAASTSAPDTPTSILICREDGGGFLADADDDGDGADLVVARDERLLVVDQDEEYVALLLSEESASGSGGAPAEEIEEWMKAARSGCVRWIIKTTATFRCGGKTAYVAVTYLDRFLAQRRVNRRQEWALQLLAVACLSLAIKMEEQHAPRLSEFRVDAYEFDSASILRMELFVLSTLEWRMNAVTPFSYISCFAARFREDERRAILLRAVECVFAAIKATSSVEYQPSTMAVASILVARGRNLDALKAILGSSCPHIDTEHVYSCYSAMVQDDDKSPTRSTSTGVASSGVSVAAHAGSGSGSPSPGASVSVGANNAAGTATPDNHSNKRRREGVAKNARIQMGARFDSSD

SEQ ID NO: 3062 - protein, 346 aa, Zea mays
MGDAAAATATASTSAPATPTSILICLEDGSDLLSDAYDGAGAADFVVARDEHLLVEDQDEEYVALLLSKESALVCAPAEEETEEWMKTARSGCVRWIIKTTAMFGFGGKTAYVAVTYLDRFLVQRRVNRGNEWALRLLTVACLPLAIKLEEEHAPRLSEFPLDEDEFDSASILRMELLVLGTLEWRMIAVTPFPLHSANFAARFREDERRAILMRAVECVFAAIKVISSVEYRPSTIAVASILVARGGEETPAGSLDALKAILGSSCPQLDTGHVYSCYRAMVRENDKSPTHSTSTGVASSGVSVAGNGRASPGANNAAGSGPPATPDSHKHNHNQRRRLRSPQRQ

SEQ ID NO: 3063 - protein, 646 aa, Oryza sativa Japonica Group
MSKGEGPAIGIDLGTTYSCVGVWQHDRVEIIANDQGNRTTPSYVAFTDTERLIGDAAKNQVAMNPTNTVFDAKRLIGRRFSDPSVQSDMKLWPFKVVPGPGDKPMIVVQYKGEEKQFAAEEISSMVLIKMREIAEAYLGSSIKNAVVTVPAYFNDSQRQATKDAGVIAGLNVMRIINEPTAAAIAYGLDKKATSSGEKNVLIFDLGGGTFDVSLLTIEEGIFEVKATAGDTHLGGEDFDNRMVNHFVQEFKRKNKKDISGNPRALRRLRTACERAKRTLSSTAQTTIEIDSLYEGIDFYTTITRARFEELNMDLFRKCMEPVEKCLRDAKMDKSSVHDVVLVGGSTRIPKVQQLLQDFFNGKELCKSINPDEAVAYGAAVQAAILSGEGNEKVQDLLLLDVTPLSLGLETAGGVMTVLIPRNTTIPTKKEQVFSTYSDNQPGVLIQVYEGERARTKDNNLLGKFELSGIPPAPRGVPQINVCFDIDANGILNVSAEDKTTGQKNKITITNDKGRLSKEEIEKMVQEAEKYKAEDEEHKKKVDAKNALENYAYNMRNTIKDEKIASKLAADDKKRIEDAIDGAISWLDTNQLAEADEFEDKMKELEGICNPIIAKMYQGPGADMAGGMDEDAPAGGSGAGPKIEEVD

SEQ ID NO: 3064 - protein, 648 aa, Populus trichocarpa
MAGKGEGPAIGIDLGTTYSCVGVWQHDRVEIIANDQGNRTTPSYVAFTDTERLIGDAAKNQVAMNPVNTVFDAKRLIGRRFSDPSVQSDVKLWPFKVIAGPGDKPMIVVTYKGEEKQFAAEEISSMVLIKMREIAEAYLGTTIKNAVVTVPAYFNDSQRQATKDAGVIAGLNVMRIINEPTAAAIAYGLDKKATSVGEKNVLIFDLGGGTFDVSLLTIEEGIFEVKATAGDTHLGGEDFDNRMVNHFVQEFKRKNKKDISGNPRALRRLRTACERAKRTLSSTAQTTIEIDSLYEGIDFYSSITRARFEEMNMDLFRKCMEPVEKCLRDAKMDKSTVHDVVLVGGSTRIPKVQQLLQDFFNGKELCKSINPDEAVAYGASVQAAILSGEGNEKVQDLLLLDVTPLSLGLETAGGVMTVLIPRNTTIPTKKEQVFSTYSDNQPGVLIQVYEGERTRTRDNNLLGKFELSGIPPAPRGVPQITVCFDIDANGILNVSAEDKTTGQKNKITITNDKGRLSKEEIEKMVEEAEKYKSEDEEHKKKVEAKNALENYAYNMRNTVKDEKIGSKLNPADKKKIEDAIDQAIHWLDSNQLAEADEFEDKMKELESICNPIIAKMYQGDGADMGGRMDEDAPSTGGSGAGPKIEEVD

SEQ ID NO: 3065 - protein, 648 aa, Gossypium hirsutum
MAGKGEGPAIGIDLGTTYSCVGVWQHDRVEIIANDQGNRTTPSYVGFTDTERLIGDAAKNQVAMNPINTVFDAKRLIGRRFTDSSVQSDIKLWPFKVIAGPGDKPMIVVNYKGEEKQFAAEEISSMVLIKMREIAEAYLGFTVKNAVVTVPAYFNDSQRQATKDAGVIAGLNVMRIINEPTAAAIAYGLDKKATSVGEKNVLIFDLGGGTFDVSLLTIEEGIFEVKATAGDTHLGGEDFDNRMVNHFVQEFKRKNKKDISGNPRALRRLRTSCERAKRTLSSTAQTTIEIDSLYEGIDFYSTITRARFEELNMDLFRKCMEPVEKCLRDAKMDKSSVHDVVLVGGSTRIPKVQQLLQDFFNGKELCKSINPDEAVAYGAAVQAAILSGEGNEKVQDLLLLDVTPLSLGLETAGGVMTVLIPRNTTIPTKKEQVFSTYSDNQPGVLIQVYEGERTRTRDNNLLGKFELSGIPPAPRGVPQITVCFDIDANGILNVSAEDKTTGQKNKITITNDKGRLSKEEIEKMVQEAEKYKSEDEEHKKKVEAKNALENYAYNMRNTVKDEKIGSKLSPDDKKRIEDAIEEAIQWLDSNQLAEADEFEDKMKELESVCNPIIAKMYQGAGGDMGGSMDEDAPPSGGSGAGPKIEEVD

SEQ ID NO: 3066 - protein, 656 aa, Dactylis glomerata
MAKKGGEGPAIGIDLGTTYSCVGVWQHDRVEIIANDQGNRTTPSYVGFTDTERLIGDAAKNQVAMNPTNTVFDAKRLIGRRFSDPSVQSDMKLWPFKVIPGPADKPMIVVQYKGEEKQFAAEEISSMVLIKMKEIGEAYLGTTIKNAVVTVPAYFNDSQRQATKDAGVIAGLNVMRIINEPTAAAIAYGLDKKASSSGEKNVLIFDLGGGTFDVSLLTIEEGIFEVKATAGDTHLGGEDFDNRMVNHFVQEFKRKNKKDISGNPRALRRLRTACERAKRTLSSTAQTTIEIDSLYEGIDFYSTITRARFEEMNMDLFRKCMEPVEKCLRDAKMDKSTVHDVVLVGGSTRIPKVQQLLQDFFNGKELCKSINPDEAVAYGAAVQAAILSGEGNEKVQDLLLLDVTPLSLGLETAGGVMTTLIPRNTTIPTKKEQVFSTYSDNQPGVLIQVFEGERARTKDNNLLGKFELSGIPPAPRGVPQITVCFDIDANGILNVSAEDKTAGVKNKITITNDKGRLSKEDIEKMVQEAERYKAEDEEVKKKVDAKNALENYAYNMRNTIKDDKIAAKLSADDKKTIEDAVDGAISWLDTNQLAEADEFEDKMKELEGICNPIIARMYQGPGADMGGMPGMAGGMDMDEDVPAGGSGAGPKIEEVD

SEQ ID NO: 3067 - protein, 397 aa, Zea mays; identical to SEQ ID NO: 1039

SEQ ID NO: 3068 - protein, 423 aa, Sorghum bicolor
MPISSSLAARLRTGHSPAPAPGRARWSPYARPSVPEPCGGGKASRPTLRLDPVTTRLLGPVQKAVLSGSSRRAEPDAPEASARRRRGNDMTSPKPEPKPKPANGDDRTPVEEKRRSSGEGGFVFLCALAGHTEAISGISLPLGSDKLYSGGADGSVRIWDCNSGKCVDVIKMGGKVGCMITHGPWVFIGISKSVEAWNTKTGMKLSLQGPSSLVCSMAITDEMLFAGTRDGRIMAWKFPSKESKIEPVFILSGHQRPVVSLSISARRLYSGSLDKTIKAWDLTTWQCVQTLFEHKAAVTSVLCWDEKLLSCSLDKTVKVWTLSESGNLQAKYTHAEEHGLRTLFGMHRVGKTPVLFCSLHNSNCIRLFNLPSFDGMGTLLSKKEVRTIELTAGGLLFTGDCSGELKVWRWAPQDQEAVADVHS

SEQ ID NO: 3069 - protein, 96 aa, Zea mays
MSGRGKGGAKRHRKVLRDNIQGITKPAIRRLARRGGVKRISGLIYEETRGVLKIFLENVIRDAVTYTEHARRKTVTAMDVVYALKRQGRTLYGFGG

SEQ ID NO: 3070 - protein, 103 aa, Zea mays
MSGRGKCGKGLGKGGAKRHRKVLRDNIQGITKPAIRRLARRGGVKRISGLIYEETRGVLKIFLENVIRDAVTYTEHARRKTVTAMDVVYALKRQGRTLYGFGG

SEQ ID NO: 3071 - protein, 96 aa, Capsella bursa-pastoris
GKGLGKGGAKRHRKVLRDNIQGITKPAIRRLARRGGVKRISGLIYEETRGVLKIFLENVIRDAVTYTEHARRKTVTAMDVVYALKRQGRTLYGFGG

SEQ ID NO: 3072 - protein, 102 aa, Triticum aestivum
SGRDKGGKGLGKGGAKRHRKVLRDNIQGITKPAIRRLARRGGVKRISGLIYEETRGVLKIFLENVIRDAVTYTEHARRKTVTAMDVVYALKRQGRTLYGFGG

SEQ ID NO: 3073 - protein, 103 aa, Triticum aestivum
MSGRDKGGKGLGKGGAKRHRKVLRDNIQGITKPAIRRLARRGGVKRISGLIYEETRGVLKIFLENVIRDAVTYTEHARRKTVTAMDVVYALKRQGRTLYGFGG

SEQ ID NO: 3074 - protein, 103 aa, Zea mays
MSGRGNGGKGLGKGGAKRHRKVLRDNIQGITKPAIRRLARRGGVKRISGLIYEETRGVLKIFLENVIRDAVTYTEHARRKTVTAMDVVYALKRQGRTLYGFGG

SEQ ID NO: 3075 - protein, 103 aa, Arabidopsis thaliana
MSGRGKGGKGLGKGGAKRHRKVLRDNIQGITKPAIRRLARRGGVKRISGLIYEETRGVLKIFLENVIRDAVTYTEHARRKTVTAMDVVYALKRQGRTLYGFGG

SEQ ID NO: 3076 - protein, 103 aa, Hyacinthus orientalis
MSGRRKGGKGLGKGGAKRHRKVLRDNIQGITKPAIRRLARRGGVKRISGLIYEETRGVLKIFLENVIRDAVTYTEHARRKTVTAMDVVYALKRQGRTLYGFGG

SEQ ID NO: 3077 - protein, 103 aa, Malus x domestica
MTGRGKGGKGLGKGGAKRHRKVLRDNIQGITKPAIRRLARRGGVKRISGLIYEETRGVLKIFLENVIRDAVTYTEHARRKTVTAMDVVYALKRQGRTLYGFGG

SEQ ID NO: 3078 - protein, 648 aa, Oryza sativa Japonica Group
MAKGEGPAIGIDLGTTYSCVGVWQHDRVEIIANDQGNRTTPSYVAFTDSERLIGDAAKNQVAMNPINTVFDAKRLIGRRFSDPSVQSDMKLWPFKVIPGPGDKPMIVVQYKGEEKQFSAEEISSMVLIKMREIAEAYLGSNIKNAVVTVPAYFNDSQRQATKDAGVIAGLNVMRIINEPTAAAIAYGLDKKATSSGEKNVLIFDLGGGTFDVSLLTIEEGIFEVKATAGDTHLGGEDFDNRMVNHFVLEFKRKNKKDISGNPRALRRLRTACERAKRTLSSTAQTTIEIDSLYEGIDFYSTITRARFEELNMDLFRKCMEPVEKCLRDAKMDKSSVHDVVLVGGSTRIPKVQQLLQDFFNGKELCKSINPDEAVAYGAAVQAAILSGEGNEKVQDLLLLDVTPLSLGLETAGGVMTVLIPRNTTIPTKKEQVFSTYSDNQPGVLIQVYEGERARTKDNNLLGKFELSGIPPAPRGVPQITVCFDIDANGILNVSAEDKTTGQKNKITITNDKGRLSKEEIEKMVQEAEKYKAEDEEHKKKVDAKNALENYAYNMRNTIKDDKIASKLSADDKKKIEDAIDGAINWLDSNQLAEADEFEDKMKELESICNPIIAKMYQGAGADMGGAAGMDEDAPAGGSGAGPKIEEVD

SEQ ID NO: 3079 - protein, 650 aa, Arabidopsis lyrata subsp. lyrata
MAGKGEGPAIGIDLGTTYSCVGVWQHDRVEIIANDQGNRTTPSYVAFTDSERLIGDAAKNQVAMNPTNTVFDAKRLIGRRYSDPSVQADKSHWPFKVISGPGEKPMIVVNHKGEEKQFSAEEISSMVLVKMREIAEAFLGTPVKNAVVTVPAYFNDSQRQATKDAGVISGLNVMRIINEPTAAAIAYGLDKKASSVGEKNVLIFDLGGGTFDVSLLTIEEGIFEVKATAGDTHLGGEDFDNRMVNHFVQEFKRKNKKDITGNPRALRRLRTACERAKRTLSSTAQTTIEIDSLFEGIDFYTTITRARFEELNMDLFRKCMEPVEKCLRDAKMDKNSVHDVVLVGGSTRIPKVQQLLQDFFNGKELCKSINPDEAVAYGAAVQAAILSGEGNEKVQDLLLLDVTPLSLGLETAGGVMTVLIPRNTTIPTKKEQIFSTYSDNQPGVLIQVYEGERARTKDNNLLGKFELSGIPPAPRGVPQITVCFDIDANGILNVSAEDKTTGQKNKITITNDKGRLSKEEIEKMVQEAEKYKAEDEEHKKKVDAKNALENYAYNMRNTIKDEKIASKLDAADKKKIEDAIDQAIEWLDGNQLAEADEFEDKMKELESICNPIIARMYQGAGPDMGGAAGMDDDAPASGSGGAGPKIEEVD

SEQ ID NO: 3080 - protein, 438 aa, Zea mays
MAAATAFRSGTRRGDALAPVEDAGSATRERQAAGRGGGSVRRSKSLSRFPPPSPSTEDTATPSSRFVNKVRGGGSGGVFPPQVSLDDLADEFFRARAESEDDDDEETAARGRSRLPAAAERGGGGAGGRRSSTARYARQTESSRQRGRSVSRPPAERRGVAANAVDGGPAARRQRYASVDRRAAMDRQRWCDSDNDMEVPHQYVSRGMHTKSSSGNSLQSSFHKPSKANQALKRSTSQKDFFHSRDSSSSHSSITDDESRSSLSFHSRNQKAVCAVYGLDKEHGIDDGAGNVLYDVMRKEVRQAVEEIRNQLEEAMTKSEPSEKAINSDAQPTQVITQLRRSYTSKLEESEKRKQELLAQLAAEEHHGHELTKIVRELLPTPKKTANLQRQPHYRRRSNDRSRMSKRLTEEAEQYFEDFLSNVEDTDFSSYPRISTFP

SEQ ID NO: 3081 - protein, 442 aa, Sorghum bicolor
MAKPARAPRPKPPPARASARRLLGLGGLGVAAAAYVGVDYLRYLSPAWHGRLQPALWAALALAAAARAPFYRHWSAELRAALPFLGSIAFMLAAFLCEAISVRFVSAVMGLHWHGTAAPLPDTGQWLLLSLNEKLPQSVVDLLRAHIITLHHYLMLFIMLGFSVLFDCIKAPGLGIATRYMFTMAIGRVLRTITFIATILPSARPWCAAARYQIPQHPHPWAQKYYVPYASDSNAIRRVITHDMAYAAVQAYPDEYRPDWGRMSFLVDILRPTPGEGPSWYHLLKKASGGCNDLMYSGHMLVAVLTAMAWTEAYGGWISVAIWLLVLHSAQREVRERHHYSVDCVAAIYVGILLWRMTGFIWSARDLTRARRLAKLEEIQSRLVHAAKDSDIDEIRGLLKEVELAGQEKQGFSQRAILTFAAGTIIFTLSCVLIAFTMTSDG

SEQ ID NO: 3082 - protein, 442 aa, Zea mays
MAKPPRAPRPKLQTPRAPARRLLGLGGLGVAAAAYVGVDYLRHLSPAWHGRLQPALWAVLALAAAARAPFYRHWSAELRAALPFLGSIAFMLAAFLCEAISVRFVSAVMGLHWHRTAAPLPDTGQWLLLSLNEKLPQSVVDLLRAHVITLHHYLMLFIMLGFSVLFDCIKAPGLGIATRYMFTMAIGRVLRTITFIATILPSARPWCAVARYQIPRHPHPWAQKYYVPYASDSNAIRRVITQDMAYAAVQAYPDEYKPDWGRMSFLVDILRPTPGEGPSWYHLLKKASGGCNDLMYSGHMLVAVLTAMAWTEAYGGWISVAIWLLVLHSAQREVRERHHYSVDCVAAIYVGVLLWRMTGFIWSARDLARARRLAKLEEVQSRLVHAAKDSDIDEIRGLLKEVELSGQERQGFSQRAILAFAAGTIIFTLSCVLIAFTATSDG

SEQ ID NO: 3083 - protein, 449 aa, Oryza sativa Japonica Group
MARAARGKAPRPRPRPPRGLAASLRRLLAGAGGGLGVAAAAYVGVDYLRYLSPAWHGRLMPALWAALALAAAARAPFYRHWSAELRAALPFLGSIAFMLGAFLCEAVSVRFVSAVMGLQWHRSAAPLPDTGQWLLLALNEKLPQSVVDLLRAHVITLHHYLMLFIMLGFSVLFGCIKAPGLGIATRYMFTMAIGRLLRTMTFVATILPSARPWCAAARYQIPGHPHPWAQKYYVPYASDSDAIRRVIRDDVAYAAVQSYPGEYRPDWGRMSFLVDILRPTPGEGPSWYHLLKKASGGCNDLMYSGHMLVAVLTAMAWTEAYGGWISVAIWLLVLHSAQREIRERHHYTVDCVVAIYVGILLWRMTRFIWSARDASRARRLAKLDEVHNRLIHAAKDSDVDEIRGLLKEVELAGQEKQGVSQRAILAFAAATIIFTLTCVVLALTLTSDG

SEQ ID NO: 3084 - protein, 474 aa, Oryza sativa Indica Group
MARAARGKAPRPRPRPPRGLAASLRRLLAGAGGGLGVAAAAYVGVDYLRYLSPAWHGRLMPALWAALALAAAARAPFYRHWSAELRAALPFLGSIAFMLGAFLCEAVSVRFVSAVMGLQWHSSSKESMPFWNKGPSRSSLGKKAKRLSAAPLPDTGQWLLLALNEKLPQSVVDLLRAHVITLHHYLMLFIMLGFSVLFGCIKAPGLGIATRYMFTMAIGRLLRTMTFVATILPSARPWCAAARYQIPGHPHPWAQKYYVPYASDSDAIRRVIRDDVAYAAVQSYPGEYRPDWGRMSFLVDILRPTPGEGPSWYHLLKKASGGCNDLMYSGHMLVAVLTAMAWTEAYGGWISVAIWLLVLHSAQREIRERHHYTVDCVVAIYVGILLWRMTRFIWSARDASRARRLAKLDEVQNRLIHAAKDSDVDEIRGLLKEVELAGQEKQGVSQRAILAFAAATIIFTLTCVVLALTLTSDG

SEQ ID NO: 3085 - protein, 483 aa, Oryza sativa Japonica Group
MARAARGKAPRPRPRPPRGLAASLRRLLAGAGGGLGVAAAAYVGVDYLRYLSPAWHGRLMPALWAALALAAAARAPFYRHWSAELRAALPFLGSIAFMLGAFLCEAVSVRFVSAVMGLQWHSSSKESMPFWNKGPSRSSLGKKAKRLSAAPLPDTGQWLLLALNEKLPQSVVDLLRAHVITLHHYLMLFIMLGFSVLFGCIKAPGLGIATRYMFTMAIGRLLRTMTFVATILPSARPWCAAARYQIPGHPHPWAQKYYVPYASDSDAIRRVIRDDVAYAAVQSYPGEYRPDWGRMSFLVDILRPTPGEGPSWYHLLKKASGGCNDLMYSGHMLVAVLTAMAWTEAYGGWISVAIWLLVLHSAQREIRERHHYTVDCVVAIYVGILLWRMTRFIWSARDASRARRLAKLDEVHNRLIHAAKDSDVDEIRGLLKEVELAGQEKQGVSQRAILAFAAATIIFTLTCVVLALTLTSDGMHGFNRDVT

SEQ ID NO: 3086 - protein, 352 aa, Zea mays
MLAAFLCEAISVRFVSAVMGLHWHRTAAPLPDTGQWLLLSLNEKLPQSVVDLLRAHVITLHHYLMLFIMLGFSVLFDCIKAPGLGIATRYMFTMAIGRVLRTITFIATILPSARPWCAVARYQIPQHPHPWAQKYYVPYASDSNAIRRVITQDMAYAAVQAYPDEYKPDWGRMSFLVDILRPTPGEGPSWYHLLKKASGGCNDLMYSGHMLVAVLTAMAWTEAYGGWISVAIWLLVLHSAQREVRERHHYSVDCVAAIYVGVLLWRMTGFIWSARDLARARRLAKLEEVQSRLVHAAKDSDIDEIRGLLKEVELSGQERQGFSQRAILAFAAGTIIFTLSCVLIAFTATSDG

SEQ ID NO: 3087 - protein, 463 aa, Oryza sativa Indica Group
MNPMIEEPSPPTRNSRPCRSPRQRGPRRHGLTGDPPPRARARGGLGLAAAAYVGVDYARRHLPPAWWRWHGRLQPALWGALALAAAARAPFYRRWDAELRAAPRFLAAMALMLAAFLCEAISVRFVSTVLGLQWHRSTAPLPDTGQWLLLALNEKLPQIVVDLLRAPIISLHHYLMLFIMLGFSALFDCIKGPGLGIAARYMFTMAVGRSLRTVTFLATILPSARPWCAEARYQIPDHPHPWAQKYYAPYASDPDAIRRVIQEDMPYAFVKEYPGEYRPSWGHMSFLVDILRPTVEEGSSWYHFLKKASGGCSDLMYSGHMLVAVLTAMAWTEAYGGWISVVIWFLVLHSAQREIRERHHYSVDCIVAIYVGILLWRMTGFIWSAIDNSRARRLAKLDKVQNRLFQAAKDSDMDEIRGLLNEVELAGQERKGFSQRVILSFSSAMIVFTLSCVLLAFTLTSDG

SEQ ID NO: 3088 - protein, 445 aa, Sorghum bicolor
MAKPKPKRPAPPRRGWGSGGLWRPVALGGGLPLAGAAYVGVDYLRHLSPVWHGRLRPALWAALALATAARAPFYRRWDAEVRAAPRFFATIAFMLAALLCEAISVRFVSTVLGLRWHRSTAPLPDTGQWMLLALSGKLPQTVVDLLKARIITLHHYLMLFIMLAFSALFDCIKGPGLGIGSRYMFTMAVGRLLRTITFIATILPSARPWCAHSRYQIPDHPHPWAQKYYAPYASDPNMIWRVMKEDTPYATLQDYPDEYKPDWGLMSFLVDLLRPSSGEGPSWYHLLRKSSGGCNDLIYSGHMFVAVLTAMAWAEAYGGWSSVVIWFLVIHSAQREVRERHHYSVDCIVAIYIGVLLWRMTGFLWSAMETNRSRRLAKLDEVQKRLFQAAKDSDVLEIRSLLNEVELAGQENKGFSQRIIFSFAAAVIVFTVLFVLLAFTLTNDG

SEQ ID NO: 3089 - protein, 340 aa, Zea mays; identical to SEQ ID NO: 1040

SEQ ID NO: 3090 - protein, 350 aa, Zea mays
MEVEYHEEYVRSSRGVQLFTCGWLPAAASPKALVFLCHGYGMECSGFMRECGVRLAAAGYGVFGMDYEGHGKSMGARCYIRSFRRLVDDCGHFFKSVCELEEYRGKSRFLYGESMGGAVALLLHTEDPAFWDGAVLVAPMCKISEKVKPHPLVITLLTQVEDVIPRWKIVPTKQDVIDAAFKDPVKREKIRRNQLIYQDKPRLKTALEMLRTSMYIEDSLSQVTLPFFVLHGEADTVTDPEVSRALYERSASADKTIKLYPGMWHGLTAGEPDENVEAIFSDIVSWLNHRSRSWAVEERHMTRKLAPAPAKSIEGHGTVDGKVHTQQGRPRRRQGFLCGLAGRTHHHAEM

SEQ ID NO: 3091 - protein, 286 aa, Zea mays
MDYEGHGKSMGARCYIRSFRRLVDDCGHFFKSVCELEEYRGKSRFLYGESMGGAVALLLHTEDSAFWDGAVLVAPMCKISEKVKPHPLVITLLTQVEDVIPRWKIVPTKQDVIDAAFKDPVKREKIRRNQLIYQDKPRLKTALEMLRTSMYIEDSLSQVTLPFFVLHGEADTVTDPEVSRALYERSASADKTIKLYPGMWHGLTAGEPDENVEAIFSDIVSWLNHRSRSWAVEERHMTRKLAPAPAKSIEGHGTVDGKVHTQQGRPRRRQGFLCGLAGRTHHHAEM

SEQ ID NO: 3092 - protein, 349 aa, Oryza sativa Indica Group
MEVEYHEEYVRNSRGVQLFTCGWLPAKTSPKALVFLCHGYAMECSGYMRECGMRLAAAGYGVFGMDYEGHGKSMGARCYIRSFRRLVDDCHRFFKSICDMEEYRSKSRFLYGESMGGAVALLLHMKDPTFWDGAILVAPMCKISEKVKPHPVVISLLTQVEDVIPRWKIVPTKDVIDAAFKDPAKREKIRKNKLIYQDKPRLKTALEMLRTSMHVEDSLSKVKLPFFVLHGDADTVTDPEVSRALYERAASADKAIKLYAGMWHGLTAGEPDHNVDAIFSDIVAWLNGRSRTWTVEDRLMKMMASPDRFIRGERGGAADVDGDAKRGPPRRRGGCFSGLAGRTHHHSEM

SEQ ID NO: 3093 - protein, 353 aa, Sorghum bicolor
MMDVVYHEEYVRNPRGVQLFTCGWLPPASSSPPKALVFLCHGYGMECSDFMRACGIKLATAGYGVFGIDYEGHGKSMGARCYIQKFENLVADCDRFFKSICDMEEYRNKSRFLYGESMGGAVALLLHRKDPTFWDGAVLVAPMCKISEKVKPHPVVVTLLTQVEEIIPKWKIVPTKDVIDSAFKDPVKREKIRKNKLIYQDKPRLKTALELLRTSMDVEDSLSEVTMPFFILHGEADTVTDPEVSRALYERAASTDKTIKLYPGMWHGLTAGEPDENVELVFSDIVSWLDKRSRHWEQDERARTPPEPENKHRQAATTKITRVTSSSGGTESQRRGSCLCGLGGRPHQQQCRM

SEQ ID NO: 3094 - protein, 338 aa, Hordeum vulgare subsp. vulgare
MEVEYHEEYVRNPRGVQLFTCGWLPASASPKALVFLCHGYGMECSVFMRACGFKLAAAGYGVFGIDYEGHGKSMGARCYIQKFGRLVADCDRFFKSVCDMEEYRSKSRFLYGESMGGAVALLLHRKDPAFWDGAVLVAPMCKISEKVKPHPVVVTLLTQVEELIPTWKIVPTKDVIDSAFKDPLKREKIRKNKLIYQDKPRLKTALELLRTSMDVEVGLSEVRMPFFVLHGEADTVTDPEVSRALYQRAASADKTIKLYPGMWHGLTAGEPDDNVELVFADIVAWLNKRCYHRRPEHDPVRSAPAEPTRYQRPEFDGADSPVSIPRRRGRFLCGQCRM

SEQ ID NO: 3095 - protein, 338 aa, Hordeum vulgare subsp. vulgare
MEVEYHEEYVRNPRGVQLFTCGWLPASASPKALVFLCHGYGMECSVFMRACGFKLAAAGYGVFGIDYEGHGKSMGARCYIQKFGRLVADCDRFFKSVCDMEEYRSKSRFLYGESMGGAVALLLHRKDPAFWDGAVLVAPMCKISEKVKPHPVVVTLLTQVEELIPTWKIVPTKDVIDSAFKDPFKREKIRKNKLIYQDKPRLKTALELLRTSMDVEVGLSEVRMPFFVLHGEADTVTDPEVSRALYQRAASADKTIKLYPGMWHGLTAGEPDDNVELVFADIVAWLNKRCYHRRPEHDPVRSAPAEPTRYQRPEFDGADSPVSIPRRRGRFLCGQCRM

SEQ ID NO: 3096 - protein, 351 aa, Oryza sativa Japonica Group
MTKEMADDVEYHEEFVTNPRGLRLFTCGWLPASSSPKALIFLCHGYGMEVSGFMKACGVELATAGYGVFGIDYEGHGKSMGARCYIQKFEHLVDDCDRFFKSICELEEYRDKSRFLYGESMGGAVALLLHRKDPTFWDGAVLVAPMCKISEKVKPHPLVVTLLTQVEEIIPKWKIVPTKDVIDSAFKDPIKREKIRKNKLIYQDKPRLKTALELLRTSISVEQSLSQVSIPFFILHGEADKVTDPEVSRALYERAASADKTIKLYPGMWHGLTAGEPDHNVHLVFSDIVAWLDRRSHRQDRASITPPAACTDSAAAAAADSPVSPEPPRQGAAGGFLCGLTGRANPQQCRM

SEQ ID NO: 3097 - protein, 347 aa, Oryza sativa Japonica Group
MADDVEYHEEFVTNPRGLRLFTCGWLPASSSPKALIFLCHGYGMEVSGFMKACGVELATAGYGVFGIDYEGHGKSMGARCYIQKFEHLVDDCDRFFKSICELEEYRDKSRFLYGESMGGAVALLLHRKDPTFWDGAVLVAPMCKISEKVKPHPLVVTLLTQVEEIIPKWKIVPTKDVIDSAFKDPIKREKIRKNKLIYQDKPRLKTALELLRTSISVEQSLSQVSMPFFILHGEADKVTDPEVSRALYERAASADKTIKLYPGMWHGLTAGEPDHNVHLVFSDIVAWLDRRSHRQDRASITPPAACTDSAAAAAADSPVSPEPPRQGAAGGFLCGLTGRANPQQCRM

SEQ ID NO: 3098 - protein, 348 aa, Sorghum bicolor
MEVEYHEEYVRNSRGVQLFTCGWLPVATSPKALVFLCHGYGMECSGFMRECGMRLAAAGYGVFGMDYEGHGKSMGARCYIRSFRRLVDDCSHFFKSICELEEYRGKSRFLYGESMGGAVALLLHRKDPAFWDGAVLVAPMCKISEKVKPHPVVITLLTQVEDVIPKWKIVPTKQDVIDAAFKDPVKREKIRRNKLIYQDKPRLKTALEMLRTSMYIEDSLSQVKLPFFVLHGEADTVTDPEVSRALYERAASADKTIKLYPGMWHGLTAGETDENVEAVFSDIVSWLNQRCRSWTMEDRFRKLVPAPAKFIHGDDAVDGKAQTQGRPRRRRPGLLCGLAGRTHHHAEM

SEQ ID NO: 3099 - protein, 454 aa, Sorghum bicolor
MTAHSEHPPSPAEPPAPTTIRDLSDDLLREILLRLPSLPSLVRAALTCRAFLAAVRSSPAFRLRFRALHSPPLLGFFFDPDGNENPTFTPIRRGSDRDHAAAVRGLDVFLTRVPHQDDDDVFPGWQVMECRGGCLLLLNWKTKQLAAYNPLTGALDLVPKLPDEISKGHRGKFISGDFFLVVPDDEAPDRRSFRVIASCHDKSRVRIAVFSSATRKWQILPWSEPVPTQPASGKYWLLSGKQVNGFLCWSHHKNAYKVLLDTATLQFSFIDLPDGLSGQGHLYRTGDTKDGKLCIVAAIDFTLFVWFRTPDADGVDKWVLQNVLQLEEEVLEATEGSLDELEQLKVFAIRDGIVYMTTFETFRDATLPCWYLSFCLETRKLEKLFYVKADGHAHPYFMPWPTSLVAIKSLPHPDVVVHRLIFFMQKWSILLKEIEKFGNDDDREIITRLGAIKS

SEQ ID NO: 3100 - protein, 409 aa, Zea mays
MASHPEHPAEPRAPPAPTTIGDLSDDLLREILLRLPSLPSLVCASLSCRAFLAAVRSSRAFRRRFRALHPPPLLGFFFDPDGNENPTFMPIRRGSDRGHAAAVRGLDAFLTRVPHEDDVFPGWQIMECRGGCLLLLNWRTKQLAAYNPLTGALDLVPKLPDDICKGHRGKFISGDFFLVVPDDEAPDRRSFRVVSSCHDKYRVRVAVFSSATRKWQILPWSEPVPTQPASGKYWLLSGRQVSGFLCWSHHKNAYKVLLDTATLQFSVIDLPYGLSGQGHLYRTGDTKDGKLCIVAAIDFSLFVWFRTPDAGGIDRWVLRHVLQLEDEVLEATEGSRNELEQLKVFAILDGIVYMTTFETFRDATLPCWYLSFCLETRKLEKLFYVKANGHAHPYFMPWPTALVGNNLSP

SEQ ID NO: 3101 - protein, 331 aa, Zea mays; identical to SEQ ID NO: 1041

SEQ ID NO: 3102 - protein, 337 aa, Zea mays
MAKQSCCHKKKLRRGLWSPEEDEKLMNHIAKYGHGCWSSVPKLAGLDRCGKSCRLRWINYLRPDLKRGTFSQEEEDLIIHLHSLLGNKWSQIAAQLPGRTDNEVKNFWNSYIKKRLRERGIDPATHQPLAEPAAATAAAAVTTTTTVSRRSVFGDVDLIPTTATTTIHQAPPPSFEGGSMLDGVKLAVELDWPVAGDGVTSRPCYLQGGCFDMDALQQHCGSMSIPPAPVVPSASASSSTLTSMAEAEHCSTNNVAAGGNLPWLDLGANAVAGAGGHVVGSCYAGALDELRWLEYFDSAFQAAESQQGALQPGQCVYGGKDDVPVHFDVHGGLSNWC

SEQ ID NO: 3103 - protein, 330 aa, Sorghum bicolor
MAKQSCCHKKKLRRGLWSPEEDEKLMNHIAQYGHGCWSSVPKLAGLERCGKSCRLRWINYLRPDLKRGTFSQEEEDLIIHLHSLLGNKWSQIAAQLPGRTDNEVKNFWNSYIKKRLRERGIDPATHQPLAEPAAATAPASTTTVSRRAVFGDVDLIPTTTPIQAPSSFEGPMLDGVTKLPAVDMDWPVPGDGVPSSSLPRPCYLQGGCFDIGALQQQQHCGSIVPAPVVPSASSSSTLTSMAEAEHCNTNITGGSLPWLELGANAVADAGHVDSCYAGALDELRWSEYFDSAFQAAASQQGALQAAGQCVYGGKDDVPVHFDVHGLSNWC

SEQ ID NO: 3104 - protein, 728 aa, Zea mays; identical to SEQ ID NO: 1018

SEQ ID NO: 3105 - protein, 515 aa, Sorghum bicolor; identical to SEQ ID NO: 1042

SEQ ID NO: 3106 - protein, 504 aa, Zea mays
MVATKPRVAVVGAGVAGLTAAHRLCAAGGERFEVTVVEAGARAGGRVLTSEFAGHRVEMGATWVQGVDGSPVYALARDAGALACGKDLPPYERMDGFPGRVLTVAEGGEEVDADRVASPIEELYRGMMEAARAGEAGGGGGVEEYLSRGLRAFQAARPGGGKELEEVEDALLAMHINRERADTSADDLGDLDLATEGEYRDFPGEHVTIPAGYSRVVDHLVAALPPDTVRLGLRLRRLDWSETPLRLHFDDGATAISADHVILTVSLGVLKASLGKDAHAAGGIAFDPPLPQFKREAVARLGFGVVNKMFMELEAVPAARPEGDRGGGGEHPLAASAPPEFPFLHMAFRGHVSEIPWWMRGTESICPVHAGSSVALAWFAGREAEHLESLPDDEVIRGVHSTLDSFLPAPSRWRVKRIKRSGWATDQLFLGSYTYVPVGSSGEDLDRMAEPLPRRLDADVDVARAPPPRVLFAGEATHRTHYSTTHAAYLSGVREAERLLQHYA

SEQ ID NO: 3107 - protein, 503 aa, Oryza sativa Indica Group
MVAKKPRVVVVGAGISGLAAAHRLCGAGGDRFEVAVVEAGDRVGGRILTSEFAGHRVEMGATWVQGVVGSPVYALARDAGALGEEEGRGLPYERMDGFPDRVLTVAEGGEVVDADTVAGPIEELYRGMMEAARAGEAGGGGGVEEYLRRGLRAYQAARSAGGGGKELEEVDEALLAMHINRERTDTSADDLGDLDLTAEGEYRDFPGEHVTIPGGYSRVVERLAAALPPGTVRLGLRLRRLKWGGTPVRLHFADGAPPLTADHVILTVSLGVLKASLGNKDTAGVGAAAIAFDPPLPPFKREAVARLGFGVVNKLFMEVEAVAPSEPEDVAGVQPAAAGFPFLHMAFRGHVSKIPWWMRGTESICPVHAGSTVALAWFAGREAAHLESLPDDDVIRGAHATLDSFLPAAPRWRVRRIKRSGWATDPLFLGSYSYVAVGSSGDDLDRMAEPLPRGPDAAADERPPSPRLLFAGEATHRTHYSTTHAAYLSGVREANRLLQHYRG

SEQ ID NO: 3108 - protein, 512 aa, Oryza sativa Japonica Group
MVAKKPRVVVVGAGISGLAAAHRLCGAGGDRFEVAVVEAGDRVGGRILTSEFAGHRVEMGATWVQGVVGSPVYALARDAGALGEEEGRGLPYERMDGFPDRVLTVAEGGEVVDADTVAGPIEELYRGMMEAARAGEAGGGGGVEEYLRRGLRAYQAARSAGGGGGGGKELEEVDEALLAMHINRERTDTSADDLGDLDLTAEGEYRDFPGEHVTIPGGYSRVVERLAAALPPGTVRLGLRLRRLKWGGTPVRLHFADGAPPLTADHVILTVSLGVLKASLGNKDTAGVGAAAIAFDPPLPPFKREAVARLGFGVVNKLFMEVEAVAPSEPEDVAGVQPAAAGFPFLHMAFRGHVSKIPWWMRGTESICPVHAGSTVALAWFAGREAAHLESLPDDDVIRGAHATLDSFLPAAPRWRVRRIKRSGWATDPLFLGSYSYVAVGSSGDDLDRMAEPLPRGPDAAADERPPSPRLLFAGEATHRTHYSTTHAAYLSGVREANRLLQHYRGGANHTT

SEQ ID NO: 3109 - protein, 510 aa, Hordeum vulgare subsp. vulgare
MVEKKPRIVIVGAGIAGLSAAQQLCGAGREKFEVVVVEAGCRAGGRVFTSEFADHRLEMGATWVQGILGSPVYALAREAGALREEAADLPYERMDGFPDGVLTVAEGGGVVDANTVAKPIEELYRGMMEAARAGEAVGEGGGVEEYLRRGLRAYQARRPGGRKELEEVEEALLGMHINRERTDTSADDLGDLDLPAEGEYRDFPGDHVTIPGGYTRVVEHLVAALPPGTVRLGLRLRRLDWGETPVRLHFAGEATTTLTADHVILTVSLGVLKASIGKDVSATATGAIAFDPPLPQFKREAVERLGFGVVDKLFIEVEAVETPEPDGGYAQLARTAQPAFPFLHMAFLGDAAKIPWWMRGTESVCPVHAGSTVALAWFAGREAAHLESLPDDEVISALQSTLESFLPAQPRRCSWAGAGATPRWRVKRIKRSGWAADPLFLGSYSYVAVGSSGEDLDRMAEPLPRGPEADRTPLRVLFAGEATHRTHYSTTHAAYLSGVREADRLLQHYC

SEQ ID NO: 3110 - protein, 542 aa, Zea mays
MARGGDGLQVLSALDAAKTQWYHFTAIIVAGMGFFTDAYDLFCISLVTKLLGRIYYTDTSKDSPGSLPPNVAAAVNGVAFCGTLAGQLFFGWLGDKLGRKSVYGMTLMVMVICSVASGLSFGHTPTGVMATLCFFRFWLGFGIGGDYPLSATIMSEYANKRTRGAFIAAVFAMQGFGILAGGIVTLVISAAFRAAYPSPAYRDDHFTSTVPQADFVWRVILMLGAAPALLTYYWRMKMPETARYTALVAKNAKQAAADMSKVLHTEILDEQEKLDGMVAAEGANSFGLFSREFARRHGLHLVGTATTWFLLDIAFYSQNLFQKDIFTSINWIPKANTMSALEEVYRISRAQTLIALCGTVPGYWFTVALIDVVGRFAIQLLGFFMMTVFMLGLAIPYHHWTTPGNHIGFVVMYAFTFFFANFGPNSTTFIVPAEIFPARLRSTCHGISAASGKAGAIIGAFGFLYAAQNQDKSKTDAGYPAGIGVRNSLFVLAASNMLGFVLTFLVPESKGKSLEEMSGEAEDSEEEPVGARAVRPSETQMV

SEQ ID NO: 3111 - protein, 539 aa, Zea mays
MARGGDGLQVLSALDAAKTQWYHFTAIIVAGMGFFTDAYDLFCISLVTKLLGRIYYTDTSKDSPGSLPPNVAAAVNGVAFCGTLAGQLFFGWLGDKLGRKSVYGMTLMVMVICSVASGLSFGHTPTGVMATLCFFRFWLGFGIGGDYPLSATIMSEYANKRTRGAFIAAVFAMQGFGILAGGIVTLVISAAFRAAYPSPAYRDDHFTSTVPQADIVWRVIVMLGAAPALLTYYWRMKMPETARYTALVAKNAKQAAADMSKVLHTEIVDEQEKLDAAEGANSFGLFSREFARRHGLHLVGTATTWFLLDIAFYSQNLFQKDIFTSINWIPKANTMSALEEVYRISRAQTLIALCGTVPGYWFTVALIDVVGRFAIQLLGFFMMTVFMLGLAIPYHHWTTPGNHIGFVVMYAFTFFFANFGPNSTTFIVPAEIFPARLRSTCHGISAASGKAGAIIGAFGFLYAAQNQDRSKTDAGYPAGIGVRNSLFVLAASNMLGFVLTFLVPESKGKSLEEMSGEAEDSEEEPVGARAVRPSETQMV

SEQ ID NO: 3112 - protein, 539 aa, Zea mays
MARGGDGLQVLSALDAAKTQWYHFTAIIVAGMGFFTDAYDLFCISLVTKLLGRIYYTDTSKDSPGSLPPNVAAAVNGVAFCGTLAGQLFFGWLGDKLGRKSVYGMTLMVMVICSVASGLSFGHTPTGVMATLCFFRFWLGFGIGGDYPLSATIMSEYANKRTRGAFIAAVFAMQGFGILAGGIVTLVISAAFRAAYPSPAYRDDHFTSTVPQADFVWRVILMLGAAPALLTYYWRMKMPETARYTALVAKNAKQAAADMSKVLQTEIVDEQEKLDAAEGANSFGLFSREFARRHGLHLVGTATTWFLLDIAFYSQNLFQKDIFTSINWIPKANTMSALEEVYRISRAQTLIALCGTVPGYWFTVALIDVVGRFAIQLLGFFMMTVFMLGLAIPYHHWTTPGNHIGFVVMYAFTFFFANFGPNSTTFIVPAEIFPARLRSTCHGISAASGKAGAIIGAFGFLYAAQNQDRSKTDAGYPAGIGVRNSLFVLAASNMLGFVLTFLVPESRGKSLEEMSGEAEDSEEEPVGARAVRPSETQMV

SEQ ID NO: 3113 - protein, 539 aa, Zea mays
MARGGDGLQVLSALDAAKTQWYHFTAIIVAGMGFFTDAYDLFCISLVTKLLGRIYYTDTSKDSPGSLPPNVAAAVNGVAFCGTLAGQLFFGWLGDKLGRKSVYGMTLMVMVICSVASGLSFGHTPTGVMATLCFFRFWLGFGIGGDYPLSATIMSEYANKRTRGAFIAAVFAMQGFGILAGGIVTLVISAAFRAAYPSPAYRDDHFTSTVPQADIVWRVIVMLGAAPALLTYYWRMKMPETARYTALVAKNAKQAAADMSKVLHTEIVDEQEKLDAAEGANSFGLFSREFARRHGLHLVGTATTWFLLDIAFYSQNLFQKDIFTSINWIPKANTMSALEEVYRISRAQTLIALCGTVPGYWFTVALIDVVGRFAIQLLGFFMMTVFMLGLAIPYHHWTTPGNHIGFVVMYAFTFFFANFGPNSTTFIVPAEIFPARLRSTCHGISAASGKAGAIIGAFSFLYAAQNQDRSKTDAGYPAGIGVRNSLFVLAASNMLGFVLTFLVPESKGKSLEEMSGEAEDSEEEPVGARAVRPSETQMV

SEQ ID NO: 3114 - protein, 539 aa, Zea mays
MARGGDGLQVLSALDAAKTQWYHFTAIIVAGMGFFTDAYDLFCISLVTKLLGRIYYTDTSKDSPGSLPPNVAAAVNGVAFCGTLAGQLFFGWLGDKLGRKSVYGMTLMVMVICSVASGLSFGHTPTGVMATLCFFRFWLGFGIGGDYPLSATIMSEYANKRTRGAFIAAVFAMQGFGILAGGIVTLVISAAFRAAYPSPAYRDDHFTSTVPQADIVWRVIVMLGAAPALLTYYWLMKMPETARYTALVAKNAKQAAADMSKVLHTEIVDEQEKLDAAEGANSFGLFSREFARRHGLHLVGTATTWFLLDIAFYSQNLFQKDIFTSINWIPKANTMSALEEVYRISRAQTLIALCGTVPGYWFTVALIDVVGRFAIQLLGFFMMTVFMLGLAIPYHHWTTPGNHIGFVVMYAFTFFFANFGPNSTTFIVPAEIFPARLRSTCHGISAASGKAGAIIGAFGFLYAAQNQDRSKTDAGYPAGIGVRNSLFVLAASNMLGFVLTFLVPESKGKSLEEMSGEAEDSEEEPVGARAVRPSETQMV

SEQ ID NO: 3115 - protein, 541 aa, Sorghum bicolor
MARGGDGLQVLSALDAAKTQWYHFTAIIVAGMGFFTDAYDLFCISLVTKLLGRIYYTDTSKDNPGSLPPNVAAAVNGVAFCGTLAGQLFFGWLGDKLGRKSVYGMTLMLMVICSIASGLSFGHTPTGVMATLCFFRFWLGFGIGGDYPLSATIMSEYANKKTRGAFIAAVFAMQGFGILAGGIVTLIISAAFRAGYPAPAYKDDHFNSTVPQSDFVWRIILMLGALPALLTYYWRMKMPETARYTALVAKNAKQAAADMSKVLHTEIVDEQEKLDQMVTAESNTFGLFSREFARRHGLHLVGTATTWFLLDIAFYSQNLFQKDIFTAINWIPKANTMSALEEVFRISRAQTLIALCGTVPGYWFTVALIDVVGRFAIQLLGFFMMTVFMLGLAIPYHHWTTAGNHIGFVVMYGFTFFFANFGPNSTTFIVPAEIFPARLRSTCHGISAASGKAGAIIGAFGFLYAAQNQDKSKADAGYPAGIGVRNSLFVLAGCNMLGFVLTFLVPESKGKSLEEMSGEADDAEEEAVGARAVRPSETQMV

SEQ ID NO: 3116 - protein, 541 aa, Zea mays
MARGGDGLQVLSALDAAKTQWYHFTAIIVAGMGFFTDAYDLFCISLVTKLLGRIYYTDTSKDNPGSLPPNVAAAVNGVAFCGTLAGQLFFGWLGDKLGRKSVYGMTLMLMVICSVASGLSFGHTPTGVMATLCFFRFWLGFGIGGDYPLSATIMSEYANKKTRGAFIAAVFAMQGFGILAGGIVTLVISAAFRAGYPAPAYRDDHFNSTVPQADYVWRIILILGAAPAMLTYYWRMKMPETARYTALVAKNAKQAAADMSRVLQTEIVDEQEKLDEMVTAESNTFGLFSREFARRHGLHLVGTSTTWFLLDIAFYSQNLFQKDIFTSINWIPKANTMSALEEVFRISRAQTLIALCGTVPGYWFTVALIDVVGRFAIQLLGFFMMTVFMLGLAIPYHHWTTPGNHIGFVVMYAFTFFFANFGPNSTTFIVPAEIFPARLRSTCHGISAASGKAGAIIGAFGFLYAAQNQDKSKADAGYPAGIGVRNSLFVLAASNLLGFILTFLVPESKGKSLEEMSGEADDAEDDAVGTRAVRPSGTQMV

SEQ ID NO: 3117 - protein, 508 aa, Zea mays
MGFFTDAYDLFCISLVTKLLGRIYYTDTSKDSPGSLPPNVAAAVNGVAFCGTLAGQLFFGWLGDKLGRKSVYGMTLMVMVICSVASGLSFGHTPTGVMATLCFFRFWLGFGIGGDYPLSATIMSEYANKRTRGAFIAAVFAMQGFGILAGGIVTLVISAAFRAAYPSPAYRDDHFTSTVPQADFVWRVILMLGAAPALLTYYWRMKMPETARYTALVAKNAKQAAADMSKVLQTEIVDEQEKLDAAEGANSFGLFSREFARRHGLHLVGTATTWFLLDIAFYSQNLFQKDIFTSINWIPKANTMSALEEVYRISRAQTLIALCGTVPGYWFTVALIDVVGRFAIQLLGFFMMTVFMLGLAIPYHHWTTPGNHIGFVVMYAFTFFFANFGPNSTTFIVPAEIFPARLRSTCHGISAASGKAGAIIGAFGFLYAAQNQDRSKTDAGYPAGIGVRNSLFVLAASNMLGFVLTFLVPESKGKSLEEMSGEAEDSEEEPVGARAVRPSETQMV

SEQ ID NO: 3118 - protein, 538 aa, Hordeum vulgare subsp. vulgare
MARSEQQGLQVLSALDAAKTQWYHFTAIVVAGMGFFTDAYDLFCISLVTKLLGRIYYTDLSKPDPGSLPPSVAAAVNGVAFCGTLAGQLFFGWLGDKMGRKSVYGMTLLLMVICSIGSGLSFAHTPKSVMATLCFFRFWLGFGIGGDYPLSATIMSEYANKKTRGAFIAAVFAMQGFGILAGGIVTLIISSAFRAGFHEPAYQDDRVASTGTEADFVWRIILMLGALPALLTYYWRMKMPETARYTALVAKNAKLAAADMSKVLQVELEDETEKMDEMVSRGANDFGLFSPQFARRHGLHLVGTATTWFLLDIAFYSQNLFQKDIFTSINWIPKARTMSALDEVFRISRAQTLIALCGTVPGYWFTVFLIDVVGRFAIQLMGFFMMTVFMLGLAVPYHHWTTPGNQIGFVVMYGFTFFFANFGPNATTFVVPAEIFPARLRSTCHGISAAAGKAGAMIGAFGFLYAAQDPHKPDAGYRPGIGVRNSLFVLAGVNLLGFMFTFLVPEANGKSLEEMSGEAQDNENEDQARTAAVQPSMA

SEQ ID NO: 3119 - protein, 541 aa, Oryza sativa Japonica Group
MARQEQQQHLQVLSALDAAKTQWYHFTAIVVAGMGFFTDAYDLFCISLVTKLLGRIYYTDLAKENPGSLPPNVAAAVNGVAFCGTLAGQLFFGWLGDKLGRKSVYGMTLLMMVICSIASGLSFSHTPTSVMATLCFFRFWLGFGIGGDYPLSATIMSEYANKKTRGAFIAAVFAMQGFGILAGGIVTLIISSAFRAGFPAPAYQDDRAGSTVRQADYVWRIILMLGAMPALLTYYWRMKMPETARYTALVAKNAKQAAADMSKVLQVEIQEEQDKLEQMVTRNSSSFGLFSRQFARRHGLHLVGTATTWFLLDIAFYSQNLFQKDIFTSINWIPKAKTMSALEEVFRIARAQTLIALCGTVPGYWFTVFLIDIVGRFAIQLLGFFMMTVFMLGLAVPYHHWTTKGNHIGFVVMYAFTFFFANFGPNSTTFIVPAEIFPARLRSTCHGISAAAGKAGAIIGSFGFLYAAQDPHKPDAGYKPGIGVRNSLFVLAGCNLLGFICTFLVPESKGKSLEEMSGEAEDDDDEVAAAGGGAAVRPQTA

SEQ ID NO: 3120 - protein, 559 aa, Zea mays
MAAADASAETAAIARRLASCNTGTRERALRYLLSEFLPASAPRLSATDLLKLWKGIFFCFWHADKPLYQSSVATRLASAVSVPPSPADGAAFLAAYLTTLRREWAHIDVHRLDKFYLLNRRFLHHAFLLLHANSFAPDVTSQVVSVLSDKALLPEADNVAAATSRGLGYHVAEAFLDELLPVLPVSLETMDTLLAPFFTVLEKSTDRVMVSKVKAGVFERLLDSGSRLLEMVKKGEDVEKGDPEEKLGKVGLLFGFSKRFLDIGAMAETVQSNRKVVFGLRDAFVKIEKGLQLSGLEIPAPKFEATEVPVPPNVGKGKAQKKKKKTKKAALAEGEMEDDKDLKREKKIKKEKKDKKRRKVEVVDEGDVNEKSTDAPGADQQMGDGTDGITFDAALKSNLQKQFEMVAAEAGMAEGGSSSSDSPVTPVTGKVATKRKRSKSADKLSEASDGDGGSEGNLLAQDGEKSGKKVRFSMKNNLVWRPHNPLPPQCLRLPPSATPRGSALKKGVQPGPITPTPLKKAKPKAKSAKKVLKKPPSSAVKRLRKSRVSQPEFFWCMTP

SEQ ID NO: 3121 - protein, 561 aa, Zea mays
MAAAAAAAAAADVPAEAAAIARRLASCNTGTRERAVRYLLSDFLPASARRLSATDLIKLWKGLFFCFWHADKPLYQSSVATRLASAVSAPPSPTDGAAFLAAYLTTLRREWAHIDVHRLDKFYLLNRRFLHHAFLLLSANSFAPVVTSQVVSVLSDKALLPEADSAAAGTSRGLGYHVAEAFLDELLPVLPVTLETVDALLAPFFIVLAKSTDRVMVSKVKTCVFERLLESGSRLLEMVKKGEEVDKGSAEEKLGKFGLLFGFSKRFLDIGANAATVQWNRKVLFGLRDAFVKIEKALQLSGLEIPVPQFEAAELSVQPNAGDEKAQKKKKTKNVALAEGEMGDAKDLKREKKVKKDKKVKKEKKKKRKVEVVDEGNTTDKSTDAPVDDQQIGDGADGITFDETLKSNLQKQFEMAAAEAGMVKGGSSSSASPVTPVSGKVATKRKRSKSADKLSEASDGGDGSEGNLLAQDGEKSGKKVRFSMKNNLVWKPHNPLPPQCLRLPPSATPRGSALKKGVKPGPITPTPLRKAKPKAKSAKKVLKKQPSSAVKRLRKLQSFSA

SEQ ID NO: 3122 - protein, 558 aa, Oryza sativa Japonica Group
MAAAAAADASAEAAAIARRLASCNGSARERAVRHLLSTFLPASAPHLSASDLLKLWKGLFFCFWHSDKPLYQSSLATRLAAGVSSGPSPAAAAAFFAAYLATLRREWVHIDTHRLDKFYLLNRRFLHHAFLLLAANSFAADLTSQVVSILSEKVLLPEADNVAAGSPRGLGYHVAEVFLDELSPVLPVSLQTMEVLLSPFFAVLEKSSDRVMVAKVKSSVFERFLESGKQLLEMAKKGEGVEKGSADEKIGKVGLLFGFSKRFSDIGAKAETVQANRKVLFGLRDAFVKVEKGLELSGVEIAVPEFKSTEVTGVENGMDLDEVKVEKKKKKKAKKASLVEGETEGAKDSKQEKKVKKEKKEKKKKKKVEVVDEGDVTEQSTDAPAEEDQQMGDGTEAVTFDETLMSNLQKQFEKAAAEAGMVNGGSSSSALPASGKAAKKRKRAKSADRLSVSDGDDVSSEGTIISQDGEKSGKKVRFSMKNNLVWKPHNPLPPQCLRLPPSATPRGSALKKGVLPGPIKETPTPVKKTKPKAKSAKKVLKKPSSAAKRLRKLQNFSA

SEQ ID NO: 3123 - protein, 550 aa, Oryza sativa Japonica Group
ASAEAAAIARRLASCNGSARERAVRHLLSTFLPASAPHLSASDLLKLWKGLFFCFWHSDKPLYQSSLATRLAAGVSSGPSPAAAAAFFAAYLATLRREWVHIDTHRLDKFYLLNRRFLHHAFLLLAANSFAADLTSQVVSILSEKVLLPEADNVAAGSPRGLGYHVAEVFLDELSPVLPVSLQTMEVLLSPFFAVLEKSSDRVMVAKVKSSVFERFLESGKQLLEMAKKGEGVEKGSADEKIGKVGLLFGFSKRFSDIGAKAETVQANRKVLFGLRDAFVKVEKGLELSGVEIAVPEFKSTEVTGVENGMDLDEVKVEKKKKKKAKKASLVEGETEGAKDSKQEKKVKKEKKEKKKKKKVEVVDEGDVTEQSTDAPAEEDQQMGDGTEAVTFDETLMSNLQKQFEKAAAEAGMVNGGSSSSALPASGKAAKKRKRAKSADRLSVSDGDDVSSEGTIISQDGEKSGKKVRFSMKNNLVWKPHNPLPPQCLRLPPSATPRGSALKKGVLPGPIKETPTPVKKTKPKAKSAKKVLKKPSSAAKRLRKLQNFSA

SEQ ID NO: 3124 - protein, 558 aa, Oryza sativa Indica Group
MAAAAAAADASAEAAAISRRLASCNGSARERAVRHLLSTFLPASAPHLSASDLLKLWKGLFFCFWHSDKPLYQSSLATRLAAGVSSGPSPAAAAAFFAAYLATLRREWVHIDTHRLDKFYLLNRRFLHHAFLLLAANSFAADLTSQVVSILSEKVLLPEADNVAAGSPRGLGYHVAEVFLDELSPVLPVSLQTMEVLLSPFFAVLEKSSDRVMVAKVKSSVFERFLESGKQLLEMAKKGEGVEKGSADEKIGKVGLLFGFSKRFSDIGAKAETVQANRKVLFGLRDAFVKVEKGLELSGVEIAVPEFKSTEVTGVENGMDLDEVKVEKKKKKVKKASLVEGETEGAKDSKQEKKVKKEKKEKKKKKKVEVVDEGDVTKQSTDAPAEEDQQMGDGTEAVTFDETLMSNLQKQFEKAAAEAGMVNGGSSSSASPASGKAAKKRKRAKSADRLSVSDGDDVSSEGTIISQDGEKSGKKVRFSMKNNLVWKPHNPLPPQCLRLPPSATPRGSALKKGVLPGPIKETPTPVKKTKPKAKSAKKVLKKPFSAAKRLRKLQNFSA

SEQ ID NO: 3125 - protein, 557 aa, Oryza sativa Indica Group
MAAAAAADASAEAAAIARRLASCNGSARERAVRHLLSTFLPASAPHLSASDLLKLWKGLFFCFWHSDKPLYQSSLATRLAAGVSSGPSPAAAAAFFAAYLATLRREWVHIDTHRLDKFYLLNRRFLHHAFLLLAANSFAADLTSQVVSILSEKVLLPEADNVAAGSPRGLGYHVAEVFLDELSPVLPVSLQTMEVLLSPFFAVLEKSSDRVMVAKVKSSVFERFLESGKQLLEMAKKGEGVEKGSADEKIGKVGLLFGFSKRFSDIGAKAETVQANRKVLFGLRDAFVKVEKGLELSGVEIAVPEFKSTEVTGVENGMDLDEVKVEKKKKKVKKASLVEGETEGAKDSKQEKKVKKEKKEKKKKKKVEVVDEGDVTKQSTDAPAEEDQQMGDGTEAVTFDETLMSNLQKQFEKAAAEAGMVNGGSSSSASPASGKAAKKRKRAKSADRLSVSDGDDVSSEGTIISQDGEKSGKKVRFSMKNNLVWKPHNPLPPQCLRLPPSATPRGSALKKGVLPGPIKETPTPVKKTKPKAKSAKKVLKKPFSAAKRLRKLQNFSA

SEQ ID NO: 3126 - protein, 92 aa, Zea mays
MATPDNKGHGHPLPKFGEWDVKNPATSEGFTVIFQKARDDKKTTTGPGAGNARAGIPPAFRNGGGDGGYRPDFGDGNQYAPPKRKKWAFCGC

SEQ ID NO: 3127 - protein, 95 aa, Sorghum bicolor
MATPDKGQGRPLPKFGEWDVKNPATSEGFTVIFQKARDGKKTTGGPGNVRAGIPPAFRNGDGADDGGYRPDFKYGDSSQHTPPKRIKKKWAFCGC

SEQ ID NO: 3128 - protein, 92 aa, Oryza sativa Japonica Group
MTTMDKGRALPKFGEWDVKNPASAEGFTVIFQKARDDKKTTGPGNARVGIPPAFRSTDDDGGYRPEFKPAESYQQHTPPKRVKKKWAFCAGC

SEQ ID NO: 3129 - protein, 550 aa, Zea mays
MAAADASAETAAIARRLASCNTGTRERALRYLLSDFLPASAPRLSATDLLKLWKGIFFCFWHADKPLYQSSVATRLASAVSAPPSPTDGTAFLAAYLTTLRREWAHIDVHRLDKFYLLNRRFLHHAFLLLRANSFAPDVTSQVVSVLSDKALLPEADNVAAATSRGLGYHVAEAFLDELLPVLPVSLETMDTLLAPFFTVLEKSTDRVMVSKVKAGVFERLLDSGSRLLEMVKKGEEVEKGDAEEKLGKVGLLFGFSKRFLDIGAMAETVQSNRKVVFGLRDAFVKIEKGLQLSGLEIPAPKFEATEVPVPPNVGKGKAQKKKKAKKAALAEGEMEEDNDLKREKKIKKEKKEKKRRKVEVVDEGDVTEKSTNAPGADQQMGDGTDGITFDAALKSNLQKQFEMVAAEAGMAEGGSSSSDSPVTPVTGKVATKRKRSKSADKLSEASAGDGGSEGNLLAQDGEKSGKKVRFSMKNNLVWRPHNPLPPQCLRLPPSATPRGSALKKGVQPGPITPTPLKKAKPKAKSAKKVLKKPPSSAVKRLRKLQSFSA

SEQ ID NO: 3130 - protein, 556 aa, Hordeum vulgare subsp. vulgare
MAAAAASAEAAAITRRLASCNTGARERAVRYLLADFLPASAPHLSDIDLLKLWKGLFFCFWHADKPLYQADLASRLAAAVSAAATPAAAADFLAAYLATIRREWSSIDVHRLDKFYLLNRRFLHHAFLFLGARSFAPAVTAQIVSVISEKAVLPEADNATGRGLGYHVADVFLDEILPMLPVSLQSMELLLAPFFTVLEKSTDRVLVSKVRSSLFERFLVSGSQLLEMTRKGEEVEKGSVEEKLGQVGLLFGFSKRFLDIGANAETVQGNRKVVFGLRDAFLKLEKGLELSGVKISEPEFQGTQPPMVAVVENGMDLDEAKVEKKKKKKKAKKAALAEGGEEEDEVKAPKQEKKVKKDKKKEKKEKKKKKNKVEDSDGGDSSEQSIDATSEDQQMGDDTDAITFDDASMSNLQKQFEKVAAEAGMPVTPVTAIVAKKRKRSKSADRSSESSGGDVGSKGNVPAQDGDKSGKKVRFSMKSNLVWNPPTPLPPQCLRLPPSATPRGSALKSGVRPGPIKESSTQVKKAKAKAKSAKKVLKKSPSSAVKRLRKLQTFSA

SEQ ID NO: 3131 - protein, 799 aa, Sorghum bicolor
MMEADMENGRSYQERPRTFSTVRSKSSVPVAFRLLMRINPRALIILSLLVFSGVLYVGASTSPIVVFVFCICTLSLFFSLYLTKWVLAKDEGPPEMSEISDAIRDGAEGFFRTQYGTISKMAFILAFVILGIYLFRSTTPQQEASGLGRATLAYITVASFLLGALCSGLAGFVGMWVSVRANVRVSSAARRSAREALQIAVRAGGFSAIVVVCMAVFGVAILYSTFYVWLGVDSPGSMKVTDLPLLLVGYGFGASFVALFAQLGGGIYTKAADVGADLVGKVEQGIPEDDPRNPAVIADLVGDNVGDCAARGADLFESIAAEIISAMILGGTMAQRCKIEDPSGFILFPLVVHSFDLVVSSVGILSIRGTRDSGLISSIEDPMAIMQKGYSVTIVLAVLTFGVSTRWLLYTEQAPSAWLNFALCGLVGIITAYAFVWISKYYTDYKYEPVRLLALSSSTGHGTNIIAGVSLGLESTALPVLVISVAIISAYWLGQTSGLVDESGNPTGGLFGTAVATMGMLSTAGYVLTMDMFGPIADNAGGIVEMSQQPESVREITDVLDAVGNTTKATTKGFAIGSAALASFLLFSAYMDEVASFAQLPFKEVDIAVPEIFVGGLLGSMLIFLFSAWACSAVGKTAQEVVNEVRRQFIERPGIMDYKEKPDYGRCVAIVASASLREMIKPGALAIISPMAVGVVFRILGHYTAQPLLGAKVVASMLMFATVAGILMALFLNTAGGAWDNAKKYIETGALGGKGSESHKAAVTGDTVGDPFKDTAGPSLHVLIKMLATITLVMAPIFL

SEQ ID NO: 3132 - protein, 799 aa, Zea mays
MMEEDMENGRSYQERPRTFSTVRSKSSIPLALRLLMRINPRALIILSLLVFSGVLYVGASTSPIVVFVFCICTLSLFFSLYLTKWVLAKDEGPPEMSEISDAIRDGAEGFFKTQYGTISKMAFILAFVILGIYLFRTTTPQQEASGLGRATLAYITVASFLLGALCSGIAGFVGMWVSVRANVRVSSAARRSAREALQIAVRAGGFSAIVVVCMAVFGVAILYSTFYVWLGVDSPGSMKVTDLPLLLVGYGFGASFVALFAQLGGGIYTKAADVGADLVGKVEQGIPEDDPRNPAVIADLVGDNVGDCAARGADLFESIAAEIISAMILGGTMAQRCKIEDPSGFILFPLVVHSFDLVVSSVGILSIRGTRDSGLISPIEDPMAIMQKGYSVTIMLAVLTFGASTRWLLYTEQAPSAWLNFALCGLVGIVTAYAFVWISKYYTDYKHEPVRLLALSSSTGHGTNIIAGVSLGMESTALPVLVISVAIISAYWLGQTSGLVDESGNPTGGLFGTAVATMGMLSTAGYVLTMDMFGPIADNAGGIVEMSQQPESVREITDVLDAVGNTTKATTKGFAIGSAALASFLLFSAYMDEVASFAQLPFKEVDIAVPEIFVGGLLGSMLIFLFSAWACSAVGKTAQEVVKEVRRQFIERPGIMDYKEKPDYGRCVAIVASASLREMIKPGALAIISPMAVGVVFRILGHYTGQPLLGAKVVASMLMFATVAGILMALFLNTAGGAWDNAKKYIETGALGGKGSESHKAAVTGDTVGDPFKDTAGPSLHVLIKMLATITLVMAPIFL

SEQ ID NO: 3133 - protein, 799 aa, Oryza sativa Indica Group
MMEADMENGRLYPERPRTFSTVRTKSSLPPIFRVLMRINPRAFIVLLLLVFSGVLYVGASTSPIVLFVFCICTLSLFFSLYLTKWVLAKDEGPPEMSEISDAIRDGAEGFFRTQYGTISKMACILALVILGIYLFRSTTPQQEASGVGRTTSAYITVASFLLGALCSGIAGFVGMWVSVRANVRVSSAARRSAREALQIAVRAGGFSAIVVVGMAVFGVAILYATFYVWLEVDSPGSMKVTDLPLLLVGYGFGASFVALFAQLGGGIYTKAADVGADLVGKVEQGIPEDDPRNPAVIADLVGDNVGDCAARGADLFESIAAEIISAMILGGTMAQRCKIEDPSGFILFPLVVHSFDLVISSVGILSIRGTRDSGLISPIEDPMAIMQKGYSITILLAVVTFGVSTRWLLYTEQAPSAWLNFALCGLVGIITAYAFVWISKYYTDYKHEPVRLLALSSSTGHGTNIIAGVSLGLESTALPVLVISVAIISAFWLGHTSGLVDESGNPTGGLFGTAVATMGMLSTAAYVLTMDMFGPIADNAGGIVEMSQQPESVREITDILDAVGNTTKATTKGFAIGSAALASFLLFSAYMDEVAAFAQLPFKEVDIAIPEVFVGGLLGSMLIFLFSAWACSAVGRTAQEVVNEVRRQFIERPGIMDYNEKPDYGRCVAIVASASLREMIRPGALAIISPMAVGIIFRMLGHATGQPLLGAKVVAAMLMFATVAGILMALFLNTAGGAWDNAKKYIETGALGGKGSESHKAAVTGDTVGDPFKDTAGPSIHVLIKMLATITLVMAPIFL

SEQ ID NO: 3134 - protein, 799 aa, Oryza sativa Japonica Group
MMEADMENGRLYPERPRTFSTVRTKSSLPPIFRVLMRINPRAFIVLLLLVFSGVLYVGASTSPIVLFVFCICTLSLFFSLYLTKWVLAKDEGPPEMSEISDAIRDGAEGFFRTQYGTISKMACILALVILGIYLFRSTTPQQEASGVGRTTSAYITVASFLLGALCSGIAGFVGMWVSVRANVRVSSAARRSAREALQIAVRAGGFSAIVVVGMAVFGVAILYATFYVWLEVDSPGSMKVTDLPLLLVGYGFGASFVALFAQLGGGIYTKAADVGADLVGKVEQGIPEDDPRNPAVIADLVGDNVGDCAARGADLFESIAAEIISAMILGGTMAQRCKIEDPSGFILFPLVVHSFDLVISSVGILSIRGTRDSGLISPIEDPMAIMQKGYSITILLAVVTFGVSTRWLLYTEQAPSAWLNFALCGLVGIITAYAFVWISKYYTDYKHEPVRLLALSSSTGHGTNIIAGVSLGLESTALPVLVISVAIISAFWLGHTSGLVDESGNPTGGLFGTAVATMGMLSTAAYVLTMDMFGPIADNAGGIVEMSQQPESVREITDILDAVGNTTKATTKGFAIGSAALASFLLFSAYMDEVAAFAQLPFKEVDIAIPEVFVGGLLGSMLIFLFSAWACSAVGRTAQEVVNEVRRQFIERPGIMDYNEKPDYGRCVAIVASASLREMIRPGALAIISPMAVGIIFRMLGHATGRPLLGAKVVAAMLMFATVSGILMALFLNTAGGAWDNAKKYIETGALGGKGSESHKAAVTGDTVGDPFKDTAGPSIHVLIKMLATITLVMAPIFL

SEQ ID NO: 3135 - protein, 799 aa, Hordeum vulgare subsp. vulgare
MMESEMEKGRPYQEKPRTFSTVRSKSSIPLVFRVLMKINPRALIVVLLLVVCGVFYLGASTSPIIVFVFCICTLSLFFSLYLTKWVLAKDEGPPEMSEISDAIRDGAEGFFRTQYGAISKMAGILALVILFIYLFRTTTPQQEASGLGRTTSAYITVIAFLLGAVCSGLAGYVGMWVSVRANVRVSSAARRSAREALQIAVRAGGFSAIVVVGMAVFGVALLYATFYVWLGVDSPDSMKVTDLPLLLVGYGFGASFVALFAQLGGGIYTKAADVGADLVGKVEQGIPEDDPRNPAVIADLVGDNVGDCAARGADLFESIAAEIISAMILGATMAQRCKIEDPSGFILFPLVVHSFDLVVSSVGILSIRGTRDSGLISPIEDPMAIMQKGYSITILLAILTFGGSTRWLLYTEQAPTAWFNFALCGLVGIITAYAFVWISKYYTDYKHEPVRLLALSSSTGHGTNIIAGVSLGMESTALPVLVISVAIISAFWLGRTCGLVDELGNPTGGLFGTAVATMGMLSTAAYVLTMDMFGPIADNAGGIVEMSQQPESVREITDILDAVGNTTKATTKGFAIGSAALASFLLFSAYMDEVAAFAQLPFKEVDIAIPEVFVGGLLGSMLIFLFSGWACSAVGRTAQEVVTEVRRQFIERPGIMDYKEKPDYGRCVAIVASASLREMIKPGALAILSPMAVGIIFRILGHATGQPLLGAKVVASMLMFATVTGILMALFLNTSGGAWDNAKKYIETGALGGKGSEAHKAAITGDTVGDPFKDTAGPSIHVLIKMLATITLVMAPIFL

SEQ ID NO: 3136 - protein, 802 aa, Arabidopsis thaliana
MMMDEDVEQATLVSYSDKPRTFPDMRSKTYSPLIIRILRNLNVRALSVLLLLSFGGIFYMGARTSPIIVFVFVVCIISFMLSVYLTKWVLAKDEGPPEMVQISDAIRDGAEGFLRTQYGTISKMAFLLAFVILCIYLFRNLTPQQEASGLGRTMSAYITVAAFLLGALCSGIAGYVGMWVSVRANVRVSSAARRSAREALQIAVRAGGFSALVVVGMAVIGIAILYSTFYVWLDVDSPGSMKVTDLPLLLVGYGFGASFVALFAQLGGGIYTKGADVGADLVGKVEHGIPEDDPRNPAVIADLVGDNVGDCAARGADLFESIAAEIISAMILGGTMAQKCKIEDPSGFILFPLVVHSFDLVISSIGILSIKGTRNASVKSPVEDPMVVLQKGYSLTIILAVLTFGASTRWLLYTEQAPSAWLNFFMCGLVGIITAYVFVWISRYYTDYKYEPVRTLALASSTGHGTNIIAGVSLGLESTALPVLVISVAIISAFWLGNTSGLIDEKGNPTGGLFGTAVATMGMLSTAAYVLTMDMFGPIADNAGGIVEMSQQPESVREITDVLDAVGNTTKATTKGFAIGSAALASFLLFSAYMDEVSAFANVSFKEVDIAIPEVFIGGLLGAMLIFLFSAWACAAVGRTAQEVVNEVRRQFIERPGIMDYKEKPDYGRCVAIVASSALREMIKPGALAIISPIAVGFVFRILGYYTGQPLLGAKVVAAMLMFATVCGILMALFLNTAGGAWDNAKKYIETGALGGKGSDSHKAAVTGDTVGDPFKDTAGPSIHVLIKMLATITLVMAPIFL

SEQ ID NO: 3137 - protein, 851 aa, Arabidopsis thaliana
MLKTIYGRCFSRSQYRRIKIQRPSSGAELPRSTGFIPLPLVRRANSLQNMMMDEDVEQATLVSYSDKPRTFPDMRSKTYSPLIIRILRNLNVRALSVLLLLSFGGIFYMGARTSPIIVFVFVVCIISFMLSVYLTKWVLAKDEGPPEMVQISDAIRDGAEGFLRTQYGTISKMAFLLAFVILCIYLFRNLTPQQEASGLGRTMSAYITVAAFLLGALCSGIAGYVGMWVSVRANVRVSSAARRSAREALQIAVRAGGFSALVVVGMAVIGIAILYSTFYVWLDVDSPGSMKVTDLPLLLVGYGFGASFVALFAQLGGGIYTKGADVGADLVGKVEHGIPEDDPRNPAVIADLVGDNVGDCAARGADLFESIAAEIISAMILGGTMAQKCKIEDPSGFILFPLVVHSFDLVISSIGILSIKGTRNASVKSPVEDPMVVLQKGYSLTIILAVLTFGASTRWLLYTEQAPSAWLNFFMCGLVGIITAYVFVWISRYYTDYKYEPVRTLALASSTGHGTNIIAGVSLGLESTALPVLVISVAIISAFWLGNTSGLIDEKGNPTGGLFGTAVATMGMLSTAAYVLTMDMFGPIADNAGGIVEMSQQPESVREITDVLDAVGNTTKATTKGFAIGSAALASFLLFSAYMDEVSAFANVSFKEVDIAIPEVFIGGLLGAMLIFLFSAWACAAVGRTAQEVVNEVRRQFIERPGIMDYKEKPDYGRCVAIVASSALREMIKPGALAIISPIAVGFVFRILGYYTGQPLLGAKVVAAMLMFATVCGILMALFLNTAGGAWDNAKKYIETGALGGKGSDSHKAAVTGDTVGDPFKDTAGPSIHVLIKMLATITLVMAPIFL

SEQ ID NO: 3138 - protein, 800 aa, Vitis vinifera
MDDDVESGALGPYQDKPRIFPNMRSKSYTPLIFRIFMGINVRVLFVLLLLGLGAVFYVGARTSPILVFVFSVCIISFLLSVYLTKWVLAKDEGPPEMAQISDAIRDGAEGFFRTQYGTISKMAMLLALVILSIYLFRSTTPQQESSGIGRSTTAYITVAAFLLGALCSGIAGYVGMWVSVRANVRVSSAARRSAREALQIAVRAGGFSALVVVGMAVIGVAILYATFYVWLGVDSTGSMKVTDLPLLLVGYGFGASFVALFAQLGGGIYTKAADVGADLVGKVEQGIPEDDPRNPAVIADLVGDNVGDCAARGADLFESIAAEIISAMILGGTMAQRCKIEDPSGFILFPLVIHSFDLVISSVGIFSIRGTRDSGVKSPVEDPMAILQKGYSITIILAVLTFGLSTRWLLYTEQAPSAWMNFALCGLVGIMTAYVFVWITKYYTDYKHEPVRTLALSSSTGHGTNIIAGVSLGLESTALPVIVISISIVSAFWLGQTSGLVDETGNPTGGLFGTAVATMGMLSTAAYVLTMDMFGPIADNAGGIVEMSQQPESVREITDLLDAVGNTTKATTKGFAIGSAALASFLLFSAYMDEVSAFAHEPFKQVDIAIPEVFVGGLLGSMLIFLFSAWACSAVGRTAQEVVNEVRRQFIERPGIMDYKEKPDYGRCVAIVASASLREMIKPGALAIVSPIVVGFLFRILGYYTGHPLLGAKVVASMLMFATVAGILMALFLNTAGGAWDNAKKYIETGALGGKGSDAHKAAVTGDTVGDPFKDTAGPSLHVLIKMLATITLVMAPVFL

SEQ ID NO: 3139 - protein, 802 aa, Arabidopsis lyrata subsp. lyrata
MMMDEDIEQASLMSFNDRPRAFPNMRSKTYSPLIFRILRKLNVRVLSIILLFCFGAIFYVGASTSPIIVFVFAVCIISFLLSIYLTKWVLAKDEGPPEMVEISDAIRDGAEGFFRTQYSTISKMAVLLAFVILCIYLFRSLTPQQEAAGLGRAMSAYITVAAFLLGALCSGIAGYVGMWVSVRANVRVSSAARRSAREALQIAVRAGGFSALVVVGMAVIGIAILYSTFYVWLGVDSPGSMNVTDLPLLLVGYGFGASFVALFAQLGGGIYTKGADVGADLVGKVEQGIPEDDPRNPAVIADLVGDNVGDCAARGADLFESIAAEIISAMILGGTMAKKCKIEDPSGFILFPLVVHSFDLIISSIGILSIKGTRDASVKSPVEDPMAVLQKGYSLTIILAVLTFGASTRWLLYTEQAPSAWFNFALCGLVGIITAYIFVWISKYYTDYKHEPVRTLALASSTGHGTNIIAGVSLGLESTALPVLTISVAIISAYWLGNTSGLVDENGIPTGGLFGTAVATMGMLSTAAYVLTMDMFGPIADNAGGIVEMSQQPESVREITDLLDAVGNTTKATTKGFAIGSAALASFLLFSAYMDEVSAFANVSFKEVDIAIPEVFVGGLLGSMLIFLFSAWACAAVGRTAQEVVNEVRRQFIERPGIMEYKEKPDYSRCVAIVASAALREMIKPGALAIASPIVVGLVFRILGYYTGQPLLGAKVVASMLMFATVCGILMALFLNTAGGAWDNAKKYIETGALGGKGSEAHKAAVTGDTVGDPFKDTAGPSIHVLIKMLATITLVMAPVFL

SEQ ID NO: 3140 - protein, 802 aa, Arabidopsis thaliana
MMMDEDVEQASLMSFNDRPRAFPNMRSKTYSPLIFRIIRKLNVRVLSIILLFCFGAIFYMGASTSPIIVFVFTVCIISFLLSIYLTKWVLAKDEGPPEMVEISDAIRDGAEGFFRTQYSTISKMAILLAFVILCIYLFRSLTPQQEAAGLGRAMSAYITVAAFLLGALCSGIAGYVGMWVSVRANVRVSSAARRSAREALQIAVRAGGFSALVVVGMAVIGIAILYSTFYVWLGVGSPGSMNVTDLPLLLVGYGFGASFVALFAQLGGGIYTKGADVGADLVGKVEQGIPEDDPRNPAVIADLVGDNVGDCAARGADLFESIAAEIISAMILGGTMAKKCKIEDPSGFILFPLVVHSFDLIISSIGILSIKGTRDASVKSPVEDPMAVLQKGYSLTIILAVITFGASTRWLLYTEQAPSAWFNFALCGLVGIITAYIFVWISKYYTDYKHEPVRTLALASSTGHGTNIIAGVSLGLESTALPVLTISVAIISAYWLGNTSGLVDENGIPTGGLFGTAVATMGMLSTAAYVLTMDMFGPIADNAGGIVEMSQQPESVREITDLLDAVGNTTKATTKGFAIGSAALASFLLFSAYMDEVSAFANVSFKEVDIAIPEVFVGGLLGAMLIFLFSAWACAAVGRTAQEVVNEVRRQFIERPGIMEYKEKPDYSRCVAIVASAALREMIKPGALAIASPIVVGLVFRILGYYTGQPLLGAKVVASMLMFATVCGILMALFLNTAGGAWDNAKKYIETGALGGKGSEAHKAAVTGDTVGDPFKDTAGPSIHVLIKMLATITLVMAPVFL

SEQ ID NO: 3141 - protein, 397 aa, Zea mays
MGVDGRTGPGCSSLGYGAMEELGPFRVKSDGKTLYRNPYAWNNAANVLFLESPAGVGFSYSNTTADYSRSGDNKTAEDALRFLLNWMEKFPEYKGRDLYLAGESYAGHYVPQLAHAILGHAAAGKPSSSSPLNLRGIMIGNAVINDWTDTKGMYDFFWTHALISDATADAIGRHCNFSAAADADAAASNDKCNEATSEADEALQDIDIYNIYAPNCQSPGLVSPPITPSMDRFDPCSDYYVNAYLNDPDVQRALHANVTRLDHPWSACSDVLRRWTDSATTVLPILTELLNNDIRVWVYSGDTDGRVPVTSSRYSVNQLQLPVAAKWRAWFSSTQGAGEVGGYTVQYKGKEKGSLSLVTVRGAGHEVPSYQPRRALVLVQGFLAGKTLPGCKTCESA

SEQ ID NO: 3142 - protein, 444 aa, Oryza sativa Japonica Group
KEADRVAGLPGQPAGVGFAQYAGYVTVDAAAGRALFYYLAEADGGAAASSKAPLLLWLNGGPGCSSLGYGAMEELGPFRVKSDGVSLYRNPYSWNNVANVMFLESPIGVGFSYSNTTADYSRMGDNSTAEDAYKFLVNWMERFPEYKGRDFYLAGESYAGHYVPQLAHAILRHSSAAAGGKPSSSPINLKGIMIGNAVINDWTDTKGMYDFFWTHALISDEANDGITKHCNFTDGADANSLCDDATSLADDCLQDIDIYNIYAPNCQSPGLVVSPPVTPSIESFDPCTDYYVEAYLNNPDVQKALHANITRLDHPWSACSGVLRRWVDSASTVLPIIKELLKNNIRVWVYSGDTDGRVPVTSSRYSVNQLNLPVAAKWRPWFSNTQGVGDVGGYIVQYKGNLSLVTVRGAGHEVPSYQPQRALVLVQYFLEGKTLPDCEKCGEA

SEQ ID NO: 3143 - protein, 506 aa, Oryza sativa Japonica Group
MPRAALRRRRGEAAHAPGRLPRPAPRLAVVVGVAGRGSWRAGAVAIAVRWAARGASGGGGWEQRRRTAWRGCRGTAGVGFAQYAGYVTVDAAAGRALFYYLAEAERRAAASSKAPLLLWLNGGPGCSSLGYGAMEELGPFRVKSDGVSLYRNPYSWNNVANVMFLESPIGVGFSYSNTTADYSRMGDNSTAEDAYKFLVNWMERFPEYKGRDFYLAGESYAGHYVPQLAHAILRHSSAAAGGKPSSSPINLKGIMIGNAVINDWTDTKGMYDFFWTHALISDEANDGITKHCNFTDGADANSLCDDATSLADDCLQDIDIYNIYAPNCQSPGLVVSPPVTPSIESFDPCTDYYVEAYLNNPDVQKALHANITRLDHPWSACSGVLRRWVDSASTVLPIIKELLKNNIRVWVYSGDTDGRVPVTSSRYSVNQLNLPVAAKWRPWFSNTQGVGDVGGYIVQYKGNLSLVTVRGAGHEVPSYQPQRALVLVQYFLEGKTLPDCEKCGEA

SEQ ID NO: 3144 - protein, 373 aa, Oryza sativa Indica Group
MEELGPFRVKSDGVSLYRNPYSWNNVANVMFLESPIGVGFSYSNTTADYSRMGDNSTAEDAYKFLVNWMERFPEYKGRDFYLAGESYAGHYVPQLAHAILRHSSAAAAGKPSSSPINLKGIMIGNAVINDWTDTKGMYDFFWTHALISDEANDGITKHCNFTDGADANSLCDDATSLADDCLQDIDIYNIYAPNCQSPGLVVSPPVTPSIESFDPCTDYYVEAYLNNPDVQKALHANITRLDHPWSACSGVLRRWVDSASTVLPIIKELLKNNIRVWVYSGDTDGRVPVTSSRYSVNQLNLPVAAKWRPWFSNTQGAGDVGGYIVQYKGNLSLVTVRGAGHEVPSYQPQRALVLVQYFLEGKTLPDCEKCGEA

SEQ ID NO: 3145 - protein, 747 aa, Sorghum bicolor
MAPSRKSPVVAEERAGMEEGKGERCAVEEVALVVPETDDPSLPVMTFRAWTLGLGSCVVLIFLNTFFTYRTQPLTISGILAQILVLPAGRFMAAVLPNREVRLLGGRLGSFNLNPGPFNVKEHVIITIFANCGVSYGGGDAYSIGAITVMKAYYKQTLSFACALLIVLTTQILGYGWAGMLRRYLVDPAEMWWPSNLAQVSLFRALHEKEEEGGKSRGPSRMRFFLIVFFASFAYYALPGYLLPILTFFSWACWVWPHSITAQQVGSGYHGLGVGAFTLDWAGISAYHGSPLVAPWASIANTAVGFVMFIYVIVPLCYWQFNTFDARRFPIFSNQLFTASGQKYDTTKVLTKDFDLNVAAYDSYGKLYLSPLFAISIGSGFLRFTATIVHVLLFHGSDMWKQSKSAMNAVKMDVHAKLMQRYRQVPQWWFLMLLLGSVVVSLLMSFVWKEEVQLPWWGMLFAFALAFVVTLPIGVIQATTNQQPGYDIIAQFMIGYALPGKPIANLLFKIYGRISTVHALSFLADLKLGHYMKIPPRCMYTAQLIGTVVAGVVNLAVAWWMLDNIDNICDVEALHPDSPWTCPKYRVTFDASVIWGLIGPGRLFGRHGLYRNLVWLFLVGAVLPVPVWLLSRAFPEKKWIALINVPVISYGFAGMPPATPTNIATWLVTGTIFNFFVFRYRKAWWQKYNYVLSAALDAGTAFMGVLIFFALQNAHHDLKWWGTEVDHCPLASCPTAPGIAVKGCPVF

SEQ ID NO: 3146 - protein, 746 aa, Zea mays
MASRKSPVAAEERAGTGEGKGERCAVEEVALVVPETDDPSLPVMTFRAWALGLGSCVVLIFLNTFFTYRTQPLTISGILAQILVLPAGRFLAAVLPDREVRILGGRLGSFNLNPGPFNVKEHVIITIFANCGVSYGGGDAYSIGAITVMKAYYKQTLSFACALLIVLTTQILGYGWAGLLRRYLVDPAEMWWPSNLAQVSLFRALHEKEEEGGKSRGPSRMRFFLIVFFASFAYYALPGYLLPILTFFSWACWAWPHSITAQQVGSGYHGLGVGAFTLDWAGISAYHGSPLVAPWASIANTAVGFVMFIYVIVPLCYWQFNTFDARRFPIFSNQLFTASGQKYDTTKVLTKDFDLNVAAYDSYGKLYLSPLFAISIGSGFLRFTATIVHVLLFHGSDMWKQSKSAMNAVKLDVHAKLMQRYRQVPQWWFLMLLLGSVVVSLLMSFVWKEEMQLPWWGMLFAFALAFVVTLPIGVIQATTNQQPGYDIIAQFMIGYALPGKPIANLLFKIYGRISTVHALSFLADLKLGHYMKIPPRCMYTAQLVGTVVAGVVNLAVAWWMLDNIENICDVEALHPDSPWTCPKYRVTFDASVIWGLIGPGRLFGQHGLYRNLVWLFLVGAVLPVPVWLLSRAFPEKKWIALINVPVISYGFAGMPPATPTNIATWLVTGTIFNYFVFRYRKGWWQKYNYVLSAALDAGTAFMGVLIFFALQNAHHELKWWGTEVDHCPLASCPTAPGIAVKGCPVF

SEQ ID NO: 3147 - protein, 721 aa, Zea mays
VEEVALVVPETDDPSMPVMTFRAWALGLGSCVVLIFLNTFFTYRTQPLTISGILAQILVLPAGRFLAAVLPDREVRILGGRLGSFNLNPGPFNVKEHVIITIFANCGVSYGGGDAYSIGAITVMKAYYKQTLSFACALLIVLTTQILGYGWAGLLRRYLVDPAEMWWPSNLAQVSLFRALHEKEEEGGKSRGPSRMRFFLIVFFASFAYYALPGYLLPILTFFSWACWAWPHSITAQQVGSGYHGLGVGAFTLDWAGISAYHGSPLVAPWASIANTAVGFVMFIYVIVPLCYWQFNTFDARRFPIFSNQLFTASGQKYDTTKVLTKDFDLNVAAYDSYGKLYLSPLFAISIGSGFLRFTATIVHVLLFHGSDMWKQSKSAMNAVKPDVHAKLMQRYRQVPQWWFLMLLLGSVVVSLLMSFVWKEEMQLPWWGMLFAFALAFVVTLPIGVIQATTNQQPGYDIIAQFMIGYALPGKPIANLLFKIYGRISTVHALSFLADLKLGHYMKIPPRCMYTAQLVGTVVAGVVNLAVAWWMLDNIENICDVEALHPDSPWTCPKYRVTFDASVIWGLIGPGRLFGQHGLYRNLVWLFLVGAVLPVPVWLLSRAFPEKKWIALINVPVISYGFAGMPPATPTNIATWLVTGTIFNYFVFRYRKGWWQKYNYVLSAALDAGTAFMGVLIFFALQNAHHELKWWGTEVDHCPLASCPPAPGIAVKGCPVF

SEQ ID NO: 3148 - protein, 745 aa, Hordeum vulgare subsp. vulgare
MSSTTKPPAAGGKGAQGEGERYPVEEVALVVPETDDPATPVMTFRAWTLGLTSCVVLIFLNTFFTYRTQPLTISGILAQILVLPVGRFMASVLPDREVRLLGGRLGSFNLNPGPFNIKEHVIITIFANCGVSYGGGDAYSIGAITVMKAYYKQSLSFLCALLIVLSTQILGYGWAGMLRRFLVDPAEMWWPSNLAQVSLFRALHETKEGGKPSKGPSRMRFFLIFFFASFAYYALPGYLLPILTFFSWACWVWPRSITAQQVGSGYHGLGVGAFTLDWAGISAYHGSPLVAPWASIANTAVGFVMFIYVIVPLCYWRFNTFDARRFPIFSNQLFTSTGQKYDTTKVLTSDFDLNVAAYDSYGKLYLSPLFAISIGSGFLRFSATIVHVLLFHGADMWRQSRRAIGAAAKLDVHARLMQRYKQVPQWWFLVLLAGSIAVSLLMCFVWKEQVQLPWWGMLFAFALAFVVTLPIGVIQATTNQQPGYDIIAQFMIGYALPGKPIANLLFKIYGRISTVHALSFLADLKLGHYMKIPPRCMYTAQLVGTVVAGVVNLAVAWWMLDSIENICDVEALHPDSPWTCPKYRVTFDASVIWGLIGPGRLFGQHGLYRNLVWLFVVGAVLPVPVWLLSRAFPEKKWIALVNVPVISYGFAGMPPATPTNIASWLVTGTVFNFFVFRYRKGWWQKYNYVLSAALDAGTAFMGVLIFFALQNAHHDLKWWGTEVDHCPLATCPTAPGIVVKGCPVF

SEQ ID NO: 3149 - protein, 757 aa, Oryza sativa Japonica Group
MASLKSPVAAEEQAATAAAAAAKGEGERCPVEEVALVVPETDDPTTPVMTFRAWTLGLASCVVLIFLNTFFTYRTQPLTISGILAQILVLPAGQFMAAVLPSREVRLLGGRLGSFNLNPGPFNIKEHVIITIFANCGVSYGGGDAYSIGAITVMKAYYKQSLSFLCALLIVLTTQILGYGWAGMLRRYLVDPADMWWPSNLAQVSLFRALHEKEGGDGGKGSSSRGPTRMRFFLIFFFASFAYYALPGYLLPILTFFSWACWAWPHSITAQQVGSGYHGLGVGAFTLDWAGISAYHGSPLVAPWSSIANTAAGFVMFIYLIVPLCYWKFDTFDARKFPIFSNQLFTASGQKYDTTKVLTREFDLNVAAYESYGKLYLSPLFAISIGSGFLRFTATIVHVALFHGGDIWRQSRSAMSSAAAKMDVHAKLMRRYKQVPQWWFLVLLVGSVAVSLVMSFVYREEVQLPWWGMLFAFALAFVVTLPIGVIQATTNQQPGYDIIAQFMIGYALPGKPIANLLFKIYGRISTVHALSFLADLKLGHYMKIPPRCMYTAQLVGTVVAGVVNLAVAWWMLGSIDNICDVEALHPDSPWTCPKYRVTFDASVIWGLIGPARLFGRHGLYRNLVWLFLAGAVLPVPVWLLSRAFPEKKWIALINVPVISYGFAGMPPATPTNIASWLVTGTIFNYFVFKYRKGWWQKYNYVLSAALDAGTAFMGVLIFFALQNAHHELKWWGTAVDHCPLASCPTAPGIAVKGCPVF

SEQ ID NO: 3150 - protein, 748 aa, Musa acuminata
MTSNKSSVPQESAPEVAAAAGEEEGEEKEYRPVEEVALVVPETDDPSLPVMTFRAWFIGLASCIILIFLNTFFTYRTQPLTISAILAQITALPVGRFMASVLPNREIRVFRNWGFNLNPGPFNIKEHVIITIFANCGVSIGGGDAYSIGAITVMKAYYKQSLSFLCGLIIVLTTQILGYGWAGMLRRYLVDPAEMWWPSNLAQVSLFRALHEKDSRSKGLTRMQFFVLFFVASFAYYTLPGYLLPILTFFSWICWSWPRSITAQQIGSAYHGLGVGAFTLDWAGISAYHGSPLVTPWFSILNTAVGFIMFIYIIVPLCYWKFNTFDARKFPIFSNQLFTTRGQKYDTTKILTPNYDLNVAAYESYGKLYLSPLFALSIGSGFARFSATIVHVLLFHGSDIWRQSKSAMNSAKVDIHAKLMKKYKQVPHWWFLILLAASVILSLMMSFVWKEEVQLPWWGMIFAFGLACLVTLPIGVIQATTNQQPGYDIIAQFIIGYVLPGKPIANLLFKIYGRISTIHALSFLADLKLGHYMKIPPRCMYTAQLVGTVVSGVVNLAVAWWMLGSIENICDVDALHPESPWTCPKYRVTFDASVIWGLVGPGRLFGHGGLYRNLVWLFLVGAALPVPVWALSKIFPEKKWIPLINIPVISYGFAGMPPATPTNIASWLITGTIFNYFVFRYRKGWWQKYNYVLSAALDAGTAFMGVLLFFALQNANHNLRWWGTELDHCPLASCPTEPGISVKGCPVF

SEQ ID NO: 3151 - protein, 726 aa, Oryza sativa Japonica Group
MASLKSPVAAEEQAATAAAAAAKGEGERCPVEEVALVVPETDDPTTPVMTFRAWTLGLASCVVLIFLNTFFTYRTQPLTISGILAQILVLPAGQFMAAVLPSREVRLLGGRLGSFNLNPGPFNIKEHVIITIFANCGVSYGGGDAYSIGAITVMKAYYKQSLSFLCALLIVLTTQILGYGWAGMLRRYLVDPADMWWPSNLAQVSLFRALHEKEGGDGGKGSSSRGPTRMRFFLIFFFASFAYYALPGYLLPILTFFSWACWAWPHSITAQQVGSGYHGLGVGAFTLDWAGISAYHGSPLVAPWSSIANTAAGFVMFIYLIVPLCYWKFDTFDARKFPIFSNQLFTASGQKYDTTKVLTREFDLNVAAYESYGKLYLSPLFAISIGSGFLRFTATIVHVALFHGGDIWRQSRSAMSSAAAKMDVHAKLMRRYKQVPQWWFLVLLVGSVAVSLVMSFVYREEQPGYDIIAQFMIGYALPGKPIANLLFKIYGRISTVHALSFLADLKLGHYMKIPPRCMYTAQLVGTVVAGVVNLAVAWWMLGSIDNICDVEALHPDSPWTCPKYRVTFDASVIWGLIGPARLFGRHGLYRNLVWLFLAGAVLPVPVWLLSRAFPEKKWIALINVPVISYGFAGMPPATPTNIASWLVTGTIFNYFVFKYRKGWWQKYNYVLSAALDAGTAFMGVLIFFALQNAHHELKWWGTAVDHCPLASCPTAPGIAVKGCPVF

SEQ ID NO: 3152 - protein, 737 aa, Arabidopsis thaliana
MDAEKATDKTNVHLSSDHERCPVEEVALVVPETDDPSLPVMTFRAWFLGLTSCVLLIFLNTFFTYRTQPLTISAILMQIAVLPIGKFMARTLPTTSHNLLGWSFSLNPGPFNIKEHVIITIFANCGVAYGGGDAYSIGAITVMKAYYKQSLSFICGLFIVLTTQILGYGWAGILRRYLVDPVDMWWPSNLAQVSLFRALHEKENKSKGLTRMKFFLVALGASFIYYALPGYLFPILTFFSWVCWAWPNSITAQQVGSGYHGLGVGAFTLDWAGISAYHGSPLVAPWSSILNVGVGFIMFIYIIVPVCYWKFNTFDARKFPIFSNQLFTTSGQKYDTTKILTPQFDLDIGAYNNYGKLYLSPLFALSIGSGFARFTATLTHVALFNGRDIWKQTWSAVNTTKLDIHGKLMQSYKKVPEWWFYILLAGSVAMSLLMSFVWKESVQLPWWGMLFAFALAFIVTLPIGVIQATTNQQPGYDIIGQFIIGYILPGKPIANLIFKIYGRISTVHALSFLADLKLGHYMKIPPRCMYTAQLVGTVVAGVVNLGVAWWMLESIQDICDIEGDHPNSPWTCPKYRVTFDASVIWGLIGPRRLFGPGGMYRNLVWLFLIGAVLPVPVWALSKIFPNKKWIPLINIPVISYGFAGMPPATPTNIASWLVTGTIFNYFVFNYHKRWWQKYNYVLSAALDAGTAFMGVLLFFALQNAGHDLKWWGTEVDHCPLASCPTAPGIKAKGCPVF

SEQ ID NO: 3153 - protein, 737 aa, Arabidopsis thaliana
MDAEKATDKTNVHLSSDHERCPVEEVALVVPETDDPSLPVMTFRTWFLGLTSCVLLIFLNTFFTYRTQPLTISAILMQIAVLPIGKFMARTLPTTSHNLLGWSFSLNPGPFNIKEHVIITIFANCGVAYGGGDAYSIGAITVMKAYYKQSLSFICGLFIVLTTQILGYGWAGILRRYLVDPVDMWWPSNLAQVSLFRALHEKENKSKGLTRMKFFLVALGASFIYYALPGYLFPILTFFSWVCWAWPNSITAQQVGSGYHGLGVGAFTLDWAGISAYHGSPLVAPWSSILNVGVGFIMFIYIIVPVCYWKFNTFDARKFPIFSNQLFTTSGQKYDTTKILTPQFDLDIGAYNNYGKLYLSPLFALSIGSGFARFTATLTHVALFNGRDIWKQTWSAVNTTKLDIHGKLMQSYKKVPEWWFYILLAGSVAMSLLMSFVWKESVQLPWWGMLFAFALAFIVTLPIGVIQATTNQQPGYDIIGQFIIGYILPGKPIANLIFKIYGRISTVHALSFLADLKLGHYMKIPPRCMYTAQLVGTVVAGVVNLGVAWWMLESIQDICDIEGDHPNSPWTCPKYRVTFDASVIWGLIGPRRLFGPGGMYRNLVWLFLIGAVLPVPVWALSKIFPNKKWIPLINIPVISYGFAGMPPATPTNIASWLVTGTIFNYFVFNYHKRWWQKYNYVLSAALDAGTAFMGVLLFFALQNAGHDLKWWGTEVDHCPLASCPTAPGIKAKGCPVF

SEQ ID NO: 3154 - protein, 737 aa, Arabidopsis lyrata subsp. lyrata
MDAEKASDRNNVHLSSDHERCPVEEVALVVPETDDPSIPVMTFRAWFLGLTSCVLLIFLNTFFTYRTQPLTISAILMQIAVLPIGKFMARTLPTTSHNLLGWNFSLNPGPFNIKEHVIITIFANCGVSYGGGDAYSIGAITVMKAYYKQSLSFICGLFIVLTTQILGYGWAGILRRYLVDPVDMWWPSNLAQVSLFRALHEKENKSKGLTRMQFFLVALGASFLYYALPGYLFPILTFFSWVCWAWPNSITAQQVGSGYHGLGVGAFTLDWAGISAYHGSPLVAPWSSILNVGVGFIMFIYIVVPVCYWKFNTFDARKFPIFSNQLFTTSGQKYDTTKILTPQFDLDIGAYNSYGKLYLSPLFALSIGSGFARFTATLTHVALFNGRDIWRQTWSAVNTTKLDIHGKLMQSYKKVPEWWFYVLLAGSVAMSLLMSFVWKESVQLPWWGMLFAFALAFIVTLPIGVIQATTNQQPGYDIIGQFIIGYILPGKPIANLIFKIYGRISTVHALSFLADLKLGHYMKIPPRCMYTAQLVGTVVAGVVNLGVAWWMLESIQDICDIEGDHPNSPWTCPKYRVTFDASVIWGLIGPRRLFGPGGMYRNLVWLFLIGAVLPVPVWALSKIFPNKKWIPLINIPVISYGFAGMPPATPTNIASWLVTGTIFNYFVFNYHKRWWQKYNYVLSAALDAGTAFMGVLLFFALQNAGHDLKWWGTEVDHCPLASCPTAPGIKAKGCPVF

SEQ ID NO: 3155 - protein, 348 aa, Zea mays
MKCLELERDADSLSVRARACVGGVRPDADFGVAGLGGARPEHGGGVVRHTDLPLARHGHQPHGAAGRPRHDARRGVAQRERVPALHQRRDVARHRAADDLLALARGGHRAQRVGVRSGAHQRRVADPAGHLVHQPARGRRRREVARRVHGHAPYRARLAVVVHHGLGLLALACCWLGVVDLHPVGLFGLPQTLDIVVRDKVAWILSLHPLFPGEGLGAIEGEVDVRRLLHDESGEGDGVGDGGESGDRAAVQGGSLHDAGLHLDGAGGGEHGAPAGVEVRAVLQLPHDELDNVERGAALPERGGADVEAAAECGEARLPALGRQRARHVPGAAVQSQRPPHGSAAGER

SEQ ID NO: 3156 - protein, 524 aa, Zea mays
MKPTTSSTLLLAAAVLCLALPLLPGATAKAARARQGDYLARLRGSSPWPAESASLAVAATDRASRHAASPGVGRKEDDRVDRLPGQPSGVDFEQYAGYVTVDAAAGRALFYYLAEAVGGGSASAAKPLLLWLNGGPGCSSLGYGAMEELGPFRVKSDGKTLYRNPYAWNNAANVLFLESPAGVGFSYSNTTADYSRSGDNKTAEDALRFLLNWMEKFPEYKGRDLYLAGESYAGHYVPQLAHAILGHAAAGKPSSSSPLNLRGIMIGNAVINDWTDTKGMYDFFWTHALISDATADAIGRHCNFSAAADADAAASNDKCNEATSEADEALQDIDIYNIYAPNCQSPGLVSPPITPSMDRFDPCSDYYVNAYLNDPDVQRALHANVTRLDHPWSACSDVLRRWTDSATTVLPILTELLNNDIRVWVYSGDTDGRVPVTSSRYSVNQLQLPVAAKWRAWFSSTQGAGEVGGYTVQYKGKEKGSLSLVTVRGAGHEVPSYQPRRALVLVQGFLAGKTLPGCKTCESA

SEQ ID NO: 3157 - protein, 524 aa, Zea mays
MKPTTSSTLLLAAAVLCLALPLLPGATAKAARARQGDYLARLRGSSPWPAESASLAVAATDRASRHAASPGVGRKEDDRVDRLPGQPSGVDFEQYAGYVTVDAAAGRALFYYLAEAVGGGSASAAKPLLLWLNGGPGCSSLGYGAMEELGPFRVKSDGKTLYRNPYAWNNAANVLFLESPAGVGFSYSNTTEDYSRSGDNKTAEDALRFLLNWMEKFPEYKGRDLYLAGESYAGHYVPQLAHAILGHAAAGKPSSSSPLNLRGIMIGNAVINDWTDTKGMYDFFWTHALISDATADAIGRHCNFSAAADADAAASNDKCNEATSEADEALQDIDIYNIYAPNCQSPGLVSPPITPSMDRFDPCSDYYVNAYLNDPDVQRALHANVTRLDHPWSACSDVLRRWTDSATTVLPILTELLNNDIRVWVYSGDTDGRVPVTSSRYSVNQLQLPVAAKWRAWFSSTQGAGEVGGYVVQYKGKEKGSLSLVTVRGAGHEVPSYQPRRALVLVQGFLAGKTLPGCKTCESA

SEQ ID NO: 3158 - protein, 526 aa, Sorghum bicolor
MRTTTTTNTALPLLAMLCLALPLLPGATAKAARARQGDYLARLRGSPRQSPWPAESASLAVASATDRAARHAASPPVGRKEDDRVDKLPGQPSGVDFEQYSGYVTVDAAAGRALFYYLAEAVGGGSAAKPLLLWLNGGPGCSSLGYGAMEELGPFRVKSDGKTLYRNPYAWNNAANVLFLESPAGVGFSYSNTTADYGRFGDNKTAEDALQFLLNWMDKFPEYKGRDFYLAGESYAGHYVPQLAHAILRHAAATAGGGKPSSSSPINLKGIMIGNAVINDWTDSKGMYDFFWTHALISDTTADAIGRYCNFSAAAAGSDKCDEATSEADEALEDIDIYNIYAPNCQSDDLVSPPITPSMDNFDPCSDYYVNAYLNDPAVQSALHANVTRLDHPWSACSDVLRRWTDSATTVLPILTELLKNDVRVWVYSGDTDGRVPVTSSRYSVNQLQLPVAAKWRAWFSSTQGAGEVGGYVVQYKGKEKGSLSLVTVRGAGHEVPSYQPKRALVLVQNFLAGKTLPDCKTCESA

SEQ ID NO: 3159 - protein, 524 aa, Zea mays
MTRTTTSSTLLTAALLCLALPLLPGATANKAARRRQGDNLARLRGSPWPAESSVSLAVAATDDRASRHAASPPAGRSKEDDRVDKLPGQPSGVDFEQYAGYVTVDAAAGRALFYYLTEAVGGGAAAKPLLLWLNGGPGCSSLGYGAMEELGPFRVKSDGKTLYRNPYAWNNAANVLFLESPAGVGFSYSNRTEDYSRSGDNKTAEDALLFLLNWMEKFPEYKGRDLYLAGESYAGHYVPQLAHAILRHAAAAAGKPSSPINLRGIMIGNAVINDWTDTKGMYDFFWTHALISDATADAIGRHCNFSAAAAAAAGSNDKCDEATSEADEALEDIDIYNIYAPNCQSADLVSPPITPSMDNFDPCSDYYVDAYLNDPDVQRALHANVTRLDHPWSACSDVLRRWTDSAATVLPILAELLKNDLRVWVYSGDTDGRVPVTSSRYSVNQLQLPVAAKWRAWFSSTQGAGEVGGYVVQYKGKEKGSLSLVTVRGAGHEVPSYQPKRALVLVQGFLAGKALPDCETCESG

(The sequence listing continues in the following parts.)

1. A method of improving abiotic stress tolerance, nitrogen use efficiency, biomass, vigor or yield of a plant, the method comprising expressing within the plant an exogenous polynucleotide having a nucleic acid sequence at least 90% identical to SEQ ID NOs: 103, 101-102, 104-216, 223-227, 264-416, wherein said nucleic acid sequence is capable of regulating abiotic stress tolerance of the plant, thereby improving abiotic stress tolerance, nitrogen use efficiency, biomass, vigor or yield of the plant.

2. A transgenic plant exogenously expressing a polynucleotide having a nucleic acid sequence at least 90% identical to SEQ ID NOs: 1-216, 223-227, 264-416, 615-626 or 639, wherein said nucleic acid sequence is capable of regulating abiotic stress tolerance of the plant.

3. The transgenic plant of claim 2, wherein said polynucleotide has a nucleic acid sequence selected from the group consisting of SEQ ID NOs: 1-216, 223-227, 264-416, 615-626 or 639.

4. The method of claim 1, wherein said exogenous polynucleotide encodes a precursor of said nucleic acid sequence.

5. The method of claim 1, wherein said precursor is at least 60% identical to SEQ ID NO: 217-222, 417-421 or 458-614.

6. The method of claim 1, wherein said exogenous polynucleotide encodes a miRNA or a precursor thereof.

7. The method of claim 1, wherein said exogenous polynucleotide encodes a siRNA.

8. The method of claim 1, wherein said exogenous polynucleotide is selected from the group consisting of SEQ ID NO: 103, 101-102, 104-216, 217-222, 223-227, 264-416, 417-421 or 458-614.

9. An isolated polynucleotide having a nucleic acid sequence at least 90% identical to SEQ ID NO: 16-113, 117-216, wherein said nucleic acid sequence is capable of regulating abiotic stress tolerance of a plant.

10. The isolated polynucleotide of claim 9, wherein said nucleic acid sequence is as set forth in SEQ ID NO: 16-113, 117-216.

11. The isolated polynucleotide of claim 9, wherein said polynucleotide encodes a precursor of said nucleic acid sequence.

12. The isolated polynucleotide of claim 9, wherein said polynucleotide encodes a miRNA or a precursor thereof.

13. The isolated polynucleotide of claim 9, wherein said polynucleotide encodes a siRNA.

14. A nucleic acid construct comprising the isolated polynucleotide of claim 9 under the regulation of a cis-acting regulatory element.

15. The nucleic acid construct of claim 14, wherein said cis-acting regulatory element comprises a promoter.

16. The nucleic acid construct of claim 15, wherein said promoter comprises a tissue-specific promoter.

17. The nucleic acid construct of claim 16, wherein said tissue-specific promoter comprises a root specific promoter.

18. A method of improving abiotic stress tolerance, nitrogen use efficiency, biomass, vigor or yield of a plant, the method comprising expressing within the plant an exogenous polynucleotide which downregulates an activity or expression of a gene encoding an RNAi molecule having a nucleic acid sequence at least 90% identical to a nucleic acid sequence selected from the group consisting of SEQ ID NOs: 1-100, 615-626 and 639, thereby improving abiotic stress tolerance, nitrogen use efficiency, biomass, vigor or yield of a plant.

19. A transgenic plant exogenously expressing a polynucleotide which downregulates an activity or expression of a gene encoding an RNAi molecule having a nucleic acid sequence at least 90% identical to a nucleic acid sequence selected from the group consisting of SEQ ID NOs: 1-100, 615-626 and 639.

20. An isolated polynucleotide which downregulates an activity or expression of a gene encoding an RNAi molecule having a nucleic acid sequence selected from the group consisting of SEQ ID NOs: 1-100, 615-626 and 639, 627-638 and 640.

21. The method of claim 18, wherein said polynucleotide encodes a miRNA-Resistant Target as set forth in Tables 14-16.

22. The method of claim 21, wherein said polynucleotide encoding miRNA-Resistant Target is as set forth in SEQ ID NO: 877-886, 893-913, 1226-1535.

23. The method of claim 18, wherein said isolated polynucleotide encodes a target mimic as set forth in Tables 17-19.

24. The method of claim 21, wherein said polynucleotide encoding said target mimic is as set forth in SEQ ID NO:1741-1815.

25. A nucleic acid construct comprising the isolated polynucleotide of claim 20 under the regulation of a cis-acting regulatory element.

26. The nucleic acid construct of claim 25, wherein said cis-acting regulatory element comprises a promoter.

27. The nucleic acid construct of claim 26, wherein said promoter comprises a tissue-specific promoter.

28. The nucleic acid construct of claim 27, wherein said tissue-specific promoter comprises a root specific promoter.

29. The method of claim 1, further comprising growing the plant under abiotic stress.

30. The method of claim 29, wherein said abiotic stress is selected from the group consisting of salinity, drought, water deprivation, flood, etiolation, low temperature, high temperature, heavy metal toxicity, anaerobiosis, nutrient deficiency, nutrient excess, low nitrogen, atmospheric pollution and UV irradiation.

31. The method of claim 1, wherein the plant is a monocotyledon.

32. The method of claim 1, wherein the plant is a dicotyledon.

33. A method of improving abiotic stress tolerance, nitrogen use efficiency, biomass, vigor or yield of a plant, the method comprising expressing within the plant an exogenous polynucleotide encoding a polypeptide having an amino acid sequence at least 80% homologous to SEQ ID NOs: 1861-1869, 1892-1915, 1921-1924, 1931-1939, 1952-1963, 2010-2014, 2327-2355, 2763-3040, 3044-3163, 3175-3269, 3313-3323, 3458-3944 or 3950-3969, wherein said polypeptide is capable of regulating abiotic stress tolerance of the plant, thereby improving abiotic stress tolerance, nitrogen use efficiency, biomass, vigor or yield of the plant.

34. A transgenic plant exogenously expressing a polynucleotide encoding a polypeptide having an amino acid sequence at least 80% homologous to SEQ ID NOs: 1816-2014, 2183-2355, 2500-3969, wherein said polypeptide is capable of regulating nitrogen use efficiency of the plant.

35. A nucleic acid construct comprising a polynucleotide encoding a polypeptide having an amino acid sequence at least 80% homologous to SEQ ID NOs: 1816-2014, 2183-2355, 2500-3969, wherein said polypeptide is capable of regulating abiotic stress tolerance of a plant, and wherein said polynucleotide is under a transcriptional control of a cis-acting regulatory element.

36. The method of claim 33, wherein said polynucleotide is selected from the group consisting of SEQ ID NO: 2053-2061, 2080-2101, 2106-2109, 2111-2116, 2126-2136, 2178-2182, 2478-2499, 4185-4418, 4422-4527, 4539-4624, 4661-4670, 4787-5213 and 5219-5238.

37. The method of claim 33, wherein said polypeptide is selected from the group consisting of SEQ ID NO: 1861-1869, 1892-1915, 1921-1924, 1931-1939, 1952-1963, 2010-2014, 2327-2355, 2763-3040, 3044-3163, 3175-3269, 3313-3323, 3458-3944 and 3950-3969.

38. The nucleic acid construct of claim 35, wherein said cis-acting regulatory element comprises a promoter.

39. The nucleic acid construct of claim 38, wherein said promoter comprises a tissue-specific promoter.

40. The nucleic acid construct of claim 39, wherein said tissue-specific promoter comprises a root specific promoter.

41. The method of claim 33, further comprising growing the plant under water deprivation conditions.

42. The method of claim 33, further comprising growing the plant under salinity stress.

43. The method of claim 33, further comprising growing the plant under high temperature stress.

44. The method of claim 33, further comprising growing the plant under abiotic stress.

45. The method of claim 44, wherein said abiotic stress is selected from the group consisting of salinity, drought, water deprivation, flood, etiolation, low temperature, high temperature, heavy metal toxicity, anaerobiosis, nutrient deficiency, nutrient excess, atmospheric pollution and UV irradiation.

46. The method of claim 33, wherein the plant is a monocotyledon.

47. The method of claim 33, wherein the plant is a dicotyledon.

48. A method of improving abiotic stress tolerance, nitrogen use efficiency, biomass, vigor or yield of a plant, the method comprising expressing within the plant an exogenous polynucleotide which downregulates an activity or expression of a polypeptide having an amino acid sequence at least 80% homologous to SEQ ID NOs: 1816-1860, 1870-1891, 1916-1920, 1925-1930, 1940-1951, 1964-2009, 2183-2326, 2500-2762, 3041-3043, 3164-3174, 3270-3312, 3324-3457, 3945-3949, wherein said polypeptide is capable of regulating abiotic stress tolerance of the plant, thereby improving abiotic stress tolerance, nitrogen use efficiency, biomass, vigor or yield of the plant.

49. A transgenic plant exogenously expressing a polynucleotide which downregulates an activity or expression of a polypeptide having an amino acid sequence at least 80% homologous to SEQ ID NOs: 1816-1860, 1870-1891, 1916-1920, 1925-1930, 1940-1951, 1964-2009, 2183-2326, 2500-2762, 3041-3043, 3164-3174, 3270-3312, 3324-3457, 3945-3979, wherein said polypeptide is capable of regulating abiotic stress tolerance of the plant.

50. A nucleic acid construct comprising a polynucleotide which downregulates an activity or expression of a polypeptide having an amino acid sequence at least 80% homologous to SEQ ID NOs: 1816-1860, 1870-1891, 1916-1920, 1925-1930, 1940-1951, 1964-2009, 2183-2326, 2500-2762, 3041-3043, 3164-3174, 3270-3312, 3324-3457, 3945-3949, wherein said polypeptide is capable of regulating abiotic stress tolerance of a plant, said nucleic acid sequence being under the regulation of a cis-acting regulatory element.

51. The method of claim 48, wherein said polynucleotide acts by a mechanism selected from the group consisting of sense suppression, antisense suppression, ribozyme inhibition, gene disruption.

52. The nucleic acid construct of claim 50, wherein said cis-acting regulatory element comprises a promoter.

53. The nucleic acid construct of claim 52, wherein said promoter comprises a tissue-specific promoter.

54. The nucleic acid construct of claim 53, wherein said tissue-specific promoter comprises a root specific promoter.

55. The method of claim 48, further comprising growing the plant under water deprivation conditions.

56. The method of claim 48, further comprising growing the plant under salinity stress.

57. The method of claim 48, further comprising growing the plant under high temperature stress.

58. The method of claim 48, further comprising growing the plant under abiotic stress.

59. The method of claim 58, wherein said abiotic stress is selected from the group consisting of salinity, drought, water deprivation, flood, etiolation, low temperature, high temperature, heavy metal toxicity, anaerobiosis, nutrient deficiency, nutrient excess, atmospheric pollution and UV irradiation.
